United States Patent Application Publication US 2011/0183924 A1 - sequence listing, part 69

SEQ ID NO: 243916 - DNA, 2919 bp, Homo sapiens
tgctgcgtctatctagaggatcccggtttcgcatgttcccggggcgctggcgtttccgttgcttggatcagtctaggtgcagctgccggatccttcagcgtctgcatctcggcgtcgccccgcgtaccgtcgcccggctctccgccgctctcccggggtttcggggcacttgggtcccacagtctggtcctgcttcaccttcccctgacctgagtagtcgccatggcacaggttctcagaggcactgtgactgacttccctggatttgatgagcgggctgatgcagaaactcttcggaaggctatgaaaggcttgggcacagatgaggagagcatcctgactctgttgacatcccgaagtaatgctcagcgccaggaaatctctgcagcttttaagactctgtttggcagggatcttctggatgacctgaaatcagaactaactggaaaatttgaaaaattaattgtggctctgatgaaaccctctcggctttatgatgcttatgaactgaaacatgccttgaagggagctggaacaaatgaaaaagtactgacagaaattattgcttcaaggacacctgaagaactgagagccatcaaacaagtttatgaagaagaatatggctcaagcctggaagatgacgtggtgggggacacttcagggtactaccagcggatgttggtggttctccttcaggctaacagagaccctgatgctggaattgatgaagctcaagttgaacaagatgctcaggctttatttcaggctggagaacttaaatgggggacagatgaagaaaagtttatcaccatctttggaacacgaagtgtgtctcatttgagaaaggtgtttgacaagtacatgactatatcaggatttcaaattgaggaaaccattgaccgcgagacttctggcaatttagagcaactactccttgctgttgtgaaatctattcgaagtatacctgcctaccttgcagagaccctctattatgctatgaagggagctgggacagatgatcataccctcatcagagtcatggtttccaggagtgagattgatctgtttaacatcaggaaggagtttaggaagaattttgccacctctctttattccatgattaaggtagtagaacctttctttaaattacgtttgggaatccaaagcagactggtatgttgcatgaaagacaaggataagagaacctgattcttgtgttaagtttaaaattttagtgacacgattagagcaatgagttaaaaagcttagcataatgtttcctgaagtagagatgatggctcccaagtgaaagcatgggtattgatgtggctgaggctcttggtgaactcagaagcattatttagtagtggtaacagatgactcaacaaaccaaaccccttgcctatgataataatgtgttctttctgtcttttatcaattccagctgtctttattagtccttcttttatttcatatcagcttttcctttctttatcgtctgttatcaccttatctctgatgctggtttctaattcaggaaagagccaaccaggtcatattgggagtaaagagcccctaggtattagtatcatttttgttctttttaaaacaaggtgctctgtggcctataattacatttagcttaaagtcttttgacttttttttttttttttccagtaaaggttaatgtggaccatgtgcaaagcaagatttcaattgagcagaagcttttagtttagcatgtttgtggtttggctggcccaaaggacactagagagtttacccatgcacttttagcttgaaacattaatttatcatgcatgtctgcatgtgagacaagcagatgcaaagcatgttctgcccttctgtctcggagggagagccatgacagccctgcagccccagcactgcccgtgttagctgatatataccaagtgatagaaactattctgtctagaaggcttgatttgactatagttgttaaagttgcctggttctttgtgttaccagagggaatactgagtgtctgaggttacattggtaggaaactccctgcataacattcctgatgtgaaagtcacagagattacccacttgggagaagagtcttatgaataaaatttgttgccagttatttagttttaaaattttctatggcttctgtgagtcatggaggttaatggaatacatttggtttcagggagatacatctggggactataagaaagctcttctgctgctctgtggagaagatgactaacgtgtcacggggaagagctccctgctgtgtgcctgcaccaccccactgccttccttcagcacctttagctgcatttgtatgccagtgcttaacacattgccttattcatactagcatgctcatgaccaacacatacacgtcatagaagaaaatagtggtgcttctttctgatctctagtggagatctctttgactgctgtagtactaaagtgtacttaatgttactaagtttaatgcctggccattttccatttatatatattttttaagaggctagagtgcttttagccttttttaaaaactccatttatattacatttgtaaccatgatactttaatcagaagcttagccttgaaattgtgaactcttggaaatgttattagtgaagttcgcaactaaactaaacctgtaaaattatgatgattgtattcaaaagattaatgaaaaataaacatttctgtccccctgaaaaaaaacaatataacacaagacaaccacaccacgcaacagacagaaacaacaagcacacactccaacaaaacacacaaaaatacgacggaggcgacagacacatcaaacaccacgagggggcaaaccaaagacacaacgagtcttacaaacgaggcgcagccttgtaggtagcttaaagaaaaagacg

SEQ ID NO: 243917 - DNA, 1579 bp, Homo sapiens
aatcccttccagagcggctctagcgactcactccgagacagattcagcaccgtcgcccggctctccgccgctctcccggggtttcggggcacttgggtcccacagtctggtcctgcttcaccttcccctgacctgagtagtcgccatggcacaggttctcagaggcactgtgactgacttccctggatttgatgagcgggctgatgcagaaactcttcggaaggctatgaaaggcttgggcacagatgaggagagcatcctgactctgttgacatcccgaagtaatgctcagcgccaggaaatctctgcagcttttaagactctgtttggcagggatcttctggatgacctgaaatcagaactaactggaaaatttgaaaaattaattgtggctctgatgaaaccctctcggctttatgatgcttatgaactgaaacatgccttgaagggagctggaacaaatgaaaaagtactgacagaaattattgcttcaaggacacctgaagaactgagagccatcaaacaagtttatgaagaagaatatggctcaagcctggaagatgacgtggtgggggacacttcagggtactaccagcggatgttggtggttctccttcaggctaacagagaccctgatgctggaattgatgaagctcaagttgaacaagatgctcaggctttatttcaggctggagaacttaaatgggggacagatgaagaaaagtttatcaccatctttggaacacgaagtgtgtctcatttgagaaaggtgtttgacaagtacatgactatatcaggatttcaaattgaggaaaccattgaccgcgagacttctggcaatttagagcaactactccttgctgttgtgaaatctattcgaagtatacctgcctaccttgcagagaccctctattatgctatgaagggagctgggacagatgatcataccctcatcagagtcatggtttccaggagtgagattgatctgtttaacatcaggaaggagtttaggaagaattttgccacctctctttattccatgattaagggagatacatctggggactataagaaagctcttctgctgctctgtggagaagatgactaacgtgtcacggggaagagctccctgctgtgtgcctgcaccaccccactgccttccttcagcacctttagctgcatttgtatgccagtgcttaacacattgccttattcatactagcatgctcatgaccaacacatacacgtcatagaagaaaatagtggtgcttctttctgatctctagtggagatctctttgactgctgtagtactaaagtgtacttaatgttactaagtttaatgcctggccattttccatttatatatattttttaagaggctagagtgcttttagccttttttaaaaactccatttatattacatttgtaaccatgatactttaatcagaagcttagccttgaaattgtgaactcttggaaatgttattagtgaagttcgcaactaaactaaacctgtaaaattatgatgattgtattcaaaagattaatgaaaaataaacatttctgtccccctgaa

SEQ ID NO: 243918 - DNA, 1573 bp, Homo sapiens
cggcgcctcatgattgtcatttactgtggcgtagcgtttacaaccgtcgcccggctctccgccgctctcccggggtttcggggcacttgggtcccacagtctggtcctgcttcaccttcccctgacctgagtagtcgccatggcacaggttctcagaggcactgtgactgacttccctggatttgatgagcgggctgatgcagaaactcttcggaaggctatgaaaggcttgggcacagatgaggagagcatcctgactctgttgacatcccgaagtaatgctcagcgccaggaaatctctgcagcttttaagactctgtttggcagggatcttctggatgacctgaaatcagaactaactggaaaatttgaaaaattaattgtggctctgatgaaaccctctcggctttatgatgcttatgaactgaaacatgccttgaagggagctggaacaaatgaaaaagtactgacagaaattattgcttcaaggacacctgaagaactgagagccatcaaacaagtttatgaagaagaatatggctcaagcctggaagatgacgtggtgggggacacttcagggtactaccagcggatgttggtggttctccttcaggctaacagagaccctgatgctggaattgatgaagctcaagttgaacaagatgctcaggctttatttcaggctggagaacttaaatgggggacagatgaagaaaagtttatcaccatctttggaacacgaagtgtgtctcatttgagaaaggtgtttgacaagtacatgactatatcaggatttcaaattgaggaaaccattgaccgcgagacttctggcaatttagagcaactactccttgctgttgtgaaatctattcgaagtatacctgcctaccttgcagagaccctctattatgctatgaagggagctgggacagatgatcataccctcatcagagtcatggtttccaggagtgagattgatctgtttaacatcaggaaggagtttaggaagaattttgccacctctctttattccatgattaagggagatacatctggggactataagaaagctcttctgctgctctgtggagaagatgactaacgtgtcacggggaagagctccctgctgtgtgcctgcaccaccccactgccttccttcagcacctttagctgcatttgtatgccagtgcttaacacattgccttattcatactagcatgctcatgaccaacacatacacgtcatagaagaaaatagtggtgcttctttctgatctctagtggagatctctttgactgctgtagtactaaagtgtacttaatgttactaagtttaatgcctggccattttccatttatatatattttttaagaggctagagtgcttttagccttttttaaaaactccatttatattacatttgtaaccatgatactttaatcagaagcttagccttgaaattgtgaactcttggaaatgttattagtgaagttcgcaactaaactaaacctgtaaaattatgatgattgtattcaaaagattaatgaaaaataaacatttctgtccccctgaa

SEQ ID NO: 243919 - DNA, 1249 bp, Homo sapiens
tgctgcgtctatctagaggatcccggtttcgcatgttcccggggcgctggcgtttccgttgcttggatcagtctaggtgcagctgccggatccttcagcgtctgcatctcggcgtcgccccgcgtaccgtcgcccggctctccgccgctctcccggggtttcggggcacttgggtcccacagtctggtcctgcttcaccttcccctgacctgagtagtcgccatggcacaggttctcagaggcactgtgactgacttccctggatttgatgagcgggctgatgcagaaactcttcggaaggctatgaaaggcttgggcacagatgaggagagcatcctgactctgttgacatcccgaagtaatgctcagcgccaggaaatctctgcagcttttaagactctgtttggcagggatcttctggatgacctgaaatcagaactaactggaaaatttgaaaaattaattgtggctctgatgaaaccctctcggctttatgatgcttatgaactgaaacatgccttgaagggagctggaacaaatgaaaaagtactgacagaaattattgcttcaaggacacctgaagaactgagagccatcaaacaagtttatgaagaagaatatggctcaagcctggaagatgacgtggtgggggacacttcagggtactaccagcggatgttggtggttctccttcaggctaacagagaccctgatgctggaattgatgaagctcaagttgaacaagatgctcaggctttatttcaggctggagaacttaaatgggggacagatgaagaaaagtttatcaccatctttggaacacgaagtgtgtctcatttgagaaaggtgtttgacaagtacatgactatatcaggatttcaaattgaggaaaccattgaccgcgagacttctggcaatttagagcaactactccttgctgttgtgaaatctattcgaagtatacctgcctaccttgcagagaccctctattatgctatgaagggagctgggacagatgatcataccctcatcagagtcatggtttccaggagtgagattgatctgtttaacatcaggaaggagtttaggaagaattttgccacctctctttattccatgattaagggagatacatctggggactataagaaagctcttctgctgctctgtggagaagatgactaacgtgtcacggggaagagctccctgctgtgtgcctatcaagcctggtaccggctcgattctatag

SEQ ID NO: 243920 - DNA, 1655 bp, Homo sapiens
tgtcgactgcttcggatggggaaggaaaggcttgggcacagatgaggagagcatcctgactctgttgacatcccgaagtaatgctcagcgccaggaaatctctgcagcttttaagactctgtttggcagggatcttctggatgacctgaaatcagaactaactggaaaatttgaaaaattaattgtggctctgatgaaaccctctcggctttatgatgcttatggcacaggttctcagaggcactgtgactgacttccctggatttgatgagcgggctgatgcagaaactcttcggaaggctatgaaaggcttgggcacagatgaggagagcatcctgactctgttgacatcccgaagtaatgctcagcgccaggaaatctctgcagcttttaagactctgtttggcagggatcttctggatgacctgaaatcagaactaactggaaaatttgaaaaattaattgtggctctgatgaaaccctctcggctttatgatgcttatgaactgaaacatgccttgaagggagctggaacaaatgaaaaagtactgacagaaattattgcttcaaggacacctgaagaactgagagccatcaaacaagtttatgaagaagaatatggctcaagcctggaagatgacgtggtgggggacacttcagggtactaccagcggatgttggtggttctccttcaggctaacagagaccctgatgctggaattgatgaagctcaagttgaacaagatgctcaggctttatttcaggctggagaacttaaatgggggacagatgaagaaaagtttatcaccatctttggaacacgaagtgtgtctcatttgagaaaggtgtttgacaagtacatgactatatcaggatttcaaattgaggaaaccattgaccgcgagacttctggcaatttagagcaactactccttgctgttgtgaaatctattcgaagtatacctgcctaccttgcagagaccctctattatgctatgaagggagctgggacagatgatcataccctcatcagagtcatggtttccaggagtgagattgatctgtttaacatcaggaaggagtttaggaagaattttgccacctctctttattccatgattaagggagatacatctggggactataagaaagctcttctgctgctctgtggagaagatgactaacgtgtcacggggaagagctccctgctgtgtgcctgcaccaccccactgccttccttcagcacctttagctgcatttgtatgccagtgcttaacacattgccttattcatactagcatgctcatgaccaacacatacacgtcatagaagaaaatagtggtgcttctttctgatctctagtggagatctctttgactgctgtagtactaaagtgtacttaatgttactaagtttaatgcctggccattttccatttatatatattttttaagaggctagagtgcttttagccttttttaaaaactccatttatattacatttgtaaccatgatactttaatcagaagcttagccttgaaattgtgaactcttggaaatgttattagtgaagttcgcaactaaactaaacctgtaaaattatgatgattgtattcaaaagattaatgaaaaataaacatttctgtccccctgaa

SEQ ID NO: 243921 - DNA, 1344 bp, Homo sapiens
tgctgcgtctatctagaggatcccggtttcgcatgttcccggggcgctggcgtttccgttgcttggatcagtctaggtgcagctgccggatccttcagcgtctgcatctcggcgtcgccccgcgtaccgtcgcccggctctccgccgctctcccggggtttcggggcacttgggtcccacagtctggtcctgcttcaccttcccctgacctgagtagtcgccatggcacaggttctcagaggcactgtgactgacttccctggatttgatgagcgggctgatgcagaaactcttcggaaggctatgaaaggcttgggcacagatgaggagagcatcctgactctgttgacatcccgaagtaatgctcagcgccaggaaatctctgcagcttttaagactctgtttggcagggatcttctggatgacctgaaatcagaactaactggaaaatttgaaaaattaattgtggctctgatgaaaccctctcggctttatgatgcttatgaactgaaacatgccttgaagggagctggaacaaatgaaaaagtactgacagaaattattgcttcaaggacacctgaagaactgagagccatcaaacaagtttatgaagaagaatatggctcaagcctggaagatgacgtggtgggggacacttcagggtactaccagcggatgttggtggttctccttcaggctaacagagaccctgatgctggaattgatgaagctcaagttgaacaagatgctcaggctttatttcaggctggagaacttaaatgggggacagatgaagaaaagtttatcaccatctttggaacacgaagtgtgtctcatttgagaaaggtgtttgacaagtacatgactatatcaggatttcaaattgaggaaaccattgaccgcgagacttctggcaatttagagcaactactccttgctgttgtgaaatctattcgaagtatacctgcctaccttgcagagaccctctattatgctatgaagggagctgggacagatgatcataccctcatcagagtcatggtttccaggagtgagattgatctgtttaacatcaggaaggagtttaggaagaattttgccacctctctttattccatgattaagggagatacatctggtgacttaaaagtgtgtagcacctccccattccctttctcttgatcctttcgacataggacgtgcctgctcccccttcaccttctaccatgattgtaagtgtcctgaagcctccctagaagctgagtagctggcatcatgctttctgtagaacctgcagaaccatgaggcaattaaacctctttttctttataaattatccagtct

SEQ ID NO: 243922 - DNA, 1419 bp, Homo sapiens
tgctgcgtctatctagaggatcccggtttcgcatgttcccggggcgctggcgtttccgttgcttggatcagtctaggtgcagctgccggatccttcagcgtctgcatctcggcgtcgccccgcgtaccgtcgcccggctctccgccgctctcccggggtttcggggcacttgggtcccacagtctggtcctgcttcaccttcccctgacctgagtagtcgccatggcacaggttctcagaggcactgtgactgacttccctggatttgatgagcgggctgatgcagaaactcttcggaaggctatgaaaggcttgggcacagatgaggagagcatcctgactctgttgacatcccgaagtaatgctcagcgccaggaaatctctgcagcttttaagactctgtttggcagggatcttctggatgacctgaaatcagaactaactggaaaatttgaaaaattaattgtggctctgatgaaaccctctcggctttatgatgcttatgaactgaaacatgccttgaagggagctggaacaaatgaaaaagtactgacagaaattattgcttcaaggacacctgaagaactgagagccatcaaacaagtttatgaagaagaatatggctcaagcctggaagatgacgtggtgggggacacttcagggtactaccagcggatgttggtggttctccttcaggctaacagagaccctgatgctggaattgatgaagctcaagttgaacaagatgctcaggctttatttcaggctggagaacttaaatgggggacagatgaagaaaagtttatcaccatctttggaacacgaagtgtgtctcatttgagaaaggtgtttgacaagtacatgactatatcaggatttcaaattgaggaaaccattgaccgcgagacttctggcaatttagagcaactactccttgctgttgtgaaatctattcgaagtatacctgcctaccttgcagagaccctctattatgctatgaagggagctgggacagatgatcataccctcatcagagtcatggtttccaggagtgagattgatctgtttaacatcaggaaggagtttaggaagaattttgccacctctctttattccatgattaaggtagtagaacctttctttaaattacgtttgggaatccaaagcagactggtatgttgcatgaaagacaaggataagagaacctgattcttgtgttaagtttaaaattttagtgacacgattagagcaatgagttaaaaagcttagcataatgtttcctgatgggacgaagatgcgccatcagtgatgccccacccagccacggaaacgacatggtttatatatgtggtgtcctggtattcggcatagatgccttcggtgtagttagccagtctttctgttgccattattccacag

SEQ ID NO: 243923 - DNA, 1575 bp, Homo sapiens
tgctgcgtctatctagaggatcccggtttcgcatgttcccggggcgctggcgtttccgttgcttggatcagtctaggtgcagctgccggatccttcagcgtctgcatctcggcgtcgccccgcgtaccgtcgcccggctctccgccgctctcccggggtttcggggcacttgggtcccacagtctggtcctgcttcaccttcccctgacctgagtagtcgccatggcacaggttctcagaggcactgtgactgacttccctggatttgatgagcgggctgatgcagaaactcttcggaaggctatgaaaggcttgggcacagatgaggagagcatcctgactctgttgacatcccgaagtaatgctcagcgccaggaaatctctgcagcttttaagactctgtttggcagggatcttctggatgacctgaaatcagaactaaagggagctggaacaaatgaaaaagtactgacagaaattattgcttcaaggacacctgaagaactgagagccatcaaacaagtttatgaagaagaatatggctcaagcctggaagatgacgtggtgggggacacttcagggtactaccagcggatgttggtggttctccttcaggctaacagagaccctgatgctggaattgatgaagctcaagttgaacaagatgctcaggctttatttcaggctggagaacttaaatgggggacagatgaagaaaagtttatcaccatctttggaacacgaagtgtgtctcatttgagaaaggtgtttgacaagtacatgactatatcaggatttcaaattgaggaaaccattgaccgcgagacttctggcaatttagagcaactactccttgctgttgtgaaatctattcgaagtatacctgcctaccttgcagagaccctctattatgctatgaagggagctgggacagatgatcataccctcatcagagtcatggtttccaggagtgagattgatctgtttaacatcaggaaggagtttaggaagaattttgccacctctctttattccatgattaagggagatacatctggggactataagaaagctcttctgctgctctgtggagaagatgactaacgtgtcacggggaagagctccctgctgtgtgcctgcaccaccccactgccttccttcagcacctttagctgcatttgtatgccagtgcttaacacattgccttattcatactagcatgctcatgaccaacacatacacgtcatagaagaaaatagtggtgcttctttctgatctctagtggagatctctttgactgctgtagtactaaagtgtacttaatgttactaagtttaatgcctggccattttccatttatatatattttttaagaggctagagtgcttttagccttttttaaaaactccatttatattacatttgtaaccatgatactttaatcagaagcttagccttgaaattgtgaactcttggaaatgttattagtgaagttcgcaactaaactaaacctgtaaaattatgatgattgtattcaaaagattaatgaaaaataaacatttctgtccccctgaa

SEQ ID NO: 243924 - DNA, 1171 bp, Homo sapiens
aaggctagtacgaggctggtgtggaatcggccgagggaagggagctggaacaaatgaaaaagtactgacagaaattattgcttcaaggacacctgaagaactgagagccatcaaacaagtttatgaagaagaatatggctcaagcctggaagatgacgtggtgggggacacttcagggtactaccagcggatgttggtggttctccttcaggctaacagagaccctgatgctggaattgatgaagctcaagttgaacaagatgctcaggctttatttcaggctggagaacttaaatgggggacagatgaagaaaagtttatcaccatctttggaacacgaagtgtgtctcatttgagaaaggtgtttgacaagtacatgactatatcaggatttcaaattgaggaaaccattgaccgcgagacttctggcaatttagagcaactactccttgctgttgtgaaatctattcgaagtatacctgcctaccttgcagagaccctctattatgctatgaagggagctgggacagatgatcataccctcatcagagtcatggtttccaggagtgagattgatctgtttaacatcaggaaggagtttaggaagaattttgccacctctctttattccatgattaagggagatacatctggggactataagaaagctcttctgctgctctgtggagaagatgactaacgtgtcacggggaagagctccctgctgtgtgcctgcaccaccccactgccttccttcagcacctttagctgcatttgtatgccagtgcttaacacattgccttattcatactagcatgctcatgaccaacacatacacgtcatagaagaaaatagtggtgcttctttctgatctctagtggagatctctttgactgctgtagtactaaagtgtacttaatgttactaagtttaatgcctggccattttccatttatatatattttttaagaggctagagtgcttttagccttttttaaaaactccatttatattacatttgtaaccatgatactttaatcagaagcttagccttgaaattgtgaactcttggaaatgttattagtgaagttcgcaactaaactaaacctgtaaaattatgatgattgtattcaaaagattaatgaaaaataaacatttctgtccccctgaa

SEQ ID NO: 243925 - DNA, 1132 bp, Homo sapiens
tgctgcgtctatctagaggatcccggtttcgcatgttcccggggcgctggcgtttccgttgcttggatcagtctaggtgcagctgccggatccttcagcgtctgcatctcggcgtcgccccgcgtaccgtcgcccggctctccgccgctctcccggggtttcggggcacttgggtcccacagtctggtcctgcttcaccttcccctgacctgagtagtcgccatggcacaggttctcagaggcactgtgactgacttccctggatttgatgagcgggctgatgcagaaactcttcggaaggctatgaaaggcttgggcacagatgaggagagcatcctgactctgttgacatcccgaagtaatgctcagcgccaggaaatctctgcagcttttaagactctgtttggcagggatcttctggatgacctgaaatcagaactaactggaaaatttgaaaaattaattgtggctctgatgaaaccctctcggctttatgatgcttatgaactgaaacatgccttgaagggagctggaacaaatgaaaaagtactgacagaaattattgcttcaaggacacctgaagaactgagagccatcaaacaagtttatgaagaagaatatggctcaagcctggaagatgacgtggtgggggacacttcagggtactaccagcggatgttggtggttctccttcaggctaacagagaccctgatgctggaattgatgaagctcaagttgaacaagatgctcaggctttatttcaggctggagaacttaaatgggggacagatgaagaaaagtttatcaccatctttggaacacgaagtgtgtctcatttgagaaaggtgtttgacaagtacatgactatatcaggatttcaaattgaggaaaccattgaccgcgagacttctggcaatttagagcaactactccttgctgttgtgaaatctattcgaagtatacctgcctaccttgcagagaaccgattattaggggaactagtcagttgccaaagcccaacccggtcagcccctctactggatatatactcaaaggaatacaagtaattctaccataaagacacatgcatgcatatgttcactgcagtactattcataatatcaaaggacg

SEQ ID NO: 243926 - DNA, 1602 bp, Homo sapiens
tgctgcgtctatctagaggatcccggtttcgcatgttcccggggcgctggcgtttccgttgcttggatcagtctaggtgcagctgccggatccttcagcgtctgcatctcggcgtcgccccgcgtaccgtcgcccggctctccgccgctctcccggggtttcggggcacttgggtcccacagtctggtcctgcttcaccttcccctgacctgagtagtcgccatggcacaggttctcagaggcactgtgactgacttccctggatttgatgagcgggctgatgcagaaactcttcggaaggctatgaaaggcttgggcacagatgaggagagcatcctgactctgttgacatcccgaagtaatgctcagcgccaggaaatctctgcagcttttaagactctgtttggcagggatcttctggatgacctgaaatcagaactaactggaaaatttgaaaaattaattgtggctctgatgaaaccctctcggctttatgatgcttatgaactgaaacatgccttgaagggagctggaacaaatgaaaaagtactgacagaaattattgcttcaaggacacctgaagaactgagagccatcaaacaagtttatgaagaagaatatggctcaagcctggaagatgacgtggtgggggacacttcagggtactaccagcggatgttggtggttctccttcaggctaacagagaccctgatgctggaattgatgaagctcaagttgaacaagatgctcaggctttatttcaggctggagaacttaaatgggggacagatgtgtttgacaagtacatgactatatcaggatttcaaattgaggaaaccattgaccgcgagacttctggcaatttagagcaactactccttgctgttgtgaaatctattcgaagtatacctgcctaccttgcagagaccctctattatgctatgaagggagctgggacagatgatcataccctcatcagagtcatggtttccaggagtgagattgatctgtttaacatcaggaaggagtttaggaagaattttgccacctctctttattccatgattaagggagatacatctggggactataagaaagctcttctgctgctctgtggagaagatgactaacgtgtcacggggaagagctccctgctgtgtgcctgcaccaccccactgccttccttcagcacctttagctgcatttgtatgccagtgcttaacacattgccttattcatactagcatgctcatgaccaacacatacacgtcatagaagaaaatagtggtgcttctttctgatctctagtggagatctctttgactgctgtagtactaaagtgtacttaatgttactaagtttaatgcctggccattttccatttatatatattttttaagaggctagagtgcttttagccttttttaaaaactccatttatattacatttgtaaccatgatactttaatcagaagcttagccttgaaattgtgaactcttggaaatgttattagtgaagttcgcaactaaactaaacctgtaaaattatgatgattgtattcaaaagattaatgaaaaataaacatttctgtccccctgaa

SEQ ID NO: 243927 - DNA, 2120 bp, Homo sapiens
tgctgcgtctatctagaggatcccggtttcgcatgttcccggggcgctggcgtttccgttgcttggatcagtctaggtgcagctgccggatccttcagcgtctgcatctcggcgtcgccccgcgtaccgtcgcccggctctccgccgctctcccggggtttcggggcacttgggtcccacagtctggtcctgcttcaccttcccctgacctgagtagtcgccatggcacaggttctcagaggcactgtgactgacttccctggatttgatgagcgggctgatgcagaaactcttcggaaggctatgaaaggcttgggcacagatgaggagagcatcctgactctgttgacatcccgaagtaatgctcagcgccaggaaatctctgcagcttttaagactctgtttggcagggatcttctggatgacctgaaatcagaactaactggaaaatttgaaaaattaattgtggctctgatgaaaccctctcggctttatgatgcttatgaactgaaacatgccttgaagggagctggaacaaatgaaaaagtactgacagaaattattgcttcaaggacacctgaagaactgagagccatcaaacaagtttatgaagaagaatatggctcaagcctggaagatgacgtggtgggggacacttcagggtactaccagcggatgttggtggttctccttcaggtattgcgtggagattaattacagtttgattaaaaagcctgaagttggactgggctgaatctagttaagtaaggtcacttaaaattcttttaataatttgtggtacttgctgattcttactgcgatgattctgactgtatgttgcctgtgcttgtttgtgtttcagaatatctggtctaaattcttaacagctaactcatacatgttttagatagtagtatcttgttcctttcatagaatgatagcggtatcttgttctttcatagaatttaaaatcagtagggtcattattggttttggacagtgctgggtgatgataacgtgaaatagtgcaggattgatcttaataaaagcatattattcctagagaaagagtgttattgaataaccatcaggtggaaccatttttccttttgaatgagaatgctctatagttcagtaatgtgacatattacctctcataggctaacagagaccctgatgctggaattgatgaagctcaagttgaacaagatgctcaggctttatttcaggctggagaacttaaatgggggacagatgaagaaaagtttatcaccatctttggaacacgaagtgtgtctcatttgagaaaggtgtttgacaagtacatgactatatcaggatttcaaattgaggaaaccattgaccgcgagacttctggcaatttagagcaactactccttgctgttgtgaaatctattcgaagtatacctgcctaccttgcagagaccctctattatgctatgaagggagctgggacagatgatcataccctcatcagagtcatggtttccaggagtgagattgatctgtttaacatcaggaaggagtttaggaagaattttgccacctctctttattccatgattaagggagatacatctggggactataagaaagctcttctgctgctctgtggagaagatgactaacgtgtcacggggaagagctccctgctgtgtgcctgcaccaccccactgccttccttcagcacctttagctgcatttgtatgccagtgcttaacacattgccttattcatactagcatgctcatgaccaacacatacacgtcatagaagaaaatagtggtgcttctttctgatctctagtggagatctctttgactgctgtagtactaaagtgtacttaatgttactaagtttaatgcctggccattttccatttatatatattttttaagaggctagagtgcttttagccttttttaaaaactccatttatattacatttgtaaccatgatactttaatcagaagcttagccttgaaattgtgaactcttggaaatgttattagtgaagttcgcaactaaactaaacctgtaaaattatgatgattgtattcaaaagattaatgaaaaataaacatttctgtccccctgaa

SEQ ID NO: 243928 - DNA, 1574 bp, Homo sapiens
tgctgcgtctatctagaggatcccggtttcgcatgttcccggggcgctggcgtttccgttgcttggatcagtctaggtgcagctgccggatccttcagcgtctgcatctcggcgtcgccccgcgtaccgtcgcccggctctccgccgctctcccggggtttcggggcacttgggtcccacagtctggtcctgcttcaccttcccctgacctgagtagtcgccatggcacaggttctcagaggcactgtgactgacttccctggatttgatgagcgggctgatgcagaaactcttcggaaggctatgaaaggcttgggcacagatgaggagagcatcctgactctgttgacatcccgaagtaatgctcagcgccaggaaatctctgcagcttttaagactctgtttggcagggatcttctggatgacctgaaatcagaactaactggaaaatttgaaaaattaattgtggctctgatgaaaccctctcggctttatgatgcttatgaactgaaacatgccttgaagggagctggaacaaatgaaaaagtactgacagaaattattgcttcaaggattcagggtactaccagcggatgttggtggttctccttcaggctaacagagaccctgatgctggaattgatgaagctcaagttgaacaagatgctcaggctttatttcaggctggagaacttaaatgggggacagatgaagaaaagtttatcaccatctttggaacacgaagtgtgtctcatttgagaaaggtgtttgacaagtacatgactatatcaggatttcaaattgaggaaaccattgaccgcgagacttctggcaatttagagcaactactccttgctgttgtgaaatctattcgaagtatacctgcctaccttgcagagaccctctattatgctatgaagggagctgggacagatgatcataccctcatcagagtcatggtttccaggagtgagattgatctgtttaacatcaggaaggagtttaggaagaattttgccacctctctttattccatgattaagggagatacatctggggactataagaaagctcttctgctgctctgtggagaagatgactaacgtgtcacggggaagagctccctgctgtgtgcctgcaccaccccactgccttccttcagcacctttagctgcatttgtatgccagtgcttaacacattgccttattcatactagcatgctcatgaccaacacatacacgtcatagaagaaaatagtggtgcttctttctgatctctagtggagatctctttgactgctgtagtactaaagtgtacttaatgttactaagtttaatgcctggccattttccatttatatatattttttaagaggctagagtgcttttagccttttttaaaaactccatttatattacatttgtaaccatgatactttaatcagaagcttagccttgaaattgtgaactcttggaaatgttattagtgaagttcgcaactaaactaaacctgtaaaattatgatgattgtattcaaaagattaatgaaaaataaacatttctgtccccctgaa

SEQ ID NO: 243929 - DNA, 1043 bp, Homo sapiens
tgctgcgtctatctagaggatcccggtttcgcatgttcccggggcgctggcgtttccgttgcttggatcagtctaggtgcagctgccggatccttcagcgtctgcatctcggcgtcgccccgcgtaccgtcgcccggctctccgccgctctcccggggtttcggggcacttgggtcccacagtctggtcctgcttcaccttcccctgacctgagtagtcgccatggcacaggttctcagaggcactgtgactgacttccctggatttgatgagcgggctgatgcagaaactcttcggaaggctatgaaaggcttgggcacagatgaggagagcatcctgactctgttgacatcccgaagtaatgctcagcgccaggaaatctctgcagcttttaagactctgtttggcagggatcttctggatgacctgaaatcagaactaactggaaaatttgaaaaattaattgtggctctgatgaaaccctctcggctttatgatgcttatgaactgaaacatgccttgaagggagctggaacaaatgaaaaagtactgacagaaattattgcttcaaggacacctgaagaactgagagccatcaaacaagtttatgaagaagaatatggctcaagcctggaagatgacgtggtgggggacacttcagggtactaccagcggatgttggtggttctccttcaggctaacagagaccctgatgctggaattgatgaagctcaagttgaacaagatgctcaggctttatttcaggctggagaacttaaatgggggacagatgaagaaaagtttatcaccatctttggaacacgaagtgtgtctcatttgagaaaggtgtttgacaagtacatgactatatcaggatttcaaattgaggaaaccattgaccgcgagacttctggcaatttagagcaactactccttgctgttgtgccatctattcgatgtacaccggcatacacggcagccccgctctattactatgttctgaagggataaacggccgcccgttaatactctttcctgagtat

SEQ ID NO: 243930 - DNA, 1534 bp, Homo sapiens
tgctgcgtctatctagaggatcccggtttcgcatgttcccggggcgctggcgtttccgttgcttggatcagtctaggtgcagctgccggatccttcagcgtctgcatctcggcgtcgccccgcgtaccgtcgcccggctctccgccgctctcccggggtttcggggcacttgggtcccacagtctggtcctgcttcaccttcccctgacctgagtagtcgccatggcacaggttctcagaggcactgtgactgacttccctggatttgatgagcgggctgatgcagaaactcttcggaaggctatgaaaggcttgggcacagatgaggagagcatcctgactctgttgacatcccgaagtaatgctcagcgccaggaaatctctgcagcttttaagactctgtttggcagggatcttctggatgacctgaaatcagaactaactggaaaatttgaaaaattaattgtggctctgatgaaaccctctcggctttatgatgcttatgaactgaaacatgccttgaagggagctggaacaaatgaaaaagtactgacagaaattattgcttcaaggagctaacagagaccctgatgctggaattgatgaagctcaagttgaacaagatgctcaggctttatttcaggctggagaacttaaatgggggacagatgaagaaaagtttatcaccatctttggaacacgaagtgtgtctcatttgagaaaggtgtttgacaagtacatgactatatcaggatttcaaattgaggaaaccattgaccgcgagacttctggcaatttagagcaactactccttgctgttgtgaaatctattcgaagtatacctgcctaccttgcagagaccctctattatgctatgaagggagctgggacagatgatcataccctcatcagagtcatggtttccaggagtgagattgatctgtttaacatcaggaaggagtttaggaagaattttgccacctctctttattccatgattaagggagatacatctggggactataagaaagctcttctgctgctctgtggagaagatgactaacgtgtcacggggaagagctccctgctgtgtgcctgcaccaccccactgccttccttcagcacctttagctgcatttgtatgccagtgcttaacacattgccttattcatactagcatgctcatgaccaacacatacacgtcatagaagaaaatagtggtgcttctttctgatctctagtggagatctctttgactgctgtagtactaaagtgtacttaatgttactaagtttaatgcctggccattttccatttatatatattttttaagaggctagagtgcttttagccttttttaaaaactccatttatattacatttgtaaccatgatactttaatcagaagcttagccttgaaattgtgaactcttggaaatgttattagtgaagttcgcaactaaactaaacctgtaaaattatgatgattgtattcaaaagattaatgaaaaataaacatttctgtccccctgaa

SEQ ID NO: 243931 - DNA, 1010 bp, Homo sapiens
tagccggtccagacttctgtcaccagcggatgttggtggttctccttcaggctaacagagaccctgatgctggaattgatgaagctcaagttgaacaagatgctcaggctttatttcaggctggagaacttaaatgggggacagatgaagaaaagtttatcaccatctttggaacacgaagtgtgtctcatttgagaaaggtgtttgacaagtacatgactatatcaggatttcaaattgaggaaaccattgaccgcgagacttctggcaatttagagcaactactccttgctgttgtgaaatctattcgaagtatacctgcctaccttgcagagaccctctattatgctatgaagggagctgggacagatgatcataccctcatcagagtcatggtttccaggagtgagattgatctgtttaacatcaggaaggagtttaggaagaattttgccacctctctttattccatgattaagggagatacatctggggactataagaaagctcttctgctgctctgtggagaagatgactaacgtgtcacggggaagagctccctgctgtgtgcctgcaccaccccactgccttccttcagcacctttagctgcatttgtatgccagtgcttaacacattgccttattcatactagcatgctcatgaccaacacatacacgtcatagaagaaaatagtggtgcttctttctgatctctagtggagatctctttgactgctgtagtactaaagtgtacttaatgttactaagtttaatgcctggccattttccatttatatatattttttaagaggctagagtgcttttagccttttttaaaaactccatttatattacatttgtaaccatgatactttaatcagaagcttagccttgaaattgtgaactcttggaaatgttattagtgaagttcgcaactaaactaaacctgtaaaattatgatgattgtattcaaaagattaatgaaaaataaacatttctgtccccctgaa

SEQ ID NO: 243932 - DNA, 1481 bp, Homo sapiens
tgctgcgtctatctagaggatcccggtttcgcatgttcccggggcgctggcgtttccgttgcttggatcagtctaggtgcagctgccggatccttcagcgtctgcatctcggcgtcgccccgcgtaccgtcgcccggctctccgccgctctcccggggtttcggggcacttgggtcccacagtctggtcctgcttcaccttcccctgacctgagtagtcgccatggcacaggttctcagaggcactgtgactgacttccctggatttgatgagcgggctgatgcagaaactcttcggaaggctatgaaaggcttgggatcttctggatgacctgaaatcagaactaactggaaaatttgaaaaattaattgtggctctgatgaaaccctctcggctttatgatgcttatgaactgaaacatgccttgaagggagctggaacaaatgaaaaagtactgacagaaattattgcttcaaggacacctgaagaactgagagccatcaaacaagtttatgaagaaggctaacagagaccctgatgctggaattgatgaagctcaagttgaacaagatgctcaggctttatttcaggctggagaacttaaatgggggacagatgaagaaaagtttatcaccatctttggaacacgaagtgtgtctcatttgagaaaggtgtttgacaagtacatgactatatcaggatttcaaattgaggaaaccattgaccgcgagacttctggcaatttagagcaactactccttgctgttgtgaaatctattcgaagtatacctgcctaccttgcagagaccctctattatgctatgaagggagctgggacagatgatcataccctcatcagagtcatggtttccaggagtgagattgatctgtttaacatcaggaaggagtttaggaagaattttgccacctctctttattccatgattaagggagatacatctggggactataagaaagctcttctgctgctctgtggagaagatgactaacgtgtcacggggaagagctccctgctgtgtgcctgcaccaccccactgccttccttcagcacctttagctgcatttgtatgccagtgcttaacacattgccttattcatactagcatgctcatgaccaacacatacacgtcatagaagaaaatagtggtgcttctttctgatctctagtggagatctctttgactgctgtagtactaaagtgtacttaatgttactaagtttaatgcctggccattttccatttatatatattttttaagaggctagagtgcttttagccttttttaaaaactccatttatattacatttgtaaccatgatactttaatcagaagcttagccttgaaattgtgaactcttggaaatgttattagtgaagttcgcaactaaactaaacctgtaaaattatgatgattgtattcaaaagattaatgaaaaataaacatttctgtccccctgaa

SEQ ID NO: 243933 - DNA, 1040 bp, Homo sapiens
gcgagtgatgctgaggtgactctagttgatccccgttctccccgtggtactaccagcggatgttggtggttctccttcaggctaacagagaccctgatgctggaattgatgaagctcaagttgaacaagatgctcaggctttatttcaggctggagaacttaaatgggggacagatgaagaaaagtttatcaccatctttggaacacgaagtgtgtctcatttgagaaaggtgtttgacaagtacatgactatatcaggatttcaaattgaggaaaccattgaccgcgagacttctggcaatttagagcaactactccttgctgttgtgaaatctattcgaagtatacctgcctaccttgcagagaccctctattatgctatgaagggagctgggacagatgatcataccctcatcagagtcatggtttccaggagtgagattgatctgtttaacatcaggaaggagtttaggaagaattttgccacctctctttattccatgattaagggagatacatctggggactataagaaagctcttctgctgctctgtggagaagatgactaacgtgtcacggggaagagctccctgctgtgtgcctgcaccaccccactgccttccttcagcacctttagctgcatttgtatgccagtgcttaacacattgccttattcatactagcatgctcatgaccaacacatacacgtcatagaagaaaatagtggtgcttctttctgatctctagtggagatctctttgactgctgtagtactaaagtgtacttaatgttactaagtttaatgcctggccattttccatttatatatattttttaagaggctagagtgcttttagccttttttaaaaactccatttatattacatttgtaaccatgatactttaatcagaagcttagccttgaaattgtgaactcttggaaatgttattagtgaagttcgcaactaaactaaacctgtaaaattatgatgattgtattcaaaagattaatgaaaaataaacatttctgtccccctgaa

SEQ ID NO: 243934 - DNA, 943 bp, Homo sapiens
tgctgcgtctatctagaggatcccggtttcgcatgttcccggggcgctggcgtttccgttgcttggatcagtctaggtgcagctgccggatccttcagcgtctgcatctcggcgtcgccccgcgtaccgtcgcccggctctccgccgctctcccggggtttcggggcacttgggtcccacagtctggtcctgcttcaccttcccctgacctgagtagtcgccatggcacaggttctcagaggcactgtgactgacttccctggatttgatgagcgggctgatgcagaaactcttcggaaggctatgaaaggcttgggcacagatgaggagagcatcctgactctgttgacatcccgaagtaatgctcagcgccaggaaatctctgcagcttttaagactctgtttggcagggatcttctggatgacctgaaatcagaactaactggaaaatttgaaaaattaattgtggctctgatgaaaccctctcggctttatgatgcttatgaactgaaacatgccttgaagggagctggaacaaatgaaaaagtactgacagaaattattgcttcaaggacacctgaagaactgagagccatcaaacaagtttatgaagaagaatatggctcaagcctggaagatgacgtggtgggggacacttcagggtactaccagcggatgttggtggttctccttcaggctaacagagaccctgatgctggaattgatgaagctcaagttgaacaagatgctcaggctttatttcaggctggagaacttaaatgggggacagatgaagaaaagtttatcaccatctttggaacacgaagtgtgtctcatttgagaaaggtgtttgacaagtacatgactatatcaggatttcaaattgaggaaaccattgccctgacccgacgacgattccgcacgcccgacgattccggtccgc

SEQ ID NO: 243935 - DNA, 943 bp, Homo sapiens
tgctgcgtctatctagaggatcccggtttcgcatgttcccggggcgctggcgtttccgttgcttggatcagtctaggtgcagctgccggatccttcagcgtctgcatctcggcgtcgccccgcgtaccgtcgcccggctctccgccgctctcccggggtttcggggcacttgggtcccacagtctggtcctgcttcaccttcccctgacctgagtagtcgccatggcacaggttctcagaggcactgtgactgacttccctggatttgatgagcgggctgatgcagaaactcttcggaaggctatgaaaggcttgggcacagatgaggagagcatcctgactctgttgacatcccgaagtaatgctcagcgccaggaaatctctgcagcttttaagactctgtttggcagggatcttctggatgacctgaaatcagaactaactggaaaatttgaaaaattaattgtggctctgatgaaaccctctcggctttatgatgcttatgaactgaaacatgccttgaagggagctggaacaaatgaaaaagtactgacagaaattattgcttcaaggacacctgaagaactgagagccatcaaacaagtttatgaagaagaatatggctcaagcctggaagatgacgtggtgggggacacttcagggtactaccagcggatgttggtggttctccttcaggctaacagagaccctgatgctggaattgatgaagctcaagttgaacaagatgctcaggctttatttcaggctggagaacttaaatgggggacagatgaagaaaagtttatcaccatctttggaacacgaagtgtgtctcatttgagaaaggtgtttgacaagtacatgactatatcaggatttcaaattgaggaaaccattgtgcgcggtaattccggggtaccgaggctcgaaaaccgtacatcat

SEQ ID NO: 243936 - DNA, 1174 bp, Homo sapiens
  misc_feature (189)..(189): n is a, c, g, or t
gcggccgccgggcccggcgggcgcgacgctgcctcctcacctgcgcaagctaggagggggcggactgagtgccatagcccagcctgggctggagcgcacggtctgacctactagaaacatgagcaaccatcgccgtccccagtgacaacactcctcacatactatctggtggaggtgggggatggggantaatgtgacatattacctctcataggctaacagagaccctgatgctggaattgatgaagctcaagttgaacaagatgctcaggctttatttcaggctggagaacttaaatgggggacagatgaagaaaagtttatcaccatctttggaacacgaagtgtgtctcatttgagaaaggtgtttgacaagtacatgactatatcaggatttcaaattgaggaaaccattgaccgcgagacttctggcaatttagagcaactactccttgctgttgtgaaatctattcgaagtatacctgcctaccttgcagagaccctctattatgctatgaagggagctgggacagatgatcataccctcatcagagtcatggtttccaggagtgagattgatctgtttaacatcaggaaggagtttaggaagaattttgccacctctctttattccatgattaagggagatacatctggggactataagaaagctcttctgctgctctgtggagaagatgactaacgtgtcacggggaagagctccctgctgtgtgcctgcaccaccccactgccttccttcagcacctttagctgcatttgtatgccagtgcttaacacattgccttattcatactagcatgctcatgaccaacacatacacgtcatagaagaaaatagtggtgcttctttctgatctctagtggagatctctttgactgctgtagtactaaagtgtacttaatgttactaagtttaatgcctggccattttccatttatatatattttttaagaggctagagtgcttttagccttttttaaaaactccatttatattacatttgtaaccatgatactttaatcagaagcttagccttgaaattgtgaactcttggaaatgttattagtgaagttcgcaactaaactaaacctgtaaaattatgatgattgtattcaaaagattaatgaaaaataaacatttctgtccccctgaa

SEQ ID NO: 243937 - DNA, 1050 bp, Homo sapiens
tcataggttcgcagggtttgttataatttttatttttatgggctttggtgagggaggtaggtggtagtttgtgtttaatatttttagttggctaacagagaccctgatgctggaattgatgaagctcaagttgaacaagatgctcaggctttatttcaggctggagaacttaaatgggggacagatgaagaaaagtttatcaccatctttggaacacgaagtgtgtctcatttgagaaaggtgtttgacaagtacatgactatatcaggatttcaaattgaggaaaccattgaccgcgagacttctggcaatttagagcaactactccttgctgttgtgaaatctattcgaagtatacctgcctaccttgcagagaccctctattatgctatgaagggagctgggacagatgatcataccctcatcagagtcatggtttccaggagtgagattgatctgtttaacatcaggaaggagtttaggaagaattttgccacctctctttattccatgattaagggagatacatctggggactataagaaagctcttctgctgctctgtggagaagatgactaacgtgtcacggggaagagctccctgctgtgtgcctgcaccaccccactgccttccttcagcacctttagctgcatttgtatgccagtgcttaacacattgccttattcatactagcatgctcatgaccaacacatacacgtcatagaagaaaatagtggtgcttctttctgatctctagtggagatctctttgactgctgtagtactaaagtgtacttaatgttactaagtttaatgcctggccattttccatttatatatattttttaagaggctagagtgcttttagccttttttaaaaactccatttatattacatttgtaaccatgatactttaatcagaagcttagccttgaaattgtgaactcttggaaatgttattagtgaagttcgcaactaaactaaacctgtaaaattatgatgattgtattcaaaagattaatgaaaaataaacatttctgtccccctgaa

SEQ ID NO: 243938 - DNA, 1481 bp, Homo sapiens
tgctgcgtctatctagaggatcccggtttcgcatgttcccggggcgctggcgtttccgttgcttggatcagtctaggtgcagctgccggatccttcagcgtctgcatctcggcgtcgccccgcgtaccgtcgcccggctctccgccgctctcccggggtttcggggcacttgggtcccacagtctggtcctgcttcaccttcccctgacctgagtagtcgccatggcacaggttctcagaggcactgtgactgacttccctggatttgatgagcgggctgatgcagaaactcttcggaaggctatgaaaggcttgggcacagatgaggagagcatcctgactctgttgacatcccgaagtaatgctcagcgccaggaaatctctgcagcttttaagactctgtttggcagggatcttctggatgacctgaaatcagaactaactggaaaatttgaaaaattaattgtggctctgatgaaaccctctcggctttatgatgcttatgaactgaaacatgccttgaagggagctggaacaaatgaaaaagtactgacagaaattattgcttcaaggacacctgaagaactgagagccatcaaacaagtttatgaagaagaatatggctcaagcctggaagatgacgtggtgggggacacttcagggtactaccagcggatgttggtggttctccttcaggctaacagagaccctgatgctggaattgatgaagctcaagttgaacaagatgctcaggctttatttcaggctggagaacttaaatgggggacagatgtgtttgacaagtacatgactatatcaggatttcaaattgaggaaaccattgaccgcgagacttctggcaatttagagcaactactccttgctgttggtttaacatcaggaaggagtttaggaagaattttgccacctctctttattccatgattaagggagatacatctggggactataagaaagctcttctgctgctctgtggagaagatgactaacgtgtcacggggaagagctccctgctgtgtgcctgcaccaccccactgccttccttcagcacctttagctgcatttgtatgccagtgcttaacacattgccttattcatactagcatgctcatgaccaacacatacacgtcatagaagaaaatagtggtgcttctttctgatctctagtggagatctctttgactgctgtagtactaaagtgtacttaatgttactaagtttaatgcctggccattttccatttatatatattttttaagaggctagagtgcttttagccttttttaaaaactccatttatattacatttgtaaccatgatactttaatcagaagcttagccttgaaattgtgaactcttggaaatgttattagtgaagttcgcaactaaactaaacctgtaaaattatgatgattgtattcaaaagattaatgaaaaataaacatttctgtccccctgaa

SEQ ID NO: 243939 - DNA, 687 bp, Homo sapiens
ttcatagcataatagagggtctctgcaaggtagggagctgggacagatgatcataccctcatcagagtcatggtttccaggagtgagattgatctgtttaacatcaggaaggagtttaggaagaattttgccacctctctttattccatgattaagggagatacatctggggactataagaaagctcttctgctgctctgtggagaagatgactaacgtgtcacggggaagagctccctgctgtgtgcctgcaccaccccactgccttccttcagcacctttagctgcatttgtatgccagtgcttaacacattgccttattcatactagcatgctcatgaccaacacatacacgtcatagaagaaaatagtggtgcttctttctgatctctagtggagatctctttgactgctgtagtactaaagtgtacttaatgttactaagtttaatgcctggccattttccatttatatatattttttaagaggctagagtgcttttagccttttttaaaaactccatttatattacatttgtaaccatgatactttaatcagaagcttagccttgaaattgtgaactcttggaaatgttattagtgaagttcgcaactaaactaaacctgtaaaattatgatgattgtattcaaaagattaatgaaaaataaacatttctgtccccctgaa

SEQ ID NO: 243940 - DNA, 870 bp, Homo sapiens
  misc_feature (807)..(807): n is a, c, g, or t
  misc_feature (867)..(868): n is a, c, g, or t
tgctgcgtctatctagaggatcccggtttcgcatgttcccggggcgctggcgtttccgttgcttggatcagtctaggtgcagctgccggatccttcagcgtctgcatctcggcgtcgccccgcgtaccgtcgcccggctctccgccgctctcccggggtttcggggcacttgggtcccacagtctggtcctgcttcaccttcccctgacctgagtagtcgccatggcacaggttctcagaggcactgtgactgacttccctggatttgatgagcgggctgatgcagaaactcttcggaaggctatgaaaggcttgggcacagatgaggagagcatcctgactctgttgacatcccgaagtaatgctcagcgccaggaaatctctgcagcttttaagactctgtttggcagggatcttctggatgacctgaaatcagaactaactggaaaatttgaaaaattaattgtggctctgatgaaaccctctcggctttatgatgcttatgaactgaaacatgccttgaagggagctggaacaaatgaaaaagtactgacagaaattattgcttcaaggacacctgaagaactgagagccatcaaacaagtttatgaagaagaatatggctcaagcctggaagatgacgtggtgggggacacttcagggtactaccagcggatgttggtggttctccttcaggctaacagagaccctgatgctggaattgatgaagctcaagttgaacaagatgctcaggctttaatttcaaggctgggagaaactttaaattggggggaacaagattgaaanaaaaagttttaatcaaccaatccttttggggaacaacgaaagtggtggtccccaattttnnag

SEQ ID NO: 243941 - DNA, 844 bp, Homo sapiens
  misc_feature (772)..(772): n is a, c, g, or t
tgctgcgtctatctagaggatcccggtttcgcatgttcccggggcgctggcgtttccgttgcttggatcagtctaggtgcagctgccggatccttcagcgtctgcatctcggcgtcgccccgcgtaccgtcgcccggctctccgccgctctcccggggtttcggggcacttgggtcccacagtctggtcctgcttcaccttcccctgacctgagtagtcgccatggcacaggttctcagaggcactgtgactgacttccctggatttgatgagcgggctgatgcagaaactcttcggaaggctatgaaaggcttgggcacagatgaggagagcatcctgactctgttgacatcccgaagtaatgctcagcgccaggaaatctctgcagcttttaagactctgtttggcagggatcttctggatgacctgaaatcagaactaactggaaaatttgaaaaattaattgtggctctgatgaaaccctctcggctttatgatgcttatgaactgaaacatgccttgaagggagctggaacaaatgaaaaagtactgacagaaattattgcttcaaggacacctgaagaactgagagccatcaaacaagtttatgaagaagaatatggctcaagcctggaagatgacgtggtgggggacacttcagggtactaccagcggatgttggtggttctccttcaggctaacagagaccctgatgctggaattgatgaagctcaagttgaacaagatgctcaggctttattttaagctgggngaccttaaatgggggacagataaaagccaggcccactatttcaggatttaattggggaccatgaccgcagaa

SEQ ID NO: 243942 - DNA, 754 bp, Homo sapiens
tgctgcgtctatctagaggatcccggtttcgcatgttcccggggcgctggcgtttccgttgcttggatcagtctaggtgcagctgccggatccttcagcgtctgcatctcggcgtcgccccgcgtaccgtcgcccggctctccgccgctctcccggggtttcggggcacttgggtcccacagtctggtcctgcttcaccttcccctgacctgagtagtcgccatggcacaggttctcagaggcactgtgactgacttccctggatttgatgagcgggctgatgcagaaactcttcggaaggctatgaaaggcttggggcaccaccccactgccttccttcagcacctttagctgcatttgtatgccagtgcttaacacattgccttattcatactagcatgctcatgaccaacacatacacgtcatagaagaaaatagtggtgcttctttctgatctctagtggagatctctttgactgctgtagtactaaagtgtacttaatgttactaagtttaatgcctggccattttccatttatatatattttttaagaggctagagtgcttttagccttttttaaaaactccatttatattacatttgtaaccatgatactttaatcagaagcttagccttgaaattgtgaactcttggaaatgttattagtgaagttcgcaactaaactaaacctgtaaaattatgatgattgtattcaaaagattaatgaaaaataaacatttctgtccccctgaa

SEQ ID NO: 243943 - DNA, 815 bp, Homo sapiens
  misc_feature (743)..(743): n is a, c, g, or t
  misc_feature (752)..(752): n is a, c, g, or t
  misc_feature (770)..(770): n is a, c, g, or t
tgctgcgtctatctagaggatcccggtttcgcatgttcccggggcgctggcgtttccgttgcttggatcagtctaggtgcagctgccggatccttcagcgtctgcatctcggcgtcgccccgcgtaccgtcgcccggctctccgccgctctcccggggtttcggggcacttgggtcccacagtctggtcctgcttcaccttcccctgacctgagtagtcgccatggcacaggttctcagaggcactgtgactgacttccctggatttgatgagcgggctgatgcagaaactcttcggaaggctatgaaaggcttgggcacagatgaggagagcatcctgactctgttgacatcccgaagtaatgctcagcgccaggaaatctctgcagcttttaagactctgtttggcagggatcttctggatgacctgaaatcagaactaactggaaaatttgaaaaattaattgtggctctgatgaaaccctctcggctttatgatgcttatgaactgaaacatgccttgaagggagctggaacaaatgaaaaagtactgacagaaattattgcttcaaggacacctgaagaactgagagccatcaaacaagtttatgaagaagaatatggctcaagcctggaagatgacgtggtgggggacacttcagggtactaccagcggatgttggtggttctccttcagctaacagagaccctggatgcctgggaatttggaatggaaaaaaaggnccctttccnaaaaaaggggtttttttnggggaaaaaaaaccccaaaaaggggaaaaattggggcccttttcc

SEQ ID NO: 243944 - DNA, 934 bp, Homo sapiens
tgctgcgtctatctagaggatcccggtttcgcatgttcccggggcgctggcgtttccgttgcttggatcagtctaggtgcagctgccggatccttcagcgtctgcatctcggcgtcgccccgcgtaccgtcgcccggctctccgccgctctcccggggtttcggggcacttgggtcccacagtctggtcctgcttcaccttcccctgacctgagtagtcgccatggcacaggttctcagaggcactgtgactgacttccctggatttgatgagcgggctgatgcagaaactcttcggaaggctatgaaaggcttgggcacagatgaggagagcatcctgactctgttgacatcccgaagtaatgctcagcgccaggaaatctctgcagcttttaagactctgtttggcagggatcttctggatgacctgaaatcagaactaactggaaaatttgaaaaattaattgtggctctgatgaaaccctctcggctttatgatgcttatgaactgaaacatgccttgaagggagctggaacaaatgaaaaagtactgacagaaattattgcttcaaggacacctgaagaactgagagccatcaaacaagtttatgaagaagaatatgggtcaggccggaagataacgggtgggggggcaacctcacgggacaaccgcggaagtgcgggggaccctcagggaacagaacctagtcgggattgggaacccacgttgccgagccagggtaatcaggccgacaccacgggcgccacaaagtctccccttggacccgggtctccaaagggttcacaccatagtactagacaccaccacaccacacacccgcgggacccgacccctagggggcacacacccggatagggcacccacgaaccttgtctaattatattttgaatcagcacactcaacacgaagctgc

SEQ ID NO: 243945 - DNA, 604 bp, Homo sapiens
  misc_feature (601)..(601): n is a, c, g, or t
tgctgcgtctatctagaggatcccggtttcgcatgttcccggggcgctggcgtttccgttgcttggatcagtctaggtgcagctgccggatccttcagcgtctgcatctcggcgtcgccccgcgtaccgtcgcccggctctccgccgctctcccggggtttcggggcacttgggtcccacagtctggtcctgcttcaccttcccctgacctgagtagtcgccatggcacaggttctcagaggcactgtgactgacttccctggatttgatgagcgggctgatgcagaaactcttcggaaggctatgaaaggcttgggcacagatgaggagagcatcctgactctgttgacatcccgaagtaatgctcagcgccaggaaatctctgcagcttttaagactctgtttggcagggatcttctggatgacctgaaatcagaactaactggaaaatttgaaaaattaattgtggctctgatgaaaccctctcggctttatgatgcttatgaactgaaacatgccttgaagggagctggaacaaatgaccaagtttatgaagaagaatatggctcaagcctgggatgacgtggtgggggacacttcnggt

SEQ ID NO: 243946 - DNA, 377 bp, Homo sapiens
atagaagaaaatagtggtgcttctttctgatctctagtggagatctctttgactgctgtagtactaaagtgtacttaatgttactaagtttaatgcctggccattttccatttatatatattttttaagaggctagagtgcttttagccttttttaaaaactccatttatattacatttgtaaccatgatactttaatcagaagcttagccttgaaattgtgaactcttggaaatgttattagtgaagttcgcaactaaactaaacctgtaaaattatgatgattgtattcaaaagattaatgaaaaataaacatttctgtccccctgaattatgtgtacatgtgtgtttagatttattattaaatttatttaacaa

SEQ ID NO: 243947 - DNA, 436 bp, Homo sapiens
aaccatctgtccctgttccttctgatgtttcaggattcagtggcctttgaggatgtggctgtcagcttcacccaggaggagtgggctttgctggatccttcccagaagaatctctacagggatgtgatgcaggaaaccttcaagaacctgacctctgtaggaaaaacatggaaagttcagaacattgaagatgagtacaaaaatcccaggagaaatctaagagatggagtctccctgtttcccaggctggtcattgactgctggatcatgtgattcttctgtctccatctccccaagttctgggattacagacatgagccaccacaattggctactacttttttaaaaaatcaccttgagtcctatggggccaatatgtttttgaaaactgaatttcctgcccagtaaagaacaaagtcagcatcactattccaat

SEQ ID NO: 243948 - DNA, 418 bp, Homo sapiens
  misc_feature (4)..(4): n is a, c, g, or t
  misc_feature (10)..(10): n is a, c, g, or t
  misc_feature (19)..(19): n is a, c, g, or t
  misc_feature (51)..(51): n is a, c, g, or t
tgcnccttgnggctaattngccgcgcccactactacttatgcgagagcccnacagaaggggaagcccattccagcttctacttttgttgctatgcaggttgttgtcgggataccagatttcctactccgagaggccccgggtccctctgccacaacttctgtcgctctgccgcctgcaccgtgacccgcactattcacgggagccctagagaggacaccgggacacccagaagccgggaaatgatgtttcaggattcagtggcctttgaggatgtggctgtcagcttcacccaggaggagtgggctttgctggatccttcccagaagaatctctacagggatgtgatgcaggaaaccttcaagaacctgacctctgtaggtaagaatgacaatattacttcccagtgaattagagaac

SEQ ID NO: 243949 - DNA, 2314 bp, Homo sapiens
  misc_feature (4)..(4): n is a, c, g, or t
  misc_feature (10)..(10): n is a, c, g, or t
  misc_feature (19)..(19): n is a, c, g, or t
  misc_feature (51)..(51): n is a, c, g, or t
tgcnccttgnggctaattngccgcgcccactactacttatgcgagagcccnacagaaggggaagcccattccagcttctacttttgttgctatgcaggttgttgtcgggataccagatttcctactccgagaggccccgggtccctctgccacaacttctgtcgctctgccgcctgcaccgtgacccgcactattcacgggagccctagagaggacaccgggacacccagaagccgggaaatgatgtttcaggattcagtggcctttgaggatgtggctgtcagcttcacccaggaggagtgggctttgctggatccttcccagaagaatctctacagggatgtgatgcaggaaaccttcaagaacctgacctctgtaggaaaaacatggaaagttcagaacattgaagatgagtacaaaaatcccaggagaaatctaagtcttatgagagagaaactctgtgaaagtaaagaaagtcatcactgtggagaaagcttcaaccagattgcagatgacatgctgaacaggaaaactcttcctggaataacaccatgtgaaagcagtgtgtgtggagaagttggcacgggtcattcatctcttaatacgcatatcagagctgacactggacacaagtcatctgagtatcaggaatatggagagaatccatatagaaataaggaatgtaagaaagccttcagttatcttgactcctttcaatcacatgataaagcttgcactaaagagaaaccctatgatggtaaagaatgtacagaaaccttcatttcccattcatgcattcaaagacacagggtaatgcacagtggagatggaccttataaatgtaagttttgtgggaaagccttctattttctcaatttatgtcttatccatgaacgaattcacactggtgtgaaaccatataagtgtaaacaatgtggtaaggcctttactcgttccactacccttccagtacatgaaagaactcacacaggagtgaatgccgatgaatgtaaagaatgtgggaatgcattcagttttcctagtgaaattcgtagacataaaaggtctcacactggagaaaaaccctatgagtgtaagcaatgtgggaaagtcttcatttctttcagttccattcagtatcataagatgactcacactggagagaaaccctatgaatgtaagcagtgtgggaaagcctttagatgtggctcacaccttcaaaagcatggaaggactcacactggagagaaaccctatgaatgtaggcaatgtggtaaagccttcagatgtacctcggaccttcaaaggcatgaaaagacacacactgaggataaaccctatggatgtaagcagtgtgggaaaggctttagatgtgcttcacaacttcaaattcatgaaaggacgcacagtggagagaaaccccatgaatgtaaggaatgtggaaaagtattcaagtatttttcttccttgcgtatacatgaaaggacgcacactggagagaagccccatgaatgtaagcaatgtggaaaagcattcaggtatttctcttccttgcatatacatgaaaggacacacactggagataagccatatgagtgtaaggtatgtggcaaagccttcacttgttccagttccattcgatatcatgaaaggactcacactggagagaaaccctatgaatgtaagcactgtggtaaggcctttatttccaattacattcgatatcatgaaaggactcacactggagagaaaccctatcaatgcaagcaatgtggcaaagcctttattcgtgccagttcatgtcgagaacatgaaagaactcataccattaatagatgagaaatccttttagtggaagcaacgggagaagctttctgttgtcccacttcctttgaaacacaagaaaagagagtggtgaaagaacctctggataactgctttttgaattgagaagagagacttgcgataggacaataaaatctagaagaacttggatggtttcgtaatacaattcacctatagccaatcttgcatgagatttcaaaggcacagaaaaggaaggcatcagtcacatattagaggccccacacagggagagaggtgtgtggctacccgcttccagcccattttcctgattctttggcttgttaatcgagaatatcccccaaatcacttgtctctgttcctcagagttgtaggtctccagatatgtccccagtgctccacattaaagatacatgcccactttgctgtttcttcagaaatgttaaaatgtttaccagagaactaataaatgttgttatggctggaaata

SEQ ID NO: 243950 - DNA, 2438 bp, Homo sapiens
  misc_feature (4)..(4): n is a, c, g, or t
  misc_feature (10)..(10): n is a, c, g, or t
  misc_feature (19)..(19): n is a, c, g, or t
  misc_feature (51)..(51): n is a, c, g, or t
tgcnccttgnggctaattngccgcgcccactactacttatgcgagagcccnacagaaggggaagcccattccagcttctacttttgttgctatgcaggttgttgtcgggataccagatttcctactccgagaggccccgggtccctctgccacaacttctgtcgctctgccgcctgcaccgtgacccgcactattcacgggagccctagagaggacaccgggacacccagaagccgggaaatgatgtttcaggattcagtggcctttgaggatgtggctgtcagcttcacccaggaggagtgggctttgctggatccttcccagaagaatctctacagggatgtgatgcaggaaaccttcaagaacctgacctctgtaggaaaaacatggaaagttcagaacattgaagatgagtacaaaaatcccaggagaaatctaagtcttatgagagagaaactctgtgaaagtaaagaaagtcatcactgtggagaaagcttcaaccagattgcagatgacatgctgaacaggaaaactcttcctggaataacaccatgtgaaagcagtgtgtgtggagaagttggcacgggtcattcatctcttaatacgcatatcagagctgacactggacacaagtcatctgagtatcaggaatatggagagaatccatatagaaataaggaatgtaagaaagccttcagttatcttgactcctttcaatcacatgataaagcttgcactaaagagaaaccctatgatggtaaagaatgtacagaaaccttcatttcccattcatgcattcaaagacacagggtaatgcacagtggagatggaccttataaatgtaagttttgtgggaaagccttctattttctcaatttatgtcttatccatgaacgaattcacactggtgtgaaaccatataagtgtaaacaatgtggtaaggcctttactcgttccactacccttccagtacatgaaagaactcacacaggagtgaatgccgatgaatgtaaagaatgtgggaatgcattcagttttcctagtgaaattcgtagacataaaaggtctcacactggagaaaaaccctatgagtgtaagcaatgtgggaaagtcttcatttctttcagttccattcagtatcataagatgactcacactggagagaaaccctatgaatgtaagcagtgtgggaaagcctttagatgtggctcacaccttcaaaagcatggaaggactcacactggagagaaaccctatgaatgtaggcaatgtggtaaagccttcagatgtacctcggaccttcaaaggcatgaaaagacacacactgaggataaaccctatggatgtaagcagtgtgggaaaggctttagatgtgcttcacaacttcaaattcatgaaaggacgcacagtggagagaaaccccatgaatgtaaggaatgtggaaaagtattcaagtatttttcttccttgcgtatacatgaaaggacgcacactggagagaagccccatgaatgtaagcaatgtggaaaagcattcaggtatttctcttccttgcatatacatgaaaggacacacactggagataagccatatgagtgtaaggtatgtggcaaagccttcacttgttccagttccattcgatatcatgaaaggactcacactggagagaaaccctatgaatgtaagcactgtggtaaggcctttatttccaattacattcgatatcatgaaaggactcacactggagagaaaccctatcaatgcaagcaatgtggcaaagcctttattcgtgccagttcatgtcgagaacatgaaagaactcataccattaatagatgagaaatccttttagtggaagcaacgggagaagctttctgttgtcccacttcctttgaaacacaagaaaagagagtggtgaaagaacctctggataactgctttttgaattgagaagagagacttgcgataggacaataaaatctagaagaacttggatggtttcgtaatacaattcacctatagccaatcttgcatgagatttcaaaggcacagaaaaggaaggcatcagtcacatattagaggccccacacagggagagaggtgtgtggctacccgcttccagcccattttcctgattctttggcttgttaatcgagaatatcccccaaatcacttgtctctgttcctcagagttgtaggtctccagatatgtccccagtgctccacattaaagatacatgcccactttgctgtttcttcagaaatgttaaaatgtttaccagagaactaataaatgttgttatggctggaaatactcactgatgcccaactcttctatagattgagttggtttaagaggtctactttgtattgcaagcattgttgtttctacggattagcgagcctgttcttgattaaaccaactagatgggagcttg

SEQ ID NO: 243951 - DNA, 2147 bp, Homo sapiens
agacagatgagggcagcacaccttgcagggcaacacagagtggggggaacatccaggatgcacattcaaccagcagatgtttcaggattcagtggcctttgaggatgtggctgtcagcttcacccaggaggagtgggctttgctggatccttcccagaagaatctctacagggatgtgatgcaggaaaccttcaagaacctgacctctgtaggaaaaacatggaaagttcagaacattgaagatgagtacaaaaatcccaggagaaatctaagtcttatgagagagaaactctgtgaaagtaaagaaagtcatcactgtggagaaagcttcaaccagattgcagatgacatgctgaacaggaaaactcttcctggaataacaccatgtgaaagcagtgtgtgtggagaagttggcacgggtcattcatctcttaatacgcatatcagagctgacactggacacaagtcatctgagtatcaggaatatggagagaatccatatagaaataaggaatgtaagaaagccttcagttatcttgactcctttcaatcacatgataaagcttgcactaaagagaaaccctatgatggtaaagaatgtacagaaaccttcatttcccattcatgcattcaaagacacagggtaatgcacagtggagatggaccttataaatgtaagttttgtgggaaagccttctattttctcaatttatgtcttatccatgaacgaattcacactggtgtgaaaccatataagtgtaaacaatgtggtaaggcctttactcgttccactacccttccagtacatgaaagaactcacacaggagtgaatgccgatgaatgtaaagaatgtgggaatgcattcagttttcctagtgaaattcgtagacataaaaggtctcacactggagaaaaaccctatgagtgtaagcaatgtgggaaagtcttcatttctttcagttccattcagtatcataagatgactcacactggagagaaaccctatgaatgtaagcagtgtgggaaagcctttagatgtggctcacaccttcaaaagcatggaaggactcacactggagagaaaccctatgaatgtaggcaatgtggtaaagccttcagatgtacctcggaccttcaaaggcatgaaaagacacacactgaggataaaccctatggatgtaagcagtgtgggaaaggctttagatgtgcttcacaacttcaaattcatgaaaggacgcacagtggagagaaaccccatgaatgtaaggaatgtggaaaagtattcaagtatttttcttccttgcgtatacatgaaaggacgcacactggagagaagccccatgaatgtaagcaatgtggaaaagcattcaggtatttctcttccttgcatatacatgaaaggacacacactggagataagccatatgagtgtaaggtatgtggcaaagccttcacttgttccagttccattcgatatcatgaaaggactcacactggagagaaaccctatgaatgtaagcactgtggtaaggcctttatttccaattacattcgatatcatgaaaggactcacactggagagaaaccctatcaatgcaagcaatgtggcaaagcctttattcgtgccagttcatgtcgagaacatgaaagaactcataccattaatagatgagaaatccttttagtggaagcaacgggagaagctttctgttgtcccacttcctttgaaacacaagaaaagagagtggtgaaagaacctctggataactgctttttgaattgagaagagagacttgcgataggacaataaaatctagaagaacttggatggtttcgtaatacaattcacctatagccaatcttgcatgagatttcaaaggcacagaaaaggaaggcatcagtcacatattagaggccccacacagggagagaggtgtgtggctacccgcttccagcccattttcctgattctttggcttgttaatcgagaatatcccccaaatcacttgtctctgttcctcagagttgtaggtctccagatatgtccccagtgctccacattaaagatacatgcccactttgctgtttcttcagaaatgttaaaatgtttaccagagaactaataaatgttgttatggctggaaata

SEQ ID NO: 243952 - DNA, 2726 bp, Homo sapiens
  misc_feature (4)..(4): n is a, c, g, or t
  misc_feature (10)..(10): n is a, c, g, or t
  misc_feature (19)..(19): n is a, c, g, or t
  misc_feature (51)..(51): n is a, c, g, or t
tgcnccttgnggctaattngccgcgcccactactacttatgcgagagcccnacagaaggggaagcccattccagcttctacttttgttgctatgcaggttgttgtcgggataccagatttcctactccgagaggccccgggtccctctgccacaacttctgtcgctctgccgcctgcaccgtgacccgcactattcacgggagccctagagaggacaccgggacacccagaagccgggaaatgatgtttcaggattcagtggcctttgaggatgtggctgtcagcttcacccaggaggagtgggctttgctggatccttcccagaagaatctctacagggatgtgatgcaggaaaccttcaagaacctgacctctgtaggaaaaacatggaaagttcagaacattgaagatgagtacaaaaatcccaggagaaatctaagtcttatgagagagaaactctgtgaaagtaaagaaagtcatcactgtggagaaagcttcaaccagattgcagatgacatgctgaacaggaaaactcttcctggaataacaccatgtgaaagcagtgtgtgtggagaagttggcacgggtcattcatctcttaatacgcatatcagagctgacactggacacaagtcatctgagtatcaggaatatggagagaatccatatagaaataaggaatgtaagaaagccttcagttatcttgactcctttcaatcacatgataaagcttgcactaaagagaaaccctatgatggtaaagaatgtacagaaaccttcatttcccattcatgcattcaaagacacagggtaatgcacagtggagatggaccttataaatgtaagttttgtgggaaagccttctattttctcaatttatgtcttatccatgaacgaattcacactggtgtgaaaccatataagtgtaaacaatgtggtaaggcctttactcgttccactacccttccagtacatgaaagaactcacacaggagtgaatgccgatgaatgtaaagaatgtgggaatgcattcagttttcctagtgaaattcgtagacataaaaggtctcacactggagaaaaaccctatgagtgtaagcaatgtgggaaagtcttcatttctttcagttccattcagtatcataagatgactcacactggagagaaaccctatgaatgtaagcagtgtgggaaagcctttagatgtggctcacaccttcaaaagcatggaaggactcacactggagagaaaccctatgaatgtaggcaatgtggtaaagccttcagatgtacctcggaccttcaaaggcatgaaaagacacacactgaggataaaccctatggatgtaagcagtgtgggaaaggctttagatgtgcttcacaacttcaaattcatgaaaggacgcacagtggagagaaaccccatgaatgtaaggaatgtggaaaagtattcaagtatttttcttccttgcgtatacatgaaaggacgcacactggagagaagccccatgaatgtaagcaatgtggaaaagcattcaggtatttctcttccttgcatatacatgaaaggacacacactggagataagccatatgagtgtaaggtatgtggcaaagccttcacttgttccagttccattcgatatcatgaaaggactcacactggagagaaaccctatgaatgtaagcactgtggtaaggcctttatttccaattacattcgatatcatgaaaggactcacactggagagaaaccctatcaatgcaagcaatgtggcaaagcctttattcgtgccagttcatgtcgagaacatgaaagaactcataccattaatagatgagaaatccttttagtggaagcaacgggagaagctttctgttgtcccacttcctttgaaacacaagaaaagagagtggtgaaagaacctctggataactgctttttgaattgagaagagagacttgcgataggacaataaaatctagaagaacttggatggtttcgtaatacaattcacctatagccaatcttgcatgagatttcaaaggcacagaaaaggaaggcatcagtcacatattagaggccccacacagggagagaggtgtgtggctacccgcttccagcccattttcctgattctttggcttgttaatcgagaatatcccccaaatcacttgtctctgttcctcagagttgtaggtctccagatatgtccccagtgctccacattaaagatacatgcccactttgctgtttcttcagaaatgttaaaatgtttaccagagaactaataaatgttgttatggctggaaataaaaaaaaaaaaaaaaaaaaaaaaaaaaaaaaaaaaaaaaaaaaaaaaaaaaaaaaaaaaaaaaaaaaaaaaaaaaaaaaaaaaaagaaaagaaagaaaaaaaaagaaaagaaaaaagaataaaaaggagagtaaaaaaatggtgaaaagtactggaatggaacaacaagaaaacgaaacagaaagacaaaagagaagggagcccgggacaccataaagcaaaacaaaacagagaggaaaacagaagacacgccaacccacaccgacacgagagacgcggcagagaccagacgagaacaaaaagagaaaacgcgaggggcgagctaggaaaagagtaacacaaagcagaaaaataaagcgaggacaaaagaagagaaaacacgcacgggaaagtgaaacagaaacaaaagaaa

SEQ ID NO: 243953 - DNA, 655 bp, Homo sapiens
  misc_feature (4)..(4): n is a, c, g, or t
  misc_feature (10)..(10): n is a, c, g, or t
  misc_feature (19)..(19): n is a, c, g, or t
  misc_feature (51)..(51): n is a, c, g, or t
tgcnccttgnggctaattngccgcgcccactactacttatgcgagagcccnacagaaggggaagcccattccagcttctacttttgttgctatgcaggttgttgtcgggataccagatttcctactccgagaggccccgggtccctctgccacaacttctgtcgctctgccgcctgcaccgtgacccgcactattcacgggagccctagagaggacaccgggacacccagaagccgggaaatgatgtttcaggattcagtggcctttgaggatgtggctgtcagcttcacccaggaggagtgggctttgctggatccttcccagaagaatctctacagggatgtgatgcaggaaaccttcaagaacctgacctctgtaggaaaaacatggaaagttcagaacattgaagatgagtacaaaaatcccaggagaaatctaagagatggagtctccctgtttcccaggctggtcattgactgctggatcatgtgattcttctgtctccatctccccaagttctgggattacagacatgagccaccacaattggctactacttttttaaaaaatcaccttgagtcctatggggccaatatgtttttgaaaactgaatttcctgcccagtaaagaacaaagtcagcatcactattccaat

SEQ ID NO: 243954 - DNA, 279 bp, Homo sapiens
cacaataaatatgaagtaaatatatatgtatataactattttctcttctgagagagccatatgtttgctgccagttgatgtatgatttgggggcatggtggaaaaatacttgttttagtgctaatatatgtttgcacaacatgagtctttcagtcattgaatgtttgaaactaggtttccttaaaattaatttgaattacatgtgattactctttctttactgaagaattctactccttttttatttgtaaaaatagaagatcattgtggtaaagtttg

SEQ ID NO: 243955 - DNA, 636 bp, Homo sapiens
  misc_feature (1)..(1): n is a, c, g, or t
naaattgacacagatccccccgtggaaaaattataccggtgtttcctcgttgaaatattcaaggcggtatttgggattaataccgggcgcccaaaaaattaaaaagtcctctaccaattgtagcgggcccccattttcccccagaacacacctatgcccttgtttccgccaagctccaagttttggacgagctttttttttttttctcgggaagcgcgccattgttttggtcccggaaattcgcccattatggccggggtgcacacaaatcacttacatgtaggttaatacctaattatataaagcaaacattaatttctaaaaaataaaatatgtaacttttttataaactcagaatacagaatggttttttaaatgaaatataaaattacagaacttgagtaaaacagttgataaattggtctacattagtattttaaaacatcatgttctactgagaccctgtctctaccaaaaatttagaaattagccaggaatcgtagaacacatctgtagtcctggctactcaaaaggctgaaaagggaaaggttgcttgagcccaggagtttgaggctgcagtgagctataatcacaccattgcactctgcctgggtgacagagagagagtctatctct

SEQ ID NO: 243956 - DNA, 737 bp, Homo sapiens
gcagattcgcgcaaacccggaagcggatcgcatggagtgatggtcccaccgcagcggtgagttttgctctgtgttgtgttaagtctgcgcttcccaagtccccggcgcttctgtacctgggacgtggggtccccatagacctggaaattctcacccgtgttccttcacctagagcaaatttagacgtcctcgtcagagtccaggggtcgcttccttttgggtttaaagtcgccctgaggatggtcccttcccgaatctttctgctatagggcaatgtatacacttcccatcgcgtagtttccctgctcaaaacctttttctgactcctcccgacccgcactttttaaagtccttaccgcgaggcggattcccgcccttggcgcctcccagtcttgtcttaaggcgccgtcgccccccacctccctcctcgttccaggcccttatgctccccaggtctccccaccgcagtcaccgcttaccctgagcccgcgttggggaggtgcccggggctgtcctatgacaccgggtgttcttgcctgccctgcaccagcccctggaaaatgcgctcctccgggatgcaggcgtcttactccaaagccctcctgtgattgtgttggccaaagggatcaggagactgagagagagagcagtagaaaacctgagacagagaaaagaagaatgagaaagaccataacagatggcaaagtagaggatgagtgagggatttgccaagagag

SEQ ID NO: 243957 - DNA, 376 bp, Homo sapiens
gtcctccccctctctctcctcccctctcctcccctcggccctatcctcccctcccctctcctctcttccctcccttcctcccttctttccttcctctatcctcccttctctcgctctctctctagctcattttttttttcttctgcccggaagaaatactggcattctccaaggctcttttctcagccttcttttttaggttcttattctaaaatctctcttcagtgctctctcattgatttccaaggatttctttataagtggactgagattgagtactgggtccccaaggctgagcacaggtccctcctatccccaaggaggtgctctgaacccactccccatggctgtggatggctccccaaccttctgcatg

SEQ ID NO: 243958 - DNA, 357 bp, Homo sapiens
tttactcccctaagtatcccttctactctatttactcatccttccctctctccctgagaacccctggcaactactgaccattttactgactgtccccaaagttttgcctttttaaaaaatgttatatagttagaattatatatgtagctttttctggttgacttatttcactttgcaatacgcatttaagtttgttccatgtctgtttgtgacttggtagcttatttctttttatcactgaataatattccattttgtggtactatagtttgttcattcacctactgaagtacatcttggttgctatcaagttttggcaattttgaataaagctgctataaaagtttatgtgtgtaa

SEQ ID NO: 243959 - DNA, 996 bp, Homo sapiens
cgagacttcgtttcataaaaacaaagaaacaaacaaacagaaaaaaacaacaaaacaaacaaacagaaaaaaccaacaaaacaaaaaacaagaggcaagaagttcagtgtgcagaatctctgagaaaaacccatggttgttaaccccaggtctgccccttttgagcagggtgacattaggcaactgatttgatttctcttagatgaaatttcctcactccctgcctattcaaccacagtactgaggacatttggagctggattatctctctggtggcagctgtcctgggcattttagggtgtttactagcatccctggcctccccccactagataccagtagcactcccaccccacactggttgcaacaaccagaaatgtctccaagacacttccacgtgacccccggggggtcagaatttctccccttccccctgtgttttcctatggaggtggaacgtgtttatttctttgctcaccgttttgcaatctctcttcccccgccacaaggcagggactcttctatctccgtcaccatcccatcctcccacagtggagacagctctggggactctcctgagcagcagattcttgggtgccacattctgttccattcctggggaatttatctctttactgagtgatgggtacatgagaactttctgtgtcacccttgcatcttttctgttttgtttttacaaaagaaaaaaaagaaggccgggtgcggtggcttacgcctgtaatcccagcactttgggaggccaaggcgggtggatcacgaggtcaggagatcgagaccatcctggctaacacggtgaaaccccgtctctactaaaaatacaaaaaattagccaggtgtggtggcgggctcctgtagtcccacctacttgggaggctgaggcaggagaatggcgtgaacctgggaggcggagcttgcggtgagccaagatcgtgcccactgcactccagcctggcagacagagcgagactccgtctc

SEQ ID NO: 243960 - DNA, 263 bp, Homo sapiens
gccccgcagctgcgccccccgtcagggcatcgaccgctacggggtcccgggcccggccgaaggcgggcagtcgcgggtggcgcgacgctgtgcagacgcccgcctctagctcctcccggccagtggcgcgcgctgcgcctcacagcggttgcgggggcctgggagctcggcggccgggctctgccgctcggactgcagttgcggcatcctccccgccccccgcgacctccgaaaagaaaataaagaaaaaaagagaaaaaaaa

SEQ ID NO: 243961 - DNA, 342 bp, Homo sapiens
agaattcctctgggcatatagcttttgctatttaattatttccttaagataaattcccagccgggcgcagtggctcacgcctgtaatcccagcactttgggagatcaaggcaggcagatcacgaggtcaggagatcgagaccatcgtggctcacacagtgaaaccccgtgtctactaaaaatacaaaaaattagccgggcgtggtggcggtcgcctgtagtcccagctactcgggaggctgaggcaggagaatggcgtgaacccgggaggcggagcttgcagtgagcctagatcgcgccactggcactccagcctgggcgacagagcaagactctgtctcaa

SEQ ID NO: 243962 - DNA, 639 bp, Homo sapiens
tactgacttatttgtggtgtcagaaccccattttcaagaacttcccattctgtttgatgggaacgagggcactttttatagactccaactcacctttaaactttgtgaaatctctgtttgtaaaccacaaaatttatcagcacaactgagtttcccattcctagcttttgtgaacataaggatgacataagaatttcctcttacaatgcctctcacttccacttccccaatcagttcctccccgtgaatcggaagtaagttgagaatagcagctccacccacagctttctgatccttctgagggctgaatctgcccacaagttaggtcaagtgtgtgtcagaaatggtttttatcacagagacactatgagaatatgtgcggacagctgagtctgccacctgtctttctgcctgatttctgcagcaggaatgaatcactcacttcctgcgttgatggtggctgtggcatcctgtcatcacagtagcccttttattctattcctccattcatctccattatcttctaatatgaaaaccattatgtaggtgcatagatttatttgtccttgacttaacagagaccagttaacacttttcaagattttagacttgaccaagcttatcgatgcggcccgaatt

SEQ ID NO: 243963 - DNA, 426 bp, Homo sapiens
agttccccaaattaatacttttataatttcttacgcctgtctttactgcaatctctgaatataaattgtgaagatttcatggacacttatcacttccccagtcaatactcttgtgatttcctatgcctgtctttgctttaacctcttaattccgtcattttcataagctgaggacgtatgtcaccttaggaccctgtgatgattgcattaactgcacaaattgtttaaacaatttgaaatctgggcatcttgaaaaaagaacagggtaagagcgatgttcagggaacaagggaggtaaccttaaagtctggctgcctgtgggctgggtgggacagagccatatttctcttattactgaaaacgggtaagagaaatatcgctgaattctttccccagtgaggaatattaataattaacagccctggg

SEQ ID NO: 243964 - DNA, 434 bp, Homo sapiens
ccgtttacaaagtactttcacttatgttattactttatgtaaactactcaataatcatataaggtagaaggagatagatatctccttgttgtagacaaggaatctaaagttctgagagggtagttgactgattaatcaagtaagaagctagaggggccaacacgtgagcctcgcacttcagttctggactgtactctagctgcaacaacctcttcctctcaaaacaggtgctggagttttccacaggactctgtgtgttgggcacttacccataggaccagcccctttcagtggtctacaataactattggccgggcgcggtggctcacacctgtaatcccagcactttgggaggccgaggcgggcggatccacgaggtcaggagatcgagaccatcctggctaacacggtgaaaccccgtctctactaaaaaa

SEQ ID NO: 243965 - DNA, 490 bp, Homo sapiens
gtgtacttatgaatgattaaaaggtaaatgttatgatatgtatattttacacattaaaattttttttaaaagaatacatgttacaacatggataaaccttgaaaacattatgctaaatgaaaaaagccagacacaaaaagccacatattatatgactgcatttacatgaaatgtctagaacctgcaaagccacagagctggaaggtgaatggatgcttcccagatgctggaggaggggagaactgaaaatatttttgaactagataggggtagtggttgcacaacactgtgaatatatgaaaagccactgaagtgtacgtacactttaaaatggtaaattttgtgttatgtgaatttcatctaaattaaaaataatgtaatacatcgaactcttgtagagcgtttctcagtttccttctaacgccatgtccgtgattgtcttacatggtccttctctttgctcctctctgcttggtgtatgtgagtctat

SEQ ID NO: 243966 - DNA, 537 bp, Homo sapiens
agaaattggagcatgtcatcgtaataccattgttgacattcaagtacacgcagacctcattttattgtatttcacagtgtggtgttataatatgtattatgtttctgtttgcaggtcctggttcataactcccatatcccttgttacagttttttggtttaatggtgggtatgttaggccttaggggcaggcctcagaaaacagaatgtctctgatctccttctgctctccttttacctgccccaaggtagggctctaatcaccaccccctacctttctgactgtaggtcttatgagcaatcagagggtccttcccccctctaccctggaggaaggaatgctgatgtcgcggagcttccacaaaaacctaagaggactgggttagcagagcttccaaatagctgaacaaatggaggttccaggagagtcatgccccagggaggtcaaagaagcttcccctccttccttcatagatcgctctacgtatctcttcatctgtttcctttgcaacatgccttgtaataaatcagtaaatat

SEQ ID NO: 243967 - DNA, 366 bp, Homo sapiens
gctcttgggggttgtggggcaaaactgccaccagtcaaaaaccactggctaaagtatatggaaggagtagtgcactgaggtgtccaaagccaagttacaaggtaggaaagataaatatctttgaggaagaccaagagcaagggaagagggacttaactatagaagtctgtacatctatcccccaggggtctccaagagcagtggttctcaccccagagcatcagcatctcctgggaacttgtcaaaaatgcaaattctcgagcctctcccaagacctactgaatcagaaactctggagggtggggcccagccctctgttgtcttgacaagccctctgggggattctgaagctccctgaagtttgag

SEQ ID NO: 243968 - DNA, 598 bp, Homo sapiens
tggagtgtcagtctatcacccaggctggagtgcagtggtgtgatctcggttcactgcaatctccacctcccgggttcaagcaatcctcccacctcagcctcccaggtagctaggactacaggcttgtgctaccacgcctggctaatttgttttgtattttcagtagagatggcgtttcaccatgttggccaggctggtcttgaactcctggtctcaagtgatccgcccacctcagcctctgaaagtgctgggattacaggtgttagccactgcgcccggtcaaaatcagctcttctaggagtctaacgcaactcacacataaacaaacacacacgcattcttctaaataaaaaatctctcattcctcatcatgttccctttaattctaacatctacaaaagtcctgaaaatgaacttaaaaatagttaagaagtcaattttacctctttgccaagaggtaaaatcagacggctcaaacagctgcattgcatggcaggttccacaagatgcaatgcaccgtatataaaacaccacacccaagtacatgactccacccataagaattctacaagataacccctatacatcattgttgttt

SEQ ID NO: 243969 - DNA, 607 bp, Homo sapiens
cacgaaacacagcatggccttagcgagtcgcacaggtttgacgtcagcggttgtcatggtaacaggggcaaagatgctgatgccagtgtcagtcaggactgagctcctccctccagtctgattcctgccagtgcttaaggatgtatggaggggagaagcgtcttccaagcaaaatcttcatcctctgttctctatcacgtgcagtgcgtcaccagatcctcgccagtgctgagggtggggatacgggggaatctctgacttgcaagattaaattatcattggagagggaacgtgtcagccttgttcaccgcagtgtcgccaatgctgctagctcagttcctgcccctgcccaccattgggagaatcatgagccaactctctctgtctctcctctctctctctctgtctcgtcccttggccttagctgtcaccaatacactgactctgactcccaaatctttccctgagacctgttttcctgagtctcatacgcagttcctcctccacactaggcagctccactcagtgttctgatatcaagcttgagattctccttccgcctagaaacctagaattctccagctaataacctccgttgtcttcaccc

SEQ ID NO: 243970 - DNA, 828 bp, Homo sapiens
aaacaggttgctggttgcaaggtagttttccaacctctacgtgattctcagactttaggttgcatcataatcacctggagggcttgttcaaacgcagattgctgggccccacccccagaatttttgattcagccagtctggggtggggctgatatttgtatttctaccaactttccaggtgaggctggctgatgatggtctggaaaccactttgaaaacctctgaagcttttctcaactcccttctttgtgtacctaaaacactttatccctactgtagatgtagcattagcgtgttatattagtttagtgattggtgtgtgggtctctgggagcctttctgaatcacctccctagcctagtgcctgacaatagcaatttgctccccattcattgactgaactgaaaccggagggtcatggtcatcatcattgttccaagccatagatagaagatgaagtcaccacccctgatctcagagctcatcagagtagagcttgggctggaccctgcccttctctgcagtgagcagttttctctgtggagctctgtgcaacctggagccagtcctgcctggggtaagaggaaaaaagactccttccccccagccccacagcctgtacgcaaacacaccgggagacatgacctgctcagaggagacctggaaccaagggaataaaatgagagtgggttgggggcttggctgttagttattttttgcttgtaagtggacaatttgtggtgtggtgtgtgaatttggggtcttaaatccagatagctgtttgctgtggacagcccctgtttttgaattacagggcatttcaagtga

SEQ ID NO: 243971 - DNA, 433 bp, Homo sapiens
accaaaatcaatgtggggagcaaggatactgttcttgtgagtttcagaatgtgcagcatgtgcaggctgagatccacttgaagaagacatttataggtgaatcactagacatgctgaaaatgtgttcaaatggcaaaacaaaatggggaacatgcacaaatatacggacttgaggccaggactgcttgctcctgcagaactcattccctgggatttagcagcagtcttaaagttaggtccataactggattgggatgtgatcattgatactgatagccaccattttttcaatgcctgatgagttgattttctacattaatgctaatccttgaaacaactgtgtgaagttaacattatcctgtttttaagtaggataactgacttgcccaaggttgttcagcgaataagcagtacagctgggattcaaacttgg

SEQ ID NO: 243972 - DNA, 475 bp, Homo sapiens
tgtgatgaagggtctgggaaactaaatgcattcaaccgggatcactgcggtcctccttggttcatccatgtatgtatttactccatatttacttcatccatgtaggaaaatatgttccaggttacctgattagacacttagaatagactggtgaagaaacatagtgggtaaacatgatgacagaacagctgttgagggccgggtgcggtggatcacgcctgtaatcccagcactttgggaggccgaggcaggcaggtcacaaggtcaggagttcgagaccagcctggccaatatggtaaaaccccatctctactaaaaatataaaaattagccaggcgtgctggcgggtgcctgtagtcccagctactcaggaggctgaagcaggagaatagcttgaacccgggaagcagaggttgcagtgagccaagatcgtgccactgcactccagcctgggtgacagagcgagactccaggg

SEQ ID NO: 243973 - DNA, 348 bp, Homo sapiens
gactttcatcatgggtgatctctctcacttgttccaagggaagtcaagtgtatgttgtaaagtaccctctggataggcctacatggcaaggatttgaagaaagcctctggttagcagctagtgaggaactgagatgctgtttccaatagcctgcaaagaactgaatcttgccaacaagcatgtgagtgggcttagaagcagaatcaaactcagtcatgcttcatataagaccacagcttccaacaattccccaactgcaacttcatgagaaaccttgatccagaagctcccagctataccaacccccaatttctaaccaacagaaaatgtgaaataacttgtttgatg

SEQ ID NO: 243974 - DNA, 423 bp, Homo sapiens
cgtttaagtgatttaacatgtgtagagtgcttagactgtggtgtgtgtgtgttaaataaaaactgtccatgtcgcaggccccccactttccacattcgtctttctctttccgtgtaattacctttaacagaagtagaaagaataaggccactttgttcttccaggtaactcaaagtcattctgattttgcagcttctgatatcatttgtttatgtattaagagaaataggtagtagtatgatttttctcaaccctatttcacgtcttacataaaaactctaagaagccagtataggccaggcgcagtggctcacacctgtaaccccagcactttgggaggccgaggccggtggatcacgaggtcaggagatcgagaccatcctggctaacatgttgaaaccccgtctctactaaaaatacaaa

SEQ ID NO: 243975 - DNA, 590 bp, Homo sapiens
cacacttgtgttggcagctctggggcaggcagctttgtggttgatggtgagggtagggagagatgaagtgcttgagacacagagtttctgctgcaggaactgggttgttaggaaggcactggggctgcaggttacgtgtttggacctatcagtcatttgactgtgggagagtaacttgcttaagccccagaatcatcttctgtgaaatagggatattaacaatgcttaatgagtaggtttttgaacagagtggataagtcaacaaaaggttaacatcctacctggtgtgtgggaagcactccataaacagcagctgctgtgtttctatctctgttattacttcccacataaagcacaggtgatgaccaagagggtgtcaacctatgtcaactttgttatccttccgttggagtctgtaattgaggctgatgtatattaacatggaaataaggtctcaggaagcaagagggtgcagctgacaggcagcgctgcaggcagacagctcataattttctcctcctttctgggtgggtcacagttgggactagtctctggattaaaaacagtgctaatgccctcaatgtctgcat

SEQ ID NO: 243976 - DNA, 480 bp, Homo sapiens
taaaagatacgtctgtttctgtttggcatggatattcagcttcattatgtaaagaaatttttttacagtttcacatgcatgatatttatttgataaaaattttaggtatattcaaaagtcaccattatttcttttatgaaacataggtgcagaatttttattataaaggtatattttaaaacagaatagattacacatattacatgcattttgtgtacatatgtctataggaatcaatttacaattttccaaaaacatcttgctttagtttgtggatattcactgctttcattctatttttaattaaatagttttgctattttctctatgcatgtttgagaaaccaaaacagttaagcacaagcattttgatttattgatatataataacaaatgtgtgattgaatcccatgactaagagtacattaatatatttcttgtgcacatgatcagtttatctttgttattccatatgagttaa

SEQ ID NO: 243977 - DNA, 451 bp, Homo sapiens
accaagcctcctctgtcccgctaaccttctcagctttcatggtgaaccaagcctcctctgtcccgctaaccattctcagctttcatggtgaaccaagcctcctctgtcccactaaccttctcagctttcatagtaaaccaagccttctctgtctgatgggccctttcttagatggtgttaacacatctgacaaagttaatcctatctcatgctgtccagtgtgccatcctgcctcttgctggtaactttgtatttctctaatcaatagtttgatgctaagtttcaggaggcattctttttctcctttctaaagtgtggaaatcccctatgcctttctgttgagtcctctaaatttcttgtgtattcatgcatatttcgttttcggtagcaaggctatctagatttttatcagaatttaaagcagtctgtcaggatcttacctgccaccaaa

SEQ ID NO: 243978 - DNA, 201 bp, Homo sapiens
tttttgtctaaatgtgttcactatattacacatcaaaatgcaaataactgatttaattatccaacattctggattgcctataacattcttcctaagattcaactgtagatattactgatccaaattatgaacaagaattattctaaaaaatcactgaggaaactaaaaagcgtaacaaaatgacaaatttatgtattaaaa

SEQ ID NO: 243979 - DNA, 596 bp, Homo sapiens
tctgggatacatgggcagaacacacaggtttgttacataggtatacatgtgccatggtggtttgctgcacctattaacccaatttttatatttttagtagagacggggtttcaccatgttggccaggctggtcttgaacttctggcctcaagtgatctgcccgatttggctgcgttttgtcaatatcatccacaacatttccataaccacaaacaccacttctaaaacaagagctagaaagtcaagtaaaagggaaatataagaggaatgcggacaaatttgttactactagtaaaataaaaatgtccagcacatgtgattttgatgatgaaatagtagcatcgccttcatgtattagagagagcatgtaaattacttgctttgcggcacagacaggtctgaaatcgtctgcttagaagtggtggtattttttaatagagtacagcaaaataaaaaactgctcttaaaatccatcaatggagttccccaaatgtaaacataattatagaatccctctaaaaccggagttacacattacttttttgattttccagtgtacagagtagaaagtaagttttcaatgaaggaataaatac

SEQ ID NO: 243980 - DNA, 502 bp, Homo sapiens
catcttgcccagactggtcttgaactcctgggctcaagcagttttcccacctcagccttgctaaatgctgggattaaattttaataattaaggaaacctgaatatgggcaaagctttcaataaacaattaggatttagtcacgttcccttttacagaatacttaagtacctatagagatagtcacatagctgttttgttttctagattagaaaacctacagttttatgttctgatatctttattctgatctctttagctgtttttaataaagcaaacttaaaaaaacacaaatcttatttgtaatgtaactgtgaactagaacatttgtaatagagaaaaattgaaaataatctaaatgtttatcagcagaaaaaggggtaaataaattataatatggtcatacaatgtgatgctatattgcagtttaaatgaatcaactagagctatacatgtcaacatggatacatttgttggccaaagtgttcattccccacctggaaa

SEQ ID NO: 243981 - DNA, 448 bp, Homo sapiens
ccaggctggtcttgaactcctgggctcaagagatcttcctgcctcagcctcacagactgctgggattacaggcatgagccaccacacccagcctgggtgacagagcgagactgtctcaaaaaaaaaaaacaaaaatattcaactatgagctggggaaaaaagcttcagcggtcactgaaagtgcttacaggtacagctagtatggggatggaatatgccccattagccaggccaacagatctcatataggagaatctgttttatgtttgttggacagtgggtgagttatcgcagagttatgccttttttttctgtcactattttatgtcccttatcactgtgcctttaacctactgaaatgcagttgaggccgggtgcggtggctcacaccaagatggcgccactacactccagcctgggcaacagagggagactccatctcaaaaaa

SEQ ID NO: 243982 - DNA, 542 bp, Homo sapiens
tgggaagtgtgttgggcagaataatgactcccaaagatgttcatatcctaatcctcagaacctgtaagtatgttaccttaaatggcaaaaagggatgtggcagatgtgattaaattaaggctcttggaatgaggagtttatcttggtttatctgggtgggccccatgtattcttgagggtccttatgaggcagcagcaggagagtcagagtaggaagagatgtgataatggaagtagacgggaggctcgggggagaaagagacaatgagagagagagacttgaagaagctgtctggctggcttgaaggtaaaggaagggccaccagccaaggaatgcaggccatccctagaaaccagaatagacaaggaaacagatttccccctagagcctccagaaggaacacagacctgctgatgccccgatgagggaccctttcaaacatctaacctgcagaactgtaagataataaattgggttgtcttaagccaccatgtctgtggtcatttgttagagcagcaataggaaaccaacacaggaagca

SEQ ID NO: 243983 - DNA, 451 bp, Homo sapiens
tcaaatatgccgaccgggccaaggagatcaggctctcggtgcgtgccagccagggccggcttgggcgtggggcagctccagccggggagcaggaaagggtgggacccaggcagctccaatagatccctgggccaagtgtccccaaggcagaggaaggaagttcctctggcctggacatggtggctcatgcctgtaatcccagcactttgggagaccaaggtgggcagatcaccagaggtcaggagttcgagaccagcctgggcagcatgatgaaaccccatctctactaaaaatacaaaaatctgctgggcatggtggtgggcacctgtaatcccagctactctggaggctgaggcagaagaatcgcttgaacccaggagatgaaggttgcagtgagctgagataatgccactgcactccagcctgggcgacagagctagactctgtctca

SEQ ID NO: 243984 - DNA, 868 bp, Homo sapiens
gttctgccatatgctaactattgcttttagacttgttttctgtaatgagcattctttaaaatgtcttgtatgttgaaaacctagatgagacttgttacctagctctgttttcttctcattcttctgtttgctaatatttttgcacctatgggggttttcttgtttgtttccgttgttggttttttggtggtttttgccattttaggatatgttctttagcttttgcctccctcataatgtattaggccatcttgcccccttcccagtctttttctctgaagatcactgtgatgttcttacatccagaggaaattacactacttcttttgtacgaaaaacaaattaggattgtaaatccagtgttacctgctctttaacagaaaaatgttcaaagtctaaagagcgttcctgtttcctttcttgtctaagtttttttctttttgcacttatttatgaaatagtcttgcattacttaattaagtatggatattgtgagttccaaatatatttgagcttttattggatcttggatgtattttctttaagcatgaggctggttttgaagatgtatgtcacattttgtgataggttactgattcatttaaaatggaacttctggcactggcaaaacccaagaatttagagtagacgaactagatggaaactacctggcatcctatgtgacttccttcttccaccgatgtctatagtatattctgagctggggcacaacttgtgggacttggtgtgatttttctctgatgaaactaagtagggactacattgctaccttaactatctgaaagctatggtttcattagctgttgaaagagtttattatttatgggcttcgtagctggaaaaatat

SEQ ID NO: 243985 - DNA, 774 bp, Homo sapiens
tgtttccctttgtctgaactccctcactggcttagaatccattgtaatgattacattgtaatcctgttcttgctaacatctccaactctaccaaaccatctggcaagacctcaagccccaggctggagtgcagtggtgcaatctcagctcactgcaacctccgcctcccgggttcaagcgattctccttcctcagcctcccaagtagctgggactacaggctagcaccaccatgcccagctaatttttgtattttcagtagagacggagtttcaccatgttggccaggatggtctcaatctcttgacatcgtgatctgcccgcctgagcctcccaaagtgctgggattacaggcatgagccactgtgcccggccagggcaaaggttcttaatccagggttcctgaattttttgtgtaagtccattctattttctgggagaaagtgttcaagtttttatcagattgtcaaagggattcttaactgccaaaagattaagaattggttaactggccaggcgcgatggctcacgccttaatcccaccactttgggaagccgaggcaggcagattgcttgagttcaggagttcgagaccagcctgggcaacgtgatgaaatcctgtctttaccgaaaatacaaaaattagccaggtgttggccgggcacagtgactcacaaccgtaatcccagcactttggaaggccgaggcaggcagatcactgaggtcaggagttcgagaccagcctggccaacgtagtgaaaccctgtctctacta

SEQ ID NO: 243986 - DNA, 461 bp, Homo sapiens
tgtcatcagtcctaatcatgctccctttggtttggatctcttgtagcaccaaggggtggagggtaccttcagaggtcaagaaaatggactggcatggcaggcacatgcccgccagaggactttgtcaaatggccaaggcattcccatcaatgccaggtgtcagcatactgcagggatgcaccgagatacacggctgccagtgaaaagaagatgccctctgacttgccaccatgagcagtcaaaacgaaacttgtcttggattaggctgttttcgtgtcaggagaaacacagtgtagctgctgacttcattgtgccccctcaccatcctaaggcaattcaaaaagagttttcgggttgtatgcaaataattttatttctaaatgaatactgttttagggtaggatttgggagaacttaagccacagtatattttccccaaaataaaagttataggctacaaa

SEQ ID NO: 243987 - DNA, 673 bp, Homo sapiens
ttacagacaacatgaagtgaggtcttgttttttaatctaatctgataatctctgacatttaatcagactgtttatagcacttatatttaatgtgatttttgataagggaagttttactcctgtcatcttgctttttgtgtttatctcatcttgttttagttccatttctcctctttttttgccttctttatgaccacacctttatctccactatcagcttgttagctacacctctttgttctgtttgtttggttttgtttggtttttgttactggttgttctggggtttacagaatacgtctttaacttaccttcaaataatatttataccactttacagaaaaaaatttttttaataatagtattatacgactttacatataagaatcttaaacaagattcttatatttcttcctcctgtcctttgtgctgtggttctacatgttacttggtggttctttcatcttgggtagtttcctcatatgcatgtgcagtactcagccacactcaagggaaccctctgcagatacctggagctttttctgtgtagccctctcccctccgtagtgtttgcatgatattttgccatgcaaattctggtcacatcggcctccctgaactccaaatgctgtctcctcaattcagcaagtcagctaggctctgtttgagtggc

SEQ ID NO: 243988 - DNA, 581 bp, Homo sapiens
tgttgagatatcagttgtccctaaaatgagctatggattcaatacaaatccaattcaataattttttgtagaaattaatacactgattctaaaatgtgtatcaaaagacaacagaactaggaaagtgaaaataattttgaaaacgaacaacaaagttgcaagacccacctacttgatttcaagattttaaaagttacacaatcaagactattctgtattggtgaaagaatagatgtataggtcaataaacagaacagagattccagaaatagacccttacatatacatacatatagtgaactgatatttgacaaatatacaaagacagttaagtagataaaggagaatccttaaaatgaacctccatccatacctcaaattctatataaaaattaactcaaaatggatcataggcctaaatgtaaaacctaaaactataaaacttttagtaaaaaacaggagaaaatatttgtaaccttggattaagcaaagatttcttagatatgacatcaaaagcacagtcaattaaaaaaatgaactttttttcttcaaaaggccctatgaaaaggatgaaaaagagg

SEQ ID NO: 243989 - DNA, 326 bp, Homo sapiens
tctcctacttccctgtaaggcagacattatagatccaccttgattttacaggggaggaaactgaagttaaatcactcatccaaggtcacactgctagtaggtgcaggggcccaggattcaaccccaggcatgcctgactccaaggcctgtgtttgttctatcattaatcctacacacattgggcttcacacaggtttattctggagatactgacatattctgttcatgtctggggggtagttacacaagtatgtgtaaacttatgatctgtgcacttttctgtgtttatgttataacatcaataaagtttcctttttttaatgttt

SEQ ID NO: 243990 - DNA, 5142 bp, Homo sapiens
  misc_feature (3815)..(3815): n is a, c, g, or t
  misc_feature (4471)..(4471): n is a, c, g, or t
caaaagagaaacataaaaaggatggggtaacagttatagacagcttaggctagtcttggattatagtaatctgcagatacatggtgtgtgaatgacatctgaaggtgttatcttacactgtaaatcatttttatgactacacatatactatttcatgaagatgaaaatgcatttctagtgaatttctaaacttgtttgtaaacagtaacttcttttaaattagctaactctaaatgatctgttctaattaattttcaacttgcataacgtgaaaaagaagtaattttcaacttgtaactttactgaaaaatttcaaatatgcttttccataatatttaccagggttactagtaacagaaacttaccagttaatggaatatttctttcctcactacctctcaaatatatatgtcccttggaagagatcgaagtgagaaattaaaaacatgagaactagaaaggaaacaagagcataggagtttttatgaggataataaacccacatgggaagagccagatcacagaataaacttttttattttttaacaaaacacattttaatgtaatccatgtttaactgcagacttgccttaaaacaagaaaatgaggagaaaagaaatgccgatatgttgtataataaagatagtgaacagttaagaataaaagaagaggagtgtgggaaagtggttgaaacaaagcaacaacttaaatggaatctgagaagacttgttaaggaattgaggacagtaagaaataacttggatctggttgtgcaggagagaaacgatgcccagaagcaactttctgaagaacaggatgccagaatattacaagatcagattctgacgagtaaacaaaaggaactagaaatggctcgaaagaaaatgaattctgagatttctcataggcatcagaaagaaaaggatctctttcatgaagattgcatgttgcaggaagaaattgccttgctgagactggaaatagatacaataaaaaatcagaacaagcaaaaggaaaagaaatattttgaggacattgaggctgtgaaagaaaagaatgataaccttcaaaaaattataaaactaaatgaggaaacattaacagaaacaatactccagtacagtggacagctgaacaatctgacagctgagaacaaaatactcaattctgaactggagaatgggaaacagaaccaagaaagactagaaatagaaatggaatcataccgttgtagactagctgctgctgtacgtgactgtgatcaaagtcagacagcaagagacctaaaacttgatttccagagaacaagacaagagtgggttcgtttacatgacaaaatgaaggttgatatgtctggcctacaagctaagaatgagattctttctgaaaaactttctaatgctgaaagtaaaattaacagcctacaaattcagctccataacacaagagatgctcttggaagagagagtttgattttggaacgtgtgcaaagagacctcagccaaacacagtgtcagaagaaagaaactgaacaaatgtaccaaattgaacaaagcaaactgaagaaatacattgccaagcaggaatctgtagaggagagattatctcaactacaaagtgaaaatatgttgcttcgacagcaactggatgatgctcacaagaaagctaacagtcaagaaaagacaagcagtactatccaagaccagtttcattctgctgccaaaaatcttcaagctgagagtgaaaagcagattctttcactacaagagaagaacaaggagctgatggatgaatataatcatttaaaagaaagaatggatcaatgtgagaaagagaaagcaggaagaaaaattgaccttacagaagcacaggaaactgtaccttcacgatgtctacatctggatgcagagaatgaagttcttcaacttcaacagacattattctctatgaaagcaatacaaaagcaatgtgaaacactacagaagaataagaagcagctgaaacaagaagtagtaaacctcaaaagttatatggaaagaaatatgttagaacgtggtaaagctgaatggcataaactgttgattgaagaaagagcaaggaaggagatagaagaaaaattaaacgaagccattctcaccttgcagaaacaagcagcagtatctcatgaacagttagtacagttaagggaggataatactacttcaataaaaactcagatggaactcacaatcaaagatctggaatctgaaatctccagaataaaaacttcgcaagccgactttaataaaaccgaattggaaagatataaggaactctacctagaagaagtgaaagttagagaatccttgtcaaatgaactcagtagaactaatgagatgatagcagaggtcagtacgcaacttactgtggagaaagagcagaccagatccagatctctattcactgcttatgctacaaggccagtcctagagtcaccttgcgttggaaatcttaatgatagtgaaggtctcaacagaaaacatattccaagaaaaaagaggtctgctcttaaggacatggagagctacttgttgaaggttagctatcttttttccttcggcgttcagatttctgatagaattcttgtatgttatttggtaaaatagttacttaattgtcttgtgtatggtaagtaaaagtaataattacctgtgttaataaagagaggagacagaaattttaccgttatttttaagtctctggagctctcattgataagagattactcctttgttaactttatttaataaatgtaaccaaactgacacattttaaatttttttaaaaactgcatttaagttagattttaaccaaaggtttactttgatgtgctttgtcttactaattgattttagtttgtctggggttcacttttaatgggtttagtgtgcctggggtcacttttaaagtttttctgcgtcatctcaggttttctacctgtcatcatatgtgaatgattggtgtccaaacactaaccacccatggatgtttattatttaaaaggacccaaggtgaatacttttatatgttatataaacctgcaacacttgattaatctgttctttaagttaaaagttttgtgattttcttatatgagtacatctgtaattgctattgcacttaatagtgttttaatcccaattttagtaaaatgtgtctattgctatgcaatagcacagtggttttgaaatagttaaatcaaataaatatttgaatttttaaagtaaagctcacataagttttgtctctctacctggccataactttagtaattgatgactaagatggcaatggtatctagagtccttcaatagcaaatgtgaccaaacagaatcagttctattcttaataccccaaattccatgtaaagctgcacatggacatctcccctggacatgtaacaggaaccttttagttcaaccgtgtggtttcactcagagtaagagtctatttctggggatttcaaaatggatccaaaaatgacgagctgtatcaactatagagttggtaaggaaaaaaaaaacaaaacgtagttcaactatgcttgacccagattaaggtatttgtctaacatttgtccatttttcaactgagggaaaattacaaaaactgggcacagtggcacacacctgtagtcccagctgctcctgaggctgaggcaggaagatcacttgaacccaggagttcaaatctgcagtgcgcaatgattattcctgtgagtagctacggcactgcagcattccaatctgggcaacatagcaagattctgtctcttnaaaaaattacaaaatccataaaacatttgtttgaacaacaatagataaatagttttctttgtgtatattgttgtttttaaaattttcaatcgatgcacattggcttatagttttgatgtttttatgatctccttagcgcacagaaaagtagcgcaggcccacatggaatgaacctcaaccttgttgtgtttacctggctatttcgtgtcctaacaaatcatagaagagcaaatctaaggtttcttagatagcattgtggccaaatagcttaaaagggaatgcattaaatgattgttttaatacatagattacaagagcccagctagctgatatttttaatcatattgttcgcttaggttttatttttctgaaaaaaatgagatgatcagcgtccaaatgcctcagtcatgaaattgtaccactgggtactaatgggaaatgaatgttaaatacgtctgtaaatggttaagcaagatgcaaatataatgttctcattagtactatgaacccccaaaatttgagacaagtctcaattaatttagaaagtttattttgccgaggttgaggacacacatccatgacacagcctcaggaagtcctgatgacatgtgtccaaggtggttggggcacagcttggttttatacattttaggggnagacatgagacatcaatcaatatatttaagaagtacattggttcactctggaaaggcgggacaatttgaagcaaagggaggaagactggtagcggggagggggcttccaggtcacagataggtgagagacaaacagttgcactcttttgagtttctgattagcttttccaaaggagacagtcagatctgcatttatcttagtgagcagagaggtaactttgaatagaatgggaggcaggtttgccctaagcagtttccagcctgagttttccttttagcttagtgattttggaggcccaagatattttcctttcacagtacttaccagaaaaacaaggtaatgtatcattttacaagatagtgctgagagagtataaaaagcagatgtaggccgggcactgtagctcacacctgtaatcccagcactttgggaggccgaggcgagtgggtcacttgaggtcaggaattcaagaccagcctggacaacatggtgaaaccctgtctctgctaaaaatacaaaaattagcctggcatggtggcgggcgcctataatcctagctacttgggaggctgaggcaggagaatcgcttgaacccaggaggcagaggttgcagtgagccaagattgtgccactgcactgcagcccaggtgacagagcaagactccatctc

SEQ ID NO: 243991 - DNA, 2881 bp, Homo sapiens
caaaagagaaacataaaaaggatggggtaacagttatagacagcttaggctagtcttggattatagtaatctgcagatacatggtgtgtgaatgacatctgaaggtgttatcttacactgtaaatcatttttatgactacacatatactatttcatgaagatgaaaatgcatttctagtgaatttctaaacttgtttgtaaacagtaacttcttttaaattagctaactctaaatgatctgttctaattaattttcaacttgcataacgtgaaaaagaagtaattttcaacttgtaactttactgaaaaatttcaaatatgcttttccataatatttaccagggttactagtaacagaaacttaccagttaatggaatatttctttcctcactacctctcaaatatatatgtcccttggaagagatcgaagtgagaaattaaaaacatgagaactagaaaggaaacaagagcataggagtttttatgaggataataaacccacatgggaagagccagatcacagaataaacttttttattttttaacaaaacacattttaatgtaatccatgtttaactgcagacttgccttaaaacaagaaaatgaggagaaaagaaatgccgatatgttgtataataaagatagtgaacagttaagaataaaagaagaggagtgtgggaaagtggttgaaacaaagcaacaacttaaatggaatctgagaagacttgttaaggaattgaggacagtaagaaataacttggatctggttgtgcaggagagaaacgatgcccagaagcaactttctgaagaacaggatgccagaatattacaagatcagattctgacgagtaaacaaaaggaactagaaatggctcgaaagaaaatgaattctgagatttctcataggcatcagaaagaaaaggatctctttcatgaagattgcatgttgcaggaagaaattgccttgctgagactggaaatagatacaataaaaaatcagaacaagcaaaaggaaaagaaatattttgaggacattgaggctgtgaaagaaaagaatgataaccttcaaaaaattataaaactaaatgaggaaacattaacagaaacaatactccagtacagtggacagctgaacaatctgacagctgagaacaaaatactcaattctgaactggagaatgggaaacagaaccaagaaagactagaaatagaaatggaatcataccgttgtagactagctgctgctgtacgtgactgtgatcaaagtcagacagcaagagacctaaaacttgatttccagagaacaagacaagagtgggttcgtttacatgacaaaatgaaggttgatatgtctggcctacaagctaagaatgagattctttctgaaaaactttctaatgctgaaagtaaaattaacagcctacaaattcagctccataacacaagagatgctcttggaagagagagtttgattttggaacgtgtgcaaagagacctcagccaaacacagtgtcagaagaaagaaactgaacaaatgtaccaaattgaacaaagcaaactgaagaaatacattgccaagcaggaatctgtagaggagagattatctcaactacaaagtgaaaatatgttgcttcgacagcaactggatgatgctcacaagaaagctaacagtcaagaaaagacaagcagtactatccaagaccagtttcattctgctgccaaaaatcttcaagctgagagtgaaaagcagattctttcactacaagagaagaacaaggagctgatggatgaatataatcatttaaaagaaagaatggatcaatgtgagaaagagaaagcaggaagaaaaattgaccttacagaagcacaggaaactgtaccttcacgatgtctacatctggatgcagagaatgaagttcttcaacttcaacagacattattctctatgaaagcaatacaaaagcaatgtgaaacactacagaagaataagaagcagctgaaacaagaagtagtaaacctcaaaagttatatggaaagaaatatgttagaacgtggtaaagctgaatggcataaactgttgattgaagaaagagcaaggaaggagatagaagaaaaattaaacgaagccattctcaccttgcagaaacaagcagcagtatctcatgaacagttagtacagttaagggaggataatactacttcaataaaaactcagatggaactcacaatcaaagatctggaatctgaaatctccagaataaaaacttcgcaagccgactttaataaaaccgaattggaaagatataaggaactctacctagaagaagtgaaagttagagaatccttgtcaaatgaactcagtagaactaatgagatgatagcagaggtcagtacgcaacttactgtggagaaagagcagaccagatccagatctctattcactgcttatgctacaaggccagtcctagagtcaccttgcgttggaaatcttaatgatagtgaaggtctcaacagaaaacatattccaagaaaaaagaggtctgctcttaaggacatggagagctacttgttgaagatgcagcagaagttgcaaaatgatctaactgcagaagtagcagctgctactaaatatgaacctggatcctatatagcttctcctctaggatttacacacaaggaaaatctgaatcaagatccagttttggaagtaacaaaagatgctgggattacaagcgtgagctaccacacccagcgaggaagccaagtttaacgtgtgtgctccactcctccaacctggccaaagggcagtcatcatcactggccactactgaccacagcctttagaaactccccttgaacgtgctgggctgaccttcctct

SEQ ID NO: 243992 - DNA, 2823 bp, Homo sapiens
caaaagagaaacataaaaaggatggggtaacagttatagacagcttaggctagtcttggattatagtaatctgcagatacatggtgtgtgaatgacatctgaaggtgttatcttacactgtaaatcatttttatgactacacatatactatttcatgaagatgaaaatgcatttctagtgaatttctaaacttgtttgtaaacagtaacttcttttaaattagctaactctaaatgatctgttctaattaattttcaacttgcataacgtgaaaaagaagtaattttcaacttgtaactttactgaaaaatttcaaatatgcttttccataatatttaccagggttactagtaacagaaacttaccagttaatggaatatttctttcctcactacctctcaaatatatatgtcccttggaagagatcgaagtgagaaattaaaaacatgagaactagaaaggaaacaagagcataggagtttttatgaggataataaacccacatgggaagagccagatcacagaataaacttttttattttttaacaaaacacattttaatgtaatccatgtttaactgcagacttgccttaaaacaagaaaatgaggagaaaagaaatgccgatatgttgtataataaagatagtgaacagttaagaataaaagaagaggagtgtgggaaagtggttgaaacaaagcaacaacttaaatggaatctgagaagacttgttaaggaattgaggacagtaagaaataacttggatctggttgtgcaggagagaaacgatgcccagaagcaactttctgaagaacaggatgccagaatattacaagatcagattctgacgagtaaacaaaaggaactagaaatggctcgaaagaaaatgaattctgagatttctcataggcatcagaaagaaaaggatctctttcatgaagattgcatgttgcaggaagaaattgccttgctgagactggaaatagatacaataaaaaatcagaacaagcaaaaggaaaagaaatattttgaggacattgaggctgtgaaagaaaagaatgataaccttcaaaaaattataaaactaaatgaggaaacattaacagaaacaatactccagtacagtggacagctgaacaatctgacagctgagaacaaaatactcaattctgaactggagaatgggaaacagaaccaagaaagactagaaatagaaatggaatcataccgttgtagactagctgctgctgtacgtgactgtgatcaaagtcagacagcaagagacctaaaacttgatttccagagaacaagacaagagtgggttcgtttacatgacaaaatgaaggttgatatgtctggcctacaagctaagaatgagattctttctgaaaaactttctaatgctgaaagtaaaattaacagcctacaaattcagctccataacacaagagatgctcttggaagagagagtttgattttggaacgtgtgcaaagagacctcagccaaacacagtgtcagaagaaagaaactgaacaaatgtaccaaattgaacaaagcaaactgaagaaatacattgccaagcaggaatctgtagaggagagattatctcaactacaaagtgaaaatatgttgcttcgacagcaactggatgatgctcacaagaaagctaacagtcaagaaaagacaagcagtactatccaagaccagtttcattctgctgccaaaaatcttcaagctgagagtgaaaagcagattctttcactacaagagaagaacaaggagctgatggatgaatataatcatttaaaagaaagaatggatcaatgtgagaaagagaaagcaggaagaaaaattgaccttacagaagcacaggaaactgtaccttcacgatgtctacatctggatgcagagaatgaagttcttcaacttcaacagacattattctctatgaaagcaatacaaaagcaatgtgaaacactacagaagaataagaagcagctgaaacaagaagtagtaaacctcaaaagttatatggaaagaaatatgttagaacgtggtaaagctgaatggcataaactgttgattgaagaaagagcaaggaaggagatagaagaaaaattaaacgaagccattctcaccttgcagaaacaagcagcagtatctcatgaacagttagtacagttaagggaggataatactacttcaataaaaactcagatggaactcacaatcaaagatctggaatctgaaatctccagaataaaaacttcgcaagccgactttaataaaaccgaattggaaagatataaggaactctacctagaagaagtgaaagttagagaatccttgtcaaatgaactcagtagaactaatgagatgatagcagaggtcagtacgcaacttactgtggagaaagagcagaccagatccagatctctattcactgcttatgctacaaggccagtcctagagtcaccttgcgttggaaatcttaatgatagtgaaggtctcaacagaaaacatattccaagaaaaaagaggtctgctcttaaggacatggagagctacttgttgaagatgcagcagaagttgcaaaatgatctaactgcagaagtagcagctgctactaaatatgaacctggatcctatatagcttctcctctaggatttacacacaaggaaaatctgaatcaagatccagttttggaagtaacaaaagaatatgcacagattttaagaagaaaatacatactctgaaagataaggcaattttatttgggctattcacatgatattttgtttcccattaaatatatgatgtgaa

SEQ ID NO: 243993 - DNA, 320 bp, Homo sapiens
gcttgcatcttctctagtttccttataataccaaacccagcacagtgtgtcaacagtggttatgctctcttgtttttttttatgtgtattactttttgttttgttttcaaatattttcgatctgcggttggttgaatccatggatgtagagggccaactgtaataaaaatctgtttttaaaaattagatgaaagtggccaggcgcagtggcgcatgccggtaatcccagcactttgggaggccaaggcaggtggatcacgaggtcaggagatcaagaccatcctgcctaacacggtgaaacccgtctctactaaaaatac

SEQ ID NO: 243994 - DNA, 346 bp, Homo sapiens
ttctttctgagagctcctccctgagggatgtcatctgtaaacaagatagcctgttgtgggcctggcccataatggctcacgcctgtaatctcagcattttgggaggctgaggtaggtggatcacctgaggttcaggagtttgagaccagcctggccaaaatggtgaaactctgtctctactaaaagtacaaaaattagctgggtgtggtggtgggtgcttgtaatcccagctactcagtaggctgaggcaggaggatcgcttgaacccggaaggtggaggttgcagtaattcaaaatggcgccattgcattccagcctgggctacagagagagattccatctcaaa

SEQ ID NO: 243995 - DNA, 497 bp, Homo sapiens
caggtttgtaataataaatttataatggaaatggctctttttattttctccccctcctacctcactggtacctcatttttccaaaccccagtcccatgaaggctttgcagcacagctgctatcagttggtggagtgccaggagttttccattgtcttgtaacagtgatttgttcccagcacattcaactctcttcctcattttggatattctggttaatggaattgtaatatgtaccaaacttggcttaccaatcttcacaggaccataaaacaaaaatatttatattaaaatagtagtgaatgtaatttaattttttaatcatccctttagaaattggatacccccgagcccttgtgaaggggctgcatgaagcatcagttataaatatggtgataaaatagcagcacttgctagttaacagagatctggttgaccgaatgctagataacagaatttgataaaaatagatgaaaaaaacaggttgcataattgcta

SEQ ID NO: 243996 - DNA, 665 bp, Homo sapiens
ccacagcaggaggcacacgtgtctggttgttcctctttgagtcatgctaagatcgatccctggcttcaggtggtgacagcctggtcctggcagtgtcaagtcctggatcagccttccagccgcttttttcacccattgcttttcatggtttgaatcaggtgtttgatgaggagaatgcacatattagctggttgtttctttgtcttgaaagagagttcatagaggaaataggatagatgcttctctccatttaattaccaatttttagggtaaaaagttgggcccctagttaattccaattttgttcagtgccttgggtctctccatctctctgcctgcctgtctgtctctttcttccccattctctacagtcattatgagctcctggggtttgtatattgaatgcgtctcactcaattgcctttcttattccttttgatgctcagttgcatgattggctctgtgttcctttggcacggccctcttgctttctggcataacaggatgtcccaggctcattttgtaagtgctactctggctttgaacccagccattcctccaaggaccccttgcctcttggtggggagaggatttaagggaaggggctgtaggtgtgctcattgctatcgcttcttattgcttccaggtctttttggtgataacta

SEQ ID NO: 243997 - DNA, 913 bp, Homo sapiens
ccatgtttgtgtttgttcttagagacggaggtcgcactctgtggcccaggctgtcctcgaactccctgggctcaagcgctcttactgccttggcctcccgagtagcgtagctgggactcaggtgcaagccaccgtgcctcacttttatttccaaaaagcatcctgttccctcctgctggagaaactgggctgcccctgggctcttggcctccactttgctccgtgccacccagacttatcctgcaggtctcagctcaaaggtcctttcctcaggaacagctatcctccctccccagaacagatcccgccgcccggtccctattatgcccatacggccgccttctgtagaatgacttgttcgtcatctgccacaagacccaggcttttttacttgctcgccaccattcgcccagaagcagagacttcgctaaaagcacctcaatgaataaatgaataaatggtttgtagacaggcctttgaggttcctgcttctgtgaccagcaccagaatgggtgtcccttctgcacagcctgagtgaggcctaccccggctcctacttcaccgggcccagctcctcaagagcttccttctgcggctgctgctgagtcttcttccgattcatttccaaacccacacgttacgcaaggcgccctctgcaagtagtatctgcaaagaggaactcgccatgccgtccttcctatttctcaaaaataatagctaagcaaatgtcgggagtgcagcgaagtgtctgcatgaacaccctcagccagccctgcgactaaactacaaccaagcccaggttctgcaaaacgattccagaaataagccaccggcctgccgcggcctccggagccctctcccgctcggcgccccgaggccccaccccgaagcacgcgcgcacccacgcggccgc

SEQ ID NO: 243998 - DNA, 632 bp, Homo sapiens
ccatgtttgtgtttgttcttagagacggaggtcgcactctgtggcccaggctgtcctcgaactccctgggctcaagcgctcttactgccttggcctcccgagtagcgtagctgggactcaggtgcaagccaccgtgcctcacttttatttccaaaaagcatcctgttccctcctgctggagaaactgggctgcccctgggctcttggcctccactttgctccgtgccacccagacttatcctgcaggtctcagctcaaaggtcctttcctcaggaacagctatcctccctccccagaacagatcccgccgcccggtccctattatgcccatacggccgccttctgtagaatgacttgttcgtcatctgccacaagacccaggcttttttacttgctcgccaccattcgcccagaagcagagacttcgctaaaagcacctcaatgaataaatgaataaatggtttgtagacaggcctttgaggttcctgcttctgtgaccagcaccagaatgggtgtcccttctgcacagcctgagtgaggcctaccccggctcctacttcaccgggtttcgctcagcaaacagctactcccagctgcgactatcgagctcggtagacgtgtttctgccgcta

SEQ ID NO: 243999 - DNA, 466 bp, Homo sapiens
aaaaatcaagctgcaaatatgcaagctggaacctggcataggtgaatgccggcagctggaccaataggaaagggctacctgggagccaggtgtgttcaatatggagtctctatctccccttttctttgtcaccatgtgtacagtaaaaaagcaggcagcatggcactggcgaggcagagaacccacctgcataataaaatataagggtgagtggccagcttcttcacacactatgcaaatgacacacccagtcttaatcagttcttcgcatgctatgcaaattgcacacctggtctgaccaatcttttatgccctatgtaaatcagagaccaccttctcaggcttatctataaaacctcctgcacttcaccacggggctggaggaccggctcgggaccccctctctctgcaggagagagcttttctctttctttcgcctattaaacctccactcttaacctcactc

SEQ ID NO: 244000 - DNA, 288 bp, Homo sapiens
tttctgtgtgttttttctgaggtaccagcatcttccttctgtctttctgtgtggcatatcttttttcattgcctgcttgatgaaatgatagggcatagagatgtttaatttagttagagggaggtatcgataggttttggggatgggaaaggggcatgggagtgaatatgttcatggttatttctgcaaagtatgaaactctattttttcttacttctcttgatctgttttatgcccttgctattgatgacttttctttcttttcttcccttctgccacctactattt

SEQ ID NO: 244001 - DNA, 409 bp, Homo sapiens
gcagatgaaccatgtcagtggcaagttctgatgtcaagcaagcttatctgatgccacatagtttccttagaaccaatgttaagcttccttggcagcagctgtttattctaacccaatatgagactcagtctgtcagttaaggctacataaatgttagcagagcaaccttgctcaccagatccccatttatgaagataccatgactaagcttctaatgtgcaaacacttcatcctccccctcaactcaagattcttctggccaggcgcagtggctcacgcctgtaatcccagcactttgggaggctgaggcaggagaattgcttgaacccgggaggcagaggttgcagtgagccaagatcacgccattgcactccaacctgggtgacaagagcgaaaccctgtctcaaaa

SEQ ID NO: 244002 - DNA, 540 bp, Homo sapiens
gctgttcaccattgttgagtgaagtcgtgggtgtgggtgagttcatctggtggttctgtttcaggggctgtgagtggggcattcgtcagtgtttgtggtggggagttggagggtgtctgggagaagggatggctacatgcagcatctcaccatgctgcactgcgtggcacttagaagaacagaaagcgcaactttataatagtgccgagagaagattgtgagaacctgaaaaatacagaaaaacaataccacatgtgcagcctgtccacaaagctgtatattttgtgagaatgccgatggaaaaaaggatacctagtaaacatgaggatggctgcttaatggagaaagaagtatggaatgagaagagggaaattagagaaacagcatatcagaaaagtgagggtaaggccgggtgcggtggctcacgcctaaaatcccagtatgttgggaggctgaggcaggtggatcacttgaggtcaggagttcgaggccaatgtgggcaacttggtgaaaccccttctctcctaaaaatacaagaat

SEQ ID NO: 244003 - DNA, 497 bp, Homo sapiens
ctgggcacatcctccattgctcctgtctgtcacagtgggagccacagcagttttagcacccagaggtgacccagctgagtccatgaaacccaaactttcttagcagctgcttggagtgtttgggaaacacagctcagaagtgcaaactttaaccattgcaagagagagttgatgacagattcctcactcctcattccctctctgtgccactggactcatgcactggttctgtcagcctctgttgacatcctgccacagctctgtttcctgtgaagttgtggccagcccagtaatgacatgccatctttgattttgtctcctccttctcttcctcactttcccttttctctcactcttaatgccccgggattcctctcccctcaaaccttgaacatgcaaactttgcctcgggctctgctttgaaaggaactacaattaagaccttcttccctcataccaaaataaatcatagatgggttagagcattacaatataaa

SEQ ID NO: 244004 - DNA, 470 bp, Homo sapiens
atgtttctgttattgattgtgcttttcttgtcatatttaagaaatctttgcttaactcaaagtcacaaaagatttcttctatgttttcttttgaaattctatagtgttagattttacatttatgtctacagtccattttgaattaatttttatatggtgtgaagttatgaattgaagttcattttattgcatatggctaactgttccagtaccatttgctgaaaagattatattttgtaccttgtgggaaatcacttgaccatacatgtgtgagtctattcctagactctctattctgaactactgacttgtctatctttatagcaatactacactgttttgattattctccaagtctggaagtcagggagagtgaagtcttcaaactgttcttttttgaagttgtgattactctaagtcctttgtatttccacatgaattttagaataaacttgtcaacttctactaaa

SEQ ID NO: 244005 - DNA, 1283 bp, Homo sapiens
ggaaatgtcctgtgtctctcactatgctggttagacaactgtatacatttaccaaaattcatccaaatgtactctttggatgaattttattgtacataaatactatctcagtgcctaaatatcattaaaaataggttcagggtattaaagatactgaatatatcactgactttcaactcttgaactaatcacttgaaatcaaagaaatgatttttgcttgttatttgtgtcacaaagatatgtcacaaagatatgtgattattttcaaaacttcacttgactatctttcccctaaaaagcaagcatacatttaagttgaaaacctatgtattttactttccataaatttctttgcacaatattctgaaaggatatactgttagtggctatgagttaacgacatttcagtatttttgctaccaccaaaaaatgcaaaccaagataaggaggctactgcccaatggctgatgtttgtgaatgaagctgtatgcagatgggcaaaaaagggggtatgtgtatcaacaattcctcaccaaaggaaccagatctctttagaaaaatggattccattgttagagcaggaaaaggacaagatgaatttagaacatcttgtaacagaatttaagaggtgctcataaaaagcctgggacatgtcaaaaggacacaggaggtggcctgaaaggggcttccactgaccaaatatgaaacattaacagaaaacttattgcatagaataagaatcctgacttcaaactgatacaggaaagggacaggtcttcctcaaagtataaagctaactaaaaaatacagaagaaaaaaaggggttaagaaattaccattttccatctatcagagcaactgatttaggcaagaaactatcactgatactaaaactaaaatggatcaaagtttgataagatgtttatacagcctcaaagtatctccccacaaataacttatttattataaaggggaaaatagtaatatttcagtggagaaacctggcagacatcaactcaccaagtgatcaaagttaacatcacacatacacacacaaaaataaaataaaataaaataagtaaaaacaaagttaacatcacctgattaaactggcattgtatgcttcatgatatgatgcataaaggaggatatatcacttatttaataatttatcacttatttaatattatgaacttaatcataaagaaacatcagaaaaacctaaattaagagaaattctacaaaataaatgttccatcctattaaaaaatgtcattgtcatt

SEQ ID NO: 244006 - DNA, 305 bp, Homo sapiens
tgtggttcttgtcatcttgccaaagggtcacagtcatttttaaaaatcttttcatttacatctcagaatgagagtgtgaaatatgatgtgaaaaatctgaggccccacaaaatgtttttttgtttttacaaatagaccatttagttgagttcttttcttggctgaatgtctctgccacaggcttgggtccttcttaaggagagagactgagtcatatatttctgaaatccaaaagtacctcaaatataacaggtgcttaacagatctatgtcgaataaaggaacaaatctttagaaaatctaaca

SEQ ID NO: 244007 - DNA, 483 bp, Homo sapiens
tgtagggggactggaatagaaacaggaatcaaagtgaggaggctgtggtaggtgtccaggcaagagactgtgtctgttcacagtacggaagacaaattcaagttatattttggaggtgaaatcaaccaattgctgatggctcagatgtgtggggcgagggaaagaagagtcaagatggaatcccaggttttcatcctgagcaactgggaggatagtggtggtgtttcctgagatggagaggaatcggaggagcacctggggccagatcatgggggtgctgtgaacatcagctgaggggtctggaccagaccccgcagacaatggggagcttgggaaggcttctgagcaacagcagaatattcattcagtcattcaacaaacatttgtggtaaaagcttgtccatattctattctctcacagacggcaaagctccccacaagcagccgtgggttatgggccacaaacatccttcctgggcctat

SEQ ID NO: 244008 - DNA, 257 bp, Homo sapiens
ggagaggccacaatagtacctggtcctgccatgcatagggacgcggctgctctcctggaatggtaacagggagatcatagccagccagcggggagctaggcagcaggaacgaacaggccctgcagggggcagcagctgcagctggagcaatggtgggcgggcaggcaccaaaacctctgcactgtcacaggcccagccacctggcacctcctagctgccatggaaatacagtgagaaaaccagtcggaattcttatt

SEQ ID NO: 244009 - DNA, 376 bp, Homo sapiens
cttctaggggcgcggacccttcggcacccacaggagtggacactaagaacacgtgagacgacaggggcagagatggggtgtcccgggcaggtagcctgggtccagcacggcagccagaaagacgaggaaaacggagctggccctgggcaggcacgagcctctgagcctagagagtgaaggtaaagggcgcggggagaggaagcaaagccacgaggagggcgggtctccctgggcgcgggggcacgcgctgggcaaacgcgacaggacccggggagccgggaccccgacatgcaggaggagatcgcagccctaccccaggacgcagggaacgagaaaaggccgcgggaggccctgtgacccgcggcctccctaagcc

SEQ ID NO: 244010 - DNA, 410 bp, Homo sapiens
tattgagaaacggaacacagccagacgtatgttaacaagaagatactgggcccaggctaccccagaaagaagagcgggctccgaaggcctggcgggccgcttgccatctccccttttaacacaaaacaaaacctcatgtaaatagaaggagatctgaagttctaagtgacagttttctaggattggtgaaaacagtacttcagaatttctctctttaatgtattggagtgatcaagacactttcacagtattatacctgttgtctgttcagctgtatattgttacagggtgctcggaaagtggcggagatgctactgtgacaagtcaatgaactcttgtctatcaagactattgtgtttttgaaggaaaattgagactttcctagctttcaattgtatgtcgtcaattac

SEQ ID NO: 244011 - DNA, 570 bp, Homo sapiens
taggaatcctggcaagatccccagatctactgtgttgttgtccagaggcaagcatgagcagctgagcctcagagagagcttacagtctaccaggcttaaatcctgtcagcaggaatgccaaaggccaaaccatgagaatctccagaggaagaacagcttcgttatcacagtaatctgcagtctcttaagtggggtgtatatgtttttggttttgagatggaagaagagctttttgtcctgctaaaagttgccatataggagaaaaactttgagttttaacacaaaacaaaacctcatgtaaatagaaggagatctgaagttctaagtgacagttttctaggattggtgaaaacagtacttcagaatttctctctttaatgtattggagtgatcaagacactttcacagtattatacctgttgtctgttcagctgtatattgttacagggtgctcggaaagtggcggagatgctactgtgacaagtcaatgaactcttgtctatcaagactattgtgtttttgaaggaaaattgagactttcctagctttcaattgtatgtcgtcaattac

SEQ ID NO: 244012 - DNA, 369 bp, Homo sapiens
cacccactgtctaaccagtcccaatgagatgagctgggtacctcagttggaaatgcagaaatcacctgccttctgtgttgatctcgcttagagctgcagaccggagctgttcttatttggccatcttgccagccaccgtctaatggcttttcagagtacgtgcttcagttatctccacatgtatataaaagtttattcattacctcatagacacactgagcttgactgctgaaactggttagaagaaaccacaatgtttatagtacatacagtaaatacaaggctaaccacagcatgatgatgcaagaaaggatttaccaaagcagagaaggggaaaatgaggctttttttattccagtggacacaggg

SEQ ID NO: 244013 - DNA, 189 bp, Homo sapiens
cagagatgtaagccatgttgcaaaagtgtcacagcagcctttagttctcgcttctgtaagcctgcttcacgtagttcctgcctcaaaatgcttaaaagggactcgttttctttgttctgggctcagcctttaggacacatgtccactgggcctgtgtacaccttaaaataaacaccctcctgcactcca

SEQ ID NO: 244014 - DNA, 603 bp, Homo sapiens
taaactgaaggcccggtgcggtggctcccacctgtaatcccagcactttgggaggccgaggtgggtggatcacctgaggtcagcagttcgagaccagcctgaccaacatggtgaaaccctgtctctactaaaatacaaaattagctgggtgtggtggtgcatgcctataattccaactactcgggaggccgaggcaggagaatcagttgaacctgggaggtggaggttgcagtgagctgagattgcgccattgcactctagcctgggcaacaagagcgaaactccgtctcaataaataaataaataaataaataaaataaactgaatagccgtcctttgtgtgtatccaccaccttttgttcatccactcatctgttgatggacacttgggttgcttccagctcttggctgttgggaatagtgctgcaataaatatgggtgggccggctgcggtggctcacatctgtaaccttggtgctttgggaggctgcagcaggaggatcacttgagcccaggaggtcaagaccagcctgggcaacatagtgagaccctatctctattaaaaaatgttttaaaattaaaaataaaatgggtgtactaata

SEQ ID NO: 244015 - DNA, 283 bp, Homo sapiens
caaaaatgttaaaaagaaagagggggcagctagtgctgtgaaaaagatagctagtcattctattagacataagataagactagttcagatcacaatcaggtcagtctcatgatagaatagttagaggacctcccacatcagactgatagcagttttggaaagagcaaaagcaatgttttagatgtgctacttttaatttgcatactgaaatgttgaataaaaagctgtccaattttttttctgtcatactatatgtcactaatataaatttctgtatgaaaca

SEQ ID NO: 244016 - DNA, 464 bp, Homo sapiens
gaattttacttacacagtttggtaagacttctatttaaagaaagaagacgttttggaagtccacaccattgaactaaatcactatatacgactcagcactgggatttggatggaggctaagactggcttgggggaatcaatcccaattctaggaagcttttcctggcttaatcaggtcaagtccacccgctgaagtgatttcacctctttctgaccaggagtaacctaatgctaaactaaacatgccagagatgctccaaaatggaatagatccattacagtcttaattcagagcttttctccttatgtcaagggcaaaaacgggtttgtttgtttttttaaaaaaaggaactacttttcttacgtttcagggacttaaaatttttcaacctaatgtattccattctcagggttcacaataaaccccattttgcaatttcttctatccagaatatgctatctgg

SEQ ID NO: 244017 - DNA, 473 bp, Homo sapiens
gatcaggagccactgctgtcacatcaggaaaaagttccagttttgctctaccatccaacacctagccagactcgatttgcagctcagttgactgaagcaaaatacaacagctcaaagaataagccttatacaacatctgcctgaagggatttatgaccctggaagagatagatcagatcagaaacaaagatctgggagtatgtgatctgtatgatggactttgtttatggggacctgattcagtttctgccatgcatgcacatttatcatgaggattatatagataactggttgatgagatccttcacgtgtccctcctgcatggagccagttgatgcagcactgcttacatcctataagattaattgagccaggctctctcatctgacttccagtgaaccacatttttggtggttttgattgtttgtcactgagcccaaagaggcagggattaggaattaaaataatgcaaa

SEQ ID NO: 244018 - DNA, 328 bp, Homo sapiens
actttagctctgatgcctgcctctgtcttaatctgtcccttgggtattgatttgcatctctccctagctcttttgagctccttttagcaaatttcaggtgagcacactttcataaagtgctgtaaaataagtattgtaatttagtagtagatgaaatgatttaatgtatagaatgtgttattacagttatttattatttatatcttgtctgcttcccaaaggatatggcttataatacatagacacaattttttttttttttttgagatggagtcttgctctgttgccaagctggagtgcagtggcacgatctcggctcactgcaacc

SEQ ID NO: 244019 - DNA, 194 bp, Homo sapiens
aactggattaaaaatcatattttctatttttaaaattgtttgattggccttcctgggacatattattatgatatttcatcactttcacagggtgattaatgaaatgaaagtccaaatattttgaagtaaattttacatagttagcatttttgtattgttcttccttaactcatagattgaccttacacttgttt

SEQ ID NO: 244020 - DNA, 181 bp, Homo sapiens
ttagcaaaatgcagaaaatgatgctttttttttaaggttgcagttagagtcagaactaatattttaagtactggcacggtatgtagtatttccatagaatgtaaatggtagctatttttattttctttggatttcaatgtctttctcaaggtggcaaattagggctatatttatatgcttt

SEQ ID NO: 244021 - DNA, 433 bp, Homo sapiens
  misc_feature (179)..(179): n is a, c, g, or t
cagacaaaggagggacctgctgaacagacggtgcggaggccaaggccagatccacacacaaaagtacaggacctcagccttggcaggcaaaggagggacttgctgaacagacggtgcggaggccaaggccagatccacgcacaaaggatgtcacttgtgggtcctaccccaggtggtanttgcttgcaaaaagcagggctcctcctggccctctgcagtctgagtctcagtgaggataaacccagcagaaagctctgcctcaggctgtgctcgaatcacaggaaatgaatcttacaggggaactttggggtctgcactgggactattagtggtacgtaaaatgctttgtggaagaaaggttaaaattggaccctttgaaggttaaaaaggtgtatctggaagtagaatagaagccttcacttgagtgaacatg

SEQ ID NO: 244022 - DNA, 346 bp, Homo sapiens
gctgctgctttgggatgggggtgtgcttcagacagtcagagaagaaaccctgagtaatgctgacattgatgggccacgcagactatgatcagctccgggaatgtctgtgaaggagcagccaggggacagggctggcctggggggatctgcatccacacttcctgcagtcgtagtaattctcagtgatttctgcatatagattggtctagaaagtctaaaaatagtctttaccgtcaaaactaactctctgcatgtttataccttggcttgggtgaactcgtttcagtttacctgtttcaacgcctagcacaatgcccagcatatagtaaaccctatacacttgttg

SEQ ID NO: 244023 - DNA, 490 bp, Homo sapiens
agggtaaatatattattttgtaaagcaaaagaagaggaaaggaaaatccaaagttccactattatttaactagttaaataggttgagatgtctaaacaaatcatttcttatatattttgctattaattggcctcttaacagtaatccctttgcttatcactgagtttagtgatgaccttaagggagcactgtggtaaaagttaggggcagccctttccagtcttggtgtcggcatattttgattttgaagagaagactggtggagtgaaaactagttaggaggccatttccgcttaatggctagatgcactttgcagagactttaaagtctttaaacggcttttatccactgcttgaagtggtctccttaggcagatgttcatggtcttttagcactaatccagctagatgtgtataaagttataccaacaatacataattgaatgtaaataaacctagcatattgcctgcttccacttttcctccagta

SEQ ID NO: 244024 - DNA, 463 bp, Homo sapiens
aatcatgagggaggaatgtggcttttttatctttgtagctatgttatttaggagtaaaatgggaggcaggattgcgtagttcccagcttgacttttccctccggcttagtgattttggggtcctgagatttattttcctttcacactctacataagaatagtttctaaagtctgaaacccaaggttcaccacaaacccctgaggagagagaatgtggctgtccccgctggggcgggggaggagagctggatgggaaatgctgtgggaaagtgcctttcccatgtcagattcttcgtgctgcgctccctttaaggtttggtgtaaatgacagaaacgattcctcattcactgggtgaggattatcctggagggtggacattcctggacaacagcagagatgacagtccttgacatcgtctccccccgtgataaatcgtcaccatgatgatgaatccaggagtca

SEQ ID NO: 244025 - DNA, 548 bp, Homo sapiens
atattgggtctcattatgttgtctaggctaagctcaaactcctggaatcaagccatcctcccaccttagcctcctgaaaacacctgcaaattcaatccaatactatagtaattcttaagccttttggtcttagaacccctctgtaccttaaaactgaggccacttagctttcatttatgtaggatatatcaactgatatttactgtatttgcaattaaaactcagaaattttaaaaacattttctcaggagaaaccagtggaggaaaaaagaaattttaagaatacaatcatatacaagcacacatgccattaagccattacggtgatgacatcacctcaggcacctgacctctggaaacctccattgtacccttgtgagagaattgagtgtcatgtcttagcatgattatgaaaataattttgagggccaggtgctccgaacttgctcaaatcaatagcaaagcagagagaagctcaacaacttcagaactcagtaacttcaagcactaatagaataaaagaaaacttggggccgaatttcttgcgg

SEQ ID NO: 244026 - DNA, 489 bp, Homo sapiens
tctcttgtctgtggagcctccttcaaacccagggaaataaaaccacctgccacgggttgtggttcttctaggatcttctatcaatgttctctgaggtccccaggagccatgaagctggggctgactcccagggcaatgggactgcagtgtccttgttctttcttgttctatgcatccatgctctgctccacccctgccccttcactctgcccacacacatccctctagactggccttgtggtcagagcctggagtgcatgggctgctgggggcctgtgggctgcactgggccagaacccctggcaccttcaagactggcctggagccagcaggtaggtgacctttccagggcctgcctatcccagctttctcctccaatccctcccctctcttgcctgggtcaattagagagagcttgtctgttggctgcctggcagggtggagttcaggggcaggtcaggagcccagtgacagctcggaaaaaaaaaa

SEQ ID NO: 244027 - DNA, 452 bp, Homo sapiens
ggaagctactgtatccgtcaggcaaaaggcagtgaggcctgaaccacatagtagaagtaagaaagaagtcaaatgcaaaacgtcctatggtattcaccgtctaagactagctctcaaaattcttctttaaaacaccttttgaaatatatatccttttggctgggtgcagtggctcatgcctgtaaccccagcactttgggaggctgaggtgggaagatcgcttgagcccaggaattcaagaccagcctgggcaacgcaggaacacagggacacccaatgtctacaaaataaaaattaaaattaaaaataaaccctagccgatcatggtggcacacacctgtggtcccagctactcaggaagctgaggtaggagcatggcttgagcctggcgggtcaaggctgcacgatcacaccactgcaccccagcctgggtaacagagcaaaaccctgtt

SEQ ID NO: 244028 - DNA, 373 bp, Homo sapiens
ttcaatgactgtgcagtcctcagaagagattaggctgatctttaccaattgacgtgaaaagatgatgatattaagtgaaaaaaaaacaggttgctggctgggcatggtggcttatgcctataatcctaacactttgggaggccaaggtaggaggatcgcttgagcctaggagtttgaggctatcctgggtaacaaagtgagacccatctctacaaaaaaaatcaagaaattatctggatgtggtggcacatggtcccagctacactggaggctgaggcaggagaatcacttgagcccaggaggtggagtctccagtgattcatgtttgtgttattgcactccagcctgagcaacacagtgagaccctgtctta

SEQ ID NO: 244029 - DNA, 421 bp, Homo sapiens
ttgaagtcctgtactctatttttagaagctcttttttacgtttccgtggttcagggcatcagtcataaacatatttattattcagcacaaaaatgttgttcagtgtcttaaggctgtttaaactttacggaaataataaaccagtggcacttcagtggatgtaatatatgagcactactgaacaaatttaagggcggagaattttgcggtccttcacagattgctgctctgtctgcgccgccatgaacggtattttgaagaatcctttcctattttacactgagagggttccgtctccatgcttctcacacgttttgattttctgcctcccactgaaagaaacgcttttgtagcccttcaagaaacttcctacatgtctcccctccttctctcctgcctcattattactcctttaaagaaa

SEQ ID NO: 244030 - DNA, 526 bp, Homo sapiens
gcttcagttccaggacaagggtgaaccagtgtggcacacagggtacaaaagttaaggaggcactcactcttagggtcatgcatgaccctagtcccagccctgcccatctgaaaaatcactgatgctcagaagcctttctcctttctgtctccctcagcccataatttatatttctattatttctcatctttagtacagtggttacttgggctctatcacttactagctcactacatatttttatgtagaaatgtctagcatgcaataaaatatggcatgcacagagataagacaatgtgattaacaagaagaaactaagcgaagaaagactcagaggattcagataatgtggtaatcagacatgaactttaaagtaacaatgcttaatctgttcagtaagaaaccagataaaaaatttcaatagataaatgaaatctataataaaaaaagaaatggaaattctatagctgaaaatttagtcactggaaagaagaacttagtgaataggttttaaaaaagaggcagg

SEQ ID NO: 244031 - DNA, 296 bp, Homo sapiens
cagggcatctgagttctagaggctggtggtgagagaagagagcagaagaacagaaattagcccaaaagaggctggaattcaagaacaagatttcatctgctggtagaacaccaaaagcagagcccgcctgacagtgctggaccaggagatgttgaaacagagcttcctctatgcattcctatttaagaactgaatcaacctctcagatttaaaaccatcagaaataactaagtactcacaatatgaagatgagtagttataccttgataacaaataaaatccaaacacttgattaa

SEQ ID NO: 244032 - DNA, 460 bp, Homo sapiens
ttagcctggcgtggtggcgggcgcctgtagtcccagctacttgggaggctaaggcaggagaatggtgtgaacctgggaggcagagcttgcagtgagctgagattgtgggcactccagcctgggtgacagggtgagactgtctcaagaaaaaaaaaaaaagacacaaggctgggtgcagtggcccatgcctgtaatcccagcatttgggaggccaaggcaggaggatctcttgagccagcttgagcaacatagggagaccctatctctacaaaaaaaattaaaaaatttgccaagaatggtggcatgtggaggcaaatggaggctgaggcagtaggatcacttgagcctggaaggccaaggctgcagtgagccctgattgtgccattgtcctccagcctgggtgacagagtgaatactgtttctaaaaagaaaaaagaaaggaaatatataatcagaggag

SEQ ID NO: 244033 - DNA, 449 bp, Homo sapiens
cggggctgccaggagtggtcttgggacgccagggaccctgtgtgtgtggtaggggggccactgctgacaccaacacagacagggttaggctcgaggacaaaccgtattcgccgccgccgcacctgccacgcacatcggaagcgttagcacagttttccctgcgtggggctgggtctcctacccaggctgagtttctcccctctaagaggaaacaccgccagccttctttctcctacggcctttggattctgaaaactcgctgtggggagggacgtgaggcttcggcaccaggaacccctgcgggctaagacggtgttggccaatcacatccagtcactctcctgggaaagtcacttttatggagacagccccccaagggggtctcaagatatattgaagttttggttagttatgtatgctgactaaatttacaagtaaacttgtttatc

SEQ ID NO: 244034 - DNA, 463 bp, Homo sapiens
ttgagacggagtcttgctcttgttgcctaggctggagtgcagcagggcgatctcagctgaattcaacctccacctcctgggctcaagcagttctcctgcctcagcctcctgagtaaggcacctgccaccatgcccagctaatttttgtatttttagtagagacggggtttcaccatgttggccaggctggtctcaaactcctgacctcaggtgatctacctgcctcggcctcccaaagtgctgggattaaaggcgtgagccactgtgcccagccagaagtgcctgctcttgttagggaagtgtagtacatatgcgtgtggtagtggtggggcatatcactttatatttatatacctggttgtttttcacctgctgttctgctcacattatgctatgtgtgaggattgaacatttatttgcttggtgaagtctaagtgttcaatgtatgtttgctgctattgtt

SEQ ID NO: 244035 - DNA, 229 bp, Homo sapiens
tgcccagcctcctgctggacaggaaacagaacccacctgaattccgacatcattctgctaaggacatatccagggacagcttgccctctccactccagcctctttaacaaccaggactggtgtgtcatctactttggaagggctcgttcaccttgctgatatcctctccctgcccccatactctggatatgagtgttgtttgttcccaacaatattctcctttgggaga

SEQ ID NO: 244036 - DNA, 516 bp, Homo sapiens
tgtaaatttcttgcgcaaattccttttacgtgatgttaaagcacattcccgaactgctataattatgtaatttatcaatgtgaaaagtggactttgagatgtagtagtccagagctaatatggtgagcagtaagggaatgcagtgtgtttagcgaggagctatttccgtgggaaataaatcttttgagaaagactcgtggatccctgggcttcactgtgagctgtgcatccaggtgataagaactggatcccaagttcagctctgacatgaaacactaggtgcaacagacaagtcccttaacctctttgagacttagcattcttatctgtgaattgaagtcagactagttgcatggttaccggactttggagtatcagtgaccagtaagatatttaaaattttggaataattttaggttcacaggaaagttacaaagatagataacttcccctaatgttatccttcacccagatttcctcactgttaacatcttaagtgacaatagtgcatttgct

SEQ ID NO: 244037 - DNA, 501 bp, Homo sapiens
agacaaaaatgctgtatgtttacacgagagtgtagaccattgacgtagcagagcagttcaggctttttcagagctgacctgtctggagtccattctggaagtgtccagctcttgcctcactttggcctcgtccgtatggcttgagagagacgtatcaccaaccactgtgtgcacagagcatttcttccaggacctgaacagccaaaccaaaaggcggaaagttgcccagtcccctctgctgtgccctgatgggatcgttggtggaattccacctctctacggaaagcactctgggacacacctcatgaaaaaggccaacctcttctcttaacaaaagagcctttcacacaaaaattagccaggtgtggtgcgcgcctgtaatctcagctactcgggaggctgaggcaggagaattgcttgaacccaggaagcagaggttacagtgagccaagactgcaccactgcatgtcagtctgggccactgagcgagactccgcctca

SEQ ID NO: 244038 - DNA, 481 bp, Homo sapiens
tttttgagacggagtctcgctctgtcgcccaggccggactgcggactgcagtggcgcaatctcggctcactgcaagctccgcctcccgggttcacgccattctcctgcctcagcctcccgagtagctgggactacaggcgcccgccaccgcgcccggctaattttttgtatttttagtagagacggggtttcaccttgttagccaggatggtctcgatctcctgacctcatgatccacccgcctcggcctcccaaagtgctgggattacaggcgtgagccaccgcgcccggcctaaatatgacttttaaaggacataaatttcctatataaggtgcaggggtgggaaaatataatttggttaattatcccatatatattctattagtgactggaattatgattaaccatgtgccaggcatcagggtgaatactaacatacataatctaatttaataacactaacaataataataaaatgat

SEQ ID NO: 244039 - DNA, 455 bp, Homo sapiens
atattttcttagtttcctagacataccgtgtcctctctcatagtatttttcttatgtttatcttgacctttgcatagcaaattcccccttattcctgctcaaaagttatcctatagaatctttcctagccagcctctgtcagctgtggtagatgaagccttccctttactaccagagtactctgttcttacctctctcatatttttttctctttcatagtattttcatatcgcataattctcttttaaatgagttctaagagggcggagatttgctctaggacttgacatatataaaataatgtttgccgtgagagagattggttgatttgcctttactgactgaatcactacagagggctttacaggtcagatgaagaatttagaatcagtgctatacaatgttatatgttaattccatctaaataaactcagattgcaaactgaattgccaaa

SEQ ID NO: 244040 - DNA, 747 bp, Homo sapiens
ctgcatttctgttgaaaaagctctgattccaaaacatttttttgatctgaatatgtgactctttactaatttcctttttgcgttgaaagagcaaaggaagttaagtcaattaagattgatgttctagaagaaatttcatatatcactgtttatgatttgttgctataatgttaaacagttacaattcattgtatctgagatgtttgctacctggagctgacatttaggcaaaaattatcaggtgtttatagattctgagaacagctggaaagactaatttcatatcttcattgaaatcattagtattccgggtaagggaaatggcactattaccatttccagtggaaagtggtttttctcttccaacttgctgccacattccaaactgtgagcacttttattttgtaccctgatctaccacgagagggtaaggaaaacacagaaaaagaaaaggggtaggccgggtgtggtggctcacacctgtaatcccagcactttgggaggcagaggcgggtggatcacgaggtcaggagatcgagaccatcctggctaacacagtgaaaccccgtctctactaaaaatacaacaacaacaacaaaaaaaaaattagccaggcatggtggtagtcccagctactcaggaggctgaggcaggaaaatggcatgaacccaggaagcggagcttgcagtgagccgagattgtgccactgcactccagcctgggtgacagagcgagactccgtctcca

SEQ ID NO: 244041 - DNA, 453 bp, Homo sapiens
accacatatttttcttctactttgtctatacactccaaccatttatatagctttccttctgtccctttttcatttaaaacaaaattacctaactccctaccaccttctcatttttctgtatatataaatgtttgtgtcaaacgtctgaaatttctggcttgtttgtatcacaacgtggcctcatctaaaccaaatacaatgatgtagtctaaaaacagaaaatgacatgtgttttagacctgcaagacactatctgttcaatggctgaggtgagggtctggactacagattttttataaagtatatgcagaaaaattacaaatcactaggaattctttcagttgtgaagaatgtctgacataagatttgaagtgctacctttccagcttatatattaatttgcttatatatttgatatgaataaatgctttttttctcatgggtccttgcgag

SEQ ID NO: 244042 - DNA, 456 bp, Homo sapiens
aagcttatcagctattgttaatgttagtgtattttatgtgtggcccaagacaattcttcttccaatgtggcccagggatgccaaaatattggacaccactgctctagtggaaaaagctcagaactggtgacaggttctagtctgtcaccaattatcatgtggccttctgtctgaccattatttcatctatatgatgaagaaactgaaatagttgattagctctcaatctggcaccttgaaaccttccagagtcctcaaagttggtaagagtggggatgagctacgtttaacataccagaaaacttactgtaaataatctattcacctgggctaggtacaagccaacaaaaatgccaagccacggtaatgttcactatctcacatagatggcctttttttttttttttttttgcaatttttttttttctaacattaacaatagctgataagcttaga

SEQ ID NO: 244043 - DNA, 581 bp, Homo sapiens
atttgggggcattgagttcataacaaacctaggttccagactgattctggcccttcagctatgggacttttggtatattatttagcctgtcttaacttcagtctccacctctgcgaagggagaaaatagtagtgcctgacataacatatgtaaagcaccgggcaccatgcctggctcatgggaacccttagcataagctgttgttagaaatgagaagctgctatggatcttactctgtcctgagtgctagggatttaacagactgaacatgtggcccataccttgcattatgttgctactactgacatcttggaatccctatcttctcatctctgctgtagcctcacttctctggttcttaccctgattttgcctcaataacgattggcttgctgaatacctactgtgtgccaagctctggatatataagttaaatttacgtctcaacagccccaagagttaattattattatatccaccattttcccttcccatatttttgtttggttggttggtttcagagaaatgaaccagaaactctcacagctaagtagcagagctaagatttgaacccacagttt

SEQ ID NO: 244044 - DNA, 378 bp, Homo sapiens
ctcactcccttcagtcatactcattagaccaaacccaactggaatcagtgcagccatccaccttctccccccaccttgacccactgtgtgctggtggagacaatcacacctccagagtttgctgcttggagctcacaaggctactgctatttcagacacagctgatgatctcacctcctgcattagagtgaggatgagccctctgagaggaactcctcaacttctaggctcccacctgagattccattctgtcgcactagtgtgttaaatccagttcttactggcttgcaagagtggattgttaaatgttcaggaattttatgagccagttgttaaacaccgttattactaaaaattaaatgaagactgggtgcagtg

SEQ ID NO: 244045 - DNA, 396 bp, Homo sapiens
caggtgtgagccacctgcccagcctgagatcagttttgtctggaatgttcttcatgtaaaacattaagattgccaatctgtaatttgcagcatcctctttcttccttctttaaatgaaactgagactcttccctgactttgatcatctgatccttttccctttttcatgagccatcaaaggctattataagctttcatggatctcatcacagatcctgtcaatatccttgggtgtaattgtggcgagataatattttgagatattacctgagaaatccttctctgaattttttactctttgccttttattcatttagtcaatgcattcattgcctcagggaaagactgttaccgcagaaaaccaaagaaagagcttctaaaatttctgaagcttat

SEQ ID NO: 244046 - DNA, 350 bp, Homo sapiens
atggaaaaaatagaaaatctcagttaagaagtagaagccgtaaagaagacacaaatagaaatttaacaactgataaatataataatcaaaataaacagaagggagctccacaacagaatggaggaaacagaggaatgaattggtgaatgtgaagataagacaattgaaactgcccaagctgaaaaacagaaaaaaatactgaagaaaaagtaaaattgaacagtgcctcaggggacctatgaatcagtaacaaaagatctaacattggagtcccagaaagaaaagaaaaagagggtgaggtggaaaaagtgcttgaagaaataatggtggaggcatccaaattggaaagg

SEQ ID NO: 244047 - DNA, 497 bp, Homo sapiens
tctgttattgtggccatgggaaatgaacacaaggacccctcaggcaggggttgccgcttctcagctcttcctgagaagctcctgagccagagagctcaggctggtttctgaggagctcatcctaacccactacacaaaccccatccagccgctcagcagatgcctcccctgcccctcaaccctccactcccattatagctgctccatctatgggaggatggcctgaagccagcgatgaggggatgggacaacggccaggctgtgcacacattccccctgcctgctgcctctccacccctagaatatccccctctatggctgcaggaatgcaaacttcctctgccttcttttctcagtgttccacacacatgttctcttgactttattgactaaacacattttagagcaaatactgatgctcagactggctctaatgcaacagagaatgcgaaaccacattctgtcattttcataaagttctgattgcaaacaacaat

SEQ ID NO: 244048 - DNA, 227 bp, Homo sapiens
  misc_feature (196)..(196): n is a, c, g, or t
  misc_feature (200)..(201): n is a, c, g, or t
  misc_feature (215)..(215): n is a, c, g, or t
  misc_feature (218)..(218): n is a, c, g, or t
catatttgcaatacacctttagcacagattaaattcccaaatacactcggctgttcctgagatcactccagtgccttcctccttggctgatctccttttgggctgccatcttcctccttccactgcagaatctttacagagtgctttcatatctcccagagaagtccccctatcctacttccccttcctaattccncagnngctcaataaagtanaanagcttaaaa

SEQ ID NO: 244049 - DNA, 291 bp, Homo sapiens
cgcggtgtacacaccaggccctctgtctggaaggcgcttcacaacctttctgccttttcccgcgaggctgtaggtctagcttagttgtagctttctccaggaagcccttctgaaatgctgcacacacctccttcacagcacatatgaccccgcaacaggaggctagtctgcagcgcctcgagggaagagactgggcccatccacatttctatcctgaagaccagcccagagccagcatctaggaagcacccagtaaaggtgtggccaatgaattaaagactggatgaatga

SEQ ID NO: 244050 - DNA, 386 bp, Homo sapiens
gcggccgcgttccggcgtgatccctggaagctgccagcaggtgctgctcaaggaaggaacagcttcagccataggtgacagtggcacacatctcactgaagacagagaaggacaagttgaaaacatggatttttgtgttgtaccatgtcttatgatggtatcattcaacaatttttaaaattagattttggaaaacatttttttatcttctacctcattgtattctttcaaccgccaagtgaagccagtactttaagcctcactgccaatttacagagcacagaataaaacagaagagaataaaatgatatgggttgcagcttcccagttgtaacgagcaaaaggataggagcctcagactcttagttctgaaccctgcctgggtt

SEQ ID NO: 244051 - DNA, 478 bp, Homo sapiens
catttaacgttttggaaaaatgtattgccctggtttgattctccaagaatgttgatggttacaggctcctcagaggagaccatcagtctcaggactaggacttaacagcttgatcatgatgtcagtaatagatgtttactgagcccactggtacacaccgtgctattactgagtctctttaactatagccatttctgacaaggaatttaccatctgcctcctcaaagtggatagtttgggtttgttcgtgtgtttacattgtgaaattatgtttatcaagatctctgtaccctaactaatcaccaattttttgagtgatcaaaaagacacagccaaaacaagtcacagcagtttctctacccggctgagctgactacctacaagagagaattgtggtaaattatgtggtcagtgactcagagaaaggtttgtagacaccactcgtgaaagcttgcattaaaataacacatgcaagagt

SEQ ID NO: 244052 - DNA, 272 bp, Homo sapiens
cttcaaattagagtccccctcgtcctgacatcctgtgtggtcggcctcggccagacacagaccatgtgtccagctttgggcttctcagccgagggagggtaggcgcgggagggagggaaaggctgagggcaaggcatccaaatggacacgtagttgggaaaactaaaaagaacatgggtaagaagaagagtggcccttcctttctttcttgcctagaaggaatttttgtagctaaggcataatttacatacaataaaaatgcagtgtacatt

SEQ ID NO: 244053 - DNA, 487 bp, Homo sapiens
cagcccaaattttcgctaagtcccaactgccatgtacaacattcagtatctttactaaggctaatgataccaaaaataggcaacatggactatttattgagtctttacattattagctcatttaatcctcatagttaatttatgaggtaggtcttgttatcccattaaacagatgaagttactaaatagttcctccttttttcacaaggataaatttccacaagggtaattaagtgatctctgctactgagacctccagaaattcacgtcttccattgctgcatatatcatattgagtaacatttcagtaccacccttttttctaagataaattttttactcttgatgacagcattaagaatagtgtgatagactttttttaaggagtgttaataatctaaaacgttgagaaagaaaatgcaaggcatgcaaaacctacccaattaacatgcaagaggaaaaaacattatcttaatgatttccaagt

SEQ ID NO: 244054 - DNA, 427 bp, Homo sapiens
ctagactttaatttattgcattttctccctttagacaggaagccacgtgaggtcaggagcttgtatctcctcatggagtgtgtgtcatgtgtcctgagtgtggagcaagcgtgcggtgcatggtaggccacataaaggtcaactccctgacgagaaaagctccagttactatgcagagtaagctgaactggcaggacggccaacaggcacgcagctcgtgaaacgtagtccccccaacgcaaatacgtgttccagcatgagaggaagggacattcctaggagccagaagcaaagacacgactcaaaacaacaacccgggcagctgcagccctgaggcctacagaggcaggtgacagggacgccagatggtacaagcttccagtcaggaaaggtcctgaggcccctgcatagagccaggtgctgatgg

SEQ ID NO: 244055 - DNA, 283 bp, Homo sapiens
ctgcactccagcctgggcaacagagcgcaagaccctgtctcaaaaaaaaaaaaagtcaaaaagttctgcctttttaagccaaataatgaaaatgtagtttgtaattataacatatgtagaagtgaagtggcatgacagcagtatcacagacgccaggagtggggatatgaaagtataccattaaaagatttttacacattatgcaaagtgatataatacttgaagacagactatgataagtaaaggcatatactgtatgttatatgccctagagcaaccacca

SEQ ID NO: 244056 - DNA, 991 bp, Homo sapiens
acccgacagcgcttatgtcagtgtctttgtcatgtttcatagaattgttagactttaaaagaacctcctgaaagtctgcctctgaacatttgtatggttctgccaatgtctgatgagaagaatgcttccctgtttgaggagtgtgttcactgatgagaggggacgggagaagcctggttgtgatttcaggaataattctcaaaggagattatactcttattgcaaaatggggtctgctatatattgttcatgtcactttattgcaagtgacatgaattatatgacattaaaaataatatgccttgaatcacactgattagacccagaaggatcattgagtttttggtggttttaaagatccaagaaagacctatctagcccaagtgtatgaatgagaagactgaagcccacagaagtgaactcagcaccagtgtctcaagaaccccagtactctggtttttttcttttttgagacggagtctcgctctgtcgcccaggctggagtgcagtggcgcgatctcggctcactgcaagctccgcctcccgggttcatgccattctcctgtctcagcctctcgagtagctgggactacaggcgcccgccaccatgcccggctaattttttgtatctttagtagagacggggtttcaccatgttagccaggatggtctcgatctcctgacctcgtgatccgcccgcctcggcctcccaaagtgctgggattacaggagtgagccaaggcgcccagcccagctgtacgttttaaaagtcaagcacttctgtttagcagcccatgtaagcttgtcaatcattctgaattgaaatgtaatttattctgtaatttcttcaatgcattatatttccccttttctttaaatgtatgtaacattgtgttctacagttttgctgccatgattccttggcaccgtgaattcttactaagcaatgtttgttaacagtatacaggctcgatactaggcaggaagagct

SEQ ID NO: 244057 - DNA, 523 bp, Homo sapiens
agttgatgcaggaaagggtttggagtattcaaagaacagaagggaagccactcaaggttagagaaaatagcaagggctggagcaaatagaacatcattagtcatggtttagagcttggattctgtcactagctagtctgtaagaatggtttgaaggggcaagagtgaaagaagagactaattgggagactcctccagaagttaaggagagaggtgatggagacttgaaaaagagtgggcagtggatgtggcaagagctggattaatttgaggtaatcgtagaggtagaatcaatgggaattgggtataggggatgaagaagtagaaagcatcggggctatctaggtttggagcttgagcagctagatagatgatggtgtcattttactgtaattagaaagaccgggccaggcgcggtggctcacgcctgtaatcccagcactttgggaggccgaggcgggcggatcacgaggtcaggagatcgagaccatcccggctaaaacagtgaaaccccgtctctacta

SEQ ID NO: 244058 - DNA, 941 bp, Homo sapiens
ctgcctctgatagttatgagggatccctttcaaacagaggaactgcttcaactgtttgttagggctaacccaaatgttcagaccccttcagggacaccttccaagaaaaagcatcatttttttttccaagcagcaattccacacagaggactcttcggaagtgttgattgcaagaagagggcttgggaaaccatatcctcagggagtgtttttctgcaggctctgatgaaaggaataagcattgtcagattttttaaatgttctcttacactaaaatacattaaaataactaaatatgtaccccaggaaacctgggagaacaccaagtaaagtgcactgaggataacgcaagaactaaagcctagctctggttccttcattcgtgcaatttatatttttttgagcaccgctcatgtgccagccctgtttagtgtcttggtgaggacaaagttgacatgagccttctctcagagttcggtattgtgggcacataaacaacaaaaaacctctctctcactagtaatcaggggaggttgcaaattaaaactgcggtgagggagaatttcttgcccatcagattggcaaaaattttaaagttggacaatgtcaaatgttggcaaggataggaagcaatatgagcctcatccatgctggtgggagtataatgtgatccacattatttggaacagtgtcacttttcctaggaaagttgaacatgtgtatataacctatgctccagaaatttcagtgagataaatacatggaggcctgcccactctcgtgcaccaggagacacatacaagcgtgttccgaggagcaccatccgtaataccggaaacaagactgtcgaccaactaaagagagcataaataaattactgcatatttatacaatggaacactatggtgatgaaaataaatgaagcaagaagcaagttgcag

SEQ ID NO: 244059 - DNA, 681 bp, Homo sapiens
cggtttataaggctcacagtatagataaagggggcgagagggatccaccagactatataaagaatggtgtggtaatgggcccccccacaaaaatattagcaagagagatgtaagcgaacaggcggttaagagatggagatggaatctcactctgtggagtgcagtggtgcaatctcggctcactgcaacctcagccccccaggttctagcgattctcctggcacagcctcccaagtagctgggattacaggcacaacctaccatgcctgactaattttgcatttttagtagagacagggtttcgccatgttggccaggctggtcttgaactcctgacctcaggtgatccacccgcctcggcctcccaaagtgctgggattacagacgtgagccaccgcgcctggctcagagggccttttctaactggagaattcctgccagtctccctgccgcttggcctcttctcctcatgatgaatgaatagaggagggaggctcttaattctcctggagtcagctccagacagacagggtattggcatgccaatttccagcctcagtggtaaaggtcgacacgctaatcaccctcctccatgaaacgtgacaaaaattacctgaagaaagccacagccaagctccaggcccctgccccacaaatccccttccccatgcctctctcaag

SEQ ID NO: 244060 - DNA, 772 bp, Homo sapiens
aaatcatttgaccataatttatagctggttccattttaacacgtttgcttccatatatctcatggcaatgggaactgcaagagtaatgtgcatattgcatttacctcttcagtgacctttattccagtggcttgggaacaaaagttaacttcagaacttatcttccacaggacaatgcaatgtagttgtaggtagatggcacagggtcagtgctttccttttaatgttgtaaaatatatacatttatattggcttatgtttacaatagaagtcttctgtttaactaactttgcacaggtttaatttgattcagtgacttagtctactaattaatgaattgtaggaaagttaaatatattagaatgaacttgtgaaggcgataactataggaaaaaatcttttgaggcactgtaattattgtaaaaattaatctgtgacggctaaataaaatgctgcactcagaaaaaaaaatccccgaattgaattaaaaatgattagcatttatcatttacttttaacatagtgcttccaggcaaagggggaaagttggtggtaaatagaagtttggattttttttccttctccttgggagtgtgtgttagttactgttttttagttttgatctatggaaacaatgcttatttaggtcccaaatgcttcccctctctttttaataaactttttggtgatcattttaacatagttaatattattaactagggatttgttttttgtggttgtgtgtcgtaagaaaagtaaaattcatatttgg

SEQ ID NO: 244061 - DNA, 538 bp, Homo sapiens
ctttattgaggtataactcatatgtatcaaattcagcaattttatgtgcacagctcaatgagttttgacagacagtactacaactacctaaacgagtaagtcatagactctttccatcactccccaggttcctgcatggctctttgcagtcaatcccctcctcccactcccgaaccctgccagtctgccttctgtcactaaagttttgacttttctagaatttcatatcagtatcatcataaagcatatggtctgtgtctgatttctctcctttagcctaatgtttctgatggctatgccatagtttgtttattcactcacccattcatgaacatggaactgtttccagttttgggctattaagaataaagctcctgtgaaaatttatgttcaattctttatctgggtgtggattttctttttaggtaattatttaaattgacaaagaaaaattgtgtaaatttatcatgtaccacgttttgaaatatgtatacattgtggaatgactacgttgaaataattaaactgacatacttat

SEQ ID NO: 244062 - DNA, 393 bp, Homo sapiens
ctttattgaggtataactcatatgtatcaaattcagcaattttatgtgcacagctcaatgagttttgacagacagtactacaactacctaaacgagtaagtcatagactctttccatcactccccaggttcctgcatggctctttgcagtcaatcccctcctcccactcccgaaccctgccagtctgccttctgtcactaaagttttgacttttctagaatttcatatcagtatcatcataaagcatatggtctgtgtctgatttctctcctttagcctaatgtttctgatggctatgccatagtttgtttattcactcacccattcatgaacatggaactgtttccagttttgggctattaagaataaagctcctgtgaaaatttatgttca

SEQ ID NO: 244063 - DNA, 454 bp, Homo sapiens
gcaggattgggcagaagaagttgggctgtgattcagccacaacgagacctctgccaaccccacagggagctctgaagctaagactgcccttcaaagttatcctgagttggaactagggtacctggggcaggtaccttcatacctcctgcctccctcatctaccagtcgttggatgcaggctactcacaggaagagagacatgaccttgagcaaggtggctcttcttagatccaggaaattcccagaaggactgtcagctgtcagcagcaagcagctggggagttctttagtccttaaggaggatctaagtgtcaccacatgaagtccataccaatcattagaactaattattgctgggaattgtggtttgattcagcctaagttatctgaactctacttttatctggtctttcacactttttcattcttttccacccttccacagtcatttatt

SEQ ID NO: 244064 - DNA, 351 bp, Homo sapiens
aaaaggtatatgatttatctatcattggaataccagaagaagaaggaagaaaaaagaagaaatatgtgaagtaataatggccaagaatgttacaaaatcaatgacagactttaaaatatagatccaggaacctcagaaaatatcaagcagaatgaatgataaagtaagtaaaccgtgcacattatatttaaaaactgcagaaaaccaaaaactaagagaaaatcttggaagaagcaagagcttggaggggaaaataaaaacttacctatagaagaacagaataagaattatggcagacttctcatcaccatgcaagcaagaaaagagtagagtaaaatattttaaaagttg

SEQ ID NO: 244065 - DNA, 473 bp, Homo sapiens
catactcatctgttggtggtgggtggggggtggactggatgaggacagcattgggcaacactctttctggcctccccactgcagggagccacaattactgtgggaggccagggtagtccagggtttccctttgggccatcagcattccaactgctcctcctacttctggcctctggagaactaaattaccaccatgcacttcccattccacctgtgcctcagcccgagggtcctgctcttcctgcatattcaagctgatctttctagggagtagcctgcactgtgccagcactacccccttgtcacaggcagcacctccctgtgctgggggagcctcagtctgcccttgggctcaggcccctaggctcaggttagctgacattcccaggaaatcctacaacttctcctttcctttcatggctgtaagacacagtccactatcagtctcattgtaaaagacatttctaaagagt

SEQ ID NO: 244066 - DNA, 380 bp, Homo sapiens
cctcgcagcattgttgtaaggactaaaagagacagtgtacgtgaagtgcagagtatctggcattcaacaagtgctccctaatggcagtcggattggacggcttattttcccttttcagttctcatggcactgtgtagttgtactgtaactttagggggttgcttttcctcatttgttttaccatgaaaaatattttcttttcccctttggagaagagaagtggcacacacaccactgaggatcactgtgaaggtggagaggcgttgtagaagattggttaaatgcccgggctctggggccagattgcatgagataacatctttttttttgggatggagtcttgctctgttgcccaggctggagtgcagtggcacaatctc

SEQ ID NO: 244067 - DNA, 302 bp, Homo sapiens
ttctctttgcaatcctttaaaaaattcagatcatgttagtcctctgcttagagccctccaatagctttttgtcttaaagtaaactctgaaggccttgctgtggcctgccaggctaaccctcttccgaacaaccatcctcacttcgagccttgccagacagatctctttgctgtttcttaaaaacatcaagcttacacttgtaatcacagcactttgggaggccgaggcgggcggatcacgaggtcaggagttcgagaccagcccggccagcatggtgacaccccgtctctactaaaaaaaaa

SEQ ID NO: 244068 - DNA, 345 bp, Homo sapiens
tgatgaatcagagggatacctaaatacaaaaactgagtgaaaacaccaaaggatgagccaagtttgccaatgatagagatgatatcctactcatatttgctctgaagcaactaatacaatgcttcatacatggttccctcttgtgatgttcatcttaagctgactttttccagatacgaatgttgtgggtggcagcagaaaaacccagcacctgggctcacatagtgcttatgcccagtctcaatcttgatgcacatgcaccccgtgtgtacttcccctgtctgtctaatatcactgagtttccttataacttcagttcttaaaagcttcatcaccataacatca

SEQ ID NO: 244069 - DNA, 555 bp, Homo sapiens
gggtaagcttgaagttggtcactgcaaaagaagagcaaatttgtgtatatggtgagggcagtccatgaaaggatgctcctatcttttatttttctttttaacttttattttgacataatttcagacatacagaaaacgtacaagaatagtaccaaaaagttcccatatattatggtgtgcatgtgggtagaaacatttttctggaccacttgagaacaagttgtagacctgatgctcctttgtccctaagtacttaagtgtacatttcttaaaattaagggaattctcttacgtaaccccaataaaatcatcaaaatcaggttattaaaattaataaaacactattatctgatctacagatcttttcaatctcacttgtctcagtgatgtccttcacagcaaaaaagaatcccagatcctggtagcacgcagttttcataagtttgtctcctttgatctggaacagtacccagtctttgtgttttatgacattgacattttgatgagcatgagccagttattttgcaaaatgtcctctgttttggacccccttgt

SEQ ID NO: 244070 - DNA, 448 bp, Homo sapiens
ttagccctcattgatccattccgagctaatttttgtatacagtatagggtaagggcccaacttcatattacactattttttttaaaaagtatgcatatatgtttgtgtgtatgtatgtatttatatttttaaatgaactgcactgagtctatctgagctcgggcattactgttgagttatagaagagctaagttgtttgggggtctcaaatctatgtgataaatatctcccttaaaaactcacagacttcaggtgaacacaggtagtaaaaaataccctttccaaaacaaacacagtatgaaagctaagataataaaatgtagaatttgaagagaaaacatgtctcctgaaatccaaaggccagttgtatgaaaatgactgtggcagaaacatatataatttcaattgtataggaagggacaatagtctcaagacatgtgtcatggag

SEQ ID NO: 244071 - DNA, 458 bp, Homo sapiens
gccctgccaggtggagggtgagccgcctgtgtccatttcctggcagcgggataggctggccttagccaatgagagtggtgtcaccctgatgccagatggctccctgcacctggccgccctgccttcccgccggagcctcccttcccgtgcccacgagtaccactgcgtggcccagaaccgctacgggcggctggtgagccgacaggcccgggtacagctggcaagtaagtgacagggctgctcctgggattgggggatgagagttggtggggcacccacagaaggcacccatggggcccagactcgctgagagtgggcctgagcagggccagcccagccattagacacagtgtacacactggtagagcctctgattcttttaggggcccacaaaaatgttttaacttcttcaaaaccagaagaaaaaaatgaatacaataataaatatgtaaaaatga

SEQ ID NO: 244072 - DNA, 537 bp, Homo sapiens
tagggttatggtatataaaaaagaactaaagttgctaatttgaaagaggagctaaaactgagtaaatgttttaaaaataatttaaagaactttggatgggaaagaaggaagatggcaaaatctgtaactaaaaataaaacaaaattccagcaggtgtgaaaggatatgaaatgttgaatttgttcctcaattcacttttgcaaattaattacattcttttttttttaagacagagtctcactctgttgaccaggctggagtgcagtggcacaatcttggctcactgcacctccgcctcccgggttcaagtgaatctcctgcctcagcctcccaagtagctgggattacaggcgcctgccaccaagcccagctaatttttgtatctttagtagagttagggtttcaccatgttggtcaggctgaggcaggagaatcgcttgggaacccaggaggcagaggttgcagtgggccgagatcacgacattgcactccagcctgggtgacaggagcgaaactccatatcaaaataataataat

SEQ ID NO: 244073 - DNA, 373 bp, Homo sapiens
cacaagaaggattcaacacaggaaggtgcatttagaaagaatctatgacatattacattaaaacaaaagctggcaggacatggtggctcacgcctgtaatcgcaacacttcgggaggccaaggtgggcagattacctgaggtcaggagttcaagaccagcctggccaacatggtaaaaccccgtctctactaaaaatacaaaaaaatttagccgggtgtggtggtggatgcctgtaatcccagctactcagaaggctgaggcaggagaatcgcttgggaacccaggaggcagaggttgcagtgggccgagatcacgacattgcactccagcctgggtgacaggagcgaaactccatatcaaaataataataat

SEQ ID NO: 244074 - DNA, 229 bp, Homo sapiens
tgcctgtccttccatcctgtactaggtagaagggaggcatgagatgtagataagggagaacacacttagttgggatttagaaaaatgaggtggtacaaggtgccagggagttagaagagagggtagggctaagaagtgggataaagggagaaaaaaaaaagtgcaaaggcctcagaaataacttgggcctatttggataagtagggtcaattttgcctacagttagctt

SEQ ID NO: 244075 - DNA, 459 bp, Homo sapiens
ctatcttactgctaaaagctaatctgagatgcagaggattctacagcctgaaaaactgagaaaaacattgcaagactcacatactttaaacatgattacttctatgcatatctcaatttaagaaaagacaaatgcagtattatacaacactcacattttagcataattttgaggaagggtcttagctcataaatttggcctcctaatgtgaaaactaaatttctgaagcagggcacgttaagcctcatacctgggaacttgggagagatttgagaacttgagagagacttacttttattctcagttttgtcaaatagtagtatttggaccaatggcctgaatgaaaaactccttagaaagtgttcataggctgaaaattattcatcatgctggaatgcgcctacctcagaatatttgcactggctgtttcctgtacttggggactgtttcccctggaaa

SEQ ID NO: 244076 - DNA, 381 bp, Homo sapiens
ctcccaaagtgctgggattatagacgtgagccaccgcgcctggcccttatcacattttttgaccacctctgtgttgacatggcatacgaagttttctccaagtggaagatccccctcacaagattgtcaacaagtgtttggacttgagcaggaaagcagaggaacgatcatgaaattctaatacatttgagaatcctagtggtattaagattttctagctaatatagtttacatccctagcatatggttccctcaagagttcagcaaagcctttctagtaaaaatattaataaaggtcaagatgtaaattggaacaataagcagtaattcacccatcctaccaccagagaataacaagggtaggcatatgtgcgtatgtac

SEQ ID NO: 244077 - DNA, 572 bp, Homo sapiens
  misc_feature (405)..(405): n is a, c, g, or t
  misc_feature (407)..(407): n is a, c, g, or t
  misc_feature (418)..(418): n is a, c, g, or t
  misc_feature (516)..(516): n is a, c, g, or t
gggctcactctgtcacccaggctagagtgcagtggcacaatcttggctcactgcagcctcgacctcctgggctcaagtgatccttccacctcagcctcttgaataactgccactaaaggtgtgtgccaccatgcccaactaatttttgtatttttttggtagagatggagtttcaccatgttggccagactggttccgaactcctgacctcaagtgatccacccacctcggcctcccaaagtgctgggattacaggtgtgagccaccgcgcctggcaagagccttctttacttagcacagaagattgcttaataaatacttcttggttataaaaaaaaaaaaaaaaaaaaaaaaaaaaaaaaaaaaaaaaaaaaaaaaaaaaaataaaaaaaaaaaaataaaaananccaaaattccnatacactaactcctaatccaattcacccccacccccctatcacatcttttctcccaattactctccaaatcctatacctcctccacctcccttttttnacaacaaccttcttccttacttcacacttccacataaaccccctaccaaacaacta

SEQ ID NO: 244078 - DNA, 636 bp, Homo sapiens
ggtgagtcagataagggaagcaacaaaatcaatataaggatctactaccaagttggctactgcagtgaacatcaggtattaaatctgagctgctcaatggttctaagaagaaaacagactatgcctcagcattgtccaccagaagggtaaaatggagaagcaattcactattgtctccagcccccaagggctattgattgcccacatttatttgttactaatgaatgagtgctgagcagagtgccacaggcatcagagaagacctggcagaaagaggaaggtggagtataaaagagggaagagcagcagacacgtgagttgaggcactgccagcctgaaacaggccaaggttgcatatactgtgtatttattcccttgagtccctccttgcaaggccaccgcaggtatgatttatatcaccctacctaaggctacagctcctgttgggtggcccatgaacctgggatctgagccaaccaacttatctctcagaaactccatctctgaatgctccgacaaggaagagacccatggtaccaaaatgaaacctggttctgaattggagaatccaatgctctaggggatagcaatgtaaatctgccaaacccaaaaggctaagcatcatgagattgggaa

SEQ ID NO: 244079 - DNA, 165 bp, Homo sapiens
acgataatgtcttcaaggttcatccatgttgcggcctgcctcagaagtgcctgtctgttttttttgttgttgttgttttttgtttgttcgtttgactttgttttgttttgtgtttccatggagtctcactctgtcgcacaggctggagtacagtggcacaatctg

SEQ ID NO: 244080 - DNA, 509 bp, Homo sapiens
tatctgtcaggtgtaaattttttattttgatgtaatttcagacttgaaagttctaagaataataaaaattcctttgtgtttaccaccctgactgttatcactctcctgtatgtatgaatatgttttaatccttttgagagtgagttgtacatatgcctcttgatatctacatatttccttgtgtattttcaaaaacaagtgatataattatcaaaatcaggctgggtgcagtgtctcatgcctgtaattctcagcactttgggagactgaggtgggaggatggcttgagcccaggagttcgagaccagcctgggcaatacggggcaagccctcctccacaaaaaaatgagaaaaaaaaaattagctgggtgtggtgacacacctgtagtcccagcttctctggaatctgaggcaggataatcacttgagcctaggaggttgaggctgcaatgagccgagatcacgccattgccctctagcttgggcaacagagcgagactgtctcacca

SEQ ID NO: 244081 - DNA, 342 bp, Homo sapiens
gtgggttggagagtggaaagaattgacaggatgacctgagccctgaagtaggagggaagggctgcataagcaaaggaactggctttcgatagttcagctagtagaggactggaggatggaatgtatgggggcagatgctggcaagcaaatgtggttgagcaagtccatgccagaaatgccacaaatttaccaagagacagagtcaagataattatctatgctggctgggcaccatggttcacgcctgtaatcccaacactttgggaggccaaagcaggtggatcacctgaggtcaggagttcaagaccagcctggccaacatggtgaaaccccatctctacc

SEQ ID NO: 244082 - DNA, 460 bp, Homo sapiens
aggcaaacaatggcagactgcattcttcctacttctccaatcatatttatcagtcccattgggagaataactttcagtagtgctcaaaattaccagcatccaatttgtaactgcaaggaaccattcaagaaataaacacttcaagaaaagaaataaaccattcaaggaaagaacacttatgggttctcactcataagtaggagttgaacaatgagaacacatggacacagggaggggaacaacacacactggggcctgtcgggagttgggaggcaaggagagggagagcattagaacaaatacctaatgcatgtggggcttaaaaactgggtgacgggttgacgggtgcagcaaaccaccatggcacatgtttacctatgtaacaaacctacacattctgtacatgtatcccggaacttagagtaaaatttaaaaataaataaataaataacaaaatgtt

SEQ ID NO: 244083 - DNA, 281 bp, Homo sapiens
cagaagccccaagttgaagaagagatacaaagcttggaagcaggaagagatggagcggacacacaaaggaatccaacactggagaacggcaacgtaaaggtggcgtgctaggggaaagctccagaattcctgcagctgggcgctggagccaccctgaactttcaaagacctccctattccagtctccacaatcccaggtcctggtatgtccctggatttggggggagattctggctcctttgtagcaccacaataaacccttattgcctgagttatcccaa

SEQ ID NO: 244084 - DNA, 420 bp, Homo sapiens
agttgaaaagtcaaattttcaaaagcttctatctgccaccatgaacttaacagtttcctagtatttagaaacttttctgatttttccaaatgacaaatacatgacattacccgttcacatatgaataaagatctattccaagtacaagatagagaaatagattttaatgtaacaaaatagaaaaactcactactatggtttcagattctaatactggaattaatctttagaaaattatcactgttgaattttggtgtagtatgaaaggaagaatatcataattaccagaaaacaaatgattagaatattgctccatcttaatcacatatcatatatgtgttaggccagatatttttcatacatttccattgaaataatgtgttacaacactcacaaataaaaaaaaaaattcaaccatct

SEQ ID NO: 244085 - DNA, 394 bp, Homo sapiens
tgagtaaattccatctcaaaaaaaactactttgctcatccacagaagcaactcttctagcatctagaatggtgaatgatctccagaagcttttcaatttactttgcccagatccatcagaggaatcattatctatgacagatgtagcctagcaaaatatatttcttaaataagaagacttgaaaggcaaaattactccttgacctatgggctgcagaacagatgttgtgttagcaggcatgaaaacaacatgaaccttcttgtacatcttcatcagagctgttggatgaccaaatgtattgtcaataagcagtagtattttgaaaggaatctttttgtgaagccagtagctctcaacagtaggcttaaaatatttaataaaatatgctgtaaac

SEQ ID NO: 244086 - DNA, 378 bp, Homo sapiens
cataagatatggtcaatttgggagatatttcatgcacttttaaaaagcagccatattctcaattatcagagttcagagttcaatatacttctgtaggatctgcctcattggccatgtcactgaagtcttctatcttcttactaacggtttgtcttggatagagagtggtgtggtgaattctccagccctgagtataattttatcctttctccttgtatctcctgcactttttactctttgaaagtgactgtattattgggcacatgtatattaataactgtgataccttcatagtgaattgtagcttcagtgttatgaaaacacctccttttaaatctcttttaatgccgtgagctctaacatctactttgttagaca

SEQ ID NO: 244087 - DNA, 373 bp, Homo sapiens
accagcgacctcatcactatgtcaccaaagtgttttggaacttggtattccagagacttctggaacgccgtgcaaggcctgcccccagcaagccacaaccaggaaggtgcaggcacgcccccactagctcctcccctatttattgcctcctggaaaacccaggaccctcttccccatctccacccctacccctgggggcagcccagggagagccaggcacaatgagggctcccaacagctgcaaggatttatctgaacctttgagaaagaggaggagccatctaagtttctggaaacctgagccccaagtgagcccgggttctctctgtacctgcaactacctcatttcaataaagtctgtgttttcccttct

SEQ ID NO: 244088 - DNA, 496 bp, Homo sapiens
aatccatgttcatgggcttcttaataagacaagatatttgtaaagaaatagatttatataatattattaaccttaatataagaagaaaaatacatagaaccctatatccagcaattagaaaatgcacatttttctaggactgacatggtctatttgtaaaaaatggaccattgactaggctgtcaagtaaatcttaaaatttaagaatgcctggctgggcgctgtggctcacgcctgtaatcccagcactttgggaggcctaggtgggtggatcacctgaggtcgggagtttgagaccagcctgaccaacatggagaaacctcgtctctactaaaaatacaaagattagccaggcatagtggtgcatgcctgtaatctcagctactcaggaggctgaggcaggagaattgcttgaatccgggaggcagaggttgcggtgagccaagattgtgccactgcactccagcctgggcaacgagagcgaaactctgtctca

SEQ ID NO: 244089 - DNA, 627 bp, Homo sapiens
taaagcgagaactgaacaataaacagttttctacaacagggcttctataagaccagtaacttctatgctccccaaaaagtatttatgaaactatttgagtggttttacatcttgattattcttccacttaaatattgtctttaaatgacctgcctgggtgcatgtccagaatggaaatagcaaaagttagatgtcttacagtccaagctctacaagtcctagctatgtgaccatgttggttatgattagaccaactgcatttggtctaatcctaacctctgggtgttttaataaactctgatagcctccagggattattaaaaagtccagaggtgaggccaggcatggtggctcacacctgtaatcccaggactttggaaggctgaggcaggcggatcacttgaggtcaagagttcgagaccagcctggccaacatggtgaaaccccgcctctactaaaaatacaaaaaaaaattatcctggcatggtggcacacacctgtaatcccagctactcgggaggctgaggcaggagaattgcttgaaccttggaggcagaggttgcagtgagccaagatcatgccactgcactgtagcctcctgggtgacagagtgagactcagtctcca

SEQ ID NO: 244090 - DNA, 365 bp, Homo sapiens
cttaatgctagcagagtagaaaggaggtacaaatgagctcagttcttcatcttttatagcagggaatcaatagatacaagcatattagaattccgtgagaacaaagaaaacaggagggttttaaaggttgttacatttggaatatggcaataggagtaggatgggcaagaaacatttacttttagttctgtttttactgttgttttctgtatgctgtaggtattactggtataatttctgaaagctaggttgggcgcggtggctcacgcctgtaatcccagcactttgggaggccaaggcgggcagatcacaaggtcaggagatcgagaccatcctggctaacacggtgaaaccctgtctctatt

SEQ ID NO: 244091 - DNA, 180 bp, Homo sapiens
tttaaaatggtattaaatgtctcacacatggaatatggttggaccagtttaacctgtccaggcacagtggctaatgcctgtaatcccagcactttaggagggaggccgagactggaggatcacctgagcccaggagttcaagaccagccctggccacatggtaaaaccccatctctacca

SEQ ID NO: 244092 - DNA, 300 bp, Homo sapiens
caatcacagattaaatataaaatgataaaaccagtggcatagccaggttcaaaagcaagagaaaaagtccatggaccaaaaatggaaaataaatgcaagatggtgaatagtgctgatttcataggctttttggctccaagactgaaataaagcaaagattggcagtagcttgactctggtaggataccagggttgaatttccttcacagaagaagcaggacctaagccaggtagaaaacttgatgtcaggagtttcgaggaggctctctgttgtgaagagcggctgtatatatatataaa

SEQ ID NO: 244093 - DNA, 331 bp, Homo sapiens
gaaaccctttcttgatcgtgtgggtggctctgaaaagagcctttgggttcaggacgccgaggaacgcctcacttggagctggtgtacttggtgacagccttggtgccctcggacacggcgtgcttggccagctcgccgggcagcagcaggcgaacggccgtctgcacttcgcgggacgtgatggtggagcgcttgttgtagtgtgccaggcgggaggcctcgctggcgatgcgctcgaagatgtcattgacgaaggagttcatgatgcccatggccttggacgagatgccggtgtcggggtgcacctgcttcagcaccttgtacacgtaga

SEQ ID NO: 244094 - DNA, 407 bp, Homo sapiens
gcctctaaacttttcgcatccacaaaatgaagcagttggatcagaagatatctaaggttccttcctgtgctaagatcctagagtcctaaagttccattcttgttgttgtaatgaagtgaaaagcacacatattcataccaaaagggtcataaatttaagattcttctgtggagggactgggaaaagtctttacagttttaggttgtaattaagaaagtgaattatgctaaaattgactttaggaaaacaatggtgttttgtgtaaccacatggatatcatctgggtatatgtaaataggaggcaggtaaaaatgatgaatgctaatctctgtaaaattcaaatgaatattaactcttattcaaatagcacaagtacattgcacagggaaatcaagacgtgaattcat

SEQ ID NO: 244095 - DNA, 620 bp, Homo sapiens
agacagagtttcgctctcgttgcccaggctggagtgcaatggtgcaatctccgctcaccacaacctccgcctcccggattcaagcgattctcctgcctcagcctcccgagaagctgggattacaggcatgtgccaccatgcccggctaatttttgtgtttttagtagagagggggtttcttcattttggtcaggctggcctcagactcccgacctcaggtgatccgcctgcctcggcctcccaaagtgctgggattacaggcgtgagccactggcccggccagagctacgagttcttaaagcactttattctttgtatctcagtgagaaggcatcaccatgctctaacttagggatgatggcatcttgaattagttgtgcagcagagatggaaagaagtaggtagacatgagagagacagcttagaaatggcaatgatgggggttttaatgtactttcattattgttagatgaagaaaagccaagggttttaatattttatatacaggtggctttgagtctactgcatggataaggccaaactgggctcctgggggcgggagggcatcatgactctaagtggaaactgctatttcgagaccccaaggaacatgagaatgg

SEQ ID NO: 244096 - DNA, 693 bp, Homo sapiens
aaaacaaaacgttaaagcgtttctttaacagtcgtgggatgtgaatctgatcattttaaccctcatgtttgttagacactgcttatttgagctggaatttgctggaatatctgttatttatctgttatatactgtaccagatccaaatgatatattgtctaattttattactatgttcattaccttattggaaacaatacaattttgtcctgatacaatatgaaaaagactatttcttttcaactagggcacatttagatttgtttttgttttactgttgatttccaagagtgctaaatagtatctttttgttactatgtatacagacttgcacaaattttcatagttgtagttccattaaaggcactggactccaaaaaattatctaaagtatttttgttttccattactttaaaagattaattgaataaagcattgtggtggatctgtggctccattaatcattctgaaattgatatgtttaattctggattttgtttttgagagaggagataactgtcaatcaaatattgaacagagaccctagtatttcttttaagttcaaataaatctgggaggaaattgcaactttgttcatactcctatccatggaagtagatactcatgaagtatcataaatagaattttgcctttaatgggaaggcaaagctaataaagacattatattaaata

SEQ ID NO: 244097 - DNA, 419 bp, Homo sapiens
tcataaaaatgaaaaatgtctccctaactgaattataaagtctttgagaccagaagccacactatgttagaatgtgagcataatctgatttgtacagagttgatatttaaatatttgttagttggctagaatacatgagacataaaaatgcaaagtttaaagttccacttcagcatgaatagcagttagcacaatctgactaacttctctcaatattaaaacagaagacattactgaaaaaggtcaagacaagttaaactattggcataaatttttcccctacagaaggtcattctattttgaaaaacattttgaatggtaatagaattgtacaaataaactatctcagaatttaagcaagtgcttactacaatcagctatattaaataataatagtgtttatactttagtcaataaac

SEQ ID NO: 244098 - DNA, 649 bp, Homo sapiens
  misc_feature (515)..(515): n is a, c, g, or t
  misc_feature (518)..(518): n is a, c, g, or t
  misc_feature (537)..(537): n is a, c, g, or t
ataacttctctaatttaaaacgtgtgggggttgcacattttaaaaagccaaattaatagttttctcaagtttttgaggaatgatgtactcgcgtggagaaatttacctatgacaatcatcagtcctatgacatctgttctggcctgcagagctgaaatgaagtgggaaatcaatacattctcagacgaagaagaataagagaatttgtcaccagtagacctgcagaagaagaatgactaaaggatggtatctaaacaaaaacaagccaaaagagaagaaaccttggaagggagaaagaacactgttagcaaaactatatgtaactacaatagatttttcttctcctcttgaattttctaaagtatgatttctaaattatgctggttgaagcaaaaattataaaactctctgctgtggttctaaatgtatacaaaggaaatatttaaggaaattattttataaattggggaattaaaggtaaataaaggtataatttcacaggatgtaaaatgganaanaaaaaaaaaaaaaaaaaanttgggccaagtggattttaaattggaccaagctatggcttgcggccgaatttggggctaacttgcgccaatgcccctataggggggcgtttaacattaactggccggcgttt

SEQ ID NO: 244099 - DNA, 403 bp, Homo sapiens
aatttcttttaacaagcagcacagaagagaaaaataccacaggaaagaggcagaacaccaccaccaaaaggagaagcccccttgcttctggagacagatggctttccagggttcagatggtcttcacttatactaacaatgctttctctgttcacaaacccctctccagaaagactaacacacacctaaatattgccaagagataatgactccggttatcactctgtaaaaatgatacgatgagcagttggtcttacaagggagccgtgagaatgtgtgtggggctgcctggagccaatctttactagctgtgtaaccaggagggagtgctgtgaccactggcgcctcagtaaagtggagataagaatggtacctaattcttcaaaacaaggatctctgagta

SEQ ID NO: 244100 - DNA, 457 bp, Homo sapiens
aaattctcaattccttaggtttatgtgcttttacttcttttatttgattaaaattgctgtcatgacctctctctgcagagggctgcatcattttggtcattctcaagtgatctctttgagcaatttaagaattgccataagattctaacctctgctgtaactatggttgtgtgttcttggttagaccactaaatcttattagcagttttaaaaattattccttttggtttagaagttaagactaaatgctgaagtttttgtaacttttggttttgatatcatttcaaacttaagaaaacatttgaagaaaaggacaaagaatttccacttaccctttacccaggtttaccagttattgataagtatatccatttgctttaccagaaggctaacttgttttagttctcattttcacctttgagacatttggaataaatatcaatgttaacataaattg

SEQ ID NO: 244101 - DNA, 467 bp, Homo sapiens
ttggaatcaaccaagtcttccaagctcctgttaaggttgatattttgacatcctcccatgaatcatgaatggtcttaatggcattcacttactagagtagtgaattctgtccagaaggttttcaatgtgcttagcccagatgcatcagaggagtcattttctatggcagttctagcctgatgaaatgtatttctttaataataagacttgagtgtcaaaattactcctttatccattatgggttgtggaatgaatgttgtgtcaacaggcatgaagacaacattcctttccttgtatgttaacatgcaagggctggtccctctgcaggctctcgggaggatcccagcccgtccagcctcgagcatctgaggccctgtcatgctgcatcactgcctcctttctccacattttgaggaccctgtgattcccttgggcttgtctgggtaatccaggacaggattcttatt

SEQ ID NO: 244102 - DNA, 746 bp, Homo sapiens
tgaaagctttaaaaaactccatgaaaatttgcaaaacttaaaaaaaaaatgtagaagaggactaaacttgataaaatattaaaagaattgaaacccttcctaaaggcagcttctcaagggagcacaagttcacacacagtttacttttggaggaacgtctgaggtcatgaggactagattctagagctacaggtctcagggacagtctcgagggatacagggcccccatcaccacatccccagatttaaccgcagcagctcagcttttatctgtatctgttggagctctctaggaaatgtcaataccaaagcaaacccaaatcacaactagattagattactattcaagagaatgattctctaccgaaactgtgcaaaatggggatatcaagagagttggaaaatgtaagacgtaaagaccataatcaggaaaatacgcatcatatttgttattcactgagagggaggaatttccacttaaatcctatttccagcagctggattgtgctctcagtggagtgctctggattctgattaatagagattttctagtcctcccagcaacttccttctcaattctcttcactttccgcagatctcggcaccagggttgcatcttgtgggctccattgtgttttcacacaatgtgctatttgtccttcacagtgttttggtttatttttctgtttgtccatcttgtttttgaacaattgccagcatttaaaaatgaggaaatctaaaatctg

SEQ ID NO: 244103 - DNA, 247 bp, Homo sapiens
acatatccagttaggtgacacttcactatgtatggagaaacctttaggctgaacttaaaatatgtaaggaggcagctttagcctaaacttaatttaacaggtggtagcaaaggttctaaggagggagattcttcattcaacaagcagggaaccctacccgagaggggcaacatgaaggcacgcaggcttgggctcactcctgtttcccagctcatccttgtaataaatgtttttcaccatcaaaaca

SEQ ID NO: 244104 - DNA, 451 bp, Homo sapiens
tctcaaaaaaaaaaaaaagtgccagcgtatgaggtaattagattggttctctccagaggtaacctgccaagaagagatgctatagatgttactcatatactgtaaaacattgtgaaatcagattactttaaaatgatgtattacaaagttttgcaaaaaagcagttgtgactgtggaagcccaaggcttatatcccagctctgtcttacactaaatatgggtacagtgtttccactctgtccataaaatgggagctaatattctccaacctgtgtgcctgacatgatggttaaaaggattaaacaaaacaatagtttgtaatttattctgtcagagcacactgctggtaaataaaagggagtaagttgactaaaactaaatttaaaaaaaaatcctaataaaacaagtttgtaatttataattgtatacaaataaaagatgttacaaaaaa

SEQ ID NO: 244105 - DNA, 426 bp, Homo sapiens
actggagtaatgttgctttccatacataactgttgaggaaatgtactaacacagacgagatcaaactgaaaaagaattatatgtccaatgttctagtcctagaaagaatacacacacttcctctctcttcctctaaatccatagatgttagcagtgaaagatactaagaaaatgaagaactagaacgtggaatattgtcacatggaactaacataagaagtaaaatgtaaatgaaggaattttatacatgtgcatttcaaatgatctcgaccacaaaatcagagaaatgacagacgaatacatgaattatcaaaccattcgctgttcaaaaataaacttctgaactttagtgtttgcttaatggaaagttctttcttttctttactcagttatgacctcagacatgcatcagaactcaatgcatat

SEQ ID NO: 244106 - DNA, 428 bp, Homo sapiens
gggtaacagagtgcgaccctctctcaaaaaagtcaaaataaaaagtaattcttgtgagcatcaaatgatgtgtggaaagagttttaactgtgacagatgataaggacataaaaaggaattgctataagcaaaacacatgattacattttttcctcaaatatatttctaaacctgttactgaagttttgccaacgaagggttgttaggtgagaaacaaaactgagttctataatgtatcatgctcattgctaacatataaagcttattatttataatagtttttctgttatttatataatcatacttcagagtaaacgaagaacttctatgttagaaaccagcctctcagaggatttgtatatctaacctataaacagagaaaaattaagctcaaagatctgacacaactctcagaaagtttactttat

SEQ ID NO: 244107 - DNA, 332 bp, Homo sapiens
taagctcaaagttaaagaaggaaagaaataataaagatcagagcagaaacaaataaaatacagactagaaaaacaataaaaaaaatccataaaagtcaggttttaaaaaatatataaatatatataaaaatataacatataaacaaaatagacaaatctttaagaaaaaagtctcaaaatcagaaatgaaagaggcaacattacaaccaatattacagaaatacaaaggatcttaacagactactatgaataagtatacctcaacaaattggacaacctagaagtggataaatttctggacatatacaacctgccaaaactgaaccataaaa

SEQ ID NO: 244108 - DNA, 419 bp, Homo sapiens
gccctcacatggaagttggtgccttccgtagtcctatttcatatgaagattggcttggcatgtggagggcactcattcggcaactccccaggctttgggcactgtgtggaggggcttgtgtagggaccagcaggcctggtgtgaggggtccaggcgtcaaggagctcctggctgggccctctgggcagctgcttccactcttgtctctgccttctcatctagagagactcccaagccctggaggggtgtgttgtgttaggaattaactccctgcctaccccaaggcctcagaaatagattattagagatgtgaattattctttgagacttgggataagaaacagccaaagctaaacatatttcagttttaaaaaatcagtgttttataaaacacagtttggggcttttaaaggtacata

SEQ ID NO: 244109 - DNA, 644 bp, Homo sapiens
ttccgtcttgccagcccattctctctaatgactgtctccctcgctggatgtgatgaagtaggctacattatgcagcaccccatgaaacaaagaattgagtgtgaccaccaggcaacatctggcaaggaactgagttccaacagtgcacaaggaagtgaatcctgacaacagtcccaagagcttaggagtgaatccttctccactccagcctcagataagtcttgcccttaattgcagcctcatgaaagactctgaaaccttgggcccaggtaacccatgccaagattcctgacctgcagaaactgtgggtcatcaagcatgttctttcaagtctctacatgtgtagtaatttgttatgcagctttagataaccaagagatggaacaattggaactgccctacagttacggtggggcataaaatgacacaagcattttggaaaacagttgggcagtttcttataaaattaaacagacacttaccctaacacccagcattgtgctctaggtatttacctaagaaaaataaaacgtgtttatacaaagacttatacatgaatatttatagcagttttatacataatagcctacaagtagaaacaactcaaatgtccatccaaagacaaataactaaagtatggaata

SEQ ID NO: 244110 - DNA, 399 bp, Homo sapiens
gcagaatcattcagccttaaaaagaaaggatattctgacacatgctacaacacagatgtacctcaaaaacattatgctaagtgaattaaactagtcacaaaagaacaaattgtatgattctacttatatgagacacctagagtagtcacattgataggtctgacctttgtgggtccatgtatacatgaattttcttccttatgcagcaagaccaccaactccctaagttttttggtggggggggtcaaaaattatatgcaggtttttgattgtgtgatgggttggtgcctgtaacacctgtgttattcagaagtcaactgtatttttaatgccacacacagtttaaaaaagaaattagtttctcctaatgtgcacattaaaagtagtaaaaatggccaa

SEQ ID NO: 244111 - DNA, 499 bp, Homo sapiens
acattagtatcaaaggtacactgatgcaagaccagcaactgggcccctgtgtcagattaatatggcttttgtggagcattaatccacttttttaaaaaatataaaaggttataaaaaggcttattgaattatatcttttagtcaagttgtttaaaatttagtagatttatttataagatttgagagacatttaattggtcttgacctaatgctatctttattagagcttactgtttgggaaattaagtctcctgtctcaaagtataaagggtttggccatttatttttacatctttgagttatcattttggctaaatgaatgacttatttattttacaatgacctgtgatcctatttcgtgatatcctgtgttttaaacttttcatatttgacaaactttctaaaatcaaatactaaattcagtccttttgacctcactaatgttttgatattaggtcccctgaagtccaaaacagacatatttggcttattttctaca

SEQ ID NO: 244112 - DNA, 384 bp, Homo sapiens
attcttacctgcatgtatgataaaatgtataagagttgcagttcctccacatccttgccaacactcggtggtattcatctttttaaattatagacattctaatgggggtaaagtgatatctaattgttgttttcactttatttcactaatactaatgttattgagcatgttttcatatgctattggctatttgtatatattcaaatatctattcaaatcctttgctcatttttgatagaatcattttttttaattattattgagttgtggccaggcgtggtggctcacacctgtaatctcagtactttgggaggccgaagtgggaggattgcttgagtccaggagtccgagggcagcttgggcaacataatgagaccctgtctc

SEQ ID NO: 244113 - DNA, 1294 bp, Homo sapiens
ctgaaagatggtgtgcagaattctaatgttcttcctctcgcggggtcgtgggggctttcttccagttctctgggttctgatcgttggggctgtcctgacacccttcttcagatgaccgctgtcaggttggtgaaggcagtgcgcgttgggccttccctccctagagatgtgattgcacgtcgggtaccaggagcctggccagccctcagcttctgctaaccagggagcagtgaagcccggtttacttttgttggcttgtttattttctaatgtcacctgcctctgcactttaagtagtatttgggctgttatggagtgtgcacattctaacacagcaccttgtcagctggctgagaagctgaaaattctcggcattcctccttgatgtcaattacttcaaggagcaggaaggtgacttcttttaacaagtggaaaggattcaggtaacaaagccatttcctcttcttaaccctctactgtggaaagttattgacttagcgacacagtctgtttatctgggcttcaggagcagggctttggagactgaaggcttctccccacttttgtgcaatgttatatattttttctcactcttcatccagtctgagtggggtctgccccctcccctgagcagtcaccatcctgctacccactccggctctattggcgactgtggcatagggtggtggaaaggacgctggactgagagcccagagatcagatgtctgaccttccctctgcctggaagagctgcctggcctctgatcagggtccctaccttcgttttctggcctcactcactgtggcccaccatccagcagtgcaggtgtcctggggactcggggaaggtcagaagtggaaggaaagcctccaagccctcgcatgcaggcccaccattccactgtcaggttttcttccctttccttctgctctacattttgtgccagcagtttgggggtctcctgaatcttatcccttcgcagcggtaggcaggtgcaatttctggccagtcactgaacatgaagaagcatctataggcggagttaaatccaaaacacttggcctgacacacctggccttgaagtctcccccagcctctcctcttgtccccaacagtggttcatgttctagccacacagaaattgagggggtcctgtgttatctgtgttcctgcagacagaggcttgcctaggacagcaaaagtcatctaacataaatatatgcatgaataaactcactgtcaaaattcagccacccaattccatgataatcagtcatttactgattgccagag

SEQ ID NO: 244114 - DNA, 454 bp, Homo sapiens
tattggactggtctagtctcattgagtatattaaacttgaatctagcctgaacataaagttttctgattgctaacttttaaatatgtattcataaagtctagaggtgagggtggggggaaaatgaatatttatttgtcatgtgccaataagtttggtcagtacaattatctttatctcatttaatttttacaactaccctgaaaaataattcttacaggaaaaaagaaaaaaaacgtacagagcatgaagaggggtagagtaggaatgcttgttggggatacataggttaatagcaaccttagatctagatctggcttggtcttataggagaataacactgactttgtttttgtggtgttttttttttttttaaaaatccagcagccaaaaccagatttatctcatgggtggattacttaactcataaggctgatatattaagctaaatatacc

SEQ ID NO: 244115 - DNA, 812 bp, Homo sapiens
cattccagaattagattgtggtgatggtttggttgtacaactttgtaagtatactaaaaaccactgaattgtacacttttaaaaaagttaaacatattgctaccatatgacccagcaattctactcctaggcaaatatccaaaagaattgaaaacataaatctacacaaaagcttgtaaaggaatgttcatagcagcattattcataatacctccaaagtagaaataacccaaatccatcaactagtgaatgcataaacaaaatatggtgtatctgtgtggtaggcaaaatcatggcccccaagggactttgcagatgtgattaaggatcttgagatggggagattatcctggattatccacataggccagtgtgatcacaaggtgcttaaaagttgaagaggaagatgaaagaagaaaaaaggaaattttgactataaaaaaggaggccatagtgatgtgtgagaaggacttgaatgctggcctcgaaggtggaggaagggagccataaacgcaggaatgtggatggcatctacaaagtggaaaagggaaggaaaaaggatctcccttggagcctccaaaaaggaacacagctccgacaacaccttggttttagcccaataatacctgcctcaggttcctaacctacagaactgtaaagtaataaatttgtgttgttttaagctactaaatttgtggtaatctgtggccgggcgcggtgggtcacacttgtaatcccagcactttgggaggccgaggcaggcggagcacgaggtcaggagatcgagaccacggtgaaaccctgtctctact

SEQ ID NO: 244116 - DNA, 398 bp, Homo sapiens
tgcctgcttgttctcaagggcattattgtgtattttaggttttcatttgttgacctaaaaggaagaagctcaggtaaaattaatataagtagagagtgtatttgggccaagactgaggattgcaacctgggagcataaattcaagttgtcctgaatatatatgctccatctagcaacagttacaagtagcgttttttggtttgtttgtttgtttgtttgtttgtttgttttttttttgagacactgtctaaaaaaaaaagaaaaaagaaaaaatatctgacaattttctgcaggtaaaatatgtttttgcctaaaatgaagctgaagatatatgcacatatttattgttattttatacaatttgtacttctatgaataaagtcagacattcacttgca

SEQ ID NO: 244117 - DNA, 342 bp, Homo sapiens
ttttttttttttaaagaaacaaactcaagttgcactattgatagttgatctatacctctatatttcacttcagcatggacaccttcaaactgcagcactttttgacaaacatcagaaatgttaatttataccaagagagtaattatgctcatattaatgagactctggagtgctaacaataagcagttataattaattatgtaaaaaatgagaatggtgaggggaattgcatttcattattaaaaacaaggctagttcttcctttagcatgggagctgagtgtttgggagggtaaggactatagcagaatctcttcaatgagcttattctttatcttagaca

SEQ ID NO: 244118 - DNA, 440 bp, Homo sapiens
aatttatgcttcaccttctctcttaaaaaaatctccagagagaggaatgcctgcatatggatgttggtgcatgtttcccctgaaaaaattaggagaaagtgggaagaataaaactcagacttcagcaaaaccttaacatttgttaaagcttttgcacacatattaaaatattccccaatttaaagagcattgctgtatggttttggtctaagcatgacgttacctagttaacctgatgttaactgtcaccatgcagagacatgtaaaggcaaataaagtcacagtacagccaaggctataggttggtaaagatgcttcattatccaatattacagtggaggagatgtttttcttagaatcaatcatgtatttagcaaaatcttgccagtcagaatttgtggagttgtagcaaagcatataataaagatcttggaatcaca

SEQ ID NO: 244119 - DNA, 470 bp, Homo sapiens
aattaaattttatttaataatattcattaaataaaaatattattatcatgccagttttatggtttgaatatcacctttgcatgcattttctaacttgtttttgaaaacctcactgtaaggtacagttactcatagtaaaaacaatatgtgatcaatataatgtttttaataaaaatatggagttgttctaaaaaaaaaaaaaaaaaaaaaaaaaaaaaaaaaaaaaaaaagaaaaaaaacaaaataaagactaaataaaactaagccattataaactgatgagccgttcgttatagatcaatcgactgagttgataaatgcctattctcaatgtaatggcttggcctttcagacagttgtccttttctaacttatttgcaatatggcaaagtcctgttcgaactttcatgccaacaggtttacgtttttaaacgggatatgtacatggatggaataattggttggttaac

SEQ ID NO: 244120 - DNA, 446 bp, Homo sapiens
ctgcaggttgtaccagtcagtcaagctgatgtactctatcggcatcttcttcacctatgccctccagttccacgtcccagctgagatcatcatcccgtttgccatctcccaagtgtcagagagctgggcactgtttgtagacctgtctgtccgctcagccttggtctgtctaacctgtgtctcagccatcctcatcccccgcctggacttggtcatctccctggtaggctccgtgagcagcagcgccctggctctcatcatcccagccctcctggagatcgtcatcttttactctgaggacatgagctgtgtcaccattgccaaggacatcatgattagcatcgtgggccttttagggtgtatatttgggacataccaagccctctatgagttgccccaacccatcagccattccatggccaactccacaggtgtccatgcataat

SEQ ID NO: 244121 - DNA, 469 bp, Homo sapiens
ttacacttgatcagggaaatgagcaccaaatgttggacatttttcctgtttccggtcaacattgatgttaatgatctccaaacaaagatgctttcaggtttggtgacagcctgtacacccagtgctctagttcatgttttcagggagctgactcactctgctgcttgaatcaactgaaagctggaaaaaaatatgtgaaacaatggtttttaagatacaggacataaggcagccgggccatccctgggagggaggaaaagtacagggtgagctccatgattgcatgaaagcattgcctggagagagtctctggagcatggtgtcaggaggcgcctgcaggtctccctgagtttagacagaacagggagtctggggaagccacggcatctgggggttcttagggctgaggctgggagaggagaaagcaactcagaaccaaagttctggtgacagagcgagactctgtctc

SEQ ID NO: 244122 - DNA, 206 bp, Homo sapiens
gcttaagctcagtggcaagaaaggagtttattttaaagcagctcttccaatgacgggacttgattaggactgggcaaggatcatgatacaacagtatcatagttcactgcagccttgaactcctgggctcaggatgaaagagtgtggggaggaacagttgtcatggctcacatttgtaatgagctgttcctccacacacgcctgac

SEQ ID NO: 244123 - DNA, 557 bp, Homo sapiens
cctaccaccacacctggctaattttttgtattttagtagagacagggtttcacgatgttggccaagatggtcttgatctcctgacctcgtgatccacccacctcagcctccaaaagtgctgggattacaggcgtgagccatcgtgcccggccgtttacatgaataagttctttagtggtgacttgtgagattttggtgcacctagctttttctaggaagttctaaccctacaggaggttgtgcagtagaaaacgggtgtcatcccagctcagcttcattagcctcccaccctgtgtagggcctggcctttcccccacgcagccccagggcccttggcctgcacccccagcctctagcagctgctgggaccccctaaacccccgggcccccttgtgggcattcgggaggcatccagacatgcagcagcatgtccagacccggctttctatagacgctgacctggcggcacctggcctggcttcctgggagcctcgcggctgggctcttctgcttgggtttcagtgttcgtggtagccccgcctgtctgggcacggccg

SEQ ID NO: 244124 - DNA, 287 bp, Homo sapiens
aaaggcatgaataccaggaggtatggatcatggggccatcttggagaccggctaccacaattccctagaagatgtcacctaatttttgcctaaatacctccagagatgggtagcttgtttgagaggcagcccaacccacttttgaaaagcattatggtttaatttatattgagttaatatcttcagcaacttctatatatcagttctaatttaatcccaaaatgttcttccacaagacaatcattcatataattggaaacatgtcaccttttcagtcattggcgaga

SEQ ID NO: 244125 - DNA, 295 bp, Homo sapiens
caaaggtttatttcttgctgatgaagattcactgaggttctgggacactctacagagaagctcttctgcatgtattggctcatcattcccagtggttttactcttaggaacccaccatgtcaatgcccttggacctcaaaggccctgacactgcatgtggagtcaggtgcataaaacatccttgaatctattaattctgggcctcctcaatgaaaggttaaattcatttaaaatacttaaatgatgacatcgtagatccaagaggtcaaataaaataaggatttagtcttttttt

SEQ ID NO: 244126 - DNA, 291 bp, Homo sapiens
tgagacccagatttcccatcatttagcatatcccaggaaagtgcccacacagaagaatctgggactcccaggccatagcttatcttggccatgtaactttggtcatgacagtgatctcccactttgctcatgtagagagtgaaatatagattagggcacaagatgaactgtaggccgggggtggtagctcatgcctgtaatctcagcactttgggaggccaaggtgggtggattacttgaagtcaggagtttgagaccagcttggccaacatagtgaaagcctgtctccac

SEQ ID NO: 244127 - DNA, 360 bp, Homo sapiens
cataccaaaagctgctgttgttgacagtttaatgtctatggatctgactcggagagaaatgtgccacttactgaatcaccaacaccatatctttggtgttgaggtggggcacgcttactttttcatctgaagattgacacagcccaccaagaacatttgaaagagacaggattgctgctgaaaaggcatgacatcaagccacacaaattggatggtaagactagagattaacttgtgaacaggtcgtatgacgagagctgaaacgtacaactggatcttggtcatgccattcctcaaaggagactaagaaatcctgaatttttaatttatgcttaatagccatggctttgtctctacaga

SEQ ID NO: 244128 - DNA, 453 bp, Homo sapiens
gcacccagcaaagaaaattataccaaagcacatgataataaaatagctcaaaaccagtgatacagagaaaagtcctaaaaccagccagataaacaagacacgttaattacaaagaggaaatttcttttctgaacaatgcaagtgaagacatacagggatatcttaaagtactgagtgaaaaaaaaatccctgtcagcctagaattctatacacagtacaaataacttttaagaacagtggcaaaataaagtctttttcagacatacaaaatcagagaattcatcaccagcagaactgcattacaagtaatattaaaggaagtccttcaagcaggaggaaaatgacaccagatgaaaatatggatctagacaaacgaatgaagagcactggaaatattaactgtatgggttaaggtatatgatttcattactatttaaactctttgaaagatat

SEQ ID NO: 244129 - DNA, 441 bp, Homo sapiens
cctgagtagctgggattacaggtgcatgccaccacacatagataatttgtgtatttttctacagatgggatttcaccctgtttcccaggctagtttggaactcctgggatcaagcaatcagcctgccttggcctcccaaagtgctgggattacaggtgtgagccaccacacccagcccaaatatgccctttcaaagagtatattagatgaaccagaggggaagggagggccaggcatggtggctgacctgagcaacatggtgaaaccccatctctacaaaaactaaaaaaattagcaggacgtggttgcacacacatgtattccctactcaggaggctgaggcatgaggattgcttgagcccaggaggttaaggccatagtgagctgtgattgtgccactgcactcccatctggggtgaaaaaatgagactgtctcaaaaa

SEQ ID NO: 244130 - DNA, 543 bp, Homo sapiens
tctacagaagatagcaactcagtaagacttatttatacaagtttagttttattgccaatatccatgagatattttaaaatcaacttaaatatttgtaataaaggattacagactaggaaatatatttctttaataaaaataactcacgaaagttgaattgtgactaagaggaagagaaaagaaggaaataaactaacaattgttaaatacttattaggtgcagagatttatatactttacatcatttaactgttaaaagagtcctgtgaagtgggtgttatgactattgctttgaagttgagggaattgaagctcagagaatttgagtaactgaaccaaagtcatatagctagtaagtgaagaactaggattcaaatctagatctgtatgcttccaaaattcactctcactctttgtatgagaggccaattaaaaaccccctacgtccctctgaatttgaactcaattgagaaataaaacagagagatgcagatcaaagcactcattttctcactaataaaaatgactggaaaatgtggcttt

SEQ ID NO: 244131 - DNA, 474 bp, Homo sapiens
tgctgtattaagacttttgacacattttcagtttctccattgacaaagagtgtgtcaagtaagatttcaaactgtgctgtgtgaataagcccctttttcttcatcctcagcaagtgataagcagtatcttatttttttccagttgaggaaatgatgaaaacgatcagtgctctaaatatgcactcctgttttcttatagtgttaaaaggttttgttttttacattgggtggcagtttaatatagtgcaggtgttggaatcattttttcaatacttttttcatctaggagtttaatatacttcacatttattccaagtttcttttatgtacctcaataacatttaatatttttcttcaatatgtgggccacacatttattaattaaaattttttttgctgggtaacaaaaaagaaaaagagcagcagaaagcattctttcattgataaaatcaagtaaactgatttaaagaaata

SEQ ID NO: 244132 - DNA, 642 bp, Homo sapiens
ttttatatttccccatctcagccagaatctcagctagttggagttatttacctggtggagtgaccgaaatgttaatttccaagggatctaagttgtcaattaacctgccctttttttttgttgctgtagttttcattaacttttttttaaattgaatatggaagtataaagaggcactccgaagagtccactgtgttccaaacaaaatctcctttgtccttgctgtgcagcagtaactcaatttcctcttggtattctggatcagtaactccaacaagtagagtaatttcttttttccttgtttgttcaagtggcataaggagcccaaaatggccgtgtgaaagtctcatcttccaattcagtagaaataccattgtgtctcccagtggaaatcttacctccttggatacaaagacctctaaactcatagagcaaaaattctgtgagtgagttattaagcaatcatagtgagaagaggcacccttacaccttgaatcctggagccatgcattgtggctatgggggaaacagtatcatacactggtctgtgatttgaagaacatactgcatcctatacacaaaatattataattttagggtgttgtttctcaacctgtttagtaattgagttgtacataagca

SEQ ID NO: 244133 - DNA, 911 bp, Homo sapiens
ctcactagataagccagcatggcgtggacccagaaagccacctagagaatggagcaacagctcagaacttgagactgaatgccctgcactcactgtggtgtaatgacctgacctgttcctgggtggaagcttatatggatggaatcttttccataaagtgctctggacttcccaagagaaagtggctggagaaattacagaatgcggccgggtgcagtggctcatgcttgaaatcccagcactttgggaggccaaggtgggtggatcacctgaggtcaggagttcgagaccagcctggccaacatggtgaaacccccatctctactaacaatacaaaaaattagctgggcgtggtggtaggcccctgtaattcccagctacttgggaggctgaagcaagagaatcgcttgaacccaggaggcagaggttgcagtgagccgagatggcgccattgcactccatcctgggcaacaagagcgaaaatctatctcaaaaaaaaaaatagatttagggggtacaagtgcagttttgttacatgggtatattgcatagtggtaaaatgtgggcttttagtgtacctaacacccagagaagcatacattgtgcccagtaggtaatttttcatccctaaaccttttctcagcctcccactttctggagtctccaatgtcggttattccactctttatgtccatatctacacattcaatcctaatttgtaccaagtagcatctcacctttaaatcacaggcttattagttgggtgttttctttttacttatgaaaattcatctagtcaaactgtcaattaatttttcctcatttcattaaaagtgtatatctaatgctttctctaaaaattgatgtactggaaatacaaataaataaatgctccctgtgtagaatttcaa

SEQ ID NO: 244134 - DNA, 354 bp, Homo sapiens
gtactattagtacagattgatatgaaagaaagattagttatgcttatggataggtaagaagagacactcttgcaaaatggtagattgaaacacccactgaatcttcctggaagtgtgttgaaatcagttaaagggttaatgacacaaatatgaggatgattttgtaagggtatgatgaagggggcaaacagcctaatcaaaagaaaaaagaaatagcacatcatgcaaggttatcgacactgttctcagtaacctcttgcatccctgctggaaagaaactagtagggttaagtcaagaatttcctattgtgaaaggaagaagtgaccattgatttgtgccttgtcactcaggtt

SEQ ID NO: 244135 - DNA, 396 bp, Homo sapiens
gcataggtatgaatcatacagtaatacacttatgtgtacatataaatttaggaagtatcaaacgtatcaatggtgtttgattatttgggagaagactatcagtatcccttttcttgagtgccagaaaaatctgcacttacatggattacattaatacggtgataagtacatgtctgttcagagctattttaactgcatcaggccaatctgctacaacttttacattacaaagttatgagttgttttatagttgccatggactctcaggttgaaagtcatgcaacctgagcacgcccagatgtagcaagtgtacagccacagggggaccctaagtgctcagtctgaggagcgcggactgaatttagaaatggacaccccatgggagcatccaggatt

SEQ ID NO: 244136 - DNA, 450 bp, Homo sapiens
tggggcagggtcttactttgtcacccaggctggagtagtggcgcgatctcggctcactgcagcctcgaccacccaggttcaagtgatccccctacctcaggccctcaagtaccctggactacagacaagtgccactgtactccagcctgggcaacagagcaagactctgtctcacaaaacaaaaacaagcaaacaaaaaaaacctctgttatacagatattaaaaggggcaagacatccctaatacatctggtgctctaataaagttaccttaatctgcactcccagaatgccaatttaacattaccactgtactcacagtcttgtatttaatggcctatgatttaattcttgtgtgtatcctgagggcaaatactatcttcaaatctctagaaccaagaagggcctggcctgtctctttatataggtttagttgaatgctctttgaaaa

SEQ ID NO: 244137 - DNA, 504 bp, Homo sapiens
cagctttcatagtcacaaattattgcaatattttgctgttatactaaatatgggttttttttgtttgtttttaagacagagtctagctctgttacccaggttgcagtgagctgagattgtgctgttgcgctccagcctgggcaacagagtgagacttcatctcaaaaaagaaaaaaaaaggtgaaaggatgacttaaacccagggtgtcgaggttgcagggaaattcagaaatgccactgaagggccaggcatggtgtccaacacctacaatcccagcactttgggaggcagaagcaggtgcatcacctgaagtcgggagttcgagaccagcgtggccaacatggtggaatgctgtctctactaaaaatacaaaaattagcaggatgtggtggtgcgtgcctgtaatcccagctacttgggaggctgagacagaagaatcatttgaaccccggaggcagaggttgcactccgcctgggtgacaagagtggaactccatcttaaa

SEQ ID NO: 244138 - DNA, 108 bp, Homo sapiens
caagcaaagcaacaacaacacactcatcaccacttctaagacacgagaactaacttcaaacaagccaattgtgaaatcctgatttttctccttaagtaagttatggaa

SEQ ID NO: 244139 - DNA, 464 bp, Homo sapiens
taaatgggcaacaaaacacctgaaaggacatttactgaaaagtagactcccaaaacaaaaatatgtatttcacagctagatacggtcgctattagcgtcctaatggccaactccatccatgtgcgtattttgaacactaaaaacgcctcctgttacccctaagaccttgtttggataacatttttctattataagtactcgaaaccaaccccatttaagatgtttacccttattcttgagtccttgatggtttgggaaatttatcattattcatattgcacaatcctgtcactgtcttttccattaggcacagtgcctaaggtccacaatatttttagaggcccacaaaaaatattttaatttcttttcaaatcagaaggaaaaaaaatttaggtttaagaaagtattttaatatatattaatatatttgtttttgtgctaatacaatcttaaaatgtatgtat

SEQ ID NO: 244140 - DNA, 417 bp, Homo sapiens
caaaaaaacttgtagcagaattgaagaggtgagcacgtcataactgttagctgcttttattattgttgttattatagttatacattgtgttcaatattgtgggtaccagggtggtcgatgaaatgatgggaggggaggctgggtgcggtggctcagcctgtaattccagctctttgggaggccgaggtgggcggatcacctgagttcgggagttcgagaccaacctgaccaacatggagaaagcccatctctactaaaaatataaaaaattagccagacgtgatggtgcatcccagctacctgggaagctgaggcaggagaatcgcttgaacccgggaggcggaggttatagtgagctgagatcgcgccattgcactccagcctgggtgatgagcgaaagtcagtcttaaaaaaaaa

SEQ ID NO: 244141 - DNA, 454 bp, Homo sapiens
cacagacttggaaaggcagaggcacttaccaaaggggactctgctgttctgcagccaccttgtgacatacatggaggctttgagagcaggggcctggaggggaatgatagagaagtcatgtcaattttaggttttccagtacatgtaatagaaatgtttacacagtactgtagtctattaagagtgtaatggcattatgtctgaaacacaagatacatcccttaatcaaaaatactttcaaatgctatgatcgcttgagtctacagcgagttggaatcattttgctggtggagggtcttgctgatggctgctgactgataagggtggtggttgctggaggttggggtggctgtggccgtttcaggaaattggacaacattcaagtttgtcacatcaattgactcttcctttcatgaaagatttctctatagcctgcaatgttatttgatagcag

SEQ ID NO: 244142 - DNA, 583 bp, Homo sapiens
gatgggaggatcacttgtgcctgggaggtagaggctacagtgagccgtgatagtgccactgcactcccacctgggtgacagagcgagaccctgtcttaaaaacaaaaacaaaaaaagcagcaggactgtgatttctctgcaggccagaacttaacagtgggaactgtagtcactgaattaggaaacctaaatccagtgggagtaattggatcccaggatggcagggctaagtggtagcaagcaactgccaaggacaagctgggcatagttgctgctgctgaaagaagagagaatctggagaccccaaactcactacactggagggaagttaagtttggaaactgagtcatgcaagaaactgccttttttgttcctaaatagatagctataatttcgcatgcttacgttatcttatgtaaaatagagagttactgaacatgagaaaatgcttcattgacttttcccctactccctctttccacataaaaaatgtatagattcactgagtgctaatcagagtctcacactctccttgaggaagaggaaagctctttctcctttacgtatcaaaggggatattgct

SEQ ID NO: 244143 - DNA, 292 bp, Homo sapiens
atcattgttatttctgccagtacccctctgtaggttctcattacttcacatttggacagctgtaataggttcttcagtgttcatgattttgcctctcaaccccctttcctactacaattatcttcctaaaacatagaatttggtcattctctttcttagcaaccattgacaactctccagtagccaccagttcttagcaggtttatgaaaagcttcaatatctagtcctaacctccctttctagccttatctcctgccatttgcttatatcataaatctaaaactttaacca

SEQ ID NO: 244144 - DNA, 496 bp, Homo sapiens
taacttttatgtgtatcccaaataggacaggacagtcattcatttcttataatgtatcagctaatttcaaggagacatcggaatttttgtggagacatcggaatctgaagagcaaagtgattcaaattgggtcacagattaaataatttttaaaatgtttactttaaatatcttaaaaaactttaaggagaaaattaatttttctatattgttcttggccttaaaatatacattaagcattagttttctggcttttgatgtttttcataaaattagctcaaaaaatgcaaaaagcttgtatgaatatataagggcctttgtaatcatattgtaattgcttgacatagttaatttcttgatttctgactctggcatctgagtttcataattgttatgtaattactctatttttttaaatcatgtttttaaatggaagtttcagtctcagatcttttctatttcatgcaataaataatttttagcagtaaagaattat

SEQ ID NO: 244145 - DNA, 404 bp, Homo sapiens
aaatttgatctaattgatatatatagcataatattaaactcgataaacttaaaattgaatatgtaatgtgaatgcacatttaatatttattcaaatgctctatattgtgtcatagatcaagccgtgacaaattttcataattgaaaatagaaataatacattttctgacatcagttaaactgttagaaatcatttacaaaaggacaacttaatccacaaatattttaaaatcaagcaacatattcctaaataattcacaagtcacaaaattagtctcaatggaaattagaaaatattttaagaaaatgagaataagcgtgagccactgcacctagcagagcttacagtgagccaagatcgcgccactgcactccaacctgggcaatagagcgagactccatctc

SEQ ID NO: 244146 - DNA, 87 bp, Homo sapiens
tacaaaaggcatattctttcatggtttctgcaatgagaggaagtgtaatgattattttaatatttctattaaatatgtttaactgta

SEQ ID NO: 244147 - DNA, 350 bp, Homo sapiens
ggtcatcccatcttcctgctttcttttcagcccctcactgcaagataggtcccactactgctaagcacgagagttaaaaaggttggggccaggtgcggtggctcacacctgcaatcctagcactttgggaagccaaggcaggaggattgcctgagctcaggagttcaaaaccagactggacaacttggtgaaaccctgtctcaactaaaattaaaaaaatcagtggacatggtggtgtgcacctctagtctcagctactcaggaggctgaggcaagagaatcacttgaacccaagaggcagaggttgcagtgagccgagatcatgggtgacaaagtgaaactctgtctca

SEQ ID NO: 244148 - DNA, 720 bp, Homo sapiens
ccaactcccagcccaggccaggctgactcacgcggtgaccagagccatcaggagagggaggcaggccaggctgtctccagccagccctgtgaagaggaagagcgaaaacagggaattagtttgaaacttaaactgttgtgaactaggggggtgaaagggccgcaaagccagctgatctgacatggagccgcataccttggggattaagtaaatatgtactgtagaaaaccaaacctgcatgtaattccaggttgcttttgttttgttaaatactgccctgagatttacaattcctccggggtggctctgactgggactgaactttggagcctgaactatcagccaaagccgatccgattaactcttccctagccgggctggccggagcctgtggtggccaagctagcaggggtctggctgtccaggactccctcttctccttgggtggtttggacagccgcttgaccttgcatttggagggggagttgggaagcgtttttaacccttggacacaacgaataaggggaagtcagagttgttctcagcagtttcatttccttgaggcgatgccccataaaagggctcctgaagctctttgtgaaggggactgaaaagggcagatgagggtgtcctttggggcggacgtggggtttgggacaattgcatgtgattgtcattctttagctgtctgcatcccacagaaacttttttctgagtctt

SEQ ID NO: 244149 - DNA, 348 bp, Homo sapiens
ctggtgccccaccccatagagaatgctggccacgtgctggtcctgtgtgctggtggatagctgtgtcctgcgctggcatgccctgggactgtccttcacactaattagtgtcacacacatcccccctgaaactgctgcagcctttgcttaagaagactttaggtggctcacgtctgtaatcccagcactttgggaggccgaggcgggcagatcacgaggtcaggagatcgaggccatcctggcaaacacggtgaaacctggtctctactaaaaatacaagaggcaggagaatggcgtgaacccgggaggcggagcttgcagtgagccgagatcgcgccactgcactcc

SEQ ID NO: 244150 - DNA, 898 bp, Homo sapiens
gccgacatctgcacccactggtcagaaaaggaagcagacttctaaaaataatattgaaaagaagaagcccaaatttagaaaaaggaaaaggaaagcaattttaaaatgctcttttgaaaatgtttattctgatgatgccttatcaaaggagaacagggttgtctgtgagacggaagttttactaaaagagctggagcaaatgctgcagcaagcactgcaacccacagccacacctgatgaatcagaagaaggacatggagaggaaataaatatgggagaaaagttatctaaatgcagcccagaagctcctgcaggcagtctgtttgaaaaccactatgaagaggactatcttgtaattgatgggataaaattaaaagctggagaatgtattgaggatataactaataaatttaaagaaatagatgctttgatgtctgagttttagaacattatacatttttcaaattaattataaaaatattggcatctttatatttatccaaagttaaaactttaaaaatgtttagtgaaataggtataaattataccaaagtttatatttgcggtaactttctacttcatattttgagaatggccatgatttttagagccagtcaaatggtatttaagttagtgttaaaaatttagaattaaaaaaccctgatatttgtatttatatatttcttgtttgccttaatttttaaatggtttgtgaaatttgcctaacaaacatatgttttacaatgattgtttaggccctttgttcaaaaatggataacttaaaatggctggccaagctattataattctcagaggtaattcaaatctaataaacttagagaatgtatatttgcagtggaatcaaactattacaaaataaaaggaaataattttttaa

SEQ ID NO: 244151 - DNA, 1177 bp, Homo sapiens
atggataaaggcaacattcgttggacattatagtatcacattaaagactggagtgcagtggcacaatctcgcatcactgcagcatctgcctcccaggttcaagcagttctcctacctcagcctcccaagtagctgggaattacagccagaaaagtgtaagaataaaaagaagtggtataaaagtgcactacaagaagcatgtctactctatggatattctcatgagcaaagactggaaatgtgctgcctatcaaaacaacaagataaatccgaaacacatgacaaagttgctgcactggtcaagaaaaggaagcagacttctaaaaataatattgaaaagaagaagcccaaatttagaaaaaggaaaaggaaagcaattttaaaatgctcttttgaaaatgtttattctgatgatgccttatcaaaggagaacagggttgtctgtgagacggaagttttactaaaagagctggagcaaatgctgcagcaagcactgcaacccacagccacacctgatgaatcagaagaaggacatggagaggaaataaatatgggagaaaagttatctaaatgcagcccagaagctcctgcaggcagtctgtttgaaaaccactatgaagaggactatcttgtaattgatgggataaaattaaaagctggagaatgtattgaggatataactaataaatttaaagaaatagatgctttgatgtctgagttttagaacattatacatttttcaaattaattataaaaatattggcatctttatatttatccaaagttaaaactttaaaaatgtttagtgaaataggtataaattataccaaagtttatatttgcggtaactttctacttcatattttgagaatggccatgatttttagagccagtcaaatggtatttaagttagtgttaaaaatttagaattaaaaaaccctgatatttgtatttatatatttcttgtttgccttaatttttaaatggtttgtgaaatttgcctaacaaacatatgttttacaatgattgtttaggccctttgttcaaaaatggataacttaaaatggctggccaagctattataattctcagaggtaattcaaatctaataaacttagagaatgtatatttgcagtggaatcaaactattacaaaataaaaggaaataattttttaa

SEQ ID NO: 244152 - DNA, 902 bp, Homo sapiens
aaaggatcaacactggagagagaagaggggaagagaagcagacttctaaaaataatattgaaaagaagaagcccaaatttagaaaaaggaaaaggaaagcaattttaaaatgctcttttgaaaatgtttattctgatgatgccttatcaaaggagaacagggttgtctgtgagacggaagttttactaaaagagctggagcaaatgctgcagcaagcactgcaacccacagccacacctgatgaatcagaagaaggacatggagaggaaataaatatgggagaaaagttatctaaatgcagcccagaagctcctgcaggcagtctgtttgaaaaccactatgaagaggactatcttgtaattgatgggataaaattaaaagctggagaatgtattgaggatataactaataaatttaaagaaatagatgctttgatgtctgagttttagaacattatacatttttcaaattaattataaaaatattggcatctttatatttatccaaagttaaaactttaaaaatgtttagtgaaataggtataaattataccaaagtttatatttgcggtaactttctacttcatattttgagaatggccatgatttttagagccagtcaaatggtatttaagttagtgttaaaaatttagaattaaaaaaccctgatatttgtatttatatatttcttgtttgccttaatttttaaatggtttgtgaaatttgcctaacaaacatatgttttacaatgattgtttaggccctttgttcaaaaatggataacttaaaatggctggccaagctattataattctcagaggtaattcaaatctaataaacttagagaatgtatatttgcagtggaatcaaactattacaaaataaaaggaaataattttttaa

SEQ ID NO: 244153 - DNA, 763 bp, Homo sapiens
atggataaaggcaacattcgttggacattatagtatcacattaaagactggagtgcagtggcacaatctcgcatcactgcagcatctgcctcccaggttcaagcagttctcctacctcagcctcccaagtagctgggaattacagccagaaaagtgtaagaataaaaagaagtggtataaaagtgcactacaagaagcatgtctactctatggatattctcatgagcaaagactggaaatgtgctgcctatcaaaacaacaagataaatccgaaacacatgacaaagttgctgcactggtcaagaaaaggaagcagacttctaaaaataatattgaaaagaagaagcccaaatttagaaaaaggaaaaggaaagcaattttaaaatgctcttttgaaaatgtttattctgatgatgccttatcaaaggagaacagggttgtctgtgagacggaagttttactaaaagagctggagcaaatgctgcagcaagcactgcaacccacagccacacctgatgaatcagaagaaggacatggagaggaaataaatatgggagaaaagttatctaaatgcagcccagaagctcctgcaggcagtctgtttgaaaaccactatgaagaggactatcttgtaattgatgggataaaattaaaagctggagaatgtattgaggatataactaataaatttaaagaaatagatgctgatgcggccaacccccccttccccctctccatcctccgtagcaatcgacgcgagccc

SEQ ID NO: 244154 - DNA, 947 bp, Homo sapiens
atggataaaggcaacattcgttggacattatagtatcacattaaagactggagtgcagtggcacaatctcgcatcactgcagcatctgcctcccaggttcaagcagttctcctacctcagcctcccaagtagctgggaattacagccagaaaagtgtaagaataaaaagaagtggtataaaagtgcactacaagaagcatgtctactctatggatattctcatgagcaaagactggaaatgtgctgcctatcaaaacaacaagataaatccgaaacacatgacaaagttgctgcactggtcaagaaaaggaagcagacttctaaaaataatattgaaaagaagaagcccaaatttagaaaaaggaaaaggaaagcaattttaaaatgctcttttgaaaatgtttattctgatgatgccttatcaaaggagaacagggttgtctgtgagacggaagttttactaaaagagctggagcaaatgctgcagcaagcactgcaacccacagccacacctgatgaatcagaagaaggacatggagaggaaataaatatgggagaaaagacaatttttttttttggagatagagtctcactttgtcaccaaggctggagtgaagtaatgcaatctttgctcactgcaatctctgcctcccaagttcaagtgattctcctgcctcagcctcctgagtatctggggattacagaataataaccaaaggaggtttatggtggaggatgaagaaaagctctgtctgagttagtgagtttgttaaagcaatttttcaagcaaaagaaaatttgtgattgaggccaaagagaatttgagagcctcaattactcagattttaaaaaacaacacttaatgtttacacttagtgtttgacgcttcattttccttcatatggataatagctaacatttattaaacacttcttatatgcccgaaa

SEQ ID NO: 244155 - DNA, 134 bp, Homo sapiens
ctgtcaaattctttttctaggaaagcaattttaaaatgctcttttgaaaatgtttattctgatgatgccttatcaaaggagaacaggggtatgtgaaagcctgtcctgcttttagttctttaacctatatataa

SEQ ID NO: 244156 - DNA, 236 bp, Homo sapiens
tgttatttctggcgtgtttggctgtctttgctgccatagcatttcccgcacagtgcagcctttataccttctgccctcgtgaaggggcttagatcctggtagagcagatgatgcttggaggaagatgcattagctccagcttccatggggcctgagggctcttggggtcatcagggaactatcttaaaatttgctaaaccaagccaagacacatcacttgctgtcttatttaggga

SEQ ID NO: 244157 - DNA, 1467 bp, Homo sapiens
agtctaaccctcctctctccatgcccattacctcacgtttccaagtctaaccctcctctctccatgcccattacctcacgtttcccagtctaactctcctctctatacccattacctcatgtttcccagtctaaccctcctcgctatccccatcacctcacgtttctcagtctaactctcccttctctatgcccattacctcctgtttccaagtctaactctcctctctccatgttcattacctcatgtttcccagtgtaactctcctctctatccccattatctcacatttcctaatctaactctcccctctctatgtccattacctcacgtttccaagtctaactctcctctctatccccattacctcatgtttcctagtctaactctcccctctctatgtccattacctcatgtttccaagtcttcatcagttcctggatgtgtctggttccaccctcttttccagccctttggtttgaatctggacacgtctaattgccaccagtctccttgctcccttttcaatcatcccacaaaccgccaacttcgtaaggtgtaaactccttgtctgctttagtcttcatccacgtatgaaggtgaaagtcagctatgtggtctgggcctgctcaaaatgactctcaggctaaccctcccaccacatttctctctcacatagaaactccaaccaaaccgcatgactcgctgcatcccacacactggaagtacctgttgctggggctccttcttaaacaactccacctgcatgaaggggccagtcatctcaacctcagtgttctattcctgcgtcagcacaatttggcccataggcgaaacccagacagccgcccacttttgtgaataagtggacacagccatgtccactcatcagtgcactgtccgctgcttttaggctgcaagagcagaactcagtactggcgacagagcctgaatgtcccgcaaagatgaaaatattcactgcttactcctttacagaaaaatcataaggacctctggtctactgaaagcctacacacatccttcgagatcatcaccaatgtccctgggctatcatggggatctgtgggggtctgacaatctcacaggaaaagtcctcagtactgtaaggctaccctcgaaaaagcgaccaaggaaggcacgtttttaaaactactctgaaattatagcaaatccaagctaccacgggttagataaattacccagaaagaagtaaaaatgctgacattggcaacttgccgtgtctctgtgctacttttctcttttcctccatatcagatgcctacaatctaagggaacagaatggtaaccacagggcctcaaggagctccgtctacaggaactgcggggggaacagcaaacatactgatgctgtacggaaaggcttcgagaagaccgtgaagccatcttcatctcacaataaatccaactgcttatccaaaaaaaaaa

SEQ ID NO: 244158 - DNA, 1041 bp, Homo sapiens
agtctaaccctcctctctccatgcccattacctcacgtttccaagtctaaccctcctctctccatgcccattacctcacgtttcccagtctaactctcctctctatacccattacctcatgtttcccagtctaaccctcctcgctatccccatcacctcacgtttctcagtctaactctcccttctctatgcccattacctcctgtttccaagtctaactctcctctctccatgttcattacctcatgtttcccagtgtaactctcctctctatccccattatctcacatttcctaatctaactctcccctctctatgtccattacctcacgtttccaagtctaactctcctctctatccccattacctcatgtttcctagtctaactctcccctctctatgtccattacctcatgtttccaagtcttcatcagttcctggatgtgtctggttccaccctcttttccagccctttggtttgaatctggacacgtctaattgccaccagtctccttgctcccttttcaatcatcccacaaaccgccaacttcgtaaggtgtaaactccttgtctgctttagtcttcatccacgtatgaaggtgaaagtcagctatgtggtctgggcctgctcaaaatgactctcaggctaaccctcccaccacatttctctctcacatagaaactccaaccaaaccgcatgactcgctgcatcccacacactggaagtacctgttgctggggctccttcttaaacaactccacctgcatgataggaggggggcccccctcctatcatgcaacctggtggtcccccgctcccgggaggtcaccatattgatgccgaacttagtgcggacacccgatcggcatagcgcactacagcccagaactcctggactcaagcgatcctccagcctcagcctcccgagtagctgggactacaggcatgagccactgcacccagcccttcaaggtataagtaaaaagggcaagtgcaaaatagtgtgtatgctataccactgcttgtgcatgataggaggg

SEQ ID NO: 244159 - DNA, 360 bp, Homo sapiens
tgatgttctagttatgttatcactcatttattagctgcaggattcctatgttagagagaaatttcccattatttactatttagttatcttgaggtccctatgggaaaggtagaataaatgcttgattctttccctttatttaccattttaaaaaataatgagtccctatctcttccaaaggcaaactgtgaattttaaaattttttctcaatgtttatctcttcttttgccagtggaaacattttttagttgactccaagcctcctgcctcaactcttctttgatatctgaaactttaagatgtcccacttctattttttatattttccattgtagacctggaataaagtcattgctctc

SEQ ID NO: 244160 - DNA, 294 bp, Homo sapiens
agaaaactatcagtgcttcagaagttcccttcatgctctgttttgtcactaccagggatagtaaccagtggcagaaatttggctacttttgtactttatataaacagaaccgtctagtatctacatagttcctatcgcctgtttatcttaatatgatgtattaatagaataatgtttaatgatatgattaacatgtaattttaatggctgcatagtattctgtcatatagctacaccataatttatttaatgagtcctttatgtgtttatgtagcttgcagtttttcgctatta

SEQ ID NO: 244161 - DNA, 501 bp, Homo sapiens
gctccccttgattaaaaaccgcctaaatccagcccgaaaacatcagcctcatgactcatgtcagcataaccagaaacattccaaccctaagataaacccgtctccgaccaaaaacataccaaccctgagacagcctcccctctgaccagagatattcaaccctgcaataaactctccctcacatacaaacattctgaacctatgataagcacccccttccaaaacccttaaatgtgcttagtctataagagagaagagctctgacctaactcagccagaagcccctctcaggtttctctaaaataaacctgtgtttaactgtcaagtgacatttcatgcttctttcctctttaattcttacagtgagtgtgtagagcacgcttgacataagtgactccaccttagaaaaagattccatgttacatttcattcaaaaggcatcatgcctacaggagccagatgttcacctgatcaataaagcccacatccaaacagttaaga

SEQ ID NO: 244162 - DNA, 377 bp, Homo sapiens
agtttatttgaatggtatccggcaaggttcaatccctaaagcccgactcctgtagggcagacccccagctctctgctgagctagcctggcccaggggtggacttttgaacccctgaaagagtaaagaggacatgcatccttaaagcaagtacaaacagtatatccctccttttggctgagcttgccacaaaggcagaggagtggtaagctgaagggtgtgctgcctggcaggcacctgggaggtcaccaatatcttcttccccttgtaagataagacagtcaaattgggagcaggcatggctgcacccttgtggaagctcaggagattgggggcttgccaggtgcctgtcgacgggccgcgaatttagtagtagtag

SEQ ID NO: 244163 - DNA, 463 bp, Homo sapiens
tgcccagttctgagcacggtttactgagttctaggtgacaattatggggtcagggagtggaagccttgggaccctccagacaagtgggcagagcacaagcatgggacctgatgaccttggcagtttacttcgccttctgagcctccgtttcctcacctgtaaaatgggtatggagacctaagctctggcgttgctgtgagggtgagatgtagtaacgtggagatggcctggcaggtgcctggcacatagtaggtgctcactgaatggacttcccttcccccttccgagttctatgcctaccaagaagctgcacgcgtgcctaccccaggaggagaggaactgggggtgggggagcgggggctggaataaagggaagggcagtagggagaatcagttctccctggaggagatggcacactttgcttggagaagaaaaactacaaactacccaggagttgccccc

SEQ ID NO: 244164 - DNA, 424 bp, Homo sapiens
gtctccagggacagagtctaggaataggaatttaaatcaaagtcataacagactttataggaaatattaattcaaataggaagtattgtagagtgtgtgtctgtgtgtggggggggtctgtgtactaactatagaaatggaaacatacggtaaaatatcaacgaaatggaaagaatgttctggggaaaaaaagccatttacaatggtataatccaaggaccataattatttttctgagaaaggttattcctcacttaaaagtcaatagtattttctattcacttcaacttattcagcaaatgtaaaaatatttcagttcttttttattttgattttttgagatattccctaaaataagtaggatccgctgttaccactgttggacgactcaccaatgcacccccatcccccatttctgatctaa

SEQ ID NO: 244165 - DNA, 311 bp, Homo sapiens
actgtgtgcccaaacacaatctaagcatgttacatatgacctcttatcctcacaaaccttgaggtaggaactgttagtgttgtcattttatagacagtaaacttgtgtgttgtgtaacctctctacagtgacatagctgttaagagcctgtattgaacctgggcagcttagcccagagttgggttgggttggggttttttcagttcttttttattttgattttttgagatattccctaaaataagtaggatccgctgttaccactgttggacgactcaccaatgcacccccatcccccatttctgatctaa

SEQ ID NO: 244166 - DNA, 410 bp, Homo sapiens
gcatgaaagctactctacctattctgtagagtatttaacaataatcaccagctactaagtgccaggtcctgcgttaggggtgcagatggtattgagatccctgttttacaaaccaagagatggagattcagagaataaagtcagctgcccaaaggcacagagctagggagtagccgagctggcattcaagctccagtctctcaggcttggaaatccatactccttccattttgctaaacagttcttacctgatgttctttggggctgctgatgagtctgagtaagtaggcctagatcatgatcccagtccaggctcagctgtgtgtagtaccatgtcatcatgtatgacaaggtctgacccccccgactagcacagcagtccatcatcattacgggggaaaaaagaaagg

SEQ ID NO: 244167 - DNA, 336 bp, Homo sapiens
gctcaataaaaaatgattatccaggtatcacctcaataacagaataataagtcataaaatacctacaagtttccaagtactatgatgaatgtcttatataattcagagcttaaaaataggaatgctgggaaatagcagaatatcagtctaatatgagggaagtaatctgatccagagttaccaaagtactaggatctcaatagcagggtatgctgcatttaggttaaaggagataattatgggtgatagttcagacagaaaaatagtttgaaggccaggtacagtgattcacacctttaatcccagcacttggaaaggctgaggcagatggattgc

SEQ ID NO: 244168 - DNA, 387 bp, Homo sapiens
acacccatggagaccccgcccagccaatccccaccctagcttccacccagatacactctgccaggccacaactgcaggcactctccccccagcctccacccctcacctgtgccctggacctcagactcagctttccatcctacctgagttttctgcctccctccatcctgtgtccccccaccatacatggctgccagagacgtcctcttagaagtcacacctggggtctgattgcgtccctcgcctccccagatcccccaaggtctccttcctgtgccgtcatatctgcagttcttaggactgtctagacatgctttgttcaactaggtaatcacacggggtaaattggatttaaatgtaattaagattaaataaaaatacacatgc

SEQ ID NO: 244169 - DNA, 470 bp, Homo sapiens
agctcactctagctcccttcctgttagaatttattcagaacctccatttctaggaggaagcaaggagggggcagttatcttcgtggacttgggtcctcctggaccctttgtcctcatggttatgtttcaaacagagttgagggctccctaaaggggaaagattatttaagttttgtaaatgctgccctccaaaaaccactccacataaatgtttcatggcttagcctctgtgaggccagagctggaacattcagctgtgagggtgtttatatttgtggaactctcttgaacatttgctgtgggttttaaacagctgctatgctgaagctctggggataggaagatcatgaatattcaggtgaagccaccagaatgaacagccgttaatagaataaatgcctaaacagttgtgtaaggcttattaagacctattggggctgagataataaattcccactctgacatgttgc

SEQ ID NO: 244170 - DNA, 684 bp, Homo sapiens
ggagtctcactctgtcacccaggctagaatgcagtggcaggatctcagctcgcggcaacctctgcctcccgggttcaagcagttcttgtgtagctgggattatatagccatgcaccaccacgcctggctaatttttgtatttttagtaggaatgaggtttcaccattttggccaggctggtctcaaactcctgacctcaagtgatctgcccgcctcagcatctcaaaattctgggattgcaggtgtgagccactgcgcctggcttcaaattgtcccaatttctgcttataaaagtgttgacaagctgattcctgagtccttctgatgagactctagtagtcttgacagcttccttgctacctgttaattacataatgttccaggctaattttgcattgttttacctccagacccagaataagtaattttgccatggaatcctggttccttttaaatgggatatggtgttgagagaccatgacctgggcactagatcactgctattaagttggccatttgctcattgttattatgccttttcagtgaagggatctgcaaaatatgtcctggtttggttttgtttaagataaaagacctcaggagtttttacagatacttacaattcaattctaggactatagagttttcacttaatttcttctatcttttttccctgtctccttt

SEQ ID NO: 244171 - DNA, 470 bp, Homo sapiens
ctacatctaacgccatggccccccttgagtgaagtatttctcactgtgttttaggaaatgtcataaataagttttttttaacaccctgtcggaccataaaggattgatctactggtagacacttattctcaatcagagcttttcccaagggaatttgtcatgtggaaaaaagccatttgtcaaggaatggccaggcattgtggctcatgcctgtaatcccagcactttgggaggctgaggtgggcgaatcacctgaggttgggagtttgagaccagcctgaccaacgtgaagaaaccctgtctctactaaaaatacaaaattagccgggcatggtggtgcatgcctcctatcccacctactcgggaggctgaggcaggagaatcacttgaacccgggaggcagaggttgcagtgagccaagatcatgccattgcactctagcctgggcaataagagcaaaactccatctc

SEQ ID NO: 244172 - DNA, 612 bp, Homo sapiens
gatacggagttttgctttgtcacccagcctggagtgcagtggcttgatctcggctcactgcatcctccacctcccaggttcaagtgattcttctgcctcagcctcctgagtagctgggattacaggtgcacaccaccacacctggctaattttttgtatttcagtagagatgaggttccactatgttggccatgctggtctgaaactcctgacctcaagtgatctgcccgcctcggcctcccacagtgctgattacaggcatgaggcactggtggcccccagccttaatcttctgagttccatttcccttggaacctgacttgcaacagatacaatgtatatcgtgttttaaaacatgtaccataatacaatttatgttgtgaaacagtattatttatgtttgggaatgcgtgtgtattttgtaaaactgtaaaagcatgcaccagaatgacgaacaccaaattcaagagagaagttacttctggaaggtagaaaggaggacaggcttgtggaagcacacacataatgttttaataactacattacattttcattcttatactggatactgtatacatatatactggttagagtattccttatgctttcttt

SEQ ID NO: 244173 - DNA, 619 bp, Homo sapiens
aatgaggtattcattgtagggtactgaccacgaatatttaggcagctcacttgaactagcttaactgcatcctccacctcccaggttcaagtgattcttctgcctcagcctcctgagtagctgggattacaggtgcacaccaccacacctggctaattttttgtatttcagtagagatgaggttccactatgttggccatgctggtctgaaactcctgacctcaagtgatctgcccgcctcggcctcccacagtgctgattacaggcatgaggcactggtggcccccagccttaatcttctgagttccatttcccttggaacctgacttgcaacagatacaatgtatatcgtgttttaaaacatgtaccataatacaatttatgttgtgaaacagtattatttatgtttgggaatgcgtgtgtattttgtaaaactgtaaaagcatgcaccagaatgacgaacaccaaattcaagagagaagttacttctggaaggtagaaaggaggacaggcttgtggaagcacacacataatgttttaataactacattacattttcattcttatactggatactgtatacatatatactggttagagtattccttatgctttcttt

SEQ ID NO: 244174 - DNA, 560 bp, Homo sapiens
gcgttgagttgaatgacagctgacttcatggctgtctgcgaagtggggaagcctgaacacagtcctataaactaaaggccactgcagacttttagcacaaggagatccttacagggaacatgtgccatcagctctttggagtgaacaaggaattagacccccatcatgccaaaaaactaggatttttaggtggtctttccatcccttcagatttaagtattcaaagaaagagagacagacctacattccaagggtcttctgagtgcaaggccttgtgttgtttgtttatttaggggagggcctggtgctcttctctgttttatgctttaccttcttttatttctcagatctcatgttagcactatgttctgaattccctaataatggctcttgagaactgatttacattttgttggtttgtttacttcttgagcacataaaaggaccccaaattagagatactatcccttgggcttctgaaaaatgaatcaaccaaaactggttgactctaaccttgccttgctgagtaaaaattctgctttggatgagaaatgtcttga

SEQ ID NO: 244175 - DNA, 459 bp, Homo sapiens
gagaggaaaactatcgccaacagaaagaatccagataggaagagagaaaaagaaagaccagagatggattttgtgtcctttttaaaacagcctcaatcacctgattcctccctgccacttctctgcaaatgatagagttcacacatctataattctctcataggttcatgtgggctgctcctcataaccctgctcaaacactactgaggcatcaggatcttcaagattcataatcacataacaattgttttgagctgaagacagcagaagaacataaggataccctgtacttctcaggaggataggaacatcagatttggaatggatgaggaaactgaagcgaaagaatgttgactaattttgtcaaggtcacacaactgggtgctttggtgggctcttctggggacaaaagaaagcacaacaaaaaaaggaaataaatggcatatgcaaacccctaaa

SEQ ID NO: 244176 - DNA, 618 bp, Homo sapiens
gaaggtaccaaactcagctaaacacctgatcagattgacttaactgtccttaatgataaaaagaagcatacctatttttggacataaatgttatttatctcagtctccactgctcttctacatacaacatctagcattctttcaaaaatcataagacagaaaaatcaaggggaagacataaaacaatcaaagatctgattcagatatgactcagccgtttaaactatcaggcaggaactttaaataactatgagtagcatgctaaaagatctgcttggaaggagagcaagaggcattgagcgatttcagcagagagatggaaaccataattaagagtcaaaaattggcctgacataggggctcacacctgtaatcccagcactgtgggaggctgaggtgggtggatcacctgaggtcaggagttcaagaccagcctggccaacatggtgaaaacccgtctctactaaaaatacaatgaagccagaaggtcgcttgaaccttgcaggcgcaggctgtaccagcctgaaatttccttcttgcacttcaccccgggccaacagcaatcgaggttccattctacaaccatctcccacatcgcgttcccacttttatttgatg

SEQ ID NO: 244177 - DNA, 549 bp, Homo sapiens
gcatttgtctcctgccgcagctggggctgcagatctagtcttcagttcacagagaactgccccccaactgctcccccgtactctgctcctacaggcccagctgctgtggctgtgcgacctgcagggactggcagacccgtagctaagacgccaggatttcctggaagcagagaaatgtgaccatagtgtcttcagacctgaaactgaattggagactgttaggcccagaagaacaattagggtgacgtgtgcattgagtaaacccagacctggtcacctgtctggagcaaaggaaaaagccatggagtatgaagcatccaggtaggtgaaagcgaatgaagaagaggatgacatagatgagagatccaaaggccaaggaggaacccagacttttacatgtgatttgggaagctgtgcttcagtggaaatcgtttctgagaagcctgggttttttcacttgttctcacataggggcatcttctgtcccatgctctctaacgactctactttttcttcaataatttttcttcagatttgcagtgagagcca

SEQ ID NO: 244178 - DNA, 398 bp, Homo sapiens
aatctttacatctggagatctatagcagggctatccctagtgacatgcgtgaagaagcttggaaatggtgctgggtaggagctgagtgtgcagaatgtggaaaggcattctaaaccaaaggaagaacacgagtaaagatgatgaagcagggataaggctaaaatgaaatttgtgatctgatccacatacaagcacagtgtagtacagctggaatatagagaagagcttgaagacttatgagcaactatcccggtactcttggaggctctgcaaccacagtttgagaaactccgcgttcaaagttaaaaactgtcacctgattttttaataacatcaaagattgtgaaagcaagtataaataacacagagattaaaataatgaggcaggatcagaaagg

SEQ ID NO: 244179 - DNA, 460 bp, Homo sapiens
ccatctactttctcttacctggatcagtgcaacagtctctttcccagataattatgtctccgtaaactattctcaacatggcagccattaatgatcctttcaaaacgtgtcagatttatgccactcctttattcaaaactctgtagtggtaactgttttacaaagaaggaagaattggctgggcgtggtggctcatgcctataatcccagcactttgggaggccaaggtgggtggatcacttgaggtcaagagttcgagaccagcctggccaacatggtgaaaccccatctctactaaaaatacaaaaattacctgagcgtggtggtggacacttgtaatcccagctactcaggaggctgacacaggaaaatcgcttgaacccaggaggcagaggttgcagtgagccaagatcgcatcattgcactccagcctgggcaactagaatgaaactccatctca

SEQ ID NO: 244180 - DNA, 347 bp, Homo sapiens
ctgtactgctgaggctccctcgggtctgctctgctgggctcttcaggtctcaagctcaggacatggtaatcacaggctaggctgggaaagatgtagctgtgtctctgtggaactggtcatccactggggaactactggggaactactggggagcaggccgtggtctgcactgctggcgatacctcctcctctgctgggtgtggtggctcatgcctgtaatcccaggactttgggagggcaaggcaggaggaacacttgagcccagaaatttgagaccagcctagacaagatagtgagaccctgtctctacaaaaaatagaaaaattagccaggccggtagtctctac

SEQ ID NO: 244181 - DNA, 574 bp, Homo sapiens
tcatttttaggagtttttcttttgtattctgaatatgagtcattggtcagatatatgtattgcaaatatcttctcacattcagtggcttgccttttcactgttgatgttttcacaaacaagttactaattttaatgtagtacagtttatcagttttttcctctgtgataagctctttttgtgttctgtttatcatctttacccattcaaaggtcaccagattttctatgtttcatctaaaggtttaattgttcaactttgatgtacagatctgcagtccatctggacctggtgtttgtatttagtgtgaggtagtgttcaagattcatatgggccaggtgcggtggctcatgcctgtattcccagcactttgggaggacaaggcaggagaattgcttgagcccaggagtttgagaccatcctgggcaacatagtgggaccgtgtctctacaaaaaaattcaaaaattagccagaaattagctaggcatgatggcatgtgcctatattcccagctactcaggaggctgaggtgggaggagcgcttgagcctgtgatgtcaaggctgtagtgagag

SEQ ID NO: 244182 - DNA, 1388 bp, Homo sapiens
  misc_feature (7)..(7): n is a, c, g, or t
  misc_feature (293)..(293): n is a, c, g, or t
  misc_feature (923)..(923): n is a, c, g, or t
  misc_feature (1370)..(1370): n is a, c, g, or t
gtttccnctcacacggtaggcggctgtgcaatttcgtctggagtccccagacccctcctcatccttcccagggttgctctgaggccattcctcgtcatctaggaggggtctacataaaagcatttataaacacctccaaatgggagccaggcatgcccacctttggagcacttttctctactgcaaatttatctactgctcgtgaaatctctggatttaactctgatgaaagactggaggctgaaggagaacttcaatatcatatattttaaaggttgattcacagtttggancaagaattaaagaaccacgaacttcaaggtaaaacgggcaacggcgttggggcaagcctctctgcatctgcgtgtccagcctctcctgcgtgccagaagtccccaggcaggagtgtggtgggacatccggctggggtaaggacaggcaccctcccactgtgtcagggcccagagagtgggtggagaagctctgcaagagacctgtgcaagggcgccttgcaggagcctgcagtccccacaggtgtgtttgtggataacacttggggagccctggccttttggggtcacggagggcttggctctcacctcagagctgcagaggagccgcttctacatcaggacatcagaagctggaacaggatggccggcgaggggcctcttgttggggtcacagagatgggtcgcagagatggcccgtgtggaaggttggattctcaccccacctctgcccctagatgtcctggtgaccctcccctctgtagtcttggttttttgcaaaacagttatgacctcctgccatactgggtactttgcttatgtattgtgtttactctttactgtgtgtctctcctgctaaggtctacgaagaagggtctttgtgggtggggttcttagaggcatcccaagtancagaagcagtccctggactaaggggctcaataaatattttttatttattattttttctttttgagatggagtctcgctctcttgaccaggctggagtacagtggcacaatcttggctcactgcagccttcgcctcctgggttcaagtgatttccggctaatttttgtatttttagtagtgacggggtatcaccatgttggccaggctggtcacaaactcctgacctcaagtgatccacccgcctcagcctcccaacatgctgggattatagacatgagccaccatgcctggccaaatatttgtcaaattgaatttgtatttccatacaaattttagtctggataaagtgcttcatgcctgtaatccaagcactttgagaggctgaggcgggtggatggcttgagcccaggagtttgagaccagcatggaaaacatagagaaaccccntctcaatataagaagaag

SEQ ID NO: 244183 - DNA, 244 bp, Homo sapiens
ctcccaaagagaatatcacgtttacaccttaatccatttatgtgctggctgcgactttcatggagtaagctgattcctttatttcctagttcatagggaagcaagggtagctacttgactgaataggcaattagatattggagaggaacaagaattaaaaatataaacatggggaaaaaggaaaaaatacatttgatatatgtcatagctctatatcatcaagttataaagttatatgattaca

SEQ ID NO: 244184 - DNA, 363 bp, Homo sapiens
  misc_feature (352)..(352): n is a, c, g, or t
tgcacctgcaatcccagctacttgggaggctgagacaggaaaatcacttgaacccagaaggcagaggctgcagtgagccgagatcatgccactgcactccagcctgggtagcggagcaagactatctcaaaagaaataaaataaatacataaaaataaataaataaaaatttgaattatcatcaattccctaccaccccaacaaatcaacattcattctccatattcattacagtttgggtcaatattcaatcacaattttaaaataattacatcaatacaacttcttgctttttaaaaaaaaaaaaaaaaaaaaaaaaaaaaaaaaaaaaaaaaaaaaaaaaaaaaaaggnaaaaaaaaaaa

SEQ ID NO: 244185 - DNA, 484 bp, Homo sapiens
agctaccccagcattttctatcatctataatagtacctggatgtggttttcagactcttcaacctcctggttaccctcctaaaagcacttcctctgcctcagtgtcccacttaaaaagtgtgtgacttggaattggatacagcacttcagagcaatgggcagtgggactaccccgatattatatacacagagaaaatatttaatgaactctataattttatcaaggtgttgagctttttgagcaccaacatcttgagtaaaaaaaaaaaatctttttacatagttgctaagccaggattcccacattctctatgtttgtacgtacattgttttttataacataaatgtcacacttcattcagtcctacttaattcaattggtggtaacccatcactttagcttctggagatattcttcccaaccactgatttatctatttgttcacccttccattcattcaataaagatttattgaacagcttt

SEQ ID NO: 244186 - DNA, 548 bp, Homo sapiens
atccaggggcttgtggggagggttcccgggggctcttggggaggggtcctggggtttcctaggaggggtctggatccttgaggaggggtcctaggccttggggagggttcctggggccctggggaggggtcctgggtcctgggggtttggaggagaggtcctgggtccacaggctttcctatgaaccagtcatgtcctgttgtgcctctgatgctctggacagtgtttggaaatgcttgttggtctcagtaatgagtggtttgtggccgggtgcagtggctcacacctgtaatcccagcactttgggaggccgaggcaggtggatcacgaggtcaggagttcaagactagcctgaccaatatggtgaaaccctgtctctactaaaaatacaaaaattagctgggcatggtggcgggcacctgtagtcccagccactcgggaggctgaggcaggagaatcacttgaacctgggaggcggaggttgcagtgagctgagatcacgcccctgcactccagcctgggtgacagagtgagactccatctcaata

SEQ ID NO: 244187 - DNA, 399 bp, Homo sapiens
gtagtatgaccatttctcttggtatatgcccttttgagtaagctggaaattaaaccccatgaaaaactactttaattcaattagatgccggaagagtgtgtgtctaaggttataagtaaaccatattatagaataataatacacacacacacacacacacacacacacacacaagtagtacctccaccagggggaatggatggcttttagaaaaagtaagagcatgtgaagtttcctggttacatagaacaatttggatacatcagaaaaagccaagagtacagaattaatctatactggaaaaacgtttttccggttttttttgagactaacattctcagtgtcaggttataatacctgagtgcgaaatgcggaaaaatgcaataggaactgaccaaa

SEQ ID NO: 244188 - DNA, 576 bp, Homo sapiens
gcgtaaaagaagcgccataagggaccaacgagcagtccagctataggtgtggacgcctggtcccacccggaattgcaggggcttggctactgattggctaagaaagtcctcctaggccctcattggaggatctaaacgcctctcttcggcgtggagacgggaagggacgactcagacgaggacaagaagtgggcaggggagaggcggttgttttgcttcagccgcgggtggggcgcaggcgagagtgggaaactgggaaggccgggctctggggaggtgttgcggggaggggaaaggcccggatgttccctaacaatgaaatcatcgccgacctatcagagccgccgagctgggatacctgcctgacctgtaccccggagggagaagagtgggcgggaaattggggtgtcggaagaacctggaaagcaacgtgagaaagtgggacaggtgttcccttcaggaggattttgtgctattagagattatttttataccagcccttgacatttccgtattttgtttctcagtcggcattgatattaaaactcccagcctagtctcttgacatggacttgt

SEQ ID NO: 244189 - DNA, 562 bp, Homo sapiens
gatatataaaatatcaataatagtaatagcttgtgagagtagtttgtcagtatactcacaaagatcatgaatttgacgcttactagtatgagggataaataaaaaacattttataatatgtagctaccataaagatacgattatgacacaactgagaattgagcggtcttttaattctccttttgagtaatctttaccaacctgtcctctgagcctccgtgtatatgctatgtttaagaccaatgattagctatttatacatgaattttccatttttccttgttcaaaacacttttgtcacacaaataatattaactaaactaaagtgacttgagggagtatggattaatgaggttcacaagaaaataaataaagcaacaacttgtgaaatttagggcagatgccatttattgccatttcccgctgactgttaagtagagatttcagttcagataaacacattctaagaattactactgaaagtgtaaacatcagcctgcattttagtacttgctggttctttagtaaaaatttcgaatgtcagcccaaggttgtcttgcta

SEQ ID NO: 244190 - DNA, 622 bp, Homo sapiens
ttctgatcaatacccagttcagcattaggtcattagtgctcattacagtgaaagacggataactgtgatcctaataagtcatttgggacactttaaagattctttatatgccacatggtctgtcacctaaacccagtcaggtgctctttgaatttaaatatcatggctcttacaagcctaatacttccattttacaaaagtcaaaataaactgatggggtaaagcctaaatataaccactctaaagagtacacgggaagagatgaatcaaatgactaatccaatctcaaaataaataattaataaaattacaaaatgagttttgggcctcctagtttccagtttcatatacttgaaatacttctcctttacttaaattcccaggaattcctatggttgtcataaataattagagtgctaatagcagctctgattctgctggtaagaaggaagagcttggtcttcaaagctgaatttagtaactcagggcagggggtctttggctgcatcccaaaagcagataatcaaagaaacaaaggcacttatccccaaagtcctcatctgtgattaaaactggcatccttaagtgccaatggtaatttatttatcccagcgtattcaag

SEQ ID NO: 244191 - DNA, 456 bp, Homo sapiens
cttggtcaaggaggggtctaggagctctgtcccttgtaaagacaccttatttataattaaattggaaagtggtttgaaatagtataaatatcctgtattctaacaatcttcttctgagtattttatcatcaattaatcacccctgcctgtgtcagttattatatttatgtttttacattggaaattgtcttctcaaaattttactatgtacttgtttttgctggcattctgtcgtaaaaaggaacattccctgcccaaagtttgactttcatccaaaattaattttagtccattaaagttaaaatgttaaagttttaaatcactttaattaaatttttttgcctatcaccctggactagtgaatttttcacatacaatgttttaagcttttattttattattggttttcatggataagaatatagattaataaaaacattcttatttacctgttta

SEQ ID NO: 244192 - DNA, 578 bp, Homo sapiens
agaaactgaactcttaaacactgatggtggtaaagtaaaatggtgcagctgttttagaaataggtttggtagtcaccaggtatacagaaatgaaaacatatgtctacacagaaacatacaagaaattttatagcagcattgctcatcatagctcaaaagtgaaagcaacccaatgtctatcaactgatagatgaatgaacaaaatgtgtttctttccgtacagtgggctattattccggcataaaaaagaaatgacatgctgatgcaggttacaacatgtatgaaccatgaaaaggccacatattgtatgattccatttatatgaaatgtccagaattgagaagtccataacgagaggagattagtggttgggaggggcctgtggggggaaaatgggggatggctactaatggatactgactttctttttgtggtgatgaaaatgttctcgaaccaggtagcagggaaggttccaaaactttgttaatataccacttaaagtgtacatactttatgagtgtgaaatttatggtatgtgaattatatataaattaaaaaattcaaaaagaagtgttaaa

SEQ ID NO: 244193 - DNA, 511 bp, Homo sapiens
tttgagacagagtctctctctgtcacccaggctggagtgcagtggcgcaatctcggctcactgcaagctccgcctcccggattcacgtcattctgctgcctcagcctcccgagtagctgggactacaggcgcccgccaccacacccagctaattttttgtatttttagtagagacggggtttcaccgtgttagccaggatagtctagattttctgacctcattatctgcccgcctcggcctcccaaagtgctgggattataggcgtgagccactgtgcctggccacatttatattttttctagttcctattttttacatttatatttatatttattatttattaggtattttatttaaaaaattcctcaagtagtttgtgatcaaagtccatttaaataactaaattcaaattaaaaaataatctggcgtgaacccaggaggcagagaaggcagtgagccgggattgcaccactgcactccaacctgggagtcagagcgagactccgtctc

SEQ ID NO: 244194 - DNA, 521 bp, Homo sapiens
gcaactgtgccactgtgaatgcctcatgtgtcagcatagcttattatctagctctgagcagaatgggagtgctgctgaattagtcttggtccacaggtatctccagtgtcccagatgtttcacctcctttgttcttatctttgcttttattttgggttacaaacacagcagataaattaattctcagcatcttcagagaaactgtgggttagagcagaatcaccaactagaagaaaccatttaaattcaaaaatcataaggaacccagaaccaatgttaacactgcataaatacaacaagattaataggaggccccacagttaattcctaaggtggttcttagctgtaaagcaattcaaatgaccttcttataaaccctgggcaaaagtcccctgtgatgtggtggaaaatatcaacacgtaaaggaaataagaatgactgtgagttgagttttgttgttttagatccagatcatgaatatttaaagaaataaaagcattttgagttgggaggccatgcta

SEQ ID NO: 244195 - DNA, 366 bp, Homo sapiens
ctttgggtggcttaccatggcctttggtgtattagtgtctctgagaagttctgcaggaaagactctcattttgttaggtctcatgtagcttctccccaccgtgtctaatcacgaaggctgcatctgacggaaaacctattaacatgctacagaaatgctgcctgtgtgtacgcgtgatccctcctcccccgtgtgtttggaggcagtgaggattagagcgtggctgggagaggagcgtgcaggggtaaggacggggtaggggacccactgctggggactactagagctgaagctcccctcctcaggctgtgtcctctctttccctctgggcagtgcagaaaattcactcaatattaggcacagtca

SEQ ID NO: 244196 - DNA, 526 bp, Homo sapiens
catgaacatttagctgctgagcccaaaagcttgatttttattagctatatttgttgcccatatattggaacagatcttaaagtggaagtcagatgtgtattatcagataccatttggagtaatgagtgtattttcctaatctttccaacaccaacctaaaaactcatctcaaaagcatgcatactaattaatttgttttccatatagtaataagattaacaacctcgcatttacacggggtactgagtcatgctcaaataaaacaagttctaatgagaaaaattgaatgtggcagcaaatcatgtcccacccggcaatccaggtttatgtgtgtttgtctgtctttgctacacgtatttttgtcaggatctcactgtaaacaagatgatttctctcatgttgggttagtctaggtaaatttgtttaatgaacaacaaagtcattgtaaacattgcacaaatctgagtgcctggcagcatggctaggaatcttttaagcagcttcaaaaaatgaaacgtgtacacca

SEQ ID NO: 244197 - DNA, 354 bp, Homo sapiens
tctgccttgagtgtcatggagacaaagtggagaacctggacttctactcctacctagcagtaacaaggtggcagtaacccttcccttgacagagtggtgtcaaagagagccatataaagcagaaaatttaaatgaaatcatttcagaacataatgtgaaatacccaggtttcaataaaaattgctttttatgtcaataattagaagtatcttgaaccaaatgaaaaagagcaatcaataaatgctaacattgagatgacaaagacgttagaaatatctaacaacattttttttctaatgaagatttctaagcagccatgatttcaatgagcaattataaacatctttaggtaaa

SEQ ID NO: 244198 - DNA, 485 bp, Homo sapiens
catgaccaagcctcccttggccagctgtgcacctggtaaggccgctctgggataaccaccaccccaggcctgggctgcaggtcttggcatcctgaagatacaagcaagaggagacttctttcctcatagcctgtgagtcactctgctgggtgccctctgacagccctacccccccaatgcctctgacccctggggtcccttgctccttcccccaatgagatctgaagccaccaggatcccaggtcacccatttctctcccttgaccgtcacagtgcatctggggagcctttcagtcttgtcgcaggttgagcaggggcctcctggggtccagggcagtcctgcttcctgaggctagggctccccagccaggccaaaccccaggtgcagggctcactcctatcctgctctcttggcctcctgagcagagcttggcatgcagtagatgctcagtaaacactaaacaaatgccttacattctcctaaa

SEQ ID NO: 244199 - DNA, 453 bp, Homo sapiens
agttctttgcaagctttaatctgttaaaaacccagcaagaattccattggatgattttattagctcataccacaccctgataccaagtaatatctcaataaactatgatttttgactctttcataaaaagaactccatctgaaaatagacaaagttggatgaaaataataccctttttctttttactgtataacggtatcaacttgataacataacaaaaagaggaagttaaagtgaaattttcagtctggatacttgttgtcacataaaggatcttttactcaactcttcatcaaaaaagtaagagaaagagaaagaaggaaggagggaaggaaggaagggagagagggagagagagagaatgaaggagggaaggaaggaagggagagagggagagagagagaaagaaaaagggaaagagagaaagaaaggaaagaaagaaaaggaagaaag

SEQ ID NO: 244200 - DNA, 367 bp, Homo sapiens
ctcactcatccacccgcctgtcgacctctgtcaggtttgacttcttgcaagggaggaaaggaaggccgagagacagaaagactttgctttcatgatgagtgcaaccacagatgagtccagcaggggcaggttgcggtggaatggccccaactcagacaccttcaaggatctcccactggctgaacccaactgggaatgaagtgacatggaaatctgagatgcagcctacagaaatcagtcctcctagcatccatggcagaggatgggtgaaactggcaaacagtttcctaagctaagactgagccccaaacagatggaagcgcccacagacgtgctcctcctcctccttggcatcatcatcattgga

SEQ ID NO: 244201 - DNA, 446 bp, Homo sapiens
atttgaatgccttcttgattataagtcaaaaagtacatagtgatctattatcaaaaactattggcctatctgttgacaacttgggtaggtcctcctttaattttattgaaagcaaagaattggaaactacctaatttacaaaaaaaagaagaagaagaagaagaagaagaaatgtgttacctaattattagagctcactttctaagtttctaggaagtatgacccaaaaaagcttggccaagacttatcacatggctgttgattataccatcacccttttacttacaggcgtcttgcttatggacctaaaaaagatgaaactggagttagaaacaaaaacagaaaattgtaaattgtgcatttggggacttttctccttgactgtgaacagagacctatatacaatgccaaatttcattttttaagaatgtctcaaaatgcagagt

SEQ ID NO: 244202 - DNA, 199 bp, Homo sapiens
ctctcaagaggagggctactcattgactgggtagcaaaaggccccacttctattagggcatgctggctggagtcccctgtgtcctggccatagcacagcctttgactggcatcatgcccattctatgaatgaatagagagattgactaacccgagtgactagctttgggagctggtaggatgattaggaaaactgaacc

SEQ ID NO: 244203 - DNA, 590 bp, Homo sapiens
attttttttttttttgggatttttagtaaacagggtttcactgcgttagccaggatggtcttgatctcctgacctcgtgatccatccgcctcggcctcccacagtgctgggattacaggcgtgagccactgtgcctggccgcctttcccatttttgaagacaaaacgcatggcatatagggggtactcaatgatgtgttaaatacactaattaaagactgagagtctgtattagttttctaaagttattttctttgcatcttttacttagaatataagtgtgagttcagttgcttaatgcctagtgccaagacaactatggttgttgagttcactccccaagtgggcttctcagatttctctgtgtgaaaaaaaaaaaaaaaaaaaaaaaatgatcccctgatagtatctccactgtctccatcaaagggttttgtttgtttttttctttgagacaccacctctgtcatccaggctggagtgcagtggtatgatctgggctcactgcaacctccacctcctaggctcaagcaatcctcccacctcagcctcctgagtagctaggaccacaggcacgcgccaccacgtcca

SEQ ID NO: 244204 - DNA, 382 bp, Homo sapiens
tggccaggctggtcttgaactcctgagctcaagcgatccacccgcctcagcttcccaagagagacatttccctttattcttcttctacgccctcacggtgccactgttttataatctgatgttaaaatctatcaactgcagtgggaataaaacagttaagatagaaataatacataaaagaggtaacaaatgcagttcatgctttttagttcacttgacaaagcatgactcagctgctttgagggattcctatttaattttcttgggtcagcttgtaattaaaccttaaaagaacctgtcaaggccaagcacagtggctcatgcctgtaatcccagcattttgggaggccggggcagacggatcacttgaggtcaggagttc

SEQ ID NO: 244205 - DNA, 627 bp, Homo sapiens
tttttctttgagacaccacctctgtcatccaggctggagtgcagtggtatgatctgggctcactgcaacctccacctcctaggctcaagcaatcctcccacctcagcctcctgagtagctaggaccacaggcacgcgccaccacgtccagataatttttgtatttttagtagagatggggttttgccatgttggccaggctggtcttgaactcctgagctcaagcgatccacccgcctcagcttcccaaggtgctgggactgcaggtgtgagccaccatgcccggccccaagggctcttttaagagagacatttccctttattcttcttctacgccctcacggtgccactgttttataatctgatgttaaaatctatcaactgcagtgggaataaaacagttaagatagaaataatacataaaagaggtaacaaatgcagttcatgctttttagttcacttgacaaagcatgactcagctgctttgagggattcctatttaattttcttgggtcagcttgtaattaaaccttaaaagaacctgtcaaggccaagcacagtggctcatgcctgtaatcccagcattttgggaggccggggcagacggatcacttgaggtcaggagttc

SEQ ID NO: 244206 - DNA, 382 bp, Homo sapiens
aatagccaaaagcagtcttgaaaaagaagaagaaatatggagaactcacagttcttgattttaaaatttacgagaaagctacagtagtcaaaacagggtgatactggaatagatggacatatagaccaatggaatagaatagagagcccagaaataaaccctcgcatatatgatcaaatgattttcaacatggatgccaagaccactcaatggaaaaatgacagtctcttcaacaaatagtgttggggaagctgcatatccacatgcaaaagaataaagttagaccctttcttaacaccatataaagtaactcaaaatggatcaaagacctaaacatatgagcaaaagcttctactagactcttagaagaacacattaagga

SEQ ID NO: 244207 - DNA, 177 bp, Homo sapiens
tctttttcagtatggactgacatggcatctttcagaataacctaataacaaatatgcctcatgacagcaagtatcttcccaaggcatcagtgttttgtcttaaatgaagaaggcatactccgcccattaacaagatgttgaccttattccatatgaaataacaaccctggccatcct

SEQ ID NO: 244208 - DNA, 411 bp, Homo sapiens
ctgtctacccagctccctcttggccacggcttcctggccagccctgctggaaaccgggagctgctgcagagctggaggagggagggggtcacccagatcacctctgcagagagcagggcctggccggggatgggcttcacagaggccctcttccacccatccatgcttgttcctacgttcacttcagggagccctgaggttttgcgggaacccagggtcctgggaccccagcctcagcctctcccctccacctagcatgtccagaaatgctcatctgcagtaccaagtaccaggtgtcccagtggaatttcttctctgaataccactccggggaggaataaaactgagggagataagcaccaccctgggtttgttcgtgctgagctaaaggaataaaggctctgcactgaa

SEQ ID NO: 244209 - DNA, 392 bp, Homo sapiens
cacctagaattgcgcgtcgacatttttgttgagtgggcaatgaagctgtttgttgagaaagttagaagtatatttgagaatctgaaagggcttgaaaagttaggatgtagactgggcatggtggctcatgcctgtaatccctgcattttgggatgctgaggcaggtgggttgtttgaactcaggagttcaagaccatcctgggcaacatggtaaaatcccatctttattaaaaatatagaaattagccaggtgtggtggcactcacctgtggttccaggtactcaggaggctgaggtgggagaatttcttgagcccaggaggcagaggctgcagtaagcagaaatcataccattgcactccagcctggatgacagagcaggaccttgtctca

SEQ ID NO: 244210 - DNA, 194 bp, Homo sapiens
tacctgttagtgtcctttatcttctaacatctattgttgcctttgaaaaatctgttgggaattttctaagtctgatcattcgtaaggtaacttttctttttaggttatgggttgtttttcttatcccttatctttttctttcttctctgccttttactggtatatatctagaaatatattttaaaatacttttc

SEQ ID NO: 244211 - DNA, 469 bp, Homo sapiens
cagaagccagactgcagtaagttggggagttaactggaagtaaggaagttaactaagatctagagtttctttcaaatagcctgccaggaatgggaatgagagagctgagaataattaaattaatgagctaggtctcaaggaaactagaaggaatgggttctagaccacagaaggagggattaattgtggtcttgtagggagactcagcttcctctgagaaaggaggaaagggaatatgaaagggaatacaggtaagtttgtaagggagggcttgttggtgggcagtagggaaattggagacattactacctaatagcctcagtattctcttaggagttacagacaagagaactgggtgcagcagctcatgcctgtaatcccaacactttgcgaggccaaggcgggagaataactggaggcccggcatttgaaactagcctgggtgatgtggcagcactccatcgccaga

SEQ ID NO: 244212 - DNA, 502 bp, Homo sapiens
caatttctgcaatggctttgcatctgataaaaattaaaatgcactggaatatcctaaaacattgccagagacttcttgaaggaagatgttgatttatatgttgtatagatataataactgattgaaatactctcactgatgttaacttgcagcaaagttaaaggcttgacatgccttttcaattacaatttacttaatctcagtatttcatgtttctctggttggttggtgatgattacagagtgaaaaatatgtattgactaaggtaattacttaagtcaaatatttataaaatgtattcaacggaagttacgtttcactatactgtgggtttactttttgtactgtgtgcttcttagagcaatacgttttaccaccctgtatacccctcagtgttatagatataaaaatttaagtatccagataaggggatagatggttgatagtaggcaggcatataatatagagatgaataaatagataaagttgttagttatacttt

SEQ ID NO: 244213 - DNA, 392 bp, Homo sapiens
ccaagaaggggtcggaagagggccagccctagtttagggggaggtcaggacagggtgtgctgacgagtttgtctgaactgagatccgaaagctctgccaggaaagccaccaatgcaatcgacttgcaattcacaagttgcctgctcaacaccagccggtgtgcatgcccggatctggactaggacatggcttccagtcagcttttgctgccggcagtgatgaagaaaggcagcggttccctctgctggttccttctgcactgttcagttgtcataagtccccagggattgtattcctctgggggaagcagggcagggcaggctccagagggccagtgaggcgagcagttgtctaacacctttcttggaatgaaatgaaatttacttttatca

SEQ ID NO: 244214 - DNA, 342 bp, Homo sapiens
tctgtttccctgtagcttgtactgacttttactaatctaatagcaagacaagaagtctaaggtgggattacaggcatgagccaccacgcctggcccttgttgtgttttaatgtgaatcctgttttacttataattaaaagtagcttaactaggatatttttcagtaatggccctatttctttgaaaccgaatagaattaataacctaataaactcttagggcttgtgggacctaaaggataattccccagggttgcatgtccttcacctgagaaatgaatgcagggatctttggtagagtcagttaagactagggctgttgaacccagcgagactctgtctt

SEQ ID NO: 244215 - DNA, 612 bp, Homo sapiens
ctggggtcttgcatcccttctctgattcttcccttgaggtgggctgtccaagtgcgcagtggcctgtcagcgcttcgaaggggtcacacgtgcagtgtgtttactggagttgtatgcatgctcacttgaggcattcttcccttaccaaaggttcctaggtcataggccagttaaatgccgccatttttgccttcagtgcacatatgtgagcccactcgccctactcctgagattttattgggaagctgctgatcgcatttcaggttttttctgtctattgggaggctgccccttcctggtgccagttgcaaccaattattattttagagtgacagttaacaaccatctgaccatcacctgctggttgcctgatattcctgggggagggcaaggggccctctcctgccctgctcatgcctgaccagctacctactgtaacaatacttaatggtaaaagactgaatgttccctctaacacagggaacaaggcaagaatgtctgtctgctctcgccacttgtattcagtattgactggagatcaactgccagtatagtaaggcaaaacaaataaataaaaggaaataaaaggcataaatattggaaagaaacaaa

SEQ ID NO: 244216 - DNA, 452 bp, Homo sapiens
tggagactgtgttctcttcgctgtttagttagcgagcagctagggtggagtcggcctcaaaggttccgctctcatgtcggcaagtgtgatttgaattttaaaacactgagctttcccggtggaagagttcccaagtttattccgacctacggaagcccaggaggaccaggattaccgctgccgctggatgcgtccagggccgggatgcgcgaccgtgagacgctgcgcttccgaagccctcgcaggcttccgggtgccagagcaggagacataccctctgtccagccttccactctcagcccccagttttttcccacttttgcttttcaggagtcgtccagcaagacttgaaaggaggagaaaggcctgctggacaggatgctagagcctggcagtgaccacttgggggccctgggcattaaataaacttcttggggcccgtttcgttatta

SEQ ID NO: 244217 - DNA, 1094 bp, Homo sapiens
acctcatcaggaggctcagaccttgccagactgcctgctttcatggatagacataaaaaccttcagcttgaatgttaacaccttgatgggaaaggtggctcatggaatgttttcttatcctttgaacactcctcatttcagaagctttgcttctgttgcaaccaaacatgacacttagcgtgctgagcaggaaggacaaggaaagagtaattcgcagactgttattacaggcccctccaggggaatttgtaaatgcctttgatgatctctgtctgcttatccgtgatgaaaaacttatgcaccaccaaggtgagtgtgcaggccaccaacactgccaaaaatattctgtaccactctgcatcgatggaaatccagtactcttgtctcaccacaatgtaatgggcgactaccgattttttgaccatcaaagcaaactttctttcaaatatgacctgcttcaaaatcagctgaaagacatccaaagtcatggtatcattcagaatgaggcagaatacctgagagttgttcttctgtgcgccttaaaactgtatgtgaatgaccactatccaaaaggaaattgcaacatgctgagaaaaactgtcaaaagtaaggagtacttgatagcttgcattgaagatcacaactatgaaacaggagagtgctggaacggactttggaaatctaaatggattttccaagttaacccatttctaacccaagtaacgggaagaatatttgtgcaagctcacttcttcaggtgtgtcaaccttcatattgaaatatccaaggacctgaaagaaagcttggaaatagttaaccaagctcaactggctctaagttttgcaaggcttgtggaagagcaagagaacaaatttcaagctgcagtcttggaagaattacaggagttatccaatgaagccctgagaaaaattctacgaagggatcttccagtgacccgcactcttattgactggcacaggatactctctgacttgaatctggtgatgtatcctaaattaggatatgtcatttattcaagaagtgtgttgtgcaactggataatataaagaattgctcctggtaactaaaaaaaa

SEQ ID NO: 244218 - DNA, 734 bp, Homo sapiens
ctagccctacaaaacactgaaatgtttaaaatgcaaatatcccagcgtagtaggccgatcaacgtaacatagaacctataaataggtgcttttacatgtagaatttattttgataaagttacgaataaaggtaataatgtgggaagcaatagcctccagtaatgctgaagcaacaggatcttagaacagcgtttgcaaagtgtgctctacagaaaactatgataatagaaatcaaaatttaaagtgtccatagtccagtcaccttgagaaactctgggataaaattgtgttttttatagcaaaattaaaataatgtgtgctgtgattcaaatgggctatatgatatgtttttttaacacagaatgaaaccaaatcagagtgtcttgcaggattcaggttctttggaccacactctgcaaaacactatgttagaaatttagttttgtccctctccctcccactggacaccaaaacagcagttatatctaaaatgtgaattcatgaaaatgaatggaaatttgtatttctcacatctctagaagaaagctgtctccatgaatgatgttaaaaagggagatattgacatatttgtatgaaagtggagaaattgagaatatgaaaaaataagcaaaatgaaaagatttgggaaagactgctgcaaaaataacagaggaataatatgcagttgatttattttttattttttatttttatgttttttgagaccaaggctg

SEQ ID NO: 244219 - DNA, 589 bp, Homo sapiens
ttatggggtcatgtatgaagaattttgtcttcatacttgaagtcaaaggatgaaaaatttgatccctaaagagttcttttcacaatttttaaatttcaataaaataaagaatggtaggactgtgattgaaaaatgtgatactaaatttttctattgaatgatgcatatttatttttaaaatccttctctgtacttattcattcaacaaatatttattaagtgctcagtttgtgccagccactatagtaagcactgtggagtaaaaacaaacttggtctgtgcaatctttggatttaggttattggcagggtaggaggcaggtattaataaaataacacaaaactgcagtgaagacaagtatgattatgagcagtatggtgctgtatagataatatggtgatttgacttaataagaggccagaaaaatggtttgtttatttatttatttattaatgacagagtcttgctctgttgcccaggctggaatgcagcattgcaatcttggctcactgcagcctcagcgtcccgggctcaagtgattctcatgccttagcctcccgagtagttgggactacacgggccagcgcct

SEQ ID NO: 244220 - DNA, 326 bp, Homo sapiens
ctgagagaaagagagagatcgagaggaatcgagatttatgtgtgaaacacttctaaacatgccctataagtacagtagattctcccctcacagccacaccctgtaagtgctgtattttcagagctgaacaattaacataaggagcatgagtcaggctttgaacaactctgtgggaaccagaaagccttttgctattaggaatgatgtaaattccccaaggctggaagaaatccacaatggaaggcagacagggtcataaataacaacaatgaatactgcatatgccacataaagtatgatgctgtgatagtgacactctttcaaat

SEQ ID NO: 244221 - DNA, 1896 bp, Homo sapiens
aaatttaaactataaataggccaggtctggtggcttatgcctggaatcccagcattttgggaggctgaggtgggaggctcactggaggccaggagttcaaaaccagcctgagcaacatagggagacctcagctctacaactgaaaaaaaaatagccaggtgtggtcatggtggcaccggtctgtattccagccacttgggaggctgaggcaggaggtttgcttgagtccaggagtttgaggttgcggtgagctacacaatgagctatggtggcactactacactccagcctgggccatagagtaaggccctgtctctaactggaagtccaaagagggatctacttcctagactattaatttaatagatcaataaattaatcaagaatatgatttttttctcatctttctctgtagtcatattttatacagactttttgtttaagtaatctctctttatgggcagacaatgatttcagaaacaccacaaattattctcaaagagaaaagatgaggattttttttttttagaaaatgtaactcttttcagtagctcttggcagacctaccttcacattttcttgactaaaaacagtcattaaaaaaagtcagtcacaaacaggtgaatttaaattatcatggtttacctatgcttaacaagctttatcctcagaggtaaggatagggttactttcccgaattttagatatgtggaaatatttggagttatgtcaataaatgaaaaagtgtgatggatatagtgcttgccttggaatatacccaatacagatattctgaaaactttaagttcagtaatatgccaggggttcccaagaccacttgagacctggtaatttattggaagtctctaagggaatcagaagctgtagtactcattgttacagtatattacagtaaaaacagtacagatagaagtcagctaagagaaaagacaaatgaagtgaactccaggagaaaccaagtccaagctctcaggtgtcccctcccagagcagttgcatggggacatgtttaattatcccaacaacaatatgtaaagtacaaagcattgccaaccaggaacactcgctggagcctagttgtcgaaggtgtttactgggatcagtcgcatagtcatgtaatgcccatatgattgacctcagctccatgacatttaagcacaactttcttcctacacccagagtaaaaacagatgttcacataagtcacgttgataacataaccttttctggtcgaactgggagagtatggcccaagacttcaggaaaacaagaacacttttatcaagcaaaatactccaagggctcagagatgaactcctagtctaaggtctagtcctgcagagggacccctctttggaatgtatagtatttgagcaattcaggccagtcaagttaaaccttttcacccatgcctaaatgctatttaataaatgtaaataacaacgatgagatagtttattaaacatttttattgaaatacacaaatagtatatagttaattaattttaacaaagtgattgtacatatttcacaataaaattcccttaaattaccatctgctctatctgcaagtaattattattctgattgctaataacatagactttttttaacctatttttgaacttttataatagaattaaacaatatatattcttttctggatggcttctgttactcagaaatatatttaggagagtcatcaaagctctcttgggtataccatttatccttcttgcttgataatgctccatgtatgtatatatatgctatgatgtgtttattttactcttgatggataactgcaaaacttccaatttaagctgttgtgaataattctttaataaaaaattttgtacatttgctgaaaaaaata

SEQ ID NO: 244222 - DNA, 456 bp, Homo sapiens
actaagtcctgcacaagtgctatttacttggctgaactaattggagtctggggtgttgcttttttagctttacgcccactcttctttgggaaagtgtgctttaagggggatgccatggatgttgaatgccccaatctccattcctgcaacaatcagaaacacatttttctcactaaatatactcccagaagtctctctcacagaaacaaaagcaatcacttataaggatctgtataagggtgtttattacagatgcatttgtagtggcaaaaaatctacaaagaccaacactaagaacatggttgaactaatcacagatcatgcacatctctgaatattatgaaaaagagggaaatagagttctatgagttggagggatttccgcaggatgttgttgacagagaaaatcaagatgaagaaaagtgtatactatgtgatcttttgtttaaaaagaaa

SEQ ID NO: 244223 - DNA, 208 bp, Homo sapiens
gataaaaggagcggtccaaggcactggagtgctgtgttttatgtttaatgcataaagggagccactgcctgccccaaaccaggtaccttcgaaacatcacgatggccctgaggctgcacctagacctgagcacgtagcatggaagtcattctggcagtggccgtggtctctgtggaggtctcagcttccgggccgccaggcagcccag

SEQ ID NO: 244224 - DNA, 432 bp, Homo sapiens
gcctaacttaatttttaaaatgtatcagattcaaagtttaatatttgattttttaaaaaccagtaaactcaacatatatttggtcaattgagttttgacaaaggtttcaaggcaaaccaattggaaaaggacagttttattaaataaatggtgcagaaacaactggatatctatttttttaaaaagaatcttgactcttaccccacactatcacttaaatgtaaaagttgaaattataaaacttatagaagaaaagataggagtaaatctccatgatcttgtcttacgtaaagttttcctaggacacaaaaagcactaatcatttttgtaaaaagataaatttaacctgataaaattaaaaatgttgattacttgaaagactttataagaaaatgaataggcaaataagatattcacaaaacatatatatga

SEQ ID NO: 244225 - DNA, 163 bp, Homo sapiens
gccacactagcctttgtaaaaggctgtgatctgtgcatccactatccataaactgactagggcacaagtggagcagaataagggcacacagagatccttctcactatgactcggaactccaagaacacactagccagcttgtcaaccagcgggtaggacagac

SEQ ID NO: 244226 - DNA, 423 bp, Homo sapiens
ctcccctatccctcccaagtcgtccttcggctcctcagcacccattttccctgctgcacaccctcctgacaactcctgccctgaagccctgggcccgggtcacggcgggaaggtgagtgctcacaggcgcgagctcacgttaccaagttgggtcagcgtgcagagaaaagggaattgggaattggagggctgtaaaatgtaaatgtgctttaaattttacatttcctggcgtggccaggacaggctgaccttccgattacaatccgcgtcatcccgtcgcttctgcccccagcctggcgaggtcgggaaccgtttcccgcaggactttcattgggagttacgagggcgccctgtgcctggaggtggcgcgggctggagccctcccggaggagaccggcgcctggcagggggtcgtcgcggccg

SEQ ID NO: 244227 - DNA, 521 bp, Homo sapiens
ggctggtctcgaactcctgaccttgtgatccacccgcctcggcctcccaaagtgctgggattacaggcataagccactgtgcctggccgctatgaataatatttctaagcatggttacataactgaatattaaagtcacatattacttttaaaaagaattagtcattatcatacattatctaagtattatactaatattaaaatattaataacaatagcctacataatagcaaaaattggaaagcagaatagaggggcagaggaagttaaagtatgccctgtcttcatcattaaagaaaagattcaaaaagtattgcatcatccctttgaggactaccaaaaaaaataggttaaagaatgcttatgaagctgggtatggtggcatacacctgcagtcccagctctcaggagactgaggcaggaggattggttgagcccagaagttcaaggctagactgcactatgattgtgcctgtgaagagctactgcactccagcctgggcaacatagtgagactccgt

SEQ ID NO: 244228 - DNA, 540 bp, Homo sapiens
aatatttattgaataatcgaataacttagtgtaggaatttagtcttagtcattaaatttaactaggtttagtcaacttaatgaagaaataactgataaaaaatattaggaaatattgtttgtaatttgagggtaaggaaagtcttcatcaagacccaaaatggatttgtctttttaaaaattaataaatttgaccacatagacatttaaaacttctttataaaaagtacaataaacaaaggttgaaagataagtatcagacaggagaaaatacttgcgacatgtaacaggatacattaaagatacataaaaagatacatacaaagcagaatgaaaaagacaatccaatagaacagtggacaatccaatgaacagaaaattagagaagagctgttgcaccatatacaaaaattcaccgagaatggatcaaagacctaaatttaagaactaaaacaccgaggctcttggaagaaaacaaaatctaaatggtattggagttggccatgatttcttgaaatatgataaccagagcacaggcaac

SEQ ID NO: 244229 - DNA, 180 bp, Homo sapiens
cattagattaaaagccagagacatattatagtcctagttctttcgcttactagagatttgaccttgaaaagcttaatttgtttaaatcccgtttcctcatctgaaaaatgaagactgatgatatctgtcctaactccatcttgtgatgatccaatggaataaagtgctgtcaaaatgtga

SEQ ID NO: 244230 - DNA, 267 bp, Homo sapiens
aagtggaaaggatccttggacgtcaggcggtgcagcctccttgaggttctgaaatctggcagccacattctggcctacagcagtccagcctctacttaatcatcacactgccagagctcacctcatggggccacatctctgtcactttaatagggaaacagtctaccaaaaattggaccaagatttgcagctcttcaaactccaccccttagtcctacctcagacctttaaagcttcccagaataaatctaatttctcaatgacagc

SEQ ID NO: 244231 - DNA, 432 bp, Homo sapiens
acattcacgttctgaagtatcacctcagtctttttctctatgcacatatataattattttaaattaaaattgggctcaagccatgtttacatagttctatagcctccatcttctgcttaacacagtgtcgtgtcccttttcctctgtctcaaaaaaaaaaattttttttttacttgtattagtaatggaaatttgtatttcaggagaatcgcttaagcctgggaggcggaggttgcagtgagccagcatggcaccactgcactccagcttcggcaacagaaaaaaaaaaaaagcatctgttttgtttactatttaaataattacatttatttatgtcaatgttgaacctatttattgtcttattgtttaaatgttaaatctgtgcagcagctttattctttaaatattaaacatgtattgtgttcattaaaa

SEQ ID NO: 244232 - DNA, 479 bp, Homo sapiens
ataactaaaagtataattggattgtttgtaacacaaagaaaggataaatgcttgaggtgacagataccccatttaccctgatgtgattatgactcattgtatgattgtatcaaaatatctcatgtaccccacaaatatatacaactactatgtacccacatatattaaacattaaaaaattttaaaataaaagcgtatctcattggactgtagaaagtatcaagtgagataacctttccgatgtgcctggtactgaataactaagtgctgaattaatttttgtttctctctctttccagaaggaatgaaatagaaagaataaagctgaaggacatttcatttatgttcaactagaaatccaatatagttttaggcaaactatattttcccttgcaactgtactcccttacatacatgtaagtgggaaagaataaatgtgacaaacaaaatatcactcctgattccacaatctaaacaaa

SEQ ID NO: 244233 - DNA, 178 bp, Homo sapiens
tcttctttcatattgtttttaactgatcattcatgtcctgctatgggaagtttagcatctctctcaaggatgctcctcctcaccaattttctaagaactgcagagtctgaatcagtttacgggggcatcactgccacttccaaatgcaaataaaagggagaattggagtgccaccaat

SEQ ID NO: 244234 - DNA, 450 bp, Homo sapiens
cccgggttcacgccattctcctgcctcagcctcccgagtagctgggactacaggcacccgccatcgtgcccagctaatttttgtatttttagtagagacggggtttcactgtgttagccaggatggtctcgatctcctgacctcatgatccccccaacttggcctcccaaatctcagtataatgaggtgttcaaacctactcatacacaatactttttacaaaatactcaaaactggttattcttttaacacaaatggctctcaaatattaccacacctagtttatgttctaatgtagctttactactttcacatcttaacaaaagcccttctgataaaaatcaaagcaggaaaattttctgtttttaaaatgaggaacatagccccagctaaggtagtaatttcactatgatcgcacatctagtatatggctcgtggccgaattcctgt

SEQ ID NO: 244235 - DNA, 283 bp, Homo sapiens
tcaaaaaaaaaaatttttttttacttgtattagtaatggaaatttgtatttcaggagaatcgcttaaacctgggaggcggaggttgcagtgagccagcatggcaccactgcactccagcttcggcaacagaaaaaaaaaaaagcatctgttttgtttactatttaaataattacatttatttatgtcaatgttgaacctatttattgtcttattgtttaaatgttaaatctgtgcagcagctttattctttaaatattaaacatgtattgtgttcattatcta

SEQ ID NO: 244236 - DNA, 724 bp, Homo sapiens
cagagacggggcaatgggatgttatatgacagaagcctacttcaagacattctccaaaatcataccattgaaaaggcagcgcagctcagagtaaggaactgacgtagatcttcctggagcttggtggaggggggtcagaagtatgaagaaaacaggaaatgtggagttgaatatttaagtgcatctctgaggcaacacctgtggctgagagaaggcaccagaagcagctttgagcagagagcagatccagcatcaggacagagaggaaaagaggcaaatccgatgtgatatttggccacatccaaacatcctgtgactctctaaaagcaccataaggtctttgtcacaaatatattcattaaattatgtgttttattttgttttttaatagcctttaagaagccaaagaattttgaaataaaagtatttcttctgattatgttcacaaattaacaaagaatccgtaagcagtgtgatccatttaagccataaagctgtgcttctgaagtattattagaaattctaaaattgtttcctaagattttggatacctttcaaagtgtttgaaatggatggtttagaaaacacagctggcttaataggctagcacaggggaaaatgaccttctacagataagaacacacccagatggaggtatttggctgtttcttaagagagttgctttagtgagcatggaaagaaatgttcgctaatagaaactcaa

SEQ ID NO: 244237 - DNA, 350 bp, Homo sapiens
agcctgtgcaactgtcatgatgctccggaagaatggtaatcagattatttcagatttgcatctccagggtttagcatcaggacagaggattaagtaaattctttccattaattctcacatctttagtttttcttccaagcaaacaactatacagagctatgtttcagaaaaatatagaggtaatattaaagtcaatgcagctgatgattcaatctaaaaaatacttcatggctgggaacggtggctcatgcctgtaatcccagtactttgggaggccgaggagggagggttgcttgaagctaggagttcgagactcgcctggtaaacatagcaccaccctcatctctaca

SEQ ID NO: 244238 - DNA, 429 bp, Homo sapiens
ctttctggacccaagggtatttatggaaggcagagaatgagcagtggccttttatataattcatcatgttatcaaagaaacaccacactgttagatgtgcccttgcaggtttggataaaattttatcccaacaaatgcatttttcccccctagaatgtgttcgctggggtttaaaggagagatagagataatcccattgagctatttatctctctgaaaacgttttccaggaagagtgttgaggttttagctgtagaactgctattgattttttttttttctggtgtgctttgttatagctggtgaacagtgacagtttgacagcactgcaaaataagaccccagtttatccaaggggagaaagtggagtacattcatacatgcagtaaaagattaccgactaataaaactcacaacaatgatttaaaa

SEQ ID NO: 244239 - DNA, 168 bp, Homo sapiens
acacacacacacatacatacacacacacactttttaaaaaataaagttcttcatccaaaggccaattcttaccaagtagtttgagaaccattgaagggagaggcttttattcttttacttctccctgcccatctcagatgtgatgagaccagaactcttttttttctt

SEQ ID NO: 244240 - DNA, 137 bp, Homo sapiens
ttctgttttccctctactagactggaaagccccatgacagcaatgatcaaatctattaagttatctccaatccctatcatattataggtatactacaaatatttcttaaataaatcaattattctttttatttttct

SEQ ID NO: 244241 - DNA, 680 bp, Homo sapiens
cagcaatcttgtttttattttcttccaaacatttaaaaccttgattattgacatactgaaattggcatgcattctcttttcatgcaggtaacagaatagacatggagcagatccctctgaaatcagttataaatattaaattgtattgaacattcatagtaaaaatacgttgtaaagtgctgaagtcatgtaagtctgcaaaactgccacaagctcaaagttcttctcaagcagtggcagagatttgctatatccaccttgttttagattatgcctgtttttgacagacactgtgtcatttcctcccccaccctccccaaagttttatagattgtcctatttctatggctggtaagatgctctacaaaatgtagcaggtggtgatgaactatgccactttcatttcagtgcagagaaatattcaagcttgtgtgtacctgtaaccaaactaggcttgttatgtttttcccccgagttgtcataaattaacattaatgatgagtaaagatggagcagcgagcattgaccgtcacctgcagggtgagattgcagtaaaataggtgagtaaaaagtccacctattatcctgacacttgtcctctttacagaaaactgtaacgtgagcaatactatacatgtagtgtgactccaaaaataaaaaataaaacaaacaacaacaac

SEQ ID NO: 244242 - DNA, 432 bp, Homo sapiens
cattcttttcattggtgtgagtcttgaatataaatggaaatcagaggtctgtaatagcaggccagtgtggataaggcagtaaggttttgagtctgaggagatggctgggggcagtttgtagacttattgtcagtccagtgtagaatttgagaatatagccagggcttaaggttccagtttcaaattaaagacaaaagaaatcagcaataccaaaatgaagacagaagcctgggaattgtgcctcaagatctggactgagaggacatttctacacaacagctcccctaagggcggggtatgaccgttgttgctaagctgtcaccatctctccttccctattagactggcttctgtggggtaattaaccagtacaaggatgtatgggaagctcttctgagaagacctcacattaaaacaaagtgttgttattca

SEQ ID NO: 244243 - DNA, 440 bp, Homo sapiens
gtctgaatctgtcagtctatagttctctactgttccatcaacaggaagcatctggtcattcttcgtgtaattgttagaaaataccaggtgtacttttaatgtttgctgttcaaacgaaaatagattggatcttggttaagttcacttggtttggccaggcacagtggctcacgcctgcagtcccagcacttggggaggtggaggcgggccgatcacctgaggtcaagagtttgagaccagcctggctaacgcggtgaaaccccatttctactaaaaatacaaaaaattagctgggcgtggtggtgcgcgcttgtaatcccagctactcgggaggctgaggcaggagaatcgcttgagccagagaggcaaaggttgcaataagccaagatagcgccattgcattccagcttgggcaacaggagcgaaactctgtctcaaaa

SEQ ID NO: 244244 - DNA, 220 bp, Homo sapiens
gagactccatctcgagaaaaaaaaaaaaaattacatacttagacgtgagagtcccacaaaatatgagatttaaagaagtgtcagaggattgaagcttatcatatagcatcctgacctgcagaaaagaagaggggcttggggcttttgggaggtggtggtgacataagttatgggagggtgcagggaggaggtgtatggtgaataaaagttgttatgcaga

SEQ ID NO: 244245 - DNA, 379 bp, Homo sapiens
gtgtggatttttgaatggatattctgaagacaactaggtggttttctaagctccatctgcttcccaggcctttggctgccattctaggcttggatgtacaggacaactgcagcactgggatgagcttcttcagcagctagaactgctttgagctgcttctctgaacagcctgtctggagatgtcccgggtggctgaatcactgcacctgctgagtgaccagctgtgtgtctttgaggctcgtggtaaggcagtggccagtgcaatgacactgcaagtgtggctttccaccctgccctgtcactcctcctttttcactctcactgccttgggactccacgtttcaaataaagcacccagtccagccccattttcaacaga

SEQ ID NO: 244246 - DNA, 575 bp, Homo sapiens
tggtcgagacggggtcttgatgtgttgaccagggtggtctcgaactcaagtgatcctcctgcctcagcctcccaaaagtgctaggattacaggcatgagccactccacccagccgtaaacctctttaaatggctaccaaacttaactaccatcttctctcaatgccactgtttcctttacaacattttccgtttttgatttaacatataatatgtgtttcctttagaaaaaatgcacagagaagctaaaagaaaagaaaattaattccactacttagagatcatcactgctaacaccttggtatatatccttttagattttgttttattgaaatatacacatgaatatatattaatctgcccaagaatatatatttataaaagtgggattaaacacatactatttacatatttatgaaaatggaatgaaatacatactccttcataagccctgccgtctttccacatcaacacatttatttaaagcatcattttcagtggctgcccaagtcatggtggaggatcagaggcaaatcctcttcttgatgaggatgaggagtgaggataggagaagga

SEQ ID NO: 244247 - DNA, 2169 bp, Homo sapiens
  misc_feature (687)..(687): n is a, c, g, or t
  misc_feature (804)..(804): n is a, c, g, or t
  misc_feature (1487)..(1487): n is a, c, g, or t
  misc_feature (1519)..(1519): n is a, c, g, or t
acgcagaataagccacgacaaccaagaggtgcagcagatgcctgcaccacagaaaaaagcaataaatcctctcttcacccaaaccgtcatggccattcgtcttctgacccagtgtatccttgtggaatttgtacaaacgaggtgaacgatgatcaggatgccatcttatgtgaggcctcttgtcagaaatggtttcatcggatctgtactggaatgactgaaacagcttatggcctcttaactgcagaagcatctgcagtatggggctgtgatacctgtatggctgacaaagatgtccagttaatgcgtactagagaaacttttggtccatctgcagtgggcagtgatgcttaatcaaaggcattaactaaagtgggtttattttcctgtgcattgcagaagttcattgacacaggattttaatgttttacattatttttttaaatgcatacacaaaaacattatttacttagtttttattaatcacttcatcactagagcaaattttttattgtctttgcttgctgtcttaaatgagaataatgtatatgggggtgctttagaaacataaataaatgttagttgttgttatttatcacaaacataaaagcctcttgaaacttcaaaataatatataacaaatgtaggcaagttttaacttttaaaagttagaatcattgaaaaacntgtatttcagtgctgaactttggttgtaccatattaaagatttagttcaaaaagtttatcaaggatccacttaacacgtcttcacaacataatatatgtaactgtaacatggggganagcatacatttttatggattaaaaaaataatagtatgacaccagattcctcctccactagggtctttggaatcaatgaatttcatatttcaagtgagttttcaggatatctgtttgtacagatacgagacagatcttagcatatagtaaattctcagtaagtattgttgattaacttgtggatggtaccacatgaaattgctaatattagatcagttgaaaattgactgcaattagtaaagttggtataacgtacgttcccagttgtgctatttagaattatgatagtattatgctcctacttttctttgatattgagttgtcttgttattgtttattgttttccagagaaatactatagtatccacagaagaattgtgaatacttttttataattttgaactgggacatattgcagatgaggaaggtagaaacatccatttggccttagagggctctgctagtaaaagaactactcagtggtggtttgaaaaatcttgttctggggatctgaatttcaaaaatgaaccctaggggagatcaaaatccattttaaacaaagatcaattaagagccaaagtgaaatctaacttgcaaacaacaatttgaagccttgcagcagacttaaggaattcccgctctgactggggaaaagtataaaaatggacctgagagtaccctctngagggatgatcaagaatggagacagttggagntgtgctcattaagattcaaaacagcagaaatccatttttggagcagattataacctgtggccaaaaaaaaaaaatgtgtgctgtttgacagctaatggcaatttatacaatcattggaggctggtaaagctccctaatatgttgccaccattatcattgcaaccaaaaaaattctgaagattgtgtggtgatctacgaaagagataaataattactgttatttaaacccaagtgaaacaatgacggcagcagcatattatcaagaaatttaaattatgcatgaaaatgtgatttaaaaacaatgtcctttgggtaacacacaagaacctacactttcacagacaaggactcgacctcacatgtcacaagctactaaagcaaagttaagtgacttgggctatgaaattttgtcatgtccattttagtcactggacctttattccatggactactgtctatcatttggagctttttctaagaaacaatgcattccccaatcgagatgaagtaactggaagatgttaacaatttatacagcctaacaaatgatgaattttataaaagttagacctttaatattctgttggaagaaaactattcatgctcctgatgcatattttgattgaataaaacttatttttttaaataca

SEQ ID NO: 244248 - DNA, 502 bp, Homo sapiens
aggagacatgaaaaagcaaggaaatgtgacgccttcagaagaaaccagtaattctccagcaacagatccccatccaaaagaaattcaggaaagctcaaacagagaattgagcagagaattgaccggactgattgtaaagaaggtcatcaacatggaagagtcttttgaacaacaacataaagaaatgaggaaaagaggtggggagatatatgagatgattacctgccagaaagaggttttaaaattcaacagaagagtatttctggaactgaagaaatcattggatgaaatacaaagtacactcaaaagcttcaatgatagactagaacaaatagaagaaaaactctcagggcataaaatctgaagcatttttctcactttaaagattcatgggttgtactctggccattaatgtgaacaaaacctgctgggttagttcttattctggggtcttgggtaatcgttagagcgaaataaaaataatttcccttaaaaaaaacga

SEQ ID NO: 244249 - DNA, 307 bp, Homo sapiens
agcttgcaaggaaggagtcgtgattgtctcttagaagggctgattcgcagtctgtattatcttcatgcttctagcaagtttactagcaagtgtgtattaaaggttaaagaaagtagctttccagctattagagcttgagatacaacgtggaaaggagtctagaaccccagggagataaactaggctcgacctacttttctctaaacacaaacacagtccttgctgtttgctaaactgagcaaatttcatcgacagctgtcttctaggtccgtaaaatattttcttctataaagcatatttttaatag

SEQ ID NO: 244250 - DNA, 454 bp, Homo sapiens
tctcaaaaaaaaaaaagagtctggaaaaggagtaggtccagatccaggagtactctgcagtgccataccaaagaatacatgtgagctttaaaagaaccctggctacaacatggagaaaagtttgggaaaggagagagcctagagaaaaaagaccaggccggacacggtggctcaggcctgtactcccaaagtcctgagattacaggcgtgagccaccgtgcccagccccagcctttttttctttcctttttttgtagagacagggtctcactatattgaccaggctggtctccaactcctgggctcaagaaattctgctgcctaggcctcctaaagtgctgggatcataggtgtgagccacaacaccaagtcaatatttttttatatagagtacttgctgaaatgataatattttggatactggggttaaataaaaatattttattacatttaa

SEQ ID NO: 244251 - DNA, 585 bp, Homo sapiens
ttacacaaatgtaaaattagagtaataatagtgactccataggaccctcaagataaggaaataaggtattttagtcagatgattcttatcacatgtctaaaaatttagtgtctctaaaattcttgatatatgcataccagtagacactcaacacatttatttcactactaagaaaaaagttttctttagttagagacaagggattttatgtgaaatgtgtggaaattctatgccagaacgatagtacatgtagaattctttgtaaagatagaaatcttgagagaccaaggagttaattgtcaaggatctcaagttcttctcctggttagttcacattcctcatcttcctttgtttctggagttactcattatctgtagatctcttttaaaagtggtttttacacattcactttaaagagtaagaatgttcagtaaatacaattgtattttaatgtttaataaatactaatgtttaataaatactgtttgatgtttcatgtttttaagcattgaagttttaataaaaagctttgcttttaataaataaaatttcatgttaattttaatgcttttccaagaaataaa

SEQ ID NO: 244252 - DNA, 385 bp, Homo sapiens
ctcccaaagtgctgggattacaggcatgagccaccgtgcccggcactcatcatgggattgtaagacttaaatcagtttgaagattttaatttttatagttttttttctgtttattttgccatgaaatcattcacataataacttcatgtttctttatttaattcttactctagggatcaacagtctttaaaatttcagtgatatttatccttttataatcatagctataggctgggcatggtggcatgcacttgtagtcccacctactcaggaggctgaggtgggaggattgcttgagctcaggagtctgagactcagcctgggcaacatagtgagacctggtcccccccagctcctaaaaaaagtcagccacatctccgtctca

SEQ ID NO: 244253 - DNA, 580 bp, Homo sapiens
tgagacagagtctcactctgtcgcccaggctggagtgcagtggcacaatctcaactcactgcaatgtccacctcctgggttcaagtgattctcctgcctcagcctcccgagtagatgggattacaggcacgtgccaccacatcggctgattttttatatttttggtagagaagaggtttcaccatgttggccaggctagtcttgaactcctgacctcaagtgatctgcccaccttggcctcccaaagtgctgggattacaggtgtgagccaccaggaccagcctctagtataagttcttagaggaatcttaaaatgaaaaaattagtttgacattcccaaaactgttttccaagaaccaaaaggctttatcttatataaacacacctagaaaactgtaatttaaaaccaggctttttatacataacaaaaaggtaatctcaataaaaataaataataaacctgaatacaggcatatctcattttaatgcatttcactttattacacttcaaagatagagatttttaacaaattgaaggtctgtggcaccctacatcaagcaagtctatcagcaccatttt

SEQ ID NO: 244254 - DNA, 582 bp, Homo sapiens
atttccacctaactcccctttgcccacgatttcagggaacctaggaggcttcctggccttgtgaccttttccttgaatctcttataattctttctacctgtgttgcatggcagattctcagattgaggctaaagaaaagaagggtggggacaaagcatacagaatgtgtgtatctgtttttatgtgggtgttggctgtttttcgtcactgctttttaagctgaatcttagctggttttcttgaactttgactttaggtgtaaaaattcaaccagacattctctccttactgtggtcagctgacatcataaccactaaggcttaatgagcttaacttgcactttcatcactagcaaaggtcttgaagttatttctcttactgattcataatgggtgtgtgtatgaatcactctcacataatttagatataaaaacctatgaggatgagggagggaggggaagaaaaaaaaggactcctttcattttcatccgtacttcccagatgggctgaatctccgattatttgacccatcattgttattaatatggttaataaactacctatttattgattgaattgttc

SEQ ID NO: 244255 - DNA, 820 bp, Homo sapiens
gagcccccaccacttgttggggacctgcctaccgttatttcatgggtacactgcaggttccttctctcctatgctgcatgattggtggtctgctgtacactgtgcagatgtttctcctgtgctatttcatgattatttttcaagtggcctcttagtcaagggatggcaggtcaacacatgggaacatctgctcttaccatttttctaagcaaacagcagatggcattgctgctgtccttttgatctgaagcaaaaattcccatgtctgaggtgttggtttacattgacactgcctggcaagcgactgcctgagagtcggcctcccgcaacagtagcactgcttacagatgttttctctgcaatgctcatttttagtttgtttcttcctgtgactctacttctgcagggtgtcttaaactttgattcttcctcctgtgactgttgctccatcacctcactgatgtcaactatggtcctcaggtttcctaccatttgtcacttgggatcaccattagagttgccaaagaggagacagtaacctgcctcacatcaggaagtagacactggctatgtgtgtgtgatggactacacaagattatcttggaaatagctgaaccaccaacctttttctaggtgattcctctgccagacaagaccatcttaaaattacattttaaccattggatttataaaactttaatgtatgtattctgtaagatttgtactcatcgaacaacttatctttacaaacagtgcaaatatgcaaatgaaatgtccacttcagtgttattttctagacggagtagtagcctgttagaag

SEQ ID NO: 244256 - DNA, 438 bp, Homo sapiens
agaatcaatgggaagggcattgtctgtcctgctccatgggtgccatgcttctccggagagcagtggagaagcattgaagcgctttgagcctggagatgacagtatcaggcagagcagtttcagtgatggagggtggagggaatggcagaagccgccatagacaaggaggctgctccgacttgggactagcaagagaagagcagggcctggatggagggatcagaagcatgggtggagaagaaagggcagagatattttaaaaatggaaggaacaagtcttaagccttgaaactctcccctcctaggatcgtgtgacctgcaccatcctgcaagctgctgcgttgcctaggtgaccagcagcagcaggggttggatgtgtgaaacttgggatggaggaaggactggaagggagccaggaggattgagcaagaaaggctc

SEQ ID NO: 244257 - DNA, 591 bp, Homo sapiens
ggtacaaagatttaggcctaactagcttagagaagtggtgtggagtagtgtaggagactgaatcattggtctcaattcctcactctcctgtagtagttttctacgtctttaccctgccataacctcatgtgagatgggtttttgtacctgcctcttcattttgggcatgggtatatgacttaccttggcccagtgggatgttagtggacaagacaaaagcagaggttagtagtatgcttgggctgatgggcttatcctctagtgcctctgtcatgactatgagaagaaaaaccctgaattgccacagcctcttcagcctgtttctcattgtgagaccatacagcagagccacctgagccgacctgaacttaaagcagtgccagcgcaactcagatgcctgagtgaaaataaaattcttattgttgtatgacactgagattttgtggtctgttgttcagcgttattgtggcaatagatgatgactaacacatttatcctgctggatccaggacaactccaggggctttcataagcaggttttcttggatagtctctctaggattttgccatttacaccactccctatgggtc

SEQ ID NO: 244258 - DNA, 706 bp, Homo sapiens
tttatctgagtttggttttaaaaaatccagatacaagtggacccatgcaattcaaacccatgttcttcaaggggcaactgtaaattgaaacttcaaactgatttaaaatggaagggaaaaatctcgttcccactcttatcacaaggcaagcactgttaattatttctggtgtattttttctatattaagatatataaaatagactccatttttacacagagcaaataatatatatcatcctataccttgctttgttcatttagtaatatagcagaaatatttccataatagcacatgtagatgttttaatcattggatgggccataaatttatttgttgcctaactgatgaactttaaatcatttctacttacactattattataaacaacatttccatcaatatccttatacacatgtcattggggacttgtatgactctctgtaggataaattcctttcaatgaaattgctggatcaaaatatatgtacatttaagattgggttaatgttcctaaattgtaaccgccaaaaaagttgttcctttatattcatcgacagtgtaagtttcactgtaactttgccaaaactaagttttattgaatttaaaaatttttgtcactcataggtaaaaatggtatcacactgttgtgacctgcatttttctaagcactaatgaagctaagtattttttcaagtgttttttc

SEQ ID NO: 244259 - DNA, 528 bp, Homo sapiens
gggagcctttgtgtatttctccatctcagcagttcctggggcgcttcccaagtctctctgtcaccgaatggcagagctgggaaggacctgctccagaataatgggagggagcggtgggacaagggagggaggaggcggccagcgttggaatgtggagaccagggtattggcacttcagagctgagcatcttaacattttctcttcttacccccagctggggactttgcatttgcaatgagggccccacttctctgagccctagtgaaagtggatcactttaagcccacaacaatggtggcttcttatcctcttagttaatgctttagataacttttcttttagaccaggtaggggcttgtaaagtgggactgtggctctggccttgcctggtaagacacatgaaattttctcatcttttctaactatcttccctcccctgttttctcttaatttgaaagaaatctctgcattggtaaatgtggacaaatcaagctgtgttagtgacatatctccagcagttgtcacgg

SEQ ID NO: 244260 - DNA, 342 bp, Homo sapiens
cttcaggtcctagacatttctttgttgagaggttttgattactaattcaatcttcttactcataattggttggctcaagttttctattttcttcatgattgggtcttggtagtttgcatgtttctaggagggcaagcataaatttgatgtctctaggaataaatctctttcttcttggtttaccaatatgttggtgtatatttgttcatcatagtccattgtgatcttttgtatttttgtggtatcacttgtaatgctctctctttaatttatatttatttttatttgagtcttcttttttcttagttactctagctaaaggtttgctaattttatttttcc

SEQ ID NO: 244261 - DNA, 427 bp, Homo sapiens
tttgtaatttccttgaacacagctttccctcctgaaagctattttttcctttcaccgtcttgcttttttgaggcacacatacctttgaaagtatagttcatatttcatttgattcatcaaaaccattatagttacataggtgtagttatgttaaatttcatgaatatttacatttagagacttccacttcagggaagatagatcagatgtactttttcctatttctcttactaagtacaacgaaaagccctggaaattatgtataaaatcatattagaagactctgaaaagtggagaagaagtggcagactaactagggatcttgagacttgaggaacgacataatggtgggttccctggagtttctttttgcctcacatatcccagattagatactgtaaaaacgaaccaatgagagtaggccaca

SEQ ID NO: 244262 - DNA, 233 bp, Homo sapiens
gggattataggtgtgagccactgtgcctggctattatttttcttttcaagacccataggaattgttattgttgctttaagccattgatgtttactagatttacccaaatgttacctctttctatatccttcattccttcttccttgtcagatcaccctgtgataccaattccttacaccttttaaatgtttctttaatgagaatcttccgtagtaaactcagtttgtccgaaa

SEQ ID NO: 244263 - DNA, 459 bp, Homo sapiens
caggaaacatgcatgagactaatacaaacattgataatgtaaatgtacttcctagggtagaatataaatttttccctaaagtttctttccagcagctttatgaattaattggtatttgattgattgattgacaactccagttattaactaaattgaatcagctgggaaacattgcctggattacttcctcagaattatttctgcacagggactatatgattgaatgtaatcaaatagactcaagaaagaattaaattctttaaagtcacttaggcttttaattttttccctccttttttgtttttgtctaataattgaatactcatttaaaaaatgtgttattgatatatctaaggaattaaatgtcattgaactaatgttacctgtaacgaggaagaaattgttattgaaagaagggaaataaaaagagaataagttctgcaagactacttttgtgcc

SEQ ID NO: 244264 - DNA, 581 bp, Homo sapiens
gagaggagaataacttacgtgttaaggtaggaaatgtagggaagacactgtttttttcctgccaacatgttttattcaaattaaatatagatgattttatcagtatgcccatatggtaaaaataactgtatcaagtccatcaaatgttctgctttagactctcccaatgcaaagatcaatatatatgaattggatgttagttttgttttgttttttagtgtaggctattgtttttaagattctaacagctcctttacactaagcccgaattcattttacctggtgatttgatttgaaatgtatgagctgtattatataactttcaaataagtaatacaaattcaaagaatatggaaagaagagtcatacaggcacactgacagtgaattgtaatctggcaggtgacaatgattaacaggttgtgcggattcaactagacctaaatccctgaaacaatattaaaagacagaatttttaaattaaaaacattgacaatataataggcctataatatttaaaaaaatgtttacccatcatcagtcgatattaagttaaactagaaaatttggaacacactatcc

SEQ ID NO: 244265 - DNA, 554 bp, Homo sapiens
ccagcactttgggaggccaagatgggcagatcacgaagtcaggagctcgagaccagcctggcgaatatggtgaaaccccatctctactaaaaatacaaaaattagccgggcgtggtggtgtgcgcctgtaatcccagctactcaggacgctgaggcagaaaaattgcttgaatcaggaaacatgaaaaataacgaactattaaatcattagcaaaggtctgaaaagaacaagaaagtggctcctgaaaagccacacttgaactttgttgaaagagcagaccctatactacaatgtacagattggcaggcagtaaagttaatatgtgactgctgtaaataatttgtagttcatggactactatggtatgttgctgctttctagcctctgacctgcttgctttccatggattaaatatactgcaaataaagcaataacagggatacatatcaccgatggtgctagatacaagagtgcattttatttgatcaatgaggcacaggctatttttatttggaacttttctgttatatggaactcatacttgatagaaata

SEQ ID NO: 244266 - DNA, 473 bp, Homo sapiens
ttgccccggttgccctttcctcaccataaacttcaaccgaatgtaacaatatggtaggagagggatctcattaagcctcatatcgtagattctacacactggattttgtgtataatagccattcctactggagagcagataatagtgtttaccactggatagttcccatgtcctgtgaatctatgcttagtgttattgaaaaactgcatttacaaagtgtttcagacttgccttccaagcatcatttcacttcattcataacattctatgagtcggcactagtattacctggatttagagttgagaagcagagcacctaaagggtaagtaattgtcccaaggtcgttggggaactaactggcaccgggattccaacctaggttccaaagcctgccctccatctcctcaggggtccgaattctagaagaggagatatttgtgtccactagatggtgctgattgtcctcttaaaa

SEQ ID NO: 244267 - DNA, 404 bp, Homo sapiens
ttcggacatttgcccctgaacttgaagtgcgccacaccccactcccactgccagttgccacccccgtcagctctctttctgcctgtcctctttacactgttacagtgacacccaactggcagggggagggggtgggaggtattttgcctcccaggggatctttgacaatgtcttttggttgtcactcctgaatggggagttgctactggcatctctggatagcggccaggggtgccgctaaacatcctactgtgtacagaacagtccaccacaacaaagaattaaccagcccaaaatgccattggtgtcaaggctgagaaaccctgagctacactaaacaatgtccctgggaagacctcagtgaaagtgactgataatgataggaaaaaagaaggaaatgagta

SEQ ID NO: 244268 - DNA, 242 bp, Homo sapiens
agtagaccccagtctctgttgtttccttccttgagttcataagtttttatcatttagctcccacttataagagagaacatgcagtatttggttttctgctcctgcattagtatgctaaggacagtagccctaaatgactctcaacatgacaacaacaacaaaacaaatagaaagataattttggagagcaattattatgtacacatatccccatcaaaataaagacgtaatgaaggcaaagt

SEQ ID NO: 244269 - DNA, 442 bp, Homo sapiens
ttttttttggacaataaaggcctacttatctctttcgactgaagagagatagactgaagggaggcaaaattcaagtgaacactttatttcatgtaatacataataatacactcgaggcatttacgtgtattataaaataaaaaaagtttataaaataaaacgaacacttcgtttcatgtatataatgcaccttaagtgtattatatgcatttacatgtattataaaatcacctaactgcaagctagagaatccttaatatgtaatagtgagaatactaatgtctttcctcgagcgtttacagtatctaaaccttaaaatttaatttcgtgaagtccgttgtaagaagctgtgataaaagtttgagataatagaataggaaaactctaattaggctacaaaacaatgacacgtataaagcatctccttgtgtgaaagaaatga

SEQ ID NO: 244270 - DNA, 251 bp, Homo sapiens
aagtcacatcacactatctcaaagcccccgtttcctcacagaatggttgttttagagttatgtttgtaaattacctggcacatgtaggcatgtgacagactgtaaccaatgttactcaaggtcattttgcactgattcatactttgagccatttcctactgtagactctagcacacattttcaaggcagcttcctgataataaggctgtaggatatttttgggaaataaatccaaattggccattaaaacc

SEQ ID NO: 244271 - DNA, 575 bp, Homo sapiens
cattttatcaaatgctccactgtgtacatcaaagatcatggtatcatctatctctgggatgccatgtgagctttgcagttctggaagggcttcgagtcaagttttgattaattcttgatggttttatttgattatagaagtagagcttgaacgtgtgtgtgcgttttccctttttcttgtaagaactgacaatcttgattaaatttcccttttaggagtgggaagcaagaagcaaagtaattgtcaccacttcttggagaagaatggcttatagtgttttgaacatatcgtctcaaaataacctcttcggaagattagtggaaagaagcaaaactgtgaagaccttggttcacagtagctgttgatgtttctttttttcattttggtattgattataatcgcttcttcataaagctcagatgcagggtttatttccagttctttcaccgtgcttcttacctcagagtcaaaccattgctatactctccacatagttggtttccagtgtttaaattgcatgcgtgaggtgctcaggtttgtgacattgctttacatatattactgtaaaaaaaaaa

SEQ ID NO: 244272 - DNA, 469 bp, Homo sapiens
tgatagctgaagagcatgcttttaaggaagtctgaacgcccagcaactataccacacaaggaaattacacaaagattctgcagagacaacatggattccagaaaacaaattaatgataggatcatagactgagatgaaagaaagtgtagcagaattaagagaataatgtaaagaaacaatatcaccggccaggcatggtggctcacgcctgtaatcccagcactttgggaggccgaggcgggcggaccatgaggtcgggagatcgagaccatcctggctaacacggtgaaaccccatctctactaaaaatacaaaaaattagccaggcatggtggcgggtgcctgtggtcccagctactcgggaggcggaggcaggagaatggcgtgaacctgggaggcggagcttgcagtgagccgagctcgcgccactgcactccagcctgggcgacagagtgagactccatctcag

SEQ ID NO: 244273 - DNA, 325 bp, Homo sapiens
tcttcacccctatatccagtcattcatccaagtttggattctatctgcagaatgctccttggagccaggtctttctctccatcctcactgacacagccttagccctagtctttgtctctcttgcttagaccattgcagtagcctgctagctggtatcctgtctccagtctctccctccctgctgctactagagtaattcaccatctcccagccattttatttgttttttttttaagaaattgtttacttaaaaaaattctaatacatgtatgtggttccaaatacaatggaagaaagaacatagaataaaaagtaaatctttcat

SEQ ID NO: 244274 - DNA, 444 bp, Homo sapiens
atgattagtgacttaactctacccagtgtggcactagcgctggatttccaagaccacctgcaggttcaatgattcctgagagactcaagggactctacgtatagttatacttaacagttctgatttagtacaacagaagcaaaatcagcaaagggaagaattacatgggacaaattccacaggaaaccaggtggtgatgtccaagaggcctctcccagtggaatcacacagaacacacttcattcttccactgccaaattgtgcaatacgtataaaatgtcaccaatcagggaagctcattagaggtacccagtactcaaggtttttaccatgacatgctggtcatgtaggcaccctctgcctagcacataccaaaactctggaatcacagagggaaagctggtgttctgcataaagtatcttttttgtgtttgtttttttgaa

SEQ ID NO: 244275 - DNA, 394 bp, Homo sapiens
gacatacacatacttgtacaataatagttggaaacttctataccccactcacaataatggatagaagaatcaggtaaaattaggaaagtagaggacttggacaacacagtatgtgaactagatctaacaaacatacaaaaaactgcgcaacaacagaatgcacattttcccaaatgcacatgggacatttcctggatatatgttaagccacaaattaagttacaataaaatttaaaagaagaaaccatgcaaagtatcttttctgataacaacatatgaagttagaaatcaataacagatggaaaactgaaaaaaaatcacaaatatgtggattttaaactacacacttgtaaataaacaatggatcaaagaagaaatcacaaaagacttagag

SEQ ID NO: 244276 - DNA, 268 bp, Homo sapiens
ttgccttaccaccgaagatctgtgtcatctggtccccaaagaagcacagagactactacacaaaaaggggtaaatggacaccagaagagatccacaatttttagtccttatttacttcaatagttggtgtagaaacttccttgatttcagcagtctgggaggccaaagagggaggattgtttgaggccaggagttcaagaccagcctgcacaacattgtgagaccctatctctactaataaacagatacataaataataattttaaaa

SEQ ID NO: 244277 - DNA, 746 bp, Homo sapiens
gacttccttctgtggtgaagcagtaggaactctaatgaaggaaaaagtgagtttttggaattggaataaataaaggctttcccacaggaattgcctcattggattggagggaggggtttctggaactgctctggagagagaagggggaacgcattctggccggaagggttggatagctctctcagtggggcaggttagggagatcagggcttaaaagattcaccctgatgaggttttgctctttcaatgaggaagctagctgtaaacatatcaggtaccaagagaagtcctgagatgttgaacatcagttttgggggcccgcatgcaagagagaggaaggaaagatatagataggagccactcattcgctgcgatgcaagatgaccttaaaccttggtggaaaaaaaaaaaagccctaagtgtcaccttgcaaatgtttagaaataaaccaaataacaagatttcctgaggccttacccgctatttgacttaccagctacttgaaagaagcaggttgattgattgccctgcttacaaaaaagaaaaaaaaaaaaaggaaaagaggaaaagaaagaaaaagaaaaatctctgtttgcgtgattccaaagagcagttcagcaagcttacagttaaaaacacttggtcctcaaatgcaggttttattattattcaagtatggtgaggccaacagatcaggaggtggctggcattgaaaagtttgttaattatagttccccaaaggaggg

SEQ ID NO: 244278 - DNA, 429 bp, Homo sapiens
aggggttgaattaattgagattctctaaacttaggggaaagttcttaactttgattttattcatagcttactttcataattagaatttttggcaccatgcttgaaagaaaaagtaaacactttttttttaaagttagtttcctaaagaagaaataaaatttcttagttgtcatcacactcttcatttgacttccctcccaaattgctattgttttctgcttctctcatgttttcttaaatactcatcagggtgacttttcttaagtttagacagacattccactaggtctcttacctcatttgtggcaaggtttatattgatgtgtgactgctcaggtaaacctttagtctgaatgatacagctatgacaaaatatagcctcagttgtagcaaaattaaatgttacacaatggctttaattggtggtac

SEQ ID NO: 244279 - DNA, 529 bp, Homo sapiens
atgacagtctgggaaggagctgggcctgagtgtgggtcaggaggctgggaagtgaccatgtggggtgaagggagttcttggaagaaccctgggttcctgaggctgcagctcaggacgtgggctcacctggcagaggtggcgtgtctggccccaggagctctcctgtgtccggcttcccctccacctgccccgccatgggtcatgcagagacaacagccttcctagtgctggcttttgattctctccatcccttctccccagcactgggtggcagtggtgcttggtctccagaggtctgggtgccgcccccacaggcttgcctgtaggggcacctcctctcccctgcccgcaggcccccgacagatgagagaggctccccacagggaggcttgtgtctgcctggtgctaccttggtcctgccctgtgcgttcacctcccagagtgacttctgggtgacactctgatagtgcagccataaaaccttataaaaggctttgctaaagtaaataagtcactccttgctattccc

SEQ ID NO: 244280 - DNA, 202 bp, Homo sapiens
aatgtcccctggagggcaaaattgtcccgttgagaccctctggcatggaaagatgagaaagagaataaagatgtaaaatatcctctgcaagaaaaactcttagctgagtgtggtggctcacgcctgtaatcccaccactgtgggaggctgaggtgggaggctcaggtgagtctcagtaacatagtgagaccttctctctaca

SEQ ID NO: 244281 - DNA, 279 bp, Homo sapiens
aacacttccccaaattgttttcaggaattctaaaattaggtgtttaattacaaaaatgaaaaagattttgaagagcaggaaaagcgtttgagaaagaaataaagcttcaaatcatagaatctaaaatttggaaatgatgttactctgtacctcctcatcattggagccatcactgtaaccctgtgtccctcagggcttgggcggggcttaagtgagtcctgtatgcaaagcagccagagccctacctcttagtatgtgctaaattaagtgttagtctca

SEQ ID NO: 244282 - DNA, 323 bp, Homo sapiens
taaacttttaaaaatactgcatttcctcccttcttcagattatccagataggacttaggttatttttatctcagacccaagggagaatgacctggataaagtactcctggacatctcccagtgattgaagttacatacatatatataggacatctgctcatagcccagcatgtaagattttggtattgaactttccagtctaagaatatccttcagatgagaacatgtagagagagagagaaaagaaaaagagagtatcttaagggcaggtagcagtgagatgcacagtaatgagtcagtatgtggtatcagaatttatctct

SEQ ID NO: 244283 - DNA, 307 bp, Homo sapiens
aatgggtgaaacaatttgctacccgaagccccaaaggctctgattaccggtcgccgctcccctgctggggcgcgaggtgcaaagactgtaccgaccgaggacccagaggctgtccccccggaggggaagtcctcagctgcacaggttggggggggggggggggggcgggcccaaccagtcacatgacgtcgagctccgccctgcctcctccatcccagcgctctacatctcggggggcctgaatttttacggatcccttgaatattaattttcttggattaaagaaataaaacataaattttcacaa

SEQ ID NO: 244284 - DNA, 805 bp, Homo sapiens
aagccccctgaagatcctgacgatctgggatgtgctggctacaccctgctccccgtcaaccaggagcgttactgaagttacagtaaaacaatgtcaggagactgacacaaaagcaaatcctttcaaagactgattttgaatcctgattgaagagatcaaaagagaatataagaagttagaactcatttctggggcaccacctcgatgaaaaagctgacaagttcctgctacccagagccctgcagttgccacagctcaatctcttctcaacctggtgcccagcttttcctgttgattctgcaactaggccagtcatcttttcaaaaattccttttctgcttgttgactatctctgctatttgcaaccagaagtatttagataaaatatttttaaaatgtatatgtcacctttttcctaattatgatgcaaacttatcgcagaaaactcgtaattctatacattagatacaactaatgttaacatcttagtgtttccttctactcttctattctaaatatatatacatatatacttctttaaaaatagttgagtaattagaagtagagtgactatatttatatcagacaaaagaagccttaagataaaaaaaattactagagacaaagagggacatttcataatgataaaaggttcacaattcaaacatgtaatttaaaaatttcatttgtaataccatcaaaagggatacaatactgaagaataaatttagggccaggcgcagtggctcacagctgtaatcccagcactctgggaggcctaggcaggtggatcacctgaggccag

SEQ ID NO: 244285 - DNA, 399 bp, Homo sapiens
aagccccctgaagatcctgacgatctgggatgtgctggctacaccctgctccccgtcaaccaggagcgttactgaagttacagtaaaacaatgtcaggagactgacacaaaagcaaatcctttcaaagactgattttgaatcctgattgaagagatcaaaagagaatataagaagttagaactcatttctggggcaccacctcgatgaaaaagctgacaagttcctgctacccagagccctgcagttgccacagctcaatctcttctcaacctggtgcccagcttttcctgttgattctgcaactaggccagtcatcttttcaaaaattccttttctgcttgttgactatctctgctatttgcaaccagaagtatttagataaaatatttttaaaatgt

SEQ ID NO: 244286 - DNA, 477 bp, Homo sapiens
ctggatgggtataacacacataggggtgacagttcccaaaggggatccatgttacccaggcaaagacctgctgtccagccattaatgcagacctgcctctccctccaaactgtgcaaaggaatgtactagttcttttcagctaccctagacaaaaactgctaaggctggtgatgctttattaaagaatcttgatttacacatactagaattatactactatacttaaatctaagttctagtggcctccagtaacagtgaaagagacctttaattaactaacacatttcccatttgccctgataatactctctggcagcacttgcagctatattttttactctgaggtcaactcagaggttacagtcttaatgttaccctgaaatgcttttcagagaattacatcaaaataggactgatgcagttgggacagcttggttgaacagaaagtcgaaaacagatatcaaatgatctgaaaa

SEQ ID NO: 244287 - DNA, 600 bp, Homo sapiens
ctactactactactaaattcgcggcccgtcgaccagctgattgtacccgggtacagcatcactccagcccacttagagcagaaacccagttttggaaacaacactgctcttgccccctgccccagctcactggagctggtgtctcccctcggcagccgttcactggggctttccccagtcctgccccctgggctctttcccttttgacactgcagtctggggttgtgtgtatctccgtctaagcatggtagggccagcaccctcaccagcgtggagacagccagggtccccgggtggcagatagccgcctcatgccctcatatgcgtctctcaggccgctaagcctgtactatgacttgatcaccgccactgtagtactttttaatttccttccttcagctcacacccaagaggggcctccagtcaatgtctgtagaagcactgaccattcctgcataattagaagctgaggcctagcacggtggcttatacctgtaatcccagcacattgggaggctgaggcaggaggatcgtttgaactcaggagctgaagaccagcctgggcaatgtagtgagaccccatttctacaaaaaataaaa

SEQ ID NO: 244288 - DNA, 312 bp, Homo sapiens
acttctaccaccataaccactcaatcatcaccgtgtgcccagagcagaggagcccacgatgctccctgcagtttcttccaggctctcgtactggtgatgggagaactggtgataagagtgggagtgagaacgggggaaggggccagtcccttccacagaactgggaagcccagaagtggtgtccatgtccctccatggactttctttctaccgtgttctcaccatttcatgcccagctcccttctcaccagccaggcgcccatggtggagaaaaacttaggatgtgtttaaagtcaaaaggcagttttgtgt

SEQ ID NO: 244289 - DNA, 673 bp, Homo sapiens
aaaattttatttaacaaaaaagaattaggaaccaaggtatccgagcagttttaaagtttgcaaaacatacttttaacataaagaaagcaacagctccctatttttcctaaacaaatatatctgatttcactttgttggtcctagctttcctaacaaacactgtctttgcatttctggtttttccacagaattggattttgaaaataaaactgttcttccctccttcttcctttcctctaatttctaccaaggtggctaacttccttatgtgcacaagagcctgcagttattagtgcgaacatattgtagccatgagcaacaatgctggggtagggtgaggcaaggcggggtgggggggcagcaaacattttcaaagcttatgtcaaaagtaggttctctgccaaaatgagtatggtcagtacattgattctaaatggcagcaacaaagaatacctagcacccctaaagaactatatgtggaaatactgcctgccagtttcttctaacacacggtcagttcagtgacagtcctactgaagcaatggattctagttttagtgggaaacttctctttatagatgcatttcagctcctgttgctgttttggcgactgcagtcctagaaacagaagagtcctctgtaatgtgattcagaagcaatgcgctgggttgtg

SEQ ID NO: 244290 - DNA, 375 bp, Homo sapiens
tgtttctctgggaaacctgatgaatgcagctgactttaaaacaggaagatatcctgaattatctgggtgagccctatgtaatcataagggtccttaaaagtgaaagagggtggtagaacagaaggtcatagtgatgtgacataaggatttgactagctgttgctggccttgaagatggaggaaggggtcacaagcaaaagaattcaggcagcctctagaaactggaaagaaaatagattctcccccagggcttccagaaagaaatacaaccatactgatccttttcagccctcccatcccttaagcacgggaaccacctcacgcaggccccacgtgccaatagtaatcaagcaatgtcactttgttaaaagataa

SEQ ID NO: 244291 - DNA, 412 bp, Homo sapiens
tgtttctctgggaaacctgatgaatgcagctgactttaaaacaggaagatatcctgaattatctgggtgagccctatgtaatcataagggtccttaaaagtgaaagagggtggtagaacagaaggtcatagtgatgtgacataaggatttgactagctgttgctggccttgaagatggaggaaggggtcacaagcaaaagaattcaggcagcctctagaaactggaaagaaaatagattctcccccagggcttccagaaagaaatacaaccatactgatccttttgcagttcatgagcatgatgattgggtattcgtgcacatgtgtgagatgtgccaccctcgaaccttgttatgacatcggcacattgctcatctaacaggaagaaaaataaataaataaaaagaaatac

SEQ ID NO: 244292 - DNA, 502 bp, Homo sapiens
actgcaaaaaaagatgtttgacagctggtgaggaatggaagacttagatgggaggttcagttactagacagcagagctgaacttagagctgaaaatgtaaatgaatggagtcaatcaacactgggctttagccaattgtttccatgtgtaaatctgggtctgaagattttcaatggaagtcagaaatatggatttttatgtaaaacatcaagtttttttttcttttccacagccacagacttataactcatgtaagctgtttctcaaatatctgcccagtggtgctggtgagagcccgatgaaaatgcacaaagagtgacacaacctggccaccactaagaagtaaagagctcagtgatttctcatctattctttcacagctacacaccaatgaaaacaaacacccgaaaccgtcttctgtggcatttgtcagttgaaaaagaacaccttagacttaacttttaaaatgtctgtaataaaaatataattccattttcttttc

SEQ ID NO: 244293 - DNA, 364 bp, Homo sapiens
cagtttcgctctatcactcaggctggagtgcagcgtcgtgatctcggcttactgcacctccacctccagggttcaagcaattctcctgcctcagcctcccaagtagctgggtttacaggcctaagtcaccatgcccgactcagttttgtatttttaatagagatggggtttcaccatgttggccaggctggtctcaaactcctgacctcaagtgatccgcccgccttagcctcccaaagtgctgggattacaggcgtgagccactctccccagctgatgttaatttttaaaaaatgcattctattaaaagggctaatttttactgcatgataattttttaaataaatatttaaaagacaaggat

SEQ ID NO: 244294 - DNA, 411 bp, Homo sapiens
gagcagtacaccttccacaatatgccagaaaaaaacacacttgtggttacactggcctctggagcctcaaaaagctgaagaagcccagagagatttgcttaaaagcactatttgaagtccttggtaaaaaatgcaacctaaggacaattgtatttctacattgaaaggcttttaaaactactttaaattggaaggtcagagcttcaaagagcataatgactggctgtttatctccattaccctctgcttctggtgcttctgtgaacatgttctgacctcaaactgtgagtggaaatgcaggaaggatgctgtctgtgcattagtgagagccttgaaacttgcctagagcacttctgaaactctgccaagatgaaataaatagcatatagcctcccttcaaatctcaacttg

SEQ ID NO: 244295 - DNA, 440 bp, Homo sapiens
cccgcacctcctgtagcaaagccgaatcgtagtcgcgctggctcagcatctcctcctttcctgctcaaagagatgccggctccggtcacccagtggcggcaggggcaggggtgcgcggcgggctgcgtgaccatgaagcctcatctgctaaggtggcgatcgcaccggcctagctcgtcctagggatttgctctgcggcgtcggtgtaataacgtaggtgaaagtcctcttccgtggcgtgatccgcaaatgacatcagcgtcccctgagcgagctacgtccagggggcccttggtacagttttagcataatttgaccttaaaatagctctcaacgattctgtaacccccatgagcccctgacccggcctcctttgttcactacagaaatcctcgacagaacaatgaatggatgtttctatccagagtaaaatatttgac

SEQ ID NO: 244296 - DNA, 459 bp, Homo sapiens
gaataatgccacagccactcagaaacgcgttggaaaggagagcaagtcctggagcctcccttccacagccactgggaaatgattctgataggtgacgtttttccagttcccactgtggtccaatccccacagagaagctgggaacatggggctggcatggccaggggagggtctcagggtagcctgcccattttactgatatgtttctgtaacagaatccttgtagtgggaagtcagccattcccagcacaggctgggcactgcactggcatagcagggtcacctgtggggtggtggcgtggactgaaatctctctacaaacatccagtgtgagctgcgctccaaacatttcatgtgatgatggcctgtgttcgttctctctctctctttccctcttttgagttatgtgtgtgtgtgtgtgtgtgtgtgtgtgtgtatgtatttgtgttggggtgggca

SEQ ID NO: 244297 - DNA, 422 bp, Homo sapiens
tgagtgagactctaaggtagccactaggcagtccccttcctagtgacttattatatcctgatctgggaaatgttgaacatagagagggcacaggtggtgaaactggtctcagagaagttgagaaaacatgggttcaagaacgcaggtgggaggctgggtgcagtggctcacgcctgcaatcccagcactttgggaggccgaggtgggcagatcacctgaggtcaggagttcgagaccagcctggctaacatggtgaaaccccatttctattaaaaatacaataaattagccaggcgtggtggcacatgcctgtaatcccagctactcaggaggctgaggcaggagaattgcttgaacccaggaagcagaggttgcagtgagccgagattgcgtcattgcactccagcttgggcaacaagagt

SEQ ID NO: 244298 - DNA, 435 bp, Homo sapiens
ggccaggcgcagtggcttaggtgaaggccacaccagacttgggcctacgtcttggccttccaggtcagcagagtggcctgggacttggatgccttggggtcacggagttaactgcagactcagactaagtggggccccagcagcggtcagccccagaaccaagttccggagccaacacccgaacaggaaggggccttgccccaggccggagaggcccctcgcccacggccgagggggtggggcggcctcgcctcgggccggtgcttttcgcccttccttggccgccagaggctccctctctctccctctcccgggattttgctgccgggctccctctctctgcggccctagagttaatcccatcagccgaggtgaggcacctgttaccccggccttcctcacccccgcggcctctcctccattacaccgcggccg

SEQ ID NO: 244299 - DNA, 599 bp, Homo sapiens
tcttatccagtaaatatttgtttaatgaatgaatgattatatatttaacactagaagacgtttacatcagactgcaaaatgaaagttaaaacacagaatgtacgatgagatccctttctgcccacacactcatacaaacgtctatacaggcttaaaaaaaggcctgaaaacactaaaacgtaacagtggttagattatggaaacgttttttctccttgtactttctgaattaaaaatattcagaatatgcatatattacttccataataaaggagaaaagttatattaaaaaccaaataatcatacaaaattaaaaagtatacaaatacttttaatgactcccaattatctagaatacatggctcagcatggatctctcagggtccccaatctttagattcaacaatcatgtcacggttctccagtcttttcctcttctacctttagctgccaaattaatcctcctaaaacaccgtgagtttcttgtaatcactactttcaataattccccattttctatgtaaaaaagtagaaattcccaagcctggcactcaaggccttccacaatgatggcattcaatcatcctttcactttatta

SEQ ID NO: 244300 - DNA, 235 bp, Homo sapiens
caaggccaggagattgagaccatcctggcgaacacagtgaaaccccgtctctactaaaaataaaaaaaaattagccgggtgtggtggtgggtgcctgtagtcccagctactcgggaggctgaggctggaggatggtgtgaacccgggaggcggagcttgcagtgagccgagattgcgccactgcactccagtctctcaaataaataaattaattaattaattaattaaattaaat

SEQ ID NO: 244301 - DNA, 230 bp, Homo sapiens
caggcagcacctggttggctacagcagccaagagactcaaggcatcatacacagcacagcttaatatgattgctttgacggaggctcaaaaagaagtagatcaaaagcaatagaatgggtcaaccagccagggccttagcctggtagatttgtgtattatcctctgtgctctcatcttgtgtatttagtataatgaaagcaaataaagttaactatttaataaaacaatt

SEQ ID NO: 244302 - DNA, 1270 bp, Homo sapiens
ttaggccctagttcctccacttctcagccaggtaccctgcactttttgcagtagcctccttgcctggagcctaaggctaatttgctgatctgccaaccactgtctattctttctcctggtgtatctataagattctattagataaagacattagtacattgatttacgctattaaaaattatttctagccaggcactgtggcatgtccctatagtcccagctacttgggaggcagaggtgggaggatcacttgaggatagcaagactccgtctctacaaaaataaaaaaattggccaggcatggtcccagctatgtagaggctgaggtggatcacttgagcccaggagttagaggctgtagtgcacaatgaatgcacctgtgaatagccactgcactccagcctgggcaacatagatcctctctcttttaaaaagaaaaattatcttatccctcccttttccttgaaatcagagtccattccacactaactcaatgattctttttttttttcctttaattttttgtagaggtgggggtcttgctgtcttgcctaggctggtcttgaactcctggcctcaagccatcctcctgcctcgacctcctcaagtgttgggattgcaggtgtgagccattgcacccagccctgattcttttttaaaaaagctttattgaaatgcaatttaccataaaatttacccacgtaaggtgtaagatttaatggtttttgtgtatttacagaattgtacaaccatcaccagaatcaattttagaacattttcaccaaccccaaaagaaaatctactgtttagatatcaccctccaatcctccccaacccctggctagcactaatctgctgtttctctatatatttgcccattttggatatttcacagaaatgggatcataataatatgtggtcttttgtgactggcatcttccagttagtataatgttttccggtttcatctatatagcagcacacagcagtacttcattctttttcttttttaaaattgaagtaaaattcatataaaattcaccattttaaagtgtataatttagtggccgttagtacattcacaacgttgtacaattatcatcattatcaattccagaatgttttcattaccccaaaaagaaaccctgtacccttaagcagtcattccttctcttctcccccttaactcctggtaccactaatttgttttctgtctctatagatttgcctgttctggacatttcatataaatgggctcatacagtagtgc

SEQ ID NO: 244303 - DNA, 490 bp, Homo sapiens
ctgctaccccagcatcatccacaccagaggagcctgccaagcaggacctcacagctctttcagggaaagcacactttgtaagcaagataacatctagtaaaccttctgctgttgccagtgaaaaatttaaagaacaagttgatcttgcaaaaaccatgaccaatttatcaccaaccattcttggcaatgcagttcagttgatctcttcagtccccaaagggaaactgccaatcccaccctactcaagaatgaagacaatggaggtttacaaaatcaaatcagatgctaacattgcaggtttttctttaccaggacctaaggccgactgtgataagataccctccaccacagaaggctttaatgcagccaccaaggtggcaagcaggctacctgttccacaagtgtcacagcagagtgcctgtgaaagtgccttttgtccacccaccaaacttgatcttaaccacaaaacaaaactgaacagtggagcagc

SEQ ID NO: 244304 - DNA, 556 bp, Homo sapiens
gctggagcactgctgcagaaagtgatctcttactcatacttcaagacacagcctaagtatgaccacctgtatggacccttccctaatgcccaggatcaagaaaagaatgtggccaccttccaaggctcagagtagctgtgcaatgacttgtgtcaaaacccgatccagagcagcagtgatgaaatcaccctctcctttaagacctggcattacaatggcctcatcctgcatgtgggcaagtcagctctctgatggatggtgcaatttccttggtcattaacctgaggtctggggcctttaaagctattgaggagccagtgaatggagaattcgacaacgcctggcatgattgagggtgacacatcacggcagatgatggctgaggagacattgcccagaagtctcatcttaggtggttgagtaggaagtttgtgaagcaggtggtgggtgagatggagtgggtagagattcaggtatggagatgtcagtgtctaactttcttctagtctttgcaatttcacaaggaaaatcactaaaatgtgcgtctcttcattta

SEQ ID NO: 244305 - DNA, 1598 bp, Homo sapiens
gcacccagcaccatgcccggctaatgttttgtatttttagtagagacggggtttcaccatgttggccaggctgatctcgaacacttgacctcaggtgatgacctgcctcggcctcccaaagtgctgggattacaggtgtgtgccaccatacctggcctgggctagtttaaataagcgtattggcccacttaattggcttacttgcccatctattatatttaaatgctccgttaattgatttgatagactacctttcatttttttagacttgacacttccctaacccattgggctccagatttagaaataactatataaccttttttttgtattctcgggatttgattgatttgtcaatttttaaattttactcttgtcaacttgcaaaaacattttaaaatgtattacagcaatacactgcagaaattttaagaaatgtatataaccccagaaggaaacttaagtcaacattatggtaatctcttttcagattttgctgtttataaatgggtctactattatactgtactgtggtatgataccaatctggaactgttaatatttgaacatatttccatattaatatacaaatctacattaacataagtggctgcaataggattctatcatgtgactcatgatactggcctctctgacccccagggttccacccaagaatgtagtacattgaaaggtaaaaataagtttccttggccagttgttgaacttaataaatctgtgtttaccccttagtgggcccatgcctaaggtttatactttgaggtgttcttgataccaatagcatacagagtaagtcttaacgttgttgataggttcttggaaactgggacttctagcagaatgacctcaaataatgtcatgcaggtcctcaaataatgtcatgtcactgtaacacagctgaggggaaaaaaattggtcttgttatgtgcatttcatttaaagcaatttccaagaacctatcaacaatggactgtaagtgagaacttgaaattaatgccctaactatatagcaagtgaaggcatttgtgctgtgcctactcttactctgtattcaggaaaacctagctgagtttaattgcttccctagcataacaagttattttgcctcaatacacgattaaagacagattgtttaattttgtcagtgtatgatactgatagcgctttaagtccttatttaagaggtacgtactgaagtatttgtgggttaatggatatagttggagtttgcttgaaagtgtatgtggggggcatgcgtaggggtgtaatacatgaaatattagtcatgagttagtaactgctgaagccaaattggatggatatgtaggaattcattgtactgttggctctgtttatacaggattaatattttccatacgtaaaggtgaaacatgattgctctgttaggtaaccagagtgatcttgggaaataatcaggagataactgctttggtgtaatactctacaaacacaggttttcttacatgagttatgttctaagagacgttgcccaaacccttactgaactaaaatatgtgggtcagaggtgaggggcacgaagtctcagtttaaaaaaa

SEQ ID NO: 244306 - DNA, 1470 bp, Homo sapiens
ctcaaactcttgacctcaaatgatctgcctgccttggcctcctaaaatgctgggattacaggtgtgtgccaccatacctggcctgggctagtttaaataagcgtattggcccacttaattggcttacttgcccatctattatatttaaatgctccgttaattgatttgatagactacctttcatttttttagacttgacacttccctaacccattgggctccagatttagaaataactatataaccttttttttgtattctcgggatttgattgatttgtcaatttttaaattttactcttgtcaacttgcaaaaacattttaaaggaaacttaagtcaacattatggtaatctcttttcagattttgctgtttataaatgggtctactattatactgtactgtggtatgataccaatctggaactgttaatatttgaacatatttccatattaatatacaaatctacattaacataagtggctgcaataggattctatcatgtgactcatgatactggcctctctgacccccagggttccacccaagaatgtagtacattgaaaggtaaaaataagtttccttggccagttgttgaacttaataaatctgtgtttaccccttagtgggcccatgcctaaggtttatactttgaggtgttcttgataccaatagcatacagagtaagtcttaacgttgttgataggttcttggaaactgggacttctagcagaatgacctcaaataatgtcatgcaggtcctcaaataatgtcatgtcactgtaacacagctgaggggaaaaaaattggtcttgttatgtgcatttcatttaaagcaatttccaagaacctatcaacaatggactgtaagtgagaacttgaaattaatgccctaactatatagcaagtgaaggcatttgtgctgtgcctactcttactctgtattcaggaaaacctagctgagtttaattgcttccctagcataacaagttattttgcctcaatacacgattaaagacagattgtttaattttgtcagtgtatgatactgatagcgctttaagtccttatttaagaggtacgtactgaagtatttgtgggttaatggatatagttggagtttgcttgaaagtgtatgtggggggcatgcgtaggggtgtaatacatgaaatattagtcatgagttagtaactgctgaagccaaattggatggatatgtaggaattcattgtactgttggctctgtttatacaggattaatattttccatacgtaaaggtgaaacatgattgctctgttaggtaaccagagtgatcttgggaaataatcaggagataactgctttggtgtaatactctacaaacacaggttttcttacatgagttatgttctaagagacgttgcccaaacccttactgaactaaaatatgtgggtcagaggtgaggggcacgaagtctcagtttaaaaaaa

SEQ ID NO: 244307 - DNA, 335 bp, Homo sapiens
taacatgatctagcctaggttgtcagattcttcatcaatctcagaaaagataataaaaaagaagacatcaagttcatgtttggctatagggagagcaagtaactttcagggaaaaaaaaaattataccagtacatcagggcagggctcaagaccttacagtggaagagttatgctctccataaacaatatgaccttccaggagagaagaaagaatagcgatgacgactgaagacatcaattcttcaaatagatacttcgtgtctgtagaacgcaggtctcctatttcctagtttgtgtttcttccaataaactccttgaaagctcactatttccc

SEQ ID NO: 244308 - DNA, 637 bp, Homo sapiens
tggactctcatgggttttgccaaaagtacaggttcaaattccattgctttgaaatgcaacatgtttgtgactcagtattgctcttttctgatttttctttccctcacttctcatctccatgctttgttcaaagccaaaacctgagtgctaagtgaggaagctcaactattttctcgcaatggaggggagggggttacattctgctcccctattcgagtcaggtctggaaattccacatgaaagctaaacaggtcctttcggacccatgaaacatgccccttctgtgtgttcctgggctgagcactcacagggacaggacggaaggatgccctgggcctggggtttaacaggtggctaagagcccgaggggataccagctttaactcttccctccctattctgcagaaaggacacttacaagccaaggttcattactcatctacttaaatatgtcaccactgtccttactggaaacattgtctttcttaatcagttattatgtattagcaaaaaactgtggacaggcattatgaggaagagtctggcttatgtcacctatttccatagagtccacatgagtggtgtagacccctgattctcccattttatcctgtaccagaattccctgaggagtctg

SEQ ID NO: 244309 - DNA, 517 bp, Homo sapiens
gatgagtgaataaacttgtccttaagccgtaaatctgctgagtggatgtattccgtaaactaaaccatagatagcatcagatgctgtttgaatctgaaattatgtgtgtcatctcaacatgcaactagatagtagattcactgccatatccctgctctttctttccctttacagttttatactgggtctatttcagagacctaatggtggtaaataaatagtaaactctcagtgttacagctcatggttttccttccctgtagaacttgtaaacaaaaggaaaatggcaaggatctattgaagggcgaagttactgttaagatctactgtgctgtgtcaaatgtgtagcactccacagtgattaaacaggatgacaattatttttagctcagatttgttcacagcactccatagaagcaaaagttgcttttctccattgtcttccaaaacgcttagcacaaaagtcgcattctagtggagaaacaaactgtaattttcttacttgaagtagaaaaaa

SEQ ID NO: 244310 - DNA, 400 bp, Homo sapiens
ccccccacaaaaaaagaaaagagtgttagtgataagatgcatgtttttgtttatcttatgtatgtgaatgttatatttatatggctgtttgcccatagaaaataagtgtcggctgggcatggtggcttatgcctgtaatcccagccctttgggaggccgaggcgggcagatcacttgaggttaggagtttgagaccagcctggccaacatggtgaaaccctgtctctgctaaaaatacaaaaattatctgggtatggtggcgtgtgcctgtaatcccagctactcaggagactgaggcaggagaatcgcttgaactggggaggtggaggttgcagtgagccgatattgtaccactgcactccagtctgggtgacagagtaagactctgtctcaaaaaaaa

SEQ ID NO: 244311 - DNA, 310 bp, Homo sapiens
aacaggctctgaagaaaaatgacatttcagggaattaagagcacgtgttcctccctctaccttctctttcttcccccagtgaccttggaggctacttgttgataagttggttgaatctgaagagcccttggatacggaaggctgactgtgtatggctactctgaagaatgcaagaaacagtgtgtgatacgcttagggcttagcacattttgccatctatggagcatgtggtatgagtcagaaatggtgtttttgcccaattcagagactagtgcagaagacagacaaagaaaaagacaactcaggtcta

SEQ ID NO: 244312 - DNA, 4366 bp, Homo sapiens
cggctcccccaacgtcgtttttctgaaaataaaatactctgagccgaacgtttcgaagaaggaaagtccgcccttaagagagagacagagtcttgtgtttaaaatgaagaagtttaatttccgaaaagttttggatggcttaactgcctcctcccctggcagtggtagcagcagtggcagtaacagtggtggtggggctggaagtggttccgtacatccggcggggactgcaggggttctcagagaggaaattcaggaaactttgacttcggagtatttccagatttgcaagacagttcggcatggttttcctcatcagcccacagcattagcctttgatccagttcagaaaatcttggctattgggacgagaacaggtgctatacgaatactcgggagacctggtgttgattgctattgccaacatgaaagtggtgcagctgtcctacagctccaatttttgatcaatgagggtgccttggtcagtgcaagttcagatgatacacttcatttgtggaaccttagacaaaaaaggccagccatactccattctcttaaatttaaccgggaacgaattacttactgtcatctacctttccagagtaaatggctttatgttggaacagaaagaggaaatacacatattgtaaatattgaatctttcattctttctggatatgttatcatgtggaacaaggcaattgaactatccactaagactcatccaggtccagttgtacatttaagcgatagcccaagagatgaaggcaaactgctaataggttatgaaaatggtactgtagtattctgggacttgaaatctaaaagagcagaactgagagtttattatgatgaggctattcattcaattgattggcatcatgagggcaaacagttcatgtgcagccattcagatggtagtttgactttatggaacctgaaaagcccaagtcgccctttccagaccacaattccacatggaaaaagtcaaagagaaggaagaaaatctgaatcttgtaaaccaattcttaaagtagaatacaagacctgcaaaaacagcgaaccattcataatattctctggtgggctgtcctatgacaaagcttgtagaagaccaagtttaaccatcatgcatggaaaagcaattacagtacttgaaatggatcatcctattgttgaatttctaactttatgtgaaacgccctatccaaatgaatttcaagaaccctatgctgtcgtggtacttctggagaaagatctcattgtagttgatctgacacaaagcaattttccaatctttgaaaatccatatcccatggacattcatgaatcaccagttacatgcacagcatactttgcagattgtcctccggatttgattctagtactgtattctataggagtcaagcataaaaaacaaggatacagtaataaggagtggccaatcagtggaggagcttggaaccttggagcacaaacatatccagaaattattattactggtcatgcagatggatcaataaaattttgggatgcttctgcaataactctgcagatgctgtacaagctaaaaacttcaaaagtgtttgaaaaacagaaggtaggagaaggaaaacaaacatgtgaaattgtagaggaagacccatttgccattcagatgatttactggtgtccagagagcagaatattctgtgtatcaggagtctctgcatatgtcataatttataaattcagcagacatgaaattacaacagaaatagtgtcattagaggtacgacttcagtatgatgttgaagatattattacccctgaaccagaaacaagtcctccgtttccagatctctcagcccagcttccttcttcaaggagtctttctgggagcactaacactgttgctagtgaaggagtaacaaaggacagtattccatgcctcaatgtgaagacacggccagtgcgaatgcctccaggatatcaagcagaacttgttattcaattggtgtgggtagatggtgaacctccacaacagattactagtcttgctgtaagctcagcatatggaatagttgcatttgggaactgcaatgggttggctgtggtggattttatacagaagacagtactgttaagcatggggaccattgacctatatagatcaagtgacttataccagcgacaaccacggtctcctcgaaaaaacaaacagttcattgcagacaacttttgcatgcgtggcctgtctaacttttatcctgatttaacgaaacggatccgtacttcctatcagagtttaactgaactgaatgacagtccagttcccctagaacttgagcgctgcaagtctcctacctcagaccatgtaaatggacactgcacaagtccaacttctcagagttgcagttctggaaaacgtctttctagtgccgatgtttcaaaagtaaatcgctggggtcctggaagaccaccatttcgaaaggcccagtcagcagcctgcatggagatttctttaccagttacaacagaagaaaaccgagaaaattcctataatcgttctagaagctctagtatctccagtattgacaaagattctaaagaagcaattacagcactatacttcatggactcctttgcacggaaaaatgactctaccatctctccttgtctgttcgttggaaccagtctgggaatggtgttaatcatctccttaaacctaccattagcagatgaacaaaggtttacagagccagtcatggtattgccaagtggtacattcctctcattgaaaggagctgtgctaacattctcctgtatggaccgaatgggtggattaatgcaaccgccatatgaagtttggagggatccaaacaacatagatgaaaatgaaaaatcttggagaaggaaagtggtaatgaactcatcttctgcatcccaagaaataggagatcatcagtatacaataatctgctcagaaaaacaagccaaagtcttctcactgccttctcagacttgcctttatgttcataacatcacggagacatcttttatactgcaagcaaatgtggtggtcatgtgtagcagtgcctgcttggcatgcttttgtgctaacggacatatcatgataatgagcctacctagtcttcgcccaatgttggatgttaattatttgccactgacagacatgaggatagcacgaacattttgttttaccaatgaaggacaggcattatacctcgtctctcctactgaaattcagcggttaacatacagccaagaaatgtgtgataatctacaggacatgctaggagatttgtttactcccatagagacaccagaagctcaaaacagaggctttctcaagggactgtttggtggaagcggacaaacatttgacagagaagagctctttggggaagcttcggcaggaaaagcatcccgcagccttgcgcaacacattcctggaccaggtagtatagaagggatgaaaggcgctgctggaggggtgatgggagagctgacccgtgcacggattgcacttgatgaaagaggacagaggctaggagagctggaagagaaaactgcaggcatgatgaccagtgcagaagcattttccaaacatgcacatgagttaatgctgaaatacaaggataagaaatggtaccaattctgacttctaaagaagctgtgactgctttgagaaaccatattcagggaaaccaaatttattcccagcatcactactcaactgctagaagccagtttcttctacaaaatgttccatttacagtcaatctgaaattttcataaaagagatgtatcagagacactgtgcaacccaaaggctggagccctggttaaaatcccaaaatacggctgaatttgccttttcccatgtggaatggagctatcatcttggcatgtcattcgataaggatttatatttagtaactacggggagtcctcttgatttgaaaattcctgtacaaacaaaagcattaatgcacttaatgaaaaaaaatctttgcatgataaattaacatcttaaggggaaaagaaaaaaaagcatgttgtgatagaagaaaaaaagattcatggtaaactatttctatcaattgggccacactcaacaatttaaaaaatctgcatttgaagatgtcagtgcatttcaaatatatttgccatacccaactgaaacggaaaacaaaacaaaacaagaacccagagttttctcctcatctgtaactttcattgtactagaaccttattgaattcttatggcaagagtctgattaatgttctctctccatgttttacatcattcacagttgtgtcaaaatcaaatattgccagtatagtaaattattcccaacac

SEQ ID NO: 244313 - DNA, 427 bp, Homo sapiens
gacatgctaggagatttgtttactcccatagagacaccagaagctcaaaacagaggctttctcaagggactgtttggtggaagcggacaaacatttgacagagaagagctctgtgagtaaattcctgattatagaaatgtattgcaaaatagaagacgtttctgtgtatgtgtatttgtgtgtgtaacttaatgtaatatgtgatctcaaattctagactacgtattttttgcatctatcttaaagtttgaatatttgtttccttctgtaccataaaaatcatttccatttaccaacatggaaagtggtcacttcatattaggaaattgtttaacaaaagtgatacatataattcatacaaataatgagcaagctaataaatatctcatttgcaagtagatcatacctgcatggcaatgtgaaggta

SEQ ID NO: 244314 - DNA, 4386 bp, Homo sapiens
acctcggagagcgccaggcgccgcgaccagagggcccagagaagcggccggagcccgcctacctcggccccctcagcttcccgggctggcaggcggctagaggcgtctgaggaagtgtttaaaatgaagaagtttaatttccgaaaagttttggatggcttaactgcctcctcccctggcagtggtagcagcagtggcagtaacagtggtggtggggctggaagtggttccgtacatccggcggggactgcaggggttctcagagaggaaattcaggaaactttgacttcggagtatttccagatttgcaagacagttcggcatggttttcctcatcagcccacagcattagcctttgatccagttcagaaaatcttggctattgggacgagaacaggtgctatacgaatactcgggagacctggtgttgattgctattgccaacatgaaagtggtgcagctgtcctacagctccaatttttgatcaatgagggtgccttggtcagtgcaagttcagatgatacacttcatttgtggaaccttagacaaaaaaggccagccatactccattctcttaaatttaaccgggaacgaattacttactgtcatctacctttccagagtaaatggctttatgttggaacagaaagaggaaatacacatattgtaaatattgaatctttcattctttctggatatgttatcatgtggaacaaggcaattgaactatccactaagactcatccaggtccagttgtacatttaagcgatagcccaagagatgaaggcaaactgctaataggttatgaaaatggtactgtagtattctgggacttgaaatctaaaagagcagaactgagagtttattatgatgaggctattcattcaattgattggcatcatgagggcaaacagttcatgtgcagccattcagatggtagtttgactttatggaacctgaaaagcccaagtcgccctttccagaccacaattccacatggaaaaagtcaaagagaaggaagaaaatctgaatcttgtaaaccaattcttaaagtagaatacaagacctgcaaaaacagcgaaccattcataatattctctggtgggctgtcctatgacaaagcttgtagaagaccaagtttaaccatcatgcatggaaaagcaattacagtacttgaaatggatcatcctattgttgaatttctaactttatgtgaaacgccctatccaaatgaatttcaagaaccctatgctgtcgtggtacttctggagaaagatctcattgtagttgatctgacacaaagcaattttccaatctttgaaaatccatatcccatggacattcatgaatcaccagttacatgcacagcatactttgcagattgtcctccggatttgattctagtactgtattctataggagtcaagcataaaaaacaaggatacagtaataaggagtggccaatcagtggaggagcttggaaccttggagcacaaacatatccagaaattattattactggtcatgcagatggatcaataaaattttgggatgcttctgcaataactctgcagatgctgtacaagctaaaaacttcaaaagtgtttgaaaaacagaaggtaggagaaggaaaacaaacatgtgaaattgtagaggaagacccatttgccattcagatgatttactggtgtccagagagcagaatattctgtgtatcaggagtctctgcatatgtcataatttataaattcagcagacatgaaattacaacagaaatagtgtcattagaggtacgacttcagtatgatgttgaagatattattacccctgaaccagaaacaagtcctccgtttccagatctctcagcccagcttccttcttcaaggagtctttctgggagcactaacactgttgctagtgaaggagtaacaaaggacagtattccatgcctcaatgtgaagacacggccagtgcgaatgcctccaggatatcaagcagaacttgttattcaattggtgtgggtagatggtgaacctccacaacagattactagtcttgctgtaagctcagcatatggaatagttgcatttgggaactgcaatgggttggctgtggtggattttatacagaagacagtactgttaagcatggggaccattgacctatatagatcaagtgacttataccagcgacaaccacggtctcctcgaaaaaacaaacagttcattgcagacaacttttgcatgcgtggcctgtctaacttttatcctgatttaacgaaacggatccgtacttcctatcagagtttaactgaactgaatgacagtccagttcccctagaacttgagcgctgcaagtctcctacctcagaccatgtaaatggacactgcacaagtccaacttctcagagttgcagttctggaaaacgtctttctagtgccgatgtttcaaaagtaaatcgctggggtcctggaagaccaccatttcgaaaggcccagtcagcagcctgcatggagatttctttaccagttacaacagaagaaaaccgagaaaattcctataatcgttctagaagctctagtatctccagtattgacaaagattctaaagaagcaattacagcactatacttcatggactcctttgcacggaaaaatgactctaccatctctccttgtctgttcgttggaaccagtctgggaatggtgttaatcatctccttaaacctaccattagcagatgaacaaaggtttacagagccagtcatggtattgccaagtggtacattcctctcattgaaaggagctgtgctaacattctcctgtatggaccgaatgggtggattaatgcaaccgccatatgaagtttggagggatccaaacaacatagatgaaaatgaaaaatcttggagaaggaaagtggtaatgaactcatcttctgcatcccaagaaataggagatcatcagtatacaataatctgctcagaaaaacaagccaaagtcttctcactgccttctcagacttgcctttatgttcataacatcacggagacatcttttatactgcaagcaaatgtggtggtcatgtgtagcagtgcctgcttggcatgcttttgtgctaacggacatatcatgataatgagcctacctagtcttcgcccaatgttggatgttaattatttgccactgacagacatgaggatagcacgaacattttgttttaccaatgaaggacaggcattatacctcgtctctcctactgaaattcagcggttaacatacagccaagaaatgtgtgataatctacaggacatgctaggagatttgtttactcccatagagacaccagaagctcaaaacagaggctttctcaagggactgtttggtggaagcggacaaacatttgacagagaagagctctttggggaagcttcggcaggaaaagcatcccgcagccttgcgcaacacattcctggaccaggtagtatagaagggatgaaaggcgctgctggaggggtgatgggagagctgacccgtgcacggattgcacttgatgaaagaggacagaggctaggagagctggaagagaaaactgcaggcatgatgaccagtgcagaagcattttccaaacatgcacatgagttaatgctgaaatacaaggataagaaatggtaccaattctgacttctaaagaagctgtgactgctttgagaaaccatattcagggaaaccaaatttattcccagcatcactactcaactgctagaagccagtttcttctacaaaatgttccatttacagtcaatctgaaattttcataaaagagatgtatcagagacactgtgcaacccaaaggctggagccctggttaaaatcccaaaatacggctgaatttgccttttcccatgtggaatggagctatcatcttggcatgtcattcgataaggatttatatttagtaactacggggagtcctcttgatttgaaaattcctgtacaaacaaaagcattaatgcacttaatgaaaaaaaatctttgcatgataaattaacatcttaaggggaaaagaaaaaaaagcatgttgtgatagaagaaaaaaagattcatggtaaactatttctatcaattgggccacactcaacaatttaaaaaatctgcatttgaagatgtcagtgcatttcaaatatatttgccatacccaactgaaacggaaaacaaaacaaaacaagaacccagagttttctcctcatctgtaactttcattgtactagaaccttattgaattcttatggcaagagtctgattaatgttctctctccatgttttacatcattcacagttgtgtcaaaatcaaatattgccagtatagtaaattattcccaacac

SEQ ID NO: 244315 - DNA, 382 bp, Homo sapiens
aaagggagattgacaatgggggcccattgtcaaattgaggatcacggattactttcatcactgctcttttctttaatctcgaactgtttctgttttttatgaccttgacatttttaaagggtataggcctgtttcatagaatgtctcaatctccagatattttagatgacctgctttcaatatttagacaacaaaatttaaaatgtctaatgtatgttaaaaattgggttttacacacttatttgtgagagaaaaggtatgcttccctgggtgaaattaattggtgatagttcgtcctttcagtgaattagtttctggagaatatttttttctttttctctttttttttttttggtgggggggttgttgttgttgttgtttt

SEQ ID NO: 244316 - DNA, 344 bp, Homo sapiens
gcaagcagccagggtccaaaacaaagaacagtctgattctacaaacaagcctttggactaacagtatttggaaaagagactattacttcctcatagttgtaggaaaagagtgaaaaatagaaataattacaaacacacacacacacaacacacacacacattaagaatttattttctttctttcttttcctttttttttttttttgagacggagttttgctcttgttgcccaggctggaatgcaatggcacgctctcggctcactgcaaacctccgcctcccatgttcaagcaattctacctcaacctcctgagtagctgcgattacaggcgcctgccgccatg

SEQ ID NO: 244317 - DNA, 238 bp, Homo sapiens
gcaccccccatctcccataccctgtctcacactgtccacttttgtcttcatagtatggatgactgctatctgaaatgaggtattttgcctacttgaaattatgtttcaacttgttagctgtcttctcccaccataatgtaagcctcacaggagtaaggactgtatctgtcttgttactatttgtcctcccagtgttcgacacatagtaggtgctcaataaatatctactagtgagtgt

SEQ ID NO: 244318 - DNA, 368 bp, Homo sapiens
gtaagtgcacactgtggttccggatccgccaggtttcccaagtgtcttccgtcccttgcacagatctgaggaccgattgtgcccaaggaaaggagggacccactttgccctcggagctccttccagtctcaaggagagagaggggcagactcacacacgatgcacattccagctgagctgctggagggagtcaaaagaaactcgaaggctggagcatgtggagatgctggctatgctgatttaatgactgtcactcttgagagcacagtgactggaaacccttggcgcagttagagagacagagtccacactgacaggagagcagcagaatggacgcccgtttgctctgacagcactcagtgcggccg

SEQ ID NO: 244319 - DNA, 364 bp, Homo sapiens
gaggagatggaaagggagaagggcactgcctccctcttcccccaggaaaggcaacatcgtggggaaaatcgatcttagaacctgggttccattttgggggaggaggtgtcccttcagctcagaatccactgaaccaggtgctgggctaagcccttggcacaaatcatctcattttaccctcccaagagtcctgtgaaatttgtagtattcgaggctgagtatggtggttcatacttgtagtcccagctactcatgaggctgagtcgggaggatcacttgggcccaggagttcaaggctgcagtgagctgtgaattcaccactgcgctccagcctgggcaatagagcaagaccctgtctcaaaaa

SEQ ID NO: 244320 - DNA, 484 bp, Homo sapiens
gcgtgacttcagtcagttcctctcctctccaggcctcagctgccctgtctgtgagtgtgactgcatctcttccttcgtggggctgcagtgaggagtgatcggttagggcccatcaacccacacacagctggcacttgctggtcatgttctacctgcatcagccaccttgaagctgcagttgcgtggactcaggggctcctctccgggactcacctgatgcccatcccagcaccaccctcgcgcttcacacacctgaccagcctagcattgccctcacactattatttaccctggcacccaggacctggtgtgttggctggcacagagctggccctgcctcttgcctgcttcttgtctgccccaagaaccccagcttatatccaccctgcctgtcaccggccggcacccctccctccgcacctgagcctgcctgtcaccggccggcaccccctccctccgcacctgagcctgcctgtcaccaacc

SEQ ID NO: 244321 - DNA, 395 bp, Homo sapiens
ctctcagcacacacttccttccctgacagtttgtcgcctagcagctattttggcttcccaagggaaatcttgtcctttgcccttgtggggcttactgcaaatcaactcatcatgaggaagattaatcagagaaaagacatacaattttttttttttaaactgtgagcatgaagagaatcacagagtgtatactcaatctcccaatgggggcaaaatacttctgtaacctcctttcaggtggcgagaggggacatgggaatgtaggtaattctgttgagcggtaataagtgatgactaggaagattgaatggatacttgggagaatgaatagggggaggaaacagagattgacttattaatggttccctttggaaattaaatactccttggagacc

SEQ ID NO: 244322 - DNA, 477 bp, Homo sapiens
gctcttcccagagaaggtagtagatgaataataagatgctagtttcctaaggggaacaaagatttttacatctgtgtgcaagtaggatatcaaagtgcaaacccacccctctttgagagaagtagtagttgggagtgaagtaatggaacctctggcttgttattcaatataatctgccagatgatgaaagtacactttagtatacctgactccaatgattttagtaatcatttaacaattgtacaataggatatgacttctgtttcatgttggtgagaaggatagaatgctatttcttgatccaggataacataattcaagataacagaataacatggagaaaacatttcgtgtgttacaaattagaaaaagggaggaaaagttttatgtaaataatatgaaaggtaaagatttcagagatagttctttatatatttgagggtaaaataccttcttaatgtacacacaaaaaagcaa

SEQ ID NO: 244323 - DNA, 543 bp, Homo sapiens
aaatagcgtatttttttcaatgagctattcctattctattgcatgtgcttcttttctcacttagctgaaaataaagccacagcctttcagctacagagtcaatgcaaggaagggcgttaactgcttggaggtgattattacgggtggtgacttagattgtttataaaagaagggcaaagaatgaattgacttctcaaaatatttatgttttcattcaatgatttcattttgtgcttaacatgcaagtgcttagaagagccagatttgtttattcgttactaactagctgtcagatttttagacaaatgttttactgtttctagttcttatcttcctcctttgtaaaatgaaaggatggtactaaggtatctctaatgtcccttttaggtttatctgtcattgtgtgatattttaaaatctttaaattaactggtttatggataaaacagaggacatttttatttgaatcttcaatatatttaaagtgctgttatatctaaagttcataaatacctaatgtaataaagaagtcatattttgtca

SEQ ID NO: 244324 - DNA, 385 bp, Homo sapiens
attatggccgggggaaggtctcgaatcctgaagacagacttcgaggggatgatgcagcaagaagacccacaccagatgagggcgccttgatattggatttcccagcctccagaactcaaataaaaatgcagtctggattttaagggccacacagcagcaagaactaaaacctgggtctccaaggtccaagtccaggacttctctatgacaccctactgcagccctttgctggataccatacaaagcaaattgagcagatgtgttctctgccctctgaaagtttggactcaaatggacagccacaattctggcaaacatttctgttttcatcattagtgcctgtcctccctgctagctcatgggctcccccagagcaggcatgttt

SEQ ID NO: 244325 - DNA, 464 bp, Homo sapiens
cagctaaataattcaacatcaacattcatcttgttaaagcaaaattaaagtggagagtgggcctgaaaatgttctgagcaaacaaaaccaaccaactaggcattaaaaatagctttaatgttgcttaaattcaaaacataagcaaaacttaacttgggttatttctggtaaactaatttaacttgagtcatttctgtctttcttagacagaaacaaaacctaatctcagtcattcataagcagccaatcaacatatgattatgtgactatgaactttccagcaaggtaaagagaaaaggtaaattcataacagcaaccaatcaaataatttttaaattctgcttctgcattcatcctatagatacttgcctctgatgctttgtcatcagcgtgctgaacctcttttggtttgtgtgtttaccaattcatgaattgcttgttactcaaataaacttgaaaatttt

SEQ ID NO: 244326 - DNA, 576 bp, Homo sapiens
  misc_feature (2)..(2): n is a, c, g, or t
  misc_feature (4)..(4): n is a, c, g, or t
  misc_feature (7)..(7): n is a, c, g, or t
  misc_feature (433)..(433): n is a, c, g, or t
cnangcnccatcttgtaccacttgtcgtggagcaggtcgatgaagccggaggacttgtagcggctgatgaactcggacaggttggaggaggtccccagagaccccggcgccccgcctcgcccaggtgcctctcaccctcaatggcgaagggctttcccacggtcagcagtttgcagtcggcgtcgatggagacctcgtagtccaggagcgacttgtccatgatgaaggcgttgagcttgggggggtcgctcctgctggggccgggggcgggggtcagccatcgccccgcccaccccacgccccgcccccgcctcaccccgcgcccgggctcacgtgagcatggcgacgccgcggggcgtggtgggcgcgctgtggcgccgcatgtgtgcgtgcatgtcggggaagctcttcttgatgtacgcctcggcgctgntctcccacacggtgccgaagcggaagccctgcgccgggtggtgcagctgcgcgggggaccccgtcagcgcctctgctgcccctcaggacccctgaccattgaggggcgcgccgttctccggggtggggccgtcctgggcactg

SEQ ID NO: 244327 - DNA, 339 bp, Homo sapiens
aggagacggggtttcaccatgttgcccaggtgggtcttggaactcctggcctcaagtgatccacccacctcagccccccaaagtactgggattacaggcgtgggccaccatacccagctggatggcatctgcattttaaacaaggcccctggtgactccagcctcaggttgtctagttttttcaaatgctgcagcgggtgcagaggggcaggaggcgccagcacagggattcctcctgctttgcagccgtgcagtgggactctggaagccacgccatattatccgggaggctccggtgctattgcctcttgttctgtgacactcttgggtgtaaaattg

SEQ ID NO: 244328 - DNA, 206 bp, Homo sapiens
agtccattgttctttccactagatgtccatggacttcaatatcagaagcccccagattaagatgatctggctcctatgtaaactttatcttagccgggcgcggtggctcaagcctgtaatcccagcactttggaaggccaaggcgggtggatcacgaggtcaggagaccgagaccatccctaacacggtgaaaccccgtctctact

SEQ ID NO: 244329 - DNA, 483 bp, Homo sapiens
tgcactgactagggcagattttcaaaccagtcctagctctagcaaggctggcctggggttctgtggggttggtggggaagaggcaccctccagctatcccagccaccctcaggtgatccttctccagccctcctagggaagcctcttttaaaatgaggctgggctggccgggcgtggtggctcacgcctgtaatcccagcactttgggaggccgaggcgggcagatcaccgtgtcaggagtttgagaccagcctggtgaacatggtgaaaccccatctctactaaaaatacaaaaattagctgggcgtggtggcaggtgcctgtaaccccagctactagggaggatgaggcaggagaatcgcttgaacccgggaggcggaggttgcagtgagccgagattgcgccattgcactccagcatgtgtgacagggtgagactccatctcaaaaataaataaataaataaataaataaataaataaat

SEQ ID NO: 244330 - DNA, 211 bp, Homo sapiens
gatggtagttgtttcctctcaacggagctaaaaattaacttcatcctatggcatgatgtattaaaatcaggagtgtttggcccggcgtggtggctcacgcgtgtaatcccagcactttgggaggccgaggtgggcggctcacgaggtcaggatatcacgaccatcctggctaacacggtgaaaccccgtctctactaagaatacaaaaaaa

SEQ ID NO: 244331 - DNA, 1276 bp, Homo sapiens
acctaggtggttgtgggctagacctgtggccttcactgggttcttgactcattcctggagtgtgagggttttgttcttttttaactggaggtggcagatgactgtccttctggacttcctatatgctcacctgacccctgcgggacctgagatcattggggttcccaggtctttatggtatcacgcccccattgtgacaacaagaaggatgaccaaaagtatgccggtggttgaggaagataaaaaagaggagtggagttgcagggaggaggctcgacaagatcacctccagcctggggcagctggattggcgagtcaggggctggctcctgcctgggcaagacaataagccatgatgaacaatgccattatcctccttttcattgggggtacctgggcatatctgaaaaccttgaaaaagtgtttgcattttcagagcttaagaaaaggaagaagcagcagctacagtgggtttttcatgccttctagtggcattgaagaacctgcactgaatgccacctggaaaacagcctggacctgcacctttgggccggggcacccatgggagctcagcccttgccgcctcaaccctttttggattcttttctccccagactgtcccagagttcaggtcttctcgtctcttgtctgcccagtgaaggtacaagggtggaaaggtgagggtgtggagtcaggagctttgttccactgctgggcatagtgagaagtcaaaagagaggttatgatctcattgtgcttgaaggggagaggccaaagcctaagacattctgcctttttaggggaattacctttcaaggcttatttggtcttcactagcctttacatctgaggatgaaggagttgaggctctgttacatggatgtctaaagagatcataactctcacattgaatgacacagagactgatagctctagcacagtacctaggtaatgtgactctcttttgctacgtgtgcccttcctacataaggaaatgtgacataccactgggccaagcacccaggaaatgtgactctcccgcctgtgccctgcctgtattgggcaatgttgtgacacatctcagagctgagcacctaggtgatgtaactccttttttgggagctgtcaatggaagggattgtgacatatgtttggccaatcacccagatgatgtgactctcttgcctataactcaaattggggagaaattatatcttgacaatattgagattttatgttcatgcacattaaatgtctttctatttaaaaaaatctt

SEQ ID NO: 244332 - DNA, 652 bp, Homo sapiens
aaggactgtctagtttatatggtaattaatcacaacctcaaagactttgaggaggtctggaggctccactggggaccaactaggattttaaaaacaaaaacaaaaaacaaaaaaacttcccccagtccctactaccacactgcataatctccttgcctttcctcccagcatacgcccaggcccaagtcccccaacactgcccccaactagcccagtattctcaaaaagagtgataggagggcatagggttgggaatgtggtagagctgtcaaatatacacaaatctacaatgtcagttcaaaaatggaagtcatgatccttcgcgttgtcctgcaacaggataaaaatagctcatctttcatcaagacagaagaaaacctaccactatcgtatctggtaatctataacaccaccctctatctccaagttgaaccctgctgtgctgaaatcgaagctatatgcagcattttggtttaaagtcagatagacctaagtttgtattccagatttgccacatgtggctgtgtgaccttgaccttggccaagtaatttgacttctccgagcttctgcttcgtcttttttttttttaatgtggatcctgacagtgctaactctataaggttaagaggattaaattacataacacacata

SEQ ID NO: 244333 - DNA, 441 bp, Homo sapiens
gcccccctgttggccaggccccactggcctgcctggggtccctgccacctccgcaggcacctgggtctgcctttctgctgttctgtcacgaggtgtgccactcagcttggctttgaagccaggctgtgtttgtgcattgaatgcacgccaagcccaggcctccactgatggctaaataccttttctgaattgtaggcaatataagataaaaacgtgctgcgggaagtgagaaaaactacatgcccccccatgctgagtgcccacaggaggcgcacgggtagtgcaggaaaaaggcaaatggccatagttcctgaaaccagcataaattaaaacaaaatacaaatcataccctggcaaatggcaagtaacagcctattgccagtatgcgaatcacgttgtgattttttaaaatttgttttgtaataaataatttgtttgaaa

SEQ ID NO: 244334 - DNA, 378 bp, Homo sapiens
ctgtaggtgacagggaagatgatgccatcagatctgtgcttcacatagagaagtccggcttcgagatggagtcaccggagcatggtgtgcgggcactcagtaaagtggagatgtgattactagatcattatggcaatataagataaaaacgtgctgcgggaagtgagaaaaactacatgcccccccatgctgagtgcccacaggaggcgcacgggtagtgcaggaaaaaggcaaatggccatagttcctgaaaccagcataaattaaaacaaaatacaaatcataccctggcaaatggcaagtaacagcctattgccagtatgcgaatcacgttgtgattttttaaaatttgttttgtaataaataatttgtttgaaa

SEQ ID NO: 244335 - DNA, 689 bp, Homo sapiens
accaaaactcaggcatccaagactcatggtctgtttcaagcttcccccggcagtgcattggctcaagttcgtcccaagacatctgtctgtggacaggggaggaatcgaacacagggttctgtgtctgccctgctctgcccccagaagctagcaacagaccaccagccatccatcctcggtgagccagtaggtggtttgccacaggatcgagacggtgacctggccaggagcttctcccagggctttgtgacctacagtcaggagaacaattccgaaagctctctgcaaagttctagttccctcagcctttccactatgtctgtggccagcctgcctgccgtcaacaagatagatgagtcacgggaaagcagtttagaaggggaccttgcggtgaagtctgtttttcctccggagtccatggggacactccagaggtttaaggatacgcaagagactgaaaccggctataggtacatgaccctacacttcccctaccggcccactccagcctcggagaaagtgcccagtttccaacacagctcagtgtctaactgcttgaccttgcgtgttcactggggctcagaggctgagatccacaagttctccttaggcaagagctctgtgaatctgattgaggtgtcccaggcaaccgtcaagacagagctgaggaggactctgtctttaggtac

SEQ ID NO: 244336 - DNA, 792 bp, Homo sapiens
ggcacatccccagtccagtaggggttccaggcaccctgcaactttgctaatttgcaaaaaccaagttgagagacaacctaatctgagcaacaagtagtggggaaagtttctaagaatccccaaaggaaccaaaggagagacacgttctggtaccactggagtcggcagaagaacaatgccttgaaacacaagtggataaacatgtggttccctgcttggtggaggcacttgggtcctaaccatgaggtaaacaagtctaacaaaacacacatcactcccggcaaagtaccaaatcctgaagtcgtcccactggcccctggaaaacagatcaaagcccatggcaagctccactgttcacaaactccccctccacgcagcaactgtgagccagcgaatcatcttactagaagccagtgggtaaaacaataggcagatgcttatctaacagagacaatttgtcaaaccagaaggaatgacctgagaactcacattgaactgacactgatcagggtggtgtcttagtgcagggggagaaggccctgttggaacctggtccttgaggcccttagtagattttaagcccctcgaaagaggagataggaatcaaaatagtattgatttacagggtgcatacaaaaacgtgtcaaaaccaaacaaaacctgatccattttgttcctggctgcctccctattcaagagaagtgggggtggctaagaaaagctggactgagagatttaggcagtaacagaaaacttgtttagaaaaagatggagcaggagcacttaggtgtt

SEQ ID NO: 244337 - DNA, 412 bp, Homo sapiens
gctgaagggagagtggtgagcaacagcctacagctgtcacctccttcccaattggacgcagcgaaagagacttcctcatctaaagtcatgcctttctcaggagcaggctgcaactggtgactgagtgaggcaggagtagaaaggcccgctattttggcccaaacatgggacactctgattggctatattcattcaagagctccttgcaggattaaggttttgtcagctctgcattgtggtttgactttttcctttgccaaattccttcccatcgcagctgatggttattgataaacaacttgccctttgaactctctgtctcagtgtctgcttctagagacagcaacctgtgatcattggtactagcaatggcccaacaagcaattgataagatggaatttgggagctgatc

SEQ ID NO: 244338 - DNA, 574 bp, Homo sapiens
atcagaggggaaagcatgaactattcaataaatggcaacgatacaaaagaaaaccccacgaattgccattcttgacccactcaatgtatgactgcgtgcaagtcactcatcctctcttatctacaaaatggggatggtaattcctcctctgccttactcacagttttgctgtgatgattaaatgggataacagatgtaaaaggtcatggaagagctgtcactgtatagtaaatgctaatcttactatagtaagtgtactaataggatattagtaatatataataaatgtgctaataggatagcacatttaaaaatattacaaaacaacagcatcttataagaatctttaaggatgttacaccaagaaggtttgattatctatacatggttaatggcacaaaagaaattatgaagcctaagattacatactcaggaaatataaaaatatacaaattaaaaacaacctccttattgtaaacgagttgtaagcataaattacatctaacttgtcagactgctaaactgagaaatggctaaatttcctgaaaactaaggataactttaaggtcagcca

SEQ ID NO: 244339 - DNA, 426 bp, Homo sapiens
caatggtgtgatcttggctcactgcaacctctgcctcccgggttcaggtgattcccctgcctcagcctcctgagtagctgggattacaggcatgcaccaccatgcccggctaattttttgcatttttactagagacagggtttcactatattggtcaggctggccccgaactcctgacctcatgatccacccatctcggcctcccaaagtgctgggattacaggcgtgagccaatgcgcctggccccttcttggattttcttatgcatttgaaatcaggtaaagctaaaattgtgaatatgtaaataaaaataccatgagaacatgggagagggagctggggtgttttgctttcataggatgggagccaatgcctacatgttttctattgtatcttttggacaggtagaatgattgcaattgttaa

SEQ ID NO: 244340 - DNA, 480 bp, Homo sapiens
gaagaacttggagaagtggatgaaaatcagaaggaaaaacaggacaagaatttacgaaaacagcaatgagaattaggaaggatatgacttaatggtggcagaaacacatgaaaatttcccagaagtagatagcagaaaaagcagtaaaatgttcagaggaagtgcacaggaaaatgtaaaagactggggccaatgaaaaaacccaagattatactagaaagtgtgttaagctaagctgctgtggcaaagagactccaaaacatttaggcttaccccgaagctcatttctgtttgcatgatagtttatagataggtagtgctacagagctggttaggtggctgtgccattcttatcatgtggctcccacctatggctctaaagcagttagtccagctcttatcatctctcagtcagtgggatggagaagagggactagtggagtacatgtccagttgctttaagggtaaggtctgtgagtg

SEQ ID NO: 244341 - DNA, 499 bp, Homo sapiens
acttctgctgttaggtttcatgaataatagtcccctttctgttgagtttctctggttacatcattttatttaccaatgtattgctttttaatatcagtaacattgaatattaaagtaggtgataaaatggatcaagcaggaaacttgaccattacaaatcgatgctaactaaataaccgagataaccacgatgcaggttgccgattatccaggacccttttttgatctcctttggaaagggagtcatcaattctgtcctttttccttaactttgaaagcccatccttctttggcaatagtcttcaagggttttatttagctcccttttactaaaaacaagcatcacaaaatctcatctgttttttacaaagaagcctggagtaataccctgataactataggggaataatgtcatcaacagaagaatagaatttgggaagctgaccttatcacagtctatgagattaaatgtcttgggcatagtagtgtagctagagaa

SEQ ID NO: 244342 - DNA, 381 bp, Homo sapiens
agtgattattgtccattttaaatcatgagattagcagtgtaaagattcagtcccagttctggtttaaaagaaggcagtttaaagaaaatgctagaattgtccgggcacggtgtctcacgccagtaatcccagcactttgggaggccgaggtgggtggatcacttgaggtcaggggtgcgagaccagcctggccaacatggggaaaccccgtctctactaaaaacacaaaaatcagtcaggtgtggtggcatgtgcctgtaatcccagctactcaggaggctgaggcaggagaaccccctgaactcaggaggcggaggttgcattgagccaagatcatgccactgcactccagcctgggcaacagaacaaaactcttgtctc

SEQ ID NO: 244343 - DNA, 592 bp, Homo sapiens
acataactttttttcccccagaaatataataggcttttgtagttcattcacagttttatctatctctgttttattatttgtattttcattcattctcatatttctggtacatggatttcacctggatgtagaaaacacatttgcaattttgttctttttacagatttgttgggcgaatcaatatctacagtaatagtcttgaggctgttgccaggtaagtttgctgtttctttaatttgtcctttggttgggggggggggtctatttttctgttaaatcaactaaaatagccaaatacctttctattatagaaaggaatataggccgggtgcggtagctcacgcctgtaatcccagcactttgggaggctgaggtgggtggatcacctgaggtcaggagtttgaagccagcctggccaacggggtgaaacccaatctctattaaaaatacaaatttagctgggcgtggtggcacacatctgtaatcccaactactcaggaggctgaggcaggagaatctcttgaacccgggaggcgaaggtcgcagtgagccaagattgagccattgcactgtaccctgggcaacaagagca

SEQ ID NO: 244344 - DNA, 1692 bp, Homo sapiens
caccaactagcccagttaccagtggacttccacttttctttgttataactgttacagccatcaagcagggatatgaggattgtctgagacacagagctgacaatgaagtcaacaaaagcactgtttacattattgaaaatgcaaagcgagtgagaaaagaaagtgaaaaaatcaaggttggtgatgtagtagaagtacaggcagatgaaacctttccctgtgatcttattcttctatcatcttgcaccactgatggaacctgttatgtcactacagccagtcttgatggggaatccaattgcaagacacattatgcagtacgtgataccattgcactgtgtacagcagaatccatcgataccctccgagcagcaattgaatgtgaacagcctcaacctgacctctacaaatttgttgggcgaatcaatatctacagtaatagtcttgaggctgttgccaggtctttgggacctgaaaatctcttgctgaaaggagctacgctaaaaaataccgagaagatatatggagttgctgtttacactggaatggaaaccaaaatggctttgaactaccaagggaaatctcagaaacgttctgctgttgaaaaatctattaatgctttcctgattgtatatttatttatcttactgaccaaagctgcagtatgcactactctaaagtatgtttggcaaagtaccccatacaatgatgaaccttggtataaccaaaagactcagaaagagcgagagaccttgaaggttttaaaaatgttcaccgacttcctatcatttatggttctattcaactttatcattcctgtctccatgtacgtcacagtagaaatgcagaaattcttgggctccttcttcatctcatgggataaggacttttatgatgaagaaattaatgaaggagccctggttaacacatcagaccttaatgaagaacttggtcaggtggattatgtatttacagataagactggaacactcactgaaaacagcatggaattcattgaatgctgcatagatggccacaaatataaaggtgtaactcaagaggttgatggattatctcaaactgatggaactttaacatattttgacaaagtagataagaatcgagaagagctgtttctacgtgccttgtgtttatgtcatactgtagaaatcaaaacaaacgatgctgttgatggagctacagaatcagctgaattaacctatatctcctcttcaccagatgaaatagctttggtgaaaggagctaaaaggtacgggttcacatttttaggaaatcgaaatggatatatgagagtagagaaccaaagaaaagaaatagaagaatatgaacttcttcacaccttaaactttgatgctgtccggcgacgtatgagtgtaattgtgaagactcaagaaggagacatacttctcttttgtaaaggagcagactcggcagtttttcccagagtgcaaaatcatgaaattgagttaactaaagtccatgtggaacgtaatgcaatggatgggtatcggacactctgtgtagccttcaaagaaattgctccagatgattatgaaagaattaacagacagctcatagaggcaaaaatggccttacaagacagagaagaaaaaatggaaaaagttttcgatgatattgagacaaacatgaatttaattggagccactgcag

SEQ ID NO: 244345 - DNA, 1620 bp, Homo sapiens
caccaactagcccagttaccagtggacttccacttttctttgttataactgttacagccatcaagcagggatatgaggattgtctgagacacagagctgacaatgaagtcaacaaaagcactgtttacattattgaaaatgcaaagcgagtgagaaaagaaagtgaaaaaatcaaggttggtgatgtagtagaagtacaggcagatgaaacctttccctgtgatcttattcttctatcatcttgcaccactgatggaacctgttatgtcactacagccagtcttgatggggaatccaattgcaagacacattatgcagtacgtgataccattgcactgtgtacagcagaatccatcgataccctccgagcagcaattgaatgtgaacagcctcaacctgacctctacaaatttgttgggcgaatcaatatctacagtaatagtcttgaggctgttgccaggtctttgggacctgaaaatctcttgctgaaaggagctacgctaaaaaataccgagaagatatatggagttgctgtttacactggaatggaaaccaaaatggctttgaactaccaagggaaatctcagaaacgttctgctgttgaaaaatctattaatgctttcctgattgtatatttatttatcttactgaccaaagctgcagtatgcactactctaaagtatgtttggcaaagtaccccatacaatgatgaaccttggtataaccaaaagactcagaaagagcgagagaccttgaaggttttaaaaatgttcaccgacttcctatcatttatggttctattcaactttatcattcctgtctccatgtacgtcacagtagaaatgcagaaattcttgggctccttcttcatctcatgggataaggacttttatgatgaagaaattaatgaaggagccctggttaacacatcagaccttaatgaagaacttggtcaggtggattatgtatttacagataagactggaacactcactgaaaacagcatggaattcattgaatgctgcatagatggccacaaatataaaggtgtaactcaagaggttgatggattatctcaaactgatggaactttaacatattttgacaaagtagataagaatcgagaagagctgtttctacgtgccttgtgtttatgtcatactgtagaaatcaaaacaaacgatgctgttgatggagctacagaatcagctgaattaacctatatctcctcttcaccagatgaaatagctttggtgaaaggagctaaaagatatgaacttcttcacaccttaaactttgatgctgtccggcgacgtatgagtgtaattgtgaagactcaagaaggagacatacttctcttttgtaaaggagcagactcggcagtttttcccagagtgcaaaatcatgaaattgagttaactaaagtccatgtggaacgtaatgcaatggatgggtatcggacactctgtgtagccttcaaagaaattgctccagatgattatgaaagaattaacagacagctcatagaggcaaaaatggccttacaagacagagaagaaaaaatggaaaaagttttcgatgatattgagacaaacatgaatttaattggagccactgcag

SEQ ID NO: 244346 - DNA, 894 bp, Homo sapiens
gaggggaaggaaggccaaggtaagacattcttggagtttatcctatttgtagccatgaggtaaactggagtttcacttctgagggagggaaggacgtgaactggcttaaaaccagttccttttgcatgattcagcaaaacagtctttatggactcacagtggaaaaagaactcctaacttttctaatttatcctccttttaacgatagaggaggaaacgccctgttccatttcttctcaacttctggagaccttctgttaagtctcatctaaccattaaatagatcgttttccatagaatctaaggcctagattttactcatagtgatattatctacttcaaaagatatactctatgttcttccttttgcccttcatagtaaagtgaacatagtgcacacctccacaatcttaaaaaaaaatactaactttcctcccagtcttgccatagggccctccatcctttttgtaagaagatctttttccttcttgaaaccttgggagttgagtggcagccgtaagtaggaaggaggtgcccttgtctttgcttgttctctgtgctcagggaaacttcagaaaggtcaacttggcatctaggctagatttagttatctactagtttaggatcctgcctaaatcatctggtttaggatggtttaagttgatggggatgtggagaactgagtgttaaattttccttttcagttgaaagagtagtttctgttgccaagaagaaggaaatggtacttcagctttcttcgtgacagcttgaaatgtgctcaaaattataaaatcttagacaatgatgacttagatattagtatttacctaagaatttgctgttgtagaaatctacattgcaggctatcaaaattctacctgcttggtctgaaga

SEQ ID NO: 244347 - DNA, 211 bp, Homo sapiens
gaatattaggtttgaaaatattacccattagttaaatttctcctccttttacaatgatgtttgcctttaaaggggtcaccagagaataatttgtttcacagagcagccatgctattaatactactgtttagagatatagaaacgactttgcaactgtgaattgctaagaattgtagaaataaagggaaaataaaattttcttttctaattt

SEQ ID NO: 244348 - DNA, 404 bp, Homo sapiens
aagggcttaggaattcgaagataattcaaaggaagcaaaaaggaatttacatttattacgtaccagatgttttttatttttcacctgagttgacatgtgattgatttgggtttaccaaagataattttcccccagataacataaaatatagcaaagctgagatttgacccatgcacctctgctctgccatgtgccagacacatactaggcattcgtggtctatgttgtcaccaaaccacagtatactgacagtacagtaaaacaggtattctctttttcactgttgaaaagacttagggttcaaagcagttaataacgaagaatcatcacacaactggccaactgagaagaaggggaacagatgggaataaaatcaaggctagaagtctgcagtctctagattc

SEQ ID NO: 244349 - DNA, 461 bp, Homo sapiens
caggtgatccgattgtttttctaaagagcaagggctaggacgtcctacgtgttcatatgcacaattttttgaactccatcaagaacacgaaccccatgcccacatcttcactgctcaattcacattgtctgatatgcaccttccagggagaaggaggttttcatggagaaagaggcaacgttgactatacgtgtttactcaaggcttttttataccggactatatgccatccaggtttaagagaagtccaggcaggctctagcattatgtttttcacagaaaaagccggtgcagtagcccggatgcccagatccactcatttcccaaaccggttcccacacccgctgcccaccacctggcgaggaaggagcgggcgaggttcgctcgaatcgtcgtcacgggtttccgtgggtacagttattactcgttacataatattaaacaattaagattaaaaatgg

SEQ ID NO: 244350 - DNA, 542 bp, Homo sapiens
cttcaattcatttgtgaatgtctttatcccattagattgggttacttcacaattagaaaggtcatacagcaatttcttccaagatttaatgacacacttcagagtaataaaatcagtttgtccagaaaaaaaaaatccagcttttaaaactccatgtacctagaaaatcaaatacatttaaaatccagaaaatactgtgagattgtagtagattttatttagacacaatacatcttcatcttcacaatatcagataatgttagaacgtggaatattctcaagataaataaaaagagaaacacatttaaaaattgttcctacccaccccatccccaaccctggtaagtaactatccacatattctacaaagcaaagcttcttcatgcagtgtccaccagaaacaagcaccaccacctgttcctaaaatagctcgtggtgaaagagaagaaaatgagaaagctggcgacgtgactaacacactgtgcagggaagtgctctacaactactggcatgcagtgaccgtcaagcaggtgaacagaggc

SEQ ID NO: 244351 - DNA, 438 bp, Homo sapiens
ctgacaaacttcagtaaagaaaacagagagccctacccttccataatatatgaagagtggggcaaggtgaaagagaatggggagggtgtagcttataattttaaatagggtaattgcctcactgagaagggacatttgaataaagatctcaaagatgtgagaaaattagccctcgggatatctggaggaaaaattcaaaggtcctatagtatagggatgtgttggaataatagcaaacaggccagtctggctaatgtattgctgagagactggtaggaagagatttcagaggataagcctggttgggttacacattctttatctttttttaatttaatttttgtttgtcaaataataattatatgtatttatggagtataatgtaatgtgatatatgtataaattgtggaatgattaaatcaatctaattaacatgtc

SEQ ID NO: 244352 - DNA, 552 bp, Homo sapiens
aaatattttcattctatctttcatgcaactctggctgcaagctgtgctctttctgtgcccagatgaccaagtaaagccccaagtcacaagacaccctctctctctctctgccctgtgtggaaacactcctgcagaccaagcatcggtggttattgtgaatggcattgtttccattgtatttttcagtaggccattactgatatgcaataaagcactaagcctttttaaatatttattttgtatctggctaccttaataatctcttattagttctcctgcattttcagctcattctctccattttttttcggtatgccatctgttatggttgaattgtgttctctaaaaggtatatgttggagctgtaacccccagtacttcagaatgtgactgtatttagagttaggaccttgaaagaggggattaaattcaaacgaggctgttagagttggccttaatccaatctgactgatgctgttataagaagaggaaatttgggcacatggggacaatcatatgcagaggcaacaagaggtggacatctgcaagcca

SEQ ID NO: 244353 - DNA, 488 bp, Homo sapiens
taggggcaaattctttaggtaggaccttgtaggtcttggaaggcactatggtttttattatgagtgaaataggaagtcattgaagggtttagagcagagacttaaattttaacaggatcagtggctgctcattagattgtggggaggcaaaggtgaaagccggaagaccagttaaaaggctgttgtaataatccagattaatagaggaggagatggtaaatttgagatatggtttgaaggtgaagccaacatcatttgctaatggtttggaggtagattgtaaaagaaaaagagaacttaaggacgacttcaagattttaaaaatctatgttggccaggttggtcttgaactcctggcttcaagcagtcctcctgtgtcggtctcccaaagtgctagaacaggctctgagccaccgcgcccagccgacttcaagatttttaacgtgagcatttgctgagatagggaagactgggaagagcaggtttgg

SEQ ID NO: 244354 - DNA, 367 bp, Homo sapiens
gatcacacgtgtttatttaaccagtcagagtatgtcagattagtgggcacccttgtaacttattttcaacaaagaaatatccttgatgagacttggtaatccaggatgtgttgtgtgtgtgtgtctgtgtatatgtatgtatatgcattattaggaaaaactaactgtaattgaacttctatgttctcgacacttctgtatcatcgcgtcatgtaatccctacaatctcatgagataggtgttgtcaggatgttactcccattttataaatgagcatactgaagtaaagagatgaatagatcatacaataagtgacagaggaggattttaagaacaggtatttcttttttcaaagcccatatctcat

SEQ ID NO: 244355 - DNA, 364 bp, Homo sapiens
tgggtggttgagggagctcctgttgaaatgtgctgaggcttctgctgaggtttctacctcagctccacggcctgtccagttcaatggattgaagaaaatgttcacggaaggaagatgattaattgatccagagggcctgtagcaactctgtttaacatgctagatgagccagtcttattcagtgatgactaaggatctagagagttcctaggatgtgtatcctgtatgctggtcaccggaagataggcaaatttttgctttgttgctggttctgggacaacagccatgatgacttcttggcagtcatttgcagactaaggtagctttgaaggtgaagaatctttgtgttcattctcatcctgat

SEQ ID NO: 244356 - DNA, 777 bp, Homo sapiens
agaaccatcgagttagtgctagcatagaatctaacaagaaatggccctgcatccattctcttttcttctaataacagccccagatttccatttttggacctaccttttcctttttatcaggctaagtgttcatggtggggctctgtccttagttccagggataaagcctgtgacccaaacttaaaccgcagatcattttccccaggccatggagattgtttcaaatgtgggcacatggcctgaatgggtcatatcagagtaaatcttagggcttctgggttatgccaccatcacaggctcttgctttcctcactgaacttgaacctagacggatgtaagctggagctgtggcagccatcattgccctgtgaacctggaagtcagagctgacaggtgagaaacaacaaacaactcacacctgattgtattgcttgaattctgaattcagcagtgcttgaagccagattgagtcctgaccattttagtatacgatcattaagcaatcttttgcttacgacatgtgcggttgaaagagtcccaattataataggctgagagactaggtatagtaactagcacttaagtgggttgtctaggctgtaggccccagatatttaggagctgcactcagaggctcctgagcaaggtatgtgtctggggtgaccccaagtgcacttgccaatctgaactgtgaggaaataccatgtaatgggggagaggagagtgtggcaggcattcagatactttggggaaactcacttcaagcaagtgttctgt

SEQ ID NO: 244357 - DNA, 385 bp, Homo sapiens
acattgtgtgccaggatgtgagtcagtaatgaagaaaagcctggaagaaaaagagatctgtgttgagaagggagaaagagaagaaagaatgaataaactgtgttgtcatgtgattttttaaaaagacccttttttgtggttgttatgagtcacattttaaacaatgtagcctgggtgtgcattcttttcttttcttttttaaagcagtggctataaacatggtgccgtcatgtatctttttctaggatttgagctttaacaaatgaaaaaccgtgtgtataaaggggggaaaaagaaccgaaaagtggtgtaattaaggtgatggattatttcctcttacccaatactttcttttttcaataaaggaaacaagaacaataaagaa

SEQ ID NO: 244358 - DNA, 264 bp, Homo sapiens
gcttgaactcgggaggtggaggttgcagtgagccaagatctcaccattgcactccagcctgcctgggtgacagagggagactccatctcaaaaaaaaaaaaaaaaaaaacacagcttttaattaaaaaaaggtcaagacaatagtaaaaaagacaagtaggaatataagtggtacgtcagatgtaatctttccttttcttttttagatagtcttgctctctctcccaggctggagcgcagtggcacaatcttggctcactgcag

SEQ ID NO: 244359 - DNA, 380 bp, Homo sapiens
tatatccataaatatttcaatttgtatctctataagtagagacttttaaaaatgaccagaataccattagcacacctaatcttttattttaatatcaaacatctagcaagtggttaaatttcctgttgtttcatggatactcctcacccttttcttgtttttttttcccattgtagtttatttgttgtttgtcttacagtttcctaccttctggatttttaaatttttattttattttattattttttgagatggagttttgctcttgttgcccaggctggagtgcaatggcatgatctcggcgcaccgcaacctccacctcccgggttcaagtgattctcctgcctcagcctcccgagtagctgggattacaggcatgc

SEQ ID NO: 244360 - DNA, 356 bp, Homo sapiens
gagccggggccccaggcctgtttcagctctgagactcctgagggaaaggccccgggattttctcttgcataatggtgtgctctctccttggaccactcctgccctcttaatccagtcttcaaacagaggtcagagcaacatcaaattttttttttttataatttcttgttgatgcttaacataccagggaagagggcacagccgtctctgtaccggcagagagattttcacaaagcgccgtagccccggtcacagcagagcctggccggcccccagaagccccccaggcccctctcactgcccccgcaccccccaaggtagtcatttccggacttctaagggcacaggctgggttt

SEQ ID NO: 244361 - DNA, 510 bp, Homo sapiens
gcctaaaaataaaactcccacaaatccgccgctaattgaggaactagaataattctcaggtttttaaagttgcccaatcctatgattgtctccccctgtataaataaccagtatctttaatatgatgtttgatttaatggtattatattgtgtacagtttgccgatagcattatagttctcttattcatctttatcgtatgtagctggagttaatttgtttgcacagtattatagttcattatgtgaatattgcacatgaacttcagaaggaatgtcagactaatttcccaaacttctcatagtagtttacacttccacccaattgtgcccattgctcttgcgttttacatcagcctagtgtaattttgaaatatataatgaaatgaaacttttctaaaataaaatatttccagaagtaatcattgaaactattggcatatatttattttacagcatgatatataaagaaagccatagttaaaagcagaatgctactccacaaaaaaaaa

SEQ ID NO: 244362 - DNA, 459 bp, Homo sapiens
accaaatcaacagaattttcatctttttgttttaatatgtaaaaattggaagagaaatataaaagagtcagttcaaatattaattcaagcactggctgaaatcagtgtcagcaaagtaacaaggcatttatttgtttcatagaagaaacttgacaattctggaggatattcagcatgtttacaataacactgttcctgacatttttttcctccttgtttattggctcttggactaagtatcaatctttggacactgttcttttctttcttggcttgaaagtgagcaggaatgggggtgaaaggtaacttttatggctgatgaggtaagaggaagatcacaaaatcattcttgtaaggcttctctcatttcttaactgaagtatatgtcttcccttttgaagtacagaccatggctaatgagtgaattaataaaaaattcttgtggaaagttgactacat

SEQ ID NO: 244363 - DNA, 440 bp, Homo sapiens
aatgcagttatcacctttaccttcccttcactagccactccctacacagcaagcttgtctaactgtgtgcttacttagaagctccagagccagaaccctctcccactaggagattgtctcaggagacaacagtctgtttacatttacaagctaaaagtatgcccacgacagaactctctcctacctgggcagtatctcagacaatggccactttacaacctagctctgcctgcgataccaccagcttgacttcttggtagatagaaggcaccaatgccagtcacacagaaccccacctgctcgcttcgtctcctgcatgctgctcatcccaagtcccctgctttctgccccaaacgtgaaacagtacccttaaaggcaggagcctgtacttcttccgctaagctcgctttggaataaaaagtcactttctttatagcaga

SEQ ID NO: 244364 - DNA, 440 bp, Homo sapiens
gaggaggaggagaagaacttggtcttgctctctcaggggtgacagaggtggaagaagaggtagagaaggtggaagagaagccacaaagtgaaggcatctaagacttatatgtggagctacacagttcaatctcgtatcgttcaagggtcaactgtacttcattgataactgaaaattccaggaggacatcctggattttgttctataccaactcttcaaaacagttcctggcacacaggagccattagaggaatatttgttacttagatgaataactgaatgaatggaaatggaaggccagaagaataaaatgatcttcccaaaggcatcactaagaggcagaactggactgtgtgatgccaggttcccagtccaaactttttccatcactttattgtttttaggtgagtttcattaaaccagaaataagccatctaaaa

SEQ ID NO: 244365 - DNA, 197 bp, Homo sapiens
gtgaaataacttgctcatagtgacacagcactgggccaggaaccctgctgtcctgcctggagtccatgtcccatgccctggatcagtgtggactgtaaaagtggtatttattaatttatatttgaatcatggcattgaaaaagaaaaccggctgatccagcattttccaaaatgtatcctaagactctaggtcctca

SEQ ID NO: 244366 - DNA, 413 bp, Homo sapiens
aggaaaatcaaagctaccagatctgccttccctcttccatcgcaagctgtcttgcaattatcaaaaaagtgtgggcagcagatgagtttattgtgtttactttgttttgtttgttttgtgggattatcccaggagagggaattgcctagtgataacagtaagtttgtttctctgtaattttcactctgttttaggtgccttcaagtgcactatctctaaaatgggcacaaaacattattggctacttacttcacaaaagactttttactctatctttatgatattaagagaaaggctgagatttaaggatcttgacacagaacaccaattaccacaattcttgcatttttttattaccctcgttgtcttctctctatatatcaattcttcaattcttcaagaacatttaagtt

SEQ ID NO: 244367 - DNA, 123 bp, Homo sapiens
tctcatgtgggagatgggcaccatgggccagaaatgggctgaggaagctcccagccccagacctcagtttccccatctgtacaatgaagggcctttttttcatggttccaaaagccacacgtt

SEQ ID NO: 244368 - DNA, 390 bp, Homo sapiens
tagtttttgccttgctcaccctttaagaatgactagtgcaccacaagaactctaaagcaacattctcccttaatttattctaattatatgtgccttggactgttttgacacctggagatttcacaaaatagttgcttgttttctctgagactgtcaccattttctaaaacttgagaaactaggcatgaaacaaaatcaccgcctgcatttctaagtcatcatccatctatacctttgtttaataaaagtctatatattggaaatagttctcagaccttcacataattcaactgtcctaatctataactaggaatgaaccacactccttaaaatgcagaattccgattttttttttagagagacacggtcttgccatgttgcccagtctgg

SEQ ID NO: 244369 - DNA, 377 bp, Homo sapiens
atgtgtcattttcttaatgttgctgtaatctaagttatacttaatctaagcctttagcaatgatgacaggtgtttgtatgcaggtgatatttatattcctacggagtctaacttttggaaaattagtttgcatgtatttttatttcatgacatacagtaaaggtaaccttctctataaatgtttgatgtcttacagaaaatttcagtgtattagttataacctctcaatctatgcataccacatgcatgtagattcatttagagtttgggaacaaaatacaactgaaactgttaaagagaatgttctgattagactcttcaagacatagtggtcttcattcaaggagtaaatctcctgccaagagtttctatcataa

SEQ ID NO: 244370 - DNA, 393 bp, Homo sapiens
aaaaacacacctagaaagctgtgcacctcaggtgacaagagagaatggtttctgctgagaactcaaaaatagagactgcagttcatacaaatgcagatcaccgatgccaccatcagtagtgaattttctcaagacagttacctcgaacccaggtatttggtctttgtctaggggttttcattcaccagaactgtcatgcaggccaagtttgccatgctttctgcctttatatcagcagctcctctcccccgcccccaccacaaccttcacacacattgcagcaaggcatccagtcctggatcgcaactcatgctccttaacattcctacctcagtccagtcttcaaaggagagatcaccaacaacatgtgcataatatatttgacatatggga

SEQ ID NO: 244371 - DNA, 467 bp, Homo sapiens
caagaaggagtgcttcagatattagcagaaataagaacacaaccaaacctgtgcctttgtttaccttgctgagcgttgagcagcagggagggttagtgataaggttaaaatggttggcagatgctagaatttcagaagaaaaattactatagattcgtattttttctctccatgcttgataattaactgcttattaaaaaccactttccactttacatctagatttaaatgacacattttactaaatgattcagaaacaagacaggaacaaggaaaaaatttaaagctacattttaactgcatttagtcttacagtaagaaaacagctcaatagtatcatcatgatcatgtaaaagtttttaaaacctcttctattaaagagggaattctgaaaaggaaaaatgtgcattgttcctttcctttgagaaatcaaagtactttcacatttatcctcattttatcccaca

SEQ ID NO: 244372 - DNA, 583 bp, Homo sapiens
tgggtccatgcccaggagggttcatgtccagaaaggtccatgcctaggagggcccatacacaacagagccctgtgcccaggaaggaccatgtcaaggagaaccccatgcccatgagggtccatgcccagtaagggccatgcccatgagatcctcatgcccaggaaggcccatgcccaggagggtccaagcccaggccagttcatgcacaggagggccccatgcctaaaagtgtccatgcccaggaaggtccatgtccagaagagtccatacccaggagggctgatatggttaggctttgtgtctccacccaaatctcatcttgaattgtaatccctataataaccatagtccccatgtgtcaagggagagaccaggtggaggcaattggatcatgggggctgtttcccacatgctgttctcatgatagtgagtgagttctcatgagatctgatggttttataaggggctcttcccttcacttctccttcctactgtcttatgaagaaggttccttgcttccccttcaccttctgccatgattgtaagtttcctgaggcctccctagccatgctgaagtgtgag

SEQ ID NO: 244373 - DNA, 361 bp, Homo sapiens
gcgggttcgtagttatcagacttcagtactgcagaactggtgaaaacagaactaaagtcacaaagattcagtcagttctgttgaaaattgaatttattttgttgtagaaaggaaggaaagcataaatgagtatgagtgtcatttacttcacttagatgattactaatgctttttacctgatgtataattatatactaatgtatatggatatttcttcagtttttttaaaagatttttttttaaattgggcaatctttctgacttttaagctaagtttctaaaggatactgttggctgcaggaaacttaggtcatttattcagagtttatcagttttgacactttcttttgaaattgttaaa

SEQ ID NO: 244374 - DNA, 327 bp, Homo sapiens
ataaataataacccaaggttcttaggttattagtatgtctatttcttgtcacctgagccagtcataatctatgaaaatcaggacattcacgtggtcagtttacagaatcacttatgaaataaaataaataataaacacagtttgattcatctttaaaaacagacacatacacacacagctttgtcttatcttttcaaaggtttcaattccatagttaaaaattgccattggttgcacataaaacagtcaactgtaggctgaatttggggaaagaataaaacctgaagaaaaggaaacagtgaaaattactttgtttcccaaacttca

SEQ ID NO: 244375 - DNA, 398 bp, Homo sapiens
ccttaatataaaagtataaagtggcattcttttgatggcaaaatattctaaattgtatttcctaatagtaatagaaatattttagggatacccaattcattggttatatagtttcttcatgagtacagactagaatatatgacttcataaattttatgtttttatttcattttattttgccaaacaaaattagcaaaaagtgaagataagttttggcttatcaattagagataatcatacacataatttggaaatttgttttgtcacatagtgcacattttccaaagctatttaaaatggaaaatagcataaccttattatcagtgagtgtgaaaaccaaattcaaagccatgtacacaaataaataatcacttgaataaagtttgatttttcccatt

SEQ ID NO: 244376 - DNA, 578 bp, Homo sapiens
tactttcagctcaagttaagagccttgagcagcaagtggtaggatgtcaagactgtagatacccaggtgtgaacagattgtagcaggctgaagattcaggagcagatacagataaacccagtgtggccccagccaagaggtccggatcacttccctcttctcacagaatcctgcagagatggcagctgttcttcagggggtgttatactgtcttcattgaggcttatctgaatgtggggaatctggtgattatgtggtttgttccaaccttcaaataagtcattggcacacactcagttgacagtcattggatctgatgttgtgcttgggaagaaatcttacagatgatctggcccaagcttctattttttgtttttccagatgacagaatggtttggcttaagttctaaaagtagtaagagccaagatttgattcattagacctactgctctttctgagattacagaaaagttgcatttgtgtctcaagtgcctatttattcagtaggactagagttgacgctcaattttttttttttttttcttttggagatggagtctcactctgtcacccaggc

SEQ ID NO: 244377 - DNA, 559 bp, Homo sapiens
ttctcagtgatgttcttccccagtgcctgcattaacagatcatcttctcttaagaaatcaaaggtcccagtcaatttagaaagtttattttactgctgggtgcggtggctcacgcctgttgacaccgagacaaacagagagagacagcagagacaaagaccaggggagagatctcttgcttccagccccttgggaagcctgcccgtgggttccatgaggcaccccaattcttctcacaaaaatcttttcactctacttaaaatagacgaagctagcttctatttcatgaaagtccatcgttcagggctgagtgtagtggttcacgcctgtaatcccagcactttgggaggccgaggcaggcatattacttgaggtcaggagatcgagaccaacctggccaacatggtgaaaccctgtctctactaaaaatacaagaattagccgggtgtggtggcgcacccctttaatttcagctactctggaggctgaggcaggagaattgcttgaacaggggggcggaggttgcagtaagcagagatggccccactgcactccagcc

SEQ ID NO: 244378 - DNA, 583 bp, Homo sapiens
tgaatggcccttaaaatatgtttcattcagatgaggaaaggaagagaaaagaaccggattaatccaataaagagaccttaatacaaactcaatcagaagactgttgcactgtttttattgagttctgacattttctgtgtagactgtgcagcgaaggcacagcattactcattggcaataaatccatttaggtgtgcaggtgatgcccagatgatgtttattctaaggaatcttaatgtcttggcctcttcaaaaactgcacaaataaacttggctcaatattaaccacagttagtgaaccttaggataaagaaatgggattagtcatcccgtgatgcattctgcattcacccgtggcatcatgccaagggtaccccatgctactgtgtattcactccattcttaataacttgaaaaaatggagatgttagctgcctttaagaattatgcattttctatgaggatttaaggttgctgagaaggcaactatgaacaatcaatagctacttaataaacgctgtataaatgtatagtaagtaaatattcatgtctttttataaagtagacttcaacagagctctag

SEQ ID NO: 244379 - DNA, 660 bp, Homo sapiens
cactgaaatgaatcaataaccaagtgaacaagcctggcaggcttgggctgttgaaaccctgcacattccgaggataggactggcccttgcccagctccagcccttgctgtgtgagcctcaagctgctgaacatgtgcatgagaagagaaggctcagagactatacctcacccatttaaaaagacttatttttggtgcaccagtaaaaaggtagcctttttcatttagacaagtttataaattctggtgagagtcaaaatgtaaaatataaagtttataaatctaaaatggaaatctcaaatataagtcagatgaattcctcacaccaagaaaaccatgctggttcttttcttctaagagaagctgccctgagacaggctggctgccagcacacgattaccatatagcgcttgctgaaggtgaaactggagcaaaaaatgctccagtcctagcgcacttgcagcacgtatgggcttgccttcaaactgggctgagcctggatccttccctcatgccagaggcaaaatgatccccaaaacgctggagaggtgtgaaatgacatagcagacaacttgaggggctctcacctgccaaattatgcccattaaagcatcaaaaacaaatataaattgtattaatatctataaaattataaaaacta

SEQ ID NO: 244380 - DNA, 554 bp, Homo sapiens
aagcgcacgatggcgcgtccctctcagaaagcggagcgcttccctgcgttaggacccgatactggctccctccccggaggttcgcatgtgtgttccggagagggtgaaatcaggctggcaccgcgggaagaggctagagtcactaaatcaccttgtcctcttgaggctgctgtccgtatgcagcgacattctgcccgttagaggactcagctcagggcctggtacgctcaagatctgttagctaccagcaccatcaccacgaccaccgtcatcaccagcagtatccctcagcctcgtctaccttgctcgtcaagcagggtgctccaggagtgggtgtaggccactttcgccctgcctggcagatgcaactttccaacttccacctccacttggacctgctctctctactcaagtctagctggtggctgctggagtttgcgtgtgtgtttcttactatatcttctgacttcggacgcctaacccaagcttattatctcccctaaaatgggacctccttaaaatatatattacctttctttttcctgttcttaaaa

SEQ ID NO: 244381 - DNA, 397 bp, Homo sapiens
tcatagctactcaggaggctgaggcatgagaatcgtttgaacccgggaggcggaggttgcattgagccgagatcatgctactgcactccagcctgggcgacagagcgagactctgtccccacccaaaaaaaaagataattcacttctcagtttccagattgcatttatatagattatgtagttatattgataggtgttttccctgtaattagttacaataataggcaaatgtcaacacctgttattttaattttgacaagttttctttaaaatttgctataaagtctttgattgatagaaagagaaatctataaattggaagccaaaagctggagataatattaggccctcctaagcactgggtccaggaatacccacctaattcagagagtgagct

SEQ ID NO: 244382 - DNA, 487 bp, Homo sapiens
aagcctgggaagtcaaggctgcagtgagctgagatcacgccactgcactctggtctaggtgacagagtgagaccctgtctcagagaagaaaaaaaagccaaatatcttaagtggttcttaggcacattatagtgctataggttttggggagccactgtttaaaattgaaatctagacaggatcacatttcaattttaggaagctcactctggcagcgtgtagaagatggagagagatagaggtgctctggaggccttttaggatgcttctgcataaaactaagttaagaaatgtcaaaggcctgaactaaggggtggggataaaaaggaaggagtggggattctaaagatagacgtcaaaacaggttgacctgcacactgaatttagccaacagttatgtttaatttggcccacacttgctttctttcaaaaattagtatctctagccgggtgcggtggctcacgcctgtaatctcagttactttgg

SEQ ID NO: 244383 - DNA, 722 bp, Homo sapiens
gagagatgctgctccatttatgatgggtttctgttcctgatagacctattgtagtcaaaaatacatttaatacacttaacctactgaacatcatagcttagcctagcctaccttaaatgtgctcagaacacttagattaattcgcctgtacttgagcaaaatcatctggcagtgcagtagagaattggttgttcactgtttgtttgtttttttttttttttttttttgagacggagtctcgttttgttgcccaggctggagtgcagagatcacgccactgcactctggtctaggtgacagagtgagaccctgtctcagagaagaaaaaaaagccaaatatcttaagtggttcttaggcacattatagtgctataggttttggggagccactgtttaaaattgaaatctagacaggatcacatttcaattttaggaagctcactctggcagcgtgtagaagatggagagagatagaggtgctctggaggccttttaggatgcttctgcataaaactaagttaagaaatgtcaaaggcctgaactaaggggtggggataaaaaggaaggagtggggattctaaagatagacgtcaaaacaggttgacctgcacactgaatttagccaacagttatgtttaatttggcccacacttgctttctttcaaaaattagtatctctagccgggtgcggtggctcacgcctgtaatctcagttactttgg

SEQ ID NO: 244384 - DNA, 713 bp, Homo sapiens
tagtaatttaaatgaacatctgtcatctgtcttcccagctaggtaataagttccttaaggagagagattacgtctgtctatctcatggttctagccccagtgcctcgcactttgctatatacataaaagacgtttgattttttttaatgaatgaatgttctcctattaatcattgatattgatgaaaataattgttgcattagcaaaggcttcatagatagaaattatcttcaattgctaattaaattattaaatagaatttcttcctccagtgacttttttctctacctttttcaatggctccttttaggaccacctttgtgatagataaattcacatctattataatcctcatctgtcaccaaaagacaataatctagcagtgtcagcatagttactaacgttaaaaccataccacttaagccaattttaataatttttcaaacacaggtatataagattggtttaaagaacatattcactagatgccctagctagtagagacaccaacactccctttggtcctctaaataataagatttgactagtttctttctaaggtgagtttcatttttaaagtgtattgtaataggtaatatatactatacaatattgtaatatgtaaatagacacttggtgttagaactttgtcactgagtatattgtcaggaactttagaaaattgtagcatacaacactgatggagagtcacc

SEQ ID NO: 244385 - DNA, 366 bp, Homo sapiens
ctcctggttctcctgtctgtaggcttctgaaagctttgctgccctaaattcctgtccttggtctctgttgggaccatgcctactgactgatgctaacctcggggtctcttctgtcccctagtgattcaaaccagctatcctgaaactgcttccacctgggcagaccagggaccacaggaaccagagaaatgaaaagtatcacttgagaactaaattggggtgttttgcttttcccctcctcctaggttgtgtgtgtgtgtgtgtgtgtgtgtgtttcttgctaaaatgcagcaaaggaaggggaaacaaatacaacagtgcacggcagagtccctgctaataaatgtatataaaagaactgagtgc

SEQ ID NO: 244386 - DNA, 290 bp, Homo sapiens
gaactctttatatcttgttttctcctatctttctgcttttagaatcttttccctatctttgaacttcgagtgtttgattataatgtgtcttcaggtattttcatttgggttgaattggactgatgacttttgacctttttgcacttgcatgtatttcttccttcaggtttggtaattttttatgttattatttatttgaataagttttctagtcctttaactttttaagttctctcttttattctaataacctaaatatttgctcttttgatactgccccataagtccca

SEQ ID NO: 244387 - DNA, 598 bp, Homo sapiens
attcttttaaagttgtgtttcgtcatacagaaatgttaactcctctggattttgtaggaaaataactctataagaatcaatgagaattttgaaaaatgtgggtagtgaaggtcttaccagatatttaaagcagaagttctcaagcattagtgtacaaaaacctgcatggttgcattttaaaaatgaatctgtcacaggagttttcaatttttaggtattggggcagtaaggaacatagggaggcatatctgaggaatcttcattttaaatgacctctaaggtaattctgatatgattggtccatgggccacatttaagaaacattgcactttgggaggccgaggcgggcggatcacgaggtaggagatcgagaccatcccggctaacacagtgaaaccctgtctctactaaagatacaaaaacaaaattagccgggcgcagtggcgggcgcctgtagtcccagctactcgggaggctgaggcaggagaatggcgtgaacccgggaggcggagcttgcagtgagccgagattgcgccactgcactccagcctgggcaaaagagtgagactctgtctcaaaaaacaaaaacaaacaaacg

SEQ ID NO: 244388 - DNA, 441 bp, Homo sapiens
gttgttcttctcatggacctgcaggttgcagcagcagcatctgagcaaaacagagctgttctgagcagtagggcggggagcagcacgtctttgtgtggaccagaatgcaccagcctgtgggtgtatcatctcacactctacttcctagactaaggccctttcttgggcctttcagtgaatccaacccaggttggtattttgtgttgtcccccaacccaaacaaaaaattcatttgcacttaaggaagaacaagagtgacttgattaaggtatcaagttggtaaaaatggaaaaacaatttgatttagagagttaatgaacgaacatctttctttgattcttttcattaacattacacatattaggtaaactgtgtataggtgtttatttttctttatggaagtcacacatgatctatatagaaaaaatttcaaatacatca

SEQ ID NO: 244389 - DNA, 1442 bp, Homo sapiens
gatattgcaggcttaatccatgttgctcacaccttcatatagcagtgcctcttacagaataaactattgttaaataggaacccatcttgtcaatcagttgcttcatgcccagggaagagagtatgttttataggctttgtgtgcagcctgttaggccagcgtttaattgacatagactgttgtttctcaaacaacagttctattacgtacgtatgcaagtaatttctgtgcttcaaggagcttcagagagattgccttgttcaaagccctatggttattcaaatggtagagccaaaaatttgatctatgttctgacttaactccatgggctttggaccttggcagaggaaatggtgtctttgaactgtagtctgtagtcctagaaattgaataaactatttcctaaatagaggtaagagactaggatcctagcaacttctctaagttaacaaaaggggaaaaatatccccataccatttttctcttcattctattaatgagggctagagtcgtttcatagattgaatagtttcaagagcatattgagcagtgcctggctaacagctgaaagtctgccatttcatgcaactttgttaggctttagaagtgaagcaggaatatagagaaaatacagcttctcccacccacaacgtgtattttaaaccatttcttctggcccagaagacaaacttttccaaatatcttgggaaaaccacagtttctactctttggagacaagagtctcactctcacacccaggctggagtgcagtctcaactcactgcaacccctgctctcaggttcaagtggttctcctgcctcagcctcgtgagtagcactcgacaccacacctggctaatttttttgtgttttttgtagagatggggtttcgcgtgttggtcaggctggtcttgatctctggccacctcagccttccaaagtgctggtattacaggtgtgagccactgtgtctagccaagtttctactcttgatgcctgccatggactattacaagcacctggcagtgacattgcacgagttctaaagaaagacttggtctttcccacagggacattaatgtgaaagaggtccagtgacaaagattcagtcacttttgcagaccctcacaagccacaataatgaagttgcagtgaatttgggacatagccttccctccccaaaattcttgatccaagaatccacccgtcaagttcaatgactcagactccatttctagtgtggtcgttggttaacaactttactagtttccatccaggcttaacctttctatggaccataatgtcttggtgtctgctgcatttattgtccctccctgttttaaggatacttaagtttttaaagaggcataaatacttcaaagtccccattggccctcctgggggaaattacctcaaaccacagggtagtctgctaaataacc

SEQ ID NO: 244390 - DNA, 275 bp, Homo sapiens
tgaaagtaaaataaataattttattcttaattgatgtaacagtttgttcaaaataataatagcagcaatgtatttgattttacatacacacatacacacacatatattatactcccatacctgtgggttccccgttagtggattcaaccaactgtggatcaaaaatattcacacacaaaaaagaaggccaggcacagtggctcacacctttaatctcaagtgctttgggaggccagtgtgggaggatcacttgatgctaggagttcaagaccacc

SEQ ID NO: 244391 - DNA, 1004 bp, Homo sapiens
tggaggtttagctgaatcctaggatcaggaaagaatctgaagtatccttacattacacacctcttccctagcgtcagtctcccaggccctgccagtattaatacacctgaggaagaaaatagggatgggaaatccagggcccaataggaaagggaaccgaggtctacctaactatcactaaaccctagccagtgattttgaaatgcactttttcaatattctcagatatactgagagaatatgagagatctatttatagactgctgtaaggttgaccttttaaccttttgtgtgttcacactcataaaccagtctataaaatagatcttttatattcaactatgcatttaatctgttctcaggtaataccttaccaaaaatttaaaaaggttttttaaaaaaacacaccaatcgttgtcaataaagtttatgaaaagaattaagtgataacattattttaggccaggcgggtcctcacactctgggaggccgaggcgggcggttcacttaaacccaggaattcgagaccagcctgagcaataagagggaacctcgtctctacaaaaaatacaaaaattagctaggcgtagtggtccttgcctgtagtcccagctactcaggaggtttaggtaggagaatcgcttgaggccgagagattgagatccaggctgcagggagccaaattcatgccactgcactgcagcctgggtgacagagcaagacactgtctcaaaaaaaaaaaaaaaaaaaaaaaaaaaaacacaaattatttaacatctcagattcctgtttttgtttgtatgcaaaactaccatctgattgcctaagcctgtagtaattattgtttaatatttgacatttcctgcatttccaccaagtgctttatgactttagttactttctacctagtaagtttgagacttgtggaagccaattgagaatgacagacgtgcatggggagttcttcaaaagctgtgtgtaaattaaatatttttaaaacgtta

SEQ ID NO: 244392 - DNA, 396 bp, Homo sapiens
aagcctgccactgacattgaagaaccaatatatacaatggacaaacaatccagtgccggcggggtgaagaggagcgtcccctgtgattccaacgaggccaacgagatgatgccggagaccccaactggggactcagacccgcaacctgctcctaaaaaaatgaaaacatctgagtcctcgaccatactagtggttcgctacaggaggaactttaaaagaacatctccagaggaactgctgaatgaccacgcccgagagaacagaatcaaccccctccaaatggaggaggaggaattcatggaaataatggttgaaatacctgcaaagtagcaagaagctacatctctcaaccttgggcaatgaaaataaagtttgagaagctgatggctgtgtata

SEQ ID NO: 244393 - DNA, 540 bp, Homo sapiens
ctgcactccagcctgggcgacagaacaagacaccctctgaaagaaagaaaagaaagaaagagaaggaaggaaggaaggaaggaagggaaggaaggaaggaaggaaggaaccattcttgacttgtgggttatacaaaaacaggcagggttccactcctggcactaggtttgttcttgtgtttgttctctgttcagggttatgccacgcagagggtaggaggggaattagtccatggttatgtgtcctcacagatgaccactgagaaggccaccatgcctagtcgtcacgactctaggcccagcaacttgctgaagactctgcagtgctggggacccaggcatttttgtgaggctgtccacaccctatctgcctgtgaggactgggcagtccatctgggggtctggctgcctctcctgcgtgctgctgggaggctaggcctgactgtcattgctctacggccacatccccagccacgctcttctttttcttctttcagccacgtcccagtctttttttaaaagtcagcttccattctaaaga

SEQ ID NO: 244394 - DNA, 586 bp, Homo sapiens
atctgtggcctggaccccaggatccaaccccctaaactccttctaggcaaccatcttgggcaacttcacccaatgacaacctatgctcctcctgttattgacagccctgaaaaaatggagttcaaggtcataggccccattggacctgatatcttcaccaggctcctgagaacccaactgagcagccctgtcctcagattccagctcggacataacattgggggtcagaaaactgactcccaaggtacaaactggaacagccagggtgagtgccagcacacaggatggcttcctcatcataggccagagtctggccctgggttagcaagttcagggcagcctacaagaggaatgagctggaaagagctgtggccaacccagggaggccccaaatacaccaagtcccaggtcctcctgctcttgtcacctttctacagtggtaagacaagacacattgtctgaacagtcccagttcagaacttctgtcgtggagcctgtagtgctgcaaaggttgaagacagtggcttatacccagctcagttctttattttctctctttctctccttccttccttccttccttctc

SEQ ID NO: 244395 - DNA, 843 bp, Homo sapiens
  misc_feature (817)..(817): n is a, c, g, or t
  misc_feature (831)..(831): n is a, c, g, or t
ctgcactccagcctgggcgacagaacaagacaccctctgaaagaaagaaaagaaagaaagagaaggaaggaaggaaggaaggaagggaaggaaggaaggaaggaaggaaccattcttgacttgtgggttatacaaaaacaggcagggttccactcctggcactaggtttgttcttgtgtttgttctctgttcagggttatgccacgcagagggtaggaggggaattagtccatggttatgtgtcctcacagatgaccactgagaaggccaccatgcctagtcgtcacgactctaggcccagcaacttgctgaagactctgcagtgctggggacccaggcatttttgtgaggctgtccacaccctatctgcctgtgaggactgggcagtccatctgggggtctggctgcctctcctgcgtgctgctgggaggctaggcctgactgtcattgctctacggccacatccccagccacgctcttctttttcttctttcagccagagggagccctgaattcatgcagaggagtttttctaccttccatctgcttctgcatatcatcttgtctacttaatgcccctccttccggatttatagaacagtatgcataatatgaccccaactgcattccaaaaaatagatgtagatgtaagcttagagatgcaaagaaactttttgagagaattcactatgcttctcgcgggtggtgacacagttcaaggaggttccatggggtgtaatgtttatctttctcttttgtccttctgatcattgaaatgatgctttgtgtgtgtgaacatgtattacttttataattnaaatagaaaaattnatttgaatggga

SEQ ID NO: 244396 - DNA, 1011 bp, Homo sapiens
  misc_feature (985)..(985): n is a, c, g, or t
  misc_feature (999)..(999): n is a, c, g, or t
ggacataaaataggaaatatttattattcacctaataaaaacataccaaaatatgtgaagcaaaatctgacagaactgcagagaagtaaatccaatttaatattcagagatgtcaacaatcctcttaaaataattgctagaaccaaaaccacagaatgtcaataaagatagaaaaaacttaaataacatcaaccatttttacctaatcaacacttgtagaaccccttcatcaaacgagagtacagtatacatttcaagtgaacatgtaactcataccaagatagcccatattctgggccacaaagcaaatctcaataaatgtaaataattcaagtcttaatgtactctgaccacaatggaattattgcagaaactaccagaaagataagctcccctatttactcgtgccgaattcggcacgagccactgagaaggccaccatgcctagtcgtcacgactctaggcccagcaacttgctgaagactctgcagtgctggggacccaggcatttttgtgaggctgtccacaccctatctgcctgtgaggactgggcagtccatctgggggtctggctgcctctcctgcgtgctgctgggaggctaggcctgactgtcattgctctacggccacatccccagccacgctcttctttttcttctttcagccagagggagccctgaattcatgcagaggagtttttctaccttccatctgcttctgcatatcatcttgtctacttaatgcccctccttccggatttatagaacagtatgcataatatgaccccaactgcattccaaaaaatagatgtagatgtaagcttagagatgcaaagaaactttttgagagaattcactatgcttctcgcgggtggtgacacagttcaaggaggttccatggggtgtaatgtttatctttctcttttgtccttctgatcattgaaatgatgctttgtgtgtgtgaacatgtattacttttataattnaaatagaaaaattnatttgaatggga

SEQ ID NO: 244397 - DNA, 897 bp, Homo sapiens
tgggagccacaccaccaacctccaccaagccggggccacttctctttgcctctgagagttgatacggattcagaccatccataatgaacacgcatcacactttgaagcagagaaaagcagacaatacagatctatgcacaaatcaccacgcacacttcacagtaagacgttgcagaggtctaggaaggctggtttgaagaaatacacagaagaaaaacggatggactaaccagagcgctcagccagcctgctggactggcacccgtggctacagacactcttgtttagcaccatggagagctccctgcacagaagcaaggactcagggcattgccccctctctacctgagaactagactcagcgcccagcactggatttgataatacaggtactcaaatacatgtgctttcctctttactcagacacttctagggctggcagggtcagacagtaatcccccactttgtggggaggccctgtttttgctgaacagctcaagggcaggaagattctttcttccacacacccctgcaactgccaatacttgttctgtgtgacccttgcagccatcctatgcggtaggtgctaccattgccatggatcaagtggggacgcacagatccaagctccttcacctctcaagggagttgggccctcccacagatctcttggaggaaaaaaatggccttgctgggcctgtcgatttccagtccccacccacctccctcatgtacatgtgtctgtttgtgaaaccttcatagcaccttagcttccaggccctccatcccggctgcctctctggcacttgcccttttactgtgcgggtccaaagagacacctatgttcagtttgtcaaagtctgaaataagcctgtcttttaatttcactgactccca

SEQ ID NO: 244398 - DNA, 459 bp, Homo sapiens
gtaatgttaatccttttgcaccaaaatatctctttaagtctaaattatccacttttttttttaattcttcgtagagatagaggtttcgctttgttgcccaggctgttcttgacttcctaacttcaagcaatccttctgcctcagcctcccagagtgctgggattataggcatttgccaccgtgcctggtgtacccagtttctgttatcaacagaatgcagtggtgtatggttgctaaagggtcccaagatcaggacctacgttaaggtggattttgaattatttaaaattctgattttgttttatttttaattaatctttgggggaaggatgggaggggggtgagggttgaagaagtaaacattgtacctattggatacaatgtttaatatttgtgtgatgggcacactggaagcccaaacctcactattacacaatacattcatgtaacaagcctgca

SEQ ID NO: 244399 - DNA, 244 bp, Homo sapiens
cccttagggagggcaatttggtaatatctgttaagattacaaatgcatataccctttgacccagctatttcacttctgggaatgtatcctagagttatcctaggacgcatgcaaaatgatatacctgaatatctattgcagcattgttaataatagcaaaagattggaagcaacccaaaacttccatcaataggaggcagttttttcatttcattagcttgcttttatggcttcacagtgggga

SEQ ID NO: 244400 - DNA, 307 bp, Homo sapiens
ttacaccactgcactccagcctgggtgacaaagtgagactctgcctcaaaaaatgaaagaaaagaagaaaaattaaaaaggctcacataatctataagtgtccgaagtgtcctttggaataaaataattttcacattgcagttggtattaaaggtaaaataaccccccctgtttcatttaaattaaatatatctcattaagaatgtttttaaaggaattttcttcttagaaaatgtctttggaacaattcttacagaagagtttaggatgttacattttccataatggctaacttatattgaatgtc

SEQ ID NO: 244401 - DNA, 507 bp, Homo sapiens
aaatatctcatgattttgatttgcatttccctaatgacttatcatgagtatttttcattgctatgataattgactatatatatgttctttgaaaaaatgcctatttaaatgtgtactgggttgaattgtattctctcagaatctcatgtccaccctgaaactcagagtgcaatttggaagtagagttttcagagttatgatgaggtcacactgcactagatttgaccctaaatctgattacttgtgtccttataagaaagccacgtgaagaaacacttctgcatacacgggaaagatgggtatgtagagatggaagcagaaattgtagtcatacagccacaagccaagaaatgctgaagaattgtcagcaacagctagaatcttagaagaggcaaggaaggatgctcccctagaacctttggaaggtgcatggccctgtctatgccttgatttctgacttttagcatacagcactgtgagagaataaatattttttgttgaaaaaaa

SEQ ID NO: 244402 - DNA, 317 bp, Homo sapiens
tgtgctaggcaataagggtgtgcagatggacaagatagtctgccacaggaacttatcaaggtggcctccacaataggtatgggtatatggaaacatatatccaaatctcaccaatctgaagtaattctttaccacagatttgtatcaccaacataacatgtatttggatagttcaaagaactggaagagctgggcatggtggcatgtgcctgtagtcccagctactcaggacggcaaggtaggaggttcgcttgggcccaagacattttgagttcagcctgggcaacatagcgagaccctgtgtccaaaataaaaaa

SEQ ID NO: 244403 - DNA, 455 bp, Homo sapiens
gtacatgtttattgatttctgtatgagcctggtaataagctcactaaattaatgccacctaaattgttccttggtttactaacaaagaataaccatatttttatggtccaaatgccaggtttacataagaggctcatcaagaaggaaaggaaaaaatggttgcaacttaagtgattttccccttccacttagtcctccgttcatagggcccaatagcttcctatcaagcatctcaaaatctttctgacacctggatttcaagattttccattacttaatgcatcctcttgaaagtatccccacacttttccactacccatcagcgggatgccattcagtaatggaagctacattccatgagagcaagaacctcatctgtatctctgtgcctgaaggagcctgacacatagtatttaataagtactcaataaaaatctgctttatgaaaatagcct

SEQ ID NO: 244404 - DNA, 659 bp, Homo sapiens
tcaggaataaatgtatatataatttgtgttacaattataataaactgcagctgttctttgatagatttaccctatataatttaacactgattatatggaagaatgtatatctacttcatctagctataaaatatttatattcataatcttttgatcttatgctttcttcttgaagtaggtaggatattctattgaattaaaataaatcctgtggggtttgactttgaatttgacctacaagtcaaaaaaaaaatacaaatattactctttttttggggagagtggtataaattaaatttcagagaagataaatttccttcagttcagctctgattttgattatttcttgtcttttgctggctttgggattgttcttgcttctctaatttttttcagttgtgatgttaggttgttaatttgaggtctttctaactttttgatatgggcatttagtgttatgaatttccctcaacacagcctaacactcatgacatgagtttacctatataacaaacttgcacatgcacccccaaaacctaaaatgaaaatgaaaaaaaggaagagaaataaaataaaaggcttagctttttttttggtaatctgcacaattttgctatgttcctgcaataaaataaataaattttatttctaatgaaatt

SEQ ID NO: 244405 - DNA, 395 bp, Homo sapiens
tgttcttgccaccagttaatgtgaatttgacacagtaaccttttaattcataatccgctagcacccaaattctttaaaaaaagatacagcttaatagtatgctgtagaaaatcatgtgcctagtgcattgtttgcacaaattgctaggttgtatgtaattgggtgttttctaccatcagataaattagaattcagaaaataactaatttagtaataataaagtaacttgtaaataagaagaaaagatttatatttctacagattatatgtatgaatatttaattgttttcaatttaaggacaccaaaaacataaactttgaggtgaacaagttcttatatattttataccatattatatatatataaaacactatactttattggaatttttatg

SEQ ID NO: 244406 - DNA, 585 bp, Homo sapiens
tgcttcaggccatctggatgtatacgtgcaggtcacaggggatatgatggcttagcttgggctcagaggcctgacaaaattatctatcacatgtaaaatatatttcaaaaaaaagtaaaatacagtagtgccctcacatccatggtttcactttccacagtttcagttaccctcagtcgattacattgcatgctgttctgagtagcatgataaaatctcgcaccattcagctccaccccacctgggatgtgaatcatccctttgcccagcatatccaagtggtacatcccacccacccgttagtcagttagtagctatctttgttattagaatgactgtgatgggtactgtgatgggtactgctcgtgttcaagtcatccttagtttacttaatgatggccccaaagcgcaagaggagtgaagtggcgattcagatgtgcatacaagtgcttcctttaaatgaaaaggtggaagttcccaactttaagggaaaaaaatggcatgctgaggttgctaagatctacagtaacaatgaattttctatccgtgaaattgtgaagaaagaaaaaggggctgggtgtggtg

SEQ ID NO: 244407 - DNA, 505 bp, Homo sapiens
gcttgcaaaagcttaatattattctgaagtcatcgtgcagctcagcgcattaggaaagaaagctcaacgtgcaaggtttggttaaaacatgacattagcctggaaaaggaaagaccttagggacccaggtcagttgcactctattatttccaaccctatattgctcaaattgtgctcttgccctcatattctgagacagccatcatcagtgtggaatcacccaacaatgattcatgcctcagctctgacacttttcttttctcctaaggtagggatttgagctctgagagctttcctgccccacatgaagaggtgcagctaagcagaagagaggactttttttcccccatagaaggaccacttaacaaatgatgaactctaaactctgacacaatgcactgtttatttatggtatctatctaggctattcatggtgttttcatactttaaaggcaagagccatttagagaaagcagatgatttataaacctggggacaactcaac

SEQ ID NO: 244408 - DNA, 270 bp, Homo sapiens
gatggattgagttttttttgctttttggctggtgtgaattgtggttaaatgaacattcttgcacaagttttatatggacacttgttttcacttatgttgggtgagtacctgagagcggaactgctgggtcatatggtaattctatgtttaacttattggggaaagccaactgttaactatggcggctacactatttctattcccacctcaatgtatactggtgtcattttttctatatctctgtcaagacttgttattttccatcgcttt

SEQ ID NO: 244409 - DNA, 402 bp, Homo sapiens
cagtaatataagtatttttgtcatccatgactaacttttaaaatggcaaaattataaatatctgtaaagtctatgcgcagttgttactgattattgtggcaataatacataaagaacatgttttttgttttattttccacccttatgttttatttataaaacaaaaatttatatttgcacaggaggagaattagcaggatgtaaaataaaaatgaaagaccccaatggggagaatattttaaatgtcttgcagggagtggaagaaagctttgcttaaaaatgtcaccatatgctaactatatacagcacttcaagtttatttattgttaaagcctcatgtaaatcacgtcattctgaaaatcatggaaactgcacatttgtgcattaaactatgtaaacaac

SEQ ID NO: 244410 - DNA, 451 bp, Homo sapiens
tgacatgaaatgaggctggcgagggtctgtgtgttacgtaacatcttctcgttccgcagtgtgggtggctaggcagatgtgatgactgctgttggcgtcggtcccctgacattgttggtgtgtctcaattgtgtgccagtccctgagacacccccacctcaagttgctcagtttggaccctcgggcgtcagtttgtttccctgtcctcacccagctcttccagtgcgtcaacaagcccagatggctttacctccaggttgagtcctcactccttcctctctcttgctccccaccccaacccccgcctcattgtccaggccacggacacgtccttcctggtgatccagccctttcagtagcccatccctcaatgcagtgttgccgccttaccatccatcccctagaccatccagtgcggtcactgctggcctcttgcggctgtttaaattga

SEQ ID NO: 244411 - DNA, 407 bp, Homo sapiens
agtactttaaaagcacatacagaaagatacacggatgtaatacctttaattttttaaaaattttcttttaacctcagtttttttctaaacaaaccaaaacttaataataatggcataggaattatttcaataaaatgtaaaatctgttagtcagttaccaaaaagcaaaacaaaagaccttctgcagtgcacaaaatattatgttggaagaaaacatttcctttagacctgtattgttagcatcaggccacaacaaacagaactcgagggaaaaaaaacttacatgagctgaaaatgagatgaaagtgagcattactattttacacattttaaaaggggagagaaaaccaaaaatggtgagatgcaataaaagttgaactttgggttaaaaaaattaaaatgtctta

SEQ ID NO: 244412 - DNA, 442 bp, Homo sapiens
agtttgttttccttgtttttttctaataagttctttctttttccaagcaagtggtgataaatatttactggtagctttagttagtaaagttctttcaaataacaccttgggtgtttgagcattggtgatttgttttccttgaagatgtcttatgtatctttattacttgaataaatatcatcatgtagttatttacctgaattgataatgctgtgcaaaggagctaaagtatcctctctaaaaatatttttttttcataattttggcctttcattcctttaaccatttcctctcaccaaaaattaaatcttaaaatttatggacagttactctaaacagataaatattctccagggatgattaatgtatgatttttttattttattatagatgcctatattgatggcacagttctcagggaacactctccacccacccaaaa

SEQ ID NO: 244413 - DNA, 325 bp, Homo sapiens
aatgaagagaatgccagtatcatttcacgaaaacttctgggaggaggaagtagctcccagtgaagcatgacttctgcagagaaggaagctaactctaggacatttattttatgtaactatagtctatagataagcaactgccacattataggcagataaaaatagtgtacattcgaaaaccaatttatactgcagagttccttgtgagttcattttatctgtatccgttataatccaaatgcaagagtagcattactttttttaatgaggcatacttctgggcttttttgatttttaagcatttcagagaataaagggaaaagag

SEQ ID NO: 244414 - DNA, 345 bp, Homo sapiens
agaaatcacacacatacactcacacatacaccgccattattgcagaggaacagagatcacacacactcagacacacttacatacacacccccattattgtagaggaacagacagagatcacactcacacacacacacccattattgtagaggaaaagcgatcacacacactcatacatacaaaccctcattattgcgaggaacagagatcacacacactcatacacactcacacatacagacacccattattgtagaggaacaaaaatcacacacactcatacacacacacacacattatggcagaggaacagagatcacacacgcttatacacactcacacaca

SEQ ID NO: 244415 - DNA, 2613 bp, Homo sapiens
ctggaactgcttcctttttgttttattatttttccccagatgagctgactgggccatggaactgcatccttatggttcccatagcaccttaccgaggcgcccttatcaatagagttttagttatgtacctgtgttcttgtctgaacccctactaactgtgagctcctgaggagtcaggcctgagtctgtgggtcatctagcacatccttaatagaatgattgcctggatgtgaccaccctcacccccaaccctcacacaccctgccagcatgcctcagaccttaccccagctcaagataagtctcagattgcaggatacctgctgcagggaacaaaggtgaatgattgtcttgtgagcctcctgttgactgattctgttttacatggctgcacagagcccttgtggttatttggggttggggtggtggcttctgtattagtcacttctgcatgaaccatttcactcaggatctgaggccacagttcctttcttagtcactgatacatctggcagacttgaaattaatcagacaaacattgttcatagttaacatatccttggaagtttctcagctataaggaagaggtcttggtggctagggaggcctttctctgtatcctgttctatccagtgagagcctagagggtgctgcccagccatattctggctagcctcagcggttctcctgaaaaaaaattggcatctgacaacctggatggtgactataggtagtcaaatccagctggctggtctcctgggggttagcttccatggagctgcaagtcccctgaaatgatactggcagtgttgggacagcgtgtccgaaggcctggttttttcagaactggtctcagcaaaatgtctcgccaacttctacagttcccataagtacatgataactgaaacacttctagagccccccagcaatgggcttgtgcttttagtagaatatgtgcttgcttccatttaggggtaagaaggtgggcccctcaccatatgctgcacagagaagagagacaccatcactcatttattcatttaacaagtgctttccaagccactactaggtgccaagcacttcctaggtcctggggatacagtggagactaagatggagccagttctttctcatagggatctcacagcttagtgagtgagaaagccaaagagtcaaaatacagagagggtctgaggggcccattttgagagccatcatagtggtgaggagtgtgagtgctagagtcaggctgatcaaatcccagcctgccattggctagccttgtgactttgagcaagttatcttacttcgtggaacctcaggtttctcatccataaaatggggaagttggatagggtattatgatgattgaaatgcatttatacatgtaaagcataagtactggctcagggtgagcactcaataaacggcagttatacctacttttattaggaagtgatacaccttgagcaaaaccccttagagtataaggcatagcattcttacatatttttaaaatttaaaataaaatttaaaacatcttgccctttataatcagtccgccacaaacaagagatggagaaatcacccttccttgttttgtatctatggggtgcaaacatttaatcctcccaactgtcaaaaaagtgagagtttcacagcctgttttacagcagaggaaactgatattcagagaggttaagtaaatttgcccaatgccacacatctaataaatggctgagctggaatcaaggccagctcttacttggctgcaaaatccatgttttatgcagctcctccactatcttggcctccaaggcagctggctttgaacactacccttgcagcccagtcagccaatcccttgctctcctgaagcttttgctggtgggccagccccacctgctttccttgtgcactctgacttggaccctgaagtgagaagagttggcacaggacatcttacttccctgaaaacagtacctggacttttctgtatcttcacatccattgggcattgggcaaatgggtcatgcagatgaaaaccatccaagataagagacatgggagtgaaattcacacccactctggctttcataccatgggtctgaacattagcccatggtatttcttggccatactgacctgtgccattccagctgcattcatctcagttggtgttgtctgctggctgctctttctgatttcccacaggagcagtaagaacctgaggaagagtagggtcagaggagtctgggagaatgaggaaatatgagagccccaggaactgaaaaggcctgtgagagactctgagcttcctgggaacaggcgcagtggctcaagcctgtaatcccatcacttcgggaggccgaggtgggcagatcacgaggtcaggagatcaagaccatcctggctaacacggtgaaaccccatctctactaaaaatacaaaaaaattagccaggcatggtggcgggtgcctgtattcccagctacttgggaggctgaggcaggagaatggcgcgaacccagggggcggagcttgcagtgagctgtaattgtgccactgcactccagcctgggcgacagagcgagactccgtctcaaaaaaaaaa

SEQ ID NO: 244416 - DNA, 627 bp, Homo sapiens
ggagggagggaggaagcaagcaagtgaacaaatgagtctgggatttaggacttgccagacaaacaaggcccaagaggcaagtgtgcaggtgggtgtagttgggagtcagcagagttgggttggaattcaagctttgccacctgctggctataaaccttggttgggtaagtaacccaaggtaaatgagatcatctctgtaaaactcttagccttgtgcctggcacatagtaaatgcttaataagggttcactgttagtattactgttactgataacatacaaatagattgtattaatggaccataattgcaactgtataaaacaaattccatgtttggccaggcgcagtggctcaagcctgtaatcccatcacttcgggaggccgaggtgggcagatcacgaggtcaggagatcaagaccatcctggctaacacggtgaaaccccatctctactaaaaatacaaaaaaattagccaggcatggtggcgggtgcctgtattcccagctacttgggaggctgaggcaggagaatggcgcgaacccagggggcggagcttgcagtgagctgtaattgtgccactgcactccagcctgggcgacagagcgagactccgtctcaaaaaaaaaa

SEQ ID NO: 244417 - DNA, 432 bp, Homo sapiens
agagtggtggagaaacaacggaaaacccacgtaagagagagccagacagattgagagtggcaagaagaaacagaaatggagaaggagcaaaagagagagaaaggttgacggtggacgggcagactaagagtgtgagcaagggacatctttccttgcaaactccatggtccgctgcccagtaactctccaaggctttgccatatttcagccacggaactggggaattgggaaagttttctcatcacaggtccgggacgagtgagcattgttcccattattgctggcattctctgcgaactggacattagccagcaggaaattcctgggacaaatctttccactcagagtttttttaaaacttttatttatttattttaattttttttctttagggacaaaagaaaaaaaagatcaagaggcaaaaagaaaaag

SEQ ID NO: 244418 - DNA, 336 bp, Homo sapiens
cttgcctattcaatactgtttctttgacttctgtgtctgtttttaattgttcagctcttctctttccacccacatccccaaatatgcagtgagtagccgttgggtttcacgttgtaattggaaaaggtaaaagccagcctgaaaataattctggcctgttgggaatgttggcttcatgttttgagaatttccctcgtgtccctgacttcagagttaactatttctttaatgaggactaacatgttagtgttgtctctgaactttatttgcagtaattcactaatggaagctttcacagccaactctggtaatgaatgtagaacagcgaccttctgt

SEQ ID NO: 244419 - DNA, 595 bp, Homo sapiens
actaatacctctttcagggttgtagtgggttgaatagttagtggccctcaaaagatatgtcagcatcctaacccactcaactggtgaatgtaaccttatttggaaaaagggtctttatagatgtaattaaggaacttgagatgatcctggattttccaggtggacactaaatgcagggacaggtgttcttaagggaggaagagcaggcagccatgggaagacagcaagagaatggaggtatgcagccataagccaaggaacacctggagtcaccagacactggaagaagcgaggaaagattctccctagagcctttggagggagcgtggccctgctggattttcaactttagcctccagagctgtgagagaataaatttctcttgttttaagccaccaagtttgtggtaacttgttagagcagcctcagtagccactaaataaagtccagttgattagggaaatctatctggcttaactaatgataaaaacaaatttaagaaaataattcctttgggaggccaaggcagcaggattgcttgaggctagatgtttgaaaccagcttaggcaactaagcaaaacgccatctctgcaa

SEQ ID NO: 244420 - DNA, 536 bp, Homo sapiens
ttcaacttgttaaattcagtgcagccctgttccattgatcagaatcctatttaagtatgccttccacagcgtcacccaagtcatgataaatgcgtatcgaagggacccctctgtcacactcctggagacctcccctcagtggacttgcgatctttgaccgactgactttgggaagagtgattgaagccgcccctagcctagtctctgtccttttgcttctctgacctaagacgcctttctgaagctagataggccatgcccattgcagttctgcatctactatcaagtgcttcatcaaaaaggacatgaacagccttaacgttacgtgttctcagctcctcgagggctccaaggttgctttcagctgttcctggggctgctccccagagattgcaccaggcagcttagcatctcatctgtgaacgttttccgtgctctgggaggtcactttcccgggctaggggacttgaagtcattgcaaatgtctaaatatcctttttaaaaaacaaaacaaaaacactaaacccctatctcca

SEQ ID NO: 244421 - DNA, 597 bp, Homo sapiens
ttttttttcttttgattgctcttcctctttttacttctggatatatgtgagcaccaagaaggttttcatagagccatctcgccgccaatgccaacagctccaggtgctaactcagatgtatgagtttcacattgcacaactttagctcaagcatctcttctgagctctaaaccacattttcacctgcctatttggtgtctttttgtggatgtacaaacctcacctcaaactccactccatacttccaaaactctacattttccttgtctcacagttcggctcctcagatcaccaagcaccatgatttttgctttaagcagctaaagcacttagagaaacacctccacaggtttccattgcacttaactgtcacactttcatcgaagagatggtcataaaaagaaaatgtctaagcatctgtaaattcatttttgaaggcactcatcatgttgtttcaagatcttgctaagcttaggtgcttgaacattattcctgaatccaggaataagaaaatttgaggttgagtttcaactctaaaatttagcaagctttgcaagtttaaagtattatttttttgcctttgaaattcagtttcct

SEQ ID NO: 244422 - DNA, 1591 bp, Homo sapiens
  misc_feature (5)..(5): n is a, c, g, or t
ctgcngtattcacaatagcaaagactctggaccaacccaaatgtccaacaatgataaagtggattaagaaaatgtggcgaagatggccgaataggaacagctccggtctacagctcccagcgtgagcgacgcagaagacagttatctggcactggaactcaaatccagattggaacccttatctggcccttggacaaaacagtcaatcctttctgcatgcgtagaaacctttgtctgatcttcagttgacttacttttttgggtatttggtggcgagttcaacttctggcctaacactgtgtagaaatttgcactgaggcatggcgaggacatattttcttcctatgtttctggctgtagtctctaaggctgggttataattccaggctgcttttgaaagacatctcctgggctggctgtttatcttcctggctccctgttttcagtgggaattcacttcctaactcctgtgctggaatgttcactctggcttcttgtgagacctcttcattctatttgaacttactcttcccacaggaactccacagttaaaccccttttgggttcctactctctatatatactatgacactaaccatgtctgcttctattttaggcaaaatgactttactgtggataattcggaactgcaatggtttatttgaaaatcttaagatctgcctaaagtggctcttataggactgctcccttcccatttccttcttttttccttctttcttttaccatcttaactttttccattgaactcccctgacactttgatatgcacctcttttccattaaacacccctgacttttgatatatacccatccttttacccctaccagatgtttcacttacctctttagcccctcgactccctatagtcactggaacgtatgcctcctgattcacagggggttctcgagagactgatgcacacacaaagcaacacacggggcttcctggaaacagagatataatctacagcctgtgtaagattacattttaggtgaaaaacccacaaataccccaaaatatgttactaattaaaatctgtcctcactaccttaaccagtgtctgggctttacctttgaaactggtgtccttatttaaaaaaagttggacatgcacccaggaatattatcttttgaagataaaggaatagattgaagtaatgctacttcaagccaaggaatgccaaaggttgtcatcaaactaccagaatgctatggtacgcatagcaaatgaatacatcagctttcaacaacatcatcaaaaattacaagtcatggtagcaggcaaaaaatatgctttaaaaagaaaaacaaaattagaaaaggacttggacatggcaagccaatcatgtgatttcttgatgtttcttctgtgttttctgcctagaaaaacccactgcactcactgctgggtggatctatctgaacctcttatggctctgagtgccatctgaaaaagatgatggttccctttaccttgagtcgttttccccagatacactagaacccattatttcagttcttttaggtctcttctgtgctattcgattatcagaaaagatttcaatgacc

SEQ ID NO: 244423 - DNA, 300 bp, Homo sapiens
gaaatctttacaaaatacctagtaagactttttacttcctaagtttgttatgttttctgtttactctttacttttaacattgttgtgaaggagtgagtatacttccagaaatctgaacagtaatgaaaaatttcagatttttagatgtttttgcctcaaaaattatactgctgttacaacttgtttattggcttttaataatgtgtctaatatagattattacaatattatactctatattaataaatatagagtaatttatattaatgaatatttttccatttgtgcaagcgcagtgcc

SEQ ID NO: 244424 - DNA, 1008 bp, Homo sapiens
cgcagtggctcatgcctgtaatcacagcactttaggaggccgaggcgggcaggtgatcacctgaggcgggagttgagaccagcctggccaatatggtgaaacctagtttctatttaaaatacgaaaaattagccaggcgtggtggctgtaatcccagctacttgggagactaaggtgggagaatcacctgaaaccgggaggcggaggttgcagtgagccaagatagcgccactgcactccagcctgagtacaacagagactgtacttaaaagaggtatcattccaaaaccaccaagctcactagaaaaggtgcaataagatgctttactgataattaaatatgtggactttcagcctaaagacagtttacttggggagtcactggtaatcagaacaccgatgctattttggactatatggtggtcctgtaattgttagagaacaattattaacataaataaaatctaggaggttggtttagcagttagactgttttgtatttacttatcaggttcattcatctattagcattgagaattttgactagaatttcaaaactaagaaacttagaataaatgaacacctattctaaaactttttaaaatggagttactcccacaaaagtagattcatgtattagctaacatctatgtgattcaggttaactcccaattcatgcattaacatggtaatttagggaaatttgggaataacttggaataatgctttgtggactaatgagagcttgatagttttcctcctcagaatataagaaaatatatgcttcagtgttagcttcctcaactttcaagagtcatatttaccgtctttccctcaaagagctatcacaaaaataatgtaccaaatgttcatacatgtaaggtattacagggtgaagtaagtctactttttaatgcaacatttattcttttgtgaaaataaatctccacataaaagcatgaatgaaataacgtcaaaagtcctctaggcagaattttcccaaaaaaa

SEQ ID NO: 244425 - DNA, 944 bp, Homo sapiens
agtaacttcctttttttaagaagaaaagcatgcaaccaagtaacttttttaagtaaataagatcataacctaatatacagctcaaaattaacagtgggtttgaattctagcttatttttttttcagtgtttcagaaggaaaagaaaagatttaagcaggccaaaacagtgactgccttttcgttggagtcaagtaaacttgagtgcctctgtgttaagctcttctacatactttttttcgtcgattcctaaaaaatctgtagtgagtcattatttccattttacatttagagaaactcaggctcaaagacagtaacttgccccataccgcacaattagtgacagacctggattttgagcccaggctctttcaatctaagggccctgtgctctttctaccagcctttcccttttactgtcactggcaataccaatagctcaaaatgacaaaaattaaagttttatattctccccaataggattccttaattgtcttttcatgggctctactctttttctgaatttcttctgttgttcaaacaatactaccatccaacgaagctcacttttcagttctatcagacatttgcattataaatgcatccagctaagagaagttaataagagactaagaagctgtaagacaaaactgacagaagcagtaatctaattagtcagaaagacaagactaaggtcaggcaattcaaaaacccttcttttttcctttattagaggccaactaaggcaaggaatataccttttagatgatccctaatatttacagattaaatccaccaagatatctatttgcctgtgcaagagtcacagtgcacacatgaaacatctctagtgaatccaaagtggtctgaggtccctccgtgccttcctctcactgttcacaacatctgctgacttgttacctacagcctcccctattgccagctc

SEQ ID NO: 244426 - DNA, 318 bp, Homo sapiens
tgattttttcttttgcttgtggcactggctcatgcttggacatttacactctttatttagcaagaaagcatttgaaaggtacctttcaaatattggaggtaaacaaaggtcagtctttcctaagcaagagtagcaaaattaaaaatatgttaattttaacttgccggttcacagattgatgtatcctccattcacttgattactttttttgacccacacctgaaaacaaagctcttccagtcacttgaagatgaagaaaaagaaaattttaggtacagaggcgttctggtggtatgagaatgagctgtgccatggttt

SEQ ID NO: 244427 - DNA, 666 bp, Homo sapiens
ctctcttgcacttacagcttttgtcaaagtttcctccttctactggtcagaattagtgaccaaactggacatagatccctgtagaggtcttagtttctcaaagagtgggagaagaccatctgctccagggaagctaaatgaaatgaagattccagggcctatccagaaccaacgaatcagaagccctaaaactagggatgcgagatgtgcatcttatcaaaccactggcccacgagctcctaaaacaaccttaggagagccagatttctcttaccagaacattctttgtgatttcaagtcaggggtctgtctcatgcctccttcttggtctggggtaggaagaagaattgtttgttgggggacatctcataactaaaatcttgcaaacccagggcaaagttggagcctggcctcatttgcatgcaggggatggcatcagacctagcttgctatcttaatgagaagtcagtgtccctttcttcctcttaccccaccctttcctgggccctttcgaagggttgccaggacaccaggactggtatgagatgactgctcagttgtggttggtggccaggattctcgattgcaagcattctcaaatctaaggatacttctggaattgctggcatacatttatgtttattattgcattcatttttccaaaat

SEQ ID NO: 244428 - DNA, 516 bp, Homo sapiens
atgaaatattatgatcttgcaaagtttactatttatcaaatagcagaaatggacaaaggtctcagtgagttgagtcctatgcagcaagcccttatttattcattttgtgaaaaccatgacaaggccattgaggtcttggacggaatcagctggaatagagctgagatgaccatgtgtgctctattagcaaaagttcaaatgaaggccaagagaaccaagggacgtggatggagctggaagccattatcctcagcaaactaatgcagaaacagaaaaccaagccctgcatgttataaatgggagctgaacaatgagaacacatggacacaaggaggggaacaacacacactggggcctgtaggaaaaagggtgcggggagacagagcattaggaaaaacagctaatgcgtgctgggcttaatacttaggtggtgggttggtaggtgcagcaaaccaccatggcacgtgtttacctttgtaacaaacctgtatatcctgcatatgtaccctggtactt

SEQ ID NO: 244429 - DNA, 476 bp, Homo sapiens
agattgaaaagtcatttctgagaaataaatataggagcacaaaagactcaatttcttcaatagatgaaaggcatgaagaaaagagaggaactgctgtggtttaaaagagacttaagagacacatcacccaaatgctacgtggaccttctttgggtcttgattcacacatgataagaccattaaaagatattctggagacctgaagtcaatgaaaatagacttgatatttgattttattaaggaattactattatgttggggtgataatgacatggttgttttaaagccacttacttgttaggaatgcacattgaattgtcctatgttctatgtttggtgacttccaattatggtaacactatgtgccacgtgcttgctgaacaagacattcgaggtccttgcccccatggagctcatggattggtggaagagacagatgttaaataaacatttgcccagggaagcatttaattgaa

SEQ ID NO: 244430 - DNA, 449 bp, Homo sapiens
caatgaatactacacagctataaaaaataacatcatttcacttgcagcaatatggaaggataattttacactttatgtcttagtctgttttgtgctgctgtaacaaaatacctgagactgggtaatttataaaaaatagaaaattattttctgatagttctgtaggcaaggaagtcaatgatcaagataccagcatgtaatgagggccttctgttgcactctcagatagcattagtttaaatggcaagagaaaggcagaactctatttgagagggctgttgcaaccttacagcatgatacatcttgtgaaatatggttttgaacatttttattaaaaatgtaggcatcaaaatctctaccatttgtgtcatgttataataataactataaaactgcattattcagaatatgtaacaataaaaattaatattaaaaagttttaaaatgta

SEQ ID NO: 244431 - DNA, 248 bp, Homo sapiens
tcgtccacctagaacgggccccaggcctccagatggtgagcgtttatgggatcccgaggctcccctcccccacacccttattttccagatggggaaaatgaaggccagaaacaccctgttggaagttacgctgcggatttgtggcagggccagtatgagccctgtcactaaccccttcacccgctgtcccacccacctgtgactgtcctcagacagaggctgccccgggggagagggctcccaccacc

SEQ ID NO: 244432 - DNA, 153 bp, Homo sapiens
acttcattctatattaaaacatcaatgttgtacaccttaaatatatgcaattttagaagaagattctttgagtagctatcattaaaataaaggctttgcttttatatcctcagctagatttttcttttttttttttgagatggagtctcactc

SEQ ID NO: 244433 - DNA, 787 bp, Homo sapiens
acagggtctcactgtgttgcccaggctggttttcctggcctcaagctatcatcctccaggcctgggtctccagtagtgtggggattttctgaggaataaatcaagattctaattctgcacagtcaactccatatttttaacatttaagggttctactcatgtatagtagaaccataccccctggtagaaacatacctccctttttaaggcaaacacaaagaaaatggatcaatactcactgtatcggtttaatttccacaactgttatttcagttaacatagatctaacattccaataataaccaactctgaatttgcactactcccattatctttgaggtgtatcacagaattctcaagcccaaatttatttaaatccattttaattcagtatgcccctcatgcttcacagcattttctgggaagataagtgaagtgagaaaaatgatggcaatgacagattgtcaccagttcagaagaataatgaacaagcatgattggcagaaaggctgcgagctctgagtcagaacgactgaggctggaccaccccaatggttcatagtggttagttaagagcacagagaccttcctgaaccaggctactggagtgctccattcccagctccttcagttactcacaggatgaccttgaggaaaggacttcacctctctgtgcctcacttctccctattataatagggataataataccaactacctcgcaggatttttaagaagactaaatgaataaagtgctttaaaaaaatgtttgctgtctcgggcaact

SEQ ID NO: 244434 - DNA, 544 bp, Homo sapiens
  misc_feature (39)..(39): n is a, c, g, or t
gtggctctcttcaggcactggagatagatttctttcagnctgagcttcatttgcagataaccctgtgaagaaggtattactcccattatctttgaggtgtatcacagaattctcaagcccaaatttatttaaatccattttaattcagtatgcccctcatgcttcacagcattttctgggaagataagtgaagtgagaaaaatgatggcaatgacagattgtcaccagttcagaagaataatgaacaagcatgattggcagaaaggctgcgagctctgagtcagaacgactgaggctggaccaccccaatggttcatagtggttagttaagagcacagagaccttcctgaaccaggctactggagtgctccattcccagctccttcagttactcacaggatgaccttgaggaaaggacttcacctctctgtgcctcacttctccctattataatagggataataataccaactacctcgcaggatttttaagaagactaaatgaataaagtgctttaaaaaaatgtttgctgtctcgggcaact

SEQ ID NO: 244435 - DNA, 270 bp, Homo sapiens
taccccactttccctacaagacaaagatcacctctgttgggttcctttttcatagtagctccagctactaatagaatgatctgcgtaagactgatgatcaggatgctcagtatttgtgaaatgactaccttctttcccctctttaagacttcattccctccctttacataactattaactctaagagaatggattttaaccccagatgtccatcagaatggcctacagagactttaaaacacacaaattctgattcagcagttctagggt

SEQ ID NO: 244436 - DNA, 306 bp, Homo sapiens
gtgtaagcaagcccttactgtggaatgtcattttttgattccttactaaccgtcgctacttcctagtctttcaaaatggtattttaggcctgaaaattaattctaagaaaatagttcaaatactagaaaagttgtggccgcaaaagtgttgattccactcttatgatagtgaaaattgttaggaaaaaaacacaaatgcccaacattttggaaattattaaataaattaggtccatcctgaagttggaattatatgaccattaaaaattacgctttatgttcttacacagaaaggtggatggaaaa

SEQ ID NO: 244437 - DNA, 382 bp, Homo sapiens
ctccagcttctcatcagaggttggctctattcaacagcttcagcccagaggcagtgacaatccaaggatctgccctcacgcgggggctagagttggctagtgggaaggcaggagggattaaaaaaaagtcagcaggcaggaaacagctgggctgaagggacattatgtggcaggcaagaggcaagaggtgccactggcccgagctggggagcaagagtgggtgatgcccctcccatcacacgggactggaagacccagagaaagtgaccatctggacacctgagccccgcaaccttggctctgccactaattagaggagtagctcggctttgagaaaaaaaaaaatttttctttgagcaaagtttttctcatctgcaatgac

SEQ ID NO: 244438 - DNA, 516 bp, Homo sapiens
aaattggaagcttggaattctatgcttacatgattgtagagtgattttgctcctcttccttctgttgtaatgatacctgacctacattttaagattttagtttagtaccaattatgataataaataaagggctcaatcttacatgtgcagacaaagcataactttgttaggaagctaactagatttttagacactcaagattatgaacaatttttctactcagccaaagttaccttgtattatgagccccaccctcatcccaacccaacaaacatgaatacgtttagtatcttgcaaatttttgtcttgttaaagacaaggtagagctatttattatatatctttaacccagcacgtagtacccaattcttattagtttactctattgcagtttctacttttctttatttcatagtttcaaaccaggatcccaggtctttcctggtgatactagttcatggactaacgaggaaaaaaaagacaatgagagaaaaaaagactaaaacgattctcttt

SEQ ID NO: 244439 - DNA, 685 bp, Homo sapiens
ttgagactgagtcttgccctgttgcccaggctggagtgcagtggcgcgatctcagctcactgcaagctctgcctcccgggttcacgccattctcctgcctcagtctccccagcagctgggactacaggcgcctaccaccatgactggctaatttttttgtatttttagtagagacggggtttcaccatgttagccaggatggtctcgatctcccgacccacccgccttggcctcccaaagtgctgggattacaagtgtgagccaccttgcccaggctctttttttttttttttaactacttcttaaggagcagggctacaccataggcagtgtgcctagagtagcccaatatcccttttgtgccaaaagaatctttttgagtttaataaagtaggatttttttttttaggaaaaatattaaaagacattctcaagcataaacttgcaaactagagaatgcaccaacggataaacatgaggaatattaaattgctgaaatgaatagaaatccctgtgggaacgttgtcttccactgctctctcctgtaacaaagcaaaaggtagcaaatctgctgatggcttgacttcgtgagtcatgtagcctccttccctgccctggttttggtgctaaccgtgccctcatctcttccaaaagacattcagcttctgacttgagattgcacagg

SEQ ID NO: 244440 - DNA, 402 bp, Homo sapiens
atgctgctgcaacaatactgcaactgtttttctacatctatatctctataataaatttctagtggttgctggataaaagaacatttgcattttaacactgatagctgttgctaacctccttactgtacacacacacaatgccactgtatacaagccatgaataacaagccaaactgaattgccatttatctgcaatctaccttctatcccctaagcctttctttcctctatctattgataaaatgtctccccccatccattctactgccattactaaatacacaaatcctgacaaattctttaaagatttaccttgccaggtgtggtggctcacacctgtaatgccagtatcttggcaggccaagacaggaggatcacttgagcttaggagttcaagaccag

SEQ ID NO: 244441 - DNA, 233 bp, Homo sapiens
tgccaaacattttgcaggagtttctcaccagcaagttcttgtgttagtttattttaccaacatcttttgtccggtttttctttagtaaaagtatttataattctgtattatacttccataggtagatcattgttgaaagtccagaaggttgagcttccatgatgtaatatgatatgaaatcttgtattgctagtggcatttggtaggaaaagggatggggagtggttaaaggt

SEQ ID NO: 244442 - DNA, 437 bp, Homo sapiens
tgaaagatatatacgaatcattgtgatgagttttaagaggttgctgagttcaccgttattttctgtgtcatttctatgtttaccgcctcagatcctgaaagaacaaaaactatcaggtgaggcaccatgacattttgtcacattaaaaaagattcgtaatgttggatcatgaatcagagaaggaaaaggagagaaaaagctggagaggcagaagggatttgagaaagagggtgcagagaaccaacctttgaagcaaaagccataatgagaactttgctcctgcccctaacatgacatctcacttcctatgtttcaccccagcagggctcacataagagaattttaatttgattcatttaaggaccactatcctgattggtcaaagcagaatttgaacttgaattgtactagaattgtttgagaaccacattccttgt

SEQ ID NO: 244443 - DNA, 545 bp, Homo sapiens
caatacagtcagttagggcaagaattatgatgtgcattttacaaacgtatgaactcaggtaaggagcagtcaaattgcccacttagtcacacaatcagtttgtggtatgagtgggaataaaacccagattcctaattccttgtttcctttaacgtggaacaaataagcagttcaagggtaataaatgagtcaatgagtgaataaaataactctcaatgagtcccacaagtgcgtgaaagaaagagcccaggtaagctgagaacctgatactccatctactttaatcaccatcctttccagacttaaagaaggattgcccatgcacaggtagtgactccttaaaggcacaaatcatgactgaatgtgttttcaagtccagaacagaacctgacaaaaatcaagccctggagtttgtgctcaacagatgtgtaatcctctcagtgtttccagttcttaaatctcttccttcccatcctatcactcaggagaaagcacttatgaccaaattctgtaagaatttgggcagaggtgaaaaacaaaaaaac

SEQ ID NO: 244444 - DNA, 407 bp, Homo sapiens
aattggaatatagggcagaactggaactttgcatctaaacttggaggaaaacagagcttggaagaccgacaagtgaacagttgatagtgtcctgttctcctgttgtgtacactgccgagcatctcctggtagatggtgtcagaactgaattagaggacacacagctggtgtctgctgctttgtttgtgggggaaaaaaacccatgcatctggtcacggaagtcttctgtgctgatgattgtagtggtgtgagtgcagaggaaaatcacggttagagaaagttttccctacacaagtaggctaggaattcctgtgtgcaccatctccatcacctttcacgttctcctgccttggaggaactgtggatgaaaatgactacagaataaaggattattacttcagacgaga

SEQ ID NO: 244445 - DNA, 819 bp, Homo sapiens
cttctttttctgtacctcttttactggatctttcccattagaaattgagcataatgaattctctgccatcttacaggggaaaaattcaatctgttctcatctccttttctcctttcagccactgacctgtcttcttcctgtccagaaggccagacttttctccagagttgtctctgttctctttctccattttccacttcttagacccacctcagtcccctgcagcgtgtcttctcctcctattactccactgacatagcactcactaaggtgcccattgacttgatattgctgaatccattgcacgtatttgtctttaattgacctctcaccacctttcagctctgctccctcttgacacttgtacacactgctgattttcctactgactttcaggctgtttctttttggccttctttgatggcttcttctctgcccaaccacagaaatttagtttgtctaggaaatctcattaacttggctttgttaatgctggtgattctcagtctcttatctccagtttggattctctcagaacccagtgaattgcacactctctgctgaaatctgaagtctgtgcatatttcttaactcctccctctcactgttaccaaatccagcctgcaaccaagtgctgtttttttttgtttttttttttgtttttttgagagaagtctcgctcttgtcccccaggcctgagtgcaatggctcgatctcggctcactgcaacctccgcctcctgggttcaaacgattctcctgtctctgcctcccaagtagctgggattaaggcacctgctaccacgcctggctaattttt

SEQ ID NO: 244446 - DNA, 657 bp, Homo sapiens
tactccagttttaattttttacgattctgatatccatagagagatttttcttttgtaacacactagctgtcagttccttgaactttttcctctctaaggatcccaccttattgctacaactccttcatattcacaattgtgtgcatattactctttgactaataccttctatctttctagctcatttcttatttcagcaatccttcaacccttctgagacctaggacccattgatcctgtcaccttttctggcttttataaagcctctgatgtcctctctctcccctgagttccatggtcagtcattctcatcactcctttgcatactgtttccttgcccttcccttgcttcatcatacacacttggcaaagtgatagctgaagtgaatcttactctttatctagtctgcccagtatctatgcagcttaatgtatctggagaaaattacacataccatgctgcctggtgttaaacaaatggctgcaaacctcatatcagcccataatgctgcttggcaatcacaaaacattttcccacttcagttactgtcccactctcctggactagtgcttcacattctatctgtggtaaagtaccagtttcctctccacccaccttgttgtgatcaataaaatacaataaagtggattgttaag

SEQ ID NO: 244447 - DNA, 644 bp, Homo sapiens
cttctaattgccacttggattgtcctttacttataacattagctgttggcggactgttcttgtttgtttgcaaggctgaggtaatttatcatgttggcagaagacaagaatgtaggtagaagagagaaaacaaagagtgccagctggcaaggccactgtcgattcatcaaatacttctttagcaatgcttcatatcaggcagtgtgtccgatgaacatgatatgattccttttaggaactcaccatttgttaggtgacagacaaaaagaaaatgatactatagtaagaaaagagcagcaccagagcatacacaaggtgcagctgctacacaggggtgaccatttctgctttggggatttagggaaggctgcacagaatgagagcactgagctctcttgaaagataaataggatctcatcagtcaggcacggtatagatttgtgtgcctggcagaggcaagagctgatgccaaagggaggagttatgaaagttcatagtttggtagtgctggatgggagggtttgaaataacaggcatcctgctgacccaggcaaagggactcagaccatgaagggccttctatgttatgctaaggaatatgggactattatgtcttcttttttttttttttttgagagagtctc

SEQ ID NO: 244448 - DNA, 478 bp, Homo sapiens
ctcgctctgtcacccaggctggagtgcagtggtggatctcagctcactgcaacctcgccacccgattcaagcaattctcctgcctcaggctcccaaggagctggggctacaggcgacgtgccaccacgcccagctaattttttgtatttttagtggagcattaagatgtattctgaagtcacaattgtacagccctctttttttctgaacatcaaaaataaactgctaatatgtgggggctattttataatacaaagttaaaatgcaaaaacaaagaagttgacaagggattgagagtctagatctcttgccaaattcttcgctactctacattctagataacctattaaacctagattacctagttctgataccatctttctgatctgtatgactataagaatttaattttcctagttattattatcagtactaatttccctccttactccctttcccctgcctgccatctctctga

SEQ ID NO: 244449 - DNA, 413 bp, Homo sapiens
ctagctaaccagcatggagatctgtctaaccagcatggagatctatctaaccagcgtggatacccagctaaccggctccctgcccttgcttttcacctctcctgtggaatggtctgctcatggccctctctagtgatactgctcatcataaaatgtcagccagaacttccagtttactatcctatggctctagttaggcagcggtgaagttactcacagacagcataattcatgacaaacctgtgtaggtgagaatcaaaccagtgattgggaagaccagagggtcccaatgaggccagccacagtggctcatgcctgtaatctcaacagtttgggagattgaggcgggaggattgcttgaggccaggagttcaagaccatcctggacaacatagagagaccctcgactctac

SEQ ID NO: 244450 - DNA, 618 bp, Homo sapiens
gccaggctgatgggagtccctgagccagagttgcccattaaaggaatccccatcaggcaggaatggcctgatttgagtatctccactgtgccaccagtcattggtgggagaggctggaggctattggtcagctacactctccacaagaggttcttctaacaggacacctgaaaagcacatctccatgcccctgccccataacagcatatcaaaaacccattactcatttacagcatttgctgtgaggataagaaacatttccatcatatatctgtacagtctataaaaagtcttatttgagaaagtcttcctaagtgtctcaacaaacttggtccctataaaaacttcttccccaaatacaggcaaaatttcataaggacttggcactctgcatccccatctgaggcaatcttaccaaatgtttttctaattgtcctcaggaacctgttccattttccagttccagttgctgtggaatttgcctttctacctagttcctgctggacgtgaagctgggtatgctttattggctcccaggtctgacttttccccagaatactgtcattgcttctgtatttgtctcatgtccccaaagcctcaggcagccctgccctgttc

SEQ ID NO: 244451 - DNA, 402 bp, Homo sapiens
ttgttttccctaagtcttcaacctggtttcctctgtgcaaaggccccttgtgtcagcggagcaggggagggtctccaggtggatgaaaattgcactgtcaggaatttgtcttcctgggcagctgtgggcaagggtgggggcctggagacacaggttcaggctcagccccagcctctagcctatcatctgtgagccacatgcagggagagcttgtcctttggatgggaagtcattgtctgcttttagctttgtcccttcacaatgcctagtttagtgacggtttggacaatttcagcctggaccacccacagttaattgttgtggtctatgtgtgtgagagagacagagaaagagagagagagactggtgattgttaaagagacatagataggaagacagaaa

SEQ ID NO: 244452 - DNA, 543 bp, Homo sapiens
gcatgaaggtcgaagctcacaccacctctgcagactcatttcacccctcacctgcctacggtcacctgtgtggttgcccgggccagaaacaaatacccaaacgcagcatttgagggatttctacttgtctgttgcctcctcgagaacagcacgtaactgcaatgcagcctgtacaggaggacggagggaaggaaaagccagagccaggtcttgagctgaggagggcagagtcttgcggagggccctcaggactgggtgatgctgtgagggagcatgaaccccgtgtccctgagggtcctgagcgccactcggccattgggtcggatcaccaggtgggtgatgctgccattgttgagggagcaatggagccagccttcgggaggaaactgcagcgctgtgtcctgtcatctgcagcgaatgacactggcgtgacatcggaagatctcctaattatcctccccctgcttggcatcccccgagggatgtagtttcggagcgctccctcgatccggactccatcttcatagcatgcccagcggccgc

SEQ ID NO: 244453 - DNA, 284 bp, Homo sapiens
agaagaaggaagcagcacttaaattagttaatataaagcctattgtaggcaattcaggttctacagttctgcgggacccagattgcttctagctttccattctgccatccgtcaggtgtgacccttatccttatggtccaggatgaagtccagccatcatatccatgttccaagaaggatggaggagaagaagatgagatgaagggtacattctgggtgtattttaaagaaatttcctagaagctgccacataataattttactcacatcttactgaccagagc

SEQ ID NO: 244454 - DNA, 363 bp, Homo sapiens
aggaaccaggtcccttagaatgctctataaatgtgtggaggacctgggaaagcaaatcaaaagagccttgggccaggtgtggtggctcacacctgtaatcctggcactttgggagtctgaggtgtgcggatcttgaagccaggagttcaggaccagcctggccaacatggtgaaaccctgtctctattaaaaatacaaaaattatctgggcatggtagcaggcacctgtaatctcagctactcaggagggtgaggcaagagaatcacctgaacccaggaggcagaggttgcagtgagccaagataatgccactgcactccagcctgggtgacagagtgagactctgtctcaaaaaacaaaaac

SEQ ID NO: 244455 - DNA, 683 bp, Homo sapiens
atactggcctggaatcacctgccagagcaataaagtgatgaaagtgcccagaggaagtacaggctgaaataacacatttagagaagagagtaatttttaaaaaggaataaggaaaggaagtgattagtcttttcgcttccctatttcttcctcgagtatttctttaaaggagaaattccttgtaatgtctattctttttttgttttcatatactgtagttttttcctccagcttcctaatttattagtctttttcaccaccaccaacagaattaggctctacatctcatgctgctaatcactgaggccaagacttatgattcagacatgctggcggtagcaggcttctaatcatgtgctgaagaaataaatataacttctaatcatgtgctgaagaaataaatacaagtttggaaaatggtacagtattggcctgccatgcaaaacagtatttggtataggtggaaggtgtatataagggtctggtttagtggagacactcacataaagaccattcctgacaaaggggtctgactccctttttttctcaggccaggtgatttccgtagttgatatgctaattcgaaaaatcataagtaggatgaacatcaattactcagaaaaagggcaggtgcagggggtcatgcctgtaatcccagcactttgggaggtggaggcgggtgg

SEQ ID NO: 244456 - DNA, 629 bp, Homo sapiens
agaagcgtttttcaaaagtggttcacatgcagcaaacgattcaaaatcacaagcatgcagtacagtctacacccactcgagccagtaccaagtaagacttcagttctcccatgcccagagttatggtcttgaaagcctgctcatcaggctcgtagatggaagaggctgccttgtctcagatgaaactttggacttggacttttgggttaatgctggaatgagttaagacttaagggaactgttgggaaggcatggatggttttgaaacatacaaaggatgtgagattttggagtggccaggaattgaatgatacggtttggctctgtgtccccacccaaatcttattttgagttgtaatccccactatccccacatgttgagggagacacccaaagggaggcaggtaccccagtactgtttcccccattctgttctcatgatagtgagttctcatgagatctgatgattttataaatcattgacagttccttctttacatacactctctctcctgttgccttgtaaagaagatgcctacttccccttcaccttccaccatgattgtaagtttcctgaggcttccccagctatgccagactgtgaattaattaaacctcttttttaaata

SEQ ID NO: 244457 - DNA, 330 bp, Homo sapiens
actcggaggacaggtctaggctaaagatgtaaatgtgttagtcatctactaacaggtgataatagaagccagaggcatggctgatggtgctttggaatagaggatacagtgagtaaagaagacctagaaccagtcttgaagaaatccaacaaatattggttgaataaaggagcatgatcctgcaatggagccagagaagaaccagggaaccagagggatatccaggaagtgaaaacagcatttcaagaagaaagaagaaagaagtgattaacattatcaaataccaatgagaaattaagtaaaattgaggattaaaaaaagtttattgct

SEQ ID NO: 244458 - DNA, 616 bp, Homo sapiens
tcctaagttgttgctttattcagttattgtaaaaggggttgagttcttgatttgattctcagcttgggcgttgttggtgtatagcagtgctactgatttatgtacactgattttatatccagacactactgcattcattgaccagatctggagcttttaggatgagtctttagggttttctaggtgtacgatcatatcatcggtaaacagcaacagtttgaatttctctacagatttggattttttttctctctttaccagtttctttctcttgtctgatcgctctggctaggacttctgatcctatgttgattataagtggtaaaagtgggtggccaggcacggtggctcacgcctgtaatcccagcactttgggaggctgaggcagccggatcacctgaggtcaggagtttgagacccgcctgaccaacatggaaaaaccctgtctctacaaaaaatacaaaattattctggcgtggtggtgcatgcctgtaatcccagctacccaggaggctgaggcaggagaatcgcttgaacccaggaggtggaggttgcggtgagctgagatcacgccattgcactgcagcctgggcaacaagagcaaaacactgtctca

SEQ ID NO: 244459 - DNA, 423 bp, Homo sapiens
ctctgagcttccagcttctaccttgccttttcttcttctagtttaatagaaatcattagtaccaagatagctaaagtgttttttggaagggtaagagtatggaaaatgcagctcatttcctcctaaatcttcattgctccacaccaaatttgggaggcttattattttcaagcctcttcctctacatattttcaccactacaacaccacaaacaaaaagggacctagcataccataggtgcatctgtttgagaaaatgcccaaagttggaggttttggtgtttgcgtccactcagcagaattaatttgcttgattgtgtatttttgatgtcagggactctcttgataattttgtacggtgcctagcacattttcatgtataccaagacacttcaaataaatatttgataatggtattaaggca

SEQ ID NO: 244460 - DNA, 421 bp, Homo sapiens
gagacagagcaagatgccttcaggaggaatctctggccgtcttctttggtaatatccaaagagctttggtcagcgttgatatcaaagcggtgtgaagaaaacataaggccataagactaatctctggagagctgcacactgaaggggaacctaagttcttgagtccctggagtaccccaagtgtggtttcagagagggtgccattcatgagcaacactgctagccattagtggccagcaagaaggggagtgaaaggagtatcttgtagatggtgacttgggtaatatgaaattgctgtcatcaaggtttatcaaaaaaccaaaggttaaatattacatgtaggcaatgtgaggctgccccaaatggtgtgtttcccaggaacttgattcaactctgagaataaatgcatgagtactgagaa

SEQ ID NO: 244461 - DNA, 406 bp, Homo sapiens
tcccaaggggctcaaagatagatctaagcacagtttgggatggagaatcacaaattctgaatcagtggagcctgagttcatggggctttatccatcatagagacactgacgatgaatgcatagtgattaacacacagaacttggcaacttgccactgctgtgtagattttcaagagcagcaggtcccattgccccttttgccattgtgaccaagaacacttgctggctgcctccccaggagtgaagcaacaggggcatcctctgactcagtgggcatgtctacatggcagaccaccatgagcgagctgggttttggttctggctgtgttccactgtgagaatgtgggggaaaaccactcgccttctctgagctcatttacttgtctaataaatatatggggataat

SEQ ID NO: 244462 - DNA, 589 bp, Homo sapiens
tgaatttagacctgaaagtgctattctcatgacacagatgaaaaaatatggtttgttttcatacataggagaaaactgaatgggctacctttgaagtccagggcaccctcctctatcttgttcacttcctcatcaggcactatctatggactgagaagagaaggactttaaaacagtggtaaagaaagcaacaaagacaatgactggcaagacagaagaattgtgcagagaaagaggtagatagaaatggaagtctgttgttcccctctatgtgtctatgtgttttcatcattttgctcccactgatacgtgagaacatgccacatttggttttctgttcctgtgttagtttggtaaggataatgccctccagctctatccatgtccctgcaaagaacgtgatctcattctttttaatgggtgtaaagtattccatggtgtatatgtaccacaacacccctgaacttaacttaaaagttaaaaataaaaaataaaaaaggaaaagctgagttaagctatactatctttgtaactcttctgtaaatctaaaattctatcaaaataaaaagttttaaatgtatttaaaaaa

SEQ ID NO: 244463 - DNA, 449 bp, Homo sapiens
caccggctcctttaagtccacccgtccctgaaggttcctatcgagaggctaggcgtagggaaccgccttcaaccctgtgcccacggtcgtgttgtgctgcgcacgagtgataaggactcagacatcctaatgattgttccaggctctcactgggtgccggacaccgggctccacacacgtcttctcaatgaatacccacaataaccctgagagaaaggcgtggttttttaccctcgttatacaattggggaaactgaggctcaaaagagtgaaggaacctgctgagggtcacagaaaaggatgcggccgaaactcgaagtcagtctggctgcagctctaaggcctcgttactgtcgtagagcagtttgtcaagaagtccttcggttcctagatttctagaggacgctggagttcattgtgaagtgccggggctttgggtccacacaaaa

SEQ ID NO: 244464 - DNA, 463 bp, Homo sapiens
tgcagaaagctttttcttcttcttctttgaaaaagggtcttgctcttttgcccaggctggagtgcaatggtgcaatcacagctcactgcagtctctacctcaagtgattctcctgcctcaggctcccaagtagctgggaccacaagtgtgtgccactatgcctgactaattttttaaatttttttgtggagacaaagactcactgtgtctcccaggctgtcttgaactcctgaccttaagcgatcctcttcagcttcccaaagtgctgggattacaggcatgggagccaccttgcttggtcacaatgaatgtttgctcattcttctgtctgtatagaatcctaaatgtgatgctgtgtggcaatggggaagatcatacaagatacagtttctgtccttgtggagatgacagtctactctggaaaacagaaagttgtacacaaacgtgacccagcaacatggca

SEQ ID NO: 244465 - DNA, 730 bp, Homo sapiens
cagctccagcctgaatgagaagcacgtcctcctgggagttacgtcagcagcctgaccttccatcttcctcctctaaagaagcgtccctgccaccctgagcacgaagccctcgggttcctaaaggccgaggcgcttcttctcatttacttcccttgaggaagaaagaccagcccatccaccctcatttcccaccgaagggcatcgcaaataaagtttgcccacgcaaccaggccaccaccattaatttctctctgccctgctcttacattctcctcaaggttttcagtcccctagagaggctcccttcccttcttttctttccttcctccagccccccttttcacctccctccaccattgtttgaggttaagaagcatgctacggtgttctataaatcacttggcaagagtagacgacaaaagcaaaatataattcagattaaagtcatcctcccgctgaaatgatagtttcttaaataaatggcgatgctgcctatcaatcttgctggcaactggtcctctcatattcatctttctgggggtgatttaggatccacctgggtcctccgagaagattctcccatcatttccttcccgtctctctggatcttgctgctgggcttggcgcagttgacaaattctccaagtaatccctcaaaagattggagaaatgctccgaacgctccattaaacttattttccatgctttaagagacccaaaactatgtcca

SEQ ID NO: 244466 - DNA, 320 bp, Homo sapiens
accatgcccagaaaattttcatatttttagtagagatgaagtttcaccatgctggccagactggtttcgaactcctgacctcaagtgatctgcccacttcggcctcccaaagtgctaggtgtgagccacctcgcccggcctcactcagcataattttttttgagattatgctaccatccatgttgttgcccctatcagtacagctggccctccatatctacatgttcctcatccatggattcaactaaccatggatggagaatatttggaaaaaataaaatatataaaataatacaacaataaaacagtagaaaatttaa

SEQ ID NO: 244467 - DNA, 315 bp, Homo sapiens
ttttttttccaggctgctttttatgttatataaaaataagacactaacccatgggtcaggggctctccaaagacccttcccttgctgtctacctaaggcaagcgaactaactcctttcagaaataggtttttatagcacatatttatgtctatgtgtctggatcttgaaatactgatatttcttcattaggttcttctaaaagtgtttgaaaacactacttttgattgattgatcagtatacagtagtaattcaaattgccagtaagttcagttgtacctttagtgtgtttgttttaaatatgtgactttgcgtg

SEQ ID NO: 244468 - DNA, 457 bp, Homo sapiens
ccaccaggtattcccacccaccagaagctggctgttgtactcacccggaaccatggtgcaccaccacagcggcgaggtcatacaggcagctctccgggccactgttctcaggctacagaacaaggaagaaggagcagtggtcaatgacatcagtatctcgatgacctctaccctctccatgtgatgacaatcttactgaagagccattttttcaccatgctaaaaaggccagttgggtccagcagctttgcctctctacccttttatcaccaaagtatactgctgagaaagaatcaaatgaaaagaaaaaagactcaacaagacctcactcatattaactggactctacaagcagtgagcatccagacctgcatttggttacaaaagaagccttcaagctattttcatcagcttcctaatcaagttaaaaaataaaccacaaaactgagtatccaaa

SEQ ID NO: 244469 - DNA, 410 bp, Homo sapiens
ccaccaggtattcccacccaccagaagctggctgttgtactcacccggaaccatggtgcaccaccacagcggcgaggtcatacaggcagctctccgggccactgttctcaggctacagaacaaggaagaaggagcagtggtcaatgacatcagtatctcgatgacctctaccctctccatgtgatgacaatcttactgaagagccattttttcaccatgctaaaaaggtatactgctgagaaagaatcaaatgaaaagaaaaaagactcaacaagacctcactcatattaactggactctacaagcagtgagcatccagacctgcatttggttacaaaagaagccttcaagctattttcatcagcttcctaatcaagttaaaaaataaaccacaaaactgagtatccaaa

SEQ ID NO: 244470 - DNA, 410 bp, Homo sapiens
ccagcagaggtgggctggacactgctcctggcaaagctggccgggaagatgcagcccgtgggacactccccaccaccactctcacagtctgactgactgcgaagcttcacagaccagaaggttcattcctcacaagaaaaggaaaaccctggtctgatactactgttctgaaatttaacagccagttgggtccagcagctttgcctctctacccttttatcaccaaagtatactgctgagaaagaatcaaatgaaaagaaaaaagactcaacaagacctcactcatattaactggactctacaagcagtgagcatccagacctgcatttggttacaaaagaagccttcaagctattttcatcagcttcctaatcaagttaaaaaataaaccacaaaactgagtatccaaa

SEQ ID NO: 244471 - DNA, 736 bp, Homo sapiens
gaaactccgtctcaaaaaaacaaaaaccaacaaacaaaacccccaaacaccaaaacaccaagacacatacatatacagaagactgcaaagtactaaaatgttaacagtagttatttctggatgatgggattatggaagtttctaaaatacttccttctcattgctagtctgttttctgaattttctaaaatgaacacatattagctttgtagtaagaaaaaagtgtttctttttttaaaaacgccaagtgggaaaaactataggcattagaaaaaagagaaatcattaaggatggacgtagacactgaagttccttccttcctttaaaggaagaagttgattctcattattcagtgtttatgttataaaatcacagtggacaatgaattagtaaacccttgttcctgagggaaataaaaggtaggtaggttcctgcaagcctaaggtcacaacattttcatcaaatgatcaatagataccttgcttttatatgtgtttctgtttaaggacacctcatttgacattatttttgattccttaacattgaactcacagttacaacagcagtacaactcatgccggaatgaagcttatctaatatacacattttcttcataaggcacattacggtctttctgcactcaggaatactagacagcacttcagcactatgctgtttgcattctgaacagcaaaattaagccaagcatggtggcatgtgcttgtattcccagct

SEQ ID NO: 244472 - DNA, 498 bp, Homo sapiens
atcggtctgcgacagactgactcctagataggaaaacacacgtttccggcagcatcgcctgtaactggaaagacacaaggctcaatgccggggactggtccgtcaatcacgggccctgggacagtcctgcggcccccagacagcggcgaagaaagctctgcgcgccccggtttgttccgggagcgcctctgggagccgcaggctctggatatcagagggagggcgcgaccccgtgccgggagccgcagggtgctggggttgcgttcccgccctctctgcgtttcctttagtgactcccgctaagaggggctgaggcggaaacccccgcactgagtgtgaaactcaggagctcgctgaggccccctggtgcttcccggggccgcgtgcattggcctgatttcattttgttccgttgcctgtaagctgagaatttcattttctggtgagaatccgccatagaggctctggttctgggaactgtcatttcaaagagacgca

SEQ ID NO: 244473 - DNA, 696 bp, Homo sapiens
gtaacatctgaaacataacacgtgtcaggaatgttgctattacactaaatgaagtacacctctggaggaaaacggaaattctgacaccgcatcataatgaagaaaaacaaggaaaacaattaaaagaaatgaatggcaactatggccactgtgaggtaaagtagggctcaataaatacaggtttaataaacccataaaattacatttataaaaatgttggcaatggtaggttttagtcttttctgccaaaaataagcaaaatttcaagaaaatcattttcaaatccattaaaattcctatcagcttctgtgaggtttattcttcatatttgtgtgtatccacacaaaacaatataaaatgtatcagagttcatttatttggaatcatccataggaccccacggtaccactggcagtctactcctaaatgactacagaatgtaaaaaatacacattaaaactatgtacatttggctgggcacgatgcctcatgcctataatcccagcactttgggaggccaagacaggtggatcacttgaggtcaggagttcaagaccagcctcgccaacatggtgaaacagtctctactaaaaatacaaaaaagcaggagaatagcttgaacccaagaagcgaagcctgcaatgagccgagatcacaccactgcactgtagcctaggcaacagagcaagactccat

SEQ ID NO: 244474 - DNA, 377 bp, Homo sapiens
cctggaggaggtcgacacatgctaatgtcaccatgggacttcctgctttaatggtttagattgagaattggttgggatgcttttgactcctaagaagtagaaagccctgactcagctggcacagtcataaagacacttagcacctcacccagcaagaaacctggggaaggtgcctcctggtaggttaattgagtgattgactcccaggagcccaagtccttcccctctttcagctctgtcatttccaggctgtaccccttcagagtggcatgatggctactgcatccagataccacagcactcagcaggaggagagacactcctccctgtgcatctacagcagggaagggtccccgtcccagggccccagaagattg

SEQ ID NO: 244475 - DNA, 541 bp, Homo sapiens
agatctcaggaaacagtgttatcactcagagaaaacacacaggacaatggaactgacagagcatcctgggtgtttgtggaacaccaagaagcctagtgcggctggaactgaatgtgcatggaagttggagagatagatggaaacaaattgtgtagtcttttatgccagcgtagagaggttgtaatatgttcctgtgtgttcaaaaatgtacctggggttttttgcagtatggtctgataagaaactcggacatgcaaatgattgccaggaaggaagaactttcaactcacggagttttagaaacagtaggcaaaacacatcctgcagggctatgtgagaagcaccagggtggtataagaagcagaagcagaggagaaagcagaggccagatcctttattgttttccacaggaaaagaaaggcagggctgggtaaccagaagaggatttgctggtttgaataaagttggtagactttggggtctaggagctgtccctgtctgcctagtacctggccctggagtcattagagcaaaaaaaaaa

SEQ ID NO: 244476 - DNA, 1288 bp, Homo sapiens
gagaagtagaaactatatatatgtgtatttatggtatacagcatgatgtgttgaaatgtgtgtccgttgtgggcgggcttcatggctggcacctataatcccagctacatttgaggctgaggtggcaggattgcttgaggccaggcgttcatgatgaaataatatgtatacattgtgggccgttgtccagtgcagtgatgcagtctcggctcactgcaacctccgcctcttaggttcaatcgcttgggttcaagcgattctcctgcctcggcctcctgcctcaggcctcaggtgatccacccgcctcggccttccaaagtgctgggattacaggcgtgagccaccattcccggcctgatatttgttgaagaaatcatttcagtatgtcccatcattttagaaattttattttgaattagtgtctaatcaggaactacacccagcctggctatgaatttcttacagtgagatttgatcaagattaaaagctgttattgataaaaagtgattctaaaattcagttcttttggctactttgtacatggatacacatgaaccattttacaaggaaaatgttatgtgtatttgtcattcacttacaattttaaattttgggaatataataaaaggcaatctatgtaaaaagatgacactgatgtagttggtttactaagtaattcaagaggagcagtggctctctctttttctctaggtattccctagtgctttcatcgtaaaataggattctaacaactattaatgtatttggagtttcttaagggtgtaaaataggtcaagtaaagattttcaagagtcatacagctgcttttctctctgccccaaaaggggagatttgggttggccagcagcttctgacccttgttgttagtgtgtgggccttcctttgttctgttgccttcctcacctcccaaaggtacttttagcaccctatttttttctcctctttgaattataaacattgttctgtagtattgaatttttgaaaatttctagattctagaactctgtccattgtggatggagcttgtatatatgttagtgtgtaccttagtctagaaccttcaagtgggttgagtgccaatgtgagtaccatgtgattgttttctaaattggctatacttgccattttaaatactttgaaatggaatttggcattaagggctacaagtcgaaggcctctgctgattaaactatgtagttgatgacatattctaccatctagctgcttaaatatgagagagtggttttgtatgttttactaagtaaa

SEQ ID NO: 244477 - DNA, 399 bp, Homo sapiens
ttattttctctttgctcatttccctttttgcattctttctggtgattagcaatattaatctgcaaataaggtcttcatttcttcttcttgtggtttatatttcttggtgtccaaattatgtgtttgtcccaacatgggtctatgtcaccatgctcctacaaaccaaggcacatatctgcaggtggaatacaaggatgatagttaagaaatatagagctgcttttctcaaagaattaaagaggagaaatacatctctttcctgtgaaaaagaatccaggttaccactcaaagatgagtttaccctccatatatttatttcaactgaaataaatatcaaatgtttttgtctctttcagggaccatttataaattttttccaatgagccatctgaaggttta

SEQ ID NO: 244478 - DNA, 302 bp, Homo sapiens
aagcacggggcttggctgtcttcaccctggaggagggtggtggggtttatgaacagatgttcgcatccaaggtgagcatgggaagcagcatttctccatcttcttccatgctcatcacaattcctctctggtctttttcggtgtgatgattctgaacggtggacagggtcaggggtctctctggttgcagagactcaggattgggaaatgccaccaagagttctgggaagaaaaggaaaatgtcatttggctttggcaacagagcaagaccctgtctctaaaaaaaccaaacaaatgaaaaa

SEQ ID NO: 244479 - DNA, 352 bp, Homo sapiens
gccaaggaggagctcctgcagtctccagacaagaggagaccccaccttgggagtgaaggggagaagagcagttgaaggaagggagccgggggctggcatgtgggagtgatcagaagcctggggtgactctggtttctgacttggggaactgggaggacagcggtgctgccaagattgtcagggagcagggagcagtagggaagtgtgttgtgcggcatggagaacataaggcaagagaatgagcaaattctgtctcattttccagtgttgctccagtgcctagcatggaagccagagtaggtgtttttttgattgaatggatgacatgctgtgttgcaggtgggggtgaagg

SEQ ID NO: 244480 - DNA, 439 bp, Homo sapiens
attctgtctcattttccagtgttgctccagtgcctagcatggaagccagagtaggtgtttttttgattgaatggatgacatgctgtgttgcaggtgggggtgaaggggctgtgtatgggcagagagcaaagaggcccaggaccaggtctgggccaaagcacggggcttggctgtcttcaccctggaggagggtggtggggtttatgaacagatgttcgcatccaaggtgagcatgggaagcagcatttctccatcttcttccatgctcatcacaattcctctctggtctttttcggtgtgatgattctgaacggtggacagggtcaggggtctctctggttgcagagactcaggattgggaaatgccaccaagagttctgggaagaaaaggaaaatgtcatttggctttggcaacagagaagctttagggaacttgcca

SEQ ID NO: 244481 - DNA, 548 bp, Homo sapiens
aaaactaggaacagttttaaaaaagatatgcttgaagatactagagagataacaaggtagtaaagaactagtgggcctgtagcttcaaaaaaataaaaaaggaatccaaaaaggtgagctcaacatttggactccttctaccttgggagcatttattaattctggaggagttagtggagagcctgatcagtgttttagacagtctcaaaggagtggggtaaaaagtcagaatctaggactcatcaagggaaatagcctagcgttgggatgagaacctaaataattgcagcacagtaataagattggactgcaacagaccagttctcacagagatttcagcctcaaatcagctcagtctctggaattggattaaagcaataccaatttgctagaattccctggtgcctggcctaaacaaacgtaaatcctccctagagaaggaaaacatcttcctaggcctcaagttatttctatacaaacaatttttcaaatacaatattcctcagataataaaaataatcagacacttgaggaaacaggaaaacata

SEQ ID NO: 244482 - DNA, 333 bp, Homo sapiens
ccgccattttataggccttatgcaaatgatagagggaatgagacacgaagagggagaatgcagctatgaattggaagttgaatcttatttacaaatggaagatgttacctcaacatttattgctcccaggaatgaatctaataatcttgccagtgacacctttatcactcacaagaaatcgtcatttataaagaacataaatcaaggcagttcatcctcagtgatagaatctgatgaagaatgtgctgaaattgttaaacaaactcatatcaaacctactaaaattgtttctttaaagaaaaaagtgtctaaagaaataaaaaaagatcagct

SEQ ID NO: 244483 - DNA, 496 bp, Homo sapiens
tcttccttacccgtgatatataaggctgtgatctagcataggaaaggccatcaccctgaccctgaacaagacttcgttctcagcaaaccaaaaacctgcaacctacctaggtatattttccttagaaggcatggaggaaattgtaaattttcttgtgattatggtagtatcattatataatttcagatctgaatttttgttatatatgagaaaaatgacttgatttttaaatcattgtacattacatagatgtcaaattacaatataaaatgatttttatattgtaaaaattataaaatatacaacataaaaattataaatatacaatataaaatatataattttatattgtaaaattttgtatattgtatgtatttataattataatatcaaataattttttaaattatgtacccagaaggaaaaatattaatttgaagtcatattttttccagctttactgaggtataattgagaaataaaatgtatatataat

SEQ ID NO: 244484 - DNA, 223 bp, Homo sapiens
gtcagagggagcaagaagactacaaaacacttaacacacacacacacacaaaaagaattgtaattaggataaatacctattttttttgtctttccatgtaggctgtttacaaaaccaaggtagtatttttcttttaataggtaaataattatgcaatctggtataatctggaatattttgatattgtttcctgaattgtatttgctccttccaaaattaatag

SEQ ID NO: 244485 - DNA, 417 bp, Homo sapiens
agggaaatcgcaaagtgccttttaccttctctcttaatcctgaatggtaagaaagtcttctttcctaacacattaatagtttcagccgtggtattttaggtaagctatgaaagattggaaagtgttttctgtcaagaagaaataattatccctttcaaaaaattgtatattccaaacatcttctctctttgttaggttattgaaagtctgctatttaaatagttatttcctgttacttattaactcagaaaattttctatatggttgtatttgggaagatttatttaaaagttttcttttagagttaacatcaataatctgcatgttttctacagtggaggtgttaatgttgaaacataagagaatgaacatactcagcgaatggaaatcttaacatctaatccaaaaaagaaaaca

SEQ ID NO: 244486 - DNA, 326 bp, Homo sapiens
tgagccttaccttacaccatactcaaaaatcaatcatagacctaagctgtaaaagtataatacttttagaagaaattaagggaggggggcacaatggctcactcctgtaatcccagcacttggggaggccctggctggcagatcacttgaggtcaggagttcaagaccagcctggccaacatggtgaaaccctgtctctactaaaaatacaaaaattagctgggcgtggtggcaggctcctgtaatctcagctatgtggggaggctgaggcaggagaatctcttgaacccaggaggcagaggttgcagtaagccaagatctcacca

SEQ ID NO: 244487 - DNA, 973 bp, Homo sapiens
acctgcccttctgtctttcccagtgtcctctcctcttttctctctcccatcccagggtccaggttaattgcagtgcaatatttgcatagacgtgagacctcacccggggaaattccccctggtgaccaaccaggtttcctttctgaggtcaggccacatcatcagacactgctccttcctctccggcttgccactgccaccgctggctttcgcccctgtcatctggtgggtttagatcccggcacacagatttaggctcatcctttgaccttgggcactgtccagagggtggggatgtggaggctgggctagggacccagagtaaaacagtgaggggatagatattcagggagaagaggaaagggcagcaggtaggtggtggataggaagcctggattgcaatttgaactcatcagtaactccctggctgcccctgggcacaagccttcccttctctgaaccttagtttccccttctatccagtgagaagattggtcaagataatctctaagctttgttccagatctgatagactaagaagccacttcctttgcttccacttcctttggcagcacagtgttgcaacatctgtacttggatccccttcctttgacaagaatcttgcaacatgccaccctgtattagtttccttggaaagcacaattttgcaaaaggcctccctgaatcccatttttcaaatgctgatagaatgacacatacctcctctccacttagtggcttagcttgcgttttaacttttcctttcacacccatcatacatactgttctgtgactccccgaaagagggattctctctacattctgaaatttgttgtccctatcctggtattgagaagtcaccttcctgatacaaaaagaaggaacaagttgggagaccacagtgactcaacgacagtaagttcctgggatcacctgaatcagaaccagctgttaaaagggcagatttgtctca

SEQ ID NO: 244488 - DNA, 498 bp, Homo sapiens
caaaatgccaatagtgctgaggttgagaaatctgatattggtggataaaggagtcaggtccctgactagccagtgagaaggggtataaaaatactatttgagcataaaggctcctttcccccgattccagcctctcttcttgtattatttccataatttagatttaggtggttaaggctatctggaaaagttagtcatttgctagctgacgaatagagaacatctctctaagttcataatctttggaaagttggctgctggctactcattgtgtaaaggtgccatatccatctaccaaatatcagatacataagtttttttacttaaaccaccattcaaatcagagtatatctctgtttctaatgttctgagtttgaagttgtgtgtttattgatcaagaacaatatttaggacactagtatgcattagcatactaattcttctttccccatacgtggtaattaatgggttcctcttcttgaagggggatggtattta

SEQ ID NO: 244489 - DNA, 271 bp, Homo sapiens
ggtagtgggaatgtaaaatgttgcattgcttttgaaaagtttgaaagttcttctataatttgatcatacatctttcatatgtgctagcatttcctctcctaagtatgtgtctcagagaaataaaaacacacaaacacacaaaagctttttacataaatgttcatagcagaattattcgtaataggcaaaagcataaaccacccaaatttttatccactgatttacaaataaataaaaaaatgatacatccacacagtaaaataatatttgg

SEQ ID NO: 244490 - DNA, 373 bp, Homo sapiens
atacccttgagacttagaaattttttttaactcatcttaacagccaaattatcaaaaacagaatctcttgttttcattatgattttgtaccttatgtccaaccaattgattgctccgtcaaggaacctgtattctcagatgatataaacaaaaacctggcttttgtgaggtggagactgaagtttataaaggcttctcataagccctagtcagtgaccatcaggagcacctgcccctcatgtctgcagggcacaagagtcatctgcttgagaaccactgatctagcacatcaatacctaaaatgggcaaggattttcccattatgggaatttctgtataatattacattctaaataaaggttttagcactaaa

SEQ ID NO: 244491 - DNA, 481 bp, Homo sapiens
acaattctgtagagtcatgcgattagtggtttagtggtaggattaaaattagcctcggtaaattaccctggtgacagaaaagcagaatctgttaatggtttcacaggaagattggcttatcagttattttctaggttgatgaaagattatgggctgctaagaatttgaactttagaaagtaaggttgattttcctaatatttacatattttaaagtataggtattgattaaaaagaaagttattacagttagaatttgggattttatatgtgtgtgggagatgatttacaaaccaggttttttgcttagctgtgaacattaagggggccgtcgagagtgtgtgttttaggcaatccttaaatcccgtccaggggaatagtagaccattttggaaagcattttacatgttttggacccacgaaaactccatttagattcctacaaggtggtaggtgatgaaactgcaccttcttggcccgag

SEQ ID NO: 244492 - DNA, 440 bp, Homo sapiens
tctaatcccagtttatcttaagcctgtgagttaggacaggtcatatagcctcctgcaaagcttactcatctgtaatgcataactgacctgccaaccttataaagctgttgtgaagatgaaatggaagtgcttattaaattgtaaagttttgaacatgcttttaagtatgaggaaataaattacaaatcgtatcccttttcccagaacctttagaagtatttgaggtaatagctctaaatgagtttttgtttcctactctaatcaagttatttttggtctaaatctacctcatgtaatttctggtaacaagataactactatactgaccaattttctttaactgaaaggaatgcctgactgtaatcaaagttaatggtactgttatcaatagtttaatacccaacaaaagtgaacgattaacttcccttcagtctaccaaa

SEQ ID NO: 244493 - DNA, 694 bp, Homo sapiens
tcccagtggaaaggaagccattgtgtctatagaattgtacctaaaaccgtatcttattgtgatgagaggagaggagtgggaattgtggccttgggcaggctttcacctgaggctgatatactagtaccttggagagtgtgtgggaccaggctctcggggaccccttgggctttgaggaaggggcagccctcacgctgtgctcacttctgtccccatgagacggtcaccttcctatgttcctttaactgtgggcccgtcctcacatgctgctggtgggaccatacatagatgcaacactctgggaaactgctggcagtatctgctagagccaaacacaccctgtgatcccgcagccctctccggggctagacccggcagacacgcaccttgtgtaatgaacaaagacatgtatgagaacgttcagagagcctattcataacagcccagacctgaagcccccccagcgcccatccacataaagtgggtatgtgaattgtggtgtagtcacacaatgataggtaataacgggcatgaacactctgactacattccacacaaatgcaccgtgaaacatgacttgcggggagggaagccagaccaggaagagtgcctaccgttcaattccatgtacagaaacttcagagaacatgcaaaacgtgtctgcactgtagcaagtcaggatagtggctcccct

SEQ ID NO: 244494 - DNA, 739 bp, Homo sapiens
ctcccactgcagcctccccagtagctgggattacaggtacacaacaccatgcccagcaatttttttgttttggtagaaacagtgtctcgctgaccaggctgaccaaactcctggcctcaagcgatcctctagccttggcctcccaaagtgctgagattacaggtgagagccactgtgtccgggctatgtgggtagtctgataagggcaggggctatgtctgttttgcttaccaatgtttactacctactcagcacggtatctggcacacagttgggactcaacataattatataactgaataacctaaatcaaagcacttatgttcttgtaatatacattatatacatattagaactttgtagatatgctatgaaaaattgctaatgcgcctggcacagtggctcacgcctgtaatccttgcagtttggaaggccaagacaggcggatagcttgagctcaggagtttgagaccagcctgggcaacatggtgaaaccccgtctctataaaagatacaaaaattagccagaagtggtgatgtacacctgtagtcccagctacctcggggactgaggcagcaggatcgcttgagcccaggaggttgagctacagtgagacgagatcacaccactacactccagactgggtgacaaagtgaaagaaaaagaaaaaagaaaaactgctaatgatttggattaaataacaataagaaaaagaaaaactgctgtctcaaaaagaaa

SEQ ID NO: 244495 - DNA, 470 bp, Homo sapiens
ctccgcctccccaagtgctgggattacaggcatgagccatcactcccggcctcatgatatagatcttgtacatattttgttagatttatacctaagcatttcatttttgcgggtgcttattatgttttaattttaatgccaattgttcctgatatatgagaatacagttgacttttgtacattaattttgtatcctgcaactttactataattgcttattagttctaactgtttatttgtggttgattccttgaggttttcttcacaggcagtaatgttattggcgagcaaagacagttttattttttctgtaccaatctgtatacttgctattcacatcccttatttttttttggcatattgcatcttacacaattttgctttgtagcatctattttctcaccattaaatgtgatgttagctgtagagttttttattgtactttatcaagctgaagaagtaaatttgaa

SEQ ID NO: 244496 - DNA, 673 bp, Homo sapiens
ctaatatctaataagcatctaattaatgcatatcaaagctaagattttgcctttaggaaagttttctttcctaataaaatagtttatttgacaactattctttttattaggatcattcatatatttgctaagcaaagagtaaatttattttccttaagattcaatttgaatatactaagaatattaaagcaagttagataaattacccaatatatttgtcaatttgaaatttgatagacattagttgtttaattcaatgggcagttttgagctgcagtttatacacacatgcataacagagtcacctttcaattatccatgttaataggaaagtggttatagattttagtacacacattaaaatatggatactcttctcttttgataaatctcatttcaaataaaaaaaccagtctcataattatgtatctgtatctattacatcattgaatttagtaaataatgtttaatatgtataaggaaaaacaatgttattgacatgaagattatactcacatatttggcttgaaaatatctataaaaataatttctgttgcaaagtaagaaatgttcttcagaatgttattaatccctgtgttaaaagagaaattggaagatgctcactttagctcctaaaagccatggtatgtactgtgaatgcaaagattctgaa

SEQ ID NO: 244497 - DNA, 477 bp, Homo sapiens
ctcagcctcccaaagtgctgggattacaggcttgagccaccgtgcctggcctcaagcgattctcttaactcagcctcttgagtagctgggattacaggaacgcgccaccacgcccagctaattcctgtatttttagtagagacagggtttcaccatgttggccaggctggtctcaaattcctgaccccaggtgatctgcccaccttggccttaaaaagtgctgggattaaaggcgtgagccaccatgcccagcctcctacccttttctttgcccagccagataagcaggactttatggggcaaagcctatgtcagctctctccaagggcactgggaattttcctgaggtgtaatcgcttctcactgtatgttctggaacataaagctagcaatgaaggtatttctttgaactggtgttggctggtttcttctaaaaacctgcatgctttcatacctctcctgcagttcttttttttt

SEQ ID NO: 244498 - DNA, 284 bp, Homo sapiens
gctaattctgtatgtgttgtcacaaggttcttctaacttttcaactctattcttgaattgctgtcctataaaagaaaaatttcccgatagcaaagatttttctggaaggtggatcaagaggaagacaacattataaaaagaaggagcaatacttaactgacatcatagagtttgaagtatcatttgagagagaaaagtaaaactcagtgatcttttgtcttggctgaaaggaattgtggactaaatttatttttaatcacaataaatattaatattagactaga

SEQ ID NO: 244499 - DNA, 427 bp, Homo sapiens
aaataaataaactcctgtttattgagtgattaatatgtgcactgctctgtgctgagtagggaaatatccttatctttttgtgtgtgtaggtgtgtatatacacaaacatatatatgtataccgaatatttaaagaaatatctgttatatataggtatatataaagagatatgtaagtaatatcaaacaaccattagttacttagctgtgtgaccctgtgtaagtttcttaaattctttgtattcattttccttatttgtaatacaggtttgttgataataactgcctcatagggttgttttaagaatcaagagtatggatggacgcctgtaatcccagcactttgggaggctgaggcaggcagggtgcttgagctcaggagttcaagaccagcctggacaacatggtgaaacctcatctctacttaa

SEQ ID NO: 244500 - DNA, 258 bp, Homo sapiens
ccctgcttctttgaatgaaatacttgtctgccaaaaatgcagaatgggcaagcatcagttgtgggaagaatggcacatggaaaggtgagtcatgggccagagactgtcagagggctgctttcctggagctggagtggaagtaacagtaaaagtagtatggttgagaggacaatgagtgtgaaggatgaagcaaatgataaactgaggattgcaatccagaaatctgacccaatttcagaagagaacaacaatcttaat

SEQ ID NO: 244501 - DNA, 233 bp, Homo sapiens
ctcgctatgtttcctaggctaatctcaaattcctggcctgaagtggtcctcctgcttgggcctcctgagtcgctgggattacaatactgtctagtatgaaggaagtttgtcttgatatgtttcctgctcaaaacaaaatgcaacttgtcattttcaaactctaaaattcttctggtgtgttttaaaatgtctatactgtaatagcaaataaattaacttttatgacagggaat

SEQ ID NO: 244502 - DNA, 387 bp, Homo sapiens
tagttccaagagtaccaattctcttatttcttgtgtctattgactcactcttacgtggttcattttctcttgcaacttgtttttttatcataagatcatcttaggctgtgcgcagtggctcacgcctgtaatcccagcactttgggaggccgaggcagaaggatcacctgaagtcaggagttcgagaccagcctggccaacatggtgaaaccctgtatctactaaaaatacacaaattagttgggcgtgatggcacacacctgtaagaccagctacccgggaggctgaggcaggagagtcacttgagcccaggaggcagaggatgcaatgagctgagatcgtgccattgcactccagcctgggtgacagaacaagaccccatctcag

SEQ ID NO: 244503 - DNA, 511 bp, Homo sapiens
ggaggccgaggagggatgattgcttgaggcctggagtttgagaccagcctgggcaacgtagtgagaccccatttccaaaaatttaaaactcaaccgagtgtggtggcacacacctgtggttccaggtactcaggaggctgaggcaggacaatcacttgaacccaggagtttgaggctgcagtgagccgagatcacgccactgcactccaccctgggcaacagagcaagatcttgtctcgaaaaagaaaaaagaaaagaaacacacagtgtttgtatcaactccaccaccttcagcaggcagtgctttcagtctgagcctctacaaaacgggtgtgtttagcacacctctcaggctttgtgtggctgagacaagcatatgcaatgcccaccctgggcacacagcatggcacaaagtatgaaactcgctaactcaggtttctgcccttgcatccccatggttcctagcacagtccctgggacatgaaaggcatcggatcaacgtttgctccag

SEQ ID NO: 244504 - DNA, 446 bp, Homo sapiens
ggggagtttgaagaatggggtcctgaccttgctaggcaccatttgaagtgctcacatgtcctttgtcttattcagtctccatttgttttcatttatgagtgaaaggagatgaaattgagatggacttgccttgctcttggtgcagagctgtgattacagagttgatgagaaagctgttccaactgtgcatggagatgcattccgtggtcaatctgcacatggctgtcaggaactagctggagtcagcaggagagagagcaatgccttgttcatccatccaggtggggctccgagagcttccaaaccaatggataagaaggaggagccacagaggctagaaaagactgccgaccacagtttgtcccatgtagaactttctggaacattcagctgcagaaagtgaatgggctcaaagctttctgtctccttctgaacaggctgtctat

SEQ ID NO: 244505 - DNA, 350 bp, Homo sapiens
ttgttttgttttttgagacacagtctcactctgtcacccaggctggagtgcagtggcacaatcctggctcactgcaacctctgtctcctgggctcaagtgacctcagccttgcaagtacccagactacaggtgcatgccaccatgcccagctaatttttgtattttttgtagagatggagtctcaccatgttgcccaggctggtcgtctcaaactcctgggctcaagcaatctgctcaccttggtctcccaaagtgttgagattataggcatgagtcactgcgcctggccaaaaggcatttttatagaatcattctataaatgtcaccatgtggtctaaaaccagtaagc

SEQ ID NO: 244506 - DNA, 426 bp, Homo sapiens
agatagatcttaaagtaattctaaagttttgccacagagatagctgaaacagcttagtcgccttggacttgggtatccccaaatagccccattttctagagtggttcaagcaatctagcataagttaaaatcttgcccttttggaatagatctgggttttttttgtttgtttgtttgttttgtttttgtttttttgagacagggtcttgctctgtcatccaggctagagtacagtggcatgatcatgggtcactgcagcctcatgccccgagcccaatcgatcctcccacctcactatttgggcggctgaggcaggagaatcacttgaaccttggaggtggaggttgcagtgagcagagatcacgccactgctctccagcccggaccacagagtgagagtctgtctcaaaaaatcaaagaaaaaga

SEQ ID NO: 244507 - DNA, 647 bp, Homo sapiens
ggagcagccctgggcctgttgcacaattcacacactgtatgtggagcggagtgctgtgctggcagatgcaataggttgactggtgggttctattgcaccagtgggctttgggctatcaaagagagactcttctggaaccaaaaatgtaaaagaaaccaacacaatttctgaaagaacccatctcagctacagaacaaatgcaaacatccttccaaaaatataagcaaacagatgaacaataattggacacaaaaatacttagcaattcaaaaggagaggactagtctctgtgctcagacagggctgttgtcagaaacaggagaaaacaaaagatacggccttgctgataaaacaagaataagctatcataaaaaaggaacaataagaaaataactttcttagaggtgaaaaatgcaattgcccaagtaaaacacccaatgaagataatgaagatggtagctagcagactgtataatgcagtaaacctaattagtgaattagaagatccttacagagtatcagtttaagggctaggtatgggggctcacacctataacccaagcactttgggaggccaaggcaggaggattgcttgaggccaagagttcaagactaacttgggcaacatagtgagactctgtctccac

SEQ ID NO: 244508 - DNA, 408 bp, Homo sapiens
gatgataaacatgctgacaatttccaaggctgtaccctatttaattataaattacaagtattgttgcttgttttaattttcataatgtttgagaaatgcaattgcataaatcacaggagcattgtatatagttttgtccagaaattcacaaaatttttcaccaatacaaaaaaaatcccattctgaacaacatatctgcttacggtattttaagagttattcaacacagcattttctgcatttgatattactgaaatcataatgattcttcagggaatgcaggaattgatgcaatcctctgcctccaagtacagctgtgtttgagcttttctatacttaaatgcaatgtttagaattttttagtagttgtgtaatttattaagaaaataaaagagattttaaaattat

SEQ ID NO: 244509 - DNA, 209 bp, Homo sapiens
caaatatatgtagaaaataaaaataatttggaaattcttatctacaatatggaccaatgatatcatgaacaataaattttcataatatacaatggggtctaaatgtaacagtaggccctcaactctcaagaggaacaaagtgtgtttttaaaaaaactaacaacaaaagcacaatccttgaaacaaacaacaacaaaaaatgataaact

SEQ ID NO: 244510 - DNA, 444 bp, Homo sapiens
agggtgctgttctgttgagcatgctagagtgcaatggtgtaatcaatcatagctagctgcagcttcaaactcctgggtccaagcgatcctccccgctcagcaccccaagtagctgagactacaccaccatgcccagctaattaaaaaaaattttttttagagatggggtctcactatgttgcccaggctggtctcaaattttcggcctcaagtgatcctcccaccctggcctcccgaagcactgagattacagatatgagccacagagcccagtggtttatgagtcttaactcctcttctggaacctaagtttcctgatggcagatatgctatgagatatatctttgtacttctgatgaatccaaaacaatgtggaaggtatttcaggctctcgctcaatacttagaaataaaactggtaggttgaattacttctggtaattca

SEQ ID NO: 244511 - DNA, 614 bp, Homo sapiens
tatccccttatttggtcagaaagtacccttatatacatatgctcaaatacatccaaactcctgccaaatcctgtaggttcatactgctactgtgcttctatcttaaaatctgatccttctcatcttttcctgctagcatggcctagttcatgtcaattttccttccatctatatttggatgtttctgcctatataggttaggtgctgggatattaacctcctctggttttactgtgtcccttcagattaagccacattaaacaagccactaaaattatctctttaaaacctcagtgtgtttaccatctgaatgtagctctgtgatggaaaaatcatgtctctttgattattgtggtgttctagacacttagaagagctcttgggggcacaatagacattatgtatggatgtagaggaaagggagataataaggaagactcccttttggttcttattttgcacaagaggtgaacgcaaataacattcaatggaagtggataaaattaaggacatctcagagatgtctgtcctcaccacatccaaagcctaggcttttgcttttgtaaacatgcatattctctttctcttccttcttttctattactatccaatta

SEQ ID NO: 244512 - DNA, 438 bp, Homo sapiens
gtgttcagatcaaagacttagcatgacatcctgccccaactagcctccatatttaaaatcaaaacttgttaagttgaatttcataaagggctctcgttctttttccacaagggaaggaaggctgacctgctggtgaaaagcccttagggtggactgagttacccactgctgtccatgcccatgtgggatcctgcagctctaactttgcccaggctgtactctcggcctagaccactcttccttctttcctttgttcccaacttcccctcccccaactcctgtgtccctctctccagggagcctcctgtaatgtcctccagggcattgtgacctctccctccctagagcagacagcggttgactggctgccttcttagataactgaacattgatagccaccattcagatttattgcttactttatatggctgggcaaag

SEQ ID NO: 244513 - DNA, 941 bp, Homo sapiens
tacattgccagggtgaaattcaacagaagtgttttagggtaaagatcttgaggcccatgtgggcaaattatgagggtgatatgtagcttctttttctttgtagctatcttatttaggaataaaatgggaggcaggtttgtctgaggcagttcccagcttgactttaacctttgacttagtgattttgggttctgagatttattttcctttgacacaacctaataagtagttatgtcctaacaacttagtagctatttgagaagataacataattgaaagaaaaaaataatatgtttattttgttcttaaacagccataactactaatgggaaatgtatctctgttggtcattacaccagtgtctgaaaccttggaatcagattggacacttccaccctcatttcctgttctaggtagatttttagcattgttcttgttttttattacagcaactgctaacagctgcttaaaagtcagctccacaaagaaataatgtcattgaaaggaatatagcacaatgtaatgttcaagctgtgaaccacctggagctagtagttttgaggtattgagcaaatatcactgtgtttccctcgaaaatttaaaatattccacaacaccctgagagtttgctgcaatgctgtaggccacagttcgggagctgttgcagaactagagagttggttttttgtttattgctagtatttaattatgtgtaacacaggttaagaaataatactcatcagtgagattttggaagcattaaagatggatctttctgttcctctttaaaatatagatggggctgggtttgcttctttggcacttgaggcagaactaattaaaaagtgaggacacaaagagataattaagttgtccttgcttctaagtaagtatttctgttcctgcctggctctgaagttaagtgactataattagaagga

SEQ ID NO: 244514 - DNA, 834 bp, Homo sapiens
  misc_feature (84)..(84): n is a, c, g, or t
  misc_feature (127)..(127): n is a, c, g, or t
ttagcggcagcatttatatattagtaagacagggtggtcaggctggtgtagactcctgaactcaggcgatccatctgtctcggncttcccaagtgctggaattacaggcgtgagaccacaaggccgngctctagaattttaattctatgaagaagacagattaggtgaataattagatactgttctgcttgtaaagacaatacagttttccatattttacaaaagaagaaatgggagaaaggggtttaagtaacttgccctagtcacacagtaaggagaagcctgctacccaaacttctggcttgagtactcaaccacttactttctgtgctttatttccctttacgtggcagcaccattctgcagaaaacttccaagcagtttttttcacttaaaaattaaaaccctgtttactgccacctcttgactctttgccatgtgttgggctgtacatttgcttctaataaagataattggtctgttctttttctctttgaatcgggtcttgctcttttgccaggctggagtacagtggcatcgcagtcatggctcacgacagcctcaaactcctatgctgaagccatcttcctccctcagtctctcaggcagctgagactatgggtgtgtatcaccatgcccagctggggtgcagtggtgcggtctcgctcactgcaacctgcatctcccaggttcaagcgattctcctacgtcagctacttgggaggctgaaccagaggaatcgcttgaacccggggggcagaggttgcagtgagctgagatcatgacgctgtgctccagactgggcaacacagcgagtctctgtcttccaaaaga

SEQ ID NO: 244515 - DNA, 355 bp, Homo sapiens
ccaccctcgagtcggctttcgcccgtggggaaactgaggctgcctggtcgaaggcctccacggggaagcgccgaggcctcctccatgcctgggacctgggggtcttaatgaagggagagtccaccctcccgggcgaggatcccgatccatgaggcgccaacccccgcccgggcgcccgggtccagcctccccggccgagggtcggcctcacactcccctgctttgggtgtttggttttgtttaaaaaatgggactatactatatggtctacctgggtcttgccccctctgtgtgggtgacatatatcttagagattgttcaaaataaaaaacatagagaaaaggagaaaaataga

SEQ ID NO: 244516 - DNA, 481 bp, Homo sapiens
ccttcatctctactcttccaagatagaatcgctacttctgtaagtgccccaaagagcactcagctgagagcatcctatactaccaataaattctccttatgatcaatatcacaaagctctgaataatctggctgatgatgtgttcaaagagtagactccaggtgcagtatacctatgcttggtatcacaccagattgggtccattcctttctctgcattttgtattggatacccatcatcacagttgacttcactatgctgttattcttactgaatgttgaaacagactccaaatgggcatcttatactgatgcttaaactgaatgcttatatgcattactttggcttcaaagaaggcttttatgttttttgctatttattataaacagtatggaattttggcacctataaaagcaattattgcctgctggtcagtgacaactcaaactactttacctcaacatctccattttacacagta

SEQ ID NO: 244517 - DNA, 650 bp, Homo sapiens
aatccccaaataatgagaagggctggtcccacattatccatccagaaccttccatgctccaagccagaatgttggcaagatcgggttttgccttgagctatcctgggatgtgagacaaaccgatttctccatagatgggctgcagggagtgggaggcagtactccaggagagaagtgggtgaaggttcctgggatcttaggtaaagactagacgccgcctagtactggtctctactgtgctggctcaggagttctgagaactggaaggacttagcctcaacctgagttctgcacacaccccttccccttaaggaaggcagctctgagaggcagcaggacttgatccaaacccacagtcttgtcctggaggcagcaggggtgaaggtggagggtccagggccatgaggagcccccttgccatcagagcctggcctaaccaccctcttctctacttacacacacatgcattttataatagctctgacccaacctggccactctgcagagactgggacagacaggtgcaggcaatgggccctcccacacccagtcacctacaaggaattttcaaatccacttttaaaacagaaaccggtaaatgcgccgtattgtatattttatttaaataaaaaaaattccagcaaaaacta

SEQ ID NO: 244518 - DNA, 387 bp, Homo sapiens
ggccgataaaacatttcaatatggtcagtctaactggcaacgggagtaccagaactgagcaggaaaataagaggctgtggcagcaatccagatgagaaatgacactggctcagtccaggatttcatgactggacatgagtgaagaaaaggactcacagatgtctccaagatttctagcctgggtcaactagaaagatggagttgtcttcagttaaaacaaaaacaatctcagcacttcaggaggccaaggcaggaggatcacttgagcacaggagtttgaaaccaaccttgggcaacagagtcagaccctgtctctacaaaacatacaaaaattagctgggcatggtggcacacgactgtggtcccagctacttgggaagctgaggt

SEQ ID NO: 244519 - DNA, 256 bp, Homo sapiens
tcattccatttcatacttctttatatcgcaaatgcaattgtgctaattatcactacacttcatcaaatctaagtctacgttatttaataaaactattgccaatcaaactgtgacattcacattcttattagttagaatttttgttttatcttaaagaatgagctgtttagccctatctacttgtattttataatattacattcttttgtactttgcattctttgttcaaaaaacaaaaatgttgattaaagtatgt

SEQ ID NO: 244520 - DNA, 179 bp, Homo sapiens
accctccagctctctttgcctgtgccagggccacttggataccatggattgagatggcagggccacagaacgcaatccacctggaccctggagtccccaaggagctaccctggagaccagctggaccctcagcagaatttcagaaagttagaaataaaattctgtgtgtgattccactg

SEQ ID NO: 244521 - DNA, 433 bp, Homo sapiens
gtacctttggcctctgccccagttcctggcatggagctcctaacccttagcctttccgggatgccaggagcatcctttgttctactgaggtacccatgggggctcctggatgggggctgcacatcagagagccccccctaggattagaagcctagaactctcagccccagcccctgggaagaagagggctgggacgctgaggtcatcaggggtcatgcttatgtgatgaagcctcaaaagaaatccctaaaagacaaaagacaggacttgggagcatccagggtggaaacacatcagtgccgtgagggcagccacccccactcagtggggacagggctcctgcgctctggaagcttccggaccccaccctacggaccccgtcctgcgagtcctttgtaacatcctctataataaaccagcatgtgtaagtgtt

SEQ ID NO: 244522 - DNA, 575 bp, Homo sapiens
tctcaagcccatagtgaattgtgcccggacatctgacatcaacatctatgcaggctttgaaatggggtttgacacctttctgagggcagtaagagaggttgagaataataatcaaagtgaaaattcaggatgggatccagggaagtttggtagaattgttcttctctatttatcctcttagactcttctcagtttgattcacccttgacttctgcaagtaaggagtgaactaggaagcagcatggagagacctgggacacacttgggtcctttggcctcttggttagattttgagagtgatatttgggttctcttcttaaatcaaaaaccttaaagcagaaccatctgccatccaccttgcctctgtttcttcctttagattgaaaggcacgacagctgtgcatatgactacctggaagtccgggatggccccacggaagagagtgccctgatcggccacttttgtggctatgagaagccggaggatgtgaaatcgagctccaacagactgtggatgaagtttgtgtccgatggctctatcaataaagcgggctttgcagccaattttttcaagg

SEQ ID NO: 244523 - DNA, 1959 bp, Homo sapiens
agccgccgcagcctcggccgccgggcaagtagctccgagcggctgcttcccggttgcctcgacgaagacagggggcgccgcgctccgcttgctccgcgcctgagccatgcccagcagccctgtgtaaccaccgagtcccggccggagccgaccgacccagtgtgcgccgtctttcggccgagctgagctttcgtgcacgcaactccctctgccccagccggccccgcgccaccatgccccgggcgactgcacttggggccctggtgtcactgctgctgctgctgccgctgcctcgcggcgccgggggactcggggagcgcccggacgccaccgcagactactcagagctggacggcgaggagggcacggagcagcagctggagcattaccacgacccttgcaaagccgctgtcttttggggagacattgccttagatgaagatgacttgaagctgtttcacattgacaaagccagagactggaccaagcagacagtgggggcaacaggacacagcacaggtgggcttgaagagcaggcatctgagagcagcccagacaccacagccatggacactggcaccaaggaagctggaaaggatggccgggagaataccacactcctgcacagccctgggaccttgcatgccgcagccaagaccttctctccccgggtccgaagagccacaacctcaaggacagagaggatatggcctggaggagtcatcccctacgtcattggagggaacttcactgggagccagagggccatttttaagcaggccatgagacactgggagaagcacacctgtgtgaccttcatagaaaggacggatgaggaaagctttattgtattcagttacagaacctgtggctgttgctcctatgttgggcgccgaggaggaggcccacaggccatatccattgggaagaactgtgacaagtttggcattgtggctcacgagctgggccatgtggttgggttttggcatgaacacacccggccagacagagaccaacatgtcaccatcatcagggaaaacatccagccaggtcaggagtataatttcttaaaaatggaagctggggaagtgagctctctgggagagacatacgactttgacagcatcatgcactacgcccggaacaccttctcaagaggagttttcttagacaccatccttccccgtcaagatgacaatggcgtcaggccaaccattggccagcgcgtgcggctcagtcagggagacatagctcaagcccggaagctgtacaaatgcccagcgtgtggggagaccctgcaggacacaacgggaaacttttctgcacctggtttcccaaatgggtacccatcttactcccactgcgtctggaggatctcggtcaccccaggggaaaagatcgtattaaacttcacatccatggatttgtttaaaagccgactgtgctggtatgattacgtggaggtccgggatggttactggagaaaagccccccttttgggcaggttttgtggcgataagatcccggagcccctcgtctccacggacagccggctctgggtggagttccgcagcagcagcaacatcttgggcaagggcttctttgcagcgtacgaagctacctgcgggggagacatgaacaaagatgccggtcagattcaatctcccaactatccggatgactacagaccttccaaggaatgtgtctggaggattacggtttcagaggggtttcacgtgggacttaccttccaagcttttgagattgaaaggcacgacagctgtgcatatgactacctggaagtccgggatggccccacggaagagagtgccctgatcggccacttttgtggctatgagaagccggaggatgtgaaatcgagctccaacagactgtggatgaagtttgtgtccgatggctctatcaataaagcgggctttgcagccaattttttcaagg

SEQ ID NO: 244524 - DNA, 6764 bp, Homo sapiens
  misc_feature (3218)..(3218): n is a, c, g, or t
  misc_feature (6410)..(6410): n is a, c, g, or t
agccgccgcagcctcggccgccgggcaagtagctccgagcggctgcttcccggttgcctcgacgaagacagggggcgccgcgctccgcttgctccgcgcctgagccatgcccagcagccctgtgtaaccaccgagtcccggccggagccgaccgacccagtgtgcgccgtctttcggccgagctgagctttcgtgcacgcaactccctctgccccagccggccccgcgccaccatgccccgggcgactgcacttggggccctggtgtcactgctgctgctgctgccgctgcctcgcggcgccgggggactcggggagcgcccggacgccaccgcagactactcagagctggacggcgaggagggcacggagcagcagctggagcattaccacgacccttgcaaagccgctgtcttttggggagacattgccttagatgaagatgacttgaagctgtttcacattgacaaagccagagactggaccaagcagacagtgggggcaacaggacacagcacaggtgggcttgaagagcaggcatctgagagcagcccagacaccacagccatggacactggcaccaaggaagctggaaaggatggccgggagaataccacactcctgcacagccctgggaccttgcatgccgcagccaagaccttctctccccgggtccgaagagccacaacctcaaggacagagaggatatggcctggaggagtcatcccctacgtcattggagggaacttcactgggagccagagggccatttttaagcaggccatgagacactgggagaagcacacctgtgtgaccttcatagaaaggacggatgaggaaagctttattgtattcagttacagaacctgtggctgttgctcctatgttgggcgccgaggaggaggcccacaggccatatccattgggaagaactgtgacaagtttggcattgtggctcacgagctgggccatgtggttgggttttggcatgaacacacccggccagacagagaccaacatgtcaccatcatcagggaaaacatccagccaggtcaggagtataatttcttaaaaatggaagctggggaagtgagctctctgggagagacatacgactttgacagcatcatgcactacgcccggaacaccttctcaagaggagttttcttagacaccatccttccccgtcaagatgacaatggcgtcaggccaaccattggccagcgcgtgcggctcagtcagggagacatagctcaagcccggaagctgtacaaatgcccagcgtgtggggagaccctgcaggacacaacgggaaacttttctgcacctggtttcccaaatgggtacccatcttactcccactgcgtctggaggatctcggtcaccccaggggaaaagatcgtattaaacttcacatccatggatttgtttaaaagccgactgtgctggtatgattacgtggaggtccgggatggttactggagaaaagccccccttttgggcaggttttgtggcgataagatcccggagcccctcgtctccacggacagccggctctgggtggagttccgcagcagcagcaacatcttgggcaagggcttctttgcagcgtacgaagctacctgcgggggagacatgaacaaagatgccggtcagattcaatctcccaactatccggatgactacagaccttccaaggaatgtgtctggaggattacggtttcagaggggtttcacgtgggacttaccttccaagcttttgagattgaaaggcacgacagctgtgcatatgactacctggaagtccgggatggccccacggaagagagtgccctgatcggccacttttgtggctatgagaagccggaggatgtgaaatcgagctccaacagactgtggatgaagtttgtgtccgatggctctatcaataaagcgggctttgcagccaattttttcaaggaggtggatgagtgttcctggccagatcacggcgggtgcgagcatcgctgtgtgaacacgctgggcagctacaagtgtgcctgtgaccctggctacgagctggccgccgataagaagatgtgtgaagtggcctgtggcggtttcattaccaagctgaatggaaccatcaccagccctgggtggccgaaggagtatcccacaaacaaaaactgtgtctggcaggtggtggcccccgctcagtaccggatctcccttcagtttgaagtgtttgaactggaaggcaatgacgtctgtaagtacgactttgtagaggtgcgcagcggcctgtcccccgacgccaagctgcacggcaggttctgcggctctgagacgccggaggtcatcacctcgcagagcaacaacatgcgcgtggagttcaagtccgacaacaccgtctccaagcgcggcttcagggcccacttcttctcagataaggacgagtgtgccaaggacaacggcgggtgtcagcatgagtgcgtcaacaccttcgggagctacctgtgcaggtgcagaaacggctactggctccacgagaatgggcatgactgcaaagaggctggctgtgcacacaagatcagcagtgtggaggggaccctggcgagccccaactggcctgacaaataccccagccggagggagtgtacctggaacatctcttcgactgcaggccacagagtgaaactcacctttaatgagtttgagatcgagcagcaccaggaatgtgcctatgaccacctggaaatgtatgacgggccggacagcctggcccccattctgggccgtttctgcggcagcaagaaaccagaccccacggtggcttccggcagcagtatgtttctcaggttttattcggatgcctcagtgcagaggaaaggcttccaggcagtgcacagcacagagtgcgggggcaggctgaaggctgaagtgcagaccaaagagctctattcccacgcccagtttggggacaacaactacccgagcgaggcccgctgtgactgggtgatcgtggcagaggacggctacggcgtggagctgacattccggacctttgaggttgaggaggaggccgactgcggctacgactacatggaagcctacgacggctacgacagctcagcgcccaggctcggccgcttctgtggctctgggccattagaagaaatctactctgcaggtgattccctgatgattcgattccgcacagatgacaccatcaacaanaaaggctttcatgcccgatacaccagcaccaagttccaggatgccctgcacatgaagaaatagtgctgatgttcttgaaagacagaaactgagaattttttttgttttgttttgtttttaacaacaatagcaccttgaaaatctgccctaaaacagtgtacagtatttttctcaaacaaaaactcagaatccagccttagaggtatatatttgaatgaaagtcttgtaagtttggccaacaaggtggagagaaaaatgttcttttgcttctgtctgcaatgttatcattcatgaactgttaaagtgttaaagattaggattgaagtcactgaccattccggctatgcttcttcataccattctccttgtcccttgctcctatgtggcaaaaggtcagccttggggttggccgttcctctaatctggacttgcttgcaaaggtgccaggctgtcttctgtccatgttgggcataagggatgaaaacttggccgagactaatgtgtggcccacagctttggctggaatcattttctttctctctgccagggacatgtcaaccaagaaacctgaaaatatggatggatgtcaggactaaaaaaaggcatcacagtgagcagtgagcacagagggagtttcgagtataagaatcattgtcatgaagttaggagaccacaaagccatttctcagagtcattcactctccttgtccctttggtttccccccctccctaattgcagtgggggctaaggcatccattatgaatacagcagaacatttgctggcgagagtcctgtctgctgagaagacaatattgtggctcgtcctgatattttttcattcattgactttgagaagactccacctgtgcttggaattccatgggcttcaaagaacatttcttcttttagctttggaggcacttgccgtggcacacctggactccttgacatccaattcaaactgcatttgcaaaatgtgcaaagacctcttatgagggaccaattcaggtcccttatggggtgaacactgttgaagactggttaattataagttatgtaagaatcatcgccttgtggaacaagtcaatcagtgactagcttcctgtagccaatcaggttaaagagtgcgttggtaactttgctctgattaactagtattcaatcaccaacttgcaaacagaattcataacacttggcacttgttctagagaagtgtagaggatgatgtttacataattttagcacctcaaggtataatttaaacagtgaggtagttttgaatggcatttcattaaggcatctatgggcattatgagctaaaagctgtggtatgttagctttaaaagagtatttatgttggaataatttttaaataatgtttacataactgtaagtcctgtttggttgttgttggacgcagggcggcacatgagtgtttttggttagagccaagatagctcccatgcaccggaattcctttgggatgaatcagcatcattttaaacaaagtatatgtaaaaggtgaaaggttatattttttacagatcagaatgtggcaccagaggactgtgtctcattaaagtgattgctgggagcaaaaactagaatgatacaaagaaaggtcagagaaatgcatgggaatattttttccttaaaacagaaaaaaattaaagtattattaataatatatgtctgtatatatgtatgtatgtaaaagatcagctgtcaaagccttaatcaatgcagtgtggaaaatgccaacccctggtcctcgctttactgtgggccctgcaggactggctctccatttcctgcctctcctttcaccaagctctgttttggcctttctcggccctggactgaggctcagcctacacgctcatattgtgcatatggcagaccctgcccagcgtgcgctttgatacagcaaatggagcagctgacctcatggctccaatcccacctgcctgttagggtagattccatttatctgatttttgtattttctgaggttttatttggtctcatcttgtctatgagagttgaaactggaactgggaaacctaagatgggtgttatggttctttctccaaggaaataaaaattctgcagttttaacctttagaagtctaagcaagattaacaaatttcatagaaaagtgggagggagtcagaaacagagttggtgctgctcagcaggacggtgaaacaatgatacttctttttatctctttagtatgaacattttcaaaaacacacagcttcaacaattgtcaccatatggccaatttgcaacaatgggactcttatgaaaaacctttatttaggccttctgtgtgacgtatccacagaaaagagaagctctgattcagctggggctagctgggccgctcctctggaagcccacacttgtggggacttaggcatgacacaggttcttgcaaagaaactagaggctggcttcactagagagagtccattcagcagaaagtcccaggcctctgccttggtgcttccaattatcagtgacctgcctgcaagcatccccagaagcaaacagcagaggtagaagatatcactgcagcctgctttgtgctttaattgggtaccaagctttggggatgacagtgagttgcaagaatagttttagttcagagaattgtcttaggacaacaggctaatgaaggatttggggtctgggtttttagcctggctccgttctggtgtaacccggtctagcaaaagctaagcctggattgcagggcaggaaaaaatctggaattaactttagccagtggaatttcttcaaacagagaaagagaggctgttcattgatccactattccctctattttcctctaaggtaaatatttagaggtatttacctgtaaggtgaagtttcctttttatttctactttacaatttctctctaaagcaagcttgtccaacccttggcccaggacggctttgaatatggcccgacacaaattcgtaaactttttaaaaaacattgtaagattctttctgtgatttttttttttctcgtcagctatcgttagtgtattttatgtgtggcccaagataattcttcttccaatgtggcccagggaagccaaaagatgggacacccctgctgtaaagtttcatatcactcatgaattgctcagctgatttaaataatttgtaaaancctgctaactagcaaattcacattgagattttctattgattgggtccctttgatagctttcagattggtattgttagcgttccatttgtgaacaaatgttcccttggctttagcagatgtttttaaagtttcttttgtagaccgaacttctgaagagtaataccaaatgcctaaaattttatttttaaaaaggaaaattgtttaaagtattatatgtaaacatatgggtattttttattttgtgtaattttacatttcatgaaatgatgtcagtttcaaagagaaagtggagaggacctaacatatgtctctacctagaaaggatggtttcattaaagaatgtggatttattga

SEQ ID NO: 244525 - DNA, 4889 bp, Homo sapiens
  misc_feature (1343)..(1343): n is a, c, g, or t
  misc_feature (4535)..(4535): n is a, c, g, or t
ggatggtggctatattgattgcgcgcttttcgctaccatagaatcatcaccagaagtaagagagaaaatgcgcataaatgcttggcatggaataaacactcggcgagagtcagccaccatgagggtgctgcctggagcagcgtgcacctcatacaacctcaccagcgtcatttgtactaaagggtcgtgcagcagagtgcacaggtcaacagcagggtctctgatgccagagcaccagatcatggcccaactctcagtatgtgaccttgggcaagtcatctgacagcgatgagcctcattttcctcacctgtaaagcggggattagacacatcacaggggtgtaaagattaaatgaggcgatacttgtaaagcatttaaaacagctgccgacagagtgggcactcagcccttgctggctcttagccctaagtgagagagaagctgtgtgatgggatggaaggaagacagatttgggctgtgtaaagcctggctctgtcgcttaatagctgtcaaaatgtcaagcatttaatctctgaacccctgctctctcatctgcagtgtggtcattgtagcaatagctcatgtaactacttcatagggccacttgctggaccaaaagcaaggcggaggttgagaccctctctacagatgtcctcaagcatcatcacggccacacaccccctgcacagccagctggacgtctccctgcactgcctcgccccttcctgtcccagaactggaaaggaggcccccaccccagctgaacgccaggcccttgccttactttctgctcttctgtccccagacctttaatgagtttgagatcgagcagcaccaggaatgtgcctatgaccacctggaaatgtatgacgggccggacagcctggcccccattctgggccgtttctgcggcagcaagaaaccagaccccacggtggcttccggcagcagtatgtttctcaggttttattcggatgcctcagtgcagaggaaaggcttccaggcagtgcacagcacagagtgcgggggcaggctgaaggctgaagtgcagaccaaagagctctattcccacgcccagtttggggacaacaactacccgagcgaggcccgctgtgactgggtgatcgtggcagaggacggctacggcgtggagctgacattccggacctttgaggttgaggaggaggccgactgcggctacgactacatggaagcctacgacggctacgacagctcagcgcccaggctcggccgcttctgtggctctgggccattagaagaaatctactctgcaggtgattccctgatgattcgattccgcacagatgacaccatcaacaanaaaggctttcatgcccgatacaccagcaccaagttccaggatgccctgcacatgaagaaatagtgctgatgttcttgaaagacagaaactgagaattttttttgttttgttttgtttttaacaacaatagcaccttgaaaatctgccctaaaacagtgtacagtatttttctcaaacaaaaactcagaatccagccttagaggtatatatttgaatgaaagtcttgtaagtttggccaacaaggtggagagaaaaatgttcttttgcttctgtctgcaatgttatcattcatgaactgttaaagtgttaaagattaggattgaagtcactgaccattccggctatgcttcttcataccattctccttgtcccttgctcctatgtggcaaaaggtcagccttggggttggccgttcctctaatctggacttgcttgcaaaggtgccaggctgtcttctgtccatgttgggcataagggatgaaaacttggccgagactaatgtgtggcccacagctttggctggaatcattttctttctctctgccagggacatgtcaaccaagaaacctgaaaatatggatggatgtcaggactaaaaaaaggcatcacagtgagcagtgagcacagagggagtttcgagtataagaatcattgtcatgaagttaggagaccacaaagccatttctcagagtcattcactctccttgtccctttggtttccccccctccctaattgcagtgggggctaaggcatccattatgaatacagcagaacatttgctggcgagagtcctgtctgctgagaagacaatattgtggctcgtcctgatattttttcattcattgactttgagaagactccacctgtgcttggaattccatgggcttcaaagaacatttcttcttttagctttggaggcacttgccgtggcacacctggactccttgacatccaattcaaactgcatttgcaaaatgtgcaaagacctcttatgagggaccaattcaggtcccttatggggtgaacactgttgaagactggttaattataagttatgtaagaatcatcgccttgtggaacaagtcaatcagtgactagcttcctgtagccaatcaggttaaagagtgcgttggtaactttgctctgattaactagtattcaatcaccaacttgcaaacagaattcataacacttggcacttgttctagagaagtgtagaggatgatgtttacataattttagcacctcaaggtataatttaaacagtgaggtagttttgaatggcatttcattaaggcatctatgggcattatgagctaaaagctgtggtatgttagctttaaaagagtatttatgttggaataatttttaaataatgtttacataactgtaagtcctgtttggttgttgttggacgcagggcggcacatgagtgtttttggttagagccaagatagctcccatgcaccggaattcctttgggatgaatcagcatcattttaaacaaagtatatgtaaaaggtgaaaggttatattttttacagatcagaatgtggcaccagaggactgtgtctcattaaagtgattgctgggagcaaaaactagaatgatacaaagaaaggtcagagaaatgcatgggaatattttttccttaaaacagaaaaaaattaaagtattattaataatatatgtctgtatatatgtatgtatgtaaaagatcagctgtcaaagccttaatcaatgcagtgtggaaaatgccaacccctggtcctcgctttactgtgggccctgcaggactggctctccatttcctgcctctcctttcaccaagctctgttttggcctttctcggccctggactgaggctcagcctacacgctcatattgtgcatatggcagaccctgcccagcgtgcgctttgatacagcaaatggagcagctgacctcatggctccaatcccacctgcctgttagggtagattccatttatctgatttttgtattttctgaggttttatttggtctcatcttgtctatgagagttgaaactggaactgggaaacctaagatgggtgttatggttctttctccaaggaaataaaaattctgcagttttaacctttagaagtctaagcaagattaacaaatttcatagaaaagtgggagggagtcagaaacagagttggtgctgctcagcaggacggtgaaacaatgatacttctttttatctctttagtatgaacattttcaaaaacacacagcttcaacaattgtcaccatatggccaatttgcaacaatgggactcttatgaaaaacctttatttaggccttctgtgtgacgtatccacagaaaagagaagctctgattcagctggggctagctgggccgctcctctggaagcccacacttgtggggacttaggcatgacacaggttcttgcaaagaaactagaggctggcttcactagagagagtccattcagcagaaagtcccaggcctctgccttggtgcttccaattatcagtgacctgcctgcaagcatccccagaagcaaacagcagaggtagaagatatcactgcagcctgctttgtgctttaattgggtaccaagctttggggatgacagtgagttgcaagaatagttttagttcagagaattgtcttaggacaacaggctaatgaaggatttggggtctgggtttttagcctggctccgttctggtgtaacccggtctagcaaaagctaagcctggattgcagggcaggaaaaaatctggaattaactttagccagtggaatttcttcaaacagagaaagagaggctgttcattgatccactattccctctattttcctctaaggtaaatatttagaggtatttacctgtaaggtgaagtttcctttttatttctactttacaatttctctctaaagcaagcttgtccaacccttggcccaggacggctttgaatatggcccgacacaaattcgtaaactttttaaaaaacattgtaagattctttctgtgatttttttttttctcgtcagctatcgttagtgtattttatgtgtggcccaagataattcttcttccaatgtggcccagggaagccaaaagatgggacacccctgctgtaaagtttcatatcactcatgaattgctcagctgatttaaataatttgtaaaancctgctaactagcaaattcacattgagattttctattgattgggtccctttgatagctttcagattggtattgttagcgttccatttgtgaacaaatgttcccttggctttagcagatgtttttaaagtttcttttgtagaccgaacttctgaagagtaataccaaatgcctaaaattttatttttaaaaaggaaaattgtttaaagtattatatgtaaacatatgggtattttttattttgtgtaattttacatttcatgaaatgatgtcagtttcaaagagaaagtggagaggacctaacatatgtctctacctagaaaggatggtttcattaaagaatgtggatttattga

SEQ ID NO: 244526 - DNA, 1031 bp, Homo sapiens
agagagaagctgtgtgatgggatggaaggaagacagatttgggctgtgtaaagcctggctctgtcgcttaatagctgtcaaaatgtcaagcatttaatctctgaacccctgctctctcatctgcagtgtggtcattgtagcaatagctcatgtaactacttcatagggccacttgctggaccaaaagcaaggcggaggttgagaccctctctacagatgtcctcaagcatcatcacggccacacaccccctgcacagccagctggacgtctccctgcactgcctcgccccttcctgtcccagaactggaaaggaggcccccaccccagctgaacgccaggcccttgccttactttctgctcttctgtccccagacctttaatgagtttgagatcgagcagcaccaggaatgtgcctatgaccacctggaaatgtatgacgggccggacagcctggcccccattctgggccgtttctgcggcagcaagaaaccagaccccacggtggcttccggcagcagtatgtttctcaggttttattcggatgcctcagtgcagaggaaaggcttccaggcagtgcacagcacaggtacctggggtgggacactggcttccacctgatgagcacttggacaggagacagagaaatggtgaaggcacgacaaggactgccttttattctgactgggggagggcgaggggaggaaggtgcgtgataaaatgtcctattaaaatgaagcatcaagctgggcgtggtggctcatgcctgtaatcccagcactttgggaggccgaggcaggcggatcatctgaggtcaggagttcgagaccagcctgggcaacatggtgaaaccccgtctctactaaaaatacaaaattagctgggcatggtggttggtgcctgtaattccagctactcaggaggctgaggcaggagaattgcttgaacctggaggcagagattgcagtgagccaagatcgtgccattgcactctagcctggacgatagagtgagactttgtctctaaaaaaat

SEQ ID NO: 244527 - DNA, 1893 bp, Homo sapiens
agccgccgcagcctcggccgccgggcaagtagctccgagcggctgcttcccggttgcctcgacgaagacagggggcgccgcgctccgcttgctccgcgcctgagccatgcccagcagccctgtgtaaccaccgagtcccggccggagccgaccgacccagtgtgcgccgtctttcggccgagctgagctttcgtgcacgcaactccctctgccccagccggccccgcgccaccatgccccgggcgactgcacttggggccctggtgtcactgctgctgctgctgccgctgcctcgcggcgccgggggactcggggagcgcccggacgccaccgcagactactcagagctggacggcgaggagggcacggagcagcagctggagcattaccacgacccttgcaaagccgctgtcttttggggagacattgccttagatgaagatgacttgaagctgtttcacattgacaaagccagagactggaccaagcagacagtgggggcaacaggacacagcacaggtgggcttgaagagcaggcatctgagagcagcccagacaccacagccatggacactggcaccaaggaagctggaaaggggagccagagggccatttttaagcaggccatgagacactgggagaagcacacctgtgtgaccttcatagaaaggacggatgaggaaagctttattgtattcagttacagaacctgtggctgttgctcctatgttgggcgccgaggaggaggcccacaggccatatccattgggaagaactgtgacaagtttggcattgtggctcacgagctgggccatgtggttgggttttggcatgaacacacccggccagacagagaccaacatgtcaccatcatcagggaaaacatccagccaggtcaggagtataatttcttaaaaatggaagctggggaagtgagctctctgggagagacatacgactttgacagcatcatgcactacgcccggaacaccttctcaagaggagttttcttagacaccatccttccccgtcaagatgacaatggcgtcaggccaaccattggccagcgcgtgcggctcagtcagggagacatagctcaagcccggaagctgtacaaatgcccaggtcctacttgtgcttttgttagccagaaaacatcaatctgcttgctacacttctcaccaacctgttccgagggctttggctggcaaagggcgtgtggggagaccctgcaggacacaacgggaaacttttctgcacctggtttcccaaatgggtacccatcttactcccactgcgtctggaggatctcggtcaccccaggggaaaagatcgtattaaacttcacatccatggatttgtttaaaagccgactgtgctggtatgattacgtggaggtccgggatggttactggagaaaagccccccttttgggcaggttttgtggcgataagatcccggagcccctcgtctccacggacagccggctctgggtggagttccgcagcagcagcaacatcttgggcaagggcttctttgcagcgtacgaagctacctgcgggggagacatgaacaaagatgccggtcagattcaatctcccaactatccggatgactacagaccttccaaggaatgtgtctggaggattacggtttcagaggggtttcacgtgggacttaccttccaagcttttgagattgaaaggcacgacagctgtgcatatgactacctggaagtccgggatggccccacggaagagagtgccctgatcggccacttttgtggctatgagaagccggaggatgtgaaatcgagctccaacagactgtggatgaagtttgtgtccgatggctctatcaataaagcgggctttgcagccaattttttcaagg

SEQ ID NO: 244528 - DNA, 5380 bp, Homo sapiens
  misc_feature (1834)..(1834): n is a, c, g, or t
  misc_feature (5026)..(5026): n is a, c, g, or t
tctcaagcccatagtgaattgtgcccggacatctgacatcaacatctatgcaggctttgaaatggggtttgacacctttctgagggcagtaagagaggttgagaataataatcaaagtgaaaattcaggatgggatccagggaagtttggtagaattgttcttctctatttatcctcttagactcttctcagtttgattcacccttgacttctgcaagtaaggagtgaactaggaagcagcatggagagacctgggacacacttgggtcctttggcctcttggttagattttgagagtgatatttgggttctcttcttaaatcaaaaaccttaaagcagaaccatctgccatccaccttgcctctgtttcttcctttagattgaaaggcacgacagctgtgcatatgactacctggaagtccgggatggccccacggaagagagtgccctgatcggccacttttgtggctatgagaagccggaggatgtgaaatcgagctccaacagactgtggatgaagtttgtgtccgatggctctatcaataaagcgggctttgcagccaattttttcaaggaggtggatgagtgttcctggccagatcacggcgggtgcgagcatcgctgtgtgaacacgctgggcagctacaagtgtgcctgtgaccctggctacgagctggccgccgataagaagatgtgtgaagtggcctgtggcggtttcattaccaagctgaatggaaccatcaccagccctgggtggccgaaggagtatcccacaaacaaaaactgtgtctggcaggtggtggcccccgctcagtaccggatctcccttcagtttgaagtgtttgaactggaaggcaatgacgtctgtaagtacgactttgtagaggtgcgcagcggcctgtcccccgacgccaagctgcacggcaggttctgcggctctgagacgccggaggtcatcacctcgcagagcaacaacatgcgcgtggagttcaagtccgacaacaccgtctccaagcgcggcttcagggcccacttcttctcagataaggacgagtgtgccaaggacaacggcgggtgtcagcatgagtgcgtcaacaccttcgggagctacctgtgcaggtgcagaaacggctactggctccacgagaatgggcatgactgcaaagaggctggctgtgcacacaagatcagcagtgtggaggggaccctggcgagccccaactggcctgacaaataccccagccggagggagtgtacctggaacatctcttcgactgcaggccacagagtgaaactcacctttaatgagtttgagatcgagcagcaccaggaatgtgcctatgaccacctggaaatgtatgacgggccggacagcctggcccccattctgggccgtttctgcggcagcaagaaaccagaccccacggtggcttccggcagcagtatgtttctcaggttttattcggatgcctcagtgcagaggaaaggcttccaggcagtgcacagcacagagtgcgggggcaggctgaaggctgaagtgcagaccaaagagctctattcccacgcccagtttggggacaacaactacccgagcgaggcccgctgtgactgggtgatcgtggcagaggacggctacggcgtggagctgacattccggacctttgaggttgaggaggaggccgactgcggctacgactacatggaagcctacgacggctacgacagctcagcgcccaggctcggccgcttctgtggctctgggccattagaagaaatctactctgcaggtgattccctgatgattcgattccgcacagatgacaccatcaacaanaaaggctttcatgcccgatacaccagcaccaagttccaggatgccctgcacatgaagaaatagtgctgatgttcttgaaagacagaaactgagaattttttttgttttgttttgtttttaacaacaatagcaccttgaaaatctgccctaaaacagtgtacagtatttttctcaaacaaaaactcagaatccagccttagaggtatatatttgaatgaaagtcttgtaagtttggccaacaaggtggagagaaaaatgttcttttgcttctgtctgcaatgttatcattcatgaactgttaaagtgttaaagattaggattgaagtcactgaccattccggctatgcttcttcataccattctccttgtcccttgctcctatgtggcaaaaggtcagccttggggttggccgttcctctaatctggacttgcttgcaaaggtgccaggctgtcttctgtccatgttgggcataagggatgaaaacttggccgagactaatgtgtggcccacagctttggctggaatcattttctttctctctgccagggacatgtcaaccaagaaacctgaaaatatggatggatgtcaggactaaaaaaaggcatcacagtgagcagtgagcacagagggagtttcgagtataagaatcattgtcatgaagttaggagaccacaaagccatttctcagagtcattcactctccttgtccctttggtttccccccctccctaattgcagtgggggctaaggcatccattatgaatacagcagaacatttgctggcgagagtcctgtctgctgagaagacaatattgtggctcgtcctgatattttttcattcattgactttgagaagactccacctgtgcttggaattccatgggcttcaaagaacatttcttcttttagctttggaggcacttgccgtggcacacctggactccttgacatccaattcaaactgcatttgcaaaatgtgcaaagacctcttatgagggaccaattcaggtcccttatggggtgaacactgttgaagactggttaattataagttatgtaagaatcatcgccttgtggaacaagtcaatcagtgactagcttcctgtagccaatcaggttaaagagtgcgttggtaactttgctctgattaactagtattcaatcaccaacttgcaaacagaattcataacacttggcacttgttctagagaagtgtagaggatgatgtttacataattttagcacctcaaggtataatttaaacagtgaggtagttttgaatggcatttcattaaggcatctatgggcattatgagctaaaagctgtggtatgttagctttaaaagagtatttatgttggaataatttttaaataatgtttacataactgtaagtcctgtttggttgttgttggacgcagggcggcacatgagtgtttttggttagagccaagatagctcccatgcaccggaattcctttgggatgaatcagcatcattttaaacaaagtatatgtaaaaggtgaaaggttatattttttacagatcagaatgtggcaccagaggactgtgtctcattaaagtgattgctgggagcaaaaactagaatgatacaaagaaaggtcagagaaatgcatgggaatattttttccttaaaacagaaaaaaattaaagtattattaataatatatgtctgtatatatgtatgtatgtaaaagatcagctgtcaaagccttaatcaatgcagtgtggaaaatgccaacccctggtcctcgctttactgtgggccctgcaggactggctctccatttcctgcctctcctttcaccaagctctgttttggcctttctcggccctggactgaggctcagcctacacgctcatattgtgcatatggcagaccctgcccagcgtgcgctttgatacagcaaatggagcagctgacctcatggctccaatcccacctgcctgttagggtagattccatttatctgatttttgtattttctgaggttttatttggtctcatcttgtctatgagagttgaaactggaactgggaaacctaagatgggtgttatggttctttctccaaggaaataaaaattctgcagttttaacctttagaagtctaagcaagattaacaaatttcatagaaaagtgggagggagtcagaaacagagttggtgctgctcagcaggacggtgaaacaatgatacttctttttatctctttagtatgaacattttcaaaaacacacagcttcaacaattgtcaccatatggccaatttgcaacaatgggactcttatgaaaaacctttatttaggccttctgtgtgacgtatccacagaaaagagaagctctgattcagctggggctagctgggccgctcctctggaagcccacacttgtggggacttaggcatgacacaggttcttgcaaagaaactagaggctggcttcactagagagagtccattcagcagaaagtcccaggcctctgccttggtgcttccaattatcagtgacctgcctgcaagcatccccagaagcaaacagcagaggtagaagatatcactgcagcctgctttgtgctttaattgggtaccaagctttggggatgacagtgagttgcaagaatagttttagttcagagaattgtcttaggacaacaggctaatgaaggatttggggtctgggtttttagcctggctccgttctggtgtaacccggtctagcaaaagctaagcctggattgcagggcaggaaaaaatctggaattaactttagccagtggaatttcttcaaacagagaaagagaggctgttcattgatccactattccctctattttcctctaaggtaaatatttagaggtatttacctgtaaggtgaagtttcctttttatttctactttacaatttctctctaaagcaagcttgtccaacccttggcccaggacggctttgaatatggcccgacacaaattcgtaaactttttaaaaaacattgtaagattctttctgtgatttttttttttctcgtcagctatcgttagtgtattttatgtgtggcccaagataattcttcttccaatgtggcccagggaagccaaaagatgggacacccctgctgtaaagtttcatatcactcatgaattgctcagctgatttaaataatttgtaaaancctgctaactagcaaattcacattgagattttctattgattgggtccctttgatagctttcagattggtattgttagcgttccatttgtgaacaaatgttcccttggctttagcagatgtttttaaagtttcttttgtagaccgaacttctgaagagtaataccaaatgcctaaaattttatttttaaaaaggaaaattgtttaaagtattatatgtaaacatatgggtattttttattttgtgtaattttacatttcatgaaatgatgtcagtttcaaagagaaagtggagaggacctaacatatgtctctacctagaaaggatggtttcattaaagaatgtggatttattga

SEQ ID NO: 244529 - DNA, 111 bp, Homo sapiens
tgagttttaaattactttttaaacacgcaaaattccttttaaggatggtgtaatctcaaagttatttcaaaagaatattaaatgtattctctctagcagtgggagttcaga

SEQ ID NO: 244530 - DNA, 173 bp, Homo sapiens
taaatacaataaacgaacgtttccagaaatagatataaatactgtagaagaatgctagcatgtcgtacatctggatcaccttaaagaagcaacataaggctcaaagtcttaaaattattttgtaaaatgttaatgtgtacttagattttattaaaatcttttattgacttctt

SEQ ID NO: 244531 - DNA, 644 bp, Homo sapiens
tggtccttcttttctcacttctaatttttaagaataactgtagaatgtgctggaaatgcaaccttcagggataaagaagaatcagctggaacagcctaggttttattctagtctctcacagaaacaggatatccttcagtgctttagcccagcatatcatgttgccccttaggggtaaacccaaaggtaggctgctttctggagtccttcagctgcagtgcaggtggggaacaggaagatgagtttccatccaccttggacagcttttctgaggcttggggaactatctctgaatgaatcttagactttggttgtcctttgctgagtaagtaataagctcactttatgtaactcattgtttgtgtgttttgtctcaccagactcaggaaagtagtaaatgtgcatcccaagacacagtgggctgaagcgctcagactcctattcctggtggttggcatagtaatgatctttgctatcctatatcctcccttgggattggtaatcagcaaacttattttgctattgtctagcacagtgcctgtttgttgagtgaatatttattgaatgaataaatgttataaaagctttttttttttttttacatttgccctacagctaaaagcctgattgctttgaggcaggta

SEQ ID NO: 244532 - DNA, 268 bp, Homo sapiens
atagagtgatgttaaattttctggtctaaaatttctaaaatctgttttctaccttctgaaaaattgaaccattacatgttattctcctgtcttctgatatcagttctatttttcgtcattcttcaaagattaaggagtttcctatccacatgtccgagtttttccagagctttgagatgccactcatctgtgtctgaatcagagactcatttaaagcagctagctgtttctgtcctctcttctcccacatattgaacttcatttttat

SEQ ID NO: 244533 - DNA, 860 bp, Homo sapiens
agggactttcagtaaaggctgagctgaagctgaatttgaaaagcacattctttacgttccattgaagatctgcacttgctcttctgctaaccgctaaggtgtcatcagtgctgtgctattaaaatcagaagtcaaagaaggtgggtgtggccctcatagccagagttgatagaaatggatttatttatataatggatggtccatagaaaggtgaatgacctggttaacagacagggatggagtggagacctgtctgccctggtcttcaggctggttctgaaatcacagaattaagatgatctcagctgaggggcaaggcaaatcggatggaagagcggaggcccagagaagcgaagccctttcccaatatctcacagcaggtggggagtgggggaaagcagcttccagggggtggattcctgaaccaggtatttgtcactgtcccacgtagctcctcttgtcaccatatgtcccactcagtggagggatacttcctgcaagacaaagagggcctcatggttcccccgtcactcactgccttccactccctgcttctgattattctgtaagaagttgaggccgagcgcagtggctcacgcctgtaatctcagcactttgggaggccgaggcaggcggatcacctgaggtcgggagttcgagaccagcctgaccaacatggagaaaccccatctctactaaaaatacaaaattagccgggcgtggtggcgcatgcctgtaatcccagctactcgggaggctgaggcaggagaattgcttgaacctgggaggcagaggttgcaatgagccgagatcgcaccattgcactccagcctgggcaacaagagcaaaactccatctca

SEQ ID NO: 244534 - DNA, 403 bp, Homo sapiens
tttcatgatgctatattcatgctgtgccagtttggatagtagattggaggtccctaagaccacctctgggttctgtgatttactaaaataactgagactatagttgtacttataacaatattacagtgacaagatacaaaacagaatctgtaaagggaaatggctcatgggcagttgtctagaggaaaccagaagcaagcttaccagagtcctctctgcatggtgttacataagactcaactcctctagcattgaattgtgatactacttgtgaaatgtctacaatggaagctcattagcaaccagcagcacaggttcttattgagattgattatgtaggtatgtgtctagtacatatcaagattcccaactctaagaagaagagcaagtgttccaaataagc

SEQ ID NO: 244535 - DNA, 361 bp, Homo sapiens
cacgcaggaatgggccaagctagctccctccagcccttttataaagttactagtcccattcatgagggcagaacccgcagggcctaccacctcctaaaggccccacctcttactactgccgcgctggggatgaagtttcaatgtgaattttggaggagacacaaacattcaaaccataacagcagcttagaaagaaatactacaactggacctccgtgctcaagaacccaaggcgcttctcataagtattgtcataataatgtccaatacttgtgtatctcataatggtttacaaaaccttttcacatagtctcacttaattttcacaaatacctaaaatagaaaattacactccaattga

SEQ ID NO: 244536 - DNA, 162 bp, Homo sapiens
tccacttaaaaaaaaaaaaaaaagaaattttagccgggcttggtagcaggctactcaggaagaaggtgggagaatcctttgagctctgaaggttgaggctgcactgagccaggattgcacaactgtacttcaacttgggtgacagagcaagaacttgtctca

SEQ ID NO: 244537 - DNA, 518 bp, Homo sapiens
attacaagtgtgagccacagcatccggctgattataatcttaaatcctaaaaacaactcatcctggtagattcattttttctttatttcacaaaagagaaaacaaagttcagaagtgttaagtgacttggctgaggtcaccccactaacagattccagagctggcattcaaaccctgtccacctggccccaaagcctgaactgcttggattacacggcatttcccctacggtctccatcttctggtcatctctgtatgaaagctgaaacaagagggtagagtgacttgttcttagttgtgaacttaaattttttaccactctgtctatttgcaaatgaccatgaaagcacatgagtattgatttggggattacaaataaatttgagcagctaagcaaattcagaaatgcagaatttgtgaatagaaaagattaactgtaaatcacttgaaatcccagataaccaccgtagaacaccatttcaggttactctccacatgtgttttaagtgatttttata

SEQ ID NO: 244538 - DNA, 299 bp, Homo sapiens
ctcggcctcccaagtagctggaattataggcacacaccaccacactcggctgatttttgtatttttagtagagacggagtttctccatgttggccaggctggtctcgaactcctgacctcaggtgatccgcccacctcagcctcccaaactgctgggattacaggtgtgagccaccgcacttggccaaaaagtttttgattgttttgatttgtgtccgttagattctgttagtagagtggagggatggcttaggtaaagttcctgccatcagagatactctgtttctgttgtaggattc

SEQ ID NO: 244539 - DNA, 314 bp, Homo sapiens
actgttactatgccatgtgataggagagactttatatagtagttgatccatcatacagttaccatataaaacttccaggtttcttacttgttttggtttgtgtttagaattttgttgaaagtcagatgttaaagtttgggagtaccaggtgttatgtatttatagaaatacatcatctgatgttgagaaatatgaactgtggcataacttttaaacaaggaggcatagttcttctttatacctcattaaagatttactataaaagtacataaggtggggcaaaaagaagaaaataatttctggtaaatgtaaga

SEQ ID NO: 244540 - DNA, 469 bp, Homo sapiens
ttactggatatgatgccttcattttacctttaagtaaaccaaggcttagagaaagtggtctatttgatctagaaagaatatgctgtagtgtcgctatctacttggaatctgttcaggactccttggtttgtcatctagtctaccatgtaaaccaagtggcaacttatcttctaatttaagatattattggccaggcatggtggctcacgcctgtaatcccagcactttgggtggctcaggtgggcaggtcacttgagcccaggagttcgagatgagcctgggcaacctggtgaaaccccgtctctacaaaaaatacaaaaattagctgggcatggtggcatgcacctgtaaacccaactactaaggaggccgaggtgggaggatcccttgagccggggaggcaagggttgcagtgagcagattgcatcagtgcactccagcctgagtgacagagtgagaccccatctca

SEQ ID NO: 244541 - DNA, 338 bp, Homo sapiens
aaaactgtaggttatttttttgaacttggagcaggttggctgggcagtggggttggagatgacagtgtgggcaatggtggggagagttccttttatcattgtttcctgctgaaattttaaaagctacagtttaaaggggagtatatctttatgcactgtgcccgagatggatttgccctaatggaaagaccaaagctgtatatgctttcttatttttctcaatgcatttttgaaacttttcattaaaaaattgagatttacagagaggaggttatacttgaaaagaaagtatacgcaataagtacgtagaattttatctgtcaatttaaagaaataat

SEQ ID NO: 244542 - DNA, 300 bp, Homo sapiens
agacaagtggcccggggctatccagtaacctaaaagtatcattagcatcccatgctctctctgtcttcctcttttgatatttctagcatgactcacccatgctcacgtttttatcatgtctcaaagtggctgctgcagttccagtgacagaattgatgtgtcagacagaaagaaaaaggaaagtaggaaagacaaaatattataagtcagctaaatggaaaacatggaaaagctttaatccctatcattgatttaaacaaacaaaatctcacacatttaaaataaatgatgcaaaggaaa

SEQ ID NO: 244543 - DNA, 209 bp, Homo sapiens
tagttttctagcacaaatattagaggcaataaagaattttattcaaggttgacagctttagcaaacagtttctgttttatattgatgctctcttattttccatgttttctcagcattctggatatagcaccactaaaaaaattcttttggttaaattctgaatagtttaagctttaaaatgcaacttattggaaagatacaggggtagg

SEQ ID NO: 244544 - DNA, 386 bp, Homo sapiens
ccttggcttcctaaagtgctgggattacaggtgtgagccatcatgcttggtgtatgcttgtttatttttattttcattttattttttaaattttctcatagagacagggtttcaccatgttggtcaggctggtcccgaactcctgacctcaagtgatctgcccgcctcgacctcccaaagtgctgggattacaggtgtgagccaccgtgcctggtcatcatattaaatttataacaaactatcttcaatcaataaaaactgagcttaggctgggagaagtggctcacgcctgtaataccagtactttgggaggccgaggcggatggattgccttaggtcgggagttcaagaccagcctgactgacatggagaaaccccgtctctac

SEQ ID NO: 244545 - DNA, 397 bp, Homo sapiens
aaatttggttctctctgttaaaacaataaggttttcctggacttctggtctgctttcaataagaaattgtataaggttttcctttaccttttaagtaattggcttagggaacaaaaattctgcttatgttttgttttttaagattatatatttatgaagataatttcctgtgcttcacgttgtccttattaagtctttgattacttaataaaatctaaggtttttcctacaactatgtggctttctgtatttgcttttgaagtcttttaattatcactctaattaaatgaataagtattgattcacagtgacctgtgatcctattttaatcaaatgttttaaactttttgacatttttgacaatttccatttttgacatttttgataaattataaat

SEQ ID NO: 244546 - DNA, 419 bp, Homo sapiens
aattgttatcatgctatgcagatgaaaataatctcacaggctggggtagagtgtggacagggttctgagccggacccccaggggttagctctaaggaggggagaggaacgatggaactctctgaagaatttgaggataagtgggaggactgaggctctacttccccttggaatacacaggcggtccccacatgagagtagatacctggatggcatggttcagctgaggactggagagagctcccccagtgtctagtgacccagagggacacagaagagcatcttacctgagatgcaagtgaaagcttagatcattcttaatacatatctgggagccagagtctaaggggagagaaggatggaacatttgacatttgaaagtcttcagggagtactgggcaattaaaaattcaaaaggaa

SEQ ID NO: 244547 - DNA, 498 bp, Homo sapiens
ttagctcatgggccatacaaaaataggtggtggaccataatatctcaaccgctggtctcagcctcactgctgaggataatgagtagctgtgcacaaatagttacttcatcagtgcttccccagctagggacagagctacgctcaccagtcatttagcctgctaggcagaactctggaattctgattcaacttctgccctgatgctttccagctgtgaccttgggctctagtcacacgatatcagagtctcaggctgctcatttccaaaacagtgatacaaaatttttttctgccttcttcatggcactggtgcaaactgcatatgaacgtcttcatagtctgattgctggtttcctctgtggcctccatttgcaaaaagtacattaacattttaatcatccttcaccaaacatttctggaagacctattctatgccagtctgagcccttggggatatacagatgactgagaactagaccttgccctcacagcaaaaaa

SEQ ID NO: 244548 - DNA, 432 bp, Homo sapiens
cattatcatgaccgtcatgtttatggacacatttaaatatgtgaacttgcagatcaggagttcttaaccacaggtgctctgtccctcaggggacacttggcaatatcagagacatttttgattatcacaactgggggtgatggggagtgtgtgctactggcatctagtaagtaggggccagggatgctggaaacatcctgcaaagcacaggacagctccctgcaacaaagaagaatccagcccaaaatgtcaatagcatcaacgttgaggaaccctgatgtaaatgctaaaaatatgtatttaaatcacacctggaattgtcaagcccaggaagctggcctagacaaggagttaataccaaatgacaacaggtcagttagattttaagggcttcactctgggaagggtgttgctttcctttctaatagagca

SEQ ID NO: 244549 - DNA, 1850 bp, Homo sapiens
  misc_feature (1150)..(1150): n is a, c, g, or t
cataagtagccccacagtgtagtagtgggagtgacaaatctctacctaaagtattataaaaagactgtggacagagatatgcctatggcctgtgggagaatatcccataggatatttaaactggacatccagggacatccacactgcctggggaagcctcctgggaccatggtgaaggcaaatgccaatctcacctttaccatcttgggtgatattatgatgcagggtggtatagtggaagtatctcaaggcctgcttgccagaataaactttcacaaaatcctccaaatcctctttatgtcacatcatcctcagaagtatcctgctatccacctaaaacccacagtcccataaatactatgccgcttctttttttttccttcaacttttaggctcgggggtacatgtgcaggatgtgcaggtttgttacatgggtaaacgtgtgccatggtggtttgctgcacagatcaactcatcacctgggcattaagtccagtatccattagctatgcttcctgatgctctcccacccccctcccccactcccctgccctttcttaaaggatgaagaaaggataactcttatatttgacctttgagggtctcacccagtgatctcagccttctactcttgaaggcttttacatgctatgcagtgatagtgattaaaatattccctcttcccccaaatcaggcaatgcccaatatctcagtggggaagataccctattcagagtcacatgtattcttcatagcacatcaggaaaatattcattttctgtagccagtatgaagaaaggaagtatatggggaaatctctgtacctttctttcaattttgctatgaacctaaaagtgctattaaaaaaataaaatcttaaaaaaagtatactttcactttcatcccaaaggagagcttgaagtatctgaaagtgaaaagaaagtgtaggatatcactaagaattctagtcaaactggggaagcagattttagatgtctagtgttgaccttatccccagtgttgactttgtcttcatggtctttaggagtaacatctttttaagtttcctcagtggcaaatgtaagaagttaagtagtttggtggtgttgggaaatacaattctaggaagagttagaggtggcagtggtgngtgggcaggggttattttggaggagaacttgtgttaggccttagacatgcaggtggtggtggaagcaggattccagctgtgacctctagctaccagcaacttgcttcttagattaaatgatctaagcttctgttttgatcttgataactctatcaagcattagacatatctaaaatggaaggcacggtggactctcactccctccgccttggagctggatccacattttatacagtagctaagccggaaataccggcaccatccttagagctactttcatagtacactttgaatcaatctctcaggcattttgattctatttcctaaatatagtttgcttcagtgcattcctcgccctctgtcaatgattaccacgtgtgcctgaatatgaggtgaggttccccttttcctgcaaaattactcctcagagaagagggagtcttgaggtggagtcaatgcaaagcctctgctattactgggtgctttctccaaggctttattttaaatagagcatttgtgaggaagacacattagccccacatgaccctgtttaatgcggttaggtattatggagggcacctgacaaaatctttttaaaaaagggtatggcagctttgaaaatagtgtaggaatttattcttaggaatgtgtcctcacagttgtaaatgcaaagtatctttataaacaaacctttccacta

SEQ ID NO: 244550 - DNA, 336 bp, Homo sapiens
tgtttatactagttttctaggctaatctttgcatataagaaaatagaatttaggacattagccaggcgtagtgtaatctcagcaccttgggaggctaaggtgggatgatcacttgtggccaggagttcaagcccatcctggtcaacataacaagactatgtttttacaaaaaatgttaaaaattagcttgtaatgatggtgcatgcctgtagtctcagttactcttgaggctgaagtgaaagactctcttgggtccaggagcttgaggctgcactgagccatgatcacaccactgtactccagcttggatgacagagtgagaatctgtttctaaaa

SEQ ID NO: 244551 - DNA, 343 bp, Homo sapiens
ggtctgcagccatatactgaatggctgcagttgcacccaggagggcagggatcctgcctgcttctatcctgcttcaatggaataggaggcccgggtccacagctggggtttggatggctgcagcggcacccggggagctcccgcctcaacttggaggggcagggctcccaccagctccacggagcgtgcagccccagctggcttcgctgctgcagccggcgtaatggccgcggcaggccgtctggagcagccactgccatcaaaatcaatagctttcctacatgcagtaataactagctagccaacataacagaatgcaagattctacttcaagatgacacaa

SEQ ID NO: 244552 - DNA, 353 bp, Homo sapiens
gcatctctcccccatctttcccttccttttcccctttctgtcattccttggatgtcatcttgaatgtcccctctttccttcattctgtatttcaccacattgtcctttgagttttttgcattcccttctatctccattgccaacagtgagctcaagcctttgtgtttccttctggattctcatccctccaccagttttgaatcttcctgctacccatcttccatattattatttgcttagttccataaacattgacttttttttcctctgaatttctttttttcttttatttatttatttttttttaaggtggagtctccccctgtcacccaggctggagtgcagtggtgtga

SEQ ID NO: 244553 - DNA, 428 bp, Homo sapiens
caggtgttctgtcacctcagaggccagccagcctgctgctcctggagcatctggttactaataagagacaacagcctatagcaggggagtcatttcacagtggctagagcccagtccactggctggacttttccaaagagatttcctgtttttctagaaccaatgtcatcctcactgagagctcctagtgagcccctagtgggacttttgtaataaagtcctatagctggggggccgtgacaaccggctgctttccaaagtctgtggcttccttctttaggcatttgtttgtttggtttggttttacagacaaagtctctctctgttgctcagccaggagtgcagtgagccaagatcaggccactgcactctagcctgggtgacagagtgagaccctgcctcaaaccaaaccaaaaaaataagtaagg

SEQ ID NO: 244554 - DNA, 368 bp, Homo sapiens
ggaatggtggaagtgatgcggcgtccaggttatttatcctcatttgaattttttataagaaaaatgtgtttgccgggtgcggtggctcaagcctgtaatcccagcactttgggaggccgaggcgggcggatcacgaggtcaggagatcgagaccatcctggctaacaccagtagtgaaaccccatctctactaaaaatacaaaaaattagccgagtgtggtggcgggcacctgtagtcccagctactcaggaggctgaggcaggagaatggcgtgaacccgggaggcggagcttgcagtgagccgagatggtgccactgcacccccgcctgggcaacagagcgagactccgcctcaggaaaaaaaaaa

SEQ ID NO: 244555 - DNA, 426 bp, Homo sapiens
ggacattccttttccagtgttccctgcccccccctttatattttgttcttatctctttattgcagaaattttgggtggttaagtatcagattgcaagcagtacaatatgtgggttcgagcctcacatcatgtattagtaatgtaaaaaaaaaaggaaaaataaaattgtatgagtagatgactttttacagatgggctaaataaaataccaaatgattgagtcgaatatagccagtggcagggggatgaagatcaggaattaagaccctgattaagaaggtgcttgataacaccttctgatgttttcagattagggggtctgctcagttacctccttaagcttctacttctgatgctccctaaaattataggaatgactctacgtgtaaagcttatccaaactttgggcctataatatttctcttt

SEQ ID NO: 244556 - DNA, 801 bp, Homo sapiens
agcctcccccgtagtcatttatctttcaggatgagttaaggcgttaataaataattttacttttatcaaccaagtgaagaactggcatagtaaggaaggggttgccatatctacccttatatttatgaaagtactggaatgttcttttaatatgcaacaaattacagataataaatcacatcacctttttttctggggaaaaaaaaatcttcctaaaatatttgtttatttgcatttttaaaaagcattggaagattacacaaaaagaatttgcaggaaaggagaacaaggacaggttctgaagcaaggctgctcaatgtccactgtttttaaatcactttaatttctgaaccatgtggctatactccctatctaaaaggacatgaatattttttaaagtcccattacgtacataaggggcccaatacaagcaagcataaataatcttgaaaataagagaaatctgagaatgcataattttttagttgatgataaacaatagttttagaacttaaaccataattttcagatgcttgaaaaaattctgatcatcttcaaccatggtatttacatgaaccacaaaaacatacaataacatacactctccaaataacaaattgcactcctacttactcctatttctctactcagtgtccatttcctcaaaaaacttttcccaattagcaccaatgaaggacaacactcagactaccctattctttaaacagacatgaatttgtccaatatacatatatgtatttcctggactattaggtcctaaaatactttagtaaagaaagc

SEQ ID NO: 244557 - DNA, 658 bp, Homo sapiens
ttcccaatattaataggacgcccagcacaaattaggtgttcaaaagattccctttgggcgagaagaaaagagagtagaattcgttaagaggggcccagatttgtgcttgaggaccagccaggaccagtaactaaagaccagttgactaaagatttttgtgtggaatgagtaaggaattggggtaaggatttttgagtcgagtttgatgttatgcccctaaagagatcactggcacgtgtgaccagagggagcgcgtgggtctgaaatggaatgcattaacctcattcaaatcttctggaaaaatggatgttgggaaatgcaccctggattttgtcatttaaaaacactagagtgaaaactattttctcaggactggtcctcacactccaagatgctgctttgtggaagccaaagggatcgtgggctatttagattctgtaattccaaactggcctattgataaattcagtattgacttgatttgtgttaggtagaatcaacaatgcctccgtgagatggcctattcaacagaagtggggaaacactctgagaagttaagcaacttgtccaagatcacacagagagtaagctggacagggctgaatacaattgtatgattcctaattagagctctttcagctacaacacaccaaatccc

SEQ ID NO: 244558 - DNA, 1599 bp, Homo sapiens
tttttttttttaatcagacagggtcttgctctgttgcccaggctggagtgcagtggtgcgatctcggctcactgcaacttcagcctcctggattcaggcaacactcctgcctcagcctcccacgtggctgggattacaggtgcctgcccccatggctaattttttgtattttttgtagagatggggtttcaccatgttggctgggctggtctcactctcctgacctcaagcaatctgcctgtctcagcctcccaaagtgctgggattacaggcgtgagccaccgcccccagcctgagcctttttttttttctaatgcatccaaggttaaggggaagacgcaaataacaggactactctaaaaggaaacctgtttgaactctgtgagatcagtcatcagtctcagtattccacaggcacaccttaatttcattgtaaaaagatatatatattttgtctatttttgtgcttttgggggcctattttgtgcttttttaccttatgtagagatcttattacaaagtgattttctacattaaaaagagactgaaataaattgtatagttacttaactaatgaagacatttcagaactctgggatgattttaatcttgaagtagtaggtggtatagtcataaaaccattcatccccttcttgattgtatcttaattttctggctttaaggtgacatctgagaggtaatgcattcttttttatattgaaatcataaactatcacccgctgcttctctgagttacttttaattttgccttgtggttatggtttggcgtttccttctgtttggttttcagagccccatgtctatatagtcctgagtgcaagtaattactatacttgtaaatgaagatcagtatttctgcctagatctgataaaaaaattttcttgtcttagttataaaaattcaaagaaatgtgttacaaagatacttagtatagctcctcagccataacctgagacttgggatgaaatttaaaccagatacgatttactttgcagatcataaggctttttatactcttgttatcaaaatggcttatttttcaggcactaaggattgttaagagaaaagcttttcaacgaaggattgcctttcttctcccacactgttcttgatttcctctctctttcaggcctcaacaggcactgtattcattgccaatgttccaaattatcaaattcaagtgaatttatttgtgtgttctttacttatataaaaaaagataactttaaggatgtgcaagtacatttccaactgctagcacaaccagtattttgtaattaaacaaatcgctgtatggtatggtcttctacacatttatgtctatagatatctatcgatcatctttctattctgtttcatgactgaataatgtaaaaccagtgttggcaattggtatcatcaatgatactcattttttaataaccaaaggcaggggaaaatcattttacttattaataaatattttatgatgtgaaaaaaaaagccagcacaaacaacaaaaaaggggggccaaatacccggggacatgcccctttgaaggcgcccagagggcaaaaagcccgcgcacaaggcaacac

SEQ ID NO: 244559 - DNA, 276 bp, Homo sapiens
gcggccgcctactactactactgctcgaattcaagcttctaacgatgtacggggacatgactgaataatgtaaaaccagtgttggcaattggtatcatcaatgatactcattttttaataaccaaaggcaggggaaaatcattttacttattaataaatattttatgatgtgaaaaaaaaagccagcacaaacaacaaaaaaggggggccaaatacccggggacatgcccctttgaaggcgcccagagggcaaaaagcccgcgcacaaggcaacac

SEQ ID NO: 244560 - DNA, 1027 bp, Homo sapiens
tgatactttttgaaaagctggttcaagtacattttattaatttttttcaataaaagagaacagtgtattcaaggtatttagtacaaggtggaaagcctacttgatttattttttttaatgagtgaatgaattcaacttctactagattatcctctgtaagttgcgtctattagtttacacatcagtctttcacgggtgattaacctcactaaaaacttcatgttcatcaatattgtgttgaacttgaaactgtattatcatatatgtttattaataggcaatggtgtcagataatcgtgaaattgagaagtcgcccatccatttgggtgggaaaataaccaacatcctcagttgtaatcccactaagaaccgccagggcgagacgaaagcgacatcgcttccatctttacgtgagtcttggaaatggttcagcaccatgacgtccgccgaagacgtaggtgtagacgaggaacaaaagagaagacccctcgtggaggtggcctgtggggcccgccctcctcgggcgcctgtcgtcgtctgtccctgactccgctccccccggcggccgcagcgagtgcgccccgcgatgcagcgggctgtggagggagcctccatggagtctccatcaaccattgaggaccaggagacggtggcaggcggtagagaggcctgggcagggcagcgccccgggctgcggacacaggacggcggcgcccaaggacgccccagggcaggcctcagcccctccaaccggtgggagcccagctccaggggagcccgcagctccctccatcttggttgatggaggcggggagctgcgtctgggtctctccaccgtcgtgcccgtcccctgtggccccgcggacgcagacgccagcagccggggttgttcccttggccgaatggagagtccagttggggcttcccgaggacaagtttcccggccccacggggtttggtttttagggggtcccaagttcccacagtcgttccgacaaaatggaggacgtcgtctcctcctgctgca

SEQ ID NO: 244561 - DNA, 1238 bp, Homo sapiens
attataaatctagagactccaggattttaacgttctgctggactgagctggttgcctcatgttattatgcaggcaactcactttatcccaatttcttgatacttttccttctggaggtcctatttctctaacatcttccagaaaagtcttaaagctgccttaaccttttttccagtccacctcttaaattttttcctcctcttcctctatactaacatgagtgtggatccagcttgtccccaaagcttgccttgctttgaagcatccgactgtaaagaatcttcacctatgcctgtgatttgtgggcctgaagaaaactatccatccttgcaaatgtcttctgctgagatgcctcacacggagactgtctctcctcttccttcctccatggatctgcttattcaggacagccctgattcttccaccagtcccaaaggcaaacaacccacttctgcagagaatagtgtcgcaaaaaaggaagacaaggtcccagtcaagaaacagaagaccagaactgtgttctcttccacccagctgtgtgtactcaatgatagatttcagagacagaaatacctcagcctccagcagatgcaagaactctccaacatcctgaacctcagctacaaacaggtgaagacctggttccagaaccagagaatgaaatctaagaggtggcagaaaaacaactggccgaagaatagcaatggtgtgacgcagaaggcctcagcacctacctaccccagcctttactcttcctaccaccagggatgcctggtgaacccgactgggaaccttccaatgtggagcaaccagacctggaacaattcaacctggagcaaccagacccagaacatccagtcctggagcaaccactcctggaacactcagacctggtgcacccaatcctggaacaatcaggcctggaacagtcccttctataactgtggagaggaatctctgcagtcctgcatgcagttccagccaaattctcctgccagtgacttggaggctgccttggaagctgctggggaaggccttaatgtaatacagcagaccactaggtattttagtactccacaaaccatggatttattcctaaactactccatgaacatgcaacctgaagacgtgtgaagatgagtgaaactgatattactcaatttcagtctggacactggctgaatccttcctctcccctcctcccatccctcatagatacagtagggagaggtccgagc

SEQ ID NO: 244562 - DNA, 392 bp, Homo sapiens
cagaagaccagaactgtgttctcttccacccagctgtgtgtactcaatgatagatttcagagacagaaatacctcagcctccagcagatgcaagaactctccaacatcctgaacctcagctacaaacaggtaggcttgttttgtccttggaataaggtgaacaaaaattggactaatttgcatggctaagacctctgtggatgcatgtagatgtgtgtactatgtgtccgtacatcgcctcttgcaaataatttatgaagatgaaatgcttttgtaacttccttcacctctttctttccttaaatattctattatgtgaataattatgtcataatttaaccactttcttgcacagaccaatattgtgaaaatctttccaacgtttccttaat

SEQ ID NO: 244563 - DNA, 446 bp, Homo sapiens
caatcaatctctaccaaaattccaatgacatttttcacagaaatggaaaaaaaatactaaaattcatatggaaccacagaatacctcaaatagccaaagcaatcttgagaaacaacatttgaggcaccacactacctggtttcaaaatattccacaaaggaatagtaataaaaatagcatggcattaaaaacaaacatatggatggatggaaccagaatagagagcccagaaataatatactattaatggctagttagttttcaacaaaggagcctagaacacatattggggaaaggatagtcttttcaataaatagtactgggaaaattgtatatccacatgcagaacaatgatattagacctttatctcataccgtatacaaaaatcaactaagaatggattaaatacataaatgtaagactgaaactataaaactactagaag

SEQ ID NO: 244564 - DNA, 490 bp, Homo sapiens
atatgacttctcagtccctcctctcttctcttggctttacttacaccacattctctggttttcttcccctctcacagtctgctccctttccgccaccttttcagggtcttttctccctccctgacctttatagtttgatgtctgtatgacttcggcttggctctcatcttcctctacattattttcctatgtaatagcatcttctcctgtagtttaaaatactgcctgtatgctggtaacttccaaaatttatatacaattcagacctctctgaacatcagacctgcatatccggttacctgcttaactccatttagaggtctcaaggtctcattgacattgcaaacttaacatttccaaaatggcaggttgctttctattccttctctccagttaaatctatccagttgctcaagctagaaacccaggagttattctccattcatcccttctcttcactcccatgtccaatctaatagcaagacagtcc

SEQ ID NO: 244565 - DNA, 1605 bp, Homo sapiens
aaaagcagaaagagattaccagccacagacgggtcatgagcgcggtattactgctggccctcctggggttcatcctcccactgccaggagtgcaggcgctgctctgccagtttgggacagttcagcatgtgtggaaggtgtccgacctgccccggcaatggacccctaagaacaccagctgcgacagcggcttggggtgccaggacacgttgatgctcattgagagcggaccccaagtgagcctggtgctctccaagggctgcacggaggccaaggaccaggagccccgcgtcactgagcaccggatgggccccggcctctccctgatctcctacaccttcgtgtgccgccaggaggacttctgcaacaacctcgttaactccctcccgctttgggccccacagcccccagcagacccaggatccttgaggtgcccagtctgcttgtctatggaaggctgtctggaggggacaacagaagagatctgccccaaggggaccacacactgttatgatggcctcctcaggctcaggggaggaggcatcttctccaatctgagagtccagggatgcatgccccagccaggttgcaacctgctcaatgggacacaggaaattgggcccgtgggtatgactgagaactgcaataggaaagattttctgacctgtcatcgggggaccaccattatgacacacggaaacttggctcaagaacccactgattggaccacatcgaataccgagatgtgcgaggtggggcaggtgtgtcaggagacgctgctgctcatagatgtaggactcacatcaaccctggtggggacaaaaggctgcagcactgttggggctcaaaattcccagaagaccaccatccactcagcccctcctggggtgcttgtggcctcctatacccacttctgctcctcggacctgtgcaatagtgccagcagcagcagcgttctgctgaactccctccctcctcaagctgcccctgtcccaggagaccggcagtgtcctacctgtgtgcagccccttggaacctgttcaagtggctccccccgaatgacctgccccaggggcgccactcattgttatgatgggtacattcatctctcaggaggtgggctgtccaccaaaatgagcattcagggctgcgtggcccaaccttccagcttcttgttgaaccacaccagacaaatcgggatcttctctgcgcgtgagaagcgtgatgtgcagcctcctgcctctcagcatgagggaggtggggctgagggcctggagtctctcacttggggggtggggctggcactggccccagcgctgtggtggggagtggtttgcccttcctgctaactctattacccccacgattcttcaccgctgctgaccacccacactcaacctccctctgacctcataacctaatggccttggacaccagattctttcccattctgtccatgaatcatcttccccacacacaatcattcatatctactcacctaacagcaacactggggagagcctggagcatccggacttgccctatgggagaggggacgctggaggagtggctgcatgtatctgataatacagaccctgtcctttc

SEQ ID NO: 244566 - DNA, 729 bp, Homo sapiens
cgtgtgattaggcccacccagataagccaggataatctccctattttaaggtccacaacctgaattgcatatttgaagttcgttttgccatgtaacataacatattcacaggttccagggattaaggcatggacatcttcaggacatctgcatatcagagtcactaaactcaaagatggcatcatgtagagaaaaggcatgcagctacaataccactgcatggaaaacgtatgggcttgaaaatttcccatgatatatacaagataaataccagctcagattttaatcattttagaaggtgaaccaattcccaggtcccaaccaaaaattcattgattaataatccaaaacttgatctacattgagatatatttttattttagatatctaaattcaaaaattgccctgagctgagataatgtctctcaggtctaccacccatttttatagtggatttaagcataggtgttataaactttataatccttataatggtatgtgtcccttaccaaaatgaagcttttagagaaactgacatattagtgattcagttgaaatatttaggaggatttgattgtttttaatcaacgtttaaataatttaacttgttaaatgtatagattttgatttgctggttatagaaatcgtgttcaaatatttagacaatttttccttcagtaggtttgtgaatagattaaacaataaataaagcacaggtgatggtgtgtg

SEQ ID NO: 244567 - DNA, 441 bp, Homo sapiens
ccagccagaataattttggtaggcaggaaaatgcacattatgtacacacattgctcttctctgatttgctttaacactgaaaaactgaagattgtaaatgtagtctcaatttagagtgaattaacaaaagatttgtttttcaaaaaagcaaatgtataaaattaatgggtaacagatgccattagttgctaaaaaatagtatgactaaagttggtaattatctagctatgcaaataacagcccaattaaattaagactctattgggtgcatgtggaaagcattgatgtgcagtgtggtgcctccactcagcatttccttactgtctctttacagagataccaattccccctgaattactcagggtccataatggttttagaaatgtttgttctctggagctgtaaagaaatagcacttgaaaataaatttaatttttctta

SEQ ID NO: 244568 - DNA, 444 bp, Homo sapiens
gctggagacgcggagagacagctgatgttccagtttgaaggccatagggcaggaagagttgttcatgtggacagagtcccaaggccatttgcggagaaccccctcttacttgggggagggtcagccttttcattctgtttgggccctcagctgttggacaaggcctgcccacaggaaggagagggatctactttcctgattaagatgctgatgccctcgcagaaacacccagaacaatttttttttttttttgagatggagccttgctctgtctcccaggatggagtgcagtggcgtaatcttggctcaccgcaacctccacctcctgggctcacgcgtttctcctacctcagccccctgagtagctgggattataggcgtgtgccagcacacccacctaatttttgtatttttagtagagacagggtttccccatgttggcca

SEQ ID NO: 244569 - DNA, 760 bp, Homo sapiens
gagttattccatggcattaactttatttattaaagtcgacatctcacacctacccacacgccatcttaaatcaagggattttggtgtgctttgcactgaagcatgtcaagatatgttttttatttaaatccactttctctttagggaaactgaggtacagaaccatctgagatctagagctaagtgtagatatgcctcatggagcgaggcagcttttcctgtatccacaatggaatacctcttgtgcctcctcctcgacccttaacaaggttacttaacctaacaaattgctcctctgagacagtagaactccatgaaggcccatgatatccaacccctttgatagggggtgttaaaagatggcactcattttcattgttagctgttgggatgaatagtgatactgccattgagcactcaccaggtgccgggcatgagttttataaatacatatgtaaatgtacacacatgcacatatatgcaccacctcacacagacacacatagaaacacatgtacacatatatgcaggtgcacatatacatacacagatgtacacacacatatacacacacgcacatgtatacgcatacacacataaacacatgcacatatatgcacaaacacacacacatacacacatgtaaacacgtagacacatgcacatatatacacacatgtacacgtgcacacactcgcatgaacacatgcacatacatatacacacacatgcacagacacacaaacacatccaatcttca

SEQ ID NO: 244570 - DNA, 318 bp, Homo sapiens
gaccaccataggagaaaatgtgcccagtggcctacagacaaccccgacctttttttcattctggcaacagagaaacaagatttggcttgccagccttacacatagctctctgtagtggtctagagtgagaattgtcctgatcgtccttggagaggacatctgatagagctgctatcatgatgtggaaacacgtaaaccacccaacctgtattgtctccttgatttaacagaattgaccagctgggtgtcatttgatatttgaaatgagataaattccacaaaattaattataaaatatttctctattgactgattttt

SEQ ID NO: 244571 - DNA, 498 bp, Homo sapiens
ctgcccttgccagaggggtgtgtcctctccactgcagacacaagttcctcccttctctgcggccctccgctctgcaacgccatcctctctctggtcctccgtgtctctgccaggcatgggctcctgtccacatcttttctgcccagcacgctgtcctgttgccgtgtccccgcatctttcttccctaacatcggctgtggaactgaggtagcgatggctggcgtattaagaatgtgctccaagcagctctgcctagggctgaacagccccatttggcttcccgtcctcatcagcacctgacctgtggcaacagtgaagccgcaaggctcacctgccgttctctgggtcacaggtgtgtgataggggggccagtcgctccctggcagcaagacccggaacctgcactttaattccatgttccacagcaattccacccccagaataaccagatgcaatcacagcccaaacacacacaggcacgtgcacacacacaggtgc

SEQ ID NO: 244572 - DNA, 331 bp, Homo sapiens
aaatggggttgtttttatcttgctgatttgagttccttgtagattctggatattagtcctttgtcaggtgcatagtttgcaaagattttctcccactctgtgggttgtctttttactctgttgattttttagtttaattaggtcccaactatttatttttgtttttgttgcatttgcttttgggttcttaggcatgaactttttgcctaagccaatgtctagaagagtttttccagtgttctagagtttttatggtttcaggtcttagatttaagtctttgattcatcttgagttgatttttgtataaagtgagagatgaggatccagttc

SEQ ID NO: 244573 - DNA, 1054 bp, Homo sapiens
aactttgtcatcttcatgttgatcttaaacatctctctgatgaacagtataagaaaacaaatgatcacttagaggatcctgtttggtagttaaaaccgtattaaaatagagagggaagaaattaagcctccttgatggtgaagagattgggaaccaccactccagtgttagaaaatgtcaaatgacagaaggtgggctatattaagtgggaatttccaaaccccaccccctggaaggaaggaatgcttggtgacaagccttagaggagagagatgcttgtctagcccattgcctgtgtgcccaggaagagatgtgcataccttgagatatagagaagactctagtggggagaagccccaggccagcttgtcagcacagggcatcggaggcccccaaccagctccaagttctgaacagcacacagccttcaaaggcttgtactgctgctcatacccagcagaggccttgcaccaggcctccccatgcaaatcagtgtccccgcagcgtaggtaaaggagctctagctgtgctccctatgggggaacagatataccgtgggacactgagagactggaagattgcccaacatttatttactgatctgtgttcaccacagaacctaaggtatttattggtattgtttcaaccagtacgagtgattctttcatttagtggtcatctctgcactccaccacagacttttgggaattacaagatgaaaagggccacatcctcaccctggcatagctcagaaaatttggttggggaagtagggacatagacgtgatcactacaccataatttactaagctgtgagaactggaggtgcatcagtgaccagagtgcatttgagccagaggtagaaggtactgtagacaaaaggaacaacatgcgctctaggctgtatcattaggtacaattttctgtccttgggggagtctttttaaccctaagacaaaaattatgaatatagaaagaggccacggttcatctttgcaattctttcaggagaaaatttgctgcaactcactttctaagtttaaaaaaaaaaaga

SEQ ID NO: 244574 - DNA, 573 bp, Homo sapiens
ggaatcagggctcattaacatctctgagcctcagcttcttcatctgtaaaatggggatcatcagagtacctacctcaagcaatgcctgtgagacataaaagccagtgggtatgaaagcccctcaaggcccgcaaagtgccacaaagacatgaattttctctccttcatcacagtggctttttctctttccctttgtctcttcctcattacccatagggcttttcattcttggacatggaagtaaaaattagtttaagatgctgaattcacagcaattatgtcatgcccacctccacgggtttccccacaggcttcctgggtattacacagtacctgattgccacaaggtcttgagaattggggtggcccggacataagggatgctgccattgctgtctaccaacactactgctctgaaccagaaccagaaccagtgcctttcatagaaaagtaaaccaagaagtgatggatagacagagatagagaactcttgaacaaaattaatcaaagctatgctttgccctagttgtctgaatcgcaatcatacacactgacatcaaatatcttattaaa

SEQ ID NO: 244575 - DNA, 230 bp, Homo sapiens
attgattttttaattgtgcttagcagatatttaagaatgttagcacaggtctttgaataaactttgcttctaagagaagttactattcataattaggtagaaaagtctttgaagaggaacctctacttcactttttacactgtgaactgagaatgctgtgttcagagtgattactgaaaacatggttaatacacttcttccatatgataataaaatgttataaatcttac

SEQ ID NO: 244576 - DNA, 475 bp, Homo sapiens
gttgatttcatcacttcacctgtggagtgtaaattcactgacacagcctttttttggagggcagcctggcaatcatttaaacttcaaaatatcttttgatccagcatttccatttctaaggtcgtatgctatggaattacttacagaaaaatggtgcaaagatatgtattaaaaaaaattcttggccgggtgcagtggctgacatctgtaatcccagcactttgggaggccgaggagggtggatcacctgaggtcaggagttcaagaccagcctgaccaacatggcgaaacccgatctctactaaaaatacaaaaattagctgggcgtggtcgtgcacgcctgtaatcccagctacttgggaggatgaggcaggagaattgcttgaacccgggaggcagaggttgcagtgagccgagatcatgccactgcactttagccagagtgacagagcgagattccatctcgaaaaaaaag

SEQ ID NO: 244577 - DNA, 703 bp, Homo sapiens
ctcaaatccctgaggttggtggcaagcagtccaggccctcgatgcagcttgggctcttgactgtcacatgagtgcctgctcccaggccagcagggccaagaaagcgaaatgtcgggagccacctgaactcccagatacactttgcagggtcaatctttatttgggcctgccttagagggcccagcttccagcacagctggtttcaggagtgggtggactcaagtctgaggacctctctccctgtgctgcttcctcctcccaggcctccgtttcccctccggatgggcggtcctgtacaggccttcacagatgcccctgtggagttctggtccagtggggtagatgaggccagggtggtgagaggcagccagcatcagggcctgagcgactgagtgcacctgtggcctcagagacccctgcacactgggtgggctgtgggagggaagccctggtccctggtagcattggggtcctttcctgttgggagcttttaccagctgctctggcagttcccaacagagaatgcccactgtgccagcatgagcctttactgtagttctttccatcttggaggggtggcaggggcagcttggcacagtggctcacgcctttaatcccagcactttgggaagctgaagtagcctgatcgcttgagcccaggagtttgacaccagcctggcaacatagggaggcctggtctcta

SEQ ID NO: 244578 - DNA, 341 bp, Homo sapiens
caggctctggcgggtctggttgcctgcttgcctctccttattcttgtcttactcctcactcttactctgggcatctgtgtaggaccataggggcctcaattcaaagtcttgctttgctgcttgctagctgggtgacttgggggtgactcaccgaaatggtttccctgtttgttagggaataatgatggcccctgtttcagagacagagtgaagagcctggcctggtgtcatgtgtctacctgtgatatgacatatagtagcggcacagtgtcagctccctccctgccctgttcctgtcactctcagacttttctccacagacttctgagatctccgtgtcc

SEQ ID NO: 244579 - DNA, 464 bp, Homo sapiens
catacgcaatttctctctacataattttgctcttaaggatgatagaatgaggtccactttaattaaatgtataaggaacagtaatccactttgaaaggcaccgctaatccacttactggtcaccaagttatgcagatactaacgagactttcaagaagaaaacaggtataagaagaaatgagactttcaagaagaaaacaggcaatttacaggaaatatgcttggaacaggcactctattgtatatattcctcacggtcaatggctaccaagcaacaccaaagttagttcattataccctgcctcacttatggctgtgtcttctttagggggttatttacataatataagcagaatctggtaagtaaagtaagaaattgtggatctgtttacaatttggttcccatgctcaattgtacattagtttggtctccttttaataaacttctgtgtatgtactccaaa

SEQ ID NO: 244580 - DNA, 936 bp, Homo sapiens
gaaggaggatagatgcttttgaggtttttaatctgtgtgaccaggatgtgttggtggcgttgctgacaaacacagggaaacggtggtgggaagagaaaggaatgcccagagatttttatgagagtaaagcaagtcctgaataactgctcaaatcctgtaacatctaaaaggaagcaactcactcatctttgctactaaagccttatttcttatatagttctttatagaagtaaaacattgtcataaattagaattgatgttgaaatattgatggcattggctataactttgcatttcatttaaatttttggagatgatttgaagggtattgtagcagactgtgtataaacaactccacacatcatcccagagtgtctctaactgtaactgggactagggcaagagcacagtcccaagataaaaattgaaactctgtagttcagttgggactcaggctagtcttattttctttgcttttaggatagtgcagtaaatttctatccaaataggttcctttccttgggtaaagacaagttactttgtatttctttgtttgatatatacttttgaatgatttgggctacattcttactttagttcattttggaggaatatttcttagtttaatttgtctcattattaattcctccttctctgaaactttttggggatataggtatgtatggcatagtctacaaatttaatgcctttacttgtttttttcttttttgcagatgtagggcgtgtgagtatggggcgatggtgcagggaaccttgctttaacatgctattttgaaagatatccccttttattttgtagaaatgggttaccacgttgagcaccaggagtttcttgtacatttggatcctagcagaggaaatgggactttagaaagattactctgaactctgaagggctaatttaaaaaaaaaaaa

SEQ ID NO: 244581 - DNA, 344 bp, Homo sapiens
acatcttcatactcaggagtagggacaggaagacacaggctgggatggagatgggctcactcctgggccagtcaggttggctttcagaaaggtgatttctggtcacaaggcccttgagcagctggaggacttaggcagagtgcggagagcagccattcacatgagaagactccaccctggaggcagcgctaagcagccatccttccttaactgggcctctggggcaggtggtgcctagtggcctgtgaggtatacagccctttcagcacttagagaatgacgcctcaaggggaaaccattaaccctttcctagaataatagcatcaaagtcctgaccatgttga

SEQ ID NO: 244582 - DNA, 550 bp, Homo sapiens
tctccttttctatctctgcagccaagattaagggggatgctcaggaaacctaacgagttatctgcgtgtggactaatggattaacaccacctaccatcagcctcctgggtgatctgtctctttaatcttgctcaatagataacatttgggaaaagctcccttgactcctagagacactattttctgttataagctatgaggacgtcccctctggtcatcaaatttaatgggatgattattaaagggaatttgctaatattaatgcccactttcaacttgagggcctgagctacaaatttctccctgctttggctggtggggaacaggccaaggacaaaatctgaataaagttaaagaggtatctgctgctgttcaattatttaatatatcatgtaaggcaaaggtagtgatgcactatccacccaaagatatgattacactcaaagccatacgaacttttactatgcaaaggccacttcataatgggggtggggagacacagtatatacaaagttctaaagtactagtaatcaatagccttaaaaataat

SEQ ID NO: 244583 - DNA, 402 bp, Homo sapiens
cgccacaggtccatgagtgactcctaattaccaaatccaagggctccttcaccctgtcccctctggtcatcaaatttaatgggatgattattaaagggaatttgctaatattaatgcccactttcaacttgagggcctgagctacaaatttctccctgctttggctggtggggaacaggccaaggacaaaatctgaataaagttaaagaggtatctgctgctgttcaattatttaatatatcatgtaaggcaaaggtagtgatgcactatccacccaaagatatgattacactcaaagccatacgaacttttactatgcaaaggccacttcataatgggggtggggagacacagtatatacaaagttctaaagtactagtaatcaatagccttaaaaataat

SEQ ID NO: 244584 - DNA, 842 bp, Homo sapiens
aagtgtatgcgtagggtaaattttgagcagtagggttgctaggtcatagggcacctgcatttttatgtactaatattgtctaattgttctcagacacaattatacccgtttatactcttctaccaaagcatatgagaatgtctgtttctccacattcttattagaatttcatgaaacttaatttacctgcttatctcagagaagaaatattttgacattcatttcttctgtaaggttaagtatctttattgatcccttctattttttacattacattccacattgattgcctttccttatttttatattggttatttgacattttaatcatgtgagatgttggaaattaaggaaactagtcatttgtcagtcatatatgttgcaaaaacccactgtgctttttgttttgggggctgacgggagggatatgaggacatttttaatgcttgtataaacaaacataccaatcttcttgatgactttggtgtctacctgcaagggctttactctagttcctagtcacattccatttgtgactgaagctttcttaaccaccatccaaataaccaactcagaagactgatactctgctttctacttttgatctccctggccttgttgactgctctcaattacgctagagctcttccagttccacaagttaagctgtaagcttgctaaaatcagttgtgcttatgtgctttcatatgcatacagatttatctttattatgtcatttaattctatatttcataagccaatgaaatgagagtgtgaaaagaaggttgggcttttgtgaaagcctttaaaagtgagtgattaaaattttaaggatttttatt

SEQ ID NO: 244585 - DNA, 546 bp, Homo sapiens
gcactattcacaatagcaaagacatggaatcaacctaaatgcccattaatggcagacctttgcaggaacatggatggagctggaggtcattatccttggcaaactaacacaggaatggaaaacctctgcacattctcacttataagtgggagctaaatgatgagaacacgtggacataaagaggggaacaacagacaccaggacctacttgagggtggagattgggaggagggagacgaccagaaaaaataactattgggtactaggattagtacctgggtgatgaaataaatctatgtaacaaacccctgtgacatgtacacagtttacctatataacaaactgcacatatacccctaaagctaaaataaaagtttattttttaaaaaacgaaagtaagtatgtagtcagagaaaagggtttctattaaatagaaaaaaagcttaattagaaatttaaaaacaatcatctctgtggagtgatggggtgaaatccttaaggcaacgagttgagaagtcagttgagattgaaggaaccagacagcaa

SEQ ID NO: 244586 - DNA, 492 bp, Homo sapiens
gccaattttgggttgagttaccatgttgtatctctcttgcgcctaagagattcttgaaaccccagatctaagcaggtagaaccatttgatacgttagtctgaaagtgatccctgtggcaacctacttttttcctgtttttctcttaggaaaacacgtcatctctgatagaagattttcttccttctcttttcttttctctttttcttccttctctcttctcttcttttctctcctctcccttcccccgctttccgcctcctttccctctccttcccttcccacctctccccatccctcctctgcctcttctcacctcacagggttgttttttctcacagggtttctttctttctgactttgtcttttcacaaagtcttgctctgttgctcaggctggagtgctttggtgtgatcacagcacaccacaacctcaacctctgggctggagagatcctcccacctcagcctccattgtagctgggactacagtca

SEQ ID NO: 244587 - DNA, 305 bp, Homo sapiens
aaatatctttcaaaacgactcagagacatttaagaatcactggcttttttccaacttttcctccaaggaagttacaatacaatgttgaattatgtattctactttaatcaagaatttgacattaaagtaatatgtgaatcattgctatagtacactagcaaaatgggtaataaactagaatctgttcactttgtgggtttgttccagttccagattataaaatgaatgctcttaaagtgttgtggtcatgaaacaattattgagcatctttatttaagaacacgattcaattaagttttcattta

SEQ ID NO: 244588 - DNA, 726 bp, Homo sapiens
ctgtattatgcaggttacttcataaaatgaaacgatcaggcactaagggcattgtcctgtattgttatattgatacatccaactctggcatagaaattaagaccatttttagttctagaagaatgcaaggaggaaaaactttaaaatgagaaaatgttgtctgttggcctaattttttttttaaagtgggaaaaaatattgcagaaccttttagtagagctagtaaatatagagcaccagagtttgttccaacgggaaagaaagggggaaattactgaactgtgcctgtctcttgtatgtcgtttttctttttaatgaaaatttaagtcatacctcccacagtcagtttctggtcactactatctccctgtcactcaccaccagccattacctacttccttccaaaatattttttatcctgtttgttttaaagtagttttttcacagttaagaaataagtcatatgaaaacatctccatgggaatctaatgctaaaagttcacttctgtcttttctcataaaaagtgtcagatattttacctataagtaatagaaataagtctaaaataaatcagttatcactttacacgttgattttccactttttaaaaggttttttctttaatcatagtttatgctttaatcataacaatgcaagtttattatcccttatcccaaatgcttgagaccagaagtcttttggatttcagattttttaaaaaaaat

SEQ ID NO: 244589 - DNA, 424 bp, Homo sapiens
gagacagggtttgttctgtcacccaggccggagtgcagtggtgcaaatgcagctcactacagcctcgacctcccaggctcaagaatcctcccacctcagtctcccaagtagctgggaccacaggtgggctccaacatgccaggctaattcttaaattttgtatacagacaaggtcttgttatgttgcccaggctggtctcgaactcctgggctcaagcagtcctcctgccttagcctcccaaagtgctgggattataggcatgagccactccacccagctgaactgtgtatgcatttcataaatatataaatattccctatattaactattaatattaactatatttataatatttacataattgtcctttatcaatatatgtctcagatttatcaactcaagtgcagccaaattctgtctcta

SEQ ID NO: 244590 - DNA, 254 bp, Homo sapiens
tatgccctatccccagaagctcctcaaagaaaacagtacaactgaatcacatattgtatcctttctggatgaagtctgttaactaaaacttgctcatcttcttgtatttccagtaatgtgggtgagtcttacggataagtgatcagggcagatcccaggctggacttctccttatcctggcttaaggccaccagcaacattcttgtgttggatctagacaccagctctaccgcacattgaggcagagttcataa

SEQ ID NO: 244591 - DNA, 383 bp, Homo sapiens
cagtccactgtcatccagcatagaatcagtgtggagcctcttgctcagacatcccagggccaggcctccatcaggactgacactttccatttggtttctgagctctgcctggtagacccttgtgaaaggagattacccatataactgtgtttacccaaggggttggggaatggcacacacaaagctggtgaaaatccagaggtcagaggttggaaggtgctgcttttattactgagtattgaaagtgatccattacaggctgggctcggtggctcatgactgtaatcccagaactttgggaggccgaggcgggtggatcgcaaggtcaggagattgagactatcctggctaacatggtgaaaccccatctctactaaaaaata

SEQ ID NO: 244592 - DNA, 386 bp, Homo sapiens
tcattttgaagtacaggagccaaagtgtaaaatggtaagtggtgatggaatgagtgagtatcagcataatcttcacaagtgttgctttctgccctgtgatttcagattatgcaatctttaatggctttacagttaatagactcaaagtaggagtaagcttgtaatcttatttactcttacaaaaaagtcctactgactcagaatttatcttagaaatctagcttttattagggataaaaaaatatctaagatatttgtgatgctaattttatgtgtcaaattggagatgttttggatgagatcaacatttaaattgatgaactttgagtaaagtggattgcccttcataatgtggcctcctccaatcaactgaaggcctgaataga

SEQ ID NO: 244593 - DNA, 367 bp, Homo sapiens
caggccatacagttgcaaagttcgaccaattttaaataattctaacctatagaaaagttgaaagaaaatcacaaaaaaaaccttcatcttgattcaccatttgtccatatttgtttctctttaaacatacatacctgttattatgctgaatcatttaacagtaaattataaaccagcactgtccaaaagaactttctacaatggtggaaatgttcatatctgtactgtccaatatgataggtagtagccacatgtggttatttaaatttaagtgaattaaacttaacttaccacatttcaaatgctcactagtctgtggctagtggccactatattgaatagcagttatagatattatactccctaa

SEQ ID NO: 244594 - DNA, 646 bp, Homo sapiens
ctgacatattagtagaattcaagacactacaggaaaatcaatccagatttggaggcctaaaggatacataggaattaaccaagaatagagtacaaatgaagaggggcaagggattggtgtcccaagggtatgaaaacaatgttagcagtgaaggaaagcatcacatattcaggggaccttgaaaagtttggtgtgcctgagcatagtgtagctggaaggtagtggtgggagatgagcctggagaggaaatcaggggctagaagataaacaggaatatatcacagagttacttaccttaaaagtaatgttgagccactgaaaggttttcagcagctctcatcaggtttgcattatagaaagatggtcttcaggtgtagttgaatggttggaggggaagttggaacaagaccaaactaccatggaagagactttcatctgttttgtctcagcagatagagctgtatatgtcttctccctgtcctactgttttgggggactgagattttggtactcatcagcactcttgctctcatattatggacttaatagatagttagtttccaggtagaaatatattccatgctccagatattttccttcaatagagtacaagtgccatagcataaatggatctgggaacatggct

SEQ ID NO: 244595 - DNA, 383 bp, Homo sapiens
cttgaccaactttgctttctgccaacagtagtcctctcatttagtcttgcaagaagaggtaagctacaaaaactttccatatgctatacattagaccatgtagtatagttatgaaatgagatatagatatcaaatataaatgatcagtctcaaaaattatacagtaaaatacatttaactttgaagtactagtcatttaatacttgactcaaaaagagataaagagatataagttggaatcattgaaatcttaaatgaacttttatgattgaactagttatgcttggaagtactggttaataatattctgattgtaaagaacattttctttattttagcatcattttttcctctgagtacaccagtagtgtagtgtaagaatc

SEQ ID NO: 244596 - DNA, 357 bp, Homo sapiens
atgtctgattctatgtaacaagtagtaaatggaatttttcactaattgaatttttctgtttaacctagtgtccatgtgtacgtattgtacatatgactagttttgtaagcattagaatataataaacttaatcttaaacatacacccaaaacaattacttccaaaaattcttcaggaggtctattggaatctttagtgtgaatgattatcattgtgagcatctattgctattttagagtcttgcttatggggaaaaatactgattctgtgaaaataccccctttctccattagtggcatgctcattcagctcttatctttatattccagtaagttattttgctctcactgttttaac

SEQ ID NO: 244597 - DNA, 550 bp, Homo sapiens
tagatgttgttattatagcccaggtcaaggggatctagtgggaaagtggctgaggaaaaaaggatttcttcgaggtatttaatttgaaattgttttagcccttataggtgagaatgcacagaggagaagtgtgagtctttgttcccatagaattatttcaccagctcagtctggcagcctccaccttttcagttaatgctgacaatgtcaggcactctatcaggaagggaaagcataagtgtggaggctagaaagttccagagcttatggagagatctgttcatggctccaggaagaatgttctaataggtattctctctttgcttgctcctttaccttcttgctttgtcccatatttgtattctctctcactctctctctctctctctctattcactttgattagagtttggaagacttagaatatcttccttttgaatagggcctggtctggtcaatgatgtttacatgtcaacattcaggaatcactttcatttactctcaagctccatcacgtaagaaactccaaagccagccaggttaaaaaaaa

SEQ ID NO: 244598 - DNA, 456 bp, Homo sapiens
cagacactatatttttcagtgtcatcctgtgattttttaaaatttcataggtatctccccattcagcctcttatcttgaaaaatccatccagagaagctatgtttatgtctctttcttcatttgttctctctctttattttctcattttgtaaatctggccaccgtaggaaagacagcagccattcactttacagaaacgtctattttaagaactagctgcttgggggaaggctggatactttaatccttcatcttttctttaacaatactagctggtaggtagtcagcaggaaagtagaagtggagctttcagaaagaaaacattcacagtagaaagtagtgcccattatgatgttgaacaaaagtaattctcctggactcattttttaggaaagcatgttatgccactttgactttattaaaaaaaaagaagaagaagaagaaaaggaagaaag

SEQ ID NO: 244599 - DNA, 368 bp, Homo sapiens
aaccaatttttagtttctttgatttttctctattttttgttttcaagttcattgatttctgcttttgtctttataatttccttcattcttattgatttgagtttaatttgttctttctcaagtgtatcatggtagaagcttaagttctttaaggccatttttctctttaaaatatgcatatttagtgctataaatgtccctctaaacatttaacttcatcctacaatttgtattttgattttcatttacttccaactattttctaattcctttgagactttctcttttgcccattattttaaaatttgatgattaattgccaagtatttagagatattatctttctgccactacttctggtttaattt

SEQ ID NO: 244600 - DNA, 380 bp, Homo sapiens
gagatggaatcttgctttgttgccaggctggagtgcagtggcacaattccagctcactgcaacctctgcctcccgggtttaagcgattctcctgcctcggcctcctgagtagctgagattacaggcacgagctgccacacctggctaatttttgtatttttttagtagagacagggtttcaccatgttgggcaggatggtctcgttctcttgaccttgtgatccgccctccttggcctcccaaagtgctgatattacaggtgtgagccaccacgcctggcctccaattttttttaatatttaataaagtcctttttttttgtcatgttaggctttgttagaggttttttgtttgtttgtttttaccatgtatgttgcatt

SEQ ID NO: 244601 - DNA, 589 bp, Homo sapiens
tattcagttgtttctttattacccctgtgcaccctccctctgtaacagttgagaataacaattgggctttacttgtcttcgggaagccagcccattcattgaaggaaaaatggccccagccccaggttgccatagacactggagaaggctgtcaccgagctgcagcacacctatttcctggtgacatgcagaattagaggtattggggaatcaaagggaaaactaacttgatgaaacaaagggtcccttcagcatctcctgacatacttctttgcaaaagcagtctctctgtaccccttctcccttccccttctccttgaagccaggtgaatgaatttgaatccgaagccctgagaagaatgaaagcagtaacttccatgcatggctcaaagttatgcacagggcaaagacctcctttaaatcacatcggcgacttgccaggattccaaacttcttgacatgtccacagtcctcaaggatctgtcacatgcctatgtctctacattcctcagttactctgttatcattatgctgtcctcctttgagagcataaatgtgcaaagcattttcccaactaggggatctttgt

SEQ ID NO: 244602 - DNA, 471 bp, Homo sapiens
cagcttcccacaagaggagcccaggttggagagaggtgcagagccatggagttggggactagaaacctctagtgctgggtctcatgacctccgtccaggtttggggctgagaggggagggtcctaccatgtcccacctggttccctcaactccctgccctggctggggtaagtcagaaatctccttgcagtcagagacaagggaaggatccacgtgtatgctcagaagtgagtggggtttggccaggcacagtggctcatgcctgtaatcccagcactttctgaggccaaggccagaggtttgcttgagtccaggagtttgataccagcctgggcaacatagcgacaccccatctcaaaaaagagagacagagggagagagaaaggaaagaaggaaggaaagaaggaagaagagagagaaggaaggaaaagaaggaaggaaggaaagaaagaaagaaagagagagagagag

SEQ ID NO: 244603 - DNA, 408 bp, Homo sapiens
accacacatagctactttaaaaaaaattttgtagaaatggggtctccctatgttgcccaggcctgtctcaaactcctgggatcaagcaatcctcccgcctcggcttcccaaaatgccaagattacaggcgtgaaccaccacgtccagcccctatcttccattgttttactttcaacattttaacatccttaaattttaaatgtcttttataaatggcatataattattttaaaactctagctgcccaaagtggtgatttaattgaagcatttagtccacttacctttaagataattgttgatatactagggtaaataataaacatttctaccatgtatctcccgtaaagagagaaaaattttccttgggaagaaatgaaggatattatattgatgccatctactgaaa

SEQ ID NO: 244604 - DNA, 392 bp, Homo sapiens
agggttttgtttgcttacatgtttgtttttggtacagaaaggtgaaaaagttctggagatggatagtggtgatgattgcacaacaatgtgaatgttctgagtgccactgaacttaaacatggttaaaatggtaaatttcatgttatgtatgctttacgacaattaaaaatatgtatatgcagtatcttttaaagtctttatatttactttttatttttctttaattgaaggagatggaagacatttctactaaaattatagatacatttattatttgaccaagatgtatcctagagatatgcctgctcacattggaatgtcattatgttcaaagtgattcattgcaagattgtaatactaaaagactggaaataaagtatgtaactagaaga

SEQ ID NO: 244605 - DNA, 318 bp, Homo sapiens
cggagtgtcagcttatctgtaaagttacattaagctggttggtgaatacatgggttttatataattatttatacttagtatgcctgaaaacaaaagtgaatttttttgggccagattattgaggtgaagtatgaatcagagttcagagactacttggggccttataaaactgaaatcatccttttatgttcttagaaacagatccttatggctgtgtgtggtggcacacacctacctataatcccagcattttgggaggctgaagtgggaggattgtttgagaccagcctcagcaacaaagtgagaccctgtctctac

SEQ ID NO: 244606 - DNA, 283 bp, Homo sapiens
ttatagatgaggaaattgaggctcatggtggtaagtgaataacttgcaccaagatcctatggctggtatgcagtagagcctcaattcaagtacgggtcttccaggtccaaacccatgcaggctttgagaggtaaggaggtagagaacgttgacaccccgttcttggtgtgtttttcagcaaatacttgtatgcatattaaagactgtctacccttttgtcatcttgtgtcacttgctgcttcctttggtactacccaaatttctttcagcatttcagctttga

SEQ ID NO: 244607 - DNA, 921 bp, Homo sapiens
aaagcagaatagttttcaagcagaatgtattcaagcagaatggctttcttggattttgttgtgcccaataaaataaaacttttccaagtctggagtagaaaggagaggcttcttggaagtagcaatgcttaatttgggccctgacgggggaggagaaagtagttgacatgggaggaagggcaggaaggagggagatgtccatgtactatgaaatacaaaaacatatgattctattttatgtttcttttgaaatctaggagcccaaggtataccagcatgaagaggatcacctgagttacctggagatattgagatatgcccacccctaccaccatgtgcctgctgtgtaaagctcaatgggccattaccaggaccatcccagtccactgtcttccaggaagctctgtacaaccatcagaatcattctgacctggccactggagtgtgttcttcattctcctgcaccaccctcgtgtataccactttggttctgacattgcactgtttcagaatgctgtcaaggtgggtctcatgaggaatggtatccaggtcagggacaaacaaggagaccaaggacagccatgagcaagtttcaggaagttccatcacacagctgagaaatgggatatgatgtggccacagtctaagctggacaaagcggagtctgaaaaaggaacttatctaactgtattctatgggtatttgctcagtggaaattcagaaggctggaactaacagcatgggccttttcctcaagtacctctgcacttaagaaaggatgctttctactgctctcagcccaagtattccctctagtatcattcaatggtgaatagctcaccaaattggcaatggctaagtttgaacaaaatgaatatattagcaatgactgaaaccaataaagaccaacaactcatcaat

SEQ ID NO: 244608 - DNA, 527 bp, Homo sapiens
tttttttttctaattattcagttccactggggcactctgttgttgtaaataacccatttatcgtcatcgactcttttggatttttcccagaactaatttcatttttgaaatagtttctcttcttattgttttgagcaaatactgagcaccattatagatttatttttgtttgtctgatagatgctactattaaaattcttttatatgattggagatagatttccatgacttcaaaagcaagggtgatagtcactctaaagattacctcccaagtttagaagttcatttaaaaatagctctacaatgtattgaaaacccatttattcagccatcatttattgagttacccaactaagagctctgtggatggcaagggttataaatgccgaaaaaatgtggtacttgcccaggatttgcactccactgagaatccaactataattgccaacattttccacttctgttgttttaattatttcaaaattcaggtcgacgcggccgcgaatttagtagtagtagtagtaggc

SEQ ID NO: 244609 - DNA, 348 bp, Homo sapiens
tcggagaggcagggcaagcaggtgctgcccaactgaccacactccaggctcaaggaacacccacctctgcctctgtgtctcctcttccacaaaatgctcaaagagggccacttcaaggggtcgctgaggcaggagagcgagttcccatctggccttctctccaagccttggaatccagcaggggagcagttggcagcccagggacaagacagaggccaagcagtgatgtatgctctgttggccagcctgggtggaagggagagcaggtgagatcccaagcacatgggtcctcttaggcccacgggatcctctcaagccccagtcaggagggaacgaacccttcggggc

SEQ ID NO: 244610 - DNA, 812 bp, Homo sapiens
ggaacttcacacagtgcgaggcacacagggggccctcagtagctgtctgcgaactgaattcagccctgcacccagcccatcacaagcatctttgttctaaggcggtccaggaggagagaaggagctgccacgtgctgatggtctcccgtgggctaggctcttgagattccatgtgtgtgttctcattcagtgctcacagcaactccaccaggattccagtttcacagccaagaaaacagaggctctgtgaggggaggcagcttggcgaggcaatcacctcatgtggggcagtgcagggttgtacacatctgtgtcccacttggatgacttgaggaatgacttgaggattacggaatgacttgagggtcccacagaacccttcttgcgaaagacccttcatctggaggctgcactggagaagggatgctggacatgttggagcctcaaagtgcagcatcttcagtttcttgaaacttctgtgcttcttgcttgggtaactgtgcttcctctgatctttgggccaacctggcccatgagagattccaaggatttgagctgtctctagggtcatggggcagcctacatcttgtgcttgatttttctccagggatatcctaggtcaggtagttagggtgatggacattggctccagagtcagcctgatgagttgtgtttttctaaattaacttttatctggcaagagtgttgcagaatcaagttttaaaaaatatttgcatatctcatttctttgtctaattagtgttgtgagaatgatgtcacagttttcatgcttgaataaatagctgatggtg

SEQ ID NO: 244611 - DNA, 546 bp, Homo sapiens
ttagtagagacggggtttcaccgtgttagccaggatggtctcgatctcctgacctcgtgatccgcccgcctcggcctcccaaagtgctgggattacaggcgtggtggtaagggcctctaatcccagctactggggaggctgaggagaattgcttgaacccaggaggcggaacttgcagtgagccaagatcgcaccactgctctccatcctgggtgacagagtaagactccgtctcaaaataaataaatacataaaataaaatatagatcacttttcttttccattgttgcacaattttacatgtatgaatattctgtagtataaacaatcctccttttgatggacatgcatttatttttccagtgtttcatttaacaaacaaaatctgaatgattattcccgattgtactgctttgcacacatggtctaatatatttcaaggattaataagtaaacactattttattcacagtaaatggttcactcatgtttacactgtctcctatttatggcaaatgataatggtccatccgctatgggggtaat

SEQ ID NO: 244612 - DNA, 301 bp, Homo sapiens
agagtgctgctgtcttatctttcaaagccctacagaaatatggagttgactacaaaattataaattctgaaaataaaacacgtgtcttcagggaaattttaagcttgacactactttggagtaaatccctaggtccccaggagtgatctatttattgcctgccaccattagtgtatgtgggtaaaagtttgagaaggcctggagtagagtagcccaagccctcaatttgtctttcaaggcccagtgccttccttcccccaaaccctgtccgatctgtcacctacatgtaccttattctcta

SEQ ID NO: 244613 - DNA, 448 bp, Homo sapiens
ccatgtgagatgacatggcatgaaaaaaacagtgggataactgcagccagtaacacagaaaaagaagaagggctatgatgtatacgtgggtggaatacacataaaaagacaaagcttaagataattagaaaataaatgaagcagaatttctttttaaattcagtaaaattcagctttgcagcctgaaaaaaaataaaatgtcctctccacatgaagaatcaatgttatttgtttacctttgatattttccacctgacttgcagtttgcaactttcacagaagtatttatgccttattatggagcatctgttatacagcaagcactgtcatgtttgtttgctacatttatgtataaaaacattctcatgacttatgaagtttccctagtacttacctgaacaaattgcctaacgaataaatttacttatatccatcacaaaaagtgaaa

SEQ ID NO: 244614 - DNA, 560 bp, Homo sapiens
acagggagaacgccttgagcatgaaggcagagattgcgatgatgtgtctgtctacaagccaaggaatgccaaagatcaccagcagagagaggcatggaacagacacttcccccacagcccgcagaaggaaccagcctgccaacatcttgatcttggacttctggcccccagaactatgagaaaataaatttcttgtagttgtttaaagccccctagttggcggcagctccatggaactgatacagaaacctggctttgaggccgtctctctggaagactttgggcaaatgactttcctctttgagcctggggttgggaacctgagactggggaggcctggctgtatagaaatcacaggccatgccgggcgcggtggctcacgcctgtaatcccagcactctgggaggccgaggcaggcggatcacgaggtcaggagattgagaccgttctggctaacacggcgaaaccccatctctactaaaaaatacaaaaaaaaagaggcagaagaatggcgtgaacctgggaggccggagcttgcagtgagccaagatcgcgccact

SEQ ID NO: 244615 - DNA, 429 bp, Homo sapiens
atctgaaaagacgttgatgctagttatgacaaatatcagtcaatgtagtcagttgattaaatattacaaggtcgattagtaaattacattttaaaataaaatgaatactttctattgcatatcaaacaagtaggcattgtgtgttcaagattcagactcatagaatggtagtgaatgtaaaaactcttggaaagcttcttgcaaacacacattaaattttatgaaacctgaagagaaagagtatttacctcaacctggcttatgttacttatttttagcgtctttaaggtatcgtttataattaattccccagccttcttcttcttgtaaatgtaagcttagtgtcttatgttctcaaagcacttcatcaccttagaatgtcttattcttctgaacttaaaagttttatgtttgggcgatacatgcgta

SEQ ID NO: 244616 - DNA, 419 bp, Homo sapiens
tctattagttttctattgctgtgtcacaaattatcactaacttagtggctttagacaacagaaatttatgatctgacagtttttatgagtaaagagttcaggcacagttactgggtgttatgctcgagtctcaacagactgcaatcaaggtgttagctcaggctgtgatctcatctgagactttgggggcctcttctaagttcattagttgttggcagaattcagttccttggggttgtaggactaaggtgctcagcttttgaaggttaccccttttcataggcatttcacaatgtgggtatttacttcttccagacaagcatgagggcatctctctcactaggaatttctccatccagctggctaaaatggaaccttatcaaatataacctaatcaaggagtgactaccccaatatat

SEQ ID NO: 244617 - DNA, 562 bp, Homo sapiens
cagcaatgattgactctaccataaatccgttctccgtttccatggagaaagctatcttcagccaccccatggtgctgtctgttgggcaacacattaccctcagaggggactgggatgaagtgtgggcttgttttctataattaatccccaagaactctgcccctatcttccataaaaaccccagagtccccatgggagtagatttccctctttattctagttgaagtctcctggagggatccatatggtggtaaattgtttttgcaattgaaacgccttaggcagcaagaggaatcgtttttcacagccttggagaaaatgcctgcccttaataatgatggaaaagactcttctgtttccaatttatttgtcagaagtaagtggaattgagctcattaaatactgttactataaccatatattcaaaatgtctacctatctacatattcaggagaaaaatgtcaataccatgagcttttaggatgagaaaatctagacaagaaaatctgactcaagagaaaatctgactcaagaaactgtccaatcaaacctacatttggaa

SEQ ID NO: 244618 - DNA, 243 bp, Homo sapiens
gaaatttgataaagcatcattttatatttgtactaaaagcacaagatttaaattagctatcatgagtccatattaaaaacaaaaacaaaactgtagaatgtgaattatagctctgtgtgctacccagaaaaaaattcaagtcttaatgtacttcaaagcaaatattatacgattaaaatgaaatacattgatccatgattattttatatatattcattctttggtttggtaggtgaaggtata

SEQ ID NO: 244619 - DNA, 563 bp, Homo sapiens
cctatatgtcagatttaagtcccagaagcagtaggaatgcagaccctagaaaaaaaattaaagaatgtagtttattttttcctctggggtgttaactgcagctactacagaatgcagactttggaatttcaggcataacatctgaaaccatgcaagaatttagatttctgtattaaagctaaatcttcatgtaaatatggtgtaaaacaatgcattatcattataaacactgtgccttacgagctggttcaagcagaacccagataattggaaattatatgaatttatagattttccatttgaaccttattagtgttgtttaaacttgtaataatggatattttctagttatctgttttctttttttcatacactgtgatggtattttatgaaatcatttggttttgggaagttggaatttcctaaagccacagcattaaagtcagataattttatttacccaaaagtttctggaacgctgtggttctgtactgtgtatacaactaaaataagaatataaatttatataaaaataaaaatacaactatataagtaaaatttga

SEQ ID NO: 244620 - DNA, 465 bp, Homo sapiens
ctgaggaaacctggggtgggtgcaggtcctacgcagtactgaaggcctaattgaagctggagacaaaacagtggtttaccacgttccaacctcctagttccattggcctagaatttcacaatgctggaagctattaactaaggactgcctttcatggaaatttataacaattttcagtgtaagcagtcttgttactgatatattcagggactgcttatactttttacagacgaaaaaattctcctaaatccttttttaaatgaaaatgttattttataccaatctaaaacttgtattcagtttaacatcttggttttgcaaaagaggtggtctgtattcatggaaacccaatgctgcttctgaggtaaatttaaaagacaactagctgcgagagacaagatacttctaaatactttatggtaggacagtaagtattgactcatggtgccccttgttaacaggagg

SEQ ID NO: 244621 - DNA, 466 bp, Homo sapiens
aagatgctaatgtctccaatatgtaagacacatgtgggatcagaattaaaggttagctgagccatatggggctcagccttctaagcaaataaagttagggtagacacgtcatcagagctcaatcctctgtgtgagtggccaagattagatctcataagatggtgctgggcatgattgtggcatgcctgtttccagctacttgaggcaggaggatcactggatcccaggagttcaagactgcagtgagctatgtttgcaccactgcactccagcctgggcaacataatgagaccttgtctctaaaacaggaaaaaaaaaaggctgggcgcggtagctcacgcatgtaatcccagcactttgggaggccaatgcgggcggatcacctgaggttgggactttgagaccagcctgaccaacatggagaaatcccatctctacaagaaaagaaagaaagaaagaaagaaag

SEQ ID NO: 244622 - DNA, 500 bp, Homo sapiens
tctacctctgttttctcttactatacttgcctacatctcatcttctgtcaacaccaggtactcaccccatgagcttcttgtgaacttgtctggggcccaccggcctaaacatcatcttttttgtttggaattaagctttgttgaacttttcacaggtttcatttatgcaaatgcctgtgatgggacaaaaaggtctgcaaacatggaaacctggtctaaagatgtccaaagtaaactgtctgtggagtcgaatgacatttgagccctggacctaaactccaaatccaagctctttcccactgtgaccttgggcctctcaaggctcagtttcctcacctataaactgtagagaagccaataacagactcatccacactatgaggctgtgcataaggtcatgtatgtaaaactacttgctttgttgatcattctgtcccagataagtatgaattattatgcatcatttcattaaacaagaaagcttcactgtgttaatatgc

SEQ ID NO: 244623 - DNA, 368 bp, Homo sapiens
gtgagacagcaaagatggcagccagcttcttcctctggaagctttgtcccaggtgggtagtgacccattgccagcctgccctacctgtaggaagtgggttggagacccacattgggtggtctcacacaatcaggaggaatgggatcagggacccaactaaagaagcagtctggctgtgttttggtagagcagttgtgttacattagcggtgggagggtcccttcctcatctgggccacctttattctccaaacctggcaggctggagtggctgagtcaactgaaccacagagatggcagccacccctctccccaggagctccatctcagggagagattgctttgtccgtggaacccttgctggagtag

SEQ ID NO: 244624 - DNA, 485 bp, Homo sapiens
ggactgggtgtggtggctcacacccataatcccagcattttaggaggctgacttgggagaatcacttgaggctaggagtatgagaccagcctggggaacatagcaagacccatatttctaaaaaaaaaaaattatttaaaaaattagctggcatggtggtgttcacctgcagtcctagctactcaggatgctgtggcaggaagattccttgagcctaggagtttactgcagcctggatgtcagaaagatatcctgtctaaacaaaacaaaacaaaaatgactaaatgggatgttttttaagtttttcaacacctctcacttcaataggtaatctatgcagcctcctgttacagagtaaattaaaccctgaggtattaaaacctaagagaatcagtttctaggtatataaatcttggggatatataaggaaagctaggaatgtagaagcagataattatcactgttgttcagttaggctgttatat

SEQ ID NO: 244625 - DNA, 158 bp, Homo sapiens
ggtgctcattgtatagtggctaccaccaggattatagtacatacaaaggatatttaagcccttaagggctgttgaatatgtactataaccatatgtttgaaacatgtgaatatcagataacaccgatattttaaaatgcatgatgttttcttcactgg

SEQ ID NO: 244626 - DNA, 366 bp, Homo sapiens
ttatgataagaacctctacttgctttactctaagtaaaggcactctttgtccggggaatttaaaattagttccattaaatccactggaaccaatgctgctgatatcacatatgaattccaggtttatggaccctaagagttaatggataatgagaattcaaggttccctattttcttctgtcataattattataggaatataagtaattcatttaactggtctgtgcccttgagactgcacaggttgctaccattgtcacacaacactgcagcattattaaatatacttcatattaagtcaggtataggaagataaaatagaaagaggagacctaatctctgaacttaatgagcttagacttcaac

SEQ ID NO: 244627 - DNA, 577 bp, Homo sapiens
ctattcagtaaacttttttaatgtataatttgtttttcctatttacctaattccgttattcctaaaattgcaacatgtaattccatgcaggtattatttagccagaaacactcatgccctgatgtattcagcaaaccactgaatagttactcttcagggtaaaaacaggaattcggcttctcttggttgagtttacctccccatagtggctatataatattggcctctgatgggagctgtttgtgtttgcacagaaagttttcacatatcacctaaaatagggagtgtgcccccatctctgtgctggttagtggggtcctacgtaaattagtaagttatctgttgactcaaggttctttccatcttcaaggtgctctgcatcgggaaatgaagcaaacaagaaacaccagcttcagttcttaatccagaatggcactcaccccaaaacacaattcacaaaacttcttaaacacaggaggattgtttgagcctaggagttcgaggctacagtgagctatgatcacaccactgcattacagtttgggtgacagaaaagcccaaaagctatctctctctt

SEQ ID NO: 244628 - DNA, 564 bp, Homo sapiens
attcacataagtgacagaagcaaatgtattagtcaaaggatatcttcatctatattgaagtacaagctagaaagtaaacttcttgaaggcagagattttttttttaagttgtgtggctctaccacctaacataggttatgtacagaatagacatcaatagtgaatgaacagatgaattagttaatgagttaatgatggatttttagcacattttctctcttttttaggaacttaagaccccaactgagttgtttagaggaaggggccttaggctggggccaaattctatgtcttctatgcagacgtgagataatgtgaaatgttttccttttacagggtgtttcccctggcttttcagcattcttctcaattctttaattgccatttaaagatttgtatgctgtggatgagctgatggaggggaatgtttccctgaggacatggcttctcatggcagccaaggttttgtgcctgattaactcgctgattgaatcactggcctctggaggcaccaagggagggagcatgagtatatttaagcagccagaactctctgtgcctgtg

SEQ ID NO: 244629 - DNA, 223 bp, Homo sapiens
gtaaagaggggataccttcttaaactgatagacttcctgacttctttcagcagggtattgttttaaatcagccttgcagataaaaattaattccatctttttcagacaagtgaacaatttagttccttggcagatccaaaatgatagatggttatgttacgctttctgctgtcccttgccaaaaataagtaaatatatcagttaagattatgcctttacaaaa

SEQ ID NO: 244630 - DNA, 314 bp, Homo sapiens
tgctgctgtgtcgacggttgacataattatgtcaacctgcttctaaaagaaatcacatcacagctgtgcatttcaccagcaagctaccacaagataagaaaaaagaattcccagtaatggataccccactcaatcctcagtctgggttgacaatcctctgacaaattctggtgtccatgacatgcactgccttattatctgtatgaatttcatctgtctaccaacctaatatgaattagggtatttacaagataacctctaggatgtcattgtataacaatttgagtatgttaaagtgtctccttttaatgtta

SEQ ID NO: 244631 - DNA, 477 bp, Homo sapiens
agtatgaaattagtcttcaggagctgcattacctgctttcattctgtaataattcctaatgttagatgaagttttacttaggaatattctcaactctgaagtctctcacaaacttctatgaaatgcatgtgttcagagttaaattttcacaagaactttgctcaagaaattacttttcacctcagttcaatgtgaattttctctccttgtaagcaaacagaatgtagcagtactatttctatcctaagaacatatgcacgttgttccattagtagtaatattttcatcagaacattgtttaacagtagcaagtgataacatttgtaggcagtaatcagagacttgacagctttcctcaccactaacattcttccatctaggagacaagagatgtaaatgaaatagaatacttcagaaaatgattattagccgatgctaactcaagtgccaagtcgaagttgagttacgtgtttaaaa

SEQ ID NO: 244632 - DNA, 419 bp, Homo sapiens
ctcaagcaatcctcccacttcagctgcctaagggctgggattacaggcatgaaccatgatgcccggccatcttatttcttataaaaatacagtttaaaagaaagtgatgccacagccataaaaaaagaataaaatcggccgggcgtggtggctcatgcctacaaatcccagcactttcggaggccgaggcgggcggatcacgtgaggtcgggagttcgagaccagcctgaccaatatggagaaattccatctctactaaaaatacaaaattagccaggcgtggtggcacatgcctgtaatcccagctactcaggaggctgaggcaggagaatcgcttgaacctgggaggcagaggttgcagtgagctgagattgcagcattgcactccagcctggggaacaagagcgaaactctgtctc

SEQ ID NO: 244633 - DNA, 491 bp, Homo sapiens
caaggtagtatatatgaacccgttgatatattctgaaactccaaatgatttttgtgtgggaagtattgtccatattttcaacacatttctacacagtataacttttataatgagaaaaatattttaagttagctatgaggaagtacttcacgagattaaatcccgtcaatgcttatctttacctacttcaggtgcatgtctctgtaagctgccttttaactgtttttagaacatggtagggtgtgagtaataatcccaaataaactactcctcctcagcttgcttgagtggttacagcaggtcagagagtcaatctttcaggctccttggccataagatctggctgcaactactcaactgtgctgctgtagcacaaaacaggcgtcgctgtgttccaaaaaaataccctttaagtacaaaacatgatgggccagtttgctgacccctggatcagagaacaaactcaaacgctggtatgtcaatctcaagta

SEQ ID NO: 244634 - DNA, 462 bp, Homo sapiens
atatattcacactttaaaatgttgtgcaagtactatctctttgattcaaatatgtcctttgggtgggcggagtacatatttcatggtgataaattcaccttataagtagaaaaactatgcacaaatatactgcgatgtcaactttattgatttgtgtaccattgttaagacgttcatcgtcctccaatatttcttaaatctatcagcatctcagaaagtgaccatgaaggcctcatttatctatagaggaaaagatcccttcctttaggttcactcataacattgtgatttaaacagctcaggaccacctctgctctgaagggtaacagtcccagagaaagccattccctcatagtcatgcacagggacttctctttttgtagaactagggtgtgtcaagtcttaagaacagtaaaatgcccatggctaaatgcccttttaaacgtccttcagataactatg

SEQ ID NO: 244635 - DNA, 552 bp, Homo sapiens
caggagtcagtccacctggaacttctgcctccagtgcactgagtctgcacggaccaccagggctgacactgccttacttaatatgggggtgggggaagtccctgcgatatataatggtctcaatttaaattctgtgctgtttttattttagctgtgtaatttggaaacttcaaataaaaagcctgaaaggaaagttggactatttaagcttacacagactctattaatgctatatggttattctacccctgactttggaagaaggagaaactggcatgggaatacacttttctaaaaaaaatactatttaaaaatatgaaagtttatttaacatctaaggaaaggtacttaattagagggacactcaacaagaagaattgaggatctaagtaaatagtccccatctgctcctggtcctaccacctggcgattacttcctcttcttctctgatagattttagccaaccaattttgttttatttgtgcaagttgagaggccacctgttatggaatatacttccacattaaacaaagtgaacatttcctaaatct

SEQ ID NO: 244636 - DNA, 439 bp, Homo sapiens
caaaactgtaatttaaactgatttatgtcagactctgctattacttacattttatgtgtgtattgagggtgcagagagaaagtagattagagtaagagagttgagagagaaaaagtgtaattaatgagcaaaaattaatgagctagcgagctacaaactgcttgaaatatcagctgtattattttgtaatcaaactgcatacaactattaatttctgtaaaacatgtgttttgttcactttggaaaaatataaattaaaatgatgctatccatttacttactcaattgatgttaatatgtgtataattacagaattgtataagaagactcaggtggcagaaatgagtggaggccttaatgataagagagaaaaccaatctggctcagggtaatcttttgcttatttatatgatcaaaataagatgtttcaaaatggaaa

SEQ ID NO: 244637 - DNA, 452 bp, Homo sapiens
ccacctcagcttcccaagtaactgggactacaggcgcttgccaccatgcctggctaattttttgtattttccatagagacagggcatgttgcccaggctgttctcgaactcctgaactcaagcattctgcccatctcggcttctcaaagtgttggaattacaggcgtgagccaccacacccggctatatatacctacgagtagaattgctcggtcagttctactgtgtcgagtcaattctgccggatctacccggtagaaatgctgggtaactttaattgaatctttttgaggaattgccagactgttttccaaaggaattgcacaattttatactcccaccaacagtatataagggttctgattctccacatcttttccaacacttattattacctgtctatttgataatagcagtcatagtggttctgatgtggtatcattatagttttg

SEQ ID NO: 244638 - DNA, 375 bp, Homo sapiens
atcgctccaggtctaagaagcactggtctgagggttaaataagccttatcccctgtatttggtggagagatttgaagggtaactgtgagtaggagacttcagctgctctgatgggaagggcaagcaagggccccctgaccttgccaggaataacaggaatcttccacagtaataaaaactcttcagtttatgtcccttttcttatttgattacctcacctctctgggcctcagtttccttgcttgtagagtaagtggtttaaatttaatggttttctagaatctctttggctccgatagtcctgaatctttctagtgttggaagaagctctaatctagaacagtgttctagagcaatgttgtctaatcttggtct

SEQ ID NO: 244639 - DNA, 431 bp, Homo sapiens
acttcgctctgcaactttccccattctgtcttctacttactgagattctttttgtatgttgcattcaaactttcttagaaccacaatctgtttggtttatttagtcattatcaggtgaagagtagtccgctcagttaagatgctttcataggcagcataataggcctcccattgctagtagccttttgctcagcaccaacctttgttctaattagttgtggctagggtgatggtggaggtgacatgattataatgaaacacccatgggcacttttctcaaaaggcattgcaaaaggtgtacagaacttcatggcgtgttagttatttgttgctatatgaagatctttgcagtttttaagactgaaattggcaagccagtcacttggacatgttcctaggatttgagatataggagtagtatatttatgtgg

SEQ ID NO: 244640 - DNA, 1890 bp, Homo sapiens
  misc_feature (49)..(49): n is a, c, g, or t
  misc_feature (341)..(341): n is a, c, g, or t
  misc_feature (1256)..(1256): n is a, c, g, or t
  misc_feature (1495)..(1495): n is a, c, g, or t
ttttttatagagacatgtcttgctgtggttgcgcaggctggtcttgaantcctgggttcaagcgatcctcttgcatcagcctcccaaagtgctgggattataggcatgagccactgtatctggactcacttagaggagtctaatgtgaatggcccaatatcttccaataagaaagtcttctgtcaactctactaaaccacagatttaatcagaaaagtggcatttccaagtttttatttaataaagttcatgttgaaacttgggtagggaaaattggtaaataagtaggtagatggacaggacctggtggccagttatatttgattaatgataggaaagangtatctaggtataatgcctgggtttttaggaaactacgagggttgatagggtcagagaaaatatatatgtagtgttagaagaaccttggtgaaaccaaccttttaggtgtaaaggattaagtagattcaaaagatactgcattttcagaagtcaaaaactagtggagagtggtaatcgcaatggaagaaaatgccaagagggaaggagaaagtgacctagatcagaaagacttaggaaggtcaatgcaaagtgtgtttattagatttgttaattgccaaagccttaagatagaatgagattgccttcattcactttcagcaaagccaagggcgttgtctttcccttttcatatctgggacctcattttatttcaattttatttgtctcaaatcaagatagtaggaataatgaattactgttcattctgattttttggtacttgcaaaagtatgtgtatgtttttaaacactcccccaacttccagacttttataagattgggaaaatagcacagataatgtaatactgattggccttagagccagtgaccctggacaactcacctaacctttctgagtttcccatatttccctttttatcttccccttcacttacatgggtgaattacaaaaaaagttttactaccctaacatcaggaaggtcattataatgtagtagcaaagagcatagactctaaagccaaactgtctctttgtgaatcttggctctgccacttacctgtgtgtcctggggaaagttaactttatgggcccctgtttcctcaactgtgatattaggatactttcagtgttcacctctaagagttgtagggagtcaacgagtaaacacatgtaaggcaccttttagaaagctgcctcctacatagtaacctttctaaatctttgctgctgttancattatgacattatcatgataccagtatcatcctcagtcaacaaacgatagataactcagagaatgaaaaggttgttcctttatatagtttccctagaatcaccttgtaccactgctgctgagttgcaatcattcgttagtcgtatgtgacctagattccattttctaagattattcaacaatgtagaggatcagcgtagtggaaatacgtctataaacatttctaagaattgaattcnttgtaattaatagcatcagagaagctgaaaatccaaagagctaatctcttaacttcatgatggaggacaaagattttatcttttggaattttaataatgtttccagcatgagattagccttcaatattgatttctggaattctgttttcccttgtttttcattgattaacctaaaacttttgagatgtagttcatatttttggtaatattgctatgattatataactgtaactgtctagaatttaatttctagcaagggaaatttaagccttttcctcagaattatttttcatgggaaaattcttactgatagattactggacttgagtcataatttattggttatcttattctgccctatctactctcagcactaattataaaaataatcaaag

SEQ ID NO: 244641 - DNA, 480 bp, Homo sapiens
gagtcttgccctgtcacccaggctagagtgcagtggcacaatctcagctcactgcaacctccacctcccaggttcaagcgattctcctgcctcagcctcctgggtagctgggattacaggtgtgcgccaccacgcccagctaatttttgtattcttagtagagacaggtttcaccatgttggtcaggctggtctcaaactcctgacctcatgatccacccgtctcagcctcccaaagtgctgggattacaggtgtgagccaccgcgcccagccttgcttttattttttaatgagatgagtacataaatagcctcttcatgcttttttcagctgcagagtgcaggtattaagacgtaaatgggatctagaattctgatttgattctgtttctctagcaccgacattaagatagactcttggggatccagtgttcacaggcactgttactccacctggattttgtctacagagtgaattatc

SEQ ID NO: 244642 - DNA, 658 bp, Homo sapiens
actccacagtcttcagagtggggaaaataaaagggtcaaacaaggggcaggaggacgcaaggggagaggccgagaggtctcattcccattctcccctgtagggctgactctctgacttcaagataggaataaaaggaggaggagtctgctacacccaccattaagtgcgctcacagtatttactcaaccagtgacaaggagggccaaacaagaggaaaaatcctagaactgcagcaagacagatgggaatcacactagaggagggacttcccagggcatctgaggtaaggtgtaaaatctctgccttctcctccctaaatgtccccacaactgagtccagtgcaatacagcctgaagatgatagatgggtgagatggcatatgcccattctggaagggatgtcctgaatgtgctaggagttgtgagagatgactggaattccagtaacttttggcaggatttactactgtatctggatctttgggattgagagaggagcaagaagctgacactgcctactgcaagtggctataaagccattctcacggtcctgatgcaatgctcaagataaaaagcaagtgagtaattaataactaggttgtgaactaacctcttgctccaaggcatagtaccattttgcacaatccatccaggcctg

SEQ ID NO: 244643 - DNA, 908 bp, Homo sapiens
gcatcagtggcaccctccttccagtttgtttttgtttttttgagacagagtctcactgtctcccaggttagaggacagtggcatggtatctactcactgcaacctctgcctcccacgttcaagcaattctcctgcctcagcctcctgggtagttgggattaaaggcacctgccaccacgcccagctaattttttattttttttagtagagacagggtatcatcacgttggccagcctggtcttgaactcccgacctcagatgatccacctgccttggccttctaaaatgctgggattacaggcatgagccaccgcgcctggccaaatttttttgtttatttttgtaaaacatacctaacataaaatttaccattttaactatattgaagtgtacagttcaacggcattaagtacatttacattgttgtgcaaccatcaccccatctatctccaactcttccagttttgtcaaccaaaaatgtctctggaaattgccaaatgtcctctggaggcaaaattgctccagttgtttacaccttctccaaggtgaataagaagtcaaaaatgtcgatgtcataaaaaaatagaaagaaagtctaagaagctgcaataaagaagaaatgacaattcaacgcaacacataatcctgaactggttcctgtatagaaaaaaaaaattgctataaagaacactattggcaggctgggtgcagtggttcacacctgtaatcccaacactcgggtgatcagcccgcctcagcctcccaaagagcatctatattatatttatttacttcaaatatctgtagacaaatagaatgccaagacaggaaaagtaaatcaactctattagcacagaaggctaacttcaggtcagggagcaagagttatacataacaggttaagtgg

SEQ ID NO: 244644 - DNA, 434 bp, Homo sapiens
atatatttgggtgtgtgtgtgtttatattaacatatataagatatgttaataatcttaagcaaactccagaaaataattacattcagaaaaaagagaatgggatgcagttggcagtggtatctaggacaacttcaatagagcttataatgttttattttattaggtgtatattggatagatgaatgttatttatcgtttttgtggatgagaaacaatttatactgaatgttaagtaatagggagaacaatcagaccaacatgtgtgaatgtctgtttatgtggagaagctgaagaaacaattgtttgggttgataatgattactaactggaagctatggaaattgcatattaatcttcaaagtatttgaatataataaaaattacctaaacatcattcttgaacataattttaaaaataaaataataatatatt

SEQ ID NO: 244645 - DNA, 458 bp, Homo sapiens
ggaagaattttcttagaaccaaaaggcatggaattgatgacatgaaactgcctgagcttctcagctgacctgtgatggagtgttgtgcccaagtggaaagttcttctttctttcagagacatatcattcaccataaaatacaaccagagacttcaaaattactccaggctagaaggacactccaattaggggaaaagtaacctatgggcaaaccatcttccgtaagagttcaaggacaaaaaactactgatgttgtaataacattgaaacttaatgttttgggcaatccttaagtgatttatttggagtgtcccagtcattttagacctcttcaccttacaatgtattgtgtgagattatatttccatgcacctaattttaaaataaatttatttaggtagatgtagagacatattactgtgataaagcagttcataccaaataaaatttagctaata

SEQ ID NO: 244646 - DNA, 183 bp, Homo sapiens
aaaattgcatgctacaagcaagggaagaatgatttgaagcatcactgacttctcatcagaaactatgaaggccagaagtccctggaataatatctttaaagtgcttgataaaagccagtcaatccagaatgctatgttcagtgaatatatccttcaatgatgaagacaaactaaaggcatttt

SEQ ID NO: 244647 - DNA, 1149 bp, Homo sapiens
tcttttaatcaggttgctgaaatgtctcaaacttcctccctgcaatgagcagtaacatggtggaagggcgatcagcttttgggggttgatatttgctaatgaaaagacccaagcaccaggcaacatagtctcacgcacatttatttcaggggcaaacttttggagggaaaaggctctcatttttatgtgttgaatctgaaaattctcacctgaagacaaagtaaaaaaaaaaagtctctcagatttacccatctcactccttaaaaagaagagcttgattccttggcaacaaggaacaaatgttcctcagaatcccaagttatctcccacttcccagttctgaagttacatgccaggtagatctagttagatgccagtactattgtttctcaccatagcatcatagttcagaatgagactggctgggttcaaatcccgactccctcactttctagctgtgggccctgttattagctcactaaactcttggagaagaagtgctaaagatagaagcctgggtctctgaatgactgtgtggagccaagaccccaccttcccacccaatatatgaaaatgtaactggagtgccttaagtccttcagatgtggggtagtttgcactgtatgtagctagcatactcctgcctcggtttccctaacatagaactgttttgagcatcaaatgacttaagagtgatgggaaagcttagttgctccccactccaactccagatattgactctaataagggtagtccccaaatatctgtaacttttatcatgagccggatatagctatgactcccaggaattccccgtaaactcttcttgaatatttttcagcctgaagccctcttgtgggaagcaagtttgtctgctcctttctgtgagacgttcccagtcactggctcaccctgggagagacagtacgcgtgttctaagctaccaacagacttcctcagatgcagtgagtcagtacaaacacacaggcaaggttgaagaactctatggccttcgtctctcttggctcagccaggcacagttcctcttagcccaagacaaaacagcctatgctgttaaatcagtggttctaccagcttccaatcataaaaccaaggggcaataatacataaaattggaacttatacatt

SEQ ID NO: 244648 - DNA, 456 bp, Homo sapiens
ccttatctcataggtcatagaagtttggcttctctcattgacctggaaggatgccgtcatccactctgacctgcaaaccttttgatctcaaacagcgatcttccaggcgtggccccaaatcaacagcatcagcgtcacccaggagctgcctgaagccctcttgtgggaagcaagtttgtctgctcctttctgtgagacgttcccagtcactggctcaccctgggagagacagtacgcgtgttctaagctaccaacagacttcctcagatgcagtgagtcagtacaaacacacaggcaaggttgaagaactctatggccttcgtctctcttggctcagccaggcacagttcctcttagcccaagacaaaacagcctatgctgttaaatcagtggttctaccagcttccaatcataaaaccaaggggcaataatacataaaattggaacttatacatt

SEQ ID NO: 244649 - DNA, 821 bp, Homo sapiens
ccttatctcataggtcatagaagtttggcttctctcattgacctggaaggatgccgtcatccactctgacctgcaaaccttttgatctcaaacagcgatcttccaggcgtggccccaaatcaacagcatcagcgtcacccaggagctggattctttcccaaaacccaaaggcccagtccagtcacgagaagacatcaggcaaaccgaaattcagggaagttctacaaaacactaaccagtactcttcaaagttctcaaggtcatgaaatttaagaaaagactgagaaagtgtcacagttcagaagatactaaggagacaagatgaccaaatgcaatgtggcatcttgaattggatcctggtgaataaaaatgcagtgggaaatccagcgaaatcaaaataaagtctgtagtttagttagttgtgatgtcaatttcttagctttgataagtataatacgattatgtaagatgccaacattaggccgggcatggtggctcacgcctgtaatcccagcactttgggaggccgaggtgggcggatcacctgaggtcaggagttcaagaccagcctggccaacatggtgaaaccctgtctctactaaaaatacaaaaattagccaggcatggtggtgcatgcctgtaaatcccagctactcgggaggctgaggcaggagaatcacttgaccccaggaggtggaggttgctgtgagccgagaccacgccactgtactccagcctgggtaacagagtgagactcatctcaaaaaaaacaaagtcatttttctcaaaaaattaatcgaataaccgacagggaccagtgc

SEQ ID NO: 244650 - DNA, 459 bp, Homo sapiens
gcactcctgccttaagtcactgttggtagttggtgggctccggtgtacacagcctcaaagtgaaattagaaaagattgaaaactagaaacaactgaggactagaaattcaactagaactcttacagctcttataccagaagaaattctagaacttttttgaattctaactaatgccccagattatcatttggattattttgaactgaattaattttcttccattacctgcattgaaacaaatgaggtgggtcagagtgtgtgagactgtcgtggtcaagagtccgtgttatgggatggactcacagctggggaatgtcttttgggctaactgccactctgttgttgtcctctatcgaagttaaccagttttgcggttcagctttcattccagatggaatcatctttgacccacctatctgagtttgaatcttttccccctcttaatggtttacctgtat

SEQ ID NO: 244651 - DNA, 277 bp, Homo sapiens
ttatgatttgcattatctctagacagatttttatttccaagtgcctttttaaaaataagtttctcattcagcagacatccttttctcaaagtagagttttcttttttttccccaaaagacattttaaaatatcactctagcaacatcacaagaactctaacttaaaaaggaagaaaattcatctacaattctgctacgtcaacaaatccaactggttgtcattgtccatatttccttctagccctttttgcaataaagttttgctacaaaacttttg

SEQ ID NO: 244652 - DNA, 416 bp, Homo sapiens
atctgtagctaaggccctggcttttctccttctatttggaattcacttctgaaaaccatttagctcacgttctttcacataagctacatcagattcaacacagactaacagttgatgaaggtctgtgattaacatacacattcgttagagcggtcgttacctttctaagttataaaggagtagagtttacagcgagtgagttcacggcgcctcagcttttaggttgtgagcagttgcagtaggttacatcaccaggcagatgtttcctgctctgtcccgcatgttcaaaggaggatatttttgatgggaaagtgctgagacacatggtaaattgcgcctttctgagtctccaccgagcgaatacagagcctccaggaactatgtgaccaaataaaatggccaaaatttccattaga

SEQ ID NO: 244653 - DNA, 514 bp, Homo sapiens
cagatccattcgttctgtaccaatcctgcgctgagcacctgaaagtgctgaggcccaataatgagggcagaacacttggcttcagagagtacacagcatctggcagagaaagaaatataccacaaatggggcgtttcggaggttaaggaaaattccctctccccgcacactgggggcactgaagaaatgaagaacacgatgcatccactctgaagcagagattcagaaaaaagctaaaggagttgacttgcttgagtgtatgcccctgggaggaaggtgtgtaaggttatgtaagatggaaccaattttatcccgtgtgatgctaggaaaagaatggaaagccacaccacagaggggtctaaattgagcgcattgcggtcagtgttcagcctgagctgagaaaagaaaccaggctccccatggggaggcaggaactttctcagtgatttttgaagtccatgtaaataaataaatagctaacatttattgagcacttgttatgtgagcactcttc

SEQ ID NO: 244654 - DNA, 801 bp, Homo sapiens
gggattacaggcgtgcgccaccacacctggctaatttttgtatttttagtagagatggggtttcaccatgttggccaggctggtctcgaactcctgacctcaagtgatcagccctcctctgcttcccaaagtgccgggattacaggcttgagccaccgcgcctggccagaagataactttttattggtaagtgactgtaggataagaagatatattcatttagtttgagaggtctaggcccgcttttggaatcagcatgatttttttgtatgtgtgtgacctgtggcaggggccgcgggtcccctgtccgtggcgcttcgtcctgacctgctatggggctgtgggtggggcgccgccgcggccctggcattcacatttgggtctggagagagccgggagtctattaagttggttgtgaggtgccttcgaatgttatttttggtttacaactttcttgatgatattgtttgcagcacaatggtttttaattttcatgaagtctaatgagttttttcttctcttgttatagttttgtgtcacatctaaaaaaacattgtgaagtttaagatgacaaagatttacacttatgtgtttgtctaggagttttgttttagtgcttatgtttaggtttctgatgcatttttagttcatttttctttatgatcatttttttttcttttgtgaaacatctacatatgtgttttttatacatttcctgttaggtcttaatatttttctttttaatatgcttgatatctcttattaaaatgtcaacattaaataccaatattcctttaaaaa

SEQ ID NO: 244655 - DNA, 476 bp, Homo sapiens
ttggtcaggctggtcttaaactcccggcctcagatgatctgcccacctcaacctcccaaagtgctgggatgacaggcatgagccactgctcctggccacaaactacctattctgtgatcatctccacataaaattaaatcttgcagcaaggctaacatccccaaagcactttcctggagtcctgcggtccatcccaccctggcctctgccttcctgagaaaggaaagaccctgccaatatggctgcaaagaatttcctccccaatttcttgctgctctgaaaacaacttccacctcccacctcccgagtgctagcttctggaagttacgttgcctggacttgtctcggagtcagagatattgaggttctggcaagatttcgtcttcatttttcattctaagttaggacttggaaacccaaaagtcccagggagctgaatagaatagtaggtaaagtgtgagatgggcaagtgtaaa

SEQ ID NO: 244656 - DNA, 275 bp, Homo sapiens
caacaacatgggccccgtcacaccccacactgctggccaacgtggaggaggaggcagcccccaggacgcacctgtgggtggcgcttgcatgggtagcacagggtcagaccgcggaggcctggggagcgcacgctcagacagcggaggcctggggagcgcacgctcagactgcagaggctttgcagttttatggtttttatgttctgagttggggctttgataccaacacaatgaatttcccgatgtttcactagtactaaactggagtataaaca

SEQ ID NO: 244657 - DNA, 511 bp, Homo sapiens
cattgaaatgctgtatgtagacatgtaaaaggcataattcatctaaaaagcagtgcgcctggtcattttaaattgccttcagggaaaacaagagtattcttttttctttttcagtttagagtgctttttctcaatctcccttccacacatacacttcataggacagaggtcaatggagcagtgttgttttcatctaaggggtgaaaactttcaccttttccctaggcataaattcaccaattgctctacaaatcaaaaaactcacaccatttgagtggtttatagtgaccctctcactatttttttaaaccttcagatcactagtaataagacattttgtaccaccttttttgcctaattgaagctcacatttgagtagtatttttgttttataggttaacaatgacctctttgtgttttattgaacataaccttttttctgtgattattgagtttatcgaacctgttaaaatatgttttccttgaaaataaatgacttaaaactgagtga

SEQ ID NO: 244658 - DNA, 676 bp, Homo sapiens
gtggcattgcgcggtacacattacagcttctctcataaaagcaggtactgtattttgcatgagtttgataaccagatctggaaggatggcaaatgcagttcttttaaaaatatggcctctttgagatgaatgaccacgttttttggaatgaataacacattaagtcgtgtcttcaaatctaagaaggtctgtgttttgaagcctctggtgcttatctttcttttttaatggcagaaattattctctaacagtgtaataagtgatttttaagttgattttgaaatgttgccttttttgtgatagccttgttatggtcaaaggctattcatggattattacatttgcactgttattttttaatgggcatataagcacagaagagataggtttatatcattggcctgagtatttgtttttattgaccatttatttttggaattggacctcagagcacactgtggattttagaaaagcgtgtgtgtgtgtgatgttataattataggagacctgcagattctatctaggacgtaatgcctgcatagatgaagataaggtcattagtctcagaccataattatgttcctggaaaattctaagtgacactgtcttcctggctggtattacagtttgcatttttttcattttttggattccagagagtaaacaccatgtttta

SEQ ID NO: 244659 - DNA, 373 bp, Homo sapiens
attttttcattgaaatattttatttacttttaaaccagtagtaaacattttttttcctgtgaccatcactgcactggtcacctcatttattaaggaataaaccaaactacatattatcaacatattatcaatgaagaaatttgttttagggttccggtagaagaaactgacagtttattttagtagccgttttagtgaaatttgactaacacacacaaaaatctatcctgttaaaatagttttgttctagaagcatgatactcataaatagttgttaaatacttatttgtgtttctcagccagatgtcactgtcataaggatgtattggattgcaatacctaataaagttgatttatacataccctgataaaa

SEQ ID NO: 244660 - DNA, 784 bp, Homo sapiens
ggttttttggatgtttggtttttgtgtggtaaaattcaccaattttaaatatacaagggatactctgtttataccaaaagtaccaagtcccaaaagatccagaaatagatgtattccaaccccttcaacccatttcttccacccattctctccctctacgtggtcagacaatgggactcattgtttttggctcaagaatccctgacctttttgtggtaagaatctactttttcatctccctgagatctcgagatcgctggggagccaggacctggcagtgaaacagatatggagaaggggagggacaggaattggtgctgccattagaagagagtcctcaagaaaagccgggactgggacacgtagtgggagccactgggttgtgtgtgggggatgcctcctgcctggggtctgtcctcccaacccacaggagtggctctggctgtcctgttctagctatttgatcttgcctgtttggatctttcctggactcactgagatggatgctcagcatctttcaaataaatgccccgtttgcttaagactagccagagtcacttgggtttttcacaatcactaaagcttcactaaaatgaccctccaggatcccagcctctccaggaatccatgactcaagaagcggggtcagggaggatggtatggagacttccagagaaggtattctaagcgtatgccaaactactgggtgggaattcctgttgtgtgggaaacctattttccaagaaagaattgacgttttttttttttcttttcttaccttctc

SEQ ID NO: 244661 - DNA, 213 bp, Homo sapiens
tcctttttgcatggctgtgtttctgcagtgattctttcattaactagctccctaaagagctgttaaaactgcatgctgcagtggttttcacagttatgagccttcttctgatctctgttaatcagtcaagtcgtcaaacgactactgaatcaattcttccttctgatatatttgacactatcactcctcctaactatgaaaaatgtgccagga

SEQ ID NO: 244662 - DNA, 397 bp, Homo sapiens
tggggggtgaaaagttataaattacatcttttcaaatggttcacttctgagcataaaaacctcaaataacctcacgtaaaatgattattaaaaattggttcacagaatcttcatctcctcaacaaaactgttttaatttgatcaacaacattcctacattcacttaacaaatatttattactgcttacaatgtgccaggccctgtgctttatcatacacagtaggataatcagcagtgaatgaaacaaagtttctacccttggatattaatgggaaagtgattttaaacaagcacgagcatataacataatgccaggtagggggaaaacaacaaacataataaagatagagccacattttagaagaaaacattccccaaaaccaggtaatcctctgc

SEQ ID NO: 244663 - DNA, 377 bp, Homo sapiens
ggcttagaatcttaacctcatttaccacaactactgaattctttcttgtagtctagaaatttaaaaacttaaattaggtactttaagaatcccatgccgagcgcagtggctcacacctgtaatcccagcactttgtgaggccgaggcgggtggatcacgaggtcaggagatcgagaccatcctgtctaacatggtgaaacctcatctccactaaaaatacaaaaattttagccgagcgtggtggtgggcgcctgtagtcccagctactcgggaggctgaggcaggagaatggcgtgaacccgggaggcggagcttgcagtgagccaagatcgcaccactgcactccagcctgggtaacagagtgagactccgtctca

SEQ ID NO: 244664 - DNA, 421 bp, Homo sapiens
ttgtaactgtcttatttaggaatagaatgagaggcaggtgtgcctgatgcagttcccagcttgatttttccctttggcttagtgatttgggggtcctgagatttatttgcctttcacattggcatgaggagaaaaaaatctattgaattgtcttgagtaggcatccctcttctggactttaatttgtgcaggaggggacactggtattggttatcccacccagccaagcttggggtataattgatttttggtctttgggtttctaaatcagtcttatgacctcattaaaaaatgaatgagggccaggtgcagtggctcatgcctgtaatcctagcactttgggaggccaagatggatggatcgtttgaggtcaggagttcaagaccagcctggccaacatggcgaaaccctgtctctactg

SEQ ID NO: 244665 - DNA, 638 bp, Homo sapiens
ttgtttccaggctggaatgcagtggcgcaatctcggatcatggcaacctccgcctcctgggttcaagcgattttcctgccccagtctcccaagtagctgggattacaggaaccggccagcactcctggctaatttttgtatttttagtagagagggggtttcaccatgttggccagtctggtctggaattcctgacctcaggtgatctgcccgcctcagtctcccaaagtgctggattacaggcgtgaaccaccgcacctggctggagccatgtttcttcattcacttagctgtcttccttaagttaatctgggagtctttaaggcaagaatcatgtactttacagtcatctttagcacagtagccaacactttgtaatactttgtaaatatttggaaaataaattagtgaagatttatgaagatcaagagtactttatctttacaattatagataaaaaacctcattccatgaagggtgtcttactttcctgaatttcatgttatgttcttcttcatgcatttttttattgcatgaatattgtttttctattacattccattccaagatttatcatgttcccatgttggaaattttttttatatgtctatctcctcaattcaactgagagattctct

SEQ ID NO: 244666 - DNA, 385 bp, Homo sapiens
gaatctgcagaagaaaagttggaaagtagctgaggttgactggcttatgtttaaggaaagaagccaactccataatgtaaaggtacaaggtgaggtagcaggtgctgttgtagaagctgcagcaagttatccagaagatctcctaagatcatcaaggaacgtggccacatgaaacaaccagtttttaatgtaggtgaaaaacagccttctattggaagaagatatcatctagaattttcatttctggagagaagtgaattcttagcttcagttcttcaaaggaaaggctgactgttggggctaatgtgtctggtgactgagttgaagccagtgctcatttattattccagtaatcctagggccttaaaaattatgctagatctat

SEQ ID NO: 244667 - DNA, 423 bp, Homo sapiens
ctcattatttatctcagtgaaaaaagtttgtttagattttttcatccttcgtgttttctctagtaaatagttatccagctaaattattcatcacatcatcagagtgcttcctggagaaaattcaaaaacatgttataacaccctcaagaaatgcatgtcaaagtctgaatgattactaaagcacaaaaatgaggcatatcaagcattttgcagtatgtgaaagcaaaataggccagtctgggaatgatctaatatcactgtcttcagataagggagatggtcactgccccaagtcttttctttttaaaataaaccagctaacacagaaactgccttttacatataagtgtagactccacagagtaagtagttacatgcgaaaactgcaaggacacagagagactaacctcaaaaatttattat

SEQ ID NO: 244668 - DNA, 101 bp, Homo sapiens
cagatgcccgaatggcggtcctgaaggtggggatgctgcaggtaaaaacctcgagacctccaatgcccttgcagggtccccagagcatcttgctggtgaac

SEQ ID NO: 244669 - DNA, 397 bp, Homo sapiens
ttatcaattttaattaaatcagttgattataattgataaatgtataacatttgatacatttaataattagctcaaatagataaatttaattataactgtcctttatgttgacttacactaacaaaagttgaatttctagaacagccttgatacaatgtaaatataatacttaaattagagtagattgaccctgtgttaagtcaaagataaaactatttgcccttagtgggcccagaggattctcccaaaagaaaatggagaacataagatgttcatggatcaaatatctcaatactgttttgtagtttttgtgtcaattctgcccaatcaatctacacatttattttggactaatgtaaatgttgattgaaaaatttacatcaaatgcaaaagggtc

SEQ ID NO: 244670 - DNA, 445 bp, Homo sapiens
gagagaagaccaaggaacacagagtgggcagacgtgactaaattacatcatgaccttagcatctgcagacatcctggagagaacactggatttccccctgaatgaggacggagtttgtgtcaattctatggaatttaagaggaaagagttgacatttagattaaattaatacaagatatacaattcttaaagaatcaagtacatattggtgtctgtcattttattggtaatttgaaagccatttttactctaacgaaggataaatattatgaaagagaaaaactctattttgatgtaagtacatgatgtagtttggctgtgtccctatccaaatctcatcttaaattgtaactccccaaattcccacacattgtgggagggaccagtgggaagtaattgaatcaaggggcgggtctttcccgtcctgttctcatgatagtgaata

SEQ ID NO: 244671 - DNA, 300 bp, Homo sapiens
agatcgacattaaaaccaacatcataacatgattttatacttagaaaaccacaaagaatctacacagtatgaaaatttatatgtgaagcaattaaggtgctagttaatacaacgtcaatgtacaaaatcaattgtatttctatatgctagcaacaaaaaagacaaaccaatttttaaaatgggtcaaaactcgaataaacattgctccaaagaaggtatacaaatggccaaaaagcacatgaaaagatgtttaacatcatgattcaataggaaaataaaaatcaaaaccacaatgaaata

SEQ ID NO: 244672 - DNA, 594 bp, Homo sapiens
aagaacatcactggaatgcatcacagaaatactaaacttgacacaaataatttccaaaattgaactctcaaattttcaccctgtattcatcaggttctagttaggaaaaaagaaaccactctaagcattaaaacagatacaaattaacagagaaatgtggttacatggcaatagaagatccaagactccaaacagggaatgggaaggaacaccaaaatgaacaacagcagtgatggggctcagagcacactaccccaaaatataccacctcgacatagtgagtattttaaatggaagagatctgaaaaatagcagaagcaggaaggtctctctgaccttgtccctcttgtctcccctgaaacaagtcataaaacctagaagaaaatttctgaccttcccctgaagcaggttgtaagaccctcatctgagacatgccctccctatacccagaggaaaggaacatccttatctctgaagacgaggggacacagaagaatctggcaaaatcaggtcctactatgtttcccccagtttactaccattagatcacactcttttaccctaccatatttctccatggctctccactcttct

SEQ ID NO: 244673 - DNA, 339 bp, Homo sapiens
  misc_feature (1)..(1): n is a, c, g, or t
  misc_feature (8)..(8): n is a, c, g, or t
  misc_feature (26)..(26): n is a, c, g, or t
ncatggtncccctgggatcaggaatnggacgagatttatgatactctttctgatgaacatcatctagttgctgttcaatgcacggattttcatgttggagttgacatattctctcttctacacagctccactttccagtggaattattctctttagcttctgcattttcatacatctctttcatttcctttatttgctgctgtgtttggcttaggttgttatgtacagtttctaaagccaataacttttttctgagagtatctcttgtcttacggaacttatcttttaaggtattgaatttaatttgtggtttagaaagttgttcagtaagaaactcat

SEQ ID NO: 244674 - DNA, 356 bp, Homo sapiens
ggagcctgaagctcctgccctgttcctctctctccagctgcctctctctggggttggctcctctcatctcctgtccacatgcctgtcccattgctctttctacactcaagccttttccctcattcacactcgctgcacatcactgtggcccaccccacctagccttgttctgacctggctgcctggagctgggctccttcatgctaagttcccatccttgcttcacctggttgtacccccgggttagtgagggctgcatggcgcgtgtgtaacatatgtaactaacctgcacattgtgcacatgtactgtaaaacttaaaggataataataataataataaatacatacggcaaaa

SEQ ID NO: 244675 - DNA, 454 bp, Homo sapiens
cactgtttctctccatggattctgaggcccacctgggtattgtgaattctttctctggccacatctgccccctgcattgtgaaccagtgttcttagctctgacgttccagaagatcccctcaaacatcacctccctggcttggcttccctgggatttgtgaggctggagagaagaaaaaggcataagcctgagaggctccaagttggaccctaccccctgccaagcctcattttccacatcttcagaggagagcgtagatttgggcactggagcctcagtatggggtgactgtcagaagccaagagggtgccggacgcagtggctcatacttgtaatcccggcattttgggtggctgacatgggaggattgcttgaggccaggagttcaagaccagactgggcaacataaaaagaccccccatctctacaaaaaatacaaaacattagccaaat

SEQ ID NO: 244676 - DNA, 410 bp, Homo sapiens
cagaaaacttccggtgcaaaagtttcatttagctaagaaatgctacagaagtagtccctttctttcacagaatgctggcacatccatttcaggccaagatcgagaaatcacaaaatgtactgaggaagtcgatctttgttttcaggatatctgattactttgagtttaatttgggatctgtaaaaatgtcttcatttatgagaattgcctggcttgtattgatgattgctttcataaccaaatcaggtgatcttcttacaaagtaaggggaaggccaggtgtggtggctggctcatgcctgtaatcccagcacttggggaagctgaggcaggtggatgatctgagatcaggagttcaagaccagcctggccaacatggcgaaaccccatctctactaaaaacaaaaaata

SEQ ID NO: 244677 - DNA, 207 bp, Homo sapiens
agtgaatgagttctcacaagatctggttgtttgaaagtacgtagcacttccccctttgctctctttctctcctgctgccatgtgaagatgtgcttgctttcccttgcccttctaccactctccaccaatttcctgaggcctcccagccatgccttctgtacactctgtggaactgttagtcaattaaacctcttttctttataaatt

SEQ ID NO: 244678 - DNA, 168 bp, Homo sapiens
atgagcactggctgcaaacacttccgattgtcctaataagggggctgcccttggattcagtggggagggctcagggatactgctcagcaccactgcaggacaataacacagccctcaatgtcaacagtgaccacgctgaaaaagccagccctgcaggaacctcaagtc

SEQ ID NO: 244679 - DNA, 657 bp, Homo sapiens
caggaaggaagaatcatgatgccacagtaaagggagggaagggaaggaaggggaacagaaagcagaggccaacaaatagtgttccttgctcaaactaaacagttctatactttcatttagagttaactactaataattaaaaagaaaaaagcagagaacaaatgagtttgaatacacagccttcccctggtctttggcacagcagggttaagcattcctaaagatcatatagtctaaaatggaatatcacaaagacctctaccacaatacattgaaattgattaagtgaaaggaaagaaggctgctcaatggatgtttccttatgggctatgtagctttgatcaagaggggcagagattccatatctacccaacagcagaatgcaggtaagctcaatgtccaagtgttgtgatcaggcttgggccaggatttattcaaagtctctccaaaatactccacttggagactactcaaaacaaaggatccttctattaaacaaggaaggggtatgaggagtgaaagtgcgaggtggtgagggagatcagaaacttaagctgctgcacactgcggctcacacctgtattcccagcactttgggaggcagaggcgggaggaaccctttagcctaggagttgcaaacccaaacaaacaacacag

SEQ ID NO: 244680 - DNA, 431 bp, Homo sapiens
gaaaaattatttttcagttgcacataccaatttatgccaaaatatattaaagggaattaagtaacacatgacttaatgtttgtgtagacaactaaataaaataaaatcatagaagtgatgctgtaagaaatattgggacttaaagaagtttggaggttttgcaatgatgttgaaatgtatagaacccatagtattttactaagaagattatctggattttattttatttttttgagagacaacaaaaactgttctatgatgttggcttctatttaagtcataaaacttctattgaaagcctaggactctgttctacatgttgggaccaccaagatgagtgagatttgaagcctgtcctctgggaattctgtgttataaatttcattatgacagtttgtagttactcaataaatttttcttgcattttcacc

SEQ ID NO: 244681 - DNA, 296 bp, Homo sapiens
ctatcccctcatcttgatgtcactagaactggccatagctttggttccatctgccctcagttcacaggctatgtcagaagagctccaactcttctcttatccctggccattcctcaaatcaaggcagggtggcaaattcctcacccacacttactcactgagtgctgtcaaatatgaggggtaagaatccaatcaaaaatggtctaaagattttaatagacgtttctcaaaatatgatatataaatggctaataggcacataaaaatgtgctcaacatcatcaatcatagaaatgc

SEQ ID NO: 244682 - DNA, 487 bp, Homo sapiens
cagttaagttttaacagtacctacgtttttgagatcctttgactgtaatgtaagggttctgtgtggagcaaagagcagttaagcaacatgaggaagaatcacaactggacaacctaaaggtaagttgcctagaatcacagcagtgcttaaagtagtgaatggcttcgtcagctctgaggggcagcaagcctgtttctgtccttctctgagctaagaaaattgtgctagtggcctggaatggcttgaggctggtaattgtggagaaatacctgctcttaacaaaagtgctctctctttctggcacacctttctagtacctctctgcaaattagtattggtctgtctgtatgctcttttaattataaacagaaacagttgaactcttaaacaggctgatcagtagaaccactggctagaattaacagccaaagggagtaagcaagtgttggatatcccagctaggattttagctgcgaaaaggaaaaaa

SEQ ID NO: 244683 - DNA, 414 bp, Homo sapiens
cttagtaacaatttggacaagacagcaaatgctattgtccaagttttctaaagaagaatctgaaatgaaatgacatcaagagacctatcaagacctgtatccaggaaaaggtttatatgtggaagagacttgccctgtctcaggaattagagaaagaacaaatcagtgtgaaggagaattgtcagtaaaattacaagaaaagattgagatcataattgacctttgaggataataaaatttaaagaccaaaaggatggacttcacagaaacatgaccttaggttgtttttgcagttgtagtaactggttatatgaccaacaaaatatgaagaatgggtacaaattctgatagtaatgatcagtcactttgcaaatataaagttactatttactactgtattgtacaggttcaata

SEQ ID NO: 244684 - DNA, 479 bp, Homo sapiens
acatgctttcctctggaggacaggttaaatcagcagccactgttaggtgcctggccatgttcctaccggtgggaaggactggagctggggttcaaatccagagccctcctttttcctttgctccactttagagaaatcgtggaggaggatggcatgggggaatggcgagtgtggagaagagcaaggggagcagaaagaccagtgaggaggtggaggcgggagccaaggatacgagagcagggaactggctagagaaatgtttagaggtggagccccagggacaggacgtggattagatacagcagagggaggaggagctggctgagagggcagtgatgccatgcctgaagtgaggaacgcagaaggaacaggttggagtaagacaacgagcttgggttgggacctgttgcatcacagggacatcaaggtgacaattgactcaggacggagatgtaggttggagagaggaatttgggaac

SEQ ID NO: 244685 - DNA, 372 bp, Homo sapiens
tgggagaagaggaaaagttgaccagagaagggtaagaaagtttgcatagtggagatgggtagaggagcaccatcaagtatctccagcttcagccagtgatgccttggcctttagctgctctttaaagcatagggcaaaggttgcagatacttcctaccattaactagtgtgtgaccttggacaagtgttttaacatttctctgcttcattttcctcactaagattgtccccacttatggagttaatgatccctactgtacctccctcacaggattgtagtggggctagaatgaagaaatcgatgtgaaagtgttttgatagtaaaagctctttatgatgacaggtgattgctctttgcaaccatgagtgttt

SEQ ID NO: 244686 - DNA, 1011 bp, Homo sapiens
cgaactcctgacttcaggtgatccgcctgtctcagcctcccaaattgttgacattacaggcgtgagccactgcgcctggccctgttttatttatttactttgtgattcattttcccttttgtgtgtgctgaatttttagtaataaagctgccaaagtctccaggtctttgatagtatgtaaatgaaagactatggaattttataaaacatcttttaaaatcaccctcaacaaataaaagaatccctgtgaactaatgaactaagccccaaagctgatgaattgttattggacaataaactgaaaataataaattgcctctttatgagctctggtagcattagcattacaaggcacgtttgttgaaatagtttttgttgtggttgcccaagaaatgaaaataaaagcagttgttcttgatttctccgttaatcttggaagatgcttactctgggtgtattgaatcttctcaggtttgtgttactgagaagtatttagttctcaggtgtgtgttatggcattttcttttaagtctccttatgatggtttcaattaaatgtcactgaaatatcttgaagcacacatgagtgttttagtaaacccaaactcaaggggtgctctgtgaataaaaagttccttctactctcccccttgtgagagtttaattgaactcagcaaaggattgatgaattcacttgtgagttggacattacctgaaacatgagtctagaatagagtaacactaaatttgtaaagcagcaaggtaaaaactgttataaaatacaattgcaatggaagatgagaagaattgctaagaaatgtagcctcgtatgtctattttcccctgtaatatgtattgatatagggctctggtaatcaaaataaaataatatttctagtagacttgaattggagggaggaaattttatttcaggtattgcaaagaacatctcttgaaaattttaggataaaaggtgttacattgatatgctgtggatttctcctagagaaaa

SEQ ID NO: 244687 - DNA, 349 bp, Homo sapiens
aacctgcacatgaatgtttataccagctttattcataattcataactgccaaaagttggaagcaaccaagatgtccctcaataaatgaatggataaactgtggcacatccataccatagattattattcagcaataaaaagaaatgagctatcaaaccacgcaaaggcatggaagagccttaattgaatgttactatgtgaaagaaggcaatctggagaggctacatactgtatgattccaactatgtgacattctgattaaaactatagagacagtggttgccagggactcaggggaggaagtgtgaataggttcagcacaggggatttttaggggagtgaaattatt

SEQ ID NO: 244688 - DNA, 2111 bp, Homo sapiens
  misc_feature (29)..(29): n is a, c, g, or t
  misc_feature (805)..(805): n is a, c, g, or t
  misc_feature (1005)..(1005): n is a, c, g, or t
  misc_feature (1512)..(1512): n is a, c, g, or t
tgtaccaagaaaccttgccacccagtganacagacctacacggtgacaaaaattcagccaagagacaaataattcaaaagtaatatatattttaaggacaaagacacaaaagacatcagtcatctttctttaaaattgagaacagaaaactattgaatacaataagactgggaatgaacaactactcaaaatacagagcaaaaatgtaaatggtagaattctgtagtatagccttgttaaagaagagagaaagaagggtagaaaaacaatgacagaaaacaatgagaaagagatatatctagtgaacaatagaaatggacaagctgatgcacatccaaaaataggcacagaaagaaaatataaaaagagagaaacactcacacaaagatacagcaaggaaaagacactgaatgaatttcatgaaatctaatcccatcttttggcttctctgatgttatcattaaaaaataaaattagtgctttgtgttttgtgacttcaggcattatggggtacagtattggtggtgcattctttgctagaagaataaatggaatcaagaagggacccctgatcctggaaagacactcaggcccttatctgtagtcagggtatgctagaatgtcctcaggaattcttcatgctgtctggaactaggagagggtgagcccaaactgcccaagaacctcctccctcatcgccaaaatatactcaagccaataaatttagactgaaaaatttagcagcttgaaaaataagagtatttattgcaaaatgctgcaaaaaatccacagaacttgtctagantttgaacttgtcaagctctctttttattgagagcagatcagtgaaatcattaggcagatttagtcatgcaattgcctaagagattctgagatacagacaaacaagactcgaggcacaaatcttcactctaccaataagtagatgaacagagaaaagatcacagcctaagctgcagaggtaatggctgaaaagtaaaggantagcatcccgatgacggttcctattcagaagagccaaaacggaaattcaggctaatgcaaaatgcaaaacattattggaaaggagccctgaaaagtgtttcagagtacattttgatcctgttgaggtgagctcagagcaagaagctgactccccaaagcctagaggagctgtgtgagaaacagcagccaaagagaagcaaaatcaaacagaattgaggatgactcttcaaggagaaatgatctaaaagaaggggagcatcagggggatggcagactcatggggagagggacaggtacatccccataactgtctggggtgacataaggtggacaacctttcaatttgtacaagtacctacaaagagtctttaaattgttcatattcttaggtccaacaagtctgtatttaatgttttatcctaaggaaataaataatataggcaaaacatacctatacaataaggctagataaatcatggcacatccatatacaagagttcatgctgngcacagtggctcatgcctgtaattctagcactttggcaggctaaggtgggaggattgcttgaacttaggagtttgaggttacagtgagctatgattgtgccacagcactccagcctgggtgacacagcaagaccctgtctctaaagaagaaagagaaggaggaagaagaagaggaggaggaggagaagagttactatgcgatcattaagaatattgtaaaatatttcaaagagtgtatgagcaggtatatgggcactccttgttaaagatggcaagctgaatacatatatttacctctgcctgctaggaaaaccctacaaagttacattaacaggatcacaaagggaaaagctcctaaggcttaaagaacaagagtgcagacagcagcatattagatatgtcaacaaaattttagaagcttgaaagcaatcagatgagcattcaccaacttgacacaccaaaagatgactgctgaggcatggtggcacaagcctgtagtcccagctactcaagaggctgatgtgggaaaatcacttgagcctaggagttcaagtccagcccgagcaacacagtgagacccctgactctttccaaaaaaa

SEQ ID NO: 244689 - DNA, 473 bp, Homo sapiens
tagagaatatataaactttgaactcccttaaatgatgttaaagtactgaaatatgaataataaaactctagcttaaccccaagggcatttttatttatgtgttccaatttccttttcctgattttctgacaatgttggaagcattctaccttctcgtatatcacgatttttggtaaaatcgggagaaattcacagatgaacacctctggaagtacttgaagcatggaataaaatttgggttctaagaccctagaattccagatgaccagtgcagtggctttgctctgccaccctgctagcctcctcctttaattgtctgaagcctggccatggcagaacaaaacctataaccaagaccatgttgattctgtgattctggaaaagaggtctcagcactggtcaccagcagcgggggaagagaaagggtggctgtgttgtcttcaagagggacaaggaaagagcaaaaagacaaa

SEQ ID NO: 244690 - DNA, 394 bp, Homo sapiens
attaaatattttactgttttattacttatctagtcacattacatattactcttttggaagattttgggtaaaatatagtaaaaattttgtatatattcatcatagagatatggaaatagtgggactggatgtgtggataaagacagtgacactgttctgctgcaaatagagaggggatacctgcatgagtttttagtcaatggcagcaggtgcattccagagcactggagacaagtgaaatcactctggtcacattcctgttgaggactttgtaattgaagtataaactttgaacagtggcaaaactgagaagacttgcaattcctgttacatcccataacacaacatgtcaactgttccagaacagagggcataagatagaacagtagtccag

SEQ ID NO: 244691 - DNA, 464 bp, Homo sapiens
caaaactgaagaaaaaaagcacagaattgtttcaacagatgtctctcattttcagctagcatttctctcccaagttgagctggtttaatgtgttttggatttccctcctcaattggcttattttttagatcacctgcaattcatttgcaaattgcaataaaacacattttagaaaaaaggaaccttcaattattagctttgtttctttttaaatgtatatattttgactaatgtttgtgaatgaagttggctaacatgtatttagtttcattttggctttatgtaatataaagtttttaaaattttaaatatggttttaacctttatgtgtaaatgattttctagtgtgaccttctaatttaatattagacgtctaaggtatatctgtaaattagaatccgactatcactctgttcattttttttgaacaaagagtttaaataaagcctgaaccagggaaaaga

SEQ ID NO: 244692 - DNA, 405 bp, Homo sapiens
aaaaaaacccccccgggtggggaagagggcaccgagaaaacccccctttaattatgatttaaaacgggggggcgtaaaggggttttgccaccgtttggttatatttaagaagttgacttctctaatttccttgtcatgtttatttttaaatatctttctctttaaaagttgggatactataataaatattcagcaagtattttgtgtttaaatataaaatcttgttatttggattttaatactttatatatagtatttatatatataaacataaacaaaactaaagactctatgaaagaatcaaatggattttctataactgaaaatttcaatgactaaaattaagatattaccagataggtttaacagcaaattccataaagttggtaagaaaacaagaatact

SEQ ID NO: 244693 - DNA, 729 bp, Homo sapiens
ttatgtgggtatcacagagaagaggaggctctaaatgtggttctatttttttctgacgactattttccaatcataaacacatttacatcttcattatatttaactagcttagctagctttagaaatacattagctagtcttagaaatacattctaatgctaaactaagcaataccaggataacaaaactgcatccaaaaggggggggaagggcaaaattgtttttatgaaaaattctaagttattgaggtgcttaaaagcaaaaatatacaggaacatcaccaccgccaaaataattttccataactggagcaaatgccatcttccccagctgtgttattttgcagagaaaggccaataaaaatgaatggtcctcaaaaaggagaaacagatttcccttcatgctctttccacctgcacttctgacttttcagatgttaaaataagggtcaaatttctgtcaaaatgcaagactgcgtgattatagattaaaagggttggtgaatcattgacatgaagtttcagaagtaatgcagtcctgctttggagccctatccagtggtgtctgagacctatgcacaatggctttatggagtggggagcggggctgcaggtgagctgcagggcttagaaacacacacacagtccttcatggaagacgaggttagggggttactaaacctcctctgaaagcagcttgcctggaggctagagcatgatttattacaga

SEQ ID NO: 244694 - DNA, 324 bp, Homo sapiens
cccagaaggggaggccccgcccactgggccgggagggacgcgggaccacatccaattgactttgggaccacgcccacccagccacggaggagggtgggatcacgcccacctggccatccgagggctgaccctgcgctgtcaccggccactgcccagtttcgcaggacgaaagagcaggcaagtgagaaaatggagggcgggtcctgaaaagccgagaatcaggcctccctttaaagaaagccacgtagaaacccacctgtgctactcaaagctgctcggatgttcccagccctgggattttgccccgtcagccctccatgggga

SEQ ID NO: 244695 - DNA, 344 bp, Homo sapiens
gatttgggtctaccccactaattcatctaaaaggtttgacaaatttctcttgctacatatttcaggtaactgtatttagtggcttatttaaatatagtttccctttgctgacaggttaattaaacgtggtgggttagttggtggatgagaccaaattaaacatggtggattagctgaaaagtttagcactgaccctatacatacctatcaatgctataaaaatcattatggcataataaagtaagtccaaaaaaaacgcctcaagctgccctacagtgtcttcactcccgtaggccagatgttctccaaggatttacccttggggaccctgagattcattcagg

SEQ ID NO: 244696 - DNA, 439 bp, Homo sapiens
gcaaacaattattttattacatgaaagccagtaccaagaaaagattaattcagtccagatgtaaaaatgtatgtgaattttagatttggatgatctcaacaagttttcccttttgtggatgggactgcctggatcccagatggcattcacaaattatcccttaggtagttttctgagttgagaatgagatttcttgggctttccctaaaatcattttaatattaagtcttctaaaggatagaaagttttttgcatttgtacatttttgcatttttctgttcattaatacaaacctcataaatgccctagtttggtagatgaagcatatttctttcataagtgggaaaacaggaggtattcagtttgtgtatccttatgggtaaagcatagaaattttggctctcatttttgcaatttcaactttcttcttttaaagtaa

SEQ ID NO: 244697 - DNA, 328 bp, Homo sapiens
catttataagcacacaaaaaaattgaaatcaaaatgtaaatgatcaactgcaaaacattttacaaatcatattgcaaagaattcattgccttattattacaaaagcatccactagtcaatgaacaactaaaaaataaactaaaacaaacaactaagtggcaaatgggcaaaaattaaaaagtttcactaaaagtaaatttaagtggcttaatcacactgataatacaagataagcaaaataaatattcaaaaccacgtggctttgttaaaaggccacaaagactattgggaggaagcccccagatgtcaaatgtgaaactatttgaac

SEQ ID NO: 244698 - DNA, 599 bp, Homo sapiens
gaccttctttgccatgttaacatgaatgttgctattctgtgtacacacctgggaaccactgaaaactgcaaacctcaagagcgaaagtgatcagatggcattttagatagaatgctttgaaaagactgtgaaagatggagctgaggggaaaacctggagaaaacggaaagcccttagaatttagtagtggtggccaggcgcggtggctcactcctataatcccagcactttgggaggccgttgcggatggatcacttgaggtcaggaattcgagaccagcctggccaacatggtgaaaccctgtctctactaaaaatacagaaattagccaggtgtggtgaagagggcctgtaatcccagctactcagaaggctgaggcaggagaatcgcttgaactcggggcggaggctgcaatgagccaagatccatgccactgcactccagcctgtgtgccagagtgagactctgaaaaaaaataaataagagggtaagatttattaatttgatatgcctggtacaaaatatggagaaatctatgattatatccagacttccagtttggaactgaatgaatgataattccattaactaaaatatga

SEQ ID NO: 244699 - DNA, 502 bp, Homo sapiens
catggctttgcatgttgggaatatttccattttatagacgaggaaatcgaggttcatataaagttatttgcccaaggtcacttcctaaggaagtggtggttttggacttcacctctgtcctcaagaccacattgcttcccttggggaaatcagctcttcccataccatgcattcctagccccacagaaatccactagtctgggctttctctgcgattggctgaggcagcaactggtgaggcacctgggctgtgcaggagcccttggggatcagatggtggatgtggcctgcccaaggtgcatacagtcccttccttagtgtgggtacgggaaggctgtagataggccagaggtcatctcctgcaggaagaggtacaatcagccaggcatggtggctcctagctatagtcccagttactcaggagactgatgcaggaggatcacttgagcccaggagtttaagaccagcctgggtaatgtagcaagaccctgtctctttagga

SEQ ID NO: 244700 - DNA, 454 bp, Homo sapiens
acttaatgccactgaattgtacacttgagaatggttaaaataggaaagtttatgttatgtatattttaccacagtaaaaaatataaagaaaatgaaatagggtaatgtgatggagaatgactggtgcatgtgattttggtgagcaatgtcaagaaagcctctgaggtgacatcttaactgagtttcacttactacagctgtataacaaattatcccaaaacatagtggcttaaaacaatcagttattatggtcatgcatttgtgggtcaggaatttggacagggcacagagggcatagtttgtctctgtcccatgatgtctgtctggtgctcagttggaagacttgaaggctggggttgaagtcatctataggctcactcaattacatatctggcagttgacactggctatctgctgagtccctagttttgccataggccaaaagattcacagg

SEQ ID NO: 244701 - DNA, 484 bp, Homo sapiens
gctggggtatgcaggaagagaccagggtagctaaacaaagcctggcctggcaaggattgaaagaaacacttgcaatgctgtcatcttccttttctcatctgtctgtttctgttccttcccttttgcaccaagtctttccctattgtttccccctttataccctgaaagccaaaatgcacaccatggagctccccccggcggggatcttccttctgctgtggtctctcccatatcatgctccagattccatttgtcatccacacccctacccacctgtcctttcaacattttccaaaaagacctccacctttgggcatgcgcagagagagggctgctgcccacacatgccagtttcttagtatgcccaagggtacatgggcctggtgtctccctttcttcttcactaccaagtgcaggcatgggtccccccacatgcctcctcccagtgcagaggactctgattttgtttgttttgtttcgagac

SEQ ID NO: 244702 - DNA, 664 bp, Homo sapiens
ggatttaagaggttttttactccaacagtcagggcaagggaaagagaaaaccgtgcttctcttggaatctcttccaacaagggggtttcctccagtcccctccagatgcgttgaccgcgctgggaaaccgagtccagggccaggatttgtttttccaaagccgcgcgaccccagcagggcttcagatccgagttcccagttgctcttcagtctcccccgcgttcttccaaacgctatcaggagccacgcaggttaccgcaccaccggtcatttccctgtttcttctaaaagttctccagccaaatttcagcaatttatttaaaaaggcaccaggtcaccgcgaccttcgggcggctcctcaggcctcatggggtagtttggtcaggatctgcgcgcccctcgacgtgatcagaaccgtgtgctcgaactgcgccgacctttgattggttatggagaccaccattcattgcttcctcaagactttaaattcaagggaatcctccgtgaaaaatggctctattagtgatagccatgcccccctccatgggaggaaccattgccgttgcattaatgccaaattttgggtggccctgaaaggagaatctatttcatgtccccaccaatgtggacaggattgaaagccactttttgtagagtatttggg

SEQ ID NO: 244703 - DNA, 439 bp, Homo sapiens
caggtgatattactcttctgcctgggttctgcataaaaagaaaattatggcatattgcacattgttgaacccagtatttttaaaatttgactccctgcctgtgctggagtcaaatattttgatgtctcttgtgcccattaggtaggtgctttggctctcatgtatgacatatacttaggtccacttcacaggcattatgacgaactttatattgggattcacccaataaaagatattttgcctttcatcattaggcttagtgcaataggttaaatcctgggttgcatatttgtaccaagctcatagaatctttcaacaataacttgcattgtataaactctttgttggtagagagttgcataacagggcccagcaaaaagttcagattatgactctcgcttacacaaccagttgaaaataaaagttgtcaccattccac

SEQ ID NO: 244704 - DNA, 265 bp, Homo sapiens
ctgtaacacacgtgtgacgaaattggcctgtgaggacaaggcagtgagcagagaggacagcagtccttatgagatcaagctctaaggtatcctagacacatttggagaattcacctgagctacaggatgtgaaaagttgctaaaactgctgtgagattctggctaagaaagtttcatgagaagttttacagaaaaatgtgaacggaagacagaactagatataaatttgaatggtaatctaaataaaagacatttttcattttaa

SEQ ID NO: 244705 - DNA, 488 bp, Homo sapiens
ccatctggatgtatacctgcaggtcacaggggatatgatggcttagcttgggctcagaggctggacaggtttattcaaaattatgagggattcatttaatatctgaattgttcaagataatgattggtgtgacaatgagtgaccaaatttctcaaagtaagatgaattttcctgcaaggatgaaagcttggaatatggcttctgaccaaatactgtgtctagaattggtgggttcttggtctccctgacttaaagaatgaagccgcagaccctcacagtattacagttcttaaagatggtgtgtcccgagtctgttccttcagatgttcagatgtatccacagtttcttctttctggtgggttcgtggtcttgctgacttcaggagtgaagctgcagaccttcgtgtttcacttgttgatgcccctcacagcaactgccacattgtaaatatggaatctgatgtatgtttgacttcagtcaaaaatgt

SEQ ID NO: 244706 - DNA, 442 bp, Homo sapiens
tgaatttgcaattccaacaagtttcttggtgattgtgatgctgctgctccaaggataacattttcagaaacatttctgtctaaaacattactgaacctagagttagtagatctccaatcatctatggatagatttcagggagagtataaaaaagaaaaagatggtttaaacaattgcatttatattttactaaactactatgaatgtaggcaacaaaccacagaaatattagttgtacctgactttgtcccaatataaataagacatattttcatatcatcctacaatggtttcagatatcttgaaatatggtttatgcacatcaccactctgacataatattggctatttatctgtcattagatttgattatgagttattataaaggccatttcttattatgtctcaataaaacatgttagtaacttattttaatataaaa

SEQ ID NO: 244707 - DNA, 439 bp, Homo sapiens
tctctgtttccatggttgagttttacatgttattgaaggtcaccacacagagtatcctacgtgtacaatccctatacctggcttttttccacatgtgtttcagatctcagcagggtagtgagttttaactcccaagcaattgcttcattaatgaatggatccatcagccacagtatataaaggtcctagtagattgcaaggcaccaagttggtgccaaacacaaggccgattttcatacactgcaatcagctagagggtaggcaggtggtgtgggagtggctggaggcctgatgccattcgagtattgaaaaactatcaggccaggcgcggtggctcacgcctgtaatcccagcactttgggaggcagaggcgggcagatgacctgaggtcaggagttcgagaccaacctggccaacatgatgaaactccgtctctact

SEQ ID NO: 244708 - DNA, 469 bp, Homo sapiens
taaatattaaatcctctctcagttcttttaaactgtggttagaatggttatcttataactgcacatatctttgtataaaaaagatacaaatatctcttaaatattatagaactggttgaaaatattttcttttttttttcttcttttcttttcttttttttttttttttgagatggagtctccctctgtcgcccaggatggagtgcagtggcgtggtctcggctcactgcaaccctgcaacctccgcccttccgagttcaagcaattctctgcctcagcctcccaagtagctgggattataggcacccatcaccactccctgctaatttttttgtatttttagtagaggcagggttttgccatctttgccaggctggtcttgaactcctgacctcgtgatccgcccatctcggcctcccaaactgttgggattgcaggcgtgagccaccgcacctagccaatactttca

SEQ ID NO: 244709 - DNA, 217 bp, Homo sapiens
aaaatacttagaaaaataaaaaataatacaacaataaaaatgacacaaattaaaaaatacatcataacaacaatttaaacagcatttacattgtattaggcatcgtaagtaatctgggggatttaaagtactatacaatacccgtttttcattctcatttaccatcttaagagtgacaaaattcatcagattacttttagttaatagcagctatttc

SEQ ID NO: 244710 - DNA, 518 bp, Homo sapiens
taccttcttcttcatgcctgagttctgtcttcccagtagcttcctagcctagtgaaatgggacagagtcaaaggaatcagtgagtctataacaaatgttatacatgcaggttaaaatgacttcttttgcagaggaatattttctttcaaccaacttgatctgtctacgtctgatggcctggaatccttcaggaaagtgtggtcagctggattttgtcagaacgtggatttctacgggccttctggcctctcatgtttgatgaagggaacagaagaaaatggtttcacttcttcagtgtatatttatttattcatggatacctttttcagtttttatcctgtgtttctttttttctttctttctttctttttttttttttttttgagacagagttttgctcttgtcacccaggctggagtgcagtggcacaatctctactcactgcaacgtccgcctcctggtctcaagcgattctccttcctcagcctcccaagtagctggtattacaggtgcccacc

SEQ ID NO: 244711 - DNA, 306 bp, Homo sapiens
gacccaagcaccaggccagccccaacagacccaggctctaggcctaccacagcatcaggcccatccccaggaacccaggctctaggctcacctcaacctcagactgactactgcaagcctaggttccatgccagcccttgtaccagattccaggcccaccctagcatcataacaacccacctggccaaaggctccaggcaaacccttgcagacccacacactaggtctaatcaagtgccaggccagcccccatagattcagcttctaagctaacccctacatacccaggctccaggcctactccag

SEQ ID NO: 244712 - DNA, 728 bp, Homo sapiens
acatgccctcaggcaaagaataattagccagttcttgaattatttctgctgtagttcaaagctttttttttggattactgcttttaataaatacactattttgcaaattataacaatcttgtgaaagtccaaacaccagtgactaccactggcctctaattgatgaattatatttcattagctaagcaaatagttcttttgttaagggttaatgggataatttatgaggtcctaagaagtctgttgttgcctaaattaatagaatctctggattgagaagtaactttcagtagaatatagctaaaagaaaaaaaaaagaaattttctttggtatccaagaagatcaaaaaaattaaaactttttttaaaaaataaaaagaaattaatcccaaccttgtacccaagcagaacaaaggatagcaattttcaaaaagggaactaacaggccaggtgcggtgcctcacccctgtaatcttagcactttggaaggctgaggctggtggatcatctgaggtcaggagttcaagaccagcctggccaacatggtgaaaccccatctctactaaaaatacagaaaaaattagccaggcatggtggcaggtgcctgtaatcccagactcgggaggctgaagcaggagaatcacttgaacctgggaggtggaggttgcggtgagctgagattgcaccattgcactccatcctaggcaacaagagcaaaactccatctc

SEQ ID NO: 244713 - DNA, 399 bp, Homo sapiens
tgagtgacaacagagagatgagggaggttgttttgctgaccatgcctctccccaactctaactatacccaggcactatgcccagggattcaagagctacgtctggtgggttaattaagcttacgtctttgtgtactccctggagcaaggtcaggagtgggcatgatcagccacagttttcagatgggaacatggtagagttccgaaccgtctgccaccagctgcactgcccggcccagaaggcctgaaggcaccagcatccccatcaccactgccactccacctccgcatcagttatttgccaaatgggagacatcttcccttatctgtgctgtccccagctttctacaaaggcaaacaaattaaattctgtctcttccttcccaccatcaagaccaat

SEQ ID NO: 244714 - DNA, 415 bp, Homo sapiens
aatttttttctcttctgggtcccagaggactcttgtgttggctgccccttctatacctgttaggctcatttcccaggaggctggcttccgtctgtcctcaaagagctgacttctcagaggagaatagttgttacattcatttggcacttggcacagtcagcctcaggctgctggctataaaacaagggaggagcaccctttgggagtgagacagccctgactttcaattcgggctctgacatttactcactgagggaccttgagctagtcaatttccaaggctcagttgactcatctgtaaaaattggtttaataatagccgtattgcatgggctgagtaagattgtggaaatgaacctacatgtctggctgacaagggatgacaataaatggtagcagttcttagtcttggcaa

SEQ ID NO: 244715 - DNA, 365 bp, Homo sapiens
gaacaagcttgtggctgcaggcacagcacagctcaggtcactggatagatggtccctttggatcacgtgctcatccctggcccagtcagctgtgatcagaggagcaagaccgtgagataaggcttgaaacctaaggaatttcaaagagggggccatgatgggcattcagcggcatctcaggagggggcagagtaaccagcaggtgctttgcatgctggtctggtgtgtctggaaaaggcatcccgctaaaacgtttgtcaggaaacttctcatcagcatttccagcatgcaggagcaaccaagagagccacttagataccatttgattataatgtgtttctcagagaaataaatagcccaaatgg

SEQ ID NO: 244716 - DNA, 248 bp, Homo sapiens
atcctaccctggtcccccagggcccttctctcttgtccgtttcaaaggcccttttcgttgatgtcaacgccaaggccagaccgttaacatgcactccccatcaagataaggagtcccagttcaaagcctgtcctgactaactctttccgttaagtaaaaatattaatcttggttttatttaagcaggtttttttggcaagaaatgaatgcctgtggctaaaaataaacccaaagacacacactcagaa

SEQ ID NO: 244717 - DNA, 474 bp, Homo sapiens
tgtgcaccaccacacccggctaatttttgtatttttagtagagacggggtttcatcacattggccagactgctctacaactcctgagttcaagtgatccacccatctcagcctcccaaagtgccaggattacaggcgtgagccaccatgcccggccttaatttttaaattttaaatttaattttattttagattcagggagtacttggtgcatgtttgttacctgggtatattgcattctggtggagattgggcttctagcatagccattaccgaaatggtgaacatataattggtagtttaataggtctttttgagaaggtgaatttgagtggaaatactagtgttctagcagagaggagtaactcgtgagaattatcttagtatatttaagaaacagaaagaagaaaaaacaagaatttacagtatactcacagtgatatatacttgtgtgtctgtgtgtttcctattttta

SEQ ID NO: 244718 - DNA, 148 bp, Homo sapiens
cacaactatatctctagctatgacctcttcacttatctgctatattaatacaatcaattgcttatttgatatcttcatttagatgtccagtagacatccaaaacctaatatatccaaagctaatatatttattctctacacttttaca

SEQ ID NO: 244719 - DNA, 551 bp, Homo sapiens
tgggccccttattttcctgctaaaaagcccggccccccaaaaactcctttgtgacccagagggtgtagggcccccccgcccctcctcccgtgtcccccaaaggggggcttgttccccacgcccccctttttcccgcccaacgaaaaaaattcacccccccaaaaaggccggggtccaaacccttctcttcggagagggatttcccttttaaaaaaacccctgggggggggcccagggccccaccccgtgaacccccccctttaaaacccgagccagggggcccttgaggtcccggggtttaccccaccctagccccccgggtaaacccccctccccctaagggcccaaaattacccggtttggtggcccggcccctttatcccaccccttggaggctaccaaaagtttttcagtgcattttattttaacaaagttgatgctgggttaataattgtgaaatctatttcaaggataatcataaatacaaatgcttactctatgtcagatctcatgctataaactacaaatctacactataatccatttattcc

SEQ ID NO: 244720 - DNA, 375 bp, Homo sapiens
  misc_feature (10)..(10): n is a, c, g, or t
  misc_feature (39)..(39): n is a, c, g, or t
caaggagtcnttccttcatataccaggcaacacttcaangcattttcacatgcgtttcctctgcctagactgctctttcctcaggtatctccatgtttggctactccttcatgtaattgctcaaatgtcacttttcagtgaagccttccctatcaccgtatctaaaattgcagcctaccctttccatacacacaggctcacacatgaacacgcgtgcaggcatgcacacacacacaccccatatacctccttatctcccttccctgctctacttttttcattacatctaccatattctaccatgtgatatgatttatttactttctaaaatgtctctatccactgccctcctcccttaggtagtataaactccat

SEQ ID NO: 244721 - DNA, 290 bp, Homo sapiens
catgatggttcacggctgtaatcccaacacgttgggaagccgaggcgggaggatcgtttgagtccaagagttcaagaccagcctgggcaagagggtgagaccccccatctctgcaaaaaataaaatttttaaagttttttttttggtggtagacagttgtggtcacagctatacgggaagctgaagtgggagaattgcttgagctctggggttcaagactagtgagccatgattatgccactgaactccatcctgagtcaacagagcaacaccctgtctcaaaaaaaaaa

SEQ ID NO: 244722 - DNA, 418 bp, Homo sapiens
cccagcaagaagaatgaagaacagcaggagctctgcatcccacctttctcccaatgacaacattgtgtcccctgattcttgtttactgcccacggagggcctggagtgtctgggtaaggaggaggctgtgtaggacaaagaaaatgaaggtgagtgtgtgctgagaacaagctttccccactgagccggtttgtccaggctcagccacctgccctgcaagctagtgtgcgggaatgatggccagaaaggggcaaagccccttctgttctgtgagctaacatttatccctaaaactacccccctctctcttttattgctgtcagttaatctcaatgagccatttcctcccacctcggtgacattctacaagtccccttttctgataaaagtttgagttaattaaatgtgggaagtttgt

SEQ ID NO: 244723 - DNA, 384 bp, Homo sapiens
tctgagtcctctctgccactgtgagataagacattgagatgaggtgtctgaatcctagtctgggcggaggcagaaggaagggacccaagagatggtgaagacagagagaaaggcaggaccgggagcctggagcagaaggaaaaggacacccgggagccagcctaggagaggcagagccaaagattccagggtctccatgaatagaaggtgccatcttgaggctctgagaagggattggatgcttttaaagaagcatgggagtcgggcgtggtggctcacacctataatcccagcactttgggaggctgaagcaggcagatcatgaggtcaggagtttgagaccagctgaccaacacagtgaaaccccgtctctactaaaaatag

SEQ ID NO: 244724 - DNA, 465 bp, Homo sapiens
caccaggagtctggccgtgctcctagacaacaattatactggcaaaatctgcctaatgtaactatttttgcaactctggagtctactgtaagcttgcaaattccaggggaaggtataaggtaaaagcacaattaattttaattttagctcttaaaacggtagcagctacccatcccccagttcttggagaaacttgcatgcagcctatgggctccagggtgggcaaaaaggatgttgtcttccaaatattagagatctgcatccgatcactgattgctacttctgatcacagaggtgcacacaagaaggtgggcagactttgttgttgtacctccctgaattgttacaggctccttcccatctggctgaagtgacttccagaggattcaaagagccagcaccctttttgtttcctcccttcatttttccccttttgagaatgagagattagaaactaggatatcc

SEQ ID NO: 244725 - DNA, 250 bp, Homo sapiens
aaaggcttaagaatgagaatatcaaatgtagggagaccactttatggctattatattcaatcagtcaagaagccaggagaggctaaattaaattagggtggtacattggagacatgtgagaaatatcaaggaagaatagacataagcggtgataatggaggttacatacaaagcactttactaagagggcttttaggttctgtcttgagtgactgggttgatagtagtgtaattttccaagatagagtgt

SEQ ID NO: 244726 - DNA, 398 bp, Homo sapiens
gcttctgattcttggaaccaggctcggtgacctcacgcgagtgacttcatatccgggactttctgggaattctcagcagcactttttcgccgccacctccaaccaatcggactggctcttctgtcattcgggtcacctccgctgagatgccttccctgaccacccaagttgaaggaactgctaaccttttctcttggactttgttttttatttccttcacagtatttctcccctctaaaattatcttgtctgcttctacctatattgccttccctcttgaaacctaagttccataaactgaggcacaaattctgccttgttcatctctgttctcagcactctgaacagaacctggcatgaatgaggtgctcaataaaagttacttggatgaatcggca

SEQ ID NO: 244727 - DNA, 446 bp, Homo sapiens
tcctcggcggcacgcgtggccgcaggtgtgcagggcaccgggaggggcctcgccgagaagccgcttctctcctctgtgcacgccgccgccggcgcgcaccaccggcccagtcacctctccccactcttccccctaggccgccacctccaaccaatcggactggctcttctgtcattcgggtcacctccgctgagatgccttccctgaccacccaagttgaaggaactgctaaccttttctcttggactttgttttttatttccttcacagtatttctcccctctaaaattatcttgtctgcttctacctatattgccttccctcttgaaacctaagttccataaactgaggcacaaattctgccttgttcatctctgttctcagcactctgaacagaacctggcatgaatgaggtgctcaataaaagttacttggatgaatcggca

SEQ ID NO: 244728 - DNA, 376 bp, Homo sapiens
cagccctgcccttgatgtcccgcctccctccgagaccctgcaaccgtttgcctctgaggcctgttgcctgtcagcagcatggaggtctgcactactttagagacccaggagcagcagatcatccctgtcaggacagaatccctccttatttctctcaacggtgctcccctttctttcctctccctctgagaccccttgcatcatcatttcgtgaaggttaggctttacaaaactgggaatcactgttaccaccttcttttcctgctcagcaaaagtccctgaggtaaggaaattgtaagggtctggctacttgctcggaataagaagaaggagaaaatctgaaggaccaacaaaacaatcaaaatgtgaaaaatta

SEQ ID NO: 244729 - DNA, 495 bp, Homo sapiens
taaattttcgaaggcaaatgctccctcagatacagggggtccagccaatctttctgggctactgcctgtgatgtttattatgggcttaaaaaattctacatagtttatgaagtctgaaagcttctttccgtgaaacatagtaattaaatcatttcttttgtctgttcccttgtgtgtgatgatggtatcagaaatctcagtgttacttcttccttcctggcctgaattcttggacatctctattttattgagcttgtaagtttaccaatgcccagattcaaatacatctgtgtatatcactcacattccacaaaggagctctgtcatctggattataatgaagacaccacagtgagtaaggggactatggagtcctgccaggcccaaaatgtgacatgtcagactagagcaattttctgtggagtggtgacagttaaccatagggttggagtaaatatctcaagagtgtgcactattaaaaaacccccaatattt

SEQ ID NO: 244730 - DNA, 462 bp, Homo sapiens
  misc_feature (64)..(64): n is a, c, g, or t
  misc_feature (69)..(69): n is a, c, g, or t
ctgtacccctccatccttccatccctgcaccctccatccctgtacccctccatccctccatccntgcancctcatatcctgggactcacactccttccatccctgcaccctccatccctctatccatgcacccctccatccctgtacccttccatctgcctccttcattccccctggccatgtaatgggattcacagcttctggggattaggacatggacatcttgtggcgggggcataattctgtcgacgacaccaagaaacacttggatgttaaggattcaccgaacactgttcaggctccaggtgctgggagcagcagtgaacaaagccaacagacactgccaccctcaaggagttcacgttcatgggcgagggaacagatgagaaacccggcaatgaaagtaagtagcataattgacttgaaaagtgccggggagaaagagaagatggatggagaatg

SEQ ID NO: 244731 - DNA, 528 bp, Homo sapiens
gatccacttctgtgcctttccagcttctagaggctgcctgcgttccttggctcgtggccccttcctccaccttcaagccagcagcggaggcctgagtccttctcatgccatctctctgttctctctcctgcctcctcctccacactgaaggacccctgtgatcacactggcccccccaccggatgacccaggataatccatctccctgtttgaaggtcggctgattagcaaccttcattccatctgcctccttcattccccctggccatgtaatgggattcacagcttctggggattaggacatggacatcttgtggcgggggcataattctgtcgacgacaccaagaaacacttggatgttaaggattcaccgaacactgttcaggctccaggtgctgggagcagcagtgaacaaagccaacagacactgccaccctcaaggagttcacgttcatgggcgagggaacagatgagaaacccggcaatgaaagctccaccatctcttccactaaaggcaaccaccattc

SEQ ID NO: 244732 - DNA, 362 bp, Homo sapiens
tcacagtgaaacaaattgcggactggccttgtcctgagtggccttaggaagctgcagtggcctgcagtctcctggccagtctgtagaatttggcaaagatgaggcaccttatagccttacatgttcttatttttctttccttttctcttctttattttcttttttaaggatttgaattagtatatgtaaagtgcttaacgcaggagctggcagagaaagtggatactcagtaaataacagcaattgttaattgtaaaaagcatgccatttatctggtaaaatcccccattctaagcaccctgttaagtagttggtaattcctcacttgaaagaaattaaaaagaatttttgtcagtttttta

SEQ ID NO: 244733 - DNA, 525 bp, Homo sapiens
agcagagaactgggtcctcagcccaacggcccaaaaggaagtgaaacctgccaacagccaccggatgagtttggaagtatatcttgtcccagttgaaccttgtgttgactgtagcccaactggagtaattttcaatgcagcaatagataaagaatataccagaatggagctaccacatggtcaggaggaagagactcacaaagaaagatgaaggttgcagagaggtgctatggaaatagcacatgctaaaggagtcttctaagcagcccagaggcgatgacataccagtgccagcagaggaggagaaccacgcttcagtataacaaaaacttcaatgaatcatgctcaatgtggaaaagtcgaatagacatggctgaggataaaagaaaagaacgtacacataatctcactacccagagagaagcaatgttgacatatttctcttcctcaatgcatatttatatattgttgatatttttactgtctgtgcaattttgctttaattaaacatttagattatgaaat

SEQ ID NO: 244734 - DNA, 757 bp, Homo sapiens
tggaaacctcagagcagtgcttctcaaatgttaacgtgcatacgatgaatcacgtgggcatcttgttaaaatgcagagttttgagtcgagggtctggggagggctgagattgtgcacttctaaggagatgccaggtggtgctaattctgctgcactggacaccacacttagagtggcgaggtcactaaataataggagcgaaaggatcgtgagaacaccgacatcagtgagaaggaggctggctgcagagaccatgggtcttgctccattgcccaggttggagagcagtggtgtgatctcaactcattgcaaccttcacctcccaggttcaggcaattctcctgcctcagcctcctgagtggctgggattacaggcacatgccaccacgcccagaatggagctaccacatggtcaggaggaagagactcacaaagaaagatgaaggttgcagagaggtgctatggaaatagcacatgctaaaggagtcttctaagcagcccagaggcgatgacataccagtgccagcagaggaggagaaccacgcttcagtataacaaaaacttcaatgaatcatgctcaatgtggaaaagtcgaatagacatggctgaggataaaagaaaagaacgtacacataatctcactacccagagagaagcaatgttgacatatttctcttcctcaatgcatatttatatattgttgatatttttactgtctgtgcaattttgctttaattaaacatttagattatgaaat

SEQ ID NO: 244735 - DNA, 452 bp, Homo sapiens
tggaaacctcagagcagtgcttctcaaatgttaacgtgcatacgatgaatcacgtgggcatcttgttaaaatgcagagttttgagtcgagggtctggggagggctgagattgtgcacttctaaggagatgccaggtggtgctaattctgctgcactggacaccacacttagagtggcgaggtcactaaataataggagcgaaaggatcgtgagaacaccgacatcagtgagaaggaggctggctgcagagaccatggtaagctcctccccttgtgttcaggccagacctattgacctgcttctcatgaatggaatatgacaaaagcaatgggatgtcactttcatgatgaggttgcaagaggttgtgatttctactttgctaggaatctctcttgctgctgctttctcctctctattgacttcttggcttgtgtgctttgatgctgaaacca

SEQ ID NO: 244736 - DNA, 181 bp, Homo sapiens
atggcccccatttctgctggctgtcagctcctcaacctgcagccctctccaaatgagagctcaaacaacaaggcagcttgcttcttcaaatccaccaagggatagtcttcttaagacactgcagactcactgtgtaaaaattgtaaaaacacaaggtaatataatcatgtgcattccatca

SEQ ID NO: 244737 - DNA, 402 bp, Homo sapiens
cataacagatctcctgtctctgatctgaagatctacagatctctgattggtaaactttagttgcatgaactcacttgtgatgcttgataaatacagattccttggccccacccactctagagattctgatccagaatctcttttctgagatagagtttaggtgtctgcatttttaacagacatacctagtgttgatacagtttttttgaggaccacagtttgagaaatactagtctaagggaaaggagagcaataattgttggatcacttgcagaacttttaaaggtaggtgcctcggcccacccctgaagattctgatttggtgtatttgggctgagctgattctgatgcttactccttcttaagtgttaataatagtttaaggattgtgtgaaaaaatta

SEQ ID NO: 244738 - DNA, 385 bp, Homo sapiens
atgctgtttcacgtgtatttgtatctgcagctgacaggtatcctgaacatcttctctaacacgtattgatgtctacttataacctactttagtgctgtgtgaatggatctaatataccaaatgtacatgataaatgttttatctctgattctcattgatcagttttgaaatgatcaaatggtgtatctcagtaagacactaattcacattgatcaaattctaaatgatcaagttgacttggtttctgctgaacacaaattgtattaaaacaacattacttgaacatgctgccttctctaatgcaggagttatgttaccagcagttacattataactagagttattgtattataaagatgtctccttcataatgaaaagtttacac

SEQ ID NO: 244739 - DNA, 372 bp, Homo sapiens
gacaatataagaagtataaactgttgttccagtatctgttctcatatgcctctcaaaagtaaacatctcaccaggcttgagtgcgtttctcctgttgaagataacttttcatagcttcatacctcaaacacaagccagccactcccactgacactcattccaatgatggaagaaaagccagctgtgttggacttgaggggtggtgtattaatctctaacatagtgcttttctaatgaacgatgaaggataattttgactggactgagtttcacaatatattatacactgacttcagaacctaactctcccccccacacccccgccaagaagaagcctgggcaacaagagcgaaactccgttgcaaaaaaaaa

SEQ ID NO: 244740 - DNA, 235 bp, Homo sapiens
ccgtgcatgcattccatatgcaccaagacccttttaatctcctggtctgtcactctgaggagtgcagtgagcccaaaagtggagatttgatttctccatcctaatggatgctgggtggtcttccagccaagccaatgttgtaagccccttaagggcaagaaatgtgtcttgaattattctggtgttcctctgagtgtcaaactcagtgctcagcttaataaatatgtcatgactc

SEQ ID NO: 244741 - DNA, 117 bp, Homo sapiens
tcatacattcattcaacagatggtgtttgagtgtctcctatgaggcaggcattattttaggttccagggatacagtggtcaacaaaacagacaaaaaaataagtaaaataaaaatta

SEQ ID NO: 244742 - DNA, 518 bp, Homo sapiens
gtcagggtagcattggtcaaggtccttggaggcctgcctccctttttgtgctggtggggcacatggagtgccctgggaaggataatgctgcacgccctttccccgagtgcctgcagcaatgtagtgtgaggatgctgggcctttggggttccttaacacttcaggctggtcagagaggcatgtggcactttcaaggctccaggggcacgatttgggtaaaaggctttgtgatgctgccacataagtactgatgttgcactccatggaggcagtgtgatacagtgatgaagggtccaggggctctggatgggcatctttcctatgccacctattagtcccatgtccttggacaggctagttaactatcctctgcctcattttccacgtctttgaaatggggctaatgcatcctatttctgggtgttgtgagggctgggtgtgacgttgcctgtaaagcacttacccccataccctgcacttggaaaaggaaggtcatggctgcattatagccatcatca

SEQ ID NO: 244743 - DNA, 522 bp, Homo sapiens
ttatcccttttctccttttcattaaggctgttacatatatacaatccacaggtagaaaccactcttaggggcctccataagcaggcagtagtagaaatagttactgtaaatccttataagcaaaaaataatattttattacggatgattatttaggaatggcttcactattgtctcaaaaagcagaatgataaagcaagtttccttgacagaaccatcacaaaattatatacagtatttcactggttccctctgagctgtggaggaatcagccagagtagagaggtaggtggtcctggttcaagaaaacctgagtaagttttagagcagcactaactcttagaggaggttaagtttgaaaattcggttgaattctaaagataaagttatcccttccgttctgtagctgttttaatgtaaacaacaacttccaagatggctggaccctgccctgggtttgctcgaagactacttttcctgtctagggccatgattaaacagacattttaattgctgtcaaaaa

SEQ ID NO: 244744 - DNA, 452 bp, Homo sapiens
tgagcatctgctgtgtgccaggcattggagcctgggtggcccaccagcagtttccagattgtggaattcacaggccggcaacatttttcaaaaagttttccaagaggaagtcacagaaatgggcgtcacaccatcaaggacacgacgaaaccaagtaggacgtcatggttccagagcaaaggacaatcctgggcatcatggacatgagctgcctctgcactccactgcactgcactccaggctgggtgacagaacaagaccccgtttaaaacaaacaaacaaaaaaaacaccacactgagaaactacttcacaccctttaagatggctgggatggctacaatcaagaagacagacaataacaaatattggcaaggacatggagaaactggagtcctctcacgcaatgatggtgggaatataaaatggtacagttgcttcagaaaacaggttg

SEQ ID NO: 244745 - DNA, 404 bp, Homo sapiens
atccggccccagatggtctcttggacacagaagcccagtcccccatgttccccagcccatctttgcacttcagtggctctccttcacaaacacggcaaaagagctccaagaacacagggcacacaaggcacacacccagttgccacgatgtcagaatctcagttatgtggagcccagggagacaagctctggggtctgctttcattattgcctgtctgactgcacaactgcttctcatcattgtttttatagctgtaattctcctcctgtatcagtttccctgtgaaccaattatatatatataaaaaaatggtatctcagagattctagtgccagtgatggaatgttgaagccactaagagactgaaattctgacattttcccatttccattccttgcaatca

SEQ ID NO: 244746 - DNA, 612 bp, Homo sapiens
tgctattgagttatataagctgcttatatattttgggtattaagcccttattagatgtatggtttgtaaatgttttcttccattccatagattgtcttttcattttgttgattggttcctttgttatgcaggtttttagttttatgtagttttatttgtttatttttgcttttgttgcacatgcttttggtgtcacatccaaaaaatccttgccgagaaaaatgtcaaggagatttttccatatgttttcttctaggagttttatggtttcagggtacaatgtttaagccttactgtggtcttgaatttttgtctttagcttcagaaggcaaaaagctcttctggaattttgccagcttgtttttctgagtgtacagagggaaattacttcctactgatgaggaaaagcaggcagaagttgctgttacagaacaagagatggagagaaggaacttttaggtgagaggtggaaaaggtgtgttcttagctgagatggagagcatgaggtgatacagcaatacatattaactctgtacttaacacactgactacttgagccattctgactgctcaacggaattttgacacatacttgagttaggtaagcaaaga

SEQ ID NO: 244747 - DNA, 490 bp, Homo sapiens
  misc_feature (111)..(111): n is a, c, g, or t
  misc_feature (131)..(131): n is a, c, g, or t
  misc_feature (134)..(134): n is a, c, g, or t
  misc_feature (137)..(137): n is a, c, g, or t
agggtgctgggagctggcagggtccttccagacagtctcagcctctccccgccgcccccaacaggctgtcaaccaaaacgagagggggtggggagccagctcccccccccncccaaggggcccgggttttnagngtnctgtgcccgcaggcacccgtgtgacatccgcacgtccagctccgtgacctgtgtgtgtgtgtgtgcacaagtgagtgagagatttcgaacgcccacccctcgactttgaaatctgagcaaaacaagaaactggggtcttcctctcccccgaacctctccccagctagtcttccctctgttcttcctgcctccagccgcccgcgccagattttgaaatctcggagacaaaactagtactgtaagataaatttttttgtactgtatttattgtgtataacgatttttttaaaggagaattctgtacatttagaactcttgtaaattaaaaaccgatcctttttttaaaactgtac

SEQ ID NO: 244748 - DNA, 463 bp, Homo sapiens
  misc_feature (107)..(107): n is a, c, g, or t
  misc_feature (110)..(110): n is a, c, g, or t
agggtgctgggagctggcagggtccttccagacagtctcagcctctccccgccgcccccaacaggctgtcaaccaaaacgagagggggtggggagccagctcccagngtnctgtgcccgcaggcacccgtgtgacatccgcacgtccagctccgtgacctgtgtgtgtgtgtgtgcacaagtgagtgagagatttcgaacgcccacccctcgactttgaaatctgagcaaaacaagaaactggggtcttcctctcccccgaacctctccccagctagtcttccctctgttcttcctgcctccagccgcccgcgccagattttgaaatctcggagacaaaactagtactgtaagataaatttttttgtactgtatttattgtgtataacgatttttttaaaggagaattctgtacatttagaactcttgtaaattaaaaaccgatcctttttttaaaactgtac

SEQ ID NO: 244749 - DNA, 253 bp, Homo sapiens
gtttttgttaagactcttaaaactttttttttgatgtatcctaatgtttttctgctgagactctactgttaaaacatctatttaaaaatataatctatatgatatttaattaattttaataacaaatgagtgatattgatgacaaataacacagctgtaatctgtgaacttaaccttttctttcttttttatttgaaaattacctgctttttgaaacaaactaatgaaaattaaagatgtacagtttaatacc

SEQ ID NO: 244750 - DNA, 339 bp, Homo sapiens
taaaatcacataaagataactcacttctcaactggagccacggaatcgttagatgtcttggagacttttctagctacctctttgctggactcagacacaggcctgaataattaggtccaaggagctgaactggagccgctcgtggccagaggtcccttcctgggaacagcagtggcggcagcgctgcgctgagcctggcaatttgttcaagagcaggggatgctcaggctgcgctcgcccccttcttatgaacggtttgctttgcgtcttctctgtgccaagggctgccaggcaccagatgcccattttaggaaatcagaaaaataaacagtgtaaata

SEQ ID NO: 244751 - DNA, 355 bp, Homo sapiens
caaaataaaaattttttaaaaagcaaccaatcactgagtatagaattatataattttaacataatggaatgcctggtacataggtagtattcaattagggttaattatttttatttccttatattatcattaccattattattatttttttagcatctcatccagttttcacttctgtaaacaacatagcgattcttcctatgatattatttaagttctcctcataatcctgattgtacttttctggattgactttatctgtattattctttaagtgaggtgtacaaatacattactcaagttcttatcatatttttcttaatgtaagcaatgaatacatttgattaagaaatta

SEQ ID NO: 244752 - DNA, 469 bp, Homo sapiens
aatattatatctctcagaaattgtaattagcacttttcttattttaagtgaagctggacatcttttcctatgtttaattaacatatgtacagtatattcttttctgtgaacttttcatattcatttcattagattgttggtaattttcttattgattcatataaactctttatagataaggaaaattcatccattgtaatatgatccaaacatttctttcacgtgtcttttgtctttgaatttgcttgtggcttttagaaacatatttagaaatagaatatacaaactataggcaccatttaaagaataatacacaaataatgtatctctgcatagtcccctatatgctaatcttaaatgatgtattaccctctccaactattatcctaaattttattaattacattttggttttctttttaagcttatgttcatatatccttaaataaaatattgtttaattttgtct

SEQ ID NO: 244753 - DNA, 415 bp, Homo sapiens
ggggtggttttaaaaatatttacatataaatagtaaaatatttgtatcttactgttttaccatttaactattttgaatataaatgttctcaaaactattttttggctattggtaaatagcctatagagaataatgcagttgccaggtgtagtggctcatgcctgtaatcccagggaggctgaggcgcggcggatcacctgaggtcaggagttcgagaccagcctggccaacacggtgaaaccctgtctctcctaaaaattacaaaattagctgggtgtggtggcgggtgcctgtaatcccagctgcttgggagggtgaggcacgagaatcacttgaacctgggaggtgaaagttgcagtgagctgagatcatgccactcccctccagcctgggtgacagagcaagactccatctc

SEQ ID NO: 244754 - DNA, 432 bp, Homo sapiens
ggcacaaagcggggaacaagagacaccagagaatgagtattgagacactacctatttggtattatgccaattacatggatgataaaatggtctgaacgccaaacccctatgacgtgcaatgcccatgtaaccaacctccagatgtaccccttgaaactaaaataaaagttttaaaggaaaaaaaaggaacctggaagttggtccatcctatgcaatggacactttcaggtgcaaagtttgagaagatgaggatgagagacgttgtccagccctagctgatatatggaaaccttcctttctacttgctatggttgctttgcaacccagtggctagtaaagggctgttttttaaattaccaaaatgctcaaatattagtaactaattgtccaacttggaaaaagcaagtcttctgcagttggaaaaaaaagaaa

SEQ ID NO: 244755 - DNA, 694 bp, Homo sapiens
actacattttaaaaagaggattctattcatttttaaaacattaatttaaattttaaagtacttcctatatacatatatatactttaacaaattacattatttgctttaaaaaaaaatcaagaattctatgactagcaaatacttacatgattccctacctgtttaggagattccaaaagactctgaaggtcaataaatattttcaagacaacttaacttgaaaaggtatctgaatgtatatttgtcttttatgtgcagtgaactgtaagactgatagttagaagcactttgctatcttctcaacattctcatagaaatattttatttacagattcactttcttaaaatttattttagcacatgatttaaaaaatatttacctataaacacttgagacctccaaatgtttgaaaactaacttttgacaggcatggtggctcacacctgtaatcccagcattttgggagaccaaggctggtggatcacttgaggtggagaccagcctggccaagagtgaaaccccgactctactaaaaatacaaaaattagccgggtatggtggtgtgcacctgtaatcccagctacttgggaggctaaggcaggagaattgcttgaactcgggaggtggagggtgcagtgagccgagattgcaacactgcactccagcctgggagacagagctagactccatctc

SEQ ID NO: 244756 - DNA, 557 bp, Homo sapiens
ctcccttggagacaaagaatggtcaaaaaccacttgctttgataaatcttgctgaagcaacaaaaatagctgtgtcatgcagagatgatagaattacctttcaccattacatcagaacaaaaacctccaagaaaggcaaaatttctcattctcccatctaactacattcacaggcaaatccctaaaattcaagccaaattacatacaagtattttacatagctttttgcatttagaacatctgttaattcaaaatgtggttgatgaattaacggcctacaacgttcctttaaaaccaaaccacctaaaaatcaatttattcttacatttaatagttttttttttttttttttgagacagagtctcgctctatcacccaggctggagtgcagtggcgctatctcggctcactgcaagctccgcctcccgggttcacaccattctcttgcctcagcctcccgagtagctgggattacaggcgcccaccaccacgcccagctaattttttgtatttttagcagagacagggtttcacagtgttagccaggatggtctcga

SEQ ID NO: 244757 - DNA, 649 bp, Homo sapiens
tttttttttggtagagatagggtctcaccatgttgctgaagttggtctcaaactccttggctcaagcaattctcctgcctcagcctcccaaagtcttgggattacaggtgtgagccaccacaccgagcctagagcaattattttaaaacaacagtagcatcattcagaaaggccacatctggagcggttaagagcacagacttctggagcagagtgtctgggtttcaatctcaccaccgcttactaggtatatgaccttcagcaagagacagtctctactcataggattgttgtgaggactaaattggctaaggcatgacatgtacttgggacgaagcttggcacataggaaatgttcagtaggcattgtttaacagtgtaatgatatttattgaatacttatgtcatagaaactactgggtacttacatatcaatcctcacaacaatctttggaaataggtactattgatatctgtgctttgcaggagagcaagtaggcacagagcttaaacagcatggtcatgtgcagataatactggttttgcctcttatatactagagttgatagtggttatacttctggcaggccaaaaaatggcccccaaaagtattcacactgaatccctggaagctgtgaatgctatcttt

SEQ ID NO: 244758 - DNA, 267 bp, Homo sapiens
cagaaaagtgatcataaattttcagtagaatttctctttcctggaactaaaatatttgcaataggaaatatattatataagtattagatactatcagttaaattagctttgaagaaaaaaattgctaaaacttgggaaatatttgggaactaagaggcacataatataatttgtaattttaaataaatacaaatgtctctttttagaattatgtaggcttgtatttccatatacggaaaccagaaattgggttaagcgtagtttccc

SEQ ID NO: 244759 - DNA, 374 bp, Homo sapiens
gggttctgaaagcgactgtaaatgtgttgtctccgagtgggcacttgtttgtaagtatttattttccggagcccactcaggagcagagagaagctataggctgttagagacaacggaacaatgagtcaaaacaacgcctccccacttttacactaatgcatgggggaaatccccagaacactagtgtttgattatgaatggagcctgctttggggttggtgtccacaggctagcaaagaagatctggagaccatggtttggtcaaagcattttcactggtgcttagtgctgtttttaaaaaatattcccacagagactgaatgactgtttaattcccacccagtaagtatttcagaaatgatttctgcaacaaa

SEQ ID NO: 244760 - DNA, 441 bp, Homo sapiens
atctaatgtgtatttcattctattgcgttaaaaaattacattaaaataaacaggaagcattatactatccagtgctgttgtacagtgtgaaatgcttcagtatctctaaatactgtatttctctttctgcgggaaggttggaattgtatgaaacagggtgaagttgattaggtggaattttgttttgttgttgttgctggttagcttatatggctctttgaaggacaggagtcccttggtgtctgtggggaattggttctagggccccctgcagatactgaaatccaaggatgctcatgtttcttatataaaatggtgtagtatttgcatgtaacctaagcagagcctcctgttatctctagattacttataattcctaatacagtgtaagtgccgtgtaaatggctgttacactgtattgtttagggaatgatgacaaaa

SEQ ID NO: 244761 - DNA, 311 bp, Homo sapiens
tgtaagacctttttgattggtagtgttggttctgttgtctacacggaggccagatttctttatccagggagccagaaaaacaagtgcatttccttccttcagtaaacaggtcacttcctcatcactagttgaattagcccctttgttttctccttattagggggaaggaacactttatttcttcctcatttcttccagttgtctggtgcctggccacttcataattgtattttgagagaatagatattaattttcttcaacaaaaggcggagttccttgatgacacaacataattcaatttccgttctctc

SEQ ID NO: 244762 - DNA, 466 bp, Homo sapiens
aatatagagaatcaattaattaaaaaatcattcatttcaacttgcaagagggatgactacacatgttggtaataatcaagtttccagcctatttcccccaaaatgcacacttccttgaggtatataaagtttttacaatagaatctcatctactctaacctaaagttggaagttgtccccctagctagtgatgaacacttggtaaactttggagaaaaagttggaaggcgaatgtcccactgcgtgtcttggaatagttgcttctttcttatgaagacagatgtgatagaaaccatgagagcgctgcacaaagcagctgaagctgatgggtgacattcaggtagacagcttggggtcaacagagcaaccagtgcatctacaatattgaaggacaagctggagagaacctcagatatagatcaaaatatccaggtggtaaatcaatacacatgaactgcagatcagc

SEQ ID NO: 244763 - DNA, 688 bp, Homo sapiens
cagtagcatatgcttgtctcaaagattaagccattctgcatttctttcatcactgagatttttatttaattaacgcattaattatcatgaagcttactatttggtgtctgcttatctctttttttgaggaccaagcatataaatatgcgaggaatagtgttttattattctaaataccttgccattattaagagtttttttatgattatactgtctcaatgttgaaagaaaaatttttaaagatttgcatttcaatttttttacctataggcaagactgtaccactctgggcaacaaacttaagtttcagaaatttaacttaggaacttttcaaggaaatttgagatttgtgtcaagaaacctttttattaacgattaatgtaaaatttggaatacggttcttaagttaatgtgaacctgcaaaatctaccatttttgcctccataataagtcagaccttgtacaacttaaaaatgcattctgtcccacgtttcatgctgtcccttcctcagaatagtctgggagttcagcttttataacctttggttgcccttggaaggtatttatggcttggatgggctttgttcataatcactgtgttcttgtaggataacccccctggccttcttgtgacactgagctactgataacaacttctcacgtgtacagataatccaaatccacattc

SEQ ID NO: 244764 - DNA, 447 bp, Homo sapiens
taaggaaaactacaaacatctgataaaagcaaccaaagaataactaaatggagatatagtccatgctcattgatatgaagacaatattatcaagatatcagttttttccaagttgatctacagattcaatttaatcccaatcaaaatcccagccaggggggtggatccatgatggctgattagaaacaacgatcgtctgtggcatgcatggagaggaatgaaaaggggcaaatgaattcagcaccttcaaatgagatatccaggttcttgcattaggactgactggaagaacatctcaacccacagataactaagaacagtgggcagggccaaaggaatccccaccccagccaagggaagtggtgagtgattgtgtgagcctgctgggaaaccatgcttctcccacagatctttgcaaaccacggaacaggagatcccctagtgagc

SEQ ID NO: 244765 - DNA, 449 bp, Homo sapiens
tcttctcctccctgctgattcccaggagttatggcttttcacagtttcttggctactgtccagcaatcattttacagaccttaaccctttacacacccttgtacttgaaagtactgtaactgtaaccaccaataaacctgaatggagatgttcactaaagcaaatacactggcaagaacccaccttcttccccacaggtgcatttctgcacgtaatttgagacttaaagacaattgcttctgtgaagaaactaaggaaaggcaaattagacactgtatctctactcaaattcacttagaatacccgacatcccctttccacaaaggagtcatctggagagacctaggaataatttagctttggagtcttgaagtgagcgaaatctttacatacgtgtgtgtgtatgtatatatatgtatatatttcaaatatatatatgaaattgaaac

SEQ ID NO: 244766 - DNA, 384 bp, Homo sapiens
tcaagactcctagatgaaattaattccaaggttaacaaggcgcttgcttggcatcgtgctctgtctcctaggcctttgataaattattgtttttcacatgctaactaatgaggcacaaaaatcaaaatcaatagagatatgcatgcttgtatcagttttattttggtatcattttcaataatgaaatactccaagtgcttatttcagagtattttcttttctctttatgatttatctactttggaaaattgaatattatggagatttattatggcactgcattgctattcctttgttctttggagaaaatatactcttaatctcaggaagtaattaattttattttctagagaaagtaattattgaagtgaactaaaggttctt

SEQ ID NO: 244767 - DNA, 424 bp, Homo sapiens
tcaacgttcagccagttagtctacaactctcccttagcctccttgcactgctaaggcaaggaggcttgcactgagcctaaagatcagccagaggtatgtaccttttataaggtcttttctgagcatggctatggctatcagcatatgcattacactctggattccctggtgtatgtggaagccactcgaagcccttattttaccaaataggttcttttttattcttctctttcctaaactttttagtccatctacttgtcccacctgctgtctcttttgccaggtatctgtgagtagtatatgtcatctttaagtgattttgacagacaatgcttggaaatctgctctagcctgaaggagctgacacaaaagcaagcctctctgccagtctatcaggtcaaaataaataaccacaaatatttga

SEQ ID NO: 244768 - DNA, 318 bp, Homo sapiens
tatgtaatatatattttatacctttgaatcaactgagtaaaaggatactataaaaatacctattagggaaacctcttagaaaacctgttagacagcatctgctaaagctgaatatacgcccaccctgcctccacttgccttgtgatattctattatcctgttaagtacttgatgtctgtcacccacacctattcgcacactccctccccttttgaaaatccctaataaaaacttgctggtttttgtggcttgtggggcatcacggatcctaccaacgtgggatgtctcccccagacacccagctttaaaatttctctc

SEQ ID NO: 244769 - DNA, 421 bp, Homo sapiens
atccagaactcagaatcagagttgtagtgatacacatacacacacacatacatacacacacacacacacacacacacatgcacatacgtgtgtatagttttgttgtattgcagtatatagagaaagaacaataaaaagggatttttggtattatatcttacctttgctcattcagttccatgttactgccttcttatctgctctgaagccaagcaggatataacagaagattgtaggcattaggacatcatcagatgctaacagaaatttgttgatagaaaatatggttctagtggtataaaatccacaaaactaataacgggatttgtcatcaaatgttagtaaacacagaaatggtagagataccaggaaagaaataacatgaaatgcttcaattatgagctagtactggaagtttgtt

SEQ ID NO: 244770 - DNA, 688 bp, Homo sapiens
  misc_feature (211)..(211): n is a, c, g, or t
gatcttgctctgtcacccaggctggagtacaatggcgtgatcatagctcactgcagccttgaactcctaggaatcagagatcctcctacctcagccttccaagtagctgggactataggtgtacaccaccgctcccggctaaagccgggactttatttcagactcttcatttcatattgttaagggggagtcagaccttctgtatcaaggntatgcatcaagactgtggacgctggcatttgtgtaaggagaacgttttatgagatggttagccagcccttcccagcagtaagtcagcttgctgcatttgaaacttacatactggcaagtcaaaaagaaagtcttcatcattgcccatgctcaacagaggaaaggaacccatggcagacatcattaataactaaaactaaatgaaaaatattccagccttagatattctgatacactccttatttttgagggctgcagaaaaggttaacattcagcttctggaaaagaatactaaaattccttcttgatactaaatatgctcaagccactgttgaactatctaccaagatgaagcctgctggagtttcaaaaatgtcccagtgctctcaacctctgtgcgctctcttcacatcaagagtgaggtcagaagttatgtgaattacccaccccacccccccacaaaaagtgacccaggccc

SEQ ID NO: 244771 - DNA, 435 bp, Homo sapiens
actgaggcagaggctttgcagatacacagaggacatgtgaggacaggtgaaggtcatgatcattgtcagccccctcccccaactggacattcccagatctggtggacttccagccagaggagacagaaggactggatcactcaactctgccatgggtgccaggacccaatttttccctggctaactcggtcacctcctgtctgggatctccaactactacccatcccagaagtctcagctaaaacagcaattcaacggggaacttttttctgaggctccaggattgggccaggccttctccatggctctctgcccttcccctactgcagaacttagcacctgtatgtcactattggttcaaacatgtgtctttcatatgctctccacgttatctgcagcatctgctaagaataataatgaatggtaaaacctaat

SEQ ID NO: 244772 - DNA, 514 bp, Homo sapiens
tagtagagacatggttttgctaagttggccagactggtctagaactcctgacctcagtgatccacccacctcagccttccaaagcgttgggattacaggcgtgagccaccacaccaggcctggccatctactttcaacaggcatggttgaaagactccaggcagcctcttcctgtggctttgagctcaggagagtgaatgggaagagacaggattaaggacaaaagttaaccactgaccaggcttagcagttaagaattgcaacgtggcatcaggggccccgggattatatactggctatgacatgttgcatgcagtatgattcgaggcagtatttcccgtctctgagcctcagttttctccactgcaaaacaggggtagtaatatttccttccaagggctggtatgattcttaatgagacaggtcctgcaccacagcccagaggtgcttctgacacgtaaggagcaatgagctattataatattacatcttagctagcaacacaggtataagg

SEQ ID NO: 244773 - DNA, 180 bp, Homo sapiens
cataatgttatacaaccattaccactatccatttctagaacttctgatcatcccaaacaaactttgtacccattaggcaataatttgccatcttcctctccccagcccctaataatcactaatcacattctatctatggatttgttcattctagatgcctcatataaatggaatcataac

SEQ ID NO: 244774 - DNA, 378 bp, Homo sapiens
gagtatttgttcattctttcatttattcaaaaaaaattcatgtggttccctctacatataagtgctttgtggtagacactgtaggacacagaaatgaatcagacagtgatactcatcctgttctcaagaagtctgtattttagtagggttgactgtaatgtacaaaaaataagataaaatcaaaagcggtaagaattataatataagttattatgggtatgactggtattatagcatttagatataccatgtgtttcatatgtgtattatatgatgcattattactaatactcagtgtctcacagaggagataaaatataggcacacatctgtgctgacatatattatatgtgtctgcaaataaaaactgaaaaaacc

SEQ ID NO: 244775 - DNA, 594 bp, Homo sapiens
ttgtcatttccgaggatgtatcctattagaagtctagccctttattcctacaaattgaatttccactactgtaggctaacatctgaatggactcatcttactattccatgcatagtaccaggcacgttgcgtgcttttactacattttgtataatttttacgtctgtgtttgatgtcctgaaaaataccgtccacaattacttcacagctagccccagcacttggcgcccagcgggttttcctagtccctccctgccaaatcacgttgggactgagacaagaggcactgcgggtctcttacctatagttacgaagcaatggactcccttattacttcgtttcccaaatagggggtgggacacacaaccgagggagtatgaggaaaacaacttgcgggtcttcgagccacttgcgtctttctgtgggccaattacattttctttactcatattgcataaatagcagaactacatttaccacaaaggcccgacattcatggtcatggatccttgcgcatgttttctaagagcaaactgtacaaacacataaactctgaaacactgacgcacaagcgaaaacacacgcacatgtttg

SEQ ID NO: 244776 - DNA, 694 bp, Homo sapiens
agtcttgttctactataatactagaaatgtttttaaactttcgctcaaggatggagggtttcatatccttctgtattaccccttgctaaaacataagtaagcatagttatggaaaaaacacatgggcagtcattgctaagactcagtgtattgatgtcgtgtagaaaaacatgatacagagatctgtttttgtggtttatttaattgtctttgttgtttatagtatttgctctgaagtataactctataaaattttaacaaagacaaagacaatctgtcttagcccaatattagccctattccccacttgggaaaaagtattttataacacatatcaaatcagccttggagaccatagcatccaattatgcctagagtgtactagatattcgataagtgtttgttgagtcaattacttaatggacaatatataatgggttgttgtaaataaagcagagcagtgactaaaatgttgacttggtcatattgtgggagcattaaagaaggaaaacgcctgggattcaatgcccattctagggctgtctggtgctatggctctgggtaatccataaccacccggggccccagtttcttcattacttgccctgttctttggtcagactgcacagtcactccctgtacatgcagcataatttcccagttcagggtccttgtccttatggttatctaaaat

SEQ ID NO: 244777 - DNA, 389 bp, Homo sapiens
tgaccccttgtccctaaacatcaatttgaactcaaaatcctgctgaagcctagggtacacaaagtagcctgggaacacgcttcacgtcagctttccccttctgcaatccatataacatttaggaactgtctgatggagaccatgctaatgtcctagtctttacatcctggacttccataagcaatgcgattccctagttttcaagatttcaacaaacatgtaagtgctcactatatgcttgggactgagctaggcagtgggaatacaaagatgacaaggagctcatttatatccttgaaggtgagaacaaacaagatttagaaactcagtgggaaaacaaagatgttatcattgtaacttccatactgaagccattaaataaaagcaaa

SEQ ID NO: 244778 - DNA, 237 bp, Homo sapiens
acgagaacaagagcacactgcagttggagcagcaagtaaaggagctgaagaagtcgggtggagctgaagagccaagaggctccgagtctgcagcagcagccagaccagtagctggagccccagtcccacaaggagcttggatgtgcggacaagcagggtggactccccaggagcacccaggcttgagtggagaagctgttggtacaggagaggcggcaggaggagcaggagaggctg

SEQ ID NO: 244779 - DNA, 413 bp, Homo sapiens
tcgtctaataatttagactttgtatatcacaagttttgagagttaaaatagttacagatacttagcattgatgaccctgttctcaaccaggagtgattttgccacctgacgacatttgacagtgtctgaagacatttttggctgtcacatgggggaaggactgctattggtatctagtggctagagtccaggggtgctgccaaaattctacaatgcgcaggacagctgcccacaaaaaggagtccagcctaggaatccagatatttcttaaaatatcagcagggcttcagttgagaaacactgcttcaaactgagtcatcagaatctatactgattacttcttccatctaagtaagtggatactcttaattttctcaagctatgaaaagttataggctgcactgaagcttcgc

SEQ ID NO: 244780 - DNA, 524 bp, Homo sapiens
gctgtctgggagccactgattgagagagtggaggggaagagacaatggaatttaaggcttgatgtaaagaagaacccagttcaggataaaagtttgctgccaggagatgattttattcctgagccacaaatggcaattcatatttcttcaggaaatacaatgaatataacaatatccaaaagttgtcttaatgttttcaacaatttagcaaaaggtttttcagagggcactgcttctacttttgactactctttaaaggacagagctccttttacggtaaaaaatgctgtaggtgttcccattaaggtgaagcccaattgtaatctcagagtaatgggcttccctgagaaaagtgatatttttgatgttgatgctggccagaatttggaactggagtatgccagcatggtaccttcaagtcaagggaacctatctatattgagccgtcaagaaagctccttcttcactctgaccattgtacctcatggatatacagaagttgcaaatatccctgtggccagacc

SEQ ID NO: 244781 - DNA, 819 bp, Homo sapiens
ctggccatgcaggggccacgttctgcccagccccactgccgggcctttgcttgtgcctggaatgcccgcctctctctgccatcaaagtcctacccacccttcaagtcctggttcacgtggtcgcttccactcccagaaagtgttcccaggccttctctggactgttgactaaggacctagcttctccggatctcatggggtgagggctccctacactcagacagcttcttgtgtggcacttcagataatcagacaccatcccagagtccccagcaggtggctgaaccagcctctaggtcagcctcacgacccgtacatggtcaaacgccccttacccagagcgtattgctctcatagggcaggggccccatgttgggggtgcccaccacactaccactcttagcacaccaggcaagccagtccctggtaggctcatttctcccaccaaggggcaggatggtgtggtgggcaatggaataggagaaattggtttggatcctggcacatagcaggtgtccaacacacccctggctgtgggtgctaataacggaggccgtgagagctgtcgcctgagttagagagtctgctctggaagcgtgtgcctggttgacctaggagtctcattcgttcattcattcattcaacaaataattattcctgcctactagaggccaggccctgtgctagaggttgggatcaacacgtgaacagacaaaactccctgcccccatggagcttacatcctagtggaagaggcagattataataagataagcaggataaacaagacaggttggattgtgatcagctctatggaga

SEQ ID NO: 244782 - DNA, 332 bp, Homo sapiens
cactgttcacaatagccaagatttggaagcaactgaagtgtccatcagcagatgaatcgataaagaaaatgtacatatggaccacagagtagtattcagccataaaaagaacaagatcctgtcatttgcagcaacacggatgaaactggaggccattatgttaaatgaaataagcctgtcacagaaagacaaacatcacatgttctcacctgtgggagctaaaaattaaaacaattgaactcatggagatagagagtagaggatggttgctagaggctgggaaagataatgggggagtgagccagcagggaagtgaggctggctactgtgta

SEQ ID NO: 244783 - DNA, 515 bp, Homo sapiens
aaggtaggaaaataaatgttgtttaaaaagctttctatggtaactcgtcctggaaaggacgtcattacacctatgatttaagaggacagctttttatgcttccgctaatacaactcacttttggctggcacaaaatgatctcacaggaattctttcagtcatcagggcaccaaacacaggctataccgatgcaaacctcctttcgttgagggtgacacaccccatgacaaaatcctgtgccaaagagtgtgctacagtctgggacaggaatcccaaattggttactgctcatcactggttggttcctggacacctgcaggacctgtgggctctgtccccactcaccttctctgttccccagctggctgcaggcagacaggacaatctccgatgccccttctgttcacccagtccttttgctttgtcactactcctggagctttctctcaaactttcccagaatttacaggggaatctcttccataaaaaaaaataaatttggctctcagaaggga

SEQ ID NO: 244784 - DNA, 1237 bp, Homo sapiens
caccttgaagggtaaaccttctcagaactttccgtgctccctctggttcttatttctgtttttgttttttgtttttttccagaaaaaatcaaatcagactgtaggtaaaatagggtgtccagagaaggggactgttttctaaattatgaaaacaagtaacaacagagggacatctgtgtcaatatggctcagcatataaagaacccaatttttgctgtattgcttttaaactactctatagacaacatacaaatatatatttagagagctaactgaaaacagtttattagagcatttattgaaatgtcatggtggctcacacctgtaatcccagtactttgggataccaaggcagatggatcaggaattcgagaccagcctagccaacatggtgaaacaccatctctactaaaaatagaaaaattagctgggcatggtggtgcaggcctataatccagctacttgagaggctgaggcaggagaatcacttgaacccaggaggtggaggttgcagtgagccaagatcatgctattgcattgcagcctgggtgacagagcaagactctcgtctcaaaaaaaaaaaaacatttattgaaatgtaattcacataccatactatttgcgcacttaaaatttaaattattgaattttaatttaaatcaatttaaataaatttgcaaggctgatttattagctatacatctcaagagtctgtagggtatttccaaaaatgatcttatactgggacataatgtgttgaacttctaaacttcataggctatattttctaaccacaacacaacaaaatagaataactaatggttaaatttaaaatatcagctacaacaaatgagaaaatattctgaataatttgggaatcaacaaagaaataaaaccaaaaatgacattagttagaaaataacaaaaatgagaagcttatctgtcaaaacctatagaatgaagccaattatatagttaaaggtttatgttttaaatgccttaattacttttaaaagggaagaaaaaaaacatgggaaaagcaaaatgataatccagtgtggctcttggaaataaccaagaaaataggtgaagttctagccaaactagttaagatataaagacacaaaaatatacaaatttacagcagaaaatagaagtactgcacacatatgtactaaatcaaaagctttaaaatagttttaatggaatgttttaaattaaattgatgtaagaagta

SEQ ID NO: 244785 - DNA, 831 bp, Homo sapiens
agcttccagtttgcaaaccccaattccttcttcctcatcccaatgtatgtatggaacttccaaccagtatccagctcaagaaaccctggactcccatggaacaagcagtagagaaatggtgtcctctttaccacctatcaacactgtgttcatgggaacagcagctggaggcacttaaaccaccaatgtgggagggggtgctaaaactttaaaaaaaatctctactgtgcaaatatcattattcactcagacttccataagagtaaataaaaatgaatatgcagtggctgacattgttttaaagtcactggtactatggacaactccatagtgaatggagatacttgcagagcttgtcatgcacactaagagtttaaaatgtgagctcattattaatcatagtttcaaaattatcaaataaaaccagtgaagatctgaagatgcaaacatttcaactatgaagatttacatttcactttctaatttattaaacatctgtgtgcctttttatctttggtttcttttaaaaagtatatttaatgtctttacaatacctttaatttattaggatctcagaatcattgtttactatcccttatttgacaaaaagtcaaatgtgtatgttctacctccaacggaaatgtttacaaggtcaagacttaattcaattcagacaagaccaaagttgcttgacttcaattcctgtgcattagtgtgatgatttctgccacatagcagcattccgattctatgtaactgaatggagatgataagtgctttcccctctttatttaaaaaagattaaaaggaataaaagaaataatgtatgga

SEQ ID NO: 244786 - DNA, 458 bp, Homo sapiens
aggttcctccacctaccccagcctgattctcagacccagcctacgttcggcctttttctgaaagacaatttcctgagttagttctgctgttgggctcctccacatccaggctccgaaattttctcttgcctcagcctccatgaaacggagatttcgcttcctcccgttcccccttctctctccctctctctcgcccggccagaaagacggctcccttattattcgttcggattattattgtggatttgagttcgaggtgggtttttcttccacaccagactcctggaaaatccgatcgcctgtctcctctcggcctctccttgcctccctttccgcccctcgcctaatctcgcaggcaggagcccgcagtgcctcgcgcaggacgcccggccgggcctcgggctcccggcgccgctcgccccgcgcccgaccgccgtgttccggccttcgcggccgct

SEQ ID NO: 244787 - DNA, 272 bp, Homo sapiens
gagacagggtctcactctgtcactcagtctggagtgcagtggcacaatgtcggctcactgcgacctttgccccccaggctaaagcgattctcatgcctcagccttccaagtagctgggattacaggcgtgtaccaccatgcctggctaattacttgtaatagtattttaacatgtttttgatgacaaagaattgacactttaaaaatcaaagttaaatgaagtgttaaactttaatttttaagtgggcatttctatattcttttctagggtt

SEQ ID NO: 244788 - DNA, 464 bp, Homo sapiens
tggcacatgtatacatatgtaacaaacctgcacgttgtgcacatgtaccctagaaattaaagtataataaaaaaataaaaaaataaaaagaagaaaatgtctctcaaaactgaagggtaaataaagacaaaatacatgaatacactttaaaaaagttaaaatttcaagttacttttatttcatatgtaattgtagaatgcatgcactgaaagggtaaggaatttggtttgttactagaaatgtagactacgatatgtttgacttctgagcattttgaatatgatgtttatttcagctagtttattactgttttgtaaagttgagttagtgattcacatgacctaatcttatgaagtgtcccttttaccctgtgactttgactagcttgctttcatttatttatttatttatttatttatttatttatttatttatttatttattttgagacggggtctcgctct

SEQ ID NO: 244789 - DNA, 480 bp, Homo sapiens
tattgagactaatgaatataatagttgagtaatttaaatgtttatttttaatggaaggatttttactaaaaagaagctaattgacatggaaatgtcagtgaaattccttacctacaaggaaagtaaacattttgtatctaagtaaactataatgtgcacattttaagtataaagaaatctgatatttgaaagaaaaaaaagaaacaatttgctgaaatcacaaggaccattaaacaatagttttgcctttaaagttaagtttacaagataaaagaggcaagtattgaaactttgctttaatgaactgataccactaagtctgcagatgaagaaactttgacagattccctaaactgcaggaaaattatcagcaatgatgtatatgtcctttctaaatgtgagaacacagtttactaagtatcctaattaaagaattcttgtgttcttttactcaataacacattaaaaaggggttaaaaa

SEQ ID NO: 244790 - DNA, 512 bp, Homo sapiens
aatgatttcattaaatattaatttatgagttacttggaagctgaaagctatctatacatgagtatgcagaatatcaaattggttgcaaatccaaactctatcagatgtactgtaaggtatcagatgcctattagatgttaagaccagctacaatgctcatagcatatcagttggtgatgcctttaattattttaaaggaaataatcagtttccctactgcctactcttctgagcactggaagaaaaaaagcaaagttaacaaaatgagcctgtgtgcttcagaatttggacttttgtcaattaaaaggagaaataagtattacacataaaacagcactacttagtttctaaactggtgattatgtccaagaattctctattttaaaaaaatctaatgtccaaaaagatgaacttagctcttggtagttaagcatgctgcaaggaggccttctctaactcttgtcaatgtcattttttcctacccccaaattccctgccctgtgtgaagaaaa

SEQ ID NO: 244791 - DNA, 177 bp, Homo sapiens
tcaagcttctaacgatgtacggggacatgttttcactctgttcttagtcccaggagccacaggtaatcgagaatgtttgtgaactctatccacatcccctcccccacctgccaaataacctgttcaaaacaaagaaggcatagaatataaatgaatttcaaaagttaaaaaatggga

SEQ ID NO: 244792 - DNA, 554 bp, Homo sapiens
ggaattacactattagcttaaggggcaacatcataagggtcaatgttgtgatttctaagaccctcatttttagacaagcatgtttctaatcataaaagctctaatttcctcaggagagtctctgtctgtactagtttctaaaacagctaagtgggacccagattttcttgaacaaaatctaggtaaatatgacttacaaaagaaaaggttgtgtacactacaaacagggtaaatagttctcttggtggttggagtggggaaatcaatatttttggaaccaagagtccaaattacagaatcagagttggagaagacctgggccaacctcttcattttacagatgagagtgctaacaagcagagacatgaagacagttgtcaaagggcataacgcttaagttaccaggaaagccaggactagaacttaggtctcctagttctcagaccagtgttctttatgcttaacgggggaggataaagctcagaacagtaaatactattttaaacattagaggacaggaaactctgtgttggtaggagcataactggcacagg

SEQ ID NO: 244793 - DNA, 345 bp, Homo sapiens
agcactttatcttcttggtctccattccctgaattctctctgattttatgcccagcttccaatggaacctttagaagtttgtcagggagtgaaaccctcagcctccttacttgtctctcacttggtagtgactccagtgcccacacacatcttcgattccagcctttaagtgatccatcagctgccaaacaaacacaagaaaatgattgctggagaaacgcgaactctgaaagacacacaggacaactaagacactttaaaaaacaaaggagcctttaattttctggagcctatctgactttctatcactgtgttcatgtaataaaatatttggtgcctttcata

SEQ ID NO: 244794 - DNA, 511 bp, Homo sapiens
tgctatttactgtctagaataatatatgcttcattctttcatttgtatttccagaagatattttcttcatcttatatttctagaaaccattgaaaccctattcattcttaaagactaagtaattttttagtgttctactgtatgccaagcactgttgtactcttgtgggccctggaattatatcagaaaaaaacaggcagaatttgcctcctcatggattctgatctctctactggtcctcagtgacagttgaatatgtacatcagatagttgtttaccccatctcctactacattataactttcacaagggttggaaatcttaagtccgttttctatctccttagtgcttggtacctagttctgccccaaaaaacttaattccctaggacactaaccatgtcgaataaagtcactcttgggaggtctacaacagcaccgcccagtagcagtataatataaaccacatatgtaaatttaaattttttagtcttcttattaaaaactgtaaa

SEQ ID NO: 244795 - DNA, 642 bp, Homo sapiens
ctcttctatataagggaagagaacaccaccacttctgccttccttataaaatgataaatacaaacaaaataatatgaatacatttaacatgttttataaatgctgttatgattggtgtaatcttcctttaaacatttttagagagttttaatattataccatagagtttgaacttaaggcattttaagctgaaaattacatagaaaaatcactctggcagccatcagggcaaggttggaaactaattagaagactactgcattggtccagaaaaaataaaatgagagcgaagaaaaaggaaggagtaatagatattagagtaggatttcagcaagatatgttaatgagtttgaattggtagcacttgataaccttttggatgaagagaatgataaaaaggtaattcccaggtaccagcttaattatccatttactaagactgagagtgtagaataaagattgcatttgggagcaatttttaagtttcaggtgactgtaggacatccaagtggacctacgcaaggaggatactatacactggagtctaaactcaatagaaggccgggcgcggtggctcacacctgtaatcccaacacaataggaggccaaggcaggcagatcatttgaggtcaggagttcaag

SEQ ID NO: 244796 - DNA, 442 bp, Homo sapiens
gataaagtaatgatctgtgtctcagtcagctcaggctgccataacaaaatacctgggcagctggtattttgttaaggcaaaatatcatagactggttggctccaacagcagacatttctttctttcttttttttgagacagagtctcaatctgtcgtccaggctggtgtacagtggcatgatcacagctcactgcaacccctgcctcctggattcaagtgagtctcctgccacagcctcccaagtagctgggattacaagtacacgccaccagcctggccaatatggtgaaacccgtctctactaaaaatacaaaaattatccaggtgtggtggcaggcacctgtaatcccagctgctcgggaggctgaggcaggagaattgcttgaactcagaaggtggaggttgcagtgagccaacatcacaccactgcactccagcctg

SEQ ID NO: 244797 - DNA, 424 bp, Homo sapiens
ggacaagtaaagcacaagcaaccaaaaacatttttttaatcaggcttcatcaaaatttaaaactttttgtaactcataggaaactatcaagaaagtgaataggcaactcacaaaataggagaaaatatttgcaaatcatatatttaataaaggtctaacatgcaatggtcagttcaacagatgttgaaaaaaatatttgccaatatttaacatccctttatgataaaaacaacaaactgggtaaaaaagaaacttacaccaaaacaataaaagctatatatgacaaacccacagctaacaccatatcgaatgagaaaagttaaaagcctttcctctggcccagcactttgagaggccaagacaggaagatggtttgagctcaggaattttaaaccagcctaaacaacatggtgaaaccccatct

SEQ ID NO: 244798 - DNA, 376 bp, Homo sapiens
gaaggacacccagatcctggtgagcagaacactggcaaacaacctctgcgacagtgtctggtggataaagcatttggagcacctgcttatctggttcagcagcctgagccacgcaactcttcctgtgggacagtgggaccctctctgctctaagcccaggcaggtcttcaggcatttggagcacaagcttacttgggtcagtagcccgagctgctccatccttcccgtgcagagatcctcatatagggggactctctctgctccatgcccagacagatctccaggtattcagaacacctgcttgcccggttcagcagttcgagtcaccctaccccttttatgcagagatcttggttcagggggagcccactatact

SEQ ID NO: 244799 - DNA, 439 bp, Homo sapiens
ttggctacacattggagtcatttgggaagctagaaaaaaaaaatgcccaggacctgggcaagacggctgaataagaacagctctggtctgcagttcctagcaagatcaacgcagaagggaagctggcagcctgggctcttggagattgtatctggtgccggagaggactggctcccacactcagtgagggaggaattttactgacccagcatccagatgaactttggtgaggagaggaggtgaggaagtcaatgagccttgctttttcacttgcaattacggcatttcctttggaaatggacataagagcctggtggttgatgatggaagagatgaaactgtgaagagaccgaagaagctaatctatcaatagttaagattccatttctaaaagatcttactttgagtctacctatgcctgggatgtcaagaggtatga

SEQ ID NO: 244800 - DNA, 231 bp, Homo sapiens
ttctgcatacaacagatagttttttatgttggccagacactgagaaacctcactttcagttggtgttaaggtacgttgtttggatagggtttacttcaatcagggtgtatttgaatttgagatgaaaaacataaaaataaaagctaattctgtgaatagaacagaaatccactggagaatatttatgtgatacaaaattctttagtcacgttcctccttattatttcaagt

SEQ ID NO: 244801 - DNA, 487 bp, Homo sapiens
tggggaagaccacccggcaaagcactggcagggctcgaagtgggaaggcaaggtcagactggattgagagttgcaactgtgattgaaggcggtctttcaaagcaggctcttggtgagggttgggtaagaatcgcgatattgcagcgcagagttggtggaaacagcaagcaagggtttcgaggacttcaaagactcctaggggcaaacttctactgcttcctactgaagagtggatgggccttcagggaagttcctggcaggaacagtcctcccatttgtctgggcggatggtccggaagagcaaagacatgctaatgagacagaggaatagcaagtccccttcaagccgacaggaaggggcctcagttctcagcgccagcctgagtgtgggggctgcttggctcggcctgtttccacgctagggacgttctacgtgttttcttcttcatggctttttgttttctaataaaagatgtttctattcata

SEQ ID NO: 244802 - DNA, 454 bp, Homo sapiens
agacttaaagctatagaagtactagaagaaaacataggggaagtgcttcagaacattagtctaaagaaagattttatgactaaaatttcaaaagcataggcaacaaaaacaaaaatagacaaatgagattacattaaactcaaaaacttcttcacagagggaacaactgacatagtgaagagacagcctgttaagttgaaaaagacatttgcaactatctatctataataataagggattaacatccagaatatacaaggaactcaaacaacaaaaaattaaataatcccattaaaaagtgagcaaaggatctgaatacctatttctcaaaagatgtcatagaaatggccaaaagactataggatataaaagctcaacattactaatcagggaaatgcaaatcaaaataacagtaagatagcattttactctagttagaatggctattatcaaa

SEQ ID NO: 244803 - DNA, 375 bp, Homo sapiens
tgtccccattggcacggatcacacccccatcttttaatccctccctccgcccgtgtcccctcatttgctagacttgtcctcttccaggcctagtgctcggcgcttctgagaggaataggctcacagaatagcggcgctgccgagacccctggggtacgcgaggcagggggattccgcccctttggaaggtggccgagaccctcagccactaaaggacttcgtcgagacaggagagcccgcagagatcgttctcttctggataaccagattattccacaatcaaactttaacccttttgggggcgctgttccctttaacaaactctggaaaatgtacacaatcttgtgcacaacacgagagttatggacctgggtt

SEQ ID NO: 244804 - DNA, 497 bp, Homo sapiens
aaatgctaaagattgataggcatatttcccttggagaagactgtagaaacaatattgtctttaaatgttttaggaataggcatatagaataccatatgtaatatttttgggttggtccaaagggtagagttagagatttagattttgagttacttttaaaatttttctggagttattagtgaacttgatgttccagaagatactcacatgggttaggcatgtggctcacgcctgtaatcccagcactttggaaggccgaggtgggcagatcacctgaggtcaggagttcaagaccagcctgtctaacatggcaaaaccctgtctcttctaaaaatacaaaaattagccgggtgtggtggtgcactcctataatcccagctacttgggaggctgaggcaggagaatcagttaaacctgggaggcggatgttgcagtgtgccaagattgcatcactgcactccagcctgagtgacacagcaagactccgtctctcaaaa

SEQ ID NO: 244805 - DNA, 299 bp, Homo sapiens
atgacatctaattcccttccaattgtagtctctccattttcctgccaattggctatactgcaaacacaaacattattgactctgtaaaaagccttaagggaaaagggccaggcgtggcagctcatgcctgtaatcccagcactctgggaggctgatcacctgaggtcaggatcacctgaggtcaggagttcgagaccagcctggccaacatggcaaaaccctgtctttactaaaaatacaaaaaaaaaaaaatagctggatgtgatggcgggcacctgtaatcccagctacttgggagg

SEQ ID NO: 244806 - DNA, 462 bp, Homo sapiens
gcaactgttcccatctccatactgatttacagcttctcctggggcagtgtcattccttttcttccatccccattattcatgtttctgtttagacccctcgctatccatgaatccttctttaatcacctaggtccacattaatctctccatacctgtattttctgtgaattactgactataccatataatttgacacaagataacttaatctcttacattgcatggtatgatactactacatttttatatcacaacatatgtagcaccagtggcagagagtattacatgagtgactaaaacatgtattgatttagagagcagtaaagtgcagcgtaaaggagtatgtgctgttttcctgtatgtaacataagactggttgaaaagaaacatctcgttcagcctttgggaagagctttcatcactacttgctccaaaattaagactttaaaaatcttcagtaaa

SEQ ID NO: 244807 - DNA, 272 bp, Homo sapiens
cattatcacactgaaaatgtagatctctaaatacaaggatgcaagtttagaaagcataaaaagtaaaagcagtaagtcactcatcttactgctagcagctaccattactctttagatgtaaacattctagacttttcaacctgcttttacccataactacacttttaagaatgatttttgtgggccaggcatgatgactcatgccagtaatgccagtgctttgggaggccgatgtgggaggatcacctgaggccaggagtttaagaccagtc

SEQ ID NO: 244808 - DNA, 387 bp, Homo sapiens
aagaacacattcttttcaacctacacgtacaaatacgtacatgaaaggaatgtggatcaaataaagatcaaataagattatacattaaaatacttagttctttgttaggcaggtaggaagtactcatcctggagctttaaaaaaaaaagccgttttctttttaaaaatttctttgtagccctgaaagctgttaaagaaaaaaacgttctggccaagcacaagggctccctgaaagtgtaattccaccactttcggaggccgaggtaggatgattacttgccccaggagttagagaccagcctgggcaacatagtgagaccccatctcaatttatattatttaaaaaataattaatgtaagagaaattaaaacagatttttaaaaagg

SEQ ID NO: 244809 - DNA, 485 bp, Homo sapiens
cccagcaccaacctacatggacccaagctgaggtggcagagaggagggcatctgaaggcagagcctgggaagagatcctgctaggaggtctcagagaacctctgctgtagggactacagccaggtttagcaagcaggagtcagggagaagattcccaggggcagccagcattagagggctcagttcccaggagcacaggaccggtggctgggatgggcaaaaatggctcctggggcacaaaggtacaatgggaagaagctgtgcattcccatgctgtaagcgtctgccctgtttcacccaccaatccaccagtgggcatggccactttgctgtgggtgtgtggagcatttggcaagtcctagtaaggaacgatctttcttaactcccataaaccctacagaggtgtaggtcaggtaaggatacgtcatgctcagggtcaggttccagccgcagctgagggctaaggggaatgggtggacgtgggg

SEQ ID NO: 244810 - DNA, 470 bp, Homo sapiens
tacatagtctggttataaaccctttgttcatttttatgttgtaggctgcctttttacccttttaatattgtttttgatatgccctctctatgccctactggataaattccaacccctgtttgggaaccttcagtttctggaattatttcttctaaaatctttattgtttgcctttggcatttaggtctataatccatctggaacacatttgttatgtatggtgtgaggtaggggattctgtcatttttttccatatagatatccagttagtctagcaccgtgtataaaagagcactttccactagtagcataaaatcgtataggcccatgataaattcctaacagtataaataaaaaagtgaatgtctagtccatatctgtacatccagttccccactctcaaccccctgaggcagtcatagtttcttgcttacagattttaagaatcatgtttaaacatctctagcatt

SEQ ID NO: 244811 - DNA, 522 bp, Homo sapiens
tcatagagaaagtatacatcactgaaggactttagctcctcttctggggagggggttagtgtgttttggttatacacagaatagctgtatcaggttaggtggaattacagccttgttagtgtctttatttggagattaagtatggcttaaggagatacatataggtgccaagttgatgagattagttgatggacttgtgatggctagtattttatgtcaacttcactgggctacaaggtgcccagatatttggttaaacattattgtgtgtgtgtgtgtgtgtgtgtgtgtgtgcgcgtgtgcgtgtgtgtgcaagggagagatttgggatgaaattaacatgagaattgatagataagcaaagcagattgccctccccaatatgggtgggcctcattccatctattaaaggccggaagagaacagaaggctgagtaagagagaatttgctctcttaagctgactatcttcaagtgaggaaatcacatcagtcttctgtttttgaactcaggctcagattgg

SEQ ID NO: 244812 - DNA, 350 bp, Homo sapiens
gacgtacacactctgagttttgtttttatctcattaccttatgactctgactactacatctctaaaatagggtaaactatttttggtattaggttttgcttgtattactcaagtttttgtttccacccactgctatagttatctggacttgtgtgtgcacctggccatagctacatctatataaattttattcacgggtgcacattttgcatatacctttgtgtagtttaaaaatgtaagttatgtgctgatacccttccttctctattttaacttcttggataacactgccatttcactttatcattttaaacctacttaactctacccaatctgcagaaatgtcaacc

SEQ ID NO: 244813 - DNA, 267 bp, Homo sapiens
gaaagagaaaggactagcagagttacaggttagagaaacaggtaaaggctactatggacggcataatagttgcatcccatgttttgtctcttaagaacagttgcaaactattgaaggttttaaagctgtgtgttgggccgggtgtggtggcttgtgcctgtaatcccagcactttgggaggccgaggcgggtggatcacgaggtcaggagtttgagaccagcctggccaatatggtgaaatcccgtctctattaaaaataaaaaagt

SEQ ID NO: 244814 - DNA, 281 bp, Homo sapiens
tgtagaggtttttcatcttcttggttaaactgcttcctagatatttaaaaaaatttttgtagctgtggttaatgggattgcattttttattttttattgtatgtgtatagaaacactacttatttttgtgtacttattttgtttctggcagctttattgaattcatttattggttctaagggttttggtagagtttttaggtttttgtttatataagattatgtcatctgcaaacagggacagtttgcttccttcccaatttggataccttttattttttt

SEQ ID NO: 244815 - DNA, 368 bp, Homo sapiens
tagatggagtcttgctctgtcgccaggctggagtgcaatggtgcaatcttggctcactgcaacctccgcctccccagttcaagcaattcttctgcctcagcctcccgagtagctgagactacagtggaccagaggagaagatatggatgaactccttggacccaccctgttcccagctcatctgggagaatgaagctaattggtaaatccactgtttgatgcttgtaatgaagactcaaggagttctgtctctaccaagttccttgcccttaatgactcaagaattaattttatcttttcctctcaaaaccttgaaagaaatgcttgagtccttgtaacctgtaaaataaatgttgttactgaaggga

SEQ ID NO: 244816 - DNA, 314 bp, Homo sapiens
ccctttttaaattcattatctagcaagatagtcaaacttataaataattatttatgatacattgtgataagtattattccagcagtatttaagtgtagaggaggaagtaattcattctgtctccagagtttggagaatgtgatgcctaagagatagcatgccatcccagctgtaaaagaagaatagatttctctgggtaaaagaggtaaagaaagcctataaaatatttttgtatatcatttgattaaatttcatctttggtttgactaatttgtcatcctgaaaatcaaataataatgaatccaaagtctcaa

SEQ ID NO: 244817 - DNA, 554 bp, Homo sapiens
cataagaaaacctagaacttgctttccagagaacaggacatgaatgggttcatttacaggagaaaatgaattctgatatgtctaacctaaaagataacagattgtttctgaaaaaactctctaatgctgacagtaaaattaacagcctaaaaattaagtttcatcatgcaagagaaacactcagagaaaagacgtcagttttagaatgtttccaaagagaccttggccaaacacagtgtcaaaagaaagaaattgaacgaatgtataaaaatgaacaaagcaaagtaaataaatacgctgaagaagcaggaatctatagaggacagatgtgctcaactacaaagtgaaaataggttgcttcaacagcaactggatgatgcccacaagaaagctgacaatcaagaaaagacaatcagtactatccaagaccaaatccatgccgttgtaaaaaaatctagctgggagtgaaatgcagagtcttctgctagaagagaaaaacaaagacttaatcaatgtatgtaataatttgaaagaaagaatatatcaatgtgaaa

SEQ ID NO: 244818 - DNA, 237 bp, Homo sapiens
tggcagggactgtacctatttctgctcaccatgatattcccaacgtgaccctgcagtaggctctccatcaatatgtgtttaattattgaatgaatgtactgagtttggctttgttcaaagtcatactgatttaaggacaatccataatgaaatccatcacttacaacaattcatgctaatcatatgattcacctgtgtaattcattaaaagtttacactgaatgtacaaagcaggga

SEQ ID NO: 244819 - DNA, 555 bp, Homo sapiens
aatattgagaaggacatgtatgctcaaactccacaatttcacaccgcagaaccactgaagcttaacagtgaaaggtgtatgaaatgctggtgctcatggaaaaatgcaggcacagttttatctgctagcagccgagaatcaaagcaacagcctgatcctacctgataataagatgataagaaggccaagtggtaatacaatatgtgaagctcttttcttacgtaagtacataagtggagtttcaccttgggccattctttacacactaatgagtgtatgtgtgagtgtgtatgtaagaaaaaatttcaaaattttctaaagctacatatataaagataatgtctaaatgtgaaaatcagcccaattgcaaaagggccatcctacttgaaacttgcagaataaatatttcagttaagcaagggcaagttctcagcccccagcggaacagaattctggggaagaggagtcacagatagactatgatgagagggttcttgaaaactaaattgtaggagtcaacacagtgaggtgaaaggaagccttagatttggagtc

SEQ ID NO: 244820 - DNA, 472 bp, Homo sapiens
gctctcggtactggaatagcaggcatttcaacctctgtcaggaccttccatagtctctctaatgaattctctgctagcatcacagtcatatcacaaacttcatcagtcctccaggcccaagttgactctagctgcagttgtcctccaaaaccgccgaggccttgacttactgctggaaaaggagaacatctgtatattcttaaatgaagagtgttgtttttacctaaatcaatctgacctggtgtatgacaacataaaaaaactcaagaatagagcccaaaaacttgccaaccatgggggagtaactgctgatgagtatgggattctcttttggggcaatgaaaatgttctagagttagattgtagtcatggttgcacaactcaatatactaaaaaccactgatttatacactttaaatgagatgaaatgtatgattttatgtcaataaagctgttacagaagggaatgtct

SEQ ID NO: 244821 - DNA, 598 bp, Homo sapiens
gcagagaaaccaagcactaggacacatccactactgccaaaaaaaggagcagaagtactgttggaacctggacagatggaaagcaagggatggttatatgctgagggctcagcagaggtgtctgtcctcaccaggtcccagtgcaactagtctagtccagttgcacacaatatccatcctccatttcttcaataataataaagtgtggttgggtataaagctacctaaaatgaaaattacatttccaagttcagttatcctgaactgcacttcttttgcagctcagggtacttgtgtctaaattgtggctaatgagatataagcaggaggtctcatatgacagcttccaagagtcttccttaagatactggacataagcaccctctgctttgtttttcatcccttcctatctcctgtggcctaggatgtagatatctgcatatggggcagtgaagtcgaagtcatgcatggtgagacatcaatgtcaaaggaatctggatccctgacaccttggaggactctacagccctggaatgctgaaatacacatttatgtgaaggaaataaagttgtaccttcccacagttaaaaaaggtttt

SEQ ID NO: 244822 - DNA, 869 bp, Homo sapiens
gattgtagaacttaaactggaagactggattcctcagatctcaggactataacattccagataaatttttacattccctttgctgtatattaactgatgatcatttatatgttaagattttttaccttaatatttctgaataaaactcttattgcccatttaatattttcataggcaatcaaatgtgagtaatactgctaagagtctgatttattaaaaatatttgtataattcattcagtttagtttttcagtttagtctttctgctttcacttttctctgtgctaacaagtaactaatgtctgggcattgacttcttattgaatcaaagttgggttaggcatagctatgcacacctgatgtgtaagattaaagaagagattaaataagaaatcttgggtaagttggacttttctgtatagctcttttttcctctgagttgtattttaatgtagtttataagtgataaaatgatccttgttttctaaaagccagtccttcccttcagctttccacagtttctgtaaatgtttaatacttgtacagtcaatggcaattttaaatatatatatataatatatgtatatggaaaaggttcaaagatgcttttaatttatttaatgactattgccttcctataataataattttcatccttaattatgataatacttttagcaagaaaaattcctttttactacagtttttagatgcaaaatgcagtttggttctttagtcaaatccacttagagggtatattgcagtgaaactgtgaaggatacttcactaccaatgtataagctttgttgaatttgtatcattttctttcagtaatgaaaagctattcattatacagtatggaaataaaa

SEQ ID NO: 244823 - DNA, 265 bp, Homo sapiens
tcccaccaccccctgcccccaccaccccaagaggtaaaaggtaatgctggaaggatttttaatgtatattaatccagtagttataaatgcatctttgttacaggaagaatatgttattaatactgtatgtctcataataaaaattcaaacattggacattttcagcattgtaaaatttaactgaatattcattcagacagacttcattttgcagcataccttttgatgttttcataaaagctgcttcaattagatagaaaaaaaa

SEQ ID NO: 244824 - DNA, 181 bp, Homo sapiens
tgatctgattaagttccttataggttctggataccagacctttgtcagatgcatactttgcaaattctgtattctatttgacatgttctggctctgtgtacccaaccaaatctcatcttgaattgtaatctgaattgtaatcctcacgtgttgggggaggaaccttgtgggaggtgactgg

SEQ ID NO: 244825 - DNA, 618 bp, Homo sapiens
gaaagaagagtgtgagtatagagcaagcttgtccaagctgtggcccgtgggatgcatgtggtccaggacggctttgaatgagaccaaacacaaatttgtaaactttcttaaaacatgagattttttgtgtgtgattttttttttaaagctcatcagttatcgttagtgtattttatgtgtggcccaggacaattcttccagcgtggcccagagaagccaaaagattgaatacccctggtatagaggaataagcagcaaacaaaaaatgaaatggggagtccctctgaaactaatctgcttctgggactgcccaattaaaaaaaaattaaaaagggctgggcacagtggctcacacctgtaatcccagcactttggaaggccgaggcaggtggatcacctgaggttaggagttcgagaccagccagaccaacatggaaaaaccccgtctctactagaaatataaaattagctgggcgtggtggcgcatgcctgtaatcccagctactcaggaggctgaggcaggagaatcacttcaacccaggaggcagaggctgcagtgagtcgagattgtgccattgcactccagcctgggcaacaagagtgaaactccgtctcaag

SEQ ID NO: 244826 - DNA, 506 bp, Homo sapiens
gtgttggatccatgggtgaactgaaatcaatttctaacatataggtaaggtggattttatataactttttcattgttctgtgattaaatgagtattgattgttgggattttcttactacgtgtatatagcaagttttggttatccctcatccattatatatgctccacattttttattagaaaaactattcttcttcgtcacaaagaattttattctatattctttcctaatagaattagtatcaaattataaatatgtaaagtttagtgtatagtctcagatgaattattatcatttcttgtactttatcctttgtgactatttctgcctgttatttggatagttcactttgaattaaaaagagaactgtgaaatgtgtgtgtgtgttcaatcttaggggatgttagaggaaatatgttacattcatattgaacactgaaaattctaaattctatgctgattttcagttttatgttagtgaagaattttgacatggaaaaagttt

SEQ ID NO: 244827 - DNA, 497 bp, Homo sapiens
aaggaggtggagtacttgagtagaaatgatacaagataacctcttcaggaaatcagccaagtatcatagcttttcacataggtgtgtaatgtttgtgtatgtgtgtatgaagagctgttgtggcctagaatcaggggcctttagatcccttgtacagatagaaaagtaaaggctgaggcccaggagcgctccaggccactgcggtagagtccctgtctgcccctcccagtgcctggtcacttctcactgcactccctgccttactgctaaagccatcttccccgactctgaatgtgtaaccacaatggagaatatgtactccagggtcacagtttgtggagaaaaagcccagcagatgaaaattatgtttacaaggtttgtacctagaaagagtggccatttctatgatgtctttaaatgtccctgtttctcatacattttataaacacgacaatagaaggagattcggaaacagcaactttagaacaaggggaaaa

SEQ ID NO: 244828 - DNA, 528 bp, Homo sapiens
atgggcaaaagatttgaacaagaacttcaaaaagaaaataactgaatgataaaaattaaacacataaaaatggattcaacatcatagtactcaagaaaatgcaattgaaaaccacaagataacattccatacccactagaatggctaaaataaacaatgtctggcaattttcaaagttagtaaggttatggagcaactggaatcagatcagtgctattgtgaaatgagtttcaatttctgttcatgttaaattctattcaaagtgatttgatttatgtgataaaattgtttctggaaaatgttattcatccatgcaattacccaacaattatgtatttatagttcataatgggtgaaacaaagttgttcgtaccttcaaagagcatgtagacaagtttgcaaattaaagccttgttaagtcagccactatatagttactgttgtttatcacattttcttgaatcccaaacacatgtattgtcttacaaccaatttcaaaataaatctgacaactgattgatcttctta

SEQ ID NO: 244829 - DNA, 480 bp, Homo sapiens
tcagctatgagccaaaggctacataggtgtttactaggacacgtgggttagggcacaaaaagaactatcaaaaggccaggtgaggccaggcacagtggctcacacctgtaatcctgcactttgggaggctgagacaggggtatcatttgaggtcaggagtttgagactagcctggccaacacggtgaaaccccgtctctgctaaaaatattaaaaaattagctgggcatggtgatacacacttgtaatcccagctactcaggagattgagccaggagaatcacttgaaccaggaggtggggaaagaaaagaaaggaaaagaaaagaaaagaaagagaaagaaaggaaggaagagagagagagagaaagagagagagagggagggagagaaggagggagagagggagggagggaaggaaggaagggaaagaaagaaaagaaaagaaaagaaagaaaggaaagaaagaaaaagaaagaagga

SEQ ID NO: 244830 - DNA, 224 bp, Homo sapiens
ctacactttggggcagagggagtcttatgacacatggttctcagctccagctgtgacagggaaaaagggctgttgatagaataatcctgacccagataatgagatccttagctacctgcatctaatagcttcacaggacatctcaggatggaagtcagccaagaaagccattttcgtttgccttttactttaatttggcacaaacagtggacacttatttctct

SEQ ID NO: 244831 - DNA, 460 bp, Homo sapiens
tttgcagatctccagaattctcctgctgtaagatgctctcttacagaagccatattgcttttacttatgggaccatgcataaaactgaaaaggaaacccttaaatcttcagaagacagagcaaacaatatacaggaacaaagtacaaaagaaatgcaaatgtaaacatataggaaatagtcaaatttagtattcaaaaaatggaaattaaaaaaatctaaatttaaaataaatttaaaatgcaatgtttataaacttctgcttccagccgagatggaatacgagagaatagaattaacctcttgccccaacaacaacaaaacagacaaaatacattaaacagtggttttcaagaccaagagagataaaatagtattgacctcatagggttattgtgggaattaaatgagttagtatttgtaaaacatagaatggtgcctgacacgtggtaagacttattt

SEQ ID NO: 244832 - DNA, 406 bp, Homo sapiens
tctgaggccagctcgaaagttaggaaataaaatcaggtggggccccatcccgtagatgctgagggacagctctgacctagagttcctgctaagcaaatgttgaaccacggcagttgtaaaaaaatgtagatttaggaagccatttcgagataaagatttacagaagattgttgcagaaattaaagaatattcgaggttcattgttcaccattttagagttgcgtgtcttgaaaacgggaaggcaatcatgtcttctcataaaatgaattgtatagaactggaagaagtcctaacacatgaattccttagacttttgtggtccctgcttctgtcacgctgggttcacacaggttcatttcagagcatggtgaagatcaggacaagtgtacagttttccctgtagaaa

SEQ ID NO: 244833 - DNA, 401 bp, Homo sapiens
actcatttttcctttttgtgttatacccttaaaaaataaacagcacaactcttcatcatcttgaagaccacacctttttgtgatattggccatcaaccatctgagtacacacacacacacacattattacctggggaagataaaatcttctaacgtgatggacttaaccttaactaccagagacgcaccgaactgcaaaagttctcatctctcttcggagaaatagccctccttttcaccattttctcacaacttgggcagaaattccatggcctctgatagggggcgtgcttagcatatttgacacctgggacaaattattttataatacccccctcctctataacagaattattttggtaataatcataaaataaaataaataataatttcttgggaaa

SEQ ID NO: 244834 - DNA, 195 bp, Homo sapiens
cccaagtaggataatgcttacaaatgatactttgccaacccacttaggctgaaccagcatcctagagtgtattcaggtgaatcccacaaggaaaaggaaataatgggatgctggcacattactcaaaatccctccaccacccacactttaagcatcttatactatctagtagtcttagtaatttatagaatttct

SEQ ID NO: 244835 - DNA, 1720 bp, Homo sapiens
  misc_feature (97)..(97): n is a, c, g, or t
  misc_feature (137)..(137): n is a, c, g, or t
  misc_feature (802)..(802): n is a, c, g, or t
  misc_feature (827)..(827): n is a, c, g, or t
  misc_feature (939)..(939): n is a, c, g, or t
  misc_feature (976)..(976): n is a, c, g, or t
  misc_feature (1022)..(1022): n is a, c, g, or t
gccattgtaatgtcagaaaactaaataacattcaaattttgaacatgtaatgctactattagtaaaaataagtgtaattaatgtaaagttgtgtaangattactaaacttgtatacttgaaatgattgaatagttcntagaagtcatttgtttctcttttatttaaaatgtagcaagtttctaattttaaacacatacatattaagagatgcatttacatttttttagttttagttattatggatacataatagttgtacatatttatggggtacatgtagtattttgatagaagcatacaatgtgtgatgatcaaatcagggtaattcagagatccgtcacttcaaacatttatcatttatttgtgttaggaacattttaatttcattcttttagttattctgaattatataataaattatagtcaccctattgtgctgttggacactagaatttattctatctaactgtgtttttgtacctgttaacctttccctctttgtccctccctccctgctccccttcccagcctcttaaccatcattgagagagatgcctatgtaaatcttaagattttcaaaaggagcacacacatttggtaaagcactctaactgtaatgcacggtacacacaatgcgcattttctctttccttgctgtaacctctggtctctcaggtccctgcagacctttatatatatgtatatgtatatgtatatccttccagatacatataaacacacatgccaccctttaaaaacacaaacggtagcttattttatacactgttctatgctttgctnttttcatgtaatatacttgaaggtntataatcagtaagtactgtagctctgcctccttctttttaatataacattccattctgtggatgcaccataatttatttagtctagcttatgttgattgctctgctctgggntgtcaaagcctcctgagtacagcagaggcacacacantacgtggatttgggtgtgtacgtgcgtgtgtggattaggggagtgncactggcttagatggcaaagattggcagctgagggactgtttgctcccttttattcctgaccctacaaccagctgcttgtcccttggcactctggcatcagatgtggtgtgaggatattccacctgttctttgagctggtccagtgttgctggagagctctgcttgctgccttggtctgcagtggcagctgtgctttcctacaagcccaacttcatatattctgtggttttgggttttgatgtttcctagtttaatcaaggatgggcatttctgtttccattttgtgttatttttagttatccatggaaagatacaaacagaactatctttaatattaaaattacaagtttccaggaatcagttctgaaattattttgcatctttgaagtgtcttaaattttaaaaattggtcttggccaggtgcggtggctcacgcctgtaatcccagcacttcggaggccaaggcaggcagatcacggggtcaggagatcgagaccatcctggtgaacactgtgaaaccccgtctctactaaaaaaatacaaaaaaactagccgggtgtggtggtgggtgcctgtagtcccagctactcaggaggctgaggcagaagaatggcatgaatccggggggcggagcttgcgctgagccgagatcaagccactgcactccagcctgggcaacagagcgagactctgtctc

SEQ ID NO: 244836 - DNA, 230 bp, Homo sapiens
ccgcccagataatttttgtacttttaatagagatgggatttcaccatgttgttcagactggtctcaaactcctggcctcatgtgatccacccgccttggcctcccaaagtgctgagattgcaggggtgagacaccacgcctggtctaaactgtaaagtttatcgggccctttgacatgtattggtttattgactcccaaaaatctgaagttcagagaaatttaatgactt

SEQ ID NO: 244837 - DNA, 452 bp, Homo sapiens
ggcgctgggaattacagcaaaggacaaacagacaaaccctggccgccctggggctaccatgctagcgggccgctgagtcggaatccgtggctgtgttaggataacttgctcaggattgcacggctggtgagcagcagtcagaactccatccacctctcctgataccaggccaggttcctttactccagagttctcaaagcaggggtctcacgtcttctttagtctttagagagacattttcaactgactccttagtggctaagcaagcttcagaaatttctcaacaagaagcttccacacaatcaaaggtccctgcctgcgtctgtagcagccaagagctgttaagaaaggagattggagcaggtggccttgtgcaggggaggggatgggtgggaggtggccgtgcaagctctgcattgtcatggacggaataaaggatttccacaacactc

SEQ ID NO: 244838 - DNA, 558 bp, Homo sapiens
gcttattgcattctctcagagcagctgtctcaaaggaggctgctcccatgccgatctttttgtgcccaacttacagggaaagaactcattgcctgcccagtgcctgccagcctcagacttctgactgcaaatccaacaggacaatacagagttggcaggacccttctcaggagtgaggagcgggtgcaagaactcccaggtcactgctttattcagaggacctaaggaattgggttgagcggaagcgcacagagctgcagattttctttgatgaatgaaagcttcaatccacaggtttctaatagtactctcattcattttgcttacaaaaggtacagattatcactaatcctcttcaaaaggtatttgtaatcacatttccttgtatatgcaaaaaaaattctatttaaagtgtatgtgaaattaagtttacttttttgaaacacatgtagaaaaagaacaaaggtatcatcaaactagtctatgtagtctcctttcactaaaatattgatggttcaacacttaaggaagtctagaaataaaatattcaaatgacaa

SEQ ID NO: 244839 - DNA, 369 bp, Homo sapiens
acagcatgcagttgagctcagtgaactgatttattcttaccttctttgatcagagttttttttccatcagttagtcacagtatggcagctttccaaacaggatgctgtccatcaccttggaactgccatctgtaaataaagtggctttttgtttgccaactagggcctggtagaagggcacacatatgtggcagtaggatctagtaattctccagatgcctccagaatcagtcataagttaagggaggctatctgcttgtgaatatgatgagtatttccttgcttttctcttttcctgtataaaccatttccattttattatgaaaattctcagtactgccttccttgttagaatgaatgtttctctga

SEQ ID NO: 244840 - DNA, 585 bp, Homo sapiens
cagccccttgggtcagcagatgggttttgttggagtggcccattgggtgtgggtgtcttgggctggaggtgatgtggatgacgcacagggcttattctttgtgccctctcaagcttcacctttggccctggcctacagggattccgggttcaggaaagactttgaatctgcagccacatgaaaatacatggcactgctgtggacccactttttaaggaggggggggcggggaaagcatagaaaagatttgacagcttgaaactacatcagccagtttgtagaggttttggccactcttctagtttccatacacatgatccgtgatggatttggaggggcatgggaaagaggacaaagccagaggctcctcattagtcttgggaattcaaggagacttcagtttggtagctgcacttggagagattgtgtgtgtgcgcacacacatgtggttgctccaaggcagtttctactgctgcttgctcatgtgtctgtagcttccaggcagtttttcagcaagactgtaagccagatgcaaaagcaaacctgaagagatatgtcaaactgcattaaaaaaaaaaaaaaaaa

SEQ ID NO: 244841 - DNA, 449 bp, Homo sapiens
tgatacacaagaccctccctgagctctgttctgtcctgagaggaggcccacagtgccaaagaattcacatctagagctgagcctccgcacatccccactctgctgcagcccagccgcgtgaacttggacctgcctttctggggcttagggttctcactggtcctgaggaaggcttaagaatggagcaaccgccgggtgcggtggctcacgcgtgtaatcccagcactttgggaggccgaggcgggcagatcacgaggtcaggagatcgagaccatcctggctaacatggtgaaaacccatctctactaaaaatacaaaaaattagccaggcgtggtggcgggcgcctgtagtcccagctactcaggaggctgaggcaggagaatggcttgaacccgggaggcggagcttccagtgagccaagatcgcaccaccgcactccagcctgggc

SEQ ID NO: 244842 - DNA, 224 bp, Homo sapiens
atttttagtagagatggggttcaccatgttggccaggtcaaactcctgatctcaggtgatccacccgcctcgacctcccaaagtgctgggattacaggcgtgagtcaccacgcccagccttgtgtgtttattcttaataccttatttttggaagaagaatctccattctaattatccaaacctgatagctgtaaaattgaatgggaaagactagaaacaagagg

SEQ ID NO: 244843 - DNA, 2445 bp, Homo sapiens
agctgctcgggcgcggggcgttcttggtgcgccgggccgtggtgagtccgggctcccgtggccgcgtgctgggaggagactggagcccggttaggaagaatggagttggcgactcgctaccagatccctaaagaagtggctgacatctttaacgcccccagtgatgatgaagagtttgttggcttccgagatgatgttcccatggaaaccctctcgtcagaggagagctgcgatagttttgactcactagagtcagggaaacagcaggatgtgcgctttcattccaaatacttcacagaagagctaagaagaatttttatagaggacactgactcagagactgaggattttgcaggatttacgcagagtgatctgaatggaaagactaacccagaagtaatggtcgtggagtcagatttgagtgatgatggcaaagcatctttggtgagcgaggaagaggaagatgaagaagaagataaggctacccctagaagaagcaggtctagaagaagtagtattggtcttcgagtagcctttcagttccccaccaagaagctggccaacaaaccagataaaaacagttcttccgagcagttgttttctagcgcacgcttacagaatgagaaaaaaacaattcttgaaagaaagaaagactgtagacaggtgatacaaagggaagattctacctctgagtctgaggatgactctcgggatgagagccaggagagttcagatgctttgctgaaaaggaccatgaacatcaaggagaacaaagccatgcttgcccagttattggcggaattgaactcgatgccagatttcttcccagtacgaaccccaacctcagcttctaggaagaagacagtgaggcgggccttctcggagggacagatcacgcggcgtatgaacccaacccggagtgcgcggcctcctgagaagtttgctctagagaacttcactgtctcagccgctaaatttgcggaagagttttacagcttccgaagaaggaagacaattggggggaaatgccgggagtacagacgacgtcaccgtatatcttcttttcggccagtggaggatatcaccgaagaggacttagaaaatgttgccataactgttcgagataaaatctatgataaagttctgggtaacacgtgccatcagtgtcgacaaaagaccatcgacaccaagacagtgtgtcggaaccagggttgctgtggtgtgcgaggacagttctgtggaccatgcctgcggaaccgctatggggaggatgtcagatcggcattgctggacccggattgggtgtgtcccccctgtcgtgggatctgcaattgcagctactgtcggaagcgtgacggccgctgtgccacaggaatcctcattcatctggccaagttttatggttatgacaatgttaaggaatatctggagagcttacaaaaggagctggtagaagacaattaagaggaaaacaaacagaaccagccacctcaccatagagtactccaacaagacatgcataccattggtgcctaagatttattaaaacttgactgaacaaaaggggaccatcaacattgtagacactggaggccttacagagtgctagcctcttccttcaggactcacctggggcctgctgcttttatattttgaaagagtttaagggctaataatttaatttgttgtttgttaaaaattaaaatctccgttctttccggctgcattgcttttgcatgttcacatatgatgtacttttatgatgtacttttttttttttgagatggagtcttgttctgttgcccaggagggagtgcagtggtgcaacctcggctcactgcaacctttgcctcctaggttcaagtgattctcctacctcctgagtaactgggattacagtcgtgtgccaccacgctcagccctgagttagtttctagtatttttttctgactttcactctaaggatagcgttgaaaaaagaatgcacgtgtgagttactaaaaagttagaataatgtgcatgggaacagtgcagcaacatgctagaaaatcctcactgcactccagcagaggctagaggaatgccagtgttaccttacgcttctagaagcagagccactccagccagaacccattttgcagtcttctcttcgctcttcagcctgaaggtccagatgtagctggggcctctcagtttggttctatacacagggcactcgtaggtctgtttggtttcttgtctgtccacgggggtggcttttgcaaagatgaccggcatagggcatgccagctccttgagacgggcttcaacaatggttcctgcttgggtgtcccagcgggcgcctatggcaaaaacacagcggttgcaattgtgtggcagcttgctactaatgataatgatcaagttgtttgatgcaataaacattcaacattctggttttgtcat

SEQ ID NO: 244844 - DNA, 710 bp, Homo sapiens
  misc_feature (667)..(668): n is a, c, g, or t
  misc_feature (684)..(684): n is a, c, g, or t
  misc_feature (698)..(698): n is a, c, g, or t
  misc_feature (709)..(709): n is a, c, g, or t
agctgctcgggcgcggggcgttcttggtgcgccgggccgtggtgagtccgggctcccgtggccgcgtgctgggaggagactggagcccggttaggaagaatggagttggcgactcgctaccagatccctaaagaagtggctgacatctttaacgcccccagtgatgatgaagagtttgttggcttccgagatgatgttcccatggaaaccctctcgtcagaggagagctgcgatagttttgactcactagagtcagggaaacagcaggatgtgcgctttcattccaaatacttcacagaagagctaagaagaatttttatagaggacactgactcagagactgaggattttgcaggatttacgcagagtgatctgaatggaaagactaacccagaagtaatggtcgtggagtcagatttgagtgatgatggcaaagcatctttggtgagcgaggaagaggaagatgaagaagaagataaggctacccctagaagaagcaggtctagaagaagtagtattggtcttcgagtagcctttcagttccccaccaagaagctggccaacaaaccagataaaaacagttcttccgagcagttgttttctagcgcacgcttacagaatgagaaaaaaacaattcttgaaagaaagaaagactgtagacaggttnntccaaggggaaaatcntcctcctgaattcnaaggattaacnc

SEQ ID NO: 244845 - DNA, 2307 bp, Homo sapiens
agctgctcgggcgcggggcgttcttggtgcgccgggccgtggtgagtccgggctcccgtggccgcgtgctgggaggagactggagcccggttaggaagaatggagttggcgactcgctaccagatccctaaagaagtggctgacatctttaacgcccccagtgatgatgaagagtttgttggcttccgagatgatgttcccatggaaaccctctcgtcagaggagagctgcgatagttttgactcactagagtcagggaaacaggtcgtggagtcagatttgagtgatgatggcaaagcatctttggtgagcgaggaagaggaagatgaagaagaagataaggctacccctagaagaagcaggtctagaagaagtagtattggtcttcgagtagcctttcagttccccaccaagaagctggccaacaaaccagataaaaacagttcttccgagcagttgttttctagcgcacgcttacagaatgagaaaaaaacaattcttgaaagaaagaaagactgtagacaggtgatacaaagggaagattctacctctgagtctgaggatgactctcgggatgagagccaggagagttcagatgctttgctgaaaaggaccatgaacatcaaggagaacaaagccatgcttgcccagttattggcggaattgaactcgatgccagatttcttcccagtacgaaccccaacctcagcttctaggaagaagacagtgaggcgggccttctcggagggacagatcacgcggcgtatgaacccaacccggagtgcgcggcctcctgagaagtttgctctagagaacttcactgtctcagccgctaaatttgcggaagagttttacagcttccgaagaaggaagacaattggggggaaatgccgggagtacagacgacgtcaccgtatatcttcttttcggccagtggaggatatcaccgaagaggacttagaaaatgttgccataactgttcgagataaaatctatgataaagttctgggtaacacgtgccatcagtgtcgacaaaagaccatcgacaccaagacagtgtgtcggaaccagggttgctgtggtgtgcgaggacagttctgtggaccatgcctgcggaaccgctatggggaggatgtcagatcggcattgctggacccggattgggtgtgtcccccctgtcgtgggatctgcaattgcagctactgtcggaagcgtgacggccgctgtgccacaggaatcctcattcatctggccaagttttatggttatgacaatgttaaggaatatctggagagcttacaaaaggagctggtagaagacaattaagaggaaaacaaacagaaccagccacctcaccatagagtactccaacaagacatgcataccattggtgcctaagatttattaaaacttgactgaacaaaaggggaccatcaacattgtagacactggaggccttacagagtgctagcctcttccttcaggactcacctggggcctgctgcttttatattttgaaagagtttaagggctaataatttaatttgttgtttgttaaaaattaaaatctccgttctttccggctgcattgcttttgcatgttcacatatgatgtacttttatgatgtacttttttttttttgagatggagtcttgttctgttgcccaggagggagtgcagtggtgcaacctcggctcactgcaacctttgcctcctaggttcaagtgattctcctacctcctgagtaactgggattacagtcgtgtgccaccacgctcagccctgagttagtttctagtatttttttctgactttcactctaaggatagcgttgaaaaaagaatgcacgtgtgagttactaaaaagttagaataatgtgcatgggaacagtgcagcaacatgctagaaaatcctcactgcactccagcagaggctagaggaatgccagtgttaccttacgcttctagaagcagagccactccagccagaacccattttgcagtcttctcttcgctcttcagcctgaaggtccagatgtagctggggcctctcagtttggttctatacacagggcactcgtaggtctgtttggtttcttgtctgtccacgggggtggcttttgcaaagatgaccggcatagggcatgccagctccttgagacgggcttcaacaatggttcctgcttgggtgtcccagcgggcgcctatggcaaaaacacagcggttgcaattgtgtggcagcttgctactaatgataatgatcaagttgtttgatgcaataaacattcaacattctggttttgtcat

SEQ ID NO: 244846 - DNA, 481 bp, Homo sapiens
ccttgtacacactgttccagccatggaagaatccttccattcttccaacaagccaaacttttgtttttatctcagggtctttgttcttgctgtcccctcagcctggctggttccttcttgtcatgcagttctcattataaacatcgtttctccagaagcatcgtttatcattctatataaagccatctctccctacacatacacagatgtgcatgcacacacatgcacacgttactctcaatcccattaccctgttcttttctttttgctgtacttcatcattctctgaaattaccatgtgtttacatgttacatagactttctgtgaaaacaacagctacagatctaaaccaatcttgagtgagtgactcaaaaatcacaagcatcgctgtcactgatgatgtggttttctgaaatggagaacaactcttagtaaaggtccaaacaaaacaaactacaagtgtctctccattcttcatag

SEQ ID NO: 244847 - DNA, 394 bp, Homo sapiens
ggcttgcggatcttagaagagtggatctgacccggtttgtgaggaggcggctggggaggtcgtgtgggagggagggcattctaggcaggggggaaagcccgtttgagagatgggaacctgaacacattccggtcgaaagggaaggtgtagtttctggtgcatgaaaagaggcagagttgtggggcagggactgatttcatggggcttatgatccccaacgtgttagaggagatactgaaggacggaaaggatgagcagccaaagagaggaaggagacccatgagtgctgctagtcaaaggaatagagagtgagcagatgcagcagtcaagtccggttatactggacttggatgtgatgcccactggatttggatgtgagctatttgtaagagtt

SEQ ID NO: 244848 - DNA, 490 bp, Homo sapiens
acgagtgccgcaatcttcagggtattgacgcccacccgggtcctccgcagccaagagcaagggactgcggaaggagtgccgcaatcttcagggtattgacgcccacccgggtcctccgcagcctagagcagggaactgcggaaagagtgccacaatcctcagggtattgacgcccacccaagtcctccgcagccttccgcaggggagatacgcagctaggtctcagtgcgcagcttcagcatccctacaatccgcagggtactgatgcccaccaaggtcctccgcagccgtcagcagggtagcgacacccagccaggtctcagcgcatggcttcaggagtgcctcaattcacagggtactgacggtcacccaggtcttctactgctgtatgcagggtcgggacacccagctacgtctcggttcgcgacttcagccgcaacatgatccgcgtagtaaggacgcctgcccgcccaggtcttccatgtaccgc

SEQ ID NO: 244849 - DNA, 472 bp, Homo sapiens
cagtaaaattatgaccaacttacagtcctaggagatggattgcagaaatctttaagaccatccataagaaatggctttcaaacttatttgaaatcaatttgacatcacaacccacttttcatacatgtataaactgaaattggtttcacaaagtattatttcccttataacatgctacatattttcccttctattaaaaaagttggctgtcacccatgaagtttgttaccagttggtcatgactagaggttaaaaagcactgatcaattgctttaatcttaaaaaaaaaaaaaaaaaaggcaacataacacagttgctaagagtactaactttgaagtaggactgcccaggttcaaatcctgacaccgctacttggctatgaagcccaagtcctaggtcatgtcactaactttggtgcttcagtttccccctccagaaatcaagagaaaccttctaataaaactttgttatc

SEQ ID NO: 244850 - DNA, 1325 bp, Homo sapiens
  misc_feature (1)..(1): n is a, c, g, or t
  misc_feature (15)..(16): n is a, c, g, or t
nccttgttggaactnnggatccagattgctgcctactatgtgaaagttaatataaactggaggaatcgagcccagccattgagagtccaattaggagctactacaatgatgacggtcgctacaaaataaaaagaactcaaaagagggagcaacaaattcagctgaagtatggggaaacaaaaaagcctcagagaagtcatgttgcagctcaatactgaaagataagaagcagtctagacaagtaaagcaaggaaatttgtacagaagaccatatgaatagcatgtttggagaacttcaagtagttcttcatgatgagtcttgaatgaggtgaattatagctagaaaggcagattgagaaaaaaacagtaaagaatattttacaagaagagaaagtaaacacctcctggacactaaggaatacttttaagcaaggtgcttacatgaccagggttacattttagaaagattcttccaaaatcagttagcctaaaaacaaatataagaagtctagccacctaaacaagcatcgtgcttcccaataaatacactgtctcaaagtcctaatctagtaacttaccttgacaaccaaatacagtacaaccaagtactcttaagtttcagagaccaagcaactaggaccaagttcaggtcacactatagttgactagctattaaaacaacaaaaaaagggaggagtcaccatagaaaaaacgctaaaaacgtgaaaaatgcagtggtgtcaggagataagaagagtcaagtacagaatactcttcttgattacactcagaaatgggctaataacagagaaactgttttattccagtgtaagaatacttccactttttgccagttacacagagatgcaccccttatatgtaataatgaattatggttcctgacaagcagctcaaccaccaaatttaatttaatacacaatacttcaaccaaagattagattagaaacagcaaagtacaacagcactgtggtgtgcaacagctatacactagttaggttcccacagcttaaaactctctaacaagctttagagcagggtgggggaggacttactattttgcagaggttcctattcaatgaactggaaaagttcttaattcaaacatgacaagtgacatactgaagaattcaactgttttaagaagatgaatcctacctttccagggtcatccttagatcgaggcactttaaggaaacatttgttcaatgacagattatgtcgtatggaattctggaattaaagaagaaaagccataaggtcaataaaatccaaaaacataacccaaatttaaaaacagaattaga

SEQ ID NO: 244851 - DNA, 390 bp, Homo sapiens
tgctatcctattaaatgttgtggcttttaaccttttattctacgagcctcatttgtcctgtgttctcctcttcctcagagccaggctattttgagttatgctgttagccttaaaggggaacagaattgtcctggcacttgaggcttgtgaagctaacagatcacagatttttaaaatgactaattattataaaatacttagttttgcctcagaataatgaccttggtccaggtgttttgatttgtttctttagttgttaactgggaaccaagtaccagactttatatttaggcctggctgtaggcaaggggattaattagtcaatacttgttgagtagtttatggatcaaagatagtacaagtgtgttgtagtgaaacactacaaagcag

SEQ ID NO: 244852 - DNA, 421 bp, Homo sapiens
ctgggttcaagggattctcctgcctcagtctcctgagtagctgggactacagatgtacgccaccacgtccagctgatttttgtatttttttggtagagtcggggtttcaccgtgttggtcaggttggtcttgaactcctgacctcaaatgatctgcccacctcagctccgaaagtgctgggattacagatgtgagccaccgcacctggcctaagatttgtaatttaatatagattattgcaggtgtagattttgcagcttgtctttgcaaatatgattcacaccttccctttcactatagggtacattgtgggcctgtgggtagtgtgaaatggtaaaataatggacagattgagtgagataaggatccctattcatgaaacaaactggtccaatcaactacagttagagtaaaatgaagt

SEQ ID NO: 244853 - DNA, 559 bp, Homo sapiens
agagactttgtttcttaaaaagaaagaattaaccataggaggatttctctgaaaggtttttcatcaaattagaagagagcaaaacctttgtcccgtagaattaagttgacttgtacaatctgaaaagagatcagcatcttaatacattgccaaaaaaaaaaaaaaatcacacaattggagtgagttaagatttattctgaatgaacaataaagaattatgcttattatttttgggctttctgcatgtaggttaaaaaaataggttgccagtttgaatgttttttcatttttcacacctgtaatcccagcactttgggaggccaaggtgggcagatcacttgaggccaggagttcaagaccagccaggccaacatagcaaaaccctgtctctattgaaaatacaaaaaaattagctgggcatggtggtgcagacctgtaataccagctacttgagaggctgagacaggagaatcacttgaacccagaaggcagaggttgcagtgagccaagattgtgccactgcactccagtctgggagacagagccagactctatctca

SEQ ID NO: 244854 - DNA, 371 bp, Homo sapiens
tggtgatgattgtgccatttatcatttgtagtagaaacagcagtttgtgctgatcagtgactttgaaaccttcttaagataagcaagttttaatggcttacctcaagtaacaggagcacttgcttcttgtcagcatctatcacagtgactcattttatggagtcaaaatagcttataattgttaccacaagagtccagtcgttcctgccatttcttaaaaattaatggagaagtcgtgccgattttgtggccatggctacagatttttagctccatgcctgctcagtaagccattattatgtggttaccgttttgtcctcaaggaattttcctgttgctaaatcacgcatacttgaagaattcattatttt

SEQ ID NO: 244855 - DNA, 280 bp, Homo sapiens
tcaaaaaaaaaaaaaaaaaggcttgttttgttgttgacagccatgtctaaaaagaatatacgtttcctacctttgagtcttaaattcttcagtattaaatcactggcctctagtcttcagtccctgtggcttttataatttgttttaaaaattgatgactggttggcatggtggctcatgcccgtaatcccagcactttgggaggccaatataggcggattgcttgagcccagaagttcgagaccagtctgggcaacatggcaaaacctggtctctaccc

SEQ ID NO: 244856 - DNA, 413 bp, Homo sapiens
cagagcaagatgctatctcaaaaaaaaaaaaaaaaaaaacctgttattgaaataattcacataccatacaattcactcattcaaagtaaacagttgaatggtttttagtatattctgagaattgtacaaccatcaccacatttaccatactcatgacagtacagaaataaacacatgcatctatggtcaactgattttcaacaagggtgtcaagaccattcaatagagaaagaatagtgttttcaatagatgctactgggacaactgaatatccatatggaaaagaatgtggtttggacccctacctcacaccacatacaaaaattaattccaaatggatcaaagacctaaatataagaactaaaactttgatctgcagtagctggaggaaaaaaaaaagagagaaatattta

SEQ ID NO: 244857 - DNA, 279 bp, Homo sapiens
tgacaaatgatgttaacagtttcattttgggtgtttaatagcagtacagaagatttcactaacgttacaggaaattgccctgataaagtcccactaccaaccctgttggtatctgttattatttctgagtgtcaacataggtgtttcaggatgtagtggggtccacaatagtggggagtaaatatcaagttgctttacttttaagaggacattattattttaacccacacatctaaaaatcctgtctggttctcacatgttgtgagcattctctaagcc

SEQ ID NO: 244858 - DNA, 666 bp, Homo sapiens
ctgggagtacaggtgcatgccacccctgccagataacttttgcatttttatagagatgaggatttactgtgttgcccaggctggtctggaactcctggactcaagggatcctcctaccttggcctcccaaagtgctgggattacaggcgtgggccactgcacccggccgtaactgtttttctgttttgaaaccaaataccgtatatcatttactaatagcatagatcaaccttaatcaggttaatgaagaaaatggaagaacttgaggcatttttgcctgcattgaggtaggctatatgccaaaatttcttgaataatttagtccaaataccatttaaatataagtaaataactgaagacaaaatctgaggccttcctaaagtcaacttttctagttaaaaaaaaaaagctaggaattaggagacctagtccttcgattaattccttgtataacttggcagaccactgtttctggtgttcagtttactcagcaggaaaatggagataataataactaactgccccactcctgaggctgctccaaggagaaactgaagtgctctgaaaagtcacagccaccagtgggtggtagtggtgatttatgtcttcatcgaatgggttaaaatgaatctctgctgaatgtgagtgaaatatagaatcttgttt

SEQ ID NO: 244859 - DNA, 413 bp, Homo sapiens
ttacaggagagaaacctgaaagcaacttaaccaagtgatcacagaatcactggtaataactcttgttgatatcatgtgcccccaatacagtatgatgaaaagacccatcatctcggtgatatttatcctcaaaatctataatcttacaacaattatgagaaaatatagacaaacccaatttgaaaggaagcaagtctacaagatacttaaccagtactttacaaaagtgacaaggtcacaaaagacagcacaagactgagaaactcacagattggaggaagccaaagagacatcatggctgagatcatggtggtggaaccctggtttggatcctggaacagaaaaaaagaacactaagtggaaaaactgatgaaatataaataacataataaaaatctataatttaaataatg

SEQ ID NO: 244860 - DNA, 585 bp, Homo sapiens
caagaccagactgggcaacaaagtgagaccccgtctatattataaaataaaaaaatagttcagaggagaggtctgggctagagatggaaatgtagaagttagtaaatttaaagctgttgaactagaggagatagctgaggaagtgcattcaaatagagaagatgtcagaggagaactttggggttctctcagtggttagagataggatatgaggaaaaacagtgcaggagactaaggaggagctctcattgagttaggaaaatcaagagggatgccctggaagccaaatgaaggcagtgttttgaggaagaggggtgatgggccatgtgaaagccaataggtcacatgctgctaatgggtcaactaaagtgaggactgagaagtattcaccaatttagcaatgtggagctcattggtgaccctcataagagctgtgttggtggaatggaggaggtaaaatcctggagggagagaacataagaatgagagaacagttgacagtgcatgtaaacaactctttcacggaactttgtatttctgaatttttgtttatttggctattaataaaatcatatctgatataaa

SEQ ID NO: 244861 - DNA, 374 bp, Homo sapiens
ggttgggcaaattattacaggggtgcctgtggctgagatctagtttccccattttttctgtcgataacatttttatcataaacctggagcaatctgagcagtatcttttgcttaatcatcatcagaaagaatactttaacatctcttttctgaaattaaggccaccgtatttgacagatgccttcctacaattaaatgaatcatatttttgagcaatagtttttaattttccattgtacaaaatggctgctttatagcttttcttcttaaacttcctacatgacaccatccgacctccatccctcttcagctgatgatcatgcctcatttttatggagaaagtaaaagaacttgttcatctttccataatcaac

SEQ ID NO: 244862 - DNA, 407 bp, Homo sapiens
actcccaaactcaggtgatccgcctgcctcagcctcccaaagggctgcgattacaggcatgagctactgggaaggttttctagtttgggttgaaaactagaaataagtaaataatttaggcaaacaataaatatagtactttacaaaatatttgaaaagttcattgttcttaggtcctttcttgcttcctttgcaactttctaattctatatttttgctttatcttggttttatctaccaatctagaagaatatcaaagtttaggaaaatggagcatctcatgagcagtatattacttttcttcttactgtaaaatataggtgttggaatttttttttttttttggagacaggattttgcattccagcctgggtgacaagagccggactctgtctcaaaaaaaaaaa

SEQ ID NO: 244863 - DNA, 283 bp, Homo sapiens
caaaagggccttgaggctttgatccttgcctcttcctacctttgtagccttgtgattgtgtcactggtaggacatgacatcctgtcatccttgataatacgctttaaaattaccccaccagtactgggttttcttttgggatgatgaaatattttggaactagggagaggttgtggttgtacaacattgtgaatgttctaaatgccgctgaattgttcactttaagatggttaatgttatgttatgtgaatttcacctcattaaaaaaattaccacaccagtg

SEQ ID NO: 244864 - DNA, 909 bp, Homo sapiens
actcaatcaggtttttttgagtggtgaactgaatcatgttgggttatcagccgttgagtgtcgttccttttgctatttgttcgttgtggtacagggtctccgtctgtctttaaaaaaaaaaaaaaaatgatcctctgcctgcattagcctcccagttggctaggactacaggtgctcactaccacacccagctcacttttttattttttgtagagacagggtcctgctatgttttccaggctgggctcaaactcatcttcccaccttgacctcccaaactgctgtaataacaggtatgagccaccgtgcctggccccattttgtttatttgagtcttctctcttttctttttttgtttttgtttttgtttttgagacagagttcatccagcctgggtgacagcgtgagaatccatctcaaaagaaaaaaaaagagtccatttcatttagcttttcaaaaaccaattttgttggtcttttctatttattgtctagtctctaatcatttatttctgctctgatctttgttatttccttccttctgctagctttgggcttagtttgttcttcttctagttctttgaggtgttacatttgtttttttgataacttttttcattttgaaggtagacattttttgctataaactttactcttagaactactttcactgtattgcataagttttggtatgttttgttttcatttttgtctcaagactttttaaaatttcccctttaatttattatttgacttaaagaataggtagaatgttctttatatgtcagttaggtttatttggtctgaagtagagttcaagtacaatgcttccttattgattatctgtctgaatgatctgtctgttgttggaattgagatattaaaatcccctactattatagcgttcctc

SEQ ID NO: 244865 - DNA, 889 bp, Homo sapiens
atcaattgtaatgtctcctcttccacttttattttcttttttgtcacccaggctggagtggagtgatgtgacacaacgcactgtaacctcagactcctaggctcaagtgatcctctgcctgcattagcctcccagttggctaggactacaggtgctcactaccacacccagctcacttttttattttttgtagagacagggtcctgctatgttttccaggctgggctcaaactcatcttcccaccttgacctcccaaactgctgtaataacaggtatgagccaccgtgcctggccccattttgtttatttgagtcttctctcttttctttttttgtttttgtttttgtttttgagacagagttcatccagcctgggtgacagcgtgagaatccatctcaaaagaaaaaaaaagagtccatttcatttagcttttcaaaaaccaattttgttggtcttttctatttattgtctagtctctaatcatttatttctgctctgatctttgttatttccttccttctgctagctttgggcttagtttgttcttcttctagttctttgaggtgttacatttgtttttttgataacttttttcattttgaaggtagacattttttgctataaactttactcttagaactactttcactgtattgcataagttttggtatgttttgttttcatttttgtctcaagactttttaaaatttcccctttaatttattatttgacttaaagaataggtagaatgttctttatatgtcagttaggtttatttggtctgaagtagagttcaagtacaatgcttccttattgattatctgtctgaatgatctgtctgttgttggaattgagatattaaaatcccctactattatagcgttcctc

SEQ ID NO: 244866 - DNA, 352 bp, Homo sapiens
ctgttccttaaagccaagaactgtagagtcattcattttccccctacacctagcccagctctggactcaaaggagacagccatgaagatgatgaaatcacaacccctctcagatcctcaataccacatctccatgggagcactgatattttcgattaccagcacctggaaatacaatcgttctcaaggaggattgattgacagatttagcaaataaaaatacaaattgactgggtatggtggttcacgcctgtaatcccagcactttgggaggccgaggcaggtggatcatttgaggtcaagggtttgatgccattctggccaacatggtattttagtctctactaaaaata

SEQ ID NO: 244867 - DNA, 188 bp, Homo sapiens
tctttaaaaaatacaacggaggtggtacatgattgggattagtcacatagatgccaagtaatttagacccaaaggcaaattctgcttctgccgtgaggagctgcgtgactaaggccagttactgaacctcaaccacgcaacaaatgttttttgctcacgcctataatcccagctactcggcaggctga

SEQ ID NO: 244868 - DNA, 321 bp, Homo sapiens
ctatgatacattgggctgagatggaggaaactgcaagtagttaagacagaaaaatcaaaaggatagtctcaaataatctcagtacgcatgtcaggaaaacaactagagcccacagatgggatccctggactaatgaattccctggatgaattttggagcaaagactttaagccaaagaaaaggttgagatggcagttcagagtctgcagggagcctttgcaataggcaaatataaaaattaatttgacacttttcccacatcaatttatttcaaaatacccacattcacatagatttgggtcatatcagtagttttacttt

SEQ ID NO: 244869 - DNA, 415 bp, Homo sapiens
aaatattctctgtatgtggtccagcgtggcagcagctaatgggctactgagcacttgaacaggcgtgtaaatttttaaaatttaataaataggcagaagctactattactaggcagcataggtctataaagcatagtacatagctttcacttcccactgcagtcgtggaggttgaattccatgagacttttatgctagcaaatgtggatttacaattaccttttaattcctcttaggccgttggattcttgccagaagcttcctggagataattttaactagtaccttattgaagaaaagttgtcctagctaatgaaagaatgcagctcagcatcttgaagacggggcaagccttcctcatctccccacatcccatagtttcttatacccactgaattaaactgaaaaatgaaga

SEQ ID NO: 244870 - DNA, 545 bp, Homo sapiens
caggatttccataagaacaaatgagttagcgtgtgcaaaacatttaaaacagtgtctggtgtgtagcaagcaaatatgagtattagtcttttccttgttaaaatgtgtgcatctacatgtggtgcacattacaggaagtgtatagtatggattcatattttggaaaagtaattttagaagttatttctgaagtgcttattataatagtgtttcttgaccacatgcttttaaataatgtgaaggcaatgaagtaggcaatattgcttgcacatccccaatttaaacacctgtctgtccctccttccctctctccgttcttttcttcctttccctctctctttattccttccttcattcccttcaaggttgcggattattctattatataaatgtatcaatttattagaatagtttctatgatgtctatgataggttttaaattgtttgcaatagtttgccattataaataatgcccagtagcgctgtggtctgatttaacttgtgaaggtatatttccaaataaatcgctatgattggaaagttgt

SEQ ID NO: 244871 - DNA, 358 bp, Homo sapiens
acattttccagctctataaatactatgttttcttcctcttaagattccacatttccaaaaaccccaaaaacacccaggcaaaggaaactccatcaaaagcacattacgtcttagcactagtcagtcagtgcctgcaccccacaaaccaacgtgcaaaacctgggcgtatgacccagcagtcgtgctccaccactgactgctggaaaaaccagtctcttcaaataggcaatgcagaataagacaaaaataaaataaaataaaatgaaaccttctctgtattgttgttaactgcagtctttattttacacaataacagtgtatttctgatgccttaaagcagttgctatacggatcaaca

SEQ ID NO: 244872 - DNA, 397 bp, Homo sapiens
cacacacacacacacacacacacaactgtcaaacatcctgtcatcacctcaagtttaacatgactgaaacagactttaagaactaggtatgggctgaacacggtggctcacacctgtaatcccagcacgttgggagggttgacgcaggcagatcacttgaggccaggagttcaagaccagcctggccaacatagagaaaacctgtctctactaaaaatataaaaattaaccaggcagggtagcatgcacctgtagtcccacctacttgggaggctgagacaggagaatagcttgaacccgggacgtggaggctgcagagatcatgagatcttggctgcatgagctaagatcatgccactgcactccagccaggaagacagagtaagactctgtctca

SEQ ID NO: 244873 - DNA, 460 bp, Homo sapiens
tggtgtggttgtgcctgttgttaaacgtttaaaaatagttctatactggttttcaaatagcttcctgccccagcctgcccccagtgttctggcccctcccagggtctccagatctgcccatggcccagcaactaaagggtttacacctggtgcagcaggtggacgggcggcctctgcactgggggctgcagctgttccaagcagcggaggctcaggccagagcagccgctagagatttaggtcctcctcttgggtgaagagggagagaaaatgaaagcatggggagcttctcattttcacacataaagactgaatttctttataaatatttcctatcattattagtataggtaatattgatttcaaattagtctctttttttaaaatacaaagaactgtattttatccaggttagagctgtaatacatgtgtattattaaacattcaaatgaaacagaaa

SEQ ID NO: 244874 - DNA, 522 bp, Homo sapiens
aactatactcttcatctattcaacaattaacaaaaagacaactctctattcagacttgtcagaagtgcagcaatgactaagaagaatatcaaagaaacagagagtgttaaaggaactcgagagaaatgcctccatcttactatatatgtatctatatggtagaattaaccagcatatgaagctgtgattctagaagtctgtgaatggtgatggaagatcatatcaaaaacaaaaatactattgactcctctagaaggatccagttggcaaactaaaggatatttctcttcctggcagacatagatcttttttagaattaaaaaaaaaacattatgaacatgtacagttaacattcctctgatggctgagtaaagtagaataaatttggatgaaaattactatctttctccaaatgtgcacaagcacaggagaaaaaaaatccagatgttcatgtgaaatggcaatcgcacaaaaccagtgtggtgtgaaatcaaagaagccgagatggattcggcgaacaat

SEQ ID NO: 244875 - DNA, 345 bp, Homo sapiens
tctgcgaatatgatttgaataggaaagaatgggcagatacaagacatattgtgaggggaatctgaggtttgagtaaaagatttcttgccatcctaaaggaaaagagttgagatgaaggaatgagtcataaaattaatatgaagatttttacatctacagtcttaagagtaatcggattttcaaaatttgaccaaaatataagcctcttcagccatcagaaggacactgtcttctgtagaaattgtagatctagtaccttctctgggctgctccttgcctaggtgggtcaggcatctcaaatgaatcttttgtatttaataaaagttatctatgcaactggtacaa

SEQ ID NO: 244876 - DNA, 233 bp, Homo sapiens
tctagattctggaagagtataccagccccttcctctactcagcactgagtgatgccagcattttaatcagttgactttatccagaggctttggaagaggcagtctactgataatgattttacctgcatgaaaatgttaaaagcaactcacgttcaaaatatgcttcttaggatcaggaaagcacctctgtagaagatgaagactgactagaaggacaggaccagggaatttgt

SEQ ID NO: 244877 - DNA, 197 bp, Homo sapiens
aggatcagtcgctattgagtgttttcactcttgagtgcatgcctaatagttttggattgtattgtaaactcggtgaatgatacattttagagactctcgattctgttatgttcctccaaaaagtactgattttttttttttttaaagaagacagttaacatggctagaattaaactctcaattcctccctgccccca

SEQ ID NO: 244878 - DNA, 572 bp, Homo sapiens
tttttttccttatcactttttggacctcaagtgcagagtaattttttttcattgaaacacattgcatgtattatttaatacaatttgccttttctttctgaaacaaatcagatttggacctaagtactcatcaatttctgcaaacaactggtccactacctccctgagaaatttgcctgatcctaaggttggtttaggtgttattctctggttctattgttattataatttgagtaactacttatgtgggtttattgcccattaacctgttgggacctcaagagaaggacatgtttcttgttcgctttgagtctccagcattgactcagaggaagtctcaataaagatttaggtatgaacgagaagaaaattactcagatgcactttgacctgactctcaagatccccgagcaacataagccactcaaccagtgccatctccttctatgtaaaacccagtcagcataatccaggtaaccttacttactatatggtttctctagagcctattgaaatgttaaaataggcctgcagacctttattactgtcggtcagttttttaggaatctatg

SEQ ID NO: 244879 - DNA, 358 bp, Homo sapiens
tttttaaactttcttattgaagtatggcttatatacacaaaggtacaggccaggtaggccaggtgtagtggttaatgcctgtaatctcaacaccttcggaggccaaggcaggaggatcatttgatcccaggaattaaaccagcccggccaacatagcgagaacctgtctctacaaaaaaaaaaaaaaaaaaacctaaaaaaatcacccgtggtggcacacacctatagtcctggctacttgggaagctaagatgggagaatcgcttgagcccaagaggtcgcagctgcagtgagccatgttgttgccactggactccagcctgggcaacagagtgagctcctatctaaaaaaaaaaaa

SEQ ID NO: 244880 - DNA, 521 bp, Homo sapiens
agcggggaacaatcacttaaacttattatgacaagtcaacttgccttggggcaaatctcagaataaagcttctcttgtttaactgagaagtactgtaagacttgtaaggagaactattttcatatggtcataattaaatactcgtgaggaagaggagctttcttattacttggcaaaaaggaaaacaaaaggatatggagcctaaagagactaatgcaacataaagctggacttcaaattactgtgttcatcaaagcactctattattctcaactactaactcacaaaaatgccatacacttaaaatcattttaaaagcctacaaaataggccaggcacggtggctcatgcctgtaatcccagcattttaggaggccaacacgggcagatggcttgagcccaggggtttgatgaacacagtaatttgaagcggggaacaatcacttagttcaagtgattgttcaagtgattgttcaagtgattgttcaagtgattgtcagtgattgttgcaagtgattgtt

SEQ ID NO: 244881 - DNA, 1044 bp, Homo sapiens
agcggggaacaatcacttaaacttattatgacaagtcaacttgccttggggcaaatctcagaataaagcttctcttgtttaactgagaagtactgtaagacttgtaaggagaactattttcatatggtcataattaaatactcgtgaggaagaggagctttcttattacttggcaaaaaggaaaacaaaaggatatggagcctaaagagactaatgcaacataaagctggacttcaaattactgtgttcatcaaagcactctattattctcaactactaactcacaaaaatgccatacacttaaaatcattttaaaagcctacaaaataggccaggcacggtggctcatgcctgtaatcccagcattttaggaggccaacacgggcagatggcttgagcccaggggtttgagaccagcttgggcaacatgggtaaaccctgtggccagaaaaaatacaaaaattacccaggcatggtggtgtgtgcctgtagtcccagctactggggaggctgaggagggaaggtgccttgagcccaggaagcagaggttgcagtgaaccgagatcgtgccactgcactctagcttgggcgacagagggagactatgtctccaaaacctacctaaactataaaatactaattctgcctgaagattctactgctcaaatgtaaagactagtgtttctggacatggcacacagcctcaagtccaaacctggtccagctaagagggacgagggtgagatggggaataaaagccattattagtgcagtcatccacacagctgtagggagtccaactttgaagtctggaagagtactgtaaaagaccccttgctagaaaattggagcttgctggtcaaagttgctgcacaccctgcaccatctatcctgaagactgtaccattctacataagagattggccatttctggtgagataagatcacttccatgttttagatgaaactcaatgcttacagtgtgtgcttccattcccatctctgacttgagttattctaacattgaagtgattgttccccgct

SEQ ID NO: 244882 - DNA, 722 bp, Homo sapiens
ctgcaccatctatcctgaagactgtaccattctacataagagattggccatttctggtgagataagatcacttccatgttttagatgaaactcaatgcttacagtgtgtgcttccattcccatctctgacttgagttattctaaaactttcaacttcctgatgagtttaggcaagaaatggcttggtgtgccaggggcagttctaatgtaagttacaaacatttatgccttgcccatgtgctagtcctgatgctggcctcaggcacacaacgctgggaaatgttcaggctctgccttcaaggatcttgaaatccatctatggagctaacagaggtgttgctaaccccttctacacacatggacccctctagattcttactcacactcagccagctaccgtggcctgtgctcccaagagcaaatgatgcggactcaggttagatcaagggagagccccacagtcactggctgccttcttctgccctgctctcctcgtccagccgccttcagcctagttcttcctctacaatgcactgtaattcccttcccgatttcctacatcctcacgtgaatcccaaatttaactctctgagggaagacgctcgctatttagtgtactcagacaaaagcaggggggaaaataaagtggggatagttttaacttcatttataatcactttggcttcagttttttaatctgtcaaaaggaagggctgcattac

SEQ ID NO: 244883 - DNA, 485 bp, Homo sapiens
caactctataaaaccaaatggatgaatctcaaaaacataatgttgagtgaaaagacccagatacagaagagtatacaatgcacaatctcatttatataaattaccagaaaatcaaaacaagttatgctgttagaaatcgggatagtggtgacccttggtataggtgagtgctaagagtgacttgaggccgagcgcggtggtcacgcctgtaatcccagcactttgggaggccgaggcgggtgcatcacaaggtcaggagatcgagaccatcctggctaacacggtgaaaccctgtctctactaaaaatgaaaataaaataaaacaaaataaatagccgggcgtggtggtgggcacctgtagtcccagctactcaggaggctgaggcagaatggcgtgaacccgggagacggagcttgcagtgagccgagattgcgccactgcactccagcctgggcgacagagccagactccgtctcaaaaaaaa

SEQ ID NO: 244884 - DNA, 377 bp, Homo sapiens
ctttgcattctgtttatgaagcaaatataacattggtgccaaaatctgacaaagtttgcacataaaaaagaaagaaaatcccagatcactcttatgtattaatatgaatttaaaaatccaaaataaaatgttattagacatatgctgggattacagccataagccaccacgcccggccgagaaagctattttaaaatgtcaaaaagcacaatcccagaaggttccaaaggataattttataaaatcttcaaaacatggggaattgcaaacatagataaaacagaaaatttcagagcacaggaaaaggaaaactttgcattctgtttatgaagcaaatataacattggtgccaaaatctgacaaagtttgcacataaa

SEQ ID NO: 244885 - DNA, 361 bp, Homo sapiens
tttcagtaattataaaattattaacatcaactttcagttatctttagacttcaaaggtagaatttaacctttaactctgtcccaatctgtcatgtaaacaacctaaattaactaccctttgagatcaaaaattaatatcttacaagggtttactcagagtatgctaattctttgaagcttcctgaaaaccaaattcaaattcaagacaattaaatgttaataaatttctagtgatcagagagacaaatataaggaagattaatattctttctccatgctttggagacaggctctcaaagtgatcaaataaaatgttacctttgaaagtgacaccttacattacagtgcttggatgtccttc

SEQ ID NO: 244886 - DNA, 463 bp, Homo sapiens
ttcatttttaaaactcttgtggctcctccattgcttatggattaaaattcaaacagctgaacctggtgtatacaaccacgcaaaatctggcaccagtttaccttacttgctactgcttctcaattttccttccaagattctgaaatttggcaacccagttccttgtcaattccaaacatattagactattaggctccacaccttgtgattattatttccgctgcttcttttgaagacttctcatgttctcactaaatttaacattcctttttcaatatttccacagtactccgtttcacacttggaggaaaaattttttaagtattataagtatttacttgtatgtttatttccatgactagattaagaggtatttagatcctattcaactttgtgatcctgccacacttgtaagaacagtgccaggtaaacatgtgtataataaatgttgaatgaataaata

SEQ ID NO: 244887 - DNA, 322 bp, Homo sapiens
aagtaatctcatatcagatgtattttgtgaaggttttgtgccttacccaaggcttgcaagaaacaggacttacacccaggcacactcagcaaacattgcttctgtcaagctgaattagctccaaaaaattagtaggcaccaggctgactgcagacctactctccattccaatttttaaaatgttagggggagaaagagtgtgtgtgtgtatttatattgttgagcagggataaaaatatcagaggaatatgtaccatatgtattttagaggttgtcatttctatattatgaatttcaataatagttgaatttcgtgtcatga

SEQ ID NO: 244888 - DNA, 452 bp, Homo sapiens
tgttaaattcaaacaccctgggtttggtttttgctggtgggggtggagtggagttcctggagaagcaaagcagtcctaaatcaccgagttgatgggtcttttgggtgttcccaccagtccttactgatctctacaaaatcccaagttaccaagctcttcaacaaatagaagacagctgtcaaacaccatgggctacagatacaacgggcatattcagccatctttcagaagagtgataacaaatgacttaatttggaagattcactcaagatccaatttgattcatcgcggacatgcctgcacctaagttcctggggccaaagtgaggaggcagcagttctccacccaatcagaccatcatcctctttttgtaactagtatctttaacactccccttactatcctgaaaggtaatttgtggataatattacctaccaatacaaatttcaaaa

SEQ ID NO: 244889 - DNA, 324 bp, Homo sapiens
caaggtcttccttgaggtatttttacttcaaagccacgttggtcaggttaattagcccaattgattgcttacaaattttctttatccgtttaaaaatcagaatcaggcgtgagccaccgccccggtatgatacccctcaccttccctgatctgatctttgggaattatgctttagtgaattaacaggtggaagcacagttctgactttgtttctgaattggaggaagaactgcatttactggagcaaaatgttcttagaatgccccaccccctccggccttcttcctctgccctcctccagccagagtcagcagccactccttc

SEQ ID NO: 244890 - DNA, 394 bp, Homo sapiens
agtgtgtcaggcaatctggactttccagtgatgccacttagatggcacctgtcaaaagagcagtggttccatttctagattgtggatcttcagatacattctgccattttcatttcacttcctgaaagtcagggtcagcttgtgaaaagttgttaaacaacatgctaaatgtgaaatgtcaaccctcacgttaaactttccctgttcagagcatcagatgaagacttcattgggttttatggtggctttctgatttttggtagtccattgaagaagagagtttgaaaattgctgtatactgttaacgattgtctgcccatgtccgcctgaaataccatgattgtttatggaaagtatctctaataaagctggatacagtttggcttggaaaaaa

SEQ ID NO: 244891 - DNA, 442 bp, Homo sapiens
ttttttcccccaggctcctcccttcccttcttttctcccaatccagagtagatctaggaatctgaaatttccaccttggctacaaacagcactgagtctctttgaacagccttgtccataaatcttagattgtttttcatctttgaaaaagttacttctggcccagcacggtggctcatgcctgtaatcccagcactttgggaggcagaggtgggcggatcacctgaggtcaggagttcgagaccagcttgaccaacatggagaaaccccgtctctactaaaaatacaaaattagccaggcgtggtagtgcatgcctgtaatcccagctactcgggaggctgaggcaggagaatcacttgaacccgagaggcggaggtttcggtgaactgagatggcgccattgccctttagcccgggcaacaagagcaaaacaccgtctca

SEQ ID NO: 244892 - DNA, 268 bp, Homo sapiens
agaaaagagcgttgagaaatcagaaacaagtaaaccaacacccagcattgtgtctgcattttggatacaagcaattcacaagtaatgttttcagattccagagcaatccacactcaggaatattttgcagttctgacaaaatgaattgtcttataatgctttcatcattgattctgtgttattcagttcttgctgtacatacctgccttagagacactagattcaagaatgttccaagaaccagatcatcataaataacaaattcata

SEQ ID NO: 244893 - DNA, 516 bp, Homo sapiens
tagttctggggtgttgtggactagattaggaacaatctaggctcctctttaatataagactaagaaacaaacaaacaatacaaaccccgctgtatgatgatagttgatagattgctatatatctttaatatatttattttcagttaaacatagtaatatatgatcttctgttcttcaaagcatttcatagctattatcaatgaatattatttatagggtgtagagaaagaaagatatagatatgttgataccttgcaaattccgaagaacttctctagtactgaactatctcaaaaagggttttccagatgtgaaaaataaatataaatgttgtttttaaggtgctttcatagatttttacttaatcttgagtcatttatttatttctaatttttgtcttgttatcttggggtaaacggaactaactaaaactttctgcaaattttacaaacctctgaaatttgaacatgctagaatatacccaagaatctagtccaaaactaaacgacctgtagt

SEQ ID NO: 244894 - DNA, 674 bp, Homo sapiens
ttgtatgtaagaaaacattgagtcagaagagagcgttagtcatagggctactgaaacacaagctgtctgcctacggaaggctccagagtccctgacgcatatttatatctccacttcactgaagtcacaaggaacaaacacacacctgccatttcccaaatctcataaaacatataaatggatgagaccaaagagaggcatgagattccattcttatggttcacaggaagcacctggcacacagtaactattattaatttctgcactggaggcatcaggaaagccttcacgctatagggggcccttttaagttaagaagttggagagcaagcctcggggaaagcaaagagataacttagtagaatggagcaaccatacgggaacagtgagagtccatggatctccctgggctaagatcatgtatggatttggcaatctggggtggaagccacatgtgctgttattaagtggaaatgtctcgtgaacatgtggaaagtgatgactggaacttcagatgaaagtcaaagctggagataggagattcagaagtcaccccaccaaagaaggaatggttaaagctataagaactaatgataatccccccatactttgctgactctcttttcacactcagcccgcctgcaccccggtgaaataaacagcctcgttgctca

SEQ ID NO: 244895 - DNA, 254 bp, Homo sapiens
ctcagatggggtctaggaaatattgtttgcagactaccagccccagtgccacagagcctttgaaaactagaaactagaggtatccacaggtgctaacaaccagttctggtgaggggtattcgatgaaataaaatgtgtatgtggttggtaggaatgtgaatggattcaactttgtgggaagatgatttggaaatacctataaaaagtttaaatgtcaattgtctttgacccaacaaatctatgtcaagaaattt

SEQ ID NO: 244896 - DNA, 372 bp, Homo sapiens
tctgttgttgtaacccttaaaggaatgatgactaatgctttgaggaaacagcagacgtcagacagcaagcccagaaaaacctgccagcaccaagagggtgtcctcaacaggcgcctgggggacatattattctaactaaagagaccagagcttccccaggaagggaagaggagagaaatgaagaacgtctgtgttcatgtttgccaaaaacaaaagtctgagaaatctctgagagactctacatgggaggtgaaatttaccttttctaagaccattgttgattttccttttacccttgaagtggactgaaatatcactaatggtgagaggaaagctcagaggttctattaaagaatgtgaaataggttaaag

SEQ ID NO: 244897 - DNA, 404 bp, Homo sapiens
tcaccgggccaccgagtgtggaccccgcctcacttgaacgaccaagtctacaccgaccttatatccgccgcacacgcggaacttcccatccctattatctaaatccgcatccccatctcaccggacccgaccccccagctctgacacagaatcccccattcccacagcacattttacaaagaagtgcacaggtgggcctagcagaagattccaaagtctgaccaagcagttacagcaagcaaagaatctttgtcaccatcaatcatgaatctctcccatgatcatggccacatcgtcatacaacgggacaaccatggattggactctaaatgttctcattggttttactaaaatacctattttagcctcagctaaataaataacaaatatcataattttcattt

SEQ ID NO: 244898 - DNA, 395 bp, Homo sapiens
aatcatttgtatatttcttgtgttcattgtggaatcgagcaccatgttgaatgtttgttgattgacaagtgtttcacctttctttcttcctgtcagtttaggttttagccagtgcattattataagccagacaattactggagttactcgaagcaacagaaaatatgctcccaagttcaataagcaaaagcaatagatctaaatgacaagcaacatgtatcaaaagaggccacacattcatctttctgtgtgatcaattttgggcagatgtgatactacttttcttgtaaaacaagcagtgatttttatgttctgcataagggttgtattctatttctacattttgaatgaaggtaggttttacccaagtttagtaatgatagctacgtttattg

SEQ ID NO: 244899 - DNA, 502 bp, Homo sapiens
atgtccacattttagtcttcttatgctataatagaaacactaattgtttttcattctctagggaaatttttgtttcattaactttaaaaaaaaaaagatatacacacatttttaaaaactgatttggataaatgctctcattcttggcttactattaaagtagctcaaatttttaactctttcaaaattgatatatttctgctgtaatttcctagcctaactaataatgcagaaaataagcaaattatttgggaatttatcttggcaatatttgcttaagaactgacgatgccgtaaagccaaatatgagacttttttcctgattattaattttactttaattcaacaaatatttcttgagtggtttttatctacttggcattgttatttttaaatggttttataattatatcccatcttaaattgcttttaaaatattaattatagctttgaataaatttcctttgcatcttctttgttacttaaagaaaagtctttaaaa

SEQ ID NO: 244900 - DNA, 342 bp, Homo sapiens
ccacctgagggcttttgctcttgccatttcctctgccaggcatccatgtggcttatctaaccatgccattcaggtccctgttcagatatcgccaagcaccatccttccctgacctgcttctagagtagcagcccctccctccaccatctctcagccagactctccctcctgccccctggcctactcaggatatgtgtttgtgtgtttatttgttgtctccctcagccttgacagcagtggcatctcatacactatcatgtccatgcctagcacactgcctatcacttggtaagctcacagagaagcttgtttgaagaatgaactcattttggagaagacaaa

SEQ ID NO: 244901 - DNA, 445 bp, Homo sapiens
tagctcaggaaggtctccgttaaacactaagaaactgagatgcaatcagctggcctggaattcaggaaagtgctggttctgaaattgaggacagaaagaacatgtctcggggcgagaagacgtgaacctgccaaccagcctgtgttcttcttccacctgtcctgccacgtgttctgccacgtccatgcctcctgtcccgccaacaccccaggagttggcagattgggaccctactccgtggggaagggaacgctcagtgactgctgccccctgctcgctggcgtccacccgtaatctctcagttgtggtctcaaaggccaaacatgaaccaggattttccattatggttgcaattttggcttgtaattttatcactcgaatctaaatccacttcagaaatgccataaactaattgtcactgaataaactgaaacttttgaggagt

SEQ ID NO: 244902 - DNA, 414 bp, Homo sapiens
cagcataaactattacagctaactattgatcaaagtcctacccaaatataaaaaatatctagaagtatctaagagttctttttttctatttaccttgattaggagataaaagttttatctgttagttgcttttccttttggaattattgtggattttaaaacttaaaacttgcctgcaagtatttatataaacattcaggtatataagccttaatttctaagataatttaacttttgttatgggagggaggtaagagtgtaaattttatatacatgaaggtaagatctgagtgtaaactttacatacatgaagtatgaatggaaggtagaaaaaaagtcccttttcgcatgtaatctctttatcaaagaattttcttttgacactttaccactgaagtatttttgtaagtccta

SEQ ID NO: 244903 - DNA, 777 bp, Homo sapiens
  misc_feature (21)..(21): n is a, c, g, or t
ctcaacgctttatacttccanaatgacacgctttgatctcaacgctttatacttcaagaaaaaagctaagtttaaatgaaccatgtgacctctgataagtcacttgaacttgtgccttggtcaggttcactgtaggtttacatatgtatgtatgttttacacaactcttgtaattgtcatttgaggggttttgtttttgagagttctgcataagaacagaactttattaaggattagagggaagatacaaatattactgcgtttaattgatgtctaatttcatgtggcttagcagcaattaataacctgatttaaggtctttattcagaatgttaatttgcattctctgccgtgtctaatgttcttaataatgaagctaaaattaacccattttatttagtgaattatctatttaattttactttggctagtctggtagctttaagatagctttgccttagcaaggatcaaagtcctacccaaatataaaaaatatctagaagtatctaagagttctttttttctatttaccttgattaggagataaaagttttatctgttagttgcttttccttttggaattattgtggattttaaaacttaaaacttgcctgcaagtatttatataaacattcaggtatataagccttaatttctaagataatttaacttttgttatgggaggggaagccagagtccactttgtcacaattcatttctatgaatagaaaataaacacttattccagttccaagaaaaaacaagagaaaaaaaaac

SEQ ID NO: 244904 - DNA, 852 bp, Homo sapiens
  misc_feature (21)..(21): n is a, c, g, or t
ctcaacgctttatacttccanaatgacacgctttgatctcaacgctttatacttcaagaaaaaagctaagtttaaatgaaccatgtgacctctgataagtcacttgaacttgtgccttggtcaggttcactgtaggtttacatatgtatgtatgttttacacaactcttgtaattgtcatttgaggggttttgtttttgagagttctgcataagaacagaactttattaaggattagagggaagatacaaatattactgcgtttaattgatgtctaatttcatgtggcttagcagcaattaataacctgatttaaggtctttattcagaatgttaatttgcattctctgccgtgtctaatgttcttaataatgaagctaaaattaacccattttatttagtgaattatctatttaattttactttggctagtctggtagctttaagatagctttgccttagcaaggatcaaagtcctacccaaatataaaaaatatctagaagtatctaagagttctttttttctatttaccttgattaggagataaaagttttatctgttagttgcttttccttttggaattattgtggattttaaaacttaaaacttgcctgcaagtatttatataaacattcaggtatataagccttaatttctaagataatttaacttttgttatgggagggaggtaagagtgtaaattttatatacatgaaggtaagatctgagtgtaaactttacatacatgaagtatgaatggaaggtagaaaaaaagtcccttttcgcatgtaatctctttatcaaagaattttcttttgacactttaccactgaagtatttttgtaagtccta

SEQ ID NO: 244905 - DNA, 1326 bp, Homo sapiens
gagttggagtctcgctctgtcaccaggcttgagtgcagtggtgtgatcttggctcactgcaacctctgcctgccgggttcaagcagttctcctgcctcagcctcccaagtagctgggactacaggtgtacgccaccatacccagctaatttttttgtatttttagtagagatggggtttcaccatgttggccaggatggtcttggtctcttgaccttgtgatccgcctgcccgccttggcctcccaaagtgctgggattacaggcgtgagccaccgtgcccggccaagaaggattccttttttaaaagtttacagaacttggagaaacttcagaactaaagactaactgaaaatgatgtcattacactcaaaaaaaatttacaatagggaatcctgttgccacatagtgtggaaaaatcatgtcatatttaaatataccatactctgaaatgtgaggtttttacccagtaggctgacagttttgttgcaacttgctctattttttttttttttttggtccctatagcttctttctagaaaaagaggcaaacgtgccttgaaaagccagagtggctcataataaaaggaatgcgctagatacttcaagaaaaaagctaagtttaaatgaaccatgtgacctctgataagtcacttgaacttgtgccttggtcaggttcactgtaggtttacatatgtatgtatgttttacacaactcttgtaattgtcatttgaggggttttgtttttgagagttctgcataagaacagaactttattaaggattagagggaagatacaaatattactgcgtttaattgatgtctaatttcatgtggcttagcagcaattaataacctgatttaaggtctttattcagaatgttaatttgcattctctgccgtgtctaatgttcttaataatgaagctaaaattaacccattttatttagtgaattatctatttaattttactttggctagtctggtagctttaagatagctttgccttagcaaggatcaaagtcctacccaaatataaaaaatatctagaagtatctaagagttctttttttctatttaccttgattaggagataaaagttttatctgttagttgcttttccttttggaattattgtggattttaaaacttaaaacttgcctgcaagtatttatataaacattcaggtatataagccttaatttctaagataatttaacttttgttatgggaggggaagccagagtccactttgtcacaattcatttctatgaatagaaaataaacacttattccagttccaagaaaaaacaagagaaaaaaaaac

SEQ ID NO: 244906 - DNA, 474 bp, Homo sapiens
ttaaaatgttttatttttaatttttgtggctacatagtagatggatatatttatggggtgtatgagatgttctgatataggtatgcaatgtgtaattatcttgtcatggagaatggggtatccatcttctcagtcatttatcctttgtgttacaaacaatccagttatactcctttagttattttaaaatgtacaattaaattattttgactacagcaccctgttgtgttatcaaatactggatattaataatcacattatgcagcatggggtatctgtccctcaagcgtttattctttgtgattacaaacaatccaattatacttttttagttatttaaaaatgaattaagttattattgactatagtcatcctgttgtgctatcaaatagtagatcttattcattctttccaacttccttttttccccccattaactattcccacttcccctgaagcacccaatacccttct

SEQ ID NO: 244907 - DNA, 427 bp, Homo sapiens
acaatcctttaaaaatgtaaaaatcttcatagttcctaggtcatacaaaatcaggctgtaggccatatttgaccatgggcatcgcttgccagtccctggtatagtctggtcaaatcttcgaaggatcatgtatatttggaagccaccggggaagcaaggagcatctgcaggaaaaactcatgccatatgatggagtcctcattgaccaacgtctgtgctattgaagatgtctgtgcttcttttgaaagaccaaatctctaagcaccagcagctatgcagaggaacctagaaaagatatggatgtcccctttctccccacagcttagtggacatcacttctcagaaacccagacagtggatgaagagaaatcttcaaaatgtacctttaaacatgaatgcaattaaatattttgaacttggctggaaa

SEQ ID NO: 244908 - DNA, 544 bp, Homo sapiens
tttttcatggccctttaagggccactcattaacatgaatgccttatcattcattggaatagaaaactgggaggctttacttttagttacaaaagttaatgtatggaaaatacattaataaaaccggcttagcttcatttttcctactttcttgtgatatttttcttagacttgctattgatacctcagataaatatccagcagtttagagatgtggaaaaaaatatggcagttggaatcagagaggcccaggttccagttcagattctgctttttcccaagactttggaaaagccattttctaaagttgctttctgtgctgtgtgtctataaaatgagaaaaatgagtgattagattcttaataagttgcaactggtattgttgtctaggttgccttctgaattatgtaaatataatgtgcctccattgcatatttatgacaatttataagtgtttaaaaaagaaggggattctagttcattaactgcgaggttttagagtgaactagaatttgaagaatgacaaaactttaagaggttgccaa

SEQ ID NO: 244909 - DNA, 237 bp, Homo sapiens
gattgtgagctaagaggcctgggactttccccctgttgctgccagccaggttgatgaccctgggcaagtctttttccttaccaggtctcagtttcctcagctgtaaaatgagaggttgatctggatcagggatagtaaatgggcctttgttcagttactgactgttgtataacaaaccacccccaaatttagtagccttaataaacatttattagctcctgagtgagtggcttggca

SEQ ID NO: 244910 - DNA, 372 bp, Homo sapiens
atctccatggcaaaattaggagggaaaaacagcatggatgaaagttgcatttattaaataataatcgcgaacgctcacttcatgcctactgtatgctagctgctgttccaagtgttttacaatgaaataaatttttaaaatttttgcacaactctttgagataggcactattgctttcttcattttacagtcaaggaactgaggcacgagaaagttatgaagtttgtccagggtcataaagctagcagatgagggaactagactcaggcagtataactccagctacagtcattacaatgagccacacaacgcagtgggtcaaggaggagccactcacacaaagatcgtcccataagattataaccgtatttt

SEQ ID NO: 244911 - DNA, 456 bp, Homo sapiens
tggccctatactcttaaaataaatgttacagtcatgaaagacaagaaagcattctgaggtactgttccagattaaagaagacaaagaaacatgacaaattcaacacataatcctggattggctcctgaatagaggacattattgtgataatcaggaaaactgtaatggggtctgtggatcagataatactggatcaatgttataataatttcctgattttgatattcatactatagttatgtaggagagtatccacttgttttgagaaaatacacaccgaagttttaaagataatggggcatcatgtcttcaacttattttcaaatggctcagaaatatgaattgaatctgggtaatctgtgggaggatgtatgggagctctgtatactatttctgtaacttctacaaacatcttaagttacttcaaaataaaatttctaaaactgcttcaaagta

SEQ ID NO: 244912 - DNA, 311 bp, Homo sapiens
gagatggaggaacagtgggtagagcagtcagaacgcacagaacacttaacaaataaagtctgccctcttatctgggcatggtttgtggtaccccaaaacaattacaatagtaacaggaatgatcactgatcacagatcaccataatagatataatgataataaaaagattgaaatgttatgaaaattatcaacatgtgacaccgagacacaaagtgagtaaacgctatcagaaaaaatggtgcttatagatttgctcaatgtaaggttgccataaatttcaatttgtaaaaaatgtaaaatctgcaaagtg

SEQ ID NO: 244913 - DNA, 440 bp, Homo sapiens
aaggcctcacagagaagatatttggagagagacccaagggtgtctggaaagcagtattagctagcagtattataggagcatgtgtctagaagagaacaaaggcgtgcagtacctcaggaccctggaacagagagtaggaggtaggggtctagggaggctggtctattgaagccagacccttttctctgagccataggctgtctcagagccaggtcagctgcactgtaccatgaactggcttattggatccagtattctatccaaggttactgagttggtttacattattccagcatttgagacgtggggtaggtagaagtatagttggaaacagattagtaatggattgaagatttttgatgctgaatatcaagtatattgggtatattatactatactattttacatgtctgacactttaataaagttatttcatcata

SEQ ID NO: 244914 - DNA, 642 bp, Homo sapiens
aagagggcagagagtgtattctggaggccctaagtaacactctgtttttaaggggacaattttgatttcactagtctggtagctcagtgatacagaaattgactctattttccaggggtacattctttccccactaaaatattatgaaaataacccaaactttgagtgaagttttggccttcaggaaacaatttccaagtgtgctattgcaataaaaagacactcatattcttaaaggtgtccaaaagaactagttcagtttaaactatgtccctctaacacttccagaaataatgtaaattattgagactaccaaccttcctaataaaccttgaaaagtatccgagaaggttaattaaaatgaggaaggacatggagtaatttccatactgaaacactcacaataaaaaatagagtcttttttttgagacagaggttcattcttgttgcccaggctggagtgcagtggtgtgagccaagctcacaccactgcactctgtcctgggcgacagagcgagactttatctcaaaacaaacaaacaaacaaacaaacaaacaaacaaacaaaacatcaccaggcgtgagctctgggcagagagataataaagctgggtgacagagcaagacactgtctcaaaaaaa

SEQ ID NO: 244915 - DNA, 342 bp, Homo sapiens
  misc_feature (13)..(13): n is a, c, g, or t
  misc_feature (15)..(15): n is a, c, g, or t
ggatccggtaccngntaccgggccctttccacctccgcctccatgttcactcaatttctgctcatcctttaagcttggttcagtggtcaccttctctaggacccctaggctgagtgaggggtcctttcaaggcatcccttaatatgaaacctgcccccatattacccgtttacctgtctgtctcccccacatagacaggactgagttttactcaccgtcacatcctcttcagccctgaacacagaacccagcatattctcagcatattctccagtctcgaaactttggaaaagcacatctgaatacatttaaagataagatctgttccccataagggccatg

SEQ ID NO: 244916 - DNA, 369 bp, Homo sapiens
acagcatgaatttaaaccaaaatgaaaacttacccttaccacctctaccttgcagaatttcattaacaaaaatgatctacaggacttaaaagagaagtgatattactgaaattagcactatatgttgtaggctcttaaaaacatatgtctgctgagatgtggtcaacctgattgtcaggccattgaggaagtaaaggaataacaagaaaagaaagcacagagtgtgggatcatggagaccttggaatttatcccatgtggtattcctccaaggattccacagagtctctagtgacctcaggagtatgtgcagtttgctccaacactgaaaactttaagaatagacaggaatttaagcaaactcacaaga

SEQ ID NO: 244917 - DNA, 427 bp, Homo sapiens
gctctctgtattaaatcccctctgagtatctagtagtttttgttgattggtagaaatagcatggtcaggaatgccaggtactgcagaaagatggaagggatggaaatggaaaatggtcagatctttgagcaatgggggtagagcccagaattccagggcttgagaaggggatttctgccaaaccgatgggtgtataccaattctcatgaaggtcttaatttggacctactttgagactgcatactttttcatatttatcagacagctgggtacagtctgtttttgaagtgctttttcagctttagctgtcctccttttttggttttctgacttttcctcattgatttggagttctttgtatattctagatatgaatcctttatcagttatgtgtgttacaaatacctattctcattccagagctgct

SEQ ID NO: 244918 - DNA, 296 bp, Homo sapiens
cctgctatttgcaagcatctgttaggatggccataaaaggtactttctctgtcctcaagaatcttatagctgttaatagttagaagatagactcctacttcaaaatccttccatgtcatagaaacttccaaatcattgatctcctatcagatacgttaatttcaaatacttttgctaccaggccttttcctggctttacttgctactttttttttttttttttttttttgaggcagaatctcctgagatcgcaccattgcattccagcctggtcaaagaagcgagactctgtctca

SEQ ID NO: 244919 - DNA, 133 bp, Homo sapiens
aaaaaaaaaaaaaaaacccacaaacctaagttcacacacctagaaattccattcacaaaaatttatcatacatgtataactgcacttgtctgcaagagtacaaaattgcttactacaacactgcttacaatat

SEQ ID NO: 244920 - DNA, 776 bp, Homo sapiens
gtttcatcagttattactatctgaaacagtttttgtttgtttactctgctgtaggaacgtaagttccaggagagcacagactgcctttttattaccactgtagatgagtgcctagcacattgtagctacctgtaactcaaaatacctgtattagatatacccgtattataggaactgtggaagtaccaggttaaatattggtcattaacaaaggtgtttgttagggagagagtacctgttataaagtttccagcatctccacataattgccatattttaaaaatgtgtttataatactttgtctgtaatatatttgactttaatgatccatgttcataaatcagttaatatgagacatcttttgaaatgtgacattcaatttttaaatttgaaacttgtaaggtttttttgtttgtttgtttgtttttgagacggagttgtggtctgtctcccaggctgaagtacagtagcatgatctcagcctcccaagtagctgggattgcaggcacccgccaccacgcccggctaatttcttgtatttttttctagagacggttttggccatgttggccaggttggtctagcactcctgacctcaaatgatccacccgcctcagcctcccagagtactgggattacatgtgtgaaccaccatgcttggccttaactttttctattaatataaaaaataaatatgaaatatactcccttactacctaaaataactgaaggattatctttatgactaggaaaaaaactagttttccttctagctt

SEQ ID NO: 244921 - DNA, 970 bp, Homo sapiens
ttttgattttaatgtttaacacaatgaggatcatactgatacctagagttggttctttaataagtctcccattgtaaaaatatgggaaaaaacaaactccctttatcctactatactctcaccacacagaacgcttctgtgaccaaacatggggactgtccctcacacaccaagcaagtgatcatttctacagtggacaccagatgaatgtcctataatttgattcaattttgataatgtctatctggaggtagcatcagatcctacaagtttgagagctcagtcccacaagactgccccccatttgggatatcaatcaaaagtaatacattgtcacctatacctctgactataaaccagggttcccacaaccccctccttgggtttgattagtttgctagagccgcttatagaactcagggaaatacttatctctacctgtttattatgaaagatgttaacaaaagatacagatgaacagccagatggaagagatgtgtagggccaaaggagaaggggcttccatgctctctccaggcatgccatgctccaggaacctccacgtgttcagctatctggaagctctcctgagccctgttttttgtgtttttatggaggcttcattacttgcccatgattgattaaataattggccactgaaggttgaccagttcccatcctgaagctttataggagcctccagccaccagtcatctcattagcatacaagatactcttagcactctggtgattccaacaagggttttaggagctgtgtgtaaagaaaaaggaagaccaaatacttatatcacaatatcatacctatatttttaaaaagagagggctggacgtggtggcttacccctgtaatcctagcactttgggatttgggatgccaaggtgggcagatcacttgaggccaaagttcagtaccagccttggcaacatagaccacatctgtacaaaaaag

SEQ ID NO: 244922 - DNA, 465 bp, Homo sapiens
ttgctctgtcgcccaggctagagtgcagtgccatgatcttggcttactgcaacctctgcctcctgggttcaggcaattctcatgcctcagcctcctgagtagctgggattacaggtgcacaccaccatgcccagctaatttttgtatttttagagacgaggtttcaccatgttggccaaatttgcctcaaacccctgatctcaagtgatctgcctgccttggcctcccaaagtgctgggattacagccatgaaccactgtacccgaactgcacttgccttttatacatgcaagaaatgtgaaggggacagtccccaaaaacccactttgaggatatgttctgaaattagtatctactgaacttcagtctcctaagttgtatatattctgtccaacagtgcaactcgaactggactctgcagaccagccctagtcccagaataagcacagaaactgagagtagacc

SEQ ID NO: 244923 - DNA, 550 bp, Homo sapiens
gtgagattgagacttccctctaacctcttgctgtcactccatgtcatcctctgctctgggtctttcacttgctgctccaggtctttacctgctccaggactgtgcactccctgcactggctctgctcaagaatgtccctgatctcccctggctcagagagtggggcttcagaatgcaggacggacatgtgaacaggctagacagcactctgctatgaaaacaccgaacctgaggagagtctcagaggccctaagagggcaatgtaaaccagaaacacttagggtggatgcttgtggcagggcggtctattcttagtccaggccagtttctagagaggggaggctcagaatcaattaggacagttttggagtttctccttctctcttattgctccaaccgcagaattaaaagtactcctagaggggccaggtacaattgctcacgcctgtaatcccagcactttgggaggccaaggtgggcagatcacttgaggtcagaagtttgagaccagcctggccaacatagtgaaacctcatctctactaaaaata

SEQ ID NO: 244924 - DNA, 599 bp, Homo sapiens
gcatgaagtctgacttcagtgtagcattgaggagggtcctggcctcagatactgcaccagttgtttgttcagctctgggcaagaacattagtcagatcattaggtatttttgtccctttctgcattgtccttcgtcatatatttattaaacacctactgtatcctaggcagtatttcccagggatgcaaagatgaattagatctggttgcttttcttcagagtctgaagttaagtgtcaggtttgtggggaaggttattcttgccttgtgtattttgtcccaacttaagctataatttttgaatttgtaaaaccttatactgtttagaaaaaaaaaaaacacagtaaaaaaaaaaaggatgggtgaatgcataaatttagtttttgaaaatttaagcgactgtttctccaaaatgtcacttttcatccccagtttgccttttgtctgaaatgcaccagtgaagcaatcaagaagaagaattgattaattttgtgctgtatgcctttcagttctgtattttgtttgtgcttcaaactgtgacagttgaaatttcatggtaaaaaagaaaacggttttgaatttgggatatagagaaaaat

SEQ ID NO: 244925 - DNA, 418 bp, Homo sapiens
gcatatttatccattgttttaaattactcattttgttataatgttgtatttttgtgtgtgtgatgttctttttctttgctagcataaccccagatgtctgcttttaatttttataccattacaaggaatcatgtagtcaacatcaagtttagaattataattttcaaaaatggatcataatcaaaacatatatacattgattagcatttaaggcacgccttatcaatggtaaagaatagtgctatctgaaacaaaaccaagtagcaaataatagcttttccttgtggtttttcccattcagttactaacttgttatagagtcgtgttttatttatatatcagagatgcttgttctgttcatggtcatgtagcgtaaatagtatatactattgttttaataaagcttataattttctaa

SEQ ID NO: 244926 - DNA, 2578 bp, Homo sapiens
agcttcctttgtatgagggctgttgcgcacttccggtggaatgcgctgaagcgagtgggtggagtttacggagccggtgggcggtaggcggtgctacgggtagctgggtgctgtccaaaggcgacagggcgtcgttaggggagcgagtcgtgaccggttgggccacactcaacgtgggacgaagcttcgcctactgtttgactacgtgcgtgcagcctcccctcgatgtcggccctcgaaaagagcatgcacctcggccgccttccctctcgcccacctctacccggcagcgggggcagtcagagcggagccaagatgcgaatgggccctggaagaaagcgggacttttcccctgttccttggagtcagtattttgagtccatggaagatgtagaagtagagaatgaaactggcaaggatacttttcgagtctacaagagtggttcagagggtccagtcctgctccttctgcatggaggaggtcattctgccctttcttgggctgtgttcacggcagcgattattagtagagttcagtgtaggattgtagctttggatctgcgaagtcatggtgaaacaaaggtcaagaatcctgaagatctgtctgcagaaacaatggcaaaagacgttggcaatgtggttgaagccatgtatggggaccttcctcctccaattatgctgattggacatagcatgggtggtgctattgcagtccacacagcatcatccaacctggtaccaagcctcttgggtctgtgcatgattgatgttgtagaaggtacagctatggatgcacttaatagcatgcagaatttcttacggggtcgtcctaaaaccttcaagtctctggagaatgctattgaatggagtgtgaagagtggccagattcgaaatctggagtctgcccgtgtctcaatggttggccaagtcaaacagtgtgaaggaattacaagtccagaaggctcaaaatctatagtggaaggaatcatagaggaagaagaagaagatgaggaaggaagtgagtctataagcaagaggaaaaaggaagatgacatggagaccaagaaagaccatccatacacctggagaattgaactggcaaaaacagaaaaatactgggacggctggttccgaggcttatccaatctctttcttagttgtcccattcctaaattgctgctcttggctggtgttgatagattggataaagatctgaccattggccagatgcaagggaagttccagatgcaggtcctaccccagtgtggccatgcagtccatgaggatgcccctgacaaggtagctgaagctgttgccactttcctgatccggcacaggtttgcagaacccatcggtggattccagtgtgtgtttcctggctgttagtgacctgctgtccacccctcctcaacatcgagctctgttgtaaatacgtcgcaccagaggccactgtgatgccactgtctcctctccatcccgcccagccatgtgacactggctcccggtagacgggcaccccgagatgtaccaaccttttcatgtattctgccaaaagcattgttttccagggcccttgaccaacatcggcttccccagtccagggctcccctgctcctttcccttccctgtactggggtagctcctgcctgctctccctgcgttgcctagggtaaagcctccagatttgccatactgagcccctcttcctagcatcaggcgatacatctgagttcaaatgtcttcccaggctcagggacctccattccttgagattgtcttggcatggcccagccctgcctcatgggatggacaatgcatggggtggtctttatttttccctttcaaataaaacactagtcaggtaccgttttatcccagtcgtactcttccaggtttggaagacccagagaggccaagatcccatccttagccatagcgagcggtggtggtggatagcatcacaagaaacgagcctgaaaatcaggtccagccggtccaagcacatggcctcccatctgggagagcccactgtcccactcccacatgtctgggcacctgccctgggctgaggccaggctgctccaggggcctcctgcgccctcacctgccacagagcaacccaggttaaatacagcccatgcacaaagccacaggccaaagcctatggaattgtttttaatcatcaaatttaaccattttcataactggttcctggaggtgtgcagtgcccccttgcctcttcaaacctacagcttctctttgccatttgtggatttcacatcactccacacagaaacattacagcctggcatccccagtctttgccttcttccagctgcctcgacacagcactgtggcctgtccctattgcccaggcacgccatttccaagggcaggaaggggcagtgtcctgaagcccatcttttctgtgactgtcttaggtgatgtgtagccccctccacctttccactcaacaacctcccacccctgtcctgctgcatggtccggagtctgggacctactttgttttttgttatttatgaccttgtttaaagaaaataaatatctcccaaccttt

SEQ ID NO: 244927 - DNA, 734 bp, Homo sapiens
gtgagtgaggagttgactgggaaaaggagagatccaattcttgttctagtccttggcacatacactctctgggttttgagaaaaggatggtcctacaacgattctaagttgttttctcattggtcctacaacaattctaagttgttttctcaaaggcaaaagcatgatttcaaaatgacatcacttgtcagattttctggtgtatggaaagatttaataatcctgcctcttttgaagcctgaaacttacaatttaaagcctgaaatctaccataaggaacttggtaaattgtgtcagataccatgaaaatgcatcttttcatagttaaccacagattgtttatgtaaaggcaaattggtggtcaggttcaaggtaaaatggattattgggttgattagtagccaaaaactaaatgcatgttcaggtcaaaatgaatttgtttgttttagttggtgccattttccttttattattcagaactacagagtgtgcattttattaataggaatgaaagctcatgcttgaggatttgaatagggtggatgtatatattttataaactcaagttgcaaaatatgtaaagtcactactttttaaatagaatataaatgttaaaacagacaaatctatgttatatattttttaatacatgtatcagacttgttagttgaatgcagattactttgctttatggaatttcataacttttaataataaagcagttgttattggaa

SEQ ID NO: 244928 - DNA, 441 bp, Homo sapiens
gcataaaggttttgtaaagcggattattttttccttcagttttcatttgtgacctgatctgtataaaatacagtgtcatgctgaaaaccctatgtaattaaagccatgggaaatagagaattttaaaatccatgactcattcacctgctgcagtctggcccacacctttactaagtgagatgtcagcttcctaactgaaccacatgtgtatgtgaagtctagtaaaataggttgtgagtcagtttttattatgatatccatttttagttactggtagccattaagagagtttctcaggcattcagaaaagtccatcccttagtgaaaaggtttggtctctgagagaaggacctagtcatttgagactcaatttatttcaggagtagagatccattgatcaatgatcactgtaaagcataatagccctaaaatacatacact

SEQ ID NO: 244929 - DNA, 334 bp, Homo sapiens
ttcccaaattcatttgtctgtaggattctttgtttgttgaatagcatcaagtagcatctcaaggaacaccctttgggaaatgctgctgagagaagctaagaacttgcttcacgatcgtcaagcactgaaaaggattcatacttgggaaactggcaaactgtttttctgaccctgacccttgccagtagtataatcatgggcaagtcacttgatttcttcacatgtaaaacaaaatgataatatatcctccatggacagccatagagagaagattcattacaaaatgcatttacggtaggaacagaagttgacaataaaagttaatattgtcaca

SEQ ID NO: 244930 - DNA, 660 bp, Homo sapiens
ggagctaaagtcatgaatgacagctatctctcccatataaacacttctgggacattgaccaagtcagcgtaattaggctggatggtctcattctgtatggcacttccaatttcatttatcctgaagtatctatacctgtgagtctatctcagttattacccttgagcattatgtaatatagctaagtggatgctctctttggatgaaaaggaaaataaactaattctaataaacttttagcactattttgtagaattatagttagccaattcactaacttaactcttagcattctaaaagcaaaataagtgtagctgataaatcccttatcataacacaccatgccaccacgatttcacaccctactaagaaccaccctatgtctcaaagtctactgctcaactgtatactacactatacccaagtgtagtaatgtggcacatcaacctttcttggtaggaggttttttaaaaatccaacactgccagatgaaatgtgaatttggactcctgatcattcctttaattatgctatcaatcagccattaccaccctcttcttctatcacagtactatgcttctccttaaaagcactacaaacattactcagtcgctcgccaggcgcagccatataaagtcagggacaagcctttggctgctg

SEQ ID NO: 244931 - DNA, 839 bp, Homo sapiens
tgatagatatgtattttttatttcccagaacctatcacaatgcctggcacagagcaaatactcaggaaatctataacaaataacattacccaatcagtaaattgtcagtactgtaggaattgagaggaagaagtagtcacatgcatttggggctgtaagagaaagatttaatagaaagatggcagtggcatttaagatgcacaaattattaaaattttaactattacagtgtagaagtctaggtagagggaatgatttgtacagtaaagtagaagtggacagagtaatgctttttgtttttgtctgtctggacagtagttggctgtaacaaagtttgtgtctaactaaaaagtacctgttgactcagatagccacagtaagagactagaacgtgatggcataatggtgacaaaaatgagttcaaatctacagtccaccacttcctagttggctcaccacttattacctacacttaatttttgctacctaatctgtaaagtggaaataataaaatacatatctgtttactgagagatgaacaaactatttggtttcttccagactctcagtaaatactctgttcagtttttaatcctttattttgtaggtataataacatgtaataattggtaaaggatcattaaataatgtcttcaagtcataagaattgtactttgaaaaactaatttggcagaaggggtaagtaaaaggatgagaagtctgacatggagaaaccagtataatataatgaaagtctgaagtggtgtggtggcaataggaaaagaaaagatcaggatgagaaattgctttaaaaaataaaagtacattcttcataagca

SEQ ID NO: 244932 - DNA, 592 bp, Homo sapiens
ctttatgatctttgctaatctgaaagacgaaaaatgttattttgctattattttaatctgcattttaaaattatgagtaaggttgagcatcttttcatatattaaagtcatttatattttcttcccttttgaaatgtttattcatatccttagcctttttttccctgttagagtactagttttttccatattgatttataaatgttcttagtatattaacgaaaataaccttttgatgtatgtttttaaaactgttttttaccaattgaccgtttgttttgtcattacatttattacagattttgagtatcctaacatagtaaaatttatcagtgttttattttacagtgtgtatggctctatgacctagaaagacctttttggtgcagaagttataaaaaaatattcctatgttttcttctagcatttttatggtttcagtcttttttatgtatgataaaaatcatttgtatatctgaaacttacttggcataaggagttaaatagggatgcaacttaattttttttctcagaaggatacctggttattatatcaccagttatttaaaaaatcagcctttccttattgatt

SEQ ID NO: 244933 - DNA, 416 bp, Homo sapiens
  misc_feature (413)..(413): n is a, c, g, or t
ctcagcgatcttgtgtttctcgaaaggtctgcgcaacaaacagctgagtgggcttcgcccagcccagtctccacactgcgggaaaggaatcataaatcccagatagaagcggagccggcgccacgcattccactttttgaagtccgcagaccgacggcactggcaaattcctgagtccagtgctaacgctgggtttccacagtttggacaggggagtctccccggagttccctggccctggtcccgcacagtccgggcctgaatcagcgtctaggctacttaggagctactcccacttagctctggcaacaccaccttcccttgcgtggggggaagaggacagtgggtaggtaggttagtgtttcagcctccaagggcaacagagcaagaccctatctcaaaaaagcaaaaancca

SEQ ID NO: 244934 - DNA, 707 bp, Homo sapiens
gggagagtaaaacttatggaactttgtaactagaatacaacatagaaaccataataatcccaataaaaagacacttgcccagttgattcttttctaatgtttgtacctaaaatcatagccattgagttctttgtggcctcatatcccaggcctcatcctttctcccttgaaatggagactggggatatttgtatgatttcatcaaaataaaatgcttcattctgtattttaatacatggagaaaggtctaagcacattagttgttcaggatgttaaaccaggcccttgttgcactaaaagaaaacacttctgtggatgttgtgtattagtatcaagatctttttattattattattgcaagggattttccatttaagtgtgagaaaaaatgcccttcattgtttcaaaacatcaatatgctggggaaaactgtgcatgaactaacacaatttctttatcgtaacaacattatttcattttcttatttttcagtcacatatgaggttatttgcatcaaagaaacatagtttttagtgaaacaaagtggttatataggctacttatatatagtataatacaataatcaggtatctgactggttaagtaaaaaatgcagtatgctctttttattgttatatttttccgtttttatagatttctctgaggatttactgtaccactctaagccattatttgtcagttattta

SEQ ID NO: 244935 - DNA, 353 bp, Homo sapiens
cggcacgagggaatcaagagggcttcttgattctccaccagctctcatgagcggtttccccactactgtatccctctccagaaccaggggaactgttgtcactgaagtcttcaaactgtaaaggagcatggagatgcgtaattaaaccctggacagaaaagcttttagcgagctcttcaccgcatctgttctggaaagcctgagtacctgtccacacccattttattccgttgagaaactaggtcaccgagactgcagaaatagaagcccttgttgaacccctggaatgtttccttgctgaggctaaatgagagatgggccgaacacacaatttttactcagaaaaacttaga

SEQ ID NO: 244936 - DNA, 463 bp, Homo sapiens
ctctgtcgcccaggctggagtgcagtggcgggatctcggctcactgcaagctccgcctcccgggttcacgccattctcctgcctcagcctcccgagtagctgggactacaggcgcccgccactacgcccggctaattttttgtatttttagtagagacggggtttcaccgttttagccgggatggtctcgatctcctgacctcgtgatccgcccgcctcggcctcccaaagtgctgggattacaggcgtgagccaccgcgcccggccccaaatagacttcttgacgtgtattattaaatttaatccaagacaagaggatagagggattacctttttatggctaaggtaacaatattgctaatgaataaaaacctgtatatgttgaaagttacatggctattataaaaaaaaaccaaacaatccatactgtctctcaaccagactactgtggagctttctcatt

SEQ ID NO: 244937 - DNA, 563 bp, Homo sapiens
gaaggaaaatccaggtgagtctgggtttccacttcaacgacaagttagggagaggagctgagagtgagcgtcgagagctgtcagagcgggcattgaagaccgtggtgaggagttggaggctggttgtaaagtcatgggaaactatatccaggcatcacccagatgagcagggaggaggaatggatctgaggggcactgtagagaagggacttgggggatggattgtctttggtgtataaaaggaagaaggtgtcaaagaggatccaaggcagcagctctacatccttgttgagtccagaacccctgtgtgacgtgcaactgagaacgcgggatgcttcccccagaaaatgcacacaacccactcacaaacatcagcgtcattttgggggagttgcttggttcaagattaaggtttctcgccctgtgaagggcctgaagtggtgagaacatcggcatcctgcgtttggcttataggactctcaagacaattgtatatttattttcagaaaagaaaggaaatatctctgaaacttgaaattaaaaaccttatttattttaatata

SEQ ID NO: 244938 - DNA, 408 bp, Homo sapiens
catttcattaaaatgtgtcctctgtcttgacatgggtatcacagggagttgaactaactggttcttatttacaaggccccaactgttcttaagaaaaatgttagggttcccagaaacataagggctttgaccatatcatttccaggacaagatcacagacataatcagtgccgtctgtttaaaggctttaagagccagctgagccaatttagcatcaatttagtacaatcagcaactaatgaaagagaagtcagggtggccataaaatgatcaggattgctcatgttggtgtaagggatcattcagttgtattctgcaggaacaacccgtcatcttgaatatcagcaaaaagctctatttagagacaattacagtaataatatcaggttataataccatgttcacagg

SEQ ID NO: 244939 - DNA, 430 bp, Homo sapiens
agtattgccaaagcatgtgatagttttgagatgctgacaaacgtgaaccatagacccatgttttccttaaacctggggtttatctttatgtgtaaattacggaataggagatgctagccttctgtagatgaaaggtaggattgttaaaaatgccaacatctcgataagaatgggtggagtgtacaaattatgtccttatttatggaaacattttaaggtaaggaaaaataattatgccatgtggaacccattatgccagattctgttttcatacaccaataattctgtataagaagcaaatgcgtagtttatgaaacaacatagtgttaaaaacaggaggctgggtcttcagtctgttgatggcacagtcctatgatagaaaaatatcttccttctgccaaaatagtttaaaagtaatggaaccaaaaaa

SEQ ID NO: 244940 - DNA, 701 bp, Homo sapiens
gattctcctgtttaggttttcttgctgtcaagagcccccaaagactgtacaccaggaaagtgctgtccttagagtcaaggttttcactgaagggggcacatgaccctcctggctgactttgaatacacgatcaagtcctcatgaataatgaatactaatgacaatatcaaaacacctatttgcattgtacactcactaaagtcagagggagaattggggctgctcccacaaaagggcacgtgactctctaaataaagagctttaatgcattttatatttaaaccataaggccatgggctcaaacccaaactgagatgggctctgcttcttaagtactattctggaaaggcattgaaatatttatccatctatctgggttctgtgtttctaaagcagttcctttccttgtactgcaatccagagtgggcctgtttgcaaatcccctttaactggagagtggctgcccttcagaagcaaaaggagtcctttgggaaagtcattgtctatgaaacttattcaatgagaactatgaagaacagcctttttttatttaaatgcatgtaattcaaagattgtctactctgtgcactgactgggtcaaattcttactttcactgctccatctctatgtggccttgggcaagttgtctaacttctttaagccttaggggataattgttcctaaattaatagtattacca

SEQ ID NO: 244941 - DNA, 787 bp, Homo sapiens
gaaaaaaatcgtactgtgggtcggtgtggaaagcttttggtcttcttgaattttactcgttttcacagagaaggaagatggtgtgaagcattctgatggactccacctgtttttaggtgccaagataattaagctagagtagttgcatttaaaacctaaccatgaaaataaaatgaatacaaagaatttctgtttggtgtcagagctaccttagaattagggaactgtgaaagaagatcttggatgaatctgatggcagatttcattaaagttgaagttacatattcatgactgattttgattgcaccatttctaaggtcttaaagcggtgggggtggggaggtcttataaccgaataacctactctttcgttctaaaagaaaaagaaatcgtgcttttgttttgacttgaaattttattctcatgctggcccaagagtaaagtctgatacctggaatgtactggcagcaaaatgtactgtttaaaaatctgaaacatcggccaggcacagtggctcacacctgtaatcccagcactttgggaggccaaggcaggcggatcacgaggtcaggagattgagaccatcctggctaacacagtgaaaccccgtctctattaaaaatacaaaaaaattagccgggcgtggtggtgggcacctgtagtcccagctactcgggaggctgagttaggagaatggcgtgaacccgggaggcagagcttgcagtgaaccgagattgtgccactgcactccagcctgggtgacagagcgagactctgtctcaaaaag

SEQ ID NO: 244942 - DNA, 346 bp, Homo sapiens
ccctggggctggggctggctcccagatggggtgttttttatctgtaaaaattgtttttaaataactcattacattataaaaataaagttttggccagaagtgctgggattacaggtgtgagccaccatacctggctgctgagaccgctcatctctcttccttcccattgtagggcaagctggtatttccattctccaggaggactttcctgctttattcaacaacaaacatccattgagcagctatggtttctaagtgtgcaccactgggcttagaattgttgatgggcttgaggggattaatctcaactccagcttgggtgatagtgagactcctcaaaaaaaaa

SEQ ID NO: 244943 - DNA, 319 bp, Homo sapiens
agaaaaagaaaactttggtaagagaaaattgaagctctagatgagtgaaaagattctaacagcaccaagctgccgtaaatgagctcaagtctcctggccaggacaaattacactccagggagtagagagaactcgcctctgaagctgtaaagcctctgctgataatctttacagaacatggagactgtgaaagaaattggaacgctagaaatggcaaaatatagctctgattagtaaagagggggaaagcttctgcaaactacaaaagtggggctatcctatccatcctcattaaattccctgatcagactaaaaaaag

SEQ ID NO: 244944 - DNA, 331 bp, Homo sapiens
agaaaaagaaaactttggtaagagaaaattgaagctctagatgagtgaaaagattctaacagcaccaagctgccgtaaatgagctcaagtctcctggccaggacaaattacactccagggagtagagagaactcgcctctgaagctgtaaagcctctgctgataatctttacagaacatggagactgtgaaagaaattggaacgctagaaatggcaaaatatagctctgattagtaaagagggggaaagcttctgcaaactaccctggagtacttggtcagcgttaaatccttgggtggctggctccccttggctttcagcagtgattctc

SEQ ID NO: 244945 - DNA, 445 bp, Homo sapiens
tttctgcttgggaaatgctcagctgtgcctcagtttcccttagtcttcctctgagctgcaggtaattgagactgagaggctttccacacttcccagaaggggcagacttgatggtgcttcctatctccacgcaagagcaactattgtggatcctcacctccgacagtgctgatggaaacacccacaactgctcgcagcgggtctgggctttcctagtcaatcattttactttcagggcgtagaggtaggagaatgaaacagattgcacagcactggtgaaaagaaaaggagaaattcagggaggaggaatgagggatcctctttcttgtgtgtgggtgttagcttgcctcccaaccacactgacacttgctgtgccattgatttgacttttctcctatcttaacaataacaaatcattaaaaaatcagtttatcaaaatataaaa

SEQ ID NO: 244946 - DNA, 286 bp, Homo sapiens
tataaacccgtgcagcattttactgtacttaatactgtaggcagttgtaacacagtggtaaatatttgtgtctaaacatagaaatctaaacaatctaaacagaaaaggtacaataaaaatatagcatacaagattaaaaatggtacgtaccatgtatagagcacttaccatgaatggagcttgcaggactggcagttgctgtaggtgagtcagtgagtgagtggcgagtgatattactgtacactactgtggactctatactacactgtgggtacactaaatttgt

SEQ ID NO: 244947 - DNA, 220 bp, Homo sapiens
aaaatcaagaaaaatgtctagttctcatggctccacattagaatcagaaaagatgaaagaactaacacttttcaccctttgctcaataaattcagtggaatatacatagacaagtacttgatggcctctcatttaagccttaccatttcccctaaaaggtccggtatgtgatactcttttacagaatatgaaatgaaactgaaagaaaattaactttcca

SEQ ID NO: 244948 - DNA, 415 bp, Homo sapiens
gagcaaggaattgaagaagaatacagaaggaagttgtttttctctgcctcagttcatatcctgcctctgccatttagagtctctgacctttggcaatttttttcttttcactctagtttagttttctggtctctaaaatggggggagaaattgtgcctacctaaggtttgctgtaaagaatgaccgaggtaatccatgcctggcctataagtgattagtaaatgttagctgtcagcctttacaaaggcatagtgctatgtcaaagcatagtgctttgataatatagtttaataggataaattttcagatagtaaaccttttcccttcattcagggtaaaaataatagttctataacccatcaaagtttagttctctaagcttttgtatccctgttttaaaataattcagctcaaa

SEQ ID NO: 244949 - DNA, 394 bp, Homo sapiens
ggacacgccactcgttcatccactcattcgatgacacgtgcgtcgtttccaccttttggctactgtgcatgatgctacgggcattctagcacctgtttttgtctgaatgtgtgttttcatttcttgtgggttcatacctaggagtgggactgcagggtcatatggtaattctgtttccttctgaggagctgccagcctgttttccaaagtggctgtactttctggcattcccacccacagcatacgtgggttccagtcccctacgtcgttgctaacgtttgttattatctgtcttctcatcacagccctcctggtgggtgtgaggtagtatcaccctgtggttttgatttgcattttcctaatgactaataacgttgaggaactttgcatgtgc

SEQ ID NO: 244950 - DNA, 371 bp, Homo sapiens
tgcactttagtgcacaccaaactgccttcagaaaagatgtacctgtttacactttcatcattttatctgttttatatgttttcagacactttatcctgcaactttgactacttaacggtgggttccaatagtaaaaatagtaacatatgctttgtggtcatgttagcactgattaattagtaaaccttccacgttttccagtcagtatcaacgtggtcttccgtttattttcctaatctcacttttcgtaacctccctttctcttcttgtctcacttccttacatttcttctgaacctccgtatacctgtctcattaaatttaatgattaaactttttaattacaattgtaaaagtatctctaatcaatta

SEQ ID NO: 244951 - DNA, 436 bp, Homo sapiens
ccaaaatagtttgaatcagaaagtggtctttgaatagtgattcagcctaatacatcactaagaaggagaaacaaatgaggcattggagacctttcatccaagtgtcaaataggaaaagtcgttcatgtaccatggcatgtacaggaaagcagtgatgtttcaagaactaactggcaacgactatcagattttagaaacaaagtctgcatttcatgatgccccaaaatctagttgaaaacataatattcaatatttgttacctctttttttgtatatttatttgttatactgaactgaattattcacttattatttgaagttatgttcttataggaagctaggcaccaaccagcagttgctaataatatactataatttagtaagtaattcaattgaataaaatttatgacaaatttaaaaaaaagttaattaaaat

SEQ ID NO: 244952 - DNA, 277 bp, Homo sapiens
ctttattcttgattttaaagagtgcaactaagttggaagattcattatctcatatcagtaggggcagtagccagagctaaatgttgaaagcataaatgcagtttaattcgattaatgtctattaaatgtcaactatttaccagtcactatgctcagctttgaaagtacaagatagatttaatatcctaatagctctaatttattgtggacatttaattcattatgccatttagttcttacaacagccttctaagatagaaagctgttatccatattt

SEQ ID NO: 244953 - DNA, 508 bp, Homo sapiens
ctcgactcctccgtccccatctctcctccctttctggcactgtgtgactgtctggtgggctctctctatctggtgtgcttgtgagcacaggctctgtgtggcattctgtttctgtgtgtttctcttggtccccggctttggttatggggagcagtgattttactgtaactacctcactcacccctgacgtgcaggtcagcagggtgggagtctgtctagctgagtggcttacagcccaccgtggacatgggttgaatctggttctgtgagctacctggccttgggcagctcacttcccctgtgagcttctggttctagcacttacacgggaataagaaaattcaaaaattagctggacgtggtggtgggcacctgtaatcccagctacttgggaggctgaggcaggaggatcacttaaacctgggaggtggaggtcacagtgagccgagatcatgccactgcactccagcctgggcgacagaatgagactctgtatcaaaaaaaaaaa

SEQ ID NO: 244954 - DNA, 460 bp, Homo sapiens
ctcgtttattgtaacacatctgttgccaagttgcacttttttttagaaacagtcttcgaggcctcttgctttagttcaggggtactcagtcatatccaagtggtcttcaatgaatattgtacgtttcggaaatcaaaagtgatcttcctggccaggtgtggtggctcatgcctgtgatcccagcactttgggaggctgagggagccggatcacctgaggtcaggagttcgagaccagcctggccgacatggcgaaaccccgtcactactaaaaatacaaaaaaaattagctggatgtggtggcaggcatctgtaatcctagctacttgggaggctcaggcaggagaatcgcttgaaccagggaggttgcagtgagctgcaggcggagtttgcagtgagctgagatcgcaccactgcactcctgcctggttaacagagtgagaccctgtctcaaaaaaaaa

SEQ ID NO: 244955 - DNA, 506 bp, Homo sapiens
cttgctgttgcccaggctgatcttgaactactcctgcgctcaagcaatcctcctaccttgacctcccgaagtgctggagttgatagctttggtcgcctggccaactttttgtcttatcatttttgcttatttggaggagtttaacaaaatggcactgtcgctatataagagagatcaacatttttcagagatgcgtactttaagcaaatagaagcaaaataatatccaggacttgttttaaaatacttaagaaacaacaacaacaaaaagactagatcaaacaaatataaaattgtaactacttaatctgtgcgatgggtatatgggacttcattagtttctctctacatttctttgtttgtaaatgttcataatttttaaggaaaaaaaaggcccagttttaaatcccatcaccgatacctgctaattatatgggctgagtttcttttatctataaaatgggaatgctaagtgtacatactttcatgaggttgttgcaaacttgg

SEQ ID NO: 244956 - DNA, 626 bp, Homo sapiens
ataccgccactgatctgacaggaggctgagctcaggtggtaatgcaagtgataggaagtggttgtaaatacagatgaagcttcactctctggcttctcacctcctgctgtctggcctggtttctaacaggccacaaaggtaccagtctgtggcccaggggttggggacccctggtatagtctgttgctcctaggttacataggcagttgtaacacaatggtaagtatatgtatatctaacaaacctaaacatagaaaagatatggtaaaaataggacattatgcagtgcatgactgtatattggcaggtgttgcctcagaccaggtaacaattactgtttacagagtgccatttctatatgagagtcaaatgcttctttgtcacttccactcaaaatatacttttaagtagtggccacaagttgaaaggcctaagggtacatcttcctgtgaaataagaggaaggtagaagtatacagataaaattccaaatggagaagatagaatttgatggagtacatgtagtcctcaatcttctcaaagactgaagcaagagtaatcagccaattgagaaaagtgacgaagagcctgaaaatgaggagtggaagaagtatgtatacagttgga

SEQ ID NO: 244957 - DNA, 593 bp, Homo sapiens
agaaagaggtttaatgggcttacagtctcacatggctggggaggcctcagaatcatggccaaaggcaaggagaagcaagtcacatcttacatggatggcagggggcaaagagagagcttgtgctgggaaacctttgtttttaaaaccatcagatctcatgagactcattcaccatcatgagaacagcatgggaaagctccacccccataattcaatcacctcccaccaggttcctcccacaacatgtgggaattgcaggagttacaattcaagatgagatttgggtggggacacagccaaaccatatcacctgcaactaagaagaatgttgaagttgatgaagtaatactggagaactgttaagccattggcaagtctagatcttgcagagttaaatcatgtaagaaatacaagaataacatagagagaattggcaaacataatgacaagacaggaaattcaaatagaatgatgtaaatacttggcaaaatcaatgaaaactgtgaatttttttaaaaagggcaatcttgtaatcttgctttgaaagtcatatgggaagtaaagaatgttgtataaagtggggaatgttttat

SEQ ID NO: 244958 - DNA, 508 bp, Homo sapiens
agtgggtcctgggctgcaggagaatccgctgccccaggagcagagactgggaagaagcccacagtaagggcaaagggtggactgcggagactgctccgtcctccctccccacccctacgccaggtttcacttctccctgagagtcctggggcaacaccccctgttctttccctcgcacccccatttttaaaatgttacgtgggagctttcggggacgggctgcgggcatccgtttccctagcccagtgggaggtggaaccgaagcccaggagtccaggcctctggccctgcgcctccctggctaaagagcgccctgtggggaggaagcagggccccaggcggaaccgggaaaacacaccggggctttaaacagaccgggccactcccatcgaatttggaaagcggttaaaagaggtcgtgccgcattctgcgccgcgtccctcttccttcagtcccgccgagtgtccccgaccagaggtgacctcctagaaggggaggtccccaaact

SEQ ID NO: 244959 - DNA, 624 bp, Homo sapiens
agttgtggagcgacagcgacagagccttggagagggaggctctgctcaggatttgtccccagtgccttatttagttcacttggtgaggtcatgttttcctggatggtgttgatgctagtagatgttcttcagtgtctgggcattaaaatcttgggcatgcagcaccatatgagaggtttaaaaaataaaatttaaagagagaaaagcggtgggattgctgaatcagacagagccaattgatgatcagtaatggtggccaataatcagctggaaacaaagtacttagcagggcttgaaaacaccaaaactctgagaccactgaccttcaaaaacttcaacagccctgagtgaaaagtccaaacacatttatctaccattcaaagaccctttattgtctgtcctctgcgcatctcagtagtctctttttaccacactgtctatatactgcatgagccatttatatgaaactatctgacactccaaggcatcttatactatatattcaatcatgtatccctagtaattagcacagtcctggcatatagtttgctactaaacttttgcagaatgaaggaattatcttgtatccaggttccaagttttaaggtgattcttcacaaaaaa

SEQ ID NO: 244960 - DNA, 382 bp, Homo sapiens
gccaaggcgggtggatcacctgaagtcaggagttcaagaccagcctggccaacatggtgaaaccctgtctctgctaaaaatacaaaaatcagccagacatggtggcatgctcctgtagtcccagctactcaggaggctgaggcaggagaatcacttgaacctgggagatggaggttgcagtgatccaagattgcgccaccgcactccagctctgggcgacagagtgagactctgtctcaaaaaactaaataaactaaaaataaaaattacagcaagaagaactgaaataaagaatagaaaaacagtagagaaatttggtgaaatcgaaagttggttctttgcaaagctcagcaaaattacaaaactttaggtagacttaaga

SEQ ID NO: 244961 - DNA, 415 bp, Homo sapiens
cttctggacatggactgctgggaagagggtaaaaatgggtatggagttggggagtggaataatgtgctcctcatgtctcttcacaccccaagagtcaaataaggtttaatattctgtgggctttagtccgggtatggtggctcacacctgtaatcccagccctttgggaggccgaggtaggtggatcacttgaggtctggagtatgagaccagcctcaacaatatggtgaaactccatctctactaaaaacacaaaattagctggacatggtggcgcacacccgtagtcccagctacttgggaggctgaggcaggagaatcacttgaaccccacaggcggaggttgcagtgagctgagattgtgccattgcaccccagcctggacaacaagaatgaaactctgtctcaaaaaaaa

SEQ ID NO: 244962 - DNA, 467 bp, Homo sapiens
atttttcttttttacaatttgttctttttaattgggtgacattaaagagtaccttctaagcagttaaatgtgccaggagtcatattgacacagggccacagacatgagtaagacaatgcattcacagtctcataaggcagatcacagacttatacttagcctctgggtacagaaaagttacttcccacatttttctcattgaaaatgtttcctctcagaatcttggtgtggttttacataaaggaggattcttcagatcttttttggagactgagtctttactctggcaaccaaaattgtatttcccctgcttctaaactttcctctaaactcctctctatttagccttctctctccttagtcctgagatcctgcagtagttgagcaactggaacgtcacgtttataaataaaccaaagtcaagggatgttgggctctccagaggtggacttcaggtggacaaagat

SEQ ID NO: 244963 - DNA, 411 bp, Homo sapiens
ttcaaatctcttaaatttggatttccaggttacctacagaaatgatgtcgaacttgagatgatttcacggactcaaggacaccttcattggtcttcccaaatttggagtgcactcttaaccctttctttgaccactttctcacacctaaagctgtttaataggagcagcactttcaactatcagaggtgaacatcctgatggagggcaacaaaagtcaggggtgtgtgttctccaaaaggggcatgacatcttatgcattttgaccattccaagattctttaggacttttgccagaggtacaaagaaggaaacagacaaacaggaaatttaaatctctcaaatggtattatttgtttgcctcttttataaaattatggagatcagagattgaagattatgcttgcaatgaa

SEQ ID NO: 244964 - DNA, 387 bp, Homo sapiens
gatgtgcagggttctgagctgggtcccaaggacatgaggacaacttggcaggtactttctaccatcaagggcacacgacattgctgaggacagaaatagtgcaaggtggggaggtggcaggttacaagataaagaagctatagtcaattgccagttagaaagagtactgggaaaatagcaataatagctaccatagaaactgtgcaagtactaggtgaagaggcctgtgaaactaacttactgcaaggcttgaataaatagagacattcgcggccaggtgcagtggctcatgcctgtaatctcagcaccttgagaggatgaggcgggggtatcacaaggtcaagaggtcgagaccattctggccaacatggtgaaaccttgtctcta

SEQ ID NO: 244965 - DNA, 291 bp, Homo sapiens
ttcttctggaatgttcccagccaatgactgtgcaggccccttcctgtgggacatgggtttcctccaacagataactttggctgggggactctgcaacagcctggcccaaactttcttggaactgtacggcaatctgagacttgctccttaatctgccttccttcctctccttctgtcacaggtgacagacctacattatggtctgaaagctttccttgctacgcctacttccttctgtttatccttcaaagtcctttcccgcaataaatctcttgcatgtacaatcccatt

SEQ ID NO: 244966 - DNA, 431 bp, Homo sapiens
ctcatttgggttctgtggggaggtggctttgagttcctcggggcccagtctgcagtggctattgggagaaaaggccccaccttcctgggcagagaagtggagcttccacttaaagaggcagaaggaggctgtcagaagagggaagggtgagtgtgtgtctgtgtgcatgcacacacacacgcgtgcaggttatagtaatcactgtttcacatcttatttttaagaagtcagaaggttgtggtaagaagtgagaatgaggagtcccctttaaggtggtctaaggttgtgcccaagacagttggcttgttccttgggaaatgtctttcagggcctgaggagctggataaaatggagggaatgacctaatccatttggtccaattgatttttttttttttttgcaacagagtggctccgtctcaaaaaaaaaaa

SEQ ID NO: 244967 - DNA, 962 bp, Homo sapiens
tagacctgttctcaaagttgatctctactgaactggaatggaaagacccttggattttgttaatcctcctgccttgaagcttaattatacttaacgcttctaaaattgatatgggtcttcttttgatgattcctagtcttctttaggtcatctttctttctttttttttttctttttgagacaggatattgctctgtcacccaggctggagcgcagtggtgagatcacagctcactgcagcctcaaactcccaggctcaagtgattctcccacctcagcctcccaagtagatgggaccacaagtgtgtgctaccatgtctggctaatttttttttattatttgtagagccgaggccttgcagtgttgtccaggctggcctcaaactccagggctcaagtgagcctcccactgtctcccaaagtactgggattatagcatgagccaccacatccagccttgggccatctacttaatctatggcttaatagttattgtccctaggaattctttctgatctaacctagaaattctcttacagcaatttgagcaaaataatatgggtaatagcagaggccatccttaatcagtaagtttaaaaagaaaactattctttagggctctttttctgcttatagcagtaataccagaaattcaaaaatgtaaactagctagaagaaaaatgtagtaagctttcagagttagcttctattatgtcaggtacagtgctgagcattttacatgctttccatcattgaattatctccatgaccttattagagcaggtactgtggttattcccattttgcagacgagaaaactgagattataaactctgtaatgtatgtaaggtcacagagccagagttaaaaacccaggccttctgacaccagtgctcaagttcttaaacctatgctgtatttctgcaaagaaaacaaaataaaataaaataattcttaatcca

SEQ ID NO: 244968 - DNA, 873 bp, Homo sapiens
gaaacagccttacactgggcacatggaggagacgtccaccctgcagccaggactggggttcacgtcactgccagagctacactcgccttctgcttccacggtcctgttaattctagatcagagagcaagaaaaaagtacagaacatatcctctacggttatttcctgctttctaattaaaaaaataataaccatggcaagagagaaagaaagagaaagtactcagaggctgacactgacatttcacttcctcgctctcctaagtttaattacaacagcacgtgcagccacgtcagccaaatgacttcatttctgatgtgaaaacgcttaggccatgatgtcgttcattttctgtaattgctgccttttctcattctgttaatagtcccggcaaccagatttcagtggggcatgacgtgaatgtgtatatggtgattcaaatgcaaaatttgtttatggggcttttaatcgaacgcgtgtgtgcctgaacattcttgctcaagttgatgaatcatggggtggaataaaggctgagtttagtttttcactttagcaaaggggcaatggggtgcctactatgtgcgagacattgggaggggcttctgaattattctggatatcgtcattttgcagtgtgcataattttgccaaccgttgctttcgtagcccctgctaagtgttgactttttaaaatataagtttattgtaaaagtgacatgaaaattacaacagatattccagaccaaaataatacaacaatcccagcatctgattgagtcagtgtttgctgtttcccctgcactttcctagttcttaagcatttgcgtatgtaaacattcatatttgcaataaaaaagtgagcttttatattcta

SEQ ID NO: 244969 - DNA, 424 bp, Homo sapiens
tgtcccatttcatcgccgaatgttgggagactggggtctgtcctcggaaagaaacagcctttctgtttataggtttggatcgtctatccctttcagggaactggtgtgttggggacggcttctctgccctgcctgacatggtccagtcatcccgtcagccttctggacggcaacaccaaagctgggaccaaaaaaaagttccagcttaagtgctaatgccaagtgttagatcttgtttgcttgtttgttttaaatcagagactaattaatgtcaagcaaatctgttaaaagatttgatcacgggaagcctggtcggtttccagtgaccaggtcaattccatatctgaaattagtcttgttagagttgctgccaaaaacagtttaacctttaatctgtaatatgttgtttcaaagaggaatctgg

SEQ ID NO: 244970 - DNA, 484 bp, Homo sapiens
tctagatagaagccaactaaatttctagttaccctttcttttaaataaattaaagtttccttgatgctattggtattccacttctaagtcatttgtttggtaactttaccaagagtcaaaattaaggatatgtatgaatactgatattatgagaagaaacaaatttcttgtaatttttctactgacaaaatagcataatgtaataatatttgaggacaatattttaaatataggtctactagtgagaagaaaggaattctttttttggtcataacactttgcttatttgggcgtcaaaattggtgttcccttcatcagattgattgcattgcagatatttaactataaaaccttcttagttcatgggctatacagaaagaggaagaaggctagatttggcctgtgggccatagtttcctgactctgatctgcaagattatttctgcatttaatttcattctttatatttgttattaaaaaaaaa

SEQ ID NO: 244971 - DNA, 394 bp, Homo sapiens
tcagaaaatgggctggccagcccccattccagtggacacattctttcgttaaaaatgttaatgacattgttgtaaacaacaggtcctaaaaaaaaaaaaaagtgggaacaacagggccaggtgtgtttggtggctcatacctgtaatcccagcattttgggaggccaaggtggggggattacttgaagccaaaagttcaaaaccagcttgggcaacatagtgagaccccatccctataaaaatgtaaaaaatatattagctgggtgtggtggcatgtgcttatagtcccagctacttgggaggatggtttgagctcaggagatagaggctgcagggagctgtgaccacaccactgcactccagcctgggtgacaaagtgagaacctgtctcaaa

SEQ ID NO: 244972 - DNA, 285 bp, Homo sapiens
cagtgcatgattgttctgctggcagtactgggggctgggctggccaccccaaatgttaccctgggcatctgcttaacagcccaaacagagggaataatagaccctcaaagatggctccgtccctgaggcctagagggctgtgtgagagctgacctcaaggccaaattcttgccccctctctctgttggtccatgagccccaggatcctcttcctggctctacactgaagcctggacttggaagctgccatcctaaggcctgcatttaatcaggagaacctgagga

SEQ ID NO: 244973 - DNA, 103 bp, Homo sapiens
agtcacttcatgttgcttcatccactgcccacattccagcaccacaaccaagcaggaacaagatgacattagctcaagtagtgaaacaaggaaaattgctatg

SEQ ID NO: 244974 - DNA, 607 bp, Homo sapiens
  misc_feature (10)..(10): n is a, c, g, or t
aaataaaaantgtacacattcatggcatacaacattatgtttcaaaatatattgtggaatgactcaatcaagctaattaacacatccatcacctcccgtacttaccatttgtgtgtgtgtgtggcagtaatattttaaaacctattctcttagcaattttcaagtatacattgtcattcattataatcaccctgttatacaacagatctcctgaacttattcttccaaggactttttttttttttttttttttgagatggggtctcactctgtcacccaggctggagtacagagtgagactccgtctcaaaaaaaaaaaaaagatacatgttgtggaatgtgatgcacactctgacatgcagcggcagagtggaacagtgacattctaaagagtgactcctacatgaaatacctaaaaagaagccccaggaagttagctgagtcctacagaacatgactctggtttccttagcacttgaatccagctcttggcagggccaatattgacagcagagtcaccaaacacttccttcagttatcggtcaacagagactttttggctaaatgaagaacactgctgttcctttgtgttcctaccatgtaactt

SEQ ID NO: 244975 - DNA, 634 bp, Homo sapiens
  misc_feature (25)..(25): n is a, c, g, or t
ccgacaagtttcaagaagccagaanaaaagtagatatcccaggcaagcaaacgaacggccaacaggggaacatttgaggggcactagatgccctagaagcagcccctgagtccgctcaagacaggatttctgggtttccattatgtcatgttcctcttagagatacatgttctttccaaagccccaccactggactcagcgtcactctgagactaccagtttgcatttccagttacctgcctgacatcgcccttgatgtcttgctgacccttaacgctccacatgtctaaaatgtgagccagcctttccctggcaactctttctcctcatgccccatacctgtccatgacatcatctagggctgtcgacatgattttgtggggcacaatacaaaatgtattgtaggtctccctgatcaaaaattattaagacacaggctccagatgtaggcatcaatgctgtttctgtgttcttcatcactgtccaacccattctttgccagaattcctgcagtctatcctttgaaatgtctcacatctgtcccttcattcccatttccatggctgaccctcaaatctcactcggctttcggtcggggctttgtaattggtgttcctcctatttcttgcctctg

SEQ ID NO: 244976 - DNA, 291 bp, Homo sapiens
gttaattattctgtgtatgtgagtatgtgatatttgtaagattgagaataaagactaaagttagggacaaaacactttacattaatcatgcagtgcagctcctatgtaaccgtgtttgtcaaacacaccctgaatggttttgtcaagtattatgttgctgtatccatcacttattagactccgatgatcactttctattttatccatttaagtattccctcaacatcatccagagtcgtgttcttgatgcttaagtgctcagacataaaactattaaaatattattgataa

SEQ ID NO: 244977 - DNA, 393 bp, Homo sapiens
tgacttttagtcaacaaagaaactaaaagttagaaatgagcactagatgagagaacaatgccactgtaaaatactcttttttaaaaaaatacacgcaaagcttcatatgttaataccccaagctccaagatggccaatttatttttgaaacaagaaacacctgtttattatcaaccataacaataatatgtttaattttgagagaatctttttggcagttgttaataagccatactgtaagatttaaaatagttttaatatattctaatggacttcttataaggcatgagaaaatatatttagatgttttctttgctttcacgtaagttcagcattaaacatatgccttccgttaactttagtcattatttcaccagattgtacttaatgaaa

SEQ ID NO: 244978 - DNA, 166 bp, Homo sapiens
tctttctttaactcccaccttccctttaaaaaaaacctaacagcaatagcatggtatgattcaaaaactcattttgccactaactgacattgtatcttggttaagtcacttaatatcactggttctcaggtttttttgtaaaataaattaatttatttctagtaat

SEQ ID NO: 244979 - DNA, 455 bp, Homo sapiens
atttatttacatactattacaagtacacaaattatttcttagaaagtgtgtgtgtgtggtgtatgtgtgtacaatatagatatcaatacctcaaccctggagtcagatatatttattcagtaaatctcaaatgataaactttagcaaattcagtggtctgtttaggaaagctattgaaactatcagttttattaaataaagtttaatttagtctgtgttgacattttaaggacaatttttttgaaataaggaagactgagaaaaataagtttgaagaaaaattaagagttcaattttggatatgctaagtctgagatgcctgtcaatcatgtaagtggaggtatgagttgaaagttgagtattttggggggagttcagtacacaggtcagagcagaagatataaatttttaagtcatcatcacttatattgcaaggctagatgagatacgtaggg

SEQ ID NO: 244980 - DNA, 392 bp, Homo sapiens
cagaaatatctattttttatgtataaagaaacatgtttgagacaaaaatagttgtatataaaaggatatttcataatctcagaatagttacaaagctcactgcttgaatttggtgttaaaaattctaatggaaacatgtaaagccacatactactgaaagcacaatgcccaggaaagttgtcactcttcacttaagggagtggttgccaggggctgagaaagggaggatggggagtgactgctaataggtatgtggtttctttgggcgatgatgagaatgttctggaattggaatagtggtgatagttgtataactgtttgaatgtactaggaaccactgaattgtatactttgaaagggtgaattttatggttgtgaattatctcactaaa

SEQ ID NO: 244981 - DNA, 683 bp, Homo sapiens
tttttttgggtttttcttgagacgaagtctcgttttgttgcccaggctggagtgcagtggcatgatctgtgctcactgcaaccgccacctcccagggttcaagtgattctcctgcctcagcctcccaagcagctgggattacagacgcctgccaccacgcccggctaactttgttgtatttttagtagagatggggtttcaccatattggccagggtggtctcgaactcctgacctcaagagatggctgctgtacactttttgcaactggtttgatgtcacatttcagctccaactttgcatcctgagaacacttaaacgtttctgcaggtccattttatacaacttgaaagaccgtaaaactttctggttgccacaagcatatctttcttttctgctcatccaataaacagctgtgccctactgtgatagattttccaaacaaaaatacctggagcagcagtttagcaaaatatgccttcagtggcattcaacaaatggagtttccccaagcacagttctgtaagaagtgcgtgtgagagtgtgtgtatatgtgtgtatgtgtattttaagttattatttgtattgtgcaaaaatttttttttgatcttggggattctggctgtgaatttggtgcacgacaattatggtaaaaaaaccagaatcacagaatcatcttaatac

SEQ ID NO: 244982 - DNA, 2565 bp, Homo sapiens
acagaaggcggggccagcgccgctgccgggtgctggaggcgccattggagccggcttggctggcgagcccggctgaggagcctcttgggccgcacttaccgccgcgtccgctcccggtccctggcccctcagcggcatggcgtgcggggcgacgctgaagcggcccatggagttcgaggcggcgctgctgagccccggctccccgaagcggcggcgctgcgcccctctgcccggccccactccgggcctcaggcccccggacgccgagccgccgccgccgtttcagacgcagaccccaccgcagagtctgcagcagcccgccccgcccggcagcgagcggcgccttccaactccggagcaaatttttcagaacataaaacaagaatatagtcgttatcagaggtggagacatttagaagttgttcttaatcagagtgaagcttgtgcttcggaaagtcaacctcactcctcagcactcacagcacctagctctccaggttcctcatggatgaagaaggaccagcccacatttaccctccgacaagttggcataatatgtgagcgcctcttaaaagactatgaagataaaattcgggaggagtatgagcaaatcctcaataccaaactagcagaacaatatgaatcttttgtgaaattcacacatgatcagattatgcgacggtatgggacaaggccaacaagctatgtgtcatgaagctttgtcacatatctgggtaccaggtttgacctcaagagatggctgctgtacactttttgcaactggtttgatgtcacatttcagctccaactttgcatcctgagaacacttaaacgtttctgcaggtccattttatacaacttgaaagaccgtaaaactttctggttgccacaagcatatctttcttttctgctcatccaataaacagctgtgccctactgtgatagattttccaaacaaaaatacctggagcagcagtttagcaaaatatgccttcagtggcattcaacaaatggagtttccccaagcacagttctgtaagaagtgcgtgtgagagtgtgtgtatatgtgtgtatgtgtattttaagttattatttgtattgtgcaaaaatttttttttgatcttggggattctggctgtgaatttggtgcacgacaattatggtaaaaaaacatttgcttggtctaaagaagatcattaatgttttgtgaccatacaagttgtaacagtggattgtttttatgtgtaggtattgttaaatacagggactgtttccaggcacagaatatgaatcgtaagttaggatggacattagatgtgattatgatgataaagcgaaggtctgcggtcctatatctacagacacgtggtgagaaattagaacaaactggagacgggccattgacacatggactctgcctgggcatgttaggttaattctttgactccaagccttaaaatactcacatggagtcagcgctcacctcattcacacaattatcatagagctccctggacactgaacctctaaagggaaaaggtctaccctggagccaggagcatcagggttggcttgggagcatgagaggtgagcccagggctaggcctgggccaggccccggcagcactgctacttgggaggagccacttcacctttgtattagttattaaaaaatataatttgggctgggcgcagtggctcacgcctgtaatcccagcactttgggagtccgaggcatgcggatcacttgaggtcaggagttcgagaccaccctggccaatatggtgaaaccccatctctactaaaaatacaacaaagttagccgggcgtggtggcaggcgtctgtaatcccagctgcttgggaggctgaggcaggagaatcacttgaaccctggaggtggcggttgcagtgagcacagatcatgccactgcactccagcctgggcaacaaaacgagacttcgtctcaaaaaaaaaaaaaaaacatagaatttggatcctttggtcgggttctcccaaattcttttgaggtgtccatggtcaactgcttcagctttgttttggcaaccccctgcccgaagtcgcatataggctgttcttcaccttgtttccaaggctgaggaacagaaagtagcctctgttttgaggaggtggaagttaagtatacatttattttttactgtgacttgttcaggaccacattttacaaaatgccttgtttccttcattgtttctggaaaggaaagttctattaatattgttttactttgaatatagaatagtttttttaattagggcttattttgaaaaattctgagtttaattcaaatgtatgccaataccttccaaagtaaggtaatattcagagacagttgttgtgatcagatggcttagagaaatttctggaatattcacattcgaagattccttattaatgaatgtctttgacttaaatctaaccaaaaactgcaacattattctttgtacattttcattatatagtgttaacaagcttagttgcaaacaaataaaatacttaagctatttgtttaccttgccttcttaa

SEQ ID NO: 244983 - DNA, 2719 bp, Homo sapiens
acagaaggcggggccagcgccgctgccgggtgctggaggcgccattggagccggcttggctggcgagcccggctgaggagcctcttgggccgcacttaccgccgcgtccgctcccggtccctggcccctcagcggcatggcgtgcggggcgacgctgaagcggcccatggagttcgaggcggcgctgctgagccccggctccccgaagcggcggcgctgcgcccctctgcccggccccactccgggcctcaggcccccggacgccgagccgccgccgccgtttcagacgcagaccccaccgcagagtctgcagcagcccgccccgcccggcagcgagcggcgccttccaactccggagcaaatttttcagaacataaaacaagaatatagtcgttatcagaggtggagacatttagaagttgttcttaatcagagtgaagcttgtgcttcggaaagtcaacctcactcctcagcactcacagcacctagctctccaggttcctcatggatgaagaaggaccagcccacatttaccctccgacaagttggcataatatgtgagcgcctcttaaaagactatgaagataaaattcgggaggagtatgagcaaatcctcaataccaaactagcagaacaatatgaatcttttgtgaaattcacacatgatcagattatgcgacggtatgggacaaggccaacaagctatgtgtcatgaagctttgtcacatatctgggtaccaggtttgacctcaagagatggctgctgtacactttttgcaactggtttgatgtcacatttcagctccaactttgcatcctgagaacacttaaacgtttctgcaggtccattttatacaacttgaaagaccgtaaaactttctggttgccacaagcatatctttcttttctgctcatccaataaacagctgtgccctactgtgatagattttccaaacaaaaatacctggagcagcagtttagcaaaatatgccttcagtggcattcaacaaatggagtttccccaagcacagttctgtaagaagtgcgtgtgagagtgtgtgtatatgtgtgtatgtgtattttaagttattatttgtattgtgcaaaaatttttttttgatcttggggattctggctgtgaatttggtgcacgacaattatggtaaaaaaacatttgcttggtctaaagaagatcattaatgttttgtgaccatacaagttgtaacagtggattgtttttatgtgtaggtattgttaaatacagggactgtttccaggcacagaatatgaatcgtaagttaggatggacattagatgtgattatgatgataaagcgaaggtctgcggtcctatatctacagacacgtggtgagaaattagaacaaactggagacgggccattgacacatggactctgcctgggcatgttaggttaattctttgactccaagccttaaaatactcacatggagtcagcgctcacctcattcacacaattatcatagagctccctggacactgaacctctaaagggaaaaggtctaccctggagccaggagcatcagggttggcttgggagcatgagaggtgagcccagggctaggcctgggccaggccccggcagcactgctacttgggaggagccacttcacctttgtattagttattaaaaaatataatttgggctgggcgcagtggctcacgcctgtaatcccagcactttgggagtccgaggcatgcggatcacttgaggtcaggagttcgagaccaccctggccaatatggtgaaaccccatctctactaaaaatacaacaaagttagccgggcgtggtggcaggcgtctgtaatcccagctgcttgggaggctgaggcaggagaatcacttgaaccctggaggtggcggttgcagtgagcacagatcatgccactgcactccagcctgggcaacaaaacgagacttcgtctcaaaaaaaaaaaaaaaacatagaatttggatcctttggtcgggttctcccaaattcttttgaggtgtccatggtcaactgcttcagctttgttttggcaaccccctgcccgaagtcgcatataggctgttcttcaccttgtttccaaggctgaggaacagaaagtagcctctgttttgaggaggtggaagttaagtatacatttattttttactgtgacttgttcaggaccacattttacaaaatgccttgtttccttcattgtttctggaaaggaaagttctattaatattgttttactttgaatatagaatagtttttttaattagggcttattttgaaaaattctgagtttaattcaaatgtatgccaataccttccaaagtaaggtaatattcagagacagttgttgtgatcagatggcttagagaaatttctggaatattcacattcgaagattccttattaatgaatgtctttgacttaaatctaaccaaaaactgcaacattattctttgtacattttcattatatagtgttaacaagcttagttgcaaacaaataaaatacttaagctatttgtttaccttgccttcttaatactgtgataatgtttattaattcaaataacttatgtgagagctgctataaccatttccccagttcaacattgcattgaaaatttatggacctttaaaaaaaaaagcccaacagtgatttttttttaataattaaagaatgattttactttgta

SEQ ID NO: 244984 - DNA, 3102 bp, Homo sapiens
acagaaggcggggccagcgccgctgccgggtgctggaggcgccattggagccggcttggctggcgagcccggctgaggagcctcttgggccgcacttaccgccgcgtccgctcccggtccctggcccctcagcggcatggcgtgcggggcgacgctgaagcggcccatggagttcgaggcggcgctgctgagccccggctccccgaagcggcggcgctgcgcccctctgcccggccccactccgggcctcaggcccccggacgccgagccgccgccgccgtttcagacgcagaccccaccgcagagtctgcagcagcccgccccgcccggcagcgagcggcgccttccaactccggagcaaatttttcagaacataaaacaagaatatagtcgttatcagaggtggagacatttagaagttgttcttaatcagagtgaagcttgtgcttcggaaagtcaacctcactcctcagcactcacagcacctagctctccaggttcctcatggatgaagaaggaccagcccacatttaccctccgacaagttggcataatatgtgagcgcctcttaaaagactatgaagataaaattcgggaggagtatgagcaaatcctcaataccaaactagcagaacaatatgaatcttttgtgaaattcacacatgatcagattatgcgacggtatgggacaaggccaacaagctatgtgtcatgaagctttgtcacatatctgggtaccaggtttgacctcaagagatggctgctgtacactttttgcaactggtttgatgtcacatttcagctccaactttgcatcctgagaacacttaaacgtttctgcaggtccattttatacaacttgaaagaccgtaaaactttctggttgccacaagcatatctttcttttctgctcatccaataaacagctgtgccctactgtgatagattttccaaacaaaaatacctggagcagcagtttagcaaaatatgccttcagtggcattcaacaaatggagtttccccaagcacagttctgtaagaagtgcgtgtgagagtgtgtgtatatgtgtgtatgtgtattttaagttattatttgtattgtgcaaaaatttttttttgatcttggggattctggctgtgaatttggtgcacgacaattatggtaaaaaaacatttgcttggtctaaagaagatcattaatgttttgtgaccatacaagttgtaacagtggattgtttttatgtgtaggtattgttaaatacagggactgtttccaggcacagaatatgaatcgtaagttaggatggacattagatgtgattatgatgataaagcgaaggtctgcggtcctatatctacagacacgtggtgagaaattagaacaaactggagacgggccattgacacatggactctgcctgggcatgttaggttaattctttgactccaagccttaaaatactcacatggagtcagcgctcacctcattcacacaattatcatagagctccctggacactgaacctctaaagggaaaaggtctaccctggagccaggagcatcagggttggcttgggagcatgagaggtgagcccagggctaggcctgggccaggccccggcagcactgctacttgggaggagccacttcacctttgtattagttattaaaaaatataatttgggctgggcgcagtggctcacgcctgtaatcccagcactttgggagtccgaggcatgcggatcacttgaggtcaggagttcgagaccaccctggccaatatggtgaaaccccatctctactaaaaatacaacaaagttagccgggcgtggtggcaggcgtctgtaatcccagctgcttgggaggctgaggcaggagaatcacttgaaccctggaggtggcggttgcagtgagcacagatcatgccactgcactccagcctgggcaacaaaacgagacttcgtctcaaaaaaaaaaaaaaaacatagaatttggatcctttggtcgggttctcccaaattcttttgaggtgtccatggtcaactgcttcagctttgttttggcaaccccctgcccgaagtcgcatataggctgttcttcaccttgtttccaaggctgaggaacagaaagtagcctctgttttgaggaggtggaagttaagtatacatttattttttactgtgacttgttcaggaccacattttacaaaatgccttgtttccttcattgtttctggaaaggaaagttctattaatattgttttactttgaatatagaatagtttttttaattagggcttattttgaaaaattctgagtttaattcaaatgtatgccaataccttccaaagtaaggtaatattcagagacagttgttgtgatcagatggcttagagaaatttctggaatattcacattcgaagattccttattaatgaatgtctttgacttaaatctaaccaaaaactgcaacattattctttgtacattttcattatatagtgttaacaagcttagttgcaaacaaataaaatacttaagctatttgtttaccttgccttcttaatactgtgataatgtttattaattcaaataacttatgtgagagctgctataaccatttccccagttcaacattgcattgaaaatttatggacctttaaaaaaaaaagcccaacagtgatttttttttaataattaaagaatgattttactttgtatttgaagggtgatttgtttcatctcttcttttttcagggtagtcacttgttcctaaaagaggaacatagcagtggctgtaatgggaatggctctgcagtgggctagtcacaccaaaataaagaaagggcagctgtgggagccatcagaagctgtggaggctggactggtaatggggaatgctgccccactgaagtcttgttttagagatcagtgtgatgtgctcacttaactataaagtgtcagtccccattccaactaagtggctcctggctgggaagtagagtaggtttctctaaggaaaatgacacctgctcaccacccgccccactataccacattgttgttaggctatcatataatgataaggtagccctctgaggcc

SEQ ID NO: 244985 - DNA, 2925 bp, Homo sapiens
acagaaggcggggccagcgccgctgccgggtgctggaggcgccattggagccggcttggctggcgagcccggctgaggagcctcttgggccgcacttaccgccgcgtccgctcccggtccctggcccctcagcggcatggcgtgcggggcgacgctgaagcggcccatggagttcgaggcggcgctgctgagccccggctccccgaagcggcggcgctgcgcccctctgcccggccccactccgggcctcaggcccccggacgccgagccgccgccgccgtttcagacgcagaccccaccgcagagtctgcagcagcccgccccgcccggcagcgagcggcgccttccaactccggagcaaatttttcagaacataaaacaagaatatagtcgttatcagaggtggagacatttagaagttgttcttaatcagagtgaagcttgtgcttcggaaagtcaacctcactcctcagcactcacagcacctagctctccaggttcctcatggatgaagaaggaccagcccacatttaccctccgacaagttggcataatatgtgagcgcctcttaaaagactatgaagataaaattcgggaggagtatgagcaaatcctcaataccaaactagcagaacaatatgaatcttttgtgaaattcacacatgatcagattatgcgacggtatgggacaaggccaacaagctatgtgtcatgaagctttgtcacatatctgggtaccaggtttgacctcaagagatggctgctgtacactttttgcaactggtttgatgtcacatttcagctccaactttgcatcctgagaacacttaaacgtttctgcaggtccattttatacaacttgaaagaccgtaaaactttctggttgccacaagcatatctttcttttctgctcatccaataaacagctgtgccctactgtgatagattttccaaacaaaaatacctggagcagcagtttagcaaaatatgccttcagtggcattcaacaaatggagtttccccaagcacagttctgtaagaagtgcgtgtgagagtgtgtgtatatgtgtgtatgtgtattttaagttattatttgtattgtgcaaaaatttttttttgatcttggggattctggctgtgaatttggtgcacgacaattatggtaaaaaaacatttgcttggtctaaagaagatcattaatgttttgtgaccatacaagttgtaacagtggattgtttttatgtgtaggtattgttaaatacagggactgtttccaggcacagaatatgaatcgtaagttaggatggacattagatgtgattatgatgataaagcgaaggtctgcggtcctatatctacagacacgtggtgagaaattagaacaaactggagacgggccattgacacatggactctgcctgggcatgttaggttaattctttgactccaagccttaaaatactcacatggagtcagcgctcacctcattcacacaattatcatagagctccctggacactgaacctctaaagggaaaaggtctaccctggagccaggagcatcagggttggcttgggagcatgagaggtgagcccagggctaggcctgggccaggccccggcagcactgctacttgggaggagccacttcacctttgtattagttattaaaaaatataatttgggctgggcgcagtggctcacgcctgtaatcccagcactttgggagtccgaggcatgcggatcacttgaggtcaggagttcgagaccaccctggccaatatggtgaaaccccatctctactaaaaatacaacaaagttagccgggcgtggtggcaggcgtctgtaatcccagctgcttgggaggctgaggcaggagaatcacttgaaccctggaggtggcggttgcagtgagcacagatcatgccactgcactccagcctgggcaacaaaacgagacttcgtctcaaaaaaaaaaaaaaaacatagaatttggatcctttggtcgggttctcccaaattcttttgaggtgtccatggtcaactgcttcagctttgttttggcaaccccctgcccgaagtcgcatataggctgttcttcaccttgtttccaaggctgaggaacagaaagtagcctctgttttgaggaggtggaagttaagtatacatttattttttactgtgacttgttcaggaccacattttacaaaatgccttgtttccttcattgtttctggaaaggaaagttctattaatattgttttactttgaatatagaatagtttttttaattagggcttattttgaaaaattctgagtttaattcaaatgtatgccaataccttccaaagtaaggtaatattcagagacagttgttgtgatcagatggcttagagaaatttctggaatattcacattcgaagattccttattaatgaatgtctttgacttaaatctaaccaaaaactgcaacattattctttgtacattttcattatatagtgttaacaagcttagttgcaaacaaataaaatacttaagctatttgtttaccttgccttcttaaaaaaaaaaaatcaaacacaaaagcatacacaaccgggcgaacacaagataaacgcaactaacacacacattgttggggccgccagtgcgcctagaaaaatttttacaaaccacctctggtggggccgcgggccccacagtagtgaagcaaaggttggtgaaacgggtttcccacaaagagaagccccccgtggaacacgcacacagggcgggtgggtttcttcccaaataaaaaaagcgcgggcggggacacgcgcgttgcttttgtgcgacaaccccagaagggggaggctcgaagagcgaatagcggggggctataaaacgcgggggttctccagggggctgtataaaatcctgggtg

SEQ ID NO: 244986 - DNA, 2110 bp, Homo sapiens
acagaaggcggggccagcgccgctgccgggtgctggaggcgccattggagccggcttggctggcgagcccggctgaggagcctcttgggccgcacttaccgccgcgtccgctcccggtccctggcccctcagcggcatggcgtgcggggcgacgctgaagcggcccatggagttcgaggcggcgctgctgagccccggctccccgaagcggcggcgctgcgcccctctgcccggccccactccgggcctcaggcccccggacgccgagccgccgccgccgtttcagacgcagaccccaccgcagagtctgcagcagcccgccccgcccggcagcgagcggcgccttccaactccggagcaaatttttcagaacataaaacaagaatatagtcgttatcagaggtggagacatttagaagttgttcttaatcagagtgaagcttgtgcttcggaaagtcaacctcactcctcagcactcacagcacctagctctccaggttcctcatggatgaagaaggaccagcccacatttaccctccgacaagttggcataatatgtgagcgcctcttaaaagactatgaagataaaattcgggaggagtatgagcaaatcctcaataccaaactagcagaacaatatgaatcttttgtgaaattcacacatgatcagattatgcgacggtatgggacaaggccaacaagctatgtgtcatgaagctttgtcacatatctgggtaccaggtttgacctcaagagatggctgctgtacactttttgcaactggtttgatgtcacatttcagctccaactttgcatcctgagaacacttaaacgtttctgcaggtccattttatacaacttgaaagaccgtaaaactttctggttgccacaagcatatctttcttttctgctcatccaataaacagctgtgccctactgtgatagattttccaaacaaaaatacctggagcagcagtttagcaaaatatgccttcagtggcattcaacaaatggagtttccccaagcacagttctgtaagaagtgcgtgtgagagtgtgtgtatatgtgtgtatgtgtattttaagttattatttgtattgtgcaaaaatttttttttgatcttggggattctggctgtgaatttggtgcacgacaattatggtaaaaaaacatttgcttggtctaaagaagatcattaatgttttgtgaccatacaagttgtaacagtggattgtttttatgtgtaggtattgttaaatacagggactgtttccaggcacagaatatgaatcgtaagttaggatggacattagatgtgattatgatgataaagcgaaggtctgcggtcctatatctacagacacgtggtgagaaattagaacaaactggagacgggccattgacacatggactctgcctgggcatgttaggttaattctttgactccaagccttaaaatactcacatggagtcagcgctcacctcattcacacaattatcatagagctccctggacactgaacctctaaagggaaaaggtctaccctggagccaggagcatcagggttggcttgggagcatgagaggtgagcccagggctaggcctgggccaggccccggcagcactgctacttgggaggagccacttcacctttgtattagttattaaaaaatataatttgggctgggcgcagtggctcacgcctgtaatcccagcactttgggagtccgaggcatgcggatcacttgaggtcaggagttcgagaccaccctggccaatatggtgaaaccccatctctactaaaaatacaacaaagttagccgggcgtggtggcaggcgtctgtaatcccagctgcttgggaggctgaggcaggagaatcacttgaaccctggaggtggcggttgcagtgagcacagatcatgccactgcactccagcctgggcaacaaaacgagacttcgtctcaaaaaaaaaaaaaaaaaaaacccgggctctttttcgggggcgacaaaagagagtttaagaggcacgggtcatttttctcgcccgttttgacaaggggtaaaacgcggccccaaagggggataatcgaacgatcgtaacgaaaa

SEQ ID NO: 244987 - DNA, 2553 bp, Homo sapiens
  misc_feature (10)..(10): n is a, c, g, or t
  misc_feature (24)..(25): n is a, c, g, or t
gctagtacgnggctggtttgaatnngccgaggttggagccggcttggctggcgagcccggctgaggagcctcttgggccgcacttaccgccgcgtccgctcccggtccctggcccctcagcggcatggcgtgcggggcgacgctgaagcggcccatggagttcgaggcggcgctgctgagccccggctccccgaagcggcggcgctgcgcccctctgcccggccccactccgggcctcaggcccccggacgccgagccgccgccgccgtttcagacgcagaccccaccgcagagtctgcagcagcccgccccgcccggcagcgagcggcgccttccaactccggagcaaatttttcagaacataaaacaagaatatagtcgttatcagaggtggagacatttagaagttgttcttaatcagagtgaagcttgtgcttcggaaagtcaacctcactcctcagcactcacagcacctagctctccaggttcctcatggatgaagaaggaccagcccacatttaccctccgacaagttggcataatatgtgagcgcctcttaaaagactatgaagataaaattcgggaggagtatgagcaaatcctcaataccaaactagcagaacaatatgaatcttttgtgaaattcacacatgatcagattatgcgacggtatgggacaaggccaacaagctatgtgtcatgaagctttgtcacatatctgggtaccaggtttgacctcaagagatggctgctgtacactttttgcaactggtttgatgtcacatttcagctccaactttgcatcctgagaacacttaaacgtttctgcaggtccattttatacaacttgaaagaccgtaaaactttctggttgccacaagcatatctttcttttctgctcatccaataaacagctgtgccctactgtgatagattttccaaacaaaaatacctggagcagcagtttagcaaaatatgccttcagtggcattcaacaaatggagtttccccaagcacagttctgtaagaagtgcgtgtgagagtgtgtgtatatgtgtgtatgtgtattttaagttattatttgtattgtgcaaaaatttttttttgatcttggggattctggctgtgaatttggtgcacgacaattatggtaaaaaaacatttgcttggtctaaagaagatcattaatgttttgtgaccatacaagttgtaacagtggattgtttttatgtgtaggtattgttaaatacagggactgtttccaggcacagaatatgaatcgtaagttaggatggacattagatgtgattatgatgataaagcgaaggtctgcggtcctatatctacagacacgtggtgagaaattagaacaaactggagacgggccattgacacatggactctgcctgggcatgttaggttaattctttgactccaagccttaaaatactcacatggagtcagcgctcacctcattcacacaattatcatagagctccctggacactgaacctctaaagggaaaaggtctaccctggagccaggagcatcagggttggcttgggagcatgagaggtgagcccagggctaggcctgggccaggccccggcagcactgctacttgggaggagccacttcacctttgtattagttattaaaaaatataatttgggctgggcgcagtggctcacgcctgtaatcccagcactttgggagtccgaggcatgcggatcacttgaggtcaggagttcgagaccaccctggccaatatggtgaaaccccatctctactaaaaatacaacaaagttagccgggcgtggtggcaggcgtctgtaatcccagctgcttgggaggctgaggcaggagaatcacttgaaccctggaggtggcggttgcagtgagcacagatcatgccactgcactccagcctgggcaacaaaacgagacttcgtctcaaaaaaaaaaaaaaaacatagaatttggatcctttggtcgggttctcccaaattcttttgaggtgtccatggtcaactgcttcagctttgttttggcaaccccctgcccgaagtcgcatataggctgttcttcaccttgtttccaaggctgaggaacagaaagtagcctctgttttgaggaggtggaagttaagtatacatttattttttactgtgacttgttcaggaccacattttacaaaatgccttgtttccttcattgtttctggaaaggaaagttctattaatattgttttactttgaatatagaatagtttttttaattagggcttattttgaaaaattctgagtttaattcaaatgtatgccaataccttccaaagtaaggtaatattcagagacagttgttgtgatcagatggcttagagaaatttctggaatattcacattcgaagattccttattaatgaatgtctttgacttaaatctaaccaaaaactgcaacattattctttgtacattttcattatatagtgttaacaagcttagttgcaaacaaataaaatacttaagctatttgtttaccttgccttcttaa

SEQ ID NO: 244988 - DNA, 2163 bp, Homo sapiens
ccacattttacccatgaggaacctggagagctaggtgctgtgagtgctgaggagtgaggttgactttccgaagcacaagcttcactctgattaaggttcctcatggatgaagaaggaccagcccacatttaccctccgacaagttggcataatatgtgagcgcctcttaaaagactatgaagataaaattcgggaggagtatgagcaaatcctcaataccaaactagcagaacaatatgaatcttttgtgaaattcacacatgatcagattatgcgacggtatgggacaaggccaacaagctatgtgtcatgaagctttgtcacatatctgggtaccaggtttgacctcaagagatggctgctgtacactttttgcaactggtttgatgtcacatttcagctccaactttgcatcctgagaacacttaaacgtttctgcaggtccattttatacaacttgaaagaccgtaaaactttctggttgccacaagcatatctttcttttctgctcatccaataaacagctgtgccctactgtgatagattttccaaacaaaaatacctggagcagcagtttagcaaaatatgccttcagtggcattcaacaaatggagtttccccaagcacagttctgtaagaagtgcgtgtgagagtgtgtgtatatgtgtgtatgtgtattttaagttattatttgtattgtgcaaaaatttttttttgatcttggggattctggctgtgaatttggtgcacgacaattatggtaaaaaaacatttgcttggtctaaagaagatcattaatgttttgtgaccatacaagttgtaacagtggattgtttttatgtgtaggtattgttaaatacagggactgtttccaggcacagaatatgaatcgtaagttaggatggacattagatgtgattatgatgataaagcgaaggtctgcggtcctatatctacagacacgtggtgagaaattagaacaaactggagacgggccattgacacatggactctgcctgggcatgttaggttaattctttgactccaagccttaaaatactcacatggagtcagcgctcacctcattcacacaattatcatagagctccctggacactgaacctctaaagggaaaaggtctaccctggagccaggagcatcagggttggcttgggagcatgagaggtgagcccagggctaggcctgggccaggccccggcagcactgctacttgggaggagccacttcacctttgtattagttattaaaaaatataatttgggctgggcgcagtggctcacgcctgtaatcccagcactttgggagtccgaggcatgcggatcacttgaggtcaggagttcgagaccaccctggccaatatggtgaaaccccatctctactaaaaatacaacaaagttagccgggcgtggtggcaggcgtctgtaatcccagctgcttgggaggctgaggcaggagaatcacttgaaccctggaggtggcggttgcagtgagcacagatcatgccactgcactccagcctgggcaacaaaacgagacttcgtctcaaaaaaaaaaaaaaaacatagaatttggatcctttggtcgggttctcccaaattcttttgaggtgtccatggtcaactgcttcagctttgttttggcaaccccctgcccgaagtcgcatataggctgttcttcaccttgtttccaaggctgaggaacagaaagtagcctctgttttgaggaggtggaagttaagtatacatttattttttactgtgacttgttcaggaccacattttacaaaatgccttgtttccttcattgtttctggaaaggaaagttctattaatattgttttactttgaatatagaatagtttttttaattagggcttattttgaaaaattctgagtttaattcaaatgtatgccaataccttccaaagtaaggtaatattcagagacagttgttgtgatcagatggcttagagaaatttctggaatattcacattcgaagattccttattaatgaatgtctttgacttaaatctaaccaaaaactgcaacattattctttgtacattttcattatatagtgttaacaagcttagttgcaaacaaataaaatacttaagctatttgtttaccttgccttcttaa

SEQ ID NO: 244989 - DNA, 2430 bp, Homo sapiens
acagaaggcggggccagcgccgctgccgggtgctggaggcgccattggagccggcttggctggcgagcccggctgaggagcctcttgggccgcacttaccgccgcgtccgctcccggtccctggcccctcagcggcatggcgtgcggggcgacgctgaagcggcccatggagttcgaggcggcgctgctgagccccggctccccgaagcggcggcgctgcgcccctctgcccggccccactccgggcctcaggcccccggacgccgagccgccgccgccgtttcagacgcagaccccaccgcagagtctgcagcagcccgccccgcccggcagcgagcggcgccttccaactccggagcaaatttttcagaacataaaacaagaatatagtcgttatcagaggtggagacatttagaagttgttcttaatcagagtgaagcttgtgcttcggaaagtcaacctcactcctcagcactcacagcacctagctctccagaacaatatgaatcttttgtgaaattcacacatgatcagattatgcgacggtatgggacaaggccaacaagctatgtgtcatgaagctttgtcacatatctgggtaccaggtttgacctcaagagatggctgctgtacactttttgcaactggtttgatgtcacatttcagctccaactttgcatcctgagaacacttaaacgtttctgcaggtccattttatacaacttgaaagaccgtaaaactttctggttgccacaagcatatctttcttttctgctcatccaataaacagctgtgccctactgtgatagattttccaaacaaaaatacctggagcagcagtttagcaaaatatgccttcagtggcattcaacaaatggagtttccccaagcacagttctgtaagaagtgcgtgtgagagtgtgtgtatatgtgtgtatgtgtattttaagttattatttgtattgtgcaaaaatttttttttgatcttggggattctggctgtgaatttggtgcacgacaattatggtaaaaaaacatttgcttggtctaaagaagatcattaatgttttgtgaccatacaagttgtaacagtggattgtttttatgtgtaggtattgttaaatacagggactgtttccaggcacagaatatgaatcgtaagttaggatggacattagatgtgattatgatgataaagcgaaggtctgcggtcctatatctacagacacgtggtgagaaattagaacaaactggagacgggccattgacacatggactctgcctgggcatgttaggttaattctttgactccaagccttaaaatactcacatggagtcagcgctcacctcattcacacaattatcatagagctccctggacactgaacctctaaagggaaaaggtctaccctggagccaggagcatcagggttggcttgggagcatgagaggtgagcccagggctaggcctgggccaggccccggcagcactgctacttgggaggagccacttcacctttgtattagttattaaaaaatataatttgggctgggcgcagtggctcacgcctgtaatcccagcactttgggagtccgaggcatgcggatcacttgaggtcaggagttcgagaccaccctggccaatatggtgaaaccccatctctactaaaaatacaacaaagttagccgggcgtggtggcaggcgtctgtaatcccagctgcttgggaggctgaggcaggagaatcacttgaaccctggaggtggcggttgcagtgagcacagatcatgccactgcactccagcctgggcaacaaaacgagacttcgtctcaaaaaaaaaaaaaaaacatagaatttggatcctttggtcgggttctcccaaattcttttgaggtgtccatggtcaactgcttcagctttgttttggcaaccccctgcccgaagtcgcatataggctgttcttcaccttgtttccaaggctgaggaacagaaagtagcctctgttttgaggaggtggaagttaagtatacatttattttttactgtgacttgttcaggaccacattttacaaaatgccttgtttccttcattgtttctggaaaggaaagttctattaatattgttttactttgaatatagaatagtttttttaattagggcttattttgaaaaattctgagtttaattcaaatgtatgccaataccttccaaagtaaggtaatattcagagacagttgttgtgatcagatggcttagagaaatttctggaatattcacattcgaagattccttattaatgaatgtctttgacttaaatctaaccaaaaactgcaacattattctttgtacattttcattatatagtgttaacaagcttagttgcaaacaaataaaatacttaagctatttgtttaccttgccttcttaa

SEQ ID NO: 244990 - DNA, 2049 bp, Homo sapiens
gctgaccagcaccatggcggttggcaagaacaagcgccttacgaaaggcggcaaaaagggagccaagaagaaagtggttgatccattttctaagaaagatggtatgatgtgaaagcacctgctatgttcaatataagaaatattggaaagacgctcgtcaccaggacccaaggaaccaaaattgcatctgatggtctcaagggtcgtgtgtttgaagtgagtcttgctgatttgcagaatgatgaagttgcatttagaaaattcaagctgattactgaagatgttcagggtaaaaactgcctgactaacttccatgcgtttctgcaggtccattttatacaacttgaaagaccgtaaaactttctggttgccacaagcatatctttcttttctgctcatccaataaacagctgtgccctactgtgatagattttccaaacaaaaatacctggagcagcagtttagcaaaatatgccttcagtggcattcaacaaatggagtttccccaagcacagttctgtaagaagtgcgtgtgagagtgtgtgtatatgtgtgtatgtgtattttaagttattatttgtattgtgcaaaaatttttttttgatcttggggattctggctgtgaatttggtgcacgacaattatggtaaaaaaacatttgcttggtctaaagaagatcattaatgttttgtgaccatacaagttgtaacagtggattgtttttatgtgtaggtattgttaaatacagggactgtttccaggcacagaatatgaatcgtaagttaggatggacattagatgtgattatgatgataaagcgaaggtctgcggtcctatatctacagacacgtggtgagaaattagaacaaactggagacgggccattgacacatggactctgcctgggcatgttaggttaattctttgactccaagccttaaaatactcacatggagtcagcgctcacctcattcacacaattatcatagagctccctggacactgaacctctaaagggaaaaggtctaccctggagccaggagcatcagggttggcttgggagcatgagaggtgagcccagggctaggcctgggccaggccccggcagcactgctacttgggaggagccacttcacctttgtattagttattaaaaaatataatttgggctgggcgcagtggctcacgcctgtaatcccagcactttgggagtccgaggcatgcggatcacttgaggtcaggagttcgagaccaccctggccaatatggtgaaaccccatctctactaaaaatacaacaaagttagccgggcgtggtggcaggcgtctgtaatcccagctgcttgggaggctgaggcaggagaatcacttgaaccctggaggtggcggttgcagtgagcacagatcatgccactgcactccagcctgggcaacaaaacgagacttcgtctcaaaaaaaaaaaaaaaacatagaatttggatcctttggtcgggttctcccaaattcttttgaggtgtccatggtcaactgcttcagctttgttttggcaaccccctgcccgaagtcgcatataggctgttcttcaccttgtttccaaggctgaggaacagaaagtagcctctgttttgaggaggtggaagttaagtatacatttattttttactgtgacttgttcaggaccacattttacaaaatgccttgtttccttcattgtttctggaaaggaaagttctattaatattgttttactttgaatatagaatagtttttttaattagggcttattttgaaaaattctgagtttaattcaaatgtatgccaataccttccaaagtaaggtaatattcagagacagttgttgtgatcagatggcttagagaaatttctggaatattcacattcgaagattccttattaatgaatgtctttgacttaaatctaaccaaaaactgcaacattattctttgtacattttcattatatagtgttaacaagcttagttgcaaacaaataaaatacttaagctatttgtttaccttgccttcttaa

SEQ ID NO: 244991 - DNA, 1358 bp, Homo sapiens
tagggctaggagcgaggccggggttgaatcggcaccgaggggtattgttaaatacagggactgtttccaggcacagaatatgaatcgtaagttaggatggacattagatgtgattatgatgataaagcgaaggtctgcggtcctatatctacagacacgtggtgagaaattagaacaaactggagacgggccattgacacatggactctgcctgggcatgttaggttaattctttgactccaagccttaaaatactcacatggagtcagcgctcacctcattcacacaattatcatagagctccctggacactgaacctctaaagggaaaaggtctaccctggagccaggagcatcagggttggcttgggagcatgagaggtgagcccagggctaggcctgggccaggccccggcagcactgctacttgggaggagccacttcacctttgtattagttattaaaaaatataatttgggctgggcgcagtggctcacgcctgtaatcccagcactttgggagtccgaggcatgcggatcacttgaggtcaggagttcgagaccaccctggccaatatggtgaaaccccatctctactaaaaatacaacaaagttagccgggcgtggtggcaggcgtctgtaatcccagctgcttgggaggctgaggcaggagaatcacttgaaccctggaggtggcggttgcagtgagcacagatcatgccactgcactccagcctgggcaacaaaacgagacttcgtctcaaaaaaaaaaaaaaaacatagaatttggatcctttggtcgggttctcccaaattcttttgaggtgtccatggtcaactgcttcagctttgttttggcaaccccctgcccgaagtcgcatataggctgttcttcaccttgtttccaaggctgaggaacagaaagtagcctctgttttgaggaggtggaagttaagtatacatttattttttactgtgacttgttcaggaccacattttacaaaatgccttgtttccttcattgtttctggaaaggaaagttctattaatattgttttactttgaatatagaatagtttttttaattagggcttattttgaaaaattctgagtttaattcaaatgtatgccaataccttccaaagtaaggtaatattcagagacagttgttgtgatcagatggcttagagaaatttctggaatattcacattcgaagattccttattaatgaatgtctttgacttaaatctaaccaaaaactgcaacattattctttgtacattttcattatatagtgttaacaagcttagttgcaaacaaataaaatacttaagctatttgtttaccttgccttcttaa

SEQ ID NO: 244992 - DNA, 1094 bp, Homo sapiens
  misc_feature (942)..(942): n is a, c, g, or t
acagaaggcggggccagcgccgctgccgggtgctggaggcgccattggagccggcttggctggcgagcccggctgaggagcctcttgggccgcacttaccgccgcgtccgctcccggtccctggcccctcagcggcatggcgtgcggggcgacgctgaagcggcccatggagttcgaggcggcgctgctgagccccggctccccgaagcggcggcgctgcgcccctctgcccggccccactccgggcctcaggcccccggacgccgagccgccgccgccgtttcagacgcagaccccaccgcagagtctgcagcagcccgccccgcccggcagcgagcggcgccttccaactccggagcaaatttttcagaacataaaacaagaatatagtcgttatcagaggtggagacatttagaagttgttcttaatcagagtgaagcttgtgcttcggaaagtcaacctcactcctcagcactcacagcacctagctctccaggttcctcatggatgaagaaggaccagcccacatttaccctccgacaagttggcataatatgtgagcgcctcttaaaagactatgaagataaaattcgggaggagtatgagcaaatcctcaataccaaactagcagaacaatatgaatcttttgtgaaattcacacatgatcagattatgcgacggtatgggacaaggccaacaagctatgtgtcatgaagctttgtcacatatctgggtaccaggtttgacctcaagagatggctgctgtacactttttgcaactggtttgatgtcacatttcagctccaactttgcatcctgagaacacttaaacgtttctgcaggtccattttatacaacttgaaagaccgtaaaactttctggttgccacaagcatatctttcttttctgctcatccaataaacagctggccactggaaatntcacaaatccgacacagtacaaatgcctatggctacaagagtccaccattgaaaggcggaaggggtatgggatggttagatatgatgcaatttttactggttgctgatgcgaatagaaactgtgcaagtgctcacgataagactcgctgatc

SEQ ID NO: 244993 - DNA, 1420 bp, Homo sapiens
aagcaaagaaccaaagccaggagacctgggtgctggttcaggctgtgaggccctgggtaagtcacctctctgggtctcaactttctgatctgtaaaatgtggagaacagctgtgagccaccacgcccagcccctttttgttttctaacagctaatttcgttttccagcagatttcatgtttctggacattgtatttatttggtcctatatctacagacacgtggtgagaaattagaacaaactggagacgggccattgacacatggactctgcctgggcatgttaggttaattctttgactccaagccttaaaatactcacatggagtcagcgctcacctcattcacacaattatcatagagctccctggacactgaacctctaaagggaaaaggtctaccctggagccaggagcatcagggttggcttgggagcatgagaggtgagcccagggctaggcctgggccaggccccggcagcactgctacttgggaggagccacttcacctttgtattagttattaaaaaatataatttgggctgggcgcagtggctcacgcctgtaatcccagcactttgggagtccgaggcatgcggatcacttgaggtcaggagttcgagaccaccctggccaatatggtgaaaccccatctctactaaaaatacaacaaagttagccgggcgtggtggcaggcgtctgtaatcccagctgcttgggaggctgaggcaggagaatcacttgaaccctggaggtggcggttgcagtgagcacagatcatgccactgcactccagcctgggcaacaaaacgagacttcgtctcaaaaaaaaaaaaaaaacatagaatttggatcctttggtcgggttctcccaaattcttttgaggtgtccatggtcaactgcttcagctttgttttggcaaccccctgcccgaagtcgcatataggctgttcttcaccttgtttccaaggctgaggaacagaaagtagcctctgttttgaggaggtggaagttaagtatacatttattttttactgtgacttgttcaggaccacattttacaaaatgccttgtttccttcattgtttctggaaaggaaagttctattaatattgttttactttgaatatagaatagtttttttaattagggcttattttgaaaaattctgagtttaattcaaatgtatgccaataccttccaaagtaaggtaatattcagagacagttgttgtgatcagatggcttagagaaatttctggaatattcacattcgaagattccttattaatgaatgtctttgacttaaatctaaccaaaaactgcaacattattctttgtacattttcattatatagtgttaacaagcttagttgcaaacaaataaaatacttaagctatttgtttaccttgccttcttaa

SEQ ID NO: 244994 - DNA, 599 bp, Homo sapiens
agctcggtaccccgccatttacaactatctaaaatgcctccgtttctcccaaattcttttgaggtgtccatggtcaactgcttcagctttgttttggcaaccccctgcccgaagtcgcatataggctgttcttcaccttgtttccaaggctgaggaacagaaagtagcctctgttttgaggaggtggaagttaagtatacatttattttttactgtgacttgttcaggaccacattttacaaaatgccttgtttccttcattgtttctggaaaggaaagttctattaatattgttttactttgaatatagaatagtttttttaattagggcttattttgaaaaattctgagtttaattcaaatgtatgccaataccttccaaagtaaggtaatattcagagacagttgttgtgatcagatggcttagagaaatttctggaatattcacattcgaagattccttattaatgaatgtctttgacttaaatctaaccaaaaactgcaacattattctttgtacattttcattatatagtgttaacaagcttagttgcaaacaaataaaatacttaagctatttgtttaccttgccttcttaa

SEQ ID NO: 244995 - DNA, 736 bp, Homo sapiens
ttatgtcgggggagggggagattgagacctacatgccaaagggagtatctaaagtctagtcagaagatctttgtctcttcccacttctgaagaaagtttgaagaaatgagacaataaagtgaaagctcaagtttgtttcttttttattagagcaaatttttcagaacataaaacaagaatatagtcgttatcagaggtggagacatttagaagttgttcttaatcagagtgaagcttgtgcttcggaaagtcaacctcactcctcagcactcacagcacctagctctccaggtaagcccactttgatctgcaaaattcgcattaagagtttgtaaatggtacttataatgatgaatctagaattggcctcctctaatgtaatagaattgctaacggggatgtattaatatttacagatatttttaaaactatacagtcatgaaattggaagaaacctcacattgatttgatgtgcttccatccacccaatacaagaatatcttcctgtataactgcaatgtgtaatattgtagccagggtgcaataaatagccacatgtgggctatttaattttaaactaattaaaattagataaaattttggccggctgaggtggctcatgcctgtaatcctagcactttgggaggctgaggcaggcggatctcctgaggtcaagagttcaagaccggcctggccaacatggcaaaacctcatctctactaaaaatacaaaaaaa

SEQ ID NO: 244996 - DNA, 872 bp, Homo sapiens
tctgtgatagggtcttgctctgtcacccaggctggagtgcaatggtgcgggtgcgatctcggctcactgcaactccagcctggtgacagagcgagactatgtctcaaaaaaaaaaaaaagttcaacatatcaaagtgacgaaaggagtctactatcattaagtgttgaaatctgcacccttaatcccagggttgaatccatgctaaaccactaaagcagtttaactttaggcaagttatttaaattctgtactccaatattctcacctctaaaacatgaataacagtatctactcctactcaaggttttgatgatgattaagttaacacaaactcacaactttaacagtgttggacatagtcaagtgtttagaatacttccataaattaatgtcctgctacttttttctgccaaatcagaaagccattatatgacccaacaaggtatcagaaataattagtaatttcctggagcctcatcagttctcaacctatcttactcagactgattttgctcattaatacacccaataaaaactcatttgaaaaaccagggcaagttattgttaggcttgggatgattattttcttcaagagattgagacagtggcctactctaataggtctccaaacttactgccctacttgccctcttagttctcatcactaatattccctacacaacagaagataaaccagacctcttcttcaaaatccttcaatagattctacttgtgcccaagacaggatcttaaacaagaccctctaaggtcccgtgctatgaaatgtttggtccttgcctacctctctaactccatccctcatctatgtattcttggtaattattttccagtattatttcttacttggagg

SEQ ID NO: 244997 - DNA, 1737 bp, Homo sapiens
  misc_feature (702)..(702): n is a, c, g, or t
  misc_feature (1544)..(1544): n is a, c, g, or t
  misc_feature (1558)..(1558): n is a, c, g, or t
  misc_feature (1580)..(1581): n is a, c, g, or t
tctgtgatagggtcttgctctgtcacccaggctggagtgcaatggtgcgggtgcgatctcggctcactgcaacctctgcttcctgggctcaagcgattctcatgcctgtctctcaagtagctgggactacagacacttgccaccactcctggctaatttttgtatatttttgaagagacagggtttcaccatgttgcccaggccggtctcaaacccctgagctcaagcgatgcgcctccctcagcctcccaaagtgctgggattacaggcctgagctaccacacctggccaacatgattttctaataggccaaaggtgagaagagtaaaagtcaaggatggctagccaaaatctttggcccaagagacacaaaaattgtttcattaactgaaaaaggcaacagtacacaagagactggtttgaggcatgaacatcaggagcacagttttgcacttttaagttgacatattggatattcaacagagttgtcatgcaggtaaactgaattggtatgacattcgaaagaaaagtataggctgttgatcttaagtgtcgaaatcagcttataggtggtatattacatcatgaatgaatctgaatgaaattggacccagagtgtggacagaaaaaaaagtggaaggcttaaccatggggcactccacagaaagaagtttaacatgtaacagaaacatgtacaaaaancctgaaagcaaagtaaaaaaaaaataaaaacgtttcaaggaagagatctggttaaatggaaccacagggtcaagtgagatgagttaaccacaaataatttttttctaactgaagttcacttcggttttataagtcttagaaaaaaaaaaagatagctcacttttgtttttttactttaagagatagggtctcactcttgtcacccaggctggagtacagtggcgcaatcataactcacactgacctcaaactcctgaactcaattaactctaccgcctcagcctcccagggagctacactacagctgtgtgccaccgtgcccagctttttgtagacaggctcttgctatgttgccagactttcctggccttaagctatcctccaacttcagcctcccaaagtgctgggattataggcataaactgctgcaactggcctaaagctcacttttaaaatgtgcttgcttccctattaacaatgccatcacaaccatggtaacattttaccaagatacatctacctaaacattaactaccttgcacatatacacatctttaagccatttaaggtgttgggaaatcaagggcaaaaatataaacatatttagttttaaaattttaataataaaagtccaaagttgttctttggaactttaaccaaactaaaatctgtttttctagaatgctcagccggacacagtggctcactgcaacgtctgcctcccaggttcaagcaattctcctgcctcagcctcccaagtagctgggactatataggcgcatgccgacacgcctggctgattttcttgtatttcaatagagatggggtttaatcgtgttgcncaggctggtctcanactcctgagctcaccaagcagnngtgatcacctgaggttttatataaaatcctcagtgtgattttatataaattctcagatattactttgtttggggagtaaatcagagaattttatataaaccacactaagccagcctgcctcctcaagaagtttaggtaaccaaattaccgttgggc

SEQ ID NO: 244998 - DNA, 657 bp, Homo sapiens
  misc_feature (30)..(30): n is a, c, g, or t
ttaacatgtaacagaaacatgtacaaaaancctgaaagcaaagtaaaaaaaaaataaaaacgtttcaaggaagagatctggttaaatggaaccacagggtcaagtgagatgaggattgaaaaaggacccctgggcttagttaatgcatccgtctccgtggttcttttttaaccacaaataatttttttctaactgaagttcacttcggttttataagtcttagaaaaaaaaaaagatagctcacttttgtttttttactttaagagatagggtctcactcttgtcacccaggctggagtacagtggcgcaatcataactcacactgacctcaaactcctgaactcaattaactctaccgcctcagcctcccagggagctacactacagctgtgtgccaccgtgcccagctttttgtagacaggctcttgctatgttgccagactttcctggccttaagctatcctccaacttcagcctcccaaagtgctgggattataggcataaactgctgcaactggcctaaagctcacttttaaaatgtgcttgcttccctattaacaatgccatcacaaccatggtaacattttaccaagatacatctacctaaacattaactaccttgcacatatacacatctttaagccatttaaggtgtt

SEQ ID NO: 244999 - DNA, 765 bp, Homo sapiens
ccagggagggtcctgcctcactgctcgggggctcaccagccaggcctcagcatctctgccccactcaccggccctcatggtaatggaccacatgggtcagaggtgacagcaggtggcttacacatttccagagatctgatctcgtaacctcagggaccataaaataaaaaacatttcttactgtgtgcagtatcagggccacgtttaaagtcatgtgcaaagtttaggccaaaggcactcaaagtgatcagccagattctctcgtatgtttgttcagtgcagacacacagacgatggtgcgcgctattgagagaaaacagctgaaagtaaagtaataattttgagttttgctactttttggttatgtggcttgagctcatgcctttcccaagatctcgggggctagaagactgtccccagaaccatgaaccccagtgaaacaaatacatatatgcccgtggctgtgtcctcaacctggacctgaaaggcaagtggccatgggggtggctttctggaaaaggggaggggcttgggcaagcttagcccacagctgcagagaaaaccctcagggcgggctctgccagcgggtccagcacgccctcaaaatgcagcgccctcgtccagccggcagcccctgcctgtgtttgcgaagaatcaaggtgcttttgtgcttctgttcctttctcttcagctttacaacggccattctacatggaaaagcccccaaacggtgcctctataaacagtaaacccttgccaggctgg

SEQ ID NO: 245000 - DNA, 436 bp, Homo sapiens
gagaagagaatttccttcttggagtggtgaacaggaaggcttggaagggcagatggctaacctcgtgctgcatgtctccctggtgcagaaagtagatatgattatggatagagctgttctgagacaagataacatgttatttgcaatgtgagcccagcaacggctccccaaaagtgggaggagggatggagttgggttgtaagaaaattgagggttcctgggaaagtattccaagaatacaaattttatacttagaagacttcttgtaagaaagtgagtctaagaaagcagtcaggttcattcctctgaaaaacatgaaatgtgttacaaaaagccttatgatatggagtctgtctgacccccaccccactgctcttgcgaatgcttccagagattggggctcactggcgccccccggtggtattcaagccttctc

SEQ ID NO: 245001 - DNA, 295 bp, Homo sapiens
ttaatgaagtactcaacaggaaggtgtaaactgtgatcctcttccttgagtgagatggaaaaaaattaatttgccgcatcagtgtccatatctcagttcttctcacctgaagaacgttgggaagaccttaattggaatcacaagaattgggtgtaaactttggctccacattcactatctgtgggacattcattatctgtgggcttcatctgtaaatgggtgggctgtctttgggtaggtcacccagttgaaacaatggactccaagggttttattacctcctaagtgttgaata

SEQ ID NO: 245002 - DNA, 361 bp, Homo sapiens
tttgttccatagacacttgattgagtacttaagttgaacatctaggtctatgaatgacgttggtcaaatgttttattgttctctgtttcggttttagcaggagagatttgctgtttcataaaagaaattgggagagtatatcattttatgcctgtaacttattatagcattggaataagctgttctttggaggtttgagagactttaccagtacaatcattccccccctcccccaaatataaaaagataaaataaaaagccggtcagtgtctgttgcacaaaattacaaccgctctctgcttgtatttgcctagttctccagaatgtagggaaaaataaaaattcaatgaattagacacct

SEQ ID NO: 245003 - DNA, 338 bp, Homo sapiens
gaagctccattaactctgcacaaaacctcggcccgcctcggccgggcccagtgaaaggcgctcccgggcgggggccctcggggaggctgcccgtgtcctcgccccaacccagcccgagcgaggagaggggccatccccgggcccgcgccaggcccccagccggatgccggcttccaatggggaaactgaggcacggggcttggtcatgcaaaaggggccggagcggctgggactgagacccgttccttcgccgcggtccgcatgggtccggtggccagcaccgtgctggctgttttaatttggttgccgatatataaaaatcagatttgacattaaaa

SEQ ID NO: 245004 - DNA, 155 bp, Homo sapiens
gaaggctggaggcttggtccacgaacaagaaaagcaggacgaatgggggcggcgggttgagggtgaaggcacaagcaggcaggcaaaattactgaactccaacagcagcaagagccaaggcaaactgtggcataaacacacaaaacacatcttac

SEQ ID NO: 245005 - DNA, 427 bp, Homo sapiens
agggcagggagagcctcaggtggtgatgccagtctgtcctggccagcctaacagggggcttctggacaaaaattgctccatgaaagcaaaggggagatgctagccaaagggcacaaacttgcaattacaagacgagttctggagacctgctgtgagcacggtaactagagttaataatcatgcattacatacttaaaatttgagagtaactcttgcgtgttcttattacaaaaagggaactctgtgaggtgatgagtctcttaattagcttgattgtgatcgtcatttcacggtgtatatatatgtcagatcatcatgttgtacaccttatattaatacaatttttctctgtctcaaaagaaagagggatggtttctaaaaaaagttttaaagtgaataggcttattttggtgttaagtgaaaaagc

SEQ ID NO: 245006 - DNA, 499 bp, Homo sapiens
cctttgctttaaaaaacagccctagaagtacacatcgttggccccgaaggagccccagcagccatgtcggaccgcgaggtgaccttggagggcgggaggacggacgaggggcctggcggagctagactgagagggcgccgccggcgtcctgaaggccctgctccccgaatgtgtgggagtgtgtctgacggtgcgagggtggctgtggcggggcctgagcagcgtgtccgtgtcccgatgccgcccgcctgttactgagttaggcaggagtgcccgagtctggcgaacttcagcagttctcgttccagagctccacacgaggttggccaaagctttgcgggacttacatacccttcttcctccgcccagtcctgcttccttccccttcctttcacgggtgttgataccatgtcaacatcctcgtaccccaaactcagtcgcagcgtctgcttctggagaaaccattctgcagcattaaagctggtgagaagatgggatt

SEQ ID NO: 245007 - DNA, 228 bp, Homo sapiens
ctatcagaatgtagtttgggttccctcaaggtgagccctgagacaaggacttgggagcagatagtttatttgggatgtgatttgagtaactaaaagtgaaggagtgggaaaagtgaggcaggaagggagaaagtcagtagagtatattgagaaatggactgccactgtgggccactgggaaccttggtaataaccatgtggaatgtgcctcatagttgtaccaccaaa

SEQ ID NO: 245008 - DNA, 404 bp, Homo sapiens
gggtctctaggtagctgattagagcagtgcctctcaagtcgcctgggggcttcctagaatcacaggcaagcagtcccacacctgggcactctgatgcgacaaataagtaaggcatggtccacagccacaaggagcttatagtccaggatataaataactcatgagaaatgaaaaatgcaatcaaaaagaggcataaagtgcatgaaaattaagagaggggcaaaattaattctgatgcagagtggggctggagcaggggagagagggaattagggaaagtgtcagtgaaggaggtggtatatgaaataagtctcatggtatgggtaggatttggatgtgcaatggtgggtagggtgtgcaggacagttgggaggaagtgcaacactcatctgctctctggccac

SEQ ID NO: 245009 - DNA, 466 bp, Homo sapiens
ggaagcacatctcccaattccaggagtcaggaggccaagacctggggctgcagcagcagcacaagcccaccaaccttagcaacctaggctctgccggggatgggacggacacttctgttccctggagccaacattcaccaacattcatccacttgagagtcatccgggacttggataatctgcaaggtccaggtgtcctgccctagctgctgactgggtgggagcccgggaatctgcatgttcccatcccccgcaggggactccaatgaggcggcctgaggcccagtcatcaggaaacaccactctcactgggctgacacacacattaagcagcaggtgggggaaaagagcttctagcatatcaggcagcactttcgccaccacattctggatcaaaatagacaccatctctctcccgacatttatcaggtccctccctgccccatgcattaaaggatggttcaaa

SEQ ID NO: 245010 - DNA, 1024 bp, Homo sapiens
tatcaacagtattgattgagttgattttatatttccaccagttagtataattgctaaagatgaaaccccttccccagagcagttgaatttatagtggaatttgatatgatgtttactattagtgaaagtgatgacatataaatatatatgtttaaatattttagagatgagaatgtgtcttttattttgtgatgtagctgactttctctgaagaatagtggtttccttttaattcaaaaattgccatttattccagagcagttatgtattgcatgcattaaaagaatcatctttaattctaacaagaaaactacatgaaggaattctaatctagaaatttaatgcatatttgggtctgtctggctctaaaactcaagttatttttacatcatactgctgtcaggtgacttcttccacattctaaattgcaaatagtcataggatgttagagacggaaggaacgaagtattggtcatgtagtaaaactttttggaagggccaaaagaggtttatggacttgccaacaaccaacagatagtggccagactagaatttttgtcttctaattactgatatttgctgtttccaagctcctttccgttaccatttaggagcagttaattaaacacctactctcttgggacattggttatattattcaactctctctctttctcatatatgtgtgtgtgtgtatacacacatatatagagttttaaaaagtgtgtgtgtgtgtatatatatataggttttttgtccctcttcaggcagtgcatagtgaagtggcatatatatagtagcactcaataaatatcgattagtttgctgctactattttgttattgtgttcttcagtattgctattttgctcttttagccctctgacaactgtaagcaactttctatattaaaattcttttgttgaaatacctacattgatatctagtttcctgattataccttaatacatacaaaataaatcagaaactgaatgaaaaaatatgtatagggaaaacataataag

SEQ ID NO: 245011 - DNA, 498 bp, Homo sapiens
gacgtaagaagatctctccagataagaggcaacatgtttcaagaaattttaatctctgggcatgtgactatgttccatcttgtcttgatggcttttcaaataaccaaatatcatacgtatataaagaagccatggtggtctcaagcttcagacgctttccacgatgctataaagagatatggaacgcttttacatttcttcctgagagaagctatacagaggttttgaaaaagaagcccaaagtaaggttcactgttgacaaaaaggttgtttcttcactggagtcctaatcctcccagaagatttttgatgaattttgtaatactggtatttcatcagacatcctaaaagtatatgttttctgatccagcaccactatttaatttttaaagtacttttatgatttttataaggtcaaaaaacattcaaatccttgtgaaatgaatttgtgatgacatacgcatgtgtaaataaacttttcagatggccacatttaaa

SEQ ID NO: 245012 - DNA, 632 bp, Homo sapiens
ttcaaattgtaagttgtgactcagtagatcatgaaactaatagaggagaataacatcagtattcatgatgaataattaaatagaaaatactggagcacatcatacatgtaagagtaggtacccttttatgacaccgtatgtggatggatgggcgtgcatgtatttatataacgtatatatttaaatacatggtttgggggatggatgtctacatcaaatttatttgttactatgggttttggcaaaaaagtttgaaagctgctaggatagtgcatagccaggagggaaataagaagaagctatgagagaactagataatccttctcctacacagactcgtgttttgtgtgagtgggacactcctcagcctgcgtccactctcaggtagcttcctctttgaaccgcttgtcattgtgaggcagtgaccatctgcgccagccctgtccttggctctaacgtgatgttcatttgctcacctttcttggacttcctttgcttcctcaggctttagcttcttgccctgctgcctgtatctatggccttctctctggctgtggtttagggaaaatcactccatctttctgtgccttcagtgtgtttgtccactgtgagtgaagcataatcaatacttg

SEQ ID NO: 245013 - DNA, 488 bp, Homo sapiens
ggtctactttaggtcattctgtggaggtagtagctatctagtcatgatggttaattttatgtgtaaaccacttctgggccatgggatgcacaattatttggtcaaacattgtgagtgtgtctgtgagggtatttttggagaacattaacatttaaatgcataaaccaattacagtggagtaccctccttaacatgtgtgggtctcatccaattagttgaaggcctgattagaacatgaaggctgattctctcacaagtaagagggaactcctcttgcctgcccgccttgagctgacaattgtctttttctaccattgaactaaaatggaaacattgattcttctttggtctcgggcctgctggctttcagactggaaagacatgatcaactctcctggatctccagcttgccaactgcagatcttgggaattctcaccctccataaccatgtaagccaattccttataataaatctctatttctcact

SEQ ID NO: 245014 - DNA, 547 bp, Homo sapiens
  misc_feature (319)..(319): n is a, c, g, or t
  misc_feature (321)..(321): n is a, c, g, or t
  misc_feature (357)..(358): n is a, c, g, or t
tttttaaagagaaagaatcttactctgtcacccaggctagagagcagtgaaattatagctcagtgcatccctgaactcttgggctcaagggatcctcccaagggaggcacagtactgccttactgggtgacacagtaagactccatctcaagggaaaaaaaaaagattgtaagttaaatctcctagaaagccaaacacttgtcagatagtgaaaaaagaagagaacagattgtaaatttatagcatcagttcagtagtttcaacattttaataaggaggctaggggacacaatgggtcacgcctgtaatcccagcaccnantttttttttttttttttttttaaagagaaagaatcnnactctgtcacccaggctagagagcagtgaaattatagctcagtgcatccctgaactcttgggctcaagggatcctcccaagggaggcacagtactgccttactgggtgacacagtaagactccatctcaagggaaaaaaaaaagattgtaagttaaatctcctagaaagccaaacacttgtcagatagt

SEQ ID NO: 245015 - DNA, 465 bp, Homo sapiens
tgatatgggccgttcctggcaggaacgtatcttacacctttatttttctgtcctccaaggaggatagattgagcccaggatgtggaggctacaggtgagctgagatcgcaccactgcactccagcctgggcaacagtgaggccctcactcttaaacaattaaaaattaaaaattaaaaaaagaaagaggctaagactaggcgcagtggctcacgcctataatcccagcactttgggagactgcagtaggcggatgacttaagtccaagagtttgagaccaacccggccaacacggcagaatctatccgtacaaaaaatacaaaaattagccaggcgcggtgatggtgcctgtggtcccagcttctgaggtaggaggatcgcctgagccctggaaggtacagctgcagggagccgagactgcaccactgcactgcaggctgggtagcagagtgagaccgtctcatg

SEQ ID NO: 245016 - DNA, 538 bp, Homo sapiens
ttaagacagacaggtcttcatttcaaagatttcactggtatttacaactaagcatataaatacccaaagcgagactccccagtcctgagttttcctgcttcacttcacagaacacactttgttaattaccaaagctgccgtccacaaattagaacttctgctggactgggaaggcagaaatgagaataaatacctcttcaaatctgcagatctgcggaactgcgcaaatatcctgtgaatcggacccacttggaagagtgtgtgggtcagcggtgcattcaggactgtgataaaatttaattagaagctgctattgggacaccgttattgatgcgctggtacacgtagggggaaaaccgcagcctgtgtgctgccggtgcccttggtgggagctgtcttcacggggctgctcacatagtgctgaaatcaaactcactggtcatactgcccactgtcattttgggttgaggaccagaatgtgcatttctgggcttccccaaatctggaccctgtctgttcccaccactccctatctccc

SEQ ID NO: 245017 - DNA, 426 bp, Homo sapiens
ccatatgctataggttaattcctttgtcaggaatcctgaatgctttatcaggaatactgagtgctgatttggagagatacaagggtacaaatgatctgggtaataagcagctgcacaaatgtttatttatagcctaacatgttaattctgaaagcctctttaccagttcatttatttataactccaaagagacaatacacaaacagccattcatatcaactgctggcagtactcaattgatatgcttttgtttgggcatctggtagattgtttccatgagaacttctaagtagaaagttcatccctaaaggagcttctgtatagcattaatgtacccaagcttttcatgtataccttgtctcttcaaaaatatgggtttgtataggaaaacattctttccagttttttcatctgtttgccggaagc

SEQ ID NO: 245018 - DNA, 421 bp, Homo sapiens
ataattctaactgctattagatcgctgatcggaaaaccacacttgcctcccctttcccccaccccccagcatcatccaccccaccccgccccctaggaagggaagagggaggaagacctcaaaacgcgacacaatgacaattaactttccttgaaccttccctggaaggactgcatttttgcaatgcactttagttcccttcggttcaattcttgagtagaggacctcccaaatgcccatgaggagtgagtgggaatttctcaggatgggacggtagcagctttcctgattttcttttaggatggttctctgtaggtgggataaggcgctgaatggattttcaaatgatcaagtgcgtcgtcagttgaaaagcttcaggtagatttataaaacatgtgcaaataaaacctaaaaccgagaa

SEQ ID NO: 245019 - DNA, 580 bp, Homo sapiens
ctcactctctctcaaagacaaggaacaggaaggaagcctttgaggaaagggaagctttgctctttactgttggccctttgtattgtcttggggagacactccctagactgcacacccaccacaaatgaccataaatatttctgtatctcaagctggagcctcaggaaaaccagaaagcgcaaaacgacgaactgcataggcatctgttgcgagtgttgaaaagatctgtcccggattttggaagggccacattcaataaatccacatgtagtttgttgaacagattaacaagcctttaaacatacttacattctgttctagggtttaataaaacaagtcctcagaattgatgcctttggcgcccacctattttcccagctaaagagagaatgtgtaaagatttatagctgagcttgcagttgtaattggacctttgtaaggtttttaaatgaaatactgtttttggttttgttttgcctttttgctctctacttctattcatacagttaattaaagtttagtattcactatgcaaattgtaacagggaatggttacattatgacattgagaaagatcctt

SEQ ID NO: 245020 - DNA, 332 bp, Homo sapiens
agaagagctactcttgagattttgagaatgtgggaaagccccgggtggatatcaaagcacattcctatgcttggtttttctgtgcatgctgctgaagattcaggaggtggaagacagagggaggagggaagaagcactggaaatcttcgttgcttttctattctattgttagatggcttagtaaaaagccacatttctataaagttttccataatgtccgcattttctgtaaaagtagaccaaaggcagagtggtcaaaggagacctttcctttttgtatttattaaaataatgtattcttgttataataaagagagaaagaaaaatgtaag

SEQ ID NO: 245021 - DNA, 594 bp, Homo sapiens
  misc_feature (574)..(574): n is a, c, g, or t
tgagtgttagttttaaatagactattgacaaattacagatttttttcacgtattgaaattatattccagatgattttgagatttactggtataatattctcctcatgaggtaggatggaagggaagaaatagagaaaaaatgttctgctctgaaataaatgtggtgtttcctgacagcgtttgtcaagagatggggttccaccatgtagccccggctggtcttgagctcatgagctcaagcgattcacctgcctcagcctcccaaagtgctgggattacaagtgtgagccaccattcctgcctctatacctctaaaggtgttgaataatttgaatgggaatttgaaggtccatggcttccaaaccagcaggagttaaggcttaattgcttggaaatacattttcatggctgataccagtaacagaaaaatgtctgtatgtcaagaggctctgtactaatcagttaaccataacatgtgccaccccataccttgggccaatgtaactgttaacagcttgaagctattaaaaatgtacccggatgcggccgaaatcccttcttttctctaacgcgnccgaccccccccccccgccc

SEQ ID NO: 245022 - DNA, 642 bp, Homo sapiens
  misc_feature (622)..(622): n is a, c, g, or t
tgagtgttagttttaaatagactattgacaaattacagatttttttcacgtattgaaattatattccagatgattttgagatttactggtataatattctcctcatgaggtaggatggaagggaagaaatagagaaaaaatgttctgctctgaaataaatgtggtgtttcctgacagcgtttgtcaagaaggaaaggtcgaaaataaagcactgatggaaatacatgataaataagagatggggttccaccatgtagccccggctggtcttgagctcatgagctcaagcgattcacctgcctcagcctcccaaagtgctgggattacaagtgtgagccaccattcctgcctctatacctctaaaggtgttgaataatttgaatgggaatttgaaggtccatggcttccaaaccagcaggagttaaggcttaattgcttggaaatacattttcatggctgataccagtaacagaaaaatgtctgtatgtcaagaggctctgtactaatcagttaaccataacatgtgccaccccataccttgggccaatgtaactgttaacagcttgaagctattaaaaatgtacccggatgcggccgaaatcccttcttttctctaacgcgnccgaccccccccccccgccc

SEQ ID NO: 245023 - DNA, 450 bp, Homo sapiens
  misc_feature (430)..(430): n is a, c, g, or t
tctggaaaatatgagaaatatgggcaattactctctgaagaaagagatggggttccaccatgtagccccggctggtcttgagctcatgagctcaagcgattcacctgcctcagcctcccaaagtgctgggattacaagtgtgagccaccattcctgcctctatacctctaaaggtgttgaataatttgaatgggaatttgaaggtccatggcttccaaaccagcaggagttaaggcttaattgcttggaaatacattttcatggctgataccagtaacagaaaaatgtctgtatgtcaagaggctctgtactaatcagttaaccataacatgtgccaccccataccttgggccaatgtaactgttaacagcttgaagctattaaaaatgtacccggatgcggccgaaatcccttcttttctctaacgcgnccgaccccccccccccgccc

SEQ ID NO: 245024 - DNA, 294 bp, Homo sapiens
attttaaaaacttatcaatagatttctttgtggcttttactaatgaagttgtattttttttctacccatgttaggtgttgaataatttgaatgggaatttgaaggtccatggcttccaaaccagcaggagttaaggcttaattgcttggaaatacattttcatggctgataccagtaacagaaaaatgtctgtatgtcaagaggctctgtactaatcagttaaccataacatgtgccaccccataccttgggccaatgtaactgttaacagcttgaagctattaaaaatgtacc

SEQ ID NO: 245025 - DNA, 454 bp, Homo sapiens
ccgtcccacggctagctgaatcgtgagatcctggctcagggacgctcagctggtcagcagtcctattgggacctgtgacaacttagggcttctggctaccgaaactatcttcatttccacttaaaaagtatacgatttagctagaaacgaacgagttgtgaccgcagctttccacttttggtttatttgaattggtgtctcttcctggcgtctactgatacttggtcagggaatataaaattaatttacttatccaacaaccgaaaaaggatataattatttttaaaaagtaatctgcttcaaggtcaagaacatgattttctaattaactgctgtttttggtttcatagtcacactttcttcatgggcccgaataattgaatagaccgtgtgtaatgaaatttacatttgaaatgtgaataaaataatttttgcagtcttggaaattttgagg

SEQ ID NO: 245026 - DNA, 708 bp, Homo sapiens
caaaaagggaacggcacctagacaccgaaaagtaactgaagcaaagggagtttaaagaacgcgcccagccgcctgggtcttgaacccagtgttaatgagagcaaaaacctctgcatcctccactgagctgtccttgagcatgtctcataatcatgcttcattttaaaaacagaaataagtgagtaagctatgaaagaagacaacctttaaatttttcaaaagttcttggtggtctgtgattagaaatttcatctatatgaaataactgttttggagggcttactgttaaattcaggcattttagggccagtggaaactggttaagcattcacatcagtcttaacattaatctgataatctactgggagtttaaagactctaagcactaaacacagattttcctcactgtctataaaatgaaagaggaaagaagcattgtactaaattttttataaagctaattgtattcccttttttttttttgaggtagttcattgcattttgaacaaggataactgtcagaaaagatcctctttgaataaaacaggtatctcccccatggctgcttctgggtctgccctctgcaaccacatggaataggtctgattccggttcttcaggacaacttttcaagaattaaaaaatcacctccaaatgaatgcatttttacaaaatgaaaataggtagagatgctattttaaaaaaaaa

SEQ ID NO: 245027 - DNA, 378 bp, Homo sapiens
tgcgcctgtagtcccaactactcaggaggctggggtgggaggaatgcttgagtgccagagttcaaggctgcagtgagttacagtcatgccactgcactccagcctgggtaacagagcacgacactgtctctaaaaaaaaaaaaaaaaattccaaggcattaaaaaagttaacttttaatatacattttcttaaataaaatatgacagttaaaatttataaaattataaaagtaatataatcccattactgaaaatttggagaataaagatcaacagaggaaaaaatatctataatcttaccaccgtaaaataaccttattgctttggtaaaacatttccttcctgtgtttattcccatctctatcataaaaattcata

SEQ ID NO: 245028 - DNA, 555 bp, Homo sapiens
ttcttcccagaactctgtcccttgaattctcactgtcttggtctcctgggattctcagctccacctcctcaagtaagggaatgtgtcagattctgactgggttctctctctttgcattgtttaatctctgtgtattttggaattttccagctatctttctgttattggtttctaataattccattgtgatctgagagcagatattatatgctttctattttaaattcattaagatctgttttatggttcagaatgtggtctggtttggtaaatactccgtgtgaacttgaaaagaatgtgcattctgcccttgttgggtaaagtcatctatggatgtcagttatattcaggtatttgatggtatcgttgagttcaactgtgtccttactgatttttctgcctgttggatctgtccatttctgttaaaaggatgttgaaatctatatatgagatctataaggatcttcatatgtttttggagaatttacccctttatcattatgtaatacccctccctgttcctaattgttatctgttagatcaattcagaataaa

SEQ ID NO: 245029 - DNA, 438 bp, Homo sapiens
tataattaaattgggttgaaatagaacaccactccatgtcaaatgctgggtacatagccacaaattgtaacatacttttaacgatggcaggacgttgtttttgctggcagggctatgggcttccacaatggattatctttaaaataataataataatcactgtatgagggaaagagactagggaatcttgctttgcagtgtgcattttaatttttaaaaaaatttcatgaaatccttaagctaagtattcagtggaactatgttaattaaatggctacgacccacatggggaatagcaattttctctatttttaaatctcttcatttaaccatatttcagcactgatgacccacttgccatatacttttcatataacctagagaacttgtcttgccctccctagggccccagccttgcctatagagcacactctccaa

SEQ ID NO: 245030 - DNA, 439 bp, Homo sapiens
agactcttattatgtggatgttgctacatctagttttgtactctgtatttttttccttttctcattctcactgccttccggggaaacttctcaacccagtcttcttacagttgatttttaaatcatctacctgctattacaccaatccactatgttctttcttttgagtattttattttcatatataatatttccacttggttgttttaaaaaatttttctttattttattttcctcatcttctaaagaatatctatcatgcttaatttaaaatcttgacctttctgttccaacaacattgtttccaatgataaatatttttcagtttgttgacttaaagaaataacttacacttcccagatatcttgtttgttatttgagtctgtgaggcaatgtttccctgggactaccagctattctgtttggcagtgtgttggga

SEQ ID NO: 245031 - DNA, 714 bp, Homo sapiens
gcccagcctgggtgtgttttttttaatttgtctttatgaccccttccagtcgtagaactgtgtgtggagttactttttcaatgggaatagtaaggggaagagttttacactgcacatggaaacatttatgtaacactttataacaaaaaatgccatatacatgtgattgtgacatggtggaaggagcatgactttagggttcaaacgtggatttggatcttggatgattcattcagcagatgtgaactgagtatctgctgtttggtgagcactgggtgaacatagccagataaagcggatctaccctcacctcatggggagagttggagggagtgggaggaagagaccgctttgagaactctcctcaccgcctctgtgaccctgcaagttccttaactctctgtgcctcaggtttctcatcaaagaagtagtcacacctaccatgctgggttgtgaaaagtaaaatagatcacctttattaaagcaccggcagaagatctgagggaggtctttgtaaacagaagtcccctcctgcgactgttggtgtagacattgcgagccccattttatggagaagaaaactgagagagaaattttgagcaacttgctgaaaagagcttaagtaacttgcctgaagtcacgcagctagtaagtgaaagagctgagaatcaaatccaggtcttttgattcaaaatcccgcactctctttttttg

SEQ ID NO: 245032 - DNA, 454 bp, Homo sapiens
aagaatcataaatggatgctaaaagtaggtaaaagtttgaggagtaacaaaacacatagcctcagaatatctccccataaaatatttattaattacaaaagaaaaaaaacaacacttttgtaataagacataccaacatcatatgtctcctgatacgatgcacagaaaacagagcatcacttctggtagatttctgcccaaaatgcatacgtcgaatctaatcatgatgaaaccataagagaagctcaaactctgggacattctacaaaataaccaaccagttctcaaaactgaaaggttataaaagacaaagactaaggtaccagccaaacacataagacataacaactgaatgtggaaacgttttcttttcctacaaagacatgattggaacaattgacagaacctgagtaaggtgtacatattagctagtaaaataatgtgttgctgttag

SEQ ID NO: 245033 - DNA, 447 bp, Homo sapiens
agcttctactcagcagggggaagaaaaatggaccatgttataacaaataacatggcggtgaactctgtggatggtggagttgttctgtgtgctccagttcctaccgagattgtgcctaactcatcatgaatctcagcagcagcagcatggacaccatcaccagcagaagcgtttgcaagtatccaattatgggttagagactctgcaaggaaattacattcacccagcacctggccagaacctaagacttgtttcagcacttcttgcaattagcagagggcagttgcctccgtggtgtgtagccagttggggtgatgagcaattctccccacaaaagcctcatgagacatctggtgactgagttcgcaatggcactgcctcagtgtgtgtgcccataaaaaggcaagctgacagtacccgtctaggacagggttcaccaggcttgtc

SEQ ID NO: 245034 - DNA, 407 bp, Homo sapiens
ccatgcacttaaaaaggagcaaaaaaattacttttatttttattaacttctaactgaaatgcagcatttcctttagttatgaacatagacacacataggcacagtggtattagcaggacctgtgatattgtcaccagtagaaatcacagatattttcatgtcatgcttcagtggaagcagttactttgaataactgcctttgttcatcactgccatgaagttacatttgttgttaaatgtgctgatagatcttttatttcatgtcacagttgggtagagctgttttgttataggtgaaatggacgtgtggaaggctgagtgttgtggaatacactggaattctgtcttatttatttagatcttttatttcttttattctttaataaagaagcacttatcagatatca

SEQ ID NO: 245035 - DNA, 387 bp, Homo sapiens
cttttcaaaagttggcaattaaatctgaatttacagatacagataacagtttatcagaaatcatatttttcctgaagaaaatttaaaattaggagttgtgggcctggtgcggtggcttacgcctgtaatcccagcactttgggaggctgaggtgagcagatcacttgaggtcaggagttcgagaccagcatagccaacatagtgaaaccctcatctctactaaaagtacaaaaattagccaggtgtggtggcgtgtgcctgtagtcccagctactcgggaggctgaggcaggagaatcgtttgaacccgggaggcggaggctgcagtgagccgagattgcgccactgcactccagcctgggtgacagagtgacactccgtctcacaa

SEQ ID NO: 245036 - DNA, 414 bp, Homo sapiens
cattacatgacaaaagggacttttcaggtgtgaataatgttagagaccttgaaatggagatatcttggattttcttggtggacccaatgtaactacatgaatctttacaaatacaatacagaagaagggtgggtcagagagatgctatgtaagaaggatttgatctgttgttccaacctttaaaaatgaagtataggaaccacaggccaagcaaagcagtagcccctagaaagtggaaacagccttcagtttatagtaagaaaatgggaacctcaatcctataatctcaaagaactgaattcttctaataatccaaataagcaggaaatgaaatctcctctagagtctctgtattagtctgttctcatgctgctaataaagacatacccaagactcagtaatttataaaggaaa

SEQ ID NO: 245037 - DNA, 210 bp, Homo sapiens
gccagaatatctcattttagttaagcaaaagtataaagttactggtgagtttatttgaagatttggaagaagaagaagaagatagaaaatgaaaattagaggaggttttccttacttcaggttgctgacacaaacatttccttggttctctggaggcttttccagtggggttggcccattaaataaatatatgtttctttttgcttttag

SEQ ID NO: 245038 - DNA, 340 bp, Homo sapiens
tggggggtcagttttgtagacaaggtgcagtcgtgtggctggctgaccttagttattcagtctctagcttcttcagagaccaagccgatactgtgtggtctaggaccccaggaaaaaaaaaaagtacctttgtcagacaagatattccaagaacttagaggttatctcctaggaaccagtcaaaggccaaccgtttctttagaatatccagagtttggccacccaggcctgctgagcaggaagagggcgagagataccccagttccttcttccaatttcacctgtctgataaacccaatttttctttcatggggagtagtaagaaagggtagagagagag

SEQ ID NO: 245039 - DNA, 547 bp, Homo sapiens
ttgagacagagccttgctctgtcaccgagactggagtgcagacacatcacccagactggagtgcagacgcacaaccttggctcactacaacctctgactccagattcaagcaattctcctgcctcagcctcgcaagtagctgagagtacaggaatgctcaaacacatttggctaatttgtatttttactagagacggggtttcaccctgttggccaggctggtctcaaactcctgacctcaaatgatccgcctgccttagcctcccaaagtgctaggattacaggtgtgagccacagtgcccagccaaggccctctcttctactttatctacaatataacacgatcagggtccaatttggcaggaactgcatgaaaatgttgcaaaatacacaaaaagcctgtagacaactgcaagaacagactatgattaagacatacagtagaccaactaagtcacggagaaaaagagctgaagagaaaatgtcctccagatatcagggtactcaaaagcacccaggtatcctagggaattgagaaagccccatg

SEQ ID NO: 245040 - DNA, 442 bp, Homo sapiens
tgtttgttttccttcaactccatcaggcctttattcaaagtcttttaactctgttttactttatttcattcccctgcaatagctaaggtctaacaccagattaattggaatattagctagcattcacaaaggcctagatctgtaactctgaaattggtcaaattccattaaaaatttttgttacaataagctgtttgtaagatctgactagtggcttatttttaatagaattttgcattaaaattttatcaatacaatttgcaacaaatttgtctaaatatgtgaaaagatttcattgcctttttgtgggcttagattattttttaatgttgattttgaaatatatttggaattgttatctaaattctaaaagctacaagtgaaaataataatgaaagtaagtagttaatattagtggcaagatcattgccagtatcatttc

SEQ ID NO: 245041 - DNA, 549 bp, Homo sapiens
actacataaatcttggcttactatacataaataaaagttatacctcaccaactgtcccttgtctcagaggtataaaaccaaggccttaaactggacagagagtctagtgcttccattattctggtaatttaggaaacatatttgagtgtatttatatttgttaaactctcaaagttgttcgctaccaacaataggtgctctttcaactcacaatggaaagggagcaaacgtctgcgtagattagtggacttggagaatatatttgtaaaattggcatcacctccaaagttcctaggaggagataagaatctaaatggcccatggcataaataataagtttggaaaattattatatcatcaaactctgcatgtatttccttctccacagtttccaataataccacttccttgcctggatctatgctcctgtgtgacatgatgaacaagctgcagtacttgtgttacttctatcctggacataggaacaggtgataggttaattataccttcaagaagaattcttttcttgctgtcaaaacagtagtgaaa

SEQ ID NO: 245042 - DNA, 138 bp, Homo sapiens
ttatgttctaatttactctttgcttgttttgatttgcttgtttgacaatacatgtccttgtaaactatttccttttaactttttctcaatttatggtgcttattttccccattaaagacttaccaattttttttttaa

SEQ ID NO: 245043 - DNA, 340 bp, Homo sapiens
cggggtgggggcctctgtctgggtgtcacctgagtcttgctgacccaaggaccaatctattcgggggcctgaggtgttctgtctccctcttccagtacatcctgcacatgctgccggggtgaacctccagaaatgcacaactgatcgcagtaaccctctgctccagcttcagcctgagctgctttattctttattttttagagttagggtcttgctctgtcgcccaggctggagtgcagcggaacaagcatggctcactgcagcctcaaattactcgccctaagtgatcctcctgctgcagcctcctgagttgcagggattagagtcatgcaccaccacg

SEQ ID NO: 245044 - DNA, 592 bp, Homo sapiens
catggtggtgcatgcctgtagtcccagctatgtggaaggatcacttgaggctgggaggttgagcctgcagtgagtcatgatcatgccactgcacttcaccctgggctacagagcaagaccctgtctcaaaaataaaataacgtgttagatcttgctaactgacttaaagggactttcttgatatattgttaagggagaagagtaatatacagagagatgtctataatatactattttggtaaaataatgttgaaaaacttaaacttctccctatacctatataggaaatagaaatgtatgtgtatttgtatatgagtatagaaaaaggcctagaagaagacatagaaggttgttaattgaagtagaagtagaggcaagatgaaaaaatatttttaaaatgtgtccacagtaaaataactacatgtaatattattccttttaacaaaaatatgtatctttgtatgaattttaaaaagaatgaaaaaaatgatcatcaacattttaatggttattttagagtgatgatatttcaagttattccttatatttttcattgtcatttgaactttttacaatgattagggtaggaaaa

SEQ ID NO: 245045 - DNA, 461 bp, Homo sapiens
gagatggcttcctaagttctaagaacagaagtggtctatgactgtgatacatccttctttggaaataactaatgagttatgagaactgaattatgaaggaagaaatatgacttaacagaaaagaaagttgttttaatgagtcattaggctatttagatttacccaacatgaagaaattaaaggacatttccaaaaggctggggataccttctgaagttctctgctgcttatggtcattgttatggtgatttaacttctgatttctctgacacgggcctttttgcccctctttttgtttgggatttgtctgccgtttattgaagactcatttgactttttgtatactgtaccctgtttatccctcactataactctataaggaaggcaatctgatccacgttttattgatgaagaaaatgagtcaagggaaagttaataaaattggagttactattgaatag

SEQ ID NO: 245046 - DNA, 465 bp, Homo sapiens
aaatgtcgaggcttcagtgagctgtgatcacctcactgcactccagcctgggtgacagagtgagaccctgtctcagataaaaggagggcagcataaaatagcctatgctcattatgctatgctaagtgcaactcttagacaagaggaattgctgactgctgtgggctctgtgacttggctgaattggggtgggaggattggggttagagtaatgtttctcatagtgtgtgtttcacgaatacatgaatcaaaatcacctgaaggactaatttataaatgcagcttcccagacccactggattagaacctttgggagtgccatgaagtgacattttaaaaataagctaggcaggttgcagtgactcacacctgtaatcccagcactttgggaggccgaggcgggcggatcacgaggtcaggaggtcaagaccatcctggctagcatggtgaaaccccatctctact

SEQ ID NO: 245047 - DNA, 474 bp, Homo sapiens
atattgtaggtcttgagctctgtttctgagcctttgctgttaggttgtctgtattttctttcattttggaactgttttcttcttttaattatgtaaagctaaaactcagccaggtgcagtggctcacacctgtaatcccagcactttgggaggcttaggcagctggatcacctgaggtcaggagttcaagaccagcctgggttggcccggtgcagtggctcatgactataatcctagcactttgggaggccaaggtgggtggatcacttgaggtcaggagttcaagaccagcctggccaacatggtgaaaccccatctctactaaaaatacaaaaattagccgggcatggtggcacatgcctatagtcccagctactcgggaggctgagggagaattgcttgaacccaggaggtagaggtcatagtgagccgagattggaccactgtactccagcctgggcggcagagagaaaa

SEQ ID NO: 245048 - DNA, 446 bp, Homo sapiens
tgagtcaacgtctcgatctgtcgcccacgctggagggcagtggtgcgatcttggctcactgtaacctccaccctcaccacgggttcaagcgattctcttgccccagcctcctgagtagctggggttacaggcgcccagcaccgcgcctggataatttttttatttttagtagagacggcgtttcaccatgttggtcaggctggtctcaaactcctgacctcgtgatctgcccacctcagcctctgaaagtgctgggattacaggcatgaacgacggtgcccagccgacattaagatatcttaaggagagtcatttctccaatttgtcatacagaagctctagtttttagtaaatgaatttttaaataagagcatacctcttttactttgttcatcattttaaaaaaagttctaagaactccttctgaagcctaatatctggtcact

SEQ ID NO: 245049 - DNA, 364 bp, Homo sapiens
caccacagttccccaaaagtccttgcttcagccacatgggcctttgtgggccttcaaatgtgtcaggtgcattccctccccagggcttttgcagatgctgctccctctcatccttcaggcttcagcgtgaacgcctctcctgagcagcgcctcctcaggccactgctgttggaatggcctccctcttcccatcttccttcatcccagcacgtccttcatagccctggtcacattgtgcaatggtatctgtgtgtcgtctgtggctgtccctctactagtctgtaaatgtgacggatgtagggacctctgggtctgtcctgactctatatctccagtgcccaataaagctttaggaaacttggta

SEQ ID NO: 245050 - DNA, 473 bp, Homo sapiens
acctcctatgacaggaagcaacttcccctttgctgtgtctcatcctcacgtgggtgctcagaaatatatgtattgtccacagggtgcttctccatccatcagaaaccataaatttccatgtgcatcctcctattcagagcatgagtgatgggcgccttccttcgtggccagggacagcatcaacctctttgtcaacatcattcctcatgtcctccaaaacttgaatgctctaaaacaaccccaggactacatgcatgctctgagtacttatttagggatgtgcatatgtatataacttgacacacatgccacacatatatatacataaacatatatcttatatcaccacatccacattgcggaagccactggctggggaggcagcactagtaatggggaatgctaaagacggtgctcagttttctctcttggcttcactccccacacacagggccccagtgactgcagatgga

SEQ ID NO: 245051 - DNA, 336 bp, Homo sapiens
aataaacatggcagtaacatctatagtttgacgggtatctttaaaaacttatggtaagacattttacagtatcaaataatttctaaacctaaagaactgcatccagtaagtactcaacatgtatttactgtggaagaaaagagggagggaaaacgactatttctcagttcaagtaaggaaatatcagtttttccttaagatttgaaaataaaacataagtaaagccggcatcagtggaaaaaaagggagagaaatcttcaaaaatggtatctgggactttcaaacgagtaaaattgaccatttaaaaacttagtcttcaaaagtccaaaagtctca

SEQ ID NO: 245052 - DNA, 429 bp, Homo sapiens
aattactctactacagacctttgcattttatattattttactttatattttatatttttactatcttaaagattaatgaaatgtatagttataactctgctttaatggcatattacctatttttccatcctcagcatccagcagtgtattacacacaatgaactttcaataaatactccttgaattaattgttggtcatatccataattaaattaatgttagatcttagagcaaatgcacaacatttgggattaagtttgcctttatgatttccaagaacacactgaggagaaacgtagctctccctaggtgtagatagtccttccaaggaacatgaaagaagggcattttaatatctgagagtgcgtcagaacatataaaaactttaagaaaatgaagcacttcttttccagattagcatagctactt

SEQ ID NO: 245053 - DNA, 196 bp, Homo sapiens
gtgagcagcagtgctgctattaacatttcatgatgtgtactccacacgttagcaccctggtataagatatctaagagcaggccgggcgcgttggctcacgcctgtaatcccagcactttgggaggccgaggcgggtggatcacgaggtcaggagatcgagaccatcctggctaacacggtgaaaccctgtctctac

SEQ ID NO: 245054 - DNA, 475 bp, Homo sapiens
gctatttcttgatgatatgctaaacaaggggtggattattcatgcctctcctttttagaccatatagggtaacttcctgacattgccatggcatttgtgaattatcatggtgctggtggaagtgtagcagtgaggacgaccagaggtcattcctgtggccatcttggttttggtgggttttggccggctcctttactgtagcctgtcttatcagcaaggtctttatgaccttattttgtgccgatctcctatctcatcctgtgacttagaatgccttaactgtctgggaatgcagcccagtaggttttagcctcattttacccaactcctattcaagatggagttgctttggctcacatgcctctgacaaaagtaaagctctcagggggctcaggctgatgggttcccttttacttctttgaatccccagtcgggcttggaaccatggcctgtaagcgcatccgacacttggcta

SEQ ID NO: 245055 - DNA, 383 bp, Homo sapiens
cctttctaaaatgtagctactaggaaattaaaaaaatacatatgtggctcacattatctttttgttaaacaatctgcttcaggcttttcattttacagaatgaataacaagttttacatctctatagacaaagtacaattcgacacttattagacttgatctctgtagtaagaatgtgtttcttacatgaattattgtattttatatagataaaagataaactttcgtgttttattagccgggcgtagctgcgggcgcctgtagtcccagctacttgggaggctgaggcaggagaatggcgtgaacccgggaggtggagcttgcagtgagccgagatcccgccactgcactccagcctgggcgacagagcggatccgtctcaa

SEQ ID NO: 245056 - DNA, 477 bp, Homo sapiens
tgaattttcatggccgtgggacggacaagaactttatcttcagctgaactaagaaaaagtcctgcaacatttttggcgcgcaatgtgggggcaccagaagcgggcaccgttgagctgttgcaactgttctgctggagccttatgtatgtggttgaaaccacctgtactactggaatgaaagcacctttacagaagaggcaatgcaagttgtattcatcacatgtgtagaatgaattaagatttatgccagttgcaaagaagaatattggctcactatttttcctctgggcatcagcatatgatcccctgttgaagacagacaagtacatctttctggtggctcctagacctggcattgggaacagaagattatcagtatgatccgtacgcttaaggaaagatctcatattattgaaatgaatattttatttgataaattgaactacagaataaagtacttttaacaaaccaaaaaaa

SEQ ID NO: 245057 - DNA, 759 bp, Homo sapiens
gccctcttcctccttgtttggccatgtaagatctgtctgcttctccttcaccttctgccataattgagccttatgtatgtggttgaaaccacctgtactactggaatgaaagcacctttacagaagaggcaatgcaagttgtattcatcacatgtgtagaatgaattaagatttatgccagttgcaaagaagaatattggctcactatttttcctctgggcatcatatggagtcttgctctgtcgccagggtgaatacagaggttgcagtgagctgagatcggctatgattccagcctgggggcgagatagcgccatggaactccagcctgggcgatgaataaaactctgtctcaagaaaaaaacaaaaaggtaagcttaatatttaattagatgataacctttcactgtgcaatctcaagaggaagatttctaaattagacatggtctttaccttacagaagaaaatggtctattcagtgtctttttaagcaagattgggaccaaaaacaggtggtaagggtgtgtaatattttaacttgtccatgaaaatagtgtaaatgcgcacccttggtaataaaggaagtgatctccctttgaattatgggaagtcctgtcatggatatggggtgctgtgtacatatatgtttattcctttatactgacaggataatatatggggctgtcctcaactttaagttcaggaaagttggctgacagatatgtttaggaaggtatgagttaaaggggctgtccttaa

SEQ ID NO: 245058 - DNA, 871 bp, Homo sapiens
tgaattttcatggccgtgggacggacaagaactttatcttcagctgaactaagaaaaagtcctgcaacatttttggcgcgcaatgtgggggcaccagaagcgggcaccgttgagctgttgcaactgttctgctggagccttatgtatgtggttgaaaccacctgtactactggaatgaaagcacctttacagaagaggcaatgcaagttgtattcatcacatgtgtagaatgaattaagatttatgccagttgcaaagaagaatattggctcactatttttcctctgggcatgtggaaatgtaaatcagtccatgttactcacctcggagaagcagaagtacgatttactattgttgcttgcttacttactcttatcaatttctatgagagaaagagacctcaagtaaacctccagcagccatctggacttccatgaaaacagaacaatcagtgggatgcagagcttggaggagacagtttccatagactgaagcacgtgctgaagcaaagttcacacttgcaggattagaagaggttgaccgaaagaaggaaggacatggacagctatgttgttgtggagtcctgttttatagtcataaccttgagtcaagtgagtttgtctggacagacagagcttgttgcctttacttatagggaaggcaccggacacagacagcctaaaggacatttgttctaacctttcagtatcctttttcttaattatttcacctgatccctgaagctggtatgtacgatttttcctttctttctaatcctttaaaaaattaaggctctaaatctcatttccacttaaattttaatggcgcattgggacttaaaataaaactctctttgaagtaaaaatcatga

SEQ ID NO: 245059 - DNA, 691 bp, Homo sapiens
aacaaacaaaaggagagtggttatttctgcaccaactatttcaaatgcaagttactccatcgctcggggtggttggatggtgcttgtcaccataggacccacagggctagttccaactgttattcggtaaggcttttttctttccaaaattcccagtgttcctttaaggcccatttagctgcgggttttgtttattctcccggcaatcagcatttaaaataagacaaacaagcattttttcctgggctgtgaatccccccggccagcctccacctgcacacctgaagccagcatgtccaatcaaatttctctgtaacccatatcccctttagagacttgcccccgtcgtataccaggctggaaatagagaacttaagcagggcaaatgtaattttaagaattgctaatgatgctagaaatctgcaatgcaattagcgtcattggatttggcgctcctccgaaggcacaaaactccttgtcatagcgcagtggcagcagcggcaagtgcctccgcatgtgccgggctgtccgggtatgctggcagccgctttgcactgagatgtgagcagttggttaggcttcctctctttctttctcacagatactgacttctttgtctcttttctgggttgcagagggatgggtattttccattgattattactttagcatttgaccctccagtggagtc

SEQ ID NO: 245060 - DNA, 500 bp, Homo sapiens
agcattcttcctctagaaaaagacctaagcccccctttacagcagttaggagatctcatccccttctgttttgccaagcaactgctgctgaggcatctatttgatttcgtatggtgatgatactttggccaatgtctctattttttcttttttactttgggcaatgtcattcaagctttccataaaatccttggaaaagcattggtaataggatagggatgttacaacccggctgactcccattcccagtcccgcggttatttgtagtcctaccaaaagggatgtgagttggatggttcatttgtgtctggcaattgcagttaaaggtataatgagggattggttcttgggagctatattaatttcacaggctaaataaacaagtgtaaaggttctagtccaattggctggtaaacataagtaagaactagttccacacaggtaaaaggctcctagtttttcaagacaagaattttctatggtaaacatgtgggttagct

SEQ ID NO: 245061 - DNA, 571 bp, Homo sapiens
tgcccaggctggagtgcagtggcgtgatcttggctcactgcaacctctgcctcctgggttcaagcaattctcctgcctcagcctcccaagagtagctgggatttacaggtacacaacaccacgcctggctaattgttgtatttttagtagagatgtggttttgccatgatggccaggctggtctccaactccctacctcaggtgatccacccacctcagcctcccaaggtgctgggattacaggcgtgagacacagtgcctagccagtgacttcttattttaaaattgtcccatgtggtgttaggcaactaccagaatactgctttagaagaacattcaatagtgagaaaatatgttcctcatatattagaagagaaaacaggcaggcagtatgaacgaatgatacctgttcaaaatctactgattcattcagaatacatacataatattaacaataggatatctggctaatggcaatactagtactttttttcttaatcttttcagtatttcaaaaatctggtacatttgaaaataaattactttcataatcaaaaactataataaaagc

SEQ ID NO: 245062 - DNA, 395 bp, Homo sapiens
aatatgaaggctggggaaaaagataaactgccaccccttgggaataatacctattggccaaggcccatagggatcggcaggttttcttacacatgttttccggttctacttggaacatgagagttatcaccaagtccttcatgaaaggtagctagtgttttatgagtcgatggtcaacatcttgtactgactgagtagaaggaagatggcatcattgtgtaaaaacattcactaaaatagctcagtgaccactgcaaaaaggaaaaaaagatggtagaaagaaactgggcatttgtatagaataacttgaaatgccatttgttttaaattctggcactttccctcaaatatcacaaaagaccacttaagatacatttgttgtggtgcaaagcatc

SEQ ID NO: 245063 - DNA, 580 bp, Homo sapiens
tggggttcaagactgatctttaaacaggcctcccagattgcttcctgaaaagactgtactgactcaggaaaagggccggaagcacatcctcttaaaagcacctttcagactgaccaagcaatgtgacagaacagaaagatacaggttctagtcccaggctggccccaaactgtcccttcaggtcactcagcctcctgcacatctcagatgaatctatgaagtaagcttcaacctggcttctaaagtataacaatgctgccgagagagcagtgctgacaacatctaaactatcagacaatcccaaaatgtcctctgggaatttttttggcagctaagacctttcaaggaaacccggaattctgataacacataaatacatcaacatactagaaagcgaaggaatatggtagtggtatgatgtagaatcttgcttctttcctctttttctttcttcccaatctggaaccaggtgaaatacaaagtacataaaggaatatttaaggatgaaaaatggggcaataaacaaacagataaaggctaacaatattattgggttttttcttagcagtgtttcaatggg

SEQ ID NO: 245064 - DNA, 1999 bp, Homo sapiens
agcggaggaagagcatggcaacatgagcagtgctgagataattggttctacaaatcttataattctgctagaggatgaagtctttgccgattttttcaacacatttctttccctcccggtttttggtcagacaccattttatactgttgaaaattcacagtggagcttgtggccagaaataccttgtaacttgattgccaaatacaaagggttattgacctggttggaaaaatgccgattacctttcttctgtaaaacaaacttgtgtttccattacattctctgtcaggagttcatcagtttcattaagtccccagaaggagccaagatgatgagatggaaaaaggcagaccagtggctactccagaaatgcattggcggggtcagagggatgtggcgcttctattcctacctcacaggcagtgcaggtgaagaattggtggatttctggatccttgctgagaacatcctgagcatagatgagatggacctggaagtgagagactactacctgtccctcctcctcatgctgagggccactcatctgcaggagggctccagggtggtaaccctctgtaacatgaacatcaagtccctcctgaacctctccatctggcatcccaaccaatcaaccactaggagggagatcctgagccacatgcagaaagtggctctgttcaaactccagagctattggcttcccaacttttacacccacaccaagatgaccatggccaaggaggaagcatgccatggtctgatgcaagagtacgagactcgcttatacagcgtttgctacacccacataggagggctccctctgaacatgagcatcaagaagtgccaccactttcagaaacggtactcaagcaggaaagccaagaggaagatgtggcaattggtagatcctgactcttggtctctggaaatggatctcaagccagatgctattggtatgcccctacaggagacatgtcctcaagagaaggtggttatacaaatgccttccctgaaaatggcttcttcaaaggaaacaagaatcagttccctggaaaaggatatgcattatgcaaaaatatccagcatggagaataaagccaagagccacctccacatggaagccccctttgagacaaaggtctctacccacctgaggactgtcatccccattgtcaatcactcctccaagatgacaattcagaaggccatcaagcaaagcttctccttaggatacatccacttggccttgtgtgctgatgcctgtgcagggaaccctttccgggaccacctgaagaagctgaatttgaaagtggagatccaacttcttgacctctggcaggacttgcagcatttcctcagtgtccttctgaataacaaaaagaatgggaatgcaatctttcgtcacttgctgggtgacagaatctgcgagctctacctgaatgagcagattggtccgtgcttaccactcaaatcccaaaccattcagggcctgaaggaactattgccctctggggatgtgatcccctggattcccaaagcccagaaggagatttgcaagatgctcagtccctggtatgatgagtttctagatgaagaggactactggtttctcctttttacggtaggaaggactttgggttaggaaggaatcatgaggatgagggaagaagaaagagtaattactgttttaaaagggttatgtgttaaagtaaatgaaattgttatttttcctagagtcaaccaaagatcagcatggtccctgttgttctaaagctaaacctctcaaggaaaaggactcagtgcataagatgactttggtgaaaccccgtctctactaaaaatacaaaaaattagccgggcgtagtggcgggcgcctgtagtcccagctacttgggaggctgaggcaggagaatggtgtgaacccgggaggcggagcttgcagtgagccgagatcccgccactgcacgccagcctgggcgacagagcgagactccgtctc

SEQ ID NO: 245065 - DNA, 731 bp, Homo sapiens
agcggaggaagagcatggcaacatgagcagtgctgagataattggttctacaaatcttataattctgctagaggatgaagtctttgccgattttttcaacacatttctttccctcccggtttttggtcagacaccattttatactgttgaaaattcacagtggagcttgtggccagaaataccttgtaacttgattgccaaatacaaagggttattgacctggttggaaaaatgccgattacctttcttctgtaaaacaaacttgtgtttccattacattctctgtcaggagttcatcagtttcattaagtccccagaaggagaagccagagtgagcctcttaaaaagtaattggtggtggtgctggagggactcccaggaagatgatgaaataggaagcactaggaatctgtttcctcatctagacaacaattgtactggcagaatctgtatgatatgctcagtccctggtatgatgagtttctagatgaagaggactactggtttctcctttttacgagtcaaccaaagatcagcatggtccctgttgttctaaagctaaacctctcaaggaaaaggactcagtgcataagatgactttgacacagaacaggttcatcagctccagacagcataaaagagaatttataggcaaagaagagaacattcttctttataagaggattcagcagtctctagagttaagccaggctttggctgacatgaaggaa

SEQ ID NO: 245066 - DNA, 887 bp, Homo sapiens
acactaacatcagatgcaacctaggcaagggttctcttatgttctgctctgggaagcatttgaagtatttcagttgtgagtaccactccagccaatgagagaaccagatggagagaaggccatgtgaggaatgggttgaagaattgcctggtgactagccagtggggttggagagataattggttctacaaatcttataattctgctagaggatgaagtctttgccgattttttcaacacatttctttccctcccggtttttggtcagacaccattttatactgttgaaaattcacagtggagcttgtggccagaaataccttgtaacttgattgccaaatacaaagggttattgacctggttggaaaaatgccgattacctttcttctgtaaaacaaacttgtgtttccattacattctctgtcaggagttcatcagtttcattaagtccccagaaggagaagccagagtgagcctcttaaaaagtaattggtggtggtgctggagggactcccaggaagatgatgaaataggaagcactaggaatctgtttcctcatctagacaacaattccaagatgatgagatggaaaaaggcagaccagtggctactccagaaatgcattggcggggtcagagggatgtggcgcttctattcctacctcacaggcagtgcaggtgaagaattggtggatttctggatccttgctgagaacatcctgagcatagatgagatggacctggaagtgagagactactacctgtccctcctcctcatgctgagggccactcatctgcaggagggctccagggtggtaaccctctgtaacatgaacatcagtaagaattataaagcatctttttggggggatgcaacaaaaaagtaaa

SEQ ID NO: 245067 - DNA, 533 bp, Homo sapiens
agcggaggaagagcatggcaacatgagcagtgctgagataattggttctacaaatcttataattctgctagaggatgaagtctttgccgattttttcaacacatttctttccctcccggtttttggtcagacaccattttatactgttgaaaattcacagtggagcttgtggccagaaataccttgtaacttgattgccaaatacaaagggttattgacctggttggaaaaatgccgattacctttcttctgtaaaacaaacttgtgtttccattacattctctgtcaggagttcatcagtttcattaagtccccagaaggaggtgaagaattggtggatttctggatccttgctgagaacatcctgagcatagatgagatggacctggaagtgagagactactacctgtccctcctcctcatgctgagggccactcatctgcaggagggctccagggtggtaaccctctgtaacatgaacatcagtaagaattataaagcatctttttggggggatgcaacaaaaaagtaaa

SEQ ID NO: 245068 - DNA, 439 bp, Homo sapiens
cagggtgtttggtcttttgagatgtcataactaatatgtactcctcctgtgattaagccagttcaagtttgtttgtttatctattgtaagagattatgtgctgtttaataaatatccttctcttggtttctcgaaactgtccccttaaagaactgaacttggggtagggttgagataagagtttgggtggggtggtggtaagagtttgggcctcccaagggctggactagactaaattggaggatctctgggcttcattccacttctgtccaccccagtctcacattcacatgcgttctcagttggagctataacagctcttatttttctcctggagtccctggcctttcagtggctacttctcctttcatcttctcatttcttatatttttctcttttgttcttccgtcagtcatccttctgttttctgacaattcct

SEQ ID NO: 245069 - DNA, 517 bp, Homo sapiens
tactcatgatgccaaccaatgttggaaatggctccaggaaaactctggattttcctaactgtggtcagcccgtggtggaacctcgccacactcttgttctggataaattgaagcaactggagaaagactcatgacacaagtttggccatggaacatgtttggcgtgtgtggttaggggtcatctgatgcatcctaccaacgtgaccccaaggaaagtgctggaggaattgggctcagatcctagagatgagctcatgtcagactctggcctccagattccattttcctggctgactcccagggcaccatggagcaaatggccagtgggtgtgccatggcaggtgagacccgcccccccaacccggcattctgaagcccttcagctggagaggaggaagagatgtttcatttgttcacaatgtttcctgaagcactggaagcgtaaattcctgagttgatgggtgtgtggggtgcaaagaaaaaaaaagtgaagtgagaataaattttacttagatgc

SEQ ID NO: 245070 - DNA, 330 bp, Homo sapiens
ctgctgcaactgcaccacagttcaactcttcctttacccagttctgcttctctcactcccttataggtgttgttcctgagaacacactccaaaacatcccatctgcatataaatctccatctctgagtccattttacagggaaccccacctaagacaagatgcagcttagaaaattattattaggaaaagctgtcctattcacagttgccagagcctactttccaaatagaaaacactagttaccttggaagaagtctttggagaagaatcaccaggatggcttatctacattgtataaatatagagaaggaggcacccattacctggga

SEQ ID NO: 245071 - DNA, 208 bp, Homo sapiens
gtttcatccaagaccagcagccaaacgtttaagggtttgtatcaagacaaacataattatgagacagaaagggcctattagttctactatgtaattttaaatctcaaactatcaaaacacacacacacacacacacacacacacacacactaaaaaacccctcttcatcttctcatttgagaaggctgtaattattccagggtcccta

SEQ ID NO: 245072 - DNA, 231 bp, Homo sapiens
ctggttcaagtgattctcgtgcctcagcctcctgagtagctgggattacaggtgtccactaccatggccagctaattatttatttatttatttatttttgtagatggattctcgctctgttgcccaggctggagtgcaatagagcgagactctgtctctgtcaatataaatatatattaataaaaataagatatgcaggcacaaaagactacttttttttttttttataca

SEQ ID NO: 245073 - DNA, 347 bp, Homo sapiens
tgagtgtgggctgtgtcctggggaatacttgggaacggccatggtctgggggcaggaggccttcggagtgtccctcccccgccactccctggaggaccccgggagacacaggcgagttcgcccctgcccctgccaagccagtgggattccccagcaccccagtgagcagaacctgtttggaaagaggcttctggaaggcctgcacgattacttgtataggttcccgaagtgataaataaatgcatgggtaaaggggaatccacttagattccctaaaagcctttgaaacaaggtggtaggcgagtctgttctgatgtgttagatccccatgcagtagtgttgtggtt

SEQ ID NO: 245074 - DNA, 402 bp, Homo sapiens
ctaatattacttagatttataggcccctataaattggcatggcatatttggcttggtttaaaaagtgttttgagggaaaaaatgtaagtatgatccgtataagtatatgtaaactaatggaagaaaacagtacactcatagtcaccttcctatttcctagaaagttcctgtgaagagttttaaaagattaactgcttaagcattatactaaaaataatctgaaatatatgagggcgaggaaaccaccaaaaaatccatagattaactcaacaaaattatattttgcagagaactcttatttatttatttttaaaagtagtcaccgaattggttttattttttcaaaagtatttgaatggtaatatttaattttctgcaggtctcagataacttccatgacac

SEQ ID NO: 245075 - DNA, 443 bp, Homo sapiens
gcagccctcacaggcctagggtttctcagaagcacactctgatgatcctcacagtaccccagcccaggccccacagctgctccccagggcagcaggagctcggcagcattacagccgactacagcccccccacagcccagacgcactcacgcaggctaacaaagggtgccccaaagtcctgggagagaagcaaagcggagacaaggggacagagcgcccgccttccctcccaggtgagaacacggaggctcagagcctctccaggcagcaggaggcatggacccagggcctcctccatagctccacaccagcctcaggagcagagcggccccagctggcctctgagggtgctcaaggctttgccaagcaacaggccagggtgtctgcctctccctccaaccctctgagcaccaattaaatcaactctaattaaaaacaacaaa

SEQ ID NO: 245076 - DNA, 2771 bp, Homo sapiens
agcggcgggcccagctcctcccccgactcggtctctctcccctcccctccgcccggcagttcctccctcccgccgccgcctcttcctcggtgaggcgctcttccagcgggcaggcagcatggcggccgtggagacgcgggtgtgcgagacagacggctgcagcagtgaggccaagctccagtgtcccacttgcatcaagctgggcatccagggctcgtacttctgctcgcaggaatgttttaaaggaagttgggctactcacaagttactacataagaaagcaaaagatgaaaaggcgaagcgagaagtgtcttcctggactgtggaaggtgatattaatactgacccatgggcaggttatcgatatactggtaaactcagaccacattatccactgatgccaacaaggccagtgccaagttatattcaaagaccagattatgctgatcatcccttaggaatgtctgaatctgaacaggctcttaaaggtacttctcagattaaattactctcatctgaagatatagaagggatgcgacttgtatgtaggcttgctagagaagttttggatgttgctgccggcatgattaaaccaggtgtaactactgaagaaatagatcacgctgtacacttagcatgtattgcaagaaattgctacccttctcccctgaattattataatttcccaaagtcttgttgtacctcagtgaatgaagtcatttgccatggaataccagacagaaggcccttacaagaaggtgacattgttaatgtggatatcactctttatcgcaatggttatcatggggacctgaatgagacattttttgttggagaagtggatgatggagcacggaaacttgttcagaccacatatgagtgcctgatgcaagccattgatgcagtgaagcctggtgttcggtacagagaattgggaaacattatccagaagcatgcccaagcaaatgggttttcagttgttcgaagctattgtgggcatggaatccacaagctttttcatacagctcccaatgtaccccactatgctaaaaataaagcagttggagtgatgaagtcgggccatgtatttacaattgagccaatgatttgtgaaggcggatggcaggatgaaacctggccagatggttggactgcggtgacaagagacggaaagcggtctgctcagtttgagcacaccctcctggtcacagacactggctgtgaaatcctaacccggcgacttgacagtgcacggcctcacttcatgtctcaattttaatttctcccaagatggcacatctcagtaccttcttactgtgctatgcattttattgagagtacagaaaggaagaggaacctttttttaatcacttgttttgttttgactatagataagaaaggactacagcatttgatgtgtgtcctcaagaacttgtcttgggtctgaaaaagctgagaagaataaaggaaacattgctcaactcttcagccccctccccctgcacacctgttttctcatttgccctttgagcacttttacttaaacttgcttgtagttgcttttatcactgccgcaaaacagccatcaagagccatctgctttccaggtgaacattggaaatgagaatctttgaaacttagcaatatgtgttgcaccagattttttaaattatatatatggaaatatatatgtatacattttaagttctgtatacataattaccaaacactatgtgacctggagtttgtgttgtttctgctctgacaggtttatatgttcttacaaatggatccatagtttgcagtgatttaattcctggttgggatttggcctcccctctcccccatgctaattatttacccttgtaattgtgcatagggaagcactcacccaatgagactttctccaatgtggactctgtgtgtcagtgaatgaatgtagtaaaattcactttggaaggttatcaggcttttaaaaatctagtttatggcaaaaatagccattttccaagtggtggctgactgttgcagggaatgagaatttcataatacactgctatttcagacctctgtttggtcagaaatggaaaagaaaaagccccctttcttcccttttctgttttacttcaagggcataccttggaggtgctcagagaagcgtgaagtttgcactatggtggaggatggggaaagagttctaaagtgtctccagctgtgaacccaggaggtcaagtgggctattaaaatctaacgttgagtaaatgtgatagtgatgagaaaggaattttgtgtactgtaaccttgcagtagagatgcagctgtccttcgtgtgtggaaacacacctctcctttacatagttgggaacctcattagaaatgacctcagctgccccatatctacgttcctttcagcagttgtccaagtaggagtgtatccagtgaagacatatcaaatcacaaagtcattgtcattagagtgtacttgattactgggcatccttgtaatataatttcataccactgacacattatacttgtaagagaacatctttcccagagtgcctcagaccttattgctttaaaatataataatgttttcattacttttattatttgaatgatttagtaaagttgactgaatctggtatagactttgggagtatgtgtgtgaagtttttatcaaactgtaatatttgtgaatggaatgccttgcaatatgaatgttaatataatgtgtaaagggagattaaaaagtttgaatgattatccta

SEQ ID NO: 245077 - DNA, 3035 bp, Homo sapiens
agcggaagcccacaaaacttccacgtttgggccctcaccagagacactggtctagaaacacaataaaatgtctgcctgggtagtcatgatcattctattatgaggtagacaggaaacagagcagggccaggagatggaaggggcctcccttgccctcaggagtccctgaccagggaagatccctccatgctctctgagggtggcggggctccaaagatcctggccaggagtgctttgttggagtgggccttgtcctaggcagttgccaggtgagcccattcacaccctactggctgtgctgctttccgggccctcagttcctgctcagtaggacgttgggcaaatgtccaggagccatctgggtgagcaagatccccatcaacagcaagaaagcattgtccccattccacactttgaagatagaagatggtctcacacttggcctgagtgacctccactctcaggtgctgcctgtgtgcacacctggcgctcaaaggaatgttttaaaggaagttgggctactcacaagttactacataagaaagcaaaagatgaaaaggcgaagcgagaagtgtcttcctggactgtggaaggtgatattaatactgacccatgggcaggttatcgatatactggtaaactcagaccacattatccactgatgccaacaaggccagtgccaagttatattcaaagaccagattatgctgatcatcccttaggaatgtctgaatctgaacaggctcttaaaggtacttctcagattaaattactctcatctgaagatatagaagggatgcgacttgtatgtaggcttgctagagaagttttggatgttgctgccggcatgattaaaccaggtgtaactactgaagaaatagatcacgctgtacacttagcatgtattgcaagaaattgctacccttctcccctgaattattataatttcccaaagtcttgttgtacctcagtgaatgaagtcatttgccatggaataccagacagaaggcccttacaagaaggtgacattgttaatgtggatatcactctttatcgcaatggttatcatggggacctgaatgagacattttttgttggagaagtggatgatggagcacggaaacttgttcagaccacatatgagtgcctgatgcaagccattgatgcagtgaagcctggtgttcggtacagagaattgggaaacattatccagaagcatgcccaagcaaatgggttttcagttgttcgaagctattgtgggcatggaatccacaagctttttcatacagctcccaatgtaccccactatgctaaaaataaagcagttggagtgatgaagtcgggccatgtatttacaattgagccaatgatttgtgaaggcggatggcaggatgaaacctggccagatggttggactgcggtgacaagagacggaaagcggtctgctcagtttgagcacaccctcctggtcacagacactggctgtgaaatcctaacccggcgacttgacagtgcacggcctcacttcatgtctcaattttaatttctcccaagatggcacatctcagtaccttcttactgtgctatgcattttattgagagtacagaaaggaagaggaacctttttttaatcacttgttttgttttgactatagataagaaaggactacagcatttgatgtgtgtcctcaagaacttgtcttgggtctgaaaaagctgagaagaataaaggaaacattgctcaactcttcagccccctccccctgcacacctgttttctcatttgccctttgagcacttttacttaaacttgcttgtagttgcttttatcactgccgcaaaacagccatcaagagccatctgctttccaggtgaacattggaaatgagaatctttgaaacttagcaatatgtgttgcaccagattttttaaattatatatatggaaatatatatgtatacattttaagttctgtatacataattaccaaacactatgtgacctggagtttgtgttgtttctgctctgacaggtttatatgttcttacaaatggatccatagtttgcagtgatttaattcctggttgggatttggcctcccctctcccccatgctaattatttacccttgtaattgtgcatagggaagcactcacccaatgagactttctccaatgtggactctgtgtgtcagtgaatgaatgtagtaaaattcactttggaaggttatcaggcttttaaaaatctagtttatggcaaaaatagccattttccaagtggtggctgactgttgcagggaatgagaatttcataatacactgctatttcagacctctgtttggtcagaaatggaaaagaaaaagccccctttcttcccttttctgttttacttcaagggcataccttggaggtgctcagagaagcgtgaagtttgcactatggtggaggatggggaaagagttctaaagtgtctccagctgtgaacccaggaggtcaagtgggctattaaaatctaacgttgagtaaatgtgatagtgatgagaaaggaattttgtgtactgtaaccttgcagtagagatgcagctgtccttcgtgtgtggaaacacacctctcctttacatagttgggaacctcattagaaatgacctcagctgccccatatctacgttcctttcagcagttgtccaagtaggagtgtatccagtgaagacatatcaaatcacaaagtcattgtcattagagtgtacttgattactgggcatccttgtaatataatttcataccactgacacattatacttgtaagagaacatctttcccagagtgcctcagaccttattgctttaaaatataataatgttttcattacttttattatttgaatgatttagtaaagttgactgaatctggtatagactttgggagtatgtgtgtgaagtttttatcaaactgtaatatttgtgaatggaatgccttgcaatatgaatgttaatataatgtgtaaagggagattaaaaagtttgaatgattatccta

SEQ ID NO: 245078 - DNA, 2585 bp, Homo sapiens
ctctgtgagatggcacccctggacactggtcaaaatctcatcccaggaatgttttaaaggaagttgggctactcacaagttactacataagaaagcaaaagatgaaaaggcgaagcgagaagtgtcttcctggactgtggaaggtgatattaatactgacccatgggcaggttatcgatatactggtaaactcagaccacattatccactgatgccaacaaggccagtgccaagttatattcaaagaccagattatgctgatcatcccttaggaatgtctgaatctgaacaggctcttaaaggtacttctcagattaaattactctcatctgaagatatagaagggatgcgacttgtatgtaggcttgctagagaagttttggatgttgctgccggcatgattaaaccaggtgtaactactgaagaaatagatcacgctgtacacttagcatgtattgcaagaaattgctacccttctcccctgaattattataatttcccaaagtcttgttgtacctcagtgaatgaagtcatttgccatggaataccagacagaaggcccttacaagaaggtgacattgttaatgtggatatcactctttatcgcaatggttatcatggggacctgaatgagacattttttgttggagaagtggatgatggagcacggaaacttgttcagaccacatatgagtgcctgatgcaagccattgatgcagtgaagcctggtgttcggtacagagaattgggaaacattatccagaagcatgcccaagcaaatgggttttcagttgttcgaagctattgtgggcatggaatccacaagctttttcatacagctcccaatgtaccccactatgctaaaaataaagcagttggagtgatgaagtcgggccatgtatttacaattgagccaatgatttgtgaaggcggatggcaggatgaaacctggccagatggttggactgcggtgacaagagacggaaagcggtctgctcagtttgagcacaccctcctggtcacagacactggctgtgaaatcctaacccggcgacttgacagtgcacggcctcacttcatgtctcaattttaatttctcccaagatggcacatctcagtaccttcttactgtgctatgcattttattgagagtacagaaaggaagaggaacctttttttaatcacttgttttgttttgactatagataagaaaggactacagcatttgatgtgtgtcctcaagaacttgtcttgggtctgaaaaagctgagaagaataaaggaaacattgctcaactcttcagccccctccccctgcacacctgttttctcatttgccctttgagcacttttacttaaacttgcttgtagttgcttttatcactgccgcaaaacagccatcaagagccatctgctttccaggtgaacattggaaatgagaatctttgaaacttagcaatatgtgttgcaccagattttttaaattatatatatggaaatatatatgtatacattttaagttctgtatacataattaccaaacactatgtgacctggagtttgtgttgtttctgctctgacaggtttatatgttcttacaaatggatccatagtttgcagtgatttaattcctggttgggatttggcctcccctctcccccatgctaattatttacccttgtaattgtgcatagggaagcactcacccaatgagactttctccaatgtggactctgtgtgtcagtgaatgaatgtagtaaaattcactttggaaggttatcaggcttttaaaaatctagtttatggcaaaaatagccattttccaagtggtggctgactgttgcagggaatgagaatttcataatacactgctatttcagacctctgtttggtcagaaatggaaaagaaaaagccccctttcttcccttttctgttttacttcaagggcataccttggaggtgctcagagaagcgtgaagtttgcactatggtggaggatggggaaagagttctaaagtgtctccagctgtgaacccaggaggtcaagtgggctattaaaatctaacgttgagtaaatgtgatagtgatgagaaaggaattttgtgtactgtaaccttgcagtagagatgcagctgtccttcgtgtgtggaaacacacctctcctttacatagttgggaacctcattagaaatgacctcagctgccccatatctacgttcctttcagcagttgtccaagtaggagtgtatccagtgaagacatatcaaatcacaaagtcattgtcattagagtgtacttgattactgggcatccttgtaatataatttcataccactgacacattatacttgtaagagaacatctttcccagagtgcctcagaccttattgctttaaaatataataatgttttcattacttttattatttgaatgatttagtaaagttgactgaatctggtatagactttgggagtatgtgtgtgaagtttttatcaaactgtaatatttgtgaatggaatgccttgcaatatgaatgttaatataatgtgtaaagggagattaaaaagtttgaatgattatccta

SEQ ID NO: 245079 - DNA, 3027 bp, Homo sapiens
acactcttggctatgcgcttgtcacggaactccacccatccctctgtgtagtccttgctgtggtactgcttttttccctcccacggctgctgctgccttctttttgcatctcacaaaccagtcctcagcctgaaagaacgcatctgacctcaccataggcactgagaaggttgcggacatgtaggggctggaagtgtggtgggatatggcccaggtacacaatacctggcactacccgcttcttgctgccacaggctgctgctttggattcctcctgctcctcctccacatctagtgtctggtctgtcccttccagcgcctttgctctgttgcggccttctccgattcctctgcctccgtgttgactgacacgagcagcacgacctaatttcattacttctaatgactgcatagattcatttgcatggttaaatcacaatttaacctattttatattgatgtatatctaaattctctttttcacaatagaatgttttaaaggaagttgggctactcacaagttactacataagaaagcaaaagatgaaaaggcgaagcgagaagtgtcttcctggactgtggaaggtgatattaatactgacccatgggcaggttatcgatatactggtaaactcagaccacattatccactgatgccaacaaggccagtgccaagttatattcaaagaccagattatgctgatcatcccttaggaatgtctgaatctgaacaggctcttaaaggtacttctcagattaaattactctcatctgaagatatagaagggatgcgacttgtatgtaggcttgctagagaagttttggatgttgctgccggcatgattaaaccaggtgtaactactgaagaaatagatcacgctgtacacttagcatgtattgcaagaaattgctacccttctcccctgaattattataatttcccaaagtcttgttgtacctcagtgaatgaagtcatttgccatggaataccagacagaaggcccttacaagaaggtgacattgttaatgtggatatcactctttatcgcaatggttatcatggggacctgaatgagacattttttgttggagaagtggatgatggagcacggaaacttgttcagaccacatatgagtgcctgatgcaagccattgatgcagtgaagcctggtgttcggtacagagaattgggaaacattatccagaagcatgcccaagcaaatgggttttcagttgttcgaagctattgtgggcatggaatccacaagctttttcatacagctcccaatgtaccccactatgctaaaaataaagcagttggagtgatgaagtcgggccatgtatttacaattgagccaatgatttgtgaaggcggatggcaggatgaaacctggccagatggttggactgcggtgacaagagacggaaagcggtctgctcagtttgagcacaccctcctggtcacagacactggctgtgaaatcctaacccggcgacttgacagtgcacggcctcacttcatgtctcaattttaatttctcccaagatggcacatctcagtaccttcttactgtgctatgcattttattgagagtacagaaaggaagaggaacctttttttaatcacttgttttgttttgactatagataagaaaggactacagcatttgatgtgtgtcctcaagaacttgtcttgggtctgaaaaagctgagaagaataaaggaaacattgctcaactcttcagccccctccccctgcacacctgttttctcatttgccctttgagcacttttacttaaacttgcttgtagttgcttttatcactgccgcaaaacagccatcaagagccatctgctttccaggtgaacattggaaatgagaatctttgaaacttagcaatatgtgttgcaccagattttttaaattatatatatggaaatatatatgtatacattttaagttctgtatacataattaccaaacactatgtgacctggagtttgtgttgtttctgctctgacaggtttatatgttcttacaaatggatccatagtttgcagtgatttaattcctggttgggatttggcctcccctctcccccatgctaattatttacccttgtaattgtgcatagggaagcactcacccaatgagactttctccaatgtggactctgtgtgtcagtgaatgaatgtagtaaaattcactttggaaggttatcaggcttttaaaaatctagtttatggcaaaaatagccattttccaagtggtggctgactgttgcagggaatgagaatttcataatacactgctatttcagacctctgtttggtcagaaatggaaaagaaaaagccccctttcttcccttttctgttttacttcaagggcataccttggaggtgctcagagaagcgtgaagtttgcactatggtggaggatggggaaagagttctaaagtgtctccagctgtgaacccaggaggtcaagtgggctattaaaatctaacgttgagtaaatgtgatagtgatgagaaaggaattttgtgtactgtaaccttgcagtagagatgcagctgtccttcgtgtgtggaaacacacctctcctttacatagttgggaacctcattagaaatgacctcagctgccccatatctacgttcctttcagcagttgtccaagtaggagtgtatccagtgaagacatatcaaatcacaaagtcattgtcattagagtgtacttgattactgggcatccttgtaatataatttcataccactgacacattatacttgtaagagaacatctttcccagagtgcctcagaccttattgctttaaaatataataatgttttcattacttttattatttgaatgatttagtaaagttgactgaatctggtatagactttgggagtatgtgtgtgaagtttttatcaaactgtaatatttgtgaatggaatgccttgcaatatgaatgttaatataatgtgtaaagggagattaaaaagtttgaatgattatccta

SEQ ID NO: 245080 - DNA, 3177 bp, Homo sapiens
agcggcgggcccagctcctcccccgactcggtctctctcccctcccctccgcccggcagttcctccctcccgccgccgcctcttcctcggtgaggcgctcttccagcgggcaggcagcatggcggccgtggagacgcgggtgtgcgagacagacggctgcagcagtgaggccaagctccagtgtcccacttgcatcaagctgggcatccagggctcgtacttctgctcgcaggaatgttttaaaggaagttgggctactcacaagttactacataagaaagcaaaagatgaaaaggcgaagcgagaagtgtcttcctggactgtggaaggtgatattaatactgacccatgggcaggttatcgatatactggtaaactcagaccacattatccactgatgccaacaaggccagtgccaagttatattcaaagaccagattatgctgatcatcccttaggaatgtctgaatctgaacaggctcttaaaggtacttctcagattaaattactctcatctgaagatatagaagggatgcgacttgtatgtaggcttgctagagaagttttggatgttgctgccggcatgattaaaccaggtgtaactactgaagaaatagatcacgctgtacacttagcatgtattgcaagaaattgctacccttctcccctgaattattataatttcccaaagtcttgttgtacctcagtgaatgaagtcatttgccatggaataccagacagaaggcccttacaagaaggtgacattgttaatgtggatatcactctttatcgcaatggttatcatggggacctgaatgagacattttttgttggagaagtggatgatggagcacggaaacttgttcagaccacatatgagtgcctgatgcaagccattgatgcagtgaagcctggtgttcggtacagagaattgggaaacattatccagaagcatgcccaagcaaatgggttttcagttgttcgaagctattgtgggcatggaatccacaagctttttcatacagctcccaatgtaccccactatgctaaaaataaagcagttggagtgatgaagtcgggccatgtatttacaattgagccaatgatttgtgaaggcggatggcaggatgaaacctggccagatggttggactgcggtgacaagagacggaaagcggtctgctcagtttgagcacaccctcctggtcacagacactggctgtgaaatcctaacccggcgacttgacagtgcacggcctcacttcatgtctcaattttaatttctcccaagatggcacatctcagtaccttcttactgtgctatgcattttattgagagtacagaaaggaagaggaacctttttttaatcacttgttttgttttgactatagataagaaaggactacagcatttgatgtgtgtcctcaagaacttgtcttgggtctgaaaaagctgagaagaataaaggaaacattgctcaactcttcagccccctccccctgcacacctgttttctcatttgccctttgagcacttttacttaaacttgcttgtagttgcttttatcactgccgcaaaacagccatcaagagccatctgctttccaggtgaacattggaaatgagaatctttgaaacttagcaatatgtgttgcaccagattttttaaattatatatatggaaatatatatgtatacattttaagttctgtatacataattaccaaacactatgtgacctggagtttgtgttgtttctgctctgacaggtttatatgttcttacaaatggatccatagtttgcagtgatttaattcctggttgggatttggcctcccctctcccccatgctaattatttacccttgtaattgtgcatagggaagcactcacccaatgagactttctccaatgtggactctgtgtgtcagtgaatgaatgtagtaaaattcactttggaaggttatcaggcttttaaaaatctagtttatggcaaaaatagccattttccaagtggtggctgactgttgcagggaatgagaatttcataatacactgctatttcagacctctgtttggtcagaaatggaaaagaaaaagccccctttcttcccttttctgttttacttcaagggcataccttggaggtgctcagagaagcgtgaagtttgcactatggtggaggatggggaaagagttctaaagtgtctccagctgtgaacccaggaggtcaagtgggctattaaaatctaacgttgagtaaatgtgatagtgatgagaaaggaattttgtgtactgtaaccttgcagtagagatgcagctgtccttcgtgtgtggaaacacacctctcctttacatagttgggaacctcattagaaatgacctcagctgccccatatctacgttcctttcagcagttgtccaagtaggagtgtatccagtgaagacatatcaaatcacaaagtcattgtcattagagtgtacttgattactgggcatccttgtaatataatttcataccactgacacattatacttgtaagagaacatctttcccagagtgcctcagaccttattgctttaaaatataataatgttttcattacttttattatttgaatgatttagtaaagttgactgaatctggtatagactttgggagtatgtgtgtgaagtttttatcaaactgtaatatttgtgaatggaatgccttgcaatatgaatgttaatataatgtgtaaagggagattaaaaagtttgaatgattatcctaaaaaaaaaaaaaaaaaaaaaaaaaaaaaaaaaaaaaaaaaagaaaaaaaaaaaaaaaaaaacaacacaaaagaagcaaaaaaaaaaaagcaacagcacagagacatagaaaaggggcgccccagagggcggaaaaaaaagagaagaaagaaaaaaacgaccgccaagcaaaaaatccaggctactaagcgcgcacccatcgtgaacgagcacaccaccaacacaccgaagcgcagtcgccacccatccctagggacaccactatccagacaaggacagtataccacccacaaggagaacatatcaaagtcacaaccaacacaagtgggaccacacacctgactaacaccgcactaaccgtctccgaccgcaccaacaacagtcatacaaggtcaaagaccaccact

SEQ ID NO: 245081 - DNA, 3267 bp, Homo sapiens
agcggcgggcccagctcctcccccgactcggtctctctcccctcccctccgcccggcagttcctccctcccgccgccgcctcttcctcggtgaggcgctcttccagcgggcaggcagcatggcggccgtggagacgcgggtgtgcgagacagacggctgcagcagtgaggccaagctccagtgtcccacttgcatcaagctgggcatccagggctcgtacttctgctcgcaggaatgttttaaaggaagttgggctactcacaagttactacataagaaagcaaaagatgaaaaggcgaagcgagaagtgtcttcctggactgtggaaggtgatattaatactgacccatgggcaggttatcgatatactggtaaactcagaccacattatccactgatgccaacaaggccagtgccaagttatattcaaagaccagattatgctgatcatcccttaggaatgtctgaatctgaacaggctcttaaaggtacttctcagattaaattactctcatctgaagatatagaagggatgcgacttgtatgtaggcttgctagagaagttttggatgttgctgccggcatgattaaaccaggtgtaactactgaagaaatagatcacgctgtacacttagcatgtattgcaagaaattgctacccttctcccctgaattattataatttcccaaagtcttgttgtacctcagtgaatgaagtcatttgccatggaataccagacagaaggcccttacaagaaggtgacattgttaatgtggatatcactctttatcgcaatggttatcatggggacctgaatgagacattttttgttggagaagtggatgatggagcacggaaacttgttcagaccacatatgagtgcctgatgcaagccattgatgcagtgaagcctggtgttcggtacagagaattgggaaacattatccagaagcatgcccaagcaaatgggttttcagttgttcgaagctattgtgggcatggaatccacaagctttttcatacagctcccaatgtaccccactatgctaaaaataaagcagttggagtgatgaagtcgggccatgtatttacaattgagccaatgatttgtgaaggcggatggcaggatgaaacctggccagatggttggactgcggtgacaagagacggaaagcggtctgctcagtttgagcacaccctcctggtcacagacactggctgtgaaatcctaacccggcgacttgacagtgcacggcctcacttcatgtctcaattttaatttctcccaagatggcacatctcagtaccttcttactgtgctatgcattttattgagagtacagaaaggaagaggaacctttttttaatcacttgttttgttttgactatagataagaaaggactacagcatttgatgtgtgtcctcaagaacttgtcttgggtctgaaaaagctgagaagaataaaggaaacattgctcaactcttcagccccctccccctgcacacctgttttctcatttgccctttgagcacttttacttaaacttgcttgtagttgcttttatcactgccgcaaaacagccatcaagagccatctgctttccaggtgaacattggaaatgagaatctttgaaacttagcaatatgtgttgcaccagattttttaaattatatatatggaaatatatatgtatacattttaagttctgtatacataattaccaaacactatgtgacctggagtttgtgttgtttctgctctgacaggtttatatgttcttacaaatggatccatagtttgcagtgatttaattcctggttgggatttggcctcccctctcccccatgctaattatttacccttgtaattgtgcatagggaagcactcacccaatgagactttctccaatgtggactctgtgtgtcagtgaatgaatgtagtaaaattcactttggaaggttatcaggcttttaaaaatctagtttatggcaaaaatagccattttccaagtggtggctgactgttgcagggaatgagaatttcataatacactgctatttcagacctctgtttggtcagaaatggaaaagaaaaagccccctttcttcccttttctgttttacttcaagggcataccttggaggtgctcagagaagcgtgaagtttgcactatggtggaggatggggaaagagttctaaagtgtctccagctgtgaacccaggaggtcaagtgggctattaaaatctaacgttgagtaaatgtgatagtgatgagaaaggaattttgtgtactgtaaccttgcagtagagatgcagctgtccttcgtgtgtggaaacacacctctcctttacatagttgggaacctcattagaaatgacctcagctgccccatatctacgttcctttcagcagttgtccaagtaggagtgtatccagtgaagacatatcaaatcacaaagtcattgtcattagagtgtacttgattactgggcatccttgtaatataatttcataccactgacacattatacttgtaagagaacatctttcccagagtgcctcagaccttattgctttaaaatataataatgttttcattacttttattatttgaatgatttagtaaagttgactgaatctggtatagactttgggagtatgtgtgtgaagtttttatcaaactgtaatatttgtgaatggaatgccttgcaatatgaatgttaatataatgtgtaaagggagattaaaaagtttgaatgattatcctaccatgtagtcattaactttgctgcatttctttgggatttcagagggaaatggtgggaatggggaggctgtttgataatctaaaataaattcatgaccatttgagtagaaatgttttttcaggtgtaatggctgtacataaactcagtagagtgccagcagcatttgagatgcaaccatatttttgagagcttttaagacagaatgctgaatattaggggagcattttatgtactgattgtggaattaacaatgtgggcttattcagtgtctgtcattagaatataagctgaaggaagaaagatcttggtgtgatagttttttggttaaaagataaaacaccacactggtgataatgcttttcttagtttgggagattttaaaacaatatggactctagtctaattgcatatatctaattacaaatgttcattggatttaggtgacaaaacacctagtttcatcattctgccacctttttacaaaacaagtcagagc

SEQ ID NO: 245082 - DNA, 2920 bp, Homo sapiens
agcggcgggcccagctcctcccccgactcggtctctctcccctcccctccgcccggcagttcctccctcccgccgccgcctcttcctcggtgaggcgctcttccagcgggcaggcagcatggcggccgtggagacgcgggtgtgcgagacagacggctgcagcagtgaggccaagctccagtgtcccacttgcatcaagctgggcatccagggctcgtacttctgctcgcagcaacgtggaaggaaccagaggctgttattctaagtgaagtaactctggaatggaaaaccaagtaccaggtcgtctcgcttacaagtaggagctaagctgtgggaatgttttaaaggaagttgggctactcacaagttactacataagaaagcaaaagatgaaaaggcgaagcgagaagtgtcttcctggactgtggaaggtgatattaatactgacccatgggcaggttatcgatatactggtaaactcagaccacattatccactgatgccaacaaggccagtgccaagttatattcaaagaccagattatgctgatcatcccttagataatgatactgagacacccagcgaagataggtaatttgcaacacaggaatgtctgaatctgaacaggctcttaaaggtacttctcagattaaattactctcatctgaagatatagaagggatgcgacttgtatgtaggcttgctagagaagttttggatgttgctgccggcatgattaaaccaggtgtaactactgaagaaatagatcacgctgtacacttagcatgtattgcaagaaattgctacccttctcccctgaattattataatttcccaaagtcttgttgtacctcagtgaatgaagtcatttgccatggaataccagacagaaggcccttacaagaaggtgacattgttaatgtggatatcactctttatcgcaatggttatcatggggacctgaatgagacattttttgttggagaagtggatgatggagcacggaaacttgttcagaccacatatgagtgcctgatgcaagccattgatgcagtgaagcctggtgttcggtacagagaattgggaaacattatccagaagcatgcccaagcaaatgggttttcagttgttcgaagctattgtgggcatggaatccacaagctttttcatacagctcccaatgtaccccactatgctaaaaataaagcagttggagtgatgaagtcgggccatgtatttacaattgagccaatgatttgtgaaggcggatggcaggatgaaacctggccagatggttggactgcggtgacaagagacggaaagcggtctgctcagtttgagcacaccctcctggtcacagacactggctgtgaaatcctaacccggcgacttgacagtgcacggcctcacttcatgtctcaattttaatttctcccaagatggcacatctcagtaccttcttactgtgctatgcattttattgagagtacagaaaggaagaggaacctttttttaatcacttgttttgttttgactatagataagaaaggactacagcatttgatgtgtgtcctcaagaacttgtcttgggtctgaaaaagctgagaagaataaaggaaacattgctcaactcttcagccccctccccctgcacacctgttttctcatttgccctttgagcacttttacttaaacttgcttgtagttgcttttatcactgccgcaaaacagccatcaagagccatctgctttccaggtgaacattggaaatgagaatctttgaaacttagcaatatgtgttgcaccagattttttaaattatatatatggaaatatatatgtatacattttaagttctgtatacataattaccaaacactatgtgacctggagtttgtgttgtttctgctctgacaggtttatatgttcttacaaatggatccatagtttgcagtgatttaattcctggttgggatttggcctcccctctcccccatgctaattatttacccttgtaattgtgcatagggaagcactcacccaatgagactttctccaatgtggactctgtgtgtcagtgaatgaatgtagtaaaattcactttggaaggttatcaggcttttaaaaatctagtttatggcaaaaatagccattttccaagtggtggctgactgttgcagggaatgagaatttcataatacactgctatttcagacctctgtttggtcagaaatggaaaagaaaaagccccctttcttcccttttctgttttacttcaagggcataccttggaggtgctcagagaagcgtgaagtttgcactatggtggaggatggggaaagagttctaaagtgtctccagctgtgaacccaggaggtcaagtgggctattaaaatctaacgttgagtaaatgtgatagtgatgagaaaggaattttgtgtactgtaaccttgcagtagagatgcagctgtccttcgtgtgtggaaacacacctctcctttacatagttgggaacctcattagaaatgacctcagctgccccatatctacgttcctttcagcagttgtccaagtaggagtgtatccagtgaagacatatcaaatcacaaagtcattgtcattagagtgtacttgattactgggcatccttgtaatataatttcataccactgacacattatacttgtaagagaacatctttcccagagtgcctcagaccttattgctttaaaatataataatgttttcattacttttattatttgaatgatttagtaaagttgactgaatctggtatagactttgggagtatgtgtgtgaagtttttatcaaactgtaatatttgtgaatggaatgccttgcaatatgaatgttaatataatgtgtaaagggagattaaaaagtttgaatgattatccta

SEQ ID NO: 245083 - DNA, 2714 bp, Homo sapiens
agcggcgggcccagctcctcccccgactcggtctctctcccctcccctccgcccggcagttcctccctcccgccgccgcctcttcctcggtgaggcgctcttccagcgggcaggcagcatggcggccgtggagacgcgggtgtgcgagacagacggctgcagcagtgaggccaagctccagtgtcccacttgcatcaagctgggcatccagggctcgtacttctgctcgcaggaatgttttaaaggaagttgggctactcacaagttactacataagaaagcaaaagatgaaaaggcgaagcgagaagtgtcttcctggactgtggaaggtgatattaatactgacccatgggcaggttatcgatatactggtaaactcagaccacattatccactgatgccaacaaggccagtgccaagttatattcaaagaccagattatgctgatcatcccttaggaatgtctgaatctgaacaggctcttaaaggtacttctcagattaaattactctcatctgaagatatagaagggatgcgacttgtatgtaggcttgctagagaagttttggatgttgctgccggcatgattaaaccaggtgtaactactgaagaaatagatcacgctgtacacttatcttgttgtacctcagtgaatgaagtcatttgccatggaataccagacagaaggcccttacaagaaggtgacattgttaatgtggatatcactctttatcgcaatggttatcatggggacctgaatgagacattttttgttggagaagtggatgatggagcacggaaacttgttcagaccacatatgagtgcctgatgcaagccattgatgcagtgaagcctggtgttcggtacagagaattgggaaacattatccagaagcatgcccaagcaaatgggttttcagttgttcgaagctattgtgggcatggaatccacaagctttttcatacagctcccaatgtaccccactatgctaaaaataaagcagttggagtgatgaagtcgggccatgtatttacaattgagccaatgatttgtgaaggcggatggcaggatgaaacctggccagatggttggactgcggtgacaagagacggaaagcggtctgctcagtttgagcacaccctcctggtcacagacactggctgtgaaatcctaacccggcgacttgacagtgcacggcctcacttcatgtctcaattttaatttctcccaagatggcacatctcagtaccttcttactgtgctatgcattttattgagagtacagaaaggaagaggaacctttttttaatcacttgttttgttttgactatagataagaaaggactacagcatttgatgtgtgtcctcaagaacttgtcttgggtctgaaaaagctgagaagaataaaggaaacattgctcaactcttcagccccctccccctgcacacctgttttctcatttgccctttgagcacttttacttaaacttgcttgtagttgcttttatcactgccgcaaaacagccatcaagagccatctgctttccaggtgaacattggaaatgagaatctttgaaacttagcaatatgtgttgcaccagattttttaaattatatatatggaaatatatatgtatacattttaagttctgtatacataattaccaaacactatgtgacctggagtttgtgttgtttctgctctgacaggtttatatgttcttacaaatggatccatagtttgcagtgatttaattcctggttgggatttggcctcccctctcccccatgctaattatttacccttgtaattgtgcatagggaagcactcacccaatgagactttctccaatgtggactctgtgtgtcagtgaatgaatgtagtaaaattcactttggaaggttatcaggcttttaaaaatctagtttatggcaaaaatagccattttccaagtggtggctgactgttgcagggaatgagaatttcataatacactgctatttcagacctctgtttggtcagaaatggaaaagaaaaagccccctttcttcccttttctgttttacttcaagggcataccttggaggtgctcagagaagcgtgaagtttgcactatggtggaggatggggaaagagttctaaagtgtctccagctgtgaacccaggaggtcaagtgggctattaaaatctaacgttgagtaaatgtgatagtgatgagaaaggaattttgtgtactgtaaccttgcagtagagatgcagctgtccttcgtgtgtggaaacacacctctcctttacatagttgggaacctcattagaaatgacctcagctgccccatatctacgttcctttcagcagttgtccaagtaggagtgtatccagtgaagacatatcaaatcacaaagtcattgtcattagagtgtacttgattactgggcatccttgtaatataatttcataccactgacacattatacttgtaagagaacatctttcccagagtgcctcagaccttattgctttaaaatataataatgttttcattacttttattatttgaatgatttagtaaagttgactgaatctggtatagactttgggagtatgtgtgtgaagtttttatcaaactgtaatatttgtgaatggaatgccttgcaatatgaatgttaatataatgtgtaaagggagattaaaaagtttgaatgattatccta

SEQ ID NO: 245084 - DNA, 1774 bp, Homo sapiens
agcggcgggcccagctcctcccccgactcggtctctctcccctcccctccgcccggcagttcctccctcccgccgccgcctcttcctcggtgaggcgctcttccagcgggcaggcagcatggcggccgtggagacgcgggtgtgcgagacagacggctgcagcagtgaggccaagctccagtgtcccacttgcatcaagctgggcatccagggctcgtacttctgctcgcaggaatgttttaaaggaagttgggctactcacaagttactacataagaaagcaaaagatgaaaaggcgaagcgagaagtgtcttcctggactgtggaaggtgatattaatactgacccatgggcaggttatcgatatactggtaaactcagaccacattatccactgatgccaacaaggccagtgccaagttatattcaaagaccagattatgctgatcatcccttaggaatgtctgaatctgaacaggctcttaaaggtacttctcagattaaattactctcatctgaagatatagaagggatgcgacttgtatgtaggcttgctagagaagttttggatgttgctgccggcatgattaaaccaggtgtaactactgaagaaatagatcacgctgtacacttagcatgtattgcaagaaattgctacccttctcccctgaattattataatttcccaaagtcttgttgtacctcagtgaatgaagtcatttgccatggaataccagacagaaggcccttacaagaaggtgacattgttaatgtggatatcactctttatcgcaatggttatcatggggacctgaatgagacattttttgttggagaagtggatgatggagcacggaaacttgttcagaccacatatgagtgcctgatgcaagccattgatgcagtgaagcctggtgttcggtacagagaattgggaaacattatccagaagcatgcccaagcaaatgggttttcagttgttcgaagctattgtgggcatggaatccacaagctttttcatacagctcccaatgtaccccactatgctaaaaataaagcagttggagtgatgaagtcgggccatgtatttacaattgagccaatgatttgtgaaggcggatggcaggatgaaacctggccagatggttggactgcggtgacaagagacggaaagcggtctgctcagtttgagcacaccctcctggtcacagacactggctgtgaaatcctaacccggcgacttgacagtgcacggcctcacttcatgtctcaattttaatttctcccaagatggcacatctcagtaccttcttactgtgctatgcattttattgagagtacagaaaggaagaggaacctttttttaatcacttgttttgttttgactatagataagaaaggactacagcatttgatgtgtgtcctcaagaacttgtcttgggtctgaaaaagctgagaagaataaaggaaacattgctcaactcttcagccccctccccctgcacacctgttttctcatttgccctttgagcacttttacttaaacttgcttgtagttgcttttatcactgccgcaaaacagccatcaagagccatctgcttcgggaattgggacgagacttgaacttcacattgttggccgcatttaatatcttttgagacaatatatcagggggacaatacacacaattgcgggggtgtgtgccacgataataaacacgggaatcggggccccccgatatatgggggacacacacggtaatatacataggag

SEQ ID NO: 245085 - DNA, 878 bp, Homo sapiens
tgatggagcacggaaacttgttcagaccacatatgagtgcctgatgcaagccattgatgcaggtcagcctcagtgttgagcacctattggcagtcctgtgtgttgatgggccaagaatgactgggcgctgcagttctgtgcattccttgtaccttccaggttgcccctgttctacctgagttagctttggttgttagcagtaatgggtaaaaggatgatctgggaatctcttggtggtgatagaccagatgattggttagcatcctttgtttcttctgtgatttatcttccttttctttgcctgataaatgaagaggactgtgcagatggttttttagtgcaacttttattctatttttaaaattctttccagtacataaatattatgttctcctcataaaaaattaaaagtgaagattatgagtgaaaaatgtgtgatcctcctttacacttgcctcccctcttatctctctcttctctctagagatatcccattaccgtttaggttttttctctctcctgtgcattaatgcacacacgtatgtgtatgtgttaaattaagttaaatggaatcataatatttttaatgtgtaactgggctgttttttcaactatcatagagatcttttcaagttagcatatatacctacagacatagatttacctcattcttttaatggctatgtattatattctatagtattacaatttgtgtaactattctgttggattttggtgctttccagatttcttactattgtagtaatgggtaggggtgtatttctggaggatttttctcaggctgtctgtctttgtacatatgaacaacttatcgaggcttttttgtttaatcagtatcttatggggataagagaagg

SEQ ID NO: 245086 - DNA, 149 bp, Homo sapiens
gctctaagagacgaaccattcaggcttcctggcccctcccccagacccctctcctgggctctgcagggctctgggctgactaacccacacccacacttagcacaggcactggcctgcttgcttctgtctctgtcttctgctgcagactg

SEQ ID NO: 245087 - DNA, 683 bp, Homo sapiens
ataacaggataatacagtatgcttaggaaaataaggcttttgttgggaattgaatcctagtgtgcagaagtattagctgactctcattataaacaaattttaccagttatttcctaacagactcttgtttaatgaataaacgctttgcttattaattacacaaaatttggtcaaagcattagaaaagattaaatagttttgttacggtgtgttaaaaacttggcttttaaccttgacatttaatggattggaccacacgggccaagttccttctcctttgcaaaggtatggagctggaaatgaacttagagatcagactcaagggaccacagcttgcacttaatagtttacctttatctgtgctttagctgtgcttttggatgtattaagaactttttaactgccttaatagactgttatcccttttactctttgatatgtgacatttaaatataccttgaatttgaactggttgtcgttatgtgttgggaacaaaattacttttgatgggaatacatttttgaattaaaaatgcaagttaatagataaataatatctgattattatagattttgaaatatttatatttaagccttacaaatgacttttcagtacaaacaaattctctgattagactttctgatcaccgtagcaaatatgaattggacaataatgtgaatgta

SEQ ID NO: 245088 - DNA, 578 bp, Homo sapiens
cagggttggagtgcagtggcgcgatcttggctcactgcaaccgccttttcccaggttcaagtggttctcctgcctcagcctcctgagtacctgaaattacaggcgcccgccaccacgccagtctcaataccttcacagaggtgaagaagcagcaaccaaatgaattagacagcaacatgattcctagagaatggcaagaccaattcttcaactacttcttcagcatttctgaaacatatggaagatggcccattgtgctctcttaattctttgataatctggacattgacttttccattatatgacctgggcttgtgggcatcatgtcataatgcacctgttcagacatctccctgtaccaatatggatcacttgaagagactcctttgcccccatcaaaaaggatacagttgtgtatctcttccatttttgtttacagtgcctaaaattatttgagcagtttttcacctcttctctgataaacaccttattagtccttaaaaagaaaagaaaaaaggaaaataaaacttttattgagatcctagaagaagaaaaaaaaattggccttgttggcctca

SEQ ID NO: 245089 - DNA, 391 bp, Homo sapiens
atttgcaaaacaacagcacttaggctattggaatttgatgtgctgtgtgtgtggtttttagatggaggcttgtttgtttgttgaagaaatcttcagccaacaataaggctgtgggatcatccatctgcaagtatcttttatccctgaagcactgagacagactggaggctacacacagaaactgtctctactccctctgccagccccaggtcccctctggagggggcctaccccaagcagcagggacagcagcagcagtccacaccaaggggtgggaggggcatgcctcctagccagtctccaaggacgcagttcattatgatgcatcctcgttgccatggagaccccaggcccacagagcctggctaatagtccctgaattcactcaggc

SEQ ID NO: 245090 - DNA, 500 bp, Homo sapiens
ctaacccccgttgtggctgactgtaagttctgtgaaatcagggaacacttgatgatagctagtagttgcccactgtgtatccactgaagcacctaccctggcattctacacatattcataaatgtttttgaacaaatgaatgaaacaactaagggtaaaactatctgctatttatccagaggcagaaccagagtcatgggcccatgagtggacacaagtaatgggacacggaatattgatcaacctgttctagatgtaacctcagtgtctgaatactagacagaggtggaactgagacaggccataggtgagataactatttcacaagtaagctatatcccatagccttctttaaaagggtgagacaatgataaggtgtgatagttaattttatccatcaattggctgggccatgatgtccagacgtttggcttaacattatactggatgttcccgtgagggtgtttttttggatgagattaacattctaatcagtggac

SEQ ID NO: 245091 - DNA, 595 bp, Homo sapiens
cttcctctactttttgagagctgatccaaactcataatatgaatagatggacattgaccaaagagaccagcagcagaacaaaagcataaacaaacatgagagtaggctaattttaccaacctgaggtcaaaaagttctcatgagatctggtcgtttgaaagcatgtaccacttccctcttcgctcactctctccctcccgctccaccatgtgaagattgtgcctgcttctccttcaccttctgccatgattgtaaatttcctgaggcctccccagccatgcctcctgtacagagactgtggaactgtgagtcaattaaacctcttttctttatgaactactgagtgtcaggtagttctttatagcagtgtgagaacagactaatatagtactcgttcaaaatatgtaagtaaactataggacaacagaaaaagggtgacaatttgtaagaaaagtgggcaaaggcttgaatggaaaatctgcaaaagagattacaggccaataaccacaggagaagatgttcaactgcattattcaccaggaaaaagaaaattatcttttgcaccatcttatacccattaggatggctattataa

SEQ ID NO: 245092 - DNA, 274 bp, Homo sapiens
tgaagtaagaaaaaaggacagaggtatcataaaagatacaaattcagaggtattgaaatacttatgcatcaaaacaactatggcaaaattttactgattcagtattatgcctatgaaaattattcagttcagtgatttggagaagagggtaaagaaatgtttacacatcagaatctgtggaggggagaatgtgtgtctggaaagaaaatggtattttgtctcattggtttgatttgtttttagttataatatttcatctattttgaattttata

SEQ ID NO: 245093 - DNA, 341 bp, Homo sapiens
ttggccaataaggtcaataaaacttgagcaactagcacatctgatgtcgccaaatatacaatgcaacagataaggatgctgctgaaaaaacaggttctcttttttttcttttcgagacagagtctggctgtcacctaggctggagtgcagtggcgtggtcttggctctctgcaacctctgcctctggggttcaagtggttctcctgcctcagcctcccgcatagctgggactacaggcacgcgtcaccacacccagctaaattttttgtatttttagtagagatcatgctattattgcactccagcctgggcaacaagagcgaaactccgtctcaaaaaac

SEQ ID NO: 245094 - DNA, 406 bp, Homo sapiens
ccatatctaatagcaaaaattgaaaacaaagtgcccaggaggagttgaaggataagtaaaccttaaaatatgcacatattctctcaaggaacgtggatagtattgtgactgattcttctccatgtgtgatccacatagatgataagatcatcatgagaagaacttaattttatacttgagctttgctttgactgaaagatgagaaattttgtgattattggtatcatctctatgatgtcatattacctagattcacatattcttaactccattaaaatagaaattatatttgtgggcggggaacttattttcatccatctctgtttccttccaattgagcaattccttattttatgttaacctgattttagtggttcattgccataattcttagaaattatatctc

SEQ ID NO: 245095 - DNA, 474 bp, Homo sapiens
gcaatgcacactgaaatagaagtctattattcaaccactaaactgccccttcctatgcctatggaatttgctaattagcaataagacattgttaatcaattatagcgttgttttctgctgaaccctgaggaaactgcataatcctaaggcagggttctaggcagccactaccaagcattcaaggttggcactagaaatgatacctatttgccttcctggcatataacatttctaatttctccctctccactggcttcttctttacttcctccaacacacataagcctttatattcaataacaaacagttgtggaatgcctactgcatgccagtgctgtttaaggcaataggaaatacagaggtaacaagaactagcataatgtaacttacacttattgagggagacagacaataaacaatcattaaacagataaataaggtttttccagacactgatcagtgtcttttgtaaga

SEQ ID NO: 245096 - DNA, 300 bp, Homo sapiens
tcatcgttgttgctaaggttggttggtggaccgagacccagctgctcaaattgtttctccttgtttggaaatatcagggccgagtaattctgctttaagacttggatgagaaggctctttgcaagcaggaagcacccatgcccatacctcgaaggcccccttctgctttgaaggttctttggtgtatatcacaccccctccttcaaagagaattcccccagtgagccagttggcagggatgtatacaaaaggaaggacattatatttcctgttttagtatgaagggaaattaaaaattta

SEQ ID NO: 245097 - DNA, 339 bp, Homo sapiens
gctgacatctgtgaatacagctgtaaggatactctgggcagcacctatacgatgagcagcaaatgaatcagctcagagccacactgggaaaaaaatacaagaacaatatttagttacaaaataatttaaatggtatgtttccttttaacgaaagcttcagcaccaaagtttgaagacctgccaaagaggaagatgttctgattagcatgtaacatagagagcatgaaagcaccttttcaaaatcccagatcgttgagcctagggcagcactcctgcagcttgaaaaggaaagagctgctggttggatttaacaataaaaaaggaaaactttaaaaagac

SEQ ID NO: 245098 - DNA, 711 bp, Homo sapiens
gatgaatccaaaaaagggagacaagtggaagacttaagtttgtgggaaaagacattttttgtcaaaaattttagacatattgaatgggaataaaagttgttttacataacatctccacagcatgaattatcttggggaaaatttttcataaatattgttaaaatcctttcaaccaccttctcccagaaaccaccattagtttctgttataatgtacagaaaaccagccgggtggggtggctcactcctgtaatcccagcactttgggaggccgaagccggtggattgcttgagttcaggagttcgagaccagcctgggaaacatggcaagaccccatctctatccttgttctaaaaagatacatataaataaacaagaaacaaagtgtacagaaaatgaggaagcatgttttatgacaaccagtccatgacaatttcaaattaaaaaaaaaaaatccttttggtgtgatagagtattccccaggttttgatgagatttttaaaataagaattatcccatattaaacttgattctcatgcacacatgatcaacttaaagaggtggtgttgtgcatgttgtatatgactatgttctaaaacattgcatttttatatgcattagttgttttggggagcaggaaataagcatatatataatattaaaataatttagcaggttttgcatggtgtgtcttgaattgagactaagtaa

SEQ ID NO: 245099 - DNA, 934 bp, Homo sapiens
tatcaggtggttttagaagaaaatggtgagaaaaatcaagtacaactaggaaagcttgaagctacaataaaatcattatctgcagaacttctgaaggcaaatgaaattatcaagaagttacaaggggatctgaaaactttaatgggtaagttgaaattgaagaatacagttactattcagcaagaaaaactcttggctgagaaggaggaaaaattacaaaaggaacaaaaggaattacaagatgttggacagtctcttcgaattaaagagcaagaggtatgcaaattacaagaacaattagaagctacagttaaaaaacttgaagaaagcaaacaacttctaaaaaataatgaaaagttaatcacgtggttaaataaagaactaaatgaaaatcagctagtgagaaagcaagatgtattgggaccttctactactccgcctgcacattccagcagcaacacaatcagaagtggaatttctcctaacctgaatgtggttgatggtagactgacttacccaacctgtgggattggttatcctgtctcctctgcatttgcattccagaataccttccctcattcgatatctgccaaaaataccagccaccctggttcaggaacaaaggttcagttccaatttgcagtttacaaaacaaatgcatcactaggagactgttcagtcacggagcaactataagtatgccttgtcaatgataaggacccatgctgaacatgtacggcgtgaatccaaatacctgacgcaaccgggacaacatagcattccctttacgcggatcagcagaacctaatttactcaattcagaccatcagagagatggccattaggacgcattacataccttctgccaaaaccacagagcaccacctctggtcttcagcctatttcccctgggcaggtaccaaacacgtaatca

SEQ ID NO: 245100 - DNA, 363 bp, Homo sapiens
gactcatctccacagtgttttttgtttgtttgttttggtaaaggtccagatagtaaatattttaggtcctgtggcccaagaggcaaaatggaagatatttagttatttgtataatgaccacttgaaaatgtgaaagccgttcatagctcaaggctgtacaaaacaagggggtgggctggatttggcccacctaccgtagagaagtagtttccaaactgttttgattataaacccctccagtaaaattttgatcacatgccacagatttttaattttttaattgtaatttctgtttataagctatcatactaatatgttatgaatttatataaatgaaattttaattgatgagataaaaatata

SEQ ID NO: 245101 - DNA, 962 bp, Homo sapiens
tttttgaagttgcaaagtcatttattagtgtacgccctatgtaaatgaagaggctatttcccgtcatagctgatgtgtttccgtttgatttcgttctaagaagttcttaggttacctgcctccatgccctattctcctgcctcagaagcacagccctcattttgctacaccccaatctgtatcagactatctcaaagagcattccagtttttaagaaaagttttcagagaaaaattcttttaaataaactctataataaaaatctcttgcatttaacattggcagagtgaagaaggggtatctctaaacccgtcattctgagaaattattgtataaacatattagtaagacagaaaaaaggaagactggagcagaattcaatggaatggaaatcaaaatagcaggaataggaaaaaagataaataaagacaagaataaaagaagatgacaggcaaaaggaagacatgtgaagtagccatggaaatgagatacaaacacagccagcatccgtcctcatacggctacttactatggccctgcaggaggcagaaagagagaagacaaataggacttcatctttgctttatctttaaactcctattcctaaatctagccttattaccccttgttttaagaggaaaacattttactaaaggccttctttccattgttcgaatcttcaagacattttacagaaatgaagcaatgctgctaaccttttgggtgacagtaggaaaggaaacaagaatacaagggagagcttatttcccagtccagggaactttgcttcagttctggctgagtgtccagtttcggatgtaacatttttttctgaatgtagacttcatcatgctggtagctcagaacaatacactgtaagcagtagtggcagctcctgagctccggctctcaggactctgctgcaggtgctttaacaggcatttcccttcctccttccctcc

SEQ ID NO: 245102 - DNA, 422 bp, Homo sapiens
tatttaagtagtaaagaactaatttcaaaccagtgttctaggtagatgggtttttacacaagttgttttcattttagatttgagagacaacataggtatcaagagaattattttattaagatattagaatgcaatgatgtgcttataaatattagggcttcagatgtctggttaagtctacttaaatttttagtacggtggctttccaaatttttctgtcaggaattcttttctaagactattttcttcttattttagtttatacaataaaataccttggatcttaaatagctacctgcaccttccttttttacactcagtgtatcctctctgctctctactttttggccttcctttttcccaccataagctgcagttctgagtgtgaagagcctcagcagaagccatagccacccccatta

SEQ ID NO: 245103 - DNA, 493 bp, Homo sapiens
gtcttatggcaggtagcagagttttcgaggtttaacttagagaaaatttttttctcctactaatttagaaaagttcaaattattccattttagcagaacactgtccactgataatgagttcagaacactctgaggcagaaggaaatgcacagcacgtttctggcacttcttttttcctggagaataaagcccctcattgttcctagatgtgttagacatggctccttccccaatctatggatagatataagcaggtcttatttgctttcacgtgacatagatgctttgtagtttatttttttatttttttagagtcaaagtcttactctgtcacccaggctggagtgagtggtgcaatcatagctcactgcagcctagaattcctgaggcagaaggatcccttgagcccaaggagtttgaggctgcagtaagccatgattgtaccactgtactctaacctgggtgatagatagaggaggccctgtctcaaaag

SEQ ID NO: 245104 - DNA, 594 bp, Homo sapiens
aaaattagcaatattaaaatagctattacaattatgcatcagataacaacaacaaaagctcattaaaaataggtaagttctaatatatttttaaaaattcactgtatagatggaagagtcggtaaacttgaagataaaccaaaagaaatttttgaatctgaaaaacaaaaaagagaagttgaagaaaattattccatagtgagttataagataaaatcaaaaggtctgccatatgtgttaactgaagtcccagaaataaagaagagagatacggcagagaaaaagaaacaatggccaaaattttcccaaatttggtggaagatataaatttaaagactccagaattttggcaaaccccaaaaaagataaaacaaagaaaaccatatttaggcacataataaataaacagctgaaaaccaaagctaaacagaaaatcttgacagcagccatagaaacacaacacagaatgaaaatgagtagcttgttatttgaaacaatgaagcccaaaagacgatggaaaggaatctttaatatgatgaaagaggtagagaatgtcaatccagaattctatatctgagtaatcttgaaagtagg

SEQ ID NO: 245105 - DNA, 364 bp, Homo sapiens
gcagataaaattctcaatgaagagtcatactttggtatcttggctactagatcaacctcttattgtggtgaggctgactttgtttccttgacactgaacaactctaggtaacctgatatgcacctggttttatttattcattcgttgaaaaattatcaagctcctgttatgtgccagggacaattccaggctctggagctatcacaatgaacaacagagagttcttgccctcaaggaacaaatagtacaataggacaaaaaaataaatgggagatttctctatagtgtgataagaatgaagacagaggctggtggtggctgatgcctgtaatcctagcactttgggaggtcgaagtgggaggac

SEQ ID NO: 245106 - DNA, 325 bp, Homo sapiens
tttttttcctttggtcaacaaacatggttggccaaagtgagtgaagcaacctcactgtcatatcctctctttggtcactgagaccaacatggtaaatcctaaagttatactgagcacagcccctagagtcacatagttttgacatcccatcaacatttcactggttgcatgagaacgtttgcagtctcccagcactcttgaggttcacagtccaggtcagatgaaattcactgagtcattaaaaggggaagtaagaataggttaccaatttttagatttaattttttgatgattcttgttttattagccccatatataaaatata

SEQ ID NO: 245107 - DNA, 439 bp, Homo sapiens
ccaaggtggaggatcttgtgttagacttcactgaattttcacttaccacctgggtacctgtctagaaccaagtggtgctcgatgtaaacctccttccctttgagagtgctgcatgctactgtactggagtttttgtttagtttttacatatatttgaaatacaaactcttttgtggaattgatgacttttcttaccatttgggtaaattctggaatctcctaaaatattattggtagtatgcactgtccatgagaggaagatgaggagaaaaagagtacagctctcgtctcctcgttgagacaccacacgacctggttttagcaacagaaaaatagcaagtggtttggctgacgcaggctaagatcccatgaagccgcagaaacgggggaagcttatagtaaagtcatctaataaagtaaatctaagtttattcagcaa

SEQ ID NO: 245108 - DNA, 610 bp, Homo sapiens
gaggagttaagaagggaaagcaatcagtcatttttccaaaggccagtctgcagggctgggactgagcacaggctgaaatcaaggttggactacctctcagcccttctcaagccctccaggcctagcagtctccatctgatcctgtattggaaatgggcatggaagatgccacaacttctcaagctttccctaggaaaaggggtgggtgaacttctggcctgaagaatctgaggatggaaggtcaactttgctcttctcctgggttctggaaccagaccttcctaacctgctctgctcacctggagccccagcccactgtcacccatgccctcatctccagactcttcttccagcaactaggcttgcaaagcagggatggtggcttggagcaccagcttccgtgtcaagcagggcaggctgcactcccagcgccctggtgcctctggctctcgaggcttgttcctcatctctagctccctcacagagttgtcctgaggctcacaatgggaacacatcaataaattacctattgcattaaaatgagttgttattattggcacaattgttattgacgcttaagcctgaaggcaaataaatgatttttagctgc

SEQ ID NO: 245109 - DNA, 255 bp, Homo sapiens
gctcaagcagtcttctgcatcagcctcccaggtaggtgagactacatggatacaccaccatccttctaaatttttaaattttttgtagagacagggtcttgccatgttgcccaggctggtctcaaactcctgcgtttaagcgatcctcctgcctcagcctcccaaaatgccaggattacaggcttcagccaccatgcccaacctcggtgagttttttaaagaaagcaacaccaacagagaataacatgctttaaa

SEQ ID NO: 245110 - DNA, 688 bp, Homo sapiens
cccatgaggtattattatcctcatttagaggatatggagaaattaaggctctgtttcaaagcaagtctgtaaattctttaacattcttcccatcaagaagagagatctatctcctgccctggaacatgggcagcgcttttgactgtctccgtgcatataatatggtggaagtgacactgcttgacttgtgaagctggatcacaatgggttattgacttccaccagcctgtctccggggacaggtgacttcatgtaagaagtccagctaccctgacagagagtccacattggagggagcacactgtaatagacagaggtgcctgaggagccccggctgttccagccgccagctatttaggtcttcccaagtcaggcaccagagagtatgaatggaaaggccttcaagagaactctagccccagccattgtctgattgtcactgcatgaggaccaaaaatgcttgctgttgttttatagcaccaagctctgagtggtttgttgtgctgcaggctccaagagaagtaactttctgagagcactcaggaatttcttagtggaactggggctagaatcaattcactgcatttaatgcagtattaaccagacaactgtgttgggccctggggaccagagaagaattaacacacagcccaagccttcccctggtctgagcttcctcttcccacct

SEQ ID NO: 245111 - DNA, 589 bp, Homo sapiens
accatttagactgtttaagaaggctgtgtaccagctttaatattgtattttatgatattagtgatccctgaattttatttgaaaaaatattattttactgagtgatttagtaggcttgatcattttccttgcagctttcatattttgtgacacactgatttaagaatcaagtctatatctgaatgtgaaaaatctgcaatgaggatagcaaacaattatattgttttaatagaaaaattatttgataatttccatgtattgatgatttcagtagaatctattctgcatttaaccaacaatcagtagttcccaagctattccgtagttttagctttaacacatagtacatgcttaataaacattagctgaatgaatgaatgaatgaatgaatgaatgactaaagactttcaggacctggaagggaggatgtaaagaacccagggccaagtgtcatgcaagcactggagcatctagatcccctccggacaccagcttcctttcccacaacccaaatgttcttttccttttatgaattttctttaatcgtgacaaaatatatataatataaaatgtatcattttaactgtta

SEQ ID NO: 245112 - DNA, 338 bp, Homo sapiens
tgaaaagtatgggaaagttataccagcaagtgctgttatatttgggatggcagtagaatgtgcagagataagaagacatcatagagtgggtattaaggacattgctggtatccatttgccaacaaatgtgaaatttcagagtccggcttattcttctgtagatactgaagaaacaattgaaccttatacaactgaaaagatgagtcgagttcctggaggatatttggctttgacagagtgctttgaaattatgacagtagatttcaacaaccttcaggaattaaaaagtcttgcaactaaaaagcctgataagattggtattccttgtttaatttttt

SEQ ID NO: 245113 - DNA, 560 bp, Homo sapiens
cacactgaaatggactttagcatgcagagcatttatcaaggagtgtcaatgtcagtggagagcgggaggagaaactggaagtgagcagagagagaaggtgagctgcaaagcatgcctagtgatagcctcagccaaccccagaaggaaggcagaagtggaatgacccttcagggtcatcccaagttgacctgaggcagacaggccttcagatatcccactggatgctggccaccctaggatggggcatggcattggggaaatctctctgtggctgaagcaattcctataggggctgacagctggagactgtctgccactggccctcccagcagctgcagcagccaggtctccattgcaggagtatcggccacacactcagtttgcagatagtgtgagtgggagctacctaaaataaaacagtcacaccttaaatattacctctttgaggaggtaatatttaagctgataaccatatggtgagaaggtggtagacttccagatagatagatagatagatagaaagaaagaaagaaagaaagaaagaaagaaagaaagaaaga

SEQ ID NO: 245114 - DNA, 620 bp, Homo sapiens
ttttgaagattgctgcctactatgtgaaagttaatataaactggagggatcgagcccagccattgagagtccaattaggagctactacaatgatgacggtcgctacaaaataaaaagaactcaaaagagggagcaacaaattcagctgaagtatggggaaacaaaaaagcctcagagaagtcatgttgcagctcaatactgaaagataagaagcagtctagacaagtaaagcaaggaaatttgtacagaagaccatatgaatagcatgtttggaaaacttcaagtagttcttcatgatgagtcttgaatgaggtgaattatagctagaaaggcagattgagaaaaaaacagtaaagaatattttacaagaagagaaagtaaacacctcctggacactaaggaatacttttaagcaaggtgcttacatgaccagggttacattttagaaagattcttccaaaatcagttagcctaaaaacaaatataagaagtctagccacctaaacaagcatcgtgcttcccaataaatacactgtctcaaagtcctaatctagtaacttaccttgacaaccaaatacagtacaaccaagtactcttaagtttcagagaccaagcaacta

SEQ ID NO: 245115 - DNA, 528 bp, Homo sapiens
catttagacagttctggggaaaggtacatatttaatgaattgaagcttcaaaagacactaccaatttgccagctctttgaatgagccattttcaaagaagatcccctgccccagtgaagtcttcggatgtctgtactcctgctaacaccttaagtgtaccctgtgagagacctcaaaagagaaccacacggccaaactgctcccaaatttctgacccatagaagctataagaaggccagctccgatggctcatgactctaatctgagcacttttggaagctgaggcaggggcatggcttgaggctaagaattagagaccagcctggtcaacatagaaagaccccatctttgcagaagagaaaaagaaaaaaattagccaggcatggtgatgtgcacccatagttttagccactcaggaggctgaggcagaggatcgcttgagcccaagattttgagagtgcagtgagctttgatggggccacagcaccacagcctgggtgacgagagtcagaccctgtctcagaacaa

SEQ ID NO: 245116 - DNA, 494 bp, Homo sapiens
acaaaaagccactggtatcagcttttaaacaacaataatttttaaagcctaatgtatatttttatggaaacgtcagtgagacttttcattcttttggcgatacgtggatagaaaccatcagattcctctttcagataattcctgccttttccctgctaggcttgtttattttttgaaaagtagccccgagagttgaatcccatgagagagtcattttctcctatgttaacacgaccttccgatactttttcaaaaagcaaactgcaggccaaacatgaagttaccgaatggcttgcacgtagtccatatgtgcttgagtgaaatctcagtgtgcagtgagcgtcttgtcagcctcatgcaagattgtcgctctgcatttccctgaaattccacaccctccttcaacggctgaactgtttcctagaacaggcttcaggctgtcttcataactgacagtgatggatcttctccctctaactgtccgtcccctgtgg

SEQ ID NO: 245117 - DNA, 278 bp, Homo sapiens
ttggagcaccaatgccatttcctggttcccgtgggtatcttctgactaatgccacctctgtgatcgcagaggccaggtcggcttcactcctcactacagcccaggcccataccaggacagctctggttgtcagagccacagacataattttacatttcctaatcgctgcataaaacacagcaaaaataaatgggtgaaattaattgtaatatggttcgttgaccccggtacatccaacgtgttatcaattcattattaaagacaaatcagtgagatat

SEQ ID NO: 245118 - DNA, 619 bp, Homo sapiens
tggagacagagtcttgctctgtcacccaggctggatctcagctcactgcaacctctgcctcctgggtttaagcgatcctcccacctcagcctccccagtagctgggactacaggcacccaccaccgctcctagctgtaaggttttttttgtatttttagtagagaggggttttaccatgttgaccaggctggtctcgaactcctgacctcaggtgatccacctgcctcggcctcccaaagtggtgggattacaggcgtgagccaccacgcccaggcttccttccaagttcttaaggtgcatgccgagcaaattaatgttctaccttcttttccaatatgactatcaaaagatacacgagttcaattgaaaaaaatatatatatatataaatttccctttgtatatcttcttttattgcaacatacagattttgatatgtagtttttctagaattatttagttctaagcgttttaagattttggttgtaatttctccttgcacctgtgagttgtttagaagtttgttattaagtttccaaacatagaagtttgtataatgttacttttggtgtgtatttttccccttgtgaagaacttacaaggagtggaaatttgattt

SEQ ID NO: 245119 - DNA, 393 bp, Homo sapiens
cctgggggataagattttttagggggctcaaaaaaaaaaagatcagcctattgtctcacttcctatatgccttcattgatatgacatcatactgaaaggaaagcactgtttctttttaatgttttttatattcatgagagttcttatgtttttttttcccttgctggaattatactaagatacagttctgtatcctgtttttattaacgcgttgtgcaatggtgtgatctcagctcactgcaacctccgtgtcccgggttcaagtgattctcctgcctcagctacttggaggctgaggcaagaggatcacttgagcccgggagcttgaggctgcagtgagctgaaatcacaccactatgctgcagcctgggtaactgtacaactctgtctcca

SEQ ID NO: 245120 - DNA, 7386 bp, Homo sapiens
tgagccgggatctggcactcccaggactcccggccggggtagctcttcactcctcagcgcgacgtcgtgtcgagttcccaaaaagctccgcaggggctgtagggaggtgatctcatccattaacagctgtgtgttgccagttcccaaatctttatctatctcagacttctctcctgcattccagattcttatattcagctgccttttggatatctctcccaggatgttctcaaggcatacaagaattaaattctgaataagtctgcaggtaggatggacagttattttaaagcagctgtcagtgacttggacaaactccttgatgattttgaacagaacccagatgaacaagattatctccaagatgtacaaaatgcatatgattctaaccactgctcagtttcttcagagttggcttcctcacagcgaacttcattgctcccaaaagaccaagagtgcgttaatagttgtgcctcatcagaaacaagctatggaacaaatgagagttccctgaatgaaaaaacactcaagggacttacttctatacaaaatgaaaaaaatgtaacaggacttgatcttctttcttctgtggatggtggtacttcagatgaaatccagccgttatatatgggacgatgtagtaaacctatctgtgatctgataagtgacatgggtaacttagttcatgcaaccaatagtgaagaagatattaaaaaattattgccagatgattttaagtctaatgcagattccttgattggattggatttatcttcagtgtcagatactccctgtgtttcttcaacagaccatgatagtgatactgtcagagaacaacagaatgataccagttctgaattacaaaatagagaaatcggaggaatcaaagaattgggtataaaagtagatacaacactttcagattcctataattacagtggaacagaaaatttaaaagataaaaagatctttaatcagttagaatcaattgttgattttaacatgtcatctgctttgactcgacaaagttccaaaatgtttcatgccaaagacaagctacaacacaagagccagccatgtggattactaaaagatgttggcttagtaaaagaggaagtagatgtggcagtcataactgccgcagaatgtttaaaagaagagggcaagacaagtgctttgacctgcagccttccgaaaaatgaagatttatgcttaaatgattcaaattcaagagatgaaaatttcaaattacctgacttttcctttcaggaagataagactgttataaaacaatctgcacaagaagactcaaaaagtttagaccttaaggataatgatgtaatccaagattcctcttcagctttacatgtttccagtaaagatgtgccgtcctcattgtcctgtcttcctgcgtctgggtctatgtgtggatcattaattgaaagtaaagcacggggtgattttttacctcagcatgaacataaagataatatacaagatgcagtgactatacatgaagaaatacagaacagtgttgttctaggtggggaaccattcaaagagaatgatcttttgaaacaggaaaaatgtaaaagcatactccttcagtcattaattgaagggatggaagacagaaagatagatcctgaccagacagtaatcagagctgagtctttggatggtggtgacaccagttctacagttgtagaatctcaagaggggctttctggcactcatgtcccagagtcttctgattgttgtgaaggttttattaatactttttcaagcaatgatatggatgggcaagacttagattactttaatattgatgaaggcgcaaaaagtggcccactaattagtgatgctgaacttgatgcctttctgacagaacagtatcttcagaccactaacataaagtcttttgaagaaaatgtaaatgactctaaatcgcaaatgaatcagatagatatgaaaggcttagatgatggaaacatcaataatatatatttcaatgcagaagcaggagctattggggaaagtcatggtattaatataatttgtgaaacagttgataaacaaaatacaatagaaaatggcctttctttaggagaaaaaagcactattccagttcaacaagggttacctaccagtaagtctgagattacaaatcaattatcagtctctgatattaacagtcaatctgttggaggggccagacctaagcaattgtttagccttccatcaagaacaaggagttcaaaggacctgaataagccagatgttccagatacaatagaaagtgaacccagcacagcagataccgttgttccaatcacttgtgctatagattctacagctgatccacaggttagcttcaactctaattacattgatatagaaagtaattctgaaggtggatctagtttcgtaactgcaaatgaagattctgtacctgaaaacacttgcaaagaaggcttggttttgggccagaaacagcctacttgggttcctgattcagaagctccaaactgtatgaactgccaagtcaaatttacttttaccaaacggcgacaccattgccgagcatgtgggaaagtattttgtggtgtctgttgtaataggaagtgtaaactgcaatatctagaaaaggaagcaagagtatgtgtagtctgctatgaaactattagtaaagctcaggcatttgaaaggatgatgagtccaactggttctaatcttaagtctaatcattctgatgaatgtactactgtccagcctcctcaggagaaccaaacatccagtataccttcaccagcaactttgccagtctcagcacttaaacaaccaggtgttgaaggactatgttccaaagaacagaagagagtatggtttgcagatggtatattgcccaatggtgaagttgcagatacaacaaaattatcatctggaagtaaaagatgttctgaagactttagtcctctctcacctgatgtgcctatgacagtaaacacagtggatcattcccattctactacagtggaaaagccaaacaatgagacaggagatattacaagaaatgagataattcagagtcctatttctcaggttccatcagtggaaaaattgtctatgaacacaggaaatgaggggttacctacttctggttcatttacactagatgatgatgtttttgcagaaactgaagaaccatctagtcctactggtgtcttagttaacagcaatttacctattgctagtatttcagattataggttactgtgtgatattaacaagtatgtctgcaataagattagtcttctacctaatgatgaggacagtttgcccccacttctggttgcatctggagaaaagggatcagtgcctgtagtagaagaacatccatctcatgagcagatcattttgcttcttgaaggtgaaggctttcatcctgttacatttgtcctaaatgctaatctactcgtgaatgtcaaattcatattttattcctcagacaaatattggtacttttcaaccaatggattgcatggcttgggacaggcagaaattattattctattgttatgtttgccaaatgaagatactattcctaaggacatcttcagactatttatcaccatatataaggatgctctaaaaggaaaatacatagaaaacttggacaatattacctttactgagagttttctcagtagcaaggatcacggaggattcctgtttattacacctacttttcagaaacttgatgatctctcattaccaagtaatccttttctttgtggaattcttatccagaagcttgagattccctgggcaaaggtttttcctatgcgtttaatgttgagattgggtgcagaatataaagcatatcctgctcctctaacaagcatcagaggccgaaaacctctttttggagaaataggacacactattatgaacttacttgttgaccttcgaaattaccagtataccttgcataatatagatcaactgttgattcatatggaaatgggaaaaagctgcataaaaataccacggaaaaagtacagtgatgtaatgaaagtactaaattcttccaatgagcatgtcattagcattggagcaagtttcagtacagaagcagattctcatctagtctgtatacagaatgatggaatttatgaaacacaggccaacagtgccactggccatcctagaaaagtgacaggtgcaagttttgtggtattcaatggagctctaaaaacatcttcaggatttcttgctaagtccagcatagttgaagatggcttaatggtacaaataactccagagaccatgaatggcttgcggctagctttacgagaacagaaagactttaaaattacatgtgggaaagttgatgcagtagacctgagagaatacgtggatatctgctgggtagatgctgaagaaaaaggaaacaaaggagttatcagttcagtggatggaatatcattacaaggatttccaagtgaaaaaataaaactggaagcagattttgaaaccgatgagaagattgtaaaatgtaccgaggtgttctactttctaaaggaccaggatttatctattttatcaacttcttatcagtttgcaaaagaaatagccatggcttgtagtgctgcgctgtgccctcacctgaaaactctaaaaagtaatgggatgaataaaattggactcagagtttccattgacactgatatggttgaatttcaggcaggatctgaaggccaacttctgcctcagcattatctaaatgatcttgatagtgctctgatacctgtgatccatggtgggacctccaactctagtttaccattagaaatagaattagtgtttttcattatagaacatcttttttagtgaaagaatgtgccatattacatattgcaacctaatttgttaaaactaactccagcactaaagctgaaatgccacaaacactaaaagtataaatatgtctgatttttgaaacacataagctttgctctttaggcaggaatgatcttttcaaatcattagcacaatatttaaatatctaaaaatttaagagatccatactttctgtagctttacaattaatttaagtactaaaaagacaaggatttcttttaagaaatttatagcatttactgtgttatttaaatgctaagccaaagtatctgcacttaggtatacctctttatgccaataatgattttaatgaaggctcttttcagatgtaaccttatgaaggaaatatctgctttgtgtatatgccagttagaatactggtttctaaagtctgtcaaattgtatttcagtggcacaaaaaccagttttgaggtcttagacttataattctttgaataaaactgataacttatttgtataattggagtggagacctacctccataattagataaactctttttggattataatcagaattttgccttttttcttctcaaattattacatatgtatgtattatatatccacatatatagttttccctgattaaatggatattaaaataattgcgggtgcttcaggactttttgcttctatatttaagtatattgtttttatagcaagaacatattctgaatgttttataaatctttaataatttatatgtaggtaatatttttgtatcacaatgcattatttttttcctcctttccttccaaactataccactgtatttaccacttctaagagtgactgacgacgggccagatgacccttgaagtagtcattatgtagcaataaatgaagcctgaaacaggtttttttacttccactttaatccttagaaatttcttggcaacttcgcatattttcattgacaccggtgtataagtataaatttaaatgaactaattacttttgcatattttaaattctttatatggtagttattttttataacaggatattaacataagttaaatcctatgtatttgaaattgttacagagctttcctctttacttcaaacagcaaaaaagtggggggcatattgtagtcctgtcatttaagttatgtaaaaaatttaatcattattttgatgctttaaacattctcatgtgtaatatatgtttttgtatcaaaaacactcatatatttcaagaaaaagaaattatgttaaatagccctgttttaagaaaaatatttatgaagcatctcaacttgaagatcaagtcaaagttataactcaggatctgaggtctcaagctaggagagactgagaattttaatcagtttgggcatatagtttggactgaatcacatctgtagtacttagccaaagacaatttggaggagaatatcagccttctggaagtagctacttcctgaacaatgtaaagtgtcgcagatattcaataaaatggcaacctgttataatttgtgaaatttattgaaatggtgtaagatgaaaacaattgcatatcaaacccaatttatgttttctaaatatagtgtatgtattctgccatgtaagtaattgaacagtcttaaaataaccaaatggtagagggctgttccatgatgggacagctttggatttgttttcataaaatctctacattcaataaaaattggaattatgtgcctgaagtttggaggcacattttgaagtattctttgtagacatatagtatgtttctgaatgtgtttgttacttatttggtcattggtacttaatttgaaattttaattttttaagagaagaaatagaatggttctttgtactcagtctgcaatgatctatttttggcttatgtcttttaatactactctctttctctgaattttgaaatatgaagtaaaatctagcccatttgttttatgcagctattcaacaaactttgtgtgttcgtatacttgctacatgcagagcactttaccaggtttctaagcaaaaatttctaaaaatgattaattgttctgacagaattaggcgtagttctttatcaacatttatggattccatgccacaagtagtatgcgcttaagtgcagagcatgccaagagaaagagtaggatttggccctgtaggagcaaagattcaattgtgggaaactacttgtttctgaaaattgcatgctaggatatttacatcatgttcctgttgaaaacaattcctgattaaaatacaagaataatcttaaaacatcaaagagattttccagacaataaggaatgccaagtccaaaagtaaagagaataagagaagcaagcatgtacccttactctgacaaccttatgagtgagggggacagaaattaaagttcagggcccatataaggtgatgaacctaacaggagaccctccacacaataggctgagactcccaaatactttcacct

SEQ ID NO: 245121 - DNA, 694 bp, Homo sapiens
cccaggctggagtgcagtggcgcgatcttggctcactggacctccacctcctgagttccagcaattctgcctcagcctcctgagtggccaggattataggcgcctgccaccacacctggctaatttttgtatttttagtagagacgaggtttcaccatgttggccaggctagtctcaaactcttgacctcaggtgatctgcccttttcggcctccccaagtgctgggattacaggcatgagccaccgtgcccagccgcattaaattattttaatgtaatattttatctcttttttttgtctttttaattagttttctagtttaagttgtgtgggtataacatttattgagtacttatatgcatatccacattctgcatttaacaaatgtgtaacataaaaatgagcagtttaaaacaaataattgttgtatttcttgatcagtgacaggtgcaagttttgtggtattcaatggagctctaaaaacatcttcaggatttcttgctaagtccagcatagttgaaggtatgaatttcatttttaatggtgttttaatgtagagttatttttcctaacctttgaaaaatatatttgatatttacacagaacatatgtaagttataaagcacgtaccacaacttacatgaaatcatcaccgcacaagaagtagaagactatctctctcttctgcgtctc

SEQ ID NO: 245122 - DNA, 735 bp, Homo sapiens
aaaaattatctctcactttcccctaagaactgattgagtgatatttatacataatgtttgtttgtaaaatgagagttgaaggtaataaattcaataatttggggttttttttgttgatagtaaccagttttcctttcttatgtatagcatatcctgctcctctaacaagcatcagaggccgaaaacctctttttggagaaataggacacactattatgaacttacttgttgtgagtaattgaactattttattaggtatttttatactgttactttaaaactgtatttagcaaagtttatacatttatattttcctactttaatttgccatattggtataatgaccattcatttacaataaatcctaattattttaacattagtgctcagtttttgacgaattgctttttagaacgtactatctcctcatgtacgtgtacctgattctaagtgcgtttgattcattctcctgcagttcttggatatttaggtaatgtaagaactctatacagacctcttaaagttgttgaaacttttgtaaatgtattagtaaagtcagtcagtcttgtgattttgagcaaattatggcttagttttctcatttataataggaagtgttggattagatgatatctaaagttcccttccacctatactttttgtaattttgtgtttccctgttaccatagaaaaatgtttcagtggactcacttttatttatccatgcctagtttg

SEQ ID NO: 245123 - DNA, 672 bp, Homo sapiens
gttgaaatttacatttggtagaaacatatgctgtttgtcaagagttcatgagctagactttacaaatagccgtaattaccatgggtatgtttcctagctagcacgcactgtcaatctgtattaatgaaaattctcaacaggctagtaaatattgagttcataaatggttcttatttaatactgactttgtacagtctaaaaagaaaaaggctttattgaaatagtctttatgggtagttttttccaggtggttactcttgtggaatatagctaacgcactgcttcctaaccactcccctccccttcttcctgccttgtccctcctccctgcctacccaagggtttttggctatcataagaaggggagagacttggattgaactaagcttgctcactgtgtgatatggtatgggatcttgaagttcttcttgcctcattttttccaatcttaatattaagtcattaatacctgcctgagcatgcagtaaaactaaaaccttatgcttcttaattccttatgctcctgaatttgaagaatcaaaatggtactgtttcttgggaaatttgactttaagagaatttctgaacgcattttggtttttatttattcttattaaaaagatatgtttggctatagtgatctcatttcatagttgaacagagaatatgaac

SEQ ID NO: 245124 - DNA, 7258 bp, Homo sapiens
tgagccgggatctggcactcccaggactcccggccggggtagctcttcactcctcagcgcgacgtcgtgtcgagttcccaaaaagctccgcaggggctgtagggaggcatacaagaattaaattctgaataagtctgcaggtaggatggacagttattttaaagcagctgtcagtgacttggacaaactccttgatgattttgaacagaacccagatgaacaagattatctccaagatgtacaaaatgcatatgattctaaccactgctcagtttcttcagagttggcttcctcacagcgaacttcattgctcccaaaagaccaagagtgcgttaatagttgtgcctcatcagaaacaagctatggaacaaatgagagttccctgaatgaaaaaacactcaagggacttacttctatacaaaatgaaaaaaatgtaacaggacttgatcttctttcttctgtggatggtggtacttcagatgaaatccagccgttatatatgggacgatgtagtaaacctatctgtgatctgataagtgacatgggtaacttagttcatgcaaccaatagtgaagaagatattaaaaaattattgccagatgattttaagtctaatgcagattccttgattggattggatttatcttcagtgtcagatactccctgtgtttcttcaacagaccatgatagtgatactgtcagagaacaacagaatgataccagttctgaattacaaaatagagaaatcggaggaatcaaagaattgggtataaaagtagatacaacactttcagattcctataattacagtggaacagaaaatttaaaagataaaaagatctttaatcagttagaatcaattgttgattttaacatgtcatctgctttgactcgacaaagttccaaaatgtttcatgccaaagacaagctacaacacaagagccagccatgtggattactaaaagatgttggcttagtaaaagaggaagtagatgtggcagtcataactgccgcagaatgtttaaaagaagagggcaagacaagtgctttgacctgcagccttccgaaaaatgaagatttatgcttaaatgattcaaattcaagagatgaaaatttcaaattacctgacttttcctttcaggaagataagactgttataaaacaatctgcacaagaagactcaaaaagtttagaccttaaggataatgatgtaatccaagattcctcttcagctttacatgtttccagtaaagatgtgccgtcctcattgtcctgtcttcctgcgtctgggtctatgtgtggatcattaattgaaagtaaagcacggggtgattttttacctcagcatgaacataaagataatatacaagatgcagtgactatacatgaagaaatacagaacagtgttgttctaggtggggaaccattcaaagagaatgatcttttgaaacaggaaaaatgtaaaagcatactccttcagtcattaattgaagggatggaagacagaaagatagatcctgaccagacagtaatcagagctgagtctttggatggtggtgacaccagttctacagttgtagaatctcaagaggggctttctggcactcatgtcccagagtcttctgattgttgtgaaggttttattaatactttttcaagcaatgatatggatgggcaagacttagattactttaatattgatgaaggcgcaaaaagtggcccactaattagtgatgctgaacttgatgcctttctgacagaacagtatcttcagaccactaacataaagtcttttgaagaaaatgtaaatgactctaaatcgcaaatgaatcagatagatatgaaaggcttagatgatggaaacatcaataatatatatttcaatgcagaagcaggagctattggggaaagtcatggtattaatataatttgtgaaacagttgataaacaaaatacaatagaaaatggcctttctttaggagaaaaaagcactattccagttcaacaagggttacctaccagtaagtctgagattacaaatcaattatcagtctctgatattaacagtcaatctgttggaggggccagacctaagcaattgtttagccttccatcaagaacaaggagttcaaaggacctgaataagccagatgttccagatacaatagaaagtgaacccagcacagcagataccgttgttccaatcacttgtgctatagattctacagctgatccacaggttagcttcaactctaattacattgatatagaaagtaattctgaaggtggatctagtttcgtaactgcaaatgaagattctgtacctgaaaacacttgcaaagaaggcttggttttgggccagaaacagcctacttgggttcctgattcagaagctccaaactgtatgaactgccaagtcaaatttacttttaccaaacggcgacaccattgccgagcatgtgggaaagtattttgtggtgtctgttgtaataggaagtgtaaactgcaatatctagaaaaggaagcaagagtatgtgtagtctgctatgaaactattagtaaagctcaggcatttgaaaggatgatgagtccaactggttctaatcttaagtctaatcattctgatgaatgtactactgtccagcctcctcaggagaaccaaacatccagtataccttcaccagcaactttgccagtctcagcacttaaacaaccaggtgttgaaggactatgttccaaagaacagaagagagtatggtttgcagatggtatattgcccaatggtgaagttgcagatacaacaaaattatcatctggaagtaaaagatgttctgaagactttagtcctctctcacctgatgtgcctatgacagtaaacacagtggatcattcccattctactacagtggaaaagccaaacaatgagacaggagatattacaagaaatgagataattcagagtcctatttctcaggttccatcagtggaaaaattgtctatgaacacaggaaatgaggggttacctacttctggttcatttacactagatgatgatgtttttgcagaaactgaagaaccatctagtcctactggtgtcttagttaacagcaatttacctattgctagtatttcagattataggttactgtgtgatattaacaagtatgtctgcaataagattagtcttctacctaatgatgaggacagtttgcccccacttctggttgcatctggagaaaagggatcagtgcctgtagtagaagaacatccatctcatgagcagatcattttgcttcttgaaggtgaaggctttcatcctgttacatttgtcctaaatgctaatctactcgtgaatgtcaaattcatattttattcctcagacaaatattggtacttttcaaccaatggattgcatggcttgggacaggcagaaattattattctattgttatgtttgccaaatgaagatactattcctaaggacatcttcagactatttatcaccatatataaggatgctctaaaaggaaaatacatagaaaacttggacaatattacctttactgagagttttctcagtagcaaggatcacggaggattcctgtttattacacctacttttcagaaacttgatgatctctcattaccaagtaatccttttctttgtggaattcttatccagaagcttgagattccctgggcaaaggtttttcctatgcgtttaatgttgagattgggtgcagaatataaagcatatcctgctcctctaacaagcatcagaggccgaaaacctctttttggagaaataggacacactattatgaacttacttgttgaccttcgaaattaccagtataccttgcataatatagatcaactgttgattcatatggaaatgggaaaaagctgcataaaaataccacggaaaaagtacagtgatgtaatgaaagtactaaattcttccaatgagcatgtcattagcattggagcaagtttcagtacagaagcagattctcatctagtctgtatacagaatgatggaatttatgaaacacaggccaacagtgccactggccatcctagaaaagtgacaggtgcaagttttgtggtattcaatggagctctaaaaacatcttcaggatttcttgctaagtccagcatagttgaagatggcttaatggtacaaataactccagagaccatgaatggcttgcggctagctttacgagaacagaaagactttaaaattacatgtgggaaagttgatgcagtagacctgagagaatacgtggatatctgctgggtagatgctgaagaaaaaggaaacaaaggagttatcagttcagtggatggaatatcattacaaggatttccaagtgaaaaaataaaactggaagcagattttgaaaccgatgagaagattgtaaaatgtaccgaggtgttctactttctaaaggaccaggatttatctattttatcaacttcttatcagtttgcaaaagaaatagccatggcttgtagtgctgcgctgtgccctcacctgaaaactctaaaaagtaatgggatgaataaaattggactcagagtttccattgacactgatatggttgaatttcaggcaggatctgaaggccaacttctgcctcagcattatctaaatgatcttgatagtgctctgatacctgtgatccatggtgggacctccaactctagtttaccattagaaatagaattagtgtttttcattatagaacatcttttttagtgaaagaatgtgccatattacatattgcaacctaatttgttaaaactaactccagcactaaagctgaaatgccacaaacactaaaagtataaatatgtctgatttttgaaacacataagctttgctctttaggcaggaatgatcttttcaaatcattagcacaatatttaaatatctaaaaatttaagagatccatactttctgtagctttacaattaatttaagtactaaaaagacaaggatttcttttaagaaatttatagcatttactgtgttatttaaatgctaagccaaagtatctgcacttaggtatacctctttatgccaataatgattttaatgaaggctcttttcagatgtaaccttatgaaggaaatatctgctttgtgtatatgccagttagaatactggtttctaaagtctgtcaaattgtatttcagtggcacaaaaaccagttttgaggtcttagacttataattctttgaataaaactgataacttatttgtataattggagtggagacctacctccataattagataaactctttttggattataatcagaattttgccttttttcttctcaaattattacatatgtatgtattatatatccacatatatagttttccctgattaaatggatattaaaataattgcgggtgcttcaggactttttgcttctatatttaagtatattgtttttatagcaagaacatattctgaatgttttataaatctttaataatttatatgtaggtaatatttttgtatcacaatgcattatttttttcctcctttccttccaaactataccactgtatttaccacttctaagagtgactgacgacgggccagatgacccttgaagtagtcattatgtagcaataaatgaagcctgaaacaggtttttttacttccactttaatccttagaaatttcttggcaacttcgcatattttcattgacaccggtgtataagtataaatttaaatgaactaattacttttgcatattttaaattctttatatggtagttattttttataacaggatattaacataagttaaatcctatgtatttgaaattgttacagagctttcctctttacttcaaacagcaaaaaagtggggggcatattgtagtcctgtcatttaagttatgtaaaaaatttaatcattattttgatgctttaaacattctcatgtgtaatatatgtttttgtatcaaaaacactcatatatttcaagaaaaagaaattatgttaaatagccctgttttaagaaaaatatttatgaagcatctcaacttgaagatcaagtcaaagttataactcaggatctgaggtctcaagctaggagagactgagaattttaatcagtttgggcatatagtttggactgaatcacatctgtagtacttagccaaagacaatttggaggagaatatcagccttctggaagtagctacttcctgaacaatgtaaagtgtcgcagatattcaataaaatggcaacctgttataatttgtgaaatttattgaaatggtgtaagatgaaaacaattgcatatcaaacccaatttatgttttctaaatatagtgtatgtattctgccatgtaagtaattgaacagtcttaaaataaccaaatggtagagggctgttccatgatgggacagctttggatttgttttcataaaatctctacattcaataaaaattggaattatgtgcctgaagtttggaggcacattttgaagtattctttgtagacatatagtatgtttctgaatgtgtttgttacttatttggtcattggtacttaatttgaaattttaattttttaagagaagaaatagaatggttctttgtactcagtctgcaatgatctatttttggcttatgtcttttaatactactctctttctctgaattttgaaatatgaagtaaaatctagcccatttgttttatgcagctattcaacaaactttgtgtgttcgtatacttgctacatgcagagcactttaccaggtttctaagcaaaaatttctaaaaatgattaattgttctgacagaattaggcgtagttctttatcaacatttatggattccatgccacaagtagtatgcgcttaagtgcagagcatgccaagagaaagagtaggatttggccctgtaggagcaaagattcaattgtgggaaactacttgtttctgaaaattgcatgctaggatatttacatcatgttcctgttgaaaacaattcctgattaaaatacaagaataatcttaaaacatcaaagagattttccagacaataaggaatgccaagtccaaaagtaaagagaataagagaagcaagcatgtacccttactctgacaaccttatgagtgagggggacagaaattaaagttcagggcccatataaggtgatgaacctaacaggagaccctccacacaataggctgagactcccaaatactttcacct

SEQ ID NO: 245125 - DNA, 7385 bp, Homo sapiens
tgagccgggatctggcactcccaggactcccggccggggtagctcttcactcctcagcgcgacgtcgtgtcgagttcccaaaaagctccgcaggggctgtagggaggcatacaagaattaaattctgaataagtctgcaggtaggatggacagttattttaaagcagctgtcagtgacttggacaaactccttgatgattttgaacagaacccagatgaacaagattatctccaagatgtacaaaatgcatatgattctaaccactgctcagtttcttcagagttggcttcctcacagcgaacttcattgctcccaaaagaccaagagtgcgttaatagttgtgcctcatcagaaacaagctatggaacaaatgagagttccctgaatgaaaaaacactcaagggacttacttctatacaaaatgaaaaaaatgtaacaggacttgatcttctttcttctgtggatggtggtacttcagatgaaatccagccgttatatatgggacgatgtagtaaacctatctgtgatctgataagtgacatgggtaacttagttcatgcaaccaatagtgaagaagatattaaaaaattattgccagatgattttaagtctaatgcagattccttgattggattggatttatcttcagtgtcagatactccctgtgtttcttcaacagaccatgatagtgatactgtcagagaacaacagaatgataccagttctgaattacaaaatagagaaatcggaggaatcaaagaattgggtataaaagtagatacaacactttcagattcctataattacagtggaacagaaaatttaaaagataaaaagatctttaatcagttagaatcaattgttgattttaacatgtcatctgctttgactcgacaaagttccaaaatgtttcatgccaaagacaagctacaacacaagagccagccatgtggattactaaaagatgttggcttagtaaaagaggaagtagatgtggcagtcataactgccgcagaatgtttaaaagaagagggcaagacaagtgctttgacctgcagccttccgaaaaatgaagatttatgcttaaatgattcaaattcaagagatgaaaatttcaaattacctgacttttcctttcaggaagataagactgttataaaacaatctgcacaagaagactcaaaaagtttagaccttaaggataatgatgtaatccaagattcctcttcagctttacatgtttccagtaaagatgtgccgtcctcattgtcctgtcttcctgcgtctgggtctatgtgtggatcattaattgaaagtaaagcacggggtgattttttacctcagcatgaacataaagataatatacaagatgcagtgactatacatgaagaaatacagaacagtgttgttctaggtggggaaccattcaaagagaatgatcttttgaaacaggaaaaatgtaaaagcatactccttcagtcattaattgaagggatggaagacagaaagatagatcctgaccagacagtaatcagagctgagtctttggatggtggtgacaccagttctacagttgtagaatctcaagaggggctttctggcactcatgtcccagagtcttctgattgttgtgaaggttttattaatactttttcaagcaatgatatggatgggcaagacttagattactttaatattgatgaaggcgcaaaaagtggcccactaattagtgatgctgaacttgatgcctttctgacagaacagtatcttcagaccactaacataaagtcttttgaagaaaatgtaaatgactctaaatcgcaaatgaatcagatagatatgaaaggcttagatgatggaaacatcaataatatatatttcaatgcagaagcaggagctattggggaaagtcatggtattaatataatttgtgaaacagttgataaacaaaatacaatagaaaatggcctttctttaggagaaaaaagcactattccagttcaacaagggttacctaccagtaagtctgagattacaaatcaattatcagtctctgatattaacagtcaatctgttggaggggccagacctaagcaattgtttagccttccatcaagaacaaggagttcaaaggacctgaataagccagatgttccagatacaatagaaagtgaacccagcacagcagataccgttgttccaatcacttgtgctatagattctacagctgatccacaggttagcttcaactctaattacattgatatagaaagtaattctgaaggtggatctagtttcgtaactgcaaatgaagattctgtacctgaaaacacttgcaaagaaggcttggttttgggccagaaacagcctacttgggttcctgattcagaagctccaaactgtatgaactgccaagtcaaatttacttttaccaaacggcgacaccattgccgagcatgtgggaaagtattttgtggtgtctgttgtaataggaagtgtaaactgcaatatctagaaaaggaagcaagagtatgtgtagtctgctatgaaactattagtaaagctcaggcatttgaaaggatgatgagtccaactggttctaatcttaagtctaatcattctgatgaatgtactactgtccagcctcctcaggagaaccaaacatccagtataccttcaccagcaactttgccagtctcagcacttaaacaaccaggtgttgaagtgcctgctattggaaaaagctgaccaaagccagtaacaagagagtctgggaattgcactttccagacttccagcctggcatccaagagcccactgtagagggtgagcttgggtttgagaggcaataggactatgttccaaagaacagaagagagtatggtttgcagatggtatattgcccaatggtgaagttgcagatacaacaaaattatcatctggaagtaaaagatgttctgaagactttagtcctctctcacctgatgtgcctatgacagtaaacacagtggatcattcccattctactacagtggaaaagccaaacaatgagacaggagatattacaagaaatgagataattcagagtcctatttctcaggttccatcagtggaaaaattgtctatgaacacaggaaatgaggggttacctacttctggttcatttacactagatgatgatgtttttgcagaaactgaagaaccatctagtcctactggtgtcttagttaacagcaatttacctattgctagtatttcagattataggttactgtgtgatattaacaagtatgtctgcaataagattagtcttctacctaatgatgaggacagtttgcccccacttctggttgcatctggagaaaagggatcagtgcctgtagtagaagaacatccatctcatgagcagatcattttgcttcttgaaggtgaaggctttcatcctgttacatttgtcctaaatgctaatctactcgtgaatgtcaaattcatattttattcctcagacaaatattggtacttttcaaccaatggattgcatggcttgggacaggcagaaattattattctattgttatgtttgccaaatgaagatactattcctaaggacatcttcagactatttatcaccatatataaggatgctctaaaaggaaaatacatagaaaacttggacaatattacctttactgagagttttctcagtagcaaggatcacggaggattcctgtttattacacctacttttcagaaacttgatgatctctcattaccaagtaatccttttctttgtggaattcttatccagaagcttgagattccctgggcaaaggtttttcctatgcgtttaatgttgagattgggtgcagaatataaagcatatcctgctcctctaacaagcatcagaggccgaaaacctctttttggagaaataggacacactattatgaacttacttgttgaccttcgaaattaccagtataccttgcataatatagatcaactgttgattcatatggaaatgggaaaaagctgcataaaaataccacggaaaaagtacagtgatgtaatgaaagtactaaattcttccaatgagcatgtcattagcattggagcaagtttcagtacagaagcagattctcatctagtctgtatacagaatgatggaatttatgaaacacaggccaacagtgccactggccatcctagaaaagtgacaggtgcaagttttgtggtattcaatggagctctaaaaacatcttcaggatttcttgctaagtccagcatagttgaagatggcttaatggtacaaataactccagagaccatgaatggcttgcggctagctttacgagaacagaaagactttaaaattacatgtgggaaagttgatgcagtagacctgagagaatacgtggatatctgctgggtagatgctgaagaaaaaggaaacaaaggagttatcagttcagtggatggaatatcattacaaggatttccaagtgaaaaaataaaactggaagcagattttgaaaccgatgagaagattgtaaaatgtaccgaggtgttctactttctaaaggaccaggatttatctattttatcaacttcttatcagtttgcaaaagaaatagccatggcttgtagtgctgcgctgtgccctcacctgaaaactctaaaaagtaatgggatgaataaaattggactcagagtttccattgacactgatatggttgaatttcaggcaggatctgaaggccaacttctgcctcagcattatctaaatgatcttgatagtgctctgatacctgtgatccatggtgggacctccaactctagtttaccattagaaatagaattagtgtttttcattatagaacatcttttttagtgaaagaatgtgccatattacatattgcaacctaatttgttaaaactaactccagcactaaagctgaaatgccacaaacactaaaagtataaatatgtctgatttttgaaacacataagctttgctctttaggcaggaatgatcttttcaaatcattagcacaatatttaaatatctaaaaatttaagagatccatactttctgtagctttacaattaatttaagtactaaaaagacaaggatttcttttaagaaatttatagcatttactgtgttatttaaatgctaagccaaagtatctgcacttaggtatacctctttatgccaataatgattttaatgaaggctcttttcagatgtaaccttatgaaggaaatatctgctttgtgtatatgccagttagaatactggtttctaaagtctgtcaaattgtatttcagtggcacaaaaaccagttttgaggtcttagacttataattctttgaataaaactgataacttatttgtataattggagtggagacctacctccataattagataaactctttttggattataatcagaattttgccttttttcttctcaaattattacatatgtatgtattatatatccacatatatagttttccctgattaaatggatattaaaataattgcgggtgcttcaggactttttgcttctatatttaagtatattgtttttatagcaagaacatattctgaatgttttataaatctttaataatttatatgtaggtaatatttttgtatcacaatgcattatttttttcctcctttccttccaaactataccactgtatttaccacttctaagagtgactgacgacgggccagatgacccttgaagtagtcattatgtagcaataaatgaagcctgaaacaggtttttttacttccactttaatccttagaaatttcttggcaacttcgcatattttcattgacaccggtgtataagtataaatttaaatgaactaattacttttgcatattttaaattctttatatggtagttattttttataacaggatattaacataagttaaatcctatgtatttgaaattgttacagagctttcctctttacttcaaacagcaaaaaagtggggggcatattgtagtcctgtcatttaagttatgtaaaaaatttaatcattattttgatgctttaaacattctcatgtgtaatatatgtttttgtatcaaaaacactcatatatttcaagaaaaagaaattatgttaaatagccctgttttaagaaaaatatttatgaagcatctcaacttgaagatcaagtcaaagttataactcaggatctgaggtctcaagctaggagagactgagaattttaatcagtttgggcatatagtttggactgaatcacatctgtagtacttagccaaagacaatttggaggagaatatcagccttctggaagtagctacttcctgaacaatgtaaagtgtcgcagatattcaataaaatggcaacctgttataatttgtgaaatttattgaaatggtgtaagatgaaaacaattgcatatcaaacccaatttatgttttctaaatatagtgtatgtattctgccatgtaagtaattgaacagtcttaaaataaccaaatggtagagggctgttccatgatgggacagctttggatttgttttcataaaatctctacattcaataaaaattggaattatgtgcctgaagtttggaggcacattttgaagtattctttgtagacatatagtatgtttctgaatgtgtttgttacttatttggtcattggtacttaatttgaaattttaattttttaagagaagaaatagaatggttctttgtactcagtctgcaatgatctatttttggcttatgtcttttaatactactctctttctctgaattttgaaatatgaagtaaaatctagcccatttgttttatgcagctattcaacaaactttgtgtgttcgtatacttgctacatgcagagcactttaccaggtttctaagcaaaaatttctaaaaatgattaattgttctgacagaattaggcgtagttctttatcaacatttatggattccatgccacaagtagtatgcgcttaagtgcagagcatgccaagagaaagagtaggatttggccctgtaggagcaaagattcaattgtgggaaactacttgtttctgaaaattgcatgctaggatatttacatcatgttcctgttgaaaacaattcctgattaaaatacaagaataatcttaaaacatcaaagagattttccagacaataaggaatgccaagtccaaaagtaaagagaataagagaagcaagcatgtacccttactctgacaaccttatgagtgagggggacagaaattaaagttcagggcccatataaggtgatgaacctaacaggagaccctccacacaataggctgagactcccaaatactttcacct

SEQ ID NO: 245126 - DNA, 6879 bp, Homo sapiens
tgagccgggatctggcactcccaggactcccggccggggtagctcttcactcctcagcgcgacgtcgtgtcgagttcccaaaaagctccgcaggggctgtagggaggcatacaagaattaaattctgaataagtctgcaggtaggatggacagttattttaaagcagctgtcagtgacttggacaaactccttgatgattttgaacagaacccagatgaacaagattatctccaagatgtacaaaatgcatatgattctaaccactgctcagtttcttcagagttggcttcctcacagcgaacttcattgctcccaaaagaccaagagtgcgttaatagttgtgcctcatcagaaacaagctatggaacaaatgagagttccctgaatgaaaaaacactcaagggacttacttctatacaaaatgaaaaaaatgtaacaggacttgatcttctttcttctgtggatggtggtacttcagatgaaatccagccgttatatatgggacgatgtagtaaacctatctgtgatctgataagtgacatgggtaacttagttcatgcaaccaatagtgaagaagatattaaaaaattattgccagatgattttaagtctaatgcagattccttgattggattggatttatcttcagtgtcagatactccctgtgtttcttcaacagaccatgatagtgatactgtcagagaacaacagaatgataccagttctgaattacaaaatagagaaatcggaggaatcaaagaattgggtataaaagtagatacaacactttcagattcctataattacagtggaacagaaaatttaaaagataaaaagatctttaatcagttagaatcaattgttgattttaacatgtcatctgctttgactcgacaaagttccaaaatgtttcatgccaaagacaagctacaacacaagagccagccatgtggattactaaaagatgttggcttagtaaaagaggaagtagatgtggcagtcataactgccgcagaatgtttaaaagaagagggcaagacaagtgctttgacctgcagccttccgaaaaatgaagatttatgcttaaatgattcaaattcaagagatgaaaatttcaaattacctgacttttcctttcaggaagataagactgttataaaacaatctgcacaagaagactcaaaaagtttagaccttaaggataatgatgtaatccaagattcctcttcagctttacatgtttccagtaaagatgtgccgtcctcattgtcctgtcttcctgcgtctgggtctatgtgtggatcattaattgaaagtaaagcacggggtgattttttacctcagcatgaacataaagataatatacaagatgcagtgactatacatgaagaaatacagaacagtgttgttctaggtggggaaccattcaaagagaatgatcttttgaaacaggaaaaatgtaaaagcatactccttcagtcattaattgaagggatggaagacagaaagatagatcctgaccagacagtaatcagagctgagtctttggatggtggtgacaccagttctacagttgtagaatctcaagaggggctttctggcactcatgtcccagagtcttctgattgttgtgaaggttttattaatactttttcaagcaatgatatggatgggcaagacttagattactttaatattgatgaaggcgcaaaaagtggcccactaattagtgatgctgaacttgatgcctttctgacagaacagtatcttcagaccactaacataaagtcttttgaagaaaatgtaaatgactctaaatcgcaaatgaatcagatagatatgaaaggcttagatgatggaaacatcaataatatatatttcaatgcagaagcaggagctattggggaaagtcatggtattaatataatttgtgaaacagttgataaacaaaatacaatagaaaatggcctttctttaggagaaaaaagcactattccagttcaacaagggttacctaccagtaagtctgagattacaaatcaattatcagtctctgatattaacagtcaatctgttggaggggccagacctaagcaattgtttagccttccatcaagaacaaggagttcaaaggacctgaataagccagatgttccagatacaatagaaagtgaacccagcacagcagataccgttgttccaatcacttgtgctatagattctacagctgatccacaggttagcttcaactctaattacattgatatagaaagtaattctgaaggtggatctagtttcgtaactgcaaatgaagattctgtacctgaaaacacttgcaaagaaggcttggttttgggccagaaacagcctacttgggttcctgattcagaagctccaaactgtatgaactgccaagtcaaatttacttttaccaaacggcgacaccattgccgagcatgtgggaaagtattttgtggtgtctgttgtaataggaagtgtaaactgcaatatctagaaaaggaagcaagagtatgtgtagtctgctatgaaactattagtaaagctcaggcatttgaaaggatgatgagtccaactggttctaatcttaagtctaatcattctgatgaatgtactactgtccagcctcctcaggagaaccaaacatccagtataccttcaccagcaactttgccagtctcagcacttaaacaaccaggtgttgaaggactatgttccaaagaacagaagagagtatggtttgcagatggtatattgcccaatggtgaagttgcagatacaacaaaattatcatctggaagtaaaagatgttctgaagactttagtcctctctcacctgatgtgcctatgtgcctgtagtagaagaacatccatctcatgagcagatcattttgcttcttgaaggtgaaggctttcatcctgttacatttgtcctaaatgctaatctactcgtgaatgtcaaattcatattttattcctcagacaaatattggtacttttcaaccaatggattgcatggcttgggacaggcagaaattattattctattgttatgtttgccaaatgaagatactattcctaaggacatcttcagactatttatcaccatatataaggatgctctaaaaggaaaatacatagaaaacttggacaatattacctttactgagagttttctcagtagcaaggatcacggaggattcctgtttattacacctacttttcagaaacttgatgatctctcattaccaagtaatccttttctttgtggaattcttatccagaagcttgagattccctgggcaaaggtttttcctatgcgtttaatgttgagattgggtgcagaatataaagcatatcctgctcctctaacaagcatcagaggccgaaaacctctttttggagaaataggacacactattatgaacttacttgttgaccttcgaaattaccagtataccttgcataatatagatcaactgttgattcatatggaaatgggaaaaagctgcataaaaataccacggaaaaagtacagtgatgtaatgaaagtactaaattcttccaatgagcatgtcattagcattggagcaagtttcagtacagaagcagattctcatctagtctgtatacagaatgatggaatttatgaaacacaggccaacagtgccactggccatcctagaaaagtgacaggtgcaagttttgtggtattcaatggagctctaaaaacatcttcaggatttcttgctaagtccagcatagttgaagatggcttaatggtacaaataactccagagaccatgaatggcttgcggctagctttacgagaacagaaagactttaaaattacatgtgggaaagttgatgcagtagacctgagagaatacgtggatatctgctgggtagatgctgaagaaaaaggaaacaaaggagttatcagttcagtggatggaatatcattacaaggatttccaagtgaaaaaataaaactggaagcagattttgaaaccgatgagaagattgtaaaatgtaccgaggtgttctactttctaaaggaccaggatttatctattttatcaacttcttatcagtttgcaaaagaaatagccatggcttgtagtgctgcgctgtgccctcacctgaaaactctaaaaagtaatgggatgaataaaattggactcagagtttccattgacactgatatggttgaatttcaggcaggatctgaaggccaacttctgcctcagcattatctaaatgatcttgatagtgctctgatacctgtgatccatggtgggacctccaactctagtttaccattagaaatagaattagtgtttttcattatagaacatcttttttagtgaaagaatgtgccatattacatattgcaacctaatttgttaaaactaactccagcactaaagctgaaatgccacaaacactaaaagtataaatatgtctgatttttgaaacacataagctttgctctttaggcaggaatgatcttttcaaatcattagcacaatatttaaatatctaaaaatttaagagatccatactttctgtagctttacaattaatttaagtactaaaaagacaaggatttcttttaagaaatttatagcatttactgtgttatttaaatgctaagccaaagtatctgcacttaggtatacctctttatgccaataatgattttaatgaaggctcttttcagatgtaaccttatgaaggaaatatctgctttgtgtatatgccagttagaatactggtttctaaagtctgtcaaattgtatttcagtggcacaaaaaccagttttgaggtcttagacttataattctttgaataaaactgataacttatttgtataattggagtggagacctacctccataattagataaactctttttggattataatcagaattttgccttttttcttctcaaattattacatatgtatgtattatatatccacatatatagttttccctgattaaatggatattaaaataattgcgggtgcttcaggactttttgcttctatatttaagtatattgtttttatagcaagaacatattctgaatgttttataaatctttaataatttatatgtaggtaatatttttgtatcacaatgcattatttttttcctcctttccttccaaactataccactgtatttaccacttctaagagtgactgacgacgggccagatgacccttgaagtagtcattatgtagcaataaatgaagcctgaaacaggtttttttacttccactttaatccttagaaatttcttggcaacttcgcatattttcattgacaccggtgtataagtataaatttaaatgaactaattacttttgcatattttaaattctttatatggtagttattttttataacaggatattaacataagttaaatcctatgtatttgaaattgttacagagctttcctctttacttcaaacagcaaaaaagtggggggcatattgtagtcctgtcatttaagttatgtaaaaaatttaatcattattttgatgctttaaacattctcatgtgtaatatatgtttttgtatcaaaaacactcatatatttcaagaaaaagaaattatgttaaatagccctgttttaagaaaaatatttatgaagcatctcaacttgaagatcaagtcaaagttataactcaggatctgaggtctcaagctaggagagactgagaattttaatcagtttgggcatatagtttggactgaatcacatctgtagtacttagccaaagacaatttggaggagaatatcagccttctggaagtagctacttcctgaacaatgtaaagtgtcgcagatattcaataaaatggcaacctgttataatttgtgaaatttattgaaatggtgtaagatgaaaacaattgcatatcaaacccaatttatgttttctaaatatagtgtatgtattctgccatgtaagtaattgaacagtcttaaaataaccaaatggtagagggctgttccatgatgggacagctttggatttgttttcataaaatctctacattcaataaaaattggaattatgtgcctgaagtttggaggcacattttgaagtattctttgtagacatatagtatgtttctgaatgtgtttgttacttatttggtcattggtacttaatttgaaattttaattttttaagagaagaaatagaatggttctttgtactcagtctgcaatgatctatttttggcttatgtcttttaatactactctctttctctgaattttgaaatatgaagtaaaatctagcccatttgttttatgcagctattcaacaaactttgtgtgttcgtatacttgctacatgcagagcactttaccaggtttctaagcaaaaatttctaaaaatgattaattgttctgacagaattaggcgtagttctttatcaacatttatggattccatgccacaagtagtatgcgcttaagtgcagagcatgccaagagaaagagtaggatttggccctgtaggagcaaagattcaattgtgggaaactacttgtttctgaaaattgcatgctaggatatttacatcatgttcctgttgaaaacaattcctgattaaaatacaagaataatcttaaaacatcaaagagattttccagacaataaggaatgccaagtccaaaagtaaagagaataagagaagcaagcatgtacccttactctgacaaccttatgagtgagggggacagaaattaaagttcagggcccatataaggtgatgaacctaacaggagaccctccacacaataggctgagactcccaaatactttcacct

SEQ ID NO: 245127 - DNA, 6292 bp, Homo sapiens
tgagccgggatctggcactcccaggactcccggccggggtagctcttcactcctcagcgcgacgtcgtgtcgagttcccaaaaagctccgcaggggctgtagggaggcatacaagaattaaattctgaataagtctgcaggtaggatggacagttattttaaagcagctgtcagtgacttggacaaactccttgatgattttgaacagaacccagatgaacaagattatctccaagatgtacaaaatgcatatgattctaaccactgctcagtttcttcagagttggcttcctcacagcgaacttcattgctcccaaaagaccaagagtgcgttaatagttgtgcctcatcagaaacaagctatggaacaaatgagagttccctgaatgaaaaaacactcaagggacttacttctatacaaaatgaaaaaaatgtaacaggacttgatcttctttcttctgtggatggtggtacttcagatgaaatccagccgttatatatgggacgatgtagtaaacctatctgtgatctgataagtgacatgggtaacttagttcatgcaaccaatagtgaagaagatattaaaaaattattgccagatgattttaagtctaatgcagattccttgattggattggatttatcttcagtgtcagatactccctgtgtttcttcaacagaccatgatagtgatactgtcagagaacaacagaatgataccagttctgaattacaaaatagagaaatcggaggaatcaaagaattgggtataaaagtagatacaacactttcagattcctataattacagtggaacagaaaatttaaaagataaaaagatctttaatcagttagaatcaattgttgattttaacatgtcatctgctttgactcgacaaagttccaaaatgtttcatgccaaagacaagctacaacacaagagccagccatgtggattactaaaagatgttggcttagtaaaagaggaagtagatgtggcagtcataactgccgcagaatgtttaaaagaagagggcaagacaagtgctttgacctgcagccttccgaaaaatgaagatttatgcttaaatgattcaaattcaagagatgaaaatttcaaattacctgacttttcctttcaggaagataagactgttataaaacaatctgcacaagaagactcaaaaagtttagaccttaaggataatgatgtaatccaagattcctcttcagctttacatgtttccagtaaagatgtgccgtcctcattgtcctgtcttcctgcgtctgggtctatgtgtggatcattaattgaaagtaaagcacggggtgattttttacctcagcatgaacataaagataatatacaagatgcagtgactatacatgaagaaatacagaacagtgttgttctaggtggggaaccattcaaagagaatgatcttttgaaacaggaaaaatgtaaaagcatactccttcagtcattaattgaagggatggaagacagaaagatagatcctgaccagacagtaatcagagctgagtctttggatggtggtgacaccagttctacagttgtagaatctcaagaggggctttctggcactcatgtcccagagtcttctgattgttgtgaaggttttattaatactttttcaagcaatgatatggatgggcaagacttagattactttaatattgatgaaggcgcaaaaagtggcccactaattagtgatgctgaacttgatgcctttctgacagaacagtatcttcagaccactaacataaagtcttttgaagaaaatgtaaatgactctaaatcgcaaatgaatcagatagatatgaaaggcttagatgatggaaacatcaataatatatatttcaatgcagaagcaggagctattggggaaagtcatggtattaatataatttgtgaaacagttgataaacaaaatacaatagaaaatggcctttctttaggagaaaaaagcactattccagttcaacaagggttacctaccagtaagtctgagattacaaatcaattatcagtctctgatattaacagtcaatctgttggaggggccagacctaagcaattgtttagccttccatcaagaacaaggagttcaaaggacctgaataagccagatgttccagatacaatagaaagtgaacccagcacagcagataccgttgttccaatcacttgtgctatagattctacagctgatccacaggttagcttcaactctaattacattgatatagaaagtaattctgaaggtggatctagtttcgtaactgcaaatgaagattctgtacctgaaaacacttgcaaagaaggcttggttttgggccagaaacagcctacttgggttcctgattcagaagctccaaactgtatgaactgccaagtcaaatttacttttaccaaacggcgacaccattgccgagcatgtgggaaagtattttgtggtgtctgttgtaataggaagtgtaaactgcaatatctagaaaaggaagcaagagtatgtgtagtctgctatgaaactattagtaaagctcaggcatttgaaaggatgatgagtccaactggttctaatcttaagtctaatcattctgatgaatgtactactgtccagcctcctcaggagaaccaaacatccagtataccttcaccagcaactttgccagtctcagcacttaaacaaccaggtgttgaaggactatgttccaaagaacagaagagagtatggtttgcagatggtatattgcccaatggtgaagttgcagatacaacaaaattatcatctggaagtaaaagatgttctgaagactttagtcctctctcacctgatgtgcctatgacagtaaacacagtggatcattcccattctactacagtggaaaagccaaacaatgagacaggagatattacaagaaatgagataattcagagtcctatttctcaggttccatcagtggaaaaattgtctatgaacacaggaaatgaggggttacctacttctggttcatttacactagatgatgatgtttttgcagaaactgaagaaccatctagtcctactggtgtcttagttaacagcaatttacctattgctagtatttcagattataggttactgtgtgatattaacaagtatgtctgcaataagattagtcttctacctaatgatgaggacagtttgcccccacttctggttgcatctggagaaaagggatcagtgcctgtagtagaagaacatccatctcatgagcagatcattttgcttcttgaaggtgaaggctttcatcctgttacatttgtcctaaatgctaatctactcgtgaatgtcaaattcatattttattcctcagacaaatattggtacttttcaaccaatggattgcatggcttgggacaggcagaaattattattctattgttatgtttgccaaatgaagatactattcctaaggacatcttcagactatttatcaccatatataaggatgctctaaaaggaaaatacatagaaaacttggacaatattacctttactgagagttttctcagtagcaaggatcacggaggattcctgtttattacacctacttttcagaaacttgatgatctctcattaccaagtaatccttttctttgtggaattcttatccagaagcttgagattccctgggcaaaggtttttcctatgcgtttaatgttgagattgggtgcagaatataaagcatatcctgctcctctaacaagcatcagaggccgaaaacctctttttggagaaataggacacactattatgaacttacttgttgaccttcgaaattaccagtataccttgcataatatagatcaactgttgattcatatggaaatgggaaaaagctgcataaaaataccacggaaaaagtacagtgatgtaatgaaagtactaaattcttccaatgagcatgtcattagcattggagcaagtttcagtacagaagcagattctcatctagtctgtatacagaatgatggaatttatgaaacacaggccaacagtgccactggccatcctagaaaagtgacaggtgcaagttttgtggtattcaatggagctctaaaaacatcttcaggatttcttgctaagtccagcatagttgaagatggcttaatggtacaaataactccagagaccatgaatggcttgcggctagctttacgagaacagaaagactttaaaattacatgtgggaaagttgatgcagtagacctgagagaatacgtggatatctgctgggtagatgctgaagaaaaaggaaacaaaggagttatcagttcagtggatggaatatcattacaaggatttccaagtgaaaaaataaaactggaagcagattttgaaaccgatgagaagattgtaaaatgtaccgaggtgttctactttctaaaggaccaggatttatctattttatcaacttcttatcagtttgcaaaagaaatagccatggcttgtagtgctgcgctgtgccctcacctgaaaactctaaaaagtaatgggatgaataaaattggactcagagtttccattgacactgatatggttgaatttcaggcaggatctgaaggccaacttctgcctcagcattatctaaatgatcttgatagtgctctgatacctgtgatccatggtgggacctccaactctagtttaccattagaaatagaattagtgtttttcattatagaacatcttttttagtgaaagaatgtgccatattacatattgcaacctaatttgttaaaactaactccagcactaaagctgaaatgccacaaacactaaaagtataaatatgtctgatttttgaaacacataagctttgctctttaggcaggaatgatcttttcaaatcattagcacaatatttaaatatctaaaaatttaagagatccatactttctgtagctttacaattaatttaagtactaaaaagacaaggatttcttttaagaaatttatagcatttactgtgttatttaaatgctaagccaaagtatctgcacttaggtatacctctttatgccaataatgattttaatgaaggctcttttcagatgtaaccttatgaaggaaatatctgctttgtgtatatgccagttagaatactggtttctaaagtctgtcaaattgtatttcagtggcacaaaaaccagttttgaggtcttagacttataattctttgaataaaactgataacttatttgtataattggagtggagacctacctccataattagataaactctttttggattataatcagaattttgccttttttcttctcaaattattacatatgtatgtattatatatccacatatatagttttccctgattaaatggatattaaaataattgcgggtgcttcaggactttttgcttctatatttaagtatattgtttttatagcaagaacatattctgaatgttttataaatctttaataatttatatgtaggtaatatttttgtatcacaatgcattatttttttcctcctttccttccaaactataccactgtatttaccacttctaagagtgactgacgacgggccagatgacccttgaagtagtcattatgtagcaataaatgaagcctgaaacaggtttttttacttccactttaatccttagaaatttcttggcaacttcgcatattttcattgacaccggtgtataagtataaatttaaatgaactaattacttttgcatattttaaattctttatatggtagttattttttataacaggatattaacataagttaaatcctatgtatttgaaattgttacagagctttcctctttacttcaaacagcaaaaaagtggggggcatattgtagtcctgtcatttaagttatgtaaaaaatttaatcattattttgatgctttaaacattctcatgtgtaatatatgtttttgtatcaaaaacactcatatatttcaagaaaaagaaattatgttaaatagccctgttttaagaaaaatatttatgaagcatctcaacttgaagatcaagtcaaagttataactcaggatctgaggtctcaagctaggagagactgagaattttaatcagtttgggcatatagtttggactgaatcacatctgtagtacttagccaaagacaatttggaggagaatatcagccttctggaagtagctacttcctgaacaatgtaaagtgtcgcagatattcaataaaatggcaacctgttata

SEQ ID NO: 245128 - DNA, 3214 bp, Homo sapiens
gtttgcttttctccagccaggatatattttactcatagttcttactggaaaaggggttttgtttttatctcactattaaaagtcctcttttcaaggaagcactcactatttgttattggagtaagcactgtaaatttttttagccaattgtattaaaatgtaatttgcaccaatgttagagtctaatattaaatattattgcaacaacaaatttgaaatatttcaagtagatttttttaataccatggggtttttaatttaagtaatgtcggcagttattcaaagcctcatccctctaatttgtttatgtgttcatttagaggaaacgtaaagtatgacatagtggcaattttatctttatgatatatgaggaggaacaattataatttatgtagtagacagataaaagatacaggagaatgtagaatttttttataaatatatcaaatattttatttaacatgcttgaactgtattttaaaatatttcacttattttatattcacattccgagttaaacaagattgctcattttcttatcaagaattttttgtttttctaggttgaatttcaggcaggatctgaaggccaacttctgcctcagcattatctaaatgatcttgatagtgctctgatacctgtgatccatggtgggacctccaactctagtttaccattagaaatagaattagtgtttttcattatagaacatcttttttagtgaaagaatgtgccatattacatattgcaacctaatttgttaaaactaactccagcactaaagctgaaatgccacaaacactaaaagtataaatatgtctgatttttgaaacacataagctttgctctttaggcaggaatgatcttttcaaatcattagcacaatatttaaatatctaaaaatttaagagatccatactttctgtagctttacaattaatttaagtactaaaaagacaaggatttcttttaagaaatttatagcatttactgtgttatttaaatgctaagccaaagtatctgcacttaggtatacctctttatgccaataatgattttaatgaaggctcttttcagatgtaaccttatgaaggaaatatctgctttgtgtatatgccagttagaatactggtttctaaagtctgtcaaattgtatttcagtggcacaaaaaccagttttgaggtcttagacttataattctttgaataaaactgataacttatttgtataattggagtggagacctacctccataattagataaactctttttggattataatcagaattttgccttttttcttctcaaattattacatatgtatgtattatatatccacatatatagttttccctgattaaatggatattaaaataattgcgggtgcttcaggactttttgcttctatatttaagtatattgtttttatagcaagaacatattctgaatgttttataaatctttaataatttatatgtaggtaatatttttgtatcacaatgcattatttttttcctcctttccttccaaactataccactgtatttaccacttctaagagtgactgacgacgggccagatgacccttgaagtagtcattatgtagcaataaatgaagcctgaaacaggtttttttacttccactttaatccttagaaatttcttggcaacttcgcatattttcattgacaccggtgtataagtataaatttaaatgaactaattacttttgcatattttaaattctttatatggtagttattttttataacaggatattaacataagttaaatcctatgtatttgaaattgttacagagctttcctctttacttcaaacagcaaaaaagtggggggcatattgtagtcctgtcatttaagttatgtaaaaaatttaatcattattttgatgctttaaacattctcatgtgtaatatatgtttttgtatcaaaaacactcatatatttcaagaaaaagaaattatgttaaatagccctgttttaagaaaaatatttatgaagcatctcaacttgaagatcaagtcaaagttataactcaggatctgaggtctcaagctaggagagactgagaattttaatcagtttgggcatatagtttggactgaatcacatctgtagtacttagccaaagacaatttggaggagaatatcagccttctggaagtagctacttcctgaacaatgtaaagtgtcgcagatattcaataaaatggcaacctgttataatttgtgaaatttattgaaatggtgtaagatgaaaacaattgcatatcaaacccaatttatgttttctaaatatagtgtatgtattctgccatgtaagtaattgaacagtcttaaaataaccaaatggtagagggctgttccatgatgggacagctttggatttgttttcataaaatctctacattcaataaaaattggaattatgtgcctgaagtttggaggcacattttgaagtattctttgtagacatatagtatgtttctgaatgtgtttgttacttatttggtcattggtacttaatttgaaattttaattttttaagagaagaaatagaatggttctttgtactcagtctgcaatgatctatttttggcttatgtcttttaatactactctctttctctgaattttgaaatatgaagtaaaatctagcccatttgttttatgcagctattcaacaaactttgtgtgttcgtatacttgctacatgcagagcactttaccaggtttctaagcaaaaatttctaaaaatgattaattgttctgacagaattaggcgtagttctttatcaacatttatggattccatgccacaagtagtatgcgcttaagtgcagagcatgccaagagaaagagtaggatttggccctgtaggagcaaagattcaattgtgggaaactacttgtttctgaaaattgcatgctaggatatttacatcatgttcctgttgaaaacaattcctgattaaaatacaagaataatcttaaaacatcaaagagattttccagacaataaggaatgccaagtccaaaagtaaagagaataagagaagcaagcatgtacccttactctgacaaccttatgagtgagggggacagaaattaaagttcagggcccatataaggtgatgaacctaacaggagaccctccacacaataggctgagactcccaaatactttcacct

SEQ ID NO: 245129 - DNA, 3160 bp, Homo sapiens
gtttgcttttctccagccaggatatattttactcatagttcttactggaaaaggggttttgtttttatctcactattaaaagtcctcttttcaaggaagcactcactatttgttattggagtaagcactgtaaatttttttagccaattgtattaaaatgtaatttgcaccaatgttagagtctaatattaaatattattgcaacaacaaatttgaaatatttcaagtagatttttttaataccatggggtttttaatttaagtaatgtcggcagttattcaaagcctcatccctctaatttgtttatgtgttcatttagaggaaacgtaaagtatgacatagtggcaattttatctttatgatatatgaggaggaacaattataatttatgtagtagacagataaaagatacaggagaatgtagaatttttttataaatatatcaaatattttatttaacatgcttgaactgtattttttcttatcaagaattttttgtttttctaggttgaatttcaggcaggatctgaaggccaacttctgcctcagcattatctaaatgatcttgatagtgctctgatacctgtgatccatggtgggacctccaactctagtttaccattagaaatagaattagtgtttttcattatagaacatcttttttagtgaaagaatgtgccatattacatattgcaacctaatttgttaaaactaactccagcactaaagctgaaatgccacaaacactaaaagtataaatatgtctgatttttgaaacacataagctttgctctttaggcaggaatgatcttttcaaatcattagcacaatatttaaatatctaaaaatttaagagatccatactttctgtagctttacaattaatttaagtactaaaaagacaaggatttcttttaagaaatttatagcatttactgtgttatttaaatgctaagccaaagtatctgcacttaggtatacctctttatgccaataatgattttaatgaaggctcttttcagatgtaaccttatgaaggaaatatctgctttgtgtatatgccagttagaatactggtttctaaagtctgtcaaattgtatttcagtggcacaaaaaccagttttgaggtcttagacttataattctttgaataaaactgataacttatttgtataattggagtggagacctacctccataattagataaactctttttggattataatcagaattttgccttttttcttctcaaattattacatatgtatgtattatatatccacatatatagttttccctgattaaatggatattaaaataattgcgggtgcttcaggactttttgcttctatatttaagtatattgtttttatagcaagaacatattctgaatgttttataaatctttaataatttatatgtaggtaatatttttgtatcacaatgcattatttttttcctcctttccttccaaactataccactgtatttaccacttctaagagtgactgacgacgggccagatgacccttgaagtagtcattatgtagcaataaatgaagcctgaaacaggtttttttacttccactttaatccttagaaatttcttggcaacttcgcatattttcattgacaccggtgtataagtataaatttaaatgaactaattacttttgcatattttaaattctttatatggtagttattttttataacaggatattaacataagttaaatcctatgtatttgaaattgttacagagctttcctctttacttcaaacagcaaaaaagtggggggcatattgtagtcctgtcatttaagttatgtaaaaaatttaatcattattttgatgctttaaacattctcatgtgtaatatatgtttttgtatcaaaaacactcatatatttcaagaaaaagaaattatgttaaatagccctgttttaagaaaaatatttatgaagcatctcaacttgaagatcaagtcaaagttataactcaggatctgaggtctcaagctaggagagactgagaattttaatcagtttgggcatatagtttggactgaatcacatctgtagtacttagccaaagacaatttggaggagaatatcagccttctggaagtagctacttcctgaacaatgtaaagtgtcgcagatattcaataaaatggcaacctgttataatttgtgaaatttattgaaatggtgtaagatgaaaacaattgcatatcaaacccaatttatgttttctaaatatagtgtatgtattctgccatgtaagtaattgaacagtcttaaaataaccaaatggtagagggctgttccatgatgggacagctttggatttgttttcataaaatctctacattcaataaaaattggaattatgtgcctgaagtttggaggcacattttgaagtattctttgtagacatatagtatgtttctgaatgtgtttgttacttatttggtcattggtacttaatttgaaattttaattttttaagagaagaaatagaatggttctttgtactcagtctgcaatgatctatttttggcttatgtcttttaatactactctctttctctgaattttgaaatatgaagtaaaatctagcccatttgttttatgcagctattcaacaaactttgtgtgttcgtatacttgctacatgcagagcactttaccaggtttctaagcaaaaatttctaaaaatgattaattgttctgacagaattaggcgtagttctttatcaacatttatggattccatgccacaagtagtatgcgcttaagtgcagagcatgccaagagaaagagtaggatttggccctgtaggagcaaagattcaattgtgggaaactacttgtttctgaaaattgcatgctaggatatttacatcatgttcctgttgaaaacaattcctgattaaaatacaagaataatcttaaaacatcaaagagattttccagacaataaggaatgccaagtccaaaagtaaagagaataagagaagcaagcatgtacccttactctgacaaccttatgagtgagggggacagaaattaaagttcagggcccatataaggtgatgaacctaacaggagaccctccacacaataggctgagactcccaaatactttcacct

SEQ ID NO: 245130 - DNA, 4485 bp, Homo sapiens
tgagccgggatctggcactcccaggactcccggccggggtagctcttcactcctcagcgcgacgtcgtgtcgagttcccaaaaagctccgcaggggctgtagggaggcatacaagaattaaattctgaataagtctgcaggtaggatggacagttattttaaagcagctgtcagtgacttggacaaactccttgatgattttgaacagaacccagatgaacaagattatctccaagatgtacaaaatgcatatgattctaaccactgctcagtttcttcagagttggcttcctcacagcgaacttcattgctcccaaaagaccaagagtgcgttaatagttgtgcctcatcagaaacaagctatggaacaaatgagagttccctgaatgaaaaaacactcaagggacttacttctatacaaaatgaaaaaaatgtaacaggacttgatcttctttcttctgtggatggtggtacttcagatgaaatccagccgttatatatgggacgatgtagtaaacctatctgtgatctgataagtgacatgggtaacttagttcatgcaaccaatagtgaagaagatattaaaaaattattgccagatgattttaagtctaatgcagattccttgattggattggatttatcttcagtgtcagatactccctgtgtttcttcaacagaccatgatagtgatactgtcagagaacaacagaatgataccagttctgaattacaaaatagagaaatcggaggaatcaaagaattgggtataaaagtagatacaacactttcagattcctataattacagtggaacagaaaatttaaaagataaaaagatctttaatcagttagaatcaattgttgattttaacatgtcatctgctttgactcgacaaagttccaaaatgtttcatgccaaagacaagctacaacacaagagccagccatgtggattactaaaagatgttggcttagtaaaagaggaagtagatgtggcagtcataactgccgcagaatgtttaaaagaagagggcaagacaagtgctttgacctgcagccttccgaaaaatgaagatttatgcttaaatgattcaaattcaagagatgaaaatttcaaattacctgacttttcctttcaggaagataagactgttataaaacaatctgcacaagaagactcaaaaagtttagaccttaaggataatgatgtaatccaagattcctcttcagctttacatgtttccagtaaagatgtgccgtcctcattgtcctgtcttcctgcgtctgggtctatgtgtggatcattaattgaaagtaaagcacggggtgattttttacctcagcatgaacataaagataatatacaagatgcagtgactatacatgaagaaatacagaacagtgttgttctaggtggggaaccattcaaagagaatgatcttttgaaacaggaaaaatgtaaaagcatactccttcagtcattaattgaagggatggaagacagaaagatagatcctgaccagacagtaatcagagctgagtctttggatggtggtgacaccagttctacagttgtagaatctcaagaggggctttctggcactcatgtcccagagtcttctgattgttgtgaaggttttattaatactttttcaagcaatgatatggatgggcaagacttagattactttaatattgatgaaggcgcaaaaagtggcccactaattagtgatgctgaacttgatgcctttctgacagaacagtatcttcagaccactaacataaagtcttttgaagaaaatgtaaatgactctaaatcgcaaatgaatcagatagatatgaaaggcttagatgatggaaacatcaataatatatatttcaatgcagaagcaggagctattggggaaagtcatggtattaatataatttgtgaaacagttgataaacaaaatacaatagaaaatggcctttctttaggagaaaaaagcactattccagttcaacaagggttacctaccagtaagtctgagattacaaatcaattatcagtctctgatattaacagtcaatctgttggaggggccagacctaagcaattgtttagccttccatcaagaacaaggagttcaaaggacctgaataagccagatgttccagatacaatagaaagtgaacccagcacagcagataccgttgttccaatcacttgtgctatagattctacagctgatccacaggttagcttcaactctaattacattgatatagaaagtaattctgaaggtggatctagtttcgtaactgcaaatgaagattctgtacctgaaaacacttgcaaagaaggcttggttttgggccagaaacagcctacttgggttcctgattcagaagctccaaactgtatgaactgccaagtcaaatttacttttaccaaacggcgacaccattgccgagcatgtgggaaagtattttgtggtgtctgttgtaataggaagtgtaaactgcaatatctagaaaaggaagcaagagtatgtgtagtctgctatgaaactattagtaaagctcaggcatttgaaaggatgatgagtccaactggttctaatcttaagtctaatcattctgatgaatgtactactgtccagcctcctcaggagaaccaaacatccagtataccttcaccagcaactttgccagtctcagcacttaaacaaccaggtgttgaaggactatgttccaaagaacagaagagagtatggtttgcagatggtatattgcccaatggtgaagttgcagatacaacaaaattatcatctggaagtaaaagatgttctgaagactttagtcctctctcacctgatgtgcctatgacagtaaacacagtggatcattcccattctactacagtggaaaagccaaacaatgagacaggagatattacaagaaatgagataattcagagtcctatttctcaggttccatcagtggaaaaattgtctatgaacacaggaaatgaggggttacctacttctggttcatttacactagatgatgatgtttttgcagaaactgaagaaccatctagtcctactggtgtcttagttaacagcaatttacctattgctagtatttcagattataggttactgtgtgatattaacaagtatgtctgcaataagattagtcttctacctaatgatgaggacagtttgcccccacttctggttgcatctggagaaaagggatcagtgcctgtagtagaagaacatccatctcatgagcagatcattttgcttcttgaaggtgaaggctttcatcctgttacatttgtcctaaatgctaatctactcgtgaatgtcaaattcatattttattcctcagacaaatattggtacttttcaaccaatggattgcatggcttgggacaggcagaaattattattctattgttatgtttgccaaatgaagatactattcctaaggacatcttcagactatttatcaccatatataaggatgctctaaaaggaaaatacatagaaaacttggacaatattacctttactgagagttttctcagtagcaaggatcacggaggattcctgtttattacacctacttttcagaaacttgatgatctctcattaccaagtaatccttttctttgtggaattcttatccagaagcttgagattccctgggcaaaggtttttcctatgcgtttaatgttgagattgggtgcagaatataaaggtaagttttagagtaataagttaaattgcatattttcaaatatactgaatgtaaagactttcagggaatcattaaaatcaattttaatggattaatggaactacttttgttttgctatgcttttaaagttctaagacaaccctcttctactaccaggttggtctagataactgtggtatgtcttcaagtttctagatgttcataagttcttttattacctaaaacttttcttcttaaatttcagaacaaaacagaaaactttcacagtgcaggttgagtatgccatatctgaaatgtattggatcagttttttggattttggactttttcagattttggaatattcacagagtacataccagttgagcatcccaaattcaaaatctgaaatgctccagtgagcatttcttttgagcatcacgttggcatttgaaaaagttatagaccgggcatggtggctcacgcctgtactcccagcactttgggaggccaaggcgggcagatcacatgaggtcaggagttcgagaccagcctggccaacatggtgaaaccctgtctctactaaaaatacaaaaattagctgggtgaggtggcaggcgcctgtaattgcagctactcaggaggctgaggcaggagaatcacctgaacccaggaggcagatttgcagtgagctaagatcatgcctctgcattccagccagggtgacagagcaagactacgtctcaaaaaaaaa

SEQ ID NO: 245131 - DNA, 4340 bp, Homo sapiens
tgagccgggatctggcactcccaggactcccggccggggtagctcttcactcctcagcgcgacgtcgtgtcgagttcccaaaaagctccgcaggggctgtagggaggcatacaagaattaaattctgaataagtctgcaggtaggatggacagttattttaaagcagctgtcagtgacttggacaaactccttgatgattttgaacagaacccagatgaacaagattatctccaagatgtacaaaatgcatatgattctaaccactgctcagtttcttcagagttggcttcctcacagcgaacttcattgctcccaaaagaccaagagtgcgttaatagttgtgcctcatcagaaacaagctatggaacaaatgagagttccctgaatgaaaaaacactcaagggacttacttctatacaaaatgaaaaaaatgtaacaggacttgatcttctttcttctgtggatggtggtacttcagatgaaatccagccgttatatatgggacgatgtagtaaacctatctgtgatctgataagtgacatgggtaacttagttcatgcaaccaatagtgaagaagatattaaaaaattattgccagatgattttaagtctaatgcagattccttgattggattggatttatcttcagtgtcagatactccctgtgtttcttcaacagaccatgatagtgatactgtcagagaacaacagaatgataccagttctgaattacaaaatagagaaatcggaggaatcaaagaattgggtataaaagtagatacaacactttcagattcctataattacagtggaacagaaaatttaaaagataaaaagatctttaatcagttagaatcaattgttgattttaacatgtcatctgctttgactcgacaaagttccaaaatgtttcatgccaaagacaagctacaacacaagagccagccatgtggattactaaaagatgttggcttagtaaaagaggaagtagatgtggcagtcataactgccgcagaatgtttaaaagaagagggcaagacaagtgctttgacctgcagccttccgaaaaatgaagatttatgcttaaatgattcaaattcaagagatgaaaatttcaaattacctgacttttcctttcaggaagataagactgttataaaacaatctgcacaagaagactcaaaaagtttagaccttaaggataatgatgtaatccaagattcctcttcagctttacatgtttccagtaaagatgtgccgtcctcattgtcctgtcttcctgcgtctgggtctatgtgtggatcattaattgaaagtaaagcacggggtgattttttacctcagcatgaacataaagataatatacaagatgcagtgactatacatgaagaaatacagaacagtgttgttctaggtggggaaccattcaaagagaatgatcttttgaaacaggaaaaatgtaaaagcatactccttcagtcattaattgaagggatggaagacagaaagatagatcctgaccagacagtaatcagagctgagtctttggatggtggtgacaccagttctacagttgtagaatctcaagaggggctttctggcactcatgtcccagagtcttctgattgttgtgaaggttttattaatactttttcaagcaatgatatggatgggcaagacttagattactttaatattgatgaaggcgcaaaaagtggcccactaattagtgatgctgaacttgatgcctttctgacagaacagtatcttcagaccactaacataaagtcttttgaagaaaatgtaaatgactctaaatcgcaaatgaatcagatagatatgaaaggcttagatgatggaaacatcaataatatatatttcaatgcagaagcaggagctattggggaaagtcatggtattaatataatttgtgaaacagttgataaacaaaatacaatagaaaatggcctttctttaggagaaaaaagcactattccagttcaacaagggttacctaccagtaagtctgagattacaaatcaattatcagtctctgatattaacagtcaatctgttggaggggccagacctaagcaattgtttagccttccatcaagaacaaggagttcaaaggacctgaataagccagatgttccagatacaatagaaagtgaacccagcacagcagataccgttgttccaatcacttgtgctatagattctacagctgatccacaggttagcttcaactctaattacattgatatagaaagtaattctgaaggtggatctagtttcgtaactgcaaatgaagattctgtacctgaaaacacttgcaaagaaggcttggttttgggccagaaacagcctacttgggttcctgattcagaagctccaaactgtatgaactgccaagtcaaatttacttttaccaaacggcgacaccattgccgagcatgtgggaaagtattttgtggtgtctgttgtaataggaagtgtaaactgcaatatctagaaaaggaagcaagagtatgtgtagtctgctatgaaactattagtaaagctcaggcatttgaaaggatgatgagtccaactggttctaatcttaagtctaatcattctgatgaatgtactactgtccagcctcctcaggagaaccaaacatccagtataccttcaccagcaactttgccagtctcagcacttaaacaaccaggtgttgaaggactatgttccaaagaacagaagagagtatggtttgcagatggtatattgcccaatggtgaagttgcagatacaacaaaattatcatctggaagtaaaagatgttctgaagactttagtcctctctcacctgatgtgcctatgacagtaaacacagtggatcattcccattctactacagtggaaaagccaaacaatgagacaggagatattacaagaaatgagataattcagagtcctatttctcaggttccatcagtggaaaaattgtctatgaacacaggaaatgaggggttacctacttctggttcatttacactagatgatgatgtttttgcagaaactgaagaaccatctagtcctactggtgtcttagttaacagcaatttacctattgctagtatttcagattataggttactgtgtgatattaacaagtatgtctgcaataagattagtcttctacctaatgatgaggacagtttgcccccacttctggttgcatctggagaaaagggatcagtgcctgtagtagaagaacatccatctcatgagcagatcattttgcttcttgaaggtgaaggctttcatcctgttacatttgtcctaaatgctaatctactcgtgaatgtcaaattcatattttattcctcagacaaatattggtacttttcaaccaatggattgcatggcttgggacaggcagaaattattattctattgttatgtttgccaaatgaagatactattcctaaggacatcttcagactatttatcaccatatataaggatgctctaaaaggaaaatacatagaaaacttggacaatattacctttactgagagttttctcagtagcaaggatcacggaggattcctgtttattacacctacttttcagaaacttgatgatctctcattaccaagtaatccttttctttgtggaattcttatccagaagcttgagattccctgggcaaaggtttttcctatgcgtttaatgttgagattgggtgcagaatataaagcatatcctgctcctctaacaagcatcagaggccgaaaacctctttttggagaaataggacacactattatgaacttacttgttgtgagtaattgaactattttattaggtatttttatactgttactttaaaactgtatttagcaaagtttatacatttatattttcctactttaatttgccatattggtataatgaccattcatttacaataaatcctaattattttaacattagtgctcagtttttgacgaattgctttttagaacgtactatctcctcatgtacgtgtacctgattctaagtgcgtttgattcattctcctgcagttcttggatatttaggtaatgtaagaactctatacagacctcttaaagttgttgaaacttttgtaaatgtattagtaaagtcagtcagtcttgtgattttgagcaaattatggcttagttttctcatttataataggaagtgttggattagatgatatctaaagttcccttccacctatactttttgtaattttgtgtttccctgttaccatagaaaaatgtttcagtggactcacttttatttatccatgcctagtttg

SEQ ID NO: 245132 - DNA, 3400 bp, Homo sapiens
tgagccgggatctggcactcccaggactcccggccggggtagctcttcactcctcagcgcgacgtcgtgtcgagttcccaaaaagctccgcaggggctgtagggaggcatacaagaattaaattctgaataagtctgcaggtaggatggacagttattttaaagcagctgtcagtgacttggacaaactccttgatgattttgaacagaacccagatgaacaagattatctccaagatgtacaaaatgcatatgattctaaccactgctcagtttcttcagagttggcttcctcacagcgaacttcattgctcccaaaagaccaagagtgcgttaatagttgtgcctcatcagaaacaagctatggaacaaatgagagttccctgaatgaaaaaacactcaagggacttacttctatacaaaatgaaaaaaatgtaacaggacttgatcttctttcttctgtggatggtggtacttcagatgaaatccagccgttatatatgggacgatgtagtaaacctatctgtgatctgataagtgacatgggtaacttagttcatgcaaccaatagtgaagaagatattaaaaaattattgccagatgattttaagtctaatgcagattccttgattggattggatttatcttcagtgtcagatactccctgtgtttcttcaacagaccatgatagtgatactgtcagagaacaacagaatgataccagttctgaattacaaaatagagaaatcggaggaatcaaagaattgggtataaaagtagatacaacactttcagattcctataattacagtggaacagaaaatttaaaagataaaaagatctttaatcagttagaatcaattgttgattttaacatgtcatctgctttgactcgacaaagttccaaaatgtttcatgccaaagacaagctacaacacaagagccagccatgtggattactaaaagatgttggcttagtaaaagaggaagtagatgtggcagtcataactgccgcagaatgtttaaaagaagagggcaagacaagtgctttgacctgcagccttccgaaaaatgaagatttatgcttaaatgattcaaattcaagagatgaaaatttcaaattacctgacttttcctttcaggaagataagactgttataaaacaatctgcacaagaagactcaaaaagtttagaccttaaggataatgatgtaatccaagattcctcttcagctttacatgtttccagtaaagatgtgccgtcctcattgtcctgtcttcctgcgtctgggtctatgtgtggatcattaattgaaagtaaagcacggggtgattttttacctcagcatgaacataaagataatatacaagatgcagtgactatacatgaagaaatacagaacagtgttgttctaggtggggaaccattcaaagagaatgatcttttgaaacaggaaaaatgtaaaagcatactccttcagtcattaattgaagggatggaagacagaaagatagatcctgaccagacagtaatcagagctgagtctttggatggtggtgacaccagttctacagttgtagaatctcaagaggggctttctggcactcatgtcccagagtcttctgattgttgtgaaggttttattaatactttttcaagcaatgatatggatgggcaagacttagattactttaatattgatgaaggcgcaaaaagtggcccactaattagtgatgctgaacttgatgcctttctgacagaacagtatcttcagaccactaacataaagtcttttgaagaaaatgtaaatgactctaaatcgcaaatgaatcagatagatatgaaaggcttagatgatggaaacatcaataatatatatttcaatgcagaagcaggagctattggggaaagtcatggtattaatataatttgtgaaacagttgataaacaaaatacaatagaaaatggcctttctttaggagaaaaaagcactattccagttcaacaagggttacctaccagtaagtctgagattacaaatcaattatcagtctctgatattaacagtcaatctgttggaggggccagacctaagcaattgtttagccttccatcaagaacaaggagttcaaaggacctgaataagccagatgttccagatacaatagaaagtgaacccagcacagcagataccgttgttccaatcacttgtgctatagattctacagctgatccacaggttagcttcaactctaattacattgatatagaaagtaattctgaaggtggatctagtttcgtaactgcaaatgaagattctgtacctgaaaacacttgcaaagaaggcttggttttgggccagaaacagcctacttgggttcctgattcagaagctccaaactgtatgaactgccaagtcaaatttacttttaccaaacggcgacaccattgccgagcatgtgggaaagtattttgtggtgtctgttgtaataggaagtgtaaactgcaatatctagaaaaggaagcaagagtatgtgtagtctgctatgaaactattagtaaagctcaggcatttgaaaggatgatgagtccaactggttctaatcttaagtctaatcattctgatgaatgtactactgtccagcctcctcaggagaaccaaacatccagtataccttcaccagcaactttgccagtctcagcacttaaacaaccaggtgttgaagtgcctgctattggaaaaagctgaccaaagccagtaacaagagagtctgggaattgcactttccagacttccagcctggcatccaagagcccactgtagagggtgagcttgggtttgagaggcaataggactatgttccaaagaacagaagagagtatggtttgcagatggtatattgcccaatggtgaagttgcagatacaacaaaattatcatctggaagtaaaagatgttctgaagactttagtcctctctcacctgatgtgcctatgacagtaaacacagtggatcattcccattctactacagtggaaaagccaaacaatgagacaggagatattacaagaaatgagataattcagagtcctatttctcaggttccatcagtggaaaaattgtctatgaacacaggaaatgaggggttacctacttctggttcatttacactagatgatgatgtttttgcagaaactgaagaaccatctagtcctactggtgtcttagttaacagcaatttacctattgctagtatttcagattataggttactgtgtgatattaacaagtatgtctgcaataagattagtcttctacctaatgatgaggacagtttgcccccacttctggttgcatctggagaaaagggatcaggtagggaagcagttatttaaattta

SEQ ID NO: 245133 - DNA, 291 bp, Homo sapiens
tagtttatatatgcaaatattatgttgttagagttggttttcatgtcatttttacatatacaggggcagtttccccaactaaattgtatattccttaaagcagcactcttaaattttatttctgtgtcaatttcttgactgtgtttcctggcatggaatacatggcataaaatttgttatgtaattaaatgaaatattattatactttctattttttaggcatacaagaattaaattctgaataagtctgcaggtaggatggacagttattttaaagcagctgtcagtgac

SEQ ID NO: 245134 - DNA, 569 bp, Homo sapiens
atggtactgtttcttgggaaatttgactttaagagaatttctgaacgcattttggtttttatttattcttattaaaaagatatgtttggctatagtgatctcatttcatagttgaacagagaatatgaactgatttgttattttttttattacatattttacagacagtaaacacagtggatcattcccattctactacagtggaaaagccaaacaatgagacaggagatattacaagaaatgagataattcagagtcctatttctcaggttccatcagtggaaaaattgtctatgaacacaggaaatgaggggttacctacttctggttcatttacactagatgatgatgtttttgcagaaactgaagaaccatctagtcctactggtgtcttagttaacagcaatttacctattgctagtatttcagattataggttactgtgtgatattaacaagtatgtctgcaataagattagtcttctacctaatgatgaggacagtttgcccccacttctggttgcatctggagaaaagggatcaggtagggaagcagttatttaaatttaa

SEQ ID NO: 245135 - DNA, 880 bp, Homo sapiens
agagagagccagagtcgctacagccagcctggcagtgcaagcccggagctgacacagggccacagccacgatgcagccactaatgcggacccttgggctgagcctgctttccatgctgtgagcccaggggacccagatggttcctgtccccgctgagaaggtggaaggactgtggcacgccctgcgctgggagcaggacagggagctacttaaagaggagacggctcaccctctgccaccattctggatccagcgtttccagggtaactttatgttaaaaatgaatgtaagtttcagtcagcaggtccctttttaactggatcatgtgctgaagaacgccacacacggagggcttgctcaggctctgggctcagcccaggaccttcctgccccaagcacctcaccacaatctctcacaggcacttctgtaagatgggacagtccagttgcaggaaaatgagctcagggctcccaccgattctacactatgggatcccactgggaactgcacagtatttaagacactgctggtgaaaacagacaactctaccacgtacagaatctattcctgcgtggtcggctgtaactgaggtgagtgccacaaggcctctgcgtgtgttcagagtgtccacaccagactccggccggactcatgggccctgggactccgcagccctcgaccttggcagcctccttgcctgcgggtgcttgaatgccacgcagcatccgacgcatcccacaaccttgagtctgctatgagtcaagtgtggtcgctgtagataaggaggaaaaaagatcatgaaaaagaacaacaacaacaaaaaatcactcatggccgggcgcggtggctcatgcctgtaatcccagcactttgggaggc

SEQ ID NO: 245136 - DNA, 627 bp, Homo sapiens
cccatttcctatagagggacagaaattattagcatttcagactcatagactcaacttaaaaagggcgcaaccacccagctcacaagagcacatcctccgcccctcccagcgggggagcaggaggtctgcatctgtccgtggagacggaccactactacatcatgaacacccgggatgagaggagggacccggccgtgcacacaatgaacctgacaggcgcgtgtccacgctgatgtcacggggcctgtggacgggggcctgtggacgggggcgctgccccttggagtcctccctaactcagccatgcccagattcctgcgtggtcggctgtaactgaggtgagtgccacaaggcctctgcgtgtgttcagagtgtccacaccagactccggccggactcatgggccctgggactccgcagccctcgaccttggcagcctccttgcctgcgggtgcttgaatgccacgcagcatccgacgcatcccacaaccttgagtctgctatgagtcaagtgtggtcgctgtagataaggaggaaaaaagatcatgaaaaagaacaacaacaacaaaaaatcactcatggccgggcgcggtggctcatgcctgtaatcccagcactttgggaggc

SEQ ID NO: 245137 - DNA, 803 bp, Homo sapiens
agagagagccagagtcgctacagccagcctggcagtgcaagcccggagctgacacagggccacagccacgatgcagccactaatgcggacccttgggctgagcctgctttccatgctgtgagcccaggggacccagatggttcctgtccccgctgagaaggtggaaggactgtggcacgccctgcgctgggagcaggacagggagctacttaaagaggagacggctcaccctctgccaccattctggatccagcgtttccagggtaactttatgttaaaaatgaatgtaaggtgagtgcctggtggggacacgtggggtgagcgagggagcttctcaggctctcgctgccatccaggccctgggctgatggaaaggaggtcactggccactcttcttcaccaggctgcagccactttggagtccacctttccggcttctaacagtttcagtcagcaggtccctttttaactggatcatgtgctgaagaacgccacacacggagggcttgctcaggctctgggctcagcccaggaccttcctgccccaagcacctcaccacaatctctcacaggcacttctgtaaggtgagaagtccagcagccatgggtttattgtttttcctgtaaaacaataaagtctggtaggagattacgcatgtatgctgtgaaagacctctttgcctaacataaggatggtaattttagtgcctttggtgttacaaacctttattacctgtggcagctaattaataggagatgttctaagagtcaaagtttcattctgtgggatttccatctaccac

SEQ ID NO: 245138 - DNA, 750 bp, Homo sapiens
agagagagccagagtcgctacagccagcctggcagtgcaagcccggagctgacacagggccacagccacgatgcagccactaatgcggacccttgggctgagcctgctttccatgctgtgagcccaggggacccagatggttcctgtccccgctgagaaggtggaaggactgtggcacgccctgcgctgggagcaggacagggagctacttaaagaggagacggctcaccctctgccaccattctggatccagcgtttccagggtaactttatgttaaaaatgaatgtaaggtgagtgcctggtggggacacgtggggtgagcgagggagcttctcaggctctcgctgccatccaggccctgggctgatggaaaggaggtcactggccactcttcttcaccaggctgcagccataactggatcatgtgctgaagaacgccacacacggagggcttgctcaggctctgggctcagcccaggaccttcctgccccaagcacctcaccacaatctctcacaggcacttctgtaaggtgagaagtccagcagccatgggtttattgtttttcctgtaaaacaataaagtctggtaggagattacgcatgtatgctgtgaaagacctctttgcctaacataaggatggtaattttagtgcctttggtgttacaaacctttattacctgtggcagctaattaataggagatgttctaagagtcaaagtttcattctgtgggatttccatctaccac

SEQ ID NO: 245139 - DNA, 583 bp, Homo sapiens
gctcccaaagtgctgggattacaagtatgagccatcacgcctagctttaatatgattattatattgatttatcatcttatgttaaaccaacctagtatttgatacaataaactcagctttggtcatcaaatattctagtttttatatcttgctgggttggtttgctaatatttatttaggatctttgttcacaagtaaacctggcctgtaagattattctcttacactctcaggtttggatatggaggtttttctaaccttataaagtgatttagaaattgctcttttttggccgggcctggtggctcacgcctgtaatcccagcactttgggaggccgaggcgggtggatcacgaggtcaggagatcgggaccatcctggctaacatggtgaaaccccgtctctattaaaaaatacaaaaaattagccgagcgtggtggcgggcgcctgtggtcccagctactggggaggatgaggcaggagaatggcgtgaacctgggaggcggagcttgcagtgagctgagatcgcgccactgcactccagcttgggtgacagagcgagactccgtcttaaaaaaaaaaa

SEQ ID NO: 245140 - DNA, 438 bp, Homo sapiens
aaagccatgtaaattaatggaaacttcctggcaaaatagcttgacttgtagcaacttcacaaccataacaatccagaggtgaggtttgcccgcaccctattcatttcaatcccgaaggcaattttccccttggccagagagaagctcaagaacaaaaaaccaaacaccgcatgttctcactcataggtgggaattgaacaatgagaacacatggacacaggaaggggaacatcacactctggggactgttgtggggtggggggaggggggagggatagcattaggagatatacctaatgttaaatgacaagttaatgggtgcagcacaccagcatggcacatgtatacatatgtaactaacctgcacattatgcacatgtaccctaaaacttaaagtataataataataaaataaaaaaagaaaattaaaaaataaaa

SEQ ID NO: 245141 - DNA, 1234 bp, Homo sapiens
cggccgcctcgccaaacaggtttacccgacgcggccggggcggcgggcggaggcggcggcgggagcggcgcggccccagaacccagataatccgtttaaagcactgagaaaatctaagaagtttttagtaaactgtagctggtatcagggatcagatcagcggacacgcccattccagcagtcaggggcctgctcggaccgtcgtgcacctccgagcgtttctgtccggtccctctgggtccgtctggttttcggaggctttcctggaaaagccagcctgtggctacctcctttctcccctaagtgatggaggattagaaggcagaggttgacccacaatctaaagtgcctggtcgccttttcccagatttcccggagcattccttcaccccgtggcatcggctgtctgcatatgggtgcaaggccctgttccgggcggagaataaacaggagttctgactgacaggagctccgcagccagcagggtggtcactagttctctgcagtctcggaggacagccctgaagaagggcaggagaaccagcacttcctccgaaaactcaaaaggacatcagtcttcaccaagttgccgatacaaaacgtgctcctgaaatgtgtagtaatgagcaccaggaaacctgggtaggagtgtgcatggcattcttcatcaccgcttggactgcatggcactgaatacccacggagagcaggatggagaaacagtgtgctcatattcacaggatggaatctagccattcacaaaaattccaaaacaggcaaaattaaactgcattctttagggaagcatcattaagtagtaaataattgacagaagggcaagaaggtgcttactctaagtgtcagaatggtggatacagctgggggtgagagggctgtgaccacagcagggcccctgggggatttgggggtgccaggcctgttccttcctgcaatggtgccctttggcagccatcccttaaactgcacttttactttatatgcttttctgtacctttactgtagtatttcaaggaaatttttaaataatcatgaatgttaccactttcctatttatgaaccatgcaacctcatcaatcttcccagttcgcagatgcccaccctctctctctgcccctgtctccttcacatatccccaaaactcgttttggcccgaaatccctgaggcccaactgccctgctgtcagcgactgcacgcctcagcaaaggcccagaa

SEQ ID NO: 245142 - DNA, 473 bp, Homo sapiens
cagatctggtttcaggagtcacacagcctctttgatgtcagaaatctctaattctctcgactaatctccctcccctttccctagcctcccgagtgcctatagcaaagatctcttttttaatgagttaattaaaaataattatattttgaacatcaccagagacgcactagaggctggaaaaccagcattaagataagcgatttctggccgcgcggggtggctcacgcctgtaatcccagcactttgggaggccaaggcaggcggatcacgaggtcaggagatcgagaccatcctagctaacacgctgaaaccccgtctctactaaaaatacaaaaaaattagccaggcgtggtggcaggcacctgtagtcccagctactcgggaggctgaggcaggagaatggcgtgaacccaggaggtggagcttgcagtgagcactccagcctgggcgacagggcgagactctgtctcaaa

SEQ ID NO: 245143 - DNA, 469 bp, Homo sapiens
  misc_feature (13)..(13): n is a, c, g, or t
  misc_feature (54)..(54): n is a, c, g, or t
ccaaggctggtcntcgaccttcctgaccttcaggtgatcccaccccacccttgnccttccccaaagtgctgggactacaggcacatgcaaaccacggtctggcttaattttcttgagttttagtagagactgggtctcgttatgttgtccaggctggtcccgagctcctgagttcaatcgatcttcctgccttggtctcccaaagtgctggcctacaggcgtgagccaccatccccagcccaatttttgtatattttgtagagacacagcctgggcaacttagtgagaccctctctctacaaaaaaagtttgaaaattaggtgtgattggacacatcagtgtcgtagtcccagcatctcaggagactgaggtggaaggattgcttgagctcagaaggtcgaggctacagtgagccatggtcacaccactgcactgcagcctgagtgactgagggagaccctgtcttatt

SEQ ID NO: 245144 - DNA, 441 bp, Homo sapiens
tggtaactatctcctactgttgtgacgattaaaggagatggtgcatgcagagtacttggcacatatgaagtgctcaataaagagtaactcctgcagcctggtgtggtggcccacacctgtaaccacaacatgttgggaggctcaacatgttggcaggaggattgcttgaggccaagggtttgagaccagcctgggcaacataaagagacccccgtctctataaaaaataataaaaactagctgagcatggtgatacatgcctgtagttccagctactcaggaggctgaggtgggaggatcaacttgagctcgggagttggaggctgcagtgagctacgatcacgccactgccctccagcctgggcaacagagcaaggccctttctctggaataaaaaaaaaagagaggctgggcgcagtggctcacacctgtaatcccagc

SEQ ID NO: 245145 - DNA, 431 bp, Homo sapiens
cctatgggtggtgtataactgattgagaggccgcacttggcaacgatgtgctttcattgggaggaggtctgtcttcatgagctttctgatgccatcctgtgccttggcctgtttcacatctttttcaggggcttgtgcagtgatctagaaggtggtggacctgaagagacctgattctgggaggccacagaataccttgggtggcccttgggatctaagaataagaacatggatgctcttgggctccacataaagcattctagttgggcgagggggaagaaggccagggcaggtctgagagtggggaagactctggaccacccacccatgccagtgtcaaccagagccgccttttctgaatgtatctgtttttacatgttgtttctaaattagattatagttgatgcctataggaagcatcctactaatta

SEQ ID NO: 245146 - DNA, 368 bp, Homo sapiens
tcactatgtgtttggaccttatagcctagcttccactcctacctacccaacatcaaatgaggacttaattctgtttctctcttaaattctctcttccttcttcctttggctcccatgacagtgggatatattgaaggaaagaatattgtccttggactgagagatttctgaactcaaaacctggctccaatatggagtaaggagaatttacttaaacattctgagtcatcatttctttcataaaatatgggatagagacacatacctcctaaaaactgtacatcgagacttgtatgagataacatgtgtaaagttagctaagagcttgtgtttctaacctccactaaactttcatgaattcatatttc

SEQ ID NO: 245147 - DNA, 396 bp, Homo sapiens
gctaggcatctgcatcaactcctaagatcctcaaggagacacgggactattggaaggtcatttgccaaggtcataaaaagcagaattgagatttgaacctaggctttttgcttttagagatcctagaaatgtctaggacatccctcattttccttttgttggagtcccctccaaaggccttttgaaactctcccccaaatctttccacctgcagccccactcagtttccttccttccacctcaccctgtggatagaaaactggctggcaggtgttgccccttgtaccccattcctttcctcagaaaaaagccaagaccccatatctcctgatccctacagtgacttcctaagagcttgacaaatggaaggtgaccttcttcaaatgcagacacata

SEQ ID NO: 245148 - DNA, 504 bp, Homo sapiens
ttaaaatcataattccccaaaacacaacccaaatgtccatcaacagtagactaaattgtggtataatgcatacactgataaactatacagttatgaaaatgagctacaacaaaatatgaataagtcttacacacataaggttgactgaaatgaatcagagacaaaataatacatcttagatgataccatttatataaagctcaaagttaggtaaagcaaaactacagtgctcagggatacatactttggtagcaaacaaaaaataaagtaagtcattaatgtaaaaatcaggttactgcttacctttggaggagaaagaggattgtgactagaaagggaaagaggagagcttctggggatgctggcaatgtcctatttcttgagctggggtggtatgtggatgttcatttataataattccttaaactgaatatgtttctgtgttttgtatgtgttttgttgttatgtatgtgttgtattttgcaataaaaaagatatttaaga

SEQ ID NO: 245149 - DNA, 282 bp, Homo sapiens
cctctgacccaggctgttgtgtggctcagaaggaaattccaaggccatgactacaacttcccggcacaagtcattgttggtgctcccgggtactgggtcacctcaagagacacatccttctctccacttcagtttccttcacagaaaagtgaagactcaaagtccaatctaggtacccaaacattgcaagaccacaaaatctcaatcatcataaagcacatcacagccaggaggagatgaatgaatgtcacgcagttacagcaacctcaagaaatttacggg

SEQ ID NO: 245150 - DNA, 274 bp, Homo sapiens
cggcacgaggttttttttttatgttcacagagatttgttggtgccaactaaatgagcccaacagccagtgacaacagaactgcactaaaaaaagtccctcatcagctcttgagagcaggttccttaaaggtgaacaatattccacatacaaggactttttcagcaccatgcattagaaatggaagtgaatgtttattattttttgtataagttggttgatacggcttttcagcttccctcagtatcattatccaaattttacaaaaaaaaaaaa

SEQ ID NO: 245151 - DNA, 496 bp, Homo sapiens
ctaagggtgggtctgcttctcccagtccactgactcaaatgttaatctcctttggcaacaccctcacagacacacccaggaacaatactttgcgtccttcaatccaatcaaattgacacccaatattaaccatcatactgatgatattatatgataatattctgtaaactataagatgctgttgaaaatgcaaaaaaaaaaaggcattgagcagtgactcacatttgtcatcccagcgctttgggagggcaaggtgagaggatcacttaaggccaggagttcaagaccatcctggccaacatggtgaaaccccgtctctattaaaaatacaaaaattagctgggtgtggtggcacgtgcctatagtcccagctactcaggaaactgaggcaggagactcgcttgaacccaggaggtggaggttgcagtgagccaagatcatgccactgcactctagcctcggtaacaaagtgagacgccccctgtccaacaactca

SEQ ID NO: 245152 - DNA, 477 bp, Homo sapiens
ctggaaaagcccagatgtgcccgtgggcgttgggctggccttccaggggtgtcccctgcgtaacaaaggacggagccctcggaccctccggtccgctcgtcgtgtgacttaaccagcaagtcacaaaaggaactttagtggggatcctacttacacatacagcagaaaggcattgcccccgtcagcctgccatgcagtttcgaatcttgattgaaggtaatttaaaagctgagtgatgtacgttcaccatggggctatggagtaaatactattaaagaaaatgacccgagtagatgcaacggtggctagcctcccaaaaggagcttttccagcttattttaaaaaccaccttattaatatgattgaagtattttggtttagggatgtgttacttaaaagagctaggcatgcatgttatttgataggatactggctactgccgtgtaaaataaaaagagctcattttatcatttgttc

SEQ ID NO: 245153 - DNA, 372 bp, Homo sapiens
gcagatctttagcaagcagctcttttccaagacgccattttatccaatctgaattgcagccaagagcttagggacgccgggctaccactcacacgctggaatgttatgtcacaaacggactggcgagaagcagccactatttgttccgtgtttgttccgtttctcctgctctacgaggggctgacgggtgaggaaatacctgcagacggtgccgcccaaccctcctaggagacgccacctcgcgtgcacagctgcctctacgcctgcatcgaggctcgcctggcctctcgctacaacatgtcggctgggtacagcgagagccgcctcctgtagagctgccagggagctgccaggaagctcccggggccagtc

SEQ ID NO: 245154 - DNA, 1316 bp, Homo sapiens
tgagatactcaaaatatccacagtggttgaatccatgaatgagaacccatggatatgaaggtcctactatgtattgtaacattttctcagatacagtagataatttagaatgagataaaacagatcaaatggtttaggttaaaattttttaggaagagaaactaacacaattatatttattattgtggttagcaatataaaaatgtgataaacagatgtaagtaatttcttcataaatttttgttgcagtacaccatagattataactgctatctttttttggtaggattactcaaactcctaacagcaagtcgcttcaacagtactatctcagttaaatggacacgataggaaactatttcaatgccatatcattactacaagtatttaaatatgatttacactatgtataatacttttaataaaccatttcccaaatatggtatataaaagtaacatgtttatataagtatatattaaagaataaaattacattctaaattagttttttgaggtcaaaaacaacagcaaaataccaaaaacaccagtagcctaagtaaaagtttgcaattttaaaatgcaaaaatttatcactctgaaatccctgtatatttcttattatgatagagatcctagatatttgacttggagaatactgttaattcagttcaagcaatatgtggcaaacaggtactacagaataaaatataacgatagaaatatttctatctccacataggtaaacttcggtcctcgaactaagcaaggtatggaacactgaagtgccttcaatggtcaggaaagtaacctaagtaaatgaatagcctacatagcaacagaatgtagcgtagacagtggaaaacggagaagtgtcttcttccaacttcatttcaacccaagtattttaaaacactgtgcacattaaacatactaatttggcagcctgaatttggccctgaatataattccattaacctctagactaggtcatccctgaaattctcgctgatctgtattttcattaaaaatgtggccgagcgcggtggctcacgcctgtaatcccagcaatttgggaggctgaggctggcggatcatgaggtcaggagatcgagaccatcctggctaacacggtgaaacctcgtctctactaaaaatacaaaaaaaaattagccgggcgcgatggcgggcacctgtagtcccagctactcgggaggctgaggcaggagaatggcgtgaacccgggaggcggagcttgcagtgagccgagatggcgccattgcactccagcctgggcaaaaagagccagactccgtctc

SEQ ID NO: 245155 - DNA, 453 bp, Homo sapiens
ctcctgagtagctgggattacaggtgtgtgccaccactcccagctaatttttatatttttagtagagatggggggtttcactatgttggccaggctggtcttgaactcctgacctcaagtgatccacctgcctcggccttccaaagtgctgggattacaggtgtgggccaccgtgcctggcccagtttggcagttgccaaaaaacaaaacgtatacttgacaatatgattcagacattccactcctagatgtttagccaagaggaaagaaagcacatgtccatataatgaattgtacatgaatattcataacaacccaacttgatttgtaaaatcgaaaactgaaacaacccaaatgtccatcggtggtcgagtggacgagcaaattgtggtctatacatggaatggaatgtgactcatgaataaaaggaaccggctattgatacacacaaca

SEQ ID NO: 245156 - DNA, 606 bp, Homo sapiens
ttttgcaacctctgaggctccttaaacatttttgaattgctgtagcctaggcttgttttgtaaaaagtgcttgttgctgaaaatgatgatttgtttggataaaccccctcctcattttttgggtggtgggggagctttttattgcatagtcacaatgggaggcattgttcacacagaccagcatcgtcatacttctattcttgtcactgacagtattatttgcaactgctttttttccagcctcttctaatttccacactaccacttattgtatttcattaaagctgggttagaaatgcaaggcatataattagattgagaactatgctatcgatttggttttccattatgatgttatcacatgcacaaaaaagtcatttggtacaattgttatgattaaaactacaaaagagatctattacatcagacttagttttcagtgcctgatgcagtgtaaaataagagtgagaggggttgatctgtttatattagagctgcatatgccatgtaaccataaatgtctgtaggctaataatttcaaaggaacctttagtagatgagaggttttttagaaattcatattaaataaaagtcaatcaatacttc

SEQ ID NO: 245157 - DNA, 383 bp, Homo sapiens
ggtgcttcgggagccgcggcttaaggtgtagacatggcgaagtccaagaaccacaccacacacaaccagtcccgaaaatggcacagaaatggtatcaagaaaccccgatcacaaagatacgaatctcttaagggggtggaccccaagttcctgaggaacatgcgctttgccaagaagcacaacaagaagggcctaaagaagatgcaggccaacaatgccaaggccatgagtgcacgtgccgaggctatcaaggccctcgtaaagcccaaggaggttaagcccaagatcccaaagggtgtcagccgcaagctcgatcgacttgcctacattgcccatcccaagcttgggaagcgtgctcgtgcccgtattgccaaggggctcag

SEQ ID NO: 245158 - DNA, 575 bp, Homo sapiens
agcttcggtttccttgtttaccctgccactagtcaaatgttagctacaaaaatatcacatgtaggcaggacctatcagagtctccatatctcagttatattgccactacaaatcacatatctgaaagacaatcataagaggcattgctaggaaccaggggacagaatataatcagatatattcatgcttgtttgccctgggcaacttttccccatttctaaaacgacatcacagtttttcatttctcaggttcacacagccaatattacaacagggttaaatatcagaaagcaaagtgaaatctcagttagctgtatgttctacatatggcaatatgctttattacatgggacgattaggtaaaatgacctttactctgtgacattgcaagaattaaaattaaaaatcaaggtccatcttatcctttcttagctgaaaaagcctaagctgatgatgagaggttctgttctttggtatgattgtaagcactttagatcagctataaagtgtatttgattggcaaatattttctcatacgtgtcctattttgcagattagagagaaatgtattattt

SEQ ID NO: 245159 - DNA, 528 bp, Homo sapiens
cttacacccagctgcatgttaactcccagcccctatcaggctgattggttctctcgactgacatagggaatggagagaaaatttagcactttctggcttcatcagcacatgatgacataattctggaacatgcctgaaatcctctgggcctgcctcaagaagagatggaagctattgtgactggacccggctaatcttcagctataccatttggggagaagaaacgaaagaaaggagcttcattccaaacggttgcatctctgcataaagaaaacctgaataaattgatgactaatctgaaatcaacagcacctcattttgtgagatgcataaatcccaatgtgaacaaaataccaggtatactggacccttacttggttctacagcagttgcgctgtaatggtgtcttggaagggactaggatatgccgtgaaggttttccaaaccgactgcagtatgctgattttaaacaaaggtactgcattctgaatccaaggacctttccaaagagcaagtttgtgagcagca

SEQ ID NO: 245160 - DNA, 518 bp, Homo sapiens
atgaccgaggcactgctcccctgcggtgatgatggctggggtggcagggaagacaatccacttaaccttcatcaagctcctgtcattggccacatattacaggaacaggaaaccaagtactgcacattctcacttctaagcaggagctaaacattgagtacacatggacacaaagaaaggaacagttgacaccagggcctactcgagggtgagggagggaggagagaaaggatcggaaaactacctatcaggtactatgctcattacctgggtggtgaaatcatctgtacacccaacccctgtgacatggaatttacctgtgtaacaaacctgcacatatgcccctgaactcatagatgagacagcgaagactcaggatagctggtccttgaagattagtgtcttgggttgaatggtggcctccccccctaaagatgcgcccaacctctggaacctgtgaatgtagatttatctggaaaaagagtccttgcagatgcaattaaggatcttgagttgag

SEQ ID NO: 245161 - DNA, 434 bp, Homo sapiens
tgccaccacctgtgtgcagagcttgggacaggggaagtcagatgtggtcgggagcctagcactgcagagtgctggtgagtccagactctggcaaggccaccatgccaccaagagcgagcacagcctctccccagcagacctgggctcccacacgtccccaaaggagagcagcgaggcactggatgctgctgctgtgctctctgtggcagagtgtgtggagcggatggcccccacactgccgaaaagtgacttgaacgaagtgaaaaagctgctaaaaaccaacaagacgttggccaaaatgcttggtcacatctttgagatgaacgataatgatccacgcaaagaggaggaaatttggaaatacagtgaatatatggcagatttgactcaaagaggaaggatggaaaacatctcatgcttcatgagctcactgt

SEQ ID NO: 245162 - DNA, 592 bp, Homo sapiens
gctttgttgctcaggctggtgaaaggattaatatgcaaaaaaaaatttttaattacttaacactatttaagaatcttcttctaaataaacaacttctgatgatgcaaaacaatatgaaatgccttgatatcatcatggttaacatccacactggtcaaatatcagtatttcagtagccaaacaaaaaatttattttaaaaattgagatggaaatttaaaaaatttctagggaaaatcctttgtaagtttatatctaatttaacagtattcaaaagtgtttaaattctgaaaagttaaacctagatagctttttgttaagcacttcctttaaaaagctgaagactatcagctagctaattgtgaaagctgtactacttgaaagcaccactagatgacaaccttgtttcacaagtaaaatattatactcctgttgaagctaagaccctgaagagatactaaactagcttaaaggtttctgacatttgttttttgttggagagtagggataacaaagaaaataaaatagactactataattttgaatttgtgtttgatataaagatcactcagggtttaaaaaaaactcatttag

SEQ ID NO: 245163 - DNA, 305 bp, Homo sapiens
ttctgtttttctctcatgctttagcgagttcctttcacattcggttttcatgggacaatactgaaaaaaactttaagacccagaagtatgaaaattggctcagcttaatccataaaagtcaagttgctttggatcctgggcattgtcccttttggccagtgatcacaagcccaatttcccttccatgctaccatgtagtcttgttgccagttttccttatatatcctcaaggttctttgtaagcttattcctttaatcaccaggcatttcttccctcaaatctcaaataaatggatttctcttct

SEQ ID NO: 245164 - DNA, 471 bp, Homo sapiens
cttggaagcatgtggaaaggtttgttctttttgtggatattcctactacctaggcaaatcagatggaattgcattcattacatggctaagtcaggacagttgaggccaactttagggatttttccgaggtgccatctatctgcatcgattgatttcaagaggtgtttgctcaggtttccgtttgctttcaagataatgtctgaacattaagttaaagttaaggctttaccatttgaaatgcagttgtaataacatttttagctctctccaactagctttaatttcttaagaacaacttgaacttctatgaaatgtattttaaaaaccaccttgtttgttttctgagtgtttcaggacttatattagagtccctggcctttagtcttcattcaagccaaacaaccattatctttaattgaagctgcttctactggaagccaaaacaattggtggagtcagtgaagaaagaaa

SEQ ID NO: 245165 - DNA, 259 bp, Homo sapiens
gagacacctgattaactaggcttggcctgccttggccgggggatgaaggctccgggaagtcccaaggccggtccttcaggcccctgagaagtctctcccgaccccactggctcttccacttcaccctggggattgacctagtggagtggagggctgcccacctgcttcctctcacagcccttcaagatcacggatagcccttcctgccagcagatgtctgctaaaaagaaataaatatttaaaacatttttaaaaagga

SEQ ID NO: 245166 - DNA, 345 bp, Homo sapiens
catagatgagaatttggaaaatatagaaaaatttaagaaaaaccatgaagagatgacttcaagttagcatgtttcattcacttacaattattttatgtatatgtaaacatttttaatttttattttggataaaattgaggttatatatacagttttatattctgtgtttttccatttattgcagtttagttattttctcacatcaagtgccatgctgtatcttcaaaaatatgtttgtataatattatacagatgatgaagttatttaaacatttttgctattgtcatttaagtggttttgtaattttgcaattataaataacgctgttgtgttatttatgcata

SEQ ID NO: 245167 - DNA, 431 bp, Homo sapiens
tgggaggccaaggcaggcggatcgcaagatcaggagattgagaccatcctggctaacacggtgaaaccccatctctactaaaaatacaaaaaaattagctaggcatggtggcgggcacctgtagtcccagctgctcaggaggctgaggcaggagaatggcatgaacccaggaggtggagcttgcagtgagctgagatcgcgccactgcactccaacctgggccacagagcaaggctccatctcaaaaaaataaaaaagaagttatatagaagtagaaaaaatattttatggaaggaaaattgaggaaacagaaaagcaaaatattaaaaatcagttagttggggccagttgctcaagcaagtaaaatgtcaggtacaaggtatacctcttaactgatagagtcaccaaaactctattaacagcatcagtca

SEQ ID NO: 245168 - DNA, 414 bp, Homo sapiens
tgggaggccaaggcaggcggatcgcaagatcaggagattgagaccatcctggctaacacggtgaaaccccatctctactaaaaatacaaaaaaattagctaggcatggtggcgggcacctgtagtcccagctgctcaggaggctgaggcaggagaatggcatgaacccaggaggtggagcttgcagtgagctgagatcgcgccactgcactccaacctgggccacagagcaaggctccatctcaaaaaaataaaaaagaagttatatagaagtagaaaaaatattttatggaaggaaaattgaggaaacagaaaagcaaaatattaaaaatcagttagttggtgactctatcagttaagaggtataccttgtacctgacattttacttgcttgagcaactggccccaacgtcga

SEQ ID NO: 245169 - DNA, 721 bp, Homo sapiens
catctcccccattttgaaataaagatattgtcaggggaaggacactggaagaatgttgttaaaatccttggtcctcatctgttttgacccattttatgttttattatcatggaagactctttgcttctcaaagtatgggccaaatgtgaccgtgctttcattttaactccaagatacccggggtagcctagatgataatctaatgaagtctagccctggcacacgtcagcaagttgcacctagccaggaacctacacagagtgggtacttagtaaatatttattgaaaaagaatttgaatagcagtaatcatacttttccaaacactacatgttctttttcagtgtgttttgactctttcctcatgagaacaatgaaaacttgtctcatattcaatgactaaaataaattttagcagtttcaagttttatagaaaaattcatgagattgagaatgagcattagctgggtctaagtttccttacacagggcagctgaatcttgacattgtatttatcataaaagtgatatgtttatagaaaatttggagaaaataaatataaagaaagaaaattacctatgagtttatctattaagatataaacatgattaacatttagtttattttcctttttgtcctttttgcaagcatatatatacatatacgtgggataaatatctatattaattgaattataattttactatgcatgtaattcactt

SEQ ID NO: 245170 - DNA, 298 bp, Homo sapiens
cgccagtcggccggagcgcgagagccgggacccgggctgttggcggcgcacgccggggaggttgaggcggaggagcgcgcgttcgggcgccgcggacgctgtcctgtagcggtctcgccggcctcggcgtccggactgtggcaccgcgcggggactccccccgcgcccccgctgccaacgttaagcgagggccaaagcccgccgcccgccccccagcatgcgcacctcgtacaccgtgaccctgcccgaggacccccccgccgccccctttcccgccctcgccaaggagctgcggccg

SEQ ID NO: 245171 - DNA, 1624 bp, Homo sapiens
  misc_feature (914)..(914): n is a, c, g, or t
tggattaagaatcaggagaggtggggctgggcgcagtggcttacgcctgtaatcccagcactttgggaggccgaggcgggtggatcacgaggtcaggagttcgagaccatcctggccaacatggtgaaaccctgtctctactaaaattagaaaaaaaatagccgggcattgtggtgggcgcccgtagtcccagccgctcgggaggctgaggcaggggaatcactggaacccgggaggcggaggttgcagtgagctgagattgcgccactgcactccagcctggcgacagagcgagactctgtctcaaaaaaaaaaaaaaaaaaaaaaaaaaaatcaggagaggtggggtgtgttttatgactttaggcaaatcaacctaagagacagttttctcttctgcagagttttaggaaagtcacaaattaatgtacttgaagaaagtgtacaatagaatagtagtattaccaaatcctaaagttcttattgtggaaaatctctgaaatattacctgcctatgtagatgccaacccttcagcaatccagacaagcttattatcttttctggatgaattaagtgtccacagttttgtacctcttcaatgtgattactttgtaggctagactgcagactgttaattgactactttctggtaccctctagctattgtcttgagacagtaaaataattactgctctctagctacatccttagcattttcctgttctgaaatgaaatcattttcttatgttaaaaataaagttaattactgttcaactcccaaggtgatattcagctgccacctcttacaaccctctcttcttaatctgtgtaactattctacagcccaggaatagcctgagtttattaaagtcacccacacagatctggctcttttcaatcaagctgccctcanagtgccagctgatgatactcccaaggagactcacaagcccactgctgcctgcagttcagacagagtccatgctattttaactggactcttggcactattagcactgacacaatgactccttaaattacgaattacaacaggccattctattccgtctgtgcttctaatgctgtcaccatgtgattttcccccagaagagatatttcccaggtaggggtatgcttaacatgcagttacggaactgagagttaatgtcagaagaaagcttttgcagtgtagccacagaatagttacaggctacattgctcagcatgcacaaataaaagcttaaaagaacgtgttaaaggaaagatttccctgtctttttagcctcctacgaacattaagaagaaaaatgttgcgaggcacagtggcttacgcctgtaatcctagcactctgggaggctgaggtgtccaagaggatcacctgaggtcaggagtttgagaccagcctggccaacatggtgaaaccccatctctactaaaaatacaaaatttgcctagcgtggtggtgggcacctgtaatcccagctacttgggaggctgaggcaggagaattgcttgaatgcgggaagtacaggttgcagtgagcagagatcacgccacttcactccactccagcctgagtgaaatagcgaaactccatctcaaaagaaagaaaaaagaaaaga

SEQ ID NO: 245172 - DNA, 306 bp, Homo sapiens
acaatctgatttcaattttagtggtctgcacatctcctaaagtctgctattagctcagattaggaaactgaaggattgaagaatcgagatgaactgaattggaaaaatatatgtatatgtatttgtggagaacgccatgtgaagaagaaaataaaatgttctgaaattaggtagtagtgttggtggacaacattgtgaatgtactgaaagtcactaaactgtacattttaaaataaaatggtgaattttatgctacataaatcttaccttattaaaaaacataaaaacacttaggggcattcaacc

SEQ ID NO: 245173 - DNA, 358 bp, Homo sapiens
ttgcacaacacacggaagcattagtcacaatttatatagctgatttcatggagctgaattctatggtgtttatagccgttgagtgtcttctcccagaaattggaaagatgccccatttgctgtaacacacacgacctccaccccattcttttcctttgtaacccaaaccacaatgtgtaattgtgtgtttattttgtgtttaatgtttatctcttcgcccaggctctaaggctctatgagggcagggatcacatctgtttagttcacccagatttcattatatatccagcattctacactctgtaactgcttagtctcaactctgaccacacattaagtcatcaagggagttaacaga

SEQ ID NO: 245174 - DNA, 745 bp, Homo sapiens
aaacagagcaaagtaggtatggatttcagctttcttttaaattgactccaggaactttaccgatggactgagcaaccaacagggacagataaatttaagtcacaggctcttcttgatgtagaaacacagcgttttattttaaagaagaaaagaaaacaatatttactgattatcttattgatcttttctagggactttaaaaaatactgtaacggttaatattgagtgtcaacttgattggattgaaggatgcaaagtattgttcctgggtgtgtctgtgagggtgttgccaaaggagattaacattccagtcagtggactgggaaaggcagacccaccctcaatctgggtgggcaccatctaatcagctgccagtgtggccagaataaagcaggaaaatgtggaaggacttgacttgctgagtcttctggtcttcagctttctcccatgctggatgcttcctgccttagagcattggactccaggtcttcagcttttggactctcggacttacaccagtggtttgccaggggctctcaggcctttggacacagactgaaggctgcactgtcggcttccctacttttgaggttttgggcttccctactcctcagcttgcagatggcctattgtggaactttaccctgtgatcatgccctcagcttggactggaactacacccccagctctcctgggtctccagcttgcagaggaaagattgcaggacttctcagcctccataaat

SEQ ID NO: 245175 - DNA, 344 bp, Homo sapiens
aagtttacttttctgtctaggtgtccttgtactttttaaatatataaatatgctttttcactgagtagcaatagaagtagtatttttgctaggcttgagttgcttactattaaaaaaaattatacttacatatttataataaaacctaatcttaggctcagatgcacatacaactaaagagcagtgcttgtcttttgcttaatgttcatattacaaggttaacttttatttataattaatatatgaacgtgttcttttttaaaaaatacacaatgtgatggataaatctaatgtcctttttgataatcaccctggttttaagaatataactgtctagagaaact

SEQ ID NO: 245176 - DNA, 273 bp, Homo sapiens
tctttctctatcaaatcagatgactgccattgacctcagaaatttaggatatctggttaaccaaaatggttaaacagacttttggggatcttgcctgagttctgtagctgaggattagtgatctcatacccagagacctctgccactgccagatctgtgctgaaattatacatcccactacaagaaatgcatcttaagaaagcctcaagagagacagccttcccagtatcttggtcaagaataaatgtgaaactgctggcagaaacaggtata

SEQ ID NO: 245177 - DNA, 276 bp, Homo sapiens
atagtttcaaggaactgcaactcaccagataactgcacctggacaatgagatgccagacccagaccccttgccaattatggttgcctaagtaacctgctgctgcctgttgaccaccttctcttcttaatcctctcctaattcctatttttccatacttagttacatttcttcccttatttttctacctctaattttagtccattgagaagatggatttttgagtgatgtcccattctccttggctgcagcatccaaataaagcccctttccctggc

SEQ ID NO: 245178 - DNA, 587 bp, Homo sapiens
ttttttttttgagacagggtctcattttgccatccagcctggagtgcagtggcatgatcatagctaactgcagcctcgattttttaggctcaagttatcctcctgcctcagcctcccaagtgggtgggactacaggggagcaccaccatgcctggctaatttatttatttattttcagtagaggtgaggtatcgctgtgctgcccaggctgtcactcagtttttattaatattgttattatcaacagtctcagtgattgtctcctcctaggcttagatgctaatcacatctaaccattgcttcaaattatttaccacgggattcatggcattgaggaagagaatgtgggttactgacactcatccatcatcagtagtggaaaaatgtccaacaacacacttaattgtacagagcatcttggccaagtcacgtgccctggatggcgctgcatttgcctgaaggacgggcatcttttttcaattcacgcaaaagcacggtatgtgctaggagtggcccagaaaagaactcaacagcatagactctgatagtgaactgatgccaaacagtgggcattattgatcccacga

SEQ ID NO: 245179 - DNA, 455 bp, Homo sapiens
ggagctggtttctaacgatgacagtcagtctctgtctagactctgtgctcttaactgccacatcacactgctgcaatgagatggtcagtgaaatgatttttccagatttaaagataccttaattaagcggttgacagatctctccttcattcttactctaaggtgtcatgtctttgcataactaagaaaatagaagcaatcctaaaaggtcttttgcaaagttgtaccaccatatctgtccgtctcctaccatctctcctccctcctgttcctatagatgaactgtcattgttattatcaaagtctcgtccctctgctggtacattcgattcctacccccacttttctacttaattgctccaacagttatcacctttgtgttgcattatcaggttttatttctctacaaaattattcttatcagctgttatttctcctagatataaaaaaaaagc

SEQ ID NO: 245180 - DNA, 794 bp, Homo sapiens
attaatatgttgaaatttaatcacaaatgtgatggtgtaataaggtggggactttgggactttattaggtcatggagggggagcctcataaaaaaggctgccttgccccctccatcgtgtaaatcaccatctgtgaaccaggaaatgggccctcaccagacaccgaatctgccggttccttgatctcggacttcccagtctccagaactgtgggaaacacatttctgttgtttatgagccacccagtttaaggtattttgttatagcagcccagatggactaggccaccaccatagtcagggaagagctggctgatttgtgcgtgtctgcgctgtgtcccaatgaaagcacaataatcaatgaacattgattctgcaatcgatgtttgaaggtcaaaggagttgggaaagggggtctcctgaagccaaggaaaagcattgtactccccaaaactgtgccagccaggttaactttttgcgagatgctacagattgagatgctttagttttacttctggctctttaagccctactcaagctctaattttgatatctcgttctagacgccttagtttgggcccctcccaggctcccttctgtttttgttctttttttctaacatcatccttggcttttcttctcctttaggtttgatctcctgtctcttgggttgagaaaccatcccctctgactcctggccccctgtgacccctccaaagccccctgtacaggtctttggccacacagagattcaacagtctaataatctaaaattgtaaatgccaaaaaaaaaaa

SEQ ID NO: 245181 - DNA, 555 bp, Homo sapiens
tatagtatgcatcagtatggttggaaaagcttcttctatcaagtttaacaactttctggtgtaacttctgagagggctgattgcttattcatgcggaagcaagacgcccagttcattttgcccgtttttgctactctttgttgggtttgggaggctgttatggtagctgcaaatggcttctcaagtgacatttgctgacattcagtgaagtacatttatcagtattcgccagctcacctctacacatgcaatccattttgttttgttcttcatagcaaactcctttccgacacccgtgccctgaaaatgataaatggcaaggtggcatatttctgaagctgcactcaagtgtcactgtgaaaaatctttaatggactaagtgtagcttttcatgttacagcttgtcaggtttgatctcctgtctcttgggttgagaaaccatcccctctgactcctggccccctgtgacccctccaaagccccctgtacaggtctttggccacacagagattcaacagtctaataatctaaaattgtaaatgccaaaaaaaaaaa

SEQ ID NO: 245182 - DNA, 128 bp, Homo sapiens
ccctccctccccattctgtttctcccattcctctctccactcatctgcccatccatcctagatactgggtcaatgacattcacaagagcctcctattaaagaatccagaattagcctgatgatagaga

SEQ ID NO: 245183 - DNA, 495 bp, Homo sapiens
ttcatatcccatactccctctctcagaaagctgtgggaggacatgtactgtattataatccatgaataagccagaaaggaattcatagtgtcagaaaacaggacagccaacacagcaaagtaaaaggaattccaggataattgcaaatgtctcaggatgataccttatatctgacctagaaaacaaccagtccagaatggagtatgaggacagaaaattgatatagaactcttgaagggggaaaactaaactgatatatgttgtgttcgagcatattggaagcagatatgtaacagagggagtttaaagatgaattagtaatagaagattaagtgcattaaaaaatgaggcaattacagttctaggacaagcaaaaaatttgtgagaggaaaatataatagttcactacttggcttagctgtgaacaatatttatgtaattataaccctctaaacattgatgtaacaaaaatttgtgataaaactctattggaaa

SEQ ID NO: 245184 - DNA, 106 bp, Homo sapiens
tgaactctccttttgttccagtgttttcttctgtgtttccactcaactgtttttttaattgtgattttaaatactttgacactatgtttttaatgttcttcacact

SEQ ID NO: 245185 - DNA, 441 bp, Homo sapiens
aaataactcgaatatccataatcgaggctggttcaaaatgtatagcacgtcattccagtggagtgctccagaactggaaggaaacgaatagagctgtgtgtgctgatacagagagattgtcgaggtgtatcaccaggcatacaaatcaagacatagaataatgtgatttctgtgtccccatttgtattgtgtgtccgcagggacagtatctggaaggtacaccaggaactgctgaggagtggaactaggactctgagacaaaaggggtttgcttttcattttaaactgtattattatttgaattttttaaaaatcaaggactgttcaggtgcaatggctcatgcctgtaatcttagcactttgggaggctgaggtgggtggatcacttgagcccaggagtttgagaccagcctggacaacatggtaagaccctgtctctac

SEQ ID NO: 245186 - DNA, 238 bp, Homo sapiens
catctcatgggaatgtggtgaggattcattgtaatgatgcaaatgaaataactaagcctgactgcctgaaactcacacgggagatcttcaaagaatgttagttctcttctccatctattcttaccaacaaaagaatgcagaagacctattttcaccagaaggaggactggaaccagagttagcaggtatggagtcacatgggtgaatcaataaaacccactcaaaatttcatctatga

SEQ ID NO: 245187 - DNA, 349 bp, Homo sapiens
tgaaagctggacactgtggcatgtacctgaagtcccaccttgagaagccaaggcctgaggatcacttcagcccaggagttccaggttgcagtgcactattatcccatttgtgaacagccagtgcactccagcctgggcaacaaagtgagatctctgtctcaaaaaaaagaaaaagttgatgaagagtagattgaatatggttttatagtacttttaagttaaaagctggggattgatatggtagcttatgcctgtaatcccagtgctgtgggaagccaaggcaggaggattgcttgagaccaggagttcaagaccagcctgggcaacatagcaagacctcatccctaca

SEQ ID NO: 245188 - DNA, 228 bp, Homo sapiens
ctgagcggccgcccgggcgtgtcgcctcccggctgtgtgactcaggcaagcactgtgcctccctgagccacgtccccatctgtagggtgaggccaggagactgaaatgggaggtagaaaggcccctgcacaccgtgggcattggatgagggtcgctttcctccttccctccacctcccccattggagtcttggttcatccactactctgacatgtgattgtcatcatt

SEQ ID NO: 245189 - DNA, 651 bp, Homo sapiens
ataatcagtaccctgtcagggaaagagtaaacagatgattaggtacctcaaacttcaagcccagaatagttaggtacttatgatgcatgacaaacagcataaatggctacaatacatgttaagtataagagatatatttaaaaataatttagctgttttttttactgtatctaaaagtccccaactattaagatatctaataaatattcactttttaagctaaaagaagttattatatggctgtgtatacactgccttcttggtatcctcaaatattctggagttattaaataatcccatctaacatgtgagtcaaaaatgtgtagttcatacctgggtttcttcagctgagcaacagctgtatgtattaagtcagattcttggtcttcccaaaacaaaaataagtatcagataataataaagctgaaaaattaaggattgcacttataatatcggcctcaaaggtcagggatatgatgatgatggtgatggttatcacaataattaacagcagccaacacttttatagcacttattacataccaagcatgactctaagatccttttttttttgagacggagtctcgctctatcgcccaggctggagtgcagtggcgtgatctcggctcactgcaagctctgcctctcggg

SEQ ID NO: 245190 - DNA, 598 bp, Homo sapiens
ataatcagtaccctgtcagggaaagagtaaacagatgattaggtacctcaaacttcaagcccagaatagttaggtacttatgatgcatgacaaacagcataaatggctacaatacatgttaagtataagagatatatttaaaaataatttagctgttttttttactgtatctaaaagtccccaactattaagatatctaataaatattcactttttaagctaaaagaagttattatatggctgtgtatacactgccttcttggtatcctcaaatattctggagttattaaataatcccatctaacatgtgagtcaaaaatgtgtagttcatacctgggtttcttcagctgagcaacagctgtatgtattaagtcagattcttggtcttcccaaaacaaaaataagtatcagataataataaagctgaaaaattaaggattgcacttataatatcggcctcaaaggtcagggatatgcacttattacataccaagcatgactctaagatccttttttttttgagacggagtctcgctctatcgcccaggctggagtgcagtggcgtgatctcggctcactgcaagctctgcctctcggg

SEQ ID NO: 245191 - DNA, 844 bp, Homo sapiens
gtaaagagtgcttggtacaacaggaggcacagggtaaatgcttgggtaatggaactactgtcattatcacccatctggctgcatgttacaaggtcaatgagataatggatacaaaatgtaaactagatgaacataaaggcttattatatagaccagtgtgtcctgaagaaaactggtgtcctaaagtgtgtcctgcagaaaactagttccctggaatgttaatagctgtttctaaataaaggttttgcaggcaatatgttttgagaatgcagagttaaatgagaatacaataagtttctttattgttaaagtatttaatccctaatagtgatatacactgtgaatcttcaagaggacagagtaagcaaacctaactgaccaggagtggctagagtattgtcagttccacagaacaaatgtgagagaaagatctggatttggtgttagggtgcctttaacatctaacactggttaactctccttttaaacctgttggcttggcattataggttaatccatattcaggttctcagacctgggaggcggggagcttcgtgatcatcttgttcagtgttttccaaacctcagtcattccaatacctccctgattcttgtcctatctaaaaatgccactgcatgccagcctgggcgacaggggcgagactaataattaataaagtaatagtaaggtgtggaatgaacggtcttaatctgctaaatgttgttgctgaggaggccgactggatccattctgacttttctaaatggctcccaggtccgcaccctcttttttggggaggccctggcccggctggaacgccgcccccggggaactccccccggg

SEQ ID NO: 245192 - DNA, 267 bp, Homo sapiens
ccttttattattttctgtccactagggacaccgtgctcttaaatatttgggtatcaaactgaataaattaaatcataattaatggttttctagttgtattaataagaagtatacacagattgcaactgaaaaaagaaaaatgtacttgttaatgagatggatgatattttacttagtctgtgctgactgagtgaggatgaacaatatacactgtgttttgaatttgcttgtgagcatggtaaaataaaaatatctaatttttttcag

SEQ ID NO: 245193 - DNA, 457 bp, Homo sapiens
gccttgtgacttattcggccgccctcgggctttgagaaagttaagcactattttatatttgataatgctttttgtatgattttatgttttttaacattaatgtgctattaatgttaaactttattttaataaaattttgaagacattatttacttttaatgtctgactataaggtaaggtttttatagactttttaaaactttttataatttttcttaaagagcaggttagtgctttaagaaaaatttattgtgcttttattttaatgtttagtttacagaaaaattggatacctctttagctaatatgtttacatacagaattttctttataattaatatttttaaatttgtttaaacttttttttttggagacggagtcttgctctgttgcccaggctggagtgcagtggtgcgatctcagctcaccgcaaattccacctcctgggttcacgcca

SEQ ID NO: 245194 - DNA, 395 bp, Homo sapiens
tctcccccttttggttcctaaataagatggttacaagatgaaaggctacacacctcccccatattttgcacacaagaaaattcctggtgagatgttaaaacttcaccatggcaatgcaacttgatagcttatctttacaggtgcagtcaccctggcccgccggacacaaatgcatatctgatttttttcctaccccattttgtctgttatgtaaaatgcagattccccacatttttcttctgcccccttttatgtaaaaactgtgtgcttctcaatatcccaccctttcccctttaaatttggagccctcaaaatcatcttcagaaaaaggcatagacctgtctcctgggtgtgtccttaactttggcaaataaatttctaaaatgactgagatg

SEQ ID NO: 245195 - DNA, 370 bp, Homo sapiens
atccacagcaagaaaatcaggccacagaaagctgtaaagagccttgggatggagactgagaagaggcaggaccacctctgacatttacgtcagtagtgagaatcaggtggactgatgaaacctctagtaaaccaaaggcaccctacacctacgatagttgttaagatgtgcacagacgtaggattgacccacatcaaaccatcagaggaagcatgcagagatgcagcatgcacatgactctctaggcctcagtttcctcactagtaaaagagacaactttaatgagttggtatatgcaaatgagttatgtacaaatgaaatgaggtatgcaaatgagttgatgtacataaatgagttgatacatgcaaat

SEQ ID NO: 245196 - DNA, 471 bp, Homo sapiens
cctaggaaaggaggaagagctggtatccaaagattattgttcatggccctctaccagcgacagcttgtcctcctgagccatcttgcctagcatttgaatgatttagcttttaaagtatcattacaaagctttgtaatttacagtttttttttagctgtattactaccagatcctgatagaaattgttattatgcattatctagcagattcacaatattcttaacctgaacttttctcagatagaactgtgcatcctaaaacatagatgtggtggattctaaatcattgttcccaaacaccacaaattaccaactatttaaactcagacattattttatgtgttaagccagtctgatagggcacattgctttacctaccaaaatgtatatgtgatttttttttaaaataccatctaaactatcataacattactgataaattaatttatattttgagacagtatacattcca

SEQ ID NO: 245197 - DNA, 141 bp, Homo sapiens
cccccgtccctaagcgtgctttcaggatgatgcccccagagccttaattagcatcaactggctactgtctgtcggtcctgagcaaattagtgaagctcccagtcccctttcctcgtctaaataaactctgtctctctggaa

SEQ ID NO: 245198 - DNA, 434 bp, Homo sapiens
tcataacacaatcatgcacttgagtttcaatctggctgtggattttagagcacagattaacagatgcctatagagtctatataattttgaacgctagcatgtaaccctcacaatcactctcactagaatcaattcatttagggacatttggcttttctcttccaggcattctggaagtcctaagtgggtccacttgccatgtagcatagtgagcagttgttcagcatgtaggttttgtgcaagcagagctatgctaaagtaacagctttccttctacgagcttctttgacctggggaaaaattatcagtttctttatcagtaaaacagggaaataatacctagtttcaagtggtattgtgattaataaattatataaagaggctgtattcattatgttttgctgcctaacaaattaccccaaaatgtagtggcc

SEQ ID NO: 245199 - DNA, 371 bp, Homo sapiens
aataacacataggccaaagaattctcaagagaaatgttaaaaaatattttgaactaaatgaaaatgaaaatatgactcatcaaaatttgtgggttgcagcatacccacatttggtcattagacaacatacttccaaacaacacatgggtcaaagaagtctcaagataaattttaaaaaatattttgaactaaataaaaatgaaaatatggcttatcaaaatgtatgggatgcagcaaaagcagtgctagaggaaaatttatagtattgaatgaatatattagaaaagaagaaatatgtaaaattaaaaatctaagcttccaccttaggaaactagagaaagaagaattacataaacctaaaacagaagaaa

SEQ ID NO: 245200 - DNA, 1756 bp, Homo sapiens
gggagaaggagaggcaaggaaagagggagggaagaaaggaagaaaagaaggagggagagagggaggaaggaagaaggtgcaaaaagaagctagcaggaatctgatttaatttcttgctgcaaaggaggttatcatctaatacacctattctattccaggcacttttctaggtaaaacagatgtgaatctagcttcatggagccatgaaaatacagattaggtatacaaataaactaacaaataaatctacattacaaactttgattactgctatggaagaaaaatacagagtgctctaagagagaataacaataggaactgtatttaaattgaaggactataagaggagtctgaggatatgaaaaatagagctgatgcccaaagatgagaaaaaattaattaatgaggacaaataaggtaaaaccattcccaatagaaaaaaaatggaatctacaaagaaaagaacatggcacccttgatgagctgagataaggccaacataactaaaacagaatgagctagtggcatgagatcagtctgcagagacagtcatgggccagcttatgtaatgtctttttggataatgttaagcatttgattctgtcatcattcttagttcaacagaaagccactgacggctttcttcaagcaagaaaatgagcttatctgatttacattttttaagtcactaaggttgctaggggaactgattaagtatctgctaatgtaggagagatgacaaattatacaatggtgatagccacagaagaaaaaagaagtagaaagattctaagtacactctgaagatgatactggtagcaaaggtgttagattagattagatggggggatgaaggactgggtagtgtcagcaataattttcaggtatctccctttggcaaaaggatggattactgaggcaatcaagtctaaggtagaaagggttagggaagaaaaatgagaagctatcagagttttgttttggaaatgtttgatttaaaatgcctgaaggctatcctactgaagctgtcaagtaagcagcagggtatacaaatctgaagtgcagaggagaactgggctacagatgccagtttaggacttcttgggatctgaaaggtattgaaaatctgaaaatactcatattttatacattaagaagtatggaatatattgatgttgatagcatcccaaagccacagagcacacatttaatttgctcctagtaacacctatgagtaggtattgaaattacttttaatgatgaaaaattagtaaaatatttccttgtattttactatagtatactcccatgtcatctataataactgagaaccatctctatcaaaagatatgtttttaaaagcttatctaacaaattattaaaggaactaaaattttacaactttttcccctagatacactatacctttcctccactgattctctgtaactaatctgcctgcaaaatgggtgattagtaaaaacatttactgagtgtataaagtacatgtaggggtatacagaaacgggaagtagctcacccattctccactaagttatttcaactttcctctctggagggcccataaaagaatatggcagcaatgtagtatcaaactaccacagatgctagagttccacttgctataaaacctcacttagtttttctaatctgattctaatctataaaatttggataatactataccttttgagttgtgaagtttaacagataattaaaatatatatttatccca

SEQ ID NO: 245201 - DNA, 460 bp, Homo sapiens
gccttagaaaaataaataaataaataaataaataaataaatagcttggactttccggggttgcagaaatccgatttcagccgggctatttaccaaaatttgtttcaaaatgactgcacctttgcttttgcaagtcacagaatgcaaatgacgataatttgttctcagaagaagtttctcttgaaatgattagcaaagtcagtcatttgaaaattagaacgaagcccttcgctaactgatatctgcttctaaagttttcattcatgtaaacctcattaatgaagatcttttatttaaacgtcaaggggatttgaaatttagagtaaattatgaagcttgtatgtctagccaagtcatgggtcaaatgcatttgtgaaaaactgctaaagagcatatggttttgaatttttctacaatgactagtgtttaaataaattgcttgtactgcttaacttcatgtg

SEQ ID NO: 245202 - DNA, 1228 bp, Homo sapiens
catgttggccaggctggtttagaactcctgacctcaggtgatccagctgtgtcagcctcccaaaatgctgggattacaggcgtgagccactgcacccagcctggatatattttttaaaaagaaaagtatatctagttttttaaaaacattaattcactcaatagtcacatctaaacagacatatactatctatgcagattgtaggcacgctgtatacaggttagatgaaaattctttggcattactgttcaaataaaaatataagacaagctggtaatgagagcaatatatgtaattttaaaatttctgtctttcttttttttcttttcttttttttttgaggctgtcttgctctgtcattcaggctggtgtgcaatggcatggtctcagcccactgcaacctccacctcccaggttcaagcgattctcatgcctcagggtctcagagttataggtgtgccccaccacaccctgctaatttttgtgtttttagtacagacgggtttttgctatgttgaccaggctggtctcaaactcctgacctcaagtggtccggctacctcggcctcccaaagtgttgagtttacaggcatgagccaccgcgtctggccaatatatataattgtaaagtgtctaataatggcatttaaaaagtacaaatacagagatctaattagttttagtaatatattttatttagcctcatccatccaaagtattatttaacaatgtaatcaacataaaaattattcttatttgtggaggtattttctctttttctgggatactatgtcttcaaaatccattgtgtattttatacttatagctcatctgaataaggactagccttatttcaagtaagcaggagtcacatgtgattggtggctgctgtattcacagcgcagcttgatagcaatttagcttcaggacttttgtttttgtttttgaaatgaactaaattgccaaacctacatgtaatataccagatacactcatgtccttaatgttatttgatttgtttctttaggacgaacaacctattttattcactttgtttatataaaaagtattattcttaaatatgtactatgcacatatgataaaacatttcacaacattaaatggtaggaaatataaaaaggagtgtcctttcattgcgtctccaagcccagtcccctgaggtaaccactatcacataaaatgcagattttttccacatatatatgag

SEQ ID NO: 245203 - DNA, 380 bp, Homo sapiens
ttgaatcctggttccaccatttgctagttggtagacttggtcaggttatgtaagctttctgggactcgtttctcagtttgtaagctgagactggatggtaatataggtctggcttctgccattaggctctgctgacctacccacacgtcacacagctcacacccttgttgcttagccctctctttttttctatatttgcttaacttctttccttttggctttatcgctcattatttgactctgggtttgcttttcatgctggaagactggttttgtttctctagtgttttggctttcaacccacccataggcatacttttatcacaccctctttctccatttgctcctgacatttctgagtggttactcacccattcaag

SEQ ID NO: 245204 - DNA, 378 bp, Homo sapiens
cacagttctgcaggctgtacaggaagcacagtggcatctgcttctggagaggcctcagggagcttttactcatgacagaaggcaaagcaggagcaggcgcttcccatggtgaaagcaggagcaagagagagagagtgtgttggggtaggtgcactaccatggagacagcaccaagccacgaaggattcgaccccgtgatccaaacacttcccaccaggctccaccttcagcactggggatctcgtttcaacatgagatttgggcgggacatccaaactatatcatctgtctccctcatccaagaccatatgatccgtagctcacttttgtctagcaacagattaaattcaacattttctgtgtgatttcttggttgag

SEQ ID NO: 245205 - DNA, 653 bp, Homo sapiens
caaagttcaaatagtgcaacaatgtttaaaaacacactgttcatacttacgaatcttaccactttataagtaatgaaaaactgttacttcaacagtatttatcaaacaaaatttcttggagacctgatgatagtaggattttgaatgttgactacagggaatgtttcttagtctattgcaaatcactatttcaacaagttgttctaccaggactagcttataccgtagttaatggtgacatagaggttcaccttcctgccattagtcaagaagaaactagagtcctgcatgcacaatcagtatatatctagggattagggcagaatgaaacggaatgtgactcaaactgagattcttcacttaaaagtttgagatacctagttttttaaacaggatgaacttcagttataaatgcaaaggagaaaatacaagtgttctttgtagctcagaagtattgcacatatactttttaccatttcataatgaaatcatggggatttcttacttgaagttactcagtttcagtctctctttgtatactctccattttcttgtgggggaattatctccttatccccaggcttggtaagaaggttattgctgttggtattttcccagattggaagataaaaatggctgaagttggccaggcg

SEQ ID NO: 245206 - DNA, 537 bp, Homo sapiens
acagctgttaaccctttcattacaaaacaatattggtattaatagcatttcccctggagttctctgatcactttgtcttagggaacaaatgcacctatgtagccacaattattcttactacttattctcactgcagagtttctagaagaagggaaacaacgatccattcaaatgccccactgcacttataagacttacagcaaagctgctaaaacttaaattttaaggtgagtgaggtggcataagggaaatgaatgagctgctaatgaatagggcaagacatgattagaagctataacaaagtctgactcaaggaaaggccaaaggttatcttgtatttgatatgtgtgttttaataaattataatcaaaatactacactgactttttcctcagtggattttctagcattctataagagatattttgtctgattaacttgctatattgaaaagtgggagtcagtatatattacttacaaattctcaaatagcctctgaaaaaattccaccacaaagattttaaaaaatggaagtat

SEQ ID NO: 245207 - DNA, 472 bp, Homo sapiens
ttgtgtggtgtgtatatgtggcgtgtgcatttgtgtggtgtgcatttgtgtggtgtgtatatgtggcatgtgaacacgtgtgcgatgtgaggagagagggagtgagacattcacggagcacgcctgtctctcctggctgtggatgactggactctcgctcattaggtgatcccacctcagggtttgtggggagatgtctgacactagagaatgaacatgtgctttggggagaggactttcacatcccacagaaacactgccctgtccaggcttcatgcccacaggatcctggagccaggtcctaagtaccaaaaagcaaataaaagcagcttcttgtttgcagctaggccctcccacccttgaaacggtgggaatacccaaatggtctctctagttgccacaggggtgtcagcacctctgggagatgtgggagggaggtactggtggcaccactaaacctggatggacttga

SEQ ID NO: 245208 - DNA, 373 bp, Homo sapiens
aagtttcctagggaactccttggcttcaaagtctgcgctgtctttacttagactcctggtgggcaaacaatggctcctgaaaggggggcatgaccaaggacagccctgtgggggcagagctgtctctgggatcagctggcatgtggggctggggcatttcctagggcatcgggcggactgggcttgcatctggagccaggtcctaagtaccaaaaagcaaataaaagcagcttcttgtttgcagctaggccctcccacccttgaaacggtgggaatacccaaatggtctctctagttgccacaggggtgtcagcacctctgggagatgtgggagggaggtactggtggcaccactaaacctggatggacttga

SEQ ID NO: 245209 - DNA, 333 bp, Homo sapiens
atcatgcagagcagtggtcttctcaagaccctgagaagttggtccctggaacccctacaccacattcaggtgccatccttattctccctctgctattccttgggactccaaagcttttccttcatcccaggtagtttgaaggacgcctaccttttcagtactctctaaaaatgtaataccttaagtaggagcctatgcttggttatgcttagctcacttgagagacctataataaaagccaactcttaattttccatagatgctcaggaggtaagtatgggcttctgtctccatgacacactttaaaagccttctacttaaaagatatagtaa

SEQ ID NO: 245210 - DNA, 517 bp, Homo sapiens
ggattttattttagcagtatgcccaggaaaaacatacaggaaatactttctcatatttaaaatgatttaaaatgtcaacatcatttcttactctctttcctgaagacttacgctccaatcctggtggttcccattttgaatttttttcctattgcattatttcctatttctgtttttaaaattttccagctaagagatctccctccagctcagtattaaaactaacaccagcttttctttaatttgtgaagagctaaaagattgcctcacattggtgttgtgttttactcagtattttctgcctttatgtaacatctaatttgtttccaggtaggcatttttaaaagctctttaaaggaaagatggcgtgagaaagtagaacacttggaaatatgtttgtagtaagttgcaaaacagtgaaaatgactcactgttatctcctgttattttatcccaagaatataacctcatgaaaattttctttgaacattaaatctgggtcatgtaattatatggg

SEQ ID NO: 245211 - DNA, 206 bp, Homo sapiens
tttcagatgacctgttataacactggatgcacacaactactaaccatgcatttatgcattttgcttattgacctattttttatatgattcatctgctcataaatgttatacccatgtgactctgattaatatacctgtttatgcttgcaaacatatgtatgatgttgttgcctattttattttgtaaggtgacctaggaagtattc

SEQ ID NO: 245212 - DNA, 284 bp, Homo sapiens
caagaaaagtaagatgaattaagaatttgatatccaaagtatctttcaactacaaaaatagccaatagtttaaatatacaagaactctcacaatatatttctcctgatctcatcttggcaggctctttggtcattatcaacagccgggaaatggagaactgggaacatacagcgactacaatgtcagatacataaaagggagtaaaagataaaagtcatgttcctagaaaagttgggagaatgtctaaagaagtaattcatgtaaaaatgctgatttggggaca

SEQ ID NO: 245213 - DNA, 347 bp, Homo sapiens
ggcagaaccgagaagaagacgcgaaggcgcgaaagcgaaggaaggaggcgaacggcaaggcaacagagggacagagacagcacaaagacaacaggaacaaaaaccaaacagccagcgcagcgcaggggccggcctccccccaaccggttaaatcagtactttgtgcttagattattaggactgtaagtattgtttgcagctgagcgacatattttactatgattatgtctgcttacacctcatatcttatatattttgtttttcatggagttagtgactacttcagcaaacacgaatatattacaaaactctcctacagttcacaatatggtcaaacatcaccacac

SEQ ID NO: 245214 - DNA, 581 bp, Homo sapiens
tttttttttaactgaaacctacaatcatggcggaaggcacctcttctcagggtgccaggagagagaatgagttttgagtgaaggaggaagccccttataaaaccatcagatctcgtgagaactcactcactatcataagaacagcatggcagaaatcatccccatgatccaattatctccacctggtcctaccctcgacacatggggattattacaattcaaggtgagatttgggtggggacacagaaccaaaccatatctctgggagagaccacaatgagcaaaaattgcactgtagcatcagttccacacatgtgagtacatactatatacaaggtcctttactgaggcccttctgtgtgtcaagcatcatgctaaacatagtacatttaagccttgaaaaaacctgtaataagatgtacatactcttatatagagtatatagatgagggaacttcaggccagagaactaaataactttctgaagatcgtacaaccaggaattgccaaactaggattcaagttcagatcttaaagtctcaaagtctcccacaaatctaggtcctggggggacactgagc

SEQ ID NO: 245215 - DNA, 306 bp, Homo sapiens
aatgcaggtgcccagggcccatctgtgaatcggggcctctgggggtgggggcggggccctggaatctgcattcttatgaggccgttaaatgatccccacgcaccttcaaatggtacacttgctgctgtcctgaaggcattcaaccatcaatctggagcccaaagagaagtttctggaaactgacaagtgaggcattcttttctcatgactttttgcttttaatctgaacggcttaaaaactatatatagttccccaaaattcacatatgtgatccacctaaccaaaatgacagccaagaaacaatg

SEQ ID NO: 245216 - DNA, 347 bp, Homo sapiens
aataatgagatatcagctcacacctattaggatgacttataaaaaagacaaaagctaagtgccagtgagggtatgaagaaaagggaaccttcacagactgtcagttgggaatgtaaattggtacaaccactctggaaaacagtatgacgactcctcaaaaaattaaaagtaggagtatgacacgatccaggaatcctactgtgggtatatatccaaaagaatggaaatcagtgtcttcaaaagatatttgcactctcatgttcattgcagcactatgcgtaatagcccaggcacggaaacagccccagtgtttgtcaactgcttaataaagactatacgatgatata

SEQ ID NO: 245217 - DNA, 353 bp, Homo sapiens
aaaactatagcaggaaggagaaccaagtaggtttgctcattaaatgaaacttaaatcctttatattctttataatgattcattaagaccaaataagatactacaaagagcaaatggaaaattttaaattacaagattatattccagttatctcttattttagaacccatcatcatcttgtgtttttccccctagctaagtaaatttctgaaccgtattttcttttcttactataatcatatatttttgggatgagttacatactcagccctctgtacccttgggcatctgctgatttagccaaccttggatcaaaaacatttagaaaagtattaatatgacaataaaaaataa

SEQ ID NO: 245218 - DNA, 329 bp, Homo sapiens
ccaaaagttagcattcttgggtagaaaagaacgtagtttataatgtagactgctgagaggtccccccagccacacacacacaaaatgattcaaattatgctgcatacactatacccagttctaacaatattaaggaaaatatagaaattgtgatgttgttttgttttattgttttgagacagggttttactctgttgcccaggctggagtgcagtggtgcaatcatagctcactgcagcctcaaactcctgggctcaagtgatcctcctacctcagcttcccacatcagcctccagagtagttgtgactacaggctcataccaccacgc

SEQ ID NO: 245219 - DNA, 394 bp, Homo sapiens
cttgttcccagcctctcgatggactctggcatcctgtcgcagctgtttctgaacgcggggacaaaagtgtgcgcggcgaattccagcctcagttgccagatgtagtgaccctttaaggaacaaatccacagcaagagggtcacccaggcaagtccagattggaacaagagggtctgactcctccgggggccagggacttggcctgagtctagagggcactcgtggaactgtgagctccgttcacaaacacagacactttaaaagtgacttcgccgtgtgtaatgagtctagctccattctgacattgacggctaacggcattgagacctccacccattccttccccaatccccacacatttactttaaataaagaatcccttggcctccagagc

SEQ ID NO: 245220 - DNA, 326 bp, Homo sapiens
ctgttctctcatttcttctctgtttcatgcaagaaattcatttcagagtttccaggaattacttaagtctctatctgctttcttcttgtctttcaaattgtagaattttttaatttgagaatttttaaaaataaatttgctcaaaaatgtttatgatcacctaacctttaagaagaagcaatcagagagtttattttaagatctagttttttacaagggctaacttaatatctgagtcttcttagaaaacttggaattggaagaaaagagagtggtcttcactatgcaattagaaagctgcaacagatttgtaggctttgcaaaca

SEQ ID NO: 245221 - DNA, 1535 bp, Homo sapiens
gtcactgactaatccataatactaattcagcttctttgtccgagtgggagccagaattttaaaattgttacaggctaaaatggtagagtccacctgagctggatgtgaaggggacagggagaaggagcaagaagggaagtcatccttccccacagggctccatgtgcctctgggtgcaactttgaactttgaacctgaaacttgcactgctcccctccactcccttctccactttccccctcctgctcaggccctgtgtatgtggactgcagctgggggtaagggacagaggctggtactggggcaccagaggtcaagggggaagtggggtgttgagcaagagagagctgttcttgtttggtactgagcaaagcctacatccacaagcagttttctgtctttccagattcttgaactcttctgtgggcaaggagttcatgaactctttagaactggaagcaaccttagagcttttctagctccatgtttgtaaacttttgtaagctatggaacacttacttcaaattgatgcaggatttttgctccttagttcagctaaatccaggttcttgtctcacaaccaggaaaaattagacatgcggacacattgaagggtgaggcaggcagaatttattaagcgaaaggaaaactctcggcaaagagagggtttctccaagcaggtttccctctcacagttgaataccaggtctaccgtggatgagctgaagaggccaggcccctcccctgcataaggtgcaaattcctggtggatccccccattcccccaatgcacatgtgggcatgcccaggcaagccataggtagcatcggaaaaggcaacattcgattggttaaaaggcattattcagaaataatcatagtatccccaggtctaatgcaacccttgtcccccattctacaaattaggagactgaggccaacacagtgaagtgactggcccagtatcacacagcatgtcacacaggaaaccagaagaagggttaggcttacaggtggcatgatggaattagcagtagaatgctgtcatgtttcaccaaaagcaaagctttagcctcacttaatggagaagggaattgtagacagggaagtcaagagtcacacattaattgaagcaggccgaaaaatgagagggaggtggctgctgtgttcatgccagagagaacacctttgaatgaatgacaggaaggtgccctttccagggactgaggcagtcatgcccagggcatatagcttggctgagggcacccaggatcccagcacccatcctgtgcctcgtcccctcacctgcaggcctttatactcctagccatagacagtggcctgcacagcactaccaagaactaccgggagacaagaaagggacactctctagagaaggcttcaaggaaagcttatggccaggcctggtggcttgtgcctgtaatcctaacactttgggaagccaaggcaggatgatggctggagcccaggagttcaagaccagcctgggtaacataagaccctgtctcttaaaaa

SEQ ID NO: 245222 - DNA, 395 bp, Homo sapiens
ttcatgtcttaagagcaatgtattttcctgaaatccacttgctggccagtgtacccactatctttcttctcaagccaaaggttctataaaggtccttatcagcgcacccagtaaagtcacaacctcccactgatgatggtggtatcatctttctgccaatctctggtcaacagaaggatgatggcagggtactaacaataaacatacttatgattgaattctatgtctccttgtggttctgtcacagagatcttttgccagaaaagccaagatagaggaatatgaagcctgttgcatagcctgaaaaacagactttatgttgaaaaacatctcccttgaagaagcagccacattcatagagactggcaataacaggaagcagcatttgcctaccc

SEQ ID NO: 245223 - DNA, 737 bp, Homo sapiens
acgttactatgtgcgagaggcagggcgatgcggctggcagatagtgagagggatcatccagttggatggcttcagggacatggaaatcactagacttttagaaaccttcttcgaagtggcagtgctcgtgaagttctttacctttaccaaaggcatggctctccagagagcacaggctcctgcacaagaaccagcacttcatcaggagaggctgcaggtactaagtgatgtccttggctcagttttgtttccatggtaactgtatgccacttttcactagcacgtttcaacattttcataacagagttaaaactacatacacagaacacctcaaaaataaacacaaacgcagtcaagtcatcttaaaagaatgtgaaatccatgtgtatgtgttggtggctgcagagggggtgtgctcctgctctcacaagaacccggctttcttcatttccaagaaaagtgaagacaggtacaatctgaggagcttctgaacttatcttgggtagccgactgggcacaagtttcagtgaacgtatgtttggcatctgtgttgtatttttcaacttacaaaacttctgttaaaaacaatgtttaatgccagacctatggttaacagccaagctcccctaagttaaggcattttttgaaaccttgctctgaagtgacaccctgtggtaaacaatgataaaggccaacagtctttcctgagcaagaacagaatctaccaaaagatcctc

SEQ ID NO: 245224 - DNA, 887 bp, Homo sapiens
ggtggcaaatttgtagcaatagcccaaagtttgtccttgaatttcaatgttccacccccatgcatacctggggcaaagcaaggcatctgtcagcacagacactagttacatccaccaaagagagaaatccaggaacatcgtgtaaataacctggtcaccctttgaatgaattatgcggaatttgtgaacctactaacaagggatcatccagttggatggcttcagggacatggaaatcactagacttttagaaaccttcttcgaagtggcagtgctcgtgaagttctttacctttaccaaaggcatggctctccagagagcacaggctcctgcacaagaaccagcacttcatcaggagaggctgcaggtactaagtgatgtccttggctcagttttgtttccatggtaactgtatgccacttttcactagcacgtttcaacattttcataacagagttaaaactacatacacagaacacctcaaaaataaacacaaacgcagtcaagtcatcttaaaagaatgtgaaatccatgtgtatgtgttggtggctgcagagggggtgtgctcctgctctcacaagaacccggctttcttcatttccaagaaaagtgaagacaggtacaatctgaggagcttctgaacttatcttgggtagccgactgggcacaagtttcagtgaacgtatgtttggcatctgtgttgtatttttcaacttacaaaacttctgttaaaaacaatgtttaatgccagacctatggttaacagccaagctcccctaagttaaggcattttttgaaaccttgctctgaagtgacaccctgtggtaaacaatgataaaggccaacagtctttcctgagcaagaacagaatctaccaaaagatcctc

SEQ ID NO: 245225 - DNA, 462 bp, Homo sapiens
aattaatcttaagggaaaagaagacataacgatagctgctatgcataaatatatatcactacttatgggcatagataatgcatttttatatctagaagaaagtgagaatttggtattttaccttcccctaatgctctccaccctgcctggttaactgaaaatagtaatttgaattgtggaagtttaaaatcttgggttttctacatgtttatttgtcattatgaagttatagtcgtgtatcgatgttgctcgttacactcaaagaagggatatagaatgaagatttagtatgctagattaggtgtgagaaaaccaggaacctctggaagaacacatgatagaacttgagaaattgaggagatgatcacttgggatacagtagaaagttaggaggaaagcggtgggaagagcaggatttataggacccgacagtgaagtaatgtagctagggatgcacaaaaa

SEQ ID NO: 245226 - DNA, 208 bp, Homo sapiens
gcagtgctgaagggacatcaagcaaatagtgtgatgcctgtgggtgcaatgttactccttcccttaggttgccaaaaaaatcaatacttcatagcattcctgaaacgaaaaagcttatgaaccattgtgtttagggcgtaagctatctattttgggctacccatcacagcttctctcctttggtagaataaagtgaactgaaccacca

SEQ ID NO: 245227 - DNA, 417 bp, Homo sapiens
gagcatatagataataatagccaccactcactgaggtcttaagtgtactgttctaaaatgctgtatatacattatcttatttaatcctcacaacagccctgtgagttagctattatcattccaattttatacatgagcctttcgaggttaccaaaggttagataacttatctgaggtcccacagtcagtcagaggtggaaccagaattgaaacccaggtctgtcacattctgtcttttctgtataccagggattagcaaactttttctgtaaaggccaactagtaaatattgtaggctttgcagatcatattgtctttattgcagctactcaacttgctgtggtactgcaagagcagccatagacattatgtcaacactggtgggcacagctgaaataaaactttatttatttacaa

SEQ ID NO: 245228 - DNA, 406 bp, Homo sapiens
ccaaaccatatcatcaaccatggggcaaagtgtgttttgtcatccttttaaagtgaccatttaatgagtattaattatgtcacaggtaacatgctaaactttacatgttttctctcatttaatcctcacaacaacccaatcacacagacaatattattatcctcattatacggataaggaaacaaaagagtagaaaggataaataacttgctcaaagtcacctaggtagagggtgaagagtggaaattcccatccagttctgacatgtagtttgtgctggtcactgatctcattaaattaataacctcacttccacagcaggatggctcagggtgggaggcagagtcagccctgcaagcagcctctcccaggatgagacttagcattgctccactgaggactcgcc

SEQ ID NO: 245229 - DNA, 693 bp, Homo sapiens
ccgagaagaaaaataaaatccttcctcatgaactcaggagtagagaaaatgtgttaccctctaacagtgctggaaaacatttccagaaacatttgaaaatattgatcaagaatggaaaagtaaaaaataatgcaagtaacccattcttatatgagggacagctaggtttaataatgggaaatatatccttccagacctcatgtggtgtcaaccaggttttatgcaatatttaggagtggccatttcccctgttcttgaattcgtctcttaaaaaattactaaagccctttaaaaactcaaccctttaaaatctaagtgaaaaacataaaaacagagggttagtagaataatcaagcttattctctatttgagttttactttcgaaaatccattatgacctccaatcagtcctgaaaatagtcacgcacatatttgtccagacatgttataatttattccaactgagtgggaaaagaaagtttctttcatgtatatgcttgtatacctaccctcctatcctctaccatcaatagaaacaaatgactgcatgatgaaactcagggtatctctcagccccactactggctgataattaaatagcataccacttttgtactaccaagctagatatagtggaactctagaaatgacactggggtataagtaaatcctgtccaaaggcagtgcccatta

SEQ ID NO: 245230 - DNA, 425 bp, Homo sapiens
cagctccttctcatactttgtcgtaacttaaatattaatagaggcaggaggcagagaaatcctagacagacagggatgggtccctggggaaaccttaccttcaggtcaaaaacagcctgaaacccacagaccagagtgaggacttccattcctgtttgttggctctcttcttattggttctttctgaataatgccttttaaccaattgaatgttgctttttccaatactacctatggcccaccctgcccccatcctgttcctataaaggcccctgtcagtggaggggagacagcctgactttggggaggagacagcttgacttcagggaaacatgatctgcttttctgataccctctccagctcccctctccactagagaactgttttcatcgctcaataaaattctccactcttaccattcaaa

SEQ ID NO: 245231 - DNA, 487 bp, Homo sapiens
taacccacatacacctactgccaagagctctcttaggttcttccttctgggaatgtaactagcaccccactaactacatacataaagatttcttattttgtatatcatccaaagcaaaaacgttaccccaagacagcccttctcattggtccccaggtcgtctgttatagcccctcagccagagcagatgttcacctaatgtcctacctgtcaatacagctatgaacacccaaggagaaagcaaaccaatttttatagcaggctaaattaaaacaaaaactaagcagttcatgaaaatagtaaggttgcgtgtttttaaatatatttataatactcattactagcaagaatatagtgaaataaacattccatatggctgtgtgggaggacaattttaaggcaacaagaacctttaaaaattaatttctctttcacttagaaattgcactattgagtaacctctctacaaaaaaatccagtatgtaaa

SEQ ID NO: 245232 - DNA, 416 bp, Homo sapiens
gctggagtgcaatggcgcaattttggctcactgcaacctccacctcccaggttcaagcgattctcctgcctcagcctcctgagtagctgggactacaggcacgtgctaccatgcccggctaatttttttttttcttttttgtattttactagagatggggtttcgccgtgttggccaggatggtctcgatctcctgacctcataatccgcccgcctgggcctcccaaagtgctgggattacaggcgtgagccatcattcccagtgtttttcagtgccttctccgataaggaacccgagaggcttccagtcaacactgggggctgggttcagtgaattcagtcatgctggtagagcccactatttttgtcctagtgggcaaaaaaggaagcctctaggggcaatgactaaagtgttc

SEQ ID NO: 245233 - DNA, 218 bp, Homo sapiens
gtttttttagctttttctcggacacttgtccagcctttgaaaactgtctgtagagtttctaaaatatgtatctctctgaattgctatctggtttgttgtatatatttctatgtagaaaatatacactcaagttcttttccttcaccataatcatcccgtactaaggataactgaactgttatcaattctgtgaataaacagaacttaaattactttta

SEQ ID NO: 245234 - DNA, 883 bp, Homo sapiens
gtctgacgtgtaaagttagcgagggactagttgcagacaattttagctaacttaaaaataagcgcatctcaaagtcctgtttttcgaagcctgaatttggtattccagtgacgcacctgccctccagaagccaactgagggttcccatggagaataagtacctattcacgatgctaggatgtggggcaggagtgaagaagagtgaaatggccatcttcccttgtggttccagcattttccgagcatgccgagggcagagggtccctgtgtcttctttgaagatcaagaaacaggcctgacgtctcagcttgtgctatgaacagggagtgttgaaatccagtttgtcctgatggctttcactttgcaggctttgctctacagataatctgttataaatctaataaggtggaatgcctccctacaagtagcgaagccgagatcacacagcgttgccgggggcaggtagggaatcagtcactgtttgtgactgctggtttcattaaaactccaccacagtcatgtttctgggagttttgccttcctgtgaattttaatccccagcagccatggttgttgctttcattctttttgaaatgatggtggaaagagctcactttccctctgggttctggctgacaagtagatactgtgagactgcattaggctgcatctgtccgctctgcgtttccgccctgagtgagctctgagcagcgggagggagggagccaaggggccctgtgcaggtgacagccagaggggaggggctcgccataacgaggagatcagttcaacaaaggactgtgtttgttttctgagctgagaagcaccccgaagccctgtgggttgtatgtttataggttaacctgctggtggcattcccaat

SEQ ID NO: 245235 - DNA, 427 bp, Homo sapiens
gaagattatttttccaataaaatattacaaaccctaggaaaaagcaatccaccatgagccagggaagatgcaacaattgagaaagtagttcaccaaaaactggaggtagtagaacactttgataaaaggaaagaatatagagttcgattggctgtcatcggactagtcttggaaaccaaaaactaccaaaacaaaggcaactattctttgaaaagttgtctcttttaggggccatgtgctaccttgatgtggcttcctagtgtacatttcaattctctgctcccttcagatttcctttatctacttaaaaataataactctttgctctttacttccatttgaatgtattcttccatatgccatatggaagccagtatagcttagtgttgtaacattagattccgtaattaaaatttctgaatttacc

SEQ ID NO: 245236 - DNA, 418 bp, Homo sapiens
aaaagataggcctgtgtaatgtcatcaatttgagaaaatagccatttttctcttatgcattattagtaagataaagtatattaggaatgaaattgaaatagacattagatttcttctccatcatttgacctgttcatagttcaaacaattaagtcatgatagtgtcaacagggattatcttaattttaattgtaaaagaatctgttttctttcatgaggataaactatcaggctttgggcttggtacttttatttgcttaggaactgagtaattgcctcataaaacagcatgatggtactattaacaccgaattataagacctgttattatagaatttgcttttctagttgggataagacttcattttttggtgcttaaaataattagtttctccaaatgggtgtataataaacaggt

SEQ ID NO: 245237 - DNA, 457 bp, Homo sapiens
ggcctaaaagaggccccaccggtgtcctgggaatccctgtcagggagagagagagtgtgtgtgtgagggagagagaacatgtgttactgcataggaccacagagcagatgtagcaacaatttttttaaaaatatattcttttcatcaaagcgacaagattttggcttgacagtaagtgaattgaaaaacagcatttggcagattttttttcattcgctgtttatttaatttgctattcgattttatgggatctcttgataagattctaagtcttcgaccctgagtttgcaaatacgtgttaatgtattgaaacttttgttcagtgatggatacactgactctcttttcattgatcccttcccagattcgttgatacatattaaaaccttgttaaaatagtttgtcaaaataaaattttgtacatcatataaaagaacattacttcagatgttacaaa

SEQ ID NO: 245238 - DNA, 713 bp, Homo sapiens
atatcagagttatttagatgagctgacattcactctatgcttagaaagatggagttgaaatttaccatgtggtaaagaggaggaagagtatgcagaaaacaacattgtgaacaaaaccatggaaggatgaacatggcatggtgtttgggaactggggagtgggaactagaaagggatgtctgtggcccaggtaagggtaaggagagagattggtgtggaagctgggacacaggttgtgaaagctcttgggggaatcacactataacccaatggttcccagacttgctggctcatcagaaccaccagtgaatctatttttagatgagattcccaaaccttgcttagttctactgactcagaattttggcagtagaatctagaaaaagttctataattattaaatgtgagttaacttattccaggctatactgcaactaagggcagtaagtattgttagggactttagaggtcacctagtccagtctcatctctggcctagactgcttctctgctgtaacatccctggtgggtggtcattcagcctctgctgaatcatgctcattagtggagctcactgtttgagtcctgttagacaaatgtggttattggtgtgttcccttgtattgagttgaaatctgctgttttatttcacccactgcttctaggcaatatccctcacgtcgcattccagatatgatcttactagtgcagag

SEQ ID NO: 245239 - DNA, 439 bp, Homo sapiens
ttcctggaccaagttatttttgtagtttactaatatacaattgatcaaaacaatataaagctatcgtaacatgtgaaagattatacaaattgtaaaaattttgttggaaatatgtcttaatgagatgattagggctgtttttcccaattcacatttccgtagggaaatattccttaaaactagaatgtggcatggcttagcacatttcactctcattttgtttgatagatgtaaataccgagaaaatctgtttacataagtagatgaaaatgatagttttattgtgcactgctactcaatttttaaagcaatttctgttatatgccaaaaatcacagtgatctatcaaaagttattttcaaattacctctcagctgacatgtcaagtcctccttaattttttttttaaataaacacttggtttgaaaaaggatttgtca

SEQ ID NO: 245240 - DNA, 371 bp, Homo sapiens
tttttcataattactttagctcaagtgattgcatttaaataatgtttgatgtgtaatgtaatatttctaaatggcttattagttcttttacagacaagccttataatgtacttagtaatttttattaatagaatcctatatgttcagacactcaagggcaagccatttcttccgtgattgccactaatttgataaatttaaatgatgagccaatatgggaaggaatacaaacatacagctcaacaagataacctgttaaggtgaacctagatctgaatgtggtcaagtccaatttcctcaagccattcacaaaattagttacatttaagaatgataagactaacatttcattattttcacacagttatttc

SEQ ID NO: 245241 - DNA, 133 bp, Homo sapiens
tcttgtattccgttctccctcctttccatctcatctctttgttttccctacctgttcttttaacagaggactccgatgacgttagaagaggctgcactgcctagagcaatctgcattccatattagctttata

SEQ ID NO: 245242 - DNA, 410 bp, Homo sapiens
aagtacagcagtctcttcgatgtctggaaacgtgtctaattacgtttagagagtaactaaaaaaatagccagtgtcccggaacagacagctcagggatcactccatagcatcctgaatgacaggatggaactacgccaggaggaaaaaaaaaagaagggcgaagaaagaaagaaaagaagcaagtgtaaagccgggatgagacgccagcctctctccaaaataatcctccagtcctcctagggccttcggggccaccgcaactctcgttcaagttatttcccttcagtttccatgaggtcaccggcccgcccacatccctcacctggcgcggggaagcgcgccctcccgcgcggcacaccctctgcacctaaaccccggacagcgcccagggctcccctctcagggaagc

SEQ ID NO: 245243 - DNA, 296 bp, Homo sapiens
tctttctctagatgggaatttctgccctagagaggtcttggaaactttctcaccagaagagcacaacttgatggcaggaagctcctgatggaggcctgaaaatggccctgaaagggatgccaggggaccagggctccactattatcagcgtgtgactttggacaaggatgttaatggctctgtgactcagttacctcttctgtactttgcttaggggtctattgctttccattttgtctttttcatttgttaaatccaatgatgtcactgacagtaaaaactagtaaatagtaaaa

SEQ ID NO: 245244 - DNA, 484 bp, Homo sapiens
cgctccaggcctgggattaaactttctccgtataacttgtaagacaggcagattctcaggaaggtgctattgcttaggggagggaaaataacatttgctatctttattctagaaagcatacatatttggtgtgtataccatttgccactggcacagacaaccaccatgctcgctgtcggttgaccctcctcaacccagcttggctggtgaaatgggctgggctcttagagtgactctcgaatgaagcagacctttcactgctactcaatttccatttatgcaaattgagcttgccttcttctctgattttcctctgttccttttaaagttttttcccagcattttgactcctggcatctgtgtgcaaatgtatgaattaatatattgctcattgatggtgagtttatatttgctgattgcatagacatggtcatgcccatgataccaggttcaagctcaaggagcttcaatgataggataccat

SEQ ID NO: 245245 - DNA, 222 bp, Homo sapiens
gagctgaggactgcaggcagcctctagacactgaaaaggaaaggaatggattctcttctagagcctccaaagaaacacagccctgccagcatcttgacttcagccccataagacccatttcagacttcgagcttctagaactgtaaggtaatcagtttatgtggctttaagccgtgaggtttctagttatttcttacaacagcaatagaaaactaatgcaag

SEQ ID NO: 245246 - DNA, 665 bp, Homo sapiens
gggcagttcatttaagaaattcataaaatctggtatttttcctccaacagtagtacagatcaattcttacgatactacagttactagaaatacaagtttactaaaaaaacaagaactgcagcattttctacagaattctgaattgcctacttttctcagttacaattaaacgccaaacagaatgaattgataatatcataatagaactaatacaagaatatgccaatggcagctgggcacagtggctcacacctgcaatcccagcattttgggaggctgaagcgggtggatcacttgagcccaagagttcgacactagcctgggcaatatggcgaaaccccgtctctaccaaaaatataaaaattagccagttttatagcccggtctctaaataaataatacaaacttaaaagtaaaatttaaaaaaaatttttttaaaggcatataccaatggctattagtactcaactgcaacttaaactgtaacttgcagctaattaattcccagtataatcttaaaacttctgggtactaatgtagtactcaactaaaataaggttctcggctcacaatacacacaaagaaagttaaataatttaatctaaaattcttcctgaacaaggaagtgtggggaaaacttcctgtaagttgaattttgagaagca

SEQ ID NO: 245247 - DNA, 304 bp, Homo sapiens
gcttttaccacatcatttttatgctctttcctctgtgccaccagttttcttccctcttctttacttcctttcccttctcagtgctaatatagaaataaagactttactatcaccaaaactttgccctgtgagagcattactagcaagggaaagatgtgtattgtagatgttccagtgtgaagaatatgaaagacctccttctaggtaaaaacccctcattatccttcaaaaatggaaccaggggtgaagtcatcataatcatgaagagcctggggttcaccttatctctgccttgtgagggtat

SEQ ID NO: 245248 - DNA, 141 bp, Homo sapiens
agagttttccctgtttgatccatatgcagcttaaatatgtgatgttattctacattttatccagattcatttttcaaaccaatagtaatcattgttagcaaaaaccaataaataatcttttattctgttttaaaatttcca

SEQ ID NO: 245249 - DNA, 266 bp, Homo sapiens
tctccttcagtggtgacgtgtggcaaatggattgtaaatgaagatagactgtgtaatgaatgacgacactaaagactaatgtgaaggactttagggaaaacaaaaggctttcatctgaaaggatgatctgtggaccaaggtcactcataccactcactgctcattttctcatgttattttaaaacttttttcggcctttatactgctttcagcagcatttgtgtgtaagaagtggacgatgactttaataaagagacccgaatgga

SEQ ID NO: 245250 - DNA, 793 bp, Homo sapiens
cagagtcatgcctcttcattaggtattatctgatgataaaagggcacagtcgactagttgtagagactatatggctcacaagtcctaaaatatttactctctggccctttacagaatctatttgctgatctccagtctagagtgttactgatgggtttctgacacagaaatatctggctgagatggtccaacataccgggaaactcattctctcctatgagaaagtcatattctctgatagcatctttggtcacctgaaacctagtgtccattgaaggcacagctctgggaactgcaaaactgttctgtggagtgttatggagagtaaagccaggcagaccagctgcttctgagggctgtggataaaatagagaatgatacacttacatcctctaccttttgtttccaggcacagatcatttcaggtgccttctgtgcagaaatagctgaataaacttggagcttggtctctttgttgttgaatttacaatgttatttgaatgtaagaccttgtagatatgacatttgaaagttagggctctggaatggcactgcctggcttcagatccttcatttttttgctaaatgacaacaaacaagaggcttaggctctgtgcctccgtttcatcatagtcaattctggtatttgcagtagttatgttgaataaagtcacccagtacacggacttagcaaatactgctccttggaaaccacagctcctagggaagatacagggttaggttcctgtgaacctctgatcacaacatttttatcaacagatcaatatacata

SEQ ID NO: 245251 - DNA, 542 bp, Homo sapiens
aagttttcactgcattttgactgtgacctgtcacaaaatcaggtgtgaaattttgcttgtggcattatgttggcactcagaaagttttggattttgaagcattttggatttcagatttttgaattagggatgcttaacctgtagtctaaaatgatattaaatagataatctgaatagttacataactattacagacattgaagccatgatcaaaaagcttccaaatggaagtttccaggcccagatggcttcactggagaagtctaccaaatatttaaatatttaaataaaaattagtacttattctacacagtctcttccagaaaacagaagaggaggaaatagtccccaactcattcaatgaggccagtattaccctaatactaaaaccagacaaagccaagagcagtggctaacacctgtaatcccagcactttgagaggctgaggcaggaggactatttgagcccaggagattgagaccagcctgggcaacatagtgagacccggtttacaaaaaataataaaattagttgggtgtgg

SEQ ID NO: 245252 - DNA, 432 bp, Homo sapiens
acaattttagttcacaaaatggggaaaaaaattttgctaaagataatcattttcattcttagtattgctggtgtggcatatggctctggaaatttcttgtttactgaaatgccaagaagctatgtccatacatacagagagagaaaggactctggctctggttctgttggctccgcctcttgttttgtgttcttaggcttatctaaagatcctcaaagctcggccaggtgcggtggctcacgcctgtggcatccccgcactttgggaggccaaggcaggcagatcatttgaggtgacaagttcgataccaatctggccaatgtggtgaaaccccatctctactaaaaatacaaaaattagctgggcatggtggtggcacaggcctgtaatcccagctactcgggaggctgaggcaggagaatcgcttgaacc

SEQ ID NO: 245253 - DNA, 654 bp, Homo sapiens
tcttatctttatgtccgtttgtgttattttgctgtcttttatactttttagttgaatgtggttatttttattttcaattttccctgtctttaaggtcataaagttttctcttaatactgctttagcaaaatccaatgagttttgatatgcagttctcttacatctttcatttccaaataattagtaattttaatttggattcttcatcaacccataaaaaggtatttttaaattccaaatggatagatttggtgtgatttgagtactttttggtggtaaatgtataattttattgcactaaggttggagaaaataaaccatatgatttctgctttttgagatttactgagttttttgtgtactaatacccaatcaatatttgtaagtgttccatgagtgtctaaaatgagcatgtattatctgtggaaaatcaagaaaccctaaagccctgtgcactggtcagccagcttgcaaatttagtccaagacgaggtcaatgatctccttgccaatggtgtaagtggccaccggcacagttactggcataggtattccttacctgtgatgcaatgctcagggttcaagagctgacaataggtgtcagtgtgaactctgtcaacagccatgggttccaggtctacaaacactgccctgg

SEQ ID NO: 245254 - DNA, 454 bp, Homo sapiens
gatattaaaaatattgtataaaattacttcaggcagtgtgcataaggtgaagcatttatgaaacataaatgagcttatgtttagacttgcatcccacccccaatatatctatctcatgtatatgcaaatattccaaaatccagagcacttttggtctcaagcatttcagataagtgatacgcaacctgtactattatctcttcatagaatacccctgtctattttgtgaatgcaagtgtttttctgtgtagccttctctgatctttttccaataagtcttattttttataattccatgtaccccagctctattatagcgcttaactgcagtttattacaattatttatagcctctttacccactagaacagcagtccccaacgtttttggcaccagggaccagttttgtggaagacagttttttcccatggatgggatgtgggggtggtggtgg

SEQ ID NO: 245255 - DNA, 456 bp, Homo sapiens
attgtcattatcatcatcgttgtcattgttgaattggctcacttcttccaagaagatgtcttggctaacttcttaaggcaagcagttttcaaagtgtgataagaggatccctcgggattcctggtatcctttcaactatgtatttgtgtgtgggtggattgtcttctaatacttcaagcaaaacactgtatcatgatagattgaatgaaggagcagatatggcaatccagctgtctcatattaatcctagcattaaatacacttgcaaaagtgtaaaatggcacagctcttctcactaaatgattttgtttttgaaaatattgttttatataaaacatttatattaatatataatgggtttatagttgttacttaaagataaattgatacataaatatacatttttcaaaattcaagcatattatggtaaatatccatagagatattctaaatatt

SEQ ID NO: 245256 - DNA, 475 bp, Homo sapiens
tgggttactttttgtctagatacttgcaggtatctttttgttgctgtttttgttttgttttatgtcagaagagttgaaaattaggactcaacggaaaatcaggcacagaaaggggggaaatacctcacgttcacactcatgtgggagctacaaaaacagctcaccgaagcagagaattgttgataaaggctaagagggagagagaggggaggataaatagggagaggtctgttgagaggtctgttatcagatacagagtgactgctagattggaggagtaagttctggtgtgttgtagcactgtagggtgaatgtggctaacgataatttagtgcgtgttttcagaaagctagaggacgggttttgaatgttcaaaaataaatgtttgaggtgatggtcctgatttattacacattgtgtacgtgcatcaaaatgtcactgtgtcccataaatagtacaattattacatacaact

SEQ ID NO: 245257 - DNA, 462 bp, Homo sapiens
tatttcattttttagcatttaaaatatttttttttttatagagatgggggtcttgctgtgtagaccaggctggttacaaagtcctggcctcaagtgatcctcccatctcgggtctcccagagtgctgggattacaggtgtgagccccacagcgcctggcccattttcaacatttctataggtatatgtgctttgcgacctgggtttaagaaagtggttattgacactgacacatattgtaatcaactcagtagattttagaacatcaagctaatgaccctaccctagaccaattaaaatgcacttctaggatcatctttaactgtaaccctgaaagtggagtcctgaactagagaaatgtgctacttgtcttactgatttttaaaaatgcattaaaattaatactataaggaatgctctttaaaaatggtggaaaataaagtggaaattttaaatttgtcat

SEQ ID NO: 245258 - DNA, 438 bp, Homo sapiens
gtggccacctgttaccctggggcagctgagaagaaattgaaagggaattgcaatttttcctggtattgggtctgcggaagggggtctctactctttctcatcccacctctactctcatcccatcctcattcttcctcattagttaaaggcagagattagggaaggcactggccacagccacccaagtatcatgacttgggcagggtaacattttgatgcaactctatgcaaatggcacccctggaaatgggcacagttgtagtccaggtgctgtggcgtctggcaagtctatgtcgtgctgtttgggggtgatgctccatctctgccgcagaatatgtaaaatgttaaatctcctgtccagagaagtttcttcccatctgcctccatagagagactgtgactggaaacagggcaaaacacagagaggctgacaagagg

SEQ ID NO: 245259 - DNA, 869 bp, Homo sapiens
atgttaatttcatttcagctccagcatttatcctcatactagtcccctaatctctaggcctcagtttcttcatttgaaaagtgaaaggaatcgtttctgctttacctagttcataagatttcctttgaaggtcaacagaggtaacggatgtgaaattattagctaactctcaaactctgtaaaaataaatggtgttgtctgtggtcaactaacagcacaagtagagagctggaaaaagttgtgaccataattgtctcttccaattaattaatgcagtctactattttatatgctacttgcctaagagataaatgataaaatcctcattaattttaatttatgacccaaattaatttttggtatatttgagaaaattatgtttaaatgatatatgaggaaacacatgtttctcacacacccatgcacacaccaatccccaccaaccataaggaatttctgctgctgcttctctccatcgtgtttactcttattagattttgtctattaggtttttacacatgaaggagaaagatatattagatacttcttatgtgtactttagtttcaagatactaaggaaacaatgtaggaatttggtgagattgtaaatattatttaaatatagtatttaatacatctgttaactgaaatcattttaacatcttctatgaccattctctttagctaggagaatacagctagcttgtttaaaatgaacaactgaaaatgtaatcttaacaaatacattcagtaatattgagaaagacttttccactaaatttaaacaagttatataaccaggcttatgcaatgaaactggtttgcaaattctaattccggaaattagatatgattttcactaggagggc

SEQ ID NO: 245260 - DNA, 803 bp, Homo sapiens
cttttatgttatcacaaagtacatctttatatgttgtgtgccatttgataaacatgttttatgcatttgatttttaaatcacataggaaacaaaaagagaagtgacaaactaaaaatacaacaatattggcttttatatttacttagggagttacctttattgatgttcgttatttcttatggcttctagttactatctatctagtatcctttaatttcatcctgaaggactgtctttaggatttcttgtaggtcaggtttactagtaacaaactctgtcagcttttgtttagcttgaaatgtcttaatttctcctttagttttgaaggattgttttgctaagtataaaatcttggttgacagtttttttttttttctgttaggatgttaaatacattgtctcactgttttctggtctcgtggtttctgatgagaaattgggttttaatcttactgagactccttgctgctttcaagattctcgttgtctttgtttttgactgattataatgtgtcttagtgtgggtttgagtttatcttgcttgaagtttgttaagctttttggatttgtagattcacgtcttcaagttttggagttttcagtcattagttaatcatgtatcatttcttcatccctctctcttgcttttctttttgtaacttcataatgcatttgttaactggcagatcccttaggctgtgttcatttttcttcattctttttctttctgctcctcagactcaataattttaattgtcttcaaattcagtaattttccctgcttttgacattatccatggtg

SEQ ID NO: 245261 - DNA, 297 bp, Homo sapiens
actcgatgtactacaaataaattgttttcacggaaatgattccccgaaagtttgctgctgaactcaggaccctaaggacgtttgcttagggaatccgtgtccctcgagaacacctaagatgggtatgcgtttgtgcatttaaaaatgcctcaaggaactattgctgaggaacagaaaccatcgccggcgcagaagcgttcgcggaccacttggagatagatgccagtacagcaattctgttccaggaggcttcggcttaagagggccggggaggaggagaaccctcgggaaatagca

SEQ ID NO: 245262 - DNA, 554 bp, Homo sapiens
ttttattctaaatttctcacactcagaattttattctgttgcttaaaagcaacctcactccccacttccaccccccacattatcctgctccatctgtataggttactctttaggcctgttgaacctcgggactttgcaatattgggtcccctatatccaagagcctctgctttgttttttctttagcacattttctctaagaacttcgtaagaaaagatgggccaggcgcagtggttcattcacgcctgtaatatcagcattttgggaggccgaggtgggcagatcacttaaggccaggagctcaagactaccctggccgacatggcgaaaccccatctctactaaaaatacagaaattaaccaggcatggtgccacattcctgtaatgccagctacttaggaggctgaggcacgagaatcgcttgaacccaggaggcagaggccacagtgagctgagatcgtgccattgcactccaacctgggcaacagagtgagactgtgtctcaaaaaaagaataaaaagctcaccactagctccactgtaaccccatgca

SEQ ID NO: 245263 - DNA, 337 bp, Homo sapiens
ttttttaatttcagaaatgttcttttggggccagagtctgggcatatatgaatgcaaatccgtgtttgttcacaactaagcccagctgagacgatcacttttctgtaggccatttgtccaggtacagaatgagcacatgttgttggtgtacgccaggtggtgcttccaccattgacttcctaaagcgctatgcttccaacactccgtccggtgaatttcaaacagccgacgaagacctctgctactgcttggagtgtgtggctgagtaccacaaagcaagagatgaattgccattcttgcatgaggtaaaatatattagatgggcaatatttttcag

SEQ ID NO: 245264 - DNA, 365 bp, Homo sapiens
tctagaaactatagaataagtatctaagacttgaagagcatgggctttagactaaagaagaaaagtgacacccacaacagaaaacgtggttaccgcctacttaaaaagtaacaatgacctttatatctcaaaacctaccacaattcagacacatggtagatgcttgatagttatcaaaaagaccaaattttttttaagcagcagggtctcactttgttgcccaggctagagtgcagtggcatgatcacagctaacggcagcttcgacctttcaggcccaagtgatcctcctacctcagcctctccagtagttggaactacaggcatgtgccaccatgctcggccaattattattattattttttt

SEQ ID NO: 245265 - DNA, 419 bp, Homo sapiens
gtgcagaacattgtcccagagaatctgtgagaaagacttggttggtgcttgaaaattcaaaaagaaaaaaaaaagtggccaggctcagtggcttatgcttgtaattctagcattttgggagccgagatcatgccacttgcacactagcctgtgcaacagagccctgtctcaaaagaatgaaagaaagaaagaaagaaagaaagaaagaaagaaagaaagaaagaaagaaagaaagaaagaaaagaaaagaaaagaaaagggaagaaaagaaaagaaaaggataaatgctccaagacatgacagttagcagagtgaaaagaaatcagtttgcactgaaatatattctaggattaggaagccacgctttggaaacagcaagacaaggcaggaataagtgtcacgcatttgggggctctaca

SEQ ID NO: 245266 - DNA, 430 bp, Homo sapiens
atcttctcatcatcgttcactacaaactacacatgggcacctggatgggttcatcatgactgtggcgtcagttcctgcattaacatccccagcaccctccagatcctgagagagggagacggagggctctccatgcccctagtacctctccaccttcttcttggtgacatgcttagttgctaagaataacagaaagcagaggtgactgaaagatcacaactcaccggcccttcaatagttcgtggacatcagcaccacggacagtgactcagtgaggctaatttccaggtggcagcagggagcatgcagataggagggaactgcaggaaaagctgcccattctattctatatgagaaagagtgtaagaaagaggaagctattacagggataatgctattcttctctaatccataaattgcgaaacctttg

SEQ ID NO: 245267 - DNA, 496 bp, Homo sapiens
ttcactcttgttgcccaggctgaagtgcaacggcgcaatctcggctcactgcaacctccacctcctgggttcgagtgattctcctgcctcagcctcagcctcccgagtagctgggattacaggtgtgagccaccacgcctggttgctgctgtatttgtgtatagctattttttaaacatttgttgtgcacctcctgtatgccaggctctgtgttagggcgtgagccaccacgcctggttgctgctgtatttgtgtatagctattttttaaacatttgttgtgcacctcctgtatgccaggctctgtgttaggttttgggggataaaagatgaataaggaagtgcacagtaatttttcacaccgtgagggaaatgtcaacagagacatgtagcttgtgctggaatgacagggacacagtggtgcactgtgtttgggggcagtagggactccacagtgcttctcctacagcactgtttatctcccctctccctccttg

SEQ ID NO: 245268 - DNA, 567 bp, Homo sapiens
tgtagtcacatttgaaagttgactgtattctgtacacaaaaatgcaaacatgcttcctaggaaaaaatagaaattttgcatatgattacacagcaaatattttctaaaactagggcaaagtcttaattcccaggacaactccttatcttaaaaacaaattattttatatgacacttttactctcacttgtctgttgaaatgagaaaataaaagtatttttgtggcagtgtgcacatctaataaacaagacattaaaatgtttggaggggctggaaatagggtcacggcctacccctttttaacaacttcattgactaaatacttccatgtcctagggaaataattcacattttgatatttttcagcaaaacaagaaaaggagagaaaacttagctgtaaaaggcaatattacagaaaatgacttagaaagttgctttctgactgggtgcagtgattcattcctgtaatcccagcactttgggaggctgagacaggaggatcacttgtgtccaggagttcaagaccagcctgagcaacatagtgagacctcatttctccaaaaaaaaa

SEQ ID NO: 245269 - DNA, 336 bp, Homo sapiens
agggcatcttcagcacagggtagagggccaagggtctttcttgggtgggtgtaaatagagccaaaggaagtttcaggaaagagatcattcacacatcagcaagcaccacacactgcactgcaacaaggtcgagttgtgcacgtgggctgtgctttggaagcgtccagacgtccgtgcaggtgttctctttagagtgtgccctgaatggcagtaagcagacaaggacattttatgtagaagagcatctggtatagaaggaactgctttgatcagtcccacgctctcttctctttggatggtgacttgcatcacaatcagaagcttctaaagttagta

SEQ ID NO: 245270 - DNA, 717 bp, Homo sapiens
tataatagtactcccttaattcctagtatgtacctctattctgcaatatgtcacattgtgttgtgcaaatatctgtggtgccaggctagaggctgagaatataaacatgaatagacatagattgtcatcaaagagcttatcctctaatgaactttattcttgcaccattgaaggaccttcacaatctggcttcagtcccttttccccagacatctatcttctagccacatctacttttctttcccaagtaaaccacttacattgtattacccctgaagtttttcctattgcttagctgataacatttattgaatgcttaccaagcgtggtgaaatcttgcccatgcttcaagatgtagccaagagtatatcatggtgactatagttaataacaatatatcgtatacaggccgggcgtggtggctcacatctgtaatcccagcactttgggaggccgaggcgggcagatcacgaggtcaggagatcgagaccatcctggccaagaagatgaaaccccgtctctactaaaaatacaaaacaaacaaacaaacaaaaaaatagccaggcatggtggcaggcgcctgtaatcccagctactctggaggctgaggcaggagaatggcatcaacctgggaggcggagcttgcagtgagctgagatcgtgccactgcactccagcctgggcgacacagcaagactccgtctcaaaaaaaaaaaa

SEQ ID NO: 245271 - DNA, 167 bp, Homo sapiens
caaattccacttcccagagagggaggaaactggtggcagccacatgtgcagcacagcagtgtcagctccagcaacaccgcagtccccagggtgtgcctccggcttcacggaagtcacctgctgcactggtttgccaactgtttgtttttctaagtcctcatctggga

SEQ ID NO: 245272 - DNA, 590 bp, Homo sapiens
accacaagggagtttctggggcctggccctctctctgctccttcctgtcccaaagggcttagtatttccctggatccaggcctgtttagtgtttggctggtttctggggcctccagcatggctcaggggagaccccaggtccatgggtaggaggagatggtgaggagaggaatggggatcccattcaggctcccctcgtgaagggggccaacactggtacttccttagacgggaagaggctgtggcatgggaagcaggtcaatagtttgtgtcaaggaggtgcagcccaagatcacagtggtggctgtttgatgaaggattttcctcagtgcctgaaaagcaatttactcttgtccttaaagcaacagtgggtaggcttctagaatgagtgtgagttttcatctcaagtggcagtgcccagctgtctgcatacctcagccccttcagacctggctgaggtattttagagggcattgtcttccacccatgctgccagtcctggcagttcctgcccagcctggatccctgggcataccctgccactaatgctgtgcagacaaagtgaggcctgctggccctctgttggcagc

SEQ ID NO: 245273 - DNA, 370 bp, Homo sapiens
gcgcggcctatcccaatatttctatcatgcttctctaatttatttttatatttatttatcgccatttatcatagtacatattttacttatttgtctattttctggctccctcactcacttcatgagggcagggattttatctttgttctgtctgctttctcagtgcttagaataggtcctcaagtaatacagatggatatgtctactatttgtaaaattgactaacaaaaaaggcattgtaaggcagggcgtggtggctcacgcctgtaatcccaggactttgggaggccgagggctgcggatcacgaggtcaggagatcgagaccatcctggctaacacagtgaaaccccatctctactaaaaaaaata

SEQ ID NO: 245274 - DNA, 408 bp, Homo sapiens
gtcagttacccatattgatatcagtttatccacatccatgctttcaagtttaaacaaagaaactaggcaaaggcagctatgtattcgctaggattagggaggagaagataatgaaccactggatagtgagaagaaagagaggtggagaaagtgagagaccccagtaacagaggacagggacacattgctaaggatagggacacattcactgtaatatagaaggccatgcttatatgtaaaatatgcagtaattgtatatatatgtacaaaagtgatgacacacatatgcacataaacaaaacacaattactgtctatgtttctttatttgtgacctaatgttttatgttgtttgtaactgaaaaaaaaattcccttctgaataaaatgtcaattttgcgattgcattt

SEQ ID NO: 245275 - DNA, 469 bp, Homo sapiens
cagacttacaaaagaagacttaccaataagattaaaataaattaacaacatatttttatgttgctaaagaataatatatgtgtttcatcgttaccgtatcaaataaaaatctaatggcatgtctaataaataccataacttcaaagtgatgatgaacttatatacaagatatctgaaacatctataacgtaatataaaaatgtctcatttcggttgatgatgaaatcacgggtgttactaatgccttttttcccctacatttataattgagggcaatgctaaacttcagaggttagtgaacataaagatacagatttttaccatgaagttaacaagtcacctgaatctatccatggactcctggtttctgaaccttaagttaagaacacttgatatagatgtatatgttaaatgataagggaaaataaaatgagtaaaacaagataaatgaaaacatgttaatatacat

SEQ ID NO: 245276 - DNA, 447 bp, Homo sapiens
gtaagttttgtgccaaactagggcagataaagatttatggacctaaaagtaggcatcataaaagctaatatttgttgaggttttgctatattccaggcagcgactaagagatttgtttattaaaagttttacagcaaatctatgatgtgggtacgattccgatcttcctttgcctcaagtttggagagttggacttgtcaactctggccgaaccaaccagtgaagagctgcagttatagctagataatcatactttaacgtttacttttttacctataagctagatgtccacatacaaagaaaagagaatttggtatttgttttccacccaagcactatttttttaggcacttgattggacagagtcccatttagttcctcgcaacattactggcctggtttttatttgttttgttttttaaactgcgtgctttttacaaatagtat

SEQ ID NO: 245277 - DNA, 425 bp, Homo sapiens
taaccaatctggaactcagcttcttcatctataaaaccagggggctatactgcagctgtgaaccattctaagaatactaatgacactaacttggtatgagaaatgctgtgcaggtcacattttctcaaatgtcatcttattggattgtcacaaaaatacctctacttgggccttagctccattttctagatggggaaactgaggctcagagagactacatgccgcatcatgaatcaacagcaaattcaggtcttagatccaggtcttatgatttaaggtcctatattcctcaaattatgatgattgcattttatattgaattttatatttctggctgcaaagtattactttataatatacattatatttctataaaaataagaagtttgataattttggtaaattaaaattgacattgatttgaa

SEQ ID NO: 245278 - DNA, 384 bp, Homo sapiens
taaccatatctgctgtatcatacaagcactcaggatcttggttgcaatgaatggaaacctatgctaaataactttctcagagggctcttggggctctggaaaccagacagaaggctggagaatgagggctgggcataggcaggtccagggaggccaagagggcagcctggctgtgaggcagctgctggtacagccagactgtccctgcttctgggtcacttgctccagacccaaagttctgcccaggaatgtctggtggtcaaactccagccatgtggctccctcttttcagaggtgaactcagtcttcactgataagggtaaggttcctggtgaatcctgcagcttgaatgtccatccccatgaatccgagctgagcctgcag

SEQ ID NO: 245279 - DNA, 410 bp, Homo sapiens
cccagttcttagactagtacctggcatgtggtaggaactccgtaagtatttgttgaattaacgagtggctaatggaagccctgaaagatcccaggaggtgaacattgcccgtttgcaggcatggaaactgaggttcagagaggttaagtctctagcccaatgtcacacagcaaacagctggaccaggtcaaacttagggacaagctaactccactagaaccccagcacatcagagtgtatcacagccaaccttcccatttcataggtatgaaaatgagcctctgagagggagggtgatgtttctctaggtcacttgggtccgaggcatgtgtttcttccctcctgcagcatggggtcagaaacagctgcattgttacaccggccggccctttaaaagcacctcctcactg

SEQ ID NO: 245280 - DNA, 434 bp, Homo sapiens
caagcagctccagggggtcctcccatgacaggaattcctgatgagaagaaaaggtgcagctctctctgacaagctggctcctctcctcagaaaaaagaaagaaacaaagagaagaggatgacattgaatgtatcagagaactaagaaacttctgccagcctgagcaacttctccagccagggcgacagagcaagaccatgtctcaaaaaaacaaacaaatgaaaaaagaaatttctggatgaggaggatgctagctctacattccacttcacaaccaggccctacatcagcctatatttgaataccatggcaattcactaccccacgatctgtgaggaaatttttccttacactaaacagattggtccagtttccacacttgggactgccagaaaaagcctatatatctaatataatttattataaatagatga

SEQ ID NO: 245281 - DNA, 443 bp, Homo sapiens
aagatgacagttccttcaaaattatccaagaaaatgatttccaacttagaatgccacacccagctaaactattaatcaattaggataaactaaggcattttcagataagaacccaaaggtttatcctttctcaggaggcgactaagattgtaggaaacaggagacccaccagagaagacaggcaaagggaatcccaaggatgatgatgaagctccagatgacaactaggcagcaggcctggagagcaaaagcagtcagactggagcaggaaggactccaaggagtgggtctccaaggggggtgggaaaaaaaggaatggatagataacctgatgtgactgggagtgcttgtaatttaccagtcctatccaagtgtgcagataggtcattaaaaaaaacaagaagtttttaaatggatcaatgattaactccaggaaaaaaaaa

SEQ ID NO: 245282 - DNA, 525 bp, Homo sapiens
gaggagaagacagatgggaaagaaattaaggagaaaggctttctggggcttggtgatcgattttgcagggctctcaacctttggaacacgtttgtagtcataatttcctctgaccctccttacacacctgtgaggcagaaggcattattctttccacttgacaaacgagggaagtggcaagtccccacacatctctgtgcctcaaagatcacactatggatctgtggcccaggtcactggatttagcctggcccttcctggagctcaggaaaaagaaattgtgctggacagatttgtggccatccttactcctgccatcttcctcgcttgggcccatgggcagttcctttctaagggaaacagctgggggaagctgattgacaggcatactgctgaggacaggagaaattgcttttagattcctggaccctctgcattcttaggctgtgaagagggtggaagtaggagggtgggagggcagagagaggattttcctcatctctgtaaagtggggagagagaattt

SEQ ID NO: 245283 - DNA, 568 bp, Homo sapiens
tcgttactatcttttggaaggttcataatatgttaatacagttattgagatgtgatgcctatcttgaaatttgtgtaatatcaaaagaaaagtaaaccaaatttccaaactataaaggacacttatagaaatagtcatgtctactaaataacatgtacctaatggtaatctcactgccctgtgtcagaataacttgagacattttctgaaatattatgaatttgttataaattagtgagatgaattcattcagcaaaaattgagtgcttgttatgtcaggcacgtaaccttgctcaaggacctcatagtctatagctgcattatccagtataaacagtcactagccacgtgtctactgagcatttgatagatggctagtccaaactgagatatgctgaaagtgtaaaatacaagatttcaaagacttaattttttttaaaagaatgtaagttatctcaattttttatattgttaatgttgagatgatattctggatattttgagtttaatcaaacattaaaatgaaattcacctgttttctttatactttaatgttactagacacttt

SEQ ID NO: 245284 - DNA, 267 bp, Homo sapiens
cagtttggactagccatctatcaaatgctcagtagacacgtggctagtgactgtttatactggataatgcagctatagactatgaggtccttgagcaaggttacgtgcctgacataacaagcacttaattttttttaaaagaatgtaagttatctcaattttttatattgttaatgttgagatgatattctggatattttgagtttaatcaaacattaaaatgaaattcacctgttttctttatactttaatgttactagacacttt

SEQ ID NO: 245285 - DNA, 510 bp, Homo sapiens
aaataaatttctattgttgaaaccacccagcctgtggtattttgcaatgacagtcctggcaaaataatacagtccttcagaggcacctattctttctgcctttaatttgctttggctttgttttatgtgtggccttgtttcatttgcttgtaaatgacttgagggcgacatccaggaaggagtatcttttcctgtgtccccacagggtgcagttcaatgccaggcacaaagtgcacagaatcagacctttgtcctcactgccagctttgtcgacctgctgacaagggtcagggggacccaagctgctatccacccagggtgcttttcaaaattcaagtcatggaaataatttagggagccacttgagtactttttggaaataatgagacagaagagcagataatagaaaatgccagcgtgtttctcaggcagtaaaagtgttacttcatgcaactttgtttgattttacatatttataaataaacagaataattacaaattatcctaaga

SEQ ID NO: 245286 - DNA, 601 bp, Homo sapiens
tttttttttttgagacagtctcactcctttgcccaggctggtgtgtagtgagtggcatgatctcggctcactgcaagctctgcctcccgggttcacgccattctcctgcctcagcctcccgagcagctgggactacaggcgccccccaccacgcccggctaattttttgtatttttagtagagacggggtttcactgtgttagccaggatggtctcgatctcctgacctcgcgatccgcccgcctcggcctcccaaagtgctgggattacaggcatgagccactgcgcccggcctgtacaactctttactagagaaaagtccactaacctcttgggcttctctccgcccatctgagaatgtgaaactgatacccaccttacaggacagctagaggtcttacagagatgctggctgtgagtgcacttagcacagaatctgacatgtagcaagcactcaaaacaatgtctgctgagtccacattttagaagcatcctgcactgacaggcaggaaaggggaggagctctggaacccccaacacccacaagcccaggcccaggacccccatcagtaaggtggtatctgtgctcttcatctctctc

SEQ ID NO: 245287 - DNA, 310 bp, Homo sapiens
cccctagagggcagcagagcctcacaggagtggggagaaagcccaaaacagaggttagtggggagtttcactcaaggagacacaaggaggcaatgcacacatttacggagaatgaagttaagctttgtgaaatgaaggaagtccgtaatacaaggagtagaaaagtctaaaatgtgaaccagacagcaaacacaaggctgggctaggaaagaaaagagtgaccagaagtcagtcacaggaaagcaaggcttgtctgctcagtgaatgttatgacccaagcaatcataataaacaggtaccatttcaccat

SEQ ID NO: 245288 - DNA, 420 bp, Homo sapiens
gggtactatcattgtgccccctcaatagggtcctcacacactcatctttattccgctcagctccggcagttggcagagagcagtgtgtcatgatgagacgttcctggaaagcctgattggccactcatttgtttccactgccacctccccaccccccagatggcaatggatattgccatgacaacataatgggatgcaatcacacctattgtggggcaggaatgttgactgcatgaaagagtgtgtgtggggccagggagaagatgagagaaacatagaccctcttgtgcccaggaagaaaggaagttaattcagaattgaggagcctgccttctgaattttaagttcccacctgatgcctatagaaactgtttattacttgccagctcacattattctcctactgtcacagtctttaaa

SEQ ID NO: 245289 - DNA, 208 bp, Homo sapiens
aactgtaaaatggtattagggcttatttcaataaatatatattaaattgtttaaagtgacccactttagcaagaattgtttgttactggttgctttcagatcagaagggagaaaagatggatgacctgccacggagccacctgtaagtggaagtgagcaagcaggaagtttttagtttatttaaaatatctgcccaaaaaaaagaaaa

SEQ ID NO: 245290 - DNA, 289 bp, Homo sapiens
tactaacacatacattaaaaaatacaaactttgaaggttgatataaaaataaatacaatttctaacatattctcacgttccaatgcgtcatcttgtaaaagccagagatatcactgttctaaactgctgctgccagggtaatctacctaaaaacccaaatctgatcatagtacatccccagttcaacccttcaatggcatcatatcccactggcacatgcctacttcatcaacttcctctcctgtaatctttatccttatatcctgtatttcagctttaccttttatct

SEQ ID NO: 245291 - DNA, 380 bp, Homo sapiens
ctcctgggcttaagaaatcgatcctcccacctcgcttcccaagtagctgggactgctgtcgcctaccaccatgaccagcttgttacttattttgttgctcaaattgttcccactttaggcactaggagctctttcacattggctcttgtatccctttgacatattgtcatccttgtggaggttttgagcaattctttactttctgtgactacaagatgctccagggatcctcttcctgtctttttccttgtcttttccacagcaccccagttactagcttaaaaatgacccacttctctctcccaggatgggagcattttgcatcacctagatatagtacctgtcctctcaaccctaggatttgactcacctgtccaatt

SEQ ID NO: 245292 - DNA, 331 bp, Homo sapiens
gaggagaaaaattgattttcaatattacatagttaatttgcagatgtaatttcagtgggaagaattgggaagagttccaaaatacaatgcctgaagcggaggtaatgaggattgatctcaggaataaaatatgtccagaagcatgttttaaaaagttaacccgtaacaggaatccatacaggaatccatacagggtaaagtattacttccatgaactaatcctcccatatggtcattgctgtttggtttgcaattgctgcattgccaatctcaatcattgagaggctggaggaggtttaggaagaaacagtgcattgatgtcaaaaaaagg

SEQ ID NO: 245293 - DNA, 235 bp, Homo sapiens
cccgccccctcccccttgtcggatgcccccagtccgcagggggcctgcgcgggcgcccgtctatcaagggctcgttcattctggatgggtgccgcggggttggggagggtgtagggggtgggggggggaggagaggtcggggtggggagtggggagggaccgaatgcggggacagcgcggggtggagaggagagaaaaagcaaaaagaggaacaataacaaaagaagaaaatata

SEQ ID NO: 245294 - DNA, 380 bp, Homo sapiens
ataaaaccaaaaaaaaaaaaaaaaaaaaaaaaaagcatttatcaaggatatttgtttagttgtatttttctaaacaaataaagggtggcatggagttatactgtacttacacggtgacaatgggttgccagccacaccccaaatagtttgcatttattattagtttattcaccagcttagtcctcctgtgaggaaatccaatctctaaaaatattcttccctgtcctcttcacactgggcacccctaccccacacagacaccactttgcttaggggagggagataagaattctgaattcactacagtgattgcttccagtggatggtcaatccagaattggagacaatcctgcatgaatgccacatttattaaaaaaaaa

SEQ ID NO: 245295 - DNA, 411 bp, Homo sapiens
ttttaaatacaaacaagtattataggtgttaccactgaccccgaaggtaagatttactgtgaaaatttataatgcaaggaagaatgatcaagttggctgtcagaacaacaaaatattacaaaccaggatgtctaagagcagaagtccgtggttgccacctctcaagcctcttagcttaatccaatctaggatgcatttccactctgcaacaaacagtatttatttttgccttatttgcagataacagttttaatgcaggtactgcccatggattagctttgagcagtgtctttttgctttggtttttttatttgtttggtttgttttgagactgagtctcactcagtcctccagcctgggcaacatagcaagactcccaccccttaagaaaaaagaagagagaaaaaaata

SEQ ID NO: 245296 - DNA, 252 bp, Homo sapiens
atcctgtgcctctatgcaagagacataaagatattttcccattttgaagaaattatataataagaaaaataatgggaaggaacagtattaagcaacagctgatcattgctaacaagggcagacaagcaaagtctgtagggaatcaaagcaaagccaaaaggaagactagtagaaggtgaagctggatttctactaaacgaagaaagagcttgagctacatgtagaggagagaagaaacattgcatgaggtgt

SEQ ID NO: 245297 - DNA, 373 bp, Homo sapiens
attatatctcttctgcagactgctccaaaattactttactaaggggggctagtggtacaatctgattgggaagggagtgcgtaggggacttgtctggaagctgcatttgcatagcagacacttcattttatttgcagtgattgagggtgagtgttacagagtttaggaagaggtaagctaatgcccccgtataccactctttcagctgtcactgacctctaccggcttgcctatgatagtggtttccaacaaatttagctgctcttcaaaatcaccaagggagtaagatttttttaagtacttattttcagatctccctccagagccactgagtcagaatctcttgagtggagcttgggaacctagtgtttaa

SEQ ID NO: 245298 - DNA, 250 bp, Homo sapiens
tttggggcattcaggctgactgaattttagacccaattgacagtcatttttgcttgagtctttttgaaaatctttttagtattattaaaatggtttcttgccttaataaaatatacagaatatataatttaacatgtatttggctttgatagcacctcaggctcttgttcatcaattattgttttagtgatttataggtgtagctgttgcaaaaggaaggtggtcacacagcacatagctgccatgactt

SEQ ID NO: 245299 - DNA, 290 bp, Homo sapiens
tatcttacaggtcttgatataagaggcaccggacaacacaatgaatggtatctttggtaaactttttaaaaacaaaaaagtataggaatgtttcacatacagccattttcaagaaaaagtcaaaagcataatgttaaattttaggttggtgaaggtatttctacaaagagccaaataataaagtatatagcttccctgttatctgccttgatataggagaactatggaatctggaggggaaaaagcatgcatattccatttattttcaatgatctcattcaggctttccg

SEQ ID NO: 245300 - DNA, 529 bp, Homo sapiens
cacagcaaatcccaccacattccactcatcaaagcagtcacaggccagcttaggttccaagagttggaagaatcaatccacctcctctcaatgaaggattaatatttgtattcaatgagagaataaaatgatggcaccatcttggtaacaatgtagagtagcaggactgtggttgtgtgtcccaggctagaaatcatacattcaagcaagcaggaggatagtaaagtcaaggcctccaaggctgaaacacagtacagccactctacccaaccactgggtatctagaaaggctcactggtgagcagccaatctttccaaattaaaagtcctgataatgatcatcactttctaaatgagaggtcttgaggaagatgtgaatgggaaggaacagggtgccaaatttttcccaagggcttttaatttggttaatgtgactctacaaaagatgattgtatcactttcagacaattccggtagcaagtaagtaatttccttttactgctacagagttaatttgcgtgtgcagaaa

SEQ ID NO: 245301 - DNA, 453 bp, Homo sapiens
caatacagttatcaacttcaaaattgtaaactgatacatgactttaatctaccatccatattcaaattttgtcagatcagcttgtaatgtcctttatagcatttccccctccagttcaggatctactctataggagtcagccaactttgtttataaagaaaatgtaggcccggtgtggtggctcatgcctgtaatcccagcactttgggaggaaggctgaggcgggcagatcacttgaggtcaggagttcgagaccaacctggccaacatagtgaaactccatctctaataaaaatactaaaattagcggggtgtggtggcgggggcctgtaatctcaggtactcaggaagctgaggcaggagaatctcttgaacccgggaggtggaggttgcagtgagtcgagcctgggcgactgcactccagcctgggcgacagggtgagactccatctca

SEQ ID NO: 245302 - DNA, 212 bp, Homo sapiens
cggcacgagggttgactatggatttctgggaatgagggtgaccctcagtgtcaacagcaggtctaattggtggtactgctctgccaaaaatgtaccaccatattgtcaacttcaccaaaatgattgacatttacgtttgtatcatctggacttttacttttggttatggaatatttttaatgaggacattttgaaataaaacactgaagaga

SEQ ID NO: 245303 - DNA, 386 bp, Homo sapiens
cagacatacagaccaacagaatagtgttaagaatacagaaacaaattcatacacccacagcctgttgatttcccacaagcacgccacacctgttcaatgaggaaagaataatctcttcaacaaacggtgctggaataactggatttccacatgcaaaagaatgaagttgcactcctatccaatacatataaaattaactcgaaattaaaagctaaatgtaagggctaaaaccgtaatactctcaggaaaaaaacaacaggaacataccttcacaaccttgaatttaaattcttatatacgacaacaaaagcacatgcaacagaagaaaaaatacagaaatcagatttaatcaaaactaaaaacttttcagccaggtgcagtggttc

SEQ ID NO: 245304 - DNA, 503 bp, Homo sapiens
ctactactactaaattcgcggccgcgtcgacgaaagaataaacatacacaaacttaaagagataatgataatattatagaaatatctaagtcctggctcaacccatgaaatagctatgtgttggaacttccttaaatgaacaggtgtgtgagtgtgtgagagtgtgtgtgtttgtgtgtgtgaattctgatttgagaacagataaaattaaaactctacagctgggcatggtggctcatgccagcattttgggaggcaggggttggaggatcgcttgagcccaggagtttgggaccagcctgggcaatatagcaagatcccctctctacagaaacaaacaaacaaacaacaagaccctttatgttacctcctagaggtaggagtcaaggaagagaggcaccttaaaagttgaacaggaaagagagcaatacatttttattaaaaaattgtttggcatagcaaggattcaagaccctgtctctaaaaaaaaaaaagtagacgcg

SEQ ID NO: 245305 - DNA, 479 bp, Homo sapiens
cgcgggcagaaggaggcggtagccctggtccctgaaaaccaggccctgctgacaaatctcagacgccaggaacagaagaaccaggaaaaatgcctgacagcttgagccagatggacggactgttggaacacctgagggtgaagctgcgcgaactcctcaaagaggaacagcaaagcagccaccaagatggaccagaaagatgaacaaagaaaattagcagaaatcaaaggcagatgctaaagcagtacaaaaccgttcacacaacgatagagacggaattgatgaagaagtctgataaatgaatgacagagtgaaaggacagcagtgaccatggtaaggtgctgacgattctggtccactggatcccatcatccctaggacagtaaatctcatcgcagtcgccactcagcaagttaccactgcagcatttcctgtttgttccaaaatgaataaaggtgattctcatcacaagggcaaat

SEQ ID NO: 245306 - DNA, 380 bp, Homo sapiens
gtaagtgagctaattttttacttatatatctgaccccttagtatatatcatagcctttcaagggcaggaatagagtctccatccttacttcccagcacagtacaaaatagtaggtatttgtggaatgagtttactgaaacaaaagagagaggtcattaatttggtcactgtagaatgaactttaggaggtcatctttatcatttattgccccttttctcttcagttgtgatttcagttcctaaagaaaaataagagaccgtggctgggtacagtggctcacacctgtaatcccagcactttgagaggccaaggtgggaggaccacttgaggcccaggaatttgagaccagactgggcagcaaagagaccctgtccctaca

SEQ ID NO: 245307 - DNA, 173 bp, Homo sapiens
taccaggcacaggcacagacgcacacaaagacgaccagagaggctcccgggctccactctcatggagctggtccaatccacacacaatgggtactagcaacctcaaattttaaagtttgtttaaagcatgttacctataaaaataaagggcttttaagagccgtaagtggaaa

SEQ ID NO: 245308 - DNA, 182 bp, Homo sapiens
ttgcacatgattattctaactctattacatgctacttatttaaaagtaaaaatgtcagccgagcgcagaggctcacgccgatatcccagccctttgggaggctgaggtgggtggatcatttgaggtcaggagttcaagatcagcctggccaaaatgttgaaaccctgtctctactaaaaata

SEQ ID NO: 245309 - DNA, 368 bp, Homo sapiens
ttgttctaaaactatcaaaaaccagaatcatccaaggcatgatctgaactggactcaacctgaagaaaaccagttctctaccttggcttccctcatattagggaaaattctcatggattaaagagggcaggcagactggggggaataataaccgtaaatgtttaattacagaatatgattaactggctacgtgtgtgcttcagtgagcattcagagcgttaacaaaagtaagacacaagaattcttggaggccggacacagtggtcacacctataatcccagcactctgggaggccaaggcgggtggaccacttgagctcaggggttcgagaccagcctaggcaacatggcaaagccctgtctctaca

SEQ ID NO: 245310 - DNA, 248 bp, Homo sapiens
gtattttaagaggtgagtccttctatgaatatcttgaccttgaggtttacaaaggacttccagaccatggggtttgctttttatcaagtcgtactgtttacataaagaagtgcagaacctggctgggcacaatggctcatgcctgtaatcccagcactttgggaggccgaaggtggatcacttgaggtcaggagtttgagaccagcctggccaacatggtaaaaccccgtatcaactaaaatgcaaaa

SEQ ID NO: 245311 - DNA, 475 bp, Homo sapiens
ccaatggaatggtgctaaaccattcataagggatctgctcccacgatccagtcaactcctgctgggccccatctccaacactgggaaccacatttcaacatgagattgggaggagacgaacatccaaaccgtattatgtcaatagtggttgctaaaggctgggaagagcaggggggaaggagaggagcagaggttggttaatgaggtacaaagttacagttagataggaggaattaattttggtgttctgtgcaatagggtgatgatatttagcaatatgcgttgtatacttcaaaatagctagaagagaggactttgaatgttcttatcacaaagaaatggcgtgtttgaggtgatgaatatgctgattaccctgatttgacattacacattgtatatatgtcttgaaatatcatactgtaccccataaatacatacaattattatatgtcaattaaaaacaaaataaacgtta

SEQ ID NO: 245312 - DNA, 1247 bp, Homo sapiens
ctaacttttataaacactttatctaggatagctttcttttagcctttagtgtggtataattactaagccaaaaggttagcagatttaattttcgttatcaattagttgtttaagctttttatttgccctttatagtctttttcctttttttttttgaaacagagtcttgctctgttgtccagactgtagtgcagtggtgtgatctcagctcgctgcagcttctgcctcccaggttcaagcctcccttgtgcttcagccttttgagtagctgggatcacaggcgtgtactaccatgcctagctaatttttatatttttagtatagatgagggttcaccatgttggccaggctggtcttgaattcctggcttcaagggatctgcctgccatggtctcccaatgtgctggcattacaggcatgatcttacagtctttaaaaagaggcagtaaaaatgttgaaatcttttttagaaacttctgcacatcaatagacatcgttggatgagactaattgaggattcctcactttcaaatgtactgaattacctttagtaagattttgctatctctttaagtgtttgctgcttccagggcttaatatttatacatgtataggtaggcatagccggaaggtggagtactcagttcttcagaaattaaggatctcatctatttggctttggctcttggatcaccttgatcaatttaaacagtgatttttccctacgtaagggtgaaagaaaaagaaacaaatggggtagaacacaaaaattcctctgaatttccaaaagccaaagcttgcatccccggcagtgttgccatttactaccagtttctgtctgacccagtcagacatctgaggcctctaactggatccaggccagttaatgattagatccaattctgtcctggacccagtccagtttctgtcacaacttccaaattcagttcagataaaaaaaattgctcaaactcagatagctcaaaacatacatccatggagctttggaatcctagagagaagcaccccatttgctgcgagagagcagtagacacaatggatcctgtgggtacctcacttggccgcttgtttctgggggttgctgggagctcgactttggatcgcacttctgacaccatctgttaagggaaaacttgagacaaatttaacagagtttatttgagcaaagaatgatttaagagttgggcagcccctgaaccagaatagattcagagccactctggtgt

SEQ ID NO: 245313 - DNA, 400 bp, Homo sapiens
cctgggcgacagagtgagactccatctcaaaaaaaaccaaagtgaccaataaacatatgaaaagatcttaatattattatagtttttcatctaggaaatagatattaaaaccacactgagggccgggagcggtggctcacgcctgtaatcccagcactttgggaggctgaggcaggcagatctcttgaggccacgagttcaagaacagcctggccaatacagcaaaaccccacctctactaaaaatacaaaaattagctgagcatggtggcatactcctgtaatcctagctactcaggaggctgaagcactagaatcactggaacccgggaggtggaggttgcagcgagccaagatcacaccactgcactccagcccggatcacagaccaagactgtttc

SEQ ID NO: 245314 - DNA, 226 bp, Homo sapiens
agatgcagctgctgtgctttagaatgtgctccggctgatcttaccttcatgccttctttctttctacctgagactacacgaatataaagcacagctccaagctaaactgttacttggaaatgaagcccagtaaatactaccctctccctcaaaatcctagggtgggaacatgtcatatacattgaagaggggggaatagaatgctcataaaaagatctctgtatgt

SEQ ID NO: 245315 - DNA, 590 bp, Homo sapiens
agttaaagttactattttagcaagactaaacttttagcatgtattttgatttatgttttcaggtgatttatagtttttaaaaatgttagtatttattttttcgaataaatcacaagtctggaccagtcactcctgttttacagacagaaacactcagggaatttttatgatcagtatctggtgcttggaagacactcctgtgtctggatgtccactgaccacataactattaaatgctttttggcaaatgggaagattggaattcaaagttgtgcgtctattttctggtgcatatagccacaaacagagacaagtctttacaggtaacgattgttcaagttagaattgtatttcaggctcttgagctccgttgtctttttcatgatgttagaaataaatactatgatattatgtttaccaatatagtatgagtaactacagatctatcaccgtggagtgcccttttggtagtcacatttggtaaagtcatatgtctcttcagcaccactgttggaagttagatacagcaaactgaaccctgagagaatatatttctttcacattaccttcattggcattttccccgtagg

SEQ ID NO: 245316 - DNA, 371 bp, Homo sapiens
gatttttgctcagagtaagaatgcatggtcatctcaactctaaatgccccacagttgctaatgatgtatttcatggagggtccccatccctaaaagcaataattaattaactatacaagtgactaattaataagtcttcacaaaagatgctgtgaacagaatccatataaactctgactgctataggcattatggcaggttacattatttcaaactttactatgtgccaggcatggtggtaaataattgacaaccattatctcattagatcttccccaaatgcccatgaaagagggactgttatctctgtttttcagataaggaatctgagaattagaaagattaagtaattttcacaaaatcacagagat

SEQ ID NO: 245317 - DNA, 246 bp, Homo sapiens
aacgtgggtctattttctgggatttgtattctggtccattgacctatttgtcttttactaataccacaacatcttgattactgtaactttacagtaagtcttgaagtgggatattgtcattcctcaaacaatattccacttcttcaacagtgtgttgactattctaggtcttttgtctctccatgtgcattttagagttagtttgttgatatccattaaaaaagccttcttaaatttttactggga

SEQ ID NO: 245318 - DNA, 450 bp, Homo sapiens
gctgttgagattttttcattgagagccctcaccagcatatggagggaaacacagtgttcttctcaatatctcccagtgattcttggagtgactcaggtttcccacagacatctccaatctgaatgccagtttttgctgaatcctacagcttttctgcactttgccttctgtgtctaccaccccctttctgtgctgggccactccactgggcacaaccccaatgtctttcttccccagaatcctcatgaccgaaggctctggaggcagtaagtgcttcccgaaagtttgagacaatgacctcacagctcagcaaaaaaacttaaaaggaaacattagacattattcttaaaagcatttcttggcccagcgtggtggctcactcctgtaattccaggattttggaggctgagcccaagagctggagacccagtgtgggtaacatggcaaaaa

SEQ ID NO: 245319 - DNA, 114 bp, Homo sapiens
aactagatattgaaggaacatacttcaaaattataaaattcccattttattgtgacagaaactgaggcagagagcatttaagtgtctcattacacaggatagtggatggattgg

SEQ ID NO: 245320 - DNA, 148 bp, Homo sapiens
tatcaaaagacaatgctttagatatctgttcttacaggacagtgaagtattagaaaatcatgggaaaaagaaaaccaccggcaaatatttttccattttaaaatgccactgactttaagacatgctagttttgagaaaaaaaagaaaa

SEQ ID NO: 245321 - DNA, 446 bp, Homo sapiens
cgaggagtcgccccccatcgcgcacagcagctaaggttgtgcactgcatcagggcgcgcggctgacggagcaaggggcaaactgaaatccaattctcgctccattcgccaagttgtgagcctcggagtgggaacagcggacaccacagagtcaggtgtcccctgtgcccgtgtggacagagtggggatcctcagctactcaccaaagctttgttcaatgcccactttctgctgacccctcgctggatgatcctggagactcagtaatgatgagaccatcctgcgccatgcattcatggggctcccagtctaactgggagactgacacaagagtgacccacgcctgttgtcccagctactcgggaggctgaggtcggaggattgcttgagcccaggagttcgaggctgcagtgagctatgcctgggagagagtgagaccctatctct

SEQ ID NO: 245322 - DNA, 551 bp, Homo sapiens
gagagcattccaagaaagccctacagaagctccaaggcttcacctaagctagcctctatagtcactcaaccacacttctattgcactgtctctgttgcgggctaaggtcagggccagcccagattcaatggaaggggactacaaagagcatgcatgaatacaggattcttgattcatcagtgaggagggggaagatcttttggaggcaacacatcagactcttgctcatctttttctgccccttcagatatgtcaaagagaagaggaagtgtgtcatgtgaagactaaagaaacttttagatctgctacatctgggttcacagcctgactccatcaatgaccagccacgttatatatatatttttccctgatactatctctctaagggaattgacaatacctgctgatattgtagggttattgtgagaattaaaaataaaatgggaacagcttttgctgtaaagtagaccgtgggcaaatggtggttattgttcacattattttcaaaatctaagaaataaaaacttatttaacatgagaaaaaaaaaaaa

SEQ ID NO: 245323 - DNA, 587 bp, Homo sapiens
tgtttttgagtttttattatggaacattctaaatatacacaaaagtagaacagaataaaaaaacccatctacccatcacccatcatcaataccaacactaagacaagcttctttcctgtgtactcccatatatgcttcccatcccccatggattaaagtatgaagcaaagtccgatcatatcattcattagtaaattatttagtatgcatataccaaaagatttttaaaaactataaccacaataccattttcaaaaacaattctttaacttctaatattcagtcagttttaaaatttctccaattgtctcataaatgtgtttgtggttagctttgatcaaattaggatccaaacaaggtctatacattgcaattaaaccgataaatatctttaaattcattttactctacaggttttcctgcccttctttccttaaaaattttttttccttagatcatttgtcttatagaatttcagtgtggatttttgctacttgtgctcctgtggtgatttaacaatgttcccctatatcttaaatttctaataaactactcatcagatctagaaacttgatgagagtctagag

SEQ ID NO: 245324 - DNA, 479 bp, Homo sapiens
tgtagcagatttactatttattttttatttttttagatttactatttataaatgacttctaattattcacatcttggggaaaataatgtcatgcatactaagaaaatctgaaattctttagcattacatacttgactaataagttaaaaaaacattaatttttgattatgtcaatcaactttacaagacgtgaaataatcattacttagtctaggaacattgaggtggaacaggaaggcagcaattgaaatgagctttgtttgagtcatgctaagtgtgaaagtccattaggcactaatgtagagatgcagacaatatgatgtttcattctggagtttcggagaaaaagctcacctgccgatattgatttgtggtttcttggcctagaggttgtatttaaagccatgagaatatttgacatcatcaaggaaatgagtgaagacagaaaaccagtccaaagatcacccaagggtcttcca

SEQ ID NO: 245325 - DNA, 441 bp, Homo sapiens
tctttttggaaacagggtcattgcaactatagttagttaagatgaggccatgctggagtaggctgggcccctaatccaacatgactggtgttcttttaagaagaaatgatttggacacagataccacacaggggagaacaccatatgaagataaaggcaacaatgggaatgatgcctttgcaaaccaagtatgccaaagatcaccagcaaaccaccagaaatagaaaggcatgaaatagagtccctctcattgttttgagaaggcaccaccaccctgtggatggcttcatcttgggcatctggactgtaagacaatgtggttctgttgtttgagtcacccagtctgtggtactttggtacagcagccccagcaaatgaatacactgagaaatgtaacaattgaaaaataaatttttagaaatacgtttgtccttaaaaaaa

SEQ ID NO: 245326 - DNA, 230 bp, Homo sapiens
cagccaacatccagcacccaccactagacatgtgagtgaaactatcgttggacttttcacctcagctcacctgctagcagaatgtagctgcatgaataagcccaggggaaaccagcagagggacctcccagctaacccacagaatcatgagaaataacacattgttattttagttatgttttggggtaattcgttacctagcaatatttaactgaacagaggccttaact

SEQ ID NO: 245327 - DNA, 500 bp, Homo sapiens
aactcctccactccacagcagggcagccttctgacgttccctattagagcctgggaagttcctccaaggaatatctgcctatgcattgccattacaggatgaggctgtttgtgaactcatcccataagaagcagcacaaagcaaagcattcaaccaaagaaactcttcctataaccttctcacttgaaaactgtgataaaataaaatgtttttcttcgatgatttaaagcctagcaaaagtctttagaataaacagacctcaggtctcataaggacccctaaacaaagaccagccctcgtcacaccaggtcacagctgctaagtcccccttgtattcctgtgctgaagtaacaggagtttagtgtgaacatcagaaaggtattttgggggttacagacacagcacaaggaattaagaaataaagagcagcagagacactccttggcaaagaaaaggaagagagcactaaaggttcaaaggaaaaaaaacctatgcggccg

SEQ ID NO: 245328 - DNA, 701 bp, Homo sapiens
gaaacgcacactgcaaagtctaccacttgtgtgattcattcctcattcagattacctaattcctaatctgcttaatttcccaaacagtgaaaccggaggacaggccatgaactttcacgtacaagtctttacattggcatacgcttgggtatcctgggtaagtatcaagaaatggaatggcctagtggtacagaacgtatatctttaacttcttaactaactttttcaattttttttttttttggagatggagtctcgctctgtggccaggctagagtacagtggtgcgatctcagctcactgcaacccccacctcccggcttcaaccgattctcctgcctcagcttcctgagtagctgcgatgacaggcatgtgcaaccacacctagctattttttttatttttagtagagacggggtttcaccatgttggccaggatggtctccatctcttgatctcgtgatctgcccgacttggcctcccaaaggtgctgggattacaggcatgagccactgcgcctggccttcaactgtttttaaataattggaccttttacattcctgccaccagtgtgtacgagctcagtagctccactttcttaccaatcacaatatggccagtctttttaattttagcctttctagtagattttattagtatctcattgtggttttcatttccatttccctaataactaataa

SEQ ID NO: 245329 - DNA, 438 bp, Homo sapiens
tctttaaaagttgtaaataaaacctaaaactaagaagcaaaattggaaccaaatgcctgcagaagctctgtagagaggacaatttgaaaaacactgttatttcatgatgactttgtgtataagacaacagtattgaatgccagttaggttggctggaggcttgtctgggttgtattatttatatggctctaaaatgaagttgagctaagatatataaatggggcaactggttttcctaatcaggatcatgtctgtgtttccatgtttgtttcacaacagtacgagggctaaaccatttgaatttgacaactacatgccattaaatgtattctgaatgtagtatatgagccagttcctctcaatattttcactgaataacaacatcaagacatttagctgacaaatgtttttctttctaataaaccctaatagtatttg

SEQ ID NO: 245330 - DNA, 450 bp, Homo sapiens
ggctgggcacagtggctcacacctgtaatcccagaactttgggaggccaaggcaggtggatcatgaggtcaggagtttgagaccaccctggctaacatggtgaaacctcgtctctactaaaaatacaaaaattagccaggtgtggtggtgtgtgcctgtaatctcagctactcgggaggctgaggcaggagaatcacttgaacctgggaggcggaggttgcagtgagccaagatcatgccactgcactccagcctgagcgacagagcaagactccgtcttgaaaaaaaataaaaataaaaaaatataaaatttttattttttagagatggggtcttgctaagttgcccagcccaatcccattactcaacatctttttggggaactgagagttcagaaggacaagtaaaaagctaataccctctccttgtaaatgccaaaaagcccaataa

SEQ ID NO: 245331 - DNA, 541 bp, Homo sapiens
taaattcgcggccgcgtcgaccaagctgtggaatcaagacaactttggctgagtcccattttatataggactaaaggagagtgcagtcctcaaaggcaataatatttatgagaacaaagaagactgtggagaaattttaggcagtagaagagagcagaaaggccaagaggatcagggttgaagtaagctatatagcaaatcaggcattgcccagttacctgggaattacattcaggcaaagcagaaatacctgaagctagttgcttatacaaccaaatattgagaagtaaagatattttcatctagaacaatcctaaaaatcactcttgtttctaaaaggccaaaggtagtgggcaggtatacaaagaaagggatatttatgagagagggcctgacatttaatctatttatgtaagtgacatcaatacatattgtcaagcctggatatgacataattaatcattaatacaacctaattgcagaagttctttttaaaaatagagttatgtctcagaataaagaaagatccctagctccaaca

SEQ ID NO: 245332 - DNA, 383 bp, Homo sapiens
ttatccctttatcttcaactcccttcaaatcatcagtattataggcaagttaagtttctattgtatgtattcgttttgtgcagctttatgtaacaaaactggtgtgtgtgtgtgtgtgtttgtgcatataaaagcacaaggtaccaccagagcacaaaggagaagcaactaagaggatactggaacatgagggaaaggttcatgaaaaataattaaggatatataagggttattctgataaggacagccgatagagaacagagaacaattctggggatggaagagcatatgcaaattaggtacaaaggctcaattaatacagcatgatttgcaagctattcactgtggctgaaatacggatgttgcatacatgtatgcattaa

SEQ ID NO: 245333 - DNA, 1279 bp, Homo sapiens
cactgactctggttagctgaatacccgatgttgacagtttctccctccctctctctctctgctgtttcctctatagagctaagtctggtttgcattgaaataagcatgcagtaatatgccttttgccttaccaacttgtatttgcacacaggcagcacagattcaccatttcacttcctaccatgaactaaaagaattgtatctcttcaacaaacaccactttatttttaaccttttttttttattgtggtaaaatgtatactacataaaatgtgccagtgtaaccattttaaaacatacaattcagcggcattaagtacattcacagtactatgcaaccataaacactatttccaaatctttttaatgactccaatctgaaactctatatccattaaacaataactcagattccctgtcccccaaacctgtggtaatctcaagtctactttctgtctctatgaatttgcctactctagatatttcacataaatacaatcacactgtgtttgtcttttcgtgtctggcttatttcactcagcatgttgtcaaggttcattcatgttgtagcatgtatcagtacttcattcttgtttctgccagaataatattccatggcatggtcataccacattttgcttatccatttatttgttgaacacttgagttgcttctgcctgttggataaagtaagtaatgttgttctgaacattggcatacagtgtttgtcaatatacaaacattggcatataatgtttgagtccctgctttcaattcttttgggatatatacccaggagtagctttctgggtcatatggtaattttttgtttaacttattgaggagctgccaagctgttttccacagcagctgcaccattttacattcctaccagccagcaatcacctttaaacatgaaaaacatgaaaggttttaaatgatatttcccaattttctaagtaaacatatgaattatagaatcattgggaagcataagagaaaaaagaagaaatacctactcataatcccaactgtgtaaaggtaataactattaacattctatttttatttatttatttatttgtattaaaaaaattaagacagggtctcactatgttgcccaagctggtctcaaactcctgggatcaagctgttgtctcacctcagctacttgggaggctgaggcaggagaatggcgtgaacccgggaggcagagcttgcagtgagccgagatcgcaccactgcactccagcctgggcgacagagcgagactgtgtct

SEQ ID NO: 245334 - DNA, 537 bp, Homo sapiens
tttctgttgttacaagattgtttaaaagaagaaacttaataactgttaactctttcagcacttatgtttatttcataaatcatgttttcagacaaatttctctcaaaatggttggtgggggaggaatgtacactaatcagaattactaagacagacaaaagtggttgcagcactgctttagttgctcctttgagttttgttaccatcataactgttcaaaacgaagctttactttctttacatccatgtttttctttttaaaaatcattacattcacgcctgtaatcccagcactttgggaggctgaggctggtggatcatgaggtcaggaattcaagaccagcctggccgatatggtggaaccccgtctccactaaaaatacaaaattagccaggtgtggtggcacatgcctgtaatctcagctactcgggaggctgaggcaggagaattgcttgaacccaggaggcagaggttgcagtgagccaagtcgtgtcactgcactccagcctgggcaacagagcaagtctctatcctaa

SEQ ID NO: 245335 - DNA, 897 bp, Homo sapiens
cactattatgatcttcctcgttttgaggttaaagtcggtgtttcctttctctgggtgtgagaatcgaccatgatgctgtcacagccaagacatttcctctcaaaccacggtgagcgcagaggtttcacaagaaattttccttcccgtccatcatgttcttgggcttgaacgaaaggttatttgtagttggaaagtctgaacgacatcatcagacacgttgtcttaggttgtgtgggaagaaaagaatcagtttaaacgaggcttacaatttcggttgcatttcaaatgggattgctttaaaaatgccaagcacataagaagagcctgtgcctagaaactcaaagagagtggatgctgactgcgtgtccagtccactcccggggcacagagcaggcactcgagcgatggttgtcgaatgaacaaccaaatgggtgaatgcgtgagtgggtgagcaacacattctgaagtgaccggaatgttctggaactgatcaccatcttctgctaatgctgactcatgttctgactttgaaccgttcattaggcgagagctaactaccttgagaggctcctggtgatcgtaactcttgctgaatggggaccaagaggcacttcagtgtaattagttccagttccatgacccaaagaggcctgagcggcagcacgtttccaacacatggcctgctccaggtcttgaagaaatagacacaggcaccactaacgctttggctgatagattatgccagcaatcaggctctgtggaggatctggtgcacagggaagataacgtgtttaatctgtctcatgccccttcttgagccaatcactgtcagggggatggggaccttagagatgatggggattcatagctgggtgtgaggatggggactcttcccct

SEQ ID NO: 245336 - DNA, 508 bp, Homo sapiens
gcacgagaaaaaaaaaaaaaaaccatcaggagccatggctcatgcctgtaatcccagcactttgcaaggcctagaggccaagacaggaggatcacttgagcccaagaatttgagaccagtctgggcaacacagggagaccccatttctacaaaaaatcagaaaaaaattagccaggcttggtggtacatgcctgtggtcccagctacttgggaggctgagatcacttgagcccaagaggttgaggctgcagtgagccatgatggtgccactgcactccaacctgggtgacagagcaagaccctgtctcaaaaaaaaaaagaaaactcctttcattgaagacataaaccacaatgggaagtacttagttctgaaagccagggcataggacctaggctcttgttcaaaatttcctgcagaacagctctatcatgtaattcttctttattctatttttcttttttgggagtgaacagagccatctgctatagtgtgtttgttaaaaaaaaa

SEQ ID NO: 245337 - DNA, 369 bp, Homo sapiens
tgctgatcttctcatcctagaggtctcactgcctctgtgtcctgaagcagacataccctaggccttctgagataaacacacaatctcctgcctgctctacatcaggcagtctgaaggcagagaggacctgcagatacttgaaagaaacagctcatctgctttgggaaccagggaaattcatgccacacttccaggatcactggtctcaggaggatttaactcaagcttggagtaagagttgacatccacaatgtcatcatcatctaattctgtttcctctttccctgccttcctttgtcctagaagcattctgtgatgactaacaaactgatttattctgattaaaaatagtagctatcattattcaaa

SEQ ID NO: 245338 - DNA, 451 bp, Homo sapiens
cttttggggttgtggatccctttgagaatctggtgaaagctatgaagaccttccagaaggatgcacatactatacatgccattttgcatacagtctctgggtatatcgacctgtcaatgtccattgaccacccccaccccccagttaagaattacccacttctggctgggcgtggtggctcaagcctgtaatcccagcactttgggaggccgaggctggtggatcacctgaggttaggagttcaagaccagcctggccaacatggtgaaaccccttctctactaaaaatacgaaaattagccggacatggtggcatgtgcatgtaatctcagctacttgggaggctgaggcaggagaatggcttgaacccgggaagtggaggttgcagtgagccaagatcatgctactgcacttcagcctgggcgacagagtgagactctgtctcaccaaa

SEQ ID NO: 245339 - DNA, 440 bp, Homo sapiens
tgatagataatgtatagttgagaaatgttaagtttctgtgagtcacctgaactctgcttgctctaaatttcttctgaatcctgaaaggccccaaatttgattggtgaatacagagggcttcaatagtgagtcctgataccagttcttgatggattatctctttactataatcacctatgctcacagcgggctatgggttttccttgtgaaatttattatgttggcgcaaaagtaattgtgatttttgccatttttccaccaacctaataaaactcccatttagcagaagctgttgatgaagaaattatctagaactccacgagtctatcaactattttgtttccaaatgagggaagtgttgtaaaggcattaggatgttggtatgatgtacagatatttaaagggtctgataaaataaaggatgtttttctaagcatatg

SEQ ID NO: 245340 - DNA, 604 bp, Homo sapiens
ctactactactaaattcgcggccgcgtcgacatttgataaaatttgagtaagtgcattttagattccaagataaacataatagatttaatgcacgtgcttatttctatacccttaggaaaccccaaggaaatgagagtaaaggaatacaagaaattgtataaaaccacaggacaaaaagaatgagaaaataggcagagtccaagaacactggcagccaagcgtcttcattccaatctgtaccctagaagtaggaggctggtgaaaatgatttttctgagagaaatatttttttctagaaaaaaatatgtacagatattgacctttggggaccactaatgatataattaactctgcttaattattcacctatggtaacatctgtaattattcacctatggtaacatatgttgggtgttgacaaagccacactcaataagaattctattctgcctttaaattttaatgaattattattattattattattattatttgagacagagtctcactctgttgcccaggctggagtgaagtgagccaagatcacgctactctactccagcctgggcagcagaccgtgactctgtctaaaattaaaaaaaa

SEQ ID NO: 245341 - DNA, 388 bp, Homo sapiens
gactttgactttggtgaggtgtcagtaaaatggtggaaaccaaaagcaagattatacttgcttaaaaaattaatgaaagacagtaaataaccttttcaaaaaatgtgtcaggccaggtgcagtggcttgtacctgtaatgctagcacttagtagggaggctgaggcaggcagactgctgagcccaggcattcaagaccagcctgagcaacatggcaaaaacctgtctctacaaaaaattagcaggtgtggtggcattcaactgtagccttagctactcaggaggcagaggtggaagaatcacctgagcccaagaagttgagcctccagggagccgtgatcatgccactgcactccagcattggcaatggattgagaccctgtctcaag

SEQ ID NO: 245342 - DNA, 320 bp, Homo sapiens
tctaagttagtcatgtgtagagactactgacaatgctaaaatcattcactgggcagattgaaatgcattttgtggatgttttctctcttagaaaaataattgttatcatttgaatttttttctgcgtcttagaaatatttttctccttgtgttcctgtatgattggtttggtgcacatcttcacttaactctccacgattctctcaggttctgatgatatgagagactgactccaatacctctgtgtccctaggagattgtaattgaaatgcgagctcttagcattttctctgttttgagcttaaaactgaagaactaaa

SEQ ID NO: 245343 - DNA, 403 bp, Homo sapiens
catacggtcggaggacttgaatgcccagtgacgtttggtgacaatctgaagccaccaaggggccacactctgagtcagaaaggacctcaggaaaggagttcaaacgcccaactgatgcaagaatccctctgcaacatccacgactgccagactcctgtttaaaactttctgacagcttcccacgctcacagggcaaagttcaaactccttgacgtgcttcaggaggccttgcgcagtctggcctctacttacatctccaattttgtttttaagtattcatcaatttgcttactaattcctttatcaacccatgcatcaaatatttagtgagtgcttacagtgtaccaggcactattttgggaattgaaaatacacaacaataaatgaaacagacaaaatcctc

SEQ ID NO: 245344 - DNA, 470 bp, Homo sapiens
aaaacttagctgtgtgtggtggtgcatgcctgtaatcccagctactcaggagactgaaggaggagactcgcttgaacccaggtggcagaggttgtggtgagccaagattgtgccattgtactccagcttgggcaacaagaacaaaactccgtctgaaaaaaaaaagccataattaagacttttcttagcaagtcatctccctcatcttccccgcaccttgctgaaccggcatctgacctacttggggccgggcccaagctggtattgggtgggcccagcaggctgggttgacccacccatctccaggggtcacagccttcagccggagccacccaccgcaggccaggcaggccggtttccaaaccatagaggagaagagggatcctggccacaccaagagcaggagccaaggttgtctcctggagaggagcgcacgggaggcagcgccaagccagggcacacacagtctc

SEQ ID NO: 245345 - DNA, 582 bp, Homo sapiens
gactatgcgttactgactctcttactaaccagcgctacagcctgatcataagtcatgctagggcaaggactgccctcctgggaaatttgaagaccttctggccaatgaatgaggtgtaatttctcagaataattttactctctgatgaaaggagggaataaggtaacgagatgttccctccctcccttctcacattggaccttgtgtgaggacgggacactggagctgctgtggccacctggaccaagagaatcaaggaggagctgacccaaaccctgatgctgcaaagccattggccagcgctggcattgtccgcctctggagtccttgttacaagagaattataaactcctgttgttgagactttgagaccccatggcggagacggagggtccttccactgcagcacaaagtggggcacttgcagtcacatcgcctgtgttcacggtggagcggatctactgcccttgtagggctgatgcattgcaaggggctgaacctcctgcactgtctcctcttggtgtaaataaacgggttaccgagcaggctctttttctttatttctcaacatatcacagaact

SEQ ID NO: 245346 - DNA, 510 bp, Homo sapiens
  misc_feature (23)..(23): n is a, c, g, or t
  misc_feature (33)..(33): n is a, c, g, or t
gctgaaggtgacttgactctctnctttaacgancgaaccaggtgtaatttctcagaataattttactctctgatgaaaggagggaataaggtaacgagatgttccctccctcccttctcacattggaccttgtgtgaggacgggacactggagctgctgtggccacctggaccaagagaatcaaggaggagctgacccaaaccctgatgctgcaaagccattggccagcgctggcattgtccgcctctggagtccttgttacaagagaattataaactcctgttgttgagactttgagaccccatggcggagacggagggtccttccactgcagcacaaagtggggcacttgcagtcacatcgcctgtgttcacggtggagcggatctactgcccttgtagggctgatgcattgcaaggggctgaacctcctgcactgtctcctcttggtgtaaataaacgggttaccgagcaggctctttttctttatttctcaacatatcacagaact

SEQ ID NO: 245347 - DNA, 262 bp, Homo sapiens
gcttgataattgccgggcgtactgttgtctcccacactcgggttaatttcataccaacagcggataggttggtccttccactgcagcacaaagtggggcacttgcagtcacatcgcctgtgttcacggtggagcggatctactgcccttgtagggctgatgcattgcaaggggctgaacctcctgcactgtctcctcttggtgtaaataaacgggttaccgagcaggctctttttctttatttctcaacatatcacagaact

SEQ ID NO: 245348 - DNA, 185 bp, Homo sapiens
agaccccatggcggagacggagggtccttccactgcagcacaaagtggggcacttgcagtcacatcgcctgtgttcacggtggagcggatctactgcccttgtagggctgatgcattgcaaggggctgaacctcctgcactgtctcctcttggtgtaaataaacactgtgccacctgagcctgat

SEQ ID NO: 245349 - DNA, 201 bp, Homo sapiens
aatggtcctcatacacacccagctttctgcctttcagaccccatggcggagacggagggtccttccactgcagcacaaagtggggcacttgcagtcacatcgcctgtgttcacggtggagcggatctactgcccttgtagggctgatgcattgcaaggggctgaacctcctgcactgtctcctcttggtgtaaataaacac

SEQ ID NO: 245350 - DNA, 215 bp, Homo sapiens
ctgtagaggtcgttttgacttgctctgacttcgcgcggttctcgcggcttccccggttcccgggttctgcacagcgcggctattaaagtgcatggagaagtgcagtccttgccccgcatcccgcagggaaatctcattttaaaagctcaaagatgtaatgagcgttaaaatctaaaatatgaaggtgttttattaaagtgatgtttgtgaacaaa

SEQ ID NO: 245351 - DNA, 472 bp, Homo sapiens
tgcaaccacgagccactttctctctcaaagtgcccaaagctgctccagtgagttgtgttcctctcactcaagtgaggttgggagctgtttgcaatgcacttgctctatttcaaaccacttcctcatgtctctttcctccaggctaggaaagaccctgctatttatcagatgagcttgggaaccattaggaaaactcaaagtcagaagcaatcaacctgcaaatacttccccgggggtatgggttgaggtcaccagcaggggaagcccccttggacacagtcctgcttgttttgcacctaacatgggctgctgggcccagaatcaaaagttctgtgtggcacagcaggctgagccgagttgaggaaacacaagagtggaggtgtcagagagctcacatttgctgttgtttcctcttgggaatcaaacccaagcttaattgtggtatcaggtgctctaaagaaacaaactgaaa

SEQ ID NO: 245352 - DNA, 393 bp, Homo sapiens
tgtgaagcaccgtcccctcccttggcagtatagggagaggccaggctccaggccagtagttgaccagaaatgattgattgctctaacagggaggccagccagcagggggttaattttgtacaagttaacccttaccacttattcaagtttctgccacagtgagagcagaggtaccagagattaagggtaccagagactaaaatgtttaaaatgtttcatctcagggtctgggccaggtagtgaaggaagcagaagttagaggagtcttgacagagaaaatagaaaggcatcaagtaccatagacttccattgccattgttgtgtggttgtgcaaactttgcaacttatttccacttacattgatcagctgttggaaccatcagttatttcatt

SEQ ID NO: 245353 - DNA, 463 bp, Homo sapiens
gggagaattagtcactttcaatttgtaattctcaaaaggcagaatattacagaaatggaaaacatgagtagtgtcctctttccgttgtgagcaccctgcatcctggtggcaggctgtatagcctgtaggaagtctctgctgtaagggtggttagtgttccctcctgggcagtgctctgatttgcatgtttgaattcatttgttgaaagctgacctttgggccgggcctggtggcaatcccagcaccttgggagggatcacttgaggtcaggagtttgagaccagcctggccaacgtagtgaaaccctgtgtctactaaaaatacaaaaattagccaggcgtggtggcaggtgcccgtaatcccagctacttgggaggccgaggcaagagaattgcttgaacctgggagtcagagtttgcagtgagctgagatcgtgccactgcacaccagcctgggtgacaga

SEQ ID NO: 245354 - DNA, 474 bp, Homo sapiens
gcactctgtcgcccaggctgtctcaaaataaataaataaataaataaataaataaataaataaataatataggtgtgcaggaataaatgaagagctgttagtatctgcaaatgctgcaagactgcaaagcaggattcacactcgattccattcctaaattgcctcctggaagagagtgatcctgggaggacccagatccttggcctgggaactgaagaggaaaatggatgactgatgtgctactcaacctttaaaaatggctttaaaactaattacctaagccacgttcaatctgacaggaggtattattggagctagcgcatcagtcagatcacttaattacttcataaatcctgggtcttagcatagattttaaagcacttttacacagaacaccattggagcagtttttttcttttcattttcttttaaagcaattaacttgcagagatttgcaggagattgaaatgaaca

SEQ ID NO: 245355 - DNA, 142 bp, Homo sapiens
acagaaagaataggcagaaatggtaatatttcaaagtagtctaatgtccagatgaatatagagcaaaatggactcatgaggattcaggctgagagaatgtagaaaaaatgaacacaagacgagttactcagactcgatttta

SEQ ID NO: 245356 - DNA, 466 bp, Homo sapiens
ctaattattttatcttatttttgtagagacaaagtctctcttttgtagagaagggcccaggctggagtaaaatatttaaagtattgagatataaaaaccactaccttagaaatctgaaccatgtgaaattatcctttaaaaatgaaggtgaagtaaacactgtctcagacaaacaaaaaataggagaatttgttgccattggactggccttgccagaaatgttaaaagaaattctttagagagaagcaaaataataggtcagaaacgtggatctacttaaaggaagaaagaacatcagagaaggaacaagtgaaggtaaaacaaaaacttttcatattcttaattgttctaacagataacagtttgttcaaaataaaaatagcaatagtatatttgattatgtatgcttatatatattcacatgcttatgtacaagtgaaataaatgacagaaataatacaaggga

SEQ ID NO: 245357 - DNA, 436 bp, Homo sapiens
atttctataatttggctgtataatcttcaattaagtcttcttatgacaattctacagtaacattttctgtaacgagaatgtagagataatttagactttcctctagcatgacgatgaacattggtttgggggtatgtctaatagtttagaatttttttctctgcttcacttctcattgttcgtaaggtcggtaaacttttaggactgttgttaattttgggaaaacttctatcaactttctgtttagtagatctatatggtataaacacagtaattataacgtattccattttacacagttccttgagcatgagaggacatgcttacctcagagtgtagggttaggaaggatgcttaacgcctgaaagggctagaaaagttgaagctggttggattatggagtgatggcacacatgtcaaggcaggtggaatattc

SEQ ID NO: 245358 - DNA, 633 bp, Homo sapiens
tctcgatcgttacgactgaaagtaggcaaaggttttttgtttgcttcgcctccttcgttgagctctctttccgtaacaaatggaaatagaagcacacaaattcaagatgggaggctctaacagactgaagatattgtggctttcaaaaaggagagaacattttagatgatatgaaggaaatgtcaccccgttactaagaattcactctattcgacagatatatacacgcttcagcaagtgctcctaaggatgagaggagagtaagttattttcatctaacagtctctatcaacactcttcttaaaacacctaatgcttaacaacagtctaaagaacacactggctactcatacctcccataggcagagaccttgtcctttttgagctgctgtatctcaggtaatcagcaatcacttagtggatgataataatttgcaaattcctctggagcctctaaagaccgtatcatgaatcatcaattcaaatgcctacaggagtcgggcaggtgatatgcaggaggaaatagagtcatttagggcccataacaaaggggagagaggccgggcgcggaggctcacgcctgtaatcccagcactttggaaggccgaggcgggccaatcatttgaggtcagg

SEQ ID NO: 245359 - DNA, 1140 bp, Homo sapiens
acctgtaatcccagctacttgggaggctgaggtaggagaatcccttgaatccgagaggcagaggttgctgtgagccaagattgcgccattgcactccggcctaggcaacaagagcgaaacttcgtctcaaaataaaaaaaaaaaaaggaaagaaaaaagtatgaattgtataagcatgccagtgtaagaggagaggcagaaattcagtctacatagtcctagcacagcttagtgctaagcacttttgttggcaataatgtattgtctttctaggatgttgtcatatgtcttcttagtcattgtacatgatttattagtttagtccaaacgcacacaggtgtattttgaattcatctgtatgcacgaatttttacagaaaattggcaatccaactatgtttttattgaattgtgcaatttattttccacatgatgtctattacaggttcagtatccctgatcagaatgttggaaatccaaaatgcccccatatgtgaaacttggggccacaagtttgagaccagcctgggcaacatggcaagatcttgtctctacaaaaaaaaatgtttaaagaatttttttaaattagcacccgtagctccagcttctcagaagattgaggtgggaagatcacttgagctcaggagttcaagactgcagtggactattataactccactgcactccatcctaggtgacagagcgagactatttaaaaaaaaaaaaaagtttcatataagattaccttcaggctatgtgtataaggtatatataaaacacaaatgaattttatgttttaattcggtcctatccccaagatagctcattatgtgcatgcaaatatttcaaaatcaaaaaatcgaaaacacttcgggtcccaagcatttcggataaggaaaaacctatagttctattcctcctcatctaccttctggaaactcagcatttaaaagcttttaagtaccataaacatcaattcaggaaggggtttcttaggcatgggctataatagcagccagagctgtagagtgaagctgaatttgaactccagctctgtacttaatagctatttggattaagctgttttcttatctgtaaaatgtaaataatagttatttcacattacgtatagaaatagatg

SEQ ID NO: 245360 - DNA, 955 bp, Homo sapiens
cagaaaattggcaatccaactatgtttttattgaattagtgcaatttattttccacatgatgtctattacaggttcagtatccctgatcagaatgttggaaatccaaaatgcccccatatgtgaaacttggggccacaagtttcacatatgggtgtattttgaattcatctgtatgcacgaatttttacagaaaattggcaatccaactatgtttttattgaattgtgcaatttattttccacatgatgtctattacaggttcagtatccctgatcagaatgttggaaatccaaaatgcccccatatgtgaaacttggggccacaagtttgagaccagcctgggcaacatggcaagatcttgtctctacaaaaaaaaatgtttaaagaatttttttaaattagcacccgtagctccagcttctcagaagattgaggtgggaagatcacttgagctcaggagttcaagactgcagtggactattataactccactgcactccatcctaggtgacagagcgagactatttaaaaaaaaaaaaaagtttcatataagattaccttcaggctatgtgtataaggtatatataaaacacaaatgaattttatgttttaattcggtcctatccccaagatagctcattatgtgcatgcaaatatttcaaaatcaaaaaatcgaaaacacttcgggtcccaagcatttcggataaggaaaaacctatagttctattcctcctcatctaccttctggaaactcagcatttaaaagcttttaagtaccataaacatcaattcaggaaggggtttcttaggcatgggctataatagcagccagagctgtagagtgaagctgaatttgaactccagctctgtacttaatagctatttggattaagctgttttcttatctgtaaaatgtaaataatagttatttcacattacgtatagaaatagatg

SEQ ID NO: 245361 - DNA, 894 bp, Homo sapiens
tctaggaaactgctcatctctcaactattgccagaataataaggcattaccatgcttgaagtaactttagtggaggacatacacattttcctgtttagtcttgctgccattagacaatccatatggaaaaattactggtacagtcaagaggaagttgtcttcaagactgtgacattgtggccaccaataggagtccactctcagctgaggaattccttaagtcatttgtgatgctggagatgatagcatgtagccatgcaaaatttcacactagtatattgatttatagtgttcactttcctccaatatgaaacagtttatttcttctacacctagctcagcaaggcattctgtggattaccttattagtaattataacaggctttatggctataatttactttaaaaatgctgagcagtattagaacagttataaatcaatatttctttttggttatcttatgccttcctatcttggagaagctttagaatcaattcattaagaaaataatcatgaattaatgagtgtgtcacatcaattaatttgtgcacaggtttaagaaacaaatattgttttcatcctactgatgcttctaagtaatgcagaaaatgaaataaaattatattgaaaaataaaaaaaaacaaaatggcctcgttggctagcggggagcctgcggcggttccttagggagggtaatcagaacctcctcatgctccctggctcgacgtcggctgggggagggtcaattactaaaggggtatacggtttcccaaatacgggataccaggaaaaactgtgcgaaggccacaaaggccgaacccaaaggccggtgctgggtttcctaggcccccccgcgactccaaatgggctagtaaggggcaacccagattag

SEQ ID NO: 245362 - DNA, 373 bp, Homo sapiens
ccaaccccagtttgtggggctggttttaattttaccaggcaggaaaattccagctgcttgctgacacccaactttaaaaagggcacaaagccttttactccgaaagtgaagtaagagcttatccttagaataatcagtccaataaaaggataaataatcctaacttgttttaagtaggagacaaaattttgaaaggaaggtttgaagagcaggaaaccacttggataataaagggtaaatatgacgaagatgctggaaacactttggccagcctgtttgcctttgtgaacagggaaaaagcatgtgtgtagttttggaacatcactctttgtatagcctgccaactatttaaaaaataaaacatcttacagga

SEQ ID NO: 245363 - DNA, 488 bp, Homo sapiens
ctcccgcctcggccctcccaaaatgctgggattataggcgtgaccaccgcgcccggccctactttgacttttactctgttaggttttccagaatgctgactcttctgccccttgaaccagggactccaaagaataagattcatgggggcggcggcaaggagttaatgtattctgtctgtggccagccatcttccctggtacatcttcttttctcagttcaaactgaggaacgggttagttggaactggagtctttctcttcccctattttcctctgaaagagttcagtgtaaaagtttttttacccattagctgggtgagaatgccagataaatggcagaacaagttaaaaatgagattgttccctcaacttcatgtgaaaggtggagtacttggctagatactctgtttattgtgtaatggattgaaccttgaaaaataaaaccccataagaatagcatatgtcatattttgaccgcttaaaagccc

SEQ ID NO: 245364 - DNA, 479 bp, Homo sapiens
gaggctgcagtgagccatgatcatgacactgcactccagcctgggcaacagagtgagactccatctcaaaaaaaaaaaaaaaaaagagaaaaaaaattgcattggccaacttggaggcttcagtgttattttgccaagaagaatgttcacttttgtcatctaattttacactgctccttcagcaaactgactttatggagagataaccctgtttacctttagaaagaaggaagttgtggattcctcagtcttactcccattactattggtcattcaacagcccatcttcccagaaggaaagatgtaacctgacttttgcgccagaataagaacaacaaacggaagaaaaaaactgagttttatagtagaagtttgtagttgaatgagcatgtagctcaaaatgaagttaaccacttaaacttgtcatatgggggaccaaaatttcttataataaaaagaactatatctgaaaataaaaa

SEQ ID NO: 245365 - DNA, 513 bp, Homo sapiens
tgcggccgccgcctcagcagcctcctcgtcgtccgcctcgtcttcgtcttcgtcatcgtcctcagcctcttcagggccggccctgctccgggtgggcccgggcttcgacgcggcgctgcaggtctcggccgccatcggcaccaacctgcgccggttccgggccgtgtttggggagagcggcgggggaggcggcagcggagaggttcctcaacttaaaagggatgaggagaccttggagacggttctgaggagactcaaaagatgattatatgattggaagtcagtcctatgaggaaaggttgagagaatgaaagcccatcttcccagaaggaaagatgtaacctgacttttgcgccagaataagaacaacaaacggaagaaaaaaactgagttttatagtagaagtttgtagttgaatgagcatgtagctcaaaatgaagttaaccacttaaacttgtcatatgggggaccaaaatttcttataataaaaagaactatatctgaaaataaaaa

SEQ ID NO: 245366 - DNA, 621 bp, Homo sapiens
agtgagccaagatggcgccattgcactccagctctgggctacagagcaagactgtctcgagggggggaaaaaaatcttccttcgcttctgacattagagcaggcagacacatgcgcgcgcgtgtgacacacacacacaccttcctcacatttttatcagaagttctctctggaatctgcactgactgaggcttcttttgagcttcacgccccacttcttcccccgtcgtctttctcctaggcacctgctctttaaaacacaagtcagcacaagggatcagaatccaggtttaactttgctgctggaagtaaacaagtgaggataaaattcttagtgaaattggacagaattttgctctcatatttgccctttttaataggttgacaaaagggagattttgctattgttaaacacctcaccatttttattcttcttgctccctttttcgccgtttgtgcctacactggggttagaaaagatcttagtgtcctctgcagccacttaagcgaatccctttacttgttccctttattgacaggtagttatttctaagctttctaatcttaccatacttccataaatattttatatataagctctagaatttgttcatagcttttt

SEQ ID NO: 245367 - DNA, 247 bp, Homo sapiens
tgtgtggtcccaggggagaggcccagagcttgtgggaaccgacttattttgctgaggcagcgtcatcttttcatcctaccaactccttttcctttgtgagcatccttcaagctataggtccttgtgcctgcattgtcttttatgcctcatgaccattggcaaaaatgggattgtctttgttttttagatgatgaaactgaggcttgcaaggtttagagccccctctgcactaggatctgaacccaga

SEQ ID NO: 245368 - DNA, 715 bp, Homo sapiens
gagagtctgtgtcaaaaaaaaaaaagaattagcttagacctgggcaagtagttatgaggagagattgcctttggggaaaatatcagaaaataagatctggaaaataccgttttttaaatatatttattctatcaacaaggtttgattatgagaaagtcttagaaagtggacatggaaaaactattggattcatggctgggcacggtggcttacgcctataatcccaccactttgggaggccgaggtgggcggatcacctgaagtcaggagttctagaccagcctgaccaacatggagaaacccagtctctacgaaaaatcaaatgaaacattataataacttgaacccacgatatttaatttctattctactcagattactccattacactccacccttaccatctattatcacactccattctcaataaaccttaccatctacttctcaggctgctcctcttcgcccaacttccgccttactttcgtctctctctactagttatcttgtctctcttctgacgatctgctacattctctcaagcccctctcttttactaaccttaattccctcttatccctatctctctttcaccacatccctctcttttttatcattcctcctactatcctcccttttcatcactgctctctcctgttctactgactacgtctatgtctctttcttcactatctctgctactctctcggtgacg

SEQ ID NO: 245369 - DNA, 399 bp, Homo sapiens
ctcacagggttaatgataattacaagccaggctttaggcaaaatcataggtaggcattgaccaaggtgtgctggtgcactgtgacccatctccctgcagctgctagctaaaaggagcatgttgaccatttgcttccccattgttcctttagatagaatctctgggggccaggcatggtggcttatgcctgtaatcccaacagtttgggaggttgaggcaggtggatcacctgaagtcaggagttcgagaccagcctggccaacctggtgaaaccccaactctactaaaaatacaaaaattagctgggcatggtggcaggcgcttgtaatcccagctactcgggatgctcaggcaggagaatcacttgaacctgggaggcggaggttgcagtgagccaag

SEQ ID NO: 245370 - DNA, 365 bp, Homo sapiens
gagttcacttttctacagaatacaaaagtccattctgaggcttttctgatgcatgactttccaacttttgcttaaatagtacctgggttgaagtttcattacattccgaggcagcacctgcattgagacgatctatatcaactataaaagttactcataccaagaaacatagactatgtgagctgtgtaaaaatacagtaaactgatgcaatgaagctacttagctctgaatccttatactttgggttgaaccataaaaattgccaatatctatgtttgacccataaaaaataatttcttatggttcaacttaatatttaagtgaatttaaataaaaatgagcaaacagtaactccatttcagat

SEQ ID NO: 245371 - DNA, 433 bp, Homo sapiens
aaggaagctgattaagcttccatagagtgttgggtgttgccatggaaagagcatagacaaaataaattgtgtgtttcaaccccagagctgccacagatgtttctggctcaatggagacttgcctgtggctagctaactctgcaagaatgtgtgaggtccaggctgggggtggtggctcacgcctgtaatccagcactttgggaggccgaggcgggcggatcacctgaggtcaggagtttgagaccagtctggccaacatggcgaaaccctgtctctactaaaataaattagccaggcattgtggtgtgttcctgtaattccagctactgggaggctgaggcaggagaatcgcttcaacctgggaggcagaggttgcagtgagccgagatcgtgccattgcactccagcttgggcagcagaatgagactgtctc

SEQ ID NO: 245372 - DNA, 339 bp, Homo sapiens
tgtctgtttttggttttttgggtttttgccaccacatttctattaagttgtgtgtcattggataaatagggaatctaagtgtgtgtgtgtgtgtgtgtgtgtctgtgtgtattgcgggtgtatagtcacttccagtacagccaaactatcaccccatctgagacactacacacttcatttacgtctctagtatggaaattatgacactgtattgaagttatttgctcatgttttttgaattcactccactgaaattcagaagctgtcagtcttcagtgcgtacatgttaaagagaatggacgcttatttgatgggagtactttaggtcgatggaggaca

SEQ ID NO: 245373 - DNA, 698 bp, Homo sapiens
ggttttaaagggggaattatttcagctacgttttctagttttctgaggctgcctgaaaaagagaagaaaagatacttccctgccagtttctctgctgaataggtgaaagtcagacagctttttcgtgctgagtccacagacgctcctcggtcatctttgatgaacatagactggaatatagaaaccaatggtcaggccctgaaccgggtcatgcatgctgaagaagcaatcgttggcctccatttgtgtatggcgcgtgcgtggtgatgtcttaaccacaccaattccacctggacgggctgcagttgttaccaattgtgagtgaccataccatagggatgaaccagcagagaagacccagtggtcacatgaggccaggctgagtgcaatgaccaagacaaaggcatgtctaggttacccagtgggagcagtggaagcggcgcttgtcatttggagcgggtcaggagccatcccatgccaccgcggcctctgtagtctcacgacttcctctgcacgcccggggcacttcattcacggcatggatgtggccctcgtgttgctgattctcatagtttttggtgcatccttcttcactccatcagccgcgaggattttgtcttctgccgtcttgtgttttgacttccccttctgccctttctctcaaggtcgccgtttgcacacagcagcatctggaggga

SEQ ID NO: 245374 - DNA, 505 bp, Homo sapiens
acttcaatttttaagagcaatgataaaccataattatagagaattatttttatctaggtacagtcagctttgaattaaccataccaacaggccagacaagtaatctgctttcattaccacccagacacctctatacaagcaatcaaagcaaacagctaggtggtgagaaatctgcatatctgcccctggaaacaatggggatatacttatctaaatcagcagttccacaggtcaaaattatctttacaagaatactaagacatcactcgcctttttcactctcatttcctcataagactgctatatcttggtatcataagagaatatcataataaaataagatcatgtggtaaaaggtgaaagtagttttgatgtccttttcctgttaccggttagctaccaatgaagtacagatttttaggttgaggtgcttttaaggttctatgctgagaatttaaccaggatagaatgtggtttagaaagggaaaagatgggttgtagacca

SEQ ID NO: 245375 - DNA, 210 bp, Homo sapiens
tgtcaacgtcctgcaagaaagaaaaggcaagaacgtcagcgatggctccactgactgattaaggcaaaggaagtcgccactatgccctggatctgttcctgaaggattacagcatgaagaaaaataatgtgggtagccgggcttcatcttagcaacacgagcacctcattttggttttcagttggtcttttaatgaacaaatgtgttgga

SEQ ID NO: 245376 - DNA, 3111 bp, Homo sapiens
  misc_feature (198)..(199): n is a, c, g, or t
  misc_feature (1727)..(1727): n is a, c, g, or t
  misc_feature (1935)..(1936): n is a, c, g, or t
cccgcatctcctgcacatctccacccctgcgcaggaggagatccccaggctgctctctccatctctcctacagctccctgcaaacgagggggaagctgctgagagtccctatcactgctggccttttaatgttgtatgcaaggaggaagagggcgagggataacttggtgctggacaactgacctgcggcccgaaggnnctctggggagggggtgcaaaagaggagcggctgggctgggggactccatgcgggggcgatggacagggcggcgctcctgggactggcccgcttgtgcgcgctgtgggcagccctgctcgtgctgttcccctacggagcccaaggaaactggatgtggttgggcattgcctccttcggggttccagagaagctgggctgcgccaatttgccgctgaacagccgccagaaggagctgtgcaagaggaaaccgtacctgctgccgagcatccgagagggcgcccggctgggcattcaggagtgcgggagccagttcagacacgagagatggaactgcatgatcaccgccgccgccactaccgccccgatgggcgccagccccctctttggctacgagctgagcagcggcaccaaagagacagcatttatttatgctgtgatggctgcaggcctggtgcattctgtgaccaggtcatgcagtgcaggcaacatgacagagtgttcctgtgacaccaccttgcagaacggcggctcagcaagtgaaggctggcactgggggggctgctccgatgatgtccagtatggcatgtggttcagcagaaagttcctagatttccccatcggaaacaccacgggcaaagaaaacaaagtactattagcaatgaacctacataacaatgaagctggaaggcaggctgtcgccaagttgatgtcagtagactgccgctgccacggagtttccggctcctgtgctgtgaaaacatgctggaaaaccatgtcttcttttgaaaagattggccatttgttgaaggataaatatgaaaacagtatccagatatcagacaaaacaaagaggaaaatgcgcaggagagaaaaagatcagaggaaaataccaatccataaggatgatctgctctatgttaataagtctcccaactactgtgtagaagataagaaactgggaatcccagggacacaaggcagagaatgcaaccgtacatcagagggtgcagatggctgcaacctcctctgctgtggccgaggttacaacacccatgtggtcaggcacgtggagaggtgtgagtgtaagttcatctggtgctgctatgtccgttgcaggaggtgtgaaagcatgactgatgtccacacttgcaagtaaccactccatccagccttgggcaagatgcctcagcaatatacaatggcattgcaaccagagaggtgcccatccctgtgcagcgctagtaaagttgactcttgcagtggaatccctagaaccttggacctgagagtttcccttacctgatcgacatattttcctttatctgatcaacccatcaatcatgtggatttcttgggattctaatgttgaaaaggtttatattcaccttttgatgatttggggaatatatattgacatacaaggaagataatctgtttcctaagcaagaaataacaggaaagatcccttatgccaggaggcctgccatactcaggataagatccttgaatatggaacttagttacaggnctcaataatggtgggtgaacattagtcatttttaaaagacacctcttatagcaataaggagacattaacatgaatctcatttattctctcagtattttaactgaagaaattatactgtttgtgtgtggatagaagatgttgaaaagttaacataagcattgggtgctgacttaccctttcatgtacttccaaagaaaggtaatcaaanngaatcttcttaagtgatataatatccctaaaaaaatgatcattacagatgtttagtgacaaagaatcaatatgtaaaaagtataatgaatgatttagattttaagtgccttttcactgggagaatctggaaaaacctccataaggtatatagcaatctttgatctttagattcatacttttatcacagatcagttcaactgttaaaaacccacctctgagatactggggggaggatcctgaaacatgcgggaaaaggagaggtaaacagtggaggtaaaaatataatttcatacattgtaaagaaaagcaccctttaaatgtgtaaagacagtgttttgtaaagaattttgtttaaaaagtttctattttgtaaatacagtacttaagttatatgatttatattaaaacatttattgacaaagcctaagagctaaggcagtaaaattatctcataaataatattagcttattttttttcatactattaatgctatttttttggacatcgaagagaattaacttagcagttagttatatggatgtgtatttcttgctaaaatgacagttttatatgttatagattaaaatatgttgcaaaatatcaaaaatttgtgttatttcagcagtaagattaattgaattctcttttcacattagttatgcttaactcataaggttattataataaattatattagtaaaagtcttaactggaaaaaagaatctaaatcagaatagtgatcaatttgtggatttgatatcctggatatttattatattttatgtaatgctgcatttctatttgaatgttaagtggtctttcttgtttttaatattcatgcatgtatattcatcatattttacaaggttcctggtaaaaattacagggctctatttaaggatgtattttaatgtaaatgcttatgttttttatgaattgttaaatatttcagtattatatagaaaaaaatagatttttaaaattcagaatggacaaagagaatattcattttcttattaataagataaagaaatgtttccctgccccacagtcttcattctatttctctttaattttattcactgaggcagagaaacaatttttgaaaaagagcaaacccatggaaaatgtctcagatctaatattaaaatcaagactaagcatttaactgtg

SEQ ID NO: 245377 - DNA, 2877 bp, Homo sapiens
  misc_feature (1493)..(1493): n is a, c, g, or t
  misc_feature (1701)..(1702): n is a, c, g, or t
agcctgcaaaaaccacagagggcaaagccagaaagatggaaaggcacccacccatgcagctcaccacttgcctcagggagaccctcttcacaggggcttctcaaaagacctccctatggtggttgggcattgcctccttcggggttccagagaagctgggctgcgccaatttgccgctgaacagccgccagaaggagctgtgcaagaggaaaccgtacctgctgccgagcatccgagagggcgcccggctgggcattcaggagtgcgggagccagttcagacacgagagatggaactgcatgatcaccgccgccgccactaccgccccgatgggcgccagccccctctttggctacgagctgagcagcggcaccaaagagacagcatttatttatgctgtgatggctgcaggcctggtgcattctgtgaccaggtcatgcagtgcaggcaacatgacagagtgttcctgtgacaccaccttgcagaacggcggctcagcaagtgaaggctggcactgggggggctgctccgatgatgtccagtatggcatgtggttcagcagaaagttcctagatttccccatcggaaacaccacgggcaaagaaaacaaagtactattagcaatgaacctacataacaatgaagctggaaggcaggctgtcgccaagttgatgtcagtagactgccgctgccacggagtttccggctcctgtgctgtgaaaacatgctggaaaaccatgtcttcttttgaaaagattggccatttgttgaaggataaatatgaaaacagtatccagatatcagacaaaacaaagaggaaaatgcgcaggagagaaaaagatcagaggaaaataccaatccataaggatgatctgctctatgttaataagtctcccaactactgtgtagaagataagaaactgggaatcccagggacacaaggcagagaatgcaaccgtacatcagagggtgcagatggctgcaacctcctctgctgtggccgaggttacaacacccatgtggtcaggcacgtggagaggtgtgagtgtaagttcatctggtgctgctatgtccgttgcaggaggtgtgaaagcatgactgatgtccacacttgcaagtaaccactccatccagccttgggcaagatgcctcagcaatatacaatggcattgcaaccagagaggtgcccatccctgtgcagcgctagtaaagttgactcttgcagtggaatccctagaaccttggacctgagagtttcccttacctgatcgacatattttcctttatctgatcaacccatcaatcatgtggatttcttgggattctaatgttgaaaaggtttatattcaccttttgatgatttggggaatatatattgacatacaaggaagataatctgtttcctaagcaagaaataacaggaaagatcccttatgccaggaggcctgccatactcaggataagatccttgaatatggaacttagttacaggnctcaataatggtgggtgaacattagtcatttttaaaagacacctcttatagcaataaggagacattaacatgaatctcatttattctctcagtattttaactgaagaaattatactgtttgtgtgtggatagaagatgttgaaaagttaacataagcattgggtgctgacttaccctttcatgtacttccaaagaaaggtaatcaaanngaatcttcttaagtgatataatatccctaaaaaaatgatcattacagatgtttagtgacaaagaatcaatatgtaaaaagtataatgaatgatttagattttaagtgccttttcactgggagaatctggaaaaacctccataaggtatatagcaatctttgatctttagattcatacttttatcacagatcagttcaactgttaaaaacccacctctgagatactggggggaggatcctgaaacatgcgggaaaaggagaggtaaacagtggaggtaaaaatataatttcatacattgtaaagaaaagcaccctttaaatgtgtaaagacagtgttttgtaaagaattttgtttaaaaagtttctattttgtaaatacagtacttaagttatatgatttatattaaaacatttattgacaaagcctaagagctaaggcagtaaaattatctcataaataatattagcttattttttttcatactattaatgctatttttttggacatcgaagagaattaacttagcagttagttatatggatgtgtatttcttgctaaaatgacagttttatatgttatagattaaaatatgttgcaaaatatcaaaaatttgtgttatttcagcagtaagattaattgaattctcttttcacattagttatgcttaactcataaggttattataataaattatattagtaaaagtcttaactggaaaaaagaatctaaatcagaatagtgatcaatttgtggatttgatatcctggatatttattatattttatgtaatgctgcatttctatttgaatgttaagtggtctttcttgtttttaatattcatgcatgtatattcatcatattttacaaggttcctggtaaaaattacagggctctatttaaggatgtattttaatgtaaatgcttatgttttttatgaattgttaaatatttcagtattatatagaaaaaaatagatttttaaaattcagaatggacaaagagaatattcattttcttattaataagataaagaaatgtttccctgccccacagtcttcattctatttctctttaattttattcactgaggcagagaaacaatttttgaaaaagagcaaacccatggaaaatgtctcagatctaatattaaaatcaagactaagcatttaactgtg

SEQ ID NO: 245378 - DNA, 918 bp, Homo sapiens
tgccagaatggcttttgctgagtgcatagcaccagcgtgtgtcatgtcttggctgcgtttctggggcccatggcccctccttacgtggcaactattgtctttactagtcaaggaggctcagcctctggtgtgggtcaaggacccgctccagctgacctctaaccccctggggccacctgagccctggtcttcccgctcctcccatctcccatgggaatctccccatgcacctgctcccccagcagccccgggggactttgattacctggggccctctgcttcttcgcagatgtcagccctgcctcaggaaccaactgaaaatttggctccattcctgaaggaattggattcagctggagagctgcccctggggccagagccgttcttggctgcacatcaggacttaaatgacaagcggactccagaagaaaggctcccagaggtggttccgcttctcaaccgggatcagaaccaggccctagttcagcttcctcgcctcaagtgggttcaaactacagatctagatcgggctgcaggtcatcaggcagatgaaatacttgttccactagacagtaaggtttcaagaccaaccaaatttgttgtttcgcccaagaacctgaagaaagatctagctgaacgttggagccttcctgagattgttgggattccacaccaattatccaaacctcagcgtcagaaacagactttgccagatgattatttgagtatggacacactgtatcccggcagcctacctccagaactccgggtgaacgcagatgagcctccagggcctcctgagcaagttggactttctcaattccatctagagcccaaaagtcaaaatccagagacccttgaagacatccagtcctcttcactccaggaagaagcccagcgcagcttctacagctccct

SEQ ID NO: 245379 - DNA, 472 bp, Homo sapiens
atttccgccacgcagatataaagcaacagaatattgctacccaacctagtattccaacgcagataccttgtcccagtcaccattccctttaggccgtttaacaaaactaagacatttgtctgtgttaataggaagccactaagtggccaatgaagaaatgaagaccaaagacaaactaagaagaaatacatcatatgaatcaaagtcttgaagaaggcatgagtggaaagaatcagataaattctacatcattgacaaggtttagtcttagaaaaaaagaaatttctcttaccgcaagtcagagaaaagagaagagacgacaaattcattcaacctatcatttaacaaagatttcttaagcccctattaattggcagtactgtagaaagcactagagagagattttaaagaggaaaataaactgtactcgggctctcctgctagatggacttaatcgcttcgaaaaaggagg

SEQ ID NO: 245380 - DNA, 440 bp, Homo sapiens
taaaccttatcataggtatatatgcatgggaaaagtaagtatgtatgtatgataggtatgtatgtacagtatacatagggttcagtgctacccatggtttcaggcattgaccagggtcttggaatgtatctcccatgcataagggaagactactgtaccttagttatcttatctacaaaaatcagatgatattcttgccctataagtatcacagaattgatacaagattttttttaaaaaaaagaacaatcctgagtggaaaaaatatggcaacttaaaaagtagctgagtgtggtagcccacgcctgtagtttcaagcaattggagatgctgaggtgggaggactgcttgagcccagcacttcgaggttgcagtgagctatgatcctgtcatggcactccagcctgggcgacagagggagaccctgtctttaaaaacta

SEQ ID NO: 245381 - DNA, 233 bp, Homo sapiens
catttaaaagattttttacaaaatcctggacacagctgtataaatagtaaaagaggatgaactgattatcttttactgatcatggtgaaaccaaaatcacctagtttcacagatatgtggaaggtttctcctggagtctgtaagagtgacagcaggtcagagaatggattaagagtctggggaaatgaactcttgggcaaacttgcttactagatacaaaccgagtatagtgc

SEQ ID NO: 245382 - DNA, 489 bp, Homo sapiens
gtttatggagttgagcacacaggcaggtgctggaccagaaaggacacacttttccaggcttggctcggggtcttcatgatgctttaaagtttgatggtctggagcggaaatgccagagcaacctgcaggtgataaagaagaacaggtcatacagtcagaagtccaaaatcaaggtgtccactggattggttccttctgagggccctgctggagaaactgatccatgcctctctcctagcttctggtggttgcttgcaatctttggagttcccggcttgtagctgcgtcactccagtatctgcctccatcttcacatggcattctcttttgtgcgtatgtgtctcctctgtgtccatctccaaatctttacaaggacattgccattcaggattagggcccactctaacctaggatgacctcattttaacttgattacatatgtaaaaaccctacttccaaatactgttcataggtacagatgttaggatt

SEQ ID NO: 245383 - DNA, 646 bp, Homo sapiens
aacaaagttaacaggaccaaggtgcagagagggtgctaggacagcgaagccaaagaggacccctcaaacccaacaagagctgtgcggctccctgattcctcgccagtgttgctaccgcccttggctcttcttgcatggctggctcttgagacccctggaagctgatggaggcaacgtgagaagcacatggacatccgaccttgagcttgagaggcagaggcctgagttctagttacagccccagcagtaccagttgtgtggactgggagggaggctatcacgtacatactccaagcctccaagcctgtttccccttctgacacaggatcttttgtggctggtatagagtgggcactcaataaatgctgtctggtcgtctggctggcatgcctcatgggcctgagaattgaatagaattacagtgatagaagcatgctggtattgtaagtggtttgtaagtgtgaggactaaattattattaaatagtaatcacatctaatcttggataaattagtaaaagcaagaatgggagcagtaaaaacctaagcaacccgaactaaaattttattgaattaattcaatttcttgtcatgtaacacaaccccagaagagaataaaataaagtttatatacatacacccatata

SEQ ID NO: 245384 - DNA, 478 bp, Homo sapiens
atactgttacaatggcaatttaatttcaacatgagctttggaggggacaacattcaaacggtagcagtaggtacataactgtcagcatagaatcaatttaaatgacttgcccaatacctggaatggaacgtgcaccccgggccatgttagctgtgttctaattaactgtgctgatgtttctgagggtaaatggcttagaatgtgtagtcagttaaatagtttcccttcaaattcatgtctacctggaatctcagaatgtgcacttatttggaaatagggttgttgcagatgtcattggttaagatgagtaatgcatctataagccaaagaacaccaagccaccaccagaagtaagaagagaggcacagaacagattctccctcagagcttccagaagaaaccaatattgctgacaccttgatttcaaacttctagccttcaggattgtgagataataaattcctattgtgttaagcca

SEQ ID NO: 245385 - DNA, 327 bp, Homo sapiens
tgagctatgatggtgccactgcactctgggctggtcaacagagtgagattctgtctccccatctcccttcctcctaaaaagccaaaaccaaatctacttcatatatattatttaattctcacaaccctatcagattgataccattaatcttgttttatagatgaggaaatgtaggccccagggttaagtgattttactaggtctcatagctaataagtgatgagtcctttatttatttatttatttattttgttttagagacaaggtcttgctatattgctcagactagacttgaacacctggctcaagtgattccctcacctcagc

SEQ ID NO: 245386 - DNA, 1315 bp, Homo sapiens
  misc_feature (648)..(648): n is a, c, g, or t
taaatcagaaaccactattgtatagatttcttgagagcagggactttgttttgttcattactgtacccatagcctctagaacagcatgtggcacgtagtaggcagtgagtaaatatttattgaatgaaggtatgaaactgtctcatttacttaaacagcaggcttttctttaatgttccttggtttgccccttttgttaggtcttcttttttttcttttgagatagggttgctctattgaggctggcatgcagtggtgtgatcttggctcactgcagcctccgcctcctgggctcaagcaagcctcccatctcagcctccttagtagctgggactacaggcgtgcaccaccacatctggctaatttttgtactttttgtagagacacggttttgccatgttgcccaggctggtcttgaaccccttggctgaagtgatctgcctgcctcggcctcccaaagtgctaggattgcaggcaagagccactatgtccagcctttttttttttttttaaacagagtcttgcgctgctgctcaggctagagtgcactggcacgatcagggctcactgcagccttgacctcctgggctgaagctgtcctcctgcctcagctcccgcatgcctcacccccaacttcaccccacagtngctgggactacaggcatgggccaccatgcctggctaatttttgtatttttagtgtagatggggtttcaccatgttgcccatgcttgtctcaaactcccggactcaagtgatcagcctgccttggcctcccaacgtgctgggattacagaggtgagccaccgcacctggctgttagctcttaaggggagcatgttttctgtgatatctgtgtgatcgtcccattaaatagaatgaattctactattctttggttttatcaagaatcgactttctggtctgttggccagtgaggcaggcattactggttacctaactgatagtcttccctgtgcctgcttctttcatgctcaagaaccgtaattttgttcagatattgagtaagcaacaatgcacttaggggaggtattaacattggcttaaacctttcatgataattctttagtaatcccagtgactggcatagactggtctcatctcattggttctggccaatcaaagaaagtctcctgggggagggttcttggaaagattttcttttttgatcagaatgggagacagttctgtgaagaaagcctctttttgctgccactcacatttcctgcgtttgaatgtggtagtgtgagtgtgattctgaaagctatagcagccgactcgtaaccccgaggca

SEQ ID NO: 245387 - DNA, 512 bp, Homo sapiens
gcagagtatcattctgtcacccaggctggagtggagtggcatgatcttggctcactgtaacttctgcctcccaggttcaagtgactctcctacctcagcctcccaatagctgggattacagccatgcaccagtgcacatggctaatttttgtatttttacaagcaatagggtctcaccatgttggccaaactggtctcaaattcctgaactgaaatgatctacccacctcagcctcccaaactgggattacaggcatgagccactgcacccagtccaaacaacatttttaaaaagcttcctgtagttcttctttttcttaagaagtttccttttactttttatccatttatttcatatatgtttttattgcccctccagatacatagtgggactcttgtattttttgtgttgatttatcttcatggatattttaggaagaggttgggacaagttacaataggactggcaacaagatgccatttaaaacaggaagttcccagagtaagtctca

SEQ ID NO: 245388 - DNA, 232 bp, Homo sapiens
tcatagctgtagagtcaatacttttcccagatttagacaagcagttgggtcttactcctggggctgttttatttttatctttctcaaatgcttcataaatattggagcagaatgtatatctatggtcagctagctaaacgttattttgcactagaagtcacccctctgatttatttcttttcctcaaatacagtgtgtgtatatatatatgtatttatatatctttaggttt

SEQ ID NO: 245389 - DNA, 272 bp, Homo sapiens
ggtcataaatgcaatttttaaaactttttcttacatagttgaacttatatcattgctttcaccttagacgagaatcatatagaagtagaacttttttaacatttggaaacttaattgctttttatttatttcaatttcatatggctaatacatttgtcgagctcttttgaaaatactattaattagttgtttaaaatgttctttgtttttcaacaaatacttgtttcaattctgttaattaaatatgttataatagtcttgtaattgttaaa

SEQ ID NO: 245390 - DNA, 486 bp, Homo sapiens
aggagctgccaaactgttttccaaagcagctgagcaatttgattcccaccagcaatgtgtgaaggttccggtttctccacatcctccccaactcttgtcattttcctttttaaaaataatagccgtcacagtgggtatgaaatggttatctccctgtgattatgacttgcatttccctaatgacaatgctgttggtcatcttttcatctattctttggagaaatgtctacttaaacccctgcccttaaaaaaataggttttttaaaaaagttgttggattttaagagttgtttattctggatacagatccttttcaaatatatgatttgtaaatattttctcttattctgagggttgtcttttcactttcttagtggtatgtatcatttgcagcacacattttaaattttgatgtttcccaatttatctgttttttctcttgtctcttttgcttctggtgtcatatctaataaagtgaaggtcatg

SEQ ID NO: 245391 - DNA, 408 bp, Homo sapiens
tcaacacatataggagaagcaataccggttgtgctcagcctctgctgcagcctcccctcagtagcagcccttcaggccattaaagaccaaaaccatttttgaaaaatctggatttctgtgaaattggataacttatgggggtgcagtgactacaacacagtaggcactaataaagttgacagaatcagtctttgttttaagaaaagtcatctgtaataattctgcagattaatgttaagtaatattaaaaataatttatgacatatagtgcttaaactaaagggagaatcccaatcatacctctattagaggcagagcgagagctagaaacaggactctcattttgctgcattctaagagtgtgggagattgggatggggcagaggcaggctcatggaggaattcacg

SEQ ID NO: 245392 - DNA, 528 bp, Homo sapiens
ttggtctgttgggcaggaggagagagcaccatgagtgtgagcagcatcacaaagatttcagactcaatgtgacaatgtgatcctttacggcttccagagattgtacctgatttcctttaagaatgcatattaaagttaattgcttggttttgagcatgcaaacgctgaaatgtgctagaatggtcaaagttcaggggtaagtgaactttactgcagcatgttgagaacagaatgaatgctgacaaagaagcagagactttttaattttaactgcaggtcaaaagaggactcttaacacaaggtagctgaaactgggcaaacacacgatcccagatggttttatacagcataaaaatgaatgagccaatgtgggttcatcgatggtaacaaatgcatcactctgtatgtgtgtgagggggtatgtgggaactctctgtactttctgctcatttttgctgtgaacctaaaactgctctaaaaaataaagtgtattttaaaagaaaattaaattaaatgtttaaaaatttt

SEQ ID NO: 245393 - DNA, 515 bp, Homo sapiens
ctgtctaaatgtagaaaatgtagcctttattattcttctctaaaaccatagttgtaaattttgatgaggaaatattgattggttttcaagtataagatgagcctcctttttaaagagtattttatacctataaagagcaaaataatacgttagcttgaagactagataaccacatcttaggttatctttgaagacttccacaaagccatcacaaatggctagatctgtgataaaacaggcatagtaaaatgttcactgtagaagtgaggttgtggctatgtatctttcactatacaattgtcagctgttctgtatgcttgaaaattgttgtaacaaaatatcggaagggaatcatagaataagaagatatctctttaaactctgccgtgggagagtcgataatttaagcagtctgtctttatttccttcaatccattaatattcataacttatttctaaggtttagaaatatagctgagtagaatttgaacaaaaaagtaaacaatactttaaaa

SEQ ID NO: 245394 - DNA, 611 bp, Homo sapiens
ttttttattttgcagagaccaggtctcactatgttgcccaggcttactgtatttcaaaggtatcactgtcatgtaccgttttacttcaatggttttattgttttgctttatcttgttacttttttacctccacaaaaagaaaatgaagacagcagagacaaagccccagacagaatgaatgagtactaaggtgccttgaacacaaagtccccatgagtaagaaggcttaaggcatactgtggaaagaactgtctttggtaaatatatcttttgagtcccacccagtcgaactgagtgagagcagtcaccatacaaaatgattctagtgcattgtaaactagtcaggaagagatagccctttacgtattatgttactctttaagctgataccaaagttttcagctcaggacagaatgacggaattaagtatgaaaagagaaattttttcacagattaaatctcaagtacactggcaaaactgaccaagtatgggcaaggtaaaagtttagggaactcccagggggtcacaaaaccataagcagtcacaaaaaccaccctttccagtatttcacctaaatctagatttcaggttcatcatagctttaaaatta

SEQ ID NO: 245395 - DNA, 527 bp, Homo sapiens
ctaaatgagtctttgagacctaatgacttattggaacctattttattttatgaggtgaaatttcaaaatctagtccttcacgttctgcagatctttgaggtcaggggctgtgtccccaggcactaagagcgcgggcttgtgggagacctaggcttacattctagcctgtccccaggcctaggcttacactgtggcttcgtagtttaccaggaagtaacccgggcaaattcacctcgttggtatgaagagagtgtcagcagaggtcgcctccagaggaggtgctgtggagactgagcgcatagcacccttaaaatcctgggaccagggcttctccacgggtaagcttaatgcaagtggagcagtgatttccagctagtgccaggcccaaggtggatgcactgtcaccttagttggattgctttttaattacctcatattctgttaaaaatcatatttctttttttttttttttgagactccatctcaaaacaaaacaaaacaaaacaaaaaccctcaacagaatgtca

SEQ ID NO: 245396 - DNA, 371 bp, Homo sapiens
tgtggccagggtgggccatgtgatttgtgttggccaatgaaatgtgagaatgttgccaggttgcagttctgacagacatcacttgtgggctgcggcacttaagagcaaggtgaccttcctaacactccgtcaataagaaataaaattttattgtgttaagccactgagatctcagggttgatctgatataacagctaactttaattatgctgattaatatagaaacataaagtcagtttgaggatcttccatttggacatgttggttaataacaacatttttctttgacttcttttcggcattcctactggccttgatcaaaagccctgtaggttcagagcctaaaatggggtttgggtagcatattccag

SEQ ID NO: 245397 - DNA, 1340 bp, Homo sapiens
gcaatctccccacttaggcctcccaaagtgcagggattataggcatgagccaccgcaccccgcagtactttccctcgtatacaagctactctcctgaaaaaaatagcaggaacccattccaatgtccaagctcccctaaagtgccaactcagaataactttcatgtttaaaaacagctgtcttcacattgcccattgtgaggttgtaaaaggaagttaagatgtcaagcaatttagattctgttacccatttccctatgaaaagagatgtgttaaaagtctttaactacttaaagggtcatcatgaaaaataagaattctattccagaagacagagttatacacagggaggtgtattatatacttgctaataaatttttgtgtaggctctttagtaaatttatctgataatggaataatcagcctttttggtggaaaggtacatacagaagctaaatcatcatctgttaatagtgtttaagagatttcttcattgagatggaatatgggcaagatgacctttaaggtctttttcacttttatcattggaaatccccagaagcaatctgatagtcttaaaactttgtcctttctaagtcctttgtattcattttagagctcttcaggaaactagagaattttggactttggttgacaaaagcggtctgacctgtgttcgtagctgggaacatgaaacacaaaattctgggtttaatcttctgaagaaatctataagtagttactggcataaatggtattactatactaacaaatttaaaagcctataatgtattaaaactcttttttactcgattacttttatttttttaagacacagtctcgctcaatgccccggctggagtgcagtggcacggtctcagctcactgcaatctccgcctcccaggttcaagcgattctcctgcctcagcctcccaagtagctggaattaattacagacgcccaccaccatgcccggctaatttttgtatttttagtagagatggggtttcaccgtgttgcctaggctggtcttgaactcctgacctcaagtgatcaacccaccttggcctcccaaagtgctgggattacaggcatgagccactgtgcccagccctcttgataatttttattcttgtttcttcttatctgtgggactccaattagaatggggttgagattgtggcattcagttttataccaatattttacccaagtgtgtcatggccttttttaatcattttaatatccccagaaatgctagaagtgtaaaggaataacagaggtaaatttgctgtcattttatgccacatcctcttttcttactttgcttcttgatacag

SEQ ID NO: 245398 - DNA, 690 bp, Homo sapiens
tttttttaagagaaaaatggcattttatttattttaaacaacagcatttaaagttatacctataaggggcacacagaagatatatggagagtttaaagaatgaaaataaactcacacgtgcccaccaccctacttgaaaaacaggattttaccagaaggctcgagtggccctccagattgtagtttctggcccctcccgttcagaggtaactggcatcctggttttcatgttgatcagtggtgtttaaagtacacctgtaggaagttccaaagtgcaggaagggaacaaagcctccttgcagagaaatcttgtactttggtgtttcatcatctgtttgtgtgacaaatatacaacgttaatgttgaagatgtgggttagtgaaattgagacctggcgcttcctgaggctggcagcccggttgagcctgaggaccagacttgaggcagttggcagtccgcgcctcgttgccctctgtctgccctgggtaagtgagaggctccttgggaggccagtggagatggctgtgggaggacagattgagtagctgtccttggagctgctcctccctcccttcgtggagaaatagaaacagctttcctccggccctcacctgttgccagggctccacgctggtgggggcgagctgcgttttgctgagttgcaccgtgggagagcgttggcggccgcat

SEQ ID NO: 245399 - DNA, 310 bp, Homo sapiens
ctaacatacgcactgttaataattctcttaagtagcttaatttttcctgtgtataatgataattgaatttttttcctctcagatgtattcatctgtttcttcctgtgtttctttttcctttctgatgagagaatgaaccctcaaaccgcttctaatttaagctaacaccgcacaggcttttttgtaatattgtatttgctttccttcctcttctctttccccagagtgtattacagaagagttgtaactatttctcaattttaaacagctgctttctggggaaacaaaccagccggagaataaacttaaa

SEQ ID NO: 245400 - DNA, 612 bp, Homo sapiens
tgagctcagtgtcaaggtgattcaactgttgtgccagacagtgatttacacagctcagataactgacctgtctagttaacagatcactgcttcatgtttttaaatattttaatttaatacattctttagtagaaatagtccacaaaacattttcttcaatttaaatatacaacttttatatcatgtatcaaaccagattttatattcaaactatcacattttaaattcttcacataacagtaagcgcactagtcatatatgaaatgtcatttagatcaaacaccaagggtcaaagcccaggacaagaattaaaattttacacttaaagagtactaaagggccagtgtgcagatgggtggattaaaaaaataaataaaataaaaaatagtactaaagggcttacttcaggcaaaagtgttcctgacgtaccaaaaagtaagatatagtttattttcatgcctccctgctcctagtaatgtatgttttgtgctgaactggcagctatcccaatgtgaaatgtattttggatgtatctggtgtcatttttctattaagaccaagtataatgtttgtttgtaaagcaataaatcttgacttgaaatcaaacttgga

SEQ ID NO: 245401 - DNA, 357 bp, Homo sapiens
tgagctcagtgtcaaggtgattcaactgttgtgccagacagtgatttacacagctcagataactgacctgtctagttaacagatcactgcttcatgtttttaaatattttaatttaatacattctttagtagaaatagtccacaaaacattttcttcaatttaaatatacaacttttatatcatgtatcaaaccagattttatattcaaactatcacattttaaattcttcacataacagtaagcgcactagtcatatatgaaatgtcatttagatcaaacaccaagggtcaaagcccaggacaagaattaaaattttacacttaaagattttgtctatctccagtggcagacatta

SEQ ID NO: 245402 - DNA, 184 bp, Homo sapiens
tcaatggtcacttgagtttttgtataattttgcaatttagataaaatgttgaaactatgtcttccaaaaggaacgtcctgattctttcattacttggatgtaaaaatgaatagtatttttaagtggttgtgaagtattagaaacaatttctgattctattaaataaaaggcaggaatttggaca

SEQ ID NO: 245403 - DNA, 525 bp, Homo sapiens
gggaatcgaagaatagtcagctaggaatagagctacagaagtacacttacataaaccatcctggactttaatgtccctgggcagattcagtcgcaaaatccaatatgatattttgtaaagttttcaagttggacatttacatttttgagaattttgagacttcatcttacacatgccagtattaacacacatttggacaatagctttattaagtctataaagctattgaaaggaacatggcttacccttgttatttcactagttcaggttgcaacgaaaggtttttttgtccatgaacacttggcatatcttacttagcaaaaaagaaggatgtacattttactatagaattaatgtatgaacagtgtgtcactgctgttggatgtaaaaatgtatatgaaaccatttcattcacttgattacatttctgaagtataaataaaaaaatctaattctttttgacccatttataaccaataggattttattctttcggagagaccattcttccatgccagagccaag

SEQ ID NO: 245404 - DNA, 480 bp, Homo sapiens
agtggataccacgttgtgaggtcagccactgggtcacttgtagtcaatgcaaagcttgcacaaaccaacgtcagcctagtttcactcagtttgacctgagactttccaatacaatctgttgttttgttttgtctcaaaaaaaagagaaaagaaaagaaaaaggtttcagatgaagttcaatgacatctaaatgggacgggtaagggtcccagtcttccccataaccttagttttgctttctcttcctgagagctagaacagtgacctcatctgggagaatccagccaacaccgcattctacaccatctgcattctatacccctaccacaacaacccactataaactggggtaagatacactagaagtgggtatttgggggtaatcctgatcatctttttcctcgtatgggagccttccaaataatgcatatatagagcataagaagaagtttcaaatagatgcaaagtcatgatggttgt

SEQ ID NO: 245405 - DNA, 437 bp, Homo sapiens
atttcctggctctgtacactgaggggacctggaggcaccccattagcaatgagcacacctggcttccccgtactggcttttaaataccattagtcactaaagaaaccagagtttcttgaagaaatggtggctggttccagggccagagtagtgaaagtacaagatgaagttggaatattttgttgtcccagaaaatatgaagaacgatgaggacacatccgaaggacacaaaagcctgcttgaaggggttcccactggccaaacctgggacaatcagagcatcaaaatatatgatagtaatagattataaccctttgaaaaaaggagaaaaacatgaggccatactgatataagtaagagaataatgaaatatttggtgaggaacaggaaatttgcatggcttcagaatacttctccacagaatactcgttaatttc

SEQ ID NO: 245406 - DNA, 425 bp, Homo sapiens
aataagcttcttagatagcctattgctttgtggttataataattatacactccactggatagcaagcaatctacttatctacacgtgtaagtttgacttgaagtttcttctatttttcatctgctggagtaactcaattactaggccatctgtatttgcaaatctgcaaagtgaatgttgtcatccagtagccttgccacatgtgtcctgagtactttttacattctttagcttccttgattcacttcagccaccctagaaattactgagtttcaaattagattaagtctccctgagaagtgaaataaatattggatggagagaaggaaagaagattcagatgggtggggatgaagaatgagccgtgtgaaggaagcatgtttgctaataaacctcacggaggatgacctgagtacacaatgcgg

SEQ ID NO: 245407 - DNA, 708 bp, Homo sapiens
gcagagagtgcacaaaggccccctgcttgagtcctcttcagggttagctctcagaaacacaatctgcagaacagatttttgttccaacatccttgcaggagaatttgcccttagcttcccccaccccagccaggctgaataaaattatgctgaaactactgtcttatttgaggaaagtaattagtcataggtgggagggggtggggagattgcagaagaatgttcatgaatattaggattttcagctctaaggggggactttgtaaacagctttagaagaagaaccaggccggctgggtgtggtggctcatgcctgtaatctcagcatttggggaggccaaggcgggcggatcacttgaggtcaggagtttgagaccagcctggccaacatggtgaaaccctgtctctattaaaaatacaaaaattagccagccgtggtagcgagcgcctatgatcccagctactccggaggctgaggccagagaatcacatgaacctgggaggtggaggctgcagtgagccgagatcacgccactgcactccagcctgggggacagagcaagaatctgtttcaaaaaaaaaaaaagaaaaataggaaggaaggaaggaaaggaaaggaaagaagagagagagaaagaaagagagagagagaaagaaagaaagaaagaaagaaagaaagaaagaaagaaagaaagaaagaaagaaaga

SEQ ID NO: 245408 - DNA, 619 bp, Homo sapiens
gctcctacagggcttttatggtgcagctcgccaatgatccgtgtgttaaagactccccaaatacacattgacacgatagactggagttgtttgggtctatcgtggcaatgatccggggataatggcagtgtcttatacaatttcactgagattggagtgctcatggtcctaatggcagaaccggaactgccccagttaagtcccaccatggcgcccagtaaagggtgtgtgggtctttgaccttctgcttcatgacactgtggcatcgctaattttactgatattttaactaacataattgagttagcatttttttccccctgaaaattcatttttgtaattcaacacctgaattagggagtccatctagtgatggtttcatttgggtaatcataagctaaagacctaggaaaggtcattcttaaacctaaagtgttttgggaaaaataatcgtgggagatgcatatgagcttgagacagagttaatatggaataaataacctcagtcctgagaaaacctagttggctaggctgaaatagacaagatgagaaggtgggaagaagatgtttttaaaaataatgaaagtaacatattcaataaaaataattcaaacactgt

SEQ ID NO: 245409 - DNA, 524 bp, Homo sapiens
ttttgagatgttttgttttgtttctgagatggagttctgcttcttgtcacctaggctggagtgcaatggcgccatctcagctcactgcaagctctgcctcccaggttcatgtgattctcctgcctcggcctcgtaagtagctgggactacaggcaccctctgccacgtccggctcattttttgtatttttagtagggacagggtttcaccacattggctaggttggtctcgaactcttgacctcaggtgatctgcccaccttggcctctcaaagtgctgggatcacaggcaggagccaccatgcccagcctaaactagtcttaaatatattcaaagaggtaaaggaaaacatggacaaagaactaaaggaaatcaggaaaataatgaaaaattctggagctgaaaagtacaataaatgaaatgaaaaattcactacaaggattcaataggagatttgagcaggcagaagaaagatcagagaatatgaagataaaacaattgaaattactctgaggagaaaataa

SEQ ID NO: 245410 - DNA, 380 bp, Homo sapiens
tgagctgttctgacactaaatacaacttttcttcttcacgcttcacttgtctgcgtacctcattcttcctagacgcaggacaagagctctggcaaaggcgctgcagccacagaggtttccggccggaaaaatcggcaccccagagatcccatgagaacgtcacgtacagcactgagacggagccctaatgaaaactgtggctctgggtgataatgacgttactgtgggttcatcaactgtagcaaattcgccctctgctgggcgttgttggaaatgcagaggctctggggggtcaggtatgtgggagctctctgtacctttcttgtaatttgatgtgaacttaaagctgctccaaaaagataaaatcttgaagaaaagcg

SEQ ID NO: 245411 - DNA, 382 bp, Homo sapiens
gcgtaggaattaacccttgtcctaaaactttctacatttctttctgggtttctctgttgtgatttgaatccttttctgggggcataattattttgtactatctaattaataggagactttgcattttgttgtcttttaaaagatacttttggcagggtgtggttgctcacacctgtagtcccagcactttggtaggctgaggtgcaaggattgattgaaaccagcctgggaaacatagaccccatctgtaccaaaaagtaacagattagccaggcagcgtgcacctgtggtcccaggaggtcaaggctgcaatgacctgtgatcatgccactgcactccagcctgggcaacagagaccctgtctcaaaaaaccaaaaagggg

SEQ ID NO: 245412 - DNA, 419 bp, Homo sapiens
atgcgctcatagaaacggtaatacgatgctctttacttctttaagtcaaatccacgttcctccgggctgcatcctgaagaattaaccgtaggagaaacaataaaggtcctcccggacagccatgagcagccctggtgctcctcggaagcccccgaggcgagaagagaaggccacactgggaatgtcgttctccgaggcggggtatggggagggtatggttgtgagcaggtggccatgacggaggctccagattctcgtgtagcagtcctggcccacggccgccacgactccttcttcttcgttcacatgcacgggtaggtaggcggagttattcacatgaccttcgtactgtgttacacatttagtggccctcaagtcccacagcttgatagttccagtcatgtctgatgacaccagga

SEQ ID NO: 245413 - DNA, 589 bp, Homo sapiens
acatcaacctccattgcaaatggccatagaaaattccaatttttcagttctttcttctaattcagcaatagctaactctttggcagatgagaagagtagcttgctcagtctccatccccatcctcttatgttcagagtctagaaagctagaagctacatatttcagactaatttgcaagtaagattctgaatacaaatgagattcctccaaatagatactatttgtaagacaaaagtaaagtgggggtcctctttcttccgctccatcttttgggaagctgggtcatcaaaaagtgagtgtctagagatagtagtgctgctgactatattcggtgtcagtgtctagtcatcagcttcttgggtatctacaagtggtttcagcagtagcaacaaccagaaactgttgcagtgtctattcattcactttgatggagtgcagaggtatttctgatggtaatagttcctaattgagttttctgatttctggattgcaggtaagagagtgtgttcataaacctaataattccagtattggcctcctgatcctcactgctgttatcctaaagatttccagcacttggtccttgta

SEQ ID NO: 245414 - DNA, 397 bp, Homo sapiens
ggggctgggcgcagtggcttacatctgtaatctcagcactttgggagactgagagaaaattaattccagttggtgttctgggcagaaatgaagaggaggaggaagaagacaaagcagcttctcccctttcctttgcactgagggcaggcccacgccactttctctggtgtggccacaccatcgtccacacgatgaaaagcagaggcccagggaggctgaaggactttcctgaaatcatccagggaggagcaaagccagccctgaatcccaggtctcctaatgattaatccagaacgccttccacttctcttttctgccacatggccttaaaacagaagacaacccagatgggacaaactagactgaataaatattcataatattctaatattcataa

SEQ ID NO: 245415 - DNA, 380 bp, Homo sapiens
ggggctgggcgcagtggcttacatctgtaatctcagcactttgggagactgagagaaaattaattccagttggtgttctgggcagaaatgaagaggaggaggaagaagacaaagcagcttctcccctttcctttgcactgagggcaggcccacgccactttctctggtgtggccacaccatcgtccacacgatgaaaagcagaggcccagggaggctgaaggactttcctgaaatcatccagggaggagcaaagccagccctgaatcccaggtctcctaatgattaatccagaacgccttccacttctcttttctgccacctcccccctcaacccattttcctagggttggggaaataaagttggaatttgtatgggtca

SEQ ID NO: 245416 - DNA, 507 bp, Homo sapiens
cagcctccatttactgagcactgtggttagacttggggcctgattcctttggaaatacagatggctggcagaaaaaaaggaagcacgaggtggttgccaatcctgcattgctttttgcaggaaggtctcaggagagtgggtgtggggagaggggagtcaagggagagcctctgtggattccagaattgcttaactggggtcatgccaagctcttaaaagccacaagtagcatttgggctccaggcttatgtctgttcctgtccagccaggcctgggtggtgtttcatcccaggcctcctgagatttaagctactgctgagattttgttatagaaaggcaagaagggggaccgaagatgtttctgtgctccggcctcctcccaaacccaaccagcccctgtggaatgtgcctctgccgggctaggacttggtttctaatgagaagaaaacaaggctgcctgtggctttctcctccctcctggaggggcactgagctcccagctaagga

SEQ ID NO: 245417 - DNA, 715 bp, Homo sapiens
ataccacccccactagcctcttctgcaggataacttgaacactgcagtggccctgtccatctaaactttacaaggttttgtaaacgttactgaacttgcttcttcccgactacattaaagcacttacttgagatattaaacattttctcattagtcctgtttgcctagtcagtcacttgtatagacagggcaacagcacggcctgaatattgggcaggacaccgccctgcgcgatagtaactttgcccaacagcttgttgagcttctcgtcgtggatggcgagctgcaggcgtcggggggtgacgcgggtcttcttgtctcgggccgcgttgcccgccaactccaggatcttggcggtcaggtactccagcaccgcctccaggtacaccggcgcaccggcccggacccgcttggcgtagttgcccttgcggaggaggcggtgcactcggcccacagaaaactggagaccagccctggaagagtgcgttttagccttggcgcgagctttgctgccctgcattccacatccagacgcagtgaagtatttaaatacttgtttagaagaaggaaagtgattgattctagtaaaacgcaagagctaaactcttataatctatattcggcaaagtagactgtgctatctcctgaacacagatttcagccaatcgaaaagcaggtgtttaaaaaaatttaaaaaaaaaaaaaaaaaaaaaac

SEQ ID NO: 245418 - DNA, 463 bp, Homo sapiens
tgtggtcacgactggcagtggtgataaaggtcggtatgaccttactgctctccataaatagcccttcagtcagtaatgtccttgcatgatatggtcacattctttcaagagcagccctgcttttatgtatggtaccttccttccacagagctttccatctcaggtgaagctgctttcttgccccaccataattcctctcaatgacttcaaagcagggcctctacattcgatttttttttaggatgagtctgtctaccttttttttagagctatgctgtctactttggtagccagtagtcacatgtagcaacttgaaatgtggctagtctgaattcagatggactttaaagtacccactgaattctcctggtaactttaaaatgctgatgacatgatatgtatatagcttggacatgatgacagtttgatatactgggttaaattaaacatattattaaaatta

SEQ ID NO: 245419 - DNA, 736 bp, Homo sapiens
agaagccgaagacccaaaaacctgaggggctgctgatgcatgttctggagtccagagtttaagaacctggagttctgatgtacaagggcaggagaatatagagatctcagctccaggaaagtgagagattcttctttcctctacctgttctattccttccctcaaccaattatatggtgcttgcccacgctggtgagggtagatgctaatctcttctggaaacaccctcatagacctgcccagaaataatggtttaccagctagctgactgactatcccttaacccagtcaagtggatgctaaaaattaaccatcacagttattaatatgatgtaatggatatgacaataatccatgtacttaaaaatataagtattattaatgacagcagccactccttaaccccctaaactcctgtcataactcaagctaagcattttttcttatactatctaatttcatacttaaaaacctgtaagttggttattacacacatatagatgagatgaaatatagatttttattacatacatatagattatattatttattaaacacatataggttaatctcagaaggattcaataacttgcccaagctcacacagctagagagtgccagtagctattatttcaaccaagtgtgtgctgcttatgacagcacactgactttccatttttctctaaatacctcatataatgagtgagcatccttttttatctcaaaaataagtaac

SEQ ID NO: 245420 - DNA, 413 bp, Homo sapiens
cactcacaagttagagaatgagacttcagctaattctttactgtgtctccttcttgttctgtgtgttttttgaaggagaaagaagtcaaaagttctctatcatcataaagtcaaaaattcatattttatttgttttgctcttttcttcggaaacatcaaatttatagtacatattgcttttcttgtcatttctctccattttgtaatttgtgtatgcagaattctaagatgacctctaagagtttcaccccctggtgtgtatgtcccatgtaattccaacatcaaggatgagcagacctgtgactatgagggatagttactctcatgagtatataaagctacataagacttcttcctagcccactggagagagatgcttctgctggttttgagtaagcagccatgttgtcaca

SEQ ID NO: 245421 - DNA, 421 bp, Homo sapiens
tttacaaattaagtccaggaacctgaaaaccaggctaaacatgaaagaatcaataagcaaaagaaaatgagggattcattaatctgcttagagaactcaaatcagtgaccataaagatggatttctggccaggcacggtggctcacgcctgtaatcccagcactttgggaggctgaggcaggcggatcacctgaggtcagtagtttgagaccagcctgggcaacatggtgaaaccccgtctctactaaaaatacaaaaactagccagatgtggtgtcggacacctgtaatcccagctacctgggaggctgagggaggaaaattgcttgaacccaggagacagaggctgcagtgagccatgatcacgccactactctccaacctgggtgacagagcgagactctgcctttaaaattaaagaa

SEQ ID NO: 245422 - DNA, 97 bp, Homo sapiens
gcaaaaacaacaaatcttattttttcagcctgttcgatgtatgtgtgaaacaatgttgtccaacaataaacgggaatcttatttttctgaggttttt

SEQ ID NO: 245423 - DNA, 783 bp, Homo sapiens
gggaaactatcatatgaaaataaaagcttctgttcataagggtatatttaaaactcatttattaaaatattgcttagaacttgaaaattcatcagtaggtgaattgtttggaaagtatggtttatccatacagtgagatgttatacacttttaaaaataacttggatctacatgtagtaacctggaaagaggcccattatacactgtttaatgaagaaagcaagtttctgagtaatgtatataacatgattccatttatatacagcatacaccaacagcacacacttttatatatataacttaggtcttatatatatttgcatgagcaaaaaatagagaagagtacacagtaaaatgttaatattaccttaagggggtgaagttttaaatgaaagaaaaatctagcaaagtttaaattaaaataaaatcccctgagaagaaagggatcagaatggttacatggtccagaaaggaaaaggtggactcaatcacagctttgttttaccacctccactcattatgcgttttcaggtcgggttgccctgacgcaccagaggtcagccctatgctaaggcagatgacaatgtgttatgccacaagtgacattggtaaatagtgcatttggagagaaaaggctataaaacttctcatctgtaaaagtttccaaggcatacaagaactttggtatcttggtaaaaagaatgtgtctccaggcacacttggaatctaccatgcttctggttgaggccctacagcctccagggtctcccggtccatatcagt

SEQ ID NO: 245424 - DNA, 572 bp, Homo sapiens
gagacgtagtctctattgcccagcctggagtgcagtggcacaatctcagctcactgcaacctctgcctcctgggttcaagcgattcttctgcctcagcctaccgagtagctgggactacaggtgtgcaccaccatgcttggctaatttttgtattttagtagagacagggtttcaccacgttggtcaggatggtcttgatctcctgacctcgtgatctgtccgccttggcctcccaaaatgctgggattacaggcgtgagccactgtgcccagcctgtgttacatttttaatatctttgcctttgattttacttcatccagtacagttttttttaaatttgcatttgcactattgctctttgcccatccttttagccttttgagtcactttactcaagtgttagtaacatctgaatttaacttttttcccacccaatctgaaggtctctcttttgaaacaaatttattccatttaagtttactgttgtaaatgtttggtttaaattttattattttggctttttttcattctgatgtatttattaaataaaggtgtgttcaactaaatttca

SEQ ID NO: 245425 - DNA, 580 bp, Homo sapiens
accagagaaatgtaggcagagaaatggggtgagacaggagaaagaaagggtcataggagcaaagggtactgttggtgagtgtcactcgtggataaattcctgactggagtggaaggaaagtgacggaaagacatttaggggcaggcatattgaatattttattttttgattggtaatattgatactcctatgatgtaatcatagcccctttctcaaaccatcccaaaattcagtagtctcccacacatactccatgttaatcatgccctggccacgtcagttttaaaggaaggtattataggttgctgtggggcttgaataaaatagccatcagagtgagatataagatcagggcttcagaaaaaaaaaaaaaaagaaatttgatttaaaaccaaaaaaggcccattaaaataacccaaactttgaggaatttgtaggaatctggaggtgggcatcaaacttcccactaaatgtagagagtggggtaggggaagggaagatgcaggaaatgggtcaatttaattttatgtaaaagtctcaaaagatgggataacatcagttaacacctggactatacaaa

SEQ ID NO: 245426 - DNA, 455 bp, Homo sapiens
tcttgcattgctataaagaaatacctgaagctgggtaatttgtaaagaaaatttattttggcatatggttcctcaggctgtacaggaagcatagtgctggtatctgcttctggtaagggcctcaggaagcttacaatcgtggcagaagacaaaggggggccagtgaattatatggcgagagggagcaagagagtgagggggctgccacacagctttaaacaaccagaacttgtgtgaactcagaacaagaactcacttatccggggggtggtgctagaccatccatgaagtgttcaactctgtggtccagttacctccctacagggccaccttccgcactgggaatcacatggctttgttttttttctctctctgtcacccaggctggagtgcagtgagccgagactgcgccacttcagtctggcctgggtgaaagagcgagactccgtctcaaa

SEQ ID NO: 245427 - DNA, 1006 bp, Homo sapiens
ggcttcagtctgtaggtgactacagaaggaggaggagctccgtctgttctctcttcaggcagttgttgtgtctctcagcgcttgttgggttcacaacctattaaataagccggggccggggccagggctggtgcccggggccgcactgtgaggtgggcaggcgaggagcgggaagaccatctctgcaagtgcagcatagcctcggcctaggacagcgggagtgcgtggccaaagctgtgagcagaggcacaggtggtggcagacagtagaggcgccccatggggaacatactgacctgtcgtgtgcaccctagcgtcagcctcgagtttgaccagcagcaggggtcggtgtgtccctctgaatctgagatctatgaggcaggagctgaggacaggatggcaggagcgcccatggctgctgctgtacagcctgctgaggtgactgttgaagttggtgaggacctccacatgcaccaggttcgtgaccgggagatgcctgaagctttggagtttaacctttctgccaatccagaggcaagcacaatattccagaggaactctcaaacagatgctttggagtttaacccttctgccaatccagaggcaagcacaatattccagaggaactctcaaacagatgttgtagaaataagaagaagcaactgtacaaaccatgtatctactgagcgtttcagtcaacaatacagctcgtgttcgacaatattccttgatgacagcacagccatccagcattatcttacaatgacaataatatctgtgaccttggagatacctcatcatatcacacaaagagatgcagatagatctttgagcatacctgatgaacagttacactcatttgcggtttccaccgtgcacattatgaagaaaagaaatggaggtgggagtttaaataactattcctcctccattccaccgactcccagcaccagccaggaggaccctcagttcagtgttcctcccactgccaacacacccacccccgt

SEQ ID NO: 245428 - DNA, 905 bp, Homo sapiens
ggcttcagtctgtaggtgactacagaaggaggaggagctccgtctgttctctcttcaggcagttgttgtgtctctcagcgcttgttgggttcacaacctattaaataagccggggccggggccagggctggtgcccggggccgcactgtgaggtgggcaggcgaggagcgggaagaccatctctgcaagtgcagcatagcctcggcctaggacagcgggagtgcgtggccaaagctgtgagcagaggcacaggtggtggcagacagtagaggcgccccatggggaacatactgacctgtcgtgtgcaccctagcgtcagcctcgagtttgaccagcagcaggggtcggtgtgtccctctgaatctgagatctatgaggcaggagctgaggacaggatggcaggagcgcccatggctgctgctgtacagcctgctgaggtgactgttgaagttggtgaggacctccacatgcaccaggttcgtgaccgggagatgcctgaagctttggagtttaacctttctgccaatccagaggcaagcacaatattccagaggaactctcaaacagatgctttggagtttaacccttctgccaatccagaggcaagcacaatattccagaggaactctcaaacagatgttgtagaaataagaagaagcaactgtacaaaccattgtgaccttggagatacctcatcatatcacacaaagagatgcagatagatctttgagcatacctgatgaacagttacactcatttgcggtttccaccgtgcacattatgaagaaaagaaatggaggtgggagtttaaataactattcctcctccattccaccgactcccagcaccagccaggaggaccctcagttcagtgttcctcccactgccaacacacccacccccgt

SEQ ID NO: 245429 - DNA, 406 bp, Homo sapiens
cgcccatggctgctgctgtacagcctgctgaggtgactgttgaagttggtgaggacctccacatgcaccaggttcgtgaccgggagatgcctgaaggtaaggaggtgataggtgccatctaccctcggtttgcctctggctgctgctgtccccaaggttccctttgaggcatcccacacttcgagctcctttctgcttgtagccagctttcccgggggctggccaggaacaaaagctggctctgccttgaattcccaccccttagtctttccccaccgagtccagtcagtttcttttcacctcccctcccaatcgcccagttcttgctctctcatctcattctcccaggctggcatgggaccatttatttatggctcttgtcgaataagcagcagttgaataaatg

SEQ ID NO: 245430 - DNA, 470 bp, Homo sapiens
gtgtatatatacccccgaagtgtggaaaagagatctcaacaggtgttggatgttattatgtattttaaatgtacccactcacattaagtgcataaagatgtatccagacaacttgtgagaacttacgtgtttctagttattttacaaccacatagccctcaaaagcaacctagaatatggaaatatatcctcacaacgctaattatccttgttaggtacactagtacttccttttcctaatactgaagaagtaaatgtgattgaaatacaaaccaaccaaatataatgaagagacatttctacatgtcaaagttggattctagatttttagacctgtgaggaatctcaacctcttcattttataaatgaggatattgagacctagaaagggaaaccaacttggtcccaaatcacttagctggtaattggcagattaaacaagtgctctgatttcagaccctagacttaaa

SEQ ID NO: 245431 - DNA, 452 bp, Homo sapiens
aaaattatgtatatttaaagtgtacaatgtgatgctttgatatgtgtatatattgtgaaatgattaccatatcaagttagttaacacatctatcacctcacgtagttaccattttttttttgtggtgagaacagttaagatctattctctcagcaaatttcgatatacgaaatgaatagagtggtacatcaaaaattacaaaggattatacagattgatacaatgttattttatagatgttaataattgttttgttcattgttataatggtatattaatattctagacataagaatattcatctttttaatttgatgttacagttgtaattagcaagcattttgcagcaagttgtatgtatacatatgtatgtatgagatacatatatatatatatacagacacatatttatactgtaagactctcaaatgttaaatgctttaatatgcaaa

SEQ ID NO: 245432 - DNA, 692 bp, Homo sapiens
ccttgtttcctagatgagagaacacaattgcataaatgtttcaaagtcatctccaaaatctcatggtaaattaaaggaaagacaagactagcatcctggattctgagttacttcctttgtgaaatgaaagagagaaacattattaaaatcttgtattatctcaatcctatttgcagcatgagttgtcataagatttataacataaatacttatcataacataagtatgcaaattggttgatttgttttgccctttactttctagatccagaggatattagaaatatgccactttagggaaaatacactagggaaagacctaagagcaaagaagaacctcatcttgatgttataaaataacaatgtaataatacattcattctaattgctcactgtatctttcaaagtaaaatgtaaatttgcattagtttttagacaatatgtactctaactttgaacttagtgtaagcaatctgctgtaaaaaatagtcccaaaatatgtctttggctcaaatacatgaggagattatttctcagccttgtaaacaattcagcaaggcactgggttggtgggaggtagaaaaagctcacgaatttaacagaagatcttcaaggtcccctggctgagaacgtggaaacaaggccaccaggaattcctcggggcagacggggtccaccccagaaggtgtgagg

SEQ ID NO: 245433 - DNA, 719 bp, Homo sapiens
ccgggaggagaattcgaagttaatcaatagaattcgtatattaattcagaaacaccttttgagcactgactttgccagcttcttgcctgggaactggaatgtagatgggagcgagacacagtccctgctgtcctcatggggctttcattttgtgaaacctgactagtaaagtaccaattattgctaaggcaagtaacacaaactttcactgctcttttctttatttagatgtcttcatctacaaaatgcgttctatttcagtaaacacacaaatatgtgtaaggtttcccatagtttgtgtcttacttctgagcctactgaatgttgttttccctataaaatcttgagcctctctagctggtctttacctaccaagaggatacacaggaagatgacatccttaggatggaagcagccactctactctgttgttttccagaaacgtagttttatattatatttaatcatatccattagcattattattgttgaactcaattggcgtttgcttagattttccttttgtgttttccaatcttgttcatggttccttcttgtatctcagacctcattgctgcatcttttcccttctcaattatgtacatcatttatacgtttctttggtgaagtatgttggtggtaaattctcacctttatttttaagaaataattttgacagcttattacagttttttagatcataaatatcttggaagttc

SEQ ID NO: 245434 - DNA, 638 bp, Homo sapiens
accatttgcttcctctcccgagggtcagagccgcctcacaccgcactcagggtggactcctgctgagggcgcgtcctcccacttcacacccaagggcaggtgctgcggagggactggagtgtgagaatctgtggccaggacacttctatacatggaggctctagattgcctactggtcaccaaacagatctgggtcctttaaggaaaaggtttatttgagtatttcacggaagccctggtgggtccatgttctctgcggcgtcctgggctcggatggagggcgtttctgccctagttctgtgcttagctgtgcatccctgggcgagccgagtttccgatccttgcctcgagaggctgctgctaggactgaggaaggtttttcgagtgaggattggcagacgttttctgtaaagggctagatagtaaatattttcaggcttgtgggccatatggactttttcacaacttctctgctgttgaagcacagaagcagccacagacgtggacagcgggcgtggccgtgtccctgtgagacttgcctaccgaggcaccagcgagctgtggtttgcttgcccgccctaacctatagcaagtgcctggccctgcaccaagcacagagcaggcatcaggcaagattg

SEQ ID NO: 245435 - DNA, 792 bp, Homo sapiens
ccaggtctggtttcctgctgcctactgactagcaaccatcagattctctgtaggacagaagacagaatttggcatctcctgccttctggtagtcagacttgttgctgaaggacagaagcgccctccaaagagtgccctgtttcctccctgtattgcaccatgagctcatacctagtgtaggatcaccactgctcgtctggagattagcactgcagcaacctcaggtacccaaggcatattggggcctgcagacatgtggctaggaaggaacggaggtagggcccttcatgcctccagacctcctgcaccttgttcattccatttgcctggaaagcatcccatgtcctacccgagaacaacttattaccatagattctctccagatagcatggaccttagagcatccctgtacttcctgcttagcatacagccctccagtttacccacttctctgtgaacctctagcacttcctgagttgcaagataattcatggttttacttgttaggttctcactgggttgtgggcttccagagggcaggactatcttgttctttgtcgctcctatccccgtaccaccccagtgtctagtacgtaggaggtataaacagttgttgaaagaagatatctgtaagttttacttacagaagaactgattctttcagaatatctaaaatgagatttaaaaaaatcattttattgaaaacatcagttgtcttaaaattataggagtttcccccattttgcatttcttcaatgaacatgtattacttgagcaataatttttagagtg

SEQ ID NO: 245436 - DNA, 480 bp, Homo sapiens
aaaaagttaaattcataagactagttatgtagcagaaaaaaacataagattcaaattcagaagcctgtgttttaaagctgtatttttggctaacttgttatgtgatctcagtttcctcacttaggaaatcattgagaagcgactcatgcatgttctaccacaagcttccatggataaataactttgaaacattccagataatacaacttcaaacctttgtctttactgagtgaaaatgattgctgtagaagtcgttcagtcttacgactggagagtcaagctctaggatatgttggtggatctgttaaccagttgattaaatcctagtaatattttatttcaaatctttcttctttgtttttctttttcttttgagacggagtctcactctgttgcccaggctggagtgcagtgagccgagatcactccactgtactccagcctgggtgacaaagtgagactacatctcaaaaaaaaaaa

SEQ ID NO: 245437 - DNA, 719 bp, Homo sapiens
caaactaattatctctctcctacttgacacccacaaaactaaaaaactggaaggaagggaaaacttctccttaaaagaatcatagaacaagataaggtgatcaagatgaagaagaggatgaaattccataaagaggaagctttgcattctaggccacttttgctctggggtcatttgctgatctagcagagatgtagcagatttggaagctgaggctataggccccagggacaaaagtggaaatccagggcccatcaacactgggggctttgtggctgggtgggcactgtgtctgtaatcccagcattttgggaggcgaggtggaaggactgcttaagcccaggagtttaagtaacatagtctatctaggtagcacagtgagactctatctctattagaagagacaagacaagacaagacaagaagcttgagtaaatgaccccctcctttgggcttgaaaccaaaaaagtgatatcctaccaggaaagatgaacaagaagaaaagcagtccacaagtggaatgtgattaaacttctgaacatctgaagcccagacactggaaaaagatgaaccttaagtattagtaaccaacggggaacaaaacaaagctcccctagatactagcaaactattcatatacctgcttactatgttcaaaaatataaaatcccaatcctgaaaaatttggcaagtaacgcgaagttactttaaaaaaacaa

SEQ ID NO: 245438 - DNA, 1061 bp, Homo sapiens
accaaattgctgaacatatcactagtattttggatttgctgagtgcagtcttcccattaaaactaagtgttcagtagggaggcgtggtggctcacacctataatcccactactttgggaggccgaggtgggtggatcacttgaggtcaaaagttcgaggccagcctggccaatatggtgaaaccccgtctctactaaaaacaaaaacaaaaactaagtgttcagtgagattgtagcctatgctacaacaatagtaatgccaattgttttagagaaaagtaaatgagaggctaccagttgtgtttagaggaggtcgacgttttattttagacaaaattcacaggaaatcacagtgggaatgtgataaggggtttgaatgattgatggggacaggaagaattcatttgagagactagagatgagtcagtattctagatcgtgaagtaaaatagtgagtcatgtagtgacttagcatgggttatccttaaatcccagtgtcttaagtgtattttttattcatactgcatgtctaaggagggttggcaaggagtgctcatagacccacaaggaatccaggctgagtgtggcaccatcaacatatatttccatgaccatagtggtggtggggaattggaacatggtaaattacacataggactatcgaatgggacttgccttgcctcactgaataatttatataggtggcttttaatgctacgatactggctaattctttccgatacattgaccatgaaatttatgagttggcacctacaattcccaccatgcctccgcttccctctgatctgttctcacgggcttaccaatgctgcccgcttctcctcttatgtgtattttctccgtcaatgactgtacacctatgccttttcttacatgatgtgcactattacttcccctttaaattaggctcggtctctctccccctaataccacctgtcattcgcattgtctattgtctctatttaaattatactctgtcacgctcctccgtcctgccgtctgtgactctccctgcttcgttagcacgtatcatctcccgtt

SEQ ID NO: 245439 - DNA, 383 bp, Homo sapiens
agaggacagatgaggaaaccaaggcttgggaggagaagcggcgcatcctgtggcacacagtaggtgtgacacaagacagctgactctggcttccaggctcttcccacagatctgcagagcttctgccctcccagccccacctgccaggactaggtcctctccgccggccctgcagctgcgttctctgcctctgctctgtggactgatgcctcacacgagctccctggcctctggcttctgcctccccatgccctctcttgtgaacagtccatcagggctgggaggaaagcaggatgaaaccagttcccagcgaagcagcattcgccagcatttacttcatacctccctttaatcaactcacttttctctaaaagctttaaaaa

SEQ ID NO: 245440 - DNA, 464 bp, Homo sapiens
ggtctactctgaaggtttaagagatccctgagccaacctcaagcttgcggacagactagcactccccagcctccccctaaaattcggactgaatggcgggccaaggatactgaaggggttctctaacatccttatgatggtggcttctggaatacactgcactagaaagtcaggcttccttaagaatagctggtcatactcaggcaacgttcccagggataaattagattagatgaaaattacaccataattagggtacttatttctagaaattcaataggaaattctcctggggttctcatgcttttaccttggtcttccccaaagggtcaaagtgcttattaaggctgggcacaatggctcatacctgtaatcccaatacttggggaagcagaagctgaaggaatgcttgaggccaggagttagagaccagccgaggtaacatatcaagtctctacaagaaa

SEQ ID NO: 245441 - DNA, 509 bp, Homo sapiens
ctgggcgacaaaagcaaagctccgtctccaaaagaaaaaaaaacaacaaaaaaaccccagaaaaacaacgaaaaatgcagtcgatccatacatgcttagaccagcgggtacaattctaggaagaaacaagaatgagaagaaagcctcagcagcagggatgcaggattgaggcacagcatataaagtaatgaaggaacaggggttctgtggccggaggatttgctcacatatcactgttaggggagccagaagccactggacaggttcagccaaaagtcagttttccatcccgaggacctgcccctgtgtcagggctcctctgtccattacagcaaattgaactggagtcatcctctgctggaccctgccccactgactcactcttgctcagagagtagcagcgatgcctctcaccactgggaaggcagcccactcctgtggatgggaaatttgttctctagtttggctgggtgtgcgtgtgtagatcagggcagaaatccaaaaaagag

SEQ ID NO: 245442 - DNA, 965 bp, Homo sapiens
ttttggaatatttatatatacataatgagatatcttagggatgagacccaagtctaaacacaaaattgattgtttcatatacaccttataaacatagcctaaaggtaattttatataataattttaataattttatgcattaaacaaagttttgtctggacctacaacttgaggtctggtgtggaattttccacttttggtgtcatgttagcactcaaaaagtttcggagttgaagcatttctgatttcagattttcagattagggatgttcaatttgtaccattgttatattaatgagttgccaataagatcagtatttgggtttgacctatgggatagatgcttgggtgtgtcagaagacttctatatatgtaattatttaccaaaaggccaataatgatgttgagatttgacatgcctgcccattaagagacagcatttgtgggccataaagaagtctaaaaggcaatcttgtatcataaataagagatggacttttgaatgagagatcctagacttaacacctgcttctcccacttactagctgtacaatgtttggtgaattacttaatctcttggtttctgagtttcctcgtcagtaaaaaggagattttaaaagtccgttgttgcctaggactgctgtgaagattaacttagataatggattgtacagggtacatttaatcatcagtcagtgaatattaatattacacaagttatagcattcaacaactaaaaagtccttatctgaaaatattggcatctctaagttctaaactgggtagaaatcctagatgtaaaataaaagggagtttaatacagagtaacagtaagataaatattcatgagaagattcattctaaatagctgactgctattgatttggctcttggccctcccatatgcccccccaaaatatctttaaaacttaatattggttgggttaccctataataaagtttcc

SEQ ID NO: 245443 - DNA, 239 bp, Homo sapiens
ggtcagggtgggctccctggaggaggtgatgggttaggttggccctaaaagcttttctgggttaggaagaatgatccaggcagaggcacctgtatgtaagagatgtgaaggagccaggtccacagagaaatgagggagttaagggcaccctccttgacccccttgtccatgtaatatgtatatcctgcctagggcttcttcagtagtaataatttgtcctcagcaaatgatatattaac

SEQ ID NO: 245444 - DNA, 1579 bp, Homo sapiens
cttaaaagcaacactgtttttttaacagggggtttctgaaaacataacagacacatcaccagcagtcactaacatttattgaattctaggcacagtaactagcatgtgcaacacttaataaattttagtgtctattaaaattcacacaatgaatatacatgtgctattctaaacatgcggaatacagcagtgaacagaatggacaaacatcctggcttgtggtgcctgtgttctagtgaaagaggcagacaatacacaggtaaagaaataagtaaaatatagagcatgttagataagtgctaaagggtaaaactaagtgagagtctcattgggggaagggaggttagaattgggggctaagttggtcagagaaggtctacctctgtatgatgggtcaacaaggaggttatctgtgggagaaaattccagaggcttgtgtgtgtcggtgtttgttgatcatcaagggagtacagggcatgaggtctgggaggacctcgtaggtcaccatatgaggacactggctttaatgccatatgaggtggaagaagagaaatgtactaaaagcccactaaaaggaagcaagaccaggtaataacctaggtaaaagatgaaggtggttagacctatgccagcaatagatgtggtgaggaaggtcagaggatcacttgagtccaggagttccacactacagtgagctgtgagctatgatcatgccactacactccaccctggaggatgaagtgagatctcatctcaaaaacaaaacaaaacccaacacatttgggctgagcactgggaggaatggaaatgccactggtgggcttgggaaccaggaggatgccaagtactctgtcaagtgctttatgcatatcatctcgttcaatcctcaagacagcattatagaaactataattttcattttgtaggtaaggaaacaatgctactacaatagtcaagtaacttggccaaagtcactcagtcagcaggcagctgtagggatctaaatcaagaatgatcttccagtgtaagactgagtataaccacatgcttcaccaccacagtcatggcaccgacaggctggtgggacacagatgtggtgacttctaaatcagatcatgagtaattagacatccatgatggtttgttgagaggagggaaatagacaatccctgggcatgctgtaaaagagaaggccaaaatgataccatttagaaatacacatgtacacagagtactcatttatgagcacatgcagaaaaatatcaaaagttatatgaacccaaatatgagcatcatttatctctggtgagatgataatttggtttgtctttttgtttatccttatcttctaatctgcctacaagtcaaattgctgggattactaactttagagaaaaatctacaatttccctataattcctatggctcagtccattatttaggtcatgagacctaaaattgtaaattagaaaaggtagaagcaaagaagaccaccagttcaccaacatgagaatgaaaggtgaggcacaatctgggactgaatccatcatctagcctttagagtgcccttccccactcc

SEQ ID NO: 245445 - DNA, 274 bp, Homo sapiens
acaaggcattcttcagtcatttttgtataatgatgagtataattgttctggtccttgggagctatcttaggagatagctgaaaaaaaaaatttttgatttttgtaataacttaccttaaatcactcaatctcttttttagttaaattaataattcttttaaattatctctgaagctactagctgtttatagtaaatccagtttctcccagtcttttgctacacagaaactggaaaagtataagggaaaggagccataatcctttttttaatgta

SEQ ID NO: 245446 - DNA, 585 bp, Homo sapiens
tgatatatttgtttattctcatgatcagagtgaagtatgggtccactttttgctttcactttttttccagttagctttccatttgtcttaacagcatttactgaaaagtccattattttccccagtgctctgagctgccaactttatcacatgaatttccatatgcacacgggtttccttctagatttttctcttctttcccattggcctttttattcataagcctgaacccttgaaggatgtttgactatagaggatttatagtctgtctagtagggccagtcccatttcattgctctacttgttcagaagttgcctcgctactcttgcatgtttatttttcataaatttcagaacaaatttgtgtagctccagaaaacaacttgttggtatttttattggaataacattaaaattacaagttaactcagggagagctaacatctttatgatgttgtttttaattcttatgcttctaatggttttctcttgtctaattgcattggccaataccaccaatacgatgctaaatagcagtggaaacacagcatccttgctgtgtttctgacttactggagttttccc

SEQ ID NO: 245447 - DNA, 548 bp, Homo sapiens
agactcaaaggctaggggtgactcaggggctgggggctgaaatcatctgaagataattaaactatctcaatcctttttctttcccctggaaaatatgctgggtattcaaatgtgacaacaaattgtcatgatttgccttgcagttgatgttggctaagggctggatctgagctggggttgttggccagaacacctacatgtggcctctccatgtagcttgggcttcctcataacgtggtggctgggttccaagggaaagtgttctgagaaagagagagccaatagagagaggtccatattcttttccaacctagtcttggaagttgagcagtgcctcttccaccatattcgattcatggagatagccataaaggcctgcccaggaccaggggagggaacctagactccacctcttcatgtaggaggggcaaggctctggaagaggacatgggaatgaattggatgtggtggccatttttggcaaaaataatctgccacagaaattgtatctggggttgaaatttaaggatatagaggggctaggcaga

SEQ ID NO: 245448 - DNA, 366 bp, Homo sapiens
gagaatagacagagtagatcagacgacatcacagagtaggactgagtactgtaaaactaatttctgagggacgtgtgtgtgtgtgtgcgtgttgggtcatggtataaattttttttttcttactttggatcataaaaagttacaagtttggaaaacactgctcaaatgcaagccctatttattgcagatgaagtagctgagatccagagaagggaagtgggtagcccaagagagtcccatgaagtctatagctgtccctattcctctggattcagggatctctccactccagcacaattgaaaatctaaatataaagagaatcttcacactcttgtttgttctagaaaaggtgatttgaggaaaga

SEQ ID NO: 245449 - DNA, 1247 bp, Homo sapiens
  misc_feature (736)..(736): n is a, c, g, or t
cggccaacctgcaaatgcccctgcgtccttgcctctcctgggaacggggagggcccgaaatgcagtggcagtccggggtggagagggaaccatcttttcatggatgatctgaggttgcctcgctaaggtaaaggctccacctgccccctgagtcggacccaggagatgatgcagctctccatctcagctgcgtagacatctgccttcgtcaacacacatctttctgagaggacaccctgccactggggtgatgccgcctcatgttccacatgattagagcctcctccagaagggcagggtgggagaggagactgttgggaggatccctcggtggccccaccctcactccccacacccaaagggcgccctgcctgcggggcctttcactagttctgtgagttatttgtctgtgaattttttccttccttatcctctttttaatgagggtggcttctccacctgtctttgtcgcggtgaacccagcagtctcttcagcatggttgccaccttgtcagcacgcctgcctgtcagtcccccttgagggcttctgttgcctgcagagggactggcaggaagaggtgcacctaggtggatctagactttgactccgggtgactcaggaggctgaggtgggaggattgcttgagcccaggaggtcggggctgcagtgagctatgatgatgccgctgcactccagcctgggtgccagcaaggccctgtctcttaaattaactcnagtagttaagtattaacaaaatcaccaacatcacaaaacaaaacagtgcggcccgctctggccaacgattttagacttggcaaagcttaaccttcgggccgctattgagcttacattggcaaatccgcctatagggggcgatctacaattaacggcccggctttaacaagtggggctgggaaaaccctgtgggtcccaatttaaaggctgtgggacaaccctttttccgcctgtgggaatacacaaggccccccgtagcgctttaccaagtgtgccaccttgtgcgacggccatttcgcgccctatcttgtgaaaacgcccacaacttttcaaacgtcctctttctcacgagggaccgtgcggacctcttttatcacgcccatcacgtcgggggtgcctctctgcaagagcctttctcacagctccgctcctctctgtgacgacctttctgccgggccggctcgtcgtccctacatctcttcgctctccggcgccatccctaccccgccct

SEQ ID NO: 245450 - DNA, 772 bp, Homo sapiens
cggccaacctgcaaatgcccctgcgtccttgcctctcctgggaacggggagggcccgaaatgcagtggcagtccggggtggagagggaaccatcttttcatggatgatctgaggttgcctcgctaaggtaaaggctccacctgccccctgagtcggacccaggagatgatgcagctctccatctcagctgcgtagacatctgccttcgtcaacacacatctttctgagaggacaccctgccactggggtgatgccgcctcatgttccacatgattagagcctcctccagaagggcagggtgggagaggagactgttgggaggatccctcggtggccccaccctcactccccacacccaaagggcgccctgcctgcggggcctttcactagttctgtgagttatttgtctgtgaattttttccttccttatcctctttttaatgagggtggcttctccacctgtctttgtcgcggtgaacccagcagtctcttcagcatggttgccaccttgtcagcacgcctgcctgtcagtcccccttgagggcttctgttgcctgcagagggactggcaggaagaggtgcacctaggtggatctagactttgactccgggtgactcaggaggctgaggtgggaggattgcttgagcccaggaggtcggggctgcagtgagctatgatgatgccgctgcactccagcctgggtgccagcaaggccctgtctcttaaataaataaataaataaataaataaataaataaataaataaaattt

SEQ ID NO: 245451 - DNA, 410 bp, Homo sapiens
acatagcaagaccccatctttatttaaaagtagaaaaggaagtaagatcatccataatccttcccaccagaggggaacatttttctttttttaggattaatatatttttatattaaaaattattcatacaggctgggtgcagtggctcactcctgtaatcccagcactttgggaggccaagtggatcagctgaagtcaggagtttgagaccagcctggccaacatggtgaaaccccatctctactaaaaatacaaaattagccgggtctgttggtgcatacctgtagtcccagctactcgggaggctgaggcaggagaatcacttgaacctgggaggcggaggctgtagtgagccgagatcatgccattgcactccagcctggacaacaagagcaaaaactccgtctaaa

SEQ ID NO: 245452 - DNA, 495 bp, Homo sapiens
agcgaaactccgtctaagaaaaaacaaacaaacaaaaaacaatcaacagagtgaaaaggcaattctttcaatacattggagactgttcaattttttattgccccttgattcagttttggaatacactagttttaaagtaatttgtctctttcacctaaactgttaaacttatcaggctgaagttgattgcaatatgtccttatgataatattcctcattatttcttactattattattgcttcttattattctttaaaatatgcatatattttaaattcttctaaatatgtattaacattctacaggatatgtattaatatccccacttgcacctctaatactgtttatttgttttctttattttttcattaatttgtcttcctagagatttactaattttattaagtttgttttcaaagaaccaacttacggctttgttaattttccccatgtgaatgtttaccattcattgatgtttgttcttatttatatta

SEQ ID NO: 245453 - DNA, 374 bp, Homo sapiens
tattcattcattcctccatccattctacaaatgattttctttatcttactccatctcagccccatgttataaactgagagtaagaagataatcctggccatagaggaactaacactctattcacaagtgtggacatagttgagcttatgtatacaacacatatgcacacatgaaaactaactcagccctttagagcgtgatcctatatcaagttcattttcataccccaccctgactgtctaacatatcttgtctatctggtctgttacggactgtgttttctgaattaatgagatactataaaacacaaagtcagagaggaaagaaaagatgaagaaagagagaaaataaattacctcttccaatttcccatg

SEQ ID NO: 245454 - DNA, 364 bp, Homo sapiens
ggaaatgacacgctaagtttcctatttctagcagctgccaaggccaccagcaagcatgggaacctctgggagtcacagctcctccgtctccagaggcctggcagtggccaagtctagaaggacgcgggtgccacctggtacagggtgagggtgtgaataacagaccccgaagggttgccacctcgagccccgtgccttgtccaggaatacacaggctcttttgatgtcaggtaactttgccatatgatctttgtggtgtacctggtaggtcacaccctgtgagtgtgtagatgcctcctcccgtgctggctgcttaatttcttctgcactcataatcctgaccatcttgaagatcatcactgaa

SEQ ID NO: 245455 - DNA, 502 bp, Homo sapiens
catgtggtcatgagaacttagtcaccctgggaataataatcaggggttctcctttgagcttttgcttattagcattctgtctcatgtacttaaacagattattacaaacaggacatttgtatagagctgtggctacagccagagttttcctacacaaatctcccttagattagaggttatgagctgcttacataatataatcaaacatgtaactatcttatggtcacagacctttaatatttcttttatgtgcctatcccagtagaaaagaaatgtgtttgtactgagtaagaactttgtacatgtgtagtttgttttttaaaatcagctttattgaggtataatttacatatattaaaacacattttatgtgtacagaccaatgacttttggcaagtgtatatatttgtgtaaccatacatgtataggttttacaaactgcactggattcagagattattagtttacaatagttgaataaatgttgattctgaaacaacag

SEQ ID NO: 245456 - DNA, 481 bp, Homo sapiens
tggagagtttgcttggtcacagtgcacagatgaagttggaaaggcgtgaagtggaggcggctgcaatcttacatagtagtaattgtaattgtacagtgactgaaagagagatgataggggtataaggtaggaggtggagaggaagggagcaactcaaaagacattttagacatagacaagcagtatttgattaagtgctgagaaaggttattagttttggcagttaagaggtatctttcatgtcatttttcttgtgtgttgaatcgttctgtaattccaatttacaaagagcttttcatctcacctgagcctcacaacaaccctgtgagtagatccccaggcttttgtctctgatgagcacaatagtcaaactgagactaggacacaagcatgtcagtgttgtttctgtatacaggctgcgtgctccatacagaaaaatgcttgtctccgtgtatacatcagtgaagcaaaagcctataaa

SEQ ID NO: 245457 - DNA, 536 bp, Homo sapiens
ggggcctgatcaaaaacaggaaaagctgttggatctcacttgtcatccatagtttcttgcccagaaatgccaaactacacaaccatgggttacacattgctttcctaccacattgtcagagatgtttaaaatagtaacactcagtgtgggctaggatgtggaacaatagagagcttcgtatataatggataggaatttaagctgttaaactttttgagggaaagctaatatatcaaacacctgcaaatggtacccatggattggtccaattattctacttctgatgatgtgtactgtgaagagcaaagatttgagcagaaggtttgtgaacaaagttatccatcacaaaattatttctaagagtgaaacacagaaagcagtccagacatctcacaataggggttggttaaataaatagaatggcataccatgcaagtattagaaatgagaaatattttaaaatatttttggaacataaataaatgttaggccgggtgcggtggctcatgcccataatcccagcactttgggaggcc

SEQ ID NO: 245458 - DNA, 399 bp, Homo sapiens
ttcttttttttgctactccactcttccagacaaaaattagtccaacatagtgacaatcacacacatggcaacaatgatggaatctgaaggctgcattaaaaatccagggctgtttcatcactataataaatttcaatttgatcagacttcagatccagttcttagcttcaggaaggcttagttagaataaagattgacattaggcagctttttcaaaataataaatcacttctacttctgcctcagtgcctaggggaattctgcacagatgcagagtgacacctttaacaagatgaacagtggtgaggggtttctgatccagttgataattttatacgccttgagctctgtgagagacttccacaaagcaatgaatgtaaaagagtttttcttgctcta

SEQ ID NO: 245459 - DNA, 457 bp, Homo sapiens
gttttgctatattgcccaggctggtcttcaactagtgggctcaggtgatctgcctggccttggtctcccaaagtgctggcattccaggcatgagccactgcacccggcctggatattgagttttgcttagaatagaagccctgtgagaccagagatgtatctgtctgtttactgttatagtcccagtgtctagagcagtgtgcaggttattgcaggtgctcaataaatatctgtaaaatgagtgaaatgaatgaatgagtatgagggacccccttgtgatgtgcagaactaagtcattatattataatacttttcctacagttattactttatccttgaatgtatttaaattgcaaagtatgtagacaggagttttgaaataaaatcaaggaggaactggcatttatatgcataaacctgaggtacttctttttttggttttatctctagccagaga

SEQ ID NO: 245460 - DNA, 387 bp, Homo sapiens
ataaaggagaggcttgaaaatgaatgaagatgttgagtggaaaaagtcacagaaaaacacctacagtacgattccatttatataaagatatctatcaaacagataaaaccaaacaatatactttgtgggagagcaatacacaaacgcttaaaacaaaactgtaaagaaaggagtgataatagaattcaggatagtggtccctttttgggggaggagagggttgtgatcagaaaggggcatattggaggtgtggtaatattttgtttcttaacctgggtgtaggaacatgagcatttactttgtttttaaatggtatattttcacatgttcttgaacatatgctaaatttctaacaaaaaggaactatgtaataaacatgtaatatat

SEQ ID NO: 245461 - DNA, 459 bp, Homo sapiens
agggagagaggaacaaattaagtgcttccatttctggtgctaccgtggactaaatattacggaaacttctgatatactgcaactaaaaatgctggatataatatttaacaaccacacacactctttcaccatagggattcccagtccacccccttaactttctgagtcactctgtgaccctgccagctacaggtttttcccagcaagcttgaacccaaactggggccttgaacatttccaggcactgttaaaggtatctaggttgcccaaaatattgaaataaactggccccagccctgagccaaatttcttaaacccccatttaaactccataccctgacccctccttgtggacaaacctaggtaagacatcctgtttttctctctgtccatcttgaaaatatgctgcagcactctatatgtaagttcttcaaataaatcctttgaactgatacccca

SEQ ID NO: 245462 - DNA, 466 bp, Homo sapiens
ggaaggaaggaaggagagagggagggagggagggaggaaaggcgggagggaggaacaaagaaagatgtacccagtaacatgagtatatacattcttttcaagtgtacataaaacatttaccaatacagacaatagcctggaccataaaacaaatctcaatacatgtcaaaggactgaaatcttacaaagtatgttttgtgaactcactgggattaaactagaactcaataccataaagataactgaattactaaataattagaaattaatcaatatactttcaaataatttatgaggcaaagaacaaattaaaatataatttagaaaatattttgaactacatttaactcaaagaaaaccgtacataccaaaatttgtgagacatagtaaaatcgtcaaaggaaatttatccattaaatatctatgttggaaaattaggtctcaaatcaaaatctaagcttccact

SEQ ID NO: 245463 - DNA, 346 bp, Homo sapiens
ctctggcattatccacttatttgatctagctaagtataggagcagaaataaattaaaaatgctttttcccagaagccccaaggatgttattcacacattctcccttctactgatctctgccagtggtgtgtaaatatatatttagggggaagtggctgaagtcaaaagctctgttggatattctttccctttcagttacttaccttcttatgcacaaatagaaagagagaaatcagaatagcagagaaattaacagacatgacagcacaacaccttctttcccatgtgctgatttgaagaggctcatgtatttatgtcacaaatgtcaaaattcaagtttctaagc

SEQ ID NO: 245464 - DNA, 485 bp, Homo sapiens
tttgaatggacacataattatacaatttatggggcacagtgtgatattttgatgcatgtatatcatgaatagtgatcaaatcagggtaactagcatatccatcacctcaaccatttatcatttctttgtacatggataaagaaaatgtggtgtatccatttgtctgttgacaaacacttaggtttggccattgtgaatagtactgcaataaccatgggagtgctttcatattgctttcctttcaatatgatatatatctatatatctatatatctatatctatatatatatacactcacatacacacatatgggggatatagaaatggaagaaagaaagaagatcacatttttacctaacgctttcttcttttctattggtactttctttatatttttatctttgaagctcagatttatcataaatgttgtatacaattttaaatattttccttttcctaattgtttgtggtagcaaagtaacat

SEQ ID NO: 245465 - DNA, 696 bp, Homo sapiens
gctcagcctccatgctctgtaactcattccttccttcccagggtatgacagctccaactggggttggatccttgcatccttggatcctaccggcagaggccgttgagaaagcagttgacaaggagcaccaaaaagacttcagagacttcaatgccctcagatacctcaccatcacattggtccctaagcttcactacttaaagaaggacttgtacatggagacctgagtttaggggtgccacattccaaatgttttccagtgatgctttaacacctcttaaaaaatggtgcccatctttctatgtctggttggtctgtccccttaatatggctctcactgggtggcacctcactgtgctgtctacatactaactacagacatgatataataatttaaagatgattttaaaagctaatagtgatataaatgtacattgttcccatcattctccttttatctcaaatgttgcctccttagaggagtcttctttaaccaccccaatctaaattcatcatcccccactccaagtgcctctctggtgtgcagccctcaccagacaactgaacctgcagattccttggtcatggactttccagcctctagaactgtaagaaaatacatttctagtttttacaaatcacccagtctcaagtattctgtttcagcagcacaaaataaagtaagacactgttaaa

SEQ ID NO: 245466 - DNA, 701 bp, Homo sapiens
tatacagataggttgtattatctataaatttcaaatcatagatgatgtaacttattatgtctatgataatgaaagaggcattaaattatgtacgagtgcaataaggagttgcgtttgatagggccaaaaagccctgaaataaggggcaatatactatttatcgattgttatatagtaatatcgccacaaactgagtggcacacatttatcatcttagagtttctgtggttcaggagtctgagtatggtttagctgcaacatctgcaaggctacaatcaagatggtggccagagctgcagtctaatttgtaagattggctgggaaaggatctatttcatgagtcatgcagttcatgtaggaatcgaggtccttgaggcctgttggactacagacctcaacttgttgctgtctgctggataaaggcttcgcttacttcctcaccgtgcagctctcttcagtatggccacttacttcattgaagccacaaagggagaaagtctgaaatcaagacagaacatataatcttatgtaatgtcatcatgaaagtggcatcctgttgtccggtgctttgtgagactccgcccctccgcccttgactaactcctttctgctagatcttcatctcttctagcaccattaccctatttctctatcaagtattttgatctctttttttttttttatttaatatttaatataat

SEQ ID NO: 245467 - DNA, 470 bp, Homo sapiens
cactcatttcttcagttattcaattctttgtgtcactatagacctaagtatattgattttatattttagattatagtctgatgacttaaattgcctaaattgtttcagctttagccactggtgctctttcaggtttacctttttttatttcagattggcctcttttttgttctcagcactttctgacagtataaaatgctctgtgctcatcttgtattaatattttcccttccctagccctagaatcaggaatttcttcaatagaaaaatggtattaaccagccggcacggtggctcacacctgtaatcccagtactttgggaggccgaggtgggcaaatcatgaggtcaggagttcgagaccagcctgaccaacatggtgaaaccccgtctctcccaaaaatacaaaaattagctgggtgtggtggcatgtgcctgtcgtcccagctactcaggaggctgaagcaggag

SEQ ID NO: 245468 - DNA, 989 bp, Homo sapiens
gattacaggtgtgagtcactgtgcctggacagcaccacctattagtgaatgacagccttgacttttgaggctaaaactttccacttctttagtatagtaattaaatctctcgctttttctactatttcggtaattaagcaggtaaagaaaaatatccagaacaatataatagggagtagggcaagaaaatcctgaggaaccacgacctgtgggtggatcgagtgcaggggtccttgagtgtagctggttgcaggaaggccccagcagaagggggctttgatgagcatccaccttgtgtaccgagtgaatgtccgtccagatgaggtgcggatgcagctgacaatggaggcgactgtaatggactatcccaagtagcaacatcatcaatttaggttttcagcctgagtgagactttcagttaatactcaactgaaaacaagatgcaaattttccttcagaaatttgttgaaagtgttttcactttggtactattgatctattaaagggctgagatgcagaggagacaccattgtgtaatttctagtggccgctctttttgtccgttatctgttcactgttctatccatgctgttctgccacacccctttttcacttaccaacacatgttggagattgctctctatcatagcatttcctctcctattctctagcctgcctcttcactctcttaatggtatcatttttctgaaaagaagctcttaattctaaaatggtcctgttggtggttttttccccttatggtcagcactttttgtgtcctttttgagtttttgtctactccaatatcataaagacattctcttaggatttctcataaagttttactgcttccttcttttttgagagagtcttactctgttgcccaggctggagtgcagtgctgcgatcttggctcactacaacctctgcctcctgggttcaagcaattctcatgactcagcctcctgagtagctgggactacaggtgc

SEQ ID NO: 245469 - DNA, 471 bp, Homo sapiens
cctttgtcttttgattgactttaaaatggaatattttaagtcattaaatgtgatgtaccccagctttgagctacttccaatatattaggttaggaagtttctatttgcttatatttttaagtcctgagtggatgatgagttttataaaatgcttttcctacttctattaagatggcaagtgtttcccccctcccctcctctctattacggtggattacataattttgaaccacccttgcattctgggataaacccaaattggtcatgatcagtagtattactaataatatacttgtagatttaaaatattttatttttcaaattttgaatcttcatttacaaataaactataatttttcttgttctgtatattcataagtgagattaattttcaattatattcataattttttgttttttgtcattttgtttttattttttgaaataaatgtctacatgtacttcatgtgg

SEQ ID NO: 245470 - DNA, 337 bp, Homo sapiens
tccctaggtggcttctggacactcttaagacatgaacacactttgggggctcaccctgtcaggctttgctctctgagcttagatgagaaaaacacaaaaataaaaccaaaaggtgacatttaggtgcccatcaagaaagatgtgttgggaactggacaggtcagggctttaagtactgtatcttactgtatgtttaagtactgtatgttactgtggaaacttacccattttcccctcagaacaactctgtctcaggaggtgagtctgagagctactgtttctttgtaaaggttttatctgatcaggcccacggtcaccacgtcagccccaccccaga

SEQ ID NO: 245471 - DNA, 474 bp, Homo sapiens
tagctttgttttccgttttcattcattcatccaaagtaattctttccctgctgacattggacacatcacccttgtatcatacagtgagtggccctgaatcctggggccatttctgtcttgttcccactaaaacatcaggctctgcttaaaagcacacacctaaatgtttgttgaataaactatggaaatcccttctacctagagcctaagacatagacaatgccctgacactttctgtctttatgtcagtcagtgtggattctgggcctctggtcgcactccctctagtgaaattcaaggctgtatagacacacacaaaacaagaaacttccaaattttaaagaaatgtgaataattggcatacatttagtataaagggattttgtgagtgattagattctttaccttttctctaattcccaatccatctaaacttgtcctgcagaaaagtacacctataaaacaaatttgacc

SEQ ID NO: 245472 - DNA, 505 bp, Homo sapiens
ctatttctcggctgagctcatccttttggatttgatgaaggccatgccgtgtatccgcatggaatcattagagaattaagaaacaagatgaaggagataagcccaagaatcaacaaagatatggacaaacagaaacttgaccacaagcaaatcatttgtactaactattggagatactgcaaggtttagagggcttggaaagaaagggagaggcagtattgaaactccagagtgacagatgagagagatgaccacggctaatggaaacatagaacataaagagatgcaacctggaaccacagataaagcagattaaatatattcacacaattggcttgctgaaggtagtaagcaccttggaagcaacacattgaaggacacaaagccaaagatggaaggagcctaagttcctgaatcaccacttagagaaaagccactttccaatcaagaaaactcatctcaaactttatctgagcaagaaataaacgtctattttataaactca

SEQ ID NO: 245473 - DNA, 667 bp, Homo sapiens
ttaatacctctctttattatttttcgagtgccaatgtcaatgtttggaaagtttctttcattttgttgcttgtactaacccagctatagccagaagcttgactggaaagtaaatgtttaggagatttgttttataaactgcattaaagcactgccatttatcaccacagatcttttattttccctaaatgtggccttgtttgaagcctcatctataaaagttcattgttggggataaactcaggataaaggtgtctttactctgcctcttatcaaactacagtttatcatagatccaccctgaaattatgtggtgaagatactgtgtacattttgtttttaaagataagaaaaaataaacatgactgcgaggatgtttggagtcctgattttttaaaaagcatttattgcttatggcacatgaagctgtgccgtcttattttgctttgttttgtatgttttttgtctttcatgagactatacacagcctgaaaaattccatgattgggaaacagaaggttgtcttgtctttggggatcatttttaggtgtttgaagttggtgataaacccaaggatctgtgctctgcctggggaatcttgagatggtgtctggtggggtttgagataaatgaaatctgaaacaataaaagtcaattcagaaaaccca

SEQ ID NO: 245474 - DNA, 390 bp, Homo sapiens
atgaagcgattacaacctgggcgcagtatactggctggctttgctgctcactcccttacgaatagctgtgatgggatatgaaatccaagggaactgttagccccccagagcagctgctcccaccgaccctgctccaagagtgctgggatgtccgctggcctcgaggcaagacaagagctccaatcactctgctgcaagcgccaccattaaagtcaagatcactgtggtggggggagttgaagtgtgcattccagcatgctcatgatcttactgaccttctccactgatgaattagaacacccctcttcccaggcacaggacgagttcagtgcctctctgtttcttgatggaccccaataaaaaaacgcctgcactgtttttcacctaagg

SEQ ID NO: 245475 - DNA, 695 bp, Homo sapiens
ctgcaataaacaaatggatgacattcatgtggccaacagagaataatgggtgttcccacattttgaaactgcttttttttttaaagtggcaatcttgagaagtatttacaagtttgtaattctataccatgcactagcaatgatcactttaaacaggctactacacagataatataaaactatgcataatttctacagtaattccacttccctttcttctgctcaagaaattactggatttcaagtgaccgaaattatagtgataactttgactttgtcaagtttcacacatcgtggggccatgatttgagccagggcagtctgactctgaatttgaacagtgtttaattgccaggaacaaaccacagggaaaacttctaaacagaagaatacagagcaaaaggaaatgcctaggattgttctttctaaattctcaacatttcccaatacaaaaagtattatggtataattacagttctataaaacaatgtgctctatgtataataaaaataccagcaaaataaagagattacctgaaaattgtaaatcgaaggacacattcacataactgagatacaactggatttttccctaaatttgttagataattccacaattgccaatttcgctctgtttgttgagatctgatcttggtttcaaattttaaaatttcactgtataataaaatgagttcc

SEQ ID NO: 245476 - DNA, 696 bp, Homo sapiens
ctgcaataaacaaatggatgacattcatgtggccaacagagaataatgggtgttcccacattttgaaacaagaacaaatttcctgttggaaataaaaaaaaaaatagggctacagagctctttttgcttttttttttaaagtggcaatcttgagaagtatttacaagtttgtaattctataccatgcactagcaatgatcactttaaacaggctactacacagataatataaaactatgcataatttctacagtaattccacttccctttcttctgctcaagaaattactggatttcaagtgaccgaaattatagtgataactttgactttgtcaagtttcacacatcgtggggccatgatttgagccagggcagtctgactctgaatttgaacagtgtttaattgccaggaacaaaccacagggaaaacttctaaacagaagaatacagagcaaaaggaaatgcctaggattgttctttctaaattctcaacatttcccaatacaaaaagtattatggtataattacagttctataaaacaatgtgctctatgtataataaaaataccagcaaaataaagagattacttccctaaatttgttagataattccacaattgccaatttcgctctgtttgttgagatctgatcttggtttcaaattttaaaatttcactgtataataaaatgagttcc

SEQ ID NO: 245477 - DNA, 750 bp, Homo sapiens
ctgcaataaacaaatggatgacattcatgtggccaacagagaataatgggtgttcccacattttgaaacaagaacaaatttcctgttggaaataaaaaaaaaaatagggctacagagctctttttgcttttttttttaaagtggcaatcttgagaagtatttacaagtttgtaattctataccatgcactagcaatgatcactttaaacaggctactacacagataatataaaactatgcataatttctacagtaattccacttccctttcttctgctcaagaaattactggatttcaagtgaccgaaattatagtgataactttgactttgtcaagtttcacacatcgtggggccatgatttgagccagggcagtctgactctgaatttgaacagtgtttaattgccaggaacaaaccacagggaaaacttctaaacagaagaatacagagcaaaaggaaatgcctaggattgttctttctaaattctcaacatttcccaatacaaaaagtattatggtataattacagttctataaaacaatgtgctctatgtataataaaaataccagcaaaataaagagattacctgaaaattgtaaatcgaaggacacattcacataactgagatacaactggatttttccctaaatttgttagataattccacaattgccaatttcgctctgtttgttgagatctgatcttggtttcaaattttaaaatttcactgtataataaaatgagttcc

SEQ ID NO: 245478 - DNA, 357 bp, Homo sapiens
gagataagccatcaggtaacctgagtgggaggaaggggcatcctaagcaggaccccagggctgggtttgacgttgcccctaacctatgtggagggactgacatatatatgcaactgactcatagcaaggtgctcttagctttgggaaatcagtcctccatggtggaattccaacgtagatactctctgtctcccagttcagacccaacacacagcccattgtccttctctgtaaattcgtatgtatcaaattgaaccatattaaatttctgttttattagttaaaatggtcaagtattggcaattttgcatggctcaacttattgaataaagtatcttggataggtattaatctcca

SEQ ID NO: 245479 - DNA, 373 bp, Homo sapiens
gtctcaagcaatcctcccagctcaatctcccaattgttgggtttctgactgttagccaccacacatggccttattattgtcacttctaggccaggttggttgagtattcactttcctgggacccatctcccaatttaccaggtggataatgcctgggtcaccttgaagtccaaaattggagacaccataaccacgctggagacaccaggagcaacccaagtccctgagtcactagctagaggacagccacagagcattacccaacctggaacatccaaagtggacgttgatgaggaaaatgtaaactcttagtgtgtaaagtcactgagatttgggggttgtttgttatagcatgagcctaatacaagaagta

SEQ ID NO: 245480 - DNA, 413 bp, Homo sapiens
actatctaggagagctccactaacaagtcccaacagatgattttgctggtccttaatgaaccagctaagattggctagatttatttatgaaatttgattaaaaattagttctggtaggccgggcgcagtggctcacgcctgtaatcccagtactttgggaggcagaggcgggcagatcacctgaggtcaggagtttgagatcagcctaggcaacactatgaaaccccgtctctactaaaaaagtacaaaattagccgggcgtggtggcacatgcctgtaatcccagatactcaggaggctgaggcaggagaatcacttgaacctgggaggcggaggatgtggaggatgcggtgagctgagatcatgccattgcactccagcctgggcaacaagagtaaatctctgtctcacca

SEQ ID NO: 245481 - DNA, 302 bp, Homo sapiens
aggctctagggggccccccagggtcctgtttcccgcggcccgcaacttatctgtgcacagagcacccccacgctgcgctaggaacttccgctgctcccccaccacctcactccttcgtgcctttgagcatgctgcctgcagtgcctgccctgatctccggctgggtgattcctgctgcacgtcaaaacccactggaggcaacacctcctccaggaagccttccctgatgccactataatggcccctcttgagtttccacagccccctgtgtctgcctcatcattgcagtgactgccaacatg

SEQ ID NO: 245482 - DNA, 421 bp, Homo sapiens
aactttttagcactatgtttatcccatcccataagctttggtttattatatttttattgcctaattccccctgtgatttctttagcccattggctatttgagaacttattattttccatatatttgtggattttgcagctttcatttattgatttatagtttcattccatcctaatcagaaaaaatatttcatatggctttaatatttttaaatttattcagacttgtttgaatattggagactgttccatatgcattgagaagaatgtgtatgctgctaagtggggtgttccatatgtgtttgttaggactaattggtttatagtgttgttcatggcctctattttcttattgatcttctatctggttctatccatgattaaaaatggggtattgaaatgtccaaccattactgtagaac

SEQ ID NO: 245483 - DNA, 208 bp, Homo sapiens
agaactatgcgtgcagcatagtcagtaactatttgttgaatcaatgaatgagaaaacaatatcagggaactctaagttgaaatacactttctcagttcacaatgttatccattctgacctttatcagacacaggcacagaggacctcagagatattcccagcagtctcaatatccatggtaatgctaataaactactattctggcatt

SEQ ID NO: 245484 - DNA, 413 bp, Homo sapiens
agagagcctaagtatagtaaaatagaggaaattacaccattgtactcatcccttaactgtttactgtggacaagaaagagcctatttgcaatctttagtgcatcatgatcattctaagaaaggatagaacctactaattgcatgaagttatttaattaactggttactgcatcagtctgatagatcagccttacagggtaacataatctaaaattttgatatatggccatgtttacaagtaataaaaataaaagaaaaatcataagatacctgggcccacaatgatttattctgggttgatagtgaacaaggctgatttgattcatttttctgccagaaggaaggaatcgcccataaaaacacaaatgagagtagttctctcctcgtgccgaatcctgcagcccgggggatcc

SEQ ID NO: 245485 - DNA, 630 bp, Homo sapiens
aaaatccagcatcttttgttatttctcctggtattcttttttgtatataaatgtctgtaatttgcaatcattttttattctgattaacttcatctatagctttacaccaaaaggaaaaagtaacacaggaaaagtaatcccatagatctataaattttactgcttaaacatacaaatatatattaaaccacaggtattagagacatgaattgcacccaacacaagcttgaagaattttaaacttagaaatttactttccagccagggcaacatggagagaatttgtctctacaaataataataataaaaaaaagtagccaggcatgttggtatgtgtgcctgctgtctcagctactctggaggctgaggtgggaggattccttgagcccaggaggccaaggctacagtgagctgtgttcctgctactgcattccagcctgggtgacagagggagaacctgtctcaaaaaaaaaaaaaagaaaaagaaaatgattttattctctaaataagcacatgtagttgagtttgtgtgtatgagagtccactgtgcaaatgggaattctccaaattaacttccgtgtaaaaatactgtatttatcaaaggacagctaataaaaaatcctaatatga

SEQ ID NO: 245486 - DNA, 896 bp, Homo sapiens
agaagacgcaaactcatccgaagtgacggaaagcaggtcactggttgtctgagtgggatgggccagaggagagaggagtcaggattacgaagggggcacaacaaggaaacttggtggggaggatatgaatatccttttttttttgcttttttagagacagggtcatgctctgtcacccagctcatagctcactgcatcctcaaactccagggcccacgggatcttcctgccaagcaactgggactacaggctcagcccaccatgcctggctgttttttttcttttggtggagatgaggtctcactatgttgcctggggctggtcttgaactcctggtctcaaggaaatcctcccacttatgactcccaaagcactgggattacaggcgtgagccaccttgcccagccatgttcattatcttgattgtgtcagttgcctctttggtgtaaaataggtcgaaatttactatgttgtacactttaaaaatctattaataggttaaataacatgaaataattgttttttaattcctaatatttgcctagggaatacaaccaacctcttcatcacatgaagacatttttttcatgcttttccatgttcctgaaatgccctcccctaggagcttcctccaatttatctactctttcacattcaagaaggtaatggagttccatcttcctccattaactcccccatactgaaatctgctatatctttcattcatttgaatcttattgttacagtacatacgatggaaatctataatatttttattgctatagttatcatttcagttgttatgttttctgcttatttttgtatcagagttgaatcaagatgtttaagtctctggagagttaagtattttgtaggaggaagaatatcaaggttgt

SEQ ID NO: 245487 - DNA, 451 bp, Homo sapiens
tggagccacagcctctggagcagccgcaacagcccatggttgtggtgtattgagggtggagcaggtagaggagcaggtgagagggaggtgcaggtgtggagctccctgagcctggaccctttatatccctgcccagggtcatgtgtgaggctgggcacacatttcctggttcctgtttgtgccatttttagggcccctttttcttgtttcctctagaaatccgccccttggtgtatgggctgctcagtgggctgctgctctcttgctgaatctgtgtccagacttaatggaggcccccaagggtctagcctctccctgttgactccagagtcacactggatttacaaaagcatctattttaggctgggcatggtggctcacacctgtaatctcagcactttgggaggcctaggcaggtggatcacttgaggtgaggggttggagaccagcc

SEQ ID NO: 245488 - DNA, 395 bp, Homo sapiens
gggcaagacgcctttgttctgccttctagggtataaccagctctgctcctgcttcattaatgtctataagtttgttacaaagacagaaactgacaggaaatgaatttagggtagggggcactgacacccaaagggaagtcactgtggacaagaccctctgggaggctggcagagattgctgccacgtggccatggcagtgtgcgctgtgagatgatcccagatgtctgcacagaatcccttcctggaggtggagagggttgacacccttgtaaaacacagggaacagacctgctaacctcatttaatgccttcacactctgtaaggccagaaactaatattaatatcaaaatacaagttttaaagtgtgtcagagatgatgttcatgcagaatgt

SEQ ID NO: 245489 - DNA, 1716 bp, Homo sapiens
ggcacgagggaagatggcttcgtttcggaagctaacgctttctgaaaaagtgccgccaaatcatcccagtcggaaaaaggttaacttcctagatatgtctctagacgacattataatctataaagagttagaagggacaaatgctgaagaagaaaagaataaaagacagaaccatagtaaaaaggaatcgccttcaagacagcaatcaaaagctcatagacatcgccatcggagaggctactcaagatgcagaagcaactctgaggaaggaaatcatgataaaaaaccatcccaaaaaccttctggattcaagtctggacaacaccctttaaatgggcagcctttaattgagcaggagaagtgcagtgacaattatgaggcccaagcagagaagaatcaaggccagtcagaggggaaccagcatcaatcagaaggaaatccggacaaatcagaagaatcccagggccaaccagaagaaaatcatcattctgagcgatcccgaaaccacttagagagatctctttctcagtcagacagatctcaagggcagctaaagagacatcatccccaatatgagagatctcatggccaatacaagagatctcatggtcaatctgagagatctcatggccactcagagagatctcatggtcactcagagagatctcatggtcactcagagagatctcatggtcactcaaagagatctcgtagccagggagatcttgtggacactcagagtgatctcatagccactcagagagatctcatagccactcagaaagatctcatagccactcagagagatctcatagccactcagagagatctcatagtcactcagagagatctcgtggccactgagagagatctcataaatcagtcagggagatctcatggccaatcagaaagacatcagagatactcaacaggtaaaaatacaataactacttaatcatcagaacaatgtgttgaattctgtggaaatagaaaagcatatatctatattctaatggctaaatatgtatttgttgaaacatgtatattgggacaaagacataaatattagaatggaggtaatacatacatagtatcaatattgtttcaacttgatgtcctctaagctatcatccagttacccaagatgtcccattaagttgttcccggtaggtctgctttccctggaagagccgtatgtactcagcctttcctattgggccttccccacaattagaatattttgacttagtgtcctgtcccccttggacgttccaacttgacttagtgtccagtgccccttggacattccaacctggtaggtaagctaatctaacaactaactgccaaattgataatatataatctatgataatgaatatctcttttgtgtctccttcctaagccatcctcagagagtccttagcagacaaatggtagatgtatctttgggcagctgaacttttctgctttcctcaaatcagaccatatgagaggatatattctatgcatagatgtaatgctaaccttctgaatatattttgaatacatttatatattcactgttgccttataaaactgttagggtaggtctgtctaccctagcaaaagaaacacagaaatttaaatgtactgggagttatgttgttaaaaacacaagatatgttaactgcagtttgtttggttattcaataaaagttttagttttaatttctcagt

SEQ ID NO: 245490 - DNA, 1372 bp, Homo sapiens
gaagtgtggtggagggtccaggtcttctgaccattcagtgcaagccaaattgtgctaatttccaatttttctccctttctcttggtgagctatttggtgctacttctactcctcatgaccaaagctggctttcatggtttactcatgtacttactgatgaaaccctcgtcagggcagtaccagttgcacccatagtccggcctgaatactcagcttaggactattgtgtccaatgtcccaaacattttgaagctacatcttaaagaagtgtcctgctcagatgcagttctccttgtgaaatccgcaggccccaaggaaagtgactttaatccagtttgctcatgcaagaacagactggcatttcacatccaggaaaacaatggatttgtactgttcagcttttgccatgcaaggagttcctggtgtggtttattaatttacatctcaggctccagcttcactatcaatcagatttggaagaaaaaagttacaaagaaaggcagcttgctgagaaacagcggaagcatgacggtacagactgggttttgaaatggagacacattctcatggcttgtgggctgagagacactgagaaaggattttgttcttgaaagatgattgttttaatgctggagatggagagttttgacaattttaagtgcatgttctgtgtgtaagaaagagtcattacgttttttttttctttcagatgttgccatgccttaaaattgctgatgattaaaatagaacatcctgagttacagaaattcagccctagtgtatcctggcctaaaaatacagaacaatcaagttgattgttggaaatgagaggctaggcagggttggaaacatgctaatgtttactgagtgaaatctttccttctcagtagagttgcccttgcagctgaaagtcactgaaagactcaacaaaataagcagatcccacttgtctcactctgttctcctatgcatgccctggaaagagaatgaatgagccctttttaatttatcaactggttttcttccatctctttactagtgagccatgggggttttttgccgttaactgggtagccagtctcttcatggagacttattttcaggaaactagcctcttgctttatgtgaaaacaaggacccaactcaagatgtcttatcacagtgtgttctgttgcgtaacagttgcatctgtagtccagcctcaatactcaggttgggactgttttgtcctgatgtctcgaacatttcaaagctacgttcttaaagaaatgtcctgctcagatagagctctccttgtgaaatcctcaaaccccaggggaagtgaccttaagccagtttgctggcttttcatgtcacagaaaacaatcgactg

SEQ ID NO: 245491 - DNA, 404 bp, Homo sapiens
taagaaatgcattcattaaaaaccaggtaatcactttggagctggtcctggcagtgtctgaataaattggacaagttagagaaaatcttgaacctgaaagctactttgtctttcagcttggtttgggcaaggtaggaagagatgaatcagttataatttgatgggatctaatgttacttttataagatacatcactttaatatgatgcttcatcattaatgttttagtaatctgacagcattagacagaattgatattccccttattttattatttcttggcttcatgacagaactgtgcattaaaaggcacttaagattttaaaagggatatctaagaaagtggttaaaactaattgcagatagattttattattcacagtattgtgtcaagtctcctgtgca

SEQ ID NO: 245492 - DNA, 562 bp, Homo sapiens
catatcaattttaggattgctttttctatatctgtgaaaatgccatggtattttgatagggattgcattgaatctgtaaaattgctttggataatattatcattttagctatattaattcttccaatccatgagcattaattatttttatatttaattctttcccttttttggtgttctctacaatttctttcatcagtgttttatagttttctttgtatagatctttcacttctttgattaaattgattcctaagtattttatattctttgtagctattatagatgggattacattcatgaattttttcagattattcactgctggtatatataaatgctgataatttttatgtgttgattttttatcctacaactttacggaatttgtttatcagttctaacagttttttggtagaatcttaaggttttcctaagtacaagatcatgtcgtctgtatataggaaatcctaaatcaaaaacctaaacctgaacaaggctaatttgacttttttctttccagtttggagcctgggcaacatatggaaaccctcatctctgca

SEQ ID NO: 245493 - DNA, 437 bp, Homo sapiens
tcaaagtgctgggattataagtgtgagctaccacaaccatccgattgtcagtgatactctaataagagacataggttacaaagcaaaggttaataatggtgctgtttaatttaccaagtagagatatttcatagagatgtttcaaactagttttaagttctgaaagtgatatcagaggctgtccaacacagagaataagaaaccagggtaaaacaggaggaaacaggtgagaaagtttttagtgggttaaaaatgattgatctttgaaaggccagttagacatactttggaaaacaaaaactacttttggtgtgaaggaggacataatcttcaaaactgcatgcttataagcttctgtagtctataaaccttcaggaaacatcacaaaatgtatttgcaaattccataaagtttaagaaaaaggcacggggaaacaa

SEQ ID NO: 245494 - DNA, 828 bp, Homo sapiens
gtgacatgatcttggctcactgcaacctccgcctcctgggttcaagtgattgtcctgcctcagcctcccaagtagctgggattacaggggtcctccaccatgcccagctaatttttgtatttttagtagagatgggttttcaccatgttggccaggctggcgttggactcctgacctcaggtgatctgcctgcctcggcctttcacagtgctgggattacaggcatgagccaccatgcccagccaagaaattgatttcattggtccagggtggataccactatattttaaaactcctcagctgattgtaactagcagccattgttgagaacctatagcatcacactacatgaatgcttgttataaatggagaatctcaaatcctatcccagtcctactgaatcagaatccgtattttaataagatcccaagatgctctgggctttgtatgcacagtataattggagaagcactgtctagactaattaaatatctaccagtggccacagagtctactaggactgtatttctcaaaatgtgattccaggaccagtggcatcacctgggaatttgttaaaaatgcaaatatttgagctccaccctagaccttctgaatagaacactgtgggagtggagcccagtagtctgtggtttaacaagttctccaggtgattctcatacataatatagtttagaagcattgcgccaggagtctctcatgaggtttgaaactgctgaattgaggaaattgattcagcaagtccttttttaaaacacatactcctgaagtgaagtgtcattgatgtctgcaactttcaaatggtttagc

SEQ ID NO: 245495 - DNA, 344 bp, Homo sapiens
acattagatcttatctttaagaggtggcatttcttagcagaccatattctttcttagattaaaagaatctccaacttgtttttcaggagtctggatcagggctgtgttgggggaagtttcccttccacggtgtctcccttcttcttgctgctcagtttgtttctggggacctgtgcgatgctggtgaaagagacaggcatcacggtgtttggagtgtgcttggtttatgacctcttttccctttccaacaagcaagacaagtcgtaagtcattttacagttttgatatcaaatggcatgtcatgggcagagaaaaattacttaatagtttccaaacttccattt

SEQ ID NO: 245496 - DNA, 480 bp, Homo sapiens
gccactgccttctcccagcaggacctgctggatggggccgttctctatagccacaatagcagcctcagcccccgtgacaccatggccttctctgtggaaatggggccagtgcacacggatgccaccctacaagtgaccattgccctagagggcccactggccccgctgaagctggtccggcacaagaagatctacgtcttccagggagaggcagctgagatcagaagggaccagttggaggcagcccaggaggcagtgccgccagcagacatcatattctcagtgaagagcccgccgagtgccagctacctggtgatggtgtcacgtggcgccttggcagatgagccacccagcctggaccccgtgcagagcttctcccaggaggcagtggacacaggcagggtcctgtacctgcactcccgccctgaggcctggagcgatgccttctcgctggatgtggcctcaggcctggatgctccc

SEQ ID NO: 245497 - DNA, 587 bp, Homo sapiens
attgataaaagggctctactttctggcatctaacaataaaagggaaactcagctataatattattcataattcatatatgcatattattactattcacaagtacaacaattctatgtcatgacatgaagtaggaatttatgctactgtgcagaggaaggagaggaaaaggagtagtaattataaagagaatgcttcagaaagcctatgaaacaagagcactagcgggcattaatttagactgcaggcaggaaaacaaagtgcaaagcaatagaagcaattctctttgttaaaaaaaaaaaatcaaatatttacctcaaccaaaataaaattttaacaaagctcctaaacatgctgtttcatgctatatcctccacaacactatgaaagggacactaaaataagtaaatgaaacattttgttgaataagattattattcataattctaccaaagactgtttgaattttaaaatactggctatgtggcccctttttcatggttgcaaaggaccatgtgccccactagctgcacccagagacaaccatcttgtttccttcttgcagaagctgtttctactttggaatttc

SEQ ID NO: 245498 - DNA, 597 bp, Homo sapiens
tgttggatagcaggattggagaggcagagattctaaggccagcagattagaacaagattacagtaagcaattctcaaaactctcagtctctggggaggcaaggagaggactggttgtcccgagccggcaggctttgctcatttctcagaatcactgggacaacagctctggttggcagagggccacgtcgtccttcagccaaagtacacatagcatgtggtcctccccatctgtaactctagagtctagatcaactgaacaaaaggtgattttgtaatgtcacccttcatcaatcagaacattagaaaatgtgattatcagtgggagtttttggctgacgttttcttgtaggcaaaccaagagaaggaaaccatttctgcacatggataagaatatgttgttgaagcactttcatcgaaatcagcactaattagaaattcttaggacagaacatcacatcagtttatagtcatccaacatatagatgaggaaaccgaggcccagagttgttaaataactcggctgtggtgtagtgagataatgtagaactggttctagttctacattagaaccagctgagttatttagaactcagct

SEQ ID NO: 245499 - DNA, 585 bp, Homo sapiens
ttcctttcatatttttttcctgttatatttcatttttatcttctccttggtttttaaatatactcttaaaatttaaggggtgtggttttcctagagattaaaatatcctttgtttaagcatattacagccaaccatgaattaacattatgcatccttacatataatatgaaaaacttggaacagtttacttccattttccattttcattcttattgaagttattataaattttattttttatacattataaaccagagtacattgtgattcatttttcttcaatcactttttaaataaattaataaatgtgtaaatgaaactgtttttatttatttacatattttggggtatttttcatttcttcttaccaatttgagtttccatctagtatgattttcttccagcttgatgtacttcttttactattttgtatagtacggatgaacttatactaaactaactcagctggatttggttgaaaatatcttcatttggccttaatttttgcaacataattttactgtgtatagagttctaatttgaaaaagttgttttcatctttaacacaaagatagtattcaacc

SEQ ID NO: 245500 - DNA, 546 bp, Homo sapiens
agataaatctagtttgtctttgaatttcaaaagttggcatctcccagctggaatccttgagtgggcctgcattcatatatattcagtacaagcataaacagcatcctaattaatgaatttgttaattcattttgccagctgagaacaaaaaacattgtttggtctctagccattgtgtgtgtgtatatgtgtgtgtgaatttggaatccccagatttcaaatcactaaatcagcagattacatagtctcttcagtccttcaagacttctaaaaggcttggagattatttcttataacggttaattgttaggaactacttttcgttttaaactgcatactatatagcctatataatggatacatagattgatacagaatgttggttatgtctttgtattttcttttcttttttttcctttttttttttttgagactgagtctcattctgtctggagtgcagtgagccgagatcgcgccactgcactccagcctggtgacagagcgagactccttctcaaaaaaaaacaaaacaaaacaaaacaaaac

SEQ ID NO: 245501 - DNA, 541 bp, Homo sapiens
gatggagtctcactctgttgtccaggagtgcagtggcgtgatctcggctcactgcaacctccacctcccaggttcaagcaattctcctgcctcagcctcccgagtagctgggactacaggcaccagccaccatgcctggctaatttttgtatttttagtagagacggggtttcaccatgttggccaggctggtcttaaactcctgacttcaagtgatccacccacctcgtcctcccaaagtgtaggattacaggcatgagtcactcattttgagtgaatgaattaatacattctattccaggtccctgctggaacaacttgagaaaattttcatgaagacatatttgcattttgaacaaactggtagtggagactgtaataattgactcaaatgattgaatccctatgaaacttcaagacattagaaccccatgcagataactattctataagtctgtaagggtggccctggctgtataatatgtaaaatgatagtttatagtaatttttagaatgaatatttttgctttttcttcactta

SEQ ID NO: 245502 - DNA, 255 bp, Homo sapiens
cgccgccgccgccgccgccgccaccccggctggagagcgctgggcgcgagctgcgcgcgcggaccgggccactcggtcgcggctttcgggggaggaggaggaggaggttttttttttaccctcggcggggagggggtaggcaggaaacggccaaggcgaagccagggccccctccctggccgagcgagggaccgccgagaccctggcggccggacggcggcgtgggggaggggcacgtgggggaggggcggccgc

SEQ ID NO: 245503 - DNA, 541 bp, Homo sapiens
tttcttaagtacagataaggcatggggaaagatatatattcttgagcccttaaactcataaaaatacaggtccttaaaaactaccagtgtttttaggttctgaacccttcatgctttttaagttcctaagaatcaatcactttatcatgggtagcaccttctatagcagggatcagctgactttctacagaggaccaaatagtaagtaaaggctttgccaagccacatataatctctgtcatatattcttattgttgtttaacaacccttaaaaaatgtaaaacaatcttaccttgggcaagatttggccttcgggccatggtttgtttacctctcttgtagagggctttcaagtgacccaagtgatgaaagggtcatgagtaaatgttccttgaataaatagtgtatcatagcaacttgagaatgtagtggtggcttctacttttaaacattatttaaactggagcactaagaaagaaccaagaaggaagtgaatgtagctgattatatattcaagtaactcatttagccccttccccca

SEQ ID NO: 245504 - DNA, 140 bp, Homo sapiens
cagaaatacatacatgtatggtcaattgattttcaacaagggtgtcaaatgggagagaaatttctcaataaatgttgccaggacaattggatagccacctgcaaaagaataatgttggacccttacctcatactatgtac

SEQ ID NO: 245505 - DNA, 677 bp, Homo sapiens
taaaaataaaaatgttttatggccaggtgcagtggctcatgcctgtaattccaacactttgggaggttgaggcaggaggagtatttgagttcaggagtttgagatcagccagggcaacatagcaagaccctgtctctattttttgtataaaaattatttaggctgggcacagtggcttacgcctgtaatctcagcactttgggaggctgaggcaggtggatcacctgaggtcgggagtttgagaccagcctgaccaacatggagaaactccgtctctactaaaaatacaaaattaactgggcatgatggtgcatgcctgtaatctcagctactcaggaggctgatgcaggagaatcgcttgaacccgggtggaggttgtggtgagccaagatcgcatcattgcactccagcctgggcagcaagagagaaactctgtctcaaaaaaaaattatttaaaaaattaaatttaaaaaaagtgttttgtttctctactacctttgtggaggggatttctgggttggacaagatcttggtttttttattttctcaatttttgtgaatgaaggtaagatgactggcagtttctgaataaagtggacaactgaaggtctgtgtccacacagagtcaggtaagagaccctgatttttaaattccagctgttgctactgaataacat

SEQ ID NO: 245506 - DNA, 1033 bp, Homo sapiens
taaaaataaaaatgttttatggccaggtgcagtggctcatgcctgtaattccaacactttgggaggttgaggcaggaggagtatttgagttcaggagtttgagatcagccagggcaacatagcaagaccctgtctctattttttgtataaaaattatttaggctgggcacagtggcttacgcctgtaatctcagcactttgggaggctgaggcaggtggatcacctgaggtcgggagtttgagaccagcctgaccaacatggagaaactccgtctctactaaaaatacaaaattaactgggcatgatggtgcatgcctgtaatctcagctactcaggaggctgatgcaggagaatcgcttgaacccgggtggaggttgtggtgagccaagatcgcatcattgcactccagcctgggcagcaagagagaaactctgtctcaaaaaaaaattatttaaaaaattaaatttaaaaaaagtgttttgtttctctactacctttgtggaggggatttctgggttggacaagatcttggtttttttattttctcaatttttgtgaatgaaggtaagatgactggcagtttctgaataaagtggacaactgaaggtctgtgtccacacagagtcaggtaagagaccctgatttttaaaaagtctcccatctacctctctacttgtttggaatactaactggatgataccaaattcaagctgttgctactgaataaacatgggaagtacaggctctaaaatctcatcaagatcaccattaggttcatggtagaaaaatatgggatgccaggaatgttgcctgtaggtctctcttgaatggctaacatatctctcacacatttggaatggatatacacatcagatcctagtcctgcagtggcctagggatagctcttttgatttggataaattaccgcatttgcagaagttctcggaagggctttatgtcaagcaaatgagttactggtatttgtgggatgaatattattctaagaggaaacttaaaagtgatttagataac

SEQ ID NO: 245507 - DNA, 503 bp, Homo sapiens
aatgttggttttctattttgcctgttactaaaagttcatgcaaataataatgtccagaagtttaggggaaagaatatttccacaagaacgaagagagagatttcactaattgtaactaagctttgttcttcccgaccctctatttctgcttccagaagctgagactcaggttagcatctcactgtatttctgtgaggaggagatattggtgcaagctctcaagcagacaagcaaaatccatccctatccaacaactcctacctattgagcaaatgatttaaaaagtggttactgtgccatcagaaaaactgttggggattgatgtgtctctttttgttgaactggctgagtagataagtacacagaataacttataccatcactttatatttacgcttacctaatatgatattgttatagctgtcttgtgaaatcaagttgttttcagcttgcttctgtcattcttccttcttctttgtgattaaatagaaacaaatgatgta

SEQ ID NO: 245508 - DNA, 374 bp, Homo sapiens
accttgggcaaagcactaaaagtaagctttaccgtctttaaaagggggaagtgttgttgaatgtgcctgggacaatgtctggcatataataaatgttcaggctggactcacgcctgtaatcctagcactttgggaagccgaggcgggtggattgcctgagctcaggagttcaagaccagcctgggcaacacggtgaaaccctgtctctactaaaatacaaaaaaattagccgggcatggccacgtacacctgtaatcccagctacttgggaggctgaggcaggagaaacacttgaacccacggggtggaggttgcagtgagcagagactgtgccattgcactccagcctgagcgacagagtgagactccatctt

SEQ ID NO: 245509 - DNA, 476 bp, Homo sapiens
cagctgctatatccagttcacacacagcgcttccagtgaatacctgtgggctgtttgggattctcttgttctcagattgctcagatgctctgtggcttctctctgctttcttcaacagatactgataatatctagtgcttgaggttggatgctacttggagtggttcatagagaatacttttccacctagttatgttgtaaatgtttcccatgggtttttggatttgctatctgcttgctgtgtttgtgtgtgttgggggcagagggaatcaggaaggtctagaactgctgcttctatcctcccagaaaatccagatgcactaaattgataacctgatgagtggtggcaaaaagtcagacagtcatgtttgaataggtttacaaattatatttaagaaaaatattattttttctataaaggtagggaaaaggctaagcagtcattcactgcttcttaataaaaattctttaccaga

SEQ ID NO: 245510 - DNA, 437 bp, Homo sapiens
ggcatttcatattgttgaaagcctcataggtgactcacgtgctacatgcatgatgaagagagatttgggaggataagttgagacctactttttgattattttaactgagaataatcaagttaaaatagagattgcgttgagctagtttgtgtcagacagtgtgcagagtccccaaaatttgcaaaacagcactattttatattccattttgggttttttagtattttgaattctgaattgcttatttctttagcacttgttagattttataatacagtataatattaaatcctcaaattgtacttttaaaatttaagctaaaataccccaggactggtaactaatactttcacataaaagtcctccttaaaggatctaaggaacatctaatcttgttttagctattctccacatccctaaccctggactttgctcag

SEQ ID NO: 245511 - DNA, 589 bp, Homo sapiens
tttttttgtaccacactcatctctgtatgaaactccactggcacaaatgttagatatttcttggtattatctcaggggatcccaaggctctgtccattttcttacagtcttcttcttttagtctgattagataatttccattcatgtaatttctgtctccaaatccactgactcttttctttgtcacaagcactctgcttttgaacatatccagtgattttcttcaaatttctaattattgtattttccagttataaaatttccatttggttcttttttatagcttctttttcttaactgagattattatttcttaaagcatggttataacagctgttttaaaatcactgcctaatataaaacatctgggtaatctcagggttggtatcttgtctcttcccttgagacttaatcagactttcctggttctttttgtgtcaagtaattttgtatcatatcatgaacatttgggatataagatgctatgagactctgggtcttgctccaattctatgaagaacaggatgtatttgaatctgtcctagatgtgcatcagccaggagccagcctgatatctgggtgggctatc

SEQ ID NO: 245512 - DNA, 687 bp, Homo sapiens
cactctaagaaggaattcattaagataaagacacagatacagcatttagagttacactttgccataaaagagcctcccttacctcctgacttgaatctataacatctgctgaactgtcgacatcaggaagactcgaaatatgttttgaggccaattatgtcatttcagattgaacctgctaacatcagattctttggtcagtagtctcactagttttgttctcacaatggaattattattttgatttttaaatgttgctccatggagactggtatgatgagctcatgctctgcagttccattttaacaaataacataatagatcgctgtcaaatgaatgccatcacagacatcatgttgggtcacagaagccacaccctaggagtgcttactagatgatccatttccatgaagctcaagaatggaccgaacttactaaaggtgatagaagtcagaataatgtcttccgggtgggaggggtttgaggctgtgaactgagcagtggcacgagggagccttctggagtgctgaaaatgtttcctagatcttgacctcggtgctggttacatgagtgaatccatatttttaaaagttatcaagctgtaaatttcaggttagtatactttatccatttcctgtgttttatatctcaaaaattcttttaaaaactaaaagacatttagaaatg

SEQ ID NO: 245513 - DNA, 234 bp, Homo sapiens
tatctgtaaaagacaccctgaatcctttagatgtgggtggggtgcagaacaattatttattagttgtggtattcaccagtgtaagtaggctgctccaaatctgatccactaagatgttttgaaatgactttatccaagaaagggaactatggagagactatcctggaattcttaaggcttatctcaggctcaagtgctagtctcatatcttgagaagcctaagatacatgaata

SEQ ID NO: 245514 - DNA, 1020 bp, Homo sapiens
atggtagtttaaagactagcagcaaggtaggatgtttcctttttaaactttcctgacattctttctataatgtttacatctatcatgagcctttcgtcttatttttatactctttctccttatcacttaatctttcccctcccttctgctcagcatttaaataggattcagttcatccattattcctgttgtcttcttatagcaatataaacacttaggccgttttttttttcatttgctatgaaattgtcaaattaacaggtgccctgcctattcaaagggttatgatgataagacaaaacaatctctatgaaagcacttgttaaccaaaaaatgcaacgtaagtgctaagatgtgatcattatttttgaaggaactgtgagatttgctcctaatattataggtattttttaaacaaaatctttaaacaaaatctagagttatcatctacattttgatggagcaaaaggagatttggctgagtgctcagagaaaatgtctattttgaactgttacgatacgtaaaggtgagcaacgtgtgccccaccctatgttgttagtttatataaaatagtgttttatttctataacgtgtttcgttttaagcagaagttatttcagattatagatattttgcctgttactgctgttttgcagtttttatggttctacatgtttgttcctgacattgattttgctaaataaaagttacagttctataaaaatttctgtaaagaatgttaaaactttctcagtgtttagtgtttctctgagaaaacaattaatatacagcacacatctttagagcaaaataagaaaagaatgcctttgccagctgcagtggcccatcctggtagtcccagctactcagaaggttgagacaggaggattgcctgagtccaggagttcaaggctatagttaatgtgctatgatcgcacctgtgagtgccccactgcacttcagtctgggctacacaggagaccctgtctcaaaaagaaaaagattggcaagatgatgta

SEQ ID NO: 245515 - DNA, 546 bp, Homo sapiens
tcttcctcccctttgggcccgtttctcaccagggtctccacagtggtcagagcaactccagctcctggctgcttggaactctccctgctggtgaccccactgacatcctccatggatcagatgggggcagcagagactgtgtccacaggaagtggacagctgtgactgcaggtggccccagcattttccaagacctgtaggagcccatcggtcctcattcgatctggaagtgattttcctagaagaattgggtattagcttctggaattatgagcaggaaaagcttgctttagaaactccaaaatctgatattccatctgaatttagaaaagcagacctgatcaaattcactatgtaagtaaaactacttatttagaaaaagaaataatagtcaactaataagttcaactacttctcctgcctctaaatttatgatggaaagttagagttgctggagacagtggctcccgcctgtaatcccagcactttgagaggcaaggcgggagaatcacttgaggtcaggagtttgagaccagtctggccaac

SEQ ID NO: 245516 - DNA, 325 bp, Homo sapiens
tgactgggactccctggagttttaatctcaaacttcttcacactgagcctctgacaagtcatcaagtacagtttaggttttcctgccctagcactagttccagagacttcggcttattcacctgtctgtctcttcaaatttgagggctaatagtttgccctgagaccttacttctctgacagatgtaaggattgttgacttttcagcttattcagctttttactggttgttaggatggagtggcaacttccaaactccttatgtgccagacctttctctgaatttttttaataacctccaattctaatttaatggatctagtaaa

SEQ ID NO: 245517 - DNA, 486 bp, Homo sapiens
atctgctccctgaagcccagttacccattcccatcattttcacctttttgtagacttccccctttcagagcggcagacgctggcatacacaggtcctgggcatcgccgtcaaggctgcccgccaggcagcttccacaaatcccaaaatgagcctttccttcttccttctaaaacagcatctccaccttctgtattatttatttcagtgaatgcctgaatctcaaacttgtacttcatcatggactccagtcttcctttcacatccaatttcaatgatcatcaatacagtcattttgctccttagcccactcggactatttctctccatacctgctgcaactgccttgacactggtgtgacagccttttaaaaactggtgtttggggctggtatcactccagtggattctcagacagctgccagaataactttgttcaagtagaaatccaaagcattgcctggtctatagtgggaaatcggtaaatg

SEQ ID NO: 245518 - DNA, 739 bp, Homo sapiens
gccatctctgatgggagcctctttagatctttcgtccatttactaattgggttgttcgatttcttattgttgagttgtaagtggtttttaatggtctggatgccagacaggtgttttgcaaatattttctccgtctgtggcttgtttctccattctcttatttcctttcccagagcaaaagtttttaattgtaacgacttcataccaatatcttctttcatggtagaaatttgtcttttatgtactttactgttgtatctacaaagtaattgccaaacccaaagttacctaaatatcccttttgttattttacagaagttttacagcttttggatttaaatttaggtctaaaaattgaattcataaaagtagagagtataatgatgcttaccagaggctgtgttgctggggagaaaaatgggaagttgttcacagatgcaaagattcagttaaaccggagaaatgcgttttgaaatctattgcacagcaggatgactatagtcaataataatgtactgtatatttaaataacaaaaagtaaatttcaaatatctaaccacaaaaaatatttttttgagacagagtctcgctctttcgcccaggccggactgcagtggcagggtctcggctcactgcaagctccgcctcctgggttcacgccatgaggtgatggatattttatcctcgatgtagtcattcctcattttatacacatatccaagcatcacattgtacccca

SEQ ID NO: 245519 - DNA, 793 bp, Homo sapiens
gccatctctgatgggagcctctttagatctttcgtccatttactaattgggttgttcgatttcttattgttgagttgtaagtggtttttaatggtctggatgccagacaggtgttttgcaaatattttctccgtctgtggcttgtttctccattctcttatttcctttcccagagcaaaagtttttaattgtaacgacttcataccaatatcttctttcatggtagaaatttgtcttttatgtactttactgttgtatctacaaagtaattgccaaacccaaagttacctaaatatcccttttgttattttacagaagttttacagcttttggatttaaatttaggtctaaaaattgaattcataaaagtagagagtataatgatgcttaccagaggctgtgttgctggggagaaaaatgggaagttgttcacagatgcaaagattcagttaaaccggagaaatgcgttttgaaatctattgcacagcaggatgactatagtcaataataatgtactgtatatttaaataacaaaaagtaaatttcaaatatctaaccacaaaaaataaaattgaggtgatgggtattttttattttatttatttatttgtttatttatttatttttttgagacagagtctcgctctttcgcccaggccggactgcagtggcagggtctcggctcactgcaagctccgcctcctgggttcacgccatgaggtgatggatattttatcctcgatgtagtcattcctcattttatacacatatccaagcatcacattgtacccca

SEQ ID NO: 245520 - DNA, 695 bp, Homo sapiens
gacggggtctgtgtggcgagggaggggacccggggttggagactggcggcgagcgactgctagatgcggagcaggtgcttgggaggggaagaacggcagcctacataaccatcgccgtaatgctctcgcaagcgtccacctgggcagggctcggtgccgggcaggcgcagctgccagttagctgcgaggcatggtcaggagccttcacccgtcctgggcgaaggaggctgtcccgtcgactaaaactctgatattaagacttggcgctgggggtggggagttgaattacgttaaaaagtcacttaagtgccttccaactctaaggagaagtacttatctgagctttggggcacacacaactactacttggcatggagagtttctcagcttcatgtgttccgtctgttattgaagctgtattggaaagtcggttcttgtttttatctgagcccgccgttttcatcccattcttttcgtcaaaaatatgttacatctgaaagaggcagatgaaaagattattctatgctaagagggttttgcagcccgataatgtcaccgttttttgttgttgttgttgtaggatcggggttcatttgcagtcttttttgtgggtgagcagaggcaggggccaataaataaattaaggcgggatatttggagttatttggttgtaataaaatatgtggttcaaccca

SEQ ID NO: 245521 - DNA, 452 bp, Homo sapiens
gtattatcctcttagatacgcacccgagagggttgaagacatgtattcacaaaaacttctacaaaggtgaggtagaaggcaggcctccattcagagatggggctgagatacctgaccaaattgaggactagctaaaacagggcctggacggaagctgtcttccctaagactcgctcaccagccagccaagtcagtttaccgttgccatggcaacactcgtgagttaccgcccctttccatggcagtggcaccataaaccaaaagttactaccccttccctagaaatgcctgcataaaccaccccttaatctgcatgtaattaaaagtgtgtataaatatgacagcaaaactgccctgacactctgcctaagagggtaaccctgctctgcaggagcagtcatggagctgtaacgccgccacttcaataaagccgttttcttctgcctctaact

SEQ ID NO: 245522 - DNA, 326 bp, Homo sapiens
atagaactacataaatattatgtttacgtatatattaatatgtttatttatataaatattacaaatatttatttgaggaagagaaaaaactcttccactcagtttgtggtgacaggtgagtgtgtgtgaagacagcctgctgggagcactgggcttcccacagctccgctcagaaccttcatgagggctagagccctggtcttgggcctctctcccctctcccagacactgtgagacctggcccaccttcctgtgagggccagtggttgtgcccctctggcttccactgctatgatgggggcccaaagggacatgatggtgagaca

SEQ ID NO: 245523 - DNA, 697 bp, Homo sapiens
actcaaacaagagaggagtttgcccctcatgcaaaagatgttcagggccattttctgctttaccaccatcagtatattgctttcattctcaaggtcacctcattgtccaagatggcagttggaacattacatcattgttccaggctggcaacaggaaggaggaggataggactctaccacttttcattacttagatctttttcattttaccacagtcaggtgcaaggaggataggaaacgcagtcttttagctaggttcattgctgtctcaaataattgaggcttctattacaatgagagaagggggaaatgtttatgagattgtattcagcagcctctgccccagagagctagagttctctttcctctccccagaaatgtctttatctagaattacttgtcttttccttttaccatgagaattcctgggaatgacaaggacacctacttttttatttggaaggctcttacctggcaacttgaaagttccataacacagtctgagaactgagaataaataaatccctgggacgtctcatttcttctttttctgagctactataatcatctttttaattgcttgtcccatttatttgcatttttttttactccaattcaacctacacagtgtggcaggattaatttttctgaagtaaatttcaagtcatgttatttcatttgtcaagaatcttaatta

SEQ ID NO: 245524 - DNA, 364 bp, Homo sapiens
gtttcaaaatttttcgaagtttttttggtcccatctcttttttttttggtcccatctcttttttttctgttcttttaaaaatgttttacattctcattcatggtcatccagttattcctcaggggaaaagggattttttggtattgaaatggagtgccctgaaattgttgaagattatttatagtattccatttacatattctcagtgatttaaaaactgctctttaaattaaggccactttgggccaggcacagtggctcacgcctataatcccagcactttgggaggctgaggcgggcgaatcacttgaggtcaggagttccagaccagcctggccaatatagtgaaagcccgtctctacta

SEQ ID NO: 245525 - DNA, 639 bp, Homo sapiens
gagcccagtccacgtgggggcgggccgcgcggcggctgtgtgacagctcggcggcgggggaggggccggaggggagcccctgagcgcggggccctcgagtactcggtcctgtcggaggaggccgacagacgcataaacaagtgcgactgtaacttgggactctgctggacgccgagctgaggagttagtcctcccgaaggtctgctaggggcgtggaccgaatctttgtacatgttttgggaaagccagtttctcctatcaccatcaacccctggagaccttgtgtgaactcaggtgtctgtcactgattatctaaggacagttcagggtacagacttcaggcaggagaaacctgggctctgctccttgccttgtcaatagccagctgtgtggctttgagcaagtcacctaatctctctagacctgtttccccatctataaaggactggacaaatgcaactctgaagatccccgtctgactccaaaattctaaggctctatgatttaacatttatttatagactacacacggtggaatcttgtgctggttgctatggggaggtggaggggcagtaagaatacaaaggaacgagtttctgtccaggtggaggtaaaatataaacacgacattttaaaatt

SEQ ID NO: 245526 - DNA, 404 bp, Homo sapiens
aacaagtgtactgctcagcccagagatactggtaatggggtaggttatgtatgtgtggagacgggatatatggaaactctgcttaccacttaattttgctgtgaacctaaaacttctctaaatataaagtcaatttaaaaattgcttcaaacttcttgtacttttaaactttatattacaacctcagtgttagttttgatctgcataatcaaaaagaaaagtaaaagcaactcatgggttggtagttttttcagtagctgtcaaagaatcctagcttaagtacagaggtgtttcttgggagctgtttgtactaaatgcaccaacaagggaaaaccaataaagctgtttaaatggtttcccagggaccttcgtgatgatggaatactacttgtcttataagacca

SEQ ID NO: 245527 - DNA, 152 bp, Homo sapiens
acggaagcatttttcatgacagctatatggtgaaaacagcccaaatatccaccagcagccctcccggagcagcacagtctaggattgggagctgtttcccccgaacaggctggaatggcaggctcagctggacgccctgctgtccttttccc

SEQ ID NO: 245528 - DNA, 373 bp, Homo sapiens
tcctgttccattggtcagtgtacctacacctttcttgcttctctcttcttgatagttacagttgctgtccagagaacatttgatatcttacaagtgaaacaaagatttaaaaaaatcagtaacaggacataaatgtgatagcaataagtccaggaaggaggtgtggaagtgatggtttcatgggaggttcattgcttcccttaaaagggccggttagtctggggtcagtaaaaggtgtgggtgtgagttagaatgccctaacactcgactgcggcaggtgcaatctgtcaccgagtagggaggagctgaagcgagtggaccgtgtctctaaggagtgccgtgtttatgctgcagccaagctcctcagagaaca

SEQ ID NO: 245529 - DNA, 426 bp, Homo sapiens
gccctgcttccagagaggctcctgccccatactctggaggaaggaatgctgcacagagagaccaagaagaatctgaacaggtctggcctccctggctttcctcatcagtgtatgaactcacatatgagatcacaccctttttgtccaatcacctttctacgtggttgtcaattttgcctataatgaaggttccattaaaaaccccaaaggatagggtttggggagcttccagagagctgaacacctagaggccaatagaaaggtgaagaactcatccatgtgctgagagggtggtgcaccccaactccacggggacaaaacctcctacattcagggcccttccagacctcgccctttgtatctcttcctctagctgtttatttaaatactttaaaatattctttgtaataaactggtaaacatacg

SEQ ID NO: 245530 - DNA, 242 bp, Homo sapiens
ggatgagcaccagatccagtttgctgtgccacagtggtaagtcacctaatctttatgtgcttggattcctcatatgtaatacaggatcacaactattgttctcactcatgcaatactactattgtgagaacctcatgaattagagaaactctgaatttgcaatttagctttagaacactgacaagtagctcattgattcttgcctcattcctctggaataaagtagctttttatcaaacaag

SEQ ID NO: 245531 - DNA, 818 bp, Homo sapiens
gttttcacatttttgagctttgccagtggcaccctctctaattaatcatcccgcgggcttagaaaacttctgcccaatcctttctgatttgttaaaagaaagagagaaggttttagtctgaaaaaggccttatctgataaacatcacattatatggatttttacatttaagtacattttctttttaaatccggtggctttcccaaactagaaagatggagtgtttgcatacatccaccaaccaccaacatcagcagaaagaaagcttgatacagtaaaggaaagaaatggcaatttaacagttcttttattttccattcagatcacatacacattaaccaaatgaggcctcacagcgtggaatctgatatcatagcaatgttttcaggaagcaataattgaatactcctcattaaaaaggttcataaaagaatcctattaaaaccaatacgaataataaaccttgaaaatgctgctttaaattccaagaggatggcgaagatctgcgtcagtaacagtcttcctgttcatagagtgattttgaaaatctcgtgggctgaatttttccaagccaagcaggcatctcactatccagtgaaagacccagggactattttgaatgcattcaatccaagcctgtgcctttcacagtcagttttctccaagaatttatccctaatcctgacaggatacccaaccaaaaggctaattatttttagtcacttaattaatagataattcttacaaagagcccaacacctgaacccaccaagtcctctttgcatgggcaaatccagctggtttgatgcactaatttca

SEQ ID NO: 245532 - DNA, 279 bp, Homo sapiens
aagggttaaatgagttaatgtgaaatgcttagaatagtgcatatagtacctttatgcacaggaagctctcaaaatgtgtcccatgtcatcttaatatctctggaaactctgtgctgagcatgactccggggggctgcagcgccgttagtgcccacggctgtctatttgaccgcaggctctgctctcacctggaagcctgacagcccaaggctgctgtgagctatgatcgcaccactgcactccagcctgggtgagagagtaagaccctgtctcaaaaaa

SEQ ID NO: 245533 - DNA, 433 bp, Homo sapiens
acattactggttgggtgtggtggctcacacctataatcccagcaatttgtgaggccgaggcggatggatcacctgaggttgggagttctagaccattctggccaacatggtgaaaccccgtctctgctgaaaatacaaaaaattagccgggtgtggtggtatgcgcctgtaatcccagctacttgggaggctgaggcagaagaattgtttgaatccgggaagtagaggctgcagtgagccaagatcgtgccactgcactctagcctaggcgacagagccaaaaaaaaataaaaataaaaaaataaaaaataaaaattctattttggagattccaaggattttaggagttgtatgccaggagacagggtggaagaccaaatacatagtcacagtattacaaaagtaatgcaaaagacaatctaaagaaaccatg

SEQ ID NO: 245534 - DNA, 549 bp, Homo sapiens
aaacagaggccttggtggcatagcggggccgagagtgcaggatgcagccactccagaaactgggaaagccaagaaagcggcttctccccttcccagaagtctccagaaggaaccagccccaccgactgtttctagacttttgactccagaattgtgagacaatgcatgtgcgttgtgttcagctcctgagtctgtggtcatttgtcaccgcagcccctggaggtttctttaatggctaaacactcgtggcctctgacaggtgtggaggttggaagtccaaagtgagcctccctggctacagccaaggtgtccgcagcgctggctcctcccggaggctccagggcaggactggctggcccttcccagctccttgactgcccgcccgtgcccctgctcacaccatggccccttcctcgagccacttggagccctcacccttctgcccccgtcacctttcccccatggccaacctccacggtggcagagacgacatttgagccatcactgacttcagggatttgcacacaagcccacgggtggttactgagt

SEQ ID NO: 245535 - DNA, 401 bp, Homo sapiens
tctctccatggattcagcagcagcgtctaaaagaaaaaaaatcatcaatcaatcatttatatatgttttaatataaagatataaaacagtggaaccagtggaactggatagaaagtaattcagttttacagaacacatctgtttttcaggctcttacttttcttaaacataaaagagccatatatatttctatggaattccccttttacttaagaattcattatcagcgaattagtgtaacgaggctgttttgttagaggctgtggttgcattcaaaaattagaataggaacaacgacttgtaaaaattcaacactttattttatttttgagacagtttcactgtgttgtccaggctggagtgcagtggcttgatctcagctcactgcaacctccccctcc

SEQ ID NO: 245536 - DNA, 458 bp, Homo sapiens
tgaagtatctcagtgccctggtgaagcagaggttctcattctcaaagtattgtatttttaattgcatatatgtgttcattggctataaattcaatcactcctagtttatcagagtaggagcaaataaatgagatgagttaatgttgagtttgaagtcatggctaaccttagtattgatatcatacatggaatgtgtttggttgatgaaccttcttagacctaattatcagcttcaatgcactccagccggggtgacagagtgagagtgcatctaaaaaaaaaaaaagaagaatgattttgcccttcacacttagtgcacacaagatagatgtatatgaatcccacaaatatttattgaccatcacctgctgtatgtcaggtgctttgctagatgctggagattataagacagcaggattctgcactccagccggggtgacagagtgagagtgaatcta

SEQ ID NO: 245537 - DNA, 587 bp, Homo sapiens
tgaagtatctcagtgccctggtgaagcagaggttctcattctcaaagtattgtatttttaattgcatatatgtgttcattggctataaattcaatcactcctagtttatcagagtaggagcaaataaatgagatgagttaatgttgagtttgaagtcatggctaaccttagtattgatatcatacatggaatgtgtttggttgatgaaccttcttagacctaattatcagcttcaactacactaacccagtaaccatagctattcagaacacagtgaacaaccaggcattaagatttttggggcctggcatggtggcttgtgcctgtaatcccaacactttgggaggctgaggtgggtggaactcctgaggtcaggagttcgagaccagcctgaccaacatagtgaaaccccatctttactaaaaatacaaaattagccaggcatggtggtacatacctgtaatcccagctactagggaggctgaggcaggagagtcgcttgaacccgggaggaggagattgcaatgagctgagatcatcgtgccactgcactctagcctgggcaacaagagcgaaactccatctca

SEQ ID NO: 245538 - DNA, 481 bp, Homo sapiens
tgaagtatctcagtgccctggtgaagcagaggttctcattctcaaagtattgtatttttaattgcatatatgtgttcattggctataaattcaatcactcctagtttatcagagtaggagcaaataaatgagatgagttaatgttgagtttgaagtcatggctaaccttagtattgatatcatacatggaatgtgtttggttgatgaaccttcttagacctaattatcagcttcaatgcactccagccggggtgacagagtgagagtgcatctaaaaaaaaaaaaagaagaatgattttgcccttcacacttagtgcacacaagatagatgtatatgaatcccacaaatatttattgaccatcacctgctgtatgtcaggtgctttgctagatgctggagattataagacagcaggattctgcctttttggagcttacagactagtggggtgcgggggagaaaacaagtgagtaaatacat

SEQ ID NO: 245539 - DNA, 696 bp, Homo sapiens
atctataagatgagtgatttgaagcagatatttatttagtttactatgtattgtctgttggagcatattactatatagtctatattactaataaatatcattaactagtaataataatggtaacatcgagaggtacttgatattctgtcaggttggacaagtgtgcctcttgaagccttgaatttcttacctgtaattgaggctgtcttacttgtaatttatcactaagattgtttctcggctttaccatcctgtaattctctgtgtcttaaacatatttgtactataccataatcataaatatttgtgctatgatttcaaagagaaaattctggacatcttttgttgaaatatcaaaatgaaaaatttatgttaaattgttcttgagaacaataattctatagattatagtagaaaccttaaaatgagtaaaatattaagtccatgggagcacaattttatagagtggatttttagagcaacttgacttttgaaagtatgggtttaactatatgttaaaacaccctgctgaggaaactaagaataaagaaagaaatgttttgtaatatagttgctgacatattaattgcttcactcacttttgctctggaaatagcttcatagcacagttcaacatgattgaaatattgataatttttttttttttacagttcccggttttcagcctaacttact

SEQ ID NO: 245540 - DNA, 244 bp, Homo sapiens
gatgcaattgagatatttgccaggcggcttccctttcttagcttggggacctcttgcatgctcactggttgttggcagaattgacccggttgtggttatgagacaaagactgccattctcttgctagccatcagccaggacttctcagctcctgggaactacccacagtccttgccacgtggcccccttggcagttcactgcatggctatttgtttttttccaggccaacaggaacatctctga

SEQ ID NO: 245541 - DNA, 383 bp, Homo sapiens
tatagtattctagccaacattttatttttacaaatagaactctttagctagatcaacagaaagattcaatatctatttcattaaaattatttaacccctgctgggtgcggtggttcacacctgtaatctcagcactttaggagactgaggcaggcagattgcttgagctcaggaatttgaaaccagcctgggcaacatgacaagacccctgtctctactaaaaacacaaaaagttaacctggcatggtggcaccacccgcctgtggtcccggctacttgagaggctggggtgggagaaccacttgagcccagaagttgaggctgcagtgagccatgatcatccactgcactccagcctgggcgacaggagtgagactgtatct

SEQ ID NO: 245542 - DNA, 492 bp, Homo sapiens
gcagtcagcacagtgggtggtcaccatatgtttgctgtaagaggaactcagtgtccacagcaagtgcggtcagtgctgcattctggatccttccctgtgccaggccctgagctaagggctgtgaaatggctgtgtccctggcctcatggagcttccaccctcgaggcaaagatggatttcaaagaaatcactcaaatgattacatctggaatgtacctaacccccctgggcaagaggctcctgctggcatcttagatcccatctcccggccccttcctgtgacctgcttctcccgccacatctcctttctcttctttgaattggccaaggagggtgtgaccacctgcattgaatgccactgagagatgcaataagatgggggctgagaactgaccactgggatttagaaaatatatttgatttcttaaaaaacaatgttcatgtgtgtggcttttgagattaaaagatgaaaatatttcataaagggtgaaa

SEQ ID NO: 245543 - DNA, 624 bp, Homo sapiens
atttttgtgaacaactcttttcctctcctaagttaataaacttagtgaatgcttcactacattcaaagattcagaatattcttttagaagctataatgtaggcaatgggcgaatcaatgctgacgttttataaagagctgatttcattgcacaggacttgcaagtctctttggaaaagggatccacatttttgtgatttattaaatatacaaactatagccgttatagtttgtttcaggtgtttatcatatactcaaggaagtctctacataaggccaaaatattcagatgagaagtgaaaaaatgtaatcacctacattaagtcaagcattggaatgttttggaaaaatctagaagagcaaatttttgtatagagaatttggcaacacttagatacaacgaacaatgtctggcagaaaacgtgttttatttggagagctggcttaccagcagatggctatatattatagaactaattttgtgacatcacattcatatgcaactcatatatttaaaatatgagaatataactaaaagaaaagaataatattaaattctccatgaaacaagctttttaaaggtaattgaccaaaacgactttgaaaattttactgaacaacaaac

SEQ ID NO: 245544 - DNA, 377 bp, Homo sapiens
tcatcatatgatcattgtggcgtgtttcagtttggactccctcaagagcagatttggagacaaggatttgagggcaaatagtttcttagggaggtgaaggaggttaagggagtgggtaacagaaagagggaaaggaaggcagcccaaacggaatgcatgatttagccaactaccaagttgaacaattggggctgaccaaatgaaactgttagacttctggcctgcactccgtttcactgtgttaaacataaaaacttctattggtcatgaaaaatgacagaattaaattaattccgattctatttcttcatatttataatcactgtgctatcattgttaatttataacctaatgtttacattttttaaaaaaagatg

SEQ ID NO: 245545 - DNA, 406 bp, Homo sapiens
agagaaaaatattcccagcattgaaatatccccatctttatcccaggagcatagtttgggaaacagtcatttgggaaataatgcttgaattgtccctgtatctaaattcatgtttccttcgtcattgtcttcatgctgatttgaaactggaactctgaactgaactggaagattagaacattttaattatagcctaaaaggacattagtgcgactgtgaatcatgaagtgggtggggaagaaaggagataaagacaatacatattcttcaagcacatgctgcaggtttacaaaccctcagctgccttaaaattcgcaatgtttttcagacccttagctatccttttggctgtttgcctagcttttgttaaccaatacctaagtgttatttgaacttcagcttgtta

SEQ ID NO: 245546 - DNA, 135 bp, Homo sapiens
ataagtgtctctgtttctttattcgcagagtttttgactgtacacaatgtttgcaacagaaaaatctcaacaataacaacaaaaaagttaacttcagaaaaataaacaagtatttactccattaaaagttattac

SEQ ID NO: 245547 - DNA, 291 bp, Homo sapiens
tttgctgttcccttgtgcaatttgctagctgtgccaccttaagcaagtgatatcaccttgttagactttttaccttcaatatggggcaccctactcacaagctggggcgcagggatttttaaacaaataagatgaacagaagaagcatcctctcaggaagaacctgaggctggaggtgccactggagaagatttatagtttttccagactaaaagaattgttcaagttatttgttgtttgtttgcttgtttttgtttctgcagcctaaaataaaactttcaaatacaataa

SEQ ID NO: 245548 - DNA, 507 bp, Homo sapiens
aacaatgtggatgaacctgaaagacattgtgctaattgaaggaagtaaaacacagcaagctacatattctataatgccatctgtacagaattctagaataggtaaagccagtgatttaaaatgcaccattggtgtcctggggctaagggaaaggattgactgctcaggggcaaggaggaactttttggggataatgggaagttctatatcttgattgtggtggtggttatatgactctgcaatttccaaaactcaaatttcacacttaaaatgggttagttactgtatgtaaatttatacttcagtaaagctgagaatagaaggagagaaaatgcatacaggagaaaacttagaagaaattaccatagtattttatcgttgactgcattttggtgctttatatatattttttatttttctaaattgtctataggattaattataagcatttaaagcttgagatttgtaagtaatgtgacttacagctaaaaaataatggttttattc

SEQ ID NO: 245549 - DNA, 659 bp, Homo sapiens
ggggttgcaatccttgtctctggtaaaacagacttttaaccaacaaagctccaaagagacaaagaagggcattacataatggtaaagggatcaatgcaacaagaagagctaacaatcctaaatatgtatgcatccaatacaggagaatacaagattcataaagcaagttcttagagaccgacaaacagacttagactcccacacaataataatgggagactttaacaccccacagtcaatattagatcaacaagacagaaaattcacaaggatatccaggacttgaactcagctctggaccaagtaggcctaatacacatctacagaactctccaccctaaatctacagaatatacattcttctcagcaccacatcacactttttctaaaattgaccacataatttgaagtaatgcactcctcagcaaatgcaaaaaatggaaatcataacagtctctcagaccacagtgcaatcaagttagaactcaggattaacgaactcactcaaaaccacacaactacatggaaactgaacaacctgcttctgaacgactactgggtaaataacgaaattattagctaggtaaataacagaaatgactaagtttttaaaatgaatgagaacaaagacacagcctaccagaatcactgggacacag

SEQ ID NO: 245550 - DNA, 490 bp, Homo sapiens
tcttatgtttagtaaggtgtgaaaactggttaaaacctttcccacattctttacgtttgtagggtttctctccagtatgaattctcttacagttggtaagggttgagaactggttaaaggctttgtgacattcatcacctttgaagggtttgtctccagtatgaattatcttaagtttactaaggattgagaatacactaaaacctttgccacataataacatttgtaggatttctctttagtatgaattttcttatgtctaataagggttgaagattggttaaaggctttgccacattcttctcatttgtagggtttctcttctgtatgaattcttttacgtttaataagctgtgataaccagttaaaaactttagcacacacctcacatttgtaggaattatctctagtatgaatgcttttatgtcatgttaggtgtgaaaacatgcaaaatgatttgccacattctttacatttgaagggtttcttg

SEQ ID NO: 245551 - DNA, 557 bp, Homo sapiens
ggcccataagtcttttatgtgaactgcttatggttggaaacttaaacactgtcactttagctcagcacttgtttattgacatactttcctatgtgtatgtactgtgctaggaactgagtgagccctaggtaaatgctggagccaggggagataaaaagagagtttaattcttgtgttctctagctagttattgattacttgtagctaatttcataagaaactcttggaggaaactgaagagtagttgtaggttctacctggatgtgacaggattctatgtgtatgcctggatatgaggacagcttgttgaatactgcctgttaatttgcttttgggtggatcacgaggtcaggagttcgagaccagcctggccaacatggtaaaaccccgtctgtactgtacaaaaaattagctgggcatggtggcaggtgcctgtaatcccagctactcgggaagctgaggcaggataatcacttgaacccgagaggcggatgttgcagtgagctgagatgatgccactgcactccagcctgggcaacagagcaagactccatctc

SEQ ID NO: 245552 - DNA, 659 bp, Homo sapiens
agagaagtgaggactgcctgcttttctggtctacgcgtgtgtgtgtgctgcactgtgcctggcactgaggctggtggtgactgtgcactcacaggccaccctcaccagacaaccagggagtggaagatcctgcccatttgagatcagttcatacctcggcatcgacgaggctgacaggcagctgactcgatgctgacgatgctgaccagacctgcattttcctggctgaccagccctgcattttcccggcctctagagctctgaatcctggagctagagggcaacctaggtcttctctgtcaccttcccaggctgaggtccccaacaggcactatcagcttgacctgaacattcagtgctggggctggtcctgcctccctgtgtacacaatagcgtcatagcgtgcaggcaggctgggcttccctctccacccatgcactgatgagaagcctcggccagcggccgtcctgcccacctggcgtggcctcacaggcatgctctgggggtaggtcttattgcgaacaatgcctacgttgggtcccgggtctttgggcacagcataaccagtgccttggtgagctctgggtagacacggattttcacccttcctcctagggggtgcttcctggctctctggtggttgatagagatcttctcag

SEQ ID NO: 245553 - DNA, 568 bp, Homo sapiens
ttttttttgtagacagtctcaccatgttgcccaggctggtcttgagctcctgggctcaagagaatctcctgcctctgcctccctagtagctaggactacaggtgaataccaccatgattttctgtagatatggagtcttgctacattgcccaggtcggtcttgaactcctagcctcaagtgatacttctgcttcagctttccagagtgctgggattacaggtgtgagccattgcatcagcccagtttttttcctttttaagagacagggtcttgctatgttgctcaggctggactcaaactcctggctcaagtgatcctcccacctcagcttctgagtggctgagactacaggcacctggcttcaactgattcttaacaagagtttgagaaagaaaaagcctccccaacgtctggaaactgcttgaacacttacagctggacctcagtgctgtttgaagctggcctagggatcatagggaggccatattattctcctgtgggacataaacaatctcgcaaaatatcaacatgagacaaggtcactctgagactgtgttcaagtgagac

SEQ ID NO: 245554 - DNA, 236 bp, Homo sapiens
tggggaccaggtaacacatctcaacggtaaacttgtcaaatttcatgttgaatttacacagtgaatttttaatttacatacattttaggtaacaaattttgatacatttatttgtatcagaattagacattttagaaaccaagaaaaaattaagcaaaaactggatacctacatttcagtgactatcaacctgcgatctcaacactccatgtgcccatgctgttcccctcaagatg

SEQ ID NO: 245555 - DNA, 484 bp, Homo sapiens
gaccaggccatttttcattcttttaattgcaatgtgatgggaatttcagaacacaggagaacagatcctgatcaaaagatttcttgtgctttttattccttgtcaattctagtagcaggcaatttctagataagatctatgctctctccagtcctatgcctaagagtattccacctttttattaccttccctggtacaagtttcgtgggctgatactgaaatccagttgcataatttttctgccttatttaggatacaaaggaaaaaggtgtcctcttaatctgtagaaggaagcccatcaagaaagcagcaagcatgatccctaagccaaggacattggcagagtcttctcattcttctttaatgcagatttcagcctttgttccaggaaaggtcccatctcataatctttcctcttgaaaaggaagaaaaaaaaaccaaacaaacagtggtctgaggagctcccattaaagacactgagagt

SEQ ID NO: 245556 - DNA, 326 bp, Homo sapiens
ccgagaggaaaacgttgcctttcttagactgtcacaggaaggtcagagggtctctggatggctaggtgggacggtgacacaaactcatttggaagcagtgagttccctttgatttttgtttgttttcactgagaaaaaagtaagtacatcagaagggcaagggaaagtttacatgcagctcagcagggtagcgatgtcgcccagcgtgaaaacttttatttgctggcagctccggtgtagggcaagctggggaaggttacccaagaagacccagtgcccacaggacaggtaatgatgggagctcctggaagttttggtttcaacct

SEQ ID NO: 245557 - DNA, 829 bp, Homo sapiens
gcgcccagcttgcatcagatgccctgtgtgtctagaattccctcccaggctgttagagccactcagcaggcctggcgccttgctccggcaaagggcctcgggtgctcgcctttgcgatggacacaggcagccttgagacaggcctgcccggaggccctgtgccctccacaccgctggcatcggctcccactgcccctcccacccagactggccctcggatggctgagtgtggggcacctgataggctctctgccccaggccagctggagaggctgaacccctagaaagtgtggccccaaccaagaccggctcatgccttccctgccccatttccccagaaggcagtgccctgcagtggcaggactaggccttgagccggttgccaccccagctgctcagggtgctgccaggtggtccccagaagacagcacctgatgcagtgtccccaggggagcagggtcagccatggagcgggggcgcatgtgtgggttcctggggccggagtgctgtcagctcccgagagactccgagagaggcctagaagccacaccgggccttgctggccagcctttgccttggcccttcaacgccccatagtgtagggtcaacctggcaggcacccaggaggggaaggtgcagccggaagcagggaggaggcaggaagggctgcttccctgtgacctccagtctccctgtgggaaccagcctgccttcctgggagtcctcctggccagggagccagcccagcctctcccgggtctccgagtgctgatctcctcgtcttgggaggggagcagaggctcagagcagtcagactcctcaaaccagg

SEQ ID NO: 245558 - DNA, 429 bp, Homo sapiens
ccactgctcatgcttgtgcagcctattacagtaatggaggtgaggcagatgagagtttccgaggaaccgatctccccggagtagattcagtgcctagaatttctacggaagccacctgagaagaaaacaggtctatctgaagtcgaatgtgattaacaaaacaaacaaaacaacaacaacaacaaaaacacaggcagagctatataacactcaaaaaagacagaaaaaaaaccctaattctttcgtatcactttgggaaatactccatttcccactaaaaatcagtgatgaaaacaatcccctaaggtggctgaaaactaagggaactccaaatttagctgaattgtcacagtgtctcaggattgctttgaattattttttaagtgtaagtttatttatatataatttaaacttagaggaaaaacatga

SEQ ID NO: 245559 - DNA, 460 bp, Homo sapiens
tatgaggtaagtattataatccaaattttataggagtgatcagcctcaaatctttacacagcagtaaatgttggaggctgaattcaagtcctaatccaaatccgggtttctttctgctacacagtgtctcagaagtattaatctttaaccaattgttttgtacttgtctacaatttatagtagttctttccagcttcacttagttctcccattcatttgctgtacaattgtggacgagttgtagatgtctttgtgcttcagtgcccctcctttgcaaaagacaaataatgagcctattgcctagggttgctgtgaggattaaatgagctaatatgtataaaacacttaaaacagtgcttggctgtgcttaattagtgggagttttattgtaaaaatgtctattttttttctatgtggatctgcagaaaagtttcataggaaatacaaaacaatagccaaa

SEQ ID NO: 245560 - DNA, 461 bp, Homo sapiens
tgagctggagttttgctcttgttgcctaggctggagtgcaatggcgcgatctcagctcaccgcgacctctgccttccagttcaagcaattctcctgcctcagcctcccgagtagctgggattacaggcatgcgtcaccacacctggctaattctgtatttttagtagagatggggtttctccatgttggtcaggctggtctcgaacttccgacctcaggtgatccgcctgccttggcctgccaaagtgctgggattacaggagtgagtcaccgcgcccggcccctattggttttttaaaggcaactgggcaatcttatgggcacccccaagcatttcttttcaccttcttgacatgttcttcttctgagtccatctctgctcccctcaaatttttggcttcacaaccctgactttaactctgatctttggacttcgtcttgaagattcggaatcttggctt

SEQ ID NO: 245561 - DNA, 524 bp, Homo sapiens
gaccaacagtgattagacaaaatgttacaagggcagcaaagcaaactgacaatcatctctcatttgaaatctttcaatactagagctaggggtgtctcagggtgaaaatctcaaacctattctccaaggaacattcaggcagccacatcacaacacagtctcgggcaccgacggcacctccaccacgcaggagccaactctgctgtcagtgaagtaacaaatccaactaaagacaaaggtagtaaaactgcagctaattggcatgaagcacaaaagagatttggaactcccatacagattctgcacccacctttaaagagtctacaaaagaggagaacatcttaaagtcggctaactttgcagaaagcaacaagtttggagcacactgcctcaacagtttcagtgcacagtgaaaatcagaaatattataaacaagaattgagacattctaaagtaagactagtgaaatgaatgtagaagaacagagaaagcgtattactcctaagactaatgaggtctttaaa

SEQ ID NO: 245562 - DNA, 515 bp, Homo sapiens
gcttttgaagttgtgggaaggcaggcggattgtccccaaaggaggtgcccttagttgatgtctgtcatcctacacaggtggggtcttttatttcatggccagggctctcaaaggcttccttttggccacaatgagagaaatctgggggtgagtgagtgtcctcccaggtaaattaatggtgggtctgtaaataaccaggggccccagactgaaatcgggcaggttgtaatttgtcagatacctggatgcctgttacctgtttctttttattctgttatcctctagcatttggtaaactttgatataaatattgtggccgtttctgagctactttattgtaagagaatagttgggaatctgtgattaggctagagttataaggggaaacaaggtctccctgagtgcaggtggggcatagaggttttaaatgggaaggaataggtgataagaatatgtaagaggttcactctacctccatttgaagacagaggtttaacgttatgaagactgtcaac

SEQ ID NO: 245563 - DNA, 791 bp, Homo sapiens
tttggaatttccttaagaagttctcatagcagtacctgaagtattaatttctagtagctgtgggtttctgtggacgcctagagaaaaaaaagaccacaaaaaaagtctgtttcgaaaatcgactggccaggagtttgtttgtttttttttcctgcttagaggcaccaccggaggactgtgtaaaggaaactgaaaactacaggttgaagagatgaacaatggagtttagatttttcgcaagaatttcgagattttaaaaatagagtcggggaacaggagtttgaagcttggggagttggaatgtcactagagaacaaaaggccggaaatgtttccatgataaaaaatggttaaagaaaaatcccaggagttctgttgtcttgaaagtcatagaaacaacttaaaagtagaaaatggttaggtgttacggctttctcgtcgttttgcttccgtatgttaaacatacagcactcaccaacgttgaaatgggcattttccgctgttggaacagcaaatctgttaatttcaagttgctccagagaaaacctgagctgtccctttaaggggttctgcttttcctatttgtgttggcatttgaaagattgtggaggcagaaaactttctggaatgtcaaaaaaaaaaaaaaatgctggaactcttaaattgagtatttccaaatgtgagcgctaaggggcgccagttattttttaaccatggaaatggttggaacaaaatgtgtaacatactcaatctgactgacctatattaaatttagttgaaacttaagttata

SEQ ID NO: 245564 - DNA, 439 bp, Homo sapiens
agggtggaggtgcttgataaggatggtcatggcattttttgcagactgaaatgatatttgaaaactaaatctaaatgctagcctgtgttacagctacttacccgctgaggatcaaacgtacatttatttgccctattgcccaacttatggctatgccagtaatgtcctctttttttccttatcatttcttttcagcttgttttcccaaactgtggtgttgccttgcccttgagaacccagctgaggtctagactgtttcatggatcacctaagcttggagctacagttgggctgcaaagttgttcctctagtgctgatacaagaacatagctggtcctcttgttcatagtggtaaaatatttttaaaatctgacataaacacaacatattaattacagaaatgatggagagagaataaagctgggaccccacaaagtca

SEQ ID NO: 245565 - DNA, 419 bp, Homo sapiens
gaaggtcctagggctggcagactacacttccatcacccaagctgcttattacagttatttctgattaccacccccctttcaaaaagctctggaatgcaataaaaataaggactggggggtgggggtggcgcaggctcataaaattaagaaatccttccatctgaaatcgtgattccaggcccatgaagtaactcatttctggcctgggtgcctataagcaagaagcagggatgtcaggatgcctgaattatccaaattatttgggtcaaattaatttagactgtttgagaaaaggcattaatttggttttagatttcctggattagccctggtattaatttcacagggagtactttagaggacttttctaaactggaaaataaagccttttcctgtggctgtcaaggtcttccaaaaaa

SEQ ID NO: 245566 - DNA, 379 bp, Homo sapiens
tcgggggaggccaggcatctgcctttacccaagggctggaggcttttgtcctgcagaggtaggcccagccaagagggagctgcctcctgtgtcttcagagatcccgacactcaactctggacatcacccaaggccgaggccttgcacttctgctcccagctagaatgaactagcttgtatcagagcagttcttctgctgagaacaactggacaatttggatgaagcataagaaacatctgtgtgcagttgagactgaggcagacaggacaggtgtccatatctagggcccgatttcagcacgtgcagtagccctgggaaaatggcatgctgtttctgcatctctgtgctcctagtaaaacagcaaaactcctggaaaga

SEQ ID NO: 245567 - DNA, 515 bp, Homo sapiens
ccaccagaatctgaccctgctggacgtcgacttgagatttcttgaatctagaactgtgagcaagtaaatttatgttgtttaagtcattcagtctacagtattttgttacagcagcctgagctaatacagtaaggaatatgtataattgcatgcattttaattcctgcctttaaacaatacttttatctctttttaaaaattattattttatttttatgagacagggtcttgctctgttgcccacgctggagtgcagtggtacaatcatggctcactgcagccttgacctcctgtgctcaagcaatcctcccaggagtttgagactggcttgggcaacatagcaagaccccatctctacaaaagattaagaaaattaggcctggtgatgcatgcctgcaagcccagcggctcaggaggccgaggcaggaggattgcctgagcctagaaggtgaggctacagtgagctgtgatcacgccactgtgctccagcctcggtgcaagccctgcctcaaaaa

SEQ ID NO: 245568 - DNA, 412 bp, Homo sapiens
ccgcatgttctcactcataggtgggaattgaacaatgagaacacatggacacaggaaggggaacatcacactctggggactgttgtggggtggggggaggagggagggatagcattaggagatatacctaatgctaaatgatgagttaatgggtacagcacaccagcatggcacatgtatacatatgtaactaacctgcacattgtgcacatgtaccctaaaactttttgttttataataataaaataaaataaataaaataaaataaaacactgtgttagcaaaacaaaataattcaatcagtaaataaatattcctctttcctggcactgatttagtaaatatgaaatgcatatactttctctattatattgaaaagcatattttattaagctagcctgcgttagacaaa

SEQ ID NO: 245569 - DNA, 547 bp, Homo sapiens
gagattatagagctggatttgtggttaaaagagattatttaatggatttaaattccattcaacctagttgataacctgtaatagtaatatgtaaatccctctgagtttttcttcaaaaactctgggataatattcacctaagaaaattaaatgagaacaagctgttgcaagctcttttgtagtctattgaatattttatagatattcaaaatttcctacaaactataattttttccatgatttagcagtgagtgattttctagctttggctcttattaggtattgtaaatagtagggttatatcgatatcagcttttgtgatggcattgtggtcatcagcttcatgacattttacccatttgcagtgatcctgtgtaaaactgccaaggaaagtaattacctgtaggagtttgctgagcttgaagagtgaaaactgttgtgaatgagcctgatcataaaacggaccaggccattcattattcctcaagtgttaatatactgacttatgcagtattcaaaccatctagtgcaatgtttttggttttgg

SEQ ID NO: 245570 - DNA, 711 bp, Homo sapiens
aggaagagagggtttgcacacttataatactgagatgtaagttccacaaggacaaagacaatgttttgtctacttcatttttcctaatatctacaacagcacttggcacattgcagacatgcaataaatagctattgaaaaaaatatgtttttatatcagtcacaagtacaatggatatagtataactgattatgtaatgttcaacatttgtacatgggattgagtcctgaaaatttcctcagtcagtgagactggaaacaattttggagaaagtattcttaaaggaggtatatacaaagacaaaaactagaaagtgagaaaacttagttgatcagaaagtgatctttacttttcacagatatcttgtcttcatagttaaactacaaatttcatgagaacagtaaatatgcttttgactattctcctttgcacagcacagaagggtaatactgaacccttatcatttaatatcccaaatgggcttgacaacttgtatctctcatgaaaggctctgagttttcccctcactctcccacgtagtcattgagacatctgttttgcccaagagctgcagagagccactccaggaggctggaggacccattaactttgtgcttcttgctcatcatactttacttcccattgacagaagaacagaggaacccactgagaatgtgggctctcactttgcttttcctgggataaatctt

SEQ ID NO: 245571 - DNA, 247 bp, Homo sapiens
ggagggaagtactgtgttggtttctaggtttgcaccattgaggagcagggttgaggcaggaggagaaagaagaatagagctaagagagtgtggtaagaaagaaatgccaagatggaatgggtggttgggagcacgtgaagatcaagagttgaagaataagaataggtcattggattttgaccttagtaactgaagagagcaatttcactagtgtgtagaggtaggcatgagactaggtgattaagaa

SEQ ID NO: 245572 - DNA, 389 bp, Homo sapiens
gctttacggatgtgtacatcaatgtttttcacccaatttgggaagcttttactccctttggcttcaagtattctttctgcccctttctttcctctttccttctaggataactcttttgcgtatgttgctatgattgttttctcacaggtttctgatgcttagttcatttttccccattttttttctcagttattcagatgggataaactcagttgatccgtctttaagttccttctttcttccacctgttcgaatcctttattgaaactcattagttaatatttcattttcattattggaatttttaactccagaatcaaattttttatgtctatgcatctttactggcattatttatttggtgagatattcttatactttcctttagt

SEQ ID NO: 245573 - DNA, 401 bp, Homo sapiens
gcagtggctcatgcctgtaatcccagcacttggggaggggaaagcaggtggatcacttgttggccaggctcgtctccaactcctgatctcagctggtccacccgcctcggcctcccaaagtactgagattacaggcgtgagccaacatgcctggccctcaggtagtcctttatagcagtgtgaaaacggactaatacagtctccctggtttctcacagttttcttccatttcattgctctgtccttgtctcacctgagttgggtatttcctcagagaatattaaatatttttgctgtcaatctagaattgtaattagataagttggcagccaaaagaaaagaaacttcatgaattataaagcccgatattaaatgaattttttgaacatttggtaaagttt

SEQ ID NO: 245574 - DNA, 193 bp, Homo sapiens
ccatttctactgcgggattgaatccctgttgctaagcttcaattatcagtttgttgtattgctgcaactcacggatctgaaaaactcataaatgaaaagagagagagacatcagcctgtcaaatgtatgtaataattttaacgtaatttaaggtagcataacaagttattttcaacctgatcacatttcttta

SEQ ID NO: 245575 - DNA, 535 bp, Homo sapiens
agccatggttttgcagatccccaaggttaatgtgctcaatggaggatcaggatctagccctatgagcatgttattaacaagcatagaagtgaattcccaaaagcatcactaagtgcactggtggtcgtaatctcatggctatgagcagcgtggggtaggcagagccaggggctagttgtttccattataagccttgtgatattttagaccatgtgtatctaatgctgtgataaagagtaaaatgtccagtcaggtgcagtggctcaagcctgtaatcccaccactttgggagcccaaggcgggagaaccacttgtgtacaggagttcctggccagcctcggcaacatagttagaccctgtctctatgagaaatagaagatgagccaagcgtgatggtgtgcctatagtcccaccgacttgtggggctgaggtaggagattgcttgagcccaggtagttgagactgcagtgaaccatgattgtgccactgcactcagcctgggtgacagttaagaccctgtctcaaaaaaaaaaaa

SEQ ID NO: 245576 - DNA, 347 bp, Homo sapiens
ttgtaataccctttattaataaactagtgaatgtaagtaaagtatttccctgagttctgtaagccactctagcaaattaaccaaatccaaggagtgagtcatgggggcccccggtttacagccagtcagtcagaggcataggtgacaacctactgcctacttgccattggcgtctgaagtggcgagcagtcttgtagaactgagcctcagcttgtggggccccacactatctccaggtagatagtatcagaattgaattataggacactcagctggtgtccactgaagaattgcttggtgttagaagttttgtgttgaatgagagtagagaatagtttgttttttcc

SEQ ID NO: 245577 - DNA, 271 bp, Homo sapiens
ctgagtatgatgctcactttatgtgcttaaagcggggactcagcaaataattgtggaaggagggaatgagtgaaatgagtgcataaataataagtacaaagaaagtggcgtaagtgtttaattcaaaacgaagtttagaccgggcatggtggctcttgcctgtaatctcagcactttgggaggccgaggaggaaggattgtttgagcccacgagttcgagaccagcctgagcaacatagcgagattctgtcttggcaaaaaacaaacaaac

SEQ ID NO: 245578 - DNA, 387 bp, Homo sapiens
agaggcaaagggattcattgtgctaaaatgtgttgactaaagagactcggacgaagaagaaaaggagccacggtgagacagtgaattcaaatcttcgagaatgtggatgaggaataaagttcactaagcaacctgtcttgagaaaaatgactctcatctgggtcttggaacttctgtgaagggcaggaacacagggatgaggcagaactgagaaagcacattgccaagagtgagatcaaccttctcttggggacttgttttacaccagagcctgcaataatctcaccataccagcttgtcacactgcttaaaaccctctcactgttagtggttatttaaggttatcttaaagtctttgggtgctttaaaactttatgttacagctac

SEQ ID NO: 245579 - DNA, 341 bp, Homo sapiens
cgaatttagcagaagcttttgcagacctcaacaaattccttgaaagtttgaaaacatggatcccaacatcaaaatgttttcattaatagagaacattcatggtgcattatctgcttacaggcgaatgtatgacagaaaaaaagagaagccaatcaaacaaaccaccatggacatatttccggaaagagtgactgttcacaaaaagagcttcaggcgggtctcttaggagatcttccagaagaagaaagcactgttataacagatggcagctccacgctgtgtgtttgtgtcttaatttttaacaaaatgtttaaaaaataaaatattttaaaaatggcaaa

SEQ ID NO: 245580 - DNA, 533 bp, Homo sapiens
gccagattccaccagggaggggggaaaaaagccctctccaagaggggtagaaaaagtgaacttcaagaatttttgagaaaaactgatttgcattggaggggaaactacaaatgctgactgcttcaatcatgcacaattgtggaaagaaagcaagatctgcagtgcaaattaatatattaaaagtcaagagaagtctactaggaaacaaatcattaacctgtattaatcctagtatatcccaaatgtttttagccctcaatttccctttttataatacatactgaacactctttgttacactgttgcaacgcattttctaaattccaaaagtaaaattattatttttgttgttgttgttgatttctcttctgttttttgatatttctattagccagatcacaaatctgtatgctggaatatcatatctggagagaaattctggtttgtgctgtaatagaaatttctaatctccattttgaacttctgtgatggaagaaagatctatcactaagcaataaacatgttttcatttt

SEQ ID NO: 245581 - DNA, 361 bp, Homo sapiens
agcggcagagcagtgtttccctgaacacaggtcatgtcatccggagcaaggaatgagtgctgactgttttatttggcagctcatgttgtttctcctagaacaaaaggttttcagaaaccctaaacctaggcactccgatttttaaaaaatcacctcagttgggtatttgaggaaataaaaattttttaaagactggagagtgatagaagggtcattgttggataacagtgccaagatgctttgtgctctagaagcagttttttctgttttgcctgtagactgctgtaactgagaataaggagacaatggtgttacagaaagctagccttttgttgtgaagaaaataaagtaaatggcatga

SEQ ID NO: 245582 - DNA, 426 bp, Homo sapiens
ctcactgctgtagtttatctgactcctccatttgatcctcagttttggaggtagggcctaatgagaggtgtttgggtcatggggtggatccctcatgaatggttggtgcaatctttgcagtaatgagttagtacttgctctatattagttcccataagagctgcttatttaaaagagtctggcactcccctctttatgtcatgtgcttcttccttcacctgttatttctgcacaactggttcctcttcctcttccaccatgagtgggaacagcttgaagctctcaccagaagcagatgctggtgtcatgcttcttgggcaacctgcagaaccatgagccaaacaaaccttttttctttaattacccagtctttattattcctttatagcaatacaaatgaactaagacactgaaaaatatcacaaa

SEQ ID NO: 245583 - DNA, 393 bp, Homo sapiens
tgttttctgtaacaaatcctagttgattcatgaatgctctatttcagcaaactagggatgcaatggaagccaggcaagaaatgagagaaaaatacatggatgagtcatcatcattcattcattcacgcatgcattcattacatgattcacacatataattatttattgaacatgtactatgtgccaggcactgtgttactgccaaaaagctctaaccttttatgaaaccagggtagtgatgggagtaaaacagagaaccgggaacattcactaatgctaatccctctggctgaggttcctctattgtttaccacgtttgaaatctctgataactgcctgaagggccttcatctctgtatcttttgcccattctctctgtttctcctgtgtgac

SEQ ID NO: 245584 - DNA, 563 bp, Homo sapiens
ttcccagcccatttccaactctacttgaactagctgcatttttttcagctttgcccagcagccctggtgagtgcaggcaaagaaggcagcggcctcttgcctcagaagcccgaggcacttcccagccagtccagggctcgctctcctgcccgcagctcgtgggcctgggtctgcagcgctttcagtggtctctgatgtctttgtccacctgcccactagggtctggccagatggggcccgtagccaaggccaatggacagacatggcttccaccccctcccagggacctgagctccagggaaggcaagcagccttttcctcacagacaccccttctgttgaagaccaggtgatagcggggacgggaggcacggacccctcaagtctgctcatcatttgcattgttgtgcatgaatttgcgtggagggttcaggaggctctgcccccaagtcctccccaggtgcaggcgcagggtacaagatgttctaaaaaatagaaacctggtggggggttgtcactgtgtgtacatttaaaagtaaactgtttaaaggtgtctagaaacta

SEQ ID NO: 245585 - DNA, 523 bp, Homo sapiens
acttggacgctggccctttgtgctccataagatggacttgcggaagctcttctctgccttctttcccagctcctgccctgaagtgagtgcccagcccctgcctgcgcactggatattagtggccatcctaggcccgagacaagatggtggaactcaggatgccagctgcctgggaggctgggagcccactactgtcctccaagacccaacgctctcagcaccctggactttcatttttccatttggaaaacgggcattccagcacccatcctcaaaaggccaatgcttcttgagaagggggatccagggttttgaagttcggccaactcggtgtatgtgccttcctgcgccttgcatggctctgggcaccattggaagactgcagatataaatgacaagtgatttattttgttttcagcctccagagctttagctttagagtcagataggcagagctgggtttatatatcatcctgagtaactaacctcagcatctgaacctcagtttattaattggtaaaaa

SEQ ID NO: 245586 - DNA, 788 bp, Homo sapiens
ggtgatgctgacactgctggttcagggaccacgcttggagaaccactacactagggcaagcaggaagagagtcctccttctggaactgaagcaggcagtgtgaagacccatgtggaacaccttaacccgaagcctctctgaccatccagttggcaaagaccctcaggccatgaggactggccaaagacagaacaaagggatgaggactcgactgggatgcctgtctcacaagtcagactcgtgtagtgatttcacagctattcttccagacaaacccaaccgcgctctcaagagattatcgacagaagaagctacgaggtgggcagattcctttgatgtgcttctctctcataagtatggggtggctgcattccgtgccttcttgaagacggagttcagtgaggagaacctggaattctggttggcctgtgaggagttcaagaagaccaggtcaactgcaaaactggtctctaaggcccataggatctttgaggagtttgtggatgtgcaggctccacgggaggtaaacattgacttccagacccgagaagccacgaggaagaacctgcaggagccatccctgacttgctttgaccaagcccaaggaaaagtacacagcctcatggagaaagactcttaccccaggttcctgaggtccaaaatgtacttagatctgctgtcccaaagccagaggaggctcagttagacctcagaagggaactcctggaaatcaccggctttcccctccacttgctgccaagatcatattctaatgtgaaatgtcatag

SEQ ID NO: 245587 - DNA, 917 bp, Homo sapiens
ggtgatgctgacactgctggttcagggaccacgcttggagaaccactacactagggcaagcaggaagagagtcctccttctggaactgaagcaggcagtgtgaagacccatgtggaacaccttaacccgaagcctctctgaccatccagttggcaaagaccctcaggccatgaggactggccaaagacagtgagaggacgtgcaagggtaaattcctgagccccgcagtcttatttcctgccctgacgtccctgcataccagcccaagggttaaccgtaagctgatgcctgtatggcggccttactgatgccacgcaggaacaaagggatgaggactcgactgggatgcctgtctcacaagtcagactcgtgtagtgatttcacagctattcttccagacaaacccaaccgcgctctcaagagattatcgacagaagaagctacgaggtgggcagattcctttgatgtgcttctctctcataagtatggggtggctgcattccgtgccttcttgaagacggagttcagtgaggagaacctggaattctggttggcctgtgaggagttcaagaagaccaggtcaactgcaaaactggtctctaaggcccataggatctttgaggagtttgtggatgtgcaggctccacgggaggtaaacattgacttccagacccgagaagccacgaggaagaacctgcaggagccatccctgacttgctttgaccaagcccaaggaaaagtacacagcctcatggagaaagactcttaccccaggttcctgaggtccaaaatgtacttagatctgctgtcccaaagccagaggaggctcagttagacctcagaagggaactcctggaaatcaccggctttcccctccacttgctgccaagatcatattctaatgtgaaatgtcatag

SEQ ID NO: 245588 - DNA, 210 bp, Homo sapiens
agagaggggactcttgctgtgttgcccaggccaatcttgaagtcctggcctcaagtgaccctcctacctcagcctcccaaagcaatgggattactggtacaagccacctcacctagctataattatattttgattcaaattaccactatgtttaactctgttgatttttaatattgaagaaaatgaaaattactgttgtagaaattcatg

SEQ ID NO: 245589 - DNA, 363 bp, Homo sapiens
gaccaatttccattaaggaaggaggaagatttgcaatactgtgacctccaaccccacagatttcccatctctgttcttacccaggaagtcctggtcatgtcatggccacatatgtttagtggaaaaaaacaccactgatacaactgtcattgtggaggtgtggaggtctggagtctctcataagcctggggttttgggtcatcagggcctgtggccaccttacctgggctgagcttgtggacaaggtgccgtgccagcctacacccctcagccagctgttctcggaagtcctgcccctgggagttgtcatgcttatccggagtgagaagagcctggagatgctgattcagtgagtgggaggca

SEQ ID NO: 245590 - DNA, 473 bp, Homo sapiens
gagtcttgctgtgtcatccagagtggagtgtaggggcgcaatctcggctcactgcaacctctgcctcccacgttcaagtaattctcctgcctcagcctcctgcatagctgggattaccaccacacctggctaatttttgtatttttagtagagatggggtttcaccatgttggccaggctggtctcgaactcctgacctcaggtgatccgcccacctcggcctcccaaagtgctgtgattacaggcgtgagccaccacacctcgtcggtttcataaaatactaaaggaaaaataatttattgattcattaatgacataagaacaaaaaattttgataaatgagagactagtgtgggacaaaattctcagagaatggcagcttttacatggtatgtcacaacaaagaaagaacaatttcagatgacagtggagatagaaaactctgtagcaagacggtctcaaataagagggga

SEQ ID NO: 245591 - DNA, 637 bp, Homo sapiens
acagagaaagaagttaaataatattgtatctggctccctgtaaaatgttggaatcatcctagaatgtttaattgtaacgctggttatttttctgtatgttgaattgaacaatgataaatactgagtttcaacagcagtacttattataacatactaaagctaatgtttgtgtttttattagggaagataggtatttggttatgcttccataaacagtgaagaaatttgtagatacaagttcctgggcttatgttatagatatacttacactgtattctaagtgttactctcgtttttcttcatggttcccgctacattcttttgcttggcctgctgcattttagcagtaaaaatgtcctttcagcctggcacacctgtaatcccagcactttgggaggccaaggcgggtggatcacctgaggtcaggagttcaagactagccaggccaacatggagaaaccccgtctctactaaaactgcaaaaattagccaggcgtgttggcaggcacctgtaatcccagctactcgggaggctgaggcaggagaatcgcttgagcctgggaggcggaggctgcagtgagctgagatcatgctactgcactccagcctgggtgacagagtgagactccgtctcaaa

SEQ ID NO: 245592 - DNA, 428 bp, Homo sapiens
aacatttctcttattctctgatgtgggtattgacaagcaatgatgccgatgcccaacatgtcagatttgtcaaggatgctccctccctctgccatgaatcaatggccagctcacctccttggaaagccacaggctctctcttagagagtcaggacaaattcaacattctccccaaatcccaagccaccagaggagaggagatgaaatctctgcaaactttacactttgctggtgaaaatctccaagtctgccctaggatactgactttggtgcatttagcagagctacatggagagaagacagctgtaaatggtgaattcagaggaatgggcttcagtctcctttaacatgatgggatgtatccatttctttggtacaggttgttttctagctgtcaataaatactagcatacgtttttgaaagtctt

SEQ ID NO: 245593 - DNA, 391 bp, Homo sapiens
tcctgctatgccaaatgcaattccattattcagagtgacacattttctataaagcaggccatctgaatgcaagccacctacttctggtgctcaacaacaaccaaaagtgtgtttcaaatgctatagggaaaaccacctgtgttaggttcactgtgggctcttaggctaggattttaatccccttcaatttcactttcctactttgtaaaaaggggaaaatgtatataaagtacttaggataatgcttggcacatggtaagtactcagcacattttagttaattatcatcatcatcctcattttcagtcacagttaaagatttttcacaaactgatcagggcaaaagaagccttccttcagtatgattttcctttaaaagttctaaatgctc

SEQ ID NO: 245594 - DNA, 754 bp, Homo sapiens
ctgctgcatagtaatccatggaagacgtggtgcagggggcttccatgagctatctgagcagtggcaccagcataactgcactgctttggccctctaggtcaggggatagcagctactgacatcaccctggcctcactaggtaaccacaggcccagccaaaaatccacagtggcccctaaggcacaatagcccccatgcattttatcctaagtatacttgttttgggtgccttttaggtaagccttgggataaaggccctcaaagcattgaagtttttactaatcaggggacttgcagagctaactcttaatgatttatcctctaaatatccaggcactaaacacttcttcctccctacctttggttctgttggccacttatccataccttccatgggagggaaggtaaaaggatgtcagaccgagcaaaagagagcagattgaaatacaaatgggtcattttgatttcttgtcagccgctcttgcaaaagagttgggggtgtgtgtggaggggagcagtggactgaaaaaggttgtcagcatttaccagtggaggacactcagcacaccctccccaaggcctgccataaccacaggggtcagagttggttgtgatgcctacaggataaacgtcactgaaaccctgtgtccacatcagtccctgggcttgcaaccaagagatggaagctccccaaaccatgatgacgagttcttctgggaagaatatgaacccgcctctggtatgaccgaccgcg

SEQ ID NO: 245595 - DNA, 505 bp, Homo sapiens
caaactccaaaccaggggtagcagtcatctgaaaaatgcagagactattttaaaggacagacaagtgcctcagatagcatcagagaacaatgcctaaggtgcatggatggaagccagtctgcacaaaatgctgaaaataggtcgttctgagcaagggggtcatggagaagaaagtaccagccctccattccttacgcccactagggcttatgtctgggatcctcacagagactagaagtgtctcccatccccatcgcagtccctggcacttcctggattgtcgagcggctccctgcctctgcccttttgtattcggagctacagccttgcctcccctgttcccaccaccctgaccacccctcaacaccatcccgctgtcagctccgccgccaactgaggcgacacctgttcatggaaaccctgtgagcctcttctgtatccatacacaataggtaatgttgttttacgtgtttcaaaacatcagtgttgtccaacagaactctct

SEQ ID NO: 245596 - DNA, 532 bp, Homo sapiens
ctatttcaaacaagaaaatcagagagccagcgtaggcaatatagtgagaccctgtctctacaaaaaatatttaaaattaaaataagaaaaaattagcaaggcatggttataatcccagctactcaggagagtgaggtgagatgattatttgagcctggagttggagaccagccttgacaatatagcaagatctcatctcttaaagaaaaaaaagccaattaaaagtcaccttttttcttcagatagaaaatacatcttctggccaggtgtggtggcccacgcctgtaatcccagcactttgggtggctgagatgagtggatcaccagaagtcgggagtttgagaccagcctggccaacatggtggaaccctgtctctactaaaaatacaaaaaattagccaggtgtggtggcgggcgcctgtaatcccagctacttgggaggctgaggcaggagaatcacttgaatccgggaggtggaggttgcagtgagccgagatcgcaccactgcactccagcctgggcaataagagtg

SEQ ID NO: 245597 - DNA, 451 bp, Homo sapiens
tggcttcctcccacccccattcatccaaaagaggctctagagtgattcagttctccctcagagagccctggctggagctggggccctcggactcaccctccatcaaaggggttctccccggggattatgtgcgtgctgtccctgcccacgaggaacttgatgcggtcatagaaggagtgtaggttctgctgtgacacagggacctgtgtctcctggatgatgtccagagggttaggggagccaaggcacagcgggttgatatggcacaggggctggaggcagcagtcagggtccatgcagtccaccaggccatctgcaggagtgacagagcatgtggtttatattgctatgttcaatcagccatgtttatccagaatgccttaattcatttcttctctatttttcactcattcaaaaactttattaaatgctgatataagccaaagtcatt

SEQ ID NO: 245598 - DNA, 387 bp, Homo sapiens
caagacagtgtggtactgacataaggacaggcatagatcaatggaatgtaattgaaagttcagaaataaacctatacctatagtcaattgatttatgacaatattcttaagaacattcaatggagaaagaataatcttttccttatatagtgcaggaacaacttgatatccacatacaaaagagtgagctggacccttacatcacactgcacacgaaaattcacccaaaatggatcaaaaacctaaatatgcaaggtaaaataataaaacttctagaagaaaacatactggtaaatcttcataacctcggatttggcaatggtttcttagatacaacaccaaaaatataaccaacaaaagaaaagataatttggactggactgcatc

SEQ ID NO: 245599 - DNA, 628 bp, Homo sapiens
atgaatctgtactgatctaatttgactatccccatgacatcatctcaagttcaagttttagacaaggtggagacagaatgtgcttttgctttgactttaaatagatgaagggaatgagacaagctttcagacagctcttggggcataaattcatcaggcagagtgatgcagcagagaaagcaatggtttttgtagtgagaatgacccaggttctaatcttgccttgtccatttctacacttgcctccttggaaaatgttaactgttcagcgtctgtttttgcatttgtacaacgagggaaataataatatgtgtctttctgaaatgctgtgatcatacattgtcataatttatgtcatgctacagcatgctgtttgggtatttagtaagtgttatgcaaatgttagcacctctaacccctagaccatgtaaaagaaatcattctctcttaaacccctatctgtatctgatgtcctacagcttaatatctttaaggtgttttgtgcatatcaaaggctattaggtaaattaatgataacatccatgatattgtctaatgtggatgtgaaagtgattaaatcaactaggctaggctgcgagtgagggttgaattcagcatagtggtggga

SEQ ID NO: 245600 - DNA, 524 bp, Homo sapiens
agtggccaacctcatcatctagggaactctgagcccagctcccgtttaagtaggcacctaaaagtctgttgaaaaatacaagggagtgacctgagaaaactgccttcccaggccagctgctcaatagaagcgtctgcgtcccttgtcccgtcttcggagctccccgtgggtgctgtagccccactcacttccctgacatcaccagagcacatgctcagtatgttgccacctcccaaatccagaagggtgtggtcttagatgccatggaagcgattctgtacaatgccgagtcagtcacaggctgatgtggcagctggtggcttgtgtcactgtgtcacccacctccgcagcaggcctgctccctccctgggaaagagctacttcagggtagggccacattgccaaggtatcttgagatccattcatgccaactttcattttcatggaaactcgtgaactcgtgctggaacatctttaaccccaaatcaggaatttacgtctttgttattagcagggacacttaa

SEQ ID NO: 245601 - DNA, 201 bp, Homo sapiens
ggattacaggcatgagctatcatacctaccctttttttcaatgttttctgtttaacaaaatcatatatatatgcgcttatatatatttatatagagagatactgtggaaattttgctgtattaaaaaggttaatgcaaaatatgattgcacaacctatataactgtaaattaataaaatttggaatgtctggtgtatagca

SEQ ID NO: 245602 - DNA, 589 bp, Homo sapiens
ccattccttgccctgtgcatgtcttttatttttctgctcctgagttgtatcctttataataaaccaacaatagtaagtaaattgttttcctgagttcagtgagccatcctagcaaatggtcaaacctgagaaagggattgtggaaacccctaactttgtagctgatgagtcagaagtacgggtgacctggacttgataccggcacctgaaatagaggcaatctcatgagacctagcccttaacatgcagggcctgtgacacctttgggtaatagtgtcagaattgaattgatgaacatctaattattattggaaaattggttattgacatggaaaaaacccacacatttggtgtcagaagtgttaagagtagaaacagatcatagaaatatgtgtaatttatgttaatgtataatgagtttattttaaaatgaataaatatttttcatattcacagtttcaatgtctaatatggtaaatatcaggaagtataatctatataaacaaatgccctttggggtcctcaacaagagtcctgaactaaaagtttgaaaactacttctctggacactgtggacattattttctgt

SEQ ID NO: 245603 - DNA, 160 bp, Homo sapiens
tggaggacagagcaagacccccgtctcaaaaaaaaaaaaaaaaaaagaactcattcccacaactaatttcacaccatcctctctttgaacataccctcttatgttccaaatccactccctccagtcccacaactctacaatccttcaatctcaccagaac

SEQ ID NO: 245604 - DNA, 405 bp, Homo sapiens
cagcctgggtaacagagtgagactctgtctctacaaacaaaacaaaacattacctgggtgtggtgacatgtttctgtagtctcaattactcaggaggctgaggcaagaagctcacttgagcccaggagtttgaggctgcagtgagccatgattgtgctattacacaccagcctgggtgacagggtgagatcctgtctctaaaaaatttttttttaaatagacaatcaaaactaaaaactgcttttcaaaagacgtcataaaaaaatgaaaaggcaagccacagttagaaacttttgctctaaaaagcaaaaagaggatgaaaagacgagctacagactggaagaaaatgtttgtaatccatacgtccaaaaatagacagtatctagaatatataaagaactctca

SEQ ID NO: 245605 - DNA, 400 bp, Homo sapiens
tctttgttagacccttattagtaattctgttttttgccctttgaagcatgtgatctttgtacctactccttgttcttacactccctgcccttttgaaacccttaataaaaacttgctggtctgagactcaggagggcatcacaggcctaccgatatgtgatgtcacccctggcagcccaactgtaaaactcttctctttgtactgtctctctttatttctcagtcagccgacacttatggaaaatagaaagaacctacactgaaatattgggggtgggttcccccaatattttatctgttctaagagctttctggaggagtccttagggttttaaaggtaaacaatcatatcgtcagcaatcagtaatagttagacttcctctttaccgatttggatgcc

SEQ ID NO: 245606 - DNA, 235 bp, Homo sapiens
taaaaaacactgtatcacaggcatgacaaatgcctgtgatgggctcatttggagactgaaaatagcaaaggcaataatcagtgagcttgatgatatgtcaataaaaactttgtgaaattaaatgcaaagacaaaaagaatgaaaaataaaacccagaacaaaaaaccaggacattcaagaattgtgggataatctcaaaaggtataacatatgtataatgggaatggtagaaaaa

SEQ ID NO: 245607 - DNA, 454 bp, Homo sapiens
agtaggtttcctttcaactccatccacttggcaataggaatgtggaagggaaggctgcctatggggttagtaattttagagccttaacttcaaagattctgctggcttaaagatatataaaatgatggccaattcaagagatatttaaaactgatcggtgaagtggtgctgtaaggggaatttatgaattaagtcattatgtataagcacaaggacttgggatatgactttaaaaggaaatataaagtctactgctatctgacctagtcagaaataaaggattccattttagccttcccagatgtgtcagtaatgaccaagagagtactgacttctaatcactggggcaagcagttgggctggtataggacggaacagcccctgctaatgtgagaacccaactcatcaaaggctaaagcagaaggcaacagaggaaagtaccctgctagtgtcc

SEQ ID NO: 245608 - DNA, 1234 bp, Homo sapiens
agactttccccccttctttacagcattctatcaaaatacagtgttttgggcgtccggcttccacgttccctccacaaaatgcctggcgaagccacagaaaccgtccctgctatagagcagcagttgctgcagccccaggctgagacagggtctggaacagaatctgacagtgatgagtcagtaccagagcttgaagaacaggattccacccaggtaaccgcacaagtccagttggtggtagcagctgaaattgatgaagaaccagtcagtaaagcaaaacagaggcggagtgaaaagaaggcacggaaggctaggttcaaactgggtcttcaacaggttacaggagttactagagtcaccatccggaaatctaagaatatcctctttgtcatcacaaaaccagatgtctacaagagcccggcttcggatacctacatggtttttggggaagccaagattgaagatttatctcaggaagcacaactagcagctgctgagaaattcaaagttcaaggtgaagctgtctcaaacattcaagaaaacacacagactccaactgtacaagagggcagtgaagacgaagaggtcgatgaaacaggtgtagaaattaaggatatagaattggtcctgtcacaagcaaatgtgtggggagcaaaggcagtccgagccctgaagaacagtaatgatattgtaaatgctattatggaattaacaatgtaaccatctgaaagcaacttttttggtgtctcagatgagtaactgcagcttggtttgaaatttgtactgtttctatcataaataaagttatggcttcttgttggatgaaaaaaaaaagacagtattttgccaaattaaacagaaaagagagttcagtggaagatggctctgatttcagggtaataataatggtaggtaacaattaaatggcatttaaaaatttgctgaatgcttgctacgagcggtggctcatgcctgaatctcagcactttgggaggccaaggcaggcagatcatctgaggtcatgagttcgagaccagcctggccaacatgatgaaaccctgtctctactaaaaatacaaaaattagctgggcatggtggtgcacacctgtaatcccagttactcaggaggctgaggcaggagaatcacttgaatccagaaggcggaggttgcagtgagctgagattgcaccacggcactccagcctgggtgacagagtgagactctgtctcaaa

SEQ ID NO: 245609 - DNA, 1561 bp, Homo sapiens
agactttccccccttctttacagcattctatcaaaatacagtgttttgggcgtccggcttccacgttccctccacaaaatgcctggcgaagccacagaaaccgtccctgctatagagcagcagttgctgcagccccaggctgagacagggtctggaacagaatctgacagtgatgagtcagtaccagagcttgaagaacaggattccacccaggtaaccgcacaagtccagttggtggtagcagctgaaattgatgaagaaccagtcagtaaagcaaaacagaggcggagtgaaaagaaggcacggaaggctaggttcaaactgggtcttcaacaggttacaggagttactagagtcaccatccggaaatctaagaatatcctctttgtcatcacaaaaccagatgtctacaagagcccggcttcggatacctacatggtttttggggaagccaagattgaagatttatctcaggaagcacaactagcagctgctgagaaattcaaagttcaaggtgaagctgtctcaaacattcaagaaaacacacagactccaactgtacaagagggcagtgaagacgaagaggtcgatgaaacaggtgtagaaattaaggatatagaattggtcctgtcacaagcaaatgtgtggggagcaaaggcagtccgagccctgaagaacagtaatgatattgtaaatgctattatggaattaacaatgtaaccatctgaaagcaacttttttggtgtctcagatgagtaactgcagcttggtttgaaatttgtactgtttctatcataaataaagttatggcttcttgttggatgaaaaaaaaaagacagtattttgccaaattaaacagaaaagagagttcagtggaagatggctctgatttcagggtaataataatgattcccacaaaggctgtcctggaaattcaccaacatcaccgctaaaatgtctaaccacattgtcaactgtgctgcctggtcaaggactgaggacctgtctcagagtgatcttccttaatcacagatctagtcatgacctggttttgctcaaaatgtttcaatggctcccgattgcctggagaatgaatttcaaatttctaagtagactcttccagctcttcaaacctatcctcatcagcctctctagcaccatctctggtgactcctcttgtggccctgggagagccacaccaggctgctgttctcatctccttcaaatgggcagcctgttgtcctagccctgtggctctgcctttgctgatcctgtcacttgaatgatcctctctctcttctgggtctggtaaaatctctcttctgtaaagctgttgagaatgcctcctccatatccagctgtaagtaatcactctttctgaatgctttgtttatactgttatagtagcacttagcaaactttactgcacttcactgcatgcaaatctgataggtcactctgatagaatgtaaactccgtgaaggccagcctgggctcctccatgtcagcagagctccataaatactttaatgttttaaatgagtaatgaataaaccgtttt

SEQ ID NO: 245610 - DNA, 437 bp, Homo sapiens
taaatgatgagtgggcacatgtggtccctgaacttttatggctattttccaattcaggaatgcatagttggaatacatatgctcaataacttgtagactacaaatattgttttcctacacagtttattttcctggtagggaaggacaatggaaacccttagaacttcctctacttaccaaaagactaaaccaaaaacaatactactttcctggaaaaattgcacagattaatgtaaccatcacttatgatttctgcaacatattcattcatctcacctgcttggccaatgcagaaaatgatattggcttaacattaacttaatgaaagcctgaatccaattagagccaataagcatgtacccttctacctgcaatgcagctgttgattcaaagtatttttctcttgacttgttaataaaatacaccagaaacagttt

SEQ ID NO: 245611 - DNA, 434 bp, Homo sapiens
ccacacccagctaatttaagtctgactaatcttaagcctctgaagaagttgaaagtaaggataacagagttgttaattacaggaatatttgaggcatgtctaaaaactataccaaatccttggcagtggctgggagaattactggttcatggcatttaaggacacctctgtcttgctaatcactaacctaaccaaggagacactttagtggctacatatgtcaaagaaaacagactttacagtatcagtccaagaaagtcagcaaacgaggaacaataacaatataaacaacaacaacaaaacagctaacagcaagaccaacaaaccctgggagaagaagttctgatttcaagatttacaatgttatattaaaatgtcaagtattttaaagaaaaagtagacatacaaagaaacaggaatgaatggcccataca

SEQ ID NO: 245612 - DNA, 373 bp, Homo sapiens
gacgagaaacttgactggtgtactgctctctgctttcctaaggggtccgtagctgtgctggtggtttgcttggtatctgtattacatccactctgtgcttcagcctgtttgtccagttactgtgtctagtgaagctagcattcacatattttagattaaattccacactccacccccaaattaaaaccctgctatttaaggtaaaaataattttaaaatgttttattttggtctctttggataaattaatcttgaggaaagcaatacttactgaatgttgatgtgtgtatatgtctttctctttgtaccatacttaacaggcaagtaactctcttgtaaaatcagattctaaatgattttcttttcttttctt

SEQ ID NO: 245613 - DNA, 170 bp, Homo sapiens
ttcaccctctcctgtttgttaaatccagtttaactatttttttttcttttatggctcaggcattttgtatcctatctaagaaatccttgtttgtcacaaagatttttcccctatgttttctcctataagttttaatttttgtttttttttttttttttttttttgggttt

SEQ ID NO: 245614 - DNA, 466 bp, Homo sapiens
tcttaattagattatctttatttcaatccaatttgcatggctatgtgagctatgattcttagaggagtgaacataaacagcaaaaattcttacttagcagacttacccagtgcaagaaagagttcccttatctcactgtattatgatcttagtcaatatgacccggaatttaagaaaataatatgacaagagtatggttttaatcaaccggaaaccatgtgttcaacagaacaacaaaacaagaaggctttgtacttacttagggagtttacatcttgatgataaggccactgaggtaactaaagaggaaatggattcagcataggctttggaagttcacttctgttacctagtaactgtgtgactttgggcaagtctttccaagtttcttttctataaaataggatggtaacaggacctactttacagggagttgtaaggtttagataagttaacaggttatgca

SEQ ID NO: 245615 - DNA, 443 bp, Homo sapiens
gcagtgcagctgtgacctacgctgcaggtcagtgggtttccacaatagcgatcaaactaaagcagaaacaatttcttttcaggaaagccagccctcagacgtgagccaccatgcccggccaaatgttttcaattatcatgcctaaaatgtagaggtgtaattgttttctaacttataattttagttctctgaggaaagggactctccctcatataataactgagggtaccctgtatcttaggtgctccctggacaacctgattactcccctagcctgggcatcattgttaacacctgcccctttttactctcaagagggtctcagtttacatgtaagcaattaggtcagcttacttaaaaatccacaggactatcaatggacttgcattttggacctccagaaaaaatacattttcagaaacacactatgtgtaaaagaaacg

SEQ ID NO: 245616 - DNA, 411 bp, Homo sapiens
ctatcatggagcagtgtgagctaccttgacaactggtgccttcgtcatggtctaggaggtgcataccgaccatcttcacgtttagcacttggtttagtccttcctttgccaccacttagagtaagacagccatcatatcagcctctttttactccatcaataagaacaggagcatcttgtacttcctttctgagcagtggcctttgagcttttatactagatgtgcagtatatactgagcagagtagtatatcttaaaagaagggatagtgagttggataaaataacctcacaaaaggttcagaagaccagcagacagtggctagaagtagaggacctcaaagctaaacttctttcttccaaacatataataaatagttttattttttcataaataaaatacacttaaaat

SEQ ID NO: 245617 - DNA, 498 bp, Homo sapiens
aataatgattcacttcagctctagagaaatgtatgaaggaagggaggaaaagagttgaaattcagaataagagtgtgattccattacctgaagaggcaaaagagcaggaggaaattggacaatctaggctacataatgttgaagtgtacagaaaaggaagctgagattgaaatactggagtgtgatgaatgaaacccagagaccaatgtcccaaacatagcccagtctgcatctcccacatgaaggaacccaaggaatggtcacgtttccatatatccccacttaagtgacatgagatggatgggtttccacaaggatcagctggaggagtttcacatccatctggcaaagctgcatgaagataagcctcgtgttttccagggaactgcattgctctacagaggcaatgccgaattattcaattgctttatgaatatttcctcccattaacctctctctgaaaatttgctgatacgcattaagtgtctcttaaccaaa

SEQ ID NO: 245618 - DNA, 677 bp, Homo sapiens
tctgtcgaccaaagatctgcttttatcatgacagctgccagattcataccacatctccaggttctgttagacatcacagtaaagtaattctttactgcttgctttacttgagccatctttctaatgtgtattcttgaaagtatcctggctgtatgaatctcaaatttcagtcccttttttagaccaccatgcagcccagaggtttggagctttgtcttggaagctccttccatcaatcagaataccaaatttacattgttaggttccctggaggtgttggagctctggattcagcaattattgtgaataagaaccttgcagctagggtgagtgccaacattccaagtgctagcacaatggaaaagagaagtggtttatgttagaatatggtcacattcttctgattaaacccactcaaaaaagacaacattgtaatattttccaatgactgtttatcatgaattacgtcagccttcgtttaaattgctattatttctccttaatgcttcttggtgcctgcataatttacggcactggcagcctcgggactatgaaataacctttcacaaccaccgtacaatagtgaagaacatggcgtttttgttgttaattattataggactcctttaacttttacaaagtgacgtcgaccggccgcgaatttagtagtagtagtc

SEQ ID NO: 245619 - DNA, 489 bp, Homo sapiens
tccagacatagacctggtgtggggagctgagtctctcacttttcaaggaaaacctctttccctgctcaactccacttgggagagggtaaagccaaggccctgggtcaatatctgcaactcctgttgccttgaccttgaccaagggcactttgcctttcaccccctgagcctccattttttcccccaggtggctttctgggttactgaggaggctgtgggttttcaggatgtgttgctggctcggcagcttcaggcatacttggcactaagagcatcactgaaagatgagcgctttcctctgctcgcccaaggcttcccaaagagctggtgccttcttctcttgcctgtcttcctgtccaagccccgagatggtgcccaggcatgttacagagagaagtagcttgagaggggtgagaaactgtctgaaataattccatccttccctggagacttggcgtgaattttatctaatcaccatggcaacagaga

SEQ ID NO: 245620 - DNA, 574 bp, Homo sapiens
tttcttttaaatccagtcaaagtcgccttaaatttccaggagttgttcttccccctgttaaggaaaagattctagctgttaagccccctcatgagatccccaaagagaaatgattctgataggaagaaattaaggaaagtgaagtttcagtaattctgcccaaaaggcaaaagctttagtaattcaggatctgtcccctttggagaacatcgactccaaagtccttgaccgtgagagatgctactttagaattgattgagtacatcagtgactgcctggcttccacaggaaaatgtctctgtattcaggatgtttccttcagattctttctcatgaactttgtgtgttttcctgaatgtactacccaacaatattactggaagtgtaatgatagaggatttggacagtctttgatgatgtattccaataaatgatgatgatacataataataaggttcatgtttgatgacattggctgaaaatataattatgatgaggaattaataatgctgacagaaattattccctctaataactctctagaagttattaaaaatgttatttttggaaagcc

SEQ ID NO: 245621 - DNA, 336 bp, Homo sapiens
acataataggacacacagatcttaggtgtacagttcaaatcattttggcaaatgcatgcacccatgtggctcacacccccatcaaaatagagaacattgctattaccccagaaaactctgagagtaccctgcccctggactctagcagcccctatctgatgtccgtcatgacgtattactgtcacccgttctggaacattatgtaaatggcatcatccagtgtctgctcttgtgtgtctggtcttcagctaagcatgatgtttgtgagattcatgcaggtggatgcatgcagctcattccttttcattgttgaatagtaatcaattatttcaacat

SEQ ID NO: 245622 - DNA, 464 bp, Homo sapiens
cgggattttaccatgttggccaggtctcaatctcttgacctcgtgttccgcctgcctaggcctcccaaagtcctggcattatgatggtgtgaaagctgtaggcattcatagaaaccatactttgaattttgaattttgatcttttctagagctagcaaggactcttttacaatgctgggcagcagcagtgagccacagcacccatcagccatgccatcaggagggtgagcaaatgctactctaccagtgagttgccagataatttttgcccatctgtaggctaatataactgttctgtgcacacttaaggtagggtaggctaagctttgatgtttggtaggtaagatgtattaaatgcattttttatttgaggtattttcagcttattatatatttgtagggacacaagcccattgtaaattgagatctgtagtgtgatggaacctcaatgcaagatttcccgc

SEQ ID NO: 245623 - DNA, 394 bp, Homo sapiens
acagccttgcgccaaagcatccacaactggccagctccctgctccccaaaatatcccagcacatactttatttttatttttatttttatttttttttgagacggagtctcactctgttgccaggctggagtgcagtggcgcaatctcagctcactgcaacctccacctcccgggttcgagtgattctcctgcctcagcctcccgagtagctgggattacaggcacacgccaccacgcccagctaattttttgtatttttactagggactgggtttcaccatgttggccaggatggtctcgatctcttgaccttgtgatccacccacctcggcctcccaaagtgctgggattacaggcgtgagccaccacgcccagccccagcacatactttcat

SEQ ID NO: 245624 - DNA, 454 bp, Homo sapiens
gcaacgacatcgaccaataccccgtggttttcaggaatgccagcgaccagggctcctggatgcagctggagatgctactgcggaagctctctgacctggtgtggacttcagatgctctaagtgatgagattttggaagatggtctggttccctagtggagtggaagatagcaaagacacggtcaccctctttggatttggatcagaatagcaaggaaagtgtttctatcactggaaggaggataatcagaccaagggctccaaggaaatactgcccacgtctagtgcaggagcagaaatcgaagtcatccatcagctagcgtgtggacaagctcactattcacacaagctcagcctagctgagtccatacaaatcctatttctgggtgggtaaagggcaggaggaaattgtaagatcagtctggtactgaataaaatcctggcctgattgtcaa

SEQ ID NO: 245625 - DNA, 281 bp, Homo sapiens
gaggagatgcaaggatgaagcgaaggttggagtgatgtggtctgctgcggggaccctgaggcgtgcaggcggcctctggaagctgaaaagacaggaaggcagcttctcccctgagcctccagaagaacccggccctgctgacactggcccaggagccccttcccccatcagggcctggagagggaagaaatgactgttcacagattttaccccgcaagacccatttcagcattctgattttgagaaccataagacagtgtgtgttgtttaagcctccaagt

SEQ ID NO: 245626 - DNA, 375 bp, Homo sapiens
ctctggctgaaaagatgatttgtgagaactgaatttctggcattaatccaatagaaaggtgagaaattaaaggcatgttcttctaatcaaccctcctatgctttaggcagacccacttgtattatctacctgaatactggcctcaggtatgtttctgatttaagggaggtgaccacttgcagagctctgtcgaaaaatattcctaggacaggtctgaagtcagcagaaataaagtgacataagtcattaattgtggcattaattgtgtgacatggaggaggggaatgatcactgaattattttgaggaacagtgatatcatgtgcaaatttcttaagaaagttgaaaaatgtttaagaaaaagtgtgtgtgtgtg

SEQ ID NO: 245627 - DNA, 462 bp, Homo sapiens
gcgagcgggccgcacctcgcgctgggccagctctggacgctgtgccgccagtggctgaggcccgaggcgcgctccaaggagcagatgctggagctgctggtgctggagcagttcctgggcgcgctgcccagcaagatgcggacctgggtgcagtcacagggcccccgaagctgcagggaggccgccagcctggtggaggacctcacacagatgtgccagcaggaaggtgagaggcgcaggcttcctgccccgggccgggccagggggcctgacgtctccgaggaccgaactgccctccttcccgcccacatcgctcccacccctgcccggcccctcccgaccagcaaacctctcctgccccgcggctgtgtttttaattatttttacatataaatgtgctgcacgcctcatctgcctcgaatttctcactcagtcggtgattaaagatccctccatttccca

SEQ ID NO: 245628 - DNA, 897 bp, Homo sapiens
agaaggagtccagcccagatcgagtcgtcctgatcttttggccgagattaggccgcttcagccttcctggaagaagccagggggactgcgcgcgtgagcgtcacgcatgcggggtcaacggatgggtgcttggtgctctgggcactgcaggggtgctggctggactgcggttaccgtatgtgttcgatactgtgggcactcataatatgttattgctttgttgtagacagttcactcgtgtagcactgaaccggagttagcgatgactctgtttccagacttgcatgactccaccaataaccagccatatgatcttaagcaaattgctcatttatttaggccttagacctctggtgtgtaaagtcggattaataaaaggactcacttcttaatacttttttgagattaagtaaatgcacttaaagcgaatggcacagttccctgacccagagtaagtgatgtcggctttatagttaattttttcatttaggtgttgtgttgcaaatgctgatgcaaataaagttaccaagcccaagccctatcttgttcagcttggctagagttattcgtcatttctgtcctgctgagagcgcagtgcagttaactgcagaaaacatgctcgccgcagttgtggggcttggtaggggaggatggaaagcagacgaaacctaaagggaaatgcagttttaaattctgtgagtccttttcctcaagagttttgtcaaatcccagcccagttttcctggagttggaaagcaccatcgaaacctgcaggttgagtccagtgcaaatcccagtcaccatcctcagctgggcccttcagcaatctttctgggagtctgtagtcagcttctcccattccttattactgctgcgtcagaccaccaccacgacccc

SEQ ID NO: 245629 - DNA, 418 bp, Homo sapiens
ggtggacttctggcaggagccttctccagccatggctttagggctgatatggttaggtgctttgtgtccccacccaagtctcatcttaaattgtaatccccataatccccacgtgtcaaaggagagacctggtggaggtaattgaatcgtaggggtggtttccaccatgccgttctcatgatagtgtgtgagttctcaggaaatcagatggttttataaggggctcttcccccatcactccacacttctttctgctgctttgtgaaagaggtgccttgcttccacttctgccgtgattgtaagtttcctgagacctccctagtcatgcagaattgtgagttaattaaacctctttcctttctaacttacccagtcttgggtagttttttggttttgttttgttttgagatggagtctc

SEQ ID NO: 245630 - DNA, 166 bp, Homo sapiens
ctacccatatgtctatgcatgttttacatagttgcaatcatagtatgtgtacatattttggatcttaatttgtgcttttccactagtgctcttggtattacaagaagggagagagcacttccaataagtgcctttattcctgctcacagactgtttctcagattac

SEQ ID NO: 245631 - DNA, 394 bp, Homo sapiens
caagtattatttttttgtaatcctttccataaccctgtgaggtaagtactgttatcacagacaaggaaaccacaatgtggacctgttcatgaacttgctcgaggccacgtggctctggagttccagctcaggtctgcctgactctcaatcccatgatattaatatactggccagtcactattttggctgtattggggtcatatttatacccttggtccagttagctatgttgggtcactttagtactgatagccagggagatgctgggcttgataggttagtataattctatgtattacctacagaaactgtttttataaattgttttgttaatatttgtttgtcacctatttattcattttatttgcactggtgaaaataaactcatctttta

SEQ ID NO: 245632 - DNA, 315 bp, Homo sapiens
gcccagaagtactctgcaagccacagcgtctacaggaagtgcctgggtggccacggctctcaagaggaatccacactagttcctgccaccctgtttctgcacatgctgttctttccgcctgggatgccctttctccctgctctgcctggctaagttctcatcatggtcctctaaggcagttcaagaactccatgactacgaccccagccctgcacccagggccagggtgggtccttctgtggggcttccttggacatagcccagagcaaaaagagatgcagctcttactctgataaacattattaaatgaataaa

SEQ ID NO: 245633 - DNA, 267 bp, Homo sapiens
agccaaacaggatgggctctaggaagtatcagtgtttccatgggagcctctttgactaaataagtggatcatgcatccaagtacattcagttattctctgaagagaatcaaaatcacaaaaacaagtaccatgggcaccctcttatcttttcctaaaatcctcatgacctgtttcttcctgttaactggaatacgcatcactctgtgacccataatacatgcttgatgaatatttgttaaattaaaaaatatgtaaaagccagagaa

SEQ ID NO: 245634 - DNA, 565 bp, Homo sapiens
atgctcctaaacattctgcagtggagccccctcaacaaagaattatctggccccaaatgttggaagtgtccaggtttaggtataaagaatcagaagcttttctcaagtattgctgttaggttggtgcaaaagtacttgcggattttgctttacttttaatggcaaaaaccgcaattatttttgcttcaacctaatatgatgcaaaattggctacaactgtaatttgttgagtgctgcaaacaaggtacttgctaagcttaactttagtgaacaaattaggaagaattggaataaggtaaaactagctaaatgactcttccctgagaataaatactaatgactgccccttcagatggtgccccctcatctgctttactgactgtttcttagtagtagttggcaaaacacctcttaaaataccatacttgttttcatcgtctttggtgtatgaaatagttgaatatatcctttcagaatcgcttgaacctgggaggtggaggttgcaatgagctgtgatcgcaccactgcactccagcctgggggacagagtgagactctgtctcaa

SEQ ID NO: 245635 - DNA, 568 bp, Homo sapiens
atgctcctaaacattctgcagtggagccccctcaacaaagaattatctggccccaaatgttggaagtgtccaggtttaggtataaagaatcagaagcttttctcaagtattgctgttaggttggtgcaaaagtacttgcggattttgctttacttttaatggcaaaaaccgcaattatttttgcttcaacctaatatgatgcaaaattggctacaactgtaatttgttgagtgctgcaaacaaggtacttgctaagcttaactttagtgaacaaattaggaagaattggaataaggtaaaactagctaaatgactcttccctgagaataaatactaatgactgccccttcagatggtgccccctcatctgctttactgactgtttcttagtagtagttggcaaaacacctcttaaaataccatacttgttttcatcgtctttggtgtatgaaatagttgaatatatcctttcagaataatatttggccatttacatctctcttttgcacacactgaatttgccatcttgtcttcctgttcctacacctttaattgtcagcaaggagac

SEQ ID NO: 245636 - DNA, 1602 bp, Homo sapiens
ggctgagtcaggagaatcgcttgaacccaggaggcacaggttgcagtgagctgagattgcgccactgcactccagcctggtgacagagcgagactccgtctcaaataaaaaaaaaaagatttatattaggcagggcatggtggctcactgcctgtaatcccagcacttggagaggctgaggcgcgaagatcacctgaggtcaggagttcgagatcagcctgaccaacatggagaaaccccgtctctactaaaaatacaaaattagacgggcgtggtggcgcatgcctgtaatcccagctactcgggaggctgaagcaggacaatcgcttgaacccgggaaggcagaggttgcagtgagccagatcgcgccactgcactccagcctgggcaacaagagcaaaaccccgtctcaaaaagaaaaaaagatttatattagaaggaggcgccttctctaaaagtaatgaatcctttttttccctccccaagcaaaaaatccttctctaaaattaacaatcatttttctaagcgtggtttaatgcttttttggaagactacttatttcttttcctttcaaaagttatgcaagctcattaaaaaaaaaaaaaaaaaaggctgggtgtggtggctcacgcctgtaatcccagcactttgggaggccgaggcaggtggatgactaggtcaggagattgagaccatcctggctaacacagtgaaaccccgtctcttatactaaaagtacaaaaaaaaaattagctgggcatgctggcaggtgcctgtagtcccagctactcgggaggctgaggcaggaaaatgacaagacagacttggatgttatacgagaaaatcatagattcctatggaatgaggaggacgaaatggacatgacttgggagaagagacttgctaagaaatactatgataaattatttaaggaatactgcatagcagatctcagtaaatataaagaaaataagtttggatttaggtggcgagtagaaaaagaagtaatttcaggaaaaggtcaatttttctgtggaaataaatattgtgataaaaaagaaggcttaaagagttgggaagttaattttggttatattgagcatggtgagaagagaaatgcacttgttaaattaaggttatgccaagaatgttccattaaattaaatttccatcacaggagaaaagaaatcaagtcaaaaaaaagaaaagataaaaccaaaaaagactgtgaagagtcatcacataaaaaatccagattatcttctgcagaagaggcctccaagaaaaaagataaaggacattcatcttcaaagaaatctgaagattctctacttagaaactctgatgaggaagaaagtgcttcagaatctgaactttggaagggtccactaccagagacagatgaaaaatcacaggaagaagaatttgatgagtattttcaggatttgtttctatgagacgagagagagaagcctccgctccttaatgtgaaacttcatgaagttttaaacttcatgcaatttgaaattccatataagtttttatctgcaagttacagcttgtgtggtttgtctttggaaataaaaatccaggttctctcag

SEQ ID NO: 245637 - DNA, 614 bp, Homo sapiens
tctgtttcacaaatgagcaaacaggcacacagaagttaagtaacacaaccactgtcacagttagtaagtagcaaaatcagaagtctgacctggacagtcaaagtgctcatttcctatctgtaaaacgtgggggtggggaagagttgtagcaaatttcttactacttaaataactgccagagagtaagagctttcaccccacacacccagccaaaacagaatagaaaatctttagttatggaaaattcagaaaccctccaatggacaaactgaggcacacctgtattcatttagtaagactctaagtcatatatacttgggctttcagcagggcttgctttaaattaataaaaaaaattaaagtgattggaaaaaacagtttaggataatcactattttaaagattcataatagttttcctagaacgagcaggaggaaaacatgttgctaaactatagctttctccctcccagcaattagcggctccatccaatagtgatggcaaattaaaatgggacttctcactgagatgaaagagtgggcaactttcctccattgaaaataaaataaaggaaatcatcttcaaaagttccaagagttcagtctagatcccag

SEQ ID NO: 245638 - DNA, 414 bp, Homo sapiens
atattcaactctgtgacctgaatgcaaacatcacaaagcactttctgagaatgcttccgtctagattttatatgaagatattcccgtttccaaggaaatcttcctagctatctaaatatcaacttgcagattctactaaaggaatgtttccaaaatgctgtatccacacaaaggttcaactctgttaattgaggacatacagcacaaagaagtttctgagaatgcttctgtctagattttatatgaagatatcccgtttccaaagaaatcctcaaaggtatccaaatatctacttccagattctacaaaaagactgtttcaaaacggctctgtcaaaaggaaggttcaactctgttacttgagtacacacatcacaaggaagtttctgagaatgcttctgtctggtttttagga

SEQ ID NO: 245639 - DNA, 457 bp, Homo sapiens
acaggctttttgccctggaattaaacccttagggcctccagactttcccagctgctcctgagtcttgtcagctgacctcacctacatagagtctttgacaaagtctctgttactgacaccccttgatcttgggaggtgaccaagtaccttcttgactttaggctcttgtggtacagacagctctgtgttctttggagagagtttccaggattactactttgtgttgtttttagcactcttgaaacaaacattagcactctttaaacaaacatagttctgaatttatgaaacttcccaccaaaaaagaaggtcttttgcctcagagcaatggggaatccttaggagcaagggagtgtgtttgcatccccaacttaagctttgctgctggtgagcactaagggtgcagacatattggggtctctggagcattctccgtgcccttcttggagatggcatc

SEQ ID NO: 245640 - DNA, 400 bp, Homo sapiens
ttccttcggttgcacaggtgactgcccctccttcagaatggcttcccttggcttctgcagtgagctttgtttctcactcctcgtaggaccctccacctgcatgcctcctgtcgcccattcccatggcctcaatcccccacatgacgaaagctgccggagctgtgcccatccttgccataattcctgttgtatacctagtggtcttccagggcactccacttgagtgtaccaaggcctttcaaatacagcatttccaagaccaaccatttcctccttaattaaactgtccctccccccatgtatcttcccagtgaaagagccatcaaatatcactcagctcaacacctacgtctaccacctagtcaccagtcaaggcaattcataaaatcaaaccagacaa

SEQ ID NO: 245641 - DNA, 706 bp, Homo sapiens
agtctagtgggatctcattgtggttttaatttgcacttccgtaatggctaagaatgctgaatatcgtgttcttctttgccactcttgtatcctctgtgaagtttctgttcagatcttttgcacggaaaaagctgtatcatggaaccagtaaaataaccaaggagaggttgattaaagttctgtttataaccctagaagattcctgccctagggatatgggatggctgaacgtaggacaccgacactggacagatgaaatagcagtttattagtcacgcatgctcacagccctggggtgggggacaccgcatgccattcagttaatcatgtgtgttgtaacttttcggggagggacatttgcagagactaatggtatgacattctgaaaagcggtgacagattaagaaattttttaattctgcagatggtagtgtcgaaccaagtggaacaaagaaagaagatctgaatgacaaagagaaaaaaaatgaagacgaaactcctgcacctgtatatagggccaagtcaattctggagacctgggtgtgggtcaagcaaccaggtaatctgagttttggcactttggaaagcttgatctgacgctccttttctaaataacttggatggattattcgtattttttggtaacaattttaaaaaatgtaattaaaaaaatttaaatatcgtggtaaaatatacataccgtaaa

SEQ ID NO: 245642 - DNA, 380 bp, Homo sapiens
agacctgggaggaagctggagaaaagatgccctctgaatctttgtgtttggctgcccaggctcgccttgacaccgaatggttgaaaacagatatacagatggtagtgtcgaaccaagtggaacaaagaaagaagatctgaatgacaaagagaaaaaaaatgaagacgaaactcctgcacctgtatatagggccaagtcaattctggagacctgggtgtgggtcaagcaaccaggtaatctgagttttggcactttggaaagcttgatctgacgctccttttctaaataacttggatggattattcgtattttttggtaacaattttaaaaaatgtaattaaaaaaatttaaatatcgtggtaaaatatacataccgtaaa

SEQ ID NO: 245643 - DNA, 352 bp, Homo sapiens
ttaattgaatatttaattagtataaatataaaactaatttttgaatgtgttcagtacatttagcaagaagacttggtgctgagctctgtagagaagcacttctgcagatgcagacagccaccgtgccctccgtgtcctcctcggtgtgctgatagaagtgagtgggtcatttggcattagcaaaggagtaagttcgcatttgcactgagctggatcttgccagactgtgcatattggaacccgcagacagaggctgctttcacgttgatgaatgggttttttcaagcgttctgctccctagttatgagaagggtgacccggccaggagacaactttatgaagctataaaaaa

SEQ ID NO: 245644 - DNA, 469 bp, Homo sapiens
tgagcctgcaggatcctggagtgccctccaagtatccctcctcacttctctccaggctactggctccatccttctgacgccaaatactctcagttcaccctgtgatattgttgcgatgtttgtcccctctaaatctcatgttgaaatgtgatccccaatattggaggtgaggtctgatgaaaggtgttttggtcatgggagcagatttctcatgaatggcttgatgccctcctcatgggaatgagtgagttctcactgtattagttgacatgagagctgtggtttaaaagagcctggcacctcctctcctctctcttgctttgtttcttaccatgtggcacccctgctccccctttgccttctgccatgaataaaagctttctgaggcctcaccagaagccaagcagatgctgcttccatgtttgtgcagccagtatagccatgagccaaaataaaccttttttcctta

SEQ ID NO: 245645 - DNA, 607 bp, Homo sapiens
taacttgtttctgaatgagattgtcagatctgtgttgacagagctctgtctagcagttctttttcccccacggagctaaaaatatcagagtagcacagcgagctgcctctctaccagcctcccagactggggaccctagctccgtgatccccttcctccagaataatgtggaggcacagggtcacccagttagacttcattttccaagtctaccctgcaactagaagtggcttgccagtgtattttcagaagtaatgtgtacaatttccatgtttcttgcttaagaggaaatggctatggggagaggttgatcaactggtacaaagttgcagttaggtgagaggaatcagttctggtgttccattgcacagcagggtgactgtggctaacaataatgcatcgtatatttcaaactaactagaagagaggattttgaatgctttaccacaaagaaatgataaatgtttgagatgatggatttgctaattactctgatttcatcattacacaatgcacacatgtgtcaaaacctttcatttttatcccatgaatatgtacacttaccatatgacaatcgaagttaaaataaaattttattttaaaaatg

SEQ ID NO: 245646 - DNA, 1172 bp, Homo sapiens
ccctccttaccgtcctccggacctcatttttaggccgaactggttttgctgcgtctctctctcctctttggtaaatcgcggagatgcacggcgcacttcgggagtctgggcagggatggggccccctgggctcggccggagagtaattcatggtctgattggaggcatcaggtgtacccttggcacagaagggcgaacatggctcaaggatcagttcccagtggccgaggggcacctgttagaacaccaacgtctcctacaaatgtgtccccaagaatgccagcaaggggaaccagcaggggcccaagtataacatcaatctgggcgagtcaccactgccccttgcagcaaccgatgcactggtccagccctcccgcaggcccgctccgtgagtaaatggctctcttctcttgcaggaatgcagtggaggaaggcaagggtattttttacaacatcaaaaactttgtccgattccagctgagcacgtaagtagaggccagcattccgagtgtcattaagcaccacgcctggcgggcggccgctgactggctgcgtgtgccccgcaggagcatctccgccctgagtctcatcactctgtccaccgtgttcaacctgcccagccccctcaacgccatgcagatcctatggatcaacatcatcatggatgggccaccggcgcagaggtgaggcagggccggctgggagccctgtgtctctttacccacctgcggggcttcctccaggggctgctggctgtgccccaaggctataaggatgaacaaatacagccactttccatcaggagttcccagaaaactgaagtgtgttgcactggagtgagactgggagtagaaggcagaggagaaagtacctgggccggcagagctgggtgaggatggaactttccgctccctctgcctggatgctctctctgggcaacctgcatggctcattctcatgcttcattccagtcaccagtcactgccttcaggaagtcttccctgattgcactcccactcaatcccctcaccctgctgtatttttccctagagaggaagatacacacagacacacttttccttatggatctgattgtgatctgtctcccctttagaacatcagtttcatggaggcggagtttgtgtttcatccctgatgtctagagataaagg

SEQ ID NO: 245647 - DNA, 665 bp, Homo sapiens
caagatccccttagcgtttccatcaggcctgcttcaagctcagatgagcatcaagctgttgtaaggcattttgaggcccttccaatcacacatatttttactgacagctttctctgaccttgtaatgtgcctattttacaacagagtgcctgactcagtctctattgctctcttgagcctcattcactaagtgacaactaatcttaggcttggaggatagctgtgctgacattctacctggtgatctctctagtgatttagaagtctgcacagatgggacagggagagagcactcttaattagcataggagatgtaggaattcaagcagaacctgtataaaatgctggaatccccagttttatgtgatgaaggagagaatctcttcagttttcaagattttttaattgaaagtttttaaacacaaaaatcacataaaacttgattcttgaaacatagcatcttcacatatagacttaaactaccaggtaagtatttgtcattcactggttttcaccagaagatgaatttgtatcataaaaagttatcaacatgggccgggtacagtggtttatgcctgtaatcctggcagactttgagaccagcctgggcaacatagcatgaccctatctctaaaaaaacagtaaaaaaaaaaaaaaaaaccact

SEQ ID NO: 245648 - DNA, 472 bp, Homo sapiens
gatgaggaagctgcattgcttcttgtgctcctatcccattggccagaacatagtcatgtggccatccctagctagaaggcacttgatctctgttttgctccattttccccaaccctcatgtcacccagtctctgtcttctctgcctccagacttacctgtcccttaccacaagcttgatgagttacaagatgaacaccccaaacccctggtcaagaaatagaactttgccaggccctccccacccagaagtccctctgtgtgcatcatcccaatcacagccccaccccggccccactccaaaagtgactgttactaacctgacactttcaataatcactccttgtttctttatggttttatctcccatgtgcatttctatacactatagtttagtcttgcttattttaaaaattccgatactttttttttttttgcaacagagcaagactctgtctcaaaaaacaaaaaaaa

SEQ ID NO: 245649 - DNA, 500 bp, Homo sapiens
gaagcactgaggcgggagcccaggaggttgaggctgcagtgagccaagatcatgccactgcactgcagcctgggtgataacagtgagagcctgtctcaaaacaaacaaacaaacaaaaacaaaaaaggattattatgggttaactttactcataaacacatgcaaaaatcctaaacaatatcctaactacaacggaatcaagtaatatagaaaatgtaatataaaaattttaaatatatgaaaagttggatttattgtagtagtatgatactactacatacacataatataatgatactactacattataatgtagtagtctaatgtagtccattagaaatggactcagtgtaatgtgtcatatcaatgcaataaaaaagtctgataaaacctcaatacatgcagtaaaggcatttcataaaattcaacattctgtcacaataacaactcttagaaaacctggaatggaaggacacatgcttaatctcataaagtaccta

SEQ ID NO: 245650 - DNA, 576 bp, Homo sapiens
tatattaacttggatccagcagctttactgtattcatttattagttctaacagttttctgttgttgtggagttgtaaggtttttctacatatatatgatcatttgtaaaaagataatttttctttcctgttttctatttggagtccttttattccttaagtcttctctcttggaatttcagtattaaattgaataggagtggtaatactggggcatccttgcctttcctggatcttagaggaaaagctttcagtttttccttactgatttatgctattatttgtgtgctttatatatgaaaaaaagctggccaggcatcccagcattttgggaagctgaggcgggtggatcgtgaggtcaggagttcaagaccagcctggccaacatagtgaaacctcgtttctactaaaaatagaaaaattagcctggtgtggtggtgggcgcctgtagtcccagctacttggcaggctgagacaggagaattgcttgaacctgggaggcagaggttgcagtgagccgagatcacccagccgagcactttaggctgggtgacagagtgagactgtctcaaaaaaa

SEQ ID NO: 245651 - DNA, 302 bp, Homo sapiens
aatttgctctataaaatcatagttatatagaatctctttgacatatggttctattcagtaggatcaaattctgatggaacctccaccttgcctgctgtgctgtgcctgcagaaggccaactttcgagaacagaatgcttttacttattctactttattacccagctcttgcccttttgggctttagaggagaagagggggagattgacaggacaagtggaaatggtgggccctccaaatgtgataggttggttgagccacatgtaaagggcatgaaaagaaagaaagaaggaaagaaaagaa

SEQ ID NO: 245652 - DNA, 322 bp, Homo sapiens
gtgtcagcttgaccttgggaagggtggagacagagaaactaaggtcaaccaaatgggtgctcttgtccatgtgaccaaactccagtaaaatgctcaacaccaaggctcaggtaaggtttttgttggggagtatattctgtacttttcgtcacatatctctgggtgaattaagcactgtccacacgatgtcactgggagaggacaaccagaagcttgtgctttgtctctcctggactctgccctatgcacctttttctgctgctgattttagtctatatctttttgttgtaataaactatgagtataacagcttcactcagtt

SEQ ID NO: 245653 - DNA, 419 bp, Homo sapiens
cagtctctagaccagtctagaagagaacaatgagctgtctgttaagtaagacattcttcaatatcttcttcccagatattgcaactttttataatggaatgttggtattgttattttaaagatcctgatgatgttcttgtgcagtacactgttacgacttttatactgtgttttgggtaaaaaattaataagttgctttttagcagtgataatttttttcttttttgcatcatattttaaaaaagaaattctgacaaattactatgtaatgtgctaaaactgaaattatgagagaaaagaaaatacaagttagtttataattctgttactgcttcattgtcatctgtgcgatactgacatttagagcacatagcacttgttaccactttcccccaccctattccttttaaaatattttc

SEQ ID NO: 245654 - DNA, 567 bp, Homo sapiens
caagcccagaatgggaatgactttctgagtccatcagtagtggtcctgagacagtttggggcagagatagcctcatttggaattgaaattgaagaagtaggctgggcgtggtggctcatgactgtaatcccagcattttgaaaggctgaggtgggcggatcgcttgagcttagaagtttgagaccatccagggcaacatgatgaaaccccaaataccaaaagtagctgggtgtagtgggtgtagtggcatgtacctgtattcccagctactcaggaggctgaggtgggaggatcacttgagcctgcagtgagctatgtttgtgccattgcactccagcctgggtgacaaaacaagaccctatctcaaaaaaaaaaaaaaaaaagtaaaacactacaaagtttatgttctctgttttgtcatcttgttgagatagtttttatttaaagagttgaaaagtaacgtttattccagatgagtatgttacattggttaggttaatttattagcatgaattaatttgttttaagaaaaacacatgacacatgaatttcatacttgtctgtctt

SEQ ID NO: 245655 - DNA, 403 bp, Homo sapiens
attaaaatataatgtccttctttgtctctggaaatgacttaatttctccttcattcttgaagggtagttttgccagatttagaattcttagcagacaagattttttcctttcaggatttgagctgtgtcatcccactgcctcctagcctccatggtttctgatgaaaaacagctgttaatcttatttgaggataccttatacagtcagccctccatatccacaggttccatatctgcagattcagccaaccacagattcaaaattcagtattcacaggatgcagaacctgtagttatggagggacaactttttctatctataggttctacagggccgacagcagtacttgcatatccatggatctgggtatctgtgggaattcctggaaccaatcccccatgg

SEQ ID NO: 245656 - DNA, 428 bp, Homo sapiens
atgttaaggaaccaccaggatgccccttcctgatcacatgcctgtcacttctcacagcaggtgtaaccactatcttgaattttatgttaatccttccttggctttaaaacaaaaaaagctacctatacaattgtaactatagtttattttcattttttaaaaaactaaagtattttactgggtttatactacaatgtattaatcccactgttgatgggcatttaggttgctttcaggttttcttcctactatgaacaatgttacattgaaaacttaatctatttttcccttcattcactttttttgtttgttttttgttttttgttcttgacacgaagtcttgctgtgtcacccaggctggagtgcagtgagccgagatcacaccactgcactccagcctgggtgacagagtgagactctgtctcaaa

SEQ ID NO: 245657 - DNA, 769 bp, Homo sapiens
attcaagaatcaatgaattgaacaatatatttctaggaaaaaaagaaaacccagtaaggactgcatcatataatattctgcaaccatattctggaccacctcattatgctcaaaggacacatcacagtactctttcatcttttatgtttgtgagccaaaatttacctgatacaaagagatgtacaaggtaattcttattaaaatatctaataaagttgtttttcataatacttttattcatgtgtctataaattagtagtaaaatagcttataaatataaaaatacaaaaaggtctatttgacccaaatggttaatggtgatgcttatttctgttaaataccaagagttagtcaaaactttgcagatacaaaccgtaaggcaaaaaaaactggtgagactgattacaacaaatttagagagttcaatgtgctatgaattcacacaactccagttcaacagagaccatgaacaaagtaagagacatatgacaaagtgggagaagttacttacgatgtatgaagtcaacaagaaatcaacatgtagaatatacatgaaacatgagaaaatcagttcaaaaaagaaagtaatactaatataaaaacagacaaagaattaaaataatttctaagactcccaacaacctaacaagcatacaaagaaatgctcaaaataggccgaccgtggtggctcacgcctgtaatcccagcactttgggaggccgaggtgggtggatcacctgaggtcaggagttcgagaccagctggccag

SEQ ID NO: 245658 - DNA, 715 bp, Homo sapiens
attcaagaatcaatgaattgaacaatatatttctaggaaaaaaagaaaacccagtaaggactgcatcatataatattctgcaaccatatatgtttgtgagccaaaatttacctgatacaaagagatgtacaaggtaattcttattaaaatatctaataaagttgtttttcataatacttttattcatgtgtctataaattagtagtaaaatagcttataaatataaaaatacaaaaaggtctatttgacccaaatggttaatggtgatgcttatttctgttaaataccaagagttagtcaaaactttgcagatacaaaccgtaaggcaaaaaaaactggtgagactgattacaacaaatttagagagttcaatgtgctatgaattcacacaactccagttcaacagagaccatgaacaaagtaagagacatatgacaaagtgggagaagttacttacgatgtatgaagtcaacaagaaatcaacatgtagaatatacatgaaacatgagaaaatcagttcaaaaaagaaagtaatactaatataaaaacagacaaagaattaaaataatttctaagactcccaacaacctaacaagcatacaaagaaatgctcaaaataggccgaccgtggtggctcacgcctgtaatcccagcactttgggaggccgaggtgggtggatcacctgaggtcaggagttcgagaccagctggccag

SEQ ID NO: 245659 - DNA, 346 bp, Homo sapiens
cccttacttatcctctgtcatgctgttgttcatggtctgcttccaaaaacaaatttaaggcagctgggattacactttgctaatctctgtagattatttttacttaaattaaggaggttttccctggtgtgatacaatgtgaagcacacagcactacccaactaagaaggctgaacctgagtttaatcaagcctctagagttaatttccagtttcaggaaattcaggcgatagaggaaccagataatgacaacacaagaaaacagatatatccagaatgtgggacattctgcaggacaactgacccagtttctgcaacaagtcattggcatggaaaaaggggggag

SEQ ID NO: 245660 - DNA, 445 bp, Homo sapiens
ctttccagtctatttctatagatttgttttcaaatcacatcagaccctatgtaaaatagtgtaccgtctttactcattataacatggtgagcatttccccaagctattacacatatttttaaacattgttttaatgaccggcataataatccagtgcttggatatatcaaattcttcggccatctccttataggtgagattgtttccaaagtttcactaatgtaagtgcactgcagtgaacgcccttacgtaacaattgttcactcccgtgtacttttctcgtgcagagttctacagcatgaaacactatatttaactttgtcaggttgatgtttatcagtggtttattattgtttttatagtattccattgtcagtgaagtatgccattcacactgtcaagtgaattgtctatttgtattatttaaaaaaaagatcacaaacat

SEQ ID NO: 245661 - DNA, 393 bp, Homo sapiens
ggtatgcattcagtagaaaccataccttggattttgaattttcatttcccgggctagccactggcagtatgatactctagtgaggctaggcagcagcagtgagccatagctcctagcagtcatgcagttatgaaggtaaacaaccaatacttcatcgcgtactgtgctgccaccattttgacccactgtaggctaatgtaagtgttctgagcacatttaaggtaggctaggcaaagctatgatgttcagtacattaggtgtactaaaagcattttttatttacagtgtttttaacttatagtaggtttattaggaggtaactccttcataaatcaaggatcatctgtttaaaatttgaaagtgtgtgttttttagaattctcttagtattcac

SEQ ID NO: 245662 - DNA, 518 bp, Homo sapiens
actgccctgacgacactggaccctctcccaggatccccaacgtcttctcaaaccgaaaatgaagaatcttgtgagggagaaggaggagggtaggtaggaggaggcatttacaaaatgctacctgttgaggtgcccgcatttgatggaaacttcaccccgatcatgcaacatcagagctgaaaggaaggatttggtcctaacaaagttcctttcattgtttattcctgagtaaacaagtatgacatcgacccatagcaatgctttgagattgggagtggggggtgggggaacaacagctgtcatcaatccagtgtctgggggtctcgctgacccatctgaagagggacgcagagaaatgcctgctttcaatacatctaattttaaatacgctactatattcatccacctacctgttacaagtcaccagcctcagttattatgacggaacatactgcgttttctgttgttctgtctcattgttcccgtttaccaatattaaagatacagcttaaaatgtt

SEQ ID NO: 245663 - DNA, 495 bp, Homo sapiens
agtctcatttagtttatactcaaactactggttaaagatggaaggctaagacagcaaaagaacatagatgttcaaatagaagttaatgaagagcacaaaatagtaatccggtaaatttatttcaaaattttctgtattctgaaataatatcttctacagcaacctggatgaaaccgaaggccattattttaagtgaagtaactcaagaataaaaaaccaaatactacatgttcttacttatgagtgagagctaaactatgagtacgcaaaggcatacagagtggtataatggacactggagattcagaagggaagagggtgggaggggggcgagggatgaaaaactacctgctgggtacaatgcatactcaggtgatggtgcactaaaatcccagactttaccgcaatataatgcatccatgtaaccaacaaccacttgtaccccataaagatattgaaaaataagtaaataaatacattttttaaaaacaaaat

SEQ ID NO: 245664 - DNA, 339 bp, Homo sapiens
gcggaggttgcagtgagcctagatcacaccactgcattccagcctggatgacagaacaagactctgtctcaaaaattaattaattaattaattaaataaaatattttcaaaaataaatctgggtacactagagaaaattgaaaacaaactgcttaatactgattatcaatacattaaaaagttacaaccataataaattctgtacatattcatgtattttaatcattgtcttaactgtatctgtctcatgtcatgttacaggtatattttacttctgaagaatatatttttatatgattataatttttaataaaagtatctctaaacttccacatttca

SEQ ID NO: 245665 - DNA, 473 bp, Homo sapiens
gaatgagaaaagggttattgtaaattctacacacatttaaagaataattaggctattataaacggctttatggcaatgaatttgacaacttagatgaaaaggacaatttctttgaaaaatacaatttaccaaaattaatataggaagaaaaggaaatccacatagccctatgtctactaagaaacattcccacaaagaaaactcaagacccagatgttttactgttgatttctaccaaatatccaaggaagaaatgatatggattttacacaaactttttcagaaaatagaggaataaggacctctgcccagtctgtttttgtggtcagcataactctaatatgaaaacctgacacattgtaggacatcctatcggtcctgatgtgattattatacactgcatgcctgcatcaaaatatcacattaacacataaacatgtacacctgctatgtacacagaaaaataaactgat

SEQ ID NO: 245666 - DNA, 474 bp, Homo sapiens
tcgctatatatcttgaactcctggttcaagtgatcctcctgcctcagcctcccaaagtgctggtattacaggcatgagccactgtgcccagctgattctttttttattacctgttatttaaatgggcaagagatctggtttaaactcttctgactttagagttttactctggaaaagataagatggttaaataatacatattctacaaaaatcttgaattatttaaagaatctataaaaattattcctggtaagaatttattattcctactgataataaaaaaaataaaaattaccaaataaataaaaagtaggttttacatggacttaaacattctacttcaagtgaaaaacctgatattttaggaaggaaaaggtattaattcaagttggtagagtcactatataaaattctgttgacaagacttactgtactcataatttgctttcctcccttagaaagattcagaccagg

SEQ ID NO: 245667 - DNA, 458 bp, Homo sapiens
aaggtacagaaagtgactccaggtcacactctagatgtcggcggggagggatctgacactcaagctgaggttcttgctgttgtgctgtacccacacacgaatgtcatgtttgtggagaagagtagctagtgaatgaagccgtggtggtggaggggggcctgatgcatctggagaggtggcttgaagctgaattgtgaaacaccttgaatgtcagacccagcagcttgacgtcatcctgtatccagggggattttgatgtagatcctaccttttactcttagagagcacacagtgagtgccccagtaggtgtacacactaagctattgggatcagataaaactattaaaattattttatctcacatgaagacattaaacttataaacacttaatttagactagcagatggatatcatttataaataaataagcatctattgagttttgtgcttaaaatg

SEQ ID NO: 245668 - DNA, 499 bp, Homo sapiens
gtcaaaatttcttagggaaattacagagcctttgtatcaacaaaatagcaacaggatgcattgtagaatgttatgcatctgttcattgctcagatgcataaggaataccagtaaagaacatatcacctactttttctttgcttttgagagactgctctattttttatcttgcctagtgttctgatccccttggttgtaaccataagaaaatctgatgagaattatgtaggccatctgccctaacttcacaaatgagagaaaaggagactttacctggggaacctcatctcttttctgatgaaaaatgatgagtaacccgtgattgcttgaaatacaatgttgaatgggtgaataacaaagggcatgtgagatttgtggggttgactgcatgcttcctaaaactcagcatatatggcacatcctttaaacagaaaaaggtcctctgctggttatctgccagggacatgcaagggaagaatgaccaaaatccatttcacta

SEQ ID NO: 245669 - DNA, 358 bp, Homo sapiens
aagccagacacatgagtcatgtcatgtgattcctttatatgatgtccagggagaaggagggggaattaactagaaaggagaaggagggagctttttgggtttatgggaattttctatatctcgatatagaaatctgtattttctatatcttgacataggattgtttacatgattgcataatttgtgaaagcaaaattgcacacttagaattgcatattttactatatataattagtacagattttattaaatatattaaatatatctactatctattttactatatataattactgtatataattgttttcctgcatataatttgctatatctattttttggacaagttaagtgtcta

SEQ ID NO: 245670 - DNA, 463 bp, Homo sapiens
agtagttatcagtagcaagtaaattattcttgcttttcaattaaatgttttaaacagaaataatgtggattcctttgaaatatttttatttcaaagagtgtgcttttgaatcctttgtgaatttagggttttaagtttttattctttgtacaaatatatttttttcttttgctctggcactccagaactccagcattgaaaacagaacatcgtgtctagagaaaccttacacatttattggccccaaaaatacataacacatctagccacataattgaaaataataaggccacgataaatgggatggccccagggtaaaacacccaaaggattcaattggtgtcactttgcatcaatgtccatgcatcatggtaattgaggtaacataaccaattaccacattttaattagagttctaagaactcgaggaaatttgcaatgatcagacagctcactttacaaa

SEQ ID NO: 245671 - DNA, 597 bp, Homo sapiens
ccataggattcttcctgaagccaagccaggatgattaggtatcgaggggggtcagataccaagggtgggggatttttgtacacagactcagcaggatttttgctcaaaccagtttctacaaggacagagagggaaacccaaggtcaggcctagtcagaaagaactcagagcctgactagaggcttggtcagaagagagtcttcgctaatacccatacaactggtataatgcaattcagagcaataaggtttttacttcaaatcttctatcttacaccaataccttccttctttcacattaaaaattctgcttccagccaggtgcggtggcttatgcctgtaatcccagaactttggcaggccgaggcaggcaaatcacttgaggtcaggagttcgagaccagtctgagcaacatggtgaaaccccaactccactaaaaatacaaaaattagccaggtgtggtggtgcatgtctgttatcccagctacttgggaggccgaggcacaagaatagcttgaacccgggaggcagaggtttcagtgagtagagatcacaccactccactctagcccgggcaacagagtgagactccatctca

SEQ ID NO: 245672 - DNA, 406 bp, Homo sapiens
ggggcactgcatgaggagctttttcaggtcacaggctgtctgggctttctccgcctgagtggatgtgtttgcaaagtggatgagtgacctttcattcctggacacccagagggccaatcagtctgttcttgctccactgagaaaactgaataaagtgcttgccacttgaaatgagagtaaggcataaataactataaaaataagcaagccccaaccccctcaaagctcaaacacagttgaagcactttgtgttttaaggcaccctgagtctggcagatgaagaagccttttctcgtgtttcctcctgcaatgtgaaaaatcacttcactggaaaagatctctgccaggccagaaagcctgtgcaccccagccgcatgctgcacccccgtcatgttctcttctctca

SEQ ID NO: 245673 - DNA, 486 bp, Homo sapiens
agtctcactctgtcacccaggcttgagtgcagtggcgcgatctcagctcactgcaacctctgcctcccaggttcaagtgattttcctgcctcagcctcctgagtagctgggattacaggcatgtgccaccacgcctggctaatttttgtatttttagtagagatggggtttcatcatgttggtcaggctggtcttgaactcctgacttcgtgatctgcccgcctcggcctcccaaagtgctgggattaccagtgtgagtcaccgcgcctggccccgagggtcttcgtttctaaccagctcccagatgacgcagccctgctggccccgagccacactgggtgcttaccggcaacgtgttgcactctgcaaccaaaggcaaggccgcatggcacccatccttccctcctgccccacatgctagtatgttccttcaatcaactctcactttgttccctaaatgtatttaaaggtaaattttaaattctt

SEQ ID NO: 245674 - DNA, 493 bp, Homo sapiens
attatgttttttttttcttataaagtttgttaaactggtgattgtatatttgcatcaaagaatttaggaaatgacaacagggaatggaaagttggaaccatttgaatgaacatagaggataacagctcatttaacaaaatctcggtcttcccatgttgtcattctcatgaccccagctaaagaaccatcttattgtgaaatgacttcccagaagaataacctatgtgggcatctaccttccagcaagctaatataaatacatatctgacgtatctgttatacaatatgacaagtaaagagatatgtcagatgaataaaaaaaaagaacagaaacaacttaagtttgctcagaaccctcttaatcatgaaattccaagattatcagaaagtcctataaatacatttttaatgattttttttaaaaaaatggtaatggggtgagcatattagtgctataagttgccctaaattttctgagagaagatgctttgct

SEQ ID NO: 245675 - DNA, 336 bp, Homo sapiens
acgggcatatcttcacataaaaactagacaaaagcattctcagaaatttctttgtgatgggtgcattcaactaagagagttgaaccttccttttgattgagcaatttgaaccctgtttttgtagaatctgcaagtgggtatttggagcgctctgaggccttcggttgaaacaggaataacttcacatgaaaactagacagaggcattctcagaaactttttgtgatgtgtgaattccactcaccaagttgaacccttcttttgatagagcagatttgaaacaatctttttgtagaatctgcaactggacattttgagagctttgagggctatgggg

SEQ ID NO: 245676 - DNA, 518 bp, Homo sapiens
gattggatgctaaacgtaaaactcagtgttctcaccctgctctctcttctaattcaacctgtttagaacttgcatgaaacaatacccttgcattccacatggatattacagaaacgttatagactcctgctacctgaaattttcttgtctttgcctcagtgagaaaaatgccatgactcttttgatctacctgcaataaatctgatggccaaggaatggatattcactgtcctatcaaatgagagccatctggaactttgtaattttgacgaacatctctattccctgcttctctgagtttgacttttttagatttcacatgtatgtgagaaaagacagtgtttgtctttctgtgcgtggcttacttcactaagcacaatgcccttcaggttcatccatgtcattgcaaatgggaagatttgcttccttttttaaggctgaataatattcctttgtgtatataggaatgatattcctatgcatgtgtgtatatgtatatcaacacttaagtttttttc

SEQ ID NO: 245677 - DNA, 415 bp, Homo sapiens
ctgtaactctctccccagcctccgcattcctttcccagaaggcttccagtgttccaagtttctcatgtatcctttgagagatgggttctgtgcacacaagccaatatacggctatagtcttttcttccccttctccccttctgctgtgcactttgattttcctgcctaactctctatcctggaggtggcgggagaccagctcatgaacttcctttattctggttgtcgctgcgcctttatcagatgccagtgtgggctatactgcaatttagtatcgatgccttattgacagacatggttgtttctaatatttagggcattaccttaaaactctcctgcctcaatttcctcatctataaagaatgcagaacagagcctggcacaagacattcaataaatattgaagagtaatata

SEQ ID NO: 245678 - DNA, 326 bp, Homo sapiens
ccaataaactctttccttctttcccatattctctcctgtatgtattcatgaacatatctaatttttaacacagctataatcaaagcagggtattatttaaatttaccaaaatcatgttctactaagagtcttcaaatttttaatgtaatgtattttttgtaatattccatttagtggatgtttcagtttcctgaactaacacctgaatatactttgagtgtttcaattaaaataatgcttcagtgttctgcttcagataacgacaagttaacatatattaaaataaacttgctacacataacaattatacattctggacaaaatat

SEQ ID NO: 245679 - DNA, 370 bp, Homo sapiens
gcgtgcttgatggacatgaacgcgctgctggaccgattccacaactacatcctcccgcacctgcggggcgaggaccgcgtctgccactgcaactgtggccggcaccatatccactacgtgatcccgtacgacggggaccagtcggtggtggacgcctccgagaactactttgtgacggacagtgtgaccaagcaggagatcgacctcatgctggggctgctgctgggcttttgcatcagctggttcctggtgtggatggacggcgtcctgcactgcgccgtgcgcgcctggagagccggacggcgctacgatggctcgtggacctggctgcccaagctgtgcagcctgcgggagctgggccggcggccgc

SEQ ID NO: 245680 - DNA, 429 bp, Homo sapiens
gaaaattaagctttgaggtcatagtgctaaatagccagggcctatgatttacttgacaaaaattgttttttatacatttgtcagtttctaattgggtagttggaaaatgccaggaaactattatttctgttcattttttgtgctatatggaatctgttatactgaggggatgtactttataagttattagtacaaggattaatcactgatagtccccttctctcgtcattcttgcactctgtggggtctagtgatccatccatacaaggagaagaaacggtggctggagggataatgagttccctctcctctttcctacacactagaagtagggtcaggaaagccctgcatgcttcttccttccctgtcccttccctgccccttgtggagggtcatcatgaaacagttacatgcaggtgctataaaaat

SEQ ID NO: 245681 - DNA, 318 bp, Homo sapiens
tgggcgacaagagcgaaactccatctcaaaacaacaacaacagcagcaacaacaacaaacaacaaatgagtgcttcctgagccaggtgacaagactcccagaatttgagtgctaggtagtctttatatggattctgtcctccttgtgccctgggtaccaacagactatggagaactgatactggagttggaataactgtatcatttttaatttctttcatacgttttgctcacagtggactcataacttgaaactcatttatccatgtgaaataaataggcaacagtaagttgttcccattttgtgggtagcaaagtg

SEQ ID NO: 245682 - DNA, 320 bp, Homo sapiens
ttgggttacattgccacgctaacgcagtggggcccaactaatctcttaggaggcaagtttcttaaatacagtgttagaccaactggaaaattaactagggtgttgtctggaaagatctcattttcatcctaaaacttgccaagtagaaatgaaagaggtggccaacaactcatttttcaaagcgtgtcagctgttgctgtactttttcatgtaaattatctttcccagggaatgaagaattgaaagggtttcttaggcattaaaaacaaaacagaacaaaacaaaaaatgctgagacattaaacaagacagtggttagct

SEQ ID NO: 245683 - DNA, 491 bp, Homo sapiens
cccttacacttatggccaattaatttttgacagaagcagcaagacagtttaacagagaaagaatagtcttttcaacaaatggtcctagcaaaactggatagccacatgcaaaagaatgaagttggatccttagctcacaccatatacataaattaacacaaaatgagtcaaatacctacctaaatgtaagagctaaaactataaaactcttttaagaaaacacaggagtaaaccttcatgactttggatttgacaaaggactcttgatatgacaccaaaagcatcagcaacatggtgaaaccccgtctatactaaaatacaaaaagtagctgtgtgtggtgcatgcgcctgtagtcccagctactcaggaggctgaggcaggagaatcacttgaacccagaaggcggaggttgcagtgagctgagatcatgccactgcactccagcatggtgacaagcaagactccgtccccccacatacacaaaaaaaaa

SEQ ID NO: 245684 - DNA, 633 bp, Homo sapiens
  misc_feature (8)..(8): n is a, c, g, or t
ggtaagancaatggcttgtgttgggcagaccaagggcatggaagctctccagcaaccagcacagtgggacagcacaggcttctagcaggcatggtttcagcctcaattgtttacaagccttgggatctggaacaattgatttgagccctacaacattagaatggttccttttctcagggcctaatatggggtcagagaaggcactcagcaaggagggttttttcagaggcccaggaagaactagttcagaggccgagcctcctgggagaatgtctcccagctcacaaaaatgactactcactggcaagtaacactaagtacagaaagaacgtcatcagttggttggtgttcttgctttctctccgtgaacaattaagagggcgcagaggtgagatggggtggggtgggataaagggaaggcctggaagaagggacagaagggctgcaaataatcacccgggagcccagtgagactcagagaaagattctaacctaaaatactcttctgctgtcagctattctgtaattaacatccacagatgaaaacatgaagtgtattaaaaatcctttgtgttttttttcaattttgactgatggacataatataatgacttgataattaaaaaaaaagaa

SEQ ID NO: 245685 - DNA, 491 bp, Homo sapiens
tacagaaggaacgctaattttcaataccttaaagaggccaaatcattcccacagcattagtggcagagggggtatttgaacccaggcagaatgactcgaactccctggtaattagccatggtggagaatgtctcccagctcacaaaaatgactactcactggcaagtaacactaagtacagaaagaacgtcatcagttggttggtgttcttgctttctctccgtgaacaattaagagggcgcagaggtgagatggggtggggtgggataaagggaaggcctggaagaagggacagaagggctgcaaataatcacccgggagcccagtgagactcagagaaagattctaacctaaaatactcttctgctgtcagctattctgtaattaacatccacagatgaaaacatgaagtgtattaaaaatcctttgtgttttttttcaattttgactgatggacataatataatgacttgataattaaaaaaaaagaa

SEQ ID NO: 245686 - DNA, 556 bp, Homo sapiens
tgatggtttctcagatttttcttgtttttgataatcttgacagttcgaggagtatttgtcaggcattttgtcaaatgttcttcaactggggtctctggtggttttctcatgattagactgggaatgtgcttttgggaggaagaccacagaggtgatgtgccagtctcagaacatcgtactaagaaaaggttctgccaacttgacttaccactgttgctggtgactttgagcccccggctgaggttactcctttgtaaagttactctttttttctcctttccatgctgtatgttttagaaggaagtcactatgctgctccaagcaactcaagtttgatgaatggggagttccgccccacctccttgagggcagagtagctacataaattacttggaatttctcaaggagatttgtctgtactcccagtttattatataaataaatgatttatttatattacagggacccagggatctttactgtatgctttgggttataatccaatggtactttactttgtggctcaagtatactacttttaaattggaaaaaaaaa

SEQ ID NO: 245687 - DNA, 642 bp, Homo sapiens
tattgtattcttgggatgttttaacaaatcacctcaacactcagtggggtatggttcttctggtctcagtggtggttctcctgatctcagttgggctgtcatgtctggagattggctgcctctaagctggtctaggattatctcaactgagaggaaagtcatttggactcgcctccacgtggtctctcatcctccagtagagagcaaatggcagtgacagggttccaagacagagaagccaaacttagggtcacctctgctaccttcttttggccaaagcaggtcgcatgacctgcccatattcaaggtatggacaagtcatctcaacctcttgggagaagcagcagggcacattgccaagggcaagcatacagcaggccattgcttgggaccatcagtacagtcggtctacaataagcataataagacaagccccaagaagaacaaaagaatcacacacaatccctgacaggtaggaggtaagtaagaaatcccagctgccgttactcttgccatgagtgaaactgtatagctaagttatacaccaagggttttgctggcaattgatttatcttgtagcctctctgcttggacactgcactatttttatattggagaagggaggagtaactgttaccggcc

SEQ ID NO: 245688 - DNA, 401 bp, Homo sapiens
tgcatgctctgtaatcccagctactcaggaggctgaggcaggaaaatcacttgaacccaggaggcggaggttgcgctgagctgagatcgcaccactgcactccagcctgggcgatagagccagactcggtctcaaaaaaacaaaaaaagtgtactgagcaccaactctaggtcatctctgtgacctgtgcttggatattcacagcatgtgtttaaattctagaatgtgggcagtagggttactaaaaacccacaacatgaacaagtcagtaataattagatcccatcgctatggtgactaaggacggtcatgcggtgtctataaaagcatcataattattataccatttacaagattgcccatacagagctttctattgccccatgttgtcttacaaggaa

SEQ ID NO: 245689 - DNA, 259 bp, Homo sapiens
atttatctacccatttacctgctaatagacatttatattattttctatattatttaatatatatatttaatatattatttaatatattatttttatattaaaaataaaaaatgatatgagcatttgtatccaaaaatttgggtctcaaatgtattaattctaggagtagaatatctgagtcatatggtaggtgaatgtttaatgttttataaattgaccacactgttttccaaaacggtttacattctcagccgaagtg

SEQ ID NO: 245690 - DNA, 405 bp, Homo sapiens
aaaatccccagcaagctgacacaagttagctatagaaactggggagaaagggatggggtgaggtggattgggtgggaggctgccttaggtgggagctgccaggccattttttgtgagagctcagaaccagaatccatcatgttctcattggcccttggttgaccatttcgtttagttagcaaactaatggcttaatattcacaaaatgcacgtgatgtcctagttaaccaggacaccagagcaccaggagaacccaggtcaaatgggggactggaccacccacttgcatgccttcctttctgtataaaattttgatttgtttcctcatgccttttgttttggtcttgtttctgtgtgcctgagctgctgctgatgaagggttggaacagggcaggccagagctag

SEQ ID NO: 245691 - DNA, 578 bp, Homo sapiens
tcgggctggtggccagcggggtctgggcgtggttttacccagctcctttgcgaagctgctgtcctttcctcaacgttaccacccggctgggcagcctaccctcgcagcaacaggtgtgcaccttccaagcttgcaacagaccacattcagaagcttgatttcttgttgttctgggaatatctggatcagagatttctccaagccactctccccgtcatctcctccacccccaggacccaactcctgcccctcccaccctagcccctgttctccctgcccacctcctaccccactggagtggcctttcatcaaacctaaaccaaagaaaccaacagaccttgctgtcaccactactccgggacctggaagttaaagcgagggagagacggtgaaacacagaaagcagaacgccttctgttcttccacaacacagggtttgtggacgtggccactataagaactcgcactgcgtgctgattatactcctcagcacaattcatttcttaaactttttagaataatttaaaatttacaaaaagttgcaaaaataaaaaccagtaaacttttaaacttcatct

SEQ ID NO: 245692 - DNA, 465 bp, Homo sapiens
cgcgcttaccgggagcccgggttgggagagggctccccaggaggggtgtgagctccgaacgagaaagaacgccaccgcctcgtggggtctcttcctaatgtgcagattccaaatctctacaatgctgcaaaagagcagcaacaggtgtgcaccttccaagcttgcaacagaccacattcagaagcttgatttcttgttgttctgggaatatctggatcagagaccttgctgtcaccactactccgggacctggaagttaaagcgagggagagacggtgaaacacagaaagcagaacgccttctgttcttccacaacacagggtttgtggacgtggccactataagaactcgcactgcgtgctgattatactcctcagcacaattcatttcttaaactttttagaataatttaaaatttacaaaaagttgcaaaaataaaaaccagtaaacttttaaacttcatct

SEQ ID NO: 245693 - DNA, 384 bp, Homo sapiens
  misc_feature (15)..(15): n is a, c, g, or t
  misc_feature (32)..(32): n is a, c, g, or t
cccaagccacttttnccccgtattttttttcnaccacccagccaaaaatttttgggccctccacacacccctgttctccctgcccacctcctaccccactggagtggcctttcatcaaacctaaaccaaagaaaccaacagaccttgctgtcaccactactccgggacctggaagttaaagcgagggagagacggtgaaacacagaaagcagaacgccttctgttcttccacaacacagggtttgtggacgtggccactataagaactcgcactgcgtgctgattatactcctcagcacaattcatttcttaaactttttagaataatttaaaatttacaaaaagttgcaaaaataaaaaccagtaaacttttaaacttcatct

SEQ ID NO: 245694 - DNA, 363 bp, Homo sapiens
cttcacaggtcagtgaccaaaacctctaaaaattcacaaagaagctcatgaggaggtccgaggctgcccaaaaggcatttggtctctggcccaggagctcaggacagacctaaggtttgagtgaaatctgggctggagtaaaccttagcaacctgtcattacctacagggcaataagctggctcccttccagtggcttctgttttgtatgttcatctctgcccagagctctgtcatctagtgttgcactgttcagtatgggaaccatgagccaaaactgactgctgagtatttgaaatgggactaacactgagatgtgctgtcgatgtgaaatacacaccagatttcaaagacttagtatgga

SEQ ID NO: 245695 - DNA, 591 bp, Homo sapiens
attctgtttgctaatactttccttttataaattaacatgcagaagtcatattaatctgcagccttccttttttgtacaatctttgtcaagttttggtattatttcctaaaaaattcagaagttttccattttctaaaatgtataacagttttaaaatagtattgatattatcagctcttgtatgatttcgtagaattcccctataaaaccttgtgacctgccgttttttgtttggtttggtttggtttgctaggtagctgttttaaaacttccctcatttattttgtgaaaatcagtctaataatttatcgtacaattaaaaataactaaaaatataattggattgttggtaacataaagaaaggataaatgcttgaggtaatggataccccatttaccctgatctgattattatgcattatatgcttgtatcaaaagctcgtgtaacccatagatatatacatctagtatgtacccataaaaatttttttttaattaaaaaaaaaagtctgttcaggctgtttaggttcacttttggtagctcacattttactggctatcgttattatgatttttttttttttttttttg

SEQ ID NO: 245696 - DNA, 373 bp, Homo sapiens
ggcaacagagaatggtgtcctggctcagatctccagcaagcctccacaatgatggtccagtatctgaagccatggccaaggcagcaggagctttgggtgcacatgggggcttcccccactttgaagtgagtcatcacatctgtattagaccctagctgttgcttaggcaaaaatgatgatttagaagaagatggagagaagaggaaagttaatttaaaagtacttatattcggccgggtgtcgtggctcatgcctgtaatcccagcactttgggaggctgaggcaggcggatcatgaggtcaggagatggagaccatcctggctaacacggtgaaatcttgtctctattaaaaatacaaaaaattagctgggc

SEQ ID NO: 245697 - DNA, 467 bp, Homo sapiens
ctgtcttcacatcctcacctttataatgggctgcttaatagctgctgggcatgaatagcaatcataaaacataaagtgctgtacaagtattgattagtaattaatttctcattttattcatcaaagctacttaattgagaaactttttccccacttatctaagcttacacacccagaaaatgagggaagcgtgtgcgtgtgtgtgtgtgtgagagagagagagagagagatctaagtgtgtatatggcagtaggggctggatttagggcctctggtttttttctctctttcatccactcacctgatggccgtctatctctatgagtcatgcaaatggctttggggcagtgatgtcaaggacatcaataacattgttataagaaggactgatgagtctgcatacttgcaactgtctaattggttcatctagaaaccaaaagactgggtcccaaatagcaacagttcaa

SEQ ID NO: 245698 - DNA, 362 bp, Homo sapiens
tgagcagaaagtggcctcgtgtcttgctgggacctgagcccttgatgctgtccacacaggtgaccctcaggagtgcagagcagggccaagaagagtggtgtgtcaagaaggtttcaggcacagctgagcagcagtaacatcgacacagagacctgaagactgacaacagactctggcagtaagatacagcaggctctgaaagaaactgaagtattttactatcaaacagatttctttgacatattttgaaatagctctgcaaagctgtctcttatgaggaaaatctacattctgtgaagaatccccttccctttctagctcttttctcctgagataattaactagagtctgataagaaacat

SEQ ID NO: 245699 - DNA, 455 bp, Homo sapiens
gatgacactgatgttactcaatttttctagggtttctgaggaacagcgatcctgctctgggctgggtccctgtgtaacaagattacattgctgagtgagatatttaaacataagacatttcctgtaagtgtcatatgcagaaaaggaggttaaggaactttatttacagtgtcttggctggatgctgtggctggcggctgtaaacccagcactttgcgaggccaaggcgtgaggatcacttgaggtcaggagtttgagaccagcctgaacaacatggtgaaactccgtctgtaccaaaaataaaaaaattaactgaggtggtggcatgctcctgtagtctcagctacttgggaggctgaggcagtagattcgcttgaatccaggaggcagagattgtagtgagctgagattgtgccactgtactccagtctgggcaacacagtgagactccatct

SEQ ID NO: 245700 - DNA, 822 bp, Homo sapiens
gggcacacatgtgctttatgccgttgctaaaaatagaaatctatatgcctatgctactttctgtgggaattgttttttctttgttatttctatactttctcaaactggttattgaccacttacattcttcagatattaagaaaactaggccaggtatggtagcttatgcctgtaatcccagcactttaggaggctgagatgggtggattgcttgaggccaggagtttgagaccagcctggccaaccctgtctattttttaataaaaatttacaaagaaaggaaaactagtgcctgattattttttcagccttgtttctgacacttagtgatctcttcccttcttccaatatattcttcatccttcattacttgccacatgtgttgatttctcaacccaagcctcaacctctggctccatattttctacctcatcagtttaaacccatttatgcctagtgttccattattggaacgctaagcatgtgggagtttatatcctgctcaaggttatcgcccaggtctgattgcaaaaattaaaaaaagaaataatcactgcactatgttcaaagcttgttgctacggcactatgagagattacgttatgtagcctttgctatcaaggagcccccaatttttttattttttttttaattaatttttttgagacggcattttgctcttgttggccaggctggagtgcaatggtgcaatctcggctcactgcaacctccacttcccaggctaaagggattctcctgcctcagcactttgggaggctgaagcgggcggatcacaaggtcaggagatcgagaccatcctgg

SEQ ID NO: 245701 - DNA, 976 bp, Homo sapiens
  misc_feature (609)..(609): n is a, c, g, or t
  misc_feature (621)..(622): n is a, c, g, or t
  misc_feature (628)..(628): n is a, c, g, or t
  misc_feature (632)..(632): n is a, c, g, or t
  misc_feature (636)..(636): n is a, c, g, or t
  misc_feature (970)..(970): n is a, c, g, or t
gaggctgaggcaggagaatcgcttgaacctgggaggcagaggttgcggtgagcgagatcacaactccagcctgggccacaagagtgaaactcagtctcaaaaataataataataaataaaaaatagaacattacagatccaattgactcttctttgtattgctcctttttttttttttttttagttttatttaaaaattttttttagaggctgagtctcacttggtggcctgggctggagtgcagtggcgcagtcatagctcactgcagcttcacactcctgagctcgagcaatcttcctgcttcagcttcctgagtagcttggactagcagaggtgtgccaccacatctggctaattaaaaaaaagtttttagagataggatctctctgtgttgctcaggttagtctcaacacctggcctcaagtgatcctcccacctcagcctcctgagtagctgtggttgtaggtggcagccaccacacctggcagtatcccttcttgagaccactgacctttcccagaagtaatcactgtcctgaagttggtatagattctttctgtctacatctatgcatgtttatgctcaaaaacaatatattgctttgattntcacttaaatannttgaantagnctgngtaataggagcaataatctgtagtacttagctgttggattcacatattatttatgagacatagcgtcattatttcgatgcatatagcaggctgcatacatttgtatagctgatgaagtccaaatagcattactcctttcattagcatcctttaggtaattgtacaccgtgcagaagtcctatggcctctttagaactgcttaacttaacaggcctttattggcggaggggattcctctttctgagtgtcccctgtctaaaaatgccccaaatagccctttttcgtttttgggcttaacgtaaattttttcataagtggtatatttctttttaangaaaag

SEQ ID NO: 245702 - DNA, 789 bp, Homo sapiens
gaggctgaggcaggagaatcgcttgaacctgggaggcagaggttgcggtgagcgagatcacaactccagcctgggccacaagagtgaaactcagtctcaaaaataataataataaataaaaaatagaacattacagatccaattgactcttctttgtattgctcctttttttttttttttttagttttatttaaaaattttttttagaggctgagtctcacttggtggcctgggctggagtgcagtggcgcagtcatagctcactgcagcttcacactcctgagctcgagcaatcttcctgcttcagcttcctgagtagcttggactagcagaggtgtgccaccacatctggctaattaaaaaaaagtttttagagataggatctctctgtgttgctcaggttagtctcaacacctggcctcaagtgatcctcccacctcagcctcctgagtagctgtggttgtaggtggcagccaccacacctggcagtatcccttcttgagaccactgacctttcccagaagtaatcactgtcctgaagttggtatagattctttctgtctacatctatgcatgtttatgctcaaaaacaatatattgctttgtgtgtctttaaaatgtatataatggttttatgctatatctttctttctgcaacctgcatttttcacttaaaataattttgaaatttagtcctgtggatatatagtgagccaattaattctgcttagctactctgtagtctgttttgtgaatataccacaatcatctactttcttattagaggac

SEQ ID NO: 245703 - DNA, 447 bp, Homo sapiens
ttctgattcatctaataattgtaagatgtattcctctgtcattttcttctcttggccatcgtgggtggaaaatgaaaatttttgaattcttaggtggagtcagtgaaagctaacattagactacgaagatggtattctagtctttcaaaaatattcttaaaaggccgggcacggttgctcacgcctgtaatcccagcactttgggaggccgaggtgggcgggtcacctgaggtcaggagttcaagaccagcctcaacatggagaaaccccgtctttattaaaaatccaaaaaaaaattagccaggcatggtggtgcatgcctgtaatcctagctactcgggaggctgaggcaggaaaattgcttgaacctgggaaacggaggttgcggtgagccaaaatggcgccattgcactccagcctgggcaacaagagcgaaactcagtctcc

SEQ ID NO: 245704 - DNA, 523 bp, Homo sapiens
ttcctttttttaaattatgaaatagcatccaagcatctttgtggtgatatctatacagcatcacaatagaaagcaatttggaactcttctctagaccacaggtttccatctacattactaaagtgttgactacgcaaacctcagggcaccttggcaagacttgggatggacataaagagctttaccatttacaccagaatcccatgaaaatattatcatctctgtgtgccaagatgagacatgtccaagtatctctgccctgaacttcacaggatccattataaagcttcaaaataaattgttcagcttaacagcatagtcaacttttaatgatgcagttatttgattcttttaatgactgaattggttctgctgcattgtgatttattccttcagtagcaatatttccattaaaggtaatgttttaatgactcaaactgttctgtgataatcattgagttaacttcgaatttcactagaagcatcttaagttcataaccatatcaagggattatgtcgacgc

SEQ ID NO: 245705 - DNA, 473 bp, Homo sapiens
tactattgagttgtttgagcttcttacatactctggttatcaatcccttgtcaaagggatactctgcacatatttctcccatgctatggactccaacttctctttggggttgtttcctttgctgtgcagaatctttagcttgacgtaatctcatttaccaagttttgcttttgctgcctctgcttttgaaatcttatgcaaaaagtctttgctttggcctggagcatctccccaaagttttcttctagtacttttatagtttcaggtcttatatttaagtctgtaatccatttgatttgatttttatatatggtgagagatagggatctagtttcatttttctacaaatggttacccaattttcctagcaccttcattgaagagactcctttcctcattgtatgttcttggtggctttgtcaaaaatgagttggctataaatgtgcagattcatatctgggctttctattctg

SEQ ID NO: 245706 - DNA, 236 bp, Homo sapiens
ccttcctcctctttctcctctctttttgttcgtttactcttttctttttctcttctcctctccctccccacatccttccctctcctcaaagcttttcagtgtctatttgactactagagcaatgcacggtggcttacacctgcaatcccagcactttgggaggctgagacaggcagattgcttgagcccaggaggccaagaccagcctgggtaacatagggagaccccatctctaa

SEQ ID NO: 245707 - DNA, 222 bp, Homo sapiens
aaagaagagagggcatctccatgcttgtgggacccaaaacctatctctggccctacaaaagttttcctaattgtctgatctttagtgcattcaggttatggcacctggagaggaatgccctttatcttttgaaggatgggatttcccatctcaaccctggattcctcaccttcagaacgagccctgccactgtctccaataaaatgttttctgcagcatcga

SEQ ID NO: 245708 - DNA, 391 bp, Homo sapiens
tacttagatgcttattagaaaaaaattgtgtttgagctgtgaaggggattgtgagtattggtccgaagaattaatgccagaggataacttctcaatgagaaatttataagccagagattcagacttttgcgtttctgtaataatcttttatagtctgcttcatgtagaataggggatggcaaacatttgctggaaaggaccagatagtacatattttagactttaaggatcatatagtccctgtcacaactattcagccctgccgttgtagctcgaaagcagccataggcagtacgtaaatgagtgcagttatattctaataaaactttacagaatagtcagcaggctagatttggcctgtgggcagtagtttgctcaacttctgatgtag

SEQ ID NO: 245709 - DNA, 521 bp, Homo sapiens
ttgagacaagagtctcactctgtcaccaggctggagtgcagtggcacgatctcagctcactgcaacctctgcctcctgggttcaaccagcctcagcctcccaagtagctgagactacaggtgtgcaccaccacatccagctaatttttgtatttttagtagagatggggtttcaccatgttggccaggatggtctcgatctcttgacctcgtgatccgcctgccttggcctcccaaagtgctggggattacaggcgtgagccaccgtgcctggccagaagacatattttctaatactcagaggaaaaacaagctctcccttcttcttggacttataatgtggataatggtgtcagtaataaagaaatatactaacaggtgtcaatggttctgataactggcatatgttataaaatgtcctaactggcttcagaataactggagaccttggaggaaggagggcaggagtgaggatcagaagacaagatgggacacccacacagatcacaaagttaactgcct

SEQ ID NO: 245710 - DNA, 418 bp, Homo sapiens
cagcctcccaaagtgctgggattacaggaggaagctgcttcgcccagcccttgatctttttaaatttaggcaaatatagtcaaattaacacagaaatagagaacagatagatagaataattttcagcttaaaaatcacatttgtggctgggcgtggtggctcacgcctgtaatcccagcactttgggagtccaaggtgggtggatcacctaaggtcagagctaccagcctggccaacatggtgaactctattaaaaatacaaaaattagccaggcgtggtggtgggtgcctgtaatcccagctacttgggaggctggggcaggagaatcgcttgaagccaggaggtggaggttgcagtgagcggatattgcgccattgcactccagcctgagcaacaaaagcgaaattccatctcaaa

SEQ ID NO: 245711 - DNA, 160 bp, Homo sapiens
aagctttttttttttggcaaacccaaaccacaatttccttctcttctgaatccatgtctttagttggagatctattggaacatttttaagatcatactttccatcatgactatgcatcaagttgactgtgtctttcataatgcctctttaaaagaatgct

SEQ ID NO: 245712 - DNA, 395 bp, Homo sapiens
atagatatatttatttgttacgaattgtcccttcatcaggaaaatgattcctttttccctatttaaggtatttgttacgaattctagttttatattatctactatatcttacccttaacttttctgagtcattttcagtgtatcttttatagaaggctatggttggaatttttttaaaacctgagtatcattgtcttctgatacagaatctgaaaaccttttaaaaattagtgaggcgaaaaaaattagccaggcatggtgacgggtgcctatagtcccagctactcgggaggctgaggcaggagaatggcacgaacccagaagccagagcttgcagtgagccgagatcgcgccactgcactccagcctgggcgacagagtgagactccggctca

SEQ ID NO: 245713 - DNA, 429 bp, Homo sapiens
  misc_feature (48)..(48): n is a, c, g, or t
aattaattagtacaaacaagggtgagggggcagggaacaccatactcnggtacttaatgtctgaaattatcagggaatttaacacattttcccataggtttatttcttgtgtaagaagtcagataaattatttccatttcaagtatttattattcagattatttaaagcaaagctttcacaaagccttttgtcagctttcctataatcctcaaataatttttcctggctggacgctttggcttactcctgtaatcctggcactttgggaggcagaagcaggaggatcacttgagcccaagagttctaggctgcagtgagctatgatcacaccactgcacccggcccttaaatctttacctgaaatattcctagatggggttaacatagcaccaggagaaccagactaaggatagtagaatcatccatgg

SEQ ID NO: 245714 - DNA, 301 bp, Homo sapiens
actttactgttctacctatgtttgttatagaaaaaagtagaaaacataaaaaattgaaatcaccaataatcctactgttcagaaataacaacttggaacatatcaagaaggaaaaaaaaaaaaagaaaactacagaaacagacttgaagatgacccaaatgttggaattagcaaacaaagactttaaataaactattctatacatgttcaacgacttgaggaagtggctataatgtgctaaaaatagaatactttaacagacaaattgaaaccttagaacaccaaatggtgattgctgaac

SEQ ID NO: 245715 - DNA, 471 bp, Homo sapiens
ctttcaaacatatgatcttgcctccacttcctgtgaaattaacctcctttctttaaaaatacaatgatttaaagaaaattgccaccataaacaaagctaaaagactaggggaaaatatttgctgcatatgtagtcaacaggattaccatctataatatataaagaggtcctataaattgaaaatttggccaggtgtggttgttcatacctgtaatcccagcactttgggaggccaaggcaggagaatcactcgagctgaggagtttgagaccagccctggcaacacagggagaccccatctctacaaaaattaaaaattagctggacatgatggtgtgcctgtagtcccagctgcttgggaggctgaggtggaaggaccacttgagtctgggaggtcaaggctgcagggaactatggtcacaccactgcactccagcctaggtgacagagcaaaaccctatctcaaaaaaa

SEQ ID NO: 245716 - DNA, 431 bp, Homo sapiens
agcagattaaatgagttaatatatgaaaaccacttaaggcagagcctggtatacagtaagtgctgagtacatgttagcgactagcttatttatacataaactttaaataatattggtttttctcttctgtggcagctgtaagggtgaaacaataatacttatgaaaagcttaatccagtgccagaaggatagtggatttttaatacatgatgcatagtattaacattaaagcctatcccactcccactaagaagagggttcaggtttctttcctcccaaatcaaagaagtgaattaaaaaatacagatatggccaggtgctcatgcctgtaatcccagtacttagaggggccgaggaagacagatcacctgaggtcgggagttcaagaccaccctggccaacacggtgaaaccccatctctactaaaaata

SEQ ID NO: 245717 - DNA, 448 bp, Homo sapiens
ctcccgcctcagcctcccaagtagctgggactacaggcgcccaccactgcgcccggcaaattttttgtatttttagtagagacggggtttcaccatgttagccaggatggtctccatctcctcaccttgtgatcctcctgcctcggcctcccaaagtgctaggatcacaggcgtgagccactgcgtagtaacgcagaatttgttcttttcaataatactaaatggtttgggaattacgatatcagaaaagtgaaatcgttttcctgaagacagaaaaaaacagaaagcattatttagctttagaaaaatgttctctacagacaatgcaatgttttaaataacaaaactgtgagatgaaaaaaagcccagtcatccacttcaggacgtgcgatgcctcactggagaatgcacttccacgaaggggctgggattgttcgagaccattcat

SEQ ID NO: 245718 - DNA, 520 bp, Homo sapiens
tatttcccccaaaagagggtgttgaggctttaacccccagtacctcaggatcaccttatatggagacagtgtcgttacaaaagtaatcaagttcaaatgaagccagtgggtgggccctaatccagtatgactggagtccttataaaaagggtaaattgggacacagacacacacacagggagcagcaatgtgaagatgaaggcggagatcagggtgatgtttgtacgtgccaatgactgccagaaacctccagaagccaggggagaggcctggaagattctcacaaccctgtcgacaccttgccttggatgtctagcctccagaactgtcagacaggaatttctgtgcttgagggaccctatttgtgataagttctgggagtccaagcagactaatacaactgtcttcagagtttcaggcatccagacctgatgctgttcctcccccatttgaaacccttcagtggctccttcactctcaaggaaaaaaaaatatccagacttcttgtcctggtgttcct

SEQ ID NO: 245719 - DNA, 361 bp, Homo sapiens
cagaactcagaaagggaaggataaatattgcctgacaggtccattctaactttgatccgaaattctgcattcttctgggagacttgtagtaaatgatttccacacttctcctcggctgttagtccttgctgtccaccaccctgtactttagaaacaaaagacaggagtaccaggagaagacagccttaaaactcttctttaaaggattcagtaactggggtagcagatgtcaattgccctccagatatcactgtcctagatatagagtgagctgagtactctgaaagctatgggcagccccaaatcttggacccagagtatattcccagtcagcattccaggggtctgaatttcccatcct

SEQ ID NO: 245720 - DNA, 240 bp, Homo sapiens
attggtcactctggagtttagtgcttccttctctgaaacccaagcaggcccaatctcaggaaggtttgggacggtcccttgaaggagttcccctgccaccattcttggggtgactccagctgctgagtttggccggagagaaaaccaatctacacgtacaacctttccacctttatcagtagtggggaatgttcaacgccctagctcgacgcggcccgaaaattttagtagtagtaggcg

SEQ ID NO: 245721 - DNA, 479 bp, Homo sapiens
accttgacactgctccccagcattttgaggggctggagattgtcctcttcacacaggccattgcatgggctctggttaacccaagtgtgttttctagtttaaacattgtctctgggaaaaaaagcacatgagcctccccactccttcccttggaaaaacaagatcagaaataatactttctcttttaagcatggtaggcggtttctgatagtacagtgtgagccagcaagactaagaactaaagggaagagtttcagagagattcattgttttttccttctcatctttcacgtcggttttgccaccaagaaaaagaagaatccccctgctgtggctaaatgcgactgtttactttgcttacagacgttgtaaattttttatgtgccgcggttgttttaagagcttttaaagcattttggatgattatataagtcacaaaacagctacagtaaaaatgaatttatttttaaacggtgtca

SEQ ID NO: 245722 - DNA, 467 bp, Homo sapiens
gtttataatatcatggaactagtttttcgggtggagaaacagacattaagcagatagctatgtatttaagtatttagtgttaataagtcctacaagtaaacaaggggtgctaaacagcacatacatggaaattagagttagtgtgttagagaaaactagtctgaaaaatataagtttgagattaaaagaataaataaagaataaatataaaaccgagatgtttggcattaagagagagtgtaaattgtcaggaagctcagaattctattaagcactcaaaataatgaccttatacaataaatttctttccatctaaatgttttctaatctaaatgtttcttctttaatcttcattttaactcgcctatagcttttgttgagatgtaagacctttaaaagacagtcattataagtgtgatttcccaaaaacatacttaagaagcaaaaatcatttgttctcacaattg

SEQ ID NO: 245723 - DNA, 451 bp, Homo sapiens
ctgtgtcaggatgctgttgggtagctggctctgtggacaagtggctgtgagtggaactctctctgagagtagctggaaaaaacccaggctccagctccctgaggagacagcgggaagtctcctgactttgtgggccccagctttctgtaggagagggtattaattctgtctctacctgtgagcagcgagggagggtatgtgccagcaccgtgtacagtacagagctgcatcgtgcaaggagtgtgcctccagttgccaggctccacactgcgggctcagcttgcgtggtagcatctccatcttcatcgccagctcctctgaattttcctttgaaatacttattattattattatttgaaatggaatctcactctgttgcccaggcagaggttgcagtgagccgagaccatgccactgtactccagcctggcgacagagcgagactgtctca

SEQ ID NO: 245724 - DNA, 338 bp, Homo sapiens
ctgtgtcaggatgctgttgggtagctggctctgtggacaagtggctgtgagtggaactctctctgagagtagctggaaaaaacccaggctccagctccctgaggagacagcgggaagtctcctgactttgtgggccccagctttctgtaggagagggtattaattctgtctctacctgtgagcagcgagggagggtatgtgccagcaccgtgtacagtacagagctgcatcgtgcaaggagtgtgcctccagttgccaggctccacactgcgggctcagcttgcgtggtagcatctccatcttcatcgccagcctggcgacagagcgagactgtctca

SEQ ID NO: 245725 - DNA, 296 bp, Homo sapiens
gactaagaaatgacccaaatgttaaagaattatcagataggactttatcatagctataactgataaaagatctgttgggaaacgtggacaacttgcatgaacagatgggaaattttagcagagaggtggaaatgattttcaaaaaatcaagtggaaatgctagaaatgtttaaaagaaacccatgatatcaaagatgaattccttttacatacttaaagggaaggtggacatcattgttgaggaaagaactgtgaacttgaagataggtcaatgattaaaacaggacaaaaagaaa

SEQ ID NO: 245726 - DNA, 516 bp, Homo sapiens
taacaaattagttgggcatggtggtacccgcctgtagtccctgctacccaagaggctgagatggaaaaattgtttgaggcaggaggttgaggctgcagtgaaccatgatcatactactgcactccatcctaggcgacagagtgagaccctgattcttgaaaaaaagaaaggaagaaagaaaataaacattctcctttaattgttagttctctccttcacactgttaaaaccctgaatgggccaggcatggtggctgacgcctgcaatcccagcactttgggaggccaaggcgggtggatcatttgaggtcaggagtttgagaccaggctggccaacatggtaagacccccatctctactaaaaatacaaaaattagctgggcatggtgccgcatgcctgtaatctcagctatttgggaggctgaggtaggagaatttctcgaacctgggaggcggaggttgcagtgagccgagatcacaccactgcactccagcctggatgacagtgagatatgtc

SEQ ID NO: 245727 - DNA, 420 bp, Homo sapiens
tcacaggataaatgtgcgtaacacacataatgtagtgcctggcccatggtaagtctcaataaaatctgacttgtaattatggttccctctaggtgtgaagatcatctcaggatccacagattgatttgaaagtggattcccagtcctcttcctttctgtcattgactctgtgtctctttattactttgggtttttctcacttttcctttcctgatcttcctcctctcattcctttaactagccataattgggattgatttatagctttatttgttgtattttaaaatatgtaattttacattttctctttttaatttaagaagtcaaagaatggaacattttatatttccttcaataaaaaagaacctttttatttgatttttatatatatccccattaaatttcatctgcttggctttg

SEQ ID NO: 245728 - DNA, 427 bp, Homo sapiens
tccttcctccttttttttcttgctggagcattttaaaggaaattctacatagcatggcttttcactcataaatatttcagtatctatttgccagatgaggactgaaaccccaaactattatcacatccaaaaacatcaacaataatttcttcctatcacatacctattgcatatttggttttgctgtatctcaaaaatgtcttttttatatgcagatggcttgttcaaagaatgataaaaacaaggtcagaacattgcactcattgataagcctcttaagtcgtctcttaaatcttttttaatctataaagaacttagctgttttctataatatttaacatttttcaaatttaaaagtctttataattcaatgcaagaaattcatgaaacgcagaaaaagcaaagcaatagttacttgtctcactat

SEQ ID NO: 245729 - DNA, 443 bp, Homo sapiens
gttctaaacttcatgttgatattcaagcgaccaaacatagccacaataaccttgaaataaaaagtaaacagcagggatactcagaattcacaattttcaaatttactacaaagctacaggaatcaagacagtgtggtacccgcatgaggacaaacatataaatcaatggaatggacagttcagatataaaccctgcatttactattaattgattttttttaactaggattctaagacaaatggataataatagtcttaacaaaagatgataggacaattgaataccacatgtaaaagagtaatattggaccctctacttcacatggtacacaaaaattaacttagaatggatcaacgacctaaaactgtaaaactcttagaagaaacattaaagtaaatcttcatgaccttggattaggcaataattccttagataggttccc

SEQ ID NO: 245730 - DNA, 319 bp, Homo sapiens
tgaaataggaagactgcatgaaaaatgtctttcctgttaacaaaggcttgaatacatgcttccggtttccatggcagcccaaccaaacagaaaaataagtcatagaagtggccttttatatcaatgacttgcttcctaaacaataggaccaggagcagtcagtgaaaaaataatgactggtgctgtcctacttatgaaaactgttttacaacttatcagattatttaaaccagagggaacatagtttgaaaataattgacacaaaattggaatttatgttttcattttgactatgtctgtctctagggtcattacttaa

SEQ ID NO: 245731 - DNA, 513 bp, Homo sapiens
tagcaggacagatcctcatgtaagtgttttgggtgaagactgggcattttttggtttgttggttagttggtttaattccagggattctaccgtgagctaggatagggtagggaagcactgggctagaggctggtaggctgtcactgcagcacgccccgggagggcaggatccagaatggtcgtggccaattgcccagaatagtaatggggtgacccaggttggctgggtccctgtcttagggaggaggccttgtgatctggaagcaaccacaggtcttgggacctttgaggagccactggtctgcagtgtggggatgaatgaattgtgagctgtggtgtcacagttttgaagttgtctgccaacttcagataaggctgtgacccccaggagcaactggagctccaacgacttgggaaaaactgtaccttgtacccaaccttggaagctcaactagctcctattccccaagtgccctaagccttttgctcctggcctttgcatagatagtctcc

SEQ ID NO: 245732 - DNA, 429 bp, Homo sapiens
cccacctcagcctcccaaagtgctgggattacaagcatgagccaccacacctggctagtgattttaaattttaaaaaaacttgggaagagaggaaaataaagagatttggaaagatgcattgttcatatttctcaggaaatacttgagggggaaagatgtgatggggcactgtcagatttgctctttatatctctgtattatttagattttaaagtaaatatcacaatcatggagctattaatatttaatcagagtcttagtgagaattacaaaagataatgcattattaaaatgttcatttttggctgggcatggtggtccacacttgtaattctaacactttgggaagccaaggtgggatgatcacttgagcccaggagttcgagaccagcatgggcaacatagtgcatcctcgtctctataaaaaa

SEQ ID NO: 245733 - DNA, 493 bp, Homo sapiens
gagagaaaaaaagcaaaggttagtgattacctaaattggattaagttctgtctagcagcatttaaagaaatgcctcttgctccctaattaccatcaactaagaatttaaacggtctattaaatttaagctgacttttttaaaaaactccctgaaatttccagctgtaacatattctgagattttagaggtttttatatattcttcaaatgtgtagaggacattctctgctttcccccccttttaaaaaatattgcatttctggagcaggataataaatgacatcactatatactaacttcgctaaaaagcagaagctcacagctaggctcagctagaagggtttgtggagagcagtagaaatccatctgaccgtggcctacgggaagaccttgtaaacatctaccccctccaaacaacctgtcattaattatttgttcaatttatttagcatagaattatatgttacataaaattatgtatttactcgtgtaa

SEQ ID NO: 245734 - DNA, 346 bp, Homo sapiens
tacccatggtcaacgaagatgaggggggctttgaagactgctttgggaagtcgggtggtggtcttttccttacacttggccagcttgggtggtgtcccacgtgcggtcaccgttggtgatcagtaaccacctagcatttagatattggaaatttagctttttgcgagggatggggcggcgaggagtgggttgggagtttgggtgagccacggatgacttaaagctggacgctggattatgatcactttgggcttttgcctgcgttctcttgaatggagttttccttcagcatttaagaaggtgttgcactccagcctgggctacgaagcgaaaatccaactcaatt

SEQ ID NO: 245735 - DNA, 411 bp, Homo sapiens
ccttcacgtttttctacatatccaggaactcttgcatcaaggcctgtgtctccatatcttctgtatacttaaatccaacgtagctacatcttgtgtcttacatgaaatgtctacccatgcaaattagctagaacttgcatgagttgggatgatatcctgtctagttccagaatggttgttctatttctttcagaatggctacattggtgacaattgggttagagaaaaattgtgtgattgagccatgtgcattttattccctacactacatgttccatgttgttccatacaagcgagttcttcttcctcctacaaactgcccttacccctccatctcagccctcattaatattcttaatatgggagaggttcttaatatgaacctctcccatagatgttggaggaagttca

SEQ ID NO: 245736 - DNA, 394 bp, Homo sapiens
gtccagtggagctgtcgggggagccagaaagaactgagttgtcatcagctctgaggaggtaactaggctgcaagagaggttgggatttctctttaggaaagtatagaggccagacgaggtggctcatgtctgtaattccagcactttgcaaggccaaggcgaggggattgcttgagcccaggagttcaagaccaggctggtgaacacagcgagatcccgactctacaaaaaatgttaaaaaatttagccgggtgtggtgacatgcacctgtggtcccagctactggggaggctaaggtgggaggatcccttgagcccagaaggttgaggcagtgaactgtgatcacaccattgtactccagcctgggtgacagagcaagaccctgtctccaaaa

SEQ ID NO: 245737 - DNA, 382 bp, Homo sapiens
aatctggcatcgttgtcgcctgtaacagagatgtcaatattagaagtttgaatcctggaatgatcacaagtgggattatttaattcctaagaaggctggcagttgagggcaagaaagatgcatttggaacaatctccaagagttttttgtttttgtctttggtttccaactagaaaaggaaaacagagattcaaatcctaagcagacttttcaaaagacaggcttcttccaagcagtaagaaaatactatttctattcaaagacacttgaagcttgtgttccttcatacctgcctggggtgctgagtttgcagagcctttctgcagacacctgaggtttttatcaatgagaatcatgaagctttggagaaataatatacaat

SEQ ID NO: 245738 - DNA, 381 bp, Homo sapiens
caaagtttatcttttactctttaatggaattggtaatggtttactaccaattttgttaacaagaagtttattcatttttaagattattggatttgcagagatttgagagtttcaattttgcatgatacttctttctaaccaatcaaatttatatgaatatagcacagcaaatactaagaggtaaaccctaaatcatttgtcatgataccttcaccaacagcattgttggttgaagagctaagatctttctctagaaagcttgactcaatttaggaaaataaaatatttggagtagagcttgggagatataattatttttatctaccagtgagaaattgactaataataatatacctattattgattttaactttcatgttc

SEQ ID NO: 245739 - DNA, 471 bp, Homo sapiens
tatgttgtcatttctagaaaatcatacaacatgtaattataagaatggcttttttttttcacttggcattattgcatttgggattcagccatttttgtatgtataaaaagatctgttcctgtatccattgctgaacagtatttcccattgagtagatacacaattagtttatccattcaaggacattcaagttctttccagattttggtgattatgaacaatactgctacaaacatttgtgcacaagtttttgtgaactttgtctagaataaatgccaggttatatggtaggtatatgtcttacttttgaagaaactgccaaactgttttctagagtgactgtatcatgttgtaatccaccagcaatgtatgaaacttccagttgttccacatcctcatgaataccttgtattatcagtattttaatttaggcattctaaaaaatatatactaatgatgttgagcaccctt

SEQ ID NO: 245740 - DNA, 499 bp, Homo sapiens
gagtgaaggccaatggttggtccccctgtcgtggcttgggaggtctctctcaaatgtcagaactgtttttattcttttataaaggctgcttagaaaacaggataacaggctttagtcaggcagatctggcttgaaacctaaagtcattctgcagctgtttgcgtttggacaaatgccttgacctctctgagtatgtttgttctcatctgaaaaatggacataaatcctcctgcctcataaggttgatgaaaggattaagtgagaccctgtctcaaaaaaaaaaaaaaaggaagggcgggcgcagggcctcacacttgtaaccccaggatttggggaggctgaggcagggagatttctggagctcaggattccaacaccagcctgagaaacttggggaacccttgtctctactaaaattacaaaatttagccgggtgtgtggacacaggcttgtaaccccagctactgggaaggccgaagcaaaagaatggcgcaaacct

SEQ ID NO: 245741 - DNA, 406 bp, Homo sapiens
gagtgaaggccaatggttggtccccctgtcgtggcttgggaggtctctctcaaatgtcagaactgtttttattcttttataaaggctgcttagaaaacaggataacaggctttagtcaggcagatctggcttgaaacctaaagtcattctgcagctgtttgcgtttggacaaatgccttgacctctctgagtatgtttgttctcatctgaaaaatggacataaatcctcctgcctcataaggttgatgaaaggattaagtgaggtgatgcaaagaaagcccatttcctggtacataagttcctggtacagagtctcactctgtcgtcacccatagtggaggcttcaataagccaagatggtgcctctgcactccagcctgggtgacagagtgagacactgactcaa

SEQ ID NO: 245742 - DNA, 521 bp, Homo sapiens
gagtgaaggccaatggttggtccccctgtcgtggcttgggaggtctctctcaaatgtcagaactgtttttattcttttataaaggctgcttagaaaacaggataacaggctttagtcaggcagatctggcttgaaacctaaagtcattctgcagctgtttgcgtttggacaaatgccttgacctctctgagtatgtttgttctcatctgaaaaatggacataaatcctcctgcctcataaggttgatgaaaggattaagtgaggtgatgcaaagaaagcccatttcctggtacataagttcctggtacagagtctcactctgtcgtcacccatagtggagtacagtggcctgatcattgctcactgcagcctcgacctcccaggctcagttgatcctcctgtctcagctacttgagaggttgaggtgggaggatcacttagcctgagaggtcagggcttcaataagccaagatggtgcctctgcactccagcctgggtgacagagtgagacactgactcaa

SEQ ID NO: 245743 - DNA, 747 bp, Homo sapiens
tatatatccttctccactccatttgtagatagcttatctcccattgtatcctatcattgccaaccatcagaggtagggccaccttttctttctgacccacactcctacacttactatttctatgtgaaagaaaaagcaaacaaacaaaacaaaacaaaaaattctatttgccattatggcccaatgtgatgagtatgcagggatctgagtgcctaaactcgctgtggtggcacctcaacacagttgactcagagctgtctcctgctaaaagtatatactaaaaacatgttaaatgatggacttccaatagtgtccagcaggttgagactctggtttctttcttcgtttgatattttctgcttcccaaatttcagagattaaaaaatacaaatggaatttgccactatttttatatgtaaagactttttttcccattataagcagaacaaatacaacgtataaatccacttaaaatagtatatttataaccacattcctcattatactacacaacaaattattttatctatactatatatgtgatatattaagctgaagtttatattctttcacctgaagtgctcttctaaaccagtctttaaatttttcattcaaaaatgcccatttcagaatggaagttagtgtaaactctatggcaatttttcaaagaactaaaaatagaattaccatttgatccagcaattccactattgggtatctaaccaaagggaaaggaattattatatt

SEQ ID NO: 245744 - DNA, 387 bp, Homo sapiens
cagataaaacatgttaagtgtttaaaaagttaaataaaaatacaatctaaattaggttatggatatgataaagcaagtagaatatggattattgttagtttatgtgtatcttagtccattcataattgaccttgtattatttgtactctccgggctttgatcatcacaaaaggaaatatttcaaatatttgttttccaagttgtgattctactctgtgaactactacccattaaaacaaatcctataggctttcaggtggagaaaaagaaaataaaagtgctctatactagactgtatctaagtgctttgcaaatttaaatacaggtttgcttttagatctcagccacaatgctatacagaatcttggtatacttaaaaacaagctc

SEQ ID NO: 245745 - DNA, 535 bp, Homo sapiens
tcagcacactgactgcaaaccagttctcatagagatcaattataaattgagacggtgttctggatgctttagtcagatttggctggtaccccaatgatctctgactctatttcttcagatactagtatgaattttcatcttcaattataacctgctaccaggatggcatatacctgatcctcttctatttattatttattttgcagaaaataaaaataggaaaaaaaccctatgtttgtacttttacatttaactcaaaactcaaatattagtgaattcctttgatttatgtgaaaattaaagttggatctaacataggcatccagcctcctttttttgacctttcgtcatactctctttgctactctcaaatttggtcaccccacactggagactggtaatttgcaagttaattcattcatccagaatttattgagcacccatcatttatcttgtactcagctagcagctatagaggagataaggctagttgtaagtatgggatttggtgaatttaatgttattgttttgatta

SEQ ID NO: 245746 - DNA, 360 bp, Homo sapiens
ctccagagggagcaaacagcatgtcttcacatggtgaaagaaatggaagggcataagagccagttagttccctcagcccttgtataacgactttaatccatctatgaggccagaacccttatggcctaatcacttcctgaaggtcccacttcttaatactgttgcattgagaattacgtttcaacaggaattttggaggggacacaaacattcaaaccatagcagtctaaaatgggtgattatgcagtatctgttccaattaatgagcattaattgcattaactaatgcaattaaaaatctggtcttgaaccagtctcattactcctatccttacagcaagaaaaaagctaaaaaaaaaa

SEQ ID NO: 245747 - DNA, 487 bp, Homo sapiens
ctgaactcattgataagtatacccccttcttgctggtcttgcagcctcaggaaacccaggctgttgttaacagtcctagaagcaccagtgtgtgtcctgccacttggcatggatcagtcgcatcataaacatttgtggtattcattaattcacaagttccaaaacaattttcaaatgtgtaagactcattttatttatgcatagagctgccagatgcatagacctgcctcatgttatccataaaagcttctttaaaaagccactttacacaactatgatgtggtagaaacagtcatgggctttttatcaggaatatcatgccctaatccctgctctgaccttcacagctattttcccataaacaattaatttctccaaagtcaaaaccctacgcttaaaaaccaatagaggaagaaggcacaacaattatcaaacatctggtaggattaaatatctccgtgttaaaacaaacacacacacacacaca

SEQ ID NO: 245748 - DNA, 918 bp, Homo sapiens
agttgccccggatgctcaaaggtggagtaggtgcaaggagtggaaggggatctaactgagagacaagtccctccgttaaagaaccataagtgtgtgcactcctcatgcagttgaagaactctggagtcagactgcttggattcaaatacagcctctaccatgtaatatctatgggatcctgagtgagtttccaatttcttcatctagaaaatggggtcataacagtgtcctgctttatagcactgtcacgaggcttcagtgggggctcattcctataaagaggcttagaggcaataaacattcactatgatctcattctatctcccaaacatccgtatacccagcccctggacggtaccttacacacagtagacaatacgaatttgctaaaaaatacccaaatgattattatctctaatttactgtgaggaaacagaaggctcagtgatgagggaacgtgacaaaggtaacaagggaaaggggacatgcgagtccagctggctccaagcccatgctccacacaaacctactgctctccttgccacccacccagcccgcgctccaatgtgggaatccacacaggggaggcggagtggaatctacctacagaggcaggcagaaaggacgcacatggcctgcttctaaactattcactggccgagtgtggtggctcacatgtgtgattccagcactttgggaggcctaggcaggggggtcacttgagcccaggagttcaagaacagcctgggaaacatgggaaaccctgtctctacaaaaaaatacaaaaattagccaggcgactggccaagcgcggtggctcacgcctgtaatcctagcactttgggaggcagaggtgggtggatcacaaggtcaggagatccagaccatcctggctaacatggtgaaaccccgtctcta

SEQ ID NO: 245749 - DNA, 581 bp, Homo sapiens
gtgaactgccaaatttcattcatcattactgatatttattgtgaaccaatccagccaaaagaattctgaacagacactttaaaaacctatgccaaactgaattgaccgtaccaggcttatcacatttaaatatttatttaaaatagtctttaaattataattatgttaattgttttattaaaatcaagagagaaaactaaccatttatcaaactgctgagactgctaaaagatttatcagccttatataaataagacacacttagtaaatattttcattccattcaagaaaggcttttgtgaccgagtgccgtggctcacacctgtaatcccagcattttgggaggccaaggcagacagatcacttgaggtcaggagttcgagactagcctagccaacattgggaaaccccatctctactaaaaatacaaaattagcttggcatggtggcgaacgcctgtagtcccagctactctggaggctgaggcaggagaatttcttgaacccaggaggcagaggttgcagtgagccgagattgcaccactgcactccagcctaggtgacagagcaagactgcatctc

SEQ ID NO: 245750 - DNA, 295 bp, Homo sapiens
ttttgtattttcagtagagacagggtttcaccgtggtctcgatctcctgacctcatgatccgccagcctcggcctcccaaagtgttgggattacaggcgtgagccaccgcgcccggccctctctcttctgtctgtgtttctgtcgctctcctttctctcctctctcttctctctctatctctctctgttatctttgtctctgtctctctctcctctctgtctccctgtctttctctcttctctctgtgtctctgtctctctcttctctctgtctctgtctttcccacccaccctc

SEQ ID NO: 245751 - DNA, 561 bp, Homo sapiens
tgatttttatttttctctttctgggacgtcttacatctttgttaacactactacttctaccctccatttatcttttagcttttctttttatattttctatttctctttttcttcttaagggatttgctcattctggtcttctaatacagtcactcattctcttggctgtacccactgtattatctatcccatcttctgaagcctttattttaaatatctcatttttcaatgttacaacaacttggcttggttctcacattttctttcttttttttaattatactttaagttctagggtccatgtgcacaatgtgtaggtttgttggttctcacgttttctagttctcatttcacattagtatcttcccgtatttcttctattactgttctcctcctttagagaacattcatagtccccttctttccatcttcaaatgctcttccctgcttcaaggttttcacaactgctgttctctcatcccttactcaacctaaacatcatctccttaaggatgccttccctgacccccaaacactaggttggtatcttctattatgatc

SEQ ID NO: 245752 - DNA, 472 bp, Homo sapiens
gcatggtcaccagggtgagatgtgaacaactattgcactgctacatctagcaaggagggtcttgcctctcgcctcagggctagcctagcccacctgggggtcatctcaggaagcccactgcttctagggtaaaaggggataggctgtgaagagcccagagaaatgtctccagggtttaaggatttctagagaaatatgcaccagagctctgtccctccttgtggccaggacttcaggtgcctcctttttgggaagcatttccattctgcctaatcagaaatacattggcgtgggctgggcccatctggggctggtcagataggccttggagaggctcctgtgagggcggctgtccagtgcaaaggaatcactgacagctttggccagcacttctggcttctaaagtgtggcaggagtctgtgaaggagccatggagaaagctgtcccagatgggacggcctagccagggtaa

SEQ ID NO: 245753 - DNA, 649 bp, Homo sapiens
ccaaaaaaagcccaggaccagacggattcacagccaaattctactagaggcacaaagaggagctggtaccattccttctgaaatgattccaaacaatagaaaatgagggactcctccctaactcgttttatgaggtcaccatttccctgatacctcaaattcattcagagtcagggatgagacagctttcactggccacacttcccctcccgctatctgcagtcctcagcgtagccaaatagtttgacatgcgggtgacagaaccccgcaatgcaaaagctggaagaaacctcaagccttggagtccaaccccttttttgacagatgctaagagtggagacatgacttatcaagatcttacaactggctgggcacggtggctgacgcctgtaatcccagcactttgggaggctgaggtggggcgatcacctgaggccaggagttcgagaccagcctggccaacgtgtcaaaaccccatctctactaaaaatacaaaagttagctgggcgtggtagcacatgcctgtaatcccagttactcaggaggctgaggcaagagaatcgcttgaaatcaggaggcagaggttgcagtgagctgagattgcgccactgcactccagcctgggtgacaagagctgacactctgtctc

SEQ ID NO: 245754 - DNA, 444 bp, Homo sapiens
cagcagcatcttgtacaatgacatattctatgtactttaaccaatgggtattcctgaatttcagggcagtgtgggcttcatcttgatttcctctcaggggtactcactcaccttcaccgcatggacatttggtctaatttatttttgagagtttttttcatgctcttgagtccatcaccctgaattggcagtcgttatttcttagtattatttccttaatgtctttttaactataaaggaaaggaaatattacagataatgttgtcatatcctttgatccccactcttctcccccattcccaggggattcacatcatgacacaaagttgatggatatcattctagtcaatatatgaaagctacatatacatatatatatgtatagatataaataagcaatgtttatgttgttttctggacaattaaatttacataactacctca

SEQ ID NO: 245755 - DNA, 781 bp, Homo sapiens
gtcctaaagagccagatacggattcaggacctacctcttactcctggccccttgaagacttgtggaatcagaacaagatcccccttccccctgcaggcatttgaggagtgctgctccagagagcattgccactgaggtcccacccctgtctggcttgggagctgggagtgcacagcctagagacaaggctccctctgaccgaagcccctggagaagtagggccattaacaccctgcaggtgcatcgcattatgccagaggagtccaaactgtccatcagaaagtctgtgtgatgtgagctagtttttacgaagcaaggattttaaaacaagcttaggaacagtgggtgacagcacccagatttgagtggggcacataagcccatccctgtcccccacatgccccgcaaagccaaggccaacctgcgtggtctcaggcgaagggttctgggaacacctggcttcaagcatccctcctttccttctgggatttcaagccccagggtgagctcctgactgtcttggagatgaccccccctcccaatgctacttccccacctatatgttgccagaagatgagaagccgatatcctcagagaatatgagcaaccagccaggatatcgagacacctgaaaagtacgattgcctcagaaaacaataataaaagtccagaaaatatgtatgatcggaagcagaagtgtagaagacagactaacacaggagttcaagaccagcaagggcaacatagggagacctcatctctacaaaaaaatttaaaaact

SEQ ID NO: 245756 - DNA, 407 bp, Homo sapiens
cagttcctaaaatacaacagacatgctctcacctcaggacctttgcacatgctgttctctcttcctgggactcttctcccagacagctgcatgacccagccctcatttcctccttagtgagacccagctctcactaaggccttccctggccaggcaatgcaaaattgtcacccccttccccccattcattctctctcttcttttcctgctttttctccattgcacttaccacctctaatatactgttttgtatattaatctttattattgcttgcctctctccactggaatgtaaaccccaaaggagaaacttttgtctgttttatactttgctgtagccccacctaaaattgtgcctggaacataattgacattcaataaataactgttgaattaatttgttgaat

SEQ ID NO: 245757 - DNA, 807 bp, Homo sapiens
ctgcattgtactatcaacctcttaagaacaaaaaatatataataggtgctcagtaaatgtttgttagttgaatgcatttcatgtcttctcaccactgatgcagataactcccttcctgattcctcagtctcttcctctgctggattacttccaccaacatacagtagtatcttttatcttaaaaacgtaaacacctgcacctctccccacccaataaaacaaaacctcctcagttgattccacatccccttccagttgctaccttctgtccctttttccctctttggcagtatttctccacttcctctccttccttaccgcccactttacagtcttcactctgtgttctcatcttcctcttcagtctttagcatgttctgttggctttatctcaggagtgtgtgctgaatccatactctgccgtatccacttcacttccactaccactgctggaccccgtgccgtcatctcactagggtaggacaggacaacccttctcgctggtctctctgctttcccttttgccccaccagaaagcagtctccacatagatcctgaggggtcttttccaaataaaaactttctgatgtcattggcctacctcaggccacgttcttacacctggagtgaaatccagtcatgctgcctggctgccagccttccgtgttagtgctggcctctctctctgtcattctctgcctgctcttctgctcactgtgctcaagtagttcatgggaaggttgcagagtgttgtggatggtttcaagatgcagtgtttggtctcccaattaaaagaattactaatac

SEQ ID NO: 245758 - DNA, 513 bp, Homo sapiens
ttggcctatggcccccggagtttgaacagtgtccccaggagagaagttgaggtgctcgaaccccgtctgggcttcctgtccggctgtcctgctcctgctgccccaggcctcccccccacaccacacaccacaggcaggcaacttggccctgggatcattacagtccagcacacatgtcccgtcaatcgcagatgtgctcaaaatagatgccgcttgtactcccctccctcccccttctgtgttactcctagagctaattatagtacaaacttctgccctccatgttcccaattctcctgcatgggccttttattcaggactcagaatacaaactctctgggctctataaccaatgtacaccctttcaggaactgtgccttctctaataggaccatgggctaatctcaactgctttcctccaaagaccctttcaaagtggcagcagcaggggcttcaattccatagctggcaaagaatggctgggcttgctccaagatcccaggaaagaatgca

SEQ ID NO: 245759 - DNA, 597 bp, Homo sapiens
ctgatctctttgaatctggtaaggatctagccttgtcttatttataccagcaagcagtgttgtcacttaatgctctcatttttcatgtaaatgactgacattttcccaagtcttcacaagtgatttctgaagatgttgctgcattgagcagagactatgtcattgtaattgcagaagttttaaaattaaatatgtttaataaaattttagagttctgtttatctggaacacataacacataatggtgtaatgtgtatttaaccataaattagcttcacaaaaagtttgtgtacataaaagtgtttatatccaaagaaattcttatttactgctcagtaatctcttgtgtagaagaaaatatgtaacatagtttgctgagtctttgataataaccctcatgtaaaataaagccgtaaagataaaatgagagttgatactcgatgaaactgatgtgagtgaatagaaactatgaaactgtgtctatgggagagaggaggacatggggctgctgttgtgaagaaggaatttgtacaagttagtccattttctgtaacttttatattctaataaaggaaaaccatatcttcatatttataa

SEQ ID NO: 245760 - DNA, 616 bp, Homo sapiens
actcctgtaattatagtcactacccttctctaaacatcttcctcatgcagtgtgtcttatttgataccactgcaaccctggaaggaaggtgtactggcattggccccacattacagataaggaaaccagggctcagactggtgacctcattcctcaatgtcacaaaggtagtaagaggccaggaagggttagcagttcatctggcaaatgagtggctggctaagtaagccagaggcccaaagtggccactgccctgaagccctccccttacctggagcctgaagccagaagccagtgggcctctggggccagggctgaatgggggaggctggtccctgggactttggattgggaagcatcctgcagttacttgtagggccagggctcgttgctctgaaaagccctctgttttatatctcttgacacaagtaagatatagcaggatagctagaaacaaacaaatagagaaagaaggaactagaagacatccttgtgctctggtatccacatgtgtatctttttatataatctagaaatgtatgtatttcaaaggtttttcattctggaaaagtctgaaaccgacgacccttcttttgtaaaataaaggcctttgcgt

SEQ ID NO: 245761 - DNA, 514 bp, Homo sapiens
cggtaccccaaaccctccacactcctcctggtcctggggagccttgggttccacccctcagatctgatgccaaagactcagtttccatgtctgtgaatgaggatgacaacagcttacctcactggcttcttgggaacagtaagtgaggttaccggtgtaacccagataatgcagtgtctggcacttagaactctataagtggtagtatttagcacttatctggtgcttagtatgtggtgagccttgttctgagtgctttgcaaacattaactcagttttcacaaccaccccaggaggtagacattcttagagtgaaaggcacagagagggtaagtaacttgtcgaagtgcacacagcacttaagtggtggaatcaggacacacacaggcagtggcttcagaattcgcacccttaaccccgcactgacaaggcttccccagcagctggcgttgtcgttgtaattacataaataagcattttactagattaatgtcggggaggagaggtgcggccg

SEQ ID NO: 245762 - DNA, 522 bp, Homo sapiens
cagtagagctcttagcatggtgtgtgtttcagtaaatgcttaataaatgttaattattatgttactcaaccagttcctggagacacttacccaatatgcattcaaaaataaagtacaatctggcaatatgaaatacccaaactaattgtcacactataaaatttaacaccacaacccctgtctgttataattttaacaccacatttctcaaaattcttcctcatgttgttctgcagatttatgtgcttttggactgaaaaatccttaaagtcagagagcatgtcatgactctgaatactatgaaacctgtgaccttgatttactcctcattgtgtcctcccatgaagagtacagtgcctcagccacaaaatttgctcaactgctcttttttgaaggaattaattgtgtggcttaaggaaaattcagattcaggctggcctatactcaaagtaaagaaagagatatttcccctttttttgttttaaagaataattaaaaaggacaccttttggcttacatagg

SEQ ID NO: 245763 - DNA, 672 bp, Homo sapiens
aggtactgatttgcttttggggcagaaagcaggggcttttaaagtgggacttggcatgaatggcatgcaggggagggagcaagcaggtgaggatctacatgactctccttagcgcttttatctaccgggtgtttgagctggcaccatggcaggcaggactagattgtaaagtggccattgtctgagatgctctccaagtgggacagagtttcctagcaggcatagtttagattgtaaattgactgttgtctctccaggcagtctcctggtgggagagatttctggcttagaaccttctaaaagcacatggttaaataagcttgccctgtaaggagtgtctggtgaagggaaggtaaagattataattgcatttctaaggaactaagtgggaagtgggagaaaggagaaaaggagaaaagaaaaaaaaaatgttttaaaacacagttatctttctcttagaaaaatgggggtactcagtaaacagaattagaaaatcaccatttggcaatcatcagacaagaaatatcaatgtttgctaaatctagtggggaaaagttgaataaggaatgagttacttacataggttcaaagcatctccccatgaaattcttatttaaaaaaacaggaactttacaaaagaggaatctagtagatatcgtcttactcatgaca

SEQ ID NO: 245764 - DNA, 742 bp, Homo sapiens
aactgacttagttatgaaatcctggaaaactaccacctattcatagtaccccttgggtaaataatttaggctctctgaacctaaggctcctaatctgtgcaatgggagagaagagtttggaaatattcccacctcatagaataatcatgaggattacccatgaacatgttattttatgtgtacctggcacagtgttgttggtgtatgtgagttctctctgattatacctactcttccaaagaggaaggacaaatgcgtccctagtcatcagagctgatctaacagaaagaacagggagattggagttgtaagttttggatctagtcatttgttcatcattcattcgctaaagacttaagcatctactcagtgccctaccctgtgttaggtcttattagggatatagagcaagtaataacaccattgtcccctgttcttatggaaatgacacactcctggggaggcaagcaccagtggcatgtaaaatgtaaacttacttgaaacttacaagagggccatgtgctgctctgtgtttggatccaagtgcattaacaactttaggagctagaagggagaggtgactaggcttgagcacccagagagaggcagcttactgcaggaggaggggcacaggatggactttactaaatgggatcatcttattcctccactaattaatgaagtggccttgggcaggttacttcactaatcatggcctcagtttcatcatctcagaaaagaa

SEQ ID NO: 245765 - DNA, 192 bp, Homo sapiens
ccaattttccaacaatgtcaacagttatttaaatggaaatatagatcccagaagtcaccaaatgtgaaacacagtgaaattattccttaaaaatggaggatattttatcattaggcatgacttacctatttcataattatgttcatttgctttctaaaatggaaagagaataaaaagcatgtataacctttt

SEQ ID NO: 245766 - DNA, 588 bp, Homo sapiens
gggtccactagatcatcagtcctcaaactctttggcaccagggacaggtttcatggaaggtaatttttccatggggttgtgggggtaaagatggtttcgggatgaaactgttccatcttggatgatcaggcaacctagatccctcgcatgtgcgggttacaatggggttcacactcccatgagaatctaaagccaccactgatctgacaggaggtggagctcaggcagtaatgcttgctcgcccatggctcatctcctactgtgtggcccagttcctgacaggccacagactggtactggttggtggcccaggggttggggacccctgcactagatcactttgccataataagatgtcctcagattccctctgccaggtctttattttactttctccaaaggctattttctctttttcttcctggaactctgaacaccctttcctgtgtttgctaagcgataagacaattttgttcacaatgttatactatgagaattctgaataggagtgagaaatgaactccactgataatcatcctatggtaaatctacttcagtgagttatagaataaaaattagactatgaaa

SEQ ID NO: 245767 - DNA, 346 bp, Homo sapiens
gcgcctatgagaaagggaagcagaccttcattctgttgttgcagctgagttcttgcttatctcctgacagggcttctagctgccctttggcctcagccatcataatctgcatcctctaccaggccactgaagctgagttgcagaattctaaaacctagcggcattataatttcattatttttattctgacttttgtattttttaagaacttttatataattcacctaccatacatacagttcacccatttaaagtgtacagttcaaaagtacctagtagtatttacagatatttgcaaccattatcacagtcaattttagagcattttcatcacctcaaaaaaaaa

SEQ ID NO: 245768 - DNA, 722 bp, Homo sapiens
tctttgtaggtgggaagtacagacaggtgatgatacttgcaaaaagtttcctgcaatcttgcatcgtcacccaggctacagtgcagtggtgagatcctggctcactgcaacctctgcctcccaggttcaagcaattctcctgcctcagccacccaagtagctggaactacaaggcatgcaccaccatgcccagctaatttttgatttttcagtagaaatggagtctcaacatgctggtcaggctggtcttaaatcctggccgcaagagatctgaccgcctcggcctcccaaagtgctgggattacaggcataatccagtgcacccagccctgattcagtgactattgaaaccccaggaattcaaggataatatcaggatttaggaatgtgaactgcttaaaatcacaaagtaatagtagtggtttctattgcccattttaaagtatctacaaaatcacttttttggtgttataattcttttaacaagtacgttgaataaaggaatatagttaagtactggcactaaataaaaactgctaccaaatatttgacttataagaccattattattattattattattcatgtgttattatttttcatggagttttgaagaccaaaaatatctgaaaaacattttaatctggccagttgaaaactagtgaatttcaaccagatgtttttaataccactttaaaaataaactgcagccattttattat

SEQ ID NO: 245769 - DNA, 541 bp, Homo sapiens
tctttgtaggtgggaagtacagacaggtgatgatacttgcaaaaagtttcctgcaatcttgcatcgtcacccaggctacagtgcagtggtgagatcctggctcactgcaacctctgcctcccaggttcaagcaattctcctgcctcagccacccaagtagctggaactacaaggcatgcaccaccatgcccagctaatttttgatttttcagtagaaatggagtctcaacatgctggtcaggctggtcttaaatcctggccgcaagagatctgaccgcctcggcctcccaaagtgctgggattacaggcataatccagtgcacccagccctgattcagtgactattgaaaccccaggaattcaaggataatatcaggatttaggaatgtgaactgcttaaaatcacaaagtaatagtagtggtttctattgcccattttaaagtatctacaaaatcacttttttggtgttataattcttttaacaagtacgttgaataaaggaatatagttaagtactggcactaaataaaaactgctacc

SEQ ID NO: 245770 - DNA, 538 bp, Homo sapiens
gccttcgggtgggaaactcatatcagtgagatacttgcaaaagtttcctgcaatcttgcatcgtcacccaggctacagtgcagtggtgagatcctggctcactgcaacctctgcctcccaggttcaagcaattctcctgcctcagccacccaagtagctggaactacaaggcatgcaccaccatgcccagctaatttttgatttttcagtagaaatggagtctcaacatgctggtcaggctggtcttaaatcctggccgcaagagatctgaccgcctcggcctcccaaagtgctgggattacaggcataatccagtgcacccagccctgattcagtgactattgaaaccccaggaattcaaggataatatcaggatttaggaatgtgaactgcttaaaatcacaaagtaatagtagtggtttctattgcccattttaaagtatctacaaaatcacttttttggtgttataattcttttaacaagtacgttgaataaaggaatatagttaagtactggcactaaataaaaactgctacc

SEQ ID NO: 245771 - DNA, 466 bp, Homo sapiens
tgaaagaagcttatggatactggaataaaaaatgaacagtgaaaaaaggcaaatatatcagtaaatctacatgaatagtgcttttacgagacaacaataataataatatattgtgacatagatccatatgttagtagagaggaaggcagaaagagagggaaaaaaggaagaagggaggaagaaaaaggaggaggcagagaaggaggaggaagagagagaattttaatatagaattttaatatgaagtataattttatacttcagcagaagcataaaagttgagagagtaaagttatgttaagctccttgctttattaaggaaaagggtaaaaatatcaattcatatttgattttagtaattcaagaattcatattgtagagactagtaaaagagcctatcactttcaaatgaacacagaaaaacaacagaaattataagaactaatcaatccccccaaaaaaggca

SEQ ID NO: 245772 - DNA, 361 bp, Homo sapiens
gacagtggggaacccacttattccttctctggagagcgccatcctgcttgctttgggggtacattcatatatgaatgtttttatatttgtttgtattcacacatatagatgtatgttatacaaggaagaggaggaaggtgcagtgcaaaggagacaaatacacccagtcagtaggaaaaatgtgaatcattctaattacgccaagacctaaaataagttatagctattataatgtgctggaaaggaatgcttttcagctctttagtaaacataattataatgtggctatttaagtaaaagacctaaactgatttgaattatctgagcttgatcttcttgatctttataaacattcaaaaaa

SEQ ID NO: 245773 - DNA, 560 bp, Homo sapiens
tttatttcatgatggggacagaagaattccagaaggagcaaggctctagggtattaaaaccagcacttcagagctttcctcttgtgttaggaccatgacctcattaagctcatgttgttcacagcactggtccttccagggcccctagctctcagattttccatgattttctcatatcagtatgtttccatctagacaatgatcaatgattggtttgttatattaataaagcatcatttacttagttttcagggcagaatatcaatgtggatggggggtatgtcaggtggattttaaaaataaagttgttctacttcatctttgctgtagaaggtatgttatgtccacagcatggttttaaaaggtaattatttagtatctaaagtaatggtatggttcttgattacaagtttggtgtaagtaggcagtgactaaggctcttaaatgtgtaaaattcatatatgaagtggagctctgtacactgttgttggaggaacggtctaacatcaatgttttcagattttcctgtgtgaagttttattaaagagcatataatttga

SEQ ID NO: 245774 - DNA, 446 bp, Homo sapiens
ggcgctctgcataagaaccaggcctgtttctgtagctcctgggggagacttgggtgggggcatgcctgggaccaccaggccagagttctgtccagtgactgcccccaagatgggctggggtggaccaaagctcactctccaaggagaagtcgctacctcaattagctctcctcccaggagcggctccactgatctcctcagaggcacagcaggctcccaagggctgcagccccccgcggcccccagcctttgcccagagttcccggccacattgtgcccgaggccccacgctgcccttttcactccctttgcctggccagcagtaggcagtgcctttgaagtcctgttttctggtccaactggaatctttgctcagaaccaaaattaggctgcacaatcagcttgcaatttaaaatgccacccaagcctccccccgtccccccttt

SEQ ID NO: 245775 - DNA, 483 bp, Homo sapiens
tatatatttttcataaatatgttttattattttttatatttttatattcttttaaactcaaccaatatccaaaagtaacatttggagccatcatttcaacagcaatttgtaactgacacttgaatacacttgaaggtcacaattaataattcttccaatatactttgtgtataacatctaaaattgcggcagatttgtaaaacaatcagaaaagaatgcaaacatcaacaagaatatagtatcatttctctttagaattctagtatttctaagttctgtattttgcttctctgtgttataaaaccaaataaaataggtctggggctgacaaatggctggcaaataaaactgaaaacatcctaaagaaaactcatctggttttacagtaccagagtaagcaaacaaaaatctgcccagattttcatactactagccatgcttcaaagttgacttgaaatcaaacattcctaagtttctttctca

SEQ ID NO: 245776 - DNA, 386 bp, Homo sapiens
ccttggaagtccatcctccagtcccagtcaagtctttagatgactacagcctcagctgagaatctgagcataatatcatgagagtcttgaagctagaaatactcagccaagctgcttctgaattcctaactcacaaaaactaccactagctccagcttgataagggcatggtgacttgactggtgtatcagatgccttaaagatgagggtctaagtttaagtaaactttattcccaggaacactagccaaggagtgcgactaaatgcatgtattgaaacctggatctaatgcgatcgtgaagatatcgttttactaatcttttatttatgtcccacacttggtagggcacacttcagagaaagcaataaacattatctgttaatta

SEQ ID NO: 245777 - DNA, 739 bp, Homo sapiens
accttataaacacagatcgttcatctaccccactaactggagagaaggaaaacgctgggtaaatagaatggagaggcctggctgtgatcgatcagcctcaagaaaggagacagggtaaaagggagaaagaaaaggaagacccaaagtaacccaggaaatcagcacatagaagagacgaacagcccagcacgaagcgctgactcaccgctccacgccttcctggtccttaatgattggcggctggaagcgggaagaaaagatccgtggtgccatttgattggccaacgaattgctcccttgccattggctcagagggcttttgatgaacagatccagaaaatatgtgaagcgaaacgcccacgccccttgaggggctgttctagacctttgctcctggtgtcgtatagagcgggggatatttcaagctggagatccgttttcttgtcccagtgaacaggtgcactatgttgaaataagagtggtgacggaggccttgtttatcttgtatcttattgtaaaaggtcatcaagaacccaccttggccaatcaagagaggagtcagctggctaatcaccgggcaggcaccgcctttttcttcccgcttcctagcttgtttgctttcgaccagccaaggagacctggtggcagggttggcaatcaggagggcatgcaaagctgtcatgaggagaaaattcatgctgcatgggaacagtcacacttttggcaaaattccttataa

SEQ ID NO: 245778 - DNA, 629 bp, Homo sapiens
accttataaacacagatcgttcatctaccccactaactggagagaaggaaaacgctgggtaaatagaatggagaggcctggctgtgatcgatcagcctcaagaaaggagacagggtaaaagggagaaagaaaaggaagacccaaagtaacccaggaaatcagcacatagaagagacgaacagcccagcacgaagcgctgactcaccgctccacgccttcctggtccttaatgattggcggctggaagcgggaagaaaagatccgtggtgccatttgattggccaacgaattgctcccttgccattggctcagagggcttttgatgaacagatccagaaaatatgtgaagcgaaacgcccacgccccttgaggggctgttctagacctttgctcctggtgtcgtatagagcgggggatatttcaagctggaggttcctattgagaattcccagggctcacggctgcagggatgctcctccagtctctccaaaatggttcatttggagagttggggtgactctgtttataatttaaatgtctaattccttcctacatgctaaactccttgaagaatgttcgtgtggcacaacatctttctgccgtaactaaacctgtcgtgcaagaagaaa

SEQ ID NO: 245779 - DNA, 277 bp, Homo sapiens
gctgtctttggagttgattttggatcatgggagctgcatcttctgcaccctctatgggggtgtttcctgtgtccacgattaagccgtaaaataggtttattcattatgagtcacattttggaaaaagtgtacctttggagatactaaatcatcaatggccacacagcagatcctttgatttggaacaacttttaaatttgagaggattttcagaaagctctcatcctaaacaaatgtcctgttaccaatatgggaggatcagaatgaaaggacattt

SEQ ID NO: 245780 - DNA, 348 bp, Homo sapiens
ccgtattgaagtgattcagctagaaattgataatcttcattttaacactgctctgagttaatggctgctcttgaaaaggtattgaatccacctggaatttccttgtgtttatggttcaagctgttcgtgagtattataccacttgacgactgaggcagaatcaaagaaagtactaatgctcttcagtaaaatatacaaaactacagacaatggcagtgccttattttgtaaagtatatagctatgagcctttgctactccttgctgacatttggaatttaactgaagtgtcttgttaaaaaacatttatggaaataaaaagaatatctttcctttttagggatataaa

SEQ ID NO: 245781 - DNA, 758 bp, Homo sapiens
tcggcctcccaaagtgctgggattacaggtgtgagccaccgcgcccagcgccaagttcctttcaattattgcaaaataaactacattacaaatatataactaattgttcagacaaaagctctcccacccctctacatttctattcccaatatttacccctcatctttcatctttgataaaaataagccccaaggtactatggattcctaaaatggtacaaagcatgcataaattaaatccttgcagtgacatctaaaacaatgttgtacctaaaaaaaaggaaaagaaagataatactcaaagttggcaagatgtgaggaaattagtttagtactcctcacatactactggtgggagcataataaacctataataaatataaaccttctggagggcaactgtaataaacaccaaaaatgttaaaaagaacactctttttgacctggtcactctacttctagtaatttattctaaggaactaataagaaaaaaatgagacaaatggattccatcacagtggtgtttaagatagcaaaatatcaataaaagattacttaaataaattctacaatcaagaatattataagaccactgaataatgatgtggattctttatttacacacacaaaaacaggccgggcatggtggctcacacctataatcccagcactttgtgaggctgagatgggtggatcacttgagccccggagttcaagaccagcttgggcaacacagtgagaccctgtctctacaaaaac

SEQ ID NO: 245782 - DNA, 493 bp, Homo sapiens
agtatgtgacagagaagaccctgtctcaaaataaataaataaataaatgaataaataaatactatatgactcaacccattcaattcatagctatctacccaaaagaaatgaaaacaaagttctacacaaactcttgtgtggtgacaaaagtgactccatcttggatgctaatttgccatgttgacctcagattaaccgcagtcctgtgaatgcctcctgattccttgtttatttactgtctttaatgtaagaatatgtactcacaatatatcctacctttaggtcaaagcaaccttgatgttatcacgcaactcattctggcctgttctagagggttgcctttcattgtctctatagtgcacataccctttttcctgtggtatataagtcccgggtctggggaataatggtgtggagatctacctgacttgttgctgaccaagaccatgcttgtgtccataagttccctaataaattgccctctgctgataaa

SEQ ID NO: 245783 - DNA, 417 bp, Homo sapiens
tcagatgtcataagagcctattgggtggggggatgctatctcaagccctccctgcctagacctgccttattcccacttatgctgtacagctactctccaaagcagggctaggggacttctctaaagcattgccaccccctcaggctttatctggggaggaagctacacagctcctctattcttgggttgccctccctgtctgggctccggtctgctatcatctatcccttccaggcttattcccaggcaggcagacagggccaggcctgcctctgggtctgactggcagctaagctcccttatccttctctgaagcttctctttacccaggctgtcactttccattcccaatatatagagggaattaactgtatacctggctttctgcagagttttagcctttgaaacttaaaaaaa

SEQ ID NO: 245784 - DNA, 282 bp, Homo sapiens
aaaatgtgaaatctgtccatttttatactgattacatactgaaattatcatttttaatgtctcagctaaatgtgatatgacaatcagtaatcaccagacatttgaggaaatcctctaatgtgaaaaacaaataggtgaaaactttgtaaaaactttttaaaaaaactttttaatctcagagggataagagaagatacagcagccacaaaacaagaacaaagaggcaatgaaagagattatttgaagaataagaaagagcccttggatattgaaatttttacc

SEQ ID NO: 245785 - DNA, 402 bp, Homo sapiens
gcgggctggagttggagatgcctggaaatgaccagcagttctcacctcccatgaaagtggcctccagaccccagattctaacatgctcaccttgaagatcccaagagcccatacctattcagatgctcctccactgcacaggtctgagaagaagggaaatggaggggagagtattatgaccacttctgggccacctttgtatccaggaaagacccttaccctaccccatcttctactggagagagtgggtaggatgcaggctgtcataggaagtgaattggagcagtttgagatcactcagcctcaggagtccataggacctagacatcaccctgcgatgcttccatcattgataaccactaagatctatcaataaacagggcatcttattcaacctaaaaa

SEQ ID NO: 245786 - DNA, 214 bp, Homo sapiens
gtcgacgaccagttgaattttatttaacctttaaaaagataattctaacttttctaggccactgcacctagcctgggtaatctatttcaatttaacaaaccagcccaacactgcatggctttaaacagtaatagccgtttctttaactcacgcatgtgcagtttgggcagggctcagcagggctggctcatctcctctccgtggaggcctgggg

SEQ ID NO: 245787 - DNA, 407 bp, Homo sapiens
tcttgggaaattattccaaaatttcaagcttcttggtatatgcaatagaattagaagagatcaaagttatatctgatatggcttaattatgtacttacattgtgtaactcaaatgactacatttcataatcctgagaaccaattgagtattacagatgtatttgaagtaaacttattcatctcaatttcttcccatttgttataagaaaccctattagtgataaactaagaggtcttcactttataccatagtcgaatcacctgggaaactttctatgtatatgtgtaaatgtgacaagttaatagaggcttttgtagtggtcagttacactgtataattttaaaatgtaggaacttataggaaatctgtcaaaacattgttaaataaataatggaatcaatataga

SEQ ID NO: 245788 - DNA, 682 bp, Homo sapiens
tggtaataagtaagacaaagtacctgctcaaaattatcagcaaaatcaataattttaaagcaagggaaaaataatgcatagtccttactttctaatcagtcctcggcccctcagtttagttcagtaatgattaatatcatcatgatcatgaccatcatcatccactaggttccaggctctgtgctaaatgccagagtacaaatgtaaagaagacagggcctgggcccctgaggggctctgcctagttaactctagggtacatgttggtgccctaattgtgataggtttgacctctagatttcttctagggctacaattagaacacactgtcaatctggaatgagaaccaaccaatgtaagtatctaaaaattgcccaagatgctataacacttgtgctaggtatagcagggtgactgattttctaacaatattgaacctatctgtaaacaatcaatgtttcacacctagatttattttaacacatactgggcttaaaaaattattgtatatacttgtgtacatgatattttgagatagataatgaaaggttactctagtcacacaaattaatgtctgtctaattgatcaaactaaattactcagaatttcacattcgcctgtcagttacatataagatgaatttcaaataattaaatgaatgatgttaattaagtttagtat

SEQ ID NO: 245789 - DNA, 450 bp, Homo sapiens
gcagtggagcaagagctgggggccaggaagggccaccggacgggcagccatggccaggtgaagagcctggagtcccgaatcaggatccacctctccctgctgagcaagatcctgtgcccctgtttctggtgattttgtaagtgctgactgaaccgactgtcgctgggaaataacacacccgtgaccccaagccaaagtttcacccacagacaaggaaacagactccatgaacacgccgactcccgacggtagaaccggggtgcccaccccagccccggtcactgtgtgtcctgcgcaggggccagggcagcccaaggctcagctctgtcctcctgcccagacctcgctcagccccctggacgccgccccgcgcccgctgcctctcctctcctctcctcccaaaggctccaggaccatgtctgcctctgaagcctgacgttacctcccact

SEQ ID NO: 245790 - DNA, 260 bp, Homo sapiens
aggtgaagtggccttctcatcacatcgtgtcaacaatcacatcatcaacaggactttccactgaggatgtgaacaattactggccatggcagcatccaacaggcttctccactgtaaagtcgcttcgttttccccttcccatactctactttttggaagcaagtcattatgtgtagcccacattcaagaaggcgttggaggcggaatcgtcttcaccagggaatatctacattaaacatttgaaattcttctgtaaagaa

SEQ ID NO: 245791 - DNA, 398 bp, Homo sapiens
cattaaaagactagccaggcatggtggcacatgcctgtagtgcaggctactcgagcgcctgaggcgggaggctggcttgagcccaggaggttgaggctgcagtgagccgtgatcacaccactgcattccagcttgggcaacagagcaagaccctgtctcaaaaaatgttaaaaaagaaaaaaattcaattaacccacctttatctcatgccaaaatacaaaatcctaagtgaacaagctaatttcaaatagttcctagaaggtttaaaatttccctgttctgggctgggaccagtggctcacgcctgtaatcccagcactttgggaggctgaggcgggcggatcacgaggtcaggagaccgacaccatcctggataacacggtgaaaccccgtctcta

SEQ ID NO: 245792 - DNA, 748 bp, Homo sapiens
ggatttatcctgtgtattggatcactcattcaacaaatatgttgagtaattttgtatgccaggtatagaatatgcaatataggttcataatttgcttttatggcctaatatatctggggcatgtatctttgttagtagatggagacctgcctccttttgatggctgtatagtagaccataattaactattccttactgatagacatttagatggtttctaattttttgacttcaaaagcatagttttgctatagaaatactttctaagtagaatgttgtatcaaagggcaggaccgttttttaatataattgatactgctaagttgcactccagaaaaagatttgaagtcccacaacagcgtatgtatttatgtctgtttctccatgcctttgccaacactggactcagtagagttcattctcaagtttacattgctttttttatttgtgatgttgagcttacatctcctgtttatttatgttttttgcccgtatttccttttgagttacctcttcatataaggtaaattacaccctctccacccaataaataggtgcagatcattttcttgtttaacttaaaatcttaagtcctgttattggttagaagctgtaagttgcttttttaatggagccttgctctgtcacccagactggagtgcactggcatgatcttagctgactgcagcctccttatgggctcaaacgatcctcccacctatgcctcccaagtagctctggctacaga

SEQ ID NO: 245793 - DNA, 814 bp, Homo sapiens
cacgctcaggcccccctccctccccgccaccaccgtccgcgtttggccggccgtggggaaggaagaaaggagccaaggaggcgaggcatggatccgcagcctcctccacccgcccagggcagcccacctcaccgtggccgaggccggggccgtggccgaggccgtggtcggggccgtggccgtggcagggggggcgctggagcccctagggcgcccctgccctgccccacctgcggccgcctcttccgtttcccctactacctctcctcccccggcacccggactggagccccactgcagggagcttccaggcacaccaacaggcactgaaccccgcgtgatgcgccccaagtgccgttcccgcaccggaccgagacacaccattgtccccgaccaaccatagcgacggacacagggcaccacagaaccaccgacatgaggcatgacgcacgaaccatggaccaccgcacacttcccagaaccggcccagctcaggcgccacctggctcaggagcacgcgggcggcgaggtcgagctggccatcgagagggtggccaaggagacggccgaacccagctggggcccgcaggacgagggctcggagccgcccaccaccgctgcagcaggggccacggaggaggaggcggtcgcagcgtggcctgagacgtggcctgcgggggagccttccacgctggctgcgcccaccagcgccgcggagccccgggagtcggagtcggaggaggccgaggccggggcagcagagctgagggccgagctggcgctggcggccgggcggcaggaggagaaacaggtc

SEQ ID NO: 245794 - DNA, 730 bp, Homo sapiens
acaccccacgcacctctttttatctctgccccgcttcccatctctcccctctctccccacaggcatggatccgcagcctcctccacccgcccagggcagcccacctcaccgtggccgaggccggggccgtggccgaggccgtggtcggggccgtggccgtggcagggggggcgctggagcccctagggcgcccctgccctgccccacctgcggccgcctcttccgtttcccctactacctctcccggcaccggctgagccactcggggctccggccccacgcctgcccgctgtgccccaaggccttccgccggccggcccacctttcccgccacctgcgcggccacgggccccagcccccgctgcgctgcgccgcctgcccccgcaccttcccagaaccggcccagctcaggcgccacctggctcaggagcacgcgggcggcgaggtcgagctggccatcgagagggtggccaaggagacggccgaacccagctggggcccgcaggacgagggctcggagccgcccaccaccgctgcagcaggggccacggaggaggaggcggtcgcagcgtggcctgagacgtggcctgcgggggagccttccacgctggctgcgcccaccagcgccgcggagccccgggagtcggagtcggaggaggccgaggccggggcagcagagctgagggccgagctggcgctggcggccgggcggcaggaggagaaacaggtc

SEQ ID NO: 245795 - DNA, 251 bp, Homo sapiens
cccagctactaaggaggctgaggcaggagaatcacttgaaactgggaggcagaggttgcagtgagccgagattgtgccattgcactccagcctggacaacaagtctccatctcaggagggaaaaaaaagggggtcgggggaatgagttcacagaggaatgacttgagatttaaacccaaaaagcaccaaaatattttgtgacttcctggttctccatagtctttgaaatgtgtttaattttcatgatattt

SEQ ID NO: 245796 - DNA, 303 bp, Homo sapiens
aacccagggccccagaatcctcctccgctgagcaaatgtgcaggccccaccacgtgccaggcagagtttcggttctgggacgagacggggcccaatctggaagactactaattaacaacgtcacagaggggcgagcaagagtttcgaagacaaatgaaggccagacactgcagcacacacctgtggtcccagtgctctgggaggctgaagtgggacactcgattgagctcaggagtttgaggccgcagtgagctgtgatcacatcactacactccagcccaggcaacagagccagatcatctc

SEQ ID NO: 245797 - DNA, 493 bp, Homo sapiens
caaaatcttcctggatgcagtgtggacagctgtggaagatgcagggggcagaaggattggtgaggaagttaggatatgtagggggtggccatggaggcagagaaatgagtggatttgagggttctggggtgcaaaatcaaggcattgtgataaattggttagggtgacaagaggacattggcaagggtgactcctagatttccatgattggttggacggtgttgccttttccttatcagtgtgctatcaaccccacaatacattgtcattatttttgtttaaattgtcagttaggtgtgagccactgcacctggcctgaagcaattcttgtgcctcagctatgtgggagtctgaggtgggagaatcccttgaaccaaggagtttgaggccaggctgggcaacatagtgtgcgaccccatcttgaacaaaaaagaaagaaagaaagagaaaaaaatcacatgaggcactttcataggtgcattatttctcttac

SEQ ID NO: 245798 - DNA, 760 bp, Homo sapiens
gacaacttcccaggagtttaagcaagaaattggtgtaaacccagaagacggagcttacagtgagccagtttgtgccattgaccccaagcttgttaaatgcagaaattaaaactctatttctgtatatcactatggtaaagggttgttggttacctgtaccatcaatccacaaaaggtataaaacttcatgtattattcttattatcttgtgctgataccagagtacctttaaaataccacccaaatttagttccgagaggcagatggagagtttggattgtctccaaaaatctaaaaggcccttgttttgacaattaggtttacgcatgtggtacatattgaggggcacataatcactggtggattggaaatgcatacctatccttgttccttccctaactaaaacggcatttaaaaggagcgaaactcaccaggatggagaaatcgagagattaaaaaaaaaaagcaagctagaaaatggacagattagtttataatttagcagcttcaggaaatggaataccaaggccagcagtgggggcaaaaaaaaactcagaaattaaaaaaaaaaaaaaaccaaaaaaaaaaaaaaatgaaggacttggcagcagtccaaacccctggaggtgggggcaaaataaggattggatgaatctgtctaaccactcaaatcccagatccttttccctacactgcgcagttgggcaacagccctctctcatttgttcattctctagaaaaggtagcccagtctctggga

SEQ ID NO: 245799 - DNA, 561 bp, Homo sapiens
gagggggctagggatatgctctggggctttcatgggaatgatgaagatgataatgagaaaaatgttatcattattatcatgaagtaccattatcataatacaatgaacctttatttattgcctaccacatgttatgggctgaataatggcccccaaagatatctgtgtcctaatcctcagaacttgtgactgttaccttctgtggcagaaagggacagtgcagatgtatgtaagttaaggactttgagatagagaggttattcttgctgattcaggtgggcccaaaatatcaccacaagggtcctcataagaaagaggccagaaggtcaaagaggtagagacaaagtgatgatggaagtggacgtgggtgtgacgtgagcaggggccatgaatgccgcagccttcagatgccagaaagggaaaggaatggattcccctgcctggagcctccaaaagaaaccagccctgcccacgccttgacttgagcccattgaaactgatcttgagctcctggcctccagaattgcaggagaataaatttgtgttgtttttaatgagcca

SEQ ID NO: 245800 - DNA, 766 bp, Homo sapiens
gagggggctagggatatgctctggggctttcatgggaatgatgaagatgataatgagaaaaatgttatcattattatcatgaagtaccattatcataatacaatgaacctttatttattgcctaccacatgttatgggctgaataatggcccccaaagatatctgtgtcctaatcctcagaacttgtgactgttaccttctgtggcagaaagggacagtgcagatgtatgtaagttaaggactttgagatagagaggttattcttgctgattcaggtgggcccaaaatatcaccacaagggtcctcataagaaagaggccagaaggtcaaagaggtagagacaaagtgatgatggaagtggacgtgggtgtgacgtgagcaggggccatgaatgccgcagccttcagatgccagaaagggaaaggaatggattcccctgcctggagcctccaaaagaaaccagccctgcccacgccttgacttgagcccattgaaactgatcttgagctcctggcctccagaattgcaggagaataaatttgtgttgtttttaatgagccaaaaaaaaaaaagaaacagagaaaaaacaaagcaacacacacagagcgaaaggacagaccaacaaaaaaagagccaacaaaagcaacaacaagagacgaacaataaaaaaacaaagaggagggggccgccgaaactaaaatatgcctccgggggggcaccagcgaaggtcagacacaacagagagtatgcagaccaggggagccca

SEQ ID NO: 245801 - DNA, 632 bp, Homo sapiens
cggacccgagctttctccttcaccagagatgattgtatctcttcacaactccacatccagtgatgtcatgttggtagcttgtcatcagccatggtgggagtatttacaccaaggaaattggcaaccactacaaatcaaagttttgttagtttggttgattggctggttgggttttcttcccccatgaatagctagttactataaagttagcagcacaccactggctggataagaaccatggaaaccaggtaaagcagtgtctaaaggcaggagaagacctgtgcttaaagcactggaaatcaaggagcccatgaaggagaagatgccagggcggtgggtcttaggatgaaggctctgacactggaatgcagtccacatggagtgtggagtcaagccccagaggccatgtaggaggggctgagtactaggcctggtttggggaggggcactggggcagttgagcatccaggaagaacatggctgataacccagagcacgtggcaggcagccttttgagagaaagaaaagagtgtctgtgagctccatgagacttcagaccttgcctcattcatctgtgtccctggtgcctaaaaccatgcatggtacaaaggaggctctatgcaattgcacca

SEQ ID NO: 245802 - DNA, 466 bp, Homo sapiens
aaaattagcacattcatttcatacagtcctgttataattctgttgacaaggttagtcatttgtttaccttaagcaaaatgttctgctttaattaaaatattcatgaataaacaatatttctcacatctcgaatttcatagctggcgttgggctcagcaaaccacagtcagcatttgaaaccataaattgacccctgctgccaaatggcagatatttggtctttagacataatttatatttaactactctgactaattctgaagccacttttcaatactgatctgtgtgtctgtttttgagttcagcattacaaaatattagccaagccttatgccctgctgtaaaatccaaaatgtgggaaatttaaaatagctgtatcaatgaaaatacatttccatttacacagtgaaggatgaaaaatattttgatctttcaggctgatttcaaaagattgccaaaaaatata

SEQ ID NO: 245803 - DNA, 580 bp, Homo sapiens
tattagggaaacaactcatgctttttgcttttaccagataattttgaaagacttgttcctaataaatttggcacgcaatttcctaagatgtccacttctttaaaagaaatgagaacatgtagagaaaattttgaaaaaaaaatgcttgttagaaaagaaatttacatttagagacagattttttaaaggaagtattttcacaaaaggcaggtgacaacattatcacatgtacacaatattatggacacttcctagctttagacagactgtcagttttgttttgcagaaaaccacacaatggcttatctgcttcagagaactttataaacatgataggtaacacattagcatttctaagaaaccatgggaaccctctctgctgagtgatagctcatcatttctccatctctactctttgaagctgggcaaggtaaactatataatagatgtatttacgaaggaggtttaataaggtgaagagaagagcaaactagtcctacttcagagaccctctacaagattctatatttaaatgcagaaagatgtattagccacgtataaatcttgctacctttgagtc

SEQ ID NO: 245804 - DNA, 480 bp, Homo sapiens
actgagttttttggttctcaagtgctttattaagtgctgtctccaaaaatatttaaaaaaacctcaagtcctcagtgtgtgagtgccacagcctcagatatgttgaatgtggtaggagagggacccctcccctactccagaatcttcacacttggccataaacacactccctctacctgaagcaaagctactctgtgacacacaagagggttaaacaaagaaaacctgcatccctcctcagcaaggcctaagctgagttggaagacaaagcacatcagccttagtatcatttgggaggaatttttttacattgtcaatatgctttcagttatgagctctagacagaggtctcattgttttgttgtagggttctccagtatgtggataacattagttgttttagaataggtaattgcaaattagtctgaagaaatctaacaggattcttttaagagcttagatttttcagggaaaaaaaaa

SEQ ID NO: 245805 - DNA, 551 bp, Homo sapiens
ttttttcctccctccacccttgcgcaacaacagcagtcctccaaagagaatgtttgaattgaattatatgaagccctcctttcttcaaatgaagtcacggactctgatggcactggcttgtcaggcaggacgaccggactgggaaagagaccaggtagaaactagtgacctagtgacgggtgaggggcgccaagtggtgcggaccacagtctcaacccccgttccctctcggtgggagtcaagggggaaaagcccttgaatcccgagacggggggatggggcgacgctgcagctggagtacttttatgtctgggagctaaaagggcttttgaatttaaaaaaacattgcttgggttgtcgcgtcagccatcaatgacgacaagaatagttatttcccagaaattaaaaaaaaaaaaaaggaaaagaaaagcgtgaacaataggttcttacctccatgtatcccaagaaaaggaaatgttgtagagaccaggaacttgtccttaatttgagggcggggggcggatgttcagagaaaaccctcagtgggtgtt

SEQ ID NO: 245806 - DNA, 366 bp, Homo sapiens
taagtactaagtaaaagttggacaaagtatagctttaggagtactgggattttgttgggttcttttttcatcaatgagctcactgtgatgctactgccatgaggtgcttcacatttccccccagcatctgatgtgggcctcatcacagtatttgcacagactacagaaacagctcctccaaaccacaaaagtccccagggaaatcccgagaacctgactgcagtaccctttttacccaatgatccacacatacttggctagtttcatttttatcaccatcactcacagaaaggcaggtgcctaatgatgtagagcggtgtgcatgatgcattgatgggggattagcagaaacaactccttcgcctg

SEQ ID NO: 245807 - DNA, 787 bp, Homo sapiens
agaaaagaaagccatgtaaccatgaaggcagagattgaagtgattcaactataagccaaggcatgccaactgctactgggagccaccaaaagctagtcaaaggcaagggaaccatcttcccgagagctttcatggggagcatggccctataaacaactggatttttgactcaagtctccagaactggaagagaatacaatcctcttttgttgttctaaaccatccaatttgcacaaaaacgtgttttgaacctactctaaccaactgtcaaaaggctgtgttaagtgattctctgacaagaaccgggatttagctgaactaagaagcaaaaattctgcatcattttggtggcgtgtacagggacatgaggaaggaaccttggccattctgatgtttaaccaagagttgagctgagtggctctgaccagcgtggaagatgagagcagcctgaacttacactgtgaaaatgccctggagaaatgcagagatgcaggtttaatgaagtccatcagggtgtccagtttcaatcactaactgttggaactgatcctcagacaagccaggactcaagtacaagcccatctacaaccagatgagcccttagggccactggggccatttctgactttgtgctcttcacacacttccttacattagaataatgtaattgttcagtatgttgtgctttaattttttaagagaatgtcaaaggctagccatgacactgttatgtgtatttcttttaatttaacttttccataaatattaaataatgtaattgttcaga

SEQ ID NO: 245808 - DNA, 892 bp, Homo sapiens
gagtatttggatgaaagaaacagaagagctcattaaacctgcaaaactctattccaatggtgaccagcattacttcacctgggaaatcattgaaaaacaattactgtgagactggattgacagagtcatgctctgctgccaaggctggagtatagtggcactatctcaactcactgcaaactccacctcccgggttcaagtgattcttctgcctcagcctcccgagtatctgggactacaggctctctttttgcctgctgccatccatgtaagacgcgacttgtttctccttgccttctgtcatgattgtgaggcttccccagacacttggaactgcacaaaaacgtgttttgaacctactctaaccaactgtcaaaaggctgtgttaagtgattctctgacaagaaccgggatttagctgaactaagaagcaaaaattctgcatcattttggtggcgtgtacagggacatgaggaaggaaccttggccattctgatgtttaaccaagagttgagctgagtggctctgaccagcgtggaagatgagagcagcctgaacttacactgtgaaaatgccctggagaaatgcagagatgcaggtttaatgaagtccatcagggtgtccagtttcaatcactaactgttggaactgatcctcagacaagccaggactcaagtacaagcccatctacaaccagatgagcccttagggccactggggccatttctgactttgtgctcttcacacacttccttacattagaataatgtaattgttcagtatgttgtgctttaattttttaagagaatgtcaaaggctagccatgacactgttatgtgtatttcttttaatttaacttttccataaatattaaataatgtaattgttcaga

SEQ ID NO: 245809 - DNA, 396 bp, Homo sapiens
aggaaccagagaggatctgggtaagatctcacaggaagagtagcatctgggttgggtgtagtgcataggagtttggcaggcagagggttatgatcataattaccatccccaggaacccctaagtatcccctggcattaaaccagagtggtctgaggccttatgttgtaagtccttggcactccaaacctcagatgaaacaaaaattgatggatgtgctttttgaatagttcactcaatcaggttaattttgacgtttaaagaagcagaaaaccactgctcagccaagatcctgcagaactttcctattctccatcctaagcccttggtgaagtagaactcaaattccctacatttttctttcttttatttttcccccctcttgtgagggatgatta

SEQ ID NO: 245810 - DNA, 260 bp, Homo sapiens
atgccagactaaaaggtcacagataactacacttatcattgctggacaaagctctatccaaatgatggcggagagtgatggcatgtacctgtagtcccagctactcgagagcctgaggcaggagaatcacttgaggtcaggagttaaaggcctccattctctatgattgcacctgtgaatatctaagctgcactacaacttgggcaacatagcgagacatctcttaaaatgataataataataaataaaataactctaca

SEQ ID NO: 245811 - DNA, 477 bp, Homo sapiens
ttaatctcaggtcttggtgatgacatggacaaagaaagaagtatttatttgaccttcgctttattggtttcctagggcaaccataacacattatcacaaaccaggtagcttaaaatggcagaagtgtattcttctgtggttctgtaggcaggaagtctaaaatctaggtgtgggcagggccacgctccatctgaaggctctggaggacaatcttccttgcctcttctagcttctgatggctccagatgttccttggcctggccaggatcactctcatctctgcctgtcttcacaggaccatctctgagtctcttcctttctaaggacacctggcactggatttagggcctaccccaagtccaggatgatctcatctcaagatacttaattatgtctgcaaagaacttttttccaggtaaagtcatgttcacaggtcttggggttaggacttggatctgtcattttggggaacaccat

SEQ ID NO: 245812 - DNA, 377 bp, Homo sapiens
ggatcagaaggtaattattccctgtgattccaccccttttcccataggatatgggaatggtgtagagttgggtggggaggacgtttaaagaaaaacataccctgcccagcatgagaatctgcccggcaggggtaagtcccatggacttactctgtgaagatgtctttcaatggcaggtgaggacacaagagggaagtcctgcctttaaaagccacaaatgggccagacacggtggctcacgcctgtaatcccagcactttgggaggccgaggcaggtggatcacctgaggtcaggagttcgagaccagcctgaccaacatggtgaaatcccgtctctactaaaactacaaaaattagccgggtgtggtggcgagcgc

SEQ ID NO: 245813 - DNA, 424 bp, Homo sapiens
atatactataaaaaagttatatgaatgtggcctctctcaaaatatcttattgtactgtacttatctatttctggacagttgactgtgtgtaactgaaagcaaaactgtggataagaaaggacgtttgtatttcttgtcatttccttgctttttttccctaagaaagcaatttccttccactatgtgtagtttggaattgaattttttgttttgcttttttaaaaaattttaacaactgtttcaagcctttgtgcctcttgtttatgggtgtaagttctggaactggagggtaagaggcagagaacaacaaggctagtcttccgtattctgacaaagacgacctggacacacagtgaaatggacaacaacttaagctttcagtgcagaaaacgctccacatcaaataccagggatactgacagag

SEQ ID NO: 245814 - DNA, 461 bp, Homo sapiens
agatcccttttgggaatggtttggttacaaactggtaaacattttcataaatcttagaataattccatacagaaaattatttgtactctacaaaaatatttattaaaatatacaatacataaatgactttctatgtacaagaaactctccatcttgaaacatttgtgttataatatctgtccctcgtgctctctctcaatatcaagagtacagcaacacccttacatgtctgccactcaccatatattttgggggtaaattgacaaataattaattctgcagttggacgttttccccttcccatcaccattattttcctgcaacttttcaggcaaagggagcagagcatggtgtcacaggaagataatgataataattaatgttaaatccactacttcctcctcctcttaggtattttccctccagtattgattatgaaagaggcttagcctcacatcagc

SEQ ID NO: 245815 - DNA, 554 bp, Homo sapiens
ctggcatctccaccactcgagagcctccccaggaaaggaggaaaagagcttcatccttccctccttacccagccctacccccttcccttcacacgtgcccctgagcacagactgtgactctcagcagtcccatcgggtgggtgggctcagtgtggccttggagggccgggtggaggcttgggggcagggggtgggacctctctatgtggggagccttacagctactgtgctggtggacaagggggagccctgaggggtgggccttttccctggaagtctggttcttctacccaaggaagtctgttctgaaacctcggaggaccctagctgatgtatctcttggcctccttggcctcactgacttgttggcagccaaactgccagatccgggctcccctggctggagagggtcccatactggcataatggtctcttttctggagactggaggctgagggaagcctgggggtcagctgttcttgaccttacccccagcagcctccaggctcccaggcatcgggaaacactgcctgttctctcctctgccatttctg

SEQ ID NO: 245816 - DNA, 349 bp, Homo sapiens
acacacaaaaataagtggtatttctatacactagcaatgaataatatgtaaagttaagaaacaattccagtggggggcagtggctcacacctgtaatcccagcactttgagaggccaaggcaggtggatcacgaggtaaggagatggagaccatcctggctaatacagtgaaacctctctctactaaatatacaaaaaattagccaggagtggtggcacacgcctgtggtcccagctaccagggagacagaggcagaagaattgcatgaacctgggaggtggaggttgcagtgagccgagattttgccactgcgccccagcctgggcaacagagtgagactctatctca

SEQ ID NO: 245817 - DNA, 390 bp, Homo sapiens
actcctgagtctcttctttaccttcgtcactgcctgctttcagatatttttctcttcaggcagccctgcaagtgcctagcaaggatgacaaatgagcttgacttccgcggcgacgtgactgtccacaaacatagcctggagcatgcacaatgcagcggcgtccacggcacagtgcaaatgccggaatgtgctgtggggttggacagagatcattgctgcagaaacaaaatgcagttttagattagcattctaggctatagatagctttgcttaattagaggaataagcaaataagtatcctgagtagcttctggattgtctcaacagaggaaaatgtataagtgaacaagttgcacgtaattaaataaaattcactgtgatctggctgtc

SEQ ID NO: 245818 - DNA, 437 bp, Homo sapiens
cccaagcctgtgaccccattgtccatccctgatttcttgggctacgggatgcagtggcgcccactctggcgagggaggggagagggtctagagttcgttcgtgccgaggtgaaatcagcggagtgggagactctgctttttagcttcagtaatttgaatgcacctctcctgtcatacctgagtagagctcagccaaagagccagaatgctcgctgtctctctgtcgttgaccttgaacaaacacttttctcacgttcatattcacctggttgataatatcaatatgatgaaaatatgaagaagctaggatcccaaccttgcatgcccaggggtgatgggtggagttattccaggaattacaacacttccatggaagtgcttgtaattccagcactttgggaggctgaggtgggcaacaagagtgaaacccagtctca

SEQ ID NO: 245819 - DNA, 532 bp, Homo sapiens
aagtgaactataagagtttttgtacaatctgcatgttgagtgcaaggaatctacactaagatatgaaggggccacgagcagtctgggccctatgacacagttaaccagctgtagttccctttccatttaaagccccacactaaggaagaactgctgggaataaaatccaaattgagtaggatagggataatagagccaaaggaaatagaaggttcagattaatgggggtaagtaaagtttcaggaaatctcacagtgtctgaggtcatgtctttaaacacttgagagaaacaacaaaatagagagttctagagctgtgaagttagaaaacctatcttgactcgtaactcctatgtaaaagttggggaaaactaatttcatattaaaatgagcagtaggaaaagatcacagtcaaatccatggaaacctatttgaaaagtgaaaataaggattagcgtaatgtctccacagtcaagctgtaccagaaagacatatagtttatgaagctagtgtaaaataaaattaatattttg

SEQ ID NO: 245820 - DNA, 413 bp, Homo sapiens
tggtggtgggcgcctgtaatgccagctactcgggtggctgaggcaggagaatcgcttgaacctgggaggtggaggttgcagtgagccgagatcacgccactacactccagcctaggcaacacagcaagagtccctctccaaaaaaaaaaaaaaaggccccaacttcatgaattacatatgccagtaggggagacataattaaatcacaagtaatcatataatttcaggtaataaaaaatgtcatgaagaaaaataaattaggtaagagggctgagaatgggaggcttctattttaaatacagtgggtcagggaaagactgaggataagacaaaatatatatcaaaaccaaactatgccattaaacaaataaatactctcttttaaaaagtaattggtggcagcacaactctct

SEQ ID NO: 245821 - DNA, 812 bp, Homo sapiens
  misc_feature (680)..(680): n is a, c, g, or t
agcggatttgaacagggcctgttgtaagtagttaatgtgtttgacaaccctgtaatatttgatatacctttggaaatgcatgagttactaatttttttgaaatctagttgtttgtaatgattgtcacttatgtctaatatcacaaaatattcaagaaattggagctgtgcaatgaacaataggacttctctttaaaaattgcacatcatgcttgtgcagcggcagatgtctgtgatagaagaggacctggaagaattccagctcgctctgaaacactacgtggagagtgcttcctcccaaagtggatgcttgcgtatttctatacagaagctttcaaatgaatctcgctacatgatctatgagttctgggagaatagtagtgtatggaatagccaccttcagacaaattatagcaagacattccaaagaagtaatgtggatttcttggaaactccagaactcacatctacaatgctagttcctgcttcgtggtggatcctgaacaactagatgttcctagacattttctttatggttccaagtgcaaaacaggtgttcttatctaaaacgtcaattagaaaattatctgcggttgttaatctactgtatattttgtttggtatatttactaagtgcactctttcaaaacttattctataactttatcaattcatgtgaanttttagctcaatttttcaaagttcactaatattctcaatatttaatgctaaatgctttgcttacattgtaactcaccctaaaaacttttagtgaccaaaatcctaatatgttgggaaaaaagcatatgcata

SEQ ID NO: 245822 - DNA, 639 bp, Homo sapiens
  misc_feature (507)..(507): n is a, c, g, or t
gcagtgaccctcgccccttccttggcagcacatcatgcttgtgcagcggcagatgtctgtgatagaagaggacctggaagaattccagctcgctctgaaacactacgtggagagtgcttcctcccaaagtggatgcttgcgtatttctatacagaagctttcaaatgaatctcgctacatgatctatgagttctgggagaatagtagtgtatggaatagccaccttcagacaaattatagcaagacattccaaagaagtaatgtggatttcttggaaactccagaactcacatctacaatgctagttcctgcttcgtggtggatcctgaacaactagatgttcctagacattttctttatggttccaagtgcaaaacaggtgttcttatctaaaacgtcaattagaaaattatctgcggttgttaatctactgtatattttgtttggtatatttactaagtgcactctttcaaaacttattctataactttatcaattcatgtgaanttttagctcaatttttcaaagttcactaatattctcaatatttaatgctaaatgctttgcttacattgtaactcaccctaaaaacttttagtgaccaaaatcctaatatgttgggaaaaaagcatatgcata

SEQ ID NO: 245823 - DNA, 682 bp, Homo sapiens
  misc_feature (550)..(550): n is a, c, g, or t
atagactggaaaagaaggatctcaaactcgaaccaccagaagaagaaattattgaagggaatactaaatctcacatcatgcttgtgcagcggcagatgtctgtgatagaagaggacctggaagaattccagctcgctctgaaacactacgtggagagtgcttcctcccaaagtggatgcttgcgtatttctatacagaagctttcaaatgaatctcgctacatgatctatgagttctgggagaatagtagtgtatggaatagccaccttcagacaaattatagcaagacattccaaagaagtaatgtggatttcttggaaactccagaactcacatctacaatgctagttcctgcttcgtggtggatcctgaacaactagatgttcctagacattttctttatggttccaagtgcaaaacaggtgttcttatctaaaacgtcaattagaaaattatctgcggttgttaatctactgtatattttgtttggtatatttactaagtgcactctttcaaaacttattctataactttatcaattcatgtgaanttttagctcaatttttcaaagttcactaatattctcaatatttaatgctaaatgctttgcttacattgtaactcaccctaaaaacttttagtgaccaaaatcctaatatgttgggaaaaaagcatatgcata

SEQ ID NO: 245824 - DNA, 287 bp, Homo sapiens
ctgggaaaaaagccaactgctgtgttcggacacttaaagcctatggacaggcctatgtgttgaggaactgagatatccagccaacagccagcaaggaactgaggtctgacaacaacctcatgagagagattggaagcagatcctgcagccccagtcaagcctttcagttgctgacaccttgacagcaacctcatgagagacgctgagccacgtgatgaggctaagctgcgcccagacttctgtctcataacagctatgagataataaatgtttgttttaagccacta

SEQ ID NO: 245825 - DNA, 222 bp, Homo sapiens
ccatccacagatggcaatgcaactggcacctccagggtggggcagtgggaggccttgagtgggagagaataagccgcaaggcagggcaaatcccgtgttcaccctagtctgtctttcccctctctgggttggttttcctctctgcaaaattaggggttaaatcagtgagtttcctcttgatgtttattattaataataagtaattaaaataatatttaatta

SEQ ID NO: 245826 - DNA, 452 bp, Homo sapiens
aagtgctaagattacaggagtgagccaccgcacctggcgcctattcttaataatgaatttaaataagtagtatcataatttgatcttacgaatttttactaatgaatcttttctgttttatttaatggcagttccatttacatttcattcaacaatggagactactgataaaataatttgaaaactagtctaatctattatttttacaaattaagaaattaaagatcagtttaaatgtgtcttgctcaaagttataaaactagaaaattgcagataccaaactttctaatccttagttcactgtttttctgatttgttacttcatctctgtgttcctgtaatacatctggttcaacaagtcattttctgtgtgccaggcacttttctaggcactggtgatatcccctgaatgtggaattgtgctgaaaataaaataagaaaagtagattcta

SEQ ID NO: 245827 - DNA, 461 bp, Homo sapiens
ttctctctgaggtgatctttatggtaaaggataacaacactcagagcaaacctgatggcagaaaattcctaatcccccacccttttatgcccaatttatatggtataagttagctcaagttcccggaggtccctgaaatcttccaaaggccatctgacatttctgacccttgactccctacttcacagaccatactattgtgaccattgcctgcacttcctagttaaagtgaccgccagatactattgtcatttaaatgttgtataagtgaccaaaaaaacatacctgaaccatgaaaaggaaaaatctaattcttttctagtctttcatgtttgaaagagtcccagatcttttgtattaaagattcctgtaatcactgaagtaaaacaagactaaaataatttaaatcaaaaatccctttgacaaggaatagcccctttttgagttattttccaaactct

SEQ ID NO: 245828 - DNA, 553 bp, Homo sapiens
ttgagatggagcctgtctcccaggctggactgtggtggcacaatctcggctcactgcaacctccacctcccaggttcaagcaattctcctacctcagcctcccgtacctgggattacaggcacacaccatgacacccagcaatttttgtatttttagtagagacagggttttgccaagttggccaggctggtctcaaactcctgacatcaggtgatccaactgcctcggcctcccaaagtgctaggattacaggtgtgagccactgcactctgccttcgttcttcaagtcccctgttttcctacctaattcctatctagttgatatacccattgttgacagtgcagtattatctaactattatggaagaactatttctgtcttcaattctgtccacttttgctgcatatgttttgacagtctgttactgtatacaaaaatatgtacacttgtattatcttcttgctgtatttaatctttaattaatatataatgtcctttgtctcatataatctttatttaaaatctattttatctgataataacatagctgt

SEQ ID NO: 245829 - DNA, 395 bp, Homo sapiens
tacgccaatcaattctattacacattttcctgcaactcctcacttgataatgaagtaatcaaaagaatcagggttttacctataaatattatttcacttgatactttagatgaatttcaggatccttgcatgcagtgtgcccttaataagtaattgctgaatgaatgaacaaagtattgggctgaatcacattattgtatatattcacaaagtaatagatcaaatcatatttttagtacagccagtcatgaattgattcttaaaataaacccatggtgatcattttataaaagggaagacaatttttttaatttggtaagaacacttatactttaatgtatgttttttaacctttcattttgaaataatgttataataaattacaaaagctataa

SEQ ID NO: 245830 - DNA, 188 bp, Homo sapiens
cctcttcggtggcgggggattggggataggtgggggtggcactggggctcagcagccacactggaaggtttttcagggggtttatctccctcttctctgagctgtcgtgcctgttttgtttgcctcggtcccttccccacccccacagttctctgttaaattgtgttattatatttaaacaaatcaat

SEQ ID NO: 245831 - DNA, 950 bp, Homo sapiens
ccgtcccgagtatctcaggtacaacaattgcttgaggacgggcgcggtgactcatgcctgtaatcccagcattttggaagactgaggtgggtggatcacaaggtcaagagatcgagatgagcctcaccaacatggtgagactccgtctcaaaaaagaaaaaaaaaaagcactgggataacaaatagtaggtgcaggaagtagccatcttctatccctcagtctggggacccaagggaagagcctggggatctcagaacccagctgccctgatgagggcttggacggagctaggacccagtcctctgtggaaggcccttggccagtaggtgctggtgtctctctcgggggttgtgcacggttgctagctctgggggtacgagacaaagctgaaaattggaaccaactgctactgctgacagtaagtgcaaggtcctaagtcccttgtttctccttcagttttccagttctcctgcagcaccccctattggcaaccctagagagggcgggctgccaaaggaaagattctgcagtgccagccccagaatcacaaagccaactacaaagagtgcatgtgggctgggcacggtgactccagctaataatcctagcactttaggaggccaaggtgggcgaatcacctgaggtcgggagttcaaaaccagcctgaccaacatggtgaaaccctgtctctactaaaaatacaaaattagcctggcatggtggcacatgcctgtaatcccagctacttgggaggctgaggcaggagaatcacttgagcccgggaggcggaggttgcagtgagctgagattgcaccactgtactccagcctgatgacagagcgagattccatctcaaaaataaataaataaataaggtttcttgtgctttctatgactgcatcagaacagagaatgtcagtatccaataggatgccagtggaattccctg

SEQ ID NO: 245832 - DNA, 850 bp, Homo sapiens
ccgtcccgagtatctcaggtacaacaattgcttgaggacgggcgcggtgactcatgcctgtaatcccagcattttggaagactgaggtgggtggatcacaaggtcaagagatcgagatgagcctcaccaacatggtgagactccgtctcaaaaaagaaaaaaaaaaagcactgggataacaaatagtaggtgcaggaagtagccatcttctatccctcagtctggggacccaagggaagagcctggggatctcagaacccagctgccctgatgagggcttggacggagctaggacccagtcctctgtggaaggcccttggccagtaggtgctggtgtctctctcgggggttgtgcacggttgctagctctgggggtacgagacaaagctgaaaattggaaccaactgctactgctgacagtaagtgcaaggtcctaagtcccttgtttctccttcagttttccagttctcctgcagcaccccctattggcaaccctagagagggcgggctgccaaaggaaagattctgcagtgccagccccagaatcacaaagccaactacaaagagtgcatgtgggctgggcacggtgactccagctaataatcctagcactttaggaggccaaggtgggaggattgtttgagcctaagagttggagaccagcctgggcaacatggcgagaccccatctctacgaaaaatttaaaaattagatgcctgttgtcccagctactaaggaggcagaggtgggaggaaggcttgagcccaggagttcaaggctgcagtgagctatgatcttgctgctgcgttccagcctgtgaaacaaagcaagaccctgtttctaaaaaaaa

SEQ ID NO: 245833 - DNA, 342 bp, Homo sapiens
tgcccaggacacaccaagttgccctgggagtgcttcattcagccttattacaagcaagtttttaaagactgaaggggacaaggagtgggctgatatgaagtcagcaggaattctgactgctttccagagagaaccttagtgactggctataaggtgttggactacaggggaagagttatggtgtccagcgtctggctttttatgtctacttggtgtcagtctggaacccacagagcaattggcttcaagaggtcgttagctcaagtgggagtgacatgtgactgctgtttcagtccagtgactctctgggccagataattaaaggggtctcgcattcctcag

SEQ ID NO: 245834 - DNA, 443 bp, Homo sapiens
ttcctaatcaggtctatttatgcaaagaaaggactgaaattcacatagttctgattggtctgtatagctgaattctgatttgtttgttttcaagccccaaaccagaagtctctgtcagatgtttatttcaaacagtcaatgggagtagtagtttctggccaaagtttatcttggcaccgacaacaggaaatgatttggcttgattatagaaagaggtgctgtgacacctttacaatgtctttctgagaacacagacatccctcacccagctgtagcttcctggttctgttgtaactttgaatacctcagttaaccatgaggagtctattttggtcgtcggccagggctcactttaacaaagctataagaaagataaattaagtgggtccatgaaggttttgaatatattaagcctattttatgtttaaaaatataaagcaaaa

SEQ ID NO: 245835 - DNA, 449 bp, Homo sapiens
actttataagcgtgattctcacaacatgcctggggcttgggactgccagcccagcattacagggaaaggaggccagagacagcaagcaatttgcccaagacgacacagctgttagcggcagaatcaagatctgaactcaggcttctgacactccaaagtcttgatttaactcttcagtgtactgtgaaccttactgcaacagactccagatgagaatctcagcatggtagctaattagttgtgcttggagaagcatgaggagtctcccctgctctgaatttgcaatctgtgtcccccacctggctttctgcctgaagctgcccccatgactcccttctttgtgcaaaagcatggaagcttctgttaggatttggccaactacagcctgcctgcaggtcaaatccagctggccgactgattttataaataaagttttattggaactcaaa

SEQ ID NO: 245836 - DNA, 355 bp, Homo sapiens
agctttgtgcatggggccggctgtgcggtctccgtgctgcactctctccccaggagtccttagcctcagaggagggaggaagcacgacaggagggatcaccgtgaggcatcttcccccagccctgcctccatcctgctcccaacccccggcccccggcagagactggagagccacagggagcactgcccggccccagccaccgataaaactggaattgaagactgtcattgcatggatgttctcttcatatatttaaaaatgactatcaggaaaaagtttgagcctcctaaaaatggtagctggtttgtttttcaacaacaaactttaataaaaactttaatgtttgatatttta

SEQ ID NO: 245837 - DNA, 298 bp, Homo sapiens
aatgttataacagaatacataacagctaagaaaacatgccacattttattttagcattttcaaataatttgtttttggtgtaagcacaggataaaaaaggagagcgtcaaagaaaagagacttaaaaaaataacattcataaaaattaacaaagtatattttggatgatgtttttacaggaaatagtttaagttggtagaatttttaaaatggtactgtattagctaataaaatattcagtacatatatatgtttggatttatgcattaaaaaactaataaaattatttccaactttt

SEQ ID NO: 245838 - DNA, 465 bp, Homo sapiens
agcctgggcaacacagtgagaatctgtctctacaaacataaaaaacatcagctgggcatagtgctgcagccctagctatgtggtggctgaggcagaaggatcgcttgattgcaccaatgaaaccatttcgcatgtgctagaatagctaaaaaacccacaaaaagcaaaataagtgttggtgagaatgtagacctactggacctctcgtggacaaacgatggtccgatcactttcgatgactgtttgacactttcttatacagtaaaagcagttctactcctaggtatttactcaagagaaatgaaacatctatctacaagaagatttacactagaatgttcatggcagtcttccttataatagattaaaaaatctagaaataaaccaaatgtccaccattataagaatgaatgagcaaattgttatattcataaaattgagtatcagtcagcaattaaaaaaaaa

SEQ ID NO: 245839 - DNA, 218 bp, Homo sapiens
attatattgcattgcagggatgcagtgtcttggagcatctagagaagtagcattaacccagggcaatgcaaacctgtggtctccttggcgttgtgctcaacttgcctttattttccctgacaaagaagcatcttcttatgttgctttcttcttattaattgaatttgcctgcagactgtagtgattaaccacaattaaaatagattaatgtataataa

SEQ ID NO: 245840 - DNA, 384 bp, Homo sapiens
aacaacaaaacacagagaatgtactctaagaccatagaaaaaataataaagataaaagcaaaagcagaatttaatgaactaggaaagagacacagagtaatacagggcaataatgcctacatgtctgcttcttgtaagaccaatgaacctaatgagcttttaccaagacaaggaaaaacgggagaaggtacaagtaaacaacaaacactaggaatgaaaaagcagacataattacagatgttgcaaatgtataaactataacatgaacaactttatgctagtcagacaaaatggacaaattcctagaaaaaaaaatttaacagcttacagtagcccaagcaggtgcagggaaaataaaaataggtttagatgtgtctgcgtgta

SEQ ID NO: 245841 - DNA, 511 bp, Homo sapiens
ttttaaaaaaaaggtttttaaaattatttctatcgaaagagagcctggttctttcagaaagcatttttttggccttcactgagatgtgtgaatttcaggcacagggttgggagcaggcttttaaaatgaccacttgttcagagaatgatttcacttggaattcagttcataaaaaatagcagcagaaagccaacagagaatcaactcatttgaccctattcccaaagacagggcagcttctgattggcagttgccaccacaaaggccgtgggatgaaattgaatgctggcatgtttcgggatttcttgaagtcagctcagagttaatatgaaacattaccaaggaaaactaggtttttccgtctcgcctgcaaaaagcatcatcaggtaaactcttattcctaggagagaaagtgaaggcccaggtactttaataatttcgatttagagatttagagctgtggaaaagctttctccccaaattaaagaagactctaataaaatttgtgccc

SEQ ID NO: 245842 - DNA, 267 bp, Homo sapiens
aaatggtataacaacaaaaatagccaacaataagatcaaatacagactatataaaattcatgtatgcttaccaggattgtcaagcccaagaaaaaaaggaaatggttgatgaataagaaaggtaggattgggtgatttttttttcctttaaaatgttataacattgcctttataattacatgtttaaattccacaaatagaagcattttgttaactccttcaataccttccagttagtgtactgcactcccactcacacctcatgcc

SEQ ID NO: 245843 - DNA, 538 bp, Homo sapiens
tacattttgtaattggagtggttcagtgaatcctctccagttaaaataggcatactttttaaagtggattacataacctggctaatgagtactcacaatatgccaggcactgtgttaagtgcattatataatgaatgttatactatttaatccttgcagcaactcttaagaggcaggcactattattattcccagattgcagatgagggaataagttgtaggatagtgaatactaagtacccagcaaagcatgagcagcagagcagaaataagtacagtcttaccaaaaacagcagcttgaattggtgtaaaagcaccaaacgagagtcaggatattgttgttccagcctactgtgtgtacttacaagctgtgtgtcgttaggcaaatcctacccttttagggcctcaatttattcatttgtagaatgccggtgttaagggaacaaaagttctgaaccctactcatcagaaccccctggagagcttaaaaaataaagatcttggggtcacacctcagagattttgattcagaagaact

SEQ ID NO: 245844 - DNA, 276 bp, Homo sapiens
aatttaaaattcagtttttcaagtgtataccagacacgtttcaagcactcagtagtcatgaggcctgtggctaccgtattaatagagacacagaacatttccatcatcatagaacattcttttggatagcactgttctacaagtgttttgttaacagtatcgtcttggacctcatgttcatagccacttttgtggttcctaagtcaacaccttttttgccctgagtgtcattaaaggggttgttaagaagtacttttgggtcttctattaaaacta

SEQ ID NO: 245845 - DNA, 1048 bp, Homo sapiens
cggggcctggagggggaaccgcgcgctgcggctgctgcgcttgctccgtccccggacgccgctggcttgcttcccttgtcagctgtgtggggactggcagagggtgtgagagcgggaaacgaccggacgagcggcggggagcgtcctgggtgaggaggaggaagtctggtcttaggtgtgaaggatgctgacgcgttccggcgcgtcgcggtgccactctcggcttctgagcgttgccctacgccgcagcgggttttcctcagctgtgaagcgcggctgcgtcctgcccgggcttccccccgccgggacggttccaacgcccgagcccagcgggcttgggcctccgctgtcgggccaggctagttgctccggggctgggagttacggcaccggggttggggcggagaagacgaactagttcaactcgacccggttaagcaagcgcagcagtgtgtgttcttggatcatagtatttcatgtaaacattttgatttaagagaaacaaaagggaaaatattaaccgttttcaagcatccaaaggcgaaatgcttcatctctgggatggagtagaggagtagcctctgcggttgagttgcagtcgtgggtgcaagaagcagcgctgaagcagagtgcagccccggaatagggcgggatggaatggcctgggcagttcagaaacccgcgaggagtccagggcggaacaggtagggagcaggggattgtattgaaagatgaaactgaaagaggggtagtggagaccagatcatgaaaagccatattaggctaactgtggcgcttatgcttaatcctcattgacagatcttgagatcattttgaaaaatcactttgtcttcagtttggtaaaagtttggagaagggcaggacttggaagaccagcttagggagactaaatagtagtgacctccaagggagaaactggacagaaagaatatttatatttagtgccacagaactccgggggtattgttttctcctttaattttacttgaaaaagtaataaatgcacatactaaaaaattcagagtgt

SEQ ID NO: 245846 - DNA, 543 bp, Homo sapiens
actttgcatatctgcttgcttttgcattagagcttggtcagcactgttgagagatttgcaaatgcaactaacagggctttcttttagcatcctaccctttcaaaaatccaggaggcaaacaatgatcaatgttgtcataagtaatgcagaggatggcaataataataatacctgactttcaccataagccatgtgctgtgcgaaatgcttacctgtattgttttacttcatcctcatcatcccctataaggcagatgctattatgaccctcactctacagatgaggaagttgaggcttagagagaggatgccttactcaaggcctcagaaggggtacttcagcacccccccacttcccttcaagatcctctaaggccagtgctctcatttgacaaatgaaagacagatttggagagacctgagatcttttggacatcaggtttatgtgtcaagcatagttttatttattttattttattttgttattttttgagatcacgccattgcactccagcctgggtgacagagcgagactctgtctca

SEQ ID NO: 245847 - DNA, 343 bp, Homo sapiens
gagtttagcaaattgatcttgttggggctgaaggcccttctgacacatactcaggagtgtcttaagaaagtacaaactatgactatatggctgtttgccctgacacccattctgaaccagatcacaaagttgatctaatccttgccttcatgtgtctggctcccttctttcctctcagggcccatttccaggtagtgctccctcactccctcttttctctccatttctgctggccctccgtctcagattccagagccctcatccagcctcttcaccccgtctcttcttccttcctgtaccttctggctcttgtctattcccactgctttattctcctcccctc

SEQ ID NO: 245848 - DNA, 450 bp, Homo sapiens
ggacatttgaatgacatatcccctctgtcacttctctccggggcccaaggccaccctcctaggttaccacagtggcttcctaatgggccataccctcacttgctttccatcaccccctgagacctggcccctgcatacctctccagcttcacccctcacatatctccctagccagacctatagtatgttttaaaaaaaaaggaaatcgcactcctctggcctctttaccttggcacacatttttccatcacctgacccctgacccacactcccttttcctgtgtaatccaattatctctaggcctcccgtgtttctgtttgtccttcaatagaaggttgtttgtcttgtcttttattgtatttctagaaccaagtgcagagactgtacaaagtggacctcagcaaagatttaccgaatgaataaatgagttcagaacgctgacttaactc

SEQ ID NO: 245849 - DNA, 432 bp, Homo sapiens
tgaaaggttaattcaagtttgtgaagtagatgtatgcaaagacataaaggtcactgaagagagtttgggagaactgtatgtacctcagtattgatagctggcaaagtgttcaagaaaaacagcagcaggaaatgagactagatagattggcatggcacgtcctatattctctgccaaggagtttcgactttgtcttacagattgatgaaaaccttatagattgaaccttacagatgggaaccttatggattgaagagattttagtagaggagaaagttattagatttgcattttagaaagaagtagcgtggactatacaaagagcaggtttttttggcacctcatctgttttcacttcctcataaaagaggacatgattgtaggttgaactataccagacataaaattaagaaacttggagtgctatttagc

SEQ ID NO: 245850 - DNA, 126 bp, Homo sapiens
aagtttattttactgaagctagattacaagtatatgaatgtgtgtgtatatgtgattaaatgagctattacatgtaaaagctcttaaaacatggcacatagtaagctgttgctttaaaaaaaataa

SEQ ID NO: 245851 - DNA, 383 bp, Homo sapiens
ccaaggttcaaacgattctcctgcctcatcctccagagtatctaggactacaggtgcatgccaccatgcctggctaatttttgtatttttagtagagatgggggtttcaccatgttggccaggctggtcttgaactcctgacctcaagtgatccacccgcctcggcctcccaacaatcttcccttttgacaaagaagcagcaggatccccaggcttagagccccaggtggctaacattatctagttagaatttagtaataggacatcccctgccttgtctaaatccatctggcccttcccctctggggggttcagatagggaggattgggaccttctataaatttgcttcttgaataaacttgactgaaaacgttagttttaa

SEQ ID NO: 245852 - DNA, 365 bp, Homo sapiens
caggcaatagtgatgctgtttgaatcaggaaactgtccctaaacaagttaagttttctgagcctcagcttcctaatttataaaatgtgcattgccctacccaccatattttgtgggaactgaatgggtatttagagactgtgatgtactaggcagtaaataaatgctcaccagtatctttgttttaatagtttaatgtgtcatcagtcctcttgctagctgactgagaactcagaatctggatgtgtggaggagctggtatactagtatctgtgcgattgggtggttttggtcacatcaggcatcacaggcagatgccaggaaggcagaatgtaaacaaattaaaaacctgcacattgctcaagg

SEQ ID NO: 245853 - DNA, 296 bp, Homo sapiens
ccaggcacacatcctgctcctcaacaactctggggaggaggtcctgttactgtggccctctgacagatgaggaagccaggcgacactgccagcttcagatgaggaagccaggtgacagtgccagcaggtgacactgccagtaagaggcacagcagggatctggtgagacgaccaccagcaaactcccagatgacactgccaccttcagtaagcatgctcaacacacttactttgatttgctaagctgataaaagagcgcacctgcaggaatgccagatgggttgtggcactgtgga

SEQ ID NO: 245854 - DNA, 378 bp, Homo sapiens
tgttctcagggtgagataaagaggaatagagacctggctaagccatctgaaacaaacagacaagcaactcagcactacaatgggactttttggatatatttggaggcaaaggaatatcagttcttgtcaaccttcattttgcagactgtgtgatgtagcagaaaaaagccagagagatgtgggtggaaaccccagcctttctatttggcgaaataacttgaccctgggagagttcctccttttttagcctacaaaattagtaggagaatagagttattatgaaaattatacgagaaagagtatgcaaagtgctaatcattgagactggcttaaagctaggactcaaataaatatgagttctgctatttttccacatac

SEQ ID NO: 245855 - DNA, 494 bp, Homo sapiens
agcattgacattaaatctgtgttgacttgcattaaaatctgacttttaaaactgctatttgaaagtaacaaatcatctagctttgattagagagaggtttgcctggatgcttgcgtcagagggagattaaaaataggagttgattgctttcacacggagagggaaatcctggaagctccttattctgggtatatctgcttccagctgattgttgtttacatctctgggtgtttctagacatctctagaatgtctagaaacattctgaggaactatttctaggacccacactgattagctcacctctctctccttcagaaaggtgtgaaacttctacaaattgtgaatgccaaggcttaaacattttaaggacaagtgcatggtttgctttccaatgaaggattattttggttggcatctgacttggtttgaatttgtttcttatagatatactacacttcttgtatttcatttgttttagcaatggatgactgg

SEQ ID NO: 245856 - DNA, 1406 bp, Homo sapiens
tactgtatcacagggataagtcatgagtccagttagtgtaaaatactcgtcatgggagtaggattatgggtttataaaggcaagagtaacctgaacatttataagtaaacatattcaaagatattctggcctattttaattccaaattaggcatgtttcacaaactttttaacaaatttttaagtagtcataaaatttcacttcccagttcttatcactttttaattttaatttctttggattaatgtcatcattaaaataggaatacatattggatttttctgactaaaaacctttaaaagaattttttacagaattactgtaagacacaatttctagactctattttataaaattttgctgatttaatcagtgattatgaaattaaagtgacaaaaataagcattacattttactgtattatagtagcaccagtcaaaatttttttttttttaagtggccttatggagacatttgcagcatcagccctgtggaaaaggacaaggaacggagttcaacctcacatttcgtaaaggcagtggaaaaaagtcagaaactttaaaattttctacagagcacagaacagaacttcttacagaagcattgagatttagaactgatttttcagagggaaaaatcacaggaaggagatacaactgctataagcatcactggagtgactcaagaaaacctgtaattttggaagtaactccaggaggctttgaccaaattaatcctgcaaccaacagagtactctgttcctatgactatagaaatattgaaggatttgtagatctctcagattatcaaggaggattttgtatactttatggaggatttagtagattgcatttatttgcgtcagagcaaagagaagagattattaaaagtgcaatagaccatgctggtaactacataggtatttcattgcggatcaggaaagagcctttagaattcgagcaatatttgaatcttcgctttggaaaatacagcactgatgaatccatcacatctttagcagagtttgtagtccaaaaaatatcacctagacattcggagcctgttaaaagagttctagcacttacagaaacatgtttagtagaacgtgatccggcaacctataatattgcaacattgaagcctttaggagaagtatttgcgttggtctgtgactcagaaaatccacaactttttaccattgaatttataaaagggcaagtacggaaatattcttcaacagagagagattccttattagcaagtttgctggatggagtaagagcctctggtaatagagatgtttgtgtaaaaatgacaccaacccataaaggtcagcgatgggggttactcagcatgcctgttgatgaggaagtagagagccttcacctcaggttcttagctacgcc

SEQ ID NO: 245857 - DNA, 1158 bp, Homo sapiens
gagccggcggcgggaggagctagggctggagcctctccagcctcccgcgaaggtttgagcacaaaatgaacataattagggaaaataaggatctggcatgtttctacacaacaaaacattcatggagggggaagtataagcgtgtcttttcagttggaactcatgcgattactacatataatcccaataccttagaagtaacaaatcagtggccttatggagacatttgcagcatcagccctgtggaaaaggacaaggaacggagttcaacctcacatttcgtaaaggcagtggaaaaaagtcagaaactttaaaattttctacagagcacagaacagaacttcttacagaagcattgagatttagaactgatttttcagagggaaaaatcacaggaaggagatacaactgctataagcatcactggagtgactcaagaaaacctgtaattttggaagtaactccaggaggctttgaccaaattaatcctgcaaccaacagagtactctgttcctatgactatagaaatattgaaggatttgtagatctctcagattatcaaggaggattttgtatactttatggaggatttagtagattgcatttatttgcgtcagagcaaagagaagagattattaaaagtgcaatagaccatgctggtaactacataggtatttcattgcggatcaggaaagagcctttagaattcgagcaatatttgaatcttcgctttggaaaatacagcactgatgaatccatcacatctttagcagagtttgtagtccaaaaaatatcacctagacattcggagcctgttaaaagagttctagcacttacagaaacatgtttagtagaacgtgatccggcaacctataatattgcaacattgaagcctttaggagaagtatttgcgttggtctgtgactcagaaaatccacaactttttaccattgaatttataaaagggcaagtacggaaatattcttcaacagagagagattccttattagcaagtttgctggatggagtaagagcctctggtaatagagatgtttgtgtaaaaatgacaccaacccataaaggtcagcgatgggggttactcagcatgcctgttgatgaggaagtagagagccttcacctcaggttcttagctacgcc

SEQ ID NO: 245858 - DNA, 367 bp, Homo sapiens
ttttaacaatttggatagtagctctaaatatttacgatgacagttagatttttggtcgtttcaatagtgactgtgatacattaaattttattttatatgattttattttatgaacctaaaagtaatactgattctgtctttagagatacaactgctataagcatcactggagtgactcaagaaaacctgtaattttggaagtaactccaggaggctttgaccaaattaatcctgcaaccaacagagtactctgttcctatgactatagaaatattgaaggatttgtagatctctcagattatcaaggaggattttgtatactttatggaggatttagtagattggtaagtactattttaaaaaaaaa

SEQ ID NO: 245859 - DNA, 524 bp, Homo sapiens
gtgtatattgaatagtaaaagggacatatgtcacaaaacagatttattcctacaaatttacataaaaaataagaagtgaaaaaataaacccagattttgaatgcgctggcttgggagcccagagaccaggcctggcttgcttttaaattgttgtgtgacctcagccatgtacctgtgcctctcaaggcctaaggtcctctctctgtaaaagaggggactacatgagatgatttcagctcaaatatccttggagactctcattgttttctagttgtaaattatgctttttctaatagtaaataagaaacgaaacagtattcatgtatgacagagaatactttgttgtttttactctgtctcaaaaaaaaacaaaacaaaaaggaggcacaaaaccccaggcttcaagtctctgcagcctgctccacatttgggcacagaaggactcagacaggcactgtgtgggcacgaggttttacaggggtggtcagacctcaggctttaatgaataaagacactactcccaa

SEQ ID NO: 245860 - DNA, 572 bp, Homo sapiens
aagagtgcactggacttttctggcagccacatacagtttttcacacacagggggtccaagtttcaatggagagaaacagttttacagaacaggagggtaaggtgagaaactgccagccccgccgcatctctagtaacacgtatggcaaaagatgaggatgaaagaaaagagtgctaatgggggctggcaaacgcttactgtaaaggaccagatggtaaataatttaggatttgccagccagataatctctgtagcaacgactcaactctaccttgatggcacaaaagcagctgtagacagtatatcaataaacgaacagggatgtgttccaataaaactttatttatagaccctgaaatgtgaatttcataggattttcatgtgtcatgaaatactgtttttcaagccatttaaaaaatgtaaaaacctatgacattatgttaagtcataatgaaagaagctagccacaaaggaccacctattgtatgactctgtttatataaagtgggtttctctgtaggcaaacccacagagaaaaaaagtagattagcagtggttgcccagggctggga

SEQ ID NO: 245861 - DNA, 455 bp, Homo sapiens
agatcatgccattgcactccagcttgggcaaccagagcaaaactccaactcaaaaacaaaacaaaacaaaacaaaacaacaaaaaaacaagaaaagactttctaattgacttgaaatccatccagaggcaatgaaagaaaagactggggctaggcacggtggctcacgcctgtaattccagcacctcggcctcccaaagtcctgggattacaggtgtgagccaccgcgtctggccaggattagtttttatttgcagtgtatatattgaacataatataaaaattgttcatttctgtgccatgtgctatataaatgtatttgtttttgattttttggcacaggatcagaaatatatgcttgtttttttttgtttttgtttttagacagagtctcactccagcttgggcaaccagagcaaaactccaactcaaaaacaaaacaaaacaaaacaaaac

SEQ ID NO: 245862 - DNA, 434 bp, Homo sapiens
agatcatgccattgcactccagcttgggcaaccagagcaaaactccaactcaaaaacaaaacaaaacaaaacaaaacaacaaaaaaacaagaaaagactttctaattgacttgaaatccatccagaggcaatgaaagaaaagactggggctaggcacggtggctcacgcctgtaattccagcacttcgggaagccgaggcgggcggatcatgagatcaggagttcgagaccagtgtgaccaacatggtgaaatcctgtctatactaaaaatacaaaattagccaggcatggtggcatgtgctggtaatcccagctactcgggaggctgaggcaggagaatcacttgaacctgggaggcagaggttgcagtgagctgagatcgtccctgtattccagcctgggcgacagaacgagactccgtctcaaaaaaaaaa

SEQ ID NO: 245863 - DNA, 140 bp, Homo sapiens
tgagaagtgaggagcctctccacccggcagccaccccatctgcttctagggtgcctgaggactttggagatggatctactgttgctgttcaagagcaaaccaaatttcaaaataaatatttcagttctttcaaaccaaca

SEQ ID NO: 245864 - DNA, 497 bp, Homo sapiens
tagagacactgtctatgatttgttactcacgctggtcttgaactcctgacttcaagcaatcctcttgcgtcagcctcccaaagtgctgggattgcaggcataagccactgcattcagcctgtcaccttgagttctttaaaagaacttgatggttgaaagcaaaattgttacattgttggatgaggtaggttttgagacagggtcacattttgttgcccaggctggtgtgcagtggtacactcttagctcttactgcagccttgacctcctggacttaagggatcctcccacttactggtgcccccgccccaagtagctgggactgtaggcatgtactgccacacaccagcatgctaggctaattaaaaaaatttttttgtagagacagggtcttactatgttgcccaagccgatctcaaactcctgggttccagtgttcttcctgctgtggccttccaaagcgctgggattacaggtgtgagccaccatacctggct

SEQ ID NO: 245865 - DNA, 469 bp, Homo sapiens
gaagtaggtgagatctcatcttcctcttacctcctgactcttgatctggtgaacactgtgctgtttttgttttattgcacgttgcattatgagtatgccagtcaaataccccggagccccaatgatccataggtgacctgtctaccttgccagggttcggctgcacaccagctttctccagtgattctggaatcctttttattccatccttcgtagactttacgtactcagagattgaaggctagtgagctgggagtcagaagacccagctttcggttttctgattttgcagttaacttgctttgccttccttgagtaagttcaaaacctctctggttagaggtctcattttttttaattcaatagaaaaaaaaagatactattgaactacatggtttccaaggtaatatacagtcctgacattctatatttgccattttaatacaaacacttatttgcatacatttat

SEQ ID NO: 245866 - DNA, 262 bp, Homo sapiens
aatcaatcttttgaaatgtttactagagagaataaccacccatgattatgagtttgcatgtgtacgtgtatacaaagctgtgaagggaacaaactggtaggctgtgtgccatttccaaccagcagagaagtctattttgtcctgcacagtattgtggtagtagtggtgattattttttaataagccaagattttaaaatcagaagattttacataacatttcagatttccagctgctcttgtaaaatcgtaggatctggcaa

SEQ ID NO: 245867 - DNA, 299 bp, Homo sapiens
aaaggaaactgctttttatactctgaaaagctaaagataactccaatttatcagtgctggtgtcacattggtggaaatttttcagcaatgagcatttaagggtgtttcatggactacaggcataaatatgtgacaaactactatggtactacaaaatcaggttaattgtagctttagagtgacgtttactgtgagttttaccaagataatacccattctgttacccttttattagtcctttatttgttgaaagtgttcattccttgctctaacttcaaaatataatggagtccttctgt

SEQ ID NO: 245868 - DNA, 1105 bp, Homo sapiens
atgaggagtttgaattagatgagcactctccagtgtttttcatggggaggatctgttttcaatcccccatatgtaaaggggaaggtggaagggatctgactgctagtagtggactgggggctcttggttctgcaatcaattaactcctcttagaaaatataaataaataaataaataaataaaagaaatgagcaactggagaccctgacctttggatctcatgaaatctgaagtttctccatattaccagtttctaggtttctgagtcttgcagaatactaaaaatgttcatcttgcaacaaagagataagatccaagtggtgaggtcttcattaattagagaagtatctggaatgtttggggaggagttatgcagggaggcagcagcaggcaggagatggcaaacccacaagggtccattggcgtttctggagtaaaatggtttgctaggttatttctggggctttgtgatagtaaagtctgaaaaactgtgtttataaatacgattggaaaagtacagaggttgaattattgccacatgttaggaatgtggaaggttgcttggataaatgagaaaagaaagaaaagaatgcaagtaatgtcctgctggggtagtgcagtattttgtttccaggtagcttcaaagtattaaatatatttacattgacccatgtagctagcaattaataaaacaaatcaataaatgagaacataagatcacccccagttctgccactcaaaactaactgatgtttctgaggtttctaaggggtgatttacaagtgaacatggttccccttggtgatgatgtcctcaaaagcaaaggccatcttccagatatgtgaattctttacccattatgaatcttgttttgttaaagtaactttttctttcaggataattttagatttacagcaaagttgcaaagataataggaagacaaagccccaaagacaaattcccaacacttcctagcaggccagttctctgactaaggtaactgaactttaaggtatttcccaataccgtcttactcaccaatatgacctaaattaccttatattacatttatcaaaattaagaaaccagcattggtatatatatg

SEQ ID NO: 245869 - DNA, 262 bp, Homo sapiens
gtttcttacaaagttaaacctatgatacatcaagcccatttttaggtatttacccaaaagaaatgaaaacatttgttcacaaaaagatttgtacaagatgttcatagcagctgtatttgtaataaaaaaaaaaataatcaaggccgggtacagtggctcctgcctgtaatcccagtactgtgggaggctgaggcgggcggatcacgaggtcagtagaacaagaccatcctggctaacacggtgaaaccccgtctctactaaa

SEQ ID NO: 245870 - DNA, 420 bp, Homo sapiens
gggctaccttttttcaggaaaggactgcattagaccaaaacccaatgccgtgaggaccacagtctttttttgtttgtttttttccttaaaagttttttctttaataatatgcccatggcttatgtagaagtgttgcaagatcttccactgagatagtaatttgtttaaatgtgtttccctcctcctctcttcccaccaccaatttcaagcaatgagcgtggttgtgcttctttgcctcagatgatatttgtggcaggatggacagcagaagccacttgaaatcagagaatattcttagtttttcttaaaacctatgctccccgatattattatggtaagtgtgccaggggatgaggaaggagaaagcagtgcctttgaggtcaacagagggaggaggaaagatttatccagagaagaaaa

SEQ ID NO: 245871 - DNA, 393 bp, Homo sapiens
ctaaaaataataataataagatttaaaaaatcatattttctctgaagccatttttaactttccagaaagaatcagttatcacaccttctgcaaaaccataactctgtacgtaaagcagaaataaatactttaaaacacaatgggatttcaaaaagttcatggaaaaatggaattaaaagttacaaaataaagacataaactttatttctcaacataagctccactaggtgtaagaaacttttataagccacaataatagccattcggagcatccctaaaaaaattgagagccctgggaatttaaccacctcaatgcaatcttttttatattattaactgaagaaaaattgacaccctttacagattttcttagaattaggaaacaaaaaaaaa

SEQ ID NO: 245872 - DNA, 386 bp, Homo sapiens
ttaatccacagcaagctcccttatatcatgtctggtacaacattgaatagaagtggtgagcgcaaacatccttgtcttttcctgatcttaaagagaaagcatccaagctttcaccagagttctcatgagtgagagggagtatcaggagagtcagtggtcagagatttgaagatgctacactgctggcttagaacatggaggaaggagcccatgagctacggaatgcagctctagaagctggaaatagcaaaagaacactttctccacatagagactctagaaggaacacagccctgctggcaccttgatttttaaacaagtgaaagtcattttggacttctgacttccagaaatgatatatgataataaatttatgttgtcttaag

SEQ ID NO: 245873 - DNA, 245 bp, Homo sapiens
ttgagcggccgcccgggcaggtactcactctgcccagacaggatagatggatatcacagaccattcattggtcatatctgacttaacctcaatatgaaattggcccagaaagagataatttctttttaaagaatctgccagcctgaatccatagcttgatattctgaatattctgaatattttttatttagcatccttcaacaaatagagccacaattttttagctgtcttgaggtaggcaaata

SEQ ID NO: 245874 - DNA, 417 bp, Homo sapiens
ttcttagcacttatctatttgacattgttatatatttattgtactcagtccacatacacacatgcacacgcatgcatatacactcacatatgcacgcacgcacactcaaatggaagacccatggggcagggcttggctttgtcttgttcactgtcacagcctgagcatctaaaacagagccaggctcacagaaagggcatgataaatggtggttggatggataattgttttgtcctcaccaaacaatcttagtcaaactcttttaaggtatgataaagtatctaaaagttctggctgggtgcgtggctcacacctgtaatctcagcactttgggaggccgaggcgggcagatcacgaggtcaggagatcaagaccatcctggctaacagagtgaaaccccgtctctactaaaaatac

SEQ ID NO: 245875 - DNA, 911 bp, Homo sapiens
gaccactgaagttgagccccacccagatgtgagcatatgaagatgaatgttggtgaaagcatgcgtcttgcatctggagaactgccttcctccgggagagccatcaacaaccacccattactgtgcagatgatgggactaacttcccttatccatgtgggcttctctgcccagctccccgccactgaggatgtgtttttgcaagacagtcaaagaagagacaagaagtaagccagcagaagccggtgagccaagtaaccctaactggtccacacaaagattgactgaatgactccaacatcatgaactgatcagttccaaagtctactcttcaagaacatgaacaatcatatcattttaaagataatttaatcctcacatggaccaaagtttttaaagaaacaactattcaatcatcggctaaaacacaaaattatacaccaacatttgaaataccattcaatataaaatataaataaatgtctttcaatttatactcaaagacaatatgttttagttaaatcatttgggcactcccaaactccttttaagtgcccagagattgacagagcagttcagctactgcatagccatggattagctatacaatatagaaacaggatctggcttcttcaaaaacgtaatatgatggatcatagggatgtacccggaagagcagaagttgaatataataagataaaattagaaaattgaagatactaagagatgaacattatgtggattttagaatcaagatactgaaagaattcagatacagacatttattactatttttgtttgctagtaaatttggcttcaataaagcccacactgttattttaatttgagtaatacttcaaaatactttcttttgagtatataatataataaaatatatgtgactttaaatta

SEQ ID NO: 245876 - DNA, 373 bp, Homo sapiens
gaactgaaacttgttaagacttatgttgtggcttaatatgtactctatcctgaagcatgtttcatgttcaattgagaagaatgtgtaatcttcagccgctggatagaatgttctgtaaatgtctgttaggcctatttggtcaagagtgcagtttaaacctaatgtttcttttttggttttctgtctggataatgtttctgttgcttaagtggggtgctgaagtttcctactaggtagaggatcagaaaaaataaatattacatactcagcttagtatctgggtgatgaaataatctgtacaacaaacccccatgacacaacctgtacatgtaacaaacctgcacatgtaccgctgaacctaaaataaaagtta

SEQ ID NO: 245877 - DNA, 629 bp, Homo sapiens
gagactgcatggggagcctgaacttccacgcccatccagtggaaaccagggagcccccctacttcagtgtagagtcagcaaaacctgtgcaggacttctatgccaaaattataaagcactgacgaaagaaagtgaaagggatctaagtaaataaggagacataccatgttcattaattttaagactcaacatagcaaagtcgtcaattcttcccaaatggatgtgggtttaatgcaattcctatcaaaatctcagcaatagtgtttctagataaagacaaaattattctaacatttacatggaaaagcaagtgaactagaatagctcaaacaattctggatgaaaagaacaaactagtaggaatcaatttcaatatagctacgtaatcaagaccctgtggtattgctgaagaaacagacacatagatcaatggaactaacacaatatacccacaaatatatagacacacaatatacccacaaatatatcaaactgatgttttgtgaagatgtgatggcaatttaatataataaaaatagtctttcccaaatggtgctggagcaactggacattcataggcaataacaaacaaaaaccttcagcctaaatctcacttcttatacaagaat

SEQ ID NO: 245878 - DNA, 447 bp, Homo sapiens
agctgactaaattaatgagtagttttttatgctacttagtatacttcagcattgtctccagaaacaggaatgttttatataaaacatgacaaagcagctggagtggggcagagacatggaagcattctcatgtccttccatttctcaggggtgctgcagttcactgaggagcagagtgtggaagttacagcatatctgagctatggggtgtgtgggttgtgttatacccaggttctcagggcctgcttttctaaaacgctgggtaactgcaggtgtttgttgtttgctaactgtgtgtagatatcatctgtgtatgcctggcaagaaaggagttaataaatgtcacgtctataatcccagcacttggggaggccaagatggaaggatctcttgagtccaggagttcaagaccagcctgggcagcataaggagaccctgtctctattt

SEQ ID NO: 245879 - DNA, 429 bp, Homo sapiens
tcatagatttgacttagcacatgacttgtttcctccacagttcccccattaagtggctaccaggtgatttaatgagggtgtattcagaaaccatctagaaaacagaccaccctccctggtgtatatatgacttcgtagaatttttagcaatagatcttgattattaaaacaaggtttctattattttaaagattgcacaaagaaggtgaaagtgaagagagaaggcactctagaaaacacaaaccatattagatgacattttggaaagaaagagggcatttaagggagaatgttggcaaagctaaaaaggagtagcttcaaaatagaggaaaaattatttgacattaatggatattacaggtttctagaatgtgagaattaaaagacaccttagagattctgtagcccactcctttgcatttatagatt

SEQ ID NO: 245880 - DNA, 621 bp, Homo sapiens
cattaaaggatgaaaagccagtcagcaacatgggatcatgttttaaaactgtctctggatgaatgaatatctctactctttcttcaagacccagtccctacagttgacaaccagggtggttctccaccaattcctggctcagggctttgctggaattgccaacattaccattagaaatcatttggggctgggcgcggtgactcacgcctgtaatctcagcactttgggaggccaaggtgggcaaatcacctgaggtcgggagttcaagaccagcctgaccaacatggagaaacactgtctttactaataatgtaaaaattagccgggcgtggtggtgcatgcctgtaatcccagctactcggcaggctgaggcaagagaattgcttgaacctgggaggtggaggttgtggtgagccgaaattgtgccattgcactccagcctgggcaacaagagcgaaactcagtctccaaaaaaaaaaaaaaaaaaaaaaatcatctgggagaattcccactctgcccgtcagaaccaagacagttggttccctttgtactcccacatgcataccatggcacctccccaagagctgctgctttctgttgccacacaactccctccctccc

SEQ ID NO: 245881 - DNA, 386 bp, Homo sapiens
ttaatgatttcccagacgagcttattttctctgctgtctttcatatttccctgtaaatgctgcaagacagactctggacctcacctctccagcaaggaatttgaggaaaggctcactgatattgaaaaaaacaacataaaagggatggtttgtactctgactgattttgtgaaaccaaatcattctgacagctgtaggcattgttgtaagtaggtaccccatcattgtcaaattaatcctgaatctgttccttcaaaaagcattaacagagagaatgtagtaactacaatctgaattaaacaaatccttcctcaggaaccctggttctgagaactcttgaaaataacagtttaaactgagtgggattttctcccactaatttctta

SEQ ID NO: 245882 - DNA, 514 bp, Homo sapiens
gtgtatacaccagttggacaaggacgctgccttattcatcactggatctatagtgatttgctcagtgccttgcacacaggcactgttgggccagcacttcccatgatctgagatgtccgtcctccttcctcttcaactttttctccagcagtgagttcctcctcctaactgaggcttccaggaaggatatcctctgcttctcagacctgaacctgccttgaatactcatgaggacccaggagctactcctcacctcccacttctcttccctcctgtcagataaccaaggcacggccaactgatctccaaccatctgaggaacccaaccgtgtgagaccacccacacctttcaagaatgttcctcccctccccttctttgtatttatactgatgcaaatttgctggccatcttaactcagtcctgtgcctcagttctcccacctgtaagatcaggaggaggataaagatgtaagactttctgcacacgttttaagatgaattccttgttaccaca

SEQ ID NO: 245883 - DNA, 711 bp, Homo sapiens
gtaagataggatttccaggtgatagttacaaaaaagagctcaaaaattttaaagactcataaataatagttataagaattatccagagactaaaacattttttagatttatgtttggtgtttaagtagtagaacttttcaagtgttcattttttagtatcatcatcattaataatactcattaaatgttttctttgtacttatggaaagcaccgtgctactacttattgagaaatatgttggggttctggggataagtgaaaggtgtaacatagataatattccaaaattgatagtcttttcactaccacagtaattcttgtaaagtgagatacattttctcttttgcatgctgactaaagtattatgaattattgaccagttatgggttaagctatctaaagaattaagtttcatgtttctcacattcatattgtagtggcgatgggtatctttcctaaattagtaagtgtgccatattatcatctcaaaaattcagctttttctcatgaagataatacttaatggtttttctttctttttaaagagatactatacagcttgatttttattatatagaagcaatcataacactgacttctaaatttcacaggagggattcagttcctcatgcatgcagaggtcttaaatggttcattgagtttcctcttaacacactataaatacctgaattttttggggaaaaaaaaaa

SEQ ID NO: 245884 - DNA, 1215 bp, Homo sapiens
cacttccgggccaggcttccgcgtggtgggcagtgtgggcatcccagcactgagttctgcccgggagaagccgacccctcccgcaatgcccgccccgccgtgcgcctcctgccatgctgcacgcgccgccctccgccgtccgctctcgggccaagcgctgtgcggtgcctgcttctgcgccgccttcgaggccgaggtgctgcacacggtgctcgccggccgcctgctgccgcccggcgcggtggtggccgtgggcgcctcgggcggcaaggactccacggtgctggcgcacgtgctgcgcgcgctggcgccgcgcctgggcatctcactgcagctcgtggccgtcgatgagggcatcggtggctaccgggacgcggcgttggcggccgtgcggcgccaggcggcgcgctgggagctgccgctcacggtcgtggcctacgaagacctctttgggggctggacgatggacgccgtggcccgcagcacagccggctccggccgcagccgctcctgctgcaccttctgtggagtgctgcggcgccgggcgctggaggaaggggcgcgccgcgtgggagccacgcacatcgtgacaggtcacaacgccgacgacatggcggagaccgtgctcatgaacttcctacggggcgacgcggggcggctggcccggggcgggggcctgggctctcccggcgaggggggcgccctgccgcgctgccgcccgctgcagttcgcctcgcagaaggaggtggtgctgtacgcgcacttccgccgcctcgactacttctccgaggagtgcgtctacgcgcccgaggccttccgcggccacgcccgggacctgctcaagcgcctggaggcggcgcggccgtccgcggtgctggacctcgtgcactcggccgagcgcctggcgctggccccggccgcgcggcccccgcgccccggcgcctgctcccgctgtggggcgctggccagccgcgcgctctgccaggcctgcgcgctcctggacggcctgaaccgcggccggccccgcctggccatcggcaagggccgccggggtctggacgaggaggcgacgccggggacgcccggggatccggcccggccccccgcctccaaggccgtccccaccttctagcgacttcgggcctcccgccgggatctgatgccgcggggtgggggctgcctgtaaatgacactgtgaataaacccgttacctta

SEQ ID NO: 245885 - DNA, 232 bp, Homo sapiens
actggggaccccaggcatctgtggctgaggaaggagggcctggggtcgtggactcctgggtctcagggaggagggggctgaacaccttgtgattcttgagcgagtggggattggttggggacctcctgcccagggcctctgctggttctgggtgcgctcagcatggtcctgaccctccttgagcatcagagaagttgaggtgctcaataaatggtgaccacttggacttggt

SEQ ID NO: 245886 - DNA, 821 bp, Homo sapiens
ggacgcccggggatccggcccggccccccgcctccaaggccgtccccaccttctagcgacttcgggcctcccgccgggatctgatgccgcggggtgggggctgcctgtaaatgacactgtgaataaacccgttaccttacctggccttccatgtggggttgggaaggagacgggggcccattcacctgaaaccctgaagaagctgggaccccagacttcgaggtctcagggaagaagggtctcgaactgggcttcaggctctgagggaggagggggctgggggaccatcctaggtctgagagaggagagggccaggactaagcctagaagaagtgggactggggaccccaggcatctgtggctgaggaaggagggcctggggtcgtggactcctgggtctcagggaggagggggctgaacaccttgtgattcttgagcgagtggggattggttggggacctcctgcccagggcctctgctggttctgggtgcgctcagcatggtcctgaccctccttgagcatcagattcctgatgtttcctgtttgcccgcagtggggtaagcggagcgtgacttgatggacacacgccattcacagccgccgtcacgatgcctcccttccagcgcttcgtgtgtagcacgcactgcaccctcatttcgtctccaccacggtctcactggctgtagcctgaagtggtaaatggccctaagacacccagtcggaaggggtcacaccgagggctccctccaaagctctcgaatatcacaggtcgtggaattggtcctcccccacccatcccctctcgaatctctcctggtat

SEQ ID NO: 245887 - DNA, 451 bp, Homo sapiens
gtaattccaatttaaggtatttaccctagaaaaatgaaaacatatgttcacacaaaaacatgcacacaaaacagtacctttattcgcaacagcctaaaactgaaaacaatttaaatgttcaccagaaaatgaatgaactgtggtatagtcatattgtatttaaaaaaacgaaacaaacaaaaatctgtgacaaacacaaattggatgaatctcaaaaacatgccaagtgaaagaaaccaggcatggaagagtacatgttacttgattccatggatatgcaattctagagtaggaaaactaataaacagatcagtggttgcctggggccaagagggagaaatgactacagacaggaaggaactttttggaggtaattcaattgttctaaagcttgattgtagtagcagtgatagtgtatatatttatcaaaatcaataaaactatatagtta

SEQ ID NO: 245888 - DNA, 334 bp, Homo sapiens
gtatcttcatttatcatccgctcccatttcgcaaacaaaatatgccatggtaaatataatctatatatcacattgtgacacagctgaccgcattagtgagccaagactgtcctagcggcagcttcctatcatgcattaacaatacaacggctgatacatttgcacaacacaataagaggtgggggagaagagagaacattgggctatgaaatcctaaacttcatgtctgaatacataattttgtcacctatctctggcatgaatgttatcatgcttactggagtcttgtgtggtacacctataaaaggcttataaactctttttgaaaaaaaaa

SEQ ID NO: 245889 - DNA, 465 bp, Homo sapiens
tttttaaaggagtggggattaagttgttcccagaattcatacggaaaagagccaagaaatgccaaattaagaaaggtaatgaaagtacgccctatgaaataacaagaataattttaaagctacagcaattaaaacagtgttattgatgcaaatatggacaaaaagaattatgaaacggaatagagtcgacacttagacccacacatatatgggaactggatataatacagagatagcattgcaaatcagtaaaggaaaaaaatggactcaataaatgatattgagacaactggttatacatatggaaaagataaaattagttcataattcacaccaaacacaaaaataaattcctgatcaatcaccaaaatgtgcaaggcaaaattttaaaacttttataagaaaatgacttcagggtggagaaagatttcctgaaaaacacataaaagcacaaatcaccaaggt

SEQ ID NO: 245890 - DNA, 455 bp, Homo sapiens
agagagaaactcatgttgaaatactgagatttgggagtgtgcgtattatagaagctaatgttaccttaactaagaacactcctaaagcagaaatttgttctctctccgagacattatgtctcttttaccacattttccacctttaataatttatttactgatatgtaagctccttgaggatagtacatttgtttcactagtgtacccacagaactctagttagttgaatgaattcagaatagaacatagctggtttggaaagtacagaagttacagaaggtagtaaaagcagtttgatttttaaaaattctagctttgtgttttatcctataatatttaggtagaaggtagggatgatgggttggggttttgttggtgtggaaatgtattgtgacaaccacagccttttaatatattttgtgtactgcatccccaataaacatgttttccaaata

SEQ ID NO: 245891 - DNA, 315 bp, Homo sapiens
gtagattcggtgtcttgccatcatttttaatggaaaaaaacatcttacagttcaatccaggaactttcaaatattgttgtatggcaagcagaaatctattttcgtgggagagaatgggagaggaagatttttcagcttaggggaattattaagttattaaaggtttagaatttaatttttttgcagctgtaattaaactaagattcctattagatggacgcactatttctgccagctagaaattcattgttcttgatttagtctgttaactgtaatttggacagctgatggtctgtatgctcatgtttagttaag

SEQ ID NO: 245892 - DNA, 519 bp, Homo sapiens
  misc_feature (495)..(495): n is a, c, g, or t
ttttttttttgagacagagtctcactctgtcgctcaggctagagtgcagtgaggaaatcttggctcattgcaacctccacctcccagattcaagcaattctcctgccttagcctcccaggtagctgggattacaggtgcctgccatcacgcccagctaatttttgtatttttagtagacagggtttcaccatgttggccagactggtctcgaactcctgacttcaagtgatccgcccgactccacctcccaaagtgctgggattacaggttgagccaccacacctggtaagaatgttgggaaaattttttcatactaacacattggcatatcagttatcagttggataaaagttttcttccatataggaagttataaaatgccactgcccagagacaaaatcttctgaagagttattagatgaatggctgacaacatcgaataaaaatgcacaaagaacattgccataataaacttttgatatccaaagtcgacnggccgccgaatttagtagtagtag

SEQ ID NO: 245893 - DNA, 371 bp, Homo sapiens
ctactctttatttacatcctagcttaaccattctctgaaagtctttcaccttacctgctcttatttaattaatttattattttttttttttgagacggagtctcggtctgtcgcccagactggagtgcagtggcgcgatctcggctcactgcaaactccgcctcccgggttcactccattctcctgcctcagcctccccagtagctgggactacaggcgcccgacacaacgcccggctaattttttgtatttttttagtagagactgggtttcaccatgttagccaggatggtctcgatctcctgacctcgtgatctgcccgccttggcctcccaaagttacgggattacaggcgtgagccaccgcgcccg

SEQ ID NO: 245894 - DNA, 704 bp, Homo sapiens
gggtgggagaggggaccttaaaatgtgtacagtgaacaaatgtcttaaagggaatcatttttgtaggaagcattttttataattttctaagtcgtgcactttctcggtccactcttgttgaagtgctgttttattactgtttctaaactaggattgacattctacagttgtgataatagcatttttgtaacttgccatccgcacagaaaatacgagaaaatctgcatgtttgattatagtattaatggacaaataagtttttgctaaatgtgagtatttctgttcctttttgtaaatatgtgacattcctgattgatttgggtttttttgttgttgttgttttgttttgttttgtttttttgagacaccgtttcaaaaaaaaaaacaaataacatagattatccaggtgcgcctggggtcgcctgtgaggcagttatatctcttgaaccccgccaggctgctcgttgcagtgagcctagatttcaccattgcactccagactgggctacaagagtgcattccattttgtgtccccaaggaacatgaaacactcgccgcatgattaatgcttctttttaatttcgtaaattgtgtactgcgataaatttattgtgttaaagacactgcgcattctctactccatgctcctttatttctcttcccttttacagttgttctttttttcttagttgtgtctttatcat

SEQ ID NO: 245895 - DNA, 1581 bp, Homo sapiens
cgcagccggcgcggcccctcagctgggggctccgcagtgccgggccccggtccctgcccgcctgcccaacgccgcagcgcccccggcccgggccgccggcaccatgtaacccggccggagcccgagccgggccaggattcagtggtcctgagccttctgaagttaggcttctgcctggtggtggggatcctgacatcaaggatgggacaccctggatggaggttcctggggcctggcccccaagactatgaagagcctttgctgaggccatgaggggttaccatggcgaccgaggcagccatccccgcccagcccgctttgctgaccaacagcatatggacgtgggccctgctgccagggccccatacctgctgggctccagggaggccttctccaccgagccccgcttctgtgccccgagagctggcctgggacacatttctcctgaagggcccctgagcctgagtgaggggccgtcggtaggccctgagggagggccagcgggggccggggttggggggggtagcagcaccttccccaggatgtaccctggccagggccccttcgacacctgtgaagactgtgtgggccacccacagggcaagggtgccccccgcctgcctcctacactcctggatcagtttgaaaagcagttgccagttcaacaagatggcttccacacactaccataccagcgagggccagcaggggcagggcccgggccagcgccagggacgggcactgccccagagccccgcagtgagagccctagccgcatccggcacctggttcattctgtgcagaagctctttgccaagtcccactctctggaggcgccggggaagcgggactataatgggcccaaggctgagggaagaggtggctctggaggagacagctaccccggcccgggctctggaggcccccacacctcccatcaccaccatcaccaccaccatcaccaccaccaccagtcccggcacggcaagaggagcaagagcaaggaccgcaagggggatgggcggcaccaggccaagtccacaggctggtggagttccgatgacaacttggacagtgatagcggcttcctggcgggtgggaggccccctggggagcctggtggtcccttctgcctggagggtccagatgggtcctaccgggacttgagcttcaaggggcgctcgggcgggtcggaaggccgctgccttgcctgcactggcatgtccatgtcactggatggacagtcggtcaagcgaagtgcctggcataccatgatggtcagccagggccgggatggatacccgggggccgggccaggcaaggggctcctgggtccggagaccaaggccaaagccaggacttatcactatctgcaggtgccgcaagatgactgggggggttaccccaccggtggcaaggatggggagatcccctgccgcaggatgcggagcggcagctacatcaaagccatgggggatgaggagagcggagactcagacggcagccccaagacatctcccaaagcagtcgcccgacgcttcaccacccgtcgctcctccagcgtggaccaggccaggatca

SEQ ID NO: 245896 - DNA, 366 bp, Homo sapiens
attcaataggaatatatgtatattgtaaaacagcatattttaaaaatactgagctaaaatttttaatgccatcacttcctaagtgactagttaaggaactaaaatggaaaagttaatctaactagcatctctacggaaggaaaatggcactacttcctaagttattattttctggttttacttttttgttttgtgaaaatttttaaataaggaaaattccaaagactaaaattgtatcataaatacctatatctcccctttattaataactgctaacattttatcttatttacttcaagcattttagaaaattcagtgtttttctggtataagagcatcccctttaaacaattttgcttctgacct

SEQ ID NO: 245897 - DNA, 506 bp, Homo sapiens
ctaccaagaaagtttatttgttatattatcatacaaatattgttgagtgtttatacaaagcaccatatatcaattcccaagaaaatatatggtaaataaagaattggaaaccatttgtatctgtttcagaaattatgacttataccttatgccacagtgaactctattctgcattcatacaaattaacacaattttttgctaagaaagacctataataaaaacatattaagacattatggtattggatactttccctaatgaaaatcacaatttaattgggggatgatattaggatatatgcaatatttacggaacaatgaagtaagactgtgtggcgtcaactatttcacccaatgaacaaacaggtagctaatatccactttagtttttcttcttatactatcttaatttcttcatagtcagattttcactgttatgaaaaatagcataaataggataaagagcaaacacaatttgtcagttcctgagtagaattcataccttt

SEQ ID NO: 245898 - DNA, 226 bp, Homo sapiens
tcccagaatattactggcaagtaggaaagacaactaattggattccattttactaccctttctctttctatctgatggacataataatattattcaaattattaagaggctggccgtaagatataaatactagcaaagtaaataatagttcatacatggaattacaaggagtttaaccactgagtacaaaacccaggagatccaacttataaattatatataattt

SEQ ID NO: 245899 - DNA, 553 bp, Homo sapiens
aacacaaggtttctagaaaaacatattatcaaagatatgttgattccatgtctttgctattgggaatagtgctgcaatgaacatacaaatgcatgtgtctttataacagaatgatttatatttctttgggtatatacccagtaatgggattgctgggtcaaatggagttgtgctgccctcttagcagcttagaaaacattatttttttatggattatttttcctttggcagttgtcttatttccatacagtcagatccaagtgaaagagtttgtcatcgtgcaatggagtcagactatgtagattaaacccaacttatctttaagaatgaatttatatctcatcaaattacatagttaatcttgaaagatgtcctccttcaaaacctacagtacttaaacatggctgatggcgccaccaagctttattaagtactttgaaaaaaaaatgtttgtttaatgttgtgcacaaagccagactttattattctttccagagcaccataaagagattcctggaaaagcctaaatttaaaggctaattttaagaagtcc

SEQ ID NO: 245900 - DNA, 417 bp, Homo sapiens
atcgtttgaaggaggagaagagcaagtcaaaggccctgaggcaagagcacactgggcatgttcaagcatcgggtgctatgggatacctgcatttcactgtacaaccttggactctccctccctccatgagcaataggagaactcctaggaacaagtctaacactaggacttccagcaatcttgagactaaagccagaggtcacgtgaactacataaactaaattcctccaaatacaaaccaagcttcccaccccaactctccttagctgaaagggtgctcacaggtactccaacacctcctgaagtgtgttggaagtgtgcccaagtggaaagcatcaatatacttcatcaattgctaagaagatatcatattgtaatgttattagtaattcaattattaaaatgtattagtgttaa

SEQ ID NO: 245901 - DNA, 315 bp, Homo sapiens
gaagactgctggctgtggtctgctcttttcattttaattttatgggtgagccaggcatggtggctcacacctgtaatcccagcactttgggaggctgaggtgggcggattgcttcaggagtttgagaacagcctgggcaacataaggagaccctgtctcttcgaaaaaataataaataaataaataaatacgccaagtgcagtggtgcatgcctatagtcccagctacttgggagtctggggaggttgaggccgcaattagccgtgattgtgccgctgcactccagcctgcatgacagagtaagaccctgtctcc

SEQ ID NO: 245902 - DNA, 409 bp, Homo sapiens
ttgatgttaaccttggtctgctggctgaggtactgtttgtcaggtttctccactgtcaacttattcccctgctttcatactatactcttcggaaggaagtcactttgtgcacccacacttaaagagtggggatttatgctgcatctccttgaaggtggagtagctacataagttattttaccaattcacttttaatccccttaggtatcactctcgggagtccgaaatactcagtattgaactatttacagagtactaacacgttccactgtcaaatatacagaagaacattgtaatggaaaatcataaagtttccttacaactttttttttttttttttgagacgaagtctcactctgttgcccaggctggagttcagtggcaagatctcggctcactgcaacctctg

SEQ ID NO: 245903 - DNA, 429 bp, Homo sapiens
ttatggagatgatgaaatcacaatcaaaattccaaactaagttcatctgcaacccacgatcacactacatcttggcgggaatatgctggtttgaagtagtcaagggctggagtttgaaagaggaacaaatgaagcctgaccttgggaggaacttccaaagattctgagccaactcccaacagggagctctcaggattcagcgagtgtcctgagtgtgctgtctgtctgtgacgccggctaggccaagcctgatggttcctcatgagaatgtcctggcctgtgctgctgaaggtgtggtccacagtggggtcagtctgctgtttccagtctccaatgcaactcatccatgaacatatgtgcagagtttgtaaaccttccatttttctgttatttctgtatgtatttattgatttttttgtgtaaaatgta

SEQ ID NO: 245904 - DNA, 716 bp, Homo sapiens
caccacccctatattgttagtcatattttggtgtatttgctttattgcctatctatcggtctatccattcatcaatccttttgtttttgttgtatttcaaagtatactttacacctagacatttccccatgcctattattaactatttgtttacttgttttgttgtgcctgagcgagttagaaaaatgccacactttgagacgaattaagagtcctttattagccggcgaccgagagacggctaacgctcaaaattctctcggccccgaggaaggggcttgattaacttttatatcttggttgaggaagcgggggggtctagttaaaacaattttacagaagttaagtagtcaaaaaaattaaaaggataaatggttacaggaaagtaaacagttccaggtgcaggggctttaagactattacaaggtgatagattcggggctttgggcattatcaatcagacgaattcttggggactgcggatatagcttcccacagtatcttatcagttaattgcattcttggatgtgctgggagtcagcttgcacaagtaaagtccttgagggaaggggctgccagtgaaagccaagatggagtttgtctggttctcttagctaagggagaaacaaggccaggtgaataaggataaaacaaggttgggcattacagtttttaggcaaaacttgtatatagtaaaatgtacaaatcttatgtat

SEQ ID NO: 245905 - DNA, 488 bp, Homo sapiens
ctacttctccattcgaacttgaagagttttacacgtttgccctagttgttttgactttattcccagaggaacagctccatcctttccgatccggaagaactttacattcttctccctctagacatggctgcatatggcaccaccatttctgttccactattgaagcatccacacatgatggagcagctcgcgtggtgcctgccacctgcccagggaagcaggagcacttgactgtttgtgaccgttcttctatcttgttcttattacagcatctgtggagtgccaccacctcacaagttcccgttttaacatggtgagctttatgatggtttgcactggatacaactttcccccacaaggttacaataaatattattattagcagttttccttttgttgctttctgtaagtatctcttactcatcctgcagcccgcttcccggtggcggcaacacctgcgatctcctgcagcttttcggccgcgccac

SEQ ID NO: 245906 - DNA, 519 bp, Homo sapiens
tgaaggacaaaggggtgaacaggagctatgaaacctgaccacaggaatatggaattccatgatgtgaaaaataatgagtgaatgaatttactgcaaggagctgcaatgactcttcttactgacttcatcagctaacaaatacaaaaccaatactcagttgatacaaattgcactgatccaacaaccgatgaaatgttggcaaaaagttcaaattatctttagtcagcgaaagactctaatatttaccaagaaatcaaacaaattcatagattatagtacaatatagatagtttggataatgaacactaagatccttgttgctgtaagactgaaaattacaaaaaacccatgaagaaaacacaaatgaccaataaggagttttagcctctaggtaaattggtatattgtcttgtagatggtcttcctcctgtaacatagtctatcaaccaaacagtgaggttaactttaaaaaataaaaaaaatattttggcattggacaatttgaccttctgctttaaa

SEQ ID NO: 245907 - DNA, 600 bp, Homo sapiens
tctcaccatcagaatggattgagcagaggaaagaatcagtgagcttgaagacagaatatttgaaaatatatggtcgaggagaaaaaaagaacacaaagaaatgaagatttcctacaatatatagaaaattattaatacctcaaaaggccaaatgtaagaattaatggtattcaagagggagttgaagaggaaggattagaaatcttattcaacaaaataataacaaaaaattccaaaatttaaaagtatacttggattagttataaatgtatattataagctttatagggcaacccccaaaaaagttttaaaaaggtatagttgatatatttaatacttacaaaggaaagaaaatggaaccatgtaaaaatgctcaactaaaaccacaaaaggtaaaaagtatatagaaaacaagaatagaaacaaagaacaagggcaatgaataaaaagtagtagatattaatccaactatgccagtaactactttgagtgtcaatggtctaaatataccaattaaaagagagagattgttagaatgaattgaagaataaaaccagctcattttataatgccaacattaccctgtaccaacatcagaca

SEQ ID NO: 245908 - DNA, 298 bp, Homo sapiens
gcacagtccgtctggctgcgtcgggaagtgtgtttgttccgcctccgccgggtgttttcttgagtactttcatccgctgtgctcctctcttgaaaagcttggaaagcaacctttgggagtttttttctttccgaaaggaaaaggatttctgcccttctggtgaggttggctctggccccgcattctcccgcgtctggaacctatctcttccggcatgttcctggtgagcaacggcggaaaaatggtttcaagagggctgtgacttccatttatttgctaaaaaatgtctcatctgaga

SEQ ID NO: 245909 - DNA, 561 bp, Homo sapiens
tgcaggtactgaggaaaggccatgtgggcaggcagcaagaaggcagccatctggaagctaggaagaaaatccttaccagaacccaaccattttggcaccctaatctcagacttccagcctcctcgaagaaaataaactgctgaacaccatgtggaagctgctaaggcttatggcttacattctttgaggcagtgacctgacatgtaactggatcccgtttagccatggttgaagttggatactccttgctcctcagcttgcagacggcctattgtgggaccttgtgatcatcaaggcaagaaggcctgacacgttcaatgtgctctaacctcctgccaagtagtgtgcaaggttcaagagatggaaaattggaagcgaaagtccttggagaagctctcattcaactgaaagcaaatatggaacagataagaaggcaagaaaaggatcatcacaaatatagcctgactggatgctgtttagagcagtagctattctatatcctcacattctcaggttctataatctgaaaatagctaaataaaaataatagctgagcccaaa

SEQ ID NO: 245910 - DNA, 361 bp, Homo sapiens
atgcctcagctcagaagaggtacgtattgatagccaacacccagggggaatgtgatgctgaccagtgctgtgggtgccagcgcactcgtctgcatcaaaccatcacctcgcagtcacacctacagttctttgcactcaatgcaaagctatggcccaggattgggggagcagcgtgtgctaagacacaggttaggagccatattccccaagcagtggtggctacattcatttctgggaaagctcagcaaagaaatgtgaccccagggacacctaaatttggactttttctgtatgaacacttggaagatttgtagcgttttataaaacttgtattcaattaaaatgtgtttcaatgatctct

SEQ ID NO: 245911 - DNA, 785 bp, Homo sapiens
cccaaaacaacagcagatgatatcttccaagtgtctgctcgggacacggcttcagccctctgtggtcccctctccccggggggctttgggattcttgtcaagctccttcaagagcctgcaagcacttaaccagccacccagagttccctcactgaagatctgagcatgacccgggacgaggcactgccggactctcattctgcacaggacttctatgagaattatgagcccaaagagatcctgggcaggggcgttagcagtgtggtcaggcgatgcatccacaagcccacgagccaggagtacgccgtgaaggtcatcgacgtcaccggtggaggcagcttcagcccggaggaggtgcgggagctgcgagaagccacgctgaaggaggtggacatcctgcgcaaggtctcagggcaccccaacatcagatgaagagaggggagctctttgactacctcactgagaaggtcaccttgagtgagaaggaaaccagaaagatcatgcgagctctgctggaggtgatctgcaccttgcacaaactcaacatcgtgcaccgggacctgaagcccgagaacattctcttggatgacaacatgaacatcaagctcacagactttggcttttcctgccagctggagccgggagagaggctgcgaggtctggtaacatggccttggcccacgtccaggcctcgggtgctcaatcaaccatctgcagaatagagatggtctgggtttctcccctaacttaattgttccctggaataaaaattccaccatttcaag

SEQ ID NO: 245912 - DNA, 1401 bp, Homo sapiens
cccaaaacaacagcagatgatatcttccaagtgtctgctcgggacacggcttcagccctctgtggtcccctctccccggggggctttgggattcttgtcaagctccttcaagagcctgcaagcacttaaccagccacccagagttccctcactgaagatctgagcatgacccgggacgaggcactgccggactctcattctgcacaggacttctatgagaattatgagcccaaagagatcctgggcaggggcgttagcagtgtggtcaggcgatgcatccacaagcccacgagccaggagtacgccgtgaaggtcatcgacgtcaccggtggaggcagcttcagcccggaggaggtgcgggagctgcgagaagccacgctgaaggaggtggacatcctgcgcaaggtctcagggcaccccaacatcatacagctgaaggacacttatgagaccaacactttcttcttcttggtgtttgacctgatgaagagaggggagctctttgactacctcactgagaaggtcaccttgagtgagaaggaaaccagaaagatcatgcgagctctgctggaggtgatctgcaccttgcacaaactcaacatcgtgcaccgggacctgaagcccgagaacattctcttggatgacaacatgaacatcaagctcacagactttggcttttcctgccagctggagccgggagagaggctgcgagaggtctgcgggacccccagttacctggcccctgagattatcgagtgctccatgaatgaggaccacccgggctacgggaaagaggtggacatgtggagcactggcgtcatcatgtacacgctgctggccggctccccgcccttctggcaccggaagcagatgctgatgctgaggatgatcatgagcggcaactaccagtttggctcgcccgagtgggatgattactcggacaccgtgaaggacctggtctcccgattcctggtggtgcaaccccagaaccgctacacagcggaagaggccttggcacaccccttcttccagcagtacttggtggaggaagtgcggcacttcagcccccgggggaagttcaaggtgatcgctctgaccgtgctggcttcagtgcggatctactaccagtaccgccgggtgaagcctgtgacccgggagatcgtcatccgagacccctatgccctccggcctctgcgccggctcatcgacgcctacgctttccgaatctatggccactgggtgaagaaggggcagcagcagaaccgggcagcccttttcgagaacacacccaaggccgtgctcctctccctggccgaggaggactactgaggggctggccagtcagggagggctagggggcaggtggggaggggaagccatggaaatacaagtcaaaggggt

SEQ ID NO: 245913 - DNA, 367 bp, Homo sapiens
  misc_feature (277)..(277): n is a, c, g, or t
  misc_feature (326)..(326): n is a, c, g, or t
cccaaaacaacagcagatgatatcttccaagtgtctgctcgggacacggcttcagccctctgtggtcccctctccccggggggctttgggattcttgtcaagctccttcaagagcctgcaagcacttaaccagccacccagagttccctcactgaagatctgagcatgacccgggacgaggcactgccggactctcattctgcacaggacttctatgagaattatgagcccaaagagatcctgggcaggtaaagcccaagctttccccacgaagtcntgtcctaggctccagcagaccctgtgggctacagccagctctgctccancccgagtactaacggcactttcatccccaaagtactgttca

SEQ ID NO: 245914 - DNA, 2665 bp, Homo sapiens
aaagtgtaaatctctgtcaagggcaggacatctctgctgcagcctctaatctgggaccccccatggggtgaggggccccccgaggccatctgtcctctgcactcccaggggcgttagcagtgtggtcaggcgatgcatccacaagcccacgagccaggagtacgccgtgaaggtcatcgacgtcaccggtggaggcagcttcagcccggaggaggtgcgggagctgcgagaagccacgctgaaggaggtggacatcctgcgcaaggtctcagggcaccccaacatcagatgaagagaggggagctctttgactacctcactgagaaggtcaccttgagtgagaaggaaaccagaaagatcatgcgagctctgctggaggtgatctgcaccttgcacaaactcaacatcgtgcaccgggacctgaagcccgagaacattctcttggatgacaacatgaacatcaagctcacagactttggcttttcctgccagctggagccgggagagaggctgcgagaggtctgcgggacccccagttacctggcccctgagattatcgagtgctccatgaatgaggaccacccgggctacgggaaagaggtggacatgtggagcactggcgtcatcatgtacacgctgctggccggctccccgcccttctggcaccggaagcagatgctgatgctgaggatgatcatgagcggcaactaccagtttggctcgcccgagtgggatgattactcggacaccgtgaaggacctggtctcccgattcctggtggtgcaaccccagaaccgctacacagcggaagaggccttggcacaccccttcttccagcagtacttggtggaggaagtgcggcacttcagcccccgggggaagttcaaggtgatcgctctgaccgtgctggcttcagtgcggatctactaccagtaccgccgggtgaagcctgtgacccgggagatcgtcatccgagacccctatgccctccggcctctgcgccggctcatcgacgcctacgctttccgaatctatggccactgggtgaagaaggggcagcagcagaaccgggcagcccttttcgagaacacacccaaggccgtgctcctctccctggccgaggaggactactgaggggctggccagtcagggagggctagggggcaggtggggaggggaagccatggaaatacaagtcaaaggggtgagatgcgtgcaggcctctgcagaaggagcacttggccctggccaggaacccctggaactgaggccacgatcccctctcaaaggctgtgcacaagggaagtgggtgttcccaccacacagcaatacctgcaggctggggcaggccctgggtgggcagagatcacacgtggcctgagaaccaggaaccccctgctcctctacttcctagatgagccaccatctccatttctctttaggggaggcccagagttactgacactcaggctttcttccctttagggtcacagggtgaggatcaaagacacaaatgtctgagatacacaattgcaggagattttattggccccatgacatccagtgacagtgtgggagcaggctactctccagggacatgtttttggaggcatatggagaagggggcccaggcgaggtggctcacacctgtaatcccagcactttgggaggtcgaggtgggaggatcgcttgaggccaggagttcgagaccaccctgggcaacagagcgagatcccatcactacaaaaattcaaaaaattagccaggcatggtggtgcacacttgtagtcccagctactcaggaggctgaggtgggagaattgcttgggcccaggaattcaaggctagagtgagccgtgatcaccagtgcactctagcctgggcaacagagaaagaccctgtctcaaaaaaaaaaaaaaaaaaaaaaagaataggaagcttctgatatttgtctttctggagtactatttgctttgtgattcccacaatgcaatgcttcacctagtacatcatctggttctcccagacccttttaggactgaactgtgctttaaatagttacatgtctgcctgttacacagtggaaactagtttccttcagagggacacgaaaccacagatgaggccacaaagaaagcattctccttccacagcaactggctgagaaaacagaaccaggaaaattctgccttgaggaaacaatgtcagcttcctgaatcatccagggagaaagggggagagaatagattttaaaatgcttaaaaaatggcctttcagagtgctctgttccaattgtttgtgtgtttgcaatcctgtgtcaataatacttggcctctaacagaaacacctggcccccagccatcgtcaacacacattgggccccttctccaaaacacaggaggctgagtcctctcctgccctggtgagaggcgcctgccacagagggatgggagacagggaaggggaagttctttcctgaggctgaagctctcgagcttggaattgcgctgtttgcaacatggccagggaatgacagtgaccctagaaggcttttctccttgtcaccacccggctgcttacagctcccctggcggccggcctgcgtctgcagcacagcggaaaccgaggttgtctgaggctgaatctggagtgttgcccatcctgc

SEQ ID NO: 245915 - DNA, 2805 bp, Homo sapiens
cccaaaacaacagcagatgatatcttccaagtgtctgctcgggacacggcttcagccctctgtggtcccctctccccggggggctttgggattcttgtcaagctccttcaagagcctgcaagcacttaaccagccacccagagttccctcactgaagatctgagcatgacccgggacgaggcactgccggactctcattctgcacaggacttctatgagaattatgagcccaaagagatcctgggcaggggcgttagcagtgtggtcaggcgatgcatccacaagcccacgagccaggagtacgccgtgaaggtcatcgacgtcaccggtggaggcagcttcagcccggaggaggtgcgggagctgcgagaagccacgctgaaggaggtggacatcctgcgcaaggtctcagggcaccccaacatcagatgaagagaggggagctctttgactacctcactgagaaggtcaccttgagtgagaaggaaaccagaaagatcatgcgagctctgctggaggtgatctgcaccttgcacaaactcaacatcgtgcaccgggacctgaagcccgagaacattctcttggatgacaacatgaacatcaagctcacagactttggcttttcctgccagctggagccgggagagaggctgcgagaggtctgcgggacccccagttacctggcccctgagattatcgagtgctccatgaatgaggaccacccgggctacgggaaagaggtggacatgtggagcactggcgtcatcatgtacacgctgctggccggctccccgcccttctggcaccggaagcagatgctgatgctgaggatgatcatgagcggcaactaccagtttggctcgcccgagtgggatgattactcggacaccgtgaaggacctggtctcccgattcctggtggtgcaaccccagaaccgctacacagcggaagaggccttggcacaccccttcttccagcagtacttggtggaggaagtgcggcacttcagcccccgggggaagttcaaggtgatcgctctgaccgtgctggcttcagtgcggatctactaccagtaccgccgggtgaagcctgtgacccgggagatcgtcatccgagacccctatgccctccggcctctgcgccggctcatcgacgcctacgctttccgaatctatggccactgggtgaagaaggggcagcagcagaaccgggcagcccttttcgagaacacacccaaggccgtgctcctctccctggccgaggaggactactgaggggctggccagtcagggagggctagggggcaggtggggaggggaagccatggaaatacaagtcaaaggggtgagatgcgtgcaggcctctgcagaaggagcacttggccctggccaggaacccctggaactgaggccacgatcccctctcaaaggctgtgcacaagggaagtgggtgttcccaccacacagcaatacctgcaggctggggcaggccctgggtgggcagagatcacacgtggcctgagaaccaggaaccccctgctcctctacttcctagatgagccaccatctccatttctctttaggggaggcccagagttactgacactcaggctttcttccctttagggtcacagggtgaggatcaaagacacaaatgtctgagatacacaattgcaggagattttattggccccatgacatccagtgacagtgtgggagcaggctactctccagggacatgtttttggaggcatatggagaagggggcccaggcgaggtggctcacacctgtaatcccagcactttgggaggtcgaggtgggaggatcgcttgaggccaggagttcgagaccaccctgggcaacagagcgagatcccatcactacaaaaattcaaaaaattagccaggcatggtggtgcacacttgtagtcccagctactcaggaggctgaggtgggagaattgcttgggcccaggaattcaaggctagagtgagccgtgatcaccagtgcactctagcctgggcaacagagaaagaccctgtctcaaaaaaaaaaaaaaaaaaaaaaagaataggaagcttctgatatttgtctttctggagtactatttgctttgtgattcccacaatgcaatgcttcacctagtacatcatctggttctcccagacccttttaggactgaactgtgctttaaatagttacatgtctgcctgttacacagtggaaactagtttccttcagagggacacgaaaccacagatgaggccacaaagaaagcattctccttccacagcaactggctgagaaaacagaaccaggaaaattctgccttgaggaaacaatgtcagcttcctgaatcatccagggagaaagggggagagaatagattttaaaatgcttaaaaaatggcctttcagagtgctctgttccaattgtttgtgtgtttgcaatcctgtgtcaataatacttggcctctaacagaaacacctggcccccagccatcgtcaacacacattgggccccttctccaaaacacaggaggctgagtcctctcctgccctggtgagaggcgcctgccacagagggatgggagacagggaaggggaagttctttcctgaggctgaagctctcgagcttggaattgcgctgtttgcaacatggccagggaatgacagtgaccctagaaggcttttctccttgtcaccacccggctgcttacagctcccctggcggccggcctgcgtctgcagcacagcggaaaccgaggttgtctgaggctgaatctggagtgttgcccatcctgc

SEQ ID NO: 245916 - DNA, 1361 bp, Homo sapiens
caagatcaagataatcgcacccccagggccctgaattagtcagcgccctgggtgggcagagatcacacgtggcctgagaaccaggaaccccctgctcctctacttcctagatgagccaccatctccatttctctttaggggaggcccagagttactgacactcaggctttcttccctttagggtcacagggtgaggatcaaagacacaaatgtctgagatacacaattgcaggagattttattggccccatgacatccagtgacagtgtgggagcaggctactctccagggacatgtttttggaggcatatggagaagggggcccaggcgaggtggctcacacctgtaatcccagcactttgggaggtcgaggtgggaggatcgcttgaggccaggagttcgagaccaccctgggcaacagagcgagatcccatcactacaaaaattcaaaaaattagccaggcatggtggtgcacacttgtagtcccagctactcaggaggctgaggtgggagaattgcttgggcccaggaattcaaggctagagtgagccgtgatcaccagtgcactctagcctgggcaacagagaaagaccctgtctcaaaaaaaaaaaaaaaaaaaaaaagaataggaagcttctgatatttgtctttctggagtactatttgctttgtgattcccacaatgcaatgcttcacctagtacatcatctggttctcccagacccttttaggactgaactgtgctttaaatagttacatgtctgcctgttacacagtggaaactagtttccttcagagggacacgaaaccacagatgaggccacaaagaaagcattctccttccacagcaactggctgagaaaacagaaccaggaaaattctgccttgaggaaacaatgtcagcttcctgaatcatccagggagaaagggggagagaatagattttaaaatgcttaaaaaatggcctttcagagtgctctgttccaattgtttgtgtgtttgcaatcctgtgtcaataatacttggcctctaacagaaacacctggcccccagccatcgtcaacacacattgggccccttctccaaaacacaggaggctgagtcctctcctgccctggtgagaggcgcctgccacagagggatgggagacagggaaggggaagttctttcctgaggctgaagctctcgagcttggaattgcgctgtttgcaacatggccagggaatgacagtgaccctagaaggcttttctccttgtcaccacccggctgcttacagctcccctggcggccggcctgcgtctgcagcacagcggaaaccgaggttgtctgaggctgaatctggagtgttgcccatcctgc

SEQ ID NO: 245917 - DNA, 2625 bp, Homo sapiens
aaagtgtaaatctctgtcaagggcaggacatctctgctgcagcctctaatctgggaccccccatggggtgaggggccccccgaggccatctgtcctctgcactcccaggggcgttagcagtgtggtcaggcgatgcatccacaagcccacgagccaggagtacgccgtgaaggtcatcgacgtcaccggtggaggcagcttcagcccggaggaggtgcgggagctgcgagaagccacgctgaaggaggtggacatcctgcgcaaggtctcagggcaccccaacatcagatgaagagaggggagctctttgactacctcactgagaaggtcaccttgagtgagaaggaaaccagaaagatcatgcgagctctgctggaggtgatctgcaccttgcacaaactcaacatcgtgcaccgggacctgaagcccgagaacattctcttggatgacaacatgaacatcaagctcacagactttggcttttcctgccagctggagccgggagagaggctgcgagaggtctgcgggacccccagttacctggcccctgagattatcgagtgctccatgaatgaggaccacccgggctacgggaaagaggtggacatgtggagcactggcgtcatcatgtacacgctgctggccggctccccgcccttctggcaccggaagcagatgctgatgctgaggatgatcatgagcggcaactaccagtttggctcgcccgagtgggatgattactcggacaccgtgaaggacctggtctcccgattcctggtggtgcaaccccagaaccgctacacagcggaagaggccttggcacaccccttcttccagcagtacttggtggaggaagtgcggcacttcagcccccgggggaagttcaaggtgatcgctctgaccgtgctggcttcagtgcggatctactaccagtaccgccgggtgaagcctgtgacccgggagatcgtcatccgagacccctatgccctccggcctctgcgccggctcatcgacgcctacgctttccgaatctatggccactgggtgaagaaggggcagcagcagaaccgggcagcccttttcgagaacacacccaaggccgtgctcctctccctggccgaggaggactactgaggggctggccagtcagggagggctagggggcaggtggggaggggaagccatggaaatacaagtcaaaggggtgagatgcgtgcaggcctctgcagaaggagcacttggccctggccaggaacccctggaactgaggccacgatcccctctcaaaggctgtgcacaagggaagtgggtgttcccaccacacagcaatacctgcaggctggggcaggccctgggtgggcagagatcacacgtggcctgagaaccaggaaccccctgctcctctacttcctagatgagccaccatctccatttctctttaggggaggcccagagttactgacactcaggctttcttccctttagggtcacagggtgaggatcaaagacacaaatgtctgagatacacaattgcaggagattttattggccccatgacatccagtgacagtgtgggagcaggctactctccagggacatgtttttggaggcatatggagaagggggcccaggcgaggtggctcacacctgtaatcccagcactttgggaggtcgaggtgggaggatcgcttgaggccaggagttcgagaccaccctgggcaacagagcgagatcccatcactacaaaaattcaaaaaattagccaggcatggtggtgcacacttgtagtcccagctactcaggaggctgaggtgggagaattgcttgggcccaggaattcaaggctagagtgagccgtgatcaccagtgcactctagcctgggcaacagagaaagaccctgtctcaaaaaaaaaaaaaaaaaaaaaaagaataggaagcttctgatatttgtctttctggagtactatttgctttgtgattcccacaatgcaatgcttcacctagtacatcatctggttctcccagacccttttaggactgaactgtgctttaaatagttacatgtctgcctgttacacagtggaaactagtttccttcagagggacacgaaaccacagatgaggccacaaagaaagcattctccttccacagcaactggctgagaaaacagaaccaggaaaattctgccttgaggaaacaatgtcagcttcctgaatcatccagggagaaagggggagagaatagattttaaaatgcttaaaaaatggcctttcagagtgctctgttccaattgtttgtgtgtttgcaatcctgtgtcaataatacttggcctctaacagaaacacctggcccccagccatcgtcaacacacattgggccccttctccaaaacacaggaggctgagtcctctcctgccctggtgagaggcgcctgccacagagggatgggagacagggaaggggaagttctttcctgaggctgaagctctcgagcttggaattgcgctgtttgcaacatggccagggaatgacagtgaccctagaaggcttttctccttgtcaccacccggctgcttacagctccctgcggaaacaaggtagagccaggggatcctcaagagcg

SEQ ID NO: 245918 - DNA, 1560 bp, Homo sapiens
  misc_feature (1)..(1): n is a, c, g, or t
  misc_feature (771)..(771): n is a, c, g, or t
  misc_feature (783)..(783): n is a, c, g, or t
nctgtgactggcggcgtgttgctgttgtcgctgtccgcgtctcgtcctattattcttcttgtccggcacgcggttcatcataagtttctgccgtgccgttgtggtctcgtcctcactcacgtgtgtgcttcttcatgatcaggcttcctctcctcgtgttggcccccccggcggttatatcatccgtcattgtcggctctctctcgattactgcgtttctgttgtcgtctcccccgtgttgtgttcggctgccccccttggttttttcgttgtgtggcttgtgttgttcgtttgtcgtgctttgtcgtgtgtggtgatcgttatgtctgtgttggttggtgtaaacacattgtgcggagatttatttgtgccccctgaacaagtcccttggaccactggtgggtgaccgcggtatactcctacacggacaaagtttttgggcgcatatgggagaaagggggccgcacagtcgaaagtggctcccaccacccgttgatcccccgcaccttttggtgagtttctaatgttggaaggattccctttgaggtccccccgaggttttgagagcccccccttgggccaacagatgcgggatccccttcactgccgatgtcccgagattatgcccaggcattgtggggcaacacccgtgtaggtccccgctatctcacggagaggcttaaggtgggagaaatttccttgggcccccggaatttcacacggctatagaagtgagaccctgattcaccccccggcacactctttacctcngggcacacacanaagaaagaccctgtctcaaaaaaaaaaaaaaaaaaaaaaagaataggaagcttctgatatttgtctttctggagtactatttgctttgtgattcccacaatgcaatgcttcacctagtacatcatctggttctcccagacccttttaggactgaactgtgctttaaatagttacatgtctgcctgttacacagtggaaactagtttccttcagagggacacgaaaccacagatgaggccacaaagaaagcattctccttccacagcaactggctgagaaaacagaaccaggaaaattctgccttgaggaaacaatgtcagcttcctgaatcatccagggagaaagggggagagaatagattttaaaatgcttaaaaaatggcctttcagagtgctctgttccaattgtttgtgtgtttgcaatcctgtgtcaataatacttggcctctaacagaaacacctggcccccagccatcgtcaacacacattgggccccttctccaaaacacaggaggctgagtcctctcctgccctggtgagaggcgcctgccacagagggatgggagacagggaaggggaagttctttcctgaggctgaagctctcgagcttggaattgcgctgtttgcaacatggccagggaatgacagtgaccctagaaggcttttctccttgtcaccacccggctgcttacagctcccctggcggccggcctgcgtctgcagcacagcggaaaccgaggttgtctgaggctgaatctggagtgttgcccatcctgc

SEQ ID NO: 245919 - DNA, 1854 bp, Homo sapiens
aaagtgtaaatctctgtcaagggcaggacatctctgctgcagcctctaatctgggaccccccatggggtgaggggccccccgaggccatctgtcctctgcactcccaggggcgttagcagtgtggtcaggcgatgcatccacaagcccacgagccaggagtacgccgtgaaggtcatcgacgtcaccggtggaggcagcttcagcccggaggaggtgcgggagctgcgagaagccacgctgaaggaggtggacatcctgcgcaaggtctcagggcaccccaacatcagatgaagagaggggagctctttgactacctcactgagaaggtcaccttgagtgagaaggaaaccagaaagatcatgcgagctctgctggaggtgatctgcaccttgcacaaactcaacatcgtgcaccgggacctgaagcccgagaacattctcttggatgacaacatgaacatcaagctcacagactttggcttttcctgccagctggagccgggagagaggctgcgagaggtctgcgggacccccagttacctggcccctgagattatcgagtgctccatgaatgaggaccacccgggctacgggaaagaggtggacatgtggagcactggcgtcatcatgtacacgctgctggccggctccccgcccttctggcaccggaagcagatgctgatgctgaggatgatcatgagcggcaactaccagtttggctcgcccgagtgggatgattactcggacaccgtgaaggacctggtctcccgattcctggtggtgcaaccccagaaccgctacacagcggaagaggccttggcacaccccttcttccagcagtacttggtggaggaagtgcggcacttcagcccccgggggaagttcaaggtgatcgctctgaccgtgctggcttcagtgcggatctactaccagtaccgccgggtgaagcctgtgacccgggagatcgtcatccgagacccctatgccctccggcctctgcgccggctcatcgacgcctacgctttccgaatctatggccactgggtgaagaaggggcagcagcagaaccgggcagcccttttcgagaacacacccaaggccgtgctcctctccctggccgaggaggactactgaggggctggccagtcagggagggctagggggcaggtggggaggggaagccatggaaatacaagtcaaaggggtgagatgcgtgcaggcctctgcagaaggagcacttggccctggccaggaacccctggaactgaggccacgatcccctctcaaaggctgtgcacaagggaagtgggtgttcccaccacacagcaatacctgcaggctggggcaggccctgggtgggcagagatcacacgtggcctgagaaccaggaaccccctgctcctctacttcctagatgagccaccatctccatttctctttaggggaggcccagagttactgacactcaggctttcttccctttagggtcacagggtgaggatcaaagacacaaatgtctgagatacacaattgcaggagattttattggccccatgacatccagtgacagtgtgggagcaggctactctccagggacatgtttttggaggcatatggagaagggggcccaggcgaggtggctcacacctgtaatcccagcactttgggaggtcgaggtgggaggatcgcttgaggccaggagttcgagaccaccctgggcaacagagcgagatcccatcactacaaaaattcaaaaaattagccaggcatggtggtgcacacttgtagtcccagctactcaggaggaagccaccatgcccggctaatttttgtatttctttctttttttttttt

SEQ ID NO: 245920 - DNA, 671 bp, Homo sapiens
agagctggatccacagcatgtcactagtaatcatctgtctccaacctttagatgacgtgctaaattacatgtctgcctgttacacagtggaaactagtttccttcagagggacacgaaaccacagatgaggccacaaagaaagcattctccttccacagcaactggctgagaaaacagaaccaggaaaattctgccttgaggaaacaatgtcagcttcctgaatcatccagggagaaagggggagagaatagattttaaaatgcttaaaaaatggcctttcagagtgctctgttccaattgtttgtgtgtttgcaatcctgtgtcaataatacttggcctctaacagaaacacctggcccccagccatcgtcaacacacattgggccccttctccaaaacacaggaggctgagtcctctcctgccctggtgagaggcgcctgccacagagggatgggagacagggaaggggaagttctttcctgaggctgaagctctcgagcttggaattgcgctgtttgcaacatggccagggaatgacagtgaccctagaaggcttttctccttgtcaccacccggctgcttacagctcccctggcggccggcctgcgtctgcagcacagcggaaaccgaggttgtctgaggctgaatctggagtgttgcccatcctgc

SEQ ID NO: 245921 - DNA, 450 bp, Homo sapiens
atctcctgacctcgtgatctgcccgcctcggcctcccaaagggctgggattacaggcatgagccaccgtgcctggctaattttgtgtttttagtagagacagggtttcaccatgttggccaggctggtctcgaactcctgacctcaggagatccacccacctgggcctcccaaagtgctgggattacaggtgcgagccaccatgtaccagaatttctaggtcttctgattcaaagcctggagctcttccctagatatcaatctacatcttgtgagactgtgatagagaagtcagccttaattagccgggcatggtggtgcatgcctgtagtcccaggtatttgggaggctgaggcaagagaattgcttgaatccaggaggtggaggttgcagtgagctgagattgcaccactgcactcgaccctgggcgacagagtgagaccctgtctca

SEQ ID NO: 245922 - DNA, 554 bp, Homo sapiens
gtttctaaaacaaacaaataaacatccgtgaaatgagccaagcatggtggtgcacacttacagtcctatctactccagaggctgaggtgggaagattacttgagtccaggagctcaaggctgcagtgagctattatagcaccactgctctttggcgtgggcaacagagcgagactccatgttttgttttgtttttttttaaaggagtccatgtgaagacatagagacatagaaaggaaggcaatgtgaagatgcaggcaagaactggagagacacattcacaagccacggaatgccaaggattgctagcaaccaccagaagctaggaaaaagcaaggaggaatgttctacagctttcagaaggagcatggccctcctgacaccctgatttcagacttccaggctccagaaccatgagagaaaaactgctgtttggtactgttatggcagccctaggaaactaacttactacataacccacatgaactaacagtaatgtatactgtaagagtataataatcacaatcacaagaactaccaaaacaacaataaatc

SEQ ID NO: 245923 - DNA, 719 bp, Homo sapiens
aaatgccttggaaggggggaaaaactattccagagagatgaaagtgggtgggatggaggaagtgtaataagattgtgactcgtgtatagggagaaatttagtgtttccggtaaaattgtttacaaaaaaaattataaaggcctacaaagaaacttactgttctgtgctaaattatttcccactctccagtactatggaaggactgacttcaaggtccctaagacaaatggtcacattcacagaaagacacaagaagggttcaaaagaccaccatttttgcagtgtaaagcagtcacccctgcccttcccactgcagcccttggcctttctcactttgagaagtcttgcaaaaagggtcttcatattaggctgtgagatagtgttgcagatgtaagttggttttgtatgaaccaagcgtcagcaagttttaggtttgatgtcggggacttggagtacatcttggggtacacttcatagctgaattagacatgcgggtggaaaggtgacaacactgttttccccttgggcaattctcaggttggtgtgtcgtttcagagttgctaaacgctgaggagttaagaagagaggagggtaaaaggacggaggaggaggaaacagatggggtgaatagaaacggtgtaagaactagaacacagggaggaggactcagggcagagcccagagcccactgcagcaccgagtccacggagcagccagag

SEQ ID NO: 245924 - DNA, 602 bp, Homo sapiens
gagtttattgtccagtagtcgggcaggcttgtgcctttccttatttgtcagattctttcatttgctgattctgtttaagctcaagggtcagtcactgtgaaatgaatttgcacctcgttttctctttaggctccaagactcccaagaactccagggctcccactttccccattctgtgggactccttagggcccagaagagtgtgctgtgcaaagttggcttttagaaaactggctagctagcttgctggctcctccactttcctctccaaaacttcagaattcaccactcactgtcctaccagaaatcccctagaattttaaggtcatgcttactcacaaagtcttgaacccttctaaacacacttcccaagagactgacttatctggaatctcatctctatagagaagcagcctcttcatctcccttcaactatcatcccatacttctctgaacaatttttcttgtcctgccaattcagtgtgattgaaaacctgaaaaccacttagcagagaatctgggcttacatagtgcttgcctgtgcagttggagacagaggagggagaaggaagcaccgcaaatactgcatgctgcagattcat

SEQ ID NO: 245925 - DNA, 305 bp, Homo sapiens
gggccctaaacatcgcagggccttacctggcatgaaacagatactgaattaatatttgttaagtgaatgaacaaatattcacagcgtgtgccacctttgatgccatttttaagacctacaggtacctgacccccgacctctggaaggagactgtattcaccaagtctccctatcaggagttcactgaccccctcgtcaagacccacaccagagtctccgtgcagcggactcaggctccagctgtggctacaacatagggtttttatacaagaaaaataaagtgaattaagcgtgaaaaaaaaaaa

SEQ ID NO: 245926 - DNA, 566 bp, Homo sapiens
gcatgatttcattctttgtatggctctatagtattccatagtgtggatgtaccacattttctttatcgaatccaccattgttgggcacctatgttggttctatgtctttgctattgtgaatagtgctgcaatgaacatacagatgcgtgtgtctttttggtagaacaatttatttttctttggtatacaccaagtaatgggattgctcagttgaatggaagttctctttctaattctttgagaaatctccaaactactttccacggtgtcctttggccaatctttaacagtagatctgctagctgcaaactcttgtagttctccttcctttcagaatgtctttatttcctcttcattcctgaaggacagtttcacatgatataaaattcatggttgatagctcttttctttcagtacttgaaaaatgttttgccacttccttctcacttccttgttttctgatgagaaatctactgtcacggctaaccagttttcccagcaccatttattaaatagggaatcctttccccattgcttgtttttgtcatgtttgtcaaagatcaaaa

SEQ ID NO: 245927 - DNA, 361 bp, Homo sapiens
cttgctctgtcacccaggctggagtgcaatggtgcattctcggctcactgcaacctcagctcccccaggttcaagcgattctcctgcctcagcctcccgagtagctgagattacaggcatgtgccagcatgccctgctaatttttgtattttggtagagacggggtttcgccatgttggccaggctgctctcgagctcctgacctcaggtgatctgcccgcctcagcctcccaaagtgctgggattacaggtgtgagacaccacgcccagccctgtccttactttcaaaataaagtatctgatggtgatggtggtggttgttattattttacttcaatgaatcacatatgtttataagatt

SEQ ID NO: 245928 - DNA, 187 bp, Homo sapiens
ctcacccctaacctttcaacaataatgagaaataagctataagttatgccaaattgtatgatggttttcatgaaatagcccaaacttagacaactcatttaggctttgcagatgcaaactgtgatagatcttccttctctttcattcttggtgatttatgtgtccggtacattgttgtgttttctat

SEQ ID NO: 245929 - DNA, 393 bp, Homo sapiens
ctgttttttccttttatgctttgtacttttggtgtcaagcctaagaagtctttgcctaactgcggttacaaagattttctcctacttttcacaaaaagatagtcttatattttgcgttgaaatacaagatacgtttatttatattaacttttgcataaggcatgaggttaaggtcaagactttttttttggcctatggatatcttgttgcagcgataccatttatttgaaaagctatgctggatggatgtggtggtttatgcctgtaatcccagaacttttggaagccaaggtggaaggattgcttgaagccaagatttcaagaccaaacttgccaacatagtgagacccttatttctacaataattttttttaaaaataaattaatcaggtg

SEQ ID NO: 245930 - DNA, 681 bp, Homo sapiens
gacatttcaggaggccgcttggcagccattttagatcctgcccgcgcggagagctcctggctgccaaaaactgcagtcgctccgtgcccaagacactcttggcagtggagataaactttgtagagatacacagtccagaaatatcttataattacaaagcacagggggcagaatgtttttacaatacagctgtgctaatgtaaacatttaatttggcagccttctccacccacttttcaattaaccgggtttatgcagatactttaggtctgtaataaactttattgctaagagtacagtttatgaaacacagatttgaggggcttttttgaggggttttccatccatttaggaaagcacattgtgaatgttatgttgccgtgaatggaaagggtagctttctgtctcaaaagatgccatgggcctggcttaactgaaacaattgctttaggaaaaaaaaaatgtgggggctgtttcctttggcttctaaagcatgcaagaggatattaatagaaggaggtaaaaatcacttatatagctacaaaaagacactcgtgttgatgatcattaaaaaagataaatgtcccctgcaatgcatgagactgtttcagagataaattcccagtaacagttcttacagatgtaattgtaataattgtgtgatcgtggtaattattctta

SEQ ID NO: 245931 - DNA, 479 bp, Homo sapiens
agacttaaaatgggtgaattttattatttgtaaattataccttaatagagcaggaaaaactgtaaagcttgttatttgtttccattctgaccatgtgcgccagggtaaagtcataattagtcattagttatggttatgaacgtcgacagtaatcacataatagtagtgtcatgctggctgtgcatcctcaagccactctctccccagcactcccacttaactcctggggaagacattcacatgagtcaaaagcagcctccaaggttctcatctcattcaggccaggacccctaggaagacttcatactgatttacagcaaagcacgtgttggccagtaagtgtgcattcagatgttgtgtcatcagtgaggtgggtattctcctggaagctgcagtgttgccaagcaatgaataagaacaacgaatcccagcaatttctctctgcgtcttggaatcatgattcagatccgggcagacaa

SEQ ID NO: 245932 - DNA, 432 bp, Homo sapiens
cctcagggaaggtctggctctattgcccaggttggattgcagtagcatactctcagctcactgtaagctccacttttcaggctcaagctaccctcccacctcatcccacccatgcacagctaacttttgtatcttttgtagagacggggttttgccatgtcttccaggctgctcttgaactcatgagctaaagcaatctgcctgcctaggcccccaaagtgctgggattacaggcgtgagccaccatgcccagtcaggaaagggatgtttctttgaatgttgagtggtagaaaaatgtattgtataatgaatgggtacctggagtctgtatggctgagcttcatttggagctttttaattttgttcaatgccacaacatttatacaaacaagttcaattgttgatgcaaataaacagaggcatttaaattca

SEQ ID NO: 245933 - DNA, 307 bp, Homo sapiens
tgtctagtggttactcccgcttcaaggctaaggaagggaaggacctgttttgctttcaaaggctttttccttccagcccttgctgtgtggcccgttgtgtgtgggagggaccatgagaggcctggatattgtcaacaaaagacttgaacaagccaaagagctgatgatgttgacaagaaggggaccttaacaaggcagataatcaaaagttgatgactgacagcccctttcgcatcccttcaccctctgctaaatcaggtctcttacatgatcttgatgacaaataataaaaattataaacacatta

SEQ ID NO: 245934 - DNA, 705 bp, Homo sapiens
catggcaaacggaggtggcaggggagcgcatgtttcagctcgtttgtgttacagctcattccgtccctctaccctgcttcagtctgcttcagtcctgggctggcccagccccactcctgcttcctgttgggtagctgcccagtgccagcggagggctgaagggctacaatgttaagagttcctttcacacccaccattcagcaggttctgagatcttgtcctgcgtttaagaagaatgaggttatgtggacactggggagtgagcaaggtggaagagggttttcttgagcaacaaaacagctctcgacacgagaggggacccaacgtgagtagagctccatgtgagaggggattccaaaggcaggtagtccccatgtgtggttgagtctgaggttttcatgggctcagaatggaggtttttatgggctcagagtgcaggctgattggtccatgggtgaacctggaaaaagcaccatttgattggctatccagttttcaggcttcagactgtctttggcttgaaagttgtcgggtttcaccgggtaccctacccgtctgcttgggagtttgtctcctgctcttatcaactgtatttctttattcatattttctatgttgtgagagattattctcataattttctagacgtggattcctttagtttttccaacttatttaaaattgcttatttaaagtctcaagtct

SEQ ID NO: 245935 - DNA, 445 bp, Homo sapiens
agtgtcaagaacttgagactaaagccacatgtaacaaaagatgcttccgttatccctatcaggaaatagcaagggttctaggagctctatgccaggaatatgggacaaagaattatggttaccaaaggctggaaagggtattggggatggggtataaaaaggagttggttaatgggtacaacaatacagttagaaggaatatgatctagtgttcagtagcacaatagggtgcctatagttaacaatagttattatatatttcagtataattagaagaatagatttggaatgtcctcagtgcaacaaaatgataaatatttaaggtgatgtatatctcaattacattacacattctatgcttatatcaaaatataatttataccccataaatatgtacaaatattgcatatccatgtgaattaaaaattttaaaaaattttaaaaa

SEQ ID NO: 245936 - DNA, 383 bp, Homo sapiens
cactccaggcaaacacagaggtctccgccacttacttcgtcactaagtccggcatgttcaccattgcctaaggaagaacagagaattaagaattgtgaggccgggcgcggtggctcacgcctgtaatcctagcactttgggaggccaaggcaggtggatcacctgaggtcaggagttcgagaccagcctggccaacatggtgaaactccttctctactaaaaataccaaaaattagctgggcatagtgacgggcgtctgtaatcccagctactcaggagactgagacaggagaatcgcttgaacccgggaggcggaggctgccatgagctgagatcgcgccattgcactccagcctgggcaacaagagcgaaactccatctca

SEQ ID NO: 245937 - DNA, 424 bp, Homo sapiens
catgatccagaagggagaaaataagatcaaatgttaaaatgctatactaatcccctagcagataacggatgggagaggaggccttggctttcaaacagtgactatcttagataatagaggaaaaatttgaaatccatacaggtacatatcaggaagttaaagtacctaaaaccaaatgtttaatgttgttatatctccttttatttttacagccatagtgatcagcttgtaacatccactttgaaaatttccaaggccaacatcatctcagtcatgaagtatggtactttggggaatctattggatatttgtttatgtactagagtgaacctggaactgcttattcctttgcttccttaaaaatgtattttctaaagtcagctgattagcaaaaaaaagaaataaaatttattgtcttttaatt

SEQ ID NO: 245938 - DNA, 692 bp, Homo sapiens
tgctaagtggagaatgcattgcaaaggtgaagagaggaagacctaatggcagacaaccacagtagtacaggcaggagatattggtggcttgagtggagccctcagagagaaatgggtagagatattgtggagatggatcaggctggacttgctgctggttgggataccattgggaaaggaaaggagaaatcaagtgtgcaaattttgggtttcaacttgggcaagtgaagaagcgatagtatcgcagagatgggtaaaactgcagagaggaacaagttgagtaggaaaagcaggtttgagagctctattttggacatgttaagtctgaaatgactgttactcatttgccttctgttaacaccttcttcagataaggcagagtgcaacgcaagttatgaggttttagctttcatgatatatgcatagtaaaattgaagcctgacagaggttcaaatagattgagcagttttgcttttgtgagattaaatctccttaaacacctcaatcactcataatttgggatgagtcattcctacagattattcaactaatctattacatgatttttcattgtgaatgtaatacatgcaattgcaccccccaaaattaagcaacagtgatgcatttacattttttgtatgtatccttcctgacctgttcctaaacacatgcaaacatatgtgtgtatggtt

SEQ ID NO: 245939 - DNA, 894 bp, Homo sapiens
gagcaccctcatcttaaaatgttgttttatttggaaataatttcaatctcatagaagagttgtgtgaatcatacagagccccacatatacttcatccagttcactgtttgtcaatatgtctgcattcgccttgtcatttcttctctcttatattattgatgtgttttaactgtttgaaaattaattgcagacatcatgtcccttttcccctgaatagcaaatattttcctaagaggaagacattctcgttcataaccatggtagacttaccagattcaggaaatttcacattcttacaacattattatccagtacatttttgaatcttttttatagcagtttgcccccacttccaggatgtcttccaggactgaaacaaggatcatgagcaccgcatttagatgcaacttctcttcagtcttccctcagcctttctttgctttcacggccttgacggttttgaagagcacaggctgtggaacaccctctctaaagtgtttctaaagtcacttcttacacagccattgctgttagaacctaggaggggtgcgtggttgggttgtgagtggtaagggccaaagttgcgaatgtctgcattggcgaaagagatttgatggaaaaggaggttgctggagtgtagacagctacatcgatccatacttgggttcagcaatcctaggagggtcccatttgtagagagagggatattttctccacatcattcccatgtgtttctcatcatcagtgaaatgatatttcatcctgtttttaccattaaccgtgtttgtggtgacctcccttttagagctgattcaaagttcccttttgggaggctttccaggatttcaccaaactgaatgttatagtggaattgagtgttttaagctgggaata

SEQ ID NO: 245940 - DNA, 441 bp, Homo sapiens
ctggaggcctcaggcagagatgaaggcccagttatgatttccttcactggagtccatcattaatgagcgccttggctggggggatgcctgctaagagggcatggagtacagatcctccactgacacccccacactcctagcagcaagcaggacttagtggccccacttactccctacagggtaggaaaagacggcagtgccctggtgaggagctgtatagggggtccttcaggatgcttgctgggaggggtggggagggcacaggacgtgctgggaccccactgggatctaagcccctcccagctgatttattcttaggatctgtaatgctcgcctgcatgtgccccgaacttcagaaggcccaagaatcaaccctgacaaatgtctttttgtcctgtattcagtagagataagattaaaaaaaaaaattagtagagggca

SEQ ID NO: 245941 - DNA, 995 bp, Homo sapiens
tatggggagatgaagcagagaaacatgcatcgaagctggggaccaaatggatctttaaataaatgaaactataaaatgtggatgaacatgtcttaattaagtaaattaacaaataaccattgcacccctgtttgaggtgctccaacaatatagacagcaatatccagttgagtgtagccattccaatagaatataaccagcggataataactcatggcatcacaacaggaatctttcaatttgcacttgcaggatggtagtgaggttctttattctataggcaagaacacaagacttacaacaggtgcagctcattataggaagtcttgggccactgcccatatttatttctgtgggttggatggccccaccttagactaaggctcctaggcatctggaatttgcctctacttcccagcaggcctccacatgctatctcctttaagatgtctcattctgttcatgatccaatttattttgtctggtttcaatgcttgtctctttcagggtgccactttaagaatatttacattctcaattataatgtgcagaaatccccgtggttttccaatcctgactacattccccaacattaactgcttctttacaggtaagagtgagtctgcagttgtcccagtggccaatacaatgcctcctcttctctcgtctgcccttccaccaagcctctggcactctcaggcactcttttctaaggaatcagtgacaagataggaagcaataaggtcaggttagagtagctgctgcaaatgatcaaacatgataaggacaatgaggtgaactgtggttgcttttctcatcctgctcttctgacacctcccactctgcacaccaatccactatggaaaccaataagccttctttcagacccatggcaaacatgctgtaacagaaagcacagctacagagggcatgcattggaggcctgtgagctgaatctggcccacagatgtgatttgtttgaccccaacagtgtt

SEQ ID NO: 245942 - DNA, 792 bp, Homo sapiens
tatggggagatgaagcagagaaacatgcatcgaagctggggaccaaatggatctttaaataaatgaaactataaaatgtggatgaacatgtcttaattaagtaaattaacaaataaccattgcacccctgtttgaggtgctccaacaatatagacagcaatatccagttgagtgtagccattccaatagaatataaccagcggataataactcatggcatcacaacaggaatctttcaatttgcacttgcaggatggtagtgaggttctttattctataggcaagaacacaagacttacaacaggtgcagctcattataggaagtcttgggccactgcccatatttatttctgtgggttggatggccccaccttagactaaggctcctaggcatctggaatttgcctctacttcccagcaggcctccacatgctatctcctttaagatgtctcattctgttcatgatccaatttattttgtctggtttcaatgcttgtctctttcagggtgccactttaagaatatttacattctcaattataatgtgcagaaatccccgtggttttccaatcctgactacattccccaacattaactgcttctttacaggtaagagtgagtctgcagttgtcccagtggccaatacaatgcctcctcttctctcgtctgcccttccaccaagcctctggcactctcaggcactcttttccggggcgcccggcgcgccggcggctcaggagcgcgaagggactgactgaccgaccgacggaccgcagcggcagaagcccgct

SEQ ID NO: 245943 - DNA, 385 bp, Homo sapiens
cattagtttataaaccatattgtaactgaaatgtgatagaaaaattttctacttaaatgaatatcaagatgacgctgcaatgcatatttacgcacacaagctcattttcataaatgaagctttcctcagaatgatggctaacatctgttgaggtcttaccaagtgctgggttttgggctaagtacttatattagtaaaagtctagcaaatactgcccatagtctagcaaggactccttacctggaagttgctgaaagccttggtaatgttatctttgttctccactctgcttttggggaggatgttttccatgactatacgagatgaggcttggggctgggtggccagagttagcaaataaaaatacagaatggatactatttta

SEQ ID NO: 245944 - DNA, 403 bp, Homo sapiens
attcccacaaatattttttcagtaccaactatgtgacaggccctggtatccaggattaaagacagttatacagagtcctatagaattcctttatctgtttttttttggctgcagtaaatgtgaaacagactagaaaagagatgaggcatgaggacagtgacattgtctctcttactgactgtcacatctgcagggtgagcacagcacctagtaggagctcaataaagatatgttgaatggatgagtgatattagtgaaaagtaataactaggagagagaatcaaatatgaaaaggatataaaataaaaactataattgccttggaccatttagtgtttgaataagccccgtaatgatgacctggggctactaagtgaccatggtgacccaggccctgtgcagc

SEQ ID NO: 245945 - DNA, 499 bp, Homo sapiens
ctctcaactgttgatggcattgcagaggagataacctaatagtgtgagagaaaagccttaacaaaaataccttcatgttgaaacagaaaggggaataaagggcgaacaagagtatgctagccagacaaaggtagaagattgtatttcaggcagaagaaatagcacgtgtattcaggatatttcaagtcctggtcagatgttaggttgcaagtttggggagaataggatatgaagctaggaaggagacagggatataagcactacaggctaaagtacttgccatttatctgggagggaatggggagtcattgatcactgcacagagatgagattttcatttatgaaaggtcacgatgggattgtaaatgatattaattctccttgtcatttttggtgcgttcaaaattgtcattcaactttcgtttttgaaaatgttatataaatgttgtgtaattatatttttattaaaaagattaaaaaatttagaaatatatggaga

SEQ ID NO: 245946 - DNA, 381 bp, Homo sapiens
gtgagtctaaggacattcattattccaaggttagtatttgcctttaaaaaatggggctaaatacttttgaacagaataggctgttagaaaaattgttagtggaattgactgtttctgaaacacatgatgtgaagcgggggaaatgtaaatgtgaaacagcagctattagagcgtttgtagaaaaagctggatggcaagaagataagtgtgtgcaaaacaagcagcattccattttacaaagcctcgggacactaatgtcacagagaatgtgacatatgaaaggtgaagcccatcaaccattaatattccagacccagggcccttgatttttgtagtcagctcccactacaagcttgacacaactcaaggacacagggtgga

SEQ ID NO: 245947 - DNA, 412 bp, Homo sapiens
agaccagtgttaataagcaggcaagaaatgaagacgtaaattactgcagtaggcatggtttctccatcacagtgaagctatttgcccaaggtgccgtagccagctaaattgggtctagaaggcagggccctagactccacatcaccaagctgcatcattcataatcctgttgaacatggaataaagagaaaagaccctctctcctaatcttcagctgggacccagggccacagaacttagagttggaagaaaacttgggacgatttaatatatctgtcatttctagtcagggatttcttgcggaacattgctgttggatgatggtccatcctctgcctgaattcatcattaaaaatttctttgaaattattaacaacatttactcaataaacatttattgaatatctactgt

SEQ ID NO: 245948 - DNA, 448 bp, Homo sapiens
caattcagtaagtacttactgaatatttctgtgagctcagtctagtaacagctaatagtggtgatgttgaggagggtgtgggggaaggataggtagagtaaggggttgtagaggctgagaaggaagatgaggggaggcttgtataagaaatgaacacctgggcacagtggctcacacctgtaatcccagcactttgggaggccgaagcgtgtggatcacttgaggtcaggagttcgagaccaccctggccaacatggcgaaactccatttctgttaaaagtacaaaaattagctgggtgtagtggcaggctcctgtaatcccaactacttgggaggctgaggcaagagaatcgcttgaacctgggtacaggggctgcagtgagccaagactgtgccactgcactccagcctgggccacagagtgagactctgtctcaaaaaaaaaaaa

SEQ ID NO: 245949 - DNA, 458 bp, Homo sapiens
aatgtgggatttttttttttttttcggcctctctttttttctctctctgcacatggatgaacagtgagattctgaatactcccttgctgaaccaagcgatggcaggtcctgctggacccacctggggaagggagacagctgtgcgacagctttcagagctcaagggtcacacctaaatccccgatttccccactgccagcagccccagttggagggtggaggtgaaggttgaaaggagggtggctgagttgacagtttctttgctagctcctctacaatcagtgcttcaggtgttttcaaaatgccactgttaacagaaggagggccttttagaattttccagatggtagatgtgattttcttttaacctgatggttttcctcctctgccttgtaaatgaataagatgttgccccaagaacagtgaggtatgttgaaaagccaaagaacatttgtgaa

SEQ ID NO: 245950 - DNA, 464 bp, Homo sapiens
tgatgctgcttcagtaggataacacagcttcaaaatcctttccttcaaaacaccgttactgaaccaaacttaggtctgcccacccaatgaaacaaagccaaacgctaatatcaggatttgcagcaagagaaaagtgaggcatttattgcagggcgctcatgcttaagacctgaactccccaatgagttacatgtaagggtttttaaaggcagtgaggcaggggttccaggcaaactcataaatctatacatggaggttatatattgattcgacttaaaaaaaaagaaaaacggacattttgaagcgggggcctacaggtcctgggtggattcaaagattttctgacttgtgattggttaaggacaaaaagatttgtctaaaaatttgaggtcagcagaaaataatgttagctgtggcccgtgggttttaccccctccaggcccctcaggaagaaatttagaaga

SEQ ID NO: 245951 - DNA, 212 bp, Homo sapiens
ctgaattctattatataaaatcattccaaccatgtcatatggttcttcggattcatgaataatttggaaaagagagccatatccatcttattaagggacacattcccaataaattttcatctttcatgtttaataattatcaatattcataacattttacattttgatcaaatatgtgttaataataatagaaataaatgtccaacaacgat

SEQ ID NO: 245952 - DNA, 190 bp, Homo sapiens
ttcttactcttagcagctcactgtaaatatccttttgaataccatccaccccacccctccaaaaaagatactgaatgcctgcagagtcagctggtttggggatacaaatatgaaaacgatttgaagcctggcctcaaatcagatcgtctagcagactctgagacaaggtttcgtgtgctcgcgatttata

SEQ ID NO: 245953 - DNA, 685 bp, Homo sapiens
caggttatggtgtttatggctaagacatgattctaccactcccttagccaattttgaaaattgtttcaaactattcatttgaggtggaattaatttttctctcccctaatgggagtagtcatggagtaatgtgaccagggcccactggatgggccatgccacttgagggcagccatcccaaaatttccagattccatccttatgggtaaaacatctcttgattgctaacattgttttttaaagcaggttaagctaataactgtgagttaattatagcatgtctaaattgagctagtttttataggaacataactcatttttgtatattgacttttgtttatttgtttgtcttaagacagggcattgctctgccaccacaggctggagggcagtggcacctgggttcaggcaattctcccatctcagtctcccgcatagctgggtctgcaaccaggcgtcactacacttggctaatttttttaattaatttttttagagaaggagtctcactggtctcactggcccaggctggtcttgaactcctgggttcaagcaatcctcccacctcccaatttggcaacacttaatattagctggggtgtttttaaaaaaccaaaaaacttcacttagcatgtaaatcaacacaaagacattactatttccttctgggatgatcactagactg

SEQ ID NO: 245954 - DNA, 264 bp, Homo sapiens
cccttagcgtggtcgcggccgaggtacgcgggggcgtcactacacttggctaatttttttaattaatttttttagagaaggagtctcactggtctcactggcccaggctggtcttgaactcctgggttcaagcaatcctcccacctcccaatttggcaacacttaatattagctggggtgtttttaaaaaaccaaaaaacttcacttagcatgtaaatcaacacaaagacattactatttccttctgggatgatcactagactg

SEQ ID NO: 245955 - DNA, 1161 bp, Homo sapiens
aaagagtgggacttctagcttgcagagaagtgcactggattttacagactgccttcaggaggcagtgtctgatttacataggggccaaagattggctggatcaggtatggatgtttacacagcttaggaggaagctagctaatcttcaattatgcaaatggagcacttgccagcaccatgttgcctgttcgttactctacacgtggtttacaaagaaaagggaagatggagccaccattttgaacatgtgtcctttccaggtagctccttttcctattagcagagctgcaggcatttattcatgcaagcttccagctcgcttatctatgtctgcagctcaatcttacaggctgctctttgttaaaaagaaataatttgggggtttttattaaaaggaaaactttaccaaggactgtttttgccctcactcactatctgcctaaattatttatttatttattcatttttgtttttgttgagatggattctcgctgtcgcccaggctggagtgcagtggcgtgatctccgcccactgcaggctccgccccccaggttcatgccgttctcctgcttttaactcctgtatcaataatagttaatgtcatgggaaacatttataacgtatttgtatgtatgaataagcaagatagcaagttttaactagtggttgtgtttaatttatttatacaaatgtgttgggtgcaagtataatttagttacatgcatagattgcatagtggtgaagtcagggcttttatggtatccatcactcgaataatgtacattataactattaagtaatttctcaccatctaccccaccctaccttcttactctttcatgtcaggtgtgctggccctcaatgaccaacacaacaaagataaatttattgttttctgagacttagacttagacttagaattcaaaatcaacctaagagaaaagatgaccccgagccaataaaacatttgttttatatatatatgtatttataaacacacacatacacagacatgtatatatatgtgtgtgtgtatgtgtgtgtgtatatatatatatttgtttatactgaagaaactcatacagagtctttcccactgcacaaacccaaaagtaaagccacatggccctatgcaataaacattatggtaataacttcaa

SEQ ID NO: 245956 - DNA, 1036 bp, Homo sapiens
tcttaagttcagctgttgctagagtagatcctgtaaggttgttttcaagctggtatacacacatggaaattgaatgaaaaattcaaatgataatgtaaattagggtatatgcataaagaagtgaaagagacagagagagactactttgaaagagagaaaaggtatgctcttatacaggaaatgtcttatgggaaggatttgttctaaacatgcttaaaaatgatagcattgagtctagggactgtcagtgtcctgtgaaatgggaaatcagaagagatgtttaaaagacaaatttatttagtactggtcgagactttcactttggtaaggggacaatacaattaacatgtaaataaaatatatagtattgcacataataatataactatgggaaaaattgaaagggaagtgctaagacagtgtttgggttggaggtcatcttggttcattttctgttgcgtgtaacaggattcctgaaactgggcaagaaaaggaatttatttcttacaattatggaggctgagaagtccatggtcaaggggctgcatctggtgagagccttcttgctggcagggactctgtgcagagccctgaggcagcacaggccatcacatggcaagtaggctaagtgtgctagttcaggtttctcttccttttataaagcctacccagtctcactccatgataagtaatagttcatttacccattaatccattaattcatgaatggattaaccgattcatgaagacaaagcccccatgactcagtcacctcttaaaggccttacctatcagtattgccacatttggggttaaatttcacatgagttttggagaggacaaatatgcaaaccatagcagaggtcatattacattttttaatagcgtggtcagagaagtcctcacttaaaatggtggctttctaggaaagacctgaaatagggaagggagtgagccatgtctgagagaggagctgtcttggcacaggaacagcaaatgcaaatatttggaggttggagcttatttagcatatttg

SEQ ID NO: 245957 - DNA, 411 bp, Homo sapiens
tcttaagttcagctgttgctagagtagatcctgtaaggttgttttcaagctggtatacacacatggaaattgaatgaaaaattcaaatgataatgtaaattagggtatatgcataaagaagtgaaagagacagagagagactactttgaaagagagaaaaggtatgctcttatacaggaaatgtcttatgggaaggatttgttctaaacatgcttaaaaatgatagcattgagtctagggactgtcagtgtcctgtgaaatgggaaatcagaagagatgtttaaaagacaaatttatttagtactggtcgagactttcactttggtaaggggacaatacaattaacatgtaaataaaatatatagtattgcactttagcctgggcaacaagagcgaaactccatctcaaaa

SEQ ID NO: 245958 - DNA, 543 bp, Homo sapiens
ttacttgtgtaagtgaaagcaagattaacataccttttaacttcttggatgtaagtcctataaggattgaaaatatacatagaaataaatttatgattttatttcttttatactttaaaactattacatgggattaaaacttgcttctacttcaatcagtatatcaaatttgtatatatatttaggtatattttaaaaaatgaattacatcaggatttatgaaataattactacttgtatacaattagcatgacacatgttgtgtgataatgtatatatggggaataaattctcattaaaactgattaatatagagaagctcacttaacagtaaaatctaatataattgctactaaaaacattgcatggcaattttatttttagtagtatggaagatttttataaacattacatatcaagaattcccacagtgaatagtaaaatttatccctcattagagatccatgtctagtctgcattaaaaattggcagtatatgaacattcatgtttataaggcagattaattaagatgtgtttgcttt

SEQ ID NO: 245959 - DNA, 438 bp, Homo sapiens
acagccttggctctcgaaggctgtcctctcccccagcctcactctgactcatcatgtaggtcccgcatgggcctcagttctcctggccatgggctctccccataccttaacctgggaaccgttgtgggcaggaccatgtgggacaaaaaggtcctgtgcccaacccagcaccaatcacagggaggcctggggataagcaggggctcttggaaagggggcagaactcagctcaagtcacagaacctgggaaggaccttcagtggaaagccgcttcaaatgtcatctgggatgagcatggtggctcacacctgtcgtctcaacactttggtgaaactgaggctggaggattgctcaaggccaggagtcgaagaccagcctgggcaacatagcaaaaccttgtctctctgtgtatttttttaatattaaaaaaaaaaaatt

SEQ ID NO: 245960 - DNA, 867 bp, Homo sapiens
ctggtggggacttggagaacttttacgtctagctagaggattgtaaatgcaccaatcagcactctgtgtctagctcaaggtttgtaaatgcaccaatcagcaccctgtcaaaacagaccaatcagctctctataaaatgggccaatcagctctctgtaaaacagaccaatcagctctctgtaaaatggaccaatcagcaggatgtgggtggggtcagataagggaataaaagcaggctgcccctgcttagcggcggcaaccctcttgggttgccttccatgctgtggaaggtttgttcttttgctcctcacaataaatgttactgctgctcactgtttgggtctgcgttgcctttatgagctgtaacactcaccgtgaaggtctccagcttcactcctgaaaccagcgaagttaccaacccactgggagcaaagaacaacttcggatgggaggaactaccaactccagatgtgccatcttaggagttgtaatcctcttggcgaaggtctgcagcttcactcctgaagccagcgagaccacgacccccccaggaggaagaaactttgaatacgtctgaacatcagaaggaaggaactctgggcacactatctttaagaactgtcacactcatcgtgagggtccacagcttcattcttgaagtcagtgagaccaagaacccaccaattccggacacacaactatcaccacagtcaattttagaacattttcgttgcgtctaaaagaaaccatatgtttttcagctgtcacctcctaatccctcaatcctcccaacacctggcaaccactaatctactgtctttgtagacttgctactcgggacatttcatataaacagaattacacagt

SEQ ID NO: 245961 - DNA, 437 bp, Homo sapiens
tcttttttaatggaaattcccattgaccctctagcaaccattaacacaggtacatccaattaagcccctaggaaaagaggcctggaacaggtaacttttgataggtctaaggagtggctggaaccccaaagcgcataacactcctgtgcattttaagaaagggggtaacaagggaatgggtgctcaagtagtaaagagaaatgaaaaatagcctgagaaggccaaactgcttgtaggttaacaccactgctaaaggcagcctttttattacaatgcagtgacatttttcccggtggaatctgactacatcagtactgctatttgctacagatgctgggttattctatttgctgatttcaaaagcatgtcaactgttctaatttccttcgtgaaaaactgcatcccatgatgcattattatattcaaaattttccttg

SEQ ID NO: 245962 - DNA, 357 bp, Homo sapiens
ccaatagccactggtttttccaaatcaactatgtttctagcatctgagataaaggatggctgtatcataagatgcaccatgataacctccagggtggaattcttttttacaaagatgttacctttagcaagagatgcctttgaaaaggagaaaacagtagcactgaaacagtattactggttctgttttctgatttatgcttttttgaaagacctgatgtttcccctattgatataattttactaattaaaacatgttttatttgatgtcttgagttttgaagaaacgtcgaaaatgaatgactgttggtgggattacaggcgtgagccaccatgcctggccaaaagcagaatctta

SEQ ID NO: 245963 - DNA, 705 bp, Homo sapiens
tgagacagagtctggctctgtcacccaggctggagtgcattggtgggatctcggctcactgtaacctccgcctcccggattcaagttattctcttgcctcagcctcctgagtagctggaactatgggcatgcaccaccatgcctggctaattttcgtattcttagtagtgacggggtttcaccatgttggccaggctggtcttgaactcttgacctccattaatccactgtctcggtctcccaaagtgctgggattataggcgtgagccaccgcacccggcctaatattcttttaagtgttagaagtttataaaaagagcaataagtgaatagtcatcttgtacccatcgctcaacttgagaaataaggcattacagatacagttgaaactctttggggcctctcttttattgcccttcatttccccagagatacttactatcctgaatttgatatttcttattcctatgaacttattcccatgaacaatagtgcaaggctgctgaattggatatatgagaaatatcttccaaactaagatttaccagtatagaccagaattgcccatagatgcaaaaattcttttctatcaaaaaattatttccacagccaggcacagtggctgacacctgtaatctcagcactttgagaggccaaagcaggaggattgcttgaacctaggagttcaagaccagcctgggcaac

SEQ ID NO: 245964 - DNA, 718 bp, Homo sapiens
ctttaatatttttggagggaaagactgagtagcacttaaactttgcatcatcaattagcattttgaaaaggcaaataaaaacacacaggtggctaaaatgttacctttgacactttcttaaagtactaaggcaccgcagtaatggatattcatcactttcctgccctaacacacacagacgcacgtgtgtgcaacaacataaccaaatatgtatatttatatgcacctagatagcatctacacaagaaaatcattcacacatttgttaatcacagctttgtttatatagtacttatacagggtggagcaataatttgtgagtcttttaaactgatgtaagagacatttttcagtttattctatgagcaaatatgatgagcccaagtgcctactagaaaattcaagcctggagaactggattaataaatataaatgaattcatttgacagagtgacattttcatttaattaaggcagaaaatcagctctaaaacaaatgattgtccctgacaaagaagcagaaattggttcttaataaatttctaatagctcttccatgggctgcggaaggtcttcagtgatagagcactttggtgggggtggggagtgggatgaagggagggacagtgaagagaattgaaaagaaaaggagaagaaaaggaacagggaagcacaaaaggtagtgcatatttaaaatttcaaaaatagcaagaaaatta

SEQ ID NO: 245965 - DNA, 927 bp, Homo sapiens
cttaacgctctcacatctgttctactcccaccctaaaattaactcctctccgaaaagaaatgttttcttcttcctttttttattataataggcaaggtctctctctcccttgctcaggctggagtgcagtggtgcagtcatagctcactgtaacctcaaactcgttggcccaagcgatcctcccacctcagtgtcctcagtagctgagactacatacaggtgtgcaacaccacacttggctaacttttaaattatctgtagagaaaaatttttctcactatgttgcccagagtggtgccaaactcctgggctcaaccagtcctcccgcctcagcctcccaaaaagctaggattacagacgtgagcatcctcacccagcccaagaaaatattttctataaataattttttgtgtgatacaaaacctagcttgttttattaggtaacctctaaaaaactgctaggcacgtaccagttcattcattggacacatctcctcctacagacaaccatttggtccctcatccagctctcctgcaccctggaccaaatgggatatgcccaactttcaacatcctctaagtccaggatactatcattctttaagtctctcttcagttataacagacccttgacatttgaaatcaaccaataatttcctgagcactaatcactgtgtgtgaaacaccataatttttttttaaatctgtaagaatgaaaagacaaataagcacaaaccacctatagcctcttgattagtaatccaaacagccttctgtccgagcaattcagcatgtaatgtggcagtcactgacaatgcacaccacagaaatcagtaataccaactacctttacagtaatgtctcagctttttatatacttcactctacacacacacatcactgttccagatgtcatgagtacagttg

SEQ ID NO: 245966 - DNA, 417 bp, Homo sapiens
aatatactaaaaacactgaatttgacaatttaaaagggtgaatttcatggtgtgtgaattatatctaaatttaaaaatttgtatttctatacattggcagtgaacaatctgaaaatgaaaatttaaaaatcacaatagaataaaaaaagttcttagcaataaatttaacagaagcaacacaagacttgtacattggaaatttcaaaacattgctgagagaaattaaagaagatctaaataaatgaagaaaattccttgttcatgaattggaagacaaaatattaataatatggcatttctccccaaattaatctatatatcagtgcactctctatcaaaatcctaggagacatttttatagaaattgataagctcatcctaaaatgtatatgcaattgcaaaggatccagattagta

SEQ ID NO: 245967 - DNA, 354 bp, Homo sapiens
aaatctaataggactaataaattagttcagttaggtcacagtatacaagaacaatttacaaaaatatggttttcatacaatgcgattattattcagccataaaaatgaaagaagttccgatacatgttacaacttggatgaaccttcaaaacatgctaagtgaaagaaatctaaataaatgaagaaaattccttgttcatgaattggaagacaaaatattaataatatggcatttctccccaaattaatctatatatcagtgcactctctatcaaaatcctaggagacatttttatagaaattgataagctcatcctaaaatgtatatgcaattgcaaaggatccagattagta

SEQ ID NO: 245968 - DNA, 169 bp, Homo sapiens
attttatgtgaatatagtttccatttccctaggataaagacctagtagtgtgaaagttgggtcatgtgctgaactgttttccgaagtggctgttttagtttgcattcccactggcaatctgtcacgtttctgttgctctgtgtctttgttagcacttggtgttatcagt

SEQ ID NO: 245969 - DNA, 1011 bp, Homo sapiens
tattgcttacttggcagttaaactttattctgaatttcctttaatatattttattttttattttattttatttttatttttagcagtcttactctgtcacctaggctggagtgtagtggcacgatcttggctcactgcaacttccaccccaggttcaagtgactcttatacctcagtcttccaagtagctgggattacaggtgtgcaccaccacacccagctaattttttctatttttattagagacggggtttcaccatgttggccaggctggtcttgaactcctggcctcaagtaatccacccacctcgacctttcaaagtgccggaattataggcgtgagccaccgctctcgggtaatatattttgattctacatagatgctctgttgaagctgtttttggctcagtcctttgacatcatatcacttcattgtttaataaattattttgtaatctgtatgtttggacaaatgtaatgtcacattagcttaaaatatacacacctgtgtttgatgcttacttacagagaaggacttacgactcccacttgtcctgagttgtttaaaattaatgattaaatttatcatgcttatgtatgattgctacaacagctatgtattgcggaatagtaaaccttgaccagactaagttttcaccttgttttgatatataatcctgtgttcttttaaaaatatgtttaaaagcagcttttactcttattaaggcttctgaatcctgaaaacttggtttggtctgcatcagtctcgtaacaaattcgaatttatttgccgaatctttccgtatttcctttttcagccttagtgttgttttgttttgttttgttttgttttttttgagatggagttttgctcttgttgcactccagcctgtgtgatagagcgagacttcgtctcagaaaaaaatctaattttaaagtcttaagattttgccattcctcctactcccaaacaaatctttggggaaaaaaaaaaaaaaaactaccaactgt

SEQ ID NO: 245970 - DNA, 1501 bp, Homo sapiens
tattgcttacttggcagttaaactttattctgaatttcctttaatatattttattttttattttattttatttttatttttagcagtcttactctgtcacctaggctggagtgtagtggcacgatcttggctcactgcaacttccaccccaggttcaagtgactcttatacctcagtcttccaagtagctgggattacaggtgtgcaccaccacacccagctaattttttctatttttattagagacggggtttcaccatgttggccaggctggtcttgaactcctggcctcaagtaatccacccacctcgacctttcaaagtgccggaattataggcgtgagccaccgctctcgggtaatatattttgattctacatagatgctctgttgaagctgtttttggctcagtcctttgacatcatatcacttcattgtttaataaattattttgtaatctgtatgtttggacaaatgtaatgtcacattagcttaaaatatacacacctgtgtttgatgcttacttacagagaaggacttacgactcccacttgtcctgagttgtttaaaattaatgattaaatttatcatgcttatgtatgattgctacaacagctatgtattgcggaatagtaaaccttgaccagactaagttttcaccttgttttgatatataatcctgtgttcttttaaaaatatgtttaaaagcagcttttactcttattaaggcttctgaatcctgaaaacttggtttggtctgcatcagtctcgtaacaaattcgaatttatttgccgaatctttccgtatttcctttttcagccttagtgttgttttgttttgttttgttttgttttttttgagatggagttttgctcttgtcgacccagactggagtgcaatggagtgatctcagctcaccacaacctctgcctcccggcagcaattctcttgcctcagcctcccaagtggctgggatgacgggcgcgtgccatcatgcctggctaattttgtatttttaatggagaacagggtttctccatgttggtcaggctggtcttgaactcccgacctcaggtgatccgcctgccttggcctcccaaagtgctgggattacaggtgtgagccactgcgcccagcctagaaaataattttaataaaatctaattttaggccgggtgcagtggatcacttgaggtcaggagttagagaccagcctggccaaaatggtgaaaccccgtctctactaaatacaaaaacttagccaagcgtgggtggcgtgcgcctgttgtcctagctactggggaggctgaggtgggagaagcacttgaatccaggaggtagaggttgcagtgagctgagatcatgccattgcactccagcctgtgtgatagagcgagacttcgtctcagaaaaaaatctaattttaaagtcttaagattttgccattcctcctactcccaaacaaatctttggggaaaaaaaaaaaaaaaactaccaactgt

SEQ ID NO: 245971 - DNA, 547 bp, Homo sapiens
agacttcaaaaatatataagctgaatagaccgctagtaagtgaagagactaaagcagtaatcaaaatctacctgcaaagaaaagcctaggtccagatggcctctgggctgcattctacctatcactcaaagaagaattaataccaattttttacaaactcttccaaaaaatagaagagaagggaacagtttccctgttattctatgaggccagtattaccctgatgtcaaaaccaaagacatcacaagagaagaaaactatggaccaatatcgcttatgaatatggccacaaaaatccccaacaaaatactagcaaatgaatacagcaacatataaaatgaattatacatcttgaccaagtgtgatttatcccaagggtgtaaggttggtttaacatctgaaaatctattaatataatatatattataattacataatatataatagcatataatataatttcaatagaataaaaacaaaaattacatgattatcttaatagatgcagaagaagcattcaacaaaatccaaaaccctttcattatta

SEQ ID NO: 245972 - DNA, 461 bp, Homo sapiens
aaggatatttctgtctcattttaatatttcagataagaattggtcaaatttgtattcaccttataagtgaatataaataagaattgatcaactttatattcacctggtaagtttttgagaagcctttttgtcgcctttgtgaaccgtattgtttgtttgcttgtgttttgagacagggtctcagctgtgtcaggcaggctggagtgccatggcgccaccatgggtcactgtggtcttgactttccaggctcaagtgattcctcttccacgagtagctgggatcacaggcgtgcgccaccatgcctggctaattaaaaaaaattttttttttcaggagagacagggtctcactacattgcccaagctggttctttttctgtttttaagattgtactgatttccttttgttttcagcagttttattatgatggaaataaacattagttttctgtatgttaatc

SEQ ID NO: 245973 - DNA, 443 bp, Homo sapiens
cagtgacactataaagcaagcatacaaacaagtctgcataataactagctaacgacacaataacaagatcaaatctacacatatgaatagtaaccttgaatgtaaatgggctaaatgccccaattaaaaggcaaaatgacaagctggatagagaaacaaaaccaatcgtatgctgtcttcaagagacccatctcacatgcaatgacgcccacacattcaaagtaaagagatagagaaaaatctacaacacaaatggaaaacagaaaaaagtaaatctaggagcaataggccataccatatagcctaggtgtgtggtatattatgccatctaggtttgcgtaagtacacgctattatgttctcactataaaactgcctaacaacacattaagcaatgtatgactgtatatctttacttatatataaaatatattaacccttggc

SEQ ID NO: 245974 - DNA, 685 bp, Homo sapiens
ctcagcagggaaagtgcgcatgtgtgagctcttcctggtggcaatgacctgaaggggcggcccctggaatctgagggccagcatttgctgtcctttgaggtcaggcctcagggcgaccatccacacagaatcactctgctgggctgctgcaggtctggttctgccattcagcatgagccctgggctcgctgcaccaccatctcctcatccgtttatgggatgagaataggaagaccctgccttttatgatgttgccctcaggattcgacaagtccaacaacttagccaagcgttgatttagtacttcctggcacacaggtggtagtcaacgttagctctcagcatcccctgacccaactcctccagcggtctccagctggaagagtccaactgctcttcattcctttatgaaatggggtggtcactgtgtaaataaatcacctgaaggatgccaatcatcttggaggagaggctagttcagatctgcaacggactcatcaccagtatttgcacttaaataatgtaatgtaataatgtgttcttcgaagtcacccctgaattgatcccatgtgtaaggaaaattgttcattctaggactacttgtaatagcacgaggtaggaaacaacctgaatttccttcaaaaaggaactggttaaataaattagactactaagacacgtgtat

SEQ ID NO: 245975 - DNA, 699 bp, Homo sapiens
gcttgtaaatctgtggacacaagcaaaatccctagctaacagtccattgtcaccatttaattactctcaggccctcacagaaaaacaaaacttcaaccaggctctagtccttgaagtctggtttgtaattgtaaaggcagctcttgtttcaatgaagcttggctgaatgtgggacaaggtgaggaagaccccaaccctgctgctgaattcaatctgcaagacactgaaccccacaagatccttttctgcacttttgtcatttaagactcaagtctcacctgtaatcccagaaccctgggagaccaaggcctgcagatcgcttgagtccaggagttcaagaccagcctgggaaacatagcaagatcccatctctacagagaatacagaaattagctgggcgtggtggtgcacacctgtagtcccaactactctggagactgaggtaggagaatcacttgagcccgagaggttgaggctgtagtaagccaagatcgcaccactgcactccagcctgggtgacagagcaagacggtctccaaaaataagaaaaggatccaagtcttttggaggtggaagttcagtaacagattaatgatgaaactaagaggggtagtgttagtgagttcctggatggccagcacaaactgactctgttttggaaaaaaaaataaacgttggtttaccttcatcctgagaggc

SEQ ID NO: 245976 - DNA, 588 bp, Homo sapiens
caatgatccaagatcacaccactgtactccagcctaagcagcagagcaagactgtctcaaaaaaaaaaaaaaagttagttattacacttccaatgagacatgtatctgtgtgcctgccacgctctgcaggggttgacctaatccctgcccactagtctggtcgtttgtctgtggggcatggggcagagaacacaggcaggcttgcaggtcagcctgttgtagggagagcaggagaagttgggagagagcctgcgaaacaggaggacgtggcctgtggggcaggcggaggccgcttaggcaccaaagcagtgcttcctggctgagcacggtggctcatgcctctaatcccagcactttaggaggccgaggcgggtggatcacgagatcaggagatcgagaccatcctggctaacacggtgaaactctgtctctactaaaaatgcaaagaattagccgggagcggtggcgggcgcctttagtcccagctactcgggaggctgaggcaggagaatggcgtgaacccaggaggcggagcttgcagtgagccgagatcgcgccactgcactccagcctgggcgactctgtctc

SEQ ID NO: 245977 - DNA, 342 bp, Homo sapiens
actggtcctatcattccttagcatgaagcctaagaatatattcactttcttgctcctttggattttttctcttcatttgaatctttgagaaagatgccttacatgctgacctcctctttctctacattgcctcttgtttaaaaaattatttcttttttgatacatgatagacctgtatgttttcagggtacctgtgataatttgacatattcgtataacataaaggtaaaatcagggtaattgggatattcattaccatatttatctattctttatgctaagcacattcaaattattctcttctagcaactttgagaggtacaatagatttttaactatagt

SEQ ID NO: 245978 - DNA, 508 bp, Homo sapiens
tacaatcaattttgaaaatattctatattaatttgaaaaacatgtatattctctatttgttaggggcagttatctatccattcactggcttattttgttgtttaaatctgctaattgcttattcaattttgtgtgatttttatgtttttgctaaaaatgtgttgagatccctcacttaagattatgaattcgtctcctttttccttataattctattttgctttatatatttcagatctatagcatgaaggtcatacaaattcatgattgctacatctttttggtgaattattccatcagttgttaatgactatgcctctgtatcttggcgcattttgccttcagttgtttttctgtccgacggtaatgttgctgcaccatgttttctttctctagtgcagtattagtgagttatgctttataacattcctttagttttgcactttctgtgtggcagttttgttttaggtgtgtcttctgtaggttaaatatagctgaatttttcaaa

SEQ ID NO: 245979 - DNA, 404 bp, Homo sapiens
catagtaagctttgttttcttctacaagcttctgccatctccaaaacaaacaaacaaacaaaatgctgttttgttgctgttgttgttttacaccaaagcttgggattcatttattcaaagcttccatattttttcacagaaattctaattccttatgatattccattacccagattcagccccagtatatacttttattctactcaacatacctctcctctaccaaaaacaaaacgaacaaatccaaacagagccatccacaattccaagaagtcttaatgtctttatctatgctttcccattacatgataatcttttccttagacattagctcatattagtgtgatttttttattcaagaccaattaaatgttaaaatattcctcgatctctgtagttaaaaa

SEQ ID NO: 245980 - DNA, 323 bp, Homo sapiens
gctcagaggggaatctgggcaaaatatataaaggaccctctgtggtattttgcaacatctcatgaatatgtaaatattttaaatataaattttttaaaaagcttaaagacagacccacgtatttaaggtgagttgatgtattataaaagtgatacaaaaaataaattgacaaaaagactgcttagttgattttgtggggaatattgatcactaattggcaaacaataaaaatgatttctgatttaaaagaagatgtaattacagatgccaaataaacaaaagagaaaaatataaaagacaatgctattttgcatcaatattca

SEQ ID NO: 245981 - DNA, 709 bp, Homo sapiens
tttccaaatttcctcttaatttaaacaggttataaatttttttcttctaaatgtgactgtttaaaacagtcaaactgtggtgctgcagaaatacctttatgggtacgaggcttaaaatctaagataaaaagacaaaaaaactctagcatccatagagaaaattagcaggatgtagaaaaagtatattataaattaaatgcaaaagaaatttttcgttgattcatgaatccatgtttattgtttggtttttcaaaaatctgtttctctgttttctcggcaatcttagtaaggcctttatatgtttacatggttaagaatctgtattgtagatcggtacttaaggtttgaagtcaatgtatgattatgtgtatgctaattctaaatgcatatttgatgctcctaaagataaacattaaaaattgttcctgagtacacctaagactttagtgataatgtttaagtagaaatgtaactcccaaaaagtttatatcaagtaatgtggatgaaagaaaggaacatgagaaaagaatcaaattttacgtgaaacagaagtggtactgtatacacaacctaacagcttctacagtttctttttttaactatcatcttagcttcaagggtacatgtgcaggtttgttatatggctaaagtgcatgtcacaagggtttggtgtaccgattatttcctcacccaggtaatgagcatagtg

SEQ ID NO: 245982 - DNA, 430 bp, Homo sapiens
tttccaaatttcctcttaatttaaacaggttataaatttttttcttctaaatgtgactgtttaaaacagtcaaactgtggtgctgcagaaatacctttatgggtacgaggcttaaaatctaagataaaaagacaaaaaaactctagcatccatagagaaaattagcaggatgtagaaaaagtatattataaattaaatgcaaaagaaatttttcgttgattcatgaatccatgtttattgtttggtttttcaaaaatctgtttctctgttttctcggcaatcttagtaaggcctttatatgtttacatggttaagaatctgtattgtagatcggtacttaaggtttgaagtcaatgtatgattatgtgaacccacctatcaaaaacattctcacgcttccccaggtaaacaataaaaaaagataaaaaat

SEQ ID NO: 245983 - DNA, 1262 bp, Homo sapiens
gcgggtcgctctcacttgtccctggaccgcagccgccgcataagtggtggccaacgctgggcctgggtgtggccggaagcagaggccgctctgactacacacccaccccccaaaggcttctgggagtcgcgcaggcgcagcggcagaccgggtgaggcggggcttgcggcgaggggtgggaccgcagggccggagtaaaagggtgcttggctgtgacaggtgctaagggcctgggcgtcagctccttgcgggagcgtcactgccgaccgggaagggaaaggcaatcttgggggcctccggagtccggaggatcactctgatgggtgatgtctcctggcctcagtgatggaattaagatgacttctatctctgaatccaagggtgactgaaagccgcaagctgcagaaaggacaagaggcatcacctatgtggataaagacagcatcctgagttgatggagaaatggcatagaaggaaccaggtcctttgatgacatcatggagcaaagctgtcttcttgccttgacctgctacctacctacatgggaagctgttacttgagaaggcaataaaatctatcttctttattgaaaaaaaaaaaaaaaaaaaaaaaaaaaaaaaaagcccgagggcctcatatgttgccggggggcggggaaaaaccagaaggggtcacgagcaaaggggccgggaggtggctcaaggtggcgtccccgcggacccgcaccttcgtgtgatcacgaagggggcacaacatggcggggcccccccaatgagaggagggatgcgcctggttaacggctgcgcaaaaagaccggggtaaacccggatttaaaataaacggggaggaaaaaggctggcacggtgaacaggcacgctgcgctactgttgctggtaacgccctcattcccttgaaacccaaggaggacaactggcacataggacctccgcacctgtgcctgacaaaagctgctccatgaatgcgccaggtaatcgaatgaatgatggcgatcgtcaagccggcggttgcacgtgccaaccgtggggccaagttcgcccaagggccaccttgatgccatttctaaagaactacagttggctgaaccccgacctctggctaggaacaatgtcatccccaagtctccctaatcaggagtacatgacacatcttagaccaaccaagctccgtggcgtgattcagccactgaggccaaccacggctttcacagcaatcgtgcatagcgcgaaacgacacgcgaagcg

SEQ ID NO: 245984 - DNA, 1772 bp, Homo sapiens
gcgggtcgctctcacttgtccctggaccgcagccgccgcataagtggtggccaacgctgggcctgggtgtggccggaagcagaggccgctctgactacacacccaccccccaaaggcttctgggagtcgcgcaggcgcagcggcagaccgggtgaggcggggcttgcggcgaggggtgggaccgcagggccggagtaaaagggtgcttggctgtgacaggtgctaagggcctgggcgtcagctccttgcgggagcgtcactgccgaccgggaagggaaaggcaatcttgggggcctccggagtccggaggatcactctgatgggtgatgtgtgtgggctaggaagggggatgtagagagcttgtgggattgttttgggtgccccctcaccttctcccattatctctggctacacgggcctcccatcctccaaaataccattttccattttgtaacctatgtatttgcacgtcctgggtcgaaatagtctaaccccaaattttcgtctgggctggctcctttatgccattcacttgtcatcgcctcagagagggctgcctaacgtctcaaaaataccagccctggcgacctcttaaagttcccttcctgtgtgaatcacggtctgaagttagctgatggatttattcttgaacatgtttaggaccggtctctcccccaggggccttatcagaactggagagcttcatcctgggagccaagggccttgctggctcacaggcagtgatgctgttacaccagtcatcacagatgcactgacctctgcacgcccagtcacactgcacgcctggtctccttactcttgaattgatttctttcaggtctcctggcctcagtgatggaattaagatgacttctatctctgaatccaagggtgactgaaagccgcaagctgcagaaaggacaagaggcatcacctatgtggataaagacagcatcctgagttgatggagaaatggcatagaaggaaccaggtcctttgatgacatcatggagcaaagctgtcttcttgccttgacctgctacctacctacatgggaagctgttacttgagaaggcaataaaatctatcttctttattgaaaaaaaaaaaaaaaaaaaaaaaaaaaaaaaaagcccgagggcctcatatgttgccggggggcggggaaaaaccagaaggggtcacgagcaaaggggccgggaggtggctcaaggtggcgtccccgcggacccgcaccttcgtgtgatcacgaagggggcacaacatggcggggcccccccaatgagaggagggatgcgcctggttaacggctgcgcaaaaagaccggggtaaacccggatttaaaataaacggggaggaaaaaggctggcacggtgaacaggcacgctgcgctactgttgctggtaacgccctcattcccttgaaacccaaggaggacaactggcacataggacctccgcacctgtgcctgacaaaagctgctccatgaatgcgccaggtaatcgaatgaatgatggcgatcgtcaagccggcggttgcacgtgccaaccgtggggccaagttcgcccaagggccaccttgatgccatttctaaagaactacagttggctgaaccccgacctctggctaggaacaatgtcatccccaagtctccctaatcaggagtacatgacacatcttagaccaaccaagctccgtggcgtgattcagccactgaggccaaccacggctttcacagcaatcgtgcatagcgcgaaacgacacgcgaagcg

SEQ ID NO: 245985 - DNA, 1085 bp, Homo sapiens
gcgggtcgctctcacttgtccctggaccgcagccgccgcataagtggtggccaacgctgggcctgggtgtggccggaagcagaggccgctctgactacacacccaccccccaaaggcttctgggagtcgcgcaggcgcagcggcagaccgggtctcctggcctcagtgatggaattaagatgacttctatctctgaatccaagggtgactgaaagccgcaagctgcagaaaggacaagaggcatcacctatgtggataaagacagcatcctgagttgatggagaaatggcatagaaggaaccaggtcctttgatgacatcatggagcaaagctgtcttcttgccttgacctgctacctacctacatgggaagctgttacttgagaaggcaataaaatctatcttctttattgaaaaaaaaaaaaaaaaaaaaaaaaaaaaaaaaagcccgagggcctcatatgttgccggggggcggggaaaaaccagaaggggtcacgagcaaaggggccgggaggtggctcaaggtggcgtccccgcggacccgcaccttcgtgtgatcacgaagggggcacaacatggcggggcccccccaatgagaggagggatgcgcctggttaacggctgcgcaaaaagaccggggtaaacccggatttaaaataaacggggaggaaaaaggctggcacggtgaacaggcacgctgcgctactgttgctggtaacgccctcattcccttgaaacccaaggaggacaactggcacataggacctccgcacctgtgcctgacaaaagctgctccatgaatgcgccaggtaatcgaatgaatgatggcgatcgtcaagccggcggttgcacgtgccaaccgtggggccaagttcgcccaagggccaccttgatgccatttctaaagaactacagttggctgaaccccgacctctggctaggaacaatgtcatccccaagtctccctaatcaggagtacatgacacatcttagaccaaccaagctccgtggcgtgattcagccactgaggccaaccacggctttcacagcaatcgtgcatagcgcgaaacgacacgcgaagcg

SEQ ID NO: 245986 - DNA, 1153 bp, Homo sapiens
gcgggtcgctctcacttgtccctggaccgcagccgccgcataagtggtggccaacgctgggcctgggtgtggccggaagcagaggccgctctgactacacacccaccccccaaaggcttctgggagtcgcgcaggcgcagcggcagaccgggtgaggcggggcttgcggcgaggggtgggaccgcagggccggagtaaaagggtgcttggctgtgacaggtctcctggcctcagtgatggaattaagatgacttctatctctgaatccaagggtgactgaaagccgcaagctgcagaaaggacaagaggcatcacctatgtggataaagacagcatcctgagttgatggagaaatggcatagaaggaaccaggtcctttgatgacatcatggagcaaagctgtcttcttgccttgacctgctacctacctacatgggaagctgttacttgagaaggcaataaaatctatcttctttattgaaaaaaaaaaaaaaaaaaaaaaaaaaaaaaaaagcccgagggcctcatatgttgccggggggcggggaaaaaccagaaggggtcacgagcaaaggggccgggaggtggctcaaggtggcgtccccgcggacccgcaccttcgtgtgatcacgaagggggcacaacatggcggggcccccccaatgagaggagggatgcgcctggttaacggctgcgcaaaaagaccggggtaaacccggatttaaaataaacggggaggaaaaaggctggcacggtgaacaggcacgctgcgctactgttgctggtaacgccctcattcccttgaaacccaaggaggacaactggcacataggacctccgcacctgtgcctgacaaaagctgctccatgaatgcgccaggtaatcgaatgaatgatggcgatcgtcaagccggcggttgcacgtgccaaccgtggggccaagttcgcccaagggccaccttgatgccatttctaaagaactacagttggctgaaccccgacctctggctaggaacaatgtcatccccaagtctccctaatcaggagtacatgacacatcttagaccaaccaagctccgtggcgtgattcagccactgaggccaaccacggctttcacagcaatcgtgcatagcgcgaaacgacacgcgaagcg

SEQ ID NO: 245987 - DNA, 357 bp, Homo sapiens
tctacacacctagctctcaacattcctctctaaaatatatgactctgtttactagtgtaaggatcaaaaggatcacatgtggcttccatgaaaagaaaggtatcttaaaattgttgtgcataaaatatacaattcaaaggaattacatagagttataaataatagagaaaataaaaagatcaatggtccataaggcgatgcaatgataaaccaccaaaaagtcctgagattctttctatgctagccacgtatgaagaactccaagccaaacgctattccttcggttgtatttttccttgaatctaaagaacaaaaatagggcctcacagtttgagagaatcattcactttgtctagc

SEQ ID NO: 245988 - DNA, 725 bp, Homo sapiens
ttattttcaaattgattaaaccaataaactaaaaactagtgttgataccatcatcatatatgctttgaaagtgttttccttttttgatagtagcagctcattcaaccaatatctcttgagcctctaccacttgtctatcacatagcaacattgtttcagtaacattacggtggatagaaagggcacaccactagtatgctttataacatgtattttcattattgtttacttcaaatgaggagaatatagtcttttttgataatgagcttgtgatagtttaattttcaaaagtataattatctaaagtgtcctaatgtcttctgaactgtagctaagtgatgaagctttatcaatactcaaagccaaaatgagattttgtagtaaggccaccctagttgtctaggttcagcatccttctgattggtcagtacctactcctgctgtgtggcagccccacaggacgagtgggttaattattttgagtcatctctcctacttatatccggaatatactgtgttccactgtaatgaaagcaatgacatttcaaacaggagacgatttatactaataatacaaagttttacttgtgtagagttagaacatatatgagagaagatattttaccaaagcacatatttccaagtaaacacctaaatcctgttactgaagagaaaaaaagtcctcaatgtttctatatgataataggtgatatattttaatttca

SEQ ID NO: 245989 - DNA, 583 bp, Homo sapiens
cattatgttgcccaaatttgtcttgaacacctggcatcaagctgtcctcttgcctaagcctcccaaagtgtttgaattacaggtgagagccaccatatccagcctatttaattttcctgtggagtcttttcccattcagcaatggcagttgcaaaaggggacctgaggatcaggtagttgtttgtttcaacaaagtgatctgcaaaattatttagttagttagttagagacagggtctccctctgtcacccaggctggagtgctgtggcatgatcatggctcactgctgccttgacttcccgggctccagcgatcctcccacttcagcctctcaagtagctggggccacaggcgtgtgctaccatgcccagctattttttgtatttttggtggagaaggggtttcaccatgttgcccaggctgatctctaactcctgagctcaagcaatccactcacgttggcctcccaaagtgctgggggattacaagggcggtggaagccaaccaatggccctgggcctaaccaaaaaatttaaactttttaaaaaaaaggcccgcctaatattgggggtgggtaactaac

SEQ ID NO: 245990 - DNA, 347 bp, Homo sapiens
ccataatgcgcaaatgactactgttaggatgttacagaatcatgcatggataaaagatctattcaggccaggcgcagtggctcacgcctgtaatcccagcactttgggaggccaaggcaggcggatcacgaggtcaggagatcgagaccgtcctggctaacacagtgaaacccagtctctactaaaaatacaaaaaaattagccgggcatggtggtgggcgcctgtagtcccagctactcgggaggctggggcaggagaatagcgtgaacccaggaggcggagcttgcagtgagccaagatggcaccactgcactccagcctgggcaacagagcgacactctgtctc

SEQ ID NO: 245991 - DNA, 553 bp, Homo sapiens
ttttttgggtgaagccttggagactggccaggacagtggcgggccgggtggattggatggaaacccgggccctgccgcaagactggggcgataatgggaaagtaaacaacgccgtggctttgttcctttcattcaggctttcttcaggtgggtggtgaatgtacaaggtacttctgaatttgttatggggaagtttccattctgcgcttgcaggcaggcacttctgccaaggtgagaagctggcgtcttgcgccccccagcggcttcctggcagaggagagctgcaaaagcccggcccttcctggattctaagaatgaagagcttgctctcctagcatttctgaactccagaggtgtctcctaaggacggggggagaggggagggggaagcggagccaggcggcattatgccccgtttgttcgctagtttcttttctttcttgatgtataaaatgatgatatgccttgattggataaaatatgttaattttaagtgattggaatataggtattactcttttaaaactattaaacttttcttttcttttctttt

SEQ ID NO: 245992 - DNA, 349 bp, Homo sapiens
agaattaaagaattttctatcaggggagcagggaagacactactgccggatgttttctcttgactttgactttgcttccaagaacatacttttttttccaaagctaaaaaaaggagaggagacagttctctgaagggaaacaccactccacgcatgggaggaaatcatttgcttcaatcttacactacttgagagcccatttgctccaattttaaaactcatttgttctgatatagctcttcatcccttcccaaatcccaaagcagtcttctgaaactaccctccttccatgaagcctggacccaacccctacatcatcacatgggcagggcctcccataagctccaag

SEQ ID NO: 245993 - DNA, 495 bp, Homo sapiens
tatacatctctggaatgcacacatgtcgaaactcgttgtgcaacccttgctgacatcaaggcaccaaaatgtctacaaatgtaattatttattatggcctaggtgggtaatatggcccaaattacccttaagctccctcttcaaggtccataaatgcccctaaggaaaaatacatcgtggtgtgctcagtcctctcttgctgaagtgccccactgcactctgctgcagtgttctttctatctaataaaactttccctttcaaacctatactgctgtgggtaaattcttctttctacctccgagcctaccaccttccattgccggggctctgacaccttgcgaaacaaatataaagaagcttttatcaaaaaaagcttgggaatcaatcacagcattatgcaaattggccataaaagctgcaagaaaaatttgaagaatcctgttttgatattggtaaatttcgagttgattttcaatttatgcaatacttctttg

SEQ ID NO: 245994 - DNA, 201 bp, Homo sapiens
ttcaattttgaaaacattatacacacacacgtgcacgcgcgcgcacacacactcgataaaagaataggtctaacattgactataaaactaaccaggaaatacaaagcctagcattggaaaataacagaatattgattgaaaatattatccttacagtagaaactcctataaaacagtaagacttcactaaacgaaactata

SEQ ID NO: 245995 - DNA, 415 bp, Homo sapiens
caaacactattatatcttataacttactgatttttttgaatatccaaaaaattcaagtaagacagcttttcctactatttggagttcatcagatcatccaagaggttaatttttggaccagcagcatcagcatcacttgggaacttctaggaaatgcaaatatttgggcaccaccctaggtttactgaattagaacctataagagtgaggctaagtaatccatattttaacaagccctccagggtattattattcactagtttgggctgaagtaagaaaaggcccaaattccattttctaagatagctacttttcattgcagttggaataaaaagtcacctgcagggccttccataatagctactccattattaatgtatttaacagaatattaagcacctattcccccaaccaa

SEQ ID NO: 245996 - DNA, 564 bp, Homo sapiens
gctgtcgagggattaatgctaggattacaggtggaccaccatgcccagctaattaaaaacaattttcttgtaaagatggggtctcgccatgtggcccaggctggtcttgaactcctaggcttaagctttcctccggcctcggtcttccaaggggttgggattacaggtatgagtcacctcaccttgcagaaagctgtgtgggtggaacgtgcctctgctgcccacccaggggccctgatgtgggaacctcacccatgggtaaggcagcggggacccaggtgtgcacccacaggctggccctgccgccccgatggaactgctgcttgtgccccccgcccacccagggaaaacagtgagaatccacagatgagcctgcatctcctccagcgtcagggtttgaggacttatccgttactgtccacgtgtagtggtgtgatctcagctcactgcagtctccgcctccaagttcaggagaattgcctaaacctgggaggcagaggttgcagtgagccgagattgcaccactccactccagcctgggctacagagcgagactccatctca

SEQ ID NO: 245997 - DNA, 411 bp, Homo sapiens
tacatctctctatttactcatgtcttctttgatttctttcatgggattgaaatgaactgtgcttttttttggactatttgcaagagggtcctacattgggggatgggccagagagtatcctaagctagctggttttcacaacataaaagctctcttcagctactacaggacatattagttcctacaaacatgatttgcctgtgtgattctttgcgtgccttctctcctaactgaaccttgctgcgttcaggtgggccttctacagccacaaaacgcaactgtgtttccataccctctttgcaggcaagagctgtaagtcccaccccactccctcatgtatttttgttggtgctctatgaaatttgctactcggcctctctcctctacttatttccatgtggctcctacaga

SEQ ID NO: 245998 - DNA, 429 bp, Homo sapiens
catcaccaccactaccatcatcaccatcatcaccatatcattattattatcatcaccaccatcctcaccatcaccatcaccattaatacaccatcatcaccatcatcacctagtagcttcagtcttagagtaagcttgtgctttcttctagctgttggtgttgtccaatatagtaaatcattattctttatttaaggcatttcctgagagatatttaaaacattgtcatctcaaaccatctatcttctctgttctttgagaattttgcagtgcggtcctccagctctccagagaacgttaggatatatttgaggggaggagggggagaagttgatgtcatgtcctctgtctgcagcttctaggagaggactgaccagcaacagtgtagtgactggtcaatcctgtagtctggagtttcatggctgaagt

SEQ ID NO: 245999 - DNA, 726 bp, Homo sapiens
acttgcacacgaacatgcaggaagttgcaagtttgttactcagacaagaaaaactggatggagcagccgctgaatcatgtaaatcaggttgaacttgactctggaaaccaggatttgtcctgaagattttcttcacagcctggactctccgccgagatattttcctctgacatgcacaaaccaggggttataaatttgtgcagagccagtgtggtgatgctgatacaggtggccctttccaaagtaaagaaatgttgccccagttcaactgcaatgcctacccaccactggcttttagaaggcacagcaagcttccagaaagcatcagcaggttcacagacttgttgaggagcattaagacacaccataatagttttaactctgactccaaaggagcacccatgatttaaaataaaaaaaaaagacaaaaaaaaaaaaaaaaaaaaaacttaggttatccccatttacccaccccacgtgtataggaatcttaaccctaagtaacacttacccatagctgcctgaagctagggtaggctcacagttctggagtacacaatgccatcatatataataaaaccaattgcccatacaagtgtgtggaaatgctcttgcttctgataacacctttacaaccaaaagttggctaagggaagctttgaataactttgtatgaaaaatttcttttaaggtactgtctaataaaagggttcacccactgcatgt

SEQ ID NO: 246000 - DNA, 1000 bp, Homo sapiens
ttcagtaagtacactaaattttaattactaattattatatagtttagaaatgcccaaatgcaaattaagtatcttcctgactaaactaacttcctatattttttcccctatgctaatggaaggagaaactctcacttatattttgggcatagaaaagcttgtacatcatcccttacacaccagggacctctgaggcatcagagcggctggaggtgggggtagggaaccactaggagctttaaccttcagcagaaggcaacttgtgtatcttaatctctgaaaaattgaatgcaatttaatattacaggactaggcctttggagttcaggacaaggaagtgaatggtcccaatacactctgcacatgtttaggcttcatttagactgttacattcagttgtgaacaccacgttttaaaaggacatcgacatacaaaaacacatgtagagcaagactgacacgttgctgggggatcaaaaaaggtgttataggatgatgaaaggaactgaagaagtttgctttggaaaggaaggcttagagagggtctgagcactgttttcaaatatttgaagggctgtcatgttgtaagatgaattagatttacttggtgcagctccaaagacctgactcatcaccatggtggttagaagttagttcaagacagatttgaggctcaagagcaagaactttccaaaaagtagagaggattacaaattgaccggaaggcagtgaactccctgttattgcaagaattctgacttcacagccaaagggaggtcttaccagggtgacccctggctctcaaagcatatcttctgcctgactgtactgcctgcaaagtgcactgatgcttcttttcctaaggggcaactcacttacgtccccttgtgactttctttacttcgattctgaagctgatgagagaactcaagaagcagaaatgcagggcaggccttcctttgaatggcctttttccaattagtaaaatgtttccctggtga

SEQ ID NO: 246001 - DNA, 799 bp, Homo sapiens
aggctcttctagccttcctgtctcatctaagagagaaaaaaagctgtgaagtgcttgtgaaggttacaggctggagacacaggcacactaaaagattgagacttcatcataggattagagaatgcctccccttccacaccttgctactacatcaacagagcttcagtataataatcgtggattatagctgaaagacctgcaaggatcagactctatttaaggaggtttttttgttgctgttttgttttgatttgttttttttttttttttgtaaatccaaaggaaacaagggagacaaaaagacagtagaagaaacagaaacttctgacacctacagctacatcaaacattaagcacagcccaactcctggccagattaacataaaacctcatactaatggtctctttggattagttcctattacttgatagatcatgtccagttttcaacaaaagaaattataacgtatgctaaaaaaaaaaaaaacacacattctgaagaggcaaaacaagcgtgagaaccaaattcaggttttggaattatcagatatggaatttaaaataaccacgattaatatactaagtaggctatgaataaaagtagataacatgcaagaccagatggctaatctaaacagagagaaactctaagaaagaatcaaaaggagttgctagaaatcaaaaacactgtaacaaatgaagaatgcctttgataggctcatcagtaagttggaaacagccaaggaaggaatcagtaaggttgaagacatggcaataaaaacttcccatgctgaaatac

SEQ ID NO: 246002 - DNA, 498 bp, Homo sapiens
tacattcacttggaaatcaatgggataaaagaaagtctacatttacatgaaaataaaaagatttgctttaataaaagaaaattaactttttaaaatccaagaataaaatagcgactgcatagagaatgggtttcatagtagatgtgtgcaaaagattggattggtgagcaacatttaaaagagccaactaatttgaaattctaacgagagggcaggtgcccaaagcgagaagcacattaacctttgctttggtaggctctagtagattacggtgttcagtttttccatgtcagagtgtcagagaccatggcccatgactatttgctgaaggagctgggaatggatgcttagaaaatattttttgaaaggtattcatttactcattcaaccagtatatactgaatgtctactatatgacaggactgttctaggcactagggatatggcaatgaacaaaacatcaaaatccttataagaatggaacttacatttagggga

SEQ ID NO: 246003 - DNA, 661 bp, Homo sapiens
tgaaacggggtttcattcttgttgcccaggctggagtgcaatggcatgatcttggcgtcggcttactgcaacctccacctcccgggttcaagcgattatcctgcctcagtctcctgagtagctgggattacaggcacacaccaccatgcctgactaatttttgtatttttagtagagacgagatttcatcatgttggccaggctggtcttgaactcctgacctcaggtgatccacctgcctcggcctcccgaagtgctgggattacaggcatgagccaccatgcctgaccttacaattcttaaaagagtagtgtacacatactacaaccacttcacctctccttcacaactcaactctctgcaatctggattcaatcctgacatttctcatgtcttatgggcacgaatttcacctctatgcagcatttagcaataagtaacaacagctggtaattattgagtgtgcacattctgccagtcactgtgttaagcacgtcacgtgcattttggttgatgcttcccaagctacaaatcaaacccaatcttttttccaagctctagactagtatagtgacaggcaccacaaatccatacagatgaaaacagagctcattagcaaaatcccactgctggatgtctcctgcttgcccttctagttcca

SEQ ID NO: 246004 - DNA, 741 bp, Homo sapiens
taaatcatgtgctcctagggacaaaggtggttggtggatcccagtggctaccacaaaatctggagtgattagatgccaaatatgattatgttgtattttaacaaatgcagaaagtataatacaatcatcattggcctttatgactaaagtatttataagactttaattcactttctcaaaatttcttgatgcctgcccgccacctctgataagcataaatatctctgccactcagtccctgtggcagactttagttttttccccagccctctatcagtgactgacacacatataacactgaacatttgtacatcccacagccaggatgattttgtttattttctttagtttatagtacaagacaatagatttttcttccatgtgcttgccttccacagataaaatattacttttgcaaattacaaatgttctcaccccaagattctggaacaacctacaaggtaggaatgccttgatctaattaaaacatttgctaactgctgattttaggggaaaactgtctttagcagcatctgtatgtgtaaaacatgtaggtccatcaataattcactgctgtctctacatttggtcactgactctcttctcacagggaaagaggtttcaaaccagatcctcttaggtctctgcactcagacccagccaaagctgggttccatagccttcagcaaaggcttgaggatgaaaagtaatggttgatgtggaataaaacatttgacatgc

SEQ ID NO: 246005 - DNA, 477 bp, Homo sapiens
gagagaagaggaactagagaatcctagtaagaaaggatcgaacaatagggaatcatgccacattctcccagaccttcactccctctctgaatcaagccgcctagactttattctgttgacaaagaagagccattggcaggtattaagtgtttcaaatctgctctgtctaaagggacgttccactctgtgagttgaatcatatacagatacttgcatgcatttaataaactatccaataagtggtgcttttaataaattctgaatacaatcaattaaaagatttgtgcacattattatttaggtatggtaccaagtaaatcagaaacaaatgcaagagcacgaatggtttatttagctacctttccatattgggtcttgatgacattagatactctgctgtattttattttttaaagtaaacatattaaaactagccaaataacctatattttcttttattacattatgatgcctaaa

SEQ ID NO: 246006 - DNA, 396 bp, Homo sapiens
aacagaacgtttttctttctcatctttgcctacaaattctactatatctcctttttgcttctctctctaatgctgtgggattttttttttctacttttcaaagaaagaaacctgagcaggtgtggaggcttatgcctataatcccaggactttggggggccaaggcaagaggatcacttgaggccaagagtttgagaccagcctgggcaaaactgggtgaccccatctctacaaaaaataaaaatatttgccgggcatggtggtatgcatcttgaagtcccagctaatttggaggttgaggtgggaatatcatttgagcccaggagttcaaggctgcggtgagctatgatcacaccactgcactccagcctcggtgatagagcaagaccttgtatc

SEQ ID NO: 246007 - DNA, 243 bp, Homo sapiens
agacactccccagactcaagctgagagacggcacccacacccactcgccaacaaggcacctgccccacgcctgccccaaggccccagaactgatcagaaaagggcctggttcctggggcggggggagcagccaggtttgtgcctggcctcaggagagcaaggcagatgcagccgggtggctggagggagggggtgaggccaggccagagcctgggcagccaggcagcctggggaccctgggga

SEQ ID NO: 246008 - DNA, 661 bp, Homo sapiens
tgagatggagcttgctctgtcacccaggctggagtgcagtggcacgatcacagctcactgcaacttccgccacctgggttcaagcaattttcctgcctcaacctcccgagtagttgagattacaggcacgtgccaccacacctgactgatttttgtatttttagtagagacagggtttcaccatgttggccaggctggtcttgaactcctgacctcaagtgatccacccacctcagtctaccaaagtgctgggattacaggttgtgagccactgcacccggcctctgtctgacttttaaatgatggagtatcccagaggtcaggctttagagctcttctttcttccatctacagagtgctcatttctttggtgatctcattcagtctcacggctttgaatgttatatgctgataagtcccaactttctctgtctcgcctaaacttcccctaatagcagaacctgatatcaaagtgcctatttgacatctccacttagatatctaataagcatctttaatgtaaaatttccaaaactgagctcctacaattccctcccacacttgttcagttttccccatctaagctaatggcaactccatccctccagttgctttggccaaaacttttgagttgcctttgactgctttttttctcccttct

SEQ ID NO: 246009 - DNA, 298 bp, Homo sapiens
attcattcagcacacattcctggaacatctctgtgcaggcacaaatgatacaggggagaattagatgagttctgtcctctccagaaatgctccatgaggttgagaggcagatagaaaaccccaatcccataccatcgttggtgccaagatgaaaggattggcagggcactggtggggctggaggcgaggccttcttgaggaagtgacctgcctctctttccctccctgcaggcccggttaccagcttgtaccgagtcaccctcagagctacagaacttctggcaattggcctttttta

SEQ ID NO: 246010 - DNA, 650 bp, Homo sapiens
cctctttctgctgacatccccatcacaacattcctcagaaaagcctacaaagatctgttaccattctgatgacacagaggatcttcattttatttctttaaatacctaattttacatctttatacttctttggacatggaaaggtttccttttccttttttgtttttggtaattttattgcgttgtattcagtgtacatgaattttttttcctcttctgttcttttttcttttttattgttatttttttatttatttattttattatactttaagttttagggtacatgtgcacaacatgcaggtttgttacatatgtatacatgtgccatgttggtgtgctgcacccattaactcgtcatttaacattaggtagatctcctaatgctatccctcccccctccccccaccccacaactggccccagtgtgtgatgttccccttcctgtgtccatgtgttctcattgttcaattcccacctatgcgagagaacatgcggtgtttggttttttgtccttgcgatagaggcattcagttagtaaagaggttggagcaacaactctttttttttttttttttcacaattgtaatcgaacaggtaatgaagccatttgttaaaatatttgcctttttaagtaaaaaagatttcag

SEQ ID NO: 246011 - DNA, 465 bp, Homo sapiens
agacacagcataccagagtctccaaagggctaagctcagcaatctgttctcaagctcccaacaggagtcttatatagtcaggcaggcaatgatcatatatggggaccattagaaataatctaatgcataccctctgaacttcaaatttttagtattctcattttctgctcaagctcaatttcaacacagttcacagtttctcatatccaccatggcattctgccaaggaactacaactcgtgttctctaaacccatctgttctaagaatgctgggctggttatcaatttctaatgtacctgcttaaactttcctctctcaatatgtccctgactgaactgcagaagacagaacaactgtactagccatctctttctgcatatcccatgtccccacagaggccactgtgtcttcataaagctaactgccacgattttcacaagtgatatttttccttcatgatttt

SEQ ID NO: 246012 - DNA, 491 bp, Homo sapiens
agttaacagagacttgaaaagcacttgtgccttaggattgcctatttttttttgctctttggaatgctgagaacactcggtgaagaaggccaagctagcctgttgaatggtgagagacgtgtgcagcagagataatttataccagattcaccagcctgccaatggccagtcactcagatggagactgtcctagaccatccagccctggctgagcctccccaggctatgagagccaccctgctgacccagagagtcatgagaaataataaatccttgcgggtttaagctagtgaacccagtgtggtttgttacacaacaaaagctgactgatataggaccttggttatttattctgtgaaatgaccatggtgaggtagaatgagagttgcagaaagcctctcactctattcagctctgacttcctcggaatggaatcctaaagagacacttgttctggagaaattatttcacactaacttcaaaaaaaaaaa

SEQ ID NO: 246013 - DNA, 479 bp, Homo sapiens
aatgattgatccacacggaacacagtaaggatgctgcaaagactgatgctacaacccaccagaaggctagtagatgcctcctgccacagaagcagccccacccctcgtggtgctttcttggctttaaagcaatacttgatgtccactttctagaggacatcataggaatatcctgcttggagttagtggaaggattccagggagagatctgccattccttcttccatagatcaagctgctttggccagccctctgcctttggctcagtcagaagtattttccctaacttagctgtaggagggagaggaacttgtggcagtctgagtaccaggctcctttattatctgccttccactgttaacggagaagggactgtgtaccgtttgagagagattttgatattgtttaaataagcttctcttgtaaaagtggtttttttttccaacttcctccagtgcttattagctaaatatatattt

SEQ ID NO: 246014 - DNA, 835 bp, Homo sapiens
tcccatggtttcctttgctcccagcggttgcgcgggctgggtttttggagcaaaggcaacggatactgctgaggctcctgagaatgtcccgttttcgaggctgcagtagctccggtgtccggttctgcagtgccgagagggaggcctcgggctccgggcgggggaatgtgttgcagtttgtccaagagccccaagcccagcaaagccgcccgttccccgctggggcgcaactctcactggaactcttgttctctgactggggaatggaatgggctcagccaaggctcccgaaaccagccctgccgctcccagttgtggtcgcattctcaagagcggctgactgcgccgtggaccatcactttcgcttctgcctgctcttgcgcctattgcggcaactactcacgctcctacgggacgaggagagggaggtgaatccgtggcagagaaaaatagtagtctagtcattcaagtgaaaggtccaagaaaggaagaaagaaaaatttatcaaaaagaaaacacaagaagtattctgaagatagcgacagtgactctgattctgaaacagactccagtgatgaagacacaaaaatgagagcaaagacagctaagaaaaaggaaaagaaatgcagatggccagattttttcctttaatttttattatggaaaaggtcaaatgtgtataaacatacatagaatggtataatgattcctcaggcacgtagcacccagcttgaacaattaacaacttgtgggaaattgccattgccccctaattaatttgaaaccaatcccaggtataatgtcatttataaacaattcagcatgtttctctaaa

SEQ ID NO: 246015 - DNA, 757 bp, Homo sapiens
cacgctggcgactcccacagaacccttcacgctgacgagaggaattggaaaacaggcccctgtagtccaaagagcatgagggaaatccctgctccactttggccccaagctggacctagtcataggaatgggaacagcacagagaggctgaaacctgggcttttaagtcaaaggacacagcagaggagttaagagaccccctaaagctccacatgaatggcactgacgtggggaaaacagcaaaggctatttgagctcaactcctgtgtagactggcccctgggtgaacagcacgacacagacttggaagactagcctgacaccagagtcacagctccaggaggcaggctggcacatgcaatcagaacataactgggttacttgcctgctgagacacaactcagcatcctgcagagggtttcatggacttgggagtctcaaggtatgccgaatgtctagaatacaaaattactaaacgtaaaaagagccagaaaaatctctgccctaaagtgaaaagaccgaatgccaactctcacatgacccaaatattgggaatatcagataaagaacagttattataaccatgctctgtgaaataagggcaaatgctcttgaatcaaagaaatgaaaaaattcagtgaataaacagaaaaacatttggaaacaaaaatgaactgggacttgtaggacaagattgaagggtctactgtgtatgtcactagattcctataaaacagagaaacaacgtatacaattt

SEQ ID NO: 246016 - DNA, 1010 bp, Homo sapiens
ggttttactgcagcagccggagtgacagcgacgcctcagccgcctctgttgctctcggagccccggcttcccctgcaccgggaaagcgccccctctcgagaggctggtccctggagaactgcgaacgagctgcagaaaaccagattttaaaatgtagaagtcgttgggctgcattcctccgaggaccagtctgatcgcccaggactaagagtggcagcgtatgagaagttgggaccatagagcaagggggggaggggacgtgttgcagcaggcattctcttctggaaggagtcgttgggagcagtgcggttggacacaagtttgcgtaggagtgttttccttttgtcaataattaatcaccggaattagccaggtagaatttgagttttagcaagagtcctgagggcggggccgaacacctaactccgggaggctcccaggcgcccggcgcagtgggaagctcgcagcagctggggaggagccaaagcctcggcgctcacctaagccgcagggagatacacccaactgggagtaagaactgcaaacaattgtgatgcttgaaccacaatatatttccccaccctctccagttgagtgtgatgatgttccactaaggatgggtgcagccactaacgcagggccccctctcaacctagatcctcgtctacagtataccctgagagaagcaggccaccagcattactcatcatccccagctttgtgtttcagagctctattctagataagagcaactgagagctctgaggctctcttcctccaaccatcctccactcttaagacagaaaatgaagaactcaacaacaagaacacaactcatttaaaagtggacaaaaaaatttgaatagacatttctccaaagagcaggtagaaacagccaatttacacatgagaaggtgtttactagccattagtggttggggaaatgaaaatcaaatcaaaaccacagtacaatcccacttcacaccaaccggaatggctatcacaaaaaa

SEQ ID NO: 246017 - DNA, 2452 bp, Homo sapiens
ggttttactgcagcagccggagtgacagcgacgcctcagccgcctctgttgctctcggagccccggcttcccctgcaccgggaaagcgccccctctcgagaggctggtccctggagaactgcgaacgagctgcagaaaaccagattttaaaatgtagaagtcgttgggctgcattcctccgaggaccagtctgatcgcccaggactaagagtggcagcgtatgagaagttgggaccatagagcaagggggggaggggacgtgttgcagcaggcattctcttctggaaggagtcgttgggagcagtgcggttggacacaagtttgcgtaggagtgttttccttttgtcaataattaatcaccggaattagccaggtagaatttgagttttagcaagagtcctgagggcggggccgaacacctaactccgggaggctcccaggcgcccggcgcagtgggaagctcgcagcagctggggaggagccaaagcctcggcgctcacctaagccgcagggagatacacccaactgggagatgaggaaacagcaacccagagaggagaactaacccacacaggatcatttcgcgaaggagcaaggctgaagaaccagacctggactttcttaggacaaacttactgcagcttgaaggagccaaccatggatttgaggcgtgtgaaggaatatttctcctggctctactatcaataccaaatcattagctgctgtgctgttttagagccctgggagcgatctatgtttaacaccatcttactaaccattattgctatggtggtatacactgcctatgtctttattccaatccacattcgcctggcttgggaatttttctcaaaaatatgtggatatcacagtacaatttctaattgatcctgttcacattcagtgaaatggcattgcatatttatatgttgcttacagcttattgatttaggtaactattgtgtcttccttcactatctgacctgaaaagcactctcttctctatgcactcttatattctgcctttctgcctggagtttgaaatacatgtctctttagtttcttttgcacatgctacattgtgctttagaccggagataatacagtgactttacctcacaaatcatattctgtcaacacaaatctatgaatttagtttatttaaaatcagaacaatttcctacaaaatttttctggaaaatagactcctaacagacctaccagaatcatgcttaaagtgctcccttgacacttattctatactgaaggataaattttaaaaaatctttataggctactgtcagaagtatcctatccttgtttacgatgtataaaaagatgtgaataaattatatggaccccctaagtcttattttctagtaaactgatgatactggaaattcttttacttcaaatgcaaaagaataagctggaggcaattatttcctttcatacagagttcatgaattgttttaaatgcttcttaaagtctggctttataaccgtttaaaatcaacaatgttgattttagataaccaagtaagtattataatacaaaataattttaagtgtaagaaactaaagtataatcaaagtaaattcagttattgtatttgtggtgttgccttgccttgcatgatgctgggggaaaaagagaaaagaaatggttttctttttgtactttcattcagtgtagagggaaaaaagcatgtattgggccaccggaagacaagctaataaataggctggaagtaatattctaccagcaggaactcaacagctccagttaaatgctttgatatagtggctcctttgcagagccaaaacaagatttattaaatttccttcaaactgtttatctttaaaacaaatataaggttttaattatactgctgaagcaaatgtgaatgccaaagactacgttttgcagttttgctttcctcccaataaatattaatgtatgtaattctagagggtaaaaatgtaaataggtttggacaatatttgcacccttgtttgtgttatgaaaaaaatttttccaaggcgagctagagagaaagatgtttggcatgccaaattaacttgcatgtttgttaaaaaaacaaacacatgttttgaagagaaaccagatctgaacatgtatttgttgagttttgcaaaataaaattaattttgtaagtaaatatctaaaaaaaaaaaaaaaaaaaaaataaagaaaaaaacaaaaaacaaaaaaaaaaatataaaaagtaaaattacaatataaatagacgaaattaaacaacgtaaaagaatggaaaaaccctagacgaaacccaacttagggggcttgcagaacataattcctttttaaaggtggcgttttaaacaaacaggggccgcatttatcaaacttgccaacaggaaaacaccttgaatgcccaatgtcaaattgtttgcgaaaatatctttt

SEQ ID NO: 246018 - DNA, 2379 bp, Homo sapiens
ggttttactgcagcagccggagtgacagcgacgcctcagccgcctctgttgctctcggagccccggcttcccctgcaccgggaaagcgccccctctcgagaggctggtccctggagaactgcgaacgagctgcagaaaaccagattttaaaatgtagaagtcgttgggctgcattcctccgaggaccagtctgatcgcccaggactaagagtggcagcgtatgagaagttgggaccatagagcaagggggggaggggacgtgttgcagcaggcattctcttctggaaggagtcgttgggagcagtgcggttggacacaagtttgcgtaggagtgttttccttttgtcaataattaatcaccggaattagccaggtagaatttgagttttagcaagagtcctgagggcggggccgaacacctaactccgggaggctcccaggcgcccggcgcagtgggaagctcgcagcagctggggaggagccaaagcctcggcgctcacctaagccgcagggagatacacccaactgggagatgaggaaacagcaacccagagaggagaactaacccacacaggatcatttcgcgaaggagcaaggctgaagaaccagacctggactttcttaggacaaacttactgcagcttgaaggagccaaccatggatttgaggcgtgtgaaggaatatttctcctggctctactatcaataccaaatcattagctgctgtgctgttttagagccctgggagcgatctatgtttaacaccatcttactaaccattattgctatggtggtatacactgcctatgtctttattccaatccacattcgcctggcttgggaatttttctcaaaaatatgtggatatcacagtacaatttctaattgatcctgttcacattcagtgaaatggcattgcatatttatatgttgcttacagcttattgatttaggtaactattgtgtcttccttcactatctgacctgaaaagcactctcttctctatgcactcttatattctgcctttctgcctggagtttgaaatacatgtctctttagtttcttttgcacatgctacattgtgctttagaccggagataatacagtgactttacctcacaaatcatattctgtcaacacaaatctatgaatttagtttatttaaaatcagaacaatttcctacaaaatttttctggaaaatagactcctaacagacctaccagaatcatgcttaaagtgctcccttgacacttattctatactgaaggataaattttaaaaaatctttataggctactgtcagaagtatcctatccttgtttacgatgtataaaaagatgtgaataaattatatggaccccctaagtatttcctttcatacagagttcatgaattgttttaaatgcttcttaaagtctggctttataaccgtttaaaatcaacaatgttgattttagataaccaagtaagtattataatacaaaataattttaagtgtaagaaactaaagtataatcaaagtaaattcagttattgtatttgtggtgttgccttgccttgcatgatgctgggggaaaaagagaaaagaaatggttttctttttgtactttcattcagtgtagagggaaaaaagcatgtattgggccaccggaagacaagctaataaataggctggaagtaatattctaccagcaggaactcaacagctccagttaaatgctttgatatagtggctcctttgcagagccaaaacaagatttattaaatttccttcaaactgtttatctttaaaacaaatataaggttttaattatactgctgaagcaaatgtgaatgccaaagactacgttttgcagttttgctttcctcccaataaatattaatgtatgtaattctagagggtaaaaatgtaaataggtttggacaatatttgcacccttgtttgtgttatgaaaaaaatttttccaaggcgagctagagagaaagatgtttggcatgccaaattaacttgcatgtttgttaaaaaaacaaacacatgttttgaagagaaaccagatctgaacatgtatttgttgagttttgcaaaataaaattaattttgtaagtaaatatctaaaaaaaaaaaaaaaaaaaaaataaagaaaaaaacaaaaaacaaaaaaaaaaatataaaaagtaaaattacaatataaatagacgaaattaaacaacgtaaaagaatggaaaaaccctagacgaaacccaacttagggggcttgcagaacataattcctttttaaaggtggcgttttaaacaaacaggggccgcatttatcaaacttgccaacaggaaaacaccttgaatgcccaatgtcaaattgtttgcgaaaatatctttt

SEQ ID NO: 246019 - DNA, 1494 bp, Homo sapiens
cggacgcgtgggtcgacccacgcgtctgaaaagcactctcttctctatgcactcttatattctgcctttctgcctggagtttgaaatacatgtctctttagtttcttttgcacatgctacattgtgctttagaccggagataatacagtgactttacctcacaaatcatattctgtcaacacaaatctatgaatttagtttatttaaaatcagaacaatttcctacaaaatttttctggaaaatagactcctaacagacctaccagaatcatgcttaaagtgctcccttgacacttattctatactgaaggataaattttaaaaaatctttataggctactgtcagaagtatcctatccttgtttacgatgtataaaaagatgtgaataaattatatggaccccctaagtcttattttctagtaaactgatgatactggaaattcttttacttcaaatgcaaaagaataagctggaggcaattatttcctttcatacagagttcatgaattgttttaaatgcttcttaaagtctggctttataaccgtttaaaatcaacaatgttgattttagataaccaagtaagtattataatacaaaataattttaagtgtaagaaactaaagtataatcaaagtaaattcagttattgtatttgtggtgttgccttgccttgcatgatgctgggggaaaaagagaaaagaaatggttttctttttgtactttcattcagtgtagagggaaaaaagcatgtattgggccaccggaagacaagctaataaataggctggaagtaatattctaccagcaggaactcaacagctccagttaaatgctttgatatagtggctcctttgcagagccaaaacaagatttattaaatttccttcaaactgtttatctttaaaacaaatataaggttttaattatactgctgaagcaaatgtgaatgccaaagactacgttttgcagttttgctttcctcccaataaatattaatgtatgtaattctagagggtaaaaatgtaaataggtttggacaatatttgcacccttgtttgtgttatgaaaaaaatttttccaaggcgagctagagagaaagatgtttggcatgccaaattaacttgcatgtttgttaaaaaaacaaacacatgttttgaagagaaaccagatctgaacatgtatttgttgagttttgcaaaataaaattaattttgtaagtaaatatctaaaaaaaaaaaaaaaaaaaaaataaagaaaaaaacaaaaaacaaaaaaaaaaatataaaaagtaaaattacaatataaatagacgaaattaaacaacgtaaaagaatggaaaaaccctagacgaaacccaacttagggggcttgcagaacataattcctttttaaaggtggcgttttaaacaaacaggggccgcatttatcaaacttgccaacaggaaaacaccttgaatgcccaatgtcaaattgtttgcgaaaatatctttt

SEQ ID NO: 246020 - DNA, 152 bp, Homo sapiens
agagattccaggtttaataacttcagttctccccactgtgtatatagatgttaagttacacagatttggcattattcccattttcaggttaatatcagaacacttgttatcaagtcaggatagtaattgtgagcctagatgctctaggtttg

SEQ ID NO: 246021 - DNA, 1503 bp, Homo sapiens
  misc_feature (1039)..(1039): n is a, c, g, or t
  misc_feature (1395)..(1395): n is a, c, g, or t
  misc_feature (1489)..(1489): n is a, c, g, or t
aagcaaatgtttttttggccggggcaactggtattaagtgttaataatggactatgtagaaattttatctacatttaaatcctaggatctacacctcataaagttattgaattattacccccactttacagatggaaaactgaatattaatggcagcgattcaaatctacacaatctagatgaaaagttctagaacaacattgccactgactgattaaaaagtcaactgaaggaaaagccagtgagaaacaaggcaatcaattactgtacagtatttagctttggatatgttaattctgagatccctattagacctccaagatattaaaagggagaaatttgggagagatatggggactggagatacaaatgggagagtcaggtacttaaagccactggacttaacagaggagaatacacagggagtggctactaataaagacgttgtaggactgactgagccctgggagccttccaacatttagaggtagggacgacaaggaagaatgggggttgaggggaatagccagtgaaggaaaagagacaagaaaatagtatgaagaaaactaatgggtccaggcacagtgactggccaacatggcgaaaccccgtctctactaaaaatacaaattagccgggcatggtggtgcacacctgtaatcccagctatttgggaggctgaggcaggagaattgcttaaacctgggagaaggaggctgcagtgagccaagatcgtgccattgcattcaagcctgggtgacagagcaagactcattctcaaaaaaacagagcaagcttccggagctatggattgggtcaaaggttctggccaggcatactctaaggagcgctaaagggtctcttgatacgggacctggttcggtctcgctcttctccgccctttcttcgcccaagcctgcgtccttgctgccgccatcttctcttagcacacaccgcttgtcctgaccatacgcgggcgcactctttcacatttcacgttaatagacacctgcgggcggtattcgtccctcggcggatncaacgatgcgtctcaccgtctctaccctctcacactactcgcgctttgtctccatctctccgcggctcttgtcacggctctctgctgtacaacgtctgtcgactctctttatctccatctctatggcgcctccttttctacatctcgtactctcgctctctcccctggtctcttcatctctgcgtgcggtcgctcctttatgcaccttctatctcatctactctctctctctcgtcacctctctactctgcgctctcgtacttactctcatcatgtcactatctctatccttcgtctactgccaccttcgcgtctcggtctgtcctctctcctcattcacgtcaccatgtctctcngcttcccctcgggtggccacgatcacactcgtacggtcactctcttctcatatctcatgaccctcactttgctcgcatcatcccctcctctctngtaggcttgacgcc

SEQ ID NO: 246022 - DNA, 1354 bp, Homo sapiens
  misc_feature (1192)..(1192): n is a, c, g, or t
aagcaaatgtttttttggccggggcaactggtattaagtgttaataatggactatgtagaaattttatctacatttaaatcctaggatctacacctcataaagttattgaattattacccccactttacagatggaaaactgaatattaatggcagcgattcaaatctacacaatctagatgaaaagttctagaacaacattgccactgactgattaaaaagtcaactgaaggaaaagccagtgagaaacaaggcaatcaattactgtacagtatttagctttggatatgttaattctgagatccctattagacctccaagatattaaaagggagaaatttgggagagatatggggactggagatacaaatgggagagtcaggtacttaaagccactggacttaacagaggagaatacacagggagtggctactaataaagacgttgtaggactgactgagccctgggagccttccaacatttagaggtagggacgacaaggaagaatgggggttgaggggaatagccagtgaaggaaaagagacaagaaaatagtatgaagaaaactaatgggtccaggcacagtgactggccaacatggcgaaaccccgtctctactaaaaatacaaattagccgggcatggtggtgcacacctgtaatcccagctatttgggaggctgaggcaggagaattgcttaaacctgggagaaggaggctgcagtgagccaagatcgtgccattgcattcaagcctgggtgacagagcaagactcattctcaaaaaaaagacttggaaaggcttcttggttcgggatttggagggcctcaagccccttaccgccctatttatcgaagggtaagaaaacctgtttgagcggtttatatttaaccaaaggttccccgtataacacgtggcacctttcattttcctgcacctgtgagtcatatcccgggccctctgtgcctcccacaccatattggggccccctggcgcctcaataccctcagcaacactctctttctataacaatagggggtcttctttactaccatgtgggccttctatatccgctctactctcttcttgacacacactcactctcggacgcgcttctcgtcgcctcttctcgcctcattacctcgctcttatctcttctcgtcatttctctcgcttacacacacacctctattntctctcactcctgccctttgctctccgacacgctcctctaagctctacgactcgcgtcgtacccctcatccctcctctagttgctgatcatggcatgccatctccactctccgcattattctcatctcctcactccgctgcctccctgtctctcctctcttc

SEQ ID NO: 246023 - DNA, 1279 bp, Homo sapiens
  misc_feature (1073)..(1073): n is a, c, g, or t
  misc_feature (1078)..(1078): n is a, c, g, or t
aagcaaatgtttttttggccggggcaactggtattaagtgttaataatggactatgtagaaattttatctacatttaaatcctaggatctacacctcataaagttattgaattattacccccactttacagatggaaaactgaatattaatggcagcgattcaaatctacacaatctagatgaaaagttctagaacaacattgccactgactgattaaaaagtcaactgaaggaaaagccagtgagaaacaaggcaatcaattactgtacagtatttagctttggatatgttaattctgagatccctattagacctccaagatattaaaagggagaaatttgggagagatatggggactggagatacaaatgggagagtcaggtacttaaagccactggacttaacagaggagaatacacagggagtggctactaataaagacgttgtaggactgactgagccctgggagccttccaacatttagaggtagggacgacaaggaagaatgggggttgaggggaatagccagtgaaggaaaagagacaagaaaatagtatgaagaaaactaatgggtccaggcacagtgactggccaacatggcgaaaccccgtctctactaaaaatacaaattagccgggcatggtggtgcacacctgtaatcccagctatttgggaggctgaggcaggagaattgcttaaacctgggagaaggaggctgcagtgagccaagatcgtgccattgcattcaagcctgggtgacagagcaagactcattctcaaaaaaaagctgagaaatgactactagagtaaggaatatggatggtactaaagaccataaacaagactattttagtagaatggtagagaaaaacttgattgaagcagcttcaattaagaacaaaggtgtgccgtgtaccggagggccacttccacatttctgtcaaggaactgtgggagtaattacccagggtagttttaggggcacaaacgttaaatcgtggaaccagggccggttaaagatcctttggaacccgaacggttgttcgtaaggaccaagggtgtctttttaagnaaaangggcggattttggacacggctaatcgtggtctcaaacaaaaacctttgtgcgggccctcacctgtgctcttgacccccaaaacctctgttcaacttatctgcgatttccatcgcataacacaaatctttaagcgtggacggttaacagctcttttttctttcaacatagggcaagtggctcgtttatttatctctcgtgct

SEQ ID NO: 246024 - DNA, 1268 bp, Homo sapiens
aagcaaatgtttttttggccggggcaactggtattaagtgttaataatggactatgtagaaattttatctacatttaaatcctaggatctacacctcataaagttattgaattattacccccactttacagatggaaaactgaatattaatggcagcgattcaaatctacacaatctagatgaaaagttctagaacaacattgccactgactgattaaaaagtcaactgaaggaaaagccagtgagaaacaaggcaatcaattactgtacagtatttagctttggatatgttaattctgagatccctattagacctccaagatattaaaagggagaaatttgggagagatatggggactggagatacaaatgggagagtcaggtacttaaagccactggacttaacagaggagaatacacagggagtggctactaataaagacgttgtaggactgactgagccctgggagccttccaacatttagaggtagggacgacaaggaagaatgggggttgaggggaatagccagtgaaggaaaagagacaagaaaatagtatgaagaaaactaatgggtccaggcacagtgactggccaacatggcgaaaccccgtctctactaaaaatacaaattagccgggcatggtggtgcacacctgtaatcccagctatttgggaggctgaggcaggagaattgcttaaacctgggagaaggaggctgcagtgagccaagatcgtgccattgcattcaagcctgggtgacagagcaagactcattctcaaaaaaaggcttataaatgcctccttggttagggaaattggtggtctctaagccttaacacggactattatgtgaaaggtaggaaaacttggtggaacaccttaatttagaacacagttttgccgataaacagggggcccctttccaatttcttgtaaaagaaatctgtgagggatactcccagggcattttagggtcaccacgcgttatatggtaacccaaggcgttattaaaaacttatggacatagatctcttttctaaaaactcaggggctcttttttatcaataccgggtttctctaacaccgcaactcctgtttataactcaacactccttctgtcttttcccgtgctctctgttcccctatcttgtatactttcttcgcgttctcccccttcaacacatactctctcttatcacttctcctccatcttttcttctcgtacatcactttagtcctcggttctcttcctcatcactctcgtccg

SEQ ID NO: 246025 - DNA, 1222 bp, Homo sapiens
aagcaaatgtttttttggccggggcaactggtattaagtgttaataatggactatgtagaaattttatctacatttaaatcctaggatctacacctcataaagttattgaattattacccccactttacagatggaaaactgaatattaatggcagcgattcaaatctacacaatctagatgaaaagttctagaacaacattgccactgactgattaaaaagtcaactgaaggaaaagccagtgagaaacaaggcaatcaattactgtacagtatttagctttggatatgttaattctgagatccctattagacctccaagatattaaaagggagaaatttgggagagatatggggactggagatacaaatgggagagtcaggtacttaaagccactggacttaacagaggagaatacacagggagtggctactaataaagacgttgtaggactgactgagccctgggagccttccaacatttagaggtagggacgacaaggaagaatgggggttgaggggaatagccagtgaaggaaaagagacaagaaaatagtatgaagaaaactaatgggtccaggcacagtgactggccaacatggcgaaaccccgtctctactaaaaatacaaattagccgggcatggtggtgcacacctgtaatcccagctatttgggaggctgaggcaggagaattgcttaaacctgggagaaggaggctgcagtgagccaagatcgtgccattgcattcaatgttgcacggccaggatcctttcaaacacaaacaccggcccggcgtaatggtatggccaaggttctgcccggataccccataggcggcaacggcctccctgggcgcggaactcgcgtccctaagcccttctcagcgcctttttagttgatcgcgcgcgctctcttggcgacgcttccctcaacacccgcgtgtctccctcacacggcggccaccttcacacttcctcgtctctcctgagttgtcccacgggcttcttgggctcactaccctactctgccacctccggcctcctcgctttctcggctaccaccagcttctttccacccaccagcctctcttatcctacacgcccgcgctccttcacccttggcgtgctcttcttacccctcaccctcggctatcccttcacgccgtcaccctccccactagccttcgcccctctcactctctgactacccgccatcgcccccc

SEQ ID NO: 246026 - DNA, 799 bp, Homo sapiens
aagcaaatgtttttttggccggggcaactggtattaagtgttaataatggactatgtagaaattttatctacatttaaatcctaggatctacacctcataaagttattgaattattacccccactttacagatggaaaactgaatattaatggcagcgattcaaatctacacaatctagatgaaaagttctagaacaacattgccactgactgattaaaaagtcaactgaaggaaaagccagtgagaaacaaggcaatcaattactgtacagtatttagctttggatatgttaattctgagatccctattagacctccaagatattaaaagggagaaatttgggagagatatggggactggagatacaaatgggagagtcaggtacttaaagccactggacttaacagaggagaatacacagggagtggctactaataaagacgttgtaggactgactgagccctgggagccttccaacatttagaggtagggacgacaaggaagaatgggggttgaggggaatagccagtgaaggaaaagagacaagaaaatagtatgaagaaaactaatgggtccaggcacagtgactggccaacatggcgaaaccccgtctctactaaaaatacaaattagccgggcatggtggtgcacacctgtaatcccagctatttgggaggctgaggcaggagaattgcttaaacctgggagaaggaggctgcagtgagccaagatcgtgccattgcattcaacgcctgctggccgagcaggattcatctctccacgtgccggggttgggcg

SEQ ID NO: 246027 - DNA, 719 bp, Homo sapiens
aagcaaatgtttttttggccggggcaactggtattaagtgttaataatggactatgtagaaattttatctacatttaaatcctaggatctacacctcataaagttattgaattattacccccactttacagatggaaaactgaatattaatggcagcgattcaaatctacacaatctagatgaaaagttctagaacaacattgccactgactgattaaaaagtcaactgaaggaaaagccagtgagaaacaaggcaatcaattactgtacagtatttagctttggatatgttaattctgagatccctattagacctccaagatattaaaagggagaaatttgggagagatatggggactggagatacaaatgggagagtcaggtacttaaagccactggacttaacagaggagaatacacagggagtggctactaataaagacgttgtaggactgactgagccctgggagccttccaacatttagaggtagggacgacaaggaagaatgggggttgaggggaatagccagtgaaggaaaagagacaagaaaatagtatgaagaaaactaatgggtccaggcacagtgactggccaacatggcgaaaccccgtctctactaaaaatacaaattagccgggcatggtggtgcacacctgtaatcccagctatttgggaggctgaggcacgtggcgctaacccttggacgtaggcttgcccc

SEQ ID NO: 246028 - DNA, 1301 bp, Homo sapiens
  misc_feature (1139)..(1139): n is a, c, g, or t
aagcaaatgtttttttggccggggcaactggtattaagtgttaataatggactatgtagaaattttatctacatttaaatcctaggatctacacctcataaagttattgaattattacccccactttacagatggaaaactgaatattaatggcagcgattcaaatctacacaatctagatgaaaagttctagaacaacattgccactgactgattaaaaagtcaactgaaggaaaagccagtgagaaacaaggcaatcaattactgtacagtatttagctttggatatgttaattctgagatccctattagacctccaagatattaaaagggagaaatttgggagagatatggggactggagatacaaatgggagagtcaggtacttaaagccactggacttaacagaggagaatacacagggagtggctactaataaagacgttgtaggactgactgagccctgggagccttccaacatttagaggtagggacgacaaggaagaatgggggttgaggggaatagccagtgaaggaaaagagacaagaaaatagtatgaagaaaactaatgggtccaggcacagtgactggccaacatggcgaaaccccgtctctactaaaaatacgaggcaggagaattgcttaaacctgggagaaggaggctgcagtgagccaagatcgtgccattgcattcaagcctgggtgacagagcaagactcattctcaaaaaaaagacttggaaaggcttcttggttcgggatttggagggcctcaagccccttaccgccctatttatcgaagggtaagaaaacctgtttgagcggtttatatttaaccaaaggttccccgtataacacgtggcacctttcattttcctgcacctgtgagtcatatcccgggccctctgtgcctcccacaccatattggggccccctggcgcctcaataccctcagcaacactctctttctataacaatagggggtcttctttactaccatgtgggccttctatatccgctctactctcttcttgacacacactcactctcggacgcgcttctcgtcgcctcttctcgcctcattacctcgctcttatctcttctcgtcatttctctcgcttacacacacacctctattntctctcactcctgccctttgctctccgacacgctcctctaagctctacgactcgcgtcgtacccctcatccctcctctagttgctgatcatggcatgccatctccactctccgcattattctcatctcctcactccgctgcctccctgtctctcctctcttc

SEQ ID NO: 246029 - DNA, 343 bp, Homo sapiens
ctcagccttggatgcatccgaagtgtgaccctgtgagctgagcatgtgagccgtggtgccctgcctgctccctaagcttttcatctgtggcccatgtcagggggtgggaggcgggggtagtgcatgttttgaagcacacaatttcactcctatccataaagagatccattagttcaattaatgaagccagtacactgaggtgttgaagggcagagactccgccagtctgccaggattcagatcccagctctgcctcttcctggctgtgtggctttaggcacactccttaacctttttccatcagtttcctcatctataaaacggggataaccacatgatcaaa

SEQ ID NO: 246030 - DNA, 411 bp, Homo sapiens
cacatgcaggcttcctgtttgtcaatcaagttttcttggaacccagtcataccgcttccttcaagtattgcctttggctgtggctgctttacatgacaacggagtggagcagttgaggcagagactacatggcccacgagcctaaagtttttactatctgaagctctaagaaaaagtttgcctgcccagaaccccaagctgttatttcaggacccacaaaatggattacttacagacatttacagcaccaacgccctcacacaaccttatagggaaagcaaagagacagaaattagttgtggggagcaaagctggtgaaatctgtttaacctgcaaattctctcctccaattagcgttgatgcacattccaagtaaataatatgcagacatgctcctgggtgttgaagcac

SEQ ID NO: 246031 - DNA, 453 bp, Homo sapiens
aaggagtcagggagcagaaagtatatgcatcagtaactcacagtgaaagcttgtttaatgaagctagcttcaatgctgtgagctgctctatagacgcccatgtaggaggaaactcaaggggcccccagccactagccattgaggaactgaggccctcaatccaacaacccacaaggaactgaatcctgccaacaaccactgagtgagcctggaagcggatcctgcccagctgaaactcgagaagattgtagctctgctgccctgaccactattctaactgcacccttgagagagaccctcagccagctaatctgtacctggattcctaacctggagaaactgaaatagcaacgcatgttgatgtaagtgctaagtttgggagtaatttgttatgtaacaataaataactaataatacttattatttaggcaataaaaccatagaaaataattc

SEQ ID NO: 246032 - DNA, 574 bp, Homo sapiens
ggactgttcaactcacctggcagccactcccagagcccctggaactctggcccaaggctctctgactgactccttctcggcttagcggctgaagactgttgctgcccgatcgcctcggaagccccgtagaccatcacggacgccgagcttccagtaactcacagtgaaagcttgtttaatgaagctagcttcaatgctgtgagctgctctatagacgcccatgtaggaggaaactcaaggggcccccagccactagccattgaggaactgaggccctcaatccaacaacccacaaggaactgaatcctgccaacaaccactgagtgagcctggaagcggatcctgcccagctgaaactcgagaagattgtagctctgctgccctgaccactattctaactgcacccttgagagagaccctcagccagctaatctgtacctggattcctaacctggagaaactgaaatagcaacgcatgttgatgtaagtgctaagtttgggagtaatttgttatgtaacaataaataactaataatacttattatttaggcaataaaaccatagaaaataattc

SEQ ID NO: 246033 - DNA, 350 bp, Homo sapiens
ccaccccaatgagaagagacctttcccacctcagaaccccatctgcacttccttggtctacttcttcagttgatgagtcatctgaaatacagacatgtcagaatctaaaaaggacaccagaaaaggccttgtgggcactaaagggtcccagagaaaccccatgttgtcaaatcccatgtttttcctcccaacagtcaatttggattatagcttactgcatttttgagagaggagagctgagatttgaatccacatcagactgtgctggaaacagaatacagagcccatcgtaggatgtacttccctctgtagcctagtttctgaaagtgtcattaaacatgtgggaacca

SEQ ID NO: 246034 - DNA, 168 bp, Homo sapiens
aattgcaaattgagacttgctgctctgtaaagaaaggccatggcttttctcaaatgtttgcttttccacacttgcacctgcacatcaccataatagtacagattaatcgagtttaaataaagatgtgtctaattcggaacacagaagcttaaggaaagagctctgttt

SEQ ID NO: 246035 - DNA, 316 bp, Homo sapiens
gatcctatttttttaaatccgttctgtatcacaaacatgccaaacagctaaaagatgagataaaacagaactacaagaaagaagtttaaatttccaaggcaacagacagctctgaggttcctggttttaaaacatcgtcaccatcatcattctttatttatatatgaattgagtcttaacagtataacaaatggctaaatacattacaataatctagtatttacatagaaatctctttacagtttgacaactgtatagaagtacctcttttagaaatgatattcaaacaagactgatcaccagaagatgtctagtg

SEQ ID NO: 246036 - DNA, 312 bp, Homo sapiens
atttaagaattcaatatcgcaatggggcatcgtcattttctcttgtgcaagaatgctgtagaatgctagcagaacatgacgtctaccagagcaacatggttgatttctaacaaggatcagataagagaatgatgaaagctaatatagatacaagataaatagagttacagataaatgtatataatacctctatttggatataattatcagatataatttacatatcataaaatttaccattttaaataatacgtttcagtggttttcagtatattgaaatgcaagatcatcaccactctctcattttgaaca

SEQ ID NO: 246037 - DNA, 788 bp, Homo sapiens
cagactagaatgtttctgttcattataaccccatgataaagcacaaccactttagtcagtttcacctgagattccctactattgagatgaaaacattacgcacagctggtctcagtggcgcacttctgtaatcccagcaacttaggagctgaagtgggaggattgcatgaggccagaagttcaagaccagcatgggcaatatagcacaatccaatctctaaaactaaaaataaattagctaggcatagtgatgcatacctctagtcctagctactggagaggctgaagtgggagtatcacttgagcccaggagttcaaggctgcagtgagctatagttgcactactgcacttcatcctgggcaacagaaaccccatctctaaagaaagaaaattaggtgacatgtccctccacctgtcaacccaaccaaaccaagatattagcaggcctatgcagaattggcaaagaaggttgtaaaaatccctgtctgttctcagcccatcagccacctcgaaattttaaaaaagtttaaattaaggtagaagagtgaggagggcaggtctgttcttggtggagcagtcaatatgctgggctttctctcaccccaagtcagataaggggcccccaggattccagtgccacaagagaaccagagaacttggcgtatattttctggactttggagggcccaggaaatggtgacttctggaaacataaaggcaaaaaggctctgccttggtctacctgccatgatgagagaacagaaagagacactaggaggaaacccct

SEQ ID NO: 246038 - DNA, 424 bp, Homo sapiens
gtgtagtgctcttctttccctttcgcctccagtctcagcctaggctgagcctctgacctgcggctagaaaggtcacaactttcctgtggcttaggaactcccggtagtgttgagaatagaaggaacccctaccctgcatgcctaggggtccggttatcttgaaagacttttgcctcctctctgagcaagtacaacacccaaaagatgagatgctccctctcagtcagccttattggaatcttttactgttgacatgatatggctgtacccgctgttctgactcagatatttcaagaatccgtggggccttttcaggccaaatcagaaatgaacaagagaagatgagagttcacactccaactgggtattttaagtaaaacctaacgaatacagtaaaatctaaagttaatgacattctccaacc

SEQ ID NO: 246039 - DNA, 480 bp, Homo sapiens
aacagtcttggcttagaacacatttttctcagattataggaatcaaaattatcttaaatttcaagggctatcagacctatgaagtccttcactagctatgtgacttgagcaagcaccatgattgttcactatcctatggaattagagaataaaataattgtatagcttaattagaaattagagttaaaatgagcttacagaccaagttaaaaatacagatataggatgaattaatttatattctgtgtttatgtgtgcgagtgctggagcttgtcttttataaaaagtgatcatagttgggcgcattggctccatgcctgtaatcccagcagtttgagaggctgaggtgggaagattgcttgagcccaggagtttgagaccagccttggcaacacagggagactccatctctacgaaaaataaaaaaattagctgggtgtagtggtgcatgcacacctgtagtcccagctacttgggtgg

SEQ ID NO: 246040 - DNA, 1246 bp, Homo sapiens
cgagaggtgctacgggcgagcgcgagcccccgagggcggctggaagccccggactgttggtagagtggaaggggatagagatcggtggggcgagcgtcctccgtggccagtcctcccctcaccgcccttcctcaggtatcgggaagagttgccagcggccatcaggggcagagcagagaagcatgtgacagggagctggagcggctgctggcctggcagcttgactgtgaagggcggcccgccccgagggcagggcctccgtagcgcgggtcttcattggggcgtggcatcggcggggcgggtgtctccagtgggggcggggcctccctggtgggtccagcaccccaggcaccctgacctggcctcccacagaggggcgcttccggccacgtctgcagcagctggtggccaccaatccccctgagctggttgtgcactgttcgaccgccaccttctgcctcctgccagatgtgggggctgcagtcaccgagctgtgtgccctctgcggtgtgggcccaccacagcctcgggtgagttgggtgggcacgacttgggtacataggcgttcttgtctgtgaagcgggcagtctgggcccttgcgtgtcgctaggagcaggaaccatagggccctgggctgctgggagcagggtctcccagagcttgtcctgatggggtgtgtctggctgcttctcctcgctgttcacagcagtcctggcagctggagctccagagatggaggccttcatgtcagatgaggcggtggccacagtgcccggctggccggccccacagtacaccctcaggtactacctgctgtacctgggccaggttcaagagcgggccacagctctgagccaaggggaatgaactgtgtgtgggcaggttggggtggcccgtgcccctgggcctgagtccgtgtgcccctccctagccagtgcctcaggacagtggactccctacctagtggagacagcactgtggacctgggctgtggggcagaggctgtgcccagacctgctgcccaaccttggccccagcctggccacccacgaggatgctaggccagccaagaagcatggaacccaggccgagtaaacttggccatggcccaggcctgctcacctgccacagaacctcaggcctccgggtctcactggacggcagggaggctgaagaggaggctggccactacgggagctcaataaacacttcccaaactcacgcctgatcacacacccggcctgac

SEQ ID NO: 246041 - DNA, 336 bp, Homo sapiens
catctaagaaatcaagaggtttcacatcaaaattagaatttctggcctctctcgatcagtcagaacgtatggcaattctcatctgcttttcagaaaaggacaatcaatcgaagctaaataggggttgctccttttggcaagacttgtactctctcacctggcctatttcatttatttgtattatctgcctggtccctgagacgtttgagtctgtcctcccccttacaggtttgggtttgaagatgagaactacaaagctgattatttcttatcattatgcctgcaattttacctagctaccactaggtggatagtaaatttatacttacgtttcca

SEQ ID NO: 246042 - DNA, 197 bp, Homo sapiens
gggaaaactaagtcactcgcccaataagggcattgatttctttctgagggcagatcccttatgacctagtcatagctgtcccacctcccaataccattccactgacaaatttcaacatgagcttttgtggggacacgcaagcatagcacacacatctacactatgagtcagtatttccactcttaagtgtaggtttt

SEQ ID NO: 246043 - DNA, 196 bp, Homo sapiens
tattagtagccttcattttcttatactatttttaaactagggcaataaatctttcataaatggtcacactaagcatttgaattggttaacttaatctgctatttatatatggttgcaaattgatatcacactaacaactatagctgtaaaaatgaaacatgaatgtagaagtccttaatggcaacagcttgagggt

SEQ ID NO: 246044 - DNA, 391 bp, Homo sapiens
agatgatatggcttcccaaaagactaatgctgtcttgagctgcattatgtactcctagatatttgtattttttaaaaacaacattgtaggtgaggctgttcattggcaaaaacatttagaaggcgatctggcaaaattatccaaaattttgtgagttataggtctttttggacatggaatccatcttttattactaagataaaatataatatctttatgctgattccctggtgcacgttactcagcccattgaaaaccttggcaaaatgtcagaccttaagactttccactatcccaaaactatgaactgtagttgcctagttttctcttttgcttatttataatgttattgatatgtttgtgctgtcaataaatgttttgtaaactgtca

SEQ ID NO: 246045 - DNA, 579 bp, Homo sapiens
ttaaagggagtattgacaggaagcgcttactagtttatctcatagaattagtggaagctttctctcagggatggaaacaacaggaccgccctgaagacttaaattgcaggaggtgccattaacatgtgccagtctcagcaagcccagggcctcgttcccctcccttggtcctacagagacaccatctgattggctcagcttggctccatgcctgtactttagccaatcagctgtggcaacacacacattgcttctaggtcctcattcctgcgggtagaactttctcagagaaagcagagtggcgacctggataggcccccactcgccagagtttcttcacccgtacctgcgggtaggtctttctcggagaaggcagagtggcgacctggataggcccccactcgccagagtttcttcactggtacctgcgggagtgcctactcaggacatgccccagaccacggcctcagctgccgccaccgaggctgtatccgtggtctggtgactagcgctgtctggtactgcccatgacctcttttctcctcccaaggatattttcccagaggcaggactgggagg

SEQ ID NO: 246046 - DNA, 505 bp, Homo sapiens
cgacttccactcacattccatcagctggtactcaggcacagagacacagccatctgcaagaagctgagagatataacctgcccgagtgcccagaagaaaggaacccagaatttggagaatacctagcaatctctgccaagggtcatgtttctgtaatcatttcttactatgcacagaataagagttgagttagtgttagcttcttcccttctctcattcctttctcactttttctcttgctatcatccattctactatataaataatatttctcatatcagatattaccattgatcacagaatgaaaactcttcaaatgatatcagaacagcaaaacagagatgagatgatttttataaaaaacaacctcttgccaagaagggatttaggtttacttatatttgttattttaattatgatcataattacctcttttctaagacatcattggctacagaatacttgacttgctaaactacaaaataaagaaatattcaaaacaata

SEQ ID NO: 246047 - DNA, 485 bp, Homo sapiens
gctcaatacagggaggatgtttgaggaagaacttcatatcctatatgtcagtgatgatatgcagtttgctttggtacacacaattgtaactgtttctctgttttggaatatgcctgatggtatttatgccaaaatgatttatagtcgactcctggttgaatctgaaagttgggacaaggaataagaagaaaggtgtatatcttattgtaatttatattgcttttgagatatgctctataacttactgcagcatatgcaacttctctgtaatgttcttagataaattatccaattattcacatttcaactacatgatggttgggtaatgaaaaatggcctgtaagtaagctttaatgaaggggaagggtttggggaaggcacaagaggaagttgcttttctataaaaatgttcctgtaaataacttagagaaggactttttatgttgctagttagtgtgtatattcaatgtaattcagggaattta

SEQ ID NO: 246048 - DNA, 298 bp, Homo sapiens
gactagaactagtttccttaatgttgtctctttgataagcttaagagatatttgtaaattttttactactttcattagaaacccatacggtttctaaaaattcagttaaatttttattgagttactgctatgtgcaaagcactatacttaccactgagcgtgtaaagttgaaactgactcattagtatgcgtgcaccacagagacactttgttcagctaatcataagcactcaatgaaaatatgattattgaagaaaaactgtttcttacccttaagggtttcaaaatctcaataatt

SEQ ID NO: 246049 - DNA, 1088 bp, Homo sapiens
tcacaagaaaatgagaattgcaattgctctggagaataggaaaattagcacatgcaaagaaaaccttaaaagaaaattggcctcttcatggaaactggggatgttttgtcctaaggtcagttatcaacagcaggatttttgtattgccattgcaagcatgtgatagaaatgtttgttattgttggagaagaaaaggctgagacccaattataccctgtactctttattcgaccaagacctcaaaagatgtcaaagaagccatttctccaaagacagcaacatctattgtgaggcactttcatattcagcagtctgtaagtttgtaggagaaaacataagtggttaatttaaaataattttgggctctaaaatggactttgttgccttttttggtgggggtggtgggaatcggattcagcccatttccaagggatagtttcttcatctcagacaactattttgtgatcctttttaaaagacattctgaaaactttaactcctgcccttcttccgtattacagttgtgttattccagaaatattgtctacttttttaatatattagattttcattcagatcttaaacatgcaaacatgtgataggttagctttttaagggagttatcagtaccactgtatctaaatgttaggtaaatgggtagatttctctttgaagttggtattttccttggcagacagcactgtatcatgctcttcaccaagctatgctctgtaatgctataatcaaggaggctactaacttgtgaacctacagtcaacacaccattgctgaaaacaaactttgattaagaacagatttgctagggggaaaaaagagtaaagtgatattttcaagcaaatataattaaaattgtttcattaaaatatatactgagtgtatattgctccacactgaaattttattttgcattaacttgttaagtaattcattttagcaatcctgcatcccattttactagtactacctctgaaatatactgtcaccttaaaaccacatcagactgtaatgtgaatttttgtagagtttttatttaaacttttatagaggcaataaatgatttccaacta

SEQ ID NO: 246050 - DNA, 344 bp, Homo sapiens
gccacccccagttgcaacagagactgggaaggtggagtatcagatggaaatcctattgtcaggacccaggctgagcatgctgcctccccacacgaaaccagacttctgttagcaagaaagatacaagatcgccggccactatggttattgacatgttgtgctgtcatcttccaaaaactgacgagggccaggtgcggtggcacacacctgtaatcccaacatcctggaggctgaggcaagaggatcacttgaggccaggactttgagactagcttgggcaacatagcgagacccccatctctacaaaaaataaaaataaaaattttaataaaaaaaatagccga

SEQ ID NO: 246051 - DNA, 370 bp, Homo sapiens
caagcttcagacagccacatgtgctctttgtcaagccttgggagggccaacaaatacactgagctgccaggaagatgtgaaaagaagcattagatgctggagttccagttgaatcctttggcagtgaacagccctgcaggctcatgcccgcacaaacttggttatgcatctccttccttttattcacagacacagagtgaagatacagctcctggtaatttcagcacaaggctctcaattcttaactggggcagcagggagctggcatccgcataagctggatatggcttacttgagtgaatggatcgcgtgcccggtattgacatcccagattctttagggttgtacctaaataaaaagatggaaaaaa

SEQ ID NO: 246052 - DNA, 402 bp, Homo sapiens
caattcattcttggattaaacttcagttctttagggaagccctttctggtgttcacagatataagttccactgtaataaacttcgtcatcctgaatttctcatcacctttgcaattgtttgtttaatggtcttccccctccatgctgtattctctaccaaaatgtaaataggttccatgagggtaggaaccttgtcttttaacccaaaagctaggatacaatgtttttcaaagggtaatcacatatctgttggaaaaaaaatacctaacacctatttagaatgtaaaaacactgagatacgaaagccaagacttgtacatacacataaaacccacaaagaaaagaggttacttcagaccttacagcttgggtagtccccatctcccataaccccaagaaaag

SEQ ID NO: 246053 - DNA, 1235 bp, Homo sapiens
atttttttatttctttttttggttcctcagagatccctattctgaacatatattcttacattacaaagaaactgggccatatgagagtacaaccaagagaaaaacattgtttgttattatattatgttatggaaatggaggttcaattagcatagagattataaactcctattcaaggctgacattatcttacattgaagtcagagcctctcccaatcttagtttatcaactcagttcttgataacctatttttagcttcagtatttacagatattgtcttaagcaacattcttgtttcttaagctcctgctttaattagccaataccaaaaaactcccacaaaaaaaaaaaaaaaacaagaaaatattgtatttgcagtggggcgttttaagcaagaaggggctttaagcacaacactcataagcttagtcatcaggattaagttaatttaaggcaaattcaaccttacagtcaacaaataagtgtatttcactttatattgtttgctatttaaaagtattaaaattccagcttctaaatgtagatatccatcccccaaacatatgcttctttaaaataggaagaacacaaactttaataagaactcacgtattcccttgcagagtcagaaacccaaacataacagcaattgggcaagtaggtaaatgaggaagtacaattcataacaaatggacagcaaaaccgataagtcaaattagacattttgactataaagcgaccaaacgcctctcctccaaaaccaaaagccaaaaccttttcaaatatacagcaactgaatcagacggtaattttggctttaaaaatctacaatactcttggtaatggtagaaatgatttatccggtaggttaaagataggtttctatcattccacttaacattatttaccaaatgctgcatttcattaatggagctgtcagtttattctgatggtaatgaaaaacaggttttaacatgaataagccctgggtccaccagaaaatatcagtgaatcaagaggtcccgaagcttatgcagtttaagggaacttcgtagattaaatttccaccttccagtcctgagagctgtggtgtgcacacccagtccgaataccttgttgagcatacaggacactaatttccgacactgcagctaactcctgcacaaactcttcaagttgcaggcttctactcaagtacccatccctagtccacatgccctagaaaaacacagga

SEQ ID NO: 246054 - DNA, 745 bp, Homo sapiens
gaaaaaaggaaagccggacaaaactgacacattacgtttaagtgaataatgaaatgagttccactgaattaccatcagaaactgtgggtctagaggatagaagagtaaaacttttagattaaaaaaaaagccagttaattaatccaaaaggaaggaagaaaaagagaggcagagaaacgaaaaacaggatgaacagaaaacaaatgataatatggtacacctaaacccaatcatattataattatgttacaattcaatggattaacactgcaatgaaaaggaagaaattgtcagaatggattataaacaacaggatccgaatatatacgctttaaatatacagtaacctatgtgctgaaattaaaagaatgagaaagttatactatgcaaaatataaccattaaagggaagaattggctatactgacatcataaaggtacatttcaagccaacaaaatattatagttaaaaatgacattttataatgagaaagggttccatttatcagaaagacataacaatcataaatatgcatacaactaataaaacagctttaaaacccatgaagcaaaaattgagaaaactcaaaggagaaacaaaaatctacaattatgtgagagattttaacactcctttctaaagcaattgatagaaaaactaaacacaatcattaaagacataaaagatctgaatactatcaagtgcaatgacataactaatattgatatttaaggagcactctgcc

SEQ ID NO: 246055 - DNA, 427 bp, Homo sapiens
ccaaaacatcttactaaatctaatcaggcctctggatctacaaaaacatagggaaggtgggaacatgtcaggccacacatagaaatgcaattgccaaaaatccagactgtggaaaattgcaaaggacaaacaatatggctttatcaacaaaagaaactgcaatgaaaaagaaattgagggagaaagatagaaattaagagacttaggaactgtactgtcccatgtcccagcatgcaagggcactgactcaacaaacctgccccaaacaaaccagtgataaaaacagagacaatgcaggacatttgaacactgactagatatttgatattttgacttttttatttattttgagatggagtttcactcttgttgcccaggctggagtgcaatggcatgatctgggctcactgtaacgtccatctcctgg

SEQ ID NO: 246056 - DNA, 346 bp, Homo sapiens
gtgagggtctcaacagtctttcaggctgtcatttgaatataagctctgccactcatcaactgtgtcctcttaggtaagttactcatcctctctggaactcattgggtaaatggagaaaataatacctaccacacaagattttgcaaatattcatttagataatatataaataatttactatatacttaataatgtgtagctatatacaaattatataaatgcacatgtaatctgtatatgtgtgtgtatatatatatgtactctgtattatatgtagtttttatacagagactgtataaatgtaagcttctcttatccctatctttgatagcattttcagattctt

SEQ ID NO: 246057 - DNA, 511 bp, Homo sapiens
tgttggaatattacatatatgtatttcctgtctcaccccctataatgttttttcttgttactgttattgaagttttcagaggtaacagctaaggtttccagatgagaagtataaagagtctttcatatcagactgaaagagaatgaaagaacagccttggaaaagtaaaattactagtgtctcctcccttaagaaccataagaagtttgaagtgaaaagacttaaagattatctagtgtgggttccaattttactacaagtaaaattaagctgagaaaggaggattgacttgcctaagagggcacaagtattttatagagaaatagattaaaattcaaataattgtatagttaaaaaaaagaaataggactcttttcataatttgaagtttgaattaagctgttttacagtaaatatttttattttctgagctttcaaaaatgtataaatgttattcttattattaatgtcctcgaaagtagaagagcccaagtaatattagtcatagttt

SEQ ID NO: 246058 - DNA, 336 bp, Homo sapiens
gtcccatccatgtacctgccatccaggttaatagaaattacgaatacccctgaaggcccatatatacccctccctcccgatacaaccactatgctgaattttgtggtaatatttccttgcatttatttattgcttttttttttttttttgagatggagtctcgctctgttgcccagtctggagtgcagtggcgcgatctcggctcactgcaacctccacctcccaggttcatgccattctcctgcctcagcctcccgagtaactgggactataggcgcccgccaccacgcccggctaattttttggatttttagtagacggggtttcaccgtgtta

SEQ ID NO: 246059 - DNA, 607 bp, Homo sapiens
agtaacacacattcctttatcctacatgttcagactagtgttaaaagtgacttcagatatttcctatgctcatgttttttaaaaaaaagtccaaccattctcctcaatgaacatgacattaaatcaagctaagtccagtcacatggtctcaactttactcactaaagctagcaggcaagggcctagtgagttgaattagaggtttaattagaagaacaagcaataaatgctaaatgttctgttgcaactgtgtaactttctgtgggattttatgccttgtatcttttttcctgaattccagaccaacggggctgcactagaaccccagaagcagagaattccataactcagactctttgattcagatatttttcttttcatcaccttgagagagcaaataaatcccccaaactacttttcccacctctcaagcttctagaggatattcttgactggaatttgtccatgttcttaaataacaggttacttcacgttctttgtgtttaaataaatgtaattaggcctgtttttaaaaactatggaaaatattaaaaagaaaattaaaatcatctataaacttaccacttagtggcagccacatgaacat

SEQ ID NO: 246060 - DNA, 409 bp, Homo sapiens
gggtgtacaggttaagagcacaggctgagacctgagtccaaatcttggctcacactagcttgatgaccttcagcgagttactcaaccactcatctgcaaaatcggaatgatagtaagagcttacttaaacagtgtctggcacacactaagtcttttataagtgttggctatcattttttctcatctatttccttgcttctggttttgcacactttaccatccacactgccatcagagtgatcacacctctcttcagtagctcccatcatctactgcataaagctgagactgttagctagactgttaggcacctttcccacacgatctggctctgccccacttcccagcctcagcccacatggctaaacaacctgaagttctccaagattcctgcattctcaccctcata

SEQ ID NO: 246061 - DNA, 296 bp, Homo sapiens
tccttctccctctccctctccctctccctctctccccagcccatttaagcttgtagtcagatgtaggactgcgctgtctgaggaactggcccccagcagcaggtggctctggagcccttgacatgtggcctgtgcaagttgagatgtgccttagaggaaagcatgccagagtttgaaggtttagaatgagagaaaaaaaaaccaacaacgacataacctatctcattgataatgtatatattgattacttgtgacataaaacatttgttcaaataaaatgtattattaagattagt

SEQ ID NO: 246062 - DNA, 860 bp, Homo sapiens
tgtttaggaagagcttcgggttttattgtttgttttttccccctcatctctatttcctttttacaatttctggaaattcatgtctaagaattcttcggaccagtctttacacaggtgcaaataagaaagtgcctatccaggtggaccctggatttatgtttattaagactgtatcttttgacaattttgtttttacatttaaaatacatcatgacatgaactttccaacacctgacccggaatttggttcaacagataaaatttaactctcacgtgactccaattactcatcttctattccgtttaaatgagaaaatgctattctaataatggaattttttttttcagtctgtggttagggaaaaaagggattagtcaaaagagaatctgttgagattactccactgaaatttcgtaattaaaaaactatataatcatatttcatgtaggggatcagatattttacctaaaaactgcctagacacttaagacttactaaaaaaaaaaaaagttaaatgttgatcactttaacgtatttgttttaaacagatttcaaagatgttaactgcattataatttatgacagcaaaaaagtgcctaaatatccaataaaggaatggttatataaatgacatatccacatgaaagatcacatagctgttaaaaatcatgtcatgtaagaatattctgatttaaaaaataagaaaatacccagagtataactttaggttaaaatcaaacaaaaactctacaaaaactctaaaaaatcatcccaaaagggaacaacaaaggaaaaaaacttaaatgctttgttaacagtgtttatctctgggtagtgatatgatgtgattacacttttc

SEQ ID NO: 246063 - DNA, 659 bp, Homo sapiens
tcttatcattgacttgttatgttcatgaaggacttggaaaaccaacgctgatcctcagagtaacagcatagatcctcacaagacagtctatgaagctggagccccctgggttgtaaaatgcctccgcaccccgtctctgtttctgaagaaggaagctctgctgagcagctaaacatgacgtgcttgttaagtgtgcattggttaaagaacagatgaaggtacaggctcagtctccaaaacttcattatacaatctcacagatgagtagcaccgttcagcattgagtgacacctactttcccatctccaggtggttagatatcatcatctccaatttaaggcccatctaagaggtgcaccttttctcgatcctgaggctcaagtgtctaaacagcaactgtaaattttctccaatcagtgtttctcccctgtgtggaaataaattcgcatccttgaagttcagctctctccttcattttacaaaaaaaccaaaaaccaaaaaacttgttttaagcaagattaaaagtgaattttctattagcagtaattttatatcactccctgtcttgcttcttttgcactcactgaattgaagagaacgatatgaaattgcctggaaataaaaatgaaagtgcttctcagagccaacaatcacatcat

SEQ ID NO: 246064 - DNA, 396 bp, Homo sapiens
aactgtggaccacccacgccactctgacgtggtgaaacaaaccatggaccacccatgccactctgacgtggtgaaacaaaccgtggaccacccatgccatggacactactcagcaataaaaaggagctgaccactgatgtgtgcaataacttggacgaagctccaaggcattacatccagggaggaaaacatctccgaaggtctacactgcatgaactgtacgatgtgtccacttatgtcacaaaatgacagcattatagagtggtggtggggttcggatgactaaaaaggggtagatggagagagatttttgtggtgatggaactgttctgtattttgtgaccgtggttacgtgaatgtcctcatgtgataaaatgacagaatgaagaaaacact

SEQ ID NO: 246065 - DNA, 356 bp, Homo sapiens
aggaaagaagcctggttcaagtttggctaaagagcattttgttccaattgatcagtggagacaagcagttaggcttgtcatctatgaggcaaagaatgggaatttggagagtgggtgtctggccttctcataggtaaacaggggacatccgtgacttctaagtcatatggggaaggatggttctttgcagtaagccattttccagaaaagccattttccctttggagtaaggggatttcttgacctgcactgctcaccaggatgaggtaaaattcagtattgccagttggcaccatttatgaaacacaccaccttgtaaccactgaattaaatattgcttctgtcatataagttca

SEQ ID NO: 246066 - DNA, 373 bp, Homo sapiens
acaatttttacgtatgtgtataaccatgtacccatcattctgataaagatgtggaacatttctggcatcccagagggttcccttttatcctctcccagtaaatgcccccccgcctccgccccacctctccaaggtaaccgaaccactatttgactgtaagttagttttggctattcttatacacggaatcatgtaaaatgtaccctttcgcgtctggcttccttggctctgctttactcatccatgttctgtgtagtagtagttcattctttgctgaatagaattctgttatatgaatgtactactattcatcttctttatttttgatggatgtttcagtttggggccaatatgaataaatctgctatgaaca

SEQ ID NO: 246067 - DNA, 390 bp, Homo sapiens
gcaccgtcgacattgaatcctcacaaacctgcggggtcagtactgctctcatccccgctttactaaagtggaaaatgaggctcagaaaagttaggaacttaataaaggagatccagctcctgagaggcagggtagtaagtcctactgcatgttactatatcttcttaaagttctacaggtgaggctgggcacggtggctcacgcctgtaatcccagcactttgtgaggccaaggcgggcagattacgaggtcagcagttcgagaccagcctggccaacatagtgaaaccccgtctctactaaaaatacaaaaattggctggtgtggtggcgcacacctgtagtcccagctgctcctgaggctgaggcaggagtattgcttaaaaaaaaaa

SEQ ID NO: 246068 - DNA, 493 bp, Homo sapiens
tggtgaattcaagttttcatcattgtgtagtgactctcctcatagcatagtaattttttgtctcaaagttgatggactctcatgttcatatagctgactcaaccctttgcagatgttgttttgccatgtattgttttctataactttctttgaaacttttttcgttcttatattttaggggtatcacttatgaatatcatatagatttatttttgttttattctgtcaatcttgtcttttaatgagtgagttcagtctactttcaggaattatgattacagatgctcctcaatttacgatggagtcatgtccgaataaacccattactagttggaaatatagaaagttaaaaatgcatttaatatacttaatctattgaacatcatagtttaacctagtctaacttaaatatgatcggaacacttacatagcccctagttaggaaaagtcatctaacacaaagtttatcttataataaagtgttgaatatctc

SEQ ID NO: 246069 - DNA, 981 bp, Homo sapiens
tatgttgtgggaggtccctgaggccgctgaggtcgttcgtgtctgttgaacggctgtgggcgtcttgctgccttgggtagggggttaaaatcgttcttgagaggaacgtctctgtgcgaagagataatgagtttagctctgagaagtgagcttgtagtggacaaaacaaagaggaaaaaaagaagagaactgtctgaggaacagaaacaagaaattaaagatgcttttgaactatttgatacagacaaagatgaagcaatagattatcatgaattaaaggtggcaatgagagccttggggtttgatgtaaaaaaagctgatgtactgaagattcttaaagattatgacagagaagccacagggaaaatcacctttgaagattttaatgaagttgtgacagactggatattggaaagagatccccatgaagaaatactcaaggcatttaaactatttgatgatgatgattcaggtaaaataagcttgaggaatttgcgacgtgttgctagagaattgggtgaaaacatgagtgatgaagaacttcgagctatgatagaagaatttgacaaagatggtgatggagaaataaaccaagaggagttcattgctattatgactggtgacatttaaagaattacaaggataaacactaagaatgttgcagttaccatcttatattctatttttgtgcctggagccatgtgaaaaaaaccaacttagttcttttatcctaaaggaccaaaaataagcatcttatatatctgtattttactactgttaagtttctttgtatgaactgtgttgttagtactcagatagtttagctttgtatttataatagagcttttatataaagttttaaaaattgaatgtgtgatatgtgttctttgaaggttttttaatttaacatttatagtcactttttagtgcacacattttccagactttcgttaataaaatatttattttattagaatttta

SEQ ID NO: 246070 - DNA, 1581 bp, Homo sapiens
tatgttgtgggaggtccctgaggccgctgaggtcgttcgtgtctgttgaacggctgtgggcgtcttgctgccttgggtagggggttaaaatcgttcttgagaggaacgtctctgtgcgaagagataatgagtttagctctgagaagtgagcttgtagtggacaaaacaaagaggaaaaaaagaagagaactgtctgaggaacagaaacaagaaattaaagatgcttttgaactatttgatacagacaaagatgaagcaatagattatcatgaattaaaggtggcaatgagagccttggggtttgatgtaaaaaaagctgatgtactgaagattcttaaagattatgacagagaagccacagggaaaatcacctttgaagattttaatgaagttgtgacagactggatattggaaagagatccccatgaagaaatactcaaggcatttaaactatttgatgatgatgattcaggtaaaataagcttgaggaatttgcgacgtgttgctagagaattgggtgaaaacatgagtgatgaagaacttcgagctatgatagaagaatttgacaaagatggtgatggagaaataaaccaagaggagttcattgctattatgactggtgacatttaaagaattacaaggataaacactaagaatgttgcagttaccatcttatattctatttttgtgcctggagccatgtgaaaaaaaccaacttagttcttttatcctaaaggaccaaaaataagcatcttatatatctgtattttactactgttaagtttctttgtatgaactgtgttgttagtactcagatagtttagctttgtatttataatagagcttttatataaagttttaaaaattgaatgtgtgatatgtgttctttgaaggttttttaatttaacatttatagtcactttttagtgcacacattttccagactttcgttaataaaatatttattttattagaattttaaagtttggtaaatttgtttttattcctagtatctgttaaccctcaagagtggatttcttaaatcttccctttataattttactagtttctgaaacaaaaattgaaatacaattagcaatagagtggcacatttttccattacctaacatttcatcaattttgacattctatattttaatacaagctgactcaatataagcctaattccttttttaagagtcctgtctttgagtttagaaggaataagtattgtgcagatagacccatttatccttgtgtattatgtttcttaacttggtatcattgtaagtatgaaagttaattttcttctgaatatttccttaaacaaattgaatgaatacaatttgaattttctaacttcttgactgagagatttaaattttggaattttgatttgttaaggtaattatcactcaattacatgtcacagtgatgaaaatagaaaactgtaagccacagaaataatttaagtctatgttttacctatatgaaggaacagtctgtgattcaccaggaaatagtagagacacagtttccaagtactggtgggctcttctgccttgtagaagtgtatgttag

SEQ ID NO: 246071 - DNA, 922 bp, Homo sapiens
  misc_feature (744)..(744): n is a, c, g, or t
  misc_feature (766)..(766): n is a, c, g, or t
  misc_feature (774)..(774): n is a, c, g, or t
  misc_feature (776)..(776): n is a, c, g, or t
tatgttgtgggaggtccctgaggccgctgaggtcgttcgtgtctgttgaacggctgtgggcgtcttgctgccttgggtagggggttaaaatcgttcttgagaggaacgtctctgtgcgaagagataatgagtttagctctgagaagtgagcttgtagtggacaaaacaaagaggaaaaaaagaagagaactgtctgaggaacagaaacaagaaattaaagatgcttttgaactatttgatacagacaaagatgaagcaatagattatcatgaattaaaggtggcaatgagagccttggggtttgatgtaaaaaaagctgatgtactgaagattcttaaagattatgacagagaagccacagggaaaatcacctttgaagattttaatgaagttgtgacagactggatattggaaagagatccccatgaagaaatactcaaggcatttaaactatttgatgatgatgattcaggtaaaataagcttgaggaatttgcgacgtgttgctagagaattgggtgaaaacatgagtgatgaagaacttcgagctatgatagaagaatttgacaaagatggtgatggagaaataaaccaagaggagttcattgctattatgactggtgacatttaaagaattacaaggataaacactaagaatgttgcagttaccatcttatattctatttttgtgcctggagccatgtgaaaaaccattagtctttatctaagacaaaatagctctatnttcgggttactagggagtttgntgaggtgngncaaagtagtgtttaaaaacattaagtaaaggggggtgtggggttatacaatagtattaggcgaatcagtgtgatttttttaaaaaaaaatggcgcgttactgggggagtgtttgtgttggagggatttattatcaatagtttaatg

SEQ ID NO: 246072 - DNA, 897 bp, Homo sapiens
tatgttgtgggaggtccctgaggccgctgaggtcgttcgtgtctgttgaacggctgtgggcgtcttgctgccttgggtagggggttaaaatcgttcttgagaggaacgtctctgtgcgaagagataatgagtttagctctgagaagtgagcttgtagtggacaaaacaaagaggaaaaaaagaagagaactgtctgaggaacagaaacaagaaattaaagatgcttttgaactatttgatacagacaaagatgaagcaatagattatcatgaattaaaggtggcaatgagagccttggggtttgatgtaaaaaaagctgatgtactgaagattcttaaagattatgacagagaagccacagggaaaatcacctttgaagattttaatgaagttgtgacagactggatattggaaagagatccccatgaagaaatactcaaggcatttaaactatttgatgatgatgattcaggtaaaataagcttgaggaatttgcgacgtgttgctagagaattgggtgaaaacatgagtgatgaagaacttcgagctatgatagaagaatttgacaaagatggtgatggagaaagtaagttttaagtgaaacgtattttccaggttttcctgatgctacacatgtaatacatttttctaaaaccaaatgacttgcaagacttttttgtaaacttaactgcttcttgtaatggaccttctgtctaaataattcacatattcaatttagaatgaagcagatctctaaaaccaattatacttcaagaaggtccttcacttttctctgaaggtgaaaccaccaaaatttcagcctttcaatataatttcagtctttaatggcttctccctcaacctacatgctaagttctaagttctattgattttccc

SEQ ID NO: 246073 - DNA, 741 bp, Homo sapiens
tatgttgtgggaggtccctgaggccgctgaggtcgttcgtgtctgttgaacggctgtgggcgtcttgctgccttgggtagggggttaaaatcgttcttgagaggaacgtctctgtgcgaagagataatgagtttagctctgagaagtgagcttgtagtggacaaaacaaagaggaaaaaaagaagagaactgtctgaggaacagaaacaagaaattaaagatgcttttgaactatttgatacagacaaagatgaagcaatagattatcatgaattaaaggtggcaatgagagccttggggtttgatgtaaaaaaagctgatgtactgaagattcttaaagattatgacagagaagccacagggaaaatcacctttgaagattttaatgaagttggtgtgtattttaatagtctttgtaatcagcagctgttaggaaattgtctgattaatatcactttttaaattttaaattctctaggttatggaattttcttatagaacactggtgtataatgtgactcttactcagttttgttttgttggttttttttttcaaagaaaaaatatggcttggctctgagatttatagtttggtctttggtttggttgtgaagattctaaccaaggaactattgtgtagctttttatagaaagatgcttctccaagttgttgtatttatattatgtgataaaacttgaagggtgatcaaaaaattattttgccttaataaaaccagaaaa

SEQ ID NO: 246074 - DNA, 987 bp, Homo sapiens
tatgttgtgggaggtccctgaggccgctgaggtcgttcgtgtctgttgaacggctgtgggcgtcttgctgccttgggtagggggttaaaatcgttcttgagaggaacgtctctgtgcgaagagataatgagtttagctctgagaagtgagcttgtagtggacaaaacaaagaggaaaaaaagaagagaactgtctgaggaacagaaacaagaaattaaagatgcttttgaactatttgatacagacaaagatgaagcaatagattatcatgaattaaaggtggcaatgagagccttggggtttgatgtaaaaaaagctgatgtactgaagattcttaaagattatgacagagaagccacagggaaaatcacctttgaagattttaatgaagttgtgacagactggatattggaaagagatccccatgaagaaatactcaaggcatttaaactatttgatgatgatgattcaggtaaaataagcttgaggaatttgcgacgtgttgctagagaattgggtgaaaacatgagtgatgaagaacttcgagctatgatagaagaatttgacaaagatggtgatggagaaataaaccaagaggagttcattgctattatgactggtgacatttaaagaattacaaggataaacactaagaatgttgcagttaccatcttatattctatttttgtgcctggagccatgtgaaaaaaaccaacttagttcttttatcctaaaggaccaaaaataagcatcttatatatctgtattttactactgttaagtttctttgtatgaactgtgttgttagtactcagatagtttagctttgtatttataatagagcttttatataaagttttaaaaattgaatgtgtgatatgtgttctttgaaggtaccatttattattggggacatattgagtgattaaagttcaatgcgaagttccttatgatgagactttcttactaattaaaccatcacgtatt

SEQ ID NO: 246075 - DNA, 1055 bp, Homo sapiens
ataaattggagattcttactatatttataattttggcaaactaaaaattagtccttatccatgattattttctgcctttacatctatatagttactggattactttggtgattaagattacatctgtaatcttttcaaattgccatttttattgatacctttgaggtatggtgacctggttttaattattctttaacataggcttttaagtatataaaagttcaaatctaatttacatgcatgatatgttcaagcttacttgtaaaggaaggatttgctaaatgaactagtagaataaagattataaagagggttgtttaaagaaccttgaaatgtcaagcatttaaaatgttttagcaagtatgtacaaatatgactgtgattgacttttttggtaacattatcttttccccagttaatattatagaatactaatttgtaatgtttatcacattatatgtatttttgcatccaagaagttacatttaataaacatgttccacttcctaacaaagaagtaaaagcaaaaagccatgtcttaatgtaataattttgcataatgtaaaattttttaaatacttagtgtaaaatggtagtcgtggattctgaaaaaataaaatgtttatatttctgactatttcattttctttcttaccacagtaaaccaagaggagttcattgctattatgactggtgacatttaaagaattacaaggataaacactaagaatgttgcagttaccatcttatattctatttttgtgcctggagccatgtgaaaaaaaccaacttagttcttttatcctaaaggaccaaaaataagcatcttatatatctgtattttactactgttaagtttctttgtatgaactgtgttgttagtactcagatagtttagctttgtatttataatagagcttttatataaagttttaaaaattgaatgtgtgatatgtgttctttgaaggttttttaatttaacatttatagtcactttttagtgcacacattttccagactttcgttaataaaatatttattttattagaatttta

SEQ ID NO: 246076 - DNA, 399 bp, Homo sapiens
ataaattggagattcttactatatttataattttggcaaactaaaaattagtccttatccatgattattttctgcctttacatctatatagttactggattactttggtgattaagattacatctgtaatcttttcaaattgccatttttattgatacctttgaggtatggtgacctggttttaattattctttaacataggcttttaagtatataaaagttcaaaaaataataatttaacttctttttataattttattatattttcattctttagaaatctaatttacatgcatgatatgttcaagcttacttgtaaaggaaggatttgctaaatgaactagtagaataaagattataaagagggttgtttaaagaaccttgaaatgtcaagcattt

SEQ ID NO: 246077 - DNA, 171 bp, Homo sapiens
gaaattaatctgtaacctaaaacccttgtatctgccctgaaaatatgtctttctaatggaaaatttgacagagtgttccatctgcaaagagcattttatatgaaatggatatctgtgtaactcaactgctgctatctggttaaatagcaattaaacacctcaagactcctt

SEQ ID NO: 246078 - DNA, 489 bp, Homo sapiens
tgaaacgtcatgccaaagtttattaggaataaaaagttataactattatatataagtaggaatgctgtataatctataaaaaaatgaggttgtcatgaggattcagacaagacaatgggtgtctgaaaagtgtcttgaaaactggaattattcaattagaataaagttatatataacagttgggataattttctggatgaagatatgtgaaaatcaactttacgaagtgattacagtaagtactgtgtgagcatttcatatgacctgcaaagagaagaaggaaaccatgtgctttgcaggaggtaaaatgctcagctgactgagatgctggaaggtcttatggggtcatatgaatgggcaggaaaatagaagatgacctttgatgcagacaaagccattatgtgtttagggaaaagtagcccaaacaacatagaaagtggttgcctctgacccagagtgtataaaccagagaagaattttggtcttcgc

SEQ ID NO: 246079 - DNA, 482 bp, Homo sapiens
acatttgtgcatctttattattattggtgtcatgtgcaaatcctgatagtagttaacatttattctttttaatggcttaaaatttttaactgacaaataaaaattgtatatatttatgaagtacaacatgctgttttgatacacacacacacgtagatcatccttcattgaagcttacaatagagatgcgtgtactctgaccttccgattagtttttagtcctccactcttaatcgtgaacaaaaggattaccagacataagaggaaagtctctaaagtggaagatattgatcaacacaaattaacaggaaaaacttggagttagcaaaatatgaagaaggaagaaaactaagaaatttttttgaaaatcctcagaaattacaaggttattaacaatcgtgttctcttctattgtacacactgaaggcttttgtttactacagcatcacaccaactctcaagatgccctacgctttatttaa

SEQ ID NO: 246080 - DNA, 523 bp, Homo sapiens
aaatatagacatatagagggagaaggtctgctgacatatttatgactagttgaatcttaagcacgtatgaattgcttactcacaaatgagtaccataacatttgctgaccgggattggcaagataccttaccaaatgactatgttagtaaatacagtcatgcattacttaacgaaggggatacattctgagaaatgtccttaggtgatttcgtcacggtgcaaacattatggtgtacaattacacacacagtacagactgctacaaacctaggctacatagagtatggcatactgctcccaagctacaaacctgtacagcatgttacagtactgaatactgtaggcaactgtaatacaatggcaagtatttgtgaatctaagcacttatcatgaatggagcttgtaaaactggaagttgctctgggtgagtcagtgagtgagtggtgggtattgtacactactgtagactttataaacactgtacacttaaactacactaaatttatttaaaaattcttcaat

SEQ ID NO: 246081 - DNA, 313 bp, Homo sapiens
gcggggctgggagggatgacctggtctgtcctctgagccaggcactgcacttggaacgggcttcttgaacgcaaagcccagaccaagtgtggcagaaacatgaaaggacaggcaggcggctgctgtgggcaggagcaggacgcccaggcctgtccccacccccgtgacccagagcctccctgggcagtgactccgggatgtccaggagcttcttctctacctcacaggactggaggggctgtggtgagacgcatcctgtgagggctgggctggccacaggcagctccccagggtgcccaccgccatctgctcc

SEQ ID NO: 246082 - DNA, 295 bp, Homo sapiens
cctcccatccagctcggcagcctggtgacgcaggaggccccggctcaggacagcctgggcagctggatcaactcttcccctgacagcagtgagaacctgtcggagatccccttgtcccacaaagagaggaaggagatcctgactggcaccaagtgcatctgggtgaaggccgcccggcggcgctcgcgggccctgggaaccgaggggcgacacctgctggcacccgcgacagagcgcagcagcctgtccctgcactcactgagcgagggcgacgatgcgcggccaccaggcccac

SEQ ID NO: 246083 - DNA, 117 bp, Homo sapiens
gtggtggtggtgggtgataagcaatggtcaggtcacagttaccataacccattgacttgggggttttgcagggtctgaagtgccatcatacccacttctttccatctgggaccagta

SEQ ID NO: 246084 - DNA, 367 bp, Homo sapiens
attctctctggttagttataaagaggaaagtagagagatgtgctctagcaagcctggaagaaagcaagcatcatgtgaattgcctagtggaaccacatggcaagaaactgggtagcctctgggaactgagtaattctcggccaaaaactagcaggaagatagggacatcagtcctatagcttcaaggaaatgaattctgccaataatcagtaagcttagaagaggatccccaacgacagatgagaactgcagccttgaccaacatcttgatttcagctcagtgagactctaatccaagaatccagccacaccaagcatagacttctggtttacagaaactgaaagacaataaatatgtcttgtttta

SEQ ID NO: 246085 - DNA, 485 bp, Homo sapiens
atctccattttacagaagagattatagaaaaagtagtaactttctcaaggtcacacagctagtaagtagtgagtctggatttgaaccaagttgtctctgaagattataggtcctgtgtggtccatgaaggacgcagagccttccaacacccacagttaaatagctacacatttgttgagcctctctagatgccagccctccacgaggtcctgtttaggattcagagatgaacatgacactatggaagtcatcaaagtgcttccaatctattggaagtaaataaaaactataaaagacagactggaagctgtgctgtcaagaaattcaagcaaagtcctctgcaaattcaagattggcacctctatccactggagtatacgttgtttctttgtagcagcactacaaattggggaaaaaaaccactttggcaatctactcataaatcctattcttcccatatccaggaacctcttgggttctaagta

SEQ ID NO: 246086 - DNA, 479 bp, Homo sapiens
gtaggctcacagttctggaagctgtgaagtccaatattaaggtacagacaggtttggcaattctgatttcaagatggtgccttaattgctgtgtcctctgaaggagagaaaagcttcattcccacgtagtggaaggcagaaaggcaaagaagcaataggaggtcaagcttgccccttttgtaatggcattaaacccacccaagcaggcaaaaccctcatggcttattgtttcctaaagagcccacctcttaatgctggtataatggcaattaaatttcaacaagagttttggaagggacagcaccccacacaaggcagaatgtaagtacatgcaaactgtatgcacacacctctttatctctggtcataagaggtaggagaggtcattcctcaccactgcctcccctacctcctgtagaaccatgatatcccacaaattcaacatggatatatttagttataaaatttacaatccatgg

SEQ ID NO: 246087 - DNA, 405 bp, Homo sapiens
tcttctgtgattcagtaagctgattttcttttagaggtggtgataggttctgagataaattaacataatcacaaatcaaacgatttttccatccctaaaagtacctcccctttgaaaaaatcacgatcattaccaattaaaaggatgcaataaaaacatgtgagagagaaatcttaggacattacattcaccatcattgtgatctggtcattgatacaaatttttcctgctgtgtttagtgattactacatagatgaccatgttgggtaataattgaatttatcggtgtctgtgttgtaaaactgaatagctaatatagcttaatgaaggaagtaaacttatcaaaccattgtcgtattgtttttctcttctgtatatcattttcctctaaataaaagatttaca

SEQ ID NO: 246088 - DNA, 330 bp, Homo sapiens
cagagcccaggaaacaaggacgcctgcacaggcccccgagcacaaggactccttcctcctctgctggcagcatccggtggttaagtgacccctgcccgctaggccagtgacccggaggtcagcacgggctggcatcagtggggacagtgaagctgttgctgccgcctggccagtcaggcctcctgcaggtctcatggccgctccacagtaggggtcagaacccgggagctgtcgccagccaccccccaccccgcccttgcggggacctggctgtggccgcggagctcccttttctagccctggtcggtttcagtgtggtaggagttatta

SEQ ID NO: 246089 - DNA, 399 bp, Homo sapiens
cacaaatcaaatttcctactattcagtttcttagtaacaaaaatgaaacaaaatttagctatcccaagcaaatttaggaacataaaacaataaccaaacagacggggtaaaaagtaactataagaacccccaggctgggcacagcagcctgtgcctgtagtccaattgtttggcaggccgaggcaggaggatcccttgaacccaggagttcgaggccatcctgggcagtctagcgagactatgtctcaaaaccaaaccaaacaaaatacacaacaacaacaaaaaagtttttgaagaaccctcagaaacataaattaggaccctaagctaagtagactttagtgcaacagctctgcaatttacaaggcaaaaattacaaccctgaaaagcaggatgaca

SEQ ID NO: 246090 - DNA, 402 bp, Homo sapiens
taatttccaaggactagaatcccagcttggttggagttcagagcctgagagcagaattttctccaggacaaggcagaaggaacttgcgggaagcttcccctatcacccctgctccccacacctgtagagattaaatgaagatatctgtttcttaagcacctgtacccccaccacagcctctggaatgtgataggcatgtatttgatgaatgaatgaatgaatgaatgaatttcactcagctgactctctctaaattccagcttccagtctgcctcttctgttgcacagaaagctttgagaacccaggctaggtttaccagttgtttcttctgagtctaacacaaaagacatgcttattaatagctgtggaattgatttgaattacatgcaaactccctcaga

SEQ ID NO: 246091 - DNA, 625 bp, Homo sapiens
aggtattgtgttttcagttcttaaatttccatttttaataagattcttcatttgttcattcatatacatctttttaaaaaatcaataaatatctttataatagctgtattggaataattatttgctaatttaaaactctttggatctgtttctattaaccacttcctctccccaggctatgtttatattttcctgattctttccaattattttcctagttactgactgtatgctagacattttccaatagttttctcaattattgatcatatgctagacatttagaaaagtacattattgagagtcagcattctgctatttttcaggggtcagatctcattttttttagtagacagttcaattactggaagatcagcctaatttttttgagactggtttttatgatttgttaggttgagtctactacagtctttaatctagggctagagtggacttaatcctaatgtgcatctttttggtttctttattaaatgtaagggacagcctgtgagctttctccattcttattggtcagaatttctatgtctcccagcattgtgtggcttctcaaatcacatttattttacatctcccctcgtgccgctcgtgccgaattaggcacgag

SEQ ID NO: 246092 - DNA, 322 bp, Homo sapiens
tcacggcagcagcaaataaacaaacaccttattggatggcattatcaacattttaccaataaggaagcagaggcatagccatttccccaagctacacagcaattaagtagcagtagagcccagtaaagttcagatttcccaattttaggtttttctacattgtcacagaaatgttttgagttgctatgaaaaatgcttgaagctaggctgggcgcggtggctcatgcctgtaatcccggcactttgggaggccgaggtgggctgatcacgaggtcaggaggtcgagaccagcttgaccaacatggtgaaaccgtgtctctac

SEQ ID NO: 246093 - DNA, 480 bp, Homo sapiens
ccagtgtttaaaataaatcaactgtggttaagacatgggggtcctagcacacagcaaaccaaccatgttctgtaatcacaggtgattgaggtagcctgcaatttgtaaggggtactcgggatttctaagttgaaccacttgtcaagaatggaaaaaaaaaaaaaagaactttaacagacagatgatcaactttatcccgatcaatcacccagagtcttctggtggtactgttgcattaacaatactttaatgtactaaggagtcttcacagagacatgtttagtgattattacagacacactggaagaaaatcattaatcctatcagaatgttcaaaggtccttcacagttacagaggaatatctctccttacccagaatcattgacaatttcagaactagtccagataaataaacatgaacaactaaagcaaagtacaagagatatgaattctcaagaatgctgacgcattccatggtt

SEQ ID NO: 246094 - DNA, 464 bp, Homo sapiens
tgagtcgacaagaaaaatcaccaatgtggaaagaatgtttgagaaactcagaaaaaggaacagactaggaatgaattcaaggattgcccaagccacatggcccaagccaccaccagattgcccaattgcctttaaaaaccaatagaaagacatgaaggtagggagggcaggaggcgattttagagggagccattaggctgatttaaaggggtggagtggacagagaaagatgcagatcatctttaatgaggatccagaaccacctggcaagagcctcaaaggagaaggaaaggagggcccaagtttagagaagtccgtgtcctacttctgtatcccaccattgtgcacagttacctttcctaaggagcccaagtatagaatcagagaagccagaatgagagcttggtccaaaaatggagacatgagggcttgatccagatttgtatggacctaccattgattct

SEQ ID NO: 246095 - DNA, 355 bp, Homo sapiens
tactactactaaattcgcggccgcgtcgacgccattcccagctgtccccgtggatgcgttatatatttagctgatctcttggaagcgagacgcagcttcgaaacaggtgagcagatttcttaggaaaggcacatgagacatgaaacttaatggacaggtgttctgattttaaaaagagggcaggctctcactcttgtatttggcttttaaaaaattctcacgtcggccgggcacggtggctcatgcctataatcctagcgcactgggaggctgaggggggtggatcaattgtgcctaggggtttgagaccagcctaagaaacatggcaaaacctcaactctaccaaaaaaaaaaa

SEQ ID NO: 246096 - DNA, 731 bp, Homo sapiens
agatacatctgctgtttggaatgagctgttttctgtttttgtttttgtttctgtttggaatgagctggtttaaaaacagcatttggggtgatccatgataccctgtccctttgctgacaagctgacacttccttttttgggtctgtagagtgcagttagggcccagagttctttcgagcaaatacttttgcaccacttgtttcagggcaggaaatcactctgtctggcacagctgtccgcatgttttattccagcaaagaagttttcactgtcaaactgcttttcacttgggggggagaaacatgagtctaaagtttccatcgaagcctctgctgggctccatcacatgagcaggtgggactgtggctggggaagggtgtgataacagctttgattttatgcaacagccattcccagctgtccccgtggatgcgttatatatttagctgatctcttggaagcgagacgcagcttcgaaacaggtgagcagatttcttaggaaaggcacatgagacatgaaacttaatggacaggtgttctgattttaaaaagagggcaggctctcactcttgtatttggcttttaaaaaattctcacgtcggccgggcacggtggctcatgcctataatcctagcgcactgggaggctgaggggggtggatcaattgtgcctaggggtttgagaccagcctaagaaacatggcaaaacctcaactctaccaaaaaaaaaaa

SEQ ID NO: 246097 - DNA, 997 bp, Homo sapiens
ggcccagcccggtggctcacgcctgtaatgccaacacttgggaggctgaggagggcagatcacaaggtctcgaactcctgacctcgtgatctgcccgcctcggccttccaaaatgctagaattacagacgtgagccactgcgcccagccaagtttgactagtttttaaaagtattgtatgacgagatgccaaaatatatgagacactcactgtaatctgcaagaaaaaagccatcaaccccatataaaaaacaaaaagcaaaaaacaacagtgagatttccactactaacattgctctgtattcactgaatcagggcaaatttcttcccattggtcccttttgaatgtggtggaattcattttagattgtaaaccaaataggagaaagaaatgaattaggtgtgttagcctgtaatataaaattgctttttgtttaccaagtttggtttgagtgttctgaaagctgattaatgaattagagcaaaatgttaacttctcttgttaatggaaagaaacttgatgagtcattttccctggttaactgggactaggagcgatggagaagatcagagattgtggtaaatgtgtgtgtgtgactcattcctccgggaattcaagcccagactttggacttacacagtcaatagatctattaacagtgcctcaattctatctctgatgaacaaagtcagagatgacagcttctcttgttaacaaattaggcccttggaaaatactcagcgggtgaactttctttagtatttgaatcactgcaataggttcaaagtacatctagtatattacagttgatgaatagagataaataataggactttttttccctgattaaaaaaccctgagtgcaaagtgaaaaagactcacgttccaacagtaagtctaaaggaagaagggctttattgttgtttacctttgattatttctttttaaaaataaataatgctacattattttttatgatttaaaaataaatcatgct

SEQ ID NO: 246098 - DNA, 441 bp, Homo sapiens
gataaataggctggctgactgtgagtgatgctgacgggcaaaggacagagacaccaggaaggagaacaggacacgaaagataactgtctcagcccttggggagtttctgacccaggaggatgggaacatcaattatcaatagttacagatcattaaataattgcaagtgtgaggcgcactataaagaggaggctcagagtccccgcatgctcacactcacacctggccacagacaggtgacacccctggcttgcccaggccagcgggtctgcaatgaggccaaggacctgggctcttgagaagttttaagtttgaaaacattgctttttaagcttaaaacaatgaaccttaataaaagtaaacacttccattgagctttgaaacacttaataggagttaaaagtaattaggctaataaaatagtcttttgttccaattcaa

SEQ ID NO: 246099 - DNA, 336 bp, Homo sapiens
gggaaaaatgacaaccctctgtattttcatttttcaatttattgtctacataggttttattattttggggacatgtatatacaaaatgaattttcatgctttgctcaattttctttccatgtattttagtatgtgttttaatttctgtggtttttatttctttcatatgccctgatgtcttttatttcaggttatacattttttaattgtaagacaaatctttcatttataccttctgatttttgttgtgcctttgtttgtttcatcttgatttggaaggccttgcatgattatgaagtactaagtttcatttaggaataaagttttgttgtttaa

SEQ ID NO: 246100 - DNA, 416 bp, Homo sapiens
gttgaaatgttgaagtaggattgccattatggaataagtatcttgcaagtttaacaaataagagggacagtcttggtcagttaaaatattttagacttagtgtcttcgttttgaaagtatcaagatcattttcccttaccctcttaagcttaaacttgtttcttgcctgggattcctgatttaaagttaggaattaaaagaatccagttttcttgttttttcatgaggatataagaatagttaactgattgtcccattaaaaattctgaataggtattttttcgtagtcacagagttcacaaaagatagtcagatttttcatgtgcagtctggaacttatttgtaagctttttctaatgataagattatttcccaattttttttttttttttttttgagacagagtctggctctgt

SEQ ID NO: 246101 - DNA, 787 bp, Homo sapiens
aatacagaaaaaaagagcaagacataaaaggggaatgtaaggcctggatttggtttagcaagatgtctattaaaatagaaaggactcagttcataagaggtcgggcctctggacctgaaaaaaatccatcctaaattcaatactggataacaggaaggcaaggtgaaaaagaggaagggaaaatattagcaaggttgaaatacacagaattgaaaatggcttaagacacttctgcattggatgtcacccatttaaacaatggacaaatgcagtgtgagagaagcaactcccaggaaacattctgcgtatgtggtggacgttccctctggcatatcagaatcacatccagcgaaccttgatccatttctcccaattttcttctaagttgtgggttgaattctgacctgaaaaacgtcagctggcaatgacactagaactgtgtcaaaagaatataatagaggataatattatcagactctgcactcaccagcctattcccaactcacagaaaagcactggtcagaaaaactagaacatttaaggcacagaggccaaggcagcaggatttcttcacaaaacaaaggaaaatgaggctgcaaccaaagtaggttatcgggcggctcattggttagtgaagcaaggaaagctgtgcatcaacggtgagttaatcaacagcagcaaccaaagaggcgtgtccagagaatacacacttgtttctcacaattagccttttggggagaacacttgctagaggagttaaggacactgggagcaccctcaacagtct

SEQ ID NO: 246102 - DNA, 307 bp, Homo sapiens
aagagcgaaactccatctcaaaaaaaaaaaagcaaggaaaaatggcatcatgaatgccatatcatatctctaataatgtatcccagtgtaaaagaaatcaacagttaccagaaaaggaattcaaaataatgatattacggaaactcagtgtgacaaaagaaaatacatgtagacaattcaacagtctcataaaaacaatacgagacttagataagaaattcacaaaggggtataaatcataataaaaaaataaaaaccacacagaaatcctgcagcttaattactcaatgaatgaaataaaaaataa

SEQ ID NO: 246103 - DNA, 456 bp, Homo sapiens
cttcgtcaaaccacacttgcccatattggcacatagcttgatgctacagccacacctcctctgtttattatctacttagtgcttggtaatatactgtgtactatgagtaccctctctgggaaccccacaataaccctttgatgtggtttcaaacccattttacagatgaggggctattacagaacttgcaccaggtcctcagaaaccaagtgagggagttgggatttgaaccccttcacctgaacacttgcacctgcctgcagttaatacatcacattggagcagataacctgccacatttcctggagagcagggttctctgctgcaactgtgctccccagggaacttttttttttttccaagacagactctcactctgttgcctaggttggagtgcaatgagctgagatcgcaccactgcattccggcttgggcgacagagtgagaccctgtctc

SEQ ID NO: 246104 - DNA, 341 bp, Homo sapiens
tcgctcttgttgcccaggatggagtgcaatggtgcaatcttggctcaccgcaacctccaccttccagattaaagcaattctcctgcctcagcctcctgagtagctgggattacaggcacgtgccatcatgcccggctaattttgtattgttagtagagatggggtttctccatgttggtcaggctggttgtgaactcccgacctcaggtgatctgctcgccactgcctcccaaagtgctgtgattacaggtgtaagccaccgcacccagcctagaatattgcaagcaaaggattagattattttcatcatgcagtacagctgtcaaaagaaacagagatgg

SEQ ID NO: 246105 - DNA, 343 bp, Homo sapiens
ggcctgcggttaccaaggcgacgaaactttattgacagctctgcctggctacaaagggctcctcagtctctctccctccctccccgtttacaccgttgcgttttgggagtatccacacgcactctgtgggaccttcccgcgatatgaacggggtcggatggagggaggggaggctgagggaggagtggggacttttgagacaagccctgactcctggggcgctcccctggggcaccccctaattgggatcaccccccctacctcaatcctagaggcaaacgtaactaacaattcatcataattacgccgagaataataagctccacactcagaacaggcggtc

SEQ ID NO: 246106 - DNA, 348 bp, Homo sapiens
tgaagagtggtgtgaggattatggtgtttaatgtccaccacaatgcctactgtcttatagaagctgagtgggaactaacgctatttctacttatttttgacaagctgcacgtgacagtgggaaaagtattgtatttggagtcagataataatgataacaaccacaaactactagcaaatgcttacacaatgcttttctgtgtggtaggtctttttccaaatactttacaaatactaattatttttaatcttcacaacaaccagaggtaggtgctggttatcatgcccatttaacagatgagaaaagtgaggcatgaaggttaagtaaatagatctctacagaagtatt

SEQ ID NO: 246107 - DNA, 557 bp, Homo sapiens
aagcctggccaacaccttgattttagatttcttagatcctgagcagagaactcatttatactgtgcctagagttctgacctacagaaaccatgagatagtaaatgagtgttttaagctgctaagcttgttttattttttaaagcagtcatagaaaactaatatattgtgtgactttggacaagttacttgatcaccctatgtgccttactgtcattgttaaatggagagataacagcacccacttcatagggtatctaggtggattaaatgagtgaatacatggaaaatatatgtggtacttggtaaagcatcaaatgttggccaataatagtagtagtggttgttataagaactcattgtaaagtagaaaatgaaaggaatttccttaaaatgccaaaagatgattatcacaaacctatagcaagcattagacttaatagtgaaactttgtaaggactccactaaaatcagaaggcacataaggatgccagttgtctttacaataaaatattgtatttgtggccctggccaatagaattatatgagaaaaagaaat

SEQ ID NO: 246108 - DNA, 1310 bp, Homo sapiens
caaaatcgtacaaagagtcgaggaagcctattctctcaaaaagaattctatttgactgagagtccaaggggaaagtcacacctgcaaagcccatctatctccatcggtagtatgaagggagaaatctggtgaccttcttatgatttctttttctcaagtctatatgtaaggacacaccaatatagttaaaagaaacaacacagtgaaaaaagaagtatttttttttctttaagttctgggatacatgtgccgaacatgcaggtttgttacataggtatacgtgtgccatggtggtctgctgcacctatcagcccgtcatccaggttttaagccctgcatgcattaggtatttgtcctactgctctccctcctcttgtcccctaccccctgataggccctggtgtgtgatgttttcctccctgtgtccccgtgttctcattgttcaactcccacttatgagtgagaacatagtgtttggttttctgttcctgtattagttggctgaggatgatagtttccagcttcatccatgttcctgcaaaggacatgaactcatccttttttatggctgcatagtattccacttggaaccaacccaaatgcccagcaaaagaagtcttattgatagtaatgatcatgctttcctagggaactcccacaattctcaagttctttatggtttttctgacttctgacttttttctatactcacatggctttatactgttttccactgcagatgacaagatttaatgagaatattgtcaaagaaaaatgtattcaggaaggagaaggaagcaaacaccttttaaaaaatattacaagaacgaaagatctggtaagagggtcatgtaaggaatcactgagcttacagaagacatttagtaaacagaaaaccatctgaaaagaaatcatgatagtatttctgtgtgaaaaagaaagaaggcttatctgtgtaacccttcaagacagaactatgcctaagatttggcataatgcaaagagactttggtttattaaacaacagagttgtctaacattagaatatattggataagtaaggagcgagcttttcaacattgggaatattttaataaagactaaatgagtccttgtcaggactgttggctaagggaatgtctgcttggactgatcattgaacaatctttccaactaaaagcttctatgattctctaagtagcaatcagcaccgacagttatgattaattttttcaaaataaaaaagttggaagcaaataattaaatgtaccccaaattgcctttaagtaaaattgttcattgttcaccta

SEQ ID NO: 246109 - DNA, 595 bp, Homo sapiens
caggaagcctggggacccagcgcctgaccagaacttcctcgggggaggctgcaggggagcaggcgcatcctgcacagaacgctctagagcgcgcaggccaaagcaccaggctgctcctgacacgtgctgcaagagggtccccgacccgggggtccagaccctgcacgcatgatggggaaggtggaggcttccccctcagctccgcggagagaagctgacactgccaggctggaaccttccattccggcccagcctcttcctccctcgctgtgccgaggagggatctagaagggactttccagagagggttagcgtgcagggtgtggaaatggaataaaagcatatgcaaataggccttagctgccttcctctaccccagcaaataagagtctctccagaaagatgctctttctccaagacgcttgaccgctcttcctttcctggatggcaccagcagggccgattggagtggtaaaccctgggccggaaggcatgccaaagggtggacaggatggacaggagacagtagcacaacgaggagggggagaacagcggctgaattggaaatgataaaataaaatgaaattttaggaac

SEQ ID NO: 246110 - DNA, 455 bp, Homo sapiens
tcatggggggatattttatgaataattttaaccttacatgttaaactggtcatatgcagttgaaaaatgtcaaaaccaaagcttgtacttgttttcttttcaacatgcagtttagcaataatggttaagagcatggactctcagaagtcaaactgccggagtttgaatactggttcctcctctccctttccgcctggttttcagaatgttgcttaaacattctacctttgtttccttgtctgtaaagtggagataataatagtacttatttcatagggttgttgtcagggttgaatgagctaatatatgtaaattcttagaatacatggtaaactttaagtaggacttattatcatttatgactaggttgtagatttaattttttctccccccatccatcctgtggtcaaagactaaattatttaacagtcatttacatcccccataaaaaaaaa

SEQ ID NO: 246111 - DNA, 349 bp, Homo sapiens
gtttccactaaaaattttccccataaagtaacaaatgattgcattcttgccagctgatgtaagcagatttgtttctggcctgtttagtagcacttcctcctttgcgaagttctctccttccttgcttggtatttgtaattcagcccatttgattttccaggtgcttctggcttctcaggctcccagtctctccctcatcctttaaagataatttcctcatgattctaccttcaaacaccctcccactctctttctactccctaatgatcttacctgcgctctgaaaacccaaatctaacactggtcaatccccaaacttccagacgttttgaaatcttccctagtggac

SEQ ID NO: 246112 - DNA, 426 bp, Homo sapiens
aaacataattaatggaaggatcatgtgcatggactatcatcttatcagtgatgataataggcctggttgcctagatctttccagtcagccgccatgttctgtcagcatagctttcataatgtcctcttcctgtcattaacaatgtctttgggtttctgggttttctgtcctcaaattcatcctgaacaccataactaggtcgttcatcctggagagatatcttggtactttgcctcccaatgtttaaaggctccctattgccaatgatgaagtcctaacattgtatcctgacatctgcatccctacacagtatgatctccgctcatgtttatgatcttctgtcccactcttcttccgtgggaaccagaccattgagctcttgggccttcagacacctgtctgctcacctctctgctcagagttctt

SEQ ID NO: 246113 - DNA, 558 bp, Homo sapiens
tatttgttcatttaatatttattcattgttaatgaataaattaacatttagtaatttattaaaatgcatatattcattaatccatttaaacgttaaaaataacattttattataaaaataacttttttaaaaaatccaagtgagaagagtgacagtgttttacatttttgcaaatctcttgactgtccggcttaatagaagacagctggattctcatatcggcttctgcattcaatcagctgtgataatgttgttttggataaagtatgcgaaggaaacccagcctcacgtagttattttgttggaaaagggaggaatattttaatagtcttttcagataattgtgaatattcttctttgacattataccaaaactcaaccaatagtagattactaaggttagttgcaatgtggaatctgaaactatatcaatgaactttttgtgctcagttatgttaaaattcagttatctggcttgtactctgaatagatcttttgctcatgcatgattttgaaataatatgcatgggtcatttggaaaatattgcttcactaagt

SEQ ID NO: 246114 - DNA, 442 bp, Homo sapiens
cactagtacagcttaggtcagttagaattctgcagaaagacttcaggcagggctgagttttgtcttttgtggactggctatctgaatttcaagatgaacacaccacagataacgaataacaagcagtggcttttggcgacgctacatggcagtatagtacactggcagccttgtttcttttctattcttttttttacattttctcagagcagtgctatatcattgtgtttatttcctagaaaacattgagaagtattagggttttctttttttttgatccagtttgagtgacatatcttgaatatagaatagacatatgtgtagtattttatgtgaacaagctgaaaaggaagacaaagggtaagaaaacttaggtaaagggaaggaaatggttggagaactttttacaatttctgaagacatgaggaccttttttataagc

SEQ ID NO: 246115 - DNA, 568 bp, Homo sapiens
attagtctggctttaaacttaaaatccacacactgtcttattttgacaactgtgcaaaaaatagaacacaggaaaagatagcccatggaatgtgagaaaatattgcaaaacatatatctgataagggattcacatgcagaatatagttgtcccttggtatatgtgggggattggttctaggacctgcctgtgtataccaaaatttgctcatacacaaatcccgcagaacctgcatatatgaaaagtcaaacataggtttcacattctgtgaatactgtattttcaatcaacatttggttgaaacaaagtctgtataagtggacccgtgtggtttatacctttggtgcgcaagggtcaactgtatgtaaagaactcctacaactcaacaacaaagaaacagtctgtttcaaaaagaagcaaaggatttgaatagacatttctctaaagaagatatacaaatggccaataagcacataaaaaaatgctcaacatatctactcattagaggaatgcaaatcaaacgtacagtgagataccatttcacacccattgtggtggccattataaa

SEQ ID NO: 246116 - DNA, 468 bp, Homo sapiens
tcttcctcctttttctcctgcccccagttagaagtttctaatttgaatcaataaaattgttctcagtgcaaaaaaggagctacttttaaacttcattacattcctgatgtggtctttatttcacagcattgtatcaggacaaatacgttttacattagaagttgaaaaggatattaaggtacaaaaaggtcttgaaaactttccttttacatttcctcccgtgagagagattttaaaattctgaatgagcatataagagttgaagactcgatttgattgtagtgtaattaagagatagttttctttttttttggcaaagagattaggataacattgatactggcttcactttcaaagcaatgttttctatagttttctatacacaattatctttaacccaaaactctaagtatgcacagtgttgtcaaaatgactttcaaataaatggtagcactacatggtaatctg

SEQ ID NO: 246117 - DNA, 399 bp, Homo sapiens
tggttgtaggggaaatctggcttcacatttgaaagcccactgatcaatgttagcattactacaagtggaacaaccagactgtatgctttctgttaacaaaaatgttgatccttaatatactcaggcctttaagtggaatttccagttataggaaagaataaaggggaaagaggaaaaggaaacaatcagacaaatccacaatgtgggatatcctattggacaactgactgtttcttccagttaaaggaaaaagagggaggagaagattgttgtagatttgtaacgatttgagatgaaaaacatggcaacatttaaaatattttaaatcttaacaggtttattatactattctctgcttttatgtgtttttaaataaaatttaaggacacatattcatga

SEQ ID NO: 246118 - DNA, 1047 bp, Homo sapiens
atccgtgtgtctgctcttcagcatcccctagggagagtccacgttatttctaagaagacaggagagaaggagggagaaaaaaacgtgcagatcaaaaggcctcagaaaaaaacaaagtgggatgaaatgctgggctttattctgtacaacctaagcattttctatctttgatgagtcaaggtactggcagttctgtccaccattacttttgcatcatcaatgcaaatatcaacacaacaaaaaggaaaataatgtcttagtattattatgaaaataattttgaccctgtggaccctctgaaagtgtttctgcagacagagttactgcaagtttcctggggacccttggttgggctctgtgtgccacattttgaggactgctgccctagagggagaaccccactatgaagccggtcaggtggggagacagcacttccattctctttaaatgatagaaatgtctaatttctgagactctctgtcttgtggagcactgtcgtcttcatggacacaggcaggatggcaaccatgtgatgctgctttccttcaccttccaccttgagtggaagctccatgaagtcctcaccagatgctgatgctggcgccgttcttgttttatagcctgcagagccatgagccaaagaaatctattttatttataaattacccagcctcaggtatttcctttacagcaacacaaatggactaagacatggtcatgacaaagtctcccatagaaaactgatctggccttctccaaaactgagggcagctgggaggcataaacagaaaaggacattggacaacactgggtttagcctgagagactctcctcactagagaagcagattttcagttgtccaatcaagctgctaaagaaagaggggctgatttgtcagactattttgtctataactagggtagccatatatgccaatttccccaaggcagtcttgattagcttctattttttggcacaattctgaacagtgtcacctcttttattctaaaatgttttctgaaataaaaatgattcttatggccgaac

SEQ ID NO: 246119 - DNA, 710 bp, Homo sapiens
atccgtgtgtctgctcttcagcatcccctagggagagtccacgttatttctaagaagacaggagagaaggagggagaaaaaaacgtgcagatcaaaaggcctcagaaaaaaacaaagtgggatgaaatgctgggctttattctgtacaacctaagcattttctatctttgatgagtcaaggtactggcagttctgtccaccattacttttgcatcatcaatgcaaatatcaacacaacaaaaaggaaaataatgtcttagtattattatgaaaataattttgaccctgtggaccctctgaaagtgtttctgcagacagagttactgcaagtttcctggggacccttggttgggctctgtgtgccacattttgaggactgctgccctagagggagaaccccactatgaagccggtcaggtggggagacagcacttccattctctttaaatgatagaaatgtctaatttctgagactctctgtcttgtggagcactgtcgtcttcatggacacaggcaggatggcaaacatggtctcgctctatcacccaggctggagtacaggagtgtaatcacagctcactgcagcattgaccttctgaactcaagctatcctcccacctcagcctcccaacatgctgggattataggcgtaaaccaccatgcatagcctttaggactgtctttttaacctgaaagctagatggacgcta

SEQ ID NO: 246120 - DNA, 780 bp, Homo sapiens
aagtgcggccagaccgaggctggagaaagagcgcagccagagacggaaaggcagccaggctgcaggatagtgatgggggccaagggccctgctgcacacttggacaggatgaacttggcccacattttgtagaatctgcaaaagccccgggttctctcaaaatgtcacagtggtaacttggagcccctggactcccccaattcctccttcggcattcaccctcctccaggggtttccccataattggcctgaatggtgcccttcccattcccccaacgtgtccctcccataactcctcaaagttcaggatacaccaggcgctgtgattcacaataaagtctgcctttattgatgtgtatcatgtttactatcccgggtaagtggtgagttcaggaaaatggcccacaacctgtcacagcctgtacttcaagagacactcagcaagatgatgacgacgacaatgatgatgatgatgatgatgactcagcaagatgatgacgacgacaatgatgatgatgataatgatgatgtgtgtgtgtgtgtgtttccgggtatccacatactctgctcttcctcactcattcacctcagacccactcagtcctctttagggcatctctttcacctgattctctctaccaaaaatttttctaactctctcctccctctgtccaaaacctccccatccttcagggcctggctcaaaggccacctccatctcctctaagaaagttttctgactactccaccttctccaggactctctgccctttgttttct

SEQ ID NO: 246121 - DNA, 558 bp, Homo sapiens
gtgcgcgcgcgcgcgcgcgtacgtctgcaccgtgtgggtgtcttcactgggggagtctggatgcatatgcacttacttcccccacccctattaaatatggagcagcttttcaggactctgtgactgccttctcctcagggtcacattgagtttgaatctgacccaaggtgcaggaatcctgcaatggggaaataaaagaatatacagaacggggtcaggtcagctgctcagaggccaaaacccctacagctgctttgattttattttttggtgtatattttaggctcctcctgccattgtacaaattgtgcctccccctttcaggtgtttggtctgtggtttaaaggcaccagagcctatgcctgcatagacataggctcccagcaacaacagaaaacccacaataccgaatccaaaacaaaacccgggaggagggggagaaaaaaaccctattgagttcaggcaaataaggttgggtctctagatccggttacaaagcagctttgaatatgcaagacagtgcacaagaccagttattccagttacaacaaactatta

SEQ ID NO: 246122 - DNA, 506 bp, Homo sapiens
acgacaagctcttgaggatggggactgtgtcttattcatctttgtgtctttagcatctaacacagtacctggtacaactgtagtgctcaaaatgtttgaactgaaccaactaatatagaactatcctcttggcgggccaaaggcagagcatagaattctaatgcctgtgtgcctgttttgaatctttgtgggtttgaaggaaggaggaggggaggagaggaagtgtagaaaatcagcaaggaatccctatcctattattgtagaatctagggcatcactgaagggataagggaaccctagttatacgattcaattgaggtttactggtaccataaggagggaaggtagggctggagtccctgcagtgttagaatgaggacactcctgtcaatgaagaaccaagagtactcaatggaagctcttacagtcagaaaacttttaaatcatgttaccattttcatatagctttacgcatcactattaataaaaaacattaaagaagaaac

SEQ ID NO: 246123 - DNA, 480 bp, Homo sapiens
atgccttacgctggacaccatagctcataccctgtagttcaacaatgtatagctaatcactaatcagtgttatttctgtaaaccaatgacaattcctgaaacttttgtaaattgctttctcttttgattcatccttttctttttactttaaaagactcaagactctcctttgctctctgaagcacttcccagtggttcccaaattccagtcctcaaccttggccaaaatatactctttacattaattttccctcattttcttccttcaggtcaatacacatagaccaatgaaatataatagagagcctagaaataaaccctcccatatatgatgaaatgatttttgacaagggtgtcaagaccatccaatgaggaaaggactattttctcaacaaatagaattgggaaaactgcatattcacatgcaaaagaatgaagtttgacccttacattgtaccatatacaaaatttaacaacaaa

SEQ ID NO: 246124 - DNA, 294 bp, Homo sapiens
ctttaaaagaaaagtacaagagcgagtttaggcagattagcaaatggcagaacagccacggccaaccaatggccacaggtcattgcaacctgtggggggctccactgtggagggagagaagtgctccatgcatatgtctctgtcctgccatgcatgctcctaagacacttggagtgctttggaggccaataaacaagggggacaccccagctcctttaagggctggaggaaagaattgagtattgaactcaatgatcttttaaaaatcaggaataaacctacattattgtcctc

SEQ ID NO: 246125 - DNA, 464 bp, Homo sapiens
aactgtgagaagtatatttataatacacaggtattctaaattaatacacaggtattataaatatatataaatatacacaggttatacaacctgtgtattatgaatatatttttatagtctgaaatctgaaaagctccaaaatcctaaagtttttgagtgctaacatgatactcattgtaacatttttatttttattatttttttcttttttgagatggagttttgctctgttgcccaggctggagtgcagtggcatgatctcggctcactgcaacctctgtctcccgggttcaagtgattcttctgcctcagcctcccaagtagctggatgtgtgcctgtagtcccagttgcttgggagcctgaggcagaagcattgtatgagcccaggagtttgaggttgcaatgagctgtgatcaagccattgtactacatcttgggcaacagagtgagaccctgtctgttt

SEQ ID NO: 246126 - DNA, 886 bp, Homo sapiens
agactttaaaatctttttgggattcatagcatttctcttttaaggagtcaaattcagcagggcttatgttgcctcataattgatccctgtttaaaaggcaacgtgaaagaagtagctaagtgcactcattgcagagttagactgtctggattcaaatcctgactcttccactctaacttgttgactttggcaagttacttaacttgtctgatttcctatttgttagctgggagcatgatctacttcatggggttgtttgaagattaaatgagaaaatatttataaagggcttagaagagtacctgaaacatgatgaatgctcaataagtgttagcaattattgtaccaagtaacaaatttgaaggaaacattctgtctaagtaggattgattaaaattccctttgaaataggtaattcaatatgcatttaaagctaggatgctttagaatagctgctatttaaattgtgtggtgtctggtgtagagtcatgtattcactacagtcaagatacagttccatcaccacaaggaattcttgtgttgcctttttatagtcacatttatgtccctcccaccctcttccctttccctgatctctgtcagccactcatctgttttcattcctttaactttgtcattttaaaaatgttaaatgtatgaaattttatatgtgacctttttggattggctttaacatccaagttgttgcatgtatcaataatttgtttcttttcattgctgagtactattacatggtgtggatgtaccacagtttatttatcattcacccactgagttgttttcaatttttggctattatgaataaagctactatgaacatttctaaaaataaataaataaattgtgtggtatatgaaaaagctct

SEQ ID NO: 246127 - DNA, 352 bp, Homo sapiens
ggcaaagccatcaaaatttgctcagtaacgagagtaatatggtaattgtaaagttttaaaaataagtttcggctgggcttggtggctcgcacgtgttatcccagcgctttgggaggccgaggtgggtagatcacctgaggtcgggagttcaagaccagcctgaccaacatgtagaaatcccgactctactaaaaatacataattagccgggcatggaggcacatgcctgtaatcgcagctactctggaggccgaagcaggagaattgcttgaacccgggaggcagagattgtggtgagccaagatcgcgccattgcactgcagcctgggcaacaagagcaaaactctgtctc

SEQ ID NO: 246128 - DNA, 552 bp, Homo sapiens
tttttttttttttttaagccctggacttccttgttttagtctttcacttaccagaatgctatacttccaattttgatgggacaaattcaacaaaagcatattcatttgtatatcagcaatcttgaatgactcaacttctggctccaaatttggcctagagtttcccaacctatatgtagcagtacattagtgtgctgaaggtattaagccttcagcccatgaggcagtcaggcaggcctggggtacagaggccccaaggtatccacctctggagtcagcacctcatctgcttctctatgtgccttacaattatgatcatttgctaggtgggccatcatgtggaaaagagcaagaagcagagcccaggacaaatgagtagtgcaaaaaggtaaggggacagaggacaattaaccttctagcactttagatgtactctaaaattaaaaccctgaaaatgaatgttctccattcattaaaacaggatccacaagacatatccctggaaaacacttaatgagacttgctatacctagacagaggtacaaactatcc

SEQ ID NO: 246129 - DNA, 535 bp, Homo sapiens
tgtccatcttgaagactaaactgccataaacagaaataagggaatattgaacagccttttttatttttattttttgacagggactgttgtatgctcgctctgagctacagagataaatcataaggtccttgtcttccagaggcttatagtataataagggtaataagataaagtatatatttcttggcagagcattgtagagaatattgacctgagataggcacagaagaaggttcgtgggatttccagaagggtgggctttattctaccagggaaacttgaagctgttttgccgagatatttccacacaaatttagttatttcttaagctgtcagcagatcctattcttaaactttaaaacattcattctgcctaaagaagctttctgtaaagccatgctttcattaacaactttggctgggtgtggtggcccatgcctgtaatcccaggactttgggagtctgaggcgagagaatctcttaagcctggtagtaaaggaacagcctgggcaacatagtgagacctcatttctta

SEQ ID NO: 246130 - DNA, 572 bp, Homo sapiens
tttgaaatttacccagccacgtgctgtccattcccttacgcagtggaaactctccttgcatttactcccaagtaatcacctcggccttgtcacatccctttagattccagattgaaaattgaacagagcatttcaaaattaaaaagttttgaaaatccaggtggggaaaatggatctgactaaacaggagagaaatttcttcctcttcccctattctacgtgcttctgtggatatagaaaggggcacccccagccccagcaagggagccaggcatccatctacttaagtaaagttggctgtggtaaggggttagactaaaattctccgcagatgcagaggagaaggaatgaattccagctgagagacctggccgatgcatgggatttgtcttcaaggtccaggcagaggggatggcagatgccaaattgcagaagtcgaagagggcccagtatggttggtctgtaaagtaggtatataatagtatctacttaatctgtgagattgaaagagattaacatgtatagagtgcctagcacggtagtaactgctcaataaacgttagccattatta

SEQ ID NO: 246131 - DNA, 769 bp, Homo sapiens
tcagctgtagtttagtgacactgagcactaattgtgggatttcaggtacagcctgaacaatatacagaaaaataggatttcatttaggcactagatttctggttgtactgcctaaggctgcctttatttttaaggtaactgggttgggggttcccaagaccacccctagtttggtgattaactaggaggactcaacatagagtacgtgtggctgtcatttattccagtgagaggatacaaggtaaactcagcaaagggaagaggccggcctggcgtgaggccaggccaagcttcccagaggcctctctcattaattttaaataaaaaaattttttttaaattattttttaagagacggggctcttgctatgttgcccaggccgtacttgaactcttgggctcaaacgatcctcctgcctcagcctcctgagtagctgggactacaggtgtatgccaccatggccagctaaaaaaatattttgcttatatatttttaaaagttaaaaaattaaacagaaaaacatttcttaagtgctctaaatagcatcctaaaaagtactttttatagctttcatttttatgcatagctctgggtgttttacaaaaagagttcagtagacacagttacctttagaatttataatgggttcactgacatcgacaaacattggaaatagtgagtaaacataataacataaagtctatgtctatagataataatcattagatcttatatttgagaacaactcagctaaaaactataataaaa

SEQ ID NO: 246132 - DNA, 326 bp, Homo sapiens
gagagagagaaaggaaggaagaaagaaagagagagagagaaagaaaagagagaaaatatgagacactttctcaaactctgcagcctgctacagtaatggtcagggagtcaagggaactggagattagaatagatgccctgatcaaccctatgactttggacaagtcactttccctctctgggctgcagtttccccttgtatagaataagagttaaatcaagtagctttgtgatcccttttagctgtgtcactctaagatatatttggttcttgacattttgccctttgatcactaaatcagttattcagttaagaggggaaacatg

SEQ ID NO: 246133 - DNA, 555 bp, Homo sapiens
ttcacctggtgtatgtgaagagctacgctacattttgaaggatagaaagaagtttaatataagtatctgtctttagtttacatctagttgttgaaacaagatacatatactgaatgactgcagataaaaacctttattattttggtggtgtgagttatcacaaagaaagtacaaaatacacttattttctttttacttaatttctgttccatgttcaaatcatctcatttgcctatgtgccctatatttcaatctgtcattaaccctcctaccttctaaatggccaaggtaattatgtctaaccttgcccttctcttacactggcagcatactcacataaacagtaaatggggattgttttatgtcgtaaaatttcccagaaggaacactcttgggtagcttctgttcagtgtagataaggaactccagcagctaactagccttctaataacccaaaaagaaaacaaatagtatgaaagagagaatggtcagagaaaaggcagaagagaaagcagtcaagaggggggaaaaggagggggaattaagttacaagat

SEQ ID NO: 246134 - DNA, 113 bp, Homo sapiens
tcccaacaacctgcttggtttagtaattgaaagcttgggtctctgaaacaaggctaccaaggtttggatactggctctgccacctattgtgtgtgtaattttgggcaagggac

SEQ ID NO: 246135 - DNA, 406 bp, Homo sapiens
ccactgcccagtcacaggcattaagcctaggatgattcatttcagacttgtccctgaccttcctcataccctttccagaagggccccttgagctgctatgatactcctaaatcactatcccattacccaaatgatggagagccaatcaaaagcttagaccaggacgctttcccaaattatgtcccaataccttcacaatgatcactttatatacaatctcactgaatgctcagcaacacacgagagcaatgtttaactgagggcaacactgaggctcaaggagggcaagtgacttgattgctgaggtcacctgctaggtgcaagagctgagaattaatcccaaggctacctggctcaaaaagcctaagctcatctactatacttgaggcgaaatcatgaaagtgtg

SEQ ID NO: 246136 - DNA, 720 bp, Homo sapiens
ttccctgctgacatttattctgcatgcttaccacacaaggggtggattatttcctcctgtgaactttcatttaggtagagagcttagggtctatgagctttgcaaggaaccaggaccttagacaaacaacaaaggaaacaaacattgactctaaaatgcaccaaataaaactgcaaaatccatattaataagaactaactaaatatatattaatttacttgttattactaataatcacaaaaattgcattacatttgaatgtgatttgtaatttgtagcttagcttttcctcattttgcaaaaattttagagtatacatgatgattactgagaaatcatagccaaatgttaattaaatgcattacctatagccaaatcatttcaaaaacaaagtcataaaattcacttcagtttttttaatgcaaaaaaatatatttagggcataggagctaacctgaaagaactcccagcagcaaaaacaaacaagttgaacaacaaaataaaatagtattagattataatctaaagtataaaataaatatccatgagtccatactaacataaataagtcgtttatacaaaattggacaccatcaaacttaagaatgccgaagtctactaatgtcctcaaatatccccattagggtaagtttccattaggttcacatcagggctttaatacgagtttggaaagtcagattattgttacatagtaaacaa

SEQ ID NO: 246137 - DNA, 373 bp, Homo sapiens
ttcttccctgatttgtggaaatggtagtgcctcttggatgctgaaatgcatcttggttctgcatttaaaagttctttaatactggctgggcgcagtggctcgcacttgaaatcccagcactttgggaggccaagtcgggcggatcacgaggtcaagagatcgagaccatcttcaccaacatggtgaaaccccatctctactaaacatacaaaaattagctggatgtagtggtgtgtgcctgtaattccagctgcttgggaggctgaggcaggataattgcttgaacccgggaggtggaggttgcggtgagccaagatcgtgccactgcactccagcctagtgacagagtgagactccatccccacaaaaaatt

SEQ ID NO: 246138 - DNA, 469 bp, Homo sapiens
gtaagtactgtaatagaataacaaagtaatatcctatcacggggcagtcacgggggcagtgagagacaagcgcttgtccatgccaggctctgtactcagtccatcacatacattaggtcttgcagtcctcataccaccataaggtggttaccattatctccaattcacagaaaagcaaacagtatggagtgtttaagcgtcctgtccgagatggcatagctagtggagctgaaatttgaacccaagtaatccaggtccagaatgccccggatgcagaaatgaccacacagattctaccaatgaactaacctgataaggttggaggtcatactcataacccctcacacaggtccacacagacacaggcaagcacacccatgtctattcagatacacaccaattcctgtctatgacgagcgctcagaaaatcctccacaacaccacaccaggaatgatgtgcattttgaga

SEQ ID NO: 246139 - DNA, 198 bp, Homo sapiens
caaccaccccaccactatcaccaccaaaggagctctagggcatatccccaaatgccctcttccctgcctgccagcccactgttcatgtacctggagctcatgtacctggagatgtggagttatcagaactttctgccacccttaatcctcttggcccagtgaaagaagggaagctgtttcagcatggccgctgactca

SEQ ID NO: 246140 - DNA, 244 bp, Homo sapiens
tggtgtggtgggatggaattctgagctcttggcggcattcatggtcccaggggatagttattgcctcaggagaaatcaagtcaaattattggctttaagttccaaaataagttcttaaagctcacagcagagataatgtccttggagagcgaggtttttgatttgccagagaagtattttggaatacagaaggttaattcctaataggatctggtcaaaaagttaatgctagaagttagagtga

SEQ ID NO: 246141 - DNA, 432 bp, Homo sapiens
ctcctggcattatttggggatcaattgtgttctttcattcgctttccctttgatttttcactagtgtgtaaccatttgaagttgcaattaattgatatatattccataagattagaatacaggatttgaacagaggcattcctactttgatttttttttttttaatttggaaagggaagtacctcttttgagctaactagtggtgtttacaacagtctaagaattttttaaacaccttaagaggacatagtcttttaaagagatttggaagcccttcccttgacctatatgctatagatacaaatattacaaaagatgtgtttttctttttctttaaaaaaatttccccccacaaaaaaaaattcccccaaatatcctagtaggtagtgctctgcttagctaattttgatggttttccctgtaaaatttgaa

SEQ ID NO: 246142 - DNA, 267 bp, Homo sapiens
ccagaggattatcgtacatctgccaggactggcgcagggagaggaattgtaggcaagattatttagtaagtttggcttcctatcaggaggaaggctggagttcagcctaggtatttatcccagcctgatcacaccctgaaatgtgctgagtcctgcctcctgcttcctgttaactcttacgaggctaacttaggttcttataacttttttttaaattcttcaaatagggtctcactctgttacccaggctggagtgcagtggcgcca

SEQ ID NO: 246143 - DNA, 514 bp, Homo sapiens
acaaattgagagcattagtcatttttagtcagtgggttatgtagagatttgttaagagagcatttattgtgacagtttgagtctgtacaacatccttgcttagaaaccaattaaaatgcctcaaggaatggatacgtatgtagttacttcttccctttctagatcccaaatgttaaagggtattatatagacccaaggaagttgtttggttttaagcacttagccccatgttgaacaacgactctaggcagacatacttgatgagtgaagcaaaaggaggaaaagcaaaagtcaaaaatggattttgattatgggtagtgatcaaggaatggatgatgtgggaacagtgtgtaaggagtatctggagggaacatgaaggggagtaattgtgtcagacaagtttgagagagtcatttatatgacatttcccccttgagattttcccttttatcttgaattttgtattactgaagataataaatgcatatatttagctaatgtgaaaaaaaaaaaa

SEQ ID NO: 246144 - DNA, 410 bp, Homo sapiens
ctgctgaattgaaagtcctttgtagcagctctgattggtggagcctgatcacatggccccagctgcagagggaggctgggaaggtgagtttcttccttgaatctggggaagcacagattcactaggtggagaatcccctgaagcataggaaggatgttcaaagatgcttaactgaaagaagaacaaatattcacaacaaaattcaagtttactcatggcaatttcactctgaagtgctctgcaaattgaatgtggcaacattgtcaagggataccaccctcagccacttgaggaatgggcacaggagctattggttgagtgactacgtgccaagcactttcccattctgtatctcatcaacttctcataaacctgtaaggaagatattatcagccttcattttctcatga

SEQ ID NO: 246145 - DNA, 260 bp, Homo sapiens
gtttgttttttttgtgtttgtttggttggttggtttttggtttttttgctttttaaaggtcacagtgttgtgagcctggtgtaaatgccaggaatattatatggacttagtatctgcatctcgttaattgtaccacacaacactctgccattcaaataatgaatatctggtcaggatacgaacttataccctctgtgtgttttttttttttaagatacgtgatttctgaaataaactttatatacaatgataagctagtt

SEQ ID NO: 246146 - DNA, 411 bp, Homo sapiens
ctattcagtgctcttactttggtaccatgatccatgataatgataactgtccatgtgttacgcctactgagaagcccaagccacttcagagatgaagcagtgtcttttttctctctctgtccatctctctttctctccctgtcacacacatacacatatgcacacacacatgcactgcttagaactccattccggagcactctgtagaatttttcaaagactcctctgacgctcttgcctttatgttgatgggagactttatgttagcgtgcatgtttccatccatttatcagatacgacatattctttggcaccagttatcgcaagatgcacatttgggaaaaaatatctaaaggctagaatggtggcagaacgtatatggaaataaaatcgttcagagttgaaaagatc

SEQ ID NO: 246147 - DNA, 331 bp, Homo sapiens
taaaaattgaaattaagttaacatttaaaaaaatgcatgtggcttacagttgggcacaagctttgggcagcacaagcttaaactttccccacaagatgcataaatgattaaaacaactgacagcaaccagagtaacataacacacacactgccccttttcctccaatttgaagaaataaataaagcagacagcttcaatgtactaggtttcaactatgaaccgcaaattcttcctgccccattctctaatttccttaaagcagctattaatatcacattctagtttggtcttttctgagacagggtctcattgtcactcaggctggagtgc

SEQ ID NO: 246148 - DNA, 483 bp, Homo sapiens
gcttgggagggctgtggccaggccttgagtccgtggctcagtgggaccttctgaaacagcctccaatccgtgcccccacttcatttgctagtggatgaccccctccagtggctttggtgctgatgggaataagtcgacctgcagcggaagttcagcccaagttttagcccagcagcttctccacacctgtccgtggtctggtcatgccgccgtctctgcggttctctgcggagtcgtggtttctgtaccttgaagagaacttcccctctgggacccagaaacccagtgaatcctcaggaaaaaagggaatgaaattactgaagacaactctgtggcggggagatggaaaagaggctctctctctttttttttcctaatattttgagacagagtttcgctcttgtcacccaggctgcagtgcagtgagccaaggtcgccccattgcactccagcctgggcaacaagagcaaaactacatctcca

SEQ ID NO: 246149 - DNA, 423 bp, Homo sapiens
ttgagaatcaagaaaaagcatcctattttctttccaaagcaatgtccttggaaaaaaatctcccgaggctgttctttcaacaagcagtgagaatgcagttaccttgggcttgaataaccatgaattaaacatgaactctccatgaattaaagaaaactctcgaaccatgagttgttactttcagcttatgtgcctgagtgctcttgttgggccagtttgtttctaaataaactgcagttgcataacagctcataaaatcaagggaggattctgtatctatcttcttagcatggatttccacgggatgtaagactctaggtcatgtttttatttctgaaaacaggtacaaaataagaagtgtaattccttttttaagttctgtcttagttcgtttgggcagctataataaaataccatagatgt

SEQ ID NO: 246150 - DNA, 390 bp, Homo sapiens
tgttctccacatgataggacaggaaagggctgctctgccctgtctgaggtggctccctggggactcagtgggaagaaataatctagaagaacaaagttcaccttggagaaggattaatgcttctgagatggaggtttctttttgctgttagggtgaaaccatgagtgcctgcaactctcttttaatggattctggaagtggaggccgtctgcatctcctgcctctgaaagctggaatctgaaagcatccaggctgagctgtatctagacttcgtagttatgcagcggcttcactgcaaaattcaacctctaattctagttgcttatggcataaacaaagggaaatggcagctatttggtgtggtaaatgaacattttaggattataccca

SEQ ID NO: 246151 - DNA, 424 bp, Homo sapiens
catggatggtcctacttgcaagaaaacctgtaagagattttttaaaaatagcacactttactaatctgacagaacctggattttcttgatatgggaagaagatgagagtggacactggggaagccactagaagtatctgccactcttggctggacagcaggctgcaaacataccaccacttgatggagacatcatgctctggtcacaatgcgtgtaaattaggtgccagtaacaaaccagtactgagaaatacccacatgtcacatggatctaaatacgtgattggtcaagtaggttgtccaaaaggcaattagaacgttatcaaggatgaagctatagtaaaaatactatatataaaccttttgtgatgaggctttagggttatttagaggagtgtaaccttaaaaataaagatgaaaaattt

SEQ ID NO: 246152 - DNA, 315 bp, Homo sapiens
cagcgtgcgcacggtatggctaattttgtatttttagtagagatgggggtctctctatgttgcctcaggctgatctcaaactcctggcctcaagtggtcctcccaccttggcctcccaaagtgtctggtattacaggtgtgagccaccacgcccagcttttgttgggctttttgatcaccagttgtcatgggcacctatcgcctttttgtgtctttccccaggctgtcagatagctaataaaaaaatacatacaaaagtgcacctaggagttttaagggaaaaagtagtcttttgtgataccgtgcggctatgat

SEQ ID NO: 246153 - DNA, 496 bp, Homo sapiens
tgcggttctctgctgttagttaaggggcccatataaaagctctttaataactatgcacatagatattttaaaatgtcaaagtgcatcctttttaaagagaggggtgcgtctctgaggtttgtcagtcagacttttgtaaacttagccatttcctcattgatttaccatctagtttcagttatattgagtttaaatttttaattttttttagtgtttttaggagatgggggtctctctatgttgcctcaggctgatctcaaactcctggcctcaagtggtcctcccaccttggcctcccaaagtgtctggtattacaggtgtgagccaccacgcccagcttttgttgggctttttgatcaccagttgtcatgggcacctatcgcctttttgtgtctttccccaggctgtcagatagctaataaaaaaatacatacaaaagtgcacctaggagttttaagggaaaaagtagtcttttgtgataccgtgcggctatgat

SEQ ID NO: 246154 - DNA, 465 bp, Homo sapiens
cctgaaggagagggacctcgaggactgctcggtgagagggcagagtctgaggggctctggaggcaccattcccctgcgtctcctggagagaaggcccgtttcagccacccgcatccagaattgcacacattttgaatccagtactcaaggaggctctgatccctgcttggctcagaggtgttgcatctttctaagtttatcggagaggcgagcccagtgtcctggcagagggtaggagggtctctttgcctctgctagtttcatggcttatttggtaagatggcctcagggccctcgtctcttcgggtgcttctccaccctgttgcgctaatggaaagaccatgagatttgggttcacgaacacctcccctccctgcatcactctttatcacatcaccctattgttttccaatctgtaatttttttaggtattagttacttgttagcttttcatctccccaaccc

SEQ ID NO: 246155 - DNA, 521 bp, Homo sapiens
ctggattggtggagttttcattggattgagagtcttacgtattatatcagtaaggatacatttggatccttgagtgatctgaagtatagggcactgatagaagatttgaggtatggcaaagccagcagatcaggagatgattgccaaggagagataattattcaccctccccaagagaaggggacaggccacatcacccagagggccacaggggaagctctagggttggtcaggaggtaaaggaggggactgtgggccagagcctttgttgtggtgtctgcagcagatataggattgattagtttgaattattacggacgatttctagttgtctgacctaccagtcaagggtgattagggcagatgaacagtggcctgcggtgtgacagccccttagaggaggttgttgaagtgtgagctccagattggtttgcatttaaaaagcatgctgtgagtgagttgtttactatttctaggaattgcctagcctgggaggggcagtccctctagggtcagcaagg

SEQ ID NO: 246156 - DNA, 376 bp, Homo sapiens
ttagcgtggtcgcggccgaggtacgcgggactttaattaggagtcataaagagtttctgaagagtgagtaagtagtttcatctgcattaaactgataataaacagacatttctaaagcaaggagctgcccatatgcgagccttaactaagcctgaatctattaaccactaactaaactcagcctcataaaatatggtttggggatgttacatgacagcaaaaatgattcagattgcctgtaggtccttaaagaggaaataaattaattgaactttggtagatattaaaggttgcgacttgcctctgaatgtgaacaattcaaccaatattatcctaggctcctagcactgattattaaaaattgtttgattcttca

SEQ ID NO: 246157 - DNA, 351 bp, Homo sapiens
  misc_feature (77)..(77): n is a, c, g, or t
agtggctgtgtccagaagctttagtcactggtttggactaatgtactttttaaagggcctgggttcccaggcccacnccacagggtcttcctcaactccaccatgcccaggcatcccaggttctaaggtctgaggtctgaggatgactggtctctctagctccatctcctcaggtggacaaggagcttattttgaggctcctggagcttccagggaaaaggactgagaaggtatggccacagggctgggccggggcctgggtgccccaccacgtggctactcggagatcacttctaaactcatgattgttctcctttgagtattgctaagacataaaaccctaaaacttag

SEQ ID NO: 246158 - DNA, 564 bp, Homo sapiens
agttcctggagctgggcagtcttctcagagtggagcctggtaaccgcgacctccccgccagttcctgtgtgttgctggctggaaaggggtagttgacaaactcccacccagcacagtatttatgtcggtcaaaaatggaaaactatgtgtccgggcacggcccaggaaggaggattccttcaggccaagagcagcctagcaatatggcgcaaccccacctctgtagtccaacctcagcctcccagctacttgaaccccaagattcaaggctccaatgagctgtgatctcaccacagcactcctgcctgcgagactgagagaccaaagaccaacaaactaccacagccaccagttccggaacctgccaatgatgggcaacggaaagtgagggagttcaactctgttttcagagaagtggaataatcatatcgctgatctatgtaaacaagttgaagaattgtctgacagaaaatatgtttcgcttttgttgttctggccgagatcgcgccaatggcactccattcagcttgagtgacagaggtgagactcccatctcaaggtaaa

SEQ ID NO: 246159 - DNA, 510 bp, Homo sapiens
agttcctggagctgggcagtcttctcagagtggagcctggtaaccgcgacctccccgccagttcctgtgtgttgctggctggaaaggggtagttgacaaactcccacccagcacagtatttatgtcggtcaaaaatggaaaactatgtgtccgggcacggcccaggaaggaggattccttcaggccaagagcagcctagcaatatggcgcaaccccacctctgtagtccaacctcagcctcccagctacttgaaccccaagattcaaggctccaatgagctgtgatctcaccacagcactcctgcctgcgagactgagagaccaaagaccaacaaactaccacagccaccagttccggaacctgccaatgatgggcaacggaaagtgagggagttcaactctgttttcagagaagtggaataatcatatcgctgatctatgtaaacaagttgaagaattgtctgacagaaaatatggtatgtttaaattggaaaagtcctgtaatacttt

SEQ ID NO: 246160 - DNA, 931 bp, Homo sapiens
  misc_feature (101)..(101): n is a, c, g, or t
  misc_feature (103)..(103): n is a, c, g, or t
  misc_feature (105)..(105): n is a, c, g, or t
  misc_feature (110)..(110): n is a, c, g, or t
  misc_feature (113)..(114): n is a, c, g, or t
  misc_feature (116)..(116): n is a, c, g, or t
  misc_feature (805)..(805): n is a, c, g, or t
  misc_feature (810)..(810): n is a, c, g, or t
  misc_feature (815)..(815): n is a, c, g, or t
  misc_feature (822)..(822): n is a, c, g, or t
  misc_feature (832)..(832): n is a, c, g, or t
gcaactgtcattgccataggaggctccggatggtggcatgcttgccgcctggtttaggatgaaatatcctcatatggtagttggagctcttgcagttctgncncnatctnganntngggatttagtaccttgtggtgtatttatgaagatcgtaactacagattttaggaaaagcggtccacattgttcagagagcatccacaggtcctgggatgccattaatcgactctcaaatactggcagtggtttgcagtggcttactggagcccttcacttatgcagcccattaacttctcaggacatccaacatttgaaagactggatctctgaaacctgggtgaatctggcaatggtggactatccttatgcctctaactttttacagcctttgcctgcttggcctatcaaggtagtgtgccagtatttgaaaaatcccaatgtatctgattcactgctgctgcagaatattttccaagctctgaatgtatattacaattattcgggccaggtgaaatgcctgaatatttcagagacagcaactagcagtctgggaacactgggttggagctatcaggcctgcacagaagtagtcatgcccttttgtactaatggtgtcgatgacatgtttgaacctcactcatggaacttaaaggaactttctgatgactgttttcaacagtggggtgtgagaccaaggccctcctggatcactactatgtatggaggcaaaaacattagttcacacacaaacattgttttcagcaatggtgaactagaaccctggtcagaagtgggtcactcaagntatcncaganactctgntggcgtcccntctcgaggggccccattgatttcgcgacaagaaggtggatctttttgggtgtaccgcgctggaggtacatacacgaatgggccacatttaaacggggaa

SEQ ID NO: 246161 - DNA, 942 bp, Homo sapiens
  misc_feature (101)..(101): n is a, c, g, or t
  misc_feature (103)..(103): n is a, c, g, or t
  misc_feature (105)..(105): n is a, c, g, or t
  misc_feature (110)..(110): n is a, c, g, or t
  misc_feature (113)..(114): n is a, c, g, or t
  misc_feature (116)..(116): n is a, c, g, or t
gcaactgtcattgccataggaggctccggatggtggcatgcttgccgcctggtttaggatgaaatatcctcatatggtagttggagctcttgcagttctgncncnatctnganntngggatttagtaccttgtggtgtatttatgaagatcgtaactacagattttaggaaaagcggtccacattgttcagagagcatccacaggtcctgggatgccattaatcgactctcaaatactggcagtggtttgcagtggcttactggagcccttcacttatgcagcccattaacttctcaggacatccaacatttgaaagactggatctctgaaacctgggtgaatctggcaatggtggactatccttatgcctctaactttttacagcctttgcctgcttggcctatcaaggtagtgtgccagtatttgaaaaatcccaatgtatctgattcactgctgctgcagaatattttccaagctctgaatgtatattacaattattcgggccaggtgaaatgcctgaatatttcagagacagcaactagcagtctgggaacactgggttggagctatcaggcctgcacagaagtagtcatgcccttttgtactaatggtgtcgatgacatgtttgaacctcactcatggaacttaaaggaactttctgatgactgttttcaacagtggggtgtgagaccaaggccctcctggatcactactatgtatggaggcaaaaacattagttcacacacaaacattgttttcagagcaatggtggaacttagacccctggtcaggaggtggagttactaaggatatcacagacactctggttgcaggcaccatctcagagggggcccaccacttagatctccgaaccaagattgcctggatcctatgtctgtgctgtaagccgtccttggagcttgacttgagaatggtccaaa

SEQ ID NO: 246162 - DNA, 885 bp, Homo sapiens
  misc_feature (101)..(101): n is a, c, g, or t
  misc_feature (103)..(103): n is a, c, g, or t
  misc_feature (105)..(105): n is a, c, g, or t
  misc_feature (110)..(110): n is a, c, g, or t
  misc_feature (113)..(114): n is a, c, g, or t
  misc_feature (116)..(116): n is a, c, g, or t
gcaactgtcattgccataggaggctccggatggtggcatgcttgccgcctggtttaggatgaaatatcctcatatggtagttggagctcttgcagttctgncncnatctnganntngggatttagtaccttgtggtgtatttatgaagatcgtaactacagattttaggaaaagcggtccacattgttcagagagcatccacaggtcctgggatgccattaatcgactctcaaatactggcagtggtttgcagtggcttactggagcccttcacttatgcagcccattaacttctcaggacatccaacatttgaaagactggatctctgaaacctgggtgaatctggcaatggtggactatccttatgcctctaactttttacagcctttgcctgcttggcctatcaaggtagtgtgccagtatttgaaaaatcccaatgtatctgattcactgctgctgcagaatattttccaagctctgaatgtatattacaattattcgggccaggtgaaatgcctgaatatttcagagacagcaactagcagtctgggaacactgggttggagctatcaggcctgcacagaagtagtcatgcccttttgtactaatggtgtcgatgacatgtttgaacctcactcatggaacttaaaggaactttctgatgactgttttcaacagtggggtgtgagaccaaggccctcctggatcactactatgtatggaggcatggtcaggaggtggagttactaaggatatcacagacactctggttgcaggcaccatctcagagggggcccaccacttagatctccgaaccaagattgcctggatcctatgtctgtgctgtaagccgtccttggagcttgacttgagaatggtccaaa

SEQ ID NO: 246163 - DNA, 540 bp, Homo sapiens
acacaccaaaaaagggaaatcacaagacaatataaacctcgcttgaagaaacgatcgtgtttaacaagacagcaaagagaaatactctgagttgagccaagtagatgtgtgctgcttttgtagatggaataaatgatcctcacttgcatagacagcaaggtcatttttctcaccctaaatggaaggcattaatcatcagctctgaagaacaacattcaggacaagaagaaacaagccaccgcagcaggaggtattgaattgagccagagaactgggggccctgtggacgggagccagctcagcccaggtagcagctcccagatcagcaggggtgggtggtggagctggtcctcttgagccctaacagctttgttgggaactttctttgttcaagaaatctcctagttaccatccaagtgcatttctgaaatgcctgactgtgctccgggctctgtaggctctggattagctggttctctgtggaccccgtctgcataaaaagcaaagatcaaaggaacatggtagagctctttaaaaaaa

SEQ ID NO: 246164 - DNA, 1309 bp, Homo sapiens
  misc_feature (833)..(833): n is a, c, g, or t
  misc_feature (1082)..(1082): n is a, c, g, or t
tgtattctctaaagatttttaaaatattttaagttctggatacaagtgcaggatgtgcgggtttgttacataggtaaacgtgtcccatggtggtttgctgcacctatcaacctatcacctaggtattaagccccacatgcattagctagttatcctgatgctctccccgctacggcccctgcatcaggccccagtgtgtgttgatctcatccctgtgtccgtgtgttctcattgttcagcttccgcttacaagtgagaacatgtggtgtttggtttcctgctcctctgttagtttgctgaggataatggcttccagcttcatccatgtccctgcaaaggacatgatctcattccttttttaaaaaaaaaaacaaaattatttccataggtgtttggggaacaggtggtatctggttacatgcgtaagtaattaagtggttacttgtgagattctggtgcacccatcacctgagcagtatacactgaacccaatttgtcactattttcctctctcactgtggctataattctgtggcatatgtgatgatatttgtcagaggtagcagtgaattattagaattcacttcatcagaaagccctgatgaagaaagacacattttgttgttaagtttgttctgtttgaaaagtttctagtttcttgcacctagtagatactcaagttatgctttttaattgattggatttactgatcacagcaactgtttcagacttattcctttatttgacatgacattaacaatagtaaatatcagctattatcattattattcttaatggtatgaacagttatgtgataggtattaaactaaaanctttacatgtactgtaatttaatctgtatacctactattaatattgtcaatttacagtgggagaaattaggcttaaaggtttaatcatttgcctggggtcttccaactctgaagaggttaaaccaagatacaaactcatgtagtttttatgtgctacattatgttgcctccataatatgtaaaagtcatagacgtggccaggagcggtggctcacacctgtaatcccagcactttgggaggccgaggcnggcggatcacgaggtcaggagatcgagaccatcctggctaacacggtgaaaccctgtctctactaaaaatacaaaaaattagccgggcgtggtggcgggtgcctgtagtcccagctactcaggaggctgaggcaggagaatggtgtgaacccaggaggaggagcttgcagtgagctgagatagcgcctcaacactccagtctgggtgacagagcgagactctgcctc

SEQ ID NO: 246165 - DNA, 411 bp, Homo sapiens
gaaacacatttacagtcagccctccatatctgtcgtttccacatccatgatcagccaaccagattgaaaacattcaagataacataaacaatagaaagtaatacagatgtgaacatgcagtgtaacaaccatgtacagagcactgacactgtatcagataatcgagatgatttaaagcatatgggaggatgtgcataggttatatgcaaatacaagtgactcttgaacaatgcagggattagggctgtcccctacacatgcagttgaaatctgggtataactctgactccccaaaagctacagatagcctgctgttgactagaagccttaccaataacataaagtcagttaacacatgttttgtatatctgttatatactgtatttttaggtaagctagagaaaaataaaa

SEQ ID NO: 246166 - DNA, 1417 bp, Homo sapiens
atagcaactatgctcttttctaaaactagttttatctcacataattcttgagtaatttctctttctcccctaacccactgtgcgttgcattatttgaggcaccatgatatggctgcagatgccttttcgtgcacctgggtcaggatgggacctgcggaaatccctcctccttcccatatttagacagtgagacataccaaaggcaagtgaagcacatggtaatagagaaagctggcactacgtttgagctagtgatctgctggtgtcaactggcagtgttttttcaggtcatcctgcttgacccttatagatgtagagaagccaagtacagtgtagaaaacgtcaacttcctggtggtcacctaagtatttttttccccttcttttggaggggtatatggagagatttctactttaccaagaatgaagctggaactttaaatggtttatgtgtgttttataaaactttttaaaaacttgcaaaatcatatgttagtatattacagtttttacttgtgtcttgtctgcccagttgccaccacttgtaaattttttttttccataagcaagtaaaagttcagctggaagatatcttcttaattgagggttcaaaagccaggaatttaagcaaaagaggaaattcttctcaatattcaaaatacaaaaactctaaggagcatcttgttgactggtatattttagcattgagcatagtgcttgatactcagtgctccataaatactgattggataaataaaatgagatgtagaggcagtagtgtttattctcatttataaattagaagtaaacaatgtgatcacagtgaaaaatccttagcctgctttggataagaactttcactcgtgcactagagagagagggaatgtgggtatgaaagtgtgtgtgtgtatgtgtgtgtgtttgtggcattggcaaatagaagagaaggatttgtcttatctgctgatttaaaaaaaaagattttatgtttattatcaagaatgtagcacttaagatatatgcaacttaaaaaaactactgagtaaaattctgggttttgtccttgaaagaaaagtggcatttcctgcatgaaaaacagtttctattataaatgacaaaaaattgttagggagccaagctttgatgcatttactacatgaaggtcaaatacttaggtcattataattctgcccccttttgtgcatgcagtacaatgaagctctttgacatggtgctagcacattctcaagatgaaggaaggtcacgtgttttcaggcattaagagcatgatctactcttttttggttccctgttataagtggctgttgagggtaaagttgaggggagaaactggactaatgaatggcttttgtctacctttgtactattttttacttttcttgcacagaagtcaatta

SEQ ID NO: 246167 - DNA, 435 bp, Homo sapiens
agtttccttgttcattgactcctccattacagagtaagcttagagaggtcagggaccacatctgtttctgtctcattccccacttcagcacagagaacgatatggggcacagtaggagctcgataaatgctttagtgaatgcataaacaaagtaagaaaccatgaggtgacccaaacctcggtttcttcagttataaaatgggcacatgggtgcaaaggctcaggtgtattgtaagggtgaaacgagaggtgatgcgtgtgaggcctttgtgagctctagatctctttgtagatgcaaagtatcagtgtagattgcagtaaccaggacatcagaagaaaaccctgctctttggaagcaaagtgtgccaaataacaaagcttagctctacaaggctatcgctaagcctatgcaataaatactttctctcctccaca

SEQ ID NO: 246168 - DNA, 909 bp, Homo sapiens
aagtgattctcctgtcttgcctcagcctcccatgtagctgggattacaggtacacaccactacacctgggtactttttgtattttcagtagagacggtgtttcaccatgttagccaggctggtctcaaactcctgacttcgtgatctgcccgcctcggcctcccaaagtgctgggattacaggcatgagccactgcgcctggcctggtttatcttttaattttaaaaaaggaaggctaacatgcctattgaaattagtagactctgccagtggtgccttgagttttttttttggctagcctgagaagggggttccatgtgttgtcttgaactgatgacagttcttgattacaggaataataatttgaaatagctctaacttgagatagaactctgtgatcctgcgaccagtgttctaatcgtacccatggtacgttagtgctgttgagtcagttaattcccagaaaaaatgaagtgttttttttagtgggaatgggggagggaaaaggaacacattccaaatatagaaaagtcaaattagaacatctgccatctttggcaaacgggctttcatggtctattgaccaattcttagttattatataaatgactgcaagacacaaatggtactgctgttgggtttggtggctttataagattctgtgtgttggacaactaggtttctcttctgtaggcttttagttgtgttgcagaagttccaaatcacctttgctgtagttgactataggctttttaatacatgaacacttaaggagaaaatctccggacccattgctgtaaaatactaaatgaagctgggcgtggtggctcatgcctgtaatcccagcactttgggaggctgaagcgggcagatcacttgaggtcaggagttcgagaccctgtccctact

SEQ ID NO: 246169 - DNA, 476 bp, Homo sapiens
gcttcagaacttctatttggttgtttgtgcttgacacacaactatttattaatatttattatctatttattaatattccctacagttcatacatcattctcctgactgcccttagttctctgtccatggtttccttcagcatcttgagcacagctaagacagttagtttaaaatctttgtttattaagtccagtgtcttgtcttccttgtgtatatttactgttgattattgcccctgtgaatgggccatacttttttgtttctttgtatactttgtatatttttgttgagaactggaagttttgaatattgtaatgtgctaatttaaaaaatcagattctccctctttcccaggaattggtgatgtttcttgtcgaagggtaaagttgtctgtgtacagactattttaagaatgggacatatggtaagccataaaataattttaaataaattttaaaagactaaaatcatgcaaa

SEQ ID NO: 246170 - DNA, 696 bp, Homo sapiens
cccacccccagctccttatgatccagtataagacaaagttatcttccatgaacagaagagatctggaattttaatggtgcttggtaattatgtacagcaatttttagccccaagaagacttatttgatagggggctgggagcactgggcaccagagtggagagaaaccctacgctggggttttgaagccaggctcaccttccgcagctcacccccttttctctgggccccaggctcctcacctatgaaagggtaatgaaaacaatagcccatctacccagtgagtcatggtgatctagtgaggtgaggaccgtggaatcccttggggaaatcaagatgggaaggttttgaaggtcacaggtcatggccagtgatgggctttggtgggcttcgggtacagataagtccccagctcatgatatttcaacttaatgattttttgactttatgatgatgcaaaagctatgtacatccagtagaaaccatactttgagcacacatataatcattctgtttttcactttcagtattcaataaattacatgagatattcagcattttattataaaataggctttgtgttagatgatttttgtccaactctaggctatggaagtgttctgggcctgtttaaggtgggttaggctaagctctgatgtttggtaggctaggtgtattaaatgtctttttgacttat

SEQ ID NO: 246171 - DNA, 346 bp, Homo sapiens
atggtattattctttaaatatttggaagaattaactgatgaagcaagccatctggggcttggaattctttgtgagaagttcttgaatagattccatttatttatgagatattggctattcagattttacttttttatgtgggctttggaaagttgtatttttcagggggtttgtctattttatccaagttgtcaatattttggtgtaaagacaataatattctcttatctttgttatatttgtgggatctgtactgatattcctttctaatattgaaaatttgtcttttttgtttctgttgatcagtattgtttggagtctatcaatataaataatattttcaaat

SEQ ID NO: 246172 - DNA, 440 bp, Homo sapiens
aggtggtgacaaatggtagccataattatttattgtcctctctgtccagactaaatgttcccttttccatattaaacatttaccattccaccacatccagctgagagtctgttcttaagctagtacaaagagtcagacccgactttgaatctccacttctccatttagctggatgatcttgggcaagttataaaatctgtttcctcttcactttataacgtgggtttcatgatcatacctcgccacagggctgttctgaagactggacatagctattttaaatgccaggaaaggccaggcgcagtggctcaaacctgtaatcccagcactggggagcctgaggcgggagaatcgcttgaacccaggaggcggaggttgcggtgagccgagattgtgccattgcactccagcctgggcaacaagagcgaaactccatctca

SEQ ID NO: 246173 - DNA, 331 bp, Homo sapiens
cactggttcccccagtgcactccaaccataattatcctgaagcctgcaaaagagaataatgagataaaggaagactgattcttgattaaaggagaaaataaagataacaattatgataagcaataatgattgtggtgatgatcagtagagaaaatagcacagacagcataaaactgtgagaagcaagacccacagctattgtaacaactggtgaataaagataaccttactggagatgaagaaaaaacaactagaatggcatttaactcagaagtaaaattccctagtaccctgtttggtacttagccaacgtgggcacctcttggaatta

SEQ ID NO: 246174 - DNA, 434 bp, Homo sapiens
caagtgacagatattggtccgtctggctacaaagccaaatgtcattgtgtttttgactaaggacaaatgaatgaagtgtacatactagtttaaaatatttattgaaaaattaatattcagtcatttattaaatgtaaaagatggcattaaaattcctctgtgttttgttggaggaggaaatacaagaataggtgtatcataggatccaaaggctcctgagaaggggttaacattgagagaaggggtagagaaaagagataataggtgatcagttgagaagatgataaatataatttgattactttaaataatcagtcaacatcagcaggtgtaaatgacatacatcagtacttttcttgttttgattaggcaggaagcagtagagtaatgattcccagacttgcattttgcacactagcaaaataaaatataaa

SEQ ID NO: 246175 - DNA, 588 bp, Homo sapiens
tttttggaatttgaggctgcttttgaggctttagtttactatcggtatttgggaaatgttccacgtgtccttgagaagaatgttttaatttatatgtggtataaaattctgtatctttgagcttcttacatggaatataaatatcattttgtccacttaatctgttattttgtgaggtgggttaaaatagaccaccatactttttgtttattctctttccacctgtagctttgccagtggttgtagtatattttctacattgttaggtgcatatatatttgtaattctttcttctttttactcatagataataaatcgctgtcttaataacataatgttttccatcttgtttggtttctatgttaattaaaatggctactttgttgttttcatattttcttaaaactgtatatacttactcaaatttttaaatgagttgaaaattacccctaatgtttcctaacataataattggtacttactgggtaatcttacatgcttgtaaagtttcttcattaaaactcagaggcatttgcatattagtatattctttattgcacattaatgtgtctttctggaattcattat

SEQ ID NO: 246176 - DNA, 597 bp, Homo sapiens
gaagcaaaagcagctggtcatcaataactcgcacttgctgcttgcctgcagctattacttgtctgatattggtaaagttctctatatttaaaggtgtctgaaaacactggcttatttataaactttgaaaggcagtagttaaaatggactttggtatattctgttcctcagagctgcatttacccctcaaacgcttaagccctatgagtttaatctctactgagattttagttgtatcaaccttgaatagactagactcctttaaaaggaaaagaaataatcaagtcattggaataaccttgatccctagacgccgccatttccctcaagtgagtgattcttattgtcacactaattaagtaaagacataaaggctttcccaatgcttttcacaagagatctttcctcgcagatttcattttatgaaatctgtaaaatgctaggaggcgtattaattaactgcagagatgctaaacatatatggaatacataattaattaccacatgatacacttaatactggaatactaaagagccagttctcagaaatttgtctagaaagggagtctttgtttctcaagaaagacaacatagact

SEQ ID NO: 246177 - DNA, 501 bp, Homo sapiens
aggattaaagagtttatcatattacttcccccccattcatacctataccactatttgtacccgaaaatgttacccaactcagtaaccatagtagtagacacatcaattattcaattcaaaaggaataagtaaggttttaaatttttactttctgtatggcaacgtccctcttaccctattctataacttctgttcttgttttcatttcctttcattcaagcagtagaaaaaatttggcactgtcacattccatcgaaaactcactctctgatgacccaactcttttttaaaactatccaaatctaagtgctctgagcatgttcaccagacaggcagcttcacaactgtaggatatttaggcaatctgttttattctattatatcttctccaaacttaattcttcttagttctgcccttctctttataaattttgcataccactaaaaaggatgatatacaagtttgcgggtattttcttgagttctctagtgctcagtcta

SEQ ID NO: 246178 - DNA, 698 bp, Homo sapiens
ttaataaatcttgccgcagcacactctctaatcgagctgtaacactcgccactgcggtccacagcttcattccttgaagcccgtgagaccacgaacccttcgattgagaagaaccttcggtgggaagaagacttctcgtctcagtaacaataacaagaaaaacagcctagactagacgcacatcaggaagacagtgtcggccacagccgcagaataaacatgtggagaaggtcattgatcaccttgactgaagcactgcagacaagataaagacagcctgatgcagaggaagattgaggactaaggggcttcatccacagatggcattttccagacagggtggctctctctgttagcgggcaggaccttctgttacttggatcattctataacaacatttagaagcagtggaataaaattgcaaaatgaaaccaagtccatttattcagcggaatcgaattgcaagatgaaaccacgtctgggaagcatatttttttacagaagaatctgcagtttagttttgtttattgcaacacaggtgcaaagggtcaacctcacctcatttatctttcagggcatgttattattattggtctgtgaaagaatccttttttgttcactcattatgttgaactatgtaaaattaccacttttgtaagataaaaaagcaatcaaatattaatgatttcaagtggctt

SEQ ID NO: 246179 - DNA, 783 bp, Homo sapiens
ttaataaatcttgccgcagcacactctctaatcgagctgtaacactcgccactgcggtccacagcttcattccttgaagcccgtgagaccacgaacccttcgattgagaagaaccttcggtgggaagaagacttctcgtctcagtaacaataacaagaaaaacagcctagactagacgcacatcaggaagacagttaatcccgtcatgtattgacccggaaacatcatctcatttgcctataagacagagagagagaatgatagaaatgctggaagaacgagccttggggcggtatcgcccagatctgaatccacacagcagctgcttcggtccctgtaactcaaggcttcctcttaatcctctgtcctccatcaacacctggctgagcaggaacaactatgacctaggaccagggccttcaggaatcttcacccctaactggaaacctctccaccaggatgtgtgcagagatgtcagcccctggtcaggcatcctcagccatctggcaccccctcaaagaggccctctgtcatctgccaatctacagtcgataccaccatgactttcccatagagggaattcccagaaaacagttcttgttctcgcttctagtccaattttccccagaaaaagtcacatttctgacaagacttgtttctgaaaagccactacgctgtcaactgccggtttgtcctgggcccccagacaccttcctctgttgtgtatgcctccgaaatacatttcccaggctctctcccaccggctttcagcaggttcagcca

SEQ ID NO: 246180 - DNA, 501 bp, Homo sapiens
gaagtaattctactttttagtagatttgcatctaatgtgactaacatgagatcttaaatgctgttagaattgagtcgttggtttaattagatcccaggcaggactgtaaactagttcaaccattgtggaagtcagtttggtgattcctcagggatctagaactagaaataccatttgacccagtaatcacattactgagtacatacccaaaggattatgaattatgctgctataaagacacatgcacacatatgtttattgtggcactattcacaatagcaaagacttggaaccaagccaaatgtccaacaacgatagattggattaagaaaatgtggcacatatacaccatggaatactatgcagccataaaaaatgattagttcatgtcctttgtagggacatggatggagctagaaaccattattctcagcaaactattgcaaggacaaaaaaccgaacaccgcatgttctcactcataggtgggaactgaacaatga

SEQ ID NO: 246181 - DNA, 362 bp, Homo sapiens
tgagacagggtctcaatctgtcacccaagcttgagtgcatggcacaattatggctcactgcagcctcacagtcccaggctcaagcaaccctgcccctcattctctcaagtagctgagaccacaggtacacacaaccctgcctggctatttcttagaaaaaaaatgtttgtagagagggtgtctccacattttgcccaggctggtctcaatcttttgggctcaagcaatccttctgtcctggcctctcaaaatcctggttttacagatgtgagccaccactatgcctggctgtgacatgtatatttaaatagatttaagaaactaaattacatgttacatgtttttacagttactttttaaaa

SEQ ID NO: 246182 - DNA, 413 bp, Homo sapiens
aagggataccactgtgaattgcagcctttgctgatgtagtcgcatgtcctcctccagtctgtggacattctatatctcttgctgctctcctcctcctggcatgataatgttttgatcagttcattgcttacttgcatgtctgtgggaggaagaggaagtctcatcaggccaagtcatgtggtgaggctggaaatccataactgagattagctacccacagtgagcatgggagtgagtgctgtgagccacagtggtactgacatcgactttctaattcccacagtcacagaatctcaaggactctgagccaattcaaagaaaagatcctgtacagtttgaatatgtaacttagcttaagagtaccctgcagtcacaagatttattaataaaagggtttggctttttaatttgta

SEQ ID NO: 246183 - DNA, 513 bp, Homo sapiens
tttggatacggcagtgatctgctggtgaccatcctgatcttcatggaccagcagatcactgccgtcattgtcaaccggaaggagaacaaactgaagaaggctgccggctaccatctggacctgttctgggtgggcatcctcatggctttgtgctcctttatgggtctcccctggtacgtggctgccacggtcatctccatcgcccacatcgacagatcccacattgaccaccatatgccaagcactctaaatgtgtcacagttcacttacacctttgagggagatactaccatcatctccattttacagagaaggaaattgagtcttggagagatgacacgcttccccaagctcacacagttagcaaggagcagagcctggatttgagcctagttctgctgccttcagagcccagactgtaatagttcacctctttgctgccggaggactggggctgcctggagctgggtgggtgctttactcacttcttttacttgctcatctcctgtctgc

SEQ ID NO: 246184 - DNA, 370 bp, Homo sapiens
ttttattttgagtgttaaaacagctttggatttctggtataatcccactaggtcatgatgtattcgcctttttatgtattcctggatttgggctgatcatattttcttgaggacttctgtatctgtgttattgaaaggtattaatctgtacctttctttttttgtaatgtatgtgaatggcttggtatcaagttaacactggcctcataaaatgaattgggaagtgttcctttcttttatatttttgaaagagtttaaatgcaatttgtattatttctttcttaattgataggctttaccagtgaagccatctaagtttggagttttcttgtggaaaggttttaaaattatgaataaatttgttaataga

SEQ ID NO: 246185 - DNA, 274 bp, Homo sapiens
tccccccacacacacctccaccccgcaggccctcatttcctcttctctttccccttgacaaaagatgtttattaaacaacaacagcagcagcaatccacaggagatgaagtaaaatgatgaggggaaaagttggggattttaggacgttgtccgctttggagggggctctccttgcactctttgtagagatttacatgactgcgagcttccctgggcccctcagtagctgagggaggaggagagaggtgaataaaacgactgagtgtccaataa

SEQ ID NO: 246186 - DNA, 476 bp, Homo sapiens
cagttggtaattggtaaacattgtttatatgaccaaatgtagatctaatattgtacattattgcatcagggtatgtcttgtgacttccagatttttctcaggtataaacacagttttctaaaggcattttatacatttgttacctaaaatgaacaactgtgtaactgtcagctatacctagaattttttatcagaagtattttagattttggattttggagtatttgtattatacttactgtttgagtgccactaatccaaaaatccaaaatgtttcagatttttggattaaggatgtttaacctgtatatagaaagagacttatttagacaaacttgaaagactcatgtactacttacacatagggttttgttttgtttagttcaaagtttaagtgaatctcgctctgtcccagccaagatcgcaccactgcactccaccctgggcaacagagcgagactctgcctccagaaaaa

SEQ ID NO: 246187 - DNA, 440 bp, Homo sapiens
ggtctgttcatacaatggaatatcattcagccctaaaaaggaaggaaattcggacacagaccacaagatggataaatcttgaggacattgtgctcagtgaaataagagtcgcagtcacaaaaggacgaatactgtatgattccactcagatgaggaatctagaggagtcaaattcgtagagacaggaagcattcatagaatggtgggtgccagggcctggggcgagggggacagagagctggtatttaatggggacttagggaaaatgagaaaagttatggaggtgaatggtggtgaaggctgtaccacgatatgaatgaacttagtgctgctgaaaattatacgctcaaagatgattaaaatggtcaattttatcttatgtatattttaccactttgaaaaatgtttaataaataaaaataaatttttaaaaaaggctg

SEQ ID NO: 246188 - DNA, 493 bp, Homo sapiens
agagatgttaacaaacagctgaaaaactaactacaatggcctgcaaaatagaacagcaggtttttgtggcaaaactttgtgtccatgagtttgttttttaaatatcctcatataatctgttttaaatcgagaggctttgggtaaaagccatggctagtcttacatgtcatggagtacctagcttgtgaggttcacagtttattatttacagagtgtccccttaaatcttctttgggtcggttcagcgaatgttgctcagatggacttttttggctgacatagagtcaaaatggtaatcaagcatgaaagtacagacagtccttaacgcacaaatgtgtcatgcttgaaaagttggaaagttggttctctggagctctgattgtattgtcctgtagaatccgtgttgtgaatggtggttaaatcccaaatgagtccgtagaacctatataatctgcaatatacctgcagtattccaattaatatgtaattcccc

SEQ ID NO: 246189 - DNA, 356 bp, Homo sapiens
caccacacgggaccattatggggctcacaaaggatagtgcatgtacaaaggtcttgtaaattgtaaagggctgtaagtaaaagtaaaggtgtattgttattaattcctggctcacctcccaaggagactctgggtaaataagataaggttgaagtaatattccaagtgattaaggccaaggtgagggctttggactgaaggccaagttcaagcctgactctctctcacggggccaggccattgtttagttcctgattggagagaagcctgagtatctcttcagtgcctcagtggggagagtgtaaatgagggaaaagttcaaaataagacatggcttgtttgcttgccctactgct

SEQ ID NO: 246190 - DNA, 238 bp, Homo sapiens
atctgcctttttctgtacttgcttgtctttagttttttgtttttgtttgagacaaggtcttgctgttttgcccaggctggcctccaactcctgggcacaagcaatcttcctgtatcagctcccagctactctggaggctgaggcaggagaatcacttgaacctgggaggcagaggttgcaatgaactgagatcgtgccactgcactctaacctgggtggcagaacaagactttgtggc

SEQ ID NO: 246191 - DNA, 289 bp, Homo sapiens
gaacccaaactctgcctctattctggaacccaaactgtgtctccatcccagaacatctcgaaagaagcagaggctgttctgaagggtggggtgatagtccccagactgcggggagataccacacctccaggaccagttagaaaacattaataaaacctcagaattagacagctttacaatcagaggattctcgagaaacagtctctcttctagtgtcctcattttccaaatgagagcaatgaagaagccaagaggaggcaaatatatgttcaataaaaataggcaatat

SEQ ID NO: 246192 - DNA, 399 bp, Homo sapiens
gctgaagtgcagtgttgccatcatggctcactgcagcctcaacctcccaggctcaagagatcctcccacctcagcctcctcagcagctgaaaatggccttggtggctcctctctccttaagatcttaggatttgtaccaactcatcagtagttttacaatctgcacagtacttgtacatctcatttcatccccacaccaaccctaccaggcaaggatcactggcctcatttaacaagataaagatgaggatactcctagttttgctgagtcctttaagacggctcagttgaaaaagtaatagtgccagggcttaaaccctcatctctaacaccaaagcctaagctcttcctgttaacagtacataaaagtcaaacccaaaccacaaaattgctggggaa

SEQ ID NO: 246193 - DNA, 470 bp, Homo sapiens
aaattctctaaggctagtacattttctgcagcttctcagtaccagatttgacctcagattctgtccctagacatagaacattccatggtttcgaccaccaaccaaacacccagctttctatataatgccgtagtttcctttccctgtgatttttgctgatatacatgtgtctttgtttatttaaatgttttgtaccacctcagtggtttatatatggtgctgcaattttccaagtattttttttttgcctcagtgaagttattttagagaatatcttagattaataaatctttggattagagtagacatacgtaaatgggatttggaatgcaattatttaactggaaatcttcatgggtttatcataaaaggagaaagaaccctctaggtgttgatagggcattggaaaagtggccagtaaattcatttcaaaatgttaggataaactcctcagatagatccaaacatta

SEQ ID NO: 246194 - DNA, 492 bp, Homo sapiens
tattttgtcctgttatatagttgtcacatgtatggtgttatggatttattaagtgttcttcataaatattaggattttataatttctcaatgattgtacatgattaaggtactgttctttttattgtcttaagtttacctgaaaatcggcctaattttattaaatacatattctacccagggggagtggtttaaagaattatctgctttgtctgggcgcagtggctcacgcctgtaatcctagcactttgggaggccaaggtgggtggatcacctgaggttgggagttcaagaccagcctgatcaacatagaaaaaccctatctctactaaaaatacaaagattagccaggcgtggtggcacatgcctgtaatcccagctacttgggaggctgaggcaggagaattgcttgaacctaggaggcggaggttgcagtaagccgaggtcttgccactgtactccagcctgggcaacaagagtaaaattccttctc

SEQ ID NO: 246195 - DNA, 258 bp, Homo sapiens
ttgatgtgaaaacgtttcccaggttttttatcttaagcacattctaaggtacagaacaaaaccccttcaaggtttagtcccacactgccaaatccatggacctagcttccttcgtcttttctttctcctaatcctacccctaaggatcacaccaaaccactctctctctaggaactcctctcaatatatactcaataaaaccccagagtcagtttctttccacctcagtagggctcaatggtgtattagactaatctc

SEQ ID NO: 246196 - DNA, 514 bp, Homo sapiens
ctggaaggccaacgctgttcttatcactgctacacagagctgaaagcaatgttagaactgtgggttaaaaagaaactagtcaagttcttcaacggatgaatggcgttatctttgccatgcaatcctactcagcaatgaaaataaactgactattggcacatccaacaccttggctgaatggcaaggtaattgtggtgacagaggaatgccagtccaaaaaagttacatagtgtgtaattccacttatactgaatttgtaaaataacaaaattataggaatgaagaacatactagttgccaggggttaaggaggcagcagaggcagaagacagctgaatgcaattagaaaatggtgacagggagggccctcatggtgacggaaatgttttgtaccttgactgtggagatggaaacgtgaatgtgtgaaaaattgtacaacagtgaacacacacacagacaccaaggaatgcaaccaaaactggagaagtctaagacaatatcaatatcagtatct

SEQ ID NO: 246197 - DNA, 416 bp, Homo sapiens
cattattagtcattagagaaacacaaatcaaaactacaatgagataccaattcttacacattaagttggccattatcaacaaaatggaaaatagcaagtgtttgcaaggatatatggaaaaattggaaccctcatacattgttgataaagttgtaaatggtgaagctgctgtggaaaatagttgggcaggtaaacataaataaaagttagcctattatctagcagttccattcttaggtatacgtcctaaagaatttatgtccaagagaattgaaagcatttgtcacacaaaaaccttgtacacacatattcatagcaatattattcatgatagtcaaaatatgaaatccatgcaaatgtccatcagctgataaatgcacaaacaaaatgtggtatacccatacaatggaatatca

SEQ ID NO: 246198 - DNA, 469 bp, Homo sapiens
tctttgaaaagataaataagattcataaaactccgtcatgactggcaaaagaaaaaaaagaaagaagatacaaattacgaataccaggagtgaagaagtggctctcgtacaggcattaaaacgacaataaggcaatgctacaaacaactctacacgcgtaaatgccaccacttaggtgaaatgaacaaaacacaaaccacagaaatgcacccaagataaaatagatgatctcaacaattctacaactattaaagaaactgaatttgtgataaaaaccctctggagtgactattttaacaactgaatttgtagttaaaaatcttcctgaaaaagaactctttaggcccatatggtctcactggcaaacttcgccaaatatttaaagaaggaataacaccaactttatacaatttctttaaggaaatagaaaagcaggcaacactttccaactcattgaatgaggccagca

SEQ ID NO: 246199 - DNA, 391 bp, Homo sapiens
aaacaaacaatcactatataccccataaatatgtataatgattatgtatcaattaaaatacataaaagatagagcttatgaaaggaaattgaattgagaactagggatttgagattaaggaaaaagctaataattacattaaaaaatttaaaaagtggggtttaacatggataaatgatgatagcttgctaagaaattaatattatcaactcaattctgtacatctgaggtaaaaaaagcctctgctagtaattcactgaactataccacttttggaaagaattccacttttattttatagtttgattaagttgtctataccaacataaaataaatttaacatttttgcttcaatcttgaataaaatttgttttcaatgtattttattaat

SEQ ID NO: 246200 - DNA, 595 bp, Homo sapiens
tcacgatcgagctcggtacccaggtcttttcccctcaaacaaataacgttgtatacagaaaatcatgaagaatctagaaaaaattactagaactagtaagtgaatttaacagcgtaacagaatataaagtcaatgtacaaaatcagttgtatttctacactgatatacattgaatttttaagagggagataatgcagtggtattaagtccaaggctagctgagaaaccccatggtgtcatagtgatctaaaattcttctgtcttttctaccatcctagagtatggtctcattcttcaaagtgacctcatggtctgtgacagctgctgaaacttaagctatcagggtcacactccaggctggaatttggaggaagggcaaattataaacacacacacacacacacacacacacactcacacactttttagctattttagctgtcttttagaaaatccttcctttttttttttagacggagtctagctttgtcacccttgctggagtgcagtggtgcaatctcagctcactgcagccttgacctctgaggttcaagtgattctcctgcctcagcctcccaagtagatgggattagag

SEQ ID NO: 246201 - DNA, 491 bp, Homo sapiens
gtcctgggcgtttcttaaactgatggcaactgcgtgtgccctggtggtgaaatggtgttgcagtatgcctgggcactgccctgtgaaaaaggacacacagaggggagactcacagttttgttttcattgctgacatggtttaaaaatgtacgttgctagctgtgaaaactcagtcattataacaccgtacacctttcttctttcagcaagtattccttgtgaacattagcaagtattctattctctgttagaattaaacaggtaatcgtaatagcatgaaagggtgaaagtatgtcttatgcaaaatagcctcttttatatagggcatctaccaattttcttgtgatttttgttttttcctcttttgaaaaatgattttagtctgctcgtgtttaggtaggtaacttctcttgatcccaattttatactttaaatgatcccagatattgcattttaaatgagatgagtatataaaaaataggaagcagaaa

SEQ ID NO: 246202 - DNA, 1835 bp, Homo sapiens
  misc_feature (9)..(9): n is a, c, g, or t
  misc_feature (497)..(497): n is a, c, g, or t
  misc_feature (692)..(693): n is a, c, g, or t
  misc_feature (1787)..(1787): n is a, c, g, or t
  misc_feature (1833)..(1833): n is a, c, g, or t
ctaggtacncagctgacactaaatttttagaagtaaaacaagctgtgttataacaccagaacctggaaggataactgctgggtctcagtcctctcctttctggaaacagacacctgggacaagagagaagcagctagggactcctatgctggctgaaccaaggtagtggtgcaggctgtggaggtgggtgcagaaccatagatcttcagaagtgtcgatttcctcctcccttgtgtgccaggtgggcagtatgcatcgtctccatttttctgatagaggggataatagggtaacggggtttgaggtcacaccaggagaaagaggccagaaagtggaccaggagaaccattcatgccttggactccagtcccaggggcctatactggatctggtaaagagtaacagctaggatagccgggcacggcaaatcacacctgtaatcccagcactctgggaggctgaggcgggtggatcacgaggtcaggagatagagaccntcctgaccaacatggtgaaacgccgtctctactaaaagtacaaaaatgagccaggcgtggtggcgtgcacctgtagtcccagctactcaggaggctgaggcaggagaatcgcttgagcccgggaggcagaggttgcagtgatctccgagttgagatcgcgccactgcgctccagccttccagcctgggcaacagnncgagactccgtctcaaaaaaaaaaaaaaaaaaaagagtaacagcgatcttgtttgccaatgtatccagacacataatagtaaacatctggctgggcacagtggctcatgcctgtaatcccagcactttgggaggccgacgcaggcggatcacaaggtcaggagatcgagatctggctaatatggtgaaaccctgtctctattaaaaatacaaaaaattagccgggcatggtggcaggctcctgtaatcccagctactcaggaggctgaggcaggggaatcacttgaacccgggaggcagaggttgcagtgagccgagatcgcaccactgcaccactgtactccagcctgggcaacagagcgagactctgtctcaaaaaataaattaattaattaattaaaaaataaacatcccatcttcagtgaaggatggactaagaggaggagggttctgtgacagagcctgagttctcatttgcctatttctgttctttcattgctggcagctctgctctcctgccaggatgagggacctctgcccacttgctcttggtggtccagagatggctttggttagaaaaaggacagaagattagccactccttgtgtaggaagtcaggaacagctccattcccccagctctcccgggcagtatcagaagccccaggttgcctgctgggagatgcataataaagctcagtcctgaactaaaccaacacatcacctggccctgggtatagaagtagtattgtgagggggatcttgggtcttccaggccaggtgtaagcaaatgtagggagttcagccccaggagagataaaagaatcatgccatggccaggtgcagtgacttatgcctataatcccagcactttgggaggccgagatgggtggatcgcttgagcttaggagttcgagaccagcctgggaaacatagtgaaacctcatctctacacacacacacacacacacacacacacacacacacacacacacaaagccaggtgtgatggcatacatctctagtcccagctacttgggaggctgaggtgggaggattgcttgagcctgggaggtggaggttgcagtaagccaanattgtgccaccatactccagcctgggtaacagagtgagaccctgtntc

SEQ ID NO: 246203 - DNA, 401 bp, Homo sapiens
gattgtttcagcctgggagtttgaagctgcactgacctgtgattgcaccgccatactccagcgtgggccacagagtggagcctcccatctcagttaaaaagaaaagaaaagaaaagaaatctggtaggccaggagtggtggcaggtttggctcatgcttgtaatcccagcactctgggagtctaaggtgacaggattgcttgaagccaggagttccagaacagcctggtcgatctaggcagaccccatatctacaaaaaactaaaaacaaaattagccaggcatggtggcagtacctgtagtcccagccactcagaaggctggaggatcacttgagcccaggaggatgaggctgcagtgagctatgatcatgccactgacagagtgagaccttgtctctta

SEQ ID NO: 246204 - DNA, 727 bp, Homo sapiens
agcgggctttgctccacttggagtcagctgattggcaggagggcatctgaaattgagaggagatttcaggacgtttacccagccctttagtggggatctgtccgggactgtgcagtctgaacctgcaactgtaaaagtgctgtttggactgtggacaagttaggttataaattttgacctctgaatggacgcaaccaatattagcctttaatgcagttagactcatttgtcagagttctggaaaattaggaaaaactaccatatgtccaagccttcatgcttttcgaaaatcaggattcataccatgagggaagatgccagctgctagctgtaccaaaggacagaatggacaaaaaggctcttcacaagccagagagccaaactcaggcagaaagcaatgaagaagaattaggacttttaaatgtcctacacccaagctgttttagcagctccaaccagcacagccagaacgcacctggcctctgctccacctcaacagctcccactgcagtaccaccatacggggcccttagcactggcctctgcgttggaccggattgccttgatgctaccaagtgaggcatcagaccaataagagggagctactctgccgcctcagtataatgagagaacagagacggcctctccctccagtgcttgacagggaacatgatttagcaaggaattgccatggccggagcaaaggaattaccgtttacagggatgg

SEQ ID NO: 246205 - DNA, 409 bp, Homo sapiens
atacacatttatctaactgtatgctggcgaaactcacacaatgcataattatctaactatatgcctgtcaaaaaataccagaggctaatttaaaatgaatcaaacatacaggcccagctgtggtattgtctctctcttaaagattgcctctggatggatacctatggtctggcactatcaagatggtatcagtctgtggctccaggtggaccataactcaagatacacatgggagtaagacacagactccctgaatctgcacacctcctgcatgcctcccatgttatgcattatgcttccctttctttaaaaacctgccctcagtccaaccttgtgaactggtttatacaggtgtcatccagccatttccctactgctggatttgaaaaataaagtcactttcctttca

SEQ ID NO: 246206 - DNA, 404 bp, Homo sapiens
agcgggctttgctccacttggagtcagctgattggcaggagggcatctgaaattgagaggagatttcaggacgtttacccagccctttagtggggatctgtccgggactgtgcagtctgaacctgcaactgtaaaagattgcctctggatggatacctatggtctggcactatcaagatggtatcagtctgtggctccaggtggaccataactcaagatacacatgggagtaagacacagactccctgaatctgcacacctcctgcatgcctcccatgttatgcattatgcttccctttctttaaaaacctgccctcagtccaaccttgtgaactggtttatacaggtgtcatccagccatttccctactgctggatttgaaaaataaagtcactttcctttca

SEQ ID NO: 246207 - DNA, 299 bp, Homo sapiens
aaaagaagcccttggagttatgtgattcctggtaaaatctaccacactttacttccagctccacagcctctcctccagtccacaagtgtgttagttcgtgttcttttggaagcagatgccaagacagagttagaagtgtaagatgtttattatggaaagtgcctatggaaagtaatagggaaagggggcagctgtagataagaaaaacctctgacccagaaatacttttgacatctgtgaaaagagggggagatggaaagaggatttggtaggaagagcctcagatcatagggcagccc

SEQ ID NO: 246208 - DNA, 463 bp, Homo sapiens
ggcccccggtgggggaaggaggagtttcctcttggcctgaacttggctgacctccgcagcttccgcccgactctggctaaagtcttggaggctactgccttgaagatgacctctagggaccagcccagacccaagggccccccgaaaagcacttcgccttgtcctgggatctcgaactctgagagctctccgacgctgaattatcagggcattctaaatcggctcaagcagttccccaggtgagagcaattccaggggccggaggtctcacgctgggaaggagccccacctggcctctctcccgggggtcctagtgagtggtctagaggctgctggcccaagagccaggctcaggaacaggaagccatgcagatacccagcatggagaacccggcaatacccatcccagcttttgattaaacaaaattaccaacaaatattaaaattttgattttcctgttcg

SEQ ID NO: 246209 - DNA, 2002 bp, Homo sapiens
  misc_feature (1263)..(1263): n is a, c, g, or t
ggcccccggtgggggaaggaggagtttcctcttggcctgaacttggctgacctccgcagcttccgcccgactctggctaaagtcttggaggctactgccttgaagatgacctctagggaccagcccagacccaagggccccccgaaaagcacttcgccttgtcctgggatctcgaactctgagagctctccgacgctgaattatcagggcattctaaatcggctcaagcagttccccaggttttctcctcattttgctgcggagttggagagcatttactactcgctgcacaagatccagcaggatgtggcagaacatcacaagcagataggaaacgtcttacagattgtggagagctgcagccaactccagggtttccagtctgaggaggtctcacctgctgaaccagccagccctgggacgccccagcaggtgaaggacaagaccctgcaggagtcgagctttgaggacatcatggccaccaggtcctccgactggctccggcggcctttgggggaggacaatcagccggagacccagctgttctgggacaaggagccttggttttggcacgacactctgaccgagcaactctggcggatttttgccggcgtccacgatgagaaggcaaagcccagagacagacagcaggcaccaggcctggggcaggaaagcaaggcaccaggatcctgtgacccaggaacagacccatgtcctgaagatgcctccacccccaggccacctgaggcctcctccagtccccctgagggttcccaagacaggaacacaagttggggtgtggtccaggagcctcctggaagagcctctcggtttctacagtccatatcctgggaccctgaggactttgaagatgcatggaagaggccagatgccttgcccgggcagtcaaagagactcgccgtcccgtgcaaactggaaaagatgcggatcttggcacacggggagctcgtgctcgccacggccatcagcagcttcacgcggcacgtgttcacctgtggcagaagaggcatcaaggtgtggagcctgactggacaggtggctgaggacaggttccctgagagccacctgcctatacagacccctggggccttcctgcgcacctgcctgctgtcctcaaacagcaggagcctgctcaccggtggctacaacctggccagcgtgagcgtgtgggacctggcggcgccctccctgcatgtgaaggagcagttgccctgtgcaggtctcaactgccaggccctggangccaacctggatgccaacctggccttcgccagcttcaccagtggtgtggtcaggatctgggacctgcgggatcagagtgtggtcagggacctcaagggttatcctgatggagtcaagagtatcgtggtcaagggctacaacatctggactgggggtccggatgcctgtctgcggtgctgggaccagaggaccatcatgaaacctctggagtaccaattcaagtctcagataatgagcctgtcccacagcccccaggaggactgggtgctgctgggcatggccaatggccagcagtggctgcaaagcaccagcgggagccagcggcacatggtggggcaaaaagacagcgtcatcctgagcgtcaagttctccccctttggccagtggtgggcaagcgttggaatggacgacttccttggcgtctacagcatgccggcggggacaaaagtgttcgaggtgcctgagatgtctccagtcacgtgctgtgacgtctcttccaacaaccgcctcgttgtcacaggctccggggagcacgcctccgtgtaccagatcacctactgaggggcctcgctgctgtcatcccactccggctcctcttttcatccccccccttccccccccccaacaagggggacatggtggagggaagcgggaaggctcttctgtggcatcgcacgatctagtctgtggtgtagactggtcgccatcacgtgtaataaagcacccgggaaaggcaaag

SEQ ID NO: 246210 - DNA, 1985 bp, Homo sapiens
  misc_feature (1246)..(1246): n is a, c, g, or t
ggcccccggtgggggaaggaggagtttcctcttggcctgaacttggctgacctccgcagcttccgcccgactctggctaaagtcttggaggctactgccttgaagatgacctctagggaccagcccagacccaagggccccccgaaaagcacttcgccttgtcctgggatctcgaactctgagagctctccgacgctgaattatcagggcattctaaatcggctcaagcagttccccaggttttctcctcattttgctgcggagttggagagcatttactactcgctgcacaagatccagcaggatgtggcagaacatcacaagcagataggaaacgtcttacagattgtggagagctgcagccaactccagggtttccagtctgaggaggtctcacctgctgaaccagccagccctgggacgccccagcaggtgaaggacaagaccctgcaggagtcgagctttgaggacatcatggccaccaggtcctccgactggctccggcggcctttgggggaggacaatcagccggagacccagctgttctgggacaaggagccttggttttggcacgacactctgaccgagcaactctggcggatttttgccggcgtccacgatgagaaggcaaagcccagagacagacgggcaggaaagcaaggcaccaggatcctgtgacccaggaacagacccatgtcctgaagatgcctccacccccaggccacctgaggcctcctccagtccccctgagggttcccaagacaggaacacaagttggggtgtggtccaggagcctcctggaagagcctctcggtttctacagtccatatcctgggaccctgaggactttgaagatgcatggaagaggccagatgccttgcccgggcagtcaaagagactcgccgtcccgtgcaaactggaaaagatgcggatcttggcacacggggagctcgtgctcgccacggccatcagcagcttcacgcggcacgtgttcacctgtggcagaagaggcatcaaggtgtggagcctgactggacaggtggctgaggacaggttccctgagagccacctgcctatacagacccctggggccttcctgcgcacctgcctgctgtcctcaaacagcaggagcctgctcaccggtggctacaacctggccagcgtgagcgtgtgggacctggcggcgccctccctgcatgtgaaggagcagttgccctgtgcaggtctcaactgccaggccctggangccaacctggatgccaacctggccttcgccagcttcaccagtggtgtggtcaggatctgggacctgcgggatcagagtgtggtcagggacctcaagggttatcctgatggagtcaagagtatcgtggtcaagggctacaacatctggactgggggtccggatgcctgtctgcggtgctgggaccagaggaccatcatgaaacctctggagtaccaattcaagtctcagataatgagcctgtcccacagcccccaggaggactgggtgctgctgggcatggccaatggccagcagtggctgcaaagcaccagcgggagccagcggcacatggtggggcaaaaagacagcgtcatcctgagcgtcaagttctccccctttggccagtggtgggcaagcgttggaatggacgacttccttggcgtctacagcatgccggcggggacaaaagtgttcgaggtgcctgagatgtctccagtcacgtgctgtgacgtctcttccaacaaccgcctcgttgtcacaggctccggggagcacgcctccgtgtaccagatcacctactgaggggcctcgctgctgtcatcccactccggctcctcttttcatccccccccttccccccccccaacaagggggacatggtggagggaagcgggaaggctcttctgtggcatcgcacgatctagtctgtggtgtagactggtcgccatcacgtgtaataaagcacccgggaaaggcaaag

SEQ ID NO: 246211 - DNA, 1017 bp, Homo sapiens
actctcttattttccttcttctgtcctctcctgttgtttgtttcgctcctccgcgtcgcggtccacatctcttgttgtggtcccgtcgtggttctgttcctgtcgtcgcctcccgccgtttgcgcctttcttgtgtctctctcgtcgttctgttttcgtcgttgcgcttttcttgtctcgcgacggtcttggttgtcttgtcgtgggttagttttctttcgctgttgttctctcctgctgttctgtggtagtatcttgtgtctgtggttgtgcgccgctggtgtggtgtgtttcgtctgcgttgttgtggtgtgtttttgtgtgttgttttttgtttgtgttttgttgttctttctttttttttttgtgttttgttttttttttttttttttttttttttttttttttttttttttttttttgtttttgttgttcataaaatgattttaatagaaaagtacaagatatgaacaaaaataaataatctttatctcatttctagcccagcaaattgtacactgcatataaaaatggtctaagatgcaattttcctttcaatcttaatattcacaaatcaaaatctattaagtaaatttaagtaaatctcttctcctatccttgaaagctttaactgctttctctatgctatctcaagcttcattgtatcttggacaatgtttcagacaacagaacttgtattatacaacatttaactcaatatttgaataatcatagaatattgtattctatcttgattctacaatccttcttaatgatggccaatatttcactagctgaatggcagcagacattaccacttaaccaattaaactattcctttctagaaccacctaaataagcacattaaagaaaatcattatgagtaaaaggagggtgcacatgaactggtaaatttcatttcttagttaaaagtagccataagagatatttctaatttcaagtttcattgttgttgctataccaacttttcatggtgcaaaaaccaaaaaaagtttt

SEQ ID NO: 246212 - DNA, 556 bp, Homo sapiens
ggatgtggcagaatgatttttctttcccacctcttgctgagaaggcaatgagattggaaatggcaaacaccccagagttctgtaactctgagtgtggaagaggaggtggcagcccttgacctcagtagcggagccagatcatcgaacatccccgtccaggaatctggacatgcactggtcaagaattcagcacaatttcctttggtctggggattgggaagctctttttgtgagtgaggcatggagtgaaattgcagaagcctgcgtgacttgtagaaaccgaagccaggctcgtttactgccttgcacaagggagatatgataagacagaatttatttgtgagtgtcgtcgatgccaaggagcctgtccaacatttatagaggcttttgggctaaacgaaaaagggtttgatctgtctgtggagacagaaagtagatgagtggttgcctaggactggggctttaggcgggtaagaggttgtcactgctaaagggtacagggttaatggaaattcttgaaattgtgctgatggtggctgcacaactctgcaggtac

SEQ ID NO: 246213 - DNA, 742 bp, Homo sapiens
gtaattgggcttctctcatctttaacaattttatggattcaaggatcttgaggggtaggtactacctctgctgtacccaaaattaactgagtttttagtacatgtcaagggtttagatcagggaagaagagccctagagagttattcaggtgatattcttctcagagagttttaatcattggtataactgtttctccaaagaatagggaatgaatctctttgaaagattatacctgaggtttacaagctttcacttagctccttctaggcagcttctctcatcatagtgcacttaatcaattagaatacaaaatgaccttgttacagtgtgaggacatcttgtggtcagaatgctatataggaaattaattgcaaatataagaccatcactcactttacccccagttcagcctggtagttcttaattttaggtatctctagccttccttgatatcaatctaggttcctcttctaatactagagctaaatctttcagttctcttatttattaaagaaggaatagagctctttacttgcgaggaaataggctcttttcacaatcatctgacacctaactttgtagtctcagcattctaagtaacagcgatctttctgcacttgtctttctttcctggcatacatccccagacaaatgttcaagggatgcttttccctcctttcttactcagtgtcttcttttcttcagatgcctttctgaagttgcttagtttctctaaaatat

SEQ ID NO: 246214 - DNA, 275 bp, Homo sapiens
aagacaatcagtttttgccattcccaagtcactcacgtgttggaaatatcaaagactttaaagcagttatcatcaccattatccatgaagcaaaggtgaacccttttttttttttatttttgagacagagttttgattttgttgcccaggctggagtacaatggcgtgatctcagctcactgtaacttctgcctcccaggctcaagtgattctcctgcctcagcctcccgagtagctgggattacaggtgcctgccaccatgcctggctaatttt

SEQ ID NO: 246215 - DNA, 972 bp, Homo sapiens
tattctaacaccaaatatatggagtttgctgaacatcaaccattctccaacacaaactgggtgtccaacaactcaattctgaaaacacccaggtcagcatagaccccactgactcaaggctgagtcccacaacactgcttccattccacatgccagtcacaagccccagggacccatctatacttctgaggaactgtctataaattataggcttccataactccctccctcaagttaaaggatttgataaaactactcacagaacttggcaaaaacactttacctatgtttactagattattatattggatacaactcagtaaatgctaagaggaaaaaacacataggacaaagaaaagcagggaaaacatgatgtgggcagtgaatcatggtagttacgactaacatctctcaaatcctttgtgttctgcaagaaaagcttactgcaaagaaatacccttttcattatgacttttatgatactccctctttaggtatcacaaattcacagattctacattctcatttttccctcataaataattaataattttgtcttcagtgttcagaatacttgttaaccaaactgctcaagtttctctccttctcccaggcccctggactatgctccaccttcagtctaagccagcatacaaccctcttgatgcccctcccaagaacaggctgacttcagggtgaaacattctctaatcttgaatctgattttgccattctcattctccattctgccttctccctcccatcttccttctaatcgtttgatcctccatatgaaaaatcacccttatctgtctcattttggaggtgcttgcagatcttgtgcttagtgctttttccattgcaatactccttaaaataaagtcacttcttacctacatcagaatttattttatttgatgatatctagaaacagcccgatgacaataacaattacaccctctcagaggacat

SEQ ID NO: 246216 - DNA, 340 bp, Homo sapiens
ttttacatctgttactataatcagttttaaggtattattttttgagacaggatctcactctgtccatgctggcgcgcaatggcgcgatttctgctcactgcaaaccgtctctggggccgaagtgatcctcccacctcagccccccaagtagctgagactacaggtgcgagccaccaaacccagctaattttgtatttttttgtagagatggggattcatcatgttgcttaggctcctgagctcaagcgatccacctgcctcggcctcccaaagtgttcggattacgggcatgagccactgcgcccagcctgggcatttttataattccctaagtaacccc

SEQ ID NO: 246217 - DNA, 181 bp, Homo sapiens
tattgtatgagtggctgtacaagggatctctgtggtgatagaaatgctctctatcaccattctatcaatgtgaattatctggctgtgatattatacaaatgttcaagatgttaccatggcggaggacactgtctaaagactgtacaagagctacttgtattatctctcacttaatgtggat

SEQ ID NO: 246218 - DNA, 1444 bp, Homo sapiens
ggcatcatgaaacggggtcctgagattttattttctttcacggtggttaaataaatggcctttagagtttgatagagttgggtctgattatcaactttagcactgtgtgctgtatgacattgtctcttcacatcactaagtctattttcttgtaggtgaaatatgaatattgacaaagttggtatgaggattaagtgagataatgcatttaaagcacatagtctcaacaaacaatagttatgactgttattatgatcattgttactattcttgaacgggcagtgaatacattgtgctaaccctggacctgccagataggtgtcttctgccctttcagattcaggatgttctcccgtaaagcaaaacaaaaacctatcctgaccttcttggatgattcataaacacttggtgaacagtttttactacacatttgttccctgatagccccttagaagtctgtggaactggctgggcgtggtggctcatgcatgtaatctcagcactttgagaggcagaggtgggcggataacttgaggtcaggagtttgagaccagcctgaccaacatggtgaaaccccgtctcaactaaaaatacaaaaattagccaggcattgtggtgggggtctgtaatctcagctacttgggaggctgagacaggagaattgcttgaacccatgaggcggaggttgcagtgagtcgagatcgcgccactgcactccagcctgggtgacagagtgagactctgtctcaaaaaaacaaaaaacaaaaaacaaaaagaaaactgtggaatagttgcctgagtctttgggtgtgagatacttatgcagcacagcagcttcaatactgtgctctgaaatctcgggtctagttactatggaatggaaagctgaggacagggagtagaaggagattcttcagtagttttttgaactcaacttgtccattccagctaaactttatttcttatgcaacataagtctatgaaggcaagatttttcttggcagcataattactgctacctaataagggaagagaatttccttctaaagattcctgctgttttctcagcaggtgggaacttttgcactctgcagctgctgggtgccattactgtccgtcctgggcttgctctttccattctgagatgggaatggaaaaatccacagggaacaattggtaattccatcctgatttgtatgcattttggggtgttggttttgttttgttttgttttgcttgctttttttttgtttttctttggtacttctattctgtaaccttgtcacttatattttttgaaaagtcaagatgcatcgtttgatacataattaaatatttgaaaacagggactgtcccggaactcttggactttgggctactgtgtgcataacctcgtggagggttctgagcagctctgtccatctacatgtgaaggatcaaaggg

SEQ ID NO: 246219 - DNA, 387 bp, Homo sapiens
acagatatgtgatattccctaatagggctgaacccttcttattcagttacctttggttggggaagaggtggtggattaggtcaatttgaggcagcaaagagcattcttgtcataccttgttgtgcatacaggttgagtatcccttagctgaaatgcttgggactagaagtgttttagatttcggattttttgtcagttttttggaatatttgcattattaccagttcagcatccctaacctggaatctgaaacgctcaattagcatttcctttgagcaccacgttggcactcaaaaagtttctgattgtggagcattttgatttcaaatttttggactagggatgctcaacttgtattttcaaacatttccctaggctatatatgta

SEQ ID NO: 246220 - DNA, 455 bp, Homo sapiens
gagatattgatagcacctacctcactgggttgctgtgaagattaaatgagataattcatgtgaaatgcttaggacagtgtctggtaggcactaagggcccaataaatgttggctgctaatattattaaaacaatttggtatgctgggggatgtcttagaagtatgtagagtagaccaggtacagtggctcacgcctataatcccagcactttgggatgccaaggtgggcagatcacttgaggtcaggagttcaagaccagcctggccaacatggtgaaacccggctctactaaaaatacaaaaattagctgggtgtgctggcacatgcctgtaatcccagctactcaggaggctgaggcagaagaatcgcttgaacctgggaggcagaggttgcagtgagccgagatcgcaccactacactccagcctgggcaacagagtgagactctgtctcaa

SEQ ID NO: 246221 - DNA, 208 bp, Homo sapiens
gtctggggcagtcttttgggactgagccattagcttgtgggatctgattgtaactccaggtagatagtgtcagaatgaaattgaattgtaggacacccagtcggtgtccagagaattggtgtgaggaaaagacccacacatttgatgtcatcagtgttgagaatgaaaaaaagctcggaatggcacatagtagatgcttggtttcaat

SEQ ID NO: 246222 - DNA, 259 bp, Homo sapiens
acagggttttgccatgttacccggctggtcttgaaatcctgggctcaagcgatgtacctgcctcagtctcccaaagtgctgggattacagcaatgaaccaccacacccggctctaaacatcatttcaaattgtcttaacaaaatttgcaggacctcataattggcctaatctgacccaaagcttggagctagtgggctacctgaaaagtatatagatctatcagagaagaataattgttttagcaccgtgaacttaagt

SEQ ID NO: 246223 - DNA, 401 bp, Homo sapiens
ctcccacaaggtctctgagttcagagatgttaacagtttattgccacatccatttaatattttcggaccacagatgaccacaggtgactgaaactgtggataaggaggggctgttgtaattatttgggatatactgctagaacattcatagtttacaaataacaagaatttccgcttgctagaccaagtatttcctatgaaaggataaaatccacatgctatagcttcagtgactcaccctgaacacttgccatgtctcagggacaaagtcaggtatctgtgctaacatgtgactagcaacctcaacccttcatcattttcttactgccttagtatgtgatttaccttacctggcaagggccaaagctatggagagtgagctagctgacactcaaccgtgc

SEQ ID NO: 246224 - DNA, 775 bp, Homo sapiens
aggaaggttctcagaatgggctttcctaatactcttggttcagtagtgagagtttcttaggaggttgttgtcacttctactactggcttttgccatctcctcacagacaaggattaaaatcactactgttgatttgccttttggcttatattacccacatgcagggtaacagagcttttactctaaaattaattcgttgaatgtttaaaacacttcttttgaggagtagagtcttaatgttaatgatggtaatgcatcctttcagaccggccaagcacagagcttcctcagtttggaagtgatgacagtactagtgccttctcacaagtaatatttggcagatattttaagttaggtgttcacatttttggagagatggatttttagtccaagctttacagctgtgtgtaagatctttctcttttgacccactattgataagtccatatatgctattagtatatttactaatttatcaaatactatgctaatattagttagacaatagtcaaaatagatacggtccctgtcctcatggccctcttttaatcttacagataaggatattttttgacatgtcgtcttgagtttaaggtgataggttttctctagcctgtagtagagaacatcagaaatttacctatacagactttcttttgcctgacttatacacaaaagataatttttcaccgaagttgatctaatttacaaattgccgtatgtttcaaagaaaacttttgggcatctaaaagaattcataatacaaaaaaaaaaa

SEQ ID NO: 246225 - DNA, 215 bp, Homo sapiens
caaaggctggggctctggctccaacctgggagttgccccaggggcttctggaaagggagaggcatccctgggaccacacagcacctgctcaggcctcaccacttctcccctctgcctgcctcaatgtccccctgagtttctgcccacctgcagatgtctacctgtggccccactgctgtgagtggggtcccacctgtgtctctacacaggcaccc

SEQ ID NO: 246226 - DNA, 141 bp, Homo sapiens
tggagctctgcagacactgggaccagaggtgaccttgaggatggaagccatgtgttgggaaaatggaacagaaagatgagtggaacttggactatgaatgtctcttgccatacttggactgtctgcctccagacatcctct

SEQ ID NO: 246227 - DNA, 555 bp, Homo sapiens
tcttatttaatgtgagagaaaaataaatttcttatttaagctactcttccttctgttactagcaactgaatatagtcactagagggaacagctcagcatggcaattaagaggatggactctggagccagagtgctcaactctgaatcccgctttgctgcttactggctttgcaaccttaaacaagctacttaacctcttcatgtcatagtttcttcatctgtgatgtgtgggtgataagagcctacctcataaattaatgtaaagattaaattagttgaaacatatcaaatgttcagaagagtccctgcacacagctgaagccagagcacatggtagcgttattatgcctgacagacccaggctaagtaaatgaactatttgtacaatatgagaatgataaactattagagatgctgtattctagtctctttatttcatagttgatgaaactaacatgcaaagaggtgaagtgccctgtccagtcacatacctgtgggacagcacagctggatataaacccagaatcctgctgctcccaggccaatgtctcatca

SEQ ID NO: 246228 - DNA, 534 bp, Homo sapiens
gagaccaattcagatcatctatttaacaaccctgtattagaattcaggggcttctgggtttctagacttccagatctttctgattccagccattttcttgcattatatttatgatttggttgcttggctagaaaaccagttctttccatagtgtcctgaatttatgaataatatcatcatttgattccctgtaatcatgttgtatcttgaagggttatctttagatcagaccttttttgaacctccagatttgaatgtccatctgcctgtttaacatcatcacttagaagtaccacagaatctcacatattaacatgtcaaaatacagcttcagattttcttcctcaaacctttcccccagtttttcctcatcttaatcaatagaaaccttattgtctcagttgtttaaattagaaataattaggttattttttatttctctctctctctttgtgaacttggaatttattagtaagttctgtaaattctaccttcagaatatgttcggaatctgaacttctaactcaaccaaaa

SEQ ID NO: 246229 - DNA, 533 bp, Homo sapiens
tgggtgggaggaactgcagttaaggaaagcagcacaaacacggctgctctgcctactgctattactgtgtgtagaaactgtcttttgtctctgacccagaggatttgtgtcttctgccaacattaatgaagctctagcaggctaacttgttagcctgaaactaggatgaaatttcagatccttcacagtactttacaaaggatcccaactaaagagcaaaatgaaatacaattacagtcatgagccacgtcacgacattctgtcagtgacagaccacatatacgatgcagatcccctaagattataatagagccgaaaaattcctgtcgcctagtgacaatcccaaccctttgtaggcctagacaaagttatgtgtttgtgttttagggttttttttttaaagtttaaaaagtaaaaaaaaattaaagatggaaaaagcttatagaataaagatataaaaaagattttcacacatgtgaatgatgtgattgtgtttcaagctatgtttttataaaacagtcaaaacctaaaaa

SEQ ID NO: 246230 - DNA, 280 bp, Homo sapiens
atttttgaaattccattccatagtaaacactcttaaccacatccaaattgtttaacttcctcctaaactaacagctgagtgtctcacaagaaaaactgcttgtcctgttgcacttatagtcattcactgatatactgatattcctcatactggtaactacagtttagacattatccttatataacttccaaacaacatttttaaaataaacgcttcattaaatcacacacacacacacacacatacacacacaatcataaaaccaaataataacagtgac

SEQ ID NO: 246231 - DNA, 445 bp, Homo sapiens
aggtctagaggcaaggcctggtagtccgtattttaataaaagctcccagtaggattcagatagccagccgggcttggaaactattcactgatttgtgtcccctcacagtaaaaatgctctttccccaggtacaggatatatggccatctggcctggatatcagtggtttgcagacctggctgcaaattagaatcacttggggagcttggagaataaatactgatgtttgaccccacccccaattaaattgttggtggggggagtagttaaaacctccccagttgattctaatgtacagtcaagttagagtacttctgtcctacataaacagatggagctaggtttagctgaaaaagtctagttttcttttagaatatgctttaccctgtgctaaaactcctctgttactgtgcctccctagccacacacacagagcttaaacgta

SEQ ID NO: 246232 - DNA, 485 bp, Homo sapiens
gtcgaccttgcccatgatgacgcactctgaaacatgccggcttctctctgcacaggaggaatttgtgaaatggaagggctccctgttcttccgatttgtcagcactctgatcgattcacacccagacattgccaggtaaatcttttcctcacgtcagacgactcaacagtttacctcatttctgatgtatgctggatttctttttttttcagattggtttagagttaagtaggatttagtgagctttcggtaggtgccaggaaaattagcagatttttaagatgctaagcaatataacaaacctttgttttgcacacaagtttaaaagaaaatggttagattcatcattgaataatctcagcattgactgcacttgctgacagtgtttgctgttcctgaaggagcttgaagaatattatatgcttgctgtattacactgtatagagtagcagccactagaaactcactgttaatttctaggcaaa

SEQ ID NO: 246233 - DNA, 5274 bp, Homo sapiens
ccagccgcttgttggggttcttgagggcaaggctcaccttcccggagaccgtctccccgtcgtagaagaggaaatatttctccttcttcccgtcctccgtcttgtgctcggcccgcttcctactctctgcatcgttcagaaggatttccacctccacgctctgcccgaagccgaagaagctcatcgcaccgccgggccgggcgggtctcggaacgactcggcgcgcgcgcgggagcgagctttgaaagttgagcacggcggcggcgagccggtgccctgggatcatggtggcgttgcggggccttggtagcggcctgcagccctggtgtccgctggatcttagactcgaatgggttgacacagtgtgggaactggatttcacagagactgagcctttggatcccagcatagaagcagagatcatagagactggattggctgcattcacaaaactctatgaaagccttttaccctttgctactggagaacatggatctatggagagtatctggaccttcttcattgagaacaatgtttcccatagtacactggtggcattgttctatcattttgttcaaatagttcataagaagaatgtcagtgtacagtatcgagaatatggccttcatgccgctgggctttactttttgctactagaagtaccaggcagtgtagccaatcaagtattccacccagtgatgtttgacaaatgcattcagactctaaagaagagctggccccaggaatctaacttgaatcggaaaagaaagaaagaacagcctaagagctctcaggctaaccccgggaggcatagaaaaaggggaaagccacccaggagagaagatattgagatggatgaaattatagaagaacaagaagatgagaatatttgtttttctgcccgggacctttctcaaattcgaaatgccatctttcaccttttaaagaattttttaaggcttctgccaaagttttccttgaaagaaaagccacaatgtgtacagaattgtatagaggtctttgtttcattaactaattttgagccagttcttcatgaatgtcatgttacacaagccagagctcttaaccaagcaaaatacataccagaactggcttattatggattgtatttgctgtgctctcccattcatggagaaggagataaggtcatcagttgtgttttccatcaaatgctcagtgtaatattaatgttagaagttggtgaaggatcccatcgtgccccccttgctgttacctcccaagtcatcaactgtagaaaccaggcggtccagtttatcagcgcccttgtggatgaattaaaggagagtatattcccagtcgtccgtatcttactgcagcacatctgtgccaaggtggtagataaatcagagtatcgtacttttgcagcccagtccctagtccagctgctcagtaaacttccttgtggggaatacgctatgttcattgcctggctttacaaatactcccgaagttccaagatcccacaccgggtttttactcttgatgttgtcttagctctgttagaactgcctgaaagagaggtggataacaccctctccttggagcatcagaagttcttaaagcataagttcctggtgcaggaaattatgtttgatcgttgcttagacaaggcgcctactgtccgcagcaaggcactgtccagctttgcacactgtctggagttgactgttaccagtgcgtcggagagtatcctggagctcctgattaacagtcctacgttttctgtaatagagagtcaccctggtaccttactgagaaattcatcagctttttcctaccaaaggcagacatctaaccgttccgaaccctcaggggagatcaacatagacagcagtggtgaaacagttggatctggagaaagatgtgtcatggcaatgctgagaaggaggatcagggatgagaagaccaacgttaggaagtctgcactgcaggtattagtgagtattttgaaacactgtgatgtctcaggcatgaaggaagacctgtggattctgcaggaccagtgtcgggaccctgcagtgtctgtccggaagcaggccctccagtctcttactgaactccttatggctcagcctagatgcgtgcagatccagaaagcctggttgcggggggtggtcccggtggtgatggactgcgagagcactgtgcaggagaaggccctggagttcctggaccagctgctgctgcagaacatccggcatcacagtcattttcactctggggacgacagccaggtcctcgcctgggcgcttcttactctcctcaccaccgaaagccaggaactgagccgatatttaaataaggcttttcatatctggtccaagaaagaaaaattctcacccacttttataaacaatgtaatatctcacactggcacggaacattcggcacctgcctggatgctgctctccaagattgctggctcctcacccaggctggactacagcagaataatacaatcttgggagaaaatcagcagtcagcagaatcccaattcaaacaccttaggacatattctctgtgtgattgggcatattgcaaagcatcttcctaagagcacccgggacaaagtgactgatgctgtcaagtgtaagctgaatggatttcagtggtctctagaggtgatcagttcagctgttgacgccttgcagaggctttgtagagcatctgcagagacaccagcagaggagcaggaattgctgacgcaggtgtgtggggatgtactctccacctgcgagcaccgcctctccaacatcgttctcaaggagaatggaacagggaatatggacgaagacctgttggtacatttttaccttaggggatatagcccagctgtgtccagccagggtggagaagcgcatcttccttctgattcagtccgtcctggcttcgtctgctgatgctgaccactcaccatcatctcaaggcagcagtgaggccccagcgtctcagccacccccccaggtcagaggttctgtcatgccctctgtgattagagcacatgccatcattaccttaggtaagctgtgcttacagcacgaggatctggcaaagaagagcatcccagccctggtgcgagagctcgaggtgtgtgaggacgtggctgtccgcaacaacgtcatcattgtaatgtgcgatctctgcattcgctacaccatcatggtggacaagtatattcccaacatctccatgtgtctgaaggattccgacccattcatccggaagcagacactcatcttgcttaccaatctcttgcaggaggaatttgtgaaatggaagggctccctgttcttccgatttgtcagcactctgatcgattcacacccagacattgccagcttcggggagttttgcctggctcacctgttactgaagaggaaccctgtcatgttcttccaacacttcattgaatgtatttttcactttaataactatgagaagcatgagaagtacaacaagttcccccagtcagagagagagaagcggctgttttcattgaagggaaagtcaaacaaagagagacgaatgaaaatctacaaatttcttctagagcacttcacagatgaacagcgattcaacatcacttccaaaatctgccttagtattttggcgtgctttgctgatggcatcctacccctggacctggacgccagtgagttactctcagacacgtttgaggtcctcagctcaaaggagatcaagcttttggcaatgagatctaaaccagacaaagacctccttatggaagaagatgacatggccttggcaaatgtagtcatgcaggaagctcagaagaagctcatctcacaagttcagaagaggaatttcatagaaaatattattccaattatcatctccctgaagactgtgctggagaaaaataagatcccagctttgcgggaactcatgcactatctcagggaggtgatgcaggattaccgagatgagctcaaggacttctttgcagttgacaaacagctggcatcagagcttgagtatgacatgaagaagtaccaggaacagctggtccaggagcaggagctagcaaaacatgcagatgtggccgggacggctggaggtgctgaggtggcacctgtggcacaggttgccctgtgtttagaaacagtgccagttcctgctggccaagaaaaccctgccatgtcacctgccgtgagccagccctgcacacccagggcaagtgctggccatgtagcagtatcatctcctacacctgaaacagggccattgcagaggttgctgcccaaagccaggcccatgtccctgagcaccattgcaatcctgaattctgtcaagaaagccgtggagtcaaagagcaggcatcggagtcggagcttaggagtgctgcctttcactttaaattctggaagcccagaaaaaacgtgcagtcaggtgtcttcatacagtttggagcaagagtcgaatggcgagattgagcacgtgaccaagcgggccatcagcacccccgagaagagcatcagtgatgtcacgtttggagcaggggtcagttacatcgggacaccacggactccgtcgtcagccaaagagaaaattgaaggccggagtcaaggaaatgacatcttatgtttatcactgcctgataaaccgcccccacagcctcagcagtggaatgtgcggtctcccgccaggaataaagacactccagcctgcagcaggaggtccctccgaaagacccctctgaaaacagccaactaaacagcgcctcccaccagtgtccaggcaggcaggagcccttgaggaagcagtctcgtgtcctccgtgtgaaggcagctggatcacttcccgcagtccttgggcagcgctttgctgtggaacacgagagctcctcctcaggggcctggcactcaccttctattctgtatgatgtatttggttaaacactgtcaaataatagagatgtgccagatttagattttcttaccctaatctgtttaatattgtaactttattccatttgaaagtgtcaagcccattcagataagctataatctggtctttaaggaacacaactttaaaactgcagctttcttttatataaatcaagcctctgttaacttgaattccttatagtacatattttcccatctgtaatgacgaaattttgattctaatattttttctattatttataagtgcaaattttttaaaaaagtgtacagctttctaaaagtaataaaggtttagcataaatac

SEQ ID NO: 246234 - DNA, 4072 bp, Homo sapiens
agtcgacggagactctcctttaattgatcccatcgtgccccccttgctgttacctcccaagtcatcaactgtagaaaccaggcggtccagtttatcagcgcccttgtggatgaattaaaggagagtatattcccagtcgtccgtatcttactgcagcacatctgtgccaaggtggtagataaatcagagtatcgtacttttgcagcccagtccctagtccagctgctcagtaaacttccttgtggggaatacgctatgttcattgcctggctttacaaatactcccgaagttccaagatcccacaccgggtttttactcttgatgttgtcttagctctgttagaactgcctgaaagagaggtggataacaccctctccttggagcatcagaagttcttaaagcataagttcctggtgcaggaaattatgtttgatcgttgcttagacaaggcgcctactgtccgcagcaaggcactgtccagctttgcacactgtctggagttgactgttaccagtgcgtcggagagtatcctggagctcctgattaacagtcctacgttttctgtaatagagagtcaccctggtaccttactgagaaattcatcagctttttcctaccaaaggcagacatctaaccgttccgaaccctcaggggagatcaacatagacagcagtggtgaaacagttggatctggagaaagatgtgtcatggcaatgctgagaaggaggatcagggatgagaagaccaacgttaggaagtctgcactgcaggtattagtgagtattttgaaacactgtgatgtctcaggcatgaaggaagacctgtggattctgcaggaccagtgtcgggaccctgcagtgtctgtccggaagcaggccctccagtctcttactgaactccttatggctcagcctagatgcgtgcagatccagaaagcctggttgcggggggtggtcccggtggtgatggactgcgagagcactgtgcaggagaaggccctggagttcctggaccagctgctgctgcagaacatccggcatcacagtcattttcactctggggacgacagccaggtcctcgcctgggcgcttcttactctcctcaccaccgaaagccaggaactgagccgatatttaaataaggcttttcatatctggtccaagaaagaaaaattctcacccacttttataaacaatgtaatatctcacactggcacggaacattcggcacctgcctggatgctgctctccaagattgctggctcctcacccaggctggactacagcagaataatacaatcttgggagaaaatcagcagtcagcagaatcccaattcaaacaccttaggacatattctctgtgtgattgggcatattgcaaagcatcttcctaagagcacccgggacaaagtgactgatgctgtcaagtgtaagctgaatggatttcagtggtctctagaggtgatcagttcagctgttgacgccttgcagaggctttgtagagcatctgcagagacaccagcagaggagcaggaattgctgacgcaggtgtgtggggatgtactctccacctgcgagcaccgcctctccaacatcgttctcaaggagaatggaacagggaatatggacgaagacctgttggtacatttttaccttaggggatatagcccagctgtgtccagccagggtggagaagcgcatcttccttctgattcagtccgtcctggcttcgtctgctgatgctgaccactcaccatcatctcaaggcagcagtgaggccccagcgtctcagccacccccccaggtcagaggttctgtcatgccctctgtgattagagcacatgccatcattaccttaggtaagctgtgcttacagcacgaggatctggcaaagaagagcatcccagccctggtgcgagagctcgaggtgtgtgaggacgtggctgtccgcaacaacgtcatcattgtaatgtgcgatctctgcattcgctacaccatcatggtggacaagtatattcccaacatctccatgtgtctgaaggattccgacccattcatccggaagcagacactcatcttgcttaccaatctcttgcaggaggaatttgtgaaatggaagggctccctgttcttccgatttgtcagcactctgatcgattcacacccagacattgccagcttcggggagttttgcctggctcacctgttactgaagaggaaccctgtcatgttcttccaacacttcattgaatgtatttttcactttaataactatgagaagcatgagaagtacaacaagttcccccagtcagagagagagaagcggctgttttcattgaagggaaagtcaaacaaagagagacgaatgaaaatctacaaatttcttctagagcacttcacagatgaacagcgattcaacatcacttccaaaatctgccttagtattttggcgtgctttgctgatggcatcctacccctggacctggacgccagtgagttactctcagacacgtttgaggtcctcagctcaaaggagatcaagcttttggcaatgagatctaaaccagacaaagacctccttatggaagaagatgacatggccttggcaaatgtagtcatgcaggaagctcagaagaagctcatctcacaagttcagaagaggaatttcatagaaaatattattccaattatcatctccctgaagactgtgctggagaaaaataagatcccagctttgcgggaactcatgcactatctcagggaggtgatgcaggattaccgagatgagctcaaggacttctttgcagttgacaaacagctggcatcagagcttgagtatgacatgaagaagtaccaggaacagctggtccaggagcaggagctagcaaaacatgcagatgtggccgggacggctggaggtgctgaggtggcacctgtggcacaggttgccctgtgtttagaaacagtgccagttcctgctggccaagaaaaccctgccatgtcacctgccgtgagccagccctgcacacccagggcaagtgctggccatgtagcagtatcatctcctacacctgaaacagggccattgcagaggttgctgcccaaagccaggcccatgtccctgagcaccattgcaatcctgaattctgtcaagaaagccgtggagtcaaagagcaggcatcggagtcggagcttaggagtgctgcctttcactttaaattctggaagcccagaaaaaacgtgcagtcaggtgtcttcatacagtttggagcaagagtcgaatggcgagattgagcacgtgaccaagcgggccatcagcacccccgagaagagcatcagtgatgtcacgtttggagcaggggtcagttacatcgggacaccacggactccgtcgtcagccaaagagaaaattgaaggccggagtcaaggaaatgacatcttatgtttatcactgcctgataaaccgcccccacagcctcagcagtggaatgtgcggtctcccgccaggaataaagacactccagcctgcagcaggaggtccctccgaaagacccctctgaaaacagccaactaaacagcgcctcccaccagtgtccaggcaggcaggagcccttgaggaagcagtctcgtgtcctccgtgtgaaggcagctggatcacttcccgcagtccttgggcagcgctttgctgtggaacacgagagctcctcctcaggggcctggcactcaccttctattctgtatgatgtatttggttaaacactgtcaaataatagagatgtgccagatttagattttcttaccctaatctgtttaatattgtaactttattccatttgaaagtgtcaagcccattcagataagctataatctggtctttaaggaacacaactttaaaactgcagctttcttttatataaatcaagcctctgttaacttgaattccttatagtacatattttcccatctgtaatgacgaaattttgattctaatattttttctattatttataagtgcaaattttttaaaaaagtgtacagctttctaaaagtaataaaggtttagcataaatac

SEQ ID NO: 246235 - DNA, 2783 bp, Homo sapiens
gctacacagagagctgtgatcatactactgtgatccagcctgggtgacagagtgagaccctgtctcaaaaactagtaatataacacaaacactttagtacatcagaagcattgttttttattttgaaaaggtttgaaatatctatttctgagtggtattaagttattgcatattttagctcatttaatatcatcatatttaattgttaggttgtcatttacaatcctgccatgtagtcccagctactcgggaggctgaggcaggagaatggtgtgaacccgggaggtggagcttgcagtgagccgagatcgcgccattgcactccagcctgggcgacagagcgagactccatgtacatttttaccttaggggatatagcccagctgtgtccagccagggtggagaagcgcatcttccttctgattcagtccgtcctggcttcgtctgctgatgctgaccactcaccatcatctcaaggcagcagtgaggccccagcgtctcagccacccccccaggtcagaggttctgtcatgccctctgtgattagagcacatgccatcattaccttaggtaagctgtgcttacagcacgaggatctggcaaagaagagcatcccagccctggtgcgagagctcgaggtgtgtgaggacgtggctgtccgcaacaacgtcatcattgtaatgtgcgatctctgcattcgctacaccatcatggtggacaagtatattcccaacatctccatgtgtctgaaggattccgacccattcatccggaagcagacactcatcttgcttaccaatctcttgcaggaggaatttgtgaaatggaagggctccctgttcttccgatttgtcagcactctgatcgattcacacccagacattgccagcttcggggagttttgcctggctcacctgttactgaagaggaaccctgtcatgttcttccaacacttcattgaatgtatttttcactttaataactatgagaagcatgagaagtacaacaagttcccccagtcagagagagagaagcggctgttttcattgaagggaaagtcaaacaaagagagacgaatgaaaatctacaaatttcttctagagcacttcacagatgaacagcgattcaacatcacttccaaaatctgccttagtattttggcgtgctttgctgatggcatcctacccctggacctggacgccagtgagttactctcagacacgtttgaggtcctcagctcaaaggagatcaagcttttggcaatgagatctaaaccagacaaagacctccttatggaagaagatgacatggccttggcaaatgtagtcatgcaggaagctcagaagaagctcatctcacaagttcagaagaggaatttcatagaaaatattattccaattatcatctccctgaagactgtgctggagaaaaataagatcccagctttgcgggaactcatgcactatctcagggaggtgatgcaggattaccgagatgagctcaaggacttctttgcagttgacaaacagctggcatcagagcttgagtatgacatgaagaagtaccaggaacagctggtccaggagcaggagctagcaaaacatgcagatgtggccgggacggctggaggtgctgaggtggcacctgtggcacaggttgccctgtgtttagaaacagtgccagttcctgctggccaagaaaaccctgccatgtcacctgccgtgagccagccctgcacacccagggcaagtgctggccatgtagcagtatcatctcctacacctgaaacagggccattgcagaggttgctgcccaaagccaggcccatgtccctgagcaccattgcaatcctgaattctgtcaagaaagccgtggagtcaaagagcaggcatcggagtcggagcttaggagtgctgcctttcactttaaattctggaagcccagaaaaaacgtgcagtcaggtgtcttcatacagtttggagcaagagtcgaatggcgagattgagcacgtgaccaagcgggccatcagcacccccgagaagagcatcagtgatgtcacgtttggagcaggggtcagttacatcgggacaccacggactccgtcgtcagccaaagagaaaattgaaggccggagtcaaggaaatgacatcttatgtttatcactgcctgataaaccgcccccacagcctcagcagtggaatgtgcggtctcccgccaggaataaagacactccagcctgcagcaggaggtccctccgaaagacccctctgaaaacagccaactaaacagcgcctcccaccagtgtccaggcaggcaggagcccttgaggaagcagtctcgtgtcctccgtgtgaaggcagctggatcacttcccgcagtccttgggcagcgctttgctgtggaacacgagagctcctcctcaggggcctggcactcaccttctattctgtatgatgtatttggttaaacactgtcaaataatagagatgtgccagatttagattttcttaccctaatctgtttaatattgtaactttattccatttgaaagtgtcaagcccattcagataagctataatctggtctttaaggaacacaactttaaaactgcagctttcttttatataaatcaagcctctgttaacttgaattccttatagtacatattttcccatctgtaatgacgaaattttgattctaatattttttctattatttataagtgcaaattttttaaaaaagtgtacagctttctaaaagtaataaaggtttagcataaatac

SEQ ID NO: 246236 - DNA, 3730 bp, Homo sapiens
ccagccgcttgttggggttcttgagggcaaggctcaccttcccggagaccgtctccccgtcgtagaagaggaaatatttctccttcttcccgtcctccgtcttgtgctcggcccgcttcctactctctgcatcgttcagaaggatttccacctccacgctctgcccgaagccgaagaagctcatcgcaccgccgggccgggcgggtctcggaacgactcggcgcgcgcgcgggagcgagctttgaaagttgagcacggcggcggcgagccggtgccctgggatcatggtggcgttgcggggccttggtagcggcctgcagccctggtgtccgctggatcttagactcgaatgggttgacacagtgtgggaactggatttcacagagactgagcctttggatcccagcatagaagcagagatcatagagactggattggctgcattcacaaaactctatgaaagccttttaccctttgctactggagaacatggatctatggagagtatctggaccttcttcattgagaacaatgtttcccatagtacactggtggcattgttctatcattttgttcaaatagttcataagaagaatgtcagtgtacagtatcgagaatatggccttcatgccgctgggctttactttttgctactagaagtaccaggcagtgtagccaatcaagtattccacccagtgatgtttgacaaatgcattcagactctaaagaagagctggccccaggaatctaacttgaatcggaaaagaaagaaagaacagcctaagagctctcaggctaaccccgggaggcatagaaaaaggggaaagccacccaggagagaagatattgagatggatgaaattatagaagaacaagaagatgagaatatttgtttttctgcccgggacctttctcaaattcgaaatgccatctttcaccttttaaagaattttttaaggcttctgccaaagttttccttgaaagaaaagccacaatgtgtacagaattgtatagaggtctttgtttcattaactaattttgagccagttcttcatgaatgtcatgttacacaagccagagctcttaaccaagcaaaatacataccagaactggcttattatggattgtatttgctgtgctctcccattcatggagaaggagataaggtcatcagttgtgttttccatcaaatgctcagtgtaatattaatgttagaagttggtgaaggatcccatcgtgccccccttgctgttacctcccaagtcatcaactgtagaaaccaggcggtccagtttatcagcgcccttgtggatgaattaaaggagagtatattcccagtcgtccgtatcttactgcagcacatctgtgccaaggtggtagataaatcagagtatcgtacttttgcagcccagtccctagtccagctgctcagtaaacttccttgtggggaatacgctatgttcattgcctggctttacaaatactcccgaagttccaagatcccacaccgggtttttactcttgatgttgtcttagctctgttagaactgcctgaaagagaggtggataacaccctctccttggagcatcagaagttcttaaagcataagttcctggtgcaggaaattatgtttgatcgttgcttagacaaggcgcctactgtccgcagcaaggcactgtccagctttgcacactgtctggagttgactgttaccagtgcgtcggagagtatcctggagctcctgattaacagtcctacgttttctgtaatagagagtcaccctggtaccttactgagaaattcatcagctttttcctaccaaaggcagacatctaaccgttccgaaccctcaggggagatcaacatagacagcagtggtgaaacagttggatctggagaaagatgtgtcatggcaatgctgagaaggaggatcagggatgagaagaccaacgttaggaagtctgcactgcaggtattagtgagtattttgaaacactgtgatgtctcaggcatgaaggaagacctgtggattctgcaggaccagtgtcgggaccctgcagtgtctgtccggaagcaggccctccagtctcttactgaactccttatggctcagcctagatgcgtgcagatccagaaagcctggttgcggggggtggtcccggtggtgatggactgcgagagcactgtgcaggagaaggccctggagttcctggaccagctgctgctgcagaacatccggcatcacagtcattttcactctggggacgacagccaggtcctcgcctgggcgcttcttactctcctcaccaccgaaagccaggaactgagccgatatttaaataaggcttttcatatctggtccaagaaagaaaaattctcacccacttttataaacaatgtaatatctcacactggcacggaacattcggcacctgcctggatgctgctctccaagattgctggctcctcacccaggctggactacagcagaataatacaatcttgggagaaaatcagcagtcagcagaatcccaattcaaacaccttaggacatattctctgtgtgattgggcatattgcaaagcatcttcctaagagcacccgggacaaagtgactgatgctgtcaagtgtaagctgaatggatttcagtggtctctagaggtgatcagttcagctgttgacgccttgcagaggctttgtagagcatctgcagagacaccagcagaggagcaggaattgctgacgcaggtgtgtggggatgtactctccacctgcgagcaccgcctctccaacatcgttctcaaggagaatggaacagggaatatggacgaagacctgttggtacatttttaccttaggggatatagcccagctgtgtccagccagggtggagaagcgcatcttccttctgattcagtccgtcctggcttcgtctgctgatgctgaccactcaccatcatctcaaggcagcagtgaggccccagcgtctcagccacccccccaggtcagaggttctgtcatgccctctgtgattagagcacatgccatcattaccttaggtaagctgtgcttacagcacgaggatctggcaaagaagagcatcccagccctggtgcgagagctcgaggtgtgtgaggacgtggctgtccgcaacaacgtcatcattgtaatgtgcgatctctgcattcgctacaccatcatggtggacaagtatattcccaacatctccatgtgtctgaaggattccgacccattcatccggaagcagacactcatcttgcttaccaatctcttgcaggaggaatttgtgaaatggaagggctccctgttcttccgatttgtcagcactctgatcgattcacacccagacattgccaggtaaatcttttcctcacgtcagacgactcaacagtttacctcatttctgatgtatgctggatttctttttttttcagattggtttagagttaagtaggatttagtgagctttcggtaggtgccaggaaaattagcagatttttaagatgctaagcaatataacaaacctttgttttgcacacaagtttaaaagaaaatggttagattcatcattgaataatctcagcattgactgcacttgctgacagtgtttgctgttcctgaaggagcttgaagaatattatatgcttgctgtattacactgtatagagtagcagccactagaaactcactgttaatttctaggcaaa

SEQ ID NO: 246237 - DNA, 3212 bp, Homo sapiens
ccagccgcttgttggggttcttgagggcaaggctcaccttcccggagaccgtctccccgtcgtagaagaggaaatatttctccttcttcccgtcctccgtcttgtgctcggcccgcttcctactctctgcatcgttcagaaggatttccacctccacgctctgcccgaagccgaagaagctcatcgcaccgccgggccgggcgggtctcggaacgactcggcgcgcgcgcgggagcgagctttgaaagttgagcacggcggcggcgagccggtgccctgggatcatggtggcgttgcggggccttggtagcggcctgcagccctggtgtccgctggatcttagactcgaatgggttgacacagtgtgggaactggatttcacagagactgagcctttggatcccagcatagaagcagagatcatagagactggattggctgcattcacaaaactctatgaaagccttttaccctttgctactggagaacatggatctatggagagtatctggaccttcttcattgagaacaatgtttcccatagtacactggtggcattgttctatcattttgttcaaatagttcataagaagaatgtcagtgtacagtatcgagaatatggccttcatgccgctgggctttactttttgctactagaagtaccaggcagtgtagccaatcaagtattccacccagtgatgtttgacaaatgcattcagactctaaagaagagctggccccaggaatctaacttgaatcggaaaagaaagaaagaacagcctaagagctctcaggctaaccccgggaggcatagaaaaaggggaaagccacccaggagagaagatattgagatggatgaaattatagaagaacaagaagatgagaatatttgtttttctgcccgggacctttctcaaattcgaaatgccatctttcaccttttaaagaattttttaaggcttctgccaaagttttccttgaaagaaaagccacaatgtgtacagaattgtatagaggtctttgtttcattaactaattttgagccagttcttcatgaatgtcatgttacacaagccagagctcttaaccaagcaaaatacataccagaactggcttattatggattgtatttgctgtgctctcccattcatggagaaggagataaggtcatcagttgtgttttccatcaaatgctcagtgtaatattaatgttagaagttggtgaaggatcccatcgtgccccccttgctgttacctcccaagtcatcaactgtagaaaccaggcggtccagtttatcagcgcccttgtggatgaattaaaggagagtatattcccagtcgtccgtatcttactgcagcacatctgtgccaaggtggtagataaatcagagtatcgtacttttgcagcccagtccctagtccagctgctcagtaaacttccttgtggggaatacgctatgttcattgcctggctttacaaatactcccgaagttccaagatcccacaccgggtttttactcttgatgttgtcttagctctgttagaactgcctgaaagagaggtggataacaccctctccttggagcatcagaagttcttaaagcataagttcctggtgcaggaaattatgtttgatcgttgcttagacaaggcgcctactgtccgcagcaaggcactgtccagctttgcacactgtctggagttgactgttaccagtgcgtcggagagtatcctggagctcctgattaacagtcctacgttttctgtaatagagagtcaccctggtaccttactgagaaattcatcagctttttcctaccaaaggcagacatctaaccgttccgaaccctcaggggagatcaacatagacagcagtggtgaaacagttggatctggagaaagatgtgtcatggcaatgctgagaaggaggatcagggatgagaagaccaacgttaggaagtctgcactgcaggtattagtgagtattttgaaacactgtgatgtctcaggcatgaaggaagacctgtggattctgcaggaccagtgtcgggaccctgcagtgtctgtccggaagcaggccctccagtctcttactgaactccttatggctcagcctagatgcgtgcagatccagaaagcctggttgcggggggtggtcccggtggtgatggactgcgagagcactgtgcaggagaaggccctggagttcctggaccagctgctgctgcagaacatccggcatcacagtcattttcactctggggacgacagccaggtcctcgcctgggcgcttcttactctcctcaccaccgaaagccaggaactgagccgatatttaaataaggcttttcatatctggtccaagaaagaaaaattctcacccacttttataaacaatgtaatatctcacactggcacggaacattcggcacctgcctggatgctgctctccaagattgctggctcctcacccaggctggactacagcagaataatacaatcttgggagaaaatcagcagtcagcagaatcccaattcaaacaccttaggacatattctctgtgtgattgggcatattgcaaagcatcttcctaagagcacccgggacaaagtgactgatgctgtcaagtgtaagctgaatggatttcagtggtctctagaggtgatcagttcagctgttgacgccttgcagaggctttgtagagcatctgcagagacaccagcagaggagcaggaattgctgacgcaggtgtgtggggatgtactctccacctgcgagcaccgcctctccaacatcgttctcaaggagaatggaacagggaatatggacgaagacctgttggtacatttttaccttaggggatatagcccagctgtgtccagccagggtggagaagcgcatcttccttctgattcagtccgtcctggcttcgtctgctgatgctgaccactcaccatcatctcaaggcagcagtgaggccccagcgtctcagccacccccccaggtcagaggttctgtcatgccctctgtgattagagcacatgccatcattaccttaggtaagaaaaacatgggagaatggggcttgacatcgttctgtgtgtagctgttgtcttaagtaagcccagccatgggactgtgtcaggggctgcggagcctgtctgtgtctgctctcagccatgtggttcctagaggtggctctgatctgag

SEQ ID NO: 246238 - DNA, 738 bp, Homo sapiens
ccagccgcttgttggggttcttgagggcaaggctcaccttcccggagaccgtctccccgtcgtagaagaggaaatatttctccttcttcccgtcctccgtcttgtgctcggcccgcttcctactctctgcatcgttcagaaggatttccacctccacgctctgcccgaagccgaagaagctcatcgcaccgccgggccgggcgggtctcggaacgactcggcgcgcgcgcgggagcgagctttgaaagttgagcacggcggcggcgagccggtgccctgggatcatggtggcgttgcggggccttggtagcggcctgcagccctggtgtccgctggatcttagactcggttccactggatgtctcacatgcagacatcatcaaacgtcacatgagtgaaaatgggattcccaaagcctgctaatggcaccatccaagccaccaacccaggagtcatggcatttctgcttcccctttcatgcccactaccactgtcctgcctctgaggtgtctcagggcagccccgctccattcctgatgctgctgccttcatcatagcctcgagcaattgcaggagtattttagctgctttctgatgttaactgtgccagcccatcccccacacttttgcagaacgacttttgaaaacacagctttgaatgtgtcaagcctgtacacctttaatgtttcccctttgtttcctaaataaatgaccacatccttggcatgctttataaga

SEQ ID NO: 246239 - DNA, 446 bp, Homo sapiens
aaaaaaaaaaaaggacaatgttactaatttttgtcactataactgtgtaagctctggatgtatctgtaactgaccccatgcagttatgtagaaattttggaggggaggaggataagaagagtctgaaatgaattgtgaaattttattctttactttaaggaatattttatgaggggaaaaatgaatataactgatagtagaataataaaaatttaaaagatacctagtttggtatcagacacgccactaattaggaacgtctacatataagtttcatgtgccacttgagtcctggagcagcagaagttgataccctttcagtgaggctcccatctgaatcattttgtatatttacagttgcaattctgcttttctatcttttttttttccagccgatatttaaataaggcttttcatatctggtccaagaaagaaaaattctcacc

SEQ ID NO: 246240 - DNA, 576 bp, Homo sapiens
tgggcgccatctaccctccagtgtttcctaacaatcccccatccaggcacaaaacctctttaagctgttgaaccttcagtccctcttcgtgacatcgcggggcagagctgtgggctgcgtgtcctgggtggagatgaagaaagcaatttccaacctgacaaatccgccagctccaaagtgagccggcccagcaagatgaaacagggcaccccagctgacctggtactgaggttgggctgagaccctgcttctcttcccccatcaccacctgcccctccctccagcccagctccattctttggcataacaggcaactctaacctagcccagaagaggatggctcatcctgggtgggacgatggctcctgccttgaaagacaaaaatcccaccttgggcagagctgagtgtgagaagatggaaaaccagtatctgccaggtgctcagtgactggccatcacattaatgaatgacgagattggagtacactgtcaccaagggcaggcaaagatgccctctggggttgtctggttcccagtgagaggctcctgagaaaaataaagctggttcccagagct

SEQ ID NO: 246241 - DNA, 961 bp, Homo sapiens
acggttccaatccgcagccgggggaagtcgcaacaaccaatgcaccgaggtccggccatctttagcggcaccatatcgtcagatgctccataccggcacggatgtcggcccgcaacatcggctcccaccatgtgagggtggagcacttcatgaaccacagcatcaccacactggccaaggacacgccgctggaggaggtggtcaaggttgtgacctccacagacgtgaccgagtatcccctggtggagagcacagagtcccagatcctggtaggcatcgtgcagagggcccagctggtgcaggccctccaggctgagcctccttccagggctccaggacaccaggtgcagtgtctccaggacatcttggccaggggctgccccacggaaccagtgaccctgacgctattctcagagaccaccttgcaccaggcacaaaacctctttaagctgttgaaccttcagtccctcttcgtgacatcgcggggcagagctgtgggctgcgtgtcctgggtggagatgaagaaagcaatttccaacctgacaaatccgccagctccaaagtgagccggcccagcaagatgaaacagggcaccccagctgacctggtactgaggttgggctgagaccctgcttctcttcccccatcaccacctgcccctccctccagcccagctccattctttggcataacaggcaactctaacctagcccagaagaggatggctcatcctgggtgggacgatggctcctgccttgaaagacaaaaatcccaccttgggcagagctgagtgtgagaagatggaaaaccagtatctgccaggtgctcagtgactggccatcacattaatgaatgacgagattggagtacactgtcaccaagggcaggcaaagatgccctctggggttgtctggttcccagtgagaggctcctgagaaaaataaagctggttcccagagct

SEQ ID NO: 246242 - DNA, 447 bp, Homo sapiens
caaagaagtgagctaaatgacatggtgtgtcacattgcagttactctgattgggatgatcatgagagtatagatagaggcatttagtatgagtgacaaaagtattcttttccttaactttgagaacatagccaaagagaacaagaaggtaggaagctagcagctgtgttactttggacagcttatttaagcttttgagacagtttcaaaaacagttttcttagctttaacatagtttttgtaatacaaggttttgcaggctaaaggagataaaataggcaaaatacttagcatataagcacttaacaaatattcttggctgggtgccgtggctcatgcctataatcacagcactttgggaggccaaggtgggcagatcacttgagcttaggagtttgagactagcctgggcaatatggcgaaaccctgtatctacaaaaacaacaac

SEQ ID NO: 246243 - DNA, 291 bp, Homo sapiens
gaaaccatccaatttattagtgtttcccttgctgcctcagcatttctggttaatgcactacagcaaatcatttggagggacaacctgaatgaagctctgccctgtgtactctgcaaaaatgttcaaaccattatcaagagtgttggaaatgaaagacaacagcatgaaattgagaagataaaattttatcagagattgtctttttaaaacaatgacttcaaagtaagaatatacattgactaatatgtacagaattattattaaaacaaatatttatttcacaccaactac

SEQ ID NO: 246244 - DNA, 431 bp, Homo sapiens
  misc_feature (416)..(417): n is a, c, g, or t
caagggggcccacagacagaaggcctgctgggccaatgacacacacttgctatgtcagagagatgcagggatgctatggtttgaatgtgctccccaaaaagcatgtgctggaaatgcaatccctgatgccacagtgttaggaggtggggcctcatgggaggtgtttagatcacgagggttccatcctcatgaatggattaatgtggattataaaagggctgggggctgactacaggcatgcacactgtgcctggctaatttttgtattttgtagagacagggtttttgccatgttacccagtctggtcttgaactcctgggctcaagtgatccacccacctcggcctccaaaagaagtcctggattacaggcatgagacattgtgcccagcctctctgtctctttaaaatcatgannactcgtagctactt

SEQ ID NO: 246245 - DNA, 427 bp, Homo sapiens
gctgctgagacagagatgagcaacacagacacgatccctgcccccgagggtttccagtctaatggggcattgaacccttaccaaatgatcacacccgtcatcacagacggaatggggtgtcggagaggtcagcgagtagtagccagagaaggtttccccaaggaagtgacctatgagttgaaatctgaaaggttatagcagcctaactaggtgagggggaagcattccaggtaagagaagcacaggtgtgaagagacgctttgatatgggaaggagcaacggagaacctgggtgaaggcggcagacaggagccaggtttggtgaggcttttgtttaatgaagttgacggtctttagctgcaaggttgcccctttagactttgcttccttagaggatttaacctcattgtttcttcaaggccggccaa

SEQ ID NO: 246246 - DNA, 272 bp, Homo sapiens
ataaaccccaccactgagaattatttggttaaccacagtttaggctactgatggattttactcagaattaaagtggaaatatattaaagcaatagttttgagaacaaagtaggtcacaaagctccatttaaaatagaataggccgggcatggtggctcatgcctgtaatcccagcagggcaaggcaggaggattgcttgagcccaggagttcaacaccagcctgggcaacaacgaaaccctgtctctacaaaaaatgcaaaaattagctggg

SEQ ID NO: 246247 - DNA, 146 bp, Homo sapiens
tttttttgaagctattgtaaaaggggttgagttcttgatttgatcctcaacttggtcactgtaggtgtatagaagagcactgatttgtgtacattaattttgtacactgaaactttgctgcattaatttatcagttctaggaactt

SEQ ID NO: 246248 - DNA, 5408 bp, Homo sapiens
  misc_feature (1246)..(1246): n is a, c, g, or t
  misc_feature (1493)..(1493): n is a, c, g, or t
  misc_feature (1573)..(1573): n is a, c, g, or t
  misc_feature (4119)..(4119): n is a, c, g, or t
  misc_feature (4882)..(4882): n is a, c, g, or t
tactcagggcctcgtctgtcaggccgggagacccggactcttacctgtggagatgtggagctgggaatgacgctgtcccgaaaaacaggaggtagccaggggacgagagggaagtagggatgctccaggcagaggacacagcttgcgcaaaggcctggagctctacgtgtcatctgacttggggaaaaagtggacacttctgcaagagcgagtgaccaaagaccacgtgttctggtctgtgtctggggtggacgctgaccctgacttggtccacgtggaagcccaagacctcggtggagattttcggtacgtcacctgcgcaatccacaattgctccgagaagatgctgacagccccattcgcaggccccattgaccacgggtctctgaccgtgcaggacgattacatcttctttaaggcaacatcagcaaaccagacaaaatactacgtctcttatcgtcgaaatgaatttgtcctgatgaagctgccgaagtatgcattgccaaaggatctgcagatcatcagcacggacgagagtcaggtgttcgtggcggtgcaggagtggtaccagatggacacctacaacctgtaccagtcggacccacggggcgtgcgctacgcgctggtgctgcaggacgtgcgcagctcacggcaggcggaggagagcgtgctcatcgacatcctggaggtcagaggggtgaaaggagtcttcctggcaaaccaaaaaattgatgggaaagtgatgacgcttataacctacaacaagggccgcgactgggattacctgaggccacccagcatggacatgaatggaaaaccaaccaactgcaagcctccagactgccacctgcacctgcacctgcgctgggcagacaacccctacgtatcaggcaccgtgcacaccaaggacaccgccccaggcctcatcatgggtgcaggtaacctgggctcacagctggtggaatataaagaagaaatgtacatcacgtcagactgtggtcacacctggcggcaggtgtttgaggaagagcatcacatcctgtacctggaccacggcggcgtgatcgtggccatcaaagacacctccatccctttgaagatcctcaagttcagtgtggacgagggcctcacctggagcacgcacaacttcaccagcacctcggtgtttgtggacgggctgctgagtgagccaggggacgagacgctggtcatgacggtctttggccacatcagcttccgctccgantgggagctggtcaaggtggacttccggccctcattctccaggcagtgcggcgaggaggactacagctcctgggagctctccaacctgcagggcgaccgctgtatcatgggccagcagagaagtttccggaaaagaaagtccacgtcctggtgcatcaaggggaggagcttcacgtcggcgctcacgtcccgcgtgtgcgagtgccgggactcggacttcctgtgcgactacggatttgagcgctccncctcctcagagtccagcaccaacaagtgctctgccaacttctggtttaacccattgtccccgcctgacgactgtgccctnggccagacctacaccagcagccttgggtaccggaaagtggtgtccaacgtgtgtgagggtggggtggacatgcagcagagtcaggtgcagctgcagtgccccctcacgccgccccggggcctgcaggtcagcattcaaggcgaggcggtggccgtgcggcctggagaggacgtcctgtttgtggtgcggcaggagcagggtgatgtcctgactaccaagtaccaggtagaccttggggacggcttcaaggccatgtacgtgaaccttacactgaccggggagcccatccggcaccgctacgagagccccggcatctaccgcgtgtccgtcagggcagagaacacggcaggccacgatgaggcggtgctctttgtccaggtcaactcccccctgcaggccctctacctggaggtggttcctgtcattggcctcaaccaggaggtgaacctcacagctgtgctgcttcccttgaaccctaacctcaccgtcttctactggtggatcggccacagcctgcagcccctcctttccctggataattctgtgacaacgcggttttcggacacgggcgacgtgcgtgtgacggtgcaggccgcctgtgggaactcggtgctgcaggactccagggtcctccgtgtgctggatcaatttcaagtcatgcctctgcagttttccaaggagctggatgcctacaaccccaacacccctgagtggagggaagacgtgggcctggtggtcacccggctgctctccaaggagaccagcgtccctcaggagcttctggtgactgtggtgaagccggggctgcccactttggccgatctgtacgtgctcctgccccctcccaggcccacaaggaagaggagcctctcgagtgataagaggctcgccgccatccagcaggtgctgaacgcacagaagatcagcttcctcctgcgaggcggagtccgggtcctggtggccctgcgggacacaggcacaggtgctgagcagctgggcggcggtggcggctactgggcggtagtggtgctgtttgtcatcgggctcttcgcagcgggagccttcatcctctacaagttcaaaaggaaacggccaggcaggaccgtgtacgcccaaatgcacaacgagaaggagcaggagatgaccagccctgtgagtcacagtgaggacgtccagggcgctgtccagggcaaccactcaggcgtggtcctgagcatcaactcccgagagatgcacagctacctggtgagctgatgccaccccagcatctgtcttttcacccacggagggcacagaaccaccagcaaagccggcggctggactggcgcccctcagagacctgcggaaagccccctccctgagtcgtcgccacaccaggcgacaggcaccaccccctctgataaatccaagcccgcccaggcccacggggggcccacgggaccccccgggactccccggacatggccctgcccctatgggacaccaggcctgactcaggcaggttctgccccccagaccccacacacggccgccccacgtgctgtcgctcagcccgaggcctgacttctctgggctgaggctggtcgtcctggagccctcccagtacctcgggctgcaagagctgcagacccgttcagacactgcgttgcgggctccttccccgcagaggccggggcctccctgactttgcttcttcactcccacctgtgcggccacccagtccctctgtgggagcccgggtgccaggccctcccaacaccacaccaccctccaggcccccctgccctccggctggaaactgcagctctgtaaatgcctctctaggtagctgctggcggtggtgggggtgtctcactctctgtctttatagccggcggtagccaccggggtggctctgtcagagttccgtactcgggagcccctttccctgagtgcccagggtgtctcctctgcccagaggggcagcagctctccctggttctccccagggcagacggggtagggcgggctcaggacccagtgcccatggttcctcactcctaccagcaagcagcaccatcccgcaggcttctcccacctgatggctgttctcccaccgggtctgggctctggaaggagccagatgcccccagaaaggtgggtggtggagacggcaccagatgtaccagttttctgcagttccttataggcgaagggaaccgggtggaaaccaagctgggagaggctgaggatggcagggctggaagggccatcagcgtgaccctcattttcaagaaggggaaactgaggcccagggaggagagtaactgaaggtcacagcacggtcacagcagaggtggccgaacccagccctctgcgcgccagtgctgtgcggtctccacacccttacggtttcctagaatcagggatgttagtgtaagtctataggaatataggggggtgggggggtcaccttttgccttgaaatgggaagtcagtagccccttcctcctcctccctcctccccctcctctctggcagggatctcagatgaccgtggcctcccnctcagagggggagaacgccagagccctggctggtgatgtgctggctgggggtgaatcccaatgagggtccctctcagagcgggagaacgccagagccctggatggtgatgcgctggctgggggtgaatcccaatgagggtccctctcagaaagggagaacgccagagccctggctggtgacatgctggctgggggtgaatccgaatgacagtgcagacgttctcccatccaccatgtctgagcttgggggaattgcctcatttcccctggaaaagaaacatggtccattagaggggaaagcccaggggtgaatcttcacgccccaaacagtgcccggtggggaggaggcacccgctccttgttgagtaaaaccacccatggagactggaacctcatctccctgggtcggggggtgttcaaggccacaggacaaggggagcaccctgggccacacaggcgtggaggtgtccccaccccttccacctgtcccccagacccaaagctctctccccaccctacctgcccacctggggctcctgtgccccctccccactccagaggccaccctacaagttgtcctcaaggtcatcctggagatgggatccaggacgtggggccatgactctctgggaccttgccacagcccccattcccctgcttgcagtctgcaaggacacctttgcagggattcttgtcctgctggccaccccacccacacctgtccctggccagcaggccgcctgcaagcgtcaggcacacaggnacagacatggcgagcacagtgcaggcccggggcccacgggcaacatggaaccctgggaactgccctcccccttagctcacagtgcctgcggtagccactctaggtcgttggccttccttgaccactccatttaattctctctgctgtttgggttgggtttttccccttagttatctgtgggtttcctgtattttatgttaatatttctattaagaacatgttgggcatgtggacccaagcacctgggaaggaggtggcatctgagacagcctgatacgttcccgtctgtgcacccatggagatccaggcgtgggcccgtggctgtccctggttgtaaattcgagggtctgcatatctgatgttcaggtagacctgggcgcctgggaacgaggccatcagctgccatgcacataacaaagagacaatgcattccttcttatttttcctttttaaaaatcgatgaatcatttgtgatgcttttaacaaagattaaatgaatttgatcagcttttgccttaaaaaaaaa

SEQ ID NO: 246249 - DNA, 5963 bp, Homo sapiens
  misc_feature (1801)..(1801): n is a, c, g, or t
  misc_feature (2048)..(2048): n is a, c, g, or t
  misc_feature (2128)..(2128): n is a, c, g, or t
  misc_feature (4674)..(4674): n is a, c, g, or t
  misc_feature (5437)..(5437): n is a, c, g, or t
gcggccgctcctgctgctgctgctgctgctgggcgcctgcggggcggcggggcgctcccctgagcccgggcgcctgggtcctcacgcccaactgacccgggtgccgcggagccctcccgcggggcgcgcggagcccggtggcggcgaggaccggcaggcgcgcggcacggagccaggcgccccgggtccgagtcccggtcccgctcctggtcccggcgaggacggcgcccccgccgcgggctaccggcgctgggagcgggcggcgccgctggccggagtggcttcgcgggcgcaggtctcgctcatcagcacgtcgttcgtgctcaagggggacgcgacgcacaaccaggcgatggtgcactggacgggcgagaacagcagcgtgatcttgatcctgacgaagtactaccacgcagacatggggaaggttctggaaagttctctgtggcggtcatcagatttcgggacgtcctacaccaagctcaccctccagcctggtgtcaccaccgtcatcgacaatttctacatctgcccgaccaacaagaggaaggtcatccttgtcagctcctcactcagtgaccgggaccagagcctattcctcagcgcagacgaaggcgccacctttcagaagcagcccattcccttcttcgtggaaactctgattttccaccctaaggaggaggacaaggtcctcgcctacacaaaggagagcaagctctacgtgtcatctgacttggggaaaaagtggacacttctgcaagagcgagtgaccaaagaccacgtgttctggtctgtgtctggggtggacgctgaccctgacttggtccacgtggaagcccaagacctcggtggagattttcggtacgtcacctgcgcaatccacaattgctccgagaagatgctgacagccccattcgcaggccccattgaccacgggtctctgaccgtgcaggacgattacatcttctttaaggcaacatcagcaaaccagacaaaatactacgtctcttatcgtcgaaatgaatttgtcctgatgaagctgccgaagtatgcattgccaaaggatctgcagatcatcagcacggacgagagtcaggtgttcgtggcggtgcaggagtggtaccagatggacacctacaacctgtaccagtcggacccacggggcgtgcgctacgcgctggtgctgcaggacgtgcgcagctcacggcaggcggaggagagcgtgctcatcgacatcctggaggtcagaggggtgaaaggagtcttcctggcaaaccaaaaaattgatgggaaagtgatgacgcttataacctacaacaagggccgcgactgggattacctgaggccacccagcatggacatgaatggaaaaccaaccaactgcaagcctccagactgccacctgcacctgcacctgcgctgggcagacaacccctacgtatcaggcaccgtgcacaccaaggacaccgccccaggcctcatcatgggtgcaggtaacctgggctcacagctggtggaatataaagaagaaatgtacatcacgtcagactgtggtcacacctggcggcaggtgtttgaggaagagcatcacatcctgtacctggaccacggcggcgtgatcgtggccatcaaagacacctccatccctttgaagatcctcaagttcagtgtggacgagggcctcacctggagcacgcacaacttcaccagcacctcggtgtttgtggacgggctgctgagtgagccaggggacgagacgctggtcatgacggtctttggccacatcagcttccgctccgantgggagctggtcaaggtggacttccggccctcattctccaggcagtgcggcgaggaggactacagctcctgggagctctccaacctgcagggcgaccgctgtatcatgggccagcagagaagtttccggaaaagaaagtccacgtcctggtgcatcaaggggaggagcttcacgtcggcgctcacgtcccgcgtgtgcgagtgccgggactcggacttcctgtgcgactacggatttgagcgctccncctcctcagagtccagcaccaacaagtgctctgccaacttctggtttaacccattgtccccgcctgacgactgtgccctnggccagacctacaccagcagccttgggtaccggaaagtggtgtccaacgtgtgtgagggtggggtggacatgcagcagagtcaggtgcagctgcagtgccccctcacgccgccccggggcctgcaggtcagcattcaaggcgaggcggtggccgtgcggcctggagaggacgtcctgtttgtggtgcggcaggagcagggtgatgtcctgactaccaagtaccaggtagaccttggggacggcttcaaggccatgtacgtgaaccttacactgaccggggagcccatccggcaccgctacgagagccccggcatctaccgcgtgtccgtcagggcagagaacacggcaggccacgatgaggcggtgctctttgtccaggtcaactcccccctgcaggccctctacctggaggtggttcctgtcattggcctcaaccaggaggtgaacctcacagctgtgctgcttcccttgaaccctaacctcaccgtcttctactggtggatcggccacagcctgcagcccctcctttccctggataattctgtgacaacgcggttttcggacacgggcgacgtgcgtgtgacggtgcaggccgcctgtgggaactcggtgctgcaggactccagggtcctccgtgtgctggatcaatttcaagtcatgcctctgcagttttccaaggagctggatgcctacaaccccaacacccctgagtggagggaagacgtgggcctggtggtcacccggctgctctccaaggagaccagcgtccctcaggagcttctggtgactgtggtgaagccggggctgcccactttggccgatctgtacgtgctcctgccccctcccaggcccacaaggaagaggagcctctcgagtgataagaggctcgccgccatccagcaggtgctgaacgcacagaagatcagcttcctcctgcgaggcggagtccgggtcctggtggccctgcgggacacaggcacaggtgctgagcagctgggcggcggtggcggctactgggcggtagtggtgctgtttgtcatcgggctcttcgcagcgggagccttcatcctctacaagttcaaaaggaaacggccaggcaggaccgtgtacgcccaaatgcacaacgagaaggagcaggagatgaccagccctgtgagtcacagtgaggacgtccagggcgctgtccagggcaaccactcaggcgtggtcctgagcatcaactcccgagagatgcacagctacctggtgagctgatgccaccccagcatctgtcttttcacccacggagggcacagaaccaccagcaaagccggcggctggactggcgcccctcagagacctgcggaaagccccctccctgagtcgtcgccacaccaggcgacaggcaccaccccctctgataaatccaagcccgcccaggcccacggggggcccacgggaccccccgggactccccggacatggccctgcccctatgggacaccaggcctgactcaggcaggttctgccccccagaccccacacacggccgccccacgtgctgtcgctcagcccgaggcctgacttctctgggctgaggctggtcgtcctggagccctcccagtacctcgggctgcaagagctgcagacccgttcagacactgcgttgcgggctccttccccgcagaggccggggcctccctgactttgcttcttcactcccacctgtgcggccacccagtccctctgtgggagcccgggtgccaggccctcccaacaccacaccaccctccaggcccccctgccctccggctggaaactgcagctctgtaaatgcctctctaggtagctgctggcggtggtgggggtgtctcactctctgtctttatagccggcggtagccaccggggtggctctgtcagagttccgtactcgggagcccctttccctgagtgcccagggtgtctcctctgcccagaggggcagcagctctccctggttctccccagggcagacggggtagggcgggctcaggacccagtgcccatggttcctcactcctaccagcaagcagcaccatcccgcaggcttctcccacctgatggctgttctcccaccgggtctgggctctggaaggagccagatgcccccagaaaggtgggtggtggagacggcaccagatgtaccagttttctgcagttccttataggcgaagggaaccgggtggaaaccaagctgggagaggctgaggatggcagggctggaagggccatcagcgtgaccctcattttcaagaaggggaaactgaggcccagggaggagagtaactgaaggtcacagcacggtcacagcagaggtggccgaacccagccctctgcgcgccagtgctgtgcggtctccacacccttacggtttcctagaatcagggatgttagtgtaagtctataggaatataggggggtgggggggtcaccttttgccttgaaatgggaagtcagtagccccttcctcctcctccctcctccccctcctctctggcagggatctcagatgaccgtggcctcccnctcagagggggagaacgccagagccctggctggtgatgtgctggctgggggtgaatcccaatgagggtccctctcagagcgggagaacgccagagccctggatggtgatgcgctggctgggggtgaatcccaatgagggtccctctcagaaagggagaacgccagagccctggctggtgacatgctggctgggggtgaatccgaatgacagtgcagacgttctcccatccaccatgtctgagcttgggggaattgcctcatttcccctggaaaagaaacatggtccattagaggggaaagcccaggggtgaatcttcacgccccaaacagtgcccggtggggaggaggcacccgctccttgttgagtaaaaccacccatggagactggaacctcatctccctgggtcggggggtgttcaaggccacaggacaaggggagcaccctgggccacacaggcgtggaggtgtccccaccccttccacctgtcccccagacccaaagctctctccccaccctacctgcccacctggggctcctgtgccccctccccactccagaggccaccctacaagttgtcctcaaggtcatcctggagatgggatccaggacgtggggccatgactctctgggaccttgccacagcccccattcccctgcttgcagtctgcaaggacacctttgcagggattcttgtcctgctggccaccccacccacacctgtccctggccagcaggccgcctgcaagcgtcaggcacacaggnacagacatggcgagcacagtgcaggcccggggcccacgggcaacatggaaccctgggaactgccctcccccttagctcacagtgcctgcggtagccactctaggtcgttggccttccttgaccactccatttaattctctctgctgtttgggttgggtttttccccttagttatctgtgggtttcctgtattttatgttaatatttctattaagaacatgttgggcatgtggacccaagcacctgggaaggaggtggcatctgagacagcctgatacgttcccgtctgtgcacccatggagatccaggcgtgggcccgtggctgtccctggttgtaaattcgagggtctgcatatctgatgttcaggtagacctgggcgcctgggaacgaggccatcagctgccatgcacataacaaagagacaatgcattccttcttatttttcctttttaaaaatcgatgaatcatttgtgatgcttttaacaaagattaaatgaatttgatcagcttttgccttaaaaaaaaa

SEQ ID NO: 246250 - DNA, 404 bp, Homo sapiens
atcctgtactgagttaaaaaccacaaaggtcaccagaagagagattcctgagatggatttgaattctggcaaaaccaacgttaggccagccaaggagcatattggagaaagagattggtatttaataagcatcgcggggacagttggctaacaggccaggggagagttaatttaaattcatacagcatacctgtcaagttcagctatatcgtactgctaatctgtgacaaacctggagacaaggaactggcattgttacccctgctgctgataaggagataaattcctggctattgaagaaaaagataccatcagggctctgatagatgggttcaaatatgtgagaataaaaatgtttgcattgcaatgtaataaaaataaataccaaaaggaaagccacggca

SEQ ID NO: 246251 - DNA, 501 bp, Homo sapiens
cactgattttgtatcctgaaactctactgaattcatttatcagatctaggatctttttggatgaatcttgagggttttctgggtatatgatcatatcatcgatgaaaagtgacagtttgcctttctctttactgatttggataccctttatttttttctcttgtctgattgctctggatcacaacagacagcaacttttaaactgtggtatttgacaaagttttgacatttgtaaacacaaataaacaataatcacaataaaataatgaacatacttatcacaccaaaaggattttatatcattttgtcatatttgttttgctattgtctaagaaattgagtaatttttaaagtaaaaaatccaagagaaaaggaaatatggaacaggtggctgaaatagaaagtactagtaaaatggtagatttaaagccaaatactttagtaatctcataagtgtaagttaaccacatggtttaattaaaagacatattactaattaat

SEQ ID NO: 246252 - DNA, 477 bp, Homo sapiens
tgcattttaaaatattttagctgatttgttagtgccttttctgcttaggcagatataagtatcaggtgaattgattgtggaacataagtagagacactgcattggaatgaaaatcagttttataaagttgaacacagattttaaaaatgctgtacatagatttgtttttatatttttcagtaaaattttaggccaggtgtggtggctcatacctgtaatccccgcactttaggaggctgaggtgggagaattgcttgagcccaggagtttgtgaccagcttggacaacacagggagacctcatctctaaaaaaagtgtaaaaataaaaaattaactgggcatggtggcacatgcctgtggtgactgagatgggaggatctcttgagcctgggaggttgaggttgccatgtgaccaatgattgcaccactgcactccagccttggtgacagagcgagaccctgtgtcagaaaaaaata

SEQ ID NO: 246253 - DNA, 416 bp, Homo sapiens
atcatagactgtaagctgagtaaggagagaatatacgtatataagagcagtgatggctggtgaaaagttttgtgggcaagaaatagaagtctccgtgaagtcaaagaatagttggattggggtgaaactggaaagataagggttggtggtcagaaagtggaataggctgggcgcggtggctcaggcctgtaattccagcactttcggaggctgaggcgggcggatcacgaggtcaggagatcgagaccatcctggccaacatggtgaaacccatctctactaaaaatacaaaaattagctgggtgtggtggctcgtgcctgtaatcctagctactcaggaggctgaggcaggagaatggcttgaaccagggagtcaaaggttgcagtgagccaagatcgtgccactgcactccagc

SEQ ID NO: 246254 - DNA, 330 bp, Homo sapiens
tacacacacttgaacccgtcttccatgttcacacccacacccagacatgcacaacttaacacacacacattcacagacatacagtcacccatacacattcacacagacatccatggacagccccccaacacggacatatcacacacattcacacacacacagtctcacatgtacacacatactcttgcacccaccccacacacgttcacactcacactcagacacacacagctcacatacacacacacacacagacatacagtctcacacacacacattgacacagacatccatggacacaccacacacaaacacacatacacacgagga

SEQ ID NO: 246255 - DNA, 250 bp, Homo sapiens
tcaagaggccagcagtctgcatatttggaattcatctgtaacgaagtgaattccaggtccctctcaatttctgcggcccaggcatagctaggagctgagtcctgggtggggcatgttacaacttgctggctgatgaagtcaaagcacttggatttctaaagaccaacggtttaaaggcttggtttgtgagctgacaaaaacaaagttttcactgttgatggggtgaaggtttttttttttttttttttct

SEQ ID NO: 246256 - DNA, 2278 bp, Homo sapiens
tttacatttgatctgcagtgaggggacatttctaattttagtttgacccacatggaaaggtggatagctttttttttttgttttggtatagagagcacgtagaattggacaattaggtaaatccttggaatcccccaaacagccatttgctttataaatccagtatttcttacctctgaacgtcttaaagagctgcctcacaaattaatctaaccattgcttgcactaagaagtttgccaagagcctcttccagccttactggggggaaggaagagattactgaaaaccaacttgtaggaatgaaatgaggctgtcagttgtctaacctaacaaactgccaaattaggtttacattttttgttattagacttttgaatggccgaggcagagttaaatttaaaattttggattgtagccactttccactcgcctaaacactcaataccggtttgtttatttttccagcatcaagaaagaaaaccaaggcactagaaagcaagcacacttaagtattgaagataattacatcttaaattttgcctgaactgtatattgtagcatacttaaacccattcaaggaaaaaattggcaaattgaaaattctcccattaaagattgatatttttgcaaactgacaaatttaacgatttcggtacccctccccaaaaatgcagtcacataaaatatatcaatactattttgaattagctctagaaatcacactgaaactatgttacatttacaaatattaaatttattataactaaaatgaatttaattgttctcagatttggccaccttatagctccgtttaaggaggggatttgttaaaaacaaaaatgcattataacttggtcaaattactttcacattaaggaaaaaaacttctaaaaaggaaaacaagaaaagcaactcttcagtttcacataattaaaagaacaggagaaagcacgcaagctacatatagctaaatttacgaaaccaaccaaagccagggggatttctcttctgattatgtgtcataaaaaggtccactgtcttatatacacatgtatataatgttacattccatcactgtaaaaagtcccctttgccccctcccccaaaaaagtttcagtctagtctccaaacttggaaagcggcgctcgctcctgctgccggtgcagttcgttctcggtcagcagctggaggttctcggcgcgcacgggtccagctccagctccagctcccgcacacgcgcgtcgtcgccacccagccgcttgctctccagccgcagccggttgttctcgtcctccatgcgcgagaggcacttctccagttccaggtactccttgatgagctcctgcttgctcatgttctgcaggctctccgtgtggtaccgctcgtacgtctccgagaagtcccgctgcagaaactcgctgccgtcccctcccatcccatcgctgcccccatcctcctcacccccttcttccatgaagtcgtcatcgctggtgtcgtcggatttggcggcggcccgcttggagtacaggccggttttgagatccggctcctcctggtcgtgatcatccatgaggaactgcgtggtgttatagggcgcgaccggctggcccttggcgaacatctcggctcggatccttgaagctcgaaggctctgtttctcgtcgaactttttcttctcttcccaggtcagcttgtagtacggtttccaatgccgcttcttcttggacgggcgtctcctatgttttttcttccccagctgtctctgctgctgtccccactcctcttcgccccctgcggcaggagcccccaacttactggcctcggagtcatgacaaggctgggcgagcagctcggcctcgggcgtcggttccacttctgccggcggcgggaagtcgccgccagcggacgagtcgtccccattctggcccttctcgccctctctcaggcagctagattctggacaggcctgggtctgcaagggaggtggttgggattccaggctcccttccccctccggccccggacggccacccaactgggggaacgctctcgattgccacctactgtcctcctcgggcacccgctcctccgcgcctggggggcgctcagggttcagctcttcctggacagcagcagcacctgtacagttgctagtttgaggctggtgttgatattctgacaagaatggctcggccatggctagtagagtcctcgaagtttaagaaattttggctagtaagtccttaaggaaaaaaatgggtttttcttaaaaaaaaa

SEQ ID NO: 246257 - DNA, 2095 bp, Homo sapiens
ctctgtctcaaaaaaaaaaaaaagttttccagaactgaagttctgctcctcctattaataatttttcttcagttggagtgacaactccatagcattaacttttttccctctgctccccagatgttttacaactggattacaaaataggatcatcattgactagggtcctcaatccaaaactggaaccacttactcctaactgaagcttcagtacacttgatgcctactgtggtttgattttttacctacatatgacatgttcgctctacactgatcaagagatcatcaagaaagaaaaccaaggcactagaaagcaagcacacttaagtattgaagataattacatcttaaattttgcctgaactgtatattgtagcatacttaaacccattcaaggaaaaaattggcaaattgaaaattctcccattaaagattgatatttttgcaaactgacaaatttaacgatttcggtacccctccccaaaaatgcagtcacataaaatatatcaatactattttgaattagctctagaaatcacactgaaactatgttacatttacaaatattaaatttattataactaaaatgaatttaattgttctcagatttggccaccttatagctccgtttaaggaggggatttgttaaaaacaaaaatgcattataacttggtcaaattactttcacattaaggaaaaaaacttctaaaaaggaaaacaagaaaagcaactcttcagtttcacataattaaaagaacaggagaaagcacgcaagctacatatagctaaatttacgaaaccaaccaaagccagggggatttctcttctgattatgtgtcataaaaaggtccactgtcttatatacacatgtatataatgttacattccatcactgtaaaaagtcccctttgccccctcccccaaaaaagtttcagtctagtctccaaacttggaaagcggcgctcgctcctgctgccggtgcagttcgttctcggtcagcagctggaggttctcggcgcgcacgggtccagctccagctccagctcccgcacacgcgcgtcgtcgccacccagccgcttgctctccagccgcagccggttgttctcgtcctccatgcgcgagaggcacttctccagttccaggtactccttgatgagctcctgcttgctcatgttctgcaggctctccgtgtggtaccgctcgtacgtctccgagaagtcccgctgcagaaactcgctgccgtcccctcccatcccatcgctgcccccatcctcctcacccccttcttccatgaagtcgtcatcgctggtgtcgtcggatttggcggcggcccgcttggagtacaggccggttttgagatccggctcctcctggtcgtgatcatccatgaggaactgcgtggtgttatagggcgcgaccggctggcccttggcgaacatctcggctcggatccttgaagctcgaaggctctgtttctcgtcgaactttttcttctcttcccaggtcagcttgtagtacggtttccaatgccgcttcttcttggacgggcgtctcctatgttttttcttccccagctgtctctgctgctgtccccactcctcttcgccccctgcggcaggagcccccaacttactggcctcggagtcatgacaaggctgggcgagcagctcggcctcgggcgtcggttccacttctgccggcggcgggaagtcgccgccagcggacgagtcgtccccattctggcccttctcgccctctctcaggcagctagattctggacaggcctgggtctgcaagggaggtggttgggattccaggctcccttccccctccggccccggacggccacccaactgggggaacgctctcgattgccacctactgtcctcctcgggcacccgctcctccgcgcctggggggcgctcagggttcagctcttcctggacagcagcagcacctgtacagttgctagtttgaggctggtgttgatattctgacaagaatggctcggccatggctagtagagtcctcgaagtttaagaaattttggctagtaagtccttaaggaaaaaaatgggtttttcttaaaaaaaaa

SEQ ID NO: 246258 - DNA, 439 bp, Homo sapiens
agcaccaaagggggccattactagctgtaagaccttgcaccttctaattgcctttctaagcctcagttttctcaccatgaagtcagggaacataacagtgcctgcctcacaggagaattatgaagaggagaaagaggtgatgagaaaagtaagggtaggccgggtgtgggggctcacgcctgcaatcccagcactttgggaggccgaggcaggcagatcatctgaggtcaggagttcaagaccagcctggccaacatggtgaaacccagtctttactaaaaacacaaaaattagctgggtgtggttgtgagtgcctgtaatccaaactactcgggaggctgaggcaggagaatcgcttgaaccagggaggcagatgttgcagtgagccaagaccacgccactgcactctagcctgggtgacagagtaagactctatctc

SEQ ID NO: 246259 - DNA, 211 bp, Homo sapiens
gcatgcctgtaataccaactactcaggaggctgaggcaggagaattacttgaacccaggaggtggaggttgcagtgagtcgagatcgtgctactgcactccagcctgggcaacaagagcgaaactctgtctgagaaaaaaaaaaagagagagagagatttaaggggtggaattaacagcgcttagtggtggagtagaggtggaggggagca

SEQ ID NO: 246260 - DNA, 111 bp, Homo sapiens
aaatgaagtatccatctataagtgcatttctagaaagctgtcaaattagaatgcaaagctctggataatttgcaaaaacaaacaaaccaaaaaaatccctcattttattta

SEQ ID NO: 246261 - DNA, 729 bp, Homo sapiens
gaaattccggacacatccgaacatcagaaggaacaaactccagacgtgctaccttaagagctgtaacactcaccgcgagggtccgcggcttcattcttgaagtcagtgagaccaagaacccaccaattccggacacagtagaagcccattgggcttttcaattttatttactctaatttcattctaaagaattctgttttgtagttctccttttattttattattattttttgagacagggtgtcactctgttgctcaggccagagtgtagtggtgccatctcagctcactgcagccttgacctctctgggctcaagcgaccctcccacctcactactttgggggatgaggtgggaggatctcttaggcctgggaggtggagattgcagtgagccgagatcacgccatggcactccagtctaggtgaaagattgagaccccatctcaaaaaaaaacaaaaaagaaaaaagtagaatttaggtattcctacttttacagtcaaaagtccactggtgtttgcataacaatgatgttttgactagttattggactaaaagtaggacacatgaagcaggtgactaggaatttggaaatattattgcttaggtcattactggaccttacgaagagattgttgcactggtgacttggactttgctggtccctccccgactcttcacagctggcttgacgactcttgtgacattctgaggttttatgctaaaccac

SEQ ID NO: 246262 - DNA, 545 bp, Homo sapiens
tattctaggtgactggtgccctgggaacatgcatctcagtggccctgtgacagttaacctaatcacagtccacgcttgcccttctgaatacaaagcacacttgactgaggaatctcactcaatatgtgtatgggacacacatttttatgtgtcttctaaagaagacaaatattcttttgaaacagaatatcctgtgagaaaacaagtaatgactggctataaatatggtatggtcaagtaaaaatctttaaactgtgacccaggatttcaggagttggtctggtccctgggtggtttaagaagcaaagccacgcctgtaatcccagcactttgggaggccgaggcgggcggatcacgaggtcaggagatcgagaccatcccggctaaaatggtgaaaccccgtctctactaaaaatacaaaaaattagccgggcgtagtggcgggcgcctgtagtcccagctacttgggaggctgaggcaggagaatggcgtgaacccgggaggcggagcttgcagtgagccgagatcccgccactgcactccag

SEQ ID NO: 246263 - DNA, 409 bp, Homo sapiens
gtacataatgctatatattcataacagtattctaaagcatatcaccagtgcatgggaaaatgttgaaagtaatttcgccagtaagttatttcaaattttctttacctataaacaattataaacttgagatttcgttactattattataatgtgaagaaaatggtatattattgccttttaaaattgtatatggcctacatcttttttttgttttgagacaggttctcactctgtcaccctggctggagtgcagtggcacaatcatagctcactataatcttgaactcctgagcccaagtgcttctcctacctcagcctcccaactagctggcactacaggtgcaagccaccatgcccagctaattttttaattttttgtagagacagaatctcactgtgttgtccaggc

SEQ ID NO: 246264 - DNA, 425 bp, Homo sapiens
cccgcaccagcccctccgccccttctcatcagtcaggtggcagctgcacactcctccctccgcacagcctagttccccagggacctcgctgagccaaaaatgcctgtggcctctgaggaagctgggaggaaaggcacgctgtctaaatgaagggccgtttcttccttccagaatagctgcggccacagcgcgtccaacgtgcctgagccgttggagccaatcgcagcacggggagcagtaattaataaaaatgggtaatgatagaccatctgtcccagcctgcgctccgtggcggggccacgccgggccctcattaggcattcctctgtcattgtccccgcagatgttggcggtggccgtgtcggtctcatgggaagacgaggttgaacacatttaggcaaacgacaccagcaggctgggcccga

SEQ ID NO: 246265 - DNA, 484 bp, Homo sapiens
taatttacaaagaaaagaggtttatttggctcacagttctgcaggatgtacaggaagcatagtgccagcatctgcttctggtgaggcctcaggaagcttccactcacggtggcaggggaaggggagcaggtgtgtcacacagtgagggagcaagggagagcaggggaggtgtcaggctctttaacgatcagctctccgtgaacgcaccagcgttactgcaccatgccatgcctgagggatccgcccccatgatctaaacgcctcccaccaggcccaactccaacaccagcgatcagactcaacagactcaacatgagattcggaggggacagatctccaagctatgtcatggtctatactgactatggaaaactgtcaggtgaccagtccatttaattacagtcacatgagggtgtcaatggcctgatcccagcaaccactgtccctgcctgaatagagaagatgccagataataaaaggggcc

SEQ ID NO: 246266 - DNA, 355 bp, Homo sapiens
ccatccatacacatgctttcagctggatcaactgatggcccaaccaactggagtagtggcctctctccgtgaacgcaccagcgttactgcaccatgccatgcctgagggatccgcccccatgatctaaacgcctcccaccaggcccaactccaacaccagcgatcagactcaacagactcaacatgagattcggaggggacagatctccaagctatgtcatggtctatactgactatggaaaactgtcaggtgaccagtccatttaattacagtcacatgagggtgtcaatggcctgatcccagcaaccactgtccctgcctgaatagagaagatgccagataataaaaggggcc

SEQ ID NO: 246267 - DNA, 590 bp, Homo sapiens
aatcagttatactttatttactaggtatcttttataagagtttttctgtgtctgattattttgctaaacaaacctcctatttaaattgtttcttcttttaaagcatgctattaaccccagattttgtcctttcatttctctatacatctagattatttagctacatttgcataaaatgatacatatcagtgctataaatataaaaattctagtattacaactttataagtaataatttacagagctggttttgtgcctaagaacttaggcatgagtaaatctggttcacacatttgaattgtatatttctagtttctgacagcatctagcatttgtttattgcattacattttttcaagaagttccatgcaaattaattcagtatctggaacatatctgttttactaaatgtttttcatgaaataattaaattttcaatatatgaggtgttgataatattccaagtcttaaagaagaggatgtatctatctcagtgattcagagagatacatttgtccagaattactacagctagtaccatggcaaatcatggactccaacctgagtcttcactccatattcattacatt

SEQ ID NO: 246268 - DNA, 283 bp, Homo sapiens
ctcctctccctcctcccatcctccaccctcaggtagtccccaatttctgttgtttccttgtgttcataagttcttatcatttagctcccgttaatttttagttttttggtctaggctggtctggaactcctggcttcaagtgatcctcctcagcctcccaaagatctgggattacaggtgtgaaccactgcacctggcctagttttatttgctaatgacaagtcaacagtcagtttagttgtaatttcgttgtaggtaagtaattctctctcctcttgagcta

SEQ ID NO: 246269 - DNA, 3050 bp, Homo sapiens
  misc_feature (2150)..(2150): n is a, c, g, or t
  misc_feature (2896)..(2896): n is a, c, g, or t
  misc_feature (3044)..(3044): n is a, c, g, or t
taccaaagcaagttaagtatagttcctcaaatacctatgacacagcccttcctctaagcctccttccacggaggggccctctctcttccacctgtagaagcccaccccagataccaccaccttcttgaaacctttttgcctctccagcccttggtgcaggctgtcctctcttaggctgtgtgagggctgttttgtgtccatctcctctctcctgctggtttgctctcagcatctgagtcatctttgaatctctggcccttgatggtagcctggcccgagccaatgttctgtgagtgtctgtggaaaggataggtctttcagccccagtgatagaagcccacctctaacgtgcttaagtaagaagggcaagtacctaatcatgtaactgggaatgatgggatgtggggcttcacacagcactgagggagagctgcaggaaccaggccccaggacagaactgtggctgtcctgcccctgttttttctctctctctggttttttttttttttttttttttgggacagagtcttgctctctcacccgggctggagtgcagtggtgcgatttcagttcactgcaacctccgccccgtcccgagctcaggcgctcaagcgatcctcatacctcagcctcccaaataattgggaccacaggcatgtacaacaaagcccagctattttatttgtattttttagtagagatggggtctcatcatgttgcccaggctggtctcaaactcctgagctgaagtggtccgcccacctcggcctcttgaagttctaggattacaggcatgagccaccgtgcccagcttggccttgttttcatacccagatggggagctgctgtcaccagattcacttcctgccagctgagaactcaccccaccaacaaaagtcttccaggttagctcatgtagaaaggcagggaagagcctgaggggctggtttggattacatgtccactcccagaccagtaatgtggtcaggaggctgggatgctcagattggccagatctgggccaggtgatcacctttatggggaaccaagggctgtagttgaccatcgagagaacttcctccaaagtaatatttgctagcagaagatagaggtggggatagaaagaatgatagcagcccagcctcttaaagaaaggatgagagtttagaaagggagatctgagctggctgcgttggtttattttttatttatttattttctgagacagagttttgctcttgttgcccaagctggagtgcgatggcgtgatcttggctcactgcaacctccacctcctgggttcaagcgattctgcctcagcctcccgagtagctgggattacaggcgcccaccaccacgcctggctaattttttgtatttgtagtagaaatggggtttcaccatgttagccaggctggtctcaaactcctgacctcaggcgatccgcctgccttggactcccaaagtgctgggattacaggggtgatgcattggtttatttattcattaattcatcaagcatttgagcacccacttcagtgcacactcagactagagaggggtccatcccaggccgggcagggcactctcagaccttacctcccacagccatcaccagcccctacgaaggagactttcctaggctcagaggcttcccctaccctgctgaatggtgttaagttctaattgttaaagaaaaagttattcaggctgggcgtggtggctcatgcctgtaatcccagcactttgagaggctgaggcaggcggatcatttgaggtcaggagtttgagaccagcctggccaacatgattaaaccctgtctccactaaaaatagaaatattagctgggcatggtggcatgtgccgtgatcccagctcctccagaggctgaggcaggaaaattgcttgaacccaggaagcggaagttgcagtgagctgagatctcgccactgtgctccagcctgggcgacagggagactccctctcaaaaaaaaaaaaaaaaccagaaaacaaaactgggcgcagtggctcacgcctgtaatcccagcactttgggagtctgaggcaggtggatcccctgaggtcgggagttcaagaccagcgtgaccaacatggagaaaccccgtctctactaaaaatacaaaattanccaagcatggtggcgcatgcctataatcgcagctacttgggaggctgaggcaggagaattgcttgaacctgggaagcagaggttgcagtgagccaagattgcatcattgcactccagcctgggcaacaagagcaaaactccatctcaaaaacaaaaacaaaaaactattcaatgacacttgtcaaagcacagtaatgaagactttattcaagaggtggcaagcactagttgtagggaccgtggcaatggggtcctgccctgaggcagaaaggttggactcaacttcaaatacagcaatgggcaagtgagaactgatagccaaggagcagagtggggtcagcgggtgcacaatgactaagaggatcatcaggcatttgtgggggattctggttaaatagtcctaacaggattcttgttgagggcaggccagggtaactagacatcatggaggatggcagaggataaggaggccgattagattttgagagtgatcagatgtggaggatgaggattctagctaaaccaacttagcacgatacttgctaaaattgaacaaggcagagatgaacacagaagtccaaaagttgagacctagttgaaaaagagctcagaaggccgggtgcagtggtccatgcttctaatccgaacactttgagaggccgaggtgggaggattgcttgagccccggagtttgagaccagcctaagcaacacagtgagacccagtatctacaaaaaagtaaaaanaatgcaacagggcacaatggcatgggcctgtagttgtagggatctgtgaggctgaggttggaggatggctcgagcccaggagttcgaggctacagtgagctatgatcatgccactgcactctagcctggacaacagagggagacactntcttta

SEQ ID NO: 246270 - DNA, 483 bp, Homo sapiens
agtacctcctagaatactgcagttggatattgaagaagtgagcaactttttactctttgaagttactggagagggaagaaatggcagtgtaggtctgacaagaattcttcagagcaggtagtactgttgtccgtgaagtactagcaaaacacttttggtgtttgctaattaaaacattaaaaatatgtaattgagccagacacggtggctcatgcctataattctagcactttgggaggccgaggtgggcggatcacttgaggtcaggagttcgagaccagccaggccaacatggtgaaaccctgtctttactaaaaataccaaaaattagctgggtgtggtggtgcacacctgtaatcccagctacttgaaggctgaggcaggggaatcgcttgaacctgggaggtagaagttgcagtgagccaagattgcgccactgcactccagcctgggtgacgagcaaaactccgtctcaaaagaaaa

SEQ ID NO: 246271 - DNA, 307 bp, Homo sapiens
aatatcctataaccatggatttgaaagaatcaatgtcattaaaacgaccatactgtccaaggcaatatacaaattcaatgcattctggtcaaactattaccatcatttttcaaagaattagtaaaataatttaagattcacatggaatgaaaaaaaaagcctaagcaaaaataacatagatgaaggcaccctattacctgatttcaaattacactacaagactgtagtaaccaaaacagcatgatgatggtacagaattatacccataggataatggaacagaccagggccctcatatgtacatatg

SEQ ID NO: 246272 - DNA, 445 bp, Homo sapiens
ctgtattagtgttatggtttatgctaagcatgtataatttaaaaaaaatgagagtaactttaaaatgatttggaagaaaaatatgtacatatgtgaacagtacttaattccaggtggtgggaatatggatgactggttatcttcttctttctgtatctttcatatttttaaatggaaaaactcaatgacctggaagtgaaagaacagatttggaaggggtgtggggcaagtgagaggaaaatgcaagagaaggacaaacctagttctggcaggattgtgtttaagttggaggtttctagggagcagttgttgggataagaaggatatggggaggcaggagaatcatgaaaatatttaggacagtgtgttgcctgtcatattattcctcctcctttcctgtttcttcaaaagaaatatacagacttacacttcttttcaagcatat

SEQ ID NO: 246273 - DNA, 488 bp, Homo sapiens
cagaattgatagacttcatgataggttatgtgaagaaggatcaaaaaggaaccaaggacagctatacagtggttggtttgaacaattgatggttcatgatgccattgctgagataaggatatttaaggaggaagatgacgagaattaattaagatcaagaaaacactaacaccaaaactcaaaggatgttggaagcttgaaagaagacctcaaagacaatatttgggcatattttaagagcatcatcaatactctgtatggcaccgaggatgacttatggaaaaacagagttatcaatgactttttgttggaaattatccaaaagagtaagattctgcaaagaagtttgtgaatttatttaccagtttatttttatttctattttcattttacgattgcctgagagtgatatttgaaaagtgttatattcatatatgtctaaatttttcaacaagtatcaaataaagattctaagttataagaaaaaa

SEQ ID NO: 246274 - DNA, 405 bp, Homo sapiens
agaaggagcttacttatttgccaaacagaaagaaagttgatgagagcaatgaaaccgcaaattaattaagatcaagaaaacactaacaccaaaactcaaaggatgttggaagcttgaaagaagacctcaaagacaatatttgggcatattttaagagcatcatcaatactctgtatggcaccgaggatgacttatggaaaaacagagttatcaatgactttttgttggaaattatccaaaagagtaagattctgcaaagaagtttgtgaatttatttaccagtttatttttatttctattttcattttacgattgcctgagagtgatatttgaaaagtgttatattcatatatgtctaaatttttcaacaagtatcaaataaagattctaagttataagaaaaaa

SEQ ID NO: 246275 - DNA, 480 bp, Homo sapiens
tgcattctggcttgggctgtcccaccttttccaaggtaatcaaatacactttactgcagcagtttccggggacggatgcaatagactagtgaaggctcaggagttgggtggggaaagggagagctcaaccctatcacactggatcactggatatggaagagacctcttggctgtagtgcttgaccttttctgcaccatggaccctttccaaaagctcatgagagctaactctcttcctcaaagagctgtatgtatacctacagttttgcagatggaggaggggatggactgcaggttcagtccatgtcaactccagtcccatcttacaaaatgaggaaactgggcctggtgcggtggctcacacctgtaactccagcactttgggaggccgagggcggtgggggggaatcacctgaggtcaggagtttgagaccagccagaccaaacatggtgaaaccccatctctactaaaagtacaaa

SEQ ID NO: 246276 - DNA, 272 bp, Homo sapiens
cttggaaagtgaaaatagctaacagtgaagtagccggttcatcttttacttacatatcttttctgttcagtgtactttgggcagccatgctgacggcctcagtggcaaaggctccatgggtagagatggtgatgcggagatcaacagcgagttcttggatgaccggatcagggtatgtgttggataccttctccaacagaggcaacaactgcttcagaacagcaaaatcacttgacttcaactacaaaatgaaataaaaaatgtcaaaccca

SEQ ID NO: 246277 - DNA, 943 bp, Homo sapiens
agccctgtcttctccacctagggagagagaccccatgagctcgtcaagctccttctgtgactgatcagagatcccaccgtgagtccagctcctggtcccatgctctggatatatcggtccctggcagcgtggtatctcacagaatctctgaccaatggagagctaatcaaagacaagtttaataggtgaagaaaatacttggattgggaggatggctgaaaagtcccattgaacaaggccctcaaatggagttcctgtggagtggtcacctttttgatgacttcaactgggaacatcagtacggaaccatcgctgggtgttcattccatcaccccttcctatgtccctgctcaggacaccctgcgtctgtctatatgcattgctaccagtttagacagtgagttacatttagtccatttgtgcattgttctttattgtatccatggtatctagcacaattcttgttcttattagagcttggtaaatgtcattgattaatccagggcagattatctctctcattttcgtgaatcctctgcataaacaatttgattaaaaatttatgacaaaattcatgaggcatggtgatgtatacactgatcaattgatttagagtgataggtagacaagatgcatttacatatttatctattgtcctttcagtgtgaagtttcttcttagtggcaaaagttctggctacttgtatatctctcatggaacgtcattattactggcagtgccgtggctcttcttcacttttttgtattgaagcaacacagatcatacctctgtagttccctgataccatgtgtttaatggtagttacatcatcactcaagaggctgccttgtccagcgtatatcttccatactggcttccactgaccctctgaaagctgttactgtgcttccattggcaatgatcacaattgcaaatcttatcc

SEQ ID NO: 246278 - DNA, 531 bp, Homo sapiens
tatttttgtttctcagagattaccttggggagtgtgggagtagggggcttcactgatacttaagttgattctcactttgaaattgtacctcccactgtaatattttaattttgtagttgttttagatgcttgtagttgttcatacagttttcattagtatcctcaactagactcaatttgaaaatattcttcttatttatttattctttataaattttgtctacagttagtagacattacaattgttttggtggctgtatgtagttattttaaaaaacaaagtcttttataattccatctcccagaggcaaatactgtgaacattttgaatatttcacttttaaaaatgcatcttaacatatttgttagcacactagtatttttcactttaacattatattttaaaaaatcataacatataactattttagatggtcatataatttatttttctactgttggttatatatgttatttgttttactattgtaaataaagctgcaataaacatttctttgtcagttcagacta

SEQ ID NO: 246279 - DNA, 903 bp, Homo sapiens
ggagccagtctagctgctgcacaggctggctggctggctggctgctaagggctgctccacgcttttgccggagacagagactgacatggaacaggggaagggcctggctgtcctcatcctggctatcattcttcttcaaggtactttggcccagtcaatcaaaggaaaccacttggttaaggtgtatgactatcaagaagatggttcggtacttctgacttgtgatgcagaagccaaaaatatcacatggtttaaagatgggaagatgatcggcttcctaactgaagataaaaaaaaatggaatctgggaagtaatgccaaggaccctcgagggatgtatcagtgtaaaggatcacagaacaagtcaaaaccactccaagtgtattacagaatgtgtcagaactgcattgaactaaatgcagccaccatatctggctttctctttgctgaaatcgtcagcattttcgtccttgctgttggggtctacttcattgctggacaggatggagttcgccagtcgagagcttcagacaagcagactctgttgcccaatgaccagctctaccagcccctcaaggatcgagaagatgaccagtacagccaccttcaaggaaaccagttgaggaggaattgaactcaggactcagagtagtccaggtgttctcctcctattcagttcccagaatcaaagcaatgcattttggaaagctcctagcagagagactttcagccctaaatctagactcaaggttcccagagatgacaaatggagaagaaaggccatcagagcaaatttgggggtttctcaaataaaataaaaataaaaacaaatactgtgtttcagaagcgccacctattggggaaaattgtaaaagaaaaatgaaaagatcaaataaccccctg

SEQ ID NO: 246280 - DNA, 730 bp, Homo sapiens
ggagccagtctagctgctgcacaggctggctggctggctggctgctaagggctgctccacgcttttgccggagacagagactgacatggaacaggggaagggcctggctgtcctcatcctggctatcattcttcttcaaggtactttggcccagtcaatcaaaggaaaccacttggttaaggtgtatgactatcaagaagatggttcggtacttctgacttgtgatgcagaagccaaaaatatcacatggtttaaagatgggaagatgatcggcttcctaactgaagataaaaaaaaatggaatctgggaagtaatgccaaggaccctcgagggatgtatcagtgtaaaggatcacagaacaagtcaaaaccactccaagtgtattacagaatgtgtcagaactgcattgaactaaatgcagccaccatatctggctttctctttgctgaaatcgtcagcattttcgtccttgctgttggggtctacttcattgctggacaggatggagttcgccagtcgagaggtaaaagaatgctcttagatgagagatgggaccacctgagaccctcagctttcctcctaccattatgtacccaatggaagagactgagttggtgcttcttgctagtgtgcatagttgggtgaggctgtatttctctgagacaggagaaaggatacttggtgttatcacagcatgttcacctgtctcaagatacagctccctctgtg

SEQ ID NO: 246281 - DNA, 597 bp, Homo sapiens
agagtatctagtcttccttctgttccagatacttcctggtagttagactacatgggcttccccaggaatcctgggggacttaagagcatcaagatgcattgagttttggcgcaaggatcttcccttgccctgccacccacagaggaaaagcctgctgccctccacagcggcattattgcagacaggcaggagaaaacgaaccaggaaaaacaactttcgcaacctgaaggtttgtctctccttttccctacagtgtgtcagaactgcattgaactaaatgcagccaccatatctggctttctctttgctgaaatcgtcagcattttcgtccttgctgttggggtctacttcattgctggacaggatggagttcgccagtcgagaggtaaaagaatgctcttagatgagagatgggaccacctgagaccctcagctttcctcctaccattatgtacccaatggaagagactgagttggtgcttcttgctagtgtgcatagttgggtgaggctgtatttctctgagacaggagaaaggatacttggtgttatcacagcatgttcacctgtctcaagatacagctccctctgtgaaaaaa

SEQ ID NO: 246282 - DNA, 1176 bp, Homo sapiens
tcggaggatctcttgaacgcaggaggtcaaggctacagtgagctgtgattgcgccactgcactccagcctgggcaacagagtgagaccctgtgtcaaaataatattaaataataaccagcaatttgcagggaagcttaaatttcgcttctgaaggtttgataactgagttggctgaactaaactaacagtaggttaacaagagaaaacccatacaaatttattgatatgtaagcatacattaatagctagcaaaatgtctatgggcatgcagggaaatcaacactgcagtctagcagaatccatggagaagtggcaagcaaggtggagactgtaaaaaaagaggagaggttgcaggacctaggggtagcagaatacagataattcccagaaagagaaagccccaccctggatagagaagtgagaagaggtgtaagatccattagacaaaataagagacttgaaagaaaatgagaccaaagacgcagtctcatgaaagtactgcttctggggaaaggaaagagggtgccttggaagggtcaccatctacctggaggcttggtgatagagagaaggggtagtagaaattaaggatcttggtgaaccagaatagaaaatagatactcatttctcccacccaaaaaggagtcattaattaaaaacagaacagaacagaaaaacactttattaggtactatttactaagaaatccagttaagtcatctaaattccttgcttctgcctatacacaactatatctggtttaggaaaaataaaatatttcaagatgaacagaagatggcaggcaacatccatataaagttactttagctggaaaacaaaatgatagtcaaaacatttcaactgggctgggcacagtggctcacagctgtaatcccagccctttgagaggccaaggtgggcggatcacttgagcccaggagttcgagcccagcctgggcactatagtgagacctagtctctacaaaaaataaggaaaaaagtttttaaaaaattttagctgatgaaaagtcttcccgaaacatccaactatagcactaaagaaaactacagcacagtactcctaccagaatttaaaatatccttaaactaacatttgtagagataaaaagtctcaaatccaaattcaaaactgcaaaacaaatggacaaaaagag

SEQ ID NO: 246283 - DNA, 228 bp, Homo sapiens
gatattttgggtttggcaatcacaaagtccttggtggcatgattaggtggcggaagccagaactctgtgggtagaagagttaacaagtaagggaagggaaaaaaagattacctttttctctaaatgtggctgaggcaggagaatcgcctgaacccgggaggcagaggttgcagtaagttgagatcacaccactgcactccaaactgggctgacagagactccgtctca

SEQ ID NO: 246284 - DNA, 704 bp, Homo sapiens
tgggtaacaggagggtggagggggcacattctgagaatacacactgtctttcactactctggggatgggagatgcctctgttattttccccaaaggcattaccagtgttttctgcaggttaaaggtgggctttctttagatggaaaaaacatgatgagtaatgagctggtaaggaaaagctgagactaaaaaacaaaaggtaaaacacaccaggtccaggagcttaactatcttcctaacttggaccacgttttagtatatagctgtaagaggcttttattaatcataactcttagaaatcaatttaagaaaatatagtacttatctgcatgtataaagccctgtacagataagcctaatatctaggaggcctgtgcttggtaggcttatcttggtaagtttatcacatttattcatcctattatggaaaaaataccttgtccattcctgaattcttcctttggtggacctcagttttgggtagatcttagccttcaaggaatctttacagttgttcttcatctttcatcttgaatgtagttattattcctaactccttctttacagctctactttgccattgagatttttttttaattgacaagaattctgccctaattacttaaataaggattttcacactatgtccaaaaaatttttactgttgattcaaataataaataccaactcgtcacttcaagtca

SEQ ID NO: 246285 - DNA, 532 bp, Homo sapiens
  misc_feature (422)..(423): n is a, c, g, or t
  misc_feature (441)..(442): n is a, c, g, or t
  misc_feature (480)..(480): n is a, c, g, or t
  misc_feature (519)..(519): n is a, c, g, or t
atgatggagctacatataaagaatttgagagctgaagtagagtcagtggaaaactaatatggatccgccactgattggctgaaaaggggaaggatgttatctaaatctgaattatgttgaacagaagaaaagagaagacagggttaagaactactctaccggatgattagtggtaactgttaaataatataagaaaatgagaagagtatactcaaggggatagaagagtttatgtacgtaagggagatgtccttaaagactgacaggaaagaaatcacccaggaagagggccaggcatggtggctcacacctgtaatcccagcactttgggaggtgcttttacttttatcaaaagtaaaaaaaaagtagctaatttaatgaataattgatcttttcccaactaaaacgaaatattatccatnncaatttactgatgttttnntatgttttggggaatatctctggactctcttctgtccnacttttgtcccatgtaaccatttggaaaccactcttaancttcgaaccttgt

SEQ ID NO: 246286 - DNA, 346 bp, Homo sapiens
atgatggagctacatataaagaatttgagagctgaagtagagtcagtggaaaactaatatggatccgccactgattggctgaaaaggggaaggatgttatctaaatctgaattatgttgaacagaagaaaagagaagacagggttaagaactactctaccggatgattagtggtaactgttaaataatataagaaaatgagaagagtatactcaaggggatagaagagtttatgtacgtaagggagatgtccttaaagactgacaggaaagaaatcacccaggaagaggcacgctcttgctgtctttccgctgtcgtgctccggtctttcgtagcgccagtatcgg

SEQ ID NO: 246287 - DNA, 330 bp, Homo sapiens
aaacgcagctgtgtttatttcaatgcgattacattcaaataaacacacatgggatcccttatgagcgtgaacccataaaacacttgttgatttggttctgaaattgtgtgttcaaataaacacacttgttttaagggaagtttcgctttactcaaatgttcatgccttgaacatgtgttttatagagggcagatgtagagtgtcttaaaagaataatagttctttagaggctgagtcattgctttagacaaatgcagaatttatttaatgtgcttttttttaatatattggtaattgtctatataagtaataaaaatcttggaatatctc

SEQ ID NO: 246288 - DNA, 408 bp, Homo sapiens
agatgttcaagttgaggtggctgagaaagtgcagaaatcgtcttcccccagggagatgcagaaggctgaagaaaaggaagtccctgaggactcactggaggagtgtgccatcacttgttcaaatagccatggcccttatgactccaaccagccacataggaaaaccaaaatcacatttgaggaagacaaagtcgactcaactctcattggctcatcctctcatgttgaatgggaggatgctgtacacattatcccagaaaatgaaagtgatgatgaggaagaggaagaaaaagggccagtgtctcccaggaatctgcaggagtctgaagaggaggaagtcccccaggagtcctgggatgaaggttattcgactctctcaattcctcctgaaaggttggcctcatacca

SEQ ID NO: 246289 - DNA, 743 bp, Homo sapiens
gggcacagtggctcatgcctataatcccagcacttggggaggccaaggcgggcagatcacgaggtcaggagttcaagactagtctggccaatatggtgaaaccccatctctactaaaaatacaaaaattagccaggcgtgatgccgggcgcctgtaatcccacctactcaggaggctgaggcagaagaatcacttgaacctgggaggtggaggtttcagtgagccgagatcgcaccactgcactccagcctgggcaacagagtgagactccatctaaaaaaaaattccatagtcttgctgtaacagaggtatgtacacatggctgttgaaacggaaaagagacctaggtaggtggctcacacctataatcccagtgagtcatgatgctgaggtgggaggattgcttaaggccaggagtttgagatcagcctgggcaacatagtgagatcctatctgtacataaaaaaggagaaaacaagaaaagaaaaggatgtgacttaactgcagggtccctgaggaaggtttcacagagcagtctcatgctagcaccagagggtcactttccctcactatcttcttcaaatacagaaaactttgagaaatcttacaagttgggagaacagcaattgcaactctggagtctaggaggactaatgccagtcagtcatgttctcggctagccaacctaagatacccatcaggagtgggagagtggttagtatccttggagtaggctccagatc

SEQ ID NO: 246290 - DNA, 991 bp, Homo sapiens
aaaggacagtacacttgtatccccactagctaagatcatgttgctctcatgaatataattcactaccaaaaacttgagcatgcatctcttaaaaataatattcttttggttgggcatggtggctcactctggtaatccttgcactttaggaggctgaggcaggaggataagttgagcccaggagtttgagaccagtctggacaacatgacaaaagcccgtctcgacaaaaatagaaaaaaatagttgggtgtggtggcatgtggctgtggtcccagctgcttgggcagccgaggtcggaggattgcttgagcccagtaggtacagtgccatgatcatggctcactgcagcctctgcagtccggcctaggtgacagagtaagaccctgtctccaaaaaaaaccccaaacttctatttttcagttgacttaaaaaaaagtcttatctacgtaacgttcacagattgtatataattgtattcttgggtcttttacaatttatgattgttaaccccttcacatacctttctttttttctcatctcattaatactgaaaatcctgatgtctgtgattcctagtttaggtgtaaaggtttgattagcttcaggttaaacattttggtaagaagatcccaagtgatgttgtatacttcatattgaatcatattagtacatgtgtaatatcagattttcttactgttattgatgcttggtcacttgtttaatcatttgattaaggtgggaactacaagatttctttgtaaaggtacattttatgctctttgcaattagcaagtaaaggatggattacttctttggcatcctggaaataatcttattcccaaaatccttttaccaggtgcactcacacacacccccactctcactcatgctggtacagtttaaccatgccagttaatctagcatgtttatctttggaatttgggaagaaacctgagtacccggagaaaacccacaaagacgtggggagaa

SEQ ID NO: 246291 - DNA, 468 bp, Homo sapiens
cgggggcccaagggcagaaagggctgcagggatagcctcatcagagggcactcaggcaatggaagagatgtggctgtgtttctgctctctgcagaagagagtcctggaggagggccagcagctgccccgggtgctggggagacagcagaagagggtggacatcagcagggccagggcgatgatgaagggacatgagataagacactttggtgactgattcggccaatgcttcttgaagaggagtgaatatgggcagagtctgaggtggagcctgaagcagatctaccccaggggaattcaaaagtgtctccggagacttaaaatgttaaattcatctaggtttcacattcttctccatgttctatttgtgcttactgcaacattagaatcccgaagcatgcacgaatccttccaaatctccaaataaaacatatttgtttgttttaattgctgtacaaatatgaactc

SEQ ID NO: 246292 - DNA, 416 bp, Homo sapiens
ctgtgctaaaattctgtggccttagttagcctgaagggcccttcagtccctggtgctgctgtttctgtgacataggaaccctggcggtaggaccctgtattagtctttttaaattgctatgaagaaatacctgggcagggcacagtggctcatgcctgtaatcgcagcactttgggaggctgaggtgggaggaccccttgagcctaggagtttgagaccgacctgggcaacatagggagaccccatctctacaaaaaaatttaaaaattagctgggcatgatggcacatgcctgtagtcccagctacttgggaggttgaggcaggaggatattttgagaccaagaggttgaggctgctgtgagctatgatgattccactgcactccagcctgggcaacagagagagaccctgtctc

SEQ ID NO: 246293 - DNA, 653 bp, Homo sapiens
gaggtggcggaggccccgagggctttgcgtcatcacttctgcggcctgcgggcgagaaggtgcgcttcgggagtagcgcgggaggacaggaggcgcaggttgtgagggacgcaggccctggggcttcggtctctgtcctccgagctcagagcctccaggcttcttcccggccgcgcgctcagcactcactgtcttacggtcccgaagcgctttaaggtgcgcagtccgcaggccttgcctactgatcttccagccaccccttgaaggaagcagttgcagacgctgagcacagtgccaaacctatatagaaactcatttgggatatggaggagaatatgccaccagttctccaaagtggaggggaaacctctcaactctggctggctgacctgctgccctagcctcccccctcctctcgcagctgttgggccaaaagacacaaagaacgagcccagtcctcctcgtccccactccttgtgaccaggggatatggacctaatgaatcatcattttcagtatggctacccttcctttttcctccaccctttccccccattctccctcagacctggctaattaaaaggaagggaaacagaatgcataatgtgggtaactatactgtaataacagttaacacaaagtgtttccatttg

SEQ ID NO: 246294 - DNA, 714 bp, Homo sapiens
aaaatatgaactttagttaacaataatgtatcaatatcagtttactaatgttaaaaatatactatactaatatattaataatagaggaaactgcagtgtggggtatatagggactctgtactatcttcacaataaatctgtaaatctaaaaccgtgtgtgtggtttttttagactaggtcttgctttgcccaacatgacatactgaggacacatcacctctgtattcttcccaaaaatctactatctaatcgtggaaaaaaatcagacaaaccccgactggcattttgtaaaacacctggccgatactctatgaacgcatcaatgctatgaaatgcaaggagatactatcacagattggaggagactaaggaagacataaccactaaatgcaatgtgatagcctagattgaatcctggtcatcctaggtgacaataaattatgacttgtgaaaatctgaataggatgaaagtttaccactaccctaaccacaatagaagagagttccaaatccaatcacagtgctgcacatcagttttgaagtcagctaaacattgagtcttagcaccctcagttactagcttcatgaccttagataagttacctctcccagtctgactttatgattcataaaaggaaaataccaccagctaaggtgtgttattgctgtaagaatattaagcaaagtgcagtaaatcttacttatttctctctt

SEQ ID NO: 246295 - DNA, 710 bp, Homo sapiens
cagagctacgtttatctgtttccaaagagtacactctcccctcaattcccagtagtacttctccagtaaatcttaagtattgtattgcttttttcccttctatttctcttagcagtctatagaaaagagcgtttatttaaagattttagtgctcatctgggcatagtgactcatgcctgtaatctccacaccttgggaggccgaggcaggaggatcgcttgagcccaggagttccagaccagcctgggcaacatgacggaaccctttctctaccaaaaatacaaaagttagctgggcatggtggtgcacacctgtagtcccagctactcaggaggctgaggcagcgggattgcttgagcccgagaggtggaggttgcagtgagccgagatcacgccactgcactctagcctgggcgacagagccagatcctgtcttttaaaaataaaaataaaaataaaaaaagattttagtgccccctataacttgaggcttggattctgaagtgaaagttgttgttctgagaggtgttgattgagcagtagtaataccaactacatcagtgggacttggtggcccagtcacacggatgcagtcagaaagggagtgttacctcataaagcagtgattcaagcctgggcttggattttaaaatgttggaaagttgtgaagaaatgggattttttttttcttccaaagattgtaataactt

SEQ ID NO: 246296 - DNA, 564 bp, Homo sapiens
taaacaacagtgtctgcccaagataaatgcacgtgtgagatagatttcacccctgagagcagttcatctttccttctgcatgccattttccctgtactgcccctcaaatggattctgaacatatagattacattatcacattaaatgaggatgagtaaacttcaaaggttcagagttaagatgcacctggacttttagattctgacttgaaagcgagctcacattaactgttccataaagctgtgatggagacacctaatgtcgttgtcaaattcctctgagtagtttttcaatgagccaaaccaaatgcaggacttcagggcttgtgagttattctctctaaagtgatgctgcaaagaaacataacataacgattgacaattttactaaaatcatgtattataaaagtgtatttgtatcagtactcacagccaattgtatacctacctagttgtaaccatttagttattacacaagaaaaaatgtgtgtaaatcgcagtttgggggcacatagaaacaacactatatacaaattataatttgtattcattgtttattccttta

SEQ ID NO: 246297 - DNA, 203 bp, Homo sapiens
cagcctgggcaacaagatcaaaactctgtctcaaaaaaaaaaaaaaaagtcacattatttatacaagtattttattttctacagaaagataatttgcttttacaaactaccaggaagttttacttgttcattcactcgcttaaatgacattttagagcacctactctgtgccagacacaatagtgtaggctgtactctcatta

SEQ ID NO: 246298 - DNA, 268 bp, Homo sapiens
aagctgtggctctgcaggacacgtgcggggtagacctctaaggccttgtcccagtggaaatgccctcccacttggcctgggtagctgctcacgcttctgaaacgggaaaaatcaactgcattcctgaatgggagcctcagagcattagaaaagataatgttctgattttttaaagctaaacgtatatggaaggaagctgaaagaggacttttgatgagtcacctaatgttgatgttgaaataaacctaatgaccctctggctaaaatc

SEQ ID NO: 246299 - DNA, 197 bp, Homo sapiens
actgtagtagagaaagtttaatagatacaagactagtcatgccacatgggaaatggagtttgtactcaaatgatctcctccaaaggtcttaggtcaggggtttttcaaaggcagtttgggggaagggagggggtggccaggtaataggtgcttgctgttgattgactggggtggagatgaaataggcgtcaaagctg

SEQ ID NO: 246300 - DNA, 370 bp, Homo sapiens
gagtttcctttaagctgtgtgtagaccaaaaaaaaaaaaaaaaaaaaaaaaaaaaaggcaagtgttttcctttgtaaagcttttcctttccttgtatttgcacattttttttttttttttttgctagtgaacttcagtcaactttcctcttaaagtttaaacatacatttcagagacagatttcagaaaccatggcccctgggcagtaatattgccacaatgaccaaggtgatctggtaaagctttctaggatctttcctcagattttaccagggaggaaataactcagttttacataaaaaataatttggcttcaccaggactctcctgattataatggtgactagtgctggttggtgtactgctaaaa

SEQ ID NO: 246301 - DNA, 540 bp, Homo sapiens
atgaattcacagatggctgtctcactgatctcttctttgtttgccaatattgtggctgccaaatttactgtgatgcagaggtatcttgagtaactttacaagaggctcttaaaccaaaaaagtgtccatggatcagagaaatggcttttatctataagccttgtcatctcctctcgcaataatcttcatataagtaatcatctcatcatatatagatcaatcagccttgttaatgctctgatctcagctctcacttttcaatgcagccctcgtgactaggaactattttctttgtaatttgaggttttgatttagtggtcacattagtcttgtcagtttgtagcagcataccatgatgttattcataaccagtgatagtattatctgctataaagttgcactgtaaatcaggaatagttgtcaacttaaatatttatgcatgtctagggaaagtaattgttaggcagacaccctttgctgtaaaacaccaacaccccagttctgatgtgttcggaaaaagaaagaaataaaaattaaaaa

SEQ ID NO: 246302 - DNA, 510 bp, Homo sapiens
agaataagctgtagtctagttggtcagagctagttgtttatgaacagattgtaaggctggataatttgacttcaagtctgtactcagcaagtctttatgtttcataaccattaaagtccatgctttgagcatttttgataaaaaatgtgattttaaaccaggactagttttcacaagttaaaggagttttaaaagaaaccaaaatattggtacaaattaattacaggtttatgcatttcgaaggcagataccctgattaacattgagggtatcaattgtttaagataaaatatttgagaattatatttaacatatgcaataaatgtttttattcttaaaattgtcgaaaagaatagaagaagttggtggtggtgatgaaatagtactaaagactttctgctttcaaacagaacagacaactggagagctaatgcacatccttgctagttaggcgaaaatttcacaggaatgaaaaagtaaagcagactttgcaggatctatttctttaaa

SEQ ID NO: 246303 - DNA, 395 bp, Homo sapiens
gtagctgtgaagtctgtgtgtacatgttaccaagaaggttataatgcttcccatcagaggagagctagaaagataataggtgcagccttgccagaggagagttgggaaggtataggtgcaggctcacccagagacggaggcccttttagtgttctgttctgtaaaacttcttgtacggtagatggcacatagtgaacgctccataaataacacgattcttattgttactcatcttcaaattctgttatcccaggctgttgaattgtcttggtttcctttgcaagagtcagtgctgactttgtcctgttctgattgctcatgtaattcatggtatcttagtctgtttgggctgctataacaaaataccataaactgaatggcttataaacaacaga

SEQ ID NO: 246304 - DNA, 462 bp, Homo sapiens
tctgggatgacaggagtgaggcactgcgctgggctcatgcatttttgaggaaatacctatgcagcacacggccggcagcaccacagtgtctcagctgtctttccaggaaagtcctgctccccactatactgtgggtcccccggctaattcagctggagtccccgtcgctcgagagcctcctcccaggaaaacgccctttgctgcggcagctttctgttctccctggctccctgcacggaactgagcttcggtacagttcatcatttgtgctgtttcaacaaagaccttcttagggaaatggcctcttctctgctttaattctgagcacgcactggtgaaggacactgtatctgagccgaggcccagggtgtcacccatcagagcctttcaccatctgtgcagatgtcagcgcggggaagggacacctcctttacataaaaacagcttagaccttgcaggctc

SEQ ID NO: 246305 - DNA, 480 bp, Homo sapiens
caaacatcatatgttctcataagtgggagctaagccatgagaatgcagaggcataagaatgacacaatggaccttgggtactcagggggaaagggtgggaagaggtggagggataaaagactataaatagcgttcagtgtatactgcttgggtgatgggtgcaccaaaatctcacaaatcaccacgaaagaacttactcatataaccaaacaccacctgttccccaataacctatgaaaataaaataataataaaaagaagaagaaagcatactaaaataaagatatgaacctgaaacttgtcatccacccaacctggatatgcttgccagtatgtgacatcaataataacatcatgactgtaagaccaggcacagtggctcacacctgtaatcccagcactttgggaggccaaggtgggccgatttgagatcagaagttgaagaccagcctgggcagcatgatgaaaccccgcctctac

SEQ ID NO: 246306 - DNA, 582 bp, Homo sapiens
ctgtcgccctggctgtgatctggctcactgcaacctctgcctctcgggttcaagtgattctcctgcctcagcctcctgagtagttgggattataggtgcctgccaccacgcccagataatttttgtatttttagtagaaacggggttttgccatgttggccaggctggtctcaaactcctgaccttgggtgatccgcctgccttggcctcccaaagtgctaggattacaggcgtgagccagcatacccggtccccacctactctttaactatgacagatgtgaacgtttgatctctttgcagacaagatcagcacggtgactgggtctttgccctaccttcctaagcaaatgacagaactggtagcagaactggagcccctgaagcttctgcaggcaaacttcctggagcagcccaagaaagtcagagcccctccttttcgtcacattcagttggaattttggaaaccaagcataatggagaaataacttttttggtatagccggaagatgaacccttgggcacagtttcaaagtcaaatattttactgtaaagtggaagaagaaaatacccagatctttct

SEQ ID NO: 246307 - DNA, 345 bp, Homo sapiens
actaaagttcctcatccacctgcctcatgggattgctcagaggatagtgtgagacaatctaccacaaagtacaactgtgagccacttcctaactcctgctttcccatgtgaacgtttgatctctttgcagacaagatcagcacggtgactgggtctttgccctaccttcctaagcaaatgacagaactggtagcagaactggagcccctgaagcttctgcaggcaaacttcctggagcagcccaagaaagtcagagcccctccttttcgtcacattcagttggaattttggaacaaggcacatgagagagatagtactcaccggggtcctctagatcgtcgacgt

SEQ ID NO: 246308 - DNA, 592 bp, Homo sapiens
ctcaaccagatggctccaaccagagaatcatttatctgacccacagaacagtataaaagaatacattgttgctgttctaagccaccaagttcccagatgatcagttttgcaacaagagcaattgatgcacatctagaggcttgattaaatgtttcagcaggaatacttcatagatgatctgtgtgcttctagcacatcagaaggctcataatgttaaaaggaggtttacttttgaacctgggtaaatgtggattaagggaaacaaacatcaacatagtcattcctcaagttagcatctctcctgggttttagtactatctggtcatcttttagccatcagggcttgtagggcactaatagggacaagtagcgatgttcctccctgatgttcagaatgacctatgcccaaagatagccgcagcatttgtcaagaggaggacattatttcaccaggttatagccacatataatattattccaaagtcatgctgattaatatatttctaaggactttgttcaacccagttttgggggtgtgcctattccttttttatttgacacaatcaagctgataccttaagatgaccaaatc

SEQ ID NO: 246309 - DNA, 963 bp, Homo sapiens
tctggtgcaaattttggtgactgatgagaaattggtacataatttaaccaaaaataggctgtatatcatggcttgcaacctggagacctctggtagatttctttagtgcatcccagccaagtgtccttcagaaattctgttgttgccaggctctcttcattgccctcaaagagctctacataagcagtggttataaagagctttgcatgatatctggagtttctctagtaatggtctcatgtgcctttacctgtgatcccaaagttaaccttggctatctataatttgtgatggcagctattctttgggtaaacaaattagctatctcagggtccataatttgtgtagaaatcctgtgcattacatgaactttgaaatagcctaggaatagagaaattcagtttctggttttagctaatgtcttgagagcttctttgctgcttctgtaacctagatagactttgctgtcacatcatgttccaagcatttgttgccattcagatgcagaatgctttgaagtcatcatttgtcattcattcttccaggaacacctagaattcttaaatagttttttggttctttactttccactttatccaggtaatggttgagataaggcactttatcccagagtgtttctggtaaaatgtttccatgtcagtttctctgagtagtctttcatccatcctgctgttgttactgcctttttccattaaggagcctgtgaatcctcaaacagcctgagagaatgggccctggattttaggaactaggccatgcctggttgatacctttctactaggaagtccagagtgttctttatttaaatgtttgttatttcagtcaaactggattgaaggataaagtgaaactaagaatgaaggaggtactcattgatttatccagttacaagtcagtctaggagcaaagttataacagtatctctcatcattcactattcgt

SEQ ID NO: 246310 - DNA, 538 bp, Homo sapiens
tccagggcaggttgctgataggtcccggtgcctcctcccacccagacttggctggtgtccacaacgcagcctccgctcacctggctcccttataatctcagtgtcgccggagcttctggtcaagtgcactcatcctggagccgactgaaccaagggagccaacggagtcacgctgggtgattcgagactatcccaagcaacacggacctcatgcggcaggtcctgtccccaccacgctgacacttgaaaggcaactgtttgaaactggttcaaatggctgtgtttgacttgaaacacatccgcgtttggtggggctggtgaaaatgaccttcggcagttcagaaacagcggaagatggacagtctcacgctgaggtttcaaggactgtgctaaaaataagattaactaagaggcagagaaggaggctcgtggataatcaaatgtgtaagattggaaagagccgctgtaatcaatttacatatcaggaaagggtaattaccataaccaaagggaaaatttctccaagccaaatggttaa

SEQ ID NO: 246311 - DNA, 524 bp, Homo sapiens
ggaaaagcaagatttgagaatattcctctttactgcattgtcattgcactctagtccttctgatttcccttgtttctcagatgatccctacgcccaattatacagaacagtcttcctctagttacttatatcaaacacttgcctgctagctgtgtttggcaggccagcaggatgaggtaataatcagaagaaaatgttctggtttattggcctcatccacgtacaacattattcaaaatagttctctgtgggtgagaacagagttgctttgagatcccctggtctaatgttctgtagtagtgaggaggaacaaaactgtaaacttttttgatctcttctagaataatggtaaggtaaatgatatctgcttggcccatcctttcagtaatgtttacaggcagttagatgtatgtgaaaatgagagcctttcatttataaacattttggctttactctttccaagtccagccatcttcttacgtacagcctccatggtcagtacagcagtgttttcctaaaagcat

SEQ ID NO: 246312 - DNA, 400 bp, Homo sapiens
ttcagtttgataatgaaggagaataagtcattgtgattgcattcccatgtgaaagctatgagatgccccattttagttttctcaacaacctaaacattatataaagatagattgcttactgttttgtttccattaagttaaaaagcatatcatttttttaagctgatgaaattttaaaaaccattcagaaatctataattctaccattattatttttgttttattttattccagcctttttatttggacgcttttacattgctataagcataatgtacatattcctttatagtctactttttaaaatttgcattatatatcaaattttttttcatttgttatgtagccttctaagaaagcaaaagctatatatataatccttatggaattgaaaattcag

SEQ ID NO: 246313 - DNA, 597 bp, Homo sapiens
agataaacaagatgttctgatagagaataacctggagatctacttagggtgatttcaaggaaaattctttttctgaggcgataacatttcagttgagccctgaagcatgagaagtgaggattaagagcctcgggaagatttttccttacagagggatatagagatgcagtggccttgagtaagggaagagcttgatttgttttaggacctgaaggaaggctggcaaggatagagagggaagggaggagccagatcttagggatcttctcagctttggtacagattttggaattttaagtatcactggaggccctcaaatagtgccttgacgtgatccgataaattgggctggtgtgtgaaaagatttgaagggggtccaggaataccagttggcagagacctggggactggggatgaggccagtattttgtgtgccccatttcccagggaacaccgcaatttatattgttggttggccatcctcctccttcgaacaacagttgacacccgtccacccccccccgtgcgcaccctccccctgcactccgccctgtcctaaacagggggaacgccataagccgggcgaacattcttccg

SEQ ID NO: 246314 - DNA, 460 bp, Homo sapiens
ttctccagtctggtaactaccccggcatattcaaagcttttagccttgaaggagttaataatataccacctcaaaatatgctgctgtggcatattgactattttaaattaaaggcacttaaaaacagcaggtgcaagatcactgtcatggatattatgtgtcttaaaaggaggagatgaaattcccatgtgaaagatgtcttccctataaaataacattgttatcttcaaggacagaaagttgaagtcgagggaaatctgtccaaacaaaatttgttaatccctatctttctagtcgcttctttaccccaagccccttcgccttatcatgtttcacaactactattttttgtccatttcactctataagcaattggctcttaactgctgctttaggtcttttttttttttaatgagggcccccgtgctatgtaaaataaacatttgtgtggttgtctcct

SEQ ID NO: 246315 - DNA, 382 bp, Homo sapiens
gtatttgaagggggtcatggaaccaatcattggtactgcaggaagactgctctatattctcattgtgcatcaatctccagaacttcatcttgcagatgtgctgcccctccctcacctttttgaaagagcctttgatgattatatggattcctgtcttttttattttttgaggtggagttttgctcttgtgtgccaggctggaatgcagtggtgctatatcggcttactgcaacctccgcctcctgggttcaagccattctccagcctcagcctcccgctagctgggattacaggcacccgccaccatgcccagctaatttttgtatttttagtagagaccgggtttccccatgttggccaggctggtctcaaactcttgact

SEQ ID NO: 246316 - DNA, 344 bp, Homo sapiens
tgctctctccaggctgcgctgacacacagttcccccggggagtgctttgctgttcagccctccggctgcgcgggaaaaagcgtgtatcctcagctgagttgtgccagggcgcttccgagcaggcctgggcactgcaggaactagccgtcctcgcccgctccggagtgcaaccaccagtggttactttgctctttacacggcattctcaaaactaatgataatagaatgatcggttctgagacaaagctatggggcaagttgaaaagctctaagtgcttcatttaaaacccagtggtttaacccacccctatgtttaataaaacattaaacagaattgggctgag

SEQ ID NO: 246317 - DNA, 340 bp, Homo sapiens
ggggctctatatgggggctgttgacaatttctatgctttcagccacggtgcagcactcagccttttgtccccaacccgcttgcaagttcatgaggctagacccataacttctgttttgcaacactcttacctctaacacagcacagatattaaaacatcttacgtgagctacatgatctgggagtaaatgcctcagaagtttctcattctgattctgttacgtagaaataaaacaaacacacgagtttcaatagcgtcagatgaaaacagttcctgtcttgctacccataatctgtatgttccatcagtgattaagggacagcagtagagaaaccacaga

SEQ ID NO: 246318 - DNA, 715 bp, Homo sapiens
aagagccgtcctctggcagatatgtgaaagaactgcctatgaggagcgagaggctacttcgcacacctcgcagctcaggtccccggagacggctttacaggcacacaagcccctctcccaagccatctgccaggagccccatgaggaacacagcacagcgcctgcatcagaagcccatgggtttgcctatcacatgtcttgttttctcctgatccgtggctcacaggctcagtgtgacccaacctcctagatttccccatcagtgctatttgcagtgcccccaagcactttcctccactccagtccctgagcgcatgccaacggccctattttcagccacccctctccatgcctcttgtctgtctctagctgacaagcagattatctcttctgtccactttgtttgccaatgtactttggcaccattgaattccaacacatgaagtaaactgaactgtgtacaacgctgagcacacacgtggtttggagagcagccccttgtcaggatccaaaatgttcccaagccttgttgatatttgggtcactgcagatctctgagtcccccttcctttttaatcttcttcccctcaactcattctcaatttctctctctgaaaccacctgtgaacacacttatgcattcaaatagatgcatactgttcatgcttatatttttctgtaaccgtcatatctaataaatacttatcatccagga

SEQ ID NO: 246319 - DNA, 375 bp, Homo sapiens
tgtagtcctgtaatcccagctactcaggaggctgaggtgggaggactgcacgtgcccaggaattcgaggctgcagtgagctatgatcatgccactgtattccagcctgggcgacagaacaagtctctgtctcttaaaaaaaaaaaagaccaccaccaacaaaaccccataccatctcttatcagctgcattgggagccctgggcctttgaaaataaggagacaaaaactagagcctttggggcccagctgcctcttctggcatactccaggatgtgtgcaaagcttccccagtgcctagggcctttgtattctccaccttgaagcatctccccgaacttgtaaaccaatcatcttccaaagtttttgaggtctgc

SEQ ID NO: 246320 - DNA, 457 bp, Homo sapiens
agaaaaagcttttttattgagtgtcaggccctgaggacacaacaggggtcaaaagccacactaccttggccaggcaaggtggctcacgcctgtaatcccagcacgtgtgtggggcccatgctagacctgtgggggagagacagctgacagctaagttgctctttcccaagggctgaacagtctagtgaagagatggcccctatgtattcagcatccagtgctgggaagacacaggaagaggaggctctttgggctggggccggggtttggggacagcctcctagagaaggtcgttgagctggtcttcatggatagaggagtggcatctagaaaggaaggagaattgcttgaacccaggaggcgaagactgcagtgagtggagattgcaccattgcactccagcctaggcaacagagcaagactctgtctcaaagccaaaaaaccaaaaaaccaaaaa

SEQ ID NO: 246321 - DNA, 326 bp, Homo sapiens
tcctgtttccatcccagaaatgctgatgtgtagccaataagcctgttcttatgatatgcacgctctcaatttggctgatctgaggggtttagctaagccttgggctttgattttcccatctgcattttcagatcctcccccatctgtcactggggcagtagtagccttctcccccaaccagctcagcaggattaggccctgtggtgcccatgcttgggcccaggatgcacaagtcagcagaactccagctgggattcctgcaggcttgggcatgggaaactgagtcctcactggttcttcccagagattccttgacacatcctttc

SEQ ID NO: 246322 - DNA, 589 bp, Homo sapiens
gtaacagttatcttaggaatcagagcaggaattctggtctctttctcagagctcatgcccagaagaactcagggagtaggggaaaatgggaagaaagggcatgagagtgaagggtaagaggaaaagggaagagaaagagaggactaagaaaggtagatgtgcatggtacctcctgatatgtatcaaaataatgtaaggtgtagcacattaaagctttagagttatgaccttccagttgaaccctcttgtttaatatatgaaaaccagaaaacttgcctaaagctctataattacaggcagaactgaaaagacagtttacctatgattactcaatgtctaaaaaggggagttaactaggaaaaaattaggtaatctgttggtacttgaagagttagtttcagctccagaaagagaagatacgtgatgtgagggatctgtagagggaaatgagaggaataggtggcattacagagagaaaatacaagaatcatgcaaatttggaaagttctatgttgtaaacgaaatgcgtgaaggagaggcagagaggaccactacctcagggagtgagataatataacctgcctttttc

SEQ ID NO: 246323 - DNA, 240 bp, Homo sapiens
cttcacaaaatgccctttgtcagagaataaaaagagttcaacaagcttggcggccttctgaaccaggtacttgctggcacagaggttccttcagggctacaagacacattaagtcatgaactattcttgattaaagatttgactgtgaaagaagatagacatatttatttaccactaaatctaacattaaaaaaaatgcatgttttactttggctaatgaatgtcactttcaaaaccatc

SEQ ID NO: 246324 - DNA, 1756 bp, Homo sapiens
ctgttcaccggaataacacaagagcaacaataataatgtactcatttactaaaccaagttgaataaatacatttttccaggttgtgagtgaaaatagcttaaggtctgccaggtttttagagattttgtcatttaacttaaacgctaaaacattcgtcccttgaagcggataccattatagaaaagtgttaattgcttggaagtttcatttattgaagttcaagtgtttttctcttaaattcagtatgttggcctgtgagttacggtcataaaagtattgcaggaattatttacctctgaatgagaaagctcaagatagttatatctccaggaactttcttcgtcttctgaacttcccccaaccccagcagacacacacactgttctggttactttcctgatcaaattcgagtctttcaaaatagcttttgatatgtcccaggagttaaacacggtatgtaaatatgaactcaccaatgtggaacaaatggagtgatctgttatcccctgggtttagacgctgcctttctattaatactgctcacaggagacagagtagggactcgtgtgcactggccacgtctcaacagcagtgtgaccttgggcaaggccttcctaagtcccgactccctgtcctctaacatggtgttcatatcagcctcattttcttactgggaaggttacgttatgtaatatatgccagccatttttgcaaagtgctgtatacaggagatcttgagtgagtgtgtttccctcctcctctttttgggtagctatgttaggctgttcactttgggcatttgccctgaactaaaatccctaagtccctttccccaaggtgaaactaagatagagttttcatatttatcctgtcttattcttttcagggaaaagattttacatctgttgaatttcatccttggtttaaagttgttcttttaactactgagatcttttgaaaatcttgatggctatttatctgattaatggtatttcctaattgattgtcatccacagaattgatggtgtatgtattccatgccttcatttcgtcaatgacaaaacattttaagcaggttaatactgatgacagatttctgaggttgcctgtagagaccattctcttcctcgatattgctcagaagttgaatttggtgtctcagcccactaggaattcgtctaacagtgttattacgataaaatgttactacaaacttgattaaacttctggtggaaattccatcacattttatgcaattttcaatttatttctccaatttatttttaatgccacatggacattatattccttaaccattcttttgcatgtgattaacatttgtgaaattaaccacttaagcaagtgtttttgctttgatgaaagaaaaatgtttaaaatcctactggatatgaaactgaaagtaatgttttgtgttttttgtttcaaatgaaagtgtaaattaagaatttgttggcagggcgtggtggctcatgcctgtaatcccagcactttgggaggccgaggtgggcagatcacctgaggtcagcagtccaagaccaccctggccaacatggtgaagtcccgtctctactaaaaatacaaaaatcagctgggcatggtggcgggcacttgtagtcccagctactcaggaggctgaagcaggagaatcacttgaactcaggaggcagaagttgcggttagccgagatcacgccactgccctccagcctggggagacagagcgagattctgtgtc

SEQ ID NO: 246325 - DNA, 1320 bp, Homo sapiens
ccaggtagacctaactattgttaaacacggtatgtcaccaatgtggaacaaatggagtgatctgttatcccctgggtttagacgctgcctttctattaatactgctcacaggagacagagtagggactcgtgtgcactggccacgtctcaacagcagtgtgaccttgggcaaggccttcctaagtcccgactccctgtcctctaacatggtgttcatatcagcctcattttcttactgggaaggttacgttatgtaatatatgccagccatttttgcaaagtgctgtatacaggagatcttgagtgagtgtgtttccctcctcctctttttgggtagctatgttaggctgttcactttgggcatttgccctgaactaaaatccctaagtccctttccccaaggtgaaactaagatagagttttcatatttatcctgtcttattcttttcagggaaaagattttacatctgttgaatttcatccttggtttaaagttgttcttttaactactgagatcttttgaaaatcttgatggctatttatctgattaatggtatttcctaattgattgtcatccacagaattgatggtgtatgtattccatgccttcatttcgtcaatgacaaaacattttaagcaggttaatactgatgacagatttctgaggttgcctgtagagaccattctcttcctcgatattgctcagaagttgaatttggtgtctcagcccactaggaattcgtctaacagtgttattacgataaaatgttactacaaacttgattaaacttctggtggaaattccatcacattttatgcaattttcaatttatttctccaatttatttttaatgccacatggacattatattccttaaccattcttttgcatgtgattaacatttgtgaaattaaccacttaagcaagtgtttttgctttgatgaaagaaaaatgtttaaaatcctactggatatgaaactgaaagtaatgttttgtgttttttgtttcaaatgaaagtgtaaattaagaatttgttggcagggcgtggtggctcatgcctgtaatcccagcactttgggaggccgaggtgggcagatcacctgaggtcagcagtccaagaccaccctggccaacatggtgaagtcccgtctctactaaaaatacaaaaatcagctgggcatggtggcgggcacttgtagtcccagctactcaggaggctgaagcaggagaatcacttgaactcaggaggcagaagttgcggttagccgagatcacgccactgccctccagcctggggagacagagcgagattctgtgtc

SEQ ID NO: 246326 - DNA, 505 bp, Homo sapiens
acttaaaagaactgagctgggcgcagtggctcacgtctgtaatcctcacacttctggaggccgagacaggcagatcacctgaatttgagatgagcctggccaacatgggaaactccctctccactaaaaatataaagactaaaaaacaagaaagaaaagaattgtagccacacaaaatatattctcagaattaaattacaatagaagtaagtaatggaaagatatcactaattagaaaaattctcagttgaaaattagataatgaattctaaggaactcaactttcaaaggaataatcaaaagggaaattagaaagtgttttaacctgaatgaaaattaaataccacgtgccaaaacatgcaggtgtagtaaaatcagtagaggaaaatgtatagcgcttatctgcttctgtttgaaaagaagaaaaataaaagatcaatgacctcagcttttactttaagaaactagagaaaataaagaaaatgaagcccaatatatgcagaaa

SEQ ID NO: 246327 - DNA, 523 bp, Homo sapiens
gatatcttatttttaattttgggaactctttctccctctatttttatagcaactttttcttcatgggtacagtagcttgttgtaattctctttgagtgttaattgcagttttttattctgtttagttttcttctttcttacatagttgcttttatccaaattcatttttgtttcttttagttcctttctttcctatggaagctttcctcaaatggctaatgatcctcattgttggtccatatttaagagtaatgtagccgggcaaaatggctcatgcatgtaatcctggcactttgggaggccgaggcgggcggattgcctgagctcaggagttcaagaccagcctgggcaacatggcgaaaccccgtctctactaaaatacaaaatattggctgggcatggtggtgtgtgcctgtagtcccggctgctcagaaggctgaggcacgagaattgcttgaacccgggaggctgagattgtaccactgcactccagcctgagtgacagagtgagactctgcctcaa

SEQ ID NO: 246328 - DNA, 510 bp, Homo sapiens
aattaagaccctctgttttaggtaactttgggaacctggtggagcatcctgacattacatcctgaaccagagtatgtctcaagatatttttggatcctgcttttgtggagacagaatccacaacacagcagagagttcctcactccaagaggtacattcttcttactgtctggttcactccctagacacatgccagcttgaccatcatacagagcagcccccaggatgaaggcaaacttctatctggagtctgatctttccaagatagggctgaatcaacttagctcttttttcttgtggctcattgctgctttccagattgagaatagcctcagatttctttctggcttccatataccatgcatcctattgctttgcttatactcttaccccccaatgtcaaaatagtcctgaagtgtataccagatcatgtcacacatatgcagaactgatcatgtcagttcaaccttggctccaagaataaagctgtaagtcctataaccaaaaaaa

SEQ ID NO: 246329 - DNA, 489 bp, Homo sapiens
tagaaagaaaagaagaacaggatgagggggaccaggaatgttggggatggatgtggtggaaggctgtgctattaaataggctggtcagtttaagcctcattgagattcatgaggacaataccacctttctcataatcaaaagtcttaactataataggccaatttcagaatttattttacattgctttcatctgtctattcacactctggtactacactgttttaaatattgaggatttatagtatttccaaactttaccaggttagtttgaaggaaataatgttttcttttttttttctttccacaggtgttatctcataaaggagataatttttaaggtatgaaatttgaaatttttttttcttttggggcacagtggctcactactataatcccagcacttggggaggccaaggtgggtggatcacctgaggtcaggagttcaaaaccagcctggccaacatggtgaaaccctgtctctactaaaa

SEQ ID NO: 246330 - DNA, 683 bp, Homo sapiens
cctttcttttctatgctttattttttacttttcatgtcaacaattgtattcatctacagaagttctgtgtatgcatatttatattctctatcttcatcatgctcatgcttttctctgctttctggaacatattgagaagatttatgatagctgtcttactgtctctgcctgctgcttctattctctctttcacttctcaatctgttgagttttttcttggttatgagtcatctctttctgcttcttctaatgcttgtttatttttattaacattgtgaatttacattgttgtttgttgcattcttgttaactagtattgagttttattcacagttaagatacttgaaatcaaatcttgttttttattctgttgcctcctcagcagcctgtagtctaattttatccacccactgtttctaaatccttctgacaattctatccagtgctcatttattaggaggtctttctatgtttgatggtaggaacataaacgattaccggccctgagtaaggtccagggactgttccacctgttcctttcaagtgacatttttcttaccctcagtactttcctcacatgtatgtgcagatcagtattcaacttgacaaaacctctctgtagattctctagagctctttctctgtgattatactgtcctctgcaggactctgccctaaaatca

SEQ ID NO: 246331 - DNA, 323 bp, Homo sapiens
ctagactgtaattctacctaagcaattggtctcctccgtaacaaatcaccgtgtgaaggcagactatttctatgtcatgagaatgcttaaacaaaaagagcacacaggagaagtgaacatactgtcaaggtgttatatgaaaattaactctaggaagggcatctgatgaggtactggaaagaaggagatctgtcttcataatgtcatcagtaactgggaagagaaggactagagaccaggtaaatagataagtcactatttggtgagcatttcaaatgaagttattccacatcctgaaaaacaaaaatgcatttcataaaaca

SEQ ID NO: 246332 - DNA, 639 bp, Homo sapiens
ccctagtctgacctctttcaccacagatttgtgtttctggttcttgaacttaatggaattatacagtaggtacttttggtgtctagcttcttttactcaatgttatgtctatccatattgttgaatataaaaggggtttattctttttgttgttatgtaataaaatatgaacctgccacagtttgtttgcccattgtactgtggatgtacatttggatagtgtctagtttttgtctatgatgagcacatgtcttctgaaagagacatacactcagtttcttgggcatatgctctgcagtagaattgctgggtcatagggtaggcacatatttagttttagtagatttgatcagatagtttccctgagtctcatttgaaccttgaacttgaagcctttgccttggtgagcttcaggttccccagcttactcataatgcagtacttctgagcccagagactggggagaggatatgtgggaaataactgggagctaagtggcagcttagctggaaggtctctagtaccttgcaggaatttcaggagcaaccccagccaccactatcagacatcaaagatcagacaggataaggcaggtggccccttcactttgtgagaaagccagagcccagagaagccaca

SEQ ID NO: 246333 - DNA, 701 bp, Homo sapiens
aataggttcacaacccttactaaacataagagaattcatgctggagagaaacccatcacatgtgaagaatgtaggaaaatctttacctcatcctcaaactttgccaaacataagcgaattcatactggagagaaaccctacaaatgtgaagaatgtggcaaagcctttaataggtccacaacccttactaaacataagagaattcatactggagagaaaccctacacatgtgaagaatgtggcaaagcttttagacagtcctcaaaactgaatgaacataagaaagttcatactggagagcggccctacaaatgtgatgaatgtggcaaagcctttggacggtccagggtcctgaatgaacataaaaaaattcatactggagagaaaccctacaaatgtgaagaatgtggcaaagcctttagacggtccacagatcggagtcaacataagaaaattcatagtgcagataaaccctacaaatgtaaagaatgtgacaaagcctttaaacaattttcgctcctgagtcaacataagaaaattcatactgtagataaaccctacaaatgtaaagattgtgacaaagcctttaaacggttctcacacctgaataaacataagaaaattcatacttgagagaaatcctacaaatgtaaagaatgtggcaaacctttggatgatccacaaaccttaatgaacatgag

SEQ ID NO: 246334 - DNA, 209 bp, Homo sapiens
atgaagtaatttatatggtttagatactgtaataactactgctaacattgtgatgaacacttgccaggcttattattattatatgacatatatcatcatatatctacataaatatgatgaaagatctccctacaaagccattgttatcacctttataatttagtaatataacatatttgttagtaaacataggtataaagtattgtttt

SEQ ID NO: 246335 - DNA, 843 bp, Homo sapiens
tgggacagagtctcactctgtctccaggctggagtgcagtggctcaatctcggctcactacaaactctgcctcctggattcaagcgattctcctgcctcggcctcacgagtagctgggattataggcgcatgccaccacgcccaactaatttgtatatttttagtagaggtggggtttcaccatgttggccaggatggtctcaatctcttgaccttgtgatctgcctgcctcagcctccccaaagtgctgggattacaggcataagccaccatgcccgatggccaagaattttctagaattggtaaacatttgagaagctatgattcctgatcgggatatacaagaaaagaatctttacctagaataagagtgaaaaaaactcaacaattgaaagtcaaaaagaaaatattgaaacagtcatacagaaaaaatggaggagacctgagactgctccaagccactcactttactgatgttgaactgatactcatcactctaagatttatagacaaaactatttatagctatttatttgtagctatttatagacaaagccacaatgggaacccgtatcccttatgtccagtgcaccagttatatgtgatattctgagacaataggcaaatgaatttttatataaagaaagtagttcacttttcaaacttaaaagggaaatatataagaatgcagtcatcttttacatgttcaaaataatgagaacaatatttagcaaatacttagaacctgtcccaccagctaaacgtgttaggcaacaaaaagtagtagaaataagaaaaatgtaatctcttgcctcttgcagtactccatgatggaggtttgtt

SEQ ID NO: 246336 - DNA, 338 bp, Homo sapiens
agagttttagtattttaatattggaattctgtgtaagattgtatttgaaccaggtaccgtggctcatgcctgtaattccaacactttgggaggccaaggtgggcagattacttgaagcccaggagttcaagaccagcctgggcaatatgacaaaacctcatctctactcaaagtatacatactaaaattagccaggtgtggtggtgcttgcctgtagtcccagcttctcaggaggctgaggtgggaggatcacttgagcctgggaggtggaggttgtactagagctaagatggcaccactgcactccagcctgggtgacagagtgagatcttgtctca

SEQ ID NO: 246337 - DNA, 545 bp, Homo sapiens
tctccttttattttgagacagactctcactctgtcgcccaggctgtagtgcagtggtgcgatctcggctcactgcaacctccacctcctgggttcaagtgattctcctgcctcagcctcctgagtagctggggctacaggcgtgtgccaccatgcccggtttatttttgtatttttagtagagaggggggtttcaccatattggccaggctagtcttgaactcctgacctcaagtgatctgcccaccttggcctcccaaagtgctgggattacagtctagcactgagttatttctttaaaattaatccgaatccctaaactatcctgttggatatctttacattgaataagggaccatttctaacccttggttagctttactatcttgcaggataaaacttaaaccgtgttaaatcttgtatcattatcctagttcctaggtgttttccgcaattcaccaaaaaaaagatgctattcttaaatagcttgcaacatatgtgttttctctatgtgattcaactacggaatttccagcatatcaaatg

SEQ ID NO: 246338 - DNA, 86 bp, Homo sapiens
aagcttcagcataaatgtcacttctatttggagtcttgcttaaattttcaaattcagttaggtccccatattacaaaaaaaaaaga

SEQ ID NO: 246339 - DNA, 474 bp, Homo sapiens
cccactagtcacggttggctagaagctcctgcgtttcccctctagccagcaaagcttctagccaccgctattccagaggaccacggcccctgtttttatgtctgagcttcagagaaaccccaccttcccagagaatcagttctgtggcagcatctactcccaaggcactaagcctcagcagagtcatatgatatacaatgacctacttggttctctgcccaggcagccatccgcccaccacctccagccccagctgcacccaggctgagattagtcttttaaagtgagggttgaaggagccttccttggccactcgaggacttaagcttttacatcgttggtgggaatgtaaattagtacaacttctacagaaaacaatataaagatttctcaaagaactaaaagtagaactaccatatgacccagcaataccattactgagtatctactcaaaggaaaataaatcatcatatt

SEQ ID NO: 246340 - DNA, 764 bp, Homo sapiens
agttgagaccgggtaacttatagccagggataatgttcaaagtctttaacaagtggtatggcttgctgaatcagagtagctggaggtaagaatgacatcctggaatcccttcttgtgctaaatgttacccatttagttggtgggtctgggtctaggatagccagggagggggaaacttcaaggggtggggtgcctcagggcagtggctgctgacccacagacctggaagtatttgactatttgaataactggtacaggtttactggtgtctacactggcagagaatctgctgtgcttcctccccttcccttcgtggcaatctagcaggttgctccaggcagcttccccagctcttattccaagaaaacctgcccctggggtggctgcaggtcacagctttgttgtcctgggacaaaggagtgtctggtgattaggcagccccaggggtcctagccaactggaagaagggcttcctgaggaaacacagtcctgggctattttatatgtgtcaggaggatgtagacagttcaacagctctagcaaatgccttaactaatagtggcttaatcaagataggtgattttcttttgtaaaaaattttactggggtaaaataacagaatgtaaaatttaccatcttaacctttttaaggtgtaccattcattaaatacattcacaacgtgtgccaccatccagctctgtaattttgctcattttgtaaaactgaaactctgtacccattaaacaaaaactccccacctacc

SEQ ID NO: 246341 - DNA, 683 bp, Homo sapiens
agttgagaccgggtaacttatagccagggataatgttcaaagtctttaacaagtggtatggcttgctgaatcagagtagctggaggtaagaatgacatcctggaatcccttcttgtgctaaatgttacccatttagttggtgggtctgggtctaggatagccagggagggggaaacttcaaggggtggggtgcctcagggcagtggctgctgacccacagacctggaagtatttgactatttgaataactggtacaggtttactggtgtctacactggcagagaatctgctgtgcttcctccccttcccttcgtggcaatctagcaggttgctccaggcagcttccccagctcttattccaagaaaacctgcccctggggtggctgcaggtcacagctttgttgtcctgggacaaaggagtgtctggtgattaggcagccccaggggtcctagccaactggaagaagggcttcctgaggaaacacagtcctgggctattttatatgtgtcaggaggatgtagacagttcaacagctctagcaaatgccttaactaatagtggcttaatcaagataggtgattttcttttgtaaaaaattttactggggtaaaataacagaatgtaaaatttaccatcttaacctttttaaggtgtaccattcattaaatacattcacaacgtg

SEQ ID NO: 246342 - DNA, 589 bp, Homo sapiens
tcacaggtgcaaaggcccaggttctcccactggctccagtccagggctagggacacctgtaagaccatgatatcatctgatacataacctttacatcataagctttacataacttttacatacataacatcacacatagcattcaggatacacacatcagatcacctttacatgctctaacatgtaaagattaggaaagtcatcaagctcattcttatgtcaaaaaacatctgcacaatttgaacatcaacaatttttgaaatctatcaaggaattgaaattgcaagggaaattacccattccaaatactgaagatacagacatgtccaggatcagaggtgacactggctgaactggaaaagaacttgaagaaagcacgagttggtgagagcacacacatggtaaatgctatgaaagcctaaacggcagatgtggactagggtgagattcctggggacctacactccgtagtcttctgaactttccttcaaaatcttccagattctcaggtatacaatccaaataatttttttatgggtctgaattggggaggattaattaccgagaaatgtaccaagagccttctaaa

SEQ ID NO: 246343 - DNA, 483 bp, Homo sapiens
catttatttggaatttataatcatggaattttcgtactacattaagaatctccatgggtgataatagagcactaaaatagctagcattgcactgatgtttctcactctctacatttgtttaattcctctgccagagacacttacttaacttgtcttggtggatttttgtaatgtgtctttcaaatggaaaaaccgtattcaagcattccagttttatcaagtagcaaaaacacccaggctgttggccagaatttgcatgtttgttactgcagtacatacccagatatctcaggcagaggaataataacaattttccacaatgtcattggatccataattctggcagtaggttaattcacttagccacttccattaaagcaataattattggcatataatcttagaaatcaccatgcattgcggtgttcaattccagttgaaatagaatttttagttcaataaatgtttgctaagtacctacta

SEQ ID NO: 246344 - DNA, 291 bp, Homo sapiens
gtgccactttgggttgtgtctaccacatgttgacattaaaaaattagagggaggccgagtcaggtggatcatgaggtcaggagattgagagcatcctggctaacatggtgaaaccccgtctctactaaaaaatacagaaaattagccaggcgcagtggcaggtacctgtagtcccagctacttgggaggctgaggcaggagaatggtgtgaacccaggaggcggagcttgaagtgaaccgagatcgtgccactgcactccagcctgggcgacagagtgagactccatctca

SEQ ID NO: 246345 - DNA, 183 bp, Homo sapiens
gcccggctaacttgtaagtttctcttagcttcctgtacagaaggcttcaggtgccgatattactgcattactcatacagtaatatagtcttaccccttgctgttgtggcagttggtcattccaacttcatggctctgcttctaatataacatccctgtctaaaatgcagacatacatgtgtac

SEQ ID NO: 246346 - DNA, 377 bp, Homo sapiens
tactaaaaatacaaaattagctgggtatggtggcacatgcccataatcccagctactcgagaggctgaggcaggggaatcgcttgaatccaggaggcggaggttgcagtgagccaagattgcaccattgcactccagcctgggcaacaagagcgaaactctgtctcaaaaaaaaaaaaaaaaaaaagaaaaaagaaaaacaacaaaaagagaaagtaaatgtggcaaatttgataactgttgcatctggtcatggagattctttgtatagttctacttttacgctgcttaaaaatgtttgataaaaccaacatggcatatgtatacctatgtaacaaacctgcacattgcgcacatgtactgtagaacttaaagtat

SEQ ID NO: 246347 - DNA, 413 bp, Homo sapiens
ctgttctctgggactgaatgcggctgcatccttcccttcctctgcttcctgtcccgatctggtttctgagtccctgggctgcagctgttgaatttccagacacaaacaagtatgcgttctgagagcctcgccgagcccacacaaccgggagagccaagctggattccattctgctttgcacatcagcagctctgctgccagctgaactccagggcaaaagctgtgcctggtaatgatgcaggcagcagggatggcacagctggcctggcttaggccgttaagggggacacgcttggccttatttgggggagagcgagaaatggaaggcgatgaagagttgcggaagcatacatcagcctccacaaaactggtgcacagcagggaaacaatctggttttgctagtcatcaacaa

SEQ ID NO: 246348 - DNA, 508 bp, Homo sapiens
tcccagctgacttcattattgagataattataaaacaaattatgtaagaatgtgtgccaccacctacattctgagcgctgctgtaaaatatgttccacaattccaaatcttgcttcaccagagaagggcagcaaaaggcttagagtcagacagacatgggtttgaatcccagctttgctttctacttgctttagtctctattctgccctcagtaaaaacaggaagaggtgctaggctctctcatacatatctccttggcagggttgttgggaggagataaagaggtatggatgagagtgcctagcacttaacaggtcttctgaaacttggacttcctttacctacagtagttgggaggaagaggcaactatcatttaaaaatctgaaattaatcagaagttctattacagctgctaggcattccaggagaagctgctgaccagcagggctctcggacatatgaataaggtaaaatcacaataaaaataaagtgaacagaaagaaataa

SEQ ID NO: 246349 - DNA, 408 bp, Homo sapiens
aaggaacacagtaattcttcagtaacagactccaaggaaaataaaatctatgaatgcctgaaaaggagttcaaaataatgatcttaagaacacttagtgagacacaagagactagaaatggagaatttaacaaaatcaggaaaacaatttttcatctaaatgaaatactttttaaaagcccctttccccatttaaaaaaaaaaaagaaatattcaacagagagacagatactacaaaacagagctaaacaggaatcttggagctaaggaattcaatgaatgaaataaaaacattgccatttgatggattactatagtgataaaatttgattcctttcaaatttatacaggagatgaatcagaagaaagaatttctgaacttgaagacaggtattttgaaataacccag

SEQ ID NO: 246350 - DNA, 479 bp, Homo sapiens
ccagatgaagagtcggggtgtgggaagggaaggtggctggggggtaggagaggacacgtctgcaagcagaagacaacagatgtgaaggcccccagttatacaagtcaaagctgggaatagcggcaacagtcgcaaagggaataacgtgtagagagagacaaaaaggatttctgagcatattggagctttttagccattctgatacattcagcaggtcaccttaagtaaagcaatctggacatgtctcacattctccaggtatggatttttatgaatcttgctcaccagcagactcaggcgtgagtttttaataagaatgtctagtttagaaattacctaggagcattttcacatcaactttaggattccctcctgaaaattttcagtttctaatgggcaggaatatatcccagtatctaaataatgtaaatggaagttcgtttcttttctagaggattttagcgtggaaaaaaaaaaaa

SEQ ID NO: 246351 - DNA, 340 bp, Homo sapiens
actacaagctgtaagctctcacaatgctcaggtctaagtacatgatgtatttatttcctagatacctactgtgaagtgtggaacaaagccaagttctattacatatttgaaaaatccaggtgacaggaagaggatacaaagatggagtaagctccccgtgtcacctcgtgggaggtagaagggatcagggtagggagttaacaagaaaactaagaaagggatgatgagactgaaatggaaaagtagatcagtgattgccacagtagagtgtaataaaagcaatataagatcttctctttctatttatgttcgttaaaaaataaaagacattaggcttgac

SEQ ID NO: 246352 - DNA, 397 bp, Homo sapiens
tgatctcggtctcctgacctcatgatctgccctcctcagcctcccaaaatgctggtatgacaggcatgagccaccgcgcccagcctaattaattttttacattttactttaacttctgagatacatgtgctaattaattaattttttaaattttactttaaaaaagtcatactttacttaagtaaaagtaagtaaatgtgtgttaactaaacacattctggggtacatgtgcacaaagcgcaggttagttacatatgtatacatgtgccatggtggtttgctgctcctatcaacccattatctaagttttaagccccacatgcactaggtatttgtcctaatgctctccatcctcttgccttctatccccccacaggccctggtgtgtgatgttccc

SEQ ID NO: 246353 - DNA, 2053 bp, Homo sapiens
acaactctctcaactcatatctaagggctaagtccactttaaccttccaatatcattacatcatatttaaacattgactctatctggtcaaggacgacaacattttatttctcctgacccttttgctatcagatctggccttgtcagttttcaatttcattcttagaatggaaacttaattcacacaagttgaacaagtagtcatcagggggcaaaacccagtggatgatggttttgtgtgctgtttggagactgggtgtttaccacacagcagtggatttcataaattccagggtcagacaagattccagtagcgacacacttgactaatatgagaaaatgcaggattaggcaatcaacaatgaggaagtcagccaagttgccacccaaaaattacttaccacagcagctgcagtccagaaatgctaacaagccagtctccctaggagtgggccatactcagctgtggaccactcacaacattttctcactttattttgcttcagagtcagtgtactgcaatgatttctcctttgcttgctttatatgtttaaaattgtcttccctaaaagctgaacttaaaattaatgtttgctaccaaaagggggtagcagtgcctggtcatgtaggcatatgtcccactctgtcggtacagagggtaagcagcctcttcctttttaaaaaatttattatgatgatttacaaaaattgaagcttacaggataaacactcaacaaaaaagtagccagtctcaagaaaccaatttttatgtatgaattaatattattttattaatccatggccaggatgattcttaagattatttcttaattctctgaacagcttaaaagagagatactccttcttttttatttacttgctttgaggttgatactcttaggtttttaacataactctctagctttgacaactcctcttataatttaaaatccttatagcttccatttacaagtaaggattatatctattttagtctcctcaatcagctacctaggagaagacttgccacttggaaagagaaagatagcacccactctccagttctcttctcccaaagttgcccgtatttcccttccctgaagccaatcaaatactttattgtttctcgctaagagtaatttttcactcttaagtacaaacagctcaacaaaaattcccggtagcataaatatgcacatcaataaaataattactactcacaatagactttccattacatatgtttcacaagcattggttttcttaaaaagaaccacgcatacagcactcaaattattgcagattctaactcagtagagtttgatttaatgtttttacaatattttttttaaagaagtgtccttccaacgctaaagaaaaaaatcagaatcaagaaaattctgtttcttagcaacagaaaaatcaaacttctgttactaagtttggtaacagaacagtactctaaattatcctctgaaccacctgatttaccatgtgatgctgggcacattgctgctaattaatcttcctaatctcgtgggatcacaatatgaataacaaggatgaacataagacacatctgtgggaattatgagggggagattataaagagtcaaaccttgtccccatatttaaattttataactataactactagtagaaatataactactaccctctcatatatatgtgatgttattaagtttataaagtgttttgatatgtttcttatttcatcttcatggctgctatttattcatagaaaaataattctcagtatctgtagcattattgttaatgtcaatcctatagaggctggaacaggctcagagaggctaagtaacttgcctaactaagtctccttgttgacaataggtcttaatgcagtgttttccgaatccctcgttcttacatcaaaacagaactgtggctgggtgtggtggctcatgcctgtaatcccagcaatttaggaggccaaggtgggaagatcacttgagcccaggaatttgagaccagcctgggcaacatagtgagtgagacctcaatctctgcc

SEQ ID NO: 246354 - DNA, 592 bp, Homo sapiens
ttggaaaactaatattttaaaaatagtcctcaggggcattaattcttggtaataaagttagtagaggtttattgagtagaagattaggatgtaatctttgacataagtggagtagtaactactcaactattagtgtggagttttcatggatttagtatcaatcaaatgttttaggggtccagaggtagtattgttaaggtctagtgaatgcttagatgttaagatcatctttatgttaagcagtttactggtttgtatttatcaaatcatatttccacatcccaatggaattacaatttttttaaatttataagctctaaatgtataggaaaacttggagaaaaatgaaaattttaattggaaattaaacacataggtcccggcactgctagaatgtgtaatatacagccttgttattctttccttcctagattctcttatgtggttaacgctgaatttctctgaaccatttagtaggttatctatttgttttcccgttgtacttcatttagtctattatacactagagaatttttgctgatccattttctggggctttctattcttggaggtggcattttgcctttgtatg

SEQ ID NO: 246355 - DNA, 465 bp, Homo sapiens
ctaacgtgggaagctggagataaaagtggcatcagcaggtttctctccgccctgctccttgctgtgtgtcccagtccattggacccaaaccagcaggatctgcaccacctggagcttggtaaaaaggcagatttctaccatctgaaactgggggtggggccagcagcctgcctctctgcggtgctgatgcacgcaggggtttggagagcccctgccctctctccaccctgtccgttcacacagccatgtgcattcattcccccacctgttgcactcggatctgggcactgtgccgtcggggtgcaccttgcccattctctcttttttttttgagactgagtcttgctctgtctcccaggctggagtgcaatggcacaatcttggctcactgcaacctctgcctcccgagttcaagtgattctcctgtctcagcctcctgtgtagctgggattacaggcacgtgcc

SEQ ID NO: 246356 - DNA, 360 bp, Homo sapiens
ttgcagtgaaccgaagtggtgccactgcactctggcctgggcgacagagcgagactccatctcaaaaaaaaaaaaaaaaagatatagaatattcccatcaccccagaaggttccctggcgtccctgagcagttgagcagtatccacctccccattggcagccatagatttgctttagctattcttgaacttcgtatcagtggaatcgtatagtataatgtgtacactcaagtctagcttctttcgctcagtattatgtttgtgaggatgggcatggtggctcacgcctgtaatcccagcactttgagaggcccaggtgggtggatcagtatcacctgaggtcaggagttcgagaccagct

SEQ ID NO: 246357 - DNA, 446 bp, Homo sapiens
cccaggaaggcctcaggcagaaggtgaagcaaaacaactgcttccaagagagactgggtgagacttgccaagtgacagcgtgtgaaacagagccagcaaaaggggatggcctcacgagtctatcagtttcccgtggattcctcatgggagggaccaagacttgggttttcttgttaacatgatccctttaggacacacagggcagtagggcctaggaattccacatgggccaacatgcatgtgtgtgcatacacacatgtacacacagccccccaagtgttgaaagactgggtgattagacaccaacataataatggttagttaccaccaagtagtgagatttgagtgatatgggtcttcttcaatataatctcatacttgccaagttttattcataatcaggaattatatgtatcatcagaaaataaatgttattttgtgtgtcc

SEQ ID NO: 246358 - DNA, 593 bp, Homo sapiens
tgttttttgagacagtctcactcacgctcagtcacccaggctggaatacagtggtgtgatctcagcccactgtaacctctgcctcccaggctcaagccattctcctgcctcaacctcccgggtagttgggattataggcacccaccaccacgcccagctaatttctgtatttttagcagagatggggtttcaccatgttggccaggctgatcttgaactctttacctcaggtaatccgcccgccttggcctcccaaagtgctgagattacaggcgtgagccaccgcacccggctcatctcagatttcttacatcacttaaaaaatgaatttatctatgctcctttttgtccctgtgtgccagatgcttaacctacagttaaaggcctactttagtaattctgatcctaatcggtccagtccagttaatcttcctgggcaaaggattcatttaagataagcttcactttacaaaagatagccccaaggctaggaagtccctgtctctagatgtgtaatcttaaaaaacatgctctgatgtcctgaattgacttcccttcctaaggatccttttgccttcatttctcaaatgtcc

SEQ ID NO: 246359 - DNA, 1073 bp, Homo sapiens
gttacttattagtgatccatcagtgggattaaaaaactggcattattatttggtgatattccatgaaatgtttacatgtgtatatatactttcctaatcaaaattcatatttgcctagtcactgaggcaaagaactagcccattatttaaggacataggattggagtcaggtgggcttaggttcaaatctctgctgtctaatattgagcaagtcacttgacctgttgctgtgcctaaatttccttgttacaggatgaagatcatattacctatctattacaggttgcaatgacttttgacactaactacctgcagttattgtcaactaaggaagctcacacaagctttgatgtccagagtgtttattggggcttcattacatagacatgactgattaaattgctggccctgtgattgagttcaatcttcatccctcttcccctccctggaggtcagactgacatcaggagggccaaaggcccaatactttaatcacatggttggtctttctggggtagccagtcccaactctgagtcatcttgttagcacagactatgtaggggttcaccacgagtcacctgagtagcacatactctcagggcacatcataaataacaagacactcctattacttgagaaagtacaagaatttagaagctacctcccaggaatgagggagagaggcccaccaaattctttattctacaacagtgttattacaaggcctatcacagggttacttcaggtggtccatgtggagcacagcataggatggcactcaataaatgttaacagttactacattacagttgcatagcacagagcttaagaaagaaaatattcagtgcagcaaaccaccatggcacatgtatacctatgtaacaaacctgcacgttcagcacatgtatcccagaacttaaagaaaaaaaaaaaacaaatattcaatgtgtttgccattagattctgcacatttttgaaagtgatctatttgttgtcatagcttcattttcattctgttcattttctgcataaataaatgagtaatctctacctcagatttaccagtgactac

SEQ ID NO: 246360 - DNA, 458 bp, Homo sapiens
gggtagaaaacataaatagcactagatgaaacatgcctttccttccagctaacactgatttaaaccatgccctcagtgacttacaaagataccaataatgggtcctgcagtttaggtgggcaccaacaaggccttgtcagaccagaaatggctgggaggtagggaaggaagacaggctagctcactagcagaggagagtagcaaggccctacgtcgaggaggaaatgtccatggaagaaaaccccaccaaacccgcaactggcgaaattccagtcccgtggaggtgcagttacctctgcatagttttttccctctttaaccagtaggagtagatctggatcacactgaggaaagggtttcattctagatctgtctttcaaatagtttcttattcaggataaatattcatgtatgctcagatactaataaaggaatgcttgttatcctggcttctccac

SEQ ID NO: 246361 - DNA, 621 bp, Homo sapiens
aaagcaaacaccccacctctttctcgtaggagcagtctgggcaccatgttttaggaaatgctgacctgtactcatagtggaactatagcagttattaatattatggtcagaatatcagggaatgagaagcctggagagataatgggaatgaatttagcttaatctctttaccatttggatcaggaaactggcccacagaggggcaggaactggcgtgaaatcatctggtgaattggtaacaatttgagagggtcttctgagatgcttcatgaaaccactctttttgcagcttcattctgtttaccttgtagttctaacgtgtcttaagccacattgtttcataggctatcttgtgaacacatttaaatgccatttgctggtgcctggttttatctgagcagcacctctcgtatttgcaagtctgttactccgttaagtggcactgattaccagaaaacatcctagtatgctgaaaaatacttgaaatgatcaactaatgaggacactaagtatgttttctcattagtaattatgcaggctctgaagctaatcccagtatctatacatacttgtattgctaaattaaaagcaactgtggtgcagagaacagaaacattttga

SEQ ID NO: 246362 - DNA, 690 bp, Homo sapiens
aaaactggaagagaagttgtcactagcatacctatcctaaaagaatggctaaagaaagttctctgaacagaaaggaagcaataaaaggaggaatcctgagaccccaggaaggaagaaagaacacagtaagcaaaaaaacctcctaaatctaataagtgagtttagtgaggtcacaggatacaagacaatatagatataagattaatatacaaaagtgagttgcatttctatgtactagcaacacgtggggaccaaaattaaaaacacagtgccattgacattagtattgtaacaatgaaatacttaggtattgtcttagtccgtttgctgctgctgtgacagaatgccacagactgggtaatttataaagtgagcatctggtcagggccttcctgctgcatcatgacatggcaggagacatcacatggcaagatagagcaaacctgctagctcagatccgtcttcctataaagtcaccagtcccatcatggaagccctaccctgatgaccatatctaatcccaattacgttccaaaggccttaccttcaggcaacatgaatctggggattcagtttccaatacatgaaatttaggggacatgttcaaacccctacagtggctgtaccattttacattccctccaacagtacacagaggttctgatttcttgatgttcttgccaacagttg

SEQ ID NO: 246363 - DNA, 532 bp, Homo sapiens
cggaagttgttttctctcaaaataactttaattgtgccaaactagtgaaagttttataaattttccagaacatttgatcatttcacattcaatgacatattcgtggtcattgcacaatgagttgagccctctgtgtactaactagcttggggaattggtaatggctaatgggttttggatcatttgacttttagatcaccggcttgaatttagagtttgctgtagtgatgatatattaccacttgataaaaatcaggtggtttctgtacaattcatatagctacattccatcttaaatttttattcttggaacttatttttcagtaaagtatattgtagcagagagtaagagtagaaatgaactaattcctttttttttttttttttgagctggagtcctgctctgttgcaggactgagggaggctgaggcaggagaatcacttgaacccgggaggcggaggttgcagtgagccaagatggcaccattgtactccagcctgggcgacgagcaaaactccgtctaaaaaaaaa

SEQ ID NO: 246364 - DNA, 770 bp, Homo sapiens
tctctgttggaagtgtaaaaggaagataagaagggctctgatgctggggttggggaggaaagagaggcaggtaagacagagcctagagagacgtttagggatcccagcacgcaaaatgaccatgcaggagggaagaggtagatttgcataaggagcccgtggctttctgggaaagaaggaattaaactcttccaacccaccttcctgttattcacagttaattagtggcagaatagggtttaacagaacttttcatttatttattttgtagagattcagtcttgctctgttgcccagactggagtgcagtagcacaatcatagctcactggagcctcaaactcctgggttcaaacgatcctcctgcctcagctttccaagtagctgtgcctacaggtgtgtaccaccacgcccaacctaacaggacttctgaagcaacagaagggaagccaggttcctgtgaggatcctagctttagcaaggaggggcagtttgtcaacagaggctgtgcaggagcaagttcaacagtgacaccttgtggaggcatgaagcaagagcagtgctagactctgctctgcccctacatctcttgggaactggtgggagcctcagactagccactttaacggctccgtgcctcagtttctcccgttgtaaattcggaatgacacacattcactcgcttcctctgtcatggagttcttctgatgacaacatttgccttaaggaagatgatggttgactcctataataattatttatggaaaggta

SEQ ID NO: 246365 - DNA, 491 bp, Homo sapiens
tggcaggcacctctaatcctagctacttgggaggctgaggcaggagaatcacttgaacctggagcacggaggttgtagtgagctgacattgcgccattgcactccaacctgggcaacaagaatggaactccgtctcaaaaaataaataaataaataaagttaacaggaaaacatttagtaattgtgtattctgtttccccctacaactactgtgagtaatctgcacttttatttctcttttggcccataagttttacattaatcctattttgctatttactgaataaagggaattgagaaaaaggcatttctcattccaagttagccctacaatgccaagtgtaaaaactcaggcctaagtgaagtttgaggtcaggataagccaggctaacagatctttctggattttactttgcatctcattcattcattcatttattcatttaactgatacttattgattactgaggatgtgccaggactgtactggg

SEQ ID NO: 246366 - DNA, 428 bp, Homo sapiens
gtaaaaaatgttattttcccactgccacttcaagtattttgtaccatggtcatctgttgttaagccacagacagcccactgctgtcaagcatttttttactgtttagtatgaatgggttcatgagtccgtgctggtatgtttggtaatatcctcagagttactgctcactcatttacctctccatgtagctgatttccttcagcacaagatgtctacacccatatcataaatgggaaagttgagggtggaggagcaacgtaaatgtccacggtcacactgctagttagaggcacagtgctagttcagtcacctggcaggctttcagatcccttcgccatctagttcaatgaaggtcgaagagggtgagaagagtttcagagttagtgggtactttgcattcttaggatttttaaattatagacctctt

SEQ ID NO: 246367 - DNA, 706 bp, Homo sapiens
attgactctttcaaagtctttcagtaggttaagtttgttttctgcagttttgattacaaatacttcatttttgttacaaagttaagctttagtttaattcttggtcatatcaaacattttaaattcattgagtctaaatcatgagttgattatattagatttgtgtaataaagcattaacaatcatgacagttaagatgattcttttatgtgttagttcattggggcagaagacagcataatacagatgcccagtgtaaagaagttagcagattcaaattatccagtggttcactcaactagaaactctaatttttaaagaatgatgtaaaatttgctgggcacttgtgtgtactcgcgtgcatatgttcttgtgttgttggtgtatattgttctgctttgttttgttgttcttcatatacattcaaataagagcttttctgacttggtagtagtaggtcaggataaagagctggggtgtgctatcccctacttgtgagttgtatataatttgttaggattcttttgtgtccacctttttttaagtttagatggctggctctgactgctataacaaggtatgtatcacagctatgtaatgtaagaatgcaaaatctactatagttgtactataaattcagcacctgttactgtataattaagatactgcatttgaagacaataaaaaagctaattcaaatacgtgt

SEQ ID NO: 246368 - DNA, 364 bp, Homo sapiens
ctacaatcttttatacacagggacaaaaccagaaatcagttggttaatgaaaataagaaataaagtaaatgcatatttaaaaaaaaaatttaaaggcaagcgttgcaggggaaagaaaaatacaagaaatgtatttctcatcagctctcagtgggttggtgtcctgaaaacacagtcacactgtcaaaactaatgcacacttacaaaagtctgctctttaaaactaatatcttaattcaggctgggcatggtggctcatgcctataatcccaacactttgggaggccaaggcaggaggaccagcctgggcaacaaagtgagaccccccatctctacaaaaaatttaaaaaactagccaggcatg

SEQ ID NO: 246369 - DNA, 705 bp, Homo sapiens
gctgcaagctcaagaaagttacagtctaagggatatgaacaaactttcagatcaattaagctttgaagttagctgtcatagctgaaggaaaagctgaagaagaaaattcgcaagttttgatctccaattaaatagacaagatactcaaacatcaacagcagcaaagtcttagcaaagaaggtaaatattttctgttcaagaaaagatttaaccttgaatggagaatgaaggcaggggttttttctttggcttagctgcttcctttccagcagcttgcctggcacatcgtggtcacaccttccctgcctcactcttcatcctttgggtctcagctttggaagattctggaaacctccgatcctcctgaggcaggtgcccctgctggaggatcctattaggagttttggaaacttactgcctggaatagaatcccaactttgcttgttcccagctgagtgaccctggagccagttatttaccctccctgggtctcagtgtcctcactcatgaaatgataataagattgatacgaaacataagtgtagctattatcatggcaccctgagtttaacctagcatcaccacctaccatccaggactgagtggatgaggctccaattaaatgagtaaatgatatgataagatggagctaatccatcaccaaaagggacaagaagcaagttgcttgccctactgaatgaagaa

SEQ ID NO: 246370 - DNA, 759 bp, Homo sapiens
gctgcaagctcaagaaagttacagtctaagggatatgaacaaactttcagatcaattaagctttgaagttagctgtcatagctgaaggaaaagctgaagaagaaaattcgcaagttttgatctccaattaaatagacaagatactcaaacatcaacagcagcaaagtcttagcaaagaaggtaaatattttctgttcaagaaaagatttaaccttgaatggagaatgaaggcaggggttttttctttggcttagctgcttcctttccagcagcttgcctggcacatcgtggtcacaccttccctgcctcactcttcatcctttgggtctcagctttggaagattctggaaacctccgatcctcctgaggcaggtgcccctgctggaggatcctattaggagttttggaaacttactgcctggaatagaatcccaactttgcttgttcccagctgagtgaccctggagccagttatttaccctccctgggtctcagtgtcctcactcatgaaatgataataagattgatacgaaaataaatgagttaatatgggtaaagcacttaacagagggcaagcacatggtaaaccataagtgtagctattatcatggcaccctgagtttaacctagcatcaccacctaccatccaggactgagtggatgaggctccaattaaatgagtaaatgatatgataagatggagctaatccatcaccaaaagggacaagaagcaagttgcttgccctactgaatgaagaa

SEQ ID NO: 246371 - DNA, 424 bp, Homo sapiens
ttatgctgaccactggagtccatggtggcaagtagagagctgctctaggttcttgaggtttggttttcattattaatttttagggtatgggcactgtgcaaagactccatagctgtgcctaggagtctaggaaaagtgacagaggcttggcttttttacctttagttcagccaagtcattttcaagtcctgagaaatgacatcatcttcaggataaaataatgaggacattagacaaaccaaactaagtgaattttagcctggtagcctctctaaggaaacagtaataataacttctgataagagttaaaagaacttgtagcatacctggatataatggggaaagggcctggggtgttacccatgtactgaaaatgaacttttaccaacatggctaaaaaattaaaactgactggcttctgtgt

SEQ ID NO: 246372 - DNA, 355 bp, Homo sapiens
tgattatgttcacctccaaggtcagtccttcgctgagcctccagattctgcccatttcttccccttcatcactgatgttgctgtgcattgaatctctcataatcaggatgatgagacatagcttggcaaactagttcattttcttaaggcagttaaaatttaattatcctgcttgcagagaggccatagatagttgagttgcatttgctgcctatgcctcatataaatttcgttttttcccctaaaatttagttttttttaaaaaagtccattccatgtgtcagggcacatggtctggagttgtcctggcacaagacagccccaggtgtctacctgcagacctgccagctgtccc

SEQ ID NO: 246373 - DNA, 373 bp, Homo sapiens
taaataaacccaaacatctatggtgaactgattattgacaagggggccaagatcattcaataaggaaagaacagtctcttcagtgaatgttcctggagcaactggataaccacatgcaaaagaacaaagttggaaaaaaaaaaaaaaagaacaaagttggaccctgcgatggttaacttcatgtgtcatcttgggtaggccacattacccagatatttggtaaaataccagtctgaatgttgctgtgaaggtatttttttttctttttataatgataaactggcaatttataattgcgcagatttatagcatgcaaagttgtgttataatctatgaatgcagtgtggaataattaaatcaagctggttaacat

SEQ ID NO: 246374 - DNA, 231 bp, Homo sapiens
ataattaagaaactttcattttttaggaaatggactagttttcatataatattgttagttattagcaatgaaatgaccaattttagcaagtagttgggaagaagttaaaatatttaaatctataaactacttccagcttgtagataaatctgttgcgtaatgtcttttatactgcttattaaacagattgtatgtgaaggaatttggattttgataactaggaaaaaaagt

SEQ ID NO: 246375 - DNA, 522 bp, Homo sapiens
agaggttagcttcaatatatctagagaatgtcttttatttactttttgtcttatttccatttgtagtaggctctctgctatgtgaagttttctttgttggtagcttcctagtgtttgttgttaaaacccaacaatgttgactgcacatcatgaatgttctttggttaaaatgtatccgtttttcacttgtacccatttttcattagtagtttactgtttaggaattcaaggcatcacatagttgcacacagaagcttttcttattttattaatagcatgtaactaatgtggatatcccagctctttagttgtatctcagaaccaggacaaaaaaagtcatcttagtttgcaaaaagatgcaccaccccatgcacactggacaacagctctgggtctctcttggagactgttgacatttcctttaggcattaatgtacttggacttgactggcacctttagcatgttagaaacaggttatttggtaaaggaaaaggctctgccagaggcaggtgaattgacgt

SEQ ID NO: 246376 - DNA, 400 bp, Homo sapiens
ccctctttactccataaactaactgtcacagggaaagatgagcctatttaactgcaggaaaatgctgaaatagtttaattgtcttccctcgatggcagacggttgttatcagagtggaggagggaatgcagaacccaatgaaatattaaatgcagacaaaaatgtgtgggtgaatgtgattgtgtagtttaatccatgtgcttttttttcaagtagtttctagtttcattgcaaagtgtggtataaaaatgatgtcagaggaatggtttgctgggttatttaaaagattgcatacaccacttacaaggtatgttgttgatggttaaaaatgacatatttattattcatgtggtccccctgacatagaagaagctgcttgaaaaatgaaatgtagatgaaa

SEQ ID NO: 246377 - DNA, 404 bp, Homo sapiens
aggggaaggtgaccaccagggcagcctgccttgtaaattaccctgaaaacaaaaacatacagcgcctcctcggcttgggacccccaccgataaattatggccaggctgtggagcagagcccaggagagactggttgctggagagttcctcccccaaaccccacgagcgatcaagaggcctctgggtccggaaaagggctgccggggtagctggcatcctgagtagatgggagcctagagcatcccaaagggtttccgctgtgttttcaggcaaagtccagagccagaccctcttgcctcacaaatttgccaggagatttcacccaggtcctctgtggcttcatacccacctcttcctgcacttttctgtttgccagcctccagccttagaccccatcagagaga

SEQ ID NO: 246378 - DNA, 401 bp, Homo sapiens
gcttctgggctgtgttgggagcgggcattgtcccctacccactcctgcacagtttcccaaagtccagccacctccgaccctccttgggggaaaaaataccagtacccagacacctctgcaccctgttatatgactgggcttgcttcaggaatatcttacaaagaagaagaaggaggaggaggaacggcttggagtcatgtttacatctagttctactgatccgttcacatctggagagattatttataactccctctataactctctgtttggaggcactggtggctctaactgacagactgatgtctaggaaatattgctctatgtctaatggtacctaaatgtgctgtggttgtatttacagatttacgtttgagggaaatataattatttccattgta

SEQ ID NO: 246379 - DNA, 440 bp, Homo sapiens
tatttgtttcaaactctacatacagatgacacaaatccttccctttttcccttttatatattaattttcaaagaattttcttctaatcatgcaatttggccaggaaatgtttaactcccatttgaatgtaaaagcatcaaagaatcctttgtagagcatttagtcaacaagttacatttggttgtcatctctgcaacttgaaaaatccaattaatttattcaacaaaatttaagtgagcctcttctagataccaggcatcgctctatgtgcaggagatacagcaggtagcaaaaggtctccatcatcctgagagatgggaaagaaagaatgaacagagaaagagaaatgaacttatactttgtcagctggtgatagctgccaagggcaaacacaatgcagggcaaggggacaggatgtgactgtgcgtgtgtgcgtgtgc

SEQ ID NO: 246380 - DNA, 415 bp, Homo sapiens
cagtttgatagacagtcttaggggtttacgatagcctgggtggtcagagaacatcagagaaggaggtaggatttatactgtttgaattgcaagaaagaaccagagattctcccgcctttcagaggggagaatattctaaggaaagcaaacagctacaacagaaggcctaaagtaggaatgaggttgatgtagacaatgaagtcaaaaaggccagtgtgactcaagaggagtatgggggagggagcattaagagtcaatattgaaaagtgagggacggacagaatatgttgggtgtaataatccaaagtaagaagcttgacttccaagtattaaagggagtcttttcacgattttactcaaaaggagtaacatgatttgatttatgttttgaaaaggtcgttttgtttgctatgta

SEQ ID NO: 246381 - DNA, 543 bp, Homo sapiens
cacatgctttggccccagacctactgcatccaaagtggagccttgggaatccgccttttactgagttttgcgaatagttgatcccccagtacataatgcctggattaaatgaaaacatttaagaaaaatgaggacagggaaaaggcatcatggtattccagacccaaagagaaagggagtttctatacccacagccccaggagctgtttacatttgactcagctcaagctcagaactggccgggaagggccttcagtcagtgggctgtgaacacatcttcccaagacaggaaggacttagcatgacattaaactcggaaatggtaaaggaaaatttctcatagtttcacctacaaaaaagcgaaaacttttgcatagaaaagacaacttggaaaaaaaaactaagtttggcaaatcaatgaaaacttagggaaaaatatttgcaacatgtattaccaatcaaggtttaatgtttataataaataaacaattctcacaaatccaagagagaatactgcaaaagacatgaataaacagtccacag

SEQ ID NO: 246382 - DNA, 479 bp, Homo sapiens
atacccagttcaattgcatctgcagatgaggatttaaaattctgtgcagcagacagtacctccagcaggcgagtaaaaggttactgcattatttttcttgtttgttaccatagcctttatctaccaaaggatttttaaaaaattgaatgtgaagtgcatgcctgtttttagatattctggaaattgatttaagtataacatgaatatcaaaagggcagtgcaaggtgaaggcagaggcagtgctggatctttttagctttaaaccagggaagaaattgagcatgttacatacacaaagaagaaacctttcagtgtcacagacaatgggaagttttaaaatacgtattttaattcaaggtgtttattatttagttttagactatcttccccaaaaagggtgctcttacattagcaatcattggtctatgaatgttcatttaagttacagtaatttgaagtatgattatttgtgaagacta

SEQ ID NO: 246383 - DNA, 228 bp, Homo sapiens
ggagatgcagtgagccaagattgcgccactacactgcactctagcctgggcgacagagtgagactccgtctcaaaagaaaaaaagaatgaacaattaaagttacttaataatatggatgtggaagtcacctgttggccatcatggagttgctggatgaaccatgaactgtgcttctacatggattcatttccactacccccactttttctgttgttgttggcgccagg

SEQ ID NO: 246384 - DNA, 312 bp, Homo sapiens
cagtatagagtgctggttagaagcaggctgtctgggtccaaatcctgcaacttaccagttgtgtgaccctggataacttggataacctcaaacgtcttgcacctcagtgtcctcatctgtaaaaagaagataataacagtatctattccatagagttgtagagattaaatgaactagcatgtgtaaagtacttattatagtgcctggcatggtaaattctatataactatttgctgtcactgtgtgaacatttttcccaaaaagaaattatgttgtgtgttatttttaaaagccttttgagacctaacacat

SEQ ID NO: 246385 - DNA, 260 bp, Homo sapiens
taaggaatacactgacacaattacatcccagcgtaatcaacgccgtggcagaagagagcgaggggctgcaggaacccagaagaaacaccaggccaagcccagtgttaccacctgcacattctcctccagctgctgtaaactccacaatggcagtggctcacacctgtagttccagcactttgcgaggccaaggtgcaaggatcgcttgagtttaggagttggagaccagcctgggcaacgtggcaaaacactgtctctac

SEQ ID NO: 246386 - DNA, 761 bp, Homo sapiens
agactgtgtagtatccctgtgttgggcaccattcttgcacatggtaggtgctttgtgaatatttgtcaggaaaaccaaaaagaatgaaacataagagaacaacaagaaaaagaatctttacctttaccctttctcttggaggaatatttgacttcttattcttgtgaattctgggagattaggaaaaaagcttctgaaatgaaggttatttcagaagtaatttttatgggagagcttccagaattcttagcctcagtaatgataatggctaacattttggagcagctaccatctgccaggcttggcagtgctaagtgcattgtcccttttaatcctcgcatgaactctttggaataggtactataggtgctgagcctggctcttcagaacaataagcatcctgacaaatgactggtcccttgaagacagtaccaggtcttattctttgcacttggccggagactagccagatgctgaggtgtgctcagtaaatggggatcatggctgagaggcccttgcaggaagctagaacctcacacacttcctctggttccagagcaggggtgtgtagaatctgtagggagacactggtgggtgttttcacaggagactgtagtgcccaagcagctttaaaagggctaagggaattttctgggatgctctacgcttatgtgggagctgactttgctttgggccaaaaatctgtgggtggtgttcagatctccttctatgttcttgtaaataaaaaacctttgaaatgc

SEQ ID NO: 246387 - DNA, 401 bp, Homo sapiens
  misc_feature (211)..(211): n is a, c, g, or t
accctcatcagcaacagcacgggcatccaggagctgttcaagcatctcagagcagttcacggacatgttccagcacaaggccttcctacactggtacatgggcaagggcatggacgagatggagttcaccgaggccgagagcaacatgaatgacctggtgtccgagtaccagcagtaccaggatgccacagccgaggaggagggcgagttngaggaggaggctgaggaggaggtggcctagagccttcagtcactggggaaagcagggaagcagtgtgaactctttattcactcccagcctgtcctgtggcctgtcccactgtgtgcacttgctgttttccctgtccacatccatgctgtacagacaccaccattaaagcattttcatagtgaaaaaaaaa

SEQ ID NO: 246388 - DNA, 840 bp, Homo sapiens
tgaggcctgtggcgcgagcacagcagcatcctgggtcttacgtcggcagaagtagaaagggaagaagcctaaaggaagtgaaagtgttgctggatctcctgctggcattgcctcctccttcacacagcatcccggttctccctgcagccacctgatcttccctttgtccccttcctcaccacagccccaccaccttcaccactccaagttgatgcttctcctacatctggccaagatgctactcagaggtggatgaaagcaaaagtcactgctctaatacaagaaaagtcccggttttaggtttcagaaacagaattttcccgaatgtttaaaatggtgaatggttccataaactgtgttaaccaggcttcttacaggctagtcccagaatctgaccaccatgtgcaatactgtttctaagaaaagtgtgctccaagcaagaaccttcaaacatttaacctgaatgaatgaatataacctcttcacggttcagtgttttcataagcaaaacaagagaatagcagcattgatgtcttttaaaaaaaatttagggctgggcgcggtggctcacgcctgtaatcccagcactttgggaggccaaggcaggcagatcactcctgaggtcaggagtttgagaccagtctggccaacaagatgaaaccctgtctctactaataatacaaaaaaattagctggaatgtggtggcacatgactgtaatcccagctactcaggaggctgaggcaggagaatcacttgaacccaggaagcagaggttgcagtgagccgagatcgagccactgcactccagcctgcgtgacaagagcaaaactccatctca

SEQ ID NO: 246389 - DNA, 349 bp, Homo sapiens
tgtccttagtcagccgctttacacctgcttggattagccactggatatgaagcttccccagaaagtggagagaactcagcaagggtgctctccatagctgaagcaaccctgggagggcctgagagccaagtctatcttccaacagtattcccagcaaatggtgaaacaagtcattcatcaaggagggatctaggtggctgatgcctgcatcaaccacagtctgcctctgttcagcttgaatccatttcttcatttgtagtctgagggtgtaagacaaatgcatgtgtctgtgtgttcaggattgtaggaggtggaggtctgtatgtttagggtagtgtgtctttgtgca

SEQ ID NO: 246390 - DNA, 382 bp, Homo sapiens
tcttttttattgaggagaaatttatataatatacagttaaccattttaaaacatacaattcagggatatttagtgtattcacaatgttgtgagcccaccagctccctctagttggttttgaaaattcatgattaattttttcttttctttctctctcctctttctaagattctgactatgcatatattaaatagtttgttttttgttctacagcttttgtttgttcttttcagtgtgtttcagtttgagtaatttctgtagctctagtaatttctatagatctatcttcaatttcacttattctttccttgactgtgtcagttctactgatgagactgttgtggacattcttcatctctgttactgtttttttttttttttt

SEQ ID NO: 246391 - DNA, 661 bp, Homo sapiens
tgaaaaattttacagttaaaggaacattagtgttgcatttgcaataactaggacaagagccagtcacatgctgatcttttaagtaatgagaatactaagtaaattaacaccataacatagatttaaagaaaaaaagccattagaactaaattaatataataacgtccagttacagcctctggttctgcttaaaatttatcagattctatttacacgtagggaaaaggacataaaatgaatcttagccttgaatatattcatacttaattaacgcatcctaaaaaaccattaacttaaacatcttaaagtgttctataatgttggctttatatgttttaaagtaagaaactttctgccagtggctttctttttttttttttttaaagagaaagcatcttgttctgttgcccaagctggaatgcaagagcagagtaacagctcactgcagccactgcagccttgatcccctcacttcagcctcctgagcagctacaatcacaagcacgggccaccaaggccggctaacttttatttcttgtagacatggggtcttgctatgttgcccaggctggtctcaaactcctgtcctcaagcaatctacctgattacaggcatgagccactgcaactagcccagtggcttaatttctgcttagaaaaat

SEQ ID NO: 246392 - DNA, 603 bp, Homo sapiens
aagtgtctctttggaaaagtatgtgtgggagggaagcatgttataagcaaagcaataaaggaaatgagtagggttttcctgtctttgactggtgtacagacctctaaagtcagagggattggtgttattctaagagtcttcagtcctctctttggcttactgaggtagttgtagcataatcaacagctcaggctttggatttaagcgcacagacctgggttcaaattccagtctttataagtgactgcaacattattcaagttacttaacatattcaagccccagcttcctcatttgtaaatatcataagtgtactacctgatagacttgtgaggattatacaaaatagcattgtaaaagtacctagtgcataacaggcattacctatatgtaagtttatgctaccattattattttgtcagatggaatatgtattatgtttttattgggttgagtgttctatcaatgtcaggtaggtcaagttggttgataacatcattcaagttttctgtctttactgactttttaaaaatcacctctctgtcaattactaagcgaggagtattgaaatctccaaatatcattgtgaatttggtttctcct

SEQ ID NO: 246393 - DNA, 245 bp, Homo sapiens
aatctcagtgctctcaggccttcctgcttctcatttccagggaagccgaaggggagtggtgctgtcagcaggctgccagagccaagggaacccaagctggagaagaatgagtttgaatccaccattcatgtgctatgtgacccaatgcaagttacacacctcctgtggcccatgttagggacataagcccctcatacttgaaggactctgagatgatctgggccgcttagctaaaggtatctgga

SEQ ID NO: 246394 - DNA, 390 bp, Homo sapiens
tcacagtcaggtacagtgcacttaccattcaataaaaagcatctctgaaacggggaagtggttaaggaatggactaaattctgtatggttgaaaatatggacagttactgctgtagtcctctcctcactgttttggggaccccatgggccagcttggggatatgaaaaagtggtggggttctgggagctcaacagacctgggctcaaatcccaggtgctaccttcatatttctaagcttcaaagtttcagtttcaactttataaaaaaggaggtaccatttgtccaatgatgctctttttttttttttgagacagagtcttgctctgtcacccaggctggagtgcagtggcgtgatctcggctcactgcaagctctgcctcccgggttca

SEQ ID NO: 246395 - DNA, 282 bp, Homo sapiens
tattcaaattttttgcccatttttaaattgggttatttgccttttattgttgagttgcaaagagttatttatatattctggatactaccttcattagatatatgattgcacaggttttgtctcattctgtgtgaactgtctttttactttcttgatggtgtcctttaatgcacaaaaatttttaaatctgaagttcaatttatctatgtcttcttttgttgcttgtaattttgtcatcatatttttaaaaccattgcccaatacaaggtcatgaagattcat

SEQ ID NO: 246396 - DNA, 604 bp, Homo sapiens
ttttaaaatgattccctctggcaatattgtttaagttgaagacaagtatgattaaatacagggacagaggttaaaaggctatttcaacagagtaactgcactactgaaaagacaagtggaaatatattaaaattactcaggagacacaatctacagggcttgattgattgtataagaaaaatgtgggaggattaggtgttaaggatatttccaaatctttggcttaaaaaaaaccagctggataatggaaccattcacagagataatgaacacaggaggacgaacaaaacaaattggggtgtgggttggaaggtgcaccaaggtaggggagttgactgagtatagaacactttattttacttatattatttttgagacgaagtcttgctctgtcgcccaggatggagtgcagcgagacaatcttggctcactgcaacctctgcctcctaggttcaagcaattatcctgcctcaacctcccgagtagctgagatcataggcacccaccaccacacctggctaattttttgtatttttagtagaaacaggtttcatcatgttggccaggctggcctagaactcctgacctcaagcaatccacccgc

SEQ ID NO: 246397 - DNA, 349 bp, Homo sapiens
atgtcaatgagaatcagactggtcaatcgcaaaacttacagaaaatagccatgcaaaatcctcattaagaaggaaaaatataacaacccaaaaacttcacactggatccttattactttatctattctcactacagtccagtgtaaaccttctgctcaacctcatattttgacttcgattcttgcttgctttaatatttctattttccccacattcctttgtactcatctatacacattttctgtcatttagtattaatctaaagctactatatttccctgaaggcttccaaaaattacaatctgtattgcactttgtcgattatatattgtgttatttttttcttctg

SEQ ID NO: 246398 - DNA, 4275 bp, Homo sapiens
  misc_feature (964)..(964): n is a, c, g, or t
tttaaatctaagggatattttcccttcctatagaaaaagatgcttttgcttggcctaatgaccatactgggcagagatcagggtgaaatccagagacttcagcccatgttactagtttcagctacaggtgagaagtagcactgcaaagaaaagctaaactggtaaccttgctgtgtagcagagatctttggtcataggagtattcctgcatgggccataaggttgtggtttgaggtggaaactccctgaaacatcagctggaaagtcgcctttagaataaagacaaagaaccttctgcaagccagccaaggcaataccaggacttggaggtggcaagtttgataaactaatctgtaggaaaaagttcctatcttagtgcttacacagttcttttttctttttttggtatagacggggtcttgctacattaattctttgactggggctgggtcttcttttgcacagggcagcttgagactacaatcaccatggcttcctctcaaaaccaagtcagggattaggctgtaagaataacaatacaagtactaaagactgaaattttattaaagccaaagattgagaactggtttccggacagcttctagccatgcattcataggctgtgagcaggagtcctgtagaataacaggagacctctggggtccaagctctgagcttctgggcacattttaaatgggtctcactttattgcccagtctggaatgcagtcacatgatcacagctcactacagcctggaacccttggactcaagcagttccaacctcagcctcctgagtagttgggactacaggcacgtgccacctcagctaattttatttatttatcttttagagacagggtctcgtatgttgaccaggctagactcaaattgctgggctcaagcaatcctcgtgcctcagcctcctgagtagctaggattacaggcatgggccaccactcccngcttaaatagcagttctgttttttgttgaaaaagtagaaaatcatcataaaacataatttggtgaatacaaaaagaaggaatctgagtcacagtcttaccacctgagatgttgaaaacagctggtttaaggggaattgggttctgtagtgagctggggcccaaaattcacagccagagtgataaggaatgtagccactttgtaggacaaaactccaggacagggcgtggtggctcacgcctataatccctgcactttgggaggatgaggctggtggattacctgaggtcaggagtttgagaccagcctggccaacacgatgaaaccccatctctactaaaaaaaacaaaaaattagctgggcgtggtggcacctgcctgtaattccagctactcaggaggctgaggcaggagaatcgcttgaaaccaggaggcagaggttgcagtgagccaagatcgcaccactgaactccagcctgggcaccaagagcaaaactcccatctcaaaaaaacaaaaacaaactccaggataagcctcctgccacatagcaagtgctggagcaaaggccatgcccacaatgaaaggcacatacccacaggctgcacaagctccagacctcctagatccagtgatacaggggtgacaaggcacctagtattgaggtgcggttgcatgggggcagggtgcagtggtgacatgagctctggccaaggtttgccacctggtaaccctttcccctggaggttttgctacttccccctacagaacaacctgacattttggttggtgctgcattgttcagtgcctgccaccactcatcagtcaacgacatttacctagtatctaatgggtgccagattgcatgttgggctgggcaccacaaactgaaaaggtccacttctgcagcacttttgcagggatggagcctggttgcgtggaatgattgtgggcacctgttttgtgtaaatcttagttgaaaagctttcctatcttccgtccttgggcttagagggaaactagggcaggaatgaagcagagagagcctactaagtgccaggtactcatagacattcatttttccactgaatcctccaataaagtttgaagtaagaatcatccccactttgcaaatgcctacactgaggtaaagtaacactcaatttgaaggaatatctaccagctcacacctactagggacaattcaacattcttactatgagagtgtcagagggaatggaaaatgcagccctagaaggatgagattttggtgccaactttcatagcaaaacaagaactttagtcactaggcccccacagctcaaggttgacctctttactgttcattgcctctctgtcatattaggtgaggaccaagacctgtctcagacccctaacagcaacattctccaaggcaaatgaggctgaagggggccacattcaaggatactttgggttcattggttcattagtctatgaggctgggaaagaaaggacttcggttaggaccactggtttatattctaaagaggcatccctgtttgacacaacatcaaggaaaaaagctctcactctagtgtaggtaagaataggggctaaatagtgtcaatgtcactcaattttttttcctctccccatccttctttttggagacaaggtctcactcagttgtcaggctggaagtacagcggctcggtcatggctcactgcaacctcaacctcctgtcctcaagcaatcctcccacctcagcctcccaagtagctggaactacatacaggtgtgcaccaccatgcctatttttttttaattgttttgtagagatggggtcttactatgttacctaggctggtcttgaactcctagcaagtgatcttcctacctcccaaagtgctgggattacaggcatggagcccctgcacccagcctcaatttttattttctgttctttgatttccaagaaatctgttcagatgatagtctttttaccccacctcctcatttggttcagtgtgtgttgatgagcagggcttcagacccacatccatcactgataggaccacatgcagaggactctgaccctactgcagtcattatgaaaaccttccaaaccaaaataagaagggtagccaacaccaccaccacctagccccaggagtcctaactttagaaaaggcagagtgagctgtgcgcagcatgcatctgtaatcccagccactccggaggctgagatgggaagatggcttgaggccagaaggtcaaggctgtagtgtactgtgactgtacctgtgaacagccactgtactctagcctgggcaacataccaagatcttgtctctaaatttaaaagaaagggaaaaaaaaaaaagaataggcagagtgaactttggggaagaaacaatcttgcctggcttgcttttcattacatatgtatatatatgtatgtatatacatacacatacacacacacacacgcagatacacatacccaatgacagtagagattttttttaagggtgcactctttgttgaatgaagtttccatatgaccaaaagtcttcaataagttctaaaactcttgcctctgaagatctgtgtttactcttaattcctacagaaaggtatccctaaactagttaagaacgatagccataactagatgttatagggcacacaggtctcagataccagaagctgacagtctccttccagacataaagggatacccagcagagattctttagagctggagagctgggaaacaccaaattatctgacatttagggtaacacaattctcattttttatatgggacagtatgtattttactacaaactacaaagactcagaggatggacagtgacagttaatatgattcctctcattgcccataggtaggccaccgatccaaatggatcctgagttcagacagaatccttacctcctgataaggttgagtgaggattattaggtgagccacagactaaggaatgtttcagaaagcagttttctaggtgtagtttggatttacaaaaaaaaaaaaaaaaaagttctccaggccaggcgtggtggctcctcaagtctagaagacccaagcctcaggcttcctccagaaaagcagtctgggagacagaatttacaaatcaactggctgaccggacgaagccccggaatcctgtgtcaattcgttttaaactaaggccagatgctttttggtaggctgcctcttcccgtgagctggtgggtacttcaagtctatgatttgattctcatttcttaaaaaaggatgagtatgtgtggtagttgggtatggtata

SEQ ID NO: 246399 - DNA, 621 bp, Homo sapiens
acattcaacaaataaagggctgatagagaattctgggaagtctgtaaagacagctgctgcttccaaacatgtgactccatttcactttagtgaaggcaacatcacagtgggaataaggcatacgtgtttaggcttggggaacagaagaagcaaaacttgaaatgaagaaagcaaagccctcagcaccttggtaaccggagtccctgcccagtcagcacactgcgttcccaaccagagctgggtgtcaggcttgggcaccaggcagatgcccatgcccgtaggtctccagcaatctttggctagtatgtcactctgactgccagtgggtacaacctgttccctctccccaagctgctaggacctgtcaccttatatgtgcctttgcaaacatgaggaatggccccttccagaattttttaccttacctgggatcccgccactgcctcctgccctccccacagcactgtcttcataccccgaagccaaggatcactggaccagagagacatctgactcagggttaaacagtcaaaggctgggaatgctcaattagatgttcttgaagctcttacgaacaaaatgattaggtcggtcaaatggtctagtgcaggctgaagtcac

SEQ ID NO: 246400 - DNA, 368 bp, Homo sapiens
gtaccataccattttcattattggggcttttaattaatgtgtttaatacctgataagggtagttgattcttagtattctttttcataattttcctgggtattcttacctgtgtattttttctgcatgatgctcacaatcagcctgtctaaaactataggaaaatgactctttgtaatgtcattggaataacagtttagattcagagagaacatgtgcagattacatgagtatattgcattaatgctggggtctaggcttctattgaacccaccgcccaaacagtgaacatggtacccaattggtagtttttcagaccttcccccttccctccctcctctctttcagagtctctagtttctgttgtttc

SEQ ID NO: 246401 - DNA, 1022 bp, Homo sapiens
gagaaacatacactcttctaatatttttgttttcttatttcagagactaatatatgtaatcgtttctatttttgagtttacagagagatatctccagttcctcttaccatcttgctttatgtaacatttaaagaaagacagcgttcaggaatttgaaaaccccatttcctctttaatgaagtggctgagatgggaagattcatgatgtgactaatttgaatggttaggactgtggtccagtagccataaataggggtctcaggttggtctgatacatagtaactcttacccagaaaataagtctctgcttcttctctttaaatgaagttgcttaattggttgccttgacacaggcttattacatcttacatcattaagccttcgctgtaacaatatttttgaagcacagacaaaagatgaatttgagtagctattattttcctggcaccacagatgcagagagagatgagactgtccctgctttgagagaacccgtagtttatttcaccttcttaaaagcctgctgttttagagttttttggatgcaaggaacagaaatcagctctagctagcttaaataaaggatttgttataaggctatagggaaatctcacataatttatttgaagaaagtacagatgggcctcacaggaattggcaaggtgtcaaagagccactattcaccatcttgatcccctctaattatctgagactagttagagagatggtggtggggtgggtgttcatggtttgtagagtggcgtttctcagatgtaaagcaagagaaagacacgtttaattctcctgaaaacaattacctttttccaggaatgttcaaaggtacttgggagggcttccaaaactaaataattgatatatcacactgatgattcaatttttaattaaaaaattgccacacacacatgatgaggaatgctaaaaaaccaagatatttttggttttaacttaaaaataatgtaaaatttactgaaaatttacttgaatagtacaaataactctct

SEQ ID NO: 246402 - DNA, 543 bp, Homo sapiens
tttctctagcttactttatttaagaatatagtatatcacacatgtaacatacaaaatatgtgttaatcaaccttttgtcatgggcaaggcttctggtcaacagtgagatattagtagttacgtttttgaagagtcaaaatttatacatggatgtttgactgcatgtggggttggtgccccaacccgcaagttgttcaacagtcaaccatataattgccatgttgtatgatagtcttctgaacttattcctcctgtctaacttaaatttcgtgtccttaagccaacatctcccccaaaccctcaacctcagcctcagtagccactattctactctttgtttctatgagctcagctttttagattctacatataagtgagatcatgcggaacttgcctttctgtgcttggcctatttcacttatcataatgtcttccagggtcacttatgttgtcccaaacgacagaatttgcttcttttttgaggttgaatagtattccattgtgtatatataccacattattcatctgctgatggacacttag

SEQ ID NO: 246403 - DNA, 618 bp, Homo sapiens
ccgtttagagggtaaagcgtgatttatagggggaacgaatcgatccagaggcaggcactgtcttgggagtgatccttcccagactggccaatcaggtatttctcctcctccccagagaagaataaaagagagagggagaggggccagggaagtcccttgtgctgtcccccagagagtggaagcccctccctctatggaaaccagaggagtgggagatgggattattctcccctaaatgtttcctctatagcccttaacagagtgtgcagttcggtgctttgagtaatcatttgattcgcacctgacgtcccccctggaatgtacaccattgaccggccacatgccacctggcatataacaggcattcatggtcacctggtggaaggaagggagggaggcctgggaatattcctttcctcctgtggcaactggtttggaaggaagggagggaggaacgctgagtatatactttcctcctgtggtgtatggattggaaaggaaggagggagggagggaggccaggaatactattttccccccatggcttatagatttggctgtgtgtcagcattacccaggggctcattaaaaacaacattcttagccccatcccagaga

SEQ ID NO: 246404 - DNA, 332 bp, Homo sapiens
ttctgcaggtagaggctgccatcagctgccatggagacccggtagtggcagaccttggcctgggcccggactaggaagggttcagagatggagacccctgccttggctgccagctgccccgaccctcccaccccagaggatgctggccacaacccactaaggggtctggctcagacctagctggggaccctgagatggtcagagctgtgtggaggagggagtgtgggcagccacaggctggggcggggcagcgagagcggcccaggttggagcttttctgctgacggtgtgcacagagtaggcacttaataaatacttgtagaatgaatgag

SEQ ID NO: 246405 - DNA, 830 bp, Homo sapiens
taggcctggaatgcagtggtgcaatctctgctcactgcaaactccacctcccaggttcaagcgattcttctgcctcagcctccctagtagctgggactacaacaacaacagcaattctaaagtctcttcagtaggacttgaccttgataacctctctggaagatttatctctgtgcatcacatttaaaaacatatgtatgtactctcttagaaactgtatcgattagggttggattcccttgtgatcattttactgtttcaaagatctagctgatgtgtcttttcagaataaagtttttaatatttattttgaaaaactttgtcttcatggcccagttgttgtcatgtgctcagttatacatgttatatatgctaaaggagaatgttgtttggcctcattccttttttttctttgctgtaaagtgggaatgtcttcctgaattgtatgttattcccccgtgagaaaatggaggccgaagatagtccctagcttgaagatgataaaacttttccaggctgtgtacttaaggggattcatttattcttaacgcttctataagtttgcctttaaatatattcaattctgtcttgatttctgaattttgaagtgctgtgtttgtttttaacaagatacatgtattcagcttttaataactgtgtttctggaggaacttgaaacaacagccatctgtatgcatgcctgcatgtgtcttttgcttgtaaagataccttccttgcttcttcagagtgaagctgggtttttctatttaaaaattaaatttggcatgttaaaatagcaaataaagctctgttatctggcatacttggaa

SEQ ID NO: 246406 - DNA, 702 bp, Homo sapiens
aacagaacatgaaataacacatctggcaaagttaaattatacgaattaatgttacttttaaaaaactttaaatgctgcactataatttggccatttgtccagttatagctatgttttgctcaccgtttaaaacttttataaacaattcaaaatgtttcttttactgtaggtttgtactgcaattaagaaaattacaaattgcaatatctggaatggaagtatattaatggctttcattctgttttccagttggatgtgtgttagccatttgatgacctcttttattcataattaacagatttcagactggtgtacagggtaactgtataacagttagttttaagtacctgaactttagtagatgctttatggtttgtacttaataaagcatattaagaaaaatgcatcaaattagattgtcagaaataacatttttcttccaaggccgttgtgcttcagttcttaatgatacatcaagttttaaaaaaattatgcctaatgaattcgtttatcttttaaagtaatttttatattataatgaatatcacttaaggatttacattattttgaacttttttttttttttattctcactccagtgtttaatgcatcaggcaatgtctgttaaagattacatcctcagggtgactacctttggattagactcctggtcctccaccactttcaccctcatgatatgtc

SEQ ID NO: 246407 - DNA, 194 bp, Homo sapiens
agtagagacggggtttcactgtgttggccaggctggtcttgaactcctgacctcgtgatccacccgcctcgccctcccaaaatgctgggattacaggtgtgagccaccgcgcctggcctaaacttttaaaattttaatcaaattaatacatgcacatggcaaagaagtaataaacagcttataacactgagcag

SEQ ID NO: 246408 - DNA, 453 bp, Homo sapiens
cacaaaacctgcacacaggcagcaaaaacaagccacatgcacgtgaagccacctagcacagttctataaactggctataaacccctttctttctcatcttatttctcactaaatacagtgctttcttccagccgaatccagtggttctgcgtgcccaggagtgtgcgttttgtgctctctttggccctcaccatcccccgacctcctgaaccaccacctctggcccgcacaatggtagcaaacaaaatgtgtgcacagcatgttgaatgtttccgacacaaagagatgatacatgtttgagatgatggatacgcttattcccctgatctgatcactatccattagaagcatcagtttgtaccccataaataggtacaactgattatgtgtcaaaagtgtaaaaaataaggcctaagcaaatataaaaaatcaattaaagttattgataatgaa

SEQ ID NO: 246409 - DNA, 332 bp, Homo sapiens
tattctttcactctgcagctcttaatccttccattttattcttatactgagagataattagtgttctagcaggcatataacataattttccacctccagacagttctgatttattgggagtggttttgttgtatgctgtgttaagcaaacaatggttgagtgggaaggtatgttaatatttattgccaaagtttgccaatactatccagtgcccagtgacacaatgacagcattcaaaatacatgtttccattcttaccctagaatctagtcacattacagttctgccttaaggaggtggaatagcataatggttaggatttggagccaggc

SEQ ID NO: 246410 - DNA, 200 bp, Homo sapiens
aggttctaaatgtagacactaacttgcgccccttccacatcctgtgttcaacgttcattcttattttgtctgtacatgatctaaagtgtaaactggaccactaacatctactttgaatgacgttgtttcaaaagtaggcaaggttctgaaaaatcttgtctgattaaaataaaaatgaataagaggacttgatgtgcaat

SEQ ID NO: 246411 - DNA, 405 bp, Homo sapiens
tcacggctctgtgaagtgtgttcagtgaagtgtaacattaaagaacaaaacgatccactgaacttctccagtcagtgtgggagcttaattttccattcaagctttcattcaccaagataaaccacatttgatgataccttgatagctggctagaaactcattaatggcatacatcttttactgtaatggatctatttcatcctctcataaagataacatgccatattatacagacaaagctaaaagacagcgcaaaatctagggatccaagataaattaataggtaaaggtaggcttaagggaagcattgaatagtattttgcactacccctggtgggataagaccatgcccagaattatctttggagatttaaaaacgcatctttgcaccttttaaagtgctcc

SEQ ID NO: 246412 - DNA, 421 bp, Homo sapiens
ataatgcccaatgcaatgtaaatgctatgaaaatgatttttgtgttgtattgtttagggaataatgacaagaaaaaagcctatacatgtttagttgaaatgaaaccatccactatttttctgaatatttttgatccacacttggttgaatccgtggatgtggaacccgcagatacagaaggctgactgcattttgttatagcagccctagcaaacataattaatgactttaatccagatggtaaatgcagaagagaaataagtttctgaggaacattaatgaattcagtattgggtctactgtttgaggtttctattcatgtcttataggcaaatagacatgagggtcaggtgatcaagagagagttatggactgaaggcatagatttgacagccatcaatatattgatggtaatgcaaaa

SEQ ID NO: 246413 - DNA, 375 bp, Homo sapiens
cagtgataagtccttccctatcagtaattattttaaatgtaagtggattaaacccatcaatcaaaagataccgagtggctgaatggataaaaaacaaaaacaaaaacaagatccaacgtatatcttgtcttcaagagactcactttagatgttaggacacatataggctgaaagtcagaccatagagaaagataattccacgtaaatggtaaccaaaaaagaacaggagtaggggaagatgaagtagagtttttgtatatgattgacattatcatcttaaaataggttgttacaactatttttatgatttttatgcaatttcctacggtaactacaaagaaaataccaacaacaaaaagaaaataatgtcattac

SEQ ID NO: 246414 - DNA, 323 bp, Homo sapiens
aaaataaacatacaatagagaggatcagcaaagccaaaagttagttccttggaaaagttgatagaacaaataaagccttggcagaattgatccagaaaaggagaaagaaggcccattaatcaataagaagaatgaaaaaaggaatgccccacaagtgttaccatggcaaaactggaagagtctacaatgttacccagcatgctgttggcattgttgtaaacaaacaagttaagggcaagattcttgccaagagaattaatgtgcgtattgagcacattaagcactctaagagccgagatagcttcctgaaacgtgtgaaggaa

SEQ ID NO: 246415 - DNA, 561 bp, Homo sapiens
tctggccacacatttccttgcttgtcaaatgtgtccagcaggctgcacctcggggcattcacatgcctttccctctgcctggaatgctcttctcctaggtagccacgtggctcactccccggcctcagtggggaaggagctttgattgcccattcatctgagaggcctcccctgcatcccactccccaaatcaccctccctgggactcccgttctccacagcacctctcagctccttcatgtctgtccgcctgccacacatggagtttgtctttgttccctgccagaggctctccaagaatattcctggaagaattgaatgttgccaattcagctgcccccctgcctggagtcctctgctgcctgacagtccacgaatcccctcccgtcggccttggctgccaccagcctcccccaccagcccatgcaggccactcctagccagagcgagggccttctctgcactctgcctggaatcgcccacgtggctggctcttccttctgtggtggtgcctcctagagagggctgccgggcacctggctaggggagacatttcctggg

SEQ ID NO: 246416 - DNA, 749 bp, Homo sapiens
gggggcggggcacccggaagcgcgcgtggacctggcgcaccgagccgggcgggcggaggggcggttgggacggcgcggggaggcgggcgcgccgcccgggccgcggcgggctgtggtcacaggtgggcggctgcggcgagggagcggccgagcggagcccgggtcccggagactcctgccgtcacgcccggggctccgcgtagcagagatcgggagacgcgtctgtgcctccggggaagccgacccatctcccctccgcctctttggctgcagttgcacctccggccagagggcaggtgcaaatcatgacacagaagggcagtatgaagcctgtgaagaaaaagaaaaccgaagaacctgaattggagcccctgtgctgctgcgagtacatagatcggaatggggaaaagaaccacgtggctacttgtttgtgtgattgtcaagatctggatgaagggtgtgatcgatggattacatgtaaatctttacagccagagacttgtgaaagaatcatggatacaatttctgatcgcctccgaattccttggcttaggggagccaaaaaagtgaacatcagcatcatccctccgcttgtcctgctgcctgtcttccttcatgtggcttcctggcatttcctcctgggggtggtggttttgacctcccttcctgtgctggcactgtggtactactacctcactcacagaaggaaagaacagaccctgtttttcctgagccttggactgttctct

SEQ ID NO: 246417 - DNA, 747 bp, Homo sapiens
cgtggtcggctgtcgccataggaacggctggtgcccagacggcgcctgcccaggctgggaaggggcggtgaaggcagctcagacctccaagaaccctggagccccctgtgtggccaggcggagccacagaagcctgatgaaaacgggaccccctccccctctctcttctcatttttgattgctcaggcgttggaggttaagcagagagagagaggcgtggacctatttacgagatgtaagttgtgttctttccacctttaccttctgagggcttcttacgcctcatggtgacaggtgcaaatcatgacacagaagggcagtatgaagcctgtgaagaaaaagaaaaccgaagaacctgaattggagcccctgtgctgctgcgagtacatagatcggaatggggaaaagaaccacgtggctacttgtttgtgtgattgtcaagatctggatgaagggtgtgatcgatggattacatgtaaatctttacagccagagacttgtgaaagaatcatggatacaatttctgatcgcctccgaattccttggcttaggggagccaaaaaagtgaacatcagcatcatccctccgcttgtcctgctgcctgtcttccttcatgtggcttcctggcatttcctcctgggggtggtggttttgacctcccttcctgtgctggcactgtggtactactacctcactcacagaaggaaagaacagaccctgtttttcctgagccttggactgttctct

SEQ ID NO: 246418 - DNA, 602 bp, Homo sapiens
tcataactagattgtgatttgttttgagattcttatgaccgtacaggtcataagatgtaaacattacttgcagcatgtgtctgtacctatgtatttgtttaggggagaaataatcttgactttaagtttttaaacatcttgttcctattttaaaaaatgacatgtgaatctgaaaagcttaatttagtagtaaggaagtaaaatgcttggtctttggtagcttttatcgtttatcccactgtttggcattcagtgttctgtagcttttaattcaacaaacccacatgaagtccctcctctttgtgctttttctgaatagatggattacatgtaaatctttacagccagagacttgtgaaagaatcatggatacaatttctgatcgcctccgaattccttggcttaggggagccaaaaaagtgaacatcagcatcatccctccgcttgtcctgctgcctgtcttccttcatgtggcttcctggcatttcctcctgggggtggtggttttgacctcccttcctgtgctggcactgtggtactactacctcactcacagaaggaaagaacagaccctgtttttcctgagccttggactgttctct

SEQ ID NO: 246419 - DNA, 798 bp, Homo sapiens
gggggcggggcacccggaagcgcgcgtggacctggcgcaccgagccgggcgggcggaggggcggttgggacggcgcggggaggcgggcgcgccgcccgggccgcggcgggctgtggtcacaggtgggcggctgcggcgagggagcggccgagcggagcccgggtcccggagactcctgccgtcacgcccggggctccgcgtagcagagatcgggagacgcgtctgtgcctccggggaagccgacccatctcccctccgcctctttggctgcagttgcacctccggccagagggcaggtgcaaatcatgacacagaagggcagtatgaagcctgtgaagaaaaagaaaaccgaagaacctgaattggagcccctgtgctgctgcgagtacatagatcggaatggggaaaagaaccacgtggctacttgtttgtgtgattgtcaagatctggatgaagggtgtgatcggtaagaacagagcatttcttgacgctggccccatcacccttctgagaactgccatgtgtactttcaacctagccacccagaatgctagaatttgctcttgattctatttccaagcatctaaaatgagagttggcttctgtgtcaagtgtgaggattttagaaagatggattacgcagtagtgcacagctgtctgtctgctctgttttataggatattatttttcgtttaaagagagatgagggagagaacaggcagtttaaagggatagtaggcaagttagtataaaataaaatgcaagccagcagaatctgtaagtttaaaatgaacacaa

SEQ ID NO: 246420 - DNA, 501 bp, Homo sapiens
gatccattattatcaggcataattaaaggggaaacagttgtggatgctgagactgactccaagtcttctaaatgagtgtggatggtgtcttctgaagtctttgacaccgtaatgacttcaggaatttggtcaaagatcaaggtgctctcatcagatccaactcataatgagagacgccagttgtactctggagcacttcttccttaatttctgatatgtctagctttccaagaggtcctgaagcagaaggtgcattcacatggagaagttttggctctggaaaactaccagtattccttcaactttattattgaggaagccaacataaatcaacacgattcttttcccacaaaagttcctttccaacctttgcagctgtctgcccacagatgtttcacatcactgtacttatggcatttttgtcctatgggccatcttctctgcttctgttgcgagacatgagacagattttcctaataaaacttaaaacccccaaaaaca

SEQ ID NO: 246421 - DNA, 614 bp, Homo sapiens
gtttgcctgttgagtggtagcctttcccctcaaccagcaatggaggagcagccccagatgcaagacgccgacgagcccgcggactccggaggggaaggccgggcaggcgggccaccgcaggtcgccggcgcccaggcggcgtgcagcgaggaccgcatgaccctgctcctcaggctgagagcacagacaaaacaacaactcttagaatataaatcaatggttgatgcaagtgaagaaaaaactccagaacaaattatgcaagaaaagcaaatcgaagctaaaattgaagacctggaaaatgaaattgaagaggtaaaagttgcttttgagataaaaaagcttgcattagacaggatgagactttcaactgcactccagcctgggtgacagaacaagactgtctcaaaaaaaaaaaaaagtttgagggaatgggttccttctcttctgcccttctgccatgtgagcacacagtgttaaacccctcggatgaagcagtgttcaaagcaccatcttggaagaaaagactgagccctcacaaaacaccgaaactgctggtactttgatcttagacttttgagcctcctgaacatgagaaataaatttctaaggtaata

SEQ ID NO: 246422 - DNA, 916 bp, Homo sapiens
  misc_feature (594)..(594): n is a, c, g, or t
  misc_feature (599)..(599): n is a, c, g, or t
gtttgcctgttgagtggtagcctttcccctcaaccagcaatggaggagcagccccagatgcaagacgccgacgagcccgcggactccggaggggaaggccgggcaggcgggccaccgcaggtcgccggcgcccaggcggcgtgcagcgaggaccgcatgaccctgctcctcaggctgagagcacagacaaaacaacaactcttagaatataaatcaatggttgatgcaagtgaagaaaaaactccagaacaaattatgcaagaaaagcaaatcgaagctaaaattgaagacctggaaaatgaaattgaagaggtaaaagttgcttttgagataaaaaagcttgcattagacaggatgagactttcaactgcacttaaaaaaaacctggagaaaattagcagacagtctagtgtgctcatggataacatgaaacacctattagagctaaataaattaataatgaaatcacagcaggaatcttgggatttagaggaaaaactgcttgatattagaaagaagagattaattaaaacaagcttcagaaagtaagcttttagaaatacagactgaaaagaacaaacagaagattgattnggacngtatggaaaactcagagaggataaagatcatacgacaaaacctacagatggagataaaaattactactgttattcaacatgtgttccagaaccttattttcggggaagtaaagtcaattgggcagaggatcctgcccttaaggaacatggttctgcaagcttgagaagaatgttgacatgatgtatataagacttccctttctgacatattttacattttctggcaatctcaactcttatttggaatacttctgtgcattgtctgtgcaccgtaattttgaaagctatcataacggttaccgtgtagtacagtgggg

SEQ ID NO: 246423 - DNA, 840 bp, Homo sapiens
  misc_feature (518)..(518): n is a, c, g, or t
  misc_feature (523)..(523): n is a, c, g, or t
gtttgcctgttgagtggtagcctttcccctcaaccagcaatggaggagcagccccagatgcaagacgccgacgagcccgcggactccggaggggaaggccgggcaggcgggccaccgcaggtcgccggcgcccaggcggcgtgcagcgaggaccgcatgaccctgctcctcaggctgagagcacagacaaaacaacaactcttagaatataaatcaatggttgatgcaagtgaagaaaaaactccagaacaaattatgcaagaaaagcaaatcgaagcatgagactttcaactgcacttaaaaaaaacctggagaaaattagcagacagtctagtgtgctcatggataacatgaaacacctattagagctaaataaattaataatgaaatcacagcaggaatcttgggatttagaggaaaaactgcttgatattagaaagaagagattaattaaaacaagcttcagaaagtaagcttttagaaatacagactgaaaagaacaaacagaagattgattnggacngtatggaaaactcagagaggataaagatcatacgacaaaacctacagatggagataaaaattactactgttattcaacatgtgttccagaaccttattttcggggaagtaaagtcaattgggcagaggatcctgcccttaaggaacatggttctgcaagcttgagaagaatgttgacatgatgtatataagacttccctttctgacatattttacattttctggcaatctcaactcttatttggaatacttctgtgcattgtctgtgcaccgtaattttgaaagctatcataacggttaccgtgtagtacagtgggg

SEQ ID NO: 246424 - DNA, 378 bp, Homo sapiens
tcagacaatctagcagctcaacttcttgatttcctactctaaaggacctggctagggaggagtgccatttctgaagcaaagcaagagccagtgagacaaaatcaaagagaagcaacagtacagatagaggaggaaactagtaacaatagaactttataagaaaatcaccagataaactgtcattccagtggtttcaagtatctattctcttttgtgtattctcataaaagccttagagtcagcaacgggacaggtggtgtcattcctctctttctccagggcagtgagggcagcagctgagcccaggctctcggtgaagtggtggaaaactatcactggagcagttgggctggcagcagtggggatgagggagtttca

SEQ ID NO: 246425 - DNA, 339 bp, Homo sapiens
gcctcccaaagtgctgggattagaggcgtgagccaccatgcccagccgattcttaaaggtggtaagccccattctccccacagaactcgctctgtactcttaagcttctttctcagttcctaggaccaattcaacatgagatggtaaaaactgaacagcatctgcttatttattctctctagatctagacagggttgaggcactgctttgcttgacaccttctttttgcaggttggacacctgtgcatgtgctcagcctttctgatgacgctgcctgcctgccttgagttggttgacctggatgtccccctttttgttcctccattggcacagagctcc

SEQ ID NO: 246426 - DNA, 649 bp, Homo sapiens
gaatcaagaaataatacaaggtatcagaattcatctgataagttccatctcctacacagaggtattacttcccccaaaataggtagatgtcattgttatttgtgaaaaggaaatttaaaaaatcaatgaaacatcataaattataaatatagatataaaataaatacttgctaaatgagagaatactattaataaaaggtcattctgtatttaatcgacaaatacaaaatgtatcgtgtgggcttgtaaactgtcaagctgttaaaaatggatccctgattctgaaaaggtagcacatgaagggcaagtactgaaaacaaggcatgctttttaaatccaatcctgaaacttcagtgagctctaaaaggacatttgctcgagtccagggaatgtggaacacagcatgagaaatgtgaacattcttggtaaactgacatcatcatgacaactctggcagggctccaagtgtctgaagcagaacgaagtcttgtttatgaagtgggagaaagaaacttgggctttctgatttacaccttggcaggaagcagaaatggttaaaagaaaaggaacactttttatatacagtaactggcaattttcagtgaagaaatgggaagaagagaaaagaaagctatttgaaaagttgaaa

SEQ ID NO: 246427 - DNA, 403 bp, Homo sapiens
tagtgtttttgtatgtaataaggttttgtattaccttattatacaagaatggttaaatggattttcactgaatatgtagagtttagaagttgctctggaagaagtgctttctttcactctagcactctcatcttgcatctatactatgttactgttgctgctgattctcttgaagtttactctgctggccagattctcccctgctcaccagtagtgaaacctcatcttgatcttgggcaacaaaaactttctcctgcagtgcaaatgactattttttgttttgttttttgatggggagggcagtgtcgtttttttttttcttttttggagtgtggggagcagcatgtaccagttatccaccactcactcagaggtaccttttctcgacatgggaggattccac

SEQ ID NO: 246428 - DNA, 110 bp, Homo sapiens
ggtataattggtaatgaacagtacttttgctaattatctttactgtcctcccctgaagtatagtgaacagagaccaagtgagccaatatcttgtgtcatatggctataga

SEQ ID NO: 246429 - DNA, 362 bp, Homo sapiens
tactccagcctgggctacagagtgagactccacctcaaaaaataaataaataaataaataaataaacttacgtatgtatgtacgtacgtttgtaaagggggggttccaggcccttcagaaaaacagtcctgggttttactgtatttactgggtttaaacaagctaagctaggggtagtttatttagcctttaaaaagatttgcatacatatcaaagggacagaggaataatttataaatactgggtttttcaaagaaatgctgtgaggaaaaggaaggagagaagatctctttccctttggaaacagtgaaaattcagttttaaaatttttactatatgtttgcatgacaactaaaaaaaaa

SEQ ID NO: 246430 - DNA, 261 bp, Homo sapiens
gaggaggggagtggcctaaggtggggcccggtggccccttcttccaccctcagccagttcttttctacctgtgtgaccttggaatcccagacacccaccactcccccagcctttcacaaacattacacagtgtgtgtgtgtgtgtgtgtgtgtgtgtgtgtgtgtgtgtgtgagaatgcatttttttattatttctggacattttatttatttatttatttatttcgtgacagagtgtgagactccatccaaaaaaaaaaa

SEQ ID NO: 246431 - DNA, 491 bp, Homo sapiens
cttttttcatacccccaggggtatgttaacgtttttctgacaaccttccagagtttttctgtgattacacacgttcacagacatttaaaaaaaatagaaatgggatcatacttctcctgtgatgcctgatattttcctgttttacagaagacagcgtaattgtttcagggtccaggagttacgtgcctaattattaacagtaacttttactttattaaaacgtattccacgcccagcccagaaattgatttctatttgccattctccaaaagacaaaaaaagttggtttttttttttttttcggtcttttgtttgtttgtttgttttttaagagatagggtcttgctttgttgcccagactggaggtcagtggcttttcacagctgcagttatagcctactgcagcctcgaactcttggcctcaagcaatcctcccacctcagcctcccaggtatctaggacaacaggcatgcaacacaaagcacagctct

SEQ ID NO: 246432 - DNA, 563 bp, Homo sapiens
tctaaaggggttgaacccttttaaagtcttttaaaaattaatttttaattttctaagtgatataggaatatattcttttcatttaaaaatgaaaacaattagggattatggctaaattcacttttgatcaccacccccacacccataccatcaccacccatccccatccccatccacataagccttccccattccccaggggtacctgctattattggtttggtgtatgtcttgcttgttctttttctgtgccctggcggatataaaccaatgggacatagacattactggagtgagagtttgtgtggtgtgtgtgtgtgtgtgtgtgtgtgtgtgtggtgtgtgtgtgtataacatgtaagctgtattgtaccaaacccatcattctataatgatgtgttttacatgatgctacatcttagaggtcttactatgatgtggatatgtatatattacttgagtagtttccataaaccatttttcatcagtgcctttttgacgttactttcgggaaagaatctggggcttcattaaagacccaatgattctttttaaaaaaaaaa

SEQ ID NO: 246433 - DNA, 353 bp, Homo sapiens
atttttgcctgtctggtaggtatggaaaaggtatttcattgtagatttgattttcgttttgcttattactgataggttgagcatctttccacttcttcactgcccatttggttttcttttctgtgaatgccagtttgtgtcttttgtccactttcctattgcagtgtttcattttttcttattgattcattggtttccttcatatattctagatgttaaccctttgccagttacataaactgcaaataatttttcccagattgtggcatgtcttttcactattttaaaaatgaattgtgatgaatatacatttaaaattttaatggagaaaatgtattaaccatttcctttct

SEQ ID NO: 246434 - DNA, 456 bp, Homo sapiens
atttaaaacatgctaagaaaaatgtcttgaaattaatagcaggttcccagtgttggcaaatacgtaaggaccacagataattccatcccataatataccccagcctttctagggcaaaagaggaataaatgacccaacacgaagaaaaattttggattttgtcagttctccaccattttcttaaacaggcagaaaactaaactaaaagctagaatttgttaatgtcaaggaaatgccctgaaaatataataaggaaaaaagaggccgaggcaggtggatcacctgaggtgaaaccccgtctctattaaaaatacaaaaaattagctgagcgtggtggtgctgaggcagaagaattgcttgaacccaggaggtggagactgcagtgggctaagatcatgccactgcactccagcctgggcaacagagcaagattccgtctcaaaaaagaaaaaaaaa

SEQ ID NO: 246435 - DNA, 532 bp, Homo sapiens
tgcttttagatatatattggttgcaaaagtttggcattaatgatttccctctgcttatgtgtaaatgcctatgttccaaagctttgccactagatattcaaatcataaattgtcatgtaagccagtcttccagaaagaaaagctatttcagcaaaatgatatttcacatttagacaaaacagtagtatttagacaataatattttgacaaaaccattttcaaaactgcttaggaaaaaggggaaatattatacttaaaggtaatgacctctgtcttgaatagaggtgagtgggttggtgacaactggtttggaggcttttgtgggggactgtggtgtcttttggattgtgtcatcagctccttcatcaagtaagcgtgtagctgttattgcctattgtaaaacatgaattgatgtgaacagtactcaatctcttacattatatgaagtataacttcctctcttttttgcctataatacatcctttaacttttacagattaaaaaaccactgttagacaaagcaaaatggaac

SEQ ID NO: 246436 - DNA, 629 bp, Homo sapiens
catggccacagttcagcagctggaaggaagatggcgcctggtggacagcagaggctttgatgaatatgtgaaggagctaggagtgggaatagctttgcgaaaaatggacacaatagccaagccagattgtatcatcacttgtgatggcaaaaacctcaccataaaaaccgagagcactttgaaaacaacacagttttcttgtaccctgggagagaattttgaagaaaccacagctgatggcagaaaaactcagactgtgtgcaactttacagatggtgcattggttcaacatcaggagtgggatgggaaggaaaacacaataagaagaaaattgaaagatgggaaattagtggtggactgtgtcatgaacagtgtcacctgtactcggatctatgaaaaagtagaataaaaattccatcatcactttggacaggagttaactaagagaatgaccaagctcagttcaatgagcaaatctccataccgtttcttttttttttttttcattactgtgttcaattatctttatcccaaacattttacatacagctatttcaaagtgtgttggattaattaggatcatccctttggttaataaataaatgtgtttgtgctaataaaaaaaatga

SEQ ID NO: 246437 - DNA, 380 bp, Homo sapiens
tccagcctgggtgacagagcaatactctgtctcaagaaaataaataaaaactaataaaaaataaaaataaagtccactgaagtgtaaactaaagtctttgtcccactgaaattatttattgctttcactggacatgttaggattaaaaatttgcctgtgagatgcagaacattgtgtataaaatgctaccttttgtgtagaaagaccaggaaaaaataagattatgttttgcttgactacatgtaaagggactctggaaggacacataagaaattggcattttggtttggcatggtggctcacgcctgggaggccaaggcaggtggatcacctgaagtcagaggttcgagtccagcctggccaatatgacgaaaccccgt

SEQ ID NO: 246438 - DNA, 363 bp, Homo sapiens
caattccctaagctgctataaaatactttactttttccttgtaagaaaagttttattttcatattcttaattaaagaagagggttcagaagcaagatacaaatcagtttggtccttacgggcaaactgcactcatgatgtgcattttcactttataagaattagatggtaaatatctgatgtagcctacaggaagaagggctagcactaaggttccatctcaagcaaacctggcttccacatgttccctcagaggccgggcgcggtagctcacgcctgtaatcctagcactttgggaggccgagaagggtggatctcctcaggtcaggagttcaagatcagcctggccaacatggtgaaacgc

SEQ ID NO: 246439 - DNA, 492 bp, Homo sapiens
caggaggcttgcttgagctcaggagttcgagtccagcctgcacaacaaagtaagaccacttttcttaaaaaagaacaatgaaaaacctgatataattgattttcctcttgtgattttttagctcccttaaagtatattttaaatcatcatggtttaatatctgaatcatggtttttcttctttattggttatttggttggttttcttgggaaaagaggttggtactagtccaatttgcacgtttgtagaggattctatacacatgtagtcctacatgtacacacacatacacaaattatttataaatatataatatatatgtgtcagagaacataaattaatgttatattgtgaagcttatatataattcagttttgcagatgaatttattcaagagcagcttatggagattaaaactatacaacttagaaattaaatactgaattttaagattttttttctttcctaaaagccatactttctttttttttt

SEQ ID NO: 246440 - DNA, 423 bp, Homo sapiens
ataagtggacagagtctttttttaaaaaatattgaggctaactgtaaaacttagtaaattattttaaatagaaattactgttttgtcacataaaataagaactgtgatttatgcataatttatgcatacttctaacttaaaatttcttctaagcatatcttcatatatgataattaaacagaagcgttcatctcatgtaactatattgcttttctgtctcgatgtagtcataaccaataatccaatattatttcaacattttttcctctggtaagatagatgggcaattcagctccttctaatataatcatttcccttaaatataagggagttcttcgtgtgctaatatgaaacaaaaagtctccaagacatattgttaggtgaaaaaaagcaagatgcggcatttttcttaccatttgtgta

SEQ ID NO: 246441 - DNA, 141 bp, Homo sapiens
tcctgaaaaggttattattaaattctttcgcgtaatgcccctttacaaatattgttaaacattaatttacagaagaacttaaatcttaatttcaagggtggcataagactatcgctttgaaattgtatctttcgcaagtta

SEQ ID NO: 246442 - DNA, 464 bp, Homo sapiens
attccagagtcaaaggtcataagaaatctcattataatttacttttcggtgtatgattttatagtgcctcactgtagctggtcataaagtttatcacttactagcactataggattcattatgtaatttgagctattatttaaatctggctgttctttttataattgtttttgaaaataaatgaagacatagaggatggatgattagcataatgaaaactggtttcatgaaacattcacactatagtgtactctgttcacatctagtctgttcctttctctttttagtgctggttataaccctctcagttaatttcaagactcatcaatcagtagcgttttttttgccccctgaaagtttactcgatagtcttaagagactgaaagagtagttgtagtgaaaggaaaacaccaagcttggcactctggatctaaggatttcctagcaaaaaaatacagtggaga

SEQ ID NO: 246443 - DNA, 478 bp, Homo sapiens
gatgccaaagaacttggcgtaccacaaagtagaaatgtgtatacaagtcaccaacaaaatgtgatgggagccatagaaaggcagcaattaatccagggggtgggcaagtgtccagaaaggaggcaggtaaagtattaacagtgacaaggagctgaggggccaaacaactctcagagcagagcctcccaacctctgccgtcacagcatatgaagagaacgtcacctggacatggaactcactgaaaatactcattccacgatctattgatgatcagaaggataggatattatgcattatgggaaatagtaactactaagaatgcatacagtctttaaaaatcctttcaatctttttacatgagatatttgggctgtttaaacatgaccttatttttcattcctatatatatgtagcctgtaattcaagcgtctaaatggattgacagacaatttctattaaagtgttcattgtgtctca

SEQ ID NO: 246444 - DNA, 342 bp, Homo sapiens
gacagtaaaaggaaaaaattggcggggcgcaatggctcatacctgtaatcccagcactttgggaggctgaggtgggtggatcgcttgagcccagttcaggcaacatgacaaaacccccacctctacaaaaaaaatagtcaacatgacaaaacccccaatgtctacaaaaaaatacacaaaacatatgagccaggggtggtggtgtgcacttgtagtcctagctacttggtaggctgaggtgggagtatcgcttgaacctgggaggtggaggttgcagtaagctgaggttgagctgttataccccaacctgggtgacagttgaaagagtgagaccctgtcttt

SEQ ID NO: 246445 - DNA, 256 bp, Homo sapiens
ccacttcctccctcagctcctccccctccccatccttctgttgccacctccttacaggtatttccagaaaggcacaccaataaacagcatgcacccaaggccccgtctcaggctctatttctaaaaaactcaacctaagccatgcacactggctcacacctgtaatctcagcacgttggaaggtcaaggtgggaggatcacttgagcccaggagttcaagaccagcccaagcaacacagcaagacgccatctctac

SEQ ID NO: 246446 - DNA, 366 bp, Homo sapiens
actgtccgttcactttctcatttgttcattcatttgcttgttcgttcctagcctgtcagattctcttctgagccaggcaaatcaaggggtgcaatccttggcatcgtgcatctctaggattaaatgctttaaaggataggaggtaacagagtggccccggggaagcccgatcggagtggcgggcatgctaccccaccctgcaaatctccctgcactgtccctggggcccagctgggttccccacaccagttgttctgtgctgccgtttcttcttttatcgctgtattttaaacactttgcacatcgggaactattcttgtgcatcgtgggttttctggtgtgtgtggaatcccttcctgagaatgc

SEQ ID NO: 246447 - DNA, 468 bp, Homo sapiens
atcatggtagaaggcagagttggagtgaggagcttcacgtggccagagcaggaggaagaaagagagtggggaggtgctacacacttttattttactctcagtttcttaagagagacacagatagcaggaaaaagcattgttctcactttacggtgatggaaagctagaccaaacaccatgttgtcaacttttctcaaacccgtcagagagctaagttcacaaagcaaacaacaggacctcaaatctaaggagaagcaggtaacataaggatagacaaagtgtgaacctggacttaaacggggcagatggccatggatactagtaaggggaggttggctgggttgactggcaaatggtgaaggccaagagcacattggtgagatagtgtgaagtcaccgaccaccacagaaatccagagtctgaactgccttcagggtttttctccaaaaactctaacaggcactcaca

SEQ ID NO: 246448 - DNA, 313 bp, Homo sapiens
actgtcaatcaaaaatatttgaaatataaatggacagttgcatctgtactgatgcagtgcatgtactgtacatgtgcagacctttttttcttattattccataaacaatacagtataacagctatttatatagcatgtaaattacattaggtattataagtaatctagagattatttaaatatataggagagctgggcatggtggtatgcacctattgtcccagctatttgggaggctgaggtgggaggaacacttaagctcaggaattcaagtccagcccaccctgggcaacacagtgagactccgtctcta

SEQ ID NO: 246449 - DNA, 425 bp, Homo sapiens
tgcttcaagtgtggtatggcagcacccatctgctgtgtccatctacactttattatatatctatgcacctcatcagggaagcacgggaacccgcaggcactgctagtaggaaggcaagctggcctggccattctggagaagaacatggcagtatactcagtcacattccagtcgcacagcctgtgatttgggtatgcatcatggataaatgttcattgtagtgttatttaggaaatccaggagctggagatggaaagcaatgtgcttgaactaggtaggatgtatacagctcaaatgggccaactgttaaattttcaggaatttggtgagctagtttttataccccgttattatttaaaatcaaattatataaacttaccactaaataacatatatttttaaaagtaataaatacttaaaacaca

SEQ ID NO: 246450 - DNA, 360 bp, Homo sapiens
agttctgttattgcaccccacctccagatgccaaattctgtatttgttaggattcagtttgttctctcatataaaagaattttcggccgagcgcagtggctcatgcctgtaatcccagcactttgggaggccgaggcaggtggatcacctgaggtcaggagtccaagaccagcctggccaacatagtgaaaccccatctctactaaaaatacaaaaaaattagccaggcgtggtggcgggcgcctataatcccagctacctgggagggtgaggcaggagaagtgcttgaacccaggaggcggaggttgcagtgagccaaaattgcgccactgcactccatcctgggcaacaagagtgaaa

SEQ ID NO: 246451 - DNA, 403 bp, Homo sapiens
ctgaatatctacaggcaaaagaatgaaattggatttaagaatccaatcttacactatacacaaaaattaactcaaaatggattaaatacttaaatgtaagacctgaaattgtaaaattcctagagttaaacatagaaagctctttgacattggtcttggccataatttttttgtatatgatcgcaaaagcatagacaacaaaagcaaaaatagacaaatgggattgaatcataccaaaaactcctgcaaagcaaaaacaaacaaacaaaaaaaaccaaaaccaccaacaaaataaaaatgcaacctacaaaatgggagaaaatatttgcaagctatgtatctgagaggggctgaatatccaatatatatatatatatatgagaaaatcatacaactcaatagc

SEQ ID NO: 246452 - DNA, 460 bp, Homo sapiens
ttgtgtctctgacattcttctgcctcctgcactttaaaccaaatcccccaaagcagcattcttctttacactggactgacgattaagccagactggtgaaagcaacagagtggctggtgggaaagagcttctgaccaggagtccccagtccttacctggctccaccaggtacaaccccagtcaagtcacctctgatctctgggcctcatctgtaaaataaggatgaccattcttgaccttctcatcttgcaaggcagctatggaaataaagtgagatagccagaagattcaaagtgcttcttaagcccacccctgtctggggcttggtttgattctatggtcttcatctctcattgctgtttgctgatgttagtgttatttccctccttcccttccctcccttcctccctcccttcttctttcttcgtttctttcttttcttattttgagacaaggtctt

SEQ ID NO: 246453 - DNA, 417 bp, Homo sapiens
aattcaaagatgaaagtcaagattcttgttcttgtaaaacttttgaatttaataaagataaagcaacatttctgcaaagaaggtagaaggacataaaaccaaattaagagatacatacaatggccaagaaagcacctaagagaaaagtgactgatatccaactacagaaattagagaggaccacgtggaggaggtgataatgaattttgaacttgaaggacaactagaattccagcaaatgaagatgaagagaagcacatttcagacaaaaggcacgaaaagacacagtggtgaaaaagttaaggaccagtttggggaatgacttatagacatttcttaggtgtgtagtggtgaaggaaaatagtggaagatgtctgcaataaaattataaaatcttttgtatgtaaacttgagtca

SEQ ID NO: 246454 - DNA, 374 bp, Homo sapiens
caggagaccgaggtgggaggatcacctgagcctagggaggttgaggctacagtgacccatgatcgcgccactgcactccagcctgagcaacagaacaagactctgtctcaaaaaaaaagaaaagaaaagaaaaagaaaaaagagcgctaggcttgtgggtgctttcccttccttggtgatactaacatctgtcgctggcagggcacttcccagcccagatcaaaatgaagtgggctttccctactttatgtcctcagatcttctctactacccagtgagggacgaactgacactttattacggaatcacagatgagattccagaataaagattctttattctttccaaaataaagaagtagtatgattgtgata

SEQ ID NO: 246455 - DNA, 407 bp, Homo sapiens
aaagcctttaagattctggcccagccaaggatgtcagatctcactgtcatcagcgcttctttgtctccctttccattctccttagtaaaatggcttggccctcctccccaacaaaaaaggagagcatggcaaaggaacacaacagtcaccctgagagacgtcacatatgatcatttgagcaataaaataagtaatacagtattatattataacccaaagtattaaataaatatccatgagtccatacttccagaaatacatgataaaataagtaactaaattgggagaaggaacagcttttccttgcaaaagaattacaaattatacatgtagatagtaacccctccaggaggtggagcttaatttctcttcctttgaatgtaggctgaacttagtgactcatttcc

SEQ ID NO: 246456 - DNA, 776 bp, Homo sapiens
catctctgggtcagaaatctgacaactcatggaaacagttcatctttgggcacttgggctcagcacactgggtagaaaagcctctcacttttaatcagagagccggatgacaaaattaggggtgtgtgtttggggttagctgggggtttgagtctcagctctgccatcacctagctaggtatcctcagtgctcccacctatcaaatagaagtggccgtgcccatcttttaggactatgatgattgaatgcactgataactttaagttactttgtgtagtgcctggtgtttaggatgtatacggtaattggtgattgttaatgaaatctaggttaaaaagataatcagtgcagtaccccatcctcctaccaccctatcaacgtttgccattctagagtttttagcaacttttagaaaccacacagggctttagtgcatcttgtcactagatggatttgctagttttcaggattctagaaggctccaaactcagatcatggtttggtccgtgacaaggagaaaaccttggttatatgcaagaccgtaacaaaatttccccatttcttttctttttttccttttttttttttttgccccgccatttttggaatttcttatagtctaagatgattcttactatactcatgtttccatcccaccaaaccttgaatccattgagactcaaatgggctctagagagcatgaaagagttaacgtgtccctgagtgcccagtttcttacaggattaggggaaaagtgactttatttttatttgca

SEQ ID NO: 246457 - DNA, 641 bp, Homo sapiens
tagctcatgctagagtgcagtggcatgatcataacttactgcagccttgacctcctgggctcaaattatccttccatctcagcctcctgagtagatggactatgggttcatgccatcatgcctggctaattttttgtactttttttttttgtagagatgaggttttgccatgttgcccaggctggtctcaaactcctgatttcaggtgacccacccacctcggcctcccaaagtgccaggattacaggcgtgagccaccgtgcccggcctgaattgtacatgttatatgtgtggagtttattataagtaaaatgtacctcaataaagtaactaaaggagtttaaactttttttggaataagagataattctaccttaaactgattttgaaatgttggctttgtttccagaaagatcatccacccaacaaaggttaagtcacttcaggcactactaagaactagtgactgtaatactgttacttagctccattgctcctttgagtgaaacagatataggaagcctggaatcagttctgcccacttattaagttatgtaaccctggtcaagcttcttaacctcctccgccttaggttccttacctctaaaatagagacataacatatacctcaaaaagttgtg

SEQ ID NO: 246458 - DNA, 617 bp, Homo sapiens
agtaaatgggagaaactttttccaaaagcagaatcagcagattttcatcatgatctgggaagccgtggggaggtgggtggagaagtcagcgaagaataaaggagccaaaggtgattccgaggtttgagcttgagttactacacacagacagcagaaatctcaaggaaagacttgattttatggaatgatgatgattttagtgttagacataattttaaagttctggagggaactaggtaaacaatgtcaagtgaggcactggaagtgaccttagatttggagtccaaaacagaagccatccttgcaggtgcacattttagaaattgtatagaaaaagacaggagaggccgggtgtggtggctcacgcctgtaatcccagcactttgggaggccgaggcaggcagatcacgaggtcaggagttcgagatgagcctggccaacatggtgaaaccctgtctctactatcaaatacaaaaattagcagggcatggtggtgtgcgcctgtaatcccagctactcgggaggctgaggcaggagaattgcttgaacacttggccctgggaggcagaggttgcagtgagccgagatcgtgccactgcactccagtctcaaaaaaa

SEQ ID NO: 246459 - DNA, 802 bp, Homo sapiens
  misc_feature (13)..(13): n is a, c, g, or t
  misc_feature (16)..(16): n is a, c, g, or t
  misc_feature (26)..(26): n is a, c, g, or t
gcttctgctgccngcngtcgctctgncgatccccatatatccgccttccggagataaatgtggagttttccaggtggaggaaaggcaagtacaaagacatcaaggctgtgaaagtgcttggcatgttcaagaagtagcaataaaggcagtatacctggagcagagtggaaaagcaggagaattgtaggagagaaagggagagagatattaaggtgctagatcatgtaaggactttgggttttatgctgagatgggtgctgaggagtgatgtcatctgaattaggtttttaatgaattattctggctacagtgtagataataaagtgtaagagtaaaagagaaaatcaattaggaggtaattgaagtagttcaggtgagatgattagatcaggattgtagtattggaggttgttaagaagtggtggaattctcgattagaaaagtgagaaagaaaaagacaggattcatttctctgggaaaaaaaaaaaaacaagatatttcagggacatgaagagaggagtagactaaagagaaggcaacaaaggaagaaaataaacaggattcctgaaagcaggagtattcaattgtgtcagaaattggaaataaatcaattaggatttattgataaccaagcaatttgaatggggagtggttggaacagaagccaagtagtagttggttgagtaataaatgtgaatagaggaagtggaggcagctaggaagacaactgtagtactaagtaaggatggtggaggctgaggacgacggtgaccgtgtccttgccccagacgtcactcgtgca

SEQ ID NO: 246460 - DNA, 1120 bp, Homo sapiens
cacctgaggtcaggagtttgagaccagcctggccaatatggtgaaaccctgtctctcctaaaaatacaataattagctgggcatggtggcgcgtgcctgtaatcccagctgctcgggaggcaggagaattgcttgaacccaggaggcgaatgttgcagtgagccaagattgtgccactgcactccagcctgggtgacagagcgagagtcagtctcaaaaagaataaaataatgttgggagtgaaaaaaataaagcagggttaggagggataagaaaatggtgggggcactattttgtagagcatgatcatagtgatttttgagcctcatttgaacagacatctaaaggaatcgaaggagtaagcaatggagataaatgtggagttttccaggtggaggaaaggcaagtacaaagacatcaaggctgtgaaagtgcttggcatgttcaagaagtagcaataaaggcagtatacctggagcagagtggaaaagcaggagaattgtaggagagaaagggagagagatattaaggtgctagatcatgtaaggactttgggttttatgctgagatgggtgctgaggagtgatgtcatctgaattaggtttttaatgaattattctggctacagtgtagataataaagtgtaagagtaaaagagaaaatcaattaggaggtaattgaagtagttcaggtgagatgattagatcaggattgtagtattggaggttgttaagaagtggtggaattctcgattagaaaagtgagaaagaaaaagacaggattcatttctctgggaaaaaaaaaaaaacaagatatttcagggacatgaagagaggagtagactaaagagaaggcaacaaaggaagaaaataaacaggattcctgaaagcaggagtattcaattgtgtcagaaattggaaataaatcaattaggatttattgataaccaagcaatttgaatggggagtggttggaacagaagccaagtagtagttggttgagtaataaatgtgaatagaggaagtggaggcagctaggaagacaactgtagtactaagtaaggatggtggaggctgaggacgacggtgaccgtgtccttgccccagacgtcactcgtgca

SEQ ID NO: 246461 - DNA, 430 bp, Homo sapiens
atgagtcctgaacttttgtcttgaggctagaattctccttcaaacagcagttttaacactcaacttctttcttgttttttccacttgtcaactcatgaacacctcaaccttgttacatccaaagccaaactcatggcttggagtggtaggtgatggctgtaatcccagtgctatgggaggcagaggtgggaggattacttgaggccaggagttggaagccagcctggaaaacacagtgagactccctatctacaaaaaaaaaaaaaaaaaaaaaaaaaaaaagctagcatggtgatgtgcatctgtaggatctgtagtcctgctacatggcacgctgaggcaggaggatcacttgaccccaggagtttgaggctgcaaagagttatgattgcaccaatgcactccagcctgggtgacacagccagagacc

SEQ ID NO: 246462 - DNA, 398 bp, Homo sapiens
ctgggatgatggatggctttattagcatgcttcaattttatatttatcaaattaaaccagcagccaagggacacttaattaagattctttgtcatcagtcagaggagagaagatgggggagagaaagggcttatgacccatattctagaaggaaaggtttaagtgcccaaaataatatgtcagaggcccttgggagggtttggtggcttgcagtaatgagggctgtcttcaccgtgggaatccgaggatgggttcgagtctttcttccttaagtgttttctctttattaagctctcatcagagatgcgacatttattcagtgctggtcctccatgttaacaaactcgtcgcatgtggtgaactgaaaataagtggagagtagggtaaaatacgaaaaa

SEQ ID NO: 246463 - DNA, 447 bp, Homo sapiens
ctgggatgatggatggctttattagcatgcttcaattttatatttatcaaattaaaccagcagccaagggacacttaattaagattctttgtcatcagtcagaggagagaagatgggggagagaaagggcttatgacccatattctagaaggaaaggtttaagtgcccaaaataatatgtcagaggcccttgggagggtttggtggcttgcagtaatgagggctgtcttcaccgtgggaatccgaggatgggttcgagtctttcttccttaagtgttttctctttattaagctctcatcagagatgcgacatttattcagtgctggtcctccatgttaacaaacacaccatgtctgtaagatatcagagcacagggcagccagggagtctgggttcaaatcccgactctccttactaattgcataatcatgggcaagttacttcatt

SEQ ID NO: 246464 - DNA, 374 bp, Homo sapiens
ttttattaagtaatgggaagggaagtaaatcatttattttatggctaaacatatatgctcattattcatattatatatcaatggttccaggggaaaaatagatgcacatttgatgtgcaaattatgtaaaagtgtttaggacttggctatatatgtttctttggtggagaaatatctatgtgatagagatttctttgggaaagatgacactcacaaaaaaagccagaaatttctgttttatagattttgataaaatgtatgaaataattttcgcagccaaaggaaagtatagcacagtatattatggagagatgttacagctcaggaaaattaatacatgtcagctgtttaataaattatgcatttaattattg

SEQ ID NO: 246465 - DNA, 376 bp, Homo sapiens
cctttctggcagtgacgacctacccacaggagaacatgcctctcgcaaaagatctccttcatccctccccagaagaagagaagaagaaacacaagaagaaacgcctggtgcagagccccaattcctacttcatgggtgtgaaatgcccaggataatataaatcaccacggtctttagccatgcacaaatggtagttttgtgtgttggctgctccactgtcctctgccagcctacaggaggaaaagcaaggcttacagaaggatgttccttcaggaagaagcagcactaaaagcactctgaatcaagatgagtgggaaaccatctcaataagcacatttttgataaaaataaaaaataaaataaaataaaataaaaa

SEQ ID NO: 246466 - DNA, 463 bp, Homo sapiens
acctctgtgaaaacagctgtgccattccaattgtgtatctggtggtggcatctgcccccttcctatgaatgaatgtgctccctcaaaatggcagaagagtataggtggcaggcacactggattggagctgggagcctaaggcactgcttttagctttctctgctaactggctgtgggacattggagaacccccctaccaccagctctttgggtttcattttctctatctggaaaggagaggtttggactgggtgacttccaaaaggtcctttcagttgtaatactcaactatgctgtttgaagaagcaaaataatctttaattcatttttctggccgtcctaaagttgttgtgaagtgtacatgagatgttctcggcaacatttttgttgttgtttgttttacttttattgattggttttcaaccatttgaaagttataatagacccagtctttatataaaaa

SEQ ID NO: 246467 - DNA, 376 bp, Homo sapiens
aagggtcctaaggtcaaccagattgggagctttctacattctctaacccacctccgtggaaatgccccatgcctgcagtgcccaggtgtgtatcaaaagcttcgaaaagtcacacagccaagaaatctgctgaattctattcagccgagggtcttccaaactaactggaccatgggccctctcttggcctgacacagcctcaagccactctggggatcctgacttggcatgcatggccagggagagcacttctgagagcaggattgtcattcagacaggggtgtgcagacacgtgttagcagtggacaccaacacacggtaattttcctgggcaccaactctgaggaatgaagtctttaaagactagagtaaagcc

SEQ ID NO: 246468 - DNA, 496 bp, Homo sapiens
acagcacatcataaatcccactgttcgtatactggctaagagtcaaggctagatattcaggcatccccagagctttcccagtccagctgtaaattaatactttactacacagttcctgacaatttaatctaataaaaggcaaaatgatgatggtagctgcattgtataaactacagtaaaatttattaaatgctttaatatgtattaacttatttgaactttataattctgtgagctatatgggaaaattatttttatctccattttatagatactaagactcagagaggttaagtgattggcccagttcacataccttttgtgttggtagagtcagttctagaagacaggccttctgccttttattttagattttttttcaacacttcctgccaaaagtagatataaagaactatttacttactttctaactgttctatggaacagtgtgggaataaacaaatatatttaaaaccactacttatttccccccaaa

SEQ ID NO: 246469 - DNA, 443 bp, Homo sapiens
gtaatatcagaaaactacttgtcagattgaaataaaatactaattgatattatccctgcccactggtggcaatttagaacaacttttctataaaattctctttggtaaaacagcattcaggtatttgaagatagaatcgtgttcccttaagtattcatctaacattctcaggttcattaactactcatttggtgccatgaattccaactgtctttaccagttccctcacccattattctctaagcttatattttttctccagctataataaggtctacttggcaaataaaaatttcacatatttaaaaattacatatatcagccaggcacagtggctcatgcctgtaatcctagcactttaggagtctaaggcaggtggatcacttgatgtcaggagttcgagaccagcctggccaacatggtgaaaccccatctctactaaa

SEQ ID NO: 246470 - DNA, 328 bp, Homo sapiens
tacgtgcacatccaggcacagcacctttccttaaacttatttatgacacagagacctttgctcacatgttttcctgctgaccctctccccaccattaccctatagtcctgccacatccccctcactgaaatagtagaaatagtgatcaataaatactgaaggaactcagagaccagtgccggcgcgggtcctccatatgctggcaccagttccctgggcccactgttctttcgctatactttgtctctgtgtcttatttcttttctcagtctcatcccacctgacgagaaataaccacaggtgttggggggaggggctgcccccttca

SEQ ID NO: 246471 - DNA, 349 bp, Homo sapiens
caaagttgggtacgctctgggatgattttaggcagcatttaggaaaacattaattaagaattttttttcggccaggcatggtagctcatgcctataatctcagcactttgggaggcctaggtgggaggatcatgaggtcaagagatcaagaccagcctagccaacatggtggaaacccagcctttactaaaaatacaaaaattagctgggcgtggtggtgcacacctgtagtcccagctacttggaaggctgaggcaggagaatctcttgaacccgggaggtggaggttgcagtgagccgagatcgtaccactgcactccagcctggtgacagagcaagattccgtctc

SEQ ID NO: 246472 - DNA, 452 bp, Homo sapiens
ttccctctccttggatgtaagtgaggaagcctctagagtctagaagctactgacagacctctcactaccacgagggcttgaggaccaagacagtaccgtgagacagatccagtggcacctcagagctgctgttctgaaggatgtcatgaatatctcgcccaagctgcacaggacttttcagttacttgacaacgtatctctttcattgcttcctgggacctaccgctgaaagcctctaactggaactctctcctaccaactgacgctcccacagtaggcacagtgagcacataggaatagaaagctgattcctggtactttgcagcttgactccttttagtggcttcctggtctagatggagtaaaacctgggggatctacttctggtattggttgtatgaggaagtcaagggatttcccttggcagaaagtaagtaaaaaaaatggacaaa

SEQ ID NO: 246473 - DNA, 510 bp, Homo sapiens
tgctctgttgccaggctggagtacagtggcatgattttggctcactgcaacctctgcctcccgggttcaagcgagtctcctgcctcagcctcccgagtagctgggactacaggcgcacaccaacatgcccagctaatttttgtatttttagtagagacagggttttaccatgttggacaggatggtctctaactcctgaccttgtgatccacctgccttggcctcccaaagtgctggaattacaggcatcagccaccgcgccccaccagcacacagactcttaactggaagagagtggggaaaagggaattaactttccccttttttattttctccttatttatgaatttatttaataattccacaggctctccaagagcagaatgaaattcagggcagatcctccctttcaaaagctgagggagctacttgtgaaactcccaaatgagtgggagtaaaggaaagtgtgttggaccaagcagcaggtcatggggtcctcatccaggctct

SEQ ID NO: 246474 - DNA, 410 bp, Homo sapiens
atagatgaccatattcttgaaaggggtgagaaagctctccagtgtctctcttataagggcaccaatcccattcacgaggggccctgcactagtgacctaatcacctaccaaagtccccacctcctaatacgtcaccttgggggctaaggtttcagcatacgaattttgtggggaaacaaacattcattgttagcaaggggagtatacaattacctaatacatgctttgagatgctgaggatgtacattttccacaaaagtctgtctttttgtaaatctttagcgtcaatagtcaaacccgcccttcagaatttctaaattcaaagtaggttccactctttttagtcagtctttcctgaagagattttaaaaatgcctaaaatatgatgagaataaataatgccatgttaa

SEQ ID NO: 246475 - DNA, 220 bp, Homo sapiens
tcatcatggttttgaagcctagtacatgaacatccagagtcagaaaacagatacatgtggatgtgactagtcagtttattttaaaaagaatttacaaaaagatttcttcaaatctgttatttttaacctttttggcatttggagtctactaggaatcaaaagagtgctgttgaaataacaatagctaatgtttattaaactcttaccattctaaaccctt

SEQ ID NO: 246476 - DNA, 425 bp, Homo sapiens
cgctctgcagcccagcagaagggcctgagggatggccagggcgggagggaggaacagaagttcaaggttcccagttgtgggcaggagactcagcatcggtccctccagcccccggcagcaggagcccccatgtgtccccgggaatgcggtgtccacgcctccctctttgcatccctgcagcgcccaaagggactgaagctcccagcacaggggaggcgcccagcgtggctgcagaggaagggaacgcaccgcaggtgggaggggcccagctgatttctcagcgtcacagtgaaaggcacccgtgatgagacagctcgctctcggcagtttcaggaccctccttgccctggctgctcatggggaacatttgaaatgcatgtgggggcctccgaattttgaattttaataaatagttgaatcagcgt

SEQ ID NO: 246477 - DNA, 352 bp, Homo sapiens
gggaaggggagagtgggaaggcactggaagaggggactttgcacactgcatgctgcacctaaatgtggccctctgctcacctttctgctcccaggaagtgggagttcaggtggccccaaggtctctttcaaattctcaaccacattccgaggacagaaaatgaatttcatctctatgcactacctgctttgccattcattaaaatgcctgtgattgtgttctcatgttaacatacctgtttcatttcatgctcctttactcccttctcttggttcccttgtacaataaaacagcagcatgaaacaaaacaatgctaagctctccttcactgtgtctctgtggtgtcacattt

SEQ ID NO: 246478 - DNA, 251 bp, Homo sapiens
ttcccaattctacacctcatcaggggactatggaggaattctaatttgtcccctaatcaactcacaaccaattgagcaaatagttaaggtggtcctgaaactactctccagtcccggggacatttggaatgcattcttacttctcttctgaaacccatagacctcatccttcacaagcaaacaaaatgtgtccatgtgcccaaacctttgttttcattcagtaagaaggcaataaagtcccttttctgccc

SEQ ID NO: 246479 - DNA, 552 bp, Homo sapiens
tgcaggacagcgccgtggtactgagtctcatcgacactattgacaccgtcatgggccatgtatcctccaacctgcacggcagcacgccccaggtcaccgtggagggctcctctgccatggcagagttttccgtggccaaaatcctgcccaagaccgtgaattcctcccattaccgcttcccggcccacgggcagagcttcatccagatcccccacgaggccttccacaggcacgcctggagcaccgtcgtgggtctgctgtaccacagcatgcactactacctgaacaacatctggcccgcccacaccaagatcgcggaggccatgcatcaccaggactgcctgctgttcgccaccagccacctgatttccctggaggtgtccccaccacccaccctgtctcagaacctgtcgggctctccactcattacggtccacctcaagcacagattggtgagtggcggtgccttcacccttgtcgccgcctttgatctggtttcacactgaggaatgctgggttgtctgtgtgcttgcataaagaatctccaacagc

SEQ ID NO: 246480 - DNA, 844 bp, Homo sapiens
catggtggctcatgcctgtaatcctagcactttgggaggctgaggcaggtggattgcctgagttcaggagttcaaaatcagcctgggcaacatggtaaaaccccgtctctgcaaaaaaaaaaaaaaaaaaaaaaatacaaaaattagctaggcatggtaagtgcatgcctgtaggcccagctacttgagggggctgaggcaggaggatcactttagccccggaggcaaaagttgcaatgagctgagatggcgccactgcccttcagcctgggggacagagtgagaccctgtttcaaaaaatgtgaggcattacgtttatctgacttaggattgggctgtgttttgtattaacattttttgtagctgtaggtgtgagaactaatatttcctccagtgttcttatttttgtttactttgttgtcttggggttccttagagacttcttaaataagatctgagacatgcagttatatatttttcttttttagttttttaattccttgcaagtattgcacaaatgcagttctttgagtaacgtcctgttgttatacaaaagccttcgtggccaggcatggtggctgacaattgtaatcccagcactttgggagtccaaggcagacagattgctttagcccaagaatttgagatttgtagacaaatggagacatggcgaaccgtctctacagaaaatacaaatattaaccaggcatggtgtcatgcacctgtactcacagctactcaggaggctgaggtaggatcatctgaacccgggaggcagtttgcagtgagccatgatcatgcccctgcactccagcctgggtgacagagcaagaccctgtctcaa

SEQ ID NO: 246481 - DNA, 707 bp, Homo sapiens
attcgcggccgcgtcgacagccccggaggcaaaagttgcaatgagctgagatggcgccactgcccttcagcctgggggacagagtgagaccctgtttcaaaaaaaaaaaaaatgctgggcatgttttactaggtaaaagtaactgagatacataagcctttagtgtgaggcattacgtttatctgacttaggattgggctgtgttttgtattaacattttttgtagctgtaggtgtgagaactaatatttcctccagtgttcttatttttgtttactttgttgtcttggggttccttagagacttcttaaataagatctgagacatgcagttatatatttttcttttttagttttttaattccttgcaagtattgcacaaatgcagttctttgagtaacgtcctgttgttatacaaaagccttcgtggccaggcatggtggctgacaattgtaatcccagcactttgggagtccaaggcagacagattgctttagcccaagaatttgagatttgtagacaaatggagacatggcgaaccgtctctacagaaaatacaaatattaaccaggcatggtgtcatgcacctgtactcacagctactcaggaggctgaggtaggatcatctgaacccgggaggcagtttgcagtgagccatgatcatgcccctgcactccagcctgggtgacagagcaagaccctgtctcaa

SEQ ID NO: 246482 - DNA, 409 bp, Homo sapiens
tgtatggttgtataatttgttgactgcacaaaagagcctggccaaaggggcaagctgaggctgaaacgtagcccctgctctgtttgctccgtaccctggcatgaggctgtgccgcctggaggaagggacacctttttctaatttgacaaagatgccatatgagctctcagaggctctgttaatgctttatgtgtgttaccttctctactcctcaaaacagctctgtgggctagatatgaataccctcattttatagatgaggaaatccaggcttagtgagttcaggtcactgagttaagtcacttggtaagggataaagctaggatttgagcctgatgccaaagcccatgctctaaaccagtaggccactatactggccccatccctaagtgctcaataagtgaaaaaa

SEQ ID NO: 246483 - DNA, 787 bp, Homo sapiens
aatcctgtaagtcatacacatatctctgtctccctctgacagacattgatttagaaaggaaagactagattcaacccccaggaaacagctgttctccttagataaggaaatcattgaactggcttttaatgttgtaagagaaagggagagaaaaaggaaaagagagagatttactacaggagcaaacaacaaaaatccgaactacctagatgacacgacacaatttataattcacagaacataacttaattatcacatttcttgatagctgactttaaaccacaggttatgctttctcccaaagcaaaatggccagccttgccattgatagcaaaacaaaacattctgagaaaactcgggtggcatgaaaaggttaaaagagaacagctgaaatcttgagacctaatgaagctgcaacacctgacaggccactcctgagagcacaggtagcttgaagaacgctaaataccaaggaaaatgtttcatttacctgttaaactagcaagttcacattgaagaatgatttaatacatacacatgcacaagactaccggaattcatgcaaatttcccaaggtattcagtgctggagtactatatgcccaaacttcagaaattttagaaatgaagatagactttaatttggttgccaggaatgttccccctttaagaaatttaaattagattctccttttctctgttgcttcagtcaaagtctctactggaaccttcataatgtcaacattaaaagaaaaatcatatctcagatccttgttctgatactgaaa

SEQ ID NO: 246484 - DNA, 487 bp, Homo sapiens
gagaagcattgttttcaaactatataactgagccttatttataattagggatattatcaaaatatgtaaccatgaggcccctcaggtcctgatcagtcagaatggatgctttcaccagcagacccggccatgtggctgctcggtcctgggtgctcgctgctgtgcgagacattagccctttagttatgagcctgtgggaacttcaggggttcccagtggggagagcagtggcagtgggaggcatctgggggccaaaggtcagtggcagggggtatttcagtattatacaactgctgtgaccagacttgtatactggccgaatatcagtgctgtttgtaatttttcactttgagaaccaacattaattccatatgaatcaagtgttttgtaactgctattcatttattcagcaaatatttattgatcatctcttctccataagatagtgtgataaacacagtcatgaataaagttattttccacaaaa

SEQ ID NO: 246485 - DNA, 535 bp, Homo sapiens
gtcttggggggcggaggataagcaaacccccaaatcctcagaaatttgaggaattacaaggaaagagtaaccatacacagattgggaaaaaactacaaaagtagaggtgttaatatcctcagagagatgagaagacaccactaagaacaggatgttataaaatagtaacaactggcaaccaataacaagctcttaaaaattaaggaaatttccggctgggggtggtggctcatgcctgtaatcccagcctgttataacttttgtagcacttacttttttttttttttttttttttttttgagacagagtcttgctctttcgccaggctggaatgcagtggtgcgatcttggctcaccgcaacctccgccttacgggttcaaatgattctcctgcctcagcctcctgagtagctgggaccacaggtacgcgccaccacgcccagctaatttttgtattttcagcagagatggggtttcaccatgttggccaggatgatctcaatatcctgacctcgtgattcacctgccgtcagcc

SEQ ID NO: 246486 - DNA, 380 bp, Homo sapiens
gtcttggggggcggaggataagcaaacccccaaatcctcagaaatttgaggaattacaaggaaagagtaaccatacacagattgggaaaaaactacaaaagtagaggtgttaatatcctcagagagatgagaagacaccactaagaacaggatgttataaaatagtaacaactggcaaccaataacaagctcttaaaaattaaggaaatttccggctgggggtggtggctcatgcctgtaatcccagcactttgggaggccaaggcgggcagatcacgaggtcaggagatcaagaccatcctggctaacacaggtgaaaccccatctctagtaaatatacaaaaaattagctgggcgtgtatggtcgggctttgggagtc

SEQ ID NO: 246487 - DNA, 419 bp, Homo sapiens
catggagataggatgtgagccagagaaggcattaaaatttttccaatagaaaaatactaaagagtaaaaaggtaaagagaggccaggcacggtggctcatgcctgtagtcccagcactttgggaggccaaagtcagaggatcgcttgagcccaggagtttgaggccagccctggcaacatagggagacctcatctctacaaaaaaaaattttattttattttatttattttatttcattttatttatttattattatttttttttgagatgaagtcttgctctgttgcccaggctggagtgcagtggtgcagtctcggctcactgcaagctctgcctcccgggttcacgccattctcctgcctcagcctcctgagtagctgggactacaggcgcccgccaccacgcccggctaatggtt

SEQ ID NO: 246488 - DNA, 151 bp, Homo sapiens
gtagagataggctctcactgtgttgcccagactgttctcggactcctggactcgagcagtcttctcacctcagcctctccaagtgctgttagtaggattccaggcatgagccaccatgcctgctctccacctcccttctgtcgtcttctct

SEQ ID NO: 246489 - DNA, 362 bp, Homo sapiens
gggcttcttatggagacttcattggttgtctgtggttgaggcatgggcatcatgtcaaaatgtgattggaaaggccgggtgtggtggctcaggcctgtcatcccagcagtgtgggaggccgaggagggtagatcacttgagggcagaagttcaagaccagcccggccaacatggcgagactctgtctctactaaaaatacaaaaattagctgcgcttggtggcgcgtgcctgtagtcccagctactcaggaagctaaggcaagagggtcgttcgaacccaggaggcggcagaggttgcagtgagctgagattgtgccactgcactccagcccgggcaacagagcaagactccatctcaatta

SEQ ID NO: 246490 - DNA, 383 bp, Homo sapiens
ggcactgtgagcgctctcctgatttttggttcttatgtaggtgctttttttgtgtgttaactctggtccttgtggggagggtggcggagtggggacacaccatcagtggagccttccatttagccatcttgctccacactatccccctcagttcttaccttcaacttcttcagaggcattttatagcttgtcccattgggttcagctggcttaggcgggcacataaggctctttccgatctggcctcaccagacctcttaagggttatttctcaccatctttcctcagcattagccataatacccaatgacccactgtttctcagcggtggcacattccctctcatccaggggcctgaacatatgctatgctttacctggcta

SEQ ID NO: 246491 - DNA, 791 bp, Homo sapiens
cattaacagattattgaccaacaggcaggggaggttaatatgctccaatgaataaagagccatcatatattttataatggagactaacaggttgatgttgctgagaaaataatatggactttgcattcaatgatgtatcttttcacaaccatatctttgataaacacaatttgggttatactggcagggattaagtagtggaaaatctcttagaagaaatgtgcttctactgtcccccttaccaaaatagaacagatgagccctaatcagagctggtaactgtaatggtgattgctctgaggaccaatgtatataaacatcactatttgaatacctagatttgggcaagtaataaggaggaaagttttgaacctgagatacccagattaaagtaggaccttttgagatgggctaaacagttttcaagtcagtagcaccctgactttcagaagaagcagacagaaatcccctcgctagaatccatattgtatgtttccaggattttaacagactaagatcaggcaggtcacaatcatttttcaccaacttgatgaggaggtaggacattatatgtgagaattaggcaaagcaatgaaactgagaatttaaacacttaaggagttacagatattggagttattaaacatagaagatagagtggctgtatgtacttatttaaagaaataaaagatgaaccacaaaagtgagcaagtaatgaaaaactgttgacagtaatcaggaagatctgaacaagaaccacatggaacctctaaaaatgggaaatattgtag

SEQ ID NO: 246492 - DNA, 356 bp, Homo sapiens
atttttttgttgttgttattaacaaattaaatatctaaagacaaaaagattattgaatggcttctgctctggagtaagaaatctgaataaggttcaatttggttaatatagcttcataccttgccctcttaacatcattaattaatttcccaggctgaatgaaggagagatgggctccctccctcttttctgcatggagcacttctactcaaccatttggaccctacagataccctcttcgccctgttcttattcgttatttccctcctcatataaaaagctaaaatgttatctataatttatctagtttaattgtaaagttaagcaagtgggttttaggaataattaataccatg

SEQ ID NO: 246493 - DNA, 319 bp, Homo sapiens
gagtggcaccaacacacccaggcagacgctcacattatgaaacataaatgcagagtgaacaaagagtgttgcaaatcactcagcttggctagctgctgccaaagcaattcagtactcctcatgaagcctgctctgcattccagaaaacaaaaaaaatagaggcctgataagataaccaggtaattaatgaagcaatttccccttcctgctcacatgcctgtatttattttttaatataaattatcatcatcttaagcaataagtacactatcttcctgtaacctttaagaacttagccaaatggagcagaacaaacagt

SEQ ID NO: 246494 - DNA, 746 bp, Homo sapiens
tggagtacagtggcatgatctccgctcattgcaacctccacttctcagttttaagtgatttctgctgtctcagcttcctgagtagctgggattacagatgtgcatcacaaaaaccagctaatttttgaattttttttgtagaggtggggttttgttgtgtggtccagactggtcttgaacatctggccttaagtgatttgcctaccccagcctcccaaagtgctggaactacaggcatgagccaccacacccagccctttctatctttttgatgtggacattagtgctataaatttccctcttttcttggtttccagtgattattttattctatcttggtgagtcatcagggaaataatcttaaatttacaatcaacatatagtttaaatccatataattgtgtgagaagaaccctttgttatttgaaggtgatgtttgaaagattttctaactgtgccttttagttagtcttaaatttctaattgtagttaaaaacatgccattgtcatttctgacattttaagtatatggtttagaagtggttagtatagttctattgttttgcagtaggttttagataatttgtgtcttacaaaagtaaaagtgaatactcattacttatgaaagaagttagttagcttgcttcttaaactttcactccaacctcacctttgtgttcacgctccttaatctccttagaggtagaacaaagaactctggatgttatctcagactacgagagact

SEQ ID NO: 246495 - DNA, 1785 bp, Homo sapiens
tggagtacagtggcatgatctccgctcattgcaacctccacttctcagttttaagtgatttctgctgtctcagcttcctgagtagctgggattacagatgtgcatcacaaaaaccagctaatttttgaattttttttgtagaggtggggttttgttgtgtggtccagactggtcttgaacatctggccttaagtgatttgcctaccccagcctcccaaagtgctggaactacaggcatgagccaccacacccagccctttctatctttttgatgtggacattagtgctataaatttccctcttttcttggtttccagtgattattttattctatcttggtgagtcatcagggaaataatcttaaatttacaatcaacatatagtttaaatccatataattgtgtgagaagaaccctttgttatttgaaggtgatgtttgaaagattttctaactgtgccttttagttagtcttaaatttctaattgtagttaaaaacatgccattgtcatttctgacattttaagtatatggtttagaagtggttagtatagttctattgttttgcagtaggttttagataatttgtgtcttacaaaagtaaaagtgaatactcattacttatgaaagaagttagttagcttgccttaggtagatagcaagagaagagtccctggaaagtccctggtcagtgcctcatccctgcataacatataaagaagcctggaaaaaatcaagctgcagacactaacaagggaactagcatatgttgttgtgcttgggagacatgcccgtggctgcacagatagaaaaacctctggcccatttggataaaaacttgtagaaacctccagctcactcagataaaggaacaagaacgacctagcatagaaatgcctttgtttggccaggcacggtggatcatgcctgtaattccaacaatgtcggaggcagctgtgggcggatcatctgaggtcgggagtttgagaccagcatgaccaagatggacaaactctgtctttactaaaaatacaaaactagccaggcatggtgctgcatgcctataatcccagctacttgggaggctgaggcaggagaatcgctagaacccaggaggcggaggtttctgtgagccgagatcgcaccattgcactccaggctgggcaacaagagcaaaactgcaaaaaaaaataaaaataaataaaaaaagaaagtacatctcaaaaaaaagaaagacaagaaaaagaaaaaaaagaagcacttttgtctttgtacagtcagtgggctcccaggaaaatgttccttctctttttgttggcatgggcactgtgggatctggtgcattccggtcgacactctcgtttatttggactgtaagtctgacctctatgaataattacttcagcccctgagtgctcccgggccaagctccttggccaaactttcaccttagcttctgataagtcttgggccaagctaagcagcatctatcaatcatcccttcagctcctgattgatcccgggccaaaggcctgggccaagctgagccacacgtttttcaagacagcctgtgaactaggcacgtatccttcccttcccagtccataaaaaccctggacccagcctcgtagagggcaccactttcagacacctatctctgctggcaaagagctttcttctcttgcttcttaaactttcactccaacctcacctttgtgttcacgctccttaatctccttagaggtagaacaaagaactctggatgttatctcagactacgagagact

SEQ ID NO: 246496 - DNA, 694 bp, Homo sapiens
aatgctaagtccaaagtggttaagtgacctgcccaagctctacaatgccctcctgaactcggatgtcttcatttcctgtgccagactcttaaaaaaaataaaaataaataaaaaaagaaagtacatctcaaaaaaaagaaagacaagaaaaagaaaaaaaagaagcacttttgtctttgtacagtcagtgggctcccaggaaaatgttccttctctttttgttggcatgggcactgtgggatctggtgcattccggtcgacactctcgtttatttggactgtaagtctgacctctatgaataattacttcagcccctgagtgctcccgggccaagctccttggccaaactttcaccttagcttctgataagtcttgggccaagctaagcagcatctatcaatcatcccttcagctcctgattgatcccgggccaaaggcctgggccaagctgagccacacgtttttcaagacagcctgtgaactaggcacgtatccttcccttcccagtccataaaaaccctggacccagcctcgtagagggcaccactttcagacacctatctctgctggcaaagagctttcttctcttgcttcttaaactttcactccaacctcacctttgtgttcacgctccttaatctccttagaggtagaacaaagaactctggatgttatctcagactacgagagact

SEQ ID NO: 246497 - DNA, 1023 bp, Homo sapiens
cgcatattctgcacctctctctccttgggggttgatgaagctgttcccgtccacgtatagctcccagtctattgatgcccaaggctggtcctggaggttaggtctgctagagtaaatttgagtccaacacctctacacagttatgctcgacagggctttagctgccgggagcaaggtggtgggttcagggtgtttccagtttagtagatcaatggttgaaaagggctgatagatgaaagtctgttgtcccccccaaccccccggatgtgggcctggtcattataatagacaggtcctcgtgtctccctgagaggcatttgcatagcctctcagatctgagatggcccacttgactatcctgatttccttccttggtctctcgaagctccgatcctccccttcaaggtaaaacctggagcgtgttagctcctgaatctcatttctgagggggttgttggcctcagtaaagcggggtaggctgggatatatggagaaagaatttctgttatctctggcggctcccgcaaaactggcttctcttgctgtttctgggactccctttttaactctgtctgccggcgaagctgctcttttacttttggctttttcgcaataagctgttcaacagggctaaatttatgctggttttgcctatattatatttaaccatgagtcaatataaaggaatttgatctaggtacactggctgccctctgacccctgtcaccaccttaaatacatggccaatagttccctgtctatagttccttcggtgggccatctaacaccaaaagagggcaattctaattcacacagagttcttaacctctagggggttaacttaactctataatctcccacagaacctttcctaaggttctgtaacatgcattttaatagagtaagttttgatgctttgatgactttccttttatttttctttttgaaattttttaacatagttcctagcggagtgggcttactttgtgtctgacctatttttctcttgaaacaaaaaaaatt

SEQ ID NO: 246498 - DNA, 465 bp, Homo sapiens
agccatgcctgtgggcctgaggaactgttaccatccactggaccaagggagcagggagaggatgatgggccggtgtggagagggcctctgactgctgctgtggccacaccatggaaatatggcagagagggagtcagagtgacagggttctggccatccactctctcttttcagtctcttgcttgtgcctccccctgatcacgcccaaccagagccagaggtcctggagaccatcagtgtagtccgtatgggtcagtcccctgggaggactgtgctggatacagaaggtgggaaatggatgtggagggcaggcagagcatttagcaaggagaaattgctgaatggagaatataaaggggatgggaggagaatgaatgatccatgtaaagtcagaaggaagggccttttgcctggtagtgtgctccactgcttaccttccttagggatgaagccatttactgagaa

SEQ ID NO: 246499 - DNA, 237 bp, Homo sapiens
agaggcctctttgaaagcctctgcttgcattaagattcccaactaatgactttaagtctgtctgaaaacttgaaatacctaactgacagaggataaaacttagatccacaacttgactcgacagataccagtctttccgtcattgtcccacataccagcaagcgatctggagcagataaaacgtagaattgaacattttcctcaaattaaagtaaaaatatggcttaccttctcacc

SEQ ID NO: 246500 - DNA, 400 bp, Homo sapiens
atgtttgggaaggatactggtgcaataggcttcctaccatcaccatgcagctagtcttacccattccagctctggtctctgtaacatggggaaagatacccagtttagaccagtatctgtcaagttcactgttaggtctttaggcaagaagtgtcccctttacacttcagtcacctattaaagcaattatttgcatctctcttgctccgcagactgagtttcttaagagcagggcctgtggttttttcagagttgtctccagtggaaaggagtgaagttatagaacactttagtgcacacaaatgtcctaaacttttaagattttaaaaatttaaaaaagatattctccaaaagcaccctgggtagggagcatgttaggcaactgtgctacgatattatc

SEQ ID NO: 246501 - DNA, 457 bp, Homo sapiens
ccggaagataatgccatgtgaaaatgtcgtgaggtgcccattctcactgacagttggcattctgatgttcagtaatcattgcttttctgtagtcaggtggaaagcagaggaaaaaataagtagtgcttgtagaactttttaaaaactgacctagggtaccagctggaagggaataggcatgcagcattttcaggaaaagaagaagaaggactatcagcgctccaactaaaattattagtggatgaccacagataaactctgctgaagaatagaagaagctcccaaacggcaaaggtgtttgtctggtttgttcattgatgtgtacgtggagcttaggacaatacaggcgctcgatggatatttgttccgtgaatgaaattgtcgtttaaacagccaagttgtagaattaaagttattcatgaatcacataaaattattaaatgtgtgaaaaaattca

SEQ ID NO: 246502 - DNA, 404 bp, Homo sapiens
taaaatgtgtgtaacatggaatactttttttaaaaaatggcagcatttagaatacagacctatttagcaataagcactttacttttacttttcaaagataaactaatgtcaagcctatggaattagttgattaatctgtttagtagtcttgtttcaacaggtatcccaacacagactcatccattttcctcccaatagttaaggaaacatatataaagtttagttctgttctcaatctacctctcttctctcatgtattcttgaaatatcaaatgtattgattaggctgggtgcggtggctcacacctgtaatcccagcactttgggaggctgacgcaggcggatcacctgggtcgggagttcgaaaccagcctaaccaacatggagaaacctcatctctacca

SEQ ID NO: 246503 - DNA, 496 bp, Homo sapiens
caggcgcccctaccccagcctcgctgtggccttaccgtttgatctcagactgctgtgctagcagtgagtgaggctttgtgggcataggaccctccgagccaggtgcaggatgtaatctcctggtgtgcggtttgttaagcccgttggccctttctttgactaggaaagggaattccctgaccccttgcgcttcccaggtgaggcgatgcctcgccctgcttttgctcacacacggtgcgctgcacccactgtccggcattccccagtgagatgtacccggtacctcagttggaaatgcagaaatcacccgtcttctacgtcactcacagtgggagctgtaggctggagccgttcctatttggccatcttggctccaaccccaactccttacattttattatggaacatttcaaacatgtagaaagatagctgaatgagacagtgagtatgcttctaatagaatgtacctgtcacccagcttcagcagttaccagct

SEQ ID NO: 246504 - DNA, 159 bp, Homo sapiens
tcctcacatacaaaaaaatagcaaggtaccttaaaaaacatctcatgtatacgtttacagattaatacacatataccaggaaaaaataaaagctgtaatgttccaaagcatcggtgattaaggaccaatgagaaactaagataaagcaattctgaactt

SEQ ID NO: 246505 - DNA, 1332 bp, Homo sapiens
tgagacagagtcttgctctatcacccaggctggagtgcagtggcgcgatctcagctcactgtaagctccgcctcccgggttcaagcaattctcctgcctcagcctcctgagtagctgggactacaggcatgcgccactacgcctggctaatttttgtatttttagtagagacggggtttcaccatgttggccaggatggtcttgatctcttgaccttgtgatccgcccacctcagcctcccaaaggcgcaggctcagatgtgcttatttctttcaactttttttttttaaatggggaagagcagagttcatttgggaatgcttatacatagggattggattgttcatattagtagtaaaaaatgtaggccttattctctacattaccaaatttttaaaatattactatatggtaatcaatgccaggtacagatttgttggttccccaaactgaattgatatcagtatcacagtggagtcttttgaaaattaaagtccaggattaaattatatgttgtcaccattcaccaccactaccaccctcccccaccaatctctcccaccggttaaactcgtcttctaatcctgtagaatcacatgaactaaatgaagaagtaagaacttgaaggctcagactgacactgttacaaactagcatcttcagatgcatggtatttactttaaatgtgcttatatacagtgtagagaagctcttgtataagaagacatctatgctagctaacttagtagtagtagagggaacatattcagtgagctgcctttatatctgtagtgtcggagacttgttactggttcatttgtggttatcagttgaaggttctgttcctgagatgtgcaatagtagtgttgaaaggtattgtttaatagtgatggggaacagacatattggacttttttttccatattaaattatttagtttgcatgcctgtttgaaattggacctctcagcagcactttgaaatagttttaattaggttaacattttgtacattaaataagtagatatagatggttgatttaactagatgtgttaaattttgaaagcacaaaggtattttatctttttgaattaaaggagaaaagccattgatttgttttcacagacagtatttttaataattaactgtctcagcacagaggtaccttggaaccaagggcaccattgaaactcagttgaagcaacttcctagtaaaccattttagtgagtcctttttgcataaatctatagcctctcagaggtgtgaggctgtcacagattggtgatctgctatctctttgagatcaactaatttggagaagtgtgtgtgtgc

SEQ ID NO: 246506 - DNA, 1252 bp, Homo sapiens
tgagacagagtcttgctctatcacccaggctggagtgcagtggcgcgatctcagctcactgtaagctccgcctcccgggttcaagcaattctcctgcctcagcctcctgagtagctgggactacaggcatgcgccactacgcctggctaatttttgtatttttagtagagacggggtttcaccatgttggccaggatggtcttgatctcttgaccttgtgatccgcccacctcagcctcccaaaggcgcaggctcagatgtgcttatttctttcaactttttttttttaaatggggaagagcagagttcatttgggaatgcttatacatagggattggattgttcatattagtagtaaaaaatgtaggccttattctctacattaccaaatttttaaaatattactatatggtaatcaatgccaggtacagatttgttggttccccaaactgaattgatatcagtatcacagtggagtcttttgaaaattaaagtccaggattaaattatatgttgtcaccattcaccaccactaccaccctcccccaccaatctctcccaccggttaaactcgtcttctaatcctgtagaatcacatgaactaaatgaagaagtaagaacttgaaggctcagactgacactgttacaaactagcatcttcagatgcatggtatttactttaaatgtgcttatatacagtgtagagaagctcttgtataagaagacatctatgctagctaacttagtagtagtagagggaacatattcagtgagctgcctttatatctgtagtgtcggagacttgttactggttcatttgtggttatcagttgaaggttctgttcctgagatgtgcaatagtagtgttgaaaggtattgtttaatagtgatggggaacagacatattggacttttttttccatattaaattatttagtttgcatgcctgtttgaaattgagagctcatgaatatagatggttgagtgtatcagtcttcaaagcatttaaaacatacttttgtttttgttttatcagtgcaatttgtttttgaagacgccggaaaactatttcatttaacctgagcaattaaaacgtgtcaaatcacagctgtcacagttaggtttgataaaattaattgttagcatccttattactgggccagctgtgatatttctggatttgactatgcactggctgcaggaaaacatgataaaatgtcaattttagatctctaactaaagaccgttagac

SEQ ID NO: 246507 - DNA, 605 bp, Homo sapiens
ttaggccagtgtggtggcatgcgcctgtagtcccagctactttgagaggctgatgtgggattatcacttgagcccaggtgttcaaggctatagtgaactatgatcacaccactgcactccagcctaggtgacagagcaagaccctatctcaaaaaaaagaaaaaggactatgacagcaaggcaaaggaaacatctaactgcttaggggagttacctacggttttaaaaaggaggtaataaggagaagagaggagagcatgcacaaaatatgagcaaatagaacccatcaaacttgagaaactgaaagtagttccattgaatccacaagaatggtgggaaacaaaattcgacatgtaggataggatcaaatcataaaaaatcttaacacagcagaactatcccaacatttcagtggctctcaaaggaaggccctgaaaagctggtggctgagcaaagcttaaggagacaactaatagaggagaaagatatggttctgctaacagcacttcagaatatttgaagctttattccaagtagctaattaaccactgccaaaataaagtaactgggacaatctttccttacttttataactagcccttatt

SEQ ID NO: 246508 - DNA, 382 bp, Homo sapiens
tagccccttctcagggcaggtctggttctggtcctcggggctcccacagaagtaaaagttgagcccctttcaagagtcactgtcagggggttggggacaatggctcacactcagcattttgggaggctgaagtgatggagttgcttgggcttagaagctcgagaccagcctgggcaacatagtgagacccccatctctacaaaaaaatatacaagtagctgggcatggtgattcctgcctgtagtgccaactattctggaggcttaggtgggaggatcacttgagcctgggaggttgaggctgcagtaatcatgccagtaatcatgcactccagcctaggggccaaagattgagaaacagcctggctcaaaaaaaaaaaaaa

SEQ ID NO: 246509 - DNA, 944 bp, Homo sapiens
tctccctctcgcccaggctggagtgcagtggcgcgatctcggctcactgcaagctccgcctcccaggttcacgccattctcctgcctcggcctcccaagtagctgggattacaggcacccgctaccatgcccggctaatttttttgtatttttagtagagacggggtttcaccatgttagccaggatggtctcgatctcctgacctcgtgatccgcccgcctcggcctcccaaagtgctgggattacaggcgtgagccaccgtgcccagcaaaacctgctattttcatttactgtatatattctttgaaaatctgaacctggatattaagtaaagggtaaatttcataaaaggcttaaagtgaatctataggaaacctagaggctatatatcttgatatatttaagtattacaagaagtctttgcttatactttcaaaattaacaaactatcaacaggatctactatgtgtgttcaggcatgtaaagtgctcttttttcttcagagggagggacctctgatgctcctcctggagcatccttgatgaagcatgcagaaaaagtaacagtgcatttccaactaactggtctggaaaggtggtcaatatatcatttaaaatagacatttcaaactgtatctatctaattgccctattatggtaaagcccaaagcacatcacagttgtactttatgagaatatcagaatctctcattccaggaaactaccttagtcttttattttagaacattactctttaaaaacaaacaagattaagtttttgtaaaaattaaaatctgactagagcttataataatttggaaggtcacggaaattctagatatatatgtttagtaaatggacttctgcttgtctaaaaataaatggaagtgcactgtatcttttccaaatgaatgggtacataattggcgggcaacctactcacc

SEQ ID NO: 246510 - DNA, 257 bp, Homo sapiens
tatttcagctttaaaactcaaattttgtgtacattttatagtatagaaattagaattataaaatgtattcacatatgcacatcattgagcttcaacagttatcgacttagggccaatcttatttcatctatatttcactcgctacaacttgcccactccttattttggagctattcacagtcactgtatcatttcatctgtaaacattttagatgatagaaccttaaatgatggaaccagtttctagaggtttgatt

SEQ ID NO: 246511 - DNA, 145 bp, Homo sapiens
agacttcctggaagaggctggatttaaggatggattttaatgaaatgttacttttggattgatcaagaggaaaggaaagagcatttgcatatcaggttcagaaatatacatcagaacataaattaaaaggaaataaaacacacta

SEQ ID NO: 246512 - DNA, 431 bp, Homo sapiens
aggctaaccaacttgcccaaggttatacaatatgtaacgggcagaaatagaattcaaacccaggtggtccagttacagagttttaatttttaaatatctaattccttttcaattctttctttttaaatgaagctaaggaggaggtctcagtttgttgttactgtttcttttatgtttttctagtacttgcttctctcccattttgacaaagacatagtatacctcaggtctagaaacaagatgtgattcttggtaaagttcctgtactgtacatgaagtggtatatcacctgaaggaagaccatggtaagttaaagttaaatactataaatcctaacacaatcctgtgaaacaatgagttgtagctaagaagccaacaaaggagataaaatggaattagaaactatacttacttattcagaagaaagcata

SEQ ID NO: 246513 - DNA, 386 bp, Homo sapiens
ggcacaaaagaatgctttctgagcatgcctccagctgaatgcaagtggacagtaacctttggaatttgctgcctgctgacaaaacttttaaattaatcctggctctggaaagtggaagtcctcagagtcctcattacttcatgctacaaaaatacaaatgcccacagaaccagaaatgagcaaagaggcagtttggcagtgagaaggacatgggtgtggaggtgaatataagtaagtagctaatatcatctcaccagtgggagcccagtatgtttggaagccggaacacccacgtgctcagatctcttcttgggatacaggggcagatgtgcacaccagaatgacggaagcttcctttagcctttgagaggagcttggtctccagg

SEQ ID NO: 246514 - DNA, 345 bp, Homo sapiens
ggtggtgatatggaagacagtgtctggcccaaagtggggagtgttagaaactttgtggggagtgagcttcgtccacttttgggaatttggcagcagagaagctgctgtggtcagcccaggtgtgttacactgagagagagggctcagcaaactggagatcgcagactcctgctctctcaggggatagtgcagagggcccctgaaaatgtgcactagggccaggcacagtggttccgcctataatcccagcatgttgagaggccaagtcaagaggatcacttaagtccaggagttcaagaccagcctaggcgatataggcaagcctcctcatctctactaaaaagt

SEQ ID NO: 246515 - DNA, 453 bp, Homo sapiens
atccatattttttccttggaaataattattttcattttgctggaccacgttttagagagcctcacttctgttgatttgattctgagcaatgtttctgagctggactgaccacagagtaagatcttaccttattcatggctgtgaatcatattgagccatttgtcttagctgtcatgcaatttgctaattaggtcattctaggggttgagggaaatgaaagactttgaaataatcattaccttctcagaacaaagcagcagcagttaaatgcttttgcccagtcattttactctgatgttcaataaattcagaagtggaaggtaagttgggatcttactgttgcataattatgctttccagtttatctgaagattgtgcagaagatatttaaatcagtgtcttacacagttataagttgtatatttctgtttttcttattacattttttatcat

SEQ ID NO: 246516 - DNA, 330 bp, Homo sapiens
aagcaattatatagcatacaagcaagtaacttacaaagacatagagatctataaaatatacataactataaaattcatgtaacagcattacaacatataatttaatattttaacattttcaaaaggtcttttagaattacaaagactattaagcataggatttcaaaagtcagttgtgttgtggatgtttgaaatgtcacttctcttaaatgctcttttattaagtttaacactaaataacagattttactataccaaaatcaaagaagaatgcaggcagtcaggcaaatccaaaagcagaatgatttactgtgtcaccaattctaacaa

SEQ ID NO: 246517 - DNA, 334 bp, Homo sapiens
tgcttcaaatcctttggattctgttactacacttcatcctgatatcaaaactaataatatgagtattggttcaccttatccaggctttgcaggagagtccaagtggaatcttagtggaaacttcgtttcccaagtagaaacttagtttctgacacgtcaccactactctcttttgaatccagcaactgcatatttttgcgaccagcaaagtctgagacaggcccattattttccccttgaaacagccaggctgcagccttcctccaatgcagggaaacacagtgatgaatagaacataattattggtgttcattataagaggcagcccaaacta

SEQ ID NO: 246518 - DNA, 621 bp, Homo sapiens
atgtggatcacacttcccttaaggacaaccagtaaatccatataaaaatatgaaatcagctggaaggcattagaactgtcaaggtagtacagaatactagaacaagatccaagaaatgatctaagtccagtgaggtgaaccaaagcatctagtgggctttcactttcagattatttgcttatctggaagaggcagctgagggtactgaatggcatttttgatagcctcataggactagagagaagaaagttggaatcagagactaagggttgggaccttggtactttgaattatacccaaaatcaactacattctaggaataaaggtgaacttgtagtaaaccagcccttccacagactgtagcccaactgcaagtcatctggttgacccagaaaaatctcaatacctaaaactggtttgtgatgaccaacaattattggagctcccagatagctggcagaagcaaacaatgattctctctagaagaggagtaccttcggccgggcacggtggctcatgcctataatcccagcactttgggaggctgaggcgggcagatcacgaggtcaggagatcgagaccatcctggctaacacggtgagaccctgtctctacccaaaa

SEQ ID NO: 246519 - DNA, 450 bp, Homo sapiens
taaacctcttctctttgtgaattacccagcctcatgtatgtggtttttttttttatagcaacacaaatgaaccaagacacagagggcacaatcatgacagaaattcttgttccgctctctgttttaatttagaggttgataatatccagtattggtgagcatacgagaaaacaggcatccttaccttgtgtgtgggaatgtggattaagggtttttggaaggaagtgggcagccttttcattttaaatggacattctttttgggccagcgtctcacttttagatgtctgatctacataagtatttgcatacatgcttagatatgctaaggttttccctgtagtattttcaaaggcatttttgcagggtaatttaaaaaatcgtggtaaagaaaaacaaaatttaccgtcttaagcatttctaagtgtacagttagcattgttgaatagca

SEQ ID NO: 246520 - DNA, 451 bp, Homo sapiens
ggccatatttttcaaaaagaaggtcactacagggacagctgcttttagtgatgcaagccagagttttgactatttggcagaatgcttcttaagggccattattctatctgttgtttctcatgtgtcgatttggtgattctgcaaatctcaactttcagctctctaaagtctaatgggccttgtaacttgtcattttccctgcatggattgtctactgaggcaagatgtttggcgagaagtaaaagactttctaatggtcccataagactggagccaaaaagtatttgttgctaactctctcttgacaaaagtcagttcttagtccatctgttcaccatttgttaatttgcattggcttgaaacctgtttacaggtgacatgctattgtgaggacacttagaaactattttaggcattagggcaatcaacagactgttctcatgccaaaaaa

SEQ ID NO: 246521 - DNA, 810 bp, Homo sapiens
acatttacagagtcaaagtaaagggatggaaaaagatattccatacagatggaaaccaaaagcaaataggagtagctatacttatatcagataaaacagatattaaatcaacaatagttaaaaaaagacaaagaaggtcattatattatcataaaaggatcaattgcagaagaaaaatgtcatttctaaatatatatgcatcgaataccacagcaccaagattcataaaacaaatacaactagacctaagaaaagagaaagacagcaatgcaatcatagtaggggacttcagtactctactgacagcactagacagatcattaaggcagaaaatcaacaaagaaactctaggcttaaattggactctagaccaaatggacctaacagacatttacagaacattctaccatacacctgtagaatattcattcttctcatctgcccatggaacattcttaaatgaccatatgcaaggccacaaggcaagtctcaaaaaaattttaaaaattgaaataatgtaaagtaccttcttggaccaaagtggaataaaactagaaatcaataacaaaaggcaccctcaaagccatacaaatgcatggaaattaaataatctgctcctgaatgattgttggatcaatgatgaaattaaggtggaaattttttaaagttttgaaacagatgaaaatagacacaacataccaaaagcatttgacgtacagcaaaaacagtgctaagaggcaattttatagtgttaacagcctacataaaaaagatagaaagatctcaaattaacaatgtaacattgtacct

SEQ ID NO: 246522 - DNA, 583 bp, Homo sapiens
acctgtatttgttattgcttctcaagaagtgaggcagtgagtctatcagttgaattttctaatggggtaaaagttactgtaaagggtattaaattaggtttgcctatgctgctagttaagtctcaacactaagagcatcctgcttctgaattacctagcacttatgtaactcaggagtagttcttgtattctttgggactagaaataaagatgagttttagactttgttatgccagctgtgcagtaaagggatctaccaaaagactccaagtagaatgtttaacttccggatcagtggagggggaaaatagaagaaaacttagttgattgaaaaggagaaaaaagaactttggaaattcaaattaaatagaaacatagacaataaggtagttgtaataaattcagatacatcaattatcacaagaaatgagcttaagctcattataatcatacatagatcagatttttaaaaatctagctatatgctatgtataagagacactaaacataatgacaaaaatgttgaaagtaaaagaaatctacagagggtgggaatgatggaaaacaaattttttaattttta

SEQ ID NO: 246523 - DNA, 492 bp, Homo sapiens
aacagatttcttcactgtttccgtgcttcccacttagcaccaaccagagaaagctgaatacactccctggccagttccataggatgttccgattccagctactcgcctccagtgtccccagacagcagcctccggcagggctcacctgggaccttccgttttctcatcataaatccccagacccctgcctttgagtctctgctggacacacaccctggagccctgcctttgagcctctgctggacacacaccccggacccctgccgttgagcctgtgctgaacactcgcagtggtgaccgacgcccccaccacagcaagccccgaatacacagcctctgtgtgttcccactgagttggtctttgtttattttcacacttaaattacacactataaaaaaaccacagttgttaatattgccacccatctcaccaaaaaagcctctatatattgtaaaactgtcaagctcaaggtgatgaataaaagtgaccca

SEQ ID NO: 246524 - DNA, 397 bp, Homo sapiens
tgcagtccccatccctgtatactctccctgaccaggcttctccacagctgccaaacttctggatgaagaccacctgggctcctttagaatgtctatgctgctccgtggcctgatccatgtcagtttttggccaccttgctcctcaaggtcttgctctgctccttcttggcatgaaccattgtcctactaaaggaagtcccactttctccccatgacttgcaacaccagcagacaacgttatccttcagaaatttttatttctggctttttattattctccttgaccattactccctcactcattcagtttttattgtatgcctcccataaggcagtccctatgccagatgatgggacataacagttctaaaaataaataaaatcctagcagactaca

SEQ ID NO: 246525 - DNA, 478 bp, Homo sapiens
agagttagtgcattttatgtgtggcccaagataatttttcttcttccaatgtgactcaggaaagccaaaagattggacactcttgcattattatttagattttttggtcaagtggttgtgtatttatctctgctaaatattataaggtgtcaagattttgcatgatgcttataaagttataaatgcagctgaaaaggaaattatctttgtgcaattttttgataaataaggcatttaatattgttggattaatgaaaacagctaaatcctgagttgtttgcaaaacacacacacatacacacatttatttaactttaaggttcttacttaggtataaacacctgaaattcacaggttataaaaatgtttaacagggaaataacttcaaatgatgactatcacaattttcataagtaatctacgtaaactactaaaaaattaattaggcaaatgtaatggaataaatgcttgtaaataa

SEQ ID NO: 246526 - DNA, 717 bp, Homo sapiens
gagggtggggggcggtggggggttggccctaaggaagaactgaggacggaagtagctttgctcccaggcaagagctgaagttcccgacccctgggaggagagggccaggaccctaggcttggagctggagctggggtaacttccagggggagataaagacacagctacccgaatggggaagccctggctactcacagctgttaaaggagggggggcagagaaacgtttccccaagagcctgagcccagggaggtggcagctctgccaggggcccaatgttggcggctcctgtcccccacagcctccaggacgcccctccgtcctctgcagcaccttcgtttacaggtcgtcttttctattttacacctgcatgtcctttgcatttcagattctttagattggatgcatggtcacgctgggaccgagaagagccactcgacagtgtattccccttttagcaataaagtaacaccatttccttctcacaggctgcctcctagcccccaacccacctatgacatccactcgtctccagtcctgccctcccacccccaaaaactgggtccactgctaatttgtcaaaaaggtaattgtttaaaaaaaaaaaaaatcccaaacagaaacagatgggaatcctgtcctgaaatgtctgaacacctgactgttgacacttgaacatttttatattataaataaaatcagaaataactcctgttt

SEQ ID NO: 246527 - DNA, 577 bp, Homo sapiens
gagggtggggggcggtggggggttggccctaaggaagaactgaggacggaagtagctttgctcccaggcaagagctgaagttcccgacccctgggaggagagggccaggaccctaggcttggagctggagctggggtaacttccagggggagataaagacacagctacccgaatggggaagccctggctactcacaggtttacaggtcgtcttttctattttacacctgcatgtcctttgcatttcagattctttagattggatgcatggtcacgctgggaccgagaagagccactcgacagtgtattccccttttagcaataaagtaacaccatttccttctcacaggctgcctcctagcccccaacccacctatgacatccactcgtctccagtcctgccctcccacccccaaaaactgggtccactgctaatttgtcaaaaaggtaattgtttaaaaaaaaaaaaaatcccaaacagaaacagatgggaatcctgtcctgaaatgtctgaacacctgactgttgacacttgaacatttttatattataaataaaatcagaaataactcctgttt

SEQ ID NO: 246528 - DNA, 526 bp, Homo sapiens
gagggtggggggcggtggggggttggccctaaggaagaactgaggacggaagtagctttgctcccaggcaagagctgaagttcccgacccctgggaggagagggccaggaccctaggcttggagctggagctggggtaacttccaggtttacaggtcgtcttttctattttacacctgcatgtcctttgcatttcagattctttagattggatgcatggtcacgctgggaccgagaagagccactcgacagtgtattccccttttagcaataaagtaacaccatttccttctcacaggctgcctcctagcccccaacccacctatgacatccactcgtctccagtcctgccctcccacccccaaaaactgggtccactgctaatttgtcaaaaaggtaattgtttaaaaaaaaaaaaaatcccaaacagaaacagatgggaatcctgtcctgaaatgtctgaacacctgactgttgacacttgaacatttttatattataaataaaatcagaaataactcctgttt

SEQ ID NO: 246529 - DNA, 322 bp, Homo sapiens
aaatcttgtcaaaccaggaggctaaatagcttcacaaatgtaaaacacaccaggccatttcctctaaacagaccttaaagggttaggccacgtgggtcacccttgtccaaatgagagccgacctgggggcctctcacttgtacagatgtggtacttattattccattgcagtagctttgcttcaggttgtagtgaataatgatatcgttttgcataattccaaattagagtgtgtgtgtgtgtgcctgtgttcatgttccaaacatttccaattacacttgtctgttaaacacttgaaagaaaaaatcaagagacaattcta

SEQ ID NO: 246530 - DNA, 410 bp, Homo sapiens
ttttttttgcgacagaatctcactctgtcccccaggctggagtgcaattgtgcaatcttggttcacggcaacctctgccccctgggttcaagagattctcctgcctcagcctccccggtagctgggattgtaggcacacaccaccacgccctgaataggctttatcctgctatcttccactaaacaaaaaaagaaaaacaatccttttcccttgtttcatcttctaacattgatttgaactaaaggaggataaagaactcaagaaaatgtaagtggcattttatcagtgataatctcaggcaggagcaatagaaaaacacaatcagacaaaggttcttttgtggacattcaagagcaagaaggagagggaactatggccagctgttctgggggtggagggtggagaggga

SEQ ID NO: 246531 - DNA, 477 bp, Homo sapiens
gtcatggccccttgaagattctttgaggaagtggctgttgagctcccaaccccagggctggagcaggaggatcagacaccccggcctcagccccagagcatgaaagccctccccactcacccagctgctctgcagacccacacttgcacacaactccatgtgccactgaccagctctgacctcgtcctgggcaaggctggcggggcctagacccaaacccacaacagtgtgtggctcccagggaggcagcgtttcctgggcaccagctctttagagaatgccttcagaagtccccatccagcctctcccctcatgaaatcctgtccttgaatcatccagcctagccccctgagtagctgtgcatttccgagaccccgaatccataatattcatatgaatgaggtggagggcagggagaatcgctgccatttattcaacccttaataaatgctgggggctgcacaaagcaaaaataaa

SEQ ID NO: 246532 - DNA, 673 bp, Homo sapiens
caaataccaaactaaatttattttgctaagagaaattgatgaactaaaagagaaataagtacagtctaaatttttagatatatggggaaaaaccctgagattactaattgtgtatcacagtcctcttatgtatatcctgaaaatgatggtatcaatataatacgtacagtggatttacattttaaacttgatctattacttttgaatatttgtcttacactgaaaataaattctgacatcttcaggaaaccaatatgaataagctaaatattgacttaaaatagttaaaccccttaataacttccttcaaataatttctattatttcactgcttaagttcagcatttgaataacaaaggtaacataagtacttaagatctcaaaggcccattacattctattaataatgacaaaacaacatatttactgaaaatagtcttttttctttgccttccagttttacactttttaaaaaacacaaaattggacaagatcaaataactaggtggtaaaacactgactttaaaaaattacatctttaaacccatgagaatcataattctaagtatggccattgggggcaacttataaacctttgaccctttcttaacactatgtgactgatttttcacaaagtggttaacagactctgaggctccaaacatgtaaacaa

SEQ ID NO: 246533 - DNA, 588 bp, Homo sapiens
gatgtggctgagagaaaaatatttgtgctgtctgtcctaatcttcatttccttgtagttgtaaaatgtttcatttgttttattccagtattataagttgtgcccatgccttgtcaagactataaaatttttgatatcagggagccttgtttatctttgtattcttatcttgccacccccttcattgtcaacttgtctgccagattggtaccttgctcatagtaagtcagtgtctgttgtatgttgatccgtttgtcctttgaccatccagatctcaacctgactgactgtatgggtggtagagtagcttaaacaaaggcatgccacaaacagctaaatatggatacagaatccaagagcatcaaatgcagaacatttttcagatatttatagcctcaaagcaaagtcaattggctgaaaaagctcagcagcatagcgaaaggaaacgggagtggcaaagccagcctcactgtctgtgctttctggtaaacaatgagaacattaaaattaaatactttaccatgaatggatggggagtgtaggacactctgggagaaatttaagatcccaatctctaggattgcctgcg

SEQ ID NO: 246534 - DNA, 354 bp, Homo sapiens
ttctttaatgagtcaaattagattagacagatacctaaaaggcgttcaggaaagcattcgttgatacataaaatgtagattgattgagattaagtatagatcaacaccccttctccacaaagatcaacataaataaaaattccatataccaagaaagacagccaaatccttcggaggtttgcgtatttcaaactgtaattagtaacacaaaattcctggatgtttacatgttataagattatgatatatgaactctggagccaggctgacctggtataacagcaacattatttgctagttgggtgattcagctgcttatttcatgcacctaaacctgagtctcctcatttgtaa

SEQ ID NO: 246535 - DNA, 788 bp, Homo sapiens
ccatgcgagtgggagagccaagaacccagtctccgagcgggacaccacggattgttttatgaaaatggcagctgggacgtggaggaagagccacctgccagttggactggagccacaagctgcactgtgaacctggtcacttggtaccaatgccgtcagcccgtgggtatctgaggggacctgccaattggactgccaaattccccagtttgctcccagatattatagaaaattatttgtataaataatgtaaagaaaacacacctatggcaaaaacatatacatgttctttagcacagggtgaaatcataactggcgtcatctaaacatttcctcaaagatcagccaaatctaggtaaattctggtaaatatactatattcaaccttaaagcttaccaccattacatgcatggctatggtagtatggtatcaacatctaaactagtgaatctaacacaggtaagaattttaaaatgcccccagatgacttcaaggccaaatttctgctaaggtctccacaaaatggctattttcaaatatagcatattgtgactgggttttctgaggtactttcccccatactttttttgttctgggactgggggctgtggaagaaaagactgctttgcaatgctgcataataaatatggttttaaaagtgcaagtgttacaaatgtcttccctaattaatcacactcctatataagtgaaaaggtaatctgaaattttggtggaaaattacttctgctgaaactaatcttaaggttggacttctttattcattagt

SEQ ID NO: 246536 - DNA, 380 bp, Homo sapiens
aacatatatttcctagctctctactaaggggatctagaatcaatgatactctagtaagaaatgagcacacctaccacccagattctatctcctaactgttatgctccactaaaagaaaccagagattcttgggagaaatggctaatccagggctggaacaaagaaagtacaagataggcctggaacatattgtgccaaatagaaagcaaagaagcactgttagatagaaagcaatgaagcaatgtcaaaaggacacacaaacccctgcttgaaggtactcccactggccatatatggaacaatttgatcataaaaataaattacaataatagattaaaatgtactgaataggaatccatgagtccatgctcatataaatg

SEQ ID NO: 246537 - DNA, 553 bp, Homo sapiens
agtatcagtacagattttagattgcctcattgttttttcattttcttaattcaaattgctgatgatgttttagaaagaatcaacaactttggccaggcatggtggctcatgcctgtaatcccaacacttttgggaggctgaggcaggtggattgcttgaggccaggagtttgagactagcagggccaacatggtgaaaccccatctctactaaaaatacaaaaattagccaggcatggtggtgcatccttgtaatcccaacttcttgggaggctgaggcacaagaattgcttgaacctgggaggtagaggttgcaatgagccaagatcacaccactgcattccagcctcagtgacagagcaagactttgtcaaaaaaaaaaaaaaaaaaataacaactttaacaggactctgatggtcaagaaccttagtgctgactgcaggagaggccatttaaccttaaatagctgttattccatcaaaacaaaaggcttatccttattataactttggcaaagctagaagggccaaggagaagtgactaagtatttgtta

SEQ ID NO: 246538 - DNA, 510 bp, Homo sapiens
gcccagggattaagtgttgaaatgacattaggtaacaggtttagagacagtaggaaaggtgtaataatagaagattggagacagatggagaacatttctgggatctagatttcagtactgttacagtaatggttgatgacagattccaaattatagataacatcaaaatagaaaataggtaatagttatgagaataaggatgttaaggaagtgtgaagctaaactgataagtgacagtgacacagtaattaacatttatgaagccaggttttttggcaagcctgttatatatgttatcttattaggtcatcataataaatcacaagtagatacgattacctgttttgcagatagagaaactgagttggggtagaggtgaggtgacgacacagagatagtggttattgggaactacagttgaagaaggctagaaatactgattaactttagtctgtattttaaaaacataaatctaaatataagtgttataaataaagagaataaacacta

SEQ ID NO: 246539 - DNA, 410 bp, Homo sapiens
tgccgttctgctcttgttgttgatgacacgctgagtccctgacctggctaagctccctcactaagaaagatgtgattttggtcacagaggagaccaggtgagggacagcaggcacagatgacaacacattattatcattcatttgttcactgactacccaagcaattggagtctgttggattccatgtgatggagaagtcgggaggatgaaagcctgcgtatgcctccagaggctccctaccaaatgatttttaatagtctgtatccctcccacaaacacagttggttactctactgggcaatgaagtttaaaggttggagaggctccaaatctgggcacagagaaatctcagcttaattgtcccaaactattaaaaaaaagacaacaatttgttgccagtacctggcgg

SEQ ID NO: 246540 - DNA, 333 bp, Homo sapiens
atgcaagcagcatcccctttgccaatacagacagccacagaagcactaagaaacattgcacccactcttctcttgggagctttatcttcttgtgcatccacttccttgacttacccctcatgtttggatatgaaaagattcactgtgcaatctgattgtacagtgcggtgtgctgtgatttcttagaccaggaaatatcagttgcttccttaaaattaaggcttgccatgttaatagtagccgtggtatataaagtgtcaaatgcattgcacatatcattttcaataaattcctcagaccttaactgttgtaagacctaacaagaaaaaaaaa

SEQ ID NO: 246541 - DNA, 237 bp, Homo sapiens
taatagcagcctgaccccatgggtgagtgtgctcctgggggtcaggacggtgatcttacagaacctaatgagggggcaggtgggcacgggaaacagctggatgcctgcaaagatgatcctgggatgagtaccctattctcacttggcatagcaggcacagaggcagagcagccctggttcacccaaccctgccacaggcagccatgtaaacttgaataaataaatccctttgcctca

SEQ ID NO: 246542 - DNA, 909 bp, Homo sapiens
ggtctagagtaacagtgtagcctaacagttaagttcatggctgatccaaaaggctgctagagcacacagctccaagtgcctccggagggcaactccacagaacatcacaacatggtgcccctagaattataccacgtggttgctctgcctacccagcactcaaatcatgctctatcatgagagctttgtggccctgggcaggttgcataccctttctctgctcagtttccctacctataaaatagtgacactgcttcctgcagttgttgctggcttgaatgagtgaacacgcatgatgcccttagcatagtgcctcacagaaccagcacttaatacatctttttaaattccattttgttgttattacttggttttgtttctagggcccactgtatacatagaactaggggtttcttcatcaattcaggctgccataacaaagtaccatagactgggtggcttatagacaacacaaatttatttctcacaattctggaggctggaagtctgagatcaggatgccagcatggttggggtctggtgagagtcttcttctaggttgcatcagtgccctttgtaaaggcactagtctcatttgtgagtgttgagtgctccaccctcacgacctaatcacctcccacaggcccggcctccaaataccaacacatattgggttaggatattgaaatgaattttaggggcacacaagcactcattccgtaacaagggggtaatggaaagaataggacaaagacacaaacgaaggaaagggaacagtgagagaaaggcaagcttgcaagatcatgagaggaaaacttgtgggtccttaaattggccaaaatggatgcgcttgctttgtgcccatcaaaatggggtctcctcctgctcccagcactgtctcctttattc

SEQ ID NO: 246543 - DNA, 529 bp, Homo sapiens
actataagacttacaaaagaagttaggagaaggaaaatgtcctggacaactactctaaatttacattaccttataaatgtactgaaatgttaactcagcatgaaataattgagatttgttattgttttgtaaagatgctaaataagaggggaaacagtacttcagagaagacgtctcttcatctgggcacattgcctaaaaagctgaaaattatcaacagatattattctaaatgggatttggaaaagaagaaattttgcggattaaattccaaatgaaattaagattactgtgggagagaaattgctgaatactggtctatttcacctactttcttgattagcatttgtgtttgacctctttatcatatttatacatttctattttctattaggtttttccaaaaaattgttttatagagtttttatgattttgacagttcaacatttatattccaagcaaaagtgataatctttttcaagcgtgtgttactaaggtcttagagaaaataaacccagtcatttgatac

SEQ ID NO: 246544 - DNA, 781 bp, Homo sapiens
ttttaatttcatttggttctgctctaatctttgttatttcttttcttctgctgggtttgggtttggtttgttcttgtttctctagtttcttgaggtgtgagtttaggctgtttatttgtgctcttagactttttgattgtagacacttaatgctatgaactttcctcttggcactgcttttgctgtatcccagaggttttgatcagttgcatcactattattgttcagttcaaataattttttaatttccatcttgatttcattgttgacccaaggatcattcaagagcgtatcatttaacttccacgtatttgtataattttgactgttcctttcggagttaatttccaatgttattccactgtagtctgagagagtacttgatataatttcaattttcttaaatttattaagacttgttttgtggcctatcatatggtctgtcttggagaatgttccatgtgctgatgaaaataatgtatattctgcagttgttgagtagaacattcggaaaatatctgttaagcccatttgttctacggtgtagtttgcgtctgttgtttctttgttggctttccatcttgatgacctgtctagtgctgtcagtgtagtgttgaagtccccactattattgagttgctgtctatctcatttcttaggtctagtagtaattgttttataaatttgggagctctagtactatgtgcacatacatttaggattgtaatatttttgtattgaactacttcttttatcattatataatgtccctctttgtctt

SEQ ID NO: 246545 - DNA, 448 bp, Homo sapiens
tgctggcggacccctgtccctccataggcagtgcaaagcacggccgttttcttttcaaagccaccaggggagtctttctctctagggtgccgagtcttatataaccaggatgacatgggcaagccgtggcttccttcacctttgccgccatctctcagttgtaagaaggcacttaggggagaggaccacacgaagcctgggccaccgggagggtcaccctggggactgttcaacacagctgatgccagttcagcgcctcctcagggccctctctctaagcactggcagatatggggcaacacaaagtcactttcacctgccatttcccagcaccgcgggtcccttgctcatccacctttgacatctgctggcagatacatggcaaggttggtgacctcttgaaataaaaatcaggagtggccactccagataaatttcttctgtaact

SEQ ID NO: 246546 - DNA, 448 bp, Homo sapiens
gcacataaatgagatgttccagtggagaatgtgtattctctgggtggactgttatcctgttcagtgcataatacggaggcaatgagaagagattaggaaccacagagcctcacttgtgaaagtcataaggagtaggaatttttaaagtgccatcccatctgccacctacatttcttttttccatagggtttaccatctcctaattttagttgttattttcattcttgattgtctatctgttcctgtgaacccacaagggcagatgtctttgtgttgaatctcctgagcccacagtctcccaagagatgtagtaggatgagtcagaactcccagtattttcacctaaaccaggaaaatttcaaatgatggggatactgagtcatccccaggcacctgctgtttggctagcctcaactaggagctgatttgcagtctgttcttcacctta

SEQ ID NO: 246547 - DNA, 797 bp, Homo sapiens
ctaatttaaaagggaaaaagtataaaaattaaactgtagctattgctaatgaatcaatttttctgcttccatgacatacctaactgaattttagtttcaaaacgtagtaatggcattttttatttgctttggtatatatgctgttacaaatttgcatcactgattctattttattttctgtgaaatacactctcccttaaatctggttttcaaccttttatccttgccggcacacataagggaaatgacatactttcttcattagtagtttttcattaaatgcagtgaggagtgaaatgtacattggcctggagtgattcaagaaactcagttgtgagtaaccaaaagaatgtcacactagcttaagtgcagaaggaaaattttgggctatgttcaaaggtgggccaattccatatatagttgctgcatatgttggggtcctggctttgtctggcttcattctctgatagattttctggaagttgaaaagatgtctcttaattgtcccagttctacattgtacccgtagcctatagcttcagcacacgtctagggagaactctgattggcctgagttacgatctgcccatccatgaacaaagtggccaggaaatgaagtattttgtttgtacgcttcgattgcctgctgatgcccagagcaggatagaagtagggtcagcaccacatgaactaagcaggattattatatagtggaagaaggatggttcctccaaggtaggaatataaggtcaatattttcctctcactttacccaccccgagttaccagcagttttc

SEQ ID NO: 246548 - DNA, 96 bp, Homo sapiens
gcttcatttcattcatttcgtcttccatcactgatacccttttttccaattgattgcatcagctcctgaggcttctgcatccttcacgtcgttctt

SEQ ID NO: 246549 - DNA, 457 bp, Homo sapiens
acagtggtaaagtgccctgtgaggtatgaagaggaagagatcgcgtcccagaaccactgtagctagaacctttgatgtcatcccagcctggaggcaccaatgtgtcctgccagctaactgatcggtcaccttggagccatgcttggctgtaaaatgttgataagccaggctcttttggtagagctttttaattaaaaagatgttgagacgttacttttcattttacaattgaaatcctaatagaatcattacactttcccgcagttaaattgcaatctgaagaaaaatagcacggccctacaccgttatataagggcactgcacgttaaacggacatcatcacttattgagcagtttttctgttagatgttgaatgagttagagatgtacaagagatctgcatggttaagttgaagtttaaagtaaaaatatctcagtgcactgcagtaaggagcta

SEQ ID NO: 246550 - DNA, 268 bp, Homo sapiens
cagattttagcatcctcacgggctccagcccatgcctgtgggttgcagcttgttctccccaactccacatcttttctgactacccgccctatgggcttcaagctccagcattggacaggaagagaacagccttacagagactacttcactacttcttctttatatgttaaccatactggaaattaggaacgttttaacaaaacttgtgaacatatttgcatctttgaataagaagaaaaataaaatgtctaaggaagtaccctataaa

SEQ ID NO: 246551 - DNA, 521 bp, Homo sapiens
cttgtgcacattatttaaaaatcagttcatgctgggcatggtggctcatgcatgtaatctcagcactttgggagagaaggttgcagtgaactgagatcgcgccactacacaccagcctgggcgacagagcgagactctgtctcaaaaaataaaataaaatgaaataaaataaaataaaataaaataataaataaataaataaaataaatcatcagttcatgtggccatgttccctctccctttccttcacatattatttccaattgttcagtagagatactgcctattatcaccttgtaaccactttcccttcaagagactatctctggcatcttacctaccttttcttcgaattttaggaactctgtactccaattctctatattccggctttgttccatattcctcttcctgcttattagtctgccagctatcatttacaaaacaaccactttgtatcagacactaagaacataaagtaattccagtctctgccctcaagaagattacattacggtggc

SEQ ID NO: 246552 - DNA, 523 bp, Homo sapiens
gcagcccaggcaacggcagaaccgctccggcagcggcggcggcggcagcaccagcagcgggagcgagcgcaacgctagcgcggcgcggggaccgccgcgctccttcccggctcctgccctcctctgccgctcgctcctctctcggcatccacctccttcccctcctcctgctcattcactctttccctcactctcccctcctcctcggcttctccccgactagcccgacagccctcgcgctctcccactccctctgcctgtcctccccggtcccctcctcccgctcattcactcgcccctctcccttctccactctctccccctgtctcctttcttcttcttctttcaccctccgtctctcacaccccctccattcccctgtctcctttctgacactgcactgcagctgctcctcagccctgccccctccccagtgagaacaaaccagcaacattgctttttttcctaaagagatttatattgatccgattaaaaaaaaaaaaccttaagaaaccccaaacgc

SEQ ID NO: 246553 - DNA, 411 bp, Homo sapiens
gcagcccaggcaacggcagaaccgctccggcagcggcggcggcggcagcaccagcagcgggagcgagcgcaacgctagcgcggcgcggggaccgccgcgctccttcccggctcctgccctcctctgccgctcgctcctctctcggcatccacctccttcccctcctcctgctcattcactctttccctcactctcccctcctcctcggcttctccccgactagcccgacagccctcgcgctctcccactccctctgcctgtcctccccggtcccctcctcccgctcattcactcgcccctctcccttctccactctctttattgactacatgcttctctcgcacccgaccttccgaagacgccgctatagccaggcgccctgtcggctagtcgggggggatcctcagagta

SEQ ID NO: 246554 - DNA, 498 bp, Homo sapiens
gacttctttagtatactgatgtgccatttatcttaggaacaaaaatgctttaaaaattaccagcttaaggccgagtgtggtggctcatgcctgtctgtaattctatcactttgggaggctgaggcagaaggatctctttttttttttctttttttttttttttgagacggagtctcgctgtattgcccaggctggagtgcagtggcacaatctcggctcactgcaagctccgcctccggggttcacgccattcgaggcaagaggatctcttaagcccaggagtttgagaccagcctaggcaacatagcgagaccccatctctacaaaaaatataaacattagttgggcatagtggcatgtgcttgtcgtcccagctactcaggaggctgaggtaagaggatggcttgggtccaggagttcaagggtcccatgagttgtgatcatgtcactgcactccagcctgggtgacacagtgaaaccctgtctcttaaaaaaaaa

SEQ ID NO: 246555 - DNA, 248 bp, Homo sapiens
gtgaaggaacagcttgtacagaggcagagtatcaagaggcatggacaggaaaccacaagtagttcactaagcctggagcacagggtgctaggagggggatcataggatgtcaggttgaacaggaggcatcagattttggaaagccttgaataccaggctatagattttattttattctatcaccacagtagaactattggagggttttaaacattagagcagtttttcaggaaaaccaaccaggcagc

SEQ ID NO: 246556 - DNA, 301 bp, Homo sapiens
aaggccttgctttccacacccaaagtgccatggaaaacatgaaaatgtgctttctatcaagggatacggtcagaaatcgaacaaaatatttcctacctgtctatatcattggagaaattgttctaggtcctttaaggaattttaggacccttactaacacctttcttcttttccaatagcatcatctgtcttagataatagttggccctctggatccctgggttccacattcatggatttaaccaaccacagatcaaaaatatttggaaaaacaaaacaaaaacagtaatacaacaataga

SEQ ID NO: 246557 - DNA, 184 bp, Homo sapiens
gttctgagaaagctggtctctctgtgcacatgtgtactattttaaaagagggggcaatacaaaggggatggggcttgatcaccaaaagtcagcacaatgaaaacaaacaataatggataatgagcactagaattcaaattagcagctgttttaaaaagatgggtttccaggagccaagatggcc

SEQ ID NO: 246558 - DNA, 640 bp, Homo sapiens
tgtcacccaggctggagtgcagtagcgctatctcggctcactgcaagctccgcctcccgggttcacgccattctcctgcctcagcctcccgagtagctgggactgcaggtgcccgccaccatatccggctacttttttgtatttttagtagagatgggatttcaccgtgttagccaggatggtctcgatctcctgacctcgtgatccgcccgcctcagcctcccaaagtgctgggattacaggcgtgagccaccgcgcccggccatcactgcaacctgttttatcagcaaggtctttatgacctgcatcttgtgccaacctcccatctcatcctgtgacttagaatgccttaaccatctgggaatgcagcccaataggtctcagcctcattttatccagcccctattcaaaatggagttgctctggttcacccgcctctgacaatagtagaagttaaaaaaaaataataacttctttaactccactccaggtggcatttcttagtgcctctgaaggttctgatgtagaaccagcccccagctcacccagagcaaggaaagatcatgaaaacccaagcagaagcaagacactgggttccagcatcaatgctaagggctagaacattttctgatgttttgct

SEQ ID NO: 246559 - DNA, 440 bp, Homo sapiens
aaaaacagtggcttaaaatttaaaagaaatctgaagactggcaggcaactgctggtatggcagccccatgatgttctcaggaaccctggatccttctaacttcctgctgtagtatcgtaaggtgtgaccttcaatctcacattctcaacatggttgcaaatcgtcagccatgctgtgcatgttctaagcaagagaaagctaaagaacaatgaaaatagtgcatgtccataagtcagtcccctttgaggggcttttctggaagtctccacccaatgataactactcattcttaactgaacctagttgcaaggcaatctgggaaatgtagtccattctttctttctcttccctctttttttctttccttccttccttttttccttctctctctctctttccctataatgacctgaataaaattggatctattagtaaggttt

SEQ ID NO: 246560 - DNA, 469 bp, Homo sapiens
cattggggctttagatgaactcagaagtactttacattactttatttactgtgtcacttactcacttttgactctgagctccacgagggcaatcacagtgtcttgggcattttagtgatactaatacttagctcatgacctaatgtgtagtacttcctcaataaatggttgttgaggcagggcgcagtggctcatcactgtaatctcagcactttgggaggctgaagcgggtggatcacctgaggccaagagtttcagaccagcctggccaacatggtgaaacccggtctactaaaaatgcaaaaattagctgggcgtggtggcacgtgcctgtaatcccagctactttgggaggttgaggcaggagaattgcttgaaccctggaggtggaggctgcagtgagccgagatcgtgccattgcactccagcctgggcgagaagagtgaaactcggtttcaaaaaaaaaaaa

SEQ ID NO: 246561 - DNA, 267 bp, Homo sapiens
cgaaatgagtcgccacttcacacccactaggatggctttagtcaataaaaagaaacattacaaatgtcagtgagaatacaaagaaattggaaatcttatggattgcaactgggaacataaaatggagcagtcgctgaggaaaagattttggcaattcctcaaaatcttaaacatgcagttaccacatgacccagtaatcccactcctaagtgtacatcaatggaaatgaaaatatatgcctattcaacaacttgcacatgaatttcc

SEQ ID NO: 246562 - DNA, 330 bp, Homo sapiens
ttgagacacactatcatgacttaagttggaatgatttcatggctcccatatggttgattggttgtgggactttatcgctaatgataattcagaaaatagtagtaggactaattgcaattctgcagatttcaccttaaacatatgctgcttcttgggctgtggaagttggacacattgagataagattattcagaaaaacagcaaggccgggcgcagtggctccctcccataatctcagcactttgggaggcctaggtgagagggtcgcttgagcccaggagtttgagagtagcctgggcattataggggtaccctgtctctacagaaaat

SEQ ID NO: 246563 - DNA, 373 bp, Homo sapiens
cagtcgctgggtcttacagtaactttatgtttaacattttgaggaaatgctattcttttccaaagtgactgcaccatttcatatttgcactagcactgtacggacattcccatttctctgtcctagtgagtgtgaaatggtatctcactgcagttccagtttgtatttccctgatggctaatgatgtggatcatttcatgtgttcattggccacagagaaatgtctatttggattctttacccatttttcaattgggttatttgtctttataggtttgttgttgttgagacagagtcttgctctgtcactcaggctggagtgcagtggcattatcacagctaactgcagtctagaactgctgggctcacgtga

SEQ ID NO: 246564 - DNA, 491 bp, Homo sapiens
ttaatgttttttgcagctgttgtttatccatgaattattattgcaatgcttaaccggagatagaaactcaccatgagcgtatcaacctttcctcttcagaagtttcacttcagtttgaaagaaaacgcaactggtgaaacaattgctgtgtgtcataaattataggtatctgacattcattacaaggaaagcaacagtcaaatatcatgggactcatatttatttatgtctatattatctgtagatattatagataatatatatgtatactttgacagagaaggaagaacaccactctggagtgtttaatctaccatagtttgatattgtctttcttgtttgtgccaatttgaattacttggttctgttttttggttatctgcaattagtgtgctatttatttccagaatagaggaaactgaagcttactctgtgtacacaaaagaatactgtacccattcagtcatgtacaaatagagttatctcatgga

SEQ ID NO: 246565 - DNA, 348 bp, Homo sapiens
agggcagtatctctcgattcataaaagattggtcaccatgacccaaatggtggccattaggccccaagtcccacagtgggcgttagattttaacatgaggtatcaggggataaatgtttatatcattgcatcccctccctagccagccaaaggtcatgttcttctcacattgcaaaatataataatctactcccaattgtcccaaatgtgttaggttgttccagcatcaactcaaaattctagagtctcatctgagacgcaaggtaaattcttatagctttgagcctgtaaaattttttaaaaaatgttatttgcatctaaaatattaataaaacagtggaagagaca

SEQ ID NO: 246566 - DNA, 386 bp, Homo sapiens
ggccaaatgaggtcctagtaggccagaggacttttcaccagtgaagtgcagtgtagttggaacaggtaggtcactgctggccagggaatctcaacctcttcaggctgcctcaggcagagtggggcccttggggccctggagacctggcagtccccacatggtgtgaatcttttgctagagcaaatccaggccagctgctctgaatgttggtgctgccaaactttcaataacctgggacccttgccagtcaggatgttctccctgggtctgatttgcagtgcaaattgactcttagctgttccaaattctcttggctctcgattacccatcctcaggccccagtactcatcctctagtcccatcccccattctgtaactctgtctcc

SEQ ID NO: 246567 - DNA, 469 bp, Homo sapiens
gtggtttttctggctagttgcacttgcattgcccccctgcttcccttccctgagttcgtcttttgagtatcaaaatcaagaacactagattctggatatccccccgcgtgattccagtaaagactcacattatggaaataatccttttttacttttaggggaaaaaagcattattaattataaagaatataaaatatttctgtaatcacagcactttgggacgcggaggcaggaggatcatttgagcccaggagttcaagaccagcgtgggcaacataaggagacctcatgtctacaaaaaaattttaaaaattagcccggcgtggtggcacgtgcctgtagacccagctacttggaaggctgaggcagcaggattgtttgagcctgggaggtcaaagctgcagtgagtagtgattgcaccgctgcactccagcctgggtgatgacagagctagacctcttctcaaaaa

SEQ ID NO: 246568 - DNA, 194 bp, Homo sapiens
tgaggttgtcttgaggaccatgcatagtttaaagactcattgcacttccaaatctgagcatcatagttttaataaaacataaaatacataaaggtgaagatatatatggtatttctgaggatcaatattgtactcttaaacatgttgcatgagacacagataaacacatttagtccttttaaggaattcttaga

SEQ ID NO: 246569 - DNA, 374 bp, Homo sapiens
ctccctactctcatttcccacccgcatcccctaacctgacttgtataattcagtcctcccaaactcagcctgctctttcacacctccagacctttgcccatgctgttcccttgccctggaatgccattgttttctgacacattttgccacatagatgcccacttaattctgaggctcagttccgatgcctctgccttcaggaaacattccctattcctcccagaaagtcccatgacctctggctttgattctctgagtcccagatgtcgtcctctgctccagccctgaccaatgggcacatgggggtatgtctgtcttccattgcattctcgtccactccagcctggcagcagagaagactctgtctaaaaaca

SEQ ID NO: 246570 - DNA, 491 bp, Homo sapiens
tttttttttggagacagggccttgctctgtcacccaagttggagtgcagtggcatgatcatagcttcctgcagcctgaacttcctggactgaagcaatcctcccgcctcagcctcccaagcagctcggactacaggtgcatgccaccacacctagctaatttttttattttgtatttttgtagagacagggtctcactatgttgcccaggctagtcttgaactcatgggctcaaatgatcctcccgcctctgcctcccaaagtgctgggattacaggcacaagccaccactcccagtctaaagcactttttaatgctaccactgtcttttcaaaaatcccagcctgagttaaagcaaactactcccttccctgctaccactgtgcacacatgcacgtgcacatacacacagaagaattggtctcaaatggcaaaataaatttgattattcaacccgtcgacgcggccgcgaattagtagtagtagtagtag

SEQ ID NO: 246571 - DNA, 356 bp, Homo sapiens
ttcattagagaaataaaaatgagcaagatttgtgattcagaatattaaaagttaagaatccatgaatagccccttaaaaatattgtcaaagcatcatggtatttgtagtggtgcttaaaaaagaagcagcagcagctgttctaagccaagcactgcttgaaaacaaaacaaaacagaacaaaaccttatatttaataaaatggagaaatttgggaatgtccctagcgtaataatgccttctactgacatttaaagtcagcttaaacatcattagggaagactatgactgtttctatgacctctagtcacaaatttaactaatttaaggttaactaatacctctttcagagttggcc

SEQ ID NO: 246572 - DNA, 394 bp, Homo sapiens
gggtcagtttaaatcagcctgtatctgcagaaaaacagttgggatgggcgggggttgggagggtgttcaaagcaacactatacttttgaaaacatgacccaacattatgcatagaaacaaacttaccaagaccggtaatagatgctgtggctgacttacctgaacatatgaaaaaattgaccctccggttggtatcatttttttatgttgtcaacatttctgtgaaaattttaagttcctagagaaagtataaccttgaaaaagaatcgtcaggtcaactaatagacaaagacaaacaagtattcatgggaatctataattgctgaaaagctacatttgaccttaaaaattgcatgttggagctctggcaaaataaaacaaagccaaaaagaaa

SEQ ID NO: 246573 - DNA, 586 bp, Homo sapiens
gatttgcatttttctaatgattagtgatgttgagcattttaagatatatctattgaccatttgcttgtcttcttttaagcaatgtctactcagatcttttgattgttttaaaaatattgctattgaattatttatgaatttcttatatattctggatattaaaaccttatcagctgaatagcttgccattttttctgcattctgtaggttgtctcttcattttcttaattgtttactttgctgtggcagtagctttttggcttgatgtaatctcatttgtctatgttttcttttgttgcctgtgcttttggggtcttatccaaaaaattcttgtgcagaccagtgtcataaagtgtttcttttatgttttcttatagtaatattaccatttaggatctcacatttaatactttaataatttttagttgatttttgtttatggtgagacctaggggtttatcttcattcttcactgcatgtggacctccagttttccctgaaccatttactgattagagtacctttctccactttgcatttttagcaccattgtccatagtaagttcactgtaagtgtatggaattc

SEQ ID NO: 246574 - DNA, 404 bp, Homo sapiens
cattaactggttattgatggtatttggaaatattgttaattaataaatgttgattttatatttagcaatgctgttcaacttttactttagttataatagtttgtgcacgattttggatcttctcaatggtcaatgctgatttgaagtttctctaatttctcaccttagccttcctaatacagtctctgtttaagttcctaacaaagaagagggggagagcaggaggaagagaatgaagaaaggccagaaagtcagataaggcataaactcaatgatcaggttcaaaataattttgacttgctactgaatgatttccactcactaattctgttaggtggtacctaataattcttgtgaagtctgttttgtgacttaatataaagtgatgaaattttagaaaacta

SEQ ID NO: 246575 - DNA, 463 bp, Homo sapiens
taaataataaatcatgtagttgccattctttgttgctttgctatatgatttgctgtaattggtttgtggtggagattgtgggttgccagctaatatccattctctccttttttcgtagtaaaacagaatcctgattttattctgggctgcagtgtgcccagctaaaagactatactacgtttcacagctttccttgcgaggtgtagccaatgggatgtaggcagaagtgttgaatgggttatccaaaaagattgctgtgttacttcattttctgtatactggaaactgggtgatttacaaagagaaggaatttatttcttacagttatagaggctgagaggtccaaggtcaaggggccacatctggcgagggtcttcttgctggtagggactctctgaagggtcctgaggtggcacatggcatcacgtggtgacagaactgagcatgctagctcaggtttttc

SEQ ID NO: 246576 - DNA, 304 bp, Homo sapiens
gaaatagggtctctgcagttgtaatcaagatgaggtcattaggagggccctaatccaatatgactgacatctttataagaagaggaaaagagacacaaacacacaaagaggatgccgtgtgaagacagaggggccgaggctcaagtgattcttctataagccaaagattgctggtgacatcaaagcgaagagaaagccgtggaacagatagatgctcccctagagcccttcaagaaagcacagccctgctgcctccttgcaaacagaaccatgaaagaataaatttctgctgttttaagtcact

SEQ ID NO: 246577 - DNA, 416 bp, Homo sapiens
ttataaataacttgtatctactcttctataatgtaaaataaaccttacctcaaatgaaatcttatttttaataaactattaattataactatcaattatttaagtagtaagagactgtatgataaaactaaatagtttctttaggaacttaaattgaagtaaagaattgtacataaattagtaattcaaaaagagcaacattaaaatcacattacacttttttagtgcttcgtgttcagacaatttaaaactatattataaatgttttattttaaattaatatttttctcatttaaattaattattctttgaacaattttatgtaaaactgtttttgaacaattttgattctgtttcatagatgtaaatctgtttattaaaccacaaatattgaataagctcatggcaaaaaaaaa

SEQ ID NO: 246578 - DNA, 355 bp, Homo sapiens
tcaaaacctttgcagtgctatttgttacctgtctgtattttaccaggtggccacctggagcctggttggtggtttaccccatgatttaggcgtcctggtcatttgtaggtgaaagttgttcacagtagaccaaggtttgagattttcttggtcactcagctgaggtgaagctgggctgctgtctgaacttgtaccctcaaggtgctgcccctttgaaggttagcccacactgataggtaatgccccaggaccccattcttggaagttaaaggactccagccctcatcctccagactctaaaaggactcctttcagcaaatgtgaccctagggccaaaaaagcagctggacatctg

SEQ ID NO: 246579 - DNA, 239 bp, Homo sapiens
gggatccggaggggcaacggaggagacgcagggcagcaaggagagaggacaccactcgcgcggcagcatccaaaggccagagtggggacccgcgctgcctcctaccctcgcctcgcatcctctgccaaatccgaattcttccagcccagcttcccgggctctgtcctccatatcgaataataatgacacatatcgaatcgcatggacttatccgacctcctcagaccccgtttccgccc

SEQ ID NO: 246580 - DNA, 1921 bp, Homo sapiens
  misc_feature (1329)..(1329): n is a, c, g, or t
  misc_feature (1346)..(1346): n is a, c, g, or t
  misc_feature (1358)..(1358): n is a, c, g, or t
  misc_feature (1363)..(1363): n is a, c, g, or t
  misc_feature (1376)..(1376): n is a, c, g, or t
  misc_feature (1381)..(1381): n is a, c, g, or t
  misc_feature (1495)..(1495): n is a, c, g, or t
  misc_feature (1562)..(1562): n is a, c, g, or t
  misc_feature (1590)..(1590): n is a, c, g, or t
  misc_feature (1618)..(1618): n is a, c, g, or t
  misc_feature (1703)..(1703): n is a, c, g, or t
gtggggtcccgcgctgcctccgccgctcctcggatggtgacggggccctgccgccgcagcccccccaagccccggctccgcaggcccacagcgccggagccccgcaggaatcatgcccaggtccttcctggtcaagaaggtcaaacttgacgcgttctcttcggccgacctggagagcgcctacggacgcgcccgcagcgacctcggcgcgccactgcacgataaagggtacctcagcgactacgtggggccctcgtccgtctacgatggcgacgccgaggctgcgctgctcaaagggccgtcgccggagcccatgtacgcagcagctgtgcgtggagagctgggtccggcggctgcagggtctgcgccgccgcccaccccgcgcccggagctggccaccgctgcgggcggctacatcaacggcgacgcggccgtcagcgagggctacgcggcggacgccttcttcatcaccgacgggcgctcgcggcgtaaggcttccaatgccggctctgccgccgctccctccacagcctcggcggcggcccccgacggcgacgccggaggcgggggcggggcgggcgggcgcagcttgggatccgggccggggggccggggcggcacgcgcgcgggggcaggcaccgaggcgcgcgcggggccaggggccgcaggtgctggcggccggcacgcgtgcggcgagtgcggcaaaacatacgccacgtcgtcgaacctgagccgccacaagcagacgcaccgcagcctggacagccagctggcgcggcgctgcccgacgtgcggcaaggtgtacgtgtccatgccggccatggccatgcacctgctcacgcacgacctgcgccacaagtgcggcgtgtgcggcaaagccttctcgcggccctggctgctgcagggccacatgcgctcgcacaccggcgagaaacccttcggctgcgcgcactgcggcaaggccttcgccgaccgctccaacctgcgcgcgcacatgcagacgcattcggccttcaagcacttccagtgcaagcgctgcaagaagagcttcgcgctcaagtcctatctcaacaagcactacgagtcggcctgcttcaagggcggcgccggaggccccgcggctcctgcgccgccacagctcagccctgtgcaggcctagggcggcggggcctcccccagccaggtcggctctcagcaatacggccccccagggaagtcttcgctggcgtccgggtggaggggccggagggcgggcccctcctcacagcaatagggggaggggggcccggtcccaccccgccccgcccgccaggggccttgccggccccntcaagcaatagggtccngaggggagaccnacccngagccccctcccntcccntccagggtgcccccggctttctcccagcaatagggtcgacgagacctagaaccgaacctcatctccgagttgggtctctgaagacgggggtgaggtgaggtagggagcgccctncttctcccgcctctgcgcccctggatcgcgtcgcagggactcaggtcttccccaccccttcccaagncttctagcgcagggcctgcggcccagangtccagggagccggcccctccccggcancaggccggggcggagcaggagcgggcgggcctgcagggacgcccctgcctagcagccttcgcggaactcccggcagtgttagacncgttgtgggtcggggagaggggcggacggcggcaccccctccctcgggttgcttctggggcctcagtcggagccgccctcctaccctcgcctcgcatcctctgccaaatccgaattcttccagcccagcttcccgggctctgtcctccatatcgaataataatgacacatatcgaatcgcatggacttatccgacctcctcagaccccgtttccgccc

SEQ ID NO: 246581 - DNA, 421 bp, Homo sapiens
tgctcaagcacagtttatgcaacaaaatgtgattcagaatctaatttcacaaaataaatccagaggagagacttgagggaaaagggcaaagatgtaactcaataaagtccatagcatcacagaataggatgatggtgatggtttctaaccttgagaatgtctaagtgggttcttcagtttctaaaatttatttatctgttcttggacccaagaaatcagaatagatcgtaacagaaaaaaaatgacctagctttcacctagacaagttagaaaatgcagaagtagcctggcagaagtacaaccatctgacctttgacaaaaccacagaaataagaaagaaaaggctcactatgcgatgaatggcgctgggatacatgactagccatgtgcaggacaattaacactgcagccctgcttgtca

SEQ ID NO: 246582 - DNA, 625 bp, Homo sapiens
tctataggtatcattttcaatactttcaacatttggtggttttctattgggtactccccattttcctatatttgtgtgtatatgtatgtgttcatgtaaatttggtatagtaattttttattcattcaacaaatatttattgttcacctgtttgtaccaggaacttttcttagtctttgggtaaaggtgaacaagacaactacagttcctgcctttgctgagacagcagttacactaacccttaattatcttacttgtctatgaaggagataaacagggtactgtactggagaataacagatgggatgcttcaggtaggacatcaaggaaagcctctaaggaaaggatgcatgagctaacacctgacattaaagaagcaagccaagtgaggagccaggggagataagcattcctggcaaagagaatagcatcaaatgcaaaaaggttcacactaaaggaaactcctgattaggtattaatgctttatacagaaacctctatacaaatccaaacttgaagatcagaatggttctacagttcataacattttgaaggtggccttattttgtgatagtctgcttcatgtgattctcactaacatatctccttcctcaacctttgctgt

SEQ ID NO: 246583 - DNA, 442 bp, Homo sapiens
gcctggaatacttgaccttctcaagcgggtatctcctagtcatccttactatttcagaacaaccatgttttctcacgctttcaggattaattcctggcaatgaaacaaaagcaaaattatcccattccacagtagattcggatgaaaactggaaataaaatcgggtacaactccaagaggagatattggagaagaaccaagctgggtctgcaaggaactgcatacgagatggcacacgtatttatgctgtctcaaggtcatgaccatgttaccatatcaagctgaaaatgtcaccactatctggacagttggtcatgttttattgggaatatatttttttcctctctgaatctattgtgaatgcgctggttggctgggttcagtaataaatatgtgagacctttcatttgaaaaaataaaaataataataatttgcattata

SEQ ID NO: 246584 - DNA, 415 bp, Homo sapiens
atgccagctactcgggaggctgtggcaggagaatagtttgaacctgggaggcagaggttgcagtgagctgaaattgcaccactgcactccagcctgagtaacaagagtgaaactccatcttaaaaaaaaaaaaaaagaaaaaaaaagaaagaaaaaagaaaagtcagttctccaaaagataaacaaaattgataaactgctagcaagactaaccaagaaaagaagaaagacaaaatatgcaaaagcatacatgaaaagggaaatattataactgatattacagaaatacaaaagataatggggactattatgaacaagcatacactaacaaactagaaaacctagaggaaatggataattcctggatatatacaacctatgaagaccatatatatggacaaatacaacctatgaa

SEQ ID NO: 246585 - DNA, 215 bp, Homo sapiens
gaaatgctgtgtcctgctccagttcttacctcattcctgctggcctgattgctgatgttgacagttgaccccacccacaacatggaattcaaatgtcaaagatggcaaagcaacaaaatagaaggatttggttcctgaaaattgtggagtccacataccaacagttctgaattgtccatggttatgtgaaaataaacatctatcttgcctgagta

SEQ ID NO: 246586 - DNA, 629 bp, Homo sapiens
aagcaatgtcgtttcaacaaagaactcagcaggataaatacgatcaagctcgtatctcacaaattatcacttgtgtctgaatgtcttccatttctgttcgtattcattcctaatggattaggtctcatcccccaagtatgtttctagtgaatatgaaaaaccctattgtcacatatttctttctttatatacaactaccatcatttcattaactgttgcttaaaggaacattttttaaaagtaatctgacacgttactttaccattttttgatcaatttatgttgtgtcttctttacatatactttgaagggccatatctgaaacagaactttcttttttcattaaaaaactagcatatgtgggctatctgcctttatattcattttattgactattttactatgaacagtcttatattttactttatattaattcctccagattaatggcaagtatttaacctaacatatggatccatctcacttaatattagtttaacttcatttaattcctttctttttactcataatcaactacttttcctgatgagatattaagaaagaagatatgttttggcacctctgtccatctctttacccatttcttactcctctaagaagggaagaaa

SEQ ID NO: 246587 - DNA, 483 bp, Homo sapiens
tgttccagacaaagcaaaaggagactgggaacctggagttgacctccttcctcagaaacaggaaggcagccccactcttcccctgaagcacagccccctgtccaaatacaagcaggcatctgccagcactgcctccctgactagggagcagcgaggccgagtcctcaccatcctaccagggagctttgtggatccccagtgctaccacttaaaatctgtgaaaccaagtcgggaacccttcacctttcactgataaaacattgtgaaaaggcaacaggcctataagtacgtgacatatgaggttgcctcagggtggacatgttttccgcttttgtccagatgttgggtggcccatcggaactctgtgtttcacaggggctgggcctgtttcccatcctgtgatgagtccttcccaattgaactcttccctagccagttgctaactagagaccaggaccactcccatctgacgtttgcttgttc

SEQ ID NO: 246588 - DNA, 645 bp, Homo sapiens
cagagtaatagtagagagacagagagagagaaaccagtagaacaagatggccagggaagaattctttgagcagatgacttttggaactgatgtagatgatgagagccatgtgaagacctaggggagaggccttccaggctaaaggaactgcactggcaaaagtcctaaggcaaaaactagcttggggtttggaaggtgtgcgaggggcgtcgtagctgaagcatggggagaccataaggaaaagcaagcaaacaacagattaagcagaagagtgacgtggttgatagacttatctgtgttatctgaagactggaatgtaggggacaagaatggaatcctggagatcagttaggaggcttttgccacgggcaagaggcaatggtgatttatatctggtggtgataatcaatgtggaggacagattagattcattctagcctgtattttgggaaaaaagtaaaaaggacttgtcagtagattggaaataagaaatgaaaaaggagtattaaggcttttcacactgaataactagatggatggtataagtgtatactgagatggggataacaggaagaggaatggttttaaaggagaaattaagagttttggtgattttgagagtcctagtagatttccgagttggga

SEQ ID NO: 246589 - DNA, 419 bp, Homo sapiens
aattccacaaggagcctgtgctttacgtaaggttagccagtcagcaaatatgtgtgtagggcgcaccataagccagagactgtgacgggggaggtgttcagtgtcactcttttaaggctagtagggactgctggttgggtcaccgttttagacaagtggttctcaaacttgaatagtctattgatttcttttaaagtatataaaaaattatgacctccagtgttatttttattatagtgttaagtattaaaaacataaagccacataaaacttcttaaattcttgtgccactataaaaaagaaactttgacaaattaagtaaaacttatgtaagttttataatattattcaaataaagggcataaatttaatacaatgaatggaaatgtctgaaactaaatttaacatattgtgcttag

SEQ ID NO: 246590 - DNA, 391 bp, Homo sapiens
actattcctgaatactacaccttcacctttcttgatgtattcccttgttttggtagagtatatctaccaatagctttctcagaaaagtacatggaggataattacattaaaaatgatatgtgtttgaaaatatctgtaataccttgacttggtttagaatttcaaattaaaagtcatttccaaaatttagagggtggttttgctctactggcttcttattccaatattgatagaatgccaaatttactcctgatcatgtgtctgaaatctgtacttctggaagttttatgatcttctttttaactccaatgctgaaatatgacaataacagtatttggtgtgggtctttgttcatccactgagctggacaattacacagcctttacaatct

SEQ ID NO: 246591 - DNA, 253 bp, Homo sapiens
acattaaaacaaagtataaaatgtttttatgtcatgtagcataagagtattacaagagagtattcaggtccttgctcaacttggctctgaaaacagatcctgctttgctatgattgtatgaagatagttttttcattatgctccattttcaaaattttagagcattatctgaaggagaactttatatcctcagcctgtgaaatctgtagtatggtggaaagagggtgtattgtagagttagatggttcttaag

SEQ ID NO: 246592 - DNA, 395 bp, Homo sapiens
tagcagcattatcacaaagacttttgtatatcttcagatatcagcatagcaaaagtaagatgtaaagttactatgcttatggaactcaggtttatgaacatttctgaaatttcaaaatttcattatttgagagatcagaacaaatcagaataactactatttttgctttttccttaggcagcaagatgagttcttttgttttttggtggtattaaaattttgttttgtttttgttttgcttttcttactatatgtgaagagcttagtcaccttgacaataggacacagtttgtgtatggccaatgtagtgccatcattcccttaagatataaattcctcattaaaaatgcatctttaatgtgcacatatcttaaataaaatcttaagaatgtcgt

SEQ ID NO: 246593 - DNA, 340 bp, Homo sapiens
aaagtgttaggattaccgatgtgagctaccgcggctggccaactctgcctcttaaattaaaaaaaaaaagtaaagaaaaaaagattctggaatagaccatcaaagcaaatgcaaaagctggcccctggttggcagtagacaagacactgggcctgcatcaagactctgtgtggcgcatcctggaaggagaggtttgggagagggagttagaaaagggggaaacactacaacagccacaaccctggaggcttaatttcaccccaggtcttcatagcaatcttgttttgtttttgatctccaaaaaggggtcagcctaggatttatgagatactccctcaca

SEQ ID NO: 246594 - DNA, 474 bp, Homo sapiens
ttcacagaggaggggaaatgtaggtcattcttttgaggggcaataaatgattattagggagaatgaatggaccttggagaacagaaattaagctgtaaatgatcctctttgcagttgagtgagccttagaaacagacatgatcttgtgaaaaggtcagtccaggtagggttatattcctcaatcttcttttttgcagtagataatgagatacatgggaggtgatggaaaacagttgttttctttggtggatccagttttttgtttgtttgttttttgttttttttttttgagacagactctccactctgcaaactccgcctcccgggtttgagtgattctcgtgcctcagccttccaagtagctgagagtccaggtgcccaccatcatgcctggctaatttttgtattttttgtttgtttgtttgtttttgaggcggagtctgcagagtggagagtctgtctcaaaaaaaaaaa

SEQ ID NO: 246595 - DNA, 449 bp, Homo sapiens
ttagtacatcaggggcagaggtgggccaaccttcttctatgtcaactggagacagggattttcaccaagatttctaaagcccagtaactggtatacagattccctaggcacagcttgaaaaccattcctatctggagagctgcaaacaaatgggacctagttcttcgttatttatggaaactttcaaaccttttttatcaccccaagttgcaaatactactcacagcctcttttcttggttgagtcacttttctattgttcagggaactgccagcaacaacttgtctctctctttttttgttttatttttatttttattttctttttatactttaggttctgggatacatgtgcagaacgtgcaggtttgttacataggcaaaccaccattgcacacgtacctatgtaagaaacctgcacatgcctggaacttaaaataaaagaaaaaa

SEQ ID NO: 246596 - DNA, 469 bp, Homo sapiens
gacatcacatgcatcatctctcacctggatcatggtagtcgtttcttaattggtttccttgtctccacccttaccctccttaagtgtattctcaacccagcagccagagagattctattaaaacacgtgtcatgccgtgccacccttgtgctcaaaacccttcagtctcctactctctgacctcattttcctccactgtgctccaccttcggttgactccagccatactcactgttcctcaaacattcaggcttgcttctgcctcagggcctctgtgcagactgttccccctgcctggaaggctgtccccctggtgcctacctgtcactttcatgtccatagagtcaccttatcactcaggctcttggtcactccatctaaaatgaaagctctccccaatgctgcctagctctttccttgtaacatgatatataattatatataattaaatatatacatgatatctatt

SEQ ID NO: 246597 - DNA, 518 bp, Homo sapiens
cagtgtattcgcacacagttgagaaaggccagggaggataacaagggctagaatatagggtcagctccctacagttgctgtaaccccctgggcagctccctttacttctctgagcttcagtgacctcctctgtaagtgaggataacatttcccagagtgaggattaaataacattatgcatggacctgcccatagacaatgacctagcaatggctcagtgagtgtcagtgatgattatccccaagtaaaataaatttgaatttaaaattttaaaaatggtcatttttgcatccattgtcttgagccaaatgggaaacggtttggttcagcctctaagcccctgcgggtaggccctgggtctttcagccctgtgtctgctggtacgcctggggctcaggaaatgcacatggtgtgttaaaaccaagtttgaatttgtcaaatcccaagtcaatccaggatgttcatttcttaaatgatacagtgagacaaagtttttttgaagaggaaaaagaaaaaaa

SEQ ID NO: 246598 - DNA, 6186 bp, Homo sapiens
ctttttattttgagcctttttgatactgaacatgatatctgagtgaagaatttttgttttattattaagaaataaatgtatcttgcttcttgagatctccctggcttcagcaatttgtagttatttccactatagaccattaagaatatatttcaaaggcaagctaacaaagttcaagtaaaaattattttttatatattacagcttctaattggcattggtttcttctcaggttaaagctgtatttttcttaaaggcttataaaaattttgctgaaaaaaatgttggtgcttcggtgcaggcttggaacctcttttcctaaactagataacttggtaccaaaaggcaaaatgaagattctcctggtctttctagggcttcttggtaattctgttgctatgccaatgcacatgccccgaatgcctggatttagcagtaaaagtgaggagatgatgcggtataatcaattcaactttatgaacggcccacatatggcacacctggggcccttctttggaaacggtctccctcagcaatttccacagtaccagatgcccatgtggcctcagccaccacccaacacatggcatccacggaaatcctcagcacccaaacgtcataacaagactgatcagacccaagaaacccagaaacccaaccagactcagtcaaaaaagccaccacaaaagcggcctttgaagcagccatcacataatcaacctcagcccgaagaggaagctcaaccccctcaggcattcccaccatttggaaatgggctattcccctatcaacaaccaccatggcaaattccacagaggttaccaccaccaggttatggacgcccaccaatcagcaatgaagaaggggggaatccttactttggatattttggatatcatggctttgggggtcgccctccttattattcagaagaaatgtttgaacaagattttgaaaaacccaaagaagaagatcctcctaaagcagaaagtccaggcacagaacccacagctaattcaacagtcactgagacgaattctacccaaccaaatcctaaagggagtcagggaggaaatgacaccagccccacaggaaacagtaccccaggactaaacactgggaacaacccttcagctcgaaatgggattggcccactccctgcagtcaacgcttcaggccagggagggccaggaagtcaaatcccatggagaccaagtcagccaaatattcgtgaaaatcatccatatcctaatataagaaattttccttcaggaagacagtggtatttcactggtactgtcatggggcacagacagaataggcctttttacagaaatcaacaagttcaaaggggtcctcggtggaacttctttgcttgggaacgtaaacaagtagctcgtccaggaaatccagtttatcacaaagcttaccctcctacttcaagaggcaattatcccaattatgcaggaaatccagcaaatctcagaagaaagcctcaggggccaaataaacaccctgtaggaactactgttgccccactgggtcccaaacctggccctgttgttcgcaatgaaaaaatccaaaatccaaaggagaagcccctgggtccaaaagaacaaataatagttcctacaaagaatccaaccagcccctggagaaactctcaacagtatgaagttaataaatcaaattataaactgcctcactctgagggttatatgccagtcccaaattttaattctgttgatcaacatgaaaactcctattacccaagaggagattccagaaaagtcccaaattctgatggacaaacccaaagccagaatttgcccaaagggattgttttagggtcaagaaggatgccatatgaatcagaaactaatcagtcagaattaaagcacagctcatatcagcctgctgtataccctgaggaaatcccttctcctgcaaaagaacattttcctgctggaagaaatacttgggaccaccaagaaatctctccaccttttaaggaagatccagggaggcaagaagaacatttaccccatccttcccatggttctagaggaagtgttttctaccctgaatataacccatatgatcccagggaaaactcaccataccttagaggcaatacatgggatgagagagatgattctcccaatactatggggcaaaaagaaagtccactctaccccataaataccccagaccagaaggagatagtcccttataatgaagaggacccagttgatccaactggagatgaagtctttcctggacaaaatagatggggtgaagagttgagcttcaaaggaggcccaacagttaggcactatgaaggtgaacaatatacctcaaatcagccaaaggaatatcttccctattctttagataatccatcaaaaccaagggaggatttttattacagtgaattttacccatggagcccggatgagaattttccatcatataatacagcttctactatgccaccacctatagagagcaggggctactacgttaataatgccgctggaccagaagaaagcactctatttccttcacggaattcctgggaccacaggatacaagcccaagggcagagagaaagaaggccgtattttaacagaaatatctgggatcaggcaacacatttacaaaaagccccagctaggccaccagaccagaaaggtaaccagccctattacagtaacaccccagctgggcttcagaaaaatccaatatggcatgaaggtgagaatttgaactatggcatgcaaataactaggatgaattctccagagagagaacattcatctttccctaacttcatcccaccaagttacccatcaggtcaaaaagaagcacatttatttcacctaagccagagaggctcttgctgtgctggtagctccacagggcccaaggacaatccactagctctacaagactacactccatcctatggtcttgcacctggggagaaccaagacaccagtcctctgtatacagacggtagtcataccaagcagacaagagatatcatctccccaacaagcatcctaccaggccaaagaaacagctcagagaagagggaaagccaaaacccttttagagatggtgtgtccacgctgaggaggaacacaccatgttctataaagaatcaactgggccaaaaggaaattatgccctttcctgaagccagttcccttcaatcaaagaatacaccttgtctcaaaaatgatcttggaggagatgggaacaacattctggaacaagtttttgaagacaaccagctcaatgaaagaactgttgaccttactcctgagcagcttgttattggtacacctgatgaaggctccaatccagaaggcatccaaagtcaagtccaagaaaatgagagtgagaggcaacagcaaagaccatctaacattctgcatttgccatgctttggctccaaattagcaaagcatcactcttccaccaccggaactccatctagcgatggaaggcaaagcccatttgatggggattcaattacgcctactgaaaatcctaacacattggttgagttagctactgaggaacaatttaagagtataaatgtagacccacttgatgcagatgaacacagtccatttgaattccttcaaagagggaccaatgtacaggaccaggtacaagactgcttactacttcaggcctaggggttatccaaccaagcattcttggggaaagagaaatcactgacattctataccaatggttcccaaaattttttccccaagacttaattaagtgtctgactgtcttggtgatccttaagttttctcccctctcagcaataggagtagcgacccaggtggagctgagattaggcctctggggatcaccagatctagcactttcacagattagtgcagaccttaaaaaagcaagaaggccatgaccatccctgcctcgaaacttgcaagtcacttgtctgagttagtttccttttgcttgatgacttcttttgctctcaaagttccatacttgcaaaattggtttttcaagactgaaaggcagattaactttccattctacttatggagatccacacatcagtatagtcctgatgcactgtacgttttttgcttgtgttgatcttgtcaggtttttttcctactcaatattctcttcaagcattttttttcttccactgccactctctttacctttatcatttctttttcttagctttcttccttcttttctctctccctcaaccattctgtatttagctttctaatcctcatctttttctctctgtatatcacttcttacatattaaattagctattttaaccatttctagtctcttctttatgtctacctcctccattatgtcttcgtctcttccaacctatctgttctgtctcccaatgtaccacttatcaactaatccctctcctctctgattcctttcttcccttcaatttatctttttccctgttacaccattttcatcttaagactgcatgtcactctcttcctttttgtatccactctccaaatcgtaccctaaatttttcttgacccagcttaaccatcattacagaatatattttggaaatggtagacactgatagctactttgtttttagttatcttagggtctctaccaagtagacacagttcagttagagagacgtatttaaggagaagggaaggcaggatacccagaactagcagcctagggaaaaggcttaggaagatggagaatgaggaactgaagaaactgccgctctgagactgcacatccaggaaaaaagactaggacttgccacacactgccaattcataatccgcaggatctgtagaagacattttgggaaacactgtcttaaataaaaactcaatgtttagttgtttttttttttttttactagttcagcataagggattctaccagtatgtgctactactaacattcttcatgtccatgcagaattacttacagacactctttcttggtatcttgaataaattgtgtaaattattttgaaaagtggatatttctatatgccttgcttataatacatcagggattattattcttattaataacatgttggcctattatctggatgtcccttgcctagagcaggaaaaaagtctcagaattacctaaaaacatactttataactttaagagatttcttaggatacatcttcaggggcagatttcataacaacatctcaaaaatttggggaaacacaacgttgaaaacttcctaagaaaaggaatcttgcccttgaatcttctgaagtacctagcacagtgtcttcaacatagaaggtacccaataaatatatatcaattcattttttaatgactttcaacactcccatgaaaacaccgtagtctgcttttcctgaaaggtgactgtctaggatgctgaatgagccaccactccgtagctttatatattcagcaacatttccatcatagaatttcagcgttagaagggatcttagaggtagattatccaggccatcccctactgcttacattcccctccccctggccagttttatattttaatcacacattgaaaaattcattaacttattctgtataaaactgtcttttaagaattatcctttcaaaataaaaatgttattgtttcactagtttatttttccaaatgattttttttgaaatctcaatatgagtactttcattacaagatactcacttcacatttcaccaaaatgcatgggttcacataattgttttggcagatatgttgacatatctgaatttataagacactgctacttaaactaccatctgagatcgctgcaatgtaaaatgtaaaaagtacagtgtgacacttccaaactgtcttgagcataagtaaatattttttctaaaaatgtatagtgtgaccaaaggaacacatattttgaatttgaaaacacacagtgaaaagaagggaaaatgtctctccagaaaataactgttttctttttttttttttttttttttttttggtttttgttttgagacagagtcttgccctattgcccacactggagtgcagtggcaccatctcagctcactgcaacctccacctcccaagttgaaacaattctcgtgcctcagcctcccaagcagctgagattacaaatgtgtgc

SEQ ID NO: 246599 - DNA, 340 bp, Homo sapiens
aattcaaaggctgcctgtgtaactatgcatagcttattacttcctttcttcacaagtttagacaagtttgatcatgggaacaatgagaaactatgctcatgattgttcttcaggaagatttatctgatgcagtgcctgagtgtggagagacacaagagttaagtgattgataaggaggcaaaaccttgggagaaaagagcttctggaccagggtcttgacctagtggaaaaagattggctggatgtggtagctcacacctgtaattccagtactttgggaggcagatgcaggaggattgctggagccccagaatttgataccagcctaatgtctctacca

SEQ ID NO: 246600 - DNA, 431 bp, Homo sapiens
tctcaaacttcaagagaccaaggtgggaggatggctgggctcaagagatcctcctgccttggcttctcaaagtgctgggattgtaggcatgagtcactgcctgtccatataaagtaacactcttgaactcactatccagacttgaggttttgttaagttactgttaaaattttgtcaattttgctcttgagttttcaaaataaacaggtcattacagataaagttgaagttccctttgtcccttccccagtaccgttcccctccctttcagaagcaccaccatcatatattttttctatttttatcatagatatatatccatggataacattataaggcttcagtgcattttaaaaagaggtccaatggttatgatataatttataactttagttttccatcgcacatttttaaaaaagttggcggccggg

SEQ ID NO: 246601 - DNA, 270 bp, Homo sapiens
gcagagagctttcaatccatttccatggagtttccctcttggatgagtggacagacaagggtcaccagatatgtaagggaagatttgaatatgaatatcagaagtaaaacaaagaagaaaaacctattgaatgaaacactgatggggaagaaaatttccagaaaaaaatgttaatattttccaaaagagaagatatcacagccataaaacagtaatttttaaaaattcagagaacaaagagctcttggaaattaaaaccataataggaat

SEQ ID NO: 246602 - DNA, 363 bp, Homo sapiens
cagccaacaaatgcttactgagtgcactgcattaggatctaggaggacatgatgatgaactagtcttcaaagtgcttactttgtagatacaaacagacagataaataaaatatgtaaaagttgtaattgatgcagtgaaggaagcaaacaaggggaatgaggtaggactaggaaagagagacctattttaggtggaatgggaagagaaggcctctctgggaaatattattcaagctgaggaccaaagcatgctccaggatcagagggtgccagtcatctgtggaatggtggtagggtagaaagtggttctggaaaagagaatgcaaatgtgggcaagaccatgggatatctgaggaactgagg

SEQ ID NO: 246603 - DNA, 374 bp, Homo sapiens
gtttgcacacatataagatggtgttttttccttcatctctaatgatttcataaggtctcagttctatatgacatttggattttgaatttataataccatgtttatatatttaacatggacacatggcaagtgctgggaattaaagctaaatatagacttgttgactgaacaatcaaactatctgcttgtcttagtccattagtagtagtttcactggtatggttgatagaaagcactcaccctcctcatacgtgcatgagacgaggccaagaagtgattcctgtgtaaattggcagccatgacagtaatgatgtttgcctaaaacatgtgtcagtaataggaaagatgattaggcaaagaagaaaaagtttaaa

SEQ ID NO: 246604 - DNA, 453 bp, Homo sapiens
ggaaacattagagtagaaaaagaaaaaggatttgagaatccagtaggaaattcagttaatcattccttccctgttactcaactaccttaacattgtcaggtttacctgaacataaacttcattttcttaattgttcttagaacgaagggatatgtttattgaaatcagtaattaagaatattttgggacagttatgatttacttagccagtgaagcagtttctattcccaaatccaggcaaagagaacaataagattaaacgtaacctaagagatttcctttttgtcaaataatgtgattttgctatgtatagaggagatgtctatatgtaagggcatatttatgaccagtagttcctaaaattaaggggactattattgtgttactcaaggtatcagttgtataggatacattatgtcatatttcaaacaatgtttataaagagattagtat

SEQ ID NO: 246605 - DNA, 457 bp, Homo sapiens
aaaagctacttcaccttaatcaccaataattgaatataaatcagggattatatctgcttatttagaatgaatgtcttcactgatgcattccttagttaacttttgatgaatgtaccagtttgcttggtgattgttattgccttctcagactctctgtaccttttttgtcaatttaaaacgtaacctagagagctgagtatgctgagtacttaggctagatatgaacaagctggacctcttaaagtcacagttggttgtgaaattagagattctctaggaaggattcctttaccctctagtaattccaaacctctctgcttactgatatttaaacaattcctttaagagaggttcttttactcaacaattaagagatgggacttcaaatgtaaatactccaggagagagttaggtttaaaactaaagtgtcaaagagagccagttttcagcctggggt

SEQ ID NO: 246606 - DNA, 616 bp, Homo sapiens
gttggggtgagggctggcctgtctgaggaggggcatttgcagtgctggagcaagccatggaggacaggaattgctccagtcagaggaacagcaaggacaaggggcccaagacggcatgtactagaggctccacgcatagaaaaagccagccatccccagtgctgtaactgagtggccagtggtgggaggtgaggtcacagacgcggagggggcatacatgggtctttgtaatagttaattttatgcatcaacttgactggatcacagtgtgcccagatatttgatcaaacattattctgagtgtttccgtgacaatgtttttggatacaatcaacatttatttaattggttgaagacctgaatagaacaaagagttcaattctctcaagtaagagaagtcctcctgtctgactacttcagaattgggacattggctttttcctgcctctacactacaactacaccatcaagccttcagacatggaaaggaaccacactattggctctcctcggtcttcagcttgccaactcaatgcagatctttgcatttgtcagccttataaccatgtgagctaattccctaaaataaatgtcctcatttaaatgtatttcctat

SEQ ID NO: 246607 - DNA, 438 bp, Homo sapiens
agtatttacaccatggacatcagcaaatgcaaccaagacctcccgctaccctggagagctgggtttaagacatttgccagcacaccactgcccagggaccagtctcagctccagagctgtgggttattggtaaaggatgtgatttcattgagcctcagtttctgtatctgtaaagcaggaatctatcacttatgaaatatcctgtgcaggcacaatcttaggtgtggaggatacaatacaacaattgggacattggctttttcctgcctctacactacaactacaccatcaagccttcagacatggaaaggaaccacactattggctctcctcggtcttcagcttgccaactcaatgcagatctttgcatttgtcagccttataaccatgtgagctaattccctaaaataaatgtcctcatttaaatgtatttcctat

SEQ ID NO: 246608 - DNA, 451 bp, Homo sapiens
atttattcacagactagtcccttctgccttctgggcaggtcacatctgaaagattatcctctttgaatcagtttgaatgttctagtgaccaggccacacagtttctcttgacatttaaaaataaagcttccagtcttgtcactaatggatttggggtccagtacccttaaaatcacctcagagctgcctgaatccatagactacttgcagaatcactggttttacttggatcaagccatctgagaagatttttatatacctcaacatattaaaggtatgaaaagatcatgcagaaaaaaacctgttcagcttcatctcacatagtatttctgccacttatttcaccacagatactttgttaatatcttggaactcttgtttttagaaaaaagcattggaaatggaggagactgtcaaggacaataataaatgatggtactgtaaacaccta

SEQ ID NO: 246609 - DNA, 408 bp, Homo sapiens
aaatgtaacatacacatacaatggagtattatgcagccttaaaaaagagggcaatccgttcaacaggttacaacatagataaacttcaaggacattattatgctaagtaaataagctagtcacaaaaggacaaatagtgtatgattccactcatatgaagtatctaaagtagtcaaaatcttagaaacagaaagtagaaatatatttgctgagggctggagggtatggggaggggaaattagtttttaatgcatatagtttcatttctcaagataaaaaagttctagagatctcatgcacaatgtgaatatacttagcatttttgaactatacacttaaaatatgattaagatggtgaatgttatgctatgtgtttattaccacaataaaaaatatttttgttgctaa

SEQ ID NO: 246610 - DNA, 497 bp, Homo sapiens
ttgttttcaaagatttacaacttcagggagacaaaggaaactccagctcatctcccacatcattgattgagaggaccattttctgactgtctgcacacgtttcctatactaccctttaatgcaacaatgggatgaagagatgaagacttctagcaggctacctcagaaaggttgctgaccaaaggctgtatggaccaaaaagtcataacaccaccctggatgaaaggacatttacctaaggaattacccgctctcaattcttcccaggtgcatgtagtatagattaaataaggtggttgtatggcaacagagacattattagaaacattcttcttgaagtttgacaacaaagcagtagatgtgtatctactacagagttgttagtgaaaaaaggtatgtttgaagtaatcaattggtattcattttaaacagtaatggtcttactgaagctaagtttaatacatgctgtgtttggaagtaatttctttaccactgtg

SEQ ID NO: 246611 - DNA, 457 bp, Homo sapiens
gtcctcctgagaaccagctaggtcccgaccacttgcgcatttgaatcatttctgatctgggtttctggcctgggctctgcaggccctagcacccaaggaggccaactcactgaagtagcctacgcttcaatgtttggctgtttgcatttcttgacaaaggaaatttgttgggcttaagttgccaagggtttgcatctggatcctatgatgtttggctttgggagggctgtgcgcagaactggctctggggcctccaccggcctccatgtaattaacttaagtgcttcgaagatgaaagcttatttgcctgatcctggattatggcatgtgccgtgaaggtaggcagagcagacctcgccagttatctctcgctattgaagtttccaaagaaaccagtggtggacagtggaagtcaggaagtttgggcatgttggaatttattaaatttgcagttaaa

SEQ ID NO: 246612 - DNA, 461 bp, Homo sapiens
gagcacttggcagggagtgataaagaactcaaagtgcgttgtttccttcagaggagctcaacagcatcagtccttaaagaacagcacccccggctgggtgtggtggctcacgcctgtaatcccagcactttgggaggccgaggcaggtggatcacgaggtcaagagatcgagaccatcctggccaacgtggtgaaactccgtctctactaaaaataaaaaaattagctgggagcttgctaaacaagtggggcctcacctcagacctactgcattaaaatctacttttagcaagatccccaggtgatttgtaagcatattaaagtttaaggcgcgtgcctgtagtcccagttactggggagactgagacaggaggatcacttgatcttgggaggcggagatagcagcaagccgagatcgcgccattgctctccagcctgtcaacagagcgaggctccgtctc

SEQ ID NO: 246613 - DNA, 411 bp, Homo sapiens
gcctaggggctaggatgtgatggacatattctataaacacaataaatattataaaacagagtgaatctaacctacacatgctcagcttggagtaattaaaaagaaagaattatatatatgaacattcaaatatttagaaggaattataaatatatgtgtgtatgagtgtgtgtgtgtctgtgtgtgtatatgcatgcacagagaagaatatcagtttcaaagcagtctgtactgccttgatattggagatattgcatcaactttctgcccaaatactaattgttaatttggttgattaggtcttgatgggtaatcctgtggtgctggtttcaagtgaccataatttagaatctattgactctaagtttcttcaagtaatgcctgttaaatcttcccccccaaaaaaaagaa

SEQ ID NO: 246614 - DNA, 456 bp, Homo sapiens
ccccctcccatttctccactctcatctgcctccctctcccccaatagccacagtgttactattattgtcccaaatccccaagctttcccatcccaggacctttgcacaggcagtttcctctgccttgtcctggctttttaaatgacaggcttcttctcagtttaactactttcctgctgggtggggtggctcaagcccttaatcccagtgactggggccaaggcaggaggattgcttgaggccagaagtttgagaccagcctggacaacatagtgataccctgtctcttagggaaaaaaaaaaaagttacgaaattaagacaccacaggtgtgtggtggcatgcacctgtagttccagctacttggaaggctgaggcttgagcccaggagttcaaagctgcagtgagccatgatcgcaccactgctctcttgcctgggcaacagagcaagactccc

SEQ ID NO: 246615 - DNA, 253 bp, Homo sapiens
atttttgcagagggaatggatgctgttaaggatgtcatgaccggctgttgatgcccagaagtctggttgttcaaggcactatctgagactgaagaaacacagactttcccatcggttccctgaaactccccctcccttttgtctagctgcacaaaaactccctgcttcacctttttgttaagacagatttgagagatcttgccctcctgccctcttgccttggtcaaattgaataaacctttctctatctcca

SEQ ID NO: 246616 - DNA, 400 bp, Homo sapiens
tccataatccccggagaagcagggaacaggttctgtgggtggggtttgggctccccagcctgctttgcccagcaggggtgggggcagtggccctcatgagtccagacccccaggaagcagctggaaacatccagggggctgggatgggagtagggtcccccagatggccaagttttctccccttagcaaggcacaggtagtcatgcttccctgtcgcaggcaggcggctgcactgccttgctgtaggctccccttcccccctaagcaccaggtcccatcatctatcagacagccccaccctgttgtgtttttctgtccactcactccagcactggctggatggggggtttgggcccccaggaggcccagaaggagcccgttggggtctgcctgtctggtg

SEQ ID NO: 246617 - DNA, 433 bp, Homo sapiens
aacaattaatgagcttgcagacatgctatttgaaattacacagaggaaatggaaaatgaattttaaaaagtgaagcacacctacaggacctagaaaatagcctcaaaagggcaagttattggccttaaagagcaggtaggatagggttagaaagtttattcaaaggaataaaaatacagaaattcccaaacctagagaaaggtatcaatataaaagtacaagaaggttatagaacaccaaacagatttaactcaaagattacctcaaggcatttagtagtcaaactcccaaaggtcaagtatgaggaaaggatctgaaaagcagcaagaaaaaaaaaataacatagaatggagaaccaatacatctagcagcagagttttcagtggaaactcaaaagccagaagagagtgacatgacataaagagctgacaaa

SEQ ID NO: 246618 - DNA, 482 bp, Homo sapiens
ctcctgtagtcaccaaccctggctccagccagaccctcccaggcctctgcaaaagctgcagctcagcgaccacagcccttgtaggaggaagatttctttaacaaaaaaagcatggagcacccaggctagcatggccctcggagatcgtccaggccaacacagaagcccagcccaaagaggagagcactcagcaggctacagacacaggccgctctgcaatgttcgtggtggctccttaagagagcctctggtacgtgaaatggaggaagaaaaccttccagcgtttggcccatcactggcagcaaatgaaaaaccagactctgtgacacattaatcatggagccagctgctccttcctcatccttgtcagggctgtgctaagtgcccatcagccataagctgcttcatgagccttctctgagcacaggttacccaaccaggattggtggctgagaataaataaataaataaataaataagta

SEQ ID NO: 246619 - DNA, 459 bp, Homo sapiens
gaaagaggctatctattacggggaggcagagctactcctggttccttcttttaaatgtaatctatgagaaagccatcttcacaacgggaaatggcatcccccactgcaaaacgcacgactgtcattacctgggaatcaatatatttttttaaaccaaatatatcattatcaattgattttcctttttcctcttagcactccagagtcccgggtagcaggggaaagctttaatgtgatatgaaggatttggacaggtaaataagttattgtaaactcattctgccttatggtcagcttccctctgacaacgcaacgagtctttctcagatcctctcaacctaagcttttccagcggccgctgatagagatgcacgtgatccatatcaaatagccattttcaagctgaaggtggcaaaaatattatttttctcaaggatagaatgttctctttacgactaa

SEQ ID NO: 246620 - DNA, 329 bp, Homo sapiens
ctagcagtgagcaagactctatgggcatgggatgtgccaagccaggcatgggagggtatctcctggtctaccggttgctgagaccatgggaaaagagcagtatttggtcaggagtgtaccgtttctccaggtacagtctgtcatggcctcccttagccaggaaagagaaatcccccaaccccttgtgcttcccgggtgaggcaacaccctgccctgcttcatcttgccctccatgggctgcacccactgtccaagcagtcccaatgagacgaaccaggtacctcagttggaaatgcagaaatcacccatcttctgtgccaatcttgctg

SEQ ID NO: 246621 - DNA, 269 bp, Homo sapiens
gtaaagaaaatacaagactcatacgtggaaaactacaaaacattgttgagaaaaattaaaaacaagctaaataaatggagagatatcccaagtgcacatggatttcaatattatcatgatggcagttctcccccaaattgatttattaacctaacacaatccctatcaaacacccaggaagctttttttgtgagaattgataacctaatttaaaaatatctatataaaaatgcaaaggatctggagtagccaaacaattttttaaaaga

SEQ ID NO: 246622 - DNA, 595 bp, Homo sapiens
acacgctcccccacttctttccgtcctccagtctttcatgttccttcgtcccctccatccccccaaaccccaccctttcccttcaatcccaatcacataaaaatcttctaattgtattttttcaaacagacatcgagacattgatacaacaccttccaagataaagagacaagtgcgtcctgccacaagtgtgtgtgagtgtgtgtgtgtgtgtgtcacgatcaaacacgcgcttcatccctcagacacctctgggaaaaaagctgactggagatacccaagataataacgaggagctaaacctaatttcagcggaaccaatggtcccagcaccagcgcccaacatttacctttccttttcgcagtatgtaaccctttaaggtctcttgccagctcaagctactcggtgctcccatgcacccgcccagttagcaccccatttccaaatgctctgcaacctaccacatcttcgccgcctccctcggccaccgcacaagcagctccccgcgagcgccgaagcctcccgccctgccacccccgcccccggccggcctctggggtcccacacctcgcgcgcctacggtcgccgcggccg

SEQ ID NO: 246623 - DNA, 905 bp, Homo sapiens
ctgagattgagtctcgctctatcgcccaggctagagtgcagtgccgagatcgcagctcactgcactccaacctgggcaacagagtgagactccatctcaaacaaccaaccaaaaaaggaacatacatcgagtaaagaccaattttatgttacaaatacataactgatttgtaacagttctaaaaatatataagctgacaggttttgagaggtttcattagaattataactatttaattagaaaagtaaaattcaagcaccaatattgatttgtaatcattttaataattatcaagaaccaaaaaagggtaaaaatatctagcccctccaaataaggaaactagcaaaaaacaaaaagggataaataagcattagtaaataaaaatagggacaaaatcgttttagtgaatgtaaaaatttagcaaataacaaaatcagatgaaaacaaaagtttagattcattcaattcatctatgtattagagaaatacttgttcttccacttatggaattacctaaacaaaatgttgttgtatgtatctgtccatgcactatagaatacaatatttttaaaattatccattgctttgttactattagtgttttgttttctctttatttgcacatataaaccagagttgactgaaatctaacttaattctttgaaatcacttctcttttccctaaacagagaatattaaggaaaacaaagacagtggatgagtctcctaggtgtccaatgagagtgtgacctttcgctgctctgaaataggtcaatagtatgtcaaggttggaggatgagtggtgagtagtacaacaccaccatgaccagattaacttcagtgctgactgaaataaaaccctcaccagggactaatgctataggccaattccttgctttttctct

SEQ ID NO: 246624 - DNA, 372 bp, Homo sapiens
atacacatgaaaacccccaaggggaatccccatatcacagtgtagtgtgatatttgacattcgtgatcatctagagatgtacagaaaaggtgaatctgtgttctgtatattctgcctaaggcaaagaaatgtttagctctctttaaaatagttccataattttttctaaaaagctttgcttgaaaactgtaagcttcccatatctggagcatttcactttaaatatttggataaatatgttatcttcttacttggacatttcatgtgtttagggattgtcttctaaattcttcctaattcatatagctgctaacacttcccgcagagctaaaccattacagatatgaaataaagacctattgatttgactta

SEQ ID NO: 246625 - DNA, 330 bp, Homo sapiens
caaaaactggtttcagcataaatttcattcaaacagaattttcctaggtatatacgctctccccagaggctataaaataatgtattttaaaccgcctttaccatgggactaattttttagaattacatacaccctttagaatgttttaaaaattattatttaggacatagtgttagtttgtggtttggtggcagttggggaatcaacaattaaataattaatttttaactagtacttctcattccttagttagaaacctaactacctgctggagatcaccaatgctcatcagagaatctgtgacactctttctttcttagaatgacaaaa

SEQ ID NO: 246626 - DNA, 423 bp, Homo sapiens
taactcccacatcttccaagtaacacatctttttcagtacttgaataaagaaaatttggccagatgtggtggctcacacctgcaatcccagtgctttgggaggccagggtgggaggatcacttgaccccaggagttggaggttacagtgagctgtgatcacaccactgcgctctagcctgggtgacagagcaagaccctgtctcaaaactaaaaaaaaaaagtgtatgtgtgtgtatatatatatttctgtttttttactagaagcaaatgtagttttaagatattcttattgtctagatgtgtgcaatgcaacattaataaatattagtaataaattttaagccagaagagcttacagaatttgccataataaaaataaagtatttcacaaagcatgaagtattacctactaagtagaatct

SEQ ID NO: 246627 - DNA, 490 bp, Homo sapiens
cttatcatgaaggaaatacataataatgtaatataatgtccaaaggcagagatcaagtgaagccaaaaacatacatcaaaaatttagtgtcaccaattttcctgtcctgatatatgaatctcagctcagcgaattaacatattccctaccttttagactggcccttgaatattgttagagataagtgtccttagagatagagaatagtgtccttagagacagagaagaaaaaattattatgcaactttaaaaaattcacagatgagaaaattactcttcttgtcctagtgagggcgttcagtgaatgttcatataaatgcttatatgtggtttctggctctatgagtatttcccatgaaacccatagatgtataaaaaaagtagaaaatatttcaaataatactgacctactggaagtactttaatgctaagtttagattagttggatagcctataagtaggaatagcaaaataagtgcctataaaagca

SEQ ID NO: 246628 - DNA, 431 bp, Homo sapiens
aactaactggagataaaagatagctagtaaaatttgttatgtacgctgataatggtctaaagttgtctgtggtgattaacttttgtcttcctgtaagagagggaagatggaactcttctgtgcatttatgtcctgtttttaggaagggcagacagatttatctgtttcttttcaattgccttcagctcaaaataatccttatgccaaagtggcatatttcagggtggcatattctgctagggtccaaagggctttcagtaaccatgctggtcatcagcgaaatgggacacttagtacctccatgaaaaaaaaaaatccagctgactacactcatttaaaggaaatatactcatttaaaggaaatcttatgaaaagcattttttttaaaacttttattggaaagaataaagaccgcacatccaaaaaataaa

SEQ ID NO: 246629 - DNA, 477 bp, Homo sapiens
cagggactcgctatgttgcccaggcaggtcttgaattcctgggctcaagtgatcctcccacctcagcctcccaaagtattgagattacatgagccactgtgcctgacccttagagaatcttgaggctaagaatcaggggtgaccctgatcaagttccacatgacaaatctctccactggccttgggagcaggtgggaccagcgactggaccttcaatagaggaagaatgacatcaagggcattttggtgaagagccaccaaagagatgtgaccaacacccagatgcccttgcacacagcttggcacttacctggatactcaataagcaagctggctttggtgccacttaaaaagcttaaccattaaaaactacagtataatgtagtataataaagaagaataaaggtgactgctcaaagaagcaaacgaaatctccctcccactcatcctttttctgggcagactaaggatgtatcc

SEQ ID NO: 246630 - DNA, 475 bp, Homo sapiens
taactttagattcatttgtctcgactgtactgtgtcttcaaccatactgaatcttttttggttcttagatcagaacaagttccttctgggcttacatgttccttcagtatgttcgctatgtctgaggcactgtcctttggttgaaataatccttcttatcctttatgtgttatttcaggtgtcagttggggatttcgtggtaccccatgggtgtctgcctgccggtctctcttttctaccaggttgtaatctgtgtgagaggagtttgtcgaggtcatagtactatcttcagtaccttgtgctgttagtacggtcattaaatgtataaatgcagcatgggtgctccttgggctccctagatgaacaaatagatcaagttattaatattaaatgcctgtaatcccagatacttggaaggctgaggcacgagaatcaagaatcccttgaacctgggaagtggaggttgcagtaagcc

SEQ ID NO: 246631 - DNA, 291 bp, Homo sapiens
cacgccccagccacacccttgaacaggaacctttagtggagggcaggataggggtttaacaaggatccactgccctctggcatcaaccttccagggaggggcggccacttcccccgactcagggcagaggggcactccttcacctcctttccctgactttccatggccctgggggtgcaggggtgaggctgtgaaaacgtgacccatgggggaggggagtactgaggcctggaccctcccagattcctccaggagttcgaaactgctaaaacccagtgccaccagccacca

SEQ ID NO: 246632 - DNA, 408 bp, Homo sapiens
ttggctatagtttgtcaacccctgctctctagaatattctcagcccccgtgagtttccctcatacccctcctggtcagtcccccaccagtgatacctctcctcacttcaaacatcatgcattggccaggcacagtggctcacacctgtaatcccagcactttgggaggccaaggcaggcagatcacttgaggtcaggagttcgagaccagcctgggcaacatggtgaaaccccgtctctactaaaattacaaaagattagccaggcgtggtggtgggcacctgcagtcccagctatttgggaggctgaggcatgagaattgcttgaactcgggaggcagaggttgcagtgagccgagatcgcaccactgcactccagcctgggcgactgagagagactgtctcagaaa

SEQ ID NO: 246633 - DNA, 458 bp, Homo sapiens
ataaactcagtatcattttttgatatcaaatttagttatcaatttagtactagaaccaaattacttcacaaaccatagtctgttgtgaccaacacccctggcagaaaatttagagtagctctaactttgggcagctggagaataattaagatgctttttgatatgctggtgatgaaactaggtggtcttcagaaacctccctgaaacaaaggctgattcccacaccccgaaatgtcaccagagcccgagtctgaggtgggtccacagctctcacccagatctcttgtctccaccaaaaagagcacttgcctggctatcatgttctgttactgtttgtaaaggaaaaatagaatagaaatgcaacactaaattgcccgtgtcactgagtagaaagtgtgccaattatagtgcagatcaaagttgatttttaataaaaggcttgtgtttaggctttgata

SEQ ID NO: 246634 - DNA, 340 bp, Homo sapiens
atttttagtagagacggggttttcaccatattagccaggatagtctcaatctcctgacttcatgttccgcccatctcggggctcccaaagtgctgggattacaggcatgagccactgtgcctggccgagaccagtgaaatatttgtcacagttcacacacctagtaagagctgcactgggatgtaaactcaggtctacctgactcagcacccacatgctccttttggtagccatgcaacttcttccaccactttttcaggatattagactcacagaccgtcagagctggatgggatctcagggatgatctggttccagcaatctggtttgacagattaaa

SEQ ID NO: 246635 - DNA, 619 bp, Homo sapiens
ttctgaacttgtttcctgttgggaagggagcccacaaattggggtaatttcagcccctcctgttgacagggtgtcacttcccactggcacctgtgaccctgcagtttcatccacctcttttcaactcctcaaacctgaggcagccctcagaactcacagccaagggccatttacaaacctaaggcaacgtttggagactgggaggggctgtaattcacagggcagaggacccgggctcctgccaccctggaggagtggcctagagcctcaggtcacactgggtctcccaggtgtgaggagggcgccttggtgcgtttgcttttttgggagccctacatttctctcatctgcgattctacagttctagaattgtcgcagtcctgccgttcatcctgtgtccctccagtgcacattttattagtaattcttgtttatactcttgctgcttaaattctagtgtgccgagaaagtttttctgatttcatcgaaagaagaaaggcacacagttctaccatatgacagatttttaacagatattctaaaaaaaattaactttccactgttttaaatgtactagttgtcattgtttcatataattcgtaaaggatttctgaagccc

SEQ ID NO: 246636 - DNA, 237 bp, Homo sapiens
cgaaggctacacaagaagtagaggactccatgtttctggctgaactgaaagccctcagtctttctactgtaccatgctactttctgagtggctattttttagatttattttctgtcctggcccgtatcttattgattagtttcttgcctgtttgttcctaatgtgagtgctttagcaatttaacagacactaaaaatatattcttccttatcctgcttccccaccaccaccaacaac

SEQ ID NO: 246637 - DNA, 430 bp, Homo sapiens
atcctcccacctcaggtaaataggtgggactgcgcccagctttaatatacatttaattagaattacaaaatgagtggagcaagaatggtgcagaagcaatatttgaagagataattgatgatcattttctagaactgcagaaagatgaatttgcagattcaaaagtgtatagccttaaagaaaagctaaaagctaaaaactgagcaagcatccatcttgtaagtcagatcacattttgtaagtcagagaaaacacagcaaaataattctgaagaagataaagagaagctaggcatggtggtgcatgcctgtagtccaagctgcttggaaggctgcaatgggaagattgcttgagttggaggccagcctgggcagcatagtgagaccccacctaccctgtctctaaaagaaagaaaataaagggaaagaaa

SEQ ID NO: 246638 - DNA, 613 bp, Homo sapiens
aaaacacattccacagaggaagctagctttataagaatagaaatgcagtctcaggtacctagatttccatgaggtattatataaatttagggatctttcgggagttctcttcttctcttcagttttttattggttttcagaaaaatatgaaattttaaaattatacttattaacatgaaatgttatcctatgcacttcattacttgctatataatagaaattatacataacacagaaaaattatgtttcagttctttacataaaatggttcatagcataatgagtcaaaacatgactgttttccattattccttatatctctagaactcaatatttaacatattgaggtatataacataaaaggtatacagccctttacagtctaagtactttcagttatttaatgcacaataaccctgtgtagcaggtaatacactgcacagaggagaaactgaagctcaaggaggttaagtgagttttcccaggtagcacagtaggaagacagactcctgattccaagtcactattttgttaactacatcagagcagcatctctgaattaacagtttctaaactacattaagatttatctatctataggcttggcacggtg

SEQ ID NO: 246639 - DNA, 522 bp, Homo sapiens
catactagttcatgtttcctatctcataaatagttttattggttttcagaaaaatatgaaattttaaaattatacttattaacatgaaatgttatcctatgcacttcattacttgctatataatagaaattatacataacacagaaaaattatgtttcagttctttacataaaatggttcatagcataatgagtcaaaacatgactgttttccattattccttatatctctagaactcaatatttaacatattgaggtatataacataaaaggtatacagccctttacagtctaagtactttcagttatttaatgcacaataaccctgtgtagcaggtaatacactgcacagaggagaaactgaagctcaaggaggttaagtgagttttcccaggtagcacagtaggaagacagactcctgattccaagtcactattttgttaactacatcagagcagcatctctgaattaacagtttctaaactacattaagatttatctatctataggcttggcacggtg

SEQ ID NO: 246640 - DNA, 561 bp, Homo sapiens
aaaacacattccacagaggaagctagctttataagaatagaaatgcagtctcaggtacctagatttccatgaggtattatataaatttagggatctttcgggagttctcttcttctcttcagttttttattggttttcagaaaaatatgaaattttaaaattatacttattaacatgaaatgttatcctatgcacttcattacttgctatataatagaaattatacataacacagaaaaattattgttttccattattccttatatctctagaactcaatatttaacatattgaggtatataacataaaaggtatacagccctttacagtctaagtactttcagttatttaatgcacaataaccctgtgtagcaggtaatacactgcacagaggagaaactgaagctcaaggaggttaagtgagttttcccaggtagcacagtaggaagacagactcctgattccaagtcactattttgttaactacatcagagcagcatctctgaattaacagtttctaaactacattaagatttatctatctataggcttggcacggtg

SEQ ID NO: 246641 - DNA, 790 bp, Homo sapiens
ctggagctgctgcctgagccctgtccagacagccgagatacactggatgttgggcagtgctttggctggacattgaaatgctgcatctgattggctaatttagtttccatttatatccctaacaaggcaagggaagagagaagccagcttctctcttgttctccttctataatgagagacaaaccatgcctctctcagacactcacaatggagaattcctcaatcctaagaaaggtggatcggttactgactgtgacagatgactgtcataactttcatgttcacggaaacttctttataaagtttctaaatgaaacgaaaacttggctaccaacctactctagtaacgcaacaacttgcccctctgttcttttgagttctggcttctgattgtttctcaccacattgtcaactccttgggaaagtactctgtatgttttaaagcaaattgccagggtttttgtttgtttgtttgtttgtttacttagacctcgggagataaaattaatcgacctctttaaatacatggaggtaacccctttctcgtttttgaagggagacacttgggaatttagaaattgggagtgtgagttctaagggctggtgtggtttagatagcccatgacagtttcaggaaggtcctggtttcctttcaagcaaaaggggccacctctgaaccaaagtggattatctcctgcagcagcaaatccagttggcagttgaattcctgcagttttatgggaatttcagtgaaacttttaaagctgtaatttttgtaactggagttaaa

SEQ ID NO: 246642 - DNA, 861 bp, Homo sapiens
ctatctgtagagataataatagtatccatatagtggggttattaggagaattaaattgaataaatgcatgtaaagtgtgcagtgcatggccaacaccatcctcaacacaccctagtgccagcacctgcccagtcccattctgcagctccacctccatctcaccggctcacagaagacgctaaacagaaacacaggaggcaatgcatttactgcaggacttggatatctccagtgagtgtagcattgtggctaagagggtaggcttcggggcagacagatgcagggcctaatcccagctctgctacttaccagctttgtatcctgaacaagttacctatcaccaccaagcctcagggtttctcatatattaaatcacacttaattttagaaatgttctggggattataaagtacttagcatggggttgtcacagagaaggtcctcagtaagaagtgggcattttcatcacaggacagagtgagacatactctagaacagcccagtctgaaagctttgtgtgatgatgtaaatgttctatatttgcactgtccaataaaggagtcactggctacatgtggcgcttgaaatgagcccagtgtcactgagaaagtgagttcttaaattttattttattgtgattaatttaaatttaaatctaaatagtcacctgtggctaatggctactgtattgcatgtcacagttctagaagcatggccagaggcttcctgggtattcagaaaggaaaaggagggctttcagttgggaaaggctcaggaagaaggcaacatgagctggggtcttctctgagcaggcttcttaaaggtgaaaacactccaacttgtggaagccctggctgtgct

SEQ ID NO: 246643 - DNA, 461 bp, Homo sapiens
gatgctgagttctctaaattgctttatgtgagatgtaacacaaaaccacatgttcaccactacaggaatagtgtggaaaaccaggtggtaataagggtctgccaaccaagacaaggaactccagaaaactattattgatgatcacagcaaaacctctgcagaaatttcacatctgctgaagcccatggcatttgcctagtactgccaaaggaaaaaataatgtcttctggtctccattccaccttcaaaatcatgctccagtgcaccttgttgttagaacataaattgtattctattccacagagtcaagagaatctagagaatttgatttctaaattcccagctccttcaaaacagaagaaaccttagaagggttttgctgcttgcaaaatgaaattaaacctgcacacttatttctgttctcttaataaagactttgaagagattaattcatgatacct

SEQ ID NO: 246644 - DNA, 311 bp, Homo sapiens
ccaaaaattgccacgacatttatttgaagtggaaatgtgtgtggattcaaacacatttggcttggaaacttggatgatagcccagagttgaagagcccacagctccctgcgttctggcctctggggtggtaccgctggtgtgtgttagagggtggattcctgggcggtggcccctggtgtgaaggggtaactcttctgtgtgggtggatagaggtcagtgccttcccagagaacctgcagccatcccctggggctgacatcaagagcctgggctatggctcaggcactgtgctagtcaaaggtatcatgga

SEQ ID NO: 246645 - DNA, 342 bp, Homo sapiens
taaggttccaatcgtaatcagcatccaactgtctgctagcaaaccatttctaataattaatttggccatcacagagaaaactgtcacgttccacaggagagatgtgaaggcaagctcttgcatgacagctgcaatgtcatcaattggggggacggttccgagcgtgtctccagagggaagaattcagggtgctgagatgatttaagccacaaataagcccagggcgcactggcactggggcctgttagcacggcagggacatggccacatctcagagagtgcgcttgtccagcggtggccaccatcagaactaccatgggggaaaaaataatcacacaattg

SEQ ID NO: 246646 - DNA, 264 bp, Homo sapiens
actaggctagcactatacactgtcttgaaagtggaagctccagggttctgtttaaaacttatcaccttcaaatgttagcattgaagtcaccttaaagatcagatccagtggttttcaatcaggggcatatatgagaatcacttgtggagctttgttctatcccagacatattgaatctgaattttcagaaagggggttcagaaataatattttatttaagttctgcacgtgattctgatacccactagtggttagtaaccacaa

SEQ ID NO: 246647 - DNA, 749 bp, Homo sapiens
atccagagctaaaaggacctggctctgactaccccctgctttgtttttaaccaggcaaaaagagctgctccggaggccaacagcgaagagccccagcctcagtgaatgtccatgctcactccggggcctcctcccctgtgcgtctgcagggcttgcacttcctgtgtgagtgtctggatctctgcccccttcccagaccccactctgtgacagcagggacatgcctgccacacgccctacttactgcatcctcaggctggcacgggggtgggcacaagaggcggaagagtgtggggcacccaggtcgggagtggggccgcctgggtccaaatcccagcacagccactgacaagctgtgggatgctgggcaaggtaatgagcctccttgaacctgaatttccccatctgtaaaatgggactaataactgcacatactccaaaccatgaggaggattcaatgagctacctagcagcactgagaatgctgcccggcactcacaggctactgcgctttcgccaccgttatcactatttgttgaatggattaatggcagcctagtttcaacttcctggaatagtgaaaattacaaaaaaggaaactgcaacctagagaggcaaagtgacttgaactcagatcctgagcctctcaggctggggctctccctccattaccctccaactcctccttgctggactagacacgagagcagggccttggcaggatgaggtccatctgctgcctgtgggcc

SEQ ID NO: 246648 - DNA, 580 bp, Homo sapiens
cctcttcctcctcctcttcttctccttcttctcttcttcctcttcctcctcctcctcttcttcctcctcctcctcctcttcctcttcctcttcttcttcttcttcctttcttctttcttcttcttactttttttttttttttttttttttgggagatggagtctggctctgttacctgggctggagagcagtggtgtgatctcggttcactgcagtctctgcctcctgggttcaagcgatttttctgcctcagcctcctgagtagctgagatttcaggtatgtgccaccatgcccagctaatttttgtattttttagtaagatggggtttcgctatgttgaccaggctggtctcgaactcctggtctcaaatgatccgcccacctcggcctcctaaagtattgggattacaggcgtgagccactgcacctggcctgtgttacttaacttctccttgccttagtttcctcatctgtaagtggggatagttgtacctatttcatgactgtcgagaggatttaaagactcaattcctgcaatgcagttaaaatagcacctggcacttagctcaataaaagctg

SEQ ID NO: 246649 - DNA, 332 bp, Homo sapiens
ttggcttttgtgaatagtgcttctatgaacacaggtttataaatatctattcaagtgtctgctttcaaatgtttgtgtatatccccagcaagagaattgccggatctcatgctaattctatttttaatttttggaggagctgttatgctgttttccattgtggctgcatcattttatattcctacaaacagtgcacaaaagttccaagtgctccacattcttctggttttttttaatagccatctggttttttttaataggtagttacattcatttttgcacttggaaaactgggggcaaaaaccaagggcatggcaaagtataaaatgtgt

SEQ ID NO: 246650 - DNA, 356 bp, Homo sapiens
gctgattttttgttttgtatttagtagagacagggttttgccatgttggtcaggctggtctcaaactcctgacctcaggtgatccacctgccttggcctcccaaagtgctgggattacaggcatgagccaccgtgcccagcctgttcctgatttaaaccagccactctttcactgaggagagactcaaagagagacccagcttacaagagggaaatgatcttggccaaagtttctgtgcagagctccctgacactactcataactttcttcacagtctggggaaacagacaaggctttcagttcccaaactaagaaagcactaaagctccaagagggaccagaaactcggcccagc

SEQ ID NO: 246651 - DNA, 461 bp, Homo sapiens
cattgaatcatctttgttccttcccttgccccacaaactctgcctatttccagcatttatttcttggaggatggaagagaggacagaaagtgacagaaaactaacaggagagttagtggcctggcatgtttccaaagggtagaaaaacaaagagaaggacattggcaattcctgctactagcaacagggttctactgagaagtcacaaatgtttagttttccttccctggacatgtgattaggctaacatttttctacctacttgaattcagataaaccctaagtgacttgctatggcataaacgtcatctgaaaagatcaggattaccccactgtgttgctttccaagttccctatcccttatcactgcaatgaaatgttccttgtcctggaggcatcagcctgggtccctcagaactcttgatggagagatatcatgggtattctaatcccacccacca

SEQ ID NO: 246652 - DNA, 453 bp, Homo sapiens
ctgtccttctccttccaggagaacagcatttctccttccctgtagtttccgccaactgaagtcccacggctcactcccattggcccagattgggtcacgtgctgggccctcaggcagtcactggctagagggaggagatgctatgattggccaggcctggtcacgtgttctttctcagcccggggcgaggtcagccttgtcagaagagcctggactaaggaggggaggctgttaccccagcaggtgcagggggtccagagggtcccaccttttacttagagggacctcctcaactgccttggggtggggaggaagggcggaggttgtctccaagcccccttacagcacaggtagggagactgaggcccagaggcagacagtgccaacccaaagcccttccagggtcatttcggctcatctccccaaaggctggatggggtctgtgtctggcag

SEQ ID NO: 246653 - DNA, 295 bp, Homo sapiens
agaaaactagcaaatagtaactattttgagtttttacaatgtgccagacactgagctaactattctgcaagtttttaattctagcagaatctgtgatataggtattattattattccagttttacagactggaaattatggttcagatttattcaatcaatttctgggagttacttaacttgaagagataaaggttgaacttgaacccaagtcagtttgcttataaatcaattttcttaaataaatcaattttcttaagcacgttcctaaataatagccccaggccaaaaaaaaa

SEQ ID NO: 246654 - DNA, 395 bp, Homo sapiens
  misc_feature (253)..(253): n is a, c, g, or t
  misc_feature (304)..(304): n is a, c, g, or t
cagcgctcagctctgtctcggccctggtgtccatctggtgtgactgggccgtttcaccccaggctcctcctctccaagctgccgtctgcacagccagcacgcagcttggatcatgggagcactccctgcctggaaccgccagcaggacccccaactcacacacagccccaagcccctgagtgtggcagccagacccccgagggcgcgcctctccctgatcctgtctcatctcctgctcccagctacacttctntgatccccacaaccgagaccacttcacacagtactcccagcttcacttctncaatcaccaccactgagaccacctcacacagtactcccagcttcacttcttcgatcaccaccaccgagaccacatcacacagtactcccag

SEQ ID NO: 246655 - DNA, 363 bp, Homo sapiens
cagcgctcagctctgtctcggccctggtgtccatctggtgtgactgggccgtttcaccccaggctcctcctctccaagctgccgtctgcacagccagcacgcagcttggatcatgggagcactccctgcctggaaccgccagcaggacccccaactcacacacagccccaagcccctgagtgtggcagccagacccccgagggcgcgcctctccctgatcctgtctcatctcctgctcccagcccaccccctgccagctttagtgcccatgagctggctcctcgttcagaacgtcctcctccctcttccgggtgcccactctgtgcttgtccatctggcaattcctgtctcccttgtaagacc

SEQ ID NO: 246656 - DNA, 561 bp, Homo sapiens
  misc_feature (517)..(517): n is a, c, g, or t
agctttggccatggggtttacctcaccctacttttacgcaagagtatgtggtggcctaacacaggtgggggaccctgcttcaataccagcctttatccacagatgaccccacgccttctgctccagagcatcagggttataacacatgggacacacggggcacacatacactcccacgcaacatccacacaccccacaaaactacctgagcccacatagtcagggcagggacaggcacagaacaaagtgggtgcacagggactcgcagggaggtcgaagagctgagtctcgtcgggaggctgagggggaagagcgggcactgggctgcgagtgtgcagagctggaggtgggggactgcggtaagtacccgtcctggggtgcgggccctgctgggaagcattgggagcaagaagggttagatcctcaaaggaggataattcttccagaaggttttctttgttttgttttgttttgttgaggcaccaagattggagtgcagtgagcagagatcaagccnctgtaccccagcctgggcaacagagcaagactctgtctcgaaaa

SEQ ID NO: 246657 - DNA, 457 bp, Homo sapiens
taaaaaaaaagaaaaagtttgtacctatatacccttttcatacatctcttatttgttactagatctccttgtcaatataaaaacttaattacttaggtatatcctaacaaaacatattccttaaacattcttaaaacagtataatgacttagttttttaattaccgtaatgaagttgtaaaagcccatgtttcttattttaagcagagagtgccttaaaaaggtttaaaatgcatcctgccagttttaaatagcagaatttattgataccatatatatagactgaaaacacatcaaagtctttcaaggttgattatttcttgtgccttccttcttcccacagtaagagagaagataaagataatactgagtaaaccattccatgctacaaattggacccattcgacaaaaatgcaatacttagtagaacatctgatgaccatggtcctattcgtgtt

SEQ ID NO: 246658 - DNA, 500 bp, Homo sapiens
agaaatggtcccagcatatgtccatcgtttgattgcaagactcataaaccataaatattacttataagaaagacacagcaacagttgggcttaccactaaaatggtggttctctttcaagatttttagttcctctgtaacatgaagacaatgggaaataaatttgtattaacaattaacagtaaatacatccttagcgtctacaatgggctcagacctaggccagttctccaggacacacaatggaagcgttaagcataatgccattcttaaagaaattgtaacccactgaggaacgagactactatcattcagtgagtactttctgtatcccaggcactttgccaggcacatgattattttaagagtcagaaattctaggtacaaatccaggctctttctataaataactgtgtcacctttgactaaatcacctggtctttctggaattaattcctccgtatgtcaaaagcattcaataaataatcagtaaatctctcg

SEQ ID NO: 246659 - DNA, 1863 bp, Homo sapiens
taaacaaatgagcatggctgtgtttcagtaaataaaatttacaaaaacaggtggtctgttggatttgacctgcaagccataatttgctggcccctagtttagcagttaaagatttacatacataatttgaattaatattaattataccaagttggaaacattgaaggacacatacagtgttttagggaatcttaaactttatttttattctctaaagttttagtttgtgttttctgttctcaagtcttgaggaatgctcacagattatctttctgctcatctctgaagggtttagcacttttgagcattacacatgaactgtcagaaaggacctgagtgccttagtgtgaattaatagctgtctccatgtctaagaagttaccatcattgggttttttcctccaggctaaactcccatcttccagcaggctttgagtgtctctgtagagtgagcaaaaacatatcagtatacataactatttactactaagtctttggatctttagatggtgctttctcagctattgcctatggctgaacaactgctagaaaagatccagaaggagcccacagctgtgctgaaagatgaggccatggttctgcatctcactctgggaaagtataatgaattttcagtttcccttttaaatgaggatccgaagagtctagatatatttataaaagctgtgcacacaacaaaggaactttacgcgggaatgccaaccattcagatcacagcccttgaaaaggtcagtgatttctttcagaaactaaggcatagcatgttcaagcatttaaaggtagaaggcaacaggaacagcgttaaaaaaaaaaagattaatattttatttggagaagatagttacaggtggactagacgttttaaaggaaaatgatgtatttgacccatttttgaaaactgaacgttgtacatgggtcattaaaaagaattgcattttaactgacaaaattaagtgggaaacaattttgtattttgagagaggttgatataaaaattatttctggaatttaaacttgttcactgaactcagttgccttttttctaccccctctagattacaaaaccattttttgcagccatatcagatgaaaaagttcagcagaagcttttaagaatgttgtttgatttattggtgaactgtaaaaactcacattgtgctcagactgtcagcagtgtttttaaaggggtaagctgcaaacttcttgtaattttttttattaatgtttatagtctcttccaagggacaccatgtttaagagtcctgtattttatagtgcttgtaagaggtcagatgttaccattaacaaaaatcatggaaaagtaagtcagagagaggcataaaataaaaattttaaatctttaccattattttattttatgaagtatttgttgataattttaaccagataggatgtgtaggaatatgtgtgtgtgtgatctttctcatattagacggaatctacctattcctttatgcaaggaataggaatgagtcaatggctcagtattgaactgggtaacattattctacttaatttaaatagttgtttaatgacatataatggaattgaaattctgcttgttggttttatacgtatattgaaaccttgttattatcagaatagccacctggttattctcttttttgaatatagaataatacaaagttctagtatctagattcagcagttctcagaattttaacatattaatcttttttccttctttttctttgctgaaatattttaaagtaaatctcataatgtcatgcactttcatccctctgtacttcagtgtgcatcttttgaaaagtggatatgactacaatgccattagaagta

SEQ ID NO: 246660 - DNA, 544 bp, Homo sapiens
aaactttgaaaaacttacttagttgtgtgtatagttgcccatcttatatagcaaaagatttgatgaaagtacttcagggagtcaacggtgagatggtgctttctcagctattgcctatggctgaacaactgctagaaaagatccagaaggagcccacagctgtgctgaaagatgaggccatggttctgcatctcactctgggaaagtataatgaattttcagtttcccttttaaatgaggatccgaagagtctagatatatttataaaagctgtgcacacaacaaaggaactttacgcgggaatgccaaccattcagatcacagcccttgaaaagattacaaaaccattttttgcagccatatcagatgaaaaagttcagcagaagcttttaagaatgttgtttgatttattggtgaactgtaaaaactcacattgtgctcagactgtcagcagtgtttttaaagggatttccgttaatgctgaacaagtccgaatagaactggagccaccagataaagctaaacccttgggcacagttcagca

SEQ ID NO: 246661 - DNA, 395 bp, Homo sapiens
aagcaaacaatttgggattagaagaaatgagaaatactttaacaagacaggaaacagaaatccagaggggtaaagtaaccttcggcaaggtcacttcagggtaaaatttcttgactcttactccagtgtccttcaccatcttgatccatctcaaattaacatttgtgtataatattagacaggaattaagcctcatttgtttccatatggatattcagttgtccagcatcctttgctgaaaagactttccttcactcattgaatttttttgtcaaaaatcaactgactgtatatatgtggatctatttctataaccactattctgtctcattgtgtttattcttataccagatacgattctgtcttgatccctgctgctttagaataagtcctta

SEQ ID NO: 246662 - DNA, 475 bp, Homo sapiens
tcaggtgttttagctccagggaggaaatagtcacagtgaaaatctatttaataaaaccgttatgaaaatgtactcaacctgagcatgcactggaacagcagaagatgaggacttggtctactgccttcccaccaaaccttgccggctctgtaaattttcagagctgtcacttgtgagctatttccaccaagggagagcttctgtaaagttggggacttggcaggccatttcgctaattctttgggtgttcttttagcattgtctgcagtgagtgtgggagtcaaaggcccttcagtgcagagataatgccatcttgttccctggaaccccgaaagagccagagtcaaaggagctttttgtttcactcatagaaaaacccacaggaaatcccagcttcagatattcctattcagtttccttgtcccttcagatctcactgtgtttaggcctcctttgagtgaggcaataactagta

SEQ ID NO: 246663 - DNA, 881 bp, Homo sapiens
aaggccagatactttagactttgcaagccatacagtctgttgcagctactcaaatctactgatgtaacccaagcaatagacatataaaagaatgggcgtggctgtgttctaataaaactttatttacaaacacaagtggcaggccagatttggcctgaagcccatagtttgccaacccctgatctcactatctcctcactccttagctctccagtcacacctctctttcctcccatacttttttccacctcgagacctttgtctattctgttctctacctagactgtctcagtttaaatgtcctttccacagagggcattcctgaagtcctaatttaattaaaatggtttctctattttatttttatgatttattttatacttatattttaattttctgtaactatacattgatttatgtgattatgtgtttaatgcctgttttaccttcaagttgtaaggtccatgaattaagaaattggatatcattgtatctctagcacctggcacatagcttaatacacagtaaattctcaatgaaatgtttgttaagtaaatagtgaattaatgagatctgatcaaaacaagggagcagaaaacaaaagataacaatttgggaatctgagatctgaaatatgagatgcttttcttgagttcatttattcctaaggtaggtcattttaaaagttctatacttgaaatagggaatatgtattaaccagggtgatgaataggcatgtcccaaatcttactgctacaaaggcgcttgtggctgacacactgtggcttacacaaagtcagatgcaggttgagcagctctacttcatctggtagctctgccacttggaagataagccccaaaagtcagcctggaaataggaa

SEQ ID NO: 246664 - DNA, 571 bp, Homo sapiens
ttagcaacatgaggtaactttctcaagaccacatggctaaaaagtggaggcatgacttccagctacagcactgatatagaatatacagtttcagatgataagttttagatgatgcttttaatggaaatttggtgacatccatacaagttctcgtcttcatctttttgccttttctttttccatgggattttgagtgaggattttcatcttcaaagatgttagagacagaatgttcaaacactttaaaaatttaacattaatttaaatttataagaaacctaaaatagctatttcctcaagttgttatttccaactctccaggtggactccaaatcactacgtaatcatcgagaaaagacttttattagatatgttcctgctgggtttagaaaatcctatatcttctgttgatacagcaaggtcagcaggaatctttaatatttacaaaatgaaaggagaacagctagttgcaaaaacttcctagtgattccattcccctaaccctaatctcaagggaaagacagcacaactgtgttacctgctgtgaactttgcagctacctgccatacct

SEQ ID NO: 246665 - DNA, 937 bp, Homo sapiens
caagggaaaaggacactgtaagcacagagcatgttcatgtggcagcaagcggccagcctgggtgtagttccacaccacgtgttgtaggagataagcccagctggggctggatgtggatgggcttgaagaccaaccagaggatgctcctctgtaggcagtggagagccactgatgacaacgtggagaatttaaagaagaatggagacagggagagcaaggagaggagcaggtgtggaggtgtgcacaacagtcatgtaaagaaccagctacaactgtagtcactcactcatgcctttgtttgtccacagacatagttattatgcacaaaacctcatgccgattgaaggtgggataagacagatggggagaaaacaaagaaaaataaaacccagtttatgtggaggattttaaatcaagggagagacagacaccagtaaaacccgagcacattcttccttgaggggctgctccagtgcctggactctcctctcatgccacaggacatcccaacatgacttcagattgccctattgcctcaaacatcagctgtatgatgaagattcccaaatccatccccaattccaatctctcctctgagtcatagagctgtatatgcaaacgctcaactgcacatcccaactggctgcccactggcacctccaactcaatcaatgcaaatgaaactcatcacctttccttctcatccccaaccctgcagctccacttgtgcctctggtctcaatgcatatctgccagcctcatccactgccaaagcctgaactgggcatcataggtgcctgagctcctgcacccattcatgcaatctctcaccaagccctgtcatcgtctacatcttttgtgtcttcccctcagtgactaccctaaattgggccaccaactaatctccctggcttctgttttactctttcaatctatg

SEQ ID NO: 246666 - DNA, 406 bp, Homo sapiens
tgggctgcagctgcacccaacaagtcaacatgtggattgcttctagaatttggatattatgaacactgctgtgctgaacattcttgtacacttatatggtttggctgtgtccccacccaaatctcatcttgaattgtagctcccataattcctatgtgtcgtgggagggacccaatgggaggtaattgaatcataggggcaggtctttcccctgctgtccttatgatagtgaataagtctcatgagatctgatggttttatacatgggagttcccctgcacaagccctcttgtctgccgccatgtaagatgtgcctttgcttctcctctgccttccaccatgattgtgaggactccccaaccatgtggaactgtgagtccattaaacctctttcctttgtaaatta

SEQ ID NO: 246667 - DNA, 553 bp, Homo sapiens
aaaatatggtacaaccatacaatgaaatattattcagccataaagaagaatgaagtattgatacataagagaacatggatgaaccttgaaaacattatgctaagtgaaagaagccagacacaaaagaccacatattagttgattccattaataagtcaatctacagagatagaaaatagatgataatttccaagggttgggatgatggggaatatgaggtgatagctaaacggcacaaggtttctttttgaagtgatagaatatcctaaaattgtaatggtaatggctatacatctgtgaatatactaaaaaccactgagttgtacaccttaaatgggtgaattgtatggtaggtgaatgatatctcaataataaagcattaagaagaatgaaaccattccacaatcaccctcctgaggaactcttagcactgcataaagtgttctgagtttgtaatcagatattgtcacactggttccttcaaacagacatgacaaggagctggctttgggctaggctgctccttgcctatgattggggaaggttaaacccc

SEQ ID NO: 246668 - DNA, 471 bp, Homo sapiens
gtctgcaggtaataaaatgggaaattgctaaacacacatccatcttctgagcggtgctatcttaagtctaggtggaagccttcaaaacaggaacctggtcaattgcaaaccttcctcctaacccaggctcctcatccccagagccggctatgaagaaagatggtttgggaacagggaaagaagatctggttaggagccatcccggctgcttgtctcttaatgtcagtaaagacagggtttcgccatgttgcccaggctggtcttgaactcctgacctcaagggatccacctgcctcggcctcccaaaatgctgggattacaggtgtgaaccactgcacccagctgttttgaaaggggacacagaacagctggatgccaaagagatgtcctaaaacaaaatgggatagcccatatactcctaataggctggaggtggactgaaggaagaatctaacaacatttctggctcta

SEQ ID NO: 246669 - DNA, 393 bp, Homo sapiens
gtctgcaggtaataaaatgggaaattgctaaacacacatccatcttctgagcggtgctatcttaagtctaggtggaagccttcaaaacaggaacctggtcaattgcaaaccttcctcctaacccaggctcctcatccccagagccggctatgaagaaagatggtttgggaacagggaaagaagatctggttaggagccatcccggctgcttgtctcttaatgtcaggtgtgtgaaatcccactcagtcattgggggactcaacctccggttggggcaagtgctacttcagaaaccccctcacacatcctggcctctactcgtacacaatattttcttttttttaacttggctgcagtgaaaaagaatatttttagtaagctacttgttgttta

SEQ ID NO: 246670 - DNA, 406 bp, Homo sapiens
ctaacatgggggtcccacgtgatacagatgctgctggtccagatgtcaggttggccttagggatttaccaggagcatcattctgtggtcagaacatagttaaatacatagataagaccctgagggtttctacaagaggcacattttaactaatcagtgggatcttttctaatggtgcagaaaccctgggtataaaccttatcccagtacactatttctaattagcagtcaactcacccaccacagtccgtgactgctcatgtcggtgctctgtgtttgtcccaaggacatgctaaatccaggcgtggtggtgtttatgtagcagacagatgtactgggcattttccatctctcttggactctctgaaattcccttacttgaactggagggacaatagaagtaccta

SEQ ID NO: 246671 - DNA, 699 bp, Homo sapiens
gttgccgataaagacatatccaagactgggcaatttacaaaagaaagaggtttaatggacttacagttccacatggctaatgaggccttgcaatcatggcggaaggcaaggaggagcaagtcacgtcttacatttttaaaaccatcatatctggtgagactcattcactatcacaagaacagtacaggaaagacccacccccataattcaattacctcccactgggttcctgccacgacacatgggaattgtgggagttacaattcaggatgagatttgggtgggtacacagccaaaccatatcagagagagagagagaaattagatatgctctaaaaattataaagagaaaataagctaaatccagttcttccctattgggcttagaaatattagctcatgtctttccttcccattacagaagttggctgaataatcatgggtgcctgttgctggaattctttcctctctgtgaggtctgtctatagccttttttaccaaagaccaacaaagaggaaactgttgtcgttgagtgcagtgcgacatcagaacatcactggatacatgagatcctgtccacgcaaagaacctacgtagggccttggcttcgagtcaatattttgttatgtctgttcacttcaggaaagttttgaggccaagaatcaaagacatatttcaaggttgttgtaaatatatttc

SEQ ID NO: 246672 - DNA, 447 bp, Homo sapiens
ggcagcagaatcgcctgagcccgggagtcggaggctgcagtgagccgagactgcgccattgcactccagcctcagtaatggaatgagactgtgtctcaaaaaaaaagaacataaatggtatttgagatgagtcttaaaggatggttaaaaatagaaattaggctgagtgcggtggctcatgcctgtaatcccaactctttgggaggccaaggcgggaggattacttgagcccaggagttcaagaccagcctaggcaacaaagtaagactctgtctgtaccaaaaaataaaaataaaaaactagccaggtatggtggcacaggcctgtagtcccagctactccagaggctgagctgagctgggaggatcacttgttgaggctgcagtgagctgtgatcgcaccattgtattccagcctaggtgacagagcgagaccctgtctcaaaaa

SEQ ID NO: 246673 - DNA, 537 bp, Homo sapiens
tgctcaaacagtaagtttgaataagctcattcagatatgaggtgtggttgatttgggtaacatgaaacttttaagggagatacagaatttaaaatggctttttatgtaatataaacatttatttctcatactaatgtctccatgttttaggatttctagttattatccttaaaagttggttttgagtttccctatttttctctaaccttcttttcctacttttgtgtataactttgtagaaaattagcttatcataaataatttacttttaaactgccttttgtgttttgtggaagtgcccaaatttgttaacttttgaatcaaaaaaggaaatacagttggccttgaacaactttggggttagggctgccgattcctagtgtagtcaaaaatccacatgtaacttttgacatccccaaaatttaaatagcctactgttgaccaggagccttaccaatagcatacacaattgattcacacatatttcatatgatatatgtattgtatactgtattcttataataaaccaagtgagag

SEQ ID NO: 246674 - DNA, 4562 bp, Homo sapiens
  misc_feature (1198)..(1198): n is a, c, g, or t
  misc_feature (1511)..(1511): n is a, c, g, or t
gccagggcgtgtcccgtgtgcccgagagcgccggcggcggggccggagggcgggccctgggccgagtgacaggccgcagccccccgagcaccgtcgaagccggcgcgcccgcccggtgcagccgctgtgcgagagcgaccccgcggtccaagcctcgcgtggccctgccgggccccttctttccccgagtagggcgcagcttcccagcctccgccccggcctcgcctggcgcttccttccgggtccttcggcctttccctggcggtgcggcaggccctcgcctcatcccaccaggcacgccgcggtgctcggccctgggtatccgggcaggctgcctccgttagggccgcccctgctctccggacgcgacttttcattggtctcagaatttcttggctcctcttggcctctgcagccttgctggaggctgccctgcggaatctgaatatggatcagaaactttcgaagttggtagaagagctcacaacttcaggagaaccccgactaaatcctgagaaaatgaaggaactgaagaaaatttgcaagtcttcagaggagcagctgagccgcgcctaccgcctgctgatagcacagctgacccaggagcacgccgagatccgtctctcagccttccagattgtggaggaactcttcgtcaggtctcaccagttccggatgctggttgtttccaacttccaggagttcctggagctcacgctgggcacagaccccgcacagcctctgccgccccccagggaggcggcacagaggctgaggcaggcgaccacccgggccgtggaagggtggaatgagaagtttggggaggcctacaagaagcttgccttgggctaccacttcttaagacacaacaaaaaggtggattttcaagacacgaatgctcggagtctggcagaaaggaagagagaagaggagaagcagaagcacttggataaaatttatcaagaaagagccagccaggcggagagggagatgcaagaaatgtctggagaaattgaatcctgcttgacggaggtagagagctgctttaggctgctggtgccttttgactttgacccgaacccggagacggaatcccttggcatggcttctggcatgtccgatgcccttcgctcctcctgcgcgggccaggtgggcccctgccggtctggcacccctgagccccgggacggggagcagncctgctgcagtagagacctgcctgcctctgcaggccaccccagagcgggcggcggggcacagccatcccagacagccacaggtgacccctcagatgaggacgaggacagcgacctcgaggagtttgtgcggagccacgggctgggctcgcacaagtacacgctggatgtggagctctgctcagagggcctgaaggtgcaggagaacgaggacaaccttgctctcatccacgccgcccgcgacacactcaagctcatccggaacaagttcctgccggctgtgtgctcgtggatccagcgcttcacccgcgtcgngacccacggtggatgtttaaagcgtgccattgacctgaaggctgaattggagctcgtactgagaaaatacaaggagctggacatcgagcctgagggaggggaaaggcgcaggacagaagccctgggggatgcggaggaagatgaggacgatgaggactttgtggaggtccctgagaaggaggggtatgagccacacatccccgaccacttgcggcctgagtatgggctggaggcagcaccagagaaagacacagttgtgcggtgcttgcggacgaggacgaggatggacgaggaggtgtcggaccccacctctgcggctgctcagctgcggcagctccgggaccacttgcctccaccctcatctgccagcccctccagagcgttgccagagccacaggaggcccagaagctggcagcagagcgggcccgggcgcctgtggtgccctacggcgtggacctgcactactggggccaggagctccccacagccgggaagattgtcaagtctgactcccagcaccgcttctggaagcccagcgaggtggaggaggaagtggtcaatgccgacatctccgagatgctccggagccgccacatcacttttgccgggaagtttgagcctgtgcagcactggtgccgtgccccgaggccagacggccggctctgtgagcgccaagaccggctgaagtgccctttccatgggaagattgttccaagggacgacgaaggacggccgctcgacccggaagacagggctcgtgagcagcggcggcagctgcagaagcaggagcgcctggaatggcaggaccctgagttgatgagagacgtggaagcagccacagggcaggatctcggctcgtccaggtacagcgggaaaggcagggggaagaagaggaggtaccccagcctcaccaacctgaaggctcaggctgataccgcccgcgctcgcattgggagaaaagtcttcgccaaggcagctgtgcggagggtagtggcagccatgaaccggatggaccagaagaagcacgagaagttttcaaaccagtttaactacgcactgaactagagagcggggcccagtgcactggccatcagcactttctccctctgccagtgtctcaggacagcagagtgggcgtgggtctgggcagtaaccatgctttgtctattactgtgtttgatgtaaagaaatggtgtgttgcaatgccctgaaggtacggccgctctgctgctacagggttcggcatcgtctggtgatgggtctggcctcgcagaagaggccctcgggcctggagatgtgaacacaggcagcgaccctgttccagagggcttctgcgagtcctcgtgaggccagtgcttgtcgtggtgtggggttcagcacggacggaatgtgtgtgcagctcagccttcagagcgtgcattccccagccaggaggcgaccactcagaggaactctgggaaacccacttttgtgcaaatgctgtttttaacacaaacacaaaggctagtgaaccgttcagtcatctgctttctgtttctggatgtgccttttcatacatgtgtcctcttgtccctggcttcttacacttggcgttgtttttaaggtttatccatgcagttcccctccaatgtataaaacaaaggaggtgaaaacctgtccatgcggaagcttgtgcacccatgttcacagcagcattggagaaggataccgaacatcttctcgtgggcttactggccatttgtgtatctcctttggagaggagtctattcaaacctcttgcctatttttaattgaatgatttatcttgagttgtaacagttgttttttttttgtttttccttttagagatgggcttttgctcttacccaggctgagtgcagtggcagaatcatggctcagtgcagcctcaaactcctgggctcaagccatccttccacgtcagcctcccaggtagctgggactacaggcacacaccacaacacctggctaattttttaaattttttgtagagatgaggtctcactgtgttgcccacggtgatctcgaactcctagcctcaagcgatcctcctgcttcggtctcccaaagtgttgggattacaggcatgagccaccactcctggccaggagtttatatgtatactgtggatactagatcctcatgtggtttgcaaaaactttatttatttatttatttatttttgaaatggaatcttgctctgtcgccaggctggagtgcaatggcgtgatctcggctcactgcaactaccacctcctgggttcaagcgattcgcctgcgtcagcgtcctgagtagctgggactacaggcgcgcaccaccacgcccagctaatttttgtatttttagtagagacgggatttcactgtgttggctgggatggtcttgatctcttgacctcgtgatccacccacctcggcctcccatagtgctgggattacaggtgtgagccaccgcactcagctgatttgcaaaaactttcttccatactgttgtttcactttctggatagtgtcctctgaagcacaaaagttaattttgatgaagtacagcaatttatctgtttttttcttttgttgcttatgcttttgctgtcacatttcagaagccatcacctaatccaagatcacagagatttacacctagtttctaataagcattttataatttcagctcttatgtgtagatctttgatccattgtgaattaagttttgtgtgtggtgtaagagcccacattcttttgcatgtggatatccagttgtcccagcaccatttgttgaaaacattatttttccccattgaattatcttcgcaccattattgataatcagttgaccaaaaatgtacaggcttatttctgggcacttgactctattccattgacctgtttaaccttatgccagtgccacagtgccttgatcagtgctgctttgttgtgagaagttttactttgttctgcttcaaggctgttttgactcttctgcatctcttgcatttccaaatgaattttaggatccactcatcagtttcttc

SEQ ID NO: 246675 - DNA, 188 bp, Homo sapiens
ctcagcagccagagattcatgggggtgacggcagagatccccatgaatctctggctgcctgagggtgacgccagagattcatgggggaagcaaaacttcccctcggagggtggagcataagtcgaggacactgattattctgtatcctgtgtttgtaaaatggcaatttatagattgtttatacagtg

SEQ ID NO: 246676 - DNA, 1111 bp, Homo sapiens
gccagggcgtgtcccgtgtgcccgagagcgccggcggcggggccggagggcgggccctgggccgagtgacaggccgcagccccccgagcaccgtcgaagccggcgcgcccgcccggtgcagccgctgtgcgagagcgaccccgcggtccaagcctcgcgtggccctgccgggccccttctttccccgagtagggcgcagcttcccagcctccgccccggcctcgcctggcgcttccttccgggtccttcggcctttccctggcggtgcggcaggccctcgcctcatcccaccaggcacgccgcggtgctcggccctgggtatccgggcaggctgcctccgttagggccgcccctgctctccggacgcgacttttcattggtctcagaatttcttggctcctcttggcctctgcagccttgctggaggctgccctgcggaatctgaatatggatcagaaactttcgaagttggtagaagagctcacaacttcaggagaaccccgactaaatcctgagaaaatgaaggaactgaagaaaatttgcaagtatgtcttagggttcagtaacagtaactgactggcccactgagcccaggacacacacagggccctgccctcctgcccccacctgggagagaaccacccgagggacacacccaggacattttctcggggccctgcagtacccggctctgacgggtggtcatgttctggggtcggggcgtgtggcgttggggaccccactgctctgtggttggtgcttctcttcattcccatttgtgtggtctggagcacatcctgtaggagttcttgagtgcacaaatgtgattcagagagaaacgtgcatctttttctttgctgctggacttttcgaagggaaagaatagagcttgctgatgggcgagttggtccatcgcctttagggtatgtccacctctgttcacttcctccaaggaaaacgccggaggggatctctgccgtcaccctcaggcagccagagattcatgggggaagcaaaacttcccctcggagggtggagcataagtcgaggacactgattattctgtatcctgtgtttgtaaaatggcaatttatagattgtttatacagtg

SEQ ID NO: 246677 - DNA, 1029 bp, Homo sapiens
  misc_feature (900)..(900): n is a, c, g, or t
  misc_feature (941)..(941): n is a, c, g, or t
gccagggcgtgtcccgtgtgcccgagagcgccggcggcggggccggagggcgggccctgggccgagtgacaggccgcagccccccgagcaccgtcgaagccggcgcgcccgcccggtgcagccgctgtgcgagagcgaccccgcggtccaagcctcgcgtggccctgccgggccccttctttccccgagtagggcgcagcttcccagcctccgccccggcctcgcctggcgcttccttccgggtccttcggcctttccctggcggtgcggcaggccctcgcctcatcccaccaggcacgccgcggtgctcggccctgggtatccgggcaggctgcctccgttagggccgcccctgctctccggacgcgacttttcattggtctcagaatttcttggctcctcttggcctctgcagccttgctggaggctgccctgcggaatctgaatatggatcagaaactttcgaagttggtagaagagctcacaacttcaggagaaccccgactaaatcctgagaaaatgaaggaactgaagaaaatttgcaagtcttcagaggagcagctgagccgcgcctaccgcctcctcatagacccgaactgtagtggccacagcccgcgcaccgcccggcacgcacctgcggtccggaagttctcccctgaccttaagttgcttaaggatgtaaagattagcgtgagctttaccgagagctgcaggagtaaggacaggaaggtgctgtacacaggagcagagcgcgacgtgcgggcggagtgcggtctgctccttagccctgtcagtggggacgtgcatgcttgtccctttggcgggagtgttggtgacggggtaggcatagggggtgagagtgctgataagaaggatgaggagaatgagctggatcagganaagagagtggagtatgcagtgctcgatgagttagaagattntactgacaatttggagctagatgaagaaggagcaggcgggttcacggctaaagcaatcgttcagagagacagagtggatgaagacgcc

SEQ ID NO: 246678 - DNA, 642 bp, Homo sapiens
cgcgccggttcggtccccggggctctgcgggcgccgggcagagacctgcggccagggcgtgtcccgtgtgcccgagagcgccggcggcggggccggagggcgggccctgggccgagtgacaggccgcagccccccgagcaccgtcgaagccggcgcgcccgcccggtgcagccgctgtgcgagagcgaccccgcggtccaagcctcgcgtggccctgccgggccccttctttccccgagtagggcgcagcttcccagcctccgccccggcctcgcctggcgcttccttccgggtccttcggcctttccctggcggtgcggcaggccctcgcctcatcccaccaggcacgccgcggtgctcggccctgggtatccgggcaggctgcctccgttagggccgcccctgctctccggacgcgacttttcattggtctcagaatttcttggctcctcttggcctctgcagccttgctggaggctgccctgcggaatctgagtgaataagggaaacagcaacagtcacgttggggaaaagctgattcggacagcgccactggttcctttaacgcacgaccctcaatgcagcgtcccacacacgggattgtagaggtcccgagtttaaggttcacttttaaaactgcaa

SEQ ID NO: 246679 - DNA, 472 bp, Homo sapiens
gttacagtcataactttctacaattttagagtaggaaaatttaaaggttatatggtctggtaagcctcatgtgggtactggctatattctagcctcataagaggctttaaaaaactgtatggattcttcttctcagaatgtgatatattcatgcccaggattataaactttccctagttgaacatcacgaattatcataagagttgtgggtgggagataatcctgagggaaaagagttgttcagataaatgggacagagacaggaaaatattattgaggagcattaaattcagtcacttctatttgtaccttatatgactgctagtttggtccagtggaatcaggaggcttgaggaccacaagacagttcttggagctgggtatttttttctgaaattgctggaagtatatttatttgggggaaggttcaaaaaaaccttgttggaaaagaaagactaaggtcaaagctaaa

SEQ ID NO: 246680 - DNA, 446 bp, Homo sapiens
tcaggaagctcaggggctggggaaacagagaggaggagaccccatccagcctgggaggagggagtttgggaaaccggatgtcagattccagccactggggagttggatttcaccctctgtagtcactttcaagtctaaaatcccacgaagaactgaagttgggcagggaaattgaaagtaaaagtgaggaatggagaagtttctgtgccacatttgacgtgaaactgaaagtgatcatgtatgtgtccctcctgctcccatatgatctggcacagcgccattcagttttacagaagctgaagctcagtgcagtagcctggcttgccagaatgcactcttccttaacggctcacatttccatccacagcccaggtctctgccctcccagttcaatccctcaccccagtccgttatttttaaggcatataaaggaaaccagagacaaa

SEQ ID NO: 246681 - DNA, 409 bp, Homo sapiens
tctgcttcattcactgattatgccaagcacttagaaaaatgccagcagagattacgttgaataaattaagatttcagccgggcacggtggctcacgcctgtaatctgagcactttggaaggcagaggcggacggatcagttgaggtcgggagttcgggaccagcctggccacaatggagaaaccctgtctctactaaaaatacaaaaattagtcaagtgtggtggcacacacctgtaatcccagctactcggaaggttgaggcatgagaatcacttgaacccaggagatggaggttgctgtgagccgagatcacgccactgcactccagcctgggaggcagaatgaaactgtgtctcaaaaaacaaaaaaagaattaacaagattttttttttaacttttgtttgcatg

SEQ ID NO: 246682 - DNA, 332 bp, Homo sapiens
ctcagccagtgactcacgttttctttagcaaagtacttatgtgttcatttccctatattttaaaaaaaacctgagttaacagctgctttcagcagtcctgcagcctcctggatgatggctgttttcagctcctggattctgcagacccgaggagtctggggatggatggggaggggagcaaagaaaactttcaacccctacccgtctttagccagagaagctctgataccatctattttgtatactggagtcctcctttgaaaatatgttgcttgaaaagatgagttctgtggctcaaaataaaatttttttatttatttaaaaataattga

SEQ ID NO: 246683 - DNA, 260 bp, Homo sapiens
ttctttaccagtctttcagtatttgatatctactgtcaaattcagtattcagctttaggtctaggtcagcacttttcaatagagatataacgtgagccacatatgtaattttaacattcctagtagctgattttttaaaaataacataaatatatggaattaattttaatgtattttatttaacccaccatatttaaaatagaatcattttgacatgtcagtattcaaaaattattaataaggtactttacttctttata

SEQ ID NO: 246684 - DNA, 451 bp, Homo sapiens
acatgaagcaagttggaagagaaatatagcgtctccctgagaaggtactggaagttgaccaagaagctaatcaaaattttgtcttgattctggaaagctcaaagcactgaagcttactggttagacattaagaacatccgcctctccccacttcctatttcattagagtattagcattttctacactttttttaagtgcaagtctgcttaattgtgcaatatgctgtttagtttaacagcatctttaatgaaccatataatactactcaacagagcatagagaaattactttctggccagtttaaaatacagtataaaattctataaattggactgcgtgcagtgtctcatgcctgtaatctcatcactttggaaagccaaggcaggagggtcacttcatgtcagatcaagaccagcctgggcaacatagagagaccctgtctgtataaaa

SEQ ID NO: 246685 - DNA, 317 bp, Homo sapiens
tgggggaggatagcttgagccctggagttcgaggctgcagtaagctacgactgccacattgcactccagtctgggtgacagatcaagaacctgtttcaaaaaacaaacaaacccatagtaggaaggtgacatgtatatgttattgcaggcagctgtccctgcaatgtgagcccagggaagtgggacctttgttttgttccgtgctatgtctccggaacctgcccagcacagtgccaagcacacagtatctgctcaatgatgacctgtcgaatgcatgaaatttagaaaagaaaaacaacaaacaaaaacccttccca

SEQ ID NO: 246686 - DNA, 255 bp, Homo sapiens
taatcgcaggaatctgtgcacatacatgcaaacaagtacatgtaaaactggtgaaatctgaataagcttcatggattatatcaacgtcagtttcctgattctaacaatgtatgatacttatgtaagttgtcatcattgagacaaagcgagtaaaggatatgtgagatcttcgtattatttcttatgactgcaaaataaaaggtttttaaaactaagttataataacaaagaactctgtgtcaaaactaaaatata

SEQ ID NO: 246687 - DNA, 318 bp, Homo sapiens
atgaaaaaaaaaaaaaacaaggaaaatttgagaacctggcacagtggagaagagcacaaggagacatgatatctaaatatgttgtggtatcctggatggaatcctggaacagaaaattgacattaaggcaaaaaatatacaattaatgcgtgcacttgttaaatgaatgaaaatgtataataatggtgtgataattgtgaaaaaatatcccacatagtaatgtagaaagttaataaagaaaaccctgtgttggataaatatacatacactctctgtagtgacttccaatggttctgtaaacttaaaactattctaaaa

SEQ ID NO: 246688 - DNA, 515 bp, Homo sapiens
gcaaggcgaaaagggccacagcactggtctgccccaatctctgggagtgggatgcccccagcaccaggatggcctgcattttcaccatgaccttttctagtggggacaggcaaccccaccacttgaacagattgccactgagtccgaagaacccccaggccctgggtaagaccattcccccaaaacacccgagtgttccaaggcgatttattcctgctctccaggcccctcccaaccacctggatcagccaccccaccaaagagccaccagtagcaagtaaaagccactactcacaaagtattgtttaaaaatacacagccaaattagctgggcatggtggtgtgagcctgtggtccaggctactcgcgaggctaatgaggatcgcttgagcccgggaggtcaaggctgcagtgagttatgatcgcacctctgcactccagcctgggagacagagcgagatgctgtcttaaaaacaaaaacacaaaaaaagcactttgggaggccgaggcgggca

SEQ ID NO: 246689 - DNA, 541 bp, Homo sapiens
tgtcatttgtcctggaatatttcagtgattctcagacattgtgtcatttcgactgtaaataattcagtgtgcatctctgagcgattgagatatcatctgtagatctagttatgtatctatctatgaatgctacgttcccttccatccacctctctggccttgtcctctgtgttgaccctggggaagaactacctggactacctgggtctttcttcctgggattacacacctgccagctcaccccagctcactctgtgttgctaccacaggaatttgctggaacacagatcattcaacttccttggttgaaatcgttcagtaattttctgttacctccagaaacaccccaaatgcttccctgtgccatgcaaatcatttcgtgatttgacgcccacaagtcatccgctggcactcgatgccaaacgaggtgcgttcacggtgctgcgctcctgcgcgccgcttttcctgccttctcagaggctccggttgaggggagcggcccgggagccttggccgactctgactcctcctcctgcctctc

SEQ ID NO: 246690 - DNA, 564 bp, Homo sapiens
ggaagagttgagtgcataataaacatttgtttttttctatgggtgtaagagtcctagaagtcttttaaaatggaagttgcattgagtttaatgggaatcttaagcattataaggtgccactcaacttttgaaattaaatcatgagttctttgtgtcatcaacactaagattctaggtttttgttttttttaatttctgggtttctttaaagatgataggggcttaatattagaaaggaagctatacgttccaggttgttagaaagttagttgctaatatgagaaattagactgctaaatccacctacctagtgttaaccacccatgcccccctgttaaccagcctcattgtctgttacttgagactctctgcagtaagaaggttggatctagaaaagtcagtctcctcttttgtgcacatgttttctctccttctgtctctaaaaagacatatgctgaattctggaagccgcagtcccgtaagattagtattggttcttagcaataggttatttagctattgattatacttttcctaggttaagatggccctcgtgccgaattc

SEQ ID NO: 246691 - DNA, 450 bp, Homo sapiens
ttatttcctgtagcttgactacaacacaaatgaatccactcaaatgttggcaagtggagcagagtcccagaacagtctgcaatctctacaggtacagaaacacccccagttcaaggatcttcacacctggatttaggcctactcctgcaactacccgcgtttcatttcaacttatgtttaaggggttcttgataatctgacatgataagtggtgttggaattggcattaaaatccaccatgttctacaacacttcatccttcttcggcaggcaccaatttgatcttctactactttgcagacatctcttctgcaaacaccagacaaattgagacaatgaccttccacaggacccaaatcacctcttactgcaggaaagaagatccagtgagaaaattagtccacaaatggaatgtaaatccataaacactcttaagtaacagaataaaaa

SEQ ID NO: 246692 - DNA, 227 bp, Homo sapiens
gcttaggcaaaatctcctccttaagagcaagttcccccttcctcctctttcttcttctttttttaatggtttgctggtttgaggaagattctgtggacctgcagacgtgccagggaagaagccagaaagtctacctttgactctaaaacaagaatggtcgataatcactcggacctcacttcattttagtttccaaattaaaaataataaaaaggtgcaactttaga

SEQ ID NO: 246693 - DNA, 2482 bp, Homo sapiens
  misc_feature (1074)..(1074): n is a, c, g, or t
  misc_feature (1209)..(1209): n is a, c, g, or t
  misc_feature (1698)..(1698): n is a, c, g, or t
ctttatttacaaacacaggcagtagcttgccaaccccctaactagagcgtagctgtcactttgagacctgagtaacttctctgtaggattacacccttgcaagaattctgcccgcagcatttccgagtttgcattataaccttgtgggcagggcagtgaaagtactgttatataggaaagttaccgtctcctaggaattttgttttaagaaaaagattctaatactaaagtatgacatttgttgaatattttttattggcagtaggaaaggaaaattgaaattacatacaggaactccaaaagcttgctcgtgctcatttttcttctattacagattgaacatttaatgataaatgtgggtggggggatttaatatttcagaacagaaggcagagattaattttattttgccccctaaaatgtaatacattttctctctcttcttgccccctgccctgccctttcccactcctcctctctgtccctttgctgggatagggaaattgactgtaaggggattatgggtctatgtgggagggagagataagagggtctcagcaaaatgccaccttccaaccctgctatcgctgtaagcagtagggaaaggaaggggtaggtttatagctcccaacccatgatcaactagttctacttccttgattgtttgatcatggtcaatctgtagaggatccatttctgaagagctttgtttaaaacggccccttctctaaacaccttagagttttgcacccagtgccccggatcacccgctggaggccacagaggacaaacgctagttgcagtgtttgtgagctgcctttgctgaacagtagtgcgcgtgggaagcatcagcaattatccacctgtttctcaccatccctttccaaactgacttttactcattcatggccatggagatatatttgccagtctttgtcaattcatcagtttttttccaggaagtccttttcttttaaatgctatcatatgaaggctgcccttgctttaagcatttttgattgttcttattaaaatgaagaataaccccttccttctctcctaccccacactccntggaggtttaagtgagcagaaaatggtagtacgataaaagatccatgtaggtgggtttgcagaaaagttaatccaagataagtaacagattgaaaatgtaggcttctgactatgctagtgcaaaccgagttaaanggatcgattagagtttactttccaatatgattttgatgaatggtgtaacattgtgaaaggctttttgaagacaaaaccactaacccgttgtattgttttgttttgttttgttttgttttgttttaagagacagggtctcgctctgttgcccaggctggagggcaatggtatgatcatggctgactgcagcctggaactcctgggctcaagtgattctcccacctcagcctcctgagtagctgggattacaggcacacaccaccacacccagctaatttttgtattttttttgtagagatgaggtttcaccatgtttcccaggctgatctcgaactcctgggcccaagcgatcctcctgcctcggcctcccaaagtgctgggattacaggtgtgagccactgtattttaaaatacagtttttaaaataaaaaaactgtattttaaggattcaatttgaatttgtgtttagatccatgctaaggcatgcangcaattgacacacggaccctgggatatgcggtgtcctgtctgactgattgattgatttctttcttttttttttttttgacagagtctcactaggtcaccaggctggagtgcagtggcacgatcttggctcactgcaacctccgcctcccaggttcaagcgattctcctgcctcagcctcctgagtagctgggattacaggcgcacgccaccacgcctagctaatttttgtatttttggtagaaatggggtttcaccatgtttgccaggatggtctcaatctcttgaccttgtgatctgcccgcctcagcctcccatagtgctaggattacaggcgtgagccagcgcacccagcctttttttgtgtgtgtgtttttagtagagatagggtttcaccatgttggccaggctgatctcaaactcctgacctcaggtgatccacccacctcagcctcccaaagtgctgggattacaggcatgagcctgatttacaggcactgatttctgacaatacatccttactatatatccaaaacttacctgccctttgaaacccagcctgtctcacctctacaaaaacaaacaaactaccttcctaaccattcctacgatactattctatttctgtgaattcttaaaatctgcttgaacagcccattttgacatttgattctctgtgtcagtgtttattgtcttagatttaccccctgcatgcagaagtgactgcatagtcactacttttagtgagtttgaaatctgtttggagagctatgtaagtaccaatgg

SEQ ID NO: 246694 - DNA, 320 bp, Homo sapiens
agatacttacatgaaaacatacagaaatctaggcttttggttgattgttttcatataattaaaaaatcattcactttgggaggccgaggcgggtggatcatgaggtcaggagatcgagaccatcctggctaacatggtgaaaccccgtctctactaaaaatacaaaaaattagctgagcgtggtggcacgtgcctgtagtctcagctacttgggaggctgaggcaggagaatcgcttgaatccaggaggcggaggttgcagtgagctgagatcgtgccactgcacttcagcctggaggacagagcaagacttcatctcaa

SEQ ID NO: 246695 - DNA, 597 bp, Homo sapiens
tagcatacatcaccctgaattatagctgcctgtttatgtatgtgtcttctgcaccaggtagtactctctgatggggcagggattgggtctgtcttgttcacagttgcatctccagcacctgcaactctgcctggctcagagtaagtgctcaatactttttgtttttgattgaatgatagaatgacgagtgaactctatttcccactagactgtgagcaccatgttgacagggaccatgccctgatcatctctggatccttagggcctatatagtgcttgccacataggaggtgctcagtagacacttatggatttgagtgaatggacttcagtttctccacttacaatctgagtaagaggaagatattctttgccctctctccctccttctccagccacattgggggttgtggttgatgctgtgaggtcgttcctgccttattcaacttcatgtccaaatcttctatggctagccaagtatgggagaagggtgcttcagggtctctctccattcactttagtctccagcattagccaagatcccactgtctaccctgaattcttcctgctattgcacaaggtttctttcatcttact

SEQ ID NO: 246696 - DNA, 399 bp, Homo sapiens
attattgcaccatagatattaacacgaatatatttttaaaaactgcccagagatcatttgatctcaagtgtatatacacttcacttttctggagttacagaaggatggtgaaataatcattttctggattttgcttttcagagggagattgaagaaagttcaatagaacactgatgagctcataagaaccgtgttgttcatgtttctttgtaattcagtttgctgtttttattcttattcctttctaggaagtacattccacaggcttctatggaaattaagttgaaataaattttgataattggcctttgatgcaaaatttatgcatagcatttaattttataacattttgttttattctgtgattaaatatatatatgtatatgttttaaagtctta

SEQ ID NO: 246697 - DNA, 441 bp, Homo sapiens
ataactatgtcctctgggccctgtcttctctctcgccacttccgtccccaactgaggaagaaagggaagggtgagtgaggagcatcctcatccctgccctaggggacctagggacttccttctgtgcctgacctctagaggtggcatggaagaagagtcccacagcagaccctggggctctgagcggagctcctccagggccatccttgtcatccctggtgagacctattgaaaacacatgtggccatagaaatataaattcagcttaaattaattaagattcagtacatttagccgggcatggttgtgtgtgcctggaatcgcagctacttgggaggttgaggtgggaggatagcttgagcccaggagattgaggctgcattgagctaggattgtgaccctgcactccagcctaagctacagagtaaaaccttgtctcta

SEQ ID NO: 246698 - DNA, 973 bp, Homo sapiens
agatggagtgtattgaatgctcctgaaacaaataaattataatttttttttgagacagggtcttgctctgtttcccaggctggggtgcagtgacacagtcatggttcactgcagcctcgatctactgggctcaaacaatcctgccacctcagccttccagtgtgctaggattacaggtgtgggccactgcctctagacaataaatatttttttatgatggatatgttggatatgctaattactctgatctgataactatacattatgtgtattgaaatatcactgtgcatcccgtaaatatgtacaattattaaatgtcaattccaaatgtccataaataaagtttaaaaaaagagatatgagctggggttttcattggtaaacaccaaatatgggtaatgcagggtttttcacccttagcaccttgaatcctgagcctttcttaaacttctatgaggcaatctggcttcttatcagcaccaactttgaatttcctcctctctgctaaataatttacgattcttccatctgctttctctatctatatactagcgatataaaaggttttttctagtttaataaaaaaattgagtttgtgttttggtttattcttcttgtggtttaggagcatttttagagataagagggaagaaatatttttattccaccacctagggctggattttagagacatttttgtgggaagtttaagacaggaaagagaaagatgtgggaagtatggtaggcagaattctaatggtgtcctcccatgattcttctcccttctttattcacgcaaccactaatctatgtattaccacaagggaactttgcaaatggaattaaggttactaatagggagattatcctggattatctgggtaggcccaagtaatcatctgagcccttaaacatagaaaagaaaggcagagagatgtgtcagaggacaaggcaggagagatgaggtagaagg

SEQ ID NO: 246699 - DNA, 800 bp, Homo sapiens
ttaacggagtctcgctctgtcgcccaggctggagtgcagtggcgtgatcttggctcactgtaagctccacctcctgggttcacgccattctcctgcctcagcctcccgagtagctgggactacaggcatccgccaccacgcctggctaatttttttatttttagtagagacggggtttcactgtgttagccaggatggtctcgatctgctgacctcatcatccgcctgccttggcctcccaaagtgctaggattacaggcgtgagccaccgtgcccggccaacagttgttttttaatgtctggttttgaagtctgccatttctgagagaagccctttcatttttaagggacatggtcttgctatgatgcccagcctagaggtcagtggcttttcataggcacagtcaggacactgctgtctcagtctcctggcctcaaggggtcctctcgagtagctgggactgtagatatgcgccactatgcccagctcattttggtcaaatattaaattccaaaggcggattaactctgagtccctttgttctaaatttggggatagttgaaatatatttctgcaaggagagtggaaaatttgagatggcggctttacgatctgagtgcgatgcctccagtgttgtgcctttgcttcctgagtctgagcgtctgccagtgtggggcattaccttaatatttgccctggacatttaaagttttgacccacagggtacatggctgcttgaggaaattagaacataatggttattttatgaagtttgggaaaacatgagtgggcactgcgt

SEQ ID NO: 246700 - DNA, 439 bp, Homo sapiens
ttagaaaatacctgagcccagagtagagttttaaagagtggaaaggattgttttgttttgttttctgtttgttttttgagacagggtctggctctgttgctcaggctggagtgcagtggtgcccttccggctcacatcagcctccagagtagctggcactacaggcataaatggaaagggttttgaagaagaaggactaaaacagtgtcaattcaaacagcctttggatttggtggagaccaccagtgatcttagaacaatgcctacagtctggaggagtaagaatcagatggtgtgttggtgatgaacaaatatatgccaatgatatagaagcagcaaatgtatatatttttctttctctctttttttttttttaaagaaattagtaaatagaaggcggcagtttaaggaataactggattaagggcggttaaaaagt

SEQ ID NO: 246701 - DNA, 464 bp, Homo sapiens
ggaaaatccaatgttttggcttgggaatggtacagcatgcttcggaaaggcagtacttactcagaattttccctttcctgggctcaattatgttacacttctctctagcctcaaatattttattgggacttcgagtttctttcatttacatgcggttccttgattataccactcagattcttctaaagacccttcaccatccctcctgggaggctgggtaaaatggcatcctcctagtgatggtcaaagcaaggtcccattggcttttggttgccctgagagcgtagaaggacagtgtcacatttgccctgttctgatcaggtactatacctatcttgtctttagtatatttaattgcttcctctccactaaactgatattattgtttttttaatgtaaactttttattaaattgtatatatagaaatcttacatgtttagctcagtgatatttcataaagtgt

SEQ ID NO: 246702 - DNA, 564 bp, Homo sapiens
ggagattgtcagttagtaacattcaagcactcactgtgtgccgtctaccattctgagggcctttacctactgcagtcttcacgataccccatgaggaggcgctgctgctctccctaccctcagatgaggaagtggaggctctgagagctcaatgctgcggtgctctgggtcacaccgtcttgcaggtgatatggtcagagtaagagcccaggactctctggccctggaaccacagctcttaatcactcccctgtactcctccctctaaatgcaattttgggccctcctgccatcttggagctaaaaatatgataaggcaggaagctctgtttcataagaactgccatcacttctccctccttgccccaggtggggttggcatggagtttgggtatccagtagaggcattgctttgcaacagcccactcagctctcctacagggcctcaggtgagagccaggcttgggcgcccatgctgcccatgctgcacggacggtgtctgcttcaccatgctggtctagggcgaaaattgggtccagaagttctctctggaaccccgcaggg

SEQ ID NO: 246703 - DNA, 510 bp, Homo sapiens
ggagattgtcagttagtaacattcaagcactcactgtgtgccgtctaccattctgagggcctttacctactgcagtcttcacgataccccatgaggaggcgctgctgctctccctaccctcagatgaggaagtggaggctctgagagctcaatgctgcggtgctctgggtcacaccgtcttgcaggtgatatggtcagagtaagagcccaggactctctggccctggaaccacagctcttaatcactcccctgtactcctccctctaaatgcaattttgggccctcctgccatcttggagctatccttgccccaggtggggttggcatggagtttgggtatccagtagaggcattgctttgcaacagcccactcagctctcctacagggcctcaggtgagagccaggcttgggcgcccatgctgcccatgctgcacggacggtgtctgcttcaccatgctggtctagggcgaaaattgggtccagaagttctctctggaaccccgcaggg

SEQ ID NO: 246704 - DNA, 1178 bp, Homo sapiens
gggaaatgggagcaaggtctcagccccgcactgcaggggccgtggcaggtgggggcagcggtggaaatagctgcgtttctgaactctcaggtcactgccaccctgtgatgccttctgatggttttaagcaacaaagaagcaccaaggaagcaggaggccgaggagggctcccagtgagggcccctccgtgggagagagcgggttgtgagagcctgggaagttcacattcccctcaccccatgaggaaactgagacctgccctgagccccagccctgtgcccttcccaggggcttgtgtgagagcggccactgggcacctgtagagtgaaaaggatgcccaggggctgggtgggccgcttgctcaggaggaaatgtacccccaccccagtctcagcacaactgcctggcacccccatcctggtgacccagggtggtctctggtgggccctggtcctggagggctctgggattcccccaccagaccctgcagcccagggtggggaggggcaggtccgagacctcctatcccccgtcattccccacctctgacctggccctcacctttgactgaccctccgaggaagaacaacttgtgtttatttctgggggtcttcgtggtggtcagcacctcaccacacaggaggaatccttctgtctctggggggtcaccagcaacgctgggacaagcagcagagggtggggggcaccggcctcggcgtgtggccctcgggctgtcctgcacgggcctctcagaccggtagcaagctctgctcattcctgagcgacacccaaggctgtcactgttagagggaagccctcagtgcacagccagttcccagaccctcccccgcgctgtgtgcctggcgtccccggacccagccatgtcgtgggcacctggggcaccagctgacctgcctgtcgggggaggcaggtctgagccccaggtggtcccggtgggctgttgcctgccatggagaaggggctggggcttgcactcagccactcaccggggccatgcacgtctcctgccctttctccacacctgcgtcccctacagactcctgctgccgtgtaatggacagtgggaccctctggtgaggtgtccccctcctgcttcgggctgcggccaccatgtctcaggtttcctggatgaactcattaaaatgaagcatagagca

SEQ ID NO: 246705 - DNA, 445 bp, Homo sapiens
ctttacaaatactatctcaagccaggtgatcaaggttaacatcaacagtgataagtcataatgatagtatgtacccttcaaattatatgatgagaatgccatcttacctctctgtcttcctcccaaaaacatattaaccatgaggaaaacatcaaattccagttaaaggagattctacaaaataggcctgaccagtaatcttcaaaattgtgaagatcaccaaaattgtcaagatcaccaaaaatctgaaaaacagtcacagtccaggggagcctaaggaggataagaactaaatgtggtcccagacaagatcctggaacagaaaatgaacactaagggaaaactaaggaaatatgaacaagtatggattttagttaataagaatatatcaatatcagttcattaattctaacaactgtaccatactaacattagatgctgataa

SEQ ID NO: 246706 - DNA, 384 bp, Homo sapiens
agccccacttcctatctaggtgagaaaaaatgttctcagtagcacacactgagagctcatctgttttctttacgtgtgggtttcttaatgccagacatttggtcttaaatccttcttggaacaaggaaagataccaatcaatatataaatgagtataaataccagcaaaaatgcctggttcatgatcactgttcaccaagcaccctaacaaagtaggtggaggatcatctccctaaagcaagttctttcatctgtaaaatgagcaggttgaactagatagatcagtggtttccaatcttttggttccctgggccacaatggaaggagaattgtcttgggccacacataaaatacattaacactaaggacagctgatcagctaaa

SEQ ID NO: 246707 - DNA, 358 bp, Homo sapiens
tctgggttccagtgattctcctgcttcagcctcccaagtagctggaattgcaggcacacgccaccacacctggctgatttttgtattttttaatagagacagggtttcaccacgttggccaggctggtctcaaaaactcatgacctcaggtgatccacccgcctcggcttcccaaagtgctgggattacaggcgtgagccaccatgcccagcctaacctagtattttaacatgagctctgggagcataagaaaattgtagaagcaaggaaagaacgatataactcataaaaggaaaaactcagaaatgatcaggtaaaataattagcaaaaataaaaggtcaggtgaaagaattcagg

SEQ ID NO: 246708 - DNA, 499 bp, Homo sapiens
cgtgaaggggatcaagggacggctgaacagacttcccgctgctggtgtgggtgacatggggatggctacagtcaagaaagggaaactagagctcagaaaaaagtgctcaggaactctggtcaaaggaacaccactagaaaacactgaaggaggcatgtcaggtggttctgcttctccatggctccctacgatgaatgcctagagagggtattgacatggcaacctgatgccagcacatctgtccacagctgccattgcaaggatctaccttggtgccctctaaagaaattctgaattttctgagaacaagaggtctagtcccatatgtggaagtcttttctgtatgtctctgagtagaaagtgagaattgatatgccaagggatgagtaatgagcctcatcttgatgcagagtccccaagaaccaacttttactgaggagcatgcaggcaactttataccccatttgacaacattaaacccaaaagaagaaaatcaaaa

SEQ ID NO: 246709 - DNA, 293 bp, Homo sapiens
ccagtagccccaggtcatctgcttgccaaaaggagggggaccagcccccggggggagcccagagctcggcagggctggggttagtaagaagagaaaacagggttagtaggggctgggttagtaagtcagagcacagcaccagcggacagggcacctcagcagacacacacaggagtcgctaagagaaaaggaagaacgcacgcaggtccgttagtttgttaagggatgatcggggtgcagttgaggcaccccaggggttagacgggttagtaatcgaacaaaagagctgccta

SEQ ID NO: 246710 - DNA, 748 bp, Homo sapiens
gggatccaatcgctagtcctagggctttccaactgtcttcctaggaccccttcgagggcagggtaaagcagaggctgagggtctcagcaaatggctccccagggcagctgactttgccctgagccactctgcatggttttacctatggaaaaagacccttcggagactggcttcttccagaaagctttaaactacagggcccagtccacccagtttatatatgtggagaagtaacacaaggctccagcagattaagtgatggcagaccagaagacgccactggctcctgagccacctgctctcacactttgctaatcagcagctcccacgtgccaaaggcagtggggtaggggactggccttgccaccgcgactctattatgtttcaaagccattggttttatttgcttctctattgttccagtgatttgtttcaagtaatcatcaaaataccaacgaaattgcaggttagcaaattttaacgttatgatgggccaagagttgattgatgggaaaccaaacaatagtgtcacacacttgctatgaagccaacatatagcacacttaaatccccttgttctgcactgtgaaaaagtttctggaaaaagcaatgaagaaggggaaaaaaactgaaactttgaatgccttggattaaccacgtggaagagctaggaacagaattagatgagccactgaagaacaggtaggtaaccgttaaaagatcccgtttaggaaattatttcatcatt

SEQ ID NO: 246711 - DNA, 500 bp, Homo sapiens
cgatttgactacgcggctcgatctgactacgcggcccgatctgactacgcggctcgatctgactacgcggctcgatctgactacgcggctcgatctgactacgcggctcgatctgactacgcgactctattatgtttcaaagccattggttttatttgcttctctattgttccagtgatttgtttcaagtaatcatcaaaataccaacgaaattgcaggttagcaaattttaacgttatgatgggccaagagttgattgatgggaaaccaaacaatagtgtcacacacttgctatgaagccaacatatagcacacttaaatccccttgttctgcactgtgaaaaagtttctggaaaaagcaatgaagaaggggaaaaaaactgaaactttgaatgccttggattaaccacgtggaagagctaggaacagaattagatgagccactgaagaacaggtaggtaaccgttaaaagatcccgtttaggaaattatttcatcatt

SEQ ID NO: 246712 - DNA, 588 bp, Homo sapiens
ttattattacatattttaagatccattgtatttctttgactacaatctgtttgtcataccctttacccaattttccagagttttaaaggttttttttttatggatttgtgggagtactctgatttcttcttaaatagtttaatttccatgttctatcagatatcctactatcttttcaaagtaatgatttagtcaatttttttattctaataataagtaatcatcaagggctaactccattacaagggagtgcatatgtagaatgtgtgaattgatttgcagaagtcttgaattcctgaaaataatttcacaagactgccttatgcctatacctattccatttcgtttcattttcctaacagccttgtgaggcatatagtattgttaactacaaagtgaggctcagagaatataaacgtccaggatcacacagctggtaactcttccacttccaaaatcttaaaatcctagtaatcatcaccactagccattccaattacactaagactgattcttgatgtctctaatttctaataaatggttgctcttctccttttcctactacaaacacccaatgaatatatatat

SEQ ID NO: 246713 - DNA, 145 bp, Homo sapiens
catatgttcattgagtaaatatttattgagtatttgctatggtccaggcactgtgctaagtattgaggataaaatggtgattgaaacattttcccttcttgattttaacatctacaaaataaaaagtatgttaatatcattgatt

SEQ ID NO: 246714 - DNA, 489 bp, Homo sapiens
gctcaatgaatcctgaataagtgaaccggcagggagggtaacagtaggcccttgcagaacagttgtaaggaatcagattatcagagccagcatgactgtcaccaagtaggtgttcgataaaggaggtggttattatagctggatcatttttccttgggggcaagaagaatgtattaattattttaaaggtgatactgttaagattatgaactataggccgggcaagggggctcacgcctataatcctagcactttgggaggccgaggtgggcggatcacctgaggtcaggaggtccagaccagcctgggcaacatggcgaaaccccatctctactaaaaatagaaaaactagccaggtgtggtggcgcctgtaatcccagctgctgggaggctgaggcaggagaatcgcttgaacccaggaggcagaggttgcagtgagccgagatcgcaccactgcactccagggtgacagagcaagactccgtctca

SEQ ID NO: 246715 - DNA, 508 bp, Homo sapiens
ccataaatttatcctctcacagtcctggaaaccagaagtctgagagtgacatgttagctagggtttttcttttcttttattttatttttctggatactataagggagaatccattccatgcctttctgctagtttcttgcaactattggcaatccctggtgccactgggcttgtagacacagtccctgcctcagctgtcacatcaactgacacagtgtatgttttctttcctgcccttctcctataaagacacttgtcactggagcaaaggcccatacaaatcaagtatgatctcatctagatattcttaacctaataatatatgcaaaggctctttacccaaataaggccacattcacaggttacaggtagacataccattttgatggtctaccatctgactcaatacagtgagtcatctggaatttcctaggatgcagggcttaggaggacatgtgacatcaatgcagggggtcgggggaggcggtaaaagaactgatggaaaaaa

SEQ ID NO: 246716 - DNA, 309 bp, Homo sapiens
ctgggtacttgtgggtaaatcgtccacactgtctgcttccaatctacttaagcaagtggttgtaaaagtcagatgactgcataaagcacgagttctctctaaaaggagtagactcagaagagaaagcagttggcctccgagtcctgcgtgagggaggtaatcatctctcagaaggccctgcatgcaagccagaaaaatctctgacttcaaggatgaaaagtaaaataacactgaaacttctgacttcgtttcactgcaggccaggatgcatgtaaatacactttggagactttaggattttctatgtgg

SEQ ID NO: 246717 - DNA, 349 bp, Homo sapiens
caaaagattattaaagtctactatgaacacctttatgtgcataaactagaaaacctagaagagatggataaactcctagaaatatacaaccctcctagattaaaccaggaagatatagaaactctgaacagactgataacaagcaacaagattaaaattgtataaaaaatattgccaaccaaagaaaatccaggaccagacgaattcacagctgaattctatcacacattcaaagcagaattgataccaatcctattggcactattccacaggataaagaggaaatcctccctaaatcattatatgaagccagtataaccctaataccaaaatcagggaagaacataac

SEQ ID NO: 246718 - DNA, 520 bp, Homo sapiens
gatgaagtctcactttgctgtccagggcggtcttgatatcctgggctcaagtgttcctcctgccttgatttcccaagtgccaggattataggcatgtgccaccacagctggcctaaagtttactttctaaataagtatttagatattttaaaaattataattcaaccccacactgacttgatttatatggtaggatctagttatctgggaatcactggaattcgtaagaggccacttataatgaatacacttaacgaatggaaaaatgtttgattagaactttatcttggaaaaggaaaccctgccaaaaagtttattttatatcatatttagggaaattcaggttatatttgcaactatgctctagttgtgagaatgaacactgaattttcatacgtacacaaaaacatgtaagcacacatttcgttctatcagcttcatcgatagcaaaacacatgctgtttttagagatgtcaaaagaggagcattttatgcatcttagaatcaatgaaacacacag

SEQ ID NO: 246719 - DNA, 308 bp, Homo sapiens
aggccctttggagttgtgtggctccccctccagctgctctgtccacagatcttcctgctctccccaactcccctctgcccttcagccccacagccagccattagctgacttgttgaccatgacttcaaagcatccagaatccagtcggctctcaccaccctctttgccattgtttccaaaagggtgttgcccctgggtttgtcttttggagccccccaggagaagggaggacttcaaagacagaaagagagctaggcaccaaacctcaagcaggccttgctttcccagactctcaaacttaaaaaaaa

SEQ ID NO: 246720 - DNA, 215 bp, Homo sapiens
tcattggtggggggaggactgcatttttttggtaaaaatggaagtaacagaaatcctaaatatcttttgatgggttataagatatattactaaaagataatttatatttagaattctaccctattttatggttaggatataatgagatgtatttgaactggtttacgtttagtatattaagtgttcagtaaatgttagctgctgtttagtgttgt

SEQ ID NO: 246721 - DNA, 341 bp, Homo sapiens
ccctctatgggcagctggccatagggagggaaacagagagagggaagaacaccttcttccaaaagcaccgatagggctgggtgtggtgacttatgcctgtaatacgctttgggagagcaaggcaagaggattgcttaaggccagaagtttgagaccaacctgaacaacacagcaaaactctgtggggctagtcaacaaaagcaaaaaatgaaaagtagctgggcatggtggcccatgcctgtggtccaaactacttgggaggctgaggcaggaggatcgcttgagcctgggagttcaaggcttcagtcagccatgatagcaccactgcactccagcccagg

SEQ ID NO: 246722 - DNA, 666 bp, Homo sapiens
catgagtcggcatctaatgattgcaggctgattctatcgaaccatagtgtcatcctcgagaccattacggtactcctgattagttctgtcttttaaaaatagttcgtgattgtatataccctgtccgagactgcagaatcactgtcttttttggtacagaaagaaatgtttccttttgcaaagccagcctcagcaatgatatggcagttctgaatgtccttctctaaaagtgtttctcattttccaaaagtagagggttgtaggcaggggcaagctagagatggtctgtgacctagtcatgagcaagatcagcctgcacagttcatacttaaatgtgccctttgctaagtgcattcacctccactaactcacctgaatggtaccaattgtcccatgactgaacaaggaagggcttatcatctccaccatacagatgagaaagctgagattcagtaatggcaagagcagatctaggcctcaaatacagatcttctgagcaaaccttatattgctgccaaatacttccaaattccagagttccagcagggcaggttgcttagtgtgatctcacagtcaagcaaagaatgggcaaccctttgctaataccaggccctctgttcaaatgaatgccaggcatcctgccaggcctgggctagaggtgtatta

SEQ ID NO: 246723 - DNA, 636 bp, Homo sapiens
ttgcagctgattctaggaacatggtgtctcccagccatgaggggtagcctgttacttctggttttaaaatagcgcgtgaagatattttagtgtttcaagactgcagaatcactgtcttttttggtacagaaagaaatgtttccttttgcaaagccagcctcagcaatgatatggcagttctgaatgtccttctctaaaagtgtttctcattttccaaaagtagagggttgtaggcaggggcaagctagagatggtctgtgacctagtcatgagcaagatcagcctgcacagttcatacttaaatgtgccctttgctaagtgcattcacctccactaactcacctgaatggtaccaattgtcccatgactgaacaaggaagggcttatcatctccaccatacagatgagaaagctgagattcagtaatggcaagagcagatctaggcctcaaatacagatcttctgagcaaaccttatattgctgccaaatacttccaaattccagagttccagcagggcaggttgcttagtgtgatctcacagtcaagcaaagaatgggcaaccctttgctaataccaggccctctgttcaaatgaatgccaggcatcctgccaggcctgggctagaggtgtatta

SEQ ID NO: 246724 - DNA, 529 bp, Homo sapiens
caatttttttcatcttgagcttttcctaaacatgtcactcttgttacttgctgtctccctttaatccactcagccttttgcagataaaaaattttaatttcagttaaagtgctctttatttttctcaccaacaagatccttttatactttaaggaccattttcaccttcataaggaatctgaaacctattcagatccagtagtttgctctttttcacagatcaagctaagcaaactcccctggcaggaagccaccagaaatttcagttacaggatactgccatattctttcacaaaaaagggcctggtaagtgcaagtgatgccctatttctcttagctgtctctaacccttgctcaaagaaagggtaagtaaaaatgggtgacatgttagacgtttaaaaatgaaataaaaatgcatacacacatggataaagtacttcctaaagtatgagctgccttattttctcaggtataaaattattttagggaagtttcaataaatcaaatgttaagaaactgctaaaacatt

SEQ ID NO: 246725 - DNA, 310 bp, Homo sapiens
agacttgtgactatgccgttgtggtagagtgtgagggatgtgatatgtgctgcttctgagcttgggccttgcaatgctggctgggtgctcttttcacaagctggaacttaaatctgcctccaaccctgctcagcatggtcatattttagagcatgggtggccaaactttttcttcatgtaaagggccaaatagtaaatattttcagttttgtaaccattcagtctctaccctgtggtgtgtaagcagccaaagatgatatgtaaacaaatgggcatggctgtattccaataaaatgttatgtgcaaatcc

SEQ ID NO: 246726 - DNA, 420 bp, Homo sapiens
aaattgcacccttatctcacaccatatataaaaatcaactcaaaatggattaaaacttggccaggcatggtggctcatgcctgtaatcccagcactttgcagggccagggcagctggatcacctgaggtcaggcgttcgggcccagcctggccaacatggtgaaaccccatctctactaaaaatacaaaaattatctgggtgcagtggcacatgcccatagtcccagctactcaggaggctgaggcaggagaatcgcttgaacctgggaggtggaggttgcagtgaacccagatcacaccactgcactccagcccgggtgacagagcaagactccatctcaaagaaaaaaagcgattaaaaacttaaacataagacttcaaactgtaaaactaccagaagaaagcataggaaaaaaatga

SEQ ID NO: 246727 - DNA, 180 bp, Homo sapiens
agacatggttgtgcatcctgtgagtatactaaaaaagggtggaattgtacattttcaatggttaaaatgtatgacaggtgcattatatcagaagaaaagctgttaaaaaaaaaaaaagacagcaaagagaaatagacaagtgtgactatgaagaaatcaaattgtaaaagtcacacagga

SEQ ID NO: 246728 - DNA, 709 bp, Homo sapiens
ggtaaacagagcttggatatttagaaacccattgtggccagaaagaaagttatgtcattcagttgaatttagcaaattgcaatttgccgaagtatgggggttatttttccaaatatactaaattttcagtattgcttaaaataaggttttcagtattaaaactagaatcttatagttttgagtaccaaaggaatttgagagaccatagctaatctctttaacaaatgtggaaaccacttagacttttttcttccagattttctcttctttttaattgtaatttttttcatttttagagacaatcttgctgtgtcacccaggcttgagtggactggtgcaatcatagctcactgcagccctgaacttctgctgaggctgtcctcctgcctcagcctcttaagtagcttgaactaccggtacacgccaccatgcctggctactttttagttgttttgttagagacagtctcactatgttgcccaggttgtctccagagagtttcaatctaggatagctatcctttcatgaaaaacgtccttttgttatcactgttcagtgtcattctttgattttaaaaggttaatgtatatattaaactgctgccttccaaatttcttttagaccttttggaaacaatctgctttaaaatccctggcttcctttttttcctcctaaacttcttctttcatttctttttttcctcaccccc

SEQ ID NO: 246729 - DNA, 323 bp, Homo sapiens
ataatcatagctcactgcagccgcacaccacagggttcaagaaattttctcaactcatcaccctcccgaatagctggaaaaacaggcatgtaccaccacaccagtttttcaattctaattatctaacttctccaagaaaacagacttcacccaacatgtacatctgctactcacatcccctcctatgcaagcttcaccttccatgccatgattctgccccaccagttcgtcattactcatcttattcactccacaattacttactaagcatctatttggtgccaggtaaccctctgggtactgaagctataacagacaacaaa

SEQ ID NO: 246730 - DNA, 301 bp, Homo sapiens
aatgatggctgcagttattcccggccgtttttgagcagtcaccacactgctgtgctggagggtttgaggctcacagcatgatgcagcaggagcccaaggagagaggcttctggaagaggagaacccctgcttctggaagttctcctgtgactggggatgcacagcctgttaaatcagtaagatgtaaaacccttgccttagtgtgttccccaaaacagcccctgagccagggatgagagagcaggtagtttacttggcagatgatcccaagaagcagaagtgaagtgaagaactcagaaaa

SEQ ID NO: 246731 - DNA, 249 bp, Homo sapiens
gccgtctttaagaactgtaacactcaccttgaaggttggcagcttcattcttgaagctggagtgcagtggcccaatctcagctcactacaatctctgcttcccaggttcaagtgattctcgtgcctcagcctcccgaatagctgggattacaggaggctcccagccctttcggattggttgagaaaagtggcctggctggtctggggccagcggcacccaccctcccctcaattgcccaactccccccc

SEQ ID NO: 246732 - DNA, 384 bp, Homo sapiens
ctcctgctgccccttgaaaatgccaggctcacttctgacatatttgcgtttgtggttttctctcccccaaatgctctctctgcagacacccccatgactaattcctttgcttctttcacattttcactccaaagtcacgaggtcttcccttgctgccctatctaaaatacctgtcttgccccactgctggccacagacaatcccatgaacgctttatattacccatccttattttttttctttattttcttgcacaatattttcttagaagttccttcttattttgtattcttagcacagtctttctaaaatagtctcttatattttactaatatgtcttattattatctgtcttcaacactagattataagttctgtgaggcc

SEQ ID NO: 246733 - DNA, 369 bp, Homo sapiens
ctcctgctgccccttgaaaatgccaggctcacttctgacatatttgcgtttgtggttttctctcccccaaatgctctctctgcagacacccccatgactaattcctttgcttctttcacattttcactccaaagtcacgaggtcttcccttgctgccctatctaaaatacctgtcttgccccactgctggccaacattgtgaaaccacatctctactaaaaatacaaaaaaattagccaggcatgggtggcaggctcctgtaatcccagctactcgggaggctgagacaggaaaattccttgaaaccaggaggcagaggttgcagtgagccgagatcacactattgtactccagcctgcatgacaaagt

SEQ ID NO: 246734 - DNA, 808 bp, Homo sapiens
caggttttgcacttaaacaatttctttaaaagcattttattcactttgctgctactgtaaatggaatgttttcttaatttcactttcaattttttcattgctggtgtatgtccatccttaggggacacattttgagccctgttaatttccttttctgtgtggcttttgagcatttgaaagacttttaagtgttatttctcaatggcacatctgcctgattgtgagctttttaaaaagcccaattctatggcatttttgtcataatcccacctttggcagagcttgaccttggacagtctcatgccctctgcagagtcctgctgcctagaccttaagatcataaagccattctaatttatagtgcatacactcagtggaacattatacagtcattaaagctgtttatggagactacactaacacagggaaataattatgatataatgttacacagaaaatggactacaaatgtatgatttccattatttttggcagatgcatcattaggaaaattaaaatccgggcggggcgcagtggctcacgcctgtaatcccagcactttgggaggccgaggcaggtggatcaccaggtcaggagatcgagaccatcctggctaacacggtgaaaccccgtctctactaaaaaatacaaaaaattagccgggcgtggtggtgggcgcctgtagtcccagctacttgggaggttgaggcaggagaatggcgtgatcccgggagcggaggttgcagtgagccaagattgcgccactgcactccagcctgggtgacagagctagactccgtctcaggga

SEQ ID NO: 246735 - DNA, 428 bp, Homo sapiens
taaaaatagattttaatttagcaaagactttaaaaatttccttcaaaatcagagttcaacaaaaagtcccaaaatttggaaaggcgagatgttggctagatttgcaattaatgtttgttggctcattataatagctgatattggctgggcccagtggctcatgcctgtaatcacagcactttgggaggccgaggcgggcggatcacgaggtcaggagatggagaccatcctggctaacacggtgaaacccagtctccactaaaaaatacaaaaaattagccgggtgtggtgccacgcgcctgtagtcctagcaactcgggagactgaggcaggagaattgcttgaacccaggacggggaggttgcggtgagtagagattgcactactgcactccagcctgggcgacagagcaagactcagtctcagga

SEQ ID NO: 246736 - DNA, 493 bp, Homo sapiens
catctagcaagaaaaatgatgatgggcacactgggagcatttccttttgcacttgccttgtcctgttgctgttttagagctatgtgctgcgtgccatttgcagattcagttatgacatttgtttggtgggtgacccccaccaaggtcacattgcagaaagagtaatgaggccccagaaagataattctccacgagggtaaaggaacgtggaccaaccaactgtcttttgcaccaaaagtgaaaagtgaaatgagtgttgctctgggtctatgaaagtagctgacccagcaccagtcatagcctttcaagcaggtggaccagtacaaccttcctcccactcttgtttcagccttgtgtcaactccaagtctctggcttcagaaaggacaaagggacaggcaaataccatctgaagtgggtcatctcattgcctattcttcccccatcacaccagtcttcataaagcaaaatatcaataaatgtgactacataaa

SEQ ID NO: 246737 - DNA, 363 bp, Homo sapiens
catagccacagaagcctttgagaatccaagcaaaatgaaatcaattaaattctgcctatcgctcttcaaggaaaatgtcacgctgtagccaccttgagacgcaagctcagggcacaagcagtgctataacgtggcaaacaacaaaagtggatgcagagtgctgtgcaaagctgctcagaataagaatttgtggtaattttaagcatgggatccatctgtcaatgcaggaaaatgacacatttgagggtacatttatttatgtaaggagtgtaaattttataccatcattagcatactggatgaaaagctgaggtcaaatttcaagtcaattaccggatgctctgttataaatgcaggaatact

SEQ ID NO: 246738 - DNA, 380 bp, Homo sapiens
ctcacacctgtaataccagtactttgggaggccgaggcaagaggattgcttgagctcaggagttagaaatcggcctggcagctgggcacggtggctcacccaggcacggtggtaatcccagcattttgggaggctgaggtgggcaggatcacctgaggtgaggacttcgaggccagcctggccaacatggtgaaaccctgtctctagtaaaaatacaaaaagtagatgggcatggtggcagacgcctgtaatcctggctattcgggaggctgaggcaggagaatctcttgaacccaagaggcggaggttgcagtgagcctaaggttgcagtgagctgaaggttgcaatgaggtcgacgcggcccgcgaatttagtagtag

SEQ ID NO: 246739 - DNA, 602 bp, Homo sapiens
cagatggcaggaatcctcaggatgacttggagagcaaccagtccagactgtagcaagtcaggttctggggaaggctacttcataaggatgagcaatttgagagagacttagacaatcagcaacaaggttggggttgaattggtaataaatacatgaaaactaagccagtgggacaattaatattagatgagaaaggaaaagtgttgaaatgttactacatggctcaattgtgcagtttccacatcatcccaataatgtgaattgaatattgagctagacaaaattatggcataactatactggaaagatgggggaatgaaaagaatatttatgtgcatagaaaagagctaagccctcatcctccatggtggggagtcagtgggtaatgctgaaacaaaattcaccaagcagcgtatcatttatctggagacaagggggtaaatttaaaaaaaaaaaaggctaaaagaggtgcctgcaagcactctgagagtagtatctgcttttcttatcttttttaaaaataacaattgtagaattgtttgattcttagtatgtgcttatatgtataactttaataaaaatgaaaacaaacaataacaaaa

SEQ ID NO: 246740 - DNA, 403 bp, Homo sapiens
gtcgactgaaattgatgtgattatttttatatcaatttcaaaattaaaaagggctcatctttatgccacataattttgatcccaccatatgtaacatggctggaacgaacgcgcaattggtactgaatttcagcctcactgtgacctttcccacatctgtctcatcagcctttcctatctgtctcctgctatcctgcccctgaccccatgcttgggtctgctttgtgactgacatccctaatcctttcaatccatgatgcttttattggacccattagccctacctggaataccttccacacatacatttgtgcttgttgagatgtgagctccatccttccaatcccatgcatattaaagcccaccccaatttgtccatcagaattgatctctagctcccagg

SEQ ID NO: 246741 - DNA, 320 bp, Homo sapiens
gaaacttttaagaagaaagtaagaatagagggatgaatgcatcttaaataatgttggtgcaattgaacatccataggcaaaaagaaagcctataaaagggcaacttgagggatccttatggcaatgaaatattttctatctcaactggatcagtgtcagtaccctggttatgatattgcagtatacttttgcaagatgttacaattggggaatactggtaaaaggcatataagatccctttgtattatttattgtaactgcatgtaagtctaattattgcaaaaaaaattgctttaaaaattaaacaatattacctaatg

SEQ ID NO: 246742 - DNA, 256 bp, Homo sapiens
aacgacttttttttttgaggcaatctcggttgtaaaaacagttgcaaagtccagaccatgaattaaaattttctgacttcagatactgaatttccaattccagatacataagagttaaaggtttctcttttttctctctctcctctctctctctgttacccaggctggagtgcactggtgtgatcacggctcactgcagcctcgacctcctgggctcaaactatcctcctacctcagcctcgtgaatagctgggac

SEQ ID NO: 246743 - DNA, 494 bp, Homo sapiens
aacagtaatggtaattttgttttcataaataaaattttaaattgaatatctacaagccggtcatagcatatgcttctccaagcagaagagagtgtaacacttgtcaggcactagctctgtctctaaaatgaggcatgggtgcctcctcaccagttagcaatttcctaaagcaaagtcttgttaataccttgcagtaggagcatcttcaagaataacaatcttttggccgggtgcggtggctcacgcctgtaatcccagcactttgggaggccgaggcaggtggatcacgaggtcaggagatcgagaccacggtgaaaccccgtctctactaaaaatacaaaaaattagctgggcgtggtggcgggcgcctgtagtcccagctactcgggaggctgaggcaggagaatggcatgaacccaggaggcagaacttgcagtgagccgagatcgcgccactgcactccagcctgggcgacagagcgagactctgtctca

SEQ ID NO: 246744 - DNA, 412 bp, Homo sapiens
agtatctgataatagtaatagacatctaaagccagaagttggttacttagtagaaaaaaaaggaatttggactataaggagtatgaatatttgtgcttttggtttaagaactgatctctgttgatggacagtatctgttgttctccaaaattacattgtaaaattacagattaatccaggagaatactttttcaattctaatattttcaattgttttgttataaggatagtgagcaatggggaagactagttttacttttttttaatgaaatataatagctttgaattttctataaacattctcaaggatttaaaggattatcgccacagatatttaatatttatcaacattcaaatttggaagacatgttgttatcaattctataagactaaaaataaaactctgaacttt

SEQ ID NO: 246745 - DNA, 556 bp, Homo sapiens
aagaattcaaggaactgaaaggccagaatattggtaggatcatgaccttttcgtataaaaattcctaagaattaagtcagaggtagtattggagtatagaagagtggatatgagtcaagagctaaattgtttgagaaatgaggagtaacacgggtgtcagtagatgacaacatgaagagaaaatgggtgacataacgatgtcataagatttgaaattgttggtttttaggaattgtttccttttagtaaagaggcaaaatgatctgagagtggcaatgaataacaaagattacatctaccccatctccaagcccactggggtgaggtctatgagaacaaagaaaaacaatcacatgggctgggcctagtggctcatgcctgtaatcccagcactttgggaggccaagatgggtggatcacctgaggtgaggagttcgagagcagcctggccaacatggtgaaaccctgtctctactaaaaataccagagaaaaaaccaaaaaaaaaaacaaattacccaaaaagacagggccagacttctcattcttgattccact

SEQ ID NO: 246746 - DNA, 1001 bp, Homo sapiens
cgtggaggcacccagctgtcccgtatgcaagtgagggctgctcctgacacagactgacacctcgggcctgaagagggaatgcggggcgggggggcgggtccagcagctggcagcagccacagtgaggtcccacaccagcactcacactggttcagagccaggggagaaaagccccggcaccaggacagtgccaacccacagcaggaagccccaagaccaagatgcaatgatgcaaggactactcctgcccacgaagggcccacagtctgcggaatgagctagagatgtggacagagactgcagtgccttgagatgagggcccacagagtgtacaaggccaaaagaggccagggaggcttcctggaggaggtgactcttaggctgagaagaaattcagcgagcagagaagtgggggaagggaacttgaggaagaggcaactacagggaacaaaggcacagaaaccagaagggcgaggagcagtggaagccgacgaggccagcctgatgccgggagtggcggggcctcccatgtactgagcggccgctgtctctctcacccacactccagcccaccagcagcctgacagccagtgccctctgcctccgtggaggctgtcttctgcctgccagagcaggtcccagagccggctgtgcagagggcctcttccctcaccaaaagcccctcagcccagcctgggtccaccaagcagggacgctccaactcaccctggctcacagccaagcatctccctgtggggcaagttcaagccaacaagggacaagaaaacacgcagaccccactggggaccctgagctcagacacccggtgtgctcctcactcacccccaccctgccccgagtgcaaagtgtcctctcccagcagcacctcatcagtcctggcccacacaggagtgccagcggccatgcaggggcactgaccctgccataactctgcctggacacaggaggacagactgtaagcacatgcagcgtgtgcactg

SEQ ID NO: 246747 - DNA, 860 bp, Homo sapiens
ttattgcagcattcagaacacttttaatcaaagttaagcattctgtaatgtttttcttttccttttaaatgtaattttcttttgttgcaaaaaatgtttaatggtgaaagtcagatttagggtagttaagttgctcagggatcctgtaagcaaatttctgacctcctacctgcttagactgttgagccctacaggattgtaagagacacacatgacaaattatggaggaaatgagagaaaacagaaagaatcttaggaatgaaaataggagagcaggaatgagaaatatatgtttctatgggtaagccacagaaaagatatgatgatttatggagatatatttgtgctatatccctgagccccattttcttttcctttcttttcttttttctttcttagacagggtctcactctgtcacccaggctggagtgcaatggcacaatctcagctcactgcaacctccatctccaggactcaagcaatcctcctgcctcagcatccacagtagctgggaccacagacgtgcaccaccatgcccagctaattttttgtagagatggggtttcgccatgttgcccgggcttgtcttgaactcctggactcaagtgatcttcccaccttggcctcccaaagtgctgggattacaggcgtgaggcaccacactcagcccccattttcatatagaaagcacaacatggacatcaggaagcttgccctttgatactaatagaatcactgaagttcactgaagaagatttaggaatattctgaaccaccaagagggaaccctctgaaccatttctaatatattcaggcattttggttattaactaaataataaaatatgcaaaccaaccta

SEQ ID NO: 246748 - DNA, 263 bp, Homo sapiens
aggagtagaagatttgatgggactacaaaagaggaactcactccattattaccagcttacactggaaaaatgatcaacaaattaagaaactatgttgggagctaatgagaagtacatatttgctgccagtagcattttggatacatactgttacaggacagaagactgatgttacttagaaattttgtagttggagtatcactgacaacatcttaaatcagatcttaagaattaacagcttaaatattatatttgatcccata

SEQ ID NO: 246749 - DNA, 476 bp, Homo sapiens
gttgcccaggctagagtgcagtggctttaacatggctcactgcagccttgacctgctgggctcaagtgatcctcctgcctcagcctaccgagtagctgggaccacaggtgtgtgccacatgcctggaaatttttattttttgtagagacactgtctcattatgttgcccaggctggtcttgaactcctgggctcaagccatcttcctgtctcagcctcccaatgtgctgggattacaggtgtgtgccatgacacccagccggattatggatgatttttaaataacttccagtaatttttaatcttaaataaaacacaaatggaacctaaaaatctcaaataatactttttttggagacagtgcaacatagtaaatagaaaataaattttaaaaaccagcaaatcctggattgaattcattagatctcttattagaaatgtgatcttggcaagccagttaacctctctgaacttctc

SEQ ID NO: 246750 - DNA, 422 bp, Homo sapiens
tggccctctttgaatatctttaatgcttttagagattagcatcagagaattattaatactagagggcacaaggaattagccattgccagtggacacctacataggtgtgactatgtgactcagttttaaaaatgtgacacaatgaaaaaattccttggatgttatggaggacgaaaattttgtaagtcctatccattctttaatggagaaactaaaatttacaatattactttatttagcccaagattttcttaagctttgtattttctaattcagctttggcttacagaatcatgcttgaagtttgagactgccagctttcaacaggcagttactagtgaaactctttggaaagatgagaagatgttgacataagtgtaatgtgagacaaagcaaagtaaaatgtaatttttaagaaaatg

SEQ ID NO: 246751 - DNA, 974 bp, Homo sapiens
tagtttaggtaaaataaaatctcccagagaaaacaaagccgggaagggagccccctttctgtgaaacgcatgccatcttctccatttgtcagtttgatgctgtaacgtacatggggttttgcaagagcttcaaaactgtctgcagacgtcaatttcgcccccctcccccttgtgagaactcgctacgtagccagcaactgtgtagtgtctacaaatgatgaaaacgatcagaaatgcgattaggtgtcggggaaaaaagggtttcccctgtttttaacttgtatttttactttaattgttacaatcttgatattcttaacgtgacttttttgggaaaccaccaagtgctttttaagcaaggagttactggtatttatgcccttaatattccttcattataggcttattgaatacgttaatatctcagtaagtgtatttgaattataattgactggctttttctgtggtactaatgtgaaaggaaaaaatattaggactgcaaaaataaatgccgcttgaatattatctgtagtgcttgcttttgcattactgtagtagaatgcttttagctggttttaagctgctaattagccgttcgtagccgaagaatgaatacaagtaatcctagttaataaatggccaaagcttgactccccaaaatgccagagcaatttatgaggtatatttcaggaaatacatatgtatatatttcgtgggggagtggagggtctgtctcttagggaatgtcttggcagttgaatacttctgattgtatatttcgtgtaacacactggagaaaagaacagtgtttaatgtcagccttcattttcttctaacttgtatgtatagttttctcatcgaaaattcatttttgtaggttagtatgaaggaaatagcgtttggattttttgctttatattttcttgtttgggccaattaagggttgttaaataaattggaaaaaatcctactac

SEQ ID NO: 246752 - DNA, 762 bp, Homo sapiens
tcttttgtgacagaaggtataaggccaaagggcaggttgtcagcgagaccgcctcccctgcaggccagttgggcttggagctttgggaaggcaagtttgcaagagcctaggcctgttgcagaaatactctgtcctcagcttttccttcagggccaggtccctggattcttggataagacatttacaatatgcgggcaccacactgaatcaggactgtgtgcagagaagcaaaccaggcctttccacatagataggaaaaaataatcataacagttcatggttatgcagcttccagtggactccattgttacctggtaatcatcagtcaattgccatcacccttaaccttaaaggtgtcactttcgtacttcaggtattctttccaaagtccctctaccccttcttctccctgtcttatctgtccctgatctctgccaccctcagttgcttacattggccaaccagcctgaaatgggagaggttgaatccttcatgctatgtgcatagccaacattccacaagatttatgtcactaaagcctgtgaaaatgacaaatggtgagaaagagggccaaaaagggaagcaaaaataaatccaactacgatttaacaaagggcggcccagtatctgtacctagtgggtactgtgatatcttgagggacatgaatttaacaagagaaataaactgctgtatgaggatctttaaaatgctcttgttttccattcaaattctctttagtaaagttgctttttgccctgaag

SEQ ID NO: 246753 - DNA, 471 bp, Homo sapiens
agccttgggtcatactgcccccgcgaggccacattggcaaaccagcaagggtgttcaacttccagacttggccatggagaagacatacgaggaggcttttcacattcagctctttaatgtttgtctctgccggcaccatcccagttgtgaataagaggtatttccacagcggctcagggtaggtagtgcacagctcacattcatcatttctgaaaaccgagaggagtctccattcggggtacaggttgatgcctgtcgtggaatgaaggttccaacacccagaccaatctctgcagtgtgctgctctcatgagcttgcaacaagatcagaaaatgttttgtgactaagcatttttcatattgcataaaatgcttcaagctcctcccttgtttctctctataatcctgtatatctgatgattgtgggtaccaagtgtttgaaataatcaaatgtgatttgatgttggtaaat

SEQ ID NO: 246754 - DNA, 228 bp, Homo sapiens
catgtaagtacatgacaagatgttctgcttcctcagagaaggcaaattaaaagcacaatgagaggagtgactcagtgaaaattatgtagtgggtagctctaagagcctgtctctccacagaaacattgaaaaataaagaacaaactgcccatttcaactctgttggaactctgaagaaagagacaaagatttatagctactaagcaaatgttgatttaaaaaaattat

SEQ ID NO: 246755 - DNA, 362 bp, Homo sapiens
caccactttcaccgcggcaccacctctccaggaatgcatccctacagaatttatccagcggcatttccagagctttctcacttgcctcaagtccccaaacccacctttactattctgggtccagtcttaggtttcctcttgtggaaggccattcccagctttgctagctccactttaagaatgtcctcatctcttcactcattatggtttgtccctctggtctcagaggaagaggtgctgatcatcctctctggatctgaatgctccacgtgtccttatgtcctatcttatcccacttcctctttgactttgttccatcagttcctctccttctctccctgctgcgtctttccttcaacttg

SEQ ID NO: 246756 - DNA, 336 bp, Homo sapiens
caggaaaacaattcttataactattccatatgttccagaaacttagaggaaatgttgaacatactgagatgtaaaagatgtaaaaaaacaaaattctagagatgaaaactatagcatgtgatgtgaaagtatataaaacagtagattaatagcagattagacattgcagaagagattaatgaatttgaggacatagcaatagaaaactattcaaaagtggggctgggattacaggcgtgagccaccgcgcctggccaggaaaacaattcttataactattccatatgttccagaaacttagaggaaatgttgaacatactgagatgtaaaagatgt

SEQ ID NO: 246757 - DNA, 349 bp, Homo sapiens
tgcaaacacagctcaccacagctttgacctccgggactgaagcagtcctcccacctcagcctcccaagtagctgggaccacaggtgtgtgcctccatgcttggctaacttttgtactttttgtaggctagtcttgaactcctaggctcaagcagtcctcccacctcggtctcccaaagtgcttggatgacagacaggagccagcgtgcctgacctaaagacatatttttccttctagtgtagttcagccttaagactgtatcagcagatagagatggaaaagtaagaaaaattgagtatcagattatatttataaataaagcagttactaattgatgtttttttttaaa

SEQ ID NO: 246758 - DNA, 472 bp, Homo sapiens
gatccgcccaccttggcctcccaaagtggtggggttacaggcgtgagccaccgtgcccggccaggaaatgaacttttaactgaaccgtagtcaaggcaaaatattcccctgattgcagtacaattctaactctgatctcctgactttaaactccaaattgttattccttactgcaattaagaatttagaagcaattatttaaattatttaaataatttaagtttccattttcccaactgccctatttatgaatccatgacatccacttgacatttttctgcttgaggagaatattatatattttgttaacttctggtctagaaatgaccaaaaagctcttttgaagatgctgaaattgttagattatctattctcttcatttcccctatcctgcaccaatagtttagaaatagagtaatgcagtacattgaggtcaaattttgaaatctttaggatttttttttttatttta

SEQ ID NO: 246759 - DNA, 313 bp, Homo sapiens
gatccgcccaccttggcctcccaaagtggtggggttacaggcgtgagccaccgtgcccggccaggaaatgaacttttaactgaaccgtagtcaaggcaaaatattcccctgattgcagtacaattctaactctgatctcctgactttaaactccaaattgttattccttactgcaattaagaatttagaagcaattatttaaattatttaaataatttaagtttccattttcccaactgccctatttatgaatccatgaacatgatatacatttgtctatttactcttctttaatttctctcaccaatagctt

SEQ ID NO: 246760 - DNA, 377 bp, Homo sapiens
cactgttggtcattagtggtagctcattcacttggatcctatgttgctttaaaatagccccatcattgtggagttaggtttgttttaattgcacattacacttaaaaatcagtcaaatggccgttgtcaacttgtctcctctgtgtgccaggaatcaatcaatttctattcaagtaaacaagtggcatttttaaaaaaaaagtcacatttgattattaactagaagaatattcagtacccttgatctgtcttctatatacttcccagtcctgacaccctttttggattcaaagattaattaatttaaaggcagtgatgagcagattagatcagaagtaactagggacctagaatggaatatgaagaattagatcatg

SEQ ID NO: 246761 - DNA, 627 bp, Homo sapiens
ggtcatactggtatagaatgagccctaaatcgaatggttggcgcccttagaaggggacacatagataaatgtgcacagagggaagaaggccatttggagatagaagcagggattggagtgatgcaactggaagccaagaaacgccgcagaatgccaggagccagcagaagctaagaaaaggcaaagaaggattattccaaagtgccttccgaagaaggttggccctgccaaaaacctgatttcagacttctagcccccaaaactgcaagagaataaattttgttgtttcaagaaaaaaaaaaaaaaagaaaaagaaaaaaaaaaaaaaaataaaaaaaaaaaaaaagaaacagaaaaaaaagaggggaggcggacgacaacacgcatcaccgaagagagcaccactagatagacaggacacccccgctgcccataaaaacagaaaaaagcgccacacataacaaagcggcggaacacatacaagcaaacgagcagagccgataggcgcgaagaaaacacaacgccacacccgacaggagagaaacaaagcacacaccgagacggcgaagcgagagaaggcaccacacccatcgcgaggacggaagacaaaaagaggcaccacccaca

SEQ ID NO: 246762 - DNA, 475 bp, Homo sapiens
agtcacctgacattccttggagcctagtccttctctgctcttgtaaccgcccaatgggttcaccttgcctgctgcctagacagagccgattcatcaagacagaagacctgcatttctctcctgagtcacctgcacttgggtgccccagctggaagagacatctttatacctgttgccctggggagaaacttgatggttgggtgctagccggctccacacaggcctgattcatgcctttgaaaaactggcagtgtccactaaactaacttgtaagtatctcctaacacacagcatttccaccactaaataaatactcaacagaaacagatttgtattcacccaaagacactacagcttaaagtttatagcagccttaaccacgttagtccaatgctggaagaaactcaaatagccatcaaataagaatgggcaaatagatggtggcatgttcttgtaattaaacactacactgcaa

SEQ ID NO: 246763 - DNA, 367 bp, Homo sapiens
atggtcaaaatgaatgttttgggatacaatttaaaattgagaatgcatttttacataatggattcaaatatgttatctcatttaatcctcacaaatatatgaaataagataattattatccacattttacagctgaagaaactgaagaagtaatagattaagtaacttgccctcagttatccagttgtccagctaactactgatggaggcaagtattgagcccacagctcatattttaaccatagaacctatgctgctaatatttaggaaagacaaaatgcatcaacagtgcttgttttatggaaataaaaagtggatgatgatagattacataacaatgataaaatgacaggctaatataaaatac

SEQ ID NO: 246764 - DNA, 479 bp, Homo sapiens
ctgttcctatttggacatcttggaagtaactcccgtttgaacatattgatgtgtttcagtccactgcagctattatccttatcagttggcaaattgaaccatctttggtcattgagaggctcttgaagttggcttcctaagaccttgggacatgaccaaataaagtagtctttaaaagtttccttactctttggtattgcaagattttccagactaatcttttatattcctgcccaaggcctggagtcctcatttctccaagaaaccctgttccttaggatggctactgagagtgctcattactattgggttggtcattgtttccaggtcgaaatcagcaccaaagtgtttttttctttaacttcttctaacctgtgtcactgtctttcctctcatacattgctgggaagcacaggattaaagtaacacgtaattactaatttgcttcatcatgtattacacatacgttacactgagta

SEQ ID NO: 246765 - DNA, 244 bp, Homo sapiens
gcatgtgtagctgaggtcctgctggaaaaataccaccggagctctctgcagctggagtggaataattctgaagtgtgtgttttgcctcctttcccagtgtctccccatggggttaagctctggtcgcctgctcctgttgctggtcttgtggcacacacgtggcaggatgtcaccctttccctgggttgcgtccactttccttgctgtgttattcacactccccaaataaaatactttcactcaa

SEQ ID NO: 246766 - DNA, 461 bp, Homo sapiens
acgtatgtttgacatttgttttgacttccagagagcttcttttaactctctttccctgattccctttagaaaactacacagtgtgtagtgtaacctctatcttcattgaatctaccaatttcttctattggcattccactataatctccactaactttgagaatgctcttagacttggccgggtgcagtggctcatgcccataattccagcactttgggaggccaaatcgggtgaatcacctgaggtcaggagtttgagaccagcctggccaacatgacgaaacccccgtctccacaaaaaatacaaaaattagccgggcatggtggcaagcacctgtaatcctagctacttgggaggctgaggcaggagaatcgcttgaacctgagaggtggaggttgcagtgagccgagatcacgccactgcactccaacctgtgcaacagagtgagactctgtcaaaa

SEQ ID NO: 246767 - DNA, 181 bp, Homo sapiens
ctctttaccctttgcctctaatattgctgtttcttcttcattcattatttttccctctttcagcagtagacttgcaccttcctgggtgcccataggatgtttactaagcattgagaatttggaaacataaattctagtctaaactttgtagccctaggcaagtcacttgtgtatgccttac

SEQ ID NO: 246768 - DNA, 321 bp, Homo sapiens
ggattcacattgagacgttgttctctccatgtgtgatctcagacagagctaatcagcttctctgagtttcagattcctgctttataaaagagtaagacttttgtagggttgtttataaggattaaaaataaaatgaatttgaaaacacctgactttgaaaagtctcaaacacacatggtttagcatataaaaaacaagtgaattaaagacgttttttgaaaattgtgtttttggaaaagttcatcaagttcatcatgaatgtcccctgaattgatttgtacttaggagatctcactgtaaataaagtcatgtggcaaaaca

SEQ ID NO: 246769 - DNA, 929 bp, Homo sapiens
gagccggccagccagggcaggcaggggcggcctctctgacgagaaggaggccactgggctgaggccaatgaatgggaaagagccagccacatggtgagctgggagagggcatcccaggcagtgcaaccagcgcttgcaaaggccctggggctggacagttcttggcggagtctgagggcttgagtctgggggagcctggctgcccagaggtggcagatgacatgaagaaataaccatgtaagggctggctgtgtatgagagcaagcattgggaaggatgaatgccaactatgttccaggaacttccactgttctcacacacccaggtgagtggtgttcaggtgggtggcacccaggtgagtgacatcccagttgagtggcacccaggtgagtagcatccaggtgagtgacacctaggtgagtgacattcaggttagtggcgtctgtgtgagtggcatcatccaggtgagtagcttccaggtgagtggcacccaggtgagtggcattcgggtgagtggcattatccaggtgacacctgggtgagtggcatccaggtgagtgatatcatccaggtaagtggcacctaggtgacatccaggtgagtgacgacatccaggtgagtgacatcatccaggtaaatggcacccaggtgagtagcattcaggtgagtgacacccaggcgagtggcatccacgtgactagcgttgtccaggtgcataacacccaggtgagtggcacccagttgagtggtgcccaagtgagtcacatccaggtaagtggggtccaggtggtggcacccaggcgagtggtgcccaggtgagtgacagccaggtgaatggtgtccaggtgagtggcatcacccaggtgaatggtgtccaggtgagtggcatccaggtaagtggtgtccaggtggtggcacccaggtgagtg

SEQ ID NO: 246770 - DNA, 870 bp, Homo sapiens
gagccggccagccagggcaggcaggggcggcctctctgacgagaaggaggccactgggctgaggccaatgaatgggaaagagccagccacatggtgagctgggagagggcatcccagggcttgagtctgggggagcctggctgcccagaggtggcagatgacatgaagaaataaccatgtaagggctggctgtgtatgagagcaagcattgggaaggatgaatgccaactatgttccaggaacttccactgttctcacacacccaggtgagtggtgttcaggtgggtggcacccaggtgagtgacatcccagttgagtggcacccaggtgagtagcatccaggtgagtgacacctaggtgagtgacattcaggttagtggcgtctgtgtgagtggcatcatccaggtgagtagcttccaggtgagtggcacccaggtgagtggcattcgggtgagtggcattatccaggtgacacctgggtgagtggcatccaggtgagtgatatcatccaggtaagtggcacctaggtgacatccaggtgagtgacgacatccaggtgagtgacatcatccaggtaaatggcacccaggtgagtagcattcaggtgagtgacacccaggcgagtggcatccacgtgactagcgttgtccaggtgcataacacccaggtgagtggcacccagttgagtggtgcccaagtgagtcacatccaggtaagtggggtccaggtggtggcacccaggcgagtggtgcccaggtgagtgacagccaggtgaatggtgtccaggtgagtggcatcacccaggtgaatggtgtccaggtgagtggcatccaggtaagtggtgtccaggtggtggcacccaggtgagtg

SEQ ID NO: 246771 - DNA, 846 bp, Homo sapiens
gagccggccagccagggcaggcaggggcggcctctctgacgagaaggaggccactgggctgaggccaatgaatgggaaagagccagccacatgggcttgagtctgggggagcctggctgcccagaggtggcagatgacatgaagaaataaccatgtaagggctggctgtgtatgagagcaagcattgggaaggatgaatgccaactatgttccaggaacttccactgttctcacacacccaggtgagtggtgttcaggtgggtggcacccaggtgagtgacatcccagttgagtggcacccaggtgagtagcatccaggtgagtgacacctaggtgagtgacattcaggttagtggcgtctgtgtgagtggcatcatccaggtgagtagcttccaggtgagtggcacccaggtgagtggcattcgggtgagtggcattatccaggtgacacctgggtgagtggcatccaggtgagtgatatcatccaggtaagtggcacctaggtgacatccaggtgagtgacgacatccaggtgagtgacatcatccaggtaaatggcacccaggtgagtagcattcaggtgagtgacacccaggcgagtggcatccacgtgactagcgttgtccaggtgcataacacccaggtgagtggcacccagttgagtggtgcccaagtgagtcacatccaggtaagtggggtccaggtggtggcacccaggcgagtggtgcccaggtgagtgacagccaggtgaatggtgtccaggtgagtggcatcacccaggtgaatggtgtccaggtgagtggcatccaggtaagtggtgtccaggtggtggcacccaggtgagtg

SEQ ID NO: 246772 - DNA, 448 bp, Homo sapiens
gagccggccagccagggcaggcaggggcggcctctctgacgagaaggaggccactgggctgaggccaatgaatgggaaagagccagccacatggtgagctgggagagggcatcccaggcagtgcaaccagcgcttgcaaaggccctggggctggacagttcttggcggagtctgaggtacaggatgatccctggatgagcgcctgagtgcacgaagcatgggtggagagggtcagctcccagcgtggctgcaggagggggtcgtgtaatgaatactaagtgccagttctgcaggatggaaacagttttgaaattggacggtggcgatggtggtgcgataatgcgaatggacccaatgccactgaaatattcactttaaaaaagttaaaatggcaaggtttacattaactagactttgccataataaaaggaaaaggaaaaaatataaa

SEQ ID NO: 246773 - DNA, 468 bp, Homo sapiens
ttcactgactgggcaaccttccccagcttcagaagaagccgtgaggcaggaaagctaaggcatatacttgagagggaatgatggcctcaaacacagagattcccactgcagccgcactaaaaccaagctgatctatgcactgcggcttggggttcagaaattatctggtgtggggatgggtgcggtggctcaagcctgtaatcccagaactttgggaggccgaggcggggggatcacaaggtgaggagtttgagaccagcctgaccaacatagtgaaaccccatctctactaaaaatacaaaaattagctgggcagggtggtgcccacctgtaatcccagctactcaggaggctgaggcaggagaatcgcttgaacccgggaggcggaggttgcagtgagctgacatcatgccactgcactccagcctgggcgacaagagggagactctgtctcaaaaaaaaaaacaa

SEQ ID NO: 246774 - DNA, 400 bp, Homo sapiens
gtactcagcagtaaacaggaatgagctgcaaatgtgggcaagtcagaatggatgtgtctcaaacaagatccaatgttgaggggaagaagccaggcacaaaaacaaatctaacgcacaacaccgttgacattctacagacaaggctcgtctgtggtgaagaacagtcagaagggtggttgctcggggcgggaaggagactgatggggaagggcaggagctccggtgagatgaaaatactctatggtgtgggagggcatgagtgacacaggtgtagccacttgtcagaaaggtaccactaagggcgtattttgatccttaaaaagcttagcaaaaatattatgagaaccctatgcttggcatttctcaccaagcttcagacgcagcgggtgctacacagacg

SEQ ID NO: 246775 - DNA, 319 bp, Homo sapiens
atgaactctgagactctacctcgagtcactgtagcatagagctgcagcctataaaaccaatttaatataatacttagctgcagcatggactcagcatctcagcaacagagtgtccttccccttatgtagcactaccagttcatctggcccttttctgtttgtgtctttctgtaggacaagacatacgggaaggccgcacctttgcatcttactgtctgtgtaagtacagttgaccctccctatctaagggttctgcatccttggatccaaccaaccacagatgaaaccattaaagacccttaagagccaaaaaaaaaaa

SEQ ID NO: 246776 - DNA, 362 bp, Homo sapiens
ccaagaaagctaggtgaataactgtaagatataggtgagagcagaagtcagatcttcagattttaatgacagaatgtcaccttttcaatcagcaacaaagtagccgagtataatcttcaaccatctgctctctgggagaggagagaggagaggggaaggagcgaggaatgaggagccagagagattgattttagctaatcacttctaactctttcattaaatttttatggagaattaatacaggctgggcgcagtggctcgtgctggtaatcccagcactttgggaggctgaagtgggaggatagcttaagcccaggagttcaggaccagcctatgcgatgtggtgagaccctgtctttaca

SEQ ID NO: 246777 - DNA, 552 bp, Homo sapiens
caaaaggagcgagattctgacactcgctccggtgcggatgaaccctgaaaataccgtgtcaagtagaaaaagctggacacaaaaacctcatattgtgtggttccatttatatgaaccatccagaatagataaacctgcagagacacaaaggagattcgtgttgccaaggcctgggtgagggactcttgggggaaaatggagagtaactgctgatgggttgaaggtttcatgttggggtgatgaaatgttctagaactgatggtggtgatagttgtagaactctgcgaatatatttaaaaccattgatttgtatagcttcaacaggtgaattgtatctcaggacatctgatatctgttgctcaaatatgcacatcatgttgtagactttatatatttatgatatatctagatttatgtacatatatttatgtgtatatgaactatgtagatgttatgtagaattcattttcctgttgctaacagtttatgtgctccacttactagactggtcagatagcataaagcataaaagcttctgtaataagtcctaaa

SEQ ID NO: 246778 - DNA, 591 bp, Homo sapiens
acttttctatgttgctcttgtatccagacactttaactcttgtattaattccagcagttcttcagctgattctccgtgtgtgtgtgtgtgtttgtgtgtttagttaactatcacaccatttgccaagaacaattttctctctttttctgtaatatttatacctccttctctcccccttttatgtcatttcattggctggaatctatacaatatgctgaataataaaagtgagactagacaaccttgccttgtttctgattctttaaatgttttgcctttaaatatgaaggttgctgtaaatttggggagatattcttcactgagttaagaaaattttcttcagtaacttaataaaaggctaaatgtttgctttctttatatgagaaacaagtgttgaatttatattactattatattaaattctgtttcaaaaatcttctgcacatgtcttaaatacaaatgtattaaatacaagctgctgctaagatgaaagttgctggccccatcacaatgggtatcttccaatgtgaataaattgccttggggaataaaatcagatttggaaaaacctgaggatggttgccatcataa

SEQ ID NO: 246779 - DNA, 522 bp, Homo sapiens
tgagacggagtctcgctctgtcgcccaagttggaatgcagtggcgcaatctcgactcactgcaaactctgcctcccagctacttggaaggctgaggcagaagaattgcttgaacctgggaggtggaggttgcagtgagctgagatcatgccattgcactcctgcctgagcaacagagggggactccatctcaaaaataaaataaaataaaatgtaagacaccctgactcttagaagttcttcaaatattatccatcgagtcccgaccctcatcccatcccacccttggttctcagttgttcttaccaacaatttctgtgtcagagactggaactacggactagctccctcaactcagcagtgcacaacaaatttggccctgttgactttgagggaagcccttgttcttggccccagtatggacctttggccaatggaactatcaaccagtttgttctttcttgtatagaatgacctctcagcttcacacctatggttctttttcagctctgaaactcttgtg

SEQ ID NO: 246780 - DNA, 101 bp, Homo sapiens
ttttttaataagaaaagtagtaaaaccactatgtagcgtacacactatggcaagagtgtagggaaaaagcattctcatacatctttggtgggcaaataagt

SEQ ID NO: 246781 - DNA, 919 bp, Homo sapiens
aggaaaagcggagagaaaccgccctctgcaggtccccttggctcccccgggaggaaaggcagcctgcccttctccgattgtcactttactctccatccggagccgcttcctttctcgccgcgaggctcggggttggggggggaccagattggagccgcgggctaactgggatccgtcccatttccctgggcttgacgttctctgaatttttagctaatgtggaaagttacatttatttgcatttgtttatcgcttgctcacataggtctgtgtcccgaagcttggcagatgagcgaacttagccagcacacccccggccgtgaagcagggaggtgaagcggggagagcaacgagccccacccgggtcttgccagctggacgttcttgtggggcagcgttgagcagcggttaggagtgccgtggactttggattcaaacagccccagctcttctgcttgctagctgggtgactttgggcaaattaacatctcgaaaatctgtttcctcattcctaaaatgcgggtctgaaagtgatcatgcctgtaaagccatctcatatccatggttctagaagcatggtgagcacctcaatttgaataatcagtgccatgctttagctacctcttgactcactcgtttgtggcaggaaatgttcccaaattaatcagaagaattcagtgactaagaggatgtaatagtatatagcgcaggcactggaatcagctctgctgtgtgatcttggacaagctgcttctgttccgtttctcttatctggggcaatacctgtctgaatagagtgactgttgggacgaaataggttagtaaatatgtactgtaaggcattagaaccttgcctggcacatagtaagtgctcaataaacgctaggtcttgttaccttggcttcccgtttaggattgg

SEQ ID NO: 246782 - DNA, 539 bp, Homo sapiens
cttatcactggtctattatttgactggtatacacagctccttatttgttttcattgtacctaaccatttctctcctcaaaccagagcataatctcagagtttattcttagtcctcagagaggctatgttaactaaatctgaagagaagagttatataatggaatattgtgcaaaaacaaaaaaaaattggcctgttaagaatggcctatgagaacttttttaacctgattcagtttaattgaaaccagcaagggttcaaactatatcgacaagatcgtattcaaattctactgttcagcctcaaagttcctgcagaaagctaggtgaggttttcttccttgactgtttattacattttctttataatacactcattttaacgtaaaaatatttttacctatatttaagttaaactagattctaaaccctgtctgcactatagaatcacgtgatgttttgagaaaaagatgacgctagctgcacaccagaatctctaaagtagtgcccaggcatttggtactttagaaacaaagaaaaaa

SEQ ID NO: 246783 - DNA, 509 bp, Homo sapiens
ctctggagtgtgtctctgtgtctgtcctcctcttcttgtgatatcacgagtcatattggaataagggcccaccagacaccagtatgatttcatctcagctaactgcactggcagtgaccttatttccaaataaagccaaatgctgaagcagcaggggttaggacttcaatgtgtctctcgcagggacacaattgaacccacagcagtcaaatacatagtccttattaaccatacatgtaggtctgctttctgctgtgtctaacagatgcgcttttctgtccgaggttgaaaattaaggcagcttcctccctgccagggtaccccctgcacaggcccctgccacagctggtggttactagaagtctttcatactcttcagtcctgtgacaataatttcgtgtttccatgcacccatatacagaccctagcgcttttggcaggaagagaagaatttctaagttgaggctgtttaaaagcgtctccccagtgaagggtcaccagatttagca

SEQ ID NO: 246784 - DNA, 920 bp, Homo sapiens
cacccccgtgacccctcttcaggcacccaccaccctgatggtgacagagggggacagccagcacccatctgtccccgtcagggctcttgttctcacagccccctggagcatgccccatgccccaaccttgggcctggctcctggcccagatggcacctggcctcttgagtctgctgggggaccccaaagttggtggtcccatagcctgccctcctgggtctccacctcatgcctggacaggacgctgtggcctgtccgggccttggccagccctgcagctgcacccccgatcctcatccctcaccccattccctgccagcatcctaaggctcctggcgggcatcctctctgctcaaaattattgacctgtctcccggccacacctgctgtgccctctcagccaggccatcatcaccccctgttcattatgtcaggcctcatgggagcctggccttctccagaagctggccccggcgtcctcccaagctggaccacgtaggccccagatcacacctgggggtccagatgtaggggtcccgtgtgcacgcccaatcagaccgagcacttgtgacactaccccaacacctctcccagggctgaatgaggaacgcgccactggacacatgaggaagaggctgccctgggagctactgatgctgtgacctcacctctctggctttgggcggcaggtccctgcacctaggatgcctgcctggaaatgtccttgcattcgtggcctccttcacagcctcctcctcagagaagcctctgcgagtgcacagggagtgtgtgcagccttgtgaagggctgggaccacttgcccagactggggcccctcaggcacaggcgtggggtcctactgacctgtctccccagctcccacacagaaagcatctaaaataaacacacgtggatggaaa

SEQ ID NO: 246785 - DNA, 1486 bp, Homo sapiens
cacccccgtgacccctcttcaggcacccaccaccctgatggtgacagagggggacagccagcacccatctgtccccgtcagggctcttgttctcacagccccctggagcatgccccatgccccaaccttgggcctggctcctggcccagatggcacctggcctcttgagtctgctgggggaccccaaagttggtggtcccatagcctgccctcctgggtctccacctcatgcctggacaggacgctgtggcctgtccgggccttggccagccctgcagctgcacccccgatcctcatccctcaccccattccctgccagcatcctaaggctcctggcgggcatcctctctgctcaaaattattgacctgtctcccggccacacctgctgtgccctctcagccaggccatcatcaccccctgttcattatgtcaggcctcatgggagcctggccttctccagaagctggccccggcgtcctcccaagctggaccacgtaggccccagatcacacctgggggtccagatgtaggggtcccgtgtgcacgcccaatcagaccgagcacttgtgacactaccccaacacctctcccagggctgaatgaggaacgcgccactggacacatgaggaagaggctgccctgggagctactgatgctgtgacctcacctctctggctttgggcggcaggtccctgcacctaggatgcctgcctggaaatgtccttgcattcgtggcctccttcacagcctcctcctcagagaagcctctgcgagtgcacagggagtgtgtgcagccttgtgaagggctgggaccacttgcccagactggggcccctcaggcacaggcgtggggtcctactgacctgtctccccagctcccacacagaaagcatctaaaataaacacacgtggatggaaaaaaaaaacaaagaacaaaaacaaagaaacaacaaaaaaaacaaaaaaaaacagcacaacaaacacaaaaaacacgacaaaaaaacaaagggggggccaccaagaaagagcccgcgagggagggcccccacaccggggccacgaacacagagagcagcggcaaaagagggggccccacaaaagcaggcgccaataaaagagagacgcgcggcagggagcaacagcgccggaaaggcgcaaaaccgcctgccaccagccggcacatctagtggggcaagcaccaccaccaagaggaggcgcgcagggagaaacccacgcagcgcggacagacacgcaaacaccgacagagccgggagatgaaagtagaggcggcccacaggaaggagagaaaaatacagagcagcacgtcgaccccgggcgggaaatcgaaacggggcggcagacacacacaacggccgacacgcagaaaaacagcacagacgccagcatggacaagaagaaatgccgtgggcaaccgcagcgcaggagcagacgacgccggcagaagacacaatatctcaagcccgc

SEQ ID NO: 246786 - DNA, 821 bp, Homo sapiens
cacccccgtgacccctcttcaggcacccaccaccctgatggtgacagagggggacagccagcacccatctgtccccgtcagggctcttgttctcacagccccctggagcatgccccatgccccaaccttgggcctggctcctggcccagatggcacctggcctcttgagtctgctgggggaccccaaagttggtggtcccatagcctgccctcctgggtctccacctcatgcctggacaggacgctgtggcctgtccgggccttggccagccctgcagctgcacccccgatcctcatccctcaccccattccctgccagcatcctaaggctcctggcgggcatcctctctgctcaaaattattgacctgtctcccggccacacctgctgtgccctctcagccaggccatcatcaccccctgttcattatgtcaggcctcatgggagcctggccttctccagaagctggccccggcgtcctcccaagctggaccacggctgaatgaggaacgcgccactggacacatgaggaagaggctgccctgggagctactgatgctgtgacctcacctctctggctttgggcggcaggtccctgcacctaggatgcctgcctggaaatgtccttgcattcgtggcctccttcacagcctcctcctcagagaagcctctgcgagtgcacagggagtgtgtgcagccttgtgaagggctgggaccacttgcccagactggggcccctcaggcacaggcgtggggtcctactgacctgtctccccagctcccacacagaaagcatctaaaataaacacacgtggatggaaa

SEQ ID NO: 246787 - DNA, 409 bp, Homo sapiens
gaaaaaaaaaaaaaaaaaaaaaaaaaaaactcgaggcccaatcagaccgagcacttgtgacactaccccaacacctctcccagggctgaatgaggaacgcgccactggacacatgaggaagaggctgccctgggagctactgatgctgtgacctcacctctctggctttgggcggcaggtccctgcacctaggatgcctgcctggaaatgtccttgcattcgtggcctccttcacagcctcctcctcagagaagcctctgcgagtgcacagggagtgtgtgcagccttgtgaagggctgggaccacttgcccagactggggcccctcaggcacaggcgtggggtcctactgacctgtctccccagctcccacacagaaagcatctaaaataaacacacgtggatggaaa

SEQ ID NO: 246788 - DNA, 932 bp, Homo sapiens
gtgcgctggttgggcctgctgggcctgggccacctcgcgctgaatcgcaggaaggtgtgagagaaggggaggggtggagaggggcttggcccggtcgcggcgaggtctgcaagaggctgaccccgatgtcccagcaggtgcggcacgtgagcacgctgctgccggcgctcctgggcgcactgggcgaaggcgacgcgcggctcgtgggtgcagcgctgggcgccctgaggaggctcctgctgcggccccgggcgcctgtgcggctcctgagcgcggagctgggaccgcgcctccctccgctactggacgacacacgggactcaatccgcgcctcggccgtcgggctccttgggactctggtgcgccggggccggggcgggctccggctggggctccgcggccccctgcggaagctggtgctgcagagtctcgtgccgctgctgctgcgcctgcatgaccccagcagggacgctgctgaggttcagcgatacccaggccacgtgcccaacttcctgagccagacccagggctacctgcggagtccacaggaccccctgcgccgggcagccaccgtgcttataggcttccttgtccaccacgccagccccggctgtgtcaaccaggacctgctggactccctgttccaggacctagggcggctgcagagcgaccccaagccggccgtggccgcggcagcgcacgtgtccgctcagcaggtggcgatgctggcccgtgcccggggctgccgccgcggccccgccttctccgcatcgccccgcgccccgcccggcccccaccagtcttcgccgacagccccttccagcgccggagcgtcgcgggccgctggggctgctccggaccccgccgagcctgaggctcgggctggggccgagggccagggtccgactcgggcaccccacgcgcatagcagc

SEQ ID NO: 246789 - DNA, 854 bp, Homo sapiens
cagatcacaccgagtcagcagccttccctagacccgccgcttcctcgctccgcgctggccgccccctcccacccttgcagcccctctctgtctccgcctgccctgactgcgccctcccacgcagacacgggactcaatccgcgcctcggccgtcgggctccttgggactctggtgcgccggggccggggcgggctccggctggggctccgcggccccctgcggaagctggtgctgcagagtctcgtgccgctgctgctgcgcctgcatgaccccagcagggacgctgctgaggttcagcgatacccaggccacgtgcccaacttcctgagccagacccagggctacctgcggagtccacaggaccccctgcgccgggcagccaccgtgcttataggtgaggccgcccggggtcacactgcccctggcaccggggctttgggagctgggccagcctccccctggggggctgtggggcctgcactcatgcatctgctgtggtccaggcttccttgtccaccacgccagccccggctgtgtcaaccaggacctgctggactccctgttccaggacctagggcggctgcagagcgaccccaagccggccgtggccgcggcagcgcacgtgtccgctcagcaggtggcgatgctggcccgtgcccggggctgccgccgcggccccgccttctccgcatcgccccgcgccccgcccggcccccaccagtcttcgccgacagccccttccagcgccggagcgtcgcgggccgctggggctgctccggaccccgccgagcctgaggctcgggctggggccgagggccagggtccgactcgggcaccccacgcgcatagcagc

SEQ ID NO: 246790 - DNA, 908 bp, Homo sapiens
gtgcgctggttgggcctgctgggcctgggccacctcgcgctgaatcgcaggaaggtgtgagagaaggggaggggtggagaggggcttggcccggtcgcggcgaggtctgcaagaggctgaccccgatgtcccagcaggtgcggcacgtgagcacgctgctgccggcgctcctgggcgcactgggcgaaggcgacgcgcggctcgtgggtgcagcgctgggcgccctgaggaggctcctgctgcggccccgggcgcctgtgcggctcctgagcgcggagctgggaccgcgcctccctccgctactggacgacacacgggactcaatccgcgcctcggccgtcgggctccttgggactctggtgcgccggggccggggcgggctccggctggggctccgcggccccctgcggaagctggtgctgcagagtctcgtgccgctgctgctgcgcctgcatgaccccagcagggacgctgctgaggttcagcgatacccaggccacgtgcccaacttcctgagccagacccagggctacctgcggagtccacaggaccccctgcgccgggcagccaccgtgcttatagggctgaatgaggaacgcgccactggacacatgaggaagaggctgccctgggagctactgatgctgtgacctcacctctctggctttgggcggcaggtccctgcacctaggatgcctgcctggaaatgtccttgcattcgtggcctccttcacagcctcctcctcagagaagcctctgcgagtgcacagggagtgtgtgcagccttgtgaagggctgggaccacttgcccagactggggcccctcaggcacaggcgtggggtcctactgacctgtctccccagctcccacacagaaagcatctaaaataaacacacgtggatggaaa

SEQ ID NO: 246791 - DNA, 670 bp, Homo sapiens
gtgcgctggttgggcctgctgggcctgggccacctcgcgctgaatcgcaggaaggtgtgagagaaggggaggggtggagaggggcttggcccggtcgcggcgaggtctgcaagaggctgaccccgatgtcccagcaggtgcggcacgtgagcacgctgctgccggcgctcctgggcgcactgggcgaaggcgacgcgcggctcgtgggtgcagcgctgggcgccctgaggaggctcctgctgcggccccgggcgcctgtgcggctcctgagcgcggagctgggaccgcgcctccctccgctactggacgacacacgggactcaatccgcgcctcggccgtcgggctccttgggactctggtgcgccggggccggggcgggctccggctggggctccgcggccccctgcggaagctggtgctgcagagtctcgtgccgctgctgctgcgcctgcatgaccccagcagggacgctgctgaggtcagcagccccccacaccatcccacccctatgccatccaacactcaccactcccaccgtgcctcccctccgacaattacagagctcagagtggaccctggcccgctgtgaccacgccttttgctggggcctgctggaggagttggtcaccgtggcccactatgacagccccgaggccctgagccacctct

SEQ ID NO: 246792 - DNA, 409 bp, Homo sapiens
cagtgagtcacgattgcaccactgcaccccagcctaggcaacagcgcaagactgtctccaaaaaaaagaaaagaaagaaaaagaagaagaaagaatgttgtttcagtcagagatgtaaggggctcacagtttcttcagctgatgacctcgagtagcttttaagaatgggcaatgtcacatttgtctttcacatgatgggaccactccacaaggtcggtggtctcaggccagagactgggcactctcctcctgcattagccttccactgcccctgccacacacaccaggatattcagttaactttgaattttcagataaacaacaaataatttttgaacataagtatgtccccaagtggggacttatcatacttataagtgtgtcttacttgagacacacttatactaaa

SEQ ID NO: 246793 - DNA, 587 bp, Homo sapiens
acggagactctctatatctacttgtctcatgttaggcaagtagatatagagagaagagctgaagataaggacctgatttctgtgagtaagaaacaaaagagaagtaaagtaatttacccagttgctatagttagcatgtggtaggtccatattagaggtctggtctgtctgcatgatggttaattttatgagatagcaagtaaaacattatttgtgtctgtgtctgtgtctgtgaggatgtgttcggagaggttcacaagcatttgaatcagtagacggagcaaataaggtccgccctcaccaatgtgggcaggcatcatccaattcactgaggactcctgctcacacagaacaaaaagtcagaggatgtgcctatagttccagcttcttggaaggctgcggcaggaagatgctggggcccaggagtttgaggccagccagggcaacatagcaagacctttctctttaaaaaaattttttttggctgggtgcagtggctcatgcctgtaatcccagcactttgggaggccgaggcaggcggatcatgaggtcaggagatcgagaccatcctggctaacatggtgaaa

SEQ ID NO: 246794 - DNA, 877 bp, Homo sapiens
caaaagagcaagtcagggaactagctttggttgggttcggtggtacacaaagcacaaggcctgggttggggttaggaggaaatgagacttgcggcgggtcggggctgaagatgtggcagcgccctgaacctggagaaaggctgaatccctttggtcaaggagagggagagagaggtaagggtctggtcttactttttaagcaggaagaagactacaaaccaccatctaccatctgccaggtaattttaaaccagtccacttaatccccatcagattttccagatgctttgaatgcagagctaaggttgagaaccactgatttagacaaatatactatgggagaaggggaaggaggttccaccagcagagagcaaccagctagagccatttggggcttatcacaaaagacttcttgtcagggaaattcacctattgagagacattttggttgtttccaattctgggccattgaaaagaatgctaataagcaaagcccctcttctgctatgaaagtaacagtgggcagatattccctctctggcccttgggtaactgaaaggaggcttataaccaaagcacagccagtgagatgctcctgctcaggatgttgattttggagaagtgacacaaggtatatgatcagagttaagggttcagtaggccagtaatgagtgccagtggtgttggttccagtagcacaatggtaagtatccagtttagaaggctcgggtggcagcatcctaagcccactatccctagcgagatgctggctgtgcctcaccaaccctcatccctgcctcatccttgttctccagcttcccattaaaactgtgagcttcctaatacctttccaataaattaaattttgtcataaata

SEQ ID NO: 246795 - DNA, 682 bp, Homo sapiens
caaaagagcaagtcagggaactagctttggttgggttcggtggtacacaaagcacaaggcctgggttggggttaggaggaaatgagacttgcggcgggtcggggctgaagatgtggcagcgccctgaacctggagaaaggctgaatccctttggtcaaggagagggagagagaggtaagggtctggtcttactttttaagcaggaagaagactacaaaccaccatctaccatctgccaggccctggaatttgaaccaccatcttctggagtgactcaaatgcagaggaagccaggcctgctgctaacgtttctgagaggcggcaagagtataaatggagatccacatatgtataaataaagagtgtgaatcaagctaacaaactgtttaataaaatatgatctaccctcttagcttgacaaatcaacttttcaaacacctggaagaacaagtttgcactcaggattctcagactcctcagagttctgcactgggatgtggaagggctgtgcaagccagcccttgggtccctgatccctgtctcctggcctgtgcccgtctcttctcagcctggctccaactcccattgagaggaagttcttgtacacatatgatactgcagcccttatgtctaatatttatccataccttctgcaaacagccactgtgtgaccacccttggg

SEQ ID NO: 246796 - DNA, 273 bp, Homo sapiens
aaagggacttcatcctcctccctccttcccaggcagttctcccaaccacccaccaacaggcaacgtaggtgtgattgccttcaaagttttctacttgccttcaagcttgaagcactggagactgagggaagagagcactggaagtggaggaagaaaaaagagctgttccctccaaggttgttcccttgggcctgactcgactggaagaagcagggtgtatatgtgtgtgtgtgtgtaattgactttgtgaccatgaaactgagttaatactca

SEQ ID NO: 246797 - DNA, 1410 bp, Homo sapiens
gaggaagggagcgatttcgagagagaatagtttgagaagttgttctcagtcccttccctcgcgggagtgtggtatttagggaagcttcggcctcttaacccatggactgttaggatggagggaatccttcccgctcgattcctatcgcggagtcctttcggagcatcgctattgatcattctcgccgccccaaccccgttgtttactttggcttcgcagatctctgtggtcttttgccctcccgcagcgcccatggccccgtcaaggttgggcagcctttctctgcaagaaggcccacgaacaactgcggttatattgggatggattgcgcgtgattttactctttacaatacattctttcatgcttcctagggattgagctgcgcggcggatccctccgacttaattctgggcctgagaaaagtttctcttggaatgcgcagtttcgtgacgcagcattattgcgtgactctagggctgacccagtttttcactttctaattgtaaggaagtgcgctagtagtccaccgaggatcctcgaggttggccttattgtatcataatttaacgaatttgcgttccaggttgttacagcctttgaaataatggcctcatatttaagaatgtagcaatttttctttgaaatttccgaaagtggggaaaaaagtaatagaagactgcacctatatggaattattttctgattcgcagttctttataatcgtagacttaatttggtggctttattggacctgtttgaaacaggaagcctttctgtaatgtggtttcgggtcggcttcacctctggcactctctgaaacgtcgttgtctatggtttccctaagaagctagaatgagcgggatgctacggagggaggtgtatacaggtgttagacaaagccccctccgcttttttggtaaagggccaaataggcattagatcaacttgtgctagctctaaggagttaaatgcggtattattaaagactgcttgtaatgttgactgttaagtgagagtgttacttctttcagtgtttatggaatcgaactaaattgctaggtattttaatgcagagttttaccttttctcgggtattttttaagacatacacagacatacatgtagttatgttgaaataaatgtgttttattagaacgttaaaaaattagaatttaggtgaactactggtatcggaacagattttggtttgttgttgaagactgtacactggtgtaggtactgtttaatacatcagattgtcatttcaaagactttgtcttcttaactttgaaaattaaataatgtgaaataatgtgataatggtttttatcttttcaggacacttgattgacacttaattgtgcttaggaatagaataggtttttttttaagtcaccatcctccaatcc

SEQ ID NO: 246798 - DNA, 336 bp, Homo sapiens
atgcataaaatatagaaaggtcaacattgtagatataaaatcagaggtatagatataaaattggagagacgacattttgcagtttgatgcatcttagagtcagagaaaaccacgtttaaatccctgagataccatttacccactgtgtgattgcaggcaatgtactgcatacacctaaaattcagttttctgatctataaaatgaagatctgaatatcttttattctggtgacaagtgatttagtgggaaaaatcaaagatgccaagcacacaaccacttcttgataattgtcagttatgaaacctaatacatatggacgttgaattgagagagta

SEQ ID NO: 246799 - DNA, 712 bp, Homo sapiens
tccctattgcaagaaactatgatgagaccatagggaaatgaaggacccatcaatctaatatcaatattaaattactgtacctttcaatggagtgctaagttctttaccttcatttattaactcaggatgaccacttactttctctgctcttgttctaagtcttctaagtattattggaatcacataactactttgacacagttttttcatcctaacctgtgcactgaatactcaatatatccatgcacaacctcctaccatgctatatattttggggctattccaaacctggcctgggctgccagccctgacccccataccatgcagcctgtcctctgggaagatcctgtcacccctgtattcctgagaagagaaatgagttctatggaaagtacctgatcacttccttccttcacatgacggggtctatctgcatcttcatgtgacctctctctgatggacattgtatttgcccaactactttgcagacatgtgccacataactgtgcttctgcactcaagccctccagcttcctctagaactgttccatcaacccttcattcccttcttttccttcctgcacttctctcctctccactcctggtctctctccactggctgggcatttctcttgtcttaaaatactcttctttttgattctgctatttctgcaagccaccaacttctttctcatcattccttttgccacca

SEQ ID NO: 246800 - DNA, 1210 bp, Homo sapiens
tgcggccccgcgccagagggccggtggctcctccgggcttctgaggacccgcagggagcgggcctcatcatttctgtctcctgtttctccacttccttctctgttggttggtccactgatgtatggacttgcacatgatgaactgtgaacttctagccacatgtagtgcccttgggtacttggagggagacacttaccataaggaaccagattgcttagagagcgtgaaggatctcatccgctatttgaggcatgaggatgagacacgagatgtgcggcagcagctgggggcagcccagatcctacagagcgaccttctgcccatcctcacccagcaccaccaggacaagcctctctttgatgctgttatcagactgatggtgaacttgacacaaccagccttgctctgttttggcaatctgcctaaggagcccagctttcggcaccattttttgcaggtgctaacttatttgcaggcctacaaagaggcctttgccagtgagaaggcttttggagtcctcagtgaaaccttgtatgagctgctgcagctgggctgggaggaacggcaggaggaagacaacttgctgattgaacggatcctactgctggtcagaaatattctccatgtcccagctgaccttgatcaggagaagaagattgatgatgacgccagtgcccatgaccagctcctctgggcgattcacctcagcggcctggatgacctgctcctctttctggccagctcgtctgctgaggagcaatggagcctacatgtgctagagattgtctcccttatgtttcgtgaccagaaccccgagcagctggcgggagtagggcagggacgcttagctcaggagcggagtgcagattttgcagaactggaggtgttgcgccagcgagagatggcagaaaagaagactcgagccctccagcgaggcaacaggcattctcgatttgggggctcctatattgtccaggggttgaaatccattggggagagggacctcatctttcacaaaggccttcacaacctacgaaactacagttcagatttgggaaagcagccgaaaaaggtgcctaaacgtcgccaggccgcccgagagctgtccattcagcgccgttctgccctcaatgtgaggctcttcctcagagacttctgctctgagttcctggagaactgttacaaccggctcatgggatcagtaaaggt

SEQ ID NO: 246801 - DNA, 570 bp, Homo sapiens
cctgccaaggttaaatcagcaaagtctattactttaagaggcaatttaattagtaatcctttctaagaggggaaaaccagcaagtccgtacctggaatgtggtcctttcagccaaagatgaaaaaaaggaagcaataactaacaaactggtggaaggtcttaatcttaaattaatatatgcagaagcagagctctttttgtaattaaaaaatggattcaagaatgcactccactttcccatctccctccattaattattaaactttggcttgttctcaatacaatgttaaattataaaccaaatgaatcatttgcatgccagtaaatatgtattcatgagggttcacaatatgtaaatgtgcatattaaaacaatagctagatttttttctcataaaataaaactttacctactagaaatctcattattgacaagtttctcttaattagaactcactgataattgctaaacccctgttgtggcaggcagaattctaaaatggacgcccatgaccctaccccttggtatacacacctgcataatccttaggactttaaatttggtggattt

SEQ ID NO: 246802 - DNA, 844 bp, Homo sapiens
tggagagagaaggacacttcaggtggcgtggtcagggagggcttctttgaggaggtgacatataagcaaagatcagaatgaccaaaagagtattccaggaaaaggaagtatatagggtaaatcctataatacaagagcaaattcaacaagtttgaggaagagaaataaggctggtgtcactgcggtggtggagagtggtgggagatgaggttgaagaggtggtcggggatgccgtacagggctccacgggccctgcatggaggaggagtctggactttatcacaggtgccatcagcagacatggagggattctaagatgagaaatcacatgatctgatttatgtcttaagacttatgatttatgaaactctagctgtgctgtggtgaatgaggacaagagcagaagcaggaaaaccatttagaaagctattacaagagcacagaagggaaatgttttggaggtaaagttgacctgaattctgaggattgtgaaaacggaggaaaagagaagaatcaagaatatctacatgctttttgtgttgagcaattggtgggtggtaatgccatttaatttgaagcctgagagaatgaagaattctattagtgtagtatttccttctttccttgtgcagccttaagcttgcagaccatggattacaccactctcttttattttccttccctacttgccctttagtccttcttatataaaagaacttcatctatctgcatcctctactcttatcctgtcttgaactcactgcagtttggctactatccccattttactaataaactccttcttgccgaacacaacaatgacctccttactaaatccaaaaac

SEQ ID NO: 246803 - DNA, 898 bp, Homo sapiens
tggagagagaaggacacttcaggtggcgtggtcagggagggcttctttgaggaggtgacatataagcaaagatcagaatgaccaaaagagtattccaggaaaaggaagtatatagggtaaatcctataatacaagagcaaattcaacaagtttgaggaagagaaataaggctggtgtcactgcggtggtggagagtggtgggagatgaggttgaagaggtggtcggggatgccgtacagggctccacgggccctgcatggaggaggagtctggactttatcacaggtgccatcagcagacatggagggattctaagatgagaaatcacatgatctgatttatgtcttaagacttatgatttatgaaactctagctgtgctgtggtgaatgaggacaagagcagaagcaggaaaaccatttagaaagctattacaagagcacagaagagggatgatggtttgtattagggtggtagcagtggagaccgaaagagacattttggaaatgttttggaggtaaagttgacctgaattctgaggattgtgaaaacggaggaaaagagaagaatcaagaatatctacatgctttttgtgttgagcaattggtgggtggtaatgccatttaatttgaagcctgagagaatgaagaattctattagtgtagtatttccttctttccttgtgcagccttaagcttgcagaccatggattacaccactctcttttattttccttccctacttgccctttagtccttcttatataaaagaacttcatctatctgcatcctctactcttatcctgtcttgaactcactgcagtttggctactatccccattttactaataaactccttcttgccgaacacaacaatgacctccttactaaatccaaaaac

SEQ ID NO: 246804 - DNA, 384 bp, Homo sapiens
caaaggatgacttacatggttttgggcctgaggaactccaaaaaagtcattgctttttacacaggtgggaggtcttggaggaacaggtttttgcaattcagagtacagctttggcggccaggtgtgatggctcatgcctataatcgcagcacattagaggggctagcatgggaggattgcctgagcccaggacttcaagactagcctgagcaatgtagtgagaccccatctctacaaaaaaaatttttttaattttctgggtgtggtggcacattcctgtagtaccagctactcaggaggctgaggttgggggattacttgagcccaggagggcaaggctttaatgagctgttgtcatgtgactgcacgccagactgaacaata

SEQ ID NO: 246805 - DNA, 363 bp, Homo sapiens
tttgaagttaatgtcagattatcatctggaacaaaagcaggggcccatgatttttctgtattgttgtagctcttgaatttaaagaaaatggagagctggctgggtgcagtagctcatgcctgtaatcccagcactttgggaggctgaggtgggcagatcacgaggtcaggagattgagactatcctggccaacatggtgaaaccccatctctattaaaaatacaaaaattagctgggcatggcggcacgtacctgtaatcccagctactcgggaggctgaggcaggagaatcgcttgaacccaggaggtggaggttgcagtgggcggagattgcaccactgcacagagctatactccgtctca

SEQ ID NO: 246806 - DNA, 229 bp, Homo sapiens
atgcgcatgccaccacgtctggccaattttattttaactagagacagggtttcatcatgttggccaagctggtctcgaactcccgacctcaggtgattcctctgcctcagcctcccaaagtgctgggattacaggcatgagccaccattcccggctcccttcccttttcttatgggaacagcattgaattttcctttgagaaaatacctctccctataggggtagttcc

SEQ ID NO: 246807 - DNA, 171 bp, Homo sapiens
acgttcttcagtatatacacatatgcttactatatgtgactactgtagtactatacattactactgtgtcttagctcattcaccttagagacaaatggatagtaaaattattttttttttagagttaggaaaggaaaaaagaagaggagaggggtcatgagttgattatat

SEQ ID NO: 246808 - DNA, 449 bp, Homo sapiens
tggtgatcagaatattttgacccacaaaaatcaacggtaaattgagcatcaggtgtctgtctcctaagttgatgcttgatatttaataaggaaaatttttagatttactgagcagaaacctaactcaagtcccataaagaattcacagcttcttacccagatcccagatctaacctgcttcatagacctagagctccccaagtaacctagagagaggttccttgaaacccttgcaaagtggccatagttccaaaacactttccttccccagggagtcttcagcatttatcatgtgactgagcactgaagaaatggaattacccagaccctttcaagtgccaccacagtccaatactcaagaacttacctagatcaggtgctacctggagtcttagcccaaatccatctcacatctgttcagtgggcctatacacccatccttggcttaa

SEQ ID NO: 246809 - DNA, 447 bp, Homo sapiens
aacagtcctgccattttgcagattgaagggagatttaaggcaactgtgtcttccacccgtgcgctcaagaggttgggatgtgaatggagagagggctgcacctggtggacctaatgttctgggcaggggagtggaggtggtgtagacagaaaatcataaaactctcaggagaagccaagatcagcgatcctcccgtcttggccccccaaagtgctgggatgacaggtgtcagcctgtcctggagtcctccaagcccgtggggtctgatgagcacagacggctcagctcttccttgcttccatacccttacataaaactggagctcggctttctcagagaggatgcttttatttgcctgagatgcaccatctgttactggctccgtttgaccgatctccttgttcatcgtggtccaggtctgcacctgacagctctgagtgctgacct

SEQ ID NO: 246810 - DNA, 567 bp, Homo sapiens
cgaatccctgaagctttttgacagcatctgcaacaacaaatggttcacagacacgtccatcatcctgtttcttaacaagaaggacatatttgaagagaagatcaagaagtccccgctcaccatctgctttcctgaatatacaggccccagcgccttcacagaagccgtggcttacatccaggcccagtacgagagcaagaacaagtcagcccacaaagagatctacacccacgtcacctgcgccacggacaccaacaacatccagtttgtctttgatgctgtgacggacgtcatcatcgccaaaaacctgcggggctgtggactctactgagcccagccgccctgcccggcacccttgccctgcctggcctgccgccccccctcccctggaaccaggctccaccactctcagaccactctttgcacttgaggaagaagacctcagaggctggcaccaagggagggaggagggagcatcctccacccgcaccccccaacagaacttgtggtaacgcaggggcggggcggggctgctgagtgcatgctgcaaggccaggagactccacg

SEQ ID NO: 246811 - DNA, 633 bp, Homo sapiens
atctaatgccaccactgatctgacaggaggtggagttcaggcataataacgcttgctcatttgctgctcacctcctgtgccacccggttcccaagaggccacggactgctacccatcagtggcctgtgggttggagacctgttttaacagaagtaggaagcattccctgtgcaccaactgtgcctgcagtaatacaataatgcttccgagtaacctttaagtatcacattttccattcacttttctagttacccattctgagctgcaagaacacaaaaacgttctctgatagcttttacagcaaacacaaaaactgtcacccttacataagcagaatatgaaaaaaaaaaaaagtcacttcaatccctcccgtgaccaccaatttagccatcatggaaaggcagaattctaactaattttgcttgcataggcatgtaacaaaatgcctccttgaaaaatctttgtaaaactgatgctccaagaaagtgtgccataattatcctgtggctcctgcattcttcctggtattctaccacatactctcaggggatgtacacttgatatgagaagtatgaaaatatgtgactactggttctttccatacgaaagaattcttacttaagtatcttttta

SEQ ID NO: 246812 - DNA, 499 bp, Homo sapiens
atcgtgggctcatgacattcatgttttataaatgtggcataaagcctcacgctgactgccatgtggcccaataccagttcgatgctacattcaaagaaccatcattccagcatgcaagcatacttaaaggcaattgaaatgtttaccaccgtccctcaagacaaacaccaaagaaaaattattttcaaaatgcatagcaacacttcttaaaatcttattttcccatctctttctctctctctaccacattcccaggagtttcccaggagcaaaactatcataaagacccagaagcaaaatgattaatgacttcactatatctgattctgatttagttggtttagagtggtgtccggtcttacgtattttttaaaatcttgctgggcacagtggcacacacctgtagtctcatctactcaggaggctgaggcagaagaatcacttgagcccgggagtttgagtccagcctgggcaacatagcaagaccctgtctctgaaa

SEQ ID NO: 246813 - DNA, 300 bp, Homo sapiens
ccagaacaagtcttggttcactgggtcaggccctacacaccccgagagcatcagctggcactggaatcaggaagggtgaccctgtatcccccgaaatgcagccacttagtgactccgaaaggccactgagcaaaggcaggagccctgcactgggagaagggatttgcctatggctagaggttgagttttcccactgcagaattccatctattagaacaccaaacttggctttattatgattatggatattattataaataataaggagctgatttgatacatgcagcaagcttggcatgg

SEQ ID NO: 246814 - DNA, 427 bp, Homo sapiens
gaagtactgaaagaacagaactgtgaactgtaaattcaatacccagcaataatattcttcaggcactaaagtgacatagaaaacattgtctaatgaaagaatgctaaggtaatgtgttgctaacaaacttacctttaaagaataagttctctaaacagaaaagaaatgataaaagaagaaggtttgcagcttttacaaacatccatctaaatgggtaaaattaagcataaatataatgtataatcaaacttctcttaagtttttaagccatttctaatagttgaagcaaaaattaaaatacaataatggaaataatagatgcagaggatggtcacaaaagaagagagcacagagcagaagatggaatcagtgaatctgaaaacatgccaacagaatttactgtctgaacaagaagaagaaaaccgat

SEQ ID NO: 246815 - DNA, 261 bp, Homo sapiens
cgccaggacttaaggcaccttctatatctcccagagtgaaatgataaaagaagaaggtttgcagcttttacaaacatccatctaaatgggtaaaattaagcataaatataatgtataatcaaacttctcttaagtttttaagccatttctaatagttgaagcaaaaattaatgacctatctggttagatgctcaaggaacatagaggaagtatttaagataattatatctaaaaagtagtgatagtaaagagactcatatg

SEQ ID NO: 246816 - DNA, 455 bp, Homo sapiens
cagcccctaattgggcaggcaacacacagggagttgggtttgctgacaaggctaagcattttgggcgttgaatacctattatgtgcctagggcattaaagtgataagaaaatctcttaaggtctgccaatgattttgaaattttaacagctcagttttcctgatgccagatgggggacagggagtgggagaactgggtacaagggtgttgctggaggagagatggggacaccctgagggagggttgtcaaatgttggcctaggcacagtgattgggtgactgggaggtgagcgatcagccttctgcacctggaaaatagggcatggctgggcttcccctgtccagcctcattttgtatgaggatcgatatactgtctccatatttgactattctgaagattttgtacaagtggaattatacaataaaaataataattattttaaaaagagaatac

SEQ ID NO: 246817 - DNA, 299 bp, Homo sapiens
atatttgctatctattgctatttattgttcaaaacccagcttggatatcatcccagcaaagccttccctgcactctccctgcaaagtcaactattgcccactcagcagcatgccatagcagacatgcacttttacccaggcacacatatggcattgtactgtcttgttggtttacacgtctgcctttctcccaagactgtgaaatgcttgtgtttttcatcctgatatgtctggcaaccatcatgatgtcttgtcagggttatttgtctaataaaagtttattggcatcaacttaatgt

SEQ ID NO: 246818 - DNA, 447 bp, Homo sapiens
gtgtggaggagacgcagcagctaccactgcaaatgctactcgaggcagagagacggaggaggtggaatgtggcctgtttcctccttgggcccttcggttttccacagtgtctttcactggccttcttgaaatccaggaaacaagagagctggaaaatattggtctctgagttatagcacagggcagagaagggcagaaaatgcacctgaaagaaaacaggcaagtgacctatataccttcttttaggccttctccctcttgtgtaccgcatagcatattaagtggaaaattattataacactcattgtatcacgtggctgtgttttgcttacatatccatctcaacttttatctcttgctttccccagcaccagcactggcacattgcaatttttgaacaaaagatttttgaactaatgaataaataggtgattagatttaattcaa

SEQ ID NO: 246819 - DNA, 400 bp, Homo sapiens
tggatgggaataaactgatctgtatgcaattaaccattaaatgaaacatactgagtaaactgactttgttttttactttatttatttagggacagagccactgttgcccaggctggagtacaatggtgcaatcacagcttactacagcctcgacctcccaggctcaatcaattctcccacctgagcctgccgagtaaacgggactatagacacataccactgtgcctggctaatttttgcatttttaggagagaaagagtttcgtcatgttgcccaggctggccttgaactcttggccttaagcaattctcctgccttggcctcccaaagtgctggtattacaggcataaaccacagcacctggctgactttgttttttaaatcctctatttttaatctg

SEQ ID NO: 246820 - DNA, 473 bp, Homo sapiens
gatggttaaaactgggacaggccaatggagaaggtccttctgtctttggtctgtgatgcgaggaacacagggatctttcctgttgtgtggagaaagaggagcccagagccgtactgagccaagggggtgccagggagaggctgccaggcctgggccctggaaccagccccccaaggccctggaaccagcctgctccatgcagctgcggctcttccagtctgtgagctactcagtgccctttcaacaaaccccgccttgttttgctttaatcagtttgcattttctgttgcttctttctggaaaaatcctctgtgctttgactgactccagggtcttcctccttgaggtggatttcttagtcactgttaggtatccaaatataggcgagtgtaaggcatttttctttcaactgttcattttaatgaattacattcaggaaataagtaggaaattaaattcattgaaagactatt

SEQ ID NO: 246821 - DNA, 431 bp, Homo sapiens
tagtagagacggggtttcaccgtgttagccaggatggtctcaatctcctgacctcgtgatccacctgccttggcctcccgaagtgctgcaggtcacacagcctgatccactgcagggcagcagctccaggcagggcacccgaggagggtttctctagcagtgacatcggcctcagaggtggggcgggtgcagttaagggctgtggagggacacagtgcatgaggccagtgcagagtgactgtgggcagggggacgaggctgggggcccagagcacttggtcttggatgtatggctttggatgagaccgtagggccaccaccaccctagggtgcttgcagatggtggggagggcactctggacgcatctacaaatggcatttgcacaggtcacagatgagcagatgctcaaagagtcgatggctcccaaagg

SEQ ID NO: 246822 - DNA, 638 bp, Homo sapiens
ctttaaagtttcagtcttatagtttcgcacagtcgcctcctacctggtctccctgcatctcttcttaacccctctattcactctttatgtataatccagagcagtgtttttgaaacaatcacatcatgtcacttctgtgcttactcttttccagtagcttcccaacatatttaaaatacaatccaaatttcttaccaagaccagtaaagcctcaaatgagatatgatgtcttcctgtctagaattttataataccaagcctactaataattgaggaactttccactcattttctctgccttgaatgtttttcttccaagtctttattgactttcatttaatcatgtagttcaattgcagcccttcaaaaggcttttccattcatagcagctaataaaataatgatgcttatcctttaccaattactttgccacattactttgctttgtttcattttcacagcagttacttctgttcaaatttatcttgttttagtgtccttttcttttctttccaaaaatgtaagctctaccagtacatgtgctatctctgacttacttgttgtcctatgcctagtacgttaaaacagtgcctagtatgtggtaagttttaaatacaattgttgaatgattggaattc

SEQ ID NO: 246823 - DNA, 407 bp, Homo sapiens
cgggggcagctgatagagagcctagagccgtctcagtgctccaggcgcttggcccctcctttctacacagtggtcaccagcatcctccctggcgtctccttcatgagtgggcactccaccctctgcccggccacctggccccctcctggggaggacagtcaggccgaggcgggtggatcacctgagatcaggagttcaagaccagcctggccaacatggtgaaaccttgtctactaaaaatacaaaaaattagccaggcacagtggtgtgcactggtagtcccagttactcgggaggctgaggcaggaaaatcgcttgaacccaggaggcggacgttgcggtgagccgagatcgcgccgctgattccagcctgggcgacaagagtgagactccatctcacacaaaaa

SEQ ID NO: 246824 - DNA, 368 bp, Homo sapiens
acagtagctcatacctgtagtctcagcaactcaagatgctggggtggaaggatcacttgaggccaggaattcaagactagcccggacaacatagcaagaactcatctctaaataaataaaaaatttaaaaattagccaggtgtggtggcatgcaccttcagtcccactacttggaaggctaaagtaggaggatcgcttgagcccaggagttggaggctgcagtgggctgcgatcaagctacctgggtgacagaatgagaccccatctctaaaaagaaaagaaaagaaattatgtgtatatgaactaggtgacaccagtagcttgaggtatgatcaagctgcccaggtgacggagtgaccccatctcta

SEQ ID NO: 246825 - DNA, 445 bp, Homo sapiens
ccccttaatgcctggggcctgtggtgccgccgccgctccgagtgtgggcccccgagcctgcgcccacccggaactcatgctgcctgcgagccccatgcgcagccctgttcccacctgcgcctctccctccacacctctctgccagccaagggagctgctccggcctcgaccaacccagagaggggctcccacagtgcagcggctggctaaagggctcctcaagcgtggccagagcggacgctgaggccggggaggcgctgagagtgagcgagggctgctaacacgttgtcacctctcactattgctgcccctttcccatggcctgagctaaaagccatagaaagtgtgtgtatgtgtgtgtgtttaggggttgctgggcaggggaagggtgggacaccatcattccacaagacctcgaagttactcctcccatagaaaaatgaaa

SEQ ID NO: 246826 - DNA, 1827 bp, Homo sapiens
cgcctcgccggcgcgcggctctctcagcgtcccaagagccactttctcgccagtacgatgctgcagcggttttccggttttccgcttcccttcatcgtagctcccgtactcatttttagccactgctgccggtttttatatccttctccatcatgcatcgtgagcctgcgaaaaagaaggcagaaaagcggctgtttgacgcctcatccttcgggaaggaccttctggccggcggagtcgcggcagctgtgtccaagacagcggtggcgcccatcgagcgggtgaagctgctgctgcaggtgcaggcgtcgtcgaagcagatcagccccgaggcgcggtacaaaggcatggtggactgcctggtgcggattcctcgcgagcagggtttcttcagtttttggcgtggcaatttggcaaatgttattcggtattttccaacacaagctctaaactttgcttttaaggacaaatacaagcagctattcatgtctggagttaataaagaaaaacagttctggaggtggtttttggcaaacctggcttctggtggagctgctggggcaacatccttatgtgtagtatatcctctagattttgcccgaacccgattaggtgtcgatattggaaaaggtcctgaggagcgacaattcaagggtttaggtgactgtattatgaaaatagcaaaatcagatggaattgctggtttataccaagggtttggtgtttcagtacagggcatcattgtgtaccgagcctcttattttggagcttatgacacagttaagggtttattaccaaagccaaagaaaactccatttcttgtctcctttttcattgctcaagttgtgactacatgctctggaatactttcttatccctttgacacagttagaagacgtatgatgatgcagagtggtgaggctaaacggcaatataaaggaaccttagactgctttgtgaagatataccaacatgaaggaatcagttccttttttcgtggcgccttctccaatgttcttcgcggtacagggggtgctttggtgttggtattatatgataaaattaaagaattctttcatattgatattggtggtaggtaatcgggagagtaaattaagaaatacatggatttaacttgttaaacatacaaattacatagctgccatttgcatacattttgatagtgttattgtctgtattttgttaaagtgctagttctgcaataaagcatacattttttcaagaatttaaatactaaaaatcagataaatgtggattttcctcccacttagactcaaacacattttagtgtgatatttcatttattataggtagtatattttaatttgttagtttaaaattctttttatgattaaaaattaatcatataatcctagattaatgctgaaatctaggaaatgaaagtagcgtcttttaaattgctattcatttaatatacctgttttcccatcttttgaagtcatatggtatgacatatttcttaaaagcttatcaatagatgtcatcatatgtgtaggcagaaataagctttgttctatatctcttctaagacagttgttattactgtgtataatatttacagtatcagcctttgattatagatgtgatcatttaaaatttgataatgactttagtgacattataaaactgaaactggaaaataaaatggcttatctgctgatgtttatctttaaaataaataaaatcttgctagtgtgaatatatcttagaacaaaaggtatcctcttgaaaattagtttgtatattttgttgacaataaaggaagcttaactgttaaaaaaaaaa

SEQ ID NO: 246827 - DNA, 718 bp, Homo sapiens
cgcctcgccggcgcgcggctctctcagcgtcccaagagccactttctcgccagtacgatgctgcagcggttttccggttttccgcttcccttcatcgtagctcccgtactcatttttagccactgctgccggtttttatatccttctccatcatgcatcgtgagcctgcgaaaaagaaggcagaaaagcggctgtttgacgcctcatccttcgggaaggaccttctggccggcggagtcgcggcagctgtgtccaagacagcggtggcgcccatcgagcgggtgaagctgctgctgcaggtgcaggcgtcgtcgaagcagatcagccccgaggcgcggtacaaaggcatggtggactgcctggtgcggattcctcgcgagcagggtttcttcagtttttggcgtggcaatttggcaaatgttattcggtattttccaacacaagctctaaactttgcttttaaggacaaatacaagcagctattcatgtctggagttaataaagaaaaacagctccagccagacggtgtcctctccatggaaaactaccttttctaggctcagggaaacagctccctttccttgcctctttgggactagggatgggaagggcccccactgttgctagtcccaagggactgcactctcctccttggtttctctaaacctgcccacacctttataaagagtcgctgttattaaagtcctgttacattaaa

SEQ ID NO: 246828 - DNA, 1583 bp, Homo sapiens
gtggggtgactcaggctgccaatgcaggtgagcaggttctttgaatgcctggagatctgcctgtgtataaagcagagagggccccactgcaccacaatctctgcacagaaagggtagggtggctcaggctgctcatctaggtttcttcagtttttggcgtggcaatttggcaaatgttattcggtattttccaacacaagctctaaactttgcttttaaggacaaatacaagcagctattcatgtctggagttaataaagaaaaacagttctggaggtggtttttggcaaacctggcttctggtggagctgctggggcaacatccttatgtgtagtatatcctctagattttgcccgaacccgattaggtgtcgatattggaaaaggtcctgaggagcgacaattcaagggtttaggtgactgtattatgaaaatagcaaaatcagatggaattgctggtttataccaagggtttggtgtttcagtacagggcatcattgtgtaccgagcctcttattttggagcttatgacacagttaagggtttattaccaaagccaaagaaaactccatttcttgtctcctttttcattgctcaagttgtgactacatgctctggaatactttcttatccctttgacacagttagaagacgtatgatgatgcagagtggtgaggctaaacggcaatataaaggaaccttagactgctttgtgaagatataccaacatgaaggaatcagttccttttttcgtggcgccttctccaatgttcttcgcggtacagggggtgctttggtgttggtattatatgataaaattaaagaattctttcatattgatattggtggtaggtaatcgggagagtaaattaagaaatacatggatttaacttgttaaacatacaaattacatagctgccatttgcatacattttgatagtgttattgtctgtattttgttaaagtgctagttctgcaataaagcatacattttttcaagaatttaaatactaaaaatcagataaatgtggattttcctcccacttagactcaaacacattttagtgtgatatttcatttattataggtagtatattttaatttgttagtttaaaattctttttatgattaaaaattaatcatataatcctagattaatgctgaaatctaggaaatgaaagtagcgtcttttaaattgctattcatttaatatacctgttttcccatcttttgaagtcatatggtatgacatatttcttaaaagcttatcaatagatgtcatcatatgtgtaggcagaaataagctttgttctatatctcttctaagacagttgttattactgtgtataatatttacagtatcagcctttgattatagatgtgatcatttaaaatttgataatgactttagtgacattataaaactgaaactggaaaataaaatggcttatctgctgatgtttatctttaaaataaataaaatcttgctagtgtgaatatatcttagaacaaaaggtatcctcttgaaaattagtttgtatattttgttgacaataaaggaagcttaactgttaaaaaaaaaa

SEQ ID NO: 246829 - DNA, 447 bp, Homo sapiens
aagtgatcctcaattctgtgcagtctgtgcctccggagactggcggctgcccctccctgtctagtcttgcaagagaggcagctggcaagaggacagaagccggcagctgctgcgttttcatcctgtttctgctcttggagctgagggggagaggtggctagcagccacccagtgatcaaacttgcagcctgcctctcttgcttccttttcacagactggagtgtgcctgggtatggagaaagaacattttgcttcttgcctctcagagtttcaagaacgcctcacctgagtggcatgcattcatggaatgagtaattattacagtggagaactcctcactgtgaattaattacacagatgatattcaagacttagactgggctagtgcaggggttagcaaactatggcccactgttcttgttttataaataaagtgttatgagcaca

SEQ ID NO: 246830 - DNA, 549 bp, Homo sapiens
gcctgagtgactgagtgaatgagactccatctctaaataaataaataaatcaagaaaattccccctttctttccttgtaaagatgtaatttgccaactcaagttgagaggatattaaaaaatcaaatatgtttataatataaataattatgtactgatattttgtttcttaggttaattaggtcatcaatgtgcaactactataataaatccatataaacacatccatatttgttgggcatttacaaagaattctgaggactaatatatttcacagaatttatcttatttagtccaattttctgaacatgtagttaaaactatccagaatcattcagttatccaagacttacctgtaaaattatagtcagactatatgattttcaaggatcatttcagaaataaaattctgcacagtattgaattacatgggataactagatcaaatgcagcagatataaaatagaacaggttttattttaaacctttgttctacaaaaatccataaaattgggcttcaacacattttaaatgttagaaggactgaact

SEQ ID NO: 246831 - DNA, 353 bp, Homo sapiens
tgaacacaagctacttctgaacactattttagcaaacagaattttagaagcataaggctctagcagagggctatacagaattttgcataaactaaataacaaccgtttcctcctgaaatgcaggaaatcaagctgcacgggtatgtttgctgattgggtgagtgaatgagtgagtcaatcagtgaaaactccaggctcctttactcttcctacctttctttaacatccttaaacttttatttgaattttttaaagtttgtaaattgttttgcttgtccatcttggactgtcagtttctgccaccaaaaaaaaaaaggagtaaaattaattttaattgactttaatttcaaaaa

SEQ ID NO: 246832 - DNA, 764 bp, Homo sapiens
agctgggattataggtgcccacgaccatacctaggtaatttttgtgttttagtagagacaggatttcaccatgttggccaggctggtctcaaacttgagacctcaggtgattcacccgccttggcctcccaaagtgttggaattacaggcgtgagccacagcgcccggccttcatttttaaagtacatgaaaaaactatttatgacaatgttgagttttacctaagcactgtgctcctagagaacagcaatgattaaccccttaccccctaaccccacctcaaccccgtctctcgggttctggaaatggctcactgcaatgactgagataaaactcatggattcccctctatggcgattccccactataccctgttactagaccggatacagatagccccaattcccatttgcctcataagtgactagctgaaatgcttggcccattgatcagctctgaattttggcccaccctcagcctaaaccagcatgaaatccctctgtaacagcccccttgagaacaggctggcctcaggataaagcaatctctgatctactgccccaccctgtcactctcgttcatcccacttacctacaccaggttctttctagactggtttactccttcctataaaagaaaatccctttttacctaccccttgagagtttgtagatttatggcctgagtgttctccctgtttacagagtcttaccaccctcaccccaccccaaaatcatccttttaaataaaatctctctttatca

SEQ ID NO: 246833 - DNA, 463 bp, Homo sapiens
acacacacccacggcagttacagcaggtaatttatctcctagcacgcaagtctctcccccatttcctcactggtcgagtactatggggttacaatcttcccagacgttgcctaagtttcattatcccccttataaggttataccccagtccccttcctcacttaagtttcgattttccgatagcaaaacttttccctttcatgggctgacccctcctctacattctgatcacttatagtgactttctaggtgcatgagctgtgtggtttgtcacatctgcaggttgactgccagtacttagatttagcatgccttgaaaatggatcatttaaaatgttttctcacacaatggcactcttttcaccaggttttccttttttttaaattgtcgttttccatcaaaattctagttaatcatgcagtggaagtttattatgtttaaataaattttaaaaagtttaag

SEQ ID NO: 246834 - DNA, 425 bp, Homo sapiens
cccccctaagggacagggtcttattctgtcacccaggctggcgtacagtggtgctatcatatagctcaacttcttggcctcagcgatccttccacattagcctcccaagtagctgggactataggcatgtgccaccaggcccagctactttttaaattttttgtataaaggggtcttgctatgttgcccaggctggtctcgaactcctgacctcaaatgatcctcccaccacagcatcccaaagtgttgggattataggcatgagtcaccatgcttggccatgttccaatctcatagatgagaaaatgaagacagttaaaagtcacaaagctgggattcaaaaaccaggaagtgagttctcaaaaatatgatgtattctgtctcccacatttatttaagtaaaaacccaaatcatttgatgcttc

SEQ ID NO: 246835 - DNA, 362 bp, Homo sapiens
tagctcgcacctgtaatcccagcactttgggaggctgaggcgggcagatcacgaggtcaggagttcaagaccagactggccaacatggtgaaaccccatctctgctaaaaatataaaaattagccgggcatggtggcaggcgcctgtaatcccagctactcgagaggctgaggcaggagaatcacttgaacctgggaggtggaggttgcagtgagccaagatcgcgccactgcactccaacttgggcgacaaagcaagacttttctcttgatatgaatattctccaagacaagtgttggttgctttaataggtaggatcaattcctgagactgcctaacatgggctggggtctacaacccag

SEQ ID NO: 246836 - DNA, 276 bp, Homo sapiens
gtgcacacacacacacacacacacatactcaaagactacttttccaacaagtgcacattttaaaactactctttggcagaaactgtactagtattagaggacacgaacatgacttaaggaggtaccctgccttatctgcaagggagtatctagttgaaaaaaaaaaaaaacaatattgtgaaattttcccctcatctttgcctcattttttcctgtgagtcatgaaacaaatatttcttgagaacgactggtaattaaacaagtatttgcagaaat

SEQ ID NO: 246837 - DNA, 407 bp, Homo sapiens
gtttttaacattcttttgttcccatttccaattgttggcatttctttgtagatttacgtattaaaaacaagaacgactgtcaggaaggcgaggaagcactgcctaacagagcatggcagtggtggaaaagcagaccagggagcccacaaggagacaatgatagagaagtctttctttgggagagcatccttagctgtggaacaggccgagatgcttacagaggaaggatggacctctgtataagctctgtagccttctcagtaaaaagtaaacagaaaaaaatggggggagagaaggaatgaagaaagtgagtctatggccttagtgcttctctgcttaggatagagcactggcaagcatatgaaaacacatacatttcattgctaaaaataaagaatcaaaagtgc

SEQ ID NO: 246838 - DNA, 330 bp, Homo sapiens
ttgatatattctgatttagttgggcctgacatttgtttttgccactcattacatgattaatttatttctgctctaaaaggagttcattctgcctgagtgcagtgactcattcctgtaatcccagcactttaggaggccaaggcaggaagactacttgagtccaggagtttgagaccagctaaggcagtatagtgagactccgtctacaaaaaaataaattagccaggcatggtggtgcacacctgtggttaagcccaggaactccaggctgcattgagctgtgattgtggccatggcactcagcctgaacaacaaagcaagacactgtgt

SEQ ID NO: 246839 - DNA, 469 bp, Homo sapiens
acagtaagtctccagaacttacttcatctgcaggtttgtactctgaccaacatcatcttatttcactccccaccccactttcagcactggtaaccacatttctattctaagccttctggtgaaatttctttcttatttcactcccagtgagtaacacaagagaaaaataaacaacaaaagccagtcaataattataaagtgaatcttaccagtatagagttataagccttgtttttacttcactgataatgttgtcgtgaacactgtttgaataatgaagactaaaggaatgatggcatgcactgtgagttcttgatgtggttgaagcaaaattcccaacaaacagacattttgctatttcattagtgtttatggctgataaataccttgtatgtttgctatactattgtgttagtaacataattttatttttatgtaacactaacaataaatagataaaagcaaaatt

SEQ ID NO: 246840 - DNA, 693 bp, Homo sapiens
gcagaaattgacaagctaatcctaaaatccatttgaaaatgtaagagacccacaatacccaaaacaatcttaaatggaacactcacttctgatttcaaaagttactataactaagtaatcaagactatgtggtactgccatatacacatatatatcatcaaaacagaattgagagtctagaaacaaacccttatatttatggtccactgatttttgacaaggatgccaagacaatgcaatgggcaaggaaaaaaagagggacaataagtgttgccaacggtatggaaaacctggagccctcatatactgctgctgggaatataaaatgatgcagctactttggaaaatagtctggcactggtagttcctcaaaaagttaaacacagttgccatgtaacccattaattccacttctaagcatatactcaaacaaaaccatatgtccaaacaaaaacttgtacatgaacgttcatagcagcactactgataatagccaaaaagtaaaaacaacccaaatatccatcaactaatgagtggataaacagtatgtagtacagccatacaataaaatatcatgcagacataaaaaggaatatatgccacaacatgaatgaaccttgaaagggctgtgttaagtgaaataagccagacatagaagacctcatatggtatgagtctatataaaaagtccag

SEQ ID NO: 246841 - DNA, 446 bp, Homo sapiens
ctccctcttcttcccaataaaaacctgaactcaaagaaaagaactggaataatcctccctatcccacttcccatggtgagccccagctgggacgctgacacatggccccaactttttctcctgcctgatgtctggacccacaggggacagatggtggtccctggtcactgaagtacccacagaacccatgcaagaggcacaaaaccatctgcttagtggtcatgtggcagcagacagtatctcagaagtcctcgcagcatatgacttcactgatgaagatggatcacacttgagcagggattcttgatctctgcaaaacagctcatacacaacaggaacaatctcacagataagaaaaactccagaagttggtctcgggctatgaaaatttctgccacaatatgatttatatgaaaataaataaagtgggtctactactttaaaat

SEQ ID NO: 246842 - DNA, 580 bp, Homo sapiens
ctccctcttcttcccaataaaaacctgaactcaaagaaaagaactggaataatcctccctatcccacttcccatggtgagccccagctgggacgctgacacatggccccaactttttctcctgcctgatgtctggacccacaggggacagatggtggtccctggtcactgaagtacccacaggtttgattattgagacttttatctctgttgactacagggaggacctgaatcagtttacatggttaaaataaaagcgccatatacaaggataaagcaggacagggcccccaccatctaaaagtagaagggatggggattgccaggcagcacctgccaccaccaagaaaagactgagaaagggacacttcaggcacaacatgtaaggaggtgctccttttgggactgaccctgcctttgcatagccctgggaatgagccaccctcatgtttgcacccaggcctctctcttgcctcatcctgcacctgccatgagtttactactgagctcacttctgaaattggctctgcattgcctgtcacctatggcaagagagaaacaactaggttatgactattgtg

SEQ ID NO: 246843 - DNA, 604 bp, Homo sapiens
accaacccccgggggccccccgcctagtatttcgggggtactcgggggggacccccttttttacaaactggaataatcctccctatcccacttcccatggtgagccccagctgggacgctgacacatggccccaactttttctcctgcctgatgtctggacccacaggggacagatggtggtccctggtcactgaagtacccacaggtttgattattgagacttttatctctgttgactacagggaggacctgaatcagtttacatggttaaaataaaagcgccatatacaaggataaagcaggacagggcccccaccatctaaaagtagaagggatggggattgccaggcagcacctgccaccaccaagaaaagactgagaaagggacacttcaggcacaacatgtaaggaggtgctccttttgggactgaccctgcctttgcatagccctgggaatgagccaccctcatgtttgcacccaggcctctctcttgcctcatcctgcacctgccatgagtttactactgagctcacttctgaaattggctctgcattgcctgtcacctatggcaagagagaaacaactaggttatgactattgtg

SEQ ID NO: 246844 - DNA, 339 bp, Homo sapiens
ctccctcttcttcccaataaaaacctgaactcaaagaaaagaactggaataatcctccctatcccacttcccatgaacccatgcaagaggcacaaaaccatctgcttagtggtcatgtggcagcagacagtatctcagaagtcctcgcagcatatgacttcactgatgaagatggatcacacttgagcagggattcttgatctctgcaaaacagctcatacacaacaggaacaatctcacagataagaaaaactccagaagttggtctcgggctatgaaaatttctgccacaatatgatttatatgaaaataaataaagtgggtctactactttaaaat

SEQ ID NO: 246845 - DNA, 294 bp, Homo sapiens
agcggctttgaataaagactgaagaacacgaacccatgcaagaggcacaaaaccatctgcttagtggtcatgtggcagcagacagtatctcagaagtcctcgcagcatatgacttcactgatgaagatggatcacacttgagcagggattcttgatctctgcaaaacagctcatacacaacaggaacaatctcacagataagaaaaactccagaagttggtctcgggctatgaaaatttctgccacaatatgatttatatgaaaataaataaagtgggtctactactttaaaat

SEQ ID NO: 246846 - DNA, 121 bp, Homo sapiens
cttgttgcaaggaggtttaaaaagtaatgttcatttctgcatcagtttcagccaaatgttgatattaaaaccttttattcttttttttaatttttgcctctagatgtgatgccttaagata

SEQ ID NO: 246847 - DNA, 478 bp, Homo sapiens
cagaaagtgcaacactttctcatggtcacgggtgagcacgaaacatctctccaaatatgggttgggaagattaagagactagtccagaagaaaacagtctccagggagaaatatatctgggaataggaatcgagaaagcaaccaagagagcagaactgagtggatgagaggaactgtcagaccacatctgcagctctgattagtcaaatccgaaatgtgcctgttgatctactattccgtggaaatactggaatcaccagctcaataataagaggaaagtaaataataccatacttgcgtggataattcccctctgctcataccttcattcaggtcaacatagatctatcatactcctacagtgtataagggacgtgctaagcttgaagtacattcattctaaaaatcaaaatacaaaggcatgggaagactaagaaaatttcataaaccttcattaaattatcagaaataaaaagga

SEQ ID NO: 246848 - DNA, 578 bp, Homo sapiens
aggataagggggaatcagagcttaagggaagaggagttacaattttgaatagggtggccagggtaggcctcatagagaagataacatttgagcaacacatccatggaggcaagggagtaagccatgcagctcttagagaagaccatactaggcagcgaagggcctagggtgaagtggtactgggacaaaaaggccaaagtggagggggaaggcgccttccctgtacttagtaaacatttgtttctgagaagagactaccagctagcagaatgaactgcatggacgttactgcttaatctgatgctcttatacaattaaaggatttgctctgctctcaactgtaatcttagtactgctgaattgtgtactgacactgcaggaaacagctctgttcagcaaagcgctgctacaaaggttctccatgtgcgcctgtacatggacaattaagttttaacaacaaaattagcagaacaactggatgttctggaagttgagatcccttcacttcattttttttccatcaaccgcagatgacgccgatgtaacgtcgctttcccgctaggtttatcctctagagg

SEQ ID NO: 246849 - DNA, 1043 bp, Homo sapiens
aggataagggggaatcagagcttaagggaagaggagttacaattttgaatagggtggccagggtaggcctcatagagaagataacatttgagcaacacatccatggaggcaagggagtaagccatgcagctcttagagaagaccatactaggcagcgaagggcctagggtgaagtggtactgggacaaaaaggccaaagtggagggggaaggcgccttccctgtacttagtaaacatttgtttctgagaagagactaccagctagcagaatgaactgcatggacgttactgcttaatctgatgctcttatacaattaaaggatttgctctgctctcaactgtaatcttagtactgctgaattgtgtactgacactgcaggaaacagctctgttcagcaaagcgctgctacaaaggttctccatgtgcgcctgtacatggacaattaagttttaacaacaaaattagcagaacaactggatgttctggaagttgagatcccttcacttcattttttttccttcccccgctgccaaggagttatcctgtggactgcccgaaagatccgcctgtcaggattgtcttacaagtgttctgagttgctgtgcaaacagcaacttcctccagattaattgttgaggatgtattacacctagtgtaaaaatgactgttaaactgctgttgagtaaatctcaaaattactgttaaaatgctgctgagtaattctcaattctctcagagaattaattgccttctaacatttgcttccagttgcaagcacctatgatttttaagagactttgtataaaatataccatttctgcatagagaaccaaattgctttcggtacattgtagttttcttagccatttttcaatagtctacacagtgtttatgtttccttttatttgtgtatagtggagtagaggggaggtttttttattcaaatagaagaagctaaaactcaaatgcaatgtcagatctcagaataaactgacccaatttctgaaacccaataaacacatttcatttgtaatattcttta

SEQ ID NO: 246850 - DNA, 564 bp, Homo sapiens
cagcattttcccattgaggtgcggcattatttatcccagtggattgaaagccaagcatgggactcagtagatcttgataatccacaggagaacattaaggccacccagctcctggagggcctggtgcaggagctgcagaagaaggcagagcaccaggtgggggaagatgggtttttactgaagatcaagctggggcactatgccacacagctccagaacacgtatgaccgctgccccatggagctggtccgctgcatccgccatatattgtacaatgaacagaggttggtccgagaagccaacaatgtgagtgtcccatagggatggggagggcagtcgggaagtcttttcttacccacctccctctggacccacctttgtcaaggtgactcagggtgcactattggtgtctctttaaagagagcttcatcctaaggggcacaaaagaaataggagacttgactgagtgcagcccagcactttgggaggctgaggcaggcagattgcctgagcccaggagttcgagagcaccctgggcaacatgatgaaaccccgtctctacca

SEQ ID NO: 246851 - DNA, 696 bp, Homo sapiens
cagcattttcccattgaggtgcggcattatttatcccagtggattgaaagccaagcatgggactcagtagatcttgataatccacaggagaacattaaggccacccagctcctggagggcctggtgcaggagctgcagaagaaggcagagcaccaggtgggggaagatgggtttttactgaagatcaagctggggcactatgccacacagctccagaacacgtatgaccgctgccccatggagctggtccgctgcatccgccatatattgtacaatgaacagaggttggtccgagaagccaacaatggtagctctccagctggaagccttgctgatgccatgtcccagaaacacctccagatcaaccagacgtttgaggagctgcgactggtcacgcaggacacagagaatgagttaaaaaagctgcagcagactcaggagtacttcatcatccagtaccaggagagcctgaggatccaagctcagtttggcccgctggcccagctgagcccccaggagcgtctgagccgggagacggccctccagcagaagcaggtgtctctggaggcctggttgcagcgtgaggcacagacactgcagcagtaccgcgtggagctggccgagaagcaccagaagaccctgcagctgctgcggaagcagcagaccatcatcctggatgacgagctgatccagtgg

SEQ ID NO: 246852 - DNA, 736 bp, Homo sapiens
tttttacctagtgatcataatcacattctactatcttcagctaattgcctttctccatttgcttttttttaaaaaaatggcatgatacgttttcagtgctagtttaaaaggaataagagcagagctttgttggaggagccattttatttaaaaaaaatctgtatctagaacatttggggatattctgaaaattaagttcccctcccaaaactgtaaaagtagagatttcgaaatatatgacaaaactccaaaacagctagttgagcaagctttaaaaacttactgtttaatttagatacagtataattcatttttttggtgcccagttctgtgagctttgacaaatgcgtagagttgtgtaaccaccaccacaatcaagagataattgcatcactcctaaacagttgtttatcaagttttacatcacctgaagacacagacctattactgttagcctgtaaatgtacaaaagataagatgagtatattgttagtactggtcactaaatggaaacaatgtggattatgtcttgctaaaatatcagaataacaaattcagcttgtgtgaattgttcctatgctcctatgctaaactcagtgtgctaaaactctgactttaaacatttatagaatgataagactaaactttctatgtttctcagggttaaaatgataatgcagataacaaaatgatgaaattttgtacttggatttaagctggctaaaattattcagtt

SEQ ID NO: 246853 - DNA, 660 bp, Homo sapiens
aactgggacttttaaaaccatcagatctcatgagaaatccctcactatcatcagaacagcatggcggaaaccgtcctcatgatccaatcacctcccaccaggtcccttccttgacatgtggggattataattagagatgagatttgaatgggcacacagagccaaaccatattacatatgtccacaaaattatctgtatgtgaatgtttatagcagttttatccacagtaactccagactcaaaatcatctaaatgtccattttctagtgtatagcgtacatacaatgaaataccacttggcaataaaagggaataaactactggaatatgcaacaacatggatgaatttcaaaagcattatgctctgtgaaggaagttaaacacagaaggcaacgtaatgtgtaattccttttatcatgcagttcaaaaaataagactataggaacagaaatttagatattggggaagcagattgatccaaaggagcacaggagaatttctagaaataatggaaatactctatctcaatcaattgatgattacataactatatatgtttgtcaaaactcattgaactgggaagccaaggcaggaagattgcatgaggccaggaattcaagactaaactggacaacacagtgagaatctgcctctacaaa

SEQ ID NO: 246854 - DNA, 194 bp, Homo sapiens
taaatgatctatctctacattatccagctgtgcatctcaatctctacggcattttattctttcatctttccctgaggatgttcagtgtggagcctaaatttttccgtccagagaacacatttcaaccacctgaaaaatgtctgagctttttgtcatatcataatcatcacttagagatcttttcttctctggga

SEQ ID NO: 246855 - DNA, 558 bp, Homo sapiens
aattgtgtcccactcagtgaaacttctctggaaagctgtaaggtatagtccagagacgagaggaagggaagaagaaatttatcctctgggagcctcccatttcctgtctcctaatagtgagaatttttccatgagaagttaatgtccctatactttcacaatgtgttaccttcttttgttgctgttcaagatgccaagcctatgccctgcagtgtggccttttgtcagagtccataaagggcaggaggaactaggaactctgggtgtgtatggttggcccagctgcagagttgacagtcaaggggataaccaactctaatcagcctagaagggaacttggtagcctaggtgagttggtcaggcacaggctggggctaaggcaaggcaaatggctgaggtctaagacgtaggtggtgctgagaaaatgtggggaagcatacaagatttgtgactgatgagtaatattctagttcttggttaggataatgggtacatggggtgttccttttattattttcaaaatgaaatgaaataaaagagggatatgtgtggactgat

SEQ ID NO: 246856 - DNA, 293 bp, Homo sapiens
aggaaacatttgggctaggccttaaaaaataaataggaattaattaggaggatactggggatgttataatgtaggaatttatagaagtcaaagttttgtgtgatcggaatgagtataaactacttcagacctacaacctgaaggacattggtagatgctgccaacaatcaagaaagttcttcactttgcagccattattgcaataacagaaaaccagactcctttgtcaaaggacactcgaaatccataagtcaaaaaccctaataaaagatttttccggctttagtgttttc

SEQ ID NO: 246857 - DNA, 774 bp, Homo sapiens
agtggatcaacaaacaagacccaactatgtgttctctacaagaaaccctctttaaatataaagacacatacatgtacattaaaagtaagtggatagaggccaggcatggtggctcacacctgtaatcccaagcactttgggagaccaaggcaggcggattgcctgagctcaggagttcaagaccagcctgggcaacatggtgaaaccccatctctgctaaaaatacaaaacttagccaggcttggtggcgcacacctgtaataccagctacttgggaggctgaggcaggagaatcacttgaacccaggaagtggaggttgcagtgagctgagatcacaccactgcactccagtctaggtgacacagcgagactctgtctcaaaaaaaaaaaagtaagtgcatagaaaaagatataccatgctaacactaatgaaaagaaagtaggagttcctatattagtttcagaaggagatttcaaggaaagttatcagggataaagagggatattacataacgataaaggtgttcattctccaagaagacataagaacacctaacattgcatgtacctaagaacacagcatcaaatacatgagataaaaactgatagaactgcaaggaaaaatagttgcatccactatgaagttggagttacagttggaggcttcaacatctctctatcagaaataacacaaagccagcaggtaaaaaatcagtaaggactaactcattgtatgaggccaacattaccctaatatcaaaaacaaagatatt

SEQ ID NO: 246858 - DNA, 393 bp, Homo sapiens
atgagatgggaaaatgcaatgagcatgctgacaccctccccaaaccttagagaaggaattaggggcaggcctgaagcaggaatttcagagggtaggccttagctctgagctccactgcactgtcacctccaggagggcccagggaggggcttcacctttgtgaccccacagcacccagaaggccctaaacagaggccagaaatgttgccttgagctgacttgaggtgacgtcacagactccagacctcaaaatgagtatttctttttatgtcagcctgatttgtgttacagtgcttagtacggcactgccataaatctcacacacacacacgcacacacacactcacccacacaccccttcattttttttaatttacattctttatatactgt

SEQ ID NO: 246859 - DNA, 490 bp, Homo sapiens
tacaaaagttgcatttgctttcctagccaaattagcattttgctctctttcccatgtttctgtatctgaaagggaggctgcatatgctacgctgtcagcttttccagcaacactcacaaatattttccttatgctgcaaactaagcccttgattcagtgtctcacccagtagacattattcattttgaaacaacacagctgtatttcagattttatgtctgatacctttcctccatgagttaagttgcaaaagtaagcaaaaatatggagagaagtgcctttaataaatttcactgagagagagaaagagagagaacctgtcaatgcaatcaacattcaaaggctaaaagcagggtgtaactgttgttaagaggtgaaccagaacttttggaacagatatggaacacaggatatgtatttttaaaaattgttgccaattctattggtttatttaccattgaacatcattccttcaataaaatgtgtatac

SEQ ID NO: 246860 - DNA, 228 bp, Homo sapiens
gtttatgtacatgaaatattctgatatccttctcataaaatctctttttgcctaagtaaattcaagctggagtttcatgacttgtatctagtgttcataactaatacagttgttcagttttaggagttaaaatggttcttactgttgaattggactatctaactgtacccgaaaagtgctgtctttttaatgcaaacagtaaagttaataaaaaatagttgcagatct

SEQ ID NO: 246861 - DNA, 344 bp, Homo sapiens
agctgattctacttaaaaaacacattacttaaaagtgaggagtatcaaaaactcagaaggaattaataaagaatacttcatcttgcttaagagtcaaccccatcattctctaattctcattctctattccttaaagcccacatttgctactaaatttagataccgatgtgtcctttgttcaagtttggttagaaaaaaaatattaaaaaagcatatttaaggaaaagaaagagcaaaatagtcttggctttttattaaataccccttaaaagcagtaaatccaattacagatccagtctggatatcacattatagtaattttcttaaaattctgaatgaagcat

SEQ ID NO: 246862 - DNA, 324 bp, Homo sapiens
aggaaagagatgttggcaggcagtgagaaggcttgagctaccgctccagtatgagcaagccagctgcacaacctcaagccagtcgctgaacaacagtttcctcatctgtacaaacagagataatgacagccaccctgcctacttcaaagatctgcagtggtaactaacaagtattcctccagtgatgctgtgaccaaggtctgacagatactaagaaacaattatgtaaagacagggttcctgccacagggaattttacagtctggctgagaaaactagacactttcctatgataagataaatagtatgggcaaagtgccaagt

SEQ ID NO: 246863 - DNA, 477 bp, Homo sapiens
ttcaaagcatagagcaaacatcaattaatcctcaaaagacgctttcaagaagaacattatcccttttggagacgcagaagctaagaggtgccgcaggagaccacggagtgaaaaaagttggaggcctaagtacagccgtgtgtacccagccgggcaccagagttaagacaactggacttgtgctcaaaaacccttctttagtaaaacaacccgtaggagtctgtgggaggaggaaaaattgaagtctggatgcaatttgccacactgagtctgttctggtaaccgcccccaacacactcacacccccttgcctgaaatggggagaggggtgggatcggtgtgtgtaaacagaggcactgccctgcctggctgctctttccatcttaggagaaccaatccagaactttctacggctcacactctgatcacagcctgtcgccatgattggcaataaacgtcacacattctcacgttata

SEQ ID NO: 246864 - DNA, 371 bp, Homo sapiens
caaggctggttttaaattttttctagaaacgaggtctcgctatattgcccaggctggtcttaaattcctagctcaatcagttctcccaccttggcctcctaaagtgttgggattataggtgtgagccatggaggctggccaggaacttgattttcagggagaagcctattcagtgtttccttggacttcctcagcctggttttatcatagcatattataagatgataaactgaaaccatctgatttgaaatcaccaacctgggaaataccagtcagaaattaattctatttttatgacattcttaaaagactgtttaaaactgaccaaagtaaaaaatcttcttttagagttataagtgtgtaaaaaaagg

SEQ ID NO: 246865 - DNA, 395 bp, Homo sapiens
atataagggatagtagggcaaacatatgcattcattcatttttgcatcaaatcactcttatgtactgcactgtgttaagcccaggtcatctagcagtgaatcaaggacataagattcctatcccttatgaggtctacaggaataaagaactgaaatgtgtttggccaggagcagtgtgatctttttgaagtttataagctccatatattggtaacttaaaaatttgcctatacctattttttgacaatatggaaaacatcagctgggcacagctgtggctcatacctgtaatcccagagctttcagaggctcaggtggaaactgaggtgagaggatggcttgagttcaggagtttgagaccagggtgggtaacaaagcaggacctcacctctacc

SEQ ID NO: 246866 - DNA, 403 bp, Homo sapiens
tcaggatggcaggggtgattaacttggtgtgtgttttacagataagtaaggattttgaactaatctgtacatagggatatttggtcaggcctgaagatttaattgaacttggcattcacacaattagtttggtttgtttactttcttatatcattaacaaacttactaaaaaggagatacaaataaactttgtgccaattacataagaaaataattggattttattaacccaggaactcaggcaatcaattaaggcaggtgtactctggtctcagtcacctcattattctttatatgctaatttaatcacaaatactaatggattgtatagaaatgagacactttattccattaaacaacatataaaagctcttaaagtggcaatgcttgtttccttgacaaa

SEQ ID NO: 246867 - DNA, 407 bp, Homo sapiens
cccctagtgtttttgagttgccggaggttgtgagaatttgcatttggaacaagttctcaagtgatactgacactgttggtcctggggccacgctttgagaaccattctttcagctttttggaatcttaagaactttagaagtctagtccacaggctccgtactgatggaggtaccagcaagggcttccttttccacttcaagagaaagaacaataagtttcaaaatttgaagaacacattgacctagcattgaagaaagcaaactctaagaacctcttcaccaaaagtattttattgttggaaaaacacctgatttcagaagtttgcaatttacgtacatagaaagtttatcaaagataacaatgattctgttttccttacaataaatgaattctaaaacatgcgaa

SEQ ID NO: 246868 - DNA, 473 bp, Homo sapiens
atttagttagactggatcttatttaaattttggagtatattgatactattgttttagcaagcaatcaccctggtgagatgaagacaatctgtgggatctggttccaatgtcagttccattctgaaagcctttgtagtgctattcagacatgtgcatcaaccaggggtgaaattgggaactgtgcaatgctctactcattagttcaggtcttagcatctttagtgtgccaattagaaccatatctaggcatgcataagttgaggggcaggtgaatccaggagtttatgaataatgttcatgggtctctttctaaagtttcttcctcttcaccatctgacccgtactttcaggttcccaggggcttctcctttccatcctccagctagaaatgcgggcctccttttattctgatgaaccatatacttctgcaattatagctgcatctttaagctcatgtggcagacggacagtga

SEQ ID NO: 246869 - DNA, 745 bp, Homo sapiens
gggcaggtgctggtgcaactgctgtgggcgctgaagggtgtcttcgaggccggagccccaggcactggcggccacacgtgctcttggggagatgctggctgtttcgggctgcgtgggagccacgaggggcttctacccacatctgctgcttgcgctggtcacacagctgcacaagctggcccgcagcccgtgctcccccgacatgcccaagatttgggttctgtcccaccgagggccaccacatagccatgccagctgtgctgtggaggccttgaaggcgctgctcaccggggatggaggccgcatggtggtcacgtgcatggagcaggcaggaggctggaggaggctggtgggagcccacacccacctggagggcgtcctgctgctggccagggctgttgcagagccggcccaccgcacggctcctgcgggaggaggtcatcctggagcgactcctcacctggcagggagaccccgaacccactgtgcgctggttgggcctgctgggcctgggccacctcgcgctgaatcgcaggaaggtgcggcacgtgagcacgctgctgccggcgctcctgggcgcactgggcgaaggcgacgcgcggctcgtgggtgcagcgctgggcgccctgaggaggctcctgctgcggccccgggcgcctgtgcggctcctgagcgcggagctgggaccgcgcctccctccgctactggacgacacacgggactcaatccgcgcctcggccgtcgg

SEQ ID NO: 246870 - DNA, 498 bp, Homo sapiens
agctatccatgcagtccgggaggggagccagacagaagcaagcatgtgcgaccagcattaaaggggcagctgcagtcagtcctctctggagccctgtccttgttcttcccaacacagccttgtgcgtatgctgatgctgcatgaaatccctgcttcttcatcgttcgtcacaagagcccatgatgccttgtcagatgacacctctgatcccaggaggatccatgccgtggagacaaacaactcattatttgccttgatgacctgtcatctcatagacacctccctggatggatggagcactggaatttgggctaccagagagttccgcctcggttagcagaagtaatttgcccgtgtccttatgcaacatgctgacctggtcggtcatttaaatgaaagggcacggcagccatgcaaaactctatctccctaatgcttttcttcccattgctttcttcttcttgaaatataaaaacgaccctgttgtaaaactgcatt

SEQ ID NO: 246871 - DNA, 809 bp, Homo sapiens
ggtagcgcttgctgagcggcggcggcaaccgacgtacacaaggggcttgagcgttctgtggagagagtgcgaggtcaggccatgaacttgggagatggtttaaagcttgaaactgaattactggatggaaaaaccaagctaatattgtctccatatgaacataaatcaaaaatttctgtgaagatgggaaataaggccaagattgcaaaatgtcctttaagaacaaaaactgggcacattctaaaatcaacacaagatacttgtattgggagtgaaaaacttttgcaaaagaagccagttggttcagaaacatcacaggcaaaaggtgaaaaaaatggaatgactttttcatccactaaggatttatgtaaacaatgtatagataaagactgtcttcatatccagaaagagatttcacctgcaactcctaatatgcagaagactagaaacaccgtaaatacatctctagtaggtaaacagaagcctcacaaaaaacacatcacagctgaaaacatgaagagcagtttggtgtgtctaacacaagaccaactacaacagattttgatgactgtaaaccaaggaaatagatctctttccctgactgagaatggaaaggaggcaaaaagtcaatatagtctatattaaacagtatttctaatcagccaaaggatgagaacattatgggattattcaaaaaaactgaaatggtttcatctgtcccagctgaaaataaatctgtcttaaatgaacatcaggagacatctaaacagtgtgagcaaaaaattgccatagagatgaatggaaaccaa

SEQ ID NO: 246872 - DNA, 783 bp, Homo sapiens
ggtagcgcttgctgagcggcggcggcaaccgacgtacacaaggggcttgagcgttctgtggagagagtgcgaggtcaggccatgaacttgggagatggtttaaagcttgaaactgaattactggatggaaaaaccaagctaatattgtctccatatgatgggaaataaggccaagattgcaaaatgtcctttaagaacaaaaactgggcacattctaaaatcaacacaagatacttgtattgggagtgaaaaacttttgcaaaagaagccagttggttcagaaacatcacaggcaaaaggtgaaaaaaatggaatgactttttcatccactaaggatttatgtaaacaatgtatagataaagactgtcttcatatccagaaagagatttcacctgcaactcctaatatgcagaagactagaaacaccgtaaatacatctctagtaggtaaacagaagcctcacaaaaaacacatcacagctgaaaacatgaagagcagtttggtgtgtctaacacaagaccaactacaacagattttgatgactgtaaaccaaggaaatagatctctttccctgactgagaatggaaaggaggcaaaaagtcaatatagtctatattaaacagtatttctaatcagccaaaggatgagaacattatgggattattcaaaaaaactgaaatggtttcatctgtcccagctgaaaataaatctgtcttaaatgaacatcaggagacatctaaacagtgtgagcaaaaaattgccatagagatgaatggaaaccaa

SEQ ID NO: 246873 - DNA, 828 bp, Homo sapiens
  misc_feature (792)..(792): n is a, c, g, or t
ggtagcgcttgctgagcggcggcggcaaccgacgtacacaaggggcttgagcgttctgtggagagagtgcgagagatggtttaaagcttgaaactgaattactggatggaaaaaccaagctaatattgtctccatatgaacataaatcaaaaatttctgtgaagatgggaaataaggccaagattgcaaaatgtcctttaagaacaaaaactgggcacattctaaaatcaacacaagatacttgtattgggagtgaaaaacttttgcaaaagaagccagttggttcagaaacatcacaggcaaaaggtgaaaaaaatggaatgactttttcatccactaaggatttatgtaaacaatgtatagataaagactgtcttcatatccagaaagagatttcacctgcaactcctaatatgcagaagactagaaacaccgtaaatacatctctagtaggtaaacagaagcctcacaaaaaacacatcacagctgaaaacatgaagagcagtttggtgtgtctaacacaagaccaactacaacagattttgatgactgtaaaccaaggaaatagatctctttccctgactgagaatggaaaggaggcaaaaagtcaatatagtctatattaaacagtatttctaatcagccaaaggatgagaacattatgggattattcaaaaaaactgaaatggtttcatctgtcccagctgaaaataaatctgtcttaaatgaacatcaggagacatctaaacagtagagaatgaatggaaaccagctgatatattcagtactctnggggaaaaggaatgtgatagagttcgttggaagcaa

SEQ ID NO: 246874 - DNA, 879 bp, Homo sapiens
  misc_feature (843)..(843): n is a, c, g, or t
ggtagcgcttgctgagcggcggcggcaaccgacgtacacaaggggcttgagcgttctgtggagagagtgcgaggtcaggccatgaacttgggagatggtttaaagcttgaaactgaattactggatggaaaaaccaagctaatattgtctccatatgaacataaatcaaaaatttctgtgaagttataaagaataagcttctggtgttttaacagatgggaaataaggccaagattgcaaaatgtcctttaagaacaaaaactgggcacattctaaaatcaacacaagatacttgtattgggagtgaaaaacttttgcaaaagaagccagttggttcagaaacatcacaggcaaaaggtgaaaaaaatggaatgactttttcatccactaaggatttatgtaaacaatgtatagataaagactgtcttcatatccagaaagagatttcacctgcaactcctaatatgcagaagactagaaacaccgtaaatacatctctagtaggtaaacagaagcctcacaaaaaacacatcacagctgaaaacatgaagagcagtttggtgtgtctaacacaagaccaactacaacagattttgatgactgtaaaccaaggaaatagatctctttccctgactgagaatggaaaggaggcaaaaagtcaatatagtctatattaaacagtatttctaatcagccaaaggatgagaacattatgggattattcaaaaaaactgaaatggtttcatctgtcccagctgaaaataaatctgtcttaaatgaacatcaggagacatctaaacagtagagaatgaatggaaaccagctgatatattcagtactctnggggaaaaggaatgtgatagagttcgttggaagcaa

SEQ ID NO: 246875 - DNA, 859 bp, Homo sapiens
  misc_feature (823)..(823): n is a, c, g, or t
aaagttcctgaagtaagataatttctagttgttgatgaagatttgcaagtattaagagttagtttcttatggttatattacctaaatagcaaaatggaaaaaagtttagaggactgatttatcacagatcatataaagataattggtgatttttcttggacagttataaagaataagcttctggtgttttaacagatgggaaataaggccaagattgcaaaatgtcctttaagaacaaaaactgggcacattctaaaatcaacacaagatacttgtattgggagtgaaaaacttttgcaaaagaagccagttggttcagaaacatcacaggcaaaaggtgaaaaaaatggaatgactttttcatccactaaggatttatgtaaacaatgtatagataaagactgtcttcatatccagaaagagatttcacctgcaactcctaatatgcagaagactagaaacaccgtaaatacatctctagtaggtaaacagaagcctcacaaaaaacacatcacagctgaaaacatgaagagcagtttggtgtgtctaacacaagaccaactacaacagattttgatgactgtaaaccaaggaaatagatctctttccctgactgagaatggaaaggaggcaaaaagtcaatatagtctatattaaacagtatttctaatcagccaaaggatgagaacattatgggattattcaaaaaaactgaaatggtttcatctgtcccagctgaaaataaatctgtcttaaatgaacatcaggagacatctaaacagtagagaatgaatggaaaccagctgatatattcagtactctnggggaaaaggaatgtgatagagttcgttggaagcaa

SEQ ID NO: 246876 - DNA, 880 bp, Homo sapiens
ggtagcgcttgctgagcggcggcggcaaccgacgtacacaaggggcttgagcgttctgtggagagagtgcgaggtcaggccatgaacttgggagatggtttaaagcttgaaactgaattactggatggaaaaaccaagctaatattgtctccatatgaacataaatcaaaaatttctgtgaagtgtcttaaagtctttgcttgtctgtggatagaacccagtttggatgatgtaccactttatccttcaactctaagcccttgatggctttacttgcaggtttaattaaggtgaagaagttgctggagtacccgaaatatcactcaataaatagatgggaaataaggccaagattgcaaaatgtcctttaagaacaaaaactgggcacattctaaaatcaacacaagatacttgtattgggagtgaaaaacttttgcaaaagaagccagttggttcagaaacatcacaggcaaaagaaagagatttcacctgcaactcctaatatgcagaagactagaaacaccgtaaatacatctctagtaggtaaacagaagcctcacaaaaaacacatcacagctgaaaacatgaagagcagtttggtgtgtctaacacaagaccaactacaacagattttgatgactgtaaaccaaggaaatagatctctttccctgactgagaatggaaaggaggcaaaaagtcaatatagtctatattaaacagtatttctaatcagccaaaggatgagaacattatgggattattcaaaaaaactgaaatggtttcatctgtcccagctgaaaataaatctgtcttaaatgaacatcaggagacatctaaacagtgtgagcaaaaaattgccatagagatgaatggaaaccaa

SEQ ID NO: 246877 - DNA, 778 bp, Homo sapiens
gactgcaggacggcatggtcccatgtagagagagtgagctagccacctgtggacgcataatagtgctgaaccaggatatcaaatactggaatgcaaagggcgtgatgtggttcgactacatataatacattgttggcagtgaattgtgaaatatgggaaataaggccaagattgcaaaatgtcctttaagaacaaaaactgggcacattctaaaatcaacacaagatacttgtattgggagtgaaaaacttttgcaaaagaagccagttggttcagaaacatcacaggcaaaaggtgaaaaaaatggaatgactttttcatccactaaggatttatgtaaacaatgtatagataaagactgtcttcatatccagaaagagatttcacctgcaactcctaatatgcagaagactagaaacaccgtaaatacatctctagtaggtaaacagaagcctcacaaaaaacacatcacagctgaaaacatgaagagcagtttggtgtgtctaacacaagaccaactacaacagattttgatgactgtaaaccaaggaaatagatctctttccctgactgagaatggaaaggaggcaaaaagtcaatatagtctatattaaacagtatttctaatcagccaaaggatgagaacattatgggattattcaaaaaaactgaaatggtttcatctgtcccagctgaaaataaatctgtcttaaatgaacatcaggagacatctaaacagtgtgagcaaaaaattgccatagagatgaatggaaaccaa

SEQ ID NO: 246878 - DNA, 960 bp, Homo sapiens
ggtagcgcttgctgagcggcggcggcaaccgacgtacacaaggggcttgagcgttctgtggagagagtgcgaggtcaggccatgaacttgggagatggtttaaagcttgaaactgaattactggatggaaaaaccaagctaatattgtctccatatgaacataaatcaaaaatttctgtgaagtgtcttaaagtctttgcttgtctgtggatagaacccagtttggatgatgtaccactttatccttcaactctaagcccttgatggctttacttgcaggtttaattaaggtgaagaagttgctggagtacccgaaatatcactcaataaatagatgggaaataaggccaagattgcaaaatgtcctttaagaacaaaaactgggcacattctaaaatcaacacaagatacttgtattgggagtgaaaaacttttgcaaaagaagccagttggttcagaaacatcacaggcaaaaggtgaaaaaaatggaatgactttttcatccactaaggatttatgtaaacaatgtatagataaagactgtcttcatatccagaaagagatttcacctgcaactcctaatatgcagaagactagaaacaccgtaaatacatctctagtaggtaaacagaagcctcacaaaaaacacatcacagctgaaaacatgaagagcagtttggtgtgtctaacacaagaccaactacaacagattttgatgactgtaaaccaaggaaatagatctctttccctgactgagaatggaaaggaggcaaaaagtcaatatagtctatattaaacagtatttctaatcagccaaaggatgagaacattatgggattattcaaaaaaactgaaatggtttcatctgtcccagctgaaaataaatctgtcttaaatgaacatcaggagacatctaaacagtgtgagcaaaaaattgccatagagatgaatggaaaccaa

SEQ ID NO: 246879 - DNA, 747 bp, Homo sapiens
cccacttgttgaattattgtaatctccatagtttgttctttaaacacagctgaactctatctcattatcatcaagtttaacatatatgtggtcaaagtgctttcctaattctatcaaaatctgtgcatttttctttttttttttttttttttttttgttatttagtttttatttcataatcataaacttaactctgcaatccagctaggcatgggagggaacaagcgaaattccttctcaaaaaacaaaagcaaaaaaagccaactgttttgatacttctactcttcttgctacctatttcttttttaatttttagattaatatcagtaggaatttctcttctcttccataacttactacagcccccttttatctttgcagtgtcttaaagtctttgcttgtctgtggatagaacccagtttggatgatgtaccactttatccttcaactctaagcccttgatggctttacttgcaggtttaattaaggtgaagaagttgctggagtacccgaaatatcactcaataaataggtgaagatgatcagaacaattccacaaactacatataaaaattgtttctctttctctatcatatagttatataccatgtatgctccccaatcacagactacagattgtatgttattcctacccctttccctattaaaaattgcaactaactgctgttatttgaaacacattcacaaatacagtggcctttatcaagttcctagatgaaaagctgt

SEQ ID NO: 246880 - DNA, 549 bp, Homo sapiens
ggtagcgcttgctgagcggcggcggcaaccgacgtacacaaggggcttgagcgttctgtggagagagtgcgaggtcaggccatgaacttgggagatggtttaaagcttgaaactgaattactggatggaaaaaccaagctaatattgtctccatatgaacataaatcaaaaatttctgtgaagtgtcttaaagtctttgcttgtctgtggatagaacccagtttggatgatgtaccactttatccttcaactctaagcccttgatggctttacttgcaggtttaattaaggtgaagaagttgctggagtacccgaaatatcactcaataaataggtgaagatgatcagaacaattccacaaactacatataaaaattgtttctctttctctatcatatagttatataccatgtatgctccccaatcacagactacagattgtatgttattcctacccctttccctattaaaaattgcaactaactgctgttatttgaaacacattcacaaatacagtggcctttatcaagttcctagatgaaaagctgt

SEQ ID NO: 246881 - DNA, 225 bp, Homo sapiens
gtaagatttttctaaagttttcatgaattttgattttttcaatatgtgttttagaatatcagattcattgggttttatgtaactgtgactcttaaactctaatttaacctgtcaatctattaaaataattgttcttttagaggactttctctaatatgcaaaattatttttataagttgtgccatattttaaggttagtgttcagaatattaagaaacctagtgt

SEQ ID NO: 246882 - DNA, 460 bp, Homo sapiens
gaacattcatcaaaaggatttgaacaacaaagacctaagtttagacttggccttaacaacagggaattcggatggctaaaatggaaaatgggtgtgttcaggagtcacccagacttggtgattgttatttttgagacaggatcttgttgtgtttttcaggctggagtgcagtggcccaatcagggctcactgttggcttgatatactgagctcaagcgatcctcctgcttcagcctcccaagtagctcggactatagccatgcaccaccccacctggctaatttacagacttgggtttgagtctgtccctttctgtagtttatgggagtgggcaattttcttaactgcagaatctcagtatcttcatctggaaaatggcaataatcatactggtgggtaatgggcatctgtggttttgtctttccagcatccatatccattccgactctttaaaaaaaaa

SEQ ID NO: 246883 - DNA, 773 bp, Homo sapiens
tgctgtgtcctcacatggtggggagagagagactaggttctctgccatctcttcttgtaagggcactaatcccagcgcgggtgccccaccctcatgacctcatctcaaccaagttatcttccaaaggccttatctccaaatatcatcacgttgggcattagggcttcaacatataaattttggtgagttggggggtggggtatacaattcagaagggaaggagggaagatacatgaagccctctttggtctagtctgaccagagcccaaatagctctgctgctccctgatactccctgtgtccccgtctgtcaccagcatggagttgggggtctggggagcctgaggggagcagcctgcaaattgggagaccagtcttggatgttttaatcatgttttctagagttaccacacgatttccctctggagttgggaggccatggtaccctcctgtgccattctttggggagtgatcaagttcccctgggcctggtgtgtaggccagcctgtgagctcaaaacaaattaacttcaacatttagttacacaatgacacactggtttatgattcgaagtggtcgggcttctggcatgtatggattagggtggagccagctctctccattttttatggcagctttattgaggtgtaattcacataccatataattaacccttttaaagtgttgaacctgattcagtgctttttagtatattcacagaattgtgcagccatcatcacaatcaattttagcacatttccatcaccccagaa

SEQ ID NO: 246884 - DNA, 317 bp, Homo sapiens
atcacagtattgctggtgatactgaccatgctggcatggtcagttctgatgaggccttcttcctggtttgcagacaacagtcttcctgttattcctcgtatggtggagatagagaggaaggaagctataaagctatagtaatcaagacagtatggtactggcaaaagagtggacaaataggttaatagaacagaataaagggtccagaaatagacccacataaatatagtctgctgaattttgacaaaggaataaaggcaatacaatggagtaaaagacagtattttcaacaaatggtgctggagggggcagttgca

SEQ ID NO: 246885 - DNA, 615 bp, Homo sapiens
  misc_feature (600)..(600): n is a, c, g, or t
attaaaactatctcatattaaaaatatatgtatgtgtgtgtatgtatatatagtgaaaatgacagctataccaactgctttcttctcctcacatctttccttgttattgaatattcttcttttgtatcattttaatgtttgtagaatggccagaatatgaatatattagttttctgatattggatatttgtgtatgtttgcaactgtttctcctgttttattgaaattgactgttaatattgagatgtttagatgcttcaaaaacaactcctttctttttctctaaaaataatgctttctctggtgttgtctgtgccaatttgcatacacatttatttggaacttattagttgcacctataggccctatcctggttttcagtttgttgttgttcaaccccactactgttaattagagctgctttacaaattctagaattttcattttgtgtcaagtttctccctataagcatatattcttttcttcgtagcttttcagagtttttaatctcctgaacacatgtgtcttctctctgagtgatggtataattaaaaatttctgacaatgattacctttcaaaaccttccacaccccaaacantcaatcacacccggg

SEQ ID NO: 246886 - DNA, 545 bp, Homo sapiens
caaaggtaagtagataggtctgaatgcatggcatctcacatggtccacttcttcttgcctccattcaaaatggttatatttaatttgtgaaagtaaagcactatagattggaggcttgaagtcgcaatggtacagtggttctctgaaatatttgctctccctggatccataaaagagactgcattaaagtacttcagttcttttgcccagtaattgatctgattgggtcatccactgagcctggttgatctgtagatgcctgtttgggtcaagtgtctgctcctagaccagtgagttgcatagggtgtcagtcacatggcaaagcatgggaccatttttcttagaagaatataagtgatgggcattttgagactacacatcctattcaaggttgagtgaatgatgaattttaagagatttcacagaaatattcattgccttctagaataccaaagtattgctttctctttctctactgtcttctctgcagaaactatttatggtgtctaagtataccaagtctttttaatcctttttgattagca

SEQ ID NO: 246887 - DNA, 476 bp, Homo sapiens
gctgtgtcccgtatatcctgtcatttccatttattttatcctcaaattataaagaattgtagtgttaagtccgttattcactttaagatgcagccagaacagtgactggagtggtttcatacctcatgggtttcccacacttccatcaacacacacttcacaacaccttggaggcattgtgaaaaggtcaagctttggagatggggaagagtcctgaagatgttgggtgacattgtacagtgaatggaggctgcctgcttggcacactttccatcacacatcacattttgctaatcttttggaataagggggaaagacatttaaatgagataattagagataagaatggagattttaatcttttccctgaagtcaagaaggcagataaggagaaattgctgtcactgaaagactgtatattttacaagaagttatttcagaagcagtctctattcctttaggctttaaatgaactt

SEQ ID NO: 246888 - DNA, 373 bp, Homo sapiens
aggtcatgaactagaagtctacaagccatggatggagccaatgagagtcaacccacttgccacgggcctctagtgattaacaagctacggcccagaaagccagttccaccaggagctcccttgccagccatccacacctcataacgggcagaccgaagcagccgaccctcgagacccagtcggagcctgcgatcactcgggcgaccctcgcctaccccgccgtaaaagccgcggcctttccacctaggtgctacgggacctacccccgtggcaaggaagagcaaacccgaacttgcgcacacccggcggccctgtctgaaagagccaccccaacttttgttttgtaaaatgtatgagttttcaaatgacacca

SEQ ID NO: 246889 - DNA, 594 bp, Homo sapiens
tagccagatgtgatggaggctgagatgggaggatcatttgagcctgggaagtcaaggctgcaataaattatgatcatgtcactgcactccagcctggatgacagagcaaagctctatctcaaaaaactctcaagacaaccacaaacatctcacaccatctatatatgatgaagtaatacatataaaccagttgtttaaaacaatttcaaaattttgggtaatctctgattgcctggattatttcccatgcaagacgatacagttacctgaacaaaggaggagatgggaagaaaaaaagtttcttggttgagggcatccctaatattaagtaaccagatgacaaccagataagcataattaaaggaaagaacagagggtaaccaggttaagagccagggctaaaaactccaaagagagaggaggagacgggtgagagaaagagagagaaagagggagagggagagagagagaggagacagagcgagacagagagagagagagagaacgagacagagactctcactgagggacagacccggtcaaagtaaatagaaacagcaggagtacaacccaacaaaagttgaaaatcaggca

SEQ ID NO: 246890 - DNA, 1186 bp, Homo sapiens
tagccagatgtgatggaggctgagatgggaggatcatttgagcctgggaagtcaaggctgcaataaattatgatcatgtcactgcactccagcctggatgacagagcaaagctctatctcaaaaaactctcaagacaaccacaaacatctcacaccatctatatatgatgaagtaatacatataaaccagttgtttaaaacaatttcaaaattttgggtaatctctgattgcctggattatttcccatgcaagacgatacagttacctgaacaaaggaggagatgggaagaaaaaaagtttcttggttgagggcatccctaatattaagtaaccagatgacaaccagataagcataattaaaggaaagaacagagggtaaccaggttaagagccagggctaaaaactccaaagagagaggaggagacgggtgagagaaagagagagaaagagggagagggagagagagagaggagacagagcgagacagagagagagagagagaacgagacagagactctcactgagggacagaccagctaaaccagaaatcttaagagggaaagtaacagtgtgtgattcaagacataggtattcaatcaaatatccttttactttcgtatatgcatggaacatcaaatcactaaatagttggtgcttcttcctcaactccaaagtcaactaggtaaagtggctcaggatgtgctttaataacctctaatgcctaaacaaacataaggaaagttagtttcagggataatcatctctcccaatgtgcaagacagaaatacggatatggtgacctataaaggggtcctcaaagccatgaattctcaacaatcagggcatggggaaacaggagctttttggtcaaatgagcaaaaggagaagcagcagacaagtggggcaagcctatttggtcaaaagcacataaaccaaaccaataaattttgtcctcaaaaggaaactgtacaggtctaggctgtcactcctgcttatagaaaactgactagttagataagaagatggagaaatatacagtatttctcttggaaagaaaaatttgggggctgggcacagtagctcacacctgtaatcccagcactttgggagggcgaggcaggcagatcacttgagctcagaagtttgagaccagcctgggcaacagggaaaaaccctgtctctac

SEQ ID NO: 246891 - DNA, 1460 bp, Homo sapiens
tagccagatgtgatggaggctgagatgggaggatcatttgagcctgggaagtcaaggctgcaataaattatgatcatgtcactgcactccagcctggatgacagagcaaagctctatctcaaaaaactctcaagacaaccacaaacatctcacaccatctatatatgatgaagtaatacatataaaccagttgtttaaaacaatttcaaaattttgggtaatctctgattgcctggattatttcccatgcaagacgatacagttacctgaacaaaggaggagatgggaagaaaaaaagtttcttggttgagggcatccctaatattaagtaaccagatgacaaccagataagcataattaaaggaaagaacagagggtaaccaggttaagagccagggctaaaaactccaaagagagaggaggagacgggtgagagaaagagagagaaagagggagagggagagagagagaggagacagagcgagacagagagagagagagagaacgagacagagactctcactgagggacagaccagctaaaccagaaatcttaagagggaaagtaacagtgtgtgattcaagacataggtattcaatcaaatatccttttactttcgtatatgcatggaacatcaaatcactaaatagttggtgcttcttcctcaactccaaagtcaactaggtaaagtggctcaggatgtgctttaataacctctaatgcctaaacaaacataaggaaagttagtttcagggataatcatctctcccaatgtgcaagacagaaatacggatatggtgacctataaaggggtcctcaaagccatgaattctcaacaatcagggcatggggaaacaggagctttttggtcaaatgagcaaaaggagaagcagcagacaagtggggcaagcctatttggtcaaaagcacataaaccaaaccaataaattttgtcctcaaaaggaaactgtacaggtctaggctgtcactcctgcttatagaaaactgactagttagataagaagatggagaaatatacagtatttctcttggaaagaaaaatttgggggctgggcacagtagctcacacctgtaatcccaccacaaaaatcttttcactccacaaagatacctcctaatgtgctactgcactacaacatagaacaacatagaaagcataaataaaacagatgatttactccggagaaagtaattttttttttgctcaactgtcaactaaaccaaaatgagtaattaatcaagaaatgcagatgaaatctaaaaatcaaagataaaaccaatctgaatcactagaagagatcagtcttcttggattacaattgtatgcctaaactagatctaactgaaatgaagtggtatcctaacagttgtacctttagcacatgggtacaagaaacagaaatacgtctttatgttaactgttagtgaggcaaagcaacg

SEQ ID NO: 246892 - DNA, 1249 bp, Homo sapiens
tagccagatgtgatggaggctgagatgggaggatcatttgagcctgggaagtcaaggctgcaataaattatgatcatgtcactgcactccagcctggatgacagagcaaagctctatctcaaaaaactctcaagacaaccacaaacatctcacaccatctatatatgatgaagtaatacatataaaccagttgtttaaaacaatttcaaaattttgggtaatctctgattgcctggattatttcccatgcaagacgatacagttacctgaacaaaggaggagatgggaagaaaaaaagtttcttggttgagggcatccctaatattaagtaaccagatgacaaccagataagcataattaaaggaaagaacagagggtaaccaggttaagagccagggctaaaaactccaaagagagaggaggagacgggtgagagaaagagagagaaagagggagagggagagagagagaggagacagagcgagacagagagagagagagagaacgagacagagactctcactgagggacagaccagctaaaccagaaatcttaagagggaaagtaacagtgtgtgattcaagacataggtattcaatcaaatatccttttactttcgtatatgcatggaacatcaaatcactaaatagttggtgcttcttcctcaactccaaagtcaactaggtaaagtggctcaggatgtgctttaataacctctaatgcctaaacaaacataaggaaagttagtttcagggataatcatctctcccaatgtgcaagacagaaatacggatatggtgacctataaaggggtcctcaaagccatgaattctcaacaatcagggcatggggaaacaggagctttttggtcaaatgagcaaaaggagaagcagcagacaagtggggcaagcctatttggtcaaaagcacataaaccaaaccaataaattttgtcctcaaaaggaaactgtacaggtctaggctgtcactcctgcttatagaaaactgactagttagataagaagatggagaaatatacagtatttctcttggaaagaaaaatttgggggctgggcacagtagctcacacctgtaatcccaccacaaaaatcttttcactccacaaagatacctcctaatgtgctactgcactacaacatagaacaacatagaaagcataaataaaacagatgatttactccggagaaagtaatttttttttttgcctccttcttctcttcattcggacc

SEQ ID NO: 246893 - DNA, 658 bp, Homo sapiens
tattttttatttttgagacggagtctcactctgttgcccaggctggagtgcagtggtgcgatctccactcgccgcaacctccacctcacagattcaagcaattctcctgcctcagcttcccgagtagctgggattacaggcgcccgccaccacgcccggctaatttttgtatttttagtagagacagggtttcaccattttggccaggctggtctcaaactcctgacctcaggtgaaccacctgccttcggcctcccaaagtgctgggattacaggcatgaaccaccaccgcgcccagccacaaaaatcttttcactccacaaagatacctcctaatgtgctactgcactacaacatagaacaacatagaaagcataaataaaacagatgatttactccggagaaagtaattttttttttgctcaactgtcaactaaaccaaaatgagtaattaatcaagaaatgcagatgaaatctaaaaatcaaagataaaaccaatctgaatcactagaagagatcagtcttcttggattacaattgtatgcctaaactagatctaactgaaatgaagtggtatcctaacagttgtacctttagcacatgggtacaagaaacagaaatacgtctttatgttaactgttagtgaggcaaagcaacg

SEQ ID NO: 246894 - DNA, 437 bp, Homo sapiens
tataaagagcattcaggaagcggctctgcctatccatgtcagagaggccagggttctgttgtaaagcacagaagtgaggatggaggaaaggcgtttctagaagataggaaggcattggggtgtctgggattgatggtaaggatttaaacctattcgtggacataagaaaaggagattggggagatattaagaatgagtttgggccgggcacggtggctcacgcccgtaatcctagcctttgggaggccgaggctggtggattgcctgagctcaggagtttgagaccagcctgggcaacacagtgaaaccccatctacttgggaggttgaggcaggagaatcgcttgaacctgagaggcggaagttgcagtgaaccaagatcgcgccattgcactccagcctgggcaacagagtgagactccatctccaaaaaaaaaa

SEQ ID NO: 246895 - DNA, 398 bp, Homo sapiens
gttgtggagggctgtgcgctcagcgtggaattatagcagttcattttctaaagtgccacgagacctggggatgaaccttccgagagaagggaaaaccacaacagcagtcccctcgtagagatgcaattcatcatgggcaggacggctgggtctgtcaacaggaagggctcttttccctgtgacgcacaaaagcaatcccacgggctctgtgttgcagcaagaggaccctgaactccctcagacaccctggctgtgtgcagggagcctccgaaatccagagacgggaggcatgcatcgccatgtgagcaccgagcggaggcataatgggactccagttcctatgcccccaccatattttctctctaattaagagtggggatagtttgtggtgagggtag

SEQ ID NO: 246896 - DNA, 312 bp, Homo sapiens
actgctggtcagaggataagttctggagttttcttgtagagcatggagactgcagttaataataacatatcatatacttgaagattgctgagagtagattctaaacattattatttatttattttcttagttttttcgccccacttcaataagctagtcgaagacagtagattttaaatgttctcaccacaaaaaatggttaagtatgtgggatgataaatatgtttgatttactcattccacagtgtgtacgtatatcaaagtatcatgttgtaaactataaataaatatcatttcttatttgtcaattaa

SEQ ID NO: 246897 - DNA, 97 bp, Homo sapiens
gaagggaactgtcaggggaacggtctacagtgagcggagtacttctgcagctctcagctgtgttgtaagcactagaactgtccttgtcagacttttc

SEQ ID NO: 246898 - DNA, 421 bp, Homo sapiens
cagacccgaggagcagagaaagacttgacacacagtgggtgggaagaggcatctctgggggcagtaggtcagccagctaccttgggaaaacaacaggcaactgtacagttgattacagcaagattgacagtgtacacttgtggggaaagtgggcagatgaggaggtccacttggggaagggaaagcgaagtgacagtaattggtcatgatctgcatgaccactggaggccccagaagggagtgctttgttttcctacctttgtatggccttcatttctgcttcctataccctagtgttttcatatttgggattaagtttacagtgctctaaaagcccctgcatttatataccagtagcttccaggagacagaagatcaaaaattctttctctgccaacccaccacttagttcttaatttaa

SEQ ID NO: 246899 - DNA, 334 bp, Homo sapiens
tgggtagggaaaaaaaattccagggaaaatcatgtgaccttctcttttttaggctagtgaaacaagagccttggccatccaggcttgtaatagtaagttgcttattttagtatatgcttccctgtaaagagtgaatttcaccttgccttccagagaagcacacttctgtgagtgtgctccgggtcagattctgttcatcacttaggtgcggagggcacagctggaaagagctgggtgaggattcccagctgctgaacaaagttgactttgatgtttactttcaacacaaggccaagaaaatctggattcacgtcctgtctttatctcctcattg

SEQ ID NO: 246900 - DNA, 360 bp, Homo sapiens
cagataattcttcaaggagtagaccaaattccatccccaaggtgataatttctttgcctattctagcccacggtcgtcttgcccatctttagaatttgtaacgcacttaaagatagaatcatccagtttagtcttcgcttcatgcatatgtgttttatccacccaactaaagtataggatacttgggggaatatagatccagtaatgtcttctgtatccatgccaccaaggacaagtttttgtgcatatagtaagtgtccctgtaagtttttgttgactgtcaaattttccaagtgctatataaattcaaattcctttcacaattattgctttatataaagggtaagctacaaaaaaaaa

SEQ ID NO: 246901 - DNA, 421 bp, Homo sapiens
caaaagaaggaccagtactcaagtatcagaaaagggtagccctgtacattgctgctttttgtgggtacattgaactcactgaatgggccctgaagcagggtgcgcggccccacgaggcagtcggtgttcacccctatcgagcatggtgccatgaagcccttcatgcagatgtctctaaatgccccattcatgcagccgcagaagcaggccaactgttgattctgaaggcctttgtcaactacagtgtgctgtgcctggaatgcaaaaatgcagcaggacaaactcccctgaccattgtgttcaaacacaagcataaagactgtgtattatatttgctcagtaaaatgtggtccacagtttcttttccaaaaatttcagtcccaatgaggatttatattaaaataaaacaatggatcctcag

SEQ ID NO: 246902 - DNA, 394 bp, Homo sapiens
gatggccttgtgttgatgtacattccttctatacctaatttgttgacagttttttttatcatgaaagatgtcgaattttgtcaaatgctctttctgcatctattgagatgatcatatgatttttattcttggttctgttaatgtggtatatcatcttcatagattggcgtatgttgaatcatccttacaacccaggggtaaatttcatttgatcatgatatgtgatctttttttatgtgttgttgaattctgtttgctagtgttgtgttgagtgaggacttctgcatctaagtttatcagggatattggcttatgattttctttttgtgtctttgcctcctattcttagcagtgttcccttgaaagcaatttgtctttttataatctctgtctg

SEQ ID NO: 246903 - DNA, 444 bp, Homo sapiens
cagcctcagtgaactaaaggctttacaacagaaggtgccaaaactttttgattctcacatgtatgtttgtccatgtatctctgtgctgtggcttgaatgtttacgtccgctccaaaatttacgtggaaatttaatccccaatgcaacagtattaagaggtagggcctttaggaggtgattagtctatgaaggctcctccctcaccaatggcattagcaccttataaaagcattaaaggaaaatagctaggccctttgtgctcttgtgcccttccactatgagaggacacagtgttcgtcttctctggaagagacagcatttaaggcaccatcttcgaagtaaagactgggccctcaccagacactgaacctgctggcatttggattttgaacttcccagcctccataactgtaagtaatacatttacactgtttataaattacc

SEQ ID NO: 246904 - DNA, 389 bp, Homo sapiens
tgatcccagctatattaattccttccttcctccgttgactcatttattaaaaatttattgtcttctccgcggcatgcctttgctgggactggtgattcagaaatactagtcataggccggatgcggtggctcacacctgtaatcctagaactttgggaggccgaggtgggtggatcacttgaggtcaggaattcaagaccagcctggccagtatggtgaaaccccatctctactaaaaatacaaaaattggccgcgtgtggtggtgggcgcctgtaatcctagctacttgggaggctgaggcagaaaaatcgcttgaggtggaggttgcagtgagccatgattgtgccactgcactccagcatgggcaacagagagagactctgtctta

SEQ ID NO: 246905 - DNA, 504 bp, Homo sapiens
ggtgctccttattatcactccttggtaacataacactaacagaatcataatccatactcaaaaatataaggaagtaatgggtaaaaaacattttttctacataagcaagacaaactcagagtcaatacaagaatgactgatagattttgctgcattaaagccataatattctggccgggcattgtggctcacacctgtaatcccagcactttgggaggccgagacatgtgaatcacctgaggtcaggagtgcaagaccagcctggccaacatggcaaaaccccatctctactaaaaatacaaaaaattagctgggcatggtggtgggaacctgtaatcccagctgcacgggaagctgaggcagaagaattgcttgaacccgggaggcggaggctgcagtaagccaagattgcatcattgcattccagcctgggcgacggagtgagactctcaaaacagaaaacaaacaaacaaacaaacaaaacctataatattctatataata

SEQ ID NO: 246906 - DNA, 414 bp, Homo sapiens
ccttggtggagtggcccgcggagactgtcactggaaggagtcctctttgttagttgccatattaccgcatttctggagcatgcagtttgctcagccttgagccaagttcttggggaggagggaaggtagagaagagtgtaagatgcatcctctggaaaaagaaaatcgtgtgggagaatgaaacgtggaacagtgaactgcgtagggggcagaatgccattggtgggatgcctgcctgcccagacccacgctcaacccttcatgtgcaagttcccatttcattttgataacaacccaaggagatggttattgttggaccatttttgcagttcaggaaatgaaggctaagaggggtctgatcatttacattggtcacacccctagtaagtgaaaggctggagtgtggatgcttcc

SEQ ID NO: 246907 - DNA, 422 bp, Homo sapiens
tctcctctgtttccaagcctttgttagttgagatttctgctgctaacggccaaagccattcctcactgctattgactttcccagtatttattgatcattcttgggtgtttctcagagaagtcacaaattcttgctaatatcattcaatcaatacctgctactacttgccccggagggagcaatttacagttgaccatgtgagaagctgcatctccaccaacctaaaaacatcaccccttgaattcagagctgctgcatttctacttgaagctcaagctcaagttctgttttctctgttcatctggatccactccagccacactggcctccttgctgcttctcaaaacacaccagcctcattcctgtatctagttctatgtttttgttttgccatagcacttaaaacctttggacatagtata

SEQ ID NO: 246908 - DNA, 354 bp, Homo sapiens
tgcttgggctgaaaggctccgtgttttctattcttctgtggatcatgaatcagcaatgaatttggaggcaggtttagacccaatgatgtccaaatcacctccctcagccaaaaacaaaaacaaaaacaaaaacaaaaaaacactcttctagaaataagaggaggacaccacaccaaaaaagagacatctcccagtgtttcattttccagaagccaacccactaagagacagtagaaatcctgtccacattgccccttgaatttatcacgaattcagttccagccaagcagttgcgtcacgtcgtgaaaaggcactctttcatcatcttgggatttcatcttgggacatagagct

SEQ ID NO: 246909 - DNA, 549 bp, Homo sapiens
ttcagagatctgcatccttcaacaaatgcacattttcactgactccaaaaaatttcattcaaactttggtctgtattgcctgacttcttagactagcttcttcattcttgttcaatgaaactgtgataacctaagcggtaagttccagttggtctctctctccaacccccttcactcttcatctgcaagtttagtcactttattgaggttaaaacaggtcatagatagtatgtggtttaaaactgtttaaaagtttcacatgtgaaaatccggatttagggcctggcgcggtggctcacgactgtaatctcggcactttgggaggctgaggcgggcagatcgcttgagacctgccggggcagcatgaagggacttcccacccccactaaaacaatacaaaaaatgagccgggcttggtggcaagccctgtagtcccagctactcggaggatgaggtgggaaaatcacctgggcccgagaggcggaggttgcagtgagcccagatcgcgctaccgcactccagcctggacgacagacccactctgtggcc

SEQ ID NO: 246910 - DNA, 425 bp, Homo sapiens
ttcagagatctgcatccttcaacaaatgcacattttcactgactccaaaaaatttcattcaaactttggtctgtattgcctgacttcttagactagcttcttcattcttgttcaatgaaactgtgataacctaagcggtacaggagagggagaggacagacttagggttgtgccttcgaacaagcacattcaacgacagcctcagttagaattcccagacgctgcctgtcttcctgggtcttgaaaaagtggggaaaaagtgaggttggcccactcagactgccagtgatgctgtggtgtgacgggtgtgtatctctatctcatacaatgggcgcaggtgaggaccaggacctgcgaccttcgtacgtttacagtccctgaaagccctcacctttaattagtagggaaaataaaagtcatctggc

SEQ ID NO: 246911 - DNA, 326 bp, Homo sapiens
aagggagttgatgctggtactgccgtctagaaaatggcagcctctgccaagtgccacgactgcattgtgtagctgtaaatggctccaagatgccaggccacagatactcctttgcataggtgccctgacccaaaagccggtgttaaaatgatggggagtaatgacaatattggctgctatccctacgtgactgtctctcgattaaagaaagtatgtgctctgaattgtttttccaccagaagatgaacttgatctgactcctctacccagtttcatttagccttgatgagaaataaatgcaaacactattttcattaacacctttc

SEQ ID NO: 246912 - DNA, 1066 bp, Homo sapiens
acattagtgaaaacaccgaagtctaaataaagtctgttgtctagtaactagtatgatgataatgttaatgtgatagttttgatcagtgtaccagaagatgagatgctaccgttaggggaagctaggtgaagggtatacatgaactttctgaactacagttacaactcttgagtaaatctaaaattatttcaaaatgcaaagttaaaagaaactaactatagtctttggaaaactaaatatactgattgaaagctaattctagaaaaaccaggtctggaaaggtgttaaggccacatctcgagggagagaattttactcactcagatacccagatatgtactagatgtttgactgactgtaagtaccaaccctgacaaggtgacaagaggggtagtgtgcaacaattcttttacagatatggaacttatagaagcctatcaaaaaaaaaatctagttcctttctttccatataagcaaggctagttcaaaacacagtggcccaactaaaagaggttcaatataagttattttttggttttttgttttttgagtagcgtctcactctgttgcccaggctgggtacagtgctgtgattatagctcactgcaacctcagtctcctgggctcaagtgacccttttttttcagcctcctgagtagctgggactacaggcatgtgccaacatgcctggctaatttttgatcgttagtagagatgaggtctcgctatgttgcccaggctggaaatgtaaattttcttaatctcccatcttagacttatttggtcggcttggagttaggaaggaatttctcactgtagtgccaaacctgaaatggtaattgtgtttgagcaagttccctgaacataagggggcgaggggaggaagaggaacgatccaggccatttttgttgatacataatagttgcacatattttttcatgtgatgtttcgatatatgcatacaatgtgtaatgatcagatcagggtaattgagatatttgttgcctcaaacattttttctttgttgggaatgtttaaactcttctagctgttttgaaatataca

SEQ ID NO: 246913 - DNA, 604 bp, Homo sapiens
tgacttaacaagaacattcacagcagctttattcataacaataaaacctgcaggattattcacaatagccaagatatggaatcaacctaactgtccatcggtggatgaatggataaagaaaatgtggtatatctacacaatggaatactattcagccttgatgaggaaggaaattctgtcatttgtgataacatggatgaacctggaggacagaactcaaatgtttgtaaacagaatagaatttttaaattgtggtatattcagactatggactattacacagcaattaaaaagcataaactactgataatacaacatagataaatctcaatgacactatattaagtgaagaaaacagacacaagagggctgtttatggttccatttacatgaacaggaaaaacaaatctatggtgatagacatcagaatagtgataacctttgaggatgaggtggggcccaagggaaatttctgggacgataaaatattttgatggagaccgtggtgggtatagacatatacaaaattcaccaaggtgtaccctaagatttattaacgtttatgtaagttatacctaagagaactttaaaaccaaaaaaaaaa

SEQ ID NO: 246914 - DNA, 791 bp, Homo sapiens
ggcatggaaggatagctgggattgcaggtgttgaaaagtgtaagatgtgttctgggcacaaagtacattccaacgtgggtgaagcacagaggaagtgaatggtggggctgtaagaccagaaagacaggttgagcactgctgtggagaaccctaaggtgaatttgtacatgtggtgattcagctgacagcgggtagcctttgagaacctgagagaacagatggggtgatgcaattgaatccgagctgcagaaggattaagggactgcagttaggtggatgggatagagataggaaggtagaaggttggtcagggactgtttcagtagtcctgatgagtcatattttagcctaaattagagctgtgatagaataagaaagtggggagttatccaagatgaattgcagagcaaaaatcttcaggttttaggaaatgattgacagaagtgggcaaagacaaagtaaaatctaagataacctggtgcttctgagtctgattgcaggaggttggtagccacacggtaagggaaaggaggcccctaaggtgctcattgtcaggtttgtgcaagtgcagagttggcacctgagaatgagtgcctttttaaattgtgagctgggcaccttgcagtccagtccctaagttccctgggtaccattggcaggagtacagatagatgtcagaggaactgaggaggaaagaggtgtctctaattttggacaagctgaatttaagtgtttgaagtgtccaaagaaatatgtctagcaagacaattaaaatactgttttctaataga

SEQ ID NO: 246915 - DNA, 270 bp, Homo sapiens
catcttttgttttccattttttattatattcttttcaaagcctatcttaaagaaagtgaaatgtagctgataaaattgtatgatgtctcattaaagaagaaaaatgaaaatttataaagaaaataactaaacagaatattacttagaaatatattcttagaatacatagtaattttcttgaccatctaaagttttaaatggaaaagtgatacaacctgtttttatgagtaattttatattaaattttactactgtcatccccatcttcaa

SEQ ID NO: 246916 - DNA, 533 bp, Homo sapiens
tggtggcattatagcctacaaaatgcttcctgatactttatctcatatcatagttgaggaaactgatgcttggagagggaaagtacctggcccagaggagccgagctaagtgacagggcccggacttgagccctagtgtccttgtttcatccaagctggttacacccaccacgatgcaaagactttgaagctgtgaggacgcgagcacccagagcctggcggggtcatctcaccaaactccaagcgcacaggtctggggacactgagggttggctttgggtgctgaggctccagaggcacccagagccctgcagaggatcccatgggggcagcaggatgaggtggggtcggggaactttgtccgagaggaactggggatgcagagcccggaaaaggctgtcatatggggacagcctgggaggtgtttaaggagccaggggctcctgggatcgaatcccagctctgcctgtcaccagctgggtggctttgggcaaacctggctccagatggtcattaataaaatggggacaata

SEQ ID NO: 246917 - DNA, 127 bp, Homo sapiens
aactataaatccattcagtgggttgtataacatttatatttagtctaatttagactttgataatttaatgctacttttatattttaacaaaaatataaattaaaattttcattagtctgttttgttg

SEQ ID NO: 246918 - DNA, 1355 bp, Homo sapiens
acatgtcgcggctaactgcagcctcgaactcctaggctcaagtagttctcccacctcattctcctgaggcaagcaacaccctgcctagctaatttatttttattcttgtttttatctgtagagacagcatttcagttttgcccagactggtcttaaactcgtgatccgcctgcctcggcctcccaaagtgctgggattacaggcgtgagccactgcgtctggccagaaatctcttaaccatgggagttaagtctcaaaattctggtgatacaagtggttgaaacttaaaactttgtttaaaaaataggattagtgaatttgagataattcataagtctgtgaaagacaataaatacatacatattttacatttactattactaaatttgtagtaaatttgagtacagcactacctctttatctgtgaaaacttcagactctcccctattactttaatttcagtgagacagggtttcactatgttggccagggtttcactatgttggccaggcttgaactcctgacctcaggtgatccacccgccttggcctcccagagtgctagaattacaggcatcagccaccacgcccggccaggatagggatttattgactcacttaggcatttatctgttctcagcatagctggatcattctagatctattctagaggtccaagcattaacactagctcatcctgtttctcagatctattgttctctgtgctgactggcttcattcgtaggccttctgtagtaagaggaaaatggctttgggtacttttgacttccatgtccttaacacctatgtctcagacagagatagtatcttttttgataattctggttaaagcacaagaagttctttcattggttcagcttggattattcctggtccaatcagtggggtctgatgtttggattggatgggtgtgaatggtgtacccacctccctaatggggatgcagtgaagtatagggtggttaaccatcccttatcaccatccataccctatggatagattttctgataagaaacacagaagaaaggaaatgatgctaaagagagtaaatagttaactgttaaaagaccaaaacctagtacttgtgtcatctaatagagaatcctatgtacattgtacacttccttttttttagaaaaattaaaataattttaaatagtctttgtgaaagcttcaaagattcttccaggccttatgtgtttgtcctttcagcttttcattataactttatgaaaatattttagccactcttttaacaatttattgaatgtctgctatgtcgttttacctgcagtgtcatttaatcttttctcaagttgataatttaaaaaataa

SEQ ID NO: 246919 - DNA, 417 bp, Homo sapiens
ctatggagctctgaggggtactcttaaatacaggttttgtataaattgagagattgtgccacaggaatagagagaaaaatttcgaagattctcatggagagccgatgtattcatgaggactgttgatccaatatcaagcagaacaggagttagttacatgggctgaactaacagaagactgagttaatcttttacggcttcttcaaaacatttgctgactctttgttttgtttttcagagtcaagaaaagtttctcttcttttaagctatttaaagctgttaacaattgagtaaaggatactcttatgagcaaaatttgaaatgcaacccctttctcaaaacctaatttctttaaaatttgaaaactgttttgtgagcattcttaatttatgacaatatagttatctgcataagttc

SEQ ID NO: 246920 - DNA, 362 bp, Homo sapiens
agacattcagctcgtaagttccacaagcttttttatttcagagttgctgacagtgagcaggtccctatactgaggataatatattcaaagctttgttcttgtttttttcttaattggtcagtctccctgggggttctctcagttttcacccagactcctgggtgagagggctgaaacagaaatgcatggtgaatgcagatggcttgtttcctggccgtcatcacacacaggggtcacatgaaggccagatattgcccaattaagttccctaaggtgggaggttaggctgagttggaggaggacagaggactgcactcagagtggccaaaaaattggcaattacctgcaatctcagttttagg

SEQ ID NO: 246921 - DNA, 416 bp, Homo sapiens
gctggcaacattgttccttggctggtgtctgggaacttgcatttaggaagggctcccactattccctgaatagtaagggtggctgttctctaaactgttcatgtgagtaatacggtttgtgctgaatacctggatttcttcagggagtctgcaattcatgtttgtgctaggcaggggatgcctacatgaccagctccttataaaaactctgggcactgagtctgtaatgagcttacctgctagacagtgttttacacatgctaccaggactcactgctggaggaattaggcacatcctatgtgactgctgggagaggactcctgaacttgcgcctggttttctcaggaccttgtcccaggttctgtgtcccttcactgattttgctttgtatttttttgctgtaataagaccctta

SEQ ID NO: 246922 - DNA, 419 bp, Homo sapiens
acgtttatatcatttcacttctatgtagcctatggtggtagatattatttatccctgtttagcgatgaaagcaacatcaggtaagcagttaactcaagggcacagttagtaggagtaccatttggaatcaacgttggtcttatgactccagttcaaatttttttcacatcatagttgtgtttaaatgtaatgtctttatttgaaagtaaacctacaaaggctaccaaggataatctgaaagaaatacaatgatatgttggtatttgataagttttgttggcaagtgtctttgcttttttgtatgcttaaaaatatgtaaaaaaatagattttcaaaatgataaaacaaaaactataatacaaaaaaggatgctaatacataaaatgttcttgcagataaataaatgaaaactttggata

SEQ ID NO: 246923 - DNA, 336 bp, Homo sapiens
ctcccagccccctccccattttgctcctccccattttgctcctcccagtagtcggtccccccatccttctcctggccttccatccccagctggaacagagatgaaggccgccttgccagccctcagtatcctgatggggaggtgtcaggcccactcacagacattagggaacctgggccaaggtaatgaagcagcggggcagggcagagccaggccggttttgtctctgggagaatgtttgactgctccagatcagggtcaccatcttgcctctctgccacccccctcccccatacccctgtcatgccctccctccaggccttgagagcattctct

SEQ ID NO: 246924 - DNA, 572 bp, Homo sapiens
agctttatcaccattattgtttacttgttaagtctcttttagctgactcatatttttaactttaacaaacatataaaggaaacttgtattactaccatatatgtaaaattggtattacttgccatatatagatgttagctgtttaaaaaaaagaaaaaggagttcttggttacttagtctgtaacttgacatagcagagtgaccccaaaggctcccttcctcttatcttgttgtccccagaggcattttgttacaattcctaacttttttttttgaggtgaggggctgcaatgcaattggatcacaggctatgtattgaagctagccaagctgcatgtaccctaatttacctctctccatccttccacttcccatccccagtgaagtgtatcacctaaaatcatctcccacaccacgagaggtgtgcaatacatagtttgggaaacactgatctgactaccttcttcacagagacccacctcgaattcctttccctttgaaaaaacttttctaactaattcagacctcagtgatcccctcaaccacattcataaagctactgtgtctattta

SEQ ID NO: 246925 - DNA, 359 bp, Homo sapiens
tgcttaggattgctttggctatttggggtctcttttggttccacatgaattttagaaaagtttttttcttattctgtgaaaaatgactttggtagtttggtaggaatagtgttgaaatctgtagattgctttgggcagtatggacatattaacaatattggttcttccaatccatgagaatggaatgtttttccatttgtttgtgtcatctctaatttctttcagcagtgtgaattttcttaacataggtcttcttgggccagcttgccttcagagcagagaagaaaagctaacagtttttgatagctactgttactgatagtgaataacataagaatcgcctttgatctattttggtt

SEQ ID NO: 246926 - DNA, 499 bp, Homo sapiens
caatctaccaagttcttcgccactgttgttttatgatttcttttaggatgggaagactaaagagaatgtaagttttaaagagaatactcctcttcccgttgtaaacccctatttacctctgccacaggaggaaacagcaataaaagcaacctgtagagcagtcacttctcgaaaggatgcctatttggtagttccaaaaccataaaaaaagaaaagtcatttttccctttctgccaattttggaagaatacatttttctggttctctaaaaacaacattaagacttcctttccacagtgaagagaagagagcatgagctgattacttggtcctacaaaaaatcatccagatgccattagaactgggagcgattaaaaaaaatgacagtcaactgagggctttgaggattattcaaaacctcaacttctcccaaattctcaagaatactttatctatgtaatacctgaatataattcttgatctattgaattctacagag

SEQ ID NO: 246927 - DNA, 629 bp, Homo sapiens
tttcttccttatggactttacatcctaatgctggagacagacaatgaacacataaacaaggactgtagtaagataatgaagaaaaacaaagcagggtgcaagggatggggtatcattttagatagagtggtcatgatgggcctctcagagcctgaataaagagaagggctttacgcctgcaaatatctgagggaggagagtggatgagaagtcctgaggcagaagcatacctgtcctagaagaagcaaagatagatgtggttaaagtgagaaggtaacttttttggaaaaaaaattgaacttgcagaaaacttgtaaaaatagtacaatgaacttttgtatatgcgtcacctaaattaattattaaatttctgccacattcaggctatttatctagctatgtatacacatacacattaccattatctgctgaattatttgagaataatttgcagaccttttacttcaaaatatctcagtgtatgcctctaagaacaaggatatgctctttaataattcataaaaatttaacattgtataacactataatctaagagttcatattcaaattttatccgttgtctcaataatgtcctttaagaaccatttttccccctcatcagggtccag

SEQ ID NO: 246928 - DNA, 328 bp, Homo sapiens
ggaaaatgtagtccaattccaggtatcgtgcacctctaaaaataaggattatattcagaaaaagtgaagaatagataatggggagcagactgcattgggtctaacatattagatcagaatctaatatttttaaggtaccgaatgtatatcctatcacatcttgatttggatgaggcttttcattttatagatggaggaaactctgaagccttcccttgtgtgtctgtgatatatgagcttttaacttctcatttatgaagttacaatagatatataattcttaccttattgtgtgttctctaagaagcacagtaaaaataaaatgaag

SEQ ID NO: 246929 - DNA, 249 bp, Homo sapiens
gcagaaaactccgggaaaaattttatttatagctttatcctgggggctgttttgcttttctacatcttcagagtggaaatgctgtctaaaccaatcagttaacaatttggttaactattgttactgccattattttggtttcctgtgacactggaagaatgttttctagcttggtcccttgtccaagcaaatgttaccaatttttaaaaaagagactgcgcaacatcctcagaagtagccaagtctagc

SEQ ID NO: 246930 - DNA, 381 bp, Homo sapiens
tctaaaggatggagtttaggctaaaggaaagtgatccaggtacaataataatcatataagaaattgtgaagactattttcaaggttcatttctatagttcactactggagaagtttctctgaacatgtggaacaccaggaaacatgaggaagaagcacagcattctctcctaaatgtgaagccagctgttggtgttgctttgctataactgctatttgccattgatgattattttcctcttcttcccagagagtaagagggagaggatgcagtctgtgtggttcccattaaaaagaaagaaaaagaaaggaaggaaggaaggaagaaagaaaaaatttttggatagaataacaaagcgataacaaagaaagataaataaaa

SEQ ID NO: 246931 - DNA, 368 bp, Homo sapiens
ctgcatggaggaaaattgctttctgtaaatcttggtccaacagaacaaaacacctatttctttccagttgggaggacagccattctcatcggtataatgaacgtattgtaagctgtgacttttacaaagtctgagggaaaccaatctgcaatcttgacagatacgatctttccagatgcactgttcgtttacggcggcaagagagctcaattaatttctgagggaggacggcaggatgcgaccccttgtgcgtggcctaggaggaactgtccctgtgtgaatttatgttctggtaatttaaaaagatttatattaagcttttctttcattttgagagtagattaaaattctaatggaaaccatttgta

SEQ ID NO: 246932 - DNA, 601 bp, Homo sapiens
acgtagtcctctcaaagtgttgggattacaggcgtcagccactgtggcccactgtggttttggtttttccagcaagtgagacgtgaaagagcaagaaaggaagatgcggttgttgtgtgccagtaaccagctatgtgacctgccacttgcgaagtggtagattttcttcatttataaaatagtgcttagagagaataaggagaaaagaaagctggggagaggggttttttctaagatctctttgggttaaaatgatttgtgatttattgggcaacatatacgagcaagattatagcaggaaagagatgtgtcaggaaagacttcagacattgtggctgttgaatctggaaagataaatggaaaggagcaatgtccaggatccttgaaactctggccaggataatacagacatgtccaaaaaggctccaacttggatttaccaagggaacctaacagtgtaaattttaggacagaccaagtgcgatggctcaagcctgtaatcccagcactttgggaggctgaggcaggaggatcatttgaggccaggaatttaagaccagcctggggcaccatactgagatcctatctctacaaaaaaaaa

SEQ ID NO: 246933 - DNA, 350 bp, Homo sapiens
aggagctcaatgctgcctagtatccaatatccaaatagagcaaatactctagaaatgttctgtttgggcacagtagaaagatcattggaataagagtcaaatgacctgaattctaaatccagttcttccccttatttgctataattgactttgggccagccttttaacttctttttaacctcggtttgttcccaagagtataaactatttgcccttcctaccttccagagttgccttggaaataaagtgaccccgtggatgtaaaagtgctttgcaaaccaatgacctagagaaatagaaacttcttcctttcaagccacatttctcctctttccttcactacaaaatct

SEQ ID NO: 246934 - DNA, 482 bp, Homo sapiens
tggtgggcggggatggcgtgcagggtggtgggagctgggcctggggtctggttctagaagcatcagggctggagggccttagacagttacgaggaagggtcgtctaccaggcctcggtgagagaagtgagcccccaccttccagtcactgggagaggactgaagaagcagccatcccccaagcatctccatcctcaaaccacacagagctcccgcccaggcactgagagggccctggggttccaccagaaatggaaagtctgatcctaaaattcatacggaattgcaagaggcctcagattgccaaaactacccaataaaagaactaaattggaagacttacacgtcccaatttcaaaaattactacaaaactgtagtaatcaagacagtatggtactggcttaaggctaggtatagagacaatggaacagaattgaaagtccaaaaataaaacccctacttttatggtgaactggtttcaa

SEQ ID NO: 246935 - DNA, 451 bp, Homo sapiens
taaattcaatcaaagaagtacacaacttgaacactaaaaactacaaaacatcattagaagaaattaaacatttaaatatgtggaaagacatcttgtgttcctcaattagaagaattaatattgttaagacagcaatagtccccatattggtctacagattcaatccaatccccatcaaaattctaactgctttttttttctttttttttttttgcagaaatggaaagtctgatcctaaaattcatacggaattgcaagaggcctcagattgccaaaactacccaataaaagaactaaattggaagacttacacgtcccaatttcaaaaattactacaaaactgtagtaatcaagacagtatggtactggcttaaggctaggtatagagacaatggaacagaattgaaagtccaaaaataaaacccctacttttatggtgaactggtttcaa

SEQ ID NO: 246936 - DNA, 506 bp, Homo sapiens
tggtgggcggggatggcgtgcagggtggtgggagctgggcctggggtctggttctagaagcatcagggctggagggccttagacagttacgaggaagggtcgtctaccaggcctcggtgagagaagtgagcccccaccttccagtcactgggagaggactgaagaagcagccatcccccaagcatctccatcctcaaaccacacagagctcccgcccaggcactgagagggccctggggttccaccaggtgagtggcactggtggggaggcctggggacccctgctgcagaaagggccacgacagattacagtgagcccctgaggacatctttgaggttggggcctctgagctcaggtctcaggaggtgtctgctggtggcctgatgggctgcgagggtcttggtggtcagtggcccccccatgaacagcagcaatgcaagctgctcccacagaggagggggcagagtgagggcttctggggcctcgtccggatctcaaggtgccc

SEQ ID NO: 246937 - DNA, 437 bp, Homo sapiens
gtaggtaacaggaaaaatattaagtcatggtgatttacaaagtggtcaccaatggaagaccgagtacaagaagatgccttataaaaatgtctggtttttggaaaaagatcttgcaaaagcttgaagaaagaatgaaaaagagatgagtgaaatgagagttctaaaaatgatgaaagaggaaaaactgactggagaggtggagaaaaaggctcaggctgctgtgagacatgaaccaatatatgaattatagaatataggactgatttgacaaacctctgaaaatagacaaccggaaattctaactatacatctcatttcttataaaacttaaaagatagttttctcaaataataggccctagaccaaacttcttgttcaagccatattatatgtctataagatatgtacatataaataaaattccatgtagatctgta

SEQ ID NO: 246938 - DNA, 450 bp, Homo sapiens
tcaagagatgagatcaagccctcattggtgaggatgtggctatggtccactggatagggcagaagttcactgaggtgcctcaagttacagttgggtctccggctggtgggccaggactggagaggatggagccacccactgaggtgccagcaagactctctttgggctgtgcaccaccgcgtctcccacacactaatggtgaggaagccatgggctgtggtgtcagtgaaatttactagaaggtgggtgccactacattttccacacatgctaaccgtgcggtgctgtagaaacaagaagcaaggcacaccagaaccagaaagaaaagctttttcttttgctgttctttgcagtgttcttcctgcactgtctactaacagagactaacgttatacgagctgccaaagaggaaatgattacagggtccagctctagtatcacaaaatgtgc

SEQ ID NO: 246939 - DNA, 610 bp, Homo sapiens
atgggattagtgaccttaaaaaagagatcccctcccccttccaccatgtgaatatatagcgggaaggttctgtctatgcggaagatagtccctccccaaacacaagaattagctggtgctttgtcatgaacttcccagcctccattgttataactgcccaaacgtactaagacagaattaaccctatattgtattaagtaaagctgtttcaggttttattagtgattatagcataatcaaggattacccttgctaatataatgtgctctatttcttagttctctattatgttctattgatatatttgtctacccttgagccaatactactcatcttagtgatggtagcttcatattacatcctaatatcttagagaacaaactcttgcttcccctctgccctgcccaattcttttttttttacaagcctcttgtcttgatcctttgctttttcacataatttttaaaaatcagcttgttatgtttcatgaaaaaaatgaaattttcattagaattatattggatcaatagattaataatttggaaagaacagatatactcacgattctgagtgtcattattaataaatacagtgaatttgtctatttgtc

SEQ ID NO: 246940 - DNA, 423 bp, Homo sapiens
ctgtcacgggctgttgtcagtgctgttcccatcggcctccttctcccttccgtgccagcttctgactgctgcgctcagccctcctgggaacagcccgatctgcagaggtcatctacctgattttatgatctggaggtacagcatctcctgaaaagggcctctgtatagaaaatgaggcacatcatcgggcgcgtgataattgcatccacagtctgatttaaattgtctttggatattctctcagtggccactcaggtctttgaaaatgtagcactgggcttcttatcgagctcaggcctggaaacagatggtctatggtcgggtgaggtggctcacgcctgtaatcccaacactttgggaggtcacagagggaggattcctttaagaccagcctgggcaacatagtgagaccctgtgtctaaa

SEQ ID NO: 246941 - DNA, 418 bp, Homo sapiens
acaacaatcaaatatcggattctagactggatcctgttttggagggggaagatcaatataaaggacattactgggtcaatttacaaaactggaattgggaaggtagattagaaaaaagtattatcaatagttgtagttataaaaaaaactggcagttcttctcaacttgggtctgcagaagtcttcatgccctgaggcatccgttatatgtgagggattagcctctctcctgtgcataccagctaagtacatccttgagagaatgggaaaatagttcactcaggtcattttctgtagggctaaattctctcatggagctggataacaggctgtaaaggaatatcttcattcttaggaaataggcactgcagtatttaggagtaaggcatcatgacttatgcaatttactctctagtca

SEQ ID NO: 246942 - DNA, 370 bp, Homo sapiens
tactggatactggtcagtcatagctataaaaattagagcacaaatggggaaagcctgtcttaaaaagacctttcttacaaaagcaaagtcagtcaaaatgttgaagaggtatagcccaaaagtcactgcatcctgtttcttctagtacatcattctgaaagcagagaaggtgccaggaaaattcttaatctatctgtgcttttccagaatatagttattttcaaaattctctaaatgtgcaacctagaatattgtgaacaaactttttaaagagctaaaatcatcaaaatgtacatgagaaaacacagacccacagactccatcatctctatgttcttatcctatcttctggcctccaaaaaggcacaca

SEQ ID NO: 246943 - DNA, 749 bp, Homo sapiens
actggatctttactccttaaggcatgaagttttagaaaagtcttaaatgacacttgctgttatctctgcctgcgtgtgagtgatgctaacccatgttggtaattcaggcttttctttcattggacacgtttcactgaggcttagaaataaccatttttctaagtaccatgacaaataccacatgggagaagctgcttttattggaaaactttcatttattaggggcatactgaatttttatgtcatgtctttggttaacacaggaggcccccagcttatcttcagccccttcttgtcaagactcctgtgttctgcttttaggctaacattggctgtgacctgacttggcttgttcatttcagaaatagccactttctgacatgtttttctaatttacatctttgtattttgatgtaatttctccctttctcaaagtaaaagaacattataatgatttcctagtggccaattttattttatttttattcttacaaagtttcatccatacctagccacatcattttgactatctccctaaccatcttagaatctaccatctttctgacctttgttttctgactaccatttgtaaaccacttgcctatgttttattcagatatcccttatatcatgatgttatactgttattcagagtaatttcattttttcttttttgagaataggccttaacaccagtgtcagagtggtttatagatgtgtgctagctattttagttcattaaaaaaaaa

SEQ ID NO: 246944 - DNA, 279 bp, Homo sapiens
gaaatatgctaccaggaaagaaaactaatatcccttaagattattgaggcaaaatactcaacaaaatactagcaagccaaattcaagagtgtattaaaaggattacacatcatgaccaggtgggatttattactggaatacaaggatggctcaatacacaaaaatcaatgtaatgcaccacattaacaagtaaaggaaataaaaacacataatcatctcaattgatacagagaaagtatttgacatagttcaataccctttcatgattagaaaaaaaaa

SEQ ID NO: 246945 - DNA, 412 bp, Homo sapiens
tcacaccttacacaaaaatcaacttaaaatggatcaaagacctaaatataagagctaaaatcataataaataaatcactcttagcagaaaacacagggagaaatctttgtgactttggaataggcaatgaattcttaaatatgacaccaaaagcacaagaaactaaagaacaaagtagataaattgggcttcatcaaatataaagacttctgtgcgtcagaggacactatcaagaaaatgaagccagcccacagggtgggagaaataaacatctatcgcagcattctcctccacgcctcctataaaaatattccccgtgctgaccacaaccactgctcctcctccctgcttccctcgccttctgcctctggtcctttctttgccattacttctcctcttctttttttctctg

SEQ ID NO: 246946 - DNA, 393 bp, Homo sapiens
cataaattaatgctgatcttgctgtaaaaattaagtaattcgaaatcaaagctgttggaactttaaattattttgagacttaaaggagtgtgactataagacctgaatcatgtaaacaggcagctgtaacctttgttcttctcattatagattagcctcttctttacctgcatcattgtgcagtatgttgtaaaagacaacagggtgccaaagaagaccactttccctcttcactgttgatctctttatacactgacttcccttttacttctcccagacaaagacttcacgactatcacgttgtctaagatggaatgttaaatatacttttaaactggaaaaggaaaacaagttgtaatcaaattgctgtatctcataaactggccttgtacg

SEQ ID NO: 246947 - DNA, 500 bp, Homo sapiens
agagaatttgggatattcttccctcttaaattaacttttaaaatagtctaagtaacaatttttaaattatttaacttaagttcgcagccccacctggtaccaggcgaacttcacctcttaattattgtggccctcggagccttcatattgtaacttatttatttaacttattcagcatctgtgaaaggtgcactgtatagtttatatttttaatttaaaacaacagagagcactgcagtttgtttgctgtcagaacaacagagcaaattttgtggacaagcaatgactattcagcctgaacctgtgcattcagaaaacataagctgagaccctgcttcaccagcctggatttcggggcttctatacagaaactggaaaaataaattttaaaaaaatcgtaaacaaaaagagagaaacccttacactagctgcttccaagaatgaactctgtgtgtatgtaaagcaacaaaacaaaaaaggaaaaaaacaaaaagcagaaa

SEQ ID NO: 246948 - DNA, 338 bp, Homo sapiens
ttaactttttctagagacagggtgtcccaatgttgatcatgttgatcttgaactcctgggcttaggcaatcctcccgcttcagcttcccaaagtgctgggattacaggcataagccactgtgcctggccttcatttgaatgttaatagccacatggggccagtggctacctcactgaacaggccaggctttgcctgtgaaatgggatgatgactcctgcatcacctatcttactgaggtgcagtaacgatcaaattagaactgggttgagaaaatgtctgaaagaaccgaagcttacaactgtattttactggatattaattattgctacaatatttt

SEQ ID NO: 246949 - DNA, 514 bp, Homo sapiens
tcatgccatgagctacaggagctcagcatggcatctgtgatattcctgcccaacatacatgacagaatccaatcatggaaaagcaccaaaaaacccaagttgaaggacaagtctaccaagtagctggccaggtaatcttcacaaaggtccgtgtcatgaaagacaaagcagcagaaactttcaaattagaggggacagctaaatgcaacacatggtcttggattgttttgttataaaggacattatcatgaagtctgaataaagtctgtagatgagatgagagaattccctgtttttaggaaatatgcaacaaaatattcagagtaaatgggcatcacatcttagatgactcagaagaaaaagggaagaacagagataagtgatacagtgaaacattgatgtttgggggatctgggtaaacaatattcagaaattctttgtaccgtgttgcaaggtttctgtaagtctgaaactatgtgagaacaagtgtttaaaaataaagcataaaatgtaa

SEQ ID NO: 246950 - DNA, 378 bp, Homo sapiens
actgttgtttatttttctttttatttggccaatatatattgagtacctactatgtttcagcccttgccagggtcctattaggaaaaaatagtgtggcacatgcctgtaatatcaacacttcgggaggcggaggtgggagaatcgcttgagcccagaagtttgagaccagtttgggcaacatagggagacgtcctctctaaaaaaaaaatttttttaattagcctggtgtggtggtgcacgcctgtggtcccagctgctccagaggctgaggtgggcggattgcttgagtccaggagattgaggctgtaatgagctatgatcgcgctgctacactctagcctgggagacagagtgacagtgagatcctgtctccaaaaa

SEQ ID NO: 246951 - DNA, 483 bp, Homo sapiens
gcctagagtgaattttttcaaaggtaaaaaggagcccaaatttcacagaatgatctcccgcttcagaaagggaaaccctctaagtacactatacacttccctgcctgttttctggagagtgataccgagtgttggcactgtctgcaaggaaggaagtaggactttgactaattgcacaaacagcaattttgtgtttttgaagtgcgaggactcagtcctgtgtccacgaagcctccttcaggaggttacttcttgacatagcccatcaaccggacctcccgttgctaggttctgagccttagggtgctttcaaatgcaatatctaggccaggagtggtggcccacacctgtaatcccagcactttgggaggctgaggcaagaggatggcttgaggcaggaggatcgaagtcaaggtgccgcgagctgtgatcgtgccactgcatgctagcctaggcaacagagcaagaccttgtttcaaaaca

SEQ ID NO: 246952 - DNA, 402 bp, Homo sapiens
gcctagagtgaattttttcaaaggtaaaaaggagcccaaatttcacagaatgatctcccgcttcagaaagggaaaccctctaagtacactatacacttccctgcctgttttctggagagtgataccgagtgttggcactgtctgcaaggaaggaagtaggactttgactaattgcacaaacagcaattttgtgtttttgaagtgcgaggactcagtcctgtgtccacgaagcctccttcaggaggttacttcttgacatagcccatcaaccggacctcccgttgctaggttctgagccttagggtgctttcaaattgctaggattacaggtgtgagtcacggcacgtgatatcagtagtcaggttgtctgttttcttttccatgcaaagcaaaacttctttg

SEQ ID NO: 246953 - DNA, 340 bp, Homo sapiens
aagtaaatatgatggcagtagaggcccagaagtgttggagtaacaaaggacagttttgcccttctgtgggtgatgtgatggaagacacagaggggagctgtaggaagaacagaggcagtgaccttaatgtctgcaatcattaagactctgctactttgagtagttcacagagcatagtaacaaacttgaactgtatccattttaagttatacaatggttgtatcaatgtttcaaataccagttgttaaatggatagactgctaagcattatgtacccagcaatccatttttgtgaagtagtaatattgttataataaagtttatattttttgagtactca

SEQ ID NO: 246954 - DNA, 390 bp, Homo sapiens
tggagtaaaaaaaaagtttgagaaacactcttacttaaaattctagggaataaatccagaaaatgaatacacagatggaacatttcatatatgaaaccaaaacaggaaaaaacattaccaagagacattaagaaaataaacaagcatacaaaaattctctgaagagtacaaagaggtcagaaagtaaacggtttttccccaaatcagttttgattttagcttcttcgctgggactgcaaatcatttcaagactttaaggttctcagagtacaagatatggaaagtctgggcccaggcggggaagaatgagggtttcatccctacaaactgattctgttcaaagtttcaaacaaatgttgtctctggatggtaatcaacaaagaaaaaaag

SEQ ID NO: 246955 - DNA, 905 bp, Homo sapiens
aagggaaaaggggagcaaagggaaaacaggccgaagtggctaaccaagaaactaaagaagatttacctgcagaaaatggggaaacgaaaactgaggagagtccagcctctgatgaagcaggagagaaagaagccaagtctgattaataaccatataccatgtcttatcagtggtccctgtctcccttcttgtacaatccagaggaatatttttatcaactattttgtaaatgcaagttttttagtagctctagaaacatttttaagaaggagggaatcccacctcatcccattttttaagtgtaaatgcttttttttaagaggtgaaatcatttgctggttgtttattttttggtacaaccagaaaatagtgtgggatattgaattatgggaggctctgactgtctcgggtgtcagcttaacattccacagatggggggttagtttttatatcctataatacaaagcatattaaatggcaatatggagtcagtcctgcatttaatgtcttgaacattttaaattacttctattaccatgttgttttttagtagaattgtttcctaaagaaaaccactctttgatcatggctctctctgccagaattgtgtgcactctgtaacatctttggttgtggtagtcctgttttcctaataactttgttactgtgctgtgaaagattacagatttgaacatgtagtgtacgtgctattgagttgtgaactggtgggccgtatgtaacagctgaccaacgtgaagatactggtacttgatagcctcttaaggaaaatttgcttccaaattttaagctggaaagtcactggaataactttaaaaaataattacaatacatggctttttagaatttcgttatgtatgttaagatttgtgtacaaattgaaatgt

SEQ ID NO: 246956 - DNA, 786 bp, Homo sapiens
aagggaaaaggggagcaaagggaaaacaggccgaagtggctaaccaagaaactaaagaagatttacctgcagaaaatggggaaacgaaaactgaggagagtccagcctctgatgaagcaggagagaaagaagccaagtctgattaataaccatataccatgtcttatcagtggtccctgtctcccttcttgtacaatccagaggaatatttttatcaactattttgtaaatgcaagttttttagtagctctagaaacatttttaagaaggagggaatcccacctcatcccattttttaagtgtaaatgcttttttttaagaggtgaaatcatttgctggttgtttattttttggtacaaccagaaaatagtgtgggatattgaattatgggaggctctgactgtctcgggtgtcagcttaacattccacagatggggggttagtttttatatcctataatacaaagcatattaaatggcaatatggagtcagtcctgcatttaatgtcttgaacattttaaattacttctattaccatgttgttttttagtagaattgtttcctaaagaaaaccactctttgatcatggctctctctgccagaattgtgtgcactctgtaacatctttggttgtggtagtcctgttttcctaataactttgttactgtgctgtgaaagattacagatttgaacatgtagtgtacgtgctattgagttgtgaactggtgggccgtatgtaacagccatttaggtacagccatttaggtatagccatttaggtaacag

SEQ ID NO: 246957 - DNA, 695 bp, Homo sapiens
aagggaaaaggggagcaaagggaaaacaggccgaagtggctaaccaagaaactaaagaagatttacctgcagaaaatggggaaacgaaaactgaggagagtccagcctctgatgaagcaggagagaaagaagccaagtctgattaataaccatataccatgtcttatcagtggtccctgtctcccttcttgtacaatccagaggaatatttttatcaactattttgtaaatgcaagttttttagtagctctagaaacatttttaagaaggagggaatcccacctcatcccattttttaagtgtaaatgcttttttttaagaggtgaaatcatttgctggttgtttattttttggtacaaccagaaaatagtgtgggatattgaattatgggaggctctgactgtctcgggtgtcagcttaacattccacagatggggggttagtttttatatcctataatacaaagcatattaaatggcaatatggagtcagtcctgcatttaatgtcttgaacattttaaattacttctattaccatgttgttttttagtagaattgtttcctaaagaaaaccactctttgatcatggctctctctgccaggggttgtgccaattaagagacagtctagggtcgaccggcgctttgcatatcagaataaagctaatgtacgcagcgctccacggcgttttacac

SEQ ID NO: 246958 - DNA, 429 bp, Homo sapiens
tttgtccttttcaacaagggcaggaccatccctgagcaactttttggaaatgaggggatgggaaagtgagtaatgaaagtaagtaagcaagggtcagagatgccaaaggcactgaaatgcctgggtggtgccacacaactaagaattagactcctagggcctgaatgtttgtgtctccccaaaattcatgcgagtatcttaactgccaaggtgagggtattagggcagacccctcaggattgggatttgtgctgatataaaagagatcccagagggctagctagccccttctaccatgagacaacacagagaaggtgccgtctatgaggaacgagcccttaccagacactgaatctgccagcaccttgaacttagacttcccagcctccaggactgtgagaaataaatgtttagtttttgatccaccca

SEQ ID NO: 246959 - DNA, 366 bp, Homo sapiens
gaaaccttccttactccaccactacctccactctctacagctgacttctctccccctttatggtttagtcttgtttcccaggagacatcatcagctgcttgagtatagagacaggctttacaatttttctgtattccctgagctgggacgatgtgtagcacagatgctcaataagtacttgcttgttgattaatcacggtaatgaagctatttattggtcataaaccacggtggggtttttgtcttcaagaacttgttgctttcctcttagaaggaagaggctggccacagtcaccattctgtcctagacacttagcataacattcacctgcttaaatgaaaggagtaggaggacagatggacatg

SEQ ID NO: 246960 - DNA, 375 bp, Homo sapiens
ctgagaacttgctgtccaggcaaaaaaaaaactcacgatgaggaatacaacacaaaccttaggtggccagcatgtcagcaaacagagagacgaagggacactgacaaaagccaacccctcaaaagaaacaaagcaacacaccaaagaggtagaaagcaaaggattaagatatgcctagaatgctcttgcttatcaggacccttaaaactaatcaaggttcctgggaatctgaattaacattaatacctgaattttaacagaaattacattagacattcctttaggcaaaagagtatatatacaacaccgacatctggttataaagagctaaggaatctcccagcttccctaaatgcagaagatatcctagtggat

SEQ ID NO: 246961 - DNA, 519 bp, Homo sapiens
ctcgtgcctgctttcctagaaattagagcattccttttaaatgccactgccagttgcactcaatttctggactacagttttttaggccaatgtttcagaaggatggtttttcagttgatttcctcttggtcccttcccactttgctgctatgaaaagagataatgaaaaccacgcgattctccccaggcctctttcttttgccacccagccttactactactttcaattgattataaagagagaacaagaaaagaaatcattacccaagagttgctttatctaatttgggtcaaaaattctttccccttccaataaaatttctgaattacccaaactactcttgagtagttctaaccaaatttgggcaaagttaggaagcttaaagaagaacggttgatggtattccctaagatcaaggatcttgaaactaaagcttgattaataaatgtattcctcaaatgggaaatcctcaaatatctgagtgaagaaaaaaaacaaagcacaaataaacaaagttt

SEQ ID NO: 246962 - DNA, 119 bp, Homo sapiens
ggaggccgagggaccaggaggagagctaggagaggtttgggcacttcagacgccccacccatcctgccctaggttccccagagttcctgggaggagggagttcttgccgacctcgcgtt

SEQ ID NO: 246963 - DNA, 1094 bp, Homo sapiens
agaaaaagaaaggagatcagtgttttataaaacttagaaatagattttttaagtgtttcttcattgacttatgtgaaaggacttttcttaatttaacaaattatgtgctttcgtttatagcctcaaaacttcttgtgtagctaagaatgggtaaataatcaggctttactaaaggactaacgtaaagatcttctgtaagtaacatttctgctactcaaggaagagataaacttcatggcataaccttgccaaagtatactaagaataaccctgacacaaagctcttttttcagccaacatgccatgaaagaaagaagacaaggggtgatctccactctctaagtgaaccactaaacccaccaaagaagaaacgagggaaatagaaagaggacccttgcctgagataatggatctgtatgtatgagtagtagaaccctgctcaaagtacaaggaagggaaaaaaaagttagtttatttggaattttggacattaagagtctttattgttcattttcttttaactcacatgaatggcttatcacttcaattaataaatatttcatttcttttcaacatattcatgaaacaaatctgaaatgaacagtgcaacatgtgaatgtttagaacattataaaattaaacacaaaatctgtctggcaatcttcctagcatcttaggaaaaaagttgacaaaatttcaagcagcagaagggggcagtaaaactcaacagaaagctctggaagatttttaagattcttccttattttcttttcatgtagattatttcccaacaaatttcagacgctaatagaaattttgtacaacagatccatatatttgcctaaaatagacacagaaacattgaatatatgcaaacatgagagctataagttttacatgatcaaaccttttttttatggtacacaatagtcacagtacttttccatataaaacaggtttagtggtcttaatttagtttggcacatttaatacactcccatgaccagcatcccaaatgtacctatccgttttattttattgtctcagaattgtcagttatttaataaattatgtaacttttttccttatgctca

SEQ ID NO: 246964 - DNA, 436 bp, Homo sapiens
taaaataccttctgaaacaactctgggaagaagctcaccacccggccacgatacccacttcttgctgccaagaagcttctagctacacggtttttccttccaccccacagtgcagtggaaacaagacccaagctcttctcaaggagtaagcacaggacaagtttcctgctaagtggtcctaagtcaacaaggccatctgataggaatttgaggagtagtgaattttataggaatagaggggaaaggactctttttccatgtaggcttctcttggagtggggagattaggaaatctccatgatataaaatgatgaaagttcgaatcattgtcaccctaccggaaagactccaatttgaccttagtgcttaatccctttagtttgaagtgtagcttaaaagtatttaaataaaatacagctgcccccaaaaaaaaaaa

SEQ ID NO: 246965 - DNA, 458 bp, Homo sapiens
ccgggccggcctgtcagggagctgcagacgtccctgtgacaggctgtacgggaagcatagcggcttctgctcctagacctgtcactcaggacccaagcgacagacagccatcacctgcaatgctccagaccacaggtcatgcctgtcacttccccacatagctcgtcactcacactctccatgaccagaaacgtggccctgaccagccacgagggggccaggacgcacgagacagagacgactggacagcatcagcagctcccacggccacacactgctctagctcccaccgtctctacctaacaacggaacccactcgcagacgcctgctgcacacttgttcatggtatttgctatttctcctgagggactaaactctccttccattttttgtcaccgtgaacaaggaggcctgaccgtgctacagatgcggaggccgtcggtccacctggcgtccc

SEQ ID NO: 246966 - DNA, 880 bp, Homo sapiens
ttcttcaatgacctaagcctcatatatactcattgtatgtgtgaggctgagtatccttaatccaaaaatctgaaattcaaaatacttcaaaattcaaaactttctgaatgccgacatgacactcgaaggaaatgctcattggagtatcttggatttccttgttagggatgctgactcagtaagtataatgcactgtctcccgagtttttcttatcatttggctatctcagaggcctttacagagaaaggaatcctacaatttgaaatttcaacactttttttccaatgacaaaatgggggaaaatcaaatcaaacaggtctcttctgaagattttatttctgctctgagctgttctgggtgacctactgctctaattaggctggaaataaacctggctttcatgagatgcaggacacggctggaggaaaaagttgtcaagactacttacaatcatcagtgcccacaggcctcagagcattccaagaattcattgattcattccataattcattctgcccattaggcacaaacacagacacccagggagaacaaacaccactggctgatttagctttactgatctgcccagggcaggacagagattaaaaaaacaataatgctgtagtttatcaatagctcctcaaatgggtagtgtggtacagcagaagtcagcacagctgacagtcctagctctacctctctgaatgtgtgttcattgacaaaatggaagattaatcccgtcctttcaacttgactgagtgctggcagggatcaaatgagactgaggatatgagaagtgctttgcaaactgaaaatcattgtgacctacacgagagagttcttcacctaacaaacatgtgttgggcgcctattacgtga

SEQ ID NO: 246967 - DNA, 461 bp, Homo sapiens
atttgtaagcaaaattgccccgtgtttctacctccagagaagatcactctcagacaaccccacacctgaacgtaacatctatttttatttaaaaaattgttttggtagagacggggtttcttctccaactcctgggctcaagtgagcctcccacttcgaccccccaaagtgttgggatgagacactgtgccccgccctgcattcctaattcaaaaatttgaagtccaaaatgctccaatgaatatttcctttgagcatcgtgtcaacactcaaagtttcggattttagattactgagttttcagattaggaatactcaacctggataagtcagttttctttggctgctttccaggttaaaaaaaaaatgtcttttctttagtttattgcctcaacatggttttccttgagatgatcttattggaattcactcaccttcgtgaatctttaaagtatttatta

SEQ ID NO: 246968 - DNA, 385 bp, Homo sapiens
ataattatcatcctttctaagtgctgttttccataatcaggtccccgtgcttatccacatccacactccccttctctcacaaagtcctacttgtctcctgggagcccctgcacgcctcccctctctgaatctctgcgaattttcacttataaaacagtaacaactctctcaaggtcatcaaaaatggcagaacagtgttcccccatctctgaaaaatatgaatgtgagaaacggtttcatactgctgagagaatttataagacttaagcagaagaatcttcagatcccccatcccccagagatttttgcaaatgagccagcccagccacaaaaatgtatgcaaacttgaagataaaatggaattaaaatatgttttaaagagaag

SEQ ID NO: 246969 - DNA, 469 bp, Homo sapiens
attacattatatgtacagctgtttttggactttctgtgtaattcacgtgtatctttggatgttaatttaataaacactcctttttctgcctgctaattcattctcatgctgaaaagaaggctactctgagtttagctcattgttgaaactgtttgctttaattcaagtagtctagtggaagaaagaaaggtggcatagtagcagttgcagaatgaaacctggaagagagaaagctatgtctaacaagggcagcagctctgagttgccagctagttagtagcagttaggatgagaagtgctgaccaacttttctgtattctgaaatcttagggtcaaaatatatttcatctgtgttttaactgtgcagtaggactgtaaagttttcacaatactttggcttttccatatttgtatggtttgtatttagttaatcttaataaaaatttagacttcaagaaaaattgggaga

SEQ ID NO: 246970 - DNA, 331 bp, Homo sapiens
acagaaaaggatgtctagtgctcatcactttgcagggggtaagacttccctgtatgccttcaccaaaggaaagctgccccatggagaggtccaagctgcaagaaactgataccttcacctaacagccggtgaggacctgaggtctgtcaacagccacctgcgtgatctcggaggcagatcctcttctagctgagcctggggatgactgcagtcctggccaacgccctcatgacagccttgtgtgagagaccccgggccaaagggatgcagataagccacacttggattcctgactcaccgtgagacaacgttttgttgttttaagccacta

SEQ ID NO: 246971 - DNA, 296 bp, Homo sapiens
gaggaaaaatgtaaaagggctagattaaaacaattcaaaatgagtaatagtgttaattgaggaccaccaccaaggaagggaaatactggtttccccatgcccttgatacaggtgggtgttaattctctttaatgttcactgaataaaaaggagagagtatatttattttagcttgaatttttttaaatattaacagggctattctgtttctattattataggttctttcactcatttatctggtcttactgatctgtacatattcgttataataaagatactaattcatctttgtc

SEQ ID NO: 246972 - DNA, 168 bp, Homo sapiens
attttgttgtagtaatctaaagttatgatttgattgcataagaagttagaagaatttcttatggtaatgtaattagctttcatatttatttatcattataataataccttttgatatataacatcatgaatcttttccttaatacaaaaggaatacatttgcaatgat

SEQ ID NO: 246973 - DNA, 446 bp, Homo sapiens
ggttaatattgaagataacaataaaaacatcaaaagtaaatttgttagtagtcttgctgacagttgcatttttgactttatcaaagctcagtagatattttcatgcatttaattagttcataaattttctatttattacttgatacaatggctatgaggtttttggaagaatagatctattttaatatatccaaattagattggtcctcctatcagcatgaatcttttatcttaatttgtgagttttatataaggtgttcatgaaatatattaggactatacatttttggtttattagattcataagtgaagtctttttcctagcaatcacaaagtgctgtaatgtattcagcatcacactagctatggagaaataacctctaggtccatagacacactaatccatagcaatagagtaatttttttgcctccattgcctcttatgg

SEQ ID NO: 246974 - DNA, 589 bp, Homo sapiens
gtactttactaaaacaaagctgtggtgaatattcctttgttcaatctcttgtcaatttttttcttgttattctaaaaagaataacttaagactttatagtcttaagactatatacataagtcttaagactatatacatttttaaagattttatgcttactacttaattgccattgaaatatttatactttcatcatcagtgaatgaaagatctctaccaatgttacctatcataataaagaacactttgacaatttgataattggaaaacggcaactaatttgtatttcaaaatttatttttaattcagcaaatactaatatgcatctcctctgttccagtcactgaatgttgggaaggggaagtgattgagaggtgagcaaggcagatcaagtttctactttgatggaacttaaagtctaacaactttaaacaagtagcaattaaaggggtgatgataaggagcatttaaggttatgttccaggttcagggtgttagattaagcctcctaaagtggcacttacagatgaattgaagttagccaaggtgggaaaggagggcatgcagggaggcacagaagtaaatcttt

SEQ ID NO: 246975 - DNA, 491 bp, Homo sapiens
ttagaaagcctgttttatagaagtgagattcactgtgagaagttccagagatcaggcctcatggttagaagctacaggaagactttacaaactttgagcagggcaagcgcccaagagctaggctgcctgtgaggtcctggacatgttcaaccatctagattgtcaaagaatcaattgcaggactggaagcaggggaagctggaggagatgccagctaggtcctcgcctgctctgtgacaatgattcaaatgcatccaggtggtagacaccccacctgccaggaacagctgtcagtcttggaaccactcagtcaacacttattttgagttggattttctgattattctagaactcatttggatcttgccatgaaccaaatcagcccttttcacattagctgcagtccctggagtattaaaaatgctgccaagccttaggttttaccacttacggagtaagccttgagttctaataaaacgatgcttaaagca

SEQ ID NO: 246976 - DNA, 588 bp, Homo sapiens
aactgcaaaggagccaggggaccttggttctagcttaagtctgctcctaactagtttaggtgacctggaggaaattccttaagttcactgggcatttttcctcttgtgaaatgagggcagtaagtgatgatctctaaagccctatcccttcctaccatcccttgatttgctggtgaaggcactggcattgctgctctctagttctaaggaggagcacacagggcaacatgcacaaaccaggaagcaggcatggcttgctagatagggatggtctggctatgactcaatggcaaatgacttgaccattccactttagcctttgggccctgggagtttcctctcctggtgtggaaagtcgtattgacaacacggaattacctatggcctgctagtccggctctcaaaaatgccttatgcaaacctgcttgttagtaactgtaaagtacaaaagttaaaaagcacctgggtgtctaaatttgaaaataattcagtgtttagggctaacattttgagaagaaaaacaaacaaaaaaacaggtttaattgtatgccattaatctgtgacctttccagtttaaaactcacaatt

SEQ ID NO: 246977 - DNA, 355 bp, Homo sapiens
cgattttggttgaaacatacaaaataagagtgttcatctttgtcccagaaaccccagctctgcactttacacatggctgtatctgtggtgtattcaaggtgccctacaaaggacagtttggtgatgtgctggttcctttcttacagcccagctgttttcctgcctcctattgggagtagtagcctgccccaaaataggagcttggcccagagcaaaaaaggaatgggccatgcgcagtggtacgcctgcaatcccagcaatttgggaggccgagacgggcagattgcctgagctcaggagtttgacaccagcctggacaatacagtgaaaccccgtctctactaaaaatacaaaa

SEQ ID NO: 246978 - DNA, 232 bp, Homo sapiens
cacacccaaatcacccgcccccccaaactgcatttcacactacgaatggagctattacagttggagcaatacagactgatttggaagaaaaccccagaaaagacatggtagatatgatggtatcttcaattagaaacacttctattcatgatgacagtgatagctccaacagtgataatgataccaaatagagagaaatattcaataaatagcttttagtataaaaatactg

SEQ ID NO: 246979 - DNA, 900 bp, Homo sapiens
ttctggcggtcactcgaaaccgccgggcctgaagcgggcgctcttccagcctggagaaggctgcgggtctccatccgtggcgcctcgccagctgcaggacgacgcgggctcttgaggggcagagcagcgcatcatgcaggatcccaatgaagatacagaatggaatgacattttaagagatttcggcattcttcctcctaaagaagagtcaaaagatgaaattgaagaaatggttttacgtttacagaaagaagcaatggtgaaaccatttgaaaagatgactcttgcacagctaaaggaagctgaagatgaatttgatgaagaagatatgcaggctgttgaaacatatagaaagaagcggttacaggaatggaaagctcttaagaaaaaacaaaaatttggagaattaagagaaatttctggaaatcagtatgtgaatgaagtcacaaatgcagaagaagatgtgtgggttataattcatctatacagatcaagcatcccaatgtgtttgttggttaaccagcatcttagtcttctagcaagaaagtttccagaaactaaatttgttaaagccatcgtgaatagctgtattcaacactaccatgacaattgtttaccaacaatttttgtgtataaaaatggtcagatagaagccaaattcattggaattatagaatgtggagggataaatctcaagctggaagaacttgaatggaagctagcagaagttggagcaatacagactgatttggaagaaaaccccagaaaagacatggtagatatgatggtatcttcaattagaaacacttctattcatgatgacagtgatagctccaacagtgataatgataccaaatagagagaaatattcaataaatagcttttagtataaaaatactg

SEQ ID NO: 246980 - DNA, 691 bp, Homo sapiens
ttctggcggtcactcgaaaccgccgggcctgaagcgggcgctcttccagcctggagaaggctgcgggtctccatccgtggcgcctcgccagctgcaggacgacgcgggctcttgaggggcagagcagcgcatcatgcaggatcccaatgaagatacagaatggaatgacattttaagagatttcggcattcttcctcctaaagaagagtcaaaagatgaaattgaagaaatggttttacgtttacagaaagaagcaatggtgaaaccatttgaaaagatgactcttgcacagctaaaggaagctgaagatgaatttgatgaagaagatatgcaggctgttgaaacatatagaaagaagcggttacaggaatggaaagctcttaagaaaaaacaaaaatttggagaattaagagaaatttctggaaatcagtatgtgaatgaagtcacaaatgcagaagaagatgtgtgggttataattcatctatacagatcaagaacttgaatggaagctagcagaagttggagcaatacagactgatttggaagaaaaccccagaaaagacatggtagatatgatggtatcttcaattagaaacacttctattcatgatgacagtgatagctccaacagtgataatgataccaaatagagagaaatattcaataaatagcttttagtataaaaatactg

SEQ ID NO: 246981 - DNA, 303 bp, Homo sapiens
gaacttagttctttgggtacctgagtctcaaggtgtgagtggcagccagccctacccaggccccctcaaaagagagtttcttcgtcctcatgacatcaccaggaacactggcagatcctgcatcagcttccttctcttctattttcttagccgcatcgcactttgccaaaacgccttgacctttgttgagcatgttatgaattctgacgaataaaataactctctggaggatggggatatttttaattgaattgtagaagccaacaactgccaaataaagccagggtttctacattccgtggc

SEQ ID NO: 246982 - DNA, 441 bp, Homo sapiens
cattggggagaagagaatcacacttgggcgggaccgcactggttttctacccgggcaaggcagcaagagctctgctctgaaggtgcccagtgctgcaaagttactgatcatctgtttaccagcgttcgaaggctcaggcgtggactgcgatgactgcaaaaatcccgagtctgggatgctcgttcccgagctgcctcctgcttctttccctttcccagcattcccacgtcaacaccctggtgaaaacctgcgtactctttctaccactgtctgaaaatagcattgtggaaggccaccaggggtggtctttaggcaaaaatcaaacggtcttgtctcaataatcatctcccctgacttcttcagggcatttaacacttaatgcaaagagttttataaagctcctgctaaacagctattatgacaactgtgtatcaactttca

SEQ ID NO: 246983 - DNA, 473 bp, Homo sapiens
aaactgatgggtaggttttttttttttggaaagtatttcagtgttatttaatggctacaacatcaaaagaaaacaaaagtgggtaacattttcattctttaaaatagattaatattaaaacatgctaatttctccaaagcaggttggccctttacccccatcctcccacagtatgtcttttctttttctctcctggagataaaagctctttaccattttttatgaattgaatatttgtgtctccccaaaattcatttgttgaagctctaacctccaatgtgactgtatctggaggtagggcctataaggaggttaaatgaggtaataagaatggggctcatcagtaccgctgatgcttttataagaaaaggaagggataccagagctctattcctctctaccatgtgagtacactgggagaagggggccacctgaaagccagaaagagagcccttaccagaaaccaaataagc

SEQ ID NO: 246984 - DNA, 277 bp, Homo sapiens
gttgttcctgaaccatcacttactttgtgtccaagtttgctctaggcattaggactagaacagacacaaaaacctctgccttcttgaagcttatattctcaaagtgtgtggtttacctacagaattctttagctagatgtctggggaatgtttcatgttttttgcttgggttttcggtttgggcttttgttaataaaatagaagggaatggaagatcatttctgaaattttatattattctcttacctaaaatttcaatagataacagacaaggaca

SEQ ID NO: 246985 - DNA, 484 bp, Homo sapiens
gcacgtgcacagaggagcctcccacctcttttgaatgccatggactgtgtccgtgttccaagacagggtggaagcctcttctctgcccacaccccttcctgatagttctccagcccccctgccgcatttcctgagtgccacggcgccttgtggttagcagtcagtgacagggaagcgctgggaccaggcctttttacccagcacgtggtgtctacagtgccagtggagcctcccccggagagggtcggcatagagtggggtggggaatgaaagctcttcccacagacagacccagagtcttaaggggaaggggaagaccccagcgacctccggtgtcaccgaggcccgtgctggtgctcaggaaccgccttctcccaataacgcagcgcgagcgacacggggcgggggcgcctcgggcgcgctggctgggggcccgcggggcgccgctccgcagtggaagggggcagacttcggaagcggccgc

SEQ ID NO: 246986 - DNA, 249 bp, Homo sapiens
gggacacttgtacatgatttaaagtaaatatttctctggaaaacatgaattatagctctgtattttgaacacacaccattttggtgcctgatacaaaatagagatttttgtgataaactaaatgataaactaattggggttgtagaaagaaggtggaaaaccaattttaattagtagaagacagactaaaggatctactgttcatgtcaaccacatctgatgccaaatacatgatataagcacataaac

SEQ ID NO: 246987 - DNA, 507 bp, Homo sapiens
ttttatgattgtgtctgtttgtatttagtacacttgttatccttgatgttttcgccctgaggacatcaactgaacaaagttgcatacatctttgtggattaccctttctgcatccataagttatctgctcttttaaaataatttgtactaaaacaccgagagttttttctaatgggaatagacagctagtgtttttttaatgcaaatgacttctccccacattctccccagcccaaagctaaatctgcatcagcatcggaggggctcggtgcttctagaagcaatttaggcacagcagttgggaatggcagtgtgacttaaagccccttgctccgtattagggaaagctacatgcgaattccgaaagagattccataggatgagcagagatgtgttcagggcatttattatcatactcgctgctcttgtttttaagaaaccagcttctgttcaggtggttttgtttgtatgcaaagattaaactgttaaataaaatcacaagcaccg

SEQ ID NO: 246988 - DNA, 492 bp, Homo sapiens
aagatcacaccattgcactccagcctgggcaataagcgaaactccatctctaaaaaaacaaaaacaaaaaactgaagaactcactaactgctgaactgctgtcagagaacagttataaaagcattgataggtcttgatggaatacagtatatggccattagaagtgatcactgtcatgccagcagcagcctagatgaacacgcagtgaagtgccagagcagggaatggtgtgtgctcgggtacagcagttgggaggatatgacatgtacgtggagcccgcctctcgctaggcgcaggactgcacaagagtggaagttgtgacggggtggtgggatttgggtgcctttccttaggcttcttttaatattgtaaaatcaggattaaaagtctcactggagaattgctggaacatgggaggtagaggttgcagtgagctgagatcgtggcattgcactccagcccaggctgataacagcgagactccacctcaaa

SEQ ID NO: 246989 - DNA, 629 bp, Homo sapiens
atttttcatactgtagactgtcctggcttataattgttcaacttaggatttttttattttacagtagtttgaaagcagtctgcagtcagtacgaaccatacttcaagtacccatagccattctgttttttactttcagtatggtattcagtaaattacatgaaatattcaatactttattataaaacaggctttgtgttaaatgattttgcccaactctaggctaatgtgttttcaccatgtttaaggtaggctaggcctctggtgttcagtaagttgagtgtgttcaatgcattttctctttataatattttcaacgtgtaatgggtttatcaaaatgtaactccagcctggcgcagtggctcacacctataaacccagcactttgggaggctgagccgggaggatgacttgagccctggaggtcgagacaagccttggtaacatggcaaaaccccatatatacaaaaaaatcaaaaattagccaggcatggtgacatgcacctgtggtcccatctactcaggaggctgaggggcacggatcacttgagcctgagaggtcaaggctgcagtgagccatgattgtgccactacactccagcctggacaacagagcaagaccctgtctca

SEQ ID NO: 246990 - DNA, 93 bp, Homo sapiens
accagaatgtacttactcattagctgttttgttatagttatggtggagataatcttgtttttcaggcttttataactaaccaaacaaattacc

SEQ ID NO: 246991 - DNA, 480 bp, Homo sapiens
aaacgaacctgactaggggctacatgaaagccatactgtgcttcctcctccttctcatgaatccctttcctcccttctcttttccatcccccatagatcagaaatgtgaaggcggttaggaaatgtccagactccaaacagaaaaaactgtgatcctcagcagacacaagacataatattggattatctgcagcttcatcctgggaaaaatataggagactgaagggaaacaggaaaataagtaaacacccatagaaaaataaaatcaacatcctgaaataggaatttctgaggatatgcttcccatttgagagatgaaaacctcgaggcacagaaataccataaaattgtctaaattacacatgcaaattaatcttggggctagaacttgatggaatatctatgttcttagacaatgctaattgattataggaactgcctttaggaccagaacaagaatctaatgtctaaatggtaaga

SEQ ID NO: 246992 - DNA, 351 bp, Homo sapiens
tcatggtagaaggcgatgggggaagctggcacatcccacatggccagcaggagaaagagagagagaggggaatgctacacactttcaaacaaccagatcttgggagaactcactcaccatcacaagaacagcaagggggaaattagcccccacgatccagtcacctcccaccaggcccctcctccaacactgggaattacaagagggcgtgagatctgggtgggaacacagagccacactgtatcaaggcacctgcttggaacccagcaacagtcatttagaataaaattttgattaacaagctactaagatgtaatttttggtttaattttagccatattctctcccttt

SEQ ID NO: 246993 - DNA, 349 bp, Homo sapiens
gtgtgaagaaagcgaaagacagtcaaggctacatatggatatttttaaagtaaggctcatgtgcagcagctgaagaagtatgtcagtgttccttgcactcatgtgatgtgacacttatatggctcacttcaaagtcaaaaatgacattgtcaatactctgctttttttttttttaggaagggtctcaccctgtcacccatgctgaagtgcagtggcatgatcatagctcactgtggccttgaactcctgaggcaggagaatgacgtgaacccgggaggcggagcttgcagtgagccgagattgcaccactgccctccagcctgggtgacagagcaagactccgtctcag

SEQ ID NO: 246994 - DNA, 318 bp, Homo sapiens
catactcttttttggtctggcttttttgggtcagcataattttgagattcatgtgtgttattgtgtatatcatagacatatgtactttatttatttttttccccttgagtaaatatttagggatcccagtctgggcaacatggcaaaacctgtctctacaaaaaatacaaaaaattagccaagggtggtggtgcacacctgctacttgggaggttgagttggaaggatcacttgagcccaggaggttgaggctacagtaagctatgatcacgccattgtactccagcctgggcaacagagtgagactctgtctcaaaa

SEQ ID NO: 246995 - DNA, 549 bp, Homo sapiens
agataaaagcaaagaaacaatatttgtgacatatcagtgacacagtctaatcctcctgtatgtaaagaactcttgaaaaaaataacaaaaggaaaaaattaacaacctgatagaaaaatgagccaaagatataaactgatagttgaaagaaaaataagtaagactagtggatcctttaacaaaaaagataactgagcacacttctagctaataaaaaatatttcacattcaatctacagaaattcaatttctcacctaccagactggtaaaaaaccagaagtttaatgatacttttattttttaaggctctgggaagataagcactctcacatgtcattgatggtaacacaaaattgtagaaatcctagggaaaacctagaaatgtatactaatattagaagtgatttttggtttgaccaaactgcctagaatatatatgccgtacaaacgcctgtacaaatacaaagtggtatttgtgaaggttattaattgcagcattgtttgtaatagaaaaaaaccaacaatagttgaataaactacgttaatcc

SEQ ID NO: 246996 - DNA, 408 bp, Homo sapiens
ttataatcaccctctttgatgtgccgatcttatcaccttctttgttaattttctctgcctccgtgtttaactgtgctaccctcagccagatccatatttaccaaggctttcctctgacacgttcaggaagatccccaccaccattctccttgacttgataaaattcctgtttttggcagcaggtgtaattttactccgtaaacaattgtgtttacgttgtactgtagatgctcctagaaatgactgagcaccagagagaaagaagatgaaggtgtctggctgctagatgcacatcccagctttgagcccataacctctgtctcagttcttccatctgtaaaaggggactgccactaatgctacctagctcatatggtgttgtgaagataaaacaagataatgcacatg

SEQ ID NO: 246997 - DNA, 372 bp, Homo sapiens
ctcccctgccgtgccctcctggccctgctttctgaacccctcgtgagccctatgtgggaggggtaggcacttagtgggcaaagttgtgttggtgccgtggtcccgaggtgctcagtgcatctagtggggacatggctttacagctggccaggcctgagcaagcattgtggcctcaaggaccaggtcccagggagaaggttttctggatggggctgccaggaactgctgtgccccagctacagaagcagagggccaaagccagagccacagacagcaggaagagacaacgctggggggagaaagttcaatgttgcaattcagtggttcgcttaccatttaccattgcagggaaaataggagaacatggaggaa

SEQ ID NO: 246998 - DNA, 312 bp, Homo sapiens
  misc_feature (178)..(178): n is a, c, g, or t
  misc_feature (211)..(211): n is a, c, g, or t
  misc_feature (218)..(218): n is a, c, g, or t
  misc_feature (246)..(246): n is a, c, g, or t
  misc_feature (259)..(259): n is a, c, g, or t
  misc_feature (275)..(275): n is a, c, g, or t
  misc_feature (304)..(304): n is a, c, g, or t
tggctgggtgcagtggctcatgctcataatcccagcactttgggagaccagaggaagaggatcacttgatctgggagtttgagaccagcctgggcaacgtagcaaaaccccataactaaaaaaaaaaaacgctgttaatctaatcaagcctatattaatttacagcgttttttttttntaagtttactttacccgttggtaattccattanggaaatngataaatggtctggtgatgaccgtggtntgcagccattaanttcattagagggttgnaaagaagtggatatacccccagggtttgngcatccct

SEQ ID NO: 246999 - DNA, 327 bp, Homo sapiens
tcttcctaagtgaaccctaatcatgttctcctgtgcctaggcacgcatctagcatagcacctacaatgcagtagcatttgattaaggtaaaatcaattttgataagactacctggaacttcactgaaatgttacttcaatctagtatccttgatattaatgtcaccacgtttcgttaaaacacacccccccccaaaacacacacacacacacacacacacacacacacacacacacacatatgtagcttttatatttagtctggttacattagtgaccatggtatttactttcttcttaaggagcctttgaatttcttgtccagatc

SEQ ID NO: 247000 - DNA, 380 bp, Homo sapiens
gcctggccaacatggtgaaaccctgtctctagtaaaaatacaaaaattagctgggcctggtggtgggcacctgtaatcccagctactcgggaggctgaggcaagagaattgcttgaacccaggagatggaggttgcagtgagccaagatcgtgccattgcactccaggctaggcggtgagagtgaaacttcgtctcaaaaaaaaaaaaaaaaaaaaaattccatgaatttgccagttacctctatttagccattctacaaatgtatacatatttcaaaacatgttgtatatgacaaatatatacaatttttatttgtcaatttaaataaatgttaaaatttataattaaaaaactataaggtaatagagcatcaaaaaaa

SEQ ID NO: 247001 - DNA, 481 bp, Homo sapiens
ctgtgttgagcacttgaaatgtaggtggtctgaattgatctgtgtactgcaagtgtaaaatacatactgcctaactttttattatgcggtctggattttgaagacttacgaaaaaatacaaaatattgcattggtaccctggtttgtatagatagtatattgaaatgataagacttggatattctgacaggcgtggtggctcatgtctgtaatcccagcaccttgggcggctgaggcaaacgaatcacttaaggtcaggagttcgagaccagcctggccaatatggtgaaactctgtgaaaccctgtctatactaaaaatacaaaaattagccaggcctggtgtcaggtgcctgttgtcccagctacttgggaggctgagacagcaagatcacttgaacccggtaggcggaggttgcagtgagctgagatcatgccactgcactccagcctgagtgacagagtgagactctgtctcaaaag

SEQ ID NO: 247002 - DNA, 492 bp, Homo sapiens
aaataagacaagattgagatgaagagaggagataagtacaggcaggaatagaactcctgccttattttccccatttttttcaaattcaacattctttttatttacgtttttgacatataaaaactgtacataattaatgtgtacaacttgatgagtttggtccttaattttttcactttgtgtgatctcaggcattttacctttacttccagaatcttagttactccctttttaagatgaaggattttgaactaaatcatctctgaagtctattccagctctaacacctgtattctgatttatacctttaagaacaataaataggctatatttatagatgaatacatgagcattaatagggacaaaatcacattttactgttgtaacaagggcataattaatagttcataaattgaaattcactcaattctctagagtgctagcaggcacgtgtatacttttccaatttatgctaaccatgttaaaaaaaaa

SEQ ID NO: 247003 - DNA, 668 bp, Homo sapiens
gagttttaatcagatttattttatatgtagaaattgcctcttttgtcagcaggaaagaaatctagtcaaatggataatcttataaaaagtaacataagcatgtctagaaccaaatcacaccctataagactcagcctttctttcttttctcccacttgccccaaatttaccacacaaacttggaaatgagctgccttctcattgcttaaagcactgacgggatcccacagaagaggagaaaagttgttgtccaattaagctccacgtgtgcattcaactcttgttgaaaaatttaaagaagaaaaggcttcaggcggtagtacaacatttaacatgtcctcatagcctttcctactttacttcagggtcaaaatctgtagagtccagacggcattgatggagcatcctggagtttatagaaggttgtctgtctggagctgggaaaagtccacagactaggaaaaggatatatattattataaggaattggcttccatgattctaaaggctgagaagtctcaaggtctgtggtcagcaagctggagacccacccaggagagccaacggtgcagttccagtctgagtctgaaggcagggaaagctccactttggtttcagtcatcatctttggaagaaaaggaagttggatttttccattaacacctccc

SEQ ID NO: 247004 - DNA, 451 bp, Homo sapiens
tacttgcaggggactgggtgtagccggctgaaaactgcagaaggaaaattttctttataagctcctggagggcagcgacccactgagatctctgtaccgtgacatctgtcactcgctagaccctagtacagtgcgtgacacgggattaagcactttacaaaggttaatggaatgaattctaccacgtgctagagaaaataacttcttcagagagagctagagaggaatcttacgtttaaatacagactccaatcacagtttttacttttgcaccagagcgattgtgcgtttgtttccgtataagtgcagtttatcaagccgaagctaagctacccaacgtttgctaagaagtactgtgtatttctggaaatttattcacaagtctgtgggaaatatgtttaattcttcttggaaatctcataaactctgaattcagtaccaccaaaaaaaa

SEQ ID NO: 247005 - DNA, 596 bp, Homo sapiens
cctcctgagtagctgggactacagacgtatgccatcacacctggcaaatttttttatttttagtagagacggtttcgccgtgttggccagggtggtctcagactcctgggctcaggatctgcctgcctcaacctcccaaagttctgggattacaggcatgagccaccgtgcccaggcaggccggaatattctgatgggtgctatagaatataacctccagttctagactctgaatgtagttgcctctgaggtggtgggtggggacaaggccctcatggccggaggcctccgcaggtggcttgatgtgtggtcacctgggcgtatgtttcctgagggaacactcgcaggtcgggcactgccaagcttggctgccagccacttgctcagccctcccgtgtctcgggcagcacatcctaccctcagcttctggcactcaggagagacgacgggctacaatctgccgtaaagcacgtttcccagcctgcccctcagtgggtgcactgatcacccgcaccattcccgcagccacccacgccatcccgcggccacccgcaccgtccccgcggccacccgcaccatccccgtggggctgcttc

SEQ ID NO: 247006 - DNA, 498 bp, Homo sapiens
ttctgcttcacagcaaagtttaaagaaggcctggctcaacgctatgcccttctctgtaacaccattgctgtaaccgtttggatattgttcagcctttttttgccatctgttcatgtgtcttcagaacatttaaaaactgttagtgtgcatggaaacattactggacaaaactgatacaactagagcaattagtctaaatacttttgcccaggcttaagctgctgaaaactggagaaagaaaaaaaggactgggccggtaaacattttctgacacaggagacataaataacggatattcacaacagtttgtaattgcaaaaaagtggaaacaacctaaatttttatcaaaaggaggagggacacaattgtagtcgatacgtataatgatgtactctacctccatgaaaatgaattaagtaacgcgatgcatgctagctatctcttgaaataatgtaataaattagtccccaaataaattgctaattcaactttcattag

SEQ ID NO: 247007 - DNA, 454 bp, Homo sapiens
tttttttttttagtttacactggtaagaaagatacagactttttgttagattattttgcccaactgcagactaatgtaagtgttctgagtgcatttaaggtaggttagactaagctatgttgttcagtaggttaggtgtattacatgcataacaatgcatatcctgtcaacagacaagatattttcaatttaggatgggtttatcaggatataaccccattgtacataaatcaaggaacacctgtatgtgtccctaaaagccaggctgcgatctaccaagaccactggcagcccttgctggggatggtgtgcaatgcgttatcaccttcactccaaggcagtgatgagtgagctgagatttagaaaaacagatatgagttcatgatctgtactagcaactagctggaatgaccctattcaagtcttctgatttttttccatgtcatttcatagt

SEQ ID NO: 247008 - DNA, 366 bp, Homo sapiens
atagtgagaagtcactgaaacgtggagattgtttatggtgattatgtctactaacacagagggctagactctaatgatacacttctaaaatcaagctaaggaaattcttcgaggaactttttattaactccccagagaacatgccaaaagtttatttcctcagcttccaggtacacaatctattcctttctatgatagtttccatgcccccactaaaatgcatttcatcattctttttggattaaatgatttcatttttagttcaaagaaacctagaacaattatttccttctttttatcattttctcgggcctgtaggcaaataattcatttttaattagaaaattgttatgggatataaagatg

SEQ ID NO: 247009 - DNA, 606 bp, Homo sapiens
tcttggatgtgtgtctaattctatatacagaagattcttcatggtgcaagaaagtataggagtgggtgggaagtagaaagacaaggtgaaaggctatagattgagagctttcttttgtctcagatcctgcaaatattaggaagtggtgagatcctgagcttcagaatcagaatgtctgaggatggtgtgtgagaatcttgctagtgtcactaaattgatttaaacagaagtcttcaaccttggcttcatattagaatcacttgggtagcttttaaaatgcccaggcttttcccaccccttgaaatgaccatatcaagatctttggggctgagaccaaaacatcagtatttctcaaagctcccctgattccaatatttagcttaggttgagagtccttgtctcagaaggttagaaaggcaaataaagaagtgagatggatggttggcaaggtgtcagtgtagtggaggtgggacttatggtgaaggataaatcatgggctctcgaaagctagtggcctctactctgctccagtggacttttgtatggaccatgtatggaagcagacttgccctggccggatcttcccagacttcaagagacgcttca

SEQ ID NO: 247010 - DNA, 707 bp, Homo sapiens
tgtgagggatgttgtttctttaatttctctttcaagttttgaagaacccacttagtacatgttgctaagttaacctacaaagaggctactatttaagagaaatgaatacagttgtgtaggtaagccatttaagacaaggcgagtgttcacctctacccccaggaccatgataactgcaggggaaataacctcctccaggtggagaaaagtaaggctttcctggtttccagcaaacaacacacataagcaagtgaaaagagtggactatgacccaggacattctccagggaatggggcagtagagaatggtcccccaggctggaaaatgagaggggcctttaactggctcaaaacagccaagagagactcagaggattaagtgaaaggagaccacttctcaaggaattattccaggttttgaagcttgaagccatttgaaaataaaccactttggatgttttgacagcaggttcaatcagggtgaattataaaggttaatattttaatcagcacctatgttttagatgtaattaaagtgaacaggtataggaaggtttttgttgttgttgttgttgttgttgtttttgagatggagtctcgctctgtcacccaggctggagggcattggtacgatcttggctcactgcaacctccccaacccgggttcaaactattcacctgcctcagcctcccaagtagctgggatt

SEQ ID NO: 247011 - DNA, 468 bp, Homo sapiens
gtccgagacttcattcttgcagtcagctagatcgagaactcaccagcaggaataaattccggacccagtaggagagaggtaacttttggctatattaaaggacagagaacacagaagacgaaaaagatatgtatggggtactctgtttgacacaactgtgttgcagtcatacacatgtccctcagcataaatggggctttgacagtggttcctttctagttgagcagtggatacaactacacagctgaagcaataagctgatacattagcagagcatgcaactgaaacaaagtatcctggtctgaatgccccagtgaccaggtgtaagtggagtcaaaacttacaagcacatgtaatgttagagtttgtgataagggacttttattcctataggaatgtgtttttcttaagatatttcatgcttaagtgttagaacttcgtttgaataaattatttcattcaacccct

SEQ ID NO: 247012 - DNA, 1522 bp, Homo sapiens
gtttggctgccaccaaagttacttctagtccttgctgtccactcctgccctcagtctggacctgcccaaggacccctgcaattaggcctcccatgcagaggtcagtgagagcccaagccaattgctctaggccccgtggctggctacttatggggcactgtcctgaccagctctgctaagatgctcctggcccctccctccaccccgtccagaggacggacccccagcgccgtggagaggctggaagccgacaaagccaagtatgtcaagacgcaccaggtgatagctaggcgacaggagccagccctgcgtgggagtcctgggccgctcacgccgcacccctgcaacgagctggggccccctgcatcgcccaggacgcccaggccggtccgccggggaagcggcaggcggctgccgaggcctgattccctcatcttctaccgccagaagcgggactgcaaggcttcggtgaacaaagagaacgccaagggccagggtctggtgcggcgcctctttctgggtgccccgcgggacgctgccccgagcagcccggcctccacagagcgacctgcggcttcagggggttgggctgcgccccaggatgccccggaagcggcgggaaagcgggcgctgtgtcccacgtgctcgctgcccctgtcggagaaggagcgcttcttcaactactgcggcctggagcgcgcgctggtggaggtgctgggcgcagagcgcttctccccgcagagctggggagccgacgccagcccgcaggccggaacttcgccgccgcccggctccggggacgccagcgactggacatccagcgacaggggcgtggacagcccgggcggcgcgggcggcggcggcggctcggaggcagcgggctcggcgcgggaccggcgccccccggtgtcggtggtggagcgcaacgcgcgcgtcatccagtggctgtacggctgccagcgcgcccgcggaccgccgcgcgagtccgaggtgtgaccgccgcggctccggactggccccgggactggccccgggcacggaaaaggacacccctcttctggcgcgctgggtgcctttgcgtaagcccttccttctggaactcagtttagcgtctgaaccttggggaggtggaacaagttgctgccgaaggcccttccctgctcccgcggcgaagggggagggagaggcctcttggtccctgtggagacccggtctggggagtcacgattggggtgggagatgagcaaacctgctgaataaagttaaaacgttatttaaatggggagctgaggaaggagcaaacgggttttcgcggttaaacccgtgggttttggaatgtgtgttcccggctgtgtgatcctgggcaagaacttgacctccctggacgcagcggcacccctcggttattaaggagggaggagtaggggatagaagtatttcaaaatagttgtaatgcgcatggcaaagtgcccagcatatagaaagtgctcaataaacgataactgctgtgacttctaccgaa

SEQ ID NO: 247013 - DNA, 469 bp, Homo sapiens
gtctcgaacttctggcctcaagtgatcctccccccttggcttcccaaagtgctgggattataggcatgagcaatatttaatttgtgagcttcctataaaatatagacataccaatattcattattctgctctccttgtttatttttcgataatttataagattgtggaccaggtgtggtggctcacgcctgtaatcccagcactttgggggaccaatgtgggcggatcatctgagatcaggagttcgagaccagcctgaccaacatggagaaatcccatctctactaaaaatataaaattagctgggcatggtggtgcatgcctgtgatcccagctactcgggaggctgaggcaggagaatcgcttggacccgggaggcagaggttgcagtgagacaagatcgcaccactgcactccagcttgggcaacagagtgaaaccccatctcaaaaaaaaaataaaaaataaaa

SEQ ID NO: 247014 - DNA, 318 bp, Homo sapiens
gtgtgtgccacctcacccagctaatttttgtattttttgttagagatagggtttcgccatgtcggccaggctggtctcaaacccctgacctcaggtgatctgcccacctcggccccccaaagtactgggattataggcttgacccactgcgcctggcctctttttagggctgttttgaatatattttaattggagtggaaaatctctgtccatttggatgaggaaatatgaggaaaggtacacctgcacttgtgttatatttctatctgatgtagcattatctcattatcttttttttttttttctgagacagggtct

SEQ ID NO: 247015 - DNA, 722 bp, Homo sapiens
gcagaatcaacctgaaaagtcaggcttggggaccacccccttctcctgctgtaagcgcctggattctgcaccccaggtgccctgaagggatttcttccctgtgtgtccccgggtcctcttctgataaggacaccagtcattggacttaaggcctctgctaatccagtctggcctcgtctcaaattgaagaacatctgcacacaccccatttccaagtaagatcctattcacaggcaccaggggtgccttcaatgcatcttttggggggaacacaattcaacccacagcatcttctgtgttgttctgcccaaggacagccaccccccagcagccgcggtgagaagttcccccaggtttggggtttccaatcttgggtggcggcaggctgggagccagggaccgcttgagccttactgtgctctcctgctaggaggggcggcagctccttgcccctggagacagcgcggctccccagagcagctgagtgtcttgcagtcatcaacagccacctcatctcagaggcagcacctggaatcttacctgcctcacctcctttagtcctcaaaacacctgtgtcccaggattatgtcccttattctacagaggaggaagctgaagtgcaaactaagaggaagttccgaagcagcaggttggggtgccaggtgccagcctggtgaggagctcggggctctcgcgaggaccgtgacggggctttcacccca

SEQ ID NO: 247016 - DNA, 941 bp, Homo sapiens
actcgggatgcgtggctcagcctcttattatcttgaaaggcagcagaagtctgaccccttctgtgtgagcttcccatggctgttatagtcacttaccaccggctgtggcttaaaaccgcgggagcgtatttcctcacagttctagaggccagaagtccagcatcagggtgccagcagggccgtattccctctgaaggcgccagagaagggtccatctttgccctcccagcttccggcggtcaccagcaggccttagtgtttgctggcgcagctgcatggctctgatctctgcctctgtcttcacagggatttcttccctgtgtgtccccgggtcctcttctgataaggacaccagtcattggacttaaggcctctgctaatccagtctggcctcgtctcaaattgaagaacatctgcacacaccccatttccaagtaagatcctattcacaggcaccaggggtgccttcaatgcatcttttggggggaacacaattcaacccacagcatcttctgtgttgttctgcccaaggacagccaccccccagcagccgcggtgagaagttcccccaggtttggggtttccaatcttgggtggcggcaggctgggagccagggaccgcttgagccttactgtgctctcctgctaggaggggcggcagctccttgcccctggagacagcgcggctccccagagcagctgagtgtcttgcagtcatcaacagccacctcatctcagaggcagcacctggaatcttacctgcctcacctcctttagtcctcaaaacacctgtgtcccaggattatgtcccttattctacagaggaggaagctgaagtgcaaactaagaggaagttccgaagcagcaggttggggtgccaggtgccagcctggtgaggagctcggggctctcgcgaggaccgtgacggggctttcacccca

SEQ ID NO: 247017 - DNA, 276 bp, Homo sapiens
gccctgtgatcttggacaagcctctctcaggctcactttctgcctctttaaaggggtggggggcaacctgtcctgttggggccctaggaaggatgaaatgaggcaccctggcaaagcacacagtccagaacaggcttggaagtgggggctgtaatgtcctgagagggactatgtagctctcttgctcttgacaccccctgcctcgtgtgtgtgttcgtgtgtgtgtgtgtgtgtgtgtgtgagagagagagatgggtgaggcgggtggatggtgtg

SEQ ID NO: 247018 - DNA, 287 bp, Homo sapiens
catcttactgttgcttcaaagtctccctcaaattccactttctccatgagaactttcacagttttcctaaccagatgaaaactctctctcatttgatgccctactgcaatttaatcttacaaattgaaattcataactctcttacaatgttttatctttctgtagtcattttccactgatgtacaggattgtgtatttgttgaaaatgtgaattgtatttccttaaactttgtatcctctctctcaaaccaaatagatgcccaataaatgtttgtagaaatgaaatt

SEQ ID NO: 247019 - DNA, 887 bp, Homo sapiens
ggccacagcccagcgagggtgaggtgggggagcgtcctggctgagggctgggccgcctcccgcgtgctctggggaacaatgcttccgcaccacccccgccccttcctggcttctgtgaaactgaacatctccaagtaaatattttcactgctaagcacaggcagcacttcgaggcttcgtgacgaagacgtggaatgcttgaccctcacctctcacctctcacctctgcaggtcctgggcgcagacttcaccttctggaccttctcctatccggaaagtatgtggctcacacggtggtgcaaggagccttgggctgggcagctgctggcctggatccgagtcctgccctggtgaaagtgctgattactttacatacttctacatctgcagaaccaggtgattgatcctcaaagcccagccagctccagcaagctctggtacctgcaaccacgggccgccctgtgcccggcccaccttcctcgaaccgtgttccgctcacctgtggcgcggccgcccccggagcagcgcgtgccgtgtgccgaggacagaggcagacccggacagagatagatgtggaggggtagccagtatcaggggcacccccgcttgtgctcactgccccacccgcctgcttttgccgctaacgtccagacattcttctcttaaccccaaagcccctggggttcagttcctgctgttgcagcccaagggctccaccaagagctgggggcagtgtccacctcctgggggtctcgaggggctccataagagccccttgtcctgagcccccacccaggctgcgcactggcagctgttcagtcccggctggctttaattgttgtcgtttaatattcaatattgacataaactctattttggttgtgaaa

SEQ ID NO: 247020 - DNA, 590 bp, Homo sapiens
agggagcctggtggggggcagggcatggaggtacacagggctgggagacaacctcctctggctgtgatttggcatttcttccatctctaactcacctgggggactccttcctgccaagccagaggagcagggcacgaatagagcctgatcctgttggagatgggtatggggagagggactgagacagagcagccttggctgctgttagagagttgtccagtctcatacctgttaccctccagttgatcaggtctgtccaggtgctgtgactcaccttgccagctcagaggagacgctgagtggtacggctggggagcacaggcttagaggtgacctgcagccaaaagcatttggcttttgctctgccaatggtccagtggattagggggtcttcagcctgtttcctaatgctctgagattctgtgccagcccaggtccctctattctggaaacaaaggcctagatccccgtatttccttcttgctgttttgtttttgtttttgagaaagagtcttgctctttctcctggagtgcagtggagatctcgccactacactccagcctgggcgacagagtgagactcccatctc

SEQ ID NO: 247021 - DNA, 538 bp, Homo sapiens
ttccatctctaactcacctgggggactccttcctgccaagccagaggagcagggcacgaatagagcctgatcctgttggagatgggtatggggagagggactgagacagagcagccttggctgctgttagagagttgtccagtctcatacctgttaccctccagttgatcaggtctgtccaggtgctgtgactcaccttgccagctcagaggagacgctgagtggtacggctggggagcacaggcttagaggtgacctgcagccaaaagcatttggcttttgctctgccaatggtccagtggattagggggtcttcagcctgtttcctaatgctctgagattctgtgccagcccaggtccctctattctggaaacaaaggcctagatccccgtatttccttcttgctgttttgtttttgtttttgagaaagagtcttgctctttctcctggagtgcagtggtgtgatcttggctcactgcaacctccccctcccgggttcaagtgattttcatgcctcagcctcccaagtagctggga

SEQ ID NO: 247022 - DNA, 362 bp, Homo sapiens
atcactcttctttttattcagtaaagtgctaagggaattagtatcagggagatatggcagataattctttgcattttagtgagtttttaaaaatacaagatagaagtggattaatagcacgaataaaaaataagaatagtagatgtagcatggaaagagaataacattgcagcccccttgagaccaaattacaggtgggatctaagggagtgcaagtaaagtgggattttatgagtctaaatgatgtgatttagataaaagtgattcttaaaatgtggttattggtcacacaggaatctctgagtccttcccaagagtgaagcacatgaatatgctgatgatgaagtggggattagtaatag

SEQ ID NO: 247023 - DNA, 388 bp, Homo sapiens
tctcatgtggctgtcacccatctgacccctatcacagacctgagggtaagtggtgctcacgggcccacatctgtcagcctgcgcctggttggagacgcctccctctcatttgtccttgcttgctgcgtgactttggcaagtgcttgcctctttgagaccctcagttttcacacctgagaaatagaaaggtggtgcctgccccagctgccacgcagaagagtttaggtggcatgtgagaaaatgccttatgaactacgatgtgagcaactgcagcatgctgtgaacaccgctttcatgagctcctcaggggcagggtaacacccaagcattcttacacctcccaccgggcttgtcacgaccgtatgcaaatgaaggccatcaagcgtgt

SEQ ID NO: 247024 - DNA, 427 bp, Homo sapiens
cagcataggtcaagttctggtgggtatttaagttcattatcacaccactccagagccataataaaggactacttttaatttctgctctaattactgagaaataatttacttaaatcattatagttggcatttgacatggaacacagatactggtttttgttttgctttgatttacacccccccacttggagaaaggaatctgaagaaattaaaactcattttccatataccccttcttccttggtccaggaacatttgagattatccttaatgttgggccatttctaactcagccagtgcaattgttgaatttgtggttttcagcagatttgcaatttgccttttgatttgactaatgattgctttttaagcctttgtggcatattcgttttcctaatattttaaataaatagtgaaatgtcatgga

SEQ ID NO: 247025 - DNA, 582 bp, Homo sapiens
aagaatgcctaggcatgtactgtttaagtgactttaaatagcccccttttttcttcttttgagagaaaatttgtatgtcttatttaaattgtgtgctctattaatgtaggtgatagtttcatttataacatcttagtattgttctaccctctatcatgttggttcactgctatttgattttcaaacagtgaaaatatttttaaggaatagaattatacatccacaatctcttttccaaaaccatttggactagacagttatgttaatatttctgcagttaaacaagtgaataggccgggcgtggtggctcacgcctgtaatcccagcactttgggaggccgaggcaggtggatcacttgaggtcaggagttcaagaccagcctggccaacatggtgaaaccccgtttctactaaaaaaaaaaaaaaaaaattagcagggcatggtggcacatctgtaatcccagctactcgggatgctgaggcacgagaatcgcttgagcccaggagggagaggttgcagctagctgagatcgtgccactgcactccagcctgggcaacagagcgagactcagtctcaaata

SEQ ID NO: 247026 - DNA, 480 bp, Homo sapiens
agttccactgtagttcctcagttgataaaagactcatttgtttatgttgttagcattgatcaaagttcatatagcaaaataacacagtagtaactgaaagatagttaccatcatgttcactcattcatgaaatcttaccttgccatcttcactgtcttgagtaaatttaaggtgtttgtttaacatctgtaatatgtttaagtttctgactataatgtagtaagatataaagtatatctaattttgaacttctctgcaaaggtaaaggatctctattaaacatccatttgaatcctgttaaatagttttagaacataatctgctaaaagttctgaagctcctttccaatacctgcttctcctgttcagttacttaagatagaatataggcatttaggcattgcacggagtcctttggggaaggtgaggtgctggcagaatttaattatagacagatgcattagtttcctgttcctgctgt

SEQ ID NO: 247027 - DNA, 423 bp, Homo sapiens
aatctcatgtggttgcaaatgtttgttaaagatttgttttctgtaagtagacttagatattccagagatgaagcagacatctttctgatgatccgaattgccaacacatttccaaagtaaaaggcgacatcagtggcttcccatttctgaaatctctgaaaaactaaacacctcaagtttgtttcacatcattaatgaataactctggaataagggggagtagggtgtgcctgcagaagagacacaactttcacttgacctttcacacatccgtatttctaaagtgaggcattaatcctaaaaggcctctcatcggagtttgtctcctcagatggggcaaatggtgtgttaatatatctgtcatataagtgctaattaagtatttgttaaatgaataaatgtcttccattaagaagcagatga

SEQ ID NO: 247028 - DNA, 806 bp, Homo sapiens
cgactctaaggtcccctggtacgctcgggttagtgtcagctcaggaaccctcggcctcccaaaatgttgagattacaggcgtgagccaccatgcccctcttacattcttttcttctgttcactacagccgtggagagctccgggttgtcctgcacatgtgcactgccctctcttttatggaccttttaggctggctgcaccctccgtctgtgtcaccctcctgctcctcctccacctggctagttcctgttggccacttttggaaattcatgccagtccagtccaccctgagtacatcctctttctgtgtcactgagctcactatgctgggttttatctatgtctccctcgcaactagatcattcacgtcttgaagttaggcatcatgcgttcttcatttctgtacctcccaactcaatgcttagcacccagcaggggctcaagactgtgtgtggaatgaaggattcgtgtgaaaatgcagggagatggaaggctgagcgtttctgttccttgaccattcccgggtttgactaataactctcatacacactgctactcattgaaggcctactgtgtgcatgcattccatgtgtgctatacagtttatttattgttaacccacgtagaattcccagacacatagcgttactacaaacttcatcacaaaaataaagaaaccagggccctgtttctctttgtttctcagatgagaagtctcaccagagttgactgtggcttctgagcattatgaggcacatgtaggatttaaagctgaaaggctttatccctgagactcagggaaatat

SEQ ID NO: 247029 - DNA, 513 bp, Homo sapiens
ggaggggttggggggaggtctgtgtaggcaaattacttctttcccattaaagatgaaaagtattttatgggtagtcaggttctccatgttactctggggaaaaaagacaaagatcccatttgtcaagcattcatttgcttttgagtaattagaaaaacatacgtcagaaacttctcagaactggcaggttactcaatgccctttgcaaacaatctcaactacgcacagcctggtaaaatacggattgcaaaagccacaatgcagaactaattttgtaggactataatgagatgggagaaaagtaaggaaaaaacatattgggtcaatttaatgagtcatttttaaacaaacatttattgagtcctagcaggtgtatcatgcagtgcttagcagatgaagaaagtgtatctcgtacttttgtaaaatatgcttttgtcgagacacactgatatatgaaaggagtgtggcaacaagagaatgagaaaaaaaatttgtgtctaatattagtgatat

SEQ ID NO: 247030 - DNA, 456 bp, Homo sapiens
ttttcttttgagacagagtcttcctctgttgcccaggctggagtgcagtggcacgatcttggctcactgcaacctccatctcctgggttcaagcaattctccggcctcagcctcccgagtagctgggattacaggcgcccgccaccacacctggctaattttttgtatttttagtagagactgggtttcaccatgttggccaggctggtatcaaactcctcaactcaggtgatccacttgccttggcctcccaaagtgctaggtttacaggcacgagtcactgcacccagcctgaagcattattttcaacagtcaaaaactggaaacaatccaaatatgtgtattaacagaatggatagatggaaatggtgttatattcatatgatggaaaaactataacaaaccacaactttatgttgcatgaaagaagtcagaaacaaaaaaagtatatactat

SEQ ID NO: 247031 - DNA, 352 bp, Homo sapiens
agagtttttgaaacactgtttcttaaatttctgtatgccttaggacagttacctggggctgcaaatgattgcttgtttttaaaagtaattttcatcacttgcgtttggggagagagtgtgcagagctcctcactgtggcactcagaaactgtcttattatactttaataatttttagaattgtcttgagttctatataatttttattcactttaataatttatattcgtgtttcttattgtgttttaagcaatatttattttctttttattcatttaagtttgccttgtttatatgagttttgttttcttctacttcttgttgggctttatcagctcatcttttattttctc

SEQ ID NO: 247032 - DNA, 451 bp, Homo sapiens
gtactgaagaatttaacttgaagaagaaagggaggtgccagggttgtgaagggcacccccttctccttaagggtcgaagaagacctatttgttaattcactgctgagatacagcactcttaccctgtccgcccagaacccctggcctgcactgtttcccccagagcatggaccattgcaaccagacatggtgcacccagcagttacctcactcggcagggtttaccgagtatacacagaagacaatagaccgctttctcaaactcatatctatagaccaccattatcagagtcccctggggtctctttaattaaaaatacaagttctagctgggcacagtggctgatgcctgtaatctcagcactttgagatgccaaagtgggaggatcacatgaggccaggagtttgagaccaacttgggcacacaaacatagcaagactctgcctctac

SEQ ID NO: 247033 - DNA, 2057 bp, Homo sapiens
aagaaaattcgagggaaagaagtttacatgactatggcttacggcaagggagaccccctcctcccacccaggctgcagcacagtatgcattatgggcacgatcctccaatgcactactcacagacagctggcaatgttatgtctaatgaacattttcatcctcagcatccatctccgagacaaggtcggggatatgggatgcccaggaattcatctcggtttataaacaggcacaacatgccgggccctaaagttgatttttacccaggcccaggtaaaaggtgctgccagagctatgataacttctcttatagatctcgttcatttagacgtagtcaccgccagatgagttgtgtgaataaggagtcccagtatggatttaccccagggaatggacagatgcccaggggcttggaagaaactattactttttatgaagttgaagaaggggatgagactgcttatccaactttacctaatcatggaggtccctctacaatggttcctgctacttcaggatactgtgttggaaggcggggacatagctcaggcaaacagactttgaatttagaggagggcaatggccagagtgaaaatgggcgatatcatgaagaatatctttatcgtgcagagccagactatgaaacttcaggtgtttatagcacaactgcatctacagcaaacttgtctcttcaggacagaaagtcatgttctatgtctcctcaggacacagttacctcatacaactacccccagaagatgatgggaaatattgcagcagttgcagcttcctgtgccaataatgttccagctccagtcttatctaacggtgcagcggctaatcaagctattagtaccacttcagtttcctcacagaatgctatacagcctctctttgtatctccacctacacacggcaggccagatacaaaagttttgcagtactatttcaatctaggattgcagtgctattaccacagctactggcactccatggtctatgtgccacagatgcagcagcagcttcatgtagagaattatccagtctatactgagccacctctggtagatcaaaccgttcctcaatgctacagtgaggtgaggagagaagatggcatacaggcggaagcatcagcaaatgatacttttccgaatgctgattcttcatctgtccctcatggagcagtctattatccagtaatgtcagatccctatgggcagccacctttgccaggttttgactcctgccttccggttgtgccagattattcctgtgttcccccctggcatccagttggtacagcatatggtggttcttctcaaattcatggtgctataaatcctgggccaattggctgtattgctccatctcccccagcttctcattatgtacctcagggtatgtaagatccagcagtatgaagtattcttgcactgccattttcttgctgtttttgtttttaaaaagtattttatgttagtggttaaatgatttaggtgattagtgtttactattgtatttgtctttaaaattattttatcttttgatttaaaatagtactttaaaattaaggggtattattttgggctgtgactaaggaaattgagatggatgtacaactagccccatattgagcatacttcattgtattcagctgttttcctgtcagccatttgtcagctttatattagctgatggtaccaattgataaaatgaatataaagtatttcattggttcaaaaatcacacatcatattaaaccatgcagaattggagtaacttccacttttttctagaaagtaaaaccaagagcctttgcttctggataactcacttaatattaaattaaagagctcttcacgtttcttgagaattatctgaagccagttgcattctgtgatatcagttttgaaggcacatggttctctgctttagatttatcccatatgctattgtttaatactggatgtatgtaagtgttttactgcactgtattgaattggtgtcttttgcacagttagcagtaaataaaaattagcatttaaaattgcaaaaa

SEQ ID NO: 247034 - DNA, 1807 bp, Homo sapiens
  misc_feature (583)..(583): n is a, c, g, or t
tcctgagatgctaccagtagaaaccttcaaggattgctaaaatctgtagtctgtgcactttaatccatctcttattagcttctgcattttgtgatttgactgagagtgacagattgctgaaaacattcttaaatttgcattgggtattaaactaagtaaaaattttgctttagttatgttttatttatgtacctgttagctaaatgttcaaagtctgatagccaaagctctgcctcttccagttttttcccttttaatttccaatacttttcttaaatcaaaatgacctgttatgaactagttctccattggtatgtctaagagaatgtagacaattcactgtccaagttttttttatacccaaaccttaagaattaagagttctttgaccatactggagacaagaaaagtagatgagcctactgttcataaggtgttatagttgtgtattgctactttatgttttgtttctttgttagtgattgcctcaccatcctatccatgccattctgctattcctcatgctggtgcctctctaccaccaccaccaccaccaccaccaccaccaccaccaccaccaccncctcctcctcctcctcctcctcctcctcctcctcctgctcttgatgtgggagagacttcaaacttacaaccaccaccaccactaccacctccaccttattcctgtgatccaagcggcagtgatttgcctcaagtgctattaccacagctactggcactccatggtctatgtgccacagatgcagcagcagcttcatgtagagaattatccagtctatactgagccacctctggtagatcaaaccgttcctcaatgctacagtgaggtgaggagagaagatggcatacaggcggaagcatcagcaaatgatacttttccgaatgctgattcttcatctgtccctcatggagcagtctattatccagtaatgtcagatccctatgggcagccacctttgccaggttttgactcctgccttccggttgtgccagattattcctgtgttcccccctggcatccagttggtacagcatatggtggttcttctcaaattcatggtgctataaatcctgggccaattggctgtattgctccatctcccccagcttctcattatgtacctcagggtatgtaagatccagcagtatgaagtattcttgcactgccattttcttgctgtttttgtttttaaaaagtattttatgttagtggttaaatgatttaggtgattagtgtttactattgtatttgtctttaaaattattttatcttttgatttaaaatagtactttaaaattaaggggtattattttgggctgtgactaaggaaattgagatggatgtacaactagccccatattgagcatacttcattgtattcagctgttttcctgtcagccatttgtcagctttatattagctgatggtaccaattgataaaatgaatataaagtatttcattggttcaaaaatcacacatcatattaaaccatgcagaattggagtaacttccacttttttctagaaagtaaaaccaagagcctttgcttctggataactcacttaatattaaattaaagagctcttcacgtttcttgagaattatctgaagccagttgcattctgtgatatcagttttgaaggcacatggttctctgctttagatttatcccatatgctattgtttaatactggatgtatgtaagtgttttactgcactgtattgaattggtgtcttttgcacagttagcagtaaataaaaattagcatttaaaattgcaaaaa

SEQ ID NO: 247035 - DNA, 2048 bp, Homo sapiens
  misc_feature (1029)..(1029): n is a, c, g, or t
aagaaaattcgagggaaagaagtttacatgactatggcttacggcaagggagaccccctcctcccacccaggctgcagcacagtatgcattatgggcacgatcctccaatgcactactcacagacagctggcaatgttatgtctaatgaacattttcatcctcagcatccatctccgagacaaggtcggggatatgggatgcccaggaattcatctcggtttataaacaggcacaacatgccgggccctaaagttgatttttacccaggcccaggtaaaaggtgctgccagagctatgataacttctcttatagatctcgttcatttagacgtagtcaccgccagatgagttgtgtgaataaggagtcccagtatggatttaccccagggaatggacagatgcccaggggcttggaagaaactattactttttatgaagttgaagaaggggatgagactgcttatccaactttacctaatcatggaggtccctctacaatggttcctgctacttcaggatactgtgttggaaggcggggacatagctcaggcaaacagactttgaatttagaggagggcaatggccagagtgaaaatgggcgatatcatgaagaatatctttatcgtgcagagccagactatgaaacttcaggtgtttatagcacaactgcatctacagcaaacttgtctcttcaggacagaaagtcatgttctatgtctcctcaggacacagttacctcatacaactacccccagaagatgatgggaaatattgcagcagttgcagcttcctgtgccaataatgttccagctccagtcttatctaacggtgcagcggctaatcaagctattagtaccacttcagtttcctcacagaatgctatacagcctctctttgtatctccacctacacacggcaggccagtgattgcctcaccatcctatccatgccattctgctattcctcatgctggtgcctctctaccaccaccaccaccaccaccaccaccaccaccaccaccaccaccncctcctcctcctcctcctcctcctcctcctcctcctgctcttgatgtgggagagacttcaaacttacaaccaccaccaccactaccacctccaccttattcctgtgatccaagcggcagtgatttgcctcaagatacaaaagttttgcagtactatttcaatctaggattgcagtgctattaccacagctactggcactccatggtctatgtgccacagatgcagcagcagcttcatgtagagaattatccagtctatactgagccacctctggtagatcaaaccgttcctcaatgctacagtgaggtgaggagagaagatggcatacaggcggaagcatcagcaaatgatacttttccgaatgctgattcttcatctgtccctcatggagcagtctattatccagtaatgtcagatccctatgggcagccacctttgccaggttttgactcctgccttccggttgtgccagattattcctgtgttcccccctggcatccagttggtacagcatatggtggttcttctcaaattcatggtgctataaatcctgggcccgaatcgcggccgctttttttttggcaattttaaatgctaatttttatttactgctaactgtgcaaaagacaccaattcaatacagtgcagtaaaacacttacatacatccagtattaaacaatagcatatgggataaatctaaagcagagaaccatgtgccttcaaaactgatatcacagaatgcaactggcttcagataattctcaagaaacgtgaagagctctttaatttaatattaagtgagttatccagaagcaaaggctcttgggttttactttctagaaaaaagtggaagttactccatctgcatgggtttatatgatgtgtgatttgggccaagaaatactttatattcatttatcagggcacccagctaatattgctgcaatggctggcaggaaacaggtgatcaagagtgtcactgggtggggcacactcattcctggcgccaatatcccct

SEQ ID NO: 247036 - DNA, 2197 bp, Homo sapiens
  misc_feature (973)..(973): n is a, c, g, or t
aagaaaattcgagggaaagaagtttacatgactatggcttacggcaagggagaccccctcctcccacccaggctgcagcacagtatgcattatgggcacgatcctccaatgcactactcacagacagctggcaatgttatgtctaatgaacattttcatcctcagcatccatctccgagacaaggtcggggatatgggatgcccaggaattcatctcggtttataaacaggcacaacatgccgggccctaaagttgatttttacccaggcccaggtaaaaggtgctgccagagctatgataacttctcttatagatctcgttcatttagacgtagtcaccgccagatgagttgtgtgaataaggagtcccagtatggatttaccccagggaatggacagatgcccaggggcttggaagaaactattactttttatgaagttgaagaaggggatgagactgcttatccaactttacctaatcatggaggtccctctacaatggttcctgctacttcaggatactgtgttggaaggcggggacatagctcaggcaaacagactttgaatttagaggagggcaatggccagagtgaaaatgggcgatatcatgaagaatatctttatcgtgcagtctcttcaggacagaaagtcatgttctatgtctcctcaggacacagttacctcatacaactacccccagaagatgatgggaaatattgcagcagttgcagcttcctgtgccaataatgttccagctccagtcttatctaacggtgcagcggctaatcaagctattagtaccacttcagtttcctcacagaatgctatacagcctctctttgtatctccacctacacacggcaggccagtgattgcctcaccatcctatccatgccattctgctattcctcatgctggtgcctctctaccaccaccaccaccaccaccaccaccaccaccaccaccaccaccncctcctcctcctcctcctcctcctcctcctcctcctgctcttgatgtgggagagacttcaaacttacaaccaccaccaccactaccacctccaccttattcctgtgatccaagcggcagtgatttgcctcaagtgctattaccacagctactggcactccatggtctatgtgccacagatgcagcagcagcttcatgtagagaattatccagtctatactgagccacctctggtagatcaaaccgttcctcaatgctacagtgaggtgaggagagaagatggcatacaggcggaagcatcagcaaatgatacttttccgaatgctgattcttcatctgtccctcatggagcagtctattatccagtaatgtcagatccctatgggcagccacctttgccaggttttgactcctgccttccggttgtgccagattattcctgtgttcccccctggcatccagttggtacagcatatggtggttcttctcaaattcatggtgctataaatcctgggccaattggctgtattgctccatctcccccagcttctcattatgtacctcagggtatgtaagatccagcagtatgaagtattcttgcactgccattttcttgctgtttttgtttttaaaaagtattttatgttagtggttaaatgatttaggtgattagtgtttactattgtatttgtctttaaaattattttatcttttgatttaaaatagtactttaaaattaaggggtattattttgggctgtgactaaggaaattgagatggatgtacaactagccccatattgagcatacttcattgtattcagctgttttcctgtcagccatttgtcagctttatattagctgatggtaccaattgataaaatgaatataaagtatttcattggttcaaaaatcacacatcatattaaaccatgcagaattggagtaacttccacttttttctagaaagtaaaaccaagagcctttgcttctggataactcacttaatattaaattaaagagctcttcacgtttcttgagaattatctgaagccagttgcattctgtgatatcagttttgaaggcacatggttctctgctttagatttatcccatatgctattgtttaatactggatgtatgtaagtgttttactgcactgtattgaattggtgtcttttgcacagttagcagtaaataaaaattagcatttaaaattgcaaaaa

SEQ ID NO: 247037 - DNA, 1176 bp, Homo sapiens
cttatgtcagtcaagtcactaatttttttgatttttaattttagatacaaaagttttgcagtactatttcaatctaggattgcagtgctattaccacagctactggcactccatggtctatgtgccacagatgcagcagcagcttcatgtagagaattatccagtctatactgagccacctctggtagatcaaaccgttcctcaatgctacagtgaggtgaggagagaagatggcatacaggcggaagcatcagcaaatgatacttttccgaatgctgattcttcatctgtccctcatggagcagtctattatccagtaatgtcagatccctatgggcagccacctttgccaggttttgactcctgccttccggttgtgccagattattcctgtgttcccccctggcatccagttggtacagcatatggtggttcttctcaaattcatggtgctataaatcctgggccaattggctgtattgctccatctcccccagcttctcattatgtacctcagggtatgtaagatccagcagtatgaagtattcttgcactgccattttcttgctgtttttgtttttaaaaagtattttatgttagtggttaaatgatttaggtgattagtgtttactattgtatttgtctttaaaattattttatcttttgatttaaaatagtactttaaaattaaggggtattattttgggctgtgactaaggaaattgagatggatgtacaactagccccatattgagcatacttcattgtattcagctgttttcctgtcagccatttgtcagctttatattagctgatggtaccaattgataaaatgaatataaagtatttcattggttcaaaaatcacacatcatattaaaccatgcagaattggagtaacttccacttttttctagaaagtaaaaccaagagcctttgcttctggataactcacttaatattaaattaaagagctcttcacgtttcttgagaattatctgaagccagttgcattctgtgatatcagttttgaaggcacatggttctctgctttagatttatcccatatgctattgtttaatactggatgtatgtaagtgttttactgcactgtattgaattggtgtcttttgcacagttagcagtaaataaaaattagcatttaaaattgcaaaaa

SEQ ID NO: 247038 - DNA, 1753 bp, Homo sapiens
  misc_feature (583)..(583): n is a, c, g, or t
tcctgagatgctaccagtagaaaccttcaaggattgctaaaatctgtagtctgtgcactttaatccatctcttattagcttctgcattttgtgatttgactgagagtgacagattgctgaaaacattcttaaatttgcattgggtattaaactaagtaaaaattttgctttagttatgttttatttatgtacctgttagctaaatgttcaaagtctgatagccaaagctctgcctcttccagttttttcccttttaatttccaatacttttcttaaatcaaaatgacctgttatgaactagttctccattggtatgtctaagagaatgtagacaattcactgtccaagttttttttatacccaaaccttaagaattaagagttctttgaccatactggagacaagaaaagtagatgagcctactgttcataaggtgttatagttgtgtattgctactttatgttttgtttctttgttagtgattgcctcaccatcctatccatgccattctgctattcctcatgctggtgcctctctaccaccaccaccaccaccaccaccaccaccaccaccaccaccaccncctcctcctcctcctcctcctcctcctcctcctcctgctcttgatgtgggagagacttcaaacttacaaccaccaccaccactaccacctccaccttattcctgtgatccaagcggcagtgatttgcctcaagtgctattaccacagctactggcactccatggtctatgtgccacagatgcagcagcagcttcatgtagagaattatccagtctatactgagccacctctggtagatcaaaccgttcctcaatgctacagtgaggtgaggagagaagatggcatacaggcggaagcatcagcaaatgatacttttccgaatgctgattcttcatctgtccctcatggagcagtctattatccagtaatgtcagatccctatgggcagccacctttgccaggttttgactcctgccttccggttgtgccagattattcctgtgttcccccctggcatccagttggtacagcatatggtggttcttctcaaattcatggtgctataaatcctgggccaattggctgtattgctccatctcccccagcttctcattatgtacctcagggtatgtaagatccagcagtatgaagtattcttgcactgccattttcttgctgtttttgtttttaaaaagtattttatgttagtggttaaatgatttaggtgattagtgtttactattgtatttgtctttaaaattattttatcttttgatttaaaatagtactttaactagccccatattgagcatacttcattgtattcagctgttttcctgtcagccatttgtcagctttatattagctgatggtaccaattgataaaatgaatataaagtatttcattggttcaaaaatcacacatcatattaaaccatgcagaattggagtaacttccacttttttctagaaagtaaaaccaagagcctttgcttctggataactcacttaatattaaattaaagagctcttcacgtttcttgagaattatctgaagccagttgcattctgtgatatcagttttgaaggcacatggttctctgctttagatttatcccatatgctattgtttaatactggatgtatgtaagtgttttactgcactgtattgaattggtgtcttttgcacagttagcagtaaataaaaattagcatttaaaattgcaaaaa

SEQ ID NO: 247039 - DNA, 1946 bp, Homo sapiens
  misc_feature (583)..(583): n is a, c, g, or t
tcctgagatgctaccagtagaaaccttcaaggattgctaaaatctgtagtctgtgcactttaatccatctcttattagcttctgcattttgtgatttgactgagagtgacagattgctgaaaacattcttaaatttgcattgggtattaaactaagtaaaaattttgctttagttatgttttatttatgtacctgttagctaaatgttcaaagtctgatagccaaagctctgcctcttccagttttttcccttttaatttccaatacttttcttaaatcaaaatgacctgttatgaactagttctccattggtatgtctaagagaatgtagacaattcactgtccaagttttttttatacccaaaccttaagaattaagagttctttgaccatactggagacaagaaaagtagatgagcctactgttcataaggtgttatagttgtgtattgctactttatgttttgtttctttgttagtgattgcctcaccatcctatccatgccattctgctattcctcatgctggtgcctctctaccaccaccaccaccaccaccaccaccaccaccaccaccaccaccncctcctcctcctcctcctcctcctcctcctcctcctgctcttgatgtgggagagacttcaaacttacaaccaccaccaccactaccacctccaccttattcctgtgatccaagcggcagtgatttgcctcaagtgctattaccacagctactggcactccatggtctatgtgccacagatgcagcagcagcttcatgtagagaattatccagtctatactgagccacctctggtagatcaaaccgttcctcaatgctacagtgaggtgaggagagaagatggcatacaggcggaagcatcagcaaatgatacttttccgaatgctgattcttcatctgtccctcatggagcagtctattatccagtaatgtcagatccctatgggcagccacctttgccaggttttgactcctgccttccggttgtgccagattattcctgtgttcccccctggcatccagttggtacagcatatggtggttcttctcaaattcatggtgctataaatcctgggccaattggctgtattgctccatctcccccagcttctcattatgtacctcagggtatgtaagatccagcagtatgaagtattcttgcactgccattttcttgctgtttttgtttttaaaaagtattttatgttagtggttaaatgatttaggtgattagtgtttactattgtatttgtctttaaaattattttatcttttgatttaaaatagtactttaaaattaaggggtattattttgggctgtgactaaggaaattgagatggatgtacaactagccccatattgagcatacttcattgtattcagctgttttcctgtcagccatttgtcagctttatattagctgatggtaccaattgataaaatgaatataaagtatttcattggttcaaaaatcacacatcatattaaaccatgcagaattggagtaacttccacttttttctagaaagtaaaaccaagagcctttgcttctggataactcacttaatattaaattaaagagctcttcacgtttcttgagaattatctgaagccagttgcattctgtgatatcagttttgaaggcacatggttctctgctttagatttatcccatatgctattgtttaatactggatgtatgtaagtgttttactgcactgtattgaattggtgtcttttgcacagttagcagtaaataaaaattagcatttaaaattgcaaaaaaaaataaaatacaaaaaaaaaaaaaaaaaaaaaagcaaaaatcacataaagaatataatttaagattttcgatctaaggggggacgtgtgacaaatgtagaccctattcgtagagcatattgacattcttatgactgac

SEQ ID NO: 247040 - DNA, 1409 bp, Homo sapiens
  misc_feature (583)..(583): n is a, c, g, or t
tcctgagatgctaccagtagaaaccttcaaggattgctaaaatctgtagtctgtgcactttaatccatctcttattagcttctgcattttgtgatttgactgagagtgacagattgctgaaaacattcttaaatttgcattgggtattaaactaagtaaaaattttgctttagttatgttttatttatgtacctgttagctaaatgttcaaagtctgatagccaaagctctgcctcttccagttttttcccttttaatttccaatacttttcttaaatcaaaatgacctgttatgaactagttctccattggtatgtctaagagaatgtagacaattcactgtccaagttttttttatacccaaaccttaagaattaagagttctttgaccatactggagacaagaaaagtagatgagcctactgttcataaggtgttatagttgtgtattgctactttatgttttgtttctttgttagtgattgcctcaccatcctatccatgccattctgctattcctcatgctggtgcctctctaccaccaccaccaccaccaccaccaccaccaccaccaccaccaccncctcctcctcctcctcctcctcctcctcctcctcctgctcttgatgtgggagagacttcaaacttacaaccaccaccaccactaccacctccaccttattcctgtgatccaagcggcagtgatttgcctcaagtgctattaccacagctactggcactccatggtctatgtgccacagatgcagcagcagcttcatgtagagaattatccagtctatactgagccacctctggtagatcaaaccgttcctcaatgctacagtgaggtgaggagagaagatggcatacaggcggaagcatcagcaaatgatacttttccgaatgctgattcttcatctgtccctcatggagcagtctattatccagtaatgtcagatccctatgggcagccacctttgccaggttttgactcctgccttccggttgtgccagattattcctgtgttcccccctggcatccagttggtacagcatatggtggttcttctcaaattcatggtgctataaatcctgggccaattggctgtattgctccatctcccccagcttctcattatgtacctcaggaaagtaaaaccaagagcctttgcttctggataactcacttaatattaaattaaagagctcttcacgtttcttgagaattatctgaagccagttgcattctgtgatatcagttttgaaggcacatggttctctgctttagatttatcccatatgctattgtttaatactggatgtatgtaagtgttttactgcactgtattgaattggtgtcttttgcacagttagcagtaaataaaaattagcatttaaaattgcaaaaa

SEQ ID NO: 247041 - DNA, 731 bp, Homo sapiens
gagacaacataaaaaggtgtctatgaagtagatatattatcctcacgttaaaggtgagaacgtaggcccagaaaggttatgaaatgtgtgcagagttcctcagctagtacaggcagagctgggatttaaaccttgtctgatttggccagcgcagtggctcacgcctgtaatcccagcactgtgggaggccgaggcgggtggatcatctgaggtcaggagttttcgagaacagcctggccagcatggcgaaaccccatctctactgaaaatacaaaaattagctgggtgtggtggcgggcgcctgtaatcccaactactcgggaggctgaggcaggagaagcacttgaacctgggaggtggggaggctgtagtgagccaagatggcaccactgcactccagcctgggcaacagaatgagactccatcttaaataaataaataaatcttgtctgactcaaaagctgggaaagccccaaacagacccagtgttcattcttcctccctctctgctcttctgtctccacaagtctctcactctatagacattcacgccttgccttggatttgatgacaagcaggtaagcttcaggcaagcacagttcccagatcctcccccagctgtgacccagactccatgctgggcaaggtctttgacacctccctttccaagccccttctgatgtctgccatccatccttggtcaaacaagaagtggaaagttggacatggta

SEQ ID NO: 247042 - DNA, 323 bp, Homo sapiens
aggtgttgtatagatattatttcctttaattcctatagcaatattgtaagttagatattaatttgctcctattgtaaggcataattattaatacttggtaagtggcagaacttagattcaaaaagccattctccagaagcccttgttctatcctcacatttctattttaagaacaaaattattatgcacaagtgcttcagagagactttgcaggtttttgttcataactatagtgcttgaaacaataaaaattgaagagacaaatagtataaactttaaaactctgcttaagaaataaaaatgcctcttaaacaattagttaa

SEQ ID NO: 247043 - DNA, 772 bp, Homo sapiens
ctgcaattagctttccaagccccctcccgtggccgtcccctcccaagacctctcacccatgtagcaatccctacatggctgcctgtcatgtccctactctctaagccctcctgcccactgttcctccctccccgacatgctgacaccaagtggtggaaaccacccctcagccccagcctgccctgtgcagagttcagctttgtgttgaatgagggggagagggacaagtgagggcggagagagagttcaggaggaggcaggatgcgcagggagcagagagtgagggagggagataccgaacagatagacagaaaacgttgtacggaaaagttgttttttcttattttttttccgggagaacccgcttacacagctctgtttgtaatttttttcttcatgctaaaatcacacggcctatttgttgatgtaagttgcctgaattccgtggtatgctatcttcttttttaaaaacaaaagcaaaaaaaaaaaaaaaaagcaaaaaaagagaaaaatctagaaaaaaaaccctaaaagatattgttgttaggtttgtttaaatgctgctgttgtatctgtttttaaagccttaaaccagtagagtttttttttctgtttcttttcaatttcctttcctttctgttccttttgatttcttaagacaaacaaaagaccaaaacccagagagtcacagagcccgtgcgtggggtgcccagggcatctgagccgctgcccgcttaaagcgcagtgctcggccggctggcgggcgggccca

SEQ ID NO: 247044 - DNA, 1407 bp, Homo sapiens
tgatcggtctttcgttagaggccaggcagtgctggatccatcttgacgcctggcagaaggggcagcgtcaccaaaccttgcagacaggctctctctggggcacaggtctcccgggtggcaggaggacaggcctggcctagcacatggtttgccacgctgtgtactgttgcccaaaaggagagtgcttgtcggtacagacgtgtgaggcccggattgtgtgtgctcgaggccaggaagaggaagggagctgctgcacctgcttgggtgacaaacagtgatgaatagcacctcacagcaattaggatgactgtcatcaaagacacagaaaatagcaagtgtgagcgaggatgcagaaaccctcatgcacagctgctgggagtatgaaagggtgcaaccactgtggaaaacacgttggtagttccccaacaagtggaacaccatcaccatgtgacccagcaattccgccctgcgcatgtatccgaaatagctgaacacagactcaagcggatgtgcgtattcccacgtctatagcagcgttgttcccagtgaccaaatgtggaaacaggctgtgtctgttgatgggtgatagacaaacaaagtgtccgtacatacaatggagtattactcagtctggaaaaggaaggaaattctgacacactctgcaatgtggatggcgcttgaggacatgatgcttagtgaaagtagccagacaccaaaaagggagactgttacacgatcccgctatctgaaatagctaggaaaggccagttcatcgaggtagaaagcagacgaaggctcgtcgcggctgggaaaggccagttcatcgcggtagaaagcagacggaggctcggtgtggtggctcacgcctggaatcccagcactttggatggctgaggtgggcggatcacctgaagtcaggtgttcgagatcagcctggccaacatggtgaaaccccatctctaataaaaatacaaaaattagccaggcctggtggcgcacacctctaatctcagctactttggaggctgaggcaggagaatcacttgaacccgggaggcggaggttgcagtgagccaagattgcgccactgcactccagcttgggtgacagggcgagactccatctcaaaaaaaaaaaaaaaaaagaaagcagactagacgttaccagggcctaaggcagggggagtggggcgtgagtgtatagtgaggacagagtttcagtttgggaagatgagaagttttggaggtggatggtggtcgtggttatacacggtgagaatgtcctgaatgctcctgaattgtacgcttaaacatgcttacactggcaaagattatggtatatattttttactatattaaaaagttaaaaaagggaagatacctacttcaacttggcagcttaaaaaac

SEQ ID NO: 247045 - DNA, 941 bp, Homo sapiens
agttaaaaatatgaagattaaggggaaattggagacaaggctttggaaaagctacattcctcaacttgatttttaaaagtagctgatgatccaaataaaagaatttgtcattttcaatcttttcctcattgttcatctgacagcggtaaaagctattactcagtctggaaaaggaaggaaattctgacacactctgcaatgtggatggcgcttgaggacatgatgcttagtgaaagtagccagacaccaaaaagggagactgttacacgatcccgctatctgaaatagctaggaaaggccagttcatcgaggtagaaagcagacgaaggctcgtcgcggctgggaaaggccagttcatcgcggtagaaagcagacggaggctcggtgtggtggctcacgcctggaatcccagcactttggatggctgaggtgggcggatcacctgaagtcaggtgttcgagatcagcctggccaacatggtgaaaccccatctctaataaaaatacaaaaattagccaggcctggtggcgcacacctctaatctcagctactttggaggctgaggcaggagaatcacttgaacccgggaggcggaggttgcagtgagccaagattgcgccactgcactccagcttgggtgacagggcgagactccatctcaaaaaaaaaaaaaaaaaagaaagcagactagacgttaccagggcctaaggcagggggagtggggcgtgagtgtatagtgaggacagagtttcagtttgggaagatgagaagttttggaggtggatggtggtcgtggttatacacggtgagaatgtcctgaatgctcctgaattgtacgcttaaacatgcttacactggcaaagattatggtatatattttttactatattaaaaagttaaaaaagggaagatacctacttcaacttggcagcttaaaaaac

SEQ ID NO: 247046 - DNA, 559 bp, Homo sapiens
agactaagtttttaatatttcatttggaaattgtttcaaactttgtgaaaagttgtaagaatagaacaaataatgctcatatattctactatttttatataaacagtgcagtcatgaaattcagggagtttaacctcgatacaacagtattacctaacgtacagaccctattcctgttcaggcagttgtcccagtaacgtcctttacagcattgtttttttaattcaggattcagtccaagatcatgcattcttttcactgagttgtcgtgtctctttagtcatctttaatctggaacgattcctctgtttttgtctttcatgacattgacattttttatgagaacagggccagttagttaagctgcataaactctcttattttgagtttgtctgatgcttcttcctgatgatattcaggttatgcatttttagtaggaagactatataagtgatactgtgtcctgccaggaggcatgtgatgttcctttgtcccattattggtgatgttaattttgatcatttggtgaatgcaagtgtaaaacatttgcaaggtaaaa

SEQ ID NO: 247047 - DNA, 197 bp, Homo sapiens
  misc_feature (2)..(2): n is a, c, g, or t
  misc_feature (10)..(10): n is a, c, g, or t
tntgaatccntttggcgcctcctactactttgctgcgagaagacgacagaatggcaggttatgcatttttagtaggaagactatataagtgatactgtgtcctgccaggaggcatgtgatgttcctttgtcccattattggtgatgttaattttgatcatttggtgaatgcaagtgtaaaacatttgcaaggtaaaa

SEQ ID NO: 247048 - DNA, 456 bp, Homo sapiens
tggtggtgatggctgcaaaacagtgtgaatgtccttaagaccactgaaatgttgactttgaaatggcaaaagcagtaaattttatgctatgtgtattgtaccacaatttttatttttagtttaaagaaaaaaaagtatccctttcaggataaaatgggaagaaatgtttagcacgttagattccctctggctattagaagcatgacttagtgcttacagtagaaaatgagagtataaattctcaagttttatattttggttatgcccatctcaaaaatgggccaaatgaggtttacttagcagagataatgggcatgtctgtaaagtgcttttatatccttggatgaaaggttctaggaacgtgccctgcattactttgaatgaattcttaataagaaatagttgtgtgcttgtgtacataaaagaactctaaataaagaagtaacattagatgat

SEQ ID NO: 247049 - DNA, 711 bp, Homo sapiens
cctacaatggctatctattaccttattctctggtttgtttaatgttcgaatctttccgaaagatccttcaacctttctggaagaatctaatctgataacaccatcaaaaacacattacttcttttggcataatttaaattgtaagacatcattcacatttatcaatgttacatatataagaactcacccaccatattcttccttgaggaattacagcatgtaattctataatcatttttataatcgtctaacaattttataatggattggttgcttactatcaattttttaaaagtcatggcttctccagtcatttcttgcttatcgaaattatttcatgagatgggtctctccttgtatatttgaaaatgaggtttgcttccttctacttaaaaaacaacttgaacatacctgtttggatcacatggtcttgtcctgataacttggaagaggttgcttcagcattgttcttattgttgtggtggttattattaatattgtttcatattctgtttaaaaaattaaaattttacacaagaccaatgtcttcttttcaattccagtacatttttcagaagtaactaatgctattggctttgtgcattgtaatttcagaccattttatatgtctttagttatatgtacagtatacacacatatgtgtcatattattccattttttctagcattaaacattgctatggaaaaaaa

SEQ ID NO: 247050 - DNA, 413 bp, Homo sapiens
aacttgagagcaaagctcaggttttctgttttcttcttactataagtaaataataagttcttcttgaccgatttcttgaattattcccaaatcatgtttctttctgcattggtatatattatggcaagtttgtatatacagatttaaaaggcaaatgcagccaggggcagtggtgcacacctgtaatcctagaatcttgggaggccaaggcaggtggatcacttgaggtcaggagtttgagaccagccgggccaacatagtgaaaccccatctctactaaaaatacaaaaattatctgggtatggtggaacatgcatgtaatcccagctactcaggtggctgaggcatgaggatcacttgaacccaggaggaggaggttgcaacagagtgagactctgtctcaaattaaataa

SEQ ID NO: 247051 - DNA, 353 bp, Homo sapiens
attttggctgaggtcacaagtgccgaggtggttcctttccaccacattccttgtggtttaaccgcaagggctcagtgtgaatgtagtgaagggaagtgggcaagcccagggctatatccagggcttcctgaggtctttgtgcagaggtataagagtgagccagctcatggagcttgccactaagtggaaataaggaagaatcatctgaggcagccatggacatttgaaaatattaaaactaagcagaactgaaggaaatagagacacaaaaaacccttcaaaaaatcaatgaatccaggagctggttttttgaaaggatcaacaaaattgatagaccgctagcaagactaata

SEQ ID NO: 247052 - DNA, 459 bp, Homo sapiens
gtgggatgcgctcgccgcgtccctgctcaggcggagggagcccggcccgccgccagggtctcgagtccgggtccaggcaggcgtggaggtggcgggaacggcgcaccgcccgggtgggcgttgttttaaggccgcagggcttgggaggcttgtgttgagttaaagggagtatgacaacttttcaacttgagtgcacacactgtccccggaatcccgcgttccagggaggaagcgcctttgacagcgcgcgccggttcgtggggcccgacggcgtgggcctgtggttgcggacctggcggagatgcgcgttcgcttcgattgtaggccattccttttaggagctgagaaaggatccgtttttacagcattctcgacctgtgattcttggtgggggaaactagttatgtggataaaaatacagttagcaaaataaaaatgccaattttacatttccttaaa

SEQ ID NO: 247053 - DNA, 563 bp, Homo sapiens
gtgggatgcgctcgccgcgtccctgctcaggcggagggagcccggcccgccgccagggtctcgagtccgggtccaggcaggcgtggaggtggcgggaacggcgcaccgcccgggtgggcgttgttttaaggccgcagggcttgggaggcttgtgttgagttaaaggtcggcccgtagatccccggaagcgcctttggttgccagcaggtgtcggcgagggtcttcagtggccaccctcctggtggtgatgtttccgtttctttccaacaggagtatgacaacttttcaacttgagtgcacacactgtccccggaatcccgcgttccagggaggaagcgcctttgacagcgcgcgccggttcgtggggcccgacggcgtgggcctgtggttgcggacctggcggagatgcgcgttcgcttcgattgtaggccattccttttaggagctgagaaaggatccgtttttacagcattctcgacctgtgattcttggtgggggaaactagttatgtggataaaaatacagttagcaaaataaaaatgccaattttacatttccttaaa

SEQ ID NO: 247054 - DNA, 395 bp, Homo sapiens
tcgcggttgaggaggcgcagggaccgggggccagtagtggccgtaaacacgggccccggccgtgtccggtcgcactcggtagcccgcatggctgcctagcgggagtatgacaacttttcaacttgagtgcacacactgtccccggaatcccgcgttccagggaggaagcgcctttgacagcgcgcgccggttcgtggggcccgacggcgtgggcctgtggttgcggacctggcggagatgcgcgttcgcttcgattgtaggccattccttttaggagctgagaaaggatccgtttttacagcattctcgacctgtgattcttggtgggggaaactagttatgtggataaaaatacagttagcaaaataaaaatgccaattttacatttccttaaa

SEQ ID NO: 247055 - DNA, 342 bp, Homo sapiens
ctgctcgaattcaagcttctaacgatgtacggggacatggctgcctagggagtatgacaacttttcaacttgagtgcacacactgtccccggaatcccgcgttccagggaggaagcgcctttgacagcgcgcgccggttcgtggggcccgacggcgtgggcctgtggttgcggacctggcggagatgcgcgttcgcttcgattgtaggccattccttttaggagctgagaaaggatccgtttttacagcattctcgacctgtgattcttggtgggggaaactagttatgtggataaaaatacagttagcaaaataaaaatgccaattttacatttccttaaa

SEQ ID NO: 247056 - DNA, 380 bp, Homo sapiens
ctactcgggaggctgaggcaggagaatggcgtgaacccgggaagcggagcttgcagtgagccgagattgcgccactgcagtccgcagtccggcctgggcgacagagcgagactccgtctcaaaaaaaaaaaaaaaaagcgtgtcaccacaaatctatcaagacagaaagtaagttagcagttacctagtgctggggattttggggaaatggagtaactattaatgagcacaattttcttctcgaggtgatgaaaatattctaaaattggttatggtgatagttgcacaactctgaatataccaaaagccattgaataatatactttaaagcaactaattatatggtatacatatgatatatcaataaaactatttcaaac

SEQ ID NO: 247057 - DNA, 580 bp, Homo sapiens
agacactcattgaagtaacaggcaaaatctagaatcgtgtgtgacttttcacataattctaggccagttttcacactaattttaactaataaaatgaaaattcttaaaattccaacaatctattcattaaatcctgaatttggtacattagctaattgacacaggttaacactgaagttatttttgttaacctgaggtaattggttgttacagacattgagactggaaagaaaaagtgaaaaggaaatggggaggtgtaggtcaaaaaacacaaggtagcattatttaggatgaactgtccaaaaacccaacgtacaacacgaggactagagcggacaagagcgtgctgggctcagagtttttgccgcactgagtggacaagagcgtgctgggctcagggttttgccgcatcgagtaggttatggctgctcctgcatgggtgccaggggagagaatgggaaatcagtgagatgtgggtgtgttaatttgttgcactctaataacaatttcactataaaaatatgtatcttataacatcataatatatgcctcaaatatacacaatacaatttatttttaa

SEQ ID NO: 247058 - DNA, 422 bp, Homo sapiens
gcagagtgccaaaggggaagagatgcggagcaaagaactggaaacttctcaggcattcacattggcaactcctgttccaagaataattatttatgacagatttcaattttcggggcagggatggtgtcttactcatcctgggcttcaggacatctgtgtaacagacgctccaggtgaagcagtgatgtcaaccctggctgaacactggaatcacctgggaagatcaaaaagcaacacctcctgcatctaggtttggtctggatattggaattttttaatgtcctggtggttttaatgggcacgcaaggttgagaactacttatttatagttttcatcaaaagtctgtctggtaaactcttaagtctttttcagtctgaagtctttattttgaattcaatcttaataaaaatttggtggttta

SEQ ID NO: 247059 - DNA, 433 bp, Homo sapiens
agaataaactgatgtagcaggactcctcaaacactgtgcagggtctccatgtcctcgatggcccctgatgagccacagtaccctcaggtcctggtgaaggagctggtgctgcctcctgcctttccccacatggggtcctgcagctcatcccacacagcctcagattccctctacagaacctgcccacagatgtcttccgagaccggcaatactgggaggcctgtggcccagacccaggaggaaccagctgagaggctccgtggaggtatcgctgatggtgtaaccagaatgaaaatgcccacttctgttctgctccctgagaacaactgtcaagccagcatgagtttccagttggaactattccttttctccccatgtttgtcgctgttttaatggacattgcctggctattaaatcccccgatgaactcact

SEQ ID NO: 247060 - DNA, 462 bp, Homo sapiens
agtgggttaattctcacagaagtgggtgagttattgagagcagttcattacaaaagtgagtttggcttcctcggctttctcttgcttcctcggctttctcttgcttcctctcaccctacgatgcattctgctgtgttacaacacagcacgaggccctcaccagaagctgaccagatccagccaccctgtcttggacttcccagcctccagaactgtaaaaaacaaaccccttttctttgtcaattacccagtcccatgggttctatgacagcaacagaaagtggacaaattgtgtaacatgcacatgtccaggagggtgtgtgagaggtaatcctgttgttacggttgttctgtagggtgaccacaattgggaatttccctgggactgttttggttttagcactgaaaactctgtatttcaataaactactcagacctggtaaaccaggatggttggtcaaa

SEQ ID NO: 247061 - DNA, 428 bp, Homo sapiens
aaattagtacatgtagaaaagtttcctggaaagaagctcaaacaatgagctctaaggaattgcggataaaatactggcttctcagcttgggttctggctctagccctattgtcaacaagccaccgtgggagaatatgaagtgagatcatcagctaagagttgaggttccacagatgctactgggggagatgaagaagatatttctcttattgcaagaaatgagaaaaatttactagcaaaatatgatatgtgataccccttccaattctagaattcaatacacttatctcatttttcaaagaattccacaaacactaaatcatataaaagattaaacaaagggagataacagttgcagacaactaggaaacactttacgatagagtgaagatttgtcagttaataaatatgtgaccttggataattca

SEQ ID NO: 247062 - DNA, 260 bp, Homo sapiens
tctcctcacctttccctgcttcctaacccagggaggagcctctgcacagctgtgtgagctgaaagaagggctgcatggtgaatgagcctgccacatctggactgagcactgctgggctctctgcatgccatttggccatgaacagcttagaaatgaaaatggtgttttccactttacccatttgccgtttctctcctcatgtgtattcatgggtgatcctagctcactctttggcaaaggacacactgtttctgaaactg

SEQ ID NO: 247063 - DNA, 407 bp, Homo sapiens
cgaagattaagcacagcactcggctgttttttgcttacatcccttccgcagctatggcataggtcccactttcccttctacagtccttagaaagctcttccagcagtggttctttcctgagacgtggaactcaatattcattagataattaggaaacatcatggagctgcattaatcagtcagggatggaagatctggaagaaccattgtgatggttgacctaggagaaccctaagcttgttgtaaattcatatgggccagtaatgaaaactagaaggattatattaatactaatacaagcagctcttgactgatgaatttgagataaaagtatgttatcatcttgagtgtaaggtttatcacatatttaaaactgagacactctattaaattctgtgtgggatgca

SEQ ID NO: 247064 - DNA, 306 bp, Homo sapiens
tcaaaagaatggagtattctatttattaaaagtatctggaattctattgtgtgtgagtctgtgcaggaacacaatgagtctcaaagtgaaaaaaactttggattcctggttcctacagcacttttgttcagatactctctgttattttgctacgtgaaaagggagcttgaatttcatgtgaagtataaaaaccaaggagaggaatcctgcttggggccatcaagtattatagcattgtggtcatgaatgattaaatagataggagaagtataattctcaataaacaccaaatgaattgtttagatg

SEQ ID NO: 247065 - DNA, 543 bp, Homo sapiens
tcctgaatacctgcatcttcttcctgactgacatggctttaggaaacacagcacattcacaaacatctgaagccaactgcaaggcacccgtcactcagcgagaaaagcagaaaggtgccaattcagatggctgagctacttcgcctgggtcccgacctgtatcaccacagggtcacagaaatggaaccttctccgtcacacctcctgatggcagtcagctgtgacccgctgaatccaggacatcatgcattccagtttcatttgcgagaacatttccaggtccggctgaagcctagtggctccagcagaggtctcaacccctttgggatgctcagtgggagacagaatcaagggccaatgatccatgacctagtcctagtgcccatgtcagtttgtcaaaggccctcagagcagattgtgttttccctggcgggggcttgacttctttgctttaaaaaggattcttaagtatttattgcagtaaaattaaccaccttcaaatttctgccagatcccctggaggtatatagcttattaacacaa

SEQ ID NO: 247066 - DNA, 522 bp, Homo sapiens
ccaagagaacatagtctccccatcttacactcgctcggaatgggggctggccccactctgctctatttaatctgagcactgttgaatgaatctgcgatgaaactccacatttcctttaatcctcacaacaaagataaaccaatttttagattcgtaaactgaggcttagagaagttaaacgtattgtccgagactacagaactggaaaatggcaaagtcaagatccaactccgaagagcctccccctgcccactagcggggaggaaatggcaaatgacacagcaaaaaatgtttaaaaccaggattctcggtcgccgtcccgcccagcgccaacgctccgtcccgcctcgcatcaacgcctcgctcctccccgcccagcgccaatgccccgccccgcgcagccgcccaggtgccagttgcgtaaccacggcaaagctcgcggcagggggcggggcagacgctgactgtcgccgggcggcggtcacgtgagcgggagcgcagcaggccggcggtccgagtgcc

SEQ ID NO: 247067 - DNA, 404 bp, Homo sapiens
cttcatccagaagtcttgtgattggctttacttggttctcagggatttttatggatccttagtccagaactagatcttaaagtagcctggatacagaattacagctagatatgaggaataacttctagtgttccataccattgtaggcttactatggttaacttaggaaatacaaatgaatatcatttccattatcatagttcatttatatttcctaagataagttaatggctacttgctgcgggagaaattcactgtattttcttaatcttaagaggtggggtaacttaactccaaattactatcagttgataatagtgttacttaaactttaaaatgttatattctctgagcacctaaatttaattcaactatggatatttggtgagatgacatagtgaaaa

SEQ ID NO: 247068 - DNA, 634 bp, Homo sapiens
gccagatggtgcaggcagtgaggagagactcaggactgcaacctttcggctccttattcctgctcatcactcagaaaagggcagtactaacccctttcctaaccaagacatggcactccctaagagctcttgtctatagagtttggtccttagaggaaagcagataccttcagcgtgagaagggcttggttgacagttttggggtattatgggaagagtaggttggggtaaagcttgagtctaactcttgatccttacatggacctatgaggccctgccattcagtcaggcactgtccttgggtcctcaaattaactgctgagaacactccccactttccgaggacgctgatgggaaatgggctctgtccatgcagctggaaggatccagtgctggtgccactgtcagtggcaccatccttgccttgaatgatctttcttgcaggctcctgcagctgagtgtttcttgtaagatttttcagggggattgggcaagaagaagaggtgcaaattctgttcccttcctaccttgaagccttcccagaccaccacggtctctgcacaagggaggctcccattactgttctgttggcttctagacccaccatcccctctctttctgtggactctgcccg

SEQ ID NO: 247069 - DNA, 196 bp, Homo sapiens
cctcctagtctttctgtctcctagggaaagagaaaaattacaaagaagaaatctctgtgtgtgtgtagggtgtgtgtagtgtgtgtgtgtgtgtgtgtgtgtgtgtgtgtgtgtgtgtgtgtctttttcccctcttccctttcctctttttatctggtccagaagaatgatttgaaatatatagtgccttgtacca

SEQ ID NO: 247070 - DNA, 470 bp, Homo sapiens
gaaaaataagccctacccccactcccattccctttcagatgggagtgtggggggtgggggtggggtagagagagtgagagagagagataattagaatgaatatatgccagaagaggaggaggcctgggacaggaaaagggagtaaaaggggatgaaccgggtagggaaatcccacccgaactgcgtgagccctctgagcgtctcgtgtcatgggacatctgtacgctcttccgctaagggggtgacgaaggtgggtgggagaggttagggcgctgcaaggcacatcccattccgtgcggctccaggtgcgtactacctggcccacgccggccttgccttccgccggtgcttttgttgcaccctccccacatgtgagcggccgcatgcgcgggcgcaggggcttcggggaaagtgaagtgtcgcgacgctgcgggctgcgcagacctgggagaggtcacacctctttcgga

SEQ ID NO: 247071 - DNA, 595 bp, Homo sapiens
ctctgtctaccaggctgcagtgcagtagtacagtcatagctcactgcagccttcaactcccacactcaaatgaacctcctacctgagtttcctgagtagctgagactacaggtgcatgccaccatgcctggctaatttttaaattttttttttgtagagatgggttctcactatgttacccagactggtcttgaattcctgggctcaaatgatcctcctgcctcagcttcctgagtagctgaggcaggagaatcgcttgaacccgggcagcagaagttgcagtgagctgagatagtgccactgcactccagcctgggtgacagggtgagattccatctcaaaaaataaacaaacaaacaaaaactccatatacaagcaatcatatctctcactatctcagttactctacatacactgaaaacagcttacttttggttttacatatcacaagatcttattagagacacatcagcacgatttgaattctatcctctggtctgttctccagttgtgccactaagagccagttggcctcccaaatattatctggacatatacttacgttagccaactggctgctggtactggtgctggt

SEQ ID NO: 247072 - DNA, 471 bp, Homo sapiens
tcgaactgtcagccttatcagtgtaaccctgtccttctctatcaccacctccaccttaactaactctagacctgccctcagtcgcttctgtggtatggggattgacataaatggaaaagaccccctaggtattttttaaatacgcattattcccccatctcccccttcttcagtagcctcagttctagatctcacaccggttgcttctacatctaataataaaactagggtgtctattgtaaaaataagagatctaaaacagaccttagccatcgagagagtatcaagatgcaaatccctggctgaaatggattaaatattccgttcgcactttaaataaaagcgattgttacgcatcaggttataaatgagcctgtctcctttgttcggtgtactctcatggcaaagctgctggcgagtgtaccctttctgcaggaagtaaaaatggccttgctgaggaaattaaaaaaa

SEQ ID NO: 247073 - DNA, 639 bp, Homo sapiens
  misc_feature (629)..(629): n is a, c, g, or t
ctctctatatttggaattattcatgtccatctctaacagatcacaaactcaaaagccagaaatgcattacagcctcttagctttgaagagttctggattgggtgccttttagccaatgatgcaaggggatggggacacagcatggggaggaggtgccttgagtcctagcaaagggagttgtttgggaaaaactctcaaaccacttttcctctgctctcacactgccatgatcaacacagaagatttctgtgacagcaaaatacatggggaaattttccccgtcagcaagcaagcaatcagttctgcagcagacaccagctgggtgtcccccaattcagttccaacactctccaccccagaggtagcatcagacaccgcagagtgagggctcagtgccataagaccacccccttctgcccgctaatcacaagtctgggcctttggaacttctgaccaaatggtttcaaactggggttcccacaaccccctctttgggctcaattactctgctagagcagctcacagaactcagggaaacacttatgtctattggtttgttatgaaagatattttaaaggatgcagataaacagcctgggtgacaaagcgagactctgtctcaaaaaacancaacaaaaac

SEQ ID NO: 247074 - DNA, 582 bp, Homo sapiens
ataattctattttcatttacaaatatatttatgtacatttgtatagctaggcttagaacaaagactggaagcatatacatcatcaaatttattgatggttatctttaggtggtgacattaagtgggatttatctcattttatactttcatatacttttaaatgtcctataataattatccattatccttttaaaaagaaaaaaatatgcttttaaaaataaaagcaatgcagtcagatgtgtggtgctgaagacttcctaatatcttacagaattttagagaaagaaggaaacagaggacccatataaaccaaagcatctctctttagaggtgatgaaatgggtctagagaagggaagtggcctgcctgaggttacccagactcttagtggctgggctatgacagaccccaggtctccaggctttggggctagaagctttgaagtgttccagtgctagccagggacctgcctctattccttcctgccctgtaggggtgacaaaaagaccagaggaagtgcaatgattccgagggtggagaaggatgtaatagtctttgcagagaggactttgcagctctcat

SEQ ID NO: 247075 - DNA, 321 bp, Homo sapiens
tggttgctccagtcccaaccttcatgtctgtgttccatgtagcagaaaggagagaagaacctgtcacttacttaggaagactttgtggaagctgcactttacatcctgcttacatctctttgactagaatttaatcacatggtcaaaataagcttcaaaggatattaaaatatgttatcagttaaaatttgtggttctatagctaagcaagaagtggttttttttttgtttcagaagtcaatcacattgtctggacactgctggtatactggttttgcccatcctatagttgtataattgattcttttgaacttaaagcat

SEQ ID NO: 247076 - DNA, 486 bp, Homo sapiens
ggatatgttcactcagcagggagctgcccaagtagcagtacttgggaatagccagtagcaggcagcaataggtgaccagtctcaggaaaagtaatggggtcccataattcacacagaccaacttgccccctgctgttctcccttgacttcattaatgcccagcaattgtccacaggccatgcacctgtactgtcagatgcagagcagggtgagctgaataggttcttagacacagctagaaatccaagtaggaggagccagaccagaggtcctgggaacaaaccgagtccaaacaaaggtaaatacagtgtaacctacagcatcattcgcttcgcttagaaggatgtgacccatcggctgggagcatgtgatgttaatgcagaatagcaagacgaccaggtgaaaggggagcagcacagccaccaaggtctcaatcttcaggttgagagaacggaaagtttaaacagagggtacaggaaagtcaga

SEQ ID NO: 247077 - DNA, 463 bp, Homo sapiens
tagctaggaccccagaggtctgcagcaagagcgggttgtccctctgtcccttccctcacccgttacccaggagctgttcaggactggaaactatccctagcatttgagtaccactcacagggctcccacctttctctctcttcagccttcatgtctatgtcacttctctatagactcttggtgtttcatctgcaaagatatgctcaaagtgtgttggttttcttagtattttggtctctgtctgtgtgagcggcatttcctggctgcatctagtcagccatcttgccccctctaacttgaatgcattctagtttgtattctattctgtaataagcatgataaacagccacagccatttttctgaaatgaagatggacctctttaattactttgataatattaataccaataaagtggtatttatattaaaatagtcaataaatagcatattttagtaaaaaaa

SEQ ID NO: 247078 - DNA, 492 bp, Homo sapiens
  misc_feature (7)..(7): n is a, c, g, or t
  misc_feature (155)..(155): n is a, c, g, or t
gaaatanaatgtgtgagatttatgagtttatgggtttctgtctgaaagcattctccaatcttggggcaaggatacaagcagaagctatcagagaactgagtgtgatgctaacagagcagccagaaaattaaaaggaaaatctagtttaaaaaaanttattatatatgtgaagaaacaggaaaatgtgataattacttgggggaaaaaaagtgtcactaaggctccaacttccagtaatggtagaatagcttgatcatcaacagataataatgataaaatctggataatttgaaagtattggagaataagcagaagcaggcagaaactgaataagagtctacccttgaaataaaatgtgtgagatttatgagtttatgggtttctgtctgaaagcattctccaatcttggggcaaggatacaagcagaagctatcagagaactgagtgtgatgctaacagagcagccagaaaattaaaaggaaaatctagttt

SEQ ID NO: 247079 - DNA, 334 bp, Homo sapiens
gattagacatagttcaagataatagtttatatgaaaaattgatgctctaaagcatttgctaccaaaatttgtttttttgtgtgtgtgttacctttactcttctccctgggtccacttaatggttctgtatttttttggagagccaaatatgtcttgaaggtagtcggggagagggaggaggagcaacatgaaatgagtgtgctgttttatcagaagccacttattcacagggcctgaagtgatagctgttgggagaagtgatattcatactgatgggggtaaaactgcctactcattttggggagcttttgttttcataataaaaattgtttgt

SEQ ID NO: 247080 - DNA, 908 bp, Homo sapiens
tggtctcaaactcctgagctcaagtggtcctccttccttggcctcccaaagtactgggattacaggtataagccactgtgcccagccataaattgcctggctcagccttccgagtagctgggactacaggcgcccaccaccacgcccggctacttttttgtatttttagtagagacggggtttcatcatgttagccaggatggtctcgatctcctgacctcgtgatctgcccgcctcagcctcccaaagtgctgggattacaggtgtgagccaccgcgcccggccgtaaccacaggtctataaattaccatttttaagattactctgtctgctatgtggagataatagattgaagtaggtatggatagtgatagtgaaaatgggaactggtatttattgtgtattttatgggaactagtacttactgtgtgtttactatgtaccaagcactgtcccgcaccttttacatagattatcttgttgaatcctcagaatggctcaatgaggtacacgctgttttttcactttactgatggggtagtgaggcacacaataacctgcacaaggtcattccattggtaattagagatgggaatcaaactcagccagtctgactcttgagctgctcttctcaactgggcttctgtgggagacttaatacctaatgccctaaggcctccattgtctataatgaattcttctttttcccctgcatctgtaacagtactagctatgtatcattcttgggagaactgagtaaagagccacacaaatcattttctgtaggtttagaactcttgcagagccctgcttcagaaaggctactcagtgctcttgctcataatcactggagtaactgcagggttctgaagagattaaggtgggtcagattcggaggatggcagcag

SEQ ID NO: 247081 - DNA, 778 bp, Homo sapiens
ggtcaatgattcattgatcccaataataaatgttttaataatgataaaacatcctactggggtttttcttgttaaaaactttaggacaggcgcagtggctcatgcctgtcctcccaaagtgctgggattacaggtgtgagccaccgcgcccggccgtaaccacaggtctataaattaccatttttaagattactctgtctgctatgtggagataatagattgaagtaggtatggatagtgatagtgaaaatgggaactggtatttattgtgtattttatgggaactagtacttactgtgtgtttactatgtaccaagcactgtcccgcaccttttacatagattatcttgttgaatcctcagaatggctcaatgaggtacacgctgttttttcactttactgatggggtagtgaggcacacaataacctgcacaaggtcattccattggtaattagagatgggaatcaaactcagccagtctgactcttgagctgctcttctcaactgggcttctgtgggagacttaatacctaatgccctaaggcctccattgtctataatgaattcttctttttcccctgcatctgtaacagtactagctatgtatcattcttgggagaactgagtaaagagccacacaaatcattttctgtaggtttagaactcttgcagagccctgcttcagaaaggctactcagtgctcttgctcataatcactggagtaactgcagggttctgaagagattaaggtgggtcagattcggaggatggcagcag

SEQ ID NO: 247082 - DNA, 387 bp, Homo sapiens
tggttttttagagagaccacatcagctctatgttaaaaaaaaaaaaacactaatggcaaacacacctctacaagtctttcaaataagcctgtaggcttttggaaaaatacccttcttgtaatgtaataaaagtgaattctatcattcactccaattatagtcagtaagatacagaaaaggccacacatttaaaatattgaagaaacaaaaaataacagaccctcatgtctgattaatgggaaaaatattattttgtgtgtgattttgttcatctcagatatgaaaaaaaaaacctttgtttttataacttttctcaaaaggacgtaaacacctctcagtactccaacaaacatgtttaaaacaaacatggctaacaccttaatcttc

SEQ ID NO: 247083 - DNA, 299 bp, Homo sapiens
ttgcatacatttgtaaaagtctattaaaaaataagtctcagccgggcacatcccagcacttggggaggctgaggcaggcagatcatgaggttaggagtttgagaccagtctgaccaatgtggtgaaaccccgtctttactaaaaatacaaaaaaaaattaggtgtggtggcgtgcacctataatcacagctactcaggctgaggcaggagaaccgcttcaacccgggaggcagaggttgcagtgagctgagactgcgccactgcactccagcttggaagacagagcaagactccatatc

SEQ ID NO: 247084 - DNA, 729 bp, Homo sapiens
tctgggaacttgcccttatcattgcttacatccctcccacctcccccactccaacacctcccctccagccaccagcagttcccagctgaccatccagccctcatcccaaacttcaccccacccaacaaagctcagtacagaccatcaggatggtgtatgggctttattttcctggtaaacacatttctgaccaatcattaccatttgctcttttgtgctaaacttcaaagtgacggaaccaaatgtaggtattcagcttgcccaagcttgggctggtttttctcagtcgtcttcacccctgtgtttgaaagggttcctggggtagttctcccagccacagctgcacaggggctcactggataactgcagattcaccttcactacctcctgggtggatgagcttgggtgagttagtggatgtcttggaagctcagttttctcgtcgaaaacagcggcctcaaggagctgcagtgaagatgcaggcagtggaggagcggagggcacgcagcatacacagcctcctagtaggtgcccaaggaatgcagccgctagcgtccaaggactgcagtgactaatcttggcatttagcctccagacaactggggaaatagcttttggcaaagtcacctgtgctgtccctttacagcaagtgtttcacatatcttgtggtggttcctcaacatcccttgagaattatttaccacagattaggttaaaatttggagagtt

SEQ ID NO: 247085 - DNA, 555 bp, Homo sapiens
gttttcatagaataaggagggatcactttggaatggtgggagatacaggtagagccagattatggaggccgtggatccagaaggctaattgacatcagtctagcaaataaaacctttagtaactcctttaggaaaagagtgacaaatcaaagtgctatagtatttaatgcttgagtgttaaatatttaacatcctgagtatgttttgtaggcaaagaggagagttacttgaagtgaactttggtttttttgagacagggtctggaatgtagtggcacaatcttggctcactgcagcctcaacctcctgggctcaagcagtcctaccacctcaggccctctcctccaccccagtagctgggactacataagattactacataagactaccatagattctgtcaccatgcccagctaatttttgtatttttagtagagatggggtttcaccacgtcgcccaggctggtcttgaactcctggactcaagggatccacctgcctcgccttcccaaggtgctgggataataggcatgagccaccacgcccagctataatt

SEQ ID NO: 247086 - DNA, 843 bp, Homo sapiens
agagagactgcctgtctccattgaatctttcagctaattcacctgcccaagcttaaagaaaactcctaattccttttgtagctttgtgagcatggggaatggtaagggaggctagtgacatctatactatcactaggccttcactgactcctggaaaatcactccataaagggtaattgatcataatcctaaggagtatagggggtaccgttgtgctgaacaatggggactttctattgctagttgacaaataattgttttcccacatctagccaccctgagaagacattaccatgctttcctgaggagcaataaatgctgagggtttttcttaaatctgccactttctaaagcaggggtgtccaatctcttggcttccctgggccacattggtagaaaaagaattgtcttgggccacacataaaatacactaacgataactgatgagctaaaaaacacacacacacacgcacacatacacacacacacacacaaaatctcataacgttcttaagaaagttgacgaactttgtgttggactgcattcagagccgtcctgggccacatgctgcctacgggccccaggttagacaagcttgttctaaagcatctgcagttcaacgtgtgtaaattgttccctaattagacatttgcctgttgataaacttagcaggcatggctaggcctgtcctaccccattcatgcttgttatctaggtctgtcctgctctgcattcatgcttgttacttatgttcaggtagctttatgtttcatttgtaaagatgaggggcttggggcacagtcttttgctggactaataatttgacagtgcttcagggctta

SEQ ID NO: 247087 - DNA, 374 bp, Homo sapiens
aaagtctggcagggagtgtccagcatggcccgtgtggctccccagggaatctttgatcttaacaaggtttgggtggtctcagcagggtggggaggagaagaaagcccactcagggtgctggtccaggggtcgcttctctgacagttccccccgctgttccctgggacgggggccttctggagtttgcagcaccctccctcggttagagacagccctgctctcaaagcctcagagccgggacaagcaacccaaattttatgggtggggaggctgggctaagatgggtgggaggacttgcccagggtcctgaacctggagggggcagaatcaggcctaggcctggatctcctgactcgaggtcccgtggctcacac

SEQ ID NO: 247088 - DNA, 420 bp, Homo sapiens
tctagggtcaacacatatatggggaaactgatggtagatatgggcttcttagtcttgaaagacttatgtagattcttttttggtgccatctcatcttgtgataaaatcattatcccccggccaggtgcggtggctcatgcctgtaatcccagaactttgggaggccgaggcaggtgtttgaggtcaggagtttgaggtcaccaggtcaggagttttgagatcggcctggccagcatgatgaaacctcatctctactaaaaatacaaaaattagccaagcatggtggtgcgcacctgtaatcccagctactcaggaggctcaggcaggagaattgcttgaacccagggggtggaggttgcagtgagccaagattgcgccactgcactccaacctaggcaacggagcaagactccgtctgaa

SEQ ID NO: 247089 - DNA, 533 bp, Homo sapiens
taggttgaacctaactaaatttgtcatcttggcaaatttatgcctaaccttatttcccatgttagcattattgcttctgtttagagatgcccctcattcataggactgttatgaacattaaatcaacaaaagtatgtgcagtgtttgcatggtgagctctgtatatcatatgctcaatgaaaggcaagcattactacccttagagttatttttatgattgttattgacctaattcaattgaattcaataatttttactgaatcccttccatggatggtgctggactagattacaagggtaacagggcagaattatctacccattacactgtaaacaattccaggggttctctaatatgaatgtcatgagtacttagcacagtccctgacacaataaacattcagcacactttggttgaattgaattaaacttaaggcacccatagtctaacatgggatatagtaacagttaacaatgaagaatgtgagaaatatcttaagagcttcgcaaagtgccatgagaataaaaaaaaa

SEQ ID NO: 247090 - DNA, 429 bp, Homo sapiens
cagtatctatctagtcctaccatgactgttggttacaaggaagctggtcaaagtgcggcctgattaatgcttaatcataaccatatttctgttcagaattcttgttaaccctgtgaagacagcttcaatgtcacagagctgcctgtaggaatgaacgccttacacttcagacctggccctcttcacctgccctttccatgctgccaacagggccttccagtggcagcggtgaccagtcactgggaaagcccagctgagtcaatgtttgctggctaactgcagaaggaatgatgaactggtccccatgaatggagaggtccaacacaaagctatgctaatttttcataagctctgcctgccgccttttatatatcaacctgaaatgtaattatctttatggctggtggagtaaatcaccagtatgtgtca

SEQ ID NO: 247091 - DNA, 483 bp, Homo sapiens
tatctctgtttctgtcttcatctcttattattatatctctcgtgatttctgcctttgcctttctgtctcctttttttcccccagttttcccaaatggtaaaaaccaggagttactaaacaacaaagggtaatcaatcccttaccatagagtagaaagcttttggggtttttgtttgttttacttttgaggtctacttatagatatgtaatttaaatataatcaaaagagaattttattaacagatgaatatcaatagcaatgaagtttatttgtagactcaccaaacaaaagtaacctccaaatggtatattgtacatgtaatgtttattcattaaattacaatttcatttttttcttcttttgaaactttctaataaaatcagcagtttattagtgatcattccctctttgctaaaagtctcatcttttttgttccatctgttccattataataaaattctgtttataatccttaaaaaaaa

SEQ ID NO: 247092 - DNA, 296 bp, Homo sapiens
ttgccaggagatgtggtatgttaaaatacaggagtccctggggaaagagctactaaagaatagtatgaatgttcctcttcgtcctaatcatcctatctccatcacatttgctgtatactcaccatgcaggccttatttaacaaagaccaattcctccatgtggctctagctctaaaacagccccggtattctgtctccattgatacaacagtgagaggagaatattggactatgatggtctctatattttcagctcttaatttctatgattttaataaagtgcataattacttaat

SEQ ID NO: 247093 - DNA, 382 bp, Homo sapiens
cacttcctcattaaactttcctcttcaagatgtagcgtctgttgatgattcttgcctaaataaagtttttactgtgttggttgtaaatacacgaaggtttttcttttcttttgcttaattaaaaaaactaattttcttcttttctttacttgggtacatacatacacatatacaccagggtttttaactgatttgtttctggatagttgggattgtgggagtttcgttttcttgttttttcttttccagtttttctgtaaggcatatgggctgctttttaaatcacaacaaataaaataaattttaaggaagaaaagtatagataagatagacagtagtatatgtataatattcctgtacagttttccaccgaaatgggatt

SEQ ID NO: 247094 - DNA, 372 bp, Homo sapiens
gtataactctttggaaaaggtgtggtttttgagactgaggtgtcaaggaggacatcctatttcctgaggattaatgaacttacatctttctttaacctttaaatataattatgtttgtcaattgttagacttttttaaggcttggtttccagtaattatggtatgtagtctccagtccaaacaacaggctctgtacagagaagttttattctatgttattttatctgaatcaagatcacactcaaccatctcaagagtccctactatagaagaggggtgtccaatcttttggcttcccagggccacattggaagaagacttgtcttgggccgcacataagatacgctaatactaacgattgctcatgagttt

SEQ ID NO: 247095 - DNA, 688 bp, Homo sapiens
tcaggacattctttcctttaccctaatccttgatcttcagtcttatttagaaaagcttaatgttaaagatctagtttattcaaaactaaagataacaaggagtatgagaatttctatttcggagtgtaaaggaggagatgtttccttggcttctctgagcctacaggccttccttgctctttaaggaagtagagagagggaggaaagtaaagtatgcttttgttttttaaggttactttgctgggagtagtttgcatcccttttggttttcttgggtggaattaactgacttaagttttaagtagttgggactatttagaaacaatgcctatccaatgtttgccataaaggcagagggtattggctttagaagttaattcttctccaggagtgaaaattagcttctaaaccagaagcagcagagctaaataaagtaattttccacctggccagtgcatgatgtgaaaggtagattaaaaaaatcagaggacccattttctgatgaaagactaagccatgttgaaacagccctgttgaggattttattttaaatctatacattcacaaaggagctttgtgtatgtctttccctatttgttgtttggactaggaagccccacccagtgcttgttgaaggcagaaagttgtggaaagcaagccgggatttgaacagtggattgaggtttcg

SEQ ID NO: 247096 - DNA, 591 bp, Homo sapiens
tgtcagagagaaaaattaaatgtatacaatttgagacttaacatattagtggtcaaatttattggtgatgaagaaacaaaatggaattgcatctccttgcttgctgagtgataatatgaatttcattcatgactatttacaatgcagaataggagaggtaactagtgaaagtaaagagagtaattattgtttggttcaagtgattcctacaatgcctttaactatggtaggcagaaaacatgaactgaattgaagttaaaactaatctaatcataaagtctgactcttaggaacagactcaagacattcatatgacaacagcagcctggacatttaaagaactcttgtttctatactcctcatccatgacctcattataacatctctctgacctggaatgtgtctgggctggtattttcatctctttatgttgggagacagaaaactagcaatgcttagaggatcagtaccttatagaatcacaatctcctgtgtgtaggaccaaggtttatgaggaagatggtgtcacttgataacatctgtgaaccacagattatacgctaagatttactcaacgtcattcagtccatc

SEQ ID NO: 247097 - DNA, 286 bp, Homo sapiens
atgtaaccaaatagaaagtatcaatagagcaatagaaattatgaaacagaagtaaaaattctgcactagaaaagtataataatggagtgaaaaaatgtagaaagacagctcagcagtagagttgaactggcagaagaaataattagcaaatttggagttagactgatagagattattcaatctgaataacgaagagaaaaatgaagaaagaaatgaacagagggcgtctgggaaatgtggacattattcatcacattagcataagcatagtgggagtactagaagg

SEQ ID NO: 247098 - DNA, 440 bp, Homo sapiens
agataaccaagaaaagaatgttgaatttatagacagcaattgtcctttttgtagaaaaatattgagctcctgtatttcaggttaaaatgcatgtcaatttttcagatgaagtaactgaacatatcaagtagtatctttaagtcatatagctggtagaagacttgaaactagaaaccagagctgaaatgaagtcaaaagttctcactttggtatggtttcatgtttctgaaaaaaaaaatcaagtcatacagtgcattaaaaaatttttctgatatctaagactatgatagaaatttcatatgtatatatgtgtgtgtgtataataaatcacttttttaatacctttgatatattaaatgcaaagcagaaattatttggaagatgaaatatataggaataaattataaaaagtaaaagcataaataaaaatgctgagatta

SEQ ID NO: 247099 - DNA, 782 bp, Homo sapiens
  misc_feature (636)..(636): n is a, c, g, or t
  misc_feature (743)..(743): n is a, c, g, or t
tgtggtggctcatgcctgtaatctcagcactttgggaagctgaggcgggcagatcaccaggtcaagagattgagaccatcctggtcaacacggtgaaaccccatctctaccaaaaatacaaaaaaaaaaaaaaaagtatttttttttactcttgaaacttttttgttaaagacacaaacacacacgctagcttaggcctaaagagtcaggatcatcaagatcattgttttccatctccatatcttgccacactggaaggtcttcaagggcaataacatatatggagctgtcatctcctatgataacaatgccttcttttagaatacttcctgaaggacctgcctgaggcagctttacagttaatattttcttcaaagtagagagtacactgtaggccaggcgcagtggctcatgcctgtaatcccagcactctgggaggccgaggcgggtggatcacctgaggtccagagttcgagaccagcctgatcaacatagtgaaaccccatctctactaaaaatacaaaagtagccaggtgtggtggtgcatgcctctaatcccagctacttgggaggctgagattacaggcacaagctactgcgcatggctatacctttattccataagcttttctattnttaaaatgtatttttttggcccggtgggggtggctcattgcctgtaatctcagcactttggggaagctgaggcgggcagatcaccaggtcaagagattgagaacatnctggtcaacaacgggaaaccccatcttttccaaaattcc

SEQ ID NO: 247100 - DNA, 647 bp, Homo sapiens
gattgcactgactgttgtaaactgaaataagcacaaaaatacttacatgaagtcagcatgtgctcaggtgaataccttatggattataatttgggtttcttctgcttttccaaaaaaaaaagcaggtcataaatgaatctttctctcctaggggaaaagtccagcatctaggggaaaagtccagcatctatgtctccttcctgattattcatatccaccagcatagagtaggaaaatgtgagtttacttgttaaattgatagtttgagagtgactgccaagttacaattatttactagacagggagcattctttaaggaagcaacactttccccagggaagccagatccttcccaaagctgttcattgttggactaccctgttacaaaagaatcacatatttcttctttctgtgttattaacaaattgataaatgaactcaaaagtcagagagtgataagacagaaatttcattaaaactggattagagcatttccttggacccaagaagaaaaatgtgcctctcattcttcctcctcttactcctcacttttcacccagtgaagggcaaagtcattgggcaaccagtgacacaagcgtttcacatcttaatctgcctattgcaagccaatagttttcattcttttg

SEQ ID NO: 247101 - DNA, 482 bp, Homo sapiens
gagtcagtctttgagtcactgaaagtgatacaagcagacagcagctggcttactgtgtgatgagagaggaaggtcccagcaccaccacgatggcatccctgccctcgaaaatggagactgagtagagccggtctagctccaatgatccgattataataactgcagggctgaaaacacgagttggtacactacacagcaaagcaaaccaccaaatccagagtgtgagaccttctacatggaaaatgatgcatttctccaataaagcagcaacaaagaaaaaaacagagaggagtcagggaccgtctcagagggagagagattgaagaggtagatggtcaaatgcagttggtgggctttgggcgctgctaagaaaccaactgcagaaaggcacctctgagacaatcagggaaatttgaacaggggctggtatcagattatatatttataattaaaatgttcatttaggaattaaagttgataat

SEQ ID NO: 247102 - DNA, 372 bp, Homo sapiens
aaaatccagatgagctcctgagttcacaggtcccgagtactataccctcccaccttgcctactccggtcaccacaccttgatcaccctgggctcctttcactttctcaaattggaagagcttttctcacctcggggccacacatgctgttccctgggcctgcaacgctcttcctccactgtgcgtggctggattcctatatactttggtctcagctcttctgtcatctctttgcagaaaccttctctggtggtctcattgggagcagccaccaagcacccgaagcccattttcctttttgccctttattaacaaccattaaaattgtgtatttatttattgcccattattcattaaatgtctttttgcctca

SEQ ID NO: 247103 - DNA, 483 bp, Homo sapiens
tgatttcccttcctgtgcaaggaagacataagtggcagaaccacatctcccgagtgtcacccagtgcagccttccacttccacctgcctagagccagggtaataatgagattctctgagagtcagaggaacattagtacaaagtatatcaataagatatattttagaggtgaggactctgaattatcacaaatgcatacagttttgtgtggtttgacccccagtttacagtgcaccccatagtcacttggatggcaaaattcaaacagtttcaaagtttatccttctcttttttttctctctctctttatataaagtaggtgaaacatctcgttaaatgatgttaaatctaagttccagtgccgtaagtccaaaggcagacctctgtgacccctagcagcctatagtttggccactctccgtgctccagtagtgtatttggggggtttcctttttttttcgagatagactctagctctgtcac

SEQ ID NO: 247104 - DNA, 880 bp, Homo sapiens
acaacaggtgttaagaggaagagaggagcaagcatatatatatggcactccaggaagatgaaggtgggattatagaagtgctgttagtaccagggacactggacaagaaagataagcaagccactgctgtctgattcctacatagcaggttaaagtgttggattcataattctcacttcaggaagactgaaaaccagactttattctgctagatcccaagatatcaaggaagaggaaaagggaagagccccaggcactattaaaccacagctacaatcactgccatttgaaacttcccaccaaacaactttactattctgatttaatttcaactcccagggagagttagtattaagaggaagtacctatcatccatgataatccaccagctctgggggtttagaagggaaaggatggaggtctcagtgcttgaggctaggctgacagctgagcagggctccagctcaccttaatctcactcctgtggatgcctgcactaggggcctgagcattctcccagatctctgcataggaggctgcccttaggcattattaaggtgtgaaagcagcaagaaagagcagaattaaactgcttttctctaatgtatccttttacagcccagtgtattttgccctaggctagccttttcttctcctttcaccctccacatgccagtccgagacagcctttcttctcacaggaattattgtattatttcttaaattctttttttcttctccatggcttttctagaggaaacctaacagtgtgggtttatcaatcattttgacaagactctgaattccactgaacagatttttgaataaaaattatgaacaaagaaagtgtagtaaatctgctaatagaaaaactgactat

SEQ ID NO: 247105 - DNA, 533 bp, Homo sapiens
cagataaaagaagtatcctgtgaaaggcacactgtaaacccccacactcagctcccctttatttcctgttagggcagggttgttggctgctctggtactagaacaccagtttaactgggggctctcagaaaaatactactcaggaataaaatggaacaaactaaggaaacacgcaaaaacatggatgagtctcaaaaacctgctgagtaaaagaagatagacatgatcaagtacataccgtatgattctatttatatgaggttctagaacagacaaagctaacctatagtgatggaaatccgatcaaataacaatgcctgtgatggtggtggcagagggattgattggctttaaaggagcatgaggaactttctagggtgatgaaaatgttctaaatatcattggggtggtgatgacacaggtgtgtacattagtcaaaattcactgaactgtacacttaaaatgtatacattttgttgtatgtaaatcatgtcttaataaaatttatttttaaaatttattattattattat

SEQ ID NO: 247106 - DNA, 466 bp, Homo sapiens
tatttatttatttatttatttatttatttatttttgagatggagtttcaatcttgttgcccaggctggaagtcagattccgtctcaataatcatcatcatcatcatcatcatcatgatgtcagagacaaggtcttgctttgtcatccagcctacagtgcagtggcaagatcatagctcactgcagcctggaactcctgggttcaagccatcctcccaccttagcctcctgagtagctgggactataggtgcacaccaccatgcctggctaattattttttgtagagacagggtccactatgttgcccaactgatctcgaactcctggtctcaagtgatcctcccacctcggccccccaaagcactgggattacaggtgcatgtgaccacaccccacctacctctgagactttccatccactttttctttctggcggaaatgaatgcccgggggcaaacttgccgac

SEQ ID NO: 247107 - DNA, 623 bp, Homo sapiens
gggagagaatgccacggcaatgtgaaggcagagactgggttgatgcatatataagccaaggaatgccagattgccagcaaacctccagaagccaggagagaaacatggaacagactctcgcacagccctcacaaggaatcaaccttgcagacaccttgattttggacttccaacctccagaaatacattgctgtttaagcctctcagtttgtgatactttgttatggcagccccaggacactgatcatacttttttttaggttgccaggacaccattgatctgctcctcctcctcctctaaatgttggcctcaatccacccacatgcctctctaacctgggtgatctcatctcattccatggaattaaatgccatctgaatgctatgacttccatatctaaacttccagactgacttcccttgggcttcagattccattctattatttctccacttagatttctatcacacgtctcaaacttatcacaatcagtagtcttgattcagctctactgaacctacctccccactcccagtaattcctccagaggactctttgcctacattctgaggctccacactgaggagtcaacctcaactcccctttccctcgattccatatg

SEQ ID NO: 247108 - DNA, 353 bp, Homo sapiens
gagccagtggttgaaatgtagctttcttgacaatgatcttgaatcttaatatagtaatgttttctttatctgatagtcagaatatgaactattccatgcaagccaattctctcaataactgaagcttgtatctccatgatattcaaaaacataattttactggatttgatacaaatgtcttatgaatatatatatatgattaaagaaaaatgttcaatctgacctttccctgatgactctcgatcattattataagtattattgctttattttgctttaatatcaaatgccgtcagagacttactgaaatttatgacgttgtttcactctaaataaaaatgaaataatattta

SEQ ID NO: 247109 - DNA, 382 bp, Homo sapiens
cactttctcctccttgaaataatacattattcatttggcttcttttttcttccccccaaatgttggcttttaattttgcttgttttgtttcatgtctgtaacagtgggtacctgggatttgattttgcccattctttactcccctatcactttcttttcatccaagaaagcctgatttggataatcagtgtaagtcaaagtgttcaaactgagtgtatagtttgtcaagtaaatttcaactcttacagtctgaaatgttacaaagttaggctgtagtacatgtttggcatctcatttttcatcatacttaatttgtcactgcattcgatagaggaaagcagaacaaataagttttcactaaccaaccacatgacagagattt

SEQ ID NO: 247110 - DNA, 465 bp, Homo sapiens
tagtgtacacttatagtatagctggaaattgggtagtatgacgcctctctggctttattatttttgctcagaattgctttggccattctggcttttgggggtgttccatataaatttagaatagttttttctaattctgtgaagaatgatgttggtagtttcatggagatagccttgaatctacaagttgctttgggcagtgtggccattttaacaatattgattcttttaatctgtaaacatggaatgttattccatttatttgtgttatcaaaatctccttcctcccttccatccttccttccttttcttatttccttccttttttgagacagagtctcaccctttcacccaggctggaatgcagtggagtcattatagctcactgcaggcttgaactcctggcctcaagccgtcagggtagttaggactacaggcatgtgccaccatgcctcgctatttaaa

SEQ ID NO: 247111 - DNA, 483 bp, Homo sapiens
ctctgttgtccagcctggagtgcagtgacttcatctgagctcactctagccttgacctcctgggctcaagccatcctcccacctcagctgggactcttgccatcacacctggccagcttttaaaaaacaattttatgtagagatagggtcttgctgtgttgccaggttggtcttgaactcttgggttcaaggaatcctcctacctcagctattgtaatttttaaatttaggaattttcagtcattttattgcctttgaaactgtataggaagttatttttcagacatcagcatttttgtagcaaacaaaattattttgttatatcacaatgtttaagaatatttattatcatcttaggttagaattaaaatagcatatttttaggaaagttctttttgtctgacagtttagagcagatccaaatatgaaatgtgagtaataatataattcttatacagttattttggagtaaatatatttgtg

SEQ ID NO: 247112 - DNA, 425 bp, Homo sapiens
gtcgtttttctgcccctgccccgtggccggagccgcaggcctgccgctacccccacccgggccacgccttccttcctcgcggccggaccgcgccagagtcccgggccctggctggaaactcgcaggccccgggcagccggggccgcaagtgcgatgaagaagcggggcccggcgcgcacatgtggttccgggcaggagccccggccgcctcgtgcccttcttctcgcccacgacggtggccggcggcggcctctgcttcccggacccatgaacaaagctggagatgcggctttggagtcggccctgggacctgcttcttctcttggcttcggggaccgcagcccagggcgttccctccggatcggtggccagggcttgcggggcgtgtgcgactcgggacccccagccgggcagcagcggccgcc

SEQ ID NO: 247113 - DNA, 318 bp, Homo sapiens
cacacttctgcaagcagagactaattataagctgcaccactcagacctgggcaagcagaaaccaaggagaaaacatttgatatcagcaaattctttattattattattattattattattattctcattccatttttgctccttcctttcctactcaagatatttgaggcatgagcaatctgtgactctaattaagggggtgacagccccaaccaggccaccatgcaggcttataatccactcatacacccagctttctccataatggctttattcttttcctccaaggttcaaaatcaccatgacttctcccccaca

SEQ ID NO: 247114 - DNA, 744 bp, Homo sapiens
ttgaacattctgtacatgtgttcatagagtatatactttctgctgtctagcttctttagctttacgtagaatgtgagggataggtatgattacattagtcgctcattttcttttattgccgatagtattccattgtataaatgtacagagtttgctcatcttttgtactgttgataaacatttgggggctaccaacttttttgttcacaagtctttaactgaatgtctttctcgtgggtaaacacttaggagtaggaatactaggacctagagtgttaactatattggaaattattcaaagggtttagcattttgcagtcctgccaacaatgtatgaaggttccagttgctctgcctcctcctcattatgccatattgtcattcttctcatttttatccattttcctgagaattaatgatgctgagcatctctctatggttagcaccctatggttagcatatcttgattgtgaagtgtacttttcatgatagttttctctcatgtttaattagagtgtctgattttatttattgatttgtgtagattgtttttattctgatattagtccctttttggatatatgtattgcaagtaattttctcccaatctgtagcatgtgctttcactttcttaataggctctttgggtttgttttgatgttgatgagagttttattatggataggttttgtttgtcaaattttgtttctctacttattaaaataaatatttgcttatgaccta

SEQ ID NO: 247115 - DNA, 376 bp, Homo sapiens
atggctgaattgaatagatattaaatttaaatgataaagatgtcttctggctttgattccttgtggttgataaatggctcaaagtgcaatggaaaatgaggtaaaaaagggagtaaaaaaagaatgagatccagtcatttgcaacatgaatggaactgaagattattatgttaagtgaaataagcctgtcacagaatggcaaacatcacatattcttccacttatttgtgggatctaaaaatcgaaacagtagaactcatggacatagatagtagaaggatggttaccagaggctgttaagtgtcatggggggctgtgagggagaggtgaggatggttaatggttacaaaaatagacagaatgaataagatccact

SEQ ID NO: 247116 - DNA, 454 bp, Homo sapiens
agcagtgtgttttaacaagcactccagacattttgatgcattctacagtttgagaacgtctacactgtaagagccccagccatcaccacctaccagaaggcttctatagctaatcatttgtcccctctcccacctccacccacaacacacataccatacatgctcacacagctaggttgttggtgtccttccaaacttgcatccaccagagtgtgcaccacattttttgtgttattatttctttatgtatgtacctcttctataaccgtataaactcatccaaaacatcaatgatggggtaccctttttttccatttcttgaatttagcatagtgacaggcaaaaacaggtactcagtaaacaccaaatgaattagagatacattgacatttgtgtatctgatgtatttatttgtatcataccttcttcaaataaatgaagtcttacataagta

SEQ ID NO: 247117 - DNA, 464 bp, Homo sapiens
caggcttttcgttattttcttattttctgggcacattcaagttcacttatcagatggaggtcattcagtcaacaaataattgtggagcccctgtgccatgccaggcttgggggacttgctgatgagctggattggggttggggagacagagtgacagaaagagaagaaccaggggtgactcctgcatttgacttgggcaactgggtaaataggtggtgtgtttcccaagatggggtgacttggagaggacatttatcaagcaacaatgaatttcctgtctactttactcatcactaacatagatgactgccaggcagtgcctttgatcagtgtgacggcactgagctgatgggactccagagaaaagcgaagatactggcattttgttgcagccctgttgtggctggctgcataataatttccaggaggctttcggaaatgttaaaaatagttcatgaccaaaa

SEQ ID NO: 247118 - DNA, 342 bp, Homo sapiens
aattgggaaaatagagaaagaactcagaaatcaaaggaacctggctcactgtgttcaatttgttcacatttcaacctcttaagtaatgaaatatcttctgaaataattgccttctcctctccattcccttcccacttccatatttttaggccacgacttttataagagcctctcagattgcactccttatgccttgaaagtgcatccagagttgtcattctaaaaataaatctaatcatgtgttcctttttgtctagcagtcatccagcatggcaagatccccagggttcttagaagcttggttccaaaacctacctttctaccagcactacctatcatttc

SEQ ID NO: 247119 - DNA, 521 bp, Homo sapiens
atttgacaactagggagcaatgccagcattattttctcttttgtagtatgccaaatatatttaaaaatataagccataattttaatacctaaagtaactgttagactgtgcattttcttattttagtaatagtaatttctgtttgtggtgaatatgagttttatttttaagtgtcctaaatgtttaataagagtcaagcctgagggagaaatcagtctggtagtttgtaattattaagatacagcagttataggccaggcacggggctcgcatctataatcccagcactttgggaggccagagcgggtggatcacagggtcaggagatcaagaccatcctggccaacatggtgaaaccccgtctctactgaaaatacaaaaattagctgggcgtggtggcacacacctctactcgggaggctgaggcaagaggatggcttgaacctgggagacagaggttgcagtgagccgagatcacaccattgcacttcagcctggtgacaagagcgagactccatctc

SEQ ID NO: 247120 - DNA, 1977 bp, Homo sapiens
agtttcctcttggcctgaacttggctgacctccgcagcttccgcccgactctggctaaagtcttggaggctactgccttgaagatgacctctagggaccagcccagacccaagggcccccccgaaaagcacttcgccttgtcctgggatctcgaactctgagagctctccgacgctgaattatcagggcattctaaatcggctcaagcagttccccaggttttctcctcattttgctgcggagttggagagcatttactactcgctgcacaagatccagcaggatgtggcagaacatcacaagcagataggaaacgtcttacagattgtggagagctgcagccaactccagggtttccagtctgaggaggtctcacctgctgaaccagccagccctgggacgccccagcaggtgaaggacaagaccctgcaggagtcgagctttgaggacatcatggccaccaggtcctccgactggctccggcggcctttgggggaggacaatcagccggagacccagctgttctgggacaaggagccttggttttggcacgacactctgaccgagcaactctggcggatttttgccggcgtccacgatgagaaggcaaagcccagagacagacagcaggcaccaggcctggggcaggaaagcaaggcaccaggatcctgtgacccaggaacagacccatgtcctgaagatgcctccacccccaggccacctgaggcctcctccagtccccctgagggttcccaagacaggaacacaagttggggtgtggtccaggagcctcctggaagagcctctcggtttctacagtccatatcctgggaccctgaggactttgaagatgcatggaagaggccagatgccttgcccgggcagtcaaagagactcgccgtcccgtgcaaactggaaaagatgcggatcttggcacacggggagctcgtgctcgccacggccatcagcagcttcacgcggcacgtgttcacctgtggcagaagaggcatcaaggtgtggagcctgactggacaggtggctgaggacaggttccctgagagccacctgcctatacagacccctggggccttcctgcgcacctgcctgctgtcctcaaacagcaggagcctgctcaccggtggctacaacctggccagcgtgagcgtgtgggacctggcggcgccctccctgcatgtgaaggagcagttgccctgtgcaggtctcaactgccaggccctggatgccaacctggatgccaacctggccttcgccagcttcaccagtggtgtggtcaggatctgggacctgcgggatcagagtgtggtcagggacctcaagggttatcctgatggagtcaagagtatcgtggtcaagggctacaacatctggactgggggtccggatgcctgtctgcggtgctgggaccagaggaccatcatgaaacctctggagtaccaattcaagtctcagataatgagcctgtcccacagcccccaggaggactgggtgctgctgggcatggccaatggccagcagtggctgcaaagcaccagcgggagccagcggcacatggtggggcaaaaagacagcgtcatcctgagcgtcaagttctccccctttggccagtggtgggcaagcgttggaatggacgacttccttggcgtctacagcatgccggcggggacaaaagtgttcgaggtgcctgagatgtctccagtcacgtgctgtgacgtctcttccaacaaccgcctcgttgtcacaggctccggggagcacgcctccgtgtaccagatcacctactgaggggcctcgctgctgtcatcccactccggctcctcttttcatccccccccttccccccccccaacaagggggacatggtggagggaagcgggaaggctcttctgtggcatcgcacgatctagtctgtggtgtagactggtcgccatcacgtgtaataaagcacccgggaaaggc

SEQ ID NO: 247121 - DNA, 1891 bp, Homo sapiens
ggcacgagggaacttggctgacctccgcagcttccgcccggtgagggacccttgtcctgggatctcgaactctgagagctctccgacgctgaattatcagggcattctaaatcggctcaagcagttccccaggttttctcctcattttgctgcggagttggagagcatttactactcgctgcacaagatccagcaggatgtggcagaacatcacaagcagataggaaacgtcttacagattgtggagagctgcagccaactccagggtttccagtctgaggaggtctcacctgctgaaccagccagccctgggacgccccagcaggtgaaggacaagaccctgcaggagtcgagctttgaggacatcatggccaccaggtcctccgactggctccggcggcctttgggggaggacaatcagccggagacccagctgttctgggacaaggagccttggttttggcacgacactctgaccgagcaactctggcggatttttgccggcgtccacgatgagaaggcaaagcccagagacagacagcaggcaccaggcctggggcaggaaagcaaggcaccaggatcctgtgacccaggaacagacccatgtcctgaagatgcctccacccccaggccacctgaggcctcctccagtccccctgagggttcccaagacaggaacacaagttggggtgtggtccaggagcctcctggaagagcctctcggtttctacagtccatatcctgggaccctgaggactttgaagatgcatggaagaggccagatgccttgcccgggcagtcaaagagactcgccgtcccgtgcaaactggaaaagatgcggatcttggcacacggggagctcgtgctcgccacggccatcagcagcttcacgcggcacgtgttcacctgtggcagaagaggcatcaaggtgtggagcctgactggacaggtggctgaggacaggttccctgagagccacctgcctatacagacccctggggccttcctgcgcacctgcctgctgtcctcaaacagcaggagcctgctcaccggtggctacaacctggccagcgtgagcgtgtgggacctggcggcgccctccctgcatgtgaaggagcagttgccctgtgcaggtctcaactgccaggccctggatgccaacctggatgccaacctggccttcgccagcttcaccagtggtgtggtcaggatctgggacctgcgggatcagagtgtggtcagggacctcaagggttatcctgatggagtcaagagtatcgtggtcaagggctacaacatctggactgggggtccggatgcctgtctgcggtgctgggaccagaggaccatcatgaaacctctggagtaccaattcaagtctcagataatgagcctgtcccacagcccccaggaggactgggtgctgctgggcatggccaatggccagcagtggctgcaaagcaccagcgggagccagcggcacatggtggggcaaaaagacagcgtcatcctgagcgtcaagttctccccctttggccagtggtgggcaagcgttggaatggacgacttccttggcgtctacagcatgccggcggggacaaaagtgttcgaggtgcctgagatgtctccagtcacgtgctgtgacgtctcttccaacaaccgcctcgttgtcacaggctccggggagcacgcctccgtgtaccagatcacctactgaggggcctcgctgctgtcatcccactccggctcctcttttcatccccccccttccccccccccaacaagggggacatggtggagggaagcgggaaggctcttctgtggcatcgcacgatctagtctgtggtgtagactggtcgccatcacgtgtaataaagcacccgggaaaggc

SEQ ID NO: 247122 - DNA, 648 bp, Homo sapiens
gactccgtcttaaacaaacaaacaaactagccaggcacggtgccacatgcctgtagtcccagctactcaggaggctgagacaggaggattgcttgaacccgggacgcagaggttgtagtgatccaagatcgcgccactgcactctagcctgggcaacagagcaggactccgtctcaaacaaacaaactagccaggcacggtgccacatgcctgtagtcccagctacttgggaggctgagacaggaggattgcttgagcccagaagatggaggctgcagtgagccatgatcacaccactacactctagcctgggagacagagtgagaccctgtcttttaaaacagaaaggaaaccttaaacctcagaatccctctgatctatcagagtggcctgcaccatcaaatccacagatcaagaggaggccgggaggaagacgagccgcgcatatgggggtaacaggccaagagttggggaatgacattctccctcagttacctgaagctaaacccctttgtctgccccattgtcagccttgctgagacggcatcatacccagggcgtcgtggctagacaccaggcctgtgaggtgcacggccagctccacccacgggcttactgcagtgtgtcccggctccatcccgatggcca

SEQ ID NO: 247123 - DNA, 1048 bp, Homo sapiens
gcttgacagtttaagaagccaaatgcagaagcagctgtcggctgattggtgtagctaagataactcaaaaatcatatcccaaaagcgctttgtggtgtgagcaggacagatgtgctgcctaccttcgggagtccttcagtccttcagggacttggacaagaagcaaagcaatgagtgtcagatctgtgacagaatcccactgaacaaggggaaaggggactggaggaggtgacccctctctcaaaaggtgacctttgagcagagacctgagttccgtgacggaagccatggcgcgtgttgaggcagaggacagagccagtgggtgggggagagcggagtgggggctctgtggtggaccgcgtccgttccagcccacgttgggaggagtgtgagcttgttgcaaccttcttaaaatgtgggctactggagatcatgccactgcactccagcctgggcgacgagcgagactccgtctaaaaaaaaaaaaaaatgtgggccactcagacggtctagggcgacggcctaggtgttagtcggaaaggaattttaaatgtatgtgactattttcaatttcttcctgagactgcagtggaggaaaatgtgttgtgggatgagccttcctccctgctggagtcaaaaccacaccagcgcagcgtccttgccttgactgctctgtaagaggcttcttgcccttcagaacacgccgctcgcttaggtgtcactgagagcgatttttctcttctctactgaggaatgctttgcataataactgaaagtattttattagaatcctaaagtgtagcagcagcaatgattgaaatctacatttcaattatttttcttaagtgtaactaaaaaatctgatgtttaagtgaaagtaaattatttgtctaatttccatcagggactttttgaaagtcacagaaaatgtggttagtagaattcatgaatctccacttcatcaaggcagtttcctagaagataaaaggggttgaaagccattcccaaggccatatcccagatagtactcatcggggatcctctaacg

SEQ ID NO: 247124 - DNA, 263 bp, Homo sapiens
tagcagcagaaactttaatgtagggttaatatatttgagaggtcattcttaagaaaagtctaggcaataggccctcaggtagtgaattattctgtaggattcattgttttttgtttcattttgttttgttttgttcttttttcatttttctatttttctccataggattcttgataggtttcaatcacacaccttcccatgggtatttccatgggcaacccaccccttctcttcagcagtaaactaacaactacataccagtg

SEQ ID NO: 247125 - DNA, 647 bp, Homo sapiens
caatcttcccccatattatacatgcacagagacatacacccacttttaaaaaagtcagttgcaggcatcattaccctttacccctaaatacttcggcatgtctcttcaacgtaactgcatggcatatcacacccaggaatttaggtctatgcactgatgctatctaaatactgtccaggtacaggttttcccagttgtccccaaaatatctttcagagctactcccccaaatgccatccaggatccagcctgaaatcacaggcagcctttggttttcatgtctcttaagtctccttttaatctagaataatccctttgcttttttgttttcttcatgatattgactttgttgacaagtccaagccagcgtctcatagaagttccacagtctggaattgcctggttatttcctcccaatgagctgccagtgttcggccaggtgctgtggggctgggggtcaggggagccctacacctcccacagcagtcctcggggaggaagaagagcagctggccccgtcctgatcacttggttagggtagcgtcggctggatctctccttctaaaggtgctggtttccctttgtgattactcagtcacctttgggtgattcttggagactgtgtgaatatccagttcctccacaaa

SEQ ID NO: 247126 - DNA, 207 bp, Homo sapiens
gccattaattttatgattgttcctgagttcccaagtcagattctaagtcaccagtttccatttatttctgccactctaaaactaaagaaataggccaggcgcggtggctcatgcctgtaatccaagcactttcagaggccgaggtgggcggatcatgaggttaggagactgacaccagcctggccagcatggtgaaagcccgtctct

SEQ ID NO: 247127 - DNA, 737 bp, Homo sapiens
cccccgccgggctcgctgcctcgggagccccgggagctccggtgagccccgcggaggagggaggggaaagggagggaagaggaggtggtggaggccgcgcccggccggcgggcagctccgggtcctctgtgcgcaggagaagcggcggctgcaggaggagatccgcgccgcgcgccgggaggtggaggaggagaaactccgcgtggagcgtctcaagaggaagtctctccgggaacgttggctaatggatggggcagctgcagtgccagagccatccgaagaccccacctcgaaggacccccagtcacccgagggccaggctcaggcccgaatccggaacctggaagacagtttgttcacactccagtcccagctgcaactgttgcaaagtgcttccacaggtgcccagcacaagccctcaggcaggcccagctggcgcagacagggtcaccgtcctctctcccagtccattgtcgaggcaggttctgtaggccagactgatctgaacaagagagcctccctgccggctggactagtgggcacgcctccagagtccccctctgagcccagggaggatgtcttggggtttctgccaggcccgaggcaggtccccggggcagcaggagactcctcagaagccaatggcccatgccccagccccatccccactccagagcaggggctaagtcagagggcagtgccatccgaagggcgggtgggtgaggccaaaggagggg

SEQ ID NO: 247128 - DNA, 623 bp, Homo sapiens
aggtggtgataagatacctgcccagcctgcagaggtcgggaggggactttacatggaccggggtagtctgtatgcccagccccaactcccttcccctgcccagaggaagtctctccgggaacgttggctaatggatggggcagctgcagtgccagagccatccgaagaccccacctcgaaggacccccagtcacccgagggccaggctcaggcccgaatccggaacctggaagacagtttgttcacactccagtcccagctgcaactgttgcaaagtgcttccacaggtgcccagcacaagccctcaggcaggcccagctggcgcagacagggtcaccgtcctctctcccagtccattgtcgaggcaggttctgtaggccagactgatctgaacaagagagcctccctgccggctggactagtgggcacgcctccagagtccccctctgagcccagggaggatgtcttggggtttctgccaggcccgaggcaggtccccggggcagcaggagactcctcagaagccaatggcccatgccccagccccatccccactccagagcaggggctaagtcagagggcagtgccatccgaagggcgggtgggtgaggccaaaggagggg

SEQ ID NO: 247129 - DNA, 340 bp, Homo sapiens
gagtgagctctcaatccattcatgattgcaagagctggtttttaaaaagagcctggcatcccctctcccctttgattcttctctcaccaggtgatctctgcacatccctgctcccctttgccttctgccatgaagccctcaccagatgcagatgcccaatcttcctgaacttttcagccatcagaatcataagtcaaataaagattttttttttttttgaatataggccgggtgcagtggctcacttctgtaatcctagcactttgggagcctgaggtgggtggatcacgaggtcaggagatccagaccatcctggctaacacggtgaaaccctatctct

SEQ ID NO: 247130 - DNA, 492 bp, Homo sapiens
atggtggataacttataagcaaataattaaagatctacaaaagtaaattcattgattgattgaattgggttgtgcacaaaaaaggaaaataaaagaatttaagggtgttttcctgactttcctgatggatgaccttgctaaaaattccaggcgacgctggtatccagagagggttctgtgtgaaaagagattccatgagacaaatggaagaacaaggagaggcgaaaggaacaatagaggtctttcagaagcaggtcaacaaacattgatgcagcattttctttgtgcgtgttgaagtaacaatgagcctcagaacttctaataagcagcataattgccatgtggagaaggctacattatacaacaccaatttctctctgaagatccaccacctccggatgaatgttactgattcctactgtctatttcatagatcttcaactcttgttcttttgtttaaagatatgagtctaagcttagacataaaaaaaa

SEQ ID NO: 247131 - DNA, 532 bp, Homo sapiens
tctctgaaatttcctccactcacacttagttttcacctggcacagaggagctggggaaatctattagctgactggaggaacgcctgcagcattctaattatcaggggagccagcgcacttcacacagtcctctcttccacttgactggctttcatctgatccaccaactcacgagtaatactaaaccaaatttccctccagattgcacaagctctaatgtgaaaatgagcactccacctggcctacaattatggaatgggtttgcaattttattattatcctctttaaaaaaaaaaaaaaaacactccaaaaggcagaaaaaaactaagcctgacgttcagtaatgacatctgctttaataagagaattgagtaagatatatgttctctgactcatgaaccctcactagcctctctcttgagttttttactgcttcacttattatttttggcgtttcacgggttcaagaccatgccacaatcacaataatgccatcagtggagaaattatttgtcacctctcttcattcaag

SEQ ID NO: 247132 - DNA, 488 bp, Homo sapiens
cacattatcacccgaaatccatagtttatacggttggtgctgtacatctatggatttgcacaaatgtataatttatccaccattataataacatagattcactgccctaaaattcctctgtgctctgcttattcatcctttcctccccactaagccactataaaggttaatgacaatcactaacctttttactgtctccatattttgccttttctagaatgtcatgaagttggaatcataccgtatgtagccttttcagactggcttctttcacttagaaatatgcatttaagtttcctctgtttttttttttttcttttgagtgctgaataatcttttttcatgatgtactaccattaatttattcacctattgaaagacatcttggttgttgccaaactttggcaattgtgaataaagctgctataaatatccatgtgcggtttacatatggccattagttttcaactcctttggataaataccaa

SEQ ID NO: 247133 - DNA, 560 bp, Homo sapiens
atgggtgagtgtgtttctcacaaatgcaccactgcacccctgcctaggtgacagagacagactgtgtctcaaaaaaatgaaaatatcagggaactcaatgcaaaagactgcggcgctttagacttgagagtaacctgcccatgacccttggggctccgtgaggaagacaaaagacccccaaaaggagggtgtatggcacctttttctggtttctcaaggggtctcaggactgctagaagttccctctcgatttcttcgtgtgttattgaaggtggcagaaaggaagaagggccaacagtaaatgggaaaacaattcttagagggctcaatttgggaagattttaaacttcccaaaaaggccaaggatgttttacatttttctcagtaaaaatcatgccgacaacaacaacaacaaaaaagtgaacagatggaaggaacataaaattgctttttaacaaaatttcagttgactgaaaagaattcccagggtaggaacaggatccaaagagaaaaagcattgctctatatatctgccagggaaaaatcccccaaaaactaaa

SEQ ID NO: 247134 - DNA, 329 bp, Homo sapiens
tgtttcctaaaaatgaaaagtttgagtttcatgtagtgagagaactaagtccattggccagtcagatgtttctcacccttcttactctggactttgagttgttccaggatcacttttgaataaggagcttacttttgttaaaacttgctgccttactaaagattataagttatagtttaaatttgtaattaattctgccatcttgcaataaagtgacaattgaaacaaggttttccaagttgcataattttatgaagtactattcaacttttgtcatgtgggtgaaagttaaagatgccattgaactacaaaacaaacaaacaaacaaa

SEQ ID NO: 247135 - DNA, 718 bp, Homo sapiens
cagtgatacaatcatggcttactgcagccttgaactcctgggctcaagcaatccttctgccttagtccctccagagtagccgagactacaggtgcaggccaccatacctggctaatgttttttttttaattttagtacagacgaggtcttgctatgttgcccggactggtcttgaactcctgggctcaaacagtccttctgcctcggcctcccaacaagaaagctttcagtccagtatttccagtccttagtcatctgtggattccctccatgtttttgaccatttccattttttatacttttgattttaaaataatgttagattcacaggaagttaaaaaatagtatggatttctggtctcccctcccacattgcccccgtgataacatctaacataactgtagcacattgtcaaaaccaggaaactggcattggtacaataggattacctgaactgtaggccttgtttggatttcctccatttttacctgcattgatgtttttgttgtgcatacagttctgtgcagttgtatcacatgtacagatttgcataaccgctactgcacctccatttaaactaatcacttgtttaaatcaactcaccttttaaaaaattaaatagccgcttttgcctcatcctaagtgatatccttgaaattattgatttgatgtacttatatttctaatacacattaaatacacaatgatttaaacatg

SEQ ID NO: 247136 - DNA, 420 bp, Homo sapiens
aagagttaatttcagagtacatgataagagggagttatacagcttatctgtaacatgcagatcaagaaaaggcattgactatttaaagcaagacatattaatgtatttgtctctttataaccaggcaaagatgtggcatggcatcacttaagcatacgggtatttgagaaccatgaatccaaaccccatcccacctcattccacctgcacgctagagcagcattgccatgatgagaacattgctgggggaaaatgtaagtgatgggggaaatccattaagcaaggccactcatggaacgtttactggggattcttctgaaaaacatgtttacatcaaatctgaaggtgaagagagaggaacaagaaaaggggagagcaacgtgaagatggaataagccagagcgtatgtagacatgttcg

SEQ ID NO: 247137 - DNA, 684 bp, Homo sapiens
tttcattcactgttatgggaagaacagatggtgaaagggttagattaaagtaatacagcatgtccattaaaataacccccacttctcgggatgcttccctcaaacaggagtactgtttactataaagaatggctttggcttacacacattggaaattgccaggagttttctcaaggataaacacaggagtaagagaaaaactaatgtcagaatcaaatgtatttttaaatgacaataatgcaacttattttgctaatctgagaggctgatggaaactatgtgcctgtgataacgtagctgaacagcagtcaaataataaagttcatttctaacttgaaaaattttagtacctagaaaatacaactaaataaagctgcaaagagaatatcaagtagaaattattttctacattcctgcactcctacaaataatagaaatttttgctgccatttcatttctaatttatcttattaataaacagcaaaaataaatctatataatacatattaataaaaactaagtataatatgatttctagacaagtctcacaaatttttagcattggaaaagaaccctcctgagatatgtttatgaaatttaattcaattacatacagttcctaaagaattaagctttaaaaaaaacttcaagaaaagttggagaatatattctaaaagaaaaatt

SEQ ID NO: 247138 - DNA, 287 bp, Homo sapiens
ccttattttaatccttaggagaaaaactataatttttctctaatatatccataaagtgaaagaagaagtacttatttgatattcttaattgttacatatttaagagcaagagtaattagttcatacttatgttcacctaagtccacccatacattgctgaggatagcggccttcagaaggtggctgtttccggaggagtaacagggaggaacaggtgggctgagatatacatgaggcccaggacattccagcctgggcaacaagaacgaaacgccatctcaattaaa

SEQ ID NO: 247139 - DNA, 521 bp, Homo sapiens
ggcggggctgtccaggaccctcgctccgcacccattttgatcccaggaagggcggtcgggcagggacggagacggccgcgaccagacaatgtcctgcattcaccgcggcctcggccaatcacaggccggcgcctcccggccccgtgcggcgccaccggccactgctccggccggaggaaaacctggctctagtcggccatctgcggctaatccagtcagagcgcgcggcgctcccacggcgcccggcccggggaaggggtctgggcagcaggcgccgcggcgtaccccgggggcagggtcgcgaactgagggcaggacgcgccgccccctccgcccgaacgcggcgctgtccctttaagatgatcctcctcccggggccaagcagcgcgttggcggccccgccgcagggggcagcgacatccgggctaccggactggcgacggcggcggcccctcgggcagctcccagtccccgcgggatgcccggctcaccgccgccggagaagaggagccctccaggcc

SEQ ID NO: 247140 - DNA, 471 bp, Homo sapiens
gatggaaaaataagaatgggttattagctggcagaaatgatgacagatttgagtgcttactgtaggtcagctgctttacatatgttacctgattttaatctgaggtaggaactattactcttcttcaggtgggaaaactcaggaccatagaggttaaatacctcatgcacagtaactactaagaagtggaagaaccagattaaaatccagtctatttatgcttagagcctgcccgcttaactactatgcggtgttgtctcagatgtagaacacatctttgttttctctgaggacttagaaaaaacacgcgtgattcttctccactgaatataggaatagtttctaccctgtttagaacatgcatagtctttatcaataagtgttaactgacatgtgaaatcactttctactctttggaagccgatgttttaagtccaagtagtctgtatggtggaaattcctaacttatgt

SEQ ID NO: 247141 - DNA, 107 bp, Homo sapiens
ttttttttttaacttcttagaataacccattcatttttggtgtgctatcaccaggtggcaggaagataatcatagaaaagtgaggctaaggtaaaaagcatacattc

SEQ ID NO: 247142 - DNA, 345 bp, Homo sapiens
cattgttttatactctgctttttttttcactgaatggaaatttttgcataaatattttgctatgtttttgaataccctgccacacatcattttaatggccacatctgaaagtggctgcactatgggttaatttcactagtctctgattttcagacatttgtttccagttttttgttgctattcatatacacagctctaccatgaactccgtggcaacagaatctttgcacatatctctgattgtttctttagaataaacccccacaagggagaactgtagggccacatggtatgtacattcttaagactcctcccgcctgtccttccagaaccgttgaattaatt

SEQ ID NO: 247143 - DNA, 261 bp, Homo sapiens
cctggctttaagagatcctcccgtgttgtcctcctaaagtgttgggatttcaggcgtgagccaccatgcctggcctattttttatttagtgagcatttgttctgaattactgcaggctgcagtgacttattagaaatttatctacttacataattttgatgagatacagaagaatttttaaaaattaaatttaattaattttttttgagatcatgccattgcactccaaagtgggtgccagagcaagtctctcaggaaagg

SEQ ID NO: 247144 - DNA, 310 bp, Homo sapiens
tttgtatacaaaatttggggtgtacacttttctagggggaaactacagctttcatgagtttctccaaggggtcaaggatcctaaaattttttgaagatctgctcattagagctcttgctgcaaaatattgtttaggaaattcgcttggactatcatggctgtgtctctgtgtgtgaaaacagaaaccttaccaagtgattgttctttcttgaagatttttataccatgatcttgaatgctaaaacactcagattcaaggggtattatttgttttcttataaagaaatcagcaggaagctgctaccagaca

SEQ ID NO: 247145 - DNA, 312 bp, Homo sapiens
tcaaaatatcagattttaaatgcaatctataaaaccgataaagactttggaataaggcgaggaataaatatatttaaaacaagtgggtacagtgaacacagtaagaagagacaaatgataataaggaaatagacaactgtgaaaatgtatgtaaggtataatagagacaggcatagtagcttgcacctgtggtcccagctactccagaggctgaggtgggaggattgcttgagcccaggagtccgaggctacagtgagctatgtcgtgtcattgcactctagcctgggtgactgagcgagaccccatctcta

SEQ ID NO: 247146 - DNA, 424 bp, Homo sapiens
gaatctgggtatgtaacagtctgaataattgaagcagaaggaaagtaaatttgtttggagtcttcagccttgtaattggcaggaattttcatttttatcagtgccatttcaaactaaaacagttccgtctttctccctaaaatttataatgtgttcttcagtatttcttttgtgctgttcaaatatttgcttattctttttctagagtgttgtccagtagaactttctgctatggtggaaatgttcatactctttaccatctacatggtacccattggccacacgtggctaccaagcacttgaaatatggcttatgagtcttcaggaacagaatttttcatttaatttttaatagccagatgtgactagtggctaccatattggaaaacacagatgtagagcattctcattgaaactcaccttt

SEQ ID NO: 247147 - DNA, 284 bp, Homo sapiens
gtggaggttgcagtgagccgagactgcaccactgtactccagcctgggcgacagggcaagactccatctcaaaaaaaaaagattacaataccatatttttctgtacctacctttttctatatttagatagataaatattatttgttacaatcacctacagtactcagtacacactgtacaggtttgtagctgagaagcaacagcctcaacctaccatattgcctaggtgtgcagtaggttacaccatcttggtttgggtaagtacctacgtctatgatgttcac

SEQ ID NO: 247148 - DNA, 372 bp, Homo sapiens
gaaatacttagattttgcacaagttcttattagataattttctattcatgtttatgcctaattcaagaattggctatcggctgggtgcaatgggtcacacctctaatccaagcacgttgtgggggctgaggtgggaggatggcttgagcccaggagtacaagaccagtatgggcaacatagtgagaaccttttctacaaaaaattaaaaagcaattagctgggcatagtggtacatgtctgcagtcccagctacttaggaggctgaggcaggaggatggcttgaacctaggaggtccatgctgcagtgagctgtgatggtgttactgtacttgagcctgggagacaaagtaagaccctgtctcaaaaaaaaa

SEQ ID NO: 247149 - DNA, 451 bp, Homo sapiens
tttcaatctgtcaaagagtggcacagaatacacacacaaacacacacacacacacacacacacagagcaatagaaatttgctctgtaatttgggagttgcattgcttgttgccttttgtgaaattttcataacagtgttttggtaattaatgacagcttttggcagtttaattctatcattttactaatttagatttatctattacattgaaaaaattcaatataacttttgaatgataaacattcaaagcaaatcttagatgactgtttatgtcatgagtttatgcttccaatatggacccaagcccctctttaagcagacttctaggtcttaagtgaggaaagatgtcattgtgttctactgccttgtcatttctatataatgtagtatcttgagatctaatttcaggcatattggcaagaagatacagacataatggaaagttggagc

SEQ ID NO: 247150 - DNA, 498 bp, Homo sapiens
atatgtatgtatacacatatataactattatctgtatctatattgaggtaaacatgagttcatactgatgactttgactatcagtactatatagttcattctggctttactctgctatctattacctccctctccaaaagtgagaaatctggctcacgccatctgacatctattaacttatttgttcagtcccatcgtccatgtacagcacttttagaattgttaacctgtatctccatgagaaatgcctttaccaaaaaagaacagtgcttatatacagttctttttgttgttagagtttccagtttcaagtttcccaaagttacttaaatcaaaccttttcccctgacatctgtattttaattttatttttaataaattgatctaaattacatggtaattatatataaagcttataaaaaatttcccttgcccaactaaagatctttagctttagatgtgtttttttttcctcctgacttttgtgaccaaaaaaaa

SEQ ID NO: 247151 - DNA, 349 bp, Homo sapiens
gcaagatgcatgtagtgattttatttcaacagcaccaacagtggtggaaggcaggctggggagaggaggagatgaggcatcttgagctgctgagaggttcacagaggctgtcagccttctgtcctaggccacgctgaaagggctgggcgtgacagccaagctgacctgctcatctggagttcccatgggcaagtctgaaagcatttccaacccacagctatgggcagcaggaccactgctcataggcaggaaaaaaaaacaacaaaaaccagcaatgaaaggatttttaagaagcccaagttctgatgctaggtgtattcatgtaaataaattcatttaatctccccat

SEQ ID NO: 247152 - DNA, 530 bp, Homo sapiens
agcactaatagtggtaatagctacagtggattacaactcaccaaacttctttaaatccctggattcataatgatggctgtttacttttgagggtttttaaaaaaaatccggcagagatttttaaatagtatatggtagtgatctaattttattttccattagaataaccattcattcagcattacttattgagtaattaatcattttctcattaatacataatgccagtatatcaaattcccaaatacatagatatgggtctcttcttggggctctgtatctccttcctttaattgtccatcttagggcgtttaataatacaagactgtctcaattactatggctttattgtaactcattacctggtaggacaagaccttccaatcttacttttcttcttcaaaattgttttaaatactgtaaattttttttctacataaatgtgaaaaacgttagaagggcaactgcagcagacatacatagcttatttttttaagattaacagcaactttatactagcaaaaaaaaaa

SEQ ID NO: 247153 - DNA, 388 bp, Homo sapiens
tatccacttcacactttctcccagaactgtgctgcacccatgtctaccctaaatcattacataaactgagttcttccaaatttgaggagaaagaaaggttcctggagttctgtagagaaaacaattctcctgacccatttgtgccagaattctcaagccattcagacatgtggagagtctctggctgtgggatctagactttgttcaaacttttgcccattacttgatctatgttaagctgctttctgctcctcagggctattctaactgcctctgtacttctgctgattgccccaagccacacccactttctgaaacaccagagatcagcaggtgttaaagaaaagtgttaaagacacattatcacctgctttaagttctctaattg

SEQ ID NO: 247154 - DNA, 197 bp, Homo sapiens
ccctaactagccaagtgtggtggctggtgcctatagtcccagctactcggggggtgctgaggtgggagaattgcttgagcccaggacgtcgaggctgcagtgagccatgtttgcgccactgcatggcagcctaggcaacaaagtgagaccctgtcaacactggtataaacggacataaatggggtatagcacattga

SEQ ID NO: 247155 - DNA, 454 bp, Homo sapiens
aataaatctagcaatcatttcattaagtctaataaaaattaatgaccctccttgcttgcagactttgaggaaataaaaaatgttttacagtggccaatgtaagcaggtgaaaataaatgatggaaaagaacagccagtaaggccaccagcatggcactcattgaaggttgcttttctgtcagtcaagactgaagattaaaggagaagagaaactgagactcagaaatggactgtgacttgctctcacagagctcatgatggggctggatgtgtctatatttaattaatatcagttataaaaacttctgggtatttgaacttcctaatttgcttggattttgaataaaaggttttttgtataatcgttatcaactgtgaaaggcataaaataatgttaatgcttctgttttcctttacgataaaccaataaaatggaataaaatattcaaatcat

SEQ ID NO: 247156 - DNA, 340 bp, Homo sapiens
tagctgaagagcattcatgagctccagtgaaaaacagcatgagaaaatttgggagaaagtttatagaattatgattagtagtatttgttgttgatttacagcttgaaatcacgtccccttatatactgtgacagttttttcggaaaagtcttttatagttttcgttattacttgatttggtttatgtaacaaattagtgagtggtctaaatttggaagggcttaagtaggaagcttaattcttaccacagcacaatccttaggtactctaggatctctctctctcataccatccttgaagacatctttgcagataccataccttttctggttagtcgagg

SEQ ID NO: 247157 - DNA, 434 bp, Homo sapiens
actgcaccagctgagttctctagagatacttctatagaattatgcatttactcaccatttttcaagtaaaaaattttaaacccatacactaattcttatttaacctagaacaacagcaatgcttcctctatattattgggtctattatttcttttttgtttttcttttttttttttttttgagacggagtctctctccgtcgcccagggtggagtgcagtggcgtggtctcggctcactgcaatctccgcctccattgggtcaattatttctaaatgctgtttttgaccaggagcacattatgttcatttttttcccccacttccaccagcttccatttccttagctttgtgttttagatttcattatttgactcttcagccactactgtaccaacaggttaaactccacagtctctgtgagatcaaaatctca

SEQ ID NO: 247158 - DNA, 288 bp, Homo sapiens
tcaccctcatcctattagcgagaaggtacatagtgaactttggccttttccaagagcttgacaatttctccaagcaggttatgctggaggattgggaggagcagaagatgccagaagcaagagtcagccttaggagggaacaactggtcccatgatgtatttcacatttgcccaaagtgtcttcctattaaataagaatcatttatttgtgcgatgttgtagttattctctgataaatacaaatatcctttaaaaggtcattcagtgttcctcctgcctgattaatga

SEQ ID NO: 247159 - DNA, 347 bp, Homo sapiens
tctctatatagagtccagtataatggacattactccaatctcccagccctttaactaaggctttacccctctgtgatatccaacaggtcactctcttcacaggaacagtccaaagggtgaaatataattgatacaagtaaagaaaaacactaaaatcatttcatcagggactactgattccaatatctgataagggacattatatccccaacacatttgccttccaacaattaaaaaagataacacccaaacttctcaagggttaatgttatgatcatactcgtacacaatttgaaaaggtgtaaattggcacaacctttctgaaagcaatgaagtaatgtgtatca

SEQ ID NO: 247160 - DNA, 574 bp, Homo sapiens
acataaggctcattagtttatcattgcctaaatattttcaaaggcagatattttatcttgaaatgtacctttaatagtgaggttcataattttgtattgttgacagtttgaatagcagatgcccagttaccctgtagattaacagaaattgccagtcttttggtttggaattctcagttacgcttttcttgttcgttcagtattctgttgggtagtttagactttttaacttgttaccatggtcctgaaaaacaccaagttcagtcaggttacttcctgtctctctcagatttgcttaccttccttcatccccattgcctttacctacttcaaaccatgcttgtatcagaaccccacaactggtattccttcttctggggcctctcaaacccatctttactttgcagtctattgttacctttccctgcttaaagattttttagtggtgccttcttactctgagaaaagaatacaaaactccttagcatggcctacaaatttcttcatgatttgccatagcttacctttcaggtttcatttttttactttttgctatacctaaagcacacagtca

SEQ ID NO: 247161 - DNA, 418 bp, Homo sapiens
tatgctaagctaatgtagtagtcctagataacctctaggtgagtttggaatttgaaaaaaaaaaaagaggaatacagtaaaatttacataattggatttacacacatccatatttgctttattttgatttttttctttttggtcactaccatggctaaaatagcatatagatacatacatgtgaatttatgtggttaatttattaaaattaattttatcaaatacatagttaataatcaaatggagcatatcatgaaaccaacagttcactgccgtactcagaagtaaccatgtttaactccttacttatttgttttttgtgttttctgttgttgttgttttgagacagagtctcgctctgtcacccagactggagtgcagtggtgcaatctcggctcactgcaaccttctcctcccg

SEQ ID NO: 247162 - DNA, 436 bp, Homo sapiens
ggtgaggcacacccacatcatgaagggtagttcccttgactcgaaatctactcatttaaatggtaattgcatctaaaaaattcctttacagcaacatctagactagtatttgaccaaacaccaggacactgtagcctgttgacacataaaattaaccatgaagctaggcatggtggctcatgcctataatcccagcgctttgggaggccaaggcagaactatcgcttgagaccaggaattcgagagcaacctaagcaaaatggtgagaccctgtctctacaaagtaaatggatcaatcaataaaacgtggtggtgctatttgacaagctgaggcaggaggattgcttgagcccaggagtttgaggctgcagtgagctatgattgtactactgcactcttgacctgaatgacagagcaagaccctatatcttaaaaa

SEQ ID NO: 247163 - DNA, 437 bp, Homo sapiens
actctgtttcagtcgtgtgctggtaaatgtttaacaataggctctccaaaaaaggaaacctcgatttgtagtgtttgccattttctgtggtgtaaatactcccaccatgttcgttttcaagctatcaacatgacgtcaagtggctcacaaaattcctgaaaatttaatagtagtctgtcgtgaggaaatacaaaccagcttcagcacaccactcaaggcatgtgcaaagaaaagatgtgaaaaaataaacatgtgaataaatgaatgatgaaattaatgattcttatcatggattctcaatgttaagaaagccacagcatgctaccatttatagggtcttttaatactcttgtttatctctgttaaaggagtctctgaccaggaggactatttaccaaggatttctatgcaacactggttgtttgtgttgtcccaaa

SEQ ID NO: 247164 - DNA, 376 bp, Homo sapiens
agagataaacgattatggtgctctttattaatctacatttatagcgagcaccaaagggggagatgaagaaagaattcatgaattttacaagtataatcaaagacaagacatttttactttttccttcaaaagctaagtgtagtgtagcaacctcacccacctcccccgaccccgccccggtagaatactaactgcctgtttttccttctgtgctcagcgagccttatctgtacttgctagtttcacattccttgaggctcagtgagttcctgcttcacctctctagggcagctgcaaagttacaaggttgatacagaaacatggtttcccaggtatgtgtaacatgtagtataaataaatgtaaaagactgatcaa

SEQ ID NO: 247165 - DNA, 439 bp, Homo sapiens
cagctcttgccaactcgtcacaaggcttaaaattcttaactgttaaggcactgacaatttgtatcaaaagttaaagcattaaaggtctccataaatgataaatgagaaagataaccaataatataataacaagaactatttacttaacattgactaggagctagccactgaatatacttgtccttaaaacccaacatcacctgcaagatgttattattgtccccagtttacagatgaggaaagtgagacgtctggaaagattaaggaatttttcctagacgacacatctggcaagtgacagggtaagattcaaacccagggctgggtgtggtggctcatgcctgtaatcccagcactttgggaggccgaggcgggcggatcacctgaggtcaggagctcgagaccagcctgaccaacatggtgaaaccccgtctctact

SEQ ID NO: 247166 - DNA, 287 bp, Homo sapiens
atcgcaccactgcactccagcctgagctacagagcaagaccctgtcttgaaaaacaaaacagtataagtagattcctttttcagcagccttccttaactattgtgaccttgagatacaggtatgctaattagctgggaaaaatgagtgtcattagcaaattcaacataggccgggtgcagtggctcatacctataatcccagagctttgggaggccagggccagaggatcacttgaagccaggagtttgagaccagcttggatgacacagtgagacgctgtctctta

SEQ ID NO: 247167 - DNA, 291 bp, Homo sapiens
attgtatttaaagtggaaagagggagaagtggtagatgaggttgaacatgtaggcagtggcatatattgaaaggcctgggagtctcgctaaaaatttaaaatgtacctgtaggatatagaaggtcattgaagaatttgagcaagaagtagcatgaagagatgtgctgtttagatcactctggtgtaatgagtcgatagagtggaaatataacaaaaagtttcccatttaaaataaatgcactttccttgtttgaatttcgtttcttgggaataaagttttgatccgtctta

SEQ ID NO: 247168 - DNA, 899 bp, Homo sapiens
agtaaattgtttttccactcaatggctctgagtgttttgatttctgttgcctcaagaatgtgaaatttggctgagaactgttccttcacactgtaccttttcctgatggttgaggaatgcctggaattttccttggattgaggtaatggatactaaactataaccacacccaaatggttattttctctgaaattattaacttaaatttaaaaatccttgagtaaactcactgggttaaattctattacctttcaatatagaaatttttttctgttagatttctaacaaattgaaattctgcagggcttaaaattttgatacataactgtatagatacacatatatatttatatatgtatgtaaataattttctaaaagcaagcacttttctctggtatgacattatctggaatgagacatttattaaagctccttggagagaaattcttgccttttttttttttttaaacaattatgacatgttcttctgattatcagaggactggtttgaccaatgttgtaatgtcaggtcacaaaggcagcctctactagtctagacatcttcagaggatgctggagacccaaacgctgagattagtatgtcaaagaatcactaaccaaatcaaacaggctccattcctcaatccagtctggaaaagagcaaccatttccactggacacatgtcacaaggactcttttagaaatacccaagttgaaatcaacccacatgggaacactcctctgctgaaatatgctcttttcttagtcctttgacaaaggaaacatggagtatgagcaagggacaaagggacacaagggaagagccaatgaacaatctcctaggaaggatgaattataaaaattgtggagagtcacattctctcacagctcctgcata

SEQ ID NO: 247169 - DNA, 354 bp, Homo sapiens
acttggccatattgccaaggaaatagtatgttacagctgtaggtgaggcccccacatagcctccctgaaacccttcccctctatccttctccagaggtagccagtaagctgactgttgtgttcatgacttccatgcatgtcttatattgtctctacatagacacgtagctccacgctgtatatcattactgtatggctttttttactcaacattacatttttgagatttactcatgttgatgcatggagctctacctatttcacggtccagatactccagaattctctccatttctgttgatggacatttaggtgtcttaagtttttaaccattacagcattgcaccgaacatt

SEQ ID NO: 247170 - DNA, 2481 bp, Homo sapiens
cctcccaatgtgctgggattacagttgtcacgtaccgcgcctggccaaaatttttattgccctcctcagagagcaactgcaataactaaacagggtaatgcttagcatatagtcggcactcaggatttttttttaatgcggatgcagcttctggacaaattcctaggatctccccaccaccccttgcttcctgccccaaccagattgagaacctggagctgtcctggcaggacctgtggagatagggaaggggccggtggggtccctcaccccacaccctccctctgccccccagcagccggcaccatggagattgtgtacgtgtacgtcaagaagcgcagcgagttcgggaagcagtgcaatttctcggaccgccaggccgagctgaacatcgacatcatgcccaaccctgagctggccgagcagttcgtggagcggaacccagtggacacgggcatccagtgctcgatcagcatgtcggaacacgaggccaactcagagcggtttgagatggagacccggggagttaaccatgtcgaggggggctggcccaaggacgtgaaccccctggagctggagcagaccatccgtttccggaagaaagtggagaaagatgagaactacgttaacgccatcatgcagctcggctctatcatggagcactgcatcaagcagaacaatgccattgacatctatgaagagtatttcaatgacgaggaggccatggaagtgatggaggaggacccttcagctaaaaccatcaatgtgttcagggacccccaggaaatcaagagggctgccacacacctctcctggcaccccgatggcaacaggaagttggcagtggcatactcctgcttggattttcagcgggcacctgtgggcatgagcagcgattcatacatctgggacctggaaaaccccaacaagcctgaacttgctctgaagccatcgtctccactcgtgacgttggagttcaaccccaaagattcccacgtactcctgggtggctgctacaatggacagatagcctgctgggacacccgaaagggcagcctggtggcggagctatccaccattgagtccagccaccgagaccctgtgtatggcaccatctggctgcagtcgaagacgggcaccgagtgcttctcagcttccacggatgggcaggtcatgtggtgggacatccgaaagatgagcgagcccactgaagttgtgatcttggacatcaccaagaaggaacagttggaaaatgccttgggggccatctccctggagttcgaatctactttgcccaccaagttcatggtggggaccgagcagggcatcgtcatctcctgcaaccgcaaggccaagacgtcagctgaaaagattgtgtgcaccttcccgggccatcatggccccatctacgccctccagagaaaccccttctacccgaagaacttcctgacggttggcgactggacagcccgcatttggtctgaagacagccgggaatcgtccatcatgtggaccaagtaccacatggcttacctcactgatgctgcctggagccccgtgaggccgaccgttttctttaccaccaggatggacggaaccctggatatctgggacttcatgttcgagcagtgcgatcccaccctcagcttgaaggtgtgtgacgaggccctcttctgcctccgggtgcaggacaatgggtgtctcatcgcctgcggctcccagctggggacaaccaccctgctggaggtctcgcctgggctctctaccctccagaggaatgagaagaacgtagcctcttccatgtttgagcgtgagacccggcgagagaagatcctggaggccaggcaccgggagatgcggctgaaggagaagggtaaggcggagggcagggatgaggagcagaccgatgaggagctggccgtagacctggaggcgctggtcagcaaggccgaggaggagttcttcgacatcatcttcacagagctgaagaagaaggaggcagacgccataaagctgacgccagtgcctcagcaaccaagtccagaagaagaccaggtggtggaggagggagaggaagcagcgggggaagaaggggatgaagaagtggaagaagacttagcctagaagtcagccttcgactgcggcgctatccctgtgtgccttcctttcccacctcttgaccctcaaccagacttgcatggccatggcagggcctcgggaagaccttcaggagtggggaagggtttctcctccatgatcgaccctcctcgtccacctacaaatcaggaacagaaagtctgtccactttgaaaatacctttccaggcagctccctgaccatttggacacattgccacgacaggagcctccaagtatgtgggaggggacgggcgggacgagcttggctgttctgctgcacctgaatgctttctgttatcctaattcttgtaaaattaaatgaatcgtaacaatgccaaagtta

SEQ ID NO: 247171 - DNA, 1228 bp, Homo sapiens
gttcgtggagtcttcccctcctgtgtcactccttccacagcccaccaagttcatggtggggaccgagcagggcatcgtcatctcctgcaaccgcaaggccaagacgtcagctgaaaagattgtgtgcaccttcccgggccatcatggccccatctacgccctccagagaaaccccttctacccgaagaacttcctgacggttggcgactggacagcccgcatttggtctgaagacagccgggaatcgtccatcatgtggaccaagtaccacatggcttacctcactgatgctgcctggagccccgtgaggccgaccgttttctttaccaccaggatggacggaaccctggatatctgggacttcatgttcgagcagtgcgatcccaccctcagcttgaaggtgtgtgacgaggccctcttctgcctccgggtgcaggacaatgggtgtctcatcgcctgcggctcccagctggggacaaccaccctgctggaggtctcgcctgggctctctaccctccagaggaatgagaagaacgtagcctcttccatgtttgagcgtgagacccggcgagagaagatcctggaggccaggcaccgggagatgcggctgaaggagaagggtaaggcggagggcagggatgaggagcagaccgatgaggagctggccgtagacctggaggcgctggtcagcaaggccgaggaggagttcttcgacatcatcttcacagagctgaagaagaaggaggcagacgccataaagctgacgccagtgcctcagcaaccaagtccagaagaagaccaggtggtggaggagggagaggaagcagcgggggaagaaggggatgaagaagtggaagaagacttagcctagaagtcagccttcgactgcggcgctatccctgtgtgccttcctttcccacctcttgaccctcaaccagacttgcatggccatggcagggcctcgggaagaccttcaggagtggggaagggtttctcctccatgatcgaccctcctcgtccacctacaaatcaggaacagaaagtctgtccactttgaaaatacctttccaggcagctccctgaccatttggacacattgccacgacaggagcctccaagtatgtgggaggggacgggcgggacgagcttggctgttctgctgcacctgaatgctttctgttatcctaattcttgtaaaattaaatgaatcgtaacaatgccaaagtta

SEQ ID NO: 247172 - DNA, 2281 bp, Homo sapiens
aaccggtaaacgccggccgtttgaggagcaccggagccgcgaccgtggattggacgcttccccagagacccagaagcagaaggagcggacccaggcagccggcaccatggagattgtgtacgtgtacgtcaagaagcgcagcgagttcgggaagcagtgcaatttctcggaccgccaggccgagctgaacatcgacatcatgcccaaccctgagctggccgagcagttcgtggagcggaacccagtggacacgggcatccagtgctcgatcagcatgtcggaacacgaggccaactcagagcggtttgagatggagacccggggagttaaccatgtcgaggggggctggcccaaggacgtgaaccccctggagctggagcagaccatccgtttccggaagaaagtggagaaagatgagaactacgttaacgccatcatgcagctcggctctatcatggagcactgcatcaagcagaacaatgccattgacatctatgaagagtatttcaatgacgaggaggccatggaagtgatggaggaggacccttcagctaaaaccatcaatgtgttcagggacccccaggaaatcaagagggctgccacacacctctcctggcaccccgatggcaacaggaagttggcagtggcatactcctgcttggattttcagcgggcacctgtgggcatgagcagcgattcatacatctgggacctggaaaaccccaacaagcctgaacttgctctgaagccatcgtctccactcgtgacgttggagttcaaccccaaagattcccacgtactcctgggtggctgctacaatggacagatagcctgctgggacacccgaaagggcagcctggtggcggagctatccaccattgagtccagccaccgagaccctgtgtatggcaccatctggctgcagtcgaagacgggcaccgagtgcttctcagcttccacggatgggcaggtcatgtggtgggacatccgaaagatgagcgagcccactgaagttgtgatcttggacatcaccaagaaggaacagttggaaaatgccttgggggccatctccctggagttcgaatctactttgcccaccaagttcatggtggggaccgagcagggcatcgtcatctcctgcaaccgcaaggccaagacgtcagctgaaaagattgtgtgcaccttcccgggccatcatggccccatctacgccctccagagaaaccccttctacccgaagaacttcctgacggttggcgactggacagcccgcatttggtctgaagacagccgggaatcgtccatcatgtggaccaagtaccacatggcttacctcactgatgctgcctggagccccgtgaggccgaccgttttctttaccaccaggatggacggaaccctggatatctgggacttcatgttcgagcagtgcgatcccaccctcagcttgaaggtgtgtgacgaggccctcttctgcctccgggtgcaggacaatgggtgtctcatcgcctgcggctcccagctggggacaaccaccctgctggaggtctcgcctgggctctctaccctccagaggaatgagaagaacgtagcctcttccatgtttgagcgtgagacccggcgagagaagatcctggaggccaggcaccgggagatgcggctgaaggagaagggtaaggcggagggcagggatgaggagcagaccgatgaggagctggccgtagacctggaggcgctggtcagcaaggccgaggaggagttcttcgacatcatcttcacagagctgaagaagaaggaggcagacgccataaagctgacgccagtgcctcagcaaccaagtccagaagaagaccaggtggtggaggagggagaggaagcagcgggggaagaaggggatgaagaagtggaagaagacttagcctagaagtcagccttcgactgcggcgctatccctgtgtgccttcctttcccacctcttgaccctcaaccagacttgcatggccatggcagggcctcgggaagaccttcaggagtggggaagggtttctcctccatgatcgaccctcctcgtccacctacaaatcaggaacagaaagtctgtccactttgaaaatacctttccaggcagctccctgaccatttggacacattgccacgacaggagcctccaagtatgtgggaggggacgggcgggacgagcttggctgttctgctgcacctgaatgctttctgttatcctaattcttgtaaaattaaatgaatcgtaacaatgccaaagtta

SEQ ID NO: 247173 - DNA, 2159 bp, Homo sapiens
aaccggtaaacgccggccgtttgaggagcaccggagccgcgaccgtggattggacgcttccccagagacccagaagcagaaggagcggacccaggcagccggcaccatggagattgtgtacgtgtacgtcaagaagcgcagcgagttcgggaagcagtgcaatttctcggaccgccaggccgagctgaacatcgacatcatgcccaaccctgagctggccgagcagttcgtggagcggaacccagtggacacgggcatccagtgctcgatcagcatgtcggaacacgaggccaactcagagcggtttgagatggagacccggggagttaaccatgtcgaggggggctggcccaaggacgtgaaccccctggagctggagcagaccatccgtttccggaagaaagtggagaaagatgagaactacgttaacgccatcatgcagctcggctctggacccccaggaaatcaagagggctgccacacacctctcctggcaccccgatggcaacaggaagttggcagtggcatactcctgcttggattttcagcgggcacctgtgggcatgagcagcgattcatacatctgggacctggaaaaccccaacaagcctgaacttgctctgaagccatcgtctccactcgtgacgttggagttcaaccccaaagattcccacgtactcctgggtggctgctacaatggacagatagcctgctgggacacccgaaagggcagcctggtggcggagctatccaccattgagtccagccaccgagaccctgtgtatggcaccatctggctgcagtcgaagacgggcaccgagtgcttctcagcttccacggatgggcaggtcatgtggtgggacatccgaaagatgagcgagcccactgaagttgtgatcttggacatcaccaagaaggaacagttggaaaatgccttgggggccatctccctggagttcgaatctactttgcccaccaagttcatggtggggaccgagcagggcatcgtcatctcctgcaaccgcaaggccaagacgtcagctgaaaagattgtgtgcaccttcccgggccatcatggccccatctacgccctccagagaaaccccttctacccgaagaacttcctgacggttggcgactggacagcccgcatttggtctgaagacagccgggaatcgtccatcatgtggaccaagtaccacatggcttacctcactgatgctgcctggagccccgtgaggccgaccgttttctttaccaccaggatggacggaaccctggatatctgggacttcatgttcgagcagtgcgatcccaccctcagcttgaaggtgtgtgacgaggccctcttctgcctccgggtgcaggacaatgggtgtctcatcgcctgcggctcccagctggggacaaccaccctgctggaggtctcgcctgggctctctaccctccagaggaatgagaagaacgtagcctcttccatgtttgagcgtgagacccggcgagagaagatcctggaggccaggcaccgggagatgcggctgaaggagaagggtaaggcggagggcagggatgaggagcagaccgatgaggagctggccgtagacctggaggcgctggtcagcaaggccgaggaggagttcttcgacatcatcttcacagagctgaagaagaaggaggcagacgccataaagctgacgccagtgcctcagcaaccaagtccagaagaagaccaggtggtggaggagggagaggaagcagcgggggaagaaggggatgaagaagtggaagaagacttagcctagaagtcagccttcgactgcggcgctatccctgtgtgccttcctttcccacctcttgaccctcaaccagacttgcatggccatggcagggcctcgggaagaccttcaggagtggggaagggtttctcctccatgatcgaccctcctcgtccacctacaaatcaggaacagaaagtctgtccactttgaaaatacctttccaggcagctccctgaccatttggacacattgccacgacaggagcctccaagtatgtgggaggggacgggcgggacgagcttggctgttctgctgcacctgaatgctttctgttatcctaattcttgtaaaattaaatgaatcgtaacaatgccaaagtta

SEQ ID NO: 247174 - DNA, 235 bp, Homo sapiens
gagaggaagcagcgggggaagaaggggatgaagaagtggaagaagacttagcctagaagtcagccttcgactgcggcgctatccctgtgtgccttcctttcccacctcttggtattgccccgctctcacaagtgggaggctgagctccgccttaaagcagcactgggtggtgggctgggagcatcgggccctgactccccagcccctacaaatcactagcccccactgactcact

SEQ ID NO: 247175 - DNA, 236 bp, Homo sapiens
gaaggtgaatctctatgtctctcgatttatttgcaatggtgtgaacctgttaagtagtctctgaaaggctactgtttgcatggtgatgttggagattgtggtctgagggcaggccgttgggaagattgctgtaaggtaaggaagattcaagaacaagctggaatcccagcattttgggaggctgaggtgggcggatcacaaggtcaggagtttgagaacagcctggccaatatggt

SEQ ID NO: 247176 - DNA, 592 bp, Homo sapiens
tgcatagaacatattaggatgtctagcccagaatacaacactcaacagatattagtttcttccatctatattttcttagttaacataattttttaaatctatgaaatcttacctgactgcagattcatcagaaattccaacatctattaaagaaaaaggtaaaatgcattttaaatcaataataaatgtacagaatattaaaatcataagaatgcacagtgatgcatgcctctaatccaaactacttgggaggatgaggcaggaggatcacttgaggagcccagaagtttgagaccagcttgggaaacatagtaagactctaccttcataaaaaaattgtgcacacttgtgtgtatgctttagatcctgttttttgttgttgttgttgttgttgttttggtttggtttggttttttaaagcataagactgacgctttgttacaaagcattcctttgggagcatgcctgggacgttattagaattaacattcattatatgtattggtaggtaattaatgcagtaagaactcttccctctgtatttattagatgcaaagaagaatacatttattaaaatttggtatctacaagt

SEQ ID NO: 247177 - DNA, 417 bp, Homo sapiens
atataaaatgttggcacatagtgggtgctgctgttatatgaatgggcacaaaatctgtctacattttgccttttaccaaatttagaatctatttagttaaaaccttcttagggcgggtggggtgcagttgctcattcctgtaatctcagcacactgggaggccaaggcaggaggactgcttgagcccaggtgtttgagaccagcctgggcacatagtgagacccccatctctccaaaaaacaaacaaacaaacaaaaacaaaacaaaactagctgggcgttgtggtgcccctgtattcccagctactcaagaggctggggtgggagaatggcttgagcccaggagttcaaggttgcagtgagctatgatcacagtactgcactccagcttgggcagccgactgagaccctgtctcga

SEQ ID NO: 247178 - DNA, 382 bp, Homo sapiens
tgtctgtgtggctctggcctctgctgtgctctgccttacacattatatcaccttggcctccccttgtgtttctcaaccccggctctgcttgccctttccgtaactgctgcagcctggacattctctcagggcagtgagctggagggatcatttgttttccatccgtcagggatcacagtatgttgctatatggtggccgttgttttgtgtggatttttagttctttcagacaggcaagaggtataaatcctgtctagcttcactaaaagcggaagttctttctgttctttgaatgttgaatgagagtgtgagagagacacgtaccatcaggaaatggaactagccacggtcatagcttttcatttagttttgttagtcttta

SEQ ID NO: 247179 - DNA, 367 bp, Homo sapiens
gtttgggaggctgaggtgagtggatcacgaggtcaggagatcaagaccatcctggctaacacagtgaaaccctgtctctattaaaaatacaaaaaattagccaggcgtggtggtgggcgcctatagctccagctgctcgggaggctgaggcaggagaatggtgtgaacccgggaggtggaggttgcagtgagccgagatcgtgccactgcactccagcctgggtgacagagcaagactccgtctcaaaaaaaactcagatgaactatagctaagtcagtgctcttgacacttttttagcaatagtagctttgtttctcacagaaaaaacaaaattttctgtggaaccacactatttaaaacataagc

SEQ ID NO: 247180 - DNA, 653 bp, Homo sapiens
gttataaaagaagcctgtttagttaggcacaaaataaaaactgacctattagcctggtgccaacactgaaatgaggttggctctaatgagaaatgtaacatacctacttcctcattttcatccctgtttatactttggtgggcatagattgagaacagagtgcttgccttttataaagagaggaggaattgttgagtagaagaattgctcagctagtgttcagaaattgagatcacatctgagctcgaccgtttatttactggctgtcactctttgggcaagttattttatctctacacatttagttcctcatctatcaaatggaactttaacgtgtatcttgctggcttccttaccgaaaacatatatttgaaaatgcttggcaaagtttagaatgctgaatagttgtaagatattaatgtgacatgaaattgagaaaaaaagtattggtgacaactggctacgtgaggatctgatgatatttgcaaagtatgaaaattccaagtattatttgaatttttatatttgttcatttagcaaaattcttttatggcactaaattcacatgtactattcttcttaaataagtcttaaaataattggttaatgtaggaataatatattttttataagtaagaagtaactagaattgt

SEQ ID NO: 247181 - DNA, 805 bp, Homo sapiens
  misc_feature (601)..(601): n is a, c, g, or t
  misc_feature (635)..(635): n is a, c, g, or t
  misc_feature (652)..(652): n is a, c, g, or t
  misc_feature (682)..(682): n is a, c, g, or t
  misc_feature (732)..(732): n is a, c, g, or t
tagaggagggaatggaggtccattagttcatctttcttctagctgaccaatagcacggcaccagcttccagtgaggacctcaggctgcttccactcctggcagaagatgaaatgaagccagtgtgtgcagaggtcacatggtgagagaaagcaagagagaggaggggaggaggtgccaggttctttttaacaaccagctctcatagaaattaacagagtgaaaactcatccaccgctttgagaatgacaccaaatcattcatgagggatcctcacccatgacccaaacactttccactggcaccacttccaacatcagggatcaaatgtcaacatgagatgtggaagacaaacatccaaactataacagaaggaatcggaaagcatactgttggatggtttgtgaagagatgtggattttcctcccctttctgtattaacaaaggaagagaaagaccttaccatttgaaatgggttggactctttacttttatatgatgtatactatgacagtttactatttctcaactctcaactaaaatggtaataataattatatcaataaatgatattaatttttaaaaaaagagagagatgagtgnaagaaggtaggtagagggaaaggtaggaaagagntaatagagaagtagaanagagtagagaggtagcatgatgagagagtnagtggagattttggtaagatagatcaggtaggatgctttactgtcggagnagcgttgtgctccccctttttaccgatttaggatcaccaccctgtaatgatctgcttcttcacacggtgggcg

SEQ ID NO: 247182 - DNA, 332 bp, Homo sapiens
ttatcatggaagtcgacgttagttattgtgggagtgggttagttatcatggaagtgggttagttattgtgggagtgggtgtgtgattgcgacagtgggtttgttataacagcaagcccagccttctcttgcttgtgttctctcgccctctcctgcccttccactgtccaccatgggatgacacaagaaggtcctcaccagatatgggccccttgactgtcggcttcccagccttcaaaatgggaattctcccacctgttcaacacatcacccagaaggacactcacctttggtccaggaggcccgggtaagccctgtggaagcaaaaaaaaa

SEQ ID NO: 247183 - DNA, 364 bp, Homo sapiens
ttttattaccattctgatgatgttgaaaggtgtgatgtttaagaggtcatgagggctctgtcttcgagaatggactaatgccattatcatgggagtaggtttgccccctcttgctctctgtctgttgtcctctttttgcctttctgtgttatgatgcttccatcatgttacaatgcaataagaaggccctcgccagattctggctccttgatcttggatatccaagcctctacaactgtgagccaatttcttgtcgttatgaattacccagtctttggtattgcattatagcagcacaaaacagactaaaacagttagtttatggttaccaaattttgaaaatttttggaagttttttattttt

SEQ ID NO: 247184 - DNA, 485 bp, Homo sapiens
agctgctgatgggcaggtgacggcctatcctgcagcagttagagggcagctagggagacgtgggctcctacctttctctccctgcaccccttctccagcattgttcccagcaggcttgggactccactgaacttggatctctttggttttgttccttgtcctctccctctgctcacacactgggctccaaggagcccgttcaaccccagattcttggattcagaatcctgggatcatcaaatcccagagatgtcaaagctcatttggtctgccccttccttagagctacaccatccggccttgacccttggagatgggatgtccacttggctgggtttattgcacccttgctgtatgcaaggctctttgcttatcaggcttggagaaattgagttaggtggtgcaaaagaggatacagagggaaatagtgcccggcctgccttaggaagcccccagtccaataaaaaagacacaagaaaaaaaaa

SEQ ID NO: 247185 - DNA, 1745 bp, Homo sapiens
ggtcgcagcttggctatggaaggctccaatggctttgggatcgactccattctctcccaccgcgcgggcagccccgcccttcccaagggggaccccttgctcggggactgccgttcgcccctggagctgagtccacgctcagagagcagcagcgactgctcttcgccagcctctccaggaagggactgtttggagacggggaccccacggcctggcggggcatccggcccaggtttggactcccacctgcagcccgggcagctctcagccccggcccagtcgcgcaccgtcacctcctcctttctgatcagggacatccttgccgactgcaaaccactcgcggcctgtgcaccctactctagcagcgggcagccggcagcccctgagcctgggggccgccttgcggccaaggccgcggaggactttagagacaagctggacaaaagtggcagcaacgcctcatcggactctgagtataaagtgaaggaggagggcgaccgcgagatctccagctccagggacagtcccccggtgcgcctgaaaaagccacgcaaggcgcgcacggccttcaccgaccatcagctggcgcagctggagcgcagcttcgagcggcagaagtacctgagcgtgcaggaccgcatggagctcgccgcctcgctcaacctcaccgacacgcaggtcaagacctggtaccagaaccgcaggactaaatggaagcgacagacggccgtcgggttggagctgctggcggaggcaggcaattactcagcgctccagcggatgttcccgtcgccttatttctacccgcagagtctggtttccaacctggaccccggcgcggcgctctacctgtaccgcggccccagcgcgccgccgcctgctctccagagacctctggtgccccgcatcctcatccacggactccagggcgccagcgagccgcccccgccgctgccccccctggccggcgtcctcccacgcgccgcgcagcctcggtgaggcgcccgtcggctccggggcctcctcccgcgggctcggcgtggccccttccgcccgcctttctgagggcgcaggttcgacgccctttcccgggagggggccctgcccggccctccctggcgccccagcccagtgccccccgaagggccaaatgccaagtccactgaggcccggaccccggactgcgtctccccagcccccctcggcgtcctctctcgcggccgctctgtccgggagccatccccacccgccgggtgtacatacgcgtctctgccactccccacccccagcctctgccggctcccctaggcaacccctttctccccaggagcgggtgcggctgattcccaggcttcgctctctcccacgccccttctacgctccaggtggagaacagcccctctccccgcgcccccgccagggagagaaggggagtgcggagccccgtctccctacccctcgagcacctgggccagcggctgagctgtacataccgtgtgcaaagtgtatatgaagttatttattcgtgacccatgagcccgtgaccgtgtccgtggattagtgagtctgtggcctgtgccctccccactcccaggcggggcaggaaggggccaagggggcttgcccacccaccccgaccccagcccccagcctcagccccggtccgggggcagccaggcccgggttctctcttttttaaatgtcgaaataaacttcttacaaatgaccaggcgcctgtccctcgc

SEQ ID NO: 247186 - DNA, 465 bp, Homo sapiens
aggctggagtgcagtagtgggatctcagctcactgcaatctctgcctcctgggttcaagcaattctcctgtctcagctcccagctactcaggcggctgaagcgggaggatcgcttgaaacaggacggttgaggctgcagtgagctgtgatcatgtcactacactccaacctgggtgacagagcaagaccctatctcaaaaagaaagaaagaaagaaagaagaattggaagaaagcagagaaaagaaaggaatatgaaagctccattcactagaaagattttggttcatccttctagaccaccttctctggagcaaaatcctattctcaaatgactcagaaaatacctaataatgtatatacatagaataataaaacaaatatggcaaaatgttaaaactgaattaagggcattcagaagttctctgtgttattcttgcactttttctgtaagtttggaattatca

SEQ ID NO: 247187 - DNA, 497 bp, Homo sapiens
ttaatagtatattggttcttatgcactgactgaacagtaaacaaacatgtcattcttatgttgaagtcctaattctcagtgtgattgcagttggagacaggatgtttaaagaggtaattaaagttaagtgagctcataagtgtggggttctaatccaataggatcgtgtccttataagaagagaaagagacactggggatgcacacttcagatgtccatgtgtgggcaaagcaagaagaaaagccttgcaggccaaggagaaaggtttcaggagaagttaagcctgcaaacatattgatctcaaactttcagactccagaactgtgacaaatgaacttctgttttttaagccatcctatctgtggtattttgttatggcagctcttacagactaatactgttcttcacatcgtattttctcatcatgctagcaaattcacttaaatgttatttagtacaattgaaattcaataataaatcgcatgattctatcactt

SEQ ID NO: 247188 - DNA, 634 bp, Homo sapiens
cccaatatgaaaggaaaagccatgctggataggcatggggggcttagagaaggcagtggtcatctcaggcactttttgccctgtgccccatctccattgcagcaactcccctgccccgagtacccaaacttcctcccaaggctgtgtatccccccgtgagaccgtcgctgtacctcccgctgtgggacgccctatcctacttaaatgagccagtcaggtcgcgtcagcccgtcaacatggagaaccttcccataaacaatgggagcggccagtcctacgggcttgtcctgtatgagaagtccatctgctccggaggccgcctccgtgcccacgctcatgacatggcacaggtgtttttggatgagacaatgatagggattctgaatgagaataataaggacctgcacattcctgaactcagggactgccgatacctgaggatcctggtggagaatcaaggacgagtcaatttttcatggcaaatacagaatgagcagaaaggaataactggatctgtcagcatcaataactcttccctggagggctttaccatctattccctggagatgaaaatgagcttctttgagaggctccgctctgccacctggaagcctgtcccagacagccaccaggg

SEQ ID NO: 247189 - DNA, 355 bp, Homo sapiens
aatttattcctattctcattagtttttttgaaggcagattcgagtctactatcaaaagtgaaacaaacagctacctcctccttaaattttggacttgttacgttctctctgtcatgacatgcaataacttgtcttgcgtcaaggagcttaaagaccacagtgctctaaaatatcatttgcaaatgttggctgctgagaattggtctggatggacagagaattttgcagaggtgctgtatttcctaattggttttcataggaattagtttctctaaatccagttacatgttgcagctctctgtgtattaccctggaaaactgaaataaacaataaaaatcgatgttttcctttgta

SEQ ID NO: 247190 - DNA, 444 bp, Homo sapiens
tgttaccagggattgccaaatgctcccctggaggcgaaatcacccaattgagaaccacttgtctagacctatatattaaaagtctggaagtaagagtaggtaaacactggcattgtatttagaaaagtttggacttcctactaggccacagtgactacagagacaaggtgggaattagtttgttctgtgaccataggtatgtattatatcaagacctgaatttggccgggcgcagaggctcatacctgtaatcccggcactttgggaggccaaggcgggtggatcgcgtgaggacaggagtttgagaccagcctgaccaacatggtgaaacccctctctactaaaactacaaaattagccaggcgtcgtggtgcatacctgtagtctcaaatacttgggaggctgaggcaggagaatcgcttgaacctgggaggcggaacttgc

SEQ ID NO: 247191 - DNA, 314 bp, Homo sapiens
aataaagaaatgatgaatgattggatggggcaaaacgggaggcaatggggtcatgtgggagtgatgtactctttgttatctgtggcactgaacaaccgccactcgatccacccatgggaacgagttccccgtgaagtgggaaattcctaatggaagttttaggttatgcagtacagctcccaactccttacctggaaaaagaccagtgctggatgctggtcactcatatagaccctggattccttgctcccaggaggggaaggaggaaccgatgacagcaggatgaatgtagcaaggatagggtggctgaggtc

SEQ ID NO: 247192 - DNA, 377 bp, Homo sapiens
ttccccctaggaatgatgaacatagttcatgtctttactaatcgtctgtgacccaagcatcatactgagcacaacgtgtaaatatcaagaagacagtgttcaagggcaaggcttcagtatatgaggggcagcagaagtgatgggggggaggaggagtggaagaccaaggctgagcagctgtgtaaagagcagattggagcaagatagaagcctgttgtgaaaactggggcccaagatcagggctggacaacatcaagcatctttgctgctagagtgcctaagcgttgagtcacagcaacttaatccctcctattaatacctggtttgattctagagactggggtgaggctgagtcccctattggctgccagaatttc

SEQ ID NO: 247193 - DNA, 303 bp, Homo sapiens
gggctttttttttttaaaggaagaggaaaagttaaatgcttcctgaagctgagaggaaccctaaaattctgtcccactaaagacatccacatcctgataatgtttttaaaatctaatttaatgctaagaaataattatgtcaataatgtaaggccagagcttatagttccggtgtaaggttctgagtctcactttctcaaaaaaaaaagtggaaaaataaaataattttgcaattgtatttttttaattttcaatttttttaaagttttgttttctgcaattgtaattataatggtgtaagtt

SEQ ID NO: 247194 - DNA, 677 bp, Homo sapiens
tttacatcacatccactaattctttgacatacctcccatccagagctggaatctgtcccttctcctggaatctgaattgacattagcggctcattgattaggtaatttctgagactaaatcttcataggtgatttaaccttaattgtatttgtaggttcaaatcacctagtaaaagtctgaggccactgtgctgtgaggaagtcctggccacatgcaggtgcctcttgtaggtgttccagccaacagccccagctgaaaccccatgagtgaagcttccttccactcatcccagatagaatacttcagcttgagttactataacaaaatatcatagattggaagacttcaaccccagacatgtatttctcacagttctggaggctgggaagtgcaagattaaggtgctggctgattaatttcctggtgagggttctcttcctggcatgcaaacatctgccttcacactgtgagctgtcctcagcataccctttggattccctcctgtccagagggggccaaggtggcagggggctggtgggtcagcagtgccccagcctgtccacacctagccaggctgtgacagtgccagggctcagccccaaccatgcttggatatcaaagtgagcaccaggagtggggagaggccaggcagcaggagtagacatccccaaacctg

SEQ ID NO: 247195 - DNA, 432 bp, Homo sapiens
gatagataaagaaaatacatagctgttccagaaaacagaaatggataacttcatgaaccaaaagcagagtaatatactttagaaaggaagcgggccggaaaacccacagttgcaaaacaaatagaatttccaactgcctcttgtagccccttcctggaagtagtcacagcccagggtgttcgacttcttcctctgttttttgtttgtttgttgtttgcttttctgtggggtttttgttgttgttgtttgcttttaaaaaaaaattccctttccctgcttttttgtcacagcagcctttgtcacttcaaacaccgcaagtgttctttaaaaaaaattatatcaacctttcaattaaaatgcaacatgtctgaaacttggtatctggagaggtgagttggacaaaggagcccttgttactgcacgttttcattc

SEQ ID NO: 247196 - DNA, 899 bp, Homo sapiens
cacgctataatggcagagttgagtagttgccaaagagaccacatggtatggacatcctaaagtatttactatctggccttttacagaaaaggtttgccaacccctgctctgtacaatgcctgtcaccaatacagaggttggggctctaaccaggtgggtctccctggcttccactggcgacctcttaacctggcttatgggtgcacattttcaggctggtgcttctgggagatatgagagacacagtcagcttgtttccagctccaagatgtgagatggactgtgtctcttatgtctgcatttgaatcttctctcctttccatccaacttcctgcccccagctctgactcataggtctctgtctttgccttttcccaagaagagcaagaaatgactaaggcccaggggaggctgcatttccctgatagctaatgatgtagaacatcttgccatgtgcttatttgtcatctacatgtcctttatggtgaaatgtctcttcacattctttgctcatttaccaaatggattgcttaaaaaaaaaaaaacttgagttttgagagttccttacatattctaggtatgagttctttgtcagatatgtggtttgcaaatatttcctcccaggctgtagtttgtctttttgtcctcttaacaaggtctttgttagagcaaacacatttaattttgaagtctagtttattgatttaaaaacattttttggatcatgcttttgttgttgtgtctaagaactcttcacaagccgtagctcccaaagacgttctcctgtgttttatttttaaagttttttaattttatgtttgacatttaaatctgtgatctgtttttaaaaaacagctttattgagatgtaattcacatacaataaaacccacacatttg

SEQ ID NO: 247197 - DNA, 156 bp, Homo sapiens
tcacgtggccaaccgtgaagcctgcccagcctccctagagcccctcctgtctcaatagcggccatgtacattttacttgttttgttgttgttttgtttttgagatggagttttactctttttgcccaggcgggagtgcagtggtgcgatctcagct

SEQ ID NO: 247198 - DNA, 535 bp, Homo sapiens
gtgacataactgtaatttacctactggtaaatgctctgttcatgtcagttagtagaatagaaagtgctggccctgctgacacagcagccatctcctggtttgcgatggacactatctcaggaggaggctgccgtgtgcctgctgcgaggggtgctccctgtttgctagggaggcccagagactgccccggcacctcgctgcacacagagaggccgtgtgtgtctcttgacccttcagctccacactgggaatgagggagaccaggggttagagatgcctcgggacctgagccgggcaccagctcccatctgtccatctgtcctgggctgctgggggagccggctctggccaggactgatgattcctggcacccaccaggagatgcacatcctgcttgaaagctgtgaactgctatccagagtgtctgggcttatcctgttggagcaaaacccctgggctaatatgtaatcccattgtgaaatgtatttcaaggagggcttctacaaggattctaattttacagcagctttaacca

SEQ ID NO: 247199 - DNA, 282 bp, Homo sapiens
agaattaattgagtggaccagatggttttgcccatttgaagcaaatggggtggattacaaagtaaatcttatttgttgtgttaagaggatcattaatagcaaaataataaaatcaagtataatacttttagaggaaaatgacctttttcagaaaagggttcacacagatgcaagtttcttattgatgtcttgatgttagctagcggtttctgagtgattaagtcattgaatattgtcaaagggaagctaagttaataaggtttataatgggatattttacca

SEQ ID NO: 247200 - DNA, 442 bp, Homo sapiens
ggattacaggagtgagccactgtacccagcatacagtttttttatagaggaaaaaaaacatgtatatggtgactttccttttcctagctttcctgaatctttcctctaacaagtaatatttaagaattagtaatgtaactctagtgtagtcccattgacacagatatgggttgttgtatccattctttatgtaaaatgtctgatatgcctaatttattcccatgttaagagaatttattgtctacacctcattcagtctagctttggagtgaaacattccactaccactggcaatttgttacttaaacagaaaagagtattgaaccccttgtctttcatgaattgctttaaaatggtgattaattgttatgatggaattaactttacagtgctatccttaattattccctaatgtttacagaataaaaaaataatgcaaaat

SEQ ID NO: 247201 - DNA, 861 bp, Homo sapiens
  misc_feature (61)..(61): n is a, c, g, or t
  misc_feature (75)..(75): n is a, c, g, or t
atatacataatcgtataggaaagaatataaaataatagaaaacaaacagccttgttagagnaacatttactggangcttgacaagaatgacattttaatggaacaatctgatccacaacatcactataatgtggcaagactgtaccagagtgagaaacagaacaagacatctgtccaactcagcacccctagcacccatcaaagtaccaatatatacaacccaatcattattatttaaagaataaactaatcaacgcatgtatcaatatatgaattagtaaataaaatggaaaacaaaggaaacaacaccactcacaaaactcacccatacaacaacaaaaaaaaacaacctctaaacttcataatatattaacccccaatagccccctcacccaacataccccacacttccctttcattcttcacgaagcgaattatttagtgcacccccccctcaccaggcgcaacaaccaacaccctcccaacgccccatccccccccggtctactcgcagccccgtaaacctcgtactcttccccacccccgcgccccctctcatccctcccaacccctgtgtctctcatcacgatacatcattttcctatatctccccacatgtacagaaccgcaagaacggcgaccctcgcgtcctactcacacttgcacaccaccaaccgtcactacaaaacaagaacctaccatcaaaaaaggtacaaaatcctcgcaacctatctatattccaaacgcgctcccgatgatgatgttactcttaaacaatcatcgatacaacacggtcacaaccgaactctttctcgcttcttttcacacccaccatcctccccccgaccacccatctcccct

SEQ ID NO: 247202 - DNA, 1072 bp, Homo sapiens
caatcaattttatactttcttaatatttaaacaccatttcaaggtatttcttatatttgtctataatattctctgtatttgtgttaaatactttatttaaagagaaatttggaggccacccaaggtatctaaatatgaaaacacctctgatttcttaacatgttaaaaaacagaattcctgttttctttttccagctaaagttacaaaatatatgtaagatataaaaatacatgctttatacttattatctaaatccttcttccattcagaaaagaacatttctggtaaaagcaagaatgacattttaatggaacaatctgatccacaacatcactataatgtggcaagactgtaccagagtgagaaacagaacaagacatctgtccaactcagcacccctagcacccatcaaagtaccaatatatacaacccaatcattattatttaaagaataaactaatcaacgcatgtatcaatatatgaattagtaaataaaatggaaaacaaaggaaacaacaccactcacaaaactcacccatacaacaacaaaaaaaaacaacctctaaacttcataatatattaacccccaatagccccctcacccaacataccccacacttccctttcattcttcacgaagcgaattatttagtgcacccccccctcaccaggcgcaacaaccaacaccctcccaacgccccatccccccccggtctactcgcagccccgtaaacctcgtactcttccccacccccgcgccccctctcatccctcccaacccctgtgtctctcatcacgatacatcattttcctatatctccccacatgtacagaaccgcaagaacggcgaccctcgcgtcctactcacacttgcacaccaccaaccgtcactacaaaacaagaacctaccatcaaaaaaggtacaaaatcctcgcaacctatctatattccaaacgcgctcccgatgatgatgttactcttaaacaatcatcgatacaacacggtcacaaccgaactctttctcgcttcttttcacacccaccatcctccccccgaccacccatctcccct

SEQ ID NO: 247203 - DNA, 580 bp, Homo sapiens
ggacatatttatattaaaatttgttttcattgttcatctgaaattcaaatttatccgggcatcctgtatttgtatctgttaggtctaaagagacaagccatatacaactgttttttgtaactctcatcccacaaaaaaaataggaaagtaattttttgagttttagagaaccttaaaattaatgctaagaccctaggaaatttcttatgtgctcatatgtttggtgaaataataggaaggcagcacagcaaagtgtttcagattgcaggttttcagtctgatggtcccaagttgaaatttcaagctctttgaccttggtcaagttacagatccccagactgcagataaactgatactgacagaatttattgatgcctgcttcatacctcatacttttattgtaatgaaattagataaaatagagtgcttagcatagtgcttgacatagtataaatgccctatatatgccaacagttgttacaattgttactataaaaaatgtggatgatgatcagattaaaagaaaccttatttgagaatattccttagaaccttatgtttatggttttcttttacttaa

SEQ ID NO: 247204 - DNA, 4223 bp, Homo sapiens
ctcgggtcgcgggcgttggcagccgggcgggtgggaggggccggagcaaaagttccgggcgcccgagccggctgctcgtgccatggagcggagtcccgacgtgtcccccgggccttcccgctccttcaaggaggagttgctctgcgccgtctgctacgaccccttccgcgacgcagtcactctgcgctgcggccacaacttctgccgcgggtgcgtgagccgctgctgggaggtgcaggtgtcgcccacctgcccagtgtgcaaagaccgcgcgtcacccgccgacctgcgcaccaaccacaccctcaacaacctggtggagaagctgctgcgcgaggaggccgagggcgcgcgctggaccagctaccgcttctcgcgtgtctgccgcctgcaccgcggacagctcagcctcttctgcctcgaggacaaggagctgctgtgctgctcctgccaggccgacccccgacaccaggggcaccgcgtgcagccggtgaaggacactgcccacgactttcgggccaagtgcaggaacatggagcatgcactgcgggagaaggccaaggccttctgggccatgcggcgctcctatgaggccatcgccaagcacaatcaggtggaggctgcatggctggaaggccggatccggcaggagtttgataagcttcgcgagttcttgagagtggaggagcaggccattctggatgccatggccgaggagacaaggcagaagcaacttctggccgacgagaagatgaagcagctcacagaggagacggaggtgctggcacatgagatcgagcggctgcagatggagatgaaggaggacgacgtttcttttctcatgaaacacaagagccgaaaacgccgactcttctgcaccatggagccagagccagcccagcccggcatgcttatcgatgtctgcaagtacctgggctccctgcagtaccgcgtctggaagaagatgcttgcatctgtggaatctgtacccttcagctttgaccccaacaccgcagctggctggctctccgtgtctgacgacctcaccagcgtcaccaaccatggctaccgcgtgcaggtggagaacccggaacgcttctcctcggcgccctgcctgctgggctcccgtgtcttctcacagggctcgcacgcctgggaggtggcccttggggggctgcagagctggagggtgggcgtggtacgtgtgcgccaggactcgggcgctgagggccactcacacagctgctaccacgacacacgctcgggcttctggtatgtctgccgcacgcagggcgtggagggggaccactgcgtgacctcggacccagccacgtcgcccctggtcctggccatcccacgccgcctgcgtgtggagctggagtgtgaggagggcgagctgtctttctatgacgcggagcgccactgccacctgtacaccttccacgcccgctttggggaggttcgcccctacttctacctggggggtgcacggggcgccgggcctccagagcctttgcgcatctgccccttgcacatcagtgtcaaggaagaactggatggctgagctggcccggggctgccccggtcttgtgccacagcactgttttctttctgccctcttcctaatgcccacactgcttgggcactattgcgcccctgcctccttgccaggctcttcctcctgtcctgcctggtccttttccatgactccaggctgtgcctctctccatgtttggtcccttctgtgcccatggtcaggagctattcgggtggcacctcgctggccaggctctcccgagtcgtggcacctccacaatgtgaattttctgaatccctattccaggatttctgggaataatgtttacttctagaatgggcctgttgtaaaccatctcatcgaggtgtggtaaagccattggatgaggaggggactgccatggaaaggagagtttgttacttacggttctgagaggaggggccacataggaaagccccacggtgggtcagaaggcggaaggagggaggggaacgtgtgggcaagagacttcctctggtttcctcaggaggaaatgggcaaggcagagtaagcaggggagacaggtttaagggtagctggcttgagtaatttcagtggctctcaggataggggctgccctttttgtctgatacctggccccgggatagtcaggacaggtgaatgttggcctggggtgtgacagccctgggagagccatgtgaaggaggcagctggcgccatcgctccggattagttggtttccataggaaaggcatgctttcagccagatgcttgccatctctagggattgggggattggctagcctgggaggatcagtctgtccaggtcagcgaggccccagataccagagcatcaagagtacaggaaatacagttaatgcagggcctctgtgtggctggatcctccgtctccatcagatcagctctgattgatctattcttgcacgatttcctctgaacacagggttccagagtacttaaacacaacattttttaaatcgtgatttcggcctatttccttgccaggcctgtttccccaccaggaaatgagataggaggactggatgaggatgtcctgttatagttgctgtggaggaagttcctctggttaattctcatcagcgtctgcagaaaagaaggaaagagggcacccttttcagttgggaagaaaggagaggggtggcgccatggacgtggccctaaacgctgtgggagagggaagaggaggctgggcctcgctgccctcttgtctctgctgacttcagcctggtcatgcttgctctgccacttgcgatttcatccctaatttcttcctccaccatgcctgcagacttttccctgggcttgttttttctcgcacatctctgaagagtttttaatcttcagctcatcatgtcccaggaagtggcatcataaaaggaaatatttttttttcctaggagcagtgttaaaatctgggtcacattcctgaccaaggacagcatcctgccttctgcccatccccttcagttcacaaaagctgacattttaaacaaatcatgactcacacgtattaattggttataaatatgttgtgtacactggttagataaaacttaaggccacaaggagggcccaggtaggcgatgtcagtgtgtgaaggggctggattgggcgtggtgaggatgttggcaaaccagtgcatgcacctggttggaagatgctcagcctcacaaaagctccaagccctttgggagccaaagtgtctgagagtgtgaccctctcctgtaaagtatttatcccacccattaatataatttctgtataataaacttgacctgaaattatttcattctttatattaaacttttaaaaatgttttttattttcaccttagatatgggaagagttttttttttttttttttttttaacaggataacttgagcaggctaggcctcttaaaaaaaaatttgagctaaaactcatttttcttttggcattttcttttcaatgttcttataagcaaagttcatccatgttgtagcatgtgttcaactttattttttcatcgggtaatattccattgtatggaatggtagtactacattttatttatcatgcatcgattggtggacatttggatcgtttctacttcttgactattatacataatgctgctaggaacttttgtgtatgagtttttgtgtggacatatgttttcatttctctttggtatatgcctgggagcagatttgctggatcatatgaaactctatttaacccttgagggactcccaaactgttttccaatgtggtgacacaattttatatcccatcaacagggcatgagggttctgatgactccacatccctcagtgctttttattatctatcttttaacttagccatcctagtaggggtaatgtggcatctcattgtgattttggtttgcatttccctgatggcgaatgatattgagcatcttttcatgagcttattggccatttgcatatcttcttaggacagctatctttagatcacttgctcattttttaattgggttatttgtctttttattattgagttgtaagagtccttttatagcctggcacaagtccctttaactggtatatgattataaaatttttctccgtgagctgtttcatttccttgatgatgtcctttgaaatactaaagcttttaat

SEQ ID NO: 247205 - DNA, 852 bp, Homo sapiens
gggactctagagcatccccacctcctaccccacgaccaggggcaccgcgtgcagccggtgaaggacactgcccacgactttcgggccaagtgcaggaacatggagcatgcactgcgggagaaggccaaggccttctgggccatgcggcgctcctatgaggccatcgccaagcacaatcaggtggaggctgcatggctggaaggccggatccggcaggagtttgataagcttcgcgagttcttgagagtggaggagcaggccattctggatgccatggccgaggagacaaggcagaagcaacttctggccgacgagaagatgaagcagctcacagaggagacggaggtgctggcacatgagatcgagcggctgcagatggagatgaaggaggacgacgtttcttttctcatggtaaggagctcagcgtctggattcagtgacagggccacatgttccaggaccagctgggagccatagcccaccagccctggccaacgtcatcttcctggagcttcctgggtactggcctggaggagctcacaagtaacctgctctgcttgtgtcatgaaactaaaaagacttatcagggcggagttccttgaaaccctgttatttcttcctcgctcttcttttttttagagacagggtcttgctgtatcacccaggctggagtacagtgggtgattatagctcagtgtaacctcaaactcatgggctcaagtgatcctctctccttagcctcctgagtagctgggactacaggcacgagccaccatgcccaactaatttttttcattttttaccagtcaggtaggggtgaggggggtctcactatgttgcccaagctggtct

SEQ ID NO: 247206 - DNA, 3790 bp, Homo sapiens
gggactctagagcatccccacctcctaccccacgaccaggggcaccgcgtgcagccggtgaaggacactgcccacgactttcgggccaagtgcaggaacatggagcatgcactgcgggagaaggccaaggccttctgggccatgcggcgctcctatgaggccatcgccaagcacaatcaggtggaggctgcatggctggaaggccggatccggcaggagtttgataagcttcgcgagttcttgagagtggaggagcaggccattctggatgccatggccgaggagacaaggcagaagcaacttctggccgacgagaagatgaagcagctcacagaggagacggaggtgctggcacatgagatcgagcggctgcagatggagatgaaggaggacgacgtttcttttctcatgaaacacaagagccgaaaacgccgactcttctgcaccatggagccagagccagcccagcccggcatgcttatcgatgtctgcaagtacctgggctccctgcagtaccgcgtctggaagaagatgcttgcatctgtggaatctgtacccttcagctttgaccccaacaccgcagctggctggctctccgtgtctgacgacctcaccagcgtcaccaaccatggctaccgcgtgcaggtggagaacccggaacgcttctcctcggcgccctgcctgctgggctcccgtgtcttctcacagggctcgcacgcctgggaggtggcccttggggggctgcagagctggagggtgggcgtggtacgtgtgcgccaggactcgggcgctgagggccactcacacagctgctaccacgacacacgctcgggcttctggtatgtctgccgcacgcagggcgtggagggggaccactgcgtgacctcggacccagccacgtcgcccctggtcctggccatcccacgccgcctgcgtgtggagctggagtgtgaggagggcgagctgtctttctatgacgcggagcgccactgccacctgtacaccttccacgcccgctttggggaggttcgcccctacttctacctggggggtgcacggggcgccgggcctccagagcctttgcgcatctgccccttgcacatcagtgtcaaggaagaactggatggctgagctggcccggggctgccccggtcttgtgccacagcactgttttctttctgccctcttcctaatgcccacactgcttgggcactattgcgcccctgcctccttgccaggctcttcctcctgtcctgcctggtccttttccatgactccaggctgtgcctctctccatgtttggtcccttctgtgcccatggtcaggagctattcgggtggcacctcgctggccaggctctcccgagtcgtggcacctccacaatgtgaattttctgaatccctattccaggatttctgggaataatgtttacttctagaatgggcctgttgtaaaccatctcatcgaggtgtggtaaagccattggatgaggaggggactgccatggaaaggagagtttgttacttacggttctgagaggaggggccacataggaaagccccacggtgggtcagaaggcggaaggagggaggggaacgtgtgggcaagagacttcctctggtttcctcaggaggaaatgggcaaggcagagtaagcaggggagacaggtttaagggtagctggcttgagtaatttcagtggctctcaggataggggctgccctttttgtctgatacctggccccgggatagtcaggacaggtgaatgttggcctggggtgtgacagccctgggagagccatgtgaaggaggcagctggcgccatcgctccggattagttggtttccataggaaaggcatgctttcagccagatgcttgccatctctagggattgggggattggctagcctgggaggatcagtctgtccaggtcagcgaggccccagataccagagcatcaagagtacaggaaatacagttaatgcagggcctctgtgtggctggatcctccgtctccatcagatcagctctgattgatctattcttgcacgatttcctctgaacacagggttccagagtacttaaacacaacattttttaaatcgtgatttcggcctatttccttgccaggcctgtttccccaccaggaaatgagataggaggactggatgaggatgtcctgttatagttgctgtggaggaagttcctctggttaattctcatcagcgtctgcagaaaagaaggaaagagggcacccttttcagttgggaagaaaggagaggggtggcgccatggacgtggccctaaacgctgtgggagagggaagaggaggctgggcctcgctgccctcttgtctctgctgacttcagcctggtcatgcttgctctgccacttgcgatttcatccctaatttcttcctccaccatgcctgcagacttttccctgggcttgttttttctcgcacatctctgaagagtttttaatcttcagctcatcatgtcccaggaagtggcatcataaaaggaaatatttttttttcctaggagcagtgttaaaatctgggtcacattcctgaccaaggacagcatcctgccttctgcccatccccttcagttcacaaaagctgacattttaaacaaatcatgactcacacgtattaattggttataaatatgttgtgtacactggttagataaaacttaaggccacaaggagggcccaggtaggcgatgtcagtgtgtgaaggggctggattgggcgtggtgaggatgttggcaaaccagtgcatgcacctggttggaagatgctcagcctcacaaaagctccaagccctttgggagccaaagtgtctgagagtgtgaccctctcctgtaaagtatttatcccacccattaatataatttctgtataataaacttgacctgaaattatttcattctttatattaaacttttaaaaatgttttttattttcaccttagatatgggaagagttttttttttttttttttttttaacaggataacttgagcaggctaggcctcttaaaaaaaaatttgagctaaaactcatttttcttttggcattttcttttcaatgttcttataagcaaagttcatccatgttgtagcatgtgttcaactttattttttcatcgggtaatattccattgtatggaatggtagtactacattttatttatcatgcatcgattggtggacatttggatcgtttctacttcttgactattatacataatgctgctaggaacttttgtgtatgagtttttgtgtggacatatgttttcatttctctttggtatatgcctgggagcagatttgctggatcatatgaaactctatttaacccttgagggactcccaaactgttttccaatgtggtgacacaattttatatcccatcaacagggcatgagggttctgatgactccacatccctcagtgctttttattatctatcttttaacttagccatcctagtaggggtaatgtggcatctcattgtgattttggtttgcatttccctgatggcgaatgatattgagcatcttttcatgagcttattggccatttgcatatcttcttaggacagctatctttagatcacttgctcattttttaattgggttatttgtctttttattattgagttgtaagagtccttttatagcctggcacaagtccctttaactggtatatgattataaaatttttctccgtgagctgtttcatttccttgatgatgtcctttgaaatactaaagcttttaat

SEQ ID NO: 247207 - DNA, 4335 bp, Homo sapiens
ctcgggtcgcgggcgttggcagccgggcgggtgggaggggccggagcaaaagttccgggcgcccgagccggctgctcgtgccatggagcggagtcccgacgtgtcccccgggccttcccgctccttcaaggaggagttgctctgcgccgtctgctacgaccccttccgcgacgcagtcactctgcgctgcggccacaacttctgccgcgggtgcgtgagccgctgctgggaggtgcaggtgtcgcccacctgcccagtgtgcaaagaccgcgcgtcacccgccgacctgcgcaccaaccacaccctcaacaacctggtggagaagctgctgcgcgaggaggccgagggcgcgcgctggaccagctaccgcttctcgcgtgtctgccgcctgcaccgcggacagctcagcctcttctgcctcgaggacaaggagctgctgtgctgctcctgccaggccgacccccgacaccaggggcaccgcgtgcagccggtgaaggacactgcccacgactttcgggtgaggagcctgatagccgaagagagaaggaactttttaccaactcaccagtggatagtgacaaagacaaggctccaaaccagctctcctaaccttcagtccaggaggcaaggccaagtgcaggaacatggagcatgcactgcgggagaaggccaaggccttctgggccatgcggcgctcctatgaggccatcgccaagcacaatcaggtggaggctgcatggctggaaggccggatccggcaggagtttgataagcttcgcgagttcttgagagtggaggagcaggccattctggatgccatggccgaggagacaaggcagaagcaacttctggccgacgagaagatgaagcagctcacagaggagacggaggtgctggcacatgagatcgagcggctgcagatggagatgaaggaggacgacgtttcttttctcatgaaacacaagagccgaaaacgccgactcttctgcaccatggagccagagccagcccagcccggcatgcttatcgatgtctgcaagtacctgggctccctgcagtaccgcgtctggaagaagatgcttgcatctgtggaatctgtacccttcagctttgaccccaacaccgcagctggctggctctccgtgtctgacgacctcaccagcgtcaccaaccatggctaccgcgtgcaggtggagaacccggaacgcttctcctcggcgccctgcctgctgggctcccgtgtcttctcacagggctcgcacgcctgggaggtggcccttggggggctgcagagctggagggtgggcgtggtacgtgtgcgccaggactcgggcgctgagggccactcacacagctgctaccacgacacacgctcgggcttctggtatgtctgccgcacgcagggcgtggagggggaccactgcgtgacctcggacccagccacgtcgcccctggtcctggccatcccacgccgcctgcgtgtggagctggagtgtgaggagggcgagctgtctttctatgacgcggagcgccactgccacctgtacaccttccacgcccgctttggggaggttcgcccctacttctacctggggggtgcacggggcgccgggcctccagagcctttgcgcatctgccccttgcacatcagtgtcaaggaagaactggatggctgagctggcccggggctgccccggtcttgtgccacagcactgttttctttctgccctcttcctaatgcccacactgcttgggcactattgcgcccctgcctccttgccaggctcttcctcctgtcctgcctggtccttttccatgactccaggctgtgcctctctccatgtttggtcccttctgtgcccatggtcaggagctattcgggtggcacctcgctggccaggctctcccgagtcgtggcacctccacaatgtgaattttctgaatccctattccaggatttctgggaataatgtttacttctagaatgggcctgttgtaaaccatctcatcgaggtgtggtaaagccattggatgaggaggggactgccatggaaaggagagtttgttacttacggttctgagaggaggggccacataggaaagccccacggtgggtcagaaggcggaaggagggaggggaacgtgtgggcaagagacttcctctggtttcctcaggaggaaatgggcaaggcagagtaagcaggggagacaggtttaagggtagctggcttgagtaatttcagtggctctcaggataggggctgccctttttgtctgatacctggccccgggatagtcaggacaggtgaatgttggcctggggtgtgacagccctgggagagccatgtgaaggaggcagctggcgccatcgctccggattagttggtttccataggaaaggcatgctttcagccagatgcttgccatctctagggattgggggattggctagcctgggaggatcagtctgtccaggtcagcgaggccccagataccagagcatcaagagtacaggaaatacagttaatgcagggcctctgtgtggctggatcctccgtctccatcagatcagctctgattgatctattcttgcacgatttcctctgaacacagggttccagagtacttaaacacaacattttttaaatcgtgatttcggcctatttccttgccaggcctgtttccccaccaggaaatgagataggaggactggatgaggatgtcctgttatagttgctgtggaggaagttcctctggttaattctcatcagcgtctgcagaaaagaaggaaagagggcacccttttcagttgggaagaaaggagaggggtggcgccatggacgtggccctaaacgctgtgggagagggaagaggaggctgggcctcgctgccctcttgtctctgctgacttcagcctggtcatgcttgctctgccacttgcgatttcatccctaatttcttcctccaccatgcctgcagacttttccctgggcttgttttttctcgcacatctctgaagagtttttaatcttcagctcatcatgtcccaggaagtggcatcataaaaggaaatatttttttttcctaggagcagtgttaaaatctgggtcacattcctgaccaaggacagcatcctgccttctgcccatccccttcagttcacaaaagctgacattttaaacaaatcatgactcacacgtattaattggttataaatatgttgtgtacactggttagataaaacttaaggccacaaggagggcccaggtaggcgatgtcagtgtgtgaaggggctggattgggcgtggtgaggatgttggcaaaccagtgcatgcacctggttggaagatgctcagcctcacaaaagctccaagccctttgggagccaaagtgtctgagagtgtgaccctctcctgtaaagtatttatcccacccattaatataatttctgtataataaacttgacctgaaattatttcattctttatattaaacttttaaaaatgttttttattttcaccttagatatgggaagagttttttttttttttttttttttaacaggataacttgagcaggctaggcctcttaaaaaaaaatttgagctaaaactcatttttcttttggcattttcttttcaatgttcttataagcaaagttcatccatgttgtagcatgtgttcaactttattttttcatcgggtaatattccattgtatggaatggtagtactacattttatttatcatgcatcgattggtggacatttggatcgtttctacttcttgactattatacataatgctgctaggaacttttgtgtatgagtttttgtgtggacatatgttttcatttctctttggtatatgcctgggagcagatttgctggatcatatgaaactctatttaacccttgagggactcccaaactgttttccaatgtggtgacacaattttatatcccatcaacagggcatgagggttctgatgactccacatccctcagtgctttttattatctatcttttaacttagccatcctagtaggggtaatgtggcatctcattgtgattttggtttgcatttccctgatggcgaatgatattgagcatcttttcatgagcttattggccatttgcatatcttcttaggacagctatctttagatcacttgctcattttttaattgggttatttgtctttttattattgagttgtaagagtccttttatagcctggcacaagtccctttaactggtatatgattataaaatttttctccgtgagctgtttcatttccttgatgatgtcctttgaaatactaaagcttttaat

SEQ ID NO: 247208 - DNA, 2930 bp, Homo sapiens
gggactctagagcatccccacctcctaccccacgaccaggggcaccgcgtgcagccggtgaaggacactgcccacgactttcgggccaagtgcaggaacatggagcatgcactgcgggagaaggccaaggccttctgggccatgcggcgctcctatgaggccatcgccaagcacaatcaggtggaggctgcatggctggaaggccggatccggcaggagtttgataagcttcgcgagttcttgagagtggaggagcaggccattctggatgccatggccgaggagacaaggcagaagcaacttctggccgacgagaagatgaagcagctcacagaggagacggaggtgctggcacatgagatcgagcggctgcagatggagatgaaggaggacgacgtttcttttctcatgaaacacaagagccgaaaacgccgactcttctgcaccatggagccagagccagcccagcccggcatgcttatcgatgtctgcaagtacctgggctccctgcagtaccgcgtctggaagaagatgcttgcatctgtggaatctgtacccttcagctttgaccccaacaccgcagctggctggctctccgtgtctgacgacctcaccagcgtcaccaaccatggctaccgcgtgcaggtggagaacccggaacgcttctcctcggcgccctgcctgctgggctcccgtgtcttctcacagggctcgcacgcctgggaggtggcccttggggggctgcagagctggagggtgggcgtggtacgtgtgcgccaggactcgggcgctgagggccactcacacagctgctaccacgacacacgctcgggcttctggtatgtctgccgcacgcagggcgtggagggggaccactgcgtgacctcggacccagccacgtcgcccctggtcctggccatcccacgccgcctgcgtgtggagctggagtgtgaggagggcgagctgtctttctatgacgcggagcgccactgccacctgtacaccttccacgcccgctttggggaggttcgcccctacttctacctggggggtgcacggggcgccgggcctccagagcctttgcgcatctgccccttgcacatcagtgtcaaggaagaactggatggctgagctggcccggggctgccccggtcttgtgccacagcactgttttctttctgccctcttcctaatgcccacactgcttgggcactattgcgcccctgcctccttgccaggctcttcctcctgtcctgcctggtccttttccatgactccaggctgtgcctctctccatgtttggtcccttctgtgcccatggtcaggagctattcgggtggcacctcgctggccaggctctcccgagtcgtggcacctccacaatgtgaattttctgaatccctattccaggatttctgggaataatgtttacttctagaatgggcctgttgtaaaccatctcatcgaggtgtggtaaagccattggatgaggaggggactgccatggaaaggagagtttgttacttacggttctgagaggaggggccacataggaaagccccacggtgggtcagaaggcggaaggagggaggggaacgtgtgggcaagagacttcctctggtttcctcaggaggaaatgggcaaggcagagtaagcaggggagacaggtttaagggtagctggcttgagtaatttcagtggctctcaggataggggctgccctttttgtctgatacctggccccgggatagtcaggacaggtgaatgttggcctggggtgtgacagccctgggagagccatgtgaaggaggcagctggcgccatcgctccggattagttggtttccataggaaaggcatgctttcagccagatgcttgccatctctagggattgggggattggctagcctgggaggatcagtctgtccaggtcagcgaggccccagataccagagcatcaagagtacaggaaatacagttaatgcagggcctctgtgtggctggatcctccgtctccatcagatcagctctgattgatctattcttgcacgatttcctctgaacacagggttccagagtacttaaacacaacattttttaaatcgtgatttcggcctatttccttgccaggcctgtttccccaccaggaaatgagataggaggactggatgaggatgtcctgttatagttgctgtggaggaagttcctctggttaattctcatcagcgtctgcagaaaagaaggaaagagggcacccttttcagttgggaagaaaggagaggggtggcgccatggacgtggccctaaacgctgtgggagagggaagaggaggctgggcctcgctgccctcttgtctctgctgacttcagcctggtcatgcttgctctgccacttgcgatttcatccctaatttcttcctccaccatgcctgcagacttttccctgggcttgttttttctcgcacatctctgaagagtttttaatcttcagctcatcatgtcccaggaagtggcatcataaaaggaaatatttttttttcctaggagcagtgttaaaatctgggtcacattcctgaccaaggacagcatcctgccttctgcccatccccttcagttcacaaaagctgacattttaaacaaatcatgactcacacgtattaattggttataaatatgttgtgtacactggttagataaaacttaaggccacaaggagggcccaggtaggcgatgtcagtgtgtgaaggggctggattgggcgtggtgaggatgttggcaaaccagtgcatgcacctggttggaagatgctcagcctcacaaaagctccaagccctttgggagccaaagtgtctgagagtgtgaccctctcctgtaaagtatttatcccacccattaatataatttctgtataataaacttgacctgaaatta

SEQ ID NO: 247209 - DNA, 1892 bp, Homo sapiens
gggactctagagcatccccacctcctaccccacgaccaggggcaccgcgtgcagccggtgaaggacactgcccacgactttcgggccaagtgcaggaacatggagcatgcactgcgggagaaggccaaggccttctgggccatgcggcgctcctatgaggccatcgccaagcacaatcaggtggaggctgcatggctggaaggccggatccggcaggagtttgataagcttcgcgagttcttgagagtggaggagcaggccattctggatgccatggccgaggagacaaggcagaagcaacttctggccgacgagaagatgaagcagctcacagaggagacggaggtgctggcacatgagatcgagcggctgcagatggagatgaaggaggacgacgtttcttttctcatgaaacacaagagccgaaaacgccgactcttctgcaccatggagccagagccagcccagcccggcatgcttatcgatgtctgcaagtacctgggctccctgcagtaccgcgtctggaagaagatgcttgcatctgtggaatctgtacccttcagctttgaccccaacaccgcagctggctggctctccgtgtctgacgacctcaccagcgtcaccaaccatggctaccgcgtgcaggagcagtgttaaaatctgggtcacattcctgaccaaggacagcatcctgccttctgcccatccccttcagttcacaaaagctgacattttaaacaaatcatgactcacacgtattaattggttataaatatgttgtgtacactggttagataaaacttaaggccacaaggagggcccaggtaggcgatgtcagtgtgtgaaggggctggattgggcgtggtgaggatgttggcaaaccagtgcatgcacctggttggaagatgctcagcctcacaaaagctccaagccctttgggagccaaagtgtctgagagtgtgaccctctcctgtaaagtatttatcccacccattaatataatttctgtataataaacttgacctgaaattatttcattctttatattaaacttttaaaaatgttttttattttcaccttagatatgggaagagttttttttttttttttttttttaacaggataacttgagcaggctaggcctcttaaaaaaaaatttgagctaaaactcatttttcttttggcattttcttttcaatgttcttataagcaaagttcatccatgttgtagcatgtgttcaactttattttttcatcgggtaatattccattgtatggaatggtagtactacattttatttatcatgcatcgattggtggacatttggatcgtttctacttcttgactattatacataatgctgctaggaacttttgtgtatgagtttttgtgtggacatatgttttcatttctctttggtatatgcctgggagcagatttgctggatcatatgaaactctatttaacccttgagggactcccaaactgttttccaatgtggtgacacaattttatatcccatcaacagggcatgagggttctgatgactccacatccctcagtgctttttattatctatcttttaacttagccatcctagtaggggtaatgtggcatctcattgtgattttggtttgcatttccctgatggcgaatgatattgagcatcttttcatgagcttattggccatttgcatatcttcttaggacagctatctttagatcacttgctcattttttaattgggttatttgtctttttattattgagttgtaagagtccttttatagcctggcacaagtccctttaactggtatatgattataaaatttttctccgtgagctgtttcatttccttgatgatgtcctttgaaatactaaagcttttaat

SEQ ID NO: 247210 - DNA, 1032 bp, Homo sapiens
gggactctagagcatccccacctcctaccccacgaccaggggcaccgcgtgcagccggtgaaggacactgcccacgactttcgggccaagtgcaggaacatggagcatgcactgcgggagaaggccaaggccttctgggccatgcggcgctcctatgaggccatcgccaagcacaatcaggtggaggctgcatggctggaaggccggatccggcaggagtttgataagcttcgcgagttcttgagagtggaggagcaggccattctggatgccatggccgaggagacaaggcagaagcaacttctggccgacgagaagatgaagcagctcacagaggagacggaggtgctggcacatgagatcgagcggctgcagatggagatgaaggaggacgacgtttcttttctcatgaaacacaagagccgaaaacgccgactcttctgcaccatggagccagagccagcccagcccggcatgcttatcgatgtctgcaagtacctgggctccctgcagtaccgcgtctggaagaagatgcttgcatctgtggaatctgtacccttcagctttgaccccaacaccgcagctggctggctctccgtgtctgacgacctcaccagcgtcaccaaccatggctaccgcgtgcaggagcagtgttaaaatctgggtcacattcctgaccaaggacagcatcctgccttctgcccatccccttcagttcacaaaagctgacattttaaacaaatcatgactcacacgtattaattggttataaatatgttgtgtacactggttagataaaacttaaggccacaaggagggcccaggtaggcgatgtcagtgtgtgaaggggctggattgggcgtggtgaggatgttggcaaaccagtgcatgcacctggttggaagatgctcagcctcacaaaagctccaagccctttgggagccaaagtgtctgagagtgtgaccctctcctgtaaagtatttatcccacccattaatataatttctgtataataaacttgacctgaaatta

SEQ ID NO: 247211 - DNA, 515 bp, Homo sapiens
aaacatttcatgcatattgttaaccagagttcaatagttgttaaagattttttttcttttgaggtgaagtttacatgcagtgaaatgcacaaatcttaagtgttggatgcagtgaggtttgacaaatcacatacttgtgaaacccaagccctgatcaagataacattatcatccccaggaagtctcttcatgcttcttcccagtcaaatctttctatcccattcccctgggtaaccactcttggttctgagttttccccaatagattagttttctgtttttctaactacataaatgaaagtatatgctctcttgtgtaaggcttctttcagcataaggtatttgggatttatctatgttgtatgtatcaaaaatttattgctgaatattatttcattgtatgaatatgccatagtttatccttttgatggacacctgggccgtttccagttttttttacatattataaataaagcttctatggatatttttctgtaaatctttttatgagcacgt

SEQ ID NO: 247212 - DNA, 562 bp, Homo sapiens
ccactgtgcccggccagtatttttaatcttttatactgtatttttattgtaccttttctatgtttagatgtttagatacacgaattccattgtgttacaactgcctacagtactcagtacagtaacatgctatacaggtttgtagcttagaagcaacaggctataccacataacctaggtgtgtagtaggctgtaccatctaggtctgtgtaagtactctgggatgttcacaggatgaaatcatctaacagtgagtttcttagaacacattcctatcattaaccaatgcatgattataccatattttgaaactgtataaggcctatattagagaagggataactaaatgcttactactacatacatcacttaatctagtcattaaatttttcattaacctaattgtgcaaaaaagcaattgtcccaaggtcatggagctaacaaaaaagtaaattccacctattacagtaagaagtgaattatctcaagtttgttacctgcttacagatctttccatttataattatatccttccatttccattatctaaatactttttatt

SEQ ID NO: 247213 - DNA, 374 bp, Homo sapiens
tgttgtttacctttagtggaagggctggtgtttaagaatagatactgctctgttaaaaatacaaccatttgtaacatctttccctatgttacagtacaggtaaaagaagcacagaactaccaaaggggcaccttacattcaaggactcctacatatgaaaattccagtatccaaaacatactagtggtgattatttgctcaattattagtagtggttacttggataatgaaactgaaaacaagactaatttggagaaaagatatcacaactttctttttctgcactgttgaaatcttttggctaagtgctggtattttttttttttctttagggacgatgtctcactatgttgtctaggctggtctcaaactcc

SEQ ID NO: 247214 - DNA, 293 bp, Homo sapiens
ctctcatctgccactattttaaaaatagcccataattgttcaatttcttaataactaacaaaaatttgtaacaaaatggacaattctgcaatctttaaaatgctcactgtggcaattttctcacatgtctaatgtgtgcccataatgtccaaagattaatattttgtaccacaaaagatggataagaaaaagaatagatttaagtatgcaacacatatattttaatattaaacttttcctttttgttaatgaaaaaaggtaagccaaaagtgttctaaatgttatataaatac

SEQ ID NO: 247215 - DNA, 132 bp, Homo sapiens
tttttttaaaacctggacaggagatagaataaatgacattttacaatcaaaattacttcacttatttcatatataaagaaaactaaaaatatgcaaaaagccagattttaagttgtgttggtgagactttct

SEQ ID NO: 247216 - DNA, 325 bp, Homo sapiens
tatagattatcacaaacagctgtggggtcttaaaattggaaaagcaactaaaattttaacaataagggaatgtttaaatcatttttagtatgtttactaaatagaatattgtgcagccttcaatatgtggccccccaaaatgtatataatattgtattaagtaaagaaagcacagccagacaccatggctcacacctgtaatcacagtgctttgggaggccaaggtaagaggatcgattgaacccaggaggttgaggctgcagtgagccatgatcacaccactgcacttcagcctgggtaacagaggtaaaccccatttctttat

SEQ ID NO: 247217 - DNA, 407 bp, Homo sapiens
ggtaggacctgtgacttcctcttgccaacagaatacagcaaaggtgatggataggatgtcactggcttgattgaattatattgtatggcaaaggtgatgggatatcatggccctcactatcttactacatatatgactctgagaacactcattttcattatcctgttggcctcgaagaagcaagccaccatgagatctacagccacaagaaaatgaattctgccagcaatccgaatgaacctggaggctgatttttctctactcaaacctctagatgagaacacagcccaactgatgcctcattgacagcctcataggactctgagcagaagaggcagctaagcctgtctagactcctgatctgtgaaaacttgagataataaatatatgtcgttttaagctgctaa

SEQ ID NO: 247218 - DNA, 539 bp, Homo sapiens
tatctgtgccctataaatatcaccaaaagcaatcgttaagtctgagccagatgaaccctgcaggggtgccataacttaccatagactggatggatcaaacaccagaaatgtatttcctcacatttcaggaggctggaagtctgaaatcgaggtgttggctgagttggttacttctgaggcctctctccttggcttgcagatggccaccttctccctgtattctcacatggtcttccctctgtgtcttactgtgccctaatctcctcttgttataaggacagcagatattgggttaggatccatgctaatgacctcatttaaccttaattacatctttgaccctatctccaaatatggtcacattttgagacactgtcgggttaggacttcaacatatgaatttgggggtgggggtacataatatgtccttctttagaacagctaagacttattctataatcctgtcactcatctttggcctttatttccagtgacctttctttcattttcagtctgaagatcattcaactcaacagaaa

SEQ ID NO: 247219 - DNA, 455 bp, Homo sapiens
taaagtcaattatcctcttaatttatcatgtcttctacttcagtaatgaagacacatactttcttcaaataatggccccttgctaggctaacacactattttgggaaggaaacaaagcttatgattgaaatgtttttaaagaaattttaaattttggatcctttcacactacattctcattaatgagtttctatttatggaactatcctttcagtttatgcaaatataatttattaaatgattaacaaggaaaataagccagctggtagtatagtgctttgaatctattaatagcttgcaatttggcaatcaagattttgcatgggagaacctacactacaattaagaatgtatgctcacagacacaagcagcttataatgcaatctatatttaaatcagtaattgctgaatttatttttgtagtgattgtgctgaatataataatgatgaccat

SEQ ID NO: 247220 - DNA, 899 bp, Homo sapiens
catttgggtgactatgtgaacatattcctacaacttttttcctcacatcagtcatttgttaaatcgaagatgaagaaacagactttgtatttattacatcctccaacataattggcagctctgtgagggaagacactatatcctattcaattttacacccggtagtaacagtatgtgtgtgtactgtatatatacatatatatatacatacacatatataaatttaagtagtaactatatatgtatatatgtatagttactacttactatatatgtatacagtatataagtatatatgtatagttactacttacaatatatgcataaagttacagcttacatttacctcgtaatatatgtatatatatatattaggagttaaatgtattaggaggtaaatgtaaactctgtggtttatcatttattcacaattgctcttaattcttggggtatagtttgcctcctacatgatgcaattcagtgaaattcccaggagacaaaacaagattttgacctgaataaaccacttattgttgtaattcacaagtgagtttattcttcctggcacacttccaggtaatatccattaggctaaggattttgtttgttcactgttctatccccaagcctagagcactgcccagtgcggaatagctaataaatattgttgaatggatagatgaatggcaattttgttggtatgctctacatagtcagcagtcaataaaggaaacatatattcgttcctgataataagatgattcactttattgcccataaattgggctttttcaggccatcatgcacgttgattgatccagagatccctcaagcatgaaaaagcagagacataggtggtatagttattatcaatagagataagaaatgtagctggcaaa

SEQ ID NO: 247221 - DNA, 319 bp, Homo sapiens
cttaaccaactaaactaaatggccatgcatgaagcccttcctacgcacatacactcatatacaactgtacacaaaagacagatatacttttattatgcaaatcacagaggaccattgtaggtccccaaaccaatttttgagactattctaaattaacctccaaaaagaaaatgaaggaacaggtcggtttaaccacttgaaatcttcctgtggaacgtactctaactaaagatattatatttttaaatgaaggaacaggtcggtttaaccacttgaaatcttcctgtggaacatactctaactaaagatattatatttt

SEQ ID NO: 247222 - DNA, 326 bp, Homo sapiens
ctgcacccagcgtgcgggctcccgctcgctccatcgcctctcagcgaccgccagcctggctgcctatctggcccctccagccggcctgcctccctatctgccctcccggtgccggttccagtgcccgtgcgcccgcgggacccgggaagccgcgcgggagagtcctggcgcactcagcctctctttgtccgcgctctggccgcggctttgggaagggactgcgagcgagccgggagttctctgggggttgctaccctgggaagaatccgtgccctccccaccccaaccctcattaccggcacacctagggcggggccgggcggccg

SEQ ID NO: 247223 - DNA, 685 bp, Homo sapiens
gtcaaatgggggaagcctcaagtgatgaacacacagaaaaaatgtggtatatacatacaaggaatattattcaaccataaaaacagtaatatggaattacaaaacactaagagatgttagtcataaaatctgctatgaaacattgatgtaccattaaaaaagaatttgcctagataactacagtattcaactgtgactgtgtagtcatgaaaactaggtattttgagtcactggcatgcagtggacagcagtaacatttcacagaaaatgcactacaatcattatgaaaagactctactgagaacattttaatgactaagagatactaaaggtaatttttattatatgtttactataccgatgctattcttatgcaaatttaaaatgctgccatccaacttttagaagcaaggaatagccttatatttctaaataaagagaaaaatataaattatgtaaaatatggtgagagtcactgatatataaaataaacatctgggaataaatcatattattatttatatacaggttgaagaaataggataatttaatcaatgtggagtgcttgccgggtgcagtggttcacgcctgtaatcctgacactttgggaggccaaggcaggcagatcacctgaggtcgggagttcgaggccagcctgaccaacatggacaaaccccatctctac

SEQ ID NO: 247224 - DNA, 714 bp, Homo sapiens
ggaggagggggtggtgagaggagaaagcagccttccaattgaagatcagccctcaggtaaaggtcagcttcgggcaggctggcctcaggcggagtcagggtcagaggaaggagcagcagcagggtgggactggggcattctacatctcattcaggtcaagcagagtctggtccagcatcctttgtgtacagaggtgttcctctttggtgcatttcagtttatcttccaagtcatcaattgtcttttccagcttggctactgatctctcagccaactcagcatgggtctctgcctcctcgagattatcagtaagaatcttcatctcttcctcacatttgtcttctttttgagggtacttttcttcagctgcactcagacacttcaggttctggtccatcagtctgatctgctcatccatctctcagcaacgggactctgccagctcagctcattcttctgtgcattccatgtctctttcaatgatcaccaacttacgagccacctcttcatacttcccatctgcctcatctgcaatgtgcttagcttctttgagttggatttcctggagttccatcttcttcatcttttaaggcccagatttcaataacctttgtatctctctcactctcatcagcagcttttcccgcttcttccagcttttgcagggcagtggccaggcgctcctgagcacagtccagctcctcttcaaccagc

SEQ ID NO: 247225 - DNA, 576 bp, Homo sapiens
gaaacagagcaaagaaaaatccaattgcctgcacaataaaaagttgtcagagaagaaagtgaagtctcccctgcatttattttctactttgcgcaggtcgccaagttatcctccccctggttgtggcaaaagcaaatccaaatgttaagcaggtcttactctagtaatctcagaatggaagaattatatggactgaaaaatcacaaattgctcagcaagtcctactccagtgcccccaagtcatccaaaactgagcttttcaaggaacctaacgcagagggcaggaggctctctcttacctcagggcttattggtatcctaacaccatcttcatcttcatcttctcagcttgctccaaatggtgcaaaatgcattccagtacgagaccgtggcttcctggtgcagacaattgagtttgctgaacagcggatccctgtattaaatgaatattgtgtggtttgtgatgagccacatgtgtttccttttcaaaccctgggagtaatgaatgaagctgctgatgaaatagcaactggagctcaggtggtagatctactagtatccatgtgtaggtctgcg

SEQ ID NO: 247226 - DNA, 512 bp, Homo sapiens
ctcatgacagaggaaaacagcaagagcagaactgaaacacaagcactcaaaaacttctgtgcagacaagtcagatgtcacatcctctcagtcaacacaaattctgaggccaaacctgactgcaggacatggacatatctccgcctgcggagaggtacagacagttgcatagtcataagcaggaatatagaatcttcttgcaggaaaggaagtgaatagttgggaacaataatatgatcccccaggcagctgaatccctgagtgaatagaggctgtgtagcaaacccaggtggaagggaaatggctgtgctttagtcaggggtaggttgaggtggccttctggtacagcatgaatcagcaggtttggagcactggtgcacagccccgcatgttatgtaaccatgctacgtgaggcgcattaggtgattacccatgtgagctcgtgcttggctcagagccgctattgtctgtaaaatatctaactacactgctaacgctgtacatacagctcac

SEQ ID NO: 247227 - DNA, 268 bp, Homo sapiens
tcaggtattttttgtgaagctagacaagttaattagaaagtttatttggaaaaacaagccaccaacgacagccaggaaaatcctagaagcaagaacagtggggaaagggtgccctagcactaccatacattaaaacatattataaaatctctgttagtaaaatacttttgtattagttcatgaacaaagcatgccacaaaatgcacagacaaaactgcatatgaatatttagtatacaattaaggcaacatctcaaatcagcagagga

SEQ ID NO: 247228 - DNA, 724 bp, Homo sapiens
tctctactaaacatacaaaaattagctgggtatggggtcacacccttataatcccagctactcagaaggctgaggcaggaggatcgctggagcctgggaagtggaggctgcagtgagctgagattgcaccattgcactccagcctcggtgacccaccttaaataaataaatacaatttttaaatgatagcatatatatatatacacacacatatacatacacaccaaataggtacatcgatgagagaacactatatttacaaaagtgcaagggaaatttgaatataagacttcagatgctggttacggtacctgaggtaggagggggaaacaggctggagtatacactacagaaatagacatgctttatcaattgtctgatttccctggagcatgttgacttcacgttgatttttttttacatgttctgttaaaaaaatttctttaaattggcctttggaaatttaccagcagtgtgctggtaaagtcttgacaatcagctctctgaaaaaaaaagcaaaaagaaaaacaaaaaacaaccccgacgtgtagcatttgccgatttctctggtgtaaatactcacagcatggctttgacatgagttttacatttggtaaaagcaaattgtgcctactttgaatagaaggattgggacagagatatggttcttgtcaggcactaattagggagtaaggcttgtctaatattgccttggctctcaagc

SEQ ID NO: 247229 - DNA, 319 bp, Homo sapiens
  misc_feature (283)..(283): n is a, c, g, or t
  misc_feature (314)..(314): n is a, c, g, or t
aacaaaaaaacacacaaatgaaaatgcaatcatagagtgcaatgttatctttcatagaatttgaatactttaaaaattttaaaactcttataacttaatcataaaaagacaactcattaataatgagcaagagacttgaacagatagtttacaaaaaaagagtgtataaaaatacgcaaatggcaagcatgaaaagatgtttaatgtcattatccatcaggaaaactcaaggtaaaaccagcgtgagccaccatgtcctgatctcatactttcaacttccagnactgtgagaaaataaatctctgttgttgaanccaaa

SEQ ID NO: 247230 - DNA, 2032 bp, Homo sapiens
gagaggattcagagctaagtctccgggctcctttcacatctgcaggagcagccagcctgggaccgcgcggcgcggggcgcgctctcgcctctcctgcaccctcagccggcgcgcttctcttatgggcgtctgctgcagtctggctgcggtcgaactgaaagcggcggcgggagaccaaacttagaccccgctgtggactagagaactcagagaaggcagagggagagggagagagagagagagaagggacccgaggaggaggcttccatcacgtcattgcaggatgttctggaagctttccctgtccttgttcctggtggcggtgctggtgaaggtggcggaagcccggaagaaccggccggcgggcgccatcccctcgccttacaaggacggcagcagcaacaactcggagagatggcagcaccagatcaaggaggtgctggcctccagccaggaggccctggtggtcaccgagcgcaagtacctcaagagtgactggtgcaagacgcagccgctgcggcagacggtgagcgaggagggctgccggagccgcaccatcctcaaccgcttctgctacggccagtgcaactccttctacatcccgcggcacgtgaagaaggaggaggagtccttccagtcctgcgccttctgcaagccccagcgcgtcacctccgtcctcgtggagctcgagtgccccggcctggacccacccttccgactcaagaaaatccagaaggtgaagcagtgccggtgcatgtccgtgaacctgagcgactcggacaagcagtgagcgccgggccggacgcagctcagccccgcgcgcgcccggccgctgggtggcgccgccgccgcctctgtccctgccctccgagcccactgtcacgctgcctggtgttccccctcagcagcaagcacttctcttagggctgacggtgtccttgtcacagacgtggatcgcaagtggagcttttgctgatgtgttcctgaccgaccccgggtcccacctgtgccccctaaaccaggcggtggatcaggcccgaaggaaaatgctggaaaaccaccaccgccacccagcagtcagagaggacctttcgaggtgatgcactgtaaatccggcattgatgtttccaccatgtggaaaagcaaggatttccctggccccgccctgcactccagctcgcccctttcccgcgcgaagtgaaggatgcgtcacttttctgagcggcccctcagacctctcctgctggtccctggacctctggctgggagcgctcattcttgtgactggcaggctgccctcggtcgctgctgtgatgaggatatgtgcaacctccataaatatgtcggtggacggggcgtctcctaataaacctgataccaagaagacaacttgagccacttggatcccgaagtgggcttcccgggaaacctcgagcagagcaggctacacaatcccccatcctcaagtccccaccgcctcttcttcctcactgtccccgccccctatttgtggactaaagatgaactctggtgtgcatgctattattgctgcaattagaatattatcacacacaaaggtctctatattaacgctggttttataagtgaccgtatattgtaaagagctgttaaaaagtattatagacctattcatgtattatttcacatgttttgactctggcttgcagcaccattcggagtaaggatgacagcaggcccagaaggtgttttactcagaaaaaaaaatgcctggtcagcaattcactgtcatgcacctatttttagattgggcagggagatgggaggagtcgtgatttttactttgaatactatttcactgacgttactaagcattgcagcacaatgtagaaattggcttgggatggataggtatagggaagggcattcgttgggaaattgatgaccggaaactagaaagcccctataatgtggaatatgcatatgtggggtgaaaccgtatactactttcactgccatgacactaggcaaaaaatatttcctgttaaaagaa

SEQ ID NO: 247231 - DNA, 391 bp, Homo sapiens
ttctttttttagtctgttctttctttatctctcaatttttcaacaatgaagttttttcatcagaaaaatacatatctttacattttagcatgctttcatacattttataaaaatcacaaatatgtaaaagaaagaccaacttcaaagaaaataccctcaaatgcttcaatctgcttttctacatttccaaatttctacagtgaataggttacttctgtcaagagaaagaaagacactttgtataaaagttgcaatatccactcactcttttaaccttaaacctaagctaatttgcatctgattttcttagaactcctgaagcttttatctcttatattagactgaatagtaggtactttagatttttacttctatcttgagtctaatacac

SEQ ID NO: 247232 - DNA, 430 bp, Homo sapiens
tacaattctgagaatgtaactataagtgttcctgatgaggccaagaaaagtacctaagaaaccaatgtggttttgtagggagatacagagataattagaaaatcggaaactggtcagtaaccagattcgaaggaaatgattaatgaatctgttgtgaggctgtatcctggatgcacatttgagtcaatcaatgatctgaatgaagatccaaactgcaaatataaaaagtaatgagattgaatgaatatttaacagagtaagatataggctgaatttaacaagacaaagtcaaagttacctatgaggcccaaagttgtccatgagcaattggataaaagagaggcatagggacaagacaggtggagttaatgctattcttttttttttttttttgagacagagtcttgctctgtcacccagactggagtgc

SEQ ID NO: 247233 - DNA, 547 bp, Homo sapiens
caggagaggacattcagaataatgctggggaagggaagttccagaacagctgtgtagcaggcctcaagaagaaacaatccagtctgcagtaggagaggtacagggctccatggggaaggaaaacaaaataatagatggatcatcagatacatatgaatatgtggaaaactgtatcaagaggctgttagagaataggggaagaagtaatcttagaaacaaagaagctaaacatgaaaatacaagaggacagaggactgcactgaagcatctagtcatgaaaaaaaatgagctgataggttcctgatgtgtttgactgtattgagaggagtgttatgtgagaatttggggaatgaaattgagatgaagaaagataagcaattattaaatcctggaaaaacagaaagttgtgtaagaaaggaaatgtaatcattgcacaccatatgactcagcggcaaataatattctatattaaaaataatgtaaagaataatataaatttaaacaaaaatggaaatataactatattgggaagattagtgcaggaaaa

SEQ ID NO: 247234 - DNA, 584 bp, Homo sapiens
cactatttagcccacaacattaaggaatgggaattcctgaccaaggacactgaaggtggtctatcctgtgtttcatttcttctcctttggtccctggccatcccttcccagttctgtctttttattgctggcttatagcagttgtttctgtatcctatgtatcctttgacagatgcaggccaatatttgcaaatatttttctcctagtcatggtttgcctgttttcctaatgtttaacaaactgagttaatctttaattttgatgaaattcaatttatcattttttacttgaaaagtaattgagttctctaagacaattttgcctaatgctaagttacaaaggatatctgtacattttaaacctagatttttttagttcttctgaaacaaaactttaaaagaagacagcgagcaagcgagagacaatcagaatgtaaagagaaaacaatgtaacacaaaggaatgtagctcttatgatcctttgtacttgtatgttatcagttgtcgtgtctcctctcatttctgattttgagtcttctctgtatttttcttagttattttagctaaagtttggaattgtatca

SEQ ID NO: 247235 - DNA, 337 bp, Homo sapiens
tgacagagcgatgcaggatctccctggaatcagatgtgagcctctttttcttacgcagctttccccttggagatcttttcatttcttatgcattctgctcccacctccatggttggtttctatttcagacctgaatccacatcagatcacatctttcttcttgactgttctatcacaacttacacctaatgtgactacaatcaagctcaagacaattctccccaaaccaggtctcaccctaaaactccccttgcttatcagtggcaccatgttcaaaaggcttacaaccttgaactactgttttttttcttttgtttccacatccactcccttacca

SEQ ID NO: 247236 - DNA, 299 bp, Homo sapiens
cagaacatcactttctcattaccttttcccttaaagagtatctgcatcatgtggaatgtataaccagttcaactggtattttaatgcaaaaattcttaacttggtctgtctggtatgagtgtgtctgcctaaagatcataactgagatgatcatctgatactacttttgtgatatgaaccctccatttaatttctatttgaacattacaggagacttgagtttttacaatgtttagttgatgaattggtattgttatatggttgaattacaataaattaagtttctgcttgaacaatca

SEQ ID NO: 247237 - DNA, 833 bp, Homo sapiens
cagtgttgtgaagggagcagaagaggagaaacctaatctccgaacccaacaacacctagcaacagtagaaaaaacttttaaacaaaagtctgggtgggagatatacaacaacttccaatttctgctgatcgggatttcagggagaagaagctgctttccctcctctctactctgtttcctgcatgacttcagctattggctggtcctgggaaagaaagtgggaaaagctttttcctctgtattcttttgggctggatagtttttgagaactcgaatctgtcttgggctgtgagacaagccactgggttcttcaaaggataaactacctacatagaggacatacctttggttaaaggagctgccgtcaggtaagaccaaaataaataaatacttactctcttaagaaatatctgtttccacaagaagagagttctctcccattctgttttgtctgtttcctttgattcttcctgttctatgatgtgataacacatttagaagttacgataaccattgtgaattatttttaaaaagtcagaaacatcatctcttcctcaaaattataccaattcctttttaaacacataattttatggtgttttagtagacatcaaaatatttctcccaagttagtgctcttcggcaggtaacagaactatgacaaaggacaatttcacatctcctttcacaattgggatggctaagcaatgaaaaggatatctcccctagaagtaaaataactttcatttactgaaactagctaagcagcttgtgtttggtaaatgagaggaaagtcccgcatggtgtttgtattgctgtactttttaaacctg

SEQ ID NO: 247238 - DNA, 481 bp, Homo sapiens
cagtgttgtgaagggagcagaagaggagaaacctaatctccgaacccaacaacacctagcaacagtagaaaaaacttttaaacaaaagtctgggtgggagatatacaacaacttccaatttctgctgatcgggatttcagggagaagaagctgctttccctcctctctactctgtttcctgcatgacttcagctattggctggtcctgggaaagaaagtgggaaaagctttttcctctgtattcttttgggctggatagtttttgagaactcgaatctgtcttgggctgtgagacaagccactgggttcttcaaaggataaactacctacatagaggacatacctttggttaaaggagctgccgtcaggtgggaatgagatctcgaaaccaaggtggtgaaagtgcatctgatgggcatatctcctgtcccaagccctccatcatcggcaatgctggtgaaaaaagtctctcagaagatgc

SEQ ID NO: 247239 - DNA, 303 bp, Homo sapiens
aggttaaaatcttactttcattttttctgaagaccatcaaaggggtttcctgaaaattttaatgacatgttaatttgatttttccttattggcgatgtggtaaagctgctataagtttctaagtatttaggcaaaaataattttgatggtggtaaagaacatcttatctttttttatgtatgtgttgtaggtgggaatgagatctcgaaaccaaggtggtgaaagtgcatctgatgggcatatctcctgtcccaagccctccatcatcggcaatgctggtgaaaaaagtctctcagaagatgc

SEQ ID NO: 247240 - DNA, 270 bp, Homo sapiens
agccctgcagagttttggaccaggatgggccatatcagagtagtgtttttggaagggctgccttgtcatgttcagcaggaagggggaaggaagagagatgctgagatgctggaggcaggaaccctattgttttgttttgttcttgagactagtcaagcgcggtagtgagaaacagggaagagtagaacaaggacttccatctgtaactgacgtgagcaatccattgagataactcactacttttagcccagccaagggaactctgtttaa

SEQ ID NO: 247241 - DNA, 265 bp, Homo sapiens
tgtatcaagatactgaagaatcttaattagtaatcaggaggtagcacaagcagcagtcccccaaacctgggtcccatctgactcctggggctagctgaatgaccctggctacttggccgcattatgcatcactttcttcatctttctccatgggaataacaatagttattgtctcacaaagacatgtctcacaaagacatggggaaatgtaattcagataggtatataaaacaataatattgaacctggcacataatataactca

SEQ ID NO: 247242 - DNA, 375 bp, Homo sapiens
ttcccggaccctatccggagtttaaactacacgctcccagctgtgggatagtaaagagaacgcagcggtgaggggattcggaaaatcggttcatccagttgacaactaaaagctaaaaaaactccaaggctccgggctaggtctataataatgacctctctaatgttccctttccaagggaactctactcgtcatctgtagtgggtggtttgtgtttttgttttttaatcctctaaagtgtatggcaacattttggaaactgtcagctcatttgagccttggcaactatattgtagaaaatgtaagaagacaaataagaggacgtttttacatgcatttcttacgttcttaaattaatttccccaaaaaacgatg

SEQ ID NO: 247243 - DNA, 414 bp, Homo sapiens
agatgtttcaagatagtggttttcagaaaaactggtcttggaactcatttttcaagattcatcctcaagtagtaaatcctgtgcaacagccaggacacaggtataatcacttattttaatactgggatactattagcttagttttttttacttttttagaaactgagctacaattcccatattgtaaaattcatcattttaaaatgtactattcagtgtttgttagtatatttataaggttgtgaaactattagcactaattccagaacgtttttatcaccccagaaagaaatcttttatctgttagcactcagcattatagattttattttttaaaatatttaagtacgtttcaaaacatcatgttaaatatgtcatgttatacgtgataaatgtatacacttttagtttgcc

SEQ ID NO: 247244 - DNA, 343 bp, Homo sapiens
caaggttatttgactttctagaggggtgtgattttgtttgacatgctattattctgttagggcccagactctgggaaggtggataatgctgagtagaatatcagtaagttgcaaatgatttctgccctatagtagagacagctccaaaaattacagttttattgccctatttattaccaggcgttaatctaactgcaatcttattccagtagacttccttttcctgaaatggacatacagaaaaatgtacatatataactcagtccactgtatcctcctttgaactagttttacctgcttgttttctcatgaatgagttacataaatctttgacatatatttt

SEQ ID NO: 247245 - DNA, 299 bp, Homo sapiens
tgattcttccactctgctagtatttcttgaactggcacagttctagatgctgaggatacattagtgaacaaaacagacaagaatccctgtttttgtggtgcttacgctctagtggaagatagaggaggcaaagatttaacaataaacataataaataaggaaagtataaggtgtgttaagtggttaagagaaaaatatagcaaggtaaagaggaaggacggtgctgggggagaggtttctattttacatggagtggtcactgtcacctcattaagaacgtaatatttaaacaaagtctt

SEQ ID NO: 247246 - DNA, 325 bp, Homo sapiens
ggaaagatgggaactcagacttaatttaactccttgcttttccccgatgcagacaccgaaaccttgcgactgagcatcaacaggtgccttcctcctgcaaggaaactttcagaaaatcttcaaggtaaaccaactatcattctaccagaatcaaggacaccggtttccaaaattctaatccaaaagggggagtgggactgggggaagatcatcaacaaggcaatccttcacctactcctactcctcaaagcagcatcagatgagaagccgggtgaggcatgttaaccgagaagccctcctccaattaatgtgctattgctccttt

SEQ ID NO: 247247 - DNA, 450 bp, Homo sapiens
tgctgctacaagaaccttctaattgttctgcccatcctccacctctcctgcctctaatccatcatacatactcctgctgggttaattttcctgaccacatcattcccttactcaaaactcttcagtggctccctatgatacagtgtaacacttgactcttcatagcccacttccaaactacttttgtaaagctttaagatgcattccaaaattatgaaagaaacacatgttcacctcaaccaggaaaacactcaaagatatacaaagaaaaacatcagtgatcttcctcacctcctctgcatttcccacccagtctcccaagacatccattgttaaggacctggggtataacttctacctctttcaccatgctccatgctcataataaactatattcatatatgtggagctattgtgttattgcctatttatacaaaaaggattatatta

SEQ ID NO: 247248 - DNA, 1171 bp, Homo sapiens
ggaagctgtaaaaatataagcccaagtattttgtgtcatctgcatatgtcaggatgaagaccaggcatgtaagaaatatcctaaagtagccaagtgataatctcatgaaaaaatatgagaatcgtttttacagagtgagttctcttttgaatggttttgactatgcttttaaaaacatttttaaaatgtacttacatctttttcgatagcccacgtatttcagaatatcctcttgatagaataatatcactcagtgtgatttttagaaaaagaaaaactcggtggtctcatatcttttgacagttgtttgtgaataataccctccccaacaaccttcccagtactcaactgctatgtaagaatgctttcttatgtggtaaatgtctcagtattttgctgcctggtatttgttcagtttccttgtatatctcagggtcagaaggaatcaggctttctcccaactctgaaacattcagacttactttctttttggtcagccttttaacaagcaagacaataaactccttttgtcagaatcgatttgattaaaaaaaaaaaaaaagaatgtgctccttatttctcattgctgtagaatacttaggaatacacatctactaatcacaattaaaaaataagagaatctttagaaacatcattgctttctggaggtagaaattttgaacttgaaggttgtagttccaggcaattttgtgcccttgaggtgtccaattgatagtatagcttgcctctgctaataaatacacaaaagttttctttcctgtgattttcagaaattatttttggaatacaaagattaataaggaatatgtgatgtttatctcctgcatttcaaaatcttctggattttttttgaggcatgaggagcaggtaatgagattttttttctgaatatcttgattctctcccttaacccagattttgcatattatgcattgctcatttgtcacctacaaaaataaaggttaatgattatttgtttgcttttgtctatataagctccctaaggcacagaccatgttcgtttttcttatgttcctcttagcactgtgcctggtgccttgccatataaaaggtaccctataaatatttgttggctgagtaatcagagagcccatttcaaaatctaaattatacaaatcatcaaagacca

SEQ ID NO: 247249 - DNA, 443 bp, Homo sapiens
gtgatgaaactttgtatttcaaaaaatggatccccttcattctctccttgtttctatgtctgctgtcctgaagccagatgtgttaccatgatgtctttatactaatatactaacacagcagttctcaaagcactgttcatggacactttgagctccctgagactcttccagggggaggccaaatctattctcatactttcccttttcactgtgttgacatttgcagtgatagtgcagaagcaacgataggcaaaactgctgacaccttaggacaaatggcagtaccagcaattgcactagtagacatcttattcttcgtcttcatgactggcagaaaacaaacaaacataaaaagaatttgacttaagaatgaccttgatgaagcagcaacatgatttattaaatctttatccttcagtacaagtctttttaatattgtgtgt

SEQ ID NO: 247250 - DNA, 759 bp, Homo sapiens
actattccctcacaaaccggggctttggggaagccatgtcctacttcaggactccacaaactcatccaggtcctctgccttccggccaaggtggggctgcttctccaggcttgtcccttggcctctgtagtcctgtagagccagtggtggtggcctctggtggaacaggcccactgagccagaaagctgagcaggtggcacctgctgcccaggcctggggcccagccctggcaatgccacaagccaggggctgccctggggggactagctgggagacactacggaaggaatacagccgaaactgccacaaattcccgcatgtgaggcagctggagagcttgggctgggacaatggctactccagaagcagagcccctgacctgggtggccccagcaggcctaggcccctgatgctgtgtgggctgtcaccacgggttctaccggtaccctctgaggcagtggggaaggaggccagctcccagcctgatatctgcatcctcaccctcgccatgatgatcgctggcatccccaccgtgcccgtcccaggagttcgggaagaggacctgatctgggccgctcaagctttcatgatggcccatccggagccagagggtgctgtggagggggcgcggtgggagcaggcacatgcccacacagcctctgggaagatgcccctagtgagatctaaaaggggccagcctcctggctcctgcttgtagatggatgaaatagcaccagatatgtagggtggaaaaaccg

SEQ ID NO: 247251 - DNA, 595 bp, Homo sapiens
gtcatggcgacaaagtgagactctgtctcaaaaaaagaaaaagaaaaataccaatactgggtctgacccgaagtcttactctacaaggcacgaagcacttggctcctgtgtttccatctctggtcatctgcttccatacaaatgatctcatttcatcctcaaaactcctaatgaggtagtgggcagtcatcagacacactttacagataaggatatcaaggaacaaaactatctgggtgactcgttcaaggttagggcaagaacctagaacacccagctcctggtctggtgctcttttaacctcatcctattgtcatgtccaggttctagaatgaataggtcaacgctgtaaagtggattccaagtgtgaaggggagggtctatgaggtgacattctagaagggtgaagaagggaggacaggcggcagatcactattccctcacaaaccggggctttggggaagccatgtcctacttcaggactccacaaactcatccaggtcctctgccttccggccaaggtgagcggggggcacctgcaattggagggagtgcggcagcttcccctgagaagttgctttctggctctggggag

SEQ ID NO: 247252 - DNA, 454 bp, Homo sapiens
caggctggagtgccatggtgcagtcatggctaactgcaacctcgaactgccaggctcaagcgatcccccttatctcagcctcccaagtaactgggactacaggtgcacaccaccacacctgggtggtttatgttttagagatggagtctgactgtgtttcccaggctggtcttgaactcctggattcagcaatcctcctgtttcagcctcccagagtgctgtgattacaggcatgagccactgagctggcctgtatatattttttcacatacttgcaattattatgtatatgattagacttttttcattagattatgtgtttttatgttattgtaagctatttgtagacacagttttattgatgatacagttttctataaaatggatattatataatcgacttagttaatttcctgtggttttaaatttagatttcttccattcattaaccaaa

SEQ ID NO: 247253 - DNA, 489 bp, Homo sapiens
agctttagttactataaaacatgtttaagcattttccatttgaaataaaattttaatttcatgctttgtcagtttagtttccctaaataaatagaaaatagtaaaatatcgcatactaaaaaaatcaacttctttggtaataaatcagttcaactgtcagaccaaaacatagttacattttacccaatgtcatgctgaccaatttgatcaaatgccacttccttataactaagagagatgcaaagatgtagactttatgttgagtgagacaggtaaggattactaggagttagataattgttttattaatcaaggtcgattttaattactattttgtctctatgttaattaatggtcttgattcaagaaaatttttttaaaaactcgtcttctcagtcaggcaaaatattaacaaaaaggcatagaaatgaaggcatttaacacagtcatagtttacattttaaaattaaagtacttctagaaataaca

SEQ ID NO: 247254 - DNA, 200 bp, Homo sapiens
cgtcctggttctggctggaggcagtggacacgtggctcatggcctcacaactcccgtacggaagtcgaccccgtgtctgacccatttctttacaaagttgacattctttgtgatcctattttatgtcattcgaaaatgttaatgttggaaacagatgatataaacaggttgtctaggaagctagaagagacaaaaataat

SEQ ID NO: 247255 - DNA, 435 bp, Homo sapiens
gtaactatttgggttgtgtagatttttgtggtttgcttttgctgttgcatgcgtgttgtcgtgaacatctcctgtaagtgtgccagaatttctccaggagtaaaaatgctgagccatcggttgtgcacatgtttaactttccaaagtggaccaccttccaccactgggtgagttcattttgcatccttgacagtacttaattttgtcaggcttattaattcttgccaatttagtgggctttaggcatgaactgtagttatgatttatctccagtctttttgttcatttttaccagttcacagggattcttcacatattccggataccagttcttgttggtttaatgtttgcagatatcttctcccatcaagaccaatgtggtttgtcttttcccatttttggtggtactttttgataaataaaaaactaacttta

SEQ ID NO: 247256 - DNA, 452 bp, Homo sapiens
atttaactttgcctccagcagctcaccataaaatttgggtccaaaaaggccaaggaatgtattatcagaaatgttagctatctctaggaaaatctgtcattcatttaagtgataatctttaaaattagcataactatattctggatcattttattacgagactatcatgtgatttcaatgtctgagtttattaccattgtacgagcaacatgctaagttacaactgtaactcccagggttggtttagcaggaaagtgatggaggcagacttaacagtgatgcgtgtagttcagcaaaggccaaatgacagcactgggagccataatggtggtttcctagtaattcaaacagaggaaagtagcaagaatacactgatctcagaataccaggcttgtcagactaaaaaatcctgtgctttaacagtcagtggttgacagcaacttatcctaagc

SEQ ID NO: 247257 - DNA, 766 bp, Homo sapiens
attcatatgttttaaattgcctgccttcctgagtagtgtgatgaaatctcacgttgtcctgctttgtccctcctgagacattaatcattcctttgtcgagtatctctaagctgtctatgggccccatccttccgtcacttagtggccgtctccattatctgatgaactgtcaaggtattgcagtgcttgtgttcaaggaacccttatttgacttaataatggccccaaagtacaagaatagtgatgctggcacattgttataatttttctattttatcacttgttactgttgttaatctcttaaggtgcctaatttataaatttacctttatcataggtatatatgtataggagaaacaccatggtatatataggattcaattctacctgcagttttggcatttgctgggagtcttggaacacagtccctgtgaatcgagggggaatgcctgtgtatatataattaataaaatagagatctagcaaatatcaaacaagtataaaagtactaaactttttgaaactgagcaagttaataattgttatgatttagttaaatatattttcatacctcatcaaatctcctataaaacaattgatttctgtataatacttaggaatttttaaaaagtaagagcgggctgggcacagtggctcatacctgtaatcccgtccagcattttgggaggcagaggtgtgagggtcacttgagcctaggagtttgagaccagcctaggcaacatagagagaccactgtcactacaca

SEQ ID NO: 247258 - DNA, 365 bp, Homo sapiens
ttccccaaaatgtaaaaatatctggggtgccaatgaaatggaaattctggtatgttgatgtcactgttgagaaagtaagtaactttgatttgatgactgaggaacaggtcctttttaaagtcagggagtcttaacagttctcagcatttagaaaattgaaggaggacctacttgaattgttagctgacaggtaatttaaaaagtttttttaatttttttttatgagatcagtatatgaattttggtctgtaattttgaagagcgtttgaagaatagagtggcaaagctatcacaaaaccgcttttgttcccaactatctatttgtattagcaagatttcttaatgcttctgtctccaaaaaggaa

SEQ ID NO: 247259 - DNA, 347 bp, Homo sapiens
tctgacaactttttgcttggacaaatggtggatgggaacacaggtgcaagagcactcatctgcaagtaaaggtgagattggcaatgcttgtttgccaacttgctggtttttatatagagtacatatttttcttcatgatcaagttaagtgtatactagagcagtggttcttaattggtgacatgtggaattttgtatggaatgcagggttttcataacttacttatcttggatccccagcgtacctacgagtatgacatgcaggctctgtttcatctttcctggattattcatctctagtatttattactggctttagtatttctgttgctttcggcagcttccacc

SEQ ID NO: 247260 - DNA, 390 bp, Homo sapiens
ggtagacagtgctgctcccagaccccagctgagaggagatggaactgcgtcactggctgcttcaccatccacagcctggactgagctgggtgggcctgctactggaagtacaggtgggcatggctcttcccacatccctggcttggcagatggtgccagttgcaggatcaagctctgcccaccattgagcagcccaggcatcatggagcctcagtactcttccttcgggccacatggcgcactccttggctagaccattcgtcaaccgcacccgaggttttctaaagttcctagattgagaccagaccttctcaaggatcttccaatcttatctgcccccatttcaggggctctcttgcataaatcaagtaataaataatgtgcaaccag

SEQ ID NO: 247261 - DNA, 957 bp, Homo sapiens
agacgctgcgcgcgggccacgcgcggcggcggaggctgcgcgcgggccacgcgcggcggcgacttgggctgggcggtcgccctgccccaccgcccttcggcgctcgcaggtccgctcccctcccaaaccgcagagcggcaggcgcggccgctggttcgagagctcggccggggcagcgcagccgccggctgcccctcgctcccaggcgccacaaccccgcgccctcgccgctgctgcgtcccgcgagacctgtggggaggccgggagtcacttcgggttccctttcagcccacgtggtcctgggacactccacccaggaacctagtcggcaccgcgcagggaatcccagcagcggggttctggccccagcacgcgttgcggcagcctggcgagcgtccttgcggcctccaagtgccggtggggtgcgtgcgcagggggcagaaaaatcatgtcttcttccagagtggggctccgtttggctgcctgtttactaaacgtttcagaagccggaagaaaatacattgttgagaacatagcaaaagcagctcttcttgacaaaaatggaaagaaacatcctcaagtttcagtgctcaatatattttccgatcaagactacaagagatcagtcattacaatagcaacttctgttgataagttggtggacaagcgcaaccaagcctaaaggcaagtgctgttgcgaggtcgacatccaggaaccagaggagggcagagcaatccacagaatggatctggggtgactcatggaggaaaaccaacacacagtaccatttaattctttttaaaaagatggaaaattataccatacccagaattactaaattctaaatagagggtatattgcatttacatttgtaaaagaatgtttccccatgtatcttttaaaaattcattttaaagatatacaataaaaagtgtttaactctgtttttcaaaaat

SEQ ID NO: 247262 - DNA, 679 bp, Homo sapiens
agacgctgcgcgcgggccacgcgcggcggcggaggctgcgcgcgggccacgcgcggcggcgacttgggctgggcggtcgccctgccccaccgcccttcggcgctcgcaggtccgctcccctcccaaaccgcagagcggcaggcgcggccgctggttcgagagctcggccggggcagcgcagccgccggctgcccctcgctcccaggcgccacaaccccgcgccctcgccgctgctgcgtcccgcgagacctgtggggaggccgggagtcacttcgggttccctttcagcccacgtggtcctgggacactccacccaggaacctagtcggcaccgcgcagggaatcccagcagcggggttctggccccagcacgcgttgcggcagcctggcgagcgtccttgcggcctccaagtgccggtggggtgcgtgcgcagggggcaggaaagaaacatcctcaagtttcagtgctcaatatattttccgatcaagactacaagagatcagtcattacaatagcaacttctgttgataagttgggaataagactaaacatcagacatctatcttgaaccgtgaggaagaagccactcactgaggatgatggagccacactcaaaaggaccaagacagaaggacgatggagtcattataccagctccggactgctgagctccagatt

SEQ ID NO: 247263 - DNA, 365 bp, Homo sapiens
agctcggtaccccgagcgggtgggaaaaatcatgtcttcttccagagtggggctccgtttggctgcctgtttactaaacgtttcagaagccggaagaaaatacattgttgagaacatagcaaaagcagctcttcttgacaaaaatggaaagaaacatcctcaagtttcagtgctcaatatattttccgatcaagactacaagagatcagtcattacaatagcaacttctgttgataagttggagacggagtctcaccatgttgcccaggctggtctccaactcctgagctcaagaaatctacctgcttgggcctcccaaagtgctgagattagaggcgtgagccactacccccagcagggaccca

SEQ ID NO: 247264 - DNA, 1143 bp, Homo sapiens
agacgctgcgcgcgggccacgcgcggcggcggaggctgcgcgcgggccacgcgcggcggcgacttgggctgggcggtcgccctgccccaccgcccttcggcgctcgcaggtccgctcccctcccaaaccgcagagcggcaggcgcggccgctggttcgagagctcggccggggcagcgcagccgccggctgcccctcgctcccaggcgccacaaccccgcgccctcgccgctgctgcgtcccgcgagacctgtggggaggccgggagtcacttcgggttccctttcagcccacgtggtcctgggacactccacccaggaacctagtcggcaccgcgcagggaatcccagcagcggggttctggccccagcacgcgttgcggcagcctggcgagcgtccttgcggcctccaagtgccggtggggtgcgtgcgcagggggcagaaaaatcatgtcttcttccagagtggggctccgtttggctgcctgtttactaaacgtttcagaagccggaagaaaatacattgttgagaacatagcaaaagcagctcttcttgacaaaaatggaaagaaacatcctcaagtttcagtgctcaatatattttccgatcaagactacaagagatcagtcattacaatagcaacttctgttgataagttgggccttgctgaggatctggtgctgcatgttcctggctgcagcgtgtttctctttggcgaagctgacctgcctgagaagcgcagtcttgtgcagagaaggaagcagctgggctggttcacgaggagggatttcagtgctcttcagcctgacctgggagctgccccttcccaaagatgtggtttaacagtggacaagcgcaaccaagcctaaaggcaagtgctgttgcgaggtcgacatccaggaaccagaggagggcagagcaatccacagaatggatctggggtgactcatggaggaaaaccaacacacagtaccatttaattctttttaaaaagatggaaaattataccatacccagaattactaaattctaaatagagggtatattgcatttacatttgtaaaagaatgtttccccatgtatcttttaaaaattcattttaaagatatacaataaaaagtgtttaactctgtttttcaaaaat

SEQ ID NO: 247265 - DNA, 1058 bp, Homo sapiens
agacgctgcgcgcgggccacgcgcggcggcggaggctgcgcgcgggccacgcgcggcggcgacttgggctgggcggtcgccctgccccaccgcccttcggcgctcgcaggtccgctcccctcccaaaccgcagagcggcaggcgcggccgctggttcgagagctcggccggggcagcgcagccgccggctgcccctcgctcccaggcgccacaaccccgcgccctcgccgctgctgcgtcccgcgagacctgtggggaggccgggagtcacttcgggttccctttcagcccacgtggtcctgggacactccacccaggaacctagtcggcaccgcgcagggaatcccagcagcggggttctggccccagcacgcgttgcggcagcctggcgagcgtccttgcggcctccaagtgccggtggggtgcgtgcgcagggggcagaaaaatcatgtcttcttccagagtggggctccgtttggctgcctgtttactaaacgtttcagaagccggaagaaaatacattgttgagaacatagcaaaagcagctcttcttgacaaaaatggaaagaaacatcctcaagtttcagtgctcaatatattttccgatcaagactacaagagatcagtcattacaatagcaacttctgttgataagttgggccttgctgaggatctggtgctgcatgttcctggctgcagcgtgtttctctttggcgaagctgacctgcctgagaagcgcagtcttgtgcagagaaggaagcagctgggctggttcacgaggagggatttcagtgctcttcagcctgacctgggagctgccccttcccaaagatgtggtttaacagcttgcttcagggcgttgtgacagttgtgttggaagaaaattggaatttcagccttgcagtgaggggatccgtgctgccaccagagcagctgagtgccaatctgcgggaggcgggagtggagcgaaactgcaaactgagaaacaaactttcacatcaggtttctaattttagagcaaaaagtggaattactttaattatatgacatttaactag

SEQ ID NO: 247266 - DNA, 1110 bp, Homo sapiens
agacgctgcgcgcgggccacgcgcggcggcggaggctgcgcgcgggccacgcgcggcggcgacttgggctgggcggtcgccctgccccaccgcccttcggcgctcgcaggtccgctcccctcccaaaccgcagagcggcaggcgcggccgctggttcgagagctcggccggggcagcgcagccgccggctgcccctcgctcccaggcgccacaaccccgcgccctcgccgctgctgcgtcccgcgagacctgtggggaggccgggagtcacttcgggttccctttcagcccacgtggtcctgggacactccacccaggaacctagtcggcaccgcgcagggaatcccagcagcggggttctggccccagcacgcgttgcggcagcctggcgagcgtccttgcggcctccaagtgccggtggggtgcgtgcgcagggggcagaaaaatcatgtcttcttccagagtggggctccgtttggctgcctgtttactaaacgtttcagaagccggaagaaaatacattgttgagaacatagcaaaagcagctcttcttgacaaaaatggaaagaaacatcctcaagtttcagtgctcaatatattttccgatcaagactacaagagatcagtcattacaatagcaacttctgttgataagttgggcagttctgttctggctgcctgcctagaggccttccaggctatcgatatggaagttcaagagggaatccacccttgcctgggagcagtggacttgattccgatttaccctctctctggtgtcacagtggaatagtgtggagtggtggccagaatggacaagcgcaaccaagcctaaaggcaagtgctgttgcgaggtcgacatccaggaaccagaggagggcagagcaatccacagaatggatctggggtgactcatggaggaaaaccaacacacagtaccatttaattctttttaaaaagatggaaaattataccatacccagaattactaaattctaaatagagggtatattgcatttacatttgtaaaagaatgtttccccatgtatcttttaaaaattcattttaaagatatacaataaaaagtgtttaactctgtttttcaaaaat

SEQ ID NO: 247267 - DNA, 741 bp, Homo sapiens
gccttgctgaggatctggtgctgcatgttcctggctgcagcgtgtttctctttggcgaagctgacctgcctgagaagcgcagtcttgtgcagagaaggaagcagctgggctggttcacgaggagggatttcagtgctcttcagcctgacctgggagctgccccttcccaaagatgtggtttaacaggttctgagcatggtttttgctttgctctgttttttttttttttttaaacttgaggtcccctttatgagccacaccctgttaatgcaggaagagttataggggtggctgcttcttgaaatgggtgaggctctcctttctgctgttactctcacccaggcccttttaagctaacctgtgagcctagaagctcccgtcaagtatttgatgagggcccccagaagtgatattcaagatatatcattagccctgcaacgtgatcactgatgaaaagaatgctcgtagctcctggcactggggcagggtcctggaggcccctgtctgtgaatggtgtggggtgtgtcctagggtgtgatggagacacctggagagggaggacttagggagagatcacttctagctggtaggaaggtctttcaatacttaaacatcagtgtagccaagttggtgcttacagctggaaatcagttctagaggaaccctggaaaaaagctgttctagataacggacttctagaatgcagagaccaaagactggaaaaagaaactattccttccc

SEQ ID NO: 247268 - DNA, 452 bp, Homo sapiens
ggatcttgattcgaacaaacttaaaaaataagaccatcagagaaatttgaacattgactaaggtttttttaaacgatattaaaaaactattgttaactatttctggctgcagtagtggtgttaacagttataattttaaatacaccttttagagatgcctacagaaatatttacagataaaaatgagatgatgcctgtgctttgcatcaaataatttgggggataaaggggatcagggtataagtggattgagacttgccatgaattgaaatgggagaatttgctatttttgtttctgtttaaaattttccattaaaagtttaaaaaatatatccaggaaaacagcctacttatgaaaagatatttaaattctacaaaattgttggtgaatatttaactgatctgagtgatgaatgagtaagtataaaataaatggataatatactaagaaa

SEQ ID NO: 247269 - DNA, 730 bp, Homo sapiens
ctcgaactcctgacctcaaataatctgcctgcttcggcctcggaaagtgctgggattacagatgtgagccactgcgctgggctctcatttgccaatttttaagttgggttatttgtctcattataagttttaggaattgtttatatattctagatatatgttccgtattggatatatgatttgcaaatgttttttcgcattctttgggttatcttttcactttcttgatagtgtgctttgaggggcaaaagtttttcgttttgatgaaatccagtgtatttttttcttcctgtttatacttttagtgtcataattaataaaccattgcctaatacaagtttatgaagatttactgctgttttcttccaagtcatatagttttagcttttacatttagttctttggttcattttgccttaatttttgtgtatgttgaggtaggagcccagcttcattattttcatgttgacatttagttgtcccagcaccatttgttgacaagattgttcttttcccctcaactggtcttgacacctttgtgggtattgatctgtttgtctggtctatgccagtaccatgctggcttgattactgtagctttgtagtaagatttgaaattaggaagtgtgtgtgtctttcaattttattctttctcaagattgctttggctattctgggtcccttgcatttccataggaattttaggatcagctcagcaatttctgccaaa

SEQ ID NO: 247270 - DNA, 783 bp, Homo sapiens
ctcgaactcctgacctcaaataatctgcctgcttcggcctcggaaagtgctgggattacagatgtgagccactgcgctgggctctcatttgccaatttttaagttgggttatttgtctcattataagttttaggaattgtttatatattctagatatatgttccgtattggatatatgatttgcaaatgttttttcgcattctttgggttatcttttcactttcttgatagtgtgctttgaggggcaaaagtttttcgttttgatgaaatccagtgtatttttttcttcctgtttatacttttagtgtcataattaataaaccattgcctaatacaagtttatgaagatttactgctgttttcttccaagtcatatagttttagcttttacatttagttctttggttcattttgccttaatttttgtgtatgttgaggtaggagcccagcttcattattttcatgttgacatttagttgtcccagcaccatttgttgacaagattgttcttttcccctcaactggtcttgacacctttgtggaaaatcagttgtctataaatgtaacggtttctttctggactctcgtttctattgtattgatctgtttgtctggtctatgccagtaccatgctggcttgattactgtagctttgtagtaagatttgaaattaggaagtgtgtgtgtctttcaattttattctttctcaagattgctttggctattctgggtcccttgcatttccataggaattttaggatcagctcagcaatttctgccaaa

SEQ ID NO: 247271 - DNA, 596 bp, Homo sapiens
aggtttgtgtggtttaagatgtctttctagatatctgggatataaagatattctcatatacttcttctgtccttcttatttaaattttaaattcaattgaaaattatttggttgggtgcagtgtaaagaagaaatagacttctttttttttcttcttagcatcgtttattattatgattttttacatcatctatatttttcccagggatccactatgtcaattttgtcatatatcaagtttccatactgtttggcagagaaaatgttggttcatcaacaccactgcctcttcctgcatagacagaaaaacttcattacccagccttccgtgtggttgtgttgagagccagtgcctgagctttgccaatgggaatgcgtgggagtgttataggtgcctaagagtaggtgtgtcttcatgtgcacgtgccccctctcatcctgcggccagaagcaaagagcctcaaatgtggagttgcataatggaagcagccaagatctccaagttgaaggagagcaccagggagagttctatgaccttcatcaattagtattatgagtgagaaattgctctgatctgaatgtttgtgtccccccaa

SEQ ID NO: 247272 - DNA, 439 bp, Homo sapiens
aataaactatgttctaactgccacaggattttttgtttttctcgagcagctaaataagcactggcctcaagacaggcactactgaaacaactgcagcccactgacagccagatgctgactaactcaaaacctcccctattcacaagccaaagcaacagttttgattggacgagagactgatttcagtaactttctcctgataagagatcatggaccatggactggttctggccggtttacagaggctgtgtagtgagtgccttcccatcttctgcttcacctagggcctaattgtaatgcacttaaatgttaagtctccaccccaaagtgaacatgggctgcatgtaacatgcatgtttactttccacacatgcatgtgaccccccttcatgaatattcacagcttatcctataatcattaaacatgtatacttagcca

SEQ ID NO: 247273 - DNA, 728 bp, Homo sapiens
catcttgaacttatttgtgagaacatttctcagtttggtttaaaagttgtcagtgacctaattttatgaagactttttcctccttggaactgacctttacaattggacagcattgctttttcttacaattctctttttcccgtaagcctgttattcagtcagatagggatgtctttgtaaaacctgtttttcaggaatgtaccgtttgagagtttaatttactgactcagaatcctatagagatcacagtcaggaataactcaaatcaaaattcttccctgcaaggccttgccccatgactcagtgtcctctctgttggtgactcattatcatctgtggccttccagccttgtcatcatcagattctacttccctgttgaaacttacatttcctgaatttcatatccttagggtgtattctctgcttctgaggaatcggccaactctgctctcttcttccccctgactgccccgcccgacatacacacacccacccacacacacacaagggaccctagaatgtaaccagcccatttaattgtctaatccagaggagtgattcgattattgggaatgtgtgcagctgagtctgctgtttcactagggaaatatttcgggatgagccaaggtacctaggatcagcctttagaccatgtcatgaaaatattagatggtatagccttgaaaacaaagaactgaagagaacttagggagacatatttgaccac

SEQ ID NO: 247274 - DNA, 515 bp, Homo sapiens
aatgatgggatagcgcctttattgtgggacaaactaattgcttaatgaatagccaataacatttcctcatactctggtttctctttggatcttataaaccctttgtcttttaccaaaaaaaaaaaaaaaaaaaaatcaaaaccaaaaccaaaaaacaaaaacatttccttatgtaaagggacatgacttttaaaaaatatgaatatttccacttttcttgtggttctccctcctgtccttctgtcttttcaaccagttgtcaatccttgcctcagaagagtttatgattctacagaacagcaaagaaaagcttttgggtttcaaaggtattgacttttatgttgtaaaaatctcaggtccaaagggaaagttgatgatataagagtaaggttcctgtttgcatccttttctcccactgcagggttggggaaaagaagccctctgcacaccagaattacccagagacatggaacacttagcactgcatcatatgttggccttacagaggtcctccg

SEQ ID NO: 247275 - DNA, 336 bp, Homo sapiens
gaaaattcagtagagaaaggactgactttaaaaagaaaaaaaaatggtccaggaggagctgagcacagtggtgtagctggccagtagtcccagctactcaggaggctgagacaggaggatcacttaagcccaggagttcacggctttagtgtgagtatgcagtgatcacacctgtgaatagccacctcataccagcctgtacaacatagcaagattctgtctctttaaaaaacaaaaaacggtgcaggagaatttggatatccatacacaaacagattattttagaccccttacctcacactatgcttaaaagtatactcaaaatggattccctat

SEQ ID NO: 247276 - DNA, 622 bp, Homo sapiens
ggccagagcctggggatcaaaggggaaataaccttgcaaatgcatcacagatgaaccccagagttcttgcatttctttatggggaattgtaaatctctgatacaaactaaacgctataccttcaaatggttggatacttggacaagaacttcttcagaatcaaatgaagcttcacttctttcagacatcagaacttcatgctatctctatccccactctacttacactcacacgtattgccttgacagaatttgagttgagactagaaaatattttgttttccagaatagcatactatgtaggaatataaatggttcctggaatgaaagtgattatgaacgggaagggccattcatttctagttattcagaagattttgagtttatcaaaggattagataaacctcttttaatttaataaatggtagccaatattagcaggatcatgagaattggagatacaatttggttgtcagtctgaaattatttcattttttctgaaattaaatattaatttagctccctgactcttattcactcagaagcccatttcaacttggttttcatgcaattaccacactcttgaaattgatctcaaatcaacacaactttgcaattgtaaa

SEQ ID NO: 247277 - DNA, 676 bp, Homo sapiens
ggccagagcctggggatcaaaggggaaataaccttgcaaatgcatcacagatgaaccccagagttcttgcatttctttatggggaattgtaaatctctgatacaaactaaacgctataccttcaaatggttggatacttggacaagaacttcttcagaatcaaatgaagcttcacttctttcagacatcagaacttcatgctatctctatccccactctacttacactcacacgtattgccttgacagaatttgagttgagactagaaaatattttgttttccagaatagcatactatgtaggaatataaatggttcctggaatgaaagtgattatgaacgggaagggccattcatttctagttattcagaagattttgagtttatcaaaggattagataaacctcttttaatttaataaatggtagccaatattagcaggatcatgagaattggagatacaatttggttgtcagaaaagacatgaaacatctattttccatttcaccttatctttaggtgaaattttttctgaaattatttcattttttctgaaattaaatattaatttagctccctgactcttattcactcagaagcccatttcaacttggttttcatgcaattaccacactcttgaaattgatctcaaatcaacacaactttgcaattgtaaa

SEQ ID NO: 247278 - DNA, 815 bp, Homo sapiens
ggtttcactctgttggccaggctggtctcgaactcctaacctcaggtgatccgcctgccttggcctcccaaagtgctgggattacaggcgtgagccactcgcggccaataggaagatttcatatttaagaagtctcaacttctagcatctctagaaaacccacaggacttggctatacctggtggccattcctgcttgagactagattgccagagctgagtagcggttgacccttttaggtgggtactgaggtctccatttgcagtctccaccaggtctgctttgcctttgctattgcagtatttgcctggcatctggcctggatcttatgctgaacctaatattcagacttctcaagtctgaaactttaaggaaaagaaaataaggaatgtaaatagtacctttcttttttaaaaaaatcattttactgtctctacaaaaataaaatcattcttattaagtcaaataattggtgaaggttaatgttagaacatgtagcattcattaactttgtcactgattgcattatacatatgggtgagccattgtttcttaataaaaatgggggtgagacttgctaagattagttacggacaatgattgatgaccagaactcatattttttactgtatttgtataagtagcagagaaatatagtaggtgcttcaagggttgcaagagtaaaatgccccttttctcaatgggagaaaagggagtattagatctagtaggaaattaagtaaaccaattactgtgattcaggctaggttaagataaatatcacgagtgaagtatgagcaaaggtcatgagggtt

SEQ ID NO: 247279 - DNA, 696 bp, Homo sapiens
ccaaggtcgccatttaattttgacacagaaccaaagtggcgagtacatttcctctccaaggtgaagcacaaggagaaactgatcactttgaccacaaggtattggcaatactggtgatcgatgtattctgggaaagatccttggcagataagtgctggtgaacagagaggtctaggagataggggtcaaaccatttttaggtgcttgagaatctcattcattcattcattcatttaataaatattgattccctctatgtgtcaggcagtatgttcaaggcactgggaatacatgagtgaacaaaagagaaaggtactcctgccctcagggagctcatattctagagggtggaaacacagaatatacaatacacttaaaaagtagtgaaaattgtatcatattttggaaggtagtatatgcaatttattagagaagaaatggagcagggtagggtgcatgttgtcggggggcctgtggtgcagtttaagtagggtgggcagggccagtcttgtgagtggaggacatttgagcacacacttcaagatgaggagtaggtcgtgtgggcatctggccctaagtgttctaggcagagggaacagccagtgagaacatggctggtatgttccaggaccaccaaggaagccactgtggctggtggagggagattctagtaagaggtgaggccagagtggtgag

SEQ ID NO: 247280 - DNA, 393 bp, Homo sapiens
tcatcataattttttctaaaaatacagtcagagaaaaacactcattgaaccctccactggaaagtagctgcaaaagaccccctgatcccaaacctgcttgacagaccacagccaagggcagggacactcaacaactgtaaacgaggaacatttcacagcggcagctggcccctctcttcttccaaccagccaatattttttgtctttctagaaaacctgtcttgttcaaaggcctgatggagctgattcggttgtgatcctgggcatatggatggcatatttgctgcgagctagccggcccccgctgctgcggacaaatctttcattcatgaacaggagcttgttaggccaactccggactctaaagccacttaattaaattgtggaaagtcg

SEQ ID NO: 247281 - DNA, 2357 bp, Homo sapiens
actagatctcttaaaaagatggaccctcagcggcgcttcctcgtagcgagcctagtggcgggtgtttgcattgaaacgtgagcgcgacccgaccttaaagagtggggagcaaagggaggacagagccctttaaaacgaggcgggtggtgcctgcccctttaagggcggggcgtccggacgactgtatctgagccccagactgccccgagtttctgtcgcaggctgcgaggaaaggcccctaggctgggtctgggtgcttggcggcggcggcttcctccccgctcgtcctccccgggcccagaggcacctcggcttcagtcatgctgagcagagtatggaagcacctgactacgaagtgctatccgtgcgagaacagctattccacgagaggatccgcgagtgtattatatcaacacttctgtttgcaacactgtacatcctctgccacatcttcctgacccgcttcaagaagcctgctgagttcaccacagtggatgatgaagatgccaccgtcaacaagattgcgctcgagctgtgcacctttaccctggcaattgccctgggtgctgtcctgctcctgcccttctccatcatcagcaatgaggtgctgctctccctgcctcggaactactacatccagtggctcaacggctccctcatccatggcctctggaaccttgtttttctcttctccaacctgtccctcatcttcctcatgccctttgcatatttcttcactgagtctgagggctttgctggctccagaaagggtgtcctgggccgggtctatgagacagtggtgatgttgatgctcctcactctgctggtgctaggtatggtgtgggtggcatcagccattgtggacaagaacaaggccaacagagagtcactctatgacttttgggagtactatctcccctacctctactcatgcatctccttccttggggttctgctgctcctggtgtgtactccactgggtctcgcccgcatgttctccgtcactgggaagctgctagtcaagccccggctgctggaagacctggaggagcagctgtactgctcagcctttgaggaggcagccctgacccgcaggatctgtaatcctacttcctgctggctgcctttagacatggagctgctacacagacaggtcctggctctgcagacacagagggtcctgctggagaagaggcggaaggcttcagcctggcaacggaacctgggctaccccctggctatgctgtgcttgctggtgctgacgggcctgtctgtgctcattgtggccatccacatcctggagctgctcatcgatgaggctgccatgccccgaggcatgcagggtacctccttaggccaggtctccttctccaagctgggctcctttggtgccgtcattcaggttgtactcatcttttacctaatggtgtcctcagttgtgggcttctatagctctccactcttccggagcctgcggcccagatggcacgacactgccatgacgcagataattgggaactgtgtctgtctcctggtcctaagctcagcacttcctgtcttctctcgaaccctggggctcactcgctttgacctgctgggtgactttggacgcttcaactggctgggcaatttctacattgtgttcctctacaacgcagcctttgcaggcctcaccacactctgtctggtgaagaccttcactgcagctgtgcgggcagagctgatccgggcctttgggctggacagactgccgctgcccgtctccggtttcccccaggcatctaggaagacccagcaccagtgacctccagctgggggtgggaaggaaaaaactggacactgccatctgctgcctaggcctggagggaagcccaaggctacttggacctcaggacctggaatctgagagggtgggtggcagaggggagcagagccatctgcactattgcataatctgagccagagtttgggaccaggacctcctgcttttccatacttaactgtggcctcagcatggggtagggctgggtgactgggtctagcccctgatcccaaatctgtttacacatcaatctgcctcactgctgttctgggccatccccatagccatgtttacatgatttgatgtgcaatagggtggggtaggggcagggaaaggactgggccagggcaggctcgggagatagattgtctcccttgcctctggcccagcagagcctaagcactgtgctatcctggaggggctttggaccacctgaaagaccaaggggatagggaggaggaggcttcagccatcagcaataaagttgatcccagggtttgctttgtttttttaaagtcgacctgtctctgtgtat

SEQ ID NO: 247282 - DNA, 2283 bp, Homo sapiens
actagatctcttaaaaagatggaccctcagcggcgcttcctcgtagcgagcctagtggcgggtgtttgcattgaaacgtgagcgcgacccgaccttaaagagtggggagcaaagggaggacagagccctttaaaacgaggcgggtggtgcctgcccctttaagggcggggcgtccggacgactgtatctgagccccagactgccccgagtttctgtcgcaggctgcgaggaaaggcccctaggctgggtctgggtgcttggcggcggcggcttcctccccgctcgtcctccccgggcccagaggcacctcggcttcagtcatgctgagcagagtatggaagcacctgactacgaagtgctatccgtgcgagaacagctattccacgagaggatccgcgagtgtattatatcaacacttctgtttgcaacactgtacatcctctgccacatcttcctgacccgcttcaagaagcctgctgagttcaccacagtggatgatgaagatgccaccgtcaacaagattgcgctcgagctgtgcacctttaccctggcaattgccctgggtgctgtcctgctcctgcccttctccatcatcagcaatgaggtgctgctctccctgcctcggaactactacatccagtggctcaacggctccctcatccatggcctctggaaccttgtttttctcttctccaacctgtccctcatcttcctcatgccctttgcatatttcttcactgagtctgagggctttgctggctccagaaagggtgtcctgggccgggtctatgagacagtggtgatgttgatgctcctcactctgctggtgctaggtatggtgtgggtggcatcagccattgtggacaagaacaaggccaacagagagtcactctatgacttttgggagtactatctcccctacctctactcatgcatctccttccttggggttctgctgctcctggtgtgtactccactgggtctcgcccgcatgttctccgtcactgggaagctgctagtcaagccccggctgctggaagacctggaggagcagctgtactgctcagcctttgaggaggcagccctgacccgcaggatctgtaatcctacttcctgctggctgcctttagacatggagctgctacacagacaggtcctggctctgcagacacagagggtcctgctggagaagaggcggaaggcttcagcctggcaacggaacctgggctaccccctggctatgctgtgcttgctggtgctgacgggcctgtctgtgctcattgtggccatccacatcctggagctgctcatcgatgaggctgccatgccccgaggcatgcagttacctaatggtgtcctcagttgtgggcttctatagctctccactcttccggagcctgcggcccagatggcacgacactgccatgacgcagataattgggaactgtgtctgtctcctggtcctaagctcagcacttcctgtcttctctcgaaccctggggctcactcgctttgacctgctgggtgactttggacgcttcaactggctgggcaatttctacattgtgttcctctacaacgcagcctttgcaggcctcaccacactctgtctggtgaagaccttcactgcagctgtgcgggcagagctgatccgggcctttgggctggacagactgccgctgcccgtctccggtttcccccaggcatctaggaagacccagcaccagtgacctccagctgggggtgggaaggaaaaaactggacactgccatctgctgcctaggcctggagggaagcccaaggctacttggacctcaggacctggaatctgagagggtgggtggcagaggggagcagagccatctgcactattgcataatctgagccagagtttgggaccaggacctcctgcttttccatacttaactgtggcctcagcatggggtagggctgggtgactgggtctagcccctgatcccaaatctgtttacacatcaatctgcctcactgctgttctgggccatccccatagccatgtttacatgatttgatgtgcaatagggtggggtaggggcagggaaaggactgggccagggcaggctcgggagatagattgtctcccttgcctctggcccagcagagcctaagcactgtgctatcctggaggggctttggaccacctgaaagaccaaggggatagggaggaggaggcttcagccatcagcaataaagttgatcccagggtttgctttgtttttttaaagtcgacctgtctctgtgtat

SEQ ID NO: 247283 - DNA, 1073 bp, Homo sapiens
gtcatgcgtgcgctgtccttgctgaccgagccttcagtggacggagatgtcatgcgattgaacagcagatgagtggtcgcatctcgagagcattaaggcagtggggagcgcaggtgcaggactcgagactcagtgggacgacgatgtctggttgcctgatcctgtgataggcggggcgtccggacgactgtatctgagccccagactgccccgagtttctgtcgcaggctgcgaggaaaggcccctaggctgggtctgggtgcttggcggcggcggcttcctccccgctcgtcctccccgggcccagaggcacctcggcttcagtcatgctgagcagagtatggaagcacctgactacgaagtgctatccgtgcgagaacagctattccacgagaggatccgcgagtgtattatatcaacacttctgtttgcaacactgtacatcctctgccacatcttcctgacccgcttcaagaagcctgctgagttcaccacagtggatgatgaagatgccaccgtcaacaagattgcgctcgagctgtgcacctttaccctggcaattgccctgggtgctgtcctgctcctgcccttctccatcatcagcaatgaggtgctgctctccctgcctcggaactactacatccagtggctcaacggctccctcatccatggcctctggaaccttgtttttctcttctccaacctgtccctcatcttcctcatgccctttgcatatttcttcactgagtctgagggctttgctggctccagaaaggtaagtaggggatatgtatccaggcaggaaacggaattccacacacatggttcagctgaagagattttaataaagaggctatttgcagaggtttagttaacggaagtttgaggctctagtgacagtaggaagtcattaccacccttaggcctgtagggacaaagggaggaaatggtttctagaacccactaatagctgaagccagggatgtgaagctgcccagagaggagctgttgtcttagtgtcataatcactgccaaaaccatggtggcagacgtgggaggactcacaggaaaca

SEQ ID NO: 247284 - DNA, 2559 bp, Homo sapiens
actagatctcttaaaaagatggaccctcagcggcgcttcctcgtagcgagcctagtggcgggtgtttgcattgaaacgtgagcgcgacccgaccttaaagagtggggagcaaagggaggacagagccctttaaaacgaggcgggtggtgcctgcccctttaagggcggggcgtccggacgactgtatctgagccccagactgccccgagtttctgtcgcaggctgcgaggaaaggcccctaggctgggtctgggtgcttggcggcggcggcttcctccccgctcgtcctccccgggcccagaggcacctcggcttcagtcatgctgagcagagtatggaagcacctgactacgaagtgctatccgtgcgagaacagctattccacgagaggatccgcgagtgtattatatcaacacttctgtttgcaacactgtacatcctctgccacatcttcctgacccgcttcaagaagcctgctgagttcaccacagtttcatcctacaaaatgggcgtaacaatgtctacctactccattgtgtggaccaaaggagatggttaatgtgaaagccctttgtgaacctgaagtgagcaactgctggatgaatgtcattacgggcacaggctctgtgtcatctcctctcctagtgcttccacagccaggaccagagacctccctgatgactggggaacctgtggatgatgaagatgccaccgtcaacaagattgcgctcgagctgtgcacctttaccctggcaattgccctgggtgctgtcctgctcctgcccttctccatcatcagcaatgaggtgctgctctccctgcctcggaactactacatccagtggctcaacggctccctcatccatggcctctggaaccttgtttttctcttctccaacctgtccctcatcttcctcatgccctttgcatatttcttcactgagtctgagggctttgctggctccagaaagggtgtcctgggccgggtctatgagacagtggtgatgttgatgctcctcactctgctggtgctaggtatggtgtgggtggcatcagccattgtggacaagaacaaggccaacagagagtcactctatgacttttgggagtactatctcccctacctctactcatgcatctccttccttggggttctgctgctcctggtgtgtactccactgggtctcgcccgcatgttctccgtcactgggaagctgctagtcaagccccggctgctggaagacctggaggagcagctgtactgctcagcctttgaggaggcagccctgacccgcaggatctgtaatcctacttcctgctggctgcctttagacatggagctgctacacagacaggtcctggctctgcagacacagagggtcctgctggagaagaggcggaaggcttcagcctggcaacggaacctgggctaccccctggctatgctgtgcttgctggtgctgacgggcctgtctgtgctcattgtggccatccacatcctggagctgctcatcgatgaggctgccatgccccgaggcatgcagggtacctccttaggccaggtctccttctccaagctgggctcctttggtgccgtcattcaggttgtactcatcttttacctaatggtgtcctcagttgtgggcttctatagctctccactcttccggagcctgcggcccagatggcacgacactgccatgacgcagataattgggaactgtgtctgtctcctggtcctaagctcagcacttcctgtcttctctcgaaccctggggctcactcgctttgacctgctgggtgactttggacgcttcaactggctgggcaatttctacattgtgttcctctacaacgcagcctttgcaggcctcaccacactctgtctggtgaagaccttcactgcagctgtgcgggcagagctgatccgggcctttgggctggacagactgccgctgcccgtctccggtttcccccaggcatctaggaagacccagcaccagtgacctccagctgggggtgggaaggaaaaaactggacactgccatctgctgcctaggcctggagggaagcccaaggctacttggacctcaggacctggaatctgagagggtgggtggcagaggggagcagagccatctgcactattgcataatctgagccagagtttgggaccaggacctcctgcttttccatacttaactgtggcctcagcatggggtagggctgggtgactgggtctagcccctgatcccaaatctgtttacacatcaatctgcctcactgctgttctgggccatccccatagccatgtttacatgatttgatgtgcaatagggtggggtaggggcagggaaaggactgggccagggcaggctcgggagatagattgtctcccttgcctctggcccagcagagcctaagcactgtgctatcctggaggggctttggaccacctgaaagaccaaggggatagggaggaggaggcttcagccatcagcaataaagttgatcccagggtttgctttgtttttttaaagtcgacctgtctctgtgtat

SEQ ID NO: 247285 - DNA, 3065 bp, Homo sapiens
actagatctcttaaaaagatggaccctcagcggcgcttcctcgtagcgagcctagtggcgggtgtttgcattgaaacgtgagcgcgacccgaccttaaagagtggggagcaaagggaggacagagccctttaaaacgaggcgggtggtgcctgcccctttaagggcggggcgtccggacgactgtatctgagccccagactgccccgagtttctgtcgcaggctgcgaggaaaggcccctaggctgggtctgggtgcttggcggcggcggcttcctccccgctcgtcctccccgggcccagaggcacctcggcttcagtcatgctgagcagagtatggaagcacctgactacgaagtgctatccgtgcgagaacagctattccacgagaggatccgcgagtgtattatatcaacacttctgtttgcaacactgtacatcctctgccacatcttcctgacccgcttcaagaagcctgctgagttcaccacagtggatgatgaagatgccaccgtcaacaagattgcgctcgagctgtgcacctttaccctggcaattgccctgggtgctgtcctgctcctgcccttctccatcatcagcaatgaggtgctgctctccctgcctcggaactactacatccagtggctcaacggctccctcatccatggcctctggaaccttgtttttctcttctccaacctgtccctcatcttcctcatgccctttgcatatttcttcactgagtctgagggctttgctggctccagaaagggtgtcctgggccgggtctatgagacagtggtgatgttgatgctcctcactctgctggtgctaggtatggtgtgggtggcatcagccattgtggacaagaacaaggccaacagagagtcactctatgacttttgggagtactatctcccctacctctactcatgcatctccttccttggggttctgctgctcctggtgtgtactccactgggtctcgcccgcatgttctccgtcactgggaagctgctagtcaagccccggctgctggaagacctggaggagcagctgtactgctcagcctttgaggaggcagccctgacccgcaggatctgtaatcctacttcctgctggctgcctttagacatggagctgctacacagacaggtcctggctctgcagacacagagggtcctgctggagaagaggcggaaggcttcagcctggcaacggaacctgggctaccccctggctatgctgtgcttgctggtgctgacgggcctgtctgtgctcattgtggccatccacatcctggagctgctcatcgatgaggctgccatgccccgaggcatgcagggtacctccttaggccaggtctccttctccaagctgggctcctttggtgccgtcattcaggttgtactcatctttcttgtatccttctggaaacccatcattgcctctgttcagcaaacctgtctcctgggactctagaccgagcacttcttggactttgtctcctttgggactctgagcaacgctgatgggaagtggggcaagttttcatcaacctcaggttcagaaagaaggaaaagacttaatttgaaaggagggctggtggttcagtagaatctgatcagaagaaaataaaaagaggccaggtgcagtggctcacacctgtaatcctagcactttgggaggctgaggcgggtagattgcttgagtttaggatttcaagaccagcctgagcaacatggtgaaacccggcctctacaaaaagtacaaaaaattagccagacgtggtggtgcgtgcttgcattcccagctacgtgggaggctgacgtgggaagatcgcttaagcccagaaggtcaaggttgcagtgagctgaaatcgcaccactgcactccagcctgggtgacaaagtgagaccctgtctcaaaaaaaaaaaaagaagtgggctgggagagagctctgttccctttgagatgagttattaattcttggagccagccagttcttccttaatgcagtggcagttacctaatggtgtcctcagttgtgggcttctatagctctccactcttccggagcctgcggcccagatggcacgacactgccatgacgcaggtagctgggagggagtaagggaagctcccggggggtgtggatgggcactaggtgcctgcagctcttccaccctcacctctcctttccctgcttccacccagataattgggaactgtgtctgtctcctggtcctaagctcagcacttcctgtcttctctcgaaccctggggctcactcgctttgacctgctgggtgactttggacgcttcaactggctgggcaatttctacattgtgttcctctacaacgcagcctttgcaggcctcaccacactctgtctggtgaagaccttcactgcagctgtgcgggcagagctgatccgggcctttgggctggacagactgccgctgcccgtctccggtttcccccaggcatctaggaagacccagcaccagtgacctccagctgggggtgggaaggaaaaaactggacactgccatctgctgcctaggcctggagggaagcccaaggctacttggacctcaggacctggaatctgagagggtgggtggcagaggggagcagagccatctgcactattgcataatctgagccagagtttgggaccaggacctcctgcttttccatacttaactgtggcctcagcatggggtagggctgggtgactgggtctagcccctgatcccaaatctgtttacacatcaatctgcctcactgctgttctgggccatccccatagccatgtttacatgatttgatgtgcaatagggtggggtaggggcagggaaaggactgggccagggcaggctcgggagatagattgtctcccttgcctctggcccagcagagcctaagcactgtgctatcctggaggggctttggaccacctgaaagaccaaggggatagggaggaggaggcttcagccatcagcaataaagttgatcccagggtttgctttgtttttttaaagtcgacctgtctctgtgtat

SEQ ID NO: 247286 - DNA, 2323 bp, Homo sapiens
actagatctcttaaaaagatggaccctcagcggcgcttcctcgtagcgagcctagtggcgggtgtttgcattgaaacgtgagcgcgacccgaccttaaagagtggggagcaaagggaggacagagccctttaaaacgaggcgggtggtgcctgcccctttaagggcggggcgtccggacgactgtatctgagccccagactgccccgagtttctgtcgcaggctgcgaggaaaggcccctaggctgggtctgggtgcttggcggcggcggcttcctccccgctcgtcctccccgggcccagaggcacctcggcttcagtcatgctgagcagagtatggaagcacctgactacgaagtgctatccgtgcgagaacagctattccacgagaggatccgcgagtgtattatatcaacacttctgtttgcaacactgtacatcctctgccacatcttcctgacccgcttcaagaagcctgctgagttcaccacaggctcgagctgtgcacctttaccctggcaattgccctgggtgctgtcctgctcctgcccttctccatcatcagcaatgaggtgctgctctccctgcctcggaactactacatccagtggctcaacggctccctcatccatggcctctggaaccttgtttttctcttctccaacctgtccctcatcttcctcatgccctttgcatatttcttcactgagtctgagggctttgctggctccagaaagggtgtcctgggccgggtctatgagacagtggtgatgttgatgctcctcactctgctggtgctaggtatggtgtgggtggcatcagccattgtggacaagaacaaggccaacagagagtcactctatgacttttgggagtactatctcccctacctctactcatgcatctccttccttggggttctgctgctcctggtgtgtactccactgggtctcgcccgcatgttctccgtcactgggaagctgctagtcaagccccggctgctggaagacctggaggagcagctgtactgctcagcctttgaggaggcagccctgacccgcaggatctgtaatcctacttcctgctggctgcctttagacatggagctgctacacagacaggtcctggctctgcagacacagagggtcctgctggagaagaggcggaaggcttcagcctggcaacggaacctgggctaccccctggctatgctgtgcttgctggtgctgacgggcctgtctgtgctcattgtggccatccacatcctggagctgctcatcgatgaggctgccatgccccgaggcatgcagggtacctccttaggccaggtctccttctccaagctgggctcctttggtgccgtcattcaggttgtactcatcttttacctaatggtgtcctcagttgtgggcttctatagctctccactcttccggagcctgcggcccagatggcacgacactgccatgacgcagataattgggaactgtgtctgtctcctggtcctaagctcagcacttcctgtcttctctcgaaccctggggctcactcgctttgacctgctgggtgactttggacgcttcaactggctgggcaatttctacattgtgttcctctacaacgcagcctttgcaggcctcaccacactctgtctggtgaagaccttcactgcagctgtgcgggcagagctgatccgggcctttgggctggacagactgccgctgcccgtctccggtttcccccaggcatctaggaagacccagcaccagtgacctccagctgggggtgggaaggaaaaaactggacactgccatctgctgcctaggcctggagggaagcccaaggctacttggacctcaggacctggaatctgagagggtgggtggcagaggggagcagagccatctgcactattgcataatctgagccagagtttgggaccaggacctcctgcttttccatacttaactgtggcctcagcatggggtagggctgggtgactgggtctagcccctgatcccaaatctgtttacacatcaatctgcctcactgctgttctgggccatccccatagccatgtttacatgatttgatgtgcaatagggtggggtaggggcagggaaaggactgggccagggcaggctcgggagatagattgtctcccttgcctctggcccagcagagcctaagcactgtgctatcctggaggggctttggaccacctgaaagaccaaggggatagggaggaggaggcttcagccatcagcaataaagttgatcccagggtttgctttgtttttttaaagtcgacctgtctctgtgtat

SEQ ID NO: 247287 - DNA, 1879 bp, Homo sapiens
tgttcctgagttccctgttgcgctattacccgcacaagatgggcccagctcgagctgtgcacctttaccctggcaattgccctgggtgctgtcctgctcctgcccttctccatcatcagcaatgaggtgctgctctccctgcctcggaactactacatccagtggctcaacggctccctcatccatggcctctggaaccttgtttttctcttctccaacctgtccctcatcttcctcatgccctttgcatatttcttcactgagtctgagggctttgctggctccagaaagggtgtcctgggccgggtctatgagacagtggtgatgttgatgctcctcactctgctggtgctaggtatggtgtgggtggcatcagccattgtggacaagaacaaggccaacagagagtcactctatgacttttgggagtactatctcccctacctctactcatgcatctccttccttggggttctgctgctcctggtgtgtactccactgggtctcgcccgcatgttctccgtcactgggaagctgctagtcaagccccggctgctggaagacctggaggagcagctgtactgctcagcctttgaggaggcagccctgacccgcaggatctgtaatcctacttcctgctggctgcctttagacatggagctgctacacagacaggtcctggctctgcagacacagagggtcctgctggagaagaggcggaaggcttcagcctggcaacggaacctgggctaccccctggctatgctgtgcttgctggtgctgacgggcctgtctgtgctcattgtggccatccacatcctggagctgctcatcgatgaggctgccatgccccgaggcatgcagggtacctccttaggccaggtctccttctccaagctgggctcctttggtgccgtcattcaggttgtactcatcttttacctaatggtgtcctcagttgtgggcttctatagctctccactcttccggagcctgcggcccagatggcacgacactgccatgacgcagataattgggaactgtgtctgtctcctggtcctaagctcagcacttcctgtcttctctcgaaccctggggctcactcgctttgacctgctgggtgactttggacgcttcaactggctgggcaatttctacattgtgttcctctacaacgcagcctttgcaggcctcaccacactctgtctggtgaagaccttcactgcagctgtgcgggcagagctgatccgggcctttgggctggacagactgccgctgcccgtctccggtttcccccaggcatctaggaagacccagcaccagtgacctccagctgggggtgggaaggaaaaaactggacactgccatctgctgcctaggcctggagggaagcccaaggctacttggacctcaggacctggaatctgagagggtgggtggcagaggggagcagagccatctgcactattgcataatctgagccagagtttgggaccaggacctcctgcttttccatacttaactgtggcctcagcatggggtagggctgggtgactgggtctagcccctgatcccaaatctgtttacacatcaatctgcctcactgctgttctgggccatccccatagccatgtttacatgatttgatgtgcaatagggtggggtaggggcagggaaaggactgggccagggcaggctcgggagatagattgtctcccttgcctctggcccagcagagcctaagcactgtgctatcctggaggggctttggaccacctgaaagaccaaggggatagggaggaggaggcttcagccatcagcaataaagttgatcccagggtttgctttgtttttttaaagtcgacctgtctctgtgtat

SEQ ID NO: 247288 - DNA, 2964 bp, Homo sapiens
actagatctcttaaaaagatggaccctcagcggcgcttcctcgtagcgagcctagtggcgggtgtttgcattgaaacgtgagcgcgacccgaccttaaagagtggggagcaaagggaggacagagccctttaaaacgaggcgggtggtgcctgcccctttaagggcggggcgtccggacgactgtatctgagccccagactgccccgagtttctgtcgcaggctgcgaggaaaggcccctaggctgggtctgggtgcttggcggcggcggcttcctccccgctcgtcctccccgggcccagaggcacctcggcttcagtcatgctgagcagagtatggaagcacctgactacgaagtgctatccgtgcgagaacagctattccacgagaggatccgcgagtgtattatatcaacacttctgtttgcaacactgtacatcctctgccacatcttcctgacccgcttcaagaagcctgctgagttcaccacagtggatgatgaagatgccaccgtcaacaagattgcgctcgagctgtgcacctttaccctggcaattgccctgggtgctgtcctgctcctgcccttctccatcatcagcaatgaggtgctgctctccctgcctcggaactactacatccagtggctcaacggctccctcatccatggcctctggaaccttgtttttctcttctccaacctgtccctcatcttcctcatgccctttgcatatttcttcactgagtctgagggctttgctggctccagaaagggtgtcctgggccgggtctatgagacagtggtgatgttgatgctcctcactctgctggtgctaggtatggtgtgggtggcatcagccattgtggacaagaacaaggccaacagagagtcactctatgacttttgggagtactatctcccctacctctactcatgcatctccttccttggggttctgctgctcctggtgtgtactccactgggtctcgcccgcatgttctccgtcactgggaagctgctagtcaagccccggctgctggaagacctggaggagcagctgtactgctcagcctttgaggaggcagccctgacccgcaggatctgtaatcctacttcctgctggctgcctttagacatggagctgctacacagacaggtcctggctctgcagacacagagggtcctgctggagaagaggcggaaggcttcagcctggcaacggaacctgggctaccccctggctatgctgtgcttgctggtgctgacgggcctgtctgtgctcattgtggccatccacatcctggagctgctcatcgatgaggctgccatgccccgaggcatgcagggtacctccttaggccaggtctccttctccaagctgggctcctttggtgccgtcattcaggttgtactcatctttcttgtatccttctggaaacccatcattgcctctgttcagcaaacctgtctcctgggactctagaccgagcacttcttggactttgtctcctttgggactctgagcaacgctgatgggaagtggggcaagttttcatcaacctcaggttcagaaagaaggaaaagacttaatttgaaaggagggctggtggttcagtagaatctgatcagaagaaaataaaaagaggccaggtgcagtggctcacacctgtaatcctagcactttgggaggctgaggcgggtagattgcttgagtttaggatttcaagaccagcctgagcaacatggtgaaacccggcctctacaaaaagtacaaaaaattagccagacgtggtggtgcgtgcttgcattcccagctacgtgggaggctgacgtgggaagatcgcttaagcccagaaggtcaaggttgcagtgagctgaaatcgcaccactgcactccagcctgggtgacaaagtgagaccctgtctcaaaaaaaaaaaaagaagtgggctgggagagagctctgttccctttgagatgagttattaattcttggagccagccagttcttccttaatgcagtggcagttacctaatggtgtcctcagttgtgggcttctatagctctccactcttccggagcctgcggcccagatggcacgacactgccatgacgcagataattgggaactgtgtctgtctcctggtcctaagctcagcacttcctgtcttctctcgaaccctggggctcactcgctttgacctgctgggtgactttggacgcttcaactggctgggcaatttctacattgtgttcctctacaacgcagcctttgcaggcctcaccacactctgtctggtgaagaccttcactgcagctgtgcgggcagagctgatccgggcctttgggctggacagactgccgctgcccgtctccggtttcccccaggcatctaggaagacccagcaccagtgacctccagctgggggtgggaaggaaaaaactggacactgccatctgctgcctaggcctggagggaagcccaaggctacttggacctcaggacctggaatctgagagggtgggtggcagaggggagcagagccatctgcactattgcataatctgagccagagtttgggaccaggacctcctgcttttccatacttaactgtggcctcagcatggggtagggctgggtgactgggtctagcccctgatcccaaatctgtttacacatcaatctgcctcactgctgttctgggccatccccatagccatgtttacatgatttgatgtgcaatagggtggggtaggggcagggaaaggactgggccagggcaggctcgggagatagattgtctcccttgcctctggcccagcagagcctaagcactgtgctatcctggaggggctttggaccacctgaaagaccaaggggatagggaggaggaggcttcagccatcagcaataaagttgatcccagggtttgctttgtttttttaaagtcgacctgtctctgtgtat

SEQ ID NO: 247289 - DNA, 2850 bp, Homo sapiens
actagatctcttaaaaagatggaccctcagcggcgcttcctcgtagcgagcctagtggcgggtgtttgcattgaaacgtgagcgcgacccgaccttaaagagtggggagcaaagggaggacagagccctttaaaacgaggcgggtggtgcctgcccctttaagggcggggcgtccggacgactgtatctgagccccagactgccccgagtttctgtcgcaggctgcgaggaaaggcccctaggctgggtctgggtgcttggcggcggcggcttcctccccgctcgtcctccccgggcccagaggcacctcggcttcagtcatgctgagcagagtatggaagcacctgactacgaagtgctatccgtgcgagaacagctattccacgagaggatccgcgagtgtattatatcaacacttctgtttgcaacactgtacatcctctgccacatcttcctgacccgcttcaagaagcctgctgagttcaccacagtggatgatgaagatgccaccgtcaacaagattgcgctcgagctgtgcacctttaccctggcaattgccctgggtgctgtcctgctcctgcccttctccatcatcagcaatgaggtgctgctctccctgcctcggaactactacatccagtggctcaacggctccctcatccatggcctctggaaccttgtttttctcttctccaacctgtccctcatcttcctcatgccctttgcatatttcttcactgagtctgagggctttgctggctccagaaagggtgtcctgggccgggtctatgagacagtggtgatgttgatgctcctcactctgctggtgctaggtatggtgtgggtggcatcagccattgtggacaagaacaaggccaacagagagtcactctatgacttttgggagtactatctcccctacctctactcatgcatctccttccttggggttctgctgctcctggtgtgtactccactgggtctcgcccgcatgttctccgtcactgggaagctgctagtcaagccccggctgctggaagacctggaggagcagctgtactgctcagcctttgaggaggcagccctgacccgcaggatctgtaatcctacttcctgctggctgcctttagacatggagctgctacacagacaggtcctggctctgcagacacagagggtcctgctggagaagaggcggaaggcttcagcctggcaacggaacctgggctaccccctggctatgctgtgcttgctggtgctgacgggcctgtctgtgctcattgtggccatccacatcctggagctgctcatcgatgaggctgccatgccccgaggcatgcagcaaacctgtctcctgggactctagaccgagcacttcttggactttgtctcctttgggactctgagcaacgctgatgggaagtggggcaagttttcatcaacctcaggttcagaaagaaggaaaagacttaatttgaaaggagggctggtggttcagtagaatctgatcagaagaaaataaaaagaggccaggtgcagtggctcacacctgtaatcctagcactttgggaggctgaggcgggtagattgcttgagtttaggatttcaagaccagcctgagcaacatggtgaaacccggcctctacaaaaagtacaaaaaattagccagacgtggtggtgcgtgcttgcattcccagctacgtgggaggctgacgtgggaagatcgcttaagcccagaaggtcaaggttgcagtgagctgaaatcgcaccactgcactccagcctgggtgacaaagtgagaccctgtctcaaaaaaaaaaaaagaagtgggctgggagagagctctgttccctttgagatgagttattaattcttggagccagccagttcttccttaatgcagtggcagttacctaatggtgtcctcagttgtgggcttctatagctctccactcttccggagcctgcggcccagatggcacgacactgccatgacgcagataattgggaactgtgtctgtctcctggtcctaagctcagcacttcctgtcttctctcgaaccctggggctcactcgctttgacctgctgggtgactttggacgcttcaactggctgggcaatttctacattgtgttcctctacaacgcagcctttgcaggcctcaccacactctgtctggtgaagaccttcactgcagctgtgcgggcagagctgatccgggcctttgggctggacagactgccgctgcccgtctccggtttcccccaggcatctaggaagacccagcaccagtgacctccagctgggggtgggaaggaaaaaactggacactgccatctgctgcctaggcctggagggaagcccaaggctacttggacctcaggacctggaatctgagagggtgggtggcagaggggagcagagccatctgcactattgcataatctgagccagagtttgggaccaggacctcctgcttttccatacttaactgtggcctcagcatggggtagggctgggtgactgggtctagcccctgatcccaaatctgtttacacatcaatctgcctcactgctgttctgggccatccccatagccatgtttacatgatttgatgtgcaatagggtggggtaggggcagggaaaggactgggccagggcaggctcgggagatagattgtctcccttgcctctggcccagcagagcctaagcactgtgctatcctggaggggctttggaccacctgaaagaccaaggggatagggaggaggaggcttcagccatcagcaataaagttgatcccagggtttgctttgtttttttaaagtcgacctgtctctgtgtat

SEQ ID NO: 247290 - DNA, 2368 bp, Homo sapiens
actagatctcttaaaaagatggaccctcagcggcgcttcctcgtagcgagcctagtggcgggtgtttgcattgaaacgtgagcgcgacccgaccttaaagagtggggagcaaagggaggacagagccctttaaaacgaggcgggtggtgcctgcccctttaagggcggggcgtccggacgactgtatctgagccccagactgccccgagtttctgtcgcaggctgcgaggaaaggcccctaggctgggtctgggtgcttggcggcggcggcttcctccccgctcgtcctccccgggcccagaggcacctcggcttcagtcatgctgagcagagtatggaagcacctgactacgaagtgctatccgtgcgagaacagctattccacgagaggatccgcgagtgtattatatcaacacttctgtttgcaacactgtacatcctctgccacatcttcctgacccgcttcaagaagcctgctgagttcaccacagtggatgatgaagatgccaccgtcaacaagattgcgctcgagctgtgcacctttaccctggcaattgccctgggtgctgtcctgctcctgcccttctccatcatcagcaatgaggtgctgctctccctgcctcggaactactacatccagtggctcaacggctccctcatccatggcctctggaaccttgtttttctcttctccaacctgtccctcatcttcctcatgccctttgcatatttcttcactgagtctgagggctttgctggctccagaaagggtgtcctgggccgggtctatgagacagtggtgatgttgatgctcctcactctgctggtgctaggtatggtgtgggtggcatcagccattgtggacaagaacaaggccaacagagagtcactctatgacttttgggagtactatctcccctacctctactcatgcatctccttccttggggttctgctgctcctggtgtgtactccactgggtctcgcccgcatgttctccgtcactgggaagctgctagtcaagccccggctgctggaagacctggaggagcagctgtactgctcagcctttgaggaggcagccctgacccgcaggatctgtaatcctacttcctgctggctgcctttagacatggagctgctacacagacaggtcctggctctgcagacacagagggtcctgctggagaagaggcggaaggcttcagcctggcaacggaacctgggctaccccctggctatgctgtgcttgctggtgctgacgggcctgtctgtgctcattgtggccatccacatcctggagctgctcatcgatgaggctgccatgccccgaggcatgcagtcttgtatccttctggaaacccatcattgcctctgttcagcaaacctgtctcctgggactctagaccgagcacttcttggactttttacctaatggtgtcctcagttgtgggcttctatagctctccactcttccggagcctgcggcccagatggcacgacactgccatgacgcagataattgggaactgtgtctgtctcctggtcctaagctcagcacttcctgtcttctctcgaaccctggggctcactcgctttgacctgctgggtgactttggacgcttcaactggctgggcaatttctacattgtgttcctctacaacgcagcctttgcaggcctcaccacactctgtctggtgaagaccttcactgcagctgtgcgggcagagctgatccgggcctttgggctggacagactgccgctgcccgtctccggtttcccccaggcatctaggaagacccagcaccagtgacctccagctgggggtgggaaggaaaaaactggacactgccatctgctgcctaggcctggagggaagcccaaggctacttggacctcaggacctggaatctgagagggtgggtggcagaggggagcagagccatctgcactattgcataatctgagccagagtttgggaccaggacctcctgcttttccatacttaactgtggcctcagcatggggtagggctgggtgactgggtctagcccctgatcccaaatctgtttacacatcaatctgcctcactgctgttctgggccatccccatagccatgtttacatgatttgatgtgcaatagggtggggtaggggcagggaaaggactgggccagggcaggctcgggagatagattgtctcccttgcctctggcccagcagagcctaagcactgtgctatcctggaggggctttggaccacctgaaagaccaaggggatagggaggaggaggcttcagccatcagcaataaagttgatcccagggtttgctttgtttttttaaagtcgacctgtctctgtgtat

SEQ ID NO: 247291 - DNA, 2060 bp, Homo sapiens
actagatctcttaaaaagatggaccctcagcggcgcttcctcgtagcgagcctagtggcgggtgtttgcattgaaacgtgagcgcgacccgaccttaaagagtggggagcaaagggaggacagagccctttaaaacgaggcgggtggtgcctgcccctttaagggcggggcgtccggacgactgtatctgagccccagactgccccgagtttctgtcgcaggctgcgaggaaaggcccctaggctgggtctgggtgcttggcggcggcggcttcctccccgctcgtcctccccgggcccagaggcacctcggcttcagtcatgctgagcagagtatggaagcacctgactacgaagtgctatccgtgcgagaacagctattccacgagaggatccgcgagtgtattatatcaacacttctgtttgcaacactgtacatcctctgccacatcttcctgacccgcttcaagaagcctgctgagttcaccacagtggatgatgaagatgccaccgtcaacaagattgcgctcgagctgtgcacctttaccctggcaattgccctgggtgctgtcctgctcctgcccttctccatcatcagcaatgaggtgctgctctccctgcctcggaactactacatccagtggctcaacggctccctcatccatggcctctggaaccttgtttttctcttctccaacctgtccctcatcttcctcatgccctttgcatatttcttcactgagtctgagggctttgctggctccagaaagggtgtcctgggccgggtctatgagacagtggtgatgttgatgctcctcactctgctggtgctaggtatggtgtgggtggcatcagccattgtggacaagaacaaggccaacagagagtcactctatgacttttgggagtactatctcccctacctctactcatgcatctccttccttggggttctgctgctcctggtgtgtactccactgggtctcgcccgcatgttctccgtcactgggaagctgctagtcaagccccggctgctggaagacctggaggagcagctgtactgctcagcctttgaggaggcagccctgacccgcaggatctgtaatcctacttcctgctggctgcctttagacatggagctgctacacagacaggtcctggctctgcagacacagagggtcctgctggagaagaggcggaaggcttcagcctggcaacggaacctgggctaccccctggctatgctgtgcttgctggtgctgacgggcctgtctgtgctcattgtggccatccacatcctggagctgctcatcgatgaggctgccatgccccgaggcatgcagggtacctccttaggccaggtctccttctccaagctgggctcctttggtgccgtcattcaggttgtactcatcttttacctaatggtgtcctcagttgtgggcttctatagctctccactcttccggagcctgcggcccagatggcacgacactgccatgacgcagataattgggaactgtgtctgtctcctggtcctaagctcagcacttcctgtcttctctcgaaccctggggctcactcgctttgacctgctgggtgactttggacgcttcaactggctgggcaatttctacattgtgttcctctacaacgcagcctttgcaggcctcaccacactctgtctggtgaagaccttcactgcagctgtgcgggcagagctgatccgggcctttgggctggacagactgccgctgcccgtctccggtttcccccaggcatctaggaagacccagcaccagtgacctccagctgggggtgggaaggaaaaaactggacactgccatctgctgcctaggcctggagggaagcccaaggctacttggacctcaggacctggaatctgagaggccagcagagcctaagcactgtgctatcctggaggggctttggaccacctgaaagaccaaggggatagggaggaggaggcttcagccatcagcaataaagttgatcccagggtttgctttgtttttttaaagtcgacctgtctctgtgtat

SEQ ID NO: 247292 - DNA, 1192 bp, Homo sapiens
ggctaggtcgaggccgggtgttaatcggccgagctttagacatggagctgctacacagacaggtcctggctctgcagacacagagggtcctgctggagaagaggcggaaggcttcagcctggcaacggaacctgggctaccccctggctatgctgtgcttgctggtgctgacgggcctgtctgtgctcattgtggccatccacatcctggagctgctcatcgatgaggctgccatgccccgaggcatgcagttacctaatggtgtcctcagttgtgggcttctatagctctccactcttccggagcctgcggcccagatggcacgacactgccatgacgcagataattgggaactgtgtctgtctcctggtcctaagctcagcacttcctgtcttctctcgaaccctggggctcactcgctttgacctgctgggtgactttggacgcttcaactggctgggcaatttctacattgtgttcctctacaacgcagcctttgcaggcctcaccacactctgtctggtgaagaccttcactgcagctgtgcgggcagagctgatccgggcctttgggctggacagactgccgctgcccgtctccggtttcccccaggcatctaggaagacccagcaccagtgacctccagctgggggtgggaaggaaaaaactggacactgccatctgctgcctaggcctggagggaagcccaaggctacttggacctcaggacctggaatctgagagggtgggtggcagaggggagcagagccatctgcactattgcataatctgagccagagtttgggaccaggacctcctgcttttccatacttaactgtggcctcagcatggggtagggctgggtgactgggtctagcccctgatcccaaatctgtttacacatcaatctgcctcactgctgttctgggccatccccatagccatgtttacatgatttgatgtgcaatagggtggggtaggggcagggaaaggactgggccagggcaggctcgggagatagattgtctcccttgcctctggcccagcagagcctaagcactgtgctatcctggaggggctttggaccacctgaaagaccaaggggatagggaggaggaggcttcagccatcagcaataaagttgatcccagggtttgctttgtttttttaaagtcgacctgtctctgtgtat

SEQ ID NO: 247293 - DNA, 1901 bp, Homo sapiens
actagatctcttaaaaagatggaccctcagcggcgcttcctcgtagcgagcctagtggcgggtgtttgcattgaaacgtgagcgcgacccgaccttaaagagtggggagcaaagggaggacagagccctttaaaacgaggcgggtggtgcctgcccctttaagggcggggcgtccggacgactgtatctgagccccagactgccccgagtttctgtcgcaggctgcgaggaaaggcccctaggctgggtctgggtgcttggcggcggcggcttcctccccgctcgtcctccccgggcccagaggcacctcggcttcagtcatgctgagcagagtatggaagcacctgactacgaagtgctatccgtgcgagaacagctattccacgagaggatccgcgagtgtattatatcaacacttctgtttgcaacactgtacatcctctgccacatcttcctgacccgcttcaagaagcctgctgagttcaccacagtggatgatgaagatgccaccgtcaacaagattgcgctcgagctgtgcacctttaccctggcaattgccctgggtgctgtcctgctcctgcccttctccatcatcagcaatgaggtgctgctctccctgcctcggaactactacatccagtggctcaacggctccctcatccatggcctctggaaccttgtttttctcttctccaacctgtccctcatcttcctcatgccctttgcatatttcttcactgagtctgagggctttgctggctccagaaagggtgtcctgggccgggtctatgagacagtggtgatgttgatgctcctcactctgctggtgctaggtatggtgtgggtggcatcagccattgtggacaagaacaaggccaacagagagtcactctatgacttttgggagtactatctcccctacctctactcatgcatctccttccttggggttctgctgctcctggtgtgtactccactgggtctcgcccgcatgttctccgtcactgggaagctgctagtcaagccccggctgctggaagacctggaggagcagctgtactgctcagcctttgaggaggcagccctgacccgcaggatctgtaatcctacttcctgctggctgcctttagacatggagctgctacacagacaggtcctggctctgcagacacagagggtcctgctggagaagaggcggaaggcttcagcctggcaacggaacctgggctaccccctggctatgctgtgcttgctggtgctgacgggcctgtctgtgctcattgtggccatccacatcctggagctgctcatcgatgaggctgccatgccccgaggcatgcagggtacctccttaggccaggtctccttctccaagctgggctcctttggtgccgtcattcaggttgtactcatcttttacctaatggtgtcctcagttgtgggcttctatagctctccactcttccggagcctgcggcccagatggcacgacactgccatgacgcagataattgggaactgtgtctgtctcctggtcctaagctcagcacttcctgtcttctctcgaaccctggggctcactcgctttgacctgctgggtgactttggacgcttcaactggctgggcaatttctacattgtgttcctctacaacgcagcctttgcaggcctcaccacactctggcgggggaaaaaccttaattggacttggccgggcaaaaacttaaccgggcccttgggcctggaaaaaaaagccgcttgcccgtttcccggtttcccccagggtttttgggaaaaccccgcccccggggccccccatttgggggggggaaagaaaaaaacggaccctgcccattggttccaaagcccgggaggaaaaccccagggttcttggaccccaa

SEQ ID NO: 247294 - DNA, 1942 bp, Homo sapiens
actagatctcttaaaaagatggaccctcagcggcgcttcctcgtagcgagcctagtggcgggtgtttgcattgaaacgtgagcgcgacccgaccttaaagagtggggagcaaagggaggacagagccctttaaaacgaggcgggtggtgcctgcccctttaagggcggggcgtccggacgactgtatctgagccccagactgccccgagtttctgtcgcaggctgcgaggaaaggcccctaggctgggtctgggtgcttggcggcggcggcttcctccccgctcgtcctccccgggcccagaggcacctcggcttcagtcatgctgagcagagtatggaagcacctgactacgaagtgctatccgtgcgagaacagctattccacgagaggatccgcgagtgtattatatcaacacttctgtttgcaacactgtacatcctctgccacatcttcctgacccgcttcaagaagcctgctgagttcaccacagtggatgatgaagatgccaccgtcaacaagattgcgctcgagctgtgcacctttaccctggcaattgccctgggtgctgtcctgctcctgcccttctccatcatcagcaatgaggtgctgctctccctgcctcggaactactacatccagtggctcaacggctccctcatccatggcctctggaaccttgtttttctcttctccaacctgtccctcatcttcctcatgccctttgcatatttcttcactgagtctgagggctttgctggctccagaaagggtgtcctgggccgggtctatgagacagtggtgatgttgatgctcctcactctgctggtgctaggtatggtgtgggtggcatcagccattgtggacaagaacaaggccaacagagagtcactctatgacttttgggagtactatctcccctacctctactcatgcatctccttccttggggttctgctgctcctggtgtgtactccactgggtctcgcccgcatgttctccgtcactgggaagctgctagtcaagccccggctgctggaagacctggaggagcagctgtactgctcagcctttgaggaggcagccctgacccgcaggatctgtaatcctacttcctgctggctgcctttagacatggagctgctacacagacaggtcctggctctgcagacacagagggtcctgctggagaagaggcggaaggcttcagcctggcaacggaacctgggctaccccctggctatgctgtgcttgctggtgctgacgggcctgtctgtgctcattgtggccatccacatcctggagctgctcatcgatgaggctgccatgccccgaggcatgcagggtacctccttaggccaggtctccttctccaagctgggctcctttggtgccgtcattcaggttgtactcatcttttacctaatggtgtcctcagttgtgggcttctatagctctccactcttccggagcctgcggcccagatggcacgacactgccatgacgcaggtagctgggagggagtaagggaagctcccggggggtgtggatgggcactaggtgcctgcagctcttccaccctcacctctcctttccctgcttccacccagataattgggaactgtgtctgtctcctggtcctaagctcagcacttcctgtcttctctcgaaccctgggtaagtattgaaaggaggagataaaggaattggatttttttgagtacttactgatgcaaagcaggcactttatatacataatttctctaattcccacaacaaacccatgagtaggtattatccgcattatacagatgaggaaagcaaggctctgtaaagtgcctacactgagcttcagggtcaaagtacatacttttacatttgctacatcccactgcctctcactattacttgaactttttggtacagagagcacttttctaaatc

SEQ ID NO: 247295 - DNA, 1986 bp, Homo sapiens
actagatctcttaaaaagatggaccctcagcggcgcttcctcgtagcgagcctagtggcgggtgtttgcattgaaacgtgagcgcgacccgaccttaaagagtggggagcaaagggaggacagagccctttaaaacgaggcgggtggtgcctgcccctttaagggcggggcgtccggacgactgtatctgagccccagactgccccgagtttctgtcgcaggctgcgaggaaaggcccctaggctgggtctgggtgcttggcggcggcggcttcctccccgctcgtcctccccgggcccagaggcacctcggcttcagtcatgctgagcagagtatggaagcacctgactacgaagtgctatccgtgcgagaacagctattccacgagaggatccgcgagtgtattatatcaacacttctgtttgcaacactgtacatcctctgccacatcttcctgacccgcttcaagaagcctgctgagttcaccacagtggatgatgaagatgccaccgtcaacaagattgcgctcgagctgtgcacctttaccctggcaattgccctgggtgctgtcctgctcctgcccttctccatcatcagcaatgaggtgctgctctccctgcctcggaactactacatccagtggctcaacggctccctcatccatggcctctggaaccttgtttttctcttctccaacctgtccctcatcttcctcatgccctttgcatatttcttcactgagtctgagggctttgctggctccagaaagggtgtcctgggccgggtctatgagacagtggtgatgttgatgctcctcactctgctggtgctaggtatggtgtgggtggcatcagccattgtggacaagaacaaggccaacagagagtcactctatgacttttgggagtactatctcccctacctctactcatgcatctccttccttggggttctgctgctcctggtgtgtactccactgggtctcgcccgcatgttctccgtcactgggaagctgctagtcaagccccggctgctggaagacctggaggagcagctgtactgctcagcctttgaggaggcagccctgacccgcaggatctgtaatcctacttcctgctggctgcctttagacatggagctgctacacagacaggtcctggctctgcagacacagagggtcctgctggagaagaggcggaaggcttcagcctggcaacggaacctgggctaccccctggctatgctgtgcttgctggtgctgacgggcctgtctgtgctcattgtggccatccacatcctggagctgctcatcgatgaggctgccatgccccgaggcatgcagttacctaatggtgtcctcagttgtgggcttctatagctctccactcttccggagcctgcggcccagatggcacgacactgccatgacgcagataattgggaactgtgtctgtctcctggtcctaagctcagcacttcctgtcttctctcgaaccctggggctcactcgctttgacctgctgggtgactttggacgcttcaactggctgggcaatttctacattgtgttcctctacaacgcagcctttgcaggcctcaccacactctgtctggtgaagaccttcactgcagctgtgcgggcagagctgatccgggcctttgggctggacagactgccgctgcccgtctccggtttcccccaggcatctaggaagacccagcaccagtgacctccagctgggggtgggaaggaaaaaactggacactgccatctgctgcctaggcctggagggaagcccaaggctacttggacctcaggacctggaatctgagaggccagcagagcctaagcactgtgctatcctggaggggctttggaccacctgaaagaccaaggggatagggaggaggaggcttcagccatcagcaataaagttgatcccagggtttgctttgtttttttaaagtcgacctgtctctgtgtat

SEQ ID NO: 247296 - DNA, 1332 bp, Homo sapiens
actagatctcttaaaaagatggaccctcagcggcgcttcctcgtagcgagcctagtggcgggtgtttgcattgaaacgtgagcgcgacccgaccttaaagagtggggagcaaagggaggacagagccctttaaaacgaggcgggtggtgcctgcccctttaagggcggggcgtccggacgactgtatctgagccccagactgccccgagtttctgtcgcaggctgcgaggaaaggcccctaggctgggtctgggtgcttggcggcggcggcttcctccccgctcgtcctccccgggcccagaggcacctcggcttcagtcatgctgagcagagtatggaagcacctgactacgaagtgctatccgtgcgagaacagctattccacgagaggatccgcgagtgtattatatcaacacttctgtttgcaacactgtacatcctctgccacatcttcctgacccgcttcaagaagcctgctgagttcaccacagtggatgatgaagatgccaccgtcaacaagattgcgctcgagctgtgcacctttaccctggcaattgccctgggtgctgtcctgctcctgcccttctccatcatcagcaatgaggtgctgctctccctgcctcggaactactacatccagtggctcaacggctccctcatccatggcctctggaaccttgtttttctcttctccaacctgtccctcatcttcctcatgccctttgcatatttcttcactgagtctgagggctttgctggctccagaaagggtgtcctgggccgggtctatgagacagtggtgatgttgatgctcctcactctgctggtgctaggtatggtgtgggtggcatcagccattgtggacaagaacaaggccaacagagagtcactctatgacttttgggagtactatctcccctacctctactcatgcatctccttccttggggttctgctgctcctggtgtgtactccactgggtctcgcccgcatgttctccgtcactgggaagctgctagtcaagccccggctgctggaagacctggaggagcagctgtactgctcagcctttgaggaggcagccctgacccgcaggatctgtaatcctacttcctgctggctgcctttagacatggagctgctacacagacaggtcctggctctgcagacacagagggtcctgctggagaagaggcggaaggcttcagcctggcaacggaacctgggctaccccctggctatgctgtgcttgctggtgctgacgggcctgtcgtgctcatgtgtgccatccacatcagagagagcatgcaggtaccgagctcgattaagtac

SEQ ID NO: 247297 - DNA, 1562 bp, Homo sapiens
actagatctcttaaaaagatggaccctcagcggcgcttcctcgtagcgagcctagtggcgggtgtttgcattgaaacgtgagcgcgacccgaccttaaagagtggggagcaaagggaggacagagccctttaaaacgaggcgggtggtgcctgcccctttaagggcggggcgtccggacgactgtatctgagccccagactgccccgagtttctgtcgcaggctgcgaggaaaggcccctaggctgggtctgggtgcttggcggcggcggcttcctccccgctcgtcctccccgggcccagaggcacctcggcttcagtcatgctgagcagagtatggaagcacctgactacgaagtgctatccgtgcgagaacagctattccacgagaggatccgcgagtgtattatatcaacacttctgtttgcaacactgtacatcctctgccacatcttcctgacccgcttcaagaagcctgctgagttcaccacagtggatgatgaagatgccaccgtcaacaagattgcgctcgagctgtgcacctttaccctggcaattgccctgggtgctgtcctgctcctgcccttctccatcatcagcaatgaggtgctgctctccctgcctcggaactactacatccagtggctcaacggctccctcatccatggcctctggaaccttgtttttctcttctccaacctgtccctcatcttcctcatgccctttgcatatttcttcactgagtctgagggctttgctggctccagaaagggtgtcctgggccgggtctatgagacagtggtgatgttgatgctcctcactctgctggtgctaggtatggtgtgggtggcatcagccattgtggacaagaacaaggccaacagagagtcactctatgacttttgggagtactatctcccctacctctactcatgcatctccttccttggggttctgctgctcctggtgtgtactccactgggtctcgcccgcatgttctccgtcactgggaagctgctagtcaagccccggctgctggaagacctggaggagcagctgtactgctcagcctttgaggaggcagccctgacccgcaggatctgtaatcctacttcctgctggctgcctttagacatggagctgctacacagacaggtcctggctctgcagacacagagggtcctgctgggtatgtggcttcgtagggcttgggatacctgggtttccccaaggagagtagcccctggttccaggtgcttgctgacagcctcccatccctgcacagagaagaggcggaaggcttcagcctggcaacggaacctgggctaccccctggctatgctgtgcttgctggtgctgacggtaggtataccagccctagaggtgaggagtggaccctcagtacttgaggccttctcagggagaggggaggcaatgcagggacctggttatcatcagtaatagtggttgcttctcactgagtgcctacttttatgtcctgcctgtggtgagcacaaatgttgagcacatcaatccccattttgtagacgaagagacagagttg

SEQ ID NO: 247298 - DNA, 1219 bp, Homo sapiens
actagatctcttaaaaagatggaccctcagcggcgcttcctcgtagcgagcctagtggcgggtgtttgcattgaaacgtgagcgcgacccgaccttaaagagtggggagcaaagggaggacagagccctttaaaacgaggcgggtggtgcctgcccctttaagggcggggcgtccggacgactgtatctgagccccagactgccccgagtttctgtcgcaggctgcgaggaaaggcccctaggctgggtctgggtgcttggcggcggcggcttcctccccgctcgtcctccccgggcccagaggcacctcggcttcagtcatgctgagcagagtatggaagcacctgactacgaagtgctatccgtgcgagaacagctattccacgagaggatccgcgagtgtattatatcaacacttctgtttgcaacactgtacatcctctgccacatcttcctgacccgcttcaagaagcctgctgagttcaccacagtttcatcctacaaaatgggcgtaacaatgtctacctactccattgtgtggaccaaaggagatggttaatgtgaaagccctttgtgaacctgaagtgagcaactgctggatgaatgtcattacgggcacaggctctgtgtcatctcctctcctagtgcttccacagccaggaccagagacctccctgatgactggggaacctgtggatgatgaagatgccaccgtcaacaagattgcgctcgagctgtgcacctttaccctggcaattgccctgggtgctgtcctgctcctgcccttctccatcatcagcaatgaggtgctgctctccctgcctcggaactactacatccagtggctcaacggctccctcatccatggcctctggaaccttgtttttctcttctccaacctgtccctcatctcccaaatctgtttacacatcaatctgcctcactgctgttctgggccatccccatagccatgtttacatgatttgatgtgcaatagggtggggtaggggcagggaaaggactgggccagggcaggctcgggagatagattgtctcccttgcctctggcccagcagagcctaagcactgtgctatcctggaggggctttggaccacctgaaagaccaaggggatagggaggaggaggcttcagccatcagcaataaagttgatcccagggtttgctttgtttttttaaagtcgacctgtctctgtgtat

SEQ ID NO: 247299 - DNA, 1067 bp, Homo sapiens
actagatctcttaaaaagatggaccctcagcggcgcttcctcgtagcgagcctagtggcgggtgtttgcattgaaacgtgagcgcgacccgaccttaaagagtggggagcaaagggaggacagagccctttaaaacgaggcgggtggtgcctgcccctttaagggcggggcgtccggacgactgtatctgagccccagactgccccgagtttctgtcgcaggctgcgaggaaaggcccctaggctgggtctgggtgcttggcggcggcggcttcctccccgctcgtcctccccgggcccagaggcacctcggcttcagtcatgctgagcagagtatggaagcacctgactacgaagtgctatccgtgcgagaacagctattccacgagaggatccgcgagtgtattatatcaacacttctgtttgcaacactgtacatcctctgccacatcttcctgacccgcttcaagaagcctgctgagttcaccacagtggatgatgaagatgccaccgtcaacaagattgcgctcgagctgtgcacctttaccctggcaattgccctgggtgctgtcctgctcctgcccttctccatcatcagcaatgaggtgctgctctccctgcctcggaactactacatccagtggctcaacggctccctcatccatggcctctggaaccttgtttttctcttctccaacctgtccctcatcttcctcatgccctttgcatatttcttcactgagtctgagggctttgctggctccagaaaggtaagtaggggatatgtatccaggcaggaaacggaattccacacacatggttcagctgaagagattttaataaagaggctatttgcagaggtttagttaacggaagtttgaggctctagtgacagtaggaagtcattaccacccttaggcctgtagggacaaagggaggaaatggtttctagaacccactaatagctgaagccagggatgtgaagctgcccagagaggagctgttgtcttagtgtcataatcactgccaaaaccatggtggcagacgtgggaggactcacaggaaaca

SEQ ID NO: 247300 - DNA, 1062 bp, Homo sapiens
actagatctcttaaaaagatggaccctcagcggcgcttcctcgtagcgagcctagtggcgggtgtttgcattgaaacgtgagcgcgacccgaccttaaagagtggggagcaaagggaggacagagccctttaaaacgaggcgggtggtgcctgcccctttaagggcggggcgtccggacgactgtatctgagccccagactgccccgagtttctgtcgcaggctgcgaggaaaggcccctaggctgggtctgggtgcttggcggcggcggcttcctccccgctcgtcctccccgggcccagaggcacctcggcttcagtcatgctgagcagagtatggaagcacctgactacgaagtgctatccgtgcgagaacagctattccacgagaggatccgcgagtgtattatatcaacacttctgtttgcaacactgtacatcctctgccacatcttcctgacccgcttcaagaagcctgctgagttcaccacagtttcatcctacaaaatgggcgtaacaatgtctacctactccattgtgtggaccaaaggagatggttaatgtgaaagccctttgtgaacctgaagtgagcaactgctggatgaatgtcattacgggcacaggctctgtgtcatctcctctcctagtgcttccacagccaggaccagagacctccctgatgactggggaacctgtggatgatgaagatgccaccgtcaacaagattgcgctcgagctgtgcacctttaccctggcaattgccctgggtgctgtcctgctcctgcccttctccatcatcagcaatgaggtgctgctctccctgcctcggaactactacatccagtggctcaacggctccctcatccatggcctctggaaccttgtttttctcttctccaacctgtccctcatctccagcagagcctaagcactgtgctatcctggaggggctttggaccacctgaaagaccaaggggatagggaggaggaggcttcagccatcagcaataaagttgatcccagggtttgctttgtttttttaaagtcgacctgtctctgtgtat

SEQ ID NO: 247301 - DNA, 442 bp, Homo sapiens
agtgagcaactgctggatgaatgtcattacgggcacaggctctgtgtcatctcctctcctagtgcttccacagccaggaccagagacctccctgatgactggggaacctggtgatggtggcctttctctttatggggagcctgagtatgctcagatcgcagctttccttccctagacattgtgtaattgggggtgggggcacacttgccccagttcctagctccagcctttcctcctcttaggatggctcaggatgagtcccccctcaacaaggcagctacccaagagtaattcccctggggactttctgtgtgaatctccccttccccctcctctcttttccctttcctggacccagccactgatgtaaccaacctcacagactagttgtttattatattaatagtttgagcatataaagaggaacttgtgatgggagaga

SEQ ID NO: 247302 - DNA, 340 bp, Homo sapiens
gtctggcaagtgactggctcttgtccctacagtgtgtactccactgggtctcgcccgcatgttctccgtcactgggaagctgctagtcaagccccgggtatgtggtattccttgctctttgatcctgcagggtgagcttcctgcagagctggaaccaaacaatgaaacaaccctatggttgtgtagtacacaacttgcagagagctacagcctttgttggttcctgtattctgtacccctatcatgcagagctggtcactagacatgcagggcagaatacagggcaattgggagggactgagcaaagctgcgggccacagggtggtgaatgagggtctgg

SEQ ID NO: 247303 - DNA, 814 bp, Homo sapiens
caacctatcagttgcagtgttgaaatgtggccaccaggaggcagcagaaagttgggctggtagcagaaaagggcctggggagcccacctctcatcctggcctttgtgcttcagggctcactcgctttgacctgctgggtgactttggacgcttcaactggctgggcaatttctacattgtgttcctctacaacgcagcctttgcaggcctcaccacactctgtctggtgaagaccttcactgcagctgtgcgggcagagctgatccgggcctttggtgagagggagtgagggtgcaggctagtggggggtggtaatcatctaggacactctggaacatggatcaccccagcaggggagagggtgtgcttcctgctttgtgggtaacgtacctcatccacacattctgtggcttggctgcctggtccctaacggactggacctttgacttgcttttgactgcccatctcctcttctccagggctggacagactgccgctgcccgtctccggtttcccccaggcatctaggaagacccagcaccagtgacctccagctgggggtgggaaggaaaaaactggacactgccatctgctgcctaggcctggagggaagcccaaggctacttggacctcaggacctggaatctgagagggtgggtggcagaggggagcagagccatctgcactattgcataatctgagccagagtttgggaccaggacctcctgcttttccatacttaactgtggcctcagcatggggtagggctgggtgactgggtctagcccctgatcccaaatctgtttacacatca

SEQ ID NO: 247304 - DNA, 507 bp, Homo sapiens
tactttattcgagtcacagaagtagggactggagagttgaagccaagtctgtctggctgcaaagcactctacggtattgtcttcctgtcacctgtttattttagtaaagacaaggaatgattgttagattttatcccaagtgtgtcactgtcaaaccctggcttatttctattcttgagttcatccactcaagaatacctgatatgttccaggcagtgtgctaggtctcgggattgaaaaggaaagtgagagatgggatcgggagcagcaaagaaggggcagaaggtcgggttcatgggtaaactgcaggcaggttgttaagtatgttgcccctttgtgcggatttaccttttatattcaaagagaagaaatggcttacataggttggctagtgagaagcactcaagggaagcaagcccctaccctgttctggccttgttcacccagaaacgctatttcctgtgttatggttctggccaagatttagctgaacagttatgctgctta

SEQ ID NO: 247305 - DNA, 711 bp, Homo sapiens
catcaatgcaatcttaacaaaccaagcatgttttctgaaccaacccatgttacaagctctttaattcacagacatttcttcagagtttttgggaaaattctattttataatttcaaagaaaataagaaaacaaaggaaccctaacagttttattggggacagagaaaaagaaagcaaaacaaacaaggtttagacaagactgacttcaattagctgtagacaggatgaacaagctacagaggttttggtataagaggtaaaggagaaaatggatatcattagccagcatcatactgctgggtttcaacttatcaccagagaaaatactaccacaaccttttatatatacatcaaatgtattacaggtcatcttgacaagaatatagcatttcagagttgacagtggtgcttgattaattcaaaaacatgaacaaattttaaaagggagacgataaattcatgtaaagatactgaataaccagatagaacttatttctcttgagacagaagggataactaaaattagtgtcaataattaaaaagtgaatgactaataacagtgtaacaaatcttttggcaagtcaggtggacgcaagtcctctttcaacaaaattgaagacagacctaattcagttgttagctgataggataaaaacattttgatgctaaagaactatgtaatttaacatataatttagaaacagctaagag

SEQ ID NO: 247306 - DNA, 319 bp, Homo sapiens
caaattaaaattttaaaacaaagcctgtttaaaagagctggatagctctttggaaatagttaagcagcaggatattaaaagtttgaatactggttcatgtttattaaaatcgcaagtaaagctataatcaaaaccaaaaactgctgcttggttcggcttatgacagggagaattgagtccacattgcatagcaccaaaacttcttgtcctaatcacttttaattactatttccctacttttaaatttagcttccctcaaggcttcagtagaaaaatgtgaaatccacagaagatttaaaactgggctcttccaaacact

SEQ ID NO: 247307 - DNA, 465 bp, Homo sapiens
tctggactcacaggtgcttttccctctgccagggatgctcgttcccaccttgcctggcggaggcctcaccgtccttcagacactcctgtgtctcttgcctggagaggccaccctgtgtggccactgcctgcagacctgagcatctcccccaccagactcagtggggcgggcctggtgttgcccactcctccttccccagtgccaagcatgtgcctgcctggaatgttgtaggtgctcagtaaacgcttgttgactgactgcgtgagagggaacagattgctcaaatgcagtgcgtcctggattttgggaacaggcactattctagtgccaagagcacatgagacggccaactctttcccgggcacgactcttgcagggcactgagcttcagctacaggagctgttgaaaatcatcgtttgttaatttcctggggtttctgaaacaaattaccacacgttcaatgg

SEQ ID NO: 247308 - DNA, 395 bp, Homo sapiens
agaacgcccaatgcaaaatcaagtatcttctataaactaggttggggaaatctgaatagccacacaaaggattttacaagtggattatttatcaccaaactccagtgtcagatgtgaaacgataaaaatagcagaagagatcacaaggaagaagctccatggcgtccgtgtgtgcaatgatggtctcaaagtgactgcaagaacacagtaaacaccatcaaaaatagagaatggaatcatatcaaactaaagtgcttcaccacaccatagaaaactcaacatacagaaggggcatcctacaggatgggagcaatgattggatcaccatacatctgttcatgggggaatagtcacagtacataaggaactcccaacaactcaatagcatgaaaaca

SEQ ID NO: 247309 - DNA, 476 bp, Homo sapiens
gtcgcccaggctggagtgtaatagtgcagtcttggctcactgcaacctctgcctcctgggctcaagtgattcttctgcctcaccctccccagtagatgggattacaggtgcactcaactctgcttggctaatttttgtatttttaatagagacagggtttcaccatgttgtccaagttggtctcgaactcttgacctcaaatgatccacccgtctcagcctcccaaaatgctgagattatagcatgagacaccgtgcctagccaagatcttttttgactaatagaatcatgacagcttaaccaatatttaacactgatcctttctctaagactactttgtgcgggttcctcagagattctcctactcttttcattcttgttaagcaagcagtctgaattcagctggttgcttctttctcagcccctagggatctaggctccacttaaaggttttctctcctgaggttccatttttt

SEQ ID NO: 247310 - DNA, 393 bp, Homo sapiens
caatttgtatagttaaaatagaaagaaaaagaaacctaccacttcggtgtaggatggagtaacctacagcaaatgaaagatcctgccaagaaaaactggaaaatctagattacggtaatttaaaaagaaaaaaaatattttaaatgcatcagagggctgggcgaagcaaaaaggattagaaagggccccactctggagagaggagaactgcagagaggtgagttgctaactagcagccacttatcccctgggggcccctcatcctgccactgggcagaggaaaagtcacttcctgggatgaccgcatctaaggccagctttcctcttttattcttcatcacaactgtctcagggcttgcactgcaatttgtcattaaatgtcagcttcattgc

SEQ ID NO: 247311 - DNA, 491 bp, Homo sapiens
ttctggccctctaatcatatgcttggtctttctggaatggccagcccatcccttgaaatgctctaagggcccaccctctgtcacctcattagtgcagactcagatgtggtcagaagtgactcttcacagataacaaaagacactcctgtcacccagaacattctaagagttttcggagttctgtgccaggaacaagggcaaaacccagatatattctttctaccacatccatgatttagataaaacttgggttcttgcaggaagtttctgaggatattaagatgttcatgaccatcctggctaacacggtgaaaccccgtctctactaaaaatacaaaaaattagctgggcgaggtggtgggcgcctgtagtcccagctactcgggaggctgaggcaggagagtggcatgaacccggggggcggagcttgcagtgagcagagatcacgccactgcactccaacccgggcaacagagcgagactctgtctca

SEQ ID NO: 247312 - DNA, 398 bp, Homo sapiens
aaaaagagacagaaagtttcctgtgtgtacatgtccaaaaaaaaggtacaacaaagcagaaaaacccttctgagggtgcataataaacaaaggactattttagggttctaagttgcagttggagtgtatgtataattgagtggttgggtttgcatatttaaaaaataaaaagtatttttagtagagatggggtttcaccattttggccaggctgatcttgaactcctgacctcaaatgatccacctgccaatcccagctactcgggaggctgaggcaggagaatctcttgaatccaaaagacagaagttgcggagagccaagatcgcaccacggcattccagcctgagtgacagagtgagactctggctcaaaatgaatgaatgaatgggataatgtt

SEQ ID NO: 247313 - DNA, 262 bp, Homo sapiens
agaggtctttttttttggaaaagagttgtgcatattatcttgtgatagtatttagttttagagttaaaaattttcttggaaggcaaggaactattatataatgctgtagcatttactttttgttgcttgttgtttttaaattccccacatttccttagaagacataagttgctttacaaattaatgaaacacacacacatacacacaaacacaataaaagacctggaacgtttcataacaatctgttacccttgttaagtat

SEQ ID NO: 247314 - DNA, 151 bp, Homo sapiens
ccagagaggccatcccagccccactagccctattgagcagacaggtgacagtagccatgcgagtgactcctggatggaccagcagaaggcctgcccctgctggcaccctacagattcataagcaataataaggcgttgtttttagttgcta

SEQ ID NO: 247315 - DNA, 383 bp, Homo sapiens
agttgatacactctgttgtgcagccatcactactacctagttccagaactttttcatgagcccgaaaggaaaccctgtgcctgttaaactgtcactgtcccctcactttcccctcctccaacgctggcaaatgataatctgctttctgtctttatgaatttacttattctgaatatttcataaagacagattgacataatatgtggccttttgtgtctggcttctttcatttagcatgtttttgagtttcatctatgttgtagcatgtatcagtatttcattcctttttatggctgagtaatgttccactgtatggatatacttagatctagttttaaaatgtattgtaaaaccataaatagaacaagtttacaaaaactgag

SEQ ID NO: 247316 - DNA, 563 bp, Homo sapiens
gggcactcagacatcatgagttggtccttgcacccccggaatttaattctctacttctatgctcttttatttctctcttcaacatgtgtagcatatgttgctaccagagacaactgctgcatcttagatgaaagattcggtagttattgtccaactacctgtggcattgcagatttcctgtctacttatcaaaccaaagtagacaaggatctacagtctttggaagacatcttacatcaagttgaaaacaaaacatcagaagtcaaacagctgataaaagcaatccaactcacttataatcctgatgaatcatcaaaaccaaatatgatagacgctgctactttgaagtccaggaaaatgttagaagaaattatgaaatatgaagcatcgattttaacacatgactcaagtattcgatatttgcaggaaatatataattcaaataatcaaaagattgttaagctgagtggagaaggaaacagagtcttgtgaatcccctctgcaaggaacacctcatgacacagggaaagcttacaatgtagtggcaaatttttaaaaataaa

SEQ ID NO: 247317 - DNA, 227 bp, Homo sapiens
tctactttgatgggatctgcacatggaaaggttgatatttgacctaatgttgaacccaacatgactataaatcaaatcagacacaacactaacttccctgtggcactcttttgtgcatatacatgctcaggaaaatcagaggattctgggaatgatgcagaagcaacccacagaatcatcgagagcatacaggaactcagcctccacaattacgtcctttaaaaaaa

SEQ ID NO: 247318 - DNA, 621 bp, Homo sapiens
cataatgtgagcagtggggagtggctgtaaatacagatgaagcttcccttttctgtaaatacagacgaggcttccctcgctcacagctgcttacctcctgctgtgtggcctggttcctaacatgccatggacccctacaggtctgtgacctgggggttggggacccctgatttaaagcatttctttacagtaaaagtaatatataccaattttttttaaagggtagtgtacaggaagatgtaaaagcacctgtaattctacctgagaactactacttttttcttttttttttttctgaggcaggagaatggcgtgaacccgggaagcggagcttgcagtgagccgagattgcgccactgcagtccgcagtccggcctgggccgacagagcgagactccgtctcaaaaaaaaaaaattaaaaaaaatccaaaaattagctgggtgtgatggtgcacatgtttaatggcccaaggattgcttaaacccaggaggtggaggttgcagtgagctgtgattgcgccactgcactctagccctgtgctacagtgagagtctggctcaaaaaaataaatatatttaaaaaaatgcggcccaaatttcagctcacttggccaaattcgt

SEQ ID NO: 247319 - DNA, 412 bp, Homo sapiens
cttaattatatggatatattgctgggaataaaaaaaatttttcaaagtaaacatcctaataacctaccagaggggtttttggtggtggtgtttgccttttaatattatggcaaagttatacgtaaggagacttattacaagtctatttgggtttttgtgttcattttacttattctgaaatggttttttggctgctataatgttatacatacatacagtagtagtatgctttcagtagcatcatgtttttaaatctttgctattaatatactcaaataaccttaaagcaggtttataaaatcattctttgttcattttctacttactggtaattatcacatccttaaattttgaaacattagaatcttaccttaattacaagtaaactgccccctggtggcaatttttctga

SEQ ID NO: 247320 - DNA, 492 bp, Homo sapiens
gagacggagtctcgccctgtcgcccaggctggagtgcagtggcacgatctcggctcacggcaagctccgcctcccgggttcacgccattctcctgcctcagcctcgcgagtagctgggactacaggcgcccgccaccacgcctggctaattttttgtatttttagtagagacggggtttcccgtgttagccaggatggtctcgatctcctgacctcgtgatccacccgcctcggcctcccaaagtgctgggattacaggcgtgagccaccgcgcccggccggtattgactgttttcaagtaaaacagtcatgctttatgagctagagagtatttgctcttcttcctttgaaaagataacaatgttttctcttatacttaaagctgagaaactgagttattcctttattttcattagattataccaatcaattaagaaagttcagtaaaaatctagctttaattttcctgaaacctcttcttagaaaattttt

SEQ ID NO: 247321 - DNA, 374 bp, Homo sapiens
atatgtccaaactcttagaaattaacacacttctaaataatccatgtgttgaggaattctcaatggaagttagcaaacgttttgtactaaatgaaaatacaacacatcagatttgtgggatgtggttgaagcaatgcatgagggaaatttctagcattacctgcatatattagaaaagagggaaataataatgtaagcacctaccttaagaaactagagtaagaaaagtaaaataaaaccaaataagtagaaggaagaaaataataaaagtagaaattgatgaagttgaaagcggagaaaaaaatagagaaaatcaatgaaacaaaaagctgattctgtgaaaagaaaaataaaattgaccaacaagaatgaca

SEQ ID NO: 247322 - DNA, 434 bp, Homo sapiens
gagaccctagacaagttacttagtgcctcagcgtttgctttctttcttctgtaacattgacatcgtaacacattgttggtgttactgtagttattaagatgatgcacagggccttgcacatgcgagaggctcactgaatattatccctcttctctcctgctacgtttggaactgcccagccctccaagctgggtgcattgtttagaaatgaatctttgcaggctgactggttgaatgtcttaccattgtgcctcctatccctagtgtcactccctgttctgtgagatggatgagatgaattccctgctgcctagaacagtagaacttctcactgataaaagacccaggccttaccctaagggaattctaaaaagtcgtggagacagaaagaggctgttaggtgttgaggggtggggaggtggggaaggatattg

SEQ ID NO: 247323 - DNA, 495 bp, Homo sapiens
taattgcatatgccttagagtgagttttaaaagtgtaaatgttttgtgtgtaaaagcattaaaaactagtttcaacagcagtaaatacatttttcctttgtgaaaatgaagacccttacagtttaaccataaacttaaaatagctaatctaaaaacagacatgttactttactttttagtgagaaacaccaccaccaaatagaaacaccaccaccaaaaactgctttgggtattggatatttatgtgggttttttgtttgtctgttttttgagagaaggacttgccatatggtaggctggtctcaaactcctgggctcaggtgatcctcctgcctcaggcttctgagtagctgggattaaaagtgcacaccactgcactgggctaggatctttatgtttttatctcactttagaggatataggaaaaaagatatttggactacaaaaagggaatattgcagtaatataattaatctgtaattaagtaattcctta

SEQ ID NO: 247324 - DNA, 584 bp, Homo sapiens
  misc_feature (389)..(389): n is a, c, g, or t
cctgtctcttctttcttcctttctcttgccctctctcttactctcattttttttccggtctctaccttttaataagatgaattcttttaaaatcattcaattatttaaattttttatttaaatataatgccttggctttctgtcttcttaagaaaaggatgattgcattctctctttaaaaaaacagtattattcatttttttttccttttattgatttatttcctccccatgagccagtggtccttacaaatttcctacagggaaatttctgggctcgaaagctggtctgtaaactggccagggtggtgaggtgtctcttgtacctggaaaacagctgactgctgtggaaggggtgtcgctgtagagtggagtgggaggcgacagggncagttatctgttcaggcagtgtcatctcctgggtgggtcctttaggagttctccacctcactcaaagcctggaaccatgaagtctcctgtctcaaaaatgtccctgattatgaaatcattctgtgttcagagctgtctctaaaaagaaaagtgaaaaaaaaaaaagtcgacgcggccgcgaatttagtagtagta

SEQ ID NO: 247325 - DNA, 363 bp, Homo sapiens
cctcccaagtagctgggactacaggcgcccaccaccacgcccagctaatttttttgtatttttagtagagacggggtttcaccatgttagccaggatggtctcgatctcctgaccttgtgatccacccaccttggcctcccaaagtgctgggattacaggtgtgagccaccatgcccggctgagaatagattttttaataccagaaaaatatttgactttttcttgtaattattgcttctaataatttttaaatatgcagatatttcagaccctttacattaatcattaaaacaaacacattcctcacataagagacaaaaggtggacagttagaggaatattcccctgctccatttcttcca

SEQ ID NO: 247326 - DNA, 2021 bp, Homo sapiens
atgggcaaccagaacgggaacccaacaggcactttaggtgcttggggaaacttgctgccacaagagagcacagaaccacaaacgtccacttctcagaatgtgtctttcagcgcacaacctcagaaccttaacactgatggaccaaataacactaaccccatgaactcttcacccaaccctatcaatgcaatgcagacaaatggactgccaaactggggcatggctgttggtatgggggccatcatcccgccccacctgcaaggccttcctggtgctaatggatcatcagtttctcaagtcagtgggggcagtgctgaaggaataagcaattctgtgtggggactgtccccaggtaaccctgccacaggaaatagcaattctgggttcagtcaggggaatggagacactgtgaactcagcattaagtgctaaacaaaatggatccagcagtgctgtgcaaaaggaaggaagtggaggaaatgcttgggattcaggacctcctgctggtcctggaatactcgcctggggaaggggcagtggcaacaatggcgttggtaatatccattcaggagcttggggccaccccagccgaagcacctctaacggtgtgaatggggaatggggaaagcccccaaaccagcattccaacagtgacatcaatgggaaaggatcaacagggtgggagagtcctagtgtcaccagccagaaccctaccgtacagcctggtggtgaacacatgaactcctgggccaaagcggcatcttctggaactacagcaagtgaaggaagtagtgatggttctggcaaccacaatgaaggaagcactgggagggaaggaacgggagaaggccgaaggcgagataaagggattatagaccaagggcacatccagttgccaaggaatgatcttgacccaagagttctgtctaatactggttggggacagactcctgtaaagcaaaacactgcctgggaatttgaagaatcccctaggtctgaaaggaaaaatgacaatgggacagaggcctggggttgtgcagctactcaggcttcaaactcaggggggaagaacgatgggtccatcatgaacagtacaaatacctcttcagtatctgggtgggtcaacgcgccacctgccgctgtgccagcaaacacaggttggggagacagcaacaacaaagcgccaagtggcccgggggtttggggggactcgataagctctactgctgttagtactgctgctgctgccaagagtggccatgcttggagtggggccgcaaatcaggaggacaagtcacccacctggggtgagcctccaaagcccaaatcccaacactggggagatggacaaagatcaaatccagcctggagtgcaggagggggagattgggcagattcatcgtctgtccttggacacttgggggatgggaaaaaaaaatggatctggatgggatgctgacagtaataggtcagggtctggttggaatgacaccacgagatctgggaacagtggctggggcaacagcacaaatacaaaggccaatccaggtacaaactggggggagactttaaaacctggcccccaacagaactgggctagcaaaccccaagacaacaatgtgagtaactggggaggagctgcttctgtgaaacagacaggaacagggtggatcggggggccggtaccggtcaaacagaaggacagcagtgaagcaactggctgggaagaaccctctccaccgtccattcgccgcaaaatggaaattgatgatggtacctcagcttggggggacccaagcaactataacaataaaactgtaaacatgtgggatagaaacaacccggtcatccagagcagtaccacgaccaataccaccaccaccaccaccactaccacgagcaacaccacacacagggtcgagacgccgcccccgcaccaggccggtactcagctgaatcgatcaccgttgcttggtccaggtaggaaaggtatttcatgtttctttacaagtaaaaaaaaaa

SEQ ID NO: 247327 - DNA, 1004 bp, Homo sapiens
tttcctaatagtttggactttttctattttcctgtggactctgagaagcctcaggaccatgtttattcagcactgaaacaagtaaaatgaagagaattgtgggccttacttaatcaaagactattcacattttcaccttaatttaggaataatattcctagaaatacatgttgttatgacgataagtagtattttttcaccagcactaaaagttatagttaaaatattttgctgtatcccagctacttgggaggctgaggcaggagaatcgcttgaacctgggaggcggaggttgcaatgagccaagattgtgccattgcactccagcctgggcatcaagagcaagactccgtctcaaaaaaaaaaaaaaatttgctgtaagcgaagactgaaatagcttctataggagagctttagaatgaagtcatttagaggagcaggcgaatcctaaccgcatctctctctttagctggactgaacccaaacatgaatgtcaacagcatggacatgaccggtggcttgtcggtgaaggacccatcccagtcccagtcacgcctcccccagtggacgcaccccaactccatggataacttgcccagtgccgcttcccccctggagcagaaccctagcaagcatggtgctatccctggaggtctaagcattgggcctccaggtaagtcctccattgatgactcctatggccggtacgatttaatccagaacagtgagtcaccagccagtcctcccgtagctgttccccatagctggtcacgtgccaaatctgacagtgataaaatctcaaatggctctagcatcaactggcccccaggtaagaccatgcaacacttctgtgcaacagcagcaggtcagaatgtgctccaagcctgcagagagtgattaggctgagaggacccagaatctgagctaaggatctggaagcgttaagcccagagctttggcattttccttggaaatccatttgtcagatcaattttgggtatggt

SEQ ID NO: 247328 - DNA, 272 bp, Homo sapiens
aggtgactctaaggatcccgtatatgctgtctcagccctgtgcaaaccaggtaagcctagcatcctgcttgccctgatctggcaatttggaaatgactcaaagtattgaattttaaagattagagttttaggatactttcctcattatatttacactttaactacaaaccaagagtcttggccaagcacagtgcctcacacctataatcccagcactttgggagtccaggacaggagggtcgcttgagcgcaggagtttgagacagctatca

SEQ ID NO: 247329 - DNA, 6868 bp, Homo sapiens
atgggcaaccagaacgggaacccaacaggcactttaggtgcttggggaaacttgctgccacaagagagcacagaaccacaaacgtccacttctcagaatgtgtctttcagcgcacaacctcagaaccttaacactgatggaccaaataacactaaccccatgaactcttcacccaaccctatcaatgcaatgcagacaaatggactgccaaactggggcatggctgttggtatgggggccatcatcccgccccacctgcaaggccttcctggtgctaatggatcatcagtttctcaagtcagtgggggcagtgctgaaggaataagcaattctgtgtggggactgtccccaggtaaccctgccacaggaaatagcaattctgggttcagtcaggggaatggagacactgtgaactcagcattaagtgctaaacaaaatggatccagcagtgctgtgcaaaaggaaggaagtggaggaaatgcttgggattcaggacctcctgctggtcctggaatactcgcctggggaaggggcagtggcaacaatggcgttggtaatatccattcaggagcttggggccaccccagccgaagcacctctaacggtgtgaatggggaatggggaaagcccccaaaccagcattccaacagtgacatcaatgggaaaggatcaacagggtgggagagtcctagtgtcaccagccagaaccctaccgtacagcctggtggtgaacacatgaactcctgggccaaagcggcatcttctggaactacagcaagtgaaggaagtagtgatggttctggcaaccacaatgaaggaagcactgggagggaaggaacgggagaaggccgaaggcgagataaagggattatagaccaagggcacatccagttgccaaggaatgatcttgacccaagagttctgtctaatactggttggggacagactcctgtaaagcaaaacactgcctgggaatttgaagaatcccctaggtctgaaaggaaaaatgacaatgggacagaggcctggggttgtgcagctactcaggcttcaaactcaggggggaagaacgatgggtccatcatgaacagtacaaatacctcttcagtatctgggtgggtcaacgcgccacctgccgctgtgccagcaaacacaggttggggagacagcaacaacaaagcgccaagtggcccgggggtttggggggactcgataagctctactgctgttagtactgctgctgctgccaagagtggccatgcttggagtggggccgcaaatcaggaggacaagtcacccacctggggtgagcctccaaagcccaaatcccaacactggggagatggacaaagatcaaatccagcctggagtgcaggagggggagattgggcagattcatcgtctgtccttggacacttgggggatgggaaaaaaaaatggatctggatgggatgctgacagtaataggtcagggtctggttggaatgacaccacgagatctgggaacagtggctggggcaacagcacaaatacaaaggccaatccaggtacaaactggggggagactttaaaacctggcccccaacagaactgggctagcaaaccccaagacaacaatgtgagtaactggggaggagctgcttctgtgaaacagacaggaacagggtggatcggggggccggtaccggtcaaacagaaggacagcagtgaagcaactggctgggaagaaccctctccaccgtccattcgccgcaaaatggaaattgatgatggtacctcagcttggggggacccaagcaactataacaataaaactgtaaacatgtgggatagaaacaacccggtcatccagagcagtaccacgaccaataccaccaccaccaccaccactaccacgagcaacaccacacacagggtcgagacgccgcccccgcaccaggccggtactcagctgaatcgatcaccgttgcttggtccagtttcatcaggctggggagaaatgcctaatgttcactcaaagactgaaaactcttggggagaaccatcctccccttctaccctggtggataatggcacagcagcatgggggaagccacccagcagtggcagcgggtggggagatcaccctgcagagccgccggtggcatttggaagagctggcgcacctgttgctgcctcagccctgtgcaaaccagcttcaaaatctatgcaagaaggctggggcagtggtggggatgaaatgaacctcagtaccagccagtgggaggatgaagaaggggacgtgtggaataatgctgcttcccaagaaagcacctcctcctgcagctcctgggggaacgcccccaaaaaaggacttcaaaagggcatgaagacgtctggcaagcaggatgaggcctggatcatgagccggctgatcaaacaactcacagacatgggcttcccgagagagccagctgaggaggccttgaagagtaacaatatgaatcttgatcaggccatgagcgctctgctggaaaagaaggtggacgtggacaagcgtgggctgggagtgaccgaccataatggaatggccgccaagcccctcggctgccgcccgccaatctccaaagagtcttccgtggaccgccccacctttcttgacaaggatggcggcctcgtggaagagcccacgccttcaccgttcttgccttccccaagcctgaagctccccctttcacacagtgcactccccagtcaggccctgggtgggattgcctccgggctgggcatgcaaaacttgaattcttctagacagataccgagtggcaatctgggtatgtttggcaatagtggagcagcacaagccaggaccatgcagcagccgccacagccaccagtgcagcctcttaactcttcccagcccagtctccgtgctcaagtgcctcagtttctatcccctcaggttcaagcacagcttttgcagtttgcagcaaaaaacattggtctcaaccctgcactattaacctcgccaattaatcctcaacatatgacgatgttgaaccagctctatcagctgcagctggcataccaacgtttacaaatccagcagcagatgttacaggcccagcgtaatgtgtccggatccatgagacaacaggagcagcaagttgcgcgcacaatcactaatctgcagcagcagatccagcagcaccagcgccagctggcccaggccctgctcgtgaagcagccaccaccgccaccgcccccgccgcacctgtctctgcacccctctgcaggcaaatcggccatggacagcttcccctcgcacccacagactcccggcctacctgacctgcagaccaaagagcagcagtcttcacccaacacctttgctccttaccctctcgctggactgaacccaaacatgaatgtcaacagcatggacatgaccggtggcttgtcggtgaaggacccatcccagtcccagtcacgcctcccccagtggacgcaccccaactccatggataacttgcccagtgccgcttcccccctggagcagaaccctagcaagcatggtgctatccctggaggtctaagcattgggcctccaggtaagtcctccattgatgactcctatggccggtacgatttaatccagaacagtgagtcaccagccagtcctcccgtagctgttccccatagctggtcacgtgccaaatctgacagtgataaaatctcaaatggctctagcatcaactggcccccagaattccatccgggagttccatggaaaggactgcagaatattgaccctgagaatgaccctgacgtcactcctggcagtgtccccactgggcctaccatcaacaccaccatccaggatgtcaaccgctacctcctcaagagtggaggtaaactgtcagacatcaaatcgacgtggtcctctggccctacctcccacacgcaagcctctctgtctcatgaactatggaaggtgcccagaaacagtactgcacccacgaggccacctccagggttaaccaatcccaagccctcctccacctggggtgccagccccctcggctggaccagctcctactcctcgggttctgcctggagcaccgacacctcaggaagaaccagcagctggctcgttcttcgaaacctcactccccagattgatggttctacactgcggacattgtgtttgcaacatgggcctcttatcacattccacctgaatctgactcaaggcaatgctgtggtccggtacagctccaaggaggaggctgccaaggcccagaagtctctgcacatgtgcgtcctgggaaacactaccatcctggccgagttcgctggtgaagaagaagtgaatcgcttcttagcccaaggccaggcgctgccacccacttccagctggcagtccagcagcgcgtccagccagccgcggctcagcgcagcgggcagctcccatggcctggtacgcagcgacgctggccactggaacgccccgtgcctgggtggcaaggggagcagtgagctgctgtggggcggggtgccccagtactccagcagcctgtggggcccgcccagcgccgacgacagcagggtgataggcagccccacgccgctaaccaccctgctgcctggggacctgctcagcggggagtccctgtaggctctgccatcatcagcaccaggagagccgacccctcccgggacccctcccggctgggcggccccacagacccgctggaacccagcagcggccgcccttttgagtacctctgtccaggactgaagacgaaccttggccgcagtccttgcgaactgttcgcaaaacagtgcgggctgcggtgggtcagcgtcacatgctaatgacaggatgttcctcgtagctttttattttgtgcgtcttatgtttgtatagtgtgttgtcattttgattttttttttttttttaagtataaaagctgcttagaatagttctatcatgaagggcacttttcagattgtgggctggaaagggttattttatctgtgggggagggagggagacgtgaagcctatttaaaatgagcctgtgacgattatgcacatgaccagaggcggccggtaatcagggcagagtctggtgtggaccgccgggcgcagagcggctccgcggcgggagctgagcggaaggcgcgggctgcgatctgctctctgttcccctggatccgcctatgcacattacccttgtttcattactttttcatgtcatttttttatcccaaaaaatattttttaaaagttaaaaaaagacatatcaaacatgcaaatacttgaatccagcaggccaatagtgaaatgtgaacactttctaattctacacttccaggttgacatcagtacacagaaacaggctctaggaaaaatttctaagttcatagcctacgtgtgtgtatgtgtgcgtgttgaaacagaagtgtgtgtgtgtgtgcatgtgtggcgcgtgctcctgcacggcgtgcagttttctgtgtttgtgtgtttgaaagcgtgtgaggatttaactgtgggttttcccttgtattcagtatacgctttttttttggcgcattggtcaaacggttgttattattagcttctaactttgcactgagtgtcctcgcccttcctttagctaatcctatacattacagagaattcctaggacagggctggcgacaattcatgtgtaaatgtttactcaaggactctgtgactgcgtttaaaaagtacagtgtatatctctggagaaataacatgtatacctacctttagcagctttttattgtggactaatgcaagaaaattattaccagagtattgcaccatttttccatttggaatataaagttaaagagaaaaaaaaaaaaaaaaaactgttgttgaactgtggccatagatacttgtaaagaatggatggttccgtggaaggaacagaaacaagcacttgggcgtgggttgtgactgcttttgggggagcctggggtttgggctcccacctgtttacagacctttttttctccttcagactttaaaattttaaaaatttaaaaaggaattaaaaaaaaaaaaagacttccgtcgtaaagaaacctattttcagaatgcagatgcgttccttcagagctctgggacgggacagtgttgttccctcggccatcgtcgtggactctgtcgattgctttcgccccttcgtcaaggtgacaggcgttgtggccactgtcttgcacatgccggacgcgctctcaggaaagccagggctcccgagggcagctccacaccatttcatgtatttttaaacccaactcctagcactgaagatgttatttaaaaaaaaaaaaaacaaaacaaaacaaaaaaatgaaaaaaaagaaaaagaggaaaaaaaaacacaaagaagaaaaatacctaatctctaatgtgtagcagttacatatttaccaaataatggactcaaaagaaatagatgtttgaagagtgctttatatattaaaaattgctttatgttttaaaaatgatcaatgttttgattgttttgcaaggaagaaagacaatggaataacataccttcaagtatgttttaaaaaatatatatatgaacattgtgctccctgcctgcttgatcaggaaacttgtgcattacatttttttaattagctttttaatggttttatcaaaacaaaaaaaatacaaaaaaaaaaaaaaaagtcctgcaagactgcagatccacaaaagctggttttatagaggatcatgaactatgcacaaactgggttcaagactttttttctcaagtttagtaggatatttagaaaaaccaaccttcctcagagtgactgcatctcattgccattacatg

SEQ ID NO: 247330 - DNA, 6893 bp, Homo sapiens
atgggcaaccagaacgggaacccaacaggcactttaggtgcttggggaaacttgctgccacaagagagcacagaaccacaaacgtccacttctcagaatgtgtctttcagcgcacaacctcagaaccttaacactgatggaccaaataacactaaccccatgaactcttcacccaaccctatcaatgcaatgcagacaaatggactgccaaactggggcatggctgttggtatgggggccatcatcccgccccacctgcaaggccttcctggtgctaatggatcatcagtttctcaagtcagtgggggcagtgctgaaggaataagcaattctgtgtggggactgtccccaggtaaccctgccacaggaaatagcaattctgggttcagtcaggggaatggagacactgtgaactcagcattaagtgctaaacaaaatggatccagcagtgctgtgcaaaaggaaggaagtggaggaaatgcttgggattcaggacctcctgctggtcctggaatactcgcctggggaaggggcagtggcaacaatggcgttggtaatatccattcaggagcttggggccaccccagccgaagcacctctaacggtgtgaatggggaatggggaaagcccccaaaccagcattccaacagtgacatcaatgggaaaggatcaacagggtgggagagtcctagtgtcaccagccagaaccctaccgtacagcctggtggtgaacacatgaactcctgggccaaagcggcatcttctggaactacagcaagtgaaggaagtagtgatggttctggcaaccacaatgaaggaagcactgggagggaaggaacgggagaaggccgaaggcgagataaagggattatagaccaagggcacatccagttgccaaggaatgatcttgacccaagagttctgtctaatactggttggggacagactcctgtaaagcaaaacactgcctgggaatttgaagaatcccctaggtctgaaaggaaaaatgacaatgggacagaggcctggggttgtgcagctactcaggcttcaaactcaggggggaagaacgatgggtccatcatgaacagtacaaatacctcttcagtatctgggtgggtcaacgcgccacctgccgctgtgccagcaaacacaggttggggagacagcaacaacaaagcgccaagtggcccgggggtttggggggactcgataagctctactgctgttagtactgctgctgctgccaagagtggccatgcttggagtggggccgcaaatcaggaggacaagtcacccacctggggtgagcctccaaagcccaaatcccaacactggggagatggacaaagatcaaatccagcctggagtgcaggagggggagattgggcagattcatcgtctgtccttggacacttgggggatgggaaaaaaaaatggatctggatgggatgctgacagtaataggtcagggtctggttggaatgacaccacgagatctgggaacagtggctggggcaacagcacaaatacaaaggccaatccaggtacaaactggggggagactttaaaacctggcccccaacagaactgggctagcaaaccccaagacaacaatgtgagtaactggggaggagctgcttctgtgaaacagacaggaacagggtggatcggggggccggtaccggtcaaacagaaggacagcagtgaagcaactggctgggaagaaccctctccaccgtccattcgccgcaaaatggaaattgatgatggtacctcagcttggggggacccaagcaactataacaataaaactgtaaacatgtgggatagaaacaacccggtcatccagagcagtaccacgaccaataccaccaccaccaccaccactaccacgagcaacaccacacacagggtcgagacgccgcccccgcaccaggccggtactcagctgaatcgatcaccgttgcttggtccagtttcatcaggctggggagaaatgcctaatgttcactcaaagactgaaaactcttggggagaaccatcctccccttctaccctggtggataatggcacagcagcatgggggaagccacccagcagtggcagcgggtggggagatcaccctgcagagccgccggtggcatttggaagagctggcgcacctgttgctgcctcagccctgtgcaaaccagcttcaaaatctatgcaagaaggctggggcagtggtggggatgaaatgaacctcagtaccagccagtgggaggatgaagaaggggacgtgtggaataatgctgcttcccaagaaagcacctcctcctgcagctcctgggggaacgcccccaaaaaaggacttcaaaagggcatgaagacgtctggcaagcaggatgaggcctggatcatgagccggctgatcaaacaactcacagacatgggcttcccgagagagccagctgaggaggccttgaagagtaacaatatgaatcttgatcaggccatgagcgctctgctggaaaagaaggtggacgtggacaagcgtgggctgggagtgaccgaccataatggaatggccgccaagcccctcggctgccgcccgccaatctccaaagagtcttccgtggaccgccccacctttcttgacaaggatggcggcctcgtggaagagcccacgccttcaccgttcttgccttccccaagcctgaagctccccctttcacacagtgcactccccagtcaggccctgggtgggattgcctccgggctgggcatgcaaaacttgaattcttctagacagataccgagtggcaatctgggtatgtttggcaatagtggagcagcacaagccaggaccatgcagcagccgccacagccaccagtgcagcctcttaactcttcccagcccagtctccgtgctcaagtgcctcagtttctatcccctcaggttcaagcacagcttttgcagtttgcagcaaaaaacattggtctcaaccctgcactattaacctcgccaattaatcctcaacatatgacgatgttgaaccagctctatcagctgcagctggcataccaacgtttacaaatccagcagcagatgttacaggcccagcgtaatgtgtccggatccatgagacaacaggagcagcaagttgcgcgcacaatcactaatctgcagcagcagatccagcagcaccagcgccagctggcccaggccctgctcgtgaagcagccaccaccgccaccgcccccgccgcacctgtctctgcacccctctgcaggcaaatcggccatggacagcttcccctcgcacccacagactcccggcctacctgacctgcagaccaaagagcagcagtcttcacccaacacctttgctccttaccctctcgctggactgaacccaaacatgaatgtcaacagcatggacatgaccggtggcttgtcggtgaaggacccatcccagtcccagtcacgcctcccccagtggacgcaccccaactccatggataacttgcccagtgccgcttcccccctggagcagaaccctagcaagcatggtgctatccctggaggtctaagcattgggcctccaggtaagtcctccattgatgactcctatggccggtacgatttaatccagaacagtgagtcaccagccagtcctcccgtagctgttccccatagctggtcacgtgccaaatctgacagtgataaaatctcaaatggctctagcatcaactggcccccagaattccatccgggagttccatggaaaggactgcagaatattgaccctgagaatgaccctgacgtcactcctggcagtgtccccactgggcctaccatcaacaccaccatccaggatgtcaaccgctacctcctcaagagtggaggtaaactgtcagacatcaaatcgacgtggtcctctggccctacctcccacacgcaagcctctctgtctcatgaactatggaaggtgcccagaaacagtactgcacccacgaggccacctccagggttaaccaatcccaagccctcctccacctggggtgccagccccctcggctggaccagctcctactcctcgggttctgcctggagcaccgacacctcaggaagaaccagcagctggctcgttcttcgaaacctcactccccagattgatggttctacactgcggacattgtgtttgcaacatgggcctcttatcacattccacctgaatctgactcaaggcaatgctgtggtccggtacagctccaaggaggaggctgccaaggcccagaagtctctgcacatgtgcgtcctgggaaacactaccatcctggccgagttcgctggtgaagaagaagtgaatcgcttcttagcccaaggccaggcgctgccacccacttccagctggcagtccagcagcgcgtccagccagccgcggctcagcgcagcgggcagctcccatggcctggtacgcagcgacgctggccactggaacgccccgtgcctgggtggcaaggggagcagtgagctgctgtggggcggggtgccccagtactccagcagcctgtggggcccgcccagcgccgacgacagcagggtgataggcagccccacgccgctaaccaccctgctgcctggggacctgctcagcggggagtccctgtaggctctgccatcatcagcaccaggagagccgacccctcccgggacccctcccggctgggcggccccacagacccgctggaacccagcagcggccgcccttttgagtacctctgtccaggactgaagacgaaccttggccgcagtccttgcgaactgttcgcaaaacagtgcgggctgcggtgggtcagcgtcacatgctaatgacaggatgttcctcgtagctttttattttgtgcgtcttatgtttgtatagtgtgttgtcattttgattttttttttttttttaagtataaaagctgcttagaatagttctatcatgaagggcacttttcagattgtgggctggaaagggttattttatctgtgggggagggagggagacgtgaagcctatttaaaatgagcctgtgacgattatgcacatgaccagaggcggccggtaatcagggcagagtctggtgtggaccgccgggcgcagagcggctccgcggcgggagctgagcggaaggcgcgggctgcgatctgctctctgttcccctggatccgcctatgcacattacccttgtttcattactttttcatgtcatttttttatcccaaaaaatattttttaaaagttaaaaaaagacatatcaaacatgcaaatacttgaatccagcaggccaatagtgaaatgtgaacactttctaattctacacttccaggttgacatcagtacacagaaacaggctctaggaaaaatttctaagttcatagcctacgtgtgtgtatgtgtgcgtgttgaaacagaagtgtgtgtgtgtgtgcatgtgtggcgcgtgctcctgcacggcgtgcagttttctgtgtttgtgtgtttgaaagcgtgtgaggatttaactgtgggttttcccttgtattcagtatacgctttttttttggcgcattggtcaaacggttgttattattagcttctaactttgcactgagtgtcctcgcccttcctttagctaatcctatacattacagagaattcctaggacagggctggcgacaattcatgtgtaaatgtttactcaaggactctgtgactgcgtttaaaaagtacagtgtatatctctggagaaataacatgtatacctacctttagcagctttttattgtggactaatgcaagaaaattattaccagagtattgcaccatttttccatttggaatataaagttaaagagaaaaaaaaaaaaaaaaaactgttgttgaactgtggccatagatacttgtaaagaatggatggttccgtggaaggaacagaaacaagcacttgggcgtgggttgtgactgcttttgggggagcctggggtttgggctcccacctgtttacagacctttttttctccttcagactttaaaattttaaaaatttaaaaaggaattaaaaaaaaaaaaagacttccgtcgtaaagaaacctattttcagaatgcagatgcgttccagagctctgaaggaacgcatctgcattcagagctctgggacgggacagtgttgttccctcggccatcgtcgtggactctgtcgattgctttcgccccttcgtcaaggtgacaggcgttgtggccactgtcttgcacatgccggacgcgctctcaggaaagccagggctcccgagggcagctccacaccatttcatgtatttttaaacccaactcctagcactgaagatgttatttaaaaaaaaaaaaaacaaaacaaaacaaaaaaatgaaaaaaaagaaaaagaggaaaaaaaaacacaaagaagaaaaatacctaatctctaatgtgtagcagttacatatttaccaaataatggactcaaaagaaatagatgtttgaagagtgctttatatattaaaaattgctttatgttttaaaaatgatcaatgttttgattgttttgcaaggaagaaagacaatggaataacataccttcaagtatgttttaaaaaatatatatatgaacattgtgctccctgcctgcttgatcaggaaacttgtgcattacatttttttaattagctttttaatggttttatcaaaacaaaaaaaatacaaaaaaaaaaaaaaaagtcctgcaagactgcagatccacaaaagctggttttatagaggatcatgaactatgcacaaactgggttcaagactttttttctcaagtttagtaggatatttagaaaaaccaaccttcctcagagtgactgcatctcattgccattacatg

SEQ ID NO: 247331 - DNA, 6985 bp, Homo sapiens
atgggcaaccagaacgggaacccaacaggcactttaggtgcttggggaaacttgctgccacaagagagcacagaaccacaaacgtccacttctcagaatgtgtctttcagcgcacaacctcagaaccttaacactgatggaccaaataacactaaccccatgaactcttcacccaaccctatcaatgcaatgcagacaaatggactgccaaactggggcatggctgttggtatgggggccatcatcccgccccacctgcaaggccttcctggtgctaatggatcatcagtttctcaagtcagtgggggcagtgctgaaggaataagcaattctgtgtggggactgtccccaggtaaccctgccacaggaaatagcaattctgggttcagtcaggggaatggagacactgtgaactcagcattaagtgctaaacaaaatggatccagcagtgctgtgcaaaaggaaggaagtggaggaaatgcttgggattcaggacctcctgctggtcctggaatactcgcctggggaaggggcagtggcaacaatggcgttggtaatatccattcaggagcttggggccaccccagccgaagcacctctaacggtgtgaatggggaatggggaaagcccccaaaccagcattccaacagtgacatcaatgggaaaggatcaacagggtgggagagtcctagtgtcaccagccagaaccctaccgtacagcctggtggtgaacacatgaactcctgggccaaagcggcatcttctggaactacagcaagtgaaggaagtagtgatggttctggcaaccacaatgaaggaagcactgggagggaaggaacgggagaaggccgaaggcgagataaagggattatagaccaagggcacatccagttgccaaggaatgatcttgacccaagagttctgtctaatactggttggggacagactcctgtaaagcaaaacactgcctgggaatttgaagaatcccctaggtctgaaaggaaaaatgacaatgggacagaggcctggggttgtgcagctactcaggcttcaaactcaggggggaagaacgatgggtccatcatgaacagtacaaatacctcttcagtatctgggtgggtcaacgcgccacctgccgctgtgccagcaaacacaggttggggagacagcaacaacaaagcgccaagtggcccgggggtttggggggactcgataagctctactgctgttagtactgctgctgctgccaagagtggccatgcttggagtggggccgcaaatcaggaggacaagtcacccacctggggtgagcctccaaagcccaaatcccaacactggggagatggacaaagatcaaatccagcctggagtgcaggagggggagattgggcagattcatcgtctgtccttggacacttgggggatgggaaaaaaaaatggatctggatgggatgctgacagtaataggtcagggtctggttggaatgacaccacgagatctgggaacagtggctggggcaacagcacaaatacaaaggccaatccaggtacaaactggggggagactttaaaacctggcccccaacagaactgggctagcaaaccccaagacaacaatgtgagtaactggggaggagctgcttctgtgaaacagacaggaacagggtggatcggggggccggtaccggtcaaacagaaggacagcagtgaagcaactggctgggaagaaccctctccaccgtccattcgccgcaaaatggaaattgatgatggtacctcagcttggggggacccaagcaactataacaataaaactgtaaacatgtgggatagaaacaacccggtcatccagagcagtaccacgaccaataccaccaccaccaccaccactaccacgagcaacaccacacacagggtcgagacgccgcccccgcaccaggccggtactcagctgaatcgatcaccgttgcttggtccagtttcatcaggctggggagaaatgcctaatgttcactcaaagactgaaaactcttggggagaaccatcctccccttctaccctggtggataatggcacagcagcatgggggaagccacccagcagtggcagcgggtggggagatcaccctgcagagccgccggtggcatttggaagagctggcgcacctgttgctgcctcagccctgtgcaaaccagcttcaaaatctatgcaagaaggctggggcagtggtggggatgaaatgaacctcagtaccagccagtgggaggatgaagaaggggacgtgtggaataatgctgcttcccaagaaagcacctcctcctgcagctcctgggggaacgcccccaaaaaaggacttcaaaagggcatgaagacgtctggcaagcaggatgaggcctggatcatgagccggctgatcaaacaactcacagacatgggcttcccgagagagccagctgaggaggccttgaagagtaacaatatgaatcttgatcaggccatgagcgctctgctggaaaagaaggtggacgtggacaagcgtgggctgggagtgaccgaccataatggaatggccgccaagcccctcggctgccgcccgccaatctccaaagagtcttccgtggaccgccccacctttcttgacaaggatggcggcctcgtggaagagcccacgccttcaccgttcttgccttccccaagcctgaagctccccctttcacacagtgcactccccagtcaggccctgggtgggattgcctccgggctgggcatgcaaaacttgaattcttctagacagataccgagtggcaatctgggtatgtttggcaatagtggagcagcacaagccaggaccatgcagcagccgccacagccaccagtgcagcctcttaactcttcccagcccagtctccgtgctcaagtgcctcagtttctatcccctcaggttcaagcacagcttttgcagtttgcagcaaaaaacattggtctcaaccctgcactattaacctcgccaattaatcctcaacatatgacgatgttgaaccagctctatcagctgcagctggcataccaacgtttacaaatccagcagcagatgttacaggcccagcgtaatgtgtccggatccatgagacaacaggagcagcaagttgcgcgcacaatcactaatctgcagcagcagatccagcagcaccagcgccagctggcccaggccctgctcgtgaagcagccaccaccgccaccgcccccgccgcacctgtctctgcacccctctgcaggcaaatcggccatggacagcttcccctcgcacccacagactcccggcctacctgacctgcagaccaaagagcagcagtcttcacccaacacctttgctccttaccctctcgctggactgaacccaaacatgaatgtcaacagcatggacatgaccggtggcttgtcggtgaaggacccatcccagtcccagtcacgcctcccccagtggacgcaccccaactccatggataacttgcccagtgccgcttcccccctggagcagaaccctagcaagcatggtgctatccctggaggtctaagcattgggcctccaggtaagtcctccattgatgactcctatggccggtacgatttaatccagaacagtgagtcaccagccagtcctcccgtagctgttccccatagctggtcacgtgccaaatctgacagtgataaaatctcaaatggctctagcatcaactggcccccagaattccatccgggagttccatggaaaggactgcagaatattgaccctgagaatgaccctgacgtcactcctggcagtgtccccactgggcctaccatcaacaccaccatccaggatgtcaaccgctacctcctcaagagtggagggtcctccccgccatcatctcagaatgccacgctgccttcttcgagtgcctggccactcagtgcctccggctacagtagctctttcagcagcattgcatccgcacctagtgttgcaggtaaactgtcagacatcaaatcgacgtggtcctctggccctacctcccacacgcaagcctctctgtctcatgaactatggaaggtgcccagaaacagtactgcacccacgaggccacctccagggttaaccaatcccaagccctcctccacctggggtgccagccccctcggctggaccagctcctactcctcgggttctgcctggagcaccgacacctcaggaagaaccagcagctggctcgttcttcgaaacctcactccccagattgatggttctacactgcggacattgtgtttgcaacatgggcctcttatcacattccacctgaatctgactcaaggcaatgctgtggtccggtacagctccaaggaggaggctgccaaggcccagaagtctctgcacatgtgcgtcctgggaaacactaccatcctggccgagttcgctggtgaagaagaagtgaatcgcttcttagcccaaggccaggcgctgccacccacttccagctggcagtccagcagcgcgtccagccagccgcggctcagcgcagcgggcagctcccatggcctggtacgcagcgacgctggccactggaacgccccgtgcctgggtggcaaggggagcagtgagctgctgtggggcggggtgccccagtactccagcagcctgtggggcccgcccagcgccgacgacagcagggtgataggcagccccacgccgctaaccaccctgctgcctggggacctgctcagcggggagtccctgtaggctctgccatcatcagcaccaggagagccgacccctcccgggacccctcccggctgggcggccccacagacccgctggaacccagcagcggccgcccttttgagtacctctgtccaggactgaagacgaaccttggccgcagtccttgcgaactgttcgcaaaacagtgcgggctgcggtgggtcagcgtcacatgctaatgacaggatgttcctcgtagctttttattttgtgcgtcttatgtttgtatagtgtgttgtcattttgattttttttttttttttaagtataaaagctgcttagaatagttctatcatgaagggcacttttcagattgtgggctggaaagggttattttatctgtgggggagggagggagacgtgaagcctatttaaaatgagcctgtgacgattatgcacatgaccagaggcggccggtaatcagggcagagtctggtgtggaccgccgggcgcagagcggctccgcggcgggagctgagcggaaggcgcgggctgcgatctgctctctgttcccctggatccgcctatgcacattacccttgtttcattactttttcatgtcatttttttatcccaaaaaatattttttaaaagttaaaaaaagacatatcaaacatgcaaatacttgaatccagcaggccaatagtgaaatgtgaacactttctaattctacacttccaggttgacatcagtacacagaaacaggctctaggaaaaatttctaagttcatagcctacgtgtgtgtatgtgtgcgtgttgaaacagaagtgtgtgtgtgtgtgcatgtgtggcgcgtgctcctgcacggcgtgcagttttctgtgtttgtgtgtttgaaagcgtgtgaggatttaactgtgggttttcccttgtattcagtatacgctttttttttggcgcattggtcaaacggttgttattattagcttctaactttgcactgagtgtcctcgcccttcctttagctaatcctatacattacagagaattcctaggacagggctggcgacaattcatgtgtaaatgtttactcaaggactctgtgactgcgtttaaaaagtacagtgtatatctctggagaaataacatgtatacctacctttagcagctttttattgtggactaatgcaagaaaattattaccagagtattgcaccatttttccatttggaatataaagttaaagagaaaaaaaaaaaaaaaaaactgttgttgaactgtggccatagatacttgtaaagaatggatggttccgtggaaggaacagaaacaagcacttgggcgtgggttgtgactgcttttgggggagcctggggtttgggctcccacctgtttacagacctttttttctccttcagactttaaaattttaaaaatttaaaaaggaattaaaaaaaaaaaaagacttccgtcgtaaagaaacctattttcagaatgcagatgcgttccttcagagctctgggacgggacagtgttgttccctcggccatcgtcgtggactctgtcgattgctttcgccccttcgtcaaggtgacaggcgttgtggccactgtcttgcacatgccggacgcgctctcaggaaagccagggctcccgagggcagctccacaccatttcatgtatttttaaacccaactcctagcactgaagatgttatttaaaaaaaaaaaaaacaaaacaaaacaaaaaaatgaaaaaaaagaaaaagaggaaaaaaaaacacaaagaagaaaaatacctaatctctaatgtgtagcagttacatatttaccaaataatggactcaaaagaaatagatgtttgaagagtgctttatatattaaaaattgctttatgttttaaaaatgatcaatgttttgattgttttgcaaggaagaaagacaatggaataacataccttcaagtatgttttaaaaaatatatatatgaacattgtgctccctgcctgcttgatcaggaaacttgtgcattacatttttttaattagctttttaatggttttatcaaaacaaaaaaaatacaaaaaaaaaaaaaaaagtcctgcaagactgcagatccacaaaagctggttttatagaggatcatgaactatgcacaaactgggttcaagactttttttctcaagtttagtaggatatttagaaaaaccaaccttcctcagagtgactgcatctcattgccattacatg

SEQ ID NO: 247332 - DNA, 4068 bp, Homo sapiens
tttcctaatagtttggactttttctattttcctgtggactctgagaagcctcaggaccatgtttattcagcactgaaacaagtaaaatgaagagaattgtgggccttacttaatcaaagactattcacattttcaccttaatttaggaataatattcctagaaatacatgttgttatgacgataagtagtattttttcaccagcactaaaagttatagttaaaatattttgctgtatcccagctacttgggaggctgaggcaggagaatcgcttgaacctgggaggcggaggttgcaatgagccaagattgtgccattgcactccagcctgggcatcaagagcaagactccgtctcaaaaaaaaaaaaaaatttgctgtaagcgaagactgaaatagcttctataggagagctttagaatgaagtcatttagaggagcaggcgaatcctaaccgcatctctctctttagctggactgaacccaaacatgaatgtcaacagcatggacatgaccggtggcttgtcggtgaaggacccatcccagtcccagtcacgcctcccccagtggacgcaccccaactccatggataacttgcccagtgccgcttcccccctggagcagaaccctagcaagcatggtgctatccctggaggtctaagcattgggcctccaggtaagtcctccattgatgactcctatggccggtacgatttaatccagaacagtgagtcaccagccagtcctcccgtagctgttccccatagctggtcacgtgccaaatctgacagtgataaaatctcaaatggctctagcatcaactggcccccagaattccatccgggagttccatggaaaggactgcagaatattgaccctgagaatgaccctgacgtcactcctggcagtgtccccactgggcctaccatcaacaccaccatccaggatgtcaaccgctacctcctcaagagtggagggtcctccccgccatcatctcagaatgccacgctgccttcttcgagtgcctggccactcagtgcctccggctacagtagctctttcagcagcattgcatccgcacctagtgttgcaggtaaactgtcagacatcaaatcgacgtggtcctctggccctacctcccacacgcaagcctctctgtctcatgaactatggaaggtgcccagaaacagtactgcacccacgaggccacctccagggttaaccaatcccaagccctcctccacctggggtgccagccccctcggctggaccagctcctactcctcgggttctgcctggagcaccgacacctcaggaagaaccagcagctggctcgttcttcgaaacctcactccccagattgatggttctacactgcggacattgtgtttgcaacatgggcctcttatcacattccacctgaatctgactcaaggcaatgctgtggtccggtacagctccaaggaggaggctgccaaggcccagaagtctctgcacatgtgcgtcctgggaaacactaccatcctggccgagttcgctggtgaagaagaagtgaatcgcttcttagcccaaggccaggcgctgccacccacttccagctggcagtccagcagcgcgtccagccagccgcggctcagcgcagcgggcagctcccatggcctggtacgcagcgacgctggccactggaacgccccgtgcctgggtggcaaggggagcagtgagctgctgtggggcggggtgccccagtactccagcagcctgtggggcccgcccagcgccgacgacagcagggtgataggcagccccacgccgctaaccaccctgctgcctggggacctgctcagcggggagtccctgtaggctctgccatcatcagcaccaggagagccgacccctcccgggacccctcccggctgggcggccccacagacccgctggaacccagcagcggccgcccttttgagtacctctgtccaggactgaagacgaaccttggccgcagtccttgcgaactgttcgcaaaacagtgcgggctgcggtgggtcagcgtcacatgctaatgacaggatgttcctcgtagctttttattttgtgcgtcttatgtttgtatagtgtgttgtcattttgattttttttttttttttaagtataaaagctgcttagaatagttctatcatgaagggcacttttcagattgtgggctggaaagggttattttatctgtgggggagggagggagacgtgaagcctatttaaaatgagcctgtgacgattatgcacatgaccagaggcggccggtaatcagggcagagtctggtgtggaccgccgggcgcagagcggctccgcggcgggagctgagcggaaggcgcgggctgcgatctgctctctgttcccctggatccgcctatgcacattacccttgtttcattactttttcatgtcatttttttatcccaaaaaatattttttaaaagttaaaaaaagacatatcaaacatgcaaatacttgaatccagcaggccaatagtgaaatgtgaacactttctaattctacacttccaggttgacatcagtacacagaaacaggctctaggaaaaatttctaagttcatagcctacgtgtgtgtatgtgtgcgtgttgaaacagaagtgtgtgtgtgtgtgcatgtgtggcgcgtgctcctgcacggcgtgcagttttctgtgtttgtgtgtttgaaagcgtgtgaggatttaactgtgggttttcccttgtattcagtatacgctttttttttggcgcattggtcaaacggttgttattattagcttctaactttgcactgagtgtcctcgcccttcctttagctaatcctatacattacagagaattcctaggacagggctggcgacaattcatgtgtaaatgtttactcaaggactctgtgactgcgtttaaaaagtacagtgtatatctctggagaaataacatgtatacctacctttagcagctttttattgtggactaatgcaagaaaattattaccagagtattgcaccatttttccatttggaatataaagttaaagagaaaaaaaaaaaaaaaaaactgttgttgaactgtggccatagatacttgtaaagaatggatggttccgtggaaggaacagaaacaagcacttgggcgtgggttgtgactgcttttgggggagcctggggtttgggctcccacctgtttacagacctttttttctccttcagactttaaaattttaaaaatttaaaaaggaattaaaaaaaaaaaaagacttccgtcgtaaagaaacctattttcagaatgcagatgcgttccttcagagctctgggacgggacagtgttgttccctcggccatcgtcgtggactctgtcgattgctttcgccccttcgtcaaggtgacaggcgttgtggccactgtcttgcacatgccggacgcgctctcaggaaagccagggctcccgagggcagctccacaccatttcatgtatttttaaacccaactcctagcactgaagatgttatttaaaaaaaaaaaaaacaaaacaaaacaaaaaaatgaaaaaaaagaaaaagaggaaaaaaaaacacaaagaagaaaaatacctaatctctaatgtgtagcagttacatatttaccaaataatggactcaaaagaaatagatgtttgaagagtgctttatatattaaaaattgctttatgttttaaaaatgatcaatgttttgattgttttgcaaggaagaaagacaatggaataacataccttcaagtatgttttaaaaaatatatatatgaacattgtgctccctgcctgcttgatcaggaaacttgtgcattacatttttttaattagctttttaatggttttatcaaaacaaaaaaaatacaaaaaaaaaaaaaaaagtcctgcaagactgcagatccacaaaagctggttttatagaggatcatgaactatgcacaaactgggttcaagactttttttctcaagtttagtaggatatttagaaaaaccaaccttcctcagagtgactgcatctcattgccattacatg

SEQ ID NO: 247333 - DNA, 4432 bp, Homo sapiens
atgggcaaccagaacgggaacccaacaggcactttaggtgcttggggaaacttgctgccacaagagagcacagaaccacaaacgtccacttctcagaatgtgtctttcagcgcacaacctcagaaccttaacactgatggaccaaataacactaaccccatgaactcttcacccaaccctatcaatgcaatgcagacaaatggactgccaaactggggcatggctgttggtatgggggccatcatcccgccccacctgcaaggccttcctggtgctaatggatcatcagtttctcaagtcagtgggggcagtgctgaaggaataagcaattctgtgtggggactgtccccaggtaaccctgccacaggaaatagcaattctgggttcagtcaggggaatggagacactgtgaactcagcattaagtgctaaacaaaatggatccagcagtgctgtgcaaaaggaaggaagtggaggaaatgcttgggattcaggacctcctgctggtcctggaatactcgcctggggaaggggcagtggcaacaatggcgttggtaatatccattcaggagcttggggccaccccagccgaagcacctctaacggtgtgaatggggaatggggaaagcccccaaaccagcattccaacagtgacatcaatgggaaaggatcaacagggtgggagagtcctagtgtcaccagccagaaccctaccgtacagcctggtggtgaacacatgaactcctgggccaaagcggcatcttctggaactacagcaagtgaaggaagtagtgatggttctggcaaccacaatgaaggaagcactgggagggaaggaacgggagaaggccgaaggcgagataaagggattatagaccaagggcacatccagttgccaaggaatgatcttgacccaagagttctgtctaatactggttggggacagactcctgtaaagcaaaacactgcctgggaatttgaagaatcccctaggtctgaaaggaaaaatgacaatgggacagaggcctggggttgtgcagctactcaggcttcaaactcaggggggaagaacgatgggtccatcatgaacagtacaaatacctcttcagtatctgggtgggtcaacgcgccacctgccgctgtgccagcaaacacaggttggggagacagcaacaacaaagcgccaagtggcccgggggtttggggggactcgataagctctactgctgttagtactgctgctgctgccaagagtggccatgcttggagtggggccgcaaatcaggaggacaagtcacccacctggggtgagcctccaaagcccaaatcccaacactggggagatggacaaagatcaaatccagcctggagtgcaggagggggagattgggcagattcatcgtctgtccttggacacttgggggatgggaaaaaaaaatggatctggatgggatgctgacagtaataggtcagggtctggttggaatgacaccacgagatctgggaacagtggctggggcaacagcacaaatacaaaggccaatccaggtacaaactggggggagactttaaaacctggcccccaacagaactgggctagcaaaccccaagacaacaatgtgagtaactggggaggagctgcttctgtgaaacagacaggaacagggtggatcggggggccggtaccggtcaaacagaaggacagcagtgaagcaactggctgggaagaaccctctccaccgtccattcgccgcaaaatggaaattgatgatggtacctcagcttggggggacccaagcaactataacaataaaactgtaaacatgtgggatagaaacaacccggtcatccagagcagtaccacgaccaataccaccaccaccatcctggccgagttcgctggtgaagaagaagtgaatcgcttcttagcccaaggccaggcgctgccacccacttccagctggcagtccagcagcgcgtccagccagccgcggctcagcgcagcgggcagctcccatggcctggtacgcagcgacgctggccactggaacgccccgtgcctgggtggcaaggggagcagtgagctgctgtggggcggggtgccccagtactccagcagcctgtggggcccgcccagcgccgacgacagcagggtgataggcagccccacgccgctaaccaccctgctgcctggggacctgctcagcggggagtccctgtaggctctgccatcatcagcaccaggagagccgacccctcccgggacccctcccggctgggcggccccacagacccgctggaacccagcagcggccgcccttttgagtacctctgtccaggactgaagacgaaccttggccgcagtccttgcgaactgttcgcaaaacagtgcgggctgcggtgggtcagcgtcacatgctaatgacaggatgttcctcgtagctttttattttgtgcgtcttatgtttgtatagtgtgttgtcattttgattttttttttttttttaagtataaaagctgcttagaatagttctatcatgaagggcacttttcagattgtgggctggaaagggttattttatctgtgggggagggagggagacgtgaagcctatttaaaatgagcctgtgacgattatgcacatgaccagaggcggccggtaatcagggcagagtctggtgtggaccgccgggcgcagagcggctccgcggcgggagctgagcggaaggcgcgggctgcgatctgctctctgttcccctggatccgcctatgcacattacccttgtttcattactttttcatgtcatttttttatcccaaaaaatattttttaaaagttaaaaaaagacatatcaaacatgcaaatacttgaatccagcaggccaatagtgaaatgtgaacactttctaattctacacttccaggttgacatcagtacacagaaacaggctctaggaaaaatttctaagttcatagcctacgtgtgtgtatgtgtgcgtgttgaaacagaagtgtgtgtgtgtgtgcatgtgtggcgcgtgctcctgcacggcgtgcagttttctgtgtttgtgtgtttgaaagcgtgtgaggatttaactgtgggttttcccttgtattcagtatacgctttttttttggcgcattggtcaaacggttgttattattagcttctaactttgcactgagtgtcctcgcccttcctttagctaatcctatacattacagagaattcctaggacagggctggcgacaattcatgtgtaaatgtttactcaaggactctgtgactgcgtttaaaaagtacagtgtatatctctggagaaataacatgtatacctacctttagcagctttttattgtggactaatgcaagaaaattattaccagagtattgcaccatttttccatttggaatataaagttaaagagaaaaaaaaaaaaaaaaaactgttgttgaactgtggccatagatacttgtaaagaatggatggttccgtggaaggaacagaaacaagcacttgggcgtgggttgtgactgcttttgggggagcctggggtttgggctcccacctgtttacagacctttttttctccttcagactttaaaattttaaaaatttaaaaaggaattaaaaaaaaaaaaagacttccgtcgtaaagaaacctattttcagaatgcagatgcgttccttcagagctctgggacgggacagtgttgttccctcggccatcgtcgtggactctgtcgattgctttcgccccttcgtcaaggtgacaggcgttgtggccactgtcttgcacatgccggacgcgctctcaggaaagccagggctcccgagggcagctccacaccatttcatgtatttttaaacccaactcctagcactgaagatgttatttaaaaaaaaaaaaaacaaaacaaaacaaaaaaatgaaaaaaaagaaaaagaggaaaaaaaaacacaaagaagaaaaatacctaatctctaatgtgtagcagttacatatttaccaaataatggactcaaaagaaatagatgtttgaagagtgctttatatattaaaaattgctttatgttttaaaaatgatcaatgttttgattgttttgcaaggaagaaagacaatggaataacataccttcaagtatgttttaaaaaatatatatatgaacattgtgctccctgcctgcttgatcaggaaacttgtgcattacatttttttaattagctttttaatggttttatcaaaacaaaaaaaatacaaaaaaaaaaaaaaaagtcctgcaagactgcagatccacaaaagctggttttatagaggatcatgaactatgcacaaactgggttcaagactttttttctcaagtttagtaggatatttagaaaaaccaaccttcctcagagtgactgcatctcattgccattacatg

SEQ ID NO: 247334 - DNA, 4441 bp, Homo sapiens
atgggcaaccagaacgggaacccaacaggcactttaggtgcttggggaaacttgctgccacaagagagcacagaaccacaaacgtccacttctcagaatgtgtctttcagcgcacaacctcagaaccttaacactgatggaccaaataacactaaccccatgaactcttcacccaaccctatcaatgcaatgcagacaaatggactgccaaactggggcatggctgttggtatgggggccatcatcccgccccacctgcaaggccttcctggtgctaatggatcatcagtttctcaagtcagtgggggcagtgctgaaggaataagcaattctgtgtggggactgtccccaggtaaccctgccacaggaaatagcaattctgggttcagtcaggggaatggagacactgtgaactcagcattaagtgctaaacaaaatggatccagcagtgctgtgcaaaaggaaggaagtggaggaaatgcttgggattcaggacctcctgctggtcctggaatactcgcctggggaaggggcagtggcaacaatggcgttggtaatatccattcaggagcttggggccaccccagccgaagcacctctaacggtgtgaatggggaatggggaaagcccccaaaccagcattccaacagtgacatcaatgggaaaggatcaacagggtgggagagtcctagtgtcaccagccagaaccctaccgtacagcctggtggtgaacacatgaactcctgggccaaagcggcatcttctggaactacagcaagtgaaggaagtagtgatggttctggcaaccacaatgaaggaagcactgggagggaaggaacgggagaaggccgaaggcgagataaagggattatagaccaagggcacatccagttgccaaggaatgatcttgacccaagagttctgtctaatactggttggggacagactcctgtaaagcaaaacactgcctgggaatttgaagaatcccctaggtctgaaaggaaaaatgacaatgggacagaggcctggggttgtgcagctactcaggcttcaaactcaggggggaagaacgatgggtccatcatgaacagtacaaatacctcttcagtatctgggtgggtcaacgcgccacctgccgctgtgccagcaaacacaggttggggagacagcaacaacaaagcgccaagtggcccgggggtttggggggactcgataagctctactgctgttagtactgctgctgctgccaagagtggccatgcttggagtggggccgcaaatcaggaggacaagtcacccacctggggtgagcctccaaagcccaaatcccaacactggggagatggacaaagatcaaatccagcctggagtgcaggagggggagattgggcagattcatcgtctgtccttggacacttgggggatgggaaaaaaaaatggatctggatgggatgctgacagtaataggtcagggtctggttggaatgacaccacgagatctgggaacagtggctggggcaacagcacaaatacaaaggccaatccaggtacaaactggggggagactttaaaacctggcccccaacagaactgggctagcaaaccccaagacaacaatgtgagtaactggggaggagctgcttctgtgaaacagacaggaacagggtggatcggggggccggtaccggtcaaacagaaggacagcagtgaagcaactggctgggaagaaccctctccaccgtccattcgccgcaaaatggaaattgatgatggtacctcagcttggggggacccaagcaactataacaataaaactgtaaacatgtgggatagaaacaacccggtcatccagagcagtaccacgaccaataccaccaccaccaccaccactaccacgagcaacaccacacacagggtcgagacgccgcccccgcaccaggccggtactcagctgaatcgatcaccgttgcttggtccagtttcatcaggctggggagaaatgcctaatgttcactcaaagactgaaaactcttggggagaaccatcctccccttctaccctggtggataatggcacagcagcatgggggaagccacccagcagtggcagcgggtggggagatcaccctgcagagccgccggtggcatttggaagagctggcgcacctgttgctgcctcagccctgtgcaaaccagcttcaaaatctatgcaagaaggctggggcagtggtggggatgaaatgaacctcagtaccagccagtgggaggatgaagaaggggacgtgtggaataatgctgcttcccaagaaagcacctcctcctgcagctcctgggggaacgcccccaaaaaaggacttcaaaagggcatgaagacgtctggcaagcaggatgaggcctggatcatgagccggctgatcaaacaactcacagacatgggcttcccgagagagccagctgaggaggccttgaagagtaacaatatgaatcttgatcaggccatgagcgctctgctggaaaagaaggtggacgtggacaagcgtgggctgggagtgaccgaccataatggaatggccgccaagcccctcggctgccgcccgccaatctccaaagagtcttccgtggaccgccccacctttcttgacaaggatggcggcctcgtggaagagcccacgccttcaccgttcttgccttccccaagcctgaagctccccctttcacacagtgcactccccagtcaggccctgggtgggattgcctccgggctgggcatgcaaaacttgaattcttctagacagataccgagtggcaatctgggtatgtttggcaatagtggagcagcacaagccaggaccatgcagcagccgccacagccaccagtgcagcctcttaactcttcccagcccagtctccgtgctcaagtgcctcagtttctatcccctcaggttcaagcacagcttttgcagtttgcagcaaaaaacattggtctcaaccctgcactattaacctcgccaattaatcctcaacatatgacgatgttgaaccagctctatcagctgcagctggcataccaacgtttacaaatccagcagcagatgttacaggcccagcgtaatgtgtccggatccatgagacaacaggagcagcaagttgcgcgcacaatcactaatctgcagcagcagatccagcagcaccagcgccagctggcccaggccctgctcgtgaagcagccaccaccgccaccgcccccgccgcacctgtctctgcacccctctgcaggcaaatcggccatggacagcttcccctcgcacccacagactcccggcctacctgacctgcagaccaaagagcagcagtcttcacccaacacctttgctccttaccctctcgctggactgaacccaaacatgaatgtcaacagcatggacatgaccggtggcttgtcggtgaaggacccatcccagtcccagtcacgcctcccccagtggacgcaccccaactccatggataacttgcccagtgccgcttcccccctggagcagaaccctagcaagcatggtgctatccctggaggtctaagcattgggcctccaggtaagtcctccattgatgactcctatggccggtacgatttaatccagaacagtgagtcaccagccagtcctcccgtagctgttccccatagctggtcacgtgccaaatctgacagtgataaaatctcaaatggctctagcatcaactggcccccagaattccatccgggagttccatggaaaggactgcagaatattgaccctgagaatgaccctgacgtcactcctggcagtgtccccactgggcctaccatcaacaccaccatccaggatgtcaaccgctacctcctcaagagtggagggtcctccccgccatcatctcagaatgccacgctgccttcttcgagtgcctggccactcagtgcctccggctacagtagctctttcagcagcattgcatccgcacctagtgttgcaggtaaactgtcagacatcaaatcgacgtggtcctctggccctacctcccacacgcaagcctctctgtctcatgaactatggaaggtgcccagaaacagtactgcacccacgaggccacctccagggttaaccaatcccaagccctcctccacctggggtgccagccccctcggctggaccagctcctactcctcgggttctgcctggagcaccgacacctcaggaagaaccagcagctggctcgttcttcgaaacctcactccccaggtgcaatatggtgcccctgcatcactgagcatgatccagggagggttcccgcttggcccccaatgcagatgaggctgtctggtggggcaggatagttgggggttcttggtcagggtccataagtgacgctgcatgggaggagatgagcaagtgccaggattggctcca

SEQ ID NO: 247335 - DNA, 3748 bp, Homo sapiens
atgggcaaccagaacgggaacccaacaggcactttaggtgcttggggaaacttgctgccacaagagagcacagaaccacaaacgtccacttctcagaatgtgtctttcagcgcacaacctcagaaccttaacactgatggaccaaataacactaaccccatgaactcttcacccaaccctatcaatgcaatgcagacaaatggactgccaaactggggcatggctgttggtatgggggccatcatcccgccccacctgcaaggccttcctggtgctaatggatcatcagtttctcaagtcagtgggggcagtgctgaaggaataagcaattctgtgtggggactgtccccaggtaaccctgccacaggaaatagcaattctgggttcagtcaggggaatggagacactgtgaactcagcattaagtgctaaacaaaatggatccagcagtgctgtgcaaaaggaaggaagtggaggaaatgcttgggattcaggacctcctgctggtcctggaatactcgcctggggaaggggcagtggcaacaatggcgttggtaatatccattcaggagcttggggccaccccagccgaagcacctctaacggtgtgaatggggaatggggaaagcccccaaaccagcattccaacagtgacatcaatgggaaaggatcaacagggtgggagagtcctagtgtcaccagccagaaccctaccgtacagcctggtggtgaacacatgaactcctgggccaaagcggcatcttctggaactacagcaagtgaaggaagtagtgatggttctggcaaccacaatgaaggaagcactgggagggaaggaacgggagaaggccgaaggcgagataaagggattatagaccaagggcacatccagttgccaaggaatgatcttgacccaagagttctgtctaatactggttggggacagactcctgtaaagcaaaacactgcctgggaatttgaagaatcccctaggtctgaaaggaaaaatgacaatgggacagaggcctggggttgtgcagctactcaggcttcaaactcaggggggaagaacgatgggtccatcatgaacagtacaaatacctcttcagtatctgggtgggtcaacgcgccacctgccgctgtgccagcaaacacaggttggggagacagcaacaacaaagcgccaagtggcccgggggtttggggggactcgataagctctactgctgttagtactgctgctgctgccaagagtggccatgcttggagtggggccgcaaatcaggaggacaagtcacccacctggggtgagcctccaaagcccaaatcccaacactggggagatggacaaagatcaaatccagcctggagtgcaggagggggagattgggcagattcatcgtctgtccttggacacttgggggatgggaaaaaaaaatggatctggatgggatgctgacagtaataggtcagggtctggttggaatgacaccacgagatctgggaacagtggctggggcaacagcacaaatacaaaggccaatccaggtacaaactggggggagactttaaaacctggcccccaacagaactgggctagcaaaccccaagacaacaatgtgagtaactggggaggagctgcttctgtgaaacagacaggaacagggtggatcggggggccggtaccggtcaaacagaaggacagcagtgaagcaactggctgggaagaaccctctccaccgtccattcgccgcaaaatggaaattgatgatggtacctcagcttggggggacccaagcaactataacaataaaactgtaaacatgtgggatagaaacaacccggtcatccagagcagtaccacgaccaataccaccaccaccaccaccactaccacgagcaacaccacacacagggtcgagacgccgcccccgcaccaggccggtactcagctgaatcgatcaccgttgcttggtccagtttcatcaggctggggagaaatgcctaatgttcactcaaagactgaaaactcttggggagaaccatcctccccttctaccctggtggataatggcacagcagcatgggggaagccacccagcagtggcagcgggtggggagatcaccctgcagagccgccggtggcatttggaagagctggcgcacctgttgctgcctcagccctgtgcaaaccagcttcaaaatctatgcaagaaggctggggcagtggtggggatgaaatgaacctcagtaccagccagtgggaggatgaagaaggggacgtgtggaataatgctgcttcccaagaaagcacctcctcctgcagctcctgggggaacgcccccaaaaaaggacttcaaaagggcatgaagacgtctggcaagcaggatgaggcctggatcatgagccggctgatcaaacaactcacagacatgggcttcccgagagagccagctgaggaggccttgaagagtaacaatatgaatcttgatcaggccatgagcgctctgctggaaaagaaggtggacgtggacaagcgtgggctgggagtgaccgaccataatggaatggccgccaagcccctcggctgccgcccgccaatctccaaagagtcttccgtggaccgccccacctttcttgacaaggatggcggcctcgtggaagagcccacgccttcaccgttcttgccttccccaagcctgaagctccccctttcacacagtgcactccccagtcaggccctgggtgggattgcctccgggctgggcatgcaaaacttgaattcttctagacagataccgagtggcaatctgggtatgtttggcaatagtggagcagcacaagccaggaccatgcagcagccgccacagccaccagtgcagcctcttaactcttcccagcccagtctccgtgctcaagtgcctcagtttctatcccctcaggttcaagcacagcttttgcagtttgcagcaaaaaacattggtctcaaccctgcactattaacctcgccaattaatcctcaacatatgacgatgttgaaccagctctatcagctgcagctggcataccaacgtttacaaatccagcagcagatgttacaggcccagcgtaatgtgtccggatccatgagacaacaggagcagcaagttgcgcgcacaatcactaatctgcagcagcagatccagcagcaccagcgccagctggcccaggccctgctcgtgaagcagccaccaccgccaccgcccccgccgcacctgtctctgcacccctctgcaggcaaatcggccatggacagcttcccctcgcacccacagactcccggcctacctgacctgcagaccaaagagcagcagtcttcacccaacacctttgctccttaccctctcgctggactgaacccaaacatgaatgtcaacagcatggacatgaccggtggcttgtcggtgaaggacccatcccagtcccagtcacgcctcccccagtggacgcaccccaactccatggataacttgcccagtgccgcttcccccctggagcagaaccctagcaagcatggtacgtctgagctaggatgcctgtggtgggatcactgctggcttattaatcgatcgtcctgttgtatagcatggccattctatacttttctaagaattgagcactgaaagttggatttaaaataacccattccattatagtgcatataagatctcagctagtcactgatcaacttcactcgaacccggtaccat

SEQ ID NO: 247336 - DNA, 163 bp, Homo sapiens
ccatcaacaccaccatccaggatgtcaaccgctacctcctcaagagtggaggtgagggtgctgctcttcctgcctctgcatggacggtctctctagacccatttggagatgtcaggggtgacaggttgggctgtgaggcagggatgatacaaggcacagttgg

SEQ ID NO: 247337 - DNA, 118 bp, Homo sapiens
ttgagggctcattcggacctgctggcttagttaggggacctcttactctggaatcttatagtccaaaacggggaatgttctagacagagagattctaaattcacattaaaaaaagaga

SEQ ID NO: 247338 - DNA, 414 bp, Homo sapiens
aatatcgcctctgtctgctgccttcatgtcttcatcccaaacagggtggagtgagaaaatagaggcatcacttgctagcaaagtaagccccctctgcagctgtttctcaaagtggagccccactggacatttcctccctgttctgtcatatgtgctctaaaactgagacacccagtgcctaagaactgcttgcaggcatggggttagcaatttccatctctcccagaagaaaagggtgggaagaggagcgagataagaagaaacagctgagatgtatcatcctttcttttgctaaatgttggcctcctacctttgtggagttaccattccaagaaatgactgttttttcttaagattcaacactgctctttgggagttgggtctccttcagtaataaaatcttatgaacatata

SEQ ID NO: 247339 - DNA, 476 bp, Homo sapiens
ggtcccgtggcccccgggacggcctcggcccggagccccaggaaccgccgcccggcccgcctccgtccccggccgccgcgcccgaggccgtgccgcccccgccggcgcccccctcctactcggacaagggcgtccagactcccagcaagggcacgccggcgccgctgcccaacggcaaccaccggtactgccgtctttgcaacatcaagttcagcagcctgtccaccttcatcgcccacaagaagtattactgctcctcgcacgccgccgagcacgtgaagtgagcgcccacactacagccgcagacgctttgcacgccccgctgcgatgcggggagggggccgcccccaggccgcacggactgccgctcctgggaaccccgccacgcacaggcctcggcggagggggccgcagggggcagcgcccgcctggacccttggcacttaataaagaagttcagtttgatgagaaaggtg

SEQ ID NO: 247340 - DNA, 418 bp, Homo sapiens
aagccccgagccctcccagcgcagatgttaactcacccccccgccggcgcccccctcctactcggacaagggcgtccagactcccagcaagggcacgccggcgccgctgcccaacggcaaccaccggtactgccgtctttgcaacatcaagttcagcagcctgtccaccttcatcgcccacaagaagtattactgctcctcgcacgccgccgagcacgtgaagtgagcgcccacactacagccgcagacgctttgcacgccccgctgcgatgcggggagggggccgcccccaggccgcacggactgccgctcctgggaaccccgccacgcacaggcctcggcggagggggccgcagggggcagcgcccgcctggacccttggcacttaataaagaagttcagtttgatgagaaaggtg

SEQ ID NO: 247341 - DNA, 1181 bp, Homo sapiens
tcataaaataaaatcttaacaaatttcaaaagattgaactcatataaaagtatatttctggatacagtggaattaaactataaatcacttacaggagtatagctttttaaaatactcaaatatttaggaattaaaccacacacttataaataaaccatgagtcgaagaagtcacaatgaaaattataaaatattttgaattggatatgaaaaacctattttgaattggtgggaaaagatacatatccaaacctgtggtatgcagctgaaatagttcttaaataaaaattataactttaaatgattatattagcaaagaaggaaggaagaaaatcagttctctaaatgtcaattaaaagaagctagaaaaagaatggccaattaaacccacagaagatcgatacaagaaatgataaagacaggaacagatataaataaatgtaatcatagaggttagtaaacaccaaaaagaagtttttggaaaaatttaataaaatggacaaatcctttgcaagattgattaagaaaaaaagagatgggccaagcacagtggctcatgcctgtaatcccagcactttgggaggctgaggcaggtagatcacctcaggtcaggggtttgagaccagcctagccagcatggcgaaacctcgtctccacaaaaaattaaaaaaattagccaggaatggtggtgggcatctgtaatcccagctacctgggaggctgaggcaggagaatctcttgaacctgggaggcagagattgcagtgagccaagatcgtgccactgtactccagccactccagcctgggtgacagagtgagactccatctcaaaaaaaaatacaataaaataaagataaaatgcaaataatcataacagatacatagacattgctatagatcctacttatattgaaaagaaatacaaagatattgtaacaattttatgccaatacatatatattcagaggaaattgacacattcattgaaaaatataactcactgaaaccgaacaaaagacagaaaacatgaataggtttagatcatgaggaaattaaatctgaaattaaaatcatttcccaacagaaaacaccattccaagatggcttcactggtgaatttatctaacattaaagtataattttacacaaattattttagataataaggagcatgagagcac

SEQ ID NO: 247342 - DNA, 1127 bp, Homo sapiens
tcataaaataaaatcttaacaaatttcaaaagattgaactcatataaaatttttaaaatactcaaatatttaggaattaaaccacacacttataaataaaccatgagtcgaagaagtcacaatgaaaattataaaatattttgaattggatatgaaaaacctattttgaattggtgggaaaagatacatatccaaacctgtggtatgcagctgaaatagttcttaaataaaaattataactttaaatgattatattagcaaagaaggaaggaagaaaatcagttctctaaatgtcaattaaaagaagctagaaaaagaatggccaattaaacccacagaagatcgatacaagaaatgataaagacaggaacagatataaataaatgtaatcatagaggttagtaaacaccaaaaagaagtttttggaaaaatttaataaaatggacaaatcctttgcaagattgattaagaaaaaaagagatgggccaagcacagtggctcatgcctgtaatcccagcactttgggaggctgaggcaggtagatcacctcaggtcaggggtttgagaccagcctagccagcatggcgaaacctcgtctccacaaaaaattaaaaaaattagccaggaatggtggtgggcatctgtaatcccagctacctgggaggctgaggcaggagaatctcttgaacctgggaggcagagattgcagtgagccaagatcgtgccactgtactccagccactccagcctgggtgacagagtgagactccatctcaaaaaaaaatacaataaaataaagataaaatgcaaataatcataacagatacatagacattgctatagatcctacttatattgaaaagaaatacaaagatattgtaacaattttatgccaatacatatatattcagaggaaattgacacattcattgaaaaatataactcactgaaaccgaacaaaagacagaaaacatgaataggtttagatcatgaggaaattaaatctgaaattaaaatcatttcccaacagaaaacaccattccaagatggcttcactggtgaatttatctaacattaaagtataattttacacaaattattttagataataaggagcatgagagcac

SEQ ID NO: 247343 - DNA, 215 bp, Homo sapiens
agacctgcaacctggccctcccaagacaagctgctgatggctgtgggccggctgtcaccacaggaccctgatcaccctgagaaatgccagttggaggaagcaatatggtcaccctgtgtgagccataagtgagggtttatagcataatcctaatgaggaactttgtctgaagtctgaggctgagttacttcaactatttgaaagttggctacgat

SEQ ID NO: 247344 - DNA, 5113 bp, Homo sapiens
  misc_feature (33)..(33): n is a, c, g, or t
  misc_feature (36)..(36): n is a, c, g, or t
cactgtggctacaagtctatgctactggccggnagnctggagcccagcagcagcgcggcggcgccggcgtcgtcccaacttgcaggcgcggagggacccctgacatttcactaaaatgagcgtgctcagcaggaagagatgtgttcctcacgctagaagccaccccgtcacatgtagtggtgtcccgtttaatggattctgacatggattatgaaaggccaaacgtagagaccatcaagtgcgttgtggtgggggacaacgccgtgggtaagaccaggctcatctgtgcccgcgcttgcaatgccaccctcacccagtaccagctgctggccacgcatgtgcccacagtatgggccatcgaccaatatcgtgtgtgccaggaggtgctggaacgctcccgagacgtggtagatgatgtcagcgtctctctgcgcctctgggacacctttggagaccaccacaaagaccgtcgctttgcttatgggagatctgatgtggtggttctgtgcttctccattgccaaccccaattccctccaccatgtcaagaccatgtggtacccagaaatcaagcacttctgcccccgagcacctgtcatcttggtgggctgccagttggacctgcgctacgctgacctggaggctgtcaacagggctaggcgacccttggctaggcccatcaaacctaatgaaatcctgcccccagagaagggtcgggaggtggccaaggagctgggcatcccctactatgagaccagcgtggtggcccagttcggcatcaaggacgtctttgacaacgccatccgagctgcactcatctcccgccgccacctgcagttctggaagtcccacctccgcaatgtgcagcggcctctgctgcaggcacccttcctaccccccaagccaccgcccccgatcatcgtggtgcccgaccctccctccagcagcgaggagggccccgcccacctcctggaggacccgctctgcgcggacgtcatcctggtgctgcaggagcgggtgcgcatctttgcccacaagatctacctctccacctcctcctccaagttctatgacctgttcctcatggacctgagtgagggggagctggggggcccctcggagccagggggcacccacccagaggaccaccagggccactctgatcaacaccaccaccatcaccaccaccaccatgggcgagacttcctgctccgagcagccagctttgacgtgtgcgagagcgtggatgaggctgggggctccggtcctgctggcctccgtgcttccaccagcgacgggatcttacggggcaacggaacagggtacctaccgggcaggggtcgtgtgctgtcttcctggagccgagcttttgtgagcatccaggaagagatggcagaagatcctctcacctacaaatcccggctgatggtggtggtgaagatggacagttccatccagccggggcccttccgggctgtcctcaagtacctgtacacgggggagctagatgagaacgagcgtgacctcatgcacattgcccacattgctgagctgctcgaggtctttgatctgcgcatgatggtggccaacattctcaacaatgaggccttcatgaaccaggagatcaccaaggccttccacgtccgccggaccaaccgggttaaggagtgcttggcaaaaggcaccttctcagatgtgaccttcatcctggatgatggcaccatcagcgcccacaagcccctgttgatttccagctgtgactggatggctgccatgtttggggggccatttgtggagagctccacccgggaggtggtgtttccctacacaagcaagagctgcatgcgggccgtgctggaatacctctacaccggcatgttcacctccagccccgacctggatgacatgaagctcatcattctagccaaccgcctctgcctgccacacctggttgccctcacagagcagtacacagtgaccgggctgatggaagcgacccagatgatggtggacatcgatggggacgtccttgtgttcctggaactggctcagttccactgtgcgtaccagctggccgactggtgtctccaccacatctgcaccaactacaacaacgtgtgccgcaagttcccccgagacatgaaggccatgtccccagaaaaccaggagtatttcgagaagcatcggtggccacctgtgtggtacctgaaggaggaagatcattaccagcgggcacggaaggagcgtgagaaggaggactacctccacctcaagcggcagcccaaacggcgttggctcttctggaacagtccatcctccccgtcttcctcggcagcctcctcctcatccccatcttcctcctcggctgtggtctgagatgctgccaccctcttctgaccctgctgctgttgtccccatccgccttcacccctctgctcttccgcatcaccccatccaccttacagggaccagggggcccacgtaaccaggacccagagggtggagctcttcttaccagccaccgtggctcagccagagaggagctgagccctgtggagcagaacgggaaccacctgcagaggtccccagacccaaagcaggacgggagacaactgcttggaggagcgaagagccctggcattttatctctgggtttgagagccctagagtcaaagggaaagcctcccagcctccagggcttctctgtgtgtcttggttgctgctctggccagggaggcagccccactcccagcaagcagaagtgatcctcgagggtcctgcccctgttggccatatctttccaccgacggacttgagtgttgcatttgttttgtgggcatttccacacgaagcctactcacaccctcactggagaagtcagggtagaaattgagccttcagagcccaactcaaggcttctacatcctggggtgcagctgcaaaaggccagacgtggaaaggcctgtatcctgccagtgtccctccgtcccagggggctgtgctggcacagacctgagaatggggacacaggtcattcagagctccaggcctggaagcagtgcctcttggtgcaacaagaaacttctccctcaccccctcctttaccctcagatttggagatggtaaccaaaggaagcagctgggacaggtggagaaggaagtaggaatgagtgcacggcgaccccgtgctcctcagggccctcccctgcctctgggtggcactgctttttatagggtggggcaaaattagcaaaaaacaaaaaccaatgacaaccaaactgaaaccgaaacgaaaaatcaacaaacactctgtcctctatccctccaaagaatgaaaatcagaaaaagcccctgcctagctcacatttctataaacagaggcccccatgatgaggaggtgaagatttaggttgcagaatcgactccaatgcctttcaggaaaggactcggcacttctctgactgcggaggccctgaccctgccagctggctccgagggcaacacaggggcctggcctctagagggctggtgattgaggggcccgggctggcggcaaagaggggtttggtctcggggcttaaatggcaccagactcttgcttttgcccatctggagactgcaggctcccttccttaccctcagagagtgcttatggtgggtgtttttgcggggctgcaataggggccaaaagtcagggaaaggggcactgacctgtagtgaaaggccacaggacacagccttattactgctggggtgggataaggggaaggagaagagggagaatggagcaggaggaaaagcagagttggtctagagaggaggagggcggggctggaggaatgtgggggattgaaactagctcccagcccccatggggcagcagctgggccacaattgcccctttccgttttctaaccccgactcagatttcaccacccacactctttttaggtgtaaaagatggagtcccacggaggaggggcagagccaggaggcagtggggctgtgggctcagagctcaggagtcgccttacctgagagagatgttctagctgagagggcctggccctggggtgggctccaggaaaacgctggttaggcctgggattgagctaacctgaaacaaaggtagcaggcaggacctaatgaccagaggttaaatcctcatcaagagagaccaggcggctggaggacaagcggctctaaccctgggggcggccatgttgtccaggcccaggcccctccaggactgtggctgcctcccctccacggcctccagggcggctggctggaaagccacgcgtatgctgccctctacaggctgctcggcctccctgcagctcagcgcagcccagggctccaagtgaggcccagaagcccatgggcagggctggggggacgaagggggaacccggagcacctccacttctagggaagatggacagcgtgggggcacacctgggcctcccggaagctgtggacgaaagggagagcgggtcctccagggcaaggggaacgggaaataggtctcctaggtgcctgaagcgctgagcaacctgggtaccctggtggggatgcagggaaggccggggcagagaaagcgaaggtcgacccagggctgtaggaagccataggagagtgaccacgggattccctgagaaacagggccggccccccaacttcagggacccaccgcccattccccgagagctgtcggaaccagatgcaacccggcagcccagagaactctcctgggaggctgtgggtgagccaggccaacattggtgtccctgtccccagagggaggagcaggcaggagagagaggggaaggaggtatgaatcccagtccccaggaacctagctctttaaactctggggagtcggattcaggaaacacccccaggaggccaagcctgaaaacagaggggagggaggaaggaaggagtcccagcaggagcacagccctggtttcctgtcactcagagctgattcacaggaggaggggaggttggggggcgggagacaaaaaccacacctctttttatataaggtttcatatttaatttggtcatggattcataaatacataagtattttgtacacaatataaatc

SEQ ID NO: 247345 - DNA, 5406 bp, Homo sapiens
  misc_feature (326)..(326): n is a, c, g, or t
  misc_feature (329)..(329): n is a, c, g, or t
tccctatcctttttttgtgaatgaaaaaaggaggtcgcgagcggtacctgggactgcagcgccaggcgtcttcgcggcagcgccttcgccgcgggcccgggcgcgtagcggcggcggcctcgcccctctcccggcgcccctgcgcgccgcccgctgcctccgcagcccggctccgcgcgccgccgtgacattgggcgcctggcgcgcggggcgatgctgatccggaaggggcagcggctgcagtgcagcgcgcgcgtccgctcctgggcccacgtccggcctgggctgccctgccggagtttctgagtggccgcgagctggccggnagnctggagcccagcagcagcgcggcggcgccggcgtcgtcccaacttgcaggcgcggagggacccctgacatttcactaaaatgagcgtgctcagcaggaagagatgtgttcctcacgctagaagccaccccgtcacatgtagtggtgtcccgtttaatggattctgacatggattatgaaaggccaaacgtagagaccatcaagtgcgttgtggtgggggacaacgccgtgggtaagaccaggctcatctgtgcccgcgcttgcaatgccaccctcacccagtaccagctgctggccacgcatgtgcccacagtatgggccatcgaccaatatcgtgtgtgccaggaggtgctggaacgctcccgagacgtggtagatgatgtcagcgtctctctgcgcctctgggacacctttggagaccaccacaaagaccgtcgctttgcttatgggagatctgatgtggtggttctgtgcttctccattgccaaccccaattccctccaccatgtcaagaccatgtggtacccagaaatcaagcacttctgcccccgagcacctgtcatcttggtgggctgccagttggacctgcgctacgctgacctggaggctgtcaacagggctaggcgacccttggctaggcccatcaaacctaatgaaatcctgcccccagagaagggtcgggaggtggccaaggagctgggcatcccctactatgagaccagcgtggtggcccagttcggcatcaaggacgtctttgacaacgccatccgagctgcactcatctcccgccgccacctgcagttctggaagtcccacctccgcaatgtgcagcggcctctgctgcaggcacccttcctaccccccaagccaccgcccccgatcatcgtggtgcccgaccctccctccagcagcgaggagggccccgcccacctcctggaggacccgctctgcgcggacgtcatcctggtgctgcaggagcgggtgcgcatctttgcccacaagatctacctctccacctcctcctccaagttctatgacctgttcctcatggacctgagtgagggggagctggggggcccctcggagccagggggcacccacccagaggaccaccagggccactctgatcaacaccaccaccatcaccaccaccaccatgggcgagacttcctgctccgagcagccagctttgacgtgtgcgagagcgtggatgaggctgggggctccggtcctgctggcctccgtgcttccaccagcgacgggatcttacggggcaacggaacagggtacctaccgggcaggggtcgtgtgctgtcttcctggagccgagcttttgtgagcatccaggaagagatggcagaagatcctctcacctacaaatcccggctgatggtggtggtgaagatggacagttccatccagccggggcccttccgggctgtcctcaagtacctgtacacgggggagctagatgagaacgagcgtgacctcatgcacattgcccacattgctgagctgctcgaggtctttgatctgcgcatgatggtggccaacattctcaacaatgaggccttcatgaaccaggagatcaccaaggccttccacgtccgccggaccaaccgggttaaggagtgcttggcaaaaggcaccttctcagatgtgaccttcatcctggatgatggcaccatcagcgcccacaagcccctgttgatttccagctgtgactggatggctgccatgtttggggggccatttgtggagagctccacccgggaggtggtgtttccctacacaagcaagagctgcatgcgggccgtgctggaatacctctacaccggcatgttcacctccagccccgacctggatgacatgaagctcatcattctagccaaccgcctctgcctgccacacctggttgccctcacagagcagtacacagtgaccgggctgatggaagcgacccagatgatggtggacatcgatggggacgtccttgtgttcctggaactggctcagttccactgtgcgtaccagctggccgactggtgtctccaccacatctgcaccaactacaacaacgtgtgccgcaagttcccccgagacatgaaggccatgtccccagaaaaccaggagtatttcgagaagcatcggtggccacctgtgtggtacctgaaggaggaagatcattaccagcgggcacggaaggagcgtgagaaggaggactacctccacctcaagcggcagcccaaacggcgttggctcttctggaacagtccatcctccccgtcttcctcggcagcctcctcctcatccccatcttcctcctcggctgtggtctgagatgctgccaccctcttctgaccctgctgctgttgtccccatccgccttcacccctctgctcttccgcatcaccccatccaccttacagggaccagggggcccacgtaaccaggacccagagggtggagctcttcttaccagccaccgtggctcagccagagaggagctgagccctgtggagcagaacgggaaccacctgcagaggtccccagacccaaagcaggacgggagacaactgcttggaggagcgaagagccctggcattttatctctgggtttgagagccctagagtcaaagggaaagcctcccagcctccagggcttctctgtgtgtcttggttgctgctctggccagggaggcagccccactcccagcaagcagaagtgatcctcgagggtcctgcccctgttggccatatctttccaccgacggacttgagtgttgcatttgttttgtgggcatttccacacgaagcctactcacaccctcactggagaagtcagggtagaaattgagccttcagagcccaactcaaggcttctacatcctggggtgcagctgcaaaaggccagacgtggaaaggcctgtatcctgccagtgtccctccgtcccagggggctgtgctggcacagacctgagaatggggacacaggtcattcagagctccaggcctggaagcagtgcctcttggtgcaacaagaaacttctccctcaccccctcctttaccctcagatttggagatggtaaccaaaggaagcagctgggacaggtggagaaggaagtaggaatgagtgcacggcgaccccgtgctcctcagggccctcccctgcctctgggtggcactgctttttatagggtggggcaaaattagcaaaaaacaaaaaccaatgacaaccaaactgaaaccgaaacgaaaaatcaacaaacactctgtcctctatccctccaaagaatgaaaatcagaaaaagcccctgcctagctcacatttctataaacagaggcccccatgatgaggaggtgaagatttaggttgcagaatcgactccaatgcctttcaggaaaggactcggcacttctctgactgcggaggccctgaccctgccagctggctccgagggcaacacaggggcctggcctctagagggctggtgattgaggggcccgggctggcggcaaagaggggtttggtctcggggcttaaatggcaccagactcttgcttttgcccatctggagactgcaggctcccttccttaccctcagagagtgcttatggtgggtgtttttgcggggctgcaataggggccaaaagtcagggaaaggggcactgacctgtagtgaaaggccacaggacacagccttattactgctggggtgggataaggggaaggagaagagggagaatggagcaggaggaaaagcagagttggtctagagaggaggagggcggggctggaggaatgtgggggattgaaactagctcccagcccccatggggcagcagctgggccacaattgcccctttccgttttctaaccccgactcagatttcaccacccacactctttttaggtgtaaaagatggagtcccacggaggaggggcagagccaggaggcagtggggctgtgggctcagagctcaggagtcgccttacctgagagagatgttctagctgagagggcctggccctggggtgggctccaggaaaacgctggttaggcctgggattgagctaacctgaaacaaaggtagcaggcaggacctaatgaccagaggttaaatcctcatcaagagagaccaggcggctggaggacaagcggctctaaccctgggggcggccatgttgtccaggcccaggcccctccaggactgtggctgcctcccctccacggcctccagggcggctggctggaaagccacgcgtatgctgccctctacaggctgctcggcctccctgcagctcagcgcagcccagggctccaagtgaggcccagaagcccatgggcagggctggggggacgaagggggaacccggagcacctccacttctagggaagatggacagcgtgggggcacacctgggcctcccggaagctgtggacgaaagggagagcgggtcctccagggcaaggggaacgggaaataggtctcctaggtgcctgaagcgctgagcaacctgggtaccctggtggggatgcagggaaggccggggcagagaaagcgaaggtcgacccagggctgtaggaagccataggagagtgaccacgggattccctgagaaacagggccggccccccaacttcagggacccaccgcccattccccgagagctgtcggaaccagatgcaacccggcagcccagagaactctcctgggaggctgtgggtgagccaggccaacattggtgtccctgtccccagagggaggagcaggcaggagagagaggggaaggaggtatgaatcccagtccccaggaacctagctctttaaactctggggagtcggattcaggaaacacccccaggaggccaagcctgaaaacagaggggagggaggaaggaaggagtcccagcaggagcacagccctggtttcctgtcactcagagctgattcacaggaggaggggaggttggggggcgggagacaaaaaccacacctctttttatataaggtttcatatttaatttggtcatggattcataaatacataagtattttgtacacaatataaatc

SEQ ID NO: 247346 - DNA, 1132 bp, Homo sapiens
aggatgtggaccaaaatagtgccctgagggccaggggctgggccaggcatcaagaatgctcacctggccaaagatggggaacagggcctccggtctaggtggtttatctctgtgctctgcacagccctggacggggaacaaagcctctggcccagggtttatctctgggctttgcacagccctggaggaggagggaactgaccagcaggccggccccctggtcacaggaatcatgtccttcacctgccttcccataagctggactttggatcccagcccttaaaaccctgtgttgtttcttcctgcagacctggtcgagaacactacttcaggacagggaatagtgacaggccagcagagccccagaggcgaggtggcagtaaacaagaatatgcacgcgcagtggaccacttctgaaggtcaacatataactttctcatccctgacatcaactgtcatccctgtgagcagaaccaactaccaaaggagagaggagcctggagggaacacagagcgatgcaagcctggagaaaaggccccgatggcccccagaagacctcttcagacagcatgtcccgtttaatggattctgacatggattatgaaaggccaaacgtagagaccatcaagtgcgttgtggtgggggacaacgccgtgggtaagaccaggctcatctgtgcccgcgcttgcaatgccaccctcacccagtaccagctgctggccacgcatgtgcccacagtatgggccatcgaccaatatcgtgtgtgccaggaggtgctggaacgctcccgagacgtggtagatgatgtcagcgtctctctgcgcctctgggacacctttggagaccaccacaaagaccgtcgctttgcttatgggagatctgatgtggtggttctgtgcttctccattgccaaccccaattccctccaccatgtcaagaccatgtggtacccagaaatcaagcacttctgcccccgagcacctgtcatcttggtgggctgccagttggacctgcgctacgctgacctggaggctgtcaacaggtagggacctggtaggccataactaagaatctggccaaagaggtcgggagcgccagcacggtaccaacaaaacgcgcgccacagcaaaa

SEQ ID NO: 247347 - DNA, 729 bp, Homo sapiens
atgactacgagttcactggccgatgctttacatgaggatacatgcctagcgatgactgcggcctccatgggggagcctttacttatcctgaggtggcacgcagaggtccccaaaactgctgccttcgagtcccactcttcctccccgtccccaggtgctggaacgctcccgagacgtggtagatgatgtcagcgtctctctgcgcctctgggacacctttggagaccaccacaaagaccgtcgctttgcttatgggaggtagggaaggcctctggccgcctgcagataaccaacagggtgggtttttccctgcttttcccaggaacaaagcacctctgtgaaatttcagctggcaagaagaagtggagaaaacagctctggcagagcctcatgggggctggggcagcctggtgcagtgaagggagcctgggtccgggatcaggaagcctggattgagttctagctctgtgcctagtagctctgagatgatgtttctcagctgtgaagtggtgaaaatggccatttctaactcacaaaatagctgtgaggccaaaacaagtcttgagctctaaagtggcacataaattggaggtattgtgattatatgttttgtgtcaagagcacgtgagcagatacctaagccaggtgtgggactgtacagggctggggtggggcagatgttccaggaccaggtaagctaccacttgtttctctgcccgtaaccttact

SEQ ID NO: 247348 - DNA, 409 bp, Homo sapiens
gagaccgactctcgctctgtcaccccggctggagtaggggtaggaaaggtacccattcccttttggagaggaccagattgagggaagctgagagggcagggaaggcctgggtccgggatcaggaagcctggattgagttctagctctgtgcctagtagctctgagatgatgtttctcagctgtgaagtggtgaaaatggccatttctaactcacaaaatagctgtgaggccaaaacaagtcttgagctctaaagtggcacataaattggaggtattgtgattatatgttttgtgtcaagagcacgtgagcagatacctaagccaggtgtgggactgtacagggctggggtggggcagatgttccaggaccaggtaagctaccacttgtttctctgcccgtaaccttact

SEQ ID NO: 247349 - DNA, 5504 bp, Homo sapiens
aggatgtggaccaaaatagtgccctgagggccaggggctgggccaggcatcaagaatgctcacctggccaaagatggggaacagggcctccggtctaggtggtttatctctgtgctctgcacagccctggacggggaacaaagcctctggcccagggtttatctctgggctttgcacagccctggaggaggagggaactgaccagcaggccggccccctggtcacaggaatcatgtccttcacctgccttcccataagctggactttggatcccagcccttaaaaccctgtgttgtttcttcctgcagacctggtcgagaacactacttcaggacagggaatagtgacaggccagcagagccccagaggcgaggtggcagtaaacaagaatatgcacgcgcagtggaccacttctgaaggtcaacatataactttctcatccctgacatcaactgtcatccctgtgagcagaaccaactaccaaaggagagaggagcctggagggaacacagagcgatgcaagcctggagaaaaggccccgatggcccccagaagacctcttcagacagcatgtcccgtttaatggattctgacatggattatgaaaggccaaacgtagagaccatcaagtgcgttgtggtgggggacaacgccgtgggtaagaccaggctcatctgtgcccgcgcttgcaatgccaccctcacccagtaccagctgctggccacgcatgtgcccacagtatgggccatcgaccaatatcgtgtgtgccaggaggtgctggaacgctcccgagacgtggtagatgatgtcagcgtctctctgcgcctctgggacacctttggagaccaccacaaagaccgtcgctttgcttatgggagatctgatgtggtggttctgtgcttctccattgccaaccccaattccctccaccatgtcaagaccatgtggtacccagaaatcaagcacttctgcccccgagcacctgtcatcttggtgggctgccagttggacctgcgctacgctgacctggaggctgtcaacagggctaggcgacccttggctaggcccatcaaacctaatgaaatcctgcccccagagaagggtcgggaggtggccaaggagctgggcatcccctactatgagaccagcgtggtggcccagttcggcatcaaggacgtctttgacaacgccatccgagctgcactcatctcccgccgccacctgcagttctggaagtcccacctccgcaatgtgcagcggcctctgctgcaggcacccttcctaccccccaagccaccgcccccgatcatcgtggtgcccgaccctccctccagcagcgaggagggccccgcccacctcctggaggacccgctctgcgcggacgtcatcctggtgctgcaggagcgggtgcgcatctttgcccacaagatctacctctccacctcctcctccaagttctatgacctgttcctcatggacctgagtgagggggagctggggggcccctcggagccagggggcacccacccagaggaccaccagggccactctgatcaacaccaccaccatcaccaccaccaccatgggcgagacttcctgctccgagcagccagctttgacgtgtgcgagagcgtggatgaggctgggggctccggtcctgctggcctccgtgcttccaccagcgacgggatcttacggggcaacggaacagggtacctaccgggcaggggtcgtgtgctgtcttcctggagccgagcttttgtgagcatccaggaagagatggcagaagatcctctcacctacaaatcccggctgatggtggtggtgaagatggacagttccatccagccggggcccttccgggctgtcctcaagtacctgtacacgggggagctagatgagaacgagcgtgacctcatgcacattgcccacattgctgagctgctcgaggtctttgatctgcgcatgatggtggccaacattctcaacaatgaggccttcatgaaccaggagatcaccaaggccttccacgtccgccggaccaaccgggttaaggagtgcttggcaaaaggcaccttctcagatgtgaccttcatcctggatgatggcaccatcagcgcccacaagcccctgttgatttccagctgtgactggatggctgccatgtttggggggccatttgtggagagctccacccgggaggtggtgtttccctacacaagcaagagctgcatgcgggccgtgctggaatacctctacaccggcatgttcacctccagccccgacctggatgacatgaagctcatcattctagccaaccgcctctgcctgccacacctggttgccctcacagagcagtacacagtgaccgggctgatggaagcgacccagatgatggtggacatcgatggggacgtccttgtgttcctggaactggctcagttccactgtgcgtaccagctggccgactggtgtctccaccacatctgcaccaactacaacaacgtgtgccgcaagttcccccgagacatgaaggccatgtccccagaaaaccaggagtatttcgagaagcatcggtggccacctgtgtggtacctgaaggaggaagatcattaccagcgggcacggaaggagcgtgagaaggaggactacctccacctcaagcggcagcccaaacggcgttggctcttctggaacagtccatcctccccgtcttcctcggcagcctcctcctcatccccatcttcctcctcggctgtggtctgagatgctgccaccctcttctgaccctgctgctgttgtccccatccgccttcacccctctgctcttccgcatcaccccatccaccttacagggaccagggggcccacgtaaccaggacccagagggtggagctcttcttaccagccaccgtggctcagccagagaggagctgagccctgtggagcagaacgggaaccacctgcagaggtccccagacccaaagcaggacgggagacaactgcttggaggagcgaagagccctggcattttatctctgggtttgagagccctagagtcaaagggaaagcctcccagcctccagggcttctctgtgtgtcttggttgctgctctggccagggaggcagccccactcccagcaagcagaagtgatcctcgagggtcctgcccctgttggccatatctttccaccgacggacttgagtgttgcatttgttttgtgggcatttccacacgaagcctactcacaccctcactggagaagtcagggtagaaattgagccttcagagcccaactcaaggcttctacatcctggggtgcagctgcaaaaggccagacgtggaaaggcctgtatcctgccagtgtccctccgtcccagggggctgtgctggcacagacctgagaatggggacacaggtcattcagagctccaggcctggaagcagtgcctcttggtgcaacaagaaacttctccctcaccccctcctttaccctcagatttggagatggtaaccaaaggaagcagctgggacaggtggagaaggaagtaggaatgagtgcacggcgaccccgtgctcctcagggccctcccctgcctctgggtggcactgctttttatagggtggggcaaaattagcaaaaaacaaaaaccaatgacaaccaaactgaaaccgaaacgaaaaatcaacaaacactctgtcctctatccctccaaagaatgaaaatcagaaaaagcccctgcctagctcacatttctataaacagaggcccccatgatgaggaggtgaagatttaggttgcagaatcgactccaatgcctttcaggaaaggactcggcacttctctgactgcggaggccctgaccctgccagctggctccgagggcaacacaggggcctggcctctagagggctggtgattgaggggcccgggctggcggcaaagaggggtttggtctcggggcttaaatggcaccagactcttgcttttgcccatctggagactgcaggctcccttccttaccctcagagagtgcttatggtgggtgtttttgcggggctgcaataggggccaaaagtcagggaaaggggcactgacctgtagtgaaaggccacaggacacagccttattactgctggggtgggataaggggaaggagaagagggagaatggagcaggaggaaaagcagagttggtctagagaggaggagggcggggctggaggaatgtgggggattgaaactagctcccagcccccatggggcagcagctgggccacaattgcccctttccgttttctaaccccgactcagatttcaccacccacactctttttaggtgtaaaagatggagtcccacggaggaggggcagagccaggaggcagtggggctgtgggctcagagctcaggagtcgccttacctgagagagatgttctagctgagagggcctggccctggggtgggctccaggaaaacgctggttaggcctgggattgagctaacctgaaacaaaggtagcaggcaggacctaatgaccagaggttaaatcctcatcaagagagaccaggcggctggaggacaagcggctctaaccctgggggcggccatgttgtccaggcccaggcccctccaggactgtggctgcctcccctccacggcctccagggcggctggctggaaagccacgcgtatgctgccctctacaggctgctcggcctccctgcagctcagcgcagcccagggctccaagtgaggcccagaagcccatgggcagggctggggggacgaagggggaacccggagcacctccacttctagggaagatggacagcgtgggggcacacctgggcctcccggaagctgtggacgaaagggagagcgggtcctccagggcaaggggaacgggaaataggtctcctaggtgcctgaagcgctgagcaacctgggtaccctggtggggatgcagggaaggccggggcagagaaagcgaaggtcgacccagggctgtaggaagccataggagagtgaccacgggattccctgagaaacagggccggccccccaacttcagggacccaccgcccattccccgagagctgtcggaaccagatgcaacccggcagcccagagaactctcctgggaggctgtgggtgagccaggccaacattggtgtccctgtccccagagggaggagcaggcaggagagagaggggaaggaggtatgaatcccagtccccaggaacctagctctttaaactctggggagtcggattcaggaaacacccccaggaggccaagcctgaaaacagaggggagggaggaaggaaggagtcccagcaggagcacagccctggtttcctgtcactcagagctgattcacaggaggaggggaggttggggggcgggagacaaaaaccacacctctttttatataaggtttcatatttaatttggtcatggattcataaatacataagtattttgtacacaatataaatc

SEQ ID NO: 247350 - DNA, 5292 bp, Homo sapiens
aaggctaggtacgaggccgggtgttcacccttaaaaccctgtgttgtttcttcctgcagacctggtcgagaacactacttcaggacagggaatagtgacaggccagcagagccccagaggcgaggtggcagcctgttctgttccacgcactcctttatctggaagcagtaaacaagaatatgcacgcgcagtggaccacttctgaaggtcaacatataactttctcatccctgacatcaactgtcatccctgtgagcagaaccaactaccaaaggagagaggagcctggagggaacacagagcgatgcaagcctggagaaaaggccccgatggcccccagaagacctcttcagacagcatgtcccgtttaatggattctgacatggattatgaaaggccaaacgtagagaccatcaagtgcgttgtggtgggggacaacgccgtgggtaagaccaggctcatctgtgcccgcgcttgcaatgccaccctcacccagtaccagctgctggccacgcatgtgcccacagtatgggccatcgaccaatatcgtgtgtgccaggaggtgctggaacgctcccgagacgtggtagatgatgtcagcgtctctctgcgcctctgggacacctttggagaccaccacaaagaccgtcgctttgcttatgggagatctgatgtggtggttctgtgcttctccattgccaaccccaattccctccaccatgtcaagaccatgtggtacccagaaatcaagcacttctgcccccgagcacctgtcatcttggtgggctgccagttggacctgcgctacgctgacctggaggctgtcaacagggctaggcgacccttggctaggcccatcaaacctaatgaaatcctgcccccagagaagggtcgggaggtggccaaggagctgggcatcccctactatgagaccagcgtggtggcccagttcggcatcaaggacgtctttgacaacgccatccgagctgcactcatctcccgccgccacctgcagttctggaagtcccacctccgcaatgtgcagcggcctctgctgcaggcacccttcctaccccccaagccaccgcccccgatcatcgtggtgcccgaccctccctccagcagcgaggagggccccgcccacctcctggaggacccgctctgcgcggacgtcatcctggtgctgcaggagcgggtgcgcatctttgcccacaagatctacctctccacctcctcctccaagttctatgacctgttcctcatggacctgagtgagggggagctggggggcccctcggagccagggggcacccacccagaggaccaccagggccactctgatcaacaccaccaccatcaccaccaccaccatgggcgagacttcctgctccgagcagccagctttgacgtgtgcgagagcgtggatgaggctgggggctccggtcctgctggcctccgtgcttccaccagcgacgggatcttacggggcaacggaacagggtacctaccgggcaggggtcgtgtgctgtcttcctggagccgagcttttgtgagcatccaggaagagatggcagaagatcctctcacctacaaatcccggctgatggtggtggtgaagatggacagttccatccagccggggcccttccgggctgtcctcaagtacctgtacacgggggagctagatgagaacgagcgtgacctcatgcacattgcccacattgctgagctgctcgaggtctttgatctgcgcatgatggtggccaacattctcaacaatgaggccttcatgaaccaggagatcaccaaggccttccacgtccgccggaccaaccgggttaaggagtgcttggcaaaaggcaccttctcagatgtgaccttcatcctggatgatggcaccatcagcgcccacaagcccctgttgatttccagctgtgactggatggctgccatgtttggggggccatttgtggagagctccacccgggaggtggtgtttccctacacaagcaagagctgcatgcgggccgtgctggaatacctctacaccggcatgttcacctccagccccgacctggatgacatgaagctcatcattctagccaaccgcctctgcctgccacacctggttgccctcacagagcagtacacagtgaccgggctgatggaagcgacccagatgatggtggacatcgatggggacgtccttgtgttcctggaactggctcagttccactgtgcgtaccagctggccgactggtgtctccaccacatctgcaccaactacaacaacgtgtgccgcaagttcccccgagacatgaaggccatgtccccagaaaaccaggagtatttcgagaagcatcggtggccacctgtgtggtacctgaaggaggaagatcattaccagcgggcacggaaggagcgtgagaaggaggactacctccacctcaagcggcagcccaaacggcgttggctcttctggaacagtccatcctccccgtcttcctcggcagcctcctcctcatccccatcttcctcctcggctgtggtctgagatgctgccaccctcttctgaccctgctgctgttgtccccatccgccttcacccctctgctcttccgcatcaccccatccaccttacagggaccagggggcccacgtaaccaggacccagagggtggagctcttcttaccagccaccgtggctcagccagagaggagctgagccctgtggagcagaacgggaaccacctgcagaggtccccagacccaaagcaggacgggagacaactgcttggaggagcgaagagccctggcattttatctctgggtttgagagccctagagtcaaagggaaagcctcccagcctccagggcttctctgtgtgtcttggttgctgctctggccagggaggcagccccactcccagcaagcagaagtgatcctcgagggtcctgcccctgttggccatatctttccaccgacggacttgagtgttgcatttgttttgtgggcatttccacacgaagcctactcacaccctcactggagaagtcagggtagaaattgagccttcagagcccaactcaaggcttctacatcctggggtgcagctgcaaaaggccagacgtggaaaggcctgtatcctgccagtgtccctccgtcccagggggctgtgctggcacagacctgagaatggggacacaggtcattcagagctccaggcctggaagcagtgcctcttggtgcaacaagaaacttctccctcaccccctcctttaccctcagatttggagatggtaaccaaaggaagcagctgggacaggtggagaaggaagtaggaatgagtgcacggcgaccccgtgctcctcagggccctcccctgcctctgggtggcactgctttttatagggtggggcaaaattagcaaaaaacaaaaaccaatgacaaccaaactgaaaccgaaacgaaaaatcaacaaacactctgtcctctatccctccaaagaatgaaaatcagaaaaagcccctgcctagctcacatttctataaacagaggcccccatgatgaggaggtgaagatttaggttgcagaatcgactccaatgcctttcaggaaaggactcggcacttctctgactgcggaggccctgaccctgccagctggctccgagggcaacacaggggcctggcctctagagggctggtgattgaggggcccgggctggcggcaaagaggggtttggtctcggggcttaaatggcaccagactcttgcttttgcccatctggagactgcaggctcccttccttaccctcagagagtgcttatggtgggtgtttttgcggggctgcaataggggccaaaagtcagggaaaggggcactgacctgtagtgaaaggccacaggacacagccttattactgctggggtgggataaggggaaggagaagagggagaatggagcaggaggaaaagcagagttggtctagagaggaggagggcggggctggaggaatgtgggggattgaaactagctcccagcccccatggggcagcagctgggccacaattgcccctttccgttttctaaccccgactcagatttcaccacccacactctttttaggtgtaaaagatggagtcccacggaggaggggcagagccaggaggcagtggggctgtgggctcagagctcaggagtcgccttacctgagagagatgttctagctgagagggcctggccctggggtgggctccaggaaaacgctggttaggcctgggattgagctaacctgaaacaaaggtagcaggcaggacctaatgaccagaggttaaatcctcatcaagagagaccaggcggctggaggacaagcggctctaaccctgggggcggccatgttgtccaggcccaggcccctccaggactgtggctgcctcccctccacggcctccagggcggctggctggaaagccacgcgtatgctgccctctacaggctgctcggcctccctgcagctcagcgcagcccagggctccaagtgaggcccagaagcccatgggcagggctggggggacgaagggggaacccggagcacctccacttctagggaagatggacagcgtgggggcacacctgggcctcccggaagctgtggacgaaagggagagcgggtcctccagggcaaggggaacgggaaataggtctcctaggtgcctgaagcgctgagcaacctgggtaccctggtggggatgcagggaaggccggggcagagaaagcgaaggtcgacccagggctgtaggaagccataggagagtgaccacgggattccctgagaaacagggccggccccccaacttcagggacccaccgcccattccccgagagctgtcggaaccagatgcaacccggcagcccagagaactctcctgggaggctgtgggtgagccaggccaacattggtgtccctgtccccagagggaggagcaggcaggagagagaggggaaggaggtatgaatcccagtccccaggaacctagctctttaaactctggggagtcggattcaggaaacacccccaggaggccaagcctgaaaacagaggggagggaggaaggaaggagtcccagcaggagcacagccctggtttcctgtcactcagagctgattcacaggaggaggggaggttggggggcgggagacaaaaaccacacctctttttatataaggtttcatatttaatttggtcatggattcataaatacataagtattttgtacacaatataaatc

SEQ ID NO: 247351 - DNA, 4783 bp, Homo sapiens
tgcatgaaaaagtcctataattttgctgagggataaactaaatatgtgagcatgttaaatacccatgtgaagcattgcctgctaattgccagagaggcagtgctgtcacggctttgtactggggaggtcactggggcctggcatagtagggaaagctttctggaagaaaaagggcttggagtggaccttgaaggagcttgatgggatttggccagacagagcagggcaggagtgggtggggattggcacccagatcctgagcagagtccctccagcctgtggaagaacaggcagcctccctccaccaccaacacaagcttggtttccttcttgaacctaccaggcccatcaaacctaatgaaatcctgcccccagagaagggtcgggaggtggccaaggagctgggcatcccctactatgagaccagcgtggtggcccagttcggcatcaaggacgtctttgacaacgccatccgagctgcactcatctcccgccgccacctgcagttctggaagtcccacctccgcaatgtgcagcggcctctgctgcaggcacccttcctaccccccaagccaccgcccccgatcatcgtggtgcccgaccctccctccagcagcgaggagggccccgcccacctcctggaggacccgctctgcgcggacgtcatcctggtgctgcaggagcgggtgcgcatctttgcccacaagatctacctctccacctcctcctccaagttctatgacctgttcctcatggacctgagtgagggggagctggggggcccctcggagccagggggcacccacccagaggaccaccagggccactctgatcaacaccaccaccatcaccaccaccaccatgggcgagacttcctgctccgagcagccagctttgacgtgtgcgagagcgtggatgaggctgggggctccggtcctgctggcctccgtgcttccaccagcgacgggatcttacggggcaacggaacagggtacctaccgggcaggggtcgtgtgctgtcttcctggagccgagcttttgtgagcatccaggaagagatggcagaagatcctctcacctacaaatcccggctgatggtggtggtgaagatggacagttccatccagccggggcccttccgggctgtcctcaagtacctgtacacgggggagctagatgagaacgagcgtgacctcatgcacattgcccacattgctgagctgctcgaggtctttgatctgcgcatgatggtggccaacattctcaacaatgaggccttcatgaaccaggagatcaccaaggccttccacgtccgccggaccaaccgggttaaggagtgcttggcaaaaggcaccttctcagatgtgaccttcatcctggatgatggcaccatcagcgcccacaagcccctgttgatttccagctgtgactggatggctgccatgtttggggggccatttgtggagagctccacccgggaggtggtgtttccctacacaagcaagagctgcatgcgggccgtgctggaatacctctacaccggcatgttcacctccagccccgacctggatgacatgaagctcatcattctagccaaccgcctctgcctgccacacctggttgccctcacagagcagtacacagtgaccgggctgatggaagcgacccagatgatggtggacatcgatggggacgtccttgtgttcctggaactggctcagttccactgtgcgtaccagctggccgactggtgtctccaccacatctgcaccaactacaacaacgtgtgccgcaagttcccccgagacatgaaggccatgtccccagaaaaccaggagtatttcgagaagcatcggtggccacctgtgtggtacctgaaggaggaagatcattaccagcgggcacggaaggagcgtgagaaggaggactacctccacctcaagcggcagcccaaacggcgttggctcttctggaacagtccatcctccccgtcttcctcggcagcctcctcctcatccccatcttcctcctcggctgtggtctgagatgctgccaccctcttctgaccctgctgctgttgtccccatccgccttcacccctctgctcttccgcatcaccccatccaccttacagggaccagggggcccacgtaaccaggacccagagggtggagctcttcttaccagccaccgtggctcagccagagaggagctgagccctgtggagcagaacgggaaccacctgcagaggtccccagacccaaagcaggacgggagacaactgcttggaggagcgaagagccctggcattttatctctgggtttgagagccctagagtcaaagggaaagcctcccagcctccagggcttctctgtgtgtcttggttgctgctctggccagggaggcagccccactcccagcaagcagaagtgatcctcgagggtcctgcccctgttggccatatctttccaccgacggacttgagtgttgcatttgttttgtgggcatttccacacgaagcctactcacaccctcactggagaagtcagggtagaaattgagccttcagagcccaactcaaggcttctacatcctggggtgcagctgcaaaaggccagacgtggaaaggcctgtatcctgccagtgtccctccgtcccagggggctgtgctggcacagacctgagaatggggacacaggtcattcagagctccaggcctggaagcagtgcctcttggtgcaacaagaaacttctccctcaccccctcctttaccctcagatttggagatggtaaccaaaggaagcagctgggacaggtggagaaggaagtaggaatgagtgcacggcgaccccgtgctcctcagggccctcccctgcctctgggtggcactgctttttatagggtggggcaaaattagcaaaaaacaaaaaccaatgacaaccaaactgaaaccgaaacgaaaaatcaacaaacactctgtcctctatccctccaaagaatgaaaatcagaaaaagcccctgcctagctcacatttctataaacagaggcccccatgatgaggaggtgaagatttaggttgcagaatcgactccaatgcctttcaggaaaggactcggcacttctctgactgcggaggccctgaccctgccagctggctccgagggcaacacaggggcctggcctctagagggctggtgattgaggggcccgggctggcggcaaagaggggtttggtctcggggcttaaatggcaccagactcttgcttttgcccatctggagactgcaggctcccttccttaccctcagagagtgcttatggtgggtgtttttgcggggctgcaataggggccaaaagtcagggaaaggggcactgacctgtagtgaaaggccacaggacacagccttattactgctggggtgggataaggggaaggagaagagggagaatggagcaggaggaaaagcagagttggtctagagaggaggagggcggggctggaggaatgtgggggattgaaactagctcccagcccccatggggcagcagctgggccacaattgcccctttccgttttctaaccccgactcagatttcaccacccacactctttttaggtgtaaaagatggagtcccacggaggaggggcagagccaggaggcagtggggctgtgggctcagagctcaggagtcgccttacctgagagagatgttctagctgagagggcctggccctggggtgggctccaggaaaacgctggttaggcctgggattgagctaacctgaaacaaaggtagcaggcaggacctaatgaccagaggttaaatcctcatcaagagagaccaggcggctggaggacaagcggctctaaccctgggggcggccatgttgtccaggcccaggcccctccaggactgtggctgcctcccctccacggcctccagggcggctggctggaaagccacgcgtatgctgccctctacaggctgctcggcctccctgcagctcagcgcagcccagggctccaagtgaggcccagaagcccatgggcagggctggggggacgaagggggaacccggagcacctccacttctagggaagatggacagcgtgggggcacacctgggcctcccggaagctgtggacgaaagggagagcgggtcctccagggcaaggggaacgggaaataggtctcctaggtgcctgaagcgctgagcaacctgggtaccctggtggggatgcagggaaggccggggcagagaaagcgaaggtcgacccagggctgtaggaagccataggagagtgaccacgggattccctgagaaacagggccggccccccaacttcagggacccaccgcccattccccgagagctgtcggaaccagatgcaacccggcagcccagagaactctcctgggaggctgtgggtgagccaggccaacattggtgtccctgtccccagagggaggagcaggcaggagagagaggggaaggaggtatgaatcccagtccccaggaacctagctctttaaactctggggagtcggattcaggaaacacccccaggaggccaagcctgaaaacagaggggagggaggaaggaaggagtcccagcaggagcacagccctggtttcctgtcactcagagctgattcacaggaggaggggaggttggggggcgggagacaaaaaccacacctctttttatataaggtttcatatttaatttggtcatggattcataaatacataagtattttgtacacaatataaatc

SEQ ID NO: 247352 - DNA, 3639 bp, Homo sapiens
gttctgcattggtgctattagcattgcctgtcggtctcagctcctggtgtcctggagctgcggctgccatgctcttgaagcctggttttccccagctgggagcgggtttgttccgtgccccgaatcttctgggttcaggaggaggctccgtggctccccttggggcttgttctcccagcttctttcaccagtcctcctgtgatgcttcttctggacagatgtgaccttcatcctggatgatggcaccatcagcgcccacaagcccctgttgatttccagctgtgactggatggctgccatgtttggggggccatttgtggagagctccacccgggaggtggtgtttccctacacaagcaagagctgcatgcgggccgtgctggaatacctctacaccggcatgttcacctccagccccgacctggatgacatgaagctcatcattctagccaaccgcctctgcctgccacacctggttgccctcacagagcagtacacagtgaccgggctgatggaagcgacccagatgatggtggacatcgatggggacgtccttgtgttcctggaactggctcagttccactgtgcgtaccagctggccgactggtgtctccaccacatctgcaccaactacaacaacgtgtgccgcaagttcccccgagacatgaaggccatgtccccagaaaaccaggagtatttcgagaagcatcggtggccacctgtgtggtacctgaaggaggaagatcattaccagcgggcacggaaggagcgtgagaaggaggactacctccacctcaagcggcagcccaaacggcgttggctcttctggaacagtccatcctccccgtcttcctcggcagcctcctcctcatccccatcttcctcctcggctgtggtctgagatgctgccaccctcttctgaccctgctgctgttgtccccatccgccttcacccctctgctcttccgcatcaccccatccaccttacagggaccagggggcccacgtaaccaggacccagagggtggagctcttcttaccagccaccgtggctcagccagagaggagctgagccctgtggagcagaacgggaaccacctgcagaggtccccagacccaaagcaggacgggagacaactgcttggaggagcgaagagccctggcattttatctctgggtttgagagccctagagtcaaagggaaagcctcccagcctccagggcttctctgtgtgtcttggttgctgctctggccagggaggcagccccactcccagcaagcagaagtgatcctcgagggtcctgcccctgttggccatatctttccaccgacggacttgagtgttgcatttgttttgtgggcatttccacacgaagcctactcacaccctcactggagaagtcagggtagaaattgagccttcagagcccaactcaaggcttctacatcctggggtgcagctgcaaaaggccagacgtggaaaggcctgtatcctgccagtgtccctccgtcccagggggctgtgctggcacagacctgagaatggggacacaggtcattcagagctccaggcctggaagcagtgcctcttggtgcaacaagaaacttctccctcaccccctcctttaccctcagatttggagatggtaaccaaaggaagcagctgggacaggtggagaaggaagtaggaatgagtgcacggcgaccccgtgctcctcagggccctcccctgcctctgggtggcactgctttttatagggtggggcaaaattagcaaaaaacaaaaaccaatgacaaccaaactgaaaccgaaacgaaaaatcaacaaacactctgtcctctatccctccaaagaatgaaaatcagaaaaagcccctgcctagctcacatttctataaacagaggcccccatgatgaggaggtgaagatttaggttgcagaatcgactccaatgcctttcaggaaaggactcggcacttctctgactgcggaggccctgaccctgccagctggctccgagggcaacacaggggcctggcctctagagggctggtgattgaggggcccgggctggcggcaaagaggggtttggtctcggggcttaaatggcaccagactcttgcttttgcccatctggagactgcaggctcccttccttaccctcagagagtgcttatggtgggtgtttttgcggggctgcaataggggccaaaagtcagggaaaggggcactgacctgtagtgaaaggccacaggacacagccttattactgctggggtgggataaggggaaggagaagagggagaatggagcaggaggaaaagcagagttggtctagagaggaggagggcggggctggaggaatgtgggggattgaaactagctcccagcccccatggggcagcagctgggccacaattgcccctttccgttttctaaccccgactcagatttcaccacccacactctttttaggtgtaaaagatggagtcccacggaggaggggcagagccaggaggcagtggggctgtgggctcagagctcaggagtcgccttacctgagagagatgttctagctgagagggcctggccctggggtgggctccaggaaaacgctggttaggcctgggattgagctaacctgaaacaaaggtagcaggcaggacctaatgaccagaggttaaatcctcatcaagagagaccaggcggctggaggacaagcggctctaaccctgggggcggccatgttgtccaggcccaggcccctccaggactgtggctgcctcccctccacggcctccagggcggctggctggaaagccacgcgtatgctgccctctacaggctgctcggcctccctgcagctcagcgcagcccagggctccaagtgaggcccagaagcccatgggcagggctggggggacgaagggggaacccggagcacctccacttctagggaagatggacagcgtgggggcacacctgggcctcccggaagctgtggacgaaagggagagcgggtcctccagggcaaggggaacgggaaataggtctcctaggtgcctgaagcgctgagcaacctgggtaccctggtggggatgcagggaaggccggggcagagaaagcgaaggtcgacccagggctgtaggaagccataggagagtgaccacgggattccctgagaaacagggccggccccccaacttcagggacccaccgcccattccccgagagctgtcggaaccagatgcaacccggcagcccagagaactctcctgggaggctgtgggtgagccaggccaacattggtgtccctgtccccagagggaggagcaggcaggagagagaggggaaggaggtatgaatcccagtccccaggaacctagctctttaaactctggggagtcggattcaggaaacacccccaggaggccaagcctgaaaacagaggggagggaggaaggaaggagtcccagcaggagcacagccctggtttcctgtcactcagagctgattcacaggaggaggggaggttggggggcgggagacaaaaaccacacctctttttatataaggtttcatatttaatttggtcatggattcataaatacataagtattttgtacacaatataaatc

SEQ ID NO: 247353 - DNA, 2845 bp, Homo sapiens
tgggtgacgtggcttgtggtttgaccgtggcttggaacagtccatcctccccgtcttcctcggcagcctcctcctcatccccatcttcctcctcggctgtggtctgagatgctgccaccctcttctgaccctgctgctgttgtccccatccgccttcacccctctgctcttccgcatcaccccatccaccttacagggaccagggggcccacgtaaccaggacccagagggtggagctcttcttaccagccaccgtggctcagccagagaggagctgagccctgtggagcagaacgggaaccacctgcagaggtccccagacccaaagcaggacgggagacaactgcttggaggagcgaagagccctggcattttatctctgggtttgagagccctagagtcaaagggaaagcctcccagcctccagggcttctctgtgtgtcttggttgctgctctggccagggaggcagccccactcccagcaagcagaagtgatcctcgagggtcctgcccctgttggccatatctttccaccgacggacttgagtgttgcatttgttttgtgggcatttccacacgaagcctactcacaccctcactggagaagtcagggtagaaattgagccttcagagcccaactcaaggcttctacatcctggggtgcagctgcaaaaggccagacgtggaaaggcctgtatcctgccagtgtccctccgtcccagggggctgtgctggcacagacctgagaatggggacacaggtcattcagagctccaggcctggaagcagtgcctcttggtgcaacaagaaacttctccctcaccccctcctttaccctcagatttggagatggtaaccaaaggaagcagctgggacaggtggagaaggaagtaggaatgagtgcacggcgaccccgtgctcctcagggccctcccctgcctctgggtggcactgctttttatagggtggggcaaaattagcaaaaaacaaaaaccaatgacaaccaaactgaaaccgaaacgaaaaatcaacaaacactctgtcctctatccctccaaagaatgaaaatcagaaaaagcccctgcctagctcacatttctataaacagaggcccccatgatgaggaggtgaagatttaggttgcagaatcgactccaatgcctttcaggaaaggactcggcacttctctgactgcggaggccctgaccctgccagctggctccgagggcaacacaggggcctggcctctagagggctggtgattgaggggcccgggctggcggcaaagaggggtttggtctcggggcttaaatggcaccagactcttgcttttgcccatctggagactgcaggctcccttccttaccctcagagagtgcttatggtgggtgtttttgcggggctgcaataggggccaaaagtcagggaaaggggcactgacctgtagtgaaaggccacaggacacagccttattactgctggggtgggataaggggaaggagaagagggagaatggagcaggaggaaaagcagagttggtctagagaggaggagggcggggctggaggaatgtgggggattgaaactagctcccagcccccatggggcagcagctgggccacaattgcccctttccgttttctaaccccgactcagatttcaccacccacactctttttaggtgtaaaagatggagtcccacggaggaggggcagagccaggaggcagtggggctgtgggctcagagctcaggagtcgccttacctgagagagatgttctagctgagagggcctggccctggggtgggctccaggaaaacgctggttaggcctgggattgagctaacctgaaacaaaggtagcaggcaggacctaatgaccagaggttaaatcctcatcaagagagaccaggcggctggaggacaagcggctctaaccctgggggcggccatgttgtccaggcccaggcccctccaggactgtggctgcctcccctccacggcctccagggcggctggctggaaagccacgcgtatgctgccctctacaggctgctcggcctccctgcagctcagcgcagcccagggctccaagtgaggcccagaagcccatgggcagggctggggggacgaagggggaacccggagcacctccacttctagggaagatggacagcgtgggggcacacctgggcctcccggaagctgtggacgaaagggagagcgggtcctccagggcaaggggaacgggaaataggtctcctaggtgcctgaagcgctgagcaacctgggtaccctggtggggatgcagggaaggccggggcagagaaagcgaaggtcgacccagggctgtaggaagccataggagagtgaccacgggattccctgagaaacagggccggccccccaacttcagggacccaccgcccattccccgagagctgtcggaaccagatgcaacccggcagcccagagaactctcctgggaggctgtgggtgagccaggccaacattggtgtccctgtccccagagggaggagcaggcaggagagagaggggaaggaggtatgaatcccagtccccaggaacctagctctttaaactctggggagtcggattcaggaaacacccccaggaggccaagcctgaaaacagaggggagggaggaaggaaggagtcccagcaggagcacagccctggtttcctgtcactcagagctgattcacaggaggaggggaggttggggggcgggagacaaaaaccacacctctttttatataaggtttcatatttaatttggtcatggattcataaatacataagtattttgtacacaatataaatc

SEQ ID NO: 247354 - DNA, 1417 bp, Homo sapiens
gttctgcattggtgctattagcattgcctgtcggtctcagctcctggtgtcctggagctgcggctgccatgctcttgaagcctggttttccccagctgggagcgggtttgttccgtgccccgaatcttctgggttcaggaggaggctccgtggctccccttggggcttgttctcccagcttctttcaccagtcctcctgtgatgcttcttctggacagatgtgaccttcatcctggatgatggcaccatcagcgcccacaagcccctgttgatttccagctgtgactggatggctgccatgtttggggggccatttgtggagagctccacccgggagctgagagagatgttctagctgagagggcctggccctggggtgggctccaggaaaacgctggttaggcctgggattgagctaacctgaaacaaaggtagcaggcaggacctaatgaccagaggttaaatcctcatcaagagagaccaggcggctggaggacaagcggctctaaccctgggggcggccatgttgtccaggcccaggcccctccaggactgtggctgcctcccctccacggcctccagggcggctggctggaaagccacgcgtatgctgccctctacaggctgctcggcctccctgcagctcagcgcagcccagggctccaagtgaggcccagaagcccatgggcagggctggggggacgaagggggaacccggagcacctccacttctagggaagatggacagcgtgggggcacacctgggcctcccggaagctgtggacgaaagggagagcgggtcctccagggcaaggggaacgggaaataggtctcctaggtgcctgaagcgctgagcaacctgggtaccctggtggggatgcagggaaggccggggcagagaaagcgaaggtcgacccagggctgtaggaagccataggagagtgaccacgggattccctgagaaacagggccggccccccaacttcagggacccaccgcccattccccgagagctgtcggaaccagatgcaacccggcagcccagagaactctcctgggaggctgtgggtgagccaggccaacattggtgtccctgtccccagagggaggagcaggcaggagagagaggggaaggaggtatgaatcccagtccccaggaacctagctctttaaactctggggagtcggattcaggaaacacccccaggaggccaagcctgaaaacagaggggagggaggaaggaaggagtcccagcaggagcacagccctggtttcctgtcactcagagctgattcacaggaggaggggaggttggggggcgggagacaaaaaccacacctctttttatataaggtttcatatttaatttggtcatggattcataaatacataagtattttgtacacaatataaatc

SEQ ID NO: 247355 - DNA, 375 bp, Homo sapiens
gagcacaggtgagaaccacagcccttcccaggtggcccctggcaatcctccaacctgggtcaaaagcagctacgaccctaaattcatgcttagttactgacatccagcaatgcctaagggaagggtcaaagttcaggattagctgaccttgataagaacactgagtcttccaagtgtttactacacagatcctgtacccctagtcagacagcctaattgaaaccagcctcattgcaatgtgatcatgtttttaagcagcctgttctgttccacgcactcctttatctggaagcagtaaacaagaatatgcacgcgcagtggaccacttctgaaggtcaacatataactttctcatccctgacatcaactgtcatc

SEQ ID NO: 247356 - DNA, 950 bp, Homo sapiens
ggaggcggcttctcctagcaactcgacgggcgttgagcggagccgctgacctgatggacgccgacagcctcctgctgtctctggagctggcgtccggcagtgggcagggcctcagcccggaccgtcgggcctcgctgctcacgtctcttatgctggttaagcgcgactaccgctatgatcgggttctcttctggggccgcatccttggcctcgtcgccgattactacatcgcgcagggcctgagtgaggaccagctcgcaccgcgcaagacgctctatagcctgaactgcacagagtggagcctcttgccccctgccacagaggagatggtggcgcagtcgtctgtggtgaagggccgcttcatgggggacccatcatacgaatatgaacacactgagctgcagaaggtgaatgaaggtgaaaaagtctttgaagaagaaatagtggtccagatcaaggaagagacccgcttggtgtctgtcattgaccagattgacaaggctgtggccatcatcccccgaggcgccctcttcaagaccccttttggacccacccatgtcaatcggacctttgaaggactgtccttgtctgaggccaagaagctcagctcctacttccatttcagggagcctgttgagctaaagaataagaccttgcttgagaaggctgacctggacccctccctggatttcatggactccttggagcatgacattcccaaagggtcctggagcatccagatggagaggggcaatgccctggtggtgctgcgcagcctgctctggccgggcctcaccttctaccatgctccccgcaccaagaactatggctacgtctacgtgggcactggcgagaagaacatggacttgcccttcatgctatagaatgggagccagcctggatgtttttaaacagagtctaaacatgattttcttaagcttcaaaaaaaa

SEQ ID NO: 247357 - DNA, 1047 bp, Homo sapiens
ggaggcggcttctcctagcaactcgacgggcgttgagcggagccgctgacctgatggacgccgacagcctcctgctgtctctggagctggcgtccggcagtgggcagggcctcagcccggaccgtcgggcctcgctgctcacgtctcttatgctggttaagcgcgactaccgctatgatcgggttctcttctggggccgcatccttggcctcgtcgccgattactacatcgcgcagggcctgagtgaggaccagctcgcaccgcgcaagacgctctatagcctgaactgcacagagtggagcctcttgccccctgccacagaggagatggtggcgcagtcgtctgtggtgaagggccgcttcatgggggacccatcatacgaatatgaacacactgagctgcagaaggtgaatgaaggtgaaaaagtctttgaagaagaaatagtggtccagatcaaggaagagacccgcttggtgtctgtcattgaccagattgacaaggctgtggccatcatcccccgaggcgccctcttcaagaccccttttggacccacccatgtcaatcggacctttgaaggactgtccttgtctgaggccaagaagctcagctcctacttccatttcagggagcctgttgagctaaagaataagaccttgcttgagaaggctgacctggacccctccctggatttcatggactccttggagcatgacattcccaaagggtctgaggcagttgttcagggtgacttcacgtggcttctgagcaggtgtggttttggttggccctgttcctgggactcctgctctgtgtccatgagggtcctggagcatccagatggagaggggcaatgccctggtggtgctgcgcagcctgctctggccgggcctcaccttctaccatgctccccgcaccaagaactatggctacgtctacgtgggcactggcgagaagaacatggacttgcccttcatgctatagaatgggagccagcctggatgtttttaaacagagtctaaacatgattttcttaagcttcaaaaaaaa

SEQ ID NO: 247358 - DNA, 986 bp, Homo sapiens
ggaggcggcttctcctagcaactcgacgggcgttgagcggagccgctgacctgatggacgccgacagcctcctgctgtctctggagctggcgtccggcagtgggcagggcctcagcccggaccgtcgggcctcgctgctcacgtctcttatgctggttaagcgcgactaccgctatgatcgggttctcttctggggccgcatccttggcctcgtcgccgattactacatcgcgcagggcctgagtgaggaccagctcgcaccgcgcaagacgctctatagcctgaactgcacagagtggagcctcttgccccctgccacagaggagatggtggcgcagtcgtctgtggtgaagggccgcttcatgggggacccatcatacgaatatgaacacactgagctgcagaaggtgaatgaaggtgaaaaagtctttgaagaagaaatagtggtccagatcaaggaagagacccgcttggtgtctgtcattgaccagattgacaaggctgtggccatcatcccccgaggcgccctcttcaagaccccttttggacccacccatgtcaatcggacctttgaaggactgtccttgtctgaggccaagaagctcagctcctacttccatttcagggagcctgttgagctaaagaataagaccttgcttgagaaggctgacctggacccctccctggatttcatggactccttggagcatgacattcccaaagggtcctggagcatccagatggagaggggcaatgccctggtgggctacgacgtacccacctgttttgtttccagttagacgtgggaaaaaccaattcaattataaagaatacatcttattccctgggcataggcaactgtgatgaaaatagcaacttacctttgggctagatgttttcagattatacttaaataaccgtggttagaaatttttcaatgcatgcttacctgccccacgcaggtgggctacgtcgtaacctctatg

SEQ ID NO: 247359 - DNA, 825 bp, Homo sapiens
ggaggcggcttctcctagcaactcgacgggcgttgagcggagccgctgacctgatggacgccgacagcctcctgctgtctctggagctggcgtccggcagtgggcagggcctcagcccggaccgtcgggcctcgctgctcacgtctcttatgctggttaagcgcgactaccgctatgatcgggttctcttctggggccgcatccttggcctcgtcgccgattactacatcgcgcagggcctgagtgaggaccagctcgcaccgcgcaagacgctctatagcctgaactgcacagagtggagcctcttgccccctgccacagaggagatggtggcgcagtcgtctgtggtgaagggccgcttcatgggggacccatcatacgaatatgaacacactgagctgcagaaggtgaatgaaggtgaaaaagtctttgaagaagaaatagtggtccagatcaaggaagagacccgcttggtgtctgtcattgaccagattgacaaggctgtggccatcatcccccgaggcgccctcttcaagaccccttttggacccacccatgtcaatcggacctttgaagaactggtataagacccctgcccctcacccaacctgtgatgggaatcaaggggtaagggcccgtgggcgcagccctagcctaggaaggttcctgtaaataggaggggggtggggaaagatggctgccgcccatggacctttggcctcctttggggatggccagggccctgatagttcccagaaaagtggctcatgccggctaggattgggttttactctgtccagaataaaacttggatcctgtccagaa

SEQ ID NO: 247360 - DNA, 934 bp, Homo sapiens
attgcaagttgtcatgaagataagacagcattgtaggggtgaggtgaccctagattagacaggttggctgcagaaggcttctctgagggtgtaacacttgttttgagagctaaaggatgaacgggaggagcatcatgagtaggagggaggcaggagctttctggatagaggcagcagcgtgtgtaaagagcttggggcactagaagaactggaagataaatggtgtgactgcagaatgatgagtgagactcaggaggcacgacatgaggctggagaggtgggcagggctgtgcaggtctcagtaaggagtttgattttattcaaagtgccagggaccattggatataaattcttcataaactgcatgcagaagagagattaaaaggttggcagaaaggaataaaaatgaaactggaggaccaagctggtaaaaattgcccccaagggtctatcagaatcctaactcacttagaccaataagatcagtggttacttacgaacaatacgtttgaaaagacctatgaaaaaacacgtgaaatttggagtttctctgtctctcatgtttcctgtaagtaattcgctagatatagagactcgattagattttgattcagtattttaggcaaaaatattttttgggtggtactgtgtacttcctattttgtcacaatgataggcatataattatatgtttagttccccactttaatgatgctaaaattaattagtgagttcaggtgttatgcctgattccttcatcataaacttctccatcaagtttcaccaaatcattttaacagtgattaataatcattggctagatacactatttcattagagttgcaaaataatagttttcctagcatttcttctttatttattggctaattttctttgattaagcactttcctaaatggagtattcaaaaaaaaa

SEQ ID NO: 247361 - DNA, 328 bp, Homo sapiens
cggcacgagggtgtacaccatggaccgtggcctcatctcctacaaggggctgcaccccttccatgtggagaaaggagtgaaacctttagggcagcttgccccggccccggcccccagccagagttcctgcggagtgaagaggggcagcccttgcttgttgggattcctgacccaggccgcagctcttgcccttccctgtccctctaaagcaataatggtcccatccaggcagtcgggggctggcctaggagatatctgagggaggaggccacctctccaagggtgctttccagagcggcagaaggaatgctccggtgattaagataaa

SEQ ID NO: 247362 - DNA, 492 bp, Homo sapiens
tgcatctgattggtgaaacataaacatatccagaatctcagcttcaagggaatctggataatgtgattttcagctttccagcctctgcttcacagtatcctatacaccataatcgttttgtcccaacatatactgtattgcaagatgctaaggtttctgatgatgcaatgggatgaaataataattctaaaaattctggccaggaatgatggctcacgcctgtaatcccagtactttgagaggccaaggcagatggatcacttgagctgaggagttcaagaccagcctgagcaaaaggtgaaaccccgtctaaaaaaatacagaaaagaatagctgagtgtagtagcatccatctgtagtcccagctactggagggctgaggcgataggatggcctgatcctgggagattgagactgaagtgagctgtgatcacaccactgcattgtagcctgtccagccttggtgacagagcaagaccctttctcaaaaaa

SEQ ID NO: 247363 - DNA, 314 bp, Homo sapiens
tgtgtcaccaatcaagtaagcctgaagcagagtggatgttgatgacggtggctggactgccctgcgcacacactggcgtggctacggctctgcgtgaggcatccagtgctggacttagcagcaccttaaagaaatacacaagtacccggaaccttcctctctgttttgagtcttgtgctttatttttatttactagtgcctgttagtgcaccaatttcaatagtctttgaccattaaatgattgtaaaataagcagtatcagatatttaaatgtttagataacatcaagataaagtccagaaaaatacaggccc

SEQ ID NO: 247364 - DNA, 513 bp, Homo sapiens
gagctgtgtgaggtgtgacaccatagtcagttcacattctgctgccttgactctgaactaattcgaagtaggttagcagctacgtctatgtccgtacctcacccacggcacttggagacccatctgatgctctgagaatgattttttattcaaacagagattatttctttctagtcaagaaagtaatctaggttcatcagaaaaaatattaaggcataaaattaaaatcaattattatcccaatacctgaagataaatactgttcctatactagtcaagaaagtaatctaggttcatcagaaaaaatattaaggcataaaattaaaatcaattattatcccaatacctgaagataaatactgttcctatactaaggcgatttcatttctgggactcttttctttctgttggttttttgttgttgttgttgttaagggtaaaacaaagaatacatttcaattaccataattttcttagaagcagggaactaccctgtgccagggactgctcctg

SEQ ID NO: 247365 - DNA, 211 bp, Homo sapiens
cttttggcgccccctctggatacagatgaaaactgcagtccatttttaagtcgcctgttcataagttttcaggaagatgtaaaattcaaaaatgcttgcatcaaatcaacgggaaatgtataaatccccgtcgtttatgatgtaaaactctacatattagtatcttattgcataattgcattaaaagtatatttatacatatacgtatata

SEQ ID NO: 247366 - DNA, 402 bp, Homo sapiens
gctcttaatttattcttttctctcttttctacaattcatactaatgacttatttccaatacaataaacataaatattaaaataattcaaataatctaaattttattctatgaaatttataattttcactaaatttcacatgtaaaagtatcctcattagaggagtttttccaaactatttcagttactttttgtagaagaaaagggaaatgaggctaactttttaaatctatgtatctaactttttagcttgtaaataccaactcttctgagacactgaccattgctttacaatccctcagaattttgtatttactaatataatcttgtagtcccatataatgtcatcctttcctaccactctaagaaataactgggtttttttgttagattgtttctttga

SEQ ID NO: 247367 - DNA, 687 bp, Homo sapiens
ggaggccgaggcgggtggatcacgaggtcaggagatcaacaccatcctggctaacaaggtgaaaccccgtctctattaaaaacacaaaaaaattacccgggcatggtggcgggcgcctgtagtcccagctactcaggaggctgaggcaggagaatggcgtgaacccgggaggcagagcttgcagtgagccaagatcgcgccactggactccagcctgggcaacagagcgagactccgtctcaaaaaaaaaaaaaagaatttctgtaggagatcttccaaattactgcttacatacatgtatattctattacaaaaattacaccactcaatgtagtctaaattattgagagtaaattgtagccattcttttacatgttttctgaacttagttgccaataatcataatcattagcttttcaaggtttgctctgaaacttacaaaccatgcaaaagtgaaaacttaggcttaacatatttggcaatttaaatcaactaaattgaatcaatctaaatactgctttgcaaagtaaaaaaggaatcaaaatgacacataagacaatcactaatccctatatttttagggtctatttcaagaaatttactactacttcttaccagcctaaggactgtgtaagaaggaaatacagtatacatacagggaagccaactgttttaatgatacctttt

SEQ ID NO: 247368 - DNA, 583 bp, Homo sapiens
gctgagaagttctaccatataacatcagtaaactggagaaccaagaaagctggtggtataatcagtctgactccaaaggcctgagaaccaggggagccaactgaaattgaaggtctgagaaccaagagctctgatatccaagagcgggagaaggtggatgtcccagctcaagaagagagaaagagaattcaccctttctccatctttttgttctattcaggtcctcagtggactggatgatgcctgcccacattggagagggccatcttctttattaagtgcattgattcaaatgctaatctcttctggaaacaccctcacccctcacagacacatccaaaataatgttttaccagctatctggccatccttagcccagtcaagttgacatatataattaaccatctctacaaaaatacaaaattagccaggcatggtggcacatgcctgtaatcccagctactcggaaggctgaggcaggagaatcacttgaacccaggaggtggaggttgcagtgagccaagatcgtgccattgcactccagcctgggcaacaagagcaaaaccccgtcttaaaaaaaaaa

SEQ ID NO: 247369 - DNA, 330 bp, Homo sapiens
agaacatgccacttacttccttccagtctgggtgacagagacagagcgagaccctgtctcaaaaaaaaaaaaaaaaaaaagtaaagaaagaaagtattactgtgaataccttcatttaaaaagaagaaataaatcaatatttggaggccaacatttggcctcctagaacatattagaaagtacaaagattagcagacagataccaatattggaaagtataaagattagcagacaaagataccaatacaaaagtacagaccaatatcccctctgagcatagatacagaaattttcaacaaaatgctaaaaagctaaatctgacatcatatt

SEQ ID NO: 247370 - DNA, 399 bp, Homo sapiens
cactcaagagaaattagttctattttccttcttccctctagtttaataatttaaaaaattaaatcatgcagccataaaaaagaatgaaattatgtcctttgcagcaacaaggatgcagttggaggccattatcctaagcgaattaacacagaaacagaaaacctaatgccgcacattcttacttataagtgggagctaaacactgggtacacacagacacaaagatgggaacagtaggcattggggattcaaaaaggcagaagagaggaaggggggccaggtttgaagaactacttgtgttcactacttggatgatgggatcattagaggcctaaacctcagcatcatgcaatatacccatgtaacaaacctgtgcccgtaccctctgaatcttggata

SEQ ID NO: 247371 - DNA, 236 bp, Homo sapiens
aaccaatgttttgcttgagtgtaccaagcaaggcctcttgagatgctgggacacaaaggtgaattttattttcccttttgcctttgagtagttaactgcctagtagatgagatactggaggtaagagaatgaagattataggatatttaaaggcatttatcatacatatatgtgttatgtttataatgtgctatagaaggacatattaaagttgaagtttctaatattttagatta

SEQ ID NO: 247372 - DNA, 484 bp, Homo sapiens
tcctatagtattaaaggctaataaaattattttaaaatttttaaaagaaattagtacttgccaatatagataaaactaactacaaacaaaataaagaatacatgcaaattctaaaaataaatgtgactataaagttacgggactgatattcatttttggtctgtggaattactctaaatcaggtgacataatcactgttaagggtaattccagaaaaactgactgctctttgtttgggtacatgaaatattttccttccatcacagtatttgttcactgacaagttccattttactcaacatgaagtatgtttgaaaacttacttagaacatctaactcatcagaatttgaatttcttgactctataaattttatataggtctttagttctgtaaatttgaaatttcaaatactgagttttcacatacaaaaaagaatatttttgtattgaaataataaaagctaacattattataaaataaat

SEQ ID NO: 247373 - DNA, 1128 bp, Homo sapiens
taaataaaaataatggaatagctaataatgtacttgatgaccatataccaagaactggactaagtgctcactaaacttaaattttttttcatttaatcctcacaaaaactgtaagaagtagttgtaatttattttatagaaagaaaatagatcacacagctactaagtggcagaacttgggtttagaaccgaggtttgatgcgtcttaacattgctttccttataccgcaattgattattcattagagcatctaactccctccctgtctctttggtttttaggaacttctagcaatagtaaaacaaaagactactgagaatttagatgatgtcaccttcttgtttactttgaaagcactttggaatcttacagatgggtctccagctgcctgcaagcacttcattgaaaatcaaggattgcaaatcttcatccaagtcttggaggtgggaagacaggattgagtttatatgtaaagttcttctcttcatgataaagtaacctgtatgtatatatttttttgacagaccttttcagagtcagcaatacaaagcaaagtacttggtcttttggtaaggtgaattgttttgaattaattttaattgcttaaaagcaaaagctaacacttatatagtacctactatatgctaggcagtattgtaagcaatttacatgtataaactcatttaatctttacattagccctacagagtaaatactattgtatatcagttatctattgttgtgaacaaactatagcttagtggcttaaaacagtagccatttaatttacttatgaatctgtgggtcagtagtttgagctcagctcagctgtaaagttcttctggtctgtctggtctcatgtggggtcacttatgtagctgcagtcatctggtggcttgactggggctggagggtctaagatggcctgactcttatgtctgacagttggtgctgcttaccagctggcgggctttgtgtccacaggcttctccacatggcaatctctagagggcaggccccactgtccaagcgctttttaaacctctgcttatatcaccttgctaatgtttcataggacaacacaggttatatatttaagcccagattaaaggcagtaaagtcacatt

SEQ ID NO: 247374 - DNA, 521 bp, Homo sapiens
taaagcacaccagatgtgagtcactagaaaaacaaaaccaaactcttcaaatgagtaggagtgaatgtaagaattctaatgaatcagcccagggtacacagcctaaatgaagtggaaaaagctaggggaggtttgctaagggggtgcatttgactcttgcgtcctataagttgggaatcctttgtcagcagttgtaacaggcatgctcagctgcaaccacaaacattttccaatggaggagtgttgatagcattttcattgaccttaaaaaaataaaaaatctaatggcagggtcaaggggaaggcaagaggtgtaatttgctggtcagtctcagtcagccgcctgcagcagcctcgtcctgtgtgagactttaagggaatgcacattggcatggggggttcccaggcggaggggggcccagattcagccttggcctcatagaggagcaacaaattgaaacaagagcagccctgttgaccttcaaactgcaaatggactgctttctttgtgccatgtcgcc

SEQ ID NO: 247375 - DNA, 428 bp, Homo sapiens
ctttcctagtgccaaattgtaacaggaatttaatctatctaaatacagggagcagtgatttacataataaatgagataattattatttaataaagatttagagaattctctagattcctgtgttcaagaaggagggcctcaaagctgcctgcagttatatttttatgataattatttattactatctcatgacttaaaaattttcttaacaagtaaaataactaccttttaaaaaatactgtaagaccctttgctatgacctcagataatttaaagtgatgtctcacagacctttatttagactgaaaggcttataaaaattttgtgtgtgcctgtaatcccagcactttgggaggccgaggtgggcagatcacgaggtcaggagttcaagaccagcctggccaatgtggtgaaaccccatctctact

SEQ ID NO: 247376 - DNA, 1834 bp, Homo sapiens
  misc_feature (1830)..(1834): n is a, c, g, or t
cagggcgcgggcgcccgccctgctctgtgacgcgcggcccgaggcgcacgcagggctcacaccacctgtcctggcctccgacccgggccgactatggcggcgctgcggctcctggcgtcagtgctcgggcgcggggtccccgccggcggctcagggctcgcgctgtcccagggctgcgcccgctgctttgccaccagtccccggctccgtgccaagttctacgcggacccggtggagatggtgaaggacatctctgacggggcgaccgtcatgatcgggggcttcgggctctgcgggatccccgagaacctgatcgccgcgctgctcaggacccgcgtgaaagacctgcaggtggtcagcagcaacgtgggcgtggaggacttcggcctgggcctcctgctggccgccaggcaggtccgtcgcatcgtctgttcctacgtgggcgagaacaccctgtgcgagagccagtacctggcaggagagctggagctggagctcacgccccagggcaccctggccgagcgcatccgcgcggggggcgccggggtgcccgccttctacacccccacgggctacgggaccctggtccaggaagggggcgcccccatccgctacaccccggacggccacctggcgctcatgagccagccccgagaggtgagggagttcaacggcgaccacttccttttggagcgcgccatccgggcagacttcgccctggtgaaagggtggaaggccgaccgggcaggaaacgtggtcttcaggagaagcgcccgcaatttcaacgtgcccatgtgcaaagctgcagacgtcacggcggtggaggtggaagagatcgtggaggtgggggctttccccccagaagacatccacgttcctaacatttatgtagatcgcgtgataaaggggcagaaatacgagaaacgaattgagcgcttaacgatcctgaaagaggaagatggagacgctggaaaggaagaggacgccaggacgcgcatcatcagacgcgcagctctggaatttgaggacggcatgtacgccaatctgggcataggcatccccctgctggccagcaacttcatcagtcccagcatgactgtccatcttcacagtgagaacgggatcctgggcctgggcccgtttcccacggaagatgaggtggatgccgacctcatcaatgcaggcaagcagacggtcacggtgcttcccgggggctgcttcttcgccagcgacgactccttcgccatgatccgagggggacacatccaactaaccatgcttggagccatgcaggtttccaaatacggcgacctggcgaactggatgatccctggcaagaaggtgaaaggcatgggcggtgccatggacttggtgtccagtcagaagaccagagtggtggtcaccatgcagcactgcacaaaggacaacacccccaagatcatggagaaatgcaccatgccgctgaccgggaagcggtgcgtggaccgcatcatcaccgagaaggccgtgtttgacgtgcacaggaagaaagagctgacgctgagggagctctgggagggcctgacggtggacgacatcaaaaagagcacggggtgtgcctttgctgtgtccccgaacctcaggcccatgcagcaggtggcaccctgacgggacctggatctgggcggggtggtgcgctcctcagggcgggtgccaccgggttccccaggggaatacatgtccccagctctgggaggggtttgctactggcctcctactttcctccctaggtggacagtgctcctctagagagctgcgactttaattaaaaacaacaggaaaacagaaaannnnn

SEQ ID NO: 247377 - DNA, 1700 bp, Homo sapiens
  misc_feature (1696)..(1700): n is a, c, g, or t
cagggcgcgggcgcccgccctgctctgtgacgcgcggcccgaggcgcacgcagggctcacaccacctgtcctggcctccgacccgggccgactatggcggcgctgcggctcctggcgtcagtgctcgggcgcggggtccccgccggcggctcagggctcgcgctgtcccagggctgcgcccgctgctttgccaccagtccccggctccgtgccaagttctacgcggacccggtggagatggtgaaggacatctctgacggggcgaccgtcatgatcgggggcttcgggctctgcgggatccccgagaacctgatcgccgcgctgctcaggacccgcgtgaaagacctgcaggtggtcagcagcaacgtgggcgtggaggacttcggcctgggcctcctgctggccgccaggcaggtccgtcgcatcgtctgttcctacgtgggcgagaacaccctgtgcgagagccagtacctggcaggagagctggagctggagctcacgccccagggcaccctggccgagcgcatccgcgcggggggcgccggggtgcccgccttctacacccccacgggctacgggaccctggtccaggaagggggcgcccccatccgctacaccccggacggccacctggcgctcatgagccagccccgagaggtgagggagttcaacggcgaccacttccttttggagcgcgccatccgggcagacttcgccctggtgaaagggtggaaggccgaccgggcaggaaacgtggtcttcaggagaagcgcccgcaatttcaacgtgcccatgtgcaaagctgcagacgtcacggcggtggaggtggaagagatcgtggaggtgggggctttccccccagaagacatccacgttcctaacatttatgtagatcgcgtgataaaggggcagaaatacgagaaacgaattgagcgcttaacgatcctgaaagaggaagatggagacgctggaaaggaagaggacgccaggacgcgcatcatcagacgcgcagctctggaatttgaggacggcatgtacgccaatctgggcataggcatccccctgctggccagcaacttcatcagtcccagcatgactgtccatcttcacagtgagaacgggatcctgggcctgggcccgtttcccacggaagatgaggtggatgccgacctcatcaatgcaggcaagcagacggtcacggtgcttcccgggggctgcttcttcgccagcgacgactccttcgccatgatccgagggggacacatccaactaaccatgcttggagccatgcaggtttccaaatacggcgacctggcgaactggatgatccctggcaagaaggtgaaaggcatgggcggtgccatggacttggtgtccagtcagaagaccagagtggtggtcaccatgcagcactgcacaaaggacaacacccccaagatcatggagaaatgcaccatgccgctgaccgggaagcggtgcgtggaccgcatcatcaccgagaaggccgtgtttgacgtgcacaggaagaaagagctgacgctgagggagctctgggagggcctgacggtggacgacatcaaaaagagcacggggtgtgcctttgctgtgtccccgaacctcaggcccatgcagcaggtggacagtgctcctctagagagctgcgactttaattaaaaacaacaggaaaacagaaaannnnn

SEQ ID NO: 247378 - DNA, 599 bp, Homo sapiens
tacatacagtttcagtttccatcagtgacaatccagtcatttccaagataggaacacacctaccaaggtggctcttaccaagtagggactgaaataagactatcttctctcctaccccaagttcagactagcctacccacattttcctgagtattagctcatttcagttgaatgcttgtccccactaattataaaaataatgctcacttttttttttttttttgagacagggtctcactttgtcacttaggctggagtacagcggcatgatcaaggttcactgcagcctcaacctcccaggctcccatctcagccccccaagtagctgggattacaggtgtgcacaccaccttgcccaactaattttttttttttttttggatagaaaaggggttttgccatgttgcccaggctgctcttgaactcttgagctcaggcggtctgcctgctcatttttttaaatttgaaaaaactaaaaagtgcaagcattttaaagcatccatgatcttccagccaaagattaaaacattacaaggggtcataccatcatctttcctatgaatctgaccataactgtgaaaatatttaaatttgtatag

SEQ ID NO: 247379 - DNA, 800 bp, Homo sapiens
tatctctaacattaggaatgctggaggtgcattttaagttttaataataagtgctagaatgaccaaattgcagactaattgtttccatattgtacttaaaatgagtttttaaaagtgaaaaagaaatgactatatacaatcaatgctatttattgtacctctgggcctactcttctaaaaattgtagcttatcgatttttctctgtcaagcttgaactaatgtaaataattgaaataatgtaaagttatattttcatgtttttatagatacaacatgacaagaatacataatgtaagagtatttcaactatggataatgttgattggataatgcacatctcagttacaagcagtactcatagtttaatatccatgtaacggtgcatcaatatattgctatataaatatgtctgtgtgcatataagtgaaaagtggtcaaacaagagtgatgacagctgtctaaaggtttttttattcattttatataaaaactgttatggaaagaccaaaatgtttatgaactattcttatgtaaatttacaattgtcctttactgtacttttttgtttacagtatagtaccttattttctgctgtgttaagtgggtgtcaaactccaagaagacatacactttctataacttctattgaagatattggaatttccaatttttcatgtgtactatgtcagaaaatgctttcgattttatttttaaatctaacatcggatggcttttccggagtgttgtaaaaacttcaatcatacataaaacatgttcttacaaaaggcaaagatcttta

SEQ ID NO: 247380 - DNA, 114 bp, Homo sapiens
gttcagttggcctgctggagaaagtaagaaccaaggtacagttgttcaaaggagcaaattatagtgccaggtgcagtggctcacacctgtaatcccagcactttgggaggctga

SEQ ID NO: 247381 - DNA, 733 bp, Homo sapiens
tcagtaatatttttcatgtataaacattgtggagactattgtagttgcttgtacaatactggggcattggtgatatctgtctctttactattgtagctcctgcctacgcctttagtaactgctaaggtgcagactgtagatctggactgtctgtgtctgtggctcacaacctcaacttctctgctgcctttgatttgctccctctgcagttttgttttctctgtactccgattgcttctcccatgcttctctgctttccaaagaaaaaactgaccttgtatagatcctgtcagctgattgcagtgctcttaacttctccattgtgagttgttcagtctgaggagtaggtataaacccagagtggtattctcttttctgttgtgtttggttttgcttacatattcaggagctgctctttacccccagaacatccgtatatatgtttttttctgtttctagatttaaaaatattccagaagcctggcctcaagatagataatattttacttttaatttggtgcccttgttttagagatttgaactggattgcatttagtaaaccaaaccccatctttaaaaaaatcatcttaaaaaaaaatagtgggccggacatgatggctcacatctgtaaatcccagcactttgggagactgaggtgggaggactgcttgagcccaggagtttgagaccagcctgggcaacacagtgagaccttttgtctacagaaaaaaaa

SEQ ID NO: 247382 - DNA, 231 bp, Homo sapiens
gggtctcactctgttgcccaggctggagtgcaatggcgtgattacagctcactgcagcttcgacttcccaggctcaagtaatcctgccacctcagcctcccacaggaatgcaccactatgcatggctgattttttactttttgtagacagagtctccctatgttgcaatggtgagctgtaatcgcaccactacactccagcctgggtgacggagtgagaccccatctcaaa

SEQ ID NO: 247383 - DNA, 398 bp, Homo sapiens
cactcccccaggccagggccccacttggagtcatggtaccatatgaaggagacccatgaacagtggagaaggggctgggtatgttcacctcccagccaccccaagggccttccaccacagtgtgcccccctgcttcccatgatccttgtatggggtcctcaggtctttgaatggttcctccagctccccccacccccctcccagtaatgaaaatcataaaccaagcgcctcctggtcagagccctgcagccccttcaccgctaaatgggaataaagttagaaccgtcctcacgaggttggtgtgaagataactgaggtaatgcttggacagccccgaaccacagggcctggcatacagtaaatgctcaataaatgttggctactattattactactgt

SEQ ID NO: 247384 - DNA, 280 bp, Homo sapiens
tgctgaattgcttctgtgagttcacttttcagttctaaggaagaataatatttgctacatatttcacaggggttcttatgaaggtaaatttaccagattaataaaaatttatgaatattaaaattatcattaataatataaaacacttatttgagattaaattaaatttttcatgagcccctctttggcaggaactctgtttaattctttgtatttatcccagcttcttaaatggtggctgtaacataataaatgtttaataaatgcttatatgaatgga

SEQ ID NO: 247385 - DNA, 308 bp, Homo sapiens
aggctggagcgctttccttgactgtgagcttgttgaacaccttaggcctcagcccatttccttcccaaattgacgctttgcctgtgtagggccctcagataacttaacaaacttaccagtgttgtttgaagaacagtgttttgagttgtaatctcaaaaccatatcccttacccaattacctgtaagacacaatggttaccacatctcagtacgtaaagtccacttgatatagaattgacttagaaataagacagattagtatagtttttcatttgtgtacaaaattaaacaatgtaaattcccccca

SEQ ID NO: 247386 - DNA, 596 bp, Homo sapiens
tttaaaacattttatttcaaagttgagcactgaaggttgaacataatattcctttttgctagaccatatgttcttccaggaaagaaaatgggcctatttagtgtggaatttccagtttttaacagagtggcttgtacttagtaggtattcaataaatgtttgttaaatgaattacttttccattttatgctacattcagtccaatttttctactcactaaaatctctattctattgcaggtagttattttataaactgaattcataatactatcctgtgattgccaaagaatgtggttctgatgagtggacaagtttcagcacattttaatgtagtgattagtaatgctgaagcttacataaggttttattgacattatacatatgcatatgtgtttatacagatgtttacgcacaaaacaggctatagattctttagcccgatttgttgaccccactgatttaaacaaagataatacaattcatttttgtatttgctatggacaaggggaaaaattcatttttataataattaaacaagtgtttgataagtaatattataggataaacatttacattttagtgacagtattctca

SEQ ID NO: 247387 - DNA, 607 bp, Homo sapiens
agagtgaatcactgggctgccatagggatttagttggacacagtgggtggccaagtcgtctctgctcctcttcatggtagtgggggctgctctctaccatctagacccaccctcatgggaaaggccgcagacccttactcagcctgtgggacaccaggcagagtcccttgcagctgatggtgagctgaggtgcactgtatttctgccacagggatttgttaatgatttactttaaatgtccacctgcagggtagctgggacgatgaaagcatcccaagacctcccttttccatctgtggctgatcacctctggaacccacagctagccggctgctcctccactatcagatggcggctgtcagtcatgggcttgtcaccgagtgcatccgtcatgctcgggccatgggccggcacctgtgtgtgtgtgtccagcttaacgacagagatttttggaaagacgccctaagatagacatacttgaaactgagtgagaataagtttgacttatttctttttgagatactttatatgtttgaaataattaatagctggcgccagtgaatctagtttctgtctgtttcctttaaagattatatgtagtgttggt

SEQ ID NO: 247388 - DNA, 445 bp, Homo sapiens
ctgcccaccggaaacgatggcgcgaggccgcagagctaaatgggggcctctccagggagtgctctgttcacggctccatcgctgttaggtagctgggacgatgaaagcatcccaagacctcccttttccatctgtggctgatcacctctggaacccacagctagccggctgctcctccactatcagatggcggctgtcagtcatgggcttgtcaccgagtgcatccgtcatgctcgggccatgggccggcacctgtgtgtgtgtgtccagcttaacgacagagatttttggaaagacgccctaagatagacatacttgaaactgagtgagaataagtttgacttatttctttttgagatactttatatgtttgaaataattaatagctggcgccagtgaatctagtttctgtctgtttcctttaaagattatatgtagtgttggt

SEQ ID NO: 247389 - DNA, 470 bp, Homo sapiens
gaagaattttcctgtgtagttgaaaaccgattgcaataaaatgtaatatttaatagtattattcaattggtagcacataactccatatttacactgattgattttcttcaattgcctaaccgcctactaggttcagatttttccatgttaattttgatttagtatttttatttctgaaagcaaatagggagcaaaccatatattatcgctgcatgtttttttcagaagctagtgagaacctcggaatctataacaatgaaataatgtgaaggtaaattaccataatatacaaggggatttcatatcctagcaatcttctatagactgctaacttgaatcatacccatgtgcaaattatctatatactacgatgtcagaaaccataaattgagtttctactatgttaggaacagggcatttttctgatatattcaacgtgctttttctcctaatatttataagtatttagg

SEQ ID NO: 247390 - DNA, 371 bp, Homo sapiens
tcctcactttaccttctgaggtcatcacatatccaaatatctaataaattttcctctacctcccctgcatcagccaagacataggtatcactctttcaaaagaagacatgaaaataacctgctttggattcagtcacattaccccagggatggtgtatggtctctccacccacctctgaaacttaccttttgcattttgcttttggtcctggcaatgcaccctacaatcctcagttttcattaacaactaatatccacaaggcactggagtatattgcagttggctcaatctttctagagccctagactgaatgttaagaaacaggtgatttttttcccctttccacctacttttatattcacataatctt

SEQ ID NO: 247391 - DNA, 1049 bp, Homo sapiens
cggggtttcaccactttggccaggatggtctcaatctcttgacctcgtgatccgcctgcctcggcctcccaaagtgctgggattcacaggcgtgagtcaccgtgcctggcctgtctctttaatcaaatcacatctcatatccagcagtcatagatgagtatgctagaatcatggactgcttggaagtcttttaatctggtgtttacctactcatccgttggtggaaatttgggctgcttattaattattaattatttttaattattgaataccagatctggtttctaaatggaatgaagactaccagctctcctcaaactaattgattattgaggtgtgtttcttttccttccctggtgatgtgcaaagagaatgaaaagggaaaaggggccaggaaggagatgttttttctccttcattcattcaacagctaatcttgagtaccaactgtgtacaaggcactaacctagatgcctgggacacataaagaacaagtagacaaagactcctacccttaatcattgagttttattctagatgggggagagggtgacagataataaacaatagaattcataatatgaattcattggagagtacaagaaaggtgaactgtagggggaagagagcaaggtaagggggtgaaggagtgttggggagattgggattgcaatttcagaaatggtagtgttatgaactgaatgtgggtgtctcccccaaatttgtatgttcaagacctcactctaatgtggctgtatttggagatggggcctctaaggaagtaactaagatgaaatgggttcgtgaggatgggcactgattcaacaggattagtgttcttatgaggacagacaccagagttctccctctcactttcttcccacacgcatgcactgaggaaagtctgtgtgaggacacagcaaggaggctgccgtccacaagctgagaagagagccctcacaagagatggaattgactggagcctcagtcttggactttcagcctccagaacagagaaaataaatgtgtgttgttaagccaccaaaaat

SEQ ID NO: 247392 - DNA, 1074 bp, Homo sapiens
ttttttgtatttttagtagagatggaagagacagagtttcaccatgttggccaggcaggtttcaaactccagacctcaagtgatccacctgcctcggcctcccaaagtgcttagaattacagctgtgagccactgcgcctggcctctatgtttaacttttgagaagtctcttgattcttgccactacgaggtgattttatccaactattacaggaaagaaaatgggagctcagaaggttggactgcttgttcaaagtcacctagctagagagctgcgcagctggaactagtatacaagtctagctgttgaaagcaccctgagcacgttacagctctcctcaaactaattgattattgaggtgtgtttcttttccttccctggtgatgtgcaaagagaatgaaaagggaaaaggggccaggaaggagatgttttttctccttcattcattcaacagctaatcttgagtaccaactgtgtacaaggcactaacctagatgcctgggacacataaagaacaagtagacaaagactcctacccttaatcattgagttttattctagatgggggagagggtgacagataataaacaatagaattcataatatgaattcattggagagtacaagaaaggtgaactgtagggggaagagagcaaggtaagggggtgaaggagtgttggggagattgggattgcaatttcagaaatggtagtgttatgaactgaatgtgggtgtctcccccaaatttgtatgttcaagacctcactctaatgtggctgtatttggagatggggcctctaaggaagtaactaagatgaaatgggttcgtgaggatgggcactgattcaacaggattagtgttcttatgaggacagacaccagagttctccctctcactttcttcccacacgcatgcactgaggaaagtctgtgtgaggacacagcaaggaggctgccgtccacaagctgagaagagagccctcacaagagatggaattgactggagcctcagtcttggactttcagcctccagaacagagaaaataaatgtgtgttgttaagccaccaaaaat

SEQ ID NO: 247393 - DNA, 503 bp, Homo sapiens
ttttttgtatttttagtagagatggaagagacagagtttcaccatgttggccaggcaggtttcaaactccagacctcaagtgatccacctgcctcggcctcccaaagtgcttagaattacagctgtgagccactgcgcctggcctctatgtttaacttttgagaagtctcttgattcttgccactacgaggtgattttatccaactattacaggaaagaaaatgggagctcagaaggttggactgcttgttcaaagtcacctagctagagagctgcgcagctggaactagtatacaagtctagctgttgaaagcaccctgagcacgttacctcatgctgtaccttgcatgtcttgttgtttccaattttcagatgaagaaacagttccacacactaagagacttaacgagggtacagttagtttcaggagagctggtagttttcattccgtttagaactggacctggtaactgttgattatcctaataaatgcacttcattta

SEQ ID NO: 247394 - DNA, 1160 bp, Homo sapiens
ttttttgtatttttagtagagatggaagagacagagtttcaccatgttggccaggcaggtttcaaactccagacctcaagtgatccacctgcctcggcctcccaaagtgcttagaattacagctgtgagccactgcgcctggcctctatgtttaacttttgagaagtctcttgattcttgccactacgaggtgattttatccaactattacaggaaagaaaatgggagctcagaaggttggactgcttgttcaaagtcacctagctagagagctgcgcagctggaactagtatacaagtctagctgttgaaagcaccctgagcacgttacctcatgctgtaccttgcatgtcttgttgtttccaattttcagatgaagaaacagttccacacactaagagacttaacgagggtacaagctctcctcaaactaattgattattgaggtgtgtttcttttccttccctggtgatgtgcaaagagaatgaaaagggaaaaggggccaggaaggagatgttttttctccttcattcattcaacagctaatcttgagtaccaactgtgtacaaggcactaacctagatgcctgggacacataaagaacaagtagacaaagactcctacccttaatcattgagttttattctagatgggggagagggtgacagataataaacaatagaattcataatatgaattcattggagagtacaagaaaggtgaactgtagggggaagagagcaaggtaagggggtgaaggagtgttggggagattgggattgcaatttcagaaatggtagtgttatgaactgaatgtgggtgtctcccccaaatttgtatgttcaagacctcactctaatgtggctgtatttggagatggggcctctaaggaagtaactaagatgaaatgggttcgtgaggatgggcactgattcaacaggattagtgttcttatgaggacagacaccagagttctccctctcactttcttcccacacgcatgcactgaggaaagtctgtgtgaggacacagcaaggaggctgccgtccacaagctgagaagagagccctcacaagagatggaattgactggagcctcagtcttggactttcagcctccagaacagagaaaataaatgtgtgttgttaagccaccaaaaat

SEQ ID NO: 247395 - DNA, 318 bp, Homo sapiens
ttcccattatttgtcaactccccggtttagtctcaaagtgaattcaagaaccaccaccagaattaggccttttgccttctcggacatcatttgttttctaaaatgcagatctttagatctttacagtatctgacgggcgcgatggctcacgcctataatcccagcactttgggaggccaaggtgggcagatcgcctgagatcaggagttcaaaaccagcctggccaacgtggtgaagccctatctctactaaaaatacaaaaattagccaggcagggtggctcatgcctgtaatcccagctactccagaggctgaggc

SEQ ID NO: 247396 - DNA, 377 bp, Homo sapiens
gttcaattaaaatatgtctgagtttttggcctaaatatagtaatagacacaaatattaaactcatttttcctaagcttttaaaaaattatatattctcaggatacgacggataatcatttgcctctgcaaatttaagtcacacaatttatttgtgtgttctctattctcattgcaacatgctttagggctaaatataatcaaaaaaaggattcaatatacgtacattaatattagtaaacctttgcccctagtaaaatgatcatggctctaaaactttaaggcttatcacttttctttcaaggaaagagtcgggcatattttaaacatgtcaacaaaaaataaattctttcatttactcattcctttctcccttcca

SEQ ID NO: 247397 - DNA, 278 bp, Homo sapiens
gcagtttcatgcagtcattgtggaaaacagtttgaagttgctaaagaaataaaaaaatggaaccaccatatgacccagaaattcctattctgggtatatactgaaagaagtaaaatcactacctggtaaaggtatctgcactgccatgttcattgaaacattattcacagtggtcaagatatggaaacaacctaagtgcctgtcactttatggtatagaattttggagctttgatgatgttgcatccaagtaaatattctataaaaataaaattctat

SEQ ID NO: 247398 - DNA, 375 bp, Homo sapiens
acacttgaaaatgcaaaacatggccacctgttcacttcatgcctagctccattcccaaagcctcctggtactggcctagaccagccccagtcactgacccctcacagggctcacagtgcctatgcatgtgccagagtgtgtgggaattgttggaagtcatgcaggttgcgaagagtcacagaatatcagtgatatgagttcatcagtttgaagagttccagaaaccaaatggtatcttgtgaacatgccaggaggcagtggtgggaagtgagatttgtagagtaagggataaaaatttgtaacagagtcgtacactttctttttgaagcaattccatccttcactcactacgggtttaaaactaatgcaggaaac

SEQ ID NO: 247399 - DNA, 454 bp, Homo sapiens
gtgttccctgggcttttggcatcacggccaagaaatcattgacaaatccaaagttatgatgcttttctcctatgttttcttgtagtaaaagttttatggctttaactgttatgttcaagtctttgatccattttgggttattctttgtacatggtataagggaagggtaccacttcattcttttgcatgtggatattcagttgccagcatcatttgctgaacagattctctttacttcatggagtggtcctggtacccttgtcaaagatcatttgaccataaatgtgaagatttagttcaggactctcatctgtctgcatgccagtaccacttagttttgattactctaactttgtagtaagttttgagatcaggaagcatgatgcccccaactctgtactttttttgactgctttggctatacgggattccttgagatacggtatgaatttta

SEQ ID NO: 247400 - DNA, 506 bp, Homo sapiens
agactgcctcaggtatcttcttagagggtaggcagctgggattctgctccaccagttctcacctggcattggtggaggactgctcccagggactttaactctgcagcactctagcctttttatattttcttctcccttgcagtctttcagactttcagaggaaagcaatctgataacataattcctcagaaagtattaatatgacttagagaaaatgtgcaatggttaaccttctcaacagtgaatcccaaatgggggaattttaagcgtgtatcggatgggagaggctttcctagtctccctactacatctccctactcccaagcctccatccctacttgctgctgcatctgctggcaaggcttgtctgtcctgaaagctgctgaaagttagcatttactagtgacatcacttagtgaatatgagtgtgagccttatcaaaactgtgacccatgtggccccactccataccaatgtgcacatctttaaccactttgggcatcttg

SEQ ID NO: 247401 - DNA, 1406 bp, Homo sapiens
  misc_feature (150)..(150): n is a, c, g, or t
  misc_feature (195)..(195): n is a, c, g, or t
  misc_feature (790)..(790): n is a, c, g, or t
ttgggtaaatgctggggtgggggtgtgtggcattcactctgaggcctccttccattccctgggtgctcatggccctggctctccaaaggccccaacaacaaagagcaaaaaatacaagacacaaagtcagctaagatgagaaactaacantggtgggactgggaactgccagcttcctggcgtgtccagttgtgngaccctgtcatccttccctgtctcttggatgtgagaactcttgttgtagcctgagtggggggcatcctgggaaacccacaagccagtgggcccagggctgctgtaggaaaaccttgctgtgtggcttcaacagtcacaagtctccaagtaccagcttgatggtagacaggaatgacgagctccctgttcaaggagctcagtctagctggaaacagaaaggtgaatgaacacatgggcagcaaggggttgccatgaactggaagtgtgctgagacctaagagtgaaaagaacacagtcaggggtgctatggggccagcaagaggacagtaaagcccaattcaagatgcaccgaggcaagcctctcacaagggaggatggtgatggtgaggggtagcaggcaccagcacccgccagggaacaccgagtgcaggcattctgttgggctgacagtctcttgagacccagctgaggcccagccccctgcccggcatcccacagacctacacctcactcctctggaggtctgggtctgaggtcatgcttctcagtttcagcacacctcactggtttcagacaagtatctcagctgtcaggntgtggaacacaggttttctcaatgacccgagaatttagaggctcagagagaaaaataaagtggctccttttccaagtaactttccagataatcccacttcttgggcccagccaaattaagagacccaattaagcaggtcccaatagctcctgaagaagtgagcaagggctggaagctttgtccctccccttccctgatggagaatttgctctctacctgctgatgcagagaaagtagagagaagtaagaaaaacaaagcctgaaatgccacaaacacaactgcccactgaagagaagcctgctctggaaccctccaccatcaactctgttgctcaaacagaaacacctctaccaagcactggcagagaggtgtccctcccaagggcaggcgaaacaggctgggccagaggcagcccacctacagcaccccccaccccttgcctgcactaggcccccttgagattgaggcctgtgtccactccagtccggcacctggagcccgtgtgtaggaagaaactctactgctgcagtgtctgtggtgtgacagacatccagtggccttggtaaactctacattcaggcaggcttactcccctctcagaaggagaaaaatgca

SEQ ID NO: 247402 - DNA, 787 bp, Homo sapiens
atttctgtagtttctgcatatctcacacggttcctggcaaattgaagagtgtttcatgaattcaggactttattgtgtttgctgtgaatcagtttgttttgtactgacgatgatgttggctaactcccttgtaactagtacttatttgaaataatgtcctcgggattattttaagcaatgtttaagtatgaaatcatttcattctcctaacatctcaaggaatatactattatattctactttacaaaaggggaaactgaggaacggggaagttaagtggaagctaagtggaagaatccagataattgacctctccttctattggtatgcaattgctagagcaatgatagtcctccggtagagccttagacattgtgtttattgcattcctgttccacccactgcattccggatactccaacttacttccaacacacatatgcaggcgtctctaaaattccggagatatggtcaccaattatttttatgtgcgacatgctcaaatcttaatatagtaaacgcttgtatattcataaaccagcttaataaatgaaacattaccattcctgttgaagagctttgtgtaaccaccttcccaatcacgactactctctgactctgagataactgctcttctgaacttggtattcatcgttgcaatgtatgtctttatatttctgctacatatgtaagtaagcagtatataacattctatattttcttttcctactttacttatcgttacctttactaggtccatccgtgttgacatatagagatattcatt

SEQ ID NO: 247403 - DNA, 1200 bp, Homo sapiens
taaaagtttttttaattattgactttttaacaaaacaggaaaatgctcacaatatagattgaataaataaagaatattataaaactatatactacataatcttagttgaaagaaaaagggaggaagaaagaggggaggtaaggaagcaaagaagaaaagaagggagggagggtgggcaatttcacaaatagaatcaaagcattaaaaatgtccatcttcttttaattcagtaattctatctccaaaaaagaattatcagaaatgctgccaaagactgtagtttgacttcagtccatgcataacctgaaacaacctcaaatcccaacaaaaaggaatatttaaatatgttatgaaatgtccacatgaaaggaagagacagagagagaaaaaccaaaaaagaaaaagagaaacgcatattcacagaaaaaaaagacttaaaggaaataaatctaaaatatatcaaggggaatgtattagatatttattatttctcctgctcttcttttgttcctcaagttttaacttttcctctagtacagcttcccttcaggttgaaaaacttccattagtatttctttaagaggagagctcctggaaatgaagcctcttggttttccatcacctgaaaatatctctattttgctttcactcccaaagaatattttttctggatataaaattctgggtggatagttttttttttcttccagcattctaaagacggggtttcactgtcttcgtctttggccaccatggttttggatgagaaatggacagtcattcgaataggtttcttccttccttccttccttcctttccttttctcttttttctttctttctctctttcttgagtccttcctttcttctcttttcttccttcccttttcttacgtataatgtgtcatattttaatgctcttaatgttttttaatccttggtttttagaagttttcttatgaggtggctgaggagttgttattaaatgtatcctgtttgaaattactgagattcttcaatttgtgaagatacgtttttctttaaatttgaaactatttcagccactctttctccaaatatttttttctgcaccagtatttttctttttaccttctgagatggaatgccaataccaagaagtttcagccttttgacattgtcccacagtaccatgaaaggcttttcatttttctccaatttt

SEQ ID NO: 247404 - DNA, 487 bp, Homo sapiens
taaaagtttttttaattattgactttttaacaaaacaggaaaatgctcacaatatagattgaataaataaagaatattataaaactatatactacataatcttagttgaaagaaaaagggaggaagaaagaggggaggtaaggaagcaaagaagaaaagaagggagggagggtgggcaatttcacaaatagaatcaaagcattaaaaatgtccatcttcttttaattcagtaattctatctccaaaaaagaattatcagaaatgctgccaaagactgtagtttgacttcagtccatgcataacctgaaacaacctcaaatcccaacaaaaaggaatatttaaatatgttatgaaatgtccacatgaaaggaagagacagagagagaaaaaccaaaaaagaaaaagagaaacgcatattcacagaaaaaaaagacttaaaggaaataaatctaaaatatcgccagtagtttgtagttacccatgtcat

SEQ ID NO: 247405 - DNA, 393 bp, Homo sapiens
aataagaagcaaaggtaatcctgatgttgaattacaagttaatgcagagcacagacatgaaaataattctatgggtttgctgcagcataatccttgccagatctccaagttccattcatctaatgaaaagccttagtttgaagaacattttggagaactcttacatcaagaggtctccagtacctcaaaaaccagtgttcaaaaggaaaatgcacacgcgcatttcagggaggtgggaataaaagccttcctttgcgcagcgtgttacatgtggaaatgtggaacgcacacgatcattcttactgttaaaaaaccccacaaagattataaaaatatgtcagtttttttttggtgcaaaaactcacacgattaaaaatattatactatgaaagc

SEQ ID NO: 247406 - DNA, 378 bp, Homo sapiens
acgagattcaatttgctagtactctgttgaaggctcttgcatccatgatcatgaaatatactggcttataattttcttttaatgtctttatcaggtttcagtatcagggttattctggcctctaacacaagttggcaagtgtctcatttctggaaaaagtttgtacagagtaacaaagcttgtaaagtttgtaatattatttcttaaatattttattttatttttatttttagagacagggtctcattatgctgcccaggctggagtgcagtggctactcacaggtgcactcccagtactaatcagcacgggagttttgacctgctccatttctgacctgggctgtttcacctttccttaggtaacctggtggtctct

SEQ ID NO: 247407 - DNA, 368 bp, Homo sapiens
ggaggtctgggtgcctcctgtccagggtatgagcccttgaaggagctttggaagggaaaagagcagatgtcgcctcttgccccaggtcttcgcagggcaggagtgtgcctggtggtgcggacctggggcctccctagggaagagggtcggggatcagcagccagaggaggaagagctatgagtctggaatgaagagatgagaagctggagcttcttatgtgaaaaataaccctccagccatggctgcgtcaccaggcacaggactgcatcctgtggtttcgcctagaattcttgaccaaggcatccctccccgtgttctctcctggcctccctgccttctgctactcaatctccagtagcccagctac

SEQ ID NO: 247408 - DNA, 666 bp, Homo sapiens
atgcttttttttacagaataggaaactatagtttaaacagtgcgtccaatagaactttctgcagtgatggaaatgttctagatctgcactgtccagtaagtaaacactagtcacatgtggctattgaatacctaaaatgtggttagtggaactgagggactgaatttgtgcatttatttaacttaaatagccacatgtggtcagtggtcaccatattggacagctcaggcttagtgttctcagcctctgcagtgttctctgtgatctggtcctccattacctctggtcatcttctacttcccctcctcacccattctaacttcactggcctccttacaggccttcagataaacctggcatgtcattgcccctgcatccctctttcccttgcctcctttaaatcttggctcaaagctgggcctggtggctcacgcctggaggtgggaggatcacttgagcccagtagttcaagtccaggcttgacaacatagggagacgccgtctcaaaaaaaaaaaaaaaaagtaggcctgggtggtacacatatagtctcagcaactgggaagctgaagtgggaggatcacttgagcctgggaggtcaaggctgcagtgagctttgatcgcgttactgcactccaccctgagtagcagagcaagaccctgtctca

SEQ ID NO: 247409 - DNA, 578 bp, Homo sapiens
atgcttttttttacagaataggaaactatagtttaaacagtgcgtccaatagaactttctgcagtgatggaaatgttctagatctgcactgtccagtaagtaaacaatgtggtcagtggtcaccatattggacagctcaggcttagtgttctcagcctctgcagtgttctctgtgatctggtcctccattacctctggtcatcttctacttcccctcctcacccattctaacttcactggcctccttacaggccttcagataaacctggcatgtcattgcccctgcatccctctttcccttgcctcctttaaatcttggctcaaagctgggcctggtggctcacgcctggaggtgggaggatcacttgagcccagtagttcaagtccaggcttgacaacatagggagacgccgtctcaaaaaaaaaaaaaaaaagtaggcctgggtggtacacatatagtctcagcaactgggaagctgaagtgggaggatcacttgagcctgggaggtcaaggctgcagtgagctttgatcgcgttactgcactccaccctgagtagcagagcaagaccctgtctca

SEQ ID NO: 247410 - DNA, 294 bp, Homo sapiens
tccctgtagttgttcaaaaaaatgttgatgaattgctgcctaaggaggaagaacagttggagctctaagcccctcaactcccagcttaagggatggtgggggagagggaggaagtgacagtaatgggagcagagaggaaaggcagaagtggggaggcagtattgttttcagccctcagggttccaggtcctctccctggctcactgcatctggtcatccatccttactgatgcattgaaacaaaataatattcaatttttagaaataatacgtcaagagtataaagtaacatgt

SEQ ID NO: 247411 - DNA, 342 bp, Homo sapiens
agcaacgtgaaatggtaatgccgcttgccatactctgcccatgagggtaactggccactcctctcctctaggttgggatggtgaaagattgctccaggaactaaaacttgcttccacctgctctccagtccccccagcaaccccctccatggcttcggttgctttctccgaagcagtaaatcgaatcctttctgaacatgcacaccttcaccgcaattccccacagactcaaatcttgattgagtgatagatagtggatgaaatcatactgcaaggagaatgcacgctggaatcaacagtacttcatatgcatctctatttcttattagactgaggtctttg

SEQ ID NO: 247412 - DNA, 527 bp, Homo sapiens
aaggcagacctggctgtggccgccttcaccatcacagctgagcgggagaaggtcatcgacttttccaagccctttatgaccctggggatcagcatcctctaccgagtgcacatgggccgcaagcctggctacttctccttcctggaccccttctcccctgctgtgtggctcttcatgcttcttgcctacctggctgtcagctgcgtcctgtttctggctgccaggctgagcccctatgagtggtataacccacacccatgcctgcgggcacgcccccacatcctggagaaccagtacacgctgggcaacagcctgtggtttcccacgcttctggaggtggggagggcctctggacagatgggtgtcccctggtgcccctccactcttctcttcctctcttttttggggggagaaacctcggaatttctatgagacctcccccagggagggggtcagttgggcccccatccctccccttgccacatcgcagcccctgttggaataaaaaaaagaacaaaaccccaaaa

SEQ ID NO: 247413 - DNA, 544 bp, Homo sapiens
agtgtgctgagtgcctccactgggctgaagctcacagggccaaggcccttgtgtcgccttttcccgagggagtctctcgcttcctcatctagacaggaggaccgtgaaggaggagcaggcggaccagccatctgtcaggtgtgagtcctgctctagcactggtgtagccctgggtggggtctagattcaaggggaatggacatgaacactgtgaacaccaccagagcccccaaaacaggacaatgtcatcacaggctgctataaaaaaaatgccaacctgagatactagcccagcgaaacagttttccaaaatgaggatacaataaaggcatttttggacaatgaaaagagaatttgccaccagcagacatttaaagaaattctaaatgcagaaagcaaaggtgatctcaaatggcatgtctggtttgtgaagaaagtggagcaaagagaataaataggtcagtaactccaaattaacagtggctatatcaatactttgtgagattaaaatgtttcataaaaatacttgggaacccccaataaa

SEQ ID NO: 247414 - DNA, 191 bp, Homo sapiens
aaagacatagaaaaggttagaaaaaaatgatcaattacagactcagcctagataggagaggcaccattcaagtaacaggagttaagagaggccgggcacagtggctcacacctgtaatcccagcactttgggaggccaaggcgggcagatcacctgaggtcaggagttcaagaccagcctggacaatatgg

SEQ ID NO: 247415 - DNA, 272 bp, Homo sapiens
tctgcagctgttaggaacccaccatctttagaagaaaaaataggactgacagtctagccaaaattttgctttaaaaaaaaaaaacaacccatcaacattcctgtggtgattacggtggatcctacaatttccttgcctacaaagtgcattaaaggccaggtacagtggctcatgcctgtaattcccaacactttggaaggccgaggtgggaggattgcttctggccaggagtttgagaccagcttgggcaacaaagtgagaccccatctcta

SEQ ID NO: 247416 - DNA, 400 bp, Homo sapiens
gtgagccataggtcaaaatgactacataggttatcaataagccccatcccaagtggaattctgaagaactgtccagaaagttatcatatgtaaaaactgacaattgacaatatatagcttagaagaaagaaaacttggagaaaaattcacaatctttacagacatatgtcatttagtgtaaggactaagagccaagacagtatgtgtattataagaatgcaataattaaatcttgagtaaatattacattaaataatgtacattatactgcttttagaaaaaggtagtattacgcgatatgctttagaaatattttaatccaaaagaataaaaaccacaacctcttttgttccctaaaattattttattcctaaaggaatcacatatatattttcagtta

SEQ ID NO: 247417 - DNA, 327 bp, Homo sapiens
tgggagggaggaggaaatggcctttgcaagcctgacctgttgtttgaaatctcaagttaccttacatgttttatgatattaaccatgtagtccatacaatttttgggattcaatatgaaatattttaaacatatttaccaaggagctcttctccagagatccttgatttaggctgatgtttcaggaagctgagctgtggattagtggccctgtgtgcccttggtctcttgctgtgtgtgtgtactctggcttcagaagcagagacggactgtgttaccttccataatgatgccgggtaaaggaggcattagctgatctggtgaaatg

SEQ ID NO: 247418 - DNA, 388 bp, Homo sapiens
aaatatgatccaaacatgaagaagggtactatcattagggcctgttggttttaaaaatatataggtagataggtagatagatacagatatatagaaaagttggggctgggtgcactggctcacgcctgtaatcccagcactttgggaggccaaggtgggtggatcacttgaggtcaggggttcgagaccagcctggccaacatggcgaaaccccgtctctactgaagatacaaaaattagctgggcttggtggcacatgcctgtaattccagctactcaggaggctgaggcaggagaatcacttgaacccaggaggcggaggttgcaatgagctgaggtcgtgccactactccagcctgggtgacaaaacgagactctgtgtcaaaaa

SEQ ID NO: 247419 - DNA, 452 bp, Homo sapiens
tcgcccaggctggcgtgcagtgacaggatcacagctcactacagccttgaattcctgggctcaagcgatcctcctgcctcagcctcctaagtagctgggattacaggatttggctaaacatgttcgggctctcagcattctttcacccctcccttcagaggaaacacggagatgccctgacttggagttgagagatctggtctctggtcctgatgccatcactaacaggcaatggaagcttcagcaagtccctccactggtctgtgcctccattccccatctgtaaagaggatcgctggtccctatcacccccctgggatgtagtgaggcttgtcatgtggcaagggaaagcacctgggacaaagcaaggtcttatgccaatgctttctgtagcatcatcctggagcctcaagtcttgtttgaaattgaataaaggagaaacatagggacga

SEQ ID NO: 247420 - DNA, 571 bp, Homo sapiens
gcatgcccaaagatggcccagatgttggtattatcagacagacaggcatttcaaaataaatatagtaagcatattaaaggacttagtagaaaagttgaataacatgcataaacagttgagtgatttcagcagagagaggaaccataaaaagaaccaatgtaaatactagaaatgaaaagcacaatatcataaataaataatttatttattggacttaataacagactggatatagcggcagaaagaatcagtgaactttaagaagaaataatctaacgcacttcagaaataatctgaagcagtaagaggaaagaaaagtgaatacaaacagaatagatggtctgaaacgtgtgggataatatcatatggcctaacatacatatcactggagtcctgcaatagtaggggaggggatataagacagaagaaatatttgaagatatgatggcttggaattttccaaagatgaagagttacttcaactcacagatccaaaaagcttacagaaccctgagtaggataaatgctgctaaaacaactggattgtgtatgtaaaaataaatgaatacat

SEQ ID NO: 247421 - DNA, 394 bp, Homo sapiens
aacatctctgaggctcatattttgatccataaaactgggatcagagttgacctacaaatgatctgcaagtttctacagtgaacccactaggaaacacttctagagataagagtgtttcataagtatgagacctcatgatggaaagtctgaattttctttcaaaattaagaaacctatatatttgggtgaagcataatgcaaaatcatattccttctaagacttcaggagaactttccagctaatataattgtgtgattattactattctttgaagatctgtgatttagaaagtatttaaaccatgagtgtttaaaaactgtttgtattttaggttcactgacagcaatatattactttatcaaattaaatagacttaagaataatacaacaatg

SEQ ID NO: 247422 - DNA, 281 bp, Homo sapiens
ctggcctgcttcttcccaatctgtgcttcctcttggactgatactctctcacacacatggatacattgaggcaggggaacacacacaggattccaagatggaagaaaggcacttatttggaattttcagaaggcagactcttgcagattcaaaatataggtaggaccctggtctgaactgtgccccctttctctttcatagggagcataattcagaaacagatttaagaactgaagatgaacacctgtgtgtgtgtgtgcagacacaggcaacacttcatc

SEQ ID NO: 247423 - DNA, 429 bp, Homo sapiens
aaagctgacttcctccacaattcccttttcaaaatgttagaaataaacggaatggcctgagttaaatacatcgatatatttaactcaaggaggatggtacaccatttccaaagaggatggcagtcagtgaaagatgactgaaacgggattgctaaatttcatgtgaatctggctgatgccctacagcccagtgaaaccagacctctctattggacagaattcgtttgcatctctaccaaacaaaaatcctttgccactcctcagtcttccacaggttagcaggggctttggtcatgggtaaatataatagtactccctcccttcagcgtcaaatgaccctaaaggtggcttgttagacaatgtcctagtccagggtgactaggtagaagtcgtttggatagtttttcttaatatttttaaggagagaaa

SEQ ID NO: 247424 - DNA, 601 bp, Homo sapiens
cgatacttggcccagtcccattacctgttccaattagccaggcttaacttctgtgatctaagaaactttcttttcaaccaagttgctttttaagtatagcattagtttaaatccccaatgcataggagaagccgtaaaactttaccagcctctgcttcagaaatttcctttccatggacactggggagcttcagtgtactaaaatgggggccatcaaatagcttgattaccatcctcccatatctgtcaagccgctgatgtgcacagagctgatgtgcaaaatactgcaagggccaaacaaaaatgacacataagggccaggcacagtggctcatacccgtaatcccagcactttgggaggccgaggtggggcgatcacgaggtcaggagttcaagaccagcctggccaagatggcgaaaccccatctctactaaaagtacaaaaattagctgggcgtggtggtgggcgcctgtaatcccagctactcaggaggctgagacagagaatttcttgaacccgggaggcggaggttgcagtgggccaagatagcgccactgcactccagcctgggcgacagagtgagattccgtctcaagaaaa

SEQ ID NO: 247425 - DNA, 653 bp, Homo sapiens
catagtcttccaaagaattcgtgggacattcaccaagacggcgcacatcctgggccatagagcacttttaaacaaccaaactcatgcggagtgcactctctgatcgtagtggagtctattagaaatcagtaacagaaagacaacaggaaaaccttcaaacaggtaaaaatgaaacaacacactattaaataatacatgatttaaagatcaagttttaaaggaaataaaaatacataaaactgaaagcaaaaacagaacataccaaaatatttgggacgcaggtaaagcagttctgagagtgaaatttatggcactaaattactacattaaaaatgaggagagatagagaaagatagttcaatagaagcctccagagattgtactcactcctccataggatcaccaaattacccacagaaaaaatcatcttcataagaaccaagaatcaggtgagcaatcacagtacctggttttagcatcatactaaggaaagaggcactgaggagagtaggagagatagtcttcaatcacctaggccacctttccctcatccaaaaaatataactgataaacaaattcattatagttgctgaatacaaaattaacatccaaaaaggagtagtatttgtctatgccaaaaacaaacaatctga

SEQ ID NO: 247426 - DNA, 619 bp, Homo sapiens
cctagcagagctctgtcaggagatgaggaaaatgtctctgtttttcaaatatttggatcttgctaaagaccaacacatttttttaagtgtgtataattttagggcaatttgatccatatgtttctgattctcttgcacttaaatcatcaaaatattgatttttaagagccatttgatgtcgaaggaacctttttaataagcttttaaagctctttaaacccagagcctggagccagggccagagctcaggctgtccgctggccagtcgcaccctcccctcccctgggtcaggattacttggagctgagtctcacttcccctcttcctggcctccctgcctccccaagaactacccaggggtgctgacagaggggcccaaccccttctgttcacagacttctctcatgcttcttcaaagcatgcctaagacacaaaccaagaggagcagtcatgatctttacttcttaaaggctgcataaaatttagttgcataaatgtgacataatgtatttaaccaacgcctgttgacggatgtttaggtcatttcccgtggtacacctttatgcacatttctgattgtttcgtttggatccatttccaaaagtaaaaatactgcgtc

SEQ ID NO: 247427 - DNA, 419 bp, Homo sapiens
tgtacaatgcaaaggacaaagattaaattatattagcaatctaggagcagaagggcaagactgcttttttaaaaaacagctaaaggtttaggaggttttattaatatttaaattgtattgaaaccacagctgcagcctttgactccagcatagagatatgcaaatatggctttcaaaagaaaggcaatttcagacagccctcaaagtaacaagaacaaataaaacaaatgattttgtaatttatctttattgactgatgttgcacaaggcacagcccataccctgtgagagtcagcaacagccgagctctctgaggagagaagagaaagccaggctggagggagaggcaggccgacccatagacaggtgacaggaaagacacagagcaggcagatgggagaagaagacaactaaattaa

SEQ ID NO: 247428 - DNA, 336 bp, Homo sapiens
agtcagttcacttttgcaatctcctgagaatcaatttcttaagacttgtggaatattcagtttaaacacaaaactaaaaacaaacagctgtattggagtattattgacatacaatagcatggcatatttcaattgtacaattgtataagtttttgcatgtgtacacacctgtgaaaccatcagtacattcaatattatgaacctgtacatcacctccaaaatattatttgtgcatacccctttgtgatcctttcttactgccccttctctccaggaaaccactgatctgctttctgtgaatatagattagactgcattttgtggagttttatatga

SEQ ID NO: 247429 - DNA, 701 bp, Homo sapiens
tgtggtggctcacgcctgtaatcccagcattttgggaggccgaagtgggtggatcacctgaggccaggagttcaagaccagcctggccaacacggtgaaaccccatctctactaaaaaatataaaaaattagccaggcatggtggtggatgcctataatcccagatacttgggaggctgaggcaggagaattgcttgaacccaggaggcggaggttgcagtgagccgagatcgtgccattgcactccagcccgggtaacagagcgagactctgtctcaaaacaaaaacaaaaacaaaacaaaacaaaagtcttattaacaaaataggactaataaaaggggctcttgatgaaagatatctttcaaaataccacagcagatatcatatttaatagtgaaagctatagaagttacatcatttctgtgcctcagtttttttcatatataaaacagggataacaaccagcctactttacagggtcattgggaggattcaactatttaatatgtgcaaagcatacagaacaatgcatttgtggcacatggcaagcattcaaatgctgcttattattttattacaatcattgtcttcatgattatttccactaaaatcagaaacaaagaatgcaatatcattgtatctattaaacattgtactacaggtcctaattcattgagagaagaaaaagaaataaaatgtat

SEQ ID NO: 247430 - DNA, 353 bp, Homo sapiens
ttttactaatttatgcctattatgagtaatgcctctaagaacattcaagttcagtctttttgtggatatatgttttcatttattttgggtaaatattgtcagaatggggttactgggtcacaagtttatgtgtagctgtgtaacaaattgtgacctttcaaaagtggttgtactcttttacattcccaccagcagtgtatgagagttccagatgttcctttctctttagttcttggtattgtcagtctttttaaatttagccattgattagatgtgtatttgtatctcattatgattttaatttgtgttttactgatggatgatgttgagtatcttttcatgggcttattgac

SEQ ID NO: 247431 - DNA, 486 bp, Homo sapiens
gcattttcatttacctatgacaatgttttcctgttttcttctagaaatggtattgttttgcttttctttcttggatctacgatccatctagaattaattaattttcatgtatggtatgaggtagcagtaattgttttccatttagatatccaattgctcctgcaccaattattgaaaaaacaagcctttcccccacggaattgcagtgatgcctctgttgtaaatctggtaaccaaacatttgggactattttgggactctattctgttaatttttctatttgtatacctttgggcggtcccactttggtctcttttataagttagtattctccctaagatctcacctgggaagaaacaaaacaaaagaaaataaaaaaatccccaaagctcaaaagacatttgaaaactactgagttagtatatttcaaaatgcctagcacagtgtctggcacacagaataaaaatattttaacaatgattaaca

SEQ ID NO: 247432 - DNA, 249 bp, Homo sapiens
aatccttacaacaacactttgtggtaggtgcacttattcttatgccattttacagatgaggaaaccaagacacagaggatagaagtaacttgttcaaggggacataaccgtaggtggccgtgccaacaggaaaccccaggaagtctggcttcagagccattccctttagctctgatggcacactgtcttgtagttcagtcttcaaatgccacagcctctgggccatcatttcctcctcccggggttctc

SEQ ID NO: 247433 - DNA, 576 bp, Homo sapiens
acccggacaagaattcaggcagcacagtccccctcccggggcagtctaccgtggggaaagggcaagcacacaaggtgggcctgcagcggcccctgaggacgccagcgacagtctctggtgggaccagctggccgtcccttctcccatttgaccctcctcctggtccgctgccacagatcaactgttgccacagctaccagggaaaggggtgtttgtccacgggaatgctccctgcggaggagctctgcccgggggcctcagccgggaaggcggccaggcgggttgcggtaccaggggctgcccagcgaggggagacaaagctccacaagtgagaacagaagctgtgccggcggcatcagttacccggcagcgtctgggaaccgcgctgggttgcgctggggtcggctagtgggccggcgttcctctccttccctccctcggctgggctccgctccacccctcactcaccctcctctggatcagcgccacctccttcctttggtcagcccccttcacctgcaataggccccaatacaaggggcttgaggaaacagttttgtgttttgttttgtggtt

SEQ ID NO: 247434 - DNA, 561 bp, Homo sapiens
cagcatgttcctactgaagaaactgggaatcctcggcaggttagtagcaagcagaactttagagtcccttgaaggaaggttgaagtgatgtttggactgctgaactgcagagtgaacctgggaatgagatgcactgacaccctcatcagtgctttccatcagtgtgcaagacttagctatttctcaaaagaacacagcttcctctcacatggaatgtcctaccattggggatgtaaccagaagcctccgaagcctactcagttttttaggtgaagatcccagatttttgtttgtcacaactctcatggttacatttataggtagggaatccagccacttcagtccagtttctgaaaattcctggctaggttatttttcagagttccatttggacattttaccacctcttctgattgtggacaagacagtgaaggcattgatgaatgtgtagggctttacagctttatttacaatccaatctggaaatgatggactcctgttacaaatagacacacttaatgtaccaaatctggaaataaaatatttcagaagtctttttga

SEQ ID NO: 247435 - DNA, 326 bp, Homo sapiens
cagcatgttcctactgaagaaactgggaatcctcggcaggttagtagcaagcagaactttagagtcccttgaaggaaggttgaagtgatgtttggactgctgaactgcagagtgaacctgggaatgagatgcactgacaccctcatcagtgctttccatcagtgtgcaagacttagctatttctcaaaagaacacagcttcctctcacatggaatgtcctaccattggggatgtaaccagaagcctccgaagcctactcagttttcgagcatcttttacactgaagcaagcatctcctcacaagtgcctcctccttacctcatccg

SEQ ID NO: 247436 - DNA, 628 bp, Homo sapiens
caaacaaaacaacaacaactaaaaaacctttcgtagaggaaagaagattcttaagaatttcagtatagtgtaccccaggagattgattttgcagatgttaattatgctgttgaaaaatagtctttctttcacacattttgtagtattgtcttttctaggtgtaagaagtagaccttatgtggttgagtggatataaatcctccaacttgttataaacagtcgtgtgggtagaaatagccaaggggatttccctttaaatcgaggacgctaaatggattctccctggcttcgagaaactctttgttgtatgctttatcttttactttgattcatgactgaccagttcttacatcaaacatttttttcccctttgaagtaagagaagagatacttaaaaaaaaaaatgtagtctagaaagagactaggaatagaacactgctgacttgttcttataccaagagctggaggcataaacagttttaataaaaaagaatactttgtatcttttgatgtaacttccctttagagattctgtttcccctgtcttaaattctcaggctatttctgattgctgtttaaataattggtagttactatttgagtcatgcttcttaaaaaaaaaagatat

SEQ ID NO: 247437 - DNA, 761 bp, Homo sapiens
aaggtgctatcaatacagctagtcttccaaagctcgtaccttcagatcttttgttttagatctgttatgaaaatgcactagtgtaagccacatttttatgcaatcaatgcccgttgtacagacagactcattcagagattaaagtgtgagttgcttgatttctttctgctatgcttcagctcagttttagcagtatgtataacatcttttaatgtgatgtaagtatgtaggtataaagttcctggatatatcagttattaagccacaattataactaagcgtgagttatggcagagacaacttgaaacactgctagtgattctaaaaatttcctaatttgacgaagaaacaggaaacaggtagtatctattttagataatttttttagattttaccattctttaatatttacatttgccaaccagaatcagacaatagaatttctgtcattccagtttaagctaataaaatgtcaagtagaggttcttggctgggcatagtggctcatgccagtaattccagcactttgtaaagctgaggcaggtggattacctgaacccaggatttcgagaccagcctgggcaacatagcgagacctcatctctacaaataataaaaagccaggcatgatggcgtgcgcatgtggtcccagccacttgggaggctgaggtgggaggattgcttgagcctgggaggttgaggctgtagtgagctgagattgcgccactgcacccagattgccaacctgggtgacagagcag

SEQ ID NO: 247438 - DNA, 375 bp, Homo sapiens
atctaaatgcccatcaacagtagactgaataaagacaatgtggtacatatacaccatggaacactatgcagccataacaaagaagagatcgtgtcctttgcagcaacatagttgaagctggaggccaatattctaagcaaactaatgcagaagcagaaagctaaatactgcatattctcacttataagtgagaactaaacaatgagaacacgtggatataaagagaggaacagctttgcccagtggcggcattgtagccaatgaggtttacctgaagtacaattattgctaattgaaaacttttcccaatacccctccatgacgacttgaaatatagtcagcactggcaatttttgaccgtctctacagagactg

SEQ ID NO: 247439 - DNA, 913 bp, Homo sapiens
gttatatctaatgacttgatcagatgcaggtgcaagttaaattttatgaggaggaacacctgggtcatgttgaatttggttgcttaataggaaatgcttctgtttgatactaagcggaggtcaccgactactagagaggcaggaggtattttcctagctggaatttaatgagggtccaggatgagttttctgatagagtcctctgccctttctctttcctcacattttccctcttctgggtgtgtgccaaaacaagtgggatgggaatggtcttcttacatgagcttgccagtctggaggccccctcagtcttctgcagcccacgtgtctccctccacctgcactgcaaggtccacctgcactgaagcgggatgatgcccacttcagatccttgtttccagctgttcaggtggcagagatttcaaggacctgctcccaaggatttctgttgcagtggctgtgttttcatttaggagatgtgctttaatttaggagctacctggagttgggccaaactccaggttaaggacacaggcctcctcggtagactgcccaccctgcagacatcagctgcatgttcagggctccccaggccaccctcatcaattcaggggttcccactaccccccgcccccgccaggttcagtagttcactagaacaactcacaaaactcagaaaagccctacacttaggattacagtttcgttctggcaaaaggaggatacaaattaaagccaaacaaaagaggttgagggcgaggtctgggagggtcccgaggtggagtttctggttttcctctccctgtggagtcatggacagcgctacctcctaccggtatgaggtgtgacaatactcacagtattgccgaccagaaaacatcacctgagcctctgatgtttggcctcgatcacg

SEQ ID NO: 247440 - DNA, 391 bp, Homo sapiens
tctctttccatcgacaggtcctgttggttctgtctttaaggtatatcctgaatctcatcacttctccagtgcatctgtgccaacttcatcacacttcggaggtcccgtgcccctggaagaatctgttgaactcagtgggtccttttcactcctctgcatctccatggatgcctccctggtcccagctacctacacgcatctggacttctggaatattctcttaactcctctgctctcttcccacacttgtttccttccatcctattttcccatggctgccagaatgggcattttaaaatgtaaatctgatcatatcgttctgatgcttaaaaccttcccttattttttcatgatactgagaataaaacgtaatctctttatgaacctatga

SEQ ID NO: 247441 - DNA, 532 bp, Homo sapiens
cagatgttaggaagtccaggccccatgtagcaccatttctggagctgagggttcagttggaatgtacactagtgagagcctgctgcccacaagttgctcagcccctcctgagaacatgccctgacagaatgaccaatcttggtgtatgtgtgtagaatgattagattatccccaagcaaatatcagatacttgaatgtactaagatttctgggtatagtatactttgtcctccttcacaggcatcctcagaggtttggaaagttttatataggatgcttgattagtcctttctgatatttgtaaacatttcccaataaagctgcatattcatctgtcctttaataaagcactattgaaatatgatgacatatagggaaagcctgtttgtgctctacaggcttgtgaaaaggtgctagaatcaaatacttgaaaatgagttgaaacatcagagacaccccataagccatatgtggcatgggcatctgaacctaatgtggaagcgtataaacatattctctagccctaaggaaa

SEQ ID NO: 247442 - DNA, 375 bp, Homo sapiens
caaggcccatgaagaggcagtggagtcattgaggcttagaagtttaagaccttttccttacaggtagcaggaagatgcctttggtctaagcctgcatattttctgatggttgaacaaggcgaagtttccctggccctcttgtccctgtggggagagagtgtcatttgcatctctcatggaattggaaatttgaagcaccatcatctccccttcattcctttcttcctttcatgtattattccttgtctccagacttcaatggtagatttcctgcttgtaaataccaggcagctgctgctgcagcaaattcatgcagaatcaccaaaaacaatggtttacttattgcattagccgaactcctaccctcgaactgca

SEQ ID NO: 247443 - DNA, 441 bp, Homo sapiens
atctttctcctaaccttcctcaaggaaacctctggccttttagcagggtaactgtgctctgaagaaataaataatcagggttttggggggctactggatactggttctgaactgtcattgattttaggggagccaaaatatcactgtggggctgggcatggtggctcacacttgtaatcccagtactttgggaggccgaggtaggcggatcacttgagttcaggagatcaagacctgcctgaccaaaatggtgaaaccccatctctactaaaaacacaaaaaattagctgggcctagtggcatgcacctgtagttccagctacttgggagggtgaggcaggagaatcacttgaatccgggaggtggaggttgcagtcagctgagattgtaccactgcactccagcctgggcgacaaacaagattccatctcaaaaaaaaaa

SEQ ID NO: 247444 - DNA, 387 bp, Homo sapiens
tatctacaggggtatcctaattgcccaccaccaaggagtgcaacaagttcctaccttgcctggaggttgctttccatttcctgagtgagagaaactgcagctttggatgaagttctgacaaagatatggaatggtggaatggggacaatttgccaacagagactttgtcactggcagggatggggaggcagcacagccaggcgattgtcccacacttgagaataaagccatttaggaaagagactctgcaaggaaaggcagcgcttggattgaaccctgtctctgctgggcaaaatatcctaatgaggaaggaaaggcagaggcaacaaaagaaatcaacgtggctatgagtgaatagcaaggatctcattcataaactcaaaattt

SEQ ID NO: 247445 - DNA, 353 bp, Homo sapiens
cataagccacagcactcacttccaaaacctttatttcttcgagcctcaatttcttcctcttaaaaatgggaataagatctgctatcttgccctggctggcgtcaggttcagtggaggttaaagtgctcatgcaaactggatgcctgaggcttttgcagcttcagggatcacaattcctggtgacagctgaagaataatggtccagggccacctcctgcattaccaaggccagtctttcacctggtgccttccctgggtgtctctggaaatatctctgcttagtgttctgcacagaaacctgcctggagtgctcagccagcgactggccaagatcgaggttctctgcttctcta

SEQ ID NO: 247446 - DNA, 502 bp, Homo sapiens
ttattatttcaagcagtttacaatgctattaagtatgctttgagatattttgatggttgtataatttccagtcttaggattcctatgatttatctaactgcttctctactattttgtttttccatcattacaaataatgtataaggttataaacgtatcctttctcatttcatcacaccattgccaactctagttattataaaaattctgtaggctaggcatggtggctcacgcctgtaatcccagcactttgggagggattacactagatcacttgaggccaggagttcaagaccagtctggccaacatggtgaaaccccatttctactaaaaatacaaaaattagctggtgtggtagcacacacctgtagtctgagttacttgggaacctgaggcacgagaattgcttcacactgggagatggaggttgcagtgagctgagatcatgccactgcactccagtctgggcaacagagtgagactctttctcaaaaaaaaaaa

SEQ ID NO: 247447 - DNA, 1154 bp, Homo sapiens
agcggccgctcgcgatctagaactagatctacttctcatatgattcagagctgctttctagactgccagataaggttgagcctaacaattccataatttctgtttttctcatatatgaatattatgctctacatcgtctcatcagagacgatgtgatccttatattaaatgtagacagcctcatttgagtacttgaataacgagaggaaattcactgtttatcatgcaatttatgctgattaactttttctagttacattaacactttcacaaagagaaagttaactttttaatttgtgtttttggtttatttcaaaaactttccagaattggagttggtgattcatgtttttttgcctctagagggagtaatgacactagggaataatgaaaccaagaaagactgatgagatttcaagtgtattaattttttttgctatcaaattttgatcagattacagtgggaaatcaacttttttttaatgaagaaaatgtatccgtatgtaggacctttttaatgagaggagacagtactaaaaattgagagaaatcacagttgcaaagaaaattaacttttttttgttaaggaacttttagaatgttacaacaacctgaatttgcaaatggtttgggatcccaagtgtgtcactgtctgctgtttgaaactcaggctgcatttttctcatatgaaggacagttaatttcccatccagggagattgtactcttagataatatttatatcatcctaaacagcatggattcaatacaaatacaacttatctcaaatatttccatgtaagaggtgatgctaattgtttcctgtatctagtgaaatgttttcctaggtcccttattacctcaatcttctattccttttttctatttggagatgattccaagacatgcatttcttgctaagaactgagtaatttagaaaaatatctttttgtgagaggctctttggaggtaaggtatataccttactcttgaaattgctgttgaaacccaaggactaatttttatttatttatttatttatttatttattttatttatttatttatggagatagggtttctctctgtcacgcccaggagttccaaaccatcctgggcaacagagggagaccctgtctctaccaaaaaaaaaaaa

SEQ ID NO: 247448 - DNA, 534 bp, Homo sapiens
ggctggtgtagatcttctgagctcaagtgatcttcctacctcggtctgccaaagtgctgcgattacaggtgtgtcatcctgcctggccagaaattaacttgattgaaagaaaagaaaagcttttgatatgctagcgtttttgcatgcatgcttttgcatgctaaagtttctatgccatttacagagatttcatggtctcttcaattgctctaagttgtccttgaggtgcagaaactcaagcacacagacttctcagctagaatttgtagctctagcaattcctttgtttattgcacaaacctagcttgtaccgagaccaaaagttctgcccccttgaagaccaaggcagattctggaattccttgtgcttgccaataccctttgacaaatgcccagccccaaaccccagcctgaacttcaggaggaagattttatagaaacacattggacttttcctgcctgtatattaaccaagagactcttctgtcactcttttttcctgcaataaactgatattcatgcaagtatctctaa

SEQ ID NO: 247449 - DNA, 283 bp, Homo sapiens
cctcgctgccggggtcgctcacagccccgggggaccgacgaatctccgccccgggcctcggggccagccctgcccgccgctcccgggctagcacacgacgtgccgcgccgacaaacgcttcctctccgcccgccacacgcccggagccgcgttccccgccggcccggactgcgcacgggcccaggaggcctgaccgaaagcggggcacagggcccggcgggcggtgctcacgcgactccgcggcttcccggcccgagcaggccccgcgcggtcctccggggcc

SEQ ID NO: 247450 - DNA, 361 bp, Homo sapiens
gtaaatgaaaggcatgagacttctcgagatgggaacaatgccagagttcaccaagtagctgaaaatttaggaaatacaagtcttaggaaaacatgtttcatgttttcatttttaaatttagtttttctttcttttttttttttttttttgagacaagagtcttgctctgtcgcccaggccagagtgcagtggtgcaatcttagctcgctgcaacttccacctcctgggttcaagcgattctcttgcctcagcctccctagtagctgagattacaggcatgcatcaccatgcccagctaatttttgtatttttagtagagacagggtttcgccatgatggccaggctggtctcaaactcctg

SEQ ID NO: 247451 - DNA, 418 bp, Homo sapiens
atctagactgcaaaggggaaatttcctcttgaccccaagtttaggaggaagcctttccagccagttctctccatccagacgctggagaggactttccctgttggcccagggtttaggaagggcttctcagtcagtctatgccagtctataaggttttgtggggatgctcacagtaagggcactgaaaggagcaagtttgtcaggtcactgcaatgagtaggccatgctttcagttcttcctatctggtcagctgccttctggcactccagctggatttacgagccaaaattatggtttgaggtgttgtaattggctaagtctctggacaaaaattacccaaaataatctgaaactttactggccaaagtgggactcctttaaaattccaaaacttgccagtctacacacacaactgga

SEQ ID NO: 247452 - DNA, 192 bp, Homo sapiens
tttacattttttaaaaaaattatattttactttaagttccaggatacatgtgtagaacgtgcaggtctgttacataggacaatgtgtggcatggtggtttgccacacctatcaaccctaaccttcttggttcatggatttttcaactagaagtttgctagctactaatcttgtcttgcattgtaagattgat

SEQ ID NO: 247453 - DNA, 401 bp, Homo sapiens
aaaagtataaatacttattatttgacagtgatgcaatgaaactagaaatttaaaatataaatatatgaagtcacaagaagagtaaatactctatcaaaaatgtttgttaaagaactaaaaactggctgggcgcagtggctcatgcctgtaatcccagcactttgggaggccgaggtcaggggttcaagaccagcccggccaagatagtgaaaccctgtctctactaaagaatacaaaaattagccaggcgtggtggcaggcgcctgtaatcccagctatgcaggaggctgaggcagagaattgcctgaatccgggaggcggaggttgcagtgagccaagatcgacccactgcactccagcctgggcgacagaataagacgccgtctcaaaaaaacaaaaac

SEQ ID NO: 247454 - DNA, 446 bp, Homo sapiens
ccagtgtcagcctggctgaggaacaaggtgtgccagcggcagtggtggggtgttcgccacagccgccgttttggagccacagtgtgccgggagccgtgctcctgctatgtgtcctttgccaggtgtcacaccaacacagcgccgcgcggggcacactcagtgcaggcaggaactggctggtgccagtggcctctccagattgtcccacgctgtgtggccttgggtacacacgggttccctggggagcttccctaccacctgggtctcaccctcagagactgaggtttaattggtcttggcatcacctagacctgctaaatcaggactctcatcctcacaagatcctaggtgcttggctcactttaaagtctgggaagcactgggagctggcacccagcagagcagtgttcagagagaggccagggtgcttgagggggtcatgtctc

SEQ ID NO: 247455 - DNA, 472 bp, Homo sapiens
ggagagcgacaagtgtcagtatacagtaaatcagtgaacgagtatttggattatataactttaaacagtgaatggggctgtaggaaaaattgaatgggtaattgggtagagggactggaggataggtaggtaccgttttagatagaatgatcagggaaaatttctctaaggaggtaggattagagctgagaaagagacagatctaagggatgtattccaaaaacagggatagaaaatactactaccctcagataagaataagttaattctgtccaatggcagtgagggggccagtgtgtaaggtacagagaattgaaggacaggggaacttggtgaggtttgggggtttggtggggtctatgtgccacagaaagctgattttgtttttgtcacaatgggaagccattagaggctttgaagcacatgaatcaacatattcttatttataaaggccattctgggaaaaacagtg

SEQ ID NO: 247456 - DNA, 453 bp, Homo sapiens
cagaactaatcagtgagtttggtagtgttgcagaatgtaagctctcaatataagtggtcttttgtatttctgtatattagcaatgagcatttggaaaatgaaataagaatacaatttcatttaaagtaacatctaaatacatgttgtgcttataaataaattcaacagactgggcaccgtggctcacacctgtaatctcagcactttgggaggccgaggtgggcagatcatgaggtcaggagatggagaccatcatgcctaacacagtgaaaccccatctctactaaaaatacaaaaaattagctaggcgtggtggcatgtgcctgtagtccagctacttgggaggctgaggcaggaggatcacttgaacctgggaggcagaggttacagtgagccgagatcgcatcactgcactccagcctgggtaacagagcaagactctgtctcaaaaaa

SEQ ID NO: 247457 - DNA, 422 bp, Homo sapiens
gtaataattagaaaagctctagttctgaggacagagacctgttggagtcaccatagtgggaatttttgacctggcatccagttcagatacctggagcttcttgactgaggggagattggatcccttggggaagagtgaagccttcaatgctgccacaactgtaatctcagcactttgggaggccgaggtgggcagatcatgaggtcaggagatggagaccatcatgcctaacacagtgaaaccccatctctactaaaaatacaaaaaattagctaggcgtggtggcatgtgcctgtagtccagctacttgggaggctgaggcaggaggatcacttgaacctgggaggcagaggttacagtgagccgagatcgcatcactgcactccagcctgggtaacagagcaagactctgtctcaaaaaa

SEQ ID NO: 247458 - DNA, 452 bp, Homo sapiens
cagataacatgatattcatgatatcactaggaaaacccctaaacaataattatgttttagaaaatcaaatgaaataataaagcaacaaaatataaaattgacatgcaaaaaaatcactagccttcataaacagtcagaaactataatagaaaaacattatttaaaaaatcaacagaaatataaaatgattagtaataatcttaacaagaactggtcaaaaccaatataaagactatgaaacatttcttgaaagcacaaaagtagactgaatgtatcgacagacatcttttatttttggatatggcatattaacattattaacatttcaaatctctccaaattaatttatgaattaatacaatctaactaataaaaccaaaaagcttccttatgaaattagaaaggtggatagtaccagttatatggaaaaaaaaacataaaaatcctaagga

SEQ ID NO: 247459 - DNA, 467 bp, Homo sapiens
atgaaggggttcttcaagatcgtgatccagtgctacagccatcttaactggttggtccctattttgtacttactggtaaatactttaaatatcactcctgcctcttcatagccaaagcacaggacactgcctagcttatcaggcttctaattctttggcaaaataataaatgaagacataccaggtctatcaatggcccagggtcaatgggcatgctgtcaaaactatgcagacaatgatcagtgatcagactgtcaagaaaaatccagatactaaagtactagaaaagaaaatggtcaagtctgtctattctctgtgtttgccttcagcatttgataaaataaatgcttatcttgataatgtgcaaaaaaatcttcaatgtgatactttatagagaatataattcaagtatttttaatgtttttaaataaagtttaaaagcaaagtttctataaagtaagtctcca

SEQ ID NO: 247460 - DNA, 382 bp, Homo sapiens
caagtttttttctaatttcccttgtaatttcttctttcatccattagttatttaggagtgtattgtttaattttcacatatttgtgaatttcccaagtttcttcctattactgatttttaatttaagtctattgtgctcagacaatatactttatgatttcaatcctatttaaaggtattcgagtttattttatggtgtatgcaccatattgtcagtcgtggagaacgttttatgtgtacttgagaatatgtattctgctgtttttggtgaagtgttctgtagatgctggttaaatctaagtttatttaagtttttatttctgtgtggatcttctgcctattcattctataaataattaaaagtggggtattgaagtctgta

SEQ ID NO: 247461 - DNA, 370 bp, Homo sapiens
tcctctgtgtcgactgggaaagtggtacccatctcccgggctgtgtgtgatcattgaatgagacacatgtcagaagccctgcacatcacaggcccggcgcgaccgctcacgcctgtaatcccagcactttgggaggccgagacgggctgatcatgaggtcaggagatcgagaccatcctggctaacacggtgaaaccccttctctactgaaaatacaaaaaattagccgaatgtggcgacgggcacctgtagtcccagctactcgagaggctgaggcaagagaatggcgtgaacctgggaggcggcgcttgcagtgagccgagatcgcgccactgcactccacctggacgacagagcgagactccgtctc

SEQ ID NO: 247462 - DNA, 368 bp, Homo sapiens
ccgggtacagcttaggtttctgtagggtttcacattggaaacattctgctcgtttcaattcatgtttttgcctgtttttgttttgttgcttttcaaaaaagcaactgatttacttcttaacactcctaattcatttggagccgtccaaatgttgtgttggtcagaaggggctcagcagccagggagcgctgctctggaaaggacccagctgctgctgaggtcgcctcgaaacccaggtcgctgtggtctcgggcattgtattttcagccccaccaaacaaggagctttttgttgtgagccacagactcctcctaggttagcaacaccacgctgagcaggagtgctgggttagttagggcggcagccat

SEQ ID NO: 247463 - DNA, 343 bp, Homo sapiens
gaaaatgtgatgtagctgagtgggtgagatcatttatgaaaaagaatattgggagaaatgagagcctctatgacaaatccttgagacactccaaaacttctttaccagacaatgaagaataaatttgaaaagcaggcgcagagtggctagagaggctgaaggagaggcaggaaggtgttgtgtcttgaaagtcaaggaaatgttgtgaagggtggtgtagaaacttatgcttcagtaacttcgacatattagtttttttttgcaagagtataccttcaaattaaaaaagataagagttttcattaagaaagttttattccatagttggactgtcataaagtga

SEQ ID NO: 247464 - DNA, 356 bp, Homo sapiens
ggtagtttggggtgcgagtccaggggcgagggaagtctcgagatgaggagaaatgtaggaggcagccgaagggccggcaaacgcggacagagatggcacctgagcgtccctgggagaacctgggcgacaggccagagaccgaaagaaatggaggcacgaaaagaagcttcgagaaactgagggactgaaagacgagggtgttgggagaggagggaagctgaaaactagagagcgtgggcgagagtgccgatgggttccagcgagagtcttagagcccacgaggccgagaggcgtggtcgcccatgaacttggggagtggagggaaaagtcggaaactgatcgtggacactagaaac

SEQ ID NO: 247465 - DNA, 548 bp, Homo sapiens
aacattagaacattacatctgtcctttaattaagcctagtgtagcttaaaggccaaagttacaaccttacgactaggctaaaagacccaggaaaggtagaatggttgacgaagataagagtatttccctgtggcagagagtgactgcgtgcactccattccccagggccaacgtactagcctgtgggctcagggacttaagctaattctttccagccttgccaaccttaatccaatcaatggtttcccccatgacctaagagttggcacatctcccttagtatttgaaaacacaagagaattccaatctcttattttcacttattaatcagctcctccattgaggagagtgaaaataattagaatagttatttttatagatcaaacatggttacctgttagaaatttcacatgatcctcctacctactacttgcaacacagcaatgtcggcctggttgtgtatttttcaagttctcagaatgactctttttttttttttttttttagatggaatctcactctgtcacccaggctggagtgaggtggca

SEQ ID NO: 247466 - DNA, 961 bp, Homo sapiens
  misc_feature (259)..(259): n is a, c, g, or t
  misc_feature (267)..(267): n is a, c, g, or t
agcggggacagagagaaatgccgaggaataggggcgcggccgcccggtttcggcgatgggttatagggtccgcgtcagccccgcgcccgcacagccaacgtcacgccgcattcttatttccaaagacccctggagcttggggtcccaccccagcggtctttcggggcgtcccctgcccttcacgcgccgcgccggctcggcccgaagcgccctgcggacccgcagcctgggccgccccgaaccggacggccccgcgggntcggaccnggaggaacggcctcgctttcagagaccacggaggcggtccccgctgtccctctggccgggtcctcagcacgcgttctcctcactcccaggactagcgagcggcgggcgggaccggggcctgggtcggagcggcgcagccagaaaggccccagcggcgctgagacgtttgggggaagcgggggcttcgcgtttcgatggcgggaagcggaatgaggttggaccggccgggccggcgttcagggacccggcgggaggcggagggctggcgtcctcgcggacatccatctgcagcgaaccaggcagaggctttgggattagatccttgactccttgcgtcagtagttaaggtttgtttaaatataaaatgggatggcccttcttacaaggttgctggaggattaaatgaataggcatgtggaaagcacctagtataataaggctcggtagtttcttccatcagggctggaagagaccacggagcctgctttcctccttcggcgtttgatctcacatatcccttcttctctggcgatcaaaaatccctatcttctgtagagatcccttttacagatcagtggcctccaggcggtatctctagcaacaagtgctaccccaagcggccggccacacatattccctggcttcatgacatagggaggcgcagtccccacgtgatgcagaagggaaatgtgcc

SEQ ID NO: 247467 - DNA, 458 bp, Homo sapiens
gtccgcggaggctcagagagggagtgtagggggaaggatgtcaatgggaggccccagcctgagccctgagcagctggccagccaggaactggcatgtgagtgagaggcatcctagtctcctgctgctccaaagacaatgcccgctgaacaggatggcaggccacatcagcagtccatacagaagtgaggctgtcgtttcttcccctggagcaccagtgaggacaggccccagctgggagccaggcaagctttgtgatggtctgaggtccatgaagggattaaaaccaggaactggctccttctccaaccactaaagcctcatctgggcccacaagccctggctgttccctggagcgtgactggaagatgtgagcagctttgtgctggagccccatttccatggtgcatgctgctgccaaaccagagatcacttgtagacttgaaagggaacatgagct

SEQ ID NO: 247468 - DNA, 824 bp, Homo sapiens
  misc_feature (259)..(259): n is a, c, g, or t
  misc_feature (267)..(267): n is a, c, g, or t
agcggggacagagagaaatgccgaggaataggggcgcggccgcccggtttcggcgatgggttatagggtccgcgtcagccccgcgcccgcacagccaacgtcacgccgcattcttatttccaaagacccctggagcttggggtcccaccccagcggtctttcggggcgtcccctgcccttcacgcgccgcgccggctcggcccgaagcgccctgcggacccgcagcctgggccgccccgaaccggacggccccgcgggntcggaccnggaggaacggcctcgctttcagagaccacggaggcggtccccgctgtccctctggccgggtcctcagcacgcgttctcctcactcccaggactagcgagcggcgggcgggaccggggcctgggtcggagcggcgcagccagaaaggccccagcggcgctgagacgtttgggggaagcgggggcttcgcgtttcgatggcgggaagcggaatgaggttggaccggccgggccggcgttcagggacccggcgggaggcggagggctggcgtcctcgcggacatccatctgcagcgaaccaggcagaggctttgggattagatccttgactccttgcgtcagtagttaagctttgtgatggtctgaggtccatgaagggattaaaaccaggaactggctccttctccaaccactaaagcctcatctgggcccacaagccctggctgttccctggagcgtgactggaagatgtgagcagctttgtgctggagccccatttccatggtgcatgctgctgccaaaccagagatcacttgtagacttgaaagggaacatgagct

SEQ ID NO: 247469 - DNA, 384 bp, Homo sapiens
tttacccacaaagaaattccttgaggacaaagaacaggcaatactcaaagtcatccctctgctcatgtgagacaaatgcatatctgattgcttcctctgccctattggttcactaagccagactaaggcacgtgactattcctgtaaattgtgcattcagtgaaaggctaatcagaaactcaaaagaatgtttcaagttgtcccacctttctgggccaaaccaatgtacatgttacatgttttgattgatgtctcgtgtctccctaaactgtatgaaaccaagctgtaccctgactaccttagacacatgtcgtcaggacctcctgaggctgtgtcgcaggcatgtccttaaccttggcaaaataaactttctaaattggtaaa

SEQ ID NO: 247470 - DNA, 369 bp, Homo sapiens
agccctccccaaggattcctatgaaacaaagtcaggaatgattttcctggggactgagagtgcccacagggctctttctgctgctttgtctacccctatagtttgctcagctctctagatttgtctcagctccagtttttcagctgcctcatagatcctgcaacagcaagccacttccttcaaaggatatgtggattctctcagctttcctggtattttcctgtcgtagttattggagcaaaagcgtgagtctccacatgctactctgtccatctgagtgggagctgcaagttagtcctgcctcctcctcagtgtagttttcatttgtattattctgatgataaatgattttgagcaccttttcatgta

SEQ ID NO: 247471 - DNA, 556 bp, Homo sapiens
tactttatagagattagtcatatgtattgttgacttgtcctaatgatataaattgggacttaacccacaggcccagtccaatcatgagaaaagcatcagacaaattccaatagtggggcatcctactaaatacccaaccagaactccttagaactgtcaaggtcatcagaaacaagacaagtctaagaagaaacagccacagccaagaggcacctacagaaacaaaatggaaatgtggtttcctggatgggatcctggaacagaaaaaggacattagggaaaaactaagaaaacgtgaatcaactattgtattagttcattttctgttgcttatagcagaatacctgaaactagataacttataaagaaaagtagttgttttcttacagttatggagtctgagaagtcaaaggtcaaggggcagcatctggtgagggccttcttgctggtggggactctgcagagtacagaggtggttcagggtatcctataacgagggggctgagtaagctagctcgggtctttcttcctcttcttataaagccaccagtcccac

SEQ ID NO: 247472 - DNA, 576 bp, Homo sapiens
atgaaggaacagaaatccagaaagccgggccagaaatagcatccgtgagcatctattgatagcataaagtccgtgggcagaaacccacaggcccagtccaatcatgagaaaagcatcagacaaattccaatagtggggcatcctactaaatacccaaccagaactccttagaactgtcaaggtcatcagaaacaagacaagtctaagaagaaacagccacagccaagaggcacctacagaaacaaaatggaaatgtggtttcctggatgggatcctggaacagaaaaaggacattagggaaaaactaagaaaacgtgaatcaactattgtattagttcattttctgttgcttatagcagaatacctgaaactagataacttataaagaaaagtagttgttttcttacagttatggagtctgagaagtcaaaggtcaaggggcagcatctggtgagggccttcttgctggtggggactctgcagagtacagaggtggttcagggtatcctataacgagggggctgagtaagctagctcgggtctttcttcctcttcttataaagccaccagtcccac

SEQ ID NO: 247473 - DNA, 239 bp, Homo sapiens
aagctgagccataaccgtcctaccaacccacgtcagcagaagagcccagtgggagggcgtgtgttcacttctgctcctctgggcaaagacgcccaggtcagaaacacccacccgaccctcccactacccagagacagccccacctgcacagctcagagcaggaccactgaccctctggctctccggtcatatttgctattgaagaccagaataaagtatttttatcaggattgaataca

SEQ ID NO: 247474 - DNA, 108 bp, Homo sapiens
caggcttctttcagggtagacccacgggactgtgtagaaaagggcttgaaggaggagatttgtgccggagcccctggtgctgtcaaagtcaaataaaatatacagaca

SEQ ID NO: 247475 - DNA, 341 bp, Homo sapiens
tacagaaatagtctccttatacttggcagcaaattcttagaaaatgaaattttaaaaaatctgtttataaaagtatcagacaaaatatcaggaaaaaaatttgacaaaagatatgtaagacatctacaccaatatgaaacactgctaagagaagttttaaaaagacttacatgaagacgtagaccatgttcatgaattagaaggctcaatatgttaacatgccagttctccctaaattgggatggcattgaatctataaagacttataaattgagagtacattctaaaatttatgtggaaataaaaaggagctaggacaattaaaaccattttgaaaaagt

SEQ ID NO: 247476 - DNA, 488 bp, Homo sapiens
aagagaagaggtgtgaacatgccggaatgtcttccagaggtaagttaataacttcattaggatgtatttacttggagggtatatattagaatgacatttttttaaattacaaatcaaaattttaatttgtgttacagataacataaaacttactaatttttaagtgtatgttaagtgcattcaccttgtgctactatcaccatcatctatccacagaactcacgtgaaactgaaactatatctgtcaaacagtaactccccattcctccctccttggtccctggcaaccattattctactctgtgtctctgtgagtttggttactctaagcacctcatggaatcatgtagtatttgtccttttgtgagactggtttattttacttaacattatatcttcaaggttcattcatgttgtagcatgtgtttgaatttccttcctttttcaggctgaataatactccacatttgtatatacaaactgtttat

SEQ ID NO: 247477 - DNA, 566 bp, Homo sapiens
ggtcacaccagccacacttccagggctcagtagccatatgtggctagtggctaccatattgggtagcaaataggcttccctgggggtgatttgtgttttgaagaatgagtaggagacagccaggaattggcaggagaagaggctctgggcgagggcagcagcccgggcaggggtgggaacatcggggagtaggagccgctccctagagctgcccctgtgtctgtgagtctggagtttgtggcgaccaaggagaatagcgagagatggggccagcgttcaacgatcttttcagtttggcttttattttaaggaaatgtggaaccatgggaagattttaagagtgggagggacattatttaatgttaaatatggaggtgaaatttacatcacataaaattaacattttaagttgttcagttaagtagcacttagcaccttcccaatgttgtgcaacgaccacatctgtctagttccaaaacacttttatcacctcaaaagaaaaccctatatcctttaattaattaattaattaatattttagagatacagtcttgctctgtccccca

SEQ ID NO: 247478 - DNA, 368 bp, Homo sapiens
atatctgtatctatatcatctattctaattctcgtatagtaaaatataatggtttttgccattatttttaaatggcaaaagccgcaattacttttgcaacaactgtctatctatctagagaaaatggtttggatctgtgtccccaccaaatcccatgttgaattgtaattcccgtgtaggtggtggggcctgttgggaggtgaccggatcatgggggcagcttctcatgaatgggttagcaccatccctttgctactgtcctcacgatcgtgagttctcatgagatgtggtcacttaaaaatgtgtcgcaccttttcctcctctcttgctcctgctcttgctatgtaagactcgcctctgccacgact

SEQ ID NO: 247479 - DNA, 314 bp, Homo sapiens
cttgattctgaaggggtaggtacattaaaggattttattgaagagaggatcatgactggatttgtagtcatgctgaggaaatagtggtagttagaaatggatctgaataagagttatcagctttagggcctgacaagagttttaaacttgtctctctgtttcttccagaaacaaattgttcaaactctgttagcttccatttcaccatgagatagtagtaattctggtttgagaaagtagaaattctgacttgggtttattttgtaaggattttgtagatgttaattaaaaaaaatttattttagatggtaaaa

SEQ ID NO: 247480 - DNA, 489 bp, Homo sapiens
aaaattcagcctaattattagctgtgctttcttggataagttatttagattctctaagctgttgtctcacaagtaaaatggagatatgtctgcctcataggctattaagaggatagcattctcatacagcagtgttacaaatgatgtatcataaaataatagtccaaccacctgccacatttcagaaacaaaaaaagatttatactttacatgcaatagacatacaaaaaattttaaattctgagggaaaaaaatgaaaatgccccacacatttgagtcatttatatattaatctggaaagaaatgctatctttctgtaacttctgttttatatttttatttcagcattcaccctgtgtgcatgagctgtattaaatgtatctgacatacatatatatatatatattttgtttgttttgttttgtttgtttagacagggtcttgctctattgcccaagctagagtgcagtggtgcagtctctgctcact

SEQ ID NO: 247481 - DNA, 409 bp, Homo sapiens
tctttaaacatgttaaatatacttatatattatgtgtgcaataattgcatgatctgaaatcattatgtgtctcattttggtttgttttctttttccttttccttttttttttttttgagatggagtctcactctgttgcccaacctggagtgcagtggtgcaatctccgctcactgcaacgtccaccttctgggttcaagcaattctcctgcctcagcctcccgagtatctgagactacaggtgcacaccaccatgcctggctaatttttgtattttttgtagaaatggagtttcaccatgttggccaggctggtctcaaactcctaacctcaagtgatccacttgcctcagcctcccaaagtgctgggattaacaggcgtgagccaccatgcctggctggtttttttt

SEQ ID NO: 247482 - DNA, 608 bp, Homo sapiens
ccctgtggataggggggaccattgtacagacatctcctgaagaacaagtgacagctcagcccccatgacatctgaatccaaccagaccaaaccgatgtttctccgcagccaaagccgcagacccagtgaggcattgttctggctcaaatgcacacaacagtttacatcaccaggcagaagagttagctaggcctctaaaatgtctgttccaatttgtgtggctttattggtttctttaagtatttttattatttaagtttacagataacattgtatgtttctatcacatatataatatgatccagtgtgtgtgtgtgtgtgtgtgtgtgtgtgtttgtgtatacacacacacatcttggagaatatatagtacatatatacatagtatatatacacattggggtcgctttatgtacagcgcgatactcccaccattggggagtcgccgaacctagcttgtttatcttttttcattttccagaaattcagtatttatgcgataccttgtagtcccgtggcttaaatataacttccttaaattttattgccgggcacgtcaccggtacttttcattccttggacaatttggtcggcatttatggatcaag

SEQ ID NO: 247483 - DNA, 442 bp, Homo sapiens
acatttgtgtaaaattagatgtgggagagtgctagggtctgaatgtttgtatctcccccaaactgatatgttgaaatcctaactgtcaaggtgatgatattaggagggtattaagaggcagagtcctcatgagtttttgcccatttttataaaatagatcccagccgggtgtggtggctcacacctgtaatctcagcactttggggggcccaggagcacaacacttgtgctcaggagttccagaccaacctggacaacatggtaaaaccctgtctttacaaaaaatacagaaattagctgggtgtggtggcataggcttgtagtcacagctactcaagaggctgaggtgggaggattgcttgagcctgtgaggcagaggttgctgtgagctgagatcaggccactgtattccagcctgggtgacagagccagaccctgtctc

SEQ ID NO: 247484 - DNA, 471 bp, Homo sapiens
tgtggttcttgctttcactttgcagtctcttgtagtgtcctaattgccctttcggcatataaaagtctctaatctcttcttcagtctcttggtatcattcttttcctaaaatatacatttgataatgccatttctgtgtttagacacttgaaacgattcttcagtgcctacagagtaaagttcaaagccttctatgatctatcccaccttgagtaactgattttactttccagtgtattctttcacttttcttctttaaccctcacctcctgtatgtacacattttgtcaacatatgctatcctgaaaacacatttttatgctattcgtttcatcctgctgtttcttaatcttagaatgctctaattgttaatttctgcctgctaaaatgtgattcattctctcaggtaaatattaaacaccatctttttcccaaaagcttcccataacgctctatgaatcatgagacttc

SEQ ID NO: 247485 - DNA, 574 bp, Homo sapiens
cagaaggagctctggtcctgcctgccagccccagagggcactcaaactttggaggccagccacccggatgaagtgaataaggcctgaaaattgcttgtttgctcgtattgtaaaataataataattaccattattatttttaaactgtctaatttctctagggaaagtaacatcgaaagcctaaaacagacgccaaaaggcccatagaacacagagggccctctctgcctctggccaccacagcccctaggccaggcatgggtatttattcttaggtatgttgcttttaagaagatgtaatcagcatcttgagccgggcctccctttgtgaggcttctgtaactatggaagtgtgatttacgcagatttgtcggggtcagagacgtctttccctgagcactgtgtatatttagacaggactcggtttggtgttaaaaagtgtatatgttgaatggattcacacacagtagccaacaatgaccacattgtcggcccgtgtacaacgcgtattgaaacgcagcgcccagacttcaactaatctgccctcaataaagctgaaataattatcctaaaa

SEQ ID NO: 247486 - DNA, 525 bp, Homo sapiens
tagtagagatggggtatcaccatgttggccaggatggtctcgatctcctgacctcgtgatccacctgcctcggcctcccaaagtgctgggattacaggtgtgagccactgcgcctggcctttggctcatttttttaataaattatgagttgctgagcatctcattgggtagcagggtttttgttgttgttgttgttgttgttttgttttttttgtttttttgttttttagtagagatggggtttcaccatgttggccaggatggtctcgatctcttgaccttgtgatccacctgcctcggcctctgaaagtgctgggattacaggcgtgagccaccgcggctggccaagggcagcaggtttaaaggaagagagaacacagtcatgacactggtgctgtggctgaattctagaaggtagtcctcttcccaattttactaactgagaaaagtaacaaggtaaggctcacttgtttaagaacagcaggttagcaacaacatagtgccaaacgttctgacattaacatc

SEQ ID NO: 247487 - DNA, 394 bp, Homo sapiens
cagtagtcatcctgacagaaaatggggaaggtgagcactaagataaagataagtatcatgaacagaaagaattaaatttttgtaacagaattgttagaactggtgagatataatgatgagggaaggagaggagtcgaacatgatcttgaggactctactcttggaggcttaaaggaatgtgttgtctgtaattgtcacagggaatcaggaaggaagagccagttagggtcaagcgttagaatatgttaagcttaataggctttgacactcagatgtgcccatcaagcagttaggaattggattattttgtttggaagaggtcagaactagtcaagagatttcatagtccttggtaaaaatatggtgtgaaaacactaaaagggatgagttcgta

SEQ ID NO: 247488 - DNA, 398 bp, Homo sapiens
ggagtggtcagcccacccaagccccgcctctgggcgggggcccaagcgatttccgagtgctgaaacctgggatgacagagcagcccagggaaagcgcgtgttccagtttactagataccacagaagtttttgcatttctgacaagtggatggccccaccctgactcatcaacctggggatccacgaaccaactcagtgcaagaggacagcttctacttcttatgatttcacctctgacccaaccagtcagcactccccattccctggccccgtacctgtcaaactatctgaaaaaccccctaacctctgagcctttggtgagatggatttgagtaacaactctgtctcccacgtggcatggccagcctcgcgtcaattaaactttctttactgcaatg

SEQ ID NO: 247489 - DNA, 830 bp, Homo sapiens
taaaaatataatgaagacatagacattatcaaatacaacagatagcactaaccttccctttgaaccgtccctaaacatccacactcacatgtcctttaaatacaaaccacttttctccaggcttcctaacttggtaaatccaggtaccttcccaggtcgttcagagaattgggagcctcgttccacatcacttttccccagcccagcagcacaaaaccaatcagctgacaaattcatttccacttctcaaggcctctcatattaatccctcctttccacacatatactgccctagctcagaccctctcatacttcttaaactgacacagacaacctcacttggaggctaactggtctccttatctttaatcccaaaatacacctatttaccacacagatccaaaacctcgtaactcctttctcaaaatcctgtaatgccctgtcaattgcattcagaagaaaaccaccttttcatcctttctccctttaagagcacattggtaagagtgtaaatcccagttctaccacttagtaggtttatttcatttgtaacctctatctcatttgtaaaaaaaaagaatcatagtactctcttctcaataaaactgttctaaggaaataattaatactaataaagcactgagaacaatgcctagcacatagaaaatgcccaaaaaaggttattattgttatccaaaccctatcctgcctcaccctacagactacttgtacttttataagtatttattctacagatttattgagtccttatgactaggagatgaagatacaaatatccattaaaaaatgttccgcattatctggccttc

SEQ ID NO: 247490 - DNA, 320 bp, Homo sapiens
tgttgcgtccagccagagcagttccgcaatgagaaatgaatgcagcttatgtttgtctcaggctcagtccacacaaccatatgactcctctgagtctaaataaattcagttccttaaacagatcagcaagtcttgatcattttttaaaatggaatctcaacgttcaataagttcaatgtcttgtcacattaagaagaaattagcaagaaatgagatgagatgggtctataacggacaaaacagacaaccacttaacactattgattatgtatgtttgccctaatatatactgtcctgttaaatttatatgagtggataca

SEQ ID NO: 247491 - DNA, 157 bp, Homo sapiens
ttagggttaagtttatctcatgttctggtcccataactttagcccctgaggagaaacaagacccagcatattaagcatccatcagggagtctgtataccaagatccaatttgagtaagtctgttgcaggatcaccttatcctaacactcatgcaaac

SEQ ID NO: 247492 - DNA, 625 bp, Homo sapiens
atattgttgcttgcatattcatgcatagttcaataagtttctctgttatttgaaaatttcttgttagtagtcagttctggcaagattatatgagatggtgtatctttcatcaggaggcacataatttcgagtctctcttcttttctcttagttctttctcttttttaacttttaggttcagaggtacatgtgcaggttagttatgtaggtaaattgcatgtcacaggggtctggtgtacagattattgcatctccccagtaataagcatagtacctgatgggtagttttttgatcctttccctcttcccacctttcaccctcaagtaggtcctagtgtctgttgttcccttctttgtgtccacgtgttctcattgtgtagctcccacttataagtgagaccataggtaggtggttttctgttcctgcattagtttgcttaggataatggcctccagctccatctatgttgctgcaaaggacatgatctcatgaagttttttgagaagtttttcagtatggttttcacgtttgttgtcaaacaaaacaagcatgcccttccacaatacattccgtgatgtttcctgctgagagacatgggatgctaattggaacaaaacgtcgatc

SEQ ID NO: 247493 - DNA, 350 bp, Homo sapiens
aaaatcactatagaataagtacataattttctcttggctgtaattctgtattaattatttttatataatgctgagaatatagtagatgttcaatacttatctgctttaatgattgaattaagacttttgggatacctgaaatatttgtagtattggaaaacagctaaaaaagatgccaaacaagaagtctacatagtgagctttgtttttttaaactctataatagtattcatatttggaccaatctctgttctgatcatatctcctgcatcataccactatatcatattctcaaggcaaattgcagacacaagatttttatagttaatggttttcatgacatatgagag

SEQ ID NO: 247494 - DNA, 696 bp, Homo sapiens
ttttttttttttctctcaaaatcaaacaaataccaggcctctgttggtcagttaagagtggttagtgcagccaccagatctgtaagactcagaggacaggcttgctggagagtattttgtcaatcccccatcgcccttgggtgctgggaatgtcagctgtgttccaatccagtttccattcatggaagacctagccatcacatagggttggaaggaggtcctgggacaactgaaggtttctggttgaggctacacctcagtgttatctgaaggaccccgaactaactccagttcctgacagcccatcacggtgtcggcaccaggacttccagtctttcctatcacattttcttccattctctcctttgtgactatcatgtctcctatcccttctttgtatgctatgctgaaggtgtttttagaccctgggaatataattttgttgggatagaatcagccagtgccttagtaaccaggaaagtaactcaaagaattgctgtttttgtgatttcctagaaacagggagaattcaagatttcagtctaaattttcacctagtaaggacctttttgtcccccaatgataggcattcatggcactgtatgggaggatatttcaccctcagtgaataccctcctctccatttgggctttgtgcccagcactgcccagtgaatcttttttctttctttctttc

SEQ ID NO: 247495 - DNA, 372 bp, Homo sapiens
agcggcccccgcgcgtgggcgcgggctcgagtggcgacgtgggccgcggtcctggcgggggagaagcacccggcgggcaggcgcggggcagggaagccccggggaacccgcagcccctccgcagacccagccagggggcgcgcgcccgaaaacgccccgtgtgcacgcgcccgcccccctccccgcgccccgcgcgcgcccctcgcagcctggagccggagcgctggctccgcgcggcctggagaggcggagaggcctgtccaccgccccctctgccgcccacgccccgctgcgggtcggaggagcagctcccgctcgcaggtgctcggagaggccgggccgcggctcccacaggtgccgggaagcggccgc

SEQ ID NO: 247496 - DNA, 184 bp, Homo sapiens
ccaataaatattatcccttttcctaattcaatagttagcaaaccgtgctcttttcaaacaaacgttaacatgtaaaacaggtagaaaacctctctaaggtttttgtttgttttgttttcatgagtggcaaggctacacggtcctttcaaaaacaatgtcctaagaaacacacattgtttgcaaa

SEQ ID NO: 247497 - DNA, 461 bp, Homo sapiens
tgagactatttttagataaatgaatgattaaagagtacagtgttattgcacaatgtgtttttatacatttggtatttttaaaaaatgatttcttcttttatgaagaaaattactcctcagtttctttgtagatttgaaaaatgtagacatttttgaggtgttagagctttttgcccccaaattaaaattattcattatagaatgtaagcaggaatgacctccaatgctttaacaatgtgtgtatgaccctttaaatgcttcagttattcttaacgaagggaatttgggaatattcttatttgatgtgatttttcaatgaataatgaatgccaatagaaatttcctgggatatgtgtctgcattcaaaatgtgaaatgtgaaatagctaatttaagactgcctgaatataaatgcatactttttttaatccaagagaagaataaatttagttgtgaaaatga

SEQ ID NO: 247498 - DNA, 572 bp, Homo sapiens
tttcttgtctgtttttccaccagtgtcagttcccaatacctgaaaagatctaagtcagcttctgggagagtatacagaaggatctggagggattcagaagagcctatgccaccagcacactaacttgctcctatcacccagcccaacttggagctaggagctctgaaggctaccaaagaggacttgtggagaggggagggctcagggatttaagaacagctctctccccttggtggcagctggaagaccaagaattgagaatggcatcacaagatggaaggagctggatccctgagttactgcatggagagctgccaaggaaagcagctcagccctcatcagatgttgcacaagcaaaaaaaaaaaaaaccaacaaaaaaaaaacgttcattgtgttgagccactgagatttggagactctacgttactgcagcataacctaccatgatcctcaggtaagcccctaggacatgggggtagggtggtttagggacaggtattattactcagcctaaggtaaagtgtctgtgttgtagtgtgatttgaatggggaagaagacattatattaaac

SEQ ID NO: 247499 - DNA, 503 bp, Homo sapiens
cagtaattcagtaaatttttgaggttaatttttttattggagagattccctttatcaaacaggttcagtgtttaatactcacctggcagagaagttttttctgataccagcttctgtgaattttatttgttggtatgatttatctgtaatgcttattaagatttagtatagtggacaatccaacaataaaggtagttctctacagattaagaagttgctaagaaaagttttgtggaccaaaatacttaaccctctgggatgatcactagcccagggaaagatggaattctttttaaaattcttttttttttttttgtaactaagtgctcattatttaagaaaaaacaactatctgccctagaatgtgaaagtttcctgtactcccttttccagaaataactattatttctcatactttaaacaaaatgtgttcatattataaattgttttgtaaattactgtttgtgggcagtgagttaaaatacataaatatttgttactac

SEQ ID NO: 247500 - DNA, 324 bp, Homo sapiens
tcgcctgggtccccgaggccgtccccaggctctcttctcggggacctgttgatgcgcgttccgcccaggctctcctctcggggacctgttgatgcgcgttccgcccaggctctcctctcggggacctgttgatgcgcgctccagggcgagccacgtgacggctgccgcggtgcagaaagcgcccccttgcccggccggacggcccagcccggagcgaacggggagaggagagaagaggaccggagggagcggagggcagtgcagggagcggagaaggaggagaggagagcagcgccgggagcagccgggtctgcacagtcgcgg

SEQ ID NO: 247501 - DNA, 1576 bp, Homo sapiens
ctcctgacctcaggtgatccacccgcgtcggcctcccaaagtgctgggattacaggcgtgagccaccgcgcccggccgccccctgacttttaaaaactagatacgatatagttggaatcgtgtggaaggaagtacatcaggaggcatataagtccatttgggacctgtaatcccggcgactcggaacgctgagacgggcggatcgcttgaacccgggaggcggagactgcagtgagccgagatcgcgccactgcactccagcctgggtgacagatagagactctgtctcaaaaataaaacaaaacaaacactttccacccatggacaccgccaagtctaagtcagagtctcctaaagagctcgtacagctgaagaagctcttcattggagggctgagctttgaaacaaccaatgagagcctgaggagccattctgagcaatggggaacactcgcggactgtgtggtaatgagagatccaaacaccaagcactccaggggctttggatttgccacatatgccactgaggaggaggtggatgcagccacgaatgcaaggccacacaaggtggatggaagagttgtggaaccaaagagagctgtctcaagagaagattctcaaagaccagatgcccacttaactatggaaaagatatttgttggtggcattaacgaagacactgaagaatatcacctaagtgattattttgaacagtatggaaaaactgaagtgattgaaatcatgactgaccaaggcagtggcaagaaaaggggctttgcctttgtaacctttgatgatcatgactccgtggataagactgtcattcagaaataccatactgtgaatggccacaactgtgaaattaggaaaggcctgtcaaagcaagagatggtgagtgcttcatccagccaaagaggtcaaagtacttctggaaactttggtggtggtcgtggaggtggtttcggtaggaatgacaactttggttgtgaaggaaatttcagtggtcatggtggctttggtggcagctgtggtggtggtggatatcgtgcagtggggatggctataatggatttggtaatgatggaagcaattttggaggtggaagctacaatgattttggcaatcatataccaaatctctccctcactaaacgtaagccttctcctcactctctcaatcttatccatcatagcaggcagttgaggtggattaaaccaaagccagctacgcaaaatcttagcatactcctcaattacccacataggatgaataatagcagttctaccgtacaacctaacataagcattcttaatttaactatttatattatcctaagtactaacggattcctaataatcaacttaaatccagcagcagactagtatatctcgcactgaaacaagttaaatgataagaccctttattcatcaacctctcttcctaggaggccggccccgtaacgggtttggccaatggcatatcgaagaatcccaaaaaaatagcttatatcccacaatatagccacataacctcttaacttaattttactagctaattaatcacttataaatatccag

SEQ ID NO: 247502 - DNA, 253 bp, Homo sapiens
agtttcataaagatttcaattttgtgaagaagcttcacttatcagagaatggaattgagaacttaagtgtctcaggatgaaaaactgtttgttttatgtaatcggtcttatatcatgttcttaaataagatcttctgtgtaagaagttcttaccagtcacaaatattcccagttgtcttctaaatttatgattatttgttctaaaattctatattatttaaatattttaaaatcttcttcaaatgaacaactt

SEQ ID NO: 247503 - DNA, 396 bp, Homo sapiens
tcagtaggttgaaatcctcatattgaaagtatttacaacatagaagctggcaaacactccgaatatcagtgattttttgttttggctaggtttgggattgaggttttttttgtggtttttagtgagctgtttgtttgaggagcctgcttaccagcacaaccctgcctaaatcctaagaaaactgtgtttaatgtgcaaatgaagattcaagtctgttaactcatgttcctgccacacgagccagctaaaccctccaaggcagtgataagaagagggagaagactctaagcaaaagatgactccatcactcggatccacagagaccacaggaacatgacactctgcctattctagtccatgtaacaacattgattaaaacagttgaggcaacacgga

SEQ ID NO: 247504 - DNA, 478 bp, Homo sapiens
aaggtctggctctgtcacccagactggagtgcagtggtgcagtctagtcttgactcactgcagcctctacctccctgcaacctctgcctcccggactcaagccattctccctcagctactggggaggctgaggtgggaggatctcttgagcctaggagatggaggctgcagtgagctgggattgtgccaccgcattccagcctggacaacagagcagaccctgtctgaaaaacaaaagcaaaagccaacaaaaaacaaactacagtgagatatcatctcaccctagttaaaatggctttcatccaaaagacaggcagtaacgaatgctggtgaggatgtggagaaaattgaaccctcatacactgttggtgggaatgtaaattagtataaccactatggagaacagtttaaaggttcctcacaatttagaaatagagctaccatataatccagcaatcccactgcttggtatataccc

SEQ ID NO: 247505 - DNA, 500 bp, Homo sapiens
tttattaaatgatgataagttaggtgggcattagataacaataattttatttcatcctcacagcaagatatgaaggatacactattgttatccccagtttacaaataagaaaattgagacttctgcagattagatccaaagtcatgtaatattggtcagttccacagctggagttccaaccttcctattgctagaaggggacagcaatgccaagcaatacaggccacgtggggagggatccaggcaggaaatacagcatggcacaccttgtgtattgcacagttttgccttagctaactaaagaaagggtgtgtgttacaatacttgacagtgtcagaatcaaagggcaaagaaggagactagcccctgatgtttagctcaactcagaaagttggcagtaaggatagttgatgcagcaagtgaagaaaagggaaatggaaaaagaaatataaatctttttcccttcatcttctcatttccaaggttcaaattaactatat

SEQ ID NO: 247506 - DNA, 527 bp, Homo sapiens
ttgacaccagctacccccacccccagcaaaggctggcaggtctgcagcagaagggtgaacaggctggcacaggcagaaaagcgtttatatgtattgatgctcctgccacggacaaaaccctgttaggtgttgggagagtcagaaaggaagtaaatcagaaagaagaaatctggagggagagacaaacatcagggcagcttttatttggatgtagaggtgccttgggataggctgctgtttgggtcctgtccctgcatgtagttggccagtaaggagatctggaaggcctgtgggtggcaaaacaggtctgatacacaagtggctctacttctgttgtagtgtatagtcagtgtctagtcctggaaggccattccagccaagggctgatctgagggttaggtgctggcagaggcacttatttggagatgccgacgttgctgaaagtaaaggagtgttcatactctacaatgggggtacagttggggagccggaaaaggaaatttgaatgtattactgagtggaaaaga

SEQ ID NO: 247507 - DNA, 420 bp, Homo sapiens
tttaaaaggtagatttatatatactgtcaagaaaagatccctaaggcacagtgttgagtaaatagattgtaaaataacccttacagcattttctttttaaaggcccaaactatgtattttcccaatttcctactctgctatatacatacaggcatggacaaaagatacaaagcaaaggattagcagaaagaatgggcaatatcattctgagtactgttcgaaaggagtttagctttgtcacaatgttttaagactgttacaagaaagacgcttgccacaaatgatatttcctaaaagaaaaaaatgtaatatttaacttttcttctgttgaggcaagataagtcaactgcatatatcataaataagattttcttactttacaagaaggaagaactgagatcctgttttttgaatgcaagt

SEQ ID NO: 247508 - DNA, 322 bp, Homo sapiens
cgccgacgactgtcaagagagttggggagtggaactgccggaagtgtctgcgcgccgtgagagaaactttcctgctccggccgcggcccggagcctcgccgcccccgcgttccgaacgacgatgagtccagatgacaacaacctgaggggactcgcgcctcggcccgccgcccgcgcctgcgctcgcctagcctcgggggaggaagactgagcccggcgcaggcggcgcggcgctcggggcccgtttcctccgcgcaatcagtcccctcgcgtcccggcgccttccccgcgatcgcgcgaccccagcgcccgccgcggccgc

SEQ ID NO: 247509 - DNA, 391 bp, Homo sapiens
agaatgaacagaaggaagttcaagagtggtgaaaagaagaaaggcagggagagaaggagaagtaaacttttcttctagagatttgtcttaaaccttagcttggctggacactgtggttcacgcctgtaatcccagcactttgggaggccgaggcgggtggatcatgaggtcaggagatcaagaccatcctggctaacacggtgaaaccctgtctctactaaaaatacaaaaaaaatttagtcaggtgtggtggtgcatgcctgtggtcccagctactcaggaggctgaggcaggagaatggcataaaacctgggaggcagagcttgcagtgagccaagatcacaccactgcactctagcctgggcgacaaagtgagactctgtctcaaaca

SEQ ID NO: 247510 - DNA, 507 bp, Homo sapiens
atagcttataatatcaagtgcctgttcaccattctaaatacttagaacagggtcaggcacaatgttagtgttcaatagatgtttaatgaataaaggaattaaatatcaggaatttcaacgttataccttttactaagtatgtaccaagctctaaaccacaattaacagcagtatgcaaaatatgacttttctttatttctacatgtgaagttcctaaaagcagagtagtattaactgttctctttttatgtataaaagagtggttaaaagactgggttctagcaacagactccctggctgtctcatctattatctgtgtgattttaggaaatttagaagattgtttcatgcctcagcctcctcatctgtacaattgctgccataatagaatctacttcatagtgttgttttgaggattgaatgaggcaatttatgcaatgtatttagaacagtgcctggcatatagtaagctctcagtaaatgttagtttttgttattttccagata

SEQ ID NO: 247511 - DNA, 583 bp, Homo sapiens
cttttctccattgttaactgtttgtttaaatagcaaacagaaggcggcaatggaggtgtggaaaactgaggatccgatgtcacttgaaagtaatgagatcacataacattgagggaatgtcctaagaggagtggcagggcataaatagaaatgaataaaagtgttttcaagtgccatttagtgggttctgaatttgaactagagattgagatatccagttatggagacattaactcaaattaacaaggtagtgaatgggaaagcacaaactataaaagactgtatcaatgtatggtattttttcccagagctgttttgacttaatggcataatagatatgtttaagtttttataacctcacgattatcattccaaatcttattttcctcctagaagcctctgtacagaaaagatgaacttaaaattactcgctttgtagaaacttaatctaaaagttcaaaatgtttaagtagcaatacctaaaacaagttgcagagtaaagaatcctctttttttctttttttcaacattaagatttggttaaataaaacctttgcaaacgtgttgccagctggaaccaaca

SEQ ID NO: 247512 - DNA, 362 bp, Homo sapiens
ccgggaggcagaggttgtagcgagccaagatcgcgccattgcacaccagcctgggcagcaagagtgaaattccgtctaaaaaaaaaaaaaaaaaaaaaaaggatgcatattttagggatacacatgactggattactgctgaaaacagaggtagtttgaaggcttggctcttcaggttttctctcaagggtttcatgggccaaatgttgttctccagttgcacctctgcttctttaagcccatttgttttgtttgctccctgccacccatctttgctaactttagtttgcggtccctcataatttcagcatgctgtggctcatctgattccaaatacacccgtggcataccttgattcagcc

SEQ ID NO: 247513 - DNA, 463 bp, Homo sapiens
ggacttcccggccctgcagtgcgcccagcactgattccgaccagggcacccccttcagagctagggacgaacagcagtgtgctcccacctcaggaccttgcctctgcggcctccacttggaaagttctcagttccctccaggcttctagaagcatctgggccagggctcatggctggataatttccctaggcttaacaacccaagcaagcttcgcctcctcgttttattttttgttaaacttatgagaatgtgttaagaaagagtgcagctcgagagacattcagagatggaacacaccagaccccagatcacaaagccaaccatgcccagcccctcccaacacccccagccccacgaccatcgttctgaattctgacgacgccgtgagcctgcctttgtactttaaactcatggaaggataaccaccttcacgttttgaaataaatgtttcctgttgaaatg

SEQ ID NO: 247514 - DNA, 575 bp, Homo sapiens
tagatgatttgatttaaaaatgtgttatatgtgatacatttataacggaatattttttgctaaaaagaaatgagctaccaagctataaaaagatatagaggaaccttggatgcatttttctaagttaaagaagccaatctgaaaaggctataaaactgtatgatttccaccatatgacactctggaaaaggcaaaactatggagatattaaaaagatcagtggttgtcaggggttaaaggggaggaagggataaataggcagagcacagatgtttagggcagtgaattattctgtatgattcatattggtggatccatggtcattatacatttgtcaaaactcatagagtgtgcaacatcaagagtgaactctaatgtaaactatggactatgggtgataatgatgtgtcaacataggtacattaattataacaaatataccactctggtgcccagtgttaatactgggggaactgatgtgtgtagaggacaatggtatatgggaactttctgtaattttgggaactgaaaactgctcttaaaagaataaagtgtattaaaaaggatcacaccaa

SEQ ID NO: 247515 - DNA, 422 bp, Homo sapiens
cacattcaattttgaacaactctggcctaaagaactttctaagccaagaatctgaaggactcaaactaacccatttcactctctgcgttattgtgtgagaatctgaggtatttattgctaaccaccatctccattatcaggggcccatggcaggtatgtctaatagatcacgatatactttcttgccaatctcagcctcagctatcctaacttagttctccaggcagccacctccaactatctgaagtggcagagagaaaaagcctttttatggtaccaggatcttaaaaccaggggttttactttttttttttttttttttttttggagacaggatctggctctgtcaccaggctggagtacaatagcatgatctctgctcactgcactccagcctgggttcaagtgattgtcctgcctca

SEQ ID NO: 247516 - DNA, 511 bp, Homo sapiens
tgtttgaagaagaaagtctcttctgggttctattttaaaattgtagaaatcaggataaaattttaatggtgtattaaaattgtgtcagctatacagcaattgtggtaaagctggcattgcctgtgcatgctcattaattgttcagtgttccacagcgcatgcctggagagctgttaacacctcagtatttcagttgacaaagtatttgagaataattagagggagtttgttgtttgtaaactttcctttgacatcctctgacaaggtcaaggtaacaccattattaaaacttgtaaaatgatgatatcatgaggaagaaattggatgtgaatatgagatattaagacaggtaacctggtttcttcaccaagtcaactgcatgtttaaaaaaaaggaaaagggctgtacttgatcaaagaagacttaagagagaattggcagaccttgctgagaatatgatttgatgcacgctgaagtatttaggagtgggatttgccataaagtatatcaa

SEQ ID NO: 247517 - DNA, 335 bp, Homo sapiens
gcggcccactgggacctctccaggtgtactgcaatatcactggtaagggtgcagtagccctactcacacttaaccaccccacttcatggaaggaagcaaaaataaattcactggagggggatacctacgtgaataaaaatttgaaagaccaactggtctcctttggggaggaaatggtattctggtgagtaatgcaaatttgcagctaggttaattttcatgagacagaaaaaagaaaacttgttaatggtcttgataatgtttcactgaagcaagaattaattatcagtggttttctttagggcctccaagggcattttctctcctgaaactca

SEQ ID NO: 247518 - DNA, 605 bp, Homo sapiens
tattataaaaatgcataaaacatgtgagattagcactgagataatcaaataggccaaaggaacaaagtagaaagtccagaaagagacccacacatatacagatcttgaatacataagagaggtggcattaaaaacagtgggaaagacaagcgattcagtaagcagtgtgggaaaaactgactacccttaagaaaaataaaataaaaactagatctccccctcacaccatacacaaaattaaattctggacattaaagattcatattaagaaaagcaaggccttaatacacttggaaaaaaattaaaggagaatgtactttaagacctccaaggttgggaagtatttcttaagaaaatttaaaaagcaaaaattgtatggaaaaacattgataaacaggtacctcaaagaaacagaaagatgttcaatatcactggtaatcagaaatacaaattaaaacagaataatgacagcatctgtattatagtgctggtgatgacatggaaaaatagaagctctcatttactatgcctagaaatgtaatttggtacagctactttggagaacactttgacagtttctagagttgcaagtaattgtccaacaa

SEQ ID NO: 247519 - DNA, 388 bp, Homo sapiens
attgttttatttaattttatgtaatacttgggtacaagttgtttgcctcttttcattaggaaacccttatatggtaaagtaatggcaatatagttttttttaagtagtattatgctctccttgctttgctgcatgttgtttttaaaaaatttgttgcttctgagtaatacttattttgtttaaatttttaaaattaaattattcttgttaatattatacaatataaaatatttacctatgctgcttaggtcctacttaggaaaattaaaaatagttacatgctaaagccagaatgagaaatattttaaaacaatttaaattatactaatatttttattaatgaaattggggctgaacaggaactatgtcaggaccagaattgtgaaga

SEQ ID NO: 247520 - DNA, 477 bp, Homo sapiens
tcacttcaaagttgaatccactgcatacgcagcagccttgtgacacagttataaactcttccctactacaagctcatagggcatcccattaccctgtggacccattaccctggggacccaacaaaaggagatctgtacctcctgaaaccagtttataaaaaattaaagagctgtttgcttcttcaaatttatagacaccagggtaaggctacatggttccattgtcaatgtttctattttaacatagcagtgaaagtactttgcagaagaattagtcaagaaaatgaccctaaaaatgacattcaaattgaggaaaagaattaaaatgttgctgtttgtaggtgacatgatcttatatatagaaaaccataaacaatacatcaaaaactaacaaatgccctcagaaaattggcaatatataaaattaacatataattatcagttatgattccatatgctaacaacaaaccacctgat

SEQ ID NO: 247521 - DNA, 368 bp, Homo sapiens
ccgcccccgcactgtgctcaggcctgaaccaagctgagagaagttaaagagccccacctctttctcttatcacagctggttcaaggttcaatttgagtctacaatgggtcaacactgccagagaagctcagtgtcttgggttgcatatataaaggtattctatcatgaattagggaggtgccatactggtcctgtcagaggaattctgacatcttcaagtacgtgaaggggctcgcctcctaaagagacacttgatttgcttagggttactccaaaggcctgaacaagtctaacaaaatgttatggcttgtatgcgccatagggtcatgattgtccggtcaataaagaaagatacacaatagctggaa

SEQ ID NO: 247522 - DNA, 384 bp, Homo sapiens
aaaaaaaaaagagaaattaaaaattagccaggtctggtgcacacctgtgatcccagatactcaggaggctgaggtggggggatcccttgagtccaggaggtcgaggctgcagtgagccccactgtattcccacctgggtgacacagcaagaccttatctcaaataaattaagctgcatgatattctattaagtgttttgttagatgcataggttatcatctaccttttggagggtggcttctactgaaccactggaaggtttggttggccataaagtccaagattttccccaatttatggatctgttctgaattccacactaccagcaccctactaccaccaagagcaagccctcaggaaccccactggaacctttcctcagta

SEQ ID NO: 247523 - DNA, 559 bp, Homo sapiens
ccaagctgtcagtgctgctgctgatgcctgctgacgttaccatgaaggctgctgccacccaaagcttttcatcactctaaatgtagtctgttccacagaaactggacagaatgatagcactgggctccactcaggaacacatctcctaagatattgacgagcaagctgtgccgcagtggggtgagggttggaagagggaaggctccagagcccgggcttcattctctcacgcgaagaaacaacagggagaggacactcttggaaactctccagctccctcactcttctctaagaaagagagttgctttatctcgttgacaaatttggaagcaaatactgggcatgagcagctcagctcctgcccatacaggactcaagctctggtgtattctccacatgccaaagctcaatggcacactctgtccctgcagcgggagcctatggcattgcctgtgattgggggtgaggttatctattctgagattcaagatggaagcctccattgcccctcctaagccatgctttccagcactgtaataaaactggatttttttccctc

SEQ ID NO: 247524 - DNA, 727 bp, Homo sapiens
taagcactttacatggattagtattatagtaatagctgtttgctgttaccaatattatcatcaattcaatccatatcctttgtatctctgtgttcatgaattctttaagaaacctgaaaaccccttaatttttgtatgattttcgtatcctcattttcttaggtagttatttaaaacatttttttcaaaatttgaaaaacttaaacagaaagtaaaatgtttcataatctcacccctataaaaacataaagtgagaagtaaaatctctgcctactcttccaattcctttttccaataaaccaccatccatccacactgttaaataaaaaactattcaatgacacgtgttaaaacacagtaaggcagattttattcaggatcattgcaatgagcacagggaccacagcaacgggattttggagtgggggagagagattgggctcacttgcaagtacaacatgggtaagtgggaatttatagccatggagcaaggtgggggcagtggatgctcgggggtaaggagtattttggctaaaccaaccccacaggattctagctgaaggccacagggtgaccaaacatcgtccaggagaggatgaagaacctgatcagatttgagggtgatcagattttgaggatggaggttcttgctaacctgacttagatgagttttttgctaaaccggattttataaggaaggtttagcaaagagcccagaagaggccag

SEQ ID NO: 247525 - DNA, 515 bp, Homo sapiens
cagaatgaaaacattagacaccctctcgttctctttctgctcctctcacaatgcaggcccattcagaacacaattgtgatactcctggacaggacgtgaaaaaggcaccggagccgctacgtgcacagtaatgacatctcaaaggccaacagcactggctggagaataaaggcgttttaaaggtctaagaacactggattgaagagccaaggagaacccttgatggatgaggaggaaggcagagcccagcaaatgacaaggcatttgtgaccaggtttccaatgccggagtgaggtagaacaaaagtactgaagagacaggagcttccgttcctgccccggtgccagcttgtctttcccgtttcccaggaagctcagctgactacaagcctacgggggtacggccctcctcttatttctgttgcctcttgttagttgagaaatgttagtgtctcaaattgttttagtccctcaaattgcctttaaggataatggtaataaaatgatttaagctac

SEQ ID NO: 247526 - DNA, 770 bp, Homo sapiens
cataaattagggcataaatacattgatcagctggctactagcaaaccaccagaactctgccgctatctggaatgataacctgtgggatacagtcaactttctgccagagctccatttgagcttgagcctgtcatactcagctgatgcccaagtgaccccttctctcatctttcattcatttttcatgcttacattttcatactaccctgctttgttcccttgccacctcttacttccctccagaggtttacagccataagtcaatggcaaaaaaaaaaaaaaaaaaaaaaaaaaatgccttacaatacagtgcctcagtgtaagatttagaaaaagctagaaagatgacaagttgaaaagatgttctcacccttgtaatgggctgactcctgaatctgtgttaccttcttgtacaattcactgacctatttttcatttgtttcttaacttggttttaactttggcctattattctaaagttggcttccagaatccaatctctattctagttattcattctttactcaaatatagttttaaggcccagtctttgcctagcacacaattgaaatgttgaccataatacccccttgatatctttctcatgctttattctctgtgaagaatagcagcgtgcacctttgtttattcctcatgaataaaaatatcaataagaatatatgagtgagagcatagtatgtattttataacacattgatttgtcctgtgaccctaggcaatatatattttattaaaattatacaacaatg

SEQ ID NO: 247527 - DNA, 528 bp, Homo sapiens
taccatttgtcttctagggtagctttatcccatgagtcagttcatcagtgaatatgttttgatgtttacaatgagcctgtcactatgttcggcattaagaaaggaaatagtgaggtcagaaacattttctattctcaataaactcacagtgtaatgtctgattctaaaaaggaaacgagttattataggtcaatttaatgaaacacagaggctactagaaccttcagaaagaccacagagtttagcctttagaaaatttcttgaaggaagtggtgtctaagctgaaatcacaagaaatcaagaagctaaggagatgagaaagggaagcagcaaaggggaacagcatacacaaaggaacagcatatgcaaagcggaagtagcaagggggagcagcatatgcaaagagggaacagcatatgcaaagggaaagccttcagaaatttatttttcctgtttctattagatttttctacaggagagctggcaagagaaatcacactcagtaaacatgtgtaatgttttaatacc

SEQ ID NO: 247528 - DNA, 168 bp, Homo sapiens
aaatattaccagaagcatagataaagctcaaatgcaacacatcatatggtgaataattcagaagataagaaaaactgatttctaatctcaatttttttaaagcctcttggtacagtcacattcatcaagaaatataatcaacctaaagagttaaaattttcttttgta

SEQ ID NO: 247529 - DNA, 313 bp, Homo sapiens
ctaccagacagcctcttgtgaaaggactgcctaattaaccctgtgctaattaacaatttaaaattacacagtgcgactgttcatgtttcattctccgggagctggagcaacagcaggagccccctccccttcgtcataactgcacccctcccaccccagcttccctgaaactgttgcattttacccagttctgcctcaagggaacaggataaaactgtcatcagcacatgtttttaaagagggagatgaacgttttgattaatagggagatacagggtaacagggtagagttttatccttttaaacaatcttt

SEQ ID NO: 247530 - DNA, 400 bp, Homo sapiens
atcccagcactttaggaggccaaggcaggtggatcacctgaggttgggagttcgagaccagcctgaccaacatggagaaatctcgcctctactgaaaaaaaaaaaatacaaaattagccaggcatggtggcgcatgactgtaatcccagctactcgggaggctgaggcaagaaaattgcttgaacctgtgacctcaggtgattcacgtgccttggcctctcaaagtgctgggattaaaagcgtgagccactgtgcccggccaagattttttttttaaagacagagtctggatctgtctgtcaggccagagtgccatggcacaatctcagctcactgcaacctctaccttctgggctcaagccactctcccaccccagcctcctgagtagctgggactaca

SEQ ID NO: 247531 - DNA, 897 bp, Homo sapiens
gaaacaagcagcaggctacattgggtccacagcctgcagcatgcttacccctggcttagatattcagaaccactggtgaatgaagaatgtattttgctttagaattttgtgatacaacttttttctaagaatatatatcctaatttctatgttatatgctgtatgtacattgatcttttaagatttaaaaggaaaatctgtcgactgaaattgtcttatatacaagatgtgcaagcagtcacaccctatcccacctctctgtgtttgtctatgagtgcgaaaaaacacagcagacccagtattttgaaaccaaattagagcagcaatatttgtgatagtgtattcagtggaatgcaggtaaagaatttatttttctgttctatggaaatgaaaattcaaagatcatacaaaaacagaggtgctaatgtgtttcacgttttaatagtcttggtttagctgcttcaaacccaagtcatattttggcggacctgaattgtaaggaataaattaagacagctttttgaaacagaccacttagaagtttatttcagactaacttttactaatactttagcattaacttgtagacagctctagttttacttccaaataatgtagtgatatacggatttttaaaaaattatgtgtaacattttatagaactctgctgtataaagcatggacacttgcattgggagatttattttagtgcttctggtttatttgcacattggcttgggtagtaggttctgttgacattcagaagctgtcagaatgccttaccatttttcttgggggaggggtgggagaaggtggttagtgtataattgttccctcttaaatttaaatatgggacaaggaaaggaggtaattgttgtgcttttgaattccagtggg

SEQ ID NO: 247532 - DNA, 894 bp, Homo sapiens
  misc_feature (831)..(831): n is a, c, g, or t
  misc_feature (834)..(834): n is a, c, g, or t
  misc_feature (849)..(850): n is a, c, g, or t
ctgaacaagattggagtacccacaataacctgtcagtatcctataaaaagctaacttatcatactgaatttgggtgtttgacaaacttttagttttgccataaaataaatgtattcattgctgggcgcagtgagagaaatgaaaacgtgtccacataaaaaccagtaaacaaatgtttatagtggctttatttataatagccaaaaagtgaaaacaggtcacaaatccatcaactgatgaatgaataaacaaaatgtggtataatagattatttttattgctacaaacgttgaactagcaaatcctgaacctttgctcctagaggaaaacacacggttaggttcctgtgagcctctagtcacatttttgtcagtagatcatcagtacacaccttcttttttatgtgtttctgatgaaagacaccttatttatttacttattttaaatttcaatagccttagggatacagtagttttgggttacacagatgaattatatagtgttaacaccttacttaaaatatatgtaaggccaggcgcggtggcgcacacctgtagtcctagctacttgggaggctgaggtaggagaggcacttgaactctggaggtggaggttgcaatgagtcaagattgcaccactgcactccagcctgggtgacaaagtgagactccatctcaaaagaaaaaagctccataggagaaggaaccttgtctcttcaccacataaactgtgtttggattcgcaatcgagttgggaaaaaaaaatcagtctggaagagccacaccaaaccgctaacagctactgtctctgggaatagaacaaggagtttgntangcgcgatatgccgcnnctgacctctagccacaataaggcttattaatgaccagacgacgt

SEQ ID NO: 247533 - DNA, 400 bp, Homo sapiens
aagttgaaagttctacactcagatgattctagactcatggtctagatgtagatgttctggactggtggttctcaaagtttggtccctggaccaaccacatcagcgtcacctaggagaaccttagaaatgcaaaactcccatcagcaacccagccctcttgggtcagaactgtaggttagcaagatccccaggggactgtctgcatattaaaatcaaagaaacactattctagactattattccttgcggctggggctttgttgatctttgtggcaccagcactaagcatagttcctggcacacagtaggtgctcaacaaataggaggaatagaaaacagtaggcactcaacgaatgcttactatttttctgttttctttctcttttcttttttttttttt

SEQ ID NO: 247534 - DNA, 454 bp, Homo sapiens
ggttaacacctggtgcaacagggatcctctagtattctggcatccactataatgccagaatggttggtgcctgtagcataacagttgttacatgtatcaaacctctcccctgttaataacagaagatagtagcagaagctttgagcttggagttatagaggctacattacaacagctactatctgcataaatcactggacccttctaaaattccaacttcctccttttaaatgaagttcttactagctacctagtaggactgtttgtggattacatgcaatgacatgaaagtgctgattagcacacagtaggcatatcattcactttgccttactagaaaaatagtaaacactacatgaaaaaattagtaaaagatgtagtattttacaaacaagttgtgtttcaaacactcatttttgaagtcagtagtctggtaattagaatgcattttccc

SEQ ID NO: 247535 - DNA, 518 bp, Homo sapiens
aaccgtagaatgtcctgttagtactcagcctgtgtatgagtgctttcctggccttgatcattctcccaagtggtgaaagctgctgactggtgtgcttcagtgcaaaaatctggaagaaggcagcacacatggtgagagctttaatgtacgctggctcactgaaggatggtcggaggctgggaggcagttctgaggaacaagtggtgctgcgggccccgacgttctttctgccacatttagctagtctccctcctgtgccttcacgtgcgacgatgacaaactgccttacaattttgagtgcggtaggaggaggagaaaaagctgattgatttctcacatgcagaggttgtgttggaattttacggtttgccttccatgtgagccagttctgcatctgcagattcaaccaattatggattgaaaatatttgagtgtgaaaaacaataaaaaattattaaacattctacatataacaaagtttcatatgtaccccatgcatatgtacaaatataattaat

SEQ ID NO: 247536 - DNA, 541 bp, Homo sapiens
ggatatcagttttcccaggacaatttgtggcataggcgatcctttccctgtttaattatcttggcccttttgtcaaaaaccaatcgactatatatacgcaggtttgttccttggctctccacccagtcccactgatttatatgtctcacgatatccatgccacctttcccctacaaagcgttctctcctcttcagtaccctgtcccacaggtttaaaccttatcagcagccctaatctctaatctctgcctccttaggtcagaggagtcccctcatgctcttttttctctctacctagtgatgtcatagtctagcaattgctcccagatagagagccagggcaaatggggcttaccccaggcattttcttttcctcaaggatcacaatcctggactgtcttgtttcatgcctgaaaacagttgcctcatatgtttcatctagttttatgtttgtttatggcaggaagcctagtccagtgccagttattgcatcttgaccagaattagaagttacagctttggctcctaaccataagttgta

SEQ ID NO: 247537 - DNA, 2260 bp, Homo sapiens
attgggaggaggataagctggggaagaggctggccacactggttgctataaccaccaccacttccggtccgttcctctttacggcccacctcagcgctgcccgcgcgaaatttgtatccctctgcttgtgtccactggctcctggggagcagcgcagggaggaggaggaggaagatatcaaagagccctcccattgggggccccagatcgccacttccggtgaccagaggtagggaaggaaacaatcccgacccggagtggacaggtgaggaggggaggacttgcctcgccgaggccgctgcgaggagcgtgcccaagggcgaaggtccagggaacccggctcccgcgcaccgaagacggccgccatgccggcccgttgtgtggccgcccactgcggcaacaccaccaagtctgggaagtcgctgttccgctttcccaaggaccgggccgtgcggctgctctgggaccgcttcgtgcggggctgccgcgccgactggtacggaggcaatgaccgctcggtcatctgctctgaccactttgccccagcctgttttgacgtctcttcggttatccagaagaacctgcgcttctcccagcgcctgaggctggtggcaggcgccgtgcccaccctgcaccgggtgcccgccccggcacctaagaggggagaggagggagaccaagcaggccgcctggacacgagaggagagctccaggcagccaggcattctgaggctgccccaggtccagtctcctgtacacgcccccgagctgggaagcaggctgcagcttcacagattacgtgtgaaaatgaacttgtgcaaacccaaccccatgctgataatccatctaatactgtcacttcagtacctactcactgtgaagaaggcccagtgcataaaagtacacaaatttctttgaaaaggccccgtcaccgtagtgtgggtattcaagccaaagtgaaagcgtttggaaaaagactgtgtaatgcaactactcagacagaggaattgtggtctagaacttcctctctctttgacatttactccagtgattcagaaacagatacagactgggatatcaagagtgaacagagtgatttgtcttatatggctgtacaggtgaaagaagaaacatgttaaaaactcaacatcaaatgctctgatgtgctatagattttcaaatctttactcacataattatctctttgctattgtaaatctttcacttcaagataatttgacagttgagtatcagcataatttgtttagctctaaggcaaaagtttgcttgcttgccaacacaatgaagataatacctacccacaaacatccctattctctactttcacctttttttttcttttaatccttttggtagaaatcaggttacaaagcaaaaccacaatatcagcaacacttcctaatcaaaattaagcattgaatatttgtttaagcttagttcagaagcaacgctcctacaggacttgacatttgctagttagaatatccctactcttctaaataatttgaaagtatagagcagtaacacagtaacagtgagcacagccaagcctgacactactaaatgatttggtagtgaagccaggacatctacccttgactattttttatgttatttatttattagtttgtccatttgtaacatgtatagatctgtcctgtgagcatttctgatgaatctatggttcttacagaaatttttcaaaggaatcaatttagagatagagttttcatatacttacattaacttattaatgaaatctgtttgcatcagtgcttactgcgacacattaattagcttgattaatttagattagaatcattaacatcatgaaaaataaaagtactacatttctaacgtattcccattgcaggtgttaggtattttttctgtcaacacctctcttttgaattctacatttgagaaataagcatggaaatattagctgccccgtctgccattcaccaggaaaaatttctatggcaattttgtaccatgaagtaaactgttacaatagtttctgagaagcatactataactctgatcttccattgagaataacaaaaataaatatcaattttacacctcatatgtcttcttagttctgaatgattagaagaacttgcatgtatttttatcctagaaggtttaaataatacatcaaagttattttcttccaaatgtaattttatgtctgctttaaggaaaataaaataaaatattaataggaaaaaaaaac

SEQ ID NO: 247538 - DNA, 1040 bp, Homo sapiens
taaacagagtctcactctgtcgcccgggctggagtgcaatggcatgatctaggctcactgcaacctccacctcccgggttcaagcaattctcctgcctcagcctcctgagtagctgggataacaggtgcatgccaccatgccaggctaatttttttttgcacttttagtagagatggggtttcaccatattggtcaggctggtctcgaactcctgacctcgtgatccacctgcctcggcctcccaaattagaggcgcgagccaccatgcccggctaaattatctacatattttctatgactgtatcttgcttttaaagcacatgtactgtctgtccagattacctctgctgccttgaatacaaagcatttcatattgctgtcactcctgcgtagtgcaaacactttccaatgaagtagacagaacttcagaaaataccctaaggagccatgttaaaaacgaccaagacttgttcaactagcaacaaagatggcccctaacgctgcaataagtttaaactttgatccttagttctaagtgaatcaatcccaattaaaatgcaggacttcatctactgtattttattaacatagttgagtatcttaatcctagctgtgaactaaatattcagcaccccaaggctgaatatggtattcagtttaaaacacctactccacaacagaagtctccttgctttcacattggcttccaccaaattgtaaaattaaatgacaagcataaagttatacaactcagcatagataactatccaagtgatatgcagtatcattcaggaatttaggctcctttgtgggacattttatcatcttttaaagcaagttaagtttagaggcaataaagacaaaatgccggggtttaaaccctactgctgcctttttttaagacaggctcattgcagccttgacctcctgggctcagttggtcctcccacctcagcctcaccagtagctcggactacaggcacccaggttcgagtgcagtggtgcgatcatagctcactgcagcctcactttttaggct

SEQ ID NO: 247539 - DNA, 862 bp, Homo sapiens
caactatggttgctaacacaagaatcggcactggtgacttttgagccatcaatcatcctttcctaacacatgaatcttttggaaaatggtctcaaatagtcaagaccccctgctgggaggagcttctatcctgctctgtggaagaaatgggcatgccagatgcctggaagatcagaggctcacattccagttcaaagttagagaaacctgagaggggtgtactggtatgaccacccgagatcccatcgctgagaaagataatggccctggagacaaagactgatgaagaaagacagtatccagctgtgatgcagatgaaacatgcggcatggttgcactcactatgcagccaaggctggaagccactctggatccagccactctggcacagcgttcttgctctaggaagaacaactgaacatggccacacaggcctcacagctggcatatggaggctgttaataagctgagcttgaggcttcaaaggactcttgtagcctgtgctggatctagcagtgaccagtatgccagtggccatggatgcccaggcccatgttcagtagtgaagcaggtgctagcagcagaagcaatagaaatggaaactgggagatctgctgtggatgaatctcattatcttctttctctgaccctctttggactaaataaactcccagtattcttgaccaacagaggtagggttggaacagaacctcaaaagtcatcattagacttcctactaatagggcattggaagttcaagcgactaactaggaaacaggttagtatttgtacccctacactgtgcaacagattacataccatttgctctatttggcatcctttccttaggctagattcccag

SEQ ID NO: 247540 - DNA, 725 bp, Homo sapiens
aagagcaaggccataggagagaagaaactaatattcaaagcttcctcccacagttcaaagttagagaaacctgagaggggtgtactggtatgaccacccgagatcccatcgctgagaaagataatggccctggagacaaagactgatgaagaaagacagtatccagctgtgatgcagatgaaacatgcggcatggttgcactcactatgcagccaaggctggaagccactctggatccagccactctggcacagcgttcttgctctaggaagaacaactgaacatggccacacaggcctcacagctggcatatggaggctgttaataagctgagcttgaggcttcaaaggactcttgtagcctgtgctggatctagcagtgaccagtatgccagtggccatggatgcccaggcccatgttcagtagtgaagcaggtgctagcagcagaagcaatagaaatggaaactgggagatctgctgtggatgaatctcattatcttctttctctgaccctctttggactaaataaactcccagtattcttgaccaacagaggtagggttggaacagaacctcaaaagtcatcattagacttcctactaatagggcattggaagttcaagcgactaactaggaaacaggttagtatttgtacccctacactgtgcaacagattacataccatttgctctatttggcatcctttccttaggctagattcccag

SEQ ID NO: 247541 - DNA, 764 bp, Homo sapiens
cgtgatctgccccctgcagccaaacaacaggacggggcagccgccatggagatgcagcccctcaagagtgccgagggcggcgacgctgacgacaggaagaaggccagcatgcacaagaaggagaagtccgtgctgcagggcaagctcaccaagctggctgtgcagatcgggaaggcgggcttggtgatgtcagccatcacggtgatcatcctggtgctctacttcactgtggacaccttcgtggtcaacaagaagccgtggctgcctgagtgcacgcccgtctacgtgcagtactttgtcaagttcttcatcattggcgtgacggtgctggtggtcgccgtgcccgaggggctccctctggccgtcaccatctcgttggcctattcggtgaaggtgagaggggaggagagcaggaccagccggctgatgcagctgcagctgagggcctgggggaatcactggggctggtgctggggttgggagatgaacgaagaagccccatagaccccctaggagcttggaagaagaatgtatgcaggaccccaaaactctgacgctttcatagagtccaggggcctgtagcaaaccagagagccataccctggctgaagaggcagctgttattcagcccagccacacgccgccttgcaggggtgcaggcccagcattgccacattgtcacctttttccaagagaagccagaaatctggacttaatgtagactctcgtgatttttagacattgataatcaactcaaaaatttt

SEQ ID NO: 247542 - DNA, 341 bp, Homo sapiens
aaaatttccaaataggattcattttaggtattgacagtggtactcagtggtactcactgtcaatacctaaaagaaaggaagaaagcaatgttctgtgaagaacttgagctaaacttctgaagttaagggttttgcttgtggtcatctgtggtacatgattacttgagatgagatgccacgatggtggtggaggtaaagaagtaccagcaggaagaaatcttcctgtgcttattccttcagagggggtatctgttgaatttttttcattttggtccttcttatgtagccatgaaggttttctaaagaatacctaaaaacggccaggtatggtggctcacgcc

SEQ ID NO: 247543 - DNA, 396 bp, Homo sapiens
cagaaaccatctggccagctccagagaccctgggcactacccttccactcccctcttcctgccatgcccttgaagagggactggggtctgcacatggtcattcctagccatggtttgagcctctcctctcctcctcactcacctcccctggcttatgttctgaaagggtgagctccagctccagagaatttgaccttggggtgaagacctagccgcagtgaggtttgcaggtggactgcagctggccctgtgcactttggggcaaagtgctccccggggtctgttctgtctgccgggaacagatatgtgatgtggcacttcccaccaccccagggatgggctactgtccctcctcagagggaccatcgggccctcatcaacatcacctccacggtc

SEQ ID NO: 247544 - DNA, 168 bp, Homo sapiens
ataaaaagtagaagaaaagcctatttttagaaaagaccaaattaatagctcctaacagtgtcagggacatttatttgttcatcagttgagtctgcatagacaatctttgaatcaccacagctgtttgagcaaacctggattggaggacaagctatgcagttaactctg

SEQ ID NO: 247545 - DNA, 387 bp, Homo sapiens
cctgtaagtctcagtgtttctctaacttctgtgagccactctagcaaattaattgaaccaaaggaggaggttaaggacagcatagtttacaaaatgagccctgtttctgacatctgaagtgggggcagtctagtgggcctgacctcttaacttgtagaaacattctttctttctagatgactagtgaccagaattaaattgaatcctaggccacccatttattgtcttctgcagaattggcgagaatggagaggaatcctcacctatcggtgaccagagatgaaatattctgaattgagagtttaaaagagcacacttagaagagatttagagtttagtttttcctgtcagtcttgcaatagtgtcaacatacgttaaaatgatctg

SEQ ID NO: 247546 - DNA, 363 bp, Homo sapiens
ggaaatggagtctcactcttgcccaggctggagtgtggtagtgtgatctcagctcactgcaacctccgcctcctgggttcaagcgattctcctacctcagcctcccgagttgctgggataacaggtgtgcgccaaaccacacccagctaatttttgtatttttagtagagatggggtttctccatgctggccaggctagtctcaaaactcctggctcaagtgatccgcctgcctcagcctcccaaagtgctgggattgcaggcaggagccaccacacccagccaggggatagtaatttgttatcgtttcctatttctgtgctgtggggaaaaacccaacatgtcttttgtaattaaaaagaga

SEQ ID NO: 247547 - DNA, 742 bp, Homo sapiens
tgaagaaaaagacttattaaaagctgaaagatgccttcttgaaacactggcattagcaccacatgaagaatatattcagcgccatttgaatatagtcagggataagatttcctcatctagttttatagagccaatattcccaaccagtaagatttcaagtgtggaaggaaagaaaattccaactgaaagtgtaaaagaaattagaggtgaatccagacaaacacaaatagtaaaaacaagtgataataaaagtcagtctaaatccaacaaacaattaggaaaaaatggagacgaagagacaccccacaaaacaacaaaagacatcaaagaaattgagaagaaaagagttgctgctttaaaaagactagaagagattgaacgtattttaaatggtgaataacattaatatttatcgtgacaatggtatcaaagaacatcaatccgtatcatgtgattgcttttactgggagctttgaaaaaaagttcaagggttcctaatggtcaatcatgagctgccttgaagtaggatcaaaataagattttcattaaagacctgtattatcccaggatgtatattatgtatcgctgttttcagagtgtgggtgaatatagcagaaatattacagcggaagtgacaaatttacaacttttattatagaaagaaggtgtttctggcaatgtaatctttactgctctcaattaaaaataattttgaggcctgaatgataatcccttgaggaca

SEQ ID NO: 247548 - DNA, 191 bp, Homo sapiens
tcaaatatacaaaaagttattaatactaggaagaatgaacagtcaatagaaaaacagtcaaagaacatgaaaagggctgggcgcggtggctcacgcctgtaatcccagcactttgggaggctgaggcaggcggatcacgaggtcaggtgatcgagaccatcctggctaacacggtgaaaccctgtctctac

SEQ ID NO: 247549 - DNA, 781 bp, Homo sapiens
cttttatgtagctctttatgacttctgaaagaaagatacactttttctagaattattttcactaactgataaaggtttagtctagactgtgagtttcagggacctgaatgaacataggataggtttaagaacaatctgatttcaaatgttagtgaaaataattctagaaaaagtgtatctttcttttatgtagctctttatgacttctgaaactttgtttttattgtttctagcaaaaacctagaaacaacttaaaagttagtaagtaggtgattggctaaattaatgttgacatatccatacaatattatattgtgccactgttacaatgaatggtttagcccagaaatggattcataggttatgcaggcaagggttaattcagctagcatgggttactcatatccagccattcccaaaaaaggcctcttttcaggactgcccttgcctggctcctgggagatgagtgctgggccctgggaatactctgcctagtaagggtgttatatgcctgaggacttgagccacaggtactggtttgatcagattgtttatgcaaacagtgtgatttatggtgaagcctatttttctctggggatctggggactacaatctaaatagctgaggtcatctgcatgcaggcattgcatgcctagtgactgaccctcaatagaaatgctggacattaaggcttgagtgaactttcctggttgacattactttgcatgtgttgtcacacattgttgctaggacaattaagcacatgcatgcgactccactg

SEQ ID NO: 247550 - DNA, 683 bp, Homo sapiens
tctttacctgcaccccagaagcctgactgacccagattacctcaaatagcacatgcctagagtggcctctgaggtctcagttcttggggtgggggtagtaaagggggtggtgtgatccgagtacatttcaatcaacatccagttggctctgagtcctggggtccacctgaaaccaagccaggctggcagaggccatgagcccatctctgggcctgaccatcagaggcatccccagttgatttcgaacagcctgagataccctctgggaagggagtgtgggtgccaggagtctgtaatgagataatcatcacacagtgagaaggagaggtcatcccagtaagcacctggggggcttgggatgctggcacagtgcaagaggcctgtccctcggggattcttagcgaatgagccttgtcacttgaaaatgaatgtgccattgtaaagaactcaggcaggggcagtggttcatgcctgtaatcccagcactttgggaggccgaggcaagcagatacttgaggtcaggagttccagacaatcctggccaacatggtgaaaccccttctctactaaaactacacaaaaatggccgggtgcggtggctcacgcctgtaatcccagcacttcgggaggtcgaggcaggtggatcacctgaggtcaggacttcgagaccatcctggccaaca

SEQ ID NO: 247551 - DNA, 383 bp, Homo sapiens
aagaaagcaagaagcttcgttaacatgataaaataaatcttctaatatataacacccagcgtcatacttaataagcaaacactgctgtcagggacaagatagatccattctaactactattattgaacagtgtcctgaaaggataatctaaccaatgcagtgaagcaggataaagagtatactactggaaagcagacaggtttgggctacaagctaagtatctacctagaaatctgaagataataaattctgaaaaatggtcagacctattaagagaaaggcacaacgatgttcactaaaagatacattttaaaactttgaaaatagcttttcagtacaggtaatagccatttgtgattgggcgtacggggagggtaccgagc

SEQ ID NO: 247552 - DNA, 496 bp, Homo sapiens
aaatttgtcagcctcccaactataaatatgaaagcagcctatcatatttacatttctttaatataccatttcaaaactgcagatttgtgttacagttatttcagtatatgtcctgtccctgttaatgtgtaggtttgtaatagggagatacatttcatatcttctttgttttatccatgctgcctgccagacagtcttgtacatggtagatactgaataactatcaaatgaataagtagttattaagaccaagatacttttcagagaaaactttaccaacttctctaggactaggaccccaaatctgtgctcagagctgctagctttgagctgtatcttaactaggtgagaggcaggataaagtgatatattagaacccattttagagatacgactttatgtgaaaagtatctagttaagaagaaacacaatatagagaccttttatgtagttttagccttccttacctaatagtgacgtaatccttcaacagaaa

SEQ ID NO: 247553 - DNA, 1313 bp, Homo sapiens
  misc_feature (68)..(68): n is a, c, g, or t
ggggaaactcatttccatttcttaaccatattgggcctgagcctcagttacctacctcttctgtaaantgtaaactacctcttggggtccttgtgaggattaaatgaaacttgagcctaaaggggctgagctgggtgctttgcaaataacccaaccttagcatgaggcacggtatcatcattacggctgtggtgtttgtggtcacctatctgcaagtcacgctttcatagatatggtagagctgggatttgaacccacattgatctaattccaaagccaatgattccaccccaaccagacactgcatttactctctatgcctaactgaaatttgttctaaacctcaccctaaggtcttgccagaaagaaaagctaaattttcattaaaagatgaaaggagaaatgaatctgtttcaaaggacatgagaggaagaaggaaatatcccttcatgaaggattttgcaactttgtccatgcttctgcagggtgtaaaagtaaaaatcctatacttcccatattcaacgtttagattttaaacaactgaacaagcactttcacaattagccttcctcagattggaatgcgaagtcaagccaacgtgtacctcttactgcagaagatttctgcactgtgaatgtgataggatttgcctccttaaccagagggtgctggtttttcctggctggagggtagaaggtcatgaatagaggacaaagcacagggaaggggcagcatgtcgggaagagccccaaggatctcagtatgaaaataaagaggtgtgagccaactgcccataggtttgggctatgagtctggggaaactgtttcaaaatcaatggaggcccaaaggcagagggaaaattctgtgtatggacttccatgtcattcagaaatgttaactccttgaaaagagttaatatatttttttcttttttaaacatttcaataggtttttggggaacaggtggtgtttggttccgtggataagttctttagtggtgatttctgagattttggtgcacccatcacctgagcagtgtacattctacccattgtgtagtcttttatctttcactcccctcccacttagaataatggtctccaattccatccaggttgctgcgaaggacattatttcattcctttttatggctgagttgcattccatggtgtatatgtatataccacaatgtctgtatccactcattgattgatgggtatgcaggctggttccatacttttccaattgcgaattgtgctgctataaacatccatttagagcacatctcaggggtcctcatagaacagctaga

SEQ ID NO: 247554 - DNA, 387 bp, Homo sapiens
atgacaaggtctagcagaccaacacaccctccattatgtgtggcaaatgcatagctgggtgggccggtcactagatggccaaattgttcatgcgattacacttgtagagctctcagagatctcgttgaagtaggaagatgagtcatgggaggaagtgtcacctatgagtctttgtaaagtccctgattacagtcagtgttagagaagggctgacatcccttgcttctcagggctatgtatggaactccagtatcccctgctcctttttcatgtttgacttgcaaatcggagtatttttgcttaaattccagttcctaagattgttccttacaactttgagccaaattaaaaccttaaaatttgtttccccaacttttttttaatgta

SEQ ID NO: 247555 - DNA, 434 bp, Homo sapiens
aaaaaattgttttctcatgattgagtttgcagagatgtttgtatagtttcagtacagtgctttatcagatacgtgtctgtgcaaatatttcctcagactacagcttgtattttcattgtttttatagtgccttttgaaatgcagaaattattaattttggtgaagtccagtttatgaatgttttctttcacagatcttttaatgatgcatctcagaaatctgtaactaatttggatctcaacgattttatcctgtttagaaacttggcagctttatcctgtacatttaggattatgatctatctcattaagctttgcaaattgtttgtggggtatgaatggaaattggagggtggaatgaacatccagttgtccaagcattatttgatgaaaaaactgccctttctccaatgaattactattgtacctttgtga

SEQ ID NO: 247556 - DNA, 1621 bp, Homo sapiens
  misc_feature (1107)..(1107): n is a, c, g, or t
  misc_feature (1197)..(1197): n is a, c, g, or t
agaaatttctatttaactcccttcaagatggctaactagacacagacaggaagagtttctcccactgagaggccggaccatcaaaaagatgcacaatccaagcagatcttctgaaggaagtaatagagaatggaaggaggaaggactcagatcctgggttgaagggggagggagcagagaaccctgcatgtggttatttagtagcaagacccattcttggtcctgtgtgcttcctggagaaggggtgagttaaataggcatggtttgtggcccacatttgccacagacctccagaatcctagcagcaggagaccccatgacccctgtggacatttaggctgggagagattgctgcttggagagtttgcagggtcacgactcagtattatgaagcccagagagtttggtgtgggaactgctacagtggagtattgccagttacactcacgcctcaagactcgccaaattcctctgggtggctttggtctttgttgactgttggttctgttcagaacagggctatcttgcccatgggattgggccaatctaatctgaatacccccttgtctgccagcctctctcagtgtccctgtctggccacaccctcttgcagcacagcctcagatgttcatatggggcacatcttaaaagccactaccatagcttttttactgacagaccttggctaaccatcagagatattttgcagatgggccccagccagtgtgtaaccacatgcagcctcccccacaccactttgccagcatgcgttcatctgcagcatcgcccaccagtttgccagcatttgcagaccctgctgctgtacccccactggagcatgtgtatgtgtggaccctgctgctatgccagcgctggtgcacatacatgtacatggactcaactgccaccactctgacaaagcactgttgctgcccaccccccataccccccattggagtgttgttgccagcagactggggacacattggcccctccagtgatagcaggtcagagaacaaagccatgggtctagtcccagcacctagggttagagcatgcagaccaagagtgctaaactgagccttggccccctgaaatcattgaganatgaagccagttgatggaacccaacttataccatagtcaaagggtcaaaataatcaaaaaatataaaagcaaaaagcttcatccaaaggncagcaacatcaaagattaaaggaacatcagcctaacagatggaaaagaactagcacaggaatcctggcaactctaaaagccagtgtcctcttcctccaaacaacccactagctccccagcaatggttcataatcagactgaaatggctgaaatgacagatatagaattcagaatctggatggcaatgaagatcattgaaattcaggagaaagttgaaacccaatcccaggaatctactgaaatgatttaaatgctgagagatgaaatagccattttaagaaagaaccaaactgatctaatagaggtgaaaaactcactacaagaaattcattctatattcgaagtattcacagcagagcagaggtaaggtgaggtaaaaatctcagagcttgaagattaattctgtgaatcaactcagtcagac

SEQ ID NO: 247557 - DNA, 1452 bp, Homo sapiens
  misc_feature (938)..(938): n is a, c, g, or t
  misc_feature (1028)..(1028): n is a, c, g, or t
agaaatttctatttaactcccttcaagatggctaactagacacagacaggaagagtttctcccactgagaggccggaccatcaaaaagatgcacaatccaagcagatcttctgaaggaagtaatagagaatggaaggaggaaggactcagatcctgggttgaagggggagggagcagagaaccctgcatgtggttatttagtagcaagacccattcttggtcctgtgtgcttcctggagaaggggtgagttaaataggcatggtttgtggcccacatttgccacagacctccagaatcctagcagcaggagaccccatgacccctgtggacatttaggctgggagagattgctgcttggagagtttgcagggtcacgactcagtattatgaagcccagagagtttggtgtgggaactgctacagtggagtattgccagttacactcacgcctcaagactcgccaaattcctctgggtggctttggtctttgttgactgttggttctgttcagaacagggctatcttgcccatgggattgggccaatctaatctgaatacccccttgtctgccagcctctctcagtgtccctgtctggccacaccctcttgcacatcgcccaccagtttgccagcatttgcagaccctgctgctgtacccccactggagcatgtgtatgtgtggaccctgctgctatgccagcgctggtgcacatacatgtacatggactcaactgccaccactctgacaaagcactgttgctgcccaccccccataccccccattggagtgttgttgccagcagactggggacacattggcccctccagtgatagcaggtcagagaacaaagccatgggtctagtcccagcacctagggttagagcatgcagaccaagagtgctaaactgagccttggccccctgaaatcattgaganatgaagccagttgatggaacccaacttataccatagtcaaagggtcaaaataatcaaaaaatataaaagcaaaaagcttcatccaaaggncagcaacatcaaagattaaaggaacatcagcctaacagatggaaaagaactagcacaggaatcctggcaactctaaaagccagtgtcctcttcctccaaacaacccactagctccccagcaatggttcataatcagactgaaatggctgaaatgacagatatagaattcagaatctggatggcaatgaagatcattgaaattcaggagaaagttgaaacccaatcccaggaatctactgaaatgatttaaatgctgagagatgaaatagccattttaagaaagaaccaaactgatctaatagaggtgaaaaactcactacaagaaattcattctatattcgaagtattcacagcagagcagaggtaaggtgaggtaaaaatctcagagcttgaagattaattctgtgaatcaactcagtcagac

SEQ ID NO: 247558 - DNA, 354 bp, Homo sapiens
tgttactttatagaggtcctggagaagctgattgaggccacgtcaatgttgcaaggagacatgagactcacatcagagttctatggcttaacatgggggatggtgtgaaaagaaacagagatcgttggagaaatgtctgattataagatatttctaagcctggtgaagaaatatataagagaagcctggagaagaaccagtaataccagaaatcagggaggggccctgaagagaaaaggataacaaaaggatgaagacctgtccaagggacccagcagctaacttgaaagagctctcaatgggtaaagctggagcaatttcaacaacaaaataaataacatatcactggattat

SEQ ID NO: 247559 - DNA, 471 bp, Homo sapiens
tactgcctgtaccacacctgggcccactggagctgaacctggggtggtcaaagactgctgcaccagaatgctgggaacagagctttggggtggtactggccagcgagtatgtgggtcctgtgggcacctatggcccctttttgaaattattctgtcccccaggtcctggcactctgggcctgtaataagaggggtatccctggtaatctccaaaatgcctttgggatcattcttccatagttttgatgaatagaacttggctgattcatattaatcttatcaaatgttcacttggttacaccattagtattctctcccaaacatgctttctcatttgttacaatttggagaggctgagagtttttcagatctttaagttctgcttcatttttttatttaaaattccatctttaaattatttttctattttttacattagaagccaagttgcaccttcaacactttgcttaa

SEQ ID NO: 247560 - DNA, 388 bp, Homo sapiens
caggtgcccagcagccccacgtggccagtggccaccacactgaagcgcagctcggaggactctgactgccctgagctgagggaggtgacgggtctgaaacactcttttctgccagaagttaggggacacctcctccctcccaacagctctcttcaggcccaagagtgagagatggtgcctctagagggcaggggctacaagaacaaagtgtccacaggtttccctgctgcccacctgctgcccatcgtctttccagagatcagaaaatgaacaaaggatgatggggcccccaaaaggaggaaacccagtgtcttcagatctgtccacagccttgacctacgaagtttagatatggagggaatagattaaaggcacacttactttgcta

SEQ ID NO: 247561 - DNA, 456 bp, Homo sapiens
ttttttgggttaaatttttcttggttctgagtaccttctaactctgatgttctataacattatgctctgattgaggggcacaggcaggtaagaaagcacttacccacgaaagcttggattgaataacaggtatggagaaatcactcataaactgttcagtcagaatccacctgggggaaacctgctggacctgctcaaccttaaaaactcaagtgtatgctgtgaaggtgttaatggaaaacccaaactgtaaaatatcttaaggaggtttatgcggagccagtatgattgaccgtggcctggggaaaacacaaacccaggaagccttgataagtggtcctgaggcagttagggcacgactctgtcttatgcattttagggaagcagaagtcacaggcaaagtcatacattagtacactgcactccatcctgggcaacagagcgagactctgtctc

SEQ ID NO: 247562 - DNA, 236 bp, Homo sapiens
tcttatctataaactagtaatactggccctaattaccttaggagctagttttcaaaatccagcactgtaatatatgaaggtattgtgggctgggcatggtggttcacaccatgtaatcccagcactttgggaggcctagacaggaggattgtttgagcccaggagactgcaatgagctgtgattgagccactgcattccagcctgggtgacaatgagaccctgtctcaaaaaaaaa

SEQ ID NO: 247563 - DNA, 476 bp, Homo sapiens
tgtttttacaggattctgatacgtgtatgacagaggtggcattgtaagttggtaaagaaatgaggggctgtttattaattggagctgcaaaattggtcaccagtttgggggaaaaaatgaaatcaggccccttgcgccattcacaaaaatccttgtgagatgactcaagggcttaaatgtgaaatgaaaaacttcagttttttagaaggaaaaatatatgtgaatatctctctggtttggcatgaatagatttctggctttggataagtaaggattttttagataagatacagaaagctccaacaatgaaaaaaataataataaattttgtcatgttagagtaagaatttctgttcatcaaaagataccttaaaatggaaaagaggatgcagtgggcggaagatatgtgcaacagttagttgtccaactagaatgtgtccaacacaagaatttgcatccagaactcttaacaacga

SEQ ID NO: 247564 - DNA, 468 bp, Homo sapiens
tcaaaatgtgtctttgcctgatgccctgaaggacttttcccaggaggggaaaacgcctttgtaagacgcaagctgggtgatggcttttgtgtgaggacgtcttccaccatccacccttccccatcctccttctgtcctgggaggctggttgcatggaccacagcaatgggctcccttctctgctgcttccaagttatgttccctgccagtggttggaggtcagggcagggaagaataaagttgggctccatctgtgggatgacccagggtggctgcatctctctcaggaaggtcacagctccttcacattctacacagcctctcctgtctccagattctggaaacctctttcttctctaactctgcacagggccccactaaccctagagagctgcactatcctttgtggctttctttacttcacccacacctttataaacatttcctgtattaaactttcttcgaatt

SEQ ID NO: 247565 - DNA, 417 bp, Homo sapiens
aggcacctaccctcacccactctggcagaagaccttctggaaaacttattccctgtgggttctagatttaggaagactagttacagtgaagggtgggagtgagaagccataatggaaaaggaaaataagtgcaagtcctcattgagagtggggacattgagcccctttccccattcagctccaggcatcacatctctaccctttctacccctacaacacacagcctaggcgggagattgaagaattatttcctaagaaaattaaccagtacaaaagaaataactaaaaaaaccccaaccactggagaccccaaagagatagtttaatccctgcctggttgccccaaagtgaaacatctactcaacatgccctgcctatgcacatttaacagctttcatgcttcactcgttaacaaaa

SEQ ID NO: 247566 - DNA, 343 bp, Homo sapiens
aataccaaatggtctgtgatttcaaggtgcctacggcgttttcaaaataaaaataaatgaaaaagactaatagttacttaatatatgatccagaaactttatatgcattgacaaatagccttaggaaattagtagtagtatcaccatttgcacatgaaagtaagtacattttccaaaatcacggggttagtatagaaatgctttattccagatcctatgactgtggccgttctgttgctattgaagtgtcaactgaaagggtagcaaaaccaggagtggaaaaagtgataccaagtcactatgatattgtttgtgtccctggatccaaccatggctagacttt

SEQ ID NO: 247567 - DNA, 601 bp, Homo sapiens
acggagtctcgctctgtcgcccaggctgaagtgcagtagcaagatctcggctcactgcaagctccgcctcccgggctcacaccattctgctgcctcagcctcccgagtagctgggacgacaggtgtccgccatcacgcctggctaattttttgtatttttagtagagacggagtttcaccgtcttagccaggatggtcttgatctcctgaccttgtgatccgcctgcctcggcctcccaaagtgctgggattacaggcgtgagccaccgcgcctggcgaagatttttttttgttattgttgttatttgttttagaaaggtatgtttccactttccttgccaagaatatgctcccaaaccaattgctcatttgtttatgtgcaagtatgcactcagcctttcggtggaagtgcttgacaaataagcgatttttctaaattagaacaataaccacttttacttaaatgactaaaatcctaactctgaagaacagtcatccagatacacttaaaacacatgccttgaaaagaaccatcacatctataattgtgaccatgggctaacacggcagcaccataagtgcgggttcttcaaatgctaag

SEQ ID NO: 247568 - DNA, 349 bp, Homo sapiens
aaacagatatgaaatccagtgatttcttaggtcttcccttatcactactttactgtaagccattgtcttttctcaacaggattgctgcagtgctcttcaaatgaactctctatcccttcccttacttgttcatatactactctcaatgcagtcgcccaatttgtttttttaaaacataagtcaaattgccatttcagaaacttccattatctctccttttcacttagattgaagtaaagcacttagtgtgggccacaggatcctcccgaatctggaccaccactacttctccgatctcaaatcctaccctttggctaatttaatccacaataaccatctgcggtcctgg

SEQ ID NO: 247569 - DNA, 532 bp, Homo sapiens
cagagtcgtttacacacaagtgagtggcgctgtaatgagcaggaggaacagtcatgtcccatctgcgacctgtcgcatcaggagaatatctgtagtcacccattctgcccggggccccaaatgcgccaccagcagtgtcgccccgttttttcattgtctcaggtgtccagaggatgatgaccaggtctttgaagttgttagtgggattaatgggtacagcaaactgggctagacatctggtttgaattaggaaaaagcattgattaatctttgagaggtgtccccaaagcagaacctttcccctcctcttccagtccccttgcttaagcctcactatcttctttttttttaagtcacactgcagaatagtggcttcgcaataacatccgtgtgaaagatcgaattgttttctattgctcagaggtggggtggagtgggggttgatcaggaattctgagatttgtaagcgctgctttctttaacggaaattgagctctattttgagggaaattagttttgcagacttcgttta

SEQ ID NO: 247570 - DNA, 411 bp, Homo sapiens
tacttattattttactatttgctttttatataaggactttactttaaaatagtgttaatacttctgtgttcttcatggtctcttcttctgtctcttaaggaatggtatttaaatctattagcaggctgggcgcagtcgtcacgcctgtaatcccagcactttgggaggctgaggcgggcagatcactaggtcaggagtttgagaccagcctggccaccaaggtgaaatcctgtctctactaaaaatacaaaaattagccaggcgtggtgcacccgcctgtaagcccaactactcaggaggccgaggcaggagaatcacttgagcccaggaggcggaggttgcagtgagccgagatcatgcccactgcactccagcctgggcgacagagcaagactccgtctcaaaaaaaaa

SEQ ID NO: 247571 - DNA, 485 bp, Homo sapiens
agatgttgcagtgagccaagatcatgccactgcactccagcctgggcaacagagcaagactctgtctcaaaagaaaaaaagaaagaaagaaaaagcacttggatttttttttccccttgctatgagataagtaatattcaccctggggtcttcttgtccatgcatccttggatacacatggaggagagcttcagaatagcaaaattaagggcggagcactggctcttgcctataattcaagcactttgggaggccaaggtaggagcatcacttgaggccaggagttcaagattagcctgagcaacagagcaaaacctcgtcccttcaaaataaaataattagccaggcatggtggcacgtgcctgtacgtgggaggctgaggtggaaggatcacttgaggccaggagctcaaggctgaagtgagccatgattataccactgcactccaggctggacagcagagcaagaccctgtctcaaaaaaaa

SEQ ID NO: 247572 - DNA, 318 bp, Homo sapiens
ctaggtgtgagatgatactaaactaagcagagaccaggaaaccaagctgtgcgtgtttttctcagtgatgaggcagccccactcataatgtgcttgtggcgtaacccctgcgtccttccgcctcctccacaacagtcactctgagtcgtcactgtcatacctctttactccaggagccttgtatgttcatgcataggggccagctctcacgagggtcagcttcccggcctcatgccctggaaatctaggttgcatttgtacaacgggacagtcaagatgctctgaggcatcatgattataaacacaatttttatgaaa

SEQ ID NO: 247573 - DNA, 787 bp, Homo sapiens
tccatgcttattgttacaagtgaaaagatacacagacttagaaacagtccctccaccctgctgcctcctcacagcccatccgcacccctctggaagcggggctggttcagagttgcttcccacgtgctggcggggctgcacccaccgggagagagctcgctgctccggagccattctcaggcttacactgccccctgctttcagaagttgcaaaggagtgtttaaaaaattggagacagaaaatgttgactgctagatttatacattggaaaagtactagtttaaaatatcagtaaacatttgcattctgattattcatgtagaatggaaatgttaggaatcgagtacaggccactgagttgtctgagctaccttttggcgtctggctgttcatttgcttagcaaagcagcccctcctttctgacagtttgacactgatgacccatcctccattgctcgaatctgctctgaaaactcccctctgtgggaggcttcttgttgacactcacttttggggagtaaagaaaggtgggtttgggtgattgcagggagctggggaccctcccctatgggaggctgcggctgtggagccctgaccgccctgtagccagcctctgcacctgggaggatggagctttcaggagccgttcttctgtttgttgttttgatttctgagagatggggatctgggttgcctgttaggattatttactctggtctctatgtgactttttccatggacttctgaggactggggtctctgcagtgcctggctttgtgaacgtcc

SEQ ID NO: 247574 - DNA, 301 bp, Homo sapiens
tccagccatacctgaagccaccactccactgttcaattatatgagcaatggattccctttttttcttaagctactttgtagatgctgtcagaagggcctctgtgtcgtaagggactaggggctatttatgcgggtaaggatggggtggaggctatgatcctatatgccattttattaggaaaacatttggtgtttagctctctgggtagggaagagatgcatctttctgccccctgagaaaagagaagtaggaaggtcatggagggccatggtgacccacatggcaggacgtcttcagagc

SEQ ID NO: 247575 - DNA, 425 bp, Homo sapiens
ttaattcattagaggttgtaaagaagtgatatactccaggttgagcatccctaatccaaaaaaccacaaatctgaaatgccttaaaacccaaaatgtttgagtgctgacgtgacaccacaaatggaaaatttcacacctgacctcatgtaatgggttgctgttaaaatgtactgtgagtcaggaatggtggtgatgctgaacagccacagatagtccacatgggtggccaaggtagtgatacctttgctttatgatggttcaatatatataagctttgtttcatgcagattatttaaaatattatatgaaattactgtcaggctatgagtataagatatatatgaaacataaatttatttcatgtataaacaggttccatccccaagatatgtcattatgtatatgcaaatattccaaaaatctg

SEQ ID NO: 247576 - DNA, 378 bp, Homo sapiens
agtttgtcaataccctaaatgttctgtggttttaagctacagagtttgtaattcatttatttattcaataaatactcagtggcaggcactgttttagaaaccttggttataactttgaatgaaattaaaaaaaatccttgccttgtggaggatgcttatgtgtggggagttgggtggtggggtcaaacaacaattacattaaaatagaaaatagtgacataaataaacctataaatattgcaacccagagttatattataaatgtaagtagtgactaggactctcatgcagatatacctctgtgctgggacaaatgaaagtttaagtgtaatttcccatatgcaagtcaaaataaaaagtgacactagaaaacacaaa

SEQ ID NO: 247577 - DNA, 495 bp, Homo sapiens
tagctgtgttaggttttgaaagcaatggaatataatctccaacatggctcttttttgaggatcttttgcaaaggtaactttggctctgtaaggttttatcttttgcactgactttagaatctaatccttggctctgatgagattctattgcgatcctttaaaaggggtaagaattaggatcatcaggactaatatgacctaagtttgtattgagttagtattgagagcattggctgaagtttagggtttgtgttgccatggggccttttcttatcccattcgtttattgcaaattcccttaaaaaagatagacatgtcttccaacttagggacaaaatgcagtaaaaatccagcctgaggaactaaatattccaggtggactgtctgccgttttttggtcaccaaaaatgtcatgcaatttcaaagtcagtttggcaaatttattccaaaacagggatgaattcgaatactgggaatctgagggagaagttaaaa

SEQ ID NO: 247578 - DNA, 373 bp, Homo sapiens
tttaaaacactttttaaggctaaaaagtattttgagttgtgtatgctctggttaaagtttcagttgttccttttctggatttattgctattgttagcaacagttgcagctatttacagcttataccagggagtgtatatttctgtagctgctctctcattttgagttaaaagataagctacacagcaccaggtctgttcctgagaaggtaagatcatcttagcttacttaactgcccagtaatgtaaatatcatgtttttgttttattgttttgttttttgagacagagtttcgctcttgttgcccaggctggagtgcaatgccacgatctcggcccactgcaacttccaccccccatgttcaaacaattctc

SEQ ID NO: 247579 - DNA, 4603 bp, Homo sapiens
  misc_feature (3)..(3): n is a, c, g, or t
  misc_feature (5)..(5): n is a, c, g, or t
  misc_feature (7)..(7): n is a, c, g, or t
  misc_feature (11)..(11): n is a, c, g, or t
  misc_feature (4175)..(4175): n is a, c, g, or t
  misc_feature (4208)..(4208): n is a, c, g, or t
  misc_feature (4220)..(4220): n is a, c, g, or t
  misc_feature (4226)..(4226): n is a, c, g, or t
  misc_feature (4252)..(4252): n is a, c, g, or t
  misc_feature (4258)..(4258): n is a, c, g, or t
  misc_feature (4290)..(4290): n is a, c, g, or t
  misc_feature (4374)..(4374): n is a, c, g, or t
  misc_feature (4377)..(4377): n is a, c, g, or t
  misc_feature (4495)..(4495): n is a, c, g, or t
  misc_feature (4523)..(4523): n is a, c, g, or t
ttngngnaacnggggggacccagcgaaatggaagaagttaggtgtccagagcacgggactttctgctttcttaagaccggcgtccgcgatggcccgaataaaggaaagagcttctacgtgtgccgggcagacacgtgcagcttcgtgcgggccaccgacattcctgtttcccattgcttattgcatgaggactttgtggtagagcttcagggtttgcttctgccacaggacaagaaagaatacagattgttcttccgatgcattagaagtaaggcagaggggaaacgctggtgtggaagtattccatggcaggatcctgattccaaagaacattctgtatccaataagtctcagcatgcatctgagacatttcatcattcttccaactggctgagaaatccattcaaggtacttgacaagaatcaagaaccagctctctggaaacagctcatcaaaggtgaaggtgaggaaaagaaggctgataagaagcaaagagaaaagggagatcagcttttcgatcaaaagaaagaacagaagcctgaaatgatggagaaagacctctcatctggcctggtaccaaagaaaaaacaatctgtagttcaagagaagaagcaagaagagggagcagagattcagtgtgaggcagagactggaggcacacacaaaagagacttttctgaaattaaatctcaacagtgccaaggtaatgagcttacaagaccatctgcatcttctcaggagaaatcaagtggtaagagtcaagatgtccaaagagaatcagaacctctgagagaaaaggttacccagcttttgcctcaaaatgttcacagtcacaactcaataagcaagccccagaaagggggacccctcaacaaggagtacacgaactgggaggctaaagaaacaaaggcaaaggatggccctagcatacaggccacccagaaaagcctgcctcaggggcatttccaagagcggccggagacccacagtgtgcctgctcctggaggaccagcggctcaggctgcaccagcagcaccagggctttccctgggtgagggccgtgaagctgccacaagcagtgacgacgaggaggaagatgatgttgtttttgtttcctctaagcctgggagccccctactctttgactcgactctggacttagagacgaaggaaaacctccaattccctgatcgaagtgtgcaaagaaaggtgtctcctgcctcaggtgtttccaagaaggtagaaccctcagacccagtagcccggcgtgtctaccttacaacacaactgaaacaaaagaagagcacactggcatcagtgaacatccaggctcttccagacaagggtcagaagttgatcaaacaaatccaggagctggaggaagtactcagtggtcttaccctttccccagagcaaggaactaatgagaagagtaacagtcaagtaccacagcagagtcacttcaccaaaactaccactggccctccccacctggtgcctccccaaccccttcctcgtcgtggtacccaacctgtgggttctctagaactaaagtctgcctgccaggtgactgctggaggatccagtcagtgctatcgaggccatacaaaccaagatcacgttcatgcagtgtggaaaatcacaagtgaagccatcggtcaactgcatcgctcacttgagtcatgtcctggtgagacggttgtggcagaagatcccgccgggctgaaggtccctttgctactacaccagaagcaggcattggcttggttactatggcgagaaagtcagaagccacaaggaggaattctggcagatgatatgggcttaggaaaaaccctgacaatgattgcgctcatcctgacccagaagaatcaagagaaaaaggaagaaaaggagaaaagcacagctttgacgtggctctccaaagatgactcttgtgactttacttcccatggaacactaatcatctgtcctgcctccctgatccatcattggaaaaatgaggtggagaaacgggtgaacagcaacaaactaagagtctatctctaccatgggccaaaccgggattcacgtgccagagtcctctctacatatgacatcgtgatcactacctatagcctcgtggccaaggagattcccacaaacaagcaagaggcagagatcccaggtgcaaacctcaatgtggagggcacctcaacacctttgcttcgaatagcctgggctcgaatcatattggatgaagctcacaatgttaagaatccccgagtgcagacttccatagctgtgtgtaagctacaagcctgtgcccgttgggctgtcactggaacccccattcaaaacaacttattggatatgtattcgctgctgaagtttctccgttgctctccatttgatgagttcaatctgtggaggagtcaggttgacaatggctcaaagaaaggaggagaacggttaagtattttaaccaagagccttttgctgaggagaacaaaagaccagctggactctactggcagacctttggtgatactgccccagcgtaaatttcagttgcaccatttaaagctttctgaagatgaagagactgtttacaatgtgttttttgcaagatcaaggtcagctctgcaatcctatctaaaaagacatgaaagtagaggcaaccaatctggaagaagccctaataatccattcagtagagtggcactggagtttgggtctgaggagcctagacactcggaggcagcagactcaccgagatccagcaccgtccacatactgtcccagttgctgagactccgccagtgttgctgtcatctttctttactgaagtcggccctggatccaatggaactgaagggtgaaggtcttgtcctttccctagaagaacagctcagtgctttgaccttgtcagaactccgtgactcagagccatcttccactgtttcccttaacggcaccttcttcaagatggagctttttgaaggcatgcgagagagcaccaagatttcatctctgttggcagaattggaggcaattcaaagaaattcagcatcccaaaagagtgtcattgtctctcagtggaccaacatgctgaaagttgtagcattgcacctgaagaagcatggactgacttatgccaccatcgatggctctgtcaatcccaagcagagaatggacttggtagaggcatttaaccactccagaggccctcaggtaatgctaatctctctcttggccggaggtgttggtctaaacctgactggaggaaatcacctctttcttttggacatgcactggaatccatcacttgaagatcaagcttgtgaccgaatttaccgagtagggcagcagaaagatgttgtcatacacagatttgtttgtgagggaacagtagaagaaaagatcttacagctccaagaaaaaaagaaagatttggccaaacaagttctatcagggtctggagaatctgtcaccaagctcaccttggctgacctcagagtcctttttggcatctaacctcctgtggataagggctcagaatagcaccattgctggtttgtattaggatctgggaataacaacctaaccatgagccttgaactctgttctttgcatttcaatttcaccgtcaagcctttcaccttcctcaaaatgaggcataatcttatccccagaattgaggaggggttgtgttaaccaattagttaaccaattatgttaataatttatttaatgagtggtatggaaaccaattgatttttttagataaaagaatatgttttagagttggatgattttggaaaacaactctggcagaattgtatataagcttcagtaaagttcaaaaagcgggccaggtgtggtggctcatgcctgtaatcccgacactttgggaggccaaggcaggaggatggcttgaagccagtagttcaagaccagcctgggcaacatagtaagaccccatctctatgaagaataaaaaaatgagctaggcgtggtagtgcacacctgtagtcctagctacttgggaggctgaggcaggaggatcccttgagtccaggaggttgaggctgcagtgagctgtgattgtgccactgttttccagcctgggcaatacagtgagaccctgtctcaaaaaaaggaaaaaaaagctcaaaaattctgtgttgcctttntttttttagctgatgatgggagaaccagttaanaccttttttaanacaggntccatcctattttttcattttttctngccagngatgttgcacctgtaaccatttttttatgggnggagcagagagtcaatccctgcagccaccctgcagccagccatttttgcagttttttcagtgcaggcagtttttcctttcaggntgnagatcaaggagatgctttgtagatgaacagatgcagagtatctgttatcattgtattgtttagtgtcagtgtatcatttagtatttgtatcactgtaccatttagtgttgtatatcantcagtcatttaatattggttatcaccanacagtttaatatttgtatcatttggttcattgtatcgtttagtatttgtattataagatttctatttgtagtatttgtat

SEQ ID NO: 247580 - DNA, 1512 bp, Homo sapiens
  misc_feature (3)..(3): n is a, c, g, or t
  misc_feature (5)..(5): n is a, c, g, or t
  misc_feature (7)..(7): n is a, c, g, or t
  misc_feature (11)..(11): n is a, c, g, or t
ttngngnaacnggggggacccagcgaaatggaagaagttaggtgtccagagcacgggactttctgctttcttaagaccggcgtccgcgatggcccgaataaaggaaagagcttctacgtgtgccgggcagacacgtgcagcttcgtgcgggccaccgacattcctgtttcccattgcttattgcatgaggactttgtggtagagcttcagggtttgcttctgccacaggacaagaaagaatacagattgttcttccgatgcattagaagtaaggcagaggggaaacgctggtgtggaagtattccatggcaggatcctgattccaaagaacattctgtatccaataagtctcagcatgcatctgagacatttcatcattcttccaactggctgagaaatccattcaaggtacttgacaagaatcaagaaccagctctctggaaacagctcatcaaaggtgaaggtgaggaaaagaaggctgataagaagcaaagagaaaagggagatcagcttttcgatcaaaagaaagaacagaagcctgaaatgatggagaaagacctctcatctggcctggtaccaaagaaaaaacaatctgtagttcaagagaagaagcaagaagagggagcagagattcagtgtgaggcagagactggaggcacacacaaaagagacttttctgaaattaaatctcaacagtgccaaggtaatgagcttacaagaccatctgcatcttctcaggagaaatcaagtggtaagagtcaagatgtccaaagagaatcagaacctctgagagaaaaggttacccagcttttgcctcaaaatgttcacagtcacaactcaataagcaagccccagaaagggggacccctcaacaaggagtacacgaactgggaggctaaagaaacaaaggcaaaggatggccctagcatacaggccacccagaaaagcctgcctcaggggcatttccaagagcggccggagacccacagtgtgcctgctcctggaggaccagcggctcaggctgcaccagcagcaccagggctttccctgggtgagggccgtgaagctgccacaagcagtgacgacgaggaggaagatgatgttgtttttgtttcctctaagcctgggagccccctactctttgactcgactctggacttagagacgaaggaaaacctccaattccctgatcgaagtgtgcaaagaaaggtgtctcctgcctcaggtgtttccaagaaggtagaaccctcagacccagtagcccggcgtgtctaccttacaacacaactgaaacaaaagaagagcacactggcatcagtgaacatccaggctcttccagacaagggtcagaagttgatcaaacaaatccaggagctggaggaagtactcagtggtcttaccctttccccagagcaaggtaaagtggcttatgcctcagaactccgggtttgcatcgactttacaagagacattcgggaagcccttttaataaagaatgtgttgattcaaaaa

SEQ ID NO: 247581 - DNA, 4449 bp, Homo sapiens
  misc_feature (3)..(3): n is a, c, g, or t
  misc_feature (5)..(5): n is a, c, g, or t
  misc_feature (7)..(7): n is a, c, g, or t
  misc_feature (11)..(11): n is a, c, g, or t
  misc_feature (4021)..(4021): n is a, c, g, or t
  misc_feature (4054)..(4054): n is a, c, g, or t
  misc_feature (4066)..(4066): n is a, c, g, or t
  misc_feature (4072)..(4072): n is a, c, g, or t
  misc_feature (4098)..(4098): n is a, c, g, or t
  misc_feature (4104)..(4104): n is a, c, g, or t
  misc_feature (4136)..(4136): n is a, c, g, or t
  misc_feature (4220)..(4220): n is a, c, g, or t
  misc_feature (4223)..(4223): n is a, c, g, or t
  misc_feature (4341)..(4341): n is a, c, g, or t
  misc_feature (4369)..(4369): n is a, c, g, or t
ttngngnaacnggggggacccagcgaaatggaagaagttaggtgtccagagcacgggactttctgctttcttaagaccggcgtccgcgatggcccgaataaaggaaagagcttctacgtgtgccgggcagacacgtgcagcttcgtgcgggccaccgagatcctgattccaaagaacattctgtatccaataagtctcagcatgcatctgagacatttcatcattcttccaactggctgagaaatccattcaaggtacttgacaagaatcaagaaccagctctctggaaacagctcatcaaaggtgaaggtgaggaaaagaaggctgataagaagcaaagagaaaagggagatcagcttttcgatcaaaagaaagaacagaagcctgaaatgatggagaaagacctctcatctggcctggtaccaaagaaaaaacaatctgtagttcaagagaagaagcaagaagagggagcagagattcagtgtgaggcagagactggaggcacacacaaaagagacttttctgaaattaaatctcaacagtgccaaggtaatgagcttacaagaccatctgcatcttctcaggagaaatcaagtggtaagagtcaagatgtccaaagagaatcagaacctctgagagaaaaggttacccagcttttgcctcaaaatgttcacagtcacaactcaataagcaagccccagaaagggggacccctcaacaaggagtacacgaactgggaggctaaagaaacaaaggcaaaggatggccctagcatacaggccacccagaaaagcctgcctcaggggcatttccaagagcggccggagacccacagtgtgcctgctcctggaggaccagcggctcaggctgcaccagcagcaccagggctttccctgggtgagggccgtgaagctgccacaagcagtgacgacgaggaggaagatgatgttgtttttgtttcctctaagcctgggagccccctactctttgactcgactctggacttagagacgaaggaaaacctccaattccctgatcgaagtgtgcaaagaaaggtgtctcctgcctcaggtgtttccaagaaggtagaaccctcagacccagtagcccggcgtgtctaccttacaacacaactgaaacaaaagaagagcacactggcatcagtgaacatccaggctcttccagacaagggtcagaagttgatcaaacaaatccaggagctggaggaagtactcagtggtcttaccctttccccagagcaaggaactaatgagaagagtaacagtcaagtaccacagcagagtcacttcaccaaaactaccactggccctccccacctggtgcctccccaaccccttcctcgtcgtggtacccaacctgtgggttctctagaactaaagtctgcctgccaggtgactgctggaggatccagtcagtgctatcgaggccatacaaaccaagatcacgttcatgcagtgtggaaaatcacaagtgaagccatcggtcaactgcatcgctcacttgagtcatgtcctggtgagacggttgtggcagaagatcccgccgggctgaaggtccctttgctactacaccagaagcaggcattggcttggttactatggcgagaaagtcagaagccacaaggaggaattctggcagatgatatgggcttaggaaaaaccctgacaatgattgcgctcatcctgacccagaagaatcaagagaaaaaggaagaaaaggagaaaagcacagctttgacgtggctctccaaagatgactcttgtgactttacttcccatggaacactaatcatctgtcctgcctccctgatccatcattggaaaaatgaggtggagaaacgggtgaacagcaacaaactaagagtctatctctaccatgggccaaaccgggattcacgtgccagagtcctctctacatatgacatcgtgatcactacctatagcctcgtggccaaggagattcccacaaacaagcaagaggcagagatcccaggtgcaaacctcaatgtggagggcacctcaacacctttgcttcgaatagcctgggctcgaatcatattggatgaagctcacaatgttaagaatccccgagtgcagacttccatagctgtgtgtaagctacaagcctgtgcccgttgggctgtcactggaacccccattcaaaacaacttattggatatgtattcgctgctgaagtttctccgttgctctccatttgatgagttcaatctgtggaggagtcaggttgacaatggctcaaagaaaggaggagaacggttaagtattttaaccaagagccttttgctgaggagaacaaaagaccagctggactctactggcagacctttggtgatactgccccagcgtaaatttcagttgcaccatttaaagctttctgaagatgaagagactgtttacaatgtgttttttgcaagatcaaggtcagctctgcaatcctatctaaaaagacatgaaagtagaggcaaccaatctggaagaagccctaataatccattcagtagagtggcactggagtttgggtctgaggagcctagacactcggaggcagcagactcaccgagatccagcaccgtccacatactgtcccagttgctgagactccgccagtgttgctgtcatctttctttactgaagtcggccctggatccaatggaactgaagggtgaaggtcttgtcctttccctagaagaacagctcagtgctttgaccttgtcagaactccgtgactcagagccatcttccactgtttcccttaacggcaccttcttcaagatggagctttttgaaggcatgcgagagagcaccaagatttcatctctgttggcagaattggaggcaattcaaagaaattcagcatcccaaaagagtgtcattgtctctcagtggaccaacatgctgaaagttgtagcattgcacctgaagaagcatggactgacttatgccaccatcgatggctctgtcaatcccaagcagagaatggacttggtagaggcatttaaccactccagaggccctcaggtaatgctaatctctctcttggccggaggtgttggtctaaacctgactggaggaaatcacctctttcttttggacatgcactggaatccatcacttgaagatcaagcttgtgaccgaatttaccgagtagggcagcagaaagatgttgtcatacacagatttgtttgtgagggaacagtagaagaaaagatcttacagctccaagaaaaaaagaaagatttggccaaacaagttctatcagggtctggagaatctgtcaccaagctcaccttggctgacctcagagtcctttttggcatctaacctcctgtggataagggctcagaatagcaccattgctggtttgtattaggatctgggaataacaacctaaccatgagccttgaactctgttctttgcatttcaatttcaccgtcaagcctttcaccttcctcaaaatgaggcataatcttatccccagaattgaggaggggttgtgttaaccaattagttaaccaattatgttaataatttatttaatgagtggtatggaaaccaattgatttttttagataaaagaatatgttttagagttggatgattttggaaaacaactctggcagaattgtatataagcttcagtaaagttcaaaaagcgggccaggtgtggtggctcatgcctgtaatcccgacactttgggaggccaaggcaggaggatggcttgaagccagtagttcaagaccagcctgggcaacatagtaagaccccatctctatgaagaataaaaaaatgagctaggcgtggtagtgcacacctgtagtcctagctacttgggaggctgaggcaggaggatcccttgagtccaggaggttgaggctgcagtgagctgtgattgtgccactgttttccagcctgggcaatacagtgagaccctgtctcaaaaaaaggaaaaaaaagctcaaaaattctgtgttgcctttntttttttagctgatgatgggagaaccagttaanaccttttttaanacaggntccatcctattttttcattttttctngccagngatgttgcacctgtaaccatttttttatgggnggagcagagagtcaatccctgcagccaccctgcagccagccatttttgcagttttttcagtgcaggcagtttttcctttcaggntgnagatcaaggagatgctttgtagatgaacagatgcagagtatctgttatcattgtattgtttagtgtcagtgtatcatttagtatttgtatcactgtaccatttagtgttgtatatcantcagtcatttaatattggttatcaccanacagtttaatatttgtatcatttggttcattgtatcgtttagtatttgtattataagatttctatttgtagtatttgtat

SEQ ID NO: 247582 - DNA, 3416 bp, Homo sapiens
  misc_feature (2988)..(2988): n is a, c, g, or t
  misc_feature (3021)..(3021): n is a, c, g, or t
  misc_feature (3033)..(3033): n is a, c, g, or t
  misc_feature (3039)..(3039): n is a, c, g, or t
  misc_feature (3065)..(3065): n is a, c, g, or t
  misc_feature (3071)..(3071): n is a, c, g, or t
  misc_feature (3103)..(3103): n is a, c, g, or t
  misc_feature (3187)..(3187): n is a, c, g, or t
  misc_feature (3190)..(3190): n is a, c, g, or t
  misc_feature (3308)..(3308): n is a, c, g, or t
  misc_feature (3336)..(3336): n is a, c, g, or t
tgctctcagggcctctaatgagcactgttgcagctgggtcctatatccctttgtgtgtactagcagtatgtgtaagtagcacaggcacacacacgcagagatgaggggccatggtataaacaaaccatcactaattggttccaaaccaatgtttgcttattttttaaaaaaggtttctgtacttaattttaaggtagaagtacattaagttatgcttttcagaaagtataacaatactccatacgcctctataatgaatcaactcaagaggagttaggaaatgatccagctttcacttccagccactctgtgaaagcacattgctttttcacactgaggtcatgtgccacccactttcctccccctgtttagcctctctttctgcctgtacttttagtggagaaaataagtaatcaagtgtttcagtttaaaagaccatttcttccatttcctacttcactataggctctgtatagaaataagagcaatggttaaacatattaattgaaggagtaaagtcagtcaagaggaagaggtaatgcctttaagttaaaggccggtcaaacacgatgactcacacctgtaattccactgtgggaggctaaggcgggaggatcacttgagcctaggagtttgagacagcctgggtaacacagcaagaccgtgtctccatatattaaaaaagaaaagttaaaagccatttggtgaatgtaactaggcactgatttttttcccttctcaagactcttgtgactttacttcccatggaacactaatcatctgtcctgcctccctgatccatcattggaaaaatgaggtggagaaacgggtgaacagcaacaaactaagagtctatctctaccatgggccaaaccgggattcacgtgccagagtcctctctacatatgacatcgtgatcactacctatagcctcgtggccaaggagattcccacaaacaagcaagaggcagagatcccaggtgcaaacctcaatgtggagggcacctcaacacctttgcttcgaatagcctgggctcgaatcatattggatgaagctcacaatgttaagaatccccgagtgcagacttccatagctgtgtgtaagctacaagcctgtgcccgttgggctgtcactggaacccccattcaaaacaacttattggatatgtattcgctgctgaagtttctccgttgctctccatttgatgagttcaatctgtggaggagtcaggttgacaatggctcaaagaaaggaggagaacggttaagtattttaaccaagagccttttgctgaggagaacaaaagaccagctggactctactggcagacctttggtgatactgccccagcgtaaatttcagttgcaccatttaaagctttctgaagatgaagagactgtttacaatgtgttttttgcaagatcaaggtcagctctgcaatcctatctaaaaagacatgaaagtagaggcaaccaatctggaagaagccctaataatccattcagtagagtggcactggagtttgggtctgaggagcctagacactcggaggcagcagactcaccgagatccagcaccgtccacatactgtcccagttgctgagactccgccagtgttgctgtcatctttctttactgaagtcggccctggatccaatggaactgaagggtgaaggtcttgtcctttccctagaagaacagctcagtgctttgaccttgtcagaactccgtgactcagagccatcttccactgtttcccttaacggcaccttcttcaagatggagctttttgaaggcatgcgagagagcaccaagatttcatctctgttggcagaattggaggcaattcaaagaaattcagcatcccaaaagagtgtcattgtctctcagtggaccaacatgctgaaagttgtagcattgcacctgaagaagcatggactgacttatgccaccatcgatggctctgtcaatcccaagcagagaatggacttggtagaggcatttaaccactccagaggccctcaggtaatgctaatctctctcttggccggaggtgttggtctaaacctgactggaggaaatcacctctttcttttggacatgcactggaatccatcacttgaagatcaagcttgtgaccgaatttaccgagtagggcagcagaaagatgttgtcatacacagatttgtttgtgagggaacagtagaagaaaagatcttacagctccaagaaaaaaagaaagatttggccaaacaagttctatcagggtctggagaatctgtcaccaagctcaccttggctgacctcagagtcctttttggcatctaacctcctgtggataagggctcagaatagcaccattgctggtttgtattaggatctgggaataacaacctaaccatgagccttgaactctgttctttgcatttcaatttcaccgtcaagcctttcaccttcctcaaaatgaggcataatcttatccccagaattgaggaggggttgtgttaaccaattagttaaccaattatgttaataatttatttaatgagtggtatggaaaccaattgatttttttagataaaagaatatgttttagagttggatgattttggaaaacaactctggcagaattgtatataagcttcagtaaagttcaaaaagcgggccaggtgtggtggctcatgcctgtaatcccgacactttgggaggccaaggcaggaggatggcttgaagccagtagttcaagaccagcctgggcaacatagtaagaccccatctctatgaagaataaaaaaatgagctaggcgtggtagtgcacacctgtagtcctagctacttgggaggctgaggcaggaggatcccttgagtccaggaggttgaggctgcagtgagctgtgattgtgccactgttttccagcctgggcaatacagtgagaccctgtctcaaaaaaaggaaaaaaaagctcaaaaattctgtgttgcctttntttttttagctgatgatgggagaaccagttaanaccttttttaanacaggntccatcctattttttcattttttctngccagngatgttgcacctgtaaccatttttttatgggnggagcagagagtcaatccctgcagccaccctgcagccagccatttttgcagttttttcagtgcaggcagtttttcctttcaggntgnagatcaaggagatgctttgtagatgaacagatgcagagtatctgttatcattgtattgtttagtgtcagtgtatcatttagtatttgtatcactgtaccatttagtgttgtatatcantcagtcatttaatattggttatcaccanacagtttaatatttgtatcatttggttcattgtatcgtttagtatttgtattataagatttctatttgtagtatttgtat

SEQ ID NO: 247583 - DNA, 409 bp, Homo sapiens
ttttacaagagtcatagtaaatgtcttggacctagatctcaaagtaaagagcaagtgctagggttctgctgaataaggaagataaaggagccattaaggtaggcacagagtagtgacggagtggcactgacagagaacaatggggaaatgtctgccagtggtttctcctcttgaactagggttgattatttgccctaagcaattaactctcttaattttgcttttattttctagcagatgatatgggcttaggaaaaaccctgacaatgattgcgctcatcctgacccagaagaatcaagagaaaaaggaagaaaaggagaaaagcacagctttgacgtggctctccaaagatggtagacagaagtgccttaatagcctgccattccctacgtcatttgagccacccaa

SEQ ID NO: 247584 - DNA, 420 bp, Homo sapiens
taggacttcatgacagggtccagacatgaatgcagctgctcccaaagtaagcaaaatgctgatgtgagccctgaaaatcaagggcattgctctgagtgagctgtgttccccataaaaatcatatgttgatgccctaacacccaacgtgactgtatatggagacaggatctttagaaggtaattaaaattaaatgaggccacaagggtggagccttaatctgataaaattatggcctcataaaaacagagagagatctctcctctgtccctccaccttgtaagaacacagcaagtcagccatctgcaagccaggaagagaggtctcaataggaatcaaatttgccgacaccttgatcttggacttctcagcctccagaagcataagaaaataaactctcgttgtttaaaccacccaatcca

SEQ ID NO: 247585 - DNA, 554 bp, Homo sapiens
caatgtctcaatatacctcctacactaagtataatagtaaatatctgtatttggtggcataatatgttcttagtataaaccaaaaacacatgctgagcattggacattgtccaatgtttaattcatatgattcattctgagtttctgactgagatcattctttcagactatgtctatttgtcctgggacccataaaatatgcagccctaacatgatttcatttttgtttcctttcctggaaaaggagaaatcattcagatcagctttcatattgccttatagacgatgacttcaaaatagtttgaaagggactcctttgttctagaactgctctaacacagtagccactagccacatgtggctattgaaagattgaaatgtggttattccaaatcaggatgtacagtaaatataaaatacacaccagatttcaaaggcttacatgaaaaaagtaatgtgaaatatctcactagtagtttttatagtgattacatgttgaaattttaacattgtgaacatattagtttaaataaaatgtattgtgaaaattaaaa

SEQ ID NO: 247586 - DNA, 347 bp, Homo sapiens
tattttttagtagagacggggtttcaccgtgttacccacgatggtctcgatcacctgacctcgtgatctgcccaccttggcctcccaaagtgctgggattacaggcgtgacgacctcgcccggccttgagaaagtgcatttaagctccttcctaaatgaatgattatttagtcttgcagtgtccataatttctttaggtcacttacggaagtctcaaacttgtctgtaacacctgataataacttccagtactattctaaaatgtagatttactttatcacattttcttctaacttctacttgcccctgttgtaacaatcttcattcttcttttgtacttatatttt

SEQ ID NO: 247587 - DNA, 138 bp, Homo sapiens
agacagatggcaaattatgtctatattatatataaatcatcatttcccattacattcagattatatatttgtcatttactataatatatataaattgatgtttctacactatcctatatataaatactgatacaatga

SEQ ID NO: 247588 - DNA, 6513 bp, Homo sapiens
atgtaggagacagatttcaatgtctgttgaaggcccccccacaccctccttcagtgccgggggcatggagggatatcttgggctcctgctgttttttaaaatgatgcgagctcatctcctgtcctgggtgtgaacgagtatatcttaccagggatgtaactgaacatttttttctgcattgtgttcctactgagcaacccaagatggccaggaactgctctgagtgcaaggagaagagggcagcacatatcctctgcacctactgcaatcgctggctgtgcagctcttgcacagaggaacaccgacacagccctgtccccgggggcccattctttcctcgggcccagaagggatctccaggagtgaatggtggtcccggagacttcaccttgtattgtcctctacacacacaggaagtactcaagctattctgtgagacatgtgatatgctcacttgccatagctgcctagtggtggaacacaaagaacacaggtgcagacatgttgaagaagttttgcaaaaccagaggatgcttctggaaggtgtgactacacaggtggcacataagaaatccagtctacagacatctgcaaagcaaattgaggacaggatttttgaagtgaagcatcagcataggaaggtggaaaaccagatcaaaatggccaagatggttctgatgaatgagctgaacaaacaggccaatgggctaatagaggaattagaggggattactaatgagagaaagcggaagctggaacagcagttacagagcatcatggttctcaaccgtcagtttgagcatgtgcagaatttcatcaactgggctgtctgcagcaaaaccagtgtcccttttcttttcagcaaagagctgattgtgtttcagatgcagcgattgctggagacaagttgtaacacagatcctggctccccttggagtatcagattcacctgggagcctaacttctggaccaagcagctagcttctcttggctgcataactactgaaggtggacaaatgtccagggcagatgctcctgcttatggaggcttacaggggtcatcacccttttatcaaagccaccagtctccagtggctcagcaagaggctcttagccacccctcacacaagttccagtctccagcagtgtgctcctcatctgtgtgctgctcccactgctccccagtctcgccttccctcaaaggccaggtccccccacccagcatacacccagcccacagcttcaggcagccccctgagatggtgccccagcagctggggtctctgcagtgctctgccctgctgcccagggagaaagagctggcctgcagccctcatccaccaaagctgctgcagccctggctggaaacccagccccccgtggagcaggagagcacatcccagcggctggggcagcagctgacttcccagcccgtgtgcattgtccccccacaggatgttcagcaaggagcccatgcccagcccaccttacagacaccctctatccaagtccagtttggccaccaccagaagctgaagctcagtcactttcagcagcagccacagcagcagctaccacctccaccaccacccctcccccatcccccacctccccttccccctcccccacagcagccacacccacctcttcctccatcccagcatctggcttctagtcagcacgagagccctcctggccctgcctgttctcagaacatggacataatgcatcacaagtttgagctggaggaaatgcagaaggacttggagcttcttctccaggctcaacagcccagcctgcaactgagtcagaccaaatctcctcagcatcttcagcaaaccattgtggggcagatcaactacatcgtgaggcagccagcacctgtccagtcccagagccaggaggagaccctgcaggctacagatgagcccccagcatctcagggctcaaagccggctctccctcttgacaagaatactgctgctgccttgccccaggcgtctggggaagaaacccctctcagtgtccccccagtggacagcaccatccagcactcctctccaaatgtggtgagaaagcactccacctcgctgagcatcatgggcttttccaacactctggagatggagttgtcatctaccaggttggagaggcccctagagccacagatccagagtgtgagcaacctgacagctggtgccccccaggcagtaccaagcctgctgagtgctccccccaaaatggtgtccagcctgacaagtgttcaaaaccaggccatgcccagcctgacaaccagtcacctacagactgtgcccagccttgtgcatagcacattccagtccatgcccaacctgataagtgactcccctcaggctatggcaagcctggcaagtgatcaccctcaggctgggcccagcctaatgtctggtcacacccaggctgtgccgagtctggcaacttgtcctctgcagagcatccctccagtttctgacatgcagccagaaactgggtccagctccagttctggccgaacttcagggagcctgtgtcccagagatggggctgatccctccctggagaatgctctgtgtaaggtaagtcctggggaaatgctatccaaacttcctttgttcatcattgggcaaaagattggccactgggacccttattctgaccttagcttaacagttctgagaccactaatgacaaccatgtctgagttctttgattcttgtcgacatttcacttttgaaagatggaaagtgaggattccactcgcttcactgacttactgggacaaggtcccatagtccccggtctggatgctcccaaggacttggccatcccctcagaactggaggagccaattaacctctctgtgaagaaacctccactggcgccagtggtcagcacgtctacagctctgcagcagtaccagaacccaaaagagtgtgagaattttgaacaaggagccctagagctggatgcaaaagagaaccagagcatcagagccttcaatagtgagcataagattccctatgtgcgactggagcgactcaagatctgtgctgcctcctcaggagagatgcctgtgttcaaactgaagccacagaagaatgatcaggatgggagcttcctgctgatcatcgagtgtggcactgagtcctccagcatgtccattaaggtcagccaggacagactgtctgaggccacccaggccccaggtctggagggaagaaaggtcactgtcacttctttggctgggcagcggccaccagaagtggagggcacatctcctgaagaacacagactcattcctcgaaccccaggagccaagaagggccccccagccccaatagagaatgaggacttctgtgctgtttgcctcaatggcggagagttactgtgctgtgaccgctgccccaaagtgttccacctctcctgccatgtgccagccttgctcagcttcccagggggagagtgggtgtgtaccttgtgccgcagcctgacccagcccgagatggagtacgactgtgagaatgcctgctataaccagcctggaatgcgggcatctcctggcctaagcatgtatgaccagaagaagtgtgagaagctggtattgtccttgtgctgcaataacctcagcctgcccttccatgaacctgtcagccccctggcccggcattattaccagattatcaagaggcccatggacctgtcaatcatccggaggaagctgcaaaagaaggacccagctcactataccaccccagaggaggtggtatcagatgtgcgcctcatgttctggaactgtgctaagttcaattatcctgactccgaggttgcagaggctggccgctgcctggaagtgttctttgagggctggttgaaggagatctacccggagaaacggtttgcccagccaaggcaggaggactcagactccgaggaggtgtctagtgagagtggatgttccactccccagggcttcccgtggcctccctacatgcaggagggcatccaacccaagaggcggcgacgacatatggagaatgaaagagcaaaaagaatgtcatttcgcctggccaacagcatctctcaggtgtgagagccaaaaggagactgggcactctggcagctgttgtcccatactgtcgaccattcctccccatcttgcagcttatcctcttcagagtgtggatggtagatgagtcttgttgaactgtgtagtgctcttctttgccatttgcatctacagcatttatttgggagctgtagtacatccactacagagaagatttcagtaataaacaggaaagaggaaggtaaatattattaccagagtaatcagatgtataggctccacttgacaagaccacacctggttaggctcgggaaaacctactttccttggtgaatttttttctgcctgggaaagcagacccgtctaaccttttagtgtccagggctcaggagccatgtatacatctgaactcctcctgggctcagaagtgggtaaaagaagggagagaggtttagacatatggcaggactgtgatccctggcccagcacagccaaagactgtcactgtttgcctttgcttgtcctgtctggatagaggcacctgccatgtgcagactagtggaggcttctagaggccataggtctcaatttgtgcctatttgggttctaacggttttcagggtatttgttttgcatagtcactttcctgatgttgacataggtggctgctgtgaaaatgctgtggatggtgtgacattcttgactgagctgggtggctgtggagagaccacttaaatcttctggttcagatttcacttacagacttagtaagatgtccacttcagagcccgccctctgtgctacttactctgggctaatcacacttctttagggtgagaacctgccttcctagaagtgactgttggtgcttgtcagtggccatacccttcatcatcctcattcagaggtatggatcgtgagttctgcttgtgaatactgtgagacagctgctgtctgcttcaggtccagagttccatgggtggagagagtaacccacaaccagctcactcctctgggcctctcctcctgcttaaagattctagttctcaacctctccaagttcatgagccaaagatcagaagtgagtcttctgaccagcccgcctccaggctgtctacagccccaaaaaagccaacacttttctggcagccctttttgttggaggttagagaaggcctcagggaccaacaggggccagatctagacattcctgggggaagtttgtctaaggtggacagggggaaaaatcaagaggcaaaaagccagtgtcctttggtgaccatgaagcaacctcagagccttagttctcctagaatgcagagagaagcattctggaagccatgggaacaggagctcgaggctgcatcctgaatgcatctgcatggccctcgcagggtgtttgtgaggatactggaggtcaggctacctcccaagcaagggcttggttgagaaggaacccattgctcatattgttgggggagctatgaacctgacatgtcagtggccaggactgagacagctctccctggtcctgtcattgcatggctaatttcaggggagtctgaggtcatggctttatttttgctaacagatgaagttcaaggatgttcttgtttgtagggcctttgctaatgagcagttttttaattagaaaacatttcttctctctttgtgagttgatggtattgctcatttccttctctacccaacctgagagatcatcttcactttaaagcaaaccatgccccttggcttgccattctttcagcagcacatgccacgttctaagcagatgggcttccgtgatcccgttttctagtttggggtaactgagtcttgaatgctttactagtccggcaatctttggacttaggcttctgccctttgagactcacatgactttctggtttggggtctggtcatttccctttcaatttttgaatctccttctctgttcagttggcttggcaaagtaccctctgttctcatgtcactaattcctgctctaggtcatctttcctttgtgcagcccacattcccaccatcctgtgaactttgttgtacttggtgttgggcaactggtgagtgttgtgacaggctcagacctgatccttcctcaggagcaattggagaccacaaatttaaagcagaaatacctgttaaaagcttggctttccttatatgagtgaggctcccagcttgggtgtggcctcctgggctcacggatcagcttgctgggccagagggggtcttagtaatgtgctagagagacacatgctcccttctcatcgtagagagcctgcatgctgagaggctccctttacacacctgcctctcgctggcttttcctttagacctagccaccagtgttttgaatcatggttttgttttgtttttgcatgcaaaaaccagaacatgacttagaaatt

SEQ ID NO: 247589 - DNA, 2662 bp, Homo sapiens
atgtaggagacagatttcaatgtctgttgaaggcccccccacaccctccttcagtgccgggggcatggagggatatcttgggctcctgctgttttttaaaatgatgcggtgagagtgtgtgcctggcatctgcgtgctgcagcagtgtggggctgacagagtgtgtcaacttgagctctggctgtgcaggcaccgctgctgcgtgagcctgttattccattctggattgctattttgatacccagattgcatcattcttcctacgtataaacagggggtccccagggtcctgcagctactcacttcaccaccaacactgttgttgtgatgagctctatttaaatgagctgccggatcggggcaggttccagccacacagtgctcttctttgccatttgcatctacagcatttatttgggagctgtagtacatccactacagagaagatttcagtaataaacaggaaagaggaaggtaaatattattaccagagtaatcagatgtataggctccacttgacaagaccacacctggttaggctcgggaaaacctactttccttggtgaatttttttctgcctgggaaagcagacccgtctaaccttttagtgtccagggctcaggagccatgtatacatctgaactcctcctgggctcagaagtgggtaaaagaagggagagaggtttagacatatggcaggactgtgatccctggcccagcacagccaaagactgtcactgtttgcctttgcttgtcctgtctggatagaggcacctgccatgtgcagactagtggaggcttctagaggccataggtctcaatttgtgcctatttgggttctaacggttttcagggtatttgttttgcatagtcactttcctgatgttgacataggtggctgctgtgaaaatgctgtggatggtgtgacattcttgactgagctgggtggctgtggagagaccacttaaatcttctggttcagatttcacttacagacttagtaagatgtccacttcagagcccgccctctgtgctacttactctgggctaatcacacttctttagggtgagaacctgccttcctagaagtgactgttggtgcttgtcagtggccatacccttcatcatcctcattcagaggtatggatcgtgagttctgcttgtgaatactgtgagacagctgctgtctgcttcaggtccagagttccatgggtggagagagtaacccacaaccagctcactcctctgggcctctcctcctgcttaaagattctagttctcaacctctccaagttcatgagccaaagatcagaagtgagtcttctgaccagcccgcctccaggctgtctacagccccaaaaaagccaacacttttctggcagccctttttgttggaggttagagaaggcctcagggaccaacaggggccagatctagacattcctgggggaagtttgtctaaggtggacagggggaaaaatcaagaggcaaaaagccagtgtcctttggtgaccatgaagcaacctcagagccttagttctcctagaatgcagagagaagcattctggaagccatgggaacaggagctcgaggctgcatcctgaatgcatctgcatggccctcgcagggtgtttgtgaggatactggaggtcaggctacctcccaagcaagggcttggttgagaaggaacccattgctcatattgttgggggagctatgaacctgacatgtcagtggccaggactgagacagctctccctggtcctgtcattgcatggctaatttcaggggagtctgaggtcatggctttatttttgctaacagatgaagttcaaggatgttcttgtttgtagggcctttgctaatgagcagttttttaattagaaaacatttcttctctctttgtgagttgatggtattgctcatttccttctctacccaacctgagagatcatcttcactttaaagcaaaccatgccccttggcttgccattctttcagcagcacatgccacgttctaagcagatgggcttccgtgatcccgttttctagtttggggtaactgagtcttgaatgctttactagtccggcaatctttggacttaggcttctgccctttgagactcacatgactttctggtttggggtctggtcatttccctttcaatttttgaatctccttctctgttcagttggcttggcaaagtaccctctgttctcatgtcactaattcctgctctaggtcatctttcctttgtgcagcccacattcccaccatcctgtgaactttgttgtacttggtgttgggcaactggtgagtgttgtgacaggctcagacctgatccttcctcaggagcaattggagaccacaaatttaaagcagaaatacctgttaaaagcttggctttccttatatgagtgaggctcccagcttgggtgtggcctcctgggctcacggatcagcttgctgggccagagggggtcttagtaatgtgctagagagacacatgctcccttctcatcgtagagagcctgcatgctgagaggctccctttacacacctgcctctcgctggcttttcctttagacctagccaccagtgttttgaatcatggttttgttttgtttttgcatgcaaaaaccagaacatgacttagaaatt

SEQ ID NO: 247590 - DNA, 450 bp, Homo sapiens
atttaaatatgatttttaactcttaaaaatgtttatgttaatgtcagagcgcctacaaaactcttaaaataaggatgagagcttgaatcatgcatgaggcagattttaactgaggtgtaagtagacagtggaatgcatgtgtttaattcaaaaaaggtttgctggccgggtgtggtggcttgtgcttgtaatcccagcactttgagaagccaagggaggaggattgcttgagcccaggagtttgagaccagcttgagcaacataaggagaccttgtctctacaaaaaataaaacattagctgggtgtggtggtagtagtcctgtagtcctagctatctgggaggctgaggcaggaggattgcttgagcttgggaggttgaggctgcagtgagccatgactgtgcatggcattccagcctgggccacagagcaagaccctgtctcaaaaaa

SEQ ID NO: 247591 - DNA, 454 bp, Homo sapiens
gagcccaggaggtcaaggttgcagtgagccatgattgcagctctgcactccaacctgggtgacagagtgagaccctgtctcaagacaaaaaaaaaaaaaaatcaaagcacacagaattatacatttttagaattagaaatgacctcaaaagctaactggtctagccttctgccattaaaacaggtaaaatagtatgatcctactttatatgcctagtattgaaaagtgtgacattggcatttacagggacatgtctactgaggaaattttgctctaagtacaggaccgaagcagttcctagtgtatatgacaagaattctatatatcctgccatttctgatatgtattctgaccactagaacacaaatacttacagatctttttactttcatttcctttgtttccttttctactcctttctcttgccctacaaagatacttaggtttctctgtt

SEQ ID NO: 247592 - DNA, 671 bp, Homo sapiens
ctcaaaactttcctgtacccttctggcttgttctgggaaaacaatgcttgcacagctttatttcttccagctttaaacctctaagacttcccttagcaatttttgtctcatcagaagtcttcacatatgctggctaggaaggaaaacattggcattttttttcaggaagaagaccgtgttaatgagctacactaaactcacgtctccattccatcttgcatgtactccttaccccatatttgagaaatatcactcaaattatgagtcagaacatgattttgatacaaaagattggtttgttcatatgatgttgttatataaagctccatgtacaattctttcataggttaaacaattttataaagcttttatactttattattttcagttcaagtgtgaattcagataatgatattgggaggccaaggcgtgaggatcacttgaggccaagagttcaagacaagcctgggcaacatagcaagacccctatttctgcaaaaaataaaaatattagctggccatggtggcatatggctgtagtcctagctacttgggaggctgaggtgggagaatcacttgaacccaagagtgtgaggctaaagtgagctacgattgcatcattgtactccagactgggcaacataatgagactctgctcttagaaaaaaaaa

SEQ ID NO: 247593 - DNA, 220 bp, Homo sapiens
ggcgaggtcctggctcctccctggcgtttgggccgtcactttcccaggtccgagagtgtcgacgctccttttgtcgaccgaggatgtggacgctcccccaggatgcggccaggcagcgccacctcacgccggcagagggtgccggcgagacgctgagggacactggagtttctgagccgaacctgcgactttaagatagggaaactggtaggacatccaa

SEQ ID NO: 247594 - DNA, 349 bp, Homo sapiens
aattcagttgcttgtggatgtgggactaaggtccctgctttctgaaagctgtcagcaaggggccccactcagctcccagaggcccctgcagttccttaccatgtggctgtcacaggccctttcacaatatggcagctgacttcttcaaagcctgaagaagaatctctctgacttctaattccttttatacaaggctcccctgattaggtcaggccctccagggataatatatttttccttaactcaaactcacctgattggggaccttaattatatctgtagaagtcttttgcaatataacataacctaatcaatataatcacctttgcggtataatataacctattca

SEQ ID NO: 247595 - DNA, 452 bp, Homo sapiens
atgggtaacctttctttttttttttcgtttgagatggggtcttattctgtcatctcagctagagtgcagtgactcactatagcctggacctccagggctcaagggatcctcccacctcaacttcctgaatagctgggaccactatgggttcataccaccacacctggctaatttttgtattttttggtagagacagggtttggtagagcccaggctgggtaaccttttgatttaaaatttattttgaattttttttggaaaaaagcatatttttacatttagatataatattgtaattgactattcataaatacagaacttctaagtataagaccaaaaggtccgttttaaaaagaaataagacaattggccgggcgtggtggttcccgcctgtaatcccagcactttgcgaggccgaggcaggcggatcacgaggtcaggagatcaagacc

SEQ ID NO: 247596 - DNA, 516 bp, Homo sapiens
ccatgcccagccaattttcagcctttagagcaagaaatcctaacaagcctatgcccattaatcataaatctgccccacttagggcactggatgtgtggctgtacagactgagttttacccatctttataaatgatgctacactactaaactgtgatgcattggacatctctcatttttctgtggctgaccagcatgcaaacattctttatatttggggcactccatcactgtgagagtcttaggaccttctttcccaccgtggagcataagggggccacatacttggtctcccaacccctcacagctagggtggcgtgtgatctggccaatgagattctccttttgggaactgtgaatcttgatcaagtggtgcaaagacagagacacgttaaaattcatcttggtggtcgagtttctagagactggtagtacctagcaatcatggtggaaccagtgacagtatcctttttattccgtggtacctgaaatccttacaataaattcttccgcttcaa

SEQ ID NO: 247597 - DNA, 312 bp, Homo sapiens
tctacaaaaactgcagaaataagcctgggttggttgacacacacctgtaggccagctgttcgaaaggctgaggcgatattatcgcttgaggccaggaggtcgaatctgcagtgagccatgatcacggcattgcactccaccttgggccacaaaaaaaaaaaaaaacaaaaaaaaaacggctgggcgcagtggctcacacgcctgtaatccaattactttaggaggctgaggtgggaggatggcttgaggggcaggagtttgagaccagcctgggcaacataataagaccctcattgccacagaaaaattaaa

SEQ ID NO: 247598 - DNA, 255 bp, Homo sapiens
tatgtctttttctgtctttgacaagttcctgtctgtcacccaatgccaggcattattttctggtaaaaatcaggaaggattctttctagcattctgtgactgtttctggttttatcaagagcagattgtgtctcattctgggatgtggagtatcacactgtctgacttggggaatttgttgggatataatgaagcactagaacttacattgggaaaatgtcagctttcctttgtggcaacagcttatcacagttc

SEQ ID NO: 247599 - DNA, 823 bp, Homo sapiens
ctgttggtgcttgttgctacatgtcttcagcagatcccaccaggcccctgggtgagcacttgaccctgacgggacgcaaaacatggccacattctgcccccatctccaggtccttgtgggggaagtgctccagatagtggtatttgggtgctgggcttgtctgacctgaggaggtggctgcagaagccagggccagccctgagcccgtgaagtctctgctcctccccagcacactgtcctgcctccctgcccttcccagccacagctgcgcagcatgtgccactccaagctctgctgctccctcccccaacttcctgttgctggggacagcaaggggtgggggctaagggtctgccgttgctcaggcgatctgtggctaatctgggaataatttgaaactaaatcttaagctctttggaagcctctcatgaaatcattgcaagtttattaacaacagctgtggccacacatgacctggatcccagccccaacccacccccagaatctcagaggggaagcaccagtcgacttgcaattcccagtcagctttctaaggggaggaaaagtgcaatgaagaagaaaagccacccgttcttcccccatggtcacaggaggctggccagcaggcacgtggacagccagccctggggaccagaagtgttggaaaaaaagtctcaaaaggaccgtaaaggctttggcaaaaatagttttgtgccaagcgctcaaatggttattttgggaacagtcagcctgtggctgctgattactgttcatatctgatttgtgaaaataaattgaatcttttccccttaaaaaaaaaaaa

SEQ ID NO: 247600 - DNA, 433 bp, Homo sapiens
gatactatagtttcctgaattgaagagtctataataggtgacatgtcgtgaatgaaagatagatggtgtaggcagaatatgtataatgtttatagtcacaaccccgccccagaatctcagaggggaagcaccagtcgacttgcaattcccagtcagctttctaaggggaggaaaagtgcaatgaagaagaaaagccacccgttcttcccccatggtcacaggaggctggccagcaggcacgtggacagccagccctggggaccagaagtgttggaaaaaaagtctcaaaaggaccgtaaaggctttggcaaaaatagttttgtgccaagcgctcaaatggttattttgggaacagtcagcctgtggctgctgattactgttcatatctgatttgtgaaaataaattgaatcttttccccttaaaaaaaaaaaa

SEQ ID NO: 247601 - DNA, 217 bp, Homo sapiens
tttttcttttttctaccctcaattggcattgttaccgatcatgggttcttggactctcaatgcaatagaaattgatatgaggccaaaagcgctttcatagacaaagcttcactggagcttatgcccaaacaaaagggaggcagcacaagagagagagaattcccgggcttccttctgaaaagagtcatagggctttcttattaggcaaagtgcagga

SEQ ID NO: 247602 - DNA, 408 bp, Homo sapiens
actttagtcaatcgatattttttcagttaattaatttaaaaaattaatatgtattattatcctagcacagtacctgacacacaataggtacttaaagatgaactgaatagatgctttaataggttaaaaccttattacatcaaccctagatgaccaattaaatattcttttgtgctatcattttgacatgacatatatttcccgaggcttaccatgatatgtatttgttctaacaagaataaacttacattaagtttctatttaacgcattgatgcataaatagatgaagctggccaactaggatgagagtaggggaaggaaggaacatactgatttaactctcaaaggctttctggataacccaagctaactcattaaatggaagctgaaaaactacataagccact

SEQ ID NO: 247603 - DNA, 432 bp, Homo sapiens
agaccactaaatacagagtctcctagttccatctattattctaaatggctgaaagacacacttggacaatcttgtgtgagcctgtcctgaagtttctggaacccaaagtgactggggtgggggacactcaacccagtagtgataaaactttgtttccagtttaatgtccttctttaactaggtgtaggatctcaggtccaccatgaaaccctaggatgcctcattgctaaggaaggggatggatcataatcccagctctacccacgccagaaggcaaaatgaggatctacaatagcgtaaacactctttgacatttcacaggttgatgcaggagtcaaaaggccagcaaagctggcgaaagcccagctgcaggaggctgaccattggccctggttcgtaggcagaggggataactgtgttttgcaacctcac

SEQ ID NO: 247604 - DNA, 171 bp, Homo sapiens
caagaattctcaaagtgtattcaaagaattaatttcattagaaattaataggctaggcaccatggctcacgcctataatcccagcactttgggaggccgaggaaggtggatctcttgagcctaggagtttgagaccagcctaggcaacatagtgagacctcgtctctataa

SEQ ID NO: 247605 - DNA, 504 bp, Homo sapiens
aaatatagataaaattgtcagctttcagtcctcctattccaacaattatttttattttttccatgcttgccaactgcagtagaatttttctaaatttttcttaaaaggtgcacggtttgatggacccttggcttgatacagttttgatttctaaaaatgatgattgtgctgggtttgaatttcacaagaaactgtttggctgtagtggagtgactatagaatgagagaactcctagagttacatagtagaattctagatcgtcaagactatagcattcccctgcccccaccaaatacggaataagttatttcttgcttgtgtgcatactgtccccatattctttaggaagcaatactgcaacaaggatatttgtgtccttttgtgacatttgaggatgtgtcatgctcactaggtgccctctactgtcatgttcaccatggttgagggcatttttaacctctgcctaaggcagtaacaaatgggttgttggcttctgaaacagg

SEQ ID NO: 247606 - DNA, 516 bp, Homo sapiens
agaacattcatgagttggatgactttgtatatgatctgtcctgctctccatttcaaaggcaagaccaccaaaattcacaagcttattatgttgtcactaatgtgtaagccaccagtttttctgcaagttggaagttttctcaacagtcaaatattcccccttctcactaatcttaaggttttaaagttatagctgcaaatctaaaaaaaaaagaaaaagtaaataaaacttattgacagaatgcctgatagtttatttacaggtttttgtttgtttgttttttgtttttctttgttttttattttgacacaaggtcttgctctgccgcccaagccagagtacagtggtacatcaaagctcactgcaatctcaaacacctaggcacaagcagtcctccctcctcagctacttgggaggctgagtcaggagaattgcttgaaccccagaggtagaggttgcagtgagccaagattgagccactggactccagcctggacaacagagaaagactccctc

SEQ ID NO: 247607 - DNA, 436 bp, Homo sapiens
gatgcatgctaccatgcccagctagtatttttatttcttgcagagacagggtctcactttgttgcccaggctaatctcaaactcccagcctcaagtgatgctcctgcctcagcctcccaaagtggtaggattatacacatgagccaccaccctcggcctactttacaatttgatgcaccttttctttacgtgactgtgatgcactttaatgggcaatcactagaggtcaggggttcaagaccagcctggccaacatggtgaaaccccgtctctaataaaaatacaaaaattagccaggtgtggtggtgcatccctgtaatcccagctacttgggaggctgagtcaggagaattgcttgaaccccagaggtagaggttgcagtgagccaagattgagccactggactccagcctggacaacagagaaagactccctc

SEQ ID NO: 247608 - DNA, 391 bp, Homo sapiens
gtttatctcaaattaaaatatcactgggtaccctgtattttatcatatgttcgagtgccttctgtcagaatttggtgaccctttgagtctgttttaaaaaggagcatgtttggccggacacagtggctcacgtctgtaatcccagcactttgggaggctgaggcgggcagatcactagaggtcaggggttcaagaccagcctggccaacatggtgaaaccccgtctctaataaaaatacaaaaattagccaggtgtggtggtgcatccctgtaatcccagctacttgggaggctgagtcaggagaattgcttgaaccccagaggtagaggttgcagtgagccaagattgagccactggactccagcctggacaacagagaaagactccctc

SEQ ID NO: 247609 - DNA, 667 bp, Homo sapiens
actgaatggcaggactgaaagagctgtgacataaacagggctgaaacatgccttccagctcaccaggttgcaggcaacaggagagaagagcagtggcccttaagggagctcagacctaggggctcccagagccagggctgtaacaccctttttggggctctgtggcttatggcatctccaagcttttgggtgccatggcgtctcccctgtccagacctcagtgcccacagtggaagctgcttgccttatgtctggtccagccatagccttgcatggaaccagagctggtgccagtgctggtgcctggagctgcccactaccacagcagctggcatgcctggctgtgcacagtggccagaccccacactcacttgctcacctacccctggccactctgcacctggatcgcccttggaggcatgggatctaggacagtagtatggactgagtgcagcctgctgggccgagtggcccgagccacgggccacagaggtttctggttagggaactggcaccaaaaaaataaatcctgtgtcactaagagtgctttcacgagtgttagaaatgagagaggagatgaaaacatttcttcaaaatgctgataaggaccatttctgtgacatggagaggcatggtcaagaggaatatctcaggcatacatgtattt

SEQ ID NO: 247610 - DNA, 373 bp, Homo sapiens
ctggaacacaactgtaatgctcaagggtgaccagcaaataggtgtaaaaaatagttctatattatcagagacaggccatcagggctacaaattctagtttctgttgtactaccatgccagctatttgaagagaaacatcgtttccatacatccatctacacagttgttcttcaagacatttggaatcacacttttccattccttgttacttagacttcttacgtgtgttcaatctgttaccatatcctgttggatttgacagtaaaatcaattgtgagttagtgccacttcactttatttttatggccactgctccaatcaaaaagtctccatggtatctccccaggataactttagcctcttcccaaacctc

SEQ ID NO: 247611 - DNA, 872 bp, Homo sapiens
tttcagcttgaggtggtcacctagtagttcactccaggcaggctgtaacctgaccatccgtctaatctcctatcaaagatgtctgtcttccagaacacttagcaattatacagctcacatggctttaggcaccttgattatgtatttccaggtgtgtgtttgtttgtcttggaactcctggagagatggggttctgactcatttgtttccaaatagtactagtcatgtctgctttgggcctttttccaatcccacaactgacaaatcatacagctttcaaagctttcaattaactgggaccatttttcttgtcctactgtagtgacaggtgctcttcaaatggtaatcttgattatcagtaagaaaaggatcttaggacttggaaatgtttggttaaaataaacataaaacaggttttctttagaacgtttctaaggctttcatatgctttttccaaatttatttgaccaatacagttttcttttgaggcatcagaattaacatcccccagccactgaaccatctcagaaatgcagatctaagccatagtggggaaataccttgttttagggtaaggaagttctttcctgtacgtaattatagtttcaaaaatagatttatagaatatcagcaagatgttggagtagacaggttcaaacacccatccttccagagaggggaacacccctgaacccactttgtcagagctctggaaaacaaaggttactgtaaagcaaccaagtaaatctggattaagaaaaaggaaacttaatactggtaagaaagctttgtgtcatttttacttgcccctcccagcatggcagtggtcttgaatacagcagcccacagaccctggtccttggttccagagg

SEQ ID NO: 247612 - DNA, 821 bp, Homo sapiens
agaatgagaagcatattaaatttttacattaatcatattgccagagacacaccaaacttctgctattgctgttgacaagcacagttgtggaggtgtttgatttttctgaagcagcattagcagaaacctcagtgtctagccacttgtcctgtgggccttgacagacgggacgtaggatatgcatggcactggtgcagatcatagtgggtatagtgtggttctagggtcagcggtgcacgcagctttctgatggtggtttcctaggcatggcagcagcagtgtgattcagagacgtcatttcctgatcatagaagagtcattgcttccttggtggcctggttctgggaagactttgggactcattcctgaaaaactaatctagagcctatttaatcaaccctcccaagtattcaatatctttgtgtttatactagctaaaatggattctattttccgcaaatgaatcttaactgataccacacattgtgtacaggaagaatagtggctgcagacaataggatctcaggaatatgggaaagtagaattgcttatctgttctcgtagagtttgaaagtagcaataattatgctagtactagaaaatgagacactgccactctgtggtgcacaatggctaagactgacctatatacattttctaatcttgtccttgtgtatttcgtgatctgctggttcaacatctgtttgtacgttaaacacctcaatcttaatattctaagaacgatgatccttcccattgagcctactaagacccccattttagcaaggaccaacactgagttgctcaggttaaaaaaaaaa

SEQ ID NO: 247613 - DNA, 511 bp, Homo sapiens
ttctatggacaacgaatgctttctttattaaaggatcccagtataactggctacccattcacaagaagataaaagtagattttcttcatgacatattaaaataaattctaggttaaatatatacatgcaaaagaaaaaacaggaaaaataaaaaacatttaaaaatttaaggaagtatttgaaatactgtataatcttagaatggggaaacattttgtgtaggacaggatgcaccatataaatgagctctgtcccaaaggagttcataacctagtgccacaaataatataaatatgttagaggtagggatagaatatgctatttttgagataagaacaaaaacagtgaggacctagaggacaattcaattcattctatgatgggcactggggaagggttcacagaagcagcattgagctgtttttaaaggagtgaatgggtgtcttctaggtagtttgtgaaaaggccccaaatcattaaaggacctggtatttcagtgccagtgagaaat

SEQ ID NO: 247614 - DNA, 665 bp, Homo sapiens
ggtgccccagggcacagagtaggtttcctgtgagctggtcggggccacggctgccgccggcacctgccctggggcacagagtaggtttcctgtgagctggtcggggccacggctgccaccggcacctgccctggggcacagagtaggtttcctgtgagctggtcggggccacggctgccgcctgcactgccctggggcacagactaggtttcctgtgagctggtcggggccatggctgctgcctgcacctgccccagggcacagagtaggtttcctgtgagctggtcggggccatggctgccgcctgcacctgccccggggcacagagtaggtttcctgtgagctggtcggggccatggctgccaccggcacctgccctggggcacagagtaggtttcctgtgagttggtcggggccacggctgccgcctgcactgccctggggcacagactaggtttcatgtgagctggtcggggccatggctgccgccggcacctgccctggggcacagagtaggtttcgtgttgcttggaacattaaggcgtaattttgattcagtttttcctaaagaagcattttgcatttttatggcttttgcagttcgggagaaagcttctctattttggatgcatttcagaagggcgttctattaaacatgaatctgc

SEQ ID NO: 247615 - DNA, 375 bp, Homo sapiens
gttaatcaaaaagtggctacttttgaagaggtaatgaccagagtagattaataaaggagatttctagagagttggtcatgttctatatctgtacttctcaaaattcagtctacatatagatctccttcgagatctttttgaaatgcagattctgattcaataggtctgggtgggagctaagattctgcatttttaacaagctcctaggcaatgccaaggctactggtaaatgaatcacactctgagaaacgaagtttgataccttctgaatggtgtatatgcaagtttatttgtaaaatatcatcaaactatatgtttatatttatgcactttctttgtatatgttttacttcaataaaagatctatttaaaacc

SEQ ID NO: 247616 - DNA, 686 bp, Homo sapiens
gttcttccaacctccaagtctcctcagtccatcctcacttcccaattccccatcccttccctgttcgccaccatttcccaacccctgatccaaccccaatgccctgaatgtcatgagagtctaggccttacccaagattctggccttcaaaggaccccaggcccttcaaaagactccagagttcccaggaatctggaccttgcccaaaacccagacctctacaagaacccaggccttacccaagatccaggcctccacgagaacccaggtcttgctccaaatcaaggcctacatgagttcccaggccttccccaagattcttatctctgccagaatccaagcccttctcaagactttggtcttcacaagaattcaggcattactcaagattcccacccccaaaagaacacaggtctgactcaagaagctggtatccttaggagcccatgtctcacccaatcccctggcctccacaagaaaacaccatttacccaaacttctgatcttcagaggagctcaggctttacacaagactctggaatctataggaatcttgaaccaaaccaagagactgtgatctacaaaaatcaagatctctcccaagcaactgaccaccaaaagaacctaggctcttctaaagattctggaggtcacaagaatacaggcaatgtccaagatccaggagt

SEQ ID NO: 247617 - DNA, 674 bp, Homo sapiens
tcactagtaagtccccagatttctgggataatttggattaaagtctgttctaatatgaaactagattggtcttctcatgagattgacatcctagcaggcagtgtaatgttgaaggtttggaatctgacatcccttggtttgaattttcactctaatacttaatagctgtgtgtctttgggcaaatgacttaacatctctcggcctctgtgttttcacttatgaatgtagatgataactccacacagagtagtttgtgaggattaagtgatatagttcatttcagtgctcagtgcaaggcctggtattagtaagtgctaaatatcagttatctgttactattttcattactgcaactaacttcacctaggccacagcttgggctcatccatttatagaacatttatgaacaggctttttactaggtgctggtgatacagaggagaataagacatgaccctgtccttagctgacagtctgatgaaggaaacagtcatataaatagctaactatatttactagttgcataaaaaattattttaccaagtaaaatggaacacattctgtgatagtggaaacacacaaagagctgtgagcacaggaccaagcataaggttgtactggtcataaaggagacctagtgagaaagagctcgtgcagatcaagaatgcccagt

SEQ ID NO: 247618 - DNA, 621 bp, Homo sapiens
tcactagtaagtccccagatttctgggataatttggattaaagtctgttctaatatgaaactagattggtcttctcatgagattgacatcctagcaggcagtgtaatgttgaaggtttggaatctgacatcccttggtttgaattttcactctaatacttaatagctgtgtgtctttgggcaaatgacttaacatctctcggcctctgtgttttcacttatgaatgtagatgataactccacacagagtagtttgtgaggattaagtgatatagttcatttcagtgctcacattactgcaactaacttcacctaggccacagcttgggctcatccatttatagaacatttatgaacaggctttttactaggtgctggtgatacagaggagaataagacatgaccctgtccttagctgacagtctgatgaaggaaacagtcatataaatagctaactatatttactagttgcataaaaaattattttaccaagtaaaatggaacacattctgtgatagtggaaacacacaaagagctgtgagcacaggaccaagcataaggttgtactggtcataaaggagacctagtgagaaagagctcgtgcagatcaagaatgcccagt

SEQ ID NO: 247619 - DNA, 279 bp, Homo sapiens
gtatttttttatagcagcaggaacagactaagacatcctacttctcagcttaaacgtcacctctgcacagagcccttcgtgatacatctgaacagattcttttctgtgactctccatccctgcactgtatttgctctttcagggtgctttttcacatttgtgagggtgtatgcatctcctcttccaggctgtaagcttcataaagtctctgttttgttcataactagaacaagccctagcacctagcagtgagtgttcattaaacatatgaagaatgaa

SEQ ID NO: 247620 - DNA, 599 bp, Homo sapiens
cactttaaaaatatgctttattttttaaactgaaatcccaattgtccataagcatacaaatggagggtttcaaattgtttactggccagagtatcaagccatttagcaggcccttgagagaagaggtatgttctggcagagaatcagagaatcatgagcctgaatgtacacaaaggaggcatgaccagcaatgaaaagacaggaagggacggagattggagagaatggtttggtccagggaaggttgttagaaatttctttcacttcacaagcttgcaaaagacctgggtctcaacttccagcaaatcgagatggagaattttttaaaaccataattaggtactttaaagaaatcttcaagttttgctttagctattggcataatttcctctattctctgggttgctgcagtagtgaggatctgcaaacaaaaaggcactcttcatggaaacaaggagaaaataaacggttctttatatcggcactattttttttcctctctgacttattcattcatgggtttctccaactgtctgagtctctgggaaatggtgtgtttgcccattaatcaaggaatacctatttctccccttcctgcg

SEQ ID NO: 247621 - DNA, 417 bp, Homo sapiens
gcatatagtagacattgaatagtgaatagcagctgctactgctgtcagtgtaaactaagaaacagacctacagaggtcatctgtcctgctggaggtcacaagggaaacagccaggactggaaccacggtcccagaccttgtaggccgtgttcttccattcccgggacacttctttccccttccctgatcaggtgggcgctgggcagacgctggcaggcaggcaccaccgctgtccaggacgcatttatgcctgaattgtaagttgtgggctgtgcctggcctcagacatgattatagggtgctgacaaaaacagcaccccctgattaagacgatgagcgaaaacgcacccgggcttttgttcactgagcaactccattgtgtctttctccccttttccacccctccctttatctact

SEQ ID NO: 247622 - DNA, 310 bp, Homo sapiens
aacgaacaaacgaatgaacaaggagacagcaggactcctgctcaggtcaaggcagagtgcggatcgcaactgtggaaggtgcacagagtcccagaaagaccaaccacacagggaggcacaaagcatcagacacggagccgggcccagagcgcccagaggtggccgggaggcagcagctgcacctcggggggtgcgggcgaggcctctgtcggggtcagaggtcatgttgccaggtgaggggcagatggacagcagtgtctgcagatgcggggcccgggaggacccaacaccacctgtatggcattctcct

SEQ ID NO: 247623 - DNA, 469 bp, Homo sapiens
taatgcggtgtctccaggatgggaatcgccttcccctcacctgactcccgcgtccggccccgcaccacctcgctccacggcccagccccgacggcgttgaaggcctgcatctgcagctcgtattccatccactcctccagctcctcgatggtgaattctctctccagccggtcactgacgacttgggccactgctgaggactggaggtctgagcgccagtacttaatcctgtagcccacggactcggggttcccgttgtactgagaatccggcaggggctaggaaggaacgaggagtcgcgatgagctgacatctcagaactgccaccctcacgggttgtaagggatgggcctgccctgtgaggccaactccgtggaggaggtgttcctgggggaaatagtcttagaaggatctactttattcttccctgaaacttttgttctgtgaattaaatgaaaccctgtcagta

SEQ ID NO: 247624 - DNA, 217 bp, Homo sapiens
caggtcactgaagtgaagagtttgatgttcttcctagatcttcatagacgtagaattgcctgtgtaatctccttacctcactagtctgccctgtcttccttcttgctagatgagaaataaagaaaacaagaaaagcaagggaaaggagagaaaaaaggagggatacagcaagagggagaaagaaaaggacgagaaaataaattactaaagggagaaa

SEQ ID NO: 247625 - DNA, 568 bp, Homo sapiens
ttcactcttgttgcccaggctggagtgcaatggcgtgatcttgggtcaccgcaacctccgcctcctgggttcaagtgattctcctgcctcagcctcctgagtagctgggattacaggcatgctccatcaccccagctaattttttatttttagtagagagagggtttctccatgttgatcaggctggtcttgaactcccgacctcaggtgatccgcccacctctgcctcccaaagtgctgggactgcaggcttgagccactgtgcccagcagcagagtttgaaaatttttatcttctttgactactcttaaaaaattttatcttaggttttatatatttgatgttaacattattataagtttcttctttaaatttcttcattcctattttggttctagagttttatcttatttattttatctttattccttttatcttttcatgctctctaaattcattcccacttttattggttaatttataagtttcattgcatcatatttttttaaactatatgattccatttatatgaccttctggaaaaggcaaaactataaggtcagaaaag

SEQ ID NO: 247626 - DNA, 391 bp, Homo sapiens
caagagctgtgccactcgtgaagatcctctaagagtacaagcatgggatgccatgaagaatggcaagtgttttaaatgcacagaaagaaaacacatattcaaatgagattttggctatgttggagaaaatttattagtataaatattcattctagtctcctctaaacagaagtccctgtacttacttctcgctgaggacagccagcttctcagaggcactgagtcctctgaagaggtaacaccacagaggcagcagcctggctggtggaaatgtgcttcattaagccttcggctgcatggagaatcctcttccacctattgagaggagtcagcgacttctgcctcactgggtctttttaataccagatatttatacttcatacaggttgcc

SEQ ID NO: 247627 - DNA, 280 bp, Homo sapiens
agtgcagggactacaggcgtgagccaccgtgctggacctgtacagttttttttaactacatttccaatatatagtcaatgcttaacctaaatgcatgcattttttcatgttctgtaaaagagggaaattcttatgatatcaacatcataatctcttatcagagttcataccaaatacatgcacgatgaggccatataatgaaaaattgctgctggggagctctattttaagaaacagtctcagatgtgacaagtagaagcagcagcagagtaaggtgatc

SEQ ID NO: 247628 - DNA, 227 bp, Homo sapiens
ttaaggtattttaagcactgaaagaataatcagcactaaatattgattattgttttaccaaggagttatagaatatttgtcctattagaaaactttatctgctgaaaatgtaagccttagtggtatctccactattatcagaaaaatttgaatttgcttatgaactccttaaagcctgattgtgagaatcatgccactaaaaataaagaaataaacaagaaataaac

SEQ ID NO: 247629 - DNA, 435 bp, Homo sapiens
attgtgaaatggacctactccagcccatttccacctttgagtcataggttcagaattcacattccatggagcaagagtttggttggccaagctggtgttctgtgccatagtaaagcaaaaacaaaacaaaacaccaaaatgggaaagaagagagaaagttgtcatatgttcatttcacctccctgctccttaaacaaatgatcagatatttaaacacacagacataaacacacacaatgcacacacaggatgtctatattgtttttgctggaaaacagtccagatgcactggggtaccatgaaattaaactcccagagggccagaatctctgttctgttgtctcctttccaatgtgtctgtaagggagcagttttatacagcctggaccttatgatgctataagtcagtcccaagtcaatcttatatctaaaaaa

SEQ ID NO: 247630 - DNA, 448 bp, Homo sapiens
agtagtctcactctgtcacccaggctggagtgcagtggcaccatcttggctcactgcaacctccgtctcctgggttcaagcaattatcctgcctcagcctcctgagtagctgggattacaggtgtgcgccaccatgcccggctaatgttttttgtattttgagtagagatggggtttcgtgatgttggcaaggctggtcttgaactcttgacctcaggtgatccacccaccttggccttccaaagtgctggaattacagacattagccaccacgcctggccagattttgcatttctaataaactcacagatgctgcctgtgctgatggtccactgatcccattttgagtgcaaggagttagactatgtcatcaggagaatatcagctgaggctccttcaggtgtttctgtgtgagggctgtcctgtcctccatatagtatatagcttc

SEQ ID NO: 247631 - DNA, 471 bp, Homo sapiens
tttacaaggtctcactgtctttgtgttgcccacattggtcttgaactcatgggctcaagcagtcctccttcctcagcctcccaaagagctgggattccagacgtgagccaccgtgccctgctgtcattaacttttgataagggaaattttatgtcaggaagtttgatctgacaaaatggttacaatggataggatggatcagaggctataagacttattcacaggatgttgctacagatcaggttgggccattaacagcctgaatttgtgatagtgtcacacaaacataaggtaggtagataaaactgtgtgcctaccttgcacagatatctgtgagtattgaaacgtttagactaggcgcagtggctcatgcctgtaatcccagcactttgggaggccgaggtgggcggataacctgaggtcaggagttcgagtccagcctgaccaacatggagaaacccatctcaacta

SEQ ID NO: 247632 - DNA, 774 bp, Homo sapiens
tgtgtctcaagcattaggagtttcaaaaaaccctatgagtcctgatttgggttagttttatcttcatgaaagttagaaaatagcatttcttttctggatattatttgtctttatcctgaattctgcaaaacatgttataacaagaattgttggctattaatatatgttactggttttaaagttttttatttattattaacaagaattgttggctattgatatatgttagtggttttaaagttttttatttattatttatcttatttgattgtgttttagagacagagtctcactctgttgcccaggctggagtgcagtggcatgatcacagcgcactgcagccttgaactccttaggctcaagcacttcacctgcctcagcctcctgagtatctgggactataggtgtgagccaccaaacgtgtctaattcttgtttacaatttatttctgtagagaaaggatcttactatgttgcccaggccagtctggaactcctggccttgggcaatcctcccacctcggcctcccaaagtgctggggaccactgtgcccagtctattttctcctttaaatagtgttttttttcctcctttaaaaaaaaccaaacctttagatgaggaggaaaaggaaaggaaacatgatgtttatggagtgattgttcagcatccagtcttacgctgggtgctttacttagtttatcgcaatgttagttccatattacagatgaagaaacaatggcattttgataatgcaaactgcatagatctctaatt

SEQ ID NO: 247633 - DNA, 456 bp, Homo sapiens
gcttgctttagaccttccaagctcaatcagatcaacgttagattattgcccctttcttttatttgctggatcttattatttttaagacagggtctcactctatcaccctggctggagggcagtggcacaatcatggcccactgcagcctcaacctcctgggctcaagtgatcttcgcaccttggccttctgagtagctgggactacaggtgcttgccactgtgcccagcttttttatttttattttttgtatagacagggtctcactgcattgcccaggctggtctcgaactgctgggactcaagtgattctcccacctcagcctcccaaagtgctgggtgaaccacgattcccagcctcggatcttattttttatttccctctgaaaatctctacctcacagacagaagctttgattgtatgacagctgtagtatgtgacatttgctaaaactta

SEQ ID NO: 247634 - DNA, 467 bp, Homo sapiens
ctgaagctccagattgagcttgtgaataaaacaacaggccagagcttcaactagcctgaactcccttcttctttatcatataaattggtaagaaaaagactgcaatctcctcccaccaacaaacaaatggacaaagcatataaatagacaatgggaataaggaaaaaaaacctgttaggaaagaagcttataaagacattcaacctcactggtaatcaaagaaatgcaaggtagataacaagacccatttttcacctattaatttaggaagaaaactggaaatagccaatgttggtaaggctgtggtgaaaccagtattcatcctgcactgccgaaggaaaagtataaattgacacaacctttttgaaaggcaatttggcaagcattaaattatgttcatatccttgacccagaaatcctacttctgggaatttaaagaaatatgcaaaaataaaaaataaaaaaat

SEQ ID NO: 247635 - DNA, 496 bp, Homo sapiens
ggggaagggatggggcatggggtgaagtctgaattcttccccatcttctgaaaagtgaggggaatcagctccttcacccgcaggcctggagagactgagtcaggagtgcttagcgggtttcctttttaagtgtgtgctgatgcttcaagtgggtaagtggctgaggttatcagtagagactctagaaggtgcagttctcttggaatctgaagtatttgaggacagaaaatcatgctgctttctggtggagtatggtaagaataatcaacacggagagttgggcttgtttggggattgcagtgagtgaggcatgcctggttaatgcaaaatgtgctgctccttcccaggcagtggctgcaaggcctctttcctttcctctgtgcagtgcagcgaggctgcccattgtcccatgttgttcgtagccaggcgtgtcttgccaagtactgtgggaagccccaagattttgctcaaatacacccggagtgggtcaacctga

SEQ ID NO: 247636 - DNA, 475 bp, Homo sapiens
ttttgtgggtgattggtttttcccctttgtctgtttttaaggtcttttaagatattctcttattctttaatgttcttcattttgcatggctaggcatagatttctgttttttatcctgcttgagaactttagggttcctggctttgcaaatttatctctctcaacaattttggaaaattctcagatagtatttgttttatctattatttcctcttcctcacttttccagtatccttttatggaattctgatttttctgattttattacaattttagacttttcactttaccttccatgacttttatcctctcttttactctttttaaaatcatttttccctatagaatgaattttggataatttctttagatttatcttttagttcactaattttctcttcaactataggtaatgtgatataaaatgtaatcattggcattttatcaatttatcaattattattttttccttttc

SEQ ID NO: 247637 - DNA, 456 bp, Homo sapiens
aaagttccttcttttagggtcttctgataacaccagattggaagttctttaaagcaagggcctcgtcctaccatcttcacatccccaacagcccccagcaaagtagtctcaggcactgctaaaatcttacttcaagaattaaggaatcaatggccagcgctagagacaacagtgaaaaaaggaagaagtgaaatagcccgggaccctccaggcaagaggggtaggagatggttccttcactgttttcttactcgcgtctgctccctgctcactaggaaaggtgttcgcctccactaagcaaaggtgaagtgggctgggacaggggaactccaagccagcttggaatgcgccctgaaatgagacctctaggctttctctaaaaagcccctttgtcctgtccaccctgctcccctcccccactgcgccctccacatccaggctggcccgagactttgc

SEQ ID NO: 247638 - DNA, 390 bp, Homo sapiens
tcaatcgcttccccgggtcattctaaagtacagccagagttgagaaccactgttctagaagcctgggatggaaggtgggtttccttgtggtttgtgcccctgcctggcagctcagggatcccatttgacccaggactcctaaggtcatcatgatttttgtaaaaaattgagtaacccagaatatggaaatggagtgaaagagtatcgttcacgatgggtgggatggtatttgtgaaggtgaatggatttacctcttcctaaaagcagagccaggcactaacttgttagacacctgataatgggtgcaggcttacgtcttggtccctgccaggcaggcttacaaggtagagaggacagttgacagagtgtttcttcccaaaggacaggctg

SEQ ID NO: 247639 - DNA, 254 bp, Homo sapiens
cggtgtaccagcgcagctgtgggaagaagcaagtgccctcttcccatgcagcctggctgtggcagtgtgaggctctacgactccagcaatgattaagaagcaggtcttggccaggcatggcggtcacacctgtaatcccaacacttttggagaccaaggtgggatcattgcttgaagccaggagatcaagaccagattggacagcacagcaagaccctgtctctaccaaacactttaaaaaataaactttgtga

SEQ ID NO: 247640 - DNA, 1563 bp, Homo sapiens
aatgtgactgagaccactacaatggccatgcctaataattacttatttttataagtgctggatgcgttttacccaacataatagcagatacagacttttaagcttaaaacctaaatgtcatagctccaaacatttggttgtatgttgaaataactctcaagcaaaaattgattttgaaacgagagctgtaaataaataaaataaatgacataaactcataaatatctggaagaaatgcttataaagaggtcagccttaaaaatgtcatgaggtctaatgtgccgctcttctatttctatggatagtacttggacaggacaaggactcaagggtctgctggtccatctctgcaccttgaaacagtggctagggcaccaggagtaatgcttccagccaaaaccatgtggttagtgtgaggagtccctccgggttaaggagtgtgtcagcataatgtgacctgaagaagaggtatacctcataggcgcccaggatcaaggtctccggcacacattgaaatcccccatgcccaggtgtggtgaagtgaatccctcagctggtgctgggcttccaggtgaggcatcctggagaggatgtgcggggcgaaggtcatatgagcacctgcagcactggaatggggtgtcactggcctgttaggccgttgctcaccaggacctctcctgagctcctacgtggcttagtggtaagtgtcccatctacccgaccccgcagcccgggtttctcctccacttacagacccgtgccctcttggggagaatgccagcctccctggagactcaggccctgcaggacccacatgctgtcgtctctcatgggctagacactctctggtgcacagggattcccagacagtgaatcccaaagccctgcaggttctgttgcttcttccctgaatgcctgccttccccgaccgaacacacaggaagacacaggtagctactaggttttatttccctccggatgtcatttcaggtccatgacatctcctttaggtagttcgcccagccactcttttcctcctacctctgccattcatgagaactgtgaggactcttcgtgtctccccagcgggcaggcttcacgggtcctgaagttggattgtcaaacccagtggtcccctgcttgccagctcaagagctgcgtttgaggcacacctgtgggtgggagtgtgggccccacctctggccaaacaaaggtacacaaggggaaacaggtgcaggtgtgtacaggcgtgcaccagctcaaacatgcaggctggaacgtgcacacgctcacattggtaccagggaaactgggtgggtgtctgggtgtctacaccaatactcagatgaaccttaatgctcagccacattcccttgctggacacacacagaaggtcccctgccatttaattgatcgtctacagtgggatttatttttacttttatacttttttaacttaccaaagtatgttgcattctttcccccatcatgaaaaagactttgatataagtaaggaggaaaagcattttttataataaaatactttatctgcatctatactat

SEQ ID NO: 247641 - DNA, 809 bp, Homo sapiens
tttttttattcaataactagacaaaagatctaagataatattaaactcaaaacagtttgtttcaaagaacaattggttaataactcagctggcacagggattcatacacagtttttcaataaatatttaaatgaacaattcatgtcacacaacttgcttttaccctagtactgagtctcacatcaaagaaatttgaaagatctataacctatgtgaaatgaagtctctgctttaccagaataatatgtggcaggtaataaatatgtaaagtacaccaaatgaaacatattttgcatagataacagtccatatcactattataattaaagaaatatatgtacagacatgtaccaatccttttaattaattttagaagatgaacagtgattcttagaagtgagtaattagactccttttagtcttatgctgttagatctttgtggaccagctgagtaaatgaatcttcaaatcaacctttctttttctgctgctcttagagcagatttataaaaatcctaagaatgtcttcaaattagaaaaatttactacattttaacctacctcatcagtttctttgtgataatagctgaaaataactcaaactgtacccatcttagttaggctatatctctgtgaaatgaaaggaaccacttaattttttttatataaattagtgaatcatttgctggagcttagaaaatattaacataccaaaatttcattatgatgatatttatattgctttttgacatgccaaaggtacatttacatattaccatatttggatgacttacatagtctggtgtaat

SEQ ID NO: 247642 - DNA, 285 bp, Homo sapiens
attgcactccagcctgggcaacaagagtgaaactccatctcaagaaaaaaaaaagaaagaaaaaagaaaacatgaatgtataaaagtttgtatccgtttcaggaattcttgctatttttgagttccagagggagtttgggccagcagagagatggcccaaccaggaacccaggaactgaccagctcccgatctctgctcacgacattccctgaagggcccgtcctctgggttcccagtgctgatctctgtcctgatccctatcttctggcatcccagggagccag

SEQ ID NO: 247643 - DNA, 741 bp, Homo sapiens
caaatacttgatttttggatatctgttctgccttacagctgtgccttcatgttaggccctagaagctgcatgcttccttggccctgtttcttaaaaggctccagcctaaagccagtaagccaatttttaaaaatcttcaaggaaatcacatttaagtgtgtctgctttccttggccatcttaactgaacttttacaccatttttttttttggctttagtaaaatataaatcctccatcttgtttcacatgagtcatctctttaaaaatgcaaatttagaattgcctcactaataactgtttacagtagggaacaagtattcaaaagacgaatgtgctaaagtggagaggaaaaactggcaaatgaaaaatcttttgaatccctaagatctacttctgtgtgcctatatgtctaaatatttatatgaattatgcatgtaatgtttgaataccaaaaatatgtgaaaaggctctaattggctttttaaaaagttcttaaatattgtatcagaaattagaaattagaaacttattcccaaatactttttcaagttttggttaaaaagaaacttcaagatgtcttcacaatagttagcatacattattgtttagatgtattggtccagtggtttttttccttttttcttttttttattttctggtcaagtggttttattttatatcttctagctactataacatgtcaaaatttgccacaaagttacaaactataaacccagacc

SEQ ID NO: 247644 - DNA, 955 bp, Homo sapiens
taatgagatagtacccctttgcccctaccctgcacctgactcaactgggtgctgcagccaacagattgtggatagaccctctcctccatccccatgatgcaataatgagccagaataccatatcctctcaattagagagctgaaggaggattactgagagggttagagggaagaatttttataatctgcatatgaagtcctggacagatccctgaacagacaatgcatgaagctgaccaaaatcaaaacagcaaacgctttaagaactcagcagtggtatagaataactcccggattttagattgacttcgggataacacataagtggggcagaccagaagcatgttggaaaggctttgagaactaaactgacatttgaactgcagcccacaaaaataagctaagaaatgtatatgcaacctaacaggaagtaaaaaaataggaagaagggtgtcataaaataatatgtaaaaggtacaggataccatttaaaactacttgtcatattgagaactaggaaaatttcaattccaatgaaaaaatacaattaacatatgccaacactaagatgatatagatgatgattaattccaaatattttaaagcagttatcattaaaaggctatcactttagaagtaaaaaatgcaataaccaaaacaaaaaccacactagatgagctcaatagcaggacaagatgaaataggaaataaactataaacttgaaacctgagtaataccaattttaaaatctgatgaacagaaaaaacaaattaacaaatgaaccatcttggatactctggcagtacaaaggaaggcagggagagggggagtaaaatacctaacatatgtgtcctcagagtcccagaaaaaaagaacagtacaaaactaaaaaaaaaattttaagaaatatgagcaaaagcttcacaaattgggggaaagtcataaacatacaga

SEQ ID NO: 247645 - DNA, 682 bp, Homo sapiens
agaaaaagcatgttggagttctgtatgttttgcacttgtactgaatagcagtttttgctatgtgtggccttttagagttgagcaagtaaataattgtatgcttgttgttgagcgtggtggtactggaatgtcacagccgctggggaggggcaggggaatgtcacactgcagggacagtctagcagcctttctctttctgagccgcctcctctctcctgtgactgtgggtgacaacctcaaaaagcctcatcatcactggctacttttttctctgcttctcattgaaaactcttgtttctggagatgaatgctaattagcttcagggcagtgcggtcatgtgtcatgcattccaggccgcctggcagctgtgattgtgttttccatttagcaaatgtattagaataattttcaggacatttccattaggaatgactttttctttctcatccatattgtttttgtctcagaaatgtctgcttttataacaaagcatgagtggaaaaatgtgaaattatcaactgttaaacacacacacacacacacacacacacacacacacacacacacaacttttcttagttgcctgctcttgactcagtgtggaataccttgaaagttgtcggagccgggcaggtttaatattcctgagcagtgcaggatgctggccaatcagctgatctc

SEQ ID NO: 247646 - DNA, 569 bp, Homo sapiens
gagacagtcttgctctgtcaccaggctagagtgcaatggcacaatcttggctcactgcaacctccacctcctgggttcaagcaattctcctgcctcagcctctggagtagctggcattacaggcacgcaccaccatgcccagctaattttttttatttttagtatagacgaggtttcaccatgttggccaggatggtctcgatctcttgacctcgtgatccgcctgcctcagcctcctaaagtgctaggattacaggcatgagccaccacgcccggcctcttcttgttttttatttgtatgttctttttcttgagcagttttgcccgagctttgtctgatttatgatttgtttcaataactaactcttggatttgtccttctctgttgttttgtatcttgatttgtatctttttttctccttgtatcttctaagtttccttcctagtatttttaggctttattgttatttttctataatcttatattgaatgatcagctcattaatattctttcatcttcaaacatatctatttgattgctgcattaaagaaatctttcatatacagta

SEQ ID NO: 247647 - DNA, 362 bp, Homo sapiens
aattaaattgcataaacaagaacaatggattcctagggtgtttaaaaacatcaggattagtgagtattaaatgaaatatcaggcattcttaagataaccttttgcagcataattaacagagtcaaaggggtatctttcaaagaaaattaaagaagatcagatagcccaagtgattaatactgaattttctaccaagtactgacctgtctgcaaacagggttagcatgggttatggagccaaactgctggggttcaaacaccattaaaattactagctatgtgacactggaagttatttgacacatccgtgcctcagttttgtcatctatagattgggggttgcatctacctcatagggttgt

SEQ ID NO: 247648 - DNA, 203 bp, Homo sapiens
taaaaacctagttcaatttatgaaattcacaaagaaatgttttcatgaagttgctaatattttctgcttcacttaaaacccaccgtgcccagcaacttttttaaatgctagcatatttattatctggatatattcgaggaggaacaccatgaaagtaccttcatagcttttaattctttagagttcttggagtataactacct

SEQ ID NO: 247649 - DNA, 384 bp, Homo sapiens
ttgagacagggtctcactcctgttgtccaggctggagtgcagtggtgagatcttagctcactatagcctagacttcccaggctcagatgattctcccacttcagactcccaagtagctggaactgcaggcatactgcagcatgcctggccaattttttgtatttttagtagagaaagaggtttgcacatttcctaggttggtttcaaactcctgccctggcctgccaaagtattgggattacaggcatgagctaccgtgcccatcggctaactttaaaagtttttttttttttaaattggcttgatgttttccaaaaagaagtgaggtgtcatccaatcctaccctataaactctgtgtacatacatatatagtacatataaaa

SEQ ID NO: 247650 - DNA, 629 bp, Homo sapiens
gatggccgggatgggcatgaggtggccaaggatgctgtgtctgtagggctgctgcaggcactcagtgagtctggggccaacctcctgtggtctgctggggctgaggcaggtagcatggttaaacagtgactccattctctctccacaggcagcccgaatgggcatgcagagcctgtatcaggccccaacccagcaaacctgggtggccactatctgacccccaaaggtggggaggggcatgggcccaggcccatcagcctccctgctgggacagggacctatggcacctgggggcagcttaggtttggcttaagttgtggtgaggggccttgccctccccctcccagcccagggtccaacctgacccagttatcttccatggccattccttgtcccacccccacccgatcataccttcccccctctgccacagcttagcatgaatcttctttattgtcctgatttgtcctgtttgttggtttttatttgtggggaagggcagctgagccaaaggggtcagaaattctgccctttgcctccaccacatggcattctggttttggtttctgtatagttttgggtctttctatgctggttgtatttatattaaacccctggttagtaaaaaa

SEQ ID NO: 247651 - DNA, 727 bp, Homo sapiens
aaattgtgaagtggtagtaattgcaagtatggctttatagataatatagttaattgataccaccctctcaagcatatacagcacatcagctgctatgagcctgggtgatagtaatggtgtctatggcatttatgatgcattgaggatgacatgagtaaaatgaaaacttagagcactcaccagggtcattctttcatggacatctgatgcccatggtcaagtaaatttttaatgacacatagtcactacacacctttcagccttctggagaggtaagtgtacattgatctgtcctaattagccttgcagagtacttcagacatccctgcaggaagactattatttaataaaataggagctgtttttacacaagctcagcacttgctccttggatagctgtattgtttttttgctcttctctcttttttttaaaactcatatctcatgtctcatgttcgtctttgtctttgacaatgtagtattaatgcagctgcatgaaaaagtaagcaaaattaaggaatgagtctgattatgaaggttcattgctattataagaacccatagagcacacatccattccttccctaatgtatagggtgctgactgcataaaattgcttggaaagacattaaggatatgcaggcaattctgttgaggtatgcagtgggatgcttttatgtttggtgataaaggtggctctggaatatctgatttcataaaaaaaaaa

SEQ ID NO: 247652 - DNA, 356 bp, Homo sapiens
agacagtgtctcactctatcacccagcctggagtgcagtggcataatcatagctcactgcagtcttgaattcctagactcaagtgatcctcccacctcagcctcctaagtagtgagtagctagaactataggtggatgccaccacacctggctatttaaaaaaaatattttagagacggggttttgaacttctgggctcaagcgatcctcctgccttagcctcctgcatagttggggttacaagcagaagccaccatgcccagctcaatgttggatttcttaattccatgagccagtgtttcctagctgcttaagtccatttactttgagtttctgtctcttacagccaaaacata

SEQ ID NO: 247653 - DNA, 354 bp, Homo sapiens
tctctgggcacagccctggaacccccatcagtgaactgcactctgacaatttggagcccagctttcagccttaagggactggactggatattccctgtttcacccgaaatcaactttaaacaggtcaacaaaacaattgaagagaagtgtctggagtacttcatacgaagacagaaatcccctggagtaaagtggaaagagacctgtctctataaacaactgaaatagcttaattttgaaagcaacaaaattattttttatgaagaagaaaagtctccactgcattcttcacaaaataattcctagtatttcttaatgactattaaaaaaatctaactacttatattacaatac

SEQ ID NO: 247654 - DNA, 1111 bp, Homo sapiens
catggtagttcatgtctgtaatcccagcactttgggaggctgaggcaggcagatcgcttgagcccaggagtttgacactaggctgggcaacatagggagaccccatctctacaaaaaaaaataaaaaattagccgagccaggaatggtggctcacgcctataatcccagcattttgcgaggccaagatgggcagactgcttgagcccaagagttcaagaacagcccgggcaacatagcgaaatttcctctccacaaaaaatacaaaaattagccgggcgtggtggtgcaggcctgtggtcccagctacttgggaggctgggcaggaggattgcttgagcccaggaagtcgaggcttctgagctgtgatcacgccactgtactccagcatgggtgacagagcaagaccctgtctcccctcccccagcatatacacacaaaaaattagcctagcatggtggcacgtgcctgtagtcccagctactcaggaggctgagacaggaggatcgcttgagcctgggaggtccagactgcaatagctgtgattgtaccaccacactccagcctaagtgacagagtgagaacttgtctcaatcaatcaataaaaataaaatgaaataaaatggcagagtacagccagcactccgtatccatgatgtagaacctgcagatacaaagagccaactgtaacctcctcaaaaatccactggagaagggaggcctctgaacaaccaactctaatttcaagttcctcacttctttagtgagagtatgaataaaatgctagggctacacagaggttactactcatttatggaaaatagcaaacataaatccttaaaagaaatgcaaaaaagctgcagcagatccacagagagctcatacaggccatgacactatactgaccacagtttaattcaagatcaacagaaggctgggcacggtggctcacacctggaatccctgcactttgggagaccgaggcaggcagattacctgaggttgggagttcgagaccagcctgaccaacatggagaaacctcatctccactaaaaatacaaaattagccaggcgtggcagcgcatgtctgtaatcccagctactcaggaggc

SEQ ID NO: 247655 - DNA, 533 bp, Homo sapiens
tgggaatgtctcagcccaccttggctcccttctccagcaggagtggaggtgtgtgatgtcaaacaggcccagcctctctctcagacccggttctgggcccacacagccccttcttcctgaaagcagaggtggcagtaagaggatggctttggcctttgaatgttctcaagcgatccaagttcagagtatactgttgctgtcctctgtccctgaagcttctctcctactccttggacaaactcacttctcccctcagggacttctctcatgtagcagagtgtacacctgctgccccagcaaggccttcacaatgatccaagcctggcctgttgctccagcttctggaacctcccatggccttcggtctacttgaatgctcctgaggccaggtagctcatcactgccggaggacctgttgccactcacttctagccacaagaaatgtctgcctgtcctgagcaaaacccaccttggaggaacttctttactcccttgttgaatttttggctctaccaaataaacatgaattgctt

SEQ ID NO: 247656 - DNA, 887 bp, Homo sapiens
gtaaatctttatgaccttggagttggcagtagactctagatatgacactaaaagcagaaacaacaaaaaataatgaattggatttaatcaaaattaaaaacttttttgtgtaaaagtatactatcaagaaaatgagaagacaacccacagaatgggagatatttgttaatcatatacctgataagaatctatgctgctgtctaaatgtttatgtctccccccacccaattcatatgtgaaggcctcaaccgcaaggtgatgggattagtgcataaggataaggatggaggcccttgtggccatgtgtggtggctcatgccggtaatcccagcactttggaaggcggaggcgggaggattgcttgggcccaggagtttgagaccagcctgggcagcaaggtgagactccatttttacaaaaatttttttaaaaaaagaaaagaggcccaagagagaaaccccctaccctttctgccattagaggaagtgggccttcaccagacagagtctgccaacaccttgatcttggacttcccagcctccagaacagtgagaatttctgttgtttattagctacccagtctgtggtattttgtaagagcagcccaaatggactaagacattctagtagcacaatatagaaagaacttttacaactcaatgaaaagacaactcagaaaatgggcatggtagaacttgtcctgtgaagaagccaagaccaaaaaaaaaaaaaaaaaatggacataggacttgaatagacattccaaagagtggcaggtgccaacaagcacatgaaaagatgatcagcatcatgaatcgttagagaagtgcaaattgaaactgcagtgagataccacttcatggccagtaggacagccatttcctaaa

SEQ ID NO: 247657 - DNA, 568 bp, Homo sapiens
tatacttgaagatatgttaagtgtgattaaagttttaaattgttacaggaacatttgttttccaaagagatcaaagttgggctttatgcacacatcttaccgcagttgcagtttataattatttatcaaatgtctgacaaggctaatgagctttgtttacattttccagccctcttgctagaattacagtttattttttccacttttgaaggctacaaatatgcataaaatcacaactggcagaattttctcaaatagggggagtttgtcatacagcaaatagcttcacaaaacacctgaagcttaagtttgaagtatctaaaattcaaaaatctcctgtaattatagtttgaattttcaaagaagcataagtttttagatctgggaggttgttatagagattatctcatccaatccctatttattttgtcaaaagacaatattgcagaaaaaattccactgggaatttactcctaatagagcattgacttacaaacgggaggtactaatgaaggggggcctctcactatatagtcatatagatgttatatacccaaatgtctgaccc

SEQ ID NO: 247658 - DNA, 626 bp, Homo sapiens
tgaaaaattgaatcaaaagctattaatctgaaaagaaacaaattagcagggcatattgttttccttgaatgctttaggttatagaacaggttaataacaatatgaattcaacatagtgggtcccaaagaggaaatgatgaaacaagagaatgatctggaaaagtgattttctactgtcctatagaaacaaattaaagaccaaaacaatattatttttttttaatgatactttagttctagggtacatgtgcacaatgtgcaggtttgatacataggtatacatgtgccacgttggtttgctgcactcatcaactcgtcatttacattaggtatttctcctaatgttatcccttcccccgtcgcccaaccccacgacaggcccgggtgtgtgatgttccccgccctgtgtccaagtgttttcattcaaaacgacattattatagaactgataaatagataaaaatcatcaaaaaaaaaaaaaagctgaataggcacaactcaaaataagcttacagacagaaaaaaatccttaagataaagatagaaattgcatgtgaaaagcacaaagcaatttcagcctagttcttaagcctggttgtagacaatctgcaaataggacagacaaa

SEQ ID NO: 247659 - DNA, 334 bp, Homo sapiens
gagagcagaaagactggagaaaaaatataccacaaatatcaaaatgttaactgtggcttacaaggtgatttttattttttatttttggctttttctgtattttgaaaatattctaggatatgttttttttttaaatcaggccaaatgctattaattaaaatattgatgaaatcaaagaatacctcaaaacatataaccagaaaacaataataaagataatagctgtcttactttgggtaccccaagagttgactctgagactaggtgcaagtagtttatttgggaattaaatctaggaagtactaataggaaaagtaggaaaatgagagagaag

SEQ ID NO: 247660 - DNA, 148 bp, Homo sapiens
atggatggctgtcacggtgccaacctcagatgcactgagctttgaaacatggcaggcctggtatgcccttgctctagcagctccccgagtgccctggacgtgctgcctgggggcggctctgccatcacggagagcccgtctcctgcgc

SEQ ID NO: 247661 - DNA, 1071 bp, Homo sapiens
ggtaggactgtactctcctgcttcagaaagaggaaatgatattagagagaggatctagtcatgattgttaacattccatgagtctgtaactgcattggaaggcgtgtatggtgtgcaacaagaaacacttgtctgggaatgagaaaacctaaggtggaatcccagttgcccctaagatccatctatgtcagtaaaaagagatgtttggactgggctagagttgcctaagcttttcgaatatgaagtctccttttaacaacaataacaaaattcagcccctccctcaatgtaatagtagttatatataataactataaatttagtggtgtttctagaggcatttatatttttattcatggaaatttcatgcatatgaaaagggatacatttatgggcaagccatcagtgttgggggagtatttggtgtctttggagtgatggcccctttcacagagtccacgggcttcctggtggcctttttagagaacccctgaactgggtctttccatcttggatctctcctactttataactctaatttaagataaaatatcaggacataatctattgcaatctgctaactgaagacccttcatagaggaagttaacacttattcagtctgcatttcaaaaagaatttctaagctatgtcagatatttcctaaatgaatgtgaataaagacgtatttgttcattttttccctaatcctgtccaacacctttatttaaaatggaacttgtttgccatgactttgatgttcctgagtgattatttagatgttattttggggttgctatcaagtgcttgttaattcttctttcccacacttgacatctctgttgaatatcatttttcatagggaaccaatgaacatgactgcgggtccctttaatcatggaatcatagaaactagagacaatagatggaagatgttgctttttcctcatctagaaaatgggaataataatgttaactattttcactcagtcatcacgcataggaaataagattcctcatctagaaaatcagaataataacattaaccttcctcacccagttgtcatgaataa

SEQ ID NO: 247662 - DNA, 338 bp, Homo sapiens
ataaataatcatagtaatggattataacccattgaataaaaaggaaagaatccatgagtccatactgacataaataaatgggagagaaaagaaaactttcttacagtaggatgccaagcaaaaaatgtagaaggaataacactgttagaaagtaataataataataaaagaggaatggtaaactcacaaatccctttcttcaaaaaggcaaaatgttactggcacacctgtagtcccagctacttggggggctgaggtgagagaattgcttgagtccaggagtttgaggttacgatgagctatgataggtgacagcagagcaagaccctgtctcaaaa

SEQ ID NO: 247663 - DNA, 603 bp, Homo sapiens
tgggtctttaagaaataagttcttactaggcactcccaaaccttgctgttttcacccagcaggcaaaataggtataaacgtgtgcatatgtaaacatgcatattactttaaaacttactgatatcttatagctatttacagttgaagaaatgatgcctcatattcaacatctgaaaggagcacatagtaagaacttatttcttaaagacaaaaagaaaaagaattattggctggtgacagttcttcatgatagacaaattaatttaaatgagcttgccaagcagttaggtgttgggagtggaaatctgcgatttgctgatgaaacagccatgctagaaaaactaaaagttggtcaaggctgtgccacacccttggcacttttctgtgatggtggagatgtgaagtttgttctggattctgcttttctcgaaggtggacatgaaaaggtgtactttcatccaatgaccaatgctgcaaccatgggattgagccctgaagactttctcacatttgtgaagatgacaggacatgatcccataatactaaattttgataaaaacaactaattgggccaatgtttagaataaatttctttctgaaagc

SEQ ID NO: 247664 - DNA, 756 bp, Homo sapiens
tgcatgtcacatctaatactgtaacactttaaatagctttcatgtcagttttaatgttaatgggatttaatttattactaaagtacatttttgttggttaagggcactgcacttttctgttttttaatgtgggattttgcgtaaatattctgtacctaagactttgtgaaagtgtgtctgtgccataatcaacaaatgatatacatcacatgcaagtcaattttatttcaatctatcataagcagtaggcgtgcacgttaagaaaattctctggatattttcataaaattacatgctcccttacctgacaaaacttgttacagctttccaaaccaaaatttccacattttgtttctaatttttaatttcaatttaataattatttaatattctatttgaatttataataaagtgttgatatccaggaattccctgaggtgtcaactgagatttatatactgacagataacccagactcacccgctctctacagtgacttctgacacgatcttccaaacagaagggatttaaattttttcttaagggctttatgttgttattattattatctcacttaattcttaattcttatcaggtggatattattttcctttttctaaaccactgtacttcagtgtagcttattattagaagtcaacattacaatgatcaaatctttgaaagccaaaggcatacgtatcaaaaagtcacaaaaatatccttaaataagctttctttagccattatataccaaaa

SEQ ID NO: 247665 - DNA, 629 bp, Homo sapiens
ctggaaaattggggtcattgattggtcagggtgaggaggatgaaattatcaggatgtggagcctgtgtgctttggtgagtcagcttcttggggggtccttcagacctgctgatgtgggtggttttagtggcatgtaggacgtgaaagaatatctcaaaggaaaacaacatttcataaggttctagttgttatctctagagcagataaggggatctataatcttgtaacagggtctatctgattctaagacaacagacaaacaacaacaaggaagcgcgtcagagaacaggccgacctcatgatccatgctgcgtgtgctgcaagctcattttagtctcatttctctccctcccttcttccctgatgaataaagtttattgggatggtttcagatgctcagcttttccatatgattaggtgagtgatccagaacccttccaaagaaccctgtggactcaaccctctgtttgaacaacatacaagataatatgagacatttatttatcgaggaccctctgagcacctggcactgtgccagattctttcagatatataaaatttcacttgctcctgttgattctggaaaggagcaacggcatcttatgaagctgtagcagatactgtcctgg

SEQ ID NO: 247666 - DNA, 647 bp, Homo sapiens
aggtttacttcaaacagttttgcagaacttgtcagaagtcttataacccttaccgagtggaggatatcacctgtcaaagttgtaaacaaacgagatgttcctgcccagtaaaacttcgccacgtggaccctaaacggccccaccgtcaagatttgtgcggtagatgcaaaggcaaacgcctgtcctgtgacagcactttcagcttcaaatacatcatttaggtgaaagtcagtgttgctgtgcatgcgctgatggagtagacgagtgagcttttccgtgcctctcctccacctctcccttctcaaaatacttcatgaaaggcagtgtgttctgaaaaagccttcaaataaaggtattgcaacacgatttatacattgcataaaatctgtctttgaaaataaagtttcaagagcgcttgtcttgtgctaacagtctgggcctgtcacttcacctttatgaatgcttgctgatggcatagagtgggccaggctctgagttaggctgcagccacttggaaaacaatttaggggggtgcttgtagacgaggtctacttatttaggcaggtctggaggactgaagcttagaaggaagttaactgaataaaaagccgcctagcgatcgcgccactgcactccagcctgggtga

SEQ ID NO: 247667 - DNA, 402 bp, Homo sapiens
catctaggctacaaacttgtacagcatgttactgtactgcataatgtaggcaattgtaacacaatagtaagtatttgtgtatctaaatatagaaaaggtacagtaaaaatttggtattataatcgtatggggccaccatcatatatgtggtctgtttttgactgaaatgatgtcatgtggtgcaggactgcatttaaaatgtgtctcttgtaagtaacatatagttgagtcttgttttttaatagtctgataatctttgtcacttaactggaatattctatttacatttgctgtatttttaaacataactagcatttactaattattaatgtaattgagtttgcatttttataattactaatgtaacgtaattactaatataaataggtttaagtcctgtct

SEQ ID NO: 247668 - DNA, 449 bp, Homo sapiens
ctgtgctggtttaaaataggtccataaattctttgaccctcctccctgcaaaagacggagaataaatcctctcctcttgagcatgggcaggacttagtgacttgcttctgatttggcagaagtgatggtgtgtgtgacttctgagactaggtcataaaaggcatgtggcttcctcgcactttctcctgggttgccatgttgtgagtaagctcaagcagtgccacaaaggggtccacatggcaacgaactgaagcctcctgctacagccatgtgagtaagccaccttgaaagcaatcctccagtcccaaccttcagatgactgcagcccccagtgatatctttgtaacttcattagagatcctgaaccaaaatcaccctgctaagctgttcccagtatccaactttcagaaattgtgtgagataataaacgtttgttgttttaaactact

SEQ ID NO: 247669 - DNA, 466 bp, Homo sapiens
tgagcagtttcatggcttttctggcataactttccaaaccccaaatgccctcggatgcactcagatgcgccgtacacaacaggaagctcagcaggacacgcagtctaggaacatgcacgacccaggagacacccaagacccaggggatgtgtgacccgggagacacatgtgacatcgccacggagcacagcagagacggaacagctgcaaaggtcacggcgcccacccagagctggtagatggggcgctggcgccgcagaggtgggccccacagccttccacacaggggcatctgacccacggcccggccccttgcaaagccaaggccgcagagggggaaggtgcaggagctctgagatgaaagaggtgatgagtttgcggcaatgtaggaatgaaatacatcggccacaggaggacgcaggtgcaaaccaccgaaataaagccattgccacacaggcggacagga

SEQ ID NO: 247670 - DNA, 344 bp, Homo sapiens
cataacttccattagctgtccccaaaagtgtatttcctacctagttattacgcatgaaatctctcgcataatatgaagtaatttctaatacccccaaaagtaaaaaatgtgagagggatctattttcaattcttagggttccacgagggaaacagatgtctttttttccccccaaaatggagtctgcagcacctcctctgtttttcccaaggtgtcccaagctgttaaatattatcttaggtcctctcgtgtgcatcaagaatgtcaagaagacaaaatggagaaaattcagttgactgagaagaaaaaaccccttttccagaaaaacacaatccacgaagagg

SEQ ID NO: 247671 - DNA, 342 bp, Homo sapiens
gtcttgaaatgcatatcttagtcactgttacttcttttaaattgttttaattgtataagataaaaaccaaaacaaacaaaaaaaatgctaccatttcaggagcatacatctagtcttaaaaatatcataaatttgggccgggtgcagtagctcacgcctgtaattccagcactttgggaggccgaggcgggcggatcacgtgaggtcaggagttcgagaccagcctggctaacatggtgaaaccctgtctctactaaaaatatgaaaattagccgggcgtgattgtgggtgcctgtaatcctggctacttgggaggctaaggcaggaaaattgcttaaaccc

SEQ ID NO: 247672 - DNA, 403 bp, Homo sapiens
tgacatttgttctaggtaacaggccacgcttgaaataaacattggtccttgagctgaggcacaggggattagaatcaggcaacaggatgaaaaagaactttggttttcatgatctctaaattcaatgagattatttatttatttatttatttatttatttttgagacagggtcttgctctgtcacctgggctggagtgcagtggtgcaatcacagcttgctgcagccttgatctcctgggctcaagccatcctcctgcctcagcctcccgagtagctgagactacaggagtaaaccaccacacctggctaattttttgtagacacgggatctcgctatgttgcccaggctggtcccaaactcctgggctcaagcgatcctcccaccttgacctctcaaaatgc

SEQ ID NO: 247673 - DNA, 445 bp, Homo sapiens
acatatatatacatatatatgcagttacataactttgagaaatgccaagttaagcaaagttagagttctttactacaagacttctcagtgcctttaatgtcctcctatgttatcctctgggtatattctattttctaaatcaacctacctttttactaggattggtgttccaaggaaaatactggaaaatgctggtctaaatattgttaaaaattgaactcaagtgtctaaaaccagaagtgcccaatcctttactagagtgtgagctccttgaggacaagggtctgtactcattctttgtaatcccatcttgcatataaccaatataatgctcaatatatattattgaatatattaatataaatttaatataactgttgagagtcaatttgtaatgcaaacctaataagctcctgatttgataaagttagttattatgaaataa

SEQ ID NO: 247674 - DNA, 765 bp, Homo sapiens
gaaaaagttaacactcctatacaaacataaaaattcttcatgaaatattatattaaaaaacaacaaagtaacccagtcatctcaaaattgacatctatgaattccagaaaagttaagagtgatgttaaaactagagcagtgaggggaagctgaagtagaaccattcccagggaaaagaaacagagttaggccttcataatgagggacatgaaggagaatcaaactccatctgcagaagacgggaagctagacgccaggctccaaagaagagccaaggttcatacatgactgtccacagtgatgtcataagacatttatcaaccagtttataaagaagactaggactttccttaagggttcagaagtgaataaccttcttccttactgaatataaaacagaaaccaagaggcagcatgggatcacaggaggagaaatctgccaagaaaggagccaaaaccaagaaagcagacgcaaagaataaagagtcccgctcacatttctgagccaccacatcaggccagaggatactggattctcctctcctactcttccttctggtgatgccaagttttgagaactgacttaaaaatactgcttagatcagagtgaattattataatccacttatgccagagctattcatgttgtatgatttttttcccttttatgctgatcttcacttgcttttgcctacctaccataagcttccacgttaaaaatctttgccacatgtatatctctgcaagcagccttctaaaataaca

SEQ ID NO: 247675 - DNA, 924 bp, Homo sapiens
gtgggaggatggtttgagcccaggagctccaggccagcctgatgagatcttgtctctaaaattttttttaactttttaatgatgtcaaaatgatttctaaagaaagattaattctgtgacagcctctggacttcaattactaagttttaagataatcaattttaaaagttaatgttggccactcatctatctttagagatggtagctgattaaactgataacatgctttattagtgattttaagacagcaaaaccattgtagattcactcttacccataatatatttcttttcattttatagttagtctttactttgggcaataatttgtaattcttaccatccataagaatacctgttctgcaatgagatcacatggacacaggaaggggaatatcacactctggggactgtggtggggtcgggggagcggggagggatagcattgggagatatacctaatgctagatgacacgttagtgggtgcagcgcaccaacatggcacatgtatacatatgtaactaacctgcacaatgtgcacatgtaccctaaaacttagagtataataaaaaaaaaaaaaattaaaaaaaaaaaaagaaaattaaaaagtaaaaaaaaataaataaataaatgtaatgttaacgcataaaaaaaaaaaaaaaaagaatacctgttctgatcagttttatagttgagcttgtgtgtctgagacattctcagagtgtgaactacaaactgatacaaactgagtactgaatgaacttttctgcatttgagttgaagcatctcctatcatgagtgtgcactgactcatcttaggactcttaaggtttgataaatactgtgggaggacctaaaataaaactcattttattatcattaattaagtatttcataaatatgaaataaaagtgctctgtgtaag

SEQ ID NO: 247676 - DNA, 459 bp, Homo sapiens
ttaattggaaccatgaacatttttcagcaagtctccaagaagcagaagtaatacaaactcaggaagcacagccaggggataaacatgcctttggcaacctcgttgagtgtattttcccctgaggttcatttgtatcacacggaagtctttcaagtttgtgtagggtgacggcatatgacaatatttatgctttgtccttagtgggttcaaactgtaagaatcactttgtaaagactaggacagggttctttgccttttagggaaggactaggatggccacttaattatgctgtaagtcattattaaaacaagaggaaaaaaatctcttagtacaactaatatttgacatccactctatctatggatatcagacataattcacttccacccataatcctatcccacattcatgtatattacagttttataaaattaaataaaaagtttcttccagccagc

SEQ ID NO: 247677 - DNA, 189 bp, Homo sapiens
gagaaaaggtttcactctgatgcccaggctggagtacaatggtgcaaatacagctcactgccacctcaacctccagtagtcctcccacctcaacttctttagtagctgggaccacaggcgtgccccaccacgcttggctaagttgtttcttctcttctttgtagagatagggcctcactgtgttgcccg

SEQ ID NO: 247678 - DNA, 523 bp, Homo sapiens
tcacacttgtttcaggtgacttaaaccttttcttatgctaagttttttgcttgtcctattcaactatctaaggacaaaaaagcccacccagcatccagttcctatgtatcattacagttcagggctatccttatcaagctcatagctcataggaggctctggagggaaaacatgcagagaaaggtcagagacgtctgacactcttttggaccccatagggggacgccctgaggatcctccgaatctcaacctctccaaagggggtgctctcggcagaggttttgaggtctagtactaagccccccttagaattttctctccggtttgcaatactgtttagccccagtatagtttggaatctggagtttcctgttgaatgggaaagtgggatggcattgcatgtatccagcctttgttgctgctgttctaagcagggggcctggttaacatgtgacatgctccttgggtgctgtttggccccagtgttctttggaatctggagaggtttggtcttgaaaaatca

SEQ ID NO: 247679 - DNA, 483 bp, Homo sapiens
ggtccactgttgttaacatttttgctcacctaggtacacatagagagctattataatctgatgtaaacaaacgatgaggagctaacacacaatgtccatttattttttttccttttcaaagacacttctttgtcatcaaggttgggtgtgcttaggaattaaggtatatatataaagggaagcctactgattaatacttctgttttctccagaatcaccaggaaatacattaatgccttcaagaaagattaaatgggaaaaaggaatgtttggatggaaagaccgaatattataaagattttgtttcttcccaagttaaattgtagatataattcaatttcaatgaaaatcccaagagaggttataaaaaattacttataaagtatttgtaagtgaaaatagctttgaaaaatggaataattaaaatgaaaagcatgattaacaacaccaaatattttaaaatattataaagtgtgaataatt

SEQ ID NO: 247680 - DNA, 395 bp, Homo sapiens
ttggatgaagaaactatttgaagtttgaatattttctttcccctgctgtgtataatctcagtgatgttaggaatctgtctcattttgatcatgcatgtagttccatgcctacctagcacagtatacagcctcaataaatagttattcaatgactgaatgaagtgagtcatactgataaatgttcattaaggcataaagtttactataaaagaaaaaccagccaaataaatataaatattaattatccataatgtgctggactgttgtaattactacctcaatctagtttaaatttatttttataagaataaatttatattttaaaacatatagggaggctgaggcgggcagatcacgaggtcaggagatcgagaccatcctggctgacacggtga

SEQ ID NO: 247681 - DNA, 703 bp, Homo sapiens
tgagataaagggatatggaccgtctttactctgatttgggattgacgaagccaatccaggatggagggaaagaagaaaatgcccagcagcaagtattcctgaagcgtccaaactccatgcatgaaactttgcctacattattgagtaaaattagcctctgggagatgtttcatctgatggcctgcacatgatgatgtggccgacttcagggactacatgtccctgtatcagcaatttcgcctgctgttctgtgcctctctatcccacactccttattaaccactatcacctgatttgaacaatttaagttggtttcctagaactgtaatcagaagattgaaaaagactgaatccaataaaagtggaagtcaatgagagatctgagtacattctggcagggtctgcctcatggtggagtgacaaaaatgaattttttcaagtcttcgatataggtgaaaatgtgaggccttgctggaaggttttagggatagattttatgaagtgagatttcgtgggaaaactcaagtagagaaataatttgccagtatctttttcttaaaaaatcaaatgtgcacattttcacacacaactgatggaacatcaaagggaacatctcttctggagggcatttggtgatatatattagagttctttaaatacatataccctttgacatacaattttatgcttaaaaagtttccct

SEQ ID NO: 247682 - DNA, 488 bp, Homo sapiens
tctgcctgccatttctaaagcacccagtatggatgtacagcaggagacacacaagtcccaagactgcctgggcctactggcccccttagcatctgctgcaggggtcccctctacagctcccatgtctgggaagaagcacagaccaccaggccccctgttctcctcctcagatccccttcctgccacctcttcccattcccaggactcagcccaggtcacctcgctgattcctgcccccttcccagctgcaagcatggatgcgggcatgagaagaacaaggtgtggcacttctgctcctgcagctgccgcagcagcccctcccccctccacattgaaccccacgttggggtcactactggagtggatggaggcccttcacatttctgggcctcagccacagctgcagcaggtgcccagaggtcagaaccagagatcccagacctcccggaccagctcgtgccccaaacgaaatgccatctcgagcccct

SEQ ID NO: 247683 - DNA, 491 bp, Homo sapiens
cataggaaagagccctgttggtttttcaccaagctttattagtattaaatatttagtaaactcttatgtctgtttcttactacgtggaaagaagtttgtgggtggaagtggggtgggagactttgagtgaatttcacagttgaaccttggcgaaattatttttataagccacaagtcattgaatatctggtttcatatgattcagcctaatatgttagcatggtttggtatcttagaaggcaaaggtgatacgcatttatggataccaattcgagctcggtaccttgttcatttaacatgtcagacatgctttagaatcatcttttgtacgtgaccatgaaatattctcagattatacattgaaatttatgttaattttggagagaaatatatgtataatactgaatattcccattcggaaacatggcatacttatgtattttcaggcccttcatctgtctttaataaaattttagtttttgtatagattt

SEQ ID NO: 247684 - DNA, 445 bp, Homo sapiens
gtatgttttgttcaacaatcgagagagtgaacttgtgaatgagtgaatgagccacctcgggacagagagagtgtccaggcaggttgtgtcatatttttttcttcacttggcttttccagtttctggatagagtgggtacttggtccctgctgtcagctggtggatggaagatcctgatgtggattgatcatgatttactttgaccttgggcttgttaacatttacttcataatggattgtaaatgtcaacaaaaaaggctttttcttctttgaaaggtggatttctttctttctttctttcttttttttagatgaagtctctcactcttgtcccccaggctgtagtgcaatggcatgatcttggctcactgcagcctccacctcctgggctcaagggattctcctgccttagcctcctgagtagctgggattacaggcgcccgcc

SEQ ID NO: 247685 - DNA, 169 bp, Homo sapiens
taaaatactacttatgtagtatcactatcactactactactactaacaataatagctaaattattttgagtaactaaaatgtattaggtcttgcattattttatcccattcagtgtctatgctggaggtcgttcataccagcttgcaaaggtcaatagttcaattttcc

SEQ ID NO: 247686 - DNA, 206 bp, Homo sapiens
gggttctacctttcatattggatcttactcaaccagcattaaacatgttcaagccactcactcaatcctcagaatacaattctgttaaattctctggtgaacccctgcactgtctcccaggatctgtcgtgtgtcattcataactaaatgtgttgtaagaaatgttgacatttgccatcttccttttctcatctttcatacacttt

SEQ ID NO: 247687 - DNA, 420 bp, Homo sapiens
tggtagaaaatattcgcaatctatctatctgacaagggattactaaccagaatatataagaaggtcaaataactcaaagagaaaaaaatgtaataatctgatttaaaaatgggcaaaaggaaatgtcaacaggcttttctcaaaagaatacaaattgcaaacagacatataaaaacatgctcaatagaaatgcaaatcaaaactacaatgagataacaccagttaagatggcttttatgcaaaagccaggcaataacaaatgctggtgagaatgcagagaaaaggtaacccttgtacactgttggtggaaatgtaaattagtacagccactatgcagaacagtatggaggttcctcagaaaactagaaataaaactaccagcaatgccactgctaggctgataggtacatagcaaaaaaa

SEQ ID NO: 247688 - DNA, 523 bp, Homo sapiens
tcttgcctccgatgtgttcttcccagcatggccagagaacaatgtctttaaaataaacatattttaatgccattgctcctgcttaaaaaccccaagtgtcttcctgtttctcttaggataaagaccaaacccagagaaccataagcctggccccgcaccactctcgcttcttattttgctctaccgcattttctcctggagagggcctcctggatgccccagggcccttgaatttgctgtttctcttttctcttctccttacctggttaattccagtggattgatccctcagatctgagagatggaggggacgtcatcccttccttgggaccttttcctgtgctcgccttcctgtgagctcacataacacacagacctctccaagccacgcatgtggtcgcaacttcgcactcgctgccctggttgtttgactttggttgtgtttgtttttagtcttggcccgctgttgtgctcattcctctcccatacttatcttaaaatactcatcttggacaagtgatta

SEQ ID NO: 247689 - DNA, 1084 bp, Homo sapiens
ctgttactgctgattaatatcttgctaatcataggttatggagactgcgtttctgttttaaggctctgttagaaattactgatgcacactattgtaaattcttatctctgtatactgtacttctgcatacagatgttatgttaaagaattacttcatccccatgtgaccatctcacctcataatcaaatgaccctaaatccctcactaacctacccccgccctcattaaacttaataataaatgctggtatatccagtgcattgttggcaccgcgggaccagaaggtggtgacccccctggacccagctttcactatcttgtgtgtgtctattatttctcaacctgccgatccgcctgggaacaaagagagagccccgttgcattgcaggctactggccagatcccgcaataaggtatgttctctaagatctgaaacaagatagaaatgctcacctttaccacaaaaaaaagggcgtccaaattgaaaaagaagtcaaattctgcagaagacatgatcttatatacttaataacctaaagactccaccaaaaaaccgttagaactgaaaaatgaattcagtaatgttgcaggatacaaaatcaacatatcaaaatcataacatttaatatacactaacagcaaataacctgaaaaaagaaatcaaggaaagcaatcacacttaagaagctacaaagaatagaaaatagctacaaagtatagaaaatacctaggaatcaagttaaccaaagaagtgaaagatgtatatgaggaaaactatgaaaaactgatgaaagaagtagaagatgacacacaaaaaaggggaagatattccatgctcatggattagaataattaaaatgacaatactactcaaagcaatttatagattcaatatgatctctatcaaaatgccaatgacattcttcatagaaataggaaaaaaatcctaaatgtatgtagaaccacaaaagaccctgagtagccaaaggaattctgagcaaaaagacaaagctggagacatatattacctgacttaaattttctacaaacctatagtaaccaaatcagcatagtactggcata

SEQ ID NO: 247690 - DNA, 1074 bp, Homo sapiens
ctgttactgctgattaatatcttgctaatcataggttatggagactgcgtttctgttttaaggctctgttagaaattactgatgcacactattgtaaattcttatctctgtatactgtacttctgcatacagatgttatgttaaagaattacttcatccccatgtgaccatctcacctcataatcaaatgaccctaaatccctcactaacctacccccgccctcattaaacttaataataaatgctggtatatccagtgcattgttggcaccgcgggaccagaaggtggtgacccccctggacccagctttcactatcttgtgtgtgtctattatttctcaacctgccgatccgcctgggaacaaagagagagccccgttgcattgcaggctactggccagatcccgcaataaggtatgttctctaagatctgaaacaagatagaaatgctcacctttaccacaaaaaaaagggcgtccaaattgaaaaagaagtcaaattctgcagaagacatgatcttatatacttaataacctaaagactccaccaaaaaaccgttagaactgaaaaatgaattcagtaatgttgcaggatacaaaatcaacatatcaaaatcataacatttaatatacactaacagcaaataacctgaaaaaagaaatcaaggaaagcaatcacacttaagaagctacaaagaatagaaaatagctacaaagtatagaaaatacctaggaatcaagttaaccaaagaagtgaaagatgtatatgaggaaaactatgaaaaactgatgaaagaagtagaagatgacacacaaaaaaggggaagatattccatgctcatggattagaataattaaaatgacaatactactcaaagcaatttatagattcaatatgatctctatcaaaatgccaatgacattcttcatagaaataggaaaaaaatcctaaatgtatgtagaaccacaaaagaccctgagtagccaaaggaattctgagcaaaaagacaaagctggagacatatattacctgactttttcttcacacctttggacccctagcttgtcctggctt

SEQ ID NO: 247691 - DNA, 1132 bp, Homo sapiens
ctgttactgctgattaatatcttgctaatcataggttatggagactgcgtttctgttttaaggctctgttagaaattactgatgcacactattgtaaattcttatctctgtatactgtacttctgcatacagatgttatgttaaagaattacttcatccccatgtgaccatctcacctcataatcaaatgaccctaaatccctcactaacctacccccgccctcattaaacttaataataaatgctggtatatccagtgcattgttggcaccgcgggaccagaaggtggtgacccccctggacccagctttcactatcttgtgtgtgtctattatttctcaacctgccgatccgcctgggaacaaagagagagccccgttgcattgcaggctactggccagatcccgcaataaggtatgttctctaagatctgaaacaagatagaaatgctcacctttaccacctttattcaacatagtgctggaaatcctggcaagagcaattaagcaagaaaaaaaagggcgtccaaattgaaaaagaagtcaaattctgcagaagacatgatcttatatacttaataacctaaagactccaccaaaaaaccgttagaactgaaaaatgaattcagtaatgttgcaggatacaaaatcaacatatcaaaatcataacatttaatatacactaacagcaaataacctgaaaaaagaaatcaaggaaagcaatcacacttaagaagctacaaagaatagaaaatagctacaaagtatagaaaatacctaggaatcaagttaaccaaagaagtgaaagatgtatatgaggaaaactatgaaaaactgatgaaagaagtagaagatgacacacaaaaaaggggaagatattccatgctcatggattagaataattaaaatgacaatactactcaaagcaatttatagattcaatatgatctctatcaaaatgccaatgacattcttcatagaaataggaaaaaaatcctaaatgtatgtagaaccacaaaagaccctgagtagccaaaggaattctgagcaaaaagacaaagctggagacatatattacctgacttaaattttctacaaacctatagtaaccaaatcagcatagtactggcata

SEQ ID NO: 247692 - DNA, 472 bp, Homo sapiens
aggctgacccagctgagaatactccctagagaagatgtggcaagcctcaggaggtctggccactcttggagtgcttaacctgaagcctgagagcagcactgagggtgggggaggctgccccctcttaaagctgccttttcagaaagcaaagtgatgcagcggtgtgagcacactctgagggcctgtcacaggagctagctggttaatggccaagtggtcagttcactggaagccttcttttcctgcctgtggctacaagattaggggcttggaagacccagaggaaggtctaatgaggagaaaaaaggaaagagatcaattcagatctccttcattcctttggaccgtatacaaaaccccagaataaaaccagaaacaaacataaaccataacctattcatttctgtatccctgaaagttttgacaaagctttgaatcatcaaatttcagaccaataaaccattgctgattt

SEQ ID NO: 247693 - DNA, 460 bp, Homo sapiens
  misc_feature (412)..(412): n is a, c, g, or t
gcctacgctgactccatgtaacctgctgaatgggaagtactatgtctctgcagtttctgatgggaacagggctggttttcaggaagagctcactgagcatatgatcctccaaggaaaccaagtaaccaagtctcctcaggcttcaccttccctgtctgtgaaccaaggatctggagggaatccttccactgcagcactccagtggcctatgaaatatctgttcccgacctcaagtatgtccttgattgccttctggttaagaaaagctgatagtgtttcaagagccaccaacatggtcagtcagctctttaaccactcaaaattcttctttcaaccacagctggattacagttactctgaacatgtttgaaatcactttttcctttttttttttttttttttaacgggcaancaagctgggggatcctcaaaagtcaaccggaaggcttgaaagttggga

SEQ ID NO: 247694 - DNA, 443 bp, Homo sapiens
tctcctcgggccgctgtgtgcctggctcacgaagtgtcagctgagcagggaaatccaggcatgacgccgctaaaatctattcctgatgcgcactgcagcgcggtgcttcagctctgagaacatcacactaagtgaaagagccaagaggccgcatacggtctggtcccattttatggaatgtccacgataacaaatccacagagacagagtggatttggggtcaccatggggagggtgtggagaagacagtgacagctcctggggccgggattcactgcgaggttgatgatgtgctctggagttaggtggaggcgctggttgcagaacgttgtcagtgtactaaataccactgaattgtgcactttaaaatggtgaaaatagtaaattttatgttctgtttatcacaaatttttaaaagatcttaacattcttaaaaaaaaaaa

SEQ ID NO: 247695 - DNA, 821 bp, Homo sapiens
taatgtgttctgctacctccatatgggggcccacctctttataacgtggtcagattctatttgtattatcactcttatcttcttgtctctcccttagggatcccaaagctagaccccgctgttcaataattgaccaaaagtttttctctacttatagtattttttctaaattagattacagtctagcacctgcagtgaaaatgggcaatcgaaggataaggaatgaaggtaaattccagtataaaggaagaactaaagaaaaaaaaacatagtaaatgtttaactttaaagtggcataacattgtgaccttgtgttccttagttcaaagaaagaagactaaaataactacagcaaatagcagtgctaattcacttggttatcctttcttcttggaagtactaccgttttggtctgtttccatagtttcaattacatagaaaactaaagggaagacctgctcaattgaaaatatccagataaaatgaaattttcttctgtctacctaagctatatagttcttactttcaaggaaatgctaaagttggatgctttttacacttcctttcatcaattcaccacgcatgcatgtcttttttgtggagactttaaaaatgtatacaaataaaattttactctgagactgatgatgtttatcaagtattagaaactgatatggaaagaacaagcaaaatacacagaattcagaggaggggagacgttcgcttaggaatgaaggcaagctgtttaactgggtgtagactcagggaggtagggacaagggcattccagacattgggagcaacaagcaagatcatgattc

SEQ ID NO: 247696 - DNA, 720 bp, Homo sapiens
agtttagttaagggatatgctttcaaatgcagtcacacgtcacttagtgacaaggatatttctgagaaatgtgtcgttaggtgatttcatggttgtgcacacattaacatgaagttggaaaaatggtgcagttagattgcttgatgcagggttgccacaaatctgttcacttcatatctctatgtcatattttggtaattctcacggtatttcatactttgcattactattatatctgttttggtgatctgtgatcagtgatctttgatgttattttgtaattgttttggagttgtatgaactacacccatttaagatggtgaacttaattggtcagtgttgtgtgtgtcctgattgctccactgaacagctgttccccatctctctccctcttctcaaatgtctcattccctgagacacaacaatattggaattaggctaattaataaccccacaatgccctctgtctaaatgaagggaagagttgcctgtctcttactttaaatagaaagctagaaatgattaagcttagtgaggaagggatgtcatgaaagctgagataggctgaaagctaggcctcttgtgccaaacagccaagttgtgaatgtaaaggaaatgttcttaaacgaagtttaaagtgctatgttagccaacacacaaatgataagaaagcaaaacagccttttgctaacagggagaaagtttgaatattctggatag

SEQ ID NO: 247697 - DNA, 486 bp, Homo sapiens
agtttagttaagggatatgctttcaaatgcagtcacacgtcacttagtgacaaggatatttctgagaaatgtgtcgttaggtgatttcatggttgtgcacacattaacatgaagttggaaaaatggtgcagttagattgcttgatgcagggttgccacaaatctgttcacttcatatctctatgtcatattttggtaattctcacggtatttcatactttgcattactattatatctgttttggtgatctgtgatcagtgatctttgatgttattttgtaattgttttggagttgtatgaactacacccatttaagatggtgaacttaattggtcagtgttgtgtgtgtcctgattgctccactgaacagctgttccccatctctctccctcttctcaaatgtctcattccctgagacacaacaatattggaaaaaggcctcagttttaattattttcttcccaaaataaatcacacatttggtta

SEQ ID NO: 247698 - DNA, 841 bp, Homo sapiens
gcaactttgatgcatgtacaaaatagagtcagccaaatttgggatttttgcaaggggttaagatggaaagacagtaggcaaggaagttgatactattggtaagaaagtggttggtgtgacaaagaatagaacctaagtttaataaggaagagagaaagagagctatagaaaaaggggactagagatccctatgaagtcaaggaactgaaatcttgagaatagttgactaagagatctgaagacataggatatttggtctgagagttgttttaaagtggggagtgattcttgtattgataagtttctgagtgtggctattggagtgctatgctgacatggaagtcaagaaagagaggctgtagcgtaggatggggcaaccacatggatgtaaagtcatcttggataatagtgaaacttgagatagaaggaaagactgtgaatcaaatgctaaaatcttggagagaggcaaacatagtaagcaacagaaaggaagagggattggaaggtattatagctagatggcatgtatatcaaaggaactgatttttaaaaaacttctcaccgggcgcggtggctcacacctgtaatcccagcaatttgggaggctgaggcgggcggatcacaaggtcaggagatcaagaccatcctgactaacacggtgaaaccccgtctctacttaaaaaaatacaaaaaattagccaggcttggtggcatgtgcctgtggtcccagctactagggaggctgaggcaggagaatcacttgaacctgcgaggcggaggttgcagtgagccgagatcgcaccactgcactccagcctgggcgacagagcgagactccatc

SEQ ID NO: 247699 - DNA, 354 bp, Homo sapiens
catgcttgagcccactagcccaatccctgagatcttatcgggaagctgctgctcctccacagctccaggagtttcctatttattgggagactgtcggtccctagtaccagctgtgaccaattataatttcagagacacagtttaacaaccacctgaccattacctgatggtcccctgaagttctctggggttgggagaggctctcctgcctggctcatgtctgcctaactacctactctaacattatgacttggagaaatacttattggggacttttaaaaaactgcagagtatcataagacttttggctatgaggatttaccagttgcagaataaagaattttaaaataattt

SEQ ID NO: 247700 - DNA, 410 bp, Homo sapiens
gacccactgtaagaaagagcgatagaggaagactgatgccagcaccagagtgagccagtgaaggacaagagaagctccgcagcagttttctataacaaatagatttgtcaggcaaggcagctggaccaagggatatggttcatctttttttcagagaaacagtggcagcaggggtccaagaagcagcaaattaacttgaggtgagtgccctcctataacggacagtctagaatgtataccgcttggtgatttagtatgacaagtaggtgtaaattacttgaggaattagtctaatactagcaggactctggccatagggatagggttaaataaataactcgagagttttatgtgctaaaaacaatagacaaacaatatccctccatcctccccgctggaaaaaaaaaaaa

SEQ ID NO: 247701 - DNA, 362 bp, Homo sapiens
tgtactctaaatgcagtctaatcaatgaatggagtagaagcaccccttactccaatttagcctaaggttattcaaaaccacaaatcttttagaactgaactattgataaataggtgagggtttctcaaatcccttccacacaaagctgactttctaagtctcaatgcagaatacatattctattaatatttatctaattatttttcaaacatatctctgccatccactatattaactatttctctcagattcgaaccatttgccaatggaatagacacaacctctattcagccatgggtgagaacattaaatgcaacaatgctgaggacaaaggagggacagtgcaattccatgagagacat

SEQ ID NO: 247702 - DNA, 413 bp, Homo sapiens
tcatgctgggcctggaacatgttcttttcctctctggaatcctcctcttttgtcttccctctccacctagatggattttccgttccctgcctcacttggaacaatgttccttcggttccatgtgtctcaaccaaaatgtcctgtcctaaggagcatgccttccaggcaccatgtccagaacccccaactgccaatgggttggctttccctaacctgttaggattcctaacacaccctatacaatactttccttccaggagctcacctcccacctgtaatgatttatgtcatgtctctttcccctccaggctataggttccaccagggcagggagagtgtttggctgggtcaattccccaacactttgtatacagcaggtgcacaataaactattagaaagtttcaggagcctt

SEQ ID NO: 247703 - DNA, 341 bp, Homo sapiens
cagcataaagaaaatgtagcttttcatgtgcttggattagctgtatacgcaaattagatgctgatgaactttctagaagtcagttttccctatggataggaacatctacctggctacatctgtgctagatatttggagagaagcattcagaatgaaagctatattttccgagctaatatttgcatgaatattgagatgtcgttccctttttgaagtaaatattgacctcagtttcacctttatttctgtgttctgatcaacacacaccaataactgctgatgactggatgttcatcctggtggaatctgctggaaccaataaaaaatgcctagctgctgtt

SEQ ID NO: 247704 - DNA, 447 bp, Homo sapiens
tcctgcagtagaatctggaatgggcttgtgacccagctcaggccagtgaaacatgaaggaaggcttggcggagaattctgaagaaggagcttctcagcttttaagagaagctcaccataggaaactccctctctccctctggacttgttggtttaaagacgcaaaacctggagctgctacagacatttttcaccactgcaagtgaagacttctgccccatagacagcgactggaagctggatcaggccaaccctgaagatcactctgtctctggatgtcggttacacaaatcaatacatttccatgtgttaaagcaattcgacttggattttacatatatttttgaaactgaaaacattgtaatctatatatctacttagaaagatgtgaaatatccacctaataataatcatttggggttactaataaaaattatttttacttttc

SEQ ID NO: 247705 - DNA, 430 bp, Homo sapiens
ctatttatagctccaacagcatcagaaagaaaaacacatgcctagtggctaaagcattcaaacacaaccccttataaaaaagttaaagtttgggttaattaaaaaaaattaatttcatattaaatatatatttttaggttccaatttacagttatgtagttatatattatcgcaataaaaagatctgcccatggactggtttttggttttgagacatgtttaaattacatcccttacagagtgctcaacttgtatgggggtaaatgactaacatgatgttatctacaaggttaaaaagcaagaataaagaactaactacattttaggtcagttcttcatcagagaaggaatgttaaaaatttatttccatccaatttattttctaaatattattaattttcttaaataaaacatttcctgaacggcaaat

SEQ ID NO: 247706 - DNA, 434 bp, Homo sapiens
acgaggaccattctgatgttggagctgcccgtggtcacacactcagcaaagtcctgaaagcctcagcgcactggggtcagctggccatgggggtgtgtgggaggtgccacagcaagcccctcctgaccctaggcgtccctccttctgacagcagaggaaaggagagccttgggctggtttcagggctgggtgcagcctgggctacacatatttttgagaggagatttgggggcacagctggggactccttaagccaccatctctctcctttgtgagcctgagtacatggaagaccctaccgactacagctcacctttcggattaggggttatttacttccaggtcattatttttaaacttttcaaattagaatataatacttggtatagatttcaaaaatcaaacttcatagaattaaaagtgaaaagtcatca

SEQ ID NO: 247707 - DNA, 546 bp, Homo sapiens
agccagtcggaaaaggctacgtagtgaatgaccccaactatgacattctgaaaaaggcaaaactatggagacaggataaagatcagtggttgccagtgaggcaggagaatagggtctgggggcagggagcctaaggctgattcatgctgacttcatgaacggaatcaaaaggaaaaccctaaatttccatgcccacgtaacaaaaggatcagaggctactccctttgcaactccccccaactttctgtgttgcagatgaaaaatggaaagtgcctcggattggtcccctcctgcaaccagtcagacatctgcatagagcgtaactttgtaacttcacttcagcctctgcttggtcaccttccacaaccaatcagactggtcatgggccactatttcatagggtgtaaaccaagtgaccaatgggaaacatctagagggtatttaaaccccagaaaattctgcgaccagtgcttttgagccttgcttgggcctgctcccactctgtgaagtgcatttttgtttcaatacagctatgcttttgttgct

SEQ ID NO: 247708 - DNA, 390 bp, Homo sapiens
tcttcttcagtttaaaagtatgaatgacatttgccagtcctccaacttttggcacatctttcattttccaagagtactcaaagatatctgacggggcggaacattagtgatctctgttgcaaggactcataatatctagagctgtgattgcgagactgtgtttaatttcaccttcagcctcttgtctgattctttccaggcatctgctgttggggccaggacttcttctttttccaagttgttacattgcatgtacaaaagaaaagttcagctgggtggggtggctcacatctgtaatgtcagcactttgggaggctgaggtgggaggatcacgaggtcaggagttcgagaccagcctggccaacatggtgaaacccatctctaccttaa

SEQ ID NO: 247709 - DNA, 566 bp, Homo sapiens
aactgccaccaactgcttctggtgtcaatactataggaggtaaacagttatgggtccccttctccagaaaggccctgtgctgtgtccataagagcaggttaagaataagaaagagattttttaccttaataaaactgggccagaagaaacagtcagggtcaacgtcatcttccctcaggacacaaatggaagaatttttctttcacgagaggtggaaaataataccaaagcaaccaaacccattagcaccattccatcctatatgagaccttgcttggctatatgatttgtggaattgcatttgtctatttgtcagtgaatctgtaatccattgttgttttctgctctgtgttttttatttcctcagaggcccctgcaaataagcagcagggccaggggctggttgggggaggaagctggggtatttacatggtaacaggaaaaagcagaaaaaaaagatccacaaagtgtgcctattcctctccccccgccaaatggaacaccagtcctcaatgttaataaagtattgcttctttaaatattttaataaatggataaacataatc

SEQ ID NO: 247710 - DNA, 709 bp, Homo sapiens
taccctgtcctcccactctgagtcagaatgatattgactgaaaccactagtatttggggctagagtcagctcatggagcacagttgatagatgacaaggcccaggagcaggtgtggcttgctcaatccctcagttacctcctaaattgctaagttaccagtagtttcccaaaaaggaagatagcttgccaagcacctgttcttgcatatgctcacttggaaacaaagcaagaagtgatgcctcaagggagttgtcttagctctgggagtgtgagctcctttaaggactttgttaaccacttgcagtaattaatacaattgcttgggtggtgggaccaaacaccaaatatccatctcaattatgttcagacatcattacaaacccattagcaccattccatcctatatgagaccttgcttggctatatgatttgtggaattgcatttgtctatttgtcagtgaatctgtaatccattgttgttttctgctctgtgttttttatttcctcagaggcccctgcaaataagcagcagggccaggggctggttgggggaggaagctggggtatttacatggtaacaggaaaaagcagaaaaaaaagatccacaaagtgtgcctattcctctccccccgccaaatggaacaccagtcctcaatgttaataaagtattgcttctttaaatattttaataaatggataaacataatc

SEQ ID NO: 247711 - DNA, 659 bp, Homo sapiens
cccggtaccgcaccagatgctgccctacatgaacgtgggcacgctgtcgcgcaccgagctgcagcttctcaaccagctgcactgtcggcggaagcggcggcaccgcaccatcttcactgacgagcagctcgaagctctcgagaacctcttccaggagaccaagtacccggacgtgggcacgcgcgagcagctggcccggaaagtgcacctccgcgaggagaaagtggaggtctggtttaagaaccgccgcgccaaatggaggcggcagaagcggtcctcatcagaggagtcggagaacgcggagaagtggaacaagacgtcgtcgtcgaaggcgtcaccggagaagagggaagaggaaggtaaaagcgatttggactcggacagctgacggccgcgggacacttgcccgtattacttacctaactcgaaggacttgcacagacagacgatgctactttcttgcacacgcgctgccttgcgggagggggtcgagaaagaggaacgaggagctgtaaatagtgtacagagccgggagggtcggcgtctggggtcagggcgcgcacagcccagcagcccgaggccgcccgcgactagcccccaccgtagtatttatagttaaattaagggtgacagtacaataaagtgatggcgatgtagac

SEQ ID NO: 247712 - DNA, 336 bp, Homo sapiens
aggcatagaaagacctttgaactagcagaacatatttctttgagggacttaggaacttcattctggttaatggctttgtttggtagaacatacccttcatcttctttctgaataagaattcatggcatgaacacgaggacaggagcaacagacactgggtctacttgagagtggggggcgcgaggagtgagaggagcagaaaaaaataactgttgggtactaggcttaatacctgggtgatgaaataatctgtacaacaaactctcatgacatgagattatgtatataacaaactctcacatgtagctcgaacctaaaataaaggtttaaaaaata

SEQ ID NO: 247713 - DNA, 318 bp, Homo sapiens
caaagacagggaccattctgaatgggagctggagccaggagtgagaaacccagcatatttggagcagaaaaggaaggctgtcttgcattggatcaaagaggctttgtgacgttggttcacatttgttactctctgggcacgtcggcatctctgggtgttctgggctggcttaaggaatctcaaatcagagtagacaaatgtagtggtttccttcattacgtctctaaaaatcatgcagcctctgctttcacacttccagtaacaaaatcacaactttttctcctttgtgaggaaggtgtttgttacattgaccccaaa

SEQ ID NO: 247714 - DNA, 482 bp, Homo sapiens
ggcacaggaaactctgggtggtttggctccagctcttgaaaacaagttccttgtttgccctcctgagttgatggtctggtggagaatttgtctgaaggaatttgttccaggaaaggtccagctgcatttgacaggaaagggagaaaagagagaacgaggcataaatctctggccttctgcctcttgcttgggaatctgtcctttccagcctgcacccacacccttggagcccaaaaccatgccatgcacatgtaaccaaccagctacatgtgaagatcacataaaggtgttcttgtcctggctctagctaaggttccagctctcagtcagcatcaattgtggaagatgggagtgcatgagcttttagatgatttcagtcccctgcctttgacaccaagtggaactgagatgatctttccaccgagccctagtcaaactgcagattcatgagcaaaataaacaccatcattactgaagcaaca

SEQ ID NO: 247715 - DNA, 421 bp, Homo sapiens
ttaactgacaagtgacttggaggtttaggttgaggagtggaagttacagagctaaacttccttacttgaacttgtactggatctagcaatggagtcagtaattatattgtaactttttgaagttttgatttagataagtctgtgcaactgtgagaatcagaattttcaatgtttgagaatttaagaggcatatttacttagtcaagtaaaggtagaaatgagccaatcatttataaatgtattctgcaaagataattaagttgggttattatggtacagttttgcttttagtttagactagctccttatttaatcaaagatactcctgttataaaagttcagtagttagaaattgcctctcagaatccattttaattcctaatctcctcttacatgttctaattgcagaccaattttaaat

SEQ ID NO: 247716 - DNA, 373 bp, Homo sapiens
gtcaaggaagaaaatttaaagagtcaaaggatcataactcttctcctctacagtaaaaatggcattgttgatgatttaagaactttggatggtgctattcagcccagataattataaagaataccccattgtggaatattattccataggtctgtaaattttctgtcacttttcctatttcagctcatcttacgcatcaaacaactcaccctgtctataaaatggaagatatgccgtataacagttatatcaaaaaagatcttttatgtgtaatcacttcataaagtgctgtttgaacataaggtattagtagttattttagcctatcacatgaatagtgcatccagactccaagatttagagatttagagtc

SEQ ID NO: 247717 - DNA, 724 bp, Homo sapiens
tccaccacctgggttcaagattctcctgcctcagcctcctgagtagctgggattacaggcgcctgccaccatgcccggctaatgtttgtattttcagtagagatggggtttcaccatgctgcccaggctggtcttgaactcctgacctcaagaggtccacccacctcggcctccctaagtgttgggattacatgcgtgagccactgcacctggcgatttctttctcatttaagagatggagtcttctgttgcccaagatggaatgcagtggtgtgattataactaggaccacaggtatgtgtcacaataccggctttttttttttttgagatggattcccactctgtcacccagactggagtgcagtggcgcaatctgggctcactgcaacctccacctcccaagttcaagcgattctcctgcctcagcctcccgagtagctgggattacaggcgctcgccaccacgcctggctaatttttgtatttttagtagagatgaggtttcaccatgttggccaggctggtctcaaactcctgacctcaggtgatccacccaccttggcctccaaagtgctgtgattacaggcatgagccaccgtgcccagccctggctaatttttttttttgtagagacagccaggctatgctgcccaggctggtctcaaactcctggtcttaacatgctccttccttagcctcctgaggtgctgagattataggcct

SEQ ID NO: 247718 - DNA, 352 bp, Homo sapiens
ttgacttgaaattgttactaaatcaagtaacttgtgaaaagagggtagaatttttagtgtcttagatttaaattaaaagtttttagaatatgaagactggccaaaccagtgattttaaagaagatagaccttcacgtttcaggtaagaatattgtaaaaccttttaaattttttaagaagaaaattgttcattttgtggcttagattttaaaaattttagaaagtataggctgggtgcagtaactcatgcttgtaatccaagcactttgggaggctgaggcaggcagattgcttgagccatgcgatcgagaccaggctgggcaatacggcgaaaccctcactctgcaaaaaa

SEQ ID NO: 247719 - DNA, 455 bp, Homo sapiens
cagcccccaggtcacatcactcatggaagggacctctcaagttcatggatttggaaagcctggcctgcaaagggctccagctgacactagcttgaggcagcatcgtgagtcagtgaggtgggcacctggacccgagtctctgtcctccaggcccaggctacaagagcgaaggctctgggctctcccagcttcatccctgggcagggggcagggctgctttggcctttgctgggctgttgagaatgagggcaactttccctgtgaggacacccggctggccaacttgcccacccactcatctcagggcctgtccccctatgattccgaaggctgggcactgagaaacaggcacacagggggctgtgctggacgtgaacgcctgacccctggactcacctgtccagacccacattgaggtaccagttctgtaagttgctcaaagcaaaatagttgct

SEQ ID NO: 247720 - DNA, 689 bp, Homo sapiens
gagcaacttgctatgttttccaggctggtctgggactcctggcctcaagccatctccctgcctccacttcccgaagttctgggatcacaagtgtgagcccctgcacctggcttaactttcaagaaagtgtttctttcctcccttccttccttcattcagatggggtctcactctgttgcccaggctagagtgcagtggcactattacagctcgctgaagcctcaactccccaggctcaagcaatcctcccacctcagcctcctgagtgagtagctgaggctgcacgtgtgtgccacaacaaccagctaataagaaagcgtttccaactgtttttttgtcttccactcatgccttgcaggagatccatagaattcctcttactaatgtcacttaagagtgagaaatataagtcccggagaggttaaacaacttgcctaagaacagggaggatgatagtagcagaaggagttgctccattctttctggaatccattaaccaaaagaaaatccatgttctttaatcatgtcacataacaaggagtttgttgcccatagataagagggagaaaggtggtaaacataacaggacaaatatttaaaatggcagaagaaaaattagggttttagaaacaagaagaaaagggctaaatcggcattttaaaaataaatggtcttagactgctgcacca

SEQ ID NO: 247721 - DNA, 602 bp, Homo sapiens
acaaattacatttttaatagtagtatcgtgagaaattgtggggttttttttgtctacttctgttattcttttgtaactcgtgtcttttgattctttgttttgtctccttatgtacttcattaatcttcttgaatttttccctaatcccaaactactagaactgtccaaggccaggaggaattggaaagaagatggtttcttgaaatctctcttccatacttctttggtcttttgcagcagacagtaacttattgggccactcttcagtattcatcagtttatttccattgaagaacttcagactccttcaagttcaaaaaagctgtgaacttgaagaaggattagtattgaagccgttgctcttataacttactagttgtgtgaccttgggcaaatttcacattcagatcctcaattttctcatccctaaatggagaatgatactgcctacctcagaggtttagttcttgtggttggtaacttacctatataaattataaggttaaatgaaatgaactctttccatacgttcgttaacattaagaattgagcactttatccaagttgtattttgtgaagaagtgagaaagaaataaaatagt

SEQ ID NO: 247722 - DNA, 407 bp, Homo sapiens
gggaaattcctccccacaagcagatgacatcctagatatggacagctctatcaagatgatagatcaagacttctctgctattaacacttctcttaatttttcattacttatgctaggcacgataatcccataattataatttcacaatcagtagctactatgattagcttaatgtagtgttccatctgtaatgccaaacctgtatctttacattttctatgggatcttttagttcacccagtggttaactttagcaatatctctaaagtaaccattgttcaaattgtatttgtggtaagatttataaacccacttgttctcactcctgtttgaatttaaccctgtaatggaacacaaaaagcagggccaaaaagaatataataaaaaaggttttcactaaaagccca

SEQ ID NO: 247723 - DNA, 444 bp, Homo sapiens
tcagagcagcatgttgaaaaagacatcacaattcaattaaaatcttcctcctttgaacactcccagaggggcaaggccacttggaatttgtgagaaatctaatttatagacacagtatcaggaaatagaattgttaacaatgaacaactgtgtgtcatagggatcaagcagcaggcatggagccaggattatctaggttctaccctcttcagcaagccatcgaacctctctgagcctcagtttcctcatctgtaaaatggagatcacagccatcagttggtgttctgggaataatagagattgtgcatgtaaaccaggtatggtggctcccacctttaatcccagcaccttgggaggctgaggcagggggatcacttgagctcaggagttcaaaaccaggctgggtaatataatgagacccctatctctattaaaaaaaaaaaa

SEQ ID NO: 247724 - DNA, 221 bp, Homo sapiens
cagcgttaagattctctgtttccctgtaacatcggagagacgagcaactctatttacatttagtgcgtgtgcatctagtgacttcggtagacatctgccaatcaaatacacgtcattctgcaaaaccacctagacgcctccatgcccttttcttactggacgatagagttgtttagataagtaaatgctttgaaataaatttggtggcttttagcaagaag

SEQ ID NO: 247725 - DNA, 694 bp, Homo sapiens
gaaactgtgcaaagttatgtgcgtgaaaaaccttcaggatggagagaatcagctgcctaccttgaactaccttgaataaggctgcctttgctctaagaaaacctgaaaagtcttcaactaaaagctgaaaagtcttcaactattacgtgaggatctgcaattggggtctatgctgtagtgactcaagatcactgatagaacttaaagtctaatttttttttcagttaggtgcatcccgatacagaaatagtgaagagtattttagctaggacccaaaattgccaaggttcttggaacttcacaaaggtcaaagcttgaactgtgtctgaagagggtatcagaatgtatctttattcagtaccatagactaagaaagaaaaacaactttatttgtacgttatatgaggaatcctcctcatgatctcacatttgttatcttagttccgtttcctcaacaatgctgtgacccagtgtggattcccatggatcttattgaaaatgcttattaaaactgctacttgacagaaactttataattttagactaatttctctccatcccctctgaataaaaattcacatggtcattgaatttttatgtgacaataatgcatatatatatatacgtataaatatatataatactcaaattctttgatgctttgtgtggcttggaataaatgttaatattacag

SEQ ID NO: 247726 - DNA, 443 bp, Homo sapiens
cccaaagaatgaggaatgttttgtgatacagagaagttttggaaattaaagaagaagctggatgcccagcttaatttatccccagaagatactgccttccgtaatgaagatacagccttccctggtgaagatacagccttctctgaggaagatacagccttccctgatgaagacatagccttccctggtaaagatacacccttctctgaggaagctacagccttctctgaggaagatacagccttccctgatgaagacacagccttccctgaggaagatacagccttccctgatgaagtgctagcctcattcaggtgactctttggtagatcggaattatattttctcacaccccatcagcatctgacaatggatgcttaacaacctggcaaatcaacaaccgattaacccatctggattaatgaggccctaaaatgctttaa

SEQ ID NO: 247727 - DNA, 544 bp, Homo sapiens
ggaagctgtatgttggtctttcccatggtggacactggaactaaagctgcaaccaaaaacatggggtgatttcagacttttcccaggaatggatattaaattttatgagatgattttagagcatctgccggatgattatgttgtttttttctttgacctattactgatggacaatattaataaatgtgctactaataagtgaatattatattccaagaataaaatctgcacaatatagtctaaacattatcttgtaatatactactgtatgattttcattggtttagtaaagacttttatatctatctctaaaatgtcattctgggaattataacttggacatcaagttccttacactctggttgccctttattggttatccttcttttttctttttaatgggccaatcaagcacactatgtaactaagatgaaagctctttaagagcacaggtctttgttttatttgctgatttatttactaagatcctagaagtatgcctgatacattattcgtattcaataaatactttttgattggttaa

SEQ ID NO: 247728 - DNA, 237 bp, Homo sapiens
aaagctgaggccaaagagagagaaaaagatttgaagacactacactgctggctttgaagatggagaaaggagccaggaaccaaggactgctgcagcctctagaagctagaacatgtaaggaggtggagtcttccccagaacctccaaatggaaagtagccctgtctactaccttgatttcaggacttctgacctccagaactgtaagataataaatgtgtgctatttcaatctacta

SEQ ID NO: 247729 - DNA, 325 bp, Homo sapiens
cattgtagggaatttgaggaatacattaaaaaaatgttgagagggctaagcgcagtggctcacgcctgatatcccagaactttgggaggccaaggtgggcggatcacctgaggtcaggagtttgagaccagcctggccaatgtggcaaaaccctgcctctactaaaaatacaaaaatgagctgggcatcatggcaggtgcttgtaatcccagttactcaggaggctgaggtgggagaatagcttgagcccaggaggtggagtttgcagtgagctgagatcacgccactgcactccagcgtgggcaacagagcaagactctgtctc

SEQ ID NO: 247730 - DNA, 464 bp, Homo sapiens
gcctcccaaagtgaaattcttaatgactggctacactaacttatgaatgccataatcaatacagattttttctccagagtcttgatagctattaatattttcctctttttttcactaaaacataaaatggaaatataattgttttgatttgaatttaatgtctatcaagattgcatcttttttattgccttcgtatgtgtctgtagatccaacatgtttatcaccacaactacctgagttctaatggtcccaagacaactctaccaccaaatttctacctttgtttctcaatgtctctgtgcattggcttcctctgtaaatgggaatacattacctgtttcaggttgttacaaggagtaaaggaaataatgtacataaagcatttggtgaggttttatatattatgatatcataatatatagaacaataaatgtctaggttttctcctatagatgagttacagt

SEQ ID NO: 247731 - DNA, 370 bp, Homo sapiens
gctctgggcagctgtctggggccgggaagcggggcagatgtcacgcagcccaggggaggaggcggctccgcggggaggacaggctgggcctcaggcctggcaagactgcctcctccccctagggcctggctctgccgcctggggctggggcacagccatgggccaggctgacctgcttccaagtctagctccagctcttcggtgtggctacccgcaagtgctagagcctctctcagcccctttctctcctgctagagaataacagcacctgctttgagtgggtgtggtcctctagtgaaagaggtgtgcaaagcccagcccagtgccgggcacactgttcctgctcaataaatatcagctgctaatatta

SEQ ID NO: 247732 - DNA, 2446 bp, Homo sapiens
  misc_feature (338)..(338): n is a, c, g, or t
tatgatcacagctatgcagtccttaccataaatgtaaacggaggctggaaaagagcatgaagaagggaaaacagctaatgtgttagggttgtggatagtagcttagtttttctttcagaaattcttttattgttgttaaagattatgccagtgtatccaaacatacacactcaaagaccttgcaagaggacgttactatcatggtatatgggacatttggaacatgggtaagctctttccgaaaatagagtaatcaaaacccagaaagcaccggaaaccttgagggtgtgatcacttacgtcgagaagaaattgaaacaagactttcattcttgaacngttcccctacaaaatactatactttgatgcttctttagatctttgctgttacctctcagcgttcttaaatcactttgtttccaggttcaatttcagaagcttcagcaactgcgccttacacagtaccatggaggatccttaccaaatgtgagccagctgcggagcaatgcgtcagagtttcagccgtcatttcaccaagctgataatgttcggggaacccgccatcacgggctggtggagaggccatccaggaaccgcttccaccccctccaccgaaggtctggggacaagccagggcgacaaatatccttttttactcttcaaagggagtgtgcattctgaaatgtttgaaaagttttcaggatttatcttccctgcaattctcctttggcctcagaatcttcatttatctgatgaaaggaggcaatacaaataaatgagttggaaactagaaacatctctgcagtcaacatttggaaacatcattgtaggtgtttatgaaagcatcaataaagttcagtttaatgaaataacaacaaaaacaacctgtaattcggtcccattgcagggtgttctgagcattttctccagaaattggccacgttagagttaaacctgactttgaatcaggttagagagccttagtctctttagcaaaaatggacatagagatatgtgatttatttgtacttcttttgatctgctgacctgcttttggaacttacagacaaaatttcatattattttctatttgtgatgtttcaaactcagtaagtgataactaaaataaacctagaatataggaaaatctcatgcagtgatgtacagtcacaccaaactctgctgttaagtagaaataaaggaaaggaaatggtgaattcacctgacagtttcatttaatcagtcctgtttacagggcggcagtggtgggtgcagctgtgtgaccagcattgtgccgaaggctttggggaacagaactgagctggattttttgggagaggacacagaagtgtgccaggagggcccgtgctctcacttcattcttctcagtactcgggcgcaggggtggaggaaggagaagaaaggcggggtgggtctcgctgcggagagctgaattcctggcagtgatggtagagttggcttcacaagcctagaaaccaggaagtgggggcagggcactcatgtttactgagcacctacccatgccaggcgctgtgctgggtaatttatgtgtcacttagtcctcaaaaactcactgagtcgttaatttttttaaccctcattttctgatgaggaaactgagtgtgtggtgaagtaacccaggattcagaccaggccccgctgatggcccagcctgtgctctcccctccctatgccacctgcgaccattcgcagtgatgaggaccttgtacaagggagccaggagttgtgggggcactctagggaaaccccaacttttcttgccttcaagcttcttgcagtttttagtctatttggaggcaaggataatgaccccagggaatgtttttctctcccctttctcccgcccccaggaacacaccacatttggtccacagaaggactgacttctgattttgtatattacgtggctgttatcaaggaaagtaaagatgataaatgatcttgagaatctattctggaatgtgtgataactttgacattgaatgaaaaaggcaaaaggaaatggaggcaattcatcagcaaatttgtacatgtcaggatggagtggtacatcaaaccgttgtccaaattgccaagaatattcaggcaaaagacttggagtgtttctttgattgatttaacaatgtattttttttggctgggcatggtggctcacgcctgtaatcccagcactttgggaggccgaggtgggcagatcacgaggtcaggagattgagaccatcctggctaacgtggtgaaaccccgtctctactaaaattacaaaaaattagccaggcttggtggtgggcacctatagtcccaggctgaggcaggagaatggtgtgaacccgggaggtggagcttgcggtgaaccgagatcgcgccactgcactccagcctgggcaacagagcgagactccgtctc

SEQ ID NO: 247733 - DNA, 718 bp, Homo sapiens
ctcctctgccgggtcgcgccggacgactggcttcgggcggcggccccggcggcctgtggacggacgggtgggccgaggtacaggccccacggccgccgtctcccgcttctgcccgcgcagagtccgcgccatggccgcctcgccgggctcgggcagcgccaacccgcggaagttcagtgagaagatcgcgctgcacacgcagagacaggccgaggagacgcgggccttcgagcagctcatgaccgacctcaccctgtcgcgggttcaatttcagaagcttcagcaactgcgccttacacagtaccatggaggatccttaccaaatgtgagccagctgcggagcaatgcgtcagagtttcaggttgagaggaacagcagtccctgtgttgatggattgaggcagtaactcgaggaggaagattttcctgcacagaactgcagaggcttggggagagagagaacacactgggatgactctgagatcctaacctgagtgtcttggtggacggtggcctcactaaatgagatggactataagaagaggaacagattaaggggacagtgattggttggatttttggtagaatttgagctgtcttgggtacttttggcagagaacttgagtaggcagttggaagtatgcacttggagttcacaaaagaactgttgggagctggaggtgtcgatttatgagttactggactgtgggtgacagtgg

SEQ ID NO: 247734 - DNA, 441 bp, Homo sapiens
  misc_feature (21)..(21): n is a, c, g, or t
  misc_feature (28)..(28): n is a, c, g, or t
gaacccttggaaaagaatttntctttangcagcttatactattcctttttcactcaaactactctcaaaagccttctcatgcaatgactgtgctgctttttttttccctttagtagcatctttccctggcccattgaaagaagagaatctgttaaatgttccgaagccactgccaaaacaactgtgggagaccaaggaggtgggtgaacagtactcagctatgtttgttgtcactgaatgtttgtacttagaggtcattgaaaaatcctgcagaggtgaaagcaagaggaactgggggaaaaggagaagatttgtctgagaacagagataagaatatacaagggaaggacgtttcaagtaaaaattatcgcgcttgtgtcaatgaattagcacattgatctcttggcttactaattttcatatgaattgacttatttaaaa

SEQ ID NO: 247735 - DNA, 5179 bp, Homo sapiens
ctcctctgccgggtcgcgccggacgactggcttcgggcggcggccccggcggcctgtggacggacgggtgggccgaggtacaggccccacggccgccgtctcccgcttctgcccgcgcagagtccgcgccatggccgcctcgccgggctcgggcagcgccaacccgcggaagttcagtgagaagatcgcgctgcacacgcagagacaggccgaggagacgcgggccttcgagcagctcatgaccgacctcaccctgtcgcgggttcaatttcagaagcttcagcaactgcgccttacacagtaccatggaggatccttaccaaatgtgagccagctgcggagcaatgcgtcagagtttcagccgtcatttcaccaagctgataatgttcggggaacccgccatcacgggctggtggagaggccatccaggaaccgcttccaccccctccaccgaaggtctggggacaagccagggcgacaatttgatggtagtgcttttggagccaattattcctcacagcctctggatgagagttggccaaggcagcagcctccttggaaagacgaaaagcatcctgggttcaggctgacatctgcacttaacaggaccaattctgattctgctcttcacacgagtgctctgagtaccaagccccaggacccctatggaggagggggccagtcggcctggcctgccccatacatgggtttctgtgatggtgagaataatggacatggggaagtagcatctttccctggcccattgaaagaagagaatctgttaaatgttccgaagccactgccaaaacaactgtgggagaccaaggagattcagtccctgtcaggacgccctcgatcctgtgatgttggaggtggcaatgcttttccacataatggtcaaaacctaggcctctcacccttcttggggaccttgaacactggagggtcattgccagatctaaccaacctccactactcgacacccctgccagcctccctggacaccaccgaccaccactttggcagtatgagtgtggggaatagtgtgaacaacatcccagctgctatgacccacctgggtataagaagctcctctggtctccagagttctcggagtaacccctccatccaagccacgctcaataagactgtgctttcctcttccttaaataaccacccacagacatctgttcccaacgcatctgctcttcacccttcgctccgtctgttttcccttagcaacccatctctttccaccacaaacctgagcggcccgtctcggcgtcggcagcctcccgtcagccctctcacgctttctcctggccctgaagcacatcaaggtttcagcagacagctgtcttcaaccagcccactggccccatatcctacctcccagatggtgtcctcagaccgaagccaactttcctttctgcccacagaagctcaagcccaggtgtcgccgccacccccttaccctgcaccccaggagctcacccagcccctcctgcagcagccccgcgcccctgaggcccctgcccagcagccccaggcagcctcctcactgccacagtcagactttcagcttctcccggcccagggctcatctttgaccaacttcttcccagatgtgggttttgaccagcagtccatgaggccaggccctgcctttcctcaacaggtgcctctggtgcaacaaggttcccgagaactgcaggactcttttcatttgagaccaagcccgtattccaactgcgggagtctcccgaacaccatcctgccagactccagcaccagcctgttcaaagacctcaacagtgcgctggcaggcctgcctgaggtcagcctgaacgtggacactccatttccactggaagaggagctgcagattgaacccctgagcctggacggactcaacatgttaagtgactccagcatgggcctgctggacccctctgttgaagagacgtttcgagctgacagactgtgaacagaaggcagtggaacagaagaatgtttttctgcaacagccaaaatagaatggaatagaatgaagccagctgataccacgggctttcgttatcttgacatagaaggaagcaatgccacggctccagggtttcagatgagatcccatctcagacactgtggcttcctccagatcacacagctttgtactgcctctcccgcctgtggccaaagtcgtgttgcagcaggcaggctgcttggagcttcccatgaactggaaagctcacctccactgcatctttttactggccatccagtcagccgatgtgtaagagtaggaaatactgtgtcactggaggcctccgtagcattgtgtagtgtgctcagaaccactgatctccgtccgcaccgaaggcgggcccggagtgggaggctcggcctggggcggcggcaccggagagggcacctcgatgcctgctctgacctgacccagagggcgaggccctccagcgggggacattcccaggctgagtggaccccacggctctctcccacgcctggattacgacatgaagtttttaccacaagcccgagggcaggcttgagttaggcagactgaaggctaattttcattttctcccagctggtttctgctgcttcagaaaagtacaccttttccttatggaccagaggaagaggaagaccattttatcagtcactgaaaagagtcccctggcactgatgagcctgaagagaactgtgctcctcctcgggggctggggaaggaagacagggactgcaggtgtctcatactcagtggcctccagacaaactccagacaagcacagacctccccactaagagcagccagagggagctggtgaggccctaaccccacccaccgagcaactgagcttccccatccctccccagagctgtgtctctgtgggctgggagtctaatgtcacccccctagaccgtaagctccttgagggcagggacagtgccttatcattgttgaacccgtagcacctaacacgtgcgtggcagcacagtcgtgtgctggagtgagtgctgcagaaccgtgcgtgcagcgcatgatgaatgagtgcgtccgccatgccgtaaggcaggctcacctgtagctatccccttccctgccagatcttctcagagctttagcttttctagcactcgtgcctatggtgaagcatgcactttaatatgcttttaacactaggtgaccaaatcacagtgaagccgggcactgcattctccttgggctgtgctccacgcgggtgggtgggagctgtcttctgagtacatccggaagggctgagcaggtgagtgccctgagcatcctggctgggccccacccaggaagatcttccttctcagatccacgtttggctctaaattgcttcaagtagagattcattctttgaggttgaaaaaatagtttatagtaaaacgaaggcctaattcatggaagcatcattagtcatcaataccttctcataaaatagatgggccagatttccaccaccgcctgcctcctctaacttgggtgatgccagtaggtttgaagggggcagagcactgcagggggaggggggggtctaggctgtgagaggacagggtggagaggaggagaaccctgaaggagagacggaagatgccaggacctttgcttggacagccattgcccttccaggagaccctggagtgtactgagggttgctggactgttccacccagaggagcaaggctgtacaatgagggtctgaatctggcacacctgtcccttatgtaaaaggagtcgtggtcacaagaccctgggctggttagcctctcccgacctcattccatttctatcttctgaccttgcctctcatctttaaaataaccctcatggggtgcccctccaccttcctctggaatccaagtattcctgtttcacatttgccccaaatctttgctgtggaattgggaaatcaaaccagagtcctcctcgcctgatttccagctcaggaagggcctgctggcctgccctgttcccagttacactttcagatccctttgtgctcaagatctcagagggggtggctttttgttaaagagccttcagtcgcaatgctacccagcaccccatgtgccaaaagaaaccagctcctgtgtcaaagggcttccaaacctgatctcactctcaacaggcgatggtgctgatgtttcaagaattgtgtttttataaaacagaggtctcagcatagtcactcttcacatagtgccttacccatgggtatcgtcatatccgggtcccagttcagtttgtctgcacagcagccaccctgcctggcaacagagaccccaagacctacacagtgaaccctactgccccaaaggcgttctccaggtgacttgtgaaaacagacctccggggaagtgatttattgggggtgtacactgggggcaatatggtttagcactgaattcaatttgtccttaggtctatgagtgagtccgatcttttcttgtgaaaggttttgggcatcgtacaacccactctgcctagaaggtgtggaggactcaccacgggcagggtcgccctggcccacagcacgtgagcctgcactcactgcggcctttgtaacaaaaccagttgtggtcctcagcatttgaagcagctgcatacttcagagtaaactatttttcattatttagttttgtcacaagaaatcgaccattgtactactctcacttacagcagttaaacagcatagaactaaaaacctgtctgcatttccattttttctttctgtatggttgtgggttttaggacatagggggttaggagaaggggtttcttgatcatgtcatgaattctcctttgtcctgtttctcctgtttcatttctcctccgcctgctgtatattacctgagctggtgttgtatcttcaagtccatatgcgtatttgcagacctttcctgttcccactcttgttggctcttctgatttatgcacagatggttcccagcatgtgtccagtgcttcatggatgggaccatcccagcaactaatcagacttcctgccagtgtcctaacccccagggcaccctgttcaaccatatttaaaaattggaatttgtataaagttgcttccaagttttataatgcatcattttacatcttttgtaattaaaagcatcacaatga

SEQ ID NO: 247736 - DNA, 5647 bp, Homo sapiens
  misc_feature (5647)..(5647): n is a, c, g, or t
ctcctctgccgggtcgcgccggacgactggcttcgggcggcggccccggcggcctgtggacggacgggtgggccgaggtacaggccccacggccgccgtctcccgcttctgcccgcgcagagtccgcgccatggccgcctcgccgggctcgggcagcgccaacccgcggaagttcagtgagaagatcgcgctgcacacgcagagacaggccgaggagacgcgggccttcgagcagctcatgaccgacctcaccctgtcgcgggttcaatttcagaagcttcagcaactgcgccttacacagtaccatggaggatccttaccaaatgtgagccagctgcggagcaatgcgtcagagtttcagccgtcatttcaccaagctgataatgttcggggaacccgccatcacgggctggtggagaggccatccaggaaccgcttccaccccctccaccgaaggtctggggacaagccagggcgacaatttgatggtagtgcttttggagccaattattcctcacagcctctggatgagagttggccaaggcagcagcctccttggaaagacgaaaagcatcctgggttcaggctgacatctgcacttaacaggaccaattctgattctgctcttcacacgagtgctctgagtaccaagccccaggacccctatggaggagggggccagtcggcctggcctgccccatacatgggtttctgtgatggtgagaataatggacatggggaagtagcatctttccctggcccattgaaagaagagaatctgttaaatgttccgaagccactgccaaaacaactgtgggagaccaaggagattcagtccctgtcaggacgccctcgatcctgtgatgttggaggtggcaatgcttttccacataatggtcaaaacctaggcctctcacccttcttggggaccttgaacactggagggtcattgccagatctaaccaacctccactactcgacacccctgccagcctccctggacaccaccgaccaccactttggcagtatgagtgtggggaatagtgtgaacaacatcccagctgctatgacccacctgggtataagaagctcctctggtctccagagttctcggagtaacccctccatccaagccacgctcaataagactgtgctttcctcttccttaaataaccacccacagacatctgttcccaacgcatctgctcttcacccttcgctccgtctgttttcccttagcaacccatctctttccaccacaaacctgagcggcccgtctcggcgtcggcagcctcccgtcagccctctcacgctttctcctggccctgaagcacatcaaggtttcagcagacagctgtcttcaaccagcccactggccccatatcctacctcccagatggtgtcctcagaccgaagccaactttcctttctgcccacagaagctcaagcccaggtgtcgccgccacccccttaccctgcaccccaggagctcacccagcccctcctgcagcagccccgcgcccctgaggcccctgcccagcagccccaggcagcctcctcactgccacagtcagactttcagcttctcccggcccagggctcatctttgaccaacttcttcccagatgtgggttttgaccagcagtccatgaggccaggccctgcctttcctcaacaggtgcctctggtgcaacaaggttcccgagaactgcaggactcttttcatttgagaccaagcccgtattccaactgcgggagtctcccgaacaccatcctgccagactccagcaccagcctgttcaaagacctcaacagtgcgctggcaggcctgcctgaggtcagcctgaacgtggacactccatttccactggaagaggagctgcagattgaacccctgagcctggacggactcaacatgttaagtgactccagcatgggcctgctggacccctctgttgaagagacgtttcgagctgacagactgtgaacagaaggcagtggaacagaagaatgtttttctgcaacagccaaaatagaatggaatagaatgaagccagctgataccacgggctttcgttatcttgacatagaaggaagcaatgccacggctccagggtttcagatgagatcccatctcagacactgtggcttcctccagatcacacagctttgtactgcctctcccgcctgtggccaaagtcgtgttgcagcaggcaggctgcttggagcttcccatgaactggaaagctcacctccactgcatctttttactggccatccagtcagccgatgtgtaagagtaggaaatactgtgtcactggaggcctccgtagcattgtgtagtgtgctcagaaccactgatctccgtccgcaccgaaggcgggcccggagtgggaggctcggcctggggcggcggcaccggagagggcacctcgatgcctgctctgacctgacccagagggcgaggccctccagcgggggacattcccaggctgagtggaccccacggctctctcccacgcctggattacgacatgaagtttttaccacaagcccgagggcaggcttgagttaggcagactgaaggctaattttcattttctcccagctggtttctgctgcttcagaaaagtacaccttttccttatggaccagaggaagaggaagaccattttatcagtcactgaaaagagtcccctggcactgatgagcctgaagagaactgtgctcctcctcgggggctggggaaggaagacagggactgcaggtgtctcatactcagtggcctccagacaaactccagacaagcacagacctccccactaagagcagccagagggagctggtgaggccctaaccccacccaccgagcaactgagcttccccatccctccccagagctgtgtctctgtgggctgggagtctaatgtcacccccctagaccgtaagctccttgagggcagggacagtgccttatcattgttgaacccgtagcacctaacacgtgcgtggcagcacagtcgtgtgctggagtgagtgctgcagaaccgtgcgtgcagcgcatgatgaatgagtgcgtccgccatgccgtaaggcaggctcacctgtagctatccccttccctgccagatcttctcagagctttagcttttctagcactcgtgcctatggtgaagcatgcactttaatatgcttttaacactaggtgaccaaatcacagtgaagccgggcactgcattctccttgggctgtgctccacgcgggtgggtgggagctgtcttctgagtacatccggaagggctgagcaggtgagtgccctgagcatcctggctgggccccacccaggaagatcttccttctcagatccacgtttggctctaaattgcttcaagtagagattcattctttgaggttgaaaaaatagtttatagtaaaacgaaggcctaattcatggaagcatcattagtcatcaataccttctcataaaatagatgggccagatttccaccaccgcctgcctcctctaacttgggtgatgccagtaggtttgaagggggcagagcactgcagggggaggggggggtctaggctgtgagaggacagggtggagaggaggagaaccctgaaggagagacggaagatgccaggacctttgcttggacagccattgcccttccaggagaccctggagtgtactgagggttgctggactgttccacccagaggagcaaggctgtacaatgagggtctgaatctggcacacctgtcccttatgtaaaaggagtcgtggtcacaagaccctgggctggttagcctctcccgacctcattccatttctatcttctgaccttgcctctcatctttaaaataaccctcatggggtgcccctccaccttcctctggaatccaagtattcctgtttcacatttgccccaaatctttgctgtggaattgggaaatcaaaccagagtcctcctcgcctgatttccagctcaggaagggcctgctggcctgccctgttcccagttacactttcagatccctttgtgctcaagatctcagagggggtggctttttgttaaagagccttcagtcgcaatgctacccagcaccccatgtgccaaaagaaaccagctcctgtgtcaaagggcttccaaacctgatctcactctcaacaggcgatggtgctgatgtttcaagaattgtgtttttataaaacagaggtctcagcatagtcactcttcacatagtgccttacccatgggtatcgtcatatccgggtcccagttcagtttgtctgcacagcagccaccctgcctggcaacagagaccccaagacctacacagtgaaccctactgccccaaaggcgttctccaggtgacttgtgaaaacagacctccggggaagtgatttattgggggtgtacactgggggcaatatggtttagcactgaattcaatttgtccttaggtctatgagtgagtccgatcttttcttgtgaaaggttttgggcatcgtacaacccactctgcctagaaggtgtggaggactcaccacgggcagggtcgccctggcccacagcacgtgagcctgcactcactgcggcctttgtaacaaaaccagttgtggtcctcagcatttgaagcagctgcatacttcagagtaaactatttttcattatttagttttgtcacaagaaatcgaccattgtactactctcacttacagcagttaaacagcatagaactaaaaacctgtctgcatttccattttttctttctgtatggttgtgggttttaggacatagggggttaggagaaggggtttcttgatcatgtcatgaattctcctttgtcctgtttctcctgtttcatttctcctccgcctgctgtatattacctgagctggtgttgtatcttcaagtccatatgcgtatttgcagacctttcctgttcccactcttgttggctcttctgatttatgcacagatggttcccagcatgtgtccagtgcttcatggatgggaccatcccagcaactaatcagacttcctgccagtgtcctaacccccagggcaccctgttcaaccatatttaaaaattggaatttgtataaagttgcttccaagttttataatgcatcattttacatcttttgtaattaaaagcatcacaatgaaaaaaaaaaaaaacaaaaaaaaaaaaacacaaaacaaaagaaaattatttatacacaaacaaccaagaaaaaacaaaaaacaatctctgttgcggggcgcgcgcggccgcgccgcccccagaaaaagatttttttaaaccacccccgtggtggggggcgcgggggccccccaagtagggtagttagcacaccatcgttgcacaaataaggtgcgttccccacaaagaaacaacacccctggggcgacaaccaaacagcgggggtgggggtggttcttctcccccacaaaacaaaaaaaaccgcccgcgggggaaaacaccaccagcgctgtttttgaaaaacaccaccaccaaaaggggcgtctaaggacgggggcaccaaggagcggcgactaacaaacagagaggggcgccacagcggcagggggcgaagataaaaaatagacgcccgccgccgcgggttgtccgn

SEQ ID NO: 247737 - DNA, 4305 bp, Homo sapiens
ctcctctgccgggtcgcgccggacgactggcttcgggcggcggccccggcggcctgtggacggacgggtgggccgaggtacaggccccacggccgccgtctcccgcttctgcccgcgcagagtccgcgccatggccgcctcgccgggctcgggcagcgccaacccgcggaagttcagtgagaagatcgcgctgcacacgcagagacaggccgaggagacgcgggccttcgagcagctcatgaccgacctcaccctgtcgcgggttcaatttcagaagcttcagcaactgcgccttacacagtaccatggaggatccttaccaaatgtgagccagctgcggagcaatgcgtcagagtttcagccgtcatttcaccaagctgataatgttcggggaacccgccatcacgggctggtggagaggccatccaggaaccgcttccaccccctccaccgaaggtctggggacaagccagggcgacaatttgatggtagtgcttttggagccaattattcctcacagcctctggatgagagttggccaaggcagcagcctccttggaaagacgaaaagcatcctgggttcaggctgacatctgcacttaacaggaccaattctgattctgctcttcacacgagtgctctgagtaccaagccccaggacccctatggaggagggggccagtcggcctggcctgccccatacatgggtttctgtgatggtgagaataatggacatggggaagtagcatctttccctggcccattgaaagaagagaatctgttaaatgttccgaagccactgccaaaacaactgtgggagaccaaggagattcagtccctgtcaggacgccctcgatcctgtgatgttggaggtggcaatgcttttccacataatggtcaaaacctaggcctctcacccttcttggggaccttgaacactggagggtcattgccagatctaaccaacctccactactcgacacccctgccagcctccctggacaccaccgaccaccactttggcagtatgagtgtggggaatagtgtgaacaacatcccagctgctatgacccacctgggtataagaagctcctctggtctccagagttctcggagtaacccctccatccaagccacgctcaataagactgtgctttcctcttccttaaataaccacccacagacatctgttcccaacgcatctgctcttcacccttcgctccgtctgttttcccttagcaacccatctctttccaccacaaacctgagcggcccgtctcggcgtcggcagcctcccgtcagccctctcacgctttctcctggccctgaagcacatcaaggtttcagcagacagctgtcttcaaccagcccactggccccatatcctacctcccagatggtgtcctcagaccgaagccaactttcctttctgcccacagaagctcaagcccaggtgtcgccgccacccccttaccctgcaccccaggagctcacccagcccctcctgcagcagccccgcgcccctgaggcccctgcccagcagccccaggcagcctcctcactgccacagtcagactttcagcttctcccggcccagggctcatctttgaccaacttcttcccagatgtgggttttgaccagcagtccatgaggccaggccctgcctttcctcaacaggtgcctctggtgcaacaaggttcccgagaactgcaggactcttttcatttgagaccaagcccgtattccaactgcgggagtctcccgaacaccatcctgccagactccagcaccagcctgttcaaagacctcaacagtgcgctggcaggcctgcctgaggtcagcctgaacgtggacactccatttccactggaagaggagctgcagattgaacccctgagcctggacggactcaacatgttaagtgactccagcatgggcctgctggacccctctgttgaagagacgtttcgagctgacagactgtgaacagaaggcagtggaacagaagaatgtttttctgcaacagccaaaatagaatggaatagaatgaagccagctgataccacgggctttcgttatcttgacatagaaggaagcaatgccacggctccagggtttcagatgagatcccatctcagacactgtggcttcctccagatcacacagctttgtactgcctctcccgcctgtggccaaagtcgtgttgcagcaggcaggctgcttggagcttcccatgaactggaaagctcacctccactgcatctttttactggccatccagtcagccgatgtgtaagagtaggaaatactgtgtcactggaggcctccgtagcattgtgtagtgtgctcagaaccactgatctccgtccgcaccgaaggcgggcccggagtgggaggctcggcctggggcggcggcaccggagagggcacctcgatgcctgctctgacctgacccagagggcgaggccctccagcgggggacattcccaggctgagtggaccccacggctctctcccacgcctggattacgacatgaagtttttaccacaagcccgagggcaggcttgagttaggcagactgaaggctaattttcattttctcccagctggtttctgctgcttcagaaaagtacaccttttccttatggaccagaggaagaggaagaccattttatcagtcactgaaaagagtcccctggcactgatgagcctgaagagaactgtgctcctcctcgggggctggggaaggaagacagggactgcaggtgtctcatactcagtggcctccagacaaactccagacaagcacagacctccccactaagagcagccagagggagctggtgaggccctaaccccacccaccgagcaactgagcttccccatccctccccagagctgtgtctctgtgggctgggagtctaatgtcacccccctagaccgtaagctccttgagggcagggacagtgccttatcattgttgaacccgtagcacctaacacgtgcgtggcagcacagtcgtgtgctggagtgagtgctgcagaaccgtgcgtgcagcgcatgatgaatgagtgcgtccgccatgccgtaaggcaggctcacctgtagctatccccttccctgccagatcttctcagagctttagcttttctagcactcgtgcctatggtgaagcatgcactttaatatgcttttaacactaggtgaccaaatcacagtgaagccgggcactgcattctccttgggctgtgctccacgcgggtgggtgggagctgtcttctgagtacatccggaagggctgagcaggtgagtgccctgagcatcctggctgggccccacccaggaagatcttccttctcagatccacgtttggctctaaattgcttcaagtagagattcattctttgaggttgaaaaaatagtttatagtaaaacgaaggcctaattcatggaagcatcattagtcatcaataccttctcataaaatagatgggccagatttccaccaccgcctgcctcctctaacttgggtgatgccagtaggtttgaagggggcagagcactgcagggggaggggggggtctaggctgtgagaggacagggtggagaggaggagaaccctgaaggagagacggaagatgccaggacctttgcttggacagccattgcccttccaggagaccctggagtgtactgagggttgctggactgttccacccagaggagcaaggctgtacaatgagggtctgaatctggcacacctgtcccttatgtaaaaggagtcgtggtcacaagaccctgggctggttagcctctcccgacctcattccatttctatcttctgaccttgcctctcatctttaaaataaccctcatggggtgcccctccaccttcctctggaatccaagtattcctgtttcacatttgccccaaatctttgctgtggaattgggaaatcaaaccagagtcctcctcgcctgatttccagctcaggaagggcctgctggcctgccctgttcccagttacactttcagatccctttgtgctcaagatctcagagggggtggctttttgttaaagagccttcagtcgcaatgctacccagcaccccatgtgccaaaagaaaccagctcctgtgtcaaagggcttccaaacctgatctcactctcaacaggcgatggtgctgatgtttcaagaattgtgtttttataaaacagaggtctcagcatagtcactcttcacatagtgccttacccatgggtaaggcactatgtgaagagtgactatgctgagacctctgt

SEQ ID NO: 247738 - DNA, 2852 bp, Homo sapiens
ctcctctgccgggtcgcgccggacgactggcttcgggcggcggccccggcggcctgtggacggacgggtgggccgaggtacaggccccacggccgccgtctcccgcttctgcccgcgcagagtccgcgccatggccgcctcgccgggctcgggcagcgccaacccgcggaagttcagtgagaagatcgcgctgcacacgcagagacaggccgaggagacgcgggccttcgagcagctcatgaccgacctcaccctgtcgcgggttcaatttcagaagcttcagcaactgcgccttacacagtaccatggaggatccttaccaaatgtgagccagctgcggagcaatgcgtcagagtttcagccgtcatttcaccaagctgataatgttcggggaacccgccatcacgggctggtggagaggccatccaggaaccgcttccaccccctccaccgaaggtctggggacaagccagggcgacaatttgatggtagtgcttttggagccaattattcctcacagcctctggatgagagttggccaaggcagcagcctccttggaaagacgaaaagcatcctgggttcaggctgacatctgcacttaacaggaccaattctgattctgctcttcacacgagtgctctgagtaccaagccccaggacccctatggaggagggggccagtcggcctggcctgccccatacatgggtttctgtgatggtgagaataatggacatggggaagtagcatctttccctggcccattgaaagaagagaatctgttaaatgttccgaagccactgccaaaacaactgtgggagaccaaggagattcagtccctgtcaggacgccctcgatcctgtgatgttggaggtggcaatgcttttccacataatggtcaaaacctaggcctctcacccttcttggggaccttgaacactggagggtcattgccagatctaaccaacctccactactcgacacccctgccagcctccctggacaccaccgaccaccactttggcagtatgagtgtggggaatagtgtgaacaacatcccagctgctatgacccacctgggtataagaagctcctctggtctccagagttctcggagtaacccctccatccaagccacgctcaataagactgtgctttcctcttccttaaataaccacccacagacatctgttcccaacgcatctgctcttcacccttcgctccgtctgttttcccttagcaacccatctctttccaccacaaacctgagcggcccgtctcggcgtcggcagcctcccgtcagccctctcacgctttctcctggccctgaagcacatcaaggtttcagcagacagctgtcttcaaccagcccactggccccatatcctacctcccagatggtgtcctcagaccgaagccaactttcctttctgcccacagaagctcaagcccaggtgtcgccgccacccccttaccctgcaccccaggagctcacccagcccctcctgcagcagccccgcgcccctgaggcccctgcccagcagccccaggcagcctcctcactgccacagtcagactttcagcttctcccggcccagggctcatctttgaccaacttcttcccagatgtgggttttgaccagcagtccatgaggccaggccctgcctttcctcaacaggtgcctctggtgcaacaaggttcccgagaactgcaggactcttttcatttgagaccaagcccgtattccaactgcgggagtctcccgaacaccatcctgccagactccagcaccagcctgttcaaagacctcaacagtgcgctggcaggcctgcctgaggtcagcctgaacgtggacactccatttccactggaagaggagctgcagattgaacccctgagcctggacggactcaacatgttaagtgactccagcatgggcctgctggacccctctgttgaagagacgtttcgagctgacagactgtgaacagaaggcagtggaacagaagaatgtttttctgcaacagccaaaatagaatggaatagaatgaagccagctgataccacgggctttcgttatcttgacatagaaggaagcaatgccacggctccagggtttcagatgagatcccatctcagacactgtggcttcctccagatcacacagctttgtactgcctctcccgcctgtggccaaagtcgtgttgcagcaggcaggctgcttggagcttcccatgaactggaaagctcacctccactgcatctttttactggccatccagtcagccgatgtgtaagagtaggaaatactgtgtcactggaggcctccgtagcattgtgtagtgtgctcagaaccactgatctccgtccgcaccgaaggcgggcccggagtgggaggctcggcctggggcggcggcaccggagagggcacctcgatgcctgctctgacctgacccagagggcgaggccctccagcgggggacattcccaggctgagtggaccccacggctctctcccacgcctggattacgacatgaagtttttaccacaagcccgagggcaggcttgagttaggcagactgaaggctaattttcattttctcccagctggtttctgctgcttcagaaaagtacaccttttccttatggaccagaggaagaggaagaccattttatcagtcactgaaaagagtcccctggcactgatgagcctgaagagaactgtgctcctcctcgggggctggggaaggaagacagggactgcaggtgtctcatactcagtggcctccagacatctcagagactagtgctctctcctcgtccttattcacccccggcctttttctatgct

SEQ ID NO: 247739 - DNA, 1479 bp, Homo sapiens
ctcctctgccgggtcgcgccggacgactggcttcgggcggcggccccggcggcctgtggacggacgggtgggccgaggtacaggccccacggccgccgtctcccgcttctgcccgcgcagagtccgcgccatggccgcctcgccgggctcgggcagcgccaacccgcggaagttcagtgagaagatcgcgctgcacacgcagagacaggccgaggagacgcgggccttcgagcagctcatgaccgacctcaccctgtcgcgggttcaatttcagaagcttcagcaactgcgccttacacagtaccatggaggatccttaccaaatgtgagccagctgcggagcaatgcgtcagagtttcagccgtcatttcaccaagctgataatgttcggggaacccgccatcacgggctggtggagaggccatccaggaaccgcttccaccccctccaccgaaggtctggggacaagccagggcgacaatttgatggtagtgcttttggagccaattattcctcacagcctctggatgagagttggccaaggcagcagcctccttggaaagacgaaaagcatcctgggttcaggctgacatctgcacttaacaggaccaattctgattctgctcttcacacgagtgctctgagtaccaagccccaggacccctatggaggagggggccagtcggcctggcctgccccatacatgggtttctgtgatggtgagaataatggacatggggaagtagcatctttccctggcccattgaaagaagagaatctgttaaatgttccgaagccactgccaaaacaactgtgggagaccaaggagattcagtccctgtcaggacgccctcgatcctgtgatgttggaggtggcaatgcttttccacataatggtcaaaacctaggcctctcacccttcttggggaccttgaacactggagggtcattgccagatctaaccaacctccactactcgacacccctgccagcctccctggacaccaccgaccaccactttggcagtatgagtgtggggaatagtgtgaacaacatcccagctgctatgacccacctgggtataagaagctcctctggtctccagagttctcggagtaacccctccatccaagccacgctcaataagactgtgctttcctcttccttaaataaccacccacagacatctgttcccaacgcatctgctcttcacccttcgctccgtctgttttcccttagcaacccatctctttccaccacaaacctgagcaagccaggcctggcttgctcaggtctcctggatcagacagatgggattttagctgctgctttaaatcctagtgctggaataagtcaaggtacttcagttcagctcttgcctctgtcactaatcttgctttatgaactcctttgattttctgaataagttccagaaggttctctattattctgtccttcttccaaactggaaatggctgt

SEQ ID NO: 247740 - DNA, 256 bp, Homo sapiens
gattatttgtcattattttatggttattataaagaaatagttccatatactactttatttaccttgacccaaggcccactaatgtataataagtaaaactgtaaaatcggtcctttcatctcctgttgttatcagttgttcttgagggtgagtgtcaatttcatggttggaggccaactcttcttcccttctctctgcagccgtcatttcaccaagctgataatgttcggggaacccgccatcacgggctggtgga

SEQ ID NO: 247741 - DNA, 1335 bp, Homo sapiens
ctcctctgccgggtcgcgccggacgactggcttcgggcggcggccccggcggcctgtggacggacgggtgggccgaggtacaggccccacggccgccgtctcccgcttctgcccgcgcagagtccgcgccatggccgcctcgccgggctcgggcagcgccaacccgcggaagttcagtgagaagatcgcgctgcacacgcagagacaggccgaggagacgcgggccttcgagcagctcatgaccgacctcaccctgtcgcgggttcaatttcagaagcttcagcaactgcgccttacacagtaccatggaggatccttaccaaatgtgagccagctgcggagcaatgcgtcagagtttcagccgtcatttcaccaagctgataatgttcggggaacccgccatcacgggctggtggagaggccatccaggaaccgcttccaccccctccaccgaaggtctggggacaagccagggcgacaatttgatggtagtgcttttggagccaattattcctcacagcctctggatgagagttggccaaggcagcagcctccttggaaagacgaaaagcatcctgggttcaggctgacatctgcacttaacaggaccaattctgattctgctcttcacacgagtgctctgagtaccaagccccaggacccctatggaggagggggccagtcggcctggcctgccccatacatgggtttctgtgatggtgagaataatggacatggggaagtagcatctttccctggcccattgaaagaagagaatctgttaaatgttccgaagccactgccaaaacaactgtgggagaccaaggagattcagtccctgtcaggacgccctcgatcctgtgatgttggaggtggcaatgcttttccacataatggtcaaaacctaggcctctcacccttcttggggaccttgaacactggagggtcattgccagatctaaccaacctccactactcgacacccctgccagcctccctggacaccaccgaccaccactttggcagtatgagtgtggggaatagtgtgaacaacatcccagctgctatgacccacctgggtataagaagctcctctggtctccagagttctcggagtaacccctccatccaagccacgctcaataagactgtgctttcctcttccttaaataaccacccacagacatctgttcccaacgcatctgctcttcacccttcgctccgtctgttttcccttagcaacccatctctatctcgaaaatcaaactcaagcctccgacgtcgttccatgtgttcccgccagccaggactgtgaggtcgccacctctctccatc

SEQ ID NO: 247742 - DNA, 1071 bp, Homo sapiens
ctcctctgccgggtcgcgccggacgactggcttcgggcggcggccccggcggcctgtggacggacgggtgggccgaggtacaggccccacggccgccgtctcccgcttctgcccgcgcagagtccgcgccatggccgcctcgccgggctcgggcagcgccaacccgcggaagttcagtgagaagatcgcgctgcacacgcagagacaggccgaggagacgcgggccttcgagcagctcatgaccgacctcaccctgtcgcgggttcaatttcagaagcttcagcaactgcgccttacacagtaccatggaggatccttaccaaatgtgagccagctgcggagcaatgcgtcagagtttcagccgtcatttcaccaagctgataatgttcggggaacccgccatcacgggctggtggagaggccatccaggaaccgcttccaccccctccaccgaaggtctggggacaagccagggcgacaatttgatggtagtgcttttggagccaattattcctcacagcctctggatgagagttggccaaggcagcagcctccttggaaagacgaaaagcatcctgggttcaggctgacatctgcacttaacaggaccaattctgattctgctcttcacacgagtgctctgagtaccaagccccaggacccctatggaggagggggccagtcggcctggcctgccccatacatgggtttctgtgatggtgagaataatggacatggggaagtagcatctttccctggcccattgaaagaagagaatctgttaaatgttccgaagccactgccaaaacaactgtgggagaccaaggaggtgggtgaacagtactcagctatgtttgttgtcactgaatgtttgtacttagaggtcattgaaaaatcctgcagaggtgaaagcaagaggaactgggggaaaaggagaagatttgtctgagaacagagataagaatatacaagggaaggacgtttcaagtaaaaattatcgcgcttgtgtcaatgaattagcacattgatctcttggcttactaattttcatatgaattgacttatttaaaa

SEQ ID NO: 247743 - DNA, 388 bp, Homo sapiens
caggaagaagaggcgcccggaaaaccttagctcttggctatctcttccctgagcacaccctggccctggggcctgagatctctccatgcaggggcagccatgagctccgggggcagcagcaaggctggccacaccacccatcagccacctccagccccgccgctcaaccagccatcagtcccttaactgccagtgttcgtggaccatgcaaaacaaccaagaggaagagaagggaccatctcaggtatgacttcaaatcaagccactgggttgtctgagaagtaccccaagcaactagtctggactgggaggttgaattgagtccttgctgttgctgaagctgtgagaataattctgtttaaaaaacttttaaataaaatatccttca

SEQ ID NO: 247744 - DNA, 780 bp, Homo sapiens
gcctactactactaaattcgcggccgcgtcgactgcatctgaatcacttgggagacttgttaaaatgcagatgtcagggccccactcaggaactaatgagctggaatctctgatggagatgctgaggaatctgcatttcaacatgcaccgctggataattttgtttctgatgcacggtaatggttgtggaccactgagctaatgcagtgcatctcagtgattactgtccatcagaagcttgttaaaaaatattcttgagcaccacccccaaaggttctggttcagtaggtcaagggtggggcccaagaatttgatttctataatgcttttaagtgaagccaatacagaccacacttagagtaacatgttctaatttttttatgaaccaggaattaataaactgggcagatagtaaagcattgcccacagaggttgaaagagactttcagattcatcgagtctaatctcatcagatggttgagcttcttccacaaaatccccaccaagtgggtctctttgaatgctctaccaacaaggatcccactacatcagagatgaaccatttacttaaatcagatcaatcacccaactatcaactaagcacttactatgtgcaagtctctatgttaagtgctaatgaagataaatgagttttctcagggagtcggggaactgtaactaaagagtacagctcttttgttttcacttaaatatgtgtcattattgtggaactattaaaccacaccattgttcattctacacacataatgaaaaaaaaaa

SEQ ID NO: 247745 - DNA, 374 bp, Homo sapiens
caaaaaaaaaaaaaaatggctgggagtggtggctcacacctgtagtcccagctactttggaggctgaaaggaggatcgcttgagcctgggaagcggaggttgcagtgagccgagattgcgccactgcactccagcctgggcgacagagggagactgtctcaaaaaaaaaaaaaagaaaaaagaatgcaatgtcagggctagaaaaaatgaagaattaaccaactcaagatgagattctaaaatattcattttattttcccccctgtgtatcagctaaatatgaggaaaaaaagaggtggaagtataaattaatttcaagaatatttttcaggttatttaggtaaactaaataaataataaagtaaataaaccag

SEQ ID NO: 247746 - DNA, 487 bp, Homo sapiens
tactctgcaggagcagtgcattttatagtgttttctttgacagttaatattaaattctgaatgccaacaacttattaatagtgagaacatctggtaattgctaaggacagaaagatgtgtcccagaaggtcacaggaaaaacctttgaatctccatcccccttgtgccatgcctaaatgattgatttccacctctagttcctttctatcaggagtggttattggtttgaagttgggggatgctgcatagtattatttagcttctttcgtgcctcctaaaagccattcatttattaaacaaacactcattgatcacccattatgttccgaaaactattctaggcacttgggatgtaaaagagaaaaaaccccaaagaacctggccttagtggagcttaacattcaagagggagaagacaaaaaacaagcaagctaaacaaacaaaaacccatgaagaagaaaatatatcatgctttataagcgctatg

SEQ ID NO: 247747 - DNA, 755 bp, Homo sapiens
ccctgtctcaaaaacaatttttttttaatcattgcagaaaattcttttggaatgtgctatatccagatcttgggtcaagttgtgcttttaaaaaatataacgatatgaggactgtgcatggtggctcatacttctaatctcagcacttctgggaggccgaggtgagagcattgcttgaggccaggagtttaagactaggctgggcaatgtagcaagatctgggtctccaaaaaattttaaaaataaaaataataactttatccaaaaagttcaactttaaccataaagttcatccttttaaagtatatagagtgttgtttttagaactgaagttacacatttaaatatgtatactctattaataaagaaaaaatagttattttttgggaaactgtacaaaggatgttatcacatacatgcagaattaataaaggttaacaatatgtcatagttactcaaaatatttggtgaccttacagtttcagaagaagggaaaatttgcagtgggtttaatgagtggatgagaggaagtttagaaagtagagacaataagtgtaggctggggtgagggttgaaaaattacatattggatacaatgttcactatttgggtgataaggcgataaggttaggtaactagaaaccctaacctcaccattatgcagtatatccatgtaacaaacttgcacatgtacccctgaatccataataaaatatatgtatgtaaataaaaattaaaaaataaaaccatgaaca

SEQ ID NO: 247748 - DNA, 420 bp, Homo sapiens
gacttgcacatttataaatagctcctatttattaatggccatcctctcttcaaccacctgctaaagttgaaccacctgcacggcaattacaaagatgactgggccagagggtatgggaagacgcctgagatgactatctttcctgcaattttgcctgggaaaagctctgcttccggaaaaaaaattactgttatcttctctatcaccaaaaattgggacaatcaaattttttctaacccttttggatataagaggcagttaaaaaaaagtgacggagatttcctagacattcttatgttttctatagacaatgtttggagtatggtgacaagccaaggaaaatgcagaaatggtcactataactatagcacctgcttctatattcccataattaataaataatgctattcctactgtcat

SEQ ID NO: 247749 - DNA, 260 bp, Homo sapiens
aattatatccaatatttattgtagactcactgtggtcaggcattaatctaagctttctaaataagtgtgatcagttagtgtgcatgtctttcaattctcacaataattaaaagagatacatgctatgattttcacagttttaaagggcaaaacaaaaaaaaaatcaaataactttaaatcgagtaagttagttgagttgaaactcagacccaatcaacacttaaattcatggttttcatcatatatcatacctcctcctc

SEQ ID NO: 247750 - DNA, 319 bp, Homo sapiens
ataaaacgctccctctccctttgggtttggagagccgggttcccccctccgggcagggcgcgggcctaaggggccccgggagttttctccggggccgggtcgggacgcggctggtgagtctcggctccggcccctgaattggggggtccgcgtctgccccaaacgccgctttcttccgttttccatgtcatttcctgtactaataagatggtggtcaaagcaggggaggagagcagcagcgagtcgccgccgccgccgcgccgaggctggcgctgaaactttgcctcgccggggaccagcgcgcccgcagcgcggccgc

SEQ ID NO: 247751 - DNA, 484 bp, Homo sapiens
ggcttggccaagagtcatctcattagaagcctcacagagaggctcctgtcactcatcactcaggaaattccaggggttttaggagctctgtgccaggaaccaggggcaaagaccaaatatcttatgatgaaactgcaatatcagattaagttttttgaatgtttgaatagatgggatttgctatgcatttttaattaactgagacttctgtcattgagactgatgaataaaatgttaaaatcttctgaaatgtggaaagtaaaagctaaacagagccaaggtgagatgaagtgatactgtaaacaaccaacagtgatggaaatgtccttctttacattctatttacaatttttattactgaaactgcatataatactttcctgagaacaaacctttcccctctccatttttaggaagatatttaaaattatgattatcatttctacagttttgggaaatagtcattaaatcttttgaccccctc

SEQ ID NO: 247752 - DNA, 484 bp, Homo sapiens
agttatagatgtcgccacgtctggtgttttctcagtttttttcctagagagatatggggagatgtggccgtgcctggtcagccttcctgaaccacacattggctggattgctgtgggtggggcagactttgttgctacagaaccccagaccccgctgttacccactggagttatttacaaggcctgccggatgcctgtacgtcagtggcttcaatccggccactctcattggcttgctgctcctggagttgcccatgctgagaaccgttctgttccacccagccagcagccagtggaaatttcctgacccctcctgggcctgaagccccagagccaggaccggacctttgtggatactgatggctggagaaaatgtctgtaagactctcagtagagaaatgctaggtgcaaaactgcacagggcctatcatcctagggtaatttagaaatacgtgcatataaaattatccctatcttgatgttt

SEQ ID NO: 247753 - DNA, 883 bp, Homo sapiens
tattttaacaaagataatttaatataagtaattgttaactgggtattggaaaagcatggtcaccagatcagcatcataagcatcacctagaaacttcctagaaatgcaaattctcagactccaacttcacccctgacttactgaatcagaaactctagtagtaggcccagcaagctgtgctttaacaagccctccagcggattctaacgcatgctaaagtttaaaaaccactgcactaaaatatcaccaagacaaccactcataggactgggcagaaagaaaaagagatggatggacttactgaaactgagaagcttcaaaaaggcccccatggaactgaaattcagacttttgagaacaggtcactgcttgcctggtactgatttctctgagttcagaggagggagcctatagacctgggaaccaggtatctgaggaagaagcacccagtaattggagctggcatctcaagaaggcacattgagattggttctataagtgttgggaaacccccaaattgcaatcagctgctactactagcaggcactattgctttcggagtgaagaattgttgctagagtgagacttaacaggattaagaaacccatccgaaggaaacagcaaattccttcttccttctctacctgtgaagtgtcacgctggtccctctattggcagagcctaacagggagacagaaatgcttgcagaattccaaagagtgggtttgaagccaagagacagtagcttactgtcatggccttaattataatacaagtggaagataatagaaataatactttaggtatgtataattgggtgcatgtagacattttctgggatactaactactgggtagacatttggccttattgtaaaaaaaaa

SEQ ID NO: 247754 - DNA, 486 bp, Homo sapiens
cagtgtcaggatgtcatagaagtctttagggacaccggacctccagccatgtggatccaggttgcagggcagcacagacagcagccggcagcaaaggcacccgtgccagcagcctcatggtgtgaagaaggtgggcaggtggtgacgggcactccgctgtatcctgggaggacactctccatgccacccaggccgttccctctgtgcccggggagtgccgccagcccctgctcctgagttcccactgtgctcggggagtgctgccagcccctgctcccacgtctccatccatctgcctcgtgcactccagagacacaggccctaggaaggaggcttctcacacccggctctcctgtccttcccgaaagctcatcacatattgaacacggagccctccccagagctgctggggactctgtgcaagctgcacacgggtacagtcaacatggtgcatgcacaggacccccagatgtcgctgaggacttc

SEQ ID NO: 247755 - DNA, 435 bp, Homo sapiens
aagattgagaccatcctggctaacatggtgaaaccctgtctctactaaaaatacaaaaaactacccgggcgcagtggtgggtgcctgtagtcccagctactcaggaggctgaggcaggagaatcgcctgaatccaggaggtggaggttgcacagtgagccaagattatgccattgcactccagcctgggtgacaagagcaagactccatctcaaaaaaaaaaaaaaaacaaaaaaacaggaaagatcacagcaagttaagacatctgtgagaaggcagtgaatattccaaaggcaggaacaagatgaacaaaaagatgtggagatcaaaattaacaaagtttagaagacttttaaaagtttgaattaggccaggcgtggtggctcatgcctgtaatcccagcactttgggcggtcaaggcaggtggatcacaagg

SEQ ID NO: 247756 - DNA, 170 bp, Homo sapiens
aggtatatggtatctcaccaggagagggtaggctactagcatatcacatttcccctggtcccagttgtatagcctaaaaaaagtaaatgtgtaacccactccatatcgtcgcttccacacctatgatgcatgggatccctgtgaaaaaaacaacacccactaaagatgaa

SEQ ID NO: 247757 - DNA, 700 bp, Homo sapiens
gggctaattttgtatttttagtagagatggggtttcgccatgttggtcaggctggttttgaactcctaacgtcaggtgatccacctgcctcagcctcccaaagtgctgggattgattacaggcatgagccaccgtgcccagcctctgtcagcagtttttgatgatgcaggcttccccctcactatccttcaactatactgtgtagtttcatatttttatcttcatcagcctactaagtgaaaatgtctatcttgttttcatttgtattttttaaattataagttaagcatcttttactgtaagtaattttatttctttttctatgggctgattttttttcttcttctttttttttttaaagagatggtctcattttgtcaccaagactgcagtacagccgtaggatcttagcttgctgcagcctcaaatttctcggctcatacaatcctcccacctcagcctcctagataggtgggattacaggtgcatgccactgtgcccaactgatttttctagttctagtggaggtgggcgtttaacatggtggtcagcctggccttaaactctctgccttacgctatctgcccaccttggccttccggcccgggattaacggcgctaagcctatgcacctggtcttaatgcggcctttttcttttagggtcccagcgcttcatgccccactcctggccctttggcc

SEQ ID NO: 247758 - DNA, 590 bp, Homo sapiens
gggctaattttgtatttttagtagagatggggtttcgccatgttggtcaggctggttttgaactcctaacgtcaggtgatccacctgcctcagcctcccaaagtgctgggattgattacaggcatgagccaccgtgcccagcctctgtcagcagtttttgatgatgcaggcttccccctcactatccttcaactatactgtgtagtttcatatttttatcttcatcagcctactaagtgaaaatgtctatcttgttttcatttgtattttttaaattataagttaagcatcttttactgtaagtaattttatttctttttctatgggctgattttttttcttcttctttttttttttaaagagatggtctcattttgtcaccaagactgcagtacagccgtaggatcttagcttgctgcagcctcaaatttctcggctcatacaatcctcccacctcagcctcctagataggtgggataatatgcatgagccactgcaccggcctctgagggactaatttttactatcctatgcctattttatttttctccaattattggtcttttacttggcttacttgatatattaag

SEQ ID NO: 247759 - DNA, 434 bp, Homo sapiens
ctatctaaagctctcattaataaaattggagaaataaagtactgcttaataaattcagtctaataatgggggaaaaagccttttaaaacatggtctcaagagtgggaggaataacagtaaaaggttgggaattagatttagtccagtctcttccacaatgactttccacacaacatctctaataattatgtacatagcttctgctcaaatacttcctgtaagagaaaaatactgtgtagagaaaaacaaagcagtgtgcttaattcaggtcaactaactacaagtcagtggtttctttaacctattttgagtcacagaattttttttttttttttttctgagacagggactcactctgttacccaggctgaagtgtagaagtgcaaatacaactcactctagccttgacctcaacctccaaggctcaggtgatc

SEQ ID NO: 247760 - DNA, 308 bp, Homo sapiens
ctatctaaagctctcattaataaaattggagaaataaagtactgcttaataaattcagtctaataatgggggaaaaagccttttaaaacatggtctcaagagtgggaggaataacagtaaaaggttgggaattagatttagtccagtctcttccacaatgactttccacacaacatctctaataattatgtacatagcttctgctcaaatacttcctgtaagagaaaaatactgtgtagagaaaaacaaagcagtgtgcttaattcaggaagtatttgagcagcaccacgaatgtcgcgggggatcct

SEQ ID NO: 247761 - DNA, 404 bp, Homo sapiens
agaatatatagactgtatatctatcagttataaagtataataaaattaatacatggaaacttacccagcttaagaatcagactcagggcccgggcatggtggctcatgcctgcaatcccagcactttgggaggctgaggcgggtcagtagtttgagaccagcctggccaacatggtgaaaccccgtctctactaaaaatacaaaaattagccaggcgtggtggcgggaacctgtaatcccagctactcaggaggctgaggcaggagaactgcttgaacccaggaggcggaggttgcagtgagccgagattgaaccactgcactccagcctgggcaacagaacaagactctgtctcaaaaaacaaacagacaaacaaaaagaaaaaagaaaaagaaagaaagaag

SEQ ID NO: 247762 - DNA, 370 bp, Homo sapiens
cgcgcgggctgctccaggggtggggactcctctatcccttggccccggacaagtcccagggcacggacgtgacccattacgaacaggcagtgaagctgtggcagggctggagctgccccaggctctggcatcatccccgagggctggagctcactccccgctagaggcttttccggaccccacgtccacaggcaggtgcatctggtgaagctttcggccacagtgagtcatggcatagccaacgggtgacacagcacgaggcaccccccccgcccccctccactgtctcttgtgagcagagttaatccccaagctggtgtttcttggcgccttcgaggtgtattttaaattctgcaaagtgactaaaaat

SEQ ID NO: 247763 - DNA, 187 bp, Homo sapiens
aagataatgacagatagattttggctcctgaggcttttcaaaatgataaagtattcttggaaatggtatgaagaacaaatgttgaatgtaagctatgattagtctcatacaagatggtcatacaattaaactcctgattgagttattcagaagcaacagaatggttcattaaaagtaatcctgacct

SEQ ID NO: 247764 - DNA, 399 bp, Homo sapiens
tcttccaatcttctcattgtatctccctgcttatctcataaatatcaaagttttaaagtaacatagctatttggttaattttagtgtggttgtttaaaacagcttaaattggaacctacttaatcagtaatctaagctactggtgaaatgaattctttttttagtattggcaggcatttgcaacaaatgaagatgccttagctcagtgccagctgtgagcaaatagtttcggttctcaatttgtgctaatctagaaattcataggaaatagccaggataaggcttgggaatgtcttgtccttgttaaactctgtccagctgtactgctcagcactctcaactgaaaattttacttgctggagaggagcggcacagattctaaggactcttctggagtct

SEQ ID NO: 247765 - DNA, 460 bp, Homo sapiens
agctaagcaatgaggatgcaaaggcataagaatgatacaatagactttggggactcatgggaaagggtaggaggggctgaaggatacaagactacacattgggtacaatgtacactgctcgggtgatgggtgcaccaaaatctcagaaatcacactaaagaacttattcatgtaaccaaccacctgttccccaaaaacctattgaaataaacaagcaaacaaaaaattctcctaaacagccaacatacagccatcaaaattgggacactaacattgatatgtgactatcctccaaccctcagactccatttaagtttcatcagttactccagtagcatcatttatagcaaaataatccagttcatcattctgtgtggtatttaatgatcatgtctctttaaactcttctgtctggaacagctccttggtctttccttggcatgaccttgacacttttgaa

SEQ ID NO: 247766 - DNA, 482 bp, Homo sapiens
gtggcagcagctttctaacttgtctccttgcctctatctgtccctgttgtttcattctccatgcagggcagtccttctgtaacctgaaccagaccttgctgctcctctgtgccactccctccggtggcttctcatcaccatggcctgcaaggctctgtgtgacctgtcttctggcactccctgacctccctcttagctcagtctgctccagcctcaaaggccttctggctgttactggaacattcaagcacattcttgctttgggtcttttataaatatatacatctgtctgtgtgtatatatatatatacacacacacacacacacaaacacacacatacacacacatatatacacacacacatacacacacacacatatatagttctctcttcctccagatatctgtaggcttcatcctctcacttccttaggcctctgcccacatggcaccatatcagaaaggccttccctgatgactt

SEQ ID NO: 247767 - DNA, 461 bp, Homo sapiens
aaaatatgcatctactccaaaataaaatttataattattctaatcagtttactgcttatttcataattttctcaaactatgtgactagaaaattttgacactcaagcttagtgaaattataaaaactaggtgttgttaattctctaaggatgatgtaccaaagggagagttagaaataagcatttacagcaattaccaaactaaaaggccaaataaaaaatagatagcttttagttattcaaataacaataattattataataatccacgttactttgctccttgaaaatacaaactctacctattgtaacaattttgatcccttgagcatattgcttggcttttaatacattttattcaaatataacaaaaagtcctccgtaattaaactgcaatatttttgttgaagtcaaattactatcattgtgaacatatgctatatgtatttagtaaaacaaacc

SEQ ID NO: 247768 - DNA, 423 bp, Homo sapiens
ccacccagattaagggtgggtctgccttcccccgcccactgactgatatgttaatctcttttggcaacaccttcacagatacacccaggatcaatactttgcatccttcaatccaatcaagttgatactcagtattaaccatcacaagattcttacattactactaataaacaagaactgaaaacaaaaacaaaaacaaaaacaaaccgagacagatcccccatttgtctctcttcactccctcttctcttcttccacatgtctctgcagtcttttctgcagcagccatttgttcaaagagcccacttccttgaacagctgcttgccaggctgcatggtcatataatgttaggtgaagagtgaagagctctgcatgaggccccactgtctatctaagagcaagggttcttgcctcaaaaaaaa

SEQ ID NO: 247769 - DNA, 458 bp, Homo sapiens
gtgactgcacccagctgactagcttctttggagtttcatccatattgtaacgtgtatcagtacttttttatagtagaagaatattgcattctatggatatactatgccacatttgtttactcattcatcgattgataagcatttgagttgttttattatgatgatgattctttttaatgctcacatgggctttcgtgtacaagtttttgcatggacttatttttcatttctcctgtgtatgtacctatcagtgaaattgccaggtcatagaataacttgatgtcaaaattatggaaaattgttttctaaagtgattgcaccattttacatttccacaagcagtatatgagagtgttctccacagcctcatctagacttggtactgtctgacttattaatattagcctttctactggggatgaagtgacatctcattttggtttagatttacatttcct

SEQ ID NO: 247770 - DNA, 474 bp, Homo sapiens
caccgccccatccctggagctagaaaccttggattcaagctggacttctgtcttcgcttgggctgccgtaacacaataccgtagactggggggctccaacaacagaaatctcttttctcatagttctggaagctagaaggcccatatcaaagtctgttgctggttcctgtcttgcagacagctgccttcttgctgtgtcctcagatggtagagagagacctctaagccactagacagtgggccccatctgctgccctggttcctggtcctttcttcctctccttttaatcctatcaggccatttaaccttaatgacctcatttaactttaattacctcctaaagaaccagtcacattgtggattagggcttcaatatgtgtatttttcttactttgagaggctgaggcgggagcattgcttgcacccaggagttcaagaccagccagggcaacatagtgagacaccatctctgt

SEQ ID NO: 247771 - DNA, 575 bp, Homo sapiens
gaggtggagtcttgctctgttgccaagctggagtgcggtggcatgcactcagctcactgcaatctccacctcccgggttcaagccattctcctgcctcaacctccaaagaagagagcttcacataactcaggcccgaggtttccttccacattctcattcttcactggacttcctgccttacaagtagcttttcagtgtgccttgtactcactgtcaggagttttactgtctgcaacaggctctgccttagaggacttagagagtgagctctgaataagtaatgatgtgtcataactttgaatatttaaatgctgagcgcctagagccagcccttgattctctgccagcttccaatctagtgtctcggtcagtggaagggccttggaagaatgaaagtggggacacaccctatctgtctggagacagggcccaattaggacagaggtgaaaagaagcaaataaaatcactatttcagatgaattgaaaaaaggcttaaggcttgcagttaagatgctgttgctcctggtaagcagcaaaatttcaacaaaaacatttgacacccagacttagctg

SEQ ID NO: 247772 - DNA, 453 bp, Homo sapiens
gttcacaggtgaagaaactaagaatcagaggagttctaactgagccatgaggactcgattcctgaaaaccttatttataaaaaacaggaatgggaactaaaacaaggcaacctgtgcaagcccttacaagtttttcatgtattacagtaaaaggtaaagcaacttaaaaaccacttgacattttttaacatttgtaaaattttgtaatgcacagttgtctctcatttaccatcccttgctagaaacttcttaggctcacccttcactgcatttccaacattattttgctgataatgtatacgcccaagtgacatgttttcatttggcttaactttcaatgcctttttgattttatgatctagtcctttattgctggacccttgaattgtatctagtcttctgctattacaaaaaatgctgaatcaaataaacctgaacatgtaacatcataaa

SEQ ID NO: 247773 - DNA, 339 bp, Homo sapiens
tatttagcgactccattgaaaagaaacataatatatggaaaaattactagaaaatctaggaaaactgactgaatgctttggaaagacacagtcaagattaaaaaaaatgtgtcacaagaaagtttacagaacctactcaaactcaaagagaaatcagagactaaattctcaaaactggaagctccctacagcatccacactcttcagccttgtactatgtgatgtgtattacgaatggagccaccggcagtatttgtatgaacatgagacaatgtgtggcagatgcttggtgctttgtaatatttagtaaaataaaacaataataatgtaactataaaa

SEQ ID NO: 247774 - DNA, 390 bp, Homo sapiens
tatttagcgactccattgaaaagaaacataatatatggaaaaattactagaaaatctaggaaaactgactgaatgctttggaaagacacagtcaagattaacatgctgagactcgggaggtggtgatttgcctagggacacagaaaaattaaaaaaaatgtgtcacaagaaagtttacagaacctactcaaactcaaagagaaatcagagactaaattctcaaaactggaagctccctacagcatccacactcttcagccttgtactatgtgatgtgtattacgaatggagccaccggcagtatttgtatgaacatgagacaatgtgtggcagatgcttggtgctttgtaatatttagtaaaataaaacaataataatgtaactataaaa

SEQ ID NO: 247775 - DNA, 762 bp, Homo sapiens
tatttagcgactccattgaaaagaaacataatatatggaaaaattactagaaaatctaggaaaactgactgaatgctttggaaagacacagtcaagtttcacctccttatgctggatatgcgacgactccaggaattttctaatctaagaacgagcgtgttcagtgaaatatcatcggtgttgcaatccgggggagcacgtgaatgtgcctgccaggggagtcaaaagcccttcttgtagaaccgtgaaaggaaataggaagtgaaagctttgccatgtagaacattcctccacactgagagcacagaggatacagacttagttcatatcccagcttcaatcttagagtgccgtgtagatattcctctgtgagtaatgacatttcctcaacatttatataaccctgaaatatcttctgatttctgcctttggtgtataggaagcaacagcacttcttttaaaaggggaaggagggtcagcgcggtggcttatgcctgtaatcccggcactttgggaggccgaggcgggcagatcatgaggtcaagagatggagaccaccctggccaacatggtgaaaccccgtctctactaaaaatacaaaaatcagctgggtgaggtggctcacacctgtagtcccagctactcgggaggctgaggcaggagaatcgtttggacccgggaggcggaggttgcagtgagccgagatagtgccactgaactccagcgacagagcaagactctgtctcaaaaaaacaaacaaac

SEQ ID NO: 247776 - DNA, 640 bp, Homo sapiens
tagggttaacataaggaattctataaaaaggactcacttggtactagaagcactcatgtattagggttctctagagtgacagaaaaataggatatatatatatgtatatcctatattacgtatatatatatatatatatcctatattacatatgtgtgtgtatatatatatatggagtttattaggtgttattaactcatgtgatcacaaggtcctacaataggctgtctacaagctgaggagccagaaagccagtctgagtcccaaagctgaacaacctggagtcctgtgttggagggcaggaagcatccagtgctggagaaagatgtaggctaggaggctaggccagtctcaccttttcatgtttttctgcctgttttatatactggccatgctggcaactgattagatggtgcccacccagattaagggtgagtctgcctttcccagcccactgactcaaatgttaatctcctttggaaacaccctcacagatatacccaggatcaatactttgcatccttcaatccaatcaagttgacagtattaaccatcacaacccacatttgaaaagaaataaatcaatattttgaaaggcaaaaaagagtgggcagatacgtaagaaaaaagtaggggtttt

SEQ ID NO: 247777 - DNA, 1052 bp, Homo sapiens
aggactaagactgaatgagggttataagagagactgtagtatgtgtgactaaatgttctaacaaggtacagtgtatctaggaaataacagggagatgtggtgagaacatattaaaggaatattatgcttgctgattatagttattaactgggagtaaaggacagtatttcaaattagatatagagggagagagagggcagggagaagataggtcctagttaatttctagttttatcctttgaaccacattaagtattttacatactcaacaaaattgcatcggcaaggatggaggaaccctaaaactgaatacaaacagacaaatgaacctgtttataaaattgataaccacacagaaaaaaaaattcaagtaacttctgaacattaaacagtgcatatattctaagaacaaaaagaactacaaatgaatgtggaactttatcaaatagattaacaaatactgtttgtcattcacagtagaaagggcatagcaaatctgaggttaatttctctgtattgtaagatttagtaaatgaggacatgcaatactgttgtgaccagagttctcctggtaggaaaagggagaacacgtaggtctctgtggtgacactgtggtgacaggccgagttacagaggtcagcatggatttattgaggctgggatgtgccactgtgccaaaaaagagagcagtgctaccctgagtgggagcgccaggacacaggggctggtatgaaggggttccagctaaatgtacaacagttttagcaccaatagtaacatgttgaataaaagaatctctgaaaatgtactggtgccaaaaaaaatacccatatttgttttctgaataaaatatgtattaataaaagattattttaaaggaagggcaaagggcaaaattagtatatggtaccatctttaaaagaaaaatcaggtcgggcacagtggctcacacctgtaatcccaaccaacactttgggaggccgaggtgcgaggattacttgaggccaggagttcctaccagcctgatcaatagagagagaccctgtctctgg

SEQ ID NO: 247778 - DNA, 684 bp, Homo sapiens
cttgctttgttgcccaggctggtctcaaactcttgagctcaagcaatcctcccaccttggcctcccaaagttctgcgattacagacatgagccaccacacctggctgacagtatttttataatggttgttgttacaccagtccagggtttcccccttggtactgggtgatcaatcagctggccacaagcactatgcacagagcttatgatctactctaactcagaactttctcggactaaaagatgagctggtttatgctgaggatttctaacagtgctcttcccagatagcagactttagtttataaaatattcatcagttcttttgctcaaaagaactcaactaaagaattcaaacgctgtatggaattaaatattaaagactatgtgttatagaaacactgtaactattttagaactcaagacctcaattcctttttctatgtgcgttcctgccaaaatcattccagctagaagggcactggcctgaggaacctgtgtccagtctccggcaccaacatgctagccctaccatcaccttgttctctgtgaggtctggcaggtggaggaacctgctgaatgacaagtaacttgtggacacaaatggcactttaaagatgcatagcttatcttatccaacgacagttaaagcacataataaatgtaaaaaatttggccaaatta

SEQ ID NO: 247779 - DNA, 2055 bp, Homo sapiens
tgcgtttaacatttttatttttaactccgctttggtagtacaaaagtcataaaagtacaaaccagacagttaaaaatacacttgacactcgaaatggtgaaaattttccttacaaatttttacatcaaggtagtagccaactcattgatgacaccaaaaagttgtccatcattagtgttttctagagaaagtctgttgtggattccctcatccttagaaaggaggaggagaaacacaagacctgtaaacatcagttgctttgggaacacaggaattctcatcagatagttcagtataaaccagtaaaaagcgtatgtgttgaaaatactgaacgcttaattttggcaaatttggaagcctgccagacaaaaaccgctcaagtatttattagaaaatatttaaaacatactcttggtatcaatacagttttaaatatttttgagtattctcttgcctgttgtattgctatttaaaaaaaagtgctctgacttgaataagatggaaaaataattaaagctaaagaatatcttacattttatcccccaccattttgagggcatatttttaaagcaaaaaagtatgcttatttgtttttaattaaaatgattagcctagactgcacatatattatttacactaatacatacccctaaaagtcctatattgctactttctggatctcagtgaaatttatttccatactgactttctccagtccacagtgtatatgaatatgtacacatacagtgtttattagttgtcagtaaaaattctcatgaaactaaattccccatttatttaaaaggttagaaatgtttagtttgatgctggaaataaaatcattgaagtctatgtacagtaaatactttgaagtatatttttatggaaatcatcttttgggagacaaatgaaagatgtgcattttcctatatgaaataaaagaagtgctcaaggcaccccccaacactgacatggaggcgggtcttggagaccttgtaactggcctcccccacagctcaccccagagctaccataaatcatgtaatactatttatgcctctgggtcctttcaggtgttttgtaaaatgtacagttataaaaaaaaaaaagaaaaagaaaagtttgccaggcctaaagggaaaagtaactggagtgttttaaataatgagcattagttacaggatgaaaaacaggaaatacacaaagaaaaacatgccagaggtaggtgcaggcccatcttatatgagaagcagggttctaggccgggcgcagtggctcaagcctgtaatcccagaactttgggaggccgaggcgggtggatcacgaggtcaggagatcgagaccatcttcgctaatgcggtgaaaccccgtctctcctaaaaatacaaaaaaaataagccaagcgtggtggtgggcacctgtagtcccagctactcaggaggccgaggcgggtagatcgcctgaggtcaggagttcaagaccagcctgaccaatatagtgataccccgtctctactaaaaatacaaaaattagtcgagcgtggtggtgcatgcctgtaatcccagctacttgggaggctgaggcaggagttaatgctgaatttgtggtcaaggaatccaaagtctagcatctggtcccatctgactccatggtcccttggggaatcaactcctcagggctaactagattatttccactgagcttttaccactgaagattcatcttttatcttttgtaacagctaacctgtatgtatcaagatcttcttacaaccagtgtcaaaataggatgcaggaactggaaaaagaaacacacactcacgtgcacacatgcatacacatatacacacacacccctgagcataagctcagactgtacatgaatagtatcactgcacatactcatcataatggaaaaactacagtgtgtacaccaaggcctgggattaggggctgggaagagtagaggctgggagtggttaagaagataaaaacagctctttccttccctggaagtataataaaattttcaacagactctttcaaccaaaacttg

SEQ ID NO: 247780 - DNA, 1441 bp, Homo sapiens
tgcgtttaacatttttatttttaactccgctttggtagtacaaaagtcataaaagtacaaaccagacagttaaaaatacacttgacactcgaaatggtgaaaattttccttacaaatttttacatcaaggtagtagccaactcattgatgacaccaaaaagttgtccatcattagtgttttctagagaaagtctgttgtggattccctcatccttagaaaggaggaggagaaacacaagacctgtaaacatcagttgctttgggaacacaggaattctcatcagatagttcagtataaaccagtaaaaagcgtatgtgttgaaaatactgaacgcttaattttggcaaatttggaagcctgccagacaaaaaccgctcaagtatttattagaaaatatttaaaacatactcttggtatcaatacagttttaaatatttttgagtattctcttgcctgttgtattgctatttaaaaaaaagtgctctgacttgaataagatggaaaaataattaaagctaaagaatatcttacattttatcccccaccattttgagggcatatttttaaagcaaaaaagtatgcttatttgtttttaattaaaatgattagcctagactgcacatatattatttacactaatacatacccctaaaagtcctatattgctactttctggatctcagtgaaatttatttccatactgactttctccagtccacagtgtatatgaatatgtacacatacagtgtttattagttgtcagtaaaaattctcatgaaactaaattccccatttatttaaaaggttagaaatgtttagtttgatgctggaaataaaatcattgaagtctatgtacagtaaatactttgaagtatatttttatggaaatcatcttttgggagacaaatgaaagatgtgcattttcctatatgaaataaaagaagtgctcaaggcaccccccaacactgacatggaggcgggtcttggagaccttgtaactggcctcccccacagctcaccccagagctaccataaatcatgtaatactatttatgcctctgggtcctttcaggtgttttgtaaaatgtacagttataaaaaaaaaaaagaaaaagaaaagtttgccaggcctaaagggaaaagtaactggagtgttttaaataatgagcattagttacaggatgaaaaacaggaaatacacaaagaaaaacatgccagaggtaggtgcaggcccatcttatatgagaagcagggttctaggccgggcgcagtggctcaagcctgtaatcccagaactttgggaggccgaggcgggtggatcacgaggtcaggagatcgagaccatcttcgctaatgcggtgaaaccccgtctctcctaaaaatacaaaaaaaataagccaagcgtggtggtggaattacaggcgtgagccaccctgcccc

SEQ ID NO: 247781 - DNA, 669 bp, Homo sapiens
gtacagtaaatactttgaagtatatttttatggaaatcatcttttgggagacaaatgaaagatgtgcattttcctatatgaaataaaagaagtgctcaaggcaccccccaacactgacatggaggcgggtcttggagaccttgtaactggcctcccccacagctcaccccagagctaccataaatcatgtaatactatttatgcctctgggtcctttcaggtgttttgtaaaatgtacagttataaaaaaaaaaaagaaaaagaaaagtttgccaggcctaaagggaaaagtaactggagtgttttaaataatgagcattagttacaggatgaaaaacaggaaatacacaaagaaaaacatgccagaggtaggtgcaggcccatcttatatgagaagcagggttctaggccgggcgcagtggctcaagcctgtaatcccagaactttgggaggccgaggcgggtggatcacgaggtcaggagatcgagaccatcttcgctaatgcggtgaaaccccgtctctcctaaaaatacaaaaaaaataagccaagcgtggtggtgggcacctgtagtcccagctactcaggaggttgaggcaggagaatggcgtgaactcagaaggtggagcttgcagtgagctgagatcgtgccactgcactccagcctgggc

SEQ ID NO: 247782 - DNA, 309 bp, Homo sapiens
cagttacactgaaggaggacatttcttttaaatggaaaagagtattttttaagttatattttgtgttttgttataaatctaaggttggttagttttattggttaaaaaagtttgctaagtgatgagggtcatggattcttattcactgcacacatttattgagatgtccctgccaccttctagcaccttcccctgcttcctttgcagtctccaaccacactggctgtcagccctggtccaccacagggcctttgcacaggctgtccccaggacctggagcacttttgccacttccccttctcaccactt

SEQ ID NO: 247783 - DNA, 400 bp, Homo sapiens
taactcatccccacagggtcatttaagaaaatgtatgcatgtttctgattcataactatattatgatgattattcttataaacccttttgacgtctaaaagccttagagccactcaacagtcctgtttgggccagtctcctggaatatgagaaaagatgaagaatgggagtgttatggagggcatacgcccctctgatcatcaccacaaagagtggagcccttcatggtcccagctgaaagcctggagaggctgcgcgcggtggctcacgcctgtaatcccaacgctttgagaggccaaggcaggtggatcacttgagcgcaggaattcaagaccagcctgggcaacatggcaaaaccccatctctacaaaaagtacaaaaattaaccgggcgtggtggt

SEQ ID NO: 247784 - DNA, 447 bp, Homo sapiens
agtcaaagctgggctttaatccttgtgagagctgatctctttccaatttgcccttatccctagagtggagcccttcatggtcccagctgaaagcgcgtgagccaccgcgcccagcccgctgaaagctcttttcagcctctcagcgctgcttttgcttttggaatcagcaattgtcttcagagtaaagtgtctccaaataccagtctcaccttacttggcttctctttttctccagatcttggactagcaaattctcactgcttttgtagctcttccatagctccaaattgctgtttttaaaaagtgctaatttgttcagcatttgtaattgttctcagcaagatgtttgaaaaagaccaactagtcagcctttgccagaaatggaactctatgacacacatttttagaaatataagttcattaagattaactttgttttggaagata

SEQ ID NO: 247785 - DNA, 372 bp, Homo sapiens
aggctctctagtctcgctggaggactcgaacatcggtacttccgagaccagctgctggaagtccaggtcctgggtctggctagctcccaggccttgaagccccaggtcctgcagacacacacgacgacgtgttcgagaagggccttggtactgggagaagggggcggggagctgagggagtgtttttttccttctgggcaagagaattaattgctcacagttgaaaggcaggaagtacccgcacagcctcccctccccagatctgcaggtcaaggtcatgtgtgcccgcatttgcacagagcctgactctgacatccgtgcacacacacgcctagtacccctgcactagtgcccccacgcccgccttcggaa

SEQ ID NO: 247786 - DNA, 1444 bp, Homo sapiens
gaggggcgatgctgccaaatcgaagaactcggctggaatatgcccgcacacgcaggttttccttcggatacccgtgaggcttgcatagaatccccggggcacggcccgagcaggagtagcgccgattctccctttcacacagtaggtgttcggcttcgggacagtgttctgctgcgtggcacacacaggacccgtcttacctgtgcacccagagcagccccttcccgcaactctcggcgttcttgggggaaggagtttccctctggataggggtgattcatcaccgcccgagcgggcggcctctgggaagttccaaccccaaaaggcgcgaccggacctcataccgtgaccacctagcccagccttacaggtcaccaaacgacagcccagagaggttacgtgactagctcgaggctgcacagcaagtccatggtggagccgggctactgcgcctcagtcctgtctctgaacgcccacgagccgcagcctgggtccaggagagcgagactagcagctctcaccgcggctctcaacgcagtcgggcctcactctgatctacagtgatgcgctttctttctcccagtaacagggctttgggccgggccctgtgctaggcgctgggggcaggagaccgcgaaaggaaactatccaggaagaaactcaatttatgtgaaccgaattgcctttgaaagttttagtactgaaagacagcccattgagaataatgtgtgagaagccagagacctcgtttcactggggacacaccccctcccggcttccctttccacgcctcccagcgcactgcattaccgtggcttcaggatgtgggggctgctacagtgttctagtagcctgacatcgactctctcaacccaagtccagcccatttccctgttcttgcttctgacaaagtgaggcccaatagggctcagactggttgctcagttctggaaagatcagggatgctgccagcatggctgtctcaacccactgagttctgtctaaacttcatttttaaaaaataaaaaaaattaagtatcagagggaaagaaattgacctgaaattatacagcaagtggaggcacagcagattcctgcatgattcctgcccctggatcaggagtctgctctacttgacctgtccctgttttcaggagttcttgaagaggatggagaaaaaatgagaatttaaccaggtttttcaagaatcatgtaaaatcaccttagtcggggtgtgttatcattaccagcatgtcctgcaggccaggggcgctgggactactctctctcccaaagacttgagacaggcagccccttctaaagcctctgcttccccgtttgtttaatacagagaacaaatcctgagatgtgacttcttaggctctgtgagatgaagcttcatggatgggggttattaatatctatcactccattccaggctcat

SEQ ID NO: 247787 - DNA, 489 bp, Homo sapiens
gtttgagtcttgtctcttttatttcttagtctagctagaggactattgattctgtttatttttttcaaggagccaattctttgttttatgaattttatctatggtttttctgttttttatttatttctgttctgatctttactcgtgccgaattcggcaccaggcggacttgatgactgatgttgcctctgcagcccacacgctggggttcaacactgggttatgctcgttttttcctggagtcagtgctgctagcttcatgttgctctgcgacaatcataggattgaggtcgaggaagacttttgaacaaactcctcaatttaaatccgccttgagcaaacgttctctgtggtctgagaagtggaaggggggagggataaatgagtgtctatgaatcaaagctttattatcttgtgattccattaatttgcatacagagtcttagaagtttctttattcaaaagcaaatgtggataaaaatgtattac

SEQ ID NO: 247788 - DNA, 519 bp, Homo sapiens
tagtctatgatcctgtaacaggataaaagtgaaaaataaagaagggtatccccatcatctcctccaaatgtgtatcaccgactcttaggatgctttatgacataagactttctcatttatgaattattgtgtgtaccacatattatatattagtgaggcttaacatctttcacagatgaaaaatagaatttctaatatgttcttcctacaacccaatgcatcatcttgcctgcttgctgaaaccacgtttgagactatcagcatatgagataaaacatgctcttgagtgtgcagtgggttccttacctcccctgctaaacaagtgagaaaaagagagccagcatggtgatgcccatcttgagttcccaagaggctgcagctggaggatggcttgagcccacaagttctgggccttagtgtgctatggcaatggggagccagggaccaccagattgctcaagaagggtgaatcagcccaggtcagaaaggaagcaggtcaacaaaaacaacaacaacaaa

SEQ ID NO: 247789 - DNA, 423 bp, Homo sapiens
ggaatcattatcaatcctttcatttcgaatccattatagacagcatccctcatacactttaagctctgtgcaggcagatcacatgtctgttttgtttagttttatcccaagcctcaggcacaatgcatagaatttagaaaaagctgaattgtatttttggatgaaagagtgaatgaaatgattgcatgttgtatatgccatgtaatggagaaacagcctctctgacattaactgaaatgagtttcaagcatctactacatttatacaatggactgcctgttataaaaggtcttattttgcaaagcattaaatctcttctggaaatcaatgtaaatatccagaaataaattcttttttatcttaatctctgcatttggatccacatccagccctattctagaacaggatttttattcattaaaa

SEQ ID NO: 247790 - DNA, 386 bp, Homo sapiens
cctaatattctggtcacacaaacgtaaactctaaatgggatttgatcaagagaaaaagccctttgttcttagtaaggcaagtacttgcgtatttcaggtatggttaggcaaatcctaccagtcattcaggactcaaaatcaaattcctctcctactctcccctctgaactttttttccctccttctcttatggaacatatcactgtactccttgtactttagctgtggtttttggcatattattataccagactggagaatccttaagggcaagaccctgtgggatgtgtcttttatctgcccagcacaacacccaaaaggctgcattgcataacatgtatttgttgaatgaaaaagtgactaatggaaataaagatgcccacata

SEQ ID NO: 247791 - DNA, 525 bp, Homo sapiens
gatggaccgtagacagagtaagtgctgtaatgaaagtgctgtaagtatgaatcccagctaagctagccacataattttaccactccgaatttgtcttaattgacaaaatggggataatatgaccaatctcataggactccccccataggatttttaaaggtttaaattaggtatgattggtaaagcacctgtcacataataggaattcaacaaatgctagttccctttccactgccctgaataacgtattagtttatctagataacagatgtttttgcatagtgaagtgcagctatgttaaattcctagtattgaatgtgtgagaaatgtaagtcactcctcctgaaaaaaaagttccttgttccttgttagtaacttacttgctttttcttactgcgcaccataataagtgtttctcaaggttaaaatcttacatcacttggattttgtcatataatattatctttgattatcttttactaaaatatacataaaaattcttatgataattaaaagtacatttta

SEQ ID NO: 247792 - DNA, 415 bp, Homo sapiens
caatgcgggcactcccctgtggcagggagggggagtcaaggaaaggaactcagcattttcagggctgcattttcacacagcaagccctaaagctgcgtttgtttcctgaaacaatcttgatttcattcagaggaggaaaacgacattttggagagtctgcggtctggggtgctttgatcctcgttcacagtccagggaggtgtagccacatccccctcctctgccctgcttggcaactcacttttttgtggaatggtggccgctggccactgctgttttgaccaaatagctgggtggaccctgaaggggccattctggccatttctggcctcaggctgggtgacggtagaggatgtagtgtcaaggttatgcgtgactgatcctttctgtaaaacagcccatcccatccctcaca

SEQ ID NO: 247793 - DNA, 347 bp, Homo sapiens
ccttgggccttgtctgggcctcagatggtgagtcccatgccttgtatcaatttagtcctgttggccaggctcggtggctcacgcttgtaatcccagaactttgggaggccgaggtgggaggatcacttgagcccaggagttggagaccagcctgggcaacatagtgagaacacctgtctctacaaaaacttaaaaaaattagccaggtgtggtggcacgtggctgtagtcccagctacttgggagatgggagatgggaggattgcttgagcctgggagttggaagttgcagtgagcctaggttgcacctgcgctccagcctgggcgacagagtgagaccccgcctca

SEQ ID NO: 247794 - DNA, 320 bp, Homo sapiens
ctggggctttgagccatgtggtatcaactcaacctctgggaagaggaagagaacaagagattaagaaccatgggcaatcattcaattgatcacgagagcaaagcatcctgactccaggaagagagggcgaaagaagcgtcaccttcagcatccttctagatctcgccctgtaagtttctccttttggctgattctgatttacatcctttggctataataacactgtcatcgtaagtacagctgctccctgaataactcaggggttggggcaccaatcccccacactgtcaaaaatctgcatataacgtttgattcccaaa

SEQ ID NO: 247795 - DNA, 318 bp, Homo sapiens
tgggatggctacactggagagtgatcaagagtgagtgtagggcaggggttggccgactttttccataaagtgctctgaaagttgcagattccaggagaagtaactattgtcagacccagacaaattggagcctagagaccagaaaggaaggaaactcatgcttgtatgtctgagataagaactgtctcaaggccagacgcggtggctcacacctgtaatcctagtactttgggaggccgaggcgggcggatcacgaggtcaggagtttgagaccagcctggccaacgtggtgaaattcccgtctctactaaaaataca

SEQ ID NO: 247796 - DNA, 490 bp, Homo sapiens
ccaaagcagcagaaaccggtggtgtgccttaagatgcatgctccaaagctgtccacaaggcctctggtacaggcttccaggtctacgtctcggcttccccgacagtgtccatgcgacactgtcaccagtttctcctctcacaagcagaaaatcaaattcggattgggcaaatgattccctgcccgggtgtggaataagggtcaagtcctaagtatggagagagagcgccggctcccgccaggatatgcgaagctctggaggggaggccaagccaccaggcacccggcgggagaagaggaggctggagagcgccgcccagtgcctgcaggccgggcgctccacgcctcccctccctcctgcacaccccattcccctccggttgccccgcctgggaagccccctccccacacctcccggcccagcatctgcacgagagccgcgagccctggcccagagctctgggtgggcctctcaccccagacggcggccg

SEQ ID NO: 247797 - DNA, 347 bp, Homo sapiens
gagaaaaactggtccaagtactgaggaagaaagcctcagaaacaccaaggttgccagggcagtgggctcttgttatcagatgaacagagtccctgaccgacacctgatctgctgcttaactggtatgtgggagccttctttctcttctggtggcatttttgttgacatttcttcctactgtcttctggcatttttattttgtaccctttttgacatattaatttggtctagataagctgtagtttgcctttaaggataatacgtaaatcacacaggttcttaacaccatgtgtttgtatgtgtgtgtatgtctagggagtaggtgcttagaactgtgtgcatctctg

SEQ ID NO: 247798 - DNA, 447 bp, Homo sapiens
aaatatgctcaatgagctaatgagaaataatgaaatcagggaagtgatacatgagcaaaatttctcagctatcttaaatatgctcaatgagttaatgagaaataatgaaatcagggaaatgatacatgaacaaaatttctgtcaacaaagaaacaaattatttaaaagaaccaaattctggaactggaaaatacagtagctgaattgaaaaatttactagaagagttcaacagcagacttgaacaggcaaaagaaagaatcagtgaacttgaaggcaagttatttgaaatgatcaagtccgaggaacaaaatcaaagaaaaaagaaaagtgaacagagtctgaaggacttacgcagtaccatcaggcagaccagttgatgcattactggagtccagaaggagaaaaaagagaaagggtggaaagataatttagagaaataatagctg

SEQ ID NO: 247799 - DNA, 332 bp, Homo sapiens
gtataaaatcatgcattgataaaatagccaatcaaagtgcaagatatgggctggacgccatggctcatgcctgtaatcccagaactttgggaagccaaagcgggtagattgaggtcaggagttcaagagcagcctggccaacatggtgaaaccgtttctactaaaaatacaaaaattcaccaggtgtggtggtgggtgcctgtaatcccagctactcaggaggctgaggctggagaattgcttgaacccaggaggcggaggctgcagtgagtggagatcgcaccattgcaccccagcctgggcaacaagagcaaaattccatctcaaaaaaa

SEQ ID NO: 247800 - DNA, 226 bp, Homo sapiens
aggaacgaagatggccgggcgcgccgcgggaacggaggggcggccggcagcggcggcggcggcggcggcggctcccgggctgtgacttcgcgcgcggcggccacccgggctacctgaacggagtgggcggcgcgggcagcggcttgctagggcgggcgggcggacgccggtgcacgggcgccgggcggaggatgcgccaggagcggcgggcggctccccgcggccg

SEQ ID NO: 247801 - DNA, 433 bp, Homo sapiens
aggcaaacggtttggccaatctctcaccagtatattaaccacatgggcaaagaaaatattttttcaaaatggatgtttttgctttagggtggagggatatgatatttttctttctatcttaatttccttccatgtttatgtttaaaattacttagtaagtaaaagtaatggttatgttagataaaattcattcaccacccttaatatgactcagtgactcaaagacaaagttccagagcaaagggtcaatcttgtgagagaggtcatgcagaatttacaaaacaaaatttatacagaacactcagaagtataaaaaagatgaagttcattattgtttataattactcacttactctgaagctacctttcctcctgctggcagagaaaaattcaaattaattaaattaattttaattaagggaaaaaaaaaaaa

SEQ ID NO: 247802 - DNA, 288 bp, Homo sapiens
tatctgccacctgagagagtattgccagcctgattcgtttagtgtgaacaagcagccatgatcagaagaagctgacacctgctgagctgagctccaacagcctaagaccctagcttttgtgggggggtggtttagactctgaagtcatggggctgataaggtaatgactgctggttttcaaaatgctttctccttcattgtttgattggatccctccttctgtctcatgagattgtcagagcaaggattgtttgaaatgtaggttaatcctttccttgaactaagtga

SEQ ID NO: 247803 - DNA, 667 bp, Homo sapiens
gagacggtgtatcaccctgttgggccaggtttgtcttgaactccagacctcactgcctgccttggcctcccaaattactgggattacaggcataagtcactgcgtctggcttgggggagttactgttgaagtattgtctttgtatcccaaagcaggcccttctgaaactgatgatgttgatgaaaaactccttctactgaagtctttgcaatgtataatcttttcacttccattttcctacatactgtttctattggttccttgtattccacagactgtgttttagtatttataagtatagtgttccttttctatgtggaaaagggaaaatgtattggcctttttttaacatataaatgaacttcacaagcaacaatttttcaaatcagttttccctgttgtgaatctcgaagtgggtacatgatgcactttcccatttaaggtaaagtacacatttatcccttatctcagaacagtcagaagtcaggttcttattgtatggttagtaatgcaaatattgataaggtcatgtcaatacttagtatttagaagaattctgaaatagcacttgttactctgtaagttttatgcatttattactttttttgaattttttataatgttcccaaacttgactgccttacttctatctcttctggcctcaagt

SEQ ID NO: 247804 - DNA, 845 bp, Homo sapiens
aaaggtatctaaaatcagagatgatattttaacattgtggctggatataagataaatctgtgaacattagtagtaaaaccatatactagttataaccagctccaaaatacaatgaaaatgatttatatagatccatttacacactacttaccaaactaaacaactctcagaatcatattagtccggataagctatgttttgctgcagtaacaaccctaaatttcagtggcttagctgagtgtggttgtgtgcacctgtactaccaactactcaggaggctgagacaggaggattgcttgagcccaggagttccaggctgtagtggtgatgatcacgtctgtgcatagccactgtactctagcctgggcaacatagtgagaccctgtcccttaaaaaaatgttagtagttatgctacacatacattgtgggtgggatagtaggttttctatccagtgattatctctactctctagaagattgccagtctccttggcagatggaaagagagactggggaattgcatgttggctcttaaacttgttctctgaaagcaacagatcctttttattcatattccattggttaagatcacatggtcaatcacttggacacacttatctttcaaagggccaagggtgtacagttcaactttgtacctgagaagagaactgaaaatatttcatgaatagcactaataattgtagcagtattgaaatataaaaatgaaaaccaaaaaagcacaaggaaaagattaatacatgtgactataaagggtataatctctgaattatattgaaagcataaatgaacagttctaaacatggaagtctttagatcagtatga

SEQ ID NO: 247805 - DNA, 742 bp, Homo sapiens
tttttttccagaaattgttgtttatttgtgccttttaacatatttctcactggatactgaaggcaggaggtccattcttctcagtttgtctacctttaatgttaatgattataactcttgagttattttggattgtatacagacagagtggacacgaggctatttgtagataagtgaacattgaaagtggtcacatgtaattattaaatgtttttctttaccttcaggtctttccagctaaagtaattcattgatgttttcaatctttcatccccaaaccctgtgttgagtgcctgtcataagcagagttgggagtatgtcactcatcaaatccattgccactgccctcaattagaagcagtgcttggttcagatttccagtatattctgtgtgcggctgccatgggaatcctcgttcaagctttcatcatatcagcctcctagtagaagatttcaaacacttttccttgcttatgagataatattccaagctgcttgtttggaattcaaggatctcatgtcaccctgatttacttcagcctaagatgactgaattgacactttgcattattgcactccaataatgtttaagtcctaacgtctaatactaagaaaaactggctaattaaatgctgctgatagtgtttctatttctacatttttgttttggtaaaaatattttagtgagacttatggttacataaagcttctgcttttcaaataaagaagtttgaaaaactga

SEQ ID NO: 247806 - DNA, 559 bp, Homo sapiens
atcctatagttcatactccatgattcttgcgggaggtctttgtagacagaagctttactaaaagataaaagcagtaggagatcgttaaaactcagcagttgatcaaactctttctgaaacctaggcttagaagccaagcagagatatgaacatgggaaagtaattaatctattacagtctttcatgataattttcactttctcaaactgttgaagtaaataattgttgggtacctatttactctaaccaaatattaacctttttattcttttcagcttttaagtactgcccattccacttctatattttgatccctcaatcagatagctaatttaattccagcattagttatgcagattttattccactggaccaaagcaatatactgtgttcctcttcccatttaattttattttaaaactttgcttgcagagctgaaagatttcttagagttttcatggggctggggttctggctgcttgcttctagattgtatcaaagcagctctgccttttttctgatttatttgttggactactccatgagattttgtctgaaa

SEQ ID NO: 247807 - DNA, 176 bp, Homo sapiens
ctagtttcttctcctagtttcaacagtaagataaatcattcccacctaggggagagaatgaagtctggaatcactaatagtgttataccctgggaatgtaagttccctcatgcaacatgagggggaggaataagatttccaccagataaataaataaatagtctgtggtgcaccca

SEQ ID NO: 247808 - DNA, 484 bp, Homo sapiens
atcatattcaactattcaccaaaccagtatcaactctattaataatcctaataataaggcccctcaaatatcagtacttggccctcatgtttcaggatactcctcaatagctatcactggagtataaccaaaaataaccattataccacccaagtaaataaaaaagactattaaccccatgaaagccccaccaaaattcaacacaataccacaacccacagcaccactaataattacccctaagcctcaataaataggagacagttttgaagaaaaacctacaatccctataaataagacaacacttaatagaaataaagcatatgccattttcccacgtggactataaccatgactataagacctaaaaaaaaaaagttaaatgtaagacttaaaagacttaaatgttcactgttactgtaaatatagaaatggcaaactattaaataacaacaataaagtttgaagtctgtgctctaaaatt

SEQ ID NO: 247809 - DNA, 321 bp, Homo sapiens
gcaatcataggcatgagagtaagtgtgcaaccagcctccagatagggagtcgctgcaaacatttatagacatttttggattggggaaaagtgtgtagaaatgtatgcataaagtacttatgtaatagggtatacacaatcagtttaaaaacactaaacacttgtcaaaatggcagttaaatttttttcagaattaaatgaaaatgatggaacaagaatcaggaaagtaattacccagaaaaaaaaaatgtttcttggatttgtaattacagttaattgctatgaaacaccatgttgatttgaaaagctgttaactaaattg

SEQ ID NO: 247810 - DNA, 476 bp, Homo sapiens
ccatctgaagatttgcctgagactgaaggatccacttctgcgacgactccctcaggacttataatgcagatggaaccagattgagaaaaaccagccaaccaaccaaccaacatgatggctgaaccagacaagagaagtcccgaagtaaaatacccaccaattaccagaatctgtgcctgccatacatcgaagtctctgacttctttattccacatgactctgcaaatctacgtctgaacttatattctcctgaaaccagaacggatgaaactcattagatgctccagcctgggggattaatgtttaccttgatttaatgtctcatcagaagcatgacatccacagcactctggctgcagcaggattaaatgaagcatggccgtttcttcaagagagacttaaacttcaagcctttagccctagagggaatgggcaggagatgaagagagagtaaaaatctattgaactaccaatga

SEQ ID NO: 247811 - DNA, 426 bp, Homo sapiens
ttacataaaagtttacccagatttacctagattctagcttgtgctttttcctccaacagttgctgatggggagaggaaaaaatagccactattcaggttccctgtgagttaactgctgctgtacaaaggcaggtgtaatattttctctgtattaaaggtgaggagaaatggcccagtgccctaaacatttatctatggccccgataagctaaaaactcctaaatcttcccatgcaattgttgtaatctcttgctttccacagttccactggttcttccttgggattttcccaaccacaaccctccttaagaccttaaagatactttaacctagcttaggcctgacatggacagatttccttttctgctagcacagtccagataagattagtttaaaaaaaaacaaactatattatgaatccgtggt

SEQ ID NO: 247812 - DNA, 609 bp, Homo sapiens
tcgaccatgccccttcgttccagctgcttgctgataggctggcccaggcgggatccatccttctgatcgccaggtcctgatgaggctggtgccaccactacatccattccagggagactcccagtctctgtcagtttcttctgcttttctgaattctaaactcactctgatctgatttcattatttgtctgttgtggtagctttggtgaagttggaccacaaataatgatatagaagaaaaaatgaaccttttttcttctttcctgtgtccttttatcaggtatcatttcctctataaaactaattttaagttgatagagtcttaggtctatagccactgttgaatgcacctaatcaggccatctccttgaactagagaatgtttgcatcataggatagataccaggttccctgagaggtgggtaccaggtgcctgggaagtgaagtaacttgccaagaacagagagccagggagtgacattgcaggcatttaagcctaggcagtctgagtcccgaaaacaagtcaagacatttattgtctttccatttcttacccatgttcttactgttttgcctggactcctcttttaatctcagtgaaaaaaaaaa

SEQ ID NO: 247813 - DNA, 2085 bp, Homo sapiens
tcgacaccacgtccacgccagtcctcagctccaggagctgggcgggatccctcatcccgctcagctgggagatgccccgggagggcgtcccccggctccgggcggcgagggtagtagccgaccccaatccactccgggggccgccgggggccgcgtgaaggcaggtgttccggggagaaacgtggaagggaggcgcggcctggggccggtggcgctcggctgggggccgcagttggctcccctgggggctctgggcggcggcagctcccgcctgtggggaggagaaggagccggatgggcgggttcaggcgcgcgcggcggcggtcccggggccgccggctcctccccgcgagggtgcctgtccgccgctcgccgcgctgaggcagtgcggggcgggcgcgcctaggctgccgcccagcgccctcgccgcggccatgcccgggccctagagcgcctgccgcagcttgcgccccgcagccccgcagccccgcgcccgccgccgcctcttcaatgggcaacctgctcggcggggtcagcttccgcgagcccaccaccgtggaggactgcgactccacctggcagaccgactcggagcccgagcccgaagaaccagggccgggcggcggcagcgagggcccggggcaggagtccgagcagcccgcgcagcccccggagcaagccggcgggcggcccggcgccagccccgcgccggacgaggacgccgaggcggcgggcgccgagcagggtggtgattccactgaagcaactgccaaaccaaagagaagtttttatgctgccagggatttgtacaagtaccgacaccagtacccaaacttcaaagatatccgatatcaaaatgacttgagcaatcttcgtttttataagaataaaattccattcaagccagatggtgtttacattgaagaagttctaagtaaatggaaaggagattatgaaaaactggagcacaaccacacttacattcaatggcttttccccctgagagaacaaggcttgaacttctatgccaaagaactaactacatatgaaattgaggaattcaaaaaaacaaaagaagcaattagaagattcctcctggcttataaaatgatgctagaattttttggaataaaactgactgataaaactggaaatgttgctcgggctgttaactggcaggaaagatttcagcatctgaatgagtcccagcacaactatttaagaatcactcgtattcttaaaagccttggtgagcttggatatgaaagttttaaatctcctcttgtaaaatttattcttcatgaagctcttgtggagaatactattcccaatattaagcagagtgctctagagtattttgtttatacaattagagacagaagagaaaggagaaagctcctgcggttcgcccagaaacactacacgccttcagagaactttatctggggaccgcctcgaaaagaacagtcggagggaagcaaagcccagaaaatgtcttcccctctcgcctccagtcataacagtcaaacttctatgcacaaaaaagccaaggactccaaaaattcctcctcagctgttcatttaaatagcaaaacagctgaagacaaaaaagtggcaccaaaagagcctgtggaagagacagacaggcccagcccagagcccagcaatgaagctgccaagccaagaaatacagagaaggacagtaatgctgagaacatgaattctcaacctgagaaaacagttactactcccacagaaaaaaaggagagtgtatctcctgagaataacgaagaaggtggaaatgataaccaagacaatgaaaatcctggaaatacaaattgccatgatgttgtactagtacagtgaattatcagaaaacccagaagccagtttaggctagagaggaaaaaactactgtatcatttatcctaaagaacagagatgaggtcaatttcaaattttagccatctgtttgtgatttctgtcataagcattttgttgtttgtttttttattttggatgacaatgaattgaatatctaataaggagatttaagataagacccaataaatgaatgtattctgt

SEQ ID NO: 247814 - DNA, 1224 bp, Homo sapiens
cggcacgaggagaagtttttcataatctcctttccatttacttagaacttcttcaatgtaaacaccatctggcctaaatggaaaggagattatgaaaaactggagcacaaccacacttacattcaatggcttttccccctgagagaacaaggcttgaacttctatgccaaagaactaactacatatgaaattgaggaattcaaaaaaacaaaagaagcaattagaagattcctcctggcttataaaatgatgctagaattttttggaataaaactgactgataaaactggaaatgttgctcgggctgttaactggcaggaaagatttcagcatctgaatgagtcccagcacaactatttaagaatcactcgtattcttaaaagccttggtgagcttggatatgaaagttttaaatctcctcttgtaaaatttattcttcatgaagctcttgtggagaatactattcccaatattaagcagagtgctctagagtattttgtttatacaattagagacagaagagaaaggagaaagctcctgcggttcgcccagaaacactacacgccttcagagaactttatctggggaccgcctcgaaaagaacagtcggagggaagcaaagcccagaaaatgtcttcccctctcgcctccagtcataacagtcaaacttctatgcacaaaaaagccaaggactccaaaaattcctcctcagctgttcatttaaatagcaaaacagctgaagacaaaaaagtggcaccaaaagagcctgtggaagagacagacaggcccagcccagagcccagcaatgaagctgccaagccaagaaatacagagaaggacagtaatgctgagaacatgaattctcaacctgagaaaacagttactactcccacagaaaaaaaggagagtgtatctcctgagaataacgaagaaggtggaaatgataaccaagacaatgaaaatcctggaaatacaaattgccatgatgttgtactagtacagtgaattatcagaaaacccagaagccagtttaggctagagaggaaaaaactactgtatcatttatcctaaagaacagagatgaggtcaatttcaaattttagccatctgtttgtgatttctgtcataagcattttgttgtttgtttttttattttggatgacaatgaattgaatatctaataaggagatttaagataagacccaataaatgaatgtattctgt

SEQ ID NO: 247815 - DNA, 1173 bp, Homo sapiens
tgtttatcgatgccaccactccaccaactggccattccatctctctccctctccttgggcctccctattccctcggataccaccatattaaaattaggcccactgaataacccttccctgacctataagtgttcaagtgaaaggaagagtcacacgtttctcactttaaacgaaaagaacagtcggagggaagcaaagcccagaaaatgtcttcccctctcgcctccagtcataacagtcaaacttctatgcacaaaaaagccaaggactccaaaaattcctcctcagctgttcatttaaatagcaaaacagctgaagacaaaaaagtggcaccaaaagagcctgtggaagagacagacaggcccagcccagagcccagcaatgaagctgccaagccaagaaatacagagaaggacagtaatgctgagaacatgaattctcaacctgagaaaacagttactactcccacagaaaaaaaggagagtgtatctcctgagaataacgaagaaggtggaaatgataaccaagacaatgaaaatcctggaaatacaaattgccatgatgttgtactagtacagtgaattatcagaaaacccagaagccagtttaggctagagaggaaaaaactactgtatcatttatcctaaagaacagagatgaggtcaatttcaaattttagccatctgtttgtgatttctgtcataagcattttgttgtttgtttttttattttggatgacaatgaattgaatatctaataaggagatttaagataagacccaataaatgaatgtattctgtaatgcttttaggatgtgaattttcaaattttgtatataataattactttgagaatattttcagagtatctagaaattaccatgtagtatttggtatacaaaatacattcttttgagacattatagtctacatgaaggaaatcaagaggataatttcattggattgctacacttttacctgatttatggctttattttactttattttattttattattattttttgagacggagtctctgttgcccaggctggagtgcagtggcatgatctcggctcactgcaacctctgcctcctggactcaaacgattctcctgcctcagcctcctgagtagctgggattacaggcgtgtgccaccacgcctggctaattt

SEQ ID NO: 247816 - DNA, 1122 bp, Homo sapiens
tcgacaccacgtccacgccagtcctcagctccaggagctgggcgggatccctcatcccgctcagctgggagatgccccgggagggcgtcccccggctccgggcggcgagggtagtagccgaccccaatccactccgggggccgccgggggccgcgtgaaggcaggtgttccggggagaaacgtggaagggaggcgcggcctggggccggtggcgctcggctgggggccgcagttggctcccctgggggctctgggcggcggcagctcccgcctgtggggaggagaaggagccggatgggcgggttcaggcgcgcgcggcggcggtcccggggccgccggctcctccccgcgagggtgcctgtccgccgctcgccgcgctgaggcagtgcggggcgggcgcgcctaggctgccgcccagcgccctcgccgcggccatgcccgggccctagagcgcctgccgcagcttgcgccccgcagccccgcagccccgcgcccgccgccgcctcttcaatgggcaacctgctcggcggggtcagcttccgcgagcccaccaccgtggaggactgcgactccacctggcagaccgactcggagcccgagcccgaagaaccagggccgggcggcggcagcgagggcccggggcaggagtccgagcagcccgcgcagcccccggagcaagccggcgggcggcccggcgccagccccgcgccggacgaggacgccgaggcggcgggcgccgagcaggtacgcggcccagcggtggcctcgggtcgggctggggcgccccgacaccccagaggggcaagtgccaagccgccctcgcgctcggaggccaggggcgccaggtggctgctcgccgctgcgacccgacccctccgcgccgcggctgacctgtctcccggtggagcccgggggcctgcaggagcccaaagcgccggaccctcccactgccggcctggggcctggccgagggcacggcgaggaagtccctcaaggcagaacccaacttgaatgggtgttttctttgcctctgcagagcagctggattatgcgaaggtggggtgggaggaacctgtctaaaaatagaggattttgacaacccctctagtgtgtgttattggt

SEQ ID NO: 247817 - DNA, 2000 bp, Homo sapiens
agaaaagaaggaaacaaagtatgggcaattctttggtggtgatttgctataaaaaaggagtagatatatggatctgtaattgatggtaggcctgggtcaaggaatgttttgtatgtttattttaagattaaagatactacagcatgtttgtttgagatcgagaagagagggaaattttgatgatccaggaaagaggaacaatattgaacaacagaatccttgtctgagcaggtgaaaggggtctgggtagagagtccaaagggaataggggttggaagagcaggagcagatgctggcaggacacagacattcttatgataatcctgagaaataggtagggcttgagtcattatctttatttcagagatgataaaactaagattcagctaaatgatttgcttaaggcctcacaaatacaagtaagcagcgttcagattgctagtcttctgactccaagtcttgggctactgatactacaccaaggtttccatatatccttcattttttagtgtgactgagattgattcagacctggacttgggacccagagcctgggattcttgttcttgcactgtcactggactctgggtggtgtgcaacttctctaagcccctgatatcttgtttctaagatggaaacacttattaactgtcaatcagggtggtgattccactgaagcaactgccaaaccaaagagaagtttttatgctgccagggatttgtacaagtaccgacaccagtacccaaacttcaaagatatccgatatcaaaatgacttgagcaatcttcgtttttataagaataaaattccattcaagccagatggtgtttacattgaagaagttctaagtaaatggaaaggagattatgaaaaactggagcacaaccacacttacattcaatggcttttccccctgagagaacaaggcttgaacttctatgccaaagaactaactacatatgaaattgaggaattcaaaaaaacaaaagaagcaattagaagattcctcctggcttataaaatgatgctagaattttttggaataaaactgactgataaaactggaaatgttgctcgggctgttaactggcaggaaagatttcagcatctgaatgagtcccagcacaactatttaagaatcactcgtattcttaaaagccttggtgagcttggatatgaaagttttaaatctcctcttgtaaaatttattcttcatgaagctcttgtggagaatactattcccaatattaagcagagtgctctagagtattttgtttatacaattagagacagaagagaaaggagaaagctcctgcggttcgcccagaaacactacacgccttcagagaactttatctggggaccgcctcgaaaagaacagtcggagggaagcaaagcccagaaaatgtcttcccctctcgcctccagtcataacagtcaaacttctatgcacaaaaaagccaaggactccaaaaattcctcctcagctgttcatttaaatagcaaaacagctgaagacaaaaaagtggcaccaaaagagcctgtggaagagacagacaggcccagcccagagcccagcaatgaagctgccaagccaagaaatacagagaaggacagtaatgctgagaacatgaattctcaacctgagaaaacagttactactcccacagaaaaaaaggagagtgtatctcctgagaataacgaagaaggtggaaatgataaccaagacaatgaaaatcctggaaatacaaattgccatgatgttgtactagtacagtgaattatcagaaaacccagaagccagtttaggctagagaggaaaaaactactgtatcatttatcctaaagaacagagatgaggtcaatttcaaattttagccatctgtttgtgatttctgtcataagcattttgttgtttgtttttttattttggatgacaatgaattgaatatctaataaggagatttaagataagacccaataaatgaatgtattctgt

SEQ ID NO: 247818 - DNA, 2458 bp, Homo sapiens
tcgacaccacgtccacgccagtcctcagctccaggagctgggcgggatccctcatcccgctcagctgggagatgccccgggagggcgtcccccggctccgggcggcgagggtagtagccgaccccaatccactccgggggccgccgggggccgcgtgaaggcaggtgttccggggagaaacgtggaagggaggcgcggcctggggccggtggcgctcggctgggggccgcagttggctcccctgggggctctgggcggcggcagctcccgcctgtggggaggagaaggagccggatgggcgggttcaggcgcgcgcggcggcggtcccggggccgccggctcctccccgcgagggtgcctgtccgccgctcgccgcgctgaggcagtgcggggcgggcgcgcctaggctgccgcccagcgccctcgccgcggccatgcccgggccctagagcgcctgccgcagcttgcgccccgcagccccgcagccccgcgcccgccgccgcctcttcaatgggcaacctgctcggcggggtcagcttccgcgagcccaccaccgtggaggactgcgactccacctggcagaccgactcggagcccgagcccgaagaaccagggccgggcggcggcagcgagggcccggggcaggagtccgagcagcccgcgcagcccccggagcaagccggcgggcggcccggcgccagccccgcgccggacgaggacgccgaggcggcgggcgccgagcagggtggtgattccactgaagcaactgccaaaccaaagagaagtttttatgctgccagggatttgtacaagtaccgacaccagtacccaaacttcaaagatatccgatatcaaaatgacttgagcaatcttcgtttttataagaataaaattccattcaagccagatggtgtttacattgaagaagttctaagtaaatggaaaggagattatgaaaaactggagcacaaccacacttacattcaatggcttttccccctgagagaacaaggcttgaacttctatgccaaagaactaactacatatgaaattgaggaattcaaaaaaacaaaagaagcaattagaagattcctcctggcttataaaatgatgctagaattttttggaataaaactgactgataaaactggaaatgttgctcgggctgttaactggcaggaaagatttcagcatctgaatgagtcccagcacaactatttaagaatcactcgtattcttaaaagccttggtgagcttggatatgaaagttttaaatctcctcttgtaaaatttattcttcatgaagctcttgtggagaatactattcccaatattaagcagagtgctctagagtattttgtttatacaattagagacagaagagaaaggagaaagctcctgcggttcgcccagaaacactacacgccttcagagaactttatctggggaccgcctcgaaaagaacagtcggagggaagcaaagcccagaaaatgtcttcccctctcgcctccagtcataacagtcaaacttctatgcacaaaaaagccaaggactccaaaaattcctcctcagctgttcatttaaatagcaaaacagctgaagacaaaaaagtggcaccaaaagagcctgtggaagagacagacaggcccagcccagagcccagcaatgaagctgccaagccaagaaatacagagaaggacagtaatgctgagaacatgaattctcaacctgagaaaacagttactactcccacagaaaaaaaggagagtgtatctcctgagaataacgaagaaggtggaaatgataaccaagacaatgaaaatcctggaaatacaaattgccatgatgttgtactagtacagtgaattatcagaaaacccagaagccagtttaggctagagaggaaaaaactactgtatcatttatcctaaagaacagagatgaggtcaatttcaaattttagccatctgtttgtgatttctgtcataagcattttgttgtttgtttttttattttggatgacaatgaattgaatatctaataaggagatttaagataagacccaataaatgaatgtattctgtaatgcttttaggatgtgaattttcaaattttgtatataataattactttgagaatattttcagagtatctagaaattaccatgtagtatttggtatacaaaatacattcttttgagacattatagtctacatgaaggaaatcaagaggataatttcattggattgctacacttttacctgatttatggctttattttactttattttattttattattattttttgagacggagtctctgttgcccaggctggagtgcagtggcatgatctcggctcactgcaacctctgcctcctggactcaaacgattctcctgcctcagcctcctgagtagctgggattacaggcgtgtgccaccacgcctggctaattt

SEQ ID NO: 247819 - DNA, 298 bp, Homo sapiens
tgcagaacttattgtgtcaatctcctggttacggcccctccatggctccccacctgacataggagacccttcacaatctggcttctgtcactcataacttgtctccagccttcattcttcagtctgattttatggttttctagttccccaatacaccacaccagtgtttatgaaaccctagtcattggcctacgaactttatgattattgacatattcatgtaccacctgtattattttttgcatagtgtttatttttaattgactacatttttaactacaataaagtaatttcaact

SEQ ID NO: 247820 - DNA, 777 bp, Homo sapiens
aaattcgccaggccatactgctggagcccattcagataaaactgcccaatactgagaggtgttttctacacccagctagaggagcacactccattttcccatgtctgacttcgtggtgtgagccctgggccctactgaccatggcgcaggacagctgtccttcagaaagcacacggtcaatccacgtggaccgtctccctcgcaggaactccgcatccttgtccctctctgcattcccagtttccgcaggagccttgatcaatggggaagcctgggtgaggatgggccaggtcccaattcccaaagctcctggaagagcctgaagacattgggaaaggctgggcctggggaggaggcagccctgggcccgctgcccatgcctctggtcctgggtggagcaggaatagttccactgtattgtcacagtgtgtttgcactttctgaggttctagctagtacagattgtatattgatagtacatattgctttgtttatgtctttgagatgagaaaggcttaaaacttgagaatatatatttggaatacagccttagaacggtttctgtacacatccacgtgcacttcacgggtgatcagttctagtacctacttgaaacagtgtctgtctgctactttattttcccaatttgatacataccctgatttgatgttttggtatttgagatgaactctgagtatgaagctgtaccataatgcaggacgtcagttttggtgtgactggacatacttgcttcaataaaagaatacatcactcccc

SEQ ID NO: 247821 - DNA, 481 bp, Homo sapiens
gagggggaggttgcagtgagctgagatccctccactgcactccagcttgggcttcagagtgagactccatctcaaaaaaaaaaaaaaagaaaagaaaagagtcttagctggatgaccttctgtttcctcattataaaatgggcagaaaaccctctttggaggctgctgtatcagacatcatatgttcaagtggctggcatagagcctggtccatgatgggcactcaacttttaattatcataattattatataatgcatcccaaagccagtgcagtggtgtgtatctgtagtctcaggtacttaggaggctgaggtgggaggatcactggagtcctggagttcttcctaagttctcaaataggggaataacaccaagcctgaaaggaagaaattgatggacagagaagcagctcatggatcctgagcatgtgggtgctggtgaggatgtagggtgtggcatcgaaaaggctggcactaatt

SEQ ID NO: 247822 - DNA, 358 bp, Homo sapiens
ctgctctatagtgctgttgcttaaaaagtcatctgtgaagaaaaccagagggagaaatttcacctgccaaagtggataaagaggactgtgcttgcagcaagaaatattgagggatgaggtactaccttcactcagataaagaacttgcttgcttcagcttgttgtaaaatggcaagttccccaagctgtgggttctataagtgttcctctgttgtgaagcaacccatggcctatgcaagtatccacctgagtcctctgcattggacttgggaggaggcaaggagaactaatataaacatgatgctcatgctacttgctgtgctatgaataataaattcctttgtctctaaatctcaaa

SEQ ID NO: 247823 - DNA, 519 bp, Homo sapiens
aaacgttggagaaaatctttgtgaccttggattatgcaatgatttcttagagatgacaccagcaaaatttcataacagtaaaatttgatcaattggactttagaaaatttaagaatttctgctcttcagaagatactattaagagaataaaaatacaaaccactgggagaaaatattttgcaaattatacaacaaaagatttgtatctagactttacacagaactcttaaaactctgtactaaaaaagcaaggagccaagataaaaaagatgggcaaaagatttgaacagacccaagaagatatacagatgacaagtaagcacacgataagatgttcgatgtcattgaaatgcaaatcaaaccagagtgaattacatctctattagaatggctagaattaaaaagtctgaccaggtgttggctaggatattaagtaactacaattcttatacactgctggtggaaatgtaaaatggtacagctactttggcaaacaatttttgccctttcaaaaagtta

SEQ ID NO: 247824 - DNA, 389 bp, Homo sapiens
tagcaggaaaaaaagatgaatgaaccaggagagagagaacatgtttttaaaatggcgcaaatgcaccccatctcccccgattcctgctggctgggcaagatggggaaatggcgcaaatgcaccccatctcccccatctccccatcttgcccaggaactccaagacatcaagatttcacgatttttaagacgtcaagatgctagcatgctaacaccatcacggttctagaactttaaaggtgtcaagattctaaagccttctggattctagaatcctgtagatgtcagcattctaaagtaccatcaggttctttatttactggattcattagttccaggattctatgagcctggtgtttagcctaaaaaataaagataaattaaaattga

SEQ ID NO: 247825 - DNA, 708 bp, Homo sapiens
gaaggagatcacgttctttgcagggacatggatgaagctgaaagccatcatcttcagcaaactaaagcaggaacagaaaaccaaacccctcatattctcacttataagtaggagctgaacaatgagaacacatggacacagggagggaacaacagtcactgggccttttttggggaggatggtgtggggagaacattagagaaaagagataatggatgctaggcttaatacttaggtgatgggttgataggtgcagcaaaccaccatgacacacgtttacctacgtaacaaatttgcacatcctgcacatgtatcgcagaacatcataaaataaagtaaatctacattgaacttaaaaacaaactctccaacctcattgtcccaccatccccctcccccagtctcctgctagagcttctcgtcctcttcgtggctgaatgaggaagacagaaaggagggaagtcctttgatttagttcacattggtcggcctcccagggcacagaggcagggagaagtagggcagagggtggatctgaggggcaacacagacatgtatccggtccagtgaatgatactgcgtctgaataacaaatggccatgtatggacaggtcactcctgaatggacaaatggccagccaggacagtttaattttactctgtggctaatagagagtcagataaaatgttggcacaggaactgacatg

SEQ ID NO: 247826 - DNA, 486 bp, Homo sapiens
  misc_feature (137)..(137): n is a, c, g, or t
cagtacagtctggtgagacatcaccactattcgcatttacagggcaaacctggctttattgtcggtcattaagaacccataagttgtcgtgaacttcacctcgtgtggatatacctaataagcactctaaatacatngaaactctccaacctcattgtcccaccatccccctcccccagtctcctgctagagcttctcgtcctcttcgtggctgaatgaggaagacagaaaggagggaagtcctttgatttagttcacattggtcggcctcccagggcacagaggcagggagaagtagggcagagggtggatctgaggggcaacacagacatgtatccggtccagtgaatgatactgcgtctgaataacaaatggccatgtatggacaggtcactcctgaatggacaaatggccagccaggacagtttaattttactctgtggctaatagagagtcagataaaatgttggcacaggaactgacatg

SEQ ID NO: 247827 - DNA, 398 bp, Homo sapiens
gtatgtctgtatcattgtgcaattgcctgtgtcatcatttatttatccaacctgggttaatgtctttgctattatgaatagtgctggactgagaattttctaaacacagctgtgtgcattttcctcttcttgcgatttagaagtttaactgctgtattcaaggtactgtaatgtattcgttctgtgcttgcttggagacttgccgactctgtgtgtctcagctcataccctcttccttccccagtagaagtaaccacaactgtgtttatgtgatcatcgttttcttaattttccttgtagtttttccaggggaaagtttatcccttaagaagacagttcattttgcctggtgtaaattttatttagaagaaatcacattaaaagtattttttgggctt

SEQ ID NO: 247828 - DNA, 429 bp, Homo sapiens
ccccctaaatgcttttctcacttggagcagcccaaaatgtagctatagagaggatgtcagtttccaaaaggaaaaaaacaaaacaaggattgggaggctctatgcttagtcattttcgtttctgaggctatcgctatcggccagccgggctcggcgccagggccgccgtaatcatgattttattctacactcccaacaactggccagaaacgttgattgctccgacttcaggtgacacctgtgaggtcccgtgagtccaaattgcctgtggtcacgcggctaaagagacgtcagtgcagtcagagagggactccagcttgggcccaagggactgcacagccctccgcctccctctccacttgccaagagggccctgtgcctgcggccctgagggccagtgtccgtccccaaggagcgaggatggagccc

SEQ ID NO: 247829 - DNA, 354 bp, Homo sapiens
ttctctctcacttatacgatatacttcaaggacgtgaacagttacaatacccagtctttcttacctgttgtcttgcctgtggggtcactcactcaattttattttaaaattactgaataactacttcatgccaggccctgcaccaggctctgtgagaggacaagaaggattattgcctcttgtaggagaaaacagatgtgcatatcattaattatgatggggtatgataagtattacaatgacaaaagctatgaataaagtgctacaaggaacagaagcagggataattaaatccatttcagtggaatctatttcaatgtacaatagtctcccctaatctgcagatatgggaag

SEQ ID NO: 247830 - DNA, 487 bp, Homo sapiens
ttatttaacaaatattgctgcgtgcctggtagagaccaggtgtatgcttggctctagggatacagcagaaagcagagcagacagaactctctgtcttcatggtgctcatgtccttgttggggatggtagagacacatcataaacaaataaagcgtatagtgtatcagatggtgatgaacagtatggaggaatgagctagagaagggtgtaggggacagtaggcaacgattacacattgaagtcagttgatcttggaagtcttctctgaggtgaccttgggccaagatcaggctgaggaagagaagacttggagcagcagaggtgaggtcctgcagttttgaggaactcactgaggttagggactcttctcatgccattcagctagggaatggctgataataaatgtatgctttatagtctttactcactctccatgttcttggtttaaaagatgcctgaatcccccctcccccccaccaaaaaaaag

SEQ ID NO: 247831 - DNA, 234 bp, Homo sapiens
gagaatctagattttgattgtttgtatttgatgggattttcaaattacttttaaaagtaagtcataagtgccagcctgaattagagggggaggactctctagggactcaggctgtgttttgagaaatgtgcttgggagcacagtgcaccttatccccagaaaggaaaagtgcccttgaagattacaagcaacaatttctatcttgcctccaacatgaccagaatagggtggagc

SEQ ID NO: 247832 - DNA, 478 bp, Homo sapiens
tcagattcttgataacctgttttaccaccctgggcggttgtcagctaaatagcctaaatttgcatattaaaggaagctgttcatgtgaaagtcaaatagcaaaatttacatggtaagatgcagagagaaaaagtttggattatataatttataaaggccttttaaatatatacatacacacgtacacacacacacacgaagttcctacagcttttacttcagaacttttagccatgagataaatacaaatttaccagcttgcaaaaagaacttcttgggtctaaacagtggtttttatcttaatggaaatataacagcagatttagagcaggcagaaaagaaaaaacagagaaaaataggacttaggaactccatagtttgcaggtcgaccttagggctcttttttcttaatgtaaatgtgcacaaagaccatattatttccattttacataaactttggctagtagaggtgccataa

SEQ ID NO: 247833 - DNA, 424 bp, Homo sapiens
gctttccacatgatttttcccccctctggacttaagaaaacaatgggcaagtcagctcatgaagaacttttcagatattcagactattattctgagagagaaaatattggcagagaacagatgggatttttctcaaggaaaagaaatggaaatcctacatcttgcaagaaatagaaaaaaataaataaactgtttgaagaagaatcacatcaggctggcaggagagagcctgcggctcggtgtctgacccagaatgttaaagccagcctggcttggctccaggataaaggacactctgtcagcctctccacattgattcatctccccagccccaagatcaggagagcattctgttccttgaagcattttatgactgtaagtcagaagtgctgcagttttaataaaaagctgtattgtcctgatc

SEQ ID NO: 247834 - DNA, 248 bp, Homo sapiens
tatatcaccccaaattttcaggtctagttggaagcaaccattaggcaaggcgaaaaacagtagaacatcaatatagcgtgcctcagttaaatattttttgaactgtttttgcactgcagaagtgtttgttgaatagctaacagaatctaagttgagaagtaaactttaagaaattggactaatattgtgatttttgatattattggtcagaatcatttcccatttctcattataatagttaaagcaag

SEQ ID NO: 247835 - DNA, 422 bp, Homo sapiens
gaggcagctatacttcccaaaagatctggggtctttctcacgagctcataccctctgctggcctagaccctttatattcccccctcggtgctgaggcaaacgatctttgccagcagggaggtctgaaaggcttaactttgtacactctgaggcaaattctccagaagtaatgttgcattttctccctgccaccaggcacattcccttcccaaggtctagatcagcaggtggccctcccagcgaaagctctgtgtcctatgatccgaaacaataaagctgtgcttgggtacgtgagattatgtttacgatgatggtcatcactccagccctaggaagtttgagaaactgaaaaataagcttagcaggctgcctaggttctgcggaatcagcaggcccccgctgtgaccaatcaagagcggccg

SEQ ID NO: 247836 - DNA, 573 bp, Homo sapiens
ataaaaatagtttgaagactttaactacataactaaaaaaagtataaaggaatttgatgtgtgctgggcagaaggtggggggcacaaaaagtaatatgtggacacatttagtcacaaacaaatccaaaatataggcatgaaaactgtttattaattcctcgctgcatgacagaagtggcttaatatactctttccagaccaaagcatctttatctgcaaaatgagaggattaaattaggttatctctaagttcatttaaaattgttttaaaacaatctatgtagataaacagagtagcagtctgcaatgtatttaaaaggaaatggactagtcaagttggcaagatctatgtgaaagaattattgttgtgctatataaaaaaagaatctgcctttttaaataagacgagtaatgacaaattaattttcatgcaggttgaaaatgtggcagatgtgtatggagaatgagaaaattcctgttataatagagatgacttaaattatgaggatggtaaagaagagggaatgttttctgtcctttcaagatgtcaaagcttaattgaacatgttttta

SEQ ID NO: 247837 - DNA, 350 bp, Homo sapiens
gcagcagctgaccctgtcctggacattttctcctgactttatgagactctagtgcagaggttgcaaactcagatgctcacagccaccaggcagggaacaagaggggcacagttggcctaatgggggccgtgtctgtcttgaaagcagctgcccctcctgaaggcggcggctcacagtggcggaactccctccgactcctccccaccccctccccacaggtcaggaacacggggagactacagctagctcttcatatttttttttgtttgtcttttgaggagaatccagagatctcgatttcagtgtgaaatatcttgattccggcacattagcaattgagaacatgtttt

SEQ ID NO: 247838 - DNA, 457 bp, Homo sapiens
taattatgtgattcctctccatagcctcaataataaagagatctcaagttggaatgtatagttctatttttcataagtatcatttaaaaaccgatttataaaccctatgacttatgaaatatttgtgaacaaaacacccaatgccactggaataattcaaatgaaagagggtcttacattgagcaatttgtcagtttaatacctgccctttacaattgctctgcggttgaccctttagtcgtattttgagttagcagatgaaaataaggtttcccttgaagtagtggttgctaagggcaactggtactgacgccgaagacgaatactctatctccttagtataatgcctactttgtgagctaaataaagagctaaattgtagagaagaaagttgtacaaatgtgaaatatcaagaaaggaatagaaacaggaatattagagatgggaaaataagaaa

SEQ ID NO: 247839 - DNA, 549 bp, Homo sapiens
acactcaactgtttttttaaagttccctctggggtttgtgactgctggcagtggctgcctagctttctggtaaaggagtgtagttagtggcaggtggctgtaccaatccagatggaggtgaaagaagctgagctgcagccacggtcagtacagtggtggcagctggactggccatttctgctgcaggttttgcaagtcaggaagcacatatagcctgaagtaaaacaggattttcaaagtctaccaaaatctgccttcagcggtggctattagagaggtgggcttgaactaaaaaggacaaaatgggaagcagcaatactacctctaagccttactgccattaaaggaaaaataagagatgctcagtaacaaatatgatcttaaatcgcccaaagaaggatctccttatatagcaacccaaatcaatgaagctaaggatttactacgtcaagctcaaaaatgaaatcaatgtatgatgaattttaggttcctactactttttatgtgtatgagtatcaactttctataaaatgcctcagagctacaact

SEQ ID NO: 247840 - DNA, 491 bp, Homo sapiens
tgcccagttccctcccctggctctggcctcggccctgaactctgccaggaaggcactcagatctcaggtggagactgccgagctctgaggccacaacaaagagctctctgcagaatgtgggccacagaatgaaaggcaggcaggcatcttaaccattcggcagggcctggcaggaagatgccggtgacaccgtagcctgtgagccgcactcagggacagtgggaagtggccagagcagatagagtggagctttggcaccagccgaagcccttgatgtggtccgtgccccaccagcgtgaattacccttgagtgcccctgcccctgggctcagcttcccagctcccaggactggcctcatcttccctgggtccctgagcacctaggtcatagtagaacattcaatttgtagttcaagctaaataataccaattattattatcgttactgtaactagcaatcttcatgggtcaagccttacttggcggccagg

SEQ ID NO: 247841 - DNA, 363 bp, Homo sapiens
cttcaaggtgtagtatttttatttggtaagtaaaaacctttattctacatgcaaatattttacttaaatattatctttaaatgtatgatatttttagttgttaattgttttcaaactaaacaatgaatcagaaaaaatgatcattcctggtaactaaaggattattactgaaaataatgttgcagcatgtcctcctctgtaccaccagtgctcactttattcacaaccctcctaccaccaagagccaaatcttgttcaatgtggaggcaatttcacatctcagtgttccaaacagacagtcacggtgttcataaatccagcgagcaccatcgctatggcatgctggaagataaaaggcaagaa

SEQ ID NO: 247842 - DNA, 168 bp, Homo sapiens
ccagaattgttccagaagagaatagagctattgattaaatttagtatttaagtcaattacttatgttacacatttaaagaatagaaatagtatgtataatttccagaactatagagagataaataagcaaataagaaaacttaatccatttagagggtagaaatgaaa

SEQ ID NO: 247843 - DNA, 285 bp, Homo sapiens
cttttctaactgtgggccagacatttctgggcagatgtttgttcctcactgactcacattccacacctagttcagctcgcccacctccaagctgtccgggtgggacgcgggaaaccctctgctcctgcgcttagcgttcgcaaaggtaaacacatcgcagaaacctgcctcccaccctggagtggcccgtggtcctcgcagacacgcgacaggcaggccagtgagaagcgccaacagccctggttcccaaactccttagctcctcagcgaaggagcacccacggc

SEQ ID NO: 247844 - DNA, 836 bp, Homo sapiens
ctatgaggtaggaactgtgatgatttccagtttacaggtgaagcagttacagcaccaataggttagataagttgcccaaggccatggccctgtcagcagcagggcagagtttggagccgaggaagtccagccctagatctagggaagatgccgaccctctatcccacctgagaacagcagaagcttgggactctctcctggctgtcggtcatctccattaaaaccaacaaatccaacgtttcctccaccattctcagcatggagaggtttggggttctctttggaaatcagcaggcaatgtttgttctggatcagtcaggccagcccagatttctttcagttgaatacatatcttcaaccccctttggggaaaaaaaagcagtggagaaaatctggtttctgagtcagtgtttgtgaaatctgcatgttcccttggtataaattgggctttggactgactttttggtttaatcaaatgtctacttcctgggctgagtgtgtgtgcgtgcgcttgcgcgcgtgtgcatgcgtgtgtgtgtgtgtgtgtgtgtgtgtgtgtgttgcataaaaagaccttccttcagattttcctgaatccagcaaataatatgatggtggaaatgagaaagttttgtatttcacgtcctcacattctgggccaccagctgccttagaaccacactggtgacactggtgatgtactattttccttagagatttttagcatcagaagagtgcctcaagttcacattttccaaaagcttccatcctcctcataaccattatttggcttcaaattacctcagtcaataaaattactatcgttggttcgcaaa

SEQ ID NO: 247845 - DNA, 593 bp, Homo sapiens
accgaggcgaaggcacctgaaattttcccagtgcccgggaaattttaacagaagcctgttaaccccagctgagcttcgtggagtaggcgctagctctgggccacagcagaggacgcctccgggctctcttgtttgaattcctccaccaatgtccggttcttctactctttacaagctgggctccgaaggaaaaaagaagaaacaaagaacgcacgctccttggcaccaacttcactttctcaggcttctgcaggtcccaggcctcccgatgtctccccctccgccctgagcatttccagaccttggagagcctgacttgggaaggggaaactggaatcaatcggttgaccgacccccttttcccaaccgccgcctccccaccaatcactccatgtccggaagggggctgggggctcccgactataggagactctgggagtcctatgaggcctttgagacaggggcgcgagcgaggctggaaggaaaggctgggcagagagcggaggggctcgcgcgcatctctcccggcgcggcagaaggttggcactgctgcccccctgcgggtcccagagccgctgggcgcccgcggccgc

SEQ ID NO: 247846 - DNA, 962 bp, Homo sapiens
ttgtgatatgatgtaaaatatctttggtcttttttcctggttcctatcatagcttctaaaacccctagaatttcctgggtgataggaacatctttgttattcataatgagctcctttaataactccagcatttatactaataaggtgacttagtgtgggggccctagttagtctcaggataggaccagtcaccagaaagaccaagtgattagaggattggaactttcaaccctaccctccaacctccaaggaggggagggagggtgttgctgaacatcaagctctataaacactcaaacaagagttgatgagctttgggactgctaaacactaggagacgccaggagggtggctcacctagacacggcgtggaagctctgcaaccgctctgccataccttgccctgtgcatctcttcgtctggctgtttatctgtatcctttgtaatatcgtttgtactaaactggtaaaacagttaataagctggtaaatgtttccctgaattccatgagccatcccagcaaattaatcaaatcccagcagaaagttgagggaatctcagtttatagccggttggtgaaaaataaaggtggcccagacttgcaattggcctctgaagtgagagcagttttgtgggactgagcccacaaccactgggatctgatgctatatccaggtagatagaatcagaattggattctaggatacccagagagggtctgctggagaattgcttggtgtgtggggaaaaacacacatctggtctaagaagtgttctgtattgagtaaatagggagcagagagagtaggaaaaaacctttttttttccttttacactctgttattctctctggaaaactcactccagtacattatgagttgggtattagtagtgagttcatatgtaattttttttgtggttttttttccccattgaaaataaactatttttgcaactagaaa

SEQ ID NO: 247847 - DNA, 584 bp, Homo sapiens
gatactgtcagttgaggattcatttgcaaattaaatgagacattgcatacacagcacagcacagtgcttgttttattgtaactactaaaaaaggttgggtattacagattcagcccatatttcagagaaaaaagaaatctatattttttcaagagattttttaaggatattcttgaatctcatttatgattttattgatcacttattggttcacccatttactcaaaaaatatttgacacctactatgtgtcaggtcgtagtcggtactatttgttggagggaagaggaaatacaccaaaatgaataacacagtttctgtccttaaaggagctcgctgctcagtggaagagaaaagaactaaagaggcagatcagtgagaaaaatgtgcaatataacacattattaaaatgagaagagagagttaaacaatcaacatcattaactctgtggcatttccttaagatatcatgaattatgagacatccttttcttaacatcaggtaaaggaaaatctttcattaaatgtgtataatgattctgagtcccacgttagtttcagaaacatgaataaacaaagaaaaac

SEQ ID NO: 247848 - DNA, 357 bp, Homo sapiens
tcagaaaagaggaaaaagtgttgtaagcaggagctcagaagcactcaagaagccggatacagtggctcaagcctgtaatcccatcaactttgggaggccaaggtaggtggatcacttgaggtcaggagttcgagaccagcctagccaacgtagtgaaaccccgtgtctaataaaaacacaaaaattagctggacacatctataatcccagctactctggagtctgaggcaggagaatcgcttgaatccaggaggcgaaggttgcagtgagccgagattgagccactgcactccagcccctgggcaacagagtgagtgagactctgtctaaaagtaaaaaaaaaaaaaaaagagttga

SEQ ID NO: 247849 - DNA, 495 bp, Homo sapiens
aaaaaaacaacaaaaaaaacacctgatttacattgtttgtaatgctgattgcaacccattaagttgacttcatgacccactaatggattgtgactctaagtttgaaaatccctgatatacacagttatgcttaatccttacggcgggagttctcaccccgttagtcaggctcatagaggtagacaaacctggctaaagttgcagaggtgaaattctattttggaatttctgattgtggagccattgctttgtttggccatctcaaccagctgagtatctgcttttgctttatattatggctggtgacttggtgagtttgcccatttccaactaagcttcagaaacagagaaagggaaccagtttgggaaaagggtccagctacaatgaacactaccatttgtctcccacaaggtcagaatagccagaggactcttcccatatgaaataccccatattcttccttaatggcttatgtttatagcagatttcctgag

SEQ ID NO: 247850 - DNA, 327 bp, Homo sapiens
tattgagatggagtcttgctttgtcgccaggctagagtgcagtggtgcaatcttggctcactacaacctccgcctcctaggttcaagcaattctgcctcagcctcccgagtagctgggactataggcgtgtgccaccacagccagctaatttttgtatttttagtagagacggggtttcaccttgccaggatggcctatctcttgacctcgtgatctactcacctcggcgtcccaaagcgctgggattacaggcatgagccaccgcacccagccctacatttctttttctgtgaatgaactcttcatgtcctttgcccagtttttgt

SEQ ID NO: 247851 - DNA, 630 bp, Homo sapiens
agttggctttgggaaagggttccttgcctgcttcagggatccagacacctcctgcccaaccatcctccaaaacaatggaacaaaataataaaataaatgcagcttggtaaaagatacacagtaggctaactgcctgagatttttctaggcaataagtttaaagatccataaacagcatgattgatgggtacagaaccatgcatcatgagctccttatgatgaaagaaaccgttattgccaaaggaaaacttgacttagcacatgacaaagaattcaaatctactttcttgtctcttacaaaaataataggattataacatcaagaacacttcagttggccaggcgtgatggctcatgcccgtaatcccagcactgtgggaggtcaaggtgggcagatcacctgagttcaggagttcaagaccagcctgtccaacatggtgaaactctatctctactaagaatacaaaaaaaaaaaaaatgagctgggtgtggtggcacacacctgtaatcccagctacttgggaggctgaggcaggagaatcacttgaacctgggaggaggaggttgcagtgaatcaagatcacaccactgcactccagcctggacaacaagaatgaaactccatctcaa

SEQ ID NO: 247852 - DNA, 100 bp, Homo sapiens
tttccggaggatggtgagtatttctggtgggtggaggtttcctccacatggcaatgtggccggggcatggtctgcatcaagctggcttagtgtggagggt

SEQ ID NO: 247853 - DNA, 299 bp, Homo sapiens
ttaaaaattagctgggcataatggtaagtgtctgtgattgggaggctgaggcaggaggattgcctgagcccaggaggttgaagctgcagtgagctatgattacacctgcactccaacctgggcaacagaaccagactctgtctcaaacaaacgcactctcaataaatgtgttaacagcagagaagacattgaggaagaaagacgggtaaaggtggaagagatttttttaaaaagtattgcacagagagatgaagaaaagagataaatatggaagagcaacagagatgaaggacagaatg

SEQ ID NO: 247854 - DNA, 505 bp, Homo sapiens
tggggccatataaatgaaagaagaaaacaaaagctaacaacaaaaacagataacttagacagatgtagcacagatgtaccatatataaccctaaaggtgaaaaactcttaaaaagtagaaaggttacagagttttaaaaaaactgtatcttacccagtagttttaatttcagaagtttatttcctaaagaaattactcaaaaggaaacaaaagtaatttttttaactttttacaaaaacaacagtttttagctgtagtatttataataatgagaattttaggaactacttaagtgccagacaataagggaggtgctaaactgacatagcagcgcaacataggcctctgtaacagggtttcccctgtaacaaggttttcttaagtgtggttcctccctgtctggtgggtcactgaggtgattaagtggttcagagaggagcgtttgttttaatatgtattactaaagagaaagctctttttttttttaagtgagttagtttaaaga

SEQ ID NO: 247855 - DNA, 527 bp, Homo sapiens
gctcgacctcctgcctcgacctcccaaagtgctactattacaggtgggagtcactgcacctagcccagtccgtcaactttgaataatgtcagagtcactggtcttggggacctagaattgccctaaatctctccattttgacagtaaaatttcacatgaatactttaacaaggcttatcaatgcaaccacaggctgtctacgtgcattcaccaacaatcctctttccaccagtccttctgtttcagccttagtacacacacacaaaaaatttaatgttgccaaaggacttgagaaaatccagaatgttttcatacacacatgtcttgggatgtgctgcctatggaagaccttcctttgcctgtcccttctccttcatccttgactttgctgtccagctctttaagggacttgagcctgagagcacatggccagagagaggacagcccagggaggtggtgttatctcttgataacaccagaagagcagagagcaaaagtagaaccggaagtgtggtctggtttgtcga

SEQ ID NO: 247856 - DNA, 634 bp, Homo sapiens
gggaggctgaggcaaaaggattgagcccaggagttggaggctgcactgagctttgatggcaccactctactccagccttcgtaacaaagaccttgtctcctaaaaaaaagattgattctaggactgtagaatagatagttaaacagcatgggatatgagggaaatcctcagcagtattaattttgcattccaatttcatgttgatgagacatacgatggctttttgttttaaaagcttttatcttgagaacatgatgtctggagttaaaggtattggcatattccacacatctgtactattcttgagtgagatggcttaaggtgtcaaattgataacctggcagatccccacgaccgacagtataaaggaccctaaagtaaattggttgaagaaattagatcccaaagattcttggtgaattttgaagtcttcatcagtatatccacattaaaaggagacgacaggaagccaaagtaattatgggctgacaggacaactggatcagtttcattaaaaaggctaacttgaagataaatcttttgactccagctctttagaggatctaaagtgaccttgatggacagtggaagaaatcacaacatggaattccttgaataaaaatttattgacttt

SEQ ID NO: 247857 - DNA, 427 bp, Homo sapiens
gggaggctgaggcaaaaggattgagcccaggagttggaggctgcactgagctttgatggcaccactctactccagccttcgtaacaaagaccttgtctcctaaaaaaaagattgattctaggactgtagaatagatagttaaacagcatgggatatgagggaaatcctcagcagtattaattttgcattccaatttcatgttgatgagacatacgatggctttttgttttaaaagcttttatcttgagaacatgatgtctggagttaaaggtattggcatattccacacatctgtactattcttgagtgagatggcttaaggtgtcaaattgataacctggcagatccccacgaccgacagtataaaggaccctagcaatatcaacctaaccttccctctacacttaccatctgaagacagcatggg

SEQ ID NO: 247858 - DNA, 241 bp, Homo sapiens
cagatcaatggagacagggccctggtttttggaagtgacttgtaatgctgctggggcagatggagataacctcatctttaaattccatggaaaataaaatggcagatgctcctgagctgcagcccctcacagggcgaaagacgcacgtggcacctgcagccagtgtgatcccggcctcactggccgacgggcagctgctcacgtgagcgcgtatgagcctcactctgcagaagacgccaga

SEQ ID NO: 247859 - DNA, 686 bp, Homo sapiens
gtcccactctgttgcccaggctggagtgcagtggtgcaatcttggctcactgcaacctctgcctccaagttcaagcgattctcatgcttccgcctcccaagtagctgtgactacaggcatgcaccaccatgccgggctaactttttgtatttttagtagagatggggtttcgctatgtttgccaggctggtcttgaactcctgacctcaagtgatccaccgcgcctggcctaaaataacttagtcttgaaactcattgacagacttcttgtttgacctgtctcctttcttccctccactttctttctctctctccctccctcctttccatctatccatccctctatctgccactcatccaagcatctgtcattccctctgcctaaatatttaccaagtgtcttgtaagtgctaagcacagtgctgggccctagaatacagaagtggccagggcagtcatggtttctgctctcacagatcttacagtcaaatagtgaacaggcaactaagcaagaaatgcagcaccatatgacatgctaagtgccgtgatggcaaggtggactgtggccggagctcaaaagagaggggaccaggcgaatttgggggaggggaggagaggagcagcttcctaggaagtgacacctaagggcggagtagggcttgccaggtgagcatggattccagaga

SEQ ID NO: 247860 - DNA, 590 bp, Homo sapiens
gtaaatctgtttaataagtttcaattaatagagccagtatcatacagattttatctcactatctctagaaataaaatgaagttggtctccatataaaacaacataatttgggcttaattgtattcttttaaataaagtttatgtacataagtattaaataccaccctttattaaagtacaatttatataagataaactcttatttagcattatcaagtatttctgagacatttgttttaataacacatttgattaatagcattagcatacataggatgcatggattatgagtttgctaatttaaatacagtaattaaatgttatggtccaaccaagacattgtttcttctgtgtacggacccttattactatgatggagattttgaaatgctaggattaagacaaggcaactcttaagttgtgcaaaatgctaggattaagacaaggcaactctaagttgtgcaaaatgctaggattaagacaaggcaactctaaattgccttaatcctagcattttgtaaatttccactgctgcacactgaaggagaaagaaggtattgtagtaatacaaaatgttaaccctgaaaggg

SEQ ID NO: 247861 - DNA, 374 bp, Homo sapiens
tagtttctaccttgcctggctgatatatctacttatctctcagttcttagtttgaaaggtcacttctgaatgaggtgtaatggtcataggttctcaattagtggttgttattgggtctgttacagctgtgcagttggccaactttgactttgggtaacttaatttctttattggtaaaaaatactttttattttattaaagtcataaagaaaaatgagatattgggtaggcttaatgtcacaggaaaatattttgataaaagtcttcatagttacacgataggttcatgatcattgtggcaaacatgagcttatagcttccacttttttgttgttgtttgttgttgttgttgtttttcagacagggtgtctctc

SEQ ID NO: 247862 - DNA, 334 bp, Homo sapiens
tatgaatggaggagtagccttaattcccttgggggcttccacttctaagagaactgttttccgtccaggtaggcagacctgtcatggctgaagcttcatcacctggcctggtcatagcccccaggccctgtaggcaggacaggggcttggcagattggcatccttcccacaaaagcatgaaagtaggatgtctgtatgtagcgacaacaaatacaagaataaggagagtttaacaacattctcaaagttggtggaaaagaaaaagaatcaatgaaaacatcaccctaaaccagctagtgctttctgtttacagggatcagaccccttcccactt

SEQ ID NO: 247863 - DNA, 799 bp, Homo sapiens
ttatagaaaccacaattccttttccccaaagccagccataaaatctgaaaatattactctaatttttcttctgcttttctgtgtaaaaactggccataaagaaattatcttacctaccttgtttaactgaaggtcataagatcctcattccagagagggccctgccacatagccaaaaggaagaagtgcatgctcagacaggtcaagaagaatctagacagacaggcctttctgggtttccctactcaatctattagtattaggtcatatcccttttgtccagtcatatttcttcatgactgttcataccttgttgaacctaaggattaaaatggtcaattttccctgtgtctttggtcttcattctgaaggcttatgttggaaatgtggtgttcaaatttcatgtaaagctatgatcaaataaatttgtatgccttttctcctcttcatctgcctcttgtcagtaattttcacctaaccttcagagggctaagcggaagtgttctcttggctccaacagtactcagaacgtggttgagttgagagctatccaatcttccctgaagttttttgttggatgtctaaagtaccaaagagttgagacccgtccgtcagagatggccgcaaggccctgaagcacagaccatgagtttctctagctaccaacttcaagtgaaagaccagaagcaactagacatatgaggaatgtcacctcagagaccagaggaggcagaagaacctgttcaaacctgaccctttgtcccaatgcctcaggttggtatctagggatatctgatat

SEQ ID NO: 247864 - DNA, 551 bp, Homo sapiens
caaccgccattcataatgcctcctcgtttatctagaagttacccccctacccctgcactcttctgtcatactttgtttggttcatatgtttgattcaaatccaaatggcctgtatggattttatattttcttatattgtagatgtttatgtatacatctatatctaccatatactatagtaactactagaggacaacaaccgtatcataggcaactcttttatgtgcataatctctgcaggatacctttaccattactaatacttagcaaatgttcgtggaaggaaagcgttgcaagaggtagggaggcaggcatgctggctttttaaaatctaattttcatcaacctctaggtcagtggttcccaatactggttgtttatttgaatcactagggaattatttttaaagagcagtgccacacctaacacctatttgattcaaatctctgggaggtaggatcacagcatctatatgtatgttttaccatcatcaggattgctgagaatttggaagaaatggaaatttctgaaaccccttccctgaatttact

SEQ ID NO: 247865 - DNA, 464 bp, Homo sapiens
tttttttgatacagggtctcactctgtcacccaggctggagtgcagtggcgtgatcttggctcactgcaacctctgcctcccgggctcaagtgatcctcccaccccagcctcccaagtagctgggactacaagcatgtgtcgccacacccagttaatttttgtattttttgtagagacagggtttcaccatgtggcccaggctggtctcgaactcctaggctcaagcaatcagcccacctcagcctcccaaactgctgggattataggtgtgagccaccgcacccagccaattcttagttcattttaataaagactttccagtacctacatattcaaggcatttacattacaacacaatgagtactctttattctccttgcctgcctcattgttgtggttagtaaatttttagtaactatacattttctgatgagatctttgtaaattttgtatttatatcagt

SEQ ID NO: 247866 - DNA, 382 bp, Homo sapiens
aatctgtggattttgatatctgtggggatcctggaaccaatcccccttggtgtctgatatcacagatatcaaaacccacatatataacaagtgtgttatatatgcataataagtttggaaggatacacaccaaactgttaatagtgactacttccaaggagacaagtgaaattagaagttaggaataaaaacaggcttttacttttttaggctatgcttctgcattatttaaatattttcaatgagcattatttggtatcattaaaatatttttaaaagatattttaaataatatttttattttaatatctttcatgttttatgtaatatttttattttaaaatatttttaaaataatatattaaagattttttattagcta

SEQ ID NO: 247867 - DNA, 504 bp, Homo sapiens
gaagaggcgcagagccataaagtggtctgcagggaagttatttttcaatcaagttgggctttgcctcgctaatccttctcctccatgggggctgagtgcagaaaactcatctctgcataaagagaccccaggcctggctcgggtccttggacccaagtttagaacctgtgcctggagctatgagaataagtaaaaggaagggaatgtgtctcagaaaaccactaggctctgaggagctccagcactccaacaaaagagacagttgaacaatgggaagaggtgctgttcaccagcaaaggccccacaattctccctgtgacactgcatgttcccagaattacagccaatctttctaagacattgagaatatcatttttatgtgtgtgaccctgagcataaaattcctttacctttctgagcctcagtttcctcctctaataaatacaggttcctagttttcacactcaagggtatacaatgacctttttgattcagatgctaggt

SEQ ID NO: 247868 - DNA, 506 bp, Homo sapiens
ggaccccagggcatattgataaaaatgttttatgtcattttcatctgaccagtaatgtagttcaaattctcattataatctttttagggtatattttgttggtcccaattttctgaaagataagaaatctgaggattgaagagattcaataaactggcccagagtcagtggtaaatatcagtttcctaattccatgatccctgctttctccaggacactctcccctttcactatgtcaggttgtttgctaaaactcagaatcaaatgtctttattaataataggaaaactataccaacagaaacgaggttttcagagaataatagaaatttagaaagtttgtcttagaaaaagtgactgcagttcatacctcaattataattactggtacatttaggaactgaagtttaaaagtgatgcatttgtttcaacgttgtttcctttttctgtgtacttcctataggtgatactaaagagcaatgaaataagcaaaagctatgttgtacc

SEQ ID NO: 247869 - DNA, 455 bp, Homo sapiens
gagaacagtccctgtccctccaaggaacccctcatgcatcttgccaagaagcccagagcactttggtcctctgcctgctccttacccctcatttccacagactaggagactgggccctgggttggggctagccccctatgttgtggaccaggaaccccagtccagagatgaaggtgatggggcagcaaagagggtcccacccctgggtttctaaccatttctgaggccttatgaatggagaacaagaaagctgtgctctcccctcctcccacccccagggcagtggacaaatactacgattttgggtacactttcagggagtccctgcatctcttgaaaaccttctacgaaccccagtttaagagcctgtccaagaccacgaaccatcccacttttccaaagagactttcaggctaacagaatatgaggctgcagctcgtcttactagttagttc

SEQ ID NO: 247870 - DNA, 525 bp, Homo sapiens
tgctgcctttttacttagatttagtcctaacacctacttctgttccctaagttttatttgcttttgactagaattcatataatcagaaaactttaccacaaacataatcaaagcaaagatgatagaaaaagtgtgggcttattgaatctagcatccttaattcataaaactaatcatctccctgccttacactagtcacatataccaaaggtgctggaaatacaaaaatagatgaaaggccaggcgcagcagctcacacctgtaatcccaacaatttgggaggccgaggtgggcaggtcactggagtccaggagtgcaaaatcagcctggacaacatggcaaaaccctgtctcaacaacaacaaaaaaaatacaaaaattagctgggcatggtggtgcatgcctatggtcccaggtactcaggaggctgaggtgggaggatcacttcttgagcctgcaaggcagaggctgcagcaagccgagattgcaccactgtactccagcctggatgacagagtgagaccct

SEQ ID NO: 247871 - DNA, 354 bp, Homo sapiens
aaagaaaataacaagtatgtttgagaatgtggaaacaatcccacataaatcgctggtgggaacgcaaaacgatgcagccatggtaggaacaattttgcagttgcactttgggaggccaaggcgggaggatcacctgaggtcaggagtttgagtccagcctggccaacacagtgaaaacccatctctactaaaaatacaaaaattacccgggcgtggtggcaggcacctgtaattccagctacttatgaggctgaggcaggagaattgctcgaacctaggaggcggaggttgcagtgagctgagaccacgccactgcactccagcctgggcgacagagtgagactctgtctcaga

SEQ ID NO: 247872 - DNA, 427 bp, Homo sapiens
tgctgatttctcattggaaatagtctgtatttagagtttgtaaaatttccagctgaaaaactagatttgtgagccgcagttgctccagtcgtacttgaaaatcttccaacaaccaaatagagtgtgttttaaaatttacattaatttcaattaactaatattaaaagttttacagaagccacatttcaagtgttgaacagccacacgtactagtggcaagtgtgttaaacagcacatatgtaaatctcgtcaccagtccacaggaacgcacatggtaccaagaagggaaagaagataccacgtatgtgcagtcactcaattcagagtgtggaaaatgctacagggtaaggaatctggttaattgcaattaaaaaaagagagagagataacctgtatataaaataaatttaagagacttgtccaagta

SEQ ID NO: 247873 - DNA, 572 bp, Homo sapiens
catataattttgtacttgggttgggggcccaaggccaaaaatttctccttgaaggtcaacaagtcatgtgtgcatttgtaaattaaaaaaataaccacctgccattttaacaggatgattatatactctcaaaaagttttggagatcatttctacaacagtggccagaaaagcagaaatatattcagtaacttcaccgttactgaagtttgggttttctctattatacttgttatatataaatgattgtgggaaatacctatgaaaatgatcatatcagaataattctcatgggagcatagtttcttaatagaataaaatatatatcattaataataaagtatgattttgtatgttgctccttttactaaccaatctttacaccaattttattcctaaaattttttccctttgatatgtctgcaaaaatttagcagtggagtgcctggtcattgcttagttatatctgaaatcattgacaatatattattttttataaactaaccttcattatggaaattagaaacatttccataagtgaaattgggttgaacttaatgaatttatgtgtca

SEQ ID NO: 247874 - DNA, 368 bp, Homo sapiens
tcaatgaaccagcagcttaaacaaatggcaagcagcttgcagaagtaagcagggctttggtgacttctacgctaaccacctcccatcttaactggtttacttacagagctggaaattaatcattctcctcccactcctctctctcagatttctgctcaggaaagtaggagaaagaagaaagaatacatggacagcctggagaaaaagtaagcctgctggcaaactgttgcgttcatcgggcagtatgcacagggaaatatgggtgtgcggagaatcggggagaagcagttcaattcctctttctggccaccttggaaacccggtggtttatcagctgtggtttgcctgccacctagtggttatttgga

SEQ ID NO: 247875 - DNA, 536 bp, Homo sapiens
tgtgccgtgtgatgatcctcccactctatgtttcagatacactgaacttcttttcatttctaaacaataccttagtgctcttgaacttggtgtttcctttcctgacacactctttccccagatggctatatgactgactcctcttgcttcagatgtgactcccttgagcacccttcctacagtagcccttaacttgtctgccttcctcactgctgaaatcctggtatgtaggatagctgtatctagggaaggtgctcaataaatatctacacatgcgtgaatcatcgaaaccaattttaaagcccacctcctctactctggtaaaaactgcataaattaaaagaaacatatagtccattccacttactgctctcccttaaaccttagtcatccataagtatctagtgacctgctttctgttccctcatctccatcctggcccccttaagcgtctaaaatcaaacatttctcccaattagaagtcacccctagctcagaatgcacatcttttcaaaaataacctttactcctattca

SEQ ID NO: 247876 - DNA, 512 bp, Homo sapiens
ttaacttttgtttttattcctatagtgcttaccccagaatttaaatttgaatggaaccacacatattatttaacccaacctctacatagataaattaaaaaaaaaaaaaccctgaagttcacaggcttaaagtcagaaaactaattctaaaaatagtatttcctgatttttaaggctcttcacccaatatattatcattttttcttgctgtgtatatgtccatgtggttagtatgttagcagctcctatcagaaaccaatcaacgttctcaaacaaaatggaattaagagagagcttttgttgagtaaactagggaagaggaaaaagggaaggaggcattgggctaaaagaactcatgtttgcagatttgagtatctgtgttccattcattcaaatttgccatctggatcattagaatataagatgcctaagctttggtaggctgaagcagaagtatcacttgaggccaggagtttgagaccagcctgggcaacctacctaccatctctacc

SEQ ID NO: 247877 - DNA, 549 bp, Homo sapiens
gagacggagtctcgctttgttgcccaggctagagtgcagtggcgcgatctcggctcactgcaagctcgaaatgcagagctcttaagcagcctagtcagtctgtaggttaatgatgatcagaaaacctgcactgagcactgtccatgctcttgttagggtctgtgatatcctctcactgagattcagccaagcagaggccctacattttgacaggtgactacacgaagctacggttcttgtccaactacctttgcccttcttgctaaaattaattcacgttaagttgaaaatattttgtgtcaacatatttgtcaaaaattattttttcctccagtatgaatagtatacagtgagaagtgaagctcctgcctcctatggtttcatccacatctagagactcactctccaggggtaaccatggtcaacagggtagagtatatatcattccagcctttcatctatgtccatataaatacatattttttaacagaaatgagataattctatagttagagttctggaactctcttttctactgctcaattggaa

SEQ ID NO: 247878 - DNA, 609 bp, Homo sapiens
tctcaatagctcagaaacttccgttttgtaaattgtgtgctgtcagtaagccttcactaattgaacaatgccctttttgagactttactaatttctcaaactgcttttttcgtgcttgtgacttttgtcacacatttactaaacattttgtgattcaacactttcgccagtttccaattatctcctagttagagtgtttcagaatttgtttcaaattgtttttaataagattgagccaggctgtggtattttatctgcaacttactacaattttacgtgtaattcaattttatccttaacttcttctctccagattggagttcttattctttgaagtcaaaagccactttatttctgtgaatacttccttttcactgttttgtaccttccctggctttctattacgtctttgaagtggctactggaaggtaatgaagtatgctggatgcatatgtattaaccatggttttgtgtcgtgttaatcatccttaaaaaaaaaaatccttccaaattatccccagttgttatctttctgtttgtgtgtgtgtgtgttttagaagtgaggcattaggctgggtgcggtggctcatgcctataatcccagcattt

SEQ ID NO: 247879 - DNA, 850 bp, Homo sapiens
tagtgtatttccttccaggacttcttattattttgtatttttagaaaaggaatggggatcacaccaaggcagaagtgcttgctgggggacagacactggcttggctgggatcaagtagcctctttctgctctccagcccagcggactggaagcagcagatcagcactcttcttcctggacaggggtaatgagaatgagtattttcctttaaagctcacttgtttccgtattctaagcggacgcgaacattgttcttttctcgtgctttcccactttcaagacccaccaacacctgcctgcccacatttcgagttatcttcgtcggctcctgcaagcccgcactcttctccgcggtggctactctccgctcatccagactcccgccctcactgcgccttcttcctgcgatgaccgaggaggtggtgggagaccaccacttgcgagcttccaaaggactttcaaacctgaaccgcagagtcagagccctcgcgccgtagaaaagtcaggagcgccccggggcccccatcggaagcttcgtgccttcccgtggaaaggtcgcgagcagggaaggccttcgtggccactgagtcccctactccaggggcggcggccgctctccgaaagagcggcccttctcgtccctcccgaggttatcgtcagagtgcacttccttggggaaacagaggtcattctgtcgagtcccccctttctgctgttctcgggagggagaaggctgctggacccaggctcgctccccgcctctcgggagatccgggaaggcctctattgctgaacgccgagacagcggccagcggcccgatcgtctccctaccgctttgcaagccgggag

SEQ ID NO: 247880 - DNA, 719 bp, Homo sapiens
tctgtcctattcccaattgcatgcttttcctcttgcataggcactgatcttccaaatcaaagtgggatggtctgctggacagctcaataccactgagtaagctattagtgccctcctggggtaaggggaccaggggatctagaatccaaggtatggaggtttttcctgcccacatttcgagttatcttcgtcggctcctgcaagcccgcactcttctccgcggtggctactctccgctcatccagactcccgccctcactgcgccttcttcctgcgatgaccgaggaggtggtgggagaccaccacttgcgagcttccaaaggactttcaaacctgaaccgcagagtcagagccctcgcgccgtagaaaagtcaggagcgccccggggcccccatcggaagcttcgtgccttcccgtggaaaggtcgcgagcagggaaggccttcgtggccactgagtcccctactccaggggcggcggccgctctccgaaagagcggcccttctcgtccctcccgaggttatcgtcagagtgcacttccttggggaaacagaggtcattctgtcgagtcccccctttctgctgttctcgggagggagaaggctgctggacccaggctcgctccccgcctctcgggagatccgggaaggcctctattgctgaacgccgagacagcggccagcggcccgatcgtctccctaccgctttgcaagccgggag

SEQ ID NO: 247881 - DNA, 454 bp, Homo sapiens
atgtttacattgaaagacattttcaagggacattaaagaatatgagaaaatttaaccatggagcagggtctttatttcatttgcagctgtatctactgcaccccatgcctggcaaatagtaagaattcagaagtaatgtgggaaggaaggaagctagccaaaatgatagagtacaccatggaaaataggatgaaataggtgacagtaaacaaggaatatttgagaacaatttgatacaacatctgggagcaattttgtggggtttgatggtgggatgtataagtgaaaatcaaataggatgtagttgtggatgaccttaacaagttcatatgttttaaaatcagggctgctgccgacaacagacattttagattacctgccagttatcagattccaaattttgatgtccagtagttctaatctagttgggctattcatttagtcagctaatatt

SEQ ID NO: 247882 - DNA, 341 bp, Homo sapiens
tgctggactttgtcaaatgctttttccacatctattgagatgatcatgtgatttttgtttttaattctgtttatgtggtgtatcacttttattgacttggatatgttaaaccatccctgcatccctggtataaaacccatttgattatggtgaattatctttttgatccgttgttggattcagttacttagtattttgttaagggtttcagcgtctgtgtttatctgggatatggttttctagtttatgtgtgtaaagttgttcacagtacccttgaatgatcttttgtatttctgtgatgtcagctgtaatatctcccgtttcatttcttattgagctta

SEQ ID NO: 247883 - DNA, 423 bp, Homo sapiens
agagaatgaggcattctcatgttacctggtcctactactggatggagccccaggtgtggtccctgaactcaggtagatttcaacatctccttcttggctgggtgtcaatgcagttgggcttgatcctactaaaacagaaaatctctactccaacaggaatttctaagaaatttctgtaaattagtgttttgcttcccccagcctcttccctaagtcaatcatgttgagcatccatgttggcttctgtgttagaaaatccaaatgcttttgaaatctccccattcatttcaattctaacttaatcctaacagtttttttaaaaaaaattacttcttgccttagttgaactaagaaagttcagcatactggcgttgtttttgtagatactgtttaatggctacttattaaatattacaatacaaa

SEQ ID NO: 247884 - DNA, 400 bp, Homo sapiens
acccattctgttagacctcctgtcccccaagtaaggtcctgaaatgggtactgttaaagtatatataattttaacagagttaaaagtatgatttctacacaaatataaagggaatatgtgtaaaagattttattcaactttagtaattaaagaaccagtaagacgttaggagtagttcaaaaggaatttcaaagaagggagatttatggttgatcagtcaaaggaatgctgaaatgaattagtgaatagattgaaaattggttaatattctgcaaggcaatgaaccttaacctgtgggggataaccttttctaccagacagaaatcattggtattgttgttggataagaataatatacattgttctcttatctaaataatttaccttgcacaccacaata

SEQ ID NO: 247885 - DNA, 388 bp, Homo sapiens
tcatgtattaataatcatataatacatgatattatatgtagaatctagaatagttgaacccatggaagcagagagtagaatggtggttaccagggactgggaggtggaaggttgaggagatgttagtcaaatgatgcaaaacttcacttagattggaggaataagttcaagatatctattgtacaacacggtgactctagttagtagcaacgtattatattttgaaaattgctgagtgcatattttaagtgttatcaccacataaaaacaattatgtgaggtaatacatacattaattaacttgatttaggcattccacaatgtatacgtgtttccacccatcatgttgtacatgagaaatatatacaatttttatcacttaaataaa

SEQ ID NO: 247886 - DNA, 418 bp, Homo sapiens
aagaacacttggagtgatctgaactcatatagatctgatatgacagaaatctgatagaggttcccaaatctgagagcaatatcaaaaatttgcatgatattgtaataatgaattgtgaaatcaaagaaacttttataaactaccaatttaaaaaaaacttaaccaggctagaggaaaacctggtttattttactgttctttctacagaaaataatacaaaattgcatttattggcaaccagaatatgcattaaaaaagtaggaaaaaagtattacaaaggagtgttaggcagttaattaacaaaaaatgttattttcccagactttgagatttttgctgtatttatcagcttttaaaatgtataatttattgtaatttcttacatcattctaaataaaaatttacttttgtgtctaat

SEQ ID NO: 247887 - DNA, 747 bp, Homo sapiens
aatgaacttgtcatataagttaaatcttaacattatattaaatcaaataatagatattagatgtctggatcattatcaatttttaaactatattattggaaacattttcaaaataattataagatagtcctcatctataaaatgctgatgtgacaataaagatttcttacttcttaggttttcacaaaaaatttattaccaaaaatcaaaattttagttaatatgtgattttacatataaagtgtgccaaaataagttttattctgatgaaaaaagaaaaattgtgagaaataaaaatgaaataaagaaatgataagaaacagaatgaaaataattgttgtccaattcaaagattattgaaggattccttatgaaacaatgtaaagggaaccagtaagtgacagagagatttaaagaaagttataaagagattataaagagatacattcagtaagaaataccacaaagatgctgggcacggtggcttatgcctgttatcacagcactttgggaggccaaggtgggcagacaagatcaggagtttgagaccagtctgtccaacatagtgaaatctcgtctctactaaaaatacaaaaattagctgggtgtggtggtgtgcacctgtaatcccagcaacatgggaggctgaggcaggagaatcacatgaacccagaaggtggaggtttcagtgagccgagattgcaccattgcactccagctcaggtgacagtgtaagactctatctga

SEQ ID NO: 247888 - DNA, 253 bp, Homo sapiens
caaacataatgtttagcaaaaaatatgcaaggtacttcatttgcataaatacaaaactagataaagcaaatctatacaagatggcaggataatggttacccttggggcaagggtggtgactagatgaagacaggaggagggcttctggaatgtggcaatgtcctgttcttacgaggatgctagttggttgggtgtgttcagtttgcattcttctatatgtatatcatacttcaataaaagttcaaggagaatc

SEQ ID NO: 247889 - DNA, 534 bp, Homo sapiens
ctcctcctatgtacttttgaaagggactcctagacctctgccatgctatgtcttttatatcaggtgcttagaacaatgtctggcatgtagtaggtgcacaataaatatttgaacaaattagactccacttcaggtttagtgcaaagcaacatcaattccatatttgagtaagaatgcaatccagtaaagtcagggtaatttttttcccttgtgtgactcttattttcccctcttctcaggagtgcaacacgtgatggcatctgcttctctgactgcgctgctgcctgtgtaacatgaccaaacattttagcatttaatctgtccctttccagaactcaacagtacttaaaaccagacttcctcagatgtgtcagagcctcttaggttgacacctcacaatatctaacagattaaaaagaaaaaaattccttatgtttaaactagccaatcataagtaaaacttacgagaatattcataaaatgtgatctcagactgggacacaatttgtttcaaaaagaagtaattgaagtttg

SEQ ID NO: 247890 - DNA, 533 bp, Homo sapiens
ttcttgctggtggtcagaataatgccatggaactcagaaaaggacattttaccaaattgtctactacgtaaggatagcacttctctgcaaatgcttttgaagttctggaataaaaagtgaaaaacaataactctaagcacactaggtcagaccttttctaagatgagaaggctctcattatgaggcttcaaaaggtagcaacagccatactgctaagatgagaaagtttaattctgtgaaacaactgcaaaggactttttcccccaatgcagcaggatatcatctggcgtaaactgaatgttttctgtgtaatatgaacagactagtggtgattcaaaatgttctgtaattcctccttctgccctggccatcaccctcacttatcaccttctctctctgtagtatcataaacttgcttcctgctcatgggtctcctttttgtgtgggggaatgagaactagtgttaccaacttccataccacttcttctcatcaatgaccgcatccttataggcccttggcactaactgtttc

SEQ ID NO: 247891 - DNA, 508 bp, Homo sapiens
cctttcccttccttccttcctttctttcttctgtctgtccatctatgtcctttctttctttctttttctttctctctctctcttttctttcttctttctctttcatctattattctatcatctttctttcatccatttatctttctgtccatctttctatcttcctttctttcttcctgttcatctgtctttctgtctgttcatccatctcgctatccatctagctatcgttgtgtttattcatccattcattcatctatctttcacctgtctatcatctgcaatgttgctaacatcaaaacatttatggttgtggacaggatatcttccatgccaggtacctttggccctcctgttgaaaagagtcaactcctatttatctatggctgtaaaagtaatgtttcaatttaaggtaactgagagttgtctgtaaacataaaggggaagttatggattctgtgtgccttaggccagtgctgttttgggatggaaaggcggtaattataga

SEQ ID NO: 247892 - DNA, 410 bp, Homo sapiens
attctatcaagcatttatattaccttttccttcctagccattttaatggaaatgggtggagaataaacagtaactcaataagaagtcataattgctcattgtagtacatcattgattgtgtgattttgtaatataattgttattgggctcttattgactggattctgggtttctcctgtccttgttaggttttgtgttgactattttctctttctatttttttcctaagacttttaaagtgtttctcaaattatggtctttgttaaactttctgcatcccgtaatgtggatgttcaaaagattcctggtccccactccctacccactgccaacagaatcagattctctggaagtgcgagctagaaaaatacattttgaataagtactcctcccctccttaggtgcttctt

SEQ ID NO: 247893 - DNA, 384 bp, Homo sapiens
gctctgtcacccaggctggagtacagtggtacaattatagctccctgcaacctcgaactcccgggctcaaactatcctcttgcctcagcctcccaagtagcagagactacaggcatgtgccatcatggccagattattattattattaagttttgtagaatcaagatttcactaagttgcccaggttggtctcaaactcctagcctcaagtgatccttctgcctcagcctcccaaactgctgggaatataattgtgagccaacacgcccagctctatggtagacactttggaaatataaaagatagaaggcaaagatgaccattgttaaaattttggcatatttcttctggtctttttttctaagcacatggttttatttcgtc

SEQ ID NO: 247894 - DNA, 831 bp, Homo sapiens
acagttacggcttattccagggcatggcttcagattaaaatcaatgcaagcaagagatgcgtagggcaagactggaagggttcccgatgcaaagctccccatgtgtcctccccatgggggcaggatgctttaccctcccggcatcacacgtgacagcactcactgaatattgccaactggggagactcacttgggtttccactggggcttcattacagaggcatggctgatgattgattgattgcttgggtggttgaactcagtctccaggactcctgagactgtgtgaccttaaaacctccactctaaatcacagggcaggtctttctggattggcggccagtccccaccctaagcctgttgggtgtagccattcccacactaaggtccttcgtagtcagaactcttctcaaatgtgacataaattacccaccagaagccaagggcgcagaccagatgtctctcagctactcgtaagcaatgagtcttgcttggactgatgggtgaacattcaaggtgctcattcagatgcagggctggcactgtccaatctttgttcactgccacgtgtcagattccaagcactttgtaaataccagctctcattttatcttcaaggcaaccctgcaatgctgtgggctctcattatccccactttccgtatggggacagtgagggggagcagctttcccaccctctcagagctggtaaatggtcgaggccaggcagcctggttctgagggcctgcacttgacccctggttgctttggtttttaaatttttaaaacattaattagttgctgcccgacttcagctggcacactcagcacc

SEQ ID NO: 247895 - DNA, 606 bp, Homo sapiens
cattaaaggggttcaagcaggggagaagggaattccgttttttagagcagagggagaaaaataaagcaattacttgatgtaaaggccagaaacaggactcctgctgtcagggagaaatcaaatctgtcagcaattagtgggatcttaggaggtaaagaactctccagcgttgagcagtgaataaggggttagcaattatatgaactgataaaagtgttctggtttccaaacagcaggttaacaagccttacttttttcataacttgatgcagatgtgatggtcacacttgaggatatttttcagtggttcgccaggaaagttccttaataagtacattgggcagcctgtttccatctcaaactgtgttcgtgctacctaacgcaaaaggatgtgtgggagagcattttgatagcaaggctcttctttaattaaaaaatggaataataaattctctgaacatgcaattaaaaaaaatcaaatgagaaattcacgtccccatgtccattcttcccatgggattggcagttcctggtattttcagcatggaaggaacgtcacctggtataaaagaggcaaactttgtatcaaataaatacattaacttt

SEQ ID NO: 247896 - DNA, 136 bp, Homo sapiens
agaattttgcaaaatagccaaaggtttgcagcaccttagacaggatttatggaagaaaaatatcccagttttggtaagaacagcaagctttgtgctgttttaacttctcctagtccccttaccccttctacctcag

SEQ ID NO: 247897 - DNA, 580 bp, Homo sapiens
tatatgtacacatctccaaaaaatatgtacttttttccccgtaactaccatgccattttcgtattttataaatgttataatatgtggcctctactaccggatccataattatacttttatgattgtctcagaaatgcctttttacagttgatttgttcaagtcagagtccaaaccaacatttggttgcttgtctcttaagttaaatagagagctgtacgggactccctccctgcttttcccatgctcttgtctcattgcataaactgggtcattcatcctacagagcgtccccattcttggtttgcttcccggtgtggttgtgtaacttgttctgccatcattacctgtcctggctttccagtaactggaagttagccgtagaggcttgattcgattcaagcctgagtcttggcaggcgtgccccatgggaggccggagagggcttcgtgctttgcctcgtcacatgaggaggctcacagcctccttaggagtaggttagtttttccccgttagtgatgctgattgctcatcttttgaagaggcacagctaggaaatgtgtatttttgaaaagaaagaaa

SEQ ID NO: 247898 - DNA, 734 bp, Homo sapiens
ggtagtactggagggaaagtatagttcacagtaatttactgtgtatttaaaagtagccagaagagaaaatttgtaatgttttcaacaccaagataatcgttcgagatgatggatagcccagttaccctgatatgatcatcacacatgtacaggtatcaaaatagcacatgtagccccaaatatgtacaactattatatatctattaaagatttaaaataaaagtgatcactatgtctacgaacattttttggtgctcacaatcggggagagggtgtgattctggcatctagtggtagagcccctgggtgctgctaaacagatcctcataataaagaattatttgacctaaacctgttacaggaaaaaccttagacaaactaaatttaacagagtttaaccaagcaaagaactattcatgagtcaggcagcctgcgaactagaatagattcagagaggcttccggtgcaaccaagtggtagcagaagattcatgaacagaaaaagccaagtgacatacagaaaatggaagtgaggtacagaaacaaccagattggttacagcttattgccttatttaaagctgatttcaacagttggctgcctgtgattggctgaaactcaatgattggcacaaatgtaggttacagtctgtttacatatccagttaggttacagttcactatgtacagaaaaacctttaggccacacttaaaatatgtaaggagacagctttag

SEQ ID NO: 247899 - DNA, 502 bp, Homo sapiens
cagaaaacgagaccactcatccatgaggtcattttagtaagttgtagatgaagcgtttgtgggacacaatgcttgagtcagtattgagatggctggagcctgaccctgtatcataagccagagcagcaggagcttggatttctgctcttccggttttctgttatggtaattgccagtccttagtgtacaggaaaaggatgggcagaggctggggcctccactgacctctgtttgtcctcagaggagccatagagctcaccagttcccccagccgtttcccaggacagaggtctttctcacagcctttctcagagggcttgaaatgttaagaactgcattttgctgcccagccggattggtgtccagcgcctcctgcccgtaggtcctagctcggctcatttcctcacagagtggagtcagaaagcattaatcagaacagggaagataatacaaaaattaaccgggtgtggtggcgcacacctgtaatcccagctactcggga

SEQ ID NO: 247900 - DNA, 480 bp, Homo sapiens
ataatactatatccagtaggattgtaggggccctaaaccagaaagatcccaagtgcttaatagtacctggcacttagtaggtactcctaaatggagtctcactttttactaccaagttattaaaaatcatagaatatccacatttccactttttactatttaaacatttctaaatgcttaaaagtaggatccttgattaattgcttctgctttgccacatacatttatccactttagtttgctgtattttgtaagtctgcttttctagtgcgtggaagtctagaaataatttcttttgcataaaaatttctgcaaatcttagcagaaaggactctgaagtctttagtggactgatttacatattaagagtgttttcacctaagaagggaaatgaaaccagcagaaagggaagtgagcaacgaatcgctgcctgccttgttaggttaattttgttttactttctcatttcttaaaaaaaat

SEQ ID NO: 247901 - DNA, 353 bp, Homo sapiens
taagggacacacgtgagcataagattttggttacttagtagaatcagttggtctcttctcaactgcacagggttgagaaaagaccagaggctgtgtgccatcatcaaccagctcaactgtttttactgccaacccaaaatgaaagaaaaaggtaccagcacagtgttaaactgtgttgcctgactgtgggctgttggaaacagtagcagcttccacaggtggaatgcatatttttgagcaagaaagtttatgtcctttgtgttagagccctctcagaaggaagaaaacacttcttaggcactgtacatcctttaattcaaaatataccaatgtcttatccccattttcagatt

SEQ ID NO: 247902 - DNA, 816 bp, Homo sapiens
agatactaaaatagatacagaatcaagcagttacaggctacatttaaaataacattatggagtgatcagtccttaggctaatatgttagtttttttttcagcgcatttacttagccgcatgcttgttcactcccgctagtttttggccgttgtcctccaatactttatgcctttcctaatatactgcaagtggatcacctattatttctcttttaaacatttaataatgtcctatatcttaaattggtttctctttggacgagctatccattatcaaccttcctgaaagtgcaattaaaatacaaactaggcatttacgatgatgtatgatattcttcatttaaaacccccaaataaacctctttctgttcaatgcctctaccccataattatacatatgaactacactggatcatctcctttgagaatattgatgatcttatgttcatctatggaactcccactatgttcaaagcagtgatatccaaagggtgaaattcctagtaagtatgaataaataatatatttcataagggaagccaaaagccaaggattcttctctcattttgattttcctttttcaattcatgtggcaactgacattatttttattatgggctatagtttcctccgtaacaaatagttgtattgtcagtttggttctagagattttgggagtaactctcttctctggaaaggttacaaatacccggattgaggactggaagcttgagccataactccattagctttcagagtatttcagggtgatttcagagtatttctgaggaaccagtccaaatggaataatatttt

SEQ ID NO: 247903 - DNA, 878 bp, Homo sapiens
ctgagccatttctacacagtgtctgtttcctcagaacaccggtcttcaccaaaggcgtgggaaagggcagagagcacaggacatattctggaattcaggtcaccttttacatctgcctggagttgggtgagcgcctcacgaatgactcggcaggactgactgccactgctaaccaggcggatgcaagcaatgaggaggacctgcccaggccgggtgggtgtctgctccctccctctggtccctggcacatctctggaccccctgccctgctgtcggagagagatgacgggcaacggcgtattctcagagacagggcctgcctgcaaatcctttaaagtcaatgggatgaaatgtatacccattgttagaaaaaaataggacttagcaagttgagtgcaaataactgattgcaagactgggatggagattggaaggggttttggggcaaaagcagaagtcttttctgggtccgcaccagctgtgaaatacctggcttgttgttctgtgcctgtctccagcacccaggcagggctacctgaccactctgctctctcagccccgccctggctctggagcgagcctgtggaaagggggacacttagccaaggccccagccacatagcagcagcagctgcgccctctgtcagctccttgcacctcctcactgggcctcctgcaaggcacctgctccactccaccactatcacctgggtcctcctggccttggcctggcttgcttaccttgttatcaagtcctgaatgggggaagcaatattccttctccactacaaatcaccacagtattcacaaagaattccagagaaataagaacagagacatcagaccacactgagcactcaataaagagaaaattcttc

SEQ ID NO: 247904 - DNA, 488 bp, Homo sapiens
taataacattcagaacaataacttttgggattttatgtctacccaaaaaacaataatttcgatgcattggttctgaacaagttaacatataactttacagagtttagacccttaatcaatagaaagtcatacaaattcccccagagtagtggttggcaaattgtggcccacagatcaaattctgcccatttttgtaaataaagttttatgggaacatagtcacatacattcatttatgtgttatcttattatcacttatgagctttttgcatgacaccagtagagttgagtagtggtaacagagaccacatggcttcaaagccttaaatatttatctgaccctttatagaaaaaaatttgcctccccattcctagaatatcagatgctacttaagtggtcttgttagacagtgcccttagagccctaatgtccaataaggtagccaccagtcacttagctatttaaatttaattcagatgaaataaaa

SEQ ID NO: 247905 - DNA, 505 bp, Homo sapiens
taataacattcagaacaataacttttgggattttatgtctacccaaaaaacaataatttcgatgcattggttctgaacaagttaacatataactttacagagtttagacccttaatcaatagaaagtcatacaaattcccccagagtagtggttggcaaattgtggcccacagatcaaattctgcccatttttgtaaataaagttttatgggaacatagtcacatacattcatttatgtgttatcttattatcacttatgagctttttgcatgacaccagtagagttgagtagtggtaacagagaccacatggcttcaaagccttaaatatttatctgaccctttatagaaaaaaatttgcctccccattcctagaatatcagatgctacttaagtggtcttgttagacagtgcccttagagccctaatgtccaataaggtagccaccagtcattgggaagttgagattgaccgcatttttcaccttcttgcccccggcggccgc

SEQ ID NO: 247906 - DNA, 460 bp, Homo sapiens
gctttcttaacttgttttctctttcccaatctcttttctgtaaaaggaggctacagcttcaggcagtaaaaccaagaggaagaggagggaaatgatgggggcaaggatggtggagtagaggaaactgggctctaccagttcctgggttggcttcatggcaaggtatttgcatggcaaggtatttatataatggttataaaagtgctgaatatggtcttcttcattttagtcagagaaatagagaatttctccctcttaaaaaattctctcttcctgaagctaaattcatgcagaacaaggatgcatcaggggtttggggacaattggaatgtacctcaaaggattctgggaagttcttctagtccctaagcagtaggtagatcatgaaaacagaggaattttgagcattttgactttattcaaagctttccccacctcatgtccccaagaaaaaaagaaa

SEQ ID NO: 247907 - DNA, 459 bp, Homo sapiens
tttttaaagagatagcatctcactcactatgttgcccagactggtcttgaactcttgggctcaagcaattcttccacctccgcctcccaaagtgttaggattataggcatgagccctcatgcctgccccttgcattttctatttaagtgatcttgaagtttttttttttcttttttaaatctcggaatttggcctttagtaagcatagaatagcaaagtgtaatacctgagctgggggaaaaagtccttgaattctttaggaaagacttaattggtgggtacaaagtgaaatgctcactggaatcaggaatcagaaaccagttctgatcacctatccctacatatccttcttcactctgccctggcatatcatggttgatgtacatagcaatgatcatcccttctgtaatcccacttgacagtttagaagtggattgataatactcttctggcttaaaa

SEQ ID NO: 247908 - DNA, 551 bp, Homo sapiens
cccatacagagtagctgcctgactcatacaatggataaagtcacatagactcaaagagtggagatggaggtcggatgtggtggctcgtgcctgtagtcccaacactttgagaggctgaggtgggaggatcgcttggtcttgaactcttgggctcaagcaattcttccacctccgcctcccaaagtgttaggattataggcatgagccctcatgcctgccccttgcattttctatttaagtgatcttgaagtttttttttttcttttttaaatctcggaatttggcctttagtaagcatagaatagcaaagtgtaatacctgagctgggggaaaaagtccttgaattctttaggaaagacttaattggtgggtacaaagtgaaatgctcactggaatcaggaatcagaaaccagttctgatcacctatccctacatatccttcttcactctgccctggcatatcatggttgatgtacatagcaatgatcatcccttctgtaatcccacttgacagtttagaagtggattgataatactcttctggcttaaaa

SEQ ID NO: 247909 - DNA, 740 bp, Homo sapiens
atggcaaactaacaaaaagaaaaatggtgactgatacccagtgctggcagtctcgtttaaactatgtgcaggaacagcaaaggaaatccagcaaatctggcacagtcattatcaaccctggccatgcagcaaaatcaccagcgaaaattttcaaaaatacacatggccaggccccagcccaaactactgaataagaatctccaggctttcacctgttagactggcaaaaatccaaaagtaaccactctggagaaacaggcattcctagacagtactggtgggatacagaatggtacaattctcatgaaatttcacagtagttaacaaattaaacatatttatactttttaacccaggaatcccatatttaggagtccagtgagaagatacagcccacaaataccaaacagcatgtgcccccggacctttccctgtaatcatgcgcctgcctatccagagggtactggttggataagctccctacatctgtccaacagagaaccacgcagcccactagaggagcgatggtcagacaactgactaagatgccttctgtgtaaataaaacaggaaagggaaaaatgaagacacgtttttgcttatttaggggaaaaagaaagactgaaaggataagctagtaaaacggattccctatgggggtggggaatgggctggaaagggatgagagtgaggctttcctgaatagatctttttatattgctttgacttttgagccataca

SEQ ID NO: 247910 - DNA, 501 bp, Homo sapiens
ggaggagaagcctgggccagcagagggctgctgtctctgctgcgctttcagcaagctcatctcaggcatgacattcaggatgcagagttgctctttatttttttatgtagtttgctaagagaaaatagccccgctacttatgtatcagtgtaatccaggggaaattacttaatttccgtcagcctcaatttgctcatctgtaaaatgaaggcaactaattacacctgccttagcatatgaggcgtgaatacgagaatgcttgacaatacttggcatagagttagccctcgataaatttcagctgttaatgttattatagcaccttcacatgttgttgtgtttatattgtaaatcgttggttaaagatatttttattgtcatgatagctccatactttcaagatgcgtctttgtagtatttcgtatccatttagtcattcattcactgagtttgtatttatcagacacctacttatggacaaggaactgttgattattatct

SEQ ID NO: 247911 - DNA, 687 bp, Homo sapiens
atatatgctcccttttaagggggagctgcaccccagctttaggatattgttgctctatgggatgtgatcccagtgttaccagatctttcaactttgcaggaggcatcagaatttggatttcctgataagcactgtgtgacccaaatgaaatacgtttgtaggtagaataggacctctagcttttcatttgagacctttccttaggctcttggaagtccttctgtggtcctgtttacctagttctcttataatctccttctggatatatattctgtcctctagtccccccagaagcactctttcttttttcaaaatctctcagaggcacagaattcttcttcctctaattcttgaaggaccacacaggtagataatggttctatcaggaattgtctttgactacttcatatgccaaaatacagtccattagtgatgggtttgttttccacggtgaatgggggtggcccagtatcatacagcctcgtaaggggagctgacttaaggagaagacacttaggttctatctgccctagccaacttacttctcacacccccacttcatctcaggcccctggaacgactttcaaaaaaatgcacctgggctctaagaaaaaagaatacccaattgttcagagcatgaagactgccaatccccattcgggctttgaaaaaaactgaactaaggaa

SEQ ID NO: 247912 - DNA, 648 bp, Homo sapiens
ggggtgcgtgggatctgtttatttggtagcaacatctgaacatggaagctaaactgacttaaatttcaggaacaaagctggtgttagcctcctatatgttcttgaattctgattaataatttgtatgccaatgcctttgaggaaagagtgctacatctgcagttaactctgaagtctattttttaaaagttggattgatggatggatagaggaatgaaaaaatatatatgctgtaaagcaagaatagtaaaaatgctgtagaacctagatgatgtgtatatgggtgtttactgtaaaagtctttcaacttttctgtatgtatgaaaattttcattataaaacgtcaagaagaaaaaatgaagactgtgtgagaagagtggcaggatgtgctctggcccatggaacaaagacattctcttgggtgcacagccctgacaggtgggaggatgacttggcatgagagctgtcgaaaacactataagccatgctcaagaatttttaatgtggaatagagaacttttctgaaaaagcatagttgaaagcaaggacaagcattaataaggcacttctactcttttatttattaccatgttgggaattattttgggaggagtgcttgcttcagaaatgctaaagtaggtaatttgt

SEQ ID NO: 247913 - DNA, 594 bp, Homo sapiens
ttggtttgttttcaattttttgagtatttactatttaaataaaaagcaatggcagcaaaggtttctatttccatgtccctttgagctttttccttgacatccacttctctcacaaggatctggccttcatgccaagtctctgctgatcttcactgcggagggcagctcctcccaggagagggtccagcccctccattggctggtgccggcctcacatttgtcctgaccctgtgtctggcttgtgctgcccgtgattatggctcctgccggccgctcagtggcccatgggattgtggagcagaaagcagaaaaggaattttggattacgggggggaaatgatgctttaaaaaggcaacagttttctgatgtctatttttttttcattctaagatagtttcataaatttcctcttcatttcaaccaagtacgcttggttacacttcctaaggaattttgttcaactagatggtatgttttggtgaattaatccaagaggacgctactgaaaaaatattatatatatgcagctttcttcacagaacatataacaggatatatatttgggatgttaatttaaaaaacaattttaaggt

SEQ ID NO: 247914 - DNA, 240 bp, Homo sapiens
ttacagacagccaaagggaacttggggctgacaaccagaaatggtggggttttttttttccaactgtgtacaaatcatatcattaagttttatgattgaatcaccagttattgaatacacatggtaatgtttacctctgactttgcagataaataagtgatttctttctagtttttcctgctccttagtgacagctgaggtagaattcttctcagataggctttcgtttttcttactttt

SEQ ID NO: 247915 - DNA, 467 bp, Homo sapiens
tatttttcatgtcttagagcttttttttgtttcttagtcgtttttgtagaccttgtttatagatgcagccactcactaaatcctagcacactggtgcaatcaacagaatttttgaaattctcatttctggccagacacagtcgtcacgcctgtaatcccagcactttggggggccatgcggggcctcacttgaggtctgtggtttgagaccagcctggccaacatagtgaaaccccgtctctactaaaaatacaaaaattagctgtgtgtggtggtgcatgcgcctgtaatcccagctgctcaggaggctgaggtgggagaatcacttgaacctgggaggcagagattgcagtaagccgagatggcgcccctgcactccagcctgggcgacagagtcagattccatctcgaaaaaaacagaaacaagaatgtttgaaatcctgatttcctgaggactggtgctcccc

SEQ ID NO: 247916 - DNA, 503 bp, Homo sapiens
ttttatgattataagcaacgcaattaaacataaaatcagaataagagaaacagttcctttaaaggagtaagcaaaatcaccatcatgtgaatttaatacgacttcattcttagaaaacttaggtgaatcaaatgagaaattaacaaaaataaaagcaaagtgtccaaatacaaaataaatgttaaaatattaatagtttacctgttcactgaaaataggcattttgaaaatacagtgggagaaaatctatccccaaaacaaagatcaactagaaataacaattatttaaaaatctaagacccttgtaaacaaaaaaactataaaattttgctgatggacaagaaaaaaagtatacataagtcttttttacatatactaaaataagcatattttagtatatgtaaaaaaatacaaaaataaaagaataccacagcctagttgcagaaattgaataaggtaaaaggtgtaaattcttaggaaattaattaatagtctaatacaac

SEQ ID NO: 247917 - DNA, 595 bp, Homo sapiens
ttcactctgttgcctgggctggagtgcagtggcacaatctcggctcgctgcaagctctgcctccgaggttcaagcaaatctcctgcctcagcctcccgagtaattgggactatgggcgcctgccaccacgcccagctaatttttgtatttttggtagagacggggtttcaccatgttggttttggccaggatggtctcgaactcctgacctcaagtgatctgcccgcctcggcctcccaaagtgctgagatgacaggcgtgagccactgcgcctggctggacattatacattttttccccttaagctgattcttcatcattggccatacaggcagtgtatggttcactaagtttcctaaaaagaattcagtaacaaaagttctttaatgaataaatataaacacttttggaaacaagagtagcagacatactctttcttaaagacgtctggttcacttcttatacccgtattttgctaggaaagaaatcgaaaccaggaagaggcactggtagatcatttacactggtcacatagtggttccttattagcaaatgctaccaacctttgtagcatgccagacaatgtaaataaaca

SEQ ID NO: 247918 - DNA, 513 bp, Homo sapiens
acagaccacgctatgcacgtatcatcaggtctgcaagctgaacagatgctctcacgtgtcatctcttagaggtaggatcagtcctggctgctatactcaagcaggaaaggtaagagggggcagctttttttccctctctttgtgtagtgtgagcaacctaaatatttccatctaagcaggttatggttccttcccacaattgaagggaaatattgatgtgcctgtttattggggggtcagcttcctggcctgatttgcttatctttaaaacagtcacaagaactttgcatattcttaggaaagaaaagggtaagaaaagaatcattgtgtcttgacagctggttgtaaagtgaaggagtcagtaaacaggttggtggttttatatacatgagattgaaaaaagttgccttgattgtttttccctgaatcggctggtcattttaatatcgatgtgggcatgttctaatcccctggttagtcagcgagatttctttctaagtagaattaagcaag

SEQ ID NO: 247919 - DNA, 208 bp, Homo sapiens
ctcctgctggtagatgaaatcatctggtctgttttggactttctcccctatagttcctttaatgggggcagaggcatctgtgttctgactgttgctgacattttcttcctcagtcgctgggcatccagtggtacttccagcctcttgagttctctttgctgctccaaggagccatctgggaaaggagctaggctcagtccacatcagc

SEQ ID NO: 247920 - DNA, 727 bp, Homo sapiens
aatagttctgtgacagctatctccactagaaggatcctggagcaggcattgaccacatacaaggaccacaattgccaccaaatactgtggctcagggttctccttttggcagcccttatctggtaagaccctggcaaagttgacacttcaagccctcccttcttccttccttttcaaggatctggacgcataagagttacaggctctatacacagggactttccttcctggaaacccggtaggaaatcccattatggctgcctgtttgccaaactattcccttgactgacaggatgcagcctattcaaacttctctgtgtctgttgaaaaaatgcatgtataaaaaaggcatggcctcacgtaattaattaggcatctgtaagggagagaagatgatctttcccttacgcatcgcaggattcacggctgagagcccataagaaagaacagataggccaggcacggtggctcacgcctgtaatcccagcactttgggaggccaagacgggtggatcatgaggtcaagagttcaagatcagcctggccaagatggtgaaaccccgtctctactgaaaatacaaaaattagccgggtgcggtggaaggcacctgtaatcccagctactcaggaagctgagacaggagaatcgcttgaacctgggcggcagaggttgcagtgagccaagattgcatcactgtagtcaggcctgggcgacagagtaagactc

SEQ ID NO: 247921 - DNA, 165 bp, Homo sapiens
gtagatgagattagttttgtagaccattagttcacattttgctcctacccttgtgcataaaatcactgcatcatttccgtggggatgagactactgcaagctacttccttggagattctgtggaagatggacatcttaaaagtaaactacttttggtatgactgc

SEQ ID NO: 247922 - DNA, 337 bp, Homo sapiens
atgcagtaaagtggggaaagtgatacaaatacaccaagctaaaatccaccgcctccttcatgtccagggaagaccaatagattagaggagtgtcctcatgttgacattattaatactttaatgattttctaaatttaatgtctcctgtgtctaccagaaatatattcctgagaagttcaatagacttggaagcagaccacctgggttcaaggcccgactgcctttctctgtaaccttgggctggtttctcaaagccttagtttccttatctgcagagtggagaggatagtaacacacttcacagggtgccctgaggattaaatgagataacgcatag

SEQ ID NO: 247923 - DNA, 398 bp, Homo sapiens
caatactgatggttgggtagttttcacacagccatgaactacaatgcaactactgaaaattatattgctgataactgtttattaatatggggatattacataacaaaactactttgttgaagaaaacagagtgaaaaagtatgtaaattatggtgtcattttaatgcacaagatgaaatatgtatggatacatatatacacaaagaaaggttctaaaatagtcactaatgtgttaactgtggtacctggagtaggagtactgataagattggtttggttttgtcttttgcctgttgttttttaacaataagtatgaagtctttttatagctagaaacaacaaagtttctttctgtattaagaaaaaatttctgcattaaaaatatatgttatggggca

SEQ ID NO: 247924 - DNA, 409 bp, Homo sapiens
gtgcaatgaacagaatcacttaatgcacactattatagaaaagttagttcctcagagagttcatgctatgatgcttttcttggtttgcatttgaagcaaagagggatagaattaacatgaatgccttatgatatatttagttagtggatccattattgtaatttaagttgtatttatactgaataatccttattttatattttacctggattgaattttgaaacaaaactggatataagatggtaaaaacctagaaatttcattttcatcagtctttctaatatacactcatgcaccgcataacggtgtttcagtcaatgatggactgcatatgtgacagaccccagattataatggatctgaaaacttcctattgcctaatgacatcataatcaatgcattactcatg

SEQ ID NO: 247925 - DNA, 333 bp, Homo sapiens
cagttgtattagagaaaagcttaaagacaaggaaaaattaaggaaatgaggcacaaaacgtagagtagatacaaccaacaaaaccaaattggattctttgagaagattagtacacttgagaaagccctggtacactagtcagagaaaagagagcagggacaaattacaatgtcagaatctacgaacccttcagacataaaaacttgaggctgtctcaaaagtcagtgggaaacgttaaatgcaattgacaaattactaggaaaaaactgctatcagaagaaatagaacatgttactagctcctgtctttcagaaatcttacctatatcttgtc

SEQ ID NO: 247926 - DNA, 414 bp, Homo sapiens
tagctgggattacaggcatgtgtcactatgctcggccaaggggcatgacattcctcacacgacttgggtcaaggtgctcgtcaccttgctgcagtaccttgcatctctaccaacgttttctatgccttgtttctgaagtgtttgtcatagtgaattccaggacttcaaattggattctttgagaagattagtacacttgagaaagccctggtacactagtcagagaaaagagagcagggacaaattacaatgtcagaatctacgaacccttcagacataaaaacttgaggctgtctcaaaagtcagtgggaaacgttaaatgcaattgacaaattactaggaaaaaactgctatcagaagaaatagaacatgttactagctcctgtctttcagaaatcttacctatatcttgtc

SEQ ID NO: 247927 - DNA, 650 bp, Homo sapiens
ctgtactccataaatatatacaattatgtgtcaactaaaaataaaagaaaaaagtgaaaaaacattcaccttttatattgccttaattgagtatgctaatataatccatattgttttaaaaatgcatataaagcttgtcctgttttttggtctgaaatgtcccagtttcaatctcaagagccccaatataattttcaggtcacccagaatgtctgattcaggaaggtttaaacactaactctgagtacatagtaaaagtaatatttaaagttgtgttttaaatgtctgtgagaccattctggacaggcttttcatatgctttcaacacttaccatatgaacgatagaatacgtaccttgcctactccagcataatttatatccccattttacatctttacgtgtatttactacttgaacttgaatatgtgaatagagatgatacattcctgggtaatcaaaattaatttctgtattacatttgaacatgaatgtttcaacatatcttgcagaaaatgaagcacagtaataaatttgcattaaaatctaaagaacattctgaattatactaaaatccttttttttttttttaaatcacattttagaaatgagatctttttcatgccactcaatactcgtgcagagcattct

SEQ ID NO: 247928 - DNA, 590 bp, Homo sapiens
ctgtactccataaatatatacaattatgtgtcaactaaatataatccatattgttttaaaaatgcatataaagcttgtcctgttttttggtctgaaatgtcccagtttcaatctcaagagccccaatataattttcaggtcacccagaatgtctgattcaggaaggtttaaacactaactctgagtacatagtaaaagtaatatttaaagttgtgttttaaatgtctgtgagaccattctggacaggcttttcatatgctttcaacacttaccatatgaacgatagaatacgtaccttgcctactccagcataatttatatccccattttacatctttacgtgtatttactacttgaacttgaatatgtgaatagagatgatacattcctgggtaatcaaaattaatttctgtattacatttgaacatgaatgtttcaacatatcttgcagaaaatgaagcacagtaataaatttgcattaaaatctaaagaacattctgaattatactaaaatccttttttttttttttaaatcacattttagaaatgagatctttttcatgccactcaatactcgtgcagagcattct

SEQ ID NO: 247929 - DNA, 376 bp, Homo sapiens
ctgttacataggtggcaggaaagtcatcgtggcaagtgatagttctatgaaggccctggggtagtcagtgatggaaaaaggcaaagataggccgggcacagtggctcacgcctgtaatcccagcattttgagaggctgaggcaagtgatcacttgagcccaggagctggagaccagcctgggcaatgcagtgaaaccccatctctacagaaaatacaaaaattagccaggcttggtggcgtacgcctgtggtcccagatactcgagaggctgaggcaggaggatcaattgagcctgggaaccggaggttgcagggagtcaagatcacaccactgcactccagcctgggaggctgagatggagtgagactccatctt

SEQ ID NO: 247930 - DNA, 484 bp, Homo sapiens
gatataggttaatgaaattttaaaaagacgtaggttaattgtaagttattgcaatataaacataagcctaactttatatgttattgcataggataaaagtttgaataaaataagctggacagatgagattcatatatgtgcttgtaaatgcactaaaaaaagaaaaaaaactgctgatgtaaaaatattgagttttagtttactcaatattttttaagtgtgatacaatagtattctactgtattattataatcatgtaaaaacaatatgttaatgctgggattatacaatcacagatgaccttttttgtaatgttttatcttactttttttcttcaaatgattcactaaaatacgaaagattttgttgcctgttgaactctccaggaattatcccttgcctcctattacaaaacagacaacactaaacacacaagtacccagtatttctccctaattcaacagctaaatttctgaattacttt

SEQ ID NO: 247931 - DNA, 480 bp, Homo sapiens
gagctgcagaaagccagaaccagctcagaaactgagaaatggacatgaagatgcccaggaaacatctctacagcatccctaactgggggttgatccattcatttccagacacagagaacagagtcacattctgctgtttccatatgtaccattttagtaagacttcttggggcacaaggcaggaagttggggacaatatatttgtctgcaccaaggcagcctgagaagagagaagtgaatactcctggggttattctatattattcacttaatattctaagtgagtcctctaggggtacctgagacatggagtatgaaagtacacattcacaaaagtaccagctttaaaactagattatctctactattcaaaaacaccaaggaaaggccacacaatggagacaaagtgcatctgagatctagcaaatttccctgttggccacatactgataatgatgtattaaaatcaattctatactg

SEQ ID NO: 247932 - DNA, 538 bp, Homo sapiens
aaatgtcattctacatttctcctcccctgacaaagtacttaagaaggccctccatgtgagctgagtagctactttttcaccccacattttcagaatttgtcttgacacacaggaaagttcattcagaaacacaaggaactccgggatttttaaaaaacttcttggctacgttgggcagtagagaagtcatttccaatttgcctgaagaataaaccaaatgaagaaaacaagagaagctctgaaatagccaagtggggaaatggagaccttgggaagtggaaatgcaggtagccttgaggaggacaattccacaattacacagagagatgtatacatagagatgccaagagcatgggctctgaaactgacctttattagcaaggggcaaattacttaatccttctgggtctccattttctcattgatacttagataaatgtagctcaaagaatttttatggggataaaatgtatgtaaaatatttaccataggacttggtgccagcataataaagtatttgatttattatcattattat

SEQ ID NO: 247933 - DNA, 377 bp, Homo sapiens
gagagtgggttttgcatacgccacctggtttatattctgagacagaccacccaaaacccactctccaaaattggcagaaatctgcccagtcgttttcctgtgatatggcaataaacaaagcgtcagtttgacttataaacaaacacatatgatgtgatgtgagaaaggctataattcagctgggggtgatgggctagaggagagaggggctggctctcccgtagagggcccagggtgcaggagaagggggcaccaggcagagggcaggatgcacacaaagactggagatttaaaggcctgtttgatggaactttaacactgcagcctggctggacggcaacttcattttcaaaagaagagcccaagttttgtacaaa

SEQ ID NO: 247934 - DNA, 389 bp, Homo sapiens
tacaaatggggaatttgaggctcagaaaggctaattgatgcaggtgtctctctgtcgtcaaagatagttctacttccactatacttaaagcctctggagaaggaattgcaggctgagagaaagagatctatcttaaatgagggaagaaatgcacgtttcattgcctggtctgggtagccttcccggtgttggagtgggaggtgggaaggttttagattcacaggtccttagattgaagggactctggaggaacaccacatagcaccccccgcattagctaatggggaaaccatatctagagattgtatccatgccagaaaaggcagagcaaagacaaccccagtctcttggcttctaggataggatgttcttccgccacccgccattta

SEQ ID NO: 247935 - DNA, 408 bp, Homo sapiens
atcactgcccctgtcttagcccttccttccctagaaaaaccatttcaccttttcattaacgcaaacaagggggtagctttaggggtgcttactcaagaacatggggccactgacaacctgtggcctttgtatcaaaagtttttgacccagtaacctgtgggtggcccaaatgtgttcaatttatcacgcgaccgccttgttaactaacaaaagcaggaagctaacctttgggggaaacttggtggtgaccacaccccatcaggttagaacaatcttaaaaggcaggaagatggctcaccgactcaaggattttaaagtatgatgctatcttactagaaagaggtaacttaacattaaccactgataattcacttaacccagcaggtttcctgacagggaacccaaatc

SEQ ID NO: 247936 - DNA, 541 bp, Homo sapiens
acttaatcctaagctctgagaggcacaggaagtaaaagaaaagttaaagatgacaattaaggtgttgggcccagttagatatagtgaagtcagaattttccctcattaaaactgttagaccaatttcattagacggaaatgcacccacatatgtaaatcttctttgtttaattggagacctattgattgtaggtaacataagcctctctaagggaaacagaacccaactgaagataagagtttcttccccccaacacatacagcattcatgattttatttctctaggcgtgttcattatcaaaatcattctactgcagactttcccataaagtgtttctgtctggccctgttttcatatctaaaagcttctagtggtttcagcaagaaatgatggaaacattttgacagaatatatatttctttttttaaaactaagatcttaaaattaaagagaaacaaaaacttacaaaatcacatgaaaatataatgctttaaagagactgagaataattgtcttcttttgtgctttcatagaatgct

SEQ ID NO: 247937 - DNA, 385 bp, Homo sapiens
tgcaatgaatccacatgtacagtgaaggagagggacatgcagagccctggcctagtgcaggggtcacagatggcttctgtgctgaagggtaagcaggcaccatccatcagacgctgggttgctgatggaagggtgacgctgggctgggagaggagtttagcagcgatgagctgccagaaagcaaggtcaagtgtggtgaggaacattcgtggttgattgcaagggaaccaagaaactccatccatctccctgaagaccgctcctttcttgcctttccttcagacagtagcccatcagaccatcccaaaagcctggagcctggatgccccagtctttagggacccgaaggactgggcaggggaggcatgggatgcctgagttgcag

SEQ ID NO: 247938 - DNA, 199 bp, Homo sapiens
ggccacctcaaatttattcttgtaagagaatataaataaattgcattttaaagtaacattgcttctcatatgaaccccttgatgttacaaagcaggcacagggtctttgctgcagatgaacctgtgtctttagactccaaatacagtgctttctgttgcacgcccacagacagtccttcctcatgccactctaacaatt

SEQ ID NO: 247939 - DNA, 459 bp, Homo sapiens
ggagaatcaaatcttatttaacaaaggccattgtcataccaaataccataaagtaacattggattagattcaacctaaatataataaaagtgtgtttttctttttgattttggacgctgacatttaggggataatttgtcagaagttaatttcttgctgacaatttatcgtctggccttttgtttctatgaccctgaacaagttgcaattccagggagctgccatatactcaacgcaaataatgtcaggtccataatcacgatactgtgtcccctgcatgaatgctttctcccatgtaagcctgcgtgctctcactcttggaggctccgtttgggtcagctgctgtttcagatcttgactgggttccattaattcagcatgcctcttaccagaggcttcaggctaggaagacccctcagctaacacagaggcactgtcacatttttctagtaagcagga

SEQ ID NO: 247940 - DNA, 352 bp, Homo sapiens
tcaataagaatcaaaatagttcattatatcttcatgccaagagaacacatgatacaaattcaacagtaatttcaattaaacgagtcccctaccacacctcagggagaatatttgttaaagacatttctaaagtaactctgacatttttacttttctttgttatggtttctaatgtaaattttttcccttatcatcttatactggaggaaatatatttctatagtctcctaaacagagaaggaaaccaaatggtttcacatttaaagttattggacataatccttttactttgttcaagtaaaaatattcagcaaagccagactgaaataataacatgaatgggcttattaag

SEQ ID NO: 247941 - DNA, 478 bp, Homo sapiens
gggagcaagatggggagcgtcagaaacctaactccaggatttgctgggttctccaaactgtagcgggaacctcactcccaggccgatgcccctctagcgtctgcagctctgggccccagggagggaggaaggagccacagagggttcggacaacagcactgactgatgccagagcaggactccattctgttaacctgacaaagcgcacaggctgcgccggcatgtttttcttccactttctacactaatttatcaaactggaaggaagagatcagaacatcaaataaaaatccacagccacagagcaattaactcaagacctaacatgtacctggataaggggactcacaagaattccggtatctacaaggttttaaatggcaatgttttctaactttgtatcttgggttattggtcgtcaatgtttccaaaaataatcactcctctcagttacattttctgatcaattattgaatga

SEQ ID NO: 247942 - DNA, 371 bp, Homo sapiens
tctgttattagtctttcttcccaggaggaggtattagatgaaatcagcaagctcactattgcagcctgacttggctcctctatggctgcatgcattgacacctgcacacacactcacagagtgggaaccaagttgcattttcttcagaagagctttttccgaaggggaaaatgtccaaatgagcaaatttaggactacagaaggaagtcctgggagaagatagctttatcttggcagtgactaagcagggctgtgtcttataattatttttatcactgatgatagtaaactgtaataagactccatctcttgtgcttactttgctgcaataattaggtctttgtgcacagtgatgctgctgttgctctgtt

SEQ ID NO: 247943 - DNA, 722 bp, Homo sapiens
gattctcattgtttgtgatgtggaattcacagtcaatacagtgtaatttaggggatagtccatttactcctgtaagaaactttataaaatgctggggccatggacagggcctgcaggcctaatctttcaccttctccaaagtttcccaatagactatttgcgaagatggaataaggcccacatcccaaatagaagggtcagggcacagccaggctggaagggagcacagaacaaaattttctgttttaaaccatggaatttgtcttctgagaattagccatttgggtcacaactgcaaagtgtgtcaggtgattaagtaatagatcaatgaaagctggagcagatctgagcaaggaacatgagtcttgaaatgaatgcctgggcagagtcggcacctggaacaggtgatttccgaaggcttgcactgttacttggcctgcctcctcttggcttgagatctaggaggagaatatataatagataggaatgcctgtcatagtcacaggccattaaaaattctctgggggaatacttttttctctgagtaatttggctgaatacgagcaaatacattcttagagatgacatttgatataaacttcctgtatgccaggcgctgttcgaacactgtatctgaattaacaaccctgagaggtaggtattattccagttttacagttcaggagaatggcgtgcccgggatgcggagcttgcactggcgt

SEQ ID NO: 247944 - DNA, 373 bp, Homo sapiens
tgcagttttaatgtatacacacaggccacacatgtacccagtgtaggatccaggcctcatcaagcttgtgcctctggttctgtgcaggagcctcactcttaaagacactcattttgctgaatgactgacagtaggataacgaaaagaacttgaacttgttttgttccggtcttctggaacaaaacactctaattagcaatatcaccataaactatgcaaaactatacagttagcgcaggtttcaactagagacagtcaagtgtctttgcccacgtctgaaggttctgtagtataaaggcccatacttatagattactatgtgtagaagaatcctgtgtcaattttaatcttcattttgagttgtgctgagctc

SEQ ID NO: 247945 - DNA, 380 bp, Homo sapiens
ccttttgtttttgacttcacttagcatagtattttcaaggttcatccatgtcttagtatgtctcagaatttcattcttctttataactgcataacataatccatttatttatatggcaaattttgtatacctgttcattttttgatggacattccagttgtgtcttcctttggctgttgtggataatgctgctaggggacattgctatgcggggatccctgcttacttgcttgcttttcttttttcttatttgttagagacagggtcttgctctgttgcccaggctggagtgcagttttgagacgatggctcactgcagcattgaattcctggcctcaagcaatcctcccacatcagcctctcaagtaaatgggactaca

SEQ ID NO: 247946 - DNA, 335 bp, Homo sapiens
gatataaggtggatatcttgtccagcccggtgccactggactctctcccctgtatgtaagccgctaataaaaccctatgtcttgtttgctgggtttctggcctcttgaacctggtgtcttccctaatgaggttaataaaggttcggcacagcaaaaggtgtcatgtaaatacctttaagggttttggcctgaattgcaaaattgctctcccaaaaggctgtagcactcttctcctacaagtagtatgtaagactctgtttctccatacctcccccaaggctagctattattcttgtaatctttgccaatctgataaaaaaaattgatttgatttt

SEQ ID NO: 247947 - DNA, 640 bp, Homo sapiens
ccaaattaaacaactagcaacagaaatgttcaaatctgtcaaatccaagtgttaacagacctgggaccaggggttcctcatagtggcttagcacagcatacagaccactttcctttggcccaaccggccttggggtctggagcaccaaacaggccctgaggaagcgtgcaaggaactggaatgcggggaaagtgatgaaatattttgttggttggcctttgcttgtttgcaaaatatatccaatgctcacacctgagagacaacagacatccttatttgtgaatagtctgcactagataattcagatttcaagtcatctgtcattcgtacttgataatgatttgttcttcatttaaagtggcctgggtacagagcaacatcccctgtctttatcacatggagctctgcctgaggcagcttcagcaggtaggcaggcaggcagatggagcacagcccattctctgctggtgcactaggaacagcagcacgtgtggtgttagcagctaataattaaaacaacgtttaagcagtgggttgagatttttaaacacaaaccaactcaaaaacacttctctgctttctatgtaatagtgctcacatcatttgtatgattgtctcgtctctttaaaattggaaatat

SEQ ID NO: 247948 - DNA, 339 bp, Homo sapiens
acacttctcccaaaatcctgtgcttaacacattgttactgagcacacaggcgtgctggggcaagcgacgcctgggaatatgaagcgaacgccacacactagaacgcgccctgggagctggcctccggtgggggacgcaggtgttgaagacataaccgcatgaccgagaaacctcagttttgctctgaaggccttcaactgcccggccgaggctcacccacaccaaggggaatcccttctcttaaagtcaactgatggtagatgtcaaccacagctacaaaacaccgtcacagcaacacctgggttagcgtttgattgaataaatgtgactggagcctga

SEQ ID NO: 247949 - DNA, 264 bp, Homo sapiens
gtcagagcattcaaggctgtggtatcttatttctgtttcagctactgtgtctgtgctctcagtgtttcatatattgggtccctacgtatgattttattttttaaatttctactgctaataaaagtttcacagatgtgatagtgtccagtatttctttcaaatttgaagtttcatttgatttaatcattttatctatcatgtcatttagtgtaatttttgaacctagtaagtgtctaataaatatttgctggggaaaaaaatgaa

SEQ ID NO: 247950 - DNA, 504 bp, Homo sapiens
acaagacttcttttctaacttcaacaccatagccatcactttgagtgtcacttttatcacccctctccctcagatcttcccaaaatgcccacaacaccagctcctccaacgagcccggggagggacttacctattgggaccttacccaagtggtccaatactgatttgtaatgtacagcttctgttgtttctgaattactttcatttcctttaccttgattctcttccaaacacacagtagtggctactccaggctagggccggacctatgtgtttataaatcccacaggcctaccacagtttatggcaggtacttaacatgctagctgaatgaatatatgaatgaataaatgaagacattccgttctacactctaagcctcagcttcagcaggtgacttcatgtcctatttttctgaaatcaaaaatctcataagaatgcctgatttacccacatctacacacttaagtttccatccatcctccatgccttcactgtcatttc

SEQ ID NO: 247951 - DNA, 275 bp, Homo sapiens
aaagaagaaccaaagggtgatatcagtgacatggtggagtatctccaaaaatcctttcctccacaaaaacgagaatatttgtaaaaaattgtcaaataaacttttttagaactctgaaaattaagcaaaaacttgcaacaatgtgcacagtatttacctaagaaaaatgcctgaatctcaggaagaacagcttggtggcatttttaatttgtcatattctcacccctccacccaagctccgtaacaaccatgaaaaccaacagcctgcaaacatg

SEQ ID NO: 247952 - DNA, 353 bp, Homo sapiens
cccggccaagcaaggtggctaagtgggaaaggctccaccgcgttgggtgtaggaagaccttgaccttagctccagcccagccactgagcagccgtgtcgccttgggtgatacctgtccctggtcggtttccctacctgtgaatctgggtacttggaagccatgctcgagaagagcccatccccaggaggtgatcagggttctcctccaggtgaggaacctggcagccgtgtgtgagaaccttagaaaagggagagggaagaggctgtggcaggaagtgaggagggagttagtgataccctgggcaggatgccatgagctgggatggaaaccacaggatgaatgcaagtaatta

SEQ ID NO: 247953 - DNA, 929 bp, Homo sapiens
gctccaaagccaccttctcaatgcgactttccctaacatcttctctaaaatggcatccctgttccccaacacttcatgtcccccttccttgccacagtagaaagaataatggtcccctaagatgcccacatcctaatccctgaaacaagtagatatgttagtctaagtggcaaaggactttacaggtctgattaaattaaggaccttgagatgaagatattatcccagattatctgagtgggcccagtgtaatcacaggaggccttatacgaggaaggcaggagggtcagaatcagaggagatatgatgacaggtgtaagagagagagagaggagaggaaggcaagggagagagagagattggaagatgccgctgggctgactttgaagatgcaggagggggccaccagccagggaatgtgggctgcctctacaaactggaaaatggaagaaaacagattctctcctagagattccagaaggatcacatccctattgacccatttttggacttctgacctccagaactataagataataaatttttgtcatttaagccactaaatctgtgctaatttgttatagcagcaatgggagattaatgcacttgctttatgtttttcttagcacttattcccgtctaactcaccatatactttagttatttatcttgtgtatggtttgtgtcccccattaaaacataagctccacaagggccaggattaatttttgtctgttttgctccccattctattccagtgtctataacagtagctgacacatagtagctacccaataaatgtttggcaaacaaacagcttccccattaaattataattgtcatgaagacaaggaccatatttctcttgcacagggcttggagcattataatgcaacaaacgttcaataaattaattaatcaacaatatc

SEQ ID NO: 247954 - DNA, 294 bp, Homo sapiens
gaatgggcaccacaacctcttatggccatgtttcccaagggaaggcagtgtgcaggacagcctgcccaccctggactcctagttgacaccgagtgccactgtcagtgatccaggaccacagattctagtgactcttcagggcagaaaagcctctgttttggcttcctctgtgccagccatctgccacctgtgaactgtaaggataaaggtcgcatgagtgattaatagtggtgtgttagtccgttctcacggttctaataaagacatacccgagactgggtactttataaagga

SEQ ID NO: 247955 - DNA, 816 bp, Homo sapiens
atactttcatgcaagagggtcacagtgtgtgtggacagaggcaagtgtgtgtatgcacagattacttatctgcctgggtgaggatccttccttctggctgcctcggacctttggtcacaaacagacctttccatcgtttggacagattgagttttcccaactcatgttgcttctccaggaatgaagaacatggggctccaggaccatggggtcagtctgaccactcctttgaaaaaatgttttattaagtttttaaattttttattgtgttcatgtcagagctccacaccttctgtcttatgagacatgctctgtccaagggaggctggtgagcccaggggctggggaggtgcatcgcggcgtggcctctggcatttctttatgacagtatccttccagccattgtagcctgctccgtgcagaagcatggtttcaaattctgcccttgaaacatggattaagcaatgttgctaatacgtatttgtccctgcgctgtcaaacatttcactgattctggagtctgcagacagcttaatagccaggtcctctgtcagcatgactgcggctgtgtctgctttgctttaagatgccattgagatttattggagaaataggtgcagaatgatacctagttaagaacagcacctggttatgtatatatcatcacaactcacggacatccaaagtgaccagatgaaacggacagaccctgcttgccaacaggcaccagcctcagtgtgggaggtgagagcaccagcccctgcccatgtctccgccacactgtgcacacggcctgcggaacacgggcacctctgg

SEQ ID NO: 247956 - DNA, 779 bp, Homo sapiens
caaggcactctcctttcactatttattcagataatgccatctcctaggacttaattacagcctttatagccaacaattttctgagttttgtataaacttcctgtggtacattttttggccttttttttttttttttttttttggcacataagtaatcactgttttgcacctagggaaacactttaactgtaagagggaaaataaggtcatattttatttgtgaaagtccttctctagccttgcgtgagcctttctaaaaattttctttcaccagctcactgaagttgattcatatagccttctatttgaccccccgccccgctgtctcccattctcagctcaaggagaaatgtttctctttgctcaaggccttgtttgcctgttaaccttcagaagccactctgctcccagaatccctttcttagaaaaagcccatccgttgctctgtaagactaaccaagcgcgactttctcctccattgcggaaggaaaccggactgacccattcagcccagcaccaaatctagcgcctctccaacctctccctccctctcgtcgtccccaccctcggccagctgcagcactgcgcaccgcaggccgctccaggcccagggcaacgcgcagccgatgtcctcccaacggtccaggtcgaggtcgtagcccactacgttgcgggtaggcacctggcgcgagtcccgccacttgaggccgcccagcagcaacgctgtctcctcgaccacggccagcccatagcagaagcggtcgtagggcagcggccgc

SEQ ID NO: 247957 - DNA, 470 bp, Homo sapiens
ccattcacaattaacttaaaaaaataaattattggtcttctccttagagaaatgacattgtgctaagcaactatgatattaccaagttcctactgtgttaaaagatagatctaagcagggaagtggttttcaaaacatgagtcactaaacaaaggaaagttttatactgctttctcatgcttttcacttgttttcatcagaagatctgacaagcataaaagtgttaacatcttttattttacagatgttcttagttttccctcaaactgtaaaagatgctatatcagagtagcttggtaggaaataatttcaacacctcctttcacttacgtgataacttattgtttgtctaagcttgtggatacttttggagagagtgaattgaggcaagaaaagatagcatattgagatctaattgttctcattttgacatatataccagtcagtctatctgctatattatatagtct

SEQ ID NO: 247958 - DNA, 476 bp, Homo sapiens
aaagaagaaggtgataaaggaaaacagacgatagtggttcctatcaagatcttagagaaagagaacattaagggagacaaattggagtgatatccaactaatcagaagctggatgtagctgaaggacttcttgttctaatttatctggctgtgtcttcactgagcggaagtatgctgactgttttacatgtggtagctacaaaaatctcataaaatgtagagcaggatgcctagaggaaactgaggctgagaaagatgcaataacttgctgaatatcacagaaacaatacgtgattcaaagactcacatacagccctcttcatgattgcagaatctcaactttcaactatactgattctccacaatgatgcatttctcgttgtaatttaatataactctacaaggagaacatggaatgggaaaaatctgaccaacattgcataatatgataaaaataactcatgattaccttaaaa

SEQ ID NO: 247959 - DNA, 377 bp, Homo sapiens
atccgtgttccacccgggcatcatgccgctggtcgcctcacctgggctgagggccagggtcagtccagccagcagacaaaaccaagaaggtcttccccaaagctgggcccggtcaggcaggtggagggctcctctccacagaggcttggcagagcacagtgggaagtgcaaactcccttgggcaatgccgagggtcgggcaggagtatcccctggcccgtaaccaagaagcgagcaaggggaacgcgtcgatggtcacccgcagggatggagaagcagcgccacagggcagcagcggggctcaaaagggggcgtgaggcctcaagaagctcgcagacctccgggagggatgcggcccgcgcctccctgcagttcccc

SEQ ID NO: 247960 - DNA, 574 bp, Homo sapiens
ttttgaaggtaagttttgcaaaggccaataaaagctaccaatctccataagctgaatcaatcagtgtatgagtgtccattatcattatgtataagacactggtactaagtatggcaggagtgggagtagttaaagaggtataagaaattgttccaggattaagtatacaaattattcatgacctttcaaggtcatggggaaaacaatttcttaccaatttcatatcaagccattcccttttggttagaaactaatttctgtcatccatttttcatgtgcacttctgcagattttgtcccgattcattttcctgttgttaatgtgaatattgtcttgctgacctatctgatacacagtagagttttagcatttagaaggctttgggctttaagataataaatatttgaatacaaggtaactgaaattttctgtttcaaatatttcacaatccttagagaacttttccataagaaaaaagatttctcaaattatttgcttcagtcttcttggaataccacatactgttgttttgctattccaaaatcgtgtgaatgatgatgtggtggaggaacag

SEQ ID NO: 247961 - DNA, 344 bp, Homo sapiens
aaaaaactataggcatcaatattctgctctaagttacagctatgatcaaaccactggctcaaagtttttcagcagtggcctcattcagggaattaagtccacatattgagcttcccattagaatattacaataggttactacacaactataatgatcaccctactacacacactctaagatataaacctgccaaagcctatttcatttcacaaaattatcatgaccttactctccttctgacaccttaaatcactctttgagccccagttcaagtgccacctctttttttttttttttttgagacagtctcactctgtcgcccaggctgcagtgcagtggcgcc

SEQ ID NO: 247962 - DNA, 1006 bp, Homo sapiens
aggttttacatctaggtaaatagatagtagcattaacaaaaacggagcagataaagagaggactgggtttaaggggacagaggagaaaagttgtctttatcagccataggactagaattctagtgtccagatttccagacaaatctattttccactctccctattactccagtgtcagaaaacattaaattgccaggggactatggctgagtgcccataaaaagttgaaggcattgtgcctagtaagaggccagatacttcctatggccacagaattagagacctaagggtagaggtgattttcaaggtgatcatgtgatacctgagcaccctctgcatcattgcttccaaataattgcgtggcatctgcatgatatttccagtgacaggaagccaccttgcagacattcctgaaacgcagatgaatgcatggaaacagtaatctaagatctacctccccgcaactttgcatctttaagcctagttctggcctcccggataataatgggaaggaagctttcaaatgaacccctaacatgtgcatccctctttgttccttacccataatcttgcttccttggaaggcagctatgattactaatattttacaggtaaagaaactgagattcagtgagaacttgatttacccagggtcacatagttagcacgtggtctcagacttgaatcgagcgatttaatttttaagtctgctgctccatccatcaacacagtagctgcctttcacactttatataagacacatgcagcagaggcctcagaagccaggcttgggccgttcttttggttactggaagtcctctaattcatcaggctctagccatcctaaaaaggactttgacctctgcaaggaacccacgcgcgtgggttccttgcagatatcctgtgtctcaagtttcaccccttgcaggagcatgtggtgaaagaggagctgctcaacgccttgtactgtgaatttatcaaccgagtcaatgaggtcggggtcgat

SEQ ID NO: 247963 - DNA, 524 bp, Homo sapiens
ggtttctccctgttggccaggctggtcttgaactcctgacctcaagtgatcgacctgcctctgcttcccaaagtgctgggattacaggcgtgaactaccgcgcctggccctcagatatttttaaatttgaaaattaagagtatatattaatatcaagtagcagaaacagaatgaagtgttataaaggcgttaagtagtagggagacataaaacttaaatctttaagctagaaatagcttgaggaattatctgatgcagtactctgttgtaatatatcaaaaatggaatcacagttttacaaatcaggcagctgcagctcagagaggttaaatttccacagacctgtttatgcagcgcggtaaatgaggaagtagaactaaaattggggactctgctactctggccattaactcagcctcgctggacctgaaatcctgacggcggagccgaatatttcttgataatttctgggcttttgatttgtgtttttctttattaaaaattgtgtatatttaaaaatttct

SEQ ID NO: 247964 - DNA, 149 bp, Homo sapiens
tccctcctgatgggcactgcactgaggccttagtgggcattacctgatgccctcatcacccagtgtacaaacacctgctgacaagaagcgtccctgagcggaacccttctgctgggacaccgcaccttccgtgtcctgagtgggctgca

SEQ ID NO: 247965 - DNA, 389 bp, Homo sapiens
cacagaaagaaagccagtttcgggaaaccatgcaagggtattatttagagaagaagagagttattaaaaactacaaagaactcaaggagaatgggagggaaattatcagatatagagattatgtgtctttagggactttgacaagaacagttttgagtagagcatttagtcatatctcaatatgccattcattttgaagctttggattagtttattccatgattatcctcacctatcacgtatggctagtttaagagcgttatttaatctagagtaacagttctgaatgttttttaacaacaacaacaacaacaaaatagcgcatgtgacacttcctttacttctttgtcccattcctcctcttttctaaaataaacaaatatgtgtat

SEQ ID NO: 247966 - DNA, 350 bp, Homo sapiens
cctaaaatattctctccctagccagattccttcaccgtttctgactaaacatagaatcactaaaaatagaacgacacaaccacaatatcatcttctcaggcaattccagcctactttctcagcaaaagcagtttcttctctttctggctgcattccttgcaggcaatccgagctgcttgcaagaaaacaaagttccttgctcatctttgcagtcctgaaacctattgctgaggcaatgctttgccccagtcctgacgggagctccgttatcacaaaaccttctgtcggtttactcctttgttcaggggccactggaagagaaagactaaatgcattccacccagggcctg

SEQ ID NO: 247967 - DNA, 340 bp, Homo sapiens
actccactccatcccaccttctcccacacctacttccagtttgttccctcacttttagtagaatttgagcttaaaaagacaggattagagtgacttactgtaattttcagtgtcatacatacacacatattactattttttcctctagaggaggggaaaaaaagaacatcataaagaataagtgctatgttagccgggcatggtggcactgcctgtagtcccaggtactggggaggctgaggcaggagaatcacttgagcccaggagcgagaggttgcagtgagccatgattgcactactgtactccacctggaagacagagcaagactcttgtctcaaa

SEQ ID NO: 247968 - DNA, 655 bp, Homo sapiens
gcagactgaaagggaagtggcattatttcatctgatttaatgttcatttgcagttatttttgttatatgtttcatttgtatttcatttatgctctagttatgttaacatttgtttttctgtgatgtattatgtctgttttcataattttcattactttgagttgaaatcccaaatacccagtctatcctcctcctctctttgttttaaaatagatttcagagcaggaaaagcatcagataaacatgtatgtcacttggttttgtttgatttattgatacaagtgtctgtctttgtcttttgtcttatgttcgaagatcagcatataccaaatgggaagactggaatcatagtaggaactagattctatttccctttcactaattggaatgaacactctagctttgtgaccaccagtttttattgcttttttaaaaaagtagtagctacacaataaagaagaaaatacaaatgtgataggactttgctagtttgcttgaaatataaagtgttagagctataatttagctttcacttatgcatttctgaattaggttttgaactctaggagcaaacgcaaaccttttaggcatcaactgtcatcttctcccttaacatttatcttttttctttttttctcttgagacgaagtcttgc

SEQ ID NO: 247969 - DNA, 1255 bp, Homo sapiens
ctcagaagttagacaataacctcagccacctagaacagctctgaatctagaaactgaattaaaaacatagatttggcagcaaaaaagcaacttatttatccagcaatgatgaatctacagggggtgtgttggggaaaccacagattcaagtcagattgtaattatgtggttcataaatggaaatacccagcaagaaagaaagaaatacgtttgttggctggctttattatataatgccaagacattttccacataagccaagaaatataggaggattaagagaaaacagagatagaagaaggaatcaaaaggaaatccgttgataaataagaactattactctataatcctctcactaaattttgacatttgacaaaattcaacagctattccttataaaaatactaaaaaatagaacttatttaaaagcggattgggtattttttcccatagtcaacagtatatttaatggaaaaagtcaaaagaattttcattaacaatcagaagataagccaacaacctcctagcacaatcattattattgttttgttttagaaaagcctattcagtgtgtatatgcgatacaaaaagtactaaataaaatgaaatgaacattttattagcttaagagaaattgattgaatacctcaaatgagagaaaaaagtgattaagttaaatgatgagtttagtagagtgggcgtgctaaagtaaataatattatctatgctccatcagtaactaaattaaaaatataatggcattcatggtgacaacctcttatgaattacctggagagaaatttttaaaagaataaaaaagtagatgatattggtgggagattaggagactctcttagatccctgcaggctcaaaagatgacactctgtatcttacttacagggcatcatttcattgtgaatgtggtgtcccaagtatatgtacccatatacattggtgtgcatggtttgtagacatcttgagagcgaaaagttttatagattttgagtagcttaaatgctaatcattactgaagtctaaacgtctccttgctttatctgtttcctgcccctctgcaaactatgtcccgtctgcttgctcacttgcctccaagtaggttcagccaatggaaggcattgacagacaactacaaaggctaaaggagtggggcatccaggacccatcttcccctgtctctcactaactcgggcagccttttttggcagtagttacttgctcgttagccagctcctaaga

SEQ ID NO: 247970 - DNA, 441 bp, Homo sapiens
aaaaaaaaaagatggtttataactcttactcaaccaatcttacctcttgatgtatatgttttttaaaatttatagttctttatgaaacatttctcctaagtatattgcacgagaaggatgaaaggtatgagactattgcttattgtattgaaaacacttcctcttccagttggcaagtataaaacggtaccaactgtgaaggacttaaaaatatctttggccaggcgcggtggctcacacctgtaatcccagcactttgggaggctgaggcaggcggatcacaaggtcaggagatcaagaccatcctggctaacatggtgaaaccacgtctctactaaaaatataaaaaattagccaggtgtggtggcaggcgcctgtagtcccagctacttgggaggctgaggcaggagaatggtgtgaacctgggaggcggagcttgca

SEQ ID NO: 247971 - DNA, 408 bp, Homo sapiens
gagatcatgactgcctccccacagaggatctgtcccactggccacctcagagccagcaagcaggaaaaactaagtgtgttgaacaggagatcatgaccgcctccccacagaggctctgtcccaggaagactggggttctgtccgtaaacccctggctggagttgccggaattcctgaagggaggtgccacccagtgaggagggatggatccaggtcccacctaaagaagcagtctggccacaatctgccacagctactgtgctgcactgtgaggaattcttctctgtccaaaccgtccgatctttctggaccagcaggggaaaatggccaactgaaaccgcagtgatggctgcctcccctccccctgggaacttggtcatcttaggcagtctccagcctgctgccact

SEQ ID NO: 247972 - DNA, 650 bp, Homo sapiens
cagaaggacactgcacatgataatgggggtgctgtgagggaataatgggggcccgggccttatgcagaggtggtgtcagggaaggccttgcccaggggtgacatctgagtttagagaggtcctgagaagaggcctcactcaggtgctctggtcatcagtcccaggagcccagccttcgagtcatcccagcccgggcaccagacgtaagtgatgaggcttccagatgattcctgccccagctgttcagggctcccagcagagaagagctgtacccacagagccctgcttggcttcttgacctgcggaatccatgaccctgttacacccctaagttctgggatggttcattataacaacagatcaccggaccacggaaattacttctcctcttctactctttaggctaactcgtttttatataaacaactcatccccacccagacacacacacaaggccctagagcagcagtttccgaacagtgccgtatcccccggggatctctaaaaaatactgacacccagacaataggggggaatcctaaaaatacctgaccaagactattcaagattgtcaggctcatgaaaaacaaagaaaagtctgatactacatcctggatggaacataacattaaaactgagaaaatcggaaa

SEQ ID NO: 247973 - DNA, 250 bp, Homo sapiens
ataatttatgttccttttcttggtggaggggaaaacatcccttgcatttaccttctagttatgggtagaggcaccagccaccagccattatgaaacgcaagacaatttgtaagctgccaggaacaacaatggattagagaggaaggaagttgggggcggatggtggctatggcaagaaaacttgatgtgtatggtaagtgtaaatgaaggtctatcacaaatgcattaaaaattgttttatgtagccaag

SEQ ID NO: 247974 - DNA, 414 bp, Homo sapiens
ttatcattccagtgtaagaattcacttcttgccctacactatccatagtacaatctcccctctccctccatctttgatcccaactacaggccagcttcagtttcaaggcactagaaggagctgaagcaaatcaagaagcagagaggaaacatggctgcgagctgcatgaggagcagtcacagagcagagtagcacactgcaggaggctggtgggcagacagaggaggcagagaggcatgcagctgcaccagggaaaggagaggtgacctgcagacagaggggctgacccgtcgccaaatctgcaagtcacctttccgcacagttcccttgctggcctccctaactatcccatgtaactgagttggaaaaacattgttgatcaagagagaaaggcttgcccatcctcaatgcaac

SEQ ID NO: 247975 - DNA, 347 bp, Homo sapiens
aaattgctctataagtcaactgataaaaaaaagtcttggtatctgaacagacttagagaaaccatatctagatgaagatgccaggtggagactgataactatcaggaaatggtagtaatggccataaagaaggaagaaagcaatctcaagtcacatgatgtagaataaaacagcatggaaaacagaaggagagcaacagacttcgggaacacgagtaaaatatttctttaaagtccttttaagaggagtaatgaggacccaccacatattcctaaatgttgtccctcagagatgcacagatgtatatgggtaaggaaatgtaaaataaactttcagctttcatttca

SEQ ID NO: 247976 - DNA, 661 bp, Homo sapiens
tcttgttttatttatactacttgtcaaggtttatgcattagcatttggatgagattcattaaaaatataagggcacatttgatgtttggctcttaacaaaaactcaaatgtttaacctcaagtttttaacacattaacttcaaaatatctgcaaaatgtgttatacagcaggacaatatgggtataaggagaattaaggtaaacaaacatttactttatgcataaaccatagctccatccaccatggagctaatctccaaaggcatggatttgacctctgttgtgggcaagtttgtcttacaaccaaaggtcataccagccactgcaaggggataagtatatatggatcacctctgcaaatataaatcttgtaatttgaattactgttgcctttttatacattttactaagtaacccttagtattctggactccctagaaaagattttccaatatttgtatagctttacatggaaaagttagttaatacttcaccttaagacatagatcatagaaggaaaagaatgtttagttcagtgattttctagccaaataacttgacagcattatatgctatgtcttatggtaagcttgtcattctttctgattccaaaagttaataatagccttcactacttatttgaaatttaaaaatttgctgg

SEQ ID NO: 247977 - DNA, 197 bp, Homo sapiens
tgatgtgcttcgagagactggttggttgagctgggtcttcagtgtactttgggaggagcctggctcagtcacagtcacagctctggtgatgaggcatgagggattaagtatgtcaggatgggccagtgaggctagctgccctcagacacctatgctgtgtcatttgattccttttgaaatctttctgtagctctatt

SEQ ID NO: 247978 - DNA, 849 bp, Homo sapiens
catcttcttctacgtgtgctaagattacccagacttcactttacccttatttcccactgactttgatcccttttacttgtttttattctgtagtatgtatttttgtcatcttttcagtactctttggaatcagaataaattaatttccatagctaaatagatatggtagttgataaaataaaaataaagtatttggcttatatatattagcatagtatttggcaaattctttctgcagagggccagacggttaatattttaggtgttgcagggcaggtgatctctgttgcaactactcagctctgcgtcgtaatgagaaagcagccatagacaatgcataagcaaatgggtgtgactgtgttccaataaaactttattttcaaaaacaatggctacatttgactttcgtgttgtagtttgcctacccctgaactagtaagttgcttttagagaccagaccttgagaaccactaagcagcatcctttttaaatcataaagagatttaagtcataaagagagaacaacatacatttcctactctcaaatataactgtaaaggatgttcttggcttacatgtgggttgtattttagaaatttgcttgtaggttagtggcttataactcagactcctttacccatagaaatgtttgtaagtgctgtcaagaattcttattagttagtaaaatatttaattaataatataaaatgttaaatgtctgcagtaaaatgtaaaagaacgatagtattaaaacatgataattagaaaaggtggtgatgaaaaggagctcagggtactttcataggcttgagaagagtaaaagtactttgactacttctgcctcagata

SEQ ID NO: 247979 - DNA, 356 bp, Homo sapiens
gtaaaattatcctgccataccaaaagattgaaaacttcattgagtagactgcagagaaacagtcagtttcattcattgctggtagaagtataaaatggtacaacccgtataaaagggtttttgcaaaaagctaaagacatggtggacagatttacttttggttcagtaatcccactgttaggaatctacactgaagataaacttccacaaataaacaacacatgcacaaggttatttattgcaacattgtagtggcaaaggattggcgacaacacagatgcccatcaatagaaggctgattgtataactggaatatccacacaacggaatattgtgcaatgctttaaaaaaaaaaa

SEQ ID NO: 247980 - DNA, 355 bp, Homo sapiens
gcataagccaccatgcccagtccagcatatatatatatttttaaactggaactcatttttttaaatggaagcacaatctgaaaaaggaataaaacccaaagattgacaacgggctagaaaaccagaaatccccaattcagcttcttcccctcactctcccctttgaactcatgatgcgtctcaaagcccagcttgaaagccacagatctagagcttggatggcattctaatgagctaagcatctaaaccgaccacagttgggagccactgaaagtttttgagcaggtaaatgatagattgattgatttattcattttgagacagtcttgctctgtcacccaggctggagtatagt

SEQ ID NO: 247981 - DNA, 285 bp, Homo sapiens
ctccttggtctgagaattgtccacggaccactgtcggtgttcccggtagttggagagcaggcaaagtgctcccatggcgagcactgaacaaacgctagcccgagccaacttccttccagcccttggtgcacaaccggttcataccactgcacttgctgtgtgttctagattctgttttattcatttagtctatttcctgtaacatttctaggtattcatatcacctctgaaggacaagattaaaataaaacaaccctaaaccattaaaaaacaaacaaacaagca

SEQ ID NO: 247982 - DNA, 404 bp, Homo sapiens
tatttgtcagtttaaaaaaactaattgttttaaaaataaattgctgtaccatattatctctacttcccttttcagttgatcttagccaaatggccaagaagcgatcaacttcccttttcaaagtagttaattttgattaggatgcattttacactgactaataagcataccgtgaaacagtaaaatacctaaaatgtacgctagtatttcaatgatgcatttcaacgaaggtccatgtgaaaattgccaggagtgactctcgacaaagataaataatcgtgtttgtctcaattttattaccttgtcacaattctaaataccttctctggactacaacataccatcctcaaaggatcaaaacaaacaaaacccaaaaaacctgaaaaccatcatctctctctttt

SEQ ID NO: 247983 - DNA, 504 bp, Homo sapiens
acgccatttacattagcaccaaaaaaatgaaatccttaggtataaacaacaaaatatgtacaagatctatatatgatgaaaactacaaaattctgatgaaagaaataaaagatctttccaacttgagctacagattcaatgtaatcccaatcaaagtctcagcaagttattttgtaaactattgacaaactgactctaaaatgtatatggagagggaaaaaacctagaatagtcaaaacactattgaagagaacactgaagtgagaacaggggcggtaactgactgcaaggcctactacagagctacaggaaccaagacagtgtgggattgctgagaagaacaaacagatcaatgcaatggaacagagagctcagaaatagacccatgcaaatgcagtcaactgattttttacaaagaaacaaaggcaacaaaatgacccaaaaagagtcttcttgacagatggtaccaaaacaactggacatccacatgcaaaaaaaaaaaaa

SEQ ID NO: 247984 - DNA, 888 bp, Homo sapiens
agcagggtatggtggcatgtgcctgtggtcccagctacttccagctacttgggaggctaaaatggaaggatcgcttgagcctgggagattgaggcctcagtgagccatgatcatgccactgtactccagcctgggtgacaagagcaagaccctgtctctcaaaaaaaaaaaaacgcggctgggtggaacatctggaaaacatctttaaagaacgctgactcaatcaggaggagcaccattttttttcttgccctccgcccttcctgcctgaaacagataagcgccctctgtgtaccaaaaaggaatgtactgtttatagagacttcaaatcagcagaaaattcaaatagttataacttttctttataatccatcatgaaaaagagtaacgacaaataagagtgcagtggtgcagtcatggctcactgcagcgtctgcctcctggactcaaagaatcctcctacctcagcctcccaagtagctaggaccacagagttgtgctctcctgcagcgttttgcggacggctggctatcttacccagaatcaatcacactgggacactgaaaaaaaaaaaaaaaggaaaaaagagcaagggagtaattctagcctgtttttacaagaacacagtggctatagacagtgccagtgtgaagatgactcagcaaacgtggagaaccaaagattctagggcagcaccaaaactgggaaagcaattacagcagaagttgccttccccatggtagcttagcaacttcgtgtctctccaaggcagagaggaaaatcaagtctaacaggccttcccgaaggctaggtgtgaaataccagaagccatctttgtttctggcgatgtcactaaataaatatttgttgatataaagtattacacat

SEQ ID NO: 247985 - DNA, 759 bp, Homo sapiens
agcagggtatggtggcatgtgcctgtggtcccagctacttccagctacttgggaggctaaaatggaaggatcgcttgagcctgggagattgaggcctcagtgagccatgatcatgccactgtactccagcctgggtgacaagagcaagaccctgtctctcaaaaaaaaaaaaacgcggctgggtggaacatctggaaaacatctttaaagaacgctgactcaatcaggaggagcaccattttttttcttgccctccgcccttcctgcctgaaacagataagcgccctctgtgtaccaaaaaggaatgtactgtttatagagacttcaaatcagcagaaaattcaaatagttataacttttctttataatccatcatgaaaaagagtaacgacaagaagctgattcctgccaactgcatttcctgggctcatttaaccatgcccagaaggaattaggacaatgaaagataaaaagataaaggagccaacatatcctctcccctttgattcagacgacttctccaccatcgccttcttcacaatggccacttttcctctgcagttggggttcttcttccccagcaatggctccaggactctgttaactcagctcctccccagttctagaggtagacggtagaggcttcctgctattgttactctggggttccccttcttctccagtttgctttccagcccttccaactcctttgtaactagttcctggtatcaaattcacttaactgaactacctgaattc

SEQ ID NO: 247986 - DNA, 472 bp, Homo sapiens
ttgcgttacagcatggcagtgctaaagggagagttgttggcattggtcaatagtgaatgctgactagaggagaacttgtttccaaaattattttgtctgtcagatggccaacgtcagtgtcaaatgaaccaggatgacttacattcacctacagctttgtggctatctaacttacaaaaatgaagttgcaggccaggcgtggtggctcacacctgtaatcccagcactttgggaggctaggcgggtggatcacctgaggtcaggagtttgagaccagcctgaccaacaaggtgaaaccccatttctactaaaaataaaaaaattagccaggcgtggcggcaggcgcctgtagtcccagctactcaggaggctgagacaggagaattgcttgaacccaggaggtggaggtttcagtgagccaagattgtaccactgcactccagcctgggcaacagagcgagactccgcctca

SEQ ID NO: 247987 - DNA, 329 bp, Homo sapiens
cccaggtgggccacctgccaatgcacaggagagcccctaatccccaggaactctgccaaactggcctatctgggcatgtgagtgaggcaggggcaaggatgggatcccctcctgagccccagttactggaccccacagaatccaggtgctctgccagcccccctgcctctacctgttaggctgccaagctgtgggtgctggggagggggtcttcctggtcctggggcctgtctatccatacccagatctcacaccatttttttctttaaatgatggcttagaaacaaaaaataacaactgaagaaaaagattttttcttaaactcaaca

SEQ ID NO: 247988 - DNA, 368 bp, Homo sapiens
tggtccgaacttgagctcacaatttgggattagagcaaatccgagtatttttctgcttgcctgcccgctcccgggcgcccagagcctgctgggtaactgcctattatccgccggttccactccagtgccctccccaataaaacttttcatatccttataaacgaactcgattgctgtgttataaacatttacactgtgctaacagatcatctccgcacatcagaattggctaaattcccttttccagatgaatatattgaaggagattagagatatgatagcttttcagattgctgaacccagagaaattagtttagtgagcatttacagaggctaaattggaaccattaaatagtggattaaattga

SEQ ID NO: 247989 - DNA, 156 bp, Homo sapiens
gatccttttgtgtatgtttagagccagatgataaaaggtattgtagtttttcaatgttgataaatgacaaagaaaattgaataaaactcttatttaaaattttattttattattttttatttttttgtcagtggcatgattacggctcactgcagc

SEQ ID NO: 247990 - DNA, 257 bp, Homo sapiens
tgcatggtgttgctcttggctcaaagtctacaattaaatcagttgttggcactcccttgaaagcattactatcacagtttcccctacatatgtaagtcaataaatttgacctttaagaaggacagttggtgtagaccccctccactgggccaacacatattgcaaatttctgaactcaggccctgcaaagtactactgccaccttgcttctttaacagagaaggcaaaataaacagaggaggattccatggtataaa

SEQ ID NO: 247991 - DNA, 556 bp, Homo sapiens
ctgacttttgactctacgtctgcctactccctgacctatgctctttctagaaagtggacacttgcccagataacaccacttctatccacttctatccctcggggaggccctaccccatttcagctgggctcagagctgggcaaattcagacctagagtggatttcaactctgccacctgccaaagggtagaccccaacatgccatgtgtttctccagtgggcatccttgggttccctggctccatgcttaggaggctgggccctccacctgacttcttcaaagccctccccaagagccagctcctgcagagccaagagccgtgagccgatcctccaaaaaccagacccataggacaagaggccaggagggagcggccagctctcggtgaacacaggtacagggccttggcaggctcagcggtcaggacgtccaggtctcatctccagtctgcctcttgctagtcacttgacctcccgcagcctcagtttccccatctgtaagatgatgacgacaccctccagctccttagtaaaggaatgataaaatgacaattca

SEQ ID NO: 247992 - DNA, 454 bp, Homo sapiens
gccagtgattggcttaggaatggccacgggacccagttccaaccaggaagaggaaatgggacgagaagaatgatcctcctttagaatcggttgtatctaatcgggatgcagatgcctgaaactctgcagtttaggaaacactagggccctctctgtgaaacattgagatgtccaagtggaaagagaacaaatcctgtattcgaagaaacggtggaccgaggctcgccccggcggacctggacctgcgtgcctctgccttctcatgtgaactgatgtctcttgcttgaactcacttgagtaaaggttttgtgccacttgtagcatgtgcagatgtaaccatcaacacggaactcctacttcctggagactgggggggatttgaacttactgtaggttcacggagtgacaaagctgtttctagggccgatgcagccgtgggccatgtgaataggat

SEQ ID NO: 247993 - DNA, 324 bp, Homo sapiens
aattttgtctaagattccccataaaagaaagctcttactgggcggggagccatagctcacgcctgtaatcctagcactctgggaggcagaggtgtgtggatcacgaggtcaagagatcgagaccatcctggccaacatggtgaaaccctgtctctaataaaaatacaaaaaaaaattagctgtgtatggtggcatgggcctgtagctccagctacttgggaggctgaggcaggagaatcacttgaacccgggaggcgaggttgcattgagcggagatcacgccattgcactccagcctgcgcaacagagcaagactccgtctca

SEQ ID NO: 247994 - DNA, 724 bp, Homo sapiens
gctacattccagctatgtgatattggtcaatttactaaacttttcagttcttaatttttctacttataaaattgtgataataagaataattgcttcagagcaattgttgtgagaaaattatatataaaatcacaccataaataatacatataatatacttagctcagtttatggatcacagtaatagttcagcaattgcatattattattattgataatagtaaccgttattatgcaattgctccgtattgctcctcatcctgtgttcccattcttgataaatgttaccaccattcgaccaatttttagaccaatgtcctgaattatcattgacacatcttcactcatcttatttctatgcattgccgtattcttaagttcaagccaccatcatttcttccttgaattactgataacttcttccttgaattactgataaatgttaataaattagatataattcattttcataattccttgaattactgcaatagctaactcatctccctacatttcccttgcatactgtgcaattcatactcataatagagctggagagaattttggaatatttaagtctgatcatgttacctcttgcttaaaatgtctcagtagcctctcataacttctaatatgaagtctatccttgatatgagctataatgcccagcatgacatgtcctttgccttcccctgtgccattcatctcctctttatcacctttg

SEQ ID NO: 247995 - DNA, 394 bp, Homo sapiens
ctgtgggtctgtactgtgactcaggaccagagcactccttactcctggcagccttataaagtcatgccattgatcatgattgaggactgggcgggaaaggcctcccctctgcaaatctttcacaactacactcctaaaaataactcaagtgcatgtgcctggaagcgcagaagagtgacttcatgacataccaatcatgttgtataatataggttgtataattcacgttaaaattttaccgttctatgtcagcagtaattagaaattttttcctaagtgtaattaaagacctgcatatttggggcaggaggaagtagcgcttttgagtaggaatataccatttactgagtggcacatgaacagaatcttgtgaaaaattaaagtaagaaattaa

SEQ ID NO: 247996 - DNA, 464 bp, Homo sapiens
gcataaaaaactattacattgctaccctgaaattaacccttcatttttatttctcttcacttattttcattttattattggctatactaggaagaattataaatacatataataagcccacttggtaaacttggcttgataccctgaaaattcgtttattccctttttagaatttgactgcttgtaagaataactagattgtacaaatactattttcaaggacctattttatctaggggaaaaagtactatttcttttattgtatcaggattcacaaataaagtaaggttgaagtggaatcagtgataaacagactgttaggttttagtgcttatcttgatatgtggatttaaaactaatattcgtacttctctttggagaaaaacaatgtcaaacatagtaagctcaactttgttatacagatgtaattattccaataaaagtcatccaagcgttttcactaa

SEQ ID NO: 247997 - DNA, 471 bp, Homo sapiens
cattatcccctccctatccagtcagagggcattaccctcctggctttgctatgtgccaatacacatggaatattcccagccagtgaggctcctctcaagcctcagtattcagggtttttactggaacttcatcatagaggcatgcttgattgtccacgcagctgctctcagcttccggtctccagtccttccaggggtgaactaaagcccggactctaaatcacaaagtccattttcctggcctggctagtctccaccctaaatctcattattagacaatccatcatgacccaagatccgcaggcaaagatagtcctatcaggtattacgtgttgatggttacttcgcaggagtctaggagaaaggacagacctctttttggtcaaggttaatttttttttttttttttttttttttttttttttactatacaacatgccatcgttctgttattttttctgtttcatcttc

SEQ ID NO: 247998 - DNA, 413 bp, Homo sapiens
tgaaacctggctgcacttcagaagcacatgggagctgatttaatgtcaggcagcatgcagaccagtcctcacaacctgtcgatgtttttaaagctccccgggtgactccaacgcacaggaagctttgagcgtaactaagtgagcctcccgccctgaaatgagagaaaggctttcaggcttgtggtgttggtggactaagtgtggcttctggccattcacacagtcaccacactgcaagggagctgggaactggagcctgtgagaagcccctgtgaacaatgttctctgtcttaaaacagcttacacggacttctcctttttacctctaaaagattcattcccctttccccaaccatataccccagattgcaaccccttgctattctcaaataaactttttgttttggagtgtc

SEQ ID NO: 247999 - DNA, 471 bp, Homo sapiens
caggttcatatactgtccagcagtatggtctcagaaaactgacctccttaagcctttgtttgtgtatctgcctaaactcattgagagttgggactatttcacacatacagtgcctggcatgtagaagggacttaatgttgaaagaaggggaggcattttaaaatccacatcaaaaaaatgttgttctgtttgggagtggtggctcacgcctgcaatcccggcactttgggaggccaaggcgggtggatcacctgaggtcaggagttcgagatcaacctgagcaacatggtgaaaccccatctctactaaaaatacaaacattagctgagcatgggggcgggatcctgtaatcccagctacttgggaggcttaggcacttgaatgagaatcacttggacccaggaggtggaggttgcagtgagcaatgattgtgccactacctgggcaacagagtgagactctgtctcaaaa

SEQ ID NO: 248000 - DNA, 252 bp, Homo sapiens
tcccagctctgtgtttagtgacatcatgcggtaggttggaagtcgcccacggtgggagggtttgcacatggaaggaaactggcaaacactacaggccgggtcctccctcccacctcaggagctgtttgttaaacgtttgctggcatacctctaggcaaacacatttttacaattagccttccatatgtatgttttctgtttctcttcttttttctttctcacctaaaatatactaatgtatcttgctacata

SEQ ID NO: 248001 - DNA, 395 bp, Homo sapiens
ttgccatgtacttaaaatcacttttaggccttaggcggaaggggcagggtggaagagattaggtagtgtccctttaagagttgggcagacctgtgcagatatacaaaaacagagtcctggccgagcgcggtggctcacacctgtaatcccaacactttgggaggctgaggcaggtggatcatgaagtcaggagtttgagaccatcctaggcaacatggtgaaaccccatctctactaaaaatacaaaaaatagctgggggtggtggcgtgtccctgtaatcccagctactcggcaggctgagggagaagaatcacttgaaccagggggtcggaagttgcagtgagctgagatcccccctgcactccagcctggcaatagagcgagaccccctctc

SEQ ID NO: 248002 - DNA, 457 bp, Homo sapiens
cagccaattggcaggcaactgacagccgctggccttttgcacacagggcctcactggagctgtactttgttttgctgaaggtgacttattcacacatcccagatgttccctgtaaccgagagccctggaaacagctaccgaaaaacacatgtgttttctaaaggcctgacagaaataaatatgagcaaacagcctgaggttgctgtctgatcaccaggcagtctaagggctgaccccatctcttcatttcctctctgtgctgctgggcctcccttccctaatggggcaggatctgaacagctctggttgtagttttagggtttgctgtaagtagtttgaatgtaataaactcatagaagaacattaaaagtgttaaaaagagggcaaggagaacagaaaaagctggtattagcttgaaatgaatatgtggaaaatgcaagtatactttgaaaatgat

SEQ ID NO: 248003 - DNA, 413 bp, Homo sapiens
atgtcgtaagttactcaggcatttatcttccctcatattctctggtgaagtagagatagtcatctccgttgaaacagatgctcagggatgtaagtaaattgctttgttgagtgaacagggaattgtagaactcaaatataccctggttgctaagtcatttggaaaacaactgaaactggatggatccaacagctcacggtccacagccaactcattcatggcttgggagtgtcatcatgggtggcagaggctctgttcctcctttgtaatgtggggacttactctctcagcaatttactgagaaaaaagtaatctcttcacacttagatcactattataggaacaaatggtgtgtatttgtgaagtgcaatatttctgggaggtcttggaaataaatactaaaagtatccaga

SEQ ID NO: 248004 - DNA, 2252 bp, Homo sapiens
  misc_feature (438)..(438): n is a, c, g, or t
  misc_feature (474)..(474): n is a, c, g, or t
  misc_feature (492)..(492): n is a, c, g, or t
  misc_feature (1969)..(1969): n is a, c, g, or t
  misc_feature (1986)..(1986): n is a, c, g, or t
  misc_feature (2030)..(2030): n is a, c, g, or t
  misc_feature (2065)..(2065): n is a, c, g, or t
  misc_feature (2145)..(2145): n is a, c, g, or t
acacacacacaatatcaccatgacaaatacacattacacacacacaacatcacaatgacaaacacacattacacacacaacatcacgatgacaaacacacattacacacacaacatcacgatgacaaacacacattacacacacatcacaatgacaaacacaacattacacacacacaacatcacaatgacacacacatcacacacacatcacaatgacaaacacacaacattacacacatatacacacagcctgagggccctccccagcccagactaacacatctcggggtgaggaccagaccttgttcataaccctgggcctcttaaccactgatctttgaaataaatggcaaatagttgtacctggatctgtctagttcttaggggaacaaactgaagaagggtggagaggaattgtcaggcctaaagagccccncagggaaagggaggagtcggatggggggcaaccatnagcaacaagtggtggctnctagaggcagagggatggaggtaatgacccatggaggtcattctacagatgaggaacctggacccagttggctcaagtccatgcaggaaatgtgggggaaaccagagacctcacgtctggatctggcttcctctccaatccacaattcctgaggaagtagaggctacatcccgcaagacgcccttattagacacatccaggacagaatgacaatccgccaagccagctggaagcataaaacacagggagctggtgggttgggtgggggcagataatgatatgcatacaaattagagggtctatgcaaatgagcattgctgcagtgtggctggagggaatccttagttcctaggattctaggatatgggtttcgaccccagaggtgaatgtattgttattattgttttgttgttgttgtgaatgacaagtcaaaatttgtgggttattgttgttatcgccaatagtattcttgtcattgttgcacagtacagagatgaaggaaacagattttgcaatcagatgatcctgggttctgagtccactctgccactcaccagctatatgacctccagcaatttccatcacctctcaatgcttcagtttccccatcggcaagatggttgtggggggagaggaacaacagtacagattcaccatcccaaattcaaaatgctccaaaatctaggccgggcgtggtggctcatacctgtaatcccagcactttgggaggtcaaagtggacggataacctgaggtcaggagctccagaccagcctggccaacatggcgaaaccccatctctactaaaaatacaaaaaattacctgggtgtggtggggggcacctgtaaccccagctactcgggaggctgaggcaggaaccctggaggttgaggttgcagtgagctgagatcacaccactgcactccagcctgggtgacagagcaaggctcccatctcaaaaaacaaaaaaacatgctccaaaatctgaaactctttgagccccagtgtgatgccacaagtgggaaattccacaactcatcacatgtgatagattgcagtggaaatgcaggcacacaccacgaagtttactcagcatcctcaaaggaaatccccgtcagtagctatatatcattttctcacatgccagataggtatctctcatcttttactgttaggtacttctgtgttgaataggtggaggaaaatgattgctggttagtagtatataaattcagagtcaggaaggatggtgatgtcggctgggtgcagtggctcatgcctgtaattccaatgtgataccctaccttgtgtttaacgtgattgactctcccttagctgagagggccaggcagactctattttggcttcttcgcttgcagtctctcacccaccccccttcctcaaggacttaagctgactcccagcacatccaagaatgcgattactgataagatactgtgacaagctatatccacanttcccaggaattcgtcnggttgatagcacccaaagcccccgcgtctatcaccttgtgatanatttaaagcccctgcacctggaactgtttgttttnctgttaccatttatctttttcactttcttgcctgttttgcttctgtaaaattgcttcagctcggctccctcttccccttntaaaccaaggtataaaaagaaacctagccccttctttggggtggagagaattttgagcgctagccgtctctcagtcgccggctaataaaggactcctgaattagtct

SEQ ID NO: 248005 - DNA, 382 bp, Homo sapiens
aatttttcttaatgttttggtttccagtgtacagactgaacacatctgtgattagatttatcaccaagtattcagcttgttttgtgttattgtaaaaaacaattgtctgtaaatgaattaaaagaagtttgaaaactgttgctatagaataaaaaatgtacaaaactagagtttgtaacaattacgtgtgtatacctatatatctccccttatggtcaaactacatttacttttataaaaagtaaattcacaagaagggtcatctatggagtgtgtgtgagtagagtagatctgaattagaaaggatacccagggactttaagtgtggattgtttgttctttaaaacaagacagaaaattcagatttagaagcagatatgat

SEQ ID NO: 248006 - DNA, 597 bp, Homo sapiens
cagaataagatagcttttctgagaaaagtaatttttttttcagttaaatagcttgctggttttatgcatggtatagcaatcttcaggtctgtttccttctctttttcctcctattcttatgtttaagctgacatctttccacttactctcttcatctctcattattttatgctacgttagactccttgctgcctacattgtagtaagtggtaacactgcttcattttggagagtgatctaaatctgttattcccaatgagcgtgtgtaccagatgtatttcgggaagttaaaagaaatggccatgtgtggtggctcatgcccgtaatcccagcactttgtgaggctgaggtgagaggatcacttgaggccaggaatttgagaccagtctgggcagcaaaacaagaccccatctttacaaaccataaaaaaattagctgggcattgtggcatgtgccggcagttctagctactttgggggctgaggctggaggatggcttgagtccagagtttgaggctgcattgagttaagataggcaccactgccctccagtctgggcgacagcgagagaccctgtctctgaaagaaattatattt

SEQ ID NO: 248007 - DNA, 880 bp, Homo sapiens
gtaaaggaaattacataactgaaatctgaaaatgctaataaagacctataacacagatgacaagcatgagcagaacagatttgtaaacacaatgcaagaggaacatattgtaccagaggacaattatgttgattgcacatgatattttggatcaaggatagagccaggtcagatctcaacattcatgctgatggcataaggaacagtataaacaatctgaaagccatttctgtctcaatttatatagtttcataaatgacatttaactacaattgtttttttcccagtatttaaaattaataccttggctataaactcattccttaaggataaatgattgtggaggaggaaaaatactcagacacataagtgacccgggaaggcatgttggtcatgagaaatccacatgttgtctggacatgagcatttgcttgcatctaaaggaaacatgacattgattcttccagtttcaggatttaatgttgcctataacttttaaaattgtttagacagtgtggaaattataaaaatatgagatgaaaagtttcttggagataatctaaacataacttattttccaaatgaacaaatcacagccaagagagtttaggtaagttacaaagagtaccatagcatataaatgtcagcaagaggtagactgtctgttgcttgagcctggaattcaatgggatgtcgaaacaatggtatactatacattggtaagggcagagtataaggaatacggtggagaacagaatgaggaaagaaaattaaagcggcaattagacatacatatttaacaccctcattttccaaaaggtgaaggttgtttctgtggagttatgaagagttagaacatactcagaatggaaggagaaaa

SEQ ID NO: 248008 - DNA, 307 bp, Homo sapiens
gagcatggcctttctgccaaaactgctaaacatattcattctgattatacatttggaaatgggggaaatgatcataatgtgggtttttggacccactgtgagagcagggttgggggtgttgagaggggaagacactgtggtggtacttcaggttcctgggtatcaatgccaactcagaccctgtaaccctgtttcccaagtcaaaaacttctgcatattcttttcccagtgtttggttgtgatattgtaaaatatgtatttggtctttaaccccttttcctggaatataacttctaaaatccttaaa

SEQ ID NO: 248009 - DNA, 859 bp, Homo sapiens
tgagttatgttcaatccaggcaacatgattgaaaaggctgtgctgacagcacttcatataaaaccaggcagacaaagtggaagtggacagttctttaaaatgtcaccttggtactcttttggcttgtatcttccctctgaactccgaaagttatttgtctacctttgtcttgaagcctgccaaccaccttgcccctcatactcttgttttatgggctgtgtcttccacctttggtatcttattatttttaatggcatttctcctaataaagtctcagcagttccacatggaacactaactggcagaacttatcactgctgccaggagggtgaggttggagtaggagtggggaatgccagtagtgaatgtgatgttctgcagaatgttgaagggagaaacttttatttatttattttttaaggactttgagactgaaagttattctagtgttggaggggaaggcagaaggtcatggtgtcacagttgcagatgaggaaagatggctttctccttagactacatttcttgttgaaaaatccattgttggcctgaagcaggtaaaccagttgtcaggaaattaatgacaaaggtcctttaatggatcatattctgtcagggggaaaggtccctggcttttaagacagaagaacattcccttttgcccattctagtattttattctactaccagagaggcttatagagattaagacccactgaataacagtagggccctaatgaaatttttagtattgacgtgtagttgatagaatctacatatatgtatgtgattatttttgttggttacttattgtataacttaaaaaatagatttgttgagatataattcacaaaaaaag

SEQ ID NO: 248010 - DNA, 444 bp, Homo sapiens
ttttaaaacaagctgacctcccaagtagagtacctgggcagccctctggctgtaagtaaggctgtggtctgttctcttttcggtgtaggcggagggccatcccgcttcagagccctcacttcacacacaggatgttccaatgtggatgatgcaattcttatcacaaacaatctacaaaggattgagatatgtttaaaatcatttcctggagtttgtggtgatatgcactctttctgtttgtctaatctgaaggcctgttgcaagaacaatctgagctcattatgtgactcaaaaaccagagagaactgcaatctctctgtgtgatgaggactgactgggaattagggtatttccagttgtagaaatgtctttcattctaacaaggactagtgcattctttttccttaaagagagaggagaaatagaaagaacaagtgtcatagc

SEQ ID NO: 248011 - DNA, 519 bp, Homo sapiens
tgggaagtagccctatttgtctctgatgtcacagaagaagagtgacagtcaaatgttggttacttttcctgttgccttagtgatcactgtagctgatgtttgctgagaaccgtttatgtgccaatccctgctctaagcacgtggactaatgcatcaactctcaacaacaacttgtgaggtgggaacgatccttaacttccttttacaaatgataaagcagccatacaaaatgaggatgacaacattctccttgcctactcccggcccacagggctctctgtgattcagcaatggttggcccctggtgaggggaaactgtggcctgggcgcctgcactatgtttgtgcaagatctgtattctgaaaattatgaaatattgctaaattaaagaagaaccgacccggcgcggtagctcacgcctgtaatcccaacactttgggaggctgaggcaggcagatcacttgaagccaggagtttgagaccagcctggccaacagagtgaaaacctgtccctacaaa

SEQ ID NO: 248012 - DNA, 234 bp, Homo sapiens
ccagtgccaacagtatgtaaggttttctattctgatagatcacagggtaaactgtcacaccagcacatttacctttaatcctaagaaagccccaataaataataggatgtgtttgtcttaccagtgttgctccttaccagaggtcataagtagatcctaatgtcactggtgaaatgaataatttttccacatgaagttttaaaaattgttatacattagacctgaaaaaaatta

SEQ ID NO: 248013 - DNA, 307 bp, Homo sapiens
tatttttatttgatgacataattggaattttgaacgtgactgcatgtttgattttaaataactttcctttaaaaatataataatgctgttgtggctaattaagtgttcttattttttagaaatgcatactaaaaattttttttaaatgatagggtcctgggatttgcttcaacaaaacacatgaaacaaagcagtatattcaggtggattggctatggtttaatggtttgagggctgggcggtggatatgggggtttatgctactgtttttgaacatatttgaaattctctgtaataaaaattcaaa

SEQ ID NO: 248014 - DNA, 596 bp, Homo sapiens
agaaaaggtaacatctactttattcactcaacaactattaattgagaaaaaagtaagtgctggggatacagagatgaataagacagataaggtcactgtattagagggacacagtacacgaagaatggcagattgtggtaggtgctctgtggagagtaaagcatgctagtccaatgaagagtgattgagcatggactaaggaggccagggagggcatctcaaaagagatgatatttgagccatgacctgggtgagaagtagcagcaagccatacaaggaatattcaaggcacagggaacaccaaatgcaaaggccacaggtcatgtttgaggaaaaaaaccaggccagtatgtctgcaatgcattagacaagacaggagaaggcacaaaaggaggtgagcaaaggaggcagagatcggatcatgaagggctatgcggaccctgacaataggaccactggaggaaggtaacagagaaatgacatggaactttctatgtgtctgctaagtgcgtgtgaatggcagcagggagtctggggcagtggagttggagaaaataggcaaatttgttatattttggaggtagacctggcaggac

SEQ ID NO: 248015 - DNA, 581 bp, Homo sapiens
tatttacatgatctggctgagtaagctatgttcctattcatctctcagtgcctttctgtagtctggcaaagagaaggactggttggctttttatgttgttttttgttttttgggtttttttttggtaaatggccttaaaggcttccaaacaagctcttattttaccctcaagataatcctgtaaatcagatagaacaagcattatcgccatttatttgaggtatttcaactcatagcagttaagttgtatgaagtctagtgatacatgagcaagtatcacgtaatagctggttagtaaattatttttgaaaacatgtttgattactcaattcttttgattactgagactttagtttcagcttcttagcccagtttattcagtaaatgatttactcagtaaaatattcatcaaatatttcttgagcacctattacttgctacacattgttctaggtgctggatatagagcagcaaacctgctcttgtggggcttacagtgaggtacgctgtgacaatatgggatgtcattctcatgggagtgcaagggaaaataaagctcttatgatgtttaatacagaata

SEQ ID NO: 248016 - DNA, 381 bp, Homo sapiens
ctcacacagagcatgagtgaccagtcatcccagttcacctctaggtgtgccaaggaacaggcaggccacacaaggaagaggaacgtgttccacttataaattttttgaggttatcctcattgatccattccataaaactatcagaggaaatcttgacacccagcagatcaccaaatctatccacaagcatggggagatgtgtgggctgacatcctcaggctgcaagagccatggccttggaaagggccgtaagttctaccacgctattggtggttctcaccatgcaacttggagaaggtgcaatattctccagctctaatgttatcacagatataagtaacgtttgtaaaattcatacctaataaatttagaacagtcatg

SEQ ID NO: 248017 - DNA, 456 bp, Homo sapiens
actcttgttgcccaggctggagtgcaatggcacgatctcagctcactgcaacctccgcctcttgggttcaaataattctcctacctcagcctcccaagtagctgtgattacaggtacctgccaccatgcccagctaatttttatatttttaacagagataaggtttcaccacattggccaggctggtctcaaactcctgacctcaggtgatccacctgcctcggcctctcaaagtgctgggattacaggcatgagccaccgcgcctggcctagtccaagaattgaaacaaagcttatactttattagtaataaacacctaatgagtgttaaactacccctcacttcaaaactacccctcacttcaaaataacttactgcagaattactttttcaattccagaagcaagttaatcacatattttaaaggaagaagccccaaactgttgaggatgacc

SEQ ID NO: 248018 - DNA, 910 bp, Homo sapiens
tcggcaaaactttcaactgctcctctccccgcacccagctcactgtgccagggccagccctcataccagaacctcctacctaactgagagcgcatctgagcaggggcagggcagagagcccagtaggccctggggagagtgaggagatactggtagttgcctctgaatatccaatctcttttttcttttttcctttcttctttctttctttaccttctttctgcccccgcccccccgcaagacagggtttcactttgttgcccaggagtttgagaccagcctggacaacatagtgagaccttgtctttacaaaaaaacaaaaacgagagagaaaataaccaggcacagttggtgttgcccctattttcccaattaactgtggaaggccgaaggtgggaggatcactttgagcctgggagatcaaggctgcaatgcgagccggtgattggcaccactggcactcccaagtctggggcacacagagcaataactggtctctcaatggatcaatcaatcactcaatcaatcaactacgtcttccactcactcactcacacgggggggggaaaagcctccttatgggcatataccgtgcaaatctctaacgtagacaaagcaaatcactccatggtcacacgcttatccaaaaataatcagggggccctaccagggtgcaattgacaacccatacacccagatctaaacggaattcatgttcggatagcagttgggagttccacataacctttggcccaaaagctgtgccattcatgtctctagtaaacacaagctcgccaatttggtttccccaatactggtccccgggaattaagggacttcaccatctcaagttccttaaaagctcgcacattggtcaccttgattaaaaccggggcccagacggcgcacc

SEQ ID NO: 248019 - DNA, 514 bp, Homo sapiens
tcggcaaaactttcaactgctcctctccccgcacccagctcactgtgccagggccagccctcataccagaacctcctacctaactgagagcgcatctgagcaggggcagggcagagagcccagtaggccctggggagagtgaggagatactggtagttgcctctgaatatccaatctcttttttcttttttcctttcttctttctttctttaccttctttctgcccccgcccccccgcaagacagggtttcactttgttgcccagggtggagtgcagtggaacaatcacagttcactgcagcctgaactcctgggctcaagcaatcctcctgtctcagcttcccaactatctgggtctacaggtgcatgccaccacacccagctaaactgtatttttttgtagagttggggttccattacattgcccaagctgccattttttcttagtaacaaactctcattttgttttccatactgtacctggaataaggactacacctcttagttccttaaa

SEQ ID NO: 248020 - DNA, 392 bp, Homo sapiens
gtaaattgctgctaaagataagtactatgatggaggcttatcaagcattcattcattcaatgataaatgtctattgattatgagacaccagtcagacctgcactggaaactaaggatgcagagatgagaaaacattctggtcctgtccttgtccatctgtccatcctgtctaggagctgcttggcactaccagcattcttctctctccttttctcagtggaaatgaattcaaccagtgttgtagttggccagcagtttaaaataggacagtgaataaaacaagcattttccccctaggaactcagacagttggggctaaaggatttcactcttatccctttgtaccagatcctgccttgaggtaacctgagacggctggcttttcaaatcct

SEQ ID NO: 248021 - DNA, 368 bp, Homo sapiens
caggtttttctacagtaaagttacagttttaacccttttccatgctgtactctttgaaaggaagtccttatgaacagcctacacttaaggaatgtagatactctacctccttggtggtggagtatctgcatacattatttggaattcttctgcattcatctggtctccatttacttacttatttaatcatttatatgagtatggactcatagacttttattttataccttgggttatagtccaatactactttatttcattgctcaaattgttgcagctttgaccattgggagcgctttcctttgactcctaggtctttttctgtttgtttgtttttgtttttgtttttctgagatggggtctcactc

SEQ ID NO: 248022 - DNA, 433 bp, Homo sapiens
gctgttatttttacacagtgaaccatgaatactgattttaattccaaaggctcacaaattaaagagcttccttgaaccctggccctcaggattctttcagtctcctggtttttctgtctgctttgtcatttctcagtggaatgactaaagccagaacctgctgggttagtgaatggaaataaagtattggtggatgtactcttcctgccctgcccgtccaagactagactgtgcggttggaatccatgtttcaatacccaaacactgcaccagctcacgactacaaaattagatgagacccaaaaaaatacaaagagtcaatattccaagaagatacttgcggttactgggtccaagatgtttgaattataggtagactctatctctgccagggactgaaatacggccagggcataaaaaatagcctgtttaa

SEQ ID NO: 248023 - DNA, 331 bp, Homo sapiens
aataggcatgccaacatactgcttgtaggagtaaaaaaatcatatacctttcttggacagccatttggcaatttctatcaaaatcttaaaagtactcatcctttgaccaggcaattccacctctgggaatctattctacagaaatattcacagaggcaaatgtagataaatgaataaatatattcccagcagtcaggtttgtattaaaaaattatacatatcataaatattccttggtaagagaatgattagctactaaagggtagctaaaagaaatgaggtagatctatttatggacatagaagtatctataaaatatattgtaaattaa

SEQ ID NO: 248024 - DNA, 465 bp, Homo sapiens
agatttttttttgtatcgtataaaatctaaatttccttggagtaaataaggtacatagaatatttaccaaaactcttttagcctatactgttgggtggcatttgtaataactcattttagcaaatgtaggtctaagcaccatggtgtagggtctgtactctttgcaaacgagctgtgtgcctttgggcaggcaccttatttgcttgcaggttttggttttcttatgagtaaatcaaaggctttaggttagataatctccaaatccccacttcttaaggtaccacaaggtgtttttggagcttgataattccccatagcctcataaaatttctgactcattccctaaatagcatatttacctgtgttttgccctttgcagcttcactctctttgaggagaaaatcaagaaaagtacttgcttctatacatccttctgttattaaaataaaactttgaaatagaatt

SEQ ID NO: 248025 - DNA, 323 bp, Homo sapiens
aatgtgatcttggcctgtaaagaaacaaaagactacttttaagacaaaacataaactgcattacaagccagggagtagggttgatgggaggactatgggacggcagtggggggaaattagagagttgggcacagctctcccagacagtgtctgaagaaaaaagactgtgtttgttcctggaacagaccaaaaagggaggatgtgaagactgatgaaataccaaagagagacttgggataaagacagttctaattgaaagggaaagaatggcaggacaaaagttcatggggaggagaaagaggagctcagtaatgagacagcag

SEQ ID NO: 248026 - DNA, 179 bp, Homo sapiens
agccttaaaagataccagaaccactcagctcagccacagttggattcctgacccacagaaacgatgagatacttggctggggtcaggtctgctctatgcatatttcatcctccatggaccagagctgatttttgtcatggtgacgacagtagcatgagaagaaagaaccccactgtgca

SEQ ID NO: 248027 - DNA, 340 bp, Homo sapiens
attttattacttacaactagtaaaaagaacactgggtatagatagctcccaaagcaatgcctccctgagctccaggctgtgtcaggttttataagcatagggtaatgaggcatgatctgactggatcttgcaatgaggtaatgccaagaggcatgatctcactggatcctgctaatgagtgatgccagagctcaatctgattgcatcgtagatccagccatgcagtgtcaacttcctaattcagtccctgctcctctgagcacttaggttcccccctgtggctacacacttggttcacctgggcctgctcaggttacatgacctgaagctccattagcaa

SEQ ID NO: 248028 - DNA, 227 bp, Homo sapiens
ctgggcaacaagagcgaaactctgtctcagggaaaaaaaaaaaaaaaaaaggagggggcgcttcatcttgactaacttcctgcattggtggagcttgatagagtggtccttcccagatccttccctgcatacagagcctgtctcttttctgattggtccctaaggccagattacctgtccctaatactgagcagaagctggtgaatgaaacaggagatccctcagtc

SEQ ID NO: 248029 - DNA, 100 bp, Homo sapiens
catctttgttgttgttttctcctgggattccctttacctcccttcttaatagtcctttctaggaatattgtgatggcaacctacttttcctcctattgat

SEQ ID NO: 248030 - DNA, 406 bp, Homo sapiens
acgttctctccaaattcacatattgaagtcctaaccccagtacctcagaatgtaactgtatttggagattcggtctttaaagatgggattacaggcatgagccaccatgcccagctacattctttttaaacattcagaaacaggtaaaactgaaaaatatataatttagacacaacacttatgtgaaaagaccaagtttaggatgttggttacctgtgacggggcagcaagattgtgggaaaggaaggaagctacaggtatgtgacagagagttgcattagcccaaatctctacagagctggtgtcaaggatgaaactattggtgttttatttggaagatacaagcccaaggcgaggtgagaaaaaagagaagggaagcaaaagaagacacaaagtgacacaaaat

SEQ ID NO: 248031 - DNA, 499 bp, Homo sapiens
tcccaggttcgagcgattctcctgcctcagctgcccgagtagctgggactacaggtgcgcaccaccacaccaagctaatttttgtatttttaatagtgacggggtttcaccatgttggccaggatggtctctgtctcttgacctcatgatccgcctgcctcagccttccaaagtgctgggattacaggcatgagccaccatgcccagctacattctttttaaacattcagaaacaggtaaaactgaaaaatatataatttagacacaacacttatgtgaaaagaccaagtttaggatgttggttacctgtgacggggcagcaagattgtgggaaaggaaggaagctacaggtatgtgacagagagttgcattagcccaaatctctacagagctggtgtcaaggatgaaactattggtgttttatttggaagatacaagcccaaggcgaggtgagaaaaaagagaagggaagcaaaagaagacacaaagtgacacaaaat

SEQ ID NO: 248032 - DNA, 457 bp, Homo sapiens
cttgcggcactaagacttgagtagtaggcatgttttagtgaccctagggtcttgtgagtgtaaattagtgcgattgactaggggaagggagcctactagggtgtagaatggggatgacaagacagggcggcggagattgtgttggcgtgaagcgagggaaacactcggccgcaggacaaaactaaaacagcaagggggcaccgaaagactcagtagtccacgtgaatatcctgattatgttgtagctgagataatgtagggtccacccctaccgggtctgtgggttttctcttcgcgtgtgtgcggagacgagagatcgaagagataaagacagaagacaaagagataggaagaaagacagctgggcccgggggaccactgccaccaaagcgcggagacagacaggtagtggccccgagtgcctggaggcgctgctatttattgtagtcaaggcaag

SEQ ID NO: 248033 - DNA, 603 bp, Homo sapiens
gcaccgattgatacgcggctgatctgactacgcggctgatctgactacgcggctcgatctgactacgcggctcgatctgactacgcggctcgatctgactacgcggctcgatctgactacgcggctcgatctcactacgcggctcgatctgacacgcggctcagcacagctccattagaactgaccacatttccagggctccctagatacctgtggctagcggctgccatactacaccgtgctgggctgtagaatggggatgacaagacagggcggcggagattgtgttggcgtgaagcgagggaaacactcggccgcaggacaaaactaaaacagcaagggggcaccgaaagactcagtagtccacgtgaatatcctgattatgttgtagctgagataatgtagggtccacccctaccgggtctgtgggttttctcttcgcgtgtgtgcggagacgagagatcgaagagataaagacagaagacaaagagataggaagaaagacagctgggcccgggggaccactgccaccaaagcgcggagacagacaggtagtggccccgagtgcctggaggcgctgctatttattgtagtcaaggcaag

SEQ ID NO: 248034 - DNA, 922 bp, Homo sapiens
gtttgttctttaacacatttgtattatctttcagttaaaagtatgtctttatgcctacatatttcaaagtaatatgagagagaacattaaactgtgttgtattgtgataaaattcttggaatcttaaacatcataatacctcaggttatttggtcactgctcttgctagcaaggctaagtagtttcagtcctttagagctttatatttaatggaaggttaaaaacaaaaacgggatgggaaggaacgtatcgcctaatacataattcttgtcattagatgatttttcctgtaaaggagctaataagaatattctcgtaatttattgtacattatgattttgatatatacttagtaaagataagtaaggtacttggcccagccaggaagaggtgatacatccttagaaagctaatggtcagtcctgacaggactgggtggtgggcaggtgttgctgctccacattgccctgaactaacagtggggtctggagtgcccagcatgggggctgtttcatgtcccctcttactgatggttttggtttgcttgtgtggaagacagttgttcggctttggtttatgttttatacaagaagagatgtgtcaattaggtaaattactggcatcttagttttcagcagttttgttttacaagaaactagcctggtaaagtataagaatgcaaaatactggctgggcgtggtggctcatgcctgtaatcccagcactttgggaggccaaggcgggcggatcacgaggtcaggagatcgagaccatcctggccaacatggtgaaaccccgtctctactaaaaatacaaaaattagctgggcgtggtggtgtacgcttgtagtcccagctactcaggaggctgaggcaggagaatcacttgaacccaggaggcagaggttgcagtgagccgagat

SEQ ID NO: 248035 - DNA, 461 bp, Homo sapiens
aatagcgttagatttatagagaagttgcaaagaatgcagagttcccgtgcactccataccaagtctcctcttattaacataggacattagtatgacacacttgtcagagttaatgaactgatattgatacctactaaagtctgtactttattccttttttttttgagatggggtcttgctctgttgcccaggctggagtgcagtggtgcaatctcggctcactgcaagctccgcctcctgggttcacgccattctcctgcctcagcctcccgagtagctgtgactacaggtgcccgccaccacgcccgtctctactaaaaatacaaaaattagccaggcgtggtggcacatgctgtaatcctagctacccaggaggctgaggcaggaaaatggcgtgaacccaagaggcggaggttgcagtgagccgagattgtgctactgcactccagcctgggtgacag

SEQ ID NO: 248036 - DNA, 428 bp, Homo sapiens
taaaacacgaaataatccccctaggatctactagaaaagtatcttatgctataagaacactgatcatttctgctacaagcaaacatagaggttgtgttctaaagtgttaatcttcctctgggggtggctagagaacagcttaccaagggggagaaatctggctcatgtcgacaaagctctcacagctcttcagaagagaagtattgtgtaagtgcaaagctattattatataaaagcattcagaggataatattagccataattgtattaaatattaatattaatgcaaatggtggctaagagcttaaagaagagcttataaactgtaacagtcaataacaatggagtaaaggtatataaaatttgtatattgtcaaccatgcacaccagacaaacccaataaactgaaaactaataagttgctaaaa

SEQ ID NO: 248037 - DNA, 435 bp, Homo sapiens
ttcactcaggccctggctgctccttcactggtctacactgctgcctcctggaaccacccactctgcaaccaggtctgatgcccggtgtggacattcagggatgaggtcccctggggctaaatgaatgaacagattctgaaaagcagaagctacgtccgggggtctctgggccacaaatcactttctgacctgcagccgtgaggcgtgaggctcactcggaagctcccggaacctggagactgccctcactcaacacttgaacaagcaaggggccaggttcaatgaaacacctgcccgcccggcacaccaggctcaaaagcaagcaagcaagcaaacaaacaaacaaaatcaaatcaggccttcacaactccccaaatcatgtgtgagtttctacagagcagaagccaaaaatatatgttatctaactaggtccta

SEQ ID NO: 248038 - DNA, 340 bp, Homo sapiens
taaatgttaagattgaccagtggattcgtgttgtctgatgcctgatctctcagttgtgaagttccccatatgttattcatgtagtagtttttgtagtagtcatttagtttttgtcattgatctattatttcattctgggtttccttttctcctttctttttgggaaatctttcaacatataagtaaattgcagttttttttttttaagtgactgcctgttaaatgtcaaatgctttaagtttggtacctgggtcagggtgcagtggctcatgcttgtaatcctagcactttgagagactgaggcgggtggatcccttgagcccaggagtacaagactagc

SEQ ID NO: 248039 - DNA, 735 bp, Homo sapiens
cagaaagtggccactggttatttcacctggccccaagacgatgcaaggcacccactctgctttttttgtgatgagatggagcatgactggccttgcacatgaccttcagtcactgcctctttgctctttggttgttgactttgtcggcagggaattcagagggaaggagagtcagcgacgtgctctcgtaaggtcatcttagaagaccactctctccaattattttaagcagctctttagagctttctacattgtgaagttctttatcctacctgtgtatccctagggctttacagagtggagattcagtaaatattttgacaagagtgagcaaatgatttaacagtcgatggagtgcaaattgccaacaacttactgtagcgtttccatccacagcattcagggtcagtggctaaaatacttgtcgtaaaggtgccaagcctccaggcatctagcagggcattagcacaccgaagcatttattagactcaggaatatactctttattggctcatttcaaacaatacctaaaaaagaaacctctttttttaaagccttcaaaagatggcaggatgtattttttcctaagacccataaaacaggtaacataaactgttactatttcataagaaaaacttaggtacagaaatactcaaacacttatccaagggagctggaatttgtgtcaaattttcttgaggaattacatggctcgtactatttagaccatgttct

SEQ ID NO: 248040 - DNA, 221 bp, Homo sapiens
  misc_feature (206)..(207): n is a, c, g, or t
ggggatgaactctgtgtcctcctcccatggcggaaaggatggaaaagcaaaagacgctcaggtgctcgcttcaccctcttttgtaagagcgctaatccattcatgagggctctgctctacccccaaagacccacttctttttttttttagacagagcttgcagtgagccgagatcgcgccactgcactccagcctgggcaacatannggggatccgtctca

SEQ ID NO: 248041 - DNA, 555 bp, Homo sapiens
tctctgggaaagcctacatatacaacaaagataagactgtattcatcatctatgctgatataatatgttttcagtcaagtaagtcttttcacatttattattgtgacttaatttctgttccatgaggtagccaggggctaaggggggagtggtagatcgttgctaatgatacaaagtacatcaagaaagaccacactttctacatacaatccagtcctcctgtaccaagtccttgaccataacactcctgatacaaatatctgcaggataaagcttaaacacatctcttgtccattcaagaccctggggcatctgtttttgccagcagctcctcacaggttccattccatcaaagctggttcagttatttaccctgtcccagaggccatgttttgcctgttgtcacttggtatgcttctcttatgcaataatattttgtatgaaggtttctcccaggcactgtgcttggaatcttacaccatatttaatcttcacagcacccctaggaggtggagactattgcccaaacagtaaacatcgcctattgcttactga

SEQ ID NO: 248042 - DNA, 912 bp, Homo sapiens
ctcccctctaccagcacaaactgtcagtggacacttctgcttcaactctctctcacactggactctgagatcctggaaagcagggactttaatatttggatctttaccctagtaagtgattgagaacaaatgaatgacaggatggaaggaagagaaaaaggagagaagagaaaggaagatggagaaagaaaagggacctacaaccatagcttatgagacattgcttaaatgatgccatgtcatgcccaaataacattgagttaagcttgaatccccttgactatagcaaagagtgaaagaactcaaagttattgtagtgtaaagaccacgttgctatgtctggggagaaaagaaaaaatattcatgtgacagagactgatttgttctgctcatggaagtaaggagatagaagatattctgggcggcagcctgacaaagcctgcccttttctgcagaaatgacattgctaccagaggagcattcatccatggtgaaaagggttaggggacctacgctggtcatcatgctgtccttgtctcggagtatcagagactggctacagctcgggataccaaaggcacaaattaggaatttcctcaaggatcacttagtaatagacactcattatgcagaagtaatcactgtaaaccagaaaaggtaaatgacttgctcaagatcacactgctggttagtaacagaaaaggattttttaccctatgcctcaatgtgccttcttcagcaataagaaaggaacctaacacgcctgctcatcaattatttgtgaaaggttattggtattttattttactcaggtattttactctaagaaacataaaaccattaaagcaacattgactgtatgactttgtgtaaggcactggattatagaaacatctttgtatgtaagcaaga

SEQ ID NO: 248043 - DNA, 520 bp, Homo sapiens
cagaatgaggaggggagtgaaaagaggactgattgagggtcttcccatggagtactcagatccttaatacccctcccctatcccatgcagaataccagcaacacagagtttaccccctttcctccagcccaccctttttgcttacaccttacctctcaaattgttgaattctgatccagggaaactaaatcacagtaaggaaaaggttttcaaatacctacatttagaggtcccctgtaaatgactggctcccaaaccagacagagcacagtgaatctattccatctagaatgcctgtctgtgccttaggaattcgattcagcttttattaattaactcattcttaaacatcaatgggtaaccaaggatcatcagtcatatcaggaaagacacaaattaaaaagactggaactaaaacaaattattaggagaaggaactctaaatcagaagacatctttaaaagaataataatccttagaaagagacagaaacatacagcattttatgaagcaggatgtc

SEQ ID NO: 248044 - DNA, 559 bp, Homo sapiens
ccctctcgaagaaggagggatgtgaggaggtcaggatagtcacctgtgctgagccatcatggagagtgagggcctgtaagggtggacacagtatgcaggagggacaaatcttcctcaccggacaggtggggatccctgcggtgcactaggggaatgcacacagggggcactatgacctggcggcccacggggcacggggacgcaccaggtagccttgggatctgcaagtccctcccggaccctggggagtgccatgacggcttccagcagcagtcactgtcctgggcgcgtcccgcgctctagcccaggtgggtcccacaacggtgtgaccaaggacgtcctatgaccaccccttgacaggtaaggaaactgaggcaggagaggcgaagcaactcgcccaaggaatgggctgtgccggtagcttctccaaggcctggtgcgccctggcctgtgcgcgtgatcccgggcggggtctcagtgcgaacaggggcttcgcgatgtggccagcgcgggcttatctccgtgccgtgacgacaaggctagaagcctgggcggccgc

SEQ ID NO: 248045 - DNA, 402 bp, Homo sapiens
cagactgaagagaggccagcccccattcctggggctccccgaggagctggctttcagcagggtttagagcagcacgaaaagtgaactgaccctggaaaaatggtaatcttctcatctgtgaggatatggaaccccaacctcttcctggacacctgatgatctgcttgtgatgggctcagagtcttgaaacacagaactatgagctcatctcatatcccaatccagcagcatggaaacctcagactgcaaggcccaagactggcacttgttctctcccaactcttttctttctctctctcctttcttttatcccttaattccttcttgcttccttccaagatttatactattaccttttaggcaaaacatcctgaacatgtaaaataaactaattaaaatcaa

SEQ ID NO: 248046 - DNA, 362 bp, Homo sapiens
gtgctggagttacagatgtgaactgctgcactcggtccacaccacatttttaacatcaacaggtaatcttctcatctgtgaggatatggaaccccaacctcttcctggacacctgatgatctgcttgtgatgggctcagagtcttgaaacacagaactatgagctcatctcatatcccaatccagcagcatggaaacctcagactgcaaggcccaagactggcacttgttctctcccaactcttttctttctctctctcctttcttttatcccttaattccttcttgcttccttccaagatttatactattaccttttaggcaaaacatcctgaacatgtaaaataaactaattaaaatcaa

SEQ ID NO: 248047 - DNA, 364 bp, Homo sapiens
tcaggaaggggaggcgggaggatctcagcccccacctcattctaccccagtgggagtggcctcttcatgtgcagttggtcccaggatcccctaacccatcatcatcctgggaggaaggcagtggctcctcccagcagagagctccaggacccgccctgccctgtgggcggcagggccctcctcctaagcccctcttcctgcccataaatgtatttacacttgtattaccccaggtacgtggctgtgacaatggcatccccagcctgcatggaggacaggaattgaactttagtctccaggcaatgaaggtgcagggactacactttattaatggttgttatgtaataaaaaacgataaaatggc

SEQ ID NO: 248048 - DNA, 468 bp, Homo sapiens
gcttgcaaagctcaaggaaacatttacaaatgtttaccggtttattatgaagctgtgaccaagaatgtggatgaacagcagatgaagaggtggatggggtttagctgcagccccgcccaccctggaggctgggggtgggattatcctaatcccagggttggtccatctggtaaccagcccctttcctcctagagtcacctcagtaatataaacgctggtgtagttgaaaggggcttattatgaataacagaattccctattactcaggaaattctgagggttttgggagctgtatgtcaggaacctaggaccaagactaaacatacactttttgccacaccacagtatcacatgaggccataagggtggccctggttctatatgactggtgtccttatgagaacagatgaggacacaggcacatgcaggggagacatctgcaagctgaggagaggccaaagaagaagc

SEQ ID NO: 248049 - DNA, 420 bp, Homo sapiens
ggccagtccgggggaagcccacaggatgctggggcacttcctggattacagaggaatcctcgccttttcagtctcttattttctcagccatagacctactctaggattgacacagccttctataaaaagtgttcctgggccgggtacagtgactcatgcctataatcccagcactttgggaggccaagatgggcggatcacgaggtcaggagatcgagaccatcctggctaacacagtgaaaccccatctctactaaaaaatacaaaaaaattagccgggtgtggtggcgggcacgtgtagtcccagctacttgggaggctgaggcaggagaatggcgggagccttggaggcagagcttgcagtgagctgagatctgccactgcactccagcctgagcgacaaagcaagactccatctca

SEQ ID NO: 248050 - DNA, 521 bp, Homo sapiens
ccattctggcattggttcagaagcactcatttccatcaagccatcttctgctaattcctgtgatgtagtatctattaggtatttaatttctccaaggttcatatcttgaaacccttcaccctctaccttttttgccgtatctacaatctgtttcatgatttcctttactgaccctgttgtaaatcctgtgaagtcatgtgtacaacatctggacacaattttctccaacaggaatctattgttttggggcttgatggcattcatgacttttttctataataatggcatcttctatggtgtaattttccagactttcatgatgttctgtctatgggcctctctttcatagcgttgacaatgttttccacagagtgttgtgtttacatgagccttaatggtccttcggatcccctgatttagagattttgcatttaagggggtagatcactttgatacttttggtgttgaacttatggggttctcagtgggcagaggcattgtccaacattgtccaacattta

SEQ ID NO: 248051 - DNA, 649 bp, Homo sapiens
gcaggcagctgtccccagcggccagtgtcccccatgccggatctctaggatctggaaggccgctgctgccaggaacaagaagtcagagagggccaggctgagcaggagcagcgccagacgcgtgccagctccatgccgggcctgggagccggccagccacgccatcaacccattggctggcagcccaaggagcagcagggccaccaggaagaccgtgtcccagccaccttggggtcccaccgacatcgtcctgactccctgcacgacgctgctcagaggacatacgggcccctgctcaatcgagtcttcgggaagcccaatatgagcaggggatgaaggaggaaggatgacagagccgtggctggccctggggacatcctggactctccccctgcaggaccgcgaactgggccccgaggagctagacgagcttcaggccgccttcgaggagtttgacactgaccgtgacggctacatcagccaccgggagctgggtgactgcatgcggaccctgggctacatgcccaccgagatggagctcctggaggtctcgcagcacatcaagatgcgcatgggcggccgtgtggactttgaggagtttgtagaactgataggcccaaagctgagggaggagacggcgcacatgctg

SEQ ID NO: 248052 - DNA, 1103 bp, Homo sapiens
gcaggcagctgtccccagcggccagtgtcccccatgccggatctctaggatctggaaggccgctgctgccaggaacaagaagtcagagagggccaggctgagcaggagcagcgccagacgcgtgccagctccatgccgggcctgggagccggccagccacgccatcaacccattggctggcagcccaaggagcagcagggccaccaggaagaccgtgtcccagccaccttgggggtaggagtcctcatcatcaagctctgtgcggggcctgtggccagtggcacccaggtcagcttccatggtagtgtccatttggggtccccagagtcctgctggacacggagtgggtgcctggtgaatcaatgatggtgtgaatgaccgagtatgggagagacggtgctgtgcatctccagagcaggcaagggggcagcagggcccaaatctggccattggccgtcagaagccccctgcgggggttgtgactcccaagagtgatgcagaggagcccccgttgaccaggaagaggagcaagaaggagagggggctccgagggtctcgaaagcgcactggcagctctggggagcagacaggccccgaggccccggggagcagcaataaccctcccagcactggagaggggccggcgggcgcaccccctgcatcccctgggccggcctcttctcgccagtcccaccgacatcgtcctgactccctgcacgacgctgctcagaggacatacgggcccctgctcaatcgagtcttcgggaagcccaatatgagcaggggatgaaggaggaaggatgacagagccgtggctggccctggggacatcctggactctccccctgcaggaccgcgaactgggccccgaggagctagacgagcttcaggccgccttcgaggagtttgacactgaccgtgacggctacatcagccaccgggagctgggtgactgcatgcggaccctgggctacatgcccaccgagatggagctcctggaggtctcgcagcacatcaagatgcgcatgggcggccgtgtggactttgaggagtttgtagaactgataggcccaaagctgagggaggagacggcgcacatgctg

SEQ ID NO: 248053 - DNA, 678 bp, Homo sapiens
gcaggcagctgtccccagcggccagtgtcccccatgccggatctctaggatctggaaggccgctgctgccaggaacaagaagtcagagagggccaggctgagcaggagcagcgccagacgcgtgccagctccatgccgggcctgggagccggccagccacgccatcaacccattggctggcagcccaaggagcagcagggccaccaggaagaccgtgtcccagccaccttgggggtaggagtcctcatcatcaagctctgtgcggggcctgtggccagtggcacccaggtcagcttccatggtagtgtccatttggggtccccagagtcctgctggacacggagtgggtgcctggtgaatcaatgatggtgtgaatgaccgagtatgggagagacggtgctgtgcatctccaggcaagtcaccatccctccctgcgccattgtcatcaccttttgagtaattatcctatgccaaggacttgaagtggatgacctcatggagtcctcatacaatctactttacaggcgaggacaggaaggttcagagaatcagtgaaggtaggaagggagctactcaggagaatcgcttgaacccgggaggcagaggttgtggtgagccaagatcgtgccatcgcactccagcctgagtaacaagagcaaaactctgtctcaaaaaaaa

SEQ ID NO: 248054 - DNA, 390 bp, Homo sapiens
ggcagagatcacgccagtgcactccagcctgggcaacagagcgagagcctgtctccaaaaaaaaaaaaggtgacattaggaaaagaataaaaaattctgttggaaaccaaaaaccaatttaaaaaaaagttctgggcttcctaatacaagcttaatttgaacacgagaggagaatttatagaaaaaccagtagtgaagaccaagaatctgatccattaataaaagccagcatctgatgttgaaagtcccatggctaaggtattgcacttggttgctagagggccttgggatggaggcactgcctcagcacatgacagtataactgtgcagagtcagttattctctcactgctatggtttactggtctataaatagcatatgatgtcactt

SEQ ID NO: 248055 - DNA, 392 bp, Homo sapiens
actgaccccttcaaactcatttactggtagaaagatatttactgaacccacatagtaggacttcgtggagttgtgtacagcttatggaggggtacatctgaaacgttcctgtaaatgcatgaaaagcaaaatcaaatgctcccaaacaggagagtaagcttgcagggcaaatgtctcagctgagatttgagaaggatcccctcacccacagctatgatgtgatactggggaatggatattggtgggatgtatctgttgtatgcaccaggatgccatttgaactgtatcaacattactacttttgaaaaaaaagttaatgaaatggttaaaaaaatcaaactgttttattctggctttatgttgggactgcttatagagggctttaggttcct

SEQ ID NO: 248056 - DNA, 263 bp, Homo sapiens
gtgtagattttttaaaaagctgtattggttgtcatatgggctgcaatgtgatggtcgccaaatcaatttcactctgtattttatattgacctccagttttatttcaaaatgctttttgctgtttggtaaggaggattttccaaaatcaaactttctcattatttaatggaaacagctttaatatgatcatatctttacaacttgtattagtccgttttcacactgctgataaagacatacctgagactgggcaatttaaaatc

SEQ ID NO: 248057 - DNA, 409 bp, Homo sapiens
ttttttttttctttttaatctctatgtacccacatatggttacactgtgggatttaagttttatgggtgaatgtgggttttaaattgtggtagcattaaggcattcaacaattaaccacactctttaatataggaaataccccttccggttcccacatacacacaaaataacccattttagtcacgctctgacagccatataaataaacaagcagcgaaacgtcagcagaaaacagtttcataggggccaattgtccaagtatggctcaccatgtaattttcatttaacataatatgacaaaatggtacacacagaaaggaggttccccaacggactttttacattctgttctttgcatttttcctgatgtgcgttaagactatcattgttaaaatttgggtgtttatt

SEQ ID NO: 248058 - DNA, 441 bp, Homo sapiens
gccatcccagagaaatagccattggaccctctctttaggtgtagtcctggcttttaataagagagtttgggctactgaaacgcaagtaattcatcagtcccttcaaagtatagataagagccagtcataaacttaatttcatacctagcattggtagttacattgaaactgcagtaatacaatcaaattgcattagccagctttatatttaagacctactgctttaattactttaaacaacacagtcttgtgtggaagcaaagaaagtcttgctataaagtggcattagcttaggaaaccccagattctttgaaggagaccgttctaagaactcctaccagaaccaaagtcaagcagccaaaaggaaaaaaaaagataaagcccggacttcaatccttgttagatggactaacccactgagcagaaaaatccccagtacag

SEQ ID NO: 248059 - DNA, 219 bp, Homo sapiens
caagccacgtgtagaagaatgaaactggatccacatctctcaccttatacaaaaatcaactcaagagggatcaaagacttaagtctaagaccttataccataaagttgtagaagataacatcagaaaaacacttctagacgttggtttgggcagagttcatgaccaaggacccaaaatcacatgaaataaataaataaataaataaataaataaataaa

SEQ ID NO: 248060 - DNA, 226 bp, Homo sapiens
ggttgaggaatgtagtcttttacctagatagcaatttgtccagttaaaataatatttattgaagtagaaaactgactatgtcagcaactgtgatggtttcttgatgtgtgaactccagcaggttgaactatagtcccaaggcattcaaacaaacactgatgtagataatgccgtgaagtgattttgcattatctgattatgacccctactcagttgactttaagct

SEQ ID NO: 248061 - DNA, 171 bp, Homo sapiens
aggtgggaggcgacactgagtctccagtcccgagaggtgcccgagggaaaaggaggcggcagctaaactggtcctggagagaagccccttccgcccctctcctcagccagcatgtcccggactccgccgctcctcagtccgcgcggtggggaccccgggccgtggcggccg

SEQ ID NO: 248062 - DNA, 482 bp, Homo sapiens
aaccaaggtactaccctcacagttcttccacattgctagggagtacactttctgatcatatcttttcaagacatgtcctcacttcttcagcaccaggggagggtaaatgggcagagcatatactaatgttctattttcttccagaagaaatgaaagaaacccacatccagaaattcctctgtaaagatcctacattggctgggtatggtggctcacgcctgtaatcccagcactttgggaggctgaggtgggcggattacttgaggtcaggagatcgagaccagcctggccaacatggcaaaaccccgtctctactaaaaatacaaaaattagcctggtgtggtggcacacacccgtaatcccagctacacaggaggctgaggcaggagactcacttgaacctgggaggcaaaggttgtagtgagccaagatcgtgccactgcactccagcctgggcaacagagcaagactccatctcaaaa

SEQ ID NO: 248063 - DNA, 246 bp, Homo sapiens
tacaactgagaatgaaaaagaataggcagctattaataattgcgttttctcaaccaacatcgaccctttgagcaggggtgggtaaagatgaacctctggcttcctcgggagttacaccttctgtagtgtctatcatggatctgcaccacgctaggtggttcatgctgataatgccttaggttgctatcagtacaattaagtagtaatagttatccctattactgatgcagaaaccaagactaaagt

SEQ ID NO: 248064 - DNA, 382 bp, Homo sapiens
atggcgtgaatccgggaggcagagcttgcggtgagctgagattgtgccactggactccagcctgggagacagagactctgtctcaaaaaaaaaaaacaaaaaacaaaaaacaactgagaaactgaatactgtcttaaatatagaccaatactaaggtcgatctcagaaatacaaaggtgtcttaacattagaaaaatccataataatcctctaaattaacaaaggacacaaatatataatcatctcaaagcagacgggagtttgagaccagcctgggcaacagagcaagatcccatctctacaaaaaaattgaaaaattagctgaacgtagtggcacatgcctgtggtcctagctgctcaggaggctgagacaggaggattc

SEQ ID NO: 248065 - DNA, 201 bp, Homo sapiens
gtgaccgcgtgtccacaaccctgggattccctcgccctcagattccagaatccaatttcttggatttcagtgtttttaaggtgggaggtctcgctatgcttcccaggctggactcaaattcctgggctcaagtgattcccccgcctcagcctcctgagtagctgggactacaggtaagtgccactgcacccaccttgtctt

SEQ ID NO: 248066 - DNA, 1460 bp, Homo sapiens
  misc_feature (59)..(59): n is a, c, g, or t
gccgctaccagccgcgccggagcccctgcgccctgcagcccgctccccggggaccgggnccggcgccatggaccgaggccaggtgctggagcagctgctcccagagctcaccgggctgctcagcctcctggaccacgagtacctcagcgataccaccctggaaaagaagatggccgtggcctccatcctgcagagcctgcagccccttccagcaaaggaggtctcctacctgtatgtgaacacagcagacctccactcggggcccagcttcgtggaatccctctttgaagaatttgactgtgacctgagtgaccttcgggacatgccagaggatgatggggagcccagcaaaggagccagccctgagctagccaagagcccacgcctgagaaacgcggccgacctgcctccaccgctccccaacaagcctccccctgaggactactatgaagaggcccttcctctgggacccggcaagtcgcctgagtacatcagctcccacactgatggaccttgggctgattgcaccttttggctatggtgcttggatcagatggctgcagcccctcacactcgattgtggatggctactatgaggacgcagacagcagctaccctgcaaccagggtgaacggcgagcttaagagctcctataatgactctgacgcaatgagcagctcctatgagtcctacgatgaagaggaggaggaagggaagagcccgcagccccgacaccagtggccctcagaggaggcctccatgcacctggtgagggaatgcaggatatgtgccttcctgctgcggaaaaagcgtttcgggcagtgggccaagcagctgacggtcatcagggaggaccagctcctgtgttacaaaagctccaaggatcggcagccacatctgaggttggcactggatacctgcagcatcatctacgtgcccaaggacagccggcacaagaggcacgagctgcgtttcacccagggggctaccgaggtcttggtgctggcactgcagagccgagagcaggccgaggagtggctgaaggtcatccgagaagtgagcaagccagttgggggagctgagggagtggaggtccccagatccccagtcctcctgtgcaagttggacctggacaagaggctgtcccaagagaagcagacctcagattctgacagcgtgggtgtgggtgacaactgttctacccttggccgccgggagacctgtgatcacggcaaagggaagaagagcagcctggcagaactgaagggctcaatgagcagggctgcgggccgcaagatcacccgtatcattggcttctccaagaagaagacactggccgatgacctgcagacgtcctccaccgaggaggaggttccctgctgtggctacctgaacgtgtgggtaacccggcgggaggacgctgtgccgcctgattgccaccactgtttaacactctgtat

SEQ ID NO: 248067 - DNA, 267 bp, Homo sapiens
attcacactgcctcctgccttctgcgagctcctgcctccctctccctcagcctctctctccctaccctgctccgctcccctagccctcttttttgtccccttgcaggcggccgacctgcctccaccgctccccaacaagcctccccctgaggactactatgaagaggcccttcctctgggacccggcaagtcgcctgagtacatcagctcccacagtaagttctggtcctcttggtggggctggggacttcctgtccctgagaagcc

SEQ ID NO: 248068 - DNA, 556 bp, Homo sapiens
aacttcacatttagttattagaggaagaaaagtcatttagggtagggtgtaagttgatgtttttattataaatcatgggaaacaaagaaataacccattcaccgctctcatcacttgggcacaccacccgctcagcattttgatgttaaaatacattttaaaggttcttttccttctttcacagaggaaataatagaggaaatggcttaaactgaggccagaagcattatggtggatgtgagtaaatctctgcattattaagagagattaaaaattgggatgggtaccttattgaggtcctgaaatctatacttgaaaaccttaaagcatcagagagctgccattttccgtgatttcggtaaaaagcagctcaggttatccttcctttgaggccattctagggggtcccacaaatctttttaagcaaaataaaaatattaataattattaaagttgttttcacattgttgaggtatattgcattaagaatggaatttgtttttccatcataaaagtagcacatactaattctaggttttgaaaatacaaatataaa

SEQ ID NO: 248069 - DNA, 288 bp, Homo sapiens
atctcacttgtagagttgaatgaaaaagcagatattcattatggtcggatatctctttggcctctcagttatattttggtgaaatttcagatgaaatcccatctttgatcattatctgtcctctcattatctgttctgtccatttctcagaacctgaagcatggagatgctgaataatttgctctttctgagatgcagggagtgattttagtgttcttataaaatggactgcgattaaatgaaacagactaaaagacctcaccactctttcttttattttcccacaga

SEQ ID NO: 248070 - DNA, 610 bp, Homo sapiens
aaagaaatcacactttgtgataacaatgtcatggggagaggttgtctggctctggtctgaggtaggaggaaggcacaattcctggtgctcagagatctgctctttgggctggaaccctgatgggcctcctttagtaggaaatggagatggagagaaagcgctgcatctttctccttagagaactctggggttgtgctggcctcagagacagtggagggggtgagggtcctctgagggcgggagcggccatatgcaggaggctgcgctgaggatgcagggtggctggtggccctgctggggggcggcctggccctctggagacagagcttcccatgccagtggctgtttgtgctgtgtggagtgtgattttcacactgaccccccaccacccccaatgtaggcagagtgtggtcccctgcctggtggtcatgttactttggaggataaagagtaggaaccctggtccatgcagggtgatgggcagtgagagatgggagcagggctggggacagccgatgcagcctcagagctgcagaggcagctgccgggctgttaaagtcacccggagggatgcaccccgccgtgcatgcggtggacggctcctgcaatt

SEQ ID NO: 248071 - DNA, 475 bp, Homo sapiens
tcactatacatttttatgaatctctacaaaccttccatcaaattaatagagatcaactagagatcaatagagaacaaaaacaaaaagacagaaacaaacaaaaataaacagcaacaacaaaatccagtgcatccattggcatcaagaccattggctgtgtaacaatagttgtacagagaagtgtggagaatcctatcggcagaggagtgcggaaattattgagcgttcttaccagccaaaacagtgcttcttaatgaatgagaacttaggtggtaaaccaggaaactctgagaaacccttataccttccagtgtctgatgagtcctgtcagacttcacttaaacacttagcggcccatgaggaaatttaaacagttttgaaacaacctatgcttgctagagcctcaaaaatattcaacatatagtcccttttagaagggattttaaaagtctcttttagaattttgacctggaaa

SEQ ID NO: 248072 - DNA, 442 bp, Homo sapiens
tgttcttttgtttctgaggcagggtctcgctctgttgcccaggctggagtacagtgttgtgaccacagctcactacagcctcaacctcccaggcacaagagatcctcccacctcagcttcctgagtagctggaactacagggctactttctcatgttttgatggaagtcaagaagataccagtggaagaggggctgtgcactacaatcccttgtgcatttgaatttcccaaagaacccccaagcaattccatgatcatgcactactggctcaacaaaaacatcagctccctggtagctacaaataaacccaatgctaccattggtgataacaccaaggacaaattttacatgactgggaatcttgatgaagaagactgtaccctactcatccacgatatactcaaagggaacagcataatatatttattctacgcagatcta

SEQ ID NO: 248073 - DNA, 179 bp, Homo sapiens
gttgaagtccagggcgtcgcacacgaggacgccgtccagggcatcgctaacgaggacgccgcccacggcatcactaacgaggtcgccgcccacggcatcgcgaacgaggacgccgcccagggcatcgcgaacgaggacgccgcccagggcatcgcacacgaggacgccgtccagggcat

SEQ ID NO: 248074 - DNA, 364 bp, Homo sapiens
atttcactcttctaggtttgaggcgtgatctctcaacctgatagtaaacctgatattaaaattcagagatattcctattgatctgtattaactcctgtggtagaggctaggaatacagccctgaataaaacagccaacctcccctttttttgcaggaagaaggcagacattaacagaacagggagctcgtggattcagcactcctggagacaagacagccagattttccttaaaaagtgacccaagggctgaaaaccaaaggagaagtaggatttttctcaacaacaacatcttgaggtcataataataagtaaaaaacaatgcactgaatgtgattaaagcttatatttttccatagtaatta

SEQ ID NO: 248075 - DNA, 413 bp, Homo sapiens
tctacctagaatcccctgggggagtgggcagaatttcccccacctctctggccaagtacctgtttatatttcctcagtctacagttctctggaacactgttggagaaacactgctctccaaacagagggctatttcgtaatctttatgggacgacactgctttttgatgatgtaattgtggcaaagtagagttcttttaaaaagctgtaaagtgtttcagaagctagagttatgaagtagtagagactttgtagtctttggtatttagttaaacttgactttatagcagtgggttctttagttctttttttagtttctaatacctttgagaatctgatggaacctacagccccccgctctggaaaaatgctcctgtctgtgagagcttgcatatggtttcaggagattcactc

SEQ ID NO: 248076 - DNA, 403 bp, Homo sapiens
aagaaaggtaatggaattactgataatgagaaattagacattttcctagttgtagttctccctaagctttgtattaatttttcctcccatgtaaaaagacaaggaatgttttgtggactgttacatagaaaattttaagtttaatggttttgattttatggccttaaaagaaaatttacatctttaattttgctttcaaaaacaaattccagaaactgtcagcttatagtatttgtgtgtatgtgttttaattgatttgaagtttgatcaacggagattttggaacttgggagttttttttgttttgttttgtttttttgagacagagtctcgctctgtcgcctaggctggagtgcagtgatgggatgtcggctcactgcaacctccagctcccgggttcaag

SEQ ID NO: 248077 - DNA, 745 bp, Homo sapiens
acacctatttgtatatttctttatttttgcaagaagggtgatcttcccagtagtccccccaaaaaatgaaattaatccaataaggatgatggaggagactaaaaaccaaaagaaaccaattctaacttatttcaaatcagtaacaaccacattgaaataaataatccaaggaacttttatactcagtagtcagtctagagaaaagtgactgcaaagaaatactaaactccaacagtttttttgtagtgatatgctgtaatgcttctgtaactatttaaatgtctaaaagggttgagcaaatgagtagataggttttgttaagagccagcattctgttgaaaaagacacaaatgtgaagtgtgggaaagtgagaaaaaaaccctgtggggatggcttggagttggggatttaagtgtgaactcataattttctaaaatacatgtgtgtatatatatgtcacatacatgtgtgtatactttgtccagtggaaaggcccagaagcaaagagatacccaaatagcaataagtacattgaatacctagatctttatttcttatatcattccccactaaaagataccaaggctgttaggagaaatgtttggttccagggctgggacagagaaatggttataagataagcctggagtatcttattatgcaagaaagtaaggaaatgctcagaaaatgatagaggcatgtcagaatgacacaggagtaggctttaaggggctcccactggcct

SEQ ID NO: 248078 - DNA, 373 bp, Homo sapiens
cctgatcctgggaacctgtcaatatgtgaccttatgtggtaaaagggactttgcagatgtgatcaaatttaaggaccttgaaatggggagagtaccctggactatccaggtgggtccaatctcatcacaagttcttaaaattggggaactgtttcttggctgcggaaaaccagagagatggcagcatgagaagaactttgccccttactgctgactttgaagatggaggaagggctcctgacccacaggatgtgggcagcttctaacagctggaaaaggcaagcatggattttcccccagagcttccagaaaggaacgcagcccttcttggcaccaataagttgtgttctttttctactttatactggctgca

SEQ ID NO: 248079 - DNA, 354 bp, Homo sapiens
cttcctcctttctccgctgtcagatatgtccactgatccgcatcttcatccactccctggatgtgaatgtcattcagcaggtcgtcgataatcctcagcacaaaacccagctgcaaaccctcatctgaagaggacgaatgaggaggacccctgtggtgcatgctgattggttcccagtggcttgccccacccccttatagcatctccctccaggaagctgctgccaccacctaaccagggtgaaagcctgagtccccccagaaggaccttcccagataccccttttcctcacagtcagaacagcagcctctacacatgttgtcctgcccctggcaataaaggcccatttttgca

SEQ ID NO: 248080 - DNA, 1532 bp, Homo sapiens
  misc_feature (369)..(369): n is a, c, g, or t
ggagatcagaaccttctggaatcttaatatgcgaggactcggtggagaaggcggcactgaagaagagtcgtccctaggccaggctggagggaaactcaagacggcggcctggccctcctgggtggcggaagtgggagcagcaggagccctggcggatccgggaggccagaagagcggaagcttcctcccctctcagcagctacagtgcattccaggccctggtctctatgcgggagaagccagcaaagaccctgtcctcaggaagcttccatttcagtgcgggaggacccacaatccatgaggccccgggcctgcgggtgtcaagtcctgcgaaggaaaataaggcagggaaacaggctggagactgcnggtgctgcgtgatgttgtttaggacagccacaaggactttcgggggtcgtggcagctgctccacttccaacttccagatccctctcactttcctcttcccaccaactccaacctgggaccaagcaggggaaagcagctgcagcccagcttgacgcccctgcaaatggagacctgtgcacctggttgtgagcattttaaagggtgtcacacagggcatacccttcggtgcctggattcctttgatgaaagggcaaagccttgaacctaagtcatcttcgagtcctcagcacttcacccagagcctggcacacagtaggagcacagaaaggtttacatccagcaggagttggccctgagctctgagtccagatcattgctcttggctgaagcagcctgtctactcacaaagatgagcatggtccctgccacgaggaaactcgtggtcctgtggactgcggtgtggagggaaagcttgggattctgagcctgataatgcaccattacatccccactcactcgggctgtgtgaacccagcaagtcacaggatcactgggtggtgaaagaaagaaacactcacagaagcgtctgtgcttggagagccatctggtccatcattgtgactgctgctctcattgctatcatgggtgtcaccattgccatcactcaaggacttctctccaggccccgaagccaagctggtgcctggttcctctgggttgggagaggggctgggcatggacaggaggagggaaaagggacctgtgctagcaggtgatgccatccaagacatctgcatcctaatccctggaacctgggattccactaggtgccatggcaaagagggattaaggtggcaggtggagtgaaggttgctaatcagccgaccttaaagtagggagatgatcctgaatgagacaaaagagagaaccagtcatggtgtcatgagaaggactcaaaatgcaactgctgactttgaagattaaggggctacaaaccaaggaacgtggtagtctctggaaaagacaaggaatagacgctgccttggggccaccagaaggaaccagccctgtcaacaccctaattttagcccagtgaggcctgtgctggacttctgacctccagaactgtaaactaataaatgtgtgttgtttctgccactaat

SEQ ID NO: 248081 - DNA, 1033 bp, Homo sapiens
  misc_feature (369)..(369): n is a, c, g, or t
ggagatcagaaccttctggaatcttaatatgcgaggactcggtggagaaggcggcactgaagaagagtcgtccctaggccaggctggagggaaactcaagacggcggcctggccctcctgggtggcggaagtgggagcagcaggagccctggcggatccgggaggccagaagagcggaagcttcctcccctctcagcagctacagtgcattccaggccctggtctctatgcgggagaagccagcaaagaccctgtcctcaggaagcttccatttcagtgcgggaggacccacaatccatgaggccccgggcctgcgggtgtcaagtcctgcgaaggaaaataaggcagggaaacaggctggagactgcnggtgctgcgtgatgttgtttaggacagccacaaggactttcgggggtcgtggcagctgctccacttccaacttccagatccctctcactttcctcttcccaccaactccaacctgggaccaagcaggggaaagcagctgcagcccagcttgacgcccctgcaaatggagacctgtgcacctggttgtgagcattttaaagggtgtcacacagggcatacccttcggtgcctggattcctttgatgaaagggcaaagccttgaacctaagtcatcttcgagtcctcagcacttcacccagagcctggcacacagtaggagcacagaaaggtgccatggcaaagagggattaaggtggcaggtggagtgaaggttgctaatcagccgaccttaaagtagggagatgatcctgaatgagacaaaagagagaaccagtcatggtgtcatgagaaggactcaaaatgcaactgctgactttgaagattaaggggctacaaaccaaggaacgtggtagtctctggaaaagacaaggaatagacgctgccttggggccaccagaaggaaccagccctgtcaacaccctaattttagcccagtgaggcctgtgctggacttctgacctccagaactgtaaactaataaatgtgtgttgtttctgccactaat

SEQ ID NO: 248082 - DNA, 430 bp, Homo sapiens
gcctttcatgcaaagaaaaccaaacacataagccacccttggcgtttctctttccttagtctgccactttcattagtacacgtgattagaaagagcaagcgtgctcgttcgcctcccggaggctgattcctcactctggtgggcttcagttcctggatggtgtgaggggtcttccatgcagaagtcttcagacactcctgaagtgtgtgattcttagtttgtttttttttgttttgttttgttttgttttgttttttttaaagaattcctggtggcaatatagacaggtacggagaccaggtagaaaaagtgggggaaatgaacaattaattacacatggattggtgatttgggattctattctttctgtcaacgaaccataaaatttaatgctaccccttaggatgctttagtgatttgtcggttgagg

SEQ ID NO: 248083 - DNA, 708 bp, Homo sapiens
attccattcaacagtgcaaaatttccagttctccccaaatttagctatataaattcagtgcaattccgataagcaaaatattccaacaggatgttcaatggaatttggcaggataagagaattttgaaaaatgagaacaaagagaggaaacatcccctaccagctatcatatatcctacagagctacaatgatttccaaagtctagaaatgacacgtgaacagactaagcatgtccaaagcagacacacacacacacacacacacacacacacacacacacacactaaagaaaaaggcagcaatttagggaatgaggtaagatcagtatgggacaactggctctcccgtattgaaaaaataaagctattctagaacttgatctttaaaatgtaaaagtggtacaaggacacagagaagcctctgttcttggctctggggtatggaatatgcacaccacgaagcatggaaggcgaaggcggcttggtgggtgcagtggccagcagccgaccaatgcattactcaagaggcccgataccacgccgcactgtgtgtgaaggaatcagtgtgcagccacaagccaacattccagaggaggggctgccaagacgggagctggcctccgcagcacagcctccggggtgtatttgcattctgcgcacggggcaagagactgggaatctggagtcttcccagacagagagccgttg

SEQ ID NO: 248084 - DNA, 131 bp, Homo sapiens
gtgaaacagcaaatctgtgaattaataaattataatatttacagattatggcaacagtggattttttatgttgaagcctgagtcagccagtgccttgggaagaattgtggactatttttccatttgaaaaa

SEQ ID NO: 248085 - DNA, 448 bp, Homo sapiens
cagcgaatgtaaactaagttcacacatatgaaactatccatatgtaagagtgtataataaacaagtaggcttaaatgtttataagagaatatgaaatacagctcaaatgcttatgttttcaaagacagtaaaataagtgttttctggagaaatataaatttcaaaattgactccatataaatctgagtagacgagaaaagaaatttagaaaaatcacccaaaatggcttttgaccagttttataggtcagttgttttgaggcacaaataaatcatatactgtaagaacttttcttgagcaagaaaaagtttggcaatgatgtctaaggacacaaaaaaagcagaagttctgaaaaaaatgataaattgaatatcagagtaaaacttatttttttcaaaagacatttattaagaaaataaagacaaattaggatttcaacataaatttg

SEQ ID NO: 248086 - DNA, 261 bp, Homo sapiens
gatgggccatacacaaggatcaagatatattaaagatagttcctattattttttatttttatttttagagacaggtcccgccctatttcccaggatagagggcagtggcacagtcatagctcattgcaaccttgaacttgcgggctcaagtgattctcctgcctcagcctcccaagtagctaggactgtaggcatatgccgccatgcctagctaatttttaatttgaattaaatttttaatttaaattgaactcctgggct

SEQ ID NO: 248087 - DNA, 834 bp, Homo sapiens
ttgctgtaaggcatagacgttaacaagcaaatacttgaaaatgagcctgtcatgagtttggtttagctgtggtgtacactaacattagcctctccatcggtggttctatttggggctgtgggttctgatagcagtttttctaggaccctaaaagcaggtcagcaggatgagaactctccgactccccaagactgcagagtgatgttagcacatttccccagagggcagagccaaggctcccatgtggatagggcccaggagtgtgcagtagaggcaggtctgcagagttcactctgagcctttcctgtgtgtgtgtgtgtgtgtgtgtagctataactttatcctccaaatacaaatacaactccaattgaacatgaatgctggcctctcatcagatgtcaggatgatgtggaatattgatccaatgaccatagtaggtccaatgtgtattactttgataacattggtcctttatggttctttgggttctcttatctagattataagcaacttaagtgtataaagcacagctgctctgtgtagttgtggttctgccagcagaattggaagctgtgtccaggcagaagccacagcatctctcgcctttctatccccacatgccacagcctgaagcagggctgggcacacagttccctcagtgcttttgcttgactgatgggatggactggcagacccacccggcttgcgaccatttatttatggtcagtatccaaggggggtctgacagtgctgctcaggcccaagcagatcagtgtggcttcttagaactttatagttcttggactaacctttctaagctgtacttgtaggaaa

SEQ ID NO: 248088 - DNA, 423 bp, Homo sapiens
ggtatgatctaaatagagacctgtataacgttctcttccaaccctttaattctttcactttcaatcaaaagagctagaagacaattccaagtataatttccacattggatattagggtgaactataagaaattgccattttgtaggtcaaaacagtcacatataggaaatttcatataattcaacctaatacaataattattacagtagttcatcttcactaaagcaaaaggccttaatatatttagtttttaggtaaaaatattggtatacatataaatgcctgtgcacataagtattggtaaagaacagggttgggactaaagatgtgtcttggataaaccacttatcggcatctagctcatccttctattgtactggacactggtgcctcctgtctgacttgaaggtttttcagactatg

SEQ ID NO: 248089 - DNA, 644 bp, Homo sapiens
tcacttcactactcatattattgagggcttgacttctgctaacaggttctcttaaaagactatctggagacagctttttaagagccttccctttccggatccctttgggatagaaaccgcagagtatttaatagtctgtgataacccttactttccatcctctgttttctgggcaactcttcgcacccacaaggtaatgactgcaaatgaattccaggcgggagcagaaatcctcctgcgctgtgcgtcgtctgccccgctcgggcctgcatatgggctccgcacactgctcgctctttgtgccacttcagggtcctgtccccttgagtctcaatcaagatacggctcattccacccttgggcaggagggcaatgctgatgaggctgtttatagcttcggtgcctgcgcactccatgttatttagttgttgttcctccgctgtttccaaacaagcagtctgtccaaaaaaaaaaaaaggatcaaatggaaaactttataaatactccaaatggcggaaacaggaagtggaataaaaatgatgtggctcttcacagaaaacatgctgtcatttttttttttctctgtaaatatacaccattcattttcagaaagaggctgtgcctaaagaagaattaaaaaaaaa

SEQ ID NO: 248090 - DNA, 415 bp, Homo sapiens
cggcctagatttacattttacatttatatatgagattcatttttagttaattgttgcatatgaaggaaggtatagatcaaagttggggtttttttgtatacagatatgtaaatgttccagcaccattgttgcaaaactatcctttctctactgaattgccttggcactgtcaaaaatttgttgtccatatatgtgaaagtctattactggactgtcttctggacctaatgtctgtgtcattatctctttgtgtatcttcgtgccaatatcaaactgtcttgattattgaagccttgcactttgaaatcaggtcgtcttagccctccaactttgttcttctttttcaaaatgaatttgcctattttaggtgcttttcattcctgtgaactttagagttagcttgtcatttcctaca

SEQ ID NO: 248091 - DNA, 450 bp, Homo sapiens
ggtctatgtgtctatccctctaccaataacacacagtcttgattactgtagctataatatcttaaaatcaggtagactgatccttcccactttctttttttcaacattgttttaactattctagtttttctttacacataaactttagaataagcttgtttgtacacaaatacatcttgttgagattttggtagaaattgcattaagcctgtcaaatttaataaaattgagggagaatcaacatctttaccatgttgtgtttcaatccatgaagatggtatgtttctccatttatttagatctttatcagcattgtgtagttcttagcatgtaagtcctatacatgttttttagactgacacctatttctttttttaagtggttgtaattggtattgtatttctaatttgtgttcacacattcattgctaataataaaatttttgtccat

SEQ ID NO: 248092 - DNA, 532 bp, Homo sapiens
tttgagaacaatatggatgaggaatatatgactagaccaataaaaggaagtcactgtcttttttatgctagctgtcttgaaagtatctgaaaatattcatgggtggcaacaaagaacatgagctatgcagacagagagactcaaccagactcctgtcagctgggtgaccttgggctggtcatttcacctctctgagccttagtttctcctcttgggatgggactgtgccttcctacagggatttttgtgtctgaataaggacagaatgagataatgtacataaaaacccccgttctgcttccctttcttagatcctacaatgcctggagaacagagatgaggccaaggaattcagagcccagtagccccacctatctttaattaactagaggacatcactccagcatcttctgctctccaggcttccatggtcctggaccatgagaatacatgctcctcatcattgaagatgcaggatgagatcttactctgtagagtacaaacagtatatacatcccttttctgggcaaaa

SEQ ID NO: 248093 - DNA, 485 bp, Homo sapiens
gatcagtgttgctgtgcacagtataaactttaaagaccttggaaataatctgaacctagcacttgtgatattgtcccaattggatatgtaaaaataattccataatgtttccaattccatattttagatgatgtctctaaaatatttttaggccagcacagtgtttcatgcctgtaatcccagtattttaggggaggccaaagttggaggattacttgagcccaggagttcaaggtgcagtgagctgtgatcacactactgcattctagcctcggacaagtgagaccctgtctccattaaaaaaaagttttttttaaagaaatgtatgtgataaaaatagaagattggaaatctcagatttagcaatatgaagagaagagttctgtatgtttctctgatgtaatttgcaatttgcttctaggagtttaactagttttttttccccaaaacattctttcaatgcttcttttttttttttttttttt

SEQ ID NO: 248094 - DNA, 428 bp, Homo sapiens
atatatacaacaacatggatgaatcttgaaataattatgcttattgaaataagacttaaaattatgtattaaatgattctatttatataaaattagtgaaaagcaaactaatctttagagaaggaaggcagatcagtggtttcctaggaatggagagatggaaagggaggaatgaatttacagagtatcaggagaaaacttttttgaataatgactacgtttattatcttagttgtggtgatggtcttatgagcacaagaaggtcaaaattcatcaaattgtaaagttcgaatatgtatttatattaattttgcttcgataaagctgtaagtttaaaaaggagagagaagaaggggaaaaggatgaagaggaagagggaggaaaagaggcagaggagattaaagaagagagggagaagaaaaaaataa

SEQ ID NO: 248095 - DNA, 867 bp, Homo sapiens
gaagtgccttgtattttatactgagagcttgagagtttatcttgatgggcgcagtggggtgtctttcggcagaagaatgatgctaggacgtcagtggcttttgactggttagtatcctgtttttttagtaacaaatcttatctttttcctcatggggaaccctttcctcactctcagtttacatgattgggtggggctgatcccattcttcaacgtcagcctgagcactgcatagcccctgtcaaagtgataggttcaagggcgggtgtagaaacccaaactagtccactgagagtcttctttgaactttttttttttttggggtggaatctctgtcacccaggctggagtgcagtagcacaatcttggctcgctgcggcccctgcctcccgggttcaagcgattcttctgcctcagcctcccaggtggctggaattacaggcacccaccaccacgcccagctaatttttgtatttttggtagagacggggttttgccttgttgcccaggctgctcttgaatccctgacttcaggtgatctgccacctcggccttccagggtgctgggattgcaggcgtgagccactgcgcccagccttctttgaacttttaattgaagcaattaggaaaggaaagttcaccttcttttagaattaataaaattgtaggatttggccctggaaactcttaaccactgagaagggactgcttgagaatgaagccacagagcagagtggagcagagtggagagaaggagagacatcgtcctgatcaacttgtttgggcaactggatccagccatgccagaataattcttcccctagaagattcacaagccaataaactcactctttttgtttgtttgtt

SEQ ID NO: 248096 - DNA, 382 bp, Homo sapiens
cacaagtgtgcaaatatctgcaaatgtaggttggaggacagtgtatggtcacgaatcaaaatccttcctaatgtatctgttcaacagagggtcccaggtagaccctgcccctgccttttttctgcctgggttgtgtctagctgcaggcagtggtaacaatccgaagggcttcatttcctttaggtgtttgtggcctcttctccacaatccagatgcctttgcacttacactccaccatattcctcttagagtcctgttcctaatggtccccatcggagcaaatacagtggattcagtcttatcccaccaccttgctcccacattaaagtccaagcctgaactcagtccttgtattcttttggcccagagtcctccatcagtc

SEQ ID NO: 248097 - DNA, 473 bp, Homo sapiens
ttttctttttgaggtggagttttgctcttgttgcctgggctggtgtgcaatggtgtgctcttggctcaccacaacctccgccccccgggttcaagtgattctcctgcttcagcctcccaagtagctgggattacaggcatgtgccaccatgcccggctaattttgtattttcggtagagacaggttttctccatgttggtcaggctggtctcgaactcctgacctcaggtgatcccctcaccttggcctcccaaagtgctgagattacaggtatgagccaccgcacccagcctgtggtttttcaaaaatagtttggtgggcagaggactaggcaatggatgctgctgattagttggggatgcaatagaggtgtgggaaatggtcctggtgctctgagtccacctctgggtaggggccacaggaccagttgagtcatgagttacaagtccaggtggggtcagttatttgccaga

SEQ ID NO: 248098 - DNA, 418 bp, Homo sapiens
ttgccatattgaagaagtaatagtatcagaatttagcttccatccctcaagggcccataaacacactgtgtggaagccaggtgatagatcacaggcttgtaatatgtacagttctcctggtttctgtacctctattacttttaaaacaagacaactggtaaattacaccacatcatggacaatccacttctgcaatgcacctcttcaggttcgtctgacagtgtttggcattcaaaggaaggatagctgccagcatacttgtctggccctgctcagcactgcctgagatattgaccttcttccccaacatggcctgtgggctggaggtgtgttctgagttctcaggaagtattgagtgccattcaactgcttcaccgtgtcagagttccccttttcaaggtttatgaaagggaaagag

SEQ ID NO: 248099 - DNA, 427 bp, Homo sapiens
cagtatttttctgatatattatgcatgtgtaaatttaaaattataatgaaacactttttttggtttgtttcccaaagtgattgtatctttcaatgtatatagtaaagcaaaatgtaacctatatctttgaaatattgtcagacacaataaaatcagtgataacataagccttccaggaattagaagcatatgaaaaaataaaataagcaaagttgaactattttaagtttattgttttaatgggaagtgaaaagcaatatgatcttaattattgctcatgtaaccgttttttaaaacttgctttaatgtagctgatggataatgcctctgactatccttattaaaagtgttctctggccaggcatagtggctcatacctgtaatcccagcactttgggaggctaaggtgagtggatcacgaagtcag

SEQ ID NO: 248100 - DNA, 452 bp, Homo sapiens
tcagagctgagagccccgaacagagatttacccacgtatttattaacagcaagccagtcattagcattgtttctatagatattaaattaactaaaagtatcccttatgggaaaagaagggatgggcccaattaaaggaataggttgggctaattaactgtagcaggagcatgtccttaaggcagagatcgctcatgctattgtttgtggcttaagaatgcctttaagcggttttctgccctgggcgggccaggtgttccttgccctcattcccctaaacccacaaccttccagcctgggctttatggccatcatgaacatgccacagtgctgcagagattttgtttatggccagttttggggccagtttatggccagattttggggggactgctcccaacatatgtgcactgtgtatgtgctcagcaccccttataaacatgtatagctttt

SEQ ID NO: 248101 - DNA, 392 bp, Homo sapiens
cagcccttactctctatacgtactctctgattaaggagcgagatgcagaagaaaggcaaatctaatagaaagtgggagttaatgctggtcaagtgatacatacagtggaaatcaccatagaagctgggaagccaggatagagcttcagcctgtctgtagtggcaggtgcccaggctggacagggaaggggctgcggtatacctgtatgggcgccaaatgccagaatcaaccaggatacaggaatgggttcctttccatctgtctgttttgctccttcctgatctattctgaactcacagaaaatagctataggtctagtggggaaagttatatatctaattttgattttttttttttttgagacggagtcttgctctgttgcccaggctgga

SEQ ID NO: 248102 - DNA, 682 bp, Homo sapiens
agggtcaatcctggtcattgttgtcttacgagagaaaaacaagagccttctcgggccccgtgttctctagctcttgatgtggcctcttcggtatcactggcagccccacagtctggtggtcagtgtgtcgcagcagagggtcattcaccgatgctgcttatccacagcaccttttctgtggggaatgggggcctctattctgctagtagactcaggtgtgtcactctgtgatactcttaagactgggttcattgaggacaggtctctttgctaacattcacacaaagtcattgtttggaagcacagtcctgcttctgaaatgctaggtctggaggagttccagcagcagccacatgggccctctcctcagatcttggctccaacatgggatactcagcagtgaggctagagatcagatgtccttcattccttgaccactaagcctagaggatggagagaaagaagtggaacatctgcactcttcaacctgagtccactccaactccatcccacaaggtgaggcaagttccaccagcctctccagcctcctgtctaatatgatcagagaaatcctcttctctctggactcaagacccatccctgtttccttccctaaggcgacaggtggctatagcaccctttgtcttggccctgcagccaccaatacacaaccataaaaata

SEQ ID NO: 248103 - DNA, 438 bp, Homo sapiens
aggaaggaaggaagggagaagaaagatagatgtgcacagttaaaatatttcagtaaacttcggtggtatttaaagcaagcacagccacatctttcttcatttagaccacctctttttctttccagtgatgtcctctgtgttttggatttatgttcaacctagaaaacagaggctttgggattttaatatagaagtttcatctaaaaatgttcaaaggcttatagctctaagggaaataaatctgggcccttttgttttttccaagcacgtgctccctagcagaaacacatgttacggttggttccatccacaggattgcatctttctgcactggccacaggtgacagcctgctgttctcaactcatctcaaaagatccacaaaataatccgatacatgctttccccagccctgccacccctgttattgaattgccaaa

SEQ ID NO: 248104 - DNA, 437 bp, Homo sapiens
tcttaacattttgtttattttgcattatatttaatagctgaagtcatgtctccctgacagaatggtttcctgttgcaatgcagtgatgttacacaacacatgatttctttcacacaaccactatgaatttcttttttcctcattctaccattatttactctaaagaacctgttctagaaaagcgtgtattttagatattttctttcattgtccctagaaatatgttcattctagacaggacaagcgtattgaaaatgtgctcagtttttccattcctcatgttctcaggtatctggcaactaaccaaaagcttataaagatcatcagagattctgggtagtatgtaaacctgtggccactctagttctctatggttggtaaactatggcctctggaccagctgcctgtttttgtaaataaaattttattggaacaca

SEQ ID NO: 248105 - DNA, 494 bp, Homo sapiens
agcatttcctccagccctggagaattcttcagatgatcataacaccttgtctgcaacctcattagagaccgcgccagacccacgtgactatattgctcctgatttcccgattccttctctgaacgtttcttttaagctgtagtggataactaatataccatttctcatgcttttgtttctgctctcatattaaaaggatatttgggctgggcacagtgtctcacgcctgtaatccccagcactttggcaggctgaggcggatggatcacctgagatcaagagttcgagaccagcctggccaacatggcgaaatgctgtctctattaaaaattcaaaaagtggctgggcatggtggtgggtgcctgtaatcccagctacttgggaggctgaggcaggagaatcgcttgaactcaggaagcagaggttgtggtgagccaagatcacaccactgcactccaggatgggtaacacagcaagagtccatttcaaaaaaa

SEQ ID NO: 248106 - DNA, 309 bp, Homo sapiens
tcccaggttcaagtgattctccgcctcaggcacctgagtagctgagacgtgcaggcatgtgcctgtaatcccagcactttgggaggccgaggcgggtggatcacgaggtcaggagttcaagaccagcctggccaatatggtgaaaccccgtctctactaagaatacaaaaattagccgggtgtggtggcacgcacctgcagtcccagctgttcgttcttgtaatcgcaaaaaataaagacacctaattggctgttttaaattttcttaataagttatcctgttacttttccctccccaccactgacatc

SEQ ID NO: 248107 - DNA, 569 bp, Homo sapiens
ttgtatctttcaatacatttaaagttttaaccttgtatttttatagattctttctgggattccctttttaaaaataactccactataaaacaatgctatagaaggtgtctgtttttaaatgagtatttcagtaagtctaattttcttaataacaatggttgaaatactaaaatttatcttgaaattgttcttcacaccctgactcttaacaaaggtggctcgctctagctaagggggctagagaaacatcttttacgtctgcagctttgctcttgacatgaaaaatattaaacacataaaatcaactacactagagcaacacaatactatatattaattatcccaaagttgggaaattcattagctttctcagcagctccaatgcctccataaaaaaggagagtattttcataaattggtcttagatgttgctatgtttaattaggtaatgcttattcagtgggaattctgcttattttacttattctgcagttctctgaactgaaaagaccagttgatgtttacattaaacctaaacttattctaaaatctgatgatttaaaaaaaaa

SEQ ID NO: 248108 - DNA, 254 bp, Homo sapiens
gtttggggccaatgagatgtgaatggaagttgcatgtattatttctagtttgtgccctaaaaaagaatatgtatgtgttgcccttgccctcttaccctctccactggctggggtgcagatgtgatggcaggaattggggcaactactttggacccagaggcagaagccctgtgatgaggatggcagaactgctctgttagccctggactgttacatgaaagataaataaacttgtatcttattcaagccactgt

SEQ ID NO: 248109 - DNA, 580 bp, Homo sapiens
cctgcaggcagagctccaactggtgggtgaaagttacaaggaggcaggtttctgaaggaagccctgtgtaataatcagagctgcccagcctgtatctaaaagtggtcaagatgcgggctgaagcgtcacgggtcaggaatgctgcacaggagagtctacggacaggctagatgacccttagcatggagggagaggacccccgacatctgtcagctctgcagtgctcgtggttccgtcatggtggagctgccgagtgacccgctggcctccctgagctgggcttgaccatatgtacgaaggaaagaaaaggcatcccatggatgtctcctagttccctcactgtggcccagtgttgtatatcaacgtcatcatggatacacctcctgtgggaggtgattaggccatgagggtggagccctcgtgaatggaattggtgcccttatagaagggaccctggaccctggacctccactctgcaaggatacagtgagaaggcagaacccagcctcaggtacactcatctcagacttgcagcctcctgaactgtgagaaataaatgtttgttgtctgtggtaaaaat

SEQ ID NO: 248110 - DNA, 256 bp, Homo sapiens
tctgcagtgctcgtggttccgtcatggtggagctgccgagtgacccgctggcctccctgagctgggcttgaccatatgtacgaaggaaagaaaaggtaccaagttctgcttgtttatttgtttgtttcagatcccagcatgtgctaaacacagtcccagatccttccctaaaagttatcttcctctatccttaccacaatcctgaaaatcaggtcttttttaaaaaataattttttcattttaaaaaaattataaa

SEQ ID NO: 248111 - DNA, 634 bp, Homo sapiens
tagtgtggaaataagctataatttccttgatgagcatgtcatactacaagacaaggttggctcaacctcctggtaactgtcctgccccagaatgggctagctccagcttaaataaattggaatcagattacctgggtactgaattgcatggcttcaggagagggtgtttggttctgtaaagccacatgtcatggtagtgaggtgagactgatggtagtatttgttcaagaatccgattttcattgagggcacaaaggctctgttgtgccacgctcaggatcttgttttcctgagattgcttcaggcagatttaaacaatggcctctcaacgtactggatttaaagagtaagtagttctccatgatcttatttctcattagtagggaaatgtaaacttttatctttggtcaaaattttgctcctgtcacctgaccccctgatgtcattatgattgtcttttccttgcagtattgccttgtcagttactcttaccagagggatttcatcatcggagtatctgcatgtctaagtccaattcagctctttacatataggccccatgccctaagtgttgctgtcattttgcctgtttagttactttacaaacactaatggcacgtaaggctcctgggaa

SEQ ID NO: 248112 - DNA, 103 bp, Homo sapiens
actagccacattaaaatagacttatttgctgactgcagtggctcacacctataagctcaatactatgggagactgatgcgggaggcttacctaagcccgggtg

SEQ ID NO: 248113 - DNA, 457 bp, Homo sapiens
aaaaggagtaaaatagagttgtgaatgtttgctttgttattaaacatatcaactcattggagctgatttatataaagttaaatcctgctagaatagctggattccttcctacatgggtggggtgggaatgctgagatcctggtgtgggcattccatgccagggtagaaatttcctgctcaggcacttagtgaaggagccaactgagggaggataggtgatgtgcccgcccatccggtggcacccagtgacctgtgcacaccaccccccatctgcccaggacccagccatgttgttcattgtacccttttcagactgctgacctccaggagcacttgtcttaaagtcacatagctgtatttttcctctccagaaaaattttgaatgtattttctaaatagctgaggtcattgcatggtcttcagtgaacttagctacaagtgaatgtgacctggagtg

SEQ ID NO: 248114 - DNA, 376 bp, Homo sapiens
ctgttccctttaatgtgttatcagaatctcatctcaatctagggatttttgccaagttgtctgaactctctatctccatatgtggtatctgaggtccttcttaaaccctgattttccccttatttggtattaatgcacacactattttcaggacccagcatcaagagtcaaggtgagtgttgtttgcaaatctatcataactcggagaagtccccatactcaaatgtcttagccatgttagcatgtactcagcaagaggccatgaacagtggctcatgcctgtaaccccagcactttgagaggccgaggagggaggatcacttgaagccaagggttcgagaccagcctgggcaacaaagcaagaccctgtctctac

SEQ ID NO: 248115 - DNA, 401 bp, Homo sapiens
ccctgctgggagtgcccaggtgccatcacctgggaacagctgatgacgcgagctaagaagttcagagttgcttttgctttacaaggcgcataggaacacactgtactaagaacgtgccagaagcctcaagatcactaaagatccccatttaccagaccggaaacaaaggagcaggggaaggaagcgcacacgtggggcttcgtgggctggaactgcatgacctcggcaagtcacttccctcccagagccactctttcccaggttagctggagacagccacaacctacaggcaggcgtggtcggaattaaagacagcaggcaccaaatgcgtggtgaatgggagacattatagtaactgttttattaatcttagattaaactatttcttgcaactttgaaaa

SEQ ID NO: 248116 - DNA, 332 bp, Homo sapiens
gcacctggtgtccacagcctgagctcctacctggagacccctggatcagggagtaaagaattctgggctgcaagtcagaagaaatgctccccaggggcttcagtggctccagagtctcaggaatcatctctggatgggtgactggggcaagggtgggctggggccctggtcttagtctcctcatcagtcaaggagggcaatgtgctttttgcccttgactctcctctgaccctggcccttcatacctggatctggcttgggagcagggtgaggccgaggcccacagaagccatagggtcagcctaagagcaagagtggaaaaagaaaaatca

SEQ ID NO: 248117 - DNA, 757 bp, Homo sapiens
  misc_feature (1)..(1): n is a, c, g, or t
  misc_feature (4)..(4): n is a, c, g, or t
  misc_feature (6)..(7): n is a, c, g, or t
nggnanngctggtttggtttaggtttgcattggtggatcatattgttatgttttaagaagtacaattctgcctctcagaatctcttggtgaaactgaaatcctattgagtgtggatgcagggaagagcaacaccttgaaataggcactgttgtcaccagtaggtcaacaaactaaatgcctgcctttgaattgtgtacagcgcagagaaggactgttttccagcatggttgctcttggttggtgtacagacacagtcttaccattcacactctggtgaacagtgtcctctgttgggaatagtgatacttggatgtttctctgagccagaaaaaagaaaatgtaaggagagagagattgacttctttttaaatcttgcccaccagtgtcactgcctttcacccagcattcctgcattttagattaaagagcctggttttcacttgaagtttctctgccttagctgcacgttgcaattttctgagatattttaaaaattagtgatgccgggaccctgaccctagggattttgatctcattggtcttgagtgctccttgggcttcccagctgtttgtactgggcagccagggtcacttcttacccaggctgtctcgaatctagtggaatacagtaaaagtgttagctaaatttttggcttgcttgcagagtaagaaaaacatcacaaacaaactgctttttcttgatgcctgtgatttgtacttttcagccttaggtacttttttttttgaaaaaaaaaa

SEQ ID NO: 248118 - DNA, 1532 bp, Homo sapiens
agcatatactctgtatgattttgatccttgtgtatatattgagacttgttttatggtgcagcaaaaggtctgtgttggtgaacatcccataaacacttgaaacgaatgctttctgcagttgttgaaagtaatattctacaaatgatttgctttgaaaccccactctaggtcttgccctcctcccatgttgaaaacattcaactgctacttgggacctgactaccaatgcttcaaacccacttacctagaaaaggttggccctgtgctgcaagatgtagcagcttgttctccgatagctacaggccctgggtcttgctgagacatgtggagcactatctgaaccacccaggtgcatcacacacctttgcctgctatagcacatgctagagtgcaccttacagatcccatcacctttcggatggggccagacattccctatgctgttgagagttctggaggctgatagatttcagccagtgtctcttggagtctctgagtggaaccaataaataaaagccctaaagaaagtgagaaattaaacaaagggcaagactgatgggggccacactactaaatttcttttgtttttaaacagctttactgaggtataattgacataacattcgcttgttttaagtgtgcagttaaattattttcagtaaaattttagacttgtgtgaccatcaccatgatcctgttttgcaacatttctatcattcctaagaaatcccctatgttcatcagtcaccaccactttttcccagtccccagctccaggcaacctctaattgactttctgactctacagatttgccttttctggagaccatataaatgaaatcatgcaatatgtggtcttttgtatctgtcttctttcatttactttaatatacttttatggttcatgtatgtggcagcacatatcaatattttaatcctgttaggggacaaatcctattaaattgtatggatagctcccattagtttattcatttatcagttgatacatatttgagtgtttctactttatggacaattatggataaagttgctatgaatattcacattcatgtgttgtgtggacataggtttttttcttctgggtagatagctagaagtgatagtgctaggtcatatggtaaatatatcttcaacattttaagatactgccaaactggtttccaacgtgactgcatgtcccatcaacaatgcgtgagtgttttagtttttccacgtcattatttcacttcccccaggtgttactgtccttttttattatagcattctagtgggtaagaagtggtgtctcactgtagttttgatttgcatgtccctgctgactgatgatgctgaccatcttttcatgtattttattgtctattcctacacctttttgatgaaatggttattcaaatattttgcctattttaaaattgggttatttatctttttgttgcgtagttgtaagtgtatttcatattctggatatgagtcctgtattaaatatatgatttgaattttttttctcagtc

SEQ ID NO: 248119 - DNA, 197 bp, Homo sapiens
ccattgtacagtgtcaggaacataccagacactgagaatagctcatgtcataaggacccagagcaagaggaccctgctgtgatgcacaaagaggaccatgcaagatatgataaagatctatgtcactgaattttggttctgtatttgtatctcagcttcccggaaataaaaaagaattctaacattcatactttcag

SEQ ID NO: 248120 - DNA, 326 bp, Homo sapiens
tcatcctggactcgggggcagcgggcctgctctgagccctcaccctggacttgtctcctctgttcagttcatgccatggaggaagtggtgaaggaggtggtgggacatgccaaggagactggagagaaagccattgccgaagccataaagaaagcccaagagtcaggggacaaaaagatgaaggaagtcactgagacagtgaccaacacagtcacaaatgccatcacccatgcagcagagagtctgggcaaacttggacagtgaatgcacctgctaccatggcccacccttcccaagtctcaataaaaagccatgaaatatgtacg

SEQ ID NO: 248121 - DNA, 624 bp, Homo sapiens
ctgaagtttagtttgaattttatagtatctcctaccttgctgtaccttaaaggactaacagcagctacctgacccaggattagccagtcatattttttccagaatttgtaattggaacaattgagatggtagtcttctgctggtagtttgaagagaggatatgtaaacttggtagctgtgtacttagaagcagagaaagcctgttttcagagagaagaatgaagcaggtaagtcatctggaaggacaagcagaagcacaattttgggaacagttgctttcagagtcctgatggcattccagccccttgtcctagtgccagttcaggcccaagtgtttggcctttgggacctatgatacagatatcctatttccttttaattaattgcctcttaaaattactattattaagctagcttgcaagggtttctgttacgtggaatcaaggaacctcagtagagaggaaaatgaagcactttgtggtggtgctgcacagggtatcattttgcagggtatatactgtgtgttttctacgttgactggagtctggggtcaggtgtaagaagtgttacataaacattgggttcaaatgagtcagaataaagtcaactaaaaaaataaaaaag

SEQ ID NO: 248122 - DNA, 140 bp, Homo sapiens
aagcctcttgcagaggcaaaagggctcagacactcaggtccttgttaatgtcagagggaaagaccctgagctccttgattcatatgatagaaatcatccttttcagtcttgatgcagcccctgatatgttgggtgtgact

SEQ ID NO: 248123 - DNA, 393 bp, Homo sapiens
aagatgaactgcaggctttgctctgagctcacagcctgacctcagtctagagctgggaatctttctctccctcattgctacacctgatcaattattgagtcccatccctttaactgcttacatggccttcaaatccatcttccctacctaagctgcccattcattgacctgtgccttctgtccatctgctgagagccaggtgctgtgcgagcctctgagaatgtggccgagaacaatatggataaaagttctgagccgggtacgctgactcatgtctgtaaacccagtgttttgggaggttgaggcagaagacttccttgaagccaggagtttgaggccggcctggacaacacagcaagaccccatctttacaaaaacaaaaacaaacaaaca

SEQ ID NO: 248124 - DNA, 396 bp, Homo sapiens
aaaagaactttaaaaaagtaacagagtgtcagaaacaatgaaaaacaactggcatgccaacatatgcaaaatagaagttccaaaaggagagaagggagaaagaagaaaaataaactactgaagatacagtagctgaaaatgtcccaagtttgctggaaaacattaatctacacatccaaaaagtttaaagaactccaagtagcctaaacataaagagatccacacctagacatatcatagtcaaaccatcaaaagtcaaataaaaagagaaaatcttagaagtagcaaaaataaaaaataattattcacatatgagaaatagtaagactaacaacttgcttcttatcagaaataatggagctcagaagtcaataaattgacatattcaaagtactg

SEQ ID NO: 248125 - DNA, 488 bp, Homo sapiens
atcatctcttatcctccaggaggattacctgggcttattcaatgcgaactcccagtggaaaccccatttccggcaaaaaagcacaatagaagccacttagccatgagactgtaaaataagaaaaagaaaaataatcgagagaagaataaaggtgttccagggcaagaaactaaaacatatttctaaaactgagctgcagatagaattcctggtttcctggtagttaaagaaagagacaaagtgtaaggagttacacagttattgtcattagctaaaagaaatttcatatttgtggcctaataggcatggaaataaaatgctagaaggagcagggcatgatggtgcacacctgtagtcccagctactcaggaggctgaggcgggagagtggcttgagcccaggagtttgaggccatagtgagctatgattgcaccactgcactccagcctgggcaacacagtaaaactctgggaaatgaagagacaaaa

SEQ ID NO: 248126 - DNA, 643 bp, Homo sapiens
cttagaggatagaaggagaaaaaaaacagagagagaatattgattaattttctcttagttcgttccagaaattttctcagaccaagttgtacttcaatcttttggttcctttagtcaccaccctcttcttttttgatttttccaatttgtgttaacacttgcctgtattgatctcttgcatttgcagccacatgaatgtgaaatccataagggcagagagttttgctggttttgttcactatcatgtcccttaacacctaaaataatgcttagcatgtagaaatctctcaataagtagcttttgcatgaatgaatgaattaaattaaatgaatgaaagaacaaaagaatattaactaaataaagccaagggtcaggaattaaacatatcacaaacatgcttggaatcttttactacataattgcctgcagaatatcattactatacagtaacacctagagaacatccgtaaattaaatagtttgatttactgaaaggactaattttatatgagcaaaaatgactttagtaattttcagataagcatttgtcaaacgtataatcttgaaactattttctttatctctcctttctataaatataatgaacaagtatttaataaaagacttcttgtttgtgacaca

SEQ ID NO: 248127 - DNA, 350 bp, Homo sapiens
gcgcatttaaaaatgagggctcccaaattagtctcatctagggatgcctattaatatgcagaagcttctaaaaagatttagagatggcacggcccatctgggagcaagtttgagtcttaccagtttgatactgggtgctgagcaaagtggcacgtgtctatgttttgtcacatgtattttgctctgggcagaatgaaaaatgttaatttggttactccaagcaaccccttgggctgcatcttgcaaagctgagtggattcttcctgtgattccatgattttccattgtgatgcagcttggcccccagagctataatgtggtgaggagggtgacagagcaagacgcaatct

SEQ ID NO: 248128 - DNA, 404 bp, Homo sapiens
ccctaagccccagtgtgatggtatttggaggtgggcatttgggaggtaattaggtttagataaagtcatgagggtgaagcctccatgatgggattagtatctttgtaagaaaaggaagaggccaggtgcagtgattcatgcctgtaatcccagcacttttggaggctgaggcaggtggatcacctgagctcaggagttcgagactagcgtgaccaacatggtgaaaccctgtctctactaaaaatacaaaattagccgggcatggtggcacatgcctataatcccagctactcaaggggctgaggcaggagaatcccttgagcctgggaggcagagattgcagtgagccaagattgcgccattgtactccagcctgggcaacaagcgtgaaactccatctcaaa

SEQ ID NO: 248129 - DNA, 193 bp, Homo sapiens
atctagtataatttctcttaaatgtcactatttcctgcaggattccaagatttacataaaaacctgatgggtgaatagtatgtttttacagattacacatctaaaatacttgaaactgtatcaccactgctatcagctccgtactatgcatttactcatgctttttatttattcttataatcatggtaaatca

SEQ ID NO: 248130 - DNA, 451 bp, Homo sapiens
taggtttgagtgatatctcatggtggttttaatttgcatttctctaatgattgaacaatgttgatcaactattcatgtgcttatttgccaccacgtcaaaaactgcaaatgttttttttgtagtagccatcctaatgggtacaaagagatatctcattgtggttttgatttgcatttccctgatttaatgatcttgaacactttttcacgtgattattggctgttggtatgtctttggagaattgtctattgcagtccttttcccatttgtaaaccggattatcttgttttttttgttactgagtggtaagagttcctttatgttctggatattaactccttattagatatgtggtttgcagatatgttctacaattctgtatattgttccttcttactctgtcatttgcttcctatgttgtgcagagatattaaaatttgatgtaatgta

SEQ ID NO: 248131 - DNA, 469 bp, Homo sapiens
gcagagccatgtattggaagcaaagccccagaagatgataaaacaattatagaggaataggcaaccaaaattgcagatttgaagagacgtgtggaattccttgtggctgagaatgaaagattaaggaaagaaaataactaaaggctgaaaaggccagacttctaaaaaggtccagtagaaaaggagctggatgtagatgctgattttgtagaaacgtcagaattacggagcttgccgccacattcagaaactgctacagcctcctcaacctggcagaagtttgcagcaaatgccgggaaagccaaggacattccaatccccagtcttcctcccttggattttacatctccagaacttccccttatggatctccctgagaatattctgaaaggatttatgaataattaaaatggaaggccacagaagaggggagaagaggaaataatacagtaatagttaatccagcaaa

SEQ ID NO: 248132 - DNA, 158 bp, Homo sapiens
gtatgtatgggtgtgtatgcttgcagaaaagtctacaaaaatattccctggattgttcacagtggctttatcttggtagaaggatttcaagtgatattttttcaaacttttgatttaacagatagtattgtgttaggaagctaagcaaaaaaaccctc

SEQ ID NO: 248133 - DNA, 299 bp, Homo sapiens
gagatagctagcactagcagggagaaatacaggtgatcagagtccaggctctctgaacatacaaacagtataactgttgttcactaaatggaaaaatcccaaaatcaaaaaccaatgcaaaacagtgaagtggcttgagctcctaggaggttaggtagaaattaaagagaatcagtggatgggtagaattttaagcagtaggtagttacccaatgtagaacgaggattagcttagacacctagtctggtggttctcagcctttcagcatttgcatacgataacttttaaggcttactta

SEQ ID NO: 248134 - DNA, 474 bp, Homo sapiens
cagtgcagagcgacctgaaagaaggtggttctcattcatctctctctttcatctccttgagaaatctagccacagggtaacacaggttttgagaggatgggaacgggacgtggcaaggatctgtgagtgtgcaggctgtgtttcacatatcattaaacatagtccagtgagggttctgcagataactggcgtttaagtttgttttattgaatcaaggaaaaagaaaaaatactgagaaaaaaatgacgcaacttgcctgccagcccatctgactgttacaaatttaatagtagtttttatttatcttctcatgtaaaggtccttggcagtgatacctaatttcctaagatagccttgctttatattgtgtgattaagatgtcatgcatatcagagtatctggaaattcttctcaacgtcctttacatacgtgattaatcacatttccaaaataacataccaaaatgaataacag

SEQ ID NO: 248135 - DNA, 824 bp, Homo sapiens
gggaaagtttccttcacatcttgggctccagtgggctggtcgttccaaaatcacatctttctcacagtcatttaaggctttcctgatgtctccaatcctcacttgcaattctttcatgtggttcatctttcaagaagatctcttgtacctccttttcagtatgatttttcttaatatatttgctctgacatgattattccattcccttccttagagctctttgtgttttaccattaaattttgttattgaaccatgtaagtcttacattatctgggctgtgcagaagagttctatatgttaaatgcaattaaaagcttccttgatgtctgggactgtgatttctctatatgaccattagtgtgctagttatatacaaaaatcaataaataagtaattaaataagtatttatacatatatacacaaataagtactgactcaattaagacctatgtagcattcacaatctattcattctcatctatctgctaagaagtttttaaaagtgctttatgtgagttatcacagtgttttagattttttattttataaatgatcaaacagcaaagagcaaatcagtttcttcatactgtaaaaatcacaaatttaaaaatcatgttattttcttttcaagtatggttttttactcctaaaaaacctctattttttctttcctttccagatgtatataatacgtaacaaaatcacaaatgtgttttcaagaacttaagaaaaaatttataggctattaaaatggttcctaattcctggatacattccaatatccaaaattattttcaaataaaggtctaaagaaatgagaaa

SEQ ID NO: 248136 - DNA, 264 bp, Homo sapiens
aactctgaacttccatgacttgtttctcaaatcttttgagacactaagaggtttctagcttgtctgaatataaaacctaattagatcacatttatttatttatttatttttatttttaatttttctgtagtaatgggtctcactttgttgacctagctggtcttgaaatcctggccccgagagatcttgccttggcctcccaaagtgctgggattataggcgtgagccattgcactcagccatagatcacgtttatatgcaatt

SEQ ID NO: 248137 - DNA, 430 bp, Homo sapiens
cacccaactaattgttttttatttgttgtagagatgggggatcccactatgttgcccaagctggtctcaaactcctgggctcaagcgatccacctgcctcagcctcccaaagggctgagattagcagtatgagatgagacactatacctggtggctttgttttttcaaaataaataactttctagaatggaaggggcttaatgaaaataaataaataaataaataacataaatggctagttttgctttccataagcaaatgaaatacagttgttaagaacaagtaaattagataactgtgaatgggataagcatctacaaataaacttgtcatagtttccaaaactttttcagtaatttaaaatcttaaagtcattgctgggattacaggcgtgaaccaccatgcctggcccgagaccccatctcttaaa

SEQ ID NO: 248138 - DNA, 534 bp, Homo sapiens
aacactcccacagccacacggacaggattccttccagtctgtgtctgtctgagcccagaaaaagaggaaatactgagctctagctggagcttcatccagcgatgataaataatctcgtgctccaattcagctcccatcctctcaagggcatggtcgccaccggaggtctaggtcttggggccccttcccccgacctggggtatctcttagggctttagtgtcctcaattagcaacccaggggaagcacagaagtgtctgggctctgttaagaggcggctttatcagccaggcgaacatttttttcagagaacctcagtttaggggaagcagttcctggcggggctttggttccaggctctccccctccagggacactcattcctaaggggagcaggctgggctgtctgggaacatttgccctgtaatatcagtttgcttcttattggtcctttgatagcagaacaagaggctctgtgatcctctggacctcagatttccttttaaactctcaaataaaaagatatgtgtgtgct

SEQ ID NO: 248139 - DNA, 369 bp, Homo sapiens
agcaaaactctgcctcaaaaaaaaaaaaaaaaattatcacaagcattgataagtccagcagtgaacacatctgtttagctttgtttagcccatacttatttgattatggaaaccttttactgagtagttctacttttatcctttcatagataataaactgcagataaaaattagttatctttcctgtatactaaagtaacaaattagaaaatatacttggtggaaaaaggattcccaattcacaacaaaatccatggaccatgaaggaataaacctcacaagaaatgtgcaaaacctgtatgaaaagaaatgatagctccaacctgaaggatatgaaataagacctaagtaaatggagacatataccat

SEQ ID NO: 248140 - DNA, 247 bp, Homo sapiens
aaaaaaaaaaaaaaaaaaaaaaaaaatagaagattagcccctgccccagaggagctttaacactacgtgggaaggcctgcctccaaaacatgagatgaccaaatagtatttttaaatgaatagatcgaataacaatctgagatactaacaaaactattattcagcaattggttggtcatgaattttcaactgaatggtactaagagattctcttttgggaagagaagagttaagatggacttctaaa

SEQ ID NO: 248141 - DNA, 676 bp, Homo sapiens
gtttcctaaagtacctggttcagatctcttgtaacactaactatattgtgctgtttatgtacatgtctctccaattagatccaatttctcaaaagcagaggctgtctctaattattgatatccccagggtccagcacaatgcctagcacgttgtcaacaattactgaaaaaatgcttaggaacaaactacactcaaaccagcatcatacgaaatgtatcactgatactccagagcgtcactctgtggttggctatgggtcggcagatctaggctgagctcagcggggaggctctccttcaagtgttggatctagttatcttggctctttgctgtaggctgagccatgtttgttcctgggacccaggctgaaggtgcagcagctgattagaagaaaaaattcccatagcgaaggcaacagcgcaaaaggccaagcccaatcacacacacacgtcaaacatttgcttatgtcatgctcactagtattttattggtgaaaggaagtcacatgatcaagctcgatattaataagatagggaaatacactccatgcttagtggaagaaactgcaaagccacatggcaaaaagtgtgaatatagagtagagtaaaaagatggaaatagtattgcagcctaccacaataagtactcaaaaaggcttatagaattagtgagttc

SEQ ID NO: 248142 - DNA, 491 bp, Homo sapiens
ttttaagtgaaagaagcaaaacataaaagcgtatctatagtatgctatccttcatgcaagcaagaaggtgatataaaatataaatgtaaaaaaaggtaatatatggagagtgtgtgtattaccatttttttacattgcatcacattttaccatctatatctatatctatatctagagagcaagcctgctcattgtgcaaaggaaatttaggaaggataaaccagaaacgaaagagactggataccagtggtggatgaggagtggggaagggttggagaggagggaatgagaatggaggagcaaaggtgaagagggagctatgagataccttcccatagctctgattcataaaaccatagtaacatttcatagactcaaaaaatacttaaacccagccagatgtgggaaaatctaaaatggaatacaaacagtagcaaatgaacctgattgcattataaatgaataacattgtcacagtgatcagaatcaga

SEQ ID NO: 248143 - DNA, 739 bp, Homo sapiens
tcttttacttggacatcttaaaattattcacaattaagtttttctcatataagtctttggagggtaacatcgttttcatttaaaaatgggaaatggaagcagaagaaaactagatgataaagttctcagttcttcactgtgattaacagctaagcagtggctaaaagcttgcatttttggtgttagattccaaatctaccactaaattttcttatcagtaaaatggggaaaagaacagtatttatttcactcagttgttgtggagataaaacgagaaaatatgtaaagggcttgacacttaggaagtattcaacaagcagtagccattattattaccacaactttaagatcactattgataagtttagaggaagaaactttttatgaagtgaattaccttttgggatctgggcactatggagaaaatatcaactaacaatctgcttggggactctatctctggaggagaaacagactacacttggggcagtaagtcagagttctaaatgttcttggaccatccttcatacaaatctcttaagtgatggtagggtgatctcaacctaaatcttttaattataaattccactctcatttcactatattctactaccttaccatagtgctcactttaactggaccacaagttcagtatagttttcattgtctgagactttaggactttattggttgtatcttcaaggataatcttctgaaatgtgaggccaaatgcttggag

SEQ ID NO: 248144 - DNA, 1352 bp, Homo sapiens
atggccggcctggggttttggggccaccctgctggacctctcctgctgctgctgctgctggtgctgccaccccgggccctgccagaaggacccctggtgttcgtggctctggtattccgccatggcgaccgggccccgctggcctcctaccccatggacccacacaaggaggtggcctccaccctgtggccacgaggcctgggccagctgaccacggagggggtccgccagcagctggagctgggccgcttcctgaggagccgctacgaggccttcctgagtccggagtaccggcgggaggaggtgtacatccgcagcacggactttgaccgcacgctggagagtgcccaggccaaccttgccgggctgtttcccgaggctgctccagggagccccgaggcccgctggaggccgatcccggtgcacacggtgcccgtggctgaggataagctgctgaggttccccatgcgcagctgtccccgataccacgagctgctgcgggaggccaccgaggccgccgagtaccaggaggccctggagggctggacgggcttcctgagtcgcctggagaacttcacgggactgtcgctggttggagagccactgcgcagggcatggaaggttctggacaccctcatgtgccagcaagcccacggtcttccactaccagcctgggcctccccagatgtcctgcggactcttgcccagatctcggctttggatattggagcccacgtgggcccaccccgggcagcagagaaggcccagctgacaggggggatcctgctgaatgctatccttgcaaacttctcccgggtccagcgcctggggctgcccctcaagatggtcatgtactcagctcatgacagcaccctgctggccctccagggggccctgggcctctatgatggacacaccccgccatatgctgcctgcctcggctttgagttccggaagcacctggggaatcccgccaaagatggagggaatgtcaccgtctccctcttctaccgcaatgactccgcccacctgcccctgcctctcagcctccccgggtgcccggccccctgtccactaggccgcttctaccagctgactgccccggcccggcctcccgcccatggggtctcctgccatggcccctatgaggctgccatccccccagctccagtggtgcccctgctggccggagctgtagctgtgctggtggcactcagcttggggctgggcctgctggcctggagaccagggtgcctgcgggccttggggggccccgtgtgagccagaaaccagggcttccctacccccagctgacactggaccccaacatgtatgctcagtagctgctctgg

SEQ ID NO: 248145 - DNA, 455 bp, Homo sapiens
gggaggctggggtgccttcctctgggagagtctaagctcttttttcccatcctcagggatcctgctgaatgctatccttgcaaacttctcccgggtccagcgcctggggctgcccctcaagatggtcatgtactcagctgtgagtccttgggaagcagtgccacatggcactgaggcacagggatgagggtgacagcgatttaggtgaggaagagcctgtggtcccagtggatctcagcccactgcctggggtaacccgtatctccaaaccctactctcaggctctaccattagtctggaaagagggaggtgacggtgttatgggaggaagaatttatgaataaatataattccttgttttctttaagaaactatgattggactaagcagtctgtccttccggaggagaaaggctgcttagtccaatcatattttgcacctacttgagcaatctt

SEQ ID NO: 248146 - DNA, 419 bp, Homo sapiens
cattaggctttttgtaaaatcataaggtcaggataagataatgataccatctaaaattacacaagattttgagtacttagtatcctctgactgacccagcaacccaacccaaaccccaacaagcatagctgaatttttggggttggcaaagccatgaatggaatgataggtttaggttcaggccccatgagctggcttgataagggaatgagtaatactgattcgatttatcctgagtcatagctgtgtactaaactaaaactttagcatacatcacatcgaatgtttctttgcttcagacaaagcgaaaagaaaaaaggacattaggaaccctcatttttattccttttcttaggaaagttaaacacttcctttcttctactttccctcttccctatcactttactccctaaagattt

SEQ ID NO: 248147 - DNA, 557 bp, Homo sapiens
gaccttcatccttctgcagcccctaggattaagggtcctcttgtagaagggaaaggggagatatgtgggaagcattcaaaccagagtgactccagtttgaataagggctaagaaaagagaagctgggtcacctaccggcaattaagggctgcacagcctgcaatcgcctagctaatgatagctaagtaataatgatagtaataatgataccttctcttttataaaaaagagggggcatgttgggaaaaaagctgagtgttgggggggaaaccgaggcagggcttgcataatgtcctctggaatgtgtctagacttgctggctccttgcttctagccttcctaggctcctaggtccctattcccagtatctcaagtagcagaacatgttccatgtaaatgctaaaccatcacagttgtagatcatgcgcctgcccttttgacctccacgttatcaccacctgtttctttgttggattaccaataaacactgtgggctcccagagctcggggccttcacagcctccacgatggccccctggtgtcccacctttctctct

SEQ ID NO: 248148 - DNA, 449 bp, Homo sapiens
gcaagaggacagaggctccaggttccttttgttttagtgctctgccatgtgtagggtgtttcccatccaaatgttccaagatgtcttaccactgtgtctgtattccaggcaatgggaaggagggaaggtgaaggggagagaattttccttccttgcaagagcatcatctgcaagttgtgtttctgctcacaccccattgacagagctttattgcttgatcacagctagctgcaaacgaggctaggagatgttttagtcagtctggtagcctttgtcacactacaatttctatgttagaggagagagagagagaacatatattagggaatagctaaccatctctgctacacctatgaccttccatttgtctcttacaatgagtttgtgaagttagaatttttatcccaagttttccactgagaaaaataaagctcataaacctgaaataa

SEQ ID NO: 248149 - DNA, 440 bp, Homo sapiens
gcacagggccttgttatatatcaggttcttaataaagactgaatgaatggatgagtgagggaatgaatgaatgtaaaaaaatcagtactacaatgtcttgtatgtggtgtcacaccagcccagtgaacttgctgagttgaagtctataccttagcaatatttacctcaacttctgtgctttacattagcatcagcattttgtgaggaaagtataaattgtgatgtctgctccgttcacaggaatgcttccaatggcgacctccaattcatttagtaaatttcagtcttcttggtcacagagtgggcaagaccaatcagaatatcccattttcctgtccacagtgatggatccaagaggcagtcagatgacctaaggaaggccagtaatagtcttccctgggatattttacattgaaatttcttttttcttttctttcttt

SEQ ID NO: 248150 - DNA, 423 bp, Homo sapiens
gtatgttgtctagcaaagatttctggttctcaaggactctctagtccctggataacactgggcataaccatgcttgatgttcaaatgaaattcatagcagtttaatcagttgatcccattgcttttttatattctgttattaatactgatttataaaacccagttattttcctcattattgcttctcagttctgtgctttctatgaattcgaattccaatttaacaaaagaatgagtttaccattttgatgtcactatctgcttgatccagggattatgtattggatttaaggtcccatggctgcaggttattacaagtatgtttgaatactgtgctttgcaaacatactgatttgcttgaaatgccaccttccttttctttcttatttctatgtttcatgagagacagcagaggacagtgct

SEQ ID NO: 248151 - DNA, 365 bp, Homo sapiens
ctcaggtactaagaacctgtactcagtggactagtacagtgaaatgtagactgttgtcttcagagccactgccaagctagagagcagggggttttattattaagcatttgtctggttgctgtaaacttttgattagtttccataatgccagtaaagttgattctgagagtatttgccagtttatttagtgcaattgtaaaaaaagataaattttgagggttccctactctgccatatttgctggcatcaagcttgatgacatcttaagacttattttcaagccaaaaaaattaaaatagcatttagtagttaaatcatagcaaacaattaataaatgaagcgtcacactttgacatggacaagag

SEQ ID NO: 248152 - DNA, 358 bp, Homo sapiens
gtaacagcaccatggggtgagttcattcccttctttgttcagaggaggtaactgaggtgcaagtgaaaggagaatggttggccgggcgtggtggctcacgcctgtaatcccagcactttgggaggccaaggtgggcagatccgaggtcaggagacagaccatcctggctaacacggtgaaaccccatctctactaaaaatacaaaaaattagctgggtgtggtggtgggcgcctgtagtcccagctacttgcgaggctgaggcaggagaatggcgtgaacccggaaggcagagcttgcagtgagccaaggttgtgccactgcactccagcctgggcaacagagcgagactccgtctca

SEQ ID NO: 248153 - DNA, 582 bp, Homo sapiens
tttttttttgagacagagtctcattcactctgtcgcccagggtggagtgcagtggtatgatcttggctcactgcaacctctacctcctaggttcaaacgattctcctgccgcagcctctccagtagttgggattacaggcatgcaaaaccatgctgggctaatttttgtagttttagtagagacaggattttatgttggccaggctgatctcgaactcctgacctcaagtgatccgtgcacctgggcctcccaaagggctgggattacaggtatgagccaccatgcctggcccagtatatttattttctaataaaaaaattataacttactttccccctcaaaagaagtttaataaaaggatattgtatttcaaggttgctccttggctaactgaaaaacaaatatctgtctttaattttccaagtaaagaaaggtttaaaatctgatagctgagccaagcacaaggttcatccctgtaatcccatcactttggaaggataaagtgggaagattacttgaggccaggagtttaaggcccccctgagcaacagaacaaggccctgtctctacgacagaaaaaa

SEQ ID NO: 248154 - DNA, 435 bp, Homo sapiens
ttacctaaataacaaacctgcacatataccactgaacctaaaataaaagtttaaaaaaatgttttttaaaaaacattttctttcagttaaccgttagaataagcaacccaaagaagctatgtgttccctccctgaaactattgaaggacaatagaggtctctgtttctcaaggccagaatttgttacatctctccttaaccaccttcaagggcctttcattgtgcttggaattaagtacaaacagcttcagtctttctcactcagcttttgtttctctctttagtccacctgtagccagtcatctcctcactagcctctgtagaccagccacatggaacttccttcgtgtcttcaaatgagccatgctctctcttgtccccaagtctttgttgcattttgtctggaatatagatccccctctcccaacccttacc

SEQ ID NO: 248155 - DNA, 693 bp, Homo sapiens
gggaacaaggttagaggcagatctgctgtaaaatgagtgaactctatgaacttcatgtttctcctctcctaaatacacaagaagtaaacctctcccccacataaagaggcgtaatcacagtgattgagccacgttggacagtgcagtgagaaactagcattgatatttcctaaattagtctgtaaggagtatgattttattctctctctttcttgtggaactctctgatgtgctgtaattgtttatctcatttgcttatttaaggctaactggaaatcagtttaagaaacatttgagttgtgcctttgtactggacactgtgttaggcaatgagaatactcaggtcaatgaatttagactctgccttcaaggtgttcactaactagtaagggaggaaagcatgaaaataaattacaaatccagggtgatgcctagaacaagataaataaatataagatgcaatgtagcataaaggaaaaatatatacatgtgtatatctatttctccatacctattttgaactctagaaataggactatgtggtgctggggtaaggtagcttctatggtaaatttaatacaacaatgaaactcctaaacctgttactactaaatcaagtgtgtcctcccacaatatcagttgccttaaattgcaattaaatgagttatgcccttgaaggttaaaaaggaaaat

SEQ ID NO: 248156 - DNA, 1063 bp, Homo sapiens
gcatgacatataagcaaaaaatgattcaaatgactgtgaacatctcatcagaaactgtgggggccaatgacattttcacggtgttgaaagaaaaaacaactgtcatccaagatgaagatttaatacatatgacaatgatattattaaggataagggggaggtgagtaaacatatcaacctgtaagagtcatacattttatataaagtagtgtgatgttaactctaaatagagttaagagaatttcaggacgtatattcctgagcaatcactaggaaatgttgcaaagaggaataggtaaaatgccaatagctgaattgaaaatcctaaaaactattcaattaactaaaaagacagcaagaatggaggaaaagaggtatgacaaatagggcaaacagaaaatcaatagtaatattcatacaatggaatgctacttagcaataaaaggaaagagcaactgatccatgcacccacaggaatgactgttaagaacattatgctgaatggagaaagccagacacaagagggtaaatactgtgatttcattttttatgaaattttagaacgggcaaaaccaatctatagtgaaaaatcatcacaacagcggttgcctcttgggtgttgaggagtgagtttattgggaaaagactgtcataaaagagttttctaaggtaatggtcatgttctatattacaataggaatttgggttacacaagtgtatgcatttgccaaactcatcaaattggacacttaagttatatacatttcattgtatgtacattttacctcaaaaaaggagctataaacaaatattagactctaagttgaggatatgcatgctgaaatgtttaggggtgaaatgtatgcatttttgcaacttactctgaaatccatcaataaataagaatgattgatacgtgatgtgataaagcaaatacaataaaaaattaattatacggtctagattttgggcagatgaatgtaaactgtacaattctttgaacttttctgttttcttgaactttttttaataataaaatgttgggaaaaattaacagacccca

SEQ ID NO: 248157 - DNA, 1021 bp, Homo sapiens
tagaataaccagagaagaccaaggcaagttttaaaaataacttggtacacatgtaggtgaaataaccttacctcccagtagctgagagaaaaaaaaaagatctcaatgctggctgttgttccaggatatttttagtaagatggccctgtcgtctttgatggtcaatgaaggaataatggcagaaaaaaatattaggcgaggagaaggctacgggcattgtttggtgtttcatttaatttccacctcatccaccagagaaaagcaaacataagcagaggttgatgatgagcacagtagaaaggaaaatgtgatgtgtcttttccttgtagttggttgataatatgtgatttgcttataccacattctgatgggaggtattttcagtctgtggctttgtaagttgaagggcctcctaagaaactcctgtttcgtaagatattctctgtcttaacttttttcaggaaaaaatatgattttttggagttgcttaatagtttttagcttttaaataagtatagtttatttaccacagcatttgaactgtcaggattttactgtgaatgctaccagaaaggtttgttctatttttacgagaatcttcttagggaaattgatgaacctggtaacctaattttagacctcctgaaatttgacagatggatggtatttattgtgttctgaatcggtccctattagacatttaaaaatagtcacatcattagagaatacattcaaaaaagaaaagatttttaacccaaaatctaatgcccagaaaatttttagtctcctaaactgggtgtgcattttggtaacagtttctaaaaagcctttttgtactctcctcattctctttcctgtgtgatgctgctgttgtcatggaaacagatcttggagttgctttgttaataccgtgtaagggactccctgaaatggagagttactgcaggtcattatcatcaacacagagctttaatatcaagtgttgtgctatgatgcgtacactacaaagcacagaaatctg

SEQ ID NO: 248158 - DNA, 553 bp, Homo sapiens
agcagggtgactttcaccctgcaacagtcacgctggagtactctggtgaaggatcaagaatattaccagttttctgatgaagaaaggaatatatttggtcaccagcaatctgcctttgaccatcctcaaagccaagtttttcatcgctgtctagaaaaatacttcattcagaggacacatatgtcctctttgaatgtctcctttttgggagcagtaggagaaagaaacttcaagatgtagaaagaattaatagtgtaacggaaagaaagaaggcaaaaggaagtaaatgtggaggccatagaaatagtaataagaataaagaagaaaaacaggaaagaagagggaaaagccatagaaaataacagccagagcgagtaggaggagacagagagaacgagagagagaaaagctgataaattcctgagaaaagtttctcttcttaagaattctaggtcaagaagtaaaatatggcacagagcattgaaaggaggcaacggatgcccagtgcaagattctgaagaagcaggaattcagcccgatgggagtccgagtt

SEQ ID NO: 248159 - DNA, 384 bp, Homo sapiens
taatgacaaacttttaaatttatttagttaccttaagaaacttgtaaaaccacattttatggaggtaaactttacccttcttttcaaagaaaaaaaaatatatatatatgatcttttataatggctcttctttgtgagtcaaagggttaaaaccatctcttttattcccaaatgagtatcagcaccattcagaggtgccatgttttatttaaaacatactcttactcagtaaccactttgttctaattggcaaggcaaagccaggtccctaaagcacacagcccattacattcagtttggattaaaaaacacaggatgaaacaaacggcatcgaaatgtacaaattaacagctcaggagtatgggacagagaggtggaattaga

SEQ ID NO: 248160 - DNA, 225 bp, Homo sapiens
tcgatacgacttttctgtttctctctctctctctttctgtctgtttctctctttctctctctgtctgtctctttctctgtctgtctgtctctctctttctttttctctgtctctctgtctctctctgtgtctgtctctctgtctgtgcctatcttctgtcttactctctttctctggctgtctgcctgtctctctctctctctctgtctgtctccgtccctctct

SEQ ID NO: 248161 - DNA, 770 bp, Homo sapiens
  misc_feature (28)..(28): n is a, c, g, or t
  misc_feature (31)..(31): n is a, c, g, or t
  misc_feature (43)..(43): n is a, c, g, or t
  misc_feature (49)..(49): n is a, c, g, or t
  misc_feature (52)..(52): n is a, c, g, or t
  misc_feature (60)..(60): n is a, c, g, or t
  misc_feature (76)..(76): n is a, c, g, or t
  misc_feature (150)..(150): n is a, c, g, or t
ccagcaatttcctcttcgggggccaacngtntttttgcaaatntggaancangggctggntttcagactttctctngtctacctcagcggccgatgaccagagtggcagcgtggtgatcttggtgggcattactcttcttactacactgnaaggtctgaactgggtgccctgttaccgtgaagggttactggcagatcaccgtggacagcatcaccatgaacggagagggccatcgcctgcgctgagggctgccaggccattgttgacaccggcacctctctgctgaccggcccaaccagccccattgccaacatccagagcgacatcggagccagcgagaactcagatggcgacatggtggtcagctgctcagccatcagcagcctgcccgacatcgtcttcaccatcaatggagtccagtaccccgtgccacccagtgcctacatcctgcagagcgaggggagctgcatcagtggcttccagggcatgaacctccccaccgaatctggagagctttggatcctgggtgatgtcttcatccgccagtactttaccgtcttcgacagggcaaacaaccaggtcggcctggcccccgtggcttaagcctaagtctcttcagccacctcccaggaagatctggcctctgtcctgtgcccactttagatgtatctaattctcctgactgttcttcccaggggagtgtggaggtcttggccctgttccctgtcctaccaataacgtagaataaaaacataacccactgaaacag

SEQ ID NO: 248162 - DNA, 882 bp, Homo sapiens
  misc_feature (28)..(28): n is a, c, g, or t
  misc_feature (31)..(31): n is a, c, g, or t
  misc_feature (43)..(43): n is a, c, g, or t
  misc_feature (49)..(49): n is a, c, g, or t
  misc_feature (52)..(52): n is a, c, g, or t
  misc_feature (60)..(60): n is a, c, g, or t
  misc_feature (76)..(76): n is a, c, g, or t
  misc_feature (150)..(150): n is a, c, g, or t
  misc_feature (525)..(525): n is a, c, g, or t
  misc_feature (534)..(534): n is a, c, g, or t
  misc_feature (539)..(539): n is a, c, g, or t
  misc_feature (562)..(562): n is a, c, g, or t
  misc_feature (579)..(579): n is a, c, g, or t
  misc_feature (584)..(584): n is a, c, g, or t
  misc_feature (588)..(588): n is a, c, g, or t
  misc_feature (599)..(599): n is a, c, g, or t
  misc_feature (607)..(607): n is a, c, g, or t
  misc_feature (630)..(630): n is a, c, g, or t
  misc_feature (643)..(643): n is a, c, g, or t
  misc_feature (646)..(646): n is a, c, g, or t
  misc_feature (670)..(670): n is a, c, g, or t
  misc_feature (676)..(677): n is a, c, g, or t
  misc_feature (692)..(692): n is a, c, g, or t
  misc_feature (697)..(698): n is a, c, g, or t
  misc_feature (703)..(703): n is a, c, g, or t
  misc_feature (711)..(711): n is a, c, g, or t
  misc_feature (726)..(726): n is a, c, g, or t
  misc_feature (739)..(740): n is a, c, g, or t
  misc_feature (760)..(760): n is a, c, g, or t
  misc_feature (783)..(783): n is a, c, g, or t
  misc_feature (801)..(801): n is a, c, g, or t
  misc_feature (810)..(810): n is a, c, g, or t
  misc_feature (817)..(817): n is a, c, g, or t
ccagcaatttcctcttcgggggccaacngtntttttgcaaatntggaancangggctggntttcagactttctctngtctacctcagcggccgatgaccagagtggcagcgtggtgatcttggtgggcattactcttcttactacactgnaaggtctgaactgggtgccctgttaccgtgaagggttactggcagatcaccgtggacagcatcaccatgaacggagagggccatcgcctgcgctgagggctgccaggccattgttgacaccggcacctctctgctgaccggcccaaccagccccattgccaacatccagagcgacatcggagccagcgagaactcagatggcgacatggtggtcagctgctcagccatcagcagcctgcccgacatcgtcttcaccatcaatggagtccagtaccccgtgccacccagtgcctacatcctgcagagcgaggggagctgcatcagtggcttccagggcatgaacctccccaccgaaagtacttcccccagtgggangctcccacnctggnagatgaacagcccctggagaacnacctggatatggagtanttcgncacnatcggcatcgnaactcctncccaggatttcaccgtcgtcttngacaccggctccnccnacctgtgggtgccctcagtctacngctccnntcttgcctgcaccanccacnnccgcntcaacccngaggattcttccacntaccagtccaccnncgagacagtctccatcaccntacggcaccggcagcatgacacngcatcctcggatacgacnctgtccagnttggagncatctctgacaccaatcagatcttcggcctgagcgagacggaacctgctccttcctgtatatgcc

SEQ ID NO: 248163 - DNA, 706 bp, Homo sapiens
gtttatcacccagcgcctatcacggctgaatcggtgtcccagctccacttttattctccttttctccagagcgaggggagctgcatcagtggcttccagggcatgaacctccccaccgaatctggagagctttggatcctgggtgatgtcttcatccgccagtactttaccgtcttcgacagggcaaacaaccaggtcggcctggcccccgtggcttaagcctaagtctcttcagccacctcccaggaagatctggcctctgtcctgtgcccactttagatgtatctaattctcctgactgttcttcccaggggagtgtggaggtcttggccctgttccctgtcctaccaataacgtagaataaaaacataacccactgaaacaggttttgtggagctgcttctctttgctggtctttttccttcacattactggggttagaacaccagggcagggatgaaaatgaccacatccatttggatggcacccaacatagtgaccccagcagctgacacttcatgatggagccaagaagacagagaggcttcgggggttgtgctggaagcatcataaaaagacctgggggtcaaaatactgggctaattgtcttctcatagaagggacacagagctgagatcgtgccattgtactccagcctgggcgacacagagagactccagctcagaaagaaaaaaataggtcactg

SEQ ID NO: 248164 - DNA, 284 bp, Homo sapiens
taaacatttttttttccatgaacaatatatgaggtctcaatatgcagtatatgcaacaatatacgcaacaaaaatataaacttctctgccctggaaggtagatctcactgttttttaaggacaggaaatggtcaactctgaaggtgagagaaacaaatttttctaaaatccttcatttcctttataccaagaaatacccataagtgaaaatttaacattgaaatttgtgtattttccagtatgcttaactttagaaatgatctgtagctgtagaaacccgattt

SEQ ID NO: 248165 - DNA, 417 bp, Homo sapiens
caaaccatccagacggcacagggggaggtcatgggaagcataaacaaactttacctacaccctcctgtaagttcctgttcatctagctgctaccataaacgtcacacggtgatatgtggcaaaattaaccagcaaacaacctcgggatgcggccataccaaagaactgcctcaaactcccctccccaatataaacccctccttctgtaagtttggggctgcttcctctctgactgttaagggggcagccggcaggttaacaaaaacttgcttgcctgactttgagtctatttttcctttctctcgggtaacctcacaccaacctccataatcatgtgagccaattctgtaaaataaatctttccctatatacatacatcctattgtttcttttttttttctggagaatccttattaa

SEQ ID NO: 248166 - DNA, 723 bp, Homo sapiens
ctttataaaaatgccttcttccttccttcctgaaggtctgctcagcaccctcaaactttttaccacctgaaaatcttttctatcaattttaccacaatggggggaggtgaatttccacaaaagatcttttcactttaaaaaattgaaatggccacataatttctcctcctaactgtgccgaagtacctaaaagtcacaggttggcattgctaggtcagccttttgcaggggccacacgtgcccaaggcccttacacacccagccaggtgttacagagcagcctctcaccatcaggctctgtgctagtgctgggaaaagattctgctggcatttaaaagtattgcacaaggaggccagatgcagcggctcatgcctgtatccaacccagaactttgggaggctgaagtgggaggattgcttgagtccaggcattcaagaccagcctgggcaacatgatgaaatcccacctctacataaaattgtttaaaaaattagccaggcatggcagcacgtgcctgtggtcctagctgctcgggaggttgaggtgggaggatcacttgggcccaggagttcaaggctgcagtgagccatgatcacgcctctgcactccagactgggtgacaagagacagacagatgaatgaaagaaagaaagaaagaaggaaagaaagaaagaaagagagagaaagaaagaaaaagaaaagaaggaaaggaaagaaagaaa

SEQ ID NO: 248167 - DNA, 641 bp, Homo sapiens
tcatgaaactagatggtcccatctgggggtgatgggacagaatgacacatcaggcattagattctcataaggagcaagcaacctagatcccagatcccttgcatatgtagttcacaatagggttcatgctcctatgagaatctaatgctgccgctgatctgacaggatgtggagatgcaaatgatggggagtgtcggtaaatacagatgaagctttgctggattgctctctgctcacctcctgcggtgcagccagcccgttcgttcgtaacaggccactggtactggtccgtggcccaggggttggggacccctcttctataggaaatgtgccaattcgagggagaaggatagataggtggagcacatcttacttttctactttgatatgtatgtgaaacaagatgaatgagttggtctttctattgctggaggtgttattaaaagggtggtaaaaacctctgctgcttcttataaaagatagcaaacaagactgcgtgggatctgtgacacgggcattttcaaaagaggttaaagaataagctgagaggtacaaggatcgcttgagcccaagagttgtcaaggctgcagtgatcgtgccactgcactctagcctggatgacagagcaagaccctgtctca

SEQ ID NO: 248168 - DNA, 226 bp, Homo sapiens
cagtcacctatctttttgaaaatacttaaggtggacttggtgatgtctgtcttctcataatttattataagcaattttaaaaaggttctgcttttaaaaagatcttttcaaatgtagaaagaacagtgtgaaatgtgaatgactggcttttaatacaagggttgtgacaaagaggcagtggcttttggaagccaaataaaggggtgaatacacgtgcatctgcata

SEQ ID NO: 248169 - DNA, 354 bp, Homo sapiens
cacacacctgtagttccagctactcaggaggctgaagtgggagagtcacttgagcccggaggttgaggctgcagtgagccgtgatcagaatttctaaaattcttttcattctacaattttgctgctttctatattaaaagcctctttgggtaatttatattttaaaaaaaattcctaattatctcaataaagtttgtttttcttgggtctttaagaatttagagagaattaaaatagttttgtgtttaatagctctgattctggaatcggtcaattaaggttgtaacatttaacatctaggacatccaggaaaaattaacctctctgagcctctgttttcttttctataaaatg

SEQ ID NO: 248170 - DNA, 162 bp, Homo sapiens
gcttcttttctgtaatgcagcccaggttttatagtggtgacagggaaggtcctgggaagaaaaggcctcttctggtagttggggagtgtgccctcaatcctgaaaagacacatttctacagaggtattcccaccatgcgtcttactctgtaatgggcagggc

SEQ ID NO: 248171 - DNA, 434 bp, Homo sapiens
ccagaaatagaaccagatacacctgaaaacttcatatatgaggtttaaaatcagtgtggaaagctggaaatcacccatagtttcgttatccagtcagttgtttttcacattttggtgtgtttccatttagttggtttgccatacttttttaaaaataatgctttaaggctgagcgtggtggctcacacttgtagtctgaagcaggcagatcacttgaggtcaggagttcgagaccagcctggccaatctgatgaaaccccatctctacaaaaaatacaaaaattagcctggtgtggtggtgcttgcctgtagcctcagctacttgggagactgaggtgggaagatggcttgagccagggaagcaaaggttgcagtgtgctgagatggcgccactgcactccagcctgggtgataaagccagaccttgcctcaca

SEQ ID NO: 248172 - DNA, 456 bp, Homo sapiens
atatggaattgacctaaatgttcaccaacgtatgcgtggataaagaaaatgtgatatttacacacaatgaaatactatttagccatagaaaagaataaaatcatgccttctgcagcaatatggatataacggaaggccattatcttaagtgaaacaagtcagacacagacaaatggcgcatattcttgcttgtaagtgggagctaaaaataatgtctactcatggacatagagtgtgaaatgacatacaatagagactcaaaaaggtgaatgggtgggagtggggtgaatgataggagattacttaatgggtacagtgtacattgttgggtgatactctcagatacctgattcaccattgtatagtcttacgcatgtaacaaaactgcatttgtacccctaaatttacatgcacacacaaaagaataaaaataaacttaaaaacttagaaatgaaa

SEQ ID NO: 248173 - DNA, 612 bp, Homo sapiens
aagtcacatacaggtagaccttatgacatttccagttgaaactaggcttgctttcggtacacaggtgaagacttgaggaagccagtgccagagaggacgtgcctcacccctcagctggctgaatgcgcttcattggcttacgctttgctttctgtatgctttctgtccttctgggtggtgtcgcatatatttttaaaaccacattcagtgtgatgaacacttgttggtacacttctaaggttagtcatctttccttctctgagcagatccttgagaagggcattgacagtggatgctttaaatagtgttcagtttttaccagtaataatattttttggtggatgtcatgaaaacacatgacatcgtgttgtgcccatgataaaaagtcctgactttttattgaatgaggtgtgctggtcaaagagacagacgtggctgccttctctggtaacagccagaggaaaaagttagcaattctagatgggttctacagctttaaaaaacttgttgtatccttaggtcctcataatattaaatattttctaattttaacagattttaagagtcagatatatactttgacttgaatgatgtagtgttgcttaaggaaga

SEQ ID NO: 248174 - DNA, 262 bp, Homo sapiens
gaacgcatcccatcccaaactgcaaaaccacaagcatcaacagcaggagccgagcaaagtgctcggcggaggaagaggaagggcgagggagagaaatggtcgagtacagaagcctgcgtgtgggtaagaaaataccctaaccactcgcccaccggacgcagggcggctgggactgcgaatccagcagcagccacagcgtagcagcgggcggcagccgccgaggcagcaatgtcaggagggcacagctggaggaggcggccgc

SEQ ID NO: 248175 - DNA, 442 bp, Homo sapiens
actgctaccgactaagcagtacgggccgcctggaagaccgaaggcggagttcgctgatgcggaagccaaggcacagggcaataaggatccgcgccatttcttgtgatgtcacctgaagccttggcgggtagctgcctctcatccattcggaggacagggctccagccaccggcagctctgaaagagtttgaagaatttattgttcacagatggtatttaaatggacttatttctaaaagtcacattcctttattacttatttgttattagaagtacccattttcatatgtgtttaaaactatttgtgtctcaaattctcaggagattgatgcatcccagtttactctttttggcatatgtttttactcataaattaggttaaatttcatacttgttttataaaatttagttatttggttacattaaaatatttgtatccaga

SEQ ID NO: 248176 - DNA, 920 bp, Homo sapiens
atatttagacacattcattgtgacacatataacatgtgcattctttttatctttttctcaagtgggtctatagttgtgatttcacagcagattggggttgttggccattgtttgaagctctcctactctctttctagcatagtcagtgtgttgcagagaactaaagggagtaaaagacacagtgcctcattgaatcctaacattttcttcctggtagggcatatatcccaccttccatatatcctgctgtgaggtgccaataatgttcttttgttccaaaacagaacattacttagaactttctaaaatatgatagaacatgaatgtttacaatacagcatgtcagctatgtaaactgtaaaacgtaagtcacagttctttttgttctgtattggtgaatcattgcaaatttttcaccaagtgcaaaacggaaagaggaactatgaactccatcttgtagatttgtagattcgccacaaccaagtctgactgtgacactcccaagaaatctgtatgtaatcagcattgcttaaatattgttagatctaatgtgatcttctgctcttaaaactcaagtacatctaagggcattgagaatggaaagtctgagttctggtactagacaagagcagccctttaggccaggcgcaatggctcacacctgtaatcccagcactttgggaggccaaggtgggtgggtcacttgaggccaggagtttgagactagcctgggcaacatagtgagtacccttctctacaaaaaacaaaaaaattagctgagcatagtggcgtgcacctgtggtcccagctacttgggaggctaaggagggaggttcactggagcccaggaggtagaggctgcagtgagctgtgatcttaccactgcattctagcctgtgtgacagagtgagaccctgtct

SEQ ID NO: 248177 - DNA, 844 bp, Homo sapiens
ttataatcagtgtgcagtggtcggaaatgggggaattctgaataagtctctctgtggaactgaaatagataaatccgacttcgtttttaggtgtaacctacccccaaccacaggagatgttagtaaagatgttggcagtaaaacaaatcttgtgactataaatccaagcatcataactctgaaatatgggaacttaaaggaaaaaaaagccctatttctggaggacattgcaacctatggagatgcattttttcttctgccagcattttccttcagggccaacacgggtacctctttcaaagtatactacacgctcgaagagtctaaagcaagtttttcaccaagtgcaaaacggaaagaggaactatgaactccatcttgtagatttgtagattcgccacaaccaagtctgactgtgacactcccaagaaatctgtatgtaatcagcattgcttaaatattgttagatctaatgtgatcttctgctcttaaaactcaagtacatctaagggcattgagaatggaaagtctgagttctggtactagacaagagcagccctttaggccaggcgcaatggctcacacctgtaatcccagcactttgggaggccaaggtgggtgggtcacttgaggccaggagtttgagactagcctgggcaacatagtgagtacccttctctacaaaaaacaaaaaaattagctgagcatagtggcgtgcacctgtggtcccagctacttgggaggctaaggagggaggttcactggagcccaggaggtagaggctgcagtgagctgtgatcttaccactgcattctagcctgtgtgacagagtgagaccctgtct

SEQ ID NO: 248178 - DNA, 380 bp, Homo sapiens
ctatacttgaatatattaaattatagacataagtttctttgaaatatttagaaaaacaaaagttttagaatatggaaatccaagcttacattatattggcaaattatgtatgtttcaattattcactaaataaattttagctaaatgcttataaataaatatatatatgtaattgccaagttagggtttgctttgtattcacatttctaaacgctggacaatagagcttctgtggatgactgttttgctgtaattccaactgtctagttatgggaactaataatttattcttcaaaaggtattaagcatttaattttacgtggacaattatagagaatgtactaactgcattcgtttattaaaaaattgtcaaaatgtga

SEQ ID NO: 248179 - DNA, 550 bp, Homo sapiens
tgtttttatttcttgtaacatttttagttgggaactcttggctaataaaatcttctaattttttttaacttagaatctagagcaacagaatgtaatatataagctcagattcctaagttactcatgcctctgactttttatatgaggctagcaattcatttatttaacaatgtcatcatcatggtaatcatcaaaatgtacttgaggcatttatgtctgtgttcccatatctttcccactatatgaagtacaataaattgactaagacctcgtgtgtgggactttataatctaaggcagaaaaattaatacagatgagcatgcaggtcatctagacagctaggcaaacactgacacaatgtacaatactgtattaaaagcatatataatgcattgagtgactatacattagagtaaatgaaagatgaattataactgggcagagtggcacgtgcctgtaatcctagtactttgggaggctgaggtgggaggatcacttgagcccaggaattcaagactagtctgtgaaacatagtgaaaccctgtatgta

SEQ ID NO: 248180 - DNA, 421 bp, Homo sapiens
ctccagcgttagggcttcagcagaggcggttgctaaggcgcaccagtcctttacttcggaccagtctgaccttaacgggaaaggcaatttccctttctgtatggggaactcatttcctttgttgctttccttattttcctcccagggtcttttaattccatcctgattggggcctgagaggagggcatgggtgaggtgtgaaccagcagcgccctttcttccttctcgctccgcccccaggcaacaccctccagcacccaagcctaccctcttcctccaacggaaaaatgcacacggcatatccgtgtctgtccacatgccggatttcccggccagttctgatgtgaaatatcttgaaagtttgctaaggggccactttatattaaaagaggattaaaaaataaagaaaatcccatacctc

SEQ ID NO: 248181 - DNA, 305 bp, Homo sapiens
ctgagaaaccaaaatgaataatatcttggaacaatttcaaaacaccaagttaccaactgctggcagccgaggcccagcaagtcaaccacctgacagtgattatggagagacaatgacaacactctaccacaaatcacaacgcctctacctagtgccctgcccaacatggcatttcattggtttttgtgtctagccttctgagcccattccttagcctcacttgaccaaagaaaaaaatcgaaaagacccaagtaataaactgaattgataaatcaataaaataggtccactatttccttgaccaa

SEQ ID NO: 248182 - DNA, 401 bp, Homo sapiens
ttccctactctaatatttgttttgtaacttcgataccatgcacttcctcccacagttagctactaggaatataaggactagcagctaccagattattataatagtcacctaagtcagaggtcaaaaaactaccagctaaatttgtactgcacccatatttgttttgactttcatagtattccctttacacaaagcatgtgtctccagtttgtcacaggcccctaaactgtagacatttttttttaccctgagcctacttgattgtgtttcttgcccacatctgtagatatttgattttgcaaacaaggcttaatcaagcattattaagaagtaagtttgttgaacaaatcccaaaatattaaccaaagaaaaacattaaagcagatgggaattttttttaa

SEQ ID NO: 248183 - DNA, 540 bp, Homo sapiens
ccaaatttagctatattagggattaaggattcaacatataaattttgagaggtcacaaacattcagtccataaaagaatctagttgtttaacaaggattgttgagccctgatatcttgttatacctgcctgtgtccctacccccattcccctccactctcatttcctcacaaacactcagataaggattttttttgataccgtttttgttacttatcaaactacgtagtaacattatgaattataaatgttattagccattgagaaagtagctgtgcactgactgactgaccccagttgactgggagggctggatggtgccttctctgtggtggaagataggttggagaaatgtggttggtagtaaatgatgtctgatttgagcagctttgaagaagtctggttctagttggtttcagttctttccagatgccatttgaatctaaaccaattttccagttcttatcattacagaattgtcttctggaagaattatttctttgtattacttggtagcaatatggatgtagttttgtgaatc

SEQ ID NO: 248184 - DNA, 637 bp, Homo sapiens
agccatgtgtcgtggcttgcgactgtagtaccacctcctcgggaggctgaggctggtagaaccacttgaacccgggaggcagaggttgcagtgagccaagatcttgtcactgcactccagcctgggcaacagagtgagagaccatcttaaaaaaaaaaaattttgagtcattctgtataaataggttatccagattttcagttctaagtattatgtcatgatcctttccccatgacactgaatgttctaagaaaacatgatttttggctaggggtgatagctcacgcctgtaatcccagcactttgcaaggccaaggcggggtagatcacttgatcccaggagtttgagaccagcctagccaacatggtgaaaccctgtctctactaaaaaaaaagaaaaaaaaatttagctgacgtggtggtacgtgcctgtagtcccagctactagggaggttgaggtgggagaatcacttgaactcggggggcggaggttgcagtgagctgagattgcactgctgcactccagcctgggtgacagagtgagaccctgtctcaaaaaaaacaaaaaaaaaccatgatttgtaaaagttgcataatatttcattttataaataatatatttagccactcatctgta

SEQ ID NO: 248185 - DNA, 399 bp, Homo sapiens
cggtcctgttccttcttttgctttctgatcggttattacacttgtaagtagaggtgctaaggagttccccagaagagaagagtataattccttttgaagaccagtttcatttaattggatcatagacttttgaatactgtttgcactatactcattttggggaggggttgggggtggaaggaacttgttagaaactgcaaatttctgtgcttcaatcccagagattcagaggtagttggtctgcgggtggggcccaggagcctgcatttcatcctaggtgagtcagattttgatgttcctctggtaaatattagcctaagcaaggggtcagcaaagagacccgccggccacatctggcctgcagactaagaatggtttttgcatttttaaaggttgata

SEQ ID NO: 248186 - DNA, 447 bp, Homo sapiens
gttttagtgtacatgtgcacattgtgcaggttagttacatatgtaattaggtttagatgttctgaatggttttaaaaccaggcacctgaaaagtgaaaagcactaagccttaatatcatgtctatgcaaaaaaagcaaattcaagaactatgcatttagcttgtaaattaaaagtcatcatcatgactaatctgaataattctggtcaaagtggaccagatgtagataaagcttttatctacatttaactgcgcatcacttcatttgttaacagaagacaaactcatgagcaatagggtatctgagcgataatttgctgtttcctcccactcctgtttgacttcaagcaatttaaggatccaaccaatccctaaacatttaccagcccacccctgtttgctctccactgaatgtgccaatttgcatcatgacgcctacatgttgtta

SEQ ID NO: 248187 - DNA, 676 bp, Homo sapiens
cataaagggaagtagcaatggaaactatttcttctggcaacttggaatatgagaagtccctggtccttgggccatttttcaaatcagtgagtgtgggaggtataatatttgtgtgtaccaatttcttccttattccattctctccactgctgatgctgcctatactgaatgcaatgaaagtctggaacctaaggaagcctttgggtgttagcttaccttggagtcaagctgagcagtcttcttgttttccagagccatgaagtgagaagagacacaattgccaaagctgtgatggaaatcatacagctttgaatttgttttagtaacatggaattctaacatgtgtcactgttcattagtactggcttttcagagcctcgtgaattacttgggtacaaatccatgacattagaggcatgagggattagaagacaatccaacaccactctaggattgatagtttaggaagaaatgcaagaaatcatctcattttgtttggttggttcattcctaccccccattctccacatttttatgaaaaattttaagtatatataaatgtagacaaaatagtaaaattcactcttatgtatccatctttcagcttcaaaaatcatcaactcatgccaattcttctctaaccccttgttgtccccctcctctgattatttgaagc

SEQ ID NO: 248188 - DNA, 482 bp, Homo sapiens
cctaggagctagaaatgaagtggtaactgaataccagagcagtgaacagcaggcaggtcctgcagctcatctgggattatttactgattgtggaaaccagtgagaaggtggtttttgtttgtttgttttcattatttctagaataggaaacaacgctttgggccaatggaagagcaggaattaaatgcctaaataaggcagggaaattcttacctgccttgaaaggacaacataagtttgtccacaagtataagaaggcagcgtgaatatttgcctatctcagaatgggatctggatggggagtgaacaaagtatctgctgggaatttgttgctcctgtcctttctttaccaagctttgggttttgaatttacctacatgaccctggaattccgaagccaataaattaaataaaatttagtctactaaaaacttttgctgaagaagttactggagatgttcttcaagagaacacaaatctag

SEQ ID NO: 248189 - DNA, 424 bp, Homo sapiens
gacgcacacggaggcttgcggacccatactcacaggcacatgtggcctggggactgggggagcaggaaagacccctccaacatttggcccttggaaggcaccattgccaatgagcctctttgctggttcccccgaccccacctgggggtcccatgggagcccagcccagccaggtgtggggatgggccaccggccattcctgttttccttgtacagacagattctcactacccacccgccatccccagacacattttatttaataacttgtcattgttaaattatttattagcgtttaccacaccaccacccccaccctgccctccactctcaccttccacctcttcccacaacagcagaaaatggaaacaacaacaaaaaaagatgagacatcagtatatttgtaaataaaccgacctgtaca

SEQ ID NO: 248190 - DNA, 453 bp, Homo sapiens
tagatgatgaaggaggtcataaacagagagtagattaatataattatctttatttcatgtctatttgcaaatgggccattgttcacatagttgtctctctttctaaatggaagaatagttggagttgggggtggggaaataccagaactgagaggagtaaaggtgcttcaagacaatgcttcttaaactttggttttgtgtttgcatctcttggggatcttgtttaaagtaggttgagattcagtatgtttggggaggggcccgttaatctgattttataaaaagttcctagatgatgccatgctgctggtctctgagaagcaagagtctggggtcctttctaaagtgtttcctctctcctctatacagtcagaaaaggaaagtgcttactggtcagagatttaaaagacataggagatataccacacttctataagaccagaaacaaaaaca

SEQ ID NO: 248191 - DNA, 599 bp, Homo sapiens
tttgatttgcatttcccaaatgactaaggatggtgagcatcttttcatgtgcttattggctatgtatatatatatattctttggagaaataactaatcaagtcctatgcccatttttgaattgagctgtttgaggttttttgttggtgagttgcaagaataatttttttctttttttgagacggattcttgctctgtcatcaggctggagtgcagtggtgcaatcttggctcactgcaacctccgcctcctgggttcaagcagttctcctgccttagcctcctgagtaactgggactacaggcgtgcaccaccacacccggctaatttttgtatttttagtagagatggggtttcactgtgttggccaggatggtctcaatctcttgacctcatgatccacccgcctcggcctcccaaagtgctgggattacaggtgtgagccactgtgctcaaccagaataatttttatatcctgaatattaatcccttatcagatatatgatttgcaattttttttaattttgttgtcttttcactctcttgaccatgtcctttgatgcacaaaagttttaaatttttattcagcctagtttatctg

SEQ ID NO: 248192 - DNA, 629 bp, Homo sapiens
taaaacagtgttctgcttgttgccccccaccaccgccaccaaaagccctgacactttttaaagttaccatgggtgagttcaaagctgggcgtttgaggggcttcccatttttccccaacagtgttctcagagtggccgtgtctgggaagcggctgggtcccggggattgaactctggggttccaggctatgagccctacaccaggcttctcttgtgtcaacatgaagaatactccattttaaattccaagtgataactctgtattcccacaagtggtatatatcgtaaatattaaaacgaccattgtttttagttggtagacatcgagaagtaggaaaattcgcgatatcagaaagggactgcaggaaacgcctcccttcctggcttcccttgctccaggagatgcttgggaggcacccgtttcacgccaggaaactccgtaaaggctcccgggacgggcagaagccccgcgccccggctgcaccccgcgcacctgctcgtggcgcgccagcagcgcgggccaggcgcagaagcgcagcaccagcaggctgcgcgccagctcccaggttcgccagctgcagtacgcctcctacgcgttgccgaagtccacggcgggcaccagcggccgc

SEQ ID NO: 248193 - DNA, 518 bp, Homo sapiens
tgacagggacaaatatttcttcccttaaaacattctgtatcttcattaaaacaattatcacttttagtgctctcacagaatttataaatgtattggaaatgaaaggagcaccaccaaaaagctggttttctttaagggatatttttgaattgggtagtagggaaggctaggggctagtccagaagccaaagccatgctgcagggctggataagtgataggctgcattaaacacacagtctctcttcatgacactgacagtttttggactttcataaactgggcattaaagaagctaaaagttaaaggaagaaatttttgctaggtttttactaaaaatggaactcagtcctagcccagatcagtttttgatttgaccacaatagttatcttctcatgctgttttactataagaggaaagaggagaatctttatgggtagaagatattctctgaatatatacaggttgtttttttttttaaataacatctggctcgaaataaaaaaaaaatactatata

SEQ ID NO: 248194 - DNA, 731 bp, Homo sapiens
cgactgtctccaaagtttttgatgcaaaacagattaaactccccattactaaagagccttggatccaggtgtaaagaatgaagataaagggtaagtacaggcagtagagaaagcatagagataatgaaagatgaggctttcttatttgattttactagagccaatggaagtaacaagtttaaatgttctcattcatttccattatttaaacatagaagactacccagggacagaagggacccctcggaacaggattcccagaaatactcttatcccagcatacaactcctcagggacaggtgaggggcaagaactgggttttcaactctttctacatgtggggtttctgggagtgctgcatgtgggatcagtggagtcctgatgcttctgggcttgtactaggagacatttcactatggccgggatgaattcccaggccatggatgcctaggctgacattgaagccttctcatggctcattctatcagttcaatcttctggccagctctttggtcatctttgagattagattaagtagatgggatgcattccaagacatccttgaaggtccagagggcaaacacagctggcagaaagaacaagttgaaggatatccttggctttgatagcggatgaccctctagatctcaacagccagagactctgtcaaggatcctgtgtcattcagccctagacttcagaggcagcccgacaacaatggaaagagtgca

SEQ ID NO: 248195 - DNA, 971 bp, Homo sapiens
agatcatggagatctctatctcctaaacaacaaatattgataattttaaattactttttctccacctaaatttacctatttgatacgatgaatgaaggtcaacatggattaaaaatttggatatcagtctatcattagagaattaagagactggtatagagagaaaaaaatagatttaggaatacataccttcacgcagtacatggaagaaacacctaactgttgtgacatcaaatatgttaaagcgctttcattaacttaattttaggaatatcaaaatgcaacgtgtaaatccggttaataattagaggggatgccagcatgcacacagctcctccaagatagccagttaagatgatgtgtgagtaatagaaaaatcatttctatttttggaatggtttatataatttttcaacagaaaattacaggattagaaggaacctaaaaggatgatatggtccagtaccctgacgtcaataaatgagtggctatttttcctgatttgctcttttcataaaattgttgcagaaatgaaaactgcttgccttctctttttgccattccattattttaaccatctgtgggtcaaggagttattcttaattattactacgtttagtttctttgttgaaatagagaagagttatagttagtatcttttaaattaaacattttttgagtactagctcttactctagtttcttggtaccatatctttcagctttctctcaaaaggtattttcattcttatcaatgcttttcctatcattctggatacttcgttaagtttatcttcatttctctaagaagtgtaaggtgtagtggaagtattaatttagtattcttgtggtttctatttgcctgttttccctttgagagcagtacactccttttatttctgaatactctgcatcagagccccttgtctggcatgtagaatatgttcaataaatgtttattgaatgcataaa

SEQ ID NO: 248196 - DNA, 466 bp, Homo sapiens
tatgaattattctttttaactcactttggcaaataattgtcgagcatttactatgccttacacggtgctaggcttgtcccttctgtcaagctgtttatatttcactaaggataagagatacagataattagtttaagtgaaaagagttataacaaatgtgtatgtggcagaagataatggtggctgtggtgggagtggtccaggagggtgccacagagatagccgtggggctgggcattgcttctgaggagaatctcaaaggagggtatgtaagaattaattggataatggatatgaatgtgctttattagttgccacataaatgcagctttttacaactgtcaattcttacagaaggtgcctcttttctagaaaccttggctgaccgagtagaacaccatagttggagtccaaacttaattaaagtgagaagaaagattttagtagattgagattttatattaaa

SEQ ID NO: 248197 - DNA, 621 bp, Homo sapiens
tgtagatgcgggctgcggacagctgtcagctgttctagtccaggagtctccccatcccttttggatttccttaaccctgcctaactcagtcacaagcccctccatctgtgtctcttcatttgagccacctggggggaattctgtttcctgtggggacctcgaatgatactggggtggacccattctttattgaggacctacgctggcagccatctgcctaaaggcacacactgggaggaaggagtccagacctcccagggtagcacacatccctctgggagggtccaccattcacccggcttgctttcctggccactgacacccctccccaggccccaccgcaagtctttgtacaccaccttagtggagtctcgtgtgtggccctgtgaggcagggtctggctaggccctctaagggatgtggaaacggaggcccagggaggctggggctcttccctagggtcacccaactttgcacagcagagtccagttccaaatgtggggctagctggctccagtgctgagcaacttcctctgtgctgtgtgggaggttcgtcttgctcatgtagctcacgtagaacacacacacacacacacacacacacgtgcacacacaggccca

SEQ ID NO: 248198 - DNA, 392 bp, Homo sapiens
tcttagtatacacagttttggaaatttacaattccaaatattgagtgatagttgtgcctttctattttattaaactggaaatctttgtatcagaaatgtatttggggccatgtgctgtgactcactcctgtaatcccagcactttgggaggttgaggcgggtggattgcttaaggccaggagttcaagagcagcctggccaacatggcaaaaccctgtctctactgaaaataccaaaattagccaggtgtggcagcccacacctgtggtcccagctactcagaagactgaagcatgagaattgcttgaacccaggaggcagaggttgcagtgagctgggatcgcgccactacactccagcctgggaaacagagagagaccctatctcaaaaa

SEQ ID NO: 248199 - DNA, 454 bp, Homo sapiens
agataaattccacttcaaaaaggactgattgttaaagctgggttgatttttatagttacaaacgccaacaaagtttccaactttgagagctgtagttaagaatgccgtgtgaacttctccaccttttcgcgtcatttaagaacttctaggaggagaaaatcaccacctcaaagcctcgtggcataatgttacactactcggtttccgggctgtcgctgtcccccgcccccagcaagaggttcacagcctgctcctctctgagaccggttcgttttgaatcgcagtttacacgcgcgagtcggttttcgcatgcctcccccatccgttctagcagtttcttgcagacccttcgggtgcaccaggacctagccccggggcgccctcgctgtcaccacgtcctgccatagagcaggttggcgcccaggacgccgccgctgtactccccggcggccgc

SEQ ID NO: 248200 - DNA, 319 bp, Homo sapiens
  misc_feature (60)..(60): n is a, c, g, or t
agctcttccacacagagttggaacattttcaacccagagtgtgacttccccgcagccctngcccaggccctctcacaaggaggaggccaggagcacgtgcaactgaacaagctgtgaagccagccgggcacagaacccccggggtggaaggctcccctgtgaaaatgcaagaggaaaggcgcaaagggaatcttcccaacctctctacctggaagcatcctcatctgtgacatgaagcaaagaacagtgccttcccgtgcaggctctttttgggattacaccagaacataggcatgctcaataaatggcagctatttgc

SEQ ID NO: 248201 - DNA, 180 bp, Homo sapiens
ctggaatggctccacaataggggtaaagaataaactgggaacttggaaaaggaagtttaggaaacatccaagattatagaaataataataaaggaatgggaaatatgagagaaaagttgaggggcatggatgatatatccaaaagttcaattgctgtttaatagtagtgccaaaaaaaaa

SEQ ID NO: 248202 - DNA, 568 bp, Homo sapiens
tctgataactgcaaagttttgaaaatattaatttgattgtgttagaatccaggctctcatcattctcagttttaccactttcttgggttttacacagggctgcctctcacacttctgttaagtggctggccactgaaggcatgtaagtttatgtaacagctaaaattttgaactgattatttcaaaaatctatctgcacaatgaaaggttagtttcattagaatcacctagtaaagttataaaacatacagattacaaagcctcacctgtgaagctttttattcagaaggctatggtggagatagaaatttttttttaagttctacaggtagtagtgataagaagccaagtttagcaatccctatattaaagaattcataaagccgtttctaacatggagagtccatgatcttaaagtgacttcaggctggtaattattgtactatgtgtattatgcatcttaaatagtggtttgaagcagtgtctttaggaggcagttaagtttctgtcaaaagtattcttttcctaggaggttcatcagtaataggaagcctgaagattaaaaaaa

SEQ ID NO: 248203 - DNA, 494 bp, Homo sapiens
agagagcccctcacccaagcccagggccacattgcccaccgactcaatgtttggctctaccacatccccgatataaccatgagaccaagccccaactcagtcatctaagacggcatcaggactgggggcctgggtgtggggaaggttccccagaaactgcctgatagggtgcaaaggagaggaaaaatagctgctctgcacagaatgagaagctccaacacacttcttttttaaattattttttaaatagagatgggttcttgctgtgttgcccaggctgatcttgaactgctgggcttaagtgatcctcctgcctcagcctcccaaaatgctaggattacaggtgggagccaccgtgcccagcaccaacacacttctaaacagagttccaaaggcagaaatagaaagtagaaaagcattatttaaggagatcgtagctgagaattttctaggatgaagcatgagcccttaagctgaaaatatcaagcaaaata

SEQ ID NO: 248204 - DNA, 546 bp, Homo sapiens
actattgtgagagatctgcaaatttaggtttaggccactgctgatatcctaaactaagtgagatctgtaatgtctgcaagttagtcagaggtgaggatggaaagcagcaccagtatccacaggacaccagcaccatccatggagttctcaagggccactcaaaaaagcctgcattctgaacacttgttgttttatagtatttggtgcttctggtcgtcaccatgtcctcccacgcccactacacacatacacacatcccctgcatagtgcaacataacattgcaaagccacaaagaaatgtatcagagaactagtatatggacccaacaaagcttcaggaggaccttgttagacccaattaaagccatatggcatctagtgaacacatttttaaaaggctatcctgtagctcagaaattacaaaataccacagaaagaaatgtcaacaactccaattctttactacacattaagctactaaaagtaacaggcctcaagaaaatcgtattattcactgcattttcttcactgtgataaaaaaaaaaa

SEQ ID NO: 248205 - DNA, 553 bp, Homo sapiens
attggagaaagaatacgtctctctgatgtaactactgcgctcaggcaacccactgtggagcttcacagtggttctctgccaaagattctgaggtttttagcctgagatgataggtcaaaaccagggaggtgctcatgggggaaagcagcactggacagagtctagatgctgcttccctcaggctgtgatgaccttcaactggccctcatccccaagaacctcagcttcttcctctgtattaaggaaataaccatagccccgtccgtctgtcacaatgtagaagcggggatgagaagtgaaaagtgaggtcttgcaaaggtctcgcaagtcctctgcaaagctaaggggtattactggacagcgacttggatgaggatggccagacattgtcctccttcaggaccagcttctcagagcagagtctccaaacataatgtcgcttccagatgacgcaaatctgatatcagagaatgactaaaagcttgcaactttgcttttaatctgttgtggatcaagttttttttcaaataaatcaaagtctgtgaacttagga

SEQ ID NO: 248206 - DNA, 520 bp, Homo sapiens
aatctatgattctattggcagcaggtactatagggacaaaaaacaggttggagggaaaggaaggcaatgacattccatatcgcagcgctgtttaatctcagtagtaggaggactttcagaggtgctacacaggcaatagtgttgtacaagtgagccattctccacttattctcagttcttaaaatgtgacctgaggactgctgatagactacaagagtcttccataggcaatccatcttggcccttaaatttaatgtttataatatgaacacacaatactactttccagcaagaaaacatcctagcaacatttaataaacagttttcactttatgggaatctcattaaagtggtcccagtctttccatgaattccagggattgcatgttctttttagagggtcaatttttgaaatagtaaatacactatgggagatggtttgttgcatttgcaaactgaaaaatgtttaactgctaaccttctgggatctggtacatctttacaatgcttcaccctacag

SEQ ID NO: 248207 - DNA, 447 bp, Homo sapiens
aaattatccaggcagggtggtgcatgcctggtttcagctacttggagctgaggcaggaggattgcctaggcctgggaggtcaaggctgcagtgagccatgattgcaccactacattccagcctgggtgacagagtgagaccctgtctctctctctctccattatatatctttttgaaaaaagaagatcttgtttgtattaaacaatcatcatttaacataactaaacaccactactattatactccaaggaataaatactaagataaacaaaagtgttaaaggaaaattgataaattttattcctaaaaaataaaatctggctgggtgcggtggctcatgcctgtaatcccagcactttgggaggccgaggagggtggatcacctgaggtcaggagttcaagaccagactggccaacatggtgaaaccccatctctactaaaaatac

SEQ ID NO: 248208 - DNA, 337 bp, Homo sapiens
ctccgggacagttggcttgctggagcaaatcattgcggtgtctggtgtctgccggggggctgagatctgggctgtgtttgtctctatccaaacagacagaacgttagaatgaggttgtctttactgcgtatccctgatgttcgggagcctgtgtgggcgagccgtcacctcctggcactgcctcaaggcggcaccaccttgcagggtgccctgctggtccagcatgcgggagccctggcacccatcaaccccagaatgaggcacagcgggcagctggggatagagcccgtggcatcccagagggtgctgcccaggcatgtcctggcactcttctacc

SEQ ID NO: 248209 - DNA, 1169 bp, Homo sapiens
gagccggcgtctggccggcccggaggggccagagacccagatgggagaagaaggcctgcttgccagtattgcaaggcccagctatcaccagacgtgccccaggacacagagcacagtgtccagccttgacacgtcctctccggagtcgcttctgatgccaaaacacggctctgccacttgccggttatgtatgtgaacagttctgaacttaagccgccatttccttacctgtaaactgggggttcgttttccgccatcagattagcaaaaagaatgaatgataatgtccagtttagtccaaggcatattgaaacccgttgcgtgccctagcagctctaccaggagtggataattagagtaaaacttggcattacctacagacgtttttaaagtatatatcctttttcccggcagtttcacttctagacactagttataaagaataagtacacatatacaaaagtcatttgtgaagatgtttaatgccatattgtttgcgtgctagagaaacactgggtggggggggaatgtagattaacaggaaactggttaagtgaacgctgctacattcaatccgggttactaacatccatccaagaatgagctacatctaggtagtgacttttttttttaatacaagacattaagtttaaaaagcagaacactgcacattatataatcttatttattaaaacacaggcacacaagacctaatactacttaatgtcacgtgcactactccttttagatatttattgagagcctattacgtaccacacattgttttggatattgggaaatcaacagtaattaaaatccctgccttctagtaatgggagagcaaaagaaaatgcaaataataaaattcaggctggatgtggtggccaaagcctgtaatcccagcactttgagaggccaaggagggaggactgcttgagaccaggagtccaagaccagcctgggcaatatgagaccccgatctctacaaaaataaagaaaaaagaaagaaagaaaataagaatattagtgcatggtggcacactcctataatctcagctacaaaggcggctgaggcgggaggatcacttgagcccaaagttggagactgcagtgagctatgattgcctcactgcactccagcctgggcaacatagcaagatcctgtctct

SEQ ID NO: 248210 - DNA, 399 bp, Homo sapiens
aattaaagcaactagagaggcaaacccaaaacccatggatggtattttcaaagtaggtaggtggcaaggtagctgcaatttcctgagaagcccccatgtgggtctgttttatttcagccattttaatggatgtaaagtggcatctgaatgtcgttttaatttgcatttctttgatgaccatgatactgaacaccttttcatatattgagctatttatactttggtgacatatccaaatattttgtccattttgaaaattgggttgtctttttagtactgaattttaaacacaaacccttgaatacagttgtggcttttttcattttctcaatggtgtcttgataaacagaagtttaattctgaagttcaatttgttaatattttatggctagttctttt

SEQ ID NO: 248211 - DNA, 1221 bp, Homo sapiens
gctcatcatccttctccatagggaaaaaaatggcattaacttccaacaagaaactgctgctcttctaccgtatcccctttagaacataaaatattaagaaagggtttctgaagcattcacaggaacagaaaactgaagcctgaagcacttcactctgcagcaagataaccccttaaaaatcatccagaatttgggggatggaggtaacccgtcaacacccgcgacacccctaccctaaggtggggagcaggattccgtcaaacagaaaatgccactctccgccccctccgccatccggaacgctgaccggcgcggagtgcgggggcggccgagggcgggagcggcgaggaggcgggacgcgacacacgcaccacgccgagaactgcttcaccgcttttttaaaggtcgcagagggagcggcggccgcagcgccaaggaaacccaggaccgggagaggaggagcggcggcgacggcggcggtaactcggaaggagcgagaaacagccccagcgcgcgacaggggagggggcgacgggggcggggcgcgagccgacggactccgaggacggtcaccgcggcgacggccggccgggcgcgcgcacgcgcgctcccttccctccgcccccgggagcccgaaaaagattcccaccctcgctcgcgccgccggcccctcccccacttccggcgtctcctagcgacggcgggggtaggggccgggatgcgcgcgggagttggtggtgcagtttaacccttccggcgccgcccgccgcttggagcggctggagaagcccccgactccggcggcctttgttagcccggccgggaacacacaacctgctcagctggttcctgccgggtccttccgggactcatctcggctccgtccccatggaggtcatcggcctagggaacttctcgaaggcttttctccctctgcttgcttgacgggaggcgcgaggagggcacagctccactcttggggacctcctctgtggaaagatcacccttcaacaggcagggattaaatttccacgccagctgtcaatgcgcactggacttcattttgctcaggattggacctcatcctccttggtgcagtgattgcgagtttcctaacccaggtttctgcgcccgcactcttgcacttcccgtaaggtggttcctggcagataacccttcttcagggtgggtgcggggctacatttatgttgcattctttga

SEQ ID NO: 248212 - DNA, 1562 bp, Homo sapiens
gctcatcatccttctccatagggaaaaaaatggcattaacttccaacaagaaactgctgctcttctaccgtatcccctttagaacataaaatattaagaaagggtttctgaagcattcacaggaacagaaaactgaagcctgaagcacttcactctgcagcaagataaccccttaaaaatcatccagaatttgggggatggaggtaacccgtcaacacccgcgacacccctaccctaaggtggggagcaggattccgtcaaacagaaaatgccactctccgccccctccgccatccggaacgctgaccggcgcggagtgcgggggcggccgagggcgggagcggcgaggaggcgggacgcgacacacgcaccacgccgagaactgcttcaccgcttttttaaaggtttttaaaatgcagtttctccagccggagaattcccacccattcaccagccccagccctcacccagctccccacccccatcgggggctccgctgggccgtgtccccgaggcggcctcggccccacgccccgaggcgcgcggcccccggcgggggggtccccgacgcggcccagctggggatgcttcgcacctgtatgtagttgttctcgcagtaatcggccacccgttccagatttgtgtagctgtcgaagagggcccggcggccccccgggatttcctcttccagcagcatctgcagctccgccatcttcacatcctcctcctcctcctcctcatacaggtcgcagagggagcggcggccgcagcgccaaggaaacccaggaccgggagaggaggagcggcggcgacggcggcggtaactcggaaggagcgagaaacagccccagcgcgcgacaggggagggggcgacgggggcggggcgcgagccgacggactccgaggacggtcaccgcggcgacggccggccgggcgcgcgcacgcgcgctcccttccctccgcccccgggagcccgaaaaagattcccaccctcgctcgcgccgccggcccctcccccacttccggcgtctcctagcgacggcgggggtaggggccgggatgcgcgcgggagttggtggtgcagtttaacccttccggcgccgcccgccgcttggagcggctggagaagcccccgactccggcggcctttgttagcccggccgggaacacacaacctgctcagctggttcctgccgggtccttccgggactcatctcggctccgtccccatggaggtcatcggcctagggaacttctcgaaggcttttctccctctgcttgcttgacgggaggcgcgaggagggcacagctccactcttggggacctcctctgtggaaagatcacccttcaacaggcagggattaaatttccacgccagctgtcaatgcgcactggacttcattttgctcaggattggacctcatcctccttggtgcagtgattgcgagtttcctaacccaggtttctgcgcccgcactcttgcacttcccgtaaggtggttcctggcagataacccttcttcagggtgggtgcggggctacatttatgttgcattctttga

SEQ ID NO: 248213 - DNA, 380 bp, Homo sapiens
ccaggctggagagcaatggtgtgacctagctcactgtaacatcaaactcctgggcttaagggatcctcctgcctcagcttcctgagtggctgggactacaggcaggcagctaatttaaaaaatgtgtttgtagagacaaggtcttgctatgttgcccaggctagttttcctgccacttcagaggaaggactcaggtttcctttttctcctacttttaagagtttttattaggaattatctgttgaatgttatctaaaacagtcaataaaatgtattaagtgccagctgcatgcaagaccctaagttagatacagtcagccctcttcatcagcaggtccacatcttcagattcaactagatcaggctgaatatttgaagaa

SEQ ID NO: 248214 - DNA, 226 bp, Homo sapiens
tccccaacctctcatgagctcctggagtatagtagctagaccgggagcctgttccattcccttctggggcaggcactgagcctttaggctagctagaggccccatagatgaggcttggcagaaatgtgctctgagctcctgccatcagattgtcacattttgcagagtgagaggagttccagggcagtcttcctttatgtggcttattcccttcagtgatgtcctc

SEQ ID NO: 248215 - DNA, 802 bp, Homo sapiens
ctgggtcatgggcttggcttctatcattatgagactatgaaaaccaaagcctgagtttggcttctgtcagtagctaacctggcttcagtgctctgcttatctctctgaattcctgccctatcttatgttttgggcttataattctttaacattagctctttgaggcttttaagaatatatatttttcgccgggcgcgatggctaacacctgtaatcccagcactttgggaggccaaggtgggtggatcacaaggtcaggagatcgagatcatcgtggctaacacagtgaaaccccgtctctactaaaaaaatacaaaaaattagctgggcgtggtggcgggcacctgtagtcccagctactcgggaggctgaggcagggagaatggtgtgaacctgggaggcggagcttgcagtgagccgagatcgcgccactgcactccatcctgggcaagagagtgaaactctgtctcaaaaaaaaaaagaaaaaaagaatatatattttctgatgtatttagttttaaaaatcttagttgtagttgtgttctgtgtaattggccatgttattggagatggatatctccattcttttttgaatatgaagaaattaaggctcagagagagagagtagttcaggtaaagttgtattactagtaaatagcagagtttgactttcagaagcttatttatgatctaggagtgtgagcagttaggcttgcgtattctttcccatatatgactgtagtcttaaggatttctactgttttagccatgtggaaatgtctcagtcacagaggacaagaaa

SEQ ID NO: 248216 - DNA, 463 bp, Homo sapiens
ttaagggaagattccaaacaagttgagctgccactaacagccagctctgaggcttttgtctctgagtgtttacagcccaggaagtctggcatccactgcaggtgaccgggcagggtgcaggtgtgaggctggaagtgagagcggacagtgggactgaaatccggactcagcagttcccgtcaaaaagacattcagactctcccagcactttgaggggcggaggtaggtggatcacctgagttcaggagttccaggccagcttggccaatgtggtgaaacctgtctctactaaaaatgcaaacattagccaggcatggtggtaggcacctgtaatcccagctacttgggaggctgaggcaggagaattgcttgaacccggaaggcggagtttgcagagagccgagattgcaccactgcatgcactccagcctgggtgacagagggagactccacctcaaaaaag

SEQ ID NO: 248217 - DNA, 288 bp, Homo sapiens
caactcctgatcagttatttctatccttcttcccttctgaaaatctatgtttgcaggcagacttagaggcttctagtgtggatgtggaagcctttaactccgtgaccccactgtgtggccagtgcttgagttctagggtatgggcctctggatctattgtgcagtgtttggtctgattctgtcctctggaatcttactcgctttttttgtttttcaaatctgcaaaacgcacccctctcttgctgaccacctcttgcttggtgctacggatacctcctgaaatctggc

SEQ ID NO: 248218 - DNA, 426 bp, Homo sapiens
ggaagccctggagaatgttttacaacatccttggtggttgtcacaactctgcagattccttggcttaataggtaagagcttttgtaataaggaaggccaagcaaaagtctctgaaaccggatgtcccttggccaaaggagtaaatctaaataatattgaataccgagggaagtggcagaaattaatatcactcttaaagatttaaagtatgtgaggatagtggtctccattattttgtaatttaatgtctcagtctagatcctacaaaacccacacggattctgatggacaataaaaaactcttgccaattcatccaaggagtggccctgattacagatgctagaccgtgtgtgggatgttactagagcaggttaacatgtttccaggtacattgcatgtgcacatcaatctagcaagccattctt

SEQ ID NO: 248219 - DNA, 373 bp, Homo sapiens
tctgtcaggtccctactggaatatttaaaattctgtttttcatacttatcagctaaaagaattacagaaatatatttctggatcctgtggggaataagagcagaaatatacaaagcttcttctttcaagacggatcccagcagcccaagctaatgtcacagttgtgttaaagactattgattccagcaggttctgggctgggtctcagcttcccaggactgttccaggctgacctcctttccctggttccatctttttttgggacttctgtgggccttcattcagcatgtggcttgcgggtgtccaggtctgcaggcatacacacctctcctgatctgaatcagagaacaaaagataaaggatcgaggacaat

SEQ ID NO: 248220 - DNA, 425 bp, Homo sapiens
aggccagggctggagaagcagaaaaaaagcatcaagcctacaaatgcatgcttacttgcagcagaaatagactaattgcatgggcgtttccctgggatccctgtctccaggcttctctcatccatgcctttctaggcagcccacatcagcccttgcttaaaactctccaaggtttctcatgccaagctccctgcaggacatcccaggccctctgggacagcagctcacgggcctctccagcctcatttgccactgtgacccattctccagcactgattcatcaattagcccatcacaggcgtagctacaagattagttttgagactctcattctatatatttatgtacatcctccaaaactgataaaacaagaaagccgtcaagttgtaattgataaatatgtaattaaatgtctacaaaatgta

SEQ ID NO: 248221 - DNA, 241 bp, Homo sapiens
gtggagaaactggatgattcatacattgttgatggaagtgcaaaatagtacaatcactttggaagacaggttgacagtgtcttaaaaagctaagcattgcaaatactgggcaacccaacagttgcactcctgtatggttacctgagaataatcagaagtgaatagaagtgactcaccccccttaaaaaaaaataagaataacggccgggcgtggtgacgcacacctgtaatcccagaactt

SEQ ID NO: 248222 - DNA, 433 bp, Homo sapiens
tgggtatgtgtgtgtcattgcgatggcttcaacagctaacagtcaacaaggctaagatctcaacttcggttccctgacatcccattagggtctttcccactatcacaactccctctgacattatggctcagttctcctgactctcctcctcatgaggtttctgccaatgcccagactgcttcctgccaatgttgttcttcccatacatggtaacaccattgggtcagagctgggagagggcatcccttggccaaactgtcctctccaggctctggcactcagctcagaatgctcagcattgcaagcctagaacaagttccttaacatgagaattcacagatttgggtgtctgtttccagacctacgatatctgtcaacagaatactaatccaagaagatattttgacaggagagagaatagtgaccccagaaa

SEQ ID NO: 248223 - DNA, 505 bp, Homo sapiens
tcctggtcaggaccccctccttggtcccagttgtagcctatgaggagatggctcttggctctgtcaacacctgtctttgccactccagcctgagggagggtagtgatctcgtgttgctgctgatctctgggcctcacccttctacttttgtcttctctgctcttccaagacctttctaagtagttttctgtattaaagtctcactagcaagctgtctggaaggggttcgtttttctgatggcgccatgactgacacaggtgattatttgagaaaatgcctctaaagtacttagaatagtgcttggcacatagaaattgctcaataaagggtagctaacaaaacctacttactttcttccttacctagattctctgcggccaatttaacccaggcgggcaggcccctgcatacaacatagctcctgaatcattgcccacttcttctcttcctggttgaccaagtccatagacatgggcttctattttgattcacccttctctaatc

SEQ ID NO: 248224 - DNA, 325 bp, Homo sapiens
gccaaataaatcccatttttctcacccttctacgtgtctgtgagcctaatctttcctagtcacgtgaaaagaaccctaaggagaatgtctcacaacaatttgaccatgaacctctttttatgcaatatacctattaaggtctcatggaaaatactgccatagtgaaaactctaattgcagaagggggagcccaagccataattcccaaatcaatcctcaatccacaagatacagatgatttttaaaactccacttgagaccaaattgtctatcactgaaaggaaataagtcttaactttcccacagcctaattcaagactcaggt

SEQ ID NO: 248225 - DNA, 245 bp, Homo sapiens
aaaaatttagttcctttatttatttaattcctttaaatatctttgacctccaaatgcataggcactgttctaaatgccagggatacaaaatagacacaaaactccttaccctcctgaaggcttatattctattggagggaatcagacaataaaataagtaggaaaatattgtatattagatgatgggttgctaaataaccaatatcattataggcactaatttgggataactatatccatgtctt

SEQ ID NO: 248226 - DNA, 539 bp, Homo sapiens
gagaaacgtgtgactcttgaccattttgtttaccaaataatgtagtgtgagatatctctactacagtaataacttccggtgtaatttacattggcgtttgttaacagcaaaagacctctcctgtgggggttaagaatatttaatcctttaaagctgacatatataacatgtagctatgtcagctacagctgtttctaaacatcagtaacaaaattatagacaggttttgaagcttctgtggtgggaatgaatacatctgaggattcaacttgctgacagtgtttttgtaatttaatcttaccatctggtagaaagtaaacattttttataaaattaaagtttataaagtgaatcgcttatagtttccgattgttgtgaatgacaaatttaagtgtactttcattgaagaatgaatggagattctgccactgttttgagatgcatactagatcgcaactgattttgccatttgatcttcattggttccttgaacagtaaacaaattggcactttcatgtcagctaaggattctgtgtttc

SEQ ID NO: 248227 - DNA, 415 bp, Homo sapiens
agtcctgaagactgtcctagtttcccagacaagtctacttcccagcaggtctctgcacaggtaggttgtgtccccaactatagcaagaggggcagaagttgagactggaccccttcagaatctgctgtgggaaggaggctgatgggcctttctcattggctgagacaggcatgtgttactcagcaagtctctgcacaagtggagtagtttcttgcccataacaggaggagctaaagccaagactgggcctcctcagggtctgctataagatggagggtggccgggtgcctgtagtcctagctactcgggaggctgaggcaggagaatggcatgaacccaggaggcagagttttcagtgagccgtgattgcaacactgcactccagcctgggggacagagcgagactccgtctcag

SEQ ID NO: 248228 - DNA, 400 bp, Homo sapiens
ctttttcattcaatctcttgtggaatcataagtcatggaacctctgcaaaaagctaccacaaagagatgagaatgtgagtgaacaaggcaaagaatatactcattttaaaattatttatgggctgggcatggtggctgacacctgtaatcccagcactttgggaggccaagacgggtggatcacgaagtcaggaatttgagaccagcctggtcagcatggtgaaaccccgtctctaataaaaatacaaaaattattcaggcatgatggtgtgcacctgtagtcccagctactcgggaggctgagacagtagaattgcttgaatccgggaggtggagattgcagtgagctgagatcacgccattgcactccagcctgggcaacagagtgagactctgtctc

SEQ ID NO: 248229 - DNA, 443 bp, Homo sapiens
tctccaggaagcccccttgtctaggaagagaaattgaatatcagcataaggtggtgaaaagctgtgaaggagatgagtgccaggagtccatggaggaaggattctagcctggacaggtgattgtggtgaatagtcatgagaatctgggaactggctcctgctctgtctatcttggagatgcatcttttgtgagaagccagggcaagaatagggaggcttaggcaatgggaagtttctgagtagataaagcagatggcagagcaaagggacagagcctggcgagaggctactccctgtagcaacctgcctaagagtgagaggaaagcaaggcatggctatgagcacgtgtagtctcagctacttgggaagctgaggctgggggatcacttgagcccaggagttcaagaccagcctaggcaacatagtgagaccatgtctcttta

SEQ ID NO: 248230 - DNA, 770 bp, Homo sapiens
caggatggctccccatgtacacttccctcctcgccccagctcacctacactggactatgacatgatcaaggaatctttttttttaagctactgagatttctgtgttgtttacatagcagtttgtaccctaaacaaacacttgagattttatacttcaggaaactattcagatttccttctcattagcaattgttccaaaaacacttactctgctaatttctgctagaaagaatcacagttcttctaacacagaaacatttctgtcccttgagttgggaaacaagaccctatgttaacccagtcagagtgtggactgaggcattcggagcctatttaagcagaagttttctataaggacaagatttaaaggcttacaaaggtaaagacaatggcctggtgggaagaattctagtctagaacgtttgagatttgactctagttctaggttcatcttagctgggtgtgtaacgttgaaaaaattggccgggtgcagtggctcaggcctgtcatcccagcactttgggaggccgaggcagacggatcacgaggtcaagagatcaagaccatcttggccaacatggtgaaaccccgtctctactaaaaatacaaaaattagctgagcgtggtggcgtgcgcctgtagtcccagctactggggaggataaggcaggagaatcgcttgaacctgggaggtggaggttgcagtgagctgagatcgcgccattgcactccagcctggtgacagagcgagactccgtctcaaaaaaaaaa

SEQ ID NO: 248231 - DNA, 364 bp, Homo sapiens
ttaaagtacctgggtgcttagcaattcttgattgttactcagcagactaatatttaaatgtaattgctgttaggtttctctgatattgtccctttgactaaacaaaactagatgactagccacattttcttagtccttgaaaaataacctgccaggcacagtggctcactcctgtaatcacagcactttaggagactgaggtggggggatcgcttgagcccaagagttcaagaccagctgagcaacatggcaagaccctgtctctacgaaaaataaacaaaattagccaggtgtggtggcatgcacctgtagtcccagctactcgtgagactgaggcgagtagatcgcttgagcccaggaggtc

SEQ ID NO: 248232 - DNA, 475 bp, Homo sapiens
actttaatttttaattgagtgcttcctattaaagtagatttggtacttccaagactatgaaatctatatttacagctatgttatttttacatttctatgttattttatatttttattttacactgctattacatatagcaaagatagtaaattatgaattagccatctgagggaaattggaaaagcagaaagtatagtaacccctcatttatctagctcccagggattcaaaggacagatgagtttcctactaaggcaaagaagacccaacactggaggtaaaaacttatcacggaagttagaggcattggctctgagttttgtctaagagtcttccatctcaatgtttatttggaaagttttcactcaggaaatttaagcatctagagtttacatgtacaactgctgtcctcctacccagttgggccagcactggatacacctctcctgcttttgcatgagcctgacctttaaa

SEQ ID NO: 248233 - DNA, 471 bp, Homo sapiens
tcttggggggtggcgggggaggacgacgtgggggacggttggagggaaggtgaagagagggaagaagaaagtgcaactgggaggcctttgaaaaataaataaataaaagaaaagccccttcaggtaacaatagtgagccagattctttcagaaccaagcttttcagatttgaatattgttcccacccgtccataaaagtccatctatagagaagatatataaatgagcgagtgagtgttgtggaaatatatatatatgtatgatttatatataatggtgtgtataaagcttttcggggttggctgtagtgtaaaaagtaatgactttattacctctgaaaggttctgtggttcacatttaacagtcttctgaattacaattcattacacaattgtgtgcgctctgacgacggcaccctatcagggctgctatctgtggctatttccaataaataactggcaacattaaatt

SEQ ID NO: 248234 - DNA, 316 bp, Homo sapiens
gcatgtattaattgtctctgcaagcaaatgcacataccaccattaccatttggaagcatgctcttttctattgaatttgttgtaaagcattttttgattgtgttttgatgaatgctgctctaagttcagatttatcttttgcttcgtttctagcaaacaaacaaatgtccttttagctaactcctgagtacatctatatgagggatatttccaaatttgtaacactgaccatttggagaagggaaacttaaaaattattattttaaagaagtgttttgaaacatgtttctaataaaaatttatatatcttccctat

SEQ ID NO: 248235 - DNA, 374 bp, Homo sapiens
atgtttattttacacacatgtgatcaaattgtacatgcaattttagtatttctttcttccctttatatttataaatatagatttataacatgtgccatcccatgctgttaaaaacttcataaacttcctttatgtaggctgcataaggtactgttgcttggcagttccataatatatttaccattccatttatgttggacatttgcgttttttccagctgtttttttactgtgggacaaatctgttctctcgcgcacgctctctctcttttttttttatgagacagggtttccctccggtcgcccaggcaggagtgctgcagcgtgatctcggctcaccgcaacctccacctcctgggttcaagtgattctcct

SEQ ID NO: 248236 - DNA, 440 bp, Homo sapiens
catatatggggcctgcttccttaaatatagcctgtatcactggaatgtaactttaagagaaaaatgttctaagctggttctatttgtttacagctctttacccagtagagtataaaacctagcaattgtttatcatttttagaacagtattgagcagcatctttatgaacccaagtgataggaaataggcttttgatccttttgagaacttaaccctgggcaatggaactgattccatggggtctgagtggagctgtggtttccaaagacttgcacatttaggttggttgatttagaattcattgtttgtagaatggtgtgcttttccaactacagatttaatcctaataaccagggtatttaccatattatcaacactcttagaaaaagacctcataaaaatgccatttaaatttatctttgctgttagctaagttgaa

SEQ ID NO: 248237 - DNA, 547 bp, Homo sapiens
catagtttgtactgtctttaagttttcttatttttattttgttggtagaagcaggaatatatataaaaatgtaacagggtaatgtattggatgaaaataaattccaacttaaagaatgaactcctgaactcctgagaccacaagttaactcagtgattaaagcaaagttctaaagaagcagtgactacagtgccagctttctatgccatagtcacagactatactgtgatgaccctagcctggtagcacttcagctgaatataagaactaagaatgaaaatacatgaacacaagaagtacccccttcactgctgaaaaattcaaattatactcctattcatcatacttatttatatgtaaagaacggatgtggtcttaccatatatatacctatcactttgattgtgagggaacaaaagcgtgcagggccctgagcagtctggtaaaagctttgacatattcacatgtgtaaacaagttcattgagctgccattgttaaatcataaaggccgagagaattcagactaagtacatttccttagaggaa

SEQ ID NO: 248238 - DNA, 449 bp, Homo sapiens
acctggtttggggccaaaaaaccaatgatgcaggcacccaccagggtggttggtttaatataaaaaatagccattcgtaaaaacaggtctgtttaaagagcctcttgaacggtagaattgtttagtgatgtcgttgaaagttttctgcagtatctgagattcagggctcaaaatgtgagatctacaactcccaccttccctgatctgctttctgtgattgcaaaacacagtgaaatgactaaacactcatgccttcccacaaaggcagaagctgccagtcgcgattctgagcagtcttgtgaagtcagctcttttagaaaactgaatggtgtgtttgttttgaagtagtccatttttttcttcaccctttgggaagaacaattattgatatagatattgaatagcaattaggctaacaaagactgaaatgtaagctccacaaaggtccc

SEQ ID NO: 248239 - DNA, 295 bp, Homo sapiens
gggtgacagagcgagactcggtctcaaaaaaaaagccaaaaaaaataaaccagcttgcagcattcctggaaattctaactaacagatgttcttgcatattgatatgagccacctccagcagagcacaacatgaccacagtctggaacagtctttggttttcttttatgttagatgcatatctcttccattgtttgtgagtttcctgagtgtggatactatttatttctgtaaccttagcccctaacatagtgtctggcaattgtaaatacttaataaatatctaatgaatttaaa

SEQ ID NO: 248240 - DNA, 462 bp, Homo sapiens
cgcgtcgaccatttatatctttcctaatgtagcaaagtagcattaagcgtagcaatttcaagaggtaaagcagaggtgttagagaagccagatggctgccaacagaggtctagctcaatggtagtgtcctgtcccaagtctgtactcagattttcaggtctagaattggttctgtttgcacatccaaatttgactgggctgagagataacagcaaataactaaacttacaaaggattgatgtaaaaactggtatgccaattccgtagttatagtggtaaatattactatgaacagattacttataccccatattcagggacttcttttttaaagaatcttggtttttgggaagttgagtgaatttcacaaagatacctgctctatcagccgtgatgaaacagcactgtgacagagaaaacccacatagtatttcaaacagggaatttttactataaaaaaga

SEQ ID NO: 248241 - DNA, 288 bp, Homo sapiens
aagtataagttacaggatgtcaacagtcttcttattcagtaatatctatgccaacagctcaacactatgcctgtggggaacgggacgctgtctcattactgccaggtagggttgaagtccaggtctcccatgtggcctctcaacaccctctggagttttaacatctgcaggagatggtatttaaggccttaagcccatgctccacagaaaagttatgaaataaaagatgagaaaataaggacaaaacataacctattcgggatttccagaagagagaaagagaggcca

SEQ ID NO: 248242 - DNA, 345 bp, Homo sapiens
gggaaggtgaggctggcattccccccactcgccaacgatgaacttccctagctatctctctagggaaacagcttttcctcctgcccagggtggccatggctactgctcgtccctgtactcaagctgccctacagcatcactaccacctgaatccaataggacctgagcgtcgtggcagtgagctctggctctgcccagagagtagaacttcactgctttctagctatgcaaccccgggcaagttacttaagctcttcacgtttcactttcctcatctataagacagggtgatcatttatccattccaaagactattgaggattaaaagtatatgaaacattcaag

SEQ ID NO: 248243 - DNA, 221 bp, Homo sapiens
tcataaggaaataatccagcccagtattatttatagtataaaaaattagaaacaacttaatatggccagcagttggaaagattaagtaaattataataataaaatatgaaataattaaaaaggatgattttgtagatttgtagcagtacagaaaaatgcttgtaggctgggcatggtggctcacacttgtaatcccagcactttgggaggctgaggtgagc

SEQ ID NO: 248244 - DNA, 481 bp, Homo sapiens
cagaggaatattttgaaaacatccactcttgctttctccacactcccatccagtgtgcctggcttcttctgcacagtgcatattctggctctttgccagaggcctggaaaatcctgccaggcagccgttcacgcagttgcccccaggggcagtgactgaccaggagtgagacacaccactctcagcccagctgtctgctcagcgcagctcaaagcacttgtaccttgagggagagaaacccaagccacacgtcctgacagactgtcacctgagtcccttggaaaacacaatcaagagcttcctgcccactcatgtcccgagctggccgggctcagtagatgctgtgccgccagctcctggcttagccggcctccctggtgcgtctgccctcaactctttgtgcagctggagtcccagaagggagtaataattaaagaaaactttgtaaatgttcaaactgaataaaactgttgttgttgct

SEQ ID NO: 248245 - DNA, 457 bp, Homo sapiens
gtccacgcaccccctgtccagcccatctccttgaaaatcaatgagtacatccaggtacaaataaggagccaggataagatcatcttctgcttcacctatgaacagaagcagatttgtttaaacctgggcaccaggtacaagtttgtgatcccagaggtgctgagcgaaatgaagaagaaaaccatcctggaggcagaacccggcccaacagcccagaagatccgggtccttctggggaaaatgaataggctcctgaattacgcgaccacccctgatctggaaaacttcatagaggccgtcagtatatcactgatggacaacaagtacctgaagaagatgctctctaaactctggttttaaggcggggcttatctggcatccaccaaatgccttaggaagttggagaccttgggagctccagggaaaaaaaacccaaagacctgttgaccttttatga

SEQ ID NO: 248246 - DNA, 377 bp, Homo sapiens
ccaagggaaattaaaacctatgtctgtacaagcacctgtacatgaacatttatggcaacttttccgtaatcacccaaaactgaaagcaacccaaagtttcctcaactgattaataaacaaactatgctacaaccatgcaatggaacactacacaacaatgaaaaaggagcaaaccactaacacacacgacatgggtgaatgccagatgcattatgctaagtgaataatgtcagacccagaaggctacatactgtataattccatttatatgacatttttgcaaggtcaaaaatataaggatatcaaatatatcagtgtttgttgggagctggaagaactttaggggctacagaagaattccttattctgattgtggt

SEQ ID NO: 248247 - DNA, 411 bp, Homo sapiens
agcaaagattatgacttgctgaaggctcagatgactgttagcattttttagcaaaagtatttttaaattaaggtattctagggtacccgttttccccacttcctttctgtgtcttgaccaaaatcacagtgacccagccagctgtagccataggttttcctcagctggcttgaacccaaaccagcttgaacattcccaggcactgataataatgtcttggtttactggaaagaaactgaccccgaccctgagccgaattccttaaattttcatgtaaactccatcccctcaccccctggctacagactaatgtgggtaaaacatcccttttctcttgctgtccatcacaataatacattgcaacaccctgcaagttcctttaataaatgttttggactgatcactctggca

SEQ ID NO: 248248 - DNA, 1676 bp, Homo sapiens
attagcttaaatgttacggccacttaaaaattctacatatgactattgtttaaatacatttttcatgtctctgatgtagtccttatttgacataagtattttattcactgcttaattgttagatagattatagacagctgttactaagtaatactgctccattagggcagaaacagaaactttattttaattaaatgtgtactaatgtttgagtttctatattttgctacagtgataattccagtaaaataaactgtaggcctctagttgttttagaattttaaaactgtaaatggactcagagaatcagtttcttattagacgtcatgagagtatatttttttcattatgctttaagagggaatttgtaacttgctcaggtaacattcaagttttctggtttgtgtttgtccctacaattaaacacactgaactaacaggaaaaggttacatacatttaggaacaattgcacttttaaagggagagaatgcatagttgctcacatatctcagtgtcagtcacctaacatggatcagtgctttatttgagattacaaaactagaaaatgacggagtcaaggctaggaccaatattctgttcagtcttagataattatagaatacacattaaaatcagatatttgaattttcttaattttgtaactatttgtcattgaaaggagatactaaaaaaattatatatcgtcctagaaagtacatgaactaataatgcatttctaaaggtgaaaaaagaataggtatttttctgtttaatattcaattttatagagagtagtacgttaatttttttaaaccccagaagctcaggatcttatcattttaaaagaaattatcaccagttctgtgtgagtaaataaagtattataacactttgtgtttttcatccatgataccttgtatttacttacctgagctttttttctagggaaagaaaaatgctcaggtaataacagagccttgaaaaatttggattttcaaaactacctatttatgtataggcctttagatcatctgatgttgaatactctttaagtgatctaaaggcctacatataaaaaggtatttttattaaattctggaattaaacatttcagcattacaagaaaagaaagcaaatccactggaacaattctgggaaagaaggaaagactgtgattaaatgcctcttaactacttcagattcctggattgatgtcttatctacaggcttctttttaaaaatcaagaatgattggctgtgagtttaccaggattatagttgaggctaaaggacagctcctcaggaaagcccctgttctacatctacggtcacatgctggaccttgagttgtcactcagagaaaagagtgccatctaccgaaactccacagtttccattgtgaatggcttctttggtgcagagttccaaaaattatgtagcccagctctttaattttgtaacatctaatgatatcaccgccttgaagtgattaaagtagattgcttaaagaattaaagctttaaagatgaaagatgttattgcttttgctggacatgaggaacagttgtaaagtttccaggtctacaataactttctggaaccctctcagtgaactgtttcttgtaaaagttttccctaagataaaagctcaatcccattgtttccacactcaaaa

SEQ ID NO: 248249 - DNA, 669 bp, Homo sapiens
cagaacaaaccacaccaactttcaaggactaagcaaaaaataaaccaacagattttactattagattattaatgctaataccttatatatttaaaagattactataaatttgttgataaaaatgttcatacattttatttaaaattattattttagccaccatagaaaccatgttcaaatgaattactctgggagtctatagatgcccagaacattactgcctttagcatcagtttacatgatcagaggatgttttgtaattgcaaaggtaatacatgaatacattcttaccataaaagttttactgcacagatcagtgttcctttgtccttacttccttcccaggcacagctgtcagtttgctgtgggtccttcctgacctttctctacagatcagtttgtaactcggacgtcagtctcactaattgagtcgtgcttgcctttgcaccaaaattgtatcatttggtttgatcacccatataatgaacaagacttaactctaaatggattttggctggtaccaaaaatcaaatctatccccaagagcaaaactatttgctctttgcaaaggaagatttgccattgtggagaagcttttaaaaaatttcccttgattaaaaaaacaaacaaacaaccaatcagtgcatgcttaggcttgtatcacccttt

SEQ ID NO: 248250 - DNA, 554 bp, Homo sapiens
gtatattttccagtgcctttgagtagttatttgttatattttatccagtcttattattttctgctgcagggttcttgtgaccatttcagtctgctggcattttcgttagtgggcttcctcatacttatttttgaattgatttttggaaattgcttcaaaattacagaatatttgcaaaaataaaaatagtagaataaatatatatggtgcagtgagttgtatgtggtttgtccccaccacaactcatggtgaaatttaattgccagtttaacggtattgaaaggtggtggggcctttaagaggtgtttggttgtggcatctctgccctctcgaatggcttatgcagactgggttagttcttttggactgggttggttctcgtgagatcaagttgttataaaacaaggcttcctctgatgtttggcctctttgcatgcacttgctttcccttcctctttctgctgtgatttgaagcagcatgagaccatcaccaaatgggctaccatccaacctccagaattgtgagccaaataaacttttttgtaaattaccca

SEQ ID NO: 248251 - DNA, 482 bp, Homo sapiens
tactttgtatagccttgttttaatgtatgatgggcatatttttgtaaataactgcagctttttgactactgcataattttccattttatagttgcattatttaacaagtccccttctgtagctcatttaaacttattgcaaatttttgctgttttaacacttgagccattatcctggtccataattgcctgaccacttaagactaatctttaaaaatagatgatattctcactcacaagtgtttgtttaaaaaatatgttcacatggacttagagagtggaataatagataatggagactcagaagtgttagggggtaacaaggtggaggaggatgagaaattggttaatgggtacgatgtacattttttaggtgatgaacaccctaaaagcttgaccactatgcaatctgtgcatgtaacagaattgcacatgtaccccataaattggtacctcctcaaaaaggtagatatgttagcacca

SEQ ID NO: 248252 - DNA, 418 bp, Homo sapiens
tccaggcctgaacaccctgtcctacctggtcctacctggatgctggcctcagtaagctcctgggctcattgaagatgaacctagcagtagtatttacaccacttgttgtgtgcccactgtgggcccggcgccatgccgagtgctctatggatgtgagagaaacggaggcccagaaagcagaaatgatgtgttaagatcactcatcaagctgatggtacagaggttagagcctctgctccctgctctacctctttcccttactccacatccatgcctgtctcttccaatgggtcggcatccaccctgacacattaaagccaaaaggaaccttaagctagggaaggggctccagaactttagtgaaagattcaaacatgtccactcaactcaatggagaaaatacaatattcaatcaaaa

SEQ ID NO: 248253 - DNA, 633 bp, Homo sapiens
actttgtagatgctaagcaccgattggccctccagagaatgacaatatccctttgatacctcactcctgatcaatctcattcattaacctcagcttctcaggaatccttgtagcttgtatgctagaagtagctatggtatatggtatccactatatgtccagtcctatggtttggctcaaaggttggctaattgcagctagagctctcaactgctagctcagcaccttgacatttgaagtttcttgtcttgaggagaaggaaaatgttctttctgccattgccactttaacagttggacatgcttaagcaacaaatacagccagtatagggaggactgtcagtagcatcaaatggccacatacctcaatggcaaaagactagatggtttgtgatttaaaaattaatgagtcgagatgagactattttggtattaaatgagaaaattgcctaacacaagggaagggtttacaaaagaatgccaattagtgtttcaacagagttaggattttccaagtaagagtagctggtagccatccagccataaaaggaacgagagtctatagatttgtaaaagtaaaactgctatattttgtatcttcaaatcttcaatataaagaatttaaagaacctga

SEQ ID NO: 248254 - DNA, 718 bp, Homo sapiens
tataagatgagtaagttctagggacctaactcacagcatggtgaagacagttaataataatgtattgcttacttgaaatttgctaagagaatagatcttacatgttctcacagcacatacacacaaacgcaaagggtaactgtgtggtgatggatatattgattaatatgattgtagtaatcattacacaatgtatatgtatatgaaagcatcatatagtacaccttgaatctacacaatttttatttgttaattgtacctcaataaagctggaaaaaagattcacattctctgagaaattttatttaatcccttcaaactgagagactgtcctctatgctgtgggtaactctattttagttcccatgtaaatgtgtttatttgtctcccctcctgatctttatctttgcatttccaacatttagcacactgccttgatgcaaagtcgaggctcagcataggagaggctcaacatagtacaggttgaaggaatggttgaattaattaactgatagcttaaagccctccacttgtattttttaaaataatattcctaaatatattttgttctcttgccagggttaaaactcatatgttacttctctacccacttgcacagactttaaggtctttttaaatcccatctgtgtgtttcttcgtcagctggaaacatttaatgtcttcttaacttggaaatctcctgtgagctttcttctgg

SEQ ID NO: 248255 - DNA, 695 bp, Homo sapiens
ggagaaagaggtgggtgaatattgaggtccacaaatcagtcaagttgaataaagaggaaattctaaggaaaatattaaaaattacagaaagaggaagctggggacactgagcataaactttgatgacatcaattttaccgtgtgcctatccactattcctccacttagtttctcagatcttgccagcaaccttagggcttgcatcctccatttctttgctcagggcatgctgaatacatgtctatgtgttttctgttttatttcctgtgtaggttttatgtgtgcacactgggaatgccctttcatctttcccatgaaccaatgtccccctccataaatactgtgggttccctttctgggcatatttcaaagatcagtgtaacaaaattattttatatgagtattaccattcccagcagagtctttaaaactagataggaaactggtgtaagtctaaaatactgtaagggccagagcttagggaaaagagcaacatatctattctatcaatctcatcttctctatactttcattgattaagagcccatgactacagcaaaaatgaaattagaggcactctacagaactcacatttcttaaagtaaatcatgccttttctgagataatttcccctctggattcttttccagtcctgtggctaccacccgtatggccaaatgtactctaatcccact

SEQ ID NO: 248256 - DNA, 639 bp, Homo sapiens
aagaggaagacaagtctcttaatagtcaacagacagcttccaaagtttgtctctctcctctaagtatcactggatcttcttttgttcacaaggatgcagaacaatgttccaagtactgttacgtttctaaactttaagattgttcatttttaagaaacaaataactataaccacataattatgtataaccaataactataaccttgataatctttcaacatactccaaaaggaaactttgagtccattttacattcagcaagttaatattaaactatgtggcacatcaaaagctttaaattaataatgtgtgttttaaatgttacaaaccgtgtcaagtgtacatctaatatatgaactaacaacttaaaatactactgttgagtcggctatgagttccttgtagttaaataagttattacaaagagtattgttataaaaggtatgtgctatgccaagcaataacaagatgtagatgtggtcacaagctagctatagtaaaatgaaaagaaaaaaactctgcttgagacctcttttgtgtcatgatttaccataattttgaagcaaagtgtttacagctgctattaaaattaaaattgaaggggagaaacaaagcaccctgaaatttgaatgaaaatta

SEQ ID NO: 248257 - DNA, 558 bp, Homo sapiens
ctcagaagcctcaggtatatattttcctcaacctttttaagtagagtttgaagttttatttgtagctttctccttttattttatcttttttttatgttttcacttaccttcaggctggatatgaggaatgcctgaagcaagtagttctccaagatacctggcaaaaatcacactatgaaaaatctctcaatttacttaagtatatacgacagcagttatattctaaaacttgatgcatgtccataggccatctcaagttcacattactgcagttccaggcttctctgggggaatcccaagagagttcattatgagtattgttttgttgttttcttgctaaaaaggccctccttggctgggcatggtggctgagacctgtaataccagcactttgggaggcctaggtgggcggatcactggaggtcaggagttgaccagcttggccaacatggtgaaaccccgtctctactaaaaaatacaaaaattagctggacggtagtgcacacctctagtcccagctacttgggagggtgaggcatgagaattgcttgaacctgg

SEQ ID NO: 248258 - DNA, 437 bp, Homo sapiens
caaacaaggaagttacagaatagatgggaagtgggacaaatcaatcattcaactcatgaggaggaggagttgccatgggaactgttctttcaattctcttaagagtaaggacaaggtccctgacatagaatgggactagggatatcagacagctttttgattgatttccttcccagactttatttcatgaaatctttacccctgccatccttcattcatatagttcagtcagtaggatgctgggggcttttattaaaagagaattccagtcctacatcctcagtcaatttaactagagttagaaacttagtacaagctggcctagtcatattggctatttggtaattggacctgagtgggattattttctcttttcaggaacctgcatatccaacgtgtaaaatagggactatgtgtgggcatacactatgcagtat

SEQ ID NO: 248259 - DNA, 428 bp, Homo sapiens
tctggagatgttaatttaatccaggcattctgatcccagaactcaggctcttaaacataacactataaaaagcccaaaatagaaagagatgtgtgtaaaaaaccttttgaacttagaaagcagggtcaatatacctgatcataaagaaagtttatcttgcagaaaacagaaataatgaacagaagcaatgccatttagaatgccttatataacaatgctaggttaaagttagcaatttttctgtatgaataatcaattgatccagcataatttatgaaaaagaccatcctactccattgcactgtgctggagcctttgtcactatttaagcgactgtgtaggtgtggataagtttctggactctttttctgttccattgttttatttaaccatcattaaaccaaatcatattgtcttgattactgaaa

SEQ ID NO: 248260 - DNA, 500 bp, Homo sapiens
aacattatagatatgtggaaatggctgtttgattataacaattgcataatgacatctgactttatattgcaaccgacggttatcagccaattaccactacagtgtgaaaggtgttaccagaggttctgtataccatatggcctaaaacttttgaggagaaatattttcctttgcttaacaaaggcatatgaagaaaatgttacaaaaatttttattaaaggccaggtgcggtggctcacgcctgtgatcccagcactttgggaggccaaggcgggcagatcacgaggtcaggagttcaagaccagcctggccaacatagggaaaccccatctctactaaaaatacaaaaaattagctgggtgtggtggcgggtgcctgtaatcctagatacccaggaggctgaggcccgagaatcgcttgaagccaggaggcagtagttgcagtgagcagagatcacaccactgcactccagcccgggtgacaatgcgagactccatctg

SEQ ID NO: 248261 - DNA, 563 bp, Homo sapiens
gagctttccagcaaaaaccggaaagcctgctagacaaattctaaaagagctgtaacactgtaggttttcctagcactgaatttattgaaattgcaatcccttccccatttatttgtgattccaattttgatatataaatataaatagatatattttgaggtgaatttgttcagaaaattctataatctgatttgctggttgtaattatgtatgtgtgtgtgtgtgtttgcacaccatttttgaaaaacttgtttattcctgccaggaccaaagaagacatttggccttaaagatttaacacagggtcatcaggacttactcaccacttcccacataaaagtgaattgttgtagaaacagtaatagtaaaatatcgttttcattacattcctatagtacatagcagctcacaagcacttttatattcagcatattccagcctgggcacaatggctcacgcctataatcccagcactttgggaggctgaggccagaggatcagcctggccttgctatgtcgaccaacctgggcaacatagcaagacctctgtctctacaaaaaaa

SEQ ID NO: 248262 - DNA, 428 bp, Homo sapiens
ctgccagaatgagagaccccttgattttcttcctgtggagaatgttccatagtggaagagtagttcctcatgcaaatccaggctgtgctgtttaccaggagaagggacagtgggcctgggcagacaaaagcaggacatgtcccctgccccgtaagaagctcttattcatgtgaagagaaagaacattcagaacagctcgtgaggcatctgttcaagcctcccagggactcactgggtaggatgtacaggagagctgtgtcaactttgtgactccaaggagtggggccagtactggtgagaacttgggagtggaggattcagagggacagttgttgccccagcagacaagggctttaaaacaaagggctttctggcactggctcccctgtctcaagagagtgggtgttctccatagctgagaagggagc

SEQ ID NO: 248263 - DNA, 257 bp, Homo sapiens
tgaaagcaaataaagctattttgacaataagtagctgatagattttatcaacaacatactgggactgaaagaaatggtagacaaaaagaaagtaacaggatgataatgtactttttttattattatactttaagttttagggtacatgtgcacaacgtgcaagtttgttacatatgtatatatgtgccatgttggtgtgctgcacccattaactcgtcatttaacattaggtatatctcctaatgctatccctcccc

SEQ ID NO: 248264 - DNA, 378 bp, Homo sapiens
agcatggccttttaaagcctataaactctccttacaattctcccattttacctgtcctaaaaccagacaagccttacaagttagttccggatctgtgccttatcaaccaaattgttttgcctatccaccctatggtgccaaacccatatcctctcctatcctcaatacctgcctctataacccattattctgttctggataacaaacatgctttctttactattcctttgcacccttcatcccagcctctctccactttcacttggactgaccgtgacacccatcaagctcagcaaattacctaggctgtactgctgcaaagcttcacagacagcccccattacttccatcaagcccaaatttcttcctcatctgtta

SEQ ID NO: 248265 - DNA, 520 bp, Homo sapiens
cagaaatcacccgtcttctgcgtcgctcacgctgggagctgtagaccggagctgttcctattcggccatcttggctcctccccccgaattcaaagttttaacactgggatgtttgggagcattgagctaagtaggggagtggaatatgatatgcttgtgacattgtaatatgctatagattaaatgagtttttatttcacttagaggtaaatagtactagtttaactatgtaaattaagctttagtactgttgctcttgcatgatttattttcattaaaataactgtaagagatgaaaaagtattttcttttaaaataagatttcaagtataagagataatttctcaactttcatattattggaacaattaatttgatgtaggttttattcatactttgtttcttcagagatgtctgtagtgggagtattttcccaacgctttactatataaaagtccagcatgttgatgttgctcctgaccattcaactaaagtaatggaattcaaacagagaatctta

SEQ ID NO: 248266 - DNA, 216 bp, Homo sapiens
ggtggacaggcaaatgcttatctgtgtttatgggtgtgagtgtatgtgtagtgttttaatgagagaaaagaaataatgaaattttgaaagcttgaaatttgattttcatggcaatgtgaatgtatatacgacagttttctaaatctgtaagggcaccagtgtgattgcagattggttgttacctgagagattaaaaccgtcataagaacaaattta

SEQ ID NO: 248267 - DNA, 178 bp, Homo sapiens
agggtgaacaaggattgtcaggatgtgactatggaagccaggaacttgaatgacatgtgatttatatgatgtatttatttctcccccactaccattccttgagtatactgttttttccaccttcaatctgaagaattatagaaataaaaaaagtcaagataatcattaatgaaaaggg

SEQ ID NO: 248268 - DNA, 455 bp, Homo sapiens
tatttacattttgcccaggagagaattgaaagggaacagttcagagtttcccaaaatcaaattaccaaagatttgagccccaatactcatacctgaaactacagcatgttgttaccaggaactggcttatatcttgaagttgccaatttcactacaacagaagatttgaggaagccccttgcctgcctccatcctactcatacccagagcataaaaaacaatagaaacatattgtgcatggagttgtgctatcacccaatagctttgcgtaccacagggcttggacacataagtaagtgtacgttgaatgaaaccatccccccctatcttttgacaagactaacatttgatccccattttacagaacaggtaagtaagactccagcagagaagataacatatccgagatcacaaaccctgtaagagacagagctagaatgagggggagctcagga

SEQ ID NO: 248269 - DNA, 305 bp, Homo sapiens
gttaacaatactgaactgtatacttaaacttgattaagatggtaaattttatatgtgcattgtacaacatttaaaaagagagagagagaaagagatgtgcatggggctttttctgataacagcattattagcttggcctagatgtgagaaggcagtctgatagaacaggctggtttcctcattcaaggaaatattgtttctcacgcctgtaatcccagcactttgggaggccgaggcgggtggatcacgaggtcagaagatcgagaccatcctggctaacgcagtgaaaccctgtctctactaaa

SEQ ID NO: 248270 - DNA, 674 bp, Homo sapiens
  misc_feature (393)..(393): n is a, c, g, or t
  misc_feature (395)..(395): n is a, c, g, or t
  misc_feature (416)..(416): n is a, c, g, or t
  misc_feature (431)..(432): n is a, c, g, or t
  misc_feature (441)..(441): n is a, c, g, or t
  misc_feature (474)..(474): n is a, c, g, or t
  misc_feature (482)..(482): n is a, c, g, or t
  misc_feature (494)..(494): n is a, c, g, or t
  misc_feature (524)..(525): n is a, c, g, or t
  misc_feature (539)..(539): n is a, c, g, or t
  misc_feature (560)..(560): n is a, c, g, or t
  misc_feature (584)..(584): n is a, c, g, or t
  misc_feature (586)..(586): n is a, c, g, or t
  misc_feature (611)..(611): n is a, c, g, or t
agaacttgttcttgaccttcaatttatttagtgaactttctaaccgcagagactaggacacaaattacgtctcaaggtaacagtgcaagttagagtacggtattcagagaaaagagaaaggctgaatcccaaatgtttaactatgcaaaacccaggggtgtctggggcctcggacctctgcagaccccagcacggcacagaaaggaaaccagtatttgcaccgtggcaaccgcgaaccaggtctttcaaacgcccgactgcatgtgagcctcacattcttgctcgtgccgaattcggcacgagggacatatgctatcacatagagttgggatacgtttaactttattaggaagagccagttttcccaattggttttaccattttaacactctnantagcaacatgtgagggtctanatgttccatgtgctnnccagcactncaaattgtcagtccactactgggtagtggtctntcacttgngcccccctttgnttttaaagaagctgtgccaatctttgcatnngtgttgtaaaggcntggtaggccttctaaattcanatcttgtgattaacatttcccagncntttctaatgaccccgtgcctttganaaaactgtagctttttctaatgtaaagggttttaagctgtatttcaaggggacattacttgtg

SEQ ID NO: 248271 - DNA, 326 bp, Homo sapiens
actctttctcttatcaaaggccagactaaccttcaaagccaagtggcttggctgaggttcctaatggagatgaagggggtctcaacttttagaacatatttgactcattcatgtgtgactatacttgataaatgcatgtcagctatctggcttcaaactggagcttctacaaactctactgcccaacaaaagcttacatctcacatctttcagcctatacccacacatctatttcctgcggtgtgccctgaagttggaacagtagagtaggcattcctcatgcatactagatctagctctattattttacttagttctatgtagtc

SEQ ID NO: 248272 - DNA, 598 bp, Homo sapiens
atttgagatacaaggtaagccatataaatgctggttaactctcccattcatttggggagctccctcaagagaaatatggtactacagttgatggctatgtagatccaagaattaggtccctgtaacccctgtataagtgagaagctacattatccattaatttattatttttttgaaaaaacagaactgaagttaaatagcagcatatctattcccttatgatttctactaacacatgattcaccaacatgagatatgtaaataaaaaccattataaaaaagaagcatcttactcactaaacttaacttcttcaaagaaggcttaattaagaaaaaagttaacttacctttaggctgtcccagtatatttcctaaatgacaactacctgagttggcaacttatgaagtaaaattattacttttctctttgacatcattcatttttcctttgaacttattctactgaagtcgcttcatatgcatggaccatacttagttaataaaattgagagtctttccccatggtgttctctattttctaatgaatgaaatctctaaaacagatgcacaatgccagactcacttattgaattcctct

SEQ ID NO: 248273 - DNA, 412 bp, Homo sapiens
aaaaaaaaaaaggtatttgagttctttcctcaatccatatacatctaaaataaagttatagcatataggcaactttacattctagtcttccttgaaacagtgtcataagtatttttcactgttagcatgtgtttgctcattggtttagcaaacatttgttgctgctgtgagctaatcctgctgggtctgaggataaaagggtgaaagaccattctggtcctcctggagctcactagtaggagagacataagttgacagtgacagctcagtatgatagggcaagaagagaaggggatgaggctgggtgtggtggctcatccctgtaatcctagcactttgggaggccgaggcagattacttgaggccagcagttcaagaaagcctgtgcaacacagagaccccgtgtctatta

SEQ ID NO: 248274 - DNA, 450 bp, Homo sapiens
actacgttggaattacaagtaggacaacaaagatgactattaaagaaagcctcctgagtgctggaacacagcaggcatgggtctgtccactcactgtaatgtgatttgcacaggaaaacatcacatagggcacatcaactcaggaaagatagtcgttgaaaagctacctcagctgggcgtagtggtcacgcctgtaatcccagaactttgtaaggctgtgaggcttgtggatcccttgagaccaagagtacgagaccaacctgagcaaaacagggagaccccgcctatgcaaaaaatacaaaaattagccaggcgtggtggtgcactcctgttgactcagctattcaggaagctgaggcagaaggaccacaagaagtcaaggccgcagtggggtataatcacatcactgcactccaccatgggtgacagaggtgagaccctgttgcaaaa

SEQ ID NO: 248275 - DNA, 593 bp, Homo sapiens
tctttaaagacaagcaaatcatgattggaggtaaaatatgcccagaaaaaaagaaaaatggaagaaaaataaagacaggtaaatgaaaatgactcggtccagagatgcatatatccttactgtgtggcaaatataaaaatgcttgatctcctcttaccaaaaacacagacttaaatctatacctgtgaataaaagcatagaacccatgtaatagctacagtgtcatgttttgtattcagaaaaggtttataacagtgtttctcgggacccaggaaagaagagaaagctatgttattagaagtcactatgtacactattatctccagctgaatgtaaactgtgctcttgatgggaatagctaaagaaacatcaaatttaaagaaggagtcattagataatttttccatttcaaacagtgctttctgtgcttgctggttttgaccttcttctattccttcagaggccatctccccctctctctggaagagactgtaaataactaattattttagaacaagaaagaggcttgattcccttagctaatgtaatatgcatactagtctgtatgaacgctagaaatcatttctttcaaa

SEQ ID NO: 248276 - DNA, 355 bp, Homo sapiens
  misc_feature (212)..(213): n is a, c, g, or t
atttaagtaaatgtctggaaaccttgactgatacctttttcttaaagatatactgcctactcagattctggaagttgtttgtttgtttgttttgagacggagtctcactctgtcgcccaggctggagtgcagtggtgtgatctcagctcactgtaacctccacctcccaggttcaagccattctcctgtctctactaaaaatacaaaattannggccgtgttgcacatgcctgtaattccagctactagggaggctgaggcaggagaatcgcaggcggaggttgcagtgagccgaggatttgccattgcactccagcctgggcaacaagagcaaagatccgtctcaaaaaaaaaa

SEQ ID NO: 248277 - DNA, 426 bp, Homo sapiens
gggacacaactttattgttgtccttatcactctactctaacatttaatgacagtttaatactgctttctatgtgccaggcacagtggtagattctaaaaatctaactgcaaataaaacttgaagacagtggtatctcgtagaacattctgtgaggatggaaatgtcctatatctgcattacccagtatgatagctgctacccatagatggctattgagcacttgaaatgtggctagtgcaacagaggaaccaaatgtgtaattttattacttcatatgtacatgtaaatagctacatgtggctactgattactgtattgaacagcacagctctaaaacgtaagtctgatgaggacagagatccgtgtcttttgtttatcactctactcccagggccaagaacagtgcctgccatatggcatgaatg

SEQ ID NO: 248278 - DNA, 182 bp, Homo sapiens
ctttgcttaattcaggcaattaagataaaaatatcaaggtaatgttttgcaataaaacctgggtgttagcatacatagttcctttttaaatctaagccttatgatgataggtatgcaataacttaccatcttaattaaggtgctagaattagatcttacatagacttagatttaagtcgagc

SEQ ID NO: 248279 - DNA, 457 bp, Homo sapiens
caagcgtgagccaccatgcccagtactgtctggtttcttaataacattgttgagccattgcaatagccttgggatattgctctttgtactttttcttatgcaagaaaaacagattcacaagttatttgatgactctcttcccatcaaaaggaaaagtctaattctttttcccttgattatggatcagcttgagcttgttgcttctaacaaatggaagagagcaacatgctggagtgatcacatggaggaagcacaaagggatacatgcccaaggggccccagctgttccagcccctagacatttgaatctactcaggcaccaagtaagcaggtgaatagccttcaggtgattgcggcccactcccagctgaagccaagtggagcgcagatgagcttcccctgctgagccctgcccaaattgcagatttggaagcaaaatgaatattgttttaagcca

SEQ ID NO: 248280 - DNA, 1076 bp, Homo sapiens
cgcccggtatggggaaagtttaaggcggaagagccctcgtttgtcggctgcttgggaagtctgaggattactgggactaacaggacttcagctggggcttcaacgtgtggtgtgggcttcctgacaccacggccactggtttccaagagtttcaacaatattttcatcatatttattgaaggcctcactgacagacttctcaaggcccctctaccttctattcgctgcctggccccaaagccagtgccacacattttaggtttttaactgcagcagcacctatgatgtttccaaaatctgtatcattaaagtttgatcagagaagcaaaaccaccttgagcaaaacaaggaatttattaaagagattaggatacacattgttatgaaagctgcaacctgctgcccctgtgtccagaagtgggcctgaagtcagcagggctggcaaatggatgtgcagtgggagagagtaggcgtgagctgcacctgcagggaggagatggaactcctgtggatggactgaaactgatgtcttccacgtcagcctctcaggcctccaacactccagcgctgatgatgaagatgacctgcagaggagctggtgcccttcaccatggaattgctcataaacccaagattcagtgaagctgaagaagcagttctggtgggagctggaggaactgcaggcacagctgctgccctgtaccaatacattgagccagtggctgcctggcattgtgtgtgagccaccacagcgcctggccctacacagactttgactgtaaatatgactgctgtttcacttctgccttccaaattttgctcagattttctgagaaacatagttcagcttaggtacattgacacagtacaaagccaccgcagtggctggttagggagggattatgaatgcaggctgagaatgcacgggaagcgtttgtctatttatagagtaggtaccattcaaggatttatgtgaatcaggtgcaaagaactcacacaaagatggggaaagttagtacttagaaatcagtgatactagataaccaataaataaaaataaacttatttttagaaaa

SEQ ID NO: 248281 - DNA, 390 bp, Homo sapiens
tggaaactattttaaaaatttaaacctgaaatacagtacctagaatctgtaactcattggatagacagtataaaacagaattagttaacttaaattcaggtcaacaggccaggcgcagtggctcctgcatgtaatcccagcactttgggagtcagaggcgggtggatcacctgaggtcaggagtttgagaacagcctgaccaacatggtgaaaccctgtctctactaaaaatacaaaaaaaactagccgagtgtggtggcacatgcctgtaatcccagctacttgggaggctgcagtagcagaatggattaaacacaggaggcagagttgcagtgagccaagatcacgtcattgcactccagcctgggcaacaagagcaaactccgtctc

SEQ ID NO: 248282 - DNA, 1028 bp, Homo sapiens
aacaaaggggtagtcaagactgaggaggaccagcttttgaggacaatcactgcgtgttgctccagctcacataaaggcacggctcctaaggaacaggcttgagacatgcacaagtgctgtgccaagtagttcaggagcctggtacagctgttcccaatatgcctttacctcctgttgcctcttctaaccacaatagggtgtggatgacatagtgcccttgctcccagaagaaactgggaaagttacaactcattaaccagttaggttagtgttggaacagtgcttgccacattattctgagaagcctcagatccgtgagggtgatgtggagctcagaacacatggcctgaccccatgtggggttttactggagcagttgttttgatctgtcttacatctgggggatctgcaagagatttcgagggatgagggccagttcccttgctaaaacttagaatgtttaaaaaaaaaaaaaactcccttgtactattgagcttggtacatctttccttgaaaggagctaaagtgaaataacttatagatcctgacatgcaatgagctgggtttttttccaattttctttgcttcttgtctctgaacatatgcctccttataattcttcctatatgtgtttgatagcattgttctctgagtaatagtaaccatgagaagaatatctaacatttattccatgcctattgtgtgccatgccacatgctgggcactttatgtgcccttatcctaccggaccccgctgcagccctgtgagtggatggtccctctcttcagctctcaggtgacacaaaaacaacaacaacaacatccgcaacagcaacttcttcagttcatttagttggtaaattctggactcagaactgcaagctaggcagtaactcagaggttgagttgacttgatgtataatgtcacctttaatgtctactgaacaagagatgtgtgtgtataagtaagacgtaaattattttttcatcttgaaaaggaatgtgctcaatagagaaaatctgaagtt

SEQ ID NO: 248283 - DNA, 400 bp, Homo sapiens
aacattttctttatgctgtatgatcataattagtttataatcttactcattggggtggctctgaaataggaagcaagtaagtaagtatccatcttctaggggaacaggtgagtgatgaaaatagaatcacatcagagttggctggcgcgttggctcacgcccagtcaaatggtgatttttctagctacatcatttcttctgcgtttatcagttggcattctactttaagaaaagctgtcacttctcccccttatgtctatgtcagcatggactcatggatttttatattttatgcagtagaatcacttgaacccgggaggcagaggttgcagtgagctgagatcaaaccactgcactccagcctggacaactgagtgagactccgtctccaaaaaaagca

SEQ ID NO: 248284 - DNA, 782 bp, Homo sapiens
gatatacctctagctagactaataaaaaaagagagaagttccaaataaatacaatcagaaatgacaaagggaatattaccaccaactccacagaaatacaaactctcagaaactgctgtgaacacctctatgcactcaagctagaaaacctaaaagaaatgatacattcctggaaatatacaacctcccaagattgaaccaggaagaaactgaatccctgaacagagaatatctcttgtaaagatgtcttcaaaatctcaaactccagtgctccttcttttaagaactccaggcgtgtcttaccagtaatgtccccctggagatgatactgacattttgaaaaacattcctcaaacagaaatcaccatcttcctctttcaaatcctgttcctctctagcctgtgctctccatatgctcatccattactgaagctagaaactgaataattgtcattgattcatatttagtacctgttggctttgcttcttaagataaattccaaatggggttgctgaattatttttttaactttttattttcaaataacttcaaacttacagaaaattggcaaaaatgtactaatgtttttgtataggtccttcacccaaattggttaccaaattttaacattttctcatatttgctttgctttagcattctctctatatacacatgtgtataaatatatagtgtatatatgtacatatacacacaaacacacacacatagacaccaaccaagaccgaccaattatataaatatatgcattttatatataata

SEQ ID NO: 248285 - DNA, 361 bp, Homo sapiens
cagtgaggggcttagcacctgggccagcagctgctgtgctcaatttctcgctgggccttagctgccttcttgcggggcagggctcgtgacctgcagcgcgccatgcctgagcctcctccccactccgtgggctcctgtgtcgcccgagcttccccgacgagcgcggcccctgctccatggtgcccagtcccattgaccacccaagggctgaggagtgcgggcgcaccgcgcgggactggcaggcagctccacctgcagccccggtctcaactgcagtgctacatcatcatgaggccttccatgaccactgacccttgctctcttcaaaactattattaaagtttgcaactgcttatttatc

SEQ ID NO: 248286 - DNA, 446 bp, Homo sapiens
agcccttgtccagctgtagcccggggacgctgcagcctgagcaggactgcacctgttccctcccaggagcctcatctctgtccggcctggctttggcttcagatgccctcagctttggcttcgaaatctgttgggtcagattcacgagagctctggccttctttgggttgggaattttaaatagttttttcaagcaggcagtagatcaactctacttgcttacttctgggtgcatctcctgttccccggccccagatcttctttttccttggtttatcctctcattgtgttgcagcacatcttccagtggcttccagagaaacagtgaatggaagccaagctttctgaccctcacatattttagaatgtcattgttctaccccaattcctgattactagtttggctggatgtaatgctctaatttaaacataacttctcttcacat

SEQ ID NO: 248287 - DNA, 523 bp, Homo sapiens
tagtctcaacatgcaggctccacccttagaactcatctacacctaatcgcctaccaaaggcctcctctccaaaaaccatcacattggaggttaggacttcaacatataaatttaggggagaggaatacaatttagtccctagcagtcaccatataacatttctaaattcttaacatacacggagggaaatgttgccacaagaaacaatgtaaaataatgtaagagcactggaaccacactgtctgggtttgaattgcagttccgtctctcactaactccaagactccattccttatgtgctgctatggcctgaatgtttgtgttccccaaaattcatctgttgaaacctagcccccaaggtcctgatattaggaggtggagcctttgacaggccattaggttatgagggtgtgctgagccctcatgaatggtattagtacccttataaaagaggcaccagcccagacatggtggctcatgcctataattccaacacttcgggaggccaaggcaggtggatcac

SEQ ID NO: 248288 - DNA, 583 bp, Homo sapiens
tcattattacaaattaattccaaatgaatatgtttgaacagggcattggttttgaatctttaatttatctcctccttagccttgctgctgacaaatcataaatagatataattaatgaaaatgttaatagtgccggtctccagaatatctctagatcactgaccttctgattggtggaaaaacctttggagaatgatctttacaggattccatggcagtgagttaatctatttttctctacatgggggcagcagacgaggtgagtttcttcctctgtcatttgtaggatctactgttattctctggagagctattgtgtcagaacggatttggattattttttaaaactactgctacctagagggtaattttattaaattcctttatcatttggattaaatacagcaaaatgaaaccagctcctcctgctcagaggagctgtcaccacaatctttaatattttcttagcattatttcctttaaagtatgctttgggacaattaataatgactaatacttaaattttcactatgagtaaaagctttttggtaaacatttattatatattccatgtcttcctttt

SEQ ID NO: 248289 - DNA, 494 bp, Homo sapiens
tcaatatgtctagacaatgtggttcatctgtgaggttttcaaattgtcacaaatcttcccccaaatttctaacatatttattgaaaaaaatccacctacaataaactaatgttattcaagagttaactgtatatactctttggaatgtcatatgaattttgaatggcagaagaactggagccagggagccattttaggaaacgactaacagtctgagtggggatatgggctgccctttaaagtgacaaccatataatttacctctgggaatgttctaaactgttcaatattcctaccttggatatcaagactgataattcttacatttctctgactgcttagatatggcaataaacaccaacctcaaagtttattttgccttttaagttcccaagtcatatcatcagttaattcttcactgtatccttgtactgaaaacatattaagatttattataatagacaaaataaataatgttacatcaccttctttta

SEQ ID NO: 248290 - DNA, 403 bp, Homo sapiens
gcttgctcaattctgtttggcaacataatttcacaaagcctctgactctgacgtctctggaaagatcctttgaagacaaaacaggatagggcacacagtcctctatgtctcttgcctgagtcgctatattccttaaaagataaatgggctgggcgcagtggctcataaacctaatcccaactgctgggattacaggcgtgagccactgcgccgggcccacaacttttctttagtaaacgtgcctaaaacttggaaacaatcttttctgaagtgactcttctgttctttggtctttgaaaaagtctcttcttgcctacttaggttaatgtaataccgtatatatacttgcctacttaggtaatgtaataccgtatatataatataaaacattttcagactttgt

SEQ ID NO: 248291 - DNA, 253 bp, Homo sapiens
ttccttttctagtttgttccagatgaattggtaaaaacacagtaagaagcgtaaggcacagctgcaaaagggttgattgcaaatggaggtacagtttctgcctaaaaccagactgtgactatggaaagctcagaaaccagcaggcaaagagcctgagggcccaaagcaggccagcaatacccaagtcccaagggtcagtatattggaggaaagtaaaggagtgaatcagactgcagaccaagtggaagaggca

SEQ ID NO: 248292 - DNA, 480 bp, Homo sapiens
aggggcctgcctcattacgagctgcacaggagggctgagcttgcattagcagcttctccctccagtgcaggagaacgcattaagatttacggttcatctgaaagtagcttagaaagaaaccatatgctcttatcatctcttgcagaagttgcagacaagttatttaaaaatctcgttttcttaaactgtctttattgcaaagaaaagagcctctgggatccacttcaagtagtcattgtggagggtacagcaagccagccctgggctaagcatttaccccactaattcaccaccacagcaaggtggagatccttgagtttttgcctgtgtttcacaaatgaggaatccgaggagcagagacctgaagtgacctgtccaggacacaagagtgaacccggggacaaagccaacccgctctgctggggctagtgcctttccacactcctctgtttctatatttaaaccgagtgaaaggagaca

SEQ ID NO: 248293 - DNA, 723 bp, Homo sapiens
gactcacacatagatattctgagattgaaattgtttgctctttgtgttacttcatgttcctttggtttaagccagggtgtattatgtgaagtcaatcatggttatacttatctttcatcattagtatccctcatcatccgtgaagtggctttcatcttgtaggtcaaatattgggaggtatttccagttaaaaattaaaaagtcaagaagtctaaaagtacaatctctgagctttggccgtttggatgtgacacacagcccagtctcatcaaaattaaatgagaacaaagtgagcaatgtatcaagtaggaatgcatttggctgtaagtaatagaaaaatagaacaatctggtcagagtagcttaaccaaataagaatatattatttttttcataacaagaagtttagaggtgggcagtccatggtagggaataaccccacatgcatcagagtccgtgctactcaaatccttccactccgccatccttagcatgggacttctgccttcaggtttgctgcctaatgattgtaaattgggttttccatctttagctccatatccacattccatactggtagaatatgggcccaatctgtttgcctttgagtctttcttcttgtttggaaagggatgttctctctgaagacttccttgtgtcaattggccagggctggctctcaggaccaccctaactacaaggttactgctagggggtgatattt

SEQ ID NO: 248294 - DNA, 156 bp, Homo sapiens
cctctgaagcatcacttttatctgacctgggtatgtttgtctatttatttgttacacgtgctacatggggaaagcgtcttagtttaatagttttaattgtatcaaggatgtgcttagatacaggctttcaagcctgcagttaaaataacacttgta

SEQ ID NO: 248295 - DNA, 695 bp, Homo sapiens
gttaagatgagacagactgttttgagctcagttatttcttgttcagatccttcagatagaatataatagatgatgtccttacggtaagagaacattggcagggcaccttgcaactaaaggatcattttgaacccggcttgaagagaagcagatcaattccatcagacctcatcctagaaagcaagccagaatatgactcaagtaatttagttatagttctatctgatattcttctaagatttctcatacaaggttcaaaatcatttagcttttctaggttctgacctagagaattgaattagaaagttcttaaataaatcttcctacttccatgttctttcatagtatgggtcacttaggagaactctcagccatatatgtcagaagccatgattttcatctcccttaggccctgagcaacttcatgaggagtcagaattattctagaaatgagatagctctgtatcaatttcccccagttgtttttgaagataatactcatctttctactgtgaagaaggaaggaccaggcataggatttactttcattcacttttttactcattcattcatttactcatttcttaagtgtactttggcaggggctgacaaaatatagagctgtgctattcagtatagtaaccatagttgctagccacatggggctactgagcactggaaatgtggctagtctg

SEQ ID NO: 248296 - DNA, 688 bp, Homo sapiens
gcttctttgagttcaccaaacagcacatttaggaaactttggttcatttttcaaatgcaaacattctgaagcctgaacttctggttcaagtgttctaacttggcttcaaggtcagaacacaaattgaaggatagatcccagaccattttagaatcatgatggcaacgcatatgccatttgtattgaactaactgaccaatgtgctgagcagagacgatgcaaaggagaataatgagaaacaggccactttagcacatgaaaatcatccatttaaaaaacttctgagccaggtgcggtggctcacgcctgtaatcccagcactttgggaggctgaggtgggcagatcacttgaggtcaggagttcgaagcctggtcaacatggtgaaaccccatctctactaaagatacaaaaaattagccaggcatagtggcaggcacctgtaatcccagctacttgggaggcaaaggcaggagaattgcttgaacccaggacgcggaggctgtagtgaccaagaccgcgctattgcactccagcctgagaaacaggagtgaaactcagtctcaattcaagacccacagcatggaagattagattaccaactcccagatcaaaggaatgtagagacaaggaatgactcttctccaaagcacctgaatttatgatatcctggacatagtctcatagtat

SEQ ID NO: 248297 - DNA, 536 bp, Homo sapiens
atgcatttcccaggagttaaagaagaactcataatggaaattccaaatttgtaataaatgtatatcaaaattgtaattataggaagaattacatgtcagaagtgtgggttgcaaataaagggagatgcaaagggacagttaaagcttcatatgcattaatggaaaaaatgtcaagaaagagtgacaaattgagcgttcaactcaagaagttagaaaaagtacaaaataaagctcaagaaaatggaagtaataatagcacaacttagtgaaataaaacaaactaaaacatatcagcaaaactgaaagtgtttctttgaaaagaaaatgttataaaaagaaatccagagcttgtgcaaggaaaatgaaaagataccagcaaacaatattaacagtaaaaattgacatagagatatttcaaatgattaagaggatattatgaacaactacgaataaattttgaagcctaataaaatgggaattgtttagaaaattttaatgaccgaaatagactctcaaaaaaaaaaaaaaaatagaaa

SEQ ID NO: 248298 - DNA, 444 bp, Homo sapiens
gagaaataaatcggagaatatgctgaaatttatttaattaaggtagtgcaggggctggttccatattaaacatggtgatggggatttaagataataatgctaccatcagtacatctaaaattgtttaatgttttactgcaaatattttttagctagaagaaattaaacaagtggggaagattctcagaaaccaacacagcccaaaatgtgcagataaagaaccaaaaaataacgtagaaaggagcaagattataataaatatttttaatgagttaatttatttcctctttttaagtcttaacttgtaacattatttgaaatcacagtaaatgtacattttatttcttgtttcagccctgaggtgagtttatttggaatgtttgttttaaatggatttagccatcatggaattaggtcatcttggaaaaatgtgttttttctaaa

SEQ ID NO: 248299 - DNA, 190 bp, Homo sapiens
gtaattttcatcccccatcttctgtcccaacactgaaaatagtaatgagtcatctccaaaactgacccagccttctgaaatccaggaccacaggaagatgttcttttgtatctcttctaaagtaatttcgattttgttctttttgtcttactgctgttagttaagtaaatacgcaatgactcaaatagaa

SEQ ID NO: 248300 - DNA, 871 bp, Homo sapiens
ccacgctcggccgacacaattattttaaaagggcaaatgaaaagaacacagaaaaggacataaaaatagcctttaaatatacaaaagatgttcaactgattagaaaaacgcaaactaaaatgacagagaaaccgtttacctatctggttgtgaaaatgtcaactgctggaccagcctctactgagaggtggggtgggaaacaaaccaccctgaacgtggccctctgagatgcagggaggaagggctcctacagcgttaacctggcaacatcctccaagaggccaaaggcacacgacgtgtgaccaagcaatcccaatgggaacggaccctgcagaagacggatctcccatgcccaaagggactcatgcacgtgaaattcacagctgaagcagcccggaggagtcggcaggggaccccgcaaagtgggtacatctgtgcagtggaacaccgtgcagccaaaaaaaagggcatgagaacacctccagggtttactattcaagagaacaagatacagcaaggtatgtattgcatgctattatctcctctgttataataagaattgaaattcctatttgcttatattgtaaaaaggagcacaagaaactagcggtccatctgagggcatgggagatgggagagatggggcaagagtttactctgtatgttgttttaattttcgaacacgtgaatgtactgtccgaaaatgaaatgccatgtctatctctgtgtgtgtgtatttatcttaagagcagagcacacactaagttagaaaaggccaaaatcctattcacgtgatcgcttgtgttttccaaggtcgaattcccaccccatctccatattaaaatctctcgatgtttctctaccaaagttc

SEQ ID NO: 248301 - DNA, 767 bp, Homo sapiens
gggctctggaataggatgtaagagtggaaaactagatatgaatagagggatctgaaacgtagggtttgggtacaattatgtcacgtttaatttgccaaagagatctggtttttcctactaagtaaatttcaccaaatgaacagtttggacagccatcttatccaaactattcaaatgcacatgtaaatctaggatagtctatcgtggaacctaaggtatgttcaggctcaggatgtcagatttccaagttgctaaagcttccagaatggcaaaataatatatctcgctttcagcagctgtggcagccactgccctctcatattaggtttgtctctctgttaaattaagttgcctgtcttgcttcccttcattaaagggttttcagttacttggaatgctgctgacccagctgatatggccccgcttctaagccataagtctggctgcgcctcatgccaagcatgcggatgcatttagagagcacctagaggatcccagccctgcaaatgcccagacacctgcaggaaatagaaatgtagttctgggggtgagggcagctacagccataaaaagggcatttaggttgagaaaagagggatgtgggcagtaaattagactctaatagtaaagagtctagtaaatagtaaatagactctaatataaatgtggctctaaatcagaaagtttctcctctcttctctggctcaaagtagatgttctatagctttagctcatggaatagcgtaagcatggagatccagtgagtg

SEQ ID NO: 248302 - DNA, 500 bp, Homo sapiens
gaggccgagatgggtagatcacttgaggctaggagtttgagaccagcctgggcaacatggcaaaaccctgtctctacaaaaaatacaagccaggcatgatgctatgcccctgtagtgtctgctactcaggaggctgaggcagaggttacagtgcgcaatgaccattccactgtactacagcctgggaaacagagtgagacaaagaaagaaaagaaaaagaaagaaagaaaagaaaaagaaagaaagaaagaaaaagaaagaaagaaacagaaggaaaagaaaaaggggaaggggaagcaaaaagaaaagagagaaaagaaaagaaacaaggaaaggaggggagggcagggcaggactgcttaggagatgggtgcaccaaaatctcactaattaccactaaataaattattcatgtaaccagataccacctgttccccaaaaatctattgaaatgaaaaatgtttaaaaaatagaaaaagaaaactcattcataatccaaa

SEQ ID NO: 248303 - DNA, 706 bp, Homo sapiens
gtgtcatgacataaaaaaggttaggaatcactgcttgtaaagaactaaggaaatgtttttgccttttggctataattcattcttattctctccctctcttactctctcgtctttctttcccctcattcttctctactcttttctactcttcaaccctcagaacttgactcccaacaattccaaaacatacacattctgaatttcagccaccaaaacagagagaaagatgatttcatttcaaatataaagtcctggggaagaactgtggttggtccagcttgagtcagatgcccatccttggacaaatcaacagtgaccaaaaggcaggaatgtcttgtgcagatgatccctaacttatgatggtttgatttttttgacttcataatggtgcaaaagtgatacacattcagtaaagaccatacttcaagtacccataaaaccattctgtttttcattttcagaatggtattcgataaattacaggagatatttaacacttcagtataaaataggctttatgttagatgattttgaccaactgtaggctaatgcaaatgttctaaacatgttcaaggtaggctaggctgagctacgatgtttggtaggttaagtgtattaaatacctttttgacttacaatagtttcaacttatgatgggtttatcaggctgtaaccccattgtaggccaggcacagtggttcacacc

SEQ ID NO: 248304 - DNA, 365 bp, Homo sapiens
gaccttttgcagttttccacagttgtgtcatatccagtcactcacgggcaagcacaattagtggtactgccaagtgcgggtggagaaatgccaaggcggtgaggaagtgaatcaaaatgaattgaaattacctgcagagaactgatgaggaggactcagtctgccgcaaaaatcaatgagttacaaaacaaaacaaaaaaaggtctgcctgagaaaatcaatgaaacccaaacggggtgaccatcgagaaaaattctcacatacacacaagtcatacctgacctcagatgtgcccagcaaatccagctcttgcccagcttgctaaagggagcataacccatctaccctctgcagcaggatttctc

SEQ ID NO: 248305 - DNA, 379 bp, Homo sapiens
cccaccagcttgtatctttttttgtaatttccttgaggctccctcgtagcttctagacagggaggggctcatgtggatgagggggcctagctccctgctctccctgctttctgcgcatccaagatgtgggtgtcttgagtgatctcaggagatacctgagctggggaaatccagcagccctttctcgtgccttgcagagcctcctgtcctgcagtctagccagtccccggttagcccctgggctgctcccatagccacattacaggccccaagaccatggcccatagctgtggctggtggtttgacacatcttcgtggagctgtgagttgctgctcactcaggcctcgcaaccgagagagacagagagataacaaattt

SEQ ID NO: 248306 - DNA, 442 bp, Homo sapiens
cagaaaatttaaggggcagagtggggtcggcctaccagtctggaagtcagcagaggggactggtggctgagggtttaacttctgtgggaaatgacatctaaacatgctccttgagagacaagccacataaaccagactcataaattaaaacttagggcttgcacctgtaattccagcacctcaggaggccaaggcaggaggattgcttgagcccagaagttccagaccagcttggaaacatacacccatctctatgcaaaatttaaaaagtagccgagcttggtagtgcatgcctgtagttccagctactcaggaggctgagataagaggatcgcttgatcccgggagtttaaggctgcagtgagctatgatcacaccactgcactccagcctgggtgagagagcaagaccttgtctcaaataccacccccttgcaaaaaaa

SEQ ID NO: 248307 - DNA, 450 bp, Homo sapiens
ctccagaacaggcgaaaatgctatgtgtgtcctagcctataatttgtgtgataacatcagggttgttttgatcttatactagggacagtaaataaagtagaaaccagaagttattcatgggactgggtctaatcagaagtcaacatggtggattagcatccaagatggggtggtttttgtctccacaaccttaacaaggctgttgaaaaagtgatccgtaaatatacatataatcacttttcaaagtcaagaaacaatagatgctggcgaggctgtggagaaaaaggaatgcttttacactgttggtgggaatgtaaattagtacaagcattgtggaagacagtgtggtgattcctcaaggatctagaaccagaaataccatttgacccagcaatcccattactgtgtatataccaaaaggaatataaatcattctattataaagataca

SEQ ID NO: 248308 - DNA, 309 bp, Homo sapiens
agggggcggagtttgggcagggggaatatatttaagtaagttctctgtgaaagcccatccatgttggcatatttcttatttatttttttaaagtcctccctgcagtccaaatatgttagcgtatctctgatttcagtgtttttattcgtaaacatggcatcaaagcccaggtaggggagtgtgaaaacactgtccaatttgtcttttacctcaaggagtgtaatttcagaaaagtaataaggtgaaaacccgctttcaggagttagagactagaactaaggaaactgaagtctgtcattctgtttgata

SEQ ID NO: 248309 - DNA, 709 bp, Homo sapiens
ctgagtttatttccaaacaggtcaggcccagatacaagcgaccgcgtagttgggagaagagcaatgctggaacagtgggtccctgtcttccacatttcctaaagtgggagggaggcggaggagtgggatagcttttgattgagggcattgacatttgtctaaggaattaaacaactgggcagctagatgacctcagtaaccagtctcgtctcagccccagccttttgatgctcatcatcttgtctggttttataaacagggagatgaatccaccttcatcggacttggcaggacagaggcatgttcatctgtgtaatcaggtttaatagcagtggcgcttgtgaaatagtttgcagtcctggtgcccagggtggaagccttctttgctcctttgtgttcctggggtgtgatggcatgcctggccctgcgccttccgtcctccaggctcccaagctgagggtcaggggccctgtcctgggcaggggccgtggaaggagcccttggtcaggagcttggagtagcaatgtcgggttttctgaatgagaagcaaaacaacactcgggaaatgagcctcgtttggctggaaatagtgtgccagtgttttcttgcttcgggttagataccagttaatttacccattggttttcattaactaatacatctttctgagcacctactgtgtgtcagggctaagggatagccagcgacc

SEQ ID NO: 248310 - DNA, 655 bp, Homo sapiens
ctgagtttatttccaaacaggtcaggcccagatacaagcgaccgcgtagttgggagaagagcaatgctggaacagtgggtccctgtcttccacatttcctaaagtgggagggaggcggaggagtgggatagcttttgattgagggcattgacatttgtctaaggaattaaacaactgggcagctagatgacctcagtaaccagtctcgtctcagccccagccttttgatgctcatcatcttgtctggttttataaacagggagatgaatccaccttcatcggacttggcaggacagaggcatgttcatctgtgtaatcaggtttaatagcagtggcgcttgtgaaatagtttgcagtcctggtgcccagggtggaagccttctttgctcctttgtgttcctggggtgtgatggcatgcctggccctgcgccttccgtcctccaggctcccaagctgagggtcaggggccctgtcctgggcaggggccgtggaaggagcccttggtcaggagcttggagtagcaatgtcgggttttctgaatgagaagcttcttgcttcgggttagataccagttaatttacccattggttttcattaactaatacatctttctgagcacctactgtgtgtcagggctaagggatagccagcgacc

SEQ ID NO: 248311 - DNA, 455 bp, Homo sapiens
agtgtttggataggagtctcttctcctgaggatccaggagaggattggattcatttttcaccaaaatgaaaataaaatttagatattcttgattgaaaattcagaactttatgaaatttttttgcagatgttgggtcagtacaatatctgagaaatggggccaggtgcggtggctcacgcttgtatcccagcattctgggaggacaaggcaggcagatcacttgaggtcaggagttcaacaccagcctggccaacatggtgaaaccccatctctactaaaaagacagaaattagctgggcatggtggtgcctgcctataattccagctacttgggaggctgaggcaggagaattgcttgaacccaggaggtggaggttgcagtgagccaagatggtgccactgcatttcagcctggggccgcagagcaagactccgtctccatctcaagagaaaa

SEQ ID NO: 248312 - DNA, 340 bp, Homo sapiens
gttatgtgtggatcaacttacaatggatttatccagacaaccccattataagctgaggagcatctgtatttacatagcttagcatatagtaagcccctgtccataatgccctaatgaaggtcaattatggagcacacaatattttgagattaagctgatgactgataaagaatattcctttcctttattttagagcttgcacctcttggatagaaaactggactgaattgaggtacatggcctcagcctctaaattatgcagaggaaactgtagacactcctaatggtggattttgaagtgccattatacatagtacaaacattatttcttttcctactt

SEQ ID NO: 248313 - DNA, 469 bp, Homo sapiens
gcttctccaaatctttgggggtcattcttgggatgacctctcttctctacttcccaaagggtttttcactcctgcctgtgggtgcctcaagcccctcattgtccctgcagggagaggggtcccttagggtcctctcacagctaggagactgccttgctgctggttccctctgctgtacccagtttctttctatcactctccacacttgctccagtggctcttggaaagttcagatacatcttggagactagggagggagacttggtaggaggagtcagggtgtgtgtgtgtgttggggggcgggggaaggggttggacagaggaaagatttctccaaatcatcagttgctttaaaagaaagcctatatttagctgggcttagagggcctgtaaatatgtattttgcaaggcagacagcccgtagctgtgggagctccagagatatgcagggaggtcaaagaaaaaaaaa

SEQ ID NO: 248314 - DNA, 560 bp, Homo sapiens
agagaccagaatcgttcagaggcagggctggtccctgttgatttatgactcaggcaaacagtccattcatccgtcagcggctccacttctatcctcagcttactggaggcagaagaatgtcccctggaagtggtctgagctgcttcctgtggtggccccattcctccgggtgggggatcctatttttagagggccaccattgccatgaaagtccagccggctcatcggcaccgtgcggcatggtgggacgcagtactgaaattcgagggggagctaggcattcatagctgtttcttacaaacaagaaaggcactgattctgaggctccatttcctcctctgtaggtggaagatagaggaggctatacagggaggctcagctgtgcctgacacacaacagagattctccaggaacaggacatgaatgaatacaaaatcaaataggtgatttccctcttcctccagcagacaaacccagaatagcaaagatcacttccatgcgcgtccgtgtgaggagaccacacaacaggctttgtgtgagcaataaagctgtttatttca

SEQ ID NO: 248315 - DNA, 459 bp, Homo sapiens
agaaaataacacataattaagttaatggatatattaattaccctgatttaatcatcacataattacatatattaaaacatcacatttttaacctatacatgtagaaaattatgtgccaatttaaacaaaataaaactttactttcattatcatatgttgtctatatttacccaatgttgctgcaaattacaggattttatttttcctctgactaatattccattctaataatgaaaatatttattctagtatttatatacaaccttatatataagagagagacactcaaagtacctggttttaactttgtatcacagagccactgaagaggtctcaaattactggtgtcattcctccatcactctatggcagtatggtatgctgaaggaatatctctgtgtgctggggaagagaaaacaggaattttgaagcaataaactgagtgctgtcctgttagag

SEQ ID NO: 248316 - DNA, 650 bp, Homo sapiens
cccagagtttctgattcagtatctggggtggagccagagaatttacatctctaataagttctcaagtgatgctgatgctgctagtccagggaccaccttctgagaaccattgcttaaaagaaccttctttgcttagtctagacctcccatccccagaacaaaccctctatttctcaccagactttccctcaacgtccaggtggatcctcccctattcctccaaacagacctcctcccattccctgagacggattctcccctttctctaggattctcccaactcccaccccagatctcctcacccccaccatcaggacagagcctccatccagggcatgtttccctaggcccagacatgtaagggttgatgataactggcttaagaggagcaaggcagaagcagaaaattcccatctcagcttagtgccaggagctaatctaacagacacaggctgctgtgggcagggatttgtgggagaagcagttgttaagcagctttgtgggcctatggaaaaaaaggagggttaacagggtcctgtgggagctggaaaggaattcgactggggggatattggaactgaccagttctgcttccaccatcccaggtctctcttccactgtgcctcccttgcccaccatgacggtctgtc

SEQ ID NO: 248317 - DNA, 339 bp, Homo sapiens
tctcaaataagtaaataaataaataaaaattaaatttttttaaaagaagacttcttatctcccaaggtaatgaagaagaaaatgggatgttgcttgtcagatgcctccttggcagtgactagcaaataatggtggctgccactcttattgctgtcattcagtgttaggataatgctgatgggcaggagctagcaagagtactagctcctctcttgcctggggcttgttattcatttggctttcctgagggccagctctgaattggtttaggtttgatctggtttattataaggtaggcctacctgttcagaacttgaaacttggccctggtgttactca

SEQ ID NO: 248318 - DNA, 467 bp, Homo sapiens
gtatgcgctggctgtatacctgggtcacccgtgcccacaccgaacccagcacgaggcccacttcatttccgtattcgtccgctcgcccagtaaacagtgagaacgcgcaaatccctgcggggcccgggcttccgggacgggctggacggacaggcctgaggggcgcggcccggggacgcgggagggggcgtgggaggcggaagtcccaggagagcctctggggactccagggccgcgggagcggttgtgggtgcggggtcgggatttgcatttcccgcgctgggccggcggacgcccgaggcctgcaggagacccggggcccagggctcggagtccaggaggtgattcgggagggcctgggacggccccggggccaggggtcgagccgagaggcggccccgcgccgctcccaggaaggaaggagagccacgcccggccccgccacgttccagagacttggaaccgcg

SEQ ID NO: 248319 - DNA, 482 bp, Homo sapiens
gtcagattcattctgacatagatcaggagtggaaaagtgtgtggtatagaatagagtcattagtaaatccatctcgttttttgtttcatttgacagcaacacattaaattaatccctgtccaaaagaatcacattaagggagctgtcaatgctaatccctagctcattgttgctgcctagctcagggttgactttaataggtcgcgctgacatttgtttcttctgagaaacatcggtgacttcatccagacccaaatctactcccattaaaaagtgaaggcacccacaagtttttacataccgtgaattctctggacttctagtttaggatttgagctcttgttggaaatgttgattcacatttatgcctttaacggaataaaggtgattatgacaataaaaagtaaggtagactcctccccgaggaaaaaacctgattaaaaaattaaaaataaaatgatgttgctatttttatacctatt

SEQ ID NO: 248320 - DNA, 474 bp, Homo sapiens
gttcttctgttaaaaatatccaaagccacattttttctctatggccttatctcaccattccatgctagttaaatagctttctctgtttttatatcacatctaatgggtttaatgtgttctaagtgtatggctccatttggtgcattggatgctatggctgagaggtgccatataaaaatattgttattgttatgatgatgagttcaagcactggaagggaaattgtgcaataacttagtactggagctatcattattttcagcaaaatgaagtttggcttcttactacactactaagccttgaagattaaatggtatctacagcatgtatcttagcaatgagccaaagaagtccaaagaaaaaatgtttgttataacaaacatttcatatattataaaacagatgttcacttttatgtattcttgatactttaagaagttgatgatacccatgtcagaaattaagaaaaaaaaa

SEQ ID NO: 248321 - DNA, 840 bp, Homo sapiens
agtatgggagaagacactctcccggaccagggtcctccttatgaacgctggtcccccacctcgccaaggccatacatgcggaatcttcctggtagatgtaataagtcagagacagatccactcatccttagccaggtagcatttaccccggaggccatggatgggcttggtggccgtgggaagtgggggcaagccagcgcagctgctcccgagggtagaagcctggctaatggcacaccccccatgggtgcagcctctaaggtccctgctgtgcagtcggtgtgtgccagaggcatggcggggcagctggcacccctgcaagtgaccgagggctccaccagcagtgggactgagtccagtgagtcagactctgagatgctgatccccgggagtcagcccctcatatttggtaaccccgcagtgctgcgttccccgtccctgctgagaagccgggggtccttgggtggcctgcgtttgatgaggaacaggaggaggatgagtgaggaggccaggagccaagtcttcagcccgagcaacctggggtcacgagaccagggtttccctaaagatcatctgttctagtgactcattcatttgtagtctacatttgttagaggagattttggacaggcacatgtttgaaagagtctgcctgacttctaaaatcgttaagaaaaacaaaacttcacataagtggcttgctttccagaaaaggtgggcaagataaacagcaagtcctaatgacaagttctcaggagcttgtttattttgctggttgaaggctaggaagaaacactttattatgaatccgatcatgtgtatagtgtgttatatttatat

SEQ ID NO: 248322 - DNA, 277 bp, Homo sapiens
gtaagtggggccaaaagagggacccatcaacactgcagatgttcctgtgcatacctcagggcctttgcacaggctgctccctggcctacaatgctcttagctcacataatctgtattgcctttcactgtctcatgtcatctttcagctctcagctcaaatttcaccctgataggcctatcttgatggtctcatctaagaatagaatcccgccctctcttggtcattctcacgcccctggctgatttgtttcttaagagcctttatgtccacctgaca

SEQ ID NO: 248323 - DNA, 214 bp, Homo sapiens
tgccatactctccacagcacatagcactgaccaccttctaacacactatgttagttcctcacttatcatgtttattgtttatcacatcaccttccacaggaaggtaagaccctccttccatgagggcaggaatgtttgttttgttcattagtctatctccagccccagcacatatgatgcactcaataaatgtcgtgtgaacaaatgaatgaac

SEQ ID NO: 248324 - DNA, 546 bp, Homo sapiens
ttcacagatttcacaggacgccttgtcaaatgccttactcttatccagtacatattttcttgttcaacaaaattagtattcctatcaaagaaagaaactgtattagttcaacatgacttgtacatactgcccctatgttggggagtagtaatcactgcttggtgagttgttaagaggctgggatttgatgtccgaaagacctggatttgaagcccaacaccaacagctgttaactgcatgaagtgggcaaaccatctgaaaataaggatgctcaaagcaccggtcccctagggttgttgtgtggagtcagcagatgtcaacaatcaccatcagatcagtgaccttatccctgacaacccattctagatctgtacaacactgacaagatcaatagcttgagatgaacagtgaaagggatctagcttctgttaccttataaaaattacaatgttttaaatctcatttgcaagttctcccattaagcaagggagtagtttactaggataaaaagacatttaatattaaaagtaactgagttgactaccg

SEQ ID NO: 248325 - DNA, 667 bp, Homo sapiens
tcattctctacctacttgaggctgacttccacccccatcagtccacccagatgattcttactaatgactttcctgccattaaacgcagcaggcagctttcctgatctttgctctgttgactacccgctcctcagtcacacactctttcccaccagccctctccccgctgcagtcctggtttttacatgtttcagcttgtttttccattggtatttggccattaaggttgatgtagctcaggaatatgcattgtcctgcttttgttctcagtatgcttctgaggtctttggaatgagtggatcccaggaggactctagacaaaggctgggctgattctctgatttctgcagtacagggaggttaatacagttaagcttgatttagagactgtaccattgaatagagatataaacattattgtaatttcattctctcactctggttatttcaacctattctagttttataggttagtattttaaatgttaatgtaagttgttttataattattactgttggtgttttttggcagcatttttagtgacttttttttgagatagggtctcactgtcacccaggctggagtgcagtggcacgatcaaaactcactgtaacctcaaactcctgagctcaagtgaacctcccacgtcagctaccaaagtagcta

SEQ ID NO: 248326 - DNA, 451 bp, Homo sapiens
taaactgctacttgaaaggcatgtgagagaatgtgtgtggtggggagagttgaggaatgcaattcacagtatttgctttcaaaacatgtggcatacagagggagcaggactgaaaaaaaataaaaagcatatggcaggcagaggtacagtaaatagtttcaagagataattcatcatagaagctttcctaatgacacttgctcagtggaaagcaaatcctttgtcatccttcatagttaagagtacaatattgtttatgtagagtcagaaataaatagtaacagcctctggattacttgactaaaaccctaggcatcagcccatacaaatagtttgtttaaactgtcattcaaatttagtttaatggaaataaaaaacagctaaattctgtcattttttttccagggtgataacagaataaatacttagtcttcaaaatttctcaactgaa

SEQ ID NO: 248327 - DNA, 428 bp, Homo sapiens
tgaaagttttttttaaataacttccaacttttgccttcacctttgccagcagtgatgtgatctgctttcagctgtagtgaagcaaactgcataaaggacattgtgcatgttaggtcttttacttgcctgttggtacatgtttgtaatatttggaaatactctcactgcgaagaaaagtatagttgtgctgtagtgggtagggtgaggaaaataagggtcatcaccagcaaagtcagagtgatgaaaaaactggattacaacactctgcttgactttgcatagataagtaagccaagcagagtgtttcctggatgtagttaaaatacaagcttggagcacaggtaaaaggccaagaggcttggagatgtacatctgagatgtaccaaagggccaagtgcaaagtaagtttgggaagtttagtgtcatat

SEQ ID NO: 248328 - DNA, 379 bp, Homo sapiens
aaaaactatacatatatctacacaaacacatttataatcagaatattgacctcttactcgatgaacttattctctccctctaatggctttatcaactgtctatggaaactctctacttggaaaccccactccacctcatatctgacacattcaaaaacaaactcacaatgtcccatactaactggctattttctccaacgtgtgatgtctaataatctaataataacattatagcattggtgtggtccctgctttacaacgtgctctactgtatgtcactgtgtacacagtatttcagtgattcttctactgtgtgagataaaatatcatcatcatattcatttagagatgagaaaatcgagaagagaggttatgcggc

SEQ ID NO: 248329 - DNA, 1067 bp, Homo sapiens
gggggccggaggacaaaccaggagaggggcttctggaagccagagagggcgtgcacacacaggcgggggagggagcctgggtgcagcagggtgggccactgcgactcaccgagggccagcggcgctggggccaggggctggagtttggagagtgagcagagagcacgcaggggctgtgaacaccaacttctctttcaggtcaatttgctgcaaaggggaaggtaaaggtggaggtaactaaggagcagggcaagagaggggtgtggttttctgtagggtccagccctacgggggcttagcaggtgtcctccccgtgtgcagagaccagagattgtaataaagacacgagataaagagcagctgggccccgggggaccactaccatcaagacgtggagaccggtagtggccctgagcgcctaggtgcgctgatatttattgcatacaagacaagggggcagggtaaggagggtgaatcttctaagtgataaagtgaagcaagtcacgtgatcataggacagggggcccttccctcttaggcagccgaagcaaagagagaaggcagcatatgtcagcattttcttctctgcacttagaagaacgatcaaagactttaagactttcactatttcttctaccgctatctactacgaacttcaaagaggagccaggagtacgggaggagcatgaaagtggataaggagtgtgatcattcaagcaccacagggagggggttaggcctccggatgactgcaggccaggcctggagaatatccagcctcccacaagaagctggtggagcagagtgttccctgactcctccaaggaaaggagactccctttcacggtcggctaagtaacgggtgccttcccaggcactggcgttaccgcttgaccaaggagccctcaagcggcccttatgttggcgtgacagagggctcacctcttgccttctaggtcacttctcacaacgtcccttcagcacctgaccctatacccgccggttattcctaggttgtattagtaatgccacaaagagtaatattaaaagctaatgactaatattta

SEQ ID NO: 248330 - DNA, 652 bp, Homo sapiens
gggactacagacacataccaccatgcctgactaatttgctttgtattttatggagaggcagggttttgccatgttgcccaggctggtcttgaactcctgggttcaagagatctgcctgccttggcctcccaaagtgctgggattataggcgtgagctaccatgcctggctgggagtgccaaatccaaattcttaacattcaaatcgtgtgcaccattttgggtgcctctattttatccttaaattcacaaatcatagtttgaccctaaattaataagaataaagtattcaagaaattcaatatattgctaagatatgacacaagcaagccagctgaaataataaaaatggtttttacttgcatttgaatgaaaggaagaaatgtttttatagttcatccctcatttcaaaaattctgtgcatgcggagtcctgcaatatgcaaaagcagacatttgtcctacaaaggcagatacattgttcccacagcaaacagtatagatttgattgtgtgtacaactgtcactatttccttcaacaataaatcaagatcaggaggtatatcaatgacaaccaactgttcctctacgaagaaaggaggttgacattcaagcacaatttattttattctgtaacatcttttcttgttgattc

SEQ ID NO: 248331 - DNA, 481 bp, Homo sapiens
atacatttattaagtatgcaagaaaaaaactatttaagaataaatgcaatgtgtttagaacaaatctgatgctctgtattttaacttttaaaaagtaaccatttcacaattaaatttggatccttcattttaccccaacaaaaactaaccttttatagagaagaactttaacaagtaatgtcaacaaagcattctaaagtactcataatttaaacaacttgcaaggagacaactgttttttttgagacagggtctggcttgcagtggtgcagtctcggctcactgcaacctctacctcccaggttcaagtgattctcctgcctcagcctcctgagtagctgggactacaggcatgtactaccacgcccagctagttttttgtatctttagtagagacagggttttgccatgttggccaggctggtctcgaactcctgacctcaggtgatctgcctgcctcagcctcccaaagtcctgggat

SEQ ID NO: 248332 - DNA, 704 bp, Homo sapiens
aatttgattaaaattatctagcattctttatatttttttagagacagcgtctcactctgtcatctaggctacagtgcagtggtgcaatcatggctcactgcagccttaacctcgtaggctcaagtgatcctcctgagtagcacaagtgtgtgctaccatgcttggctagttctttaatacttttgtagagacaaggtctcactagaccaggctggtctcaaactcctggcctcaagccatcctcctcggcctcccaaaatgctggaattataggcctgagccagtgcacctagccaaagttgtctagcattcaaccagctgctcttgaacctgcccccgcttccccatttcccctacttttcaaatatccaaccccacgttaattgctttatgctatttcagccttatgaccctgggtggcaggtgcaatcccattttacccatgagggagctgaagctcaaaactagagcagtttgctgaagttcacccagctaataagactggattaggacttaggcctgcctgattcaggttcagttctcagtacatgctcatgccaggcatggatgtcttcatgtccagcactctgaacatgagctagactgcaggtgacttagaaaggcctcagagtctagaacagagtgtctcaagggcagagccacattatggagattaatctggctggaccaaagtagtagtagaa

SEQ ID NO: 248333 - DNA, 357 bp, Homo sapiens
aggtgagaaaactgttatccaaataagaaagctgtttgcctagatgagaaaattggttgcttggttaaactggtttatacaaatattctaaagcaaacagtgaagcaagagtaacagccgtggtggcagcatctggatccttgattgacagcattatggaaagttactggccagatactccttacttaagttggcaccaatcaacttgcctggggatcagtcaaatggggtgaggtgagggggacttcaggagatccttcccagatggatgccaaattcctttgatagccctgtcattgtcaagaatttcttcaagtttatgtgtataagaataaaatcttgttcaagtttatgatg

SEQ ID NO: 248334 - DNA, 263 bp, Homo sapiens
caaaaagtaaacaaaaatacaagggaaaaaaattattgacaatgaactgctttggtagtgatttgtgattttgttttttcttgattagtaaccaacagcacagccaccaagaaattatgcacatgtgggaccacgtcaagctgaagcgtttgtgcccaacaaaggaaacaataaagaaaataaaaaggcacactaaaaattacaagtttgggataagggattatttttgaaaaggtacaagcgagtcatactaccagctggca

SEQ ID NO: 248335 - DNA, 388 bp, Homo sapiens
tctgagacggagtttcgctcttgttgcccagtctagagtgcaatggtgcgatctcggctcaccacaacctctgcctcctggtttcaagagattctcctgcctcagcctcccgagtagctgggattacaggcgtctgccaccacacttgactaattttttgtatttttagtagagacagggtttcaccatgttggctaggctggtcttgaactcctggcctcgagtgatccacccgctccggcctcgcagagtgctgggattacaaacatgagccaacgtgtctggccattttcatcatttttaagtgtacaactgagcggcatgaattacattcacactgttgtgcagccatcaccatcatctgttcccagatcatcccgactggagg

SEQ ID NO: 248336 - DNA, 501 bp, Homo sapiens
tgaacaacaggcagagttcccttactccacgtgtcattatctttaatgtaaaagggctttgtatggggatgtgctttgaatcttgaaaaatgcttttcacacttggagcaacacttatggcagagaaagggagaaaagcagaatacaaatccacatgttatgaagcgtgtggattatccatgtaattataatagagaagtgctgccctgcacaccctcgtgtgtcctcacagcagtgctgagcagaaggcaggaggggtgttgtcccatttacagagggggaccaggcctcagagtgataggtggacctggggtgaggtggccttggactaggcttctcccttctggttctttctgaaaccttgcttcataggcacctttccagcaacaacagccattcaagacccttgtgcctgttaattttgtttgtttgttttgagagggagtctcgctctgtcacccaggctgtagtgcagtggcgcgatctcggctcactgcaagc

SEQ ID NO: 248337 - DNA, 512 bp, Homo sapiens
tgaacaacaggcagagttcccttactccacgtgtcattatctttaatgtaaaagggctttgtatggggatgtgctttgaatcttgaaaaatgcttttcacacttggagcaacacttatggcagagaaagggagaaaagcagaatacaaatccacatgttatgaagcgtgtggattatccatgtaattataatagagaagtgctgccctgcacaccctcgtgtgtcctcacagcagtgctgagcagaaggcaggaggggtgttgtcccatttacagagggggaccaggcctcagagtgataggtggacctggggtgaggtggccttggactaggcttctcccttctggttctttctgaaaccttgcttcataggcacctttccagcaacaacagccattcaagacccttgtgcctgttaattttgtttgtttgttttgagagggagtctcgctctgtcacccagtgtactctagcttgggtgacagagcaagacatcgtctcaaaaaaaaaaa

SEQ ID NO: 248338 - DNA, 228 bp, Homo sapiens
gtgtttaaagatttgtattattctctcccaatgactagatagtagtattttacaatggagacttaaaagttttttgtgttttattctttcgcttttctatgccctcaatccaaagaacaccagaaatacacttgtagtcggaaaacttgggtttatcacttgcatcaaggaatgacacacaccatgggccactctggagcctctcaataaaaggatgtttcaaagaac

SEQ ID NO: 248339 - DNA, 442 bp, Homo sapiens
taattattggtgatggaagaatttagaaaactttaaatttctctttaattatattagtattccatagtgttcattttaaagtagataccgatttttgagcgtgggatggaaaatggcagaggagttaggatcctgccccagtgggccccaatagttccttatttgcatagtaatttacagtactctgtatcagaagagcagtgaatagagttccctaggaagaggaaggctttgggggtagagattaagtggtgaggcctttgaggaagggattaaatcctgatggttctgcctaagcactgtgttatacagtcaatttctagaacttattcatcttgcatggttcaaaccctgtatctattgagcaacaacttcccattcccccaacccccaatccatggcaaccatcgtattctctgcttttatgagtttgaaaaaagtg

SEQ ID NO: 248340 - DNA, 331 bp, Homo sapiens
catctggtgagaaccacgtgctgggttaaaaaacatggcagagaaggtcgcaggggaagcgaacatttgtgaagagaggcaaaacctaaggggctcctggttttataccaacccattcttgtggaaactaatccattctcacaagaactagtctagcctccccagagcaggaactcagtcacttggtgagacccatgacaagccattcacgaaggatctgcccccatgacccaaacacctcccattaggacccacctcccaacaccaccacactggggatccaatttcaacatgtgtttggtgggaacaaataaaccatatccaaaccata

SEQ ID NO: 248341 - DNA, 173 bp, Homo sapiens
ttggacaagcggagagaagttcaatgtgggaacagcagggagggccaaacagttttgtttcattttggtttacttttaacccttattacaatccttataactagtaagtagaaaaagaataagaaaatggttaacagcagtggtttgacataataggaaaagcactgtgcttt

SEQ ID NO: 248342 - DNA, 256 bp, Homo sapiens
ctcccggctggccctcactccactgaccgagtttcctctctcaatactctggggtgccgcctcacaggaggccctgcccaggcctggctgctccttcttcccgagaaagccgccaggcgacgcaccaggtgggcctgcaacgccctggagacgccgcgtcatcgtcctgtctggaatcctgcaggatcatcatgaaaccctaaactggatcacacttcctcgccctgctctgctgacagaacagcttgagcccatt

SEQ ID NO: 248343 - DNA, 328 bp, Homo sapiens
tagtagagacagggtttcatcatgttggccaggatggtcttgatctcttgacctcatgatccacctgcctcggcctcccaaagtgctgggattacaggcgtgagccaccacacctggcctagaaatcatatttaaggcacatactatttctccttttttccacagtatgatttagattaaatgtttcttactgaattaattacactagagaaccctaaccaaattgaggatttttttatattgtaaaaggatttttgaaagtctaagatcttgattaataaattagattctgagactcagaactcattattgaactttaattgaggaa

SEQ ID NO: 248344 - DNA, 459 bp, Homo sapiens
aattctatttggaagggctatggttatgcatatatgtaatggaaatactaaaatccagcaatgcaaactataagacgaaaactattaaatcataatgagacttggtttttgattgtgtggaatataaatcactgttaattagaaacatctttcaagaaataaaatgtttaattacaaagttactataatatttcattgacatcaaaagatgtttctatcaactgcagttggattttaacttcttaaaaatcaaaaaactgatgtcacagaaaccagagtgcttattctaagtgcaacacacttccaacctcacccacttcctcccacaaaacagttgttttatacggtaatgtgaaaaaattatactgctttatacagtataatgtgaaaaaatgtgattttttcaatattacccaattaaaagactgtctgaggcaataaaaacaattttatgtaaaa

SEQ ID NO: 248345 - DNA, 578 bp, Homo sapiens
ccctttgcaggtaccttttttcttgtacaagtcacatgataatgtaaggggtttttttccccatctagagcctgcctggtgggctcatggtccatttgtggaaacatgcatttccctctcctccgcccccctccttcatgatccatgctttaagagcttccccaaggcatgcagagcaagctgagaagaggtagacaagcctgcagacctttcaaagaagtggggtggcttgggaagtaaaagaagatctggagataggagttcctaaaaagcagacaagagattaccgaggggttccccacagctccagcacacagcagctgcaaaaaaaatgcagtggaattactgagggacattatgggcttgatggaggacagggaatgcttgtgccaagccaccaaggatcatgctgtggcagttgtgaccagatagactatacttttgccaaggtgaaaggatttccctactaaatcctttactttccactttgtttaaaatgagtttaacaccaagaaaatagttgtctctatgtccttatttctaatcttcctgctcaaccatgaactgcactaaacaca

SEQ ID NO: 248346 - DNA, 378 bp, Homo sapiens
tatacatacaaatgaaaataaaggcacaagagatgtgctgatcattacaggaaaagtctagaaaatgcctgttccttaatgactttaacagatgttagcatttagttctatagtcttataaatagcagacttcatttttggtggataaatgtcataaaaacttagggctaagtatttatttcgtttgtttccttcaccttgaatccatttttgaaaacctttcagttttcagaaagttattcactgaccaaatgatcacatcaatatgtcagaataaaaggaggggtgccctgtcactcctccttaaggagggaaaaaaaatgcatatggagtttctcattattttaattttttaaatctaatcttaacttttgttac

SEQ ID NO: 248347 - DNA, 706 bp, Homo sapiens
cggcaccagacctcttcatagaccaatttatcttatagtagagggatatgcctggcacaattccacactgaaatttggaatggaaactctgaggaattctacaaagacagataacatgccaatggaccactgactcatcagttctttaatgtctggtttagtttataaccatgtcacatatagtggcaacactgtcattagttgtattataaactccagaaatttgaatcagtatggttgaaacttttctcccataaaatatattactttaccctttctttgcacttgcaaagggaaatgcttagagctttcgtaatagattaataaactccctttctcaaattgacctataataaatggatgttattgccgatttcaagctatttccttctccttgagactatatcacaaataaaggaatgtgtccaccaccttttaaatcagaaatcaacaaaggaatcaaaatacaacatggcatatctctataaaaggagtaccatgcatccatcaaaatgatggcatgatgaaagattttcatgatacattattaagagaaaagcttggaatgtaaaataaagtatggttagtatagacatgcatttggaaggtaaaatgaatattttaaatatgtatacatagaaaatatctggaatactatctaccaaacggttaacacgacactaagtgttaagtagtgggattacag

SEQ ID NO: 248348 - DNA, 418 bp, Homo sapiens
ttggtttagtgaaattaactaacaaattaacagattgtactgtaatgatgtaagatgtaaccactggggaaatatggaccatctttgcaacttcctgtgaatctgcagttatttcaaaatacaaagttgaggccaggcacaatagctcacatctgtaatcctagcactttgggaggctgaggtgggtggatcacctgaggtcaggagttcgagaccaacctggtcaacgtggcgaaaccctgtctctaataaaaatacaaaaattagctgggcatggtggtgcatgcctatagtcccagttactctggaggctgaggcacgagattcttgcttgaacctgggggatggaggttgcagtgagctgagatcgtgcaactccactccagcctaggagacagagcaagactctgtctcaaaa

SEQ ID NO: 248349 - DNA, 1327 bp, Homo sapiens
tgccgggagagtgaggccgcgggggctgggaagggaccggtgtatgggggacagcaggcgaaggtcactcgggaaccagcccagctctgaggctgcgggcaggtcggaaagggagcaggacggcgacccccgtggcctccagagctctgtgtacgagagccggcgggtcacagaccccgaacgccaggacctggacaatgcagagctgggaccagaagacccagaagaggagcttccccccgaggaggtggccggggaggagttcccggagaccctggatcccaaagaggcactttctgagttggagagagtcctggacaaggacttggaagaggacattcctgaaatcagccggctgtccatcagccagaagctccccagcaccaccatgaccaaagcaaggaagaggaggaggcggaggaggctcatggagctggcagagcccaagataaactggcaagtcctgaaagacaggaagggacgctgtggtaaggggtatgcctggatctccccatgtaagatgagcttgcacttctgtctctgctggccctctgtgtactggaccgagcggttccttgaggacaccaccctcaccatcacagtgcccgcggtgtcccgccgcgtggaggaactgtctcggcccaagagattctacctggaatattacaacaacaacaggacgactcctgtctggcccattcctcggtcctccctggaatacagagcgtcgagtcgcctgaaggaactggccgccccgaagattcgtgataacttctggagcatgcccatgtctgaggtgtcccaggtatccagggcagcccaaatggcagtccccagctcgcggatcctccagttgtcaaagccgaaggccccagccaccctcttggaagagtgggaccccgtgccaaaacccaagccacatgtgtcagaccataaccgcctccttcacttggccaggcccaaagctcagtcggacaagtgcgttcctgaccgagatcctcgctgggaggtgctggatgtcaccaagaaggtggtggccagcccccggatcatctccctggccaagcccaaagtgcgcaagggcctcaacgagggatacgacaggcgtcccctcgcctctatgagcttgccacccccaaaagcatcaccagaaaagtgtgatcaacccaggcctggcctctaagacctccgctcccagtaaacaccctcaggcaccctaaccctgtgtatgtgattattctgagctttttggcctggagaagggagggcgggctagaaggccaaaagaaggatgaggaggacaataatatttatttttgcatccaac

SEQ ID NO: 248350 - DNA, 263 bp, Homo sapiens
gtgagtccatcagagttctgaatttctgtagggtgtttatgttcagtaattaatctggtgtgtggacagtctgccatccaagatgaagcatgattttgaaaaactttgttactaagtttttcttgcctcactctatacccagtaatttttttattgggtgccatatattgtgagttttaccatgttgggtgctgagtatttttgtattcctttaaatcttcttgagctttattctgagatgcagtaaagttaatttaaaatga

SEQ ID NO: 248351 - DNA, 473 bp, Homo sapiens
gaataactggtattaatcatccttcctctgtcaaactaacacctaaattactataaaattactatactatatcatgccacactatactatactgtatttactgtaaaaactgcagaggaaaatgaacttggtggttaaattaatcacagcatttgtctagattctgcaagaatgaattcatgaggatggatttaaaagctttttcaaggccgggcgcagtgtcacgcctgtaatctctgcctcccaaagtgtcgagattatagctgtgcaccgctgcacccagcctaggggacagttttataatcagtcttcttggccttcagaggactctgctggtggctatacccagctagtggcttgttctctctttccacttttattgccctgaaattctaaatattccatcattttggtagaagaaaaccagaccaaactaaacattctcatgatttcatccaccttttaaaaaaaaa

SEQ ID NO: 248352 - DNA, 339 bp, Homo sapiens
atactagttattgaaaattcaaaacaggtgtataaaaaagtacatatatggccaggtgtgggggctcacgtctgtaatcccagtactttgggaggccgaggcgggcagatcatgaggtcaggagatcaagaccatcctggctaacatggtgaaactgtctcttctaaaaaatacaaagaattagccaggcttagtggctgggtgcctatagtcccagctacttgggaggccgaggcaggagaatggcatgaacccgggaggtggagcttgcagtgagctgagatgtgccactgcactccaggctgggcgacagagcgagactccgtctcaaaaaaaaaa

SEQ ID NO: 248353 - DNA, 373 bp, Homo sapiens
aaaaaaggcaaacaactagaatggaattaaagacagatttgcaaacctttcaaccattatataaatattaaaaagttaaaaaatgaattgccaattgaaaaataaaagcttacatgtaaaaacagcaaagtgaagacagtgacaaaggagacaatggtattccattccacttgggtacatttgctggggaagactcttagccagaggcaagggctctgtaagttaaaaaggattaggaagcgttccagttcttaaagacaaactcatccagggagactttctctttgcattaattgggagggttgaaaaccaatagacagagagtgaccgtttgactgtgtgatgagatgttttgcaatgctgtgttcaactc

SEQ ID NO: 248354 - DNA, 424 bp, Homo sapiens
tggtatttttagtagagaccaggtttcactgtgttagccaggatggtcttgatctcctgacctcgtgaagtatttttatgatggttgctctaaaatccttgtcagttaattctcacatctgtgttctgttagtgctggcactgatgactgtcttttctcattgagtttgagatctctagtgatttttcaattgaaacatggacatttttagtggtttccctggagtttgtgatataaattaataactaatcgaagtccaccttcaaattacactctatccctttgtgtgtagtgcataaaccttgtgtcagagtactcccatgtcctccctcctgtgtcttattacattgctgccactcactcatctacatgctgtaatcacctatacagttactattattagagagttatcttttagattagc

SEQ ID NO: 248355 - DNA, 524 bp, Homo sapiens
caggactctggtaagcatatttctccattgccagcttgctcgctgtcaggttctgctgacagggatgttggagagagactggaaggcaagagaaggaagaactgtccttcctatcagctggctactcctggcaataggcccaggaatggtccttcatcctagcagcaggttgtcccagtcaccagcttcttttagcgccctcaaaacaagcctcatgacacctcctcagaaggaccgtgtgagtgaggcagcacccactctacagagatctgagctctgcagggcccctccgtgataaacagaatcagtcagagggggacttaactcagtggctaaggacttttctccaagtatggaggtcctgataaccctgacttcattaaccctttattgccctagccagtggggtgggagggagagattgtttcctgcccttttttcgttgttatatcactattgtcttgttttgcttttttttagtccaccaataactatttaatttcctatattaaacatttcctgtt

SEQ ID NO: 248356 - DNA, 180 bp, Homo sapiens
atagagctgacacgtgcatgctcaagttgctaattactttaaaggcaataaatagtaatggtatttttttctaaaatacaaggggaatgcaatacctaatgggaacacacatcccccacttcatcccctaaatcctcactaaatgaggattcttttttacactgtctccactgtgcttag

SEQ ID NO: 248357 - DNA, 434 bp, Homo sapiens
aagaagaatatctattgatgtgaaaatggtgtgaaatttacatttcagtgtctgtaaataaagttttatttgaaaacagccaatgcttactcatttatatattgtctctggctacttttgagctgtgacattagagctaatttttttttttaacagaaactttttggccaacaaaacttaaagcatttactgtttgtgtctttacagaaaaagtttgccagttcctaatccaggacacatgtatttacatggttgttaaacttttctgaacagccagtgggatgtggtaaatatttaacagcagcttctctggaagagaatgtattcgttagtatgtatttatgtgtgtgtatatagtttattgtaaattttacttatttttctatcactttcttaagaccacaagacaattaataaaacaaattgaaccctgt

SEQ ID NO: 248358 - DNA, 434 bp, Homo sapiens
taactggtgcacagtaaactgcacatctttaaaacctacacggtgaggagttctgacttatctccacaccagcgagacttagaccacagtcagaaaaacgaggctcctatcaccccagagttctccgtcactcgctctccgcgagccccttgccaggaagagctgcttcctggcattatagatgtgtctgcatcttcttgaattgtgcaacatggaatcatacagtgcctgctgttctgctgccagctgttcttgctcagtgtgatgtgttcgagattcagcaacacaggacgcatcagcagctgctgccctttcattgccgagccctcctccattgcaccaatacatcctgattggtctagccattgacttgctggtggatatctaggtcgtttctaggtgttagttgtcacaaataaagctacaataaataa

SEQ ID NO: 248359 - DNA, 212 bp, Homo sapiens
aagtttttcacaagaagctcaatcttaatagtgagaagatgcaagactgtagccctggttaaacctctctgcccgtaaggaacttggtacccttccttatagaagtctgctaaagttagccctttgagaaaattacctatttgcagtactcttttgccattttttgaaaaaatggccggtagtcagagttttgaaatttgaggataactttt

SEQ ID NO: 248360 - DNA, 509 bp, Homo sapiens
ccactcaatattaaccatcacagtgctggaacatgctaagtggattatttcccaaatggtccatccagggtgtctaaccatgctaatctggtggatttcacaaaatgactggagaatggtaaaggtgctcatggtttcagcttgtttgtgaaggataaggggaattattttctcggttgatgttttcccccccatacgtgtaccccacccacttaagatgcttcctgatctcagcaaaaccaacatgtctttaaacgcaggttttatgaccaaatttgcattctgtccttcgaatgacaaggttagctccagttattaaaaaacactgttaaattcctaaacttatcttggcaccacagttgcagttatttttcagactttaggcagaaaaaaaaaaagacactattagtaattttaaaaaagacactattagtaattttctaaagaagagctctgatggacagcagcaaatgactctggggtctgttaattacaggggaatgataaaa

SEQ ID NO: 248361 - DNA, 507 bp, Homo sapiens
cagtccttttcctttcaacgagacaaccctggaacctcctcatctcaatgctgcacccaaaaggagaatctgagaccatcatctccccaccgctccactcaatggaacaatcccaggaattcatctccccatcgtactaacaaagacatcccctgggcctcgtttcccctccggccaactcagagtgatggtccccgaacctcttccccatctcgctccaagcaaagcgaggttccctgggcatccatcgccctccggccaacccaaggtgacaggcctcagacatcctctcccagcaggccagcccagcatgacccaccccagtcctcctttggccccacccagtacaacttgccatcccgggccacctcttcctcccataacccaggccaccagagcacctcccgaacttcctcacctgtgtaccccgctgcctatggggctcccctgacctctcctgagccctcccagcctccatgtgctgtgtgcattgggcaccgggatgcc

SEQ ID NO: 248362 - DNA, 463 bp, Homo sapiens
cctgttttgtctttaaattggatactttgttactgtcttctctgactttgaaagtttgtctctgtagataagcatagttactgatactacccaaagcctttcagactttggcattttagatttaaggtcccatgtcttttcccaggttcctaagattatttgttgttaatagtttatactcccagcctccttgatgtccaaatcctgaaagggcccctgataactcttatggccgcccaccatacattaggagcaagggctttgtcaagaatgcagtgagcaagcagctaagctgtagcacttggccttctctgcccgaaaatcttagtagctttgatgagagcttgagacatgatctcagggaagggtgaatttgctacagctacatttatctgtgccagggttaggagatagccctaggtgaatataagaaaagctcaacctttcccttctgtccaaaagc

SEQ ID NO: 248363 - DNA, 1080 bp, Homo sapiens
agccagagtggtctcagagagactccgagaacctaattttttacaagtaaaatctttgaagaattggtaattgctaaatttttccaacatactattctacaagactaacctaaaactgattataagaactaggtgaggagggctggcaaaacgaaaatctagacattttccgtatgaagagaaatctggtaattctaatttctatgggaaattatatccaacagtttagaatagaaaatcatttatgtggaataacttggaccagatccatccagctttaattatatatttagattctaggcattctaccttcagaacatcataatgatagtaaaagagatacgattctggcccagtatcatctcaattcatgcttattgtcttttttttttttttttttttagctttctatgtattaagaatggaatgaattttatgtatgtaaaagtgtaacccaacaccttaaaattaccttctcaaaattaataaagacagagttcttataaatgattgcatcagttggacttcggtgatttcaccgtggtcatccattatgaactgtatttgctgttataattgggaagccatgatgttcagtgtattacatcattatattccatttctcaaatggaatatgaaacttgatagcatttgaaaccatttcccaggaaacactagtgcttgatggtatttttagaaagcattctgtggttaaatgagcatattaaaattaataattaagaaaataaaactatagcttctccaaataatgaagtaatgagagtttaattgattttatttaacttaatgtatctgaagcaccttttaccctgtaactttcactcttaatgcttgtgagtatgggatatgaacccattttaacagataagtgctgtaaccaaaacaggtgacagcaaaggtggaaagttcggacctcatgtcaggtggttagttgtgttggaaggtggatgtgaggtatgtttccctggatgtggcatcatgttctaaagtcacctgttctttctgaatattgaactgttgcttttctgcagaaataaaatttctgaatcaacactatac

SEQ ID NO: 248364 - DNA, 788 bp, Homo sapiens
ctgggctgaatctaagcttatcaaccttccttctagttacagagatggaaagggaatatgaccatcactcatgtggaagttgagccattagaagaaagtccacacatcttatctgccagtaaaaacctagtctcaccagatgtctcttcattcaagcaagaaagcccttttttcaattctatgaagggtgagagaggtgagtaagctgcagaaaagctggaagccagcagacgttggttcatgaggttcaagaaaagaagctgtctccataacaaaaaaggacaaagtgaagctgtggcaagctatccagaagataagctaagctgacagatgaaggtggctacactaaacaacggatcgtcgatgtaggtgaaacagtcttcagttggaagaaggtgtcatctagaactttcatagctagtgaggaaaagtcaaaggctagcttcaaagaaccattggacaagtagactctcttgttagggactaacaccattggtgaattgaagttaaaatcaatgctcatttacctttctgaaaatactagatcctttaagaattatgttaaatctctgcttgtgttctagaaatagaacaacaaagcctgggtgacagtatatctatttttacagcatggtttactgaagattttaaacccactactcagaaagaaaaaaagattcctttcaaaatattactgctcattgataacgcacctggtcacccaaaagttctgatgcagatgtacaaggatattaatgctgttttcatgcctgctaacacaacaacca

SEQ ID NO: 248365 - DNA, 458 bp, Homo sapiens
ctgggctgaatctaagcttatcaaccttccttctagttacagagatggaaagggaatatgaccatcactcatgtggaagttgagccattagaagaaagtccacacatcttatctgccagtaaaaacctagtctcaccagatgtctcttcattcaagcaaggctagtgactgttctaaacagaatcataagatctgactgtgaccaataatggagaacttgcacttgcaaagaaatggttgtggagaagcttcccatttctatatctggacacaactatgtgaggaggtgatgctggaacaggcctactgtctgaagttcacaggctgaggatgacaggaaaaaataaaagatttaactaacctggtgatgatgccactgagcccttgaattaaccctgaaactgtgctaactatagacatcttattatatgagacaataaacaatatttaagctatga

SEQ ID NO: 248366 - DNA, 420 bp, Homo sapiens
ctgggctgaatctaagcttatcaaccttccttctagttacagagatggaaagggaatatgaccatcactcatgtggaagttgagccattagaagaaagtccacacatcttatctgccagtaaaaacctagtctcaccagatgtctcttcattcaagcaagctgttccatatcatcaataaaatgctgaggaatcaattactctgagatggaagagaagttaatagagtacacaaagaaaggagattctacctaagaatgacagctgctcccgaggaagaaaacatgagttggaacagaaaaagaatcaaaagcaaatactttcttgtattgaaaaaccacaaacaaaacaaaacaatgacctgagtgtgcatataaagtttccctatgtcctttataaacttaatggaaaagtatctgtt

SEQ ID NO: 248367 - DNA, 263 bp, Homo sapiens
ttgttggccaggttcatgagagggtctggtggggaggctcatgaaacatcccagacaaggtctggaggatctcagatagccctgggcccagttccacttggcattggtgcattggccgtgtttgtctgagaaagctagttctgttttggaatgatccttagtgatgatcaaccagcagccatcactggatgtctgctgagtaacagactccatgttttctgctatgagattcaaaagaaacatgatgtattagcagagagcat

SEQ ID NO: 248368 - DNA, 399 bp, Homo sapiens
tacctacccttccgtctggccatccatccatccatccatccatccattaaagttctttttgggggtgtgagtatccgtttaattgcactgcatatctacctacaagtcatacctcttagcaatcagcaggcaatgaatcgggccattccctggttgaaattcaacttgagatttctagagggagctactcaggttaaggatgcattatctaacaagaaaaatgaatctacagtaggtcgtattacagatgcagcacatgaaggcgcccacacattacttcttagcagctgagtgtgaggtgcatgcatgtgaggctcagaccccacggtcttagggcatccttcaacttttttttttgaagaggagtctcactctgtctcccagactggtcttgaacgc

SEQ ID NO: 248369 - DNA, 457 bp, Homo sapiens
aagttggaaaataagtcaaatttaccctcaaaacttaggaaaacatcaatttctgactaatggaaaaattagaagaaacacttgaaaggcattagtacataaaatggaaacttcaaagaaacacttgactttgtacttttaatttttagaagattttaaattttaacactaagtggggagtgtctgcattggcagcacatacactaaaattggaataacacagagaagaccagcatgttccctgcacgagatgcacacaaactcctggagcgttccgtattttttttacttaacgttttctaaaaaggatgttacgttgttttagtataacaggtgaaaaacacgagcttaaataataagtccttataaaacaaaagccaattttgtttaaacatcattgaagatgcttttatttccttaaagatatattgcttataagtattatttgttaaaaaaa

SEQ ID NO: 248370 - DNA, 256 bp, Homo sapiens
tcagagggtaatttccccaaactcacacagctagtaagtggcagagctagaatgtgaacagaagtcttacttcttcagacacttgtttttcactctatacattgcttcttgtgttagccaagtggtgctggttttaaaattggcttgcaagctcttgaccattcttttcaaaagatgggatctaattcctttccccctgaatgtgggatgtacttggtgactggtgtctaatgaataaagtgtgatgaaagtgaag

SEQ ID NO: 248371 - DNA, 445 bp, Homo sapiens
gatgtctatttcatgctctgaagatgatccttgctacatcattcattttattgttcatgtcaccaccgctttattaggtgctaggagctcatttagtttggatcctgcatccttacagcacacctcatccttttgtttttgaacacttccctgtttcctgatattacaattaattctaagttcattttctacattatctttctcatacataggattagccgtttttcctaaagattgattatttccgatgttaaagaatagtgttaaaattaaaaattgtgatactggatatgtgtgttgttaaggtgttataagtacttctaggacctctcaacctatatgtctagtaaatgtacatgtttatatgaacccatgtttatggactcattgaaactacttatgtatctaattgtatgtaactttattacattaaaaatgagaacac

SEQ ID NO: 248372 - DNA, 384 bp, Homo sapiens
attatagttggcaggttagagatgtgtaagactgcttccctggggttggaatttttcaggttgccagcttttctaaagggaaaagttagtttttctgttgtaggaattagtatgtcatcagcagcagtaaccctcttttgtgatactcttgtgctttcagagttatataatgcagaaagtttctttaagatatagtaaggaaatttattggaaatatttttagtattttaaatctttttcattgctatgtaagactttaacatattaatttttattaaatgttagcactaataaattagcatttgcagttgtgttttgaggttatgcatcttttgctaatactgtgtaagaatttctaactaaaactgtattttaaaaaaagaa

SEQ ID NO: 248373 - DNA, 485 bp, Homo sapiens
gacataatcctcattttatagatggggaaagcagagcccagagaagttgaatgatgccatctcttagctaatggatgagtccaggcccagcctggaggacctaacgtgaccccagctggcttttgaggaaaccaaagcgtgttggagcctggaagcctttggtcagtcccatcattccacctctagggatcccctgtgacctcctgaaccagagcagactccctggagccgtcccaggccacagcccaggtgtgatgctgggctgcaagtgacagccaggcctatggtgcactgcccacatttggggctgcagccccttcctctccaacatttcccacctctatttttaacagaagccagtgcccctgccatctccttatcactcacagtcccactctgctgtcattgtcccgccctagagatgcttttgctcccattcaaaataatttaaataaaatgttgctacaaagcggaaaaaaatcttt

SEQ ID NO: 248374 - DNA, 549 bp, Homo sapiens
aataggaagaaatggccatagagtgtgtggtttctctcaagccaaggaatagatgttttaagaaaggaaaattcttgtggtgggaagcagtagagatgacagatacacattaatttcttgagatttctagatgactaaatgggcagatgttgaatgatagctaaaggagaacccagaaacaagggagggattttgtttttgttttttaaaaaagatagaccatagcagcttcatagactgaaacaataaaaaagttgaaggcacaaagaaagacacaggtcctctaactccctgcccagtgccctttattcatattctcagcacttgtatttctaagttttatgtttgagtcttcggggatacatcagagtagtcccccttgtctaataaatgtgtttacatttcctgccataccagaaacccttctcaaactttaatgaatttctacaaggtgagattactttaatgagaaaccaaccaaggaaaggagtatcatctgcaatatactttcaaatgttttttgcttgtttgtttcttgtccagctaaaa

SEQ ID NO: 248375 - DNA, 626 bp, Homo sapiens
ttagaaaaaatctcagaacacgaaacagaatgttaaattgtcacaggagagagcttatgcccttgaatcaagggaaaatagagttcacaaggagccagcggccggcagcatcacacttttatgacagacctggaaggtaaggtcaagggtgactttggtgggagtattatcagtgaaactattgaggaaatcatttctgctttatctctgtagtgcatgcctcattaaatacattattaaagctttaagatgaattttattaattggcatgtcacatccaatgaaaaggatgctagttttttgtgttgtttgatctttcataaggatttgaacagtcatatgtatcaagggtaaaaaacaaaaacaacaattataggctaaaggaaaattcacagagggaggtcaattgggggagggaatgccgtccagcaagtggctggaaaggttaataaacactttcaaagaagaccacagatatttttctttctctttaaagaataaagtttagccttgttcctcgaactcaaagaaagaaagtttgggtaagtctcattttgtgtgtgctcggttttacacttctgttggagaaagaattgtggtgaaattagtctggaggttttgtgcag

SEQ ID NO: 248376 - DNA, 360 bp, Homo sapiens
gaaaaaaaaaaaaaaaaaaatcatccaagaaccctgggacaatttcaaaaggtataatgtgcatgtactgggaatacctgaagaagaaagagaaggaaacggaagaagtacttgaagtagtcatggccaagaattttccaaaattcatgacaaagacacaaaaccacagacccaggaagcttagagaacaccaagcaggataaatcccaaaatatctatgtgtaggcctatcctattcaaacttcagaagatcaaagacaaagagaaaatctcttaaaatgccaaaaggggaaataaaacaccttacctatagaggaacaaggatgaaaattccaggggacttcttatcagaaaccatac

SEQ ID NO: 248377 - DNA, 222 bp, Homo sapiens
ataaagaaagtttgctttaaaaaaacaatggttatcttcaaaaataaaggggagaggcagaatttatataaaaagagttatatgataaattcttgtcctgaaataaattaactggttgtttaaagaaaagaatgtttgtaataagtcaaaaagttaaaacatgtttaaaaaattgtctgcaaaagtcataaaagaaaaaattttattaaaaaaattttaagc

SEQ ID NO: 248378 - DNA, 709 bp, Homo sapiens
tatttttctgcacatctctatttcccctggaaaattctataagtagtacccctgggtcacagggtcacagttagcaggtacagccagaaagccttcttgagggatgtgccccctaccagcagagcatgaggggggcacatggattgaagtttgtcatgtagcaatatcaacctggtcccattgaatggctaaaactctctgcagccagtcccagttggcccccagggatggggctgcccagccccagtaactgtgagcaggactctgtgtgcccatgcaagctgggagtacagcaggcaccctttgcctgctggcgtggcacccccaccagcccccctgctcagcaaccaccctggcttgtgacccttcatactactggagtttccaagaatggcatttgtcccagagggtggttgtcaccaagcactgtgaatgaacaacagaaattgcttgggtcgtgagtatgggccattggacacagcctttgagtgggcaggcaggcatccccagtccagtgccagcagggcagccaggagccccagttcagtggctggtgccaggcctgtgggccagctctgggctgacacagctggtctactgtcatatctctaatttgatcccatccctcatcccacgctatctgtggcctggtgtcatcctatgagcgaatggaggaccagcatccctgaccctgggatactggcagtga

SEQ ID NO: 248379 - DNA, 332 bp, Homo sapiens
ggacatgatgtaggctccaacttcataggcagtgaaaggggagggcaggccaaggagagaccaaagaagtaggtgctatttcctcctacctcaattccggaatctaccccagtctgtgcccaggcttctagcatttgtatgcacgtgcccttacccacactgtgcttttctatgtccaagtagctgtaagttgtgaaattgggtgtacacaaatcatagctagaatcaaaagtgttcgtcaaatgtccaatttgtgcctttgcatactttcgacaaagctttgcagggtaacccctctctggagtaaagagcaccctctttattccccacat

SEQ ID NO: 248380 - DNA, 484 bp, Homo sapiens
ggccacaaattcttcaatactcttctatggagagatttgagggctatttcccttcatcttgaatttaggcaggcttgttcagggtctggcttttaagaggagctttcaccttggtctgtggaagtcctgagtcactgtgtacaaagtccatctaccttattacaccatctggagagagctgagactacagggagagggggagtggcccggctgatcccagtcttcctagtgaccctgcccaggaacttggcatgtgagtaaagccatcttggaacctccataccagaccagccacgagatgaataatactaactgatcccagtcaatgccacatagagcagaagaactgcctaactgaattctttccaaactgctgactcaaaaatttgtatggtataataaaatgtttgttttaagtcactgttttgttaggagtaataagcaaccagaataaaattctaatctttatcatgtaccgtgctga

SEQ ID NO: 248381 - DNA, 476 bp, Homo sapiens
gagcttaactacatctgcaaaattctgttcaccagaggcaagtcatattcagggaaagagaagtgtacaaagtgagaacaccaaggtgcaaaaatcactggagctaccattataattgtagtaataaaattctcttctaatactaggtctcaaagtttcattgtgaatcaaagttcaattttacaaagtaaaaattacttattttgcatctattgagatgatcatttaagaaaccatttgttacttgtgttgaattgcattacattatttactcttgttaatctaaccttgcatttgtccgataaactgaacttgattgtgataatactttgtttttattcattgctacttttggtatgttgatattctgcttaggactcttttaatctgtcttttcatgtgatgataataaagagaattttcaatactttaactccatgtacactctgccattatccttagcaaactatttcttt

SEQ ID NO: 248382 - DNA, 1065 bp, Homo sapiens
cggggtgctcgtgggcgccctggtggggcccctctcggtagttgagagtcacgtcctttagttccccatgatttacaattttggaagggacacaaagaaacatagacttcccccatcccagatgattccgagtacatagtctgcagataatacttagcaaaacgcagtctacagactcctaaagcagcttgtctaggaagaccacccatgtgggcttatcactccaggttctgtgacccgggaccttctgagaaaacagcactgctgtgaaatatcttccttgaagcctgtgataagtctccttgttagaatgactccaacttcctgccaataatctttgtcctctccataggagatgttctaggggatgccttccttccctccatttcacaaagaggccagacttgaggactaagtcattagatcttatcccttagaattttgcatatcagcatctgctaacctccacaacacaccctggcacagggtggggctgagggccccaggaaacaaagattcccaaaagtgagagggatgagtcattatttcctagagatgactgttgttttagagaaccttggtccaactctgttctgacaaggttttaggaagatggcaacaacagtggcagcagtgtactttttggatctttctcataaaaaaacaaaagagcaagtaagagagggaaaccaaatatccacatgcaacatccgcaacaaatctagtatgtcaaggtttgacatactcccatggaccccaaagtatgagccagtgagaatgagtcatcaatacctcaagacccatataccagcatctgtgcagaaggatgcagaaggaagcaaagggatgttggatggacctaagaagaggagatccccaagctgtctacagatccttactggaaggtatggtgcaccaatttgagaacagcagctgaaactgggagggacctaacggagtatttcccagtcctctcgcccattctgtatggtgagcacataataggtacttatttagtgtttgtcgaattaataaagttcaaatgacatttccctggagattctt

SEQ ID NO: 248383 - DNA, 372 bp, Homo sapiens
taaaactcagctcacttatatccctgcatccgctacagagacagaatccaagctcatatgttccatcttctctggctgtatagtttaaggaatggaaggcaccagaacagatttattgaaatgtttattagctgaagatttatttagacagttgaggaaaacatcggcacccagcagtaaaattggctctcaaagattttcttctcctgtggaaagtcagacctctgaggccccatccaggtagaagtactagtgcaagaagggcctctgctgtccacttgtgtttctgtgatctgtgggaacattgttaacgccacatcttgacctcaaattgtttagctcctggccagacacggtggctcacacctgtaa

SEQ ID NO: 248384 - DNA, 1136 bp, Homo sapiens
ttcggagtgtgaggaggacagccggaccgagccaacgccggggactttgttccctccgcggaggggactcggcaactcgcagcggcagggtctggggccggcgcctgggagggatctgcgccccccactcactccctagctgtgttcccgccgccgccccggctagtctccggcgctggcgcctatggtcggcctccgacagcgctccggagggaccgggggagctcccaggcgcccgggactggagactgatgcatgagggggctacggaggcgcaggagcggtggtgatggtctgggaagcggagctgaagtgccctgggctttggtgaggcgtgacagtttatcatgaccgtgttcaggcaggaaaacgtggatgattactacgacaccggcgaggaacttggcagtggacagtttgcggttgtgaagaaatgccgtgagaaaagcaccggcctccagtatgccgccaaattcatcaagaaaaggaggactaagtccagccggcggggtgtgagccgcgaggacatcgagcgggaggtcagcatcctgaaggagatccagcaccccaatgtcatcaccctgcacgaggtctatgagaacaagacggacgtcatcctgatcttggaactcgttgcaggtggcgagctgtttgacttcttagctgaaaaggaatctttaactgaagaggaagcaactgaatttctcaaacaaattcttaatggtgtttactacctgcactcccttcaaatcgcccactttgatcttaagcctgagaacataatgcttttggatagaaatgtccccaaacctcggatcaagatcattgactttgggttggcccataaaattgactttggaaatgaatttaaaaacatatttgggactccagagtttgtcgctcctgagatagtcaactatgaacctcttggtcttgaggcagatatgtggagtatcggggtaataacctatatcctcctaagtggggcctcccatttcttgagacactaagcaagaaacgttagcaaatgtatccgctgtcaactacgaatttgaggatgaatacttcagtaataccagtgccctagccaaagatttcataagaagacttctggtcaaggatccaaagtgagtgtc

SEQ ID NO: 248385 - DNA, 1092 bp, Homo sapiens
ttcggagtgtgaggaggacagccggaccgagccaacgccggggactttgttccctccgcggaggggactcggcaactcgcagcggcagggtctggggccggcgcctgggagggatctgcgccccccactcactccctagctgtgttcccgccgccgccccggctagtctccggcgctggcgcctatggtcggcctccgacagcgctccggagggaccgggggagctcccaggcgcccgggactggagactgatgcatgagggggctacggaggcgcaggagcggtggtgatggtctgggaagcggagctgaagtgccctgggctttggtgaggcgtgacagtttatcatgaccgtgttcaggcaggaaaacgtggatgattactacgacaccggcgaggaacttggcagtggacagtttgcggttgtgaagaaatgccgtgagaaaagcaccggcctccagtatgccgccaaattcatcaagaaaaggaggactaagtccagccggcggggtgtgagccgcgaggacatcgagcgggaggtcagcatcctgaaggagatccagcaccccaatgtcatcaccctgcacgaggtctatgagaacaagacggacgtcatcctgatcttggaactgtgagtgccgcctgggccaggctggggagagggtgtggtgggcgtcagctggcatcttcgttccagctggaccacgccacagcgagcccgagagagggatcaggaattggttctgctgtatgaggtgtgtgagaacaatgccgtgctgcctgacctgaaacccagctgcagggatctagaacaaactctaaagagcaactcccatcactgtggttccacccagtttgcaagagggtctcccagtcttgcggttcaccactttctggggttcatctttgccgtgagcacatctgttttctgagtttcctgttaagcttcaagcatatgtccttctcccctctcactctattcctttcctctctctgtttgtttttctgcctttcttcctctgttctctttatctcttcccccatctcttccccctccatcttaaatgcacgaaccccatttttaactgttaa

SEQ ID NO: 248386 - DNA, 1131 bp, Homo sapiens
gctggtacggcccgggattatgggaatgtgactgcatgaggctgtacgtatctgcagcctgccccttttcattggtgtttatccactcacacagtgatgagcagtggtggaggcaatgcccagagctgtggcagccaccttgcagccgtgaagcaccagtgggaatgacagtcaagagaaccacggagatgccagcccctggacccacagcagcagcacctgcttccagactcagagtgtgagaaaaaaataaactcctatttgtttatggcaagagacaaggtctagctctgtgatgcaggccggaggacagtggtgtgatcacagctcactgcagccttgaactcctgggttccagcaatcctcccacctcagcctccttagtaggcgtggctacagtaatggaagacagcaaaagaagtttggagattcctggtttaaagcatttaaagcctctgtgaaaatttgcccaggccaacaacttcactttccacactcagtgccacgaagtgcagctctaagctggggatttctgtgcagagatgatccactgagtgcaacccaccaccgtgcggacaccacccctgcagaatcatctgtgaaaacaaccccaggcccagacataggggccagctaagcttcgtagccctcgaaatacagggagtgccccctctggaccctcgagcccacagtccatccaccacagaggtgtctgctgctcatcagatagttcctaccaagaaaatgctgtgtgaacccatctgtgtggcaaaccggcacggggagaaagctgacttccaaggacgtctaccaactgtcacttgcaaaccagaacttgcctctttgtagatgaagactggcagggctgaagaaatgatctcatgttgaaattaatgatgagcttcagggtgaggtgactcagttcgaatgctgttgaatgttggtgtcatgggacttttacaagaagtaaaactgggctataaaaatgatccccttcccctcactagagaagggaggttctattcctctctctgtctttccctctctctatatataccaaaggtcaaatctttggtattttgcattgagtctttaattattcattcactttgacctagtaattgcacttca

SEQ ID NO: 248387 - DNA, 590 bp, Homo sapiens
  misc_feature (92)..(92): n is a, c, g, or t
tcatgctggcatcattcattctccacgcatcagatgatcctgtggcccctcagtgccaggccccactggccctctgcgcacatcagtgactntgatgttctcccccaccgcatgctgccaatctgatggtggagacagaacagcagtcccggatggtggaggcaatgcccagagctgtggcagccaccttgcagccgtgaagcaccagtgggaatgacagtcaagagaaccacggagatgccagcccctggacccacagcagcagcacctgcttccagactcagagtgtgagaaaaaaataaactcctatttgtttatggcaagagacaaggtctagctctgtgatgcaggccggaggacagtggtgtgatcacagctcactgcagccttgaactcctgggttccagcaatcctcccacctcagcctccttagtaggcgtggctacaggtgtgtaccaccatgtccagccctaaatttcattctttttaatttcaatattgttatgtgttttctaatgttttataacttattggtatggtagatgtacatgtatacaaattaaaagaaaatttatatatattttactggg

SEQ ID NO: 248388 - DNA, 427 bp, Homo sapiens
ccaataccacatgttcagctgatttccagtgtccaaaattgcatttcacgttctcattctttgcccttgccaatttctttctttttaatcccctgtagttttaaagaagtaaattggaagtgtgttcagtttaccatttcaattcagaatctttactcataggtgctttaaaaaaaaaaaaattggtgaaacgttgcctatgaatagattgatttggaagttaccattttgtaatctaatatatcttttttgaatctgttcattttaaaatagttgtgaagaaaatgctgattattaaaatacatgtctgtcattcttggaaatttaagactttcagttgatagctgagaaaccctctttcccagaatctctagaaagcagcagccataatgattcctacaaataaataaaaagccatctttaaaaa

SEQ ID NO: 248389 - DNA, 413 bp, Homo sapiens
gaaactagaaaaacaagaacaaactaaccttaaagctagaagaagaaaaaaaactaaaattagagcagacctaaatgaaattaagaaccaaaaaaagcatacaaaaaatcaatgcaacaaaaagttcgctctttgaaaagaaaaacaaggtcaataggccactaactagattaacaagggaaaagacagatccaaataagcacaatcagaaacaacaaaggtgacattacaaccgatctcccagaaatataaaagatgtccaaagactattatggacacctctgtgcacacaaactagaaaatctagaggtaaaagataaatttctggaaacatgcaatctccaaagattgaatcagaaagaaatggaaaccctgaacagatcaatatcaagttctgaaattgaatcagtaat

SEQ ID NO: 248390 - DNA, 386 bp, Homo sapiens
atgatcagttcggcacatccagaacatggaatagtgtgccctggcctgggacaggttgaatgacgctatggtagaatgaaatcttgggcaaatcccaaaagttttataatagagagagctgtgggatttatcaaaatggatgaacacgattggctagtgctgctgattaagtagtaggacctgcatgggagtgcttttatcaaaactcaagtgatatgggtgtgcccctgttagaattagcctaatctaatcaaaatcaatctaatgtaacctctactctgattcaccatagaaatgtgatataaaatatcagcattttaaaatagtgctatttacattctattgtatactattcattaattaggaaagacaattattttctgtaa

SEQ ID NO: 248391 - DNA, 620 bp, Homo sapiens
ctagcaggccggtccaggggtccgcggtagattttagtcatggactgcatctggggctccatttgaagaatgagttgtggctttacagcttcgattctggaaaagacaaacttaacaaggaggttaaagatacagagattgaaatgtatggcctgcagtgcaggggattatttctttggcacacttcacaggccctgactatctgcttgatagttttgaaaaggcctggtccatctcctcattcttaaaaaatgagattgaattttgattagcccaggaaaattgtctatgtgtttagatttctttctttatagtgtcatttagtgttgttctctttgttgcatattctgtacaagggaatttgagtccagaggctctgttaggtcagattaaacattttggggaagaatactttgtaggctatttgtatggcatatttcactgtcagaaaacatttaagtacaggtccttgcattagtgaaactaagtttgatcatttgggtaagctggtaaccgccataagtccattgtaaagatctaatttgtagtgcataaataatctatggagagactttgacctctgaatatttataatcatgtgtattttagctgtggattga

SEQ ID NO: 248392 - DNA, 425 bp, Homo sapiens
gcgctctttttcttcttggcaatgattcataagtttgagaggctatagggttaaagagggaaagcgttctctttgccctctaaaagttcactaaaaattaactgacagaaggtagattaataggataaaaaagcatataaaatttatttcatgtgcatagtaagcacaggggaattgcaggagaatgataacccaataaagtccagatgcttatatacctacccttctttaacagggaaggggagatgaaggttataagagtaaattattttcaggggaaaagaatgagcccaaatgctgggtgcagttgctcatgcctgtaatcccagcagctgggagtctgagggaggaggattgcttgaggccaggagtttgagaccagcctaggcaatgtagctagaattcatctctaaaaataaaaaatg

SEQ ID NO: 248393 - DNA, 585 bp, Homo sapiens
gtccctctgtgaaacacagaagctataattccactttggcactaggtcatttttgttaatattttggttactcaaccagagtcaattgttttagtttccctatctgtaaaggaatatccaaaaagatgaatactgaaactcagataaaaaaaaattcatcattgaacaaaaggattagaattacgcccaacaagaaaactttgtactgtattagaatgatttaaaacaattatcatatttgtaatttattggccataaaattacttcctcattttggaaatattactttgctgtttgcctggtatttaatgtggtatcttttggtttggtatataccatacaataataaaatattagacaacatggatgattaattatcattcaaaaaaattgtaattctatgatggttaaattctcacttgcatttatttcatgtaaaatatgatataaaaacaaaattagcttacccctgctctggtttaaggaagattatactttaaaagtatagtttgctaaatagtttttaactagttaacatccacgatcatttatttgtaattacatacaagttgtttttcattattg

SEQ ID NO: 248394 - DNA, 470 bp, Homo sapiens
gtgtcagtgggtagtgttccttctagtggctctggggaagagttcactttcttccctctttcgttctgtatgctgcctacattccttggctcatggccccttcctccatcttcaaggccagcagtgcagcatcttcagatctctctctctctctcgctgaccctcctagttccctcctacaattacatcagacccaactggatatttcaggatagctttcccatctcaagtacctaaacttaatcacaactgcaaagttctttttacctctaaagcaacgtattacaggttttggggattaggacttggacattgttggtgaggccattgttctgcccaccacaggaggcaacatatagtgttcatcttatgctgattgagtgtctgccatgtgctatgcacttttgctttctttcacacagttaagaagtggtgaactaggatttgaacccaggcagtctggctctccc

SEQ ID NO: 248395 - DNA, 352 bp, Homo sapiens
tagaaaaactcacctgaggtgatagaactcaggaaagaattataaaggggagaaggtcattttagtaatggagactaaactgtaatgagcttgagcaaatacaggttgagtattctttattcaaagtgcttgggaccagaagtgttttggacttaggatttttttagattttggaatatttgcattatgcttgttgagcattcctaatctgaaaatccaaaattctccaataagcatttcctttgagcgctatgtaggcactcagaaagttttggaatttggagcagtttgaatttcagattttcaaattagggatacccactctgtatgtacagcagataatgctttaaga

SEQ ID NO: 248396 - DNA, 719 bp, Homo sapiens
  misc_feature (509)..(509): n is a, c, g, or t
  misc_feature (719)..(719): n is a, c, g, or t
aaaaaaaaaaaaaaggtgctgctttcctatctggaatcccagagatccatcctaccaccgcctatttttgttgttgttgttctccctggcacagttttgcagcccctgctgttcttctagattatgctgcaacttcacaaattctcctacgtgactctgaaaaattatagacagtgcaggtctgcaggtgaactgagacggggagtagagggactccttgaaacttcagggtggaggaatatggggagcctagagacagccggtgtttggtgagtaatttgatcttagataagcaagagttaaggaatatcttccaagtggttttcccttgggcggtgttcaaagaaagacactcagcagagtcaaagcttagataggttcctgggtagcctttaccctgaggatctgaagggtctgaggaggcagcaaccacttggaacaggtccagaagcatctcatcaacaaccgactaatcaccacccaacaatgactaatcaaactaacctcanaacatatgataaccatacacaacactaaaggacgaacctgatctcttatactaggatccttaatcatttttattgccacaactaacctcctcggactcctgcctaactcatttacacccacccaccaactatttatcctccatgcccatcccttatgaccgggcgcactgattataggctttccttttagattatgccctaccccttctn

SEQ ID NO: 248397 - DNA, 880 bp, Homo sapiens
atgcagctaatcctgaatcaatgggagcacactttggctaatgcctctgtaggcatgcattgacagatgatggagacctagaagggcagcactgatttgggatctgcgggagtggtggcaccatttggcagggataagaagatggtagggatcctgaaagaaaagacagacatctgccttgaaggagagtataagataacttgtcttctatcacaatcttgctgaagttattcctggtcattctactgagaatcttcgtatttgcctcacaatactagaatctcagccagtcagaaagcaaagaattatgtgagcctgtatggaagagggaataccaagaaataaggcagatgaagttattttatttaatagtaacagcaacaacaacaataaggccaactgtctttgctcaagctgttaactcttctccgcttgtagctatagcaccacctggagggagagtgggaacgtgagtctggaattgaattattttattttctccgagaaaccactattagctaccattaagcagcaaaaactgtttaattcaaaagctatttctagtctgatatactgatggatgtggagaataattgtacactggatgagatttttgtggaaattgataccttaccttacttattggccagggaagccaatggaatattaatttggatcccaccagtaagaaatttgttgtaatttactaaaaaacaggttatctacctttacctgtatgctgcctgtaaaaaaaaaaaaaaaaaaaaaaaaccaaaaactttcccaacaaattatgtaattaaaattctgtttacaataacttgacaaaaggaaatgtcaggtattttaaaagagtcaaatcagttacaaatatgttctt

SEQ ID NO: 248398 - DNA, 655 bp, Homo sapiens
gcctaagcaatcattcaatgaatatgaaaaactgagaaggaaaagctaagaaagtagattcaataaaaaattaccaacaaacatgattagcctgtttaatttttcctcacctcttaagtatggacctaaataattaacatcaaatacacgaggtataattttttgaaaattattaacttcctccaaaatgcagcaggaggaattgtagaaaatccttcgtggagggtggaggtcggtgctaacttcaatcatgtttgaacaagattccaaaagaagtatgacgtctctttgcctagaaaactttcaagagaacagccacttcctaccccattctgattccttattcttcaaagtctgctgggattccctatttgagaacgcccagaaacgagagtgttttgcataagtagaaagaagaaccccatcagcgcagtcttctcaaaggatttttccttcatcatatgcctgtccccaaataacttcagtacttcctggaaatgagaactttctcacaaaaaaagctgaaaaatctcattgcatcttaccgttttcctgaaacttaaggaatcaattattaaaaagaagtcttagggtccttttcaagtataggattccagcattatgattaaacaagggaatttttcttgaagttgga

SEQ ID NO: 248399 - DNA, 420 bp, Homo sapiens
ggttgctcaggaggctgaggtgggaggatggcttgagtgtgagaggtcaagcagtgagctgtgttcatgatgctgcccttcagcctgtctgagattgagactctgtctcaaaaaaaaaaaaaaagaaagaaagaagagaaaagaaaagaaagcaaaaagaaagaaaaaaaaggaaactatgccaggcagtagacaataaaatatctttgaagtaggaaggaaaaataaccatcaatctagaattttatatagagtaaaatatctacaacaaatcaaggtaaaactgatacttttcccaacaacaaaagttagaggaatttatcactaactaaattgaactagatgaactattacagtttttaagcaaggaagctgttatttgatggaagctaaggtatacataatcaaacaatgattacc

SEQ ID NO: 248400 - DNA, 440 bp, Homo sapiens
ttctaaatggtttatcatctgtttgatgcactaactcttttgggctcttggatgttggacgctggctcttacaaaaagctacacacatctacattatattcattttattttaacacacacacacaaatgaatccctgtgcccgggattgcactaggtaccaggaatacaaatacaaacatagggagctcaaaacaaaactagtgagaaagatgggaaatactacagtcatagctataaagtaatgggctaagtaacacattagcagaaataaatcatagaatacagagaaaaaaggttaaggtttgattgcctgccatggtcagataaagttccacagagacgatgaactgggccctcagggatgaataggagtttcccaagccaaaagaaaggaaaatgagtaaggggaagctagacctgaggctgagtcagtctggac

SEQ ID NO: 248401 - DNA, 428 bp, Homo sapiens
caggcacagtagctcaagtctgtaatcccaacactttgtgaggccaaggcaggagaactgcttgaggccaggagttcaagagcagcccgggcaacataatgagacctcatctctaaaaaatataaaataattagccaggcatggtggcacacacctggaatcccagctatttaatacttggggggctgaggcaggaggaaggatcctttgagcccaggagttcaagtctgcagtgagctatgatcgtgccactatactccagtctaggagacagagcaaaccttgtctctgaaacaaaattaaaaaaaaaaaaaagagagagagagagagggagaaatgtattagtgagggaccacctaacaaggttttcaaaattcttgtcactcccctttgtaggacaggtatgactacaggaggaagtcaatatt

SEQ ID NO: 248402 - DNA, 811 bp, Homo sapiens
tggacttgagtgtacttggccgcactcgggtaaaccaggcttcaccaggtagacgttctcataccgtaagggtccatcatcaaattacctggcagattgaaatcttccagggaaaatgaatttggaaatgtaaacaccttttctttctttttacttaaaagcctcgatggtagaaaaagaaataatacttataaatgatcggcacgttttaactttaaaagcttttgaactcaagtgaaagacacacgttggaaacagaattgatagttttaattctacccattttcacctggcacatcagatcagtggcaatcatttattttatggggtgtggaggggaaagggatagaaagcggatagaaagctagaatccactgaagtccctgtcctaaaaatctcagagctgtgtttacttagcttgttttaaaaaaaatctcgccgccatgtatgacaagtgttactgcaagaaattcatcagccttctacagatacttccagttttgctgtaatgatctgcagaagagaactgccatcactttctcacatcccaaggtgttgcaggaactcagagagaggggagagtggctgaaacgcttaattaccggaggcgaaggaggggcgcgcgggggaccgaaggagaggggagtgaagaaggaaggtcctttaccaggcttgtacctggagaaagctttgaatcgcttctctgctatatttggaaaaggtatgcttgctttttaaaaaaatgcctttagggcaaagtgatacccttgtgtaataattaactcagacaataaaaataattggaaaatca

SEQ ID NO: 248403 - DNA, 617 bp, Homo sapiens
tggacttgagtgtacttggccgcactcgggtaaaccaggcttcaccaggtagacgttctcataccgtaagggtccatcatcaaattacctggcagattgaaatcttccagggaaaatgaatttggaaatgtaaacaccttttctttctttttacttaaaagcctcgatggtagaaaaagaaataatacttataaatgatcggcacgttttaactttaaaagcttttgaactcaagtgaaagacacacgttggaaacagaattgatagttttaattctacccattttcacctggcacatcagatcagtggcaatcatttattttatggggtgtggaggggaaagggatagaaagcggatagaaagctagaatccactgaagtccctgtcctaaaaatctcagagaaattaaagacttattgaaacacaaacattccatcgctccatactctccgtccagatgaattgaaacttataaatccacgctctccccaattttatgttttttatttattttttttcagggtttgataggaaagatacccaagtctgatagggaagacagggccacttctggactagctgtgaggatgtgttttcatttccataacactgaagc

SEQ ID NO: 248404 - DNA, 343 bp, Homo sapiens
aaaaatacagtcagcatcttcccctgtttctgaactggactaactggacagccataaaatttatgtgaaagagactaataacaaactaattgttaaaaggattaattcttaaaaagtatttttaattttgaaaagtaatacatgcttattataacaaaatcaaagtgtgctgattgaggacgtaaaacatttttaaatttcatgctcatctttctccctcccccagcccatctcctgtgatattcattgttaacagttctatgtctttttctagatggttctgtgtttaccaccctattgcatgaaatgcctaaaaatccagtcaagtgaattttgccattta

SEQ ID NO: 248405 - DNA, 462 bp, Homo sapiens
ctttctcggggaagatgacacatctgaactgaggtaccctccaaagcctgttccgtaaaatcagcaaacaactgacaggataacttcaggaagtgggtattaattctcacggtataagtgaagacattaagcaccagagtttaagtagcttgatccactgaaagagattcaactgtgtggaacctatgccgtggagaattgctttctgccattgttatcgtccagcagttgccgaatagctctgacctgagcaaagcagtgaaacgcggtgctgttgagtgggttgccactgcacctttttcaactactctagtcttgtggagaaaataccccttctaaattttttcttcattgaatactctccctcagctccagagtaccatatagagttttcttgtattttagagttactgttttatcaaagtttaccagtcttttgtattacatttctcctgtctaaaa

SEQ ID NO: 248406 - DNA, 430 bp, Homo sapiens
tgcatactcactcactcggggctcatgtattccccacagacaagccaaaccgcagtagagatcaatagccatgtgcaccccaaagtatcaagacacaatgggggctcgggggacgcggaccacgctgtcccgggacaggctgtgagggcgcagacatgctcgtaggagacaatcccagcgtgtgcaatccaagagagctccaggaattcgtaggtggaagggacggagagataatgcagcccagtcccaccccccttcaatgactcacaaccagagacatacacacatcgactttcctggtttaaacacacacacctcccctgagatctagcttcaaaacaataagggaaataccaagtgcggaatgcatttcaggggctttccaccacccgggccagttcctaaaggggatggggggcggggtgggggg

SEQ ID NO: 248407 - DNA, 392 bp, Homo sapiens
atttggtttttattctgcaggctggagtttatgattttttgcctgcatccccaagaaaggcacatgctctgataattcctgctgtattctgttagaagaaggcaggactaggcgagagccaccgcacccagcggaaaactgtctatttttatgctgaggttcaacaaagtgtagatagcaacgcagagaaatgattggggaaaagggcatgatctaaggctaacaggctgagtggggaaagccagcagggcatctgcttagattcttcctggctttcctgtgcagcatgtcttctggctatggggcagcccctctacggaatggtggggggggttcttatgacctaccatcaaaaaaggtaggtcagattatttatttatggtcagttttta

SEQ ID NO: 248408 - DNA, 394 bp, Homo sapiens
gctcgacctaaccaacaagcccctttctaggtccagggaaaatccatggcactctttcccaccaagcccagcttctcaagtcttctttactagctcataagataaaccaatggagggccgggcacgtggctgatgcctgtaattccagcacttttggaggctgaggcgggtggatcacgaggtcaggagctcgagcccagcctggcaacatggtgaaaccccgtctctactaagaatacaaaaattagccagacatggtggtgggcacctgtaatcccagctactcaggaggctgaggcaggagaatcgcctcaacccgggaggcggaagttgcagtgagccgagattgtgccattgcactccagccggggtgacaagagcaagactccatctc

SEQ ID NO: 248409 - DNA, 441 bp, Homo sapiens
atacttttaaatttgacatataatgacaatacttaaggcagccatatattttatgaaattgagaaaagttaaattgattgaaaattactaatgtttctgttgttatctggttgatttgagatacccatgatttgtaaattaaaattcctggttgtttaatgaaagaacttttttgggtgcgaatgtatggattatatacatttgtatatctaacttattttaagcaaaaagtttagcaacatataaagtaataaaaattgtattgcacatgtaagaatagggctatagaaggaataatagcctagattttatgatcatgtaaatataacatgttttactgaagtttttaattagtttctgtgtgaaagactgtgtttaaattgtacattgtcaaaaatgtgaatgagttaaataatttattataaagaagattaatactta

SEQ ID NO: 248410 - DNA, 347 bp, Homo sapiens
tggagttaaaggttttatttaagttacgctggacacagttgagaattgtcccactcctctttccttgcttcatgtggagcattaacatgaaacacacatggttataacagcacttcaagtggaatcaagacctccacagaaagaacatttttgtgtgctttggttcagaaagaacattgttctttttttctcctgtttgctgttagagttgctgtagataaaaaggttctaaggttagaagagagatggacttcaaactgggagatggccccagcaggtctcgatggcttttattttccagctattattgggacaggaaagtagcgatgtattattaaggtaaaaaa

SEQ ID NO: 248411 - DNA, 205 bp, Homo sapiens
tggagttaaaggttttatttaagttacgctggacacagttgagaattgtcccactcctctttccttgcttcatgtggagcattaacatgaaacacacatggttataacagcacttcaagtggaatcaagacctccacagaaagaacatttttctgaaccaaagcacacaaaaatgttctttctgtggaggtcttgattccgtcga

SEQ ID NO: 248412 - DNA, 464 bp, Homo sapiens
tgctaattttaaaaatgtaatatcgtttgttacttataagagtgggactgcttaaaaatgaattttattttctgctgagatgatgtagaatgtgaatgtattaatagaaattgattcacgtttccaggatatcatattgagaatgtgtatcgagactcttcaaagtgtagatttcctttgattcaagaattctaggaatcctcacttaggagttaaacacaaaaatatgtattcatctcagtgttgttcgttcgataggaaaatatcggacacattattaatgacaacaacaggaatatattttaataagttatgatttgtccacttgatgaatgttatggatttatcaaaatcattaaaagagtagttgataacattgtaatatttgcatgaataaaatagtaaatgaaaactcacctgtatgcaaacctacaggtactttacttgctcaatgttgtgaaaag

SEQ ID NO: 248413 - DNA, 752 bp, Homo sapiens
tcaaaatctctgccagtagagctgagcatcagtgtttattttatttgtaaagctcccccatgtgattctaatgtgcagccaaggttgggaacctctgccttaaataatagataagattcaggtagtcagaaaggggaggtgctggggtagagtgagctgcagctgaagaacaaacaggaggataggctgcatcgtcagagggcacaggctgggttttgccttgtaacaagagcagagggtttgggcactcattcatttgacaaacctttatttaatcacctcttctctgctagtcactgtgtaactagttgcgctggagattcaagaaaacaaaaacaggtaagagatggttgataccctctggttgttcacagtctacttgaggaaacagataagcatgtaaaccggacttgcagtaagagcacagtgaatgaagtaagtctagaggagatggggggtcctggcactaaggaaggttctctagcgatgaatgaggcagagcatgaggcagagaggagtggccgaggccttcacttgggaaactcttgctattacaaagtgccttctagcgagggctggaaaagctagagtaaggctggttatacttggaagaaggaagaaaaactcgataaaaatattcacatttatacaatttctcctcaaatcctcatgaagtctggtcttacaaactacaaatgggattatataaattttcaagtgccctagaaagagtaatgaagtaaatgaatcct

SEQ ID NO: 248414 - DNA, 365 bp, Homo sapiens
aagaaagatttgggaagacagggaaaaggaatcaccattccttgcagagtaagatatgataagctcagttttagatatctcaatttgttagtagtatctgtagtgctcccagatagaaatattcactgggagccagaaatgcaggattggaatttgagagaatgtagagcttcaaaatcaaatgagaattagtgtgttagttctattatatcagtaagtggaagcttgtaatgaaggcagagcccagaaagtatgtcatagagctataagaggagaaggccaaggacagaacctaattaaacactagtattaagggacagtcaaaggaagagaaaattaagaaagaataaaggaaaaggaaaaaa

SEQ ID NO: 248415 - DNA, 454 bp, Homo sapiens
cagtttcagcttgttggtaccgagaattgaaatttgcattgactgtggcagtgtaagaaatttttctgagaaggtagttgtagataagtaattacataagagtgaaataataaggtgaaccagtctgaagtaatagttctgaacaagtctgccaacatttgagacatgtataccattatctcagcagaaaaaaataaaaaagtgcggtaataatgttgaaatgggactggagatgtcaaatgggttggtttaaaaatatccctaaactgctttagaaactaaacgttggagttgaataaaagtgaatctggatttcctgaatagcaccgtggcttgagtgtgctgtcagtatgtaagccagtccaccaacttaagacagaagtgttgctattccataaatacagtagaactccatatgctgagtttttcaatttcttctgttagaaagtttgga

SEQ ID NO: 248416 - DNA, 409 bp, Homo sapiens
gaaacaaaaaccagtccagtttctactttagccctaaattggaaacaaatcaaatgtccttctatacttaaaaaggcaaattgtcagtttttcttcaaatacaaggaatacaaagaaaatacattttttttctacaaagaaaaaaaagttagctaggagtggtggtgcatgcttctattcctagctactctggaggctgaggcagaaggatggcttgtgcccaagagttcaggttacagtaagctatgatggtgccactgcactccagtctgtgtgatagagtaagaccctgattctaaaatttttttaaatttcttaaaagagatttgatatttctttggtatctaactttattcaaagctggagttgcaaatgatttcagcaaaaaaaaataaagatgtgcttgata

SEQ ID NO: 248417 - DNA, 478 bp, Homo sapiens
ttattatttatttatttatttatttatttttgagacggagtctcactctgtcacccaagttggagtgcagtggcatggtctcggctcactgcaacctccgcctcctgggttcaagagattcttcggcctcagcctccctagtagctgggactacaggcacgtgccaccacacccagctaatttttgtattttagtagagacagggtttcaccatattggccaggctgttctcgaactcctgacctcatgatccgcccaccttggcctcccaaagtgctgggattacaggcatgagccaccacagctggccgtaaatattttttgaatttgaatctgttttggaagccaaatatgttttggaagccaaacaattaagagaagtaaaattttaaccctagtaggtttcgcagattcatccccagatatgtttttgtttggcttgtgttattaacaaataaatgagtgtctttcaaatgga

SEQ ID NO: 248418 - DNA, 449 bp, Homo sapiens
gtcatcatgcaagtgtctgtctgagcatggccagtaagagaactggtggtttcggtccatgaaagagctggggttcctggaagtttttggaatgcctggccacgacattggttggagtctgactgggccccatgcagaaaatgccacactctgctgagctgacatctttgtgttctgctaggaggcccaggaattcataaaagaaaagaactaaggcacttgaaaatttcgaaggtaaaactgtcacccgtgcaaatcaaatcaaaattaataatgtttttctgactcaatgcaaaaggcgaaaacaccaatttagttgttgctgcggctgcttttcatgcagtgctttagagttacagatcccacatgtggttgaaaaccggttactttcctgttggcttaaactcaaaggcatttgtatgtgtgctaaaaacatttcttactatgca

SEQ ID NO: 248419 - DNA, 426 bp, Homo sapiens
agatgagagtgggctttaaggctggaatttggaaatgcaaagagctgagaacttcataaaggaggctgagcccacaaacacaggggaggatacctggaggcttgtgagataggggctggcacagtgagagactaggctgggtggctatagtacaggagtgatcagaaatgagaggacaggctgggcgctgtggctcacgcctgtaatcccagcactttgggaggccgaggcaagcggatcacctgaggtcaggagttcaagaccagcctggccaacatggtgaaaccccgtctctactaaaaatacaaaattagctgggcatggtggcgcatgcctctagccccagctactcgggaggctaaggtaggagaatcgcttgaacccaggaggcggaggttgcagtgagccaagatcacaccactgcac

SEQ ID NO: 248420 - DNA, 271 bp, Homo sapiens
gtgagctatgattgtgtcactgtactccatcctaggtgacagagtgagctctgtctctaaaaaaataaataaaaacaaaacatgcatacaccatctgacttcaatggttctcagccttacagtgagtaaagaaaaacgatcattcacttcccagcaggcccaggaaccttaagactataagtaaaatctaaagtttgcctctgtttggcttcctaatttcaagaggtttttaaatctgagattcctataagatcaatgtggggggaaaaag

SEQ ID NO: 248421 - DNA, 237 bp, Homo sapiens
cattaccaatctgttaaccaaaaagagactaaaaggctgaccaccctcatgttgataaggtgtttacatgttgtgggtaggaaagtaaatttaacacgcacaaactctttcacacagctgttcagtttctagaaacatcttacaatgactctgtacaaggatttgcattgcagcaatgctttaatcagtaaaagcttggtaacatgtagaatgtccacctacaagaaacaaaaataa

SEQ ID NO: 248422 - DNA, 426 bp, Homo sapiens
tatgtgagataaatgacttcttatttaaaatataaagaagttccctggtagggcccctcaacatctggctgactcaaatgcctgtgttctccagggaacccaggaaacaggtccacactcagagagaaacttcatctatgacatgattccagtcagctggcatttacacctctgtagggaaagaaaatgaaacattcaaatacaaaggggtccctggagaaactcccaccggcctgagcactgggagaacaggttgagccatggaagtttctgccggttttagggggtaggagtctgtcctttctttttccggggtggtaactgggaattctatctgtgagatggggatctgttaacaggaagctctcttgctttgctgagtttttttccttttcacccaataaattccatttttctcacccttca

SEQ ID NO: 248423 - DNA, 414 bp, Homo sapiens
ggttgcagcgagctgcaccatctcggctcactgcaacctagcccgggtgacagagcgagactccgtctcaaaaaaaataaaaaataaaaaagctcagagattttaaaaaggatacccaaatgattaaaatggtacattgtaaaaactaagtaaataaataaaataaaaaataaaaccaacataactttagtattctctaacagagagggggaaaaaataccctcatcttgaaaactttaacctagaagtgcaaaaaaggcctaaatcctattgacacatacacacacaaaaacagatagtgtatgtggctttattttttcgtaatatttcacacatacagaaaagtataaattcctatgtacctaacacatagctttaccaaattttatcattttgtcatatctatttaaaaaa

SEQ ID NO: 248424 - DNA, 524 bp, Homo sapiens
tggttaagccatctttcactttgcctctctctatctccgcctatcatctggtgccagttgcatgccacagacctaggcagaagatgaaagcagagagctacgagggattctatggtagttaaagtttgagcaaccaacaaacaaaatgaagaaatagaaaaaatagaaaatatcagaagtatatcagtgaggctccttgcgggaaacaaatgcacgttaggcacattgaggggagtttaataacaggaccatttataatgggaaaccccagggccagaggagagaattgctgtcacaatttggaagcttagtgcaaatggcagcctaagtaagagaagtcaacagtgactcccagaagctggagaagacacagtggcgattcctcagagattttgaaccagaaatgccactgagtcagcaatcgcattactgggtatatattcaaaggagtataaatcattctattataaagatacatgcacacatatgttcattgcagcactattcacaatagcaaagacatg

SEQ ID NO: 248425 - DNA, 328 bp, Homo sapiens
tccccagctttgttcagaggctgttggttacatagtacaggcctggcactgagtcctgtttgtagagaaagggtgagaagtgtttggggcctgcgagcctctttgagtatctggatgctgccctgtgggaacaggttattctgtttgactccaaggctagagtgagaaccagaggttaggagttgcagggaggcggagtagctcccggtgagcacgaccctatcccaaggagctttcacttgtggagcaggccgagggtggccgtcatcgtggtggaagcaagcagtacggggcctgatctctctctctcggtcttctgacccgagga

SEQ ID NO: 248426 - DNA, 366 bp, Homo sapiens
ttttttttttagacagtctcgctctgtcacccaggccggagttcagtggtgcgatctccgctcactgcaatctctgcctcccaggtttaggagattctcctgcctcaaactcctgagtagctagaattacaggcatgtgtcacgaacctggctaatttttgtaattttagtagagacggtgtttcactatgttggccaggttggtctcaaactcctggcttcaactgatctgaccaccttggccttccaaagtgctaggattacaggtgtgagccactgcacccagctagccttctttataaaaaggtggtactagatttggctccttggtcacagtgtgctgatccttgctctaggtggtactgg

SEQ ID NO: 248427 - DNA, 598 bp, Homo sapiens
taagctgatgtattacttaagcaaatgttttttctcattgtattgctggagttattccttctggaaggggttcctaattgacttttttaaaactctgaaagttttgttgattggttaacacacaaaaaaatgtagagacgagtgtcagctgaaatgtttatccaggactctgttagtattgctgggggatagttttcacctggaggtgaaaacgcattcagttaataatggaaggtccaactcttcatgtacagtgcctagtaatctgtcctcacattacactgaagaagtatttctgcctccagagaaagttgaaggacaatgaacacttgagcaatatgctttcaaaaagcaaaaatattttcttggaaaagctagcctatctgtaaatagtttgtgttcactaagaagaccatttctttggtagcacaagggagcaggccatttgctgaaacactggactgtggaatcacttttacccggacattgggttttctgatatccttttaaaaacattttaacaaataatatactcctttgtgtttacatgcaaaactcaaagaaggttacctatcctccatgactttttaacctacct

SEQ ID NO: 248428 - DNA, 344 bp, Homo sapiens
tagtgggaatggctgttggctgcctaactggctactgcaagctttttagggcagggtcttacctaactcacctctgtatccaggtggaaactagcaccatgctttgtcgggtaatatgttatacaaagaatttagattttatcctgtaggcagtggtgggactgagggatttggggcaagggagtgacatcttcagatttgcattttagaaaggtggctctggggtgaaggagggcagtgtggagggtgctggactagactccagctactacaataggctaggcgggaaggcagaagggtggggattagggtggcatttaaggaagacaattaggggtagatct

SEQ ID NO: 248429 - DNA, 441 bp, Homo sapiens
ggctcaagtgatcgtcctcctcagcctcctgagtagttgggaccacaagctcatgccactacacctggctaatttaaaatattttttttgtgaggaggtgtggtcttactgtgttgctcatgtttgtctagaactcctgggctcaagcgatcctcctagctcagcctcccaaaatgttgcttttgcctggcacaattgttagtaggtaaatttcacatcactgtttgttttgagggtttgggggttttttgtttgtttttggtggagttacacaagtccatcatataaaggtatgaaaagagttattgctattaggaaaaattcaagtcattataggtttgggcatacagggttaaccttgtgatgtacatccccagccctgaatttatttgattaatcctctttaaaataaaggattacattcaatcaatttgttaaaaa

SEQ ID NO: 248430 - DNA, 874 bp, Homo sapiens
ttcggccgaggagagacactctagagaacacacacttgcaaatatgcatttcagatgatttcttcaggattgatttcccagggtgaaattacctggtcaaatggggtagacgtttttaagacttgatgacaaagtgcttttgagagaagccaatcatttaaccccctctattttccattcctgaaacataagaaggtgctcatatgttgtcagtattttttacattttataaccgaggaaacaacatttggagaatgtaaatacttgcacaagctggtaaatactctatttgttcaattccaaatgacatgttttcccttacacagcaccatggttcagtgttgagatccacagaaaacgtgacaaggttggcctttgactcaggcctagcagccctgagaatagggatggggactgagagagagagacagcacgagctagagagagctgtggatccaggcttcagggatgcaatgaagcctgcaaacacctttctctcacaaggctcgagaacatccagtcacctccctgaccacacttctcagatctgctttcatctgactttcacgttctcaaggttaaccttgtcaggcttgatgatcaacaaggttgcaatgagtattcatagaaattggtacagaagttaatgtccagatccacatgaaacgcaggcagaaatgaagacagtgacacttaccaatcttgacagaagggacaaaagcttaaactctacaaggaaacatttgtaaccctcatcagcatggtgctgcatattgtagacaatacatgcactttaaaaaccacaggatctaagcattatggaaatgacaatgacaacttaaggagagctgttgtcactggggaaggatgctta

SEQ ID NO: 248431 - DNA, 327 bp, Homo sapiens
ttttttttacctatatccacataaaaacctataaaaatatacagatggtgggggggtctacaaagttactaccagatgacttttcttgagaatctctaaattcaacagccaactgtactattgaaaaaaaggtgttaatactttggacaattttatgtgactataatccaggcaaatacgtcagtaggcatcagtaaatttcattctactaaaaggccacaatttttgggaacttttaaggactagtcctccacatacaaaattactttccaaggtttgctaacaatgcaattctgcatttttagtttgcacagtctcctaaaaatg

SEQ ID NO: 248432 - DNA, 690 bp, Homo sapiens
  misc_feature (687)..(687): n is a, c, g, or t
ttgcccctttttttctgtgtttggggcctttcatagtctggcaaaaagttggaggttattgccattcttcagaatttagcaggaccctgtaggaacaagaacaatatctagactcccattattaattaggacttgaaaccaaaaatgcatgacccttctaaaaagtgagtgaggatgaggatgaagcaaaggggaggcaggtgctcatagagtatgtagtattctaagcgttactaggctgggacttccccccaaaggtgatgacttcctttagtatgtgaatcttgaaatgaaagaggcacttacccaggttcagataaatgaggtgtccagcttagggcaggtgaactctgtggtaagagttatgatgacatcaggggacaggtttgcgcaaggcacactggacggaacatagagtaagatgatccagtggtgtctagaatgtggataatacccaatgtatttttgtttgatgattggaaaggagaaagaggcaaagccctttctcccttcccaggcttgggaagggctgatctgatgcatgctgtgaatatgagtcgcagtatcctagaatctttgtgctctcgctgcagttccctttgggttccatgttttccttgttccctcccatgcctagctggattgcagagttaagtttatgattatgaaataaaaactaaataacantta

SEQ ID NO: 248433 - DNA, 591 bp, Homo sapiens
gggaaagagaacagtattgaaaatgaaagtcttcaatttttttacttctggttacttatgaaatacaaacactattttctatttgatggctgttgaccatttgatgaacagttactttgtagggtcctatcttaagttcaatagatcagaatgaaaatgaggagcattcatattgtgatagatagtgatcggcaggggtaggggatgtggttgccaggtggcactaaggtgggtctgaatctaggaatggacaaccctcagaaagataagatgggaattccaagtgtttctgtcagtgatattaatgtgattattcttaactttgagatatggttagtgctgttagttcatgtatggcttgttaggcttataatgaaatttgtgggaaaaaaaaaaaaaggacaactgcattcctcaataggatttccattcattcacaagtaagaataactcacttgatggaattattgctattaacatttttttcccaacttggtacttgtttacagctgagtcttaaggtttgtttttttcttttgcttaaaaaacttctacagctgaaccaatagtagaagttttttaagaaaaaaa

SEQ ID NO: 248434 - DNA, 471 bp, Homo sapiens
ctgccattccgctatatacttactaattattattttattcaagatcatgcatgctctacttgaaggtctatcttttcagtgctacccttacccactagcctaatcacattatatctattttcaacatctaggaatcaattacgtagtgaacatgcctaagaaataataatctgggcagatgcagtggctcaggcctgtaatcccagcactttgagaggctgagcgggtggatcacttgaggtcaggagttggtcaagtgctcctagagaaccaggctgaccaacatggagaaaccttgtctctactgataatacaaaaattagccaggtgaggtggcaggcacctataatcccagctattcgggaggctgaggaaggagaattgcttgaacccctgaggtggaggttgcagtgagccaatattgcgccactgcattccagacttggcaacagagcgacactccacctcaac

SEQ ID NO: 248435 - DNA, 547 bp, Homo sapiens
agaggatgggaccatgatgtcagaagttgaaattgggagcaattgaaagattctaagccaggaaggaatcattttctattttaggatggatttgagaaagttaagaccaagaggcacttaacatacccctgaaatagaaaagaaatgatgcatgagggcgttggtcataaggatagagaagagacaagatcagaagtatgtaggacagtaaatctgcaagatgaagttggggtgaaataaaaaccacaaaaatctcgtttggggctttccaaggttgtgccaacaaataaggtagggcatacaggctggtagctagattgttaagatgagtaactgcttgcaacaacttgattatttgaagttacagtgcatagatgactgtgggacagtgatctgatgctgcaagattaccaatgttaccaaatgacaaagacatcaagaggggagaatttaaactttcaatgattgaccaaggagttgtgcatttcattttgtaacaagggcgtaagattaaaaaccccctaaagatattacaagaatttatatc

SEQ ID NO: 248436 - DNA, 610 bp, Homo sapiens
agaggatgggaccatgatgtcagaagttgaaattgggagcaattgaaagattctaagccaggaaggaatcattttctattttaggatggatttgagaaagttaagaccaagaggcacttaacatacccctgaaatagaaaagaaatgatgcatgagggcgttggtcataaggatagagaagagacaagatcagaagtatgtaggacagtaaatctgcaagatgaagttggggtgaaataaaaaccacaaaaatctcgtttggggctttccaaggttgtgccaacaaataaggtagggcatacaggctggtagctagattgttaagatgagtaactgcttgcaacaacttgattatttgaagttacagtgcatagatgactgtgggaacaatcacatcatggctgttcgtgatatgagacagacagttgcggggggtgtcatcaaagcagtggacaagaaggctgctggagctggcaaggtcaccaagtctgcccagaaagctcagaaggctaaatgaatattatccctaatacctgtcgacccactcttaatcaggggtggagaacggctcagaactgtgtgttcacttggcattaagttagtagtaaag

SEQ ID NO: 248437 - DNA, 382 bp, Homo sapiens
tcttgcctcatgcccccaggactgagaagggaactcagaacactatgggctccacagatcagcccattgcctaaggcaacagagagcatctccccataaataaggatcaagtatatatccagacacattggctgcagtaggttcttactgataagtgccatctactggctgtaggtcaaaccaaacagccgtatgtaaaagctgctgatagaaatgcatagggctatagaagcaaagccaaaagatcctacccagcattctctgcagttgcaacacagagggagtggggagaagggaaggggaaagaaaacacacacacacacacacacacacacacacacacacacacacacacaccaataatattacagagaaagaaaaa

SEQ ID NO: 248438 - DNA, 321 bp, Homo sapiens
atttagttgatgaccaccgtctaaaaatttgcagcttcttctatgagtggccctgtcatggattgttcccacaggcctttttaaatatacaatgtccacagatggacctgtgtcttttgttcctttgtggcaaagtgggctctgtaggggttcaacttaatcccacactgaccaggagctggcatcagctctgttgccccaccccttcattcttattgaaaatagcccaattgtgcagtgtgaaatctgccactaggtaacttttttttttaattcactgattacagctcgtttcaaattgtgtctgagctcctttttaaa

SEQ ID NO: 248439 - DNA, 408 bp, Homo sapiens
ccaacagcagcagcttcaggagtatttgcatggcatgaggacacctccactctttgccctctagtgttaaactcaggcatcttttctgtaatgtgaaaggaaagcgtgttttcagcacaggtgacattctaaaattgggtcttccctgtgaagaagctgaggagataaacagcaagaataaattcacaaagccttgtaagagaagagcagagcgttttcatagacgggatgtggaggtcctggaagcacagcccagcagatgactcacctctggatggaatcaacacacaaagcagataaaaagctgaacattaaagaccacattgttaaagcagagagccaaattgttcctccaccattccctatcccagacttcacatctaacaaggttaatttgtccctataaaa

SEQ ID NO: 248440 - DNA, 432 bp, Homo sapiens
ccaacagcagcagcttcaggagtatttgcatggcatgaggacacctccactctttgccctctagtgttaaactcaggcatcttttctgtaatgtgaaaggaaagcgtgttttcagcacaggtgacattctaaaattgggtcttccctgtgaagaaggttcgtatgaaaccagataactctttcatggccacaggtttgtgttgcttctaccaaagcagcatttcagggaagtgccttcccagggccggccactcacagtggacttttcacctgcactcaccttcttccaatttgcaaagccctgcctcatcacatttgagaaggccttgtacttgagtaagttaaacagtcacgggctctgctgtctctgatctgacaataacaagcattatctactttggattcccagaataaaatcaggcactgagtagt

SEQ ID NO: 248441 - DNA, 460 bp, Homo sapiens
cactccagcctgggcaacagagcaagactctgtctcaaaacaaaacaaaacaaaaagcacttaaaaaggcattttttttccatgtggaatgtcggttgcctactttatgtattcaatagtaatagatattcactcactcattccacagcctggtgcagtggaaggataaactgttttcttttatagtgctttgttagagttatttatagggttattgttttatggaagtataaacttcgaaaccagacaagcttgagagactggtcctgtcccttactagctgtttaaccttgagcaagtgacttacccactctgagcagtttccgcatctgtaaaatgaagataagaatggtatcctctacaatggctgctatgaggattagatgagcacattgtagaagctccacaaatttatggcaaagtgctttctaatctataaagagctacaagaatgtgcatg

SEQ ID NO: 248442 - DNA, 484 bp, Homo sapiens
aatgaggaagggataaaataagttttagcaatgctaagtttgagatatctgttagatatttaggtggggctatcaggtagacagtgagtatacaaatttagagatcagagaaaaaatcaaactggagatgtaaatttgagacacatataaacctaattagaagaaaatacaggataatgccttttttttttacatagagatggagtcttgctatgttgcccaggctggtctcgaactcctggcttcaagcaatccttccaccttggcctcccaaagtgctgggattacagtcatgagccaccacgcctggcccagaaaagatttcttaagtaagacatcaaaaagcacaaatctttataaatggaaaaaccaaaggaaatgtctaaattaaaacaaaagatttctgctgaataaaggacaccacaaacaaagttagcaggtagatgagggacagaagaagacatctgaaacatttataactgcc

SEQ ID NO: 248443 - DNA, 324 bp, Homo sapiens
agccccgccccaccctggaagtgttccagtgtggtggggggaccctaatactgacaactggtcagagaagggcacagcgatgaggtaggggaggggctttcagagaaggcttcctggaaagggggtttatatgaggagataggatgctgctgtgcacagaaggaatggcacaagcaaaatgttggaggaggaaggccgggcgcggtggctagcaccttggcatctcagcaccttgggaggccgaggtgggtggatcacttgagatcaggagttcgaaaccagcctggccaacatggtgaaacctcatctttactaaaaaataaa

SEQ ID NO: 248444 - DNA, 607 bp, Homo sapiens
gggctcagaaacagcgctcttcggcggtcgcagcgagtgccgacaccaggatcgctttggagtaattagccggctagctaattcacaattcggggggaaatcgtcaagttttttgtttgtttgatttttgcttccaaaatactgggcacttcagtctcggttttcttccttacaatgtggcgctcccctcctgcacgcgccctgacatgacaaattccagggtttatgtggacggtcgttggccacctactgtgtgcgagagacgaatacaagcatagactgctgtctgccggagtcaactccgtggcagggatggatcaggctggaccccttcccagtctccattgcaagggaaaagccactttcagaaatattatataaagtgtacaccccacgctcgcgcacacacgtacaaatgagcgcatataaaactggtgaaatctgagtaaggtgggtggattttatcaatgtcaatgtcctggttgccatcgtgtcaacatcgggggaaactgggtgaagggtacatggcatgtctatgtattatttcttagaactgcatttggatctacaatctcaaaatagaaattaaaaatatacatatttgaag

SEQ ID NO: 248445 - DNA, 430 bp, Homo sapiens
gtagacagggtgtcgccatgtttgccaggctggcctcgaactcctgacctcaagtgatttgcctgccttggcttcccaaagtgctgggattacaggcatgagccaccacgtctggacataaacccagtaattttgtacgatttataaaacaatgtagtctgcaggaactaaggctatgttttgcctcaaatgttctttgttttcagaataaaatacttggtcagtggaatctcttcaacaaaatagaagagaagcagtcatggagtgaagaaataaatcatctttgtttctactcatctgtcacttatgcaatacatacaatatgtaaaaaggaaaaactcccctgtgtaataggcctaagggcaaccagcagctttccacgtcgcgttgggatattaataaattttttttctttacctgtaaaataata

SEQ ID NO: 248446 - DNA, 268 bp, Homo sapiens
tatggcagctgcctttggtggaagaatttagcatgactcagaattgtgtcgagcccagaatcttaccaaacccagaatcaacattgtttcagataaataaatagtaaattcttttgttattcctagactattcatgtaatgtgggttaagtcatacacaatgtggtctgaccagttattatgtgtaatgagtgttaaatggagtgtggaacttacccagattttctgaattaattctgatagaaataaattccactttctatgtcttt

SEQ ID NO: 248447 - DNA, 922 bp, Homo sapiens
gtaggagacatgggaaagcattttggtctcatgtattcataatattggggacgatatggtagaaagccaggaaaagtatttctgttgtcacccaggtaccagaggctgacaagcacagtgaggacctctaatctttctaggggttttctagtttgttttccaagatgtggggcaggtataggggagggtcttacattgaaatctctgctgaaagctatggactgtgctggcattgtgtatgtgtcatattgccctggtttcttcaaatttctgcccttttgctcatcatcgaatgcactaccttagtggctggtttctaatgcagcttctctcccaaagggtacatttttaaatttttattttttaaaatcttgagagtcctttgatttgggaagaggaactctttcatctgagttcattgtgagccctagagagctgtgtgactttatcatcgtcataggagtcattggactttaaaggcattacaactccatttaaagtacctcattactcccaggaatattgggtgttagatcttgcaacacagcataaaacaatttatgttaaagaaggagcattatatcctaggcacttgaaacaactcaaaggtgatgttaccctatgaacagataggtggtacagtcaccgtagaaattcaagacagggatatagcaggtgatgggattcatggatttccagagtggcgctaggactccactttatgttcgtgtattcctgagctgctaaaccagcaaaactcaaccataaggcttaggtcaggatcatctgtccctccggatgcatagaggcctggtttcagaagcagaacaaccatgctattaaaatgttggttcggggctaaagagaaacagctggttctgattacaatctttcagaaaactttttggcttaaaaagaactt

SEQ ID NO: 248448 - DNA, 951 bp, Homo sapiens
gtattatttgcttcttttctatgtgttttctaggcttttgagtcagatgttaggaaagagtctgtccatctttaattttctcacttcgagaagcactgaaatatttctatacatatgtccattggtatagcgacctaacacaactttaaaatcattttgaaattgacgcacagagagcttggttttccagaactggtgaggtgtaagatggttgaggactgacttggcctggtcggacctgtttctttgtagcattattactatttgtttattttccacctgggccttacatcttccctctcaagacagcgtctaggtcccaactcagttggtaggaatttgtgcagtagcaaacctgcagatgggcagagatacaaactcactcaactcacattacagtctttccctgtctaaaacaaacaagaaaacaaaacaaaaaagggagagatcatataggcgtgtatatatacaatattttgttatagataaggaacaaagtaccatatgaattcaaaaggtgagggtgggatgggtttagagctgggagagaaaccatctaaagccttcatgaaagggggtaccatttgctgtggatactgatggcaatgttggggctggaggaaaatgttccaggtagagggcacagaattaatagggggtagctataaaaagcatgctgaataccatgctaggtaggcatttagccctgtagcatatagatgtatctgaatttaaaggcagtgggtgatgttcggaggtttggagcataagatattttgtgatcagaagaaggtgaatctgtcagaggtgtttaggaagcaaatacaagggtagatagtatgggaggttattgtagtaccttgagagaatgctattgaggacctggatgttgaggttggtagcctgggaatatctgggctctgttgatgaattaaattgagttatggcaaa

SEQ ID NO: 248449 - DNA, 289 bp, Homo sapiens
gtagtatggaggccaaggaaggcttttatggtgacgtttaagctgaaatccaaaagaattaactagtcgaaatggtgaggcaaagagtgttttgatccaaggaaataacatgtgcaccctatctactagaagggatgaattatttgcttgctgtcctgaaggtaggccattgtggcttgaaagagtgtgagagagagcatgtagggcaagatgaggctggaagagtaagtaaagatcagaaatttcaggcattgtaggccatgttaaggttttgaacgttatttttaga

SEQ ID NO: 248450 - DNA, 386 bp, Homo sapiens
ggagctaaatgatgagaacacatggatacatacaggggaacaacacaaactctggggtctattggagggtgaaggtgggaggaaggaaaggatcaggaaaaataactaatggatactaggcttaatatctggttgatgaaataatctgtacaacagatccccatgacacaagtttacctatgtagcaaatatgcacatgtacccctgaacttaaaagttaaaaagataacacaatatcaaaattttatgcaatacctacaaatttaataaaagttgtacaaagaattactgacagaaatttcaagacctaagcaaacaaaagaatcatattcactgaccaagaataccacttttactgctgtgagtagaaaatattgtgctaagcc

SEQ ID NO: 248451 - DNA, 577 bp, Homo sapiens
ttggcctagattgccgatttccatcttttctgcccaacacagttctaatatccttaaaggtttacttcaaatgtgaaggcaactgaaataaactcttcctccactgggctccctcagcactttatttcactgtcttctgttaccacgttctactttcataatgggtatttgtaccaattgtgagtgtgaccctgggccatgagtatgtaaaaatgtaacaaacgtgaaccttggtttttaaaggacttatattttaggttgggagataatgtgaacctaaataacactttttcaagataggagaaaataacaagtatttcaggagtccagagagagtttgctctgctagagggatcagagccttgtgggggaaggtggcatcttcagcaccccatatggatgtacatagagaaggcattccacacacacaacaccaggaaaaaagtcaaagaggctgaaagagcagggtgtgttggggaaggggaagaagtttagtctgttattaacgagcatcatgaacgaccaagctggtatcaagtttgttaaggccagatagggaatggctacacattccagg

SEQ ID NO: 248452 - DNA, 432 bp, Homo sapiens
gtttctgctcctgggatcacgttgttgttttatgataccaataatccctgtgctgaaggaatcaatcattcaataaatgcttcagtccacaaagcttagccctaccccacatactaatcctgacttccccttaggtgtagggacgttgattatccccaggtgtacaaactctaacagatattagccagcatctgccagtaagacagcaaaaaatctagttgaaagattggaattgtgtactttgaaccatttttcatgttagcagtgagatacaccagcctcttagacagactttgaatctgaagttgtgtggtagaagtacaggatgaaggtagttttgtagatatcttttagaccagaggtctacaaactggaccacatggcctttggcttgtggcctgttttttttttttttaaataataaaataaaaa

SEQ ID NO: 248453 - DNA, 303 bp, Homo sapiens
aataatctatggtgtcattcacgagggtcctgagtctaatggggaagacgtatgtatctacagatattacctagagtatcccatatttacaagtggatggctgatctcattcattttgttttttttaaaaaagcttgtaagtaaaaatataatttttttatttttagaaaatttagaaaaaggtaaacaataaatatataactaaaatataggaatcatccctgtcatctactgataatcactatttacatttggttgaatattctttcaggtttctttcttcttcacatccatttcatttca

SEQ ID NO: 248454 - DNA, 452 bp, Homo sapiens
aagaaaagaaaaaccaaaaatacatgatcatcacaatatcacaatagatgcagaaaaagcatttacaaaatcctatgccttttcatgattacaaacaaacaaacaaacaaaacacacacacgcactcaacaaactaggcataaaagggaactcaagattgggtataccgtggctcacacctataatcccaccagtctgggaggctgagacaggaggaacacttcagcccaggactttggcaacatcgcaggactttggcaacatcgcaagaccttgtctctactaaaaataaaaacaaaaaaattaaccaggcatggtggtgcacttgtggtcccagctgaggtgggaggatcacctcagcccaggaggtcgaggttgcaagcaatgagctataattgtgccactgcactgcagcctgggcaacagagtgagaccctgtctcaaaaacaaaa

SEQ ID NO: 248455 - DNA, 432 bp, Homo sapiens
cgaagggctttcacaatgctaggtgtggtctggctggtggcagtcatcgtaggatcacccatgtggcacgtgcaacaacttgagatcaaatatgacttcctatatgaaaaggaacacatctgctgcttagaagagtggaccagccctgtgcaccagaagatctacaccaccttcatccttgtcatcctcttcctcctgcctcttatggaagaagaaacgagctgtcattatgatggtgacagtggtggctctctttgctgtgtgctgggcaccattccatgttgtccatatgatgattgaatacagtaattttgaaaaggaatatgatgatgtcacaatcaagatgatttttgctatcgtgcaaattattggattttccaactccatctgtaatcccattgtctatgcatttatgaatgaaaacttcaaaaa

SEQ ID NO: 248456 - DNA, 406 bp, Homo sapiens
agtttacatgaagcttggagttatcaagctgcaatgctataagccccctactatatgctggacaccaggctacgcatgtaaacctagattctctaagtgaagactcatcacaaaggttgtttttattcagatatcagatgcctctcccaaaacgatcttgagaacttttcacaccttcagatacttgtacaagtttaagtctttgacaggtgacaaacagaagttttattttatactccttaaaataaacgtacattctaaaatattactttatttcaggtaattttgaaaaggaatatgatgatgtcacaatcaagatgatttttgctatcgtgcaaattattggattttccaactccatctgtaatcccattgtctatgcatttatgaatgaaaacttcaaaaa

SEQ ID NO: 248457 - DNA, 347 bp, Homo sapiens
acaagaagccctaactgttctaaatatatatgcacccaacattggagcacccagattcataaaataagttcttcttggccaacgaaaaaccttagacaaacacaaaatactagtgggaggcttgaacatcctactgacagcgttagatcatcagggcagaaagttaacaatgaaactctggatttaaacttgacacttgaccaactggatctcagacagctacaggacactacacccaacaaccaaaaaatatacatttttcttgtctgcacacagaatgtattctaagatcaaccacatgcttgatcataaaaagtctcaataaattcaaaatgattgaagtcata

SEQ ID NO: 248458 - DNA, 396 bp, Homo sapiens
tgaaaaaaccataatgagtaacagtgatgtgaaacagactggaggtgcccccaggaatttgcaatagaaggttggaatggttagggaataataatttaaataatagctactatttttgaaggtttaagagtcaagatagacaactaaaaccagtctagaaactccaataaagctaaaaataggatttcctgtataggcttaagcgtgtgctaagcactttgctaagttgttattactaacattattattatttgaggcggaatcttgctctgtcacccaggatggagtgcagtgctgcgatctcggcccaattgcaacctccgcctctgaggttcaggagaatgacgtgaacccgggaggtggagtttgcagtgagccgagatcgcgccactgcac

SEQ ID NO: 248459 - DNA, 335 bp, Homo sapiens
gtaaaaagagactttgcactggcctgctggatcacaggtgccgcattgtttctgtgtgtattacctcatttaaccctgatgaggggatgggcactgactccattccaaaggcgaagacattaaggatgttaaactacatgttaaaacagcacaaggaaaccctgtctttactaaaaataaaaaaaaattatctgggcgcggtggcaggcgcctgtagtcccacctactcgggaggctgaggcaggagaatgacgtgaacccgggaggtggagtttgcagtgagccgagatcgcgccactgcactccagcctgggcgataagtgagactctgtctc

SEQ ID NO: 248460 - DNA, 435 bp, Homo sapiens
agagtctgatccaggcttttccccctgctctgccggctcactggctggggatgtgggcaatgacggcctctgagtttacacttctcatagtgaaatgggtctcacagcaatgccatctgcttcccaaggctaaggattcagtgtgacagtgagggcaaagcactcagcacagggcccgacacacagcaaagcctcagcccttgttcttgctgctcattgatgacagtgatgacaatgatggtgactgagttgtgtggctgagcatttggaccccaagttttatctccaactggcaggtggggagccgggatttgaatttggctctgtctgaccccattctcccaggatgcaagaaatggggcctggggaggatcgcttgagcccaggagttcaagactagtctggacaacatagtgagacccctgtctctacaaa

SEQ ID NO: 248461 - DNA, 614 bp, Homo sapiens
ggcatcgaatgacaaaagaaactgttcattccagaagtcctgatggcactatcgttagatttagactcacctatctgcacagacttccagaggcaaggacagacagcacgtggctcactcgataggtggggcattcattcagagatgctcacttagtgcctactatgcaccaagcattgtgcttgcagtgaggctccaagaaactaatagggatattctagttctccaggaattcccctctgttgtgagtgatggactagaatagaagtaggcacaggctgtaccagaagagcagacacttgctatagaaggaaggccaggaacactgcttgtgatgtggctactgcttcactggacggtgaaggtgcctaacagccattccagagagaaaggccagcagagacaaaggcacagaaacatgaaagggcagagggtgatggagacacaggtgtttccaggtggccagaccagatcacagcaagagtggcaaaaatgaagcctataaatatctgttgaaaatagattataatgggagaaaaattttgcaatctatccatctgacaaagggctaatatccagaatctacaaggaacttaaacaagtttacaggaaaa

SEQ ID NO: 248462 - DNA, 619 bp, Homo sapiens
aaaattgtcaacaatactgttaaagcctattgtgttcgtctcccttcccccattagaaaccattcagaagtagatatttttataatttatttatacttacactatatatgtccatatgcctaaataataatatattttgtatgtttaaaaactatactggccaggcatggtgtctcatgcctgtaattccagtgctttgggaggcagaagcagtaggatcagttgaggctaggagttcgagactaacctgggcaacatagcgagaccctgtctctacagaaagtgaaaaaactatccaggtgtggtggtgcgtgcctgtagtcccagctattctggaggctgaggtgggaggattgcttcagcccaggaggtataggttgcaatgagctgtgatcttgccactgcatttcagcctgggtaacagtgaaaaagcttgtcttaaaaaacaaacaaacaaacaaaaactatacagtatatgtttctgtaatttgcttttttccctcaacattgtaagagtcatccatgttaatacatgtacctctgatttttccattttcactaatcctgtcatcaggtgtgtctaattggccattaaacctatctaccttctattgggtgt

SEQ ID NO: 248463 - DNA, 448 bp, Homo sapiens
cagagtgcactgggccagctctcccatttctccttgtaaagacagaaatctaagaaagttagttaggtaaagtaaaagtaatgtctctgggtttatccaaccaaaggtgtcttttaccctagtgaggagagtatcccagtgaaagcccacagctgtagcttgcaaaggaagctgggttggggatgggcttgggtcaagcctagagatttggccagtgtctccccagatgggggcagactggctaataaacagtgccagagctgtgcgtttgacagaattcctggctgctcctggctttcccatttcgatgatgatgttatgccatagccacaaactattatttaagtgtcttaaatatccttgacgttatatctgaaaatttctataaagtttaccttatattctcatactcaagagcattgggcggtattgaatcaagtaaaaaaca

SEQ ID NO: 248464 - DNA, 305 bp, Homo sapiens
tagtgctaagtgaaaagagacattagaatttcaccatattaaactatctcccaagagtaatatgagtgagggaagtgttccttttaaaagtcatgcttctaggctgagcatggtagttcatgcctgtaattccagcactttggaggccaaagcaggagaattgcttgagcctatgagtttgaggttatagtgcactatgatatcattacccactacaataaaacacgaagttcagatggtcattcactagggtgtgtgatattttggagtatagaccttaagtgattatgacatatcaaaataat

SEQ ID NO: 248465 - DNA, 482 bp, Homo sapiens
actagggctggttttcctcccccattttggcaggctggtccaacctgttacttgacagtgaagtgggcagaggagccctacatgtggttcctgcagtggtctggggaggtaagatgctgagcagttctgccacctctctcttcccccctccccagtagaccccattccagagcccagcacctggggcttgcttggccatactgtcccacaccatggtaagggaacgtttcatccttgtccccttcgcagaaagcggcagcccctacccatagtgccttctttcgactcaaactcagcctcataggaaagatttgagctgtgctttagagaaggagtagggttttaaaaagaaatttctagaccaggcatggtagtttacagctataatcccagtactttgggaggctgaggcagaaggatcacttaagtccaaggagttcaagaccagcctaggcaacatagcgagaccacatctcttaaaa

SEQ ID NO: 248466 - DNA, 504 bp, Homo sapiens
cccatccactttttaaactctcattttcaggatcggagaaatttgctaatcttcctattagcccaaccctgccaccttacttcctcctttttgtctccctcctcatttcccagtcaggtttagtaaatgaagaattatttctttggaatcatatgccattctatctcatttgtttgttgaagatggcaatcaaggctagtacgaacatcttgtcgtattccacaatccctctgcaggcctgagaagactcaccagcaagagagggaaagagagactcgataacatctaccaaatgtggccggcattttgttggacgttttcgggagcaccgtcatctcggacaaaccccgccacttcaagttccacctccctttatagcttcacgcattcaaggaaatcacttccaactacaagcagccagaaacagcagacagtaaaacacagataagactcctggggcacagagggaggtaagggaaaagtctcttgggtaactgccaaact

SEQ ID NO: 248467 - DNA, 247 bp, Homo sapiens
actacccagtcccaggcagttctttaaagcagcagagaatggactagtaaaccctgtatctaccaaaaaatacagaaattagccaggcatggtggcatgcacctgtactcccagctactcagaatgctgaggtgtgaggatcacctgagcccagggaagcaggcagcttgagactgcggtgagccgtgatcatgccaatgcactcgagcctgggtgagaccctgtttcaaaacaaaacaaaacaaaa

SEQ ID NO: 248468 - DNA, 231 bp, Homo sapiens
cagatcttgctatgttgaccaggctgattttgaattcttgggctcaagtgattttcttactttggtctcccaaagtgctgggattacaggcgtgagcaaccgtgcttggcgcaaatataaaatatttataactttgaggaagcaagtgcatttctagaaatttgcttttgaaaaacaggctttcgtgctcaaagtcagaaatgcatgtaccaacagaacattggatccagt

SEQ ID NO: 248469 - DNA, 169 bp, Homo sapiens
gaacatgtattagttacatactttcaaaaaataataacttttgatttaccttaatttcaccctaaacaaagaagaaacttctctttaggctattttaaagaaaacacattggcattttcaaagagaaattgacccagttaaaaggaaaaataaaagaaataaataccca

SEQ ID NO: 248470 - DNA, 782 bp, Homo sapiens
taaggctgttaatttgtcgacataacgggattcttttagaagtaaaaggcataaatctgcgtaaccaccaccaccttttgtttttgtttttttgttctgtcaagcttaatcaagaaagagggaagggagttgtgtcccttcactttgtaggatcggatcctgtccacccagttcccgaatgctctcaacagttacccaaccgcctgtttcaaaggcttccctgttgctcagaatgccacctggacacttctggaaggagactatcagggagataggcttcccctcctcccaggctgtgtacaggtccccactcaatccagcccagggcagagtccaaacggggagggagacgcagacagggtcaaagggaccccaagagtccagcacatctgggaaagagaaaaggaaaaggtgctgtggcttcctgtagctggggcgcacgccagcgcgccccctttcctctgggaggacccccggcccccgttcgtccccgagctcccagcccgcctccgggagccccagtgagaggaaaaacgtgcggggaccccccagcagctccaaacgccgaggcgctccccgcgagcctcagacccgacccaacgccaggactcgcgccgccggcccgggaagaaacccccacagcccgcgccccgggctggctggagggtgggggcggctagccaggcagggcaggggagactgggcccggaggccgggtttggggctgtccagccgggacagagggcccgggcgggggggtccctctgtgggaacaaggagtc

SEQ ID NO: 248471 - DNA, 484 bp, Homo sapiens
gagggacctctacttcacatagtcacccagggacccaagttccttccttcttgtggctctgtcctcttctaagcccttgaaattttttccattcagccagtggatggagaaagaaagaacatgctaaattgccctagatgtttttcatgggactggcctatattactttggctagaacttagtcagatgaccaaacctaactgcaagagaacctgggaaagtaatctaactgtatctacagaaaagaggaactgaatttgattggcatctagtctgtctctgccacaagtaactactagctgggtgagcttaggtcttagttttcttatctgtaaaatggaactaacatgagaattggtgaaagctaaatgaagtaaagtatgtggaaaatgatgaatccagttgggattcatgatcatgactcttttctctcagcttggacctcatcacagctattgagcatcatccctgctgacaaaaaaaa

SEQ ID NO: 248472 - DNA, 431 bp, Homo sapiens
tcccccacttcttccttctcttcattccttctttgctatttttaaatggcacattggaaataaaacaattgtcaatgtattcagccctcccgcagcgggctgccaatcagcacagtccagcctacctccgcttccattccctccaccttagccctcacctccctctttgctcttgcccccgtctccgggcactcaggtctctgttagtttctcaacagctttgcatatgctgttccctctatttggaatgctcttccccatctcccacccctggctggcttttcctggccacccactctgaatgatgcgctcctcttacatatgtgccctgtgtgtttctttactgatacttgtcagcctgctgatcgacttatttgcacaaacatttaataaatcactggaccgtctgctgtaggcgggcagagatcaga

SEQ ID NO: 248473 - DNA, 370 bp, Homo sapiens
agaaaagattggaacaaataagacttagaaacttaatgaagagggcttgtggaactgagctccctggtgctggagtctcttggtagaggcagaggtggggtacgtctgtgataaagctggttctccaaaggctgagaaaagtgccaactgtatttagttgctcttaaggaaagaagtgctgctgcagggatgagaagccttgcaggggtgacagtcacaggaacacaagcaagcccacaggaagcagttagggaggaagcagccatggtgtcttccatccagggccagcaggcaaagctgatgcgtagtgtgcagagtccttggtgcagcatcccaaagcacagtatagaagggtggggttagagatgac

SEQ ID NO: 248474 - DNA, 589 bp, Homo sapiens
acaaagtgagactctgtctcaaaaaaaaagaaaaagaaaaagaaaaaactggtaggtttttaaagggaaaatggttaatgagaaagccaactacaagaaaaacatttagtaagcttcattttaacagatcaaaagaggtgtgtagatttttaaaaggttaagtgatttattttctgttaatctgtaagaaaaatgtactatttgatattataaaataagtgttatcattgatagcactgaatctgaaatcctatgtaagagtctttttttgtttagtagccactccatttacctgtaccaggtaaagctcccaggactctacacacaacgcttcaaaagtggaggagacggggacggtgcctctggtgggggtcagggagggaaatatcatctctagatggatgtgtatagctgaaaaaagccttgatctatagattctagtaaactccttggcttgtatcatctccctcataaggagaatattgtgaggtggaaaaagaaaaatggcaatattccgagcactgaaaacatgacaattacatgtaaacatttcatttccattgcaaaaataatcaactccaaagaaaag

SEQ ID NO: 248475 - DNA, 350 bp, Homo sapiens
agatgtagacagatgcattttgtatttaagttgagaactgaatttctaagttcaggtataaatccccttgacaatatttgcaaaatatagttattttaatttagcagaataggttgtgttaaaaatcagctaaggctggatgcagtggctcatacttgtaatctcagcactttaggaggccaaagcagtagcttgccagagctcaggaattgaagaccagccagggcaatgtagtgggaccccatcgctacaaaacaaaaaactagccaggcatggtagcacacacttcagcaactccagaggctgagatgagaggtcgaggctgcagcaagccatgatcatgccactgc

SEQ ID NO: 248476 - DNA, 634 bp, Homo sapiens
gatagaaaaggaaggaagggatatcagagccttccaggttaccaaaccacttcagtgattttcttgtcagactctgtgaatgtctctaaataaatcagtcagtacttccaagtaccctggggacaggctcttgggaatccagggaatacagagatgaatgctttctgctgcctctctccctacttccagctttaactatccacctagtcatctcactttcatgtccaacaaacatttcaaactctacatgctcaaaactcaactcctgaccaagcgtgatgactcatacctgtaatcccagcactttgggaggccaaggcaggagggtcactttggcccaggggttcgagaccagcctgggcaacatggcaagatgtcatctctactcctgatggtgcccccaaacctgctccatccttcctgttactcaggccacaaacctatgagtcttcttaatgccttcctttcgctctcaagccgcagtcaggaaatccagttagctctagcttcaaaacatacccaaaatccaagcacttcttgccatctccacggccaccacctggaatgaaccactaaacaaaaatataccttttaatccataacaaccttctaactgagctctgctttatcttgc

SEQ ID NO: 248477 - DNA, 91 bp, Homo sapiens
tctctgcctgcaaacatacagaattttagttttaatttacataaaattagctatgcacgtatgttactctaaataaaccttaggtgcaaga

SEQ ID NO: 248478 - DNA, 460 bp, Homo sapiens
agacagatgaattaatgcctttcagggaacttccctatttgtttaatatctaactagccctaaggttaatattcaaaattattgataaaatgcattaggagatctgatgatagatgtcttaagaagaagatcagagtttcggaaggacattctcacacagatctcagtttacctcctattccagagggcataaatatgcaatggcactattcataaactcaaccaatggcacaatcattttaatactgacatgcttcagtacaaataaatataattcagagaaaatcttccatgaatattccttacggagctggaaaaaacgttatctgaagcaagatgttactatgggaggattatattacgtgcactgtgttttggcaatgctttgggatacagtcattaaataggttggctgaaaattcattttactggttaattaaatccaagagtttgcaagaaa

SEQ ID NO: 248479 - DNA, 343 bp, Homo sapiens
tggggtagattaacttaatcaggttgtggaagttgtctttaagcctccttaactaagaagggtttttttagaatcacgtagtcatgttgaattttatcagaagttacatatgcatcttttgggatgatcatatggtttttgcctttaatgccttaaatgaaagatacttatatattttaaaaattaaaccagtcttacatccttgagataaaccctatatagctatgatattttttgtaaataatgatccgtttagtcagctaatgtcatatttaagatttctgtatctatattgatttattaacaaattttattttttattaaccattttaataaatgagtt

SEQ ID NO: 248480 - DNA, 448 bp, Homo sapiens
tcagtaaacttgaagacagctcatttgaaattattaagttagggagtgaaaagaaaaaagaaagaagagaaatgaggagagactaagggtcttataggacaccatcaagccaaccaatatacacattatagtaattccagagggagaagagagagaaaagaggaagagagtctgtttgaagaaataataaccaaaaacttcccaaatttgaggaaataaatggacatacaaattcaagaagctcaaagaacttcaactaggataaaataaaaaagaattacaccaagacatactgtaatcaaactgtcacatcacaatgaaaaaatcctgaaagcagcaaaagagactaatcacttatgagggaaccaactctgtaagataatcagcagatttctcagcagaaaccttgcatgccagagggagtggggtgatatattcaaagcactaa

SEQ ID NO: 248481 - DNA, 434 bp, Homo sapiens
ttttaagtaactggatgtgctttgcgttctccaggctttagcgctttggggaactgccccgtggctgatggcaaggagggaatttggccagttaagtgtcctctgtccctggtcagtcccgacggtcaagcaacacaggatgtgcgggtctcactctcgtgtgcccctcagaggaagtgcactctcgctgctgttcagagacaagcctggtattatttaacagttatagttagttaacagttaacagttctgggtttaacgtgcctatcacctggtgatgatgaaaccagctctgtgggagaatctagtgacctgccagttcttccagcgtcccctcccaggggcgtcgctgaggaagcgctgaggctgacgctgtgtctccaggcccgtcctcgtccctgccaatgttgggggctctgactgtaactcatgac

SEQ ID NO: 248482 - DNA, 434 bp, Homo sapiens
ctgtcatcataggtttaaatttactcagtaacaactctgaagaaatattatagggttaattcaagcatcaagagtagaaattgatccacatgatctctggggtgtttcccaaatcacagaatctaggatctacctttctaaagcagatttggcccaaccactctaatttaccataggttcctgccagacatggccagtcactctcccttgtgtttactttacaccttcccaattcaattcctttgctcagattttgtcctttgcctgaaatgctcacatactccaccagctggtattgtactgattcttgcaagtccaatctaaatgactccttcttactaaatgtctcccaacttaaatatctcctccttattgtccaagctgggtataacatttattaaatggcagagcaggaatgaatacaacagaacacc

SEQ ID NO: 248483 - DNA, 469 bp, Homo sapiens
aatacttgggctgagtttaaacaatgaagataatagttaattgaaagaatgaggtaaaaagagcagaagcatgtatagagcacagtgtgagccaccgcgcctggccaggagagttaagtttttatgcactggctgtgattagaaggggtgtagaatataggagcattgtctcggaaagatgacaggcatggtggggatagaattgtggtgggaagctttggctgcttggagtcctttgggatcctgacagtaaggaatagtgagactgagtgtggccccaagaagaattgtaagaccttaaagacaaatattttaatgaaggtcacaataggccagttgactgtactagggactatgtattttgtgatatccatatgttcctatattattattttattattattattattattatttgagatgaagtcttccagcctgggtaacagagcaagaccctgtctcaaagaaa

SEQ ID NO: 248484 - DNA, 462 bp, Homo sapiens
aatacttgggctgagtttaaacaatgaagataatagttaattgaaagaatgaggtaaaaagagcagaagcatgtatagagcacagtgtgagccaccgcgcctggccaggagagttaagtttttatgcactggctgtgattagaaggggtgtagaatataggagcattgtctcggaaagatgacaggcatggtggggatagaattgtggtgggaagctttggctgcttggagtcctttgggatcctgacagtaaggaatagtgagactgagtgtggccccaagaagaattgtaagaccttaaagacaaatattttaatgaaggtcacaataggccagttgactgtactagggactatgtattttgtaaaaaccaaaagacacaaaaatataagtttattattgttattcctcctgagagggaggaactccccgggcctgggtgactgcgcctcaccctggctc

SEQ ID NO: 248485 - DNA, 373 bp, Homo sapiens
atgttgcatcgacttttttttttttaaatctaatctccttaaagttagcataaaagataaatcaaatttcacagaagactgtaaaaatctaatgttactggccaggcgtgatggcttagcctgtaatcccagcactttgggaggctgagatgggcagatcacgaggtcaagagaacgagaccatcctggccaacatggtgaaaccccgtctctactagaaatacaaaaattagctgggcatggtggcatgcacctgtagtcccagctactcgagaggctgaggcaggagaatcacttgagcccgggagacaggttgcagtgactggagatggtgccactgcactccagcctggcaacagagtgagactccgtc

SEQ ID NO: 248486 - DNA, 586 bp, Homo sapiens
gcagacctcccttcaaatgtttttggtcagaactgggtctcatagcatccttgacctagtcactagcaaggaaaatggaatcaccaggattaacgtaggctgtgcatgaaggatctactactcagctaagaacaggccaccttctctcagggccagctccctggcaggcaggaaggaaggaaggaagatgtgggaaatggctgataggtagtccacagagactgccacacttgttttgtggtgttaatttaaggtctagtttattatttggatcaggaatgtttaaaaaattaatgggctttatcttttagaggtattgtaggtttatagaaaagttagtggaaagtatagaaagtttccatatataccccctcaccatcacctccagactcccaagttactaacttcttgcattaggatggtacatttcttggaattgatgagccagtgtaagtacattgttattaactaaagtccatagtttatgttagggttcacttttggtggtgtacattctatgggttttgacacgtatccaccattacagagtcatacagagtagtttccctgccctaaaaatcgcctg

SEQ ID NO: 248487 - DNA, 344 bp, Homo sapiens
gctttgctaagtaagatgtttactggagtacatttctctcctgatatcagagatgcggctgccccaagcacatttagaagttgcactcttggtacaaaagtaaaggtttgttctcttctgcctgcaaaactacagccagcaactagaggtgatacctgaatgtatccggattgacaatcttcatccctggaaaacatgactcccagaatccagcggtgggggacgggggggtcgcatggcgggagaacagctcctcccagtgtgcctcaacacagggcatccaacacccacttgtcactcccaaggctgactgatgaataatgttcccaagtctcgctgcacgc

SEQ ID NO: 248488 - DNA, 712 bp, Homo sapiens
attgcacttatgcaggggcagtgggtccattcctgcggcattcctatgatatccaattatagtaactgtgtttgtgttgctcagttagaagttgaatgagctggagatttaatgatctagttaatcagtttataattggtaatcagaaagactgagggtttaatcagccagtgtgatatcatatgagccattggttcccagatgctggtccaacaaccacaagtattcacagatttctaggcccatctggggagattcttattcagtatgtctcaatatagactctaggaatctatcatttttcgaggttccatggaagtttctggtgcagggatgtcaaagtatgcatggtataatgactatgtcttttagtgataatgtttttcatctctgtgtgtctcagatactgctggaatgccttaactaccttctttaatggaatatgtttatatgggcattctgggctatgtgggagaaggaacctcaggctggccatcggggacctggttctagccttggttctgccactctctcaacctttcatcaggttagagaagtctaatctctgtgtaggtctaattcataaattgagagcatcagattatgcaaaaggcatttttcagctttctaacattcttcgaagagctttgcctccctaggaattgcttttgttgtcactgttcacgaacagctgttgcctcatttagtttag

SEQ ID NO: 248489 - DNA, 391 bp, Homo sapiens
tgggtgacagagcgagattgtcttaaaaaaaaaaaagaaaaagagtgaagaaaatccgctatctatgcattaatctgtgggctcatttccttgcagccttgtgattgcacgagtgttgtctgatatcatttgagcaagttgtcaactctaaggttctgcaacctgtaaatgcagtgcagctcctggggagggcgtctgtccccctggctggaggctctcaaacagaatggagaccctcactgtcagacctattgggaggactcaggcggtggatgggggttcagactagatcatgtccaaggtccttaaaaaccacaaggtgtataagatgcagccaaaatgatttaaggcaaaaccccacaaacaagatggacaaaaaccctcaaggtga

SEQ ID NO: 248490 - DNA, 271 bp, Homo sapiens
caaagaaactggctttgttagaaaatgcttttgtacagtaaaagtgaaccttaggcccaagtttcttgcagcaagtggtggggtagggtggagaggagttaggatgaattgggcagaaaaaggctactctgtgttgtaaaggaagaagggatggggctgaatggtgtgtggacaaagattataagagaagaggtcctgttggctggaaataattgaaagaagaaacagatatactgggagttcttctaataaaagaactgaattttgtact

SEQ ID NO: 248491 - DNA, 299 bp, Homo sapiens
atcactcggctccctccttactattaaaatgtgggcacttgtcagggcctttccatttgtgtgcaggatcccccgcccattccccatccattcaaggacaacgcaccagtaattctccctctcttgaattatcaaatctttcctctgctgtgtaattcccattaccacacaaatgtactataaattttcttacttttatttttttattatactttaaattctgggatacatgtgcagaacgtgcaggtttgttacataggtatacatgtggcatggtggtttgctgcacccatcaacct

SEQ ID NO: 248492 - DNA, 419 bp, Homo sapiens
accagttctccatttattttctcagaaaatcaatcagctattgaacaactatttttcacaaaacacaattcaagctactattttgctttaaccccatactagtttcttgtggctactgtcacaactatcacaaattttgtggttaaaataacataaacttattctttcacagttctaaaggccagatacctgaaattagtatcacttggctgaatcaaggtgttgtgaggactgtgctgcttctggaagctctgagagagaatctacaccttgcctttttgagctgttagtggctgccttcattccttggcttgtggcctcatcactctaacctctgttttcatatcacccctttctctgtgtgagaaaagtctccatctgtgtctttataaagacacatatgattgcatttggatcca

SEQ ID NO: 248493 - DNA, 710 bp, Homo sapiens
cggtggtgtgcactttcatgaggagattcgtaatgtctgcttgtcttcctttggcccattggaacttatttaggtttgttaccaagtcgttttgacacaatgctgctaaactttgatagcttctatgctttgtggtatgataaggtgctcctgatttatcatatacatttcctgccccaaacatagaatcaactatttctccaaggagctctgtgggtgctaggggtggggtaagtaaacttaatggcttgttctatttgtagtctgagttaagtatagcctacatttatttcaagtaaggagagaaaactcctttgtttccattgtaactatcgaggatatgttccgatctgatcagtttaggagatctctaccacttttgagttgaactgatgaaatacctagcactgagtaaacgtatagatacactatcagttctagtgctgttgttaaattgaacctaagagaaagggttgctattaatatattcaatttttttttctttgtggcataacctgtttttgtttctactttatatttatggaaataatactgggggatgtattttttggcagtactttatgagccaagagaattaatgattgataatttctgttcttcaaagattgtataagatcaccagcagtaaaaattttcttttctaacagcaatactacccactctcagtaaccagatctttttgacactag

SEQ ID NO: 248494 - DNA, 630 bp, Homo sapiens
gagaaaaattgtcttggaccacatataaaatattctaacgctaatggtagctgatgaaacttttaaaaaatctcatcatgttttaagaagtttacgaatttgtgctgagccgcattcaaagccgtcctgggcctaagtccttgctatttttcctcttcaatttccttcaatccatagttctctaggttattttcccaccctttcccaagattcggatatcccttcattcttgctgagttcatctcctatgcctattcctacatacttgctgagttcatcttctaatgtcctcatcctggtttcttcctgaacctgaaatccagctaaccttactttttcatcccatcaaacccctgctgttgccagcccagcactcacgaagatctttacatacaccaaatattaaattagggccggtacctagacattgtctctgcactctgctggcatattttcccctggaccacgaacccttcgtacctagtaacttgccacctgtgtttataaataccagcaatttgatttacagggtgaatttgtcactattgtttacttttaaatgaagttactgtatttgttgtttccattaaaggcgacattataaagcctaggcctcatatccaaagcaaa

SEQ ID NO: 248495 - DNA, 430 bp, Homo sapiens
atagaataatatcttcaaagacagtctttttttaaaaaaggacatattgttccccttaggtagatactggcattttattgaaatatagttcaagagacatgcattcaggcaagatgagtgcacaccgtgctacctacttggaacccaaactcagaacagtagaattgaatcttccttggaagactcaggaggaagatcatctctctgtgcctcagggtcctcatgatgaacctattggtaattatactgtaaacatgagggtgtgcggattagtagcgatttcttatcactgaatcattagtgagcaaactatttattttgaggtggtgtcctcaatactaatatgattgtgcttcaatatagaacaaggaatatccctggatgttatagtccttctgaaaaagagtcattgattgcagatattgtttta

SEQ ID NO: 248496 - DNA, 620 bp, Homo sapiens
ctttctcagggagtggggctttaaagttcgtttgtttgtcactccaattttagctgtgcactgcacctttctttgcacccctactctcttcatcttgtctcatagccacagctattgaatttggcctgtgatcataagttgggtttctgatctgatctcttgcattctggtgggtactgggggcagaatcagctttgttaatgattttctgggcagaaggtaaattcagctgcatctgaaggggcttcacagtccaatagccgtccttttgttttacataacagagagtgatggtcaaggccacccacatctttagtggtagagccaggacaaaaagtcaggttttctgcctcttaagtctcatgctgcctcacatagcacctccagagctctagggaaaggaggctcagagagatgaagtgacttgtctgaagtcctgtggctagtggcagagaagttggaattagacctgcattggacctcaattcgctgagcagttgcagggaaatctggaaatccttttttttttttttttgagacagagtcttactctgtcccccaggctggagtgcaatggcgtgatctcagctcactgcaacaccgcctcccgggttcaagcg

SEQ ID NO: 248497 - DNA, 368 bp, Homo sapiens
tataagagttggttattgcaagattgcagaaaatgctttaaaaatgcctagtgtgactaactcgtgagctcaggggatggaggagagactttagcaaaagaaagcaaagtatgaatttattaggaaatgaaatatcaagttaaagaaagttatggaaacaataaaattccctccatgaataagctcttgattaaaagatgtccttaaaactaattttaaaacatttattccaggtgccggtttttatattagtaatacagaattcaaaagcagtaacaggtgctgtttagattatgattctttcatcatttttcatcttatatgctttggggctttcatagcagaaatctttttcatcaagttgcaaa

SEQ ID NO: 248498 - DNA, 397 bp, Homo sapiens
tttttttttgagatggagtttcattcttgttgcccaggctggagtgcaatggcatgatcttggctcactgcaacctctgcctcctgggctcaagcgattctcctgtctcagcctcccaaatagctgggactatagacacacaccaccacacctggctaattctgtatttttggtagaaacgaggtttcaccatgttgtccaggctggtctcaaactcctgacctcaggtgatccacccaccttggcctcccaaagtgttgagattacaggcatgagccacagcgcctagctctcagcagaattttaaaagatttatcttccatctctgctgctctcttatttcctaaccattgaatgtgagatctacactggaatatatctgacaacttccaccagc

SEQ ID NO: 248499 - DNA, 467 bp, Homo sapiens
caggtctggagtttagttaataataatgtaacaatgttggtttcttaattttgacagtgtaccactataatatggtaacatgagggaaaactgaactgggtgagaggtatgtgggaacactgtgtactatctttgcagcttttctgtaaatctaaaattactccacataaaaagtttgttttggctgggcacagtggctcacgcctgtaatcccagcactttaggaagctgaggtgggcggatcacgcggtcaagagatcgagaccagactggccaacatggtgaaaccctgtctctactaaaaatacaaaaattagctgggtgtggtggtgtgcgcctgtaatcccagctacttgggagtctgaggtgggagaatcgctcgcttgaatccgggatgtggaggttatagtgagctgagattgtgccactgcactccagcctggcgacagagtgtgactctgtcttaa

SEQ ID NO: 248500 - DNA, 399 bp, Homo sapiens
cttcctcctggaactctaatccctctcattccctgaatttgtccagcactaaaactaaggaatggtggggatcctgtcttaattcttctctgttttcactatttgggagggagagtgtctgctgaagtaaccttctacctcccagttagttactagacttcatttaggataactacttggatgcttatctatcttagtttaatcttgttttttgactggcagaggggcagtcctaggtaagtgggataagccctctttgggggaggtcaggagattgattctggtgaagtctgttaacctttgtggacctaagttcttcctgtttacagtgagaacgttgacctacagcagtttgtttaagcaacatgaccctttttcaaatgaaatcttatatacaaa

SEQ ID NO: 248501 - DNA, 361 bp, Homo sapiens
aaacatcacactaaataatgttgagctaatatttttaagaaaacctatcacatagtaaacttttaataactgtacagtttggttttttttcccaatcttcctttgctcccaaacttactagccatgccttgttacacaataagtagaaaaaagaaagttatagaaacagatcaatttaaaaaaaaaaaaaaaactctcacaaagatgtggagaaaagatataaactccaaaatcaaaacaaagtagcctcttaagattatccaagccggccgcagtagctgagattacaggcatgtaccaccatgcccggcccacagagttttctcttaaataaatttaagttttaaaaagaagtccattt

SEQ ID NO: 248502 - DNA, 977 bp, Homo sapiens
gctttagagtcttgcaatggactttccagcatatagaggtaagtgaccacccaaacaacctttcaaaaatgaaccaacaggccagccacagtggctcacacctgtaattccagcgctttgggaagctgagacggatggatcacttgaggtcaggattttgagactagcctagcctaacatggcgaaaccccatctttactaaaaatacaaaaattagtcaggtatggtggcgtacacccgtaattccagctactcaggaggctgaggcatgagaatagcttgaactcgggaggctgaggcatgagaatagcttgaactcgggaggtggaagttgcagtgggaagatcttggtcgatgaagtccgctccccaggtcaagccatctcctggtcagctcccgagataactgggacgtacagggcaacactgacagaccacgccaaggcataaaaagaagtaatagtacagtagagaatggagaacaaccgagataagccaggaatagggtccacgaaaaatcctcaacgtaggaagctggcacgccatagagaacgacaacaaagaggctggagacacagcgattgaagacaactgacaccagacaaaaacctgaaaatacaacatgaacagagactcaacaatgagacacaaaaaaaaaaaatagaaaacaacagaagcaagaattacgaggacaaagacaaaaaaaacagacagtaaaccacgacacaaaggaacacaaaacacgggacaaagaaagacagaaccacaccagaaagccaggaaacaagtaagccgaaaagatgacaaagaaacagcaaaagagaaacagacaaagagcagaagacaaaaaacccacaaagcaaaacaagtcagaaagcagcaaaagggaacacacaacaaacaaagagcaacaacagacaaaaaaacaacagacaagaaaaaaaaaagaaagcaagtaagtacaccagataactaggc

SEQ ID NO: 248503 - DNA, 736 bp, Homo sapiens
gctttagagtcttgcaatggactttccagcatatagaggtaagtgaccacccaaacaacctttcaaaaatgaaccaacaggccagccacagtggctcacacctgtaattccagcgctttgggaagctgagacggatggatcacttgaggtcaggattttgagactagcctagcctaacatggcgaaaccccatctttactaaaaatacaaaaattagtcaggtatggtggcgtacacccgtaattccagctactcaggaggctgaggcatgagaatagcttgaactcgggaggctgaggcatgagaatagcttgaactcgggaggtggaagttgcagtgagcaacacggcactccagcctgggtgacagagtgagactctgtcttacaaaaataaaataaaaataaaccagcaagtcacattaaggaaaagagggataagaacagtagactggtacagtggctcatgcctgtatttccagcattttggaaggctgagggctggagaattgcttgaggccaggagtttgagaccagcctgggcaacatatcaagaccccatctctataaacaaattgaaaaattagctaggcatggtggtggtgcacaccggtaatcccagctactcaggaagatgaggcaggaggattgattgagcccaggagtttgagattatagcgagctatgatcatgccactccactctagcctggacagcggagcgagacttgatctctta

SEQ ID NO: 248504 - DNA, 517 bp, Homo sapiens
ctttcccccactgaatgttgtgtttgtcagaaactgaaatcatggatcagagccaagtttgtagtacccttaggaggggcctctgccctcctgtgtgctgcctgggtgaggacagaaccccctaacctgaaatcatggatcagagccaagtttgtagtacccttaggaggggcctctgccctcctgtgtgctgcctgggtgaggacagaaccccctaacctggagctccacttgagtgggcccatacctgtactttcctctgaaaaaagaaaatcctgcaaagaaaatagaagacatctgttctgccattgccatgcccttgttctagcccagacatgagaactgtcagaattggagttactaaatagaacttttagtctttttctgataatgtgtagtaaagtgtattacaacttatagaattctatttagggaactacaggtcagaaactaccatattggtagcagtcaatttttctttgccatcggatgtggaataaaatgttaaattgtacac

SEQ ID NO: 248505 - DNA, 423 bp, Homo sapiens
ttctttgacccaatgattatttgagtgtattgtttaattttcacatatgtgcatatttgtgaattttccagttttccttctgctattgattcctggttttattccattgtggtcaggaaagatacttggtatgatttcagtcttcttaaatttgttaagacttgttttgtgacctaacttgtgacctatcctgtagaaagttctgtgtgtgcttgggaagatcgtgtattccgctgctgttgagtagaatgttctgtatatttctgttagttgttataacagaaatatacagaattataaagttgtttaagactcctatttccttactgatcttctttctgaaagttccatccattactgaatgtgagttaagtctcctactgttactatattgctgtctatctctcccttcagttgtcaatg

SEQ ID NO: 248506 - DNA, 363 bp, Homo sapiens
agagttatagtcaaagttcaggaaattgagagctccatccagataggaatccggaaaacctgtggcattcttaaaggagatgtatagaaatcttttttgagccccacatttggaatatcacttttgcatataatttgtcccacaataaggagaaaatcacgaatgccccagtgtggttactgagcacatgactaggctgtcaccagctaagtgacttgttcacccatgccaaccttcacagcacaggcggttcaaaattgcctctgacacagttgctgtctgtagtagatcttcagggtcactggcaaataggaccctgtatattaaatagatgaatgagcaagaaatcctgtattttaagtg

SEQ ID NO: 248507 - DNA, 310 bp, Homo sapiens
accaatgctattttagttgctgctctggcctgcaatgaagctcagacaacatgaaaccctgcgtttttatttcaaagacataacagaaactctttgggtgctcagcattagagtttgtcttttcactcttggttatatttgtcattctcaattatattactcctttgccccaaggatagagatttcggttagttcgactagttatcctcagcctccactgaggcttatattcaactaaatgcctgtaacagaatgctcaaactataatggaataaatgaggtagggatgtatttttctgccctgttggaa

SEQ ID NO: 248508 - DNA, 547 bp, Homo sapiens
gaattgtgtagattttagtagttggaagaagttggagtgttaatgtgtaattagagaacagtgagaaataaaattctacagattgttttattctggtgtgctgttgtgttctcatatggttgtctttttggtcttgatagtgtatcagtaacagagtacgagtaacaaacagggatctcttctgaacggcgtgacattagaaaagctgtttacggcctcaactttgctgtggtttattaagacacagatatgtgttcattctggggccaagcagtaactggagagtggcacttattgaggccagtatggaggcagtacagagattattgagattaaaagaaagaaacaggtggaacggatctatgtaatggaaagctaaacagaatagttcgtggtacacagtagaaaagcattacatgtttattaagatatggtcatcttccatttattaaagttacatgttttataatttttagagtatatagaaattctctaccctatcatgtttgccaaagtcagaacaataacttcatttattaaatataaa

SEQ ID NO: 248509 - DNA, 624 bp, Homo sapiens
aaagccagacgattcttggaagatgaagcagtctaagcaagcaagaagataagagaaaggttatatcatgttctggttgctaaaaggagggagtggttagagatcagccacaaaggaggacagtgccctgataggaagttttgttctctgtgttaaggtttttggattttgtgctaagactaaagataaaccattcaaaaccagttttaagtatgatctgtaaactttgatctgaatcagaatcatctggtagagatattaaaaatacagctttggctgggtgtgatggctcccactggtgatcacagcatgttgggagatcaaggcaggaggattgcttgatgccaggagttcaagaccagcttgggtaacatggtgggacaccatctctacaaagtaaaaataaaaataaagtaaaaattagccagactttggactgcaggaagactaaagaaaaagaaattgtccagacttagtggcatgtgcctgtagctgtagccacttgggaggcttaggcaggaggattgcttgagcctgggagtttgaggctgcagtgagctgtgatcatgccattgcactatagcctatgcaacagagagagaccctgtctcttaaaaaaaaaaa

SEQ ID NO: 248510 - DNA, 575 bp, Homo sapiens
agagtcgtccatgttaatggagcagagtgctgagttgggagatgacatcaactggtcctgcgctttctgggtgacacacaaagtgcttctttgaactggggttctgtagaaaatagtttggaaagcaatgtgtaatattaatttttttctttcctgagaatgttacatggagtgaaattcaaaagtttcctgatgtctagataacttcctatctgtccacgtggtcttgtaagacccttgcatgagcctgtcccatttgtgctttataaatgcatgctggggctggggcgacgttacttatacctgtagtcccaacactttcggaggccaaagcaggaggattgcttgaagccaggaattcgctagccacctggatggcataacaagaccctgtctctacaaaaaaaaaaaaaaaattagctgggcatggtggttgtgttccttcagtcctagctactcaggaggctgagttgggagaattgcttgagcctaggagtttgaggctgcagagagctctggttgcgccactgtacaccagagcctgggcaacagagtgacaccctgtctcaaaagta

SEQ ID NO: 248511 - DNA, 309 bp, Homo sapiens
gtatttttttctctcgtgtttaaaaaatcagtcttgcaaggtgctttcttgcttcttagtcttcaaagaaggaaatttcggttttcttaagcgttccattattctgcacctgctgaatgtaaagtttatacacagaaatgtaagtgtgagtatcacttatcatcagagaaatgtgaattaaagccacgaggccgagtgcagtggttcgcacctgtaatcccagcactttggaaagctgaggcagtcagatcacatgagctcaggagttcgagaccagcctgggcaacatggcaaaatcccatctctaca

SEQ ID NO: 248512 - DNA, 373 bp, Homo sapiens
ccccgccccgctgcggctgattcgtctagttaaaccctggtgttcctgacacaaacttcaggaaaggattttgcacttgtgcagaccgggcgagcagagtaagaagcaggtcccgcataccaacaaaactaaggacgccaacttgtctggaaggcccaataaaaagctgattcatggaggaatgcaattgtcacatcctaatgatttcatctcccttaccccaacgaatcgataaccccaaattttccagcccctcaccctccacaaatccccttaaaaaactttgcctagaaccccttgatgaaatggattgaagcttgagaactcttcctgtttcctggcttgtaacttgtgattattaaaactttctctg

SEQ ID NO: 248513 - DNA, 337 bp, Homo sapiens
aattttttcctgagtattttctatctgcagttggttaaaaccagagatgcggagcgcatggatacggagggctgactgcgcttggaacatttctgtcaccatgtgaacaagcctgctctagccaggtggatgctgtgaaacacgtggcccagtcctctccaacatcccagtcaacagccggcactgccagagacatggcaatccagctctctgcagctgcctatagattcacacgcaagcccagtcaagaccaatagaatggcccagttgagccctgttcaaactgtaacccatagaactgtgaccaaaataaatggtagtcattttaagccattaa

SEQ ID NO: 248514 - DNA, 416 bp, Homo sapiens
ccccgccccgctgcggctgattcgtctagttaaaccctggtgttcctgacacaaacttcaggaaaggattttgcacttgtgcagaccgggcgagcagagtaagaagcagttggttaaaaccagagatgcggagcgcatggatacggagggctgactgcgcttggaacatttctgtcaccatgtgaacaagcctgctctagccaggtggatgctgtgaaacacgtggcccagtcctctccaacatcccagtcaacagccggcactgccagagacatggcaatccagctctctgcagctgcctatagattcacacgcaagcccagtcaagaccaatagaatggcccagttgagccctgttcaaactgtaacccatagaactgtgaccaaaataaatggtagtcattttaagccattaa

SEQ ID NO: 248515 - DNA, 318 bp, Homo sapiens
gcagggagggaattttgtggtggtctaggtgggtggaaaggaaggagggaacaagctgagtctccgagaggtccctgttgtggaactggatctatggccagtaatcctgccacacttacataccagagacccctgactgccacctagacctgctgtgagagagcagacctaccggcaaatagatcaggacccaaatcgcggccctaccactcactacccaagtacctgaggcaaagctacttgactgctctgagcaaccatttccttctgtattacatgagattgtcattggagttaaatgagtgtgttgcacacaga

SEQ ID NO: 248516 - DNA, 497 bp, Homo sapiens
gaggaagaaactgaggcacatttagcatatgcaaagatcacatggtgagagaggaaaagtgggagagcgtggggagaggtgccaggctctttttaataatcaactgtcatgggaactaatagagtaagaacttactcattaccacaaggatggcatcaagctattcttgaaggacacagattaagtagagagttaatttaagccaaaggtgaggactgcagcctggaaatcagattctagttgccctcaatatatgctctgattaacagcagttacaagtggtctttttcctttttttttaggaaaaaaaaggagggagcagtccctaagttgtttaccaagaatttaaaaaataacagtctatcaattggctgtacattgttctttctatcacaaattccaggaacatgaagatactgggtgagggtcacattgtgcaatgtgtggtaacattttaggtaatttatcagctagtctgaaaccacagggaaggaatg

SEQ ID NO: 248517 - DNA, 447 bp, Homo sapiens
  misc_feature (182)..(182): n is a, c, g, or t
ggtcaatccaaatgcactttgaattaattttcagctagtctttatcaactgtaaaatatactttgctttcaattaaattttaaaattactagaaacttcatggttctttagtagaattaagctaataattttctgatcaacaaaattgctgggattacaggcgtgagccaccgcgcctggcncgtctcttgtttaatctgtaggttacttccctaactttctttgttccttgcaagtcattagttggagaaactgggttattctgtagtttcccatagtctgtatcttgccaattatatcctgtgagatagtttattgtgttcctttgttctttgtgtttccagaaaattggtagtgtgtatttattttaatataaaaatgagattgtactgtacatgctattttgtattcttttcttcacttaataaaatttgtacaatcttgtca

SEQ ID NO: 248518 - DNA, 388 bp, Homo sapiens
cacagctaacatacgtggtgcttttcatgcttataaaagtgactgctttcctggaagggcaaggaatgtcatggaagatagcactaacagagtcatacagaacaggtgcacatcagctgtatgaaggcaagtggccttctaggcacacctgtaaaaacagctggagcaaaggacacagcacaccatcttgttttttaagctatgcctcccattagtggatctttccatgatatgtaaaatatcagagtgcactgtacataataagggtcaacattgttctggaaaatgtagagtgtatgtgaatagtatatgtaagtatgtaaacatatgcacattggatcatgacataaaatatgtctctaaagtgtggattgttgaaaaaaaaaaa

SEQ ID NO: 248519 - DNA, 271 bp, Homo sapiens
gagacgccatctcaaaaataaaaaaataaaaaataaaaattgtgagatttcacatgaaaattggagtttccatcttctcttgaaaaagcagcctatggggccacaccctgaggctggggctgtgaggtggctgccatggagtgggcctgtgctgcccgggctgtcacctgtctctcgctggggacccttcagtgccgggcagcagcattgccatctgtgggtttgcacgtgggggttgtttttcagagaaaattttcttctgcactcaggc

SEQ ID NO: 248520 - DNA, 460 bp, Homo sapiens
gaatagttagttgatctcggtatttggcctgagcattctgacttccacattgacaggtgcttcctggacctctggaatggagaagagtcggcgcgaactggcccaggtctggctgcgtcctggtgcaccccctgtgcctccccactgcacacctggccatccagggcctgctggctgctgcagcgctcactagagtgccctgtgattcttcagggcagagtctggcagctgcacagagcatgctagccccttttgagcttcgtgctgtgtcctggtgacacgtttccctggggtcagccctcctgtgcggtgaggcgtcttgtgggatgagctccatggcctggtggagtccctgttgccgcactttgtctgcagccccttcctggttggctgacttgacagaaatatctggactccggtgatcacttggaaggacagattgtgttgtatcaacataacc

SEQ ID NO: 248521 - DNA, 94 bp, Homo sapiens
ttttttttttcttggttcacagcagtcaaaagaaccacaaaggagcagtagtttctaagcttccatgtaggtgaagacaaaaatttttataaat

SEQ ID NO: 248522 - DNA, 469 bp, Homo sapiens
atggcaccctccttctcactgaagaatgagggagagcagtaggtcccctctgctaatgctggacaaagcaattagtgcatttcttatgactagttaattagctttttatccagctttttaaactctggccacaactctatggcctcgaagtagagtgtgagtcatccaggaagcaagtttctctactgtgtgcctgatgctcctgagtattattcgcacagtgatgtgtctgtggctgcctccatatgcccccacttagatggatgcttgtacagacgtttccaaggatatcatctgctggctcttttgttgtttctaatcaaagaaccgacaccctttgatcacaacagatcacggtattgtactacaaagactttgttagaaagacttaaattttacacgcttgtagctgtcacagaggttctgacagtatttacttttaccccacacagtagcgaaaaaatgcatt

SEQ ID NO: 248523 - DNA, 404 bp, Homo sapiens
gatttcttgatgtagcctgccatctgcccttgttttaagggttccccttccttgaggcatttgcattttaaaaggaatcaaagcctgcaggtgaagggatgatgctggattggtagaatttcaggcattcattgaaaatggatcaagggttttcttttatgttggctccttccctaggttcttgacttcggcgccagccacgaaaccacagaaagcatcccccaggaccttggcgttggactcctttcattcccttcctcccaaagtgtcccactgttgctctgacttgggggagcaggggtctccctggccctcccggctgctcccggctcaggagcgtgggaggtgaggggaggtgaggggacacggccgggggcggctcggtaggggccccgcgcggccgc

SEQ ID NO: 248524 - DNA, 387 bp, Homo sapiens
ctgagttttagtcctagagaggctgccaagccaccaagcagctgtgggcttcttgcccagggtgctacttcacacacaggtgattctgcatgggctgtgttagggtccagcagcagagagattaaggagggctcacgattcttaggagcgatcagctcatatctaataggctattttgaagaggaaaatggaaaaagcaatgccgcacagagtacttttgggccaaatacctttgaatggcagtgtagggctgtccagagatggcgtaccctttcatttctctgatgtggtgtccttcaagaatacaaaactattgctgtttctttctgaaagaatacccaagaaataacaagtaaaaaaataaaaatataatgacttgttcacata

SEQ ID NO: 248525 - DNA, 499 bp, Homo sapiens
ttttttataattcagatttttcatgttacaacatatttttaatacattaaattgtaagtatcaaactgaagaaatggagtgtgttgtgtgtatgtatatattttccttctccaaagtagtaacataagtaagcatattttaatggagagcctactggaatgagagtctgagatcctaggtttaaatcccagttctgttacgttgtagtattaggcaagtccctgggccttaagttctctgtaaaattagggtattgaacttaatgattgtatggtcacatctcctctaatgtgccataaatgtgattgcactgtcctgttaactcgtgcattgggtatcccctaccactcatgagcatcatctttagagggcctatagcgctctaaatggtccttgccatttctggaggtcgggattacttgatatgtgtgccaactgtaccagggttgtctattccagattttgacagtttttacttttttgtcccttctgtatactc

SEQ ID NO: 248526 - DNA, 590 bp, Homo sapiens
ttttactcttaaaaggtaatcaaaatgtcacctatgtcttattcttaccaaaatgtttaaatgtaacctgaatccattcatgagaaatcaaacaagtccaaactgtaggatattctataaaacaactggccatggaagggaaaaaaaaggggatatgggcaaaggaacggttatagatcaaaggagactaaagagacttgacaactaaatgcagggagtaacaggattctgccctgagttgaaaatgaaggacgctgagacaaatgtggagatataaatatgcaccatattagatattattgtggcagtggaatttctctaatgtgatcactgtggttctataggcgaatatcccactttctttggcatgtatctcctaagtacttagcggtaaagtatcattcaggatatctgcaacttcttttcaacacagaaaaaagagaaagcaaatatataacagcaaaatagtaacaattagtgaatctaggtcaaaagtttaagtgttcataatactattctttcaactctgtatttcaaaataaagttcaaaggaaaaaagcaatagcaataaagcctagtttaaaaaaaaa

SEQ ID NO: 248527 - DNA, 486 bp, Homo sapiens
gcggcccatgttacatatggccagggttatcattgggattcaaaggggatatgggcaaaggaacggttatagatcaaaggagactaaagagacttgacaactaaatgcagggagtaacaggattctgccctgagttgaaaatgaaggacgctgagacaaatgtggagatataaatatgcaccatattagatattattgtggcagtggaatttctctaatgtgatcactgtggttctataggcgaatatcccactttctttggcatgtatctcctaagtacttagcggtaaagtatcattcaggatatctgcaacttcttttcaacacagaaaaaagagaaagcaaatatataacagcaaaatagtaacaattagtgaatctaggtcaaaagtttaagtgttcataatactattctttcaactctgtatttcaaaataaagttcaaaggaaaaaagcaatagcaataaagcctagtttaaaaaaaaa

SEQ ID NO: 248528 - DNA, 493 bp, Homo sapiens
agagatctcagtttttttacattcctagattattctaaattctatggaaattaagtttcatcacactaagacaggaagaagaagaatattaaccttccaggtgacaatcctaaagggaaatatttattatttttcattgtacttggagatttcattaaatgattctttgttaagtcaaaattttgttcatgaatatcagcctttagagacataatcgctcatctagttaacatgtcagaaaagatcaacccattagtggattcattctgtaaatacttaggactgcaaatgggaaggggaaaaattgagtccagaaagttaaggccaaaatgattttgagtttaacgatccagttcatgttctcaatgtgctctatgagaataggctttgtaaccttctttagctgatgcagattaattgaagctcaaaaaacaaaacaaaagaaaaccctgcactacttaacaatgcaaagctgtgcaaggatggaagattc

SEQ ID NO: 248529 - DNA, 396 bp, Homo sapiens
cttctgcagagggagggcatagttgtttggtgagtgacagtcctgaaatggctcctgaacattattttcttcctgggagaggctgatggagaactgtcctctcctcttgagtgataactttctccaagccacatagttcaagaggtagctacactgtgcagcagtagcctggagcaggagcatcaggatgaccccagggatacctagatgagttcttgggctgttgcttatgctcatcctaagagttacctgagttaccgttccacaactttttattacataaacagggacttaatgtaccagcagcatgggcattataggaaaaaaaaaccatacagctctcattcataaggaacttatagccaaatggggcaacaaaaataactacttgtggac

SEQ ID NO: 248530 - DNA, 196 bp, Homo sapiens
gttcaggtattttcagctgattcattccatatatgttttcttctgaaacagttattcgtcattttagcttctattggttgttatcttaggcccattaattcattgggttccaaatgaatttgtctgtatgttagtgtcccatgaaacaattcttttctccgatgttttataacttaattaaaatgccagatcttga

SEQ ID NO: 248531 - DNA, 370 bp, Homo sapiens
ggtcatgttggtcctgacgtcacgttgagtctagtgccatgggggatagagtacaactgtggtgggaaccccctgttggatatagcaccatattagtggtggcaccatgttggaggaacaccatgttggctagagcaccacgttggcaggggtgacaagttggaagggggatgttagtcggctattactgaatgctccacaggctctctaatggcagctccagggaatctaggacgagctgcccactctggcacttctgacaccaccgccaaaactgtggacctttattgcatacaccatcctctgaagttcaaccctaaaagagagtatgactagagcctctgacttcttttctcctccttcttccaaa

SEQ ID NO: 248532 - DNA, 368 bp, Homo sapiens
caagctaccagagctgactggctttgttctgattgcttctttctgctttgagatctttttgagaaaaggcaggaatgcagatggaataggtagagtcttacggtgcttggctttctgctgctagttactcacctaacttcttttccaaatcttaacccatttcccatgctatagattgttccacagttaaaaagaaagaggggtctgcttgcctcaagcagctgggttaggttcatgactacaggttaagatacagcactgttatgattagtagttgcattgttcattgaacaatattctctatttgcttttctgtccactggtaaagaatgtcttgttagaatcctctagtagtggttcagattgcc

SEQ ID NO: 248533 - DNA, 529 bp, Homo sapiens
agaaaccaggctgcagcctgggctcagcctcttatccattgtggggctaaggaagagtccctgtcccccagtattctccaatcccatctgatgttaaaacctcttaatgaccctgatctaagcatttccagaaaaaggttctcagggcctttctgggggtggcgggggcaatcctttgtgacagcatgaaaagccggatggggctggcctggttgcaatggcacacgctaggttccaggcactccacacgtttctcatgataacctcgtggttgatactcacacagatgaggagctgaaaggctgcaggagctgcccaccatcctcacacagcgtggaagtggtagcaccaagactgaggcccaggaggggggtccaaagggccatcctgcattttccattgcagcagggtgggaaggagagggagatagagactttacctctactctaaatcacctccttaggttgccatattttccttacttcaatgaattatgtggaacaaaatacactcaattggtagcagaaat

SEQ ID NO: 248534 - DNA, 728 bp, Homo sapiens
agaacacatgccaataaatatcaatgttttcccttgtcctagtttatatatcatgacttactacaacacaatgaaatgggcacaagacgctactatctctattggtaactgtattcgtccgttttcacactgctgtaaagaactacctgacattgggtaatttgtgaagaaaagaggtttaattgacttacagttccacaggctgtacaggaagcatggctgggaggcctcaggaaacttacaatcacagcagaaggcaaaggggaagcaagcatgtgttaccatggaggagcaagagagagagagcaaagggtgaagtgctacacacttttaaacaaccagatcttgtaagaactcactcactatcacaagaacagcaagggggaaatccgcccccatgatccaaacacttcccaccacgtccctccccaacactgggtattacaatttgacatgagatttgggtggggacccagagccaaaccatatcactaagtctctatgccttgaaaattttcctctttttttgtttatatatatttgaaaactcatctggactaaaagttaattatttgacaaccaaaaattaattcccaactcatgaagccaaaattctcattttttaataaagttcaacttattggtttttctctcatagattgtgctttgggggttgtactaaaaactgagaaccaaatccaaggtcacctggattgcctcctatgctt

SEQ ID NO: 248535 - DNA, 461 bp, Homo sapiens
agaagaaacattctaagcgcatcaagaattctggccgactccccacagccccgggttcccatggcaaccgcctggcgcttgatggttacatctttcagcacaagcgtggaaagatttgtgtattcggctattttgtcatccgcatatgatagcacaggacatgctctgcactgtaaactctcagaccttcccgatatttgtaactttggctgctgccactggccccggctccaaaccttcagtgtcctgtattttgacatttctttgtgtccgtctctacccacttcattctcccactcctacccctttacacacaccacatcagagcttttttgtggggactgagtaaaagacctttaggaaatttcaggtatcgattccttctatgcatgcagagtagatatgaacagcaaaaataaaaaataaaaaaattgaagcagaaatagtctgcctgaaaaaaa

SEQ ID NO: 248536 - DNA, 451 bp, Homo sapiens
ctaagcatcctaagatgcaggacaatgtgcttttcccagctctgaactcccttggcctggcaaagagttgcacaaagtcaggaagccgctctgaggaagttctatactgacttctcaaaaataatgaggtaagcagaatgagctttgaggaatgggcctggcaacttgtttgaactgcaggtaacatctgaaaagcagtgttaagatcatgaacggtttagacttttgcgtaagataatggcgttatatcccagctctgtggttataggccaagtaactttagtaaaacttactttagtaaaacttacttgtttgtaaaaggcttaacttagaataggtgcccattaaggttagttgtctttctttccttagttctttttcaaattctcatctgtgtcctaaaaatttaatctgatataataatgagtatagttgtgacacactatttcct

SEQ ID NO: 248537 - DNA, 397 bp, Homo sapiens
tttgatctcactaacagggctgcttacaagctctagtcttcctggatgttttatggcaaagaaatcttgttatctttaaattccaaaacatcttcttttttgtttaatatactttgtttttcagagcagttttagatttacagcaaaattgaatggaaattacagtttctatatgcccctcaccccacacatgcactacctccctcatcatcaacataccccaccagaggggtacatttgttacaatcaatgaacatgtgtccaatactgacacacttttactacccagtctgcaatttatattaaggttcactcttgctatcacacattcaatacatttacacaaatgaaaaatgacatgtatccaccattatagtatcatatagagtagtttcgc

SEQ ID NO: 248538 - DNA, 594 bp, Homo sapiens
ggatgattaaatcaaatttgatattgctaaaatccactacatttgtcctaagctattatttaataaaacacagatggctttaaaaaattaagttgtcataacaatacataatttgagattcagatatgttcagatttaagtcaaattgacataaatgaaaataaaattctaccaactaaaatatacaaaaagttactgaaaaagtagtattacaagatgcagaaatgtacacttcaaaatatacttcaaatacacttcagttcctctggaaaatttagaattaactgtcaaagtaaattgttgaatcaatttcaaaatactcattgctgatatgggcattcccatttatctgtttcatcgtggtcataaaatgtggccacaaagagatattaaaacctttattggccgggtgcggtggctcacgcctgtaatcccagcactttgggaggccgaggcgggtggatcatgaggtcaggagatcgagaccatcctggctaacaaggtgaaaccccgtctctactaaaaatacaaaaaattagccgggcgcggtggcgggcgcctgtagtcccagctactcgggaggctgaggcagga

SEQ ID NO: 248539 - DNA, 429 bp, Homo sapiens
cttttttttataatttttatttttctgctgagatcccctatctgttcacacattaaagaccatgtgttcctttaagattttgaaaataattctaattctttgaatgtataaaatagctgctttaaaatctttgctgctaaatttaacatctgttctaacatggggttggtgttttactgactcctttttcccccttattggatcacatttttctgtttctttgctgcctactaattatttttgtattaaaaaacaacaacagaggcaaggtcttgttctgtcacccagtctggagtgcagtggtgcagtggtgcagtggtgcagtcatagttcactgctacctcacactgctgggctcaagtggtcctcccacttcagcctcctgaataactgggactacaggtgtgccccactatgctcagctaatta

SEQ ID NO: 248540 - DNA, 603 bp, Homo sapiens
caccctggccttcctccatccccctcgcacccacacattatatagctgtaaaatacctgcaaaaaataggaagttatgagagcaaatagttatctgagttgaatttttgaatctttgtacttgttatggcaacaggttttccttcctaatttcttttctcttggtctaatattaaaatgtttttgcattaccttagcatgcttactggatgggcagtgaagggagaataaagtcaccctggcacatgtgagtgtgaaagaaagctaacttaaaaaaaggaggccgggcacggtggctcatgcctgtaatcccagcactttgtgaggccgaggcgggtggatcacgaggtcaggagttcaagaccagcctggccagcatggtgaaaccccatctctactaaaactacaaagaattagccaggtgtgcggcaggcgcctgtggtcccagctactcgggaggctgaggcagagaattgcttgaacccgggaggcggaggttgcagtgagctaagatcgcaccactttactccagcctgagcgacagagcgagactctgtctcataattaatatagtcgagctggctcgcgaatttagtagtagtat

SEQ ID NO: 248541 - DNA, 515 bp, Homo sapiens
taaaactcacaaataatgatttaatgtgtatttttcagattcagtttgttattcagtacattttatcgccaactctcatcatattcatctcataccagacttaacattttctatgtcctgctaacctcgtataaatttccaaacacatcatgaaaaattttaatgtcagcttaaaaatcttccagaggatacatgggtttcaaagccttttgggagtacacaagcaaaaagtctgaacacccattattcaaaagctgttctggccaacaaaacagtcactagccacaggtgactatttaaatgtaaattagataaaattaaaaattcaattttgcagtcacgctagccacatttcaggtcctcaagagccacctgtggctagtaatgccgtactggacagtgcaaattcagaacacttccatcatcacaataaattctattggacagggctgtcctagggaacctagaatatgcactgtttgccccagtgagttgaagttataagacttttattc

SEQ ID NO: 248542 - DNA, 238 bp, Homo sapiens
aaaaaaaaaaaaaaaaagtcttttttcagttgttttgtttaatcaggttccaagtgagatccatgcactatatttggttggtgtggttcttaagggtcttttaatctataacaattcacagtttttttttaatgccacttatttgttaaagcaattggattagttgtcttgctttctggatttggatgattgtatcttctttatattatttaacatgttccattatcattcattgtct

SEQ ID NO: 248543 - DNA, 526 bp, Homo sapiens
atccagtcttcaaatctgtcagcatgtcacaacctggatcccctgaccacagcacacagtggagttccaggctgagacatgacaggctgatcacaaggagcagccacttcctttttctcaaatcacaagcagacaagcagccagagccgggtgaaggattttttactttggtttggtttttcaaccaagacattctcaaagtttattgttctatgaagtggaaacatttagttttctaacaaacaattagaagcacaggagtagagaacatgaaactgagaacgaagctcaggatacacaaaaataagaggctgggaggcagctgagatcaggaatgtccagggatcctcggccacacaagccggccaggcactctctttccagggtgtctcaaggggaaatcacccatcgatcctgggacacacgagttctaggaccaatcccttacctcagaacagcctcggcctcaaattcctgcttgcgctttaatgtttaaattattaaatgcattaatgtatttacatta

SEQ ID NO: 248544 - DNA, 341 bp, Homo sapiens
cagttcagggtggaggaggagctttgacatgctccagaagctatggagccctgactcaacacgcccaccctcgaggagcaagcctggaaggctgcagaggtggccactggcctggctgactcagccttctttgtaacagcagaacatcccgtgaaagggaactgttaagtacgtgaccctatctccatgtgacaaatccacacagccttgaaagggcggcattccctgacctatccaggtggggtggggggtgagggctgcagatctctatatcattatgtaaaacaatctcaaagacagagttaaattaaacagcaggtgctgagagcgtgctggacact

SEQ ID NO: 248545 - DNA, 754 bp, Homo sapiens
  misc_feature (225)..(225): n is a, c, g, or t
aagggaccaggcagcggggcttgaggagtctcagcgccgccaggctcagagtaggcgtgcctcccctattggtggccacatccggagagcgagctggagacggaaggggagttggtgtcaggggtcgggcggctcagggctccgggagcgagatgaagaggaagaggcagggccggggtcggggcggcgccagcgggaattaaatcgcagaaagtaccaggcacnaggtcggcgctgccggagatcgagcaggtgaacgagcgggtcctgaacaggctccatcaggtgcagaggataactcggaggctgcagcaggaacggaggttcctcatgagagtgctggactcctacggggatgactaccgggccagccagttcaccattgtgctggaggatgagggcagccagggcacggatgcccccaccccaggcaatgcggagaatgagcctccagagaaagagacactgtccccgcccagaaggactcctgcacccccagaacccggcagcccagcccccggtgaggggcccagtgggcggaagaggcggcgagtgccacgggatggacgccgagcaggaaatgcgctgactccagagctggccccggtgcagattaaggttgagcaacactttgtctttcaaacagacaaggccctggatcccagttcggttccaccggcaccagacaaacttgtgccctaatcgacttggaacagagtcagcctctgatcttcgtcatgccccaccatctccc

SEQ ID NO: 248546 - DNA, 410 bp, Homo sapiens
aataatggagagttggcatattactgaattggaagacaaaaaaatattattctacccacatttatgatagattcaatgcattctcaatatcctaacaggttcttaaaaatagaaattgacagggtggttccaatatttatatagaaatcaaaaagaatagtcaaaatattttttaaaatttattaaaatttttatattttttactttttgtttttggaaacaggcgcccactctgtcacccaggttggtacgcagcggtgcaatcatagttcactgcaaccttgaactcttgggctcaagtgatccttctgcctccctgtagagatggggtagagcctcctgagtagctaggattataggtgtgcaccacaccatctggatacttaaatttttttgtttttgtttttgga

SEQ ID NO: 248547 - DNA, 481 bp, Homo sapiens
cgtttcctcacctataaagtggcttgtgtacttgtttcacttatctcacaaagttgttgagaagataaaatatattatgagaaatacttagagtaatgtaaaatacattatgtgattaagaatgtggtaagacctgaaagacttaagagttgactaatttgaagttcatgaaaattctcacaggactttgaaaaaagaaaaaactggctgggtgaggtggctcatgcctataatcccaacacttcgggaggccaggccaggaggaacgtttgagtcatgagtttgagaccagccagggcaacataatgggaccccatttctacaaaaagtttaaaaattagccgagcatggtggcaaatgcctgcagtcccagctactcaggaggcagaggtggggggattacttgagcctgggaagtcaaggctgcagtgagacatgactgcaccactgcacacaagcctgggtaacagagaacctgtct

SEQ ID NO: 248548 - DNA, 404 bp, Homo sapiens
atcataatctttctacttaatagaaaccttgaatggccccttttaaaagtaaggcagtcttactttgcaatagaaattgattgtagtaattcaaggtgaattgcaatcgagtcccaaatacttagctgacacaaacaactcaacagggtaaggcaaggaaaatacagcattctgaaaggtaatccctttggtttgaagattgaagtttccaaggcaataaatgcctataagcataaaaccaagtcttctctcatcatagcctttggcatatagaagtgtccacatgctgaaatctttccaaatgtaatatcacaaaaaacaaaattgcaatggacttgtatagaatagaaatggttcatatcagtgtcagggcttagtaagagcaagaatcaaatcttttgaaa

SEQ ID NO: 248549 - DNA, 974 bp, Homo sapiens
ctgtggggaaacagaaaggttttgactccagtctctgtcttctgaagagctggcagtcacaactgtggcagagcctggtgtgtggcagctgcgtgaggctctcctggactgctgtggaggaaggggccctctggcaccccaggagcagcctgcccctctgtctgcctctgcatttagacccttagcctccttgcagagccacctcctggtcattagcgttaaagctcttctctcctgatgtagttttcctcaccgttcagtaaatgggcctgctgcttgtgtttggaacagagatagaagctgtagctcccacgtgtgtgtggagctggtttgacttttaaaaaattgtagtaccaaaaactatgattttttgtgtgttatccacaccatcaaggctgtatcaccgagtatctgctcattctgaaagtgtccatcctttctgaattgaaatgaaagagcaggagaaaccgtctgtgtccagcctgttagaggtgttacatttgccctaggtgggctgggcagaaggctgttctgctcgggagcaacagtgtccacacgtcagtttccagagcccgggtcgccaggatccggctcagagtgtgagtttgctcaggtgtgtgctgagcacccctgggtgccagactccgggcaggtccccgccgcagccgcgtcagcagagcaatgtgatcgttgctgggactgttcccctagtctcagtcagttcactagggccatgcatgcagtgttcagacaggagattctcatgaaaaatagaattgttatcctaaaattacatgagagggaatgcttataagtttatcaaatagtaaaacatcacaacacaggaccgggtgcggtggtgcacgcctataatcccagctacttgggaagtcaaggcaggcgatcccctgaggccgggggttcagactaggcaacgtagcaaggccctatccctgcaaaaaaaagtaaaaaaa

SEQ ID NO: 248550 - DNA, 1178 bp, Homo sapiens
aaatagctgaacacaaccatcaaggcatttttttcccaaaaagcacagaaggagattcaatcatcaaatgagaggcctcactcacctctgcatattggcccttatcctttgaaagagaataaagtaacagctgctattctttcagccaagaaagggccactggaacaggtccagaaggaaagaaaagagtgatggcaactgctgattcaagaagattgttctgtttcagtttttattttattttagatgtaccccttctccacaatgagtttctcatacacgcatctaatgaaagacgcctgttctcaaccctcctagaatttcaagatgggcaaacttacaaggaaagcaaggatgagtgctaatatgtaccatattcatgtgaatataagtttttttaataagaaaatcaaactctaaaaatacaatatacttcataattacagattgaaaaatggggccgtgtgtcctaggcagctgcccactgctgagtccagggtacactgccatcctaggaagagagtgaggaggagggtgaaaaaactcacccaggaaaggcagtgaggggtggggagggagcacaaagaaagtcacttcaaatctctctctagaactatattgtttttctgtgcaaaaatattttcttctggcccctttatagactagcttataaaaacactgcaaagtgctatgattctaagggttctggaaccgaagacaaatcattaaaagttagattcaaatcgttggtaaagaatgattatgtcacaattttgcatcacagttagtaagccagtgatagcctcggaatgtaatctaagagacagtggcacagtggttaagagttcagactctgacgttagaatacctggattctacttttggctctggtaccatgtggcttctccaagcctcagtttcctcctctgtggaatgtgaaaaatagaagctccctcatagggttttcactggcattaaaggggcttccatatagaaagcacttaaagtagtgttcagcacgtggtaagcattcaacaaatgttaggtgttattattacttattaaacaggtacataataaacaagctgttcacaaagcattatttcacctctaagccttacttctgatgtagaaaatacactaacaatatctacattgcaagattagagaaaacatat

SEQ ID NO: 248551 - DNA, 418 bp, Homo sapiens
aaatagctgaacacaaccatcaaggcatttttttcccaaaaagcacagaaggagattcaatcatcaaatgagaggcctcactcacctctgcatattggcccttatcctttgaaagagaataaagtaacagctgctattctttcagccaagaaagggccactggaacaggtccagaaggaaagaaaagagtgatggcaactgctgattcaagaagattgttctgtttcagtttttattttattttagatgtaccccttctccacaatgagtttctcatacacgcatctaatgaaagacgcctgttctcaaccctcctagaatttcaagatgggcaaacttacaaggaaagcaaggatgagtgctaatatgtaccatattcatgtgaatataagtttttttaataagaaaatcaaactct

SEQ ID NO: 248552 - DNA, 423 bp, Homo sapiens
ggccagttaaccaagttttgttagcattcctaactatccttagctgtatttctcttcagcctggcctcatttctttcaggcccagcccccgggcaggttaagatggttgctgtaattaatcatgccgtgggccctaattcagactcaccacattcaaatttcaatttaaaaaaaaaaaggcggggtgtctacttaagaaatgctccgcttatgaaatgctctttgttgccgaagcagccccctttcagcctaaaggagaaagtctaggaagtgcaggaaagaagaaaggtttccagggccctcttcaaagtacttgcacatatgtgaggggactgaggatgatctgtgctccaaagcccctccagtatttcccaatcagaacaaactgaatttttaaaaatatatattaaataccatcataat

SEQ ID NO: 248553 - DNA, 939 bp, Homo sapiens
cctagtgttggaggtagagcctggcgggaggtgatttgatgatggggcggatttctcatgaatagtttggcaccatcccctcgatactgtcctcaccagagcgagtccgtttgtgagatctgcttgtttaaaagggtgtagcacctacccctccatctcttgctcctgctctgggcctgtgcctgcttcccctttgccttctaacatgattctgagcttcctgaggccactccagaagccgagcagatgccagcatcacgtttcctgtacagcctgcagaaccgtgagccaattaaacctcttttctttacaaattacccagtctcaggtatttctttataacaatgcaagaatggcctaacacaggtgtccaggggcagagggaggctgagtgtcaggtgaatggatgtcctgactcatagaaggaaagatcaggaataggaagaaaagctttcccacaaaactgccacttaccccagaacaactcacccagcatagtcaggtgttaggtctttactgaaggtttggaaggacagagggtgggctcacactgcttgacactgatggcttaaccttgagtattagccattggcctccttgtcttggaagtcctttggccctgccaccaagaactgttccctggctgcctccttcccagctgcagcttcctctggtgttgctagagccttccctcctggaaggtgcttctcctgaattcctcttataatgcagagaattttgactcttcgtccctctgttggacatctaagtaacattaaagggctcagcttcacacacgatcacatatctatttcggcatcttggaagagcgagcagggaatgtagacatcaaggctggttcttcggctctcccaaaggccaaagatatctatttaaatatcatttaaataaacccctttattgcttaaatcatcataa

SEQ ID NO: 248554 - DNA, 439 bp, Homo sapiens
tggagaaaacagctctgtgtctggaatgagccctcctagaattcagtaccataaaactgaagacatgtaaatctgctcatgtaaatcctccactgcatagccttttgtgtggagcatttatccggactgatggcaaaaactactgatatcatatggaaatgccagctcagaagatgtggtgagctttgataattcaggaattgactgacagaaggaggacctcatttgggcagaatggctcccaaaacccagttgtgtctctgggtgtgtaagcccagcagcaggcagtgtgtcatcgctgtgtcagttctatggtgtgatgtgcggaactggtactggaatgtagacatcaaggctggttcttcggctctcccaaaggccaaagatatctatttaaatatcatttaaataaacccctttattgcttaaatcatcataa

SEQ ID NO: 248555 - DNA, 239 bp, Homo sapiens
gacatgccagtagttcacaagcccagattaggtcacagatttaaatctcttctatttatttttctgaagccaatacatggatggatttgggtctgtgtttatttccctgcccacaccgttatggctgacggggcagtgagtaggtggggagggtggagaggtccacaggaggaaggggaaggaagtgaggcccaccctaaatgagtgaatgcaggggcaccttgctgcacccacccttg

SEQ ID NO: 248556 - DNA, 539 bp, Homo sapiens
tgttagaaatttcagaataaatataattcataaaagtatgtgaaatgtaaggctgggcatggtggcttacacctgtaatcccagtactttgggaggccaaggcagacggatcactggagctcaggagtttgagactagcctgggcaacatggggagaccctgtctctactaaaaatacaaaaattagcctggtgtggtggtgcacgccagtagtcccagctacctggggggctgaggcaggaggattgcttgaatccaggaggtctaggctgcagtgagccaagattgtgccactgcactccagcctgggcaacagagcaagaccctgtctcaaaataaaaagtatatgaaattgaaatacgttgtctttttctgaaaggtggtatgaaacctaatgattgttattgaaatgtaagaaaggcccctggcattaatggatatggacacagttttccgtctgtatgttaaaacaaaagttctgctttagcctgattatccaccaagttttgactgtgtgtgtgtgtgtgtgtgtgtgtgtg

SEQ ID NO: 248557 - DNA, 137 bp, Homo sapiens
actaatgcttcagaagaattgtaatattaggtgaggacacagcaagaaggctcccatcagacactgattgctggtcccttgaccttggtcttagcctctggaactatgagaaaataaatttctgttattcataaatt

SEQ ID NO: 248558 - DNA, 252 bp, Homo sapiens
aataaagtcttctggaaggcaggatggtagcatgtgttgagtgtccgccagcgtctgccgctgtggtaaaatgagcggagataaatgaaaagacttctggaatgggcccatgaagataagtccgttttactcatgagcagattgagtttggttaaggtaacagtgatgtggatagcctctggagacagaactagtccaagtaccagctttgctcaggttattgttctgtcgtgccttgtcactccagcaaaa

SEQ ID NO: 248559 - DNA, 447 bp, Homo sapiens
gatatggaaatccagctctgtcatccagccgggagtgtagtggcatgatctcggctcaccgcaacctctcccccctgggttcaagcaattctctgcctcagcctcctgagtagctgagattacagtgagctactatcacatagttgcacgccagcctgggtgacagggtgaaaccctatccaaataataataataataatttgacaaataaagtctcttttaatgtagctggaattgtgtaagaaagtctttcctcagcaaataagaaatggactatgaaatctcccagaatcttttttagcccctaattagctataaatctcctgacagtttagccatgggaggcccaagacatgaattggtggcatggcacatggtctaatgtgcatattgtataaagttatctaaatacatcttgagagagtccacgctttctccattcttttg

SEQ ID NO: 248560 - DNA, 489 bp, Homo sapiens
aaaagctgcccttttgtgtctagaacatggatgtgttcattagggcctcctggcaccccccagaaggttaccaagagccttgaaatttgaccaaagggcctgggatagactagagggggagggtctactctacctagccgtgaaaaaatccagtgaatgatcccattctcccaaaacagtcagcaaacctccctcttatcagaaatactagtgtccaccagatatagtccataagtcattaggagttaggtcaatgaaagctcatgcacagctagtctcatcctaattggacactccagttgtcattcccatgactttggttaatataaatgcaaaaatgaatttttaaaaaatctttcagcccgggcgcagtggctcatgcctgtaatcccagcactttgggaaggcgaggtgggcagatcacttgaggtcaggagttcaagaccagcctggacaacatggtgaaaccctgtctctcctaaaaataca

SEQ ID NO: 248561 - DNA, 361 bp, Homo sapiens
aaattactcatgactttccataatcaagttttagttataacagtgtacttaagctgggctctggggtgagcagtgcccactagcaatctctgcctacttctttgctttccaggatcaggctcctgtgaatggaggaaagaagctaaagccttagggaagaaaaagagatcctatgccaaagccatcagggaatgcagggggaccctcaggtcagcagcaaactggcatttgggcgtttgggcaaattaaaatttccaatgtgcaactacccatttgaatcatttccttaatttttttttttttgcattttatcatcaagactatctggaaataaaagattatggttatcttatctaaatta

SEQ ID NO: 248562 - DNA, 492 bp, Homo sapiens
ccccgcaccccccaaaaaaagccttaattgaagacacagaaaccggttttgaaaataaaagaatcctcagatgttatgtttcagcaattcgttcatcattcttcccttctgtgacccttaatcacgtttggtctttagccctagcagataacacacagtgccactactgagcacagttgctcatgtgtgtgctctttaataggaatttggaagtcatattctgcagaatgttttaattccatactgggtggattgagattattcctgtttgtggatcacccacattgtcagtcctcactgatgacatagatgatgattcaaccaccatttcaatttggaacagcatacagggaacactactgatttcaaatgtaggattataatttctaatttaatttctaattcttgttctctggtcccccttcttctcaacaattttttgctataagtacctgatgatggccttaaactggaaacacactcgatttatta

SEQ ID NO: 248563 - DNA, 840 bp, Homo sapiens
gctcagtttgttttttttttctttgtaaatgggaaataagtgaaagttttaccatttctttcttattaatcttcactattaagagtctttaagttgttactgagtgaatgctcattctggctattttgttaaacctaaccttcaactggttatgtttttctctcctttcttgtctctctctaaaattttcatattaaacaataaagcttctgaaactactcattgtaaatattttcaagctgttcaagtaaagatttcattatctatggggcagatcttgctattgaatcttattccactccataaattatattttattggtttggaagtatatatgttttaagtagttgtgaacgtgttttttcacccaggaagctctggcccagcttggtcagcatgtaaaataattttccaacccacaaaacagatttagcagtaactgttcaggtcttgctgaaatggcttccttgatggatatttgggagggggggttttgtttgtttttaaaaaaacactgttagcatgaccaaattctacaaaattagttctttaatattaatccttccttccataccccctcacaccaccttaaaattttcaaggcttacgttttaactctcttccacttactctaattttaggggccctctggtggttaaactttacaattctttcttttccgctttaaacttttcttccatatctttacctgaacacctttcggaatccccttatttttcaggtttacccttttcatttcactccaaatttggattctatctcttaagcgtgcgtcccttattaacaccggttactatactcgttcccccctttggttcg

SEQ ID NO: 248564 - DNA, 640 bp, Homo sapiens
gctcagtttgttttttttttctttgtaaatgggaaataagtgaaagttttaccatttctttcttattaatcttcactattaagagtctttaagttgttactgagtgaatgctcattctggctattttgttaaacctaaccttcaactggttatgtttttctctcctttcttgtctctctctaaaattttcatattaaacaataaagcttctgaaactactcattgtaaatattttcaagctgttcaagtaaagatttcattatctatggggcagatcttgctattgaatcttattccactccataaattatattttattggtttggaagtatatatgttttaagtagttgtgaacgtgttttttcacccaggaagctctggcccagcttggtcagcatgtaaaataattttccaacccacaaaacagatttagcagtaactgttcaggtcttgctgaaatggcttccttgatggatatttgggagggggggttttatattaatccttccttccatacccccaccacctaaatttcaggctagtctacttttcactactaattaggtccttgtgtaacttagttttctccgctaaaaaactactcatatttactaaccctcagatacatattttagttaca

SEQ ID NO: 248565 - DNA, 353 bp, Homo sapiens
acataaactcgtagactgattttaaccaatacaactatttcacttctgtttgaggaagtattcaaactcagaatttattttgactgttttaagactttgtaacttgagatgtctccaaagagaatggtctaaagaaaggtaccacttggcaatgcaatgatagcatatgtaattgacacactcttagggaatcactctgcaaacccctgaacttataagggtataggtactattaagtagacatctctgctacaaagctaacaggtttgtgaaagtattcctcttcttaaattattgccaattctacccactttggttaatctataaaatattgatacggtgggcccccatcc

SEQ ID NO: 248566 - DNA, 663 bp, Homo sapiens
catttttttgcataaaactttccaacttctaacacaatatataaattacatatttaataagataatttttcattgcttatctcttcccctagcatgtaaactccacaagggcaaagatctttgattctttggtttgctaatgtattacaccctaggagtgtgcctgtcttttagtagctattaaatgagattaatattgcaaagaagaaatctaaccatttcattctgagagttgagcctggccagagatccataacttctgcagttttctcagccattgatccacgttgtttcatgttcagattgaaagaagcaattattattgattcagttccagccttgtggacacatagtcaaattttctaggcatgtcttgtttctaaggtgccttggaattccaactgaaattaacaggtaatagagaaaaagaataaagaaagtatcaaagaaagaaagagtgagcttcagagtaaaatattattatatagctcagactaataaaatgtgttttacttacatattcaatttgaatgacttaactttaaacatcaattcaaaaaaattgaatatcgagaagagaacatgaaaggaataagcactggagaatgagagctatgaaaaatttaaaaactcaataacaaacttccagaaattcagtatctt

SEQ ID NO: 248567 - DNA, 494 bp, Homo sapiens
aaccctaactgagaagggcgtaggcgccgtgcttttgctccccgcgcgctgtttttctcgctgactttcagcgggcggaaaagcctcggcctgccgccttccaccgttcattctagagcaaacaaaaaatgtcagctgctggcccgttcgcccctcccggggacctgcggcgggtcgcctgcccagcccccgaaccccgcctggaggccgcggtcggcccggggcttctccggaggcacccactgccaccgcgaagagttgggctctgtcagccgcgggtctctcgggggcgagggcgaggttcaggcctttcaggccgcaggaagaggaacggagcgagtccccgcgcgcggcgcgattccctgagctgtgggacgtgcacccaggactcggctcacacatgcagttcgctttcctgttggtggggggaacgccgatcgtgcgcatccgtcacccctcgccggcaatgggggcttgtgaacccccaaacctga

SEQ ID NO: 248568 - DNA, 945 bp, Homo sapiens
  misc_feature (662)..(662): n is a, c, g, or t
caggaacatgattgtaaagaaaatgtctagttcctagagagagccagtaaaagaacatcattccacaagttactgcctccaatttaaaaacatcaaaacaggataaagagtgtctcctactgagcggaaagtagagaccagaaggtttgttgaaaccccagagtgaaaaccacttagagaatcggaatcgtcaagtataaggttgtgagatggattcagagaccagactgaaatatgtctctgccaatctgtgcagtgaaagtggatgacaagggagatgggagacaggagtcagaggtggcagaacaggcattggcctccctgagagatgtccagggcgtgagagtgaatttgtgagtaggtgacagaggcatgtcacaaaaagcaggcacagagagcaatacagaatgagaggtcattttacggtagcccaaaagttagtatggtccacggataccagagcctataaaataatatcatggatttatgaaatatgagaattctattgtgtgctgtgtgtgtagataaaaaaagtaagtgcctacaaattagatgtgcagcaaaatagaatcttttaagttttctataattgatgtgtttacttttgaatcccccgccgagccctatgcagtctcaaaagcacagagaccgtcgtaataagngctcgagctattcatgagtcgaggtatttggctgcatggcgacgtttaacagcgtggctggaagctggcggtccactaatgcctcgagatcccgttgcagtgcgatgcgaagccgacgttctttctagattcctaaagcagtgtgccggggcgggtgtcgcggggtggtggcccattcccgggtatttctcttggggggccaacaaagctgttgtgttctccgataatgcgttcctgaactttgcctatgtaacacctcttccgggacacaatcgcgcctacc

SEQ ID NO: 248569 - DNA, 993 bp, Homo sapiens
ggtaattgcgtgcttttaactacatcaagggattaagggcccaaagaagattcttggcaagtgagttgaatagaaacttgaacaattgctaaaggaaactcccctgggagtgaaggggactaagaaattcattatcttctctttttattgttatataccatagcagtgtccacatccttacagtctagtactacaacagttattctttccagaatctaatatatcagctctgaactatacttttttttaatgtttcaaaaaggtcttgatcctttagcttccagaaagatgactttaacctatctatgcttctgttagattggactatgtactaactttcatttcctaaaacaacatcttcaataatgttttatttgctccaacaataggatactttgctatttaattgtaagattttcttcccctacctctggtagttctatagaaatatgtgagcagtgttcatgctgtaccccaaacatttaacctcaggggactgtttactaagttgagcattaaaccatcccacatgtcaccacatggtgacaaatgtaagctccagagatattcatctccatggatcaatattatatgttatcaaggtgggcaattttaaaacttccaactactgtttccaatcacaaaattcttctaactacaaggcatataacaggtacttcatataatccccattatagcccaaggcatctatgtagttgccccattataaacagattcctgatattcagagaagttacctttttacacaagattacacagctattaattggcagaagtgggacttgaactgttctttccactatcgaaatctctctaaggattaattaataaagcattaatcaattattggggtataggccgggcgcggtgccttacgcctgtaatcccaacactttgggaggccgaggcgggcagatcagaaggtcaggagatcgagaccatcctggctaacacggtgaaaccccgtctcta

SEQ ID NO: 248570 - DNA, 439 bp, Homo sapiens
agccacctatcatcaaatggaaatggtgtattagaaacagcccaggcaggttcagaaggtataagtaaattgtatgagcaggcggctcagactcttccaacatcaactcctgttgctttgcctcctctccctcattctacaactatggcttcttgggatgctgcctatgtccagttgactgagggagaaaaacctccagcctggattatagatgggtctgtatgatgtgctggtaccacatgaaagagaacagctgcagtattcactcacactcactcaggggtgactgtgaagggcagtggtgaaggagaatccttccagtgagcagaaactcaaggctgtccactatgtctggagtgagagatggccagaatacagacctaaattgattcatggacagtcgctgatggtttagctggatggtcagggccttaaaaag

SEQ ID NO: 248571 - DNA, 151 bp, Homo sapiens
ccaccaacagatacagcatactgaccaaccaaggcagagctacaattaaaaaaccaagaagacaacaagtggaatttgcttttctatcccttcctcaaaatctccatcagcttttccgaggcattataaataaaactaaaatctaagttaa

SEQ ID NO: 248572 - DNA, 550 bp, Homo sapiens
ataaaatatagctctgagacaccctaggagggcccacacttctagtacaacaaggctgtcttctcacagcctgtggaaactcctgaagaacagcattaagtgatactccgaagagatgatgagaagcaattggccctccaagaccatggtgcgggagtttgttggaaccagctccagctgactcctcttcccctcccaagcctcctagctcatcccaaaaggagctcctcccacaagtaccttaatagtcccactccatttgattctcacagtcctgaaggggcaggctcctgttgccattgtagagatgaaaaaactgaggctcaaaaagaaaattgccttcctcaacgtcatacagcttgtcaatggcagggctgggattcaaacccaggccaggtatggtggctcacacctttaattctagcactttgggaggccaagatgggacgccaggagttgcttgactccaggagttcaagacctgtctgggcaacatagcaagaccctgtgtcttttttgttaaaataaataaatatatacgtgaaaatgt

SEQ ID NO: 248573 - DNA, 393 bp, Homo sapiens
actacttacttatacagaatatcaaagacctagtgaatggtgatatagggaaaaaatagactcttttctcaagatgaaactgaaattttttacttagacattgtagaatgaaattacttataacttggaaagaactgcagaactcagagaatcaagattttttctcatttatagtccatgagccatccacacatggataaaatccattcaatgtgcactgcagcataatgggttttaatgtaatagggcatgtaaaatgtattgacataatttgaattttcacattgcaacacacctttaagaaatttccacttgttgagttttgatgtaatatcaaataatggtcacaattattcgaaaaggctattaaaatattactgtgtttttcaacta

SEQ ID NO: 248574 - DNA, 558 bp, Homo sapiens
cagtaggcagctagatatatgagtctggggtccaggagagaggtccagactagaaatctaaatttaggagttgtggctatataggtggtatttataattatgggatgatttccagactcccccaagatgcagaaagctggaaagaatgttactcttaccctgaaacaagaataagttgtatgttctataaaataataaactcatagaggtggggtgtgggcatggctcacctgtggcagagcacagaaaataagcagggctgtgtactagcaggaaaattaatgaattgctaaagtccaagtgtaggcaagcgtgagcgtatagaatccttgggagctgcagacacaaagacagttcataccctcttgtaggtttttctccaaggacctccagcagttgcttaggagaaaaatggggctggggacacaagggagaccagagaatgccttggtaggtggtacaggcccacttggacctttttttcctttggaaaaaaaggctttaagccgctgggaaaaaggaaataaacccagttttccattgtgtctgggaaaagta

SEQ ID NO: 248575 - DNA, 750 bp, Homo sapiens
cagtaggcagctagatatatgagtctggggtccaggagagaggtccagactagaaatctaaatttaggagttgtggctatataggtggtatttataattatgggatgatttccagactcccccaagatgcagaaagctggaaagaatgttactcttaccctgaaacaagaataagttgtatgttctataaaataataaactcatagaggtggggtgtgggcatggctcacctgtggcagagcacagaaaataagcagggctgtgtactagcaggaaaattaatgaattgctaaagtccaagtgtaggcaagcgtgagcgtatagaatccttgggagctgcagacacaaagacagttcataccctcttgtaggtttttctccaaggacctccagcagttgcttaggagaaaaatggggctggggacacaagggagaccagagaatgccttggtaggtggtacaggcccacttggacctttttttcctttggaaaaaaaggctttaagccgctgggaaaaaggaaataaacccagttttccattgtgtctgggaaaagtaaaaagaaaaagaaaacccacaaaccctgagggaacggcaggaaactgttaagggcttagactattagagtttttctgccactgggagaaagccccaacccctgtaacccagggacatagggcctacctgagactgagactgggccaggacaacaaagaacctccctgttggtgctgtcaagtcaagcaacag

SEQ ID NO: 248576 - DNA, 619 bp, Homo sapiens
caggctccttgtgaactgctccactggtgtgggagaagccaaaggggcaaagctcaagacggtgtctccctggtgagggcagttacattggcataagttgtctagcataacttgtcatgccgaccccttttcaagatagcagcttcattcactgataatgtggcagtgttccccttcatcagtggaagacatgggatgtgttctaggggaatttatagtacttgacatgtatgagggaaattctactatcaattaagtacaagaggaaaatacgtgtcaggtagtttcagggcatagggcagggtaaaggttgaggaggaagcttggatagcttgacacagggcaggaaggagaaggctctggcagaggcctggcccccttgtttagaagcagctggaacgagtccttgctcctcagcagctgttggcctcaccttcaggaactgtaagcttgtccttgtggtggggatgggctcatgggggtgagggtaggagctgtggaccattattttccttttttttctttttaaaaataaaatttgttccaagttataccaagggaaaaaaaatttgttccaagttataccaagggaaaaaaaatgaattaagaaaaaaataaa

SEQ ID NO: 248577 - DNA, 659 bp, Homo sapiens
cagcatggcaccctggtggcaggggctgatactcagccgggccagggtgctctcctgttaaccataaccaagctcacaggacatgggatgagcccactgtgtgacacagggagcgggacacagtctgttaagtcttgcacagccatgctctgccacgcaggcaggcctttccttggcctccctctccctgttcgtgctcatgtgaacatccacctacgtggatagactgggctttggttcattattgctctgtgaattcctcgaacttccgcatctgcccaacctcccccaccccattgttttcattgtgtttcaccaaatggaaattctagagtaagcatgtgagtcctctcccaaacttgttcactgttgagagtgctaaaatgctaaccccagatgctaactgaggggtagggttaccttatctttagagcactgcgaattgtatgttaagtggaacttaatgaaaaaatagttaattgaccaacatgaatatcccctgaacagaatctcccctgaacagaatcctacaatgaaactaagggagataaataaagctgtttacctgaaagctctctctaatcaagatcctttgaaatttataaaacatggtcaatatttgcactggactttgtaaaaataaagcttgataagagaag

SEQ ID NO: 248578 - DNA, 357 bp, Homo sapiens
ctgagcatgggccgatgcttccaaagttcacactgggtgcacttgtgtggggacttccatgtgagtcatctccttgcaggctgccaaggtcctgtacagcagagacccaaaccctcttagcagtcttcagagtcagctatgtgtacaggaggcattaccatatcagtgactgtcagcaagcatgtgtgactgaaatggtatccagttcttacgtatttgttttgcaggcttcttggttcagcagacagaggccattgggaagttaagagaggctctcaaactttgagggtcataagacttcccctccctgcagggtgctgtttcctgaaggaaaatattcaattactattttcttta

SEQ ID NO: 248579 - DNA, 1095 bp, Homo sapiens
gagagacctgaagcagaggagctggatgaaatgcctggagggagaaatgtaagtttgcaatgattctcccagagagtttaattttgacctagaacccagaaaagtatcactctttagcagagaagtaagccttaaagtgtttacagaaaggcaaaaagcagatacctataatactttagttaataatcataattatcactgggtacagtggcttgcacctgtaatcctagaaatgcaggaggctgagacagaaggatcatcacttgaacccagaaattcaaagccacggtgatcatgccactgcactccagcgtgggcaacagagcaagatctcacctcaaaatatatacataaataaataattataataatcattgccagttattaaattcttcctaagtgcaatctctgttcttgcaaaatctcacttaacttttcattcgtctgacaaaaatgtatcatcatgtctctttggaacttacagctatagaagaatgtaattcaatgcaacaagttgtattgtataaactacagatagattaatgaggtaaatggtggtggtagcaggactgtatacttgtatattaccagctctgtataactgatacctcaagattcaatctcattgtattctacacagtcaatacagcatgcagtactctgaggacagtgccagaaataaaaataactactatttattgagctgcatattggctcttcagcttaatctttacaaaaatcaggaaaatatgtattagctttaggtttaaaaagttgaaaactgaggctgggggtgagggaaggacatgcccaaggcctcgtggatagaagatggcagaaacaggaagtgaacacaaggcaaagcttctaagtctgcatccttttcccctgcccagaccctgtttctaaaggcaggaatgggctgcctttagaattgaagagcttggtctaggcttgagcacaataagcgcagagggtatatgggggttgacccatttgtaacaatataatcaatgatgtgaaattaggagtatgaattaagtttaaagcatggatgacctgcatcccattcacacatgccttccctggaaacag

SEQ ID NO: 248580 - DNA, 826 bp, Homo sapiens
tacaatatcacctttcttatagattcgcatatacatggccaaaggaacaactccatgttttctaaaaggcctagagaacatacatcagctcaccaggacatgattatagcttctcaagcttatctaaaataaaagataacatatatatcaacatttttgatgaaatgatgactgaaaaacatgaggatcactgtctcaagagctgtagtggtcactcatatataagaaagaattggcttggatgcattgtcttccctttttctgctcttctgcaacaatctgagtttttagatcaaacagaggtcttgcagagagcacagatttttaaaaagaattgtaaggcaatgtttcccaaccgaagaatcgtaactactgtttttaatgatgaagggatacagttcttagtcacaagatatatcaaggcattaaatccacctcagcaacttctggatatatttcttcacaattctaatgcaacatttgacctcattgctcgatttgtatctttgattccttttgtgcctaatacaccagatgaaaatgatggctctgatatatggatgacatcagagcactgcatcagtttagctatcggaaataaggaggagcatgccatccttctctgtaatttctttctgtattttggaaagaaggcactggtcctcttgggaacgtcagtgttagaagggcatgtggcttatgtagtaactcaagaaactaatgaatatttgctttggaatccatcaactggccaatgttataagcagtttgacccgttttgtcccttaaaaagtgtagattgtttgtttgatgatagaaatgtaag

SEQ ID NO: 248581 - DNA, 526 bp, Homo sapiens
gaaatactttacattttattgtagtttttagatcaaacagaggtcttgcagagagcacagatttttaaaaagaattgtaaggcaatgtttcccaaccgaagaatcgtaactactgtttttaatgatgaagggatacagttcttagtcacaagatatatcaaggcattaaatccacctcagcaacttctggatatatttcttcacaattctaatgcaacatttgtaagttattattatttttaacatcttcattgtgattaaagggcatctgtgaagaatcacttttaccttttgtgtatttgggttcaatctagtgagttgtctgtcctcaaaatatttgtactgtttgtgagtcataaagctcccttagctggactctttaagctaaaatcaaaagttctaatttagattgcctattgctacaccgcttttccatcatgggtttctttctgcctgtgtgtcctgacacccaatatccaaggaggtaatagtgctctcagatctatttcaaaggctatctttatct

SEQ ID NO: 248582 - DNA, 744 bp, Homo sapiens
ttttgatgaaaagaagttttaaactgtaccagtcctttcctttatgctcaccaggacatgattatagcttctcaagcttatctaaaataaaagataacatatatatcaacatttttgatgaaatgatgactgaaaaacatgaggatcactgtctcaagagctgtagtggtcactcatatataagaaagaattggcttggatgcattgtcttccctttttctgctcttctgcaacaatctgagtttttagatcaaacagaggtcttgcagagagcacagatttttaaaaagaattgtaaggcaatgtttcccaaccgaagaatcgtaactactgtttttaatgatgaagggatacagttcttagtcacaagatatatcaaggcattaaatccacctcagcaacttctggatatatttcttcacaattctaatgcaacatttgtaagttattattatttttaacatcttcattgtgattaaagggcatctgtgaagaatcacttttaccttttgtgtatttgggttcaatctagtgagttgtctgtcctcaaaatatttgtactgtttgtgagtcataaagctcccttagctggactctttaagctaaaatcaaaagttctaatttagattgcctattgctacaccgcttttccatcatgggtttctttctgcctgtgtgtcctgacacccaatatccaaggaggtaatagtgctctcagatctatttcaaaggctatctttatct

SEQ ID NO: 248583 - DNA, 400 bp, Homo sapiens
gctaaagacaacattggtaggatacagatgctgtgtgaaaagccacatgctggaacaaggttctgaatctttcagctgatgtggccaccctggttgctgtgggacacctgtctcctcctgccgtccaaaagagcaagaagcactaaactctgtcttcggtcagcatgactctcagcccatatgagactgtccagttgcaggaaaacaagctcagggctcccactgattctacatgatgcacttacaaattcatggactattatgaagacaagttaagagattgtgtcctccaaactcatcatttttcagaaattgtatcacaatcctacaagataaatgcacaagataattcttcaaatcattgagagtgtaatctataatcttcctaaacaacgaacag

SEQ ID NO: 248584 - DNA, 530 bp, Homo sapiens
gctaaagacaacattggtaggatacagatgctgtgtgaaaagccacatgctggaacaaggttctgaatctttcagctgatgtggccaccctggttgctgtgggacacctgtctcctcctgccgtccaaaagagcaagaagcactaaactctgtcttcggtcagcatgactctcagcccatgtaagctcaccttggctgtaccccgaggagggagatcaaagtatatgttcctactgtcagctttactcacatccacatcttctccctgcatgtccttgggttggaaggaacagcttattttttgtcctacatcagtggttcttaaactttactgtaccaagaaagcttttaaaaaatgctgatgattggggcctgcagattctcagtcactgatctggatatgtcctgcatgtaagagtgttttgcaaatcgtttctaatgtgcaaccaggattacaaaacgttatcttgtatcctgagttctctctactcttggcataaaattaaaatctgttatatcttgaaaaaaaa

SEQ ID NO: 248585 - DNA, 472 bp, Homo sapiens
ctaactcagacatacatgctgcctccacaggtggccaccctggttgctgtgggacacctgtctcctcctgccgtccaaaagagcaagaagcactaaactctgtcttcggtcagcatgactctcagcccatgtaagctcaccttggctgtaccccgaggagggagatcaaagtatatgttcctactgtcagctttactcacatccacatcttctccctgcatgtccttgggttggaaggaacagcttattttttgtcctacatcagtggttcttaaactttactgtaccaagaaagcttttaaaaaatgctgatgattggggcctgcagattctcagtcactgatctggatatgtcctgcatgtaagagtgttttgcaaatcgtttctaatgtgcaaccaggattacaaaacgttatcttgtatcctgagttctctctactcttggcataaaattaaaatctgttatatcttg

SEQ ID NO: 248586 - DNA, 491 bp, Homo sapiens
tgcgagtttaaatgcatctgtatttagtgccgggtattagccggtgaggtgatgccctgcctcatctccgggtccttcacggggtttcgctcccctttccttccgctagtcccgacgaagattcaaaagggacccgacaacactaaggcgcgcaaaggcaccaccgtgacgctgactgcggagatcctgggagagcctgcgcccgacgtaggctggaccaaggacggggaggacatcgaggaggatgacagggtgttcttcgagatcggcagcaccaccacgacgctgaccattcgccgggccacgcctcaggacagcggcaagtacgaggtgtacgtggagaacagcctgggcatggaccagagcttcgctcgcgtggacgtggcctgaacggcacccccggaccttccgccctggcgccgagcccgggggtggtgggacccacagccctccaccagcttgcttaataaagctgctctctgaccctccgc

SEQ ID NO: 248587 - DNA, 636 bp, Homo sapiens
tgcgagtttaaatgcatctgtatttagtgccgggtattagccggtgaggtgatgccctgcctcatctccgggtccttcacggggtttcgctcccctttccttccgctagtcccgacgaagattcaaaagggacccgacaacactaaggcgcgcaaaggcaccaccgtgacgctgactgcggagatcctgggagagcctgcgcccgacgtaggctggaccaaggacggggaggacatcgaggaggatgacaggcgagggccgggacctgcggcacggccagggcctggggctggaacctgggtgggactgagcccagaaatctggctggagtgacgggggcggggactgggcagcgaggaacagagctggctaaggagccccgcccagtgcgcccgtgtactgaccacggctccgccctcctccccgccgcccttccgcagggtgttcttcgagatcggcagcaccaccacgacgctgaccattcgccgggccacgcctcaggacagcggcaagtacgaggtgtacgtggagaacagcctgggcatggaccagagcttcgctcgcgtggacgtggcctgaacggcacccccggaccttccgccctggcgccgagcccgggggtggtgggacccacag

SEQ ID NO: 248588 - DNA, 455 bp, Homo sapiens
acagtgtctgtttaacttgtaactgggaagtcattagttttttttgagaggaatttcagtggactgaggtggcggggtaggcagcagccagggtataatgatttggagtatgaattcaaggtagaaattacagtaaaaattgtagcctgcccttgcaagaaactaggctataaaagaagagagtgtaagaaggtcttcagaggctgctgctttgactgtcgggttaatgctttataaagtcctctttattaatgtgtttttctacttgcagagtagaacattctcagactctgcgattctttaattttcctgaagtggcactctttgctttttgttcatgatttaaccactataaaaatgcccagctacagcttgctgcaagaacataagtttggcttcttatcatggaattctttttgaggccattacctttgaagttgtttgatacgttaaca

SEQ ID NO: 248589 - DNA, 580 bp, Homo sapiens
ctgtctggtctttgcttgagttgtcaccttagccagcccgttctggcatgtcacccacgcccccaaaacttactctgagcttgttgggtgagctttaggagacatcgtgagctagagctgctgcagtggtgggcctagaaatgtcgctagctgatggtgtagcccctccagagggacatgctggacacaaccttccgtattctgcgcaggagagcatccctccaactccccaccatatgaatgaaatttttcatatgaatgaaaattttggctggagtgcagtggcatgatcttggctcactgcaacctccgcctcctgggttcaagtgattttccttcctcaggctcctgagtagctgggactacaggcgcgtgctaccacgcccggctagtttttgtattttttagtggagatggggtttcaccatgttggtcaggctgttctcaaactcctgacctcaggtgatccacccgcctcggcctcccaaagtgctgggattacaggcatgaacctgtaacagagcaagactccatctcaaacaaaacaaaaaacaaaacaaaacaccacatttttaaataa

SEQ ID NO: 248590 - DNA, 276 bp, Homo sapiens
agagagcagtagatgtcaaggttgaagattaatacccaggagagcatttaatataaacttagaaatgtaaatgtttcaacaagaagtgggtagtgaatgactattagatgaggtgagttggagttggtggctttgattgggttgggtggagagatgaaagttaaaagcctgattggatgtagcttaaagagaatgggagacaaggaagtggagacgagctgcagaaaatgtttaggaagttttactagttaagggagtaaaaattcaaaattctgg

SEQ ID NO: 248591 - DNA, 132 bp, Homo sapiens
atttcgacagaacaagaaaattaggttgactaggaaaatggtttttaacctttatccttagcataaatcaagaggctcatttttcagtctattcctatagaattcaattaaaggtcaggtttgtaatggaga

SEQ ID NO: 248592 - DNA, 472 bp, Homo sapiens
cttttaaccttctgccatgattttgaagcctccccagccacgtggaactgtaagtccattaaacctctttcttttgtaagttacccgctcttgggtatgcctttatcagcagtgtgaaaacggactaatacaatatgtttctatgaatgtggttcctattccctaatttggagtaagtgcccagtgtgctttgtttttgcccgagcttgtcttttgcttttcatccaagatctccaatcataaccagactgctgagacagtggataggggctggagagaagttgaggaacatagcagtcaaatacttgctcttcattttacgatcattgctatttttctttcagaacttaaaactatcaggctaaacataataataataacttgggcaactttacattcctatctaggacttaatttgaggaacattcatattttatcaggaaatcagcatttctcttttaaatatgtactt

SEQ ID NO: 248593 - DNA, 966 bp, Homo sapiens
caagactggggctgacttcagggtcaaagattcgcttgggcactctaccagtcatcagaattttcacagagacacccccccaacacacacacccgcagcatgcgctccttgaaagtgctaatagcttcaatatgaggctggcacttctgcatgactgttggtgttcagggccagcctagtcttggggagtaggccatctgtagcagctgcagaaatgtttttgcttattttgagcattctaagtttttcctagccatgaataacaacaatcgaataaatcatcccacagtgtgtaggatggtcgtttttttgtttttttttttcagcaagaacaacaaaaaatgacatatcatgtactatggataatacacataaaaaattccgccatatttataggcagcagttaactaactatatttagatatttgaaactgtcttaaatcagatgaatgataaaagcttcctggatttcagtggaaagcctaaatgactaaaccaaaaaaaaaaaaagttttattactatgaagtatagtgcatattctgaaataaaagatatgtgatatttataaaataaaaagagaaactttgtcaatagacagcatcatttaataaagcagggtcccagatttacagacctttgtttgagttctaaaatttactaggaaggagggtgcaggggtggaagccgttcattgtagctctttaaatttcctcacttttgaatggagatgataaaatgcccctcacagggtttttgagaggactaaaaatataaggtatggaaagtgtttagcattgtgcctatcacaaagttagtgcttgaatatattagctattgtcattaatactattgctattcttatttcttctacaactgttattgttgaaatgcgaagtcaaaatggtacatttttatcaactattaagtgctatcatgtttcaattaatacataatgttattgatta

SEQ ID NO: 248594 - DNA, 383 bp, Homo sapiens
tgcagtgatctgaggttgcatcgctgcactccagcctggcaacagagtgagactccgtctcaagaaaaaaaaatgtttttttgcttatttagttgtatgtcagttttacctcaattaaaaactaataacacttttaaaaataaattagtagtaatgtattgttgtgaaatccatgccttaaaatgaaacaacataaatcttgacttaaacaagagtagtagataaaaccactctgaggcagaatgatctgaatctcaccgctgtgaccctgttctcatttctttaccttcgtgacgttatgttatgtgtgcctttctttgaaaaatgagggctgtaatttctacagtgtaaacttattgtgagtattaaatatgtagaaaaca

SEQ ID NO: 248595 - DNA, 513 bp, Homo sapiens
acaaacaccagctggaaaaggcagcaacgtggggtctccctccccctcagccaaagtgaactgtgtcagcaggtgtctcccagctgctgagaatgagccaagggaccaagatggccgcctggctcctgcaagtggagagggtcttgctggggcctgaactggctgaggtcttgcagcaggaaggggacgctggacacttagccccctacagggagcccagagccaggcctgggtgaaggtgcctttgggaggaggtggaggagtgtaacgattgggacccagctggacaggtccctgtgagccggcctgggtccttggtgggtgggacatgtctacaaatagctcatcacgtctccaatccagaagtgctgtgtcgtttcaaaaatgagcggagccaacgcagccaccagccaggcctcggctacctgggcaaggctgccggctcatgaatattcacggctccgatggtgtctctgagcctcctaaccatctggaattaaaccaacgagcttc

SEQ ID NO: 248596 - DNA, 500 bp, Homo sapiens
ttttttcttttctttcctttttctcttttatttatttatttttatgcctaatgaacctggctagcaattccagtatatgttgaatagattggtcagagtaggtggtatcatctgaacactgtgtcctcaaaattcatatgttaaaacctaattcccaatgtgatggccttaagagggtgagcctttggagatgattaggtgattaggctccacctttatcatgagattaatactcttataaaagaggcctgaggaagcttgttctccctatctaccatgtgagaacagaggtagaagatgccaacatgaaggaaagaacaagccctcacctaacactgaatccgctgacaacttggccttggacttcccagcctccagactgtaaaataatttctgttgttaataagttactgagtctaaggtattttcttacaatagcccaagcagatgaaatggtcgaggaaaaggtatcaagtttttgccactaaattggagtcgac

SEQ ID NO: 248597 - DNA, 449 bp, Homo sapiens
caaaggcaagagagaggaaaaaaacaaggacactagaggaatttgaagcctctggaacttacagctacaacaataattaaacacaacccaactccaggccagattaacataaatcctcacaccaaaggcctgtttacttcagtacctattagaaatacataatattgattgggtgcaatgactcatgcctgtaatcccagcactttgggaggccgaggcgggaggatcacaaggtcaggagttcgagaccagcctgaccaacatggtgaaaccccgactctactaaaaatacaaaagttagctggccatggtggcatgtgcctgtaatcccagctactcaggaagctgaggcaggagaatcacttgaacccaggaggcggaggttgcagtgagccaagattgtgccactgcactccagcctgggcaacagagtgagactccatctcaaa

SEQ ID NO: 248598 - DNA, 246 bp, Homo sapiens
tctccaaccatttcccagggtcagatatgttcacatctgacaaacagatctgtttttctccatggagatgagccagattgtcctttgtctggaatgatagttcagtggggaccccaaagttaccattttgccatcataggtcacctgcaggtttcaaagaggatgtctgcagcaccatctgttgcttttaaatgagcaatatgttgtgtgttcccatgcactgaggtcaaagcaaagggggttaaa

SEQ ID NO: 248599 - DNA, 528 bp, Homo sapiens
ctttcctgttgtcaattcttctgtaactatgttatctactatgctgaccacagggtacatgtggctttccacattaatgaaaataaaagaaaataaaatatcctgttcctgggccacacaatctcatttccagggctcaatagccacatgtggctagtagctacttggcagaggagacacagaaagaacattttcatcatcacagaaattctactcttgtagagagtgctgctctagaagctttaggccactgaagttgtattcagcgacctgacatcagagagtttttgtagtcacttgagcagaggtaatgcaatccctggggaagacttccagtttcaattacattcaggttaacaaagcccattgttccaaccaaaataatagttgctcaacattccattctgatgattttttttatccaagcagtcaacatagtttcattaaataccacccactaattgtgtactagttaaatgaggaatgaatgtggctctgtctccagataaatgaatagagagagagaca

SEQ ID NO: 248600 - DNA, 305 bp, Homo sapiens
cagtcatctgtgggtagctacttggtgtgaagaattccttggctggggctgaggagagttctctacctcacctcaaccccagccgccttctcccatccctccctcttagaccaatcccttcctacaggatgttctttttttttttttttttgatttcctctaaaaaatttcaataaagaaaataaagcaggaggtagaaagcaggagaatcgcttgaacccgggaggcagaggttgcagtgagccgagatcgtaccattgcgctccagcctggtcaacaagagcaaaacttcatctcaaaaaaga

SEQ ID NO: 248601 - DNA, 409 bp, Homo sapiens
aaccataaaaagagaaagaaatcctatctcattggcaacatggatgaacttgggagacattatgctaagtaaaataagccagacacagaaagacaaatattgtgtggtttcacttacatgtggaatctataaatgttaaactcagagaagcagaaagtaaaatggtggttgccagtgactggaagtggaatggagagatgttagtcaaaagatacaaaacgtttagttatgtataatatcaatatgttgtgggagctgatcatagcagggcgagtggcggatgttttaattcatttgtggtaattgttacacaatatatgtgtatcaaataatcatgttgtttactttgaatatgttcaatctttatttgacaattacatattttatttttacttactttaaataaatt

SEQ ID NO: 248602 - DNA, 604 bp, Homo sapiens
ccttctgctaaatcacagcagtttggggagttttcttcccaataaaactggcttaatcctaaatgggtcctgacgtattcttcgttattttatgttttaaggcccaggaaaggcctaagctaaacttttggtgggcttttcttatatcccagcctttgtataagggccttggcttttaatatttaactactcagacagtactaaaacacttgttacagaggcctgcgttagtgagacctggcctgccacaatccccactgtcaatttgctcatgctttttatcatgcatgtatatgtatttattaatcacgagaatcgtagggagatgaagcattgtaatctttctggctgcttcctgctgagagagggttgtcgtcatggggcaccaaacacagcgctggagtggaagaggtggatttgttcccggtagcactttctgttctgggggcttcgaggcagcacctgctgaaacgtaataggatgcaacagccacacatagaagtaggttgctgctgttttcttcccaagtttagtcttcagtttacagggcttgaggaaagcatagcttagatttcagtgatttccaattaggaaaaaggaaaca

SEQ ID NO: 248603 - DNA, 495 bp, Homo sapiens
tcttgttatgttgcccaatctggtcttgaactcctggcctcaagtgatcctcccacctcagcttcccaaagtactgggattacaggtgtgaatcatagtgcccagctggagttttatattaagcacttgctgacattaataattatggaagaaatatttcgcctctctgagtttctgtgtcttcatcttttaaaaaatgaagctacttatctctaaattttggagtttgtaatgaagattaaataatttatctgtagtgtattaaatattagtttctgattccttttccttctatattacaggcctctttgcaatgagccactaagaaaacaaaggccatctatccaaggacaccgcctagtgtctttgtgtgactagcacagatacatatttggtttgctgttctagataggtaataacatcttgctgtttgttcttgatgtccttctatcacgcccccttcattccaccttgattgccttccatagctgcact

SEQ ID NO: 248604 - DNA, 713 bp, Homo sapiens
aaaaaaaaaaaattagcgaggcatggtggcaggcacctgtaatcccagctactcgtgaggctggggcaggagaatcacttgaacccaggaggcagaggttgcagtgagccaagatagcaccaccgcactccagcccaggtgacagagtgagactgtctcaaaaaaaagaaagcacgaggaaacattttcttcatatgttactatatttatgcattattttcccagagtaattcagctggttaaaacatgctgctactaaggtggaggtgcagattactacagataaagaatactccctgcctgtttccaatttagaataggctttttctaaaaagacattgaatgaatagggatagtagcagaatgaatgtaggaacttggctcaaattaagaattaaactagaaacaaaaggacagtcatttattagaggagatatagtatgtagccaaggaataatagcatcagaatagataccaaaagaggtaacaaaaacaggggtaaggtgtagaaccactctacaaactctgccaaaaactcacttctttgagttctgtttttattgagccactagtttctgcagtggcttgctgtctagcatattaactttattgtctcctgagaaataaaaaggttgaaattaagagctgttccttacaatcgcccaatggttctttgtttttcactgtatctaatatgtggcaaatggtagtta

SEQ ID NO: 248605 - DNA, 384 bp, Homo sapiens
ccaggcccaactattgatgctaaaagacagtccaatcaagaccagctgatattgtttctggaaagcactcaacacctttccagtatgttcctttatgtacatatgtgtgtgtgaccaagaaaaccagagggagcttctgttgcttacaagccagaacctgactgctacagtagggccatgtaataaccagatttacacttgaagatcactctggctgctctgtggagaaaggactaagagtgaaaatgaaagtgagggataagcagttagggggcactggagaagtctacatgaaagacaatgggtctggatgcagtagctcacacctgtaatcccagcattttgggaggctgaggcaggaggatcgcttgagcccatgagttc

SEQ ID NO: 248606 - DNA, 540 bp, Homo sapiens
ctccagcattcagaacatgtcctgcttagctaaaggttttttaatatgcgatttttctcctaggattatggcaaagggagaagaaaagggatactgaccattttaggaactcaaaatattgttctaaatgttttagaaatgtgtagtaatgagtttgttattcccgattacagtgtatcttctcatgtctttgaatgtgattgtgcttgctaatttagcttatatggtagaaatattagatatttactcacatcttgaaactgagtggatgtgttggtgttggtggcaagagagcttaaaggcaaatttgtggcccactaaaaaacatgtatatagtttaatatggaatgaacttttaaactaccacttaggtccattttatgttgccttctcaactatctttttcttttttttttcacttttgccttttatgctaagttgttgaatgttgtatatatttgtcaacaatatatatgctccccaaaacaaggcaggtaaataaaaataaattcatgagaatttaacactctaagcaaatgt

SEQ ID NO: 248607 - DNA, 337 bp, Homo sapiens
ctccatgttggtcaggctggtctcgaactcccgacctcaggtgatcctcccgcctcggcgtcccaaagtgctgggattgcaggtgtgagccaccatgcccagcccagatagacctttcttgatcacccaatttagtcaaaccatcaccctgttctgtctttttccaggtactgattattagctgaaagtgtcttttctgtttaattctttgtttactttattgtcccccctccaccccgtcccatgttcctcaagggcaggagcctctttgtttttccattgccctttctggcacctggaacagggagagcatgtagggccttggctaatggttgtt

SEQ ID NO: 248608 - DNA, 468 bp, Homo sapiens
ttatcaagttttcctttttttccttcaaagaaatatgtactacttttgcagccagagttctggggtttgcttgtttgtttttcagagatagggtcttacccaggttggagtgcagtggcacagtcatacctcactgtaacctcaaactgctggcctcaggcaatcctccagcctcagtctcccaaaccgccaccacgcctagtccagttttttgtttgtttgtttgtttgtttgtttgagatggagtctcactctgttgcccaggctggagtgcagtgagctgagatcacaccacactgcactccagcctgggtgacagatatataacatatatatatatatatataaaacattagactcagcgtttccagctctagaatttatgataaaatgattgtggatgtgtgaaaagatttagcctgaggaacatacatttctgccagagtatcttcagaacagtaaaaaaaa

SEQ ID NO: 248609 - DNA, 622 bp, Homo sapiens
cctcccctagagtttgagttcttggaggcctgatgacacccagcgtgttgcctagaggtggggatgagaccctggctggctgaactgccgctcaccgtgtgtttttggagacacatccctcctggtggcacaacagaaaaccacgactctaagtcacttgccccagccctctgacctctcttcagcccagaccagcccttctgccagttataaagcaccagccctgccaagagcaaagagaggcttgctggatcccgctgtctcttcatggagttcctgaatcacagaacctcccagtttgtctgtttgcctcccatgtatcaagaactcagaggttcagccaagcgcggtggctcacgcctgtaattccagcactttgggaggccaaggcgggcagatcacctgaggtcaggagttcgagaccagcctggccaacatggtggaaccccatctctactaaaaatacaaaaaaaacagcgaggtgtggtggcgggagcctgtaaccccactactcgggaggctgaggcgggagaatcacttgaacccaggaggcggaggttgcagtgagccgagatggcaccactgcactccagcctggatgacaagagcgagactccatcta

SEQ ID NO: 248610 - DNA, 536 bp, Homo sapiens
cctaccaaagactgtttagcaagtggctttttcagaaacatgtaggatcaacttgttccatcgtcctacgttagatagactggaataacagaacaaagagagcaaataagaggtttagcttgcagctcccctcgtgtacaaccagttccacttgagaatgtcatcttctatcatatattttcaaagaaaacttgatccatagtaaatggataattcccatgtgtaagtgtattaaatggagaagaagggaaaaaaagtaaatggatagttcccaatccagggtgcaaacaaaaaacatgtactaaaatatttttactgtggttctaccacccacgtttcctcaaagattctacctttggtgggggaggttgaatgaacattttgagctcaagatacctgcccacgtggttggaaacactaataactaataggattcaaactccaaaaaatgggaaggacctttgaattagaagccgtctgtttctataagcctgtctgcttgcctgaatattaaagagatttgaaattcccattta

SEQ ID NO: 248611 - DNA, 341 bp, Homo sapiens
caacgagagcgaaaactccatctcaaaaaaaaagaaaaaaaaaaaaagacataaaataaccaatgtataagtggacccatgagttcaaacacatgtgttcaagagtcaactgcattttttaagttttaattttttgttgttgttgttttgagacagagtttcactcttgtcaccaggctggagtgcaatggctcaagctcactgcaacctccacctcccgggtacaggctgaggcatgagaatcgcttggactcgccaggtgaaggttgcagtgagccaagatcacgccaccgaactctggcctgggcaacgagagcgaaaactccatctcaaaaaaaaaa

SEQ ID NO: 248612 - DNA, 496 bp, Homo sapiens
caattttattactaagtgtctttgtgttttaggatacacataagctgacagtgagggatggataaaaatatttcattcaaacagtaaccgaaagagagcaggatgaacatatttacatcaaacaaagtagactttagatacaaaactcacaagagacaaaaaaagatactataataataaaatatcaccagggaaatataacaattataacagtacagataccaaacattggagtatctaaatatatgaagcaaatattgacaagactcaagtgacaaatagcaactaaaataatagtagattttaataacccactttcaataatagataaaatattcaaatagaagatcaataaggcaataggggacttgaacaacactataaagcaaatggacctaacagcataaacagagtatttcaccccaatgctacagaatacttgtttttctcaagcacacataggacattctcaatgatggaccacaagttaggtcac

SEQ ID NO: 248613 - DNA, 1113 bp, Homo sapiens
gacctacgcacaggagaacatgcctctcgcaaaggagctccttcatccctctccagaagaggagaagaggaaacacaagaagaaacgcctggtgcagagccccaattcctacttcatggatgtgaaatgcccaggatgctataaaatcaccacggtctttagccatgcacaaacggtagttttgtgtgttggctgctccactgtcctctgccagcctacaggaggaaaagcaaggcttacagaaggatgttccttcaggaggaagcagcactaaaagcactctgagtcaagatgagtgggaaaccatctcaataaacacattttggataaaaaaaaaaaaaaaaaaaaaaaaaaaaaaaagtttggataggggaagaaggaaaggagaaaagattaattttgaagtaaggggtaaataagcaccctgccaaggggcaataccccactgggggtgaggagcgctggattcagagggcagctggatagcactggcccaggcagacaggagagatttcttgagatgagaaggattagagcctgggttcatgacaatgaggctttgccctgaagtcacttttgtatatgtagctactgacacttgcgctttatcaggtcccttttaaaagttgctcctgtttcattcagatttactattccagactgatttagattcttcaagatcaaaacagtgactcctatcatattttctgtttttcacttcgggtagaatgggataccagttcctattctcataggacttcacttacctttcttggcctcctatggtctattctcccctggaccaacttcaaaacctccttcctctgactttctaaagttattttcacattcctctacagtatttagggttcctctattgtaggaatctttaaatcattacaaaaatggggttatatatatatcacctagtagagatctgttaatcaaaataaataaacccgtgtgcttgctgagaagctcaactgcggaaatattgattgattgctacatagacctacccataataaataagctaagatattttacatagccaggagtgatgagcaaacaccactttttcatctgtgtttaaaatttatgtattatccattt

SEQ ID NO: 248614 - DNA, 370 bp, Homo sapiens
gtgcatagtaaactatggatttcaataggtactgccaaattgccttccaggaatttcctaccaatttacattcccacaaggagcgtatgagagttcatcaaaggccctgtgtattctgagttgtttggcttcagtgttatggggagtgggccttggaatctaatagatttggagtcagatcctggctcctccactcagtcttctgatgagcttttcaagcttccaaaacctctgaggccttgtctcctatccctgtacctctcagagttgttataagaattaaatgagacaagcatgtatagtggttatcttatttcctggcatatagttatattcaataaatgatcatttctgttattctgccagtggg

SEQ ID NO: 248615 - DNA, 940 bp, Homo sapiens
gaactagttatattgaaatagttacaaaactatttcaagtattataacaatatttgtgcatataatagcatattaaataataaaatcttttggtagatctaatatctctcacatttaagtagcaaatgactgaaaatgattttttttttgagatggagtctcccgctgttgccaggcagtgcagtggcatgatcttggctcactgcaatctccgcctcatgggttcaacctcctgcctcagcctccagagtagctgggattacaggcatctgccaccacacccagctaatttttgtatttttggtagagagagggtttccccatgttggccaggatggtctcgatctcctgacctcaggtgatccgcccgcctcggcctcccaaagtgctgggatttcaggcgtgagccaccgcacctggcccatatttcaggataccccaacacttttttagggttatgaaaatgttttagagctagagagaggcagtggttgcacgccattgtgagtgtactaagtagtaccgaattgtatactttaaaatggttcattttatatcatgtgaatttcatctcaaaaaaggaactgggggtggggagatctccccacagctgtgatagggtacaacagtatccggctggggcttctactggtgatggtcatggggatcgctcattccattgggatctgttacctacgctcaaaatgacagtgctaaatttctacccaattgagttcacaggtccctttgcctgaattctatccacagattccttggtggtccacagaccctggagtaagaatctctgccctaggggatgacaggactgtaaaaggaagggacctgggtccctgaatcacacgggggaagtcacctgctgaatcagaacgcctcaacagctagctagccaagaaataaacggagagcgtggcaacccaca

SEQ ID NO: 248616 - DNA, 367 bp, Homo sapiens
gttttttatcacaggatgaaagtatgggcatcataggacgaaagtaaagtaccattaagtatggacatattttcatgtgcttatttaccatctatatatcttctttgatgcagtgtctgttcacatcttttggccattttttaaaaagtgcatatacattgacatgcagagtggagtaatagatagtggagactcagaaaggtggaaggtaggaagggtgtgaggaatgaaataccacgtattgggcataatggacactattcgggtgatgagtacactagtagcccacacttcaccactatgcaataaatctgtatcacacaactgcatttgtaccccatacatctataaaaataaaaattaaaaa

SEQ ID NO: 248617 - DNA, 578 bp, Homo sapiens
ccacaacaggccttggtgtgtgatgttccccttcctgtgttctcattgttcaattcccacctatgagtgagaacatgcggtgtttgtttttttgtccctgcgatagtttgctgagaatgatggtttccagcttcatccatgtccctataaaggacatgaactcatcgttttttatggctgcatagtattccatggtgtctatgtgccacattttcttaatccagtctatcattgttggatatggggtaaaggattcctatttaataaatggtgctgggataatttacatttttaaaaagaaatgattcatgttagaaataatacatagggcagtgcatggtggctcacgcctgtaatttcagcactttgggaggttgaggtgggcggatcacaaggtcaggagttggagaccagcctgaccaacatggtcaaaccctgtctctactaaaaatacaaaaattagctgggtgtggtggcacgtgcctctaatcccacctactcaggaggctgaggcaggagagtctctcgaacccacgaagtggaggttacagtgagccatgattgcaccactgcactcc

SEQ ID NO: 248618 - DNA, 167 bp, Homo sapiens
aaaatttgaaaattcactgggcatggtggctcattcctgtagtctagctagtcaggaggctaaggcaagaggatcatttgagctcaggaggtgaaggttgcagtgagctgtgtctgcaccactgcacttgagcctaggtgataaagcaagacatcttctcatttaaa

SEQ ID NO: 248619 - DNA, 292 bp, Homo sapiens
aagatacgaaatcttcagaacattacatatataaattatatacactatttgattctagaagtttaatgtgttagaaaatattcatctcactcttccatgtttagcccatccttataggatttggggaagggaggttaacatgaatatggagaaaggaaattaggatttcggactgccagttttagcaaagaacaaaaccaactattgtcctcaaatcagccagacttgttattcaggaaaacagatgcatttttatgagaggccataatacaagttttattgctataataaa

SEQ ID NO: 248620 - DNA, 383 bp, Homo sapiens
gagattgtcccggcaggtacatgagtccaggagagaaatccaagcagggagaagaagaaaggaggagaagggaaggaagggaggagaagcagaggagcaggaaaggaggaaaggaaggaggagtaggagaaggaggaagaagaagaagaaaaaaagtcaatggcctattagaaaggattcttagataaaagcaagttttctttgcagtatttgtatgccttccgttgcttttggccataaggacagtgctctgctggtgaattcattttctagatgcagcaagagcaggtatgctatgcttatgtcagagcaggtgattgggtgagaaggataagcagaaagattttgaaactgactctcaggcttctctgtctttgctagct

SEQ ID NO: 248621 - DNA, 3796 bp, Homo sapiens
  misc_feature (18)..(18): n is a, c, g, or t
ctattgaagccacctgcncaggacaatgaaattcttcagttacattctggtttatcgccgatttctcttcgtggttttcactgtgttggttttactacctctgcccatcgtcctccacaccaaggaagcagaatgtgcctacacactctttgtggtcgccacattttggctcacagaagcattgcctctgtcggtaacagctttgctacctagtttaatgttacccatgtttgggatcatgccttctaagaaggtggcatctgcttatttcaaggattttcacttactgctaattggagttatctgtttagcaacatccatagaaaaatggaatttgcacaagagaattgctctgaaaatggtgatgatggttggtgtaaatcctgcatggctgacgctggggttcatgagcagcactgcctttttgtctatgtggctcagcaacacctcgacggctgccatggtgatgcccattgcggaggctgtagtgcagcagatcatcaatgcagaagcagaggtcgaggccactcagatgacttacttcaacggatcaaccaaccacggactagaaattgatgaaagtgttaatggacatgaaataaatgagaggaaagagaaaacaaaaccagttccaggatacaataatgatacagggaaaatttcaagcaaggtggagttggaaaagaactcaggcatgagaaccaaatatcgaacaaagaagggccacgtgacacgtaaacttacgtgtttgtgcattgcctactcttctaccattggtggactgacaacaatcactggtacctccaccaacttgatctttgcagagtatttcaatacacgctatcctgactgtcgttgcctcaactttggatcatggtttacgttttccttcccagctgcccttatcattctactcttatcctggatctggcttcagtggcttttcctaggattcaattttaaggagatgttcaaatgtggcaaaaccaaaacagtccaacaaaaagcttgtgctgaggtgattaagcaagaataccaaaagcttgggccaataaggtatcaagaaattgtgaccttggtcctcttcattataatggctctgctatggtttagtcgagaccccggatttgttcctggttggtctgcacttttttcagagtaccctggttttgctacagattcaactgttgctttacttatagggctgctattctttcttatcccagctaagacactgactaaaactacacctacaggagaaattgttgcttttgattactctccactgattacttggaaagaattccagtcattcatgccctgggatatagccattcttgttggtggagggtttgccctggcagatggttgtgaggagtctggattatctaagtggataggaaataaattatctcctctgggttcattaccagcatggctaataattctgatatcttctttgatggtgacatctttaactgaggtagccagcaatccagctaccattacactctttctcccaatattatctccattggccgaagccattcatgtgaaccctctttatattctgataccttctactctgtgtacttcatttgcattcctcctaccagtagcaaatccacccaatgctattgtcttttcatatggtcatctgaaagtcattgacatggttaaagctggacttggtgtcaacattgttggtgttgctgtggttatgcttggcatatgtacttggattgtacccatgtttgacctctacacttacccttcgtgggctcctgctatgagtaatgagaccatgccataataagcacaaaatttctgactatcttgcggtaatttctggaagacattaatgattgactgtaaaatgtggctctaaataactaatgacacacatttaaatcagttatggtgtagctgctgcaattcccgtgaatacccgaaacctgctgttataactcagagtccatatttgttattgcagtgcaactaaagagcatctatgtgccttcatcaagaagcccatgttttgagattttgctcatgaaccatctgcaacttgcttcatcataagaataatttataacttgaccttcaaagagattagagcatttgtttcatcttacagttggagttcaatgtaacattttaaatgcaatttattatttcagaaatttcccatgaaactaaaaatagaaaataagatatacaagttaattcggtacttggataaatcatttctgcattgttgttccagagaatttgctgagaaatcaaagccatggtcatctggtgatgaagagaaaagtttaatctaaatgatatgtgcatttcctcatttaaaaaatccaattggattattcttaatatatacatgtaatatgaaaattgagattgaagcactaattccaaaattatggctgaatatactaaataacagaaaagttacagataagaatttatttctactgaactctatagttagtgtaatataattcatatttttatgatattggcacactgagaaattcattttgtagagctatggataaggcttgctatgatttgcactattagtacagtatagttagaaaggaaagctgaacactataaaactattaacatattttcgtatatgagtaacaactttgcttaagtgtttatcttagttcagaaatacataatgtcatatgttaaaaataaagagatgtagaaatctaaatgaattatcactgtgtatacagacagaaaaatcacataactctggtgtgttaacattgcaatgaaaaaatgaaaaaaagaaggaaaaaagaataagaatgaaaactgctgacgtattacaaaacagaaaaataaatgatttaaaatcaaatcaaaaagaaaaaactaaacatttaaacaaaaatgggataagaatagtcttctagaagtgaggatgcgaaaaagaatgagtttccaattaccctgatgtgacaattacacattgtagacaggtagcaaaatatcacatacacccccaaaatatgtacaaatattatatatcaataaataaatttttaaagagtaagtgctattggcattccaaaattcagctaaaggaaaaatgatcaaaaacaaagtaaggtgcacagttagcaaaagatgcagatgttatatcacagcaattctcatgctaaaaatacaacaaaagacaaagcaaaaaataaacctttgcttttttttttttttttttttttttgagacggagtctcgctctgtcgcccaggctggagtgcagtggcgggatctcggctcactgcaagctccgcctcccaggttcacgccattctcctgcctcagccaaacctttgctatttttaatcttcgttggcactttccagctgttactgaccttgtcattttttattcaaataagattatttacaaacttattcttgaaactaaatatagtaaagagggtttttaaaataatatttaacatacgaattattaattggccatgttcattatttatctatgtttattaatgggccaatgcaaaaaatcattttttcaaagaaaaatttgtccatgtaaagcttaaattataatattgctgctttgtataactcttctatgtttattctattcatttgttcctttccctaccatattttacacatgtatttataatctgtagtatttattacatttctgcttttttctagtcattcaatttatcactgctgaattgcatcagatcatggatgcatttttattatgaaaaaataaaatgacttttcaaatt

SEQ ID NO: 248622 - DNA, 829 bp, Homo sapiens
  misc_feature (18)..(18): n is a, c, g, or t
ctattgaagccacctgcncaggacaatgaaattcttcagttacattctggtttatcgccgatttctcttcgtggttttcactgtgttggttttactacctctgcccatcgtcctccacaccaaggaagcagaatgtgcctacacactctttgtggtcgccacattttggctcacagaagcattgcctctgtcggtaacagctttgctacctagtttaatgttacccatgtttgggatcatgccttctaagaaggtggcatctgcttatttcaaggattttcacttactgctaattggagttatctgtttagcaacatccatagaaaaatggaatttgcacaagagaattgctctgaaaatggtgatgatggttggtgtaaatcctgcatggctgacgctggggttcatgagcagcactgcctttttgtctatgtggctcagcaacacctcgacggctgccatggtgatgcccattgcggaggctgtagtgcagcagatcatcaatgcagaagcagaggtcgaggccactcagatgacttacttcaacggatcaaccaaccacggactagaaattgatgaaagtgttaatggacatgaaataaatgagaggaaagagaaaacaaaaccagttccaggatacaataatgatacagggaaaatttcaagcaaggtggagttggaaaagggcactgtttaactactgaaatgaagctattctcctgactaaacataactgaaaaaccattcattaaatgaaatgaccggaaaagttattggttcttctttgaatttcgccacaggaagaggaagaatcaaaccaacaaagggt

SEQ ID NO: 248623 - DNA, 1069 bp, Homo sapiens
  misc_feature (18)..(18): n is a, c, g, or t
ctattgaagccacctgcncaggacaatgaaattcttcagttacattctggtttatcgccgatttctcttcgtggttttcactgtgttggttttactacctctgcccatcgtcctccacaccaaggaagcagaatgtgcctacacactctttgtggtcgccacattttggctcacagaagcattgcctctgtcggtaacagctttgctacctagtttaatgttacccatgtttgggatcatgccttctaagaaggtggcatctgcttatttcaaggattttcacttactgctaattggagttatctgtttagcaacatccatagaaaaatggaatttgcacaagagaattgctctgaaaatggtgatgatggttggtgtaaatcctgcatggctgacgctggggttcatgagcagcactgcctttttgtctatgtggctcagcaacacctcgacggctgccatggtgatgcccattgcggaggctgtagtgcagcagatcatcaatgcagaagcagaggtcgaggccactcagatgacttacttcaacggatcaaccaaccacggactagaaattgatgaaagtgttaatggacatgaaataaatgagaggaaagagaaaacaaaaccagttccaggatacaataatgatacagggaaaatttcaagcaaggtggagttggaaaagcactggaaacttgcagttcaagatggctccccatctccctctgtccattctgtatcgcagctagctgctcaaggaaaggagaaagtggaaggcatatgtacttagaaattattctattactttcctggatttaagagtattcagattttctatttcaacatcaaacaattgcatttttaaaaagaaatttatgtgttccatgtcaaatttagtagtgtgtggttgtttataatattttcttatatctacttaatttctatagtatttatagttatatgtctttatttctaacatttttcttgtgcttttaaagattatttaaagattatttttaaataatctttatttcatttaaataaaatattttatttaagtcttttttaa

SEQ ID NO: 248624 - DNA, 1107 bp, Homo sapiens
  misc_feature (18)..(18): n is a, c, g, or t
ctattgaagccacctgcncaggacaatgaaattcttcagttacattctggtttatcgccgatttctcttcgtggttttcactgtgttggttttactacctctgcccatcgtcctccacaccaaggaagcagaatgtgcctacacactctttgtggtcgccacattttggctcacagaagcattgcctctgtcggtaacagctttgctacctagtttaatgttacccatgtttgggatcatgccttctaagaaggtggcatctgcttatttcaaggattttcacttactgctaattggagttatctgtttagcaacatccatagaaaaatggaatttgcacaagagaattgctctgaaaatggtgatgatggttggtgtaaatcctgcatggctgacgctggggttcatgagcagcactgcctttttgtctatgtggctcagcaacacctcgacggctgccatggtgatgcccattgcggaggctgtagtgcagcagatcatcaatgcagaagcagaggtcgaggccactcagatgacttacttcaacggatcaaccaaccacggactagaaattgatgaaagtgttaatggacatgaaataaatgagaggaaagagaaaacaaaaccagttccaggatacaataatgatacagggaaaatttcaagcaaggtggagttggaaaagaactcaggcatgagaaccaaatatcgaacaaagaagggccacgtgacacgtaaacttacgtgtttgtgcattgcctactcttctaccattggtggactgacaacaatcactggtacctccaccaacttgatctttgcagagtatttcaatacattccatccacacagaagaggagatcgtacaaggcatgtacaccaggaggcagaaatttgaggcatatcttggaactctgtctaccacatcctgaacatcacacagtttccactcttgttgccttcaatcctgagaatgcatccaggagccattctgttttatgtcaattactaattagatcatgtcacgttactaacttactacgttccaattagtccttattgcatttgtaataaaatccgcatactttcggactggctacaaggtta

SEQ ID NO: 248625 - DNA, 463 bp, Homo sapiens
gccgaagccattcatgtgaaccctctttatattctgataccttctactctgtgtacttcatttgcattcctcctaccagtagcaaatccacccaatgctattgtcttttcatatggtcatctgaaagtcattgacatggtgagttagctgaaaaaaatactatcaaatccaatacacatcttggtgtgtgccatgtcttgaattatcttcccttttatacaccaatcaaccaccaggaaaagcagggcctgaattctgtttatgaatgcagtgtgcatgactaatcacaaaattgtttttaagagtgattatcagaagtgaacatgccattaaaacttacggtcacaaacagagagatgttgaatgcatcattaatgctttggacgaaggaaaagagcactgaacatgctccacacgacagcataaacctacaagtcaacactaggatccaaactgatccagg

SEQ ID NO: 248626 - DNA, 437 bp, Homo sapiens
cctttctttctttctttctctctttctttctttctctttttctttcttgtctttctttcttgcattttagacagctaaaaaacacctcaagttgttatttgatgaggaatagcagttgaggccttactctctctttgtgggaatgatgtgccttgtgcttctttgaatatgttgtgtttgctttcaggtctttactttaggcaggagatacattcccaagaccattcacacaattgcagccagaggggtgaactgatggggagaatttgtggctgtgagactcttgttctttgaaaagatttgtgggtaggtggcaaattcctgtctatgccacagagttgtgtcacatccaggcccaggaaatgcctggttatgcattagttgtttggtagaagacattcctttgggctgtgtggtctattctctttgtgctaacc

SEQ ID NO: 248627 - DNA, 1467 bp, Homo sapiens
  misc_feature (22)..(22): n is a, c, g, or t
  misc_feature (28)..(28): n is a, c, g, or t
  misc_feature (39)..(39): n is a, c, g, or t
  misc_feature (72)..(74): n is a, c, g, or t
  misc_feature (85)..(85): n is a, c, g, or t
cgagtgggtccctgcctggagngctggntctcctcgcgntgctgcctgtgctcctcctgcagatcactgttnnnctcgtcttccnctgcctgcagtacagactgagaggaaaacttcgagcagagatagagaatctccaccggacttttgatccccactttctgagggtgccctgctggaagataaccctgtttgtaattgtgccggttcttggacccttggttgccttgatcatctgctacaactggctacatcgaagactagcagggcaattccttgaagagctacgaaatcccttctgagtgatgtcacatcttggcaggggtggaggagagcctggttgcccagggatttgtccttggggacatctcatccatcaagttgcacactcactggcatctttgctatggggacattccaatttgcactttcaggaacactctgaattccaagtagaattgatttcccttcttctgtcatctaccttttctcttcattttcccatttttattacccttctttccatttctctctccagtcttccacctggaagccctctctggctaaggacaggcaggtgcccctctctccatcagaggacacctgtactggagagcaacacaggatggtctctgccatgaactggaggccaggaatctcctcactgaaaattacagtatggtaactttgcaaatggtggttgtttcttccaagactccagccctgattgcgcaaaactgaaaggcatgtgaagggaaggaagaggaagagtgcaaaacattgaagagagagctgagtgagctgaagagtgaggatatgagtagccccaacccaaacctggagatggggagaaacctacagaatactagccagagctcctccttgtcttggcagcctactagggacctggggaagcaaaaacgaaagctgggcaacatgcctgctttagaatgttttccttctacttacacatcttccacaggtctcagaatctttccttcctctcatccttttctcctatcttcatatctatcagagtatccactgtttattcaacaactactacttgatggtcagacacaaacaaacaagctaggtgctaattaataaagatacgagttttggccgggtgcggtggctcacgcctgtaatcccagcactttgggaggccgaggcgggcgaatcacgaggtcaggagttcaagaccagcctggccaacatggtgaaaccccatctctactaaaaatacaaacaattaactgagcatagtggtgggcacctataataccagctactccggaggctgaggcaggagaatcgcttgaacccaggaggcagaggttgcagtgagctgagatcgcgccactgcactctagccggagtgacagagtaagactctgtctcaaaaataaataaataaataaataaataaataaataaataaataaataaataaataaaaaataa

SEQ ID NO: 248628 - DNA, 1917 bp, Homo sapiens
  misc_feature (22)..(22): n is a, c, g, or t
  misc_feature (28)..(28): n is a, c, g, or t
  misc_feature (39)..(39): n is a, c, g, or t
  misc_feature (72)..(74): n is a, c, g, or t
  misc_feature (85)..(85): n is a, c, g, or t
cgagtgggtccctgcctggagngctggntctcctcgcgntgctgcctgtgctcctcctgcagatcactgttnnnctcgtcttccnctgcctgcagtacagactgagaggaaaacttcgagcagagatagagaatctccaccggacttttgatccccactttctgagggtgccctgctggaagataaccctgtttgtaattgtgccggttcttggacccttggttgccttgatcatctgctacaactggctacatcgaagactagcagggcaattccttgaagagctacgtaagttctcttctctctgttataagcagagaataaaaagccaggaaagggagacagaagcaacaagaggaagaggcgggctattgagggatcacattcccagaggaaaggaggagctggagagcctgggtggagggaagactcctcctgggaggtagagggcaaagaagccagctgttagagacacatttacaggtggcagagaagctggaggcactcctatctgccacctgatccattcctccttcactgcccctaagcaggaatccaaccctagctggtctcattgcccattccacagcaactgcccagtgcctcacctctcagatcaaccattgaggcaggaatggagacaagatgaccccaagggcttttcttctccctagttcaatggttttatgatacaaactactgacatacgtttttcaagttattttctccttcttctaggaaatcccttctgagtgatgtcacatcttggcaggggtggaggagagcctggttgcccagggatttgtccttggggacatctcatccatcaagttgcacactcactggcatctttgctatggggacattccaatttgcactttcaggaacactctgaattccaagtagaattgatttcccttcttctgtcatctaccttttctcttcattttcccatttttattacccttctttccatttctctctccagtcttccacctggaagccctctctggctaaggacaggcaggtgcccctctctccatcagaggacacctgtactggagagcaacacaggatggtctctgccatgaactggaggccaggaatctcctcactgaaaattacagtatggtaactttgcaaatggtggttgtttcttccaagactccagccctgattgcgcaaaactgaaaggcatgtgaagggaaggaagaggaagagtgcaaaacattgaagagagagctgagtgagctgaagagtgaggatatgagtagccccaacccaaacctggagatggggagaaacctacagaatactagccagagctcctccttgtcttggcagcctactagggacctggggaagcaaaaacgaaagctgggcaacatgcctgctttagaatgttttccttctacttacacatcttccacaggtctcagaatctttccttcctctcatccttttctcctatcttcatatctatcagagtatccactgtttattcaacaactactacttgatggtcagacacaaacaaacaagctaggtgctaattaataaagatacgagttttggccgggtgcggtggctcacgcctgtaatcccagcactttgggaggccgaggcgggcgaatcacgaggtcaggagttcaagaccagcctggccaacatggtgaaaccccatctctactaaaaatacaaacaattaactgagcatagtggtgggcacctataataccagctactccggaggctgaggcaggagaatcgcttgaacccaggaggcagaggttgcagtgagctgagatcgcgccactgcactctagccggagtgacagagtaagactctgtctcaaaaataaataaataaataaataaataaataaataaataaataaataaataaataaaaaataa

SEQ ID NO: 248629 - DNA, 738 bp, Homo sapiens
atttctgcactgtaaaccttcacctacattttctagtggacctctacatctgttgtctgcaccaaacagcatccctacctttaggaaaactatctcccggtgtctcatggcaaagggcaaatgagtctctctgagccctggtttttgcagactcagcctcacaggacacaaacctgaaacgcagttgctcacaccctgtgtttacttttatttccagccacatctggaggccaaaattcataagtttgttgccaagccttacaacagtttactgagtttgtacgttaagggaagggggaaaaaatgctctcctgacttgtcgagtgtaaaatggatggaggaatcagtgggcaaaccctaaaccccaaccatgtttattaacatctgcggcctgccggcagacggggaaggcgtgagcgggctatgtttgtcttggaggttttagctcagagagctccatggtgtacgctctccatatatatacagccaggcatctttttaacccaccagagaccaggagagggaaacaagggctgttcagaagcggaggagcccaggtccgataggggaagagcagggatgggcacttggccgtgtttacaatcagggcagtgcagtgggtgggccgattcttgtgacgtacttgaggcttaaaaaacgatcataaatctaatgtctgtcaaacagggctggcattttcttttcctttcacaactacgttttgtatgaccaaaaaaa

SEQ ID NO: 248630 - DNA, 273 bp, Homo sapiens
caggtgatccgcccgcctcggcctcccacagtgctgggattacaggcgtgagccaccgtgcccggcaaaattcacagttaaatgtagtttattgagttgacaaatgcctctgtaatgtaacccacattccttgagaacatttccaaactttcagcaagttcccttgtgctgtttcccagttaatccctgccatatccccaatcactgtaggtaagttttgcttattcatgtaaaatggaattatgctgtgtgtacccttctgtatctagcttc

SEQ ID NO: 248631 - DNA, 391 bp, Homo sapiens
ctgaaattgtccgaatttggccagtgtattatattaagtgatagcaaatggagagaaaagaagaaaatgaatcttgacgagtgagctgccatcatttctgtggcagtctttaccaatactgttaaatttctacccattggatttttcaggcttctaattattggtatgtatattatatgtggtgtttgtgtagccactcaggattttaaatttgctttggtttggtttttttcatgttgaattaggtgggaatgtttgaaataaacaagaagataagggaagggctcttttctttccttttaagttccaggatacatatgcagaacgtgcaggtttgttacttagggatacgtgtgccaaagtggtttgccgcacctgttgacccttcctc

SEQ ID NO: 248632 - DNA, 364 bp, Homo sapiens
tctcttctttcagggtcactataaatgaattcctctattgatggccagtgatggtgggaatggggtggcccactaggcccctttgtcttttttgtcactgcctccataaatgtggtccttgcccctcctccttccaaagccatcttcctccacaggctgctgtttcctggtggtccctcataaggatgggcctccgcctggctcccactatggctcctcactagtattcccggaatgggaacaagcgtttgctgtgtccgagtcttggctgtattgcaacttcacgtgaaagccgaagggcctgtctgtatttggagcagacatagcaatgtagaagcaaaatatacatctcggggaatggagc

SEQ ID NO: 248633 - DNA, 727 bp, Homo sapiens
tatgcaatatgttggactagcatctcaaatatgaaaaaggcattgccaacagtgatataattttttttataacggtaagctttttaaagtataatcttattttaacctaaaatcttactatcagaaaatgcagtgtacattaaaatgttctgaaatgctttattcacatttattaaatggttgtactcactcagatatctacaaattggtttttcacttatgtaattatcttatagaatgttcaaaagtcatgcagaatgtgagataattttctattgaatatgattgttttatcattgcaagacatcaaacatccctgtttcctgccaaatgaatgtacaatagcaataaatgtaaagatgtgttttttggaaaagacacatttttgagttataaaacaaggattttaaaacttgaattgttacagtgagtatgtcttaatataggctacagtcactttagataaaaaattacctcacatctattttcaatattacttaaagatgttcatttagtggcaaatatttttttttttgcctagaggcagatattttgccacatggctatttatgaaactgtatttaaatgcatgtacacatataaaagctgccactgtggctgtaaactattacaagttatcaagattaaaaaataaacaaaaaatatttcagtttttctatgaaatgtctttactcgagtccaaatttagaggtttaaaatgcttcaa

SEQ ID NO: 248634 - DNA, 371 bp, Homo sapiens
tcctacactcagatcatggatggatgtctcaggtcttcccaggcacatttgatgttatgtaccagccatatgcatgtgtgtgtcatttatttttcactctacacaagtagtacctaatatggtgaggttgttatgattacagactctggaggcaaagttcctgggtataaatctgaactctgtcactcccaagctaagtggctttgggcaagtgatttcacctccatgtgcctcagtttgctagtctgtacaatgggatggtaatagcacctacctcatggacttgagaagtcagcaacttcatacctctaaagcccttagagctagcagtgtgtggcactcaataaaatgttgactaatgatgattctca

SEQ ID NO: 248635 - DNA, 377 bp, Homo sapiens
cagattgaaaataaatatggaaattactgaataaacttatcagacagtgataaggtaattcagtagagaatgattagattgctactttattctgagtttcactagagaagaaatatttaaactgagatctgaataacaagaaagaaaattcttcggggaaggagcattccatagggagaaaacatccatggaaaagaccttaagcctgggataaacctgatatgctcaaaacaaaataaaacatacacacaaaatgtcagaatgaatgatgcaatatattggatgaagaggaatgtgatcatatcattgtcatcctaatgacgacccctttgagagtgaaaggagatgatgctctgtataataataaccaggccaca

SEQ ID NO: 248636 - DNA, 445 bp, Homo sapiens
aaaaggtgaattaacttccacaagttcacataattggacgtgaagccaaggctacaaagcccagggttcatgacttccagtccagtgttctgcccactttatcagaatgcttccaataccacatcagccacccatggccaaggcccactcttcatacatcacagggaacaaaacctaaaatcttacactgtactattcaagccattaaaaatactttcactgcttctccaaattcacttctctttacccagtgctataatccctcttccttaagtcattctctttgtcacattcttaccaacatatctccgctactagattggtacacataccataccctggacagtcatttacttttatacacattacagccctgagaacaaactgcaagacccataaagagtcaaataggtttgcattttcaattctaaattcagagagagag

SEQ ID NO: 248637 - DNA, 324 bp, Homo sapiens
gatctcctgagctcgtgatccgcccgcctcagcctcccaaagtgctgggattacaggcatgagactctggtctttttaagtgattttaggtactcatcaaccaacaaacattaagaaacaacactttgcctacttgtaccagctgacatgaagcctgcagtacttgcccttatggaccttcaaactcacttcaattattcccttctggcaccggagaccgacttatgtcatctaaaagtcaaactaaaatctaatggcattaaaacaattcaagctcaggaatgacagccagcttgaattaatacatagtctgactttgaaaac

SEQ ID NO: 248638 - DNA, 337 bp, Homo sapiens
ggcaacaaagcaagacctcatttctacaaaaattaaaaaattagcgggtgcaagagcatgcacgtgtagtcccagctacttgcgaggctgaggcaggaggatcccctgagcccaggtgacagaggccacagtgagctatgattgtgccaccgcactccagcctgggaaacaagagcgagaccctgtctctaaaaaaacaaaacaacaaaaacaaacaaaaaaaatcatagttctactaggttgaaaatcgttatgttttggcaagtttctggcttaattaccaggtttaaaaataaatgtgtgcagtttatttcaattatacatcaagaaaaaaaaa

SEQ ID NO: 248639 - DNA, 480 bp, Homo sapiens
aacaaacaaaacattgttttaatgcctctagacatacacatcagtagccagtgtgcaccaacattgccctcagaaagtgataacttttaaaagttttattctcattaaattgtaagaggcaaaaaagaatgcaggtaggtactcattacctaattaacagtaacattctggaaagaacaaactttaagcagcaagcttggtgcacacaagccttgagaggccgctttcctccgggtccatctctggctaacaagcattgtccagaattaccaggatggagctgacaacctgacacttgccgcagagctctggagcacgcctacgcctcaggactagctaaagtgagccacacatgtgcagttgccctctttcatagcagaagtttcaaggtcttcaacccccattctttgactgagccactgaacagcagccagagctgaaccttaatctgttcccatcatttgttagctgacaaaatga

SEQ ID NO: 248640 - DNA, 462 bp, Homo sapiens
tcattttctccaccccccattaggccatcacttttatttcttgtgcatccctctagtgttttgttataaaaacactagcaaacttcttattctttctgctttctgttttgtgccatttcagtagagagagcgcctccttgctgtggtttacagctgcacaatagttcattctctgatgggtgcgcctttgtgtatttatccattcccctatacatgaacactggggtctgatcttttactatcacaaacagtgtcgcagagaataacctcgttcaagtgtcattttgtactggtatggctggaggacaaatctcagaagcaggactgtggggtcgaaagcaaatgcacttgtaatgtgtaatgttgacagtgagccacgatcactccaccgcactccagcctgggtgacaaagtgagaccctgtctttaaaaaaatggaaataaaaattcacacttatattc

SEQ ID NO: 248641 - DNA, 482 bp, Homo sapiens
tgctggaaagcctgctctccctttcccacagagtaaaggtaaagtcctcacgccagcctgcaaggccccatgtgaccttggttgctcatttcctctctaacctcatctcacatttgtccccacagctcactctgctccagccatccagccctccttgctgtcctttgagcaggctgaagacgcccagcctcaggagctctgccctggccagtccctctgactgctaggctcctccgccgggcatcctcacagccaactctcaccaactccagatcttcgcacaatagccatttcctctgttaggcctgtcctgtccaccataaggaaacttgcaactccctcagcccacagagcacctctcaccggctaacatactctgtggtcacgtgtttgctatctgcctccctaatgtctttgagaacattagctccctgagggcagaaatctccttcactgacatatcccgagccctatgcagtctc

SEQ ID NO: 248642 - DNA, 113 bp, Homo sapiens
aagttttagacagagcctcagtcctttaaccaattgcaaattaaagaatctctgaatccccgtaaaacctgtaagcccccacttcaagatatcccaacttttggggccgaagc

SEQ ID NO: 248643 - DNA, 217 bp, Homo sapiens
acagctgctttttatttttttgtctgtatcagctattggctcctatccccgcctctgggatccggcctgcgccgcggggtcctagggggccagcagctgtaaagcggtacgggattccgcaccctactccagcaagaaagagcctgaagcccctccccacctttcccggccagggcgctcttctacgtcccgcgcgcggacagccggggcgaagtag

SEQ ID NO: 248644 - DNA, 174 bp, Homo sapiens
ctgtcaatactaccaaagtctaacaacgacatgatttttaaattcctcttatcattcaggaggactgaagaagatgtgcttgccgaacaatgaagaaaagaacagctgacacactgcctaggtaactttaaattctactcaccaaactaactacatttgtccttaatacttttc

SEQ ID NO: 248645 - DNA, 274 bp, Homo sapiens
aattcatggtaatttcattcttctctaaaaccttataacagttccaaatataactggtacataattttcagtgtggatattgaagcctcaagttagaaattgcataattactgtgtaattatgtggcttttggtatgtatacacactgagtggctgcagaagggcttggttcattttgtacgcttataaactattcacctgctttgctggctttcttgaatttgcattcgtatattcaaataatacctcattttatgagcatttgcccatagcc

SEQ ID NO: 248646 - DNA, 260 bp, Homo sapiens
taagaaagtaaaggaataaaagggtgcgtactctatagacaagcagtcctgagggctgctggttgtctgtgtttatggttatttcttgatcatatgctacacaagggatggattatttatgagttttccaggaaagggatggggaagtctcagaaccgtgagtttctccacctttcaggccttatagggtaacttccagacatttcatggcatttgtaaactgtcacggtgctggtgggagtttcttttggtatgctaat

SEQ ID NO: 248647 - DNA, 377 bp, Homo sapiens
gcatgacgaagcccatgtaccctctcagcaggtgaaggaagagcagccagagcaggagggctggtttggaaccaggacccctgagtcccagacttatgcccatcccccaggcagagggttcacactgtcatccccctcaccacactctgtgcccctgcacccagcaaagccaccctgcttggatcagtgtccactgctggacgagacttgaggaggacatcactggagactttgccagggccctgggcctcggacctcagtcccaggacgtactctcagaccgttccaaggagcgctgtcttttggccataatgttccctctagatgcacattcccctttggaaacttccattcatcaacttcattgcatagagaaa

SEQ ID NO: 248648 - DNA, 433 bp, Homo sapiens
cagtgttagatgtgaatattattatatagccttgggtagcttttatgccaaatggcagagagaagatattgctcacttaagagactacagaatttcaggtagagtttatgtcaagttgctctttcttttaaagaaataaatcaaggccaggcatggtagctcttgcctgtaaacccagcactttgggaggccaaggcaggcagatcacttgagttcaggagttcaagatcagcctggacaacatggtataaccccatctctacaaagacatacaaaaattagctgggcatggtggcaggtgcctgtagtccaggctacttgggaggctgaggtgggaggatcgcttgagcccaggaggcgaaggttgcagtgagtggagatcatgccactgcactccaacctgggcaacagagtaagaccctgtctcaaatta

SEQ ID NO: 248649 - DNA, 370 bp, Homo sapiens
aaatttaaaggcaggatacagaaaaaaataccttaaaatataatgacaagacagtcttgcaagcaaagaaaaaggtgaaacatgagtaacagtaaattgccaaataaataatattataggcatatacgacatgaacaaaagtaacagaaaaaacccatagtggacctaggcaactaaattaatttgatatgcttaaagcataaaatggtggcgaaaggggctgaactacagttaaaaaaaaaagttggataagggacgggattatgacggctatttccgcccatgcaaaaaagtacattttagctgtttagtaatgaggaaccactggggaagtttcagtaagggaatgacatgtatacatctcgtttgg

SEQ ID NO: 248650 - DNA, 221 bp, Homo sapiens
gatcagctgacaccacccaaaccaataatatagctgctcagccagtctgccatcccacccagggacaaaagacagcaagaagaccacccttcaaccccctatgattccatctccaacctgaccaatcagcagcactccccacttccccagcctctacctgctagattatcttgacaaactctgatctaataataaacaataaaactccagtcccccacaca

SEQ ID NO: 248651 - DNA, 398 bp, Homo sapiens
ctaaaagcccaacaatgttttcctaaagaacagggcattcgctcttcatgagcaatagaaaacaggagccacaaagagccaagcagcaaagggcagagaatagatctagatagatgatgaagaataaccagtatacactctctgtcctcttaatctgttttgttgcagactgatgttttactctatgtctatgcatatgcacatatgcatgtacgtatacatgcgtgcaacttgatggcaaagatcccatcttgtatgttccttgtcatatcaccagctcctacggcagtaactgtcacatagtaaatattcagcaaatattcttttgagagaacgaatgaagatgcaatactattaaatacattcacaatttctcaccttgttcttttcactcaaca

SEQ ID NO: 248652 - DNA, 667 bp, Homo sapiens
aatcccagctacttgggaggctgaggcaggagaattgcttgaacctgggaggtggaggttacaccattgcactccagcctgggcaacaagagcaaaactctgtcaccagaaaaaagtaataaaaagaagaaaaaatttactgatgttgataacttactatgggtaggaaaatcctcattcttaggaaatacacactgaaatatttagggataaaggccatgatgtgtacaactttagttacctaatttagatcattcagaaaaaaaccacacataacaaaatgcaaaagggccaaaatattaccaataggtgatggggtaaaagatacatgagtattccttgtactattcttgcaacttcgtaggtttgaaattatttcaggccaggcacggttgctcatgcctgtaatcccagcattttgggaggccgaggcaggcagatcacgaggtcagtagttcaagaccatcctggctaacatgatgaaaccccatctctactaaaaatacaaaaaattagctggatgtggtggcatgcacctgtactcccagctactcgggagtctgaggcaggagaattgtttgaacccaggaagcagaggttggagtgagccgagatcgtgccactgtactccagcctgggcgacagagcgagattccatctcaaaaaa

SEQ ID NO: 248653 - DNA, 157 bp, Homo sapiens
gaagtggagttgcctgagcaatgtccactcttcctcagctaccagaaaattcctctggatagtggtcacaggagccgattggctccccaaagaggagttccttaccagttttaaatctggaagctgagggaggaaaagacaattgtttggcaaagaa

SEQ ID NO: 248654 - DNA, 254 bp, Homo sapiens
gtgatgatgaacctactctttctttgactttgagggagtcatttatagtcctccaaatgaagaaacttagtttatttctccatttctaaaaacactgtctttacttggctagaaacattgggggaaagaacaaaagatgcattgttttataaagctcctttaaaaccagcaaatcattttcacatttatattacttttgtaaagtcttttcaaaatattacatctatggtgttataaaaaccaattgtaaatcc

SEQ ID NO: 248655 - DNA, 373 bp, Homo sapiens
catttctggacccactcagggcctgggggacctcactgccttgaagggaaaaacacaggcctggctagctttgccacttggtaagtgtagtggaagagaacaaaagtatctccctggtaatctagagaatcatcacagattttgtccaacaccatcaagccagtacctatacaagtttgcaagaaccacattattactgggcttggttccatatctttaaagcaggtacagcttagatcacaacaccaagtccttgtgaatatctggaaagccttttcaagaagtacaggtacccagacagtgacaactatatgcctaactcttcaatgcccggaagaagacaaacatctacaagtatcaatacattccagaa

SEQ ID NO: 248656 - DNA, 277 bp, Homo sapiens
aatgaactgaatctgttggaattgataaaggatggtgtggagtggcttgttacatgagtttgagtgacacaaacatgtatgaggaaaaactttcaccatttcagctatatacatattctaggaaattaaaggcaaaaaaaaaccaaaaccttagattagacattcaacatttaattgaagtaatttatgggaattgctaactctttatagatgaatattgtatggtaattattatttattcattcagctaatgtgggtgagcaccttctatgtacca

SEQ ID NO: 248657 - DNA, 323 bp, Homo sapiens
ttcaaaaacaggaaagtctcttgtttgaaaaccctctaaagcaacatgtgggcttagaaaagaagccggcttgtggtttggtgattgtacttccttattgatataatggccgctgacgcaaggcctcctgggattgcagcgcggtgaccgcaggcctgacggttaccctgaccgggttctgaaacagcccggggctttcagcacagatgagaagtctaaaaatttcccttttcatttcctctcttgtgtgactttgtcatttttaaaaaaactggtcacagaaaagggaattttgcccatgcttttaaggagtttatctcgac

SEQ ID NO: 248658 - DNA, 1268 bp, Homo sapiens
atggggaaagtgtcctgctgtggcatgaaataaatgaaacagaaaatgatggcaagactgctaagaacatcctttgctttgctcttccttggcctctttggggtgctgggggcagcaacaatttcatgcagaaatgaagaagggaaagctgtggactggtttactttttataagttacctaaaagacaaaacaaggaaagtggagagactgggttagagtacctgtacctagactctacaactagaagctggaggaagagtgagcaactaatgaatgacaccaagagtgttttgggaaggacattacaacagctatatgaagcatatgcctctaagagtaacaacacagcctatctaatatacaatgatggagtccctaaacctgtgaattacagcagaaagtatggacacaccaaaggtttactgctgtggaacagagttcaagggttctggctgattcattccatccctcagtttcctccaattccggaagaaggctatgattatccacccacagggagacgaaatggacaaagtggcatctgcataactttcaagtacaaccagtatgaggcaatagattctcagctcttggtctgcaaccccaacgtctatagctgctccatcccagccacctttcaccaggagctcattcacatgccccagctgtgcaccagggccagctcatcagagattcctggcaggctcctcaccacacttcagtcggcccagggacaaaaattcctccattttgcaaagtcggattcttttcttgacgacatctttgcagcctggatggctcaacggctgaagacacacttgttaacagaaacctggcagcgaaaaagacaagagcttccttcaaactgctcccttccttaccatgtctacaatataaaagcaattaaattatcacgacactcttatttcagttcttatcaagatcatgccaagtggtgtatttcccaaaagggcaccaaaaatcgctggacatgtattggagacctaaatcggagtccacaccaagccttcagaagtggaggattcatttgtacccagaattggcaaatttaccaagcatttcaaggattagtattatactatgaaagctgtaagtaaacttggtgaaaggacacaggtactatcattgaaaaccttgacaatgggtcttcttccattacaccttctttatattttaaaggcctgtgaatatacttataacctgcatatcacaaaataaaacatttttctctcatgtttaccattta

SEQ ID NO: 248659 - DNA, 701 bp, Homo sapiens
tcatagtaatgatgataataacttacatttgcacatcactttagcatttacaaaatgttttctcatccactatctcaattatgttgttattattgtgctcgtgacatccacatatcaggggtgaaagatgatttccattccagagtatattttcagggactaatctaagtgtaaataccaacctcactatctttctcctcctaaaccctagacatctttgcagcctggatggctcaacggctgaagacacacttgttaacagaaacctggcagcgaaaaagacaagagcttccttcaaactgctcccttccttaccatgtctacaatataaaagcaattaaattatcacgacactcttatttcagttcttatcaagatcatgccaagtggtgtatttcccaaaagggcaccaaaaatcgctggacatgtattggagacctaaatcggagtccacaccaagccttcagaagtggaggattcatttgtacccagaattggcaaatttaccaagcatttcaaggattagtattatactatgaaagctgtaagtaaacttggtgaaaggacacaggtactatcattgaaaaccttgacaatgggtcttcttccattacaccttctttatattttaaaggcctgtgaatatacttataacctgcatatcacaaaataaaacatttttctctcatgtttaccattta

SEQ ID NO: 248660 - DNA, 1335 bp, Homo sapiens
atggggaaagtgtcctgctgtggcatgaaataaatgaaacagaaaatgatggcaagactgctaagaacatcctttgctttgctcttccttggcctctttggggtgctgggggcagcaacaatttcatgcagaaatgaagaagggaaagctgtggactggtttactttttataagttacctaaaagacaaaacaaggaaagtggagagactgggttagagtacctgtacctagactctacaactagaagctggaggaagagtgagcaactaatgaatgacaccaagagtgttttgggaaggacattacaacagctatatgaagcatatgcctctaagagtaacaacacagcctatctaatatacaatgatggagtccctaaacctgtgaattacagcagaaagtatggacacaccaaaggtttactgctgtggaacagagttcaagggttctggctgattcattccatccctcagtttcctccaattccggaagaaggctatgattatccacccacagggagacgaaatggacaaagtggcatctgcataactttcaagtacaaccagtatgaggcaatagattctcagctcttggtctgcaaccccaacgtctatagctgctccatcccagccacctttcaccaggagctcattcacatgccccagctgtgcaccagggccagctcatcagagattcctggcaggctcctcaccacacttcagtcggcccagggacaaaaattcctccattttgcaaagtcggattcttttcttgacggtatgaaagaccatcatcaaacaacatgctgtataattctgctgttgaactgactagggatagcttagagaaatattttgagtattcagagaaagagagatgaaaaaagggagcaaaagaaaaggaaaaaggaaagtcacggatcagttcaaacatcagccggctatatgagtcaaccacaaaagtatctcacaaccatccagccacgggccagtgaaaactcagtctccatcctctgcttggcaaggggccatagccatctccatttcttccattccctgagtggttattttaagccttctttactctcaagccctttacactactctgcaccctcactcatggcttccttttttccttcataaatagaacaatgttcactagggagaaaccacttctatatgctaccccccccccacccctccaacaatcttatctgttctccttcctttttgcagggtttctcccacccccaaagaagtgatgcaccccctatgctctgaaacctatctcagcctcagcataccttgatttgtccacctgatctgttctctgtg

SEQ ID NO: 248661 - DNA, 688 bp, Homo sapiens
catggaaacagcctgaattcgccgtagccggaaattagtgttccatagtcccctgcatctttattcactgcacttctgaaatccctccgcaggttaaatggggatagtgggcaaaagaaggaaggaaactcataattaagcaagtattttctggttctggattttgctagagaggccctgcggttttccacctggacagatacttcaatgaagcacaacttcgttgccacgtctcccgtgaggttttccccgtgatattagactctggagccaagcagcctgggttcaactgccttttctaccacttagtagctgtgtgacgttgagcgggtcacttgactgtcgtgtgcattgttttccccatctgtaaaatcttagtgtccttaaccacgtaaaacacttaggacagtgcataggacgtagggagaactatagttattcattcaaggtgtacgttgaatgaatcgatcccttccctgcaaaaaataaataaataagtaacaccacacacaaaaagaaagtgaattgatttttcccatctgggattgatgtctccctcctccgcttgtcgcctaaagcactttgttcttctcatgttgcatttctactctgttacagaaatgtgtctctatagtccatgtgatatctgtaaaccaaaaataaaagtctaagccccccaactgactgg

SEQ ID NO: 248662 - DNA, 218 bp, Homo sapiens
agaaacaggcatttcagaggcccattcttgccacgttgtcagataagtccatgtgggaaaaagaggccacctttgggaggtaggattatgggtaaatgttagtatcttcctttcacccttctgcattttccagtttttctataacttttttttttttatggagaagaaacaactccattatgtgtctctaagtcaaataaacaggccctcattatacc

SEQ ID NO: 248663 - DNA, 428 bp, Homo sapiens
aagacctcattttgttgctgaggcagagctttgtgttgccatagagacagaaatgccaatttgtagagactcttagactcccccgaatggccttccagagccaaagcaaaacataagcttcttttgcagtgaaaaggacccatctataaccctcctgtgggtccacgagatggtatgcttgtgttccccttaaggttttttttttattttttgcctgatttttacattatgtatttgtatgtcagattacacgtgtgtttgtgtgaaccataaatattctatttttttagatttatgcaaagttgtgttttaccttcataatttaagaaggaaaaataagcctctagaaacataaacgtggtattattaggagaatttcatcgaattctggtgggcaaatatgacaactaatattttataaaaaaaga

SEQ ID NO: 248664 - DNA, 442 bp, Homo sapiens
aagacggaacacatttctacacccagtgactggccaggtcccagaggaaaacaaaaaatttgacttgaaaatgtaagtgtgtcccctacttgctgtttgggctttctgcccttaaccactaccatcccactgcctccttgcagctggaaagcagaaggcaacagggaggggaaggaaagcagaagggctttgcagtcactcacctcggttctgaggactggaagcatctgagacccatctggcttgacaccctcatccacttttcctagggtctagcaaaagccagggtggtgcaccccacaggttgagctgatggagtagaagacaggtatgaggctggcatagcacccaggggcctttgacggaagcgctgagaaaatctgatatgatcatgagagccaaatgctaattcctctcactgtggatcctggctcaccaaatg

SEQ ID NO: 248665 - DNA, 337 bp, Homo sapiens
ttcctttatgttctactttagataagatagattttcttagtttgggttgctgttaacaaagtaccctggattgagtggcttataaacaacggacacttcttcctcacagttctggaggctggaagtttaaaatcagggtgccagcatggttgggttctggtgcagggtctcttccaggttgtagactgccatcttctccttgtatcctcacatggtagaaagagggtgagtgagagggtcccttttataagggcactaatctcatcatgagggctccatcctcattacctaaaaatctcccaaaggaggggggagggatagcattgggagatatacc

SEQ ID NO: 248666 - DNA, 569 bp, Homo sapiens
tgatattcctgcattctgtgggaggttattctttgcattgtaggatattaatagtatctttaggctataccaccacataccagtagcatcaccacctaatcattataattcaaaatgtctccagacactgacaagtgttctatggaaacaaagtcattccttgttggaaaccacttgtaaacaaaaagtctagtaatggtggaattatacagtgacagaaaagctcaggtttttctgattaggttgaaaaagctgctcagaaattaaatcctactgtgttcataaaaaacaaggaacccagccctgaagcaaagaactcatcagggaagttgttttctctttcaagtctatgatttcaaatgaccttaaagtggtcatctttacagtcagagaagcatatgtgtgttggggaggagaaaaaagaaggaaatgaggcagactttagaattatacctaggaaagaactgtatgtttggttataaactagatccaataaataaataaatggtttccacataactacttggcaaaggtacaataagcctattgtgagaaaaaaaaattaaggc

SEQ ID NO: 248667 - DNA, 484 bp, Homo sapiens
tttactctctaaattacttctccatttttcccctttgtttttctcttgaagaactggactccttgaccaatagggttttccacagtgcgagtcttgctaattgcatgctcatgattcagctcagtatatccctcaatcctctatttcttgcaaactggcagctggattcagagatttaatgaaactcaggtttgccatataggaggcacaaaatgtctggttgtctctcctgttgagatgatggtaggtacaggtgctaaaatgtctacgtgggtggtgggttggggagaagttgttgcaagatggtggaattctaagtctaaattttacgtttcatttataagttgaaacactctttatttttatttatttattttttgaaacggagtcttgctctgtcacccagctggagtgcagtggtgtgatctcggctcactgcaacctctgcctgggtgacagagtaagactctgtctcaaaaaaaaa

SEQ ID NO: 248668 - DNA, 365 bp, Homo sapiens
tttttttttcttaatcacttttatggggtttggttttgtgtttgtttggttgtttgttttgagacagagttttgctcttgtcgtctaggctggagtgcagtggcgcaatctcggctcactgcaacctccacctccagggttcaagtgattctcctgcctcagcctcccgagtagctgggattacaggcgcccacaaccacgcctagctaatttttatatttttagtagagacagcgtttcaccatgttggccaggctggcctttaactcctgacctcaggtgatctgcctcccttgacttcccaaagcaggaggaatggttgagctcaggagtcagagaccagcctaggcaacataaattaaaaa

SEQ ID NO: 248669 - DNA, 348 bp, Homo sapiens
actgtggcttcttcctagctctctcttttggattgctcattttgggggaacgttagcggccatgtcatgaggacactcaaacagccttgtggcctcctgccagcagctgagtcccatgcccaaagattctctcagagctcaaaataatctattttatctgcggttatattctttacttaatcctcatactgcttttgggtttttctcaccaatctttggttatgttaagtttgtgtttgtgttggcttattgcagatttggtttaggttcattgttcttttaatttttatttatatttagccaattcaataatttctttttatctgtattaaatctttctttgaaaaa

SEQ ID NO: 248670 - DNA, 388 bp, Homo sapiens
gcaaagggaactctgatacactgctgagagtataaattggtgcaactatttcagagactaacttacaatatctaatatagttgaagatgtaatatccaagaacccagtgatttggctcccagatattaacttctggagaaagttttgcatgtgcgtacaaggaaacacatacaagaatgtgtattgcagcattgcttgtaataatggaaattggcaacaaaatattaatgatagggttgaccaataagttgtggttgattgttttactggccaataaattgtggctgatttttttactttaacataggagttagaatgaataaatttagagctaaatctatcatcatgaatcaaccttgaaaacaacattcagtggaataaaaagaaa

SEQ ID NO: 248671 - DNA, 437 bp, Homo sapiens
caaggagtaatgctgcttttcacacagaaagggcttctactgtgcctgaccttaagacaggaaaagtaggggagctaaggaagctacctacaccgccctcacccccagtagccaggctcaggaaggaagaggcacagcggtgtgaatggatggagaagaggaggccggtaggctgagcccctggctcctggaacgaacacacagccatggcagaggagaatgtggcttgaataggttccatgacttgtacaagaccacagctggtacatgatgaagcaaggacaagacacgggcatctgacctcaagagtctctccaatcatgaaatacctgtatgagttatctattgctgcataacaaattgccccaatatttagcagcttaggagcaggattgctggaatggtgggataaaacttagtggcttaaaacaaaatct

SEQ ID NO: 248672 - DNA, 468 bp, Homo sapiens
acagcagagctgttcaaagaataagaggaaaaaagccgtgtgtgcatgctcacccaaaaggctctgtgctgttgttctacattggaacaaaatctatctttgcaacaagtggatggaaatgcgtattaacgtatttgagcctcttgaggggttggaatatcagccttgccagccacagggcagtggtggacttgagcagagggaggaggaggaggaagagggctgagccactctctggcatcctcaggtcactcttcagctgccgttttgaggacattttgcaaggattagctcagggagagccccacagggtgcaagtccacactgccgagcaggacttgaatgctacgagttgtctgccttgggtctgggaccccagggtcaacgggacccagagaggcgcctgtcatctgtccctggaatcgcttctgattttttttaataaagttcatacaaatagaaattcta

SEQ ID NO: 248673 - DNA, 460 bp, Homo sapiens
gctgaaagtgaggtggccctagagacactagagtcaccagccaccatcctcagagctttgaactccccattccaaaggggcacccacatttttttgaaagactggactggaatcttagcaaacaattgtaagtctcctccttaaaggccccttggaacatgcaggtattttctacgggtgtttgatgttcctgaagtggaagctgtgtgttggcgtgccacggtggggatttcgtgactctataatgattgttactccccctcccttttcaaattccaatgtgaccaattccggatcagggtgtgaggaggctggggctaaggggctcccctgaatatcttctctgctcacttccaccatctaagaggaaaaggtgagttgctcatgctgattaggattgaaatgatttgtttctcttcctaggatgaaaactaaatcaattaattattcaattaaaaaa

SEQ ID NO: 248674 - DNA, 335 bp, Homo sapiens
ccccagaaactgcctgccatagagaccaatgagaattcatgaatgagctgggcatggcggcgcatgcctataatcctagcactttaggggctgaggctggaggatcactagaggtcaggagttcgagagcagcctggccaacatagtaaaaccccgtctgtactaaaatacaaaaatcagccggacgtggtggtgcgtgcctgtaatcccagctacttggggagcctgaggcatgagaatcacttgaacctgggaggcagaggttgcagtgagcagagattgtgccactgtactccagcctgggcaacagagcaatactctatctcaaaaacaaa

SEQ ID NO: 248675 - DNA, 435 bp, Homo sapiens
agaattcctgtttaatttgtcctgacaaccttcctctccccatagtagctgtcttgcacacaaaagatgctgtcatactacatttcaccaataggtggcacgaataatcatgacatttgctaaatccagttggtatttacacaagaggaaacatcatttgcagaaagttggcaattataggtaaatatacaaacacagaaattgaaaatagcctgtttgctctatgtaacacgcataaaacctgaatacatcccaattctaagggataattattgatatcattcaaactttctatttgttttaaggagaacatggaaaacgtatttcttggtgttgacgtttatctctacaatgtcaacatttttagtgttaaataattgaggccagttatgtttatttattcttccgcttaataaaagaaaaagtaaatagaat

SEQ ID NO: 248676 - DNA, 510 bp, Homo sapiens
cactaagcaagcagaaataaccctctggggcacaagcaagccaaagctggcaaatagtacacagagggaattgggaatacagagagagctggggtgttgatgttgacacaaggcctggatcacatggtgtctgtgtggggaaggcctaaggaaacaacaggagccaaggttaatgggcggatgagcggaggcggccaaggcgctgctgtgggcactgctggaaatggaggctggagagctgcaagaacctagtactcttctgtgcacagcttgtcgagattcgaatctcgacaagttgtgcatgagtccatttgcttaaaactctgaaagaataaagtggtaagaaaacaagaaaaaaaattgatgctgcattctctgatcttctccatttggctggtcagtactctactctggcatatcaggacggaggtgatcctctatggtgccaattgcccaattgggttgagctgtacctgtggcagggtagaggcagatgctgcacaagttgtc

SEQ ID NO: 248677 - DNA, 458 bp, Homo sapiens
ttagttggattgtctttttattattgagttctggatacaagtcccttattagatacataattcgcaaatgttttgtcccattttgttagttgtcttttcacttccttgatggtgtcctttgcagcatggaaattttaaattttgatgaagttaatcttatctatcttctgtcacttgtgcttttggtgttatgtgtaagaaatctaagatcatgaagaattgcctaatttaagatcatgaagaattgtttattttcttttaagagttttatagttttagctcatatatatatatgtgtgtgtgtgtatttttttctttttttcttttttgagatggagtcttgctctgtcaccaggctggaagcgaaactccatctcaaaacaaaaaacaaaacaccaaaccgatatcatcataatagttataagccttcgtgaaattcttggttgcattttgtcctt

SEQ ID NO: 248678 - DNA, 465 bp, Homo sapiens
agcttgtttattgctttatgtatgtaggtaacttcataaactcccaaaaagcccataattgatttcaaacagcaaaaagaaagttacatgataattttgcccttggcttgaaaacattttattggtagacgatataagagggagggaaagaaacagcttaggttagagacggaaaacctatcaatcttgggacaagttaaagagcttcaagaaataaattgtagagctggctgactcagccatagtagcaatgctataaatcacttgcagacaaggggcatcacagtgccccttcatgaggtgcagtcttaggtcttctgagtcttagctcctacatcactcaacctgaaccacaaattccccacctgagaagttaaatcacagtaaacttctgttctgattcacagaggggaagagtaatttgagttaataaaagttctgaaatgcatttttttaacctcacat

SEQ ID NO: 248679 - DNA, 743 bp, Homo sapiens
agtgggaaccgctagctttgcagaacgcagagtccctcctcaccctggcggtcccggtgccctggagtgcagtcgcggaatactgttcagcggctcgggtggttttccttgcgtcccgccacgcggcggctcctcactaaaaggctgccttctccccacagctccaggtccgagaggagccgcaccgtcgggttggagatcgcgcgcaagggtggcctctgggtctgcatctgccccgcatcggccacaggaaaagcctggtccctaggcacggtcgtggttcgagcttttcgttctctcgcacattgaggtattcgctcagcccaccacgttgtcctcggggttattaggccccagtcacaagccctatgatgttttcagacttcccaggtggagataaaggaaaattttactatttctgcagaacttctgttgatgtacagcattgtatttagcaacttctgtgtagatctgaaaataaatacattaccaattgttacacaacaaaaaaaaaaaaaaaccttcgggggcctctccatattgttcggggtgcggaaaacaaggcggtacagcgacaaaaggggcaccagggcacaaaaacagagagacccatgggccacagcatttctgtgtcccaacgggggacgactctgccgggacccccatattagggagcccgcatactttcggaaacccagggtaaccgcgattctgacccaggaaagagaaagcagacacgcgac

SEQ ID NO: 248680 - DNA, 402 bp, Homo sapiens
tttcagacttcccaggtggagataaaggaaaattttactatttctgcagaacttctgttgatgtacagcattgtatttagcaacttctgtgtagatctgaaaataaatacattaccaattgttagttgcgtttttattaatataaatcttagagtacttgattttgctgttagctttacttaggtaaattatgtggcactctagcatttttgttgttgcatgttccattgaactttgctctgtgttttccatttattccaaattcaaaatagactgtaacttcccaatttattctatgttcccaaggcaccaggcatagtaggtgttttatgaatacctgttgacttgaaatttctcagacttttaaaaaatttttcattactgacaaaagatggagcgata

SEQ ID NO: 248681 - DNA, 827 bp, Homo sapiens
tattgttaaacatttggccagctgcagtggctcacacctgtagtctcaactatttggtagggcgaggcaggaggattgcctgagcccaggagtttgaggctgctatgagctatgactgcatctgtgaatagccacttcactccaccctgggcaaaatagcaagactctgtcttttaataaaaaaggaagattaaaaatttgtatgcctttttcacaattcgttttcaactaccattctgagggtaaaggagaagctttccctttgttcctacgttaccactgaaacttctgattgattaaataaacaaacacagtagcattctaataaaccagtagagtttctccgtaaaaaaacaacaaagaattaccttctaggacaaaactgatttcattgctaaataaaataaagacaaaaatgtccaacacattattcaaatgtcttacttattgaaatacaaacggatgtatattacattattgtaaagaatcataaacccggctacagagttaatcatgtatgttcttagagaaaaatacaatgagctattggccaaacagctttatcaaagatcttattgtataaatatggtactgttggggctcagaaaccaataccccaaaatatggccctttgacatgctgaatggaagaagcctcaaggcctctgtgacctttcccatgtgctatctctcaattctgtatgacctcccacaaagcacaggctaaagttgttctctgaagttcccttacctccctggagtccagatttgccaaagaaaacaattacctccaaatcctgtccctgagttttcattaactgaactcat

SEQ ID NO: 248682 - DNA, 662 bp, Homo sapiens
caagcgtgaatctggaagaaatcaaaaccctgaacagactaatatcaagttataaaattgaagcagtaatgaaaaaacctagcaaccaaaaaaaaaaaaaatcccccaacaagatgaattcacagccaaattctaccagttatgcaaagaagaactggtaccaattctactgtaactattcaaaagaatcttgctaccaaaagttgtcaaagatacaacaaacaaagaaaaccacaggccaatacccctgataaacaaaaacacaaaaatcctcaacaaaatatggatggcaatccaaattcagcagcatatcaaaaagctaattcaccatgatctagtagacttagtacatgtgatgcaaggtttctttgacatgcaagtcagtaaatgtgattcaccatataaacagaattaaaaacaaaaaccatttgatcatgtcaacagatgcagaaaaagctttcaataaaatccagtatcacttcatgataaaaacactcaacaactagacattgaaggaacatacctcaaaataataagagccatctatgacaaacccacagctaatatcacactgaatgatcaaaacatggaagcattccccttgagaacttatatgagaaaaggatgctcattctcatcattcccattcaacatcgtactgg

SEQ ID NO: 248683 - DNA, 464 bp, Homo sapiens
tatgtttatcataattgaaatgttcccttttttaattacttgtgatattacatacattgaactttttgaagtttcaccaacaacaaaaaattgacattcaggtacagtagtgatctctcttgatatgggggatacatttctgtttataaaatggttattgagataacttcaaattaaaagcatatttgatagatacgctactgctcatgtgtgggagcctggaatttggaagtcattctatgcattgtaaatggagttgtaaatgttaagctgtgtgtatgcacatgcatccagacatccacacaaatatatgggcaactgtaacccaagttgggtgacgtataatgaagcaaacatgaactctgagtaatcagaaaaatcttaaaagagatgggaagaaatccatttttttttagttagtgataataaattttaaaactaataaaatattttaaactcagata

SEQ ID NO: 248684 - DNA, 469 bp, Homo sapiens
tgtgcttgcgcagtctctcggtgtgttttctaacatttcacaattaaataaggagtagttgatattcacagccaccatttccaccgtatatgtagagaaaaatgctcaaatcctagcgatcagcccgctgagctttcacaaaccgaacacaccgtgcggtcacgaggcggctctcccgaacaccggctctgcacccccagggcccggggaaccaagacttccccaagggcccagcaaaagtgagggaggaggggaggaaaggagggagagggagggaggagtgctggctgctttccgccagcgcctcgtttgggtttcgctctgctgaggcctgaaggcgccctgagggcccctggggggcagggaggggcggtggctgcggccgacagcaaggaacctccggagaagcgaagccgggccagacgtgccaccggggcctcggcgctggcgaaggggcgcgtgcggccgc

SEQ ID NO: 248685 - DNA, 391 bp, Homo sapiens
taaaaatgctggagtttggattaggtcaatgtttagaacttttgaggagagaacacaatccactttccaactaaaacaaaaaatctcggccaagcgtagtggcccacacctataagcccggcactttgggaggccaaggcgggtggatcacttgaggtcaggagttcaagaccagcctggccagcatgatgaaaccccatctctactaaaaatacaaaaattagctgggcatggtggcgggcgcctgtagtcccagctacttgggaggctgaggcaagagaattgcttgaacccaggaggcagatgttgtagtgagatcatgccactacactccagcctaggtgacagagtgataccctgtctccaaaacataaataaataaaatgaaata

SEQ ID NO: 248686 - DNA, 319 bp, Homo sapiens
ccagggatctaaaaaataaaagctatgccttgtaaaaacttacttgtaaacttcacaaaactgtcccatgtcaggtgctattgttttatactagcacttatttacaccttttcaacataggttaaggttttccaatgaggactgaaaaggcaaaaaagtagttaaatactgtttaaaaacattatccccaggtttaaactgcctctaactttgaagtcaaacaagagtttagcaattatagttgaaataatttaaaatctagcaaagttgcataaaataaaatgaaagttacacacagcctaccaacaacaaagttaaa

SEQ ID NO: 248687 - DNA, 671 bp, Homo sapiens
tttttttgagatagggtctcactctgttgcccaggctggagtgcagtggcatgatcttggctcactgtaacctccaattcctgggctcaagcaatcctcccacttaagcctcatgagtatctggggctacaggtgcacaccaccatgcccagctaattttttgcagagatggggttttgccatgctgcccaagctagtctcgaactcctgggctcaagcaatctatttgcctcggcctcccaaagtcctgagattacaggtgtgagccaccgcatgatttattttttggtttatctatgctgtttatttccttagactataataaaaaacagctaacattaatgagacttatttgatatcaaacactgtatactttaaagtatttatatcagcctcttaatttccaaaaccaacacttttacagatgagaaaatggaaacttagagaagtgaagggccatatccaaagtcctagagctaataattgatacagtcagtatatgaacccagttctgtataattttctcagggagtttttgtgacctgagttgttttgtctctagcattgttcttccctctatggaaatagaacttctaccaagagaagagatcaagcagagtgcctatggcccatcactgggcatcttcacttggcatctgaaggcacctatg

SEQ ID NO: 248688 - DNA, 232 bp, Homo sapiens
ccccacaagtggacctgccgaacctgcgtgtacagagtcggccctccgacacacgtttcacatggcaggaacactgtattttctccctgagtttggttgaaaaaattcacatataagttgacccacaaagctcaagcttgtgtggtacaagagtcaactgtatgcaattgacactgattcctaccaacgatatccaaatcttagcatgagcagcacgataaacagaatgagc

SEQ ID NO: 248689 - DNA, 371 bp, Homo sapiens
ttcatccttctacacaatgatgttgataggtcacttcactagtagagggtgcctctctgaagagatgattatgatgcaaccttcttgtgctggtttgttttgggtgactcttatataatccatgagataatgttggggtactggaataggagctagagaatataccagaagagaacacaatcatgcaacatctctcaaatatattgtattagtctgttttcacggtgcagataaagacattcctgagactggacaatttacaaaagaaagaggtttaattggacttacagttccacgtggctggggaggcctcagaatcatggcagaaggcaaggaggagcacgtcacatcttatgtgggtggcagcaggc

SEQ ID NO: 248690 - DNA, 846 bp, Homo sapiens
cctgaggtcaggagttcaagaccagcgttgccaacatgttgaaacagtgtctgtactataaatagaaaagttagccaggcacggtggtgagtgcctgtaatcccagttactcaggagtctgaggcaggagaatctcttgaacttgggaggtggaggttgtggtgagctgagatcgtgccactgcactccagcctgggtggcagagcgagactttgtctcaaaatgaataaataaatagacattgactacagggtaatttctatgattatattatttagaagtatgaataaaatgcatacatttgtgagtcttgaatacgtattttaataaatttcttatatatttttatttgaacatgtggcctctctgcctgcaaacacacagacttttaattttgatttacataaagttaaaaatatgcatgtattactctaaaccttaggaaagaaaattatggagtgagtgtgtttgtatgagcatgagtttgtacctattttcagaagaatagagcaatatcggaacaaatcattttaataaggtgattaatttgctagctagtaaaaacctcaaaaatgctgaaagcaaatttatgctctcagctttgtattaaattcattactgtaaaaccttatggcttaaggttcagaatctcgccatacaaactctttgcctggcactcatgccagacctataattttcttgttataattttttgttttatagtttatgaagtatccattacatgagttggtcgtgattataagaatgttttttataaaattcagtagtgcacataatttttagaagtaattccataattaatgtattttatttagaacattccat

SEQ ID NO: 248691 - DNA, 577 bp, Homo sapiens
acagtaaacacagcagggagaaaaggggagaaagtgactctctatcagggaagaagacctctccctgaagcctcagcatctttcctctgtgactcatcatgcccaacccatatggatcactggaaaagaagaaggggatgtcatgactgacttaggtctatcaagaatcatgccataggatacattgctacaacaaaagctgggttttaataacaaaagagaaaggaagaatggctgttgggtaggcaactaacatttgctataattcttaaatgtgtttcctgaagattattaatgaaaaaaagtatcagcccctttatctaccattttacactgattctttcaactagtatttataacatctactatatgttgggtactgtgatagaagcaggagcctcaaagatcatcaagacatagttcctgtcctcaaggtcaaattaaatgagagaacaattcgtcaataattcagaacagtatagcaaatgctgttaggtagcatatgcatggtatagtggggcaacagaatagtctgcagcatcttgaaaagcaatccttgaattgagttttagaggag

SEQ ID NO: 248692 - DNA, 523 bp, Homo sapiens
gatccagagagctcaaaaagcagagaagcatctttcctcataggcatctctgtgggaaaccagggacacagaaaaccaaggggttttggaaattagctacttaacttgctaggtgttctacccttgctgccacttcattcttcatgtccaaggtgcaggacgacaagcagagccttgcaacctcatctgcgaactaaactcccctagatagagctgtggtgaacctttgtaagtctgaaatctgtgcatggaatagcaggtacattatagcaagacatcagagtttacgattaagcctccaagtctcccaggggtcaggaaaccctgcaggtagaagagacggtttaattggatgctcaatgctgattccagagaaatcatcagaaaacctggaggactactctaaatgggtcagattaagaaaatgcaatttggaacaaagagggtaacatctaacccagtatcaagcatgcagtaggtaatgagtaaacatttgtcaagtgaataaatgaatgaatagcta
